United States Patent Application Publication US 2007/0031850 A1 - sequence listing, part 5

SEQ ID NO: 101441 - DNA, 25 bp, Probe sequence
atactaagttatgagcattacgctc

SEQ ID NO: 101442 - DNA, 25 bp, Probe sequence
agcattacgctcatagctttcttag

SEQ ID NO: 101443 - DNA, 25 bp, Probe sequence
acgctcatagctttcttagaaagta

SEQ ID NO: 101444 - DNA, 25 bp, Probe sequence
cattacgctcatagctttcttagaa

SEQ ID NO: 101445 - DNA, 25 bp, Probe sequence
ctatactaagttatgagcattacgc

SEQ ID NO: 101446 - DNA, 25 bp, Probe sequence
cgctcatagctttcttagaaagtag

SEQ ID NO: 101447 - DNA, 25 bp, Probe sequence
gctcatagctttcttagaaagtagg

SEQ ID NO: 101448 - DNA, 25 bp, Probe sequence
gctttcttagaaagtaggtgtagtt

SEQ ID NO: 101449 - DNA, 25 bp, Probe sequence
gcattacgctcatagctttcttaga

SEQ ID NO: 101450 - DNA, 25 bp, Probe sequence
gagcattacgctcatagctttctta

SEQ ID NO: 101451 - DNA, 25 bp, Probe sequence
tactaagttatgagcattacgctca

SEQ ID NO: 101452 - DNA, 25 bp, Probe sequence
tacgctcatagctttcttagaaagt

SEQ ID NO: 101453 - DNA, 25 bp, Probe sequence
tatactaagttatgagcattacgct

SEQ ID NO: 101454 - DNA, 25 bp, Probe sequence
ttacgctcatagctttcttagaaag

SEQ ID NO: 101455 - DNA, 25 bp, Probe sequence
caaaaccggcttcatcggaaactgc

SEQ ID NO: 101456 - DNA, 25 bp, Probe sequence
agagccatctaatcaaagtaagtta

SEQ ID NO: 101457 - DNA, 25 bp, Probe sequence
accggcttcatcggaaactgcggta

SEQ ID NO: 101458 - DNA, 25 bp, Probe sequence
acacttaaagttggcgacacatacg

SEQ ID NO: 101459 - DNA, 25 bp, Probe sequence
aaagttggcgacacatacgatttaa

SEQ ID NO: 101460 - DNA, 25 bp, Probe sequence
aaaccggcttcatcggaaactgcgg

SEQ ID NO: 101461 - DNA, 25 bp, Probe sequence
catcggaaactgcggtaaagtcggt

SEQ ID NO: 101462 - DNA, 25 bp, Probe sequence
gcttcatcggaaactgcggtaaagt

SEQ ID NO: 101463 - DNA, 25 bp, Probe sequence
cggcttcatcggaaactgcggtaaa

SEQ ID NO: 101464 - DNA, 25 bp, Probe sequence
gcggtaaagtcggttaatataccag

SEQ ID NO: 101465 - DNA, 25 bp, Probe sequence
gttgtagtagagccatctaatcaaa

SEQ ID NO: 101466 - DNA, 25 bp, Probe sequence
gttggcgacacatacgatttaaatg

SEQ ID NO: 101467 - DNA, 25 bp, Probe sequence
ggcgacacatacgatttaaatgttg

SEQ ID NO: 101468 - DNA, 25 bp, Probe sequence
taatataccagatagcattaaaaca

SEQ ID NO: 101469 - DNA, 25 bp, Probe sequence
taaatgttgtagtagagccatctaa

SEQ ID NO: 101470 - DNA, 25 bp, Probe sequence
acttttaccctatgtaagtccgcat

SEQ ID NO: 101471 - DNA, 25 bp, Probe sequence
acacatcaagtatagatgcgtcttg

SEQ ID NO: 101472 - DNA, 25 bp, Probe sequence
aaatgctaatacgacgcatgaacaa

SEQ ID NO: 101473 - DNA, 25 bp, Probe sequence
cagtttattatgttagtatcagatt

SEQ ID NO: 101474 - DNA, 25 bp, Probe sequence
ctatgtgatgtgtctttttatttat

SEQ ID NO: 101475 - DNA, 25 bp, Probe sequence
gaacatgttcaaactaattgtaaat

SEQ ID NO: 101476 - DNA, 25 bp, Probe sequence
gacgcatgaacaagaggcgcattac

SEQ ID NO: 101477 - DNA, 25 bp, Probe sequence
gaggcgcattactatgtgatgtgtc

SEQ ID NO: 101478 - DNA, 25 bp, Probe sequence
gatgcgtcttgatactacttaagtt

SEQ ID NO: 101479 - DNA, 25 bp, Probe sequence
gtaaatacattactacacatcaagt

SEQ ID NO: 101480 - DNA, 25 bp, Probe sequence
gtaagtccgcattaaaacagtttat

SEQ ID NO: 101481 - DNA, 25 bp, Probe sequence
gtgtctttttatttatgaggtatga

SEQ ID NO: 101482 - DNA, 25 bp, Probe sequence
ggcgcattactatgtgatgtgtctt

SEQ ID NO: 101483 - DNA, 25 bp, Probe sequence
tatagatgcgtcttgatactactta

SEQ ID NO: 101484 - DNA, 25 bp, Probe sequence
ttaccctatgtaagtccgcattaaa

SEQ ID NO: 101485 - DNA, 25 bp, Probe sequence
atagcaactggttcaagtggtaact

SEQ ID NO: 101486 - DNA, 25 bp, Probe sequence
aacaatagcaactggttcaagtggt

SEQ ID NO: 101487 - DNA, 25 bp, Probe sequence
aactgctacgtcttaaatgatggac

SEQ ID NO: 101488 - DNA, 25 bp, Probe sequence
aactggttcaagtggtaactgctac

SEQ ID NO: 101489 - DNA, 25 bp, Probe sequence
aagtggtaactgctacgtcttaaat

SEQ ID NO: 101490 - DNA, 25 bp, Probe sequence
ctggttcaagtggtaactgctacgt

SEQ ID NO: 101491 - DNA, 25 bp, Probe sequence
gcaactggttcaagtggtaactgct

SEQ ID NO: 101492 - DNA, 25 bp, Probe sequence
gaaacaatagcaactggttcaagtg

SEQ ID NO: 101493 - DNA, 25 bp, Probe sequence
gttcaagtggtaactgctacgtctt

SEQ ID NO: 101494 - DNA, 25 bp, Probe sequence
gtaactgctacgtcttaaatgatgg

SEQ ID NO: 101495 - DNA, 25 bp, Probe sequence
gtggtaactgctacgtcttaaatga

SEQ ID NO: 101496 - DNA, 25 bp, Probe sequence
ggtaactgctacgtcttaaatgatg

SEQ ID NO: 101497 - DNA, 25 bp, Probe sequence
ggttcaagtggtaactgctacgtct

SEQ ID NO: 101498 - DNA, 25 bp, Probe sequence
tcttaaatgatggacgtactacgtt

SEQ ID NO: 101499 - DNA, 25 bp, Probe sequence
tcaagtggtaactgctacgtcttaa

SEQ ID NO: 101500 - DNA, 25 bp, Probe sequence
atcactaccttaggttgataacaac

SEQ ID NO: 101501 - DNA, 25 bp, Probe sequence
accttaggttgataacaacattata

SEQ ID NO: 101502 - DNA, 25 bp, Probe sequence
actaccttaggttgataacaacatt

SEQ ID NO: 101503 - DNA, 25 bp, Probe sequence
acttatcactaccttaggttgataa

SEQ ID NO: 101504 - DNA, 25 bp, Probe sequence
cactaccttaggttgataacaacat

SEQ ID NO: 101505 - DNA, 25 bp, Probe sequence
cttatcactaccttaggttgataac

SEQ ID NO: 101506 - DNA, 25 bp, Probe sequence
ctaccttaggttgataacaacatta

SEQ ID NO: 101507 - DNA, 25 bp, Probe sequence
gttgataacaacattatacacgaaa

SEQ ID NO: 101508 - DNA, 25 bp, Probe sequence
ggttgataacaacattatacacgaa

SEQ ID NO: 101509 - DNA, 25 bp, Probe sequence
tgataacaacattatacacgaaagg

SEQ ID NO: 101510 - DNA, 25 bp, Probe sequence
tcactaccttaggttgataacaaca

SEQ ID NO: 101511 - DNA, 25 bp, Probe sequence
taccttaggttgataacaacattat

SEQ ID NO: 101512 - DNA, 25 bp, Probe sequence
tatcactaccttaggttgataacaa

SEQ ID NO: 101513 - DNA, 25 bp, Probe sequence
ttatcactaccttaggttgataaca

SEQ ID NO: 101514 - DNA, 25 bp, Probe sequence
ttgataacaacattatacacgaaag

SEQ ID NO: 101515 - DNA, 25 bp, Probe sequence
attcacctccttaataggagtatag

SEQ ID NO: 101516 - DNA, 25 bp, Probe sequence
aggagtatagcagaaaggagcacaa

SEQ ID NO: 101517 - DNA, 25 bp, Probe sequence
agtcattcacctccttaataggagt

SEQ ID NO: 101518 - DNA, 25 bp, Probe sequence
agtatagcagaaaggagcacaaaca

SEQ ID NO: 101519 - DNA, 25 bp, Probe sequence
aagtcattcacctccttaataggag

SEQ ID NO: 101520 - DNA, 25 bp, Probe sequence
cacctccttaataggagtatagcag

SEQ ID NO: 101521 - DNA, 25 bp, Probe sequence
cattcacctccttaataggagtata

SEQ ID NO: 101522 - DNA, 25 bp, Probe sequence
gagtatagcagaaaggagcacaaac

SEQ ID NO: 101523 - DNA, 25 bp, Probe sequence
gtatagcagaaaggagcacaaacaa

SEQ ID NO: 101524 - DNA, 25 bp, Probe sequence
gtcattcacctccttaataggagta

SEQ ID NO: 101525 - DNA, 25 bp, Probe sequence
ggagtatagcagaaaggagcacaaa

SEQ ID NO: 101526 - DNA, 25 bp, Probe sequence
tcattcacctccttaataggagtat

SEQ ID NO: 101527 - DNA, 25 bp, Probe sequence
tcacctccttaataggagtatagca

SEQ ID NO: 101528 - DNA, 25 bp, Probe sequence
tatagcagaaaggagcacaaacaat

SEQ ID NO: 101529 - DNA, 25 bp, Probe sequence
ttcacctccttaataggagtatagc

SEQ ID NO: 101530 - DNA, 25 bp, Probe sequence
attgcttttttcatgtttcataatt

SEQ ID NO: 101531 - DNA, 25 bp, Probe sequence
atacttcaattctttaatccacata

SEQ ID NO: 101532 - DNA, 25 bp, Probe sequence
agattgcttttttcatgtttcataa

SEQ ID NO: 101533 - DNA, 25 bp, Probe sequence
agcatgattaatacttcaattcttt

SEQ ID NO: 101534 - DNA, 25 bp, Probe sequence
acttcaattctttaatccacatata

SEQ ID NO: 101535 - DNA, 25 bp, Probe sequence
aagttaagattgcttttttcatgtt

SEQ ID NO: 101536 - DNA, 25 bp, Probe sequence
aagtgaggtagtaggtaataaatat

SEQ ID NO: 101537 - DNA, 25 bp, Probe sequence
caattctttaatccacatatattta

SEQ ID NO: 101538 - DNA, 25 bp, Probe sequence
catgtttcataattaaaacctctgt

SEQ ID NO: 101539 - DNA, 25 bp, Probe sequence
gcttttttcatgtttcataattaaa

SEQ ID NO: 101540 - DNA, 25 bp, Probe sequence
gattgcttttttcatgtttcataat

SEQ ID NO: 101541 - DNA, 25 bp, Probe sequence
taatacttcaattctttaatccaca

SEQ ID NO: 101542 - DNA, 25 bp, Probe sequence
taagattgcttttttcatgtttcat

SEQ ID NO: 101543 - DNA, 25 bp, Probe sequence
tttcataattaaaacctctgtaaat

SEQ ID NO: 101544 - DNA, 25 bp, Probe sequence
ttcaattctttaatccacatatatt

SEQ ID NO: 101545 - DNA, 25 bp, Probe sequence
atttctcctttgcttactttatata

SEQ ID NO: 101546 - DNA, 25 bp, Probe sequence
atcaatacgttttcacactagtagg

SEQ ID NO: 101547 - DNA, 25 bp, Probe sequence
caatacgttttcacactagtaggcg

SEQ ID NO: 101548 - DNA, 25 bp, Probe sequence
cataggcgctattaatcaatacgtt

SEQ ID NO: 101549 - DNA, 25 bp, Probe sequence
cgccacataggcgctattaatcaat

SEQ ID NO: 101550 - DNA, 25 bp, Probe sequence
ggcgctattaatcaatacgttttca

SEQ ID NO: 101551 - DNA, 25 bp, Probe sequence
tcctttgcttactttatatattaaa

SEQ ID NO: 101552 - DNA, 25 bp, Probe sequence
tctcctttgcttactttatatatta

SEQ ID NO: 101553 - DNA, 25 bp, Probe sequence
tcacactagtaggcgtttttttgtt

SEQ ID NO: 101554 - DNA, 25 bp, Probe sequence
tacgttttcacactagtaggcgttt

SEQ ID NO: 101555 - DNA, 25 bp, Probe sequence
tattaatcaatacgttttcacacta

SEQ ID NO: 101556 - DNA, 25 bp, Probe sequence
tttctcctttgcttactttatatat

SEQ ID NO: 101557 - DNA, 25 bp, Probe sequence
tttcacactagtaggcgtttttttg

SEQ ID NO: 101558 - DNA, 25 bp, Probe sequence
ttatatattaaagcgccacataggc

SEQ ID NO: 101559 - DNA, 25 bp, Probe sequence
ttaatcaatacgttttcacactagt

SEQ ID NO: 101560 - DNA, 25 bp, Probe sequence
atgtgcagtgtatgaatcttgtttg

SEQ ID NO: 101561 - DNA, 25 bp, Probe sequence
acaatataactcgcttcgtcctttt

SEQ ID NO: 101562 - DNA, 25 bp, Probe sequence
aaagttgcctgctacatagaatgta

SEQ ID NO: 101563 - DNA, 25 bp, Probe sequence
ctcgcttcgtccttttagaacgaag

SEQ ID NO: 101564 - DNA, 25 bp, Probe sequence
cgaagcgagttattagttagttgag

SEQ ID NO: 101565 - DNA, 25 bp, Probe sequence
gcagtgtatgaatcttgtttgagtg

SEQ ID NO: 101566 - DNA, 25 bp, Probe sequence
gagtgtagagtaaagacttgtatta

SEQ ID NO: 101567 - DNA, 25 bp, Probe sequence
gatagatttattatgatgtgcagtg

SEQ ID NO: 101568 - DNA, 25 bp, Probe sequence
gtatgaatcttgtttgagtgtagag

SEQ ID NO: 101569 - DNA, 25 bp, Probe sequence
gtaataaaagttgcctgctacatag

SEQ ID NO: 101570 - DNA, 25 bp, Probe sequence
gtaagtcaattcaaattttaacaat

SEQ ID NO: 101571 - DNA, 25 bp, Probe sequence
gtccttttagaacgaagcgagttat

SEQ ID NO: 101572 - DNA, 25 bp, Probe sequence
taactcgcttcgtccttttagaacg

SEQ ID NO: 101573 - DNA, 25 bp, Probe sequence
taggtaacttttatttatatttgag

SEQ ID NO: 101574 - DNA, 25 bp, Probe sequence
ttaacaatataactcgcttcgtcct

SEQ ID NO: 101575 - DNA, 25 bp, Probe sequence
atcgggtatgcttaattttatagta

SEQ ID NO: 101576 - DNA, 25 bp, Probe sequence
atgactttgtacacacattattttt

SEQ ID NO: 101577 - DNA, 25 bp, Probe sequence
aaaatgcagaaagtagcgtgttatt

SEQ ID NO: 101578 - DNA, 25 bp, Probe sequence
aacactgatatcgggtatgcttaat

SEQ ID NO: 101579 - DNA, 25 bp, Probe sequence
aagatgcaggatattatttagctaa

SEQ ID NO: 101580 - DNA, 25 bp, Probe sequence
aatcgatggttattaactactaaat

SEQ ID NO: 101581 - DNA, 25 bp, Probe sequence
aatttcaaatcgatggttattaact

SEQ ID NO: 101582 - DNA, 25 bp, Probe sequence
gcgtgttatttgatttcgttctatg

SEQ ID NO: 101583 - DNA, 25 bp, Probe sequence
gctaaattaatgactttgtacacac

SEQ ID NO: 101584 - DNA, 25 bp, Probe sequence
gatcttattaacactgatatcgggt

SEQ ID NO: 101585 - DNA, 25 bp, Probe sequence
gtatcaacgatcttattaacactga

SEQ ID NO: 101586 - DNA, 25 bp, Probe sequence
gtagcgtgttatttgatttcgttct

SEQ ID NO: 101587 - DNA, 25 bp, Probe sequence
gtacacacattatttttaaagagga

SEQ ID NO: 101588 - DNA, 25 bp, Probe sequence
taactgtctagtatcaacgatctta

SEQ ID NO: 101589 - DNA, 25 bp, Probe sequence
ttcgttctatgaaattaactgtcta

SEQ ID NO: 101590 - DNA, 25 bp, Probe sequence
attcgcaataaaaaactgccagcac

SEQ ID NO: 101591 - DNA, 25 bp, Probe sequence
ataaaaaactgccagcacgcgaata

SEQ ID NO: 101592 - DNA, 25 bp, Probe sequence
acgcgaatagggcagctgacagcat

SEQ ID NO: 101593 - DNA, 25 bp, Probe sequence
aaactgccagcacgcgaatagggca

SEQ ID NO: 101594 - DNA, 25 bp, Probe sequence
aaaaaactgccagcacgcgaatagg

SEQ ID NO: 101595 - DNA, 25 bp, Probe sequence
aaaactgccagcacgcgaatagggc

SEQ ID NO: 101596 - DNA, 25 bp, Probe sequence
aatagggcagctgacagcatcgttc

SEQ ID NO: 101597 - DNA, 25 bp, Probe sequence
gaatagggcagctgacagcatcgtt

SEQ ID NO: 101598 - DNA, 25 bp, Probe sequence
cacgcgaatagggcagctgacagca

SEQ ID NO: 101599 - DNA, 25 bp, Probe sequence
cgcgaatagggcagctgacagcatc

SEQ ID NO: 101600 - DNA, 25 bp, Probe sequence
gccagcacgcgaatagggcagctga

SEQ ID NO: 101601 - DNA, 25 bp, Probe sequence
gcgaatagggcagctgacagcatcg

SEQ ID NO: 101602 - DNA, 25 bp, Probe sequence
gcacgcgaatagggcagctgacagc

SEQ ID NO: 101603 - DNA, 25 bp, Probe sequence
gcaataaaaaactgccagcacgcga

SEQ ID NO: 101604 - DNA, 25 bp, Probe sequence
tgccagcacgcgaatagggcagctg

SEQ ID NO: 101605 - DNA, 25 bp, Probe sequence
attgcatactcctttatattataaa

SEQ ID NO: 101606 - DNA, 25 bp, Probe sequence
atagaaatgttactgatgtgtatta

SEQ ID NO: 101607 - DNA, 25 bp, Probe sequence
aaatagaaatgttactgatgtgtat

SEQ ID NO: 101608 - DNA, 25 bp, Probe sequence
aaaatagaaatgttactgatgtgta

SEQ ID NO: 101609 - DNA, 25 bp, Probe sequence
aatagaaatgttactgatgtgtatt

SEQ ID NO: 101610 - DNA, 25 bp, Probe sequence
aattgcatactcctttatattataa

SEQ ID NO: 101611 - DNA, 25 bp, Probe sequence
catactcctttatattataaattaa

SEQ ID NO: 101612 - DNA, 25 bp, Probe sequence
gcatactcctttatattataaatta

SEQ ID NO: 101613 - DNA, 25 bp, Probe sequence
gaaaatagaaatgttactgatgtgt

SEQ ID NO: 101614 - DNA, 25 bp, Probe sequence
tgcatactcctttatattataaatt

SEQ ID NO: 101615 - DNA, 25 bp, Probe sequence
taattgcatactcctttatattata

SEQ ID NO: 101616 - DNA, 25 bp, Probe sequence
tagaaatgttactgatgtgtattac

SEQ ID NO: 101617 - DNA, 25 bp, Probe sequence
tttaattgcatactcctttatatta

SEQ ID NO: 101618 - DNA, 25 bp, Probe sequence
ttaattgcatactcctttatattat

SEQ ID NO: 101619 - DNA, 25 bp, Probe sequence
ttgcatactcctttatattataaat

SEQ ID NO: 101620 - DNA, 25 bp, Probe sequence
atcacaagcggttaactaggtatag

SEQ ID NO: 101621 - DNA, 25 bp, Probe sequence
agtaatgcatattgcgagtgcagga

SEQ ID NO: 101622 - DNA, 25 bp, Probe sequence
acactagttcatttcttgttaaaga

SEQ ID NO: 101623 - DNA, 25 bp, Probe sequence
aaaggtgtacttgtgcattttactt

SEQ ID NO: 101624 - DNA, 25 bp, Probe sequence
gccataatatgagagtgcatccact

SEQ ID NO: 101625 - DNA, 25 bp, Probe sequence
gaatgagtgcttgattaaaatcctt

SEQ ID NO: 101626 - DNA, 25 bp, Probe sequence
gagataagacatttaatgggcctaa

SEQ ID NO: 101627 - DNA, 25 bp, Probe sequence
gagtgcatccacttctataagtaat

SEQ ID NO: 101628 - DNA, 25 bp, Probe sequence
gattaaaacactagttcatttcttg

SEQ ID NO: 101629 - DNA, 25 bp, Probe sequence
gtacttgtgcattttacttaattaa

SEQ ID NO: 101630 - DNA, 25 bp, Probe sequence
ggtgcgggagttatggtattgccat

SEQ ID NO: 101631 - DNA, 25 bp, Probe sequence
ggtatttaaatcattatggtgcggg

SEQ ID NO: 101632 - DNA, 25 bp, Probe sequence
taaaatttcttaatcacaagcggtt

SEQ ID NO: 101633 - DNA, 25 bp, Probe sequence
taaaatccttatgggtggttgacat

SEQ ID NO: 101634 - DNA, 25 bp, Probe sequence
ttgcgagtgcaggaatgaatgagtg

SEQ ID NO: 101635 - DNA, 25 bp, Probe sequence
aggcacttccttttcattatattta

SEQ ID NO: 101636 - DNA, 25 bp, Probe sequence
agacgagtatgattcgttccaaata

SEQ ID NO: 101637 - DNA, 25 bp, Probe sequence
aaaatcatcatatcgatcattgcaa

SEQ ID NO: 101638 - DNA, 25 bp, Probe sequence
aagaatacacgatactgatttaata

SEQ ID NO: 101639 - DNA, 25 bp, Probe sequence
aatatgtatcattccacacgttgca

SEQ ID NO: 101640 - DNA, 25 bp, Probe sequence
ttcataccgcccttaatgccgggaa

SEQ ID NO: 101641 - DNA, 25 bp, Probe sequence
gcccttaatgccgggaatgatgtaa

SEQ ID NO: 101642 - DNA, 25 bp, Probe sequence
gaacattccatgatagacgagtatg

SEQ ID NO: 101643 - DNA, 25 bp, Probe sequence
gatgctgagagaatcattatattgc

SEQ ID NO: 101644 - DNA, 25 bp, Probe sequence
gttgcaggcagtgaatacgtatttg

SEQ ID NO: 101645 - DNA, 25 bp, Probe sequence
gttttgactaactagaacattccat

SEQ ID NO: 101646 - DNA, 25 bp, Probe sequence
ggtgatgttgggtgcacaaatttat

SEQ ID NO: 101647 - DNA, 25 bp, Probe sequence
tatcattccacacgttgcaggcagt

SEQ ID NO: 101648 - DNA, 25 bp, Probe sequence
ttatatctatttcataccgccctta

SEQ ID NO: 101649 - DNA, 25 bp, Probe sequence
ttggtggtcataaattggtcataat

SEQ ID NO: 101650 - DNA, 25 bp, Probe sequence
atatatagattaaaccgcacttcta

SEQ ID NO: 101651 - DNA, 25 bp, Probe sequence
agattaaaccgcacttctatattaa

SEQ ID NO: 101652 - DNA, 25 bp, Probe sequence
acttcggtgcttgcctttttaggat

SEQ ID NO: 101653 - DNA, 25 bp, Probe sequence
aaggtaagtacttcggtgcttgcct

SEQ ID NO: 101654 - DNA, 25 bp, Probe sequence
gcctttttaggatgcatatatatat

SEQ ID NO: 101655 - DNA, 25 bp, Probe sequence
gcttgcctttttaggatgcatatat

SEQ ID NO: 101656 - DNA, 25 bp, Probe sequence
gaaaggtaagtacttcggtgcttgc

SEQ ID NO: 101657 - DNA, 25 bp, Probe sequence
gaaagtgcggttatttatacagtga

SEQ ID NO: 101658 - DNA, 25 bp, Probe sequence
gtgcggttatttatacagtgaatct

SEQ ID NO: 101659 - DNA, 25 bp, Probe sequence
gtgaatctaaactataataattgga

SEQ ID NO: 101660 - DNA, 25 bp, Probe sequence
ggtgcttgcctttttaggatgcata

SEQ ID NO: 101661 - DNA, 25 bp, Probe sequence
tgttaatccgattttgatataaaaa

SEQ ID NO: 101662 - DNA, 25 bp, Probe sequence
taaaccgcacttctatattaataga

SEQ ID NO: 101663 - DNA, 25 bp, Probe sequence
tacttcggtgcttgcctttttagga

SEQ ID NO: 101664 - DNA, 25 bp, Probe sequence
ttcggtgcttgcctttttaggatgc

SEQ ID NO: 101665 - DNA, 25 bp, Probe sequence
aggcaattaacgcatatggcattta

SEQ ID NO: 101666 - DNA, 25 bp, Probe sequence
aaagcataacttaattcctataaat

SEQ ID NO: 101667 - DNA, 25 bp, Probe sequence
aagatgcttagaaatcctctgtttt

SEQ ID NO: 101668 - DNA, 25 bp, Probe sequence
ctattcgtaagttagccttcgggct

SEQ ID NO: 101669 - DNA, 25 bp, Probe sequence
gaagtattcgtcatttatgctataa

SEQ ID NO: 101670 - DNA, 25 bp, Probe sequence
gaaatcctctgtttttcttagagaa

SEQ ID NO: 101671 - DNA, 25 bp, Probe sequence
gtatctagatactttttgggaatgt

SEQ ID NO: 101672 - DNA, 25 bp, Probe sequence
ggtacttgcctattattatatctct

SEQ ID NO: 101673 - DNA, 25 bp, Probe sequence
ggaatcgactatatgacttactaag

SEQ ID NO: 101674 - DNA, 25 bp, Probe sequence
tgatatttaggcaagtacttcggta

SEQ ID NO: 101675 - DNA, 25 bp, Probe sequence
tatagctagttccttataacagcaa

SEQ ID NO: 101676 - DNA, 25 bp, Probe sequence
tattttctcctataacttatttgca

SEQ ID NO: 101677 - DNA, 25 bp, Probe sequence
tattcacatgttaatcttgttgata

SEQ ID NO: 101678 - DNA, 25 bp, Probe sequence
tttttatttccattattattcacat

SEQ ID NO: 101679 - DNA, 25 bp, Probe sequence
ttcgggctgactttttatttccatt

SEQ ID NO: 101680 - DNA, 25 bp, Probe sequence
aggagtaatctgcctctcgaaaaaa

SEQ ID NO: 101681 - DNA, 25 bp, Probe sequence
agcacaactttttgaggagatagag

SEQ ID NO: 101682 - DNA, 25 bp, Probe sequence
aaagcacaactttttgaggagatag

SEQ ID NO: 101683 - DNA, 25 bp, Probe sequence
aagaatctgaagtaattgagtgtta

SEQ ID NO: 101684 - DNA, 25 bp, Probe sequence
aagattatcactgttcaaaagaaaa

SEQ ID NO: 101685 - DNA, 25 bp, Probe sequence
caactttttgaggagatagagagaa

SEQ ID NO: 101686 - DNA, 25 bp, Probe sequence
caggagtaatctgcctctcgaaaaa

SEQ ID NO: 101687 - DNA, 25 bp, Probe sequence
gcaggagtaatctgcctctcgaaaa

SEQ ID NO: 101688 - DNA, 25 bp, Probe sequence
gaggcaggagtaatctgcctctcga

SEQ ID NO: 101689 - DNA, 25 bp, Probe sequence
gagtgttacatagatccagaagatt

SEQ ID NO: 101690 - DNA, 25 bp, Probe sequence
gatccagaagattatcactgttcaa

SEQ ID NO: 101691 - DNA, 25 bp, Probe sequence
ggagtaatctgcctctcgaaaaaag

SEQ ID NO: 101692 - DNA, 25 bp, Probe sequence
ggcaggagtaatctgcctctcgaaa

SEQ ID NO: 101693 - DNA, 25 bp, Probe sequence
tccagaagattatcactgttcaaaa

SEQ ID NO: 101694 - DNA, 25 bp, Probe sequence
ttgagtgttacatagatccagaaga

SEQ ID NO: 101695 - DNA, 25 bp, Probe sequence
attagcaacattaacgcaagaagag

SEQ ID NO: 101696 - DNA, 25 bp, Probe sequence
agtatttcactaaaggtgagaagta

SEQ ID NO: 101697 - DNA, 25 bp, Probe sequence
agagtatttcactaaaggtgagaag

SEQ ID NO: 101698 - DNA, 25 bp, Probe sequence
agcaacattaacgcaagaagagaaa

SEQ ID NO: 101699 - DNA, 25 bp, Probe sequence
acattaacgcaagaagagaaaggat

SEQ ID NO: 101700 - DNA, 25 bp, Probe sequence
aacgcaagaagagaaaggataagag

SEQ ID NO: 101701 - DNA, 25 bp, Probe sequence
aattagcaacattaacgcaagaaga

SEQ ID NO: 101702 - DNA, 25 bp, Probe sequence
caacattaacgcaagaagagaaagg

SEQ ID NO: 101703 - DNA, 25 bp, Probe sequence
ctaattagcaacattaacgcaagaa

SEQ ID NO: 101704 - DNA, 25 bp, Probe sequence
gcaacattaacgcaagaagagaaag

SEQ ID NO: 101705 - DNA, 25 bp, Probe sequence
gagaaaggataagagtatttcacta

SEQ ID NO: 101706 - DNA, 25 bp, Probe sequence
gagtatttcactaaaggtgagaagt

SEQ ID NO: 101707 - DNA, 25 bp, Probe sequence
taattagcaacattaacgcaagaag

SEQ ID NO: 101708 - DNA, 25 bp, Probe sequence
tagcaacattaacgcaagaagagaa

SEQ ID NO: 101709 - DNA, 25 bp, Probe sequence
ttagcaacattaacgcaagaagaga

SEQ ID NO: 101710 - DNA, 25 bp, Probe sequence
attaaccatctctaaattattgttt

SEQ ID NO: 101711 - DNA, 25 bp, Probe sequence
atctatctttgagattggccgtaga

SEQ ID NO: 101712 - DNA, 25 bp, Probe sequence
aaatgaatcaattaaccatctctaa

SEQ ID NO: 101713 - DNA, 25 bp, Probe sequence
aaacatcgctggtcaatctatcttt

SEQ ID NO: 101714 - DNA, 25 bp, Probe sequence
aacgtcctgtgttgcagtaagggat

SEQ ID NO: 101715 - DNA, 25 bp, Probe sequence
aagtgtttgttacatagggagctat

SEQ ID NO: 101716 - DNA, 25 bp, Probe sequence
aatatgactttaaacatcgctggtc

SEQ ID NO: 101717 - DNA, 25 bp, Probe sequence
ctagtggtgttttttacgctgagaa

SEQ ID NO: 101718 - DNA, 25 bp, Probe sequence
gttatattctttaaagtcactttct

SEQ ID NO: 101719 - DNA, 25 bp, Probe sequence
gtttatcgtaaatgtggatccgtga

SEQ ID NO: 101720 - DNA, 25 bp, Probe sequence
gtggatccgtgaaatatgactttaa

SEQ ID NO: 101721 - DNA, 25 bp, Probe sequence
ggccgtagattaaaaccatatgaaa

SEQ ID NO: 101722 - DNA, 25 bp, Probe sequence
taaagtcactttctagtggtgtttt

SEQ ID NO: 101723 - DNA, 25 bp, Probe sequence
tacgctgagaaacgtcctgtgttgc

SEQ ID NO: 101724 - DNA, 25 bp, Probe sequence
tttaattctccttcattcaaatgtg

SEQ ID NO: 101725 - DNA, 25 bp, Probe sequence
attagtttactaattcaccctagct

SEQ ID NO: 101726 - DNA, 25 bp, Probe sequence
attgagttagtgaggattagtttac

SEQ ID NO: 101727 - DNA, 25 bp, Probe sequence
actaattcaccctagctttatatta

SEQ ID NO: 101728 - DNA, 25 bp, Probe sequence
aaacgattatcatattgagttagtg

SEQ ID NO: 101729 - DNA, 25 bp, Probe sequence
aattcaccctagctttatattaaag

SEQ ID NO: 101730 - DNA, 25 bp, Probe sequence
ctaattcaccctagctttatattaa

SEQ ID NO: 101731 - DNA, 25 bp, Probe sequence
gcttattataattaacggactccct

SEQ ID NO: 101732 - DNA, 25 bp, Probe sequence
gataaaagggagaacgcttattata

SEQ ID NO: 101733 - DNA, 25 bp, Probe sequence
gtttactaattcaccctagctttat

SEQ ID NO: 101734 - DNA, 25 bp, Probe sequence
tcaccctagctttatattaaagcgt

SEQ ID NO: 101735 - DNA, 25 bp, Probe sequence
tactaattcaccctagctttatatt

SEQ ID NO: 101736 - DNA, 25 bp, Probe sequence
tagtttactaattcaccctagcttt

SEQ ID NO: 101737 - DNA, 25 bp, Probe sequence
tttactaattcaccctagctttata

SEQ ID NO: 101738 - DNA, 25 bp, Probe sequence
ttagtttactaattcaccctagctt

SEQ ID NO: 101739 - DNA, 25 bp, Probe sequence
ttactaattcaccctagctttatat

SEQ ID NO: 101740 - DNA, 25 bp, Probe sequence
acgaggtatagcagtttaaaatggt

SEQ ID NO: 101741 - DNA, 25 bp, Probe sequence
acatgtagtgtgtggctcctaataa

SEQ ID NO: 101742 - DNA, 25 bp, Probe sequence
aaacgcgctataaagcgaacgtaag

SEQ ID NO: 101743 - DNA, 25 bp, Probe sequence
aagtttgtgtttttggcataggcct

SEQ ID NO: 101744 - DNA, 25 bp, Probe sequence
aatcggaaggtatacagtctttgag

SEQ ID NO: 101745 - DNA, 25 bp, Probe sequence
gctgtttgttcgtgttattttaccg

SEQ ID NO: 101746 - DNA, 25 bp, Probe sequence
gcaaggtgtgcgaactttgttaacg

SEQ ID NO: 101747 - DNA, 25 bp, Probe sequence
gttaagtttgttcgctgtttgttcg

SEQ ID NO: 101748 - DNA, 25 bp, Probe sequence
gtttgttcgctgtttgttcgtgtta

SEQ ID NO: 101749 - DNA, 25 bp, Probe sequence
gtgcgaactttgttaacgctaatac

SEQ ID NO: 101750 - DNA, 25 bp, Probe sequence
gtgtggctcctaataaaatactatg

SEQ ID NO: 101751 - DNA, 25 bp, Probe sequence
ggggtcacatgtagtgtgtggctcc

SEQ ID NO: 101752 - DNA, 25 bp, Probe sequence
ggcaagatttgtgcaaggtgtgcga

SEQ ID NO: 101753 - DNA, 25 bp, Probe sequence
ggcataggcctaaaagttaagtttg

SEQ ID NO: 101754 - DNA, 25 bp, Probe sequence
taatgtgaaaagcctaacgttaagt

SEQ ID NO: 101755 - DNA, 25 bp, Probe sequence
atatcaatgttttaaccagtacacg

SEQ ID NO: 101756 - DNA, 25 bp, Probe sequence
atatacaactatcactaaaatttct

SEQ ID NO: 101757 - DNA, 25 bp, Probe sequence
atatgtgtactcgataaattcaata

SEQ ID NO: 101758 - DNA, 25 bp, Probe sequence
ataatatcaacagttacatgcagat

SEQ ID NO: 101759 - DNA, 25 bp, Probe sequence
atcacgaggctatatatatcaatgt

SEQ ID NO: 101760 - DNA, 25 bp, Probe sequence
aggtgtgtatttaactgtgtatggt

SEQ ID NO: 101761 - DNA, 25 bp, Probe sequence
aagtacacactcaattttaaaatat

SEQ ID NO: 101762 - DNA, 25 bp, Probe sequence
aattaattatcgtagatttctaaat

SEQ ID NO: 101763 - DNA, 25 bp, Probe sequence
caatgttttaaccagtacacgaaag

SEQ ID NO: 101764 - DNA, 25 bp, Probe sequence
gttacatgcagatagtacacgaagt

SEQ ID NO: 101765 - DNA, 25 bp, Probe sequence
gtactttgtgtactaattatcacga

SEQ ID NO: 101766 - DNA, 25 bp, Probe sequence
gtactaattatcacgaggctatata

SEQ ID NO: 101767 - DNA, 25 bp, Probe sequence
gtacacgaagtacacaatgtacaca

SEQ ID NO: 101768 - DNA, 25 bp, Probe sequence
taaaatttctgtgtactttgtgtac

SEQ ID NO: 101769 - DNA, 25 bp, Probe sequence
tacacacaagtacacactcaatttt

SEQ ID NO: 101770 - DNA, 25 bp, Probe sequence
attataacatctttgctctgttgtt

SEQ ID NO: 101771 - DNA, 25 bp, Probe sequence
ataacatctttgctctgttgtttca

SEQ ID NO: 101772 - DNA, 25 bp, Probe sequence
atctttgctctgttgtttcattaag

SEQ ID NO: 101773 - DNA, 25 bp, Probe sequence
acatctttgctctgttgtttcatta

SEQ ID NO: 101774 - DNA, 25 bp, Probe sequence
aacatctttgctctgttgtttcatt

SEQ ID NO: 101775 - DNA, 25 bp, Probe sequence
catctttgctctgttgtttcattaa

SEQ ID NO: 101776 - DNA, 25 bp, Probe sequence
ctgttgtttcattaagaggtgcaaa

SEQ ID NO: 101777 - DNA, 25 bp, Probe sequence
gaaattacacattcttattataaca

SEQ ID NO: 101778 - DNA, 25 bp, Probe sequence
gttgtttcattaagaggtgcaaaaa

SEQ ID NO: 101779 - DNA, 25 bp, Probe sequence
tctttgctctgttgtttcattaaga

SEQ ID NO: 101780 - DNA, 25 bp, Probe sequence
taacatctttgctctgttgtttcat

SEQ ID NO: 101781 - DNA, 25 bp, Probe sequence
tacacattcttattataacatcttt

SEQ ID NO: 101782 - DNA, 25 bp, Probe sequence
tataacatctttgctctgttgtttc

SEQ ID NO: 101783 - DNA, 25 bp, Probe sequence
tttgctctgttgtttcattaagagg

SEQ ID NO: 101784 - DNA, 25 bp, Probe sequence
ttcttattataacatctttgctctg

SEQ ID NO: 101785 - DNA, 25 bp, Probe sequence
attgggtggtcgtaatttggtcata

SEQ ID NO: 101786 - DNA, 25 bp, Probe sequence
atattgggtggtcgtaatttggtca

SEQ ID NO: 101787 - DNA, 25 bp, Probe sequence
acgctgattttataaagtttgtaat

SEQ ID NO: 101788 - DNA, 25 bp, Probe sequence
acgactgttaaacgctgattttata

SEQ ID NO: 101789 - DNA, 25 bp, Probe sequence
aacgactgttaaacgctgattttat

SEQ ID NO: 101790 - DNA, 25 bp, Probe sequence
gactgttaaacgctgattttataaa

SEQ ID NO: 101791 - DNA, 25 bp, Probe sequence
gtttgtaatattgggtggtcgtaat

SEQ ID NO: 101792 - DNA, 25 bp, Probe sequence
gtaatattgggtggtcgtaatttgg

SEQ ID NO: 101793 - DNA, 25 bp, Probe sequence
gtggtcgtaatttggtcatagaaat

SEQ ID NO: 101794 - DNA, 25 bp, Probe sequence
gggtggtcgtaatttggtcatagaa

SEQ ID NO: 101795 - DNA, 25 bp, Probe sequence
ggtggtcgtaatttggtcatagaaa

SEQ ID NO: 101796 - DNA, 25 bp, Probe sequence
tgggtggtcgtaatttggtcataga

SEQ ID NO: 101797 - DNA, 25 bp, Probe sequence
taaagtttgtaatattgggtggtcg

SEQ ID NO: 101798 - DNA, 25 bp, Probe sequence
tattgggtggtcgtaatttggtcat

SEQ ID NO: 101799 - DNA, 25 bp, Probe sequence
ttgggtggtcgtaatttggtcatag

SEQ ID NO: 101800 - DNA, 25 bp, Probe sequence
attttgaccaaatttgattattata

SEQ ID NO: 101801 - DNA, 25 bp, Probe sequence
ataaatgtatgttagcactctttaa

SEQ ID NO: 101802 - DNA, 25 bp, Probe sequence
atgttagcactctttaatgttaagt

SEQ ID NO: 101803 - DNA, 25 bp, Probe sequence
atgtatgttagcactctttaatgtt

SEQ ID NO: 101804 - DNA, 25 bp, Probe sequence
aaatgtatgttagcactctttaatg

SEQ ID NO: 101805 - DNA, 25 bp, Probe sequence
aatgtatgttagcactctttaatgt

SEQ ID NO: 101806 - DNA, 25 bp, Probe sequence
cactctttaatgttaagtgctaaac

SEQ ID NO: 101807 - DNA, 25 bp, Probe sequence
ctccaaatatttgtttataatttat

SEQ ID NO: 101808 - DNA, 25 bp, Probe sequence
gttagcactctttaatgttaagtgc

SEQ ID NO: 101809 - DNA, 25 bp, Probe sequence
gtatgttagcactctttaatgttaa

SEQ ID NO: 101810 - DNA, 25 bp, Probe sequence
ggttatgacttgaaattttgaccaa

SEQ ID NO: 101811 - DNA, 25 bp, Probe sequence
tgtatgttagcactctttaatgtta

SEQ ID NO: 101812 - DNA, 25 bp, Probe sequence
taatgttaagtgctaaactttaggt

SEQ ID NO: 101813 - DNA, 25 bp, Probe sequence
ttataaatgtatgttagcactcttt

SEQ ID NO: 101814 - DNA, 25 bp, Probe sequence
ttatgacttgaaattttgaccaaat

SEQ ID NO: 101815 - DNA, 25 bp, Probe sequence
attattgctccttctttagtaaaga

SEQ ID NO: 101816 - DNA, 25 bp, Probe sequence
atacttagattaatacttacatgaa

SEQ ID NO: 101817 - DNA, 25 bp, Probe sequence
atgaaaaagggaggtgtctcgtgaa

SEQ ID NO: 101818 - DNA, 25 bp, Probe sequence
aacgcatatttattatacttagatt

SEQ ID NO: 101819 - DNA, 25 bp, Probe sequence
aattattgctccttctttagtaaag

SEQ ID NO: 101820 - DNA, 25 bp, Probe sequence
gcattttcaacgcatatttattata

SEQ ID NO: 101821 - DNA, 25 bp, Probe sequence
tcaacgcatatttattatacttaga

SEQ ID NO: 101822 - DNA, 25 bp, Probe sequence
taaatgcattttcaacgcatattta

SEQ ID NO: 101823 - DNA, 25 bp, Probe sequence
tactcggacttgtaaagtaatattt

SEQ ID NO: 101824 - DNA, 25 bp, Probe sequence
tataaaatttatactcggacttgta

SEQ ID NO: 101825 - DNA, 25 bp, Probe sequence
tattcattttcaaattccaaatata

SEQ ID NO: 101826 - DNA, 25 bp, Probe sequence
tattgctccttctttagtaaagaat

SEQ ID NO: 101827 - DNA, 25 bp, Probe sequence
tttatactcggacttgtaaagtaat

SEQ ID NO: 101828 - DNA, 25 bp, Probe sequence
ttttcaacgcatatttattatactt

SEQ ID NO: 101829 - DNA, 25 bp, Probe sequence
ttcaaattccaaatataaatgcatt

SEQ ID NO: 101830 - DNA, 25 bp, Probe sequence
atttctgtcccattcttaacaatat

SEQ ID NO: 101831 - DNA, 25 bp, Probe sequence
atcatttctgtcccattcttaacaa

SEQ ID NO: 101832 - DNA, 25 bp, Probe sequence
atgaataactaatgattctttatca

SEQ ID NO: 101833 - DNA, 25 bp, Probe sequence
aagaactactacataatgaataact

SEQ ID NO: 101834 - DNA, 25 bp, Probe sequence
catgtattcctattcttaagtgcac

SEQ ID NO: 101835 - DNA, 25 bp, Probe sequence
catttctgtcccattcttaacaata

SEQ ID NO: 101836 - DNA, 25 bp, Probe sequence
gtattcctattcttaagtgcacatt

SEQ ID NO: 101837 - DNA, 25 bp, Probe sequence
tgtcccattcttaacaatatattga

SEQ ID NO: 101838 - DNA, 25 bp, Probe sequence
tcctattcttaagtgcacattagca

SEQ ID NO: 101839 - DNA, 25 bp, Probe sequence
tcttaagtgcacattagcagcggct

SEQ ID NO: 101840 - DNA, 25 bp, Probe sequence
tcatgtattcctattcttaagtgca

SEQ ID NO: 101841 - DNA, 25 bp, Probe sequence
tcatttctgtcccattcttaacaat

SEQ ID NO: 101842 - DNA, 25 bp, Probe sequence
tattcctattcttaagtgcacatta

SEQ ID NO: 101843 - DNA, 25 bp, Probe sequence
ttaagtgcacattagcagcggctaa

SEQ ID NO: 101844 - DNA, 25 bp, Probe sequence
ttctgtcccattcttaacaatatat

SEQ ID NO: 101845 - DNA, 25 bp, Probe sequence
atcgcatccttgatagatcttatat

SEQ ID NO: 101846 - DNA, 25 bp, Probe sequence
atccttgatagatcttatatataac

SEQ ID NO: 101847 - DNA, 25 bp, Probe sequence
acatcgcatccttgatagatcttat

SEQ ID NO: 101848 - DNA, 25 bp, Probe sequence
aacatcgcatccttgatagatctta

SEQ ID NO: 101849 - DNA, 25 bp, Probe sequence
catcgcatccttgatagatcttata

SEQ ID NO: 101850 - DNA, 25 bp, Probe sequence
catccttgatagatcttatatataa

SEQ ID NO: 101851 - DNA, 25 bp, Probe sequence
cgcatccttgatagatcttatatat

SEQ ID NO: 101852 - DNA, 25 bp, Probe sequence
ccttgatagatcttatatataactt

SEQ ID NO: 101853 - DNA, 25 bp, Probe sequence
gcatccttgatagatcttatatata

SEQ ID NO: 101854 - DNA, 25 bp, Probe sequence
gatcttatatataacttactaaaag

SEQ ID NO: 101855 - DNA, 25 bp, Probe sequence
gatagatcttatatataacttacta

SEQ ID NO: 101856 - DNA, 25 bp, Probe sequence
gttatgttgaaacgcaaaaaacgag

SEQ ID NO: 101857 - DNA, 25 bp, Probe sequence
tcgcatccttgatagatcttatata

SEQ ID NO: 101858 - DNA, 25 bp, Probe sequence
tactaaaagttatgttgaaacgcaa

SEQ ID NO: 101859 - DNA, 25 bp, Probe sequence
tagatcttatatataacttactaaa

SEQ ID NO: 101860 - DNA, 25 bp, Probe sequence
atctctcataaatctatgtttagtc

SEQ ID NO: 101861 - DNA, 25 bp, Probe sequence
atgacatgtgttaaatattatttcg

SEQ ID NO: 101862 - DNA, 25 bp, Probe sequence
atgtttagtcatgacatgtgttaaa

SEQ ID NO: 101863 - DNA, 25 bp, Probe sequence
acatagacttatgaaaaatctctca

SEQ ID NO: 101864 - DNA, 25 bp, Probe sequence
aaatctctcataaatctatgtttag

SEQ ID NO: 101865 - DNA, 25 bp, Probe sequence
aaaatctctcataaatctatgttta

SEQ ID NO: 101866 - DNA, 25 bp, Probe sequence
aatctctcataaatctatgtttagt

SEQ ID NO: 101867 - DNA, 25 bp, Probe sequence
gaaaaatctctcataaatctatgtt

SEQ ID NO: 101868 - DNA, 25 bp, Probe sequence
gtgttaaatattatttcgggcgctt

SEQ ID NO: 101869 - DNA, 25 bp, Probe sequence
tgttaaatattatttcgggcgcttc

SEQ ID NO: 101870 - DNA, 25 bp, Probe sequence
tgaaaaatctctcataaatctatgt

SEQ ID NO: 101871 - DNA, 25 bp, Probe sequence
tctctcataaatctatgtttagtca

SEQ ID NO: 101872 - DNA, 25 bp, Probe sequence
tctcataaatctatgtttagtcatg

SEQ ID NO: 101873 - DNA, 25 bp, Probe sequence
tagtcatgacatgtgttaaatatta

SEQ ID NO: 101874 - DNA, 25 bp, Probe sequence
tatgtttagtcatgacatgtgttaa

SEQ ID NO: 101875 - DNA, 25 bp, Probe sequence
agccatcccaacttaataaccatgt

SEQ ID NO: 101876 - DNA, 25 bp, Probe sequence
acaacatcgatttatcattatttga

SEQ ID NO: 101877 - DNA, 25 bp, Probe sequence
aagtgagtaacatttgctagtagag

SEQ ID NO: 101878 - DNA, 25 bp, Probe sequence
aaggggagagttaatcctcattatg

SEQ ID NO: 101879 - DNA, 25 bp, Probe sequence
aatttgttatcttcgtatagtacta

SEQ ID NO: 101880 - DNA, 25 bp, Probe sequence
cctcattatgagacccaccgttaaa

SEQ ID NO: 101881 - DNA, 25 bp, Probe sequence
gctagtagagttagtttccttggac

SEQ ID NO: 101882 - DNA, 25 bp, Probe sequence
gactcagtgctatgtatttttctta

SEQ ID NO: 101883 - DNA, 25 bp, Probe sequence
gagacccaccgttaaaatatatgaa

SEQ ID NO: 101884 - DNA, 25 bp, Probe sequence
gataattatttctagcatgtaagct

SEQ ID NO: 101885 - DNA, 25 bp, Probe sequence
gtttccttggactcagtgctatgta

SEQ ID NO: 101886 - DNA, 25 bp, Probe sequence
gtatgagttattaagccatcccaac

SEQ ID NO: 101887 - DNA, 25 bp, Probe sequence
tgtaagctatcgtaaacaacatcga

SEQ ID NO: 101888 - DNA, 25 bp, Probe sequence
taataagtatggtcgtgagcccctc

SEQ ID NO: 101889 - DNA, 25 bp, Probe sequence
tttcataattaataacatccccaaa

SEQ ID NO: 101890 - DNA, 25 bp, Probe sequence
attggaaaataaatgcttttagcat

SEQ ID NO: 101891 - DNA, 25 bp, Probe sequence
atattgcctaactgtaggaaataaa

SEQ ID NO: 101892 - DNA, 25 bp, Probe sequence
atgcttttagcatgttttaatataa

SEQ ID NO: 101893 - DNA, 25 bp, Probe sequence
acagagatgtgatggaaaatagttg

SEQ ID NO: 101894 - DNA, 25 bp, Probe sequence
aatataactagatcacagagatgtg

SEQ ID NO: 101895 - DNA, 25 bp, Probe sequence
gcttttagcatgttttaatataact

SEQ ID NO: 101896 - DNA, 25 bp, Probe sequence
gcatgttttaatataactagatcac

SEQ ID NO: 101897 - DNA, 25 bp, Probe sequence
tgtaggaaataaatacttaactgtt

SEQ ID NO: 101898 - DNA, 25 bp, Probe sequence
tgcttttagcatgttttaatataac

SEQ ID NO: 101899 - DNA, 25 bp, Probe sequence
taatttgtatttaatattttaacat

SEQ ID NO: 101900 - DNA, 25 bp, Probe sequence
tacttaactgttaaatgtaatttgt

SEQ ID NO: 101901 - DNA, 25 bp, Probe sequence
ttatattgcctaactgtaggaaata

SEQ ID NO: 101902 - DNA, 25 bp, Probe sequence
tttagcatgttttaatataactaga

SEQ ID NO: 101903 - DNA, 25 bp, Probe sequence
ttttaatataactagatcacagaga

SEQ ID NO: 101904 - DNA, 25 bp, Probe sequence
ttaatataactagatcacagagatg

SEQ ID NO: 101905 - DNA, 25 bp, Probe sequence
attgaatacgccgttaactgacttt

SEQ ID NO: 101906 - DNA, 25 bp, Probe sequence
atacgccgttaactgactttattat

SEQ ID NO: 101907 - DNA, 25 bp, Probe sequence
acgccgttaactgactttattatct

SEQ ID NO: 101908 - DNA, 25 bp, Probe sequence
acaattgaatacgccgttaactgac

SEQ ID NO: 101909 - DNA, 25 bp, Probe sequence
aagatttacaattgaatacgccgtt

SEQ ID NO: 101910 - DNA, 25 bp, Probe sequence
aattgaatacgccgttaactgactt

SEQ ID NO: 101911 - DNA, 25 bp, Probe sequence
cgccgttaactgactttattatctt

SEQ ID NO: 101912 - DNA, 25 bp, Probe sequence
gccgttaactgactttattatctta

SEQ ID NO: 101913 - DNA, 25 bp, Probe sequence
gctagttatcttgttaaaatccaac

SEQ ID NO: 101914 - DNA, 25 bp, Probe sequence
gaatacgccgttaactgactttatt

SEQ ID NO: 101915 - DNA, 25 bp, Probe sequence
gatttacaattgaatacgccgttaa

SEQ ID NO: 101916 - DNA, 25 bp, Probe sequence
tgaatacgccgttaactgactttat

SEQ ID NO: 101917 - DNA, 25 bp, Probe sequence
tacgccgttaactgactttattatc

SEQ ID NO: 101918 - DNA, 25 bp, Probe sequence
tttgctagttatcttgttaaaatcc

SEQ ID NO: 101919 - DNA, 25 bp, Probe sequence
tttacaattgaatacgccgttaact

SEQ ID NO: 101920 - DNA, 25 bp, Probe sequence
attgcgccataggattgtagagtga

SEQ ID NO: 101921 - DNA, 25 bp, Probe sequence
atcttgtgctacactgttttttaaa

SEQ ID NO: 101922 - DNA, 25 bp, Probe sequence
aaaattgcgccataggattgtagag

SEQ ID NO: 101923 - DNA, 25 bp, Probe sequence
aacagtgtaggaaacaagttgaatc

SEQ ID NO: 101924 - DNA, 25 bp, Probe sequence
aagttgaatcttgtgctacactgtt

SEQ ID NO: 101925 - DNA, 25 bp, Probe sequence
aattcatttataaaacagtgtagga

SEQ ID NO: 101926 - DNA, 25 bp, Probe sequence
gaatcttgtgctacactgtttttta

SEQ ID NO: 101927 - DNA, 25 bp, Probe sequence
gttgaatcttgtgctacactgtttt

SEQ ID NO: 101928 - DNA, 25 bp, Probe sequence
gtagcattttatttatggaaactgt

SEQ ID NO: 101929 - DNA, 25 bp, Probe sequence
ggaaactgtcaatttcaaatttagt

SEQ ID NO: 101930 - DNA, 25 bp, Probe sequence
tgcgccataggattgtagagtgaaa

SEQ ID NO: 101931 - DNA, 25 bp, Probe sequence
tcacggggtaggaaattgtagcatt

SEQ ID NO: 101932 - DNA, 25 bp, Probe sequence
taagattcacggggtaggaaattgt

SEQ ID NO: 101933 - DNA, 25 bp, Probe sequence
ttttgttaaaaattgcgccatagga

SEQ ID NO: 101934 - DNA, 25 bp, Probe sequence
ttgtgctacactgttttttaaaaca

SEQ ID NO: 101935 - DNA, 25 bp, Probe sequence
atagaatataaattgttaacagcat

SEQ ID NO: 101936 - DNA, 25 bp, Probe sequence
atgtggaaccgataccatataacta

SEQ ID NO: 101937 - DNA, 25 bp, Probe sequence
acaaatgtggaaccgataccatata

SEQ ID NO: 101938 - DNA, 25 bp, Probe sequence
aaatgtggaaccgataccatataac

SEQ ID NO: 101939 - DNA, 25 bp, Probe sequence
aaaacaaatgtggaaccgataccat

SEQ ID NO: 101940 - DNA, 25 bp, Probe sequence
aacaaatgtggaaccgataccatat

SEQ ID NO: 101941 - DNA, 25 bp, Probe sequence
aaccgataccatataactataaatg

SEQ ID NO: 101942 - DNA, 25 bp, Probe sequence
aatgtggaaccgataccatataact

SEQ ID NO: 101943 - DNA, 25 bp, Probe sequence
cgctgtattttttaaaacaaatgtg

SEQ ID NO: 101944 - DNA, 25 bp, Probe sequence
gaacgtaggtaaaatttgctataat

SEQ ID NO: 101945 - DNA, 25 bp, Probe sequence
gaaccgataccatataactataaat

SEQ ID NO: 101946 - DNA, 25 bp, Probe sequence
gtggaaccgataccatataactata

SEQ ID NO: 101947 - DNA, 25 bp, Probe sequence
ggaaccgataccatataactataaa

SEQ ID NO: 101948 - DNA, 25 bp, Probe sequence
tgtggaaccgataccatataactat

SEQ ID NO: 101949 - DNA, 25 bp, Probe sequence
tataaaaggaggactgggtaaatat

SEQ ID NO: 101950 - DNA, 25 bp, Probe sequence
atgttgggacattttgttatacaaa

SEQ ID NO: 101951 - DNA, 25 bp, Probe sequence
aaaggttgatgttgggacattttgt

SEQ ID NO: 101952 - DNA, 25 bp, Probe sequence
aactaaaggttgatgttgggacatt

SEQ ID NO: 101953 - DNA, 25 bp, Probe sequence
catagaatattcattgtcctgacat

SEQ ID NO: 101954 - DNA, 25 bp, Probe sequence
cattgtcctgacatttaactaaagg

SEQ ID NO: 101955 - DNA, 25 bp, Probe sequence
gaatattcattgtcctgacatttaa

SEQ ID NO: 101956 - DNA, 25 bp, Probe sequence
gatgttgggacattttgttatacaa

SEQ ID NO: 101957 - DNA, 25 bp, Probe sequence
gtcctgacatttaactaaaggttga

SEQ ID NO: 101958 - DNA, 25 bp, Probe sequence
ggttgatgttgggacattttgttat

SEQ ID NO: 101959 - DNA, 25 bp, Probe sequence
tacatagaatattcattgtcctgac

SEQ ID NO: 101960 - DNA, 25 bp, Probe sequence
tagaatattcattgtcctgacattt

SEQ ID NO: 101961 - DNA, 25 bp, Probe sequence
tattcattgtcctgacatttaacta

SEQ ID NO: 101962 - DNA, 25 bp, Probe sequence
ttattttgaaatctttttatgaaag

SEQ ID NO: 101963 - DNA, 25 bp, Probe sequence
ttcattgtcctgacatttaactaaa

SEQ ID NO: 101964 - DNA, 25 bp, Probe sequence
ttgtcctgacatttaactaaaggtt

SEQ ID NO: 101965 - DNA, 25 bp, Probe sequence
attagattctatggctacttccgct

SEQ ID NO: 101966 - DNA, 25 bp, Probe sequence
atattagattctatggctacttccg

SEQ ID NO: 101967 - DNA, 25 bp, Probe sequence
atggctacttccgctaatttaaaag

SEQ ID NO: 101968 - DNA, 25 bp, Probe sequence
ctatggctacttccgctaatttaaa

SEQ ID NO: 101969 - DNA, 25 bp, Probe sequence
gctacttccgctaatttaaaagtga

SEQ ID NO: 101970 - DNA, 25 bp, Probe sequence
gatattagattctatggctacttcc

SEQ ID NO: 101971 - DNA, 25 bp, Probe sequence
tggctacttccgctaatttaaaagt

SEQ ID NO: 101972 - DNA, 25 bp, Probe sequence
ggctacttccgctaatttaaaagtg

SEQ ID NO: 101973 - DNA, 25 bp, Probe sequence
tctatggctacttccgctaatttaa

SEQ ID NO: 101974 - DNA, 25 bp, Probe sequence
tacttccgctaatttaaaagtgagt

SEQ ID NO: 101975 - DNA, 25 bp, Probe sequence
tatggctacttccgctaatttaaaa

SEQ ID NO: 101976 - DNA, 25 bp, Probe sequence
tattagattctatggctacttccgc

SEQ ID NO: 101977 - DNA, 25 bp, Probe sequence
ttagattctatggctacttccgcta

SEQ ID NO: 101978 - DNA, 25 bp, Probe sequence
ttctatggctacttccgctaattta

SEQ ID NO: 101979 - DNA, 25 bp, Probe sequence
ttccgctaatttaaaagtgagtaag

SEQ ID NO: 101980 - DNA, 25 bp, Probe sequence
attaattatagaacagtctgggact

SEQ ID NO: 101981 - DNA, 25 bp, Probe sequence
atgtgatgttagctttgaatgatta

SEQ ID NO: 101982 - DNA, 25 bp, Probe sequence
agctttgaatgattaaccttgttat

SEQ ID NO: 101983 - DNA, 25 bp, Probe sequence
aatacatactaaacttatcggaaat

SEQ ID NO: 101984 - DNA, 25 bp, Probe sequence
gaatcgtaattaatcgccttcctta

SEQ ID NO: 101985 - DNA, 25 bp, Probe sequence
gaaaatcatcacctataatacatac

SEQ ID NO: 101986 - DNA, 25 bp, Probe sequence
gaaaacaagaaaatcatcacctata

SEQ ID NO: 101987 - DNA, 25 bp, Probe sequence
gactaagtatgtctcaggctttttc

SEQ ID NO: 101988 - DNA, 25 bp, Probe sequence
gtatgtctcaggctttttctgttat

SEQ ID NO: 101989 - DNA, 25 bp, Probe sequence
gtaattaatcgccttccttatatga

SEQ ID NO: 101990 - DNA, 25 bp, Probe sequence
gtctgggactaagtatgtctcaggc

SEQ ID NO: 101991 - DNA, 25 bp, Probe sequence
gtctcaggctttttctgttatgttt

SEQ ID NO: 101992 - DNA, 25 bp, Probe sequence
tcaggctttttctgttatgtttgaa

SEQ ID NO: 101993 - DNA, 25 bp, Probe sequence
taatcgccttccttatatgaatata

SEQ ID NO: 101994 - DNA, 25 bp, Probe sequence
taaccttgttatatctttaattaat

SEQ ID NO: 101995 - DNA, 25 bp, Probe sequence
attacattaataaccattttacagt

SEQ ID NO: 101996 - DNA, 25 bp, Probe sequence
attacgctctaactcgtttgaatac

SEQ ID NO: 101997 - DNA, 25 bp, Probe sequence
atatttaggtattcattgtaatcaa

SEQ ID NO: 101998 - DNA, 25 bp, Probe sequence
aacaattacgctctaactcgtttga

SEQ ID NO: 101999 - DNA, 25 bp, Probe sequence
aacgccgtcttgaaactaagatatt

SEQ ID NO: 102000 - DNA, 25 bp, Probe sequence
aatctaacaattacgctctaactcg

SEQ ID NO: 102001 - DNA, 25 bp, Probe sequence
aattcattcaaacacgaaggaggaa

SEQ ID NO: 102002 - DNA, 25 bp, Probe sequence
catagatataattcattcaaacacg

SEQ ID NO: 102003 - DNA, 25 bp, Probe sequence
cattgtaatcaattatttgtttttt

SEQ ID NO: 102004 - DNA, 25 bp, Probe sequence
ctttctcaaattttattaacttatg

SEQ ID NO: 102005 - DNA, 25 bp, Probe sequence
cgctctaactcgtttgaatacatag

SEQ ID NO: 102006 - DNA, 25 bp, Probe sequence
tcgtctttctcaaattttattaact

SEQ ID NO: 102007 - DNA, 25 bp, Probe sequence
taactcgtttgaatacatagatata

SEQ ID NO: 102008 - DNA, 25 bp, Probe sequence
tataaaacgccgtcttgaaactaag

SEQ ID NO: 102009 - DNA, 25 bp, Probe sequence
tttacagtataaaacgccgtcttga

SEQ ID NO: 102010 - DNA, 25 bp, Probe sequence
atatcagcgtttttattgtgaataa

SEQ ID NO: 102011 - DNA, 25 bp, Probe sequence
aaaggtgttgataacgtcatttatt

SEQ ID NO: 102012 - DNA, 25 bp, Probe sequence
aatttacttgtggataactaggata

SEQ ID NO: 102013 - DNA, 25 bp, Probe sequence
catgcgtacttatcaacaaagagtg

SEQ ID NO: 102014 - DNA, 25 bp, Probe sequence
ctaggataagtctgtggatagctat

SEQ ID NO: 102015 - DNA, 25 bp, Probe sequence
gaaagtgtcttaacaatgaattttg

SEQ ID NO: 102016 - DNA, 25 bp, Probe sequence
gagaacatgcgtacttatcaacaaa

SEQ ID NO: 102017 - DNA, 25 bp, Probe sequence
gattagtgttaatttacttgtggat

SEQ ID NO: 102018 - DNA, 25 bp, Probe sequence
gtcaatagagaacatgcgtacttat

SEQ ID NO: 102019 - DNA, 25 bp, Probe sequence
gtggatatcaggtgggaaaacagaa

SEQ ID NO: 102020 - DNA, 25 bp, Probe sequence
ggatagctataatatcagcgttttt

SEQ ID NO: 102021 - DNA, 25 bp, Probe sequence
taactctaactatagcgaatttaca

SEQ ID NO: 102022 - DNA, 25 bp, Probe sequence
taacgtcatttattgtggatatcag

SEQ ID NO: 102023 - DNA, 25 bp, Probe sequence
tagcgaatttacagttagagttatg

SEQ ID NO: 102024 - DNA, 25 bp, Probe sequence
tatctccttatttatttttaataat

SEQ ID NO: 102025 - DNA, 25 bp, Probe sequence
atataacaatgttgcgacttgaaca

SEQ ID NO: 102026 - DNA, 25 bp, Probe sequence
ataacaatgttgcgacttgaacatt

SEQ ID NO: 102027 - DNA, 25 bp, Probe sequence
atgttgcgacttgaacattgattga

SEQ ID NO: 102028 - DNA, 25 bp, Probe sequence
agactgtcaatataacaatgttgcg

SEQ ID NO: 102029 - DNA, 25 bp, Probe sequence
aagactgtcaatataacaatgttgc

SEQ ID NO: 102030 - DNA, 25 bp, Probe sequence
aatataacaatgttgcgacttgaac

SEQ ID NO: 102031 - DNA, 25 bp, Probe sequence
cattgattgatgttcaagattcatg

SEQ ID NO: 102032 - DNA, 25 bp, Probe sequence
ctgtcaatataacaatgttgcgact

SEQ ID NO: 102033 - DNA, 25 bp, Probe sequence
gactgtcaatataacaatgttgcga

SEQ ID NO: 102034 - DNA, 25 bp, Probe sequence
gttgcgacttgaacattgattgatg

SEQ ID NO: 102035 - DNA, 25 bp, Probe sequence
gtcaatataacaatgttgcgacttg

SEQ ID NO: 102036 - DNA, 25 bp, Probe sequence
tgttgcgacttgaacattgattgat

SEQ ID NO: 102037 - DNA, 25 bp, Probe sequence
tgcgacttgaacattgattgatgtt

SEQ ID NO: 102038 - DNA, 25 bp, Probe sequence
tcaatataacaatgttgcgacttga

SEQ ID NO: 102039 - DNA, 25 bp, Probe sequence
ttgcgacttgaacattgattgatgt

SEQ ID NO: 102040 - DNA, 25 bp, Probe sequence
aaacgtcagttattaacatgattac

SEQ ID NO: 102041 - DNA, 25 bp, Probe sequence
aactgttcatagtcttctgtcatgt

SEQ ID NO: 102042 - DNA, 25 bp, Probe sequence
aatgatttattatgttgggattctg

SEQ ID NO: 102043 - DNA, 25 bp, Probe sequence
catagtcttctgtcatgtgatagct

SEQ ID NO: 102044 - DNA, 25 bp, Probe sequence
ctgttcatagtcttctgtcatgtga

SEQ ID NO: 102045 - DNA, 25 bp, Probe sequence
gctgacgtttttatattgcaattag

SEQ ID NO: 102046 - DNA, 25 bp, Probe sequence
gaaactgttcatagtcttctgtcat

SEQ ID NO: 102047 - DNA, 25 bp, Probe sequence
gattacgatgaacattattgaaact

SEQ ID NO: 102048 - DNA, 25 bp, Probe sequence
gttcatagtcttctgtcatgtgata

SEQ ID NO: 102049 - DNA, 25 bp, Probe sequence
gtcagttattaacatgattacgatg

SEQ ID NO: 102050 - DNA, 25 bp, Probe sequence
gtcttctgtcatgtgatagctgacg

SEQ ID NO: 102051 - DNA, 25 bp, Probe sequence
gtgatagctgacgtttttatattgc

SEQ ID NO: 102052 - DNA, 25 bp, Probe sequence
tagtcttctgtcatgtgatagctga

SEQ ID NO: 102053 - DNA, 25 bp, Probe sequence
ttgcaattaggggagtgagacagaa

SEQ ID NO: 102054 - DNA, 25 bp, Probe sequence
ttgaaactgttcatagtcttctgtc

SEQ ID NO: 102055 - DNA, 25 bp, Probe sequence
ataaatttaatttactatatctgct

SEQ ID NO: 102056 - DNA, 25 bp, Probe sequence
agcattttattatactccttccgtg

SEQ ID NO: 102057 - DNA, 25 bp, Probe sequence
acgttcgagtcctaaagagtataat

SEQ ID NO: 102058 - DNA, 25 bp, Probe sequence
actccttccgtgaatggtatatatc

SEQ ID NO: 102059 - DNA, 25 bp, Probe sequence
aatatttgaagttgtcggttgatgt

SEQ ID NO: 102060 - DNA, 25 bp, Probe sequence
cagaaataggacttaaagcgtttag

SEQ ID NO: 102061 - DNA, 25 bp, Probe sequence
gaatggtatatatcactttaatagt

SEQ ID NO: 102062 - DNA, 25 bp, Probe sequence
gaagttgtcggttgatgttcagtat

SEQ ID NO: 102063 - DNA, 25 bp, Probe sequence
gacgtttacaagtcccattcaaaca

SEQ ID NO: 102064 - DNA, 25 bp, Probe sequence
gtcggttgatgttcagtatattgat

SEQ ID NO: 102065 - DNA, 25 bp, Probe sequence
ttactaacgttcgagtcctaaagag

SEQ ID NO: 102066 - DNA, 25 bp, Probe sequence
tacaagtcccattcaaacagaaata

SEQ ID NO: 102067 - DNA, 25 bp, Probe sequence
tatatctgctttagtatgtcaacaa

SEQ ID NO: 102068 - DNA, 25 bp, Probe sequence
tattatactccttccgtgaatggta

SEQ ID NO: 102069 - DNA, 25 bp, Probe sequence
ttttcttacaattaactttgaatag

SEQ ID NO: 102070 - DNA, 25 bp, Probe sequence
attagcgcatcattgcctttgtctt

SEQ ID NO: 102071 - DNA, 25 bp, Probe sequence
atatctataactaattagcgcatca

SEQ ID NO: 102072 - DNA, 25 bp, Probe sequence
ataactaattagcgcatcattgcct

SEQ ID NO: 102073 - DNA, 25 bp, Probe sequence
agcagcctatgatatatctataact

SEQ ID NO: 102074 - DNA, 25 bp, Probe sequence
agcgcatcattgcctttgtcttaaa

SEQ ID NO: 102075 - DNA, 25 bp, Probe sequence
actagcagcctatgatatatctata

SEQ ID NO: 102076 - DNA, 25 bp, Probe sequence
aactaattagcgcatcattgccttt

SEQ ID NO: 102077 - DNA, 25 bp, Probe sequence
aattagcgcatcattgcctttgtct

SEQ ID NO: 102078 - DNA, 25 bp, Probe sequence
ctaattagcgcatcattgcctttgt

SEQ ID NO: 102079 - DNA, 25 bp, Probe sequence
gatgttaactagcagcctatgatat

SEQ ID NO: 102080 - DNA, 25 bp, Probe sequence
gttaactagcagcctatgatatatc

SEQ ID NO: 102081 - DNA, 25 bp, Probe sequence
taattagcgcatcattgcctttgtc

SEQ ID NO: 102082 - DNA, 25 bp, Probe sequence
taactagcagcctatgatatatcta

SEQ ID NO: 102083 - DNA, 25 bp, Probe sequence
tagcgcatcattgcctttgtcttaa

SEQ ID NO: 102084 - DNA, 25 bp, Probe sequence
ttagcgcatcattgcctttgtctta

SEQ ID NO: 102085 - DNA, 25 bp, Probe sequence
attagaaatcaatttatgactgttt

SEQ ID NO: 102086 - DNA, 25 bp, Probe sequence
atttatgactgtttttcttactatg

SEQ ID NO: 102087 - DNA, 25 bp, Probe sequence
atcaatttatgactgtttttcttac

SEQ ID NO: 102088 - DNA, 25 bp, Probe sequence
agaaatcaatttatgactgtttttc

SEQ ID NO: 102089 - DNA, 25 bp, Probe sequence
aaatcaatttatgactgtttttctt

SEQ ID NO: 102090 - DNA, 25 bp, Probe sequence
aatcaatttatgactgtttttctta

SEQ ID NO: 102091 - DNA, 25 bp, Probe sequence
aatttatgactgtttttcttactat

SEQ ID NO: 102092 - DNA, 25 bp, Probe sequence
caatttatgactgtttttcttacta

SEQ ID NO: 102093 - DNA, 25 bp, Probe sequence
gaaatcaatttatgactgtttttct

SEQ ID NO: 102094 - DNA, 25 bp, Probe sequence
tcaatttatgactgtttttcttact

SEQ ID NO: 102095 - DNA, 25 bp, Probe sequence
tagaaatcaatttatgactgttttt

SEQ ID NO: 102096 - DNA, 25 bp, Probe sequence
tttatgactgtttttcttactatgt

SEQ ID NO: 102097 - DNA, 25 bp, Probe sequence
ttatgactgtttttcttactatgtg

SEQ ID NO: 102098 - DNA, 25 bp, Probe sequence
ttagaaatcaatttatgactgtttt

SEQ ID NO: 102099 - DNA, 25 bp, Probe sequence
aggttcttagcgacgaaggtagcaa

SEQ ID NO: 102100 - DNA, 25 bp, Probe sequence
agcgacgaaggtagcaaacttacgt

SEQ ID NO: 102101 - DNA, 25 bp, Probe sequence
aaggttcttagcgacgaaggtagca

SEQ ID NO: 102102 - DNA, 25 bp, Probe sequence
cttagcgacgaaggtagcaaactta

SEQ ID NO: 102103 - DNA, 25 bp, Probe sequence
gcgacgaaggtagcaaacttacgtt

SEQ ID NO: 102104 - DNA, 25 bp, Probe sequence
gaaggtagcaaacttacgttccgct

SEQ ID NO: 102105 - DNA, 25 bp, Probe sequence
gttcttagcgacgaaggtagcaaac

SEQ ID NO: 102106 - DNA, 25 bp, Probe sequence
ggttcttagcgacgaaggtagcaaa

SEQ ID NO: 102107 - DNA, 25 bp, Probe sequence
tcttagcgacgaaggtagcaaactt

SEQ ID NO: 102108 - DNA, 25 bp, Probe sequence
tagcgacgaaggtagcaaacttacg

SEQ ID NO: 102109 - DNA, 25 bp, Probe sequence
ttagcgacgaaggtagcaaacttac

SEQ ID NO: 102110 - DNA, 25 bp, Probe sequence
ttcttagcgacgaaggtagcaaact

SEQ ID NO: 102111 - DNA, 25 bp, Probe sequence
attgtcagacaatgcattaagaaaa

SEQ ID NO: 102112 - DNA, 25 bp, Probe sequence
attgcttatgcgagcgcttgacaat

SEQ ID NO: 102113 - DNA, 25 bp, Probe sequence
attttttggttaaagtgatattgct

SEQ ID NO: 102114 - DNA, 25 bp, Probe sequence
atgcgagcgcttgacaatctattct

SEQ ID NO: 102115 - DNA, 25 bp, Probe sequence
agcagtatgcgagcgcttgactaaa

SEQ ID NO: 102116 - DNA, 25 bp, Probe sequence
agcgcttgacaatctattcttttta

SEQ ID NO: 102117 - DNA, 25 bp, Probe sequence
aaagcagtatgcgagcgcttgacta

SEQ ID NO: 102118 - DNA, 25 bp, Probe sequence
gcgagcgcttgacaatctattcttt

SEQ ID NO: 102119 - DNA, 25 bp, Probe sequence
gcgagcgcttgactaaaaagaaatt

SEQ ID NO: 102120 - DNA, 25 bp, Probe sequence
gcggagtttacttttgtaaatgagc

SEQ ID NO: 102121 - DNA, 25 bp, Probe sequence
gcttgacaatctattctttttaaag

SEQ ID NO: 102122 - DNA, 25 bp, Probe sequence
gaaagcgattgtcagacaatgcatt

SEQ ID NO: 102123 - DNA, 25 bp, Probe sequence
gtatgcgagcgcttgactaaaaaga

SEQ ID NO: 102124 - DNA, 25 bp, Probe sequence
gtaaatgagcatttgattttttgaa

SEQ ID NO: 102125 - DNA, 25 bp, Probe sequence
gtgatattgcttatgcgagcgcttg

SEQ ID NO: 102126 - DNA, 25 bp, Probe sequence
atatgttgacaataagttcttaatg

SEQ ID NO: 102127 - DNA, 25 bp, Probe sequence
atgacattttgattgaacttttcta

SEQ ID NO: 102128 - DNA, 25 bp, Probe sequence
aaatgtttaaagccgagattgtcgt

SEQ ID NO: 102129 - DNA, 25 bp, Probe sequence
aatagcgttgtgttaacaactgata

SEQ ID NO: 102130 - DNA, 25 bp, Probe sequence
caatctcggcttttctacttatgat

SEQ ID NO: 102131 - DNA, 25 bp, Probe sequence
gaacttttctattgactgtacagct

SEQ ID NO: 102132 - DNA, 25 bp, Probe sequence
gactgtacagcttatagttagtatg

SEQ ID NO: 102133 - DNA, 25 bp, Probe sequence
gattgtcgtaatttaatacttcgca

SEQ ID NO: 102134 - DNA, 25 bp, Probe sequence
gttagtatgattaaacacgttcctt

SEQ ID NO: 102135 - DNA, 25 bp, Probe sequence
gtgagttattttgattggtaaacat

SEQ ID NO: 102136 - DNA, 25 bp, Probe sequence
ggtaatggcataaattgtgacttga

SEQ ID NO: 102137 - DNA, 25 bp, Probe sequence
tctcggcttttctacttatgatata

SEQ ID NO: 102138 - DNA, 25 bp, Probe sequence
taatacttcgcaatctcggcttttc

SEQ ID NO: 102139 - DNA, 25 bp, Probe sequence
tagagctaattcgtgtatatgtaag

SEQ ID NO: 102140 - DNA, 25 bp, Probe sequence
tatgagttgtatggaatttctatag

SEQ ID NO: 102141 - DNA, 25 bp, Probe sequence
aaaattacattaagtatcatacctt

SEQ ID NO: 102142 - DNA, 25 bp, Probe sequence
aagattttcgaattaatacattatt

SEQ ID NO: 102143 - DNA, 25 bp, Probe sequence
aatgtcgcgatatagtattaataat

SEQ ID NO: 102144 - DNA, 25 bp, Probe sequence
aatttgcttattaatgatacgtttt

SEQ ID NO: 102145 - DNA, 25 bp, Probe sequence
gaagatatctaattgtcgttttaaa

SEQ ID NO: 102146 - DNA, 25 bp, Probe sequence
gaaaaatccatataattatcccttg

SEQ ID NO: 102147 - DNA, 25 bp, Probe sequence
gatggtgtgtcattttcaataatct

SEQ ID NO: 102148 - DNA, 25 bp, Probe sequence
gtcattttcaataatcttagtgcgt

SEQ ID NO: 102149 - DNA, 25 bp, Probe sequence
gtgcgttttaaaatatagtatgacc

SEQ ID NO: 102150 - DNA, 25 bp, Probe sequence
gtgtatccacataaatgtcgcgata

SEQ ID NO: 102151 - DNA, 25 bp, Probe sequence
tgtcgttttaaataggtggattgct

SEQ ID NO: 102152 - DNA, 25 bp, Probe sequence
taacgtagtttaatgtgtatccaca

SEQ ID NO: 102153 - DNA, 25 bp, Probe sequence
tagtatgacctaataattcgtttta

SEQ ID NO: 102154 - DNA, 25 bp, Probe sequence
ttatcccttgattattaaattgaaa

SEQ ID NO: 102155 - DNA, 25 bp, Probe sequence
ttcaataatcttagtgcgttttaaa

SEQ ID NO: 102156 - DNA, 25 bp, Probe sequence
atatggtggatacagcgcttaaaat

SEQ ID NO: 102157 - DNA, 25 bp, Probe sequence
ataaatatggtggatacagcgctta

SEQ ID NO: 102158 - DNA, 25 bp, Probe sequence
atggtggatacagcgcttaaaatga

SEQ ID NO: 102159 - DNA, 25 bp, Probe sequence
aaatatggtggatacagcgcttaaa

SEQ ID NO: 102160 - DNA, 25 bp, Probe sequence
aatatggtggatacagcgcttaaaa

SEQ ID NO: 102161 - DNA, 25 bp, Probe sequence
gatacagcgcttaaaatgaagataa

SEQ ID NO: 102162 - DNA, 25 bp, Probe sequence
gtggatacagcgcttaaaatgaaga

SEQ ID NO: 102163 - DNA, 25 bp, Probe sequence
ggtggatacagcgcttaaaatgaag

SEQ ID NO: 102164 - DNA, 25 bp, Probe sequence
ggatacagcgcttaaaatgaagata

SEQ ID NO: 102165 - DNA, 25 bp, Probe sequence
tggatacagcgcttaaaatgaagat

SEQ ID NO: 102166 - DNA, 25 bp, Probe sequence
tggtggatacagcgcttaaaatgaa

SEQ ID NO: 102167 - DNA, 25 bp, Probe sequence
taaatatggtggatacagcgcttaa

SEQ ID NO: 102168 - DNA, 25 bp, Probe sequence
tagaaattatttcgatgggtatata

SEQ ID NO: 102169 - DNA, 25 bp, Probe sequence
tatggtggatacagcgcttaaaatg

SEQ ID NO: 102170 - DNA, 25 bp, Probe sequence
tttcgatgggtatataataatttga

SEQ ID NO: 102171 - DNA, 25 bp, Probe sequence
attctgtacgaagaattttcttata

SEQ ID NO: 102172 - DNA, 25 bp, Probe sequence
agtatcatctacagcaaaattgcaa

SEQ ID NO: 102173 - DNA, 25 bp, Probe sequence
acatagattttagcaaataccagtt

SEQ ID NO: 102174 - DNA, 25 bp, Probe sequence
ctatttctaaattctgtacgaagaa

SEQ ID NO: 102175 - DNA, 25 bp, Probe sequence
ctattatatgtatttttcagagata

SEQ ID NO: 102176 - DNA, 25 bp, Probe sequence
gcgtctattatatgtatttttcaga

SEQ ID NO: 102177 - DNA, 25 bp, Probe sequence
gcaaacgacaaaattgataagtgca

SEQ ID NO: 102178 - DNA, 25 bp, Probe sequence
gcaaataccagttatgatattcata

SEQ ID NO: 102179 - DNA, 25 bp, Probe sequence
gaattttcttataaacatagatttt

SEQ ID NO: 102180 - DNA, 25 bp, Probe sequence
gattttagcaaataccagttatgat

SEQ ID NO: 102181 - DNA, 25 bp, Probe sequence
ggctttaggtattccatcctaaagt

SEQ ID NO: 102182 - DNA, 25 bp, Probe sequence
tctacagcaaaattgcaaacgacaa

SEQ ID NO: 102183 - DNA, 25 bp, Probe sequence
ttttaggctttaggtattccatcct

SEQ ID NO: 102184 - DNA, 25 bp, Probe sequence
ttaggctttaggtattccatcctaa

SEQ ID NO: 102185 - DNA, 25 bp, Probe sequence
ttagcttaaaagtatcatctacagc

SEQ ID NO: 102186 - DNA, 25 bp, Probe sequence
ataacttttggaatcaattggaggt

SEQ ID NO: 102187 - DNA, 25 bp, Probe sequence
acttttggaatcaattggaggttct

SEQ ID NO: 102188 - DNA, 25 bp, Probe sequence
cagtgcatataaaatttgttatcat

SEQ ID NO: 102189 - DNA, 25 bp, Probe sequence
catttaataacttttggaatcaatt

SEQ ID NO: 102190 - DNA, 25 bp, Probe sequence
cattagagtaattaaaggtcattta

SEQ ID NO: 102191 - DNA, 25 bp, Probe sequence
cttttggaatcaattggaggttctc

SEQ ID NO: 102192 - DNA, 25 bp, Probe sequence
gtcagtgcatataaaatttgttatc

SEQ ID NO: 102193 - DNA, 25 bp, Probe sequence
gtcatttaataacttttggaatcaa

SEQ ID NO: 102194 - DNA, 25 bp, Probe sequence
gtgcatataaaatttgttatcatta

SEQ ID NO: 102195 - DNA, 25 bp, Probe sequence
ggtcatttaataacttttggaatca

SEQ ID NO: 102196 - DNA, 25 bp, Probe sequence
tggtcagtgcatataaaatttgtta

SEQ ID NO: 102197 - DNA, 25 bp, Probe sequence
taacttttggaatcaattggaggtt

SEQ ID NO: 102198 - DNA, 25 bp, Probe sequence
taaaatttgttatcattagagtaat

SEQ ID NO: 102199 - DNA, 25 bp, Probe sequence
tttggaatcaattggaggttctcat

SEQ ID NO: 102200 - DNA, 25 bp, Probe sequence
ttttggaatcaattggaggttctca

SEQ ID NO: 102201 - DNA, 25 bp, Probe sequence
atacaatgataattaagatctagtt

SEQ ID NO: 102202 - DNA, 25 bp, Probe sequence
atgataattaagatctagttttaaa

SEQ ID NO: 102203 - DNA, 25 bp, Probe sequence
acgtgtgggaattacaggaggaagt

SEQ ID NO: 102204 - DNA, 25 bp, Probe sequence
acaatgataattaagatctagtttt

SEQ ID NO: 102205 - DNA, 25 bp, Probe sequence
aacgtgtgggaattacaggaggaag

SEQ ID NO: 102206 - DNA, 25 bp, Probe sequence
aatgataattaagatctagttttaa

SEQ ID NO: 102207 - DNA, 25 bp, Probe sequence
caatgataattaagatctagtttta

SEQ ID NO: 102208 - DNA, 25 bp, Probe sequence
cgtgtgggaattacaggaggaagta

SEQ ID NO: 102209 - DNA, 25 bp, Probe sequence
gtgtgggaattacaggaggaagtaa

SEQ ID NO: 102210 - DNA, 25 bp, Probe sequence
tgataattaagatctagttttaaaa

SEQ ID NO: 102211 - DNA, 25 bp, Probe sequence
taagatctagttttaaaacgtgtgg

SEQ ID NO: 102212 - DNA, 25 bp, Probe sequence
taaaacgtgtgggaattacaggagg

SEQ ID NO: 102213 - DNA, 25 bp, Probe sequence
tacaatgataattaagatctagttt

SEQ ID NO: 102214 - DNA, 25 bp, Probe sequence
ttaagatctagttttaaaacgtgtg

SEQ ID NO: 102215 - DNA, 25 bp, Probe sequence
ttaaaacgtgtgggaattacaggag

SEQ ID NO: 102216 - DNA, 25 bp, Probe sequence
attccatatgctataattatcatca

SEQ ID NO: 102217 - DNA, 25 bp, Probe sequence
atattccatatgctataattatcat

SEQ ID NO: 102218 - DNA, 25 bp, Probe sequence
atgctataattatcatcatataaaa

SEQ ID NO: 102219 - DNA, 25 bp, Probe sequence
atgaaatagattataaatccgtata

SEQ ID NO: 102220 - DNA, 25 bp, Probe sequence
atgaaatattccatatgctataatt

SEQ ID NO: 102221 - DNA, 25 bp, Probe sequence
aaatattccatatgctataattatc

SEQ ID NO: 102222 - DNA, 25 bp, Probe sequence
aatattccatatgctataattatca

SEQ ID NO: 102223 - DNA, 25 bp, Probe sequence
catgaaatattccatatgctataat

SEQ ID NO: 102224 - DNA, 25 bp, Probe sequence
gcatgaaatattccatatgctataa

SEQ ID NO: 102225 - DNA, 25 bp, Probe sequence
gaaatattccatatgctataattat

SEQ ID NO: 102226 - DNA, 25 bp, Probe sequence
tgaaatattccatatgctataatta

SEQ ID NO: 102227 - DNA, 25 bp, Probe sequence
tccatatgctataattatcatcata

SEQ ID NO: 102228 - DNA, 25 bp, Probe sequence
tatgctataattatcatcatataaa

SEQ ID NO: 102229 - DNA, 25 bp, Probe sequence
tattccatatgctataattatcatc

SEQ ID NO: 102230 - DNA, 25 bp, Probe sequence
ttccatatgctataattatcatcat

SEQ ID NO: 102231 - DNA, 25 bp, Probe sequence
attaatatttctctcataaacaagt

SEQ ID NO: 102232 - DNA, 25 bp, Probe sequence
atttctctcataaacaagttgttac

SEQ ID NO: 102233 - DNA, 25 bp, Probe sequence
atatttctctcataaacaagttgtt

SEQ ID NO: 102234 - DNA, 25 bp, Probe sequence
atcttaatgatttcttaataactaa

SEQ ID NO: 102235 - DNA, 25 bp, Probe sequence
atgatttcttaataactaagtttga

SEQ ID NO: 102236 - DNA, 25 bp, Probe sequence
aaattaatatttctctcataaacaa

SEQ ID NO: 102237 - DNA, 25 bp, Probe sequence
aaaattaatatttctctcataaaca

SEQ ID NO: 102238 - DNA, 25 bp, Probe sequence
aatatttctctcataaacaagttgt

SEQ ID NO: 102239 - DNA, 25 bp, Probe sequence
aattaatatttctctcataaacaag

SEQ ID NO: 102240 - DNA, 25 bp, Probe sequence
catcttaatgatttcttaataacta

SEQ ID NO: 102241 - DNA, 25 bp, Probe sequence
gtttgaaaattaatatttctctcat

SEQ ID NO: 102242 - DNA, 25 bp, Probe sequence
taatatttctctcataaacaagttg

SEQ ID NO: 102243 - DNA, 25 bp, Probe sequence
tatttctctcataaacaagttgtta

SEQ ID NO: 102244 - DNA, 25 bp, Probe sequence
tttctctcataaacaagttgttacg

SEQ ID NO: 102245 - DNA, 25 bp, Probe sequence
ttaatatttctctcataaacaagtt

SEQ ID NO: 102246 - DNA, 25 bp, Probe sequence
atgcggttatatcattctgtgtaaa

SEQ ID NO: 102247 - DNA, 25 bp, Probe sequence
aattggattgagatctgtatgcggt

SEQ ID NO: 102248 - DNA, 25 bp, Probe sequence
gcggttatatcattctgtgtaaata

SEQ ID NO: 102249 - DNA, 25 bp, Probe sequence
gaataatcgaacataaataaacttt

SEQ ID NO: 102250 - DNA, 25 bp, Probe sequence
gaatataacaactacttaaattaag

SEQ ID NO: 102251 - DNA, 25 bp, Probe sequence
gaatctagaatataacaactactta

SEQ ID NO: 102252 - DNA, 25 bp, Probe sequence
gagatctgtatgcggttatatcatt

SEQ ID NO: 102253 - DNA, 25 bp, Probe sequence
gatctgtatgcggttatatcattct

SEQ ID NO: 102254 - DNA, 25 bp, Probe sequence
gattctctgtagatatcaaagtact

SEQ ID NO: 102255 - DNA, 25 bp, Probe sequence
gattgagatctgtatgcggttatat

SEQ ID NO: 102256 - DNA, 25 bp, Probe sequence
gtatgcggttatatcattctgtgta

SEQ ID NO: 102257 - DNA, 25 bp, Probe sequence
gtagatatcaaagtactaacgtttt

SEQ ID NO: 102258 - DNA, 25 bp, Probe sequence
tggattgagatctgtatgcggttat

SEQ ID NO: 102259 - DNA, 25 bp, Probe sequence
tctgtatgcggttatatcattctgt

SEQ ID NO: 102260 - DNA, 25 bp, Probe sequence
tttcaataattgattctctgtagat

SEQ ID NO: 102261 - DNA, 25 bp, Probe sequence
atgtaatgtcttgagctcttttttg

SEQ ID NO: 102262 - DNA, 25 bp, Probe sequence
atgtcttgagctcttttttgttggt

SEQ ID NO: 102263 - DNA, 25 bp, Probe sequence
agctcttttttgttggttcttcatc

SEQ ID NO: 102264 - DNA, 25 bp, Probe sequence
aatgtcttgagctcttttttgttgg

SEQ ID NO: 102265 - DNA, 25 bp, Probe sequence
cttgagctcttttttgttggttctt

SEQ ID NO: 102266 - DNA, 25 bp, Probe sequence
ctcttttttgttggttcttcatctt

SEQ ID NO: 102267 - DNA, 25 bp, Probe sequence
gctcttttttgttggttcttcatct

SEQ ID NO: 102268 - DNA, 25 bp, Probe sequence
gagctcttttttgttggttcttcat

SEQ ID NO: 102269 - DNA, 25 bp, Probe sequence
gatgtaatgtcttgagctctttttt

SEQ ID NO: 102270 - DNA, 25 bp, Probe sequence
gtaatgtcttgagctcttttttgtt

SEQ ID NO: 102271 - DNA, 25 bp, Probe sequence
gtcttgagctcttttttgttggttc

SEQ ID NO: 102272 - DNA, 25 bp, Probe sequence
tgtcttgagctcttttttgttggtt

SEQ ID NO: 102273 - DNA, 25 bp, Probe sequence
tgagctcttttttgttggttcttca

SEQ ID NO: 102274 - DNA, 25 bp, Probe sequence
tcttgagctcttttttgttggttct

SEQ ID NO: 102275 - DNA, 25 bp, Probe sequence
ttgagctcttttttgttggttcttc

SEQ ID NO: 102276 - DNA, 25 bp, Probe sequence
acatcttatctaatgctagcttttt

SEQ ID NO: 102277 - DNA, 25 bp, Probe sequence
aaatattcgcaaattgctttattgc

SEQ ID NO: 102278 - DNA, 25 bp, Probe sequence
gaagaggtggttttgtgtgtaaata

SEQ ID NO: 102279 - DNA, 25 bp, Probe sequence
gatgcgtaacgcttacatcttatct

SEQ ID NO: 102280 - DNA, 25 bp, Probe sequence
gattattcgaatgatgcgtaacgct

SEQ ID NO: 102281 - DNA, 25 bp, Probe sequence
gtctaatttcacatgtgtttcagta

SEQ ID NO: 102282 - DNA, 25 bp, Probe sequence
ggaagtagtttgaatgtttatataa

SEQ ID NO: 102283 - DNA, 25 bp, Probe sequence
tgtaaatacaaaattgcctttttct

SEQ ID NO: 102284 - DNA, 25 bp, Probe sequence
tcaaggttaattctatgtacacact

SEQ ID NO: 102285 - DNA, 25 bp, Probe sequence
tctaatgctagctttttgacaaaaa

SEQ ID NO: 102286 - DNA, 25 bp, Probe sequence
taattctatgtacacactttatata

SEQ ID NO: 102287 - DNA, 25 bp, Probe sequence
tagtcgagcgaccttttacttataa

SEQ ID NO: 102288 - DNA, 25 bp, Probe sequence
tattgcgattaaatttttttggtgg

SEQ ID NO: 102289 - DNA, 25 bp, Probe sequence
tttttttggtggtactatatagaag

SEQ ID NO: 102290 - DNA, 25 bp, Probe sequence
ttgtggaatgttaacgatatacgta

SEQ ID NO: 102291 - DNA, 25 bp, Probe sequence
atatcaattttacatgactttttaa

SEQ ID NO: 102292 - DNA, 25 bp, Probe sequence
atcacagtgatatcagctatagatt

SEQ ID NO: 102293 - DNA, 25 bp, Probe sequence
atcagctatagatttcaatttgaat

SEQ ID NO: 102294 - DNA, 25 bp, Probe sequence
aactccttttatactcactaatgtt

SEQ ID NO: 102295 - DNA, 25 bp, Probe sequence
aattagctagaatatcacagtgata

SEQ ID NO: 102296 - DNA, 25 bp, Probe sequence
caaactccttttatactcactaatg

SEQ ID NO: 102297 - DNA, 25 bp, Probe sequence
cagacacataagtcctcgtttttaa

SEQ ID NO: 102298 - DNA, 25 bp, Probe sequence
cataagtcctcgtttttaaaatgca

SEQ ID NO: 102299 - DNA, 25 bp, Probe sequence
ctccttttatactcactaatgttta

SEQ ID NO: 102300 - DNA, 25 bp, Probe sequence
gaatcaacatagatacagacacata

SEQ ID NO: 102301 - DNA, 25 bp, Probe sequence
gaagggaatattgttctgattataa

SEQ ID NO: 102302 - DNA, 25 bp, Probe sequence
gatacagacacataagtcctcgttt

SEQ ID NO: 102303 - DNA, 25 bp, Probe sequence
gtgatatcagctatagatttcaatt

SEQ ID NO: 102304 - DNA, 25 bp, Probe sequence
tgcaaactccttttatactcactaa

SEQ ID NO: 102305 - DNA, 25 bp, Probe sequence
tactcactaatgtttatatcaattt

SEQ ID NO: 102306 - DNA, 25 bp, Probe sequence
attcgatgatagcttttttgactgg

SEQ ID NO: 102307 - DNA, 25 bp, Probe sequence
atcacacaccgttaaagctatcgtc

SEQ ID NO: 102308 - DNA, 25 bp, Probe sequence
agtactatataacaaaatccctctt

SEQ ID NO: 102309 - DNA, 25 bp, Probe sequence
agagggattgttattatcgagtaat

SEQ ID NO: 102310 - DNA, 25 bp, Probe sequence
agctatcgtcggactattcgatgat

SEQ ID NO: 102311 - DNA, 25 bp, Probe sequence
aaatccctctttagagtgtacattt

SEQ ID NO: 102312 - DNA, 25 bp, Probe sequence
aatgtgtacttcaaagagggattgt

SEQ ID NO: 102313 - DNA, 25 bp, Probe sequence
aatcgacgacgtaaatagactatat

SEQ ID NO: 102314 - DNA, 25 bp, Probe sequence
cgttaaagctatcgtcggactattc

SEQ ID NO: 102315 - DNA, 25 bp, Probe sequence
gatagcttttttgactggatttact

SEQ ID NO: 102316 - DNA, 25 bp, Probe sequence
gtgattgtgaatcacacaccgttaa

SEQ ID NO: 102317 - DNA, 25 bp, Probe sequence
gtgtacattttacaatgtgtacttc

SEQ ID NO: 102318 - DNA, 25 bp, Probe sequence
tagactatataacgtcatcttgaaa

SEQ ID NO: 102319 - DNA, 25 bp, Probe sequence
tatgacattttaaatcgacgacgta

SEQ ID NO: 102320 - DNA, 25 bp, Probe sequence
tataacaaaatccctctttagagtg

SEQ ID NO: 102321 - DNA, 25 bp, Probe sequence
aagcgatccaaacgaggtgataata

SEQ ID NO: 102322 - DNA, 25 bp, Probe sequence
aatgtagagtgcgctatagatttta

SEQ ID NO: 102323 - DNA, 25 bp, Probe sequence
aatgatgtagtaaaggtatgtcgaa

SEQ ID NO: 102324 - DNA, 25 bp, Probe sequence
gaaagcgatccaaacgaggtgataa

SEQ ID NO: 102325 - DNA, 25 bp, Probe sequence
gagtgcgctatagattttaattttg

SEQ ID NO: 102326 - DNA, 25 bp, Probe sequence
gatgtagtaaaggtatgtcgaatag

SEQ ID NO: 102327 - DNA, 25 bp, Probe sequence
gataatattgaaagcgatccaaacg

SEQ ID NO: 102328 - DNA, 25 bp, Probe sequence
gtaaaggtatgtcgaatagggtaag

SEQ ID NO: 102329 - DNA, 25 bp, Probe sequence
gtgcgctatagattttaattttgaa

SEQ ID NO: 102330 - DNA, 25 bp, Probe sequence
ggtatgtcgaatagggtaagataat

SEQ ID NO: 102331 - DNA, 25 bp, Probe sequence
ggtataatgtagagtgcgctataga

SEQ ID NO: 102332 - DNA, 25 bp, Probe sequence
tgtagagtgcgctatagattttaat

SEQ ID NO: 102333 - DNA, 25 bp, Probe sequence
tagagtgcgctatagattttaattt

SEQ ID NO: 102334 - DNA, 25 bp, Probe sequence
tattgaaagcgatccaaacgaggtg

SEQ ID NO: 102335 - DNA, 25 bp, Probe sequence
ttgaaagcgatccaaacgaggtgat

SEQ ID NO: 102336 - DNA, 25 bp, Probe sequence
attttaactttatagggcgcacatt

SEQ ID NO: 102337 - DNA, 25 bp, Probe sequence
atgtgcaccctaaaagttgaagata

SEQ ID NO: 102338 - DNA, 25 bp, Probe sequence
agcaagtccaaataatgtgcaccct

SEQ ID NO: 102339 - DNA, 25 bp, Probe sequence
acttagtgtcacattatacaatatg

SEQ ID NO: 102340 - DNA, 25 bp, Probe sequence
aagtccaaataatgtgcaccctaaa

SEQ ID NO: 102341 - DNA, 25 bp, Probe sequence
aataatgtgcaccctaaaagttgaa

SEQ ID NO: 102342 - DNA, 25 bp, Probe sequence
aatagcgaaacttagtgtcacatta

SEQ ID NO: 102343 - DNA, 25 bp, Probe sequence
cacattatttttcgcttcaatagcg

SEQ ID NO: 102344 - DNA, 25 bp, Probe sequence
cgcttcaatagcgaaacttagtgtc

SEQ ID NO: 102345 - DNA, 25 bp, Probe sequence
gcgcacattatttttcgcttcaata

SEQ ID NO: 102346 - DNA, 25 bp, Probe sequence
gcgaaacttagtgtcacattataca

SEQ ID NO: 102347 - DNA, 25 bp, Probe sequence
gcagtaagatgatttcaaatgtgaa

SEQ ID NO: 102348 - DNA, 25 bp, Probe sequence
gtccaaataatgtgcaccctaaaag

SEQ ID NO: 102349 - DNA, 25 bp, Probe sequence
gggcgcacattatttttcgcttcaa

SEQ ID NO: 102350 - DNA, 25 bp, Probe sequence
tagggcgcacattatttttcgcttc

SEQ ID NO: 102351 - DNA, 25 bp, Probe sequence
attgtttcatacgtactcattaatg

SEQ ID NO: 102352 - DNA, 25 bp, Probe sequence
atttttccacttattgtttcatacg

SEQ ID NO: 102353 - DNA, 25 bp, Probe sequence
atacgtactcattaatgtgatagaa

SEQ ID NO: 102354 - DNA, 25 bp, Probe sequence
acgtactcattaatgtgatagaata

SEQ ID NO: 102355 - DNA, 25 bp, Probe sequence
catacgtactcattaatgtgataga

SEQ ID NO: 102356 - DNA, 25 bp, Probe sequence
gaataaatcctatgtgaatataatg

SEQ ID NO: 102357 - DNA, 25 bp, Probe sequence
gtttcatacgtactcattaatgtga

SEQ ID NO: 102358 - DNA, 25 bp, Probe sequence
gtgatagaataaatcctatgtgaat

SEQ ID NO: 102359 - DNA, 25 bp, Probe sequence
tgtttcatacgtactcattaatgtg

SEQ ID NO: 102360 - DNA, 25 bp, Probe sequence
tcatacgtactcattaatgtgatag

SEQ ID NO: 102361 - DNA, 25 bp, Probe sequence
taaatcctatgtgaatataatgata

SEQ ID NO: 102362 - DNA, 25 bp, Probe sequence
tattgtttcatacgtactcattaat

SEQ ID NO: 102363 - DNA, 25 bp, Probe sequence
tttcatacgtactcattaatgtgat

SEQ ID NO: 102364 - DNA, 25 bp, Probe sequence
ttcatacgtactcattaatgtgata

SEQ ID NO: 102365 - DNA, 25 bp, Probe sequence
ttgtttcatacgtactcattaatgt

SEQ ID NO: 102366 - DNA, 25 bp, Probe sequence
attgaagtgatggggctagtatagc

SEQ ID NO: 102367 - DNA, 25 bp, Probe sequence
agtatagcaacattgccatcaaact

SEQ ID NO: 102368 - DNA, 25 bp, Probe sequence
aacattgccatcaaactactttcat

SEQ ID NO: 102369 - DNA, 25 bp, Probe sequence
catcaaactactttcatgttggaag

SEQ ID NO: 102370 - DNA, 25 bp, Probe sequence
cattgccatcaaactactttcatgt

SEQ ID NO: 102371 - DNA, 25 bp, Probe sequence
gccatcaaactactttcatgttgga

SEQ ID NO: 102372 - DNA, 25 bp, Probe sequence
gctagtatagcaacattgccatcaa

SEQ ID NO: 102373 - DNA, 25 bp, Probe sequence
gcaacattgccatcaaactactttc

SEQ ID NO: 102374 - DNA, 25 bp, Probe sequence
gatggggctagtatagcaacattgc

SEQ ID NO: 102375 - DNA, 25 bp, Probe sequence
gttattgaagtgatggggctagtat

SEQ ID NO: 102376 - DNA, 25 bp, Probe sequence
gggctagtatagcaacattgccatc

SEQ ID NO: 102377 - DNA, 25 bp, Probe sequence
ggaaagtagttattgaagtgatggg

SEQ ID NO: 102378 - DNA, 25 bp, Probe sequence
tcatgttggaagtagtttttttatt

SEQ ID NO: 102379 - DNA, 25 bp, Probe sequence
tagcaacattgccatcaaactactt

SEQ ID NO: 102380 - DNA, 25 bp, Probe sequence
ttgccatcaaactactttcatgttg

SEQ ID NO: 102381 - DNA, 25 bp, Probe sequence
attctcgatatgttccggtcttttt

SEQ ID NO: 102382 - DNA, 25 bp, Probe sequence
aagtaacttttagatcggaatatat

SEQ ID NO: 102383 - DNA, 25 bp, Probe sequence
aattctcgatatgttccggtctttt

SEQ ID NO: 102384 - DNA, 25 bp, Probe sequence
ctcgatatgttccggtcttttttat

SEQ ID NO: 102385 - DNA, 25 bp, Probe sequence
gccatttatgcatagctaatcaata

SEQ ID NO: 102386 - DNA, 25 bp, Probe sequence
gaattctcgatatgttccggtcttt

SEQ ID NO: 102387 - DNA, 25 bp, Probe sequence
gatcggaatatatcggggaattctc

SEQ ID NO: 102388 - DNA, 25 bp, Probe sequence
gataataatacaactgagcaacaat

SEQ ID NO: 102389 - DNA, 25 bp, Probe sequence
gtcttttttatttcgcaaatatacg

SEQ ID NO: 102390 - DNA, 25 bp, Probe sequence
ggggaattctcgatatgttccggtc

SEQ ID NO: 102391 - DNA, 25 bp, Probe sequence
tcgatatgttccggtcttttttatt

SEQ ID NO: 102392 - DNA, 25 bp, Probe sequence
tacgtcattatagaattattattta

SEQ ID NO: 102393 - DNA, 25 bp, Probe sequence
tatgcatagctaatcaatagttata

SEQ ID NO: 102394 - DNA, 25 bp, Probe sequence
tatttcgcaaatatacgtcattata

SEQ ID NO: 102395 - DNA, 25 bp, Probe sequence
ttctcgatatgttccggtctttttt

SEQ ID NO: 102396 - DNA, 25 bp, Probe sequence
atccatcctaaattttttatagatc

SEQ ID NO: 102397 - DNA, 25 bp, Probe sequence
atccaattatcctaaacatccttaa

SEQ ID NO: 102398 - DNA, 25 bp, Probe sequence
agtactgttgtgtaggtcgtctttt

SEQ ID NO: 102399 - DNA, 25 bp, Probe sequence
actgtcatgacaattctcgatagaa

SEQ ID NO: 102400 - DNA, 25 bp, Probe sequence
aaaacatttttactgtcatgacaat

SEQ ID NO: 102401 - DNA, 25 bp, Probe sequence
aacgacttacatgactagtactgtt

SEQ ID NO: 102402 - DNA, 25 bp, Probe sequence
cagtagtctctgtaaaacttttaga

SEQ ID NO: 102403 - DNA, 25 bp, Probe sequence
gcacggattttatagatgttacagt

SEQ ID NO: 102404 - DNA, 25 bp, Probe sequence
gacatagattgcaaaacgattacat

SEQ ID NO: 102405 - DNA, 25 bp, Probe sequence
gttgtaacctgcacggattttatag

SEQ ID NO: 102406 - DNA, 25 bp, Probe sequence
gtgtaggtcgtctttttgtgtagtt

SEQ ID NO: 102407 - DNA, 25 bp, Probe sequence
gggggatttcgttgtaatcactgtg

SEQ ID NO: 102408 - DNA, 25 bp, Probe sequence
taatatacatttaatccatcctaaa

SEQ ID NO: 102409 - DNA, 25 bp, Probe sequence
tatcctaaacatccttaatatacat

SEQ ID NO: 102410 - DNA, 25 bp, Probe sequence
tttattttgttgtaacctgcacgga

SEQ ID NO: 102411 - DNA, 25 bp, Probe sequence
ataggcataggaggtgaatcacaca

SEQ ID NO: 102412 - DNA, 25 bp, Probe sequence
ataaaatttgccattttgaccattt

SEQ ID NO: 102413 - DNA, 25 bp, Probe sequence
atgactaatttctttaaatataaca

SEQ ID NO: 102414 - DNA, 25 bp, Probe sequence
aggcataggaggtgaatcacacact

SEQ ID NO: 102415 - DNA, 25 bp, Probe sequence
gaccatttttaagctagtaattaag

SEQ ID NO: 102416 - DNA, 25 bp, Probe sequence
aaataacgagatgctatagctatta

SEQ ID NO: 102417 - DNA, 25 bp, Probe sequence
aacaaataacgagatgctatagcta

SEQ ID NO: 102418 - DNA, 25 bp, Probe sequence
aacgagatgctatagctattaatta

SEQ ID NO: 102419 - DNA, 25 bp, Probe sequence
aagctagtaattaagatataggcat

SEQ ID NO: 102420 - DNA, 25 bp, Probe sequence
gcataggaggtgaatcacacactac

SEQ ID NO: 102421 - DNA, 25 bp, Probe sequence
gagatgctatagctattaattatat

SEQ ID NO: 102422 - DNA, 25 bp, Probe sequence
taaaatttgccattttgaccatttt

SEQ ID NO: 102423 - DNA, 25 bp, Probe sequence
tttcatgactaatttctttaaatat

SEQ ID NO: 102424 - DNA, 25 bp, Probe sequence
ttttgaccatttttaagctagtaat

SEQ ID NO: 102425 - DNA, 25 bp, Probe sequence
ttgaccatttttaagctagtaatta

SEQ ID NO: 102426 - DNA, 25 bp, Probe sequence
attcaaagatttaatgtgttggcat

SEQ ID NO: 102427 - DNA, 25 bp, Probe sequence
atttaatgtgttggcataatctttg

SEQ ID NO: 102428 - DNA, 25 bp, Probe sequence
atgtgttggcataatctttgaatgt

SEQ ID NO: 102429 - DNA, 25 bp, Probe sequence
aaagatttaatgtgttggcataatc

SEQ ID NO: 102430 - DNA, 25 bp, Probe sequence
aagatttaatgtgttggcataatct

SEQ ID NO: 102431 - DNA, 25 bp, Probe sequence
aatgtgttggcataatctttgaatg

SEQ ID NO: 102432 - DNA, 25 bp, Probe sequence
caaagatttaatgtgttggcataat

SEQ ID NO: 102433 - DNA, 25 bp, Probe sequence
gatttaatgtgttggcataatcttt

SEQ ID NO: 102434 - DNA, 25 bp, Probe sequence
gtgttggcataatctttgaatgttt

SEQ ID NO: 102435 - DNA, 25 bp, Probe sequence
tgtgttggcataatctttgaatgtt

SEQ ID NO: 102436 - DNA, 25 bp, Probe sequence
tcaaagatttaatgtgttggcataa

SEQ ID NO: 102437 - DNA, 25 bp, Probe sequence
taatgtgttggcataatctttgaat

SEQ ID NO: 102438 - DNA, 25 bp, Probe sequence
tttaatgtgttggcataatctttga

SEQ ID NO: 102439 - DNA, 25 bp, Probe sequence
ttaatgtgttggcataatctttgaa

SEQ ID NO: 102440 - DNA, 25 bp, Probe sequence
ttcaaagatttaatgtgttggcata

SEQ ID NO: 102441 - DNA, 25 bp, Probe sequence
atttgtaatcaaaactagatataat

SEQ ID NO: 102442 - DNA, 25 bp, Probe sequence
atgatttgtaatcaaaactagatat

SEQ ID NO: 102443 - DNA, 25 bp, Probe sequence
actctatgatttgtaatcaaaacta

SEQ ID NO: 102444 - DNA, 25 bp, Probe sequence
aactctatgatttgtaatcaaaact

SEQ ID NO: 102445 - DNA, 25 bp, Probe sequence
ctatgatttgtaatcaaaactagat

SEQ ID NO: 102446 - DNA, 25 bp, Probe sequence
ctaactctatgatttgtaatcaaaa

SEQ ID NO: 102447 - DNA, 25 bp, Probe sequence
ctctatgatttgtaatcaaaactag

SEQ ID NO: 102448 - DNA, 25 bp, Probe sequence
gtctaactctatgatttgtaatcaa

SEQ ID NO: 102449 - DNA, 25 bp, Probe sequence
tgatttgtaatcaaaactagatata

SEQ ID NO: 102450 - DNA, 25 bp, Probe sequence
tctaactctatgatttgtaatcaaa

SEQ ID NO: 102451 - DNA, 25 bp, Probe sequence
tctatgatttgtaatcaaaactaga

SEQ ID NO: 102452 - DNA, 25 bp, Probe sequence
taactctatgatttgtaatcaaaac

SEQ ID NO: 102453 - DNA, 25 bp, Probe sequence
atgtccgactcccaagaatagtttt

SEQ ID NO: 102454 - DNA, 25 bp, Probe sequence
aaatcaaaatttccttcaccactat

SEQ ID NO: 102455 - DNA, 25 bp, Probe sequence
aatacaacactatagagtctagaca

SEQ ID NO: 102456 - DNA, 25 bp, Probe sequence
aattatctacattttttcataccaa

SEQ ID NO: 102457 - DNA, 25 bp, Probe sequence
cattgatttatgtccgactcccaag

SEQ ID NO: 102458 - DNA, 25 bp, Probe sequence
cttcaccactatctacagtcgacat

SEQ ID NO: 102459 - DNA, 25 bp, Probe sequence
ctacagtcgacatttcattttttga

SEQ ID NO: 102460 - DNA, 25 bp, Probe sequence
cgacccttttttgaattatattgat

SEQ ID NO: 102461 - DNA, 25 bp, Probe sequence
cccgtcaactactgccaaatacaac

SEQ ID NO: 102462 - DNA, 25 bp, Probe sequence
gatgtgatttcatatcttcgaccct

SEQ ID NO: 102463 - DNA, 25 bp, Probe sequence
gatttatgatgtagtggttctttat

SEQ ID NO: 102464 - DNA, 25 bp, Probe sequence
gggtattaaactttgtatcattatt

SEQ ID NO: 102465 - DNA, 25 bp, Probe sequence
ggttctttatcattaaacacagcta

SEQ ID NO: 102466 - DNA, 25 bp, Probe sequence
tcatatcttcgacccttttttgaat

SEQ ID NO: 102467 - DNA, 25 bp, Probe sequence
tttacttttttacaatcactaatag

SEQ ID NO: 102468 - DNA, 25 bp, Probe sequence
attcagtaggtcctaacctcgtcgt

SEQ ID NO: 102469 - DNA, 25 bp, Probe sequence
atatagtaatatctttgaactttat

SEQ ID NO: 102470 - DNA, 25 bp, Probe sequence
atgaatgcaccatgcctatcgcata

SEQ ID NO: 102471 - DNA, 25 bp, Probe sequence
agaggtcgggacaaagcgcatagga

SEQ ID NO: 102472 - DNA, 25 bp, Probe sequence
agcgcataggacataattcatgatg

SEQ ID NO: 102473 - DNA, 25 bp, Probe sequence
gcaccatgcctatcgcataaattca

SEQ ID NO: 102474 - DNA, 25 bp, Probe sequence
gaatgcaccatgcctatcgcataaa

SEQ ID NO: 102475 - DNA, 25 bp, Probe sequence
gatatgaatgcaccatgcctatcgc

SEQ ID NO: 102476 - DNA, 25 bp, Probe sequence
gttgagatatgaatgcaccatgcct

SEQ ID NO: 102477 - DNA, 25 bp, Probe sequence
ggacaaagcgcataggacataattc

SEQ ID NO: 102478 - DNA, 25 bp, Probe sequence
ggacataattcatgatgcatatata

SEQ ID NO: 102479 - DNA, 25 bp, Probe sequence
tcgtcgtttttttctatataacact

SEQ ID NO: 102480 - DNA, 25 bp, Probe sequence
tatcgcataaattcagtaggtccta

SEQ ID NO: 102481 - DNA, 25 bp, Probe sequence
tttttctatataacactagcgatta

SEQ ID NO: 102482 - DNA, 25 bp, Probe sequence
ttaatgaaaggagtgtcatgaaccc

SEQ ID NO: 102483 - DNA, 25 bp, Probe sequence
attgtgtctaactatgcttattttt

SEQ ID NO: 102484 - DNA, 25 bp, Probe sequence
attgtgtctaaattgtgtctaacta

SEQ ID NO: 102485 - DNA, 25 bp, Probe sequence
actttttgtctaattgtgtctaaat

SEQ ID NO: 102486 - DNA, 25 bp, Probe sequence
aaattgtgtctaactatgcttattt

SEQ ID NO: 102487 - DNA, 25 bp, Probe sequence
ctaaattgtgtctaactatgcttat

SEQ ID NO: 102488 - DNA, 25 bp, Probe sequence
gactttttgtctaattgtgtctaaa

SEQ ID NO: 102489 - DNA, 25 bp, Probe sequence
gtctaaattgtgtctaactatgctt

SEQ ID NO: 102490 - DNA, 25 bp, Probe sequence
gtctaattgtgtctaaattgtgtct

SEQ ID NO: 102491 - DNA, 25 bp, Probe sequence
gtgtctaaattgtgtctaactatgc

SEQ ID NO: 102492 - DNA, 25 bp, Probe sequence
tgtgtctaactatgcttattttttt

SEQ ID NO: 102493 - DNA, 25 bp, Probe sequence
tctaaattgtgtctaactatgctta

SEQ ID NO: 102494 - DNA, 25 bp, Probe sequence
taaattgtgtctaactatgcttatt

SEQ ID NO: 102495 - DNA, 25 bp, Probe sequence
ttttgtctaattgtgtctaaattgt

SEQ ID NO: 102496 - DNA, 25 bp, Probe sequence
ttgtgtctaaattgtgtctaactat

SEQ ID NO: 102497 - DNA, 25 bp, Probe sequence
ttgtgtctaactatgcttatttttt

SEQ ID NO: 102498 - DNA, 25 bp, Probe sequence
atagaggagtgtagcactttgctat

SEQ ID NO: 102499 - DNA, 25 bp, Probe sequence
agtgtagcactttgctatattcctt

SEQ ID NO: 102500 - DNA, 25 bp, Probe sequence
agcactttgctatattcctttttta

SEQ ID NO: 102501 - DNA, 25 bp, Probe sequence
aatagaggagtgtagcactttgcta

SEQ ID NO: 102502 - DNA, 25 bp, Probe sequence
cactttgctatattccttttttatt

SEQ ID NO: 102503 - DNA, 25 bp, Probe sequence
gcactttgctatattccttttttat

SEQ ID NO: 102504 - DNA, 25 bp, Probe sequence
gagtgtagcactttgctatattcct

SEQ ID NO: 102505 - DNA, 25 bp, Probe sequence
gaggagtgtagcactttgctatatt

SEQ ID NO: 102506 - DNA, 25 bp, Probe sequence
gttataatagaggagtgtagcactt

SEQ ID NO: 102507 - DNA, 25 bp, Probe sequence
gtagcactttgctatattccttttt

SEQ ID NO: 102508 - DNA, 25 bp, Probe sequence
gtgtagcactttgctatattccttt

SEQ ID NO: 102509 - DNA, 25 bp, Probe sequence
ggagtgtagcactttgctatattcc

SEQ ID NO: 102510 - DNA, 25 bp, Probe sequence
ggaattctgtataattagtatatgt

SEQ ID NO: 102511 - DNA, 25 bp, Probe sequence
tagcactttgctatattcctttttt

SEQ ID NO: 102512 - DNA, 25 bp, Probe sequence
tataattagtatatgttaacagtta

SEQ ID NO: 102513 - DNA, 25 bp, Probe sequence
atcgttaagctgtctgcatcctata

SEQ ID NO: 102514 - DNA, 25 bp, Probe sequence
agctgtctgcatcctataatggaat

SEQ ID NO: 102515 - DNA, 25 bp, Probe sequence
acgactgtgttcaaagaagtgactc

SEQ ID NO: 102516 - DNA, 25 bp, Probe sequence
aacaccgcacgaataagaagcaaca

SEQ ID NO: 102517 - DNA, 25 bp, Probe sequence
aagggtatatacttacgactgtgtt

SEQ ID NO: 102518 - DNA, 25 bp, Probe sequence
gaattgtagacagcttttttattta

SEQ ID NO: 102519 - DNA, 25 bp, Probe sequence
gaagtgactcaataccatgttgtta

SEQ ID NO: 102520 - DNA, 25 bp, Probe sequence
gactcaataccatgttgttaataca

SEQ ID NO: 102521 - DNA, 25 bp, Probe sequence
gttaagctgtctgcatcctataatg

SEQ ID NO: 102522 - DNA, 25 bp, Probe sequence
gtattgagtagaaacaccgcacgaa

SEQ ID NO: 102523 - DNA, 25 bp, Probe sequence
gtatatacttacgactgtgttcaaa

SEQ ID NO: 102524 - DNA, 25 bp, Probe sequence
gtaatcgttaagctgtctgcatcct

SEQ ID NO: 102525 - DNA, 25 bp, Probe sequence
gtctgcatcctataatggaattgta

SEQ ID NO: 102526 - DNA, 25 bp, Probe sequence
tacataatgataaatttcccccttt

SEQ ID NO: 102527 - DNA, 25 bp, Probe sequence
ttgagtagaaacaccgcacgaataa

SEQ ID NO: 102528 - DNA, 25 bp, Probe sequence
attacctttataattacacagtatt

SEQ ID NO: 102529 - DNA, 25 bp, Probe sequence
ataactctgttccagatggttcagg

SEQ ID NO: 102530 - DNA, 25 bp, Probe sequence
actctgttccagatggttcagggca

SEQ ID NO: 102531 - DNA, 25 bp, Probe sequence
acacagtattgggtaaaaactcaca

SEQ ID NO: 102532 - DNA, 25 bp, Probe sequence
aaaactcacaaataactctgttcca

SEQ ID NO: 102533 - DNA, 25 bp, Probe sequence
aacattatataggggcttgcgtttt

SEQ ID NO: 102534 - DNA, 25 bp, Probe sequence
aactcacaaataactctgttccaga

SEQ ID NO: 102535 - DNA, 25 bp, Probe sequence
ctcacaaataactctgttccagatg

SEQ ID NO: 102536 - DNA, 25 bp, Probe sequence
ccagatggttcagggcaaaggagct

SEQ ID NO: 102537 - DNA, 25 bp, Probe sequence
gatggttcagggcaaaggagctgaa

SEQ ID NO: 102538 - DNA, 25 bp, Probe sequence
ggcttgcgttttgaattaattacct

SEQ ID NO: 102539 - DNA, 25 bp, Probe sequence
tgttccagatggttcagggcaaagg

SEQ ID NO: 102540 - DNA, 25 bp, Probe sequence
tgcgttttgaattaattacctttat

SEQ ID NO: 102541 - DNA, 25 bp, Probe sequence
taggggcttgcgttttgaattaatt

SEQ ID NO: 102542 - DNA, 25 bp, Probe sequence
tatataggggcttgcgttttgaatt

SEQ ID NO: 102543 - DNA, 25 bp, Probe sequence
atttatgcattgtcatgcctatcta

SEQ ID NO: 102544 - DNA, 25 bp, Probe sequence
aaatcgcaataaaacagtgcacatg

SEQ ID NO: 102545 - DNA, 25 bp, Probe sequence
aaaaggttggggattagcataatgg

SEQ ID NO: 102546 - DNA, 25 bp, Probe sequence
aacagtgcacatgactaattaagtt

SEQ ID NO: 102547 - DNA, 25 bp, Probe sequence
aatttgctatagttattcatgtatt

SEQ ID NO: 102548 - DNA, 25 bp, Probe sequence
catgcctatctattacttactaact

SEQ ID NO: 102549 - DNA, 25 bp, Probe sequence
gcctatctattacttactaactaaa

SEQ ID NO: 102550 - DNA, 25 bp, Probe sequence
gcattgtcatgcctatctattactt

SEQ ID NO: 102551 - DNA, 25 bp, Probe sequence
gcataatgggattgtgctagcacag

SEQ ID NO: 102552 - DNA, 25 bp, Probe sequence
gactaattaagttttgtgtactgtt

SEQ ID NO: 102553 - DNA, 25 bp, Probe sequence
gtcatgcctatctattacttactaa

SEQ ID NO: 102554 - DNA, 25 bp, Probe sequence
gtgtactgttttaattttgcaattt

SEQ ID NO: 102555 - DNA, 25 bp, Probe sequence
tgtgctagcacagttatttatgcat

SEQ ID NO: 102556 - DNA, 25 bp, Probe sequence
ttttgtgtactgttttaattttgca

SEQ ID NO: 102557 - DNA, 25 bp, Probe sequence
ttgtcatgcctatctattacttact

SEQ ID NO: 102558 - DNA, 25 bp, Probe sequence
atttctaagtcttcgcattatttgc

SEQ ID NO: 102559 - DNA, 25 bp, Probe sequence
ataactatttctaagtcttcgcatt

SEQ ID NO: 102560 - DNA, 25 bp, Probe sequence
actatttctaagtcttcgcattatt

SEQ ID NO: 102561 - DNA, 25 bp, Probe sequence
aacatagcattgattataactattt

SEQ ID NO: 102562 - DNA, 25 bp, Probe sequence
aactatttctaagtcttcgcattat

SEQ ID NO: 102563 - DNA, 25 bp, Probe sequence
aagtcttcgcattatttgcgatgat

SEQ ID NO: 102564 - DNA, 25 bp, Probe sequence
ctatttctaagtcttcgcattattt

SEQ ID NO: 102565 - DNA, 25 bp, Probe sequence
ctaagtcttcgcattatttgcgatg

SEQ ID NO: 102566 - DNA, 25 bp, Probe sequence
gcgatgatgtgggaatagttatttt

SEQ ID NO: 102567 - DNA, 25 bp, Probe sequence
gcattatttgcgatgatgtgggaat

SEQ ID NO: 102568 - DNA, 25 bp, Probe sequence
gacgtttaaacatagcattgattat

SEQ ID NO: 102569 - DNA, 25 bp, Probe sequence
gtcttcgcattatttgcgatgatgt

SEQ ID NO: 102570 - DNA, 25 bp, Probe sequence
tttgcgatgatgtgggaatagttat

SEQ ID NO: 102571 - DNA, 25 bp, Probe sequence
tttctaagtcttcgcattatttgcg

SEQ ID NO: 102572 - DNA, 25 bp, Probe sequence
ttacatgacgtttaaacatagcatt

SEQ ID NO: 102573 - DNA, 25 bp, Probe sequence
atttatcttgttttgtggtataata

SEQ ID NO: 102574 - DNA, 25 bp, Probe sequence
atcttgttttgtggtataataatta

SEQ ID NO: 102575 - DNA, 25 bp, Probe sequence
cttgttttgtggtataataattata

SEQ ID NO: 102576 - DNA, 25 bp, Probe sequence
ctaaatttattgatgagaggtgaag

SEQ ID NO: 102577 - DNA, 25 bp, Probe sequence
gttcgtttacattctaaatttattg

SEQ ID NO: 102578 - DNA, 25 bp, Probe sequence
gtttacattctaaatttattgatga

SEQ ID NO: 102579 - DNA, 25 bp, Probe sequence
gtgttcgtttacattctaaatttat

SEQ ID NO: 102580 - DNA, 25 bp, Probe sequence
tgttcgtttacattctaaatttatt

SEQ ID NO: 102581 - DNA, 25 bp, Probe sequence
tcgtttacattctaaatttattgat

SEQ ID NO: 102582 - DNA, 25 bp, Probe sequence
tcttgttttgtggtataataattat

SEQ ID NO: 102583 - DNA, 25 bp, Probe sequence
tatactgattaaaaaagggtgttcg

SEQ ID NO: 102584 - DNA, 25 bp, Probe sequence
tatcttgttttgtggtataataatt

SEQ ID NO: 102585 - DNA, 25 bp, Probe sequence
tttatcttgttttgtggtataataa

SEQ ID NO: 102586 - DNA, 25 bp, Probe sequence
ttacattctaaatttattgatgaga

SEQ ID NO: 102587 - DNA, 25 bp, Probe sequence
ttcgtttacattctaaatttattga

SEQ ID NO: 102588 - DNA, 25 bp, Probe sequence
aatggtgtttgcttcttttttatgt

SEQ ID NO: 102589 - DNA, 25 bp, Probe sequence
aatcagactttagaccatggtcaag

SEQ ID NO: 102590 - DNA, 25 bp, Probe sequence
aattatcaaaacaacgtcaatattt

SEQ ID NO: 102591 - DNA, 25 bp, Probe sequence
gcttcttttttatgtcgtataagta

SEQ ID NO: 102592 - DNA, 25 bp, Probe sequence
gcagacaaaatggtgtttgcttctt

SEQ ID NO: 102593 - DNA, 25 bp, Probe sequence
gaataatcagactttagaccatggt

SEQ ID NO: 102594 - DNA, 25 bp, Probe sequence
gatttgttattaatcaatcgaaaat

SEQ ID NO: 102595 - DNA, 25 bp, Probe sequence
gtttgcttcttttttatgtcgtata

SEQ ID NO: 102596 - DNA, 25 bp, Probe sequence
gtaaaggtgaatgatttgttattaa

SEQ ID NO: 102597 - DNA, 25 bp, Probe sequence
gtgtttgcttcttttttatgtcgta

SEQ ID NO: 102598 - DNA, 25 bp, Probe sequence
gtggggaagaacagcatatattagt

SEQ ID NO: 102599 - DNA, 25 bp, Probe sequence
ggtcaagtggggaagaacagcatat

SEQ ID NO: 102600 - DNA, 25 bp, Probe sequence
tggtgtttgcttcttttttatgtcg

SEQ ID NO: 102601 - DNA, 25 bp, Probe sequence
ttagaccatggtcaagtggggaaga

SEQ ID NO: 102602 - DNA, 25 bp, Probe sequence
tagaaagacaagattttaacgatta

SEQ ID NO: 102603 - DNA, 25 bp, Probe sequence
atacgtgcgtaagcactcaaggagg

SEQ ID NO: 102604 - DNA, 25 bp, Probe sequence
atcctccaatctacttataaaatat

SEQ ID NO: 102605 - DNA, 25 bp, Probe sequence
atgactacatattatgcaacggctt

SEQ ID NO: 102606 - DNA, 25 bp, Probe sequence
acacatttaatctgcagtatttcaa

SEQ ID NO: 102607 - DNA, 25 bp, Probe sequence
ctttatcctccaatctacttataaa

SEQ ID NO: 102608 - DNA, 25 bp, Probe sequence
cgtaagcactcaaggaggaactttc

SEQ ID NO: 102609 - DNA, 25 bp, Probe sequence
gcattgacgctatttttttgatata

SEQ ID NO: 102610 - DNA, 25 bp, Probe sequence
gcagtatttcaatgcattgacgcta

SEQ ID NO: 102611 - DNA, 25 bp, Probe sequence
taattactttgaaaaatacgtgcgt

SEQ ID NO: 102612 - DNA, 25 bp, Probe sequence
tcaatgcattgacgctatttttttg

SEQ ID NO: 102613 - DNA, 25 bp, Probe sequence
tacatattatgcaacggcttaaatt

SEQ ID NO: 102614 - DNA, 25 bp, Probe sequence
tacgtttgcatttagtataactatc

SEQ ID NO: 102615 - DNA, 25 bp, Probe sequence
tagtataactatcgcatttttcaaa

SEQ ID NO: 102616 - DNA, 25 bp, Probe sequence
tatgcaacggcttaaattgtataaa

SEQ ID NO: 102617 - DNA, 25 bp, Probe sequence
tataactatcgcatttttcaaaaaa

SEQ ID NO: 102618 - DNA, 25 bp, Probe sequence
attatgttagtgacaaggtatgaaa

SEQ ID NO: 102619 - DNA, 25 bp, Probe sequence
atattatgttagtgacaaggtatga

SEQ ID NO: 102620 - DNA, 25 bp, Probe sequence
atgttagtgacaaggtatgaaataa

SEQ ID NO: 102621 - DNA, 25 bp, Probe sequence
aggtatgaaataacaatagtgactt

SEQ ID NO: 102622 - DNA, 25 bp, Probe sequence
agtgacaaggtatgaaataacaata

SEQ ID NO: 102623 - DNA, 25 bp, Probe sequence
aatattatgttagtgacaaggtatg

SEQ ID NO: 102624 - DNA, 25 bp, Probe sequence
cattgttaaacattgaaagtaccgg

SEQ ID NO: 102625 - DNA, 25 bp, Probe sequence
cggtactttcattgttaaacattga

SEQ ID NO: 102626 - DNA, 25 bp, Probe sequence
ccggtactttcattgttaaacattg

SEQ ID NO: 102627 - DNA, 25 bp, Probe sequence
gacaaggtatgaaataacaatagtg

SEQ ID NO: 102628 - DNA, 25 bp, Probe sequence
gtactttcattgttaaacattgaaa

SEQ ID NO: 102629 - DNA, 25 bp, Probe sequence
ggtactttcattgttaaacattgaa

SEQ ID NO: 102630 - DNA, 25 bp, Probe sequence
tattatgttagtgacaaggtatgaa

SEQ ID NO: 102631 - DNA, 25 bp, Probe sequence
ttagtgacaaggtatgaaataacaa

SEQ ID NO: 102632 - DNA, 25 bp, Probe sequence
ttatgttagtgacaaggtatgaaat

SEQ ID NO: 102633 - DNA, 25 bp, Probe sequence
atagcagtatggaaacggtaagtaa

SEQ ID NO: 102634 - DNA, 25 bp, Probe sequence
atgatatacatagtgacatagcagt

SEQ ID NO: 102635 - DNA, 25 bp, Probe sequence
cgggctcctttaaataggacacgtg

SEQ ID NO: 102636 - DNA, 25 bp, Probe sequence
aaacaacttgaatgagcttgcttta

SEQ ID NO: 102637 - DNA, 25 bp, Probe sequence
aatgagcttgctttaatgttatgtt

SEQ ID NO: 102638 - DNA, 25 bp, Probe sequence
aattgatgaggaagcattcccttta

SEQ ID NO: 102639 - DNA, 25 bp, Probe sequence
gctttaatgttatgttttacgtaat

SEQ ID NO: 102640 - DNA, 25 bp, Probe sequence
gcattccctttaataattaggaggt

SEQ ID NO: 102641 - DNA, 25 bp, Probe sequence
gaatttgtgagagggagcgtttttt

SEQ ID NO: 102642 - DNA, 25 bp, Probe sequence
gaggaagcattccctttaataatta

SEQ ID NO: 102643 - DNA, 25 bp, Probe sequence
gtcgaattcgacaaataaacaactt

SEQ ID NO: 102644 - DNA, 25 bp, Probe sequence
tgtgagagggagcgtttttttattt

SEQ ID NO: 102645 - DNA, 25 bp, Probe sequence
tgataaaattttattcgggctcctt

SEQ ID NO: 102646 - DNA, 25 bp, Probe sequence
tgtataaaatttatacgctcccctt

SEQ ID NO: 102647 - DNA, 25 bp, Probe sequence
tacgctccccttacagaatttgtga

SEQ ID NO: 102648 - DNA, 25 bp, Probe sequence
atccttcgaaaggaagtattgggca

SEQ ID NO: 102649 - DNA, 25 bp, Probe sequence
atttagattatatccttcgaaagga

SEQ ID NO: 102650 - DNA, 25 bp, Probe sequence
ataaatttagattatatccttcgaa

SEQ ID NO: 102651 - DNA, 25 bp, Probe sequence
ataatttagttttgttactatatat

SEQ ID NO: 102652 - DNA, 25 bp, Probe sequence
agttttgttactatatataaatgaa

SEQ ID NO: 102653 - DNA, 25 bp, Probe sequence
aaatttagattatatccttcgaaag

SEQ ID NO: 102654 - DNA, 25 bp, Probe sequence
aatttagattatatccttcgaaagg

SEQ ID NO: 102655 - DNA, 25 bp, Probe sequence
cagtgattgcgaaatatgatattgt

SEQ ID NO: 102656 - DNA, 25 bp, Probe sequence
gaattcagacgtataaatttagatt

SEQ ID NO: 102657 - DNA, 25 bp, Probe sequence
gatattgtcatttataatttagttt

SEQ ID NO: 102658 - DNA, 25 bp, Probe sequence
gattatatccttcgaaaggaagtat

SEQ ID NO: 102659 - DNA, 25 bp, Probe sequence
gattgcgaaatatgatattgtcatt

SEQ ID NO: 102660 - DNA, 25 bp, Probe sequence
gttactatatataaatgaattcaga

SEQ ID NO: 102661 - DNA, 25 bp, Probe sequence
tcatttataatttagttttgttact

SEQ ID NO: 102662 - DNA, 25 bp, Probe sequence
ttgtcatttataatttagttttgtt

SEQ ID NO: 102663 - DNA, 25 bp, Probe sequence
atgatgagtaatgaggaatagcaca

SEQ ID NO: 102664 - DNA, 25 bp, Probe sequence
atggggattcatgcttcatatataa

SEQ ID NO: 102665 - DNA, 25 bp, Probe sequence
aaagtagttcgtacgcagtgtattt

SEQ ID NO: 102666 - DNA, 25 bp, Probe sequence
aataatatggggattcatgcttcat

SEQ ID NO: 102667 - DNA, 25 bp, Probe sequence
gagtaaataatggtatcgtagtgaa

SEQ ID NO: 102668 - DNA, 25 bp, Probe sequence
gtataggattgttagttagtgacgc

SEQ ID NO: 102669 - DNA, 25 bp, Probe sequence
gtagttcgtacgcagtgtatttgta

SEQ ID NO: 102670 - DNA, 25 bp, Probe sequence
gtagacgttaagttatatatattat

SEQ ID NO: 102671 - DNA, 25 bp, Probe sequence
gtacgcagtgtatttgtaagtctct

SEQ ID NO: 102672 - DNA, 25 bp, Probe sequence
gtgacgcaatattaaaagtagttcg

SEQ ID NO: 102673 - DNA, 25 bp, Probe sequence
gtgtatttgtaagtctctgattaaa

SEQ ID NO: 102674 - DNA, 25 bp, Probe sequence
ggggattcatgcttcatatataaaa

SEQ ID NO: 102675 - DNA, 25 bp, Probe sequence
taggaattttgaagttgtataggat

SEQ ID NO: 102676 - DNA, 25 bp, Probe sequence
tatatattattttctaggaattttg

SEQ ID NO: 102677 - DNA, 25 bp, Probe sequence
ttgttagttagtgacgcaatattaa

SEQ ID NO: 102678 - DNA, 25 bp, Probe sequence
attcccacctcattattaatgtcta

SEQ ID NO: 102679 - DNA, 25 bp, Probe sequence
agattcccacctcattattaatgtc

SEQ ID NO: 102680 - DNA, 25 bp, Probe sequence
acctcattattaatgtctatcctta

SEQ ID NO: 102681 - DNA, 25 bp, Probe sequence
aagattcccacctcattattaatgt

SEQ ID NO: 102682 - DNA, 25 bp, Probe sequence
aatgtctatccttaaataatagtat

SEQ ID NO: 102683 - DNA, 25 bp, Probe sequence
cacctcattattaatgtctatcctt

SEQ ID NO: 102684 - DNA, 25 bp, Probe sequence
cattattaatgtctatccttaaata

SEQ ID NO: 102685 - DNA, 25 bp, Probe sequence
ctcattattaatgtctatccttaaa

SEQ ID NO: 102686 - DNA, 25 bp, Probe sequence
cccacctcattattaatgtctatcc

SEQ ID NO: 102687 - DNA, 25 bp, Probe sequence
cctcattattaatgtctatccttaa

SEQ ID NO: 102688 - DNA, 25 bp, Probe sequence
ccacctcattattaatgtctatcct

SEQ ID NO: 102689 - DNA, 25 bp, Probe sequence
gattcccacctcattattaatgtct

SEQ ID NO: 102690 - DNA, 25 bp, Probe sequence
tcccacctcattattaatgtctatc

SEQ ID NO: 102691 - DNA, 25 bp, Probe sequence
tattaatgtctatccttaaataata

SEQ ID NO: 102692 - DNA, 25 bp, Probe sequence
ttcccacctcattattaatgtctat

SEQ ID NO: 102693 - DNA, 25 bp, Probe sequence
attgagttgtaagtaattaagtgat

SEQ ID NO: 102694 - DNA, 25 bp, Probe sequence
aggccatttatatagcgtttattta

SEQ ID NO: 102695 - DNA, 25 bp, Probe sequence
acaacgcgcatataaatggtctttt

SEQ ID NO: 102696 - DNA, 25 bp, Probe sequence
aaaggccatttatatagcgtttatt

SEQ ID NO: 102697 - DNA, 25 bp, Probe sequence
aaacaacgcgcatataaatggtctt

SEQ ID NO: 102698 - DNA, 25 bp, Probe sequence
aaaaggccatttatatagcgtttat

SEQ ID NO: 102699 - DNA, 25 bp, Probe sequence
aaggccatttatatagcgtttattt

SEQ ID NO: 102700 - DNA, 25 bp, Probe sequence
caacgcgcatataaatggtcttttt

SEQ ID NO: 102701 - DNA, 25 bp, Probe sequence
cgtattccaaaacacgtagaccata

SEQ ID NO: 102702 - DNA, 25 bp, Probe sequence
gtattccaaaacacgtagaccataa

SEQ ID NO: 102703 - DNA, 25 bp, Probe sequence
gtagaccataaaataaaaggccatt

SEQ ID NO: 102704 - DNA, 25 bp, Probe sequence
ggaacaatacgtattccaaaacacg

SEQ ID NO: 102705 - DNA, 25 bp, Probe sequence
ggccatttatatagcgtttatttaa

SEQ ID NO: 102706 - DNA, 25 bp, Probe sequence
tccaaaacacgtagaccataaaata

SEQ ID NO: 102707 - DNA, 25 bp, Probe sequence
tattccaaaacacgtagaccataaa

SEQ ID NO: 102708 - DNA, 25 bp, Probe sequence
aacttgttggagtcatttactattt

SEQ ID NO: 102709 - DNA, 25 bp, Probe sequence
aatggcgacttttatttcactatgt

SEQ ID NO: 102710 - DNA, 25 bp, Probe sequence
aatactaatattaaatggcgacttt

SEQ ID NO: 102711 - DNA, 25 bp, Probe sequence
aatttatgatatggcaatactttgt

SEQ ID NO: 102712 - DNA, 25 bp, Probe sequence
cgtgttatagaccgaatttgtgtat

SEQ ID NO: 102713 - DNA, 25 bp, Probe sequence
gaattcataatatgtctaattgact

SEQ ID NO: 102714 - DNA, 25 bp, Probe sequence
gagttgccattttgttgataaaggt

SEQ ID NO: 102715 - DNA, 25 bp, Probe sequence
gatatggcaatactttgtaatacta

SEQ ID NO: 102716 - DNA, 25 bp, Probe sequence
gttataagagttgccattttgttga

SEQ ID NO: 102717 - DNA, 25 bp, Probe sequence
ggagtcatttactattttatgtatg

SEQ ID NO: 102718 - DNA, 25 bp, Probe sequence
ggcgacttttatttcactatgttat

SEQ ID NO: 102719 - DNA, 25 bp, Probe sequence
tgtctaattgactaacttgttggag

SEQ ID NO: 102720 - DNA, 25 bp, Probe sequence
tagaccgaatttgtgtatacgtaaa

SEQ ID NO: 102721 - DNA, 25 bp, Probe sequence
tagatatgtttcgtgttatagaccg

SEQ ID NO: 102722 - DNA, 25 bp, Probe sequence
ttcactatgttataagagttgccat

SEQ ID NO: 102723 - DNA, 25 bp, Probe sequence
acaatagggcttatgttttacaatt

SEQ ID NO: 102724 - DNA, 25 bp, Probe sequence
aacgcttatgatttgttgcaatata

SEQ ID NO: 102725 - DNA, 25 bp, Probe sequence
cctcctatttactactcaaaactat

SEQ ID NO: 102726 - DNA, 25 bp, Probe sequence
gagtgtagggtaaaagggagatagt

SEQ ID NO: 102727 - DNA, 25 bp, Probe sequence
gatgacatcatgagataaaaccgat

SEQ ID NO: 102728 - DNA, 25 bp, Probe sequence
gtaagttgtgtttctaacaatactt

SEQ ID NO: 102729 - DNA, 25 bp, Probe sequence
tgaatttcctcctatttactactca

SEQ ID NO: 102730 - DNA, 25 bp, Probe sequence
taagtttgttgtaagttgtgtttct

SEQ ID NO: 102731 - DNA, 25 bp, Probe sequence
taaaacgcttatgatttgttgcaat

SEQ ID NO: 102732 - DNA, 25 bp, Probe sequence
tactactcaaaactataaaacgctt

SEQ ID NO: 102733 - DNA, 25 bp, Probe sequence
tagggcttatgttttacaatttgaa

SEQ ID NO: 102734 - DNA, 25 bp, Probe sequence
tatgaaaggcttttagttattagaa

SEQ ID NO: 102735 - DNA, 25 bp, Probe sequence
tttgaatttcctcctatttactact

SEQ ID NO: 102736 - DNA, 25 bp, Probe sequence
ttcctcctatttactactcaaaact

SEQ ID NO: 102737 - DNA, 25 bp, Probe sequence
ttgaaactgttttataaatttatga

SEQ ID NO: 102738 - DNA, 25 bp, Probe sequence
aaagcagttggacaatggcgattgt

SEQ ID NO: 102739 - DNA, 25 bp, Probe sequence
aacatcattgttcgactgcttttct

SEQ ID NO: 102740 - DNA, 25 bp, Probe sequence
catcattgttcgactgcttttctga

SEQ ID NO: 102741 - DNA, 25 bp, Probe sequence
catttgttcgattttttgactttga

SEQ ID NO: 102742 - DNA, 25 bp, Probe sequence
cattgttcgactgcttttctgatta

SEQ ID NO: 102743 - DNA, 25 bp, Probe sequence
gcttttctgattaacttgattgact

SEQ ID NO: 102744 - DNA, 25 bp, Probe sequence
gaagcataataaaaagcagttggac

SEQ ID NO: 102745 - DNA, 25 bp, Probe sequence
gactgcttttctgattaacttgatt

SEQ ID NO: 102746 - DNA, 25 bp, Probe sequence
gattttactttttcatttgttcgat

SEQ ID NO: 102747 - DNA, 25 bp, Probe sequence
gattttttgactttgaagcataata

SEQ ID NO: 102748 - DNA, 25 bp, Probe sequence
gttcgattttttgactttgaagcat

SEQ ID NO: 102749 - DNA, 25 bp, Probe sequence
ggcgattgtaacatcattgttcgac

SEQ ID NO: 102750 - DNA, 25 bp, Probe sequence
tggttctcaaataaatcggacaaat

SEQ ID NO: 102751 - DNA, 25 bp, Probe sequence
ttcgactgcttttctgattaacttg

SEQ ID NO: 102752 - DNA, 25 bp, Probe sequence
ttgttcgactgcttttctgattaac

SEQ ID NO: 102753 - DNA, 25 bp, Probe sequence
atgtaagcatgggacatcgtaacca

SEQ ID NO: 102754 - DNA, 25 bp, Probe sequence
agcatgggacatcgtaaccatatat

SEQ ID NO: 102755 - DNA, 25 bp, Probe sequence
aacatcgcattgaaattgtgatatt

SEQ ID NO: 102756 - DNA, 25 bp, Probe sequence
aagtatgtcgatatcagctttaaga

SEQ ID NO: 102757 - DNA, 25 bp, Probe sequence
aatgccatgatgattctaagataat

SEQ ID NO: 102758 - DNA, 25 bp, Probe sequence
gactttaacgttataaccaatctat

SEQ ID NO: 102759 - DNA, 25 bp, Probe sequence
cataaatgccatgatgattctaaga

SEQ ID NO: 102760 - DNA, 25 bp, Probe sequence
gctttaagacatcataaatgccatg

SEQ ID NO: 102761 - DNA, 25 bp, Probe sequence
gatatcagctttaagacatcataaa

SEQ ID NO: 102762 - DNA, 25 bp, Probe sequence
gtaagcatgggacatcgtaaccata

SEQ ID NO: 102763 - DNA, 25 bp, Probe sequence
gtcgatatcagctttaagacatcat

SEQ ID NO: 102764 - DNA, 25 bp, Probe sequence
gggacatcgtaaccatatataagta

SEQ ID NO: 102765 - DNA, 25 bp, Probe sequence
taacgttataaccaatctatttaag

SEQ ID NO: 102766 - DNA, 25 bp, Probe sequence
tataagtatgtcgatatcagcttta

SEQ ID NO: 102767 - DNA, 25 bp, Probe sequence
ttaagaataataacatcgcattgaa

SEQ ID NO: 102768 - DNA, 25 bp, Probe sequence
attgtattgtttgtttatgggaaat

SEQ ID NO: 102769 - DNA, 25 bp, Probe sequence
ataatcctgattagcttgttgtcaa

SEQ ID NO: 102770 - DNA, 25 bp, Probe sequence
atgcggttacataaaaagcgaacat

SEQ ID NO: 102771 - DNA, 25 bp, Probe sequence
aagcgaacatctaacctgatattta

SEQ ID NO: 102772 - DNA, 25 bp, Probe sequence
aatgtaatagtatatgtatgcggtt

SEQ ID NO: 102773 - DNA, 25 bp, Probe sequence
caatcaactaatttacaaccgtatt

SEQ ID NO: 102774 - DNA, 25 bp, Probe sequence
caaccgtatttttataatcaaccat

SEQ ID NO: 102775 - DNA, 25 bp, Probe sequence
gcttgttgtcaagtcatcgttcata

SEQ ID NO: 102776 - DNA, 25 bp, Probe sequence
gaagatatcacgttcaattgtattg

SEQ ID NO: 102777 - DNA, 25 bp, Probe sequence
gaacctgacgctcaatcaactaatt

SEQ ID NO: 102778 - DNA, 25 bp, Probe sequence
gacgctcaatcaactaatttacaac

SEQ ID NO: 102779 - DNA, 25 bp, Probe sequence
gttatcttctccttaatattcatta

SEQ ID NO: 102780 - DNA, 25 bp, Probe sequence
gtcaagtcatcgttcataatgaaga

SEQ ID NO: 102781 - DNA, 25 bp, Probe sequence
tgatatttaaatgaacctgacgctc

SEQ ID NO: 102782 - DNA, 25 bp, Probe sequence
ttttttgcgaatttttgtactatag

SEQ ID NO: 102783 - DNA, 25 bp, Probe sequence
atacgcccagaatgtgttggctttt

SEQ ID NO: 102784 - DNA, 25 bp, Probe sequence
ataatataaataaaagccaacacat

SEQ ID NO: 102785 - DNA, 25 bp, Probe sequence
cagaatgtgttggctttttgagttt

SEQ ID NO: 102786 - DNA, 25 bp, Probe sequence
cgcccagaatgtgttggctttttga

SEQ ID NO: 102787 - DNA, 25 bp, Probe sequence
gccaacacataaatggggatacgcc

SEQ ID NO: 102788 - DNA, 25 bp, Probe sequence
gctttttgagtttaatcgcattgtt

SEQ ID NO: 102789 - DNA, 25 bp, Probe sequence
gaatgtgttggctttttgagtttaa

SEQ ID NO: 102790 - DNA, 25 bp, Probe sequence
gagtttaatcgcattgttaaagagc

SEQ ID NO: 102791 - DNA, 25 bp, Probe sequence
gttggctttttgagtttaatcgcat

SEQ ID NO: 102792 - DNA, 25 bp, Probe sequence
gtgttggctttttgagtttaatcgc

SEQ ID NO: 102793 - DNA, 25 bp, Probe sequence
ggggatacgcccagaatgtgttggc

SEQ ID NO: 102794 - DNA, 25 bp, Probe sequence
ggatacgcccagaatgtgttggctt

SEQ ID NO: 102795 - DNA, 25 bp, Probe sequence
tggctttttgagtttaatcgcattg

SEQ ID NO: 102796 - DNA, 25 bp, Probe sequence
taatcgcattgttaaagagcaatta

SEQ ID NO: 102797 - DNA, 25 bp, Probe sequence
tacgcccagaatgtgttggcttttt

SEQ ID NO: 102798 - DNA, 25 bp, Probe sequence
ataaacaagcaagacgtagacaatt

SEQ ID NO: 102799 - DNA, 25 bp, Probe sequence
atggatatactagatgatgaattaa

SEQ ID NO: 102800 - DNA, 25 bp, Probe sequence
agcggaacaccttacatttagatta

SEQ ID NO: 102801 - DNA, 25 bp, Probe sequence
acatacttgctaattgataatggat

SEQ ID NO: 102802 - DNA, 25 bp, Probe sequence
aaagcggaacaccttacatttagat

SEQ ID NO: 102803 - DNA, 25 bp, Probe sequence
aaaacactttacagattagaatcat

SEQ ID NO: 102804 - DNA, 25 bp, Probe sequence
aacaagcaagacgtagacaatttta

SEQ ID NO: 102805 - DNA, 25 bp, Probe sequence
aacaccttacatttagattagaata

SEQ ID NO: 102806 - DNA, 25 bp, Probe sequence
gcggaacaccttacatttagattag

SEQ ID NO: 102807 - DNA, 25 bp, Probe sequence
gcaagacgtagacaattttaaggag

SEQ ID NO: 102808 - DNA, 25 bp, Probe sequence
gataatggatatactagatgatgaa

SEQ ID NO: 102809 - DNA, 25 bp, Probe sequence
gtagacaattttaaggagtgtatta

SEQ ID NO: 102810 - DNA, 25 bp, Probe sequence
ggaacaccttacatttagattagaa

SEQ ID NO: 102811 - DNA, 25 bp, Probe sequence
taaaacatacttgctaattgataat

SEQ ID NO: 102812 - DNA, 25 bp, Probe sequence
tagacatttaaaaagcggaacacct

SEQ ID NO: 102813 - DNA, 25 bp, Probe sequence
attttatggcaatttcgtgtcgcga

SEQ ID NO: 102814 - DNA, 25 bp, Probe sequence
atttcgtgtcgcgaggacttatcaa

SEQ ID NO: 102815 - DNA, 25 bp, Probe sequence
actttatatgagttttccagtcgta

SEQ ID NO: 102816 - DNA, 25 bp, Probe sequence
aagacgaatgaccaaacgctaagtt

SEQ ID NO: 102817 - DNA, 25 bp, Probe sequence
aattgcatatttgaataaccgcata

SEQ ID NO: 102818 - DNA, 25 bp, Probe sequence
caagtgacaaccttgtttaaatgtt

SEQ ID NO: 102819 - DNA, 25 bp, Probe sequence
gcttatgatagattgctcgttttta

SEQ ID NO: 102820 - DNA, 25 bp, Probe sequence
gaaaaatgacgggtaatcaaccata

SEQ ID NO: 102821 - DNA, 25 bp, Probe sequence
gattacactgtagattgagaaattt

SEQ ID NO: 102822 - DNA, 25 bp, Probe sequence
gttttccagtcgtatgttgaataag

SEQ ID NO: 102823 - DNA, 25 bp, Probe sequence
gtgtcgcgaggacttatcaagtgac

SEQ ID NO: 102824 - DNA, 25 bp, Probe sequence
gggtaatcaaccataagagctaatt

SEQ ID NO: 102825 - DNA, 25 bp, Probe sequence
ggacttatcaagtgacaaccttgtt

SEQ ID NO: 102826 - DNA, 25 bp, Probe sequence
ggcaatttcgtgtcgcgaggactta

SEQ ID NO: 102827 - DNA, 25 bp, Probe sequence
tatgagttttccagtcgtatgttga

SEQ ID NO: 102828 - DNA, 25 bp, Probe sequence
acgtaaattaatgtcctgggcgcta

SEQ ID NO: 102829 - DNA, 25 bp, Probe sequence
aaatgtgtatcaatggcgctataga

SEQ ID NO: 102830 - DNA, 25 bp, Probe sequence
aaagcacatcaacataacctctcac

SEQ ID NO: 102831 - DNA, 25 bp, Probe sequence
aacataacctctcacttgcatagta

SEQ ID NO: 102832 - DNA, 25 bp, Probe sequence
gcgtccaactgcataagaaacacta

SEQ ID NO: 102833 - DNA, 25 bp, Probe sequence
gctcgtatgtgtgtccaactgtatt

SEQ ID NO: 102834 - DNA, 25 bp, Probe sequence
gcatagtagtgagggggtttttgtt

SEQ ID NO: 102835 - DNA, 25 bp, Probe sequence
gacatgataaaattctaacggcagt

SEQ ID NO: 102836 - DNA, 25 bp, Probe sequence
gagtcgcacttgttgtaaagcaaaa

SEQ ID NO: 102837 - DNA, 25 bp, Probe sequence
gtccaactgtatttagagtcgcact

SEQ ID NO: 102838 - DNA, 25 bp, Probe sequence
gggtatacagttgttcgcatacgcg

SEQ ID NO: 102839 - DNA, 25 bp, Probe sequence
taatgtcctgggcgctacaatgtta

SEQ ID NO: 102840 - DNA, 25 bp, Probe sequence
tacagttgctcgtatgtgtgtccaa

SEQ ID NO: 102841 - DNA, 25 bp, Probe sequence
ttcgcatacgcgtccaactgcataa

SEQ ID NO: 102842 - DNA, 25 bp, Probe sequence
ttgtcgatagcgcgtttgaataaag

SEQ ID NO: 102843 - DNA, 25 bp, Probe sequence
ataagtacgtattgtctatgcattt

SEQ ID NO: 102844 - DNA, 25 bp, Probe sequence
agagataatctctatgctattaatt

SEQ ID NO: 102845 - DNA, 25 bp, Probe sequence
aatgtggaagtttataatacgatgt

SEQ ID NO: 102846 - DNA, 25 bp, Probe sequence
aatgtatggcacaactattaaagtt

SEQ ID NO: 102847 - DNA, 25 bp, Probe sequence
aatctctatgctattaatttttaaa

SEQ ID NO: 102848 - DNA, 25 bp, Probe sequence
aatatggtacaatcactaatagtta

SEQ ID NO: 102849 - DNA, 25 bp, Probe sequence
aatatgatttgaagcgggttacgtt

SEQ ID NO: 102850 - DNA, 25 bp, Probe sequence
gaatttgaacaatgtatggcacaac

SEQ ID NO: 102851 - DNA, 25 bp, Probe sequence
gaagcgctttaattggcagtactgc

SEQ ID NO: 102852 - DNA, 25 bp, Probe sequence
gtactgtaaatttaagtgaagcgct

SEQ ID NO: 102853 - DNA, 25 bp, Probe sequence
gtacgtattgtctatgcattttaca

SEQ ID NO: 102854 - DNA, 25 bp, Probe sequence
gtctatgcattttacaaagaatttg

SEQ ID NO: 102855 - DNA, 25 bp, Probe sequence
tgatttgaagcgggttacgttttcg

SEQ ID NO: 102856 - DNA, 25 bp, Probe sequence
taattggtataatgggcgagtaaat

SEQ ID NO: 102857 - DNA, 25 bp, Probe sequence
ttggcagtactgcaatgttagtaaa

SEQ ID NO: 102858 - DNA, 25 bp, Probe sequence
atatctcataaagtggtatggcata

SEQ ID NO: 102859 - DNA, 25 bp, Probe sequence
atacgttcccagtagtatgtcaatt

SEQ ID NO: 102860 - DNA, 25 bp, Probe sequence
atgacaatcctttcatatgaatatt

SEQ ID NO: 102861 - DNA, 25 bp, Probe sequence
acgttcccagtagtatgtcaattga

SEQ ID NO: 102862 - DNA, 25 bp, Probe sequence
aatcctttcatatgaatatttgttc

SEQ ID NO: 102863 - DNA, 25 bp, Probe sequence
aatttaatacgttcccagtagtatg

SEQ ID NO: 102864 - DNA, 25 bp, Probe sequence
gttcccagtagtatgtcaattgatt

SEQ ID NO: 102865 - DNA, 25 bp, Probe sequence
gttttacatatctcataaagtggta

SEQ ID NO: 102866 - DNA, 25 bp, Probe sequence
gtagtatgtcaattgatttttatag

SEQ ID NO: 102867 - DNA, 25 bp, Probe sequence
gtaacaagttttacatatctcataa

SEQ ID NO: 102868 - DNA, 25 bp, Probe sequence
gtcaattgatttttatagttgtaac

SEQ ID NO: 102869 - DNA, 25 bp, Probe sequence
gtggtatggcatagagaataataaa

SEQ ID NO: 102870 - DNA, 25 bp, Probe sequence
taatacgttcccagtagtatgtcaa

SEQ ID NO: 102871 - DNA, 25 bp, Probe sequence
tcccagtagtatgtcaattgatttt

SEQ ID NO: 102872 - DNA, 25 bp, Probe sequence
tattaatttaatacgttcccagtag

SEQ ID NO: 102873 - DNA, 25 bp, Probe sequence
atcgatgcaatggcagtaggttaaa

SEQ ID NO: 102874 - DNA, 25 bp, Probe sequence
agacataaaaaacctactgccattg

SEQ ID NO: 102875 - DNA, 25 bp, Probe sequence
acctactgccattgaaaagtttaat

SEQ ID NO: 102876 - DNA, 25 bp, Probe sequence
actgccattgaaaagtttaatcgat

SEQ ID NO: 102877 - DNA, 25 bp, Probe sequence
acataaaaaacctactgccattgaa

SEQ ID NO: 102878 - DNA, 25 bp, Probe sequence
aaagtttaatcgatgcaatggcagt

SEQ ID NO: 102879 - DNA, 25 bp, Probe sequence
aaagacataaaaaacctactgccat

SEQ ID NO: 102880 - DNA, 25 bp, Probe sequence
aagacataaaaaacctactgccatt

SEQ ID NO: 102881 - DNA, 25 bp, Probe sequence
cataaaaaacctactgccattgaaa

SEQ ID NO: 102882 - DNA, 25 bp, Probe sequence
gaaaagtttaatcgatgcaatggca

SEQ ID NO: 102883 - DNA, 25 bp, Probe sequence
gacataaaaaacctactgccattga

SEQ ID NO: 102884 - DNA, 25 bp, Probe sequence
gatgcaatggcagtaggttaaaatt

SEQ ID NO: 102885 - DNA, 25 bp, Probe sequence
gtttaatcgatgcaatggcagtagg

SEQ ID NO: 102886 - DNA, 25 bp, Probe sequence
taatcgatgcaatggcagtaggtta

SEQ ID NO: 102887 - DNA, 25 bp, Probe sequence
taaaaaacctactgccattgaaaag

SEQ ID NO: 102888 - DNA, 25 bp, Probe sequence
atattttaacacatttttcttatga

SEQ ID NO: 102889 - DNA, 25 bp, Probe sequence
agtaggagcgcctgcgctaagcgca

SEQ ID NO: 102890 - DNA, 25 bp, Probe sequence
agataattcacttagttattttaga

SEQ ID NO: 102891 - DNA, 25 bp, Probe sequence
agcgcctgcgctaagcgcatgcata

SEQ ID NO: 102892 - DNA, 25 bp, Probe sequence
accaactttccatacagcagaaaat

SEQ ID NO: 102893 - DNA, 25 bp, Probe sequence
aaagtattggagacctcttcatata

SEQ ID NO: 102894 - DNA, 25 bp, Probe sequence
gctaagcgcatgcataagagcccct

SEQ ID NO: 102895 - DNA, 25 bp, Probe sequence
gattttcatcttttgcttctactta

SEQ ID NO: 102896 - DNA, 25 bp, Probe sequence
gttgaaaagtaggagcgcctgcgct

SEQ ID NO: 102897 - DNA, 25 bp, Probe sequence
gtttcaagagttaaagattttcatc

SEQ ID NO: 102898 - DNA, 25 bp, Probe sequence
ggagacctcttcatatatagataat

SEQ ID NO: 102899 - DNA, 25 bp, Probe sequence
tgcttctacttactacaaatatatt

SEQ ID NO: 102900 - DNA, 25 bp, Probe sequence
taaaaccaactttccatacagcaga

SEQ ID NO: 102901 - DNA, 25 bp, Probe sequence
tttcttatgaattgtagttctgaac

SEQ ID NO: 102902 - DNA, 25 bp, Probe sequence
ttcatcttttgcttctacttactac

SEQ ID NO: 102903 - DNA, 25 bp, Probe sequence
attcgctttgaccggcattttgaag

SEQ ID NO: 102904 - DNA, 25 bp, Probe sequence
ctttgaccggcattttgaaggctat

SEQ ID NO: 102905 - DNA, 25 bp, Probe sequence
ctattcgctttgaccggcattttga

SEQ ID NO: 102906 - DNA, 25 bp, Probe sequence
cgctttgaccggcattttgaaggct

SEQ ID NO: 102907 - DNA, 25 bp, Probe sequence
gctttgaccggcattttgaaggcta

SEQ ID NO: 102908 - DNA, 25 bp, Probe sequence
gcattttgaaggctatttttaaata

SEQ ID NO: 102909 - DNA, 25 bp, Probe sequence
gaccggcattttgaaggctattttt

SEQ ID NO: 102910 - DNA, 25 bp, Probe sequence
ggcattttgaaggctatttttaaat

SEQ ID NO: 102911 - DNA, 25 bp, Probe sequence
tgaccggcattttgaaggctatttt

SEQ ID NO: 102912 - DNA, 25 bp, Probe sequence
tctattcgctttgaccggcattttg

SEQ ID NO: 102913 - DNA, 25 bp, Probe sequence
tcgctttgaccggcattttgaaggc

SEQ ID NO: 102914 - DNA, 25 bp, Probe sequence
tattcgctttgaccggcattttgaa

SEQ ID NO: 102915 - DNA, 25 bp, Probe sequence
tttgaccggcattttgaaggctatt

SEQ ID NO: 102916 - DNA, 25 bp, Probe sequence
ttcgctttgaccggcattttgaagg

SEQ ID NO: 102917 - DNA, 25 bp, Probe sequence
ttgaccggcattttgaaggctattt

SEQ ID NO: 102918 - DNA, 25 bp, Probe sequence
agccgaaaaggttggtgctcttctt

SEQ ID NO: 102919 - DNA, 25 bp, Probe sequence
atgtctattttgaagggagcatatc

SEQ ID NO: 102920 - DNA, 25 bp, Probe sequence
atgtcactcaactgtttatcgagtt

SEQ ID NO: 102921 - DNA, 25 bp, Probe sequence
agactgacgatttctctttcaaagt

SEQ ID NO: 102922 - DNA, 25 bp, Probe sequence
acgatttctctttcaaagttttcat

SEQ ID NO: 102923 - DNA, 25 bp, Probe sequence
acttatactatgaattactgtttaa

SEQ ID NO: 102924 - DNA, 25 bp, Probe sequence
aaaggggtgatgcctatggttatag

SEQ ID NO: 102925 - DNA, 25 bp, Probe sequence
aagtgtgcatgttataatatttatt

SEQ ID NO: 102926 - DNA, 25 bp, Probe sequence
caagggtatgtcactcaactgttta

SEQ ID NO: 102927 - DNA, 25 bp, Probe sequence
gaagggagcatatcagccgaaaagg

SEQ ID NO: 102928 - DNA, 25 bp, Probe sequence
gatgaacaaacgataacaggggaag

SEQ ID NO: 102929 - DNA, 25 bp, Probe sequence
gatagatggtggctaatctcttaat

SEQ ID NO: 102930 - DNA, 25 bp, Probe sequence
ggggaagaaatagctagttagacaa

SEQ ID NO: 102931 - DNA, 25 bp, Probe sequence
ggttggtgctcttctttatcagaga

SEQ ID NO: 102932 - DNA, 25 bp, Probe sequence
tggtggctaatctcttaataaaggg

SEQ ID NO: 102933 - DNA, 25 bp, Probe sequence
attgattcaactttatctttttcta

SEQ ID NO: 102934 - DNA, 25 bp, Probe sequence
atatttttgttattgattcaacttt

SEQ ID NO: 102935 - DNA, 25 bp, Probe sequence
atctcttccaaatgcaattcgtctt

SEQ ID NO: 102936 - DNA, 25 bp, Probe sequence
acttgaaatttaaaaccatcagcga

SEQ ID NO: 102937 - DNA, 25 bp, Probe sequence
aaaacttaggaatctcttccaaatg

SEQ ID NO: 102938 - DNA, 25 bp, Probe sequence
caaatgcaattcgtcttggtaagca

SEQ ID NO: 102939 - DNA, 25 bp, Probe sequence
gcaattcgtcttggtaagcattaat

SEQ ID NO: 102940 - DNA, 25 bp, Probe sequence
gattcaactttatctttttctaggg

SEQ ID NO: 102941 - DNA, 25 bp, Probe sequence
tctagggaggccggaaatacaaggt

SEQ ID NO: 102942 - DNA, 25 bp, Probe sequence
gtcttggtaagcattaatttcatct

SEQ ID NO: 102943 - DNA, 25 bp, Probe sequence
ggtaagcattaatttcatctaatat

SEQ ID NO: 102944 - DNA, 25 bp, Probe sequence
ggaatctcttccaaatgcaattcgt

SEQ ID NO: 102945 - DNA, 25 bp, Probe sequence
tcaactttatctttttctagggagg

SEQ ID NO: 102946 - DNA, 25 bp, Probe sequence
tcttccaaatgcaattcgtcttggt

SEQ ID NO: 102947 - DNA, 25 bp, Probe sequence
taatttcatctaatatttttgttat

SEQ ID NO: 102948 - DNA, 25 bp, Probe sequence
atcaaacatttcattccataagtaa

SEQ ID NO: 102949 - DNA, 25 bp, Probe sequence
atcgcatttgtgattttgggataat

SEQ ID NO: 102950 - DNA, 25 bp, Probe sequence
atggtttatgcatttaagtatacta

SEQ ID NO: 102951 - DNA, 25 bp, Probe sequence
agtaggggtgtatttgcgttagagc

SEQ ID NO: 102952 - DNA, 25 bp, Probe sequence
agcatcaccttttatatggtttatg

SEQ ID NO: 102953 - DNA, 25 bp, Probe sequence
aacatttcattccataagtaagata

SEQ ID NO: 102954 - DNA, 25 bp, Probe sequence
tatttgcgttagagcccctaacaac

SEQ ID NO: 102955 - DNA, 25 bp, Probe sequence
ccctaacaactccaaaatcgcattt

SEQ ID NO: 102956 - DNA, 25 bp, Probe sequence
gcccctaacaactccaaaatcgcat

SEQ ID NO: 102957 - DNA, 25 bp, Probe sequence
gtgtatttgcgttagagcccctaac

SEQ ID NO: 102958 - DNA, 25 bp, Probe sequence
gggataatcaaacatttcattccat

SEQ ID NO: 102959 - DNA, 25 bp, Probe sequence
gggtgtatttgcgttagagccccta

SEQ ID NO: 102960 - DNA, 25 bp, Probe sequence
taagtatactataacaactaccgtt

SEQ ID NO: 102961 - DNA, 25 bp, Probe sequence
tatactataacaactaccgttattt

SEQ ID NO: 102962 - DNA, 25 bp, Probe sequence
tattagcatcaccttttatatggtt

SEQ ID NO: 102963 - DNA, 25 bp, Probe sequence
agaaaatgtcttactgctcctttgt

SEQ ID NO: 102964 - DNA, 25 bp, Probe sequence
aaaatgtcttactgctcctttgtat

SEQ ID NO: 102965 - DNA, 25 bp, Probe sequence
cttactgctcctttgtatgctagta

SEQ ID NO: 102966 - DNA, 25 bp, Probe sequence
ctgctcctttgtatgctagtaatcc

SEQ ID NO: 102967 - DNA, 25 bp, Probe sequence
gctcctttgtatgctagtaatccag

SEQ ID NO: 102968 - DNA, 25 bp, Probe sequence
gctagtaatccagatactagtgtta

SEQ ID NO: 102969 - DNA, 25 bp, Probe sequence
gcagtaaagttattttctattagaa

SEQ ID NO: 102970 - DNA, 25 bp, Probe sequence
gaaaatgtcttactgctcctttgta

SEQ ID NO: 102971 - DNA, 25 bp, Probe sequence
gagcagtaaagttattttctattag

SEQ ID NO: 102972 - DNA, 25 bp, Probe sequence
gatgagtaatgtacaaagagcagta

SEQ ID NO: 102973 - DNA, 25 bp, Probe sequence
tcctttgtatgctagtaatccagat

SEQ ID NO: 102974 - DNA, 25 bp, Probe sequence
tcttactgctcctttgtatgctagt

SEQ ID NO: 102975 - DNA, 25 bp, Probe sequence
tactgctcctttgtatgctagtaat

SEQ ID NO: 102976 - DNA, 25 bp, Probe sequence
tttgtatgctagtaatccagatact

SEQ ID NO: 102977 - DNA, 25 bp, Probe sequence
ttagaaaatgtcttactgctccttt

SEQ ID NO: 102978 - DNA, 25 bp, Probe sequence
atggcacccttttagattaatcgac

SEQ ID NO: 102979 - DNA, 25 bp, Probe sequence
agtagcaataaaggggtgacctcgc

SEQ ID NO: 102980 - DNA, 25 bp, Probe sequence
aagtatatggcacccttttagatta

SEQ ID NO: 102981 - DNA, 25 bp, Probe sequence
aagggtgttatgttaatatgatttt

SEQ ID NO: 102982 - DNA, 25 bp, Probe sequence
aatagtctgacaattaagggtgtta

SEQ ID NO: 102983 - DNA, 25 bp, Probe sequence
gcttttacttcatcttaatttggca

SEQ ID NO: 102984 - DNA, 25 bp, Probe sequence
gcacccttttagattaatcgactag

SEQ ID NO: 102985 - DNA, 25 bp, Probe sequence
gacttagcttttacttcatcttaat

SEQ ID NO: 102986 - DNA, 25 bp, Probe sequence
gattttatgagaagtatggagtagc

SEQ ID NO: 102987 - DNA, 25 bp, Probe sequence
gtcgacttagcttttacttcatctt

SEQ ID NO: 102988 - DNA, 25 bp, Probe sequence
ggtgcttttttaggtcgacttagct

SEQ ID NO: 102989 - DNA, 25 bp, Probe sequence
tcacttttttagaatcaatcatgta

SEQ ID NO: 102990 - DNA, 25 bp, Probe sequence
taatcgactagaagggtgctttttt

SEQ ID NO: 102991 - DNA, 25 bp, Probe sequence
tacttcatcttaatttggcagaaat

SEQ ID NO: 102992 - DNA, 25 bp, Probe sequence
ttaggtcgacttagcttttacttca

SEQ ID NO: 102993 - DNA, 25 bp, Probe sequence
atttacgcgtactattccaatatgg

SEQ ID NO: 102994 - DNA, 25 bp, Probe sequence
atgctatcccggatgtggctcattc

SEQ ID NO: 102995 - DNA, 25 bp, Probe sequence
aggttaatatatgagtggcctttat

SEQ ID NO: 102996 - DNA, 25 bp, Probe sequence
agattgtcaatctaaattatcggca

SEQ ID NO: 102997 - DNA, 25 bp, Probe sequence
agcatgttcctatttatattatgaa

SEQ ID NO: 102998 - DNA, 25 bp, Probe sequence
acaacaccgttgtacaataatgatt

SEQ ID NO: 102999 - DNA, 25 bp, Probe sequence
aaagcgcctgtgcaaataaatattt

SEQ ID NO: 103000 - DNA, 25 bp, Probe sequence
gaatagatcggcggatgctatcccg

SEQ ID NO: 103001 - DNA, 25 bp, Probe sequence
gaatgcgataatagcatgttcctat

SEQ ID NO: 103002 - DNA, 25 bp, Probe sequence
gagtggcctttatagagtgcaatat

SEQ ID NO: 103003 - DNA, 25 bp, Probe sequence
gatgtggctcattcgttagcttatt

SEQ ID NO: 103004 - DNA, 25 bp, Probe sequence
ggaaagttcggcagtacagttaaag

SEQ ID NO: 103005 - DNA, 25 bp, Probe sequence
ggacaaagttaataagatcgccaga

SEQ ID NO: 103006 - DNA, 25 bp, Probe sequence
ggaaagtacagtgtgagcaatttgt

SEQ ID NO: 103007 - DNA, 25 bp, Probe sequence
ggcagtacagttaaagcgcctgtgc

SEQ ID NO: 103008 - DNA, 25 bp, Probe sequence
atttacacctcttttttaatatatg

SEQ ID NO: 103009 - DNA, 25 bp, Probe sequence
atatatagtgtatagagacgttact

SEQ ID NO: 103010 - DNA, 25 bp, Probe sequence
atatagtgtatagagacgttacttg

SEQ ID NO: 103011 - DNA, 25 bp, Probe sequence
atatgtgactatatatagtgtatag

SEQ ID NO: 103012 - DNA, 25 bp, Probe sequence
acctcttttttaatatatgtgacta

SEQ ID NO: 103013 - DNA, 25 bp, Probe sequence
acacctcttttttaatatatgtgac

SEQ ID NO: 103014 - DNA, 25 bp, Probe sequence
cacctcttttttaatatatgtgact

SEQ ID NO: 103015 - DNA, 25 bp, Probe sequence
ctcttttttaatatatgtgactata

SEQ ID NO: 103016 - DNA, 25 bp, Probe sequence
cctcttttttaatatatgtgactat

SEQ ID NO: 103017 - DNA, 25 bp, Probe sequence
tcttttttaatatatgtgactatat

SEQ ID NO: 103018 - DNA, 25 bp, Probe sequence
tacacctcttttttaatatatgtga

SEQ ID NO: 103019 - DNA, 25 bp, Probe sequence
tatatgtgactatatatagtgtata

SEQ ID NO: 103020 - DNA, 25 bp, Probe sequence
tatatagtgtatagagacgttactt

SEQ ID NO: 103021 - DNA, 25 bp, Probe sequence
tttacacctcttttttaatatatgt

SEQ ID NO: 103022 - DNA, 25 bp, Probe sequence
ttacacctcttttttaatatatgtg

SEQ ID NO: 103023 - DNA, 25 bp, Probe sequence
attaacgcaaaaatactcctttcat

SEQ ID NO: 103024 - DNA, 25 bp, Probe sequence
atattgttaattcaacggaactact

SEQ ID NO: 103025 - DNA, 25 bp, Probe sequence
actacattattactgattgttaacg

SEQ ID NO: 103026 - DNA, 25 bp, Probe sequence
aagtgtctatgttgaagggagtatt

SEQ ID NO: 103027 - DNA, 25 bp, Probe sequence
gaataggtcgctgtggctcgaaaat

SEQ ID NO: 103028 - DNA, 25 bp, Probe sequence
aatactcctttcatacataacacaa

SEQ ID NO: 103029 - DNA, 25 bp, Probe sequence
catagggaaatattccttactaagt

SEQ ID NO: 103030 - DNA, 25 bp, Probe sequence
caacggaactactacattattactg

SEQ ID NO: 103031 - DNA, 25 bp, Probe sequence
gcaattgaataggtcgctgtggctc

SEQ ID NO: 103032 - DNA, 25 bp, Probe sequence
gaagggagtattttttatgttcaga

SEQ ID NO: 103033 - DNA, 25 bp, Probe sequence
gaacatctagttatttcatagggaa

SEQ ID NO: 103034 - DNA, 25 bp, Probe sequence
gaaacttcttgtttcaaacaaagct

SEQ ID NO: 103035 - DNA, 25 bp, Probe sequence
gttttagtaatgaccaatagcaatt

SEQ ID NO: 103036 - DNA, 25 bp, Probe sequence
gtcgctgtggctcgaaaataaaaca

SEQ ID NO: 103037 - DNA, 25 bp, Probe sequence
tactaagtaaccaagtctaacagtt

SEQ ID NO: 103038 - DNA, 25 bp, Probe sequence
atgcatcggtttttttgtgtttcta

SEQ ID NO: 103039 - DNA, 25 bp, Probe sequence
agtgaaatcatttaacagcgagaat

SEQ ID NO: 103040 - DNA, 25 bp, Probe sequence
aacagcgagaataatcaaccaggag

SEQ ID NO: 103041 - DNA, 25 bp, Probe sequence
aacgcagatgctactacttatctta

SEQ ID NO: 103042 - DNA, 25 bp, Probe sequence
aatacactggtactcaatatataat

SEQ ID NO: 103043 - DNA, 25 bp, Probe sequence
aattagatagagttgctttgtgttt

SEQ ID NO: 103044 - DNA, 25 bp, Probe sequence
gcgtatgcatcggtttttttgtgtt

SEQ ID NO: 103045 - DNA, 25 bp, Probe sequence
gctttgtgtttttaacgcagatgct

SEQ ID NO: 103046 - DNA, 25 bp, Probe sequence
gcatcggtttttttgtgtttctaga

SEQ ID NO: 103047 - DNA, 25 bp, Probe sequence
gaataatcaaccaggaggatgactt

SEQ ID NO: 103048 - DNA, 25 bp, Probe sequence
gagttgctttgtgtttttaacgcag

SEQ ID NO: 103049 - DNA, 25 bp, Probe sequence
gatgctactacttatcttaacagtt

SEQ ID NO: 103050 - DNA, 25 bp, Probe sequence
gtgtttttaacgcagatgctactac

SEQ ID NO: 103051 - DNA, 25 bp, Probe sequence
tacaaataagccgatgcgtatgcat

SEQ ID NO: 103052 - DNA, 25 bp, Probe sequence
tactacttatcttaacagttgatta

SEQ ID NO: 103053 - DNA, 25 bp, Probe sequence
atattttgctttttgcactactttt

SEQ ID NO: 103054 - DNA, 25 bp, Probe sequence
atgttcgtatgacagtgatgtaaat

SEQ ID NO: 103055 - DNA, 25 bp, Probe sequence
aagtatattttgctttttgcactac

SEQ ID NO: 103056 - DNA, 25 bp, Probe sequence
aatgatttgtagtgtataaagtata

SEQ ID NO: 103057 - DNA, 25 bp, Probe sequence
gaaaaatattacccggaggagatgt

SEQ ID NO: 103058 - DNA, 25 bp, Probe sequence
gacagtgatgtaaatgattggtata

SEQ ID NO: 103059 - DNA, 25 bp, Probe sequence
gtatattttgctttttgcactactt

SEQ ID NO: 103060 - DNA, 25 bp, Probe sequence
gtaaatgattggtataatgggtatt

SEQ ID NO: 103061 - DNA, 25 bp, Probe sequence
tgcactactttttttaattcactaa

SEQ ID NO: 103062 - DNA, 25 bp, Probe sequence
tgctttttgcactactttttttaat

SEQ ID NO: 103063 - DNA, 25 bp, Probe sequence
tatggaaaaatattacccggaggag

SEQ ID NO: 103064 - DNA, 25 bp, Probe sequence
tatatgttcgtatgacagtgatgta

SEQ ID NO: 103065 - DNA, 25 bp, Probe sequence
tattttgctttttgcactacttttt

SEQ ID NO: 103066 - DNA, 25 bp, Probe sequence
tttgcactactttttttaattcact

SEQ ID NO: 103067 - DNA, 25 bp, Probe sequence
ttctatttaaatatatgttcgtatg

SEQ ID NO: 103068 - DNA, 25 bp, Probe sequence
atttgttttggaatgctggtaaaat

SEQ ID NO: 103069 - DNA, 25 bp, Probe sequence
ataatatatgctaaacgtacaaaat

SEQ ID NO: 103070 - DNA, 25 bp, Probe sequence
atgttgatttgttttggaatgctgg

SEQ ID NO: 103071 - DNA, 25 bp, Probe sequence
gttgatttgttttggaatgctggta

SEQ ID NO: 103072 - DNA, 25 bp, Probe sequence
tggaatgctggtaaaataagttctt

SEQ ID NO: 103073 - DNA, 25 bp, Probe sequence
tgtacgtttttatgttgatttgttt

SEQ ID NO: 103074 - DNA, 25 bp, Probe sequence
tgatttgttttggaatgctggtaaa

SEQ ID NO: 103075 - DNA, 25 bp, Probe sequence
tacgtttttatgttgatttgttttg

SEQ ID NO: 103076 - DNA, 25 bp, Probe sequence
tatgctaaacgtacaaaattacttt

SEQ ID NO: 103077 - DNA, 25 bp, Probe sequence
tatgttgatttgttttggaatgctg

SEQ ID NO: 103078 - DNA, 25 bp, Probe sequence
tattttgtacgtttttatgttgatt

SEQ ID NO: 103079 - DNA, 25 bp, Probe sequence
tttgtacgtttttatgttgatttgt

SEQ ID NO: 103080 - DNA, 25 bp, Probe sequence
ttttgtacgtttttatgttgatttg

SEQ ID NO: 103081 - DNA, 25 bp, Probe sequence
ttattttgtacgtttttatgttgat

SEQ ID NO: 103082 - DNA, 25 bp, Probe sequence
ttgtacgtttttatgttgatttgtt

SEQ ID NO: 103083 - DNA, 25 bp, Probe sequence
ataataggctaactgctttttttat

SEQ ID NO: 103084 - DNA, 25 bp, Probe sequence
ataattatagtagttggtctattta

SEQ ID NO: 103085 - DNA, 25 bp, Probe sequence
aaattgttatttgctatgatgtaga

SEQ ID NO: 103086 - DNA, 25 bp, Probe sequence
aaaattgttatttgctatgatgtag

SEQ ID NO: 103087 - DNA, 25 bp, Probe sequence
gctatgatgtagatgtcttaaaatg

SEQ ID NO: 103088 - DNA, 25 bp, Probe sequence
gatgtagatgtcttaaaatgattaa

SEQ ID NO: 103089 - DNA, 25 bp, Probe sequence
gttatttgctatgatgtagatgtct

SEQ ID NO: 103090 - DNA, 25 bp, Probe sequence
gtgatagactaagcaaaaattgtta

SEQ ID NO: 103091 - DNA, 25 bp, Probe sequence
taataggctaactgctttttttatt

SEQ ID NO: 103092 - DNA, 25 bp, Probe sequence
taaaataataggctaactgcttttt

SEQ ID NO: 103093 - DNA, 25 bp, Probe sequence
tagtagttggtctatttaaaataat

SEQ ID NO: 103094 - DNA, 25 bp, Probe sequence
tatacttttagtgatagactaagca

SEQ ID NO: 103095 - DNA, 25 bp, Probe sequence
tatttgctatgatgtagatgtctta

SEQ ID NO: 103096 - DNA, 25 bp, Probe sequence
tttgctatgatgtagatgtcttaaa

SEQ ID NO: 103097 - DNA, 25 bp, Probe sequence
ttaaaatgattaagggggatttgct

SEQ ID NO: 103098 - DNA, 25 bp, Probe sequence
atctgaagttgagggcacatatgtg

SEQ ID NO: 103099 - DNA, 25 bp, Probe sequence
aaataaccattgtatgagtctgaga

SEQ ID NO: 103100 - DNA, 25 bp, Probe sequence
aagggacaagtgtatatctgtttta

SEQ ID NO: 103101 - DNA, 25 bp, Probe sequence
cattatgttaatggctatatgtatt

SEQ ID NO: 103102 - DNA, 25 bp, Probe sequence
gcttctttatcatttgagtactact

SEQ ID NO: 103103 - DNA, 25 bp, Probe sequence
gaatcgataatagtgagtcttagtg

SEQ ID NO: 103104 - DNA, 25 bp, Probe sequence
gagtcttagtgctcaatttgtggta

SEQ ID NO: 103105 - DNA, 25 bp, Probe sequence
gtagtgcttctttatcatttgagta

SEQ ID NO: 103106 - DNA, 25 bp, Probe sequence
gtgttccaacttctttttgttcaat

SEQ ID NO: 103107 - DNA, 25 bp, Probe sequence
gggcacatatgtgttccaacttctt

SEQ ID NO: 103108 - DNA, 25 bp, Probe sequence
tgagtactactcccattatgttaat

SEQ ID NO: 103109 - DNA, 25 bp, Probe sequence
tatgtgttccaacttctttttgttc

SEQ ID NO: 103110 - DNA, 25 bp, Probe sequence
tttattatgtagtgcttctttatca

SEQ ID NO: 103111 - DNA, 25 bp, Probe sequence
ttattaggccctacaatgttatatt

SEQ ID NO: 103112 - DNA, 25 bp, Probe sequence
ttccaacttctttttgttcaataga

SEQ ID NO: 103113 - DNA, 25 bp, Probe sequence
atactagataaatcgttcaatattt

SEQ ID NO: 103114 - DNA, 25 bp, Probe sequence
ataataaatttcctagatactagat

SEQ ID NO: 103115 - DNA, 25 bp, Probe sequence
actagataaatcgttcaatatttta

SEQ ID NO: 103116 - DNA, 25 bp, Probe sequence
aaataataaatttcctagatactag

SEQ ID NO: 103117 - DNA, 25 bp, Probe sequence
aatcgttcaatattttattaataag

SEQ ID NO: 103118 - DNA, 25 bp, Probe sequence
aataataaatttcctagatactaga

SEQ ID NO: 103119 - DNA, 25 bp, Probe sequence
caatattttattaataaggaggcca

SEQ ID NO: 103120 - DNA, 25 bp, Probe sequence
ctagatactagataaatcgttcaat

SEQ ID NO: 103121 - DNA, 25 bp, Probe sequence
cctagatactagataaatcgttcaa

SEQ ID NO: 103122 - DNA, 25 bp, Probe sequence
gataaatcgttcaatattttattaa

SEQ ID NO: 103123 - DNA, 25 bp, Probe sequence
gatactagataaatcgttcaatatt

SEQ ID NO: 103124 - DNA, 25 bp, Probe sequence
tcctagatactagataaatcgttca

SEQ ID NO: 103125 - DNA, 25 bp, Probe sequence
taaatcgttcaatattttattaata

SEQ ID NO: 103126 - DNA, 25 bp, Probe sequence
tagatactagataaatcgttcaata

SEQ ID NO: 103127 - DNA, 25 bp, Probe sequence
ttgatgtagtgtaattaaagtaaga

SEQ ID NO: 103128 - DNA, 25 bp, Probe sequence
attatcgttaagatttgaaagtcaa

SEQ ID NO: 103129 - DNA, 25 bp, Probe sequence
atacatatgaaaaccaattatttgt

SEQ ID NO: 103130 - DNA, 25 bp, Probe sequence
atcattctaataggggattgtattg

SEQ ID NO: 103131 - DNA, 25 bp, Probe sequence
aaatcattctaataggggattgtat

SEQ ID NO: 103132 - DNA, 25 bp, Probe sequence
aagtcaaaagtgtttatacatatga

SEQ ID NO: 103133 - DNA, 25 bp, Probe sequence
cattctaataggggattgtattgta

SEQ ID NO: 103134 - DNA, 25 bp, Probe sequence
ccgctttttttattacataaatcat

SEQ ID NO: 103135 - DNA, 25 bp, Probe sequence
gaattatcgttaagatttgaaagtc

SEQ ID NO: 103136 - DNA, 25 bp, Probe sequence
gattgtattgtaatagaattatcgt

SEQ ID NO: 103137 - DNA, 25 bp, Probe sequence
tgaaagtcaaaagtgtttatacata

SEQ ID NO: 103138 - DNA, 25 bp, Probe sequence
tccgctttttttattacataaatca

SEQ ID NO: 103139 - DNA, 25 bp, Probe sequence
tagaaaagctgggggaaactccgct

SEQ ID NO: 103140 - DNA, 25 bp, Probe sequence
taggggattgtattgtaatagaatt

SEQ ID NO: 103141 - DNA, 25 bp, Probe sequence
tatgaaaaccaattatttgtaaata

SEQ ID NO: 103142 - DNA, 25 bp, Probe sequence
ttacataaatcattctaatagggga

SEQ ID NO: 103143 - DNA, 25 bp, Probe sequence
attcaaacacatcctttaaatattt

SEQ ID NO: 103144 - DNA, 25 bp, Probe sequence
atatgttcgtgtttttgttagggat

SEQ ID NO: 103145 - DNA, 25 bp, Probe sequence
atgttcgtgtttttgttagggatgt

SEQ ID NO: 103146 - DNA, 25 bp, Probe sequence
agggatgtggtaaaatgtgagtatt

SEQ ID NO: 103147 - DNA, 25 bp, Probe sequence
caagagttatgtgatacttttttaa

SEQ ID NO: 103148 - DNA, 25 bp, Probe sequence
cacatcctttaaatattttgtaaat

SEQ ID NO: 103149 - DNA, 25 bp, Probe sequence
gaaaatatgttcgtgtttttgttag

SEQ ID NO: 103150 - DNA, 25 bp, Probe sequence
gatacttttttaaattgtgtcatac

SEQ ID NO: 103151 - DNA, 25 bp, Probe sequence
gattttgtaatcgttttcaagagtt

SEQ ID NO: 103152 - DNA, 25 bp, Probe sequence
gttcgtgtttttgttagggatgtgg

SEQ ID NO: 103153 - DNA, 25 bp, Probe sequence
gtaaatacatcataaacgattttgt

SEQ ID NO: 103154 - DNA, 25 bp, Probe sequence
gtaatcgttttcaagagttatgtga

SEQ ID NO: 103155 - DNA, 25 bp, Probe sequence
gtcatactaatgaattttaacccga

SEQ ID NO: 103156 - DNA, 25 bp, Probe sequence
tcgtgtttttgttagggatgtggta

SEQ ID NO: 103157 - DNA, 25 bp, Probe sequence
tacttttttaaattgtgtcatacta

SEQ ID NO: 103158 - DNA, 25 bp, Probe sequence
attatgagaacagttgtccttttgt

SEQ ID NO: 103159 - DNA, 25 bp, Probe sequence
atatgtgaaaaaggacaactgttaa

SEQ ID NO: 103160 - DNA, 25 bp, Probe sequence
atgagaacagttgtccttttgtatt

SEQ ID NO: 103161 - DNA, 25 bp, Probe sequence
aggacaactgttaaaattatgagaa

SEQ ID NO: 103162 - DNA, 25 bp, Probe sequence
aaattatgagaacagttgtcctttt

SEQ ID NO: 103163 - DNA, 25 bp, Probe sequence
aaaggacaactgttaaaattatgag

SEQ ID NO: 103164 - DNA, 25 bp, Probe sequence
aaaattatgagaacagttgtccttt

SEQ ID NO: 103165 - DNA, 25 bp, Probe sequence
aattatgagaacagttgtccttttg

SEQ ID NO: 103166 - DNA, 25 bp, Probe sequence
gagaacagttgtccttttgtatttt

SEQ ID NO: 103167 - DNA, 25 bp, Probe sequence
ggacaactgttaaaattatgagaac

SEQ ID NO: 103168 - DNA, 25 bp, Probe sequence
tgagaacagttgtccttttgtattt

SEQ ID NO: 103169 - DNA, 25 bp, Probe sequence
taaaattatgagaacagttgtcctt

SEQ ID NO: 103170 - DNA, 25 bp, Probe sequence
tatgagaacagttgtccttttgtat

SEQ ID NO: 103171 - DNA, 25 bp, Probe sequence
ttatgagaacagttgtccttttgta

SEQ ID NO: 103172 - DNA, 25 bp, Probe sequence
ttaaaattatgagaacagttgtcct

SEQ ID NO: 103173 - DNA, 25 bp, Probe sequence
atagcgtatatttaataactgtaat

SEQ ID NO: 103174 - DNA, 25 bp, Probe sequence
atacttaaaacgaatacatagagaa

SEQ ID NO: 103175 - DNA, 25 bp, Probe sequence
atgtttgttaactgaatagaattct

SEQ ID NO: 103176 - DNA, 25 bp, Probe sequence
aaattacaagtaatagcgtatattt

SEQ ID NO: 103177 - DNA, 25 bp, Probe sequence
cttaaccttttttgaattcatcttg

SEQ ID NO: 103178 - DNA, 25 bp, Probe sequence
gaattctgtatatacttaaaacgaa

SEQ ID NO: 103179 - DNA, 25 bp, Probe sequence
gaatagaattctgtatatacttaaa

SEQ ID NO: 103180 - DNA, 25 bp, Probe sequence
gaaatcagtaattgtacttaacctt

SEQ ID NO: 103181 - DNA, 25 bp, Probe sequence
ggttaagtacgaaatcagtaattgt

SEQ ID NO: 103182 - DNA, 25 bp, Probe sequence
tgataaggaatatgtttgttaactg

SEQ ID NO: 103183 - DNA, 25 bp, Probe sequence
taaccttttttgaattcatcttgaa

SEQ ID NO: 103184 - DNA, 25 bp, Probe sequence
tacttaaccttttttgaattcatct

SEQ ID NO: 103185 - DNA, 25 bp, Probe sequence
tattttgcatacataaacattttga

SEQ ID NO: 103186 - DNA, 25 bp, Probe sequence
tttgcatacataaacattttgaaag

SEQ ID NO: 103187 - DNA, 25 bp, Probe sequence
ttattcattattttgcatacataaa

SEQ ID NO: 103188 - DNA, 25 bp, Probe sequence
attacagggataacggtcatgctaa

SEQ ID NO: 103189 - DNA, 25 bp, Probe sequence
atcaaattaagtgcaacagttcgtc

SEQ ID NO: 103190 - DNA, 25 bp, Probe sequence
agatgatatagcaatgatacattat

SEQ ID NO: 103191 - DNA, 25 bp, Probe sequence
acttagattttttgtatttgttgat

SEQ ID NO: 103192 - DNA, 25 bp, Probe sequence
aaatggtgtcaattgtattaatgca

SEQ ID NO: 103193 - DNA, 25 bp, Probe sequence
aaaaagattgaacgctacttgacaa

SEQ ID NO: 103194 - DNA, 25 bp, Probe sequence
aacagttcgtcacataaaattgcaa

SEQ ID NO: 103195 - DNA, 25 bp, Probe sequence
aacggtcatgctaaatggtgtcaat

SEQ ID NO: 103196 - DNA, 25 bp, Probe sequence
aatatatagtcatacattttagaaa

SEQ ID NO: 103197 - DNA, 25 bp, Probe sequence
gaacgctacttgacaatgataattg

SEQ ID NO: 103198 - DNA, 25 bp, Probe sequence
gataatatcagctgaattacaggga

SEQ ID NO: 103199 - DNA, 25 bp, Probe sequence
ggaaatgtgctaattgtagtcataa

SEQ ID NO: 103200 - DNA, 25 bp, Probe sequence
tcgtcacataaaattgcaacagata

SEQ ID NO: 103201 - DNA, 25 bp, Probe sequence
taagtgcaacagttcgtcacataaa

SEQ ID NO: 103202 - DNA, 25 bp, Probe sequence
tacattatcagtattttgtctaagg

SEQ ID NO: 103203 - DNA, 25 bp, Probe sequence
attatcaacagaatgcgggtgtaag

SEQ ID NO: 103204 - DNA, 25 bp, Probe sequence
ataatgattcttattatcaacagaa

SEQ ID NO: 103205 - DNA, 25 bp, Probe sequence
atcaacagaatgcgggtgtaagttt

SEQ ID NO: 103206 - DNA, 25 bp, Probe sequence
acctctatgaaatattttacaaaag

SEQ ID NO: 103207 - DNA, 25 bp, Probe sequence
aattcacctctatgaaatattttac

SEQ ID NO: 103208 - DNA, 25 bp, Probe sequence
gcaagatagatttgtataatccata

SEQ ID NO: 103209 - DNA, 25 bp, Probe sequence
gatagatttgtataatccatattaa

SEQ ID NO: 103210 - DNA, 25 bp, Probe sequence
gatttgtataatccatattaatgat

SEQ ID NO: 103211 - DNA, 25 bp, Probe sequence
gattcttattatcaacagaatgcgg

SEQ ID NO: 103212 - DNA, 25 bp, Probe sequence
tcttattatcaacagaatgcgggtg

SEQ ID NO: 103213 - DNA, 25 bp, Probe sequence
tcacctctatgaaatattttacaaa

SEQ ID NO: 103214 - DNA, 25 bp, Probe sequence
tcaacagaatgcgggtgtaagtttt

SEQ ID NO: 103215 - DNA, 25 bp, Probe sequence
tattatcaacagaatgcgggtgtaa

SEQ ID NO: 103216 - DNA, 25 bp, Probe sequence
ttattatcaacagaatgcgggtgta

SEQ ID NO: 103217 - DNA, 25 bp, Probe sequence
ttatcaacagaatgcgggtgtaagt

SEQ ID NO: 103218 - DNA, 25 bp, Probe sequence
attttagtgccgagcttttttgtga

SEQ ID NO: 103219 - DNA, 25 bp, Probe sequence
atgtattattctctcatttgtatag

SEQ ID NO: 103220 - DNA, 25 bp, Probe sequence
accattttagtgccgagcttttttg

SEQ ID NO: 103221 - DNA, 25 bp, Probe sequence
aaaaaagctcggcacaccattttag

SEQ ID NO: 103222 - DNA, 25 bp, Probe sequence
aaaagctcggcacaccattttagtg

SEQ ID NO: 103223 - DNA, 25 bp, Probe sequence
aagctcggcacaccattttagtgcc

SEQ ID NO: 103224 - DNA, 25 bp, Probe sequence
cacaccattttagtgccgagctttt

SEQ ID NO: 103225 - DNA, 25 bp, Probe sequence
gataaaaaagctcggcacaccattt

SEQ ID NO: 103226 - DNA, 25 bp, Probe sequence
gttaatgtaatccttgagctcacga

SEQ ID NO: 103227 - DNA, 25 bp, Probe sequence
gtaatccttgagctcacgattaata

SEQ ID NO: 103228 - DNA, 25 bp, Probe sequence
taatgtaatccttgagctcacgatt

SEQ ID NO: 103229 - DNA, 25 bp, Probe sequence
tagtgccgagcttttttgtgatttt

SEQ ID NO: 103230 - DNA, 25 bp, Probe sequence
tatggaaaatgtattattctctcat

SEQ ID NO: 103231 - DNA, 25 bp, Probe sequence
tattctctcatttgtatagattgta

SEQ ID NO: 103232 - DNA, 25 bp, Probe sequence
ttgagctcacgattaataaaattct

SEQ ID NO: 103233 - DNA, 25 bp, Probe sequence
attactaaatggtacttcatcttat

SEQ ID NO: 103234 - DNA, 25 bp, Probe sequence
atattactaaatggtacttcatctt

SEQ ID NO: 103235 - DNA, 25 bp, Probe sequence
atggtacttcatcttatatattaaa

SEQ ID NO: 103236 - DNA, 25 bp, Probe sequence
actaaatggtacttcatcttatata

SEQ ID NO: 103237 - DNA, 25 bp, Probe sequence
aaatggtacttcatcttatatatta

SEQ ID NO: 103238 - DNA, 25 bp, Probe sequence
aaaaactgatgggtacatatttaat

SEQ ID NO: 103239 - DNA, 25 bp, Probe sequence
aactgatgggtacatatttaatatg

SEQ ID NO: 103240 - DNA, 25 bp, Probe sequence
ctaaatggtacttcatcttatatat

SEQ ID NO: 103241 - DNA, 25 bp, Probe sequence
gtacttcatcttatatattaaaaat

SEQ ID NO: 103242 - DNA, 25 bp, Probe sequence
ggtacttcatcttatatattaaaaa

SEQ ID NO: 103243 - DNA, 25 bp, Probe sequence
tggtacttcatcttatatattaaaa

SEQ ID NO: 103244 - DNA, 25 bp, Probe sequence
taaatggtacttcatcttatatatt

SEQ ID NO: 103245 - DNA, 25 bp, Probe sequence
tacaaaaactagggaatatattact

SEQ ID NO: 103246 - DNA, 25 bp, Probe sequence
tactaaatggtacttcatcttatat

SEQ ID NO: 103247 - DNA, 25 bp, Probe sequence
ttactaaatggtacttcatcttata

SEQ ID NO: 103248 - DNA, 25 bp, Probe sequence
acggaaatatggcaactttacaggt

SEQ ID NO: 103249 - DNA, 25 bp, Probe sequence
acttattttttgtgtctagcgacta

SEQ ID NO: 103250 - DNA, 25 bp, Probe sequence
aaaatgttgcagttatgggtatgaa

SEQ ID NO: 103251 - DNA, 25 bp, Probe sequence
aagtcgccttatgcagaaaatactg

SEQ ID NO: 103252 - DNA, 25 bp, Probe sequence
gcgactattgattctaaacggaaat

SEQ ID NO: 103253 - DNA, 25 bp, Probe sequence
gcactagaaaggcattacttaaata

SEQ ID NO: 103254 - DNA, 25 bp, Probe sequence
gaaaatactgtatagggcgacttat

SEQ ID NO: 103255 - DNA, 25 bp, Probe sequence
gatgaggcattattaattgtgtcta

SEQ ID NO: 103256 - DNA, 25 bp, Probe sequence
gtgtctagcgactattgattctaaa

SEQ ID NO: 103257 - DNA, 25 bp, Probe sequence
gggcgacttattttttgtgtctagc

SEQ ID NO: 103258 - DNA, 25 bp, Probe sequence
gggtatgaacttaccattacacaga

SEQ ID NO: 103259 - DNA, 25 bp, Probe sequence
ggcaactttacaggtatcaaatcaa

SEQ ID NO: 103260 - DNA, 25 bp, Probe sequence
tgagtgtgttttatatatcattttt

SEQ ID NO: 103261 - DNA, 25 bp, Probe sequence
taaaatactttgttgctcaatgata

SEQ ID NO: 103262 - DNA, 25 bp, Probe sequence
tagtaagtaaagtcgccttatgcag

SEQ ID NO: 103263 - DNA, 25 bp, Probe sequence
atacgaaagtcgtctgtaattattt

SEQ ID NO: 103264 - DNA, 25 bp, Probe sequence
ataactttcttatctaaagcaaatt

SEQ ID NO: 103265 - DNA, 25 bp, Probe sequence
atggcttctattttgtataataaga

SEQ ID NO: 103266 - DNA, 25 bp, Probe sequence
agcacacatggcttctattttgtat

SEQ ID NO: 103267 - DNA, 25 bp, Probe sequence
acacatggcttctattttgtataat

SEQ ID NO: 103268 - DNA, 25 bp, Probe sequence
aaaggagtcatgatgctgcggtata

SEQ ID NO: 103269 - DNA, 25 bp, Probe sequence
caaactaactttgttaattgatcaa

SEQ ID NO: 103270 - DNA, 25 bp, Probe sequence
gcggtataagcacacatggcttcta

SEQ ID NO: 103271 - DNA, 25 bp, Probe sequence
gcaaatttgttcagtaacatggtag

SEQ ID NO: 103272 - DNA, 25 bp, Probe sequence
gaaaaaggagtcatgatgctgcggt

SEQ ID NO: 103273 - DNA, 25 bp, Probe sequence
gaaagtcgtctgtaattatttatat

SEQ ID NO: 103274 - DNA, 25 bp, Probe sequence
gatgctgcggtataagcacacatgg

SEQ ID NO: 103275 - DNA, 25 bp, Probe sequence
gatcaaaatttaataactttcttat

SEQ ID NO: 103276 - DNA, 25 bp, Probe sequence
gtcgtctgtaattatttatatattc

SEQ ID NO: 103277 - DNA, 25 bp, Probe sequence
ggagtcatgatgctgcggtataagc

SEQ ID NO: 103278 - DNA, 25 bp, Probe sequence
aacaactaagaatgtatttgcatac

SEQ ID NO: 103279 - DNA, 25 bp, Probe sequence
catttttaatttatgtttacagcaa

SEQ ID NO: 103280 - DNA, 25 bp, Probe sequence
gctagttttctggggcaaaaaagct

SEQ ID NO: 103281 - DNA, 25 bp, Probe sequence
gcttgtaatattagagcttttcaaa

SEQ ID NO: 103282 - DNA, 25 bp, Probe sequence
gcaactgctagttttctggggcaaa

SEQ ID NO: 103283 - DNA, 25 bp, Probe sequence
gaatcagtgcttaagtcaaaatata

SEQ ID NO: 103284 - DNA, 25 bp, Probe sequence
gaagacacaattaaaacttaacgct

SEQ ID NO: 103285 - DNA, 25 bp, Probe sequence
gagagtttccataaaatgtctaagt

SEQ ID NO: 103286 - DNA, 25 bp, Probe sequence
gttaaatgaatcagtgcttaagtca

SEQ ID NO: 103287 - DNA, 25 bp, Probe sequence
gtatttgcatacagacatcacgaag

SEQ ID NO: 103288 - DNA, 25 bp, Probe sequence
tgtctaagtcgtaacatttttaatt

SEQ ID NO: 103289 - DNA, 25 bp, Probe sequence
tgcatacagacatcacgaagacaca

SEQ ID NO: 103290 - DNA, 25 bp, Probe sequence
tacagacatcacgaagacacaatta

SEQ ID NO: 103291 - DNA, 25 bp, Probe sequence
tatctattgtttgagagtttccata

SEQ ID NO: 103292 - DNA, 25 bp, Probe sequence
ttctggggcaaaaaagcttgtaata

SEQ ID NO: 103293 - DNA, 25 bp, Probe sequence
agtcgagtgctggtaggtctttatt

SEQ ID NO: 103294 - DNA, 25 bp, Probe sequence
agaagcaatcaattaacaaacgtta

SEQ ID NO: 103295 - DNA, 25 bp, Probe sequence
acacaccattgaaagctaaagaagc

SEQ ID NO: 103296 - DNA, 25 bp, Probe sequence
aacggacaactttccaaagtcatct

SEQ ID NO: 103297 - DNA, 25 bp, Probe sequence
aaggcctatcagtcgagtgctggta

SEQ ID NO: 103298 - DNA, 25 bp, Probe sequence
caactttccaaagtcatcttaaaag

SEQ ID NO: 103299 - DNA, 25 bp, Probe sequence
gctggtaggtctttatttatagaaa

SEQ ID NO: 103300 - DNA, 25 bp, Probe sequence
gagtgctggtaggtctttatttata

SEQ ID NO: 103301 - DNA, 25 bp, Probe sequence
gtattcaaaatcaactaaaggacat

SEQ ID NO: 103302 - DNA, 25 bp, Probe sequence
gggtgacacaccattgaaagctaaa

SEQ ID NO: 103303 - DNA, 25 bp, Probe sequence
ggacatttttaatcacatcctttat

SEQ ID NO: 103304 - DNA, 25 bp, Probe sequence
ggcctatcagtcgagtgctggtagg

SEQ ID NO: 103305 - DNA, 25 bp, Probe sequence
ttaaaaggcctatcagtcgagtgct

SEQ ID NO: 103306 - DNA, 25 bp, Probe sequence
tatattaatcaatgggtgacacacc

SEQ ID NO: 103307 - DNA, 25 bp, Probe sequence
ttaatcacatcctttatacttatat

SEQ ID NO: 103308 - DNA, 25 bp, Probe sequence
atatgtcataaacaaacaggttata

SEQ ID NO: 103309 - DNA, 25 bp, Probe sequence
ataggaatgttcacttattgtttga

SEQ ID NO: 103310 - DNA, 25 bp, Probe sequence
atgttcacttattgtttgaaaatat

SEQ ID NO: 103311 - DNA, 25 bp, Probe sequence
atgtcataaacaaacaggttataaa

SEQ ID NO: 103312 - DNA, 25 bp, Probe sequence
aggaatgttcacttattgtttgaaa

SEQ ID NO: 103313 - DNA, 25 bp, Probe sequence
aaatatgtcataaacaaacaggtta

SEQ ID NO: 103314 - DNA, 25 bp, Probe sequence
aacaggttataaacatattatgttg

SEQ ID NO: 103315 - DNA, 25 bp, Probe sequence
aatgttcacttattgtttgaaaata

SEQ ID NO: 103316 - DNA, 25 bp, Probe sequence
caaacaggttataaacatattatgt

SEQ ID NO: 103317 - DNA, 25 bp, Probe sequence
cacttattgtttgaaaatatgtcat

SEQ ID NO: 103318 - DNA, 25 bp, Probe sequence
gaatgttcacttattgtttgaaaat

SEQ ID NO: 103319 - DNA, 25 bp, Probe sequence
gttcacttattgtttgaaaatatgt

SEQ ID NO: 103320 - DNA, 25 bp, Probe sequence
ggaatgttcacttattgtttgaaaa

SEQ ID NO: 103321 - DNA, 25 bp, Probe sequence
tcacttattgtttgaaaatatgtca

SEQ ID NO: 103322 - DNA, 25 bp, Probe sequence
taggaatgttcacttattgtttgaa

SEQ ID NO: 103323 - DNA, 25 bp, Probe sequence
ataaaggataatgacccatcgccta

SEQ ID NO: 103324 - DNA, 25 bp, Probe sequence
acgtcttttgcttttattatagtat

SEQ ID NO: 103325 - DNA, 25 bp, Probe sequence
aacaccccatcaaaataatgaatga

SEQ ID NO: 103326 - DNA, 25 bp, Probe sequence
aataaacaccccatcaaaataatga

SEQ ID NO: 103327 - DNA, 25 bp, Probe sequence
caaaagcgcagtttaaacagttctt

SEQ ID NO: 103328 - DNA, 25 bp, Probe sequence
cttttgcttttattatagtatattc

SEQ ID NO: 103329 - DNA, 25 bp, Probe sequence
gaatgatttataacgtcttttgctt

SEQ ID NO: 103330 - DNA, 25 bp, Probe sequence
tgatttataacgtcttttgctttta

SEQ ID NO: 103331 - DNA, 25 bp, Probe sequence
taacgtcttttgcttttattatagt

SEQ ID NO: 103332 - DNA, 25 bp, Probe sequence
taaattatattagtttttacgcaat

SEQ ID NO: 103333 - DNA, 25 bp, Probe sequence
tagtatattcattttacgattatca

SEQ ID NO: 103334 - DNA, 25 bp, Probe sequence
ttttacgcaatttttattatagaat

SEQ ID NO: 103335 - DNA, 25 bp, Probe sequence
ttatacatataatcgaacagttaaa

SEQ ID NO: 103336 - DNA, 25 bp, Probe sequence
ttataacgtcttttgcttttattat

SEQ ID NO: 103337 - DNA, 25 bp, Probe sequence
ttacgattatcaaaagcgcagttta

SEQ ID NO: 103338 - DNA, 25 bp, Probe sequence
atgggcctttagcgattgaaaatgt

SEQ ID NO: 103339 - DNA, 25 bp, Probe sequence
acgaatgggcctttagcgattgaaa

SEQ ID NO: 103340 - DNA, 25 bp, Probe sequence
aaatgttataaagtagcatcccaac

SEQ ID NO: 103341 - DNA, 25 bp, Probe sequence
aatgggcctttagcgattgaaaatg

SEQ ID NO: 103342 - DNA, 25 bp, Probe sequence
aatgttataaagtagcatcccaaca

SEQ ID NO: 103343 - DNA, 25 bp, Probe sequence
cgaatgggcctttagcgattgaaaa

SEQ ID NO: 103344 - DNA, 25 bp, Probe sequence
gcctttagcgattgaaaatgttata

SEQ ID NO: 103345 - DNA, 25 bp, Probe sequence
gggcctttagcgattgaaaatgtta

SEQ ID NO: 103346 - DNA, 25 bp, Probe sequence
gaatgggcctttagcgattgaaaat

SEQ ID NO: 103347 - DNA, 25 bp, Probe sequence
tttttacgaatgggcctttagcgat

SEQ ID NO: 103348 - DNA, 25 bp, Probe sequence
taagcataagatttacagttaattt

SEQ ID NO: 103349 - DNA, 25 bp, Probe sequence
tacgaatgggcctttagcgattgaa

SEQ ID NO: 103350 - DNA, 25 bp, Probe sequence
tttacgaatgggcctttagcgattg

SEQ ID NO: 103351 - DNA, 25 bp, Probe sequence
ttttacgaatgggcctttagcgatt

SEQ ID NO: 103352 - DNA, 25 bp, Probe sequence
ttacgaatgggcctttagcgattga

SEQ ID NO: 103353 - DNA, 25 bp, Probe sequence
attacgctaacctgaaacttggatg

SEQ ID NO: 103354 - DNA, 25 bp, Probe sequence
atttacattacgctaacctgaaact

SEQ ID NO: 103355 - DNA, 25 bp, Probe sequence
ataatttacattacgctaacctgaa

SEQ ID NO: 103356 - DNA, 25 bp, Probe sequence
agtctatgttgcaggttattttatt

SEQ ID NO: 103357 - DNA, 25 bp, Probe sequence
gctaacctgaaacttggatgttaaa

SEQ ID NO: 103358 - DNA, 25 bp, Probe sequence
gaatttttgtattatgcaataactt

SEQ ID NO: 103359 - DNA, 25 bp, Probe sequence
gaatggagcaagcaaataagttatt

SEQ ID NO: 103360 - DNA, 25 bp, Probe sequence
gttgcaggttattttattactctta

SEQ ID NO: 103361 - DNA, 25 bp, Probe sequence
ggatgttaaagtctatgttgcaggt

SEQ ID NO: 103362 - DNA, 25 bp, Probe sequence
tgcaggttattttattactcttaaa

SEQ ID NO: 103363 - DNA, 25 bp, Probe sequence
taacttacctaagataataattata

SEQ ID NO: 103364 - DNA, 25 bp, Probe sequence
taaagtctatgttgcaggttatttt

SEQ ID NO: 103365 - DNA, 25 bp, Probe sequence
tacattacgctaacctgaaacttgg

SEQ ID NO: 103366 - DNA, 25 bp, Probe sequence
tacgctaacctgaaacttggatgtt

SEQ ID NO: 103367 - DNA, 25 bp, Probe sequence
tattatgcaataacttacctaagat

SEQ ID NO: 103368 - DNA, 25 bp, Probe sequence
atggtttatagtggacatacaagat

SEQ ID NO: 103369 - DNA, 25 bp, Probe sequence
agagttcgctccatggtttatagtg

SEQ ID NO: 103370 - DNA, 25 bp, Probe sequence
acctctggcttgctatagagttcgc

SEQ ID NO: 103371 - DNA, 25 bp, Probe sequence
ctggcttgctatagagttcgctcca

SEQ ID NO: 103372 - DNA, 25 bp, Probe sequence
gctatagagttcgctccatggttta

SEQ ID NO: 103373 - DNA, 25 bp, Probe sequence
gcttgctatagagttcgctccatgg

SEQ ID NO: 103374 - DNA, 25 bp, Probe sequence
gagttcgctccatggtttatagtgg

SEQ ID NO: 103375 - DNA, 25 bp, Probe sequence
gttcgctccatggtttatagtggac

SEQ ID NO: 103376 - DNA, 25 bp, Probe sequence
ggacatacaagataaaggaggttca

SEQ ID NO: 103377 - DNA, 25 bp, Probe sequence
tggcttgctatagagttcgctccat

SEQ ID NO: 103378 - DNA, 25 bp, Probe sequence
tcgctccatggtttatagtggacat

SEQ ID NO: 103379 - DNA, 25 bp, Probe sequence
tctggcttgctatagagttcgctcc

SEQ ID NO: 103380 - DNA, 25 bp, Probe sequence
tagagttcgctccatggtttatagt

SEQ ID NO: 103381 - DNA, 25 bp, Probe sequence
tatagagttcgctccatggtttata

SEQ ID NO: 103382 - DNA, 25 bp, Probe sequence
ttgctatagagttcgctccatggtt

SEQ ID NO: 103383 - DNA, 25 bp, Probe sequence
attactttagatgcccaaatataac

SEQ ID NO: 103384 - DNA, 25 bp, Probe sequence
atcaatcttagtgattatatcattt

SEQ ID NO: 103385 - DNA, 25 bp, Probe sequence
acattactttagatgcccaaatata

SEQ ID NO: 103386 - DNA, 25 bp, Probe sequence
acaacattactttagatgcccaaat

SEQ ID NO: 103387 - DNA, 25 bp, Probe sequence
aaattaaatattatcaatcttagtg

SEQ ID NO: 103388 - DNA, 25 bp, Probe sequence
aaatataactgaaaggatagtcgca

SEQ ID NO: 103389 - DNA, 25 bp, Probe sequence
aaagatggcaatatataaaacaaca

SEQ ID NO: 103390 - DNA, 25 bp, Probe sequence
aaaacaacattactttagatgccca

SEQ ID NO: 103391 - DNA, 25 bp, Probe sequence
aaacaacattactttagatgcccaa

SEQ ID NO: 103392 - DNA, 25 bp, Probe sequence
aacattactttagatgcccaaatat

SEQ ID NO: 103393 - DNA, 25 bp, Probe sequence
caacattactttagatgcccaaata

SEQ ID NO: 103394 - DNA, 25 bp, Probe sequence
gaagtattcaaacaaagatggcaat

SEQ ID NO: 103395 - DNA, 25 bp, Probe sequence
gatgcccaaatataactgaaaggat

SEQ ID NO: 103396 - DNA, 25 bp, Probe sequence
tactttagatgcccaaatataactg

SEQ ID NO: 103397 - DNA, 25 bp, Probe sequence
tttagatgcccaaatataactgaaa

SEQ ID NO: 103398 - DNA, 25 bp, Probe sequence
atacttataaaatctcgacactata

SEQ ID NO: 103399 - DNA, 25 bp, Probe sequence
ataaaatctcgacactataaaaatg

SEQ ID NO: 103400 - DNA, 25 bp, Probe sequence
atctcgacactataaaaatggtata

SEQ ID NO: 103401 - DNA, 25 bp, Probe sequence
atggtatagtgtcgagattttcttg

SEQ ID NO: 103402 - DNA, 25 bp, Probe sequence
aaatctcgacactataaaaatggta

SEQ ID NO: 103403 - DNA, 25 bp, Probe sequence
aaaatctcgacactataaaaatggt

SEQ ID NO: 103404 - DNA, 25 bp, Probe sequence
aatggtatagtgtcgagattttctt

SEQ ID NO: 103405 - DNA, 25 bp, Probe sequence
aatctcgacactataaaaatggtat

SEQ ID NO: 103406 - DNA, 25 bp, Probe sequence
cgatacttataaaatctcgacacta

SEQ ID NO: 103407 - DNA, 25 bp, Probe sequence
gcgatacttataaaatctcgacact

SEQ ID NO: 103408 - DNA, 25 bp, Probe sequence
gatacttataaaatctcgacactat

SEQ ID NO: 103409 - DNA, 25 bp, Probe sequence
tggcgatacttataaaatctcgaca

SEQ ID NO: 103410 - DNA, 25 bp, Probe sequence
ggcgatacttataaaatctcgacac

SEQ ID NO: 103411 - DNA, 25 bp, Probe sequence
tggtatagtgtcgagattttcttgc

SEQ ID NO: 103412 - DNA, 25 bp, Probe sequence
tacttataaaatctcgacactataa

SEQ ID NO: 103413 - DNA, 25 bp, Probe sequence
aggaactggagaaagaattgatacc

SEQ ID NO: 103414 - DNA, 25 bp, Probe sequence
agtgtagacgattcaggtagcgcaa

SEQ ID NO: 103415 - DNA, 25 bp, Probe sequence
agttgagtgatatgtatacttttta

SEQ ID NO: 103416 - DNA, 25 bp, Probe sequence
agacgattcaggtagcgcaaaaatg

SEQ ID NO: 103417 - DNA, 25 bp, Probe sequence
aaatgacgcaggaactggagaaaga

SEQ ID NO: 103418 - DNA, 25 bp, Probe sequence
aatatggtgaatagactacacttta

SEQ ID NO: 103419 - DNA, 25 bp, Probe sequence
aattatttatatgttgatttgtcca

SEQ ID NO: 103420 - DNA, 25 bp, Probe sequence
cgcaaaaatgacgcaggaactggag

SEQ ID NO: 103421 - DNA, 25 bp, Probe sequence
gatatgtatactttttaagtgcaaa

SEQ ID NO: 103422 - DNA, 25 bp, Probe sequence
gtagacgattcaggtagcgcaaaaa

SEQ ID NO: 103423 - DNA, 25 bp, Probe sequence
gtgtagacgattcaggtagcgcaaa

SEQ ID NO: 103424 - DNA, 25 bp, Probe sequence
ggtgaatagactacactttagtttt

SEQ ID NO: 103425 - DNA, 25 bp, Probe sequence
ggtagcgcaaaaatgacgcaggaac

SEQ ID NO: 103426 - DNA, 25 bp, Probe sequence
tgaatagactacactttagttttaa

SEQ ID NO: 103427 - DNA, 25 bp, Probe sequence
ttatatgttgatttgtccaattaag

SEQ ID NO: 103428 - DNA, 25 bp, Probe sequence
atagggattcattagttgtatataa

SEQ ID NO: 103429 - DNA, 25 bp, Probe sequence
atctcaatctccttttaaagttgtg

SEQ ID NO: 103430 - DNA, 25 bp, Probe sequence
atgacccgtgtattttgaaaagtgg

SEQ ID NO: 103431 - DNA, 25 bp, Probe sequence
agcaatgtttttagtttatagggat

SEQ ID NO: 103432 - DNA, 25 bp, Probe sequence
aaagttgtggtatattacactattt

SEQ ID NO: 103433 - DNA, 25 bp, Probe sequence
cgagggatatgacccgtgtattttg

SEQ ID NO: 103434 - DNA, 25 bp, Probe sequence
gcatatagtcgatcttatactttta

SEQ ID NO: 103435 - DNA, 25 bp, Probe sequence
gcatgaaaagcatatagtcgatctt

SEQ ID NO: 103436 - DNA, 25 bp, Probe sequence
gtaatagtttttaacgagggatatg

SEQ ID NO: 103437 - DNA, 25 bp, Probe sequence
gtcgatcttatacttttaattgaga

SEQ ID NO: 103438 - DNA, 25 bp, Probe sequence
gtggtaagcaatgtttttagtttat

SEQ ID NO: 103439 - DNA, 25 bp, Probe sequence
gggatatgacccgtgtattttgaaa

SEQ ID NO: 103440 - DNA, 25 bp, Probe sequence
tacactatttatataacacgtttca

SEQ ID NO: 103441 - DNA, 25 bp, Probe sequence
tacttttaattgagacttatagtgt

SEQ ID NO: 103442 - DNA, 25 bp, Probe sequence
tatataacacgtttcataaagttta

SEQ ID NO: 103443 - DNA, 25 bp, Probe sequence
atttactttagtataggccgatcta

SEQ ID NO: 103444 - DNA, 25 bp, Probe sequence
atatgattaaccatgactacaatag

SEQ ID NO: 103445 - DNA, 25 bp, Probe sequence
ataaatcccttcactattagcagta

SEQ ID NO: 103446 - DNA, 25 bp, Probe sequence
ataagttcgatcattcatttcatac

SEQ ID NO: 103447 - DNA, 25 bp, Probe sequence
aggccgatctaatctattgtcagta

SEQ ID NO: 103448 - DNA, 25 bp, Probe sequence
aggttccagatatttgagatttgct

SEQ ID NO: 103449 - DNA, 25 bp, Probe sequence
acgcaatttttcagcgtttgccctg

SEQ ID NO: 103450 - DNA, 25 bp, Probe sequence
aattgacttcataatgcgcgattta

SEQ ID NO: 103451 - DNA, 25 bp, Probe sequence
gcgtttgccctgtgtaactattttc

SEQ ID NO: 103452 - DNA, 25 bp, Probe sequence
ccctgtgtaactattttcattttca

SEQ ID NO: 103453 - DNA, 25 bp, Probe sequence
gaatccagaaatataatgacggttt

SEQ ID NO: 103454 - DNA, 25 bp, Probe sequence
gagatttgctgttatgttagattat

SEQ ID NO: 103455 - DNA, 25 bp, Probe sequence
gttcgatcattcatttcatactaaa

SEQ ID NO: 103456 - DNA, 25 bp, Probe sequence
gtgaggggatttattaggttccaga

SEQ ID NO: 103457 - DNA, 25 bp, Probe sequence
ttttcagcgtttgccctgtgtaact

SEQ ID NO: 103458 - DNA, 25 bp, Probe sequence
atgcatttttggaatacttagtatt

SEQ ID NO: 103459 - DNA, 25 bp, Probe sequence
acatcattaattttgcgtaactatc

SEQ ID NO: 103460 - DNA, 25 bp, Probe sequence
aatctactcatgcatttttggaata

SEQ ID NO: 103461 - DNA, 25 bp, Probe sequence
aatctaatcgtacatgtaaaatttt

SEQ ID NO: 103462 - DNA, 25 bp, Probe sequence
catctatacatcacaattggaagga

SEQ ID NO: 103463 - DNA, 25 bp, Probe sequence
gaaggcaatttttatgtattacaaa

SEQ ID NO: 103464 - DNA, 25 bp, Probe sequence
gataaacatcattaattttgcgtaa

SEQ ID NO: 103465 - DNA, 25 bp, Probe sequence
gatttttattcatctaacaaaggtt

SEQ ID NO: 103466 - DNA, 25 bp, Probe sequence
gtattacaaatctaatcgtacatgt

SEQ ID NO: 103467 - DNA, 25 bp, Probe sequence
gtaatacacatctatacatcacaat

SEQ ID NO: 103468 - DNA, 25 bp, Probe sequence
taacgatttttattcatctaacaaa

SEQ ID NO: 103469 - DNA, 25 bp, Probe sequence
tacaaatcacaatgtaattacatgt

SEQ ID NO: 103470 - DNA, 25 bp, Probe sequence
tacacatctatacatcacaattgga

SEQ ID NO: 103471 - DNA, 25 bp, Probe sequence
tactcatgcatttttggaatactta

SEQ ID NO: 103472 - DNA, 25 bp, Probe sequence
tttgcgtaactatcattagattaca

SEQ ID NO: 103473 - DNA, 25 bp, Probe sequence
attgtgttctaatcatagtggttca

SEQ ID NO: 103474 - DNA, 25 bp, Probe sequence
agaacgaccggacgataactcaaga

SEQ ID NO: 103475 - DNA, 25 bp, Probe sequence
accagacgattgtgttctaatcata

SEQ ID NO: 103476 - DNA, 25 bp, Probe sequence
acgaccggacgataactcaagagcc

SEQ ID NO: 103477 - DNA, 25 bp, Probe sequence
ccggacgataactcaagagccttaa

SEQ ID NO: 103478 - DNA, 25 bp, Probe sequence
gcggagggtggacgataaccagacg

SEQ ID NO: 103479 - DNA, 25 bp, Probe sequence
gaaagaacgaccggacgataactca

SEQ ID NO: 103480 - DNA, 25 bp, Probe sequence
gaccggacgataactcaagagcctt

SEQ ID NO: 103481 - DNA, 25 bp, Probe sequence
gagggtggacgataaccagacgatt

SEQ ID NO: 103482 - DNA, 25 bp, Probe sequence
gataaccagacgattgtgttctaat

SEQ ID NO: 103483 - DNA, 25 bp, Probe sequence
gttctaatcatagtggttcaaggga

SEQ ID NO: 103484 - DNA, 25 bp, Probe sequence
ggacgataaccagacgattgtgttc

SEQ ID NO: 103485 - DNA, 25 bp, Probe sequence
tcaagggaaagaacgaccggacgat

SEQ ID NO: 103486 - DNA, 25 bp, Probe sequence
tcaagagccttaattaaagagtatt

SEQ ID NO: 103487 - DNA, 25 bp, Probe sequence
tagcttgcggagggtggacgataac

SEQ ID NO: 103488 - DNA, 25 bp, Probe sequence
atggactttcctttatttaatgtct

SEQ ID NO: 103489 - DNA, 25 bp, Probe sequence
aactatggattattgatttacacgt

SEQ ID NO: 103490 - DNA, 25 bp, Probe sequence
gcgtttgtgtggggaatatgaaatg

SEQ ID NO: 103491 - DNA, 25 bp, Probe sequence
gaattaattcaactatggattattg

SEQ ID NO: 103492 - DNA, 25 bp, Probe sequence
gactttcctttatttaatgtcttag

SEQ ID NO: 103493 - DNA, 25 bp, Probe sequence
gagtataaatggactttcctttatt

SEQ ID NO: 103494 - DNA, 25 bp, Probe sequence
gtagagtataaatggactttccttt

SEQ ID NO: 103495 - DNA, 25 bp, Probe sequence
gtgtggggaatatgaaatgtgtaga

SEQ ID NO: 103496 - DNA, 25 bp, Probe sequence
ggattattgatttacacgtataatt

SEQ ID NO: 103497 - DNA, 25 bp, Probe sequence
tggactttcctttatttaatgtctt

SEQ ID NO: 103498 - DNA, 25 bp, Probe sequence
tggggaatatgaaatgtgtagagta

SEQ ID NO: 103499 - DNA, 25 bp, Probe sequence
tcctttatttaatgtcttaggaata

SEQ ID NO: 103500 - DNA, 25 bp, Probe sequence
tatggattattgatttacacgtata

SEQ ID NO: 103501 - DNA, 25 bp, Probe sequence
tttgcgtttgtgtggggaatatgaa

SEQ ID NO: 103502 - DNA, 25 bp, Probe sequence
ttttgcgtttgtgtggggaatatga

SEQ ID NO: 103503 - DNA, 25 bp, Probe sequence
atttaccaccagccagcagattttt

SEQ ID NO: 103504 - DNA, 25 bp, Probe sequence
accaccagccagcagatttttatta

SEQ ID NO: 103505 - DNA, 25 bp, Probe sequence
accagccagcagatttttattatat

SEQ ID NO: 103506 - DNA, 25 bp, Probe sequence
aatcctttaatatcatgccttaaga

SEQ ID NO: 103507 - DNA, 25 bp, Probe sequence
aattagaggaaacccaatactatca

SEQ ID NO: 103508 - DNA, 25 bp, Probe sequence
cttttgaaatttaccaccagccagc

SEQ ID NO: 103509 - DNA, 25 bp, Probe sequence
gccttaagacagtatatgcaactat

SEQ ID NO: 103510 - DNA, 25 bp, Probe sequence
taatatcatgccttaagacagtata

SEQ ID NO: 103511 - DNA, 25 bp, Probe sequence
tagaggaaacccaatactatcaaaa

SEQ ID NO: 103512 - DNA, 25 bp, Probe sequence
tagaaatcctttaatatcatgcctt

SEQ ID NO: 103513 - DNA, 25 bp, Probe sequence
tatgcaactatacgaaatcctaaag

SEQ ID NO: 103514 - DNA, 25 bp, Probe sequence
tatcatgccttaagacagtatatgc

SEQ ID NO: 103515 - DNA, 25 bp, Probe sequence
tttgaaatttaccaccagccagcag

SEQ ID NO: 103516 - DNA, 25 bp, Probe sequence
ttaccaccagccagcagatttttat

SEQ ID NO: 103517 - DNA, 25 bp, Probe sequence
ttcttttgaaatttaccaccagcca

SEQ ID NO: 103518 - DNA, 25 bp, Probe sequence
aagaagatggtttagcaagagttgc

SEQ ID NO: 103519 - DNA, 25 bp, Probe sequence
aagagtgtctgataagcgagtcgtc

SEQ ID NO: 103520 - DNA, 25 bp, Probe sequence
aatgagcaagagtgtctgataagcg

SEQ ID NO: 103521 - DNA, 25 bp, Probe sequence
caagagttgctcatttagataaaaa

SEQ ID NO: 103522 - DNA, 25 bp, Probe sequence
gcccctaacgactaaataatgtaat

SEQ ID NO: 103523 - DNA, 25 bp, Probe sequence
gcgagtcgtcttatctaagaattaa

SEQ ID NO: 103524 - DNA, 25 bp, Probe sequence
gcaagagtgtctgataagcgagtcg

SEQ ID NO: 103525 - DNA, 25 bp, Probe sequence
gagtgtctgataagcgagtcgtctt

SEQ ID NO: 103526 - DNA, 25 bp, Probe sequence
gaggtcattttttgagataattatt

SEQ ID NO: 103527 - DNA, 25 bp, Probe sequence
gatggtttagcaagagttgctcatt

SEQ ID NO: 103528 - DNA, 25 bp, Probe sequence
gtgtctgataagcgagtcgtcttat

SEQ ID NO: 103529 - DNA, 25 bp, Probe sequence
tgattacagtaaatttttcttcgaa

SEQ ID NO: 103530 - DNA, 25 bp, Probe sequence
taaggtatacaattgattacagtaa

SEQ ID NO: 103531 - DNA, 25 bp, Probe sequence
taagcgagtcgtcttatctaagaat

SEQ ID NO: 103532 - DNA, 25 bp, Probe sequence
ttaatttaagaggtcattttttgag

SEQ ID NO: 103533 - DNA, 25 bp, Probe sequence
attattttgtcatgctgttcttaat

SEQ ID NO: 103534 - DNA, 25 bp, Probe sequence
attttgtcatgctgttcttaatata

SEQ ID NO: 103535 - DNA, 25 bp, Probe sequence
atataatacactgtgtggtgagtat

SEQ ID NO: 103536 - DNA, 25 bp, Probe sequence
aaattattttgtcatgctgttctta

SEQ ID NO: 103537 - DNA, 25 bp, Probe sequence
aaaaattattttgtcatgctgttct

SEQ ID NO: 103538 - DNA, 25 bp, Probe sequence
aaaattattttgtcatgctgttctt

SEQ ID NO: 103539 - DNA, 25 bp, Probe sequence
aattattttgtcatgctgttcttaa

SEQ ID NO: 103540 - DNA, 25 bp, Probe sequence
catgctgttcttaatataatacact

SEQ ID NO: 103541 - DNA, 25 bp, Probe sequence
gctgttcttaatataatacactgtg

SEQ ID NO: 103542 - DNA, 25 bp, Probe sequence
gttcttaatataatacactgtgtgg

SEQ ID NO: 103543 - DNA, 25 bp, Probe sequence
tgtcatgctgttcttaatataatac

SEQ ID NO: 103544 - DNA, 25 bp, Probe sequence
tttgtcatgctgttcttaatataat

SEQ ID NO: 103545 - DNA, 25 bp, Probe sequence
ttttgtcatgctgttcttaatataa

SEQ ID NO: 103546 - DNA, 25 bp, Probe sequence
ttattttgtcatgctgttcttaata

SEQ ID NO: 103547 - DNA, 25 bp, Probe sequence
ttgtcatgctgttcttaatataata

SEQ ID NO: 103548 - DNA, 25 bp, Probe sequence
attagagctttcactgaagcgaata

SEQ ID NO: 103549 - DNA, 25 bp, Probe sequence
aactcttaaaatccttcagtattag

SEQ ID NO: 103550 - DNA, 25 bp, Probe sequence
aactatcaattagagctttcactga

SEQ ID NO: 103551 - DNA, 25 bp, Probe sequence
aagtctaaatatcaagagcaaacta

SEQ ID NO: 103552 - DNA, 25 bp, Probe sequence
aagtgaagcttcaaattgtcctatt

SEQ ID NO: 103553 - DNA, 25 bp, Probe sequence
aattgtcctatttgtaatacagatt

SEQ ID NO: 103554 - DNA, 25 bp, Probe sequence
cataacaactcttaaaatccttcag

SEQ ID NO: 103555 - DNA, 25 bp, Probe sequence
gaagcttcaaattgtcctatttgta

SEQ ID NO: 103556 - DNA, 25 bp, Probe sequence
gaaacatatcataacaactcttaaa

SEQ ID NO: 103557 - DNA, 25 bp, Probe sequence
gatcaccaaacacatatatggaatt

SEQ ID NO: 103558 - DNA, 25 bp, Probe sequence
gatagtgatgtttcaaggaagctag

SEQ ID NO: 103559 - DNA, 25 bp, Probe sequence
gatttacaatatgatcaccaaacac

SEQ ID NO: 103560 - DNA, 25 bp, Probe sequence
ggaagctaggaatttttgagtattt

SEQ ID NO: 103561 - DNA, 25 bp, Probe sequence
taatgctcgaaaaagtgaagcttca

SEQ ID NO: 103562 - DNA, 25 bp, Probe sequence
ttttgagtatttattaagcggagaa

SEQ ID NO: 103563 - DNA, 25 bp, Probe sequence
atgcaatctagtcaggtccatttat

SEQ ID NO: 103564 - DNA, 25 bp, Probe sequence
atgaggagtatagttttgattgcaa

SEQ ID NO: 103565 - DNA, 25 bp, Probe sequence
aggtggcattttatcatgaggagta

SEQ ID NO: 103566 - DNA, 25 bp, Probe sequence
aatgcgattttggataggatattgc

SEQ ID NO: 103567 - DNA, 25 bp, Probe sequence
aatattgacatttacatccaactaa

SEQ ID NO: 103568 - DNA, 25 bp, Probe sequence
gaagaagctctaaatgggggaagta

SEQ ID NO: 103569 - DNA, 25 bp, Probe sequence
gaaaagcacaatatttaccacaaat

SEQ ID NO: 103570 - DNA, 25 bp, Probe sequence
gatgatcccaaaatcgcaaatgcga

SEQ ID NO: 103571 - DNA, 25 bp, Probe sequence
gatataattaatttgtccatccatt

SEQ ID NO: 103572 - DNA, 25 bp, Probe sequence
gtagacgattcacagacaaccgata

SEQ ID NO: 103573 - DNA, 25 bp, Probe sequence
gtacatttctatacaatcatttatg

SEQ ID NO: 103574 - DNA, 25 bp, Probe sequence
gtcaggtccatttataacaaaagca

SEQ ID NO: 103575 - DNA, 25 bp, Probe sequence
ggatattgcatcattcaagtgtagt

SEQ ID NO: 103576 - DNA, 25 bp, Probe sequence
ttaccacaaatatcaatttcaactt

SEQ ID NO: 103577 - DNA, 25 bp, Probe sequence
ttgtccatccattttaggtggcatt

SEQ ID NO: 103578 - DNA, 25 bp, Probe sequence
attcatctgccaatttttctctaga

SEQ ID NO: 103579 - DNA, 25 bp, Probe sequence
atatgtttttgaaattcatctgcca

SEQ ID NO: 103580 - DNA, 25 bp, Probe sequence
atgcctgaagctatgaacgtgtatc

SEQ ID NO: 103581 - DNA, 25 bp, Probe sequence
atgacctaatctagttttacttctt

SEQ ID NO: 103582 - DNA, 25 bp, Probe sequence
agtcgtctttatatcactatgacct

SEQ ID NO: 103583 - DNA, 25 bp, Probe sequence
acgcatgtacttcatttagtctact

SEQ ID NO: 103584 - DNA, 25 bp, Probe sequence
acttctttaagttgttgcacctgat

SEQ ID NO: 103585 - DNA, 25 bp, Probe sequence
aaatgtccatagtcgtctttatatc

SEQ ID NO: 103586 - DNA, 25 bp, Probe sequence
gctatgaacgtgtatcttatgaaga

SEQ ID NO: 103587 - DNA, 25 bp, Probe sequence
gaatacctctaattcgtcattaggc

SEQ ID NO: 103588 - DNA, 25 bp, Probe sequence
gttgttgcacctgattcgaataata

SEQ ID NO: 103589 - DNA, 25 bp, Probe sequence
gtcattaggcatcgatacacgcatg

SEQ ID NO: 103590 - DNA, 25 bp, Probe sequence
gtgaagcacgagtatgcctgaagct

SEQ ID NO: 103591 - DNA, 25 bp, Probe sequence
ggcatcgatacacgcatgtacttca

SEQ ID NO: 103592 - DNA, 25 bp, Probe sequence
ttttctctagatgattttgtaatgt

SEQ ID NO: 103593 - DNA, 25 bp, Probe sequence
attatgtcgaggtgtttttttgcgt

SEQ ID NO: 103594 - DNA, 25 bp, Probe sequence
atattatgtcgaggtgtttttttgc

SEQ ID NO: 103595 - DNA, 25 bp, Probe sequence
atacaaaacacctcgatattatgtc

SEQ ID NO: 103596 - DNA, 25 bp, Probe sequence
atgtcgaggtgtttttttgcgtttg

SEQ ID NO: 103597 - DNA, 25 bp, Probe sequence
acgatatatacaaaacacctcgata

SEQ ID NO: 103598 - DNA, 25 bp, Probe sequence
acaaaacacctcgatattatgtcga

SEQ ID NO: 103599 - DNA, 25 bp, Probe sequence
gaggtgtttttttgcgtttgtgtgt

SEQ ID NO: 103600 - DNA, 25 bp, Probe sequence
gatattatgtcgaggtgtttttttg

SEQ ID NO: 103601 - DNA, 25 bp, Probe sequence
gatatatacaaaacacctcgatatt

SEQ ID NO: 103602 - DNA, 25 bp, Probe sequence
gtcgaggtgtttttttgcgtttgtg

SEQ ID NO: 103603 - DNA, 25 bp, Probe sequence
tgtcgaggtgtttttttgcgtttgt

SEQ ID NO: 103604 - DNA, 25 bp, Probe sequence
tcgaggtgtttttttgcgtttgtgt

SEQ ID NO: 103605 - DNA, 25 bp, Probe sequence
tcggacgatatatacaaaacacctc

SEQ ID NO: 103606 - DNA, 25 bp, Probe sequence
tatgtcgaggtgtttttttgcgttt

SEQ ID NO: 103607 - DNA, 25 bp, Probe sequence
ttgcgtttgtgtgttttaaaattat

SEQ ID NO: 103608 - DNA, 25 bp, Probe sequence
attgtgttacaagatatataagcag

SEQ ID NO: 103609 - DNA, 25 bp, Probe sequence
aggttatgaaactgtttatagcttg

SEQ ID NO: 103610 - DNA, 25 bp, Probe sequence
cacgataagccccggaaacttattg

SEQ ID NO: 103611 - DNA, 25 bp, Probe sequence
caaatgaaatcatctattaggttat

SEQ ID NO: 103612 - DNA, 25 bp, Probe sequence
ccggaaacttattgtgttacaagat

SEQ ID NO: 103613 - DNA, 25 bp, Probe sequence
gcagaaacgaacaacagttaacaaa

SEQ ID NO: 103614 - DNA, 25 bp, Probe sequence
gcatttattttttaggaggacaatt

SEQ ID NO: 103615 - DNA, 25 bp, Probe sequence
gaagcatttattttttaggaggaca

SEQ ID NO: 103616 - DNA, 25 bp, Probe sequence
gaaactgtttatagcttgaatagaa

SEQ ID NO: 103617 - DNA, 25 bp, Probe sequence
gataagccccggaaacttattgtgt

SEQ ID NO: 103618 - DNA, 25 bp, Probe sequence
gatatataagcagaaacgaacaaca

SEQ ID NO: 103619 - DNA, 25 bp, Probe sequence
tagaagcatttattttttaggagga

SEQ ID NO: 103620 - DNA, 25 bp, Probe sequence
tatgaaactgtttatagcttgaata

SEQ ID NO: 103621 - DNA, 25 bp, Probe sequence
tattaacggtattgttttatatcca

SEQ ID NO: 103622 - DNA, 25 bp, Probe sequence
ttgccattgacaaaaagcttgtgaa

SEQ ID NO: 103623 - DNA, 25 bp, Probe sequence
attgtctagctcagagtaccccatc

SEQ ID NO: 103624 - DNA, 25 bp, Probe sequence
atatctacttttttgagtgcgaatc

SEQ ID NO: 103625 - DNA, 25 bp, Probe sequence
atgtccttatcattagttgttaaac

SEQ ID NO: 103626 - DNA, 25 bp, Probe sequence
agtccgatttctttatatctacttt

SEQ ID NO: 103627 - DNA, 25 bp, Probe sequence
aaagcgtgaactcaacaaacttatg

SEQ ID NO: 103628 - DNA, 25 bp, Probe sequence
aacttatgatggggtgcgcgctttt

SEQ ID NO: 103629 - DNA, 25 bp, Probe sequence
ctcagagtaccccatcaactaaata

SEQ ID NO: 103630 - DNA, 25 bp, Probe sequence
cgcgaccacccctatattagtaaat

SEQ ID NO: 103631 - DNA, 25 bp, Probe sequence
gaagtgaaagtattatcgttgaacc

SEQ ID NO: 103632 - DNA, 25 bp, Probe sequence
gaacagaaatgtttttaagtccgat

SEQ ID NO: 103633 - DNA, 25 bp, Probe sequence
gagtgcaacgataatgtttgccaca

SEQ ID NO: 103634 - DNA, 25 bp, Probe sequence
gtttgccacatacaaatattgtcta

SEQ ID NO: 103635 - DNA, 25 bp, Probe sequence
gtttgatcaatttcactagaactga

SEQ ID NO: 103636 - DNA, 25 bp, Probe sequence
gggtgcgcgcttttttattgaataa

SEQ ID NO: 103637 - DNA, 25 bp, Probe sequence
tatcgttgaaccaaacgcgaccacc

SEQ ID NO: 103638 - DNA, 25 bp, Probe sequence
atggtattgttacaggtcactgagc

SEQ ID NO: 103639 - DNA, 25 bp, Probe sequence
aggtcactgagcaaacattttaaat

SEQ ID NO: 103640 - DNA, 25 bp, Probe sequence
acaggtcactgagcaaacattttaa

SEQ ID NO: 103641 - DNA, 25 bp, Probe sequence
aattaagtcgacgtatataaggagg

SEQ ID NO: 103642 - DNA, 25 bp, Probe sequence
caggtcactgagcaaacattttaaa

SEQ ID NO: 103643 - DNA, 25 bp, Probe sequence
gcaaacattttaaattaagtcgacg

SEQ ID NO: 103644 - DNA, 25 bp, Probe sequence
gttacaggtcactgagcaaacattt

SEQ ID NO: 103645 - DNA, 25 bp, Probe sequence
gtattgttacaggtcactgagcaaa

SEQ ID NO: 103646 - DNA, 25 bp, Probe sequence
gtcactgagcaaacattttaaatta

SEQ ID NO: 103647 - DNA, 25 bp, Probe sequence
ggtattgttacaggtcactgagcaa

SEQ ID NO: 103648 - DNA, 25 bp, Probe sequence
tggtattgttacaggtcactgagca

SEQ ID NO: 103649 - DNA, 25 bp, Probe sequence
taagtcgacgtatataaggaggata

SEQ ID NO: 103650 - DNA, 25 bp, Probe sequence
tacaggtcactgagcaaacatttta

SEQ ID NO: 103651 - DNA, 25 bp, Probe sequence
tattgttacaggtcactgagcaaac

SEQ ID NO: 103652 - DNA, 25 bp, Probe sequence
ttgttacaggtcactgagcaaacat

SEQ ID NO: 103653 - DNA, 25 bp, Probe sequence
atcactgatagattcgtaacaataa

SEQ ID NO: 103654 - DNA, 25 bp, Probe sequence
agatcaacttttagcggtctatttt

SEQ ID NO: 103655 - DNA, 25 bp, Probe sequence
agcggtctattttaagtgaggcatg

SEQ ID NO: 103656 - DNA, 25 bp, Probe sequence
aaagttgtctattgacgattacctt

SEQ ID NO: 103657 - DNA, 25 bp, Probe sequence
cggtctattttaagtgaggcatgat

SEQ ID NO: 103658 - DNA, 25 bp, Probe sequence
gcaattaacgataattaattcccgt

SEQ ID NO: 103659 - DNA, 25 bp, Probe sequence
gacgattaccttactattgcaaaaa

SEQ ID NO: 103660 - DNA, 25 bp, Probe sequence
gatgagagtggcaattaacgataat

SEQ ID NO: 103661 - DNA, 25 bp, Probe sequence
gatagatgagagtggcaattaacga

SEQ ID NO: 103662 - DNA, 25 bp, Probe sequence
gtctattgacgattaccttactatt

SEQ ID NO: 103663 - DNA, 25 bp, Probe sequence
tcaacttttagcggtctattttaag

SEQ ID NO: 103664 - DNA, 25 bp, Probe sequence
taacttataaaattaatcactgata

SEQ ID NO: 103665 - DNA, 25 bp, Probe sequence
tattgacgattaccttactattgca

SEQ ID NO: 103666 - DNA, 25 bp, Probe sequence
tttaagtgaggcatgatttaatcat

SEQ ID NO: 103667 - DNA, 25 bp, Probe sequence
ttgtctattgacgattaccttacta

SEQ ID NO: 103668 - DNA, 25 bp, Probe sequence
attcattcaccaccgttcttatgac

SEQ ID NO: 103669 - DNA, 25 bp, Probe sequence
attcaccaccgttcttatgactaat

SEQ ID NO: 103670 - DNA, 25 bp, Probe sequence
atatctcgaaaatagttgaactgac

SEQ ID NO: 103671 - DNA, 25 bp, Probe sequence
agttttcgtggagaagtctatcact

SEQ ID NO: 103672 - DNA, 25 bp, Probe sequence
agcgatgaagcgaaaggttactgac

SEQ ID NO: 103673 - DNA, 25 bp, Probe sequence
accaccgttcttatgactaattata

SEQ ID NO: 103674 - DNA, 25 bp, Probe sequence
aagccttgatttatcgatgtttttc

SEQ ID NO: 103675 - DNA, 25 bp, Probe sequence
cgctttgccatggcgctgtgtaaga

SEQ ID NO: 103676 - DNA, 25 bp, Probe sequence
gcgaaaggttactgacacacccggc

SEQ ID NO: 103677 - DNA, 25 bp, Probe sequence
gaaaaattatgtgaaaagccttgat

SEQ ID NO: 103678 - DNA, 25 bp, Probe sequence
gatttatcgatgtttttcgtgtaat

SEQ ID NO: 103679 - DNA, 25 bp, Probe sequence
gtgtaatataactaacgttggactt

SEQ ID NO: 103680 - DNA, 25 bp, Probe sequence
ggcgctgtgtaagatagttttcgtg

SEQ ID NO: 103681 - DNA, 25 bp, Probe sequence
tggagaagtctatcactaaatgtag

SEQ ID NO: 103682 - DNA, 25 bp, Probe sequence
ttgccatggcgctgtgtaagatagt

SEQ ID NO: 103683 - DNA, 25 bp, Probe sequence
atccgatataaatatacttctttta

SEQ ID NO: 103684 - DNA, 25 bp, Probe sequence
atccagacacaaaaaacgactgcca

SEQ ID NO: 103685 - DNA, 25 bp, Probe sequence
acgtgtttcttctatattatatacc

SEQ ID NO: 103686 - DNA, 25 bp, Probe sequence
aaaaaacgactgccaatgattggta

SEQ ID NO: 103687 - DNA, 25 bp, Probe sequence
aattgttggacgtgtttcttctata

SEQ ID NO: 103688 - DNA, 25 bp, Probe sequence
gccaatgattggtagtcgttttttc

SEQ ID NO: 103689 - DNA, 25 bp, Probe sequence
gaatgtctttaaatatccgatataa

SEQ ID NO: 103690 - DNA, 25 bp, Probe sequence
gacacaaaaaacgactgccaatgat

SEQ ID NO: 103691 - DNA, 25 bp, Probe sequence
gttggacgtgtttcttctatattat

SEQ ID NO: 103692 - DNA, 25 bp, Probe sequence
gtttcttctatattatatacctaat

SEQ ID NO: 103693 - DNA, 25 bp, Probe sequence
ggacgtgtttcttctatattatata

SEQ ID NO: 103694 - DNA, 25 bp, Probe sequence
tgattggtagtcgttttttctttga

SEQ ID NO: 103695 - DNA, 25 bp, Probe sequence
taaaattgttggacgtgtttcttct

SEQ ID NO: 103696 - DNA, 25 bp, Probe sequence
tatgaatgtctttaaatatccgata

SEQ ID NO: 103697 - DNA, 25 bp, Probe sequence
ttgttggacgtgtttcttctatatt

SEQ ID NO: 103698 - DNA, 25 bp, Probe sequence
attgttttttattaagaatgatatt

SEQ ID NO: 103699 - DNA, 25 bp, Probe sequence
ataaaatcgaacaaagttgaatcag

SEQ ID NO: 103700 - DNA, 25 bp, Probe sequence
atgatattaaactattaaggtattt

SEQ ID NO: 103701 - DNA, 25 bp, Probe sequence
aaatcgaacaaagttgaatcagaaa

SEQ ID NO: 103702 - DNA, 25 bp, Probe sequence
aaaatcgaacaaagttgaatcagaa

SEQ ID NO: 103703 - DNA, 25 bp, Probe sequence
aatcgaacaaagttgaatcagaaaa

SEQ ID NO: 103704 - DNA, 25 bp, Probe sequence
gaatcagaaaaacgaaaagttcgct

SEQ ID NO: 103705 - DNA, 25 bp, Probe sequence
gaatgatattaaactattaaggtat

SEQ ID NO: 103706 - DNA, 25 bp, Probe sequence
gtattgttttttattaagaatgata

SEQ ID NO: 103707 - DNA, 25 bp, Probe sequence
ggtattgttttttattaagaatgat

SEQ ID NO: 103708 - DNA, 25 bp, Probe sequence
tggtattgttttttattaagaatga

SEQ ID NO: 103709 - DNA, 25 bp, Probe sequence
taaaatcgaacaaagttgaatcaga

SEQ ID NO: 103710 - DNA, 25 bp, Probe sequence
tattttaaaaaaaggagcatccatt

SEQ ID NO: 103711 - DNA, 25 bp, Probe sequence
tattgttttttattaagaatgatat

SEQ ID NO: 103712 - DNA, 25 bp, Probe sequence
ttggtattgttttttattaagaatg

SEQ ID NO: 103713 - DNA, 25 bp, Probe sequence
atttttgcaagtgctccccttaatt

SEQ ID NO: 103714 - DNA, 25 bp, Probe sequence
agtgctccccttaattgacacttgc

SEQ ID NO: 103715 - DNA, 25 bp, Probe sequence
aaagcattctgccctaatagtaaaa

SEQ ID NO: 103716 - DNA, 25 bp, Probe sequence
aacaactacttataattttcaatat

SEQ ID NO: 103717 - DNA, 25 bp, Probe sequence
aattgacacttgcatgttattgtaa

SEQ ID NO: 103718 - DNA, 25 bp, Probe sequence
cactctcctatactatttttgcaag

SEQ ID NO: 103719 - DNA, 25 bp, Probe sequence
catgctaatgaagtactgtggggta

SEQ ID NO: 103720 - DNA, 25 bp, Probe sequence
ctccccttaattgacacttgcatgt

SEQ ID NO: 103721 - DNA, 25 bp, Probe sequence
gaagtactgtggggtatttgcttgg

SEQ ID NO: 103722 - DNA, 25 bp, Probe sequence
gaaaaacccacaatacatgctaatg

SEQ ID NO: 103723 - DNA, 25 bp, Probe sequence
gttattgtaaagcattctgccctaa

SEQ ID NO: 103724 - DNA, 25 bp, Probe sequence
tgcaagtgctccccttaattgacac

SEQ ID NO: 103725 - DNA, 25 bp, Probe sequence
tactatttttgcaagtgctcccctt

SEQ ID NO: 103726 - DNA, 25 bp, Probe sequence
tactcactctcctatactatttttg

SEQ ID NO: 103727 - DNA, 25 bp, Probe sequence
tactgtggggtatttgcttggtatt

SEQ ID NO: 103728 - DNA, 25 bp, Probe sequence
attctataagtgaatggttattttc

SEQ ID NO: 103729 - DNA, 25 bp, Probe sequence
attacatttttacgttacatgagta

SEQ ID NO: 103730 - DNA, 25 bp, Probe sequence
aggacatatagaggaacattcaacg

SEQ ID NO: 103731 - DNA, 25 bp, Probe sequence
cagaagtgattacatttttacgtta

SEQ ID NO: 103732 - DNA, 25 bp, Probe sequence
catttttacgttacatgagtattta

SEQ ID NO: 103733 - DNA, 25 bp, Probe sequence
gaatggttattttcagaagtgatta

SEQ ID NO: 103734 - DNA, 25 bp, Probe sequence
gacatatagaggaacattcaacgta

SEQ ID NO: 103735 - DNA, 25 bp, Probe sequence
gattacatttttacgttacatgagt

SEQ ID NO: 103736 - DNA, 25 bp, Probe sequence
ggttattttcagaagtgattacatt

SEQ ID NO: 103737 - DNA, 25 bp, Probe sequence
tgattacatttttacgttacatgag

SEQ ID NO: 103738 - DNA, 25 bp, Probe sequence
taattttaatcattctataagtgaa

SEQ ID NO: 103739 - DNA, 25 bp, Probe sequence
tacatttttacgttacatgagtatt

SEQ ID NO: 103740 - DNA, 25 bp, Probe sequence
tagaggaacattcaacgtaaaattc

SEQ ID NO: 103741 - DNA, 25 bp, Probe sequence
ttacgttacatgagtatttaacttt

SEQ ID NO: 103742 - DNA, 25 bp, Probe sequence
ttcagaagtgattacatttttacgt

SEQ ID NO: 103743 - DNA, 25 bp, Probe sequence
tcgtagaaaatgagagcccccttta

SEQ ID NO: 103744 - DNA, 25 bp, Probe sequence
attcgtagaaaatgagagccccctt

SEQ ID NO: 103745 - DNA, 25 bp, Probe sequence
agggggcttttatttatgacatagt

SEQ ID NO: 103746 - DNA, 25 bp, Probe sequence
aagggggcttttatttatgacatag

SEQ ID NO: 103747 - DNA, 25 bp, Probe sequence
aatgcatattgtgaaaagggggctt

SEQ ID NO: 103748 - DNA, 25 bp, Probe sequence
cccctttaccacaacatgtaaatgc

SEQ ID NO: 103749 - DNA, 25 bp, Probe sequence
gccccctttaccacaacatgtaaat

SEQ ID NO: 103750 - DNA, 25 bp, Probe sequence
gcttttatttatgacatagttgttc

SEQ ID NO: 103751 - DNA, 25 bp, Probe sequence
gtattcgtagaaaatgagagccccc

SEQ ID NO: 103752 - DNA, 25 bp, Probe sequence
gggggcttttatttatgacatagtt

SEQ ID NO: 103753 - DNA, 25 bp, Probe sequence
ggggcttttatttatgacatagttg

SEQ ID NO: 103754 - DNA, 25 bp, Probe sequence
taaaatccattttagtattcgtaga

SEQ ID NO: 103755 - DNA, 25 bp, Probe sequence
tagaaaatgagagccccctttacca

SEQ ID NO: 103756 - DNA, 25 bp, Probe sequence
taccacaacatgtaaatgcatattg

SEQ ID NO: 103757 - DNA, 25 bp, Probe sequence
ttcgtagaaaatgagagcccccttt

SEQ ID NO: 103758 - DNA, 25 bp, Probe sequence
atatctgtggagtatgttaaagtta

SEQ ID NO: 103759 - DNA, 25 bp, Probe sequence
atagcatgaaacagtagacttctaa

SEQ ID NO: 103760 - DNA, 25 bp, Probe sequence
ataacactcctttgaaatataatta

SEQ ID NO: 103761 - DNA, 25 bp, Probe sequence
atctgtggagtatgttaaagttata

SEQ ID NO: 103762 - DNA, 25 bp, Probe sequence
agacttctaaaatatctgtggagta

SEQ ID NO: 103763 - DNA, 25 bp, Probe sequence
agcatgaaacagtagacttctaaaa

SEQ ID NO: 103764 - DNA, 25 bp, Probe sequence
actcctttgaaatataattaagtgc

SEQ ID NO: 103765 - DNA, 25 bp, Probe sequence
actataacactcctttgaaatataa

SEQ ID NO: 103766 - DNA, 25 bp, Probe sequence
aacactcctttgaaatataattaag

SEQ ID NO: 103767 - DNA, 25 bp, Probe sequence
cagtagacttctaaaatatctgtgg

SEQ ID NO: 103768 - DNA, 25 bp, Probe sequence
ctaaaatatctgtggagtatgttaa

SEQ ID NO: 103769 - DNA, 25 bp, Probe sequence
gacttctaaaatatctgtggagtat

SEQ ID NO: 103770 - DNA, 25 bp, Probe sequence
gattatagcatgaaacagtagactt

SEQ ID NO: 103771 - DNA, 25 bp, Probe sequence
gtagacttctaaaatatctgtggag

SEQ ID NO: 103772 - DNA, 25 bp, Probe sequence
gtgcatttaatgtagattatagcat

SEQ ID NO: 103773 - DNA, 25 bp, Probe sequence
atatgcgtgtatgttgttaatgaaa

SEQ ID NO: 103774 - DNA, 25 bp, Probe sequence
ataacgtattcagagcaatgctagt

SEQ ID NO: 103775 - DNA, 25 bp, Probe sequence
atgctagtcaaatttatgtaacgaa

SEQ ID NO: 103776 - DNA, 25 bp, Probe sequence
agcatttattgcttgaatgatagat

SEQ ID NO: 103777 - DNA, 25 bp, Probe sequence
acgacaacatcttgtgattctagat

SEQ ID NO: 103778 - DNA, 25 bp, Probe sequence
aaatcataacacgacaacatcttgt

SEQ ID NO: 103779 - DNA, 25 bp, Probe sequence
aacacgacaacatcttgtgattcta

SEQ ID NO: 103780 - DNA, 25 bp, Probe sequence
aagcaattcatcaatataacgtatt

SEQ ID NO: 103781 - DNA, 25 bp, Probe sequence
ctaaatcataacacgacaacatctt

SEQ ID NO: 103782 - DNA, 25 bp, Probe sequence
gaaacactaaatcataacacgacaa

SEQ ID NO: 103783 - DNA, 25 bp, Probe sequence
gagcaatgctagtcaaatttatgta

SEQ ID NO: 103784 - DNA, 25 bp, Probe sequence
gtgttgggatagatatgcgtgtatg

SEQ ID NO: 103785 - DNA, 25 bp, Probe sequence
gggatagatatgcgtgtatgttgtt

SEQ ID NO: 103786 - DNA, 25 bp, Probe sequence
tgtgattctagatgtaattgagcga

SEQ ID NO: 103787 - DNA, 25 bp, Probe sequence
ttatgtaacgaaaagcatttattgc

SEQ ID NO: 103788 - DNA, 25 bp, Probe sequence
ataaaacaatactggcattcaacat

SEQ ID NO: 103789 - DNA, 25 bp, Probe sequence
actggcattcaacatgtacgataat

SEQ ID NO: 103790 - DNA, 25 bp, Probe sequence
aaagccataaaagcggtcatgatat

SEQ ID NO: 103791 - DNA, 25 bp, Probe sequence
aagcggtcatgatattgactacttt

SEQ ID NO: 103792 - DNA, 25 bp, Probe sequence
aatactggcattcaacatgtacgat

SEQ ID NO: 103793 - DNA, 25 bp, Probe sequence
aattttagaccttatttcacgtgcg

SEQ ID NO: 103794 - DNA, 25 bp, Probe sequence
aattatgttattgcatgttttgttt

SEQ ID NO: 103795 - DNA, 25 bp, Probe sequence
cttatttcacgtgcgatttaatcga

SEQ ID NO: 103796 - DNA, 25 bp, Probe sequence
gaccttatttcacgtgcgatttaat

SEQ ID NO: 103797 - DNA, 25 bp, Probe sequence
ggcattcaacatgtacgataataaa

SEQ ID NO: 103798 - DNA, 25 bp, Probe sequence
tgttattgcatgttttgtttattat

SEQ ID NO: 103799 - DNA, 25 bp, Probe sequence
tcacgtgcgatttaatcgatgtgtt

SEQ ID NO: 103800 - DNA, 25 bp, Probe sequence
tagaccttatttcacgtgcgattta

SEQ ID NO: 103801 - DNA, 25 bp, Probe sequence
tattgactacttttatggcttttta

SEQ ID NO: 103802 - DNA, 25 bp, Probe sequence
tttagaccttatttcacgtgcgatt

SEQ ID NO: 103803 - DNA, 25 bp, Probe sequence
attaacgactgaaatctgaacgctc

SEQ ID NO: 103804 - DNA, 25 bp, Probe sequence
atttgcgttcagatttttttacaca

SEQ ID NO: 103805 - DNA, 25 bp, Probe sequence
ataagactgtcatttgcgttcagat

SEQ ID NO: 103806 - DNA, 25 bp, Probe sequence
atctgaacgctcataagactgtcat

SEQ ID NO: 103807 - DNA, 25 bp, Probe sequence
aacgactgaaatctgaacgctcata

SEQ ID NO: 103808 - DNA, 25 bp, Probe sequence
aagactgtcatttgcgttcagattt

SEQ ID NO: 103809 - DNA, 25 bp, Probe sequence
gctcataagactgtcatttgcgttc

SEQ ID NO: 103810 - DNA, 25 bp, Probe sequence
gaatggttgagtaaaatatttttga

SEQ ID NO: 103811 - DNA, 25 bp, Probe sequence
gaacgctcataagactgtcatttgc

SEQ ID NO: 103812 - DNA, 25 bp, Probe sequence
gaaatctgaacgctcataagactgt

SEQ ID NO: 103813 - DNA, 25 bp, Probe sequence
gactgtcatttgcgttcagattttt

SEQ ID NO: 103814 - DNA, 25 bp, Probe sequence
gactgaaatctgaacgctcataaga

SEQ ID NO: 103815 - DNA, 25 bp, Probe sequence
gttcagatttttttacacaatatag

SEQ ID NO: 103816 - DNA, 25 bp, Probe sequence
gtcatttgcgttcagatttttttac

SEQ ID NO: 103817 - DNA, 25 bp, Probe sequence
tgcgttcagatttttttacacaata

SEQ ID NO: 103818 - DNA, 25 bp, Probe sequence
atcaaacacctcattgttagattat

SEQ ID NO: 103819 - DNA, 25 bp, Probe sequence
atcttacacaagctctgaatcgaca

SEQ ID NO: 103820 - DNA, 25 bp, Probe sequence
acattaatgtggttgcttgaggaaa

SEQ ID NO: 103821 - DNA, 25 bp, Probe sequence
acaggggtaattgtatatgaacatt

SEQ ID NO: 103822 - DNA, 25 bp, Probe sequence
acacctcattgttagattattgaca

SEQ ID NO: 103823 - DNA, 25 bp, Probe sequence
acaagctctgaatcgacactataag

SEQ ID NO: 103824 - DNA, 25 bp, Probe sequence
gaatcgacactataagatacaaact

SEQ ID NO: 103825 - DNA, 25 bp, Probe sequence
gaagtcaagttggttcattttagaa

SEQ ID NO: 103826 - DNA, 25 bp, Probe sequence
gaacttgctaaactattaattggag

SEQ ID NO: 103827 - DNA, 25 bp, Probe sequence
gaaatgaatatcgtgttagatgatg

SEQ ID NO: 103828 - DNA, 25 bp, Probe sequence
gagttcaaatcttacacaagctctg

SEQ ID NO: 103829 - DNA, 25 bp, Probe sequence
gattattgacattataacaggggta

SEQ ID NO: 103830 - DNA, 25 bp, Probe sequence
tgggtaaatttgaacttgctaaact

SEQ ID NO: 103831 - DNA, 25 bp, Probe sequence
taattggagcatggacatttcaaaa

SEQ ID NO: 103832 - DNA, 25 bp, Probe sequence
tacacaagctctgaatcgacactat

SEQ ID NO: 103833 - DNA, 25 bp, Probe sequence
attacatgtaaatagggggatacta

SEQ ID NO: 103834 - DNA, 25 bp, Probe sequence
atagtaattataaaacgggagcaat

SEQ ID NO: 103835 - DNA, 25 bp, Probe sequence
agtgacatctcctaagacaaaatag

SEQ ID NO: 103836 - DNA, 25 bp, Probe sequence
aaataagcgtaattacatgtaaata

SEQ ID NO: 103837 - DNA, 25 bp, Probe sequence
aaaacgggagcaattagaaatcaat

SEQ ID NO: 103838 - DNA, 25 bp, Probe sequence
aacgggagcaattagaaatcaatat

SEQ ID NO: 103839 - DNA, 25 bp, Probe sequence
aagacaaaatagttagcttagctaa

SEQ ID NO: 103840 - DNA, 25 bp, Probe sequence
gcttagctaacctttttacaacaat

SEQ ID NO: 103841 - DNA, 25 bp, Probe sequence
gacatctcctaagacaaaatagtta

SEQ ID NO: 103842 - DNA, 25 bp, Probe sequence
gtgacatctcctaagacaaaatagt

SEQ ID NO: 103843 - DNA, 25 bp, Probe sequence
gggagcaattagaaatcaatatata

SEQ ID NO: 103844 - DNA, 25 bp, Probe sequence
tagcttagctaacctttttacaaca

SEQ ID NO: 103845 - DNA, 25 bp, Probe sequence
tagctaacctttttacaacaatagt

SEQ ID NO: 103846 - DNA, 25 bp, Probe sequence
tatactttgttaaaataagcgtaat

SEQ ID NO: 103847 - DNA, 25 bp, Probe sequence
ttagctaacctttttacaacaatag

SEQ ID NO: 103848 - DNA, 25 bp, Probe sequence
atatttgcgtcttggggacagacaa

SEQ ID NO: 103849 - DNA, 25 bp, Probe sequence
atcagtacatcatatttgcgtcttg

SEQ ID NO: 103850 - DNA, 25 bp, Probe sequence
atcatatttgcgtcttggggacaga

SEQ ID NO: 103851 - DNA, 25 bp, Probe sequence
acatcatatttgcgtcttggggaca

SEQ ID NO: 103852 - DNA, 25 bp, Probe sequence
aaaagcatgccaatcagtacatcat

SEQ ID NO: 103853 - DNA, 25 bp, Probe sequence
aagcatgccaatcagtacatcatat

SEQ ID NO: 103854 - DNA, 25 bp, Probe sequence
cagtacatcatatttgcgtcttggg

SEQ ID NO: 103855 - DNA, 25 bp, Probe sequence
catgccaatcagtacatcatatttg

SEQ ID NO: 103856 - DNA, 25 bp, Probe sequence
gccaatcagtacatcatatttgcgt

SEQ ID NO: 103857 - DNA, 25 bp, Probe sequence
gatgaatagagattggcatgctttt

SEQ ID NO: 103858 - DNA, 25 bp, Probe sequence
gtacatcatatttgcgtcttgggga

SEQ ID NO: 103859 - DNA, 25 bp, Probe sequence
ggggacagacaaatgatgaatagag

SEQ ID NO: 103860 - DNA, 25 bp, Probe sequence
ggcatgctttttatttttgaatata

SEQ ID NO: 103861 - DNA, 25 bp, Probe sequence
tttgcgtcttggggacagacaaatg

SEQ ID NO: 103862 - DNA, 25 bp, Probe sequence
ttggcatgctttttatttttgaata

SEQ ID NO: 103863 - DNA, 25 bp, Probe sequence
atatagccagcaatttaatatttgt

SEQ ID NO: 103864 - DNA, 25 bp, Probe sequence
atagccagcaatttaatatttgtaa

SEQ ID NO: 103865 - DNA, 25 bp, Probe sequence
ataatatgaattacaaacatctaag

SEQ ID NO: 103866 - DNA, 25 bp, Probe sequence
agatatagccagcaatttaatattt

SEQ ID NO: 103867 - DNA, 25 bp, Probe sequence
agaagaaacataggaggcatcatat

SEQ ID NO: 103868 - DNA, 25 bp, Probe sequence
aaaatgctaagtttgatatataata

SEQ ID NO: 103869 - DNA, 25 bp, Probe sequence
aagaagaaacataggaggcatcata

SEQ ID NO: 103870 - DNA, 25 bp, Probe sequence
aatgctaagtttgatatataataaa

SEQ ID NO: 103871 - DNA, 25 bp, Probe sequence
gaattacaaacatctaagaagaaac

SEQ ID NO: 103872 - DNA, 25 bp, Probe sequence
gaagaaacataggaggcatcatatt

SEQ ID NO: 103873 - DNA, 25 bp, Probe sequence
gataaaatgctaagtttgatatata

SEQ ID NO: 103874 - DNA, 25 bp, Probe sequence
gatatagccagcaatttaatatttg

SEQ ID NO: 103875 - DNA, 25 bp, Probe sequence
tagccagcaatttaatatttgtaat

SEQ ID NO: 103876 - DNA, 25 bp, Probe sequence
tatgaattacaaacatctaagaaga

SEQ ID NO: 103877 - DNA, 25 bp, Probe sequence
tatagccagcaatttaatatttgta

SEQ ID NO: 103878 - DNA, 25 bp, Probe sequence
atatttctgtcttactccctaaaat

SEQ ID NO: 103879 - DNA, 25 bp, Probe sequence
agagatgttttaatatttctgtctt

SEQ ID NO: 103880 - DNA, 25 bp, Probe sequence
cttactccctaaaatacaatattat

SEQ ID NO: 103881 - DNA, 25 bp, Probe sequence
gaccactacatattaaatcattaga

SEQ ID NO: 103882 - DNA, 25 bp, Probe sequence
gatgttttaatatttctgtcttact

SEQ ID NO: 103883 - DNA, 25 bp, Probe sequence
gtcttactccctaaaatacaatatt

SEQ ID NO: 103884 - DNA, 25 bp, Probe sequence
gggaccactacatattaaatcatta

SEQ ID NO: 103885 - DNA, 25 bp, Probe sequence
taatatttctgtcttactccctaaa

SEQ ID NO: 103886 - DNA, 25 bp, Probe sequence
tctgtcttactccctaaaatacaat

SEQ ID NO: 103887 - DNA, 25 bp, Probe sequence
tagggaccactacatattaaatcat

SEQ ID NO: 103888 - DNA, 25 bp, Probe sequence
tatttctgtcttactccctaaaata

SEQ ID NO: 103889 - DNA, 25 bp, Probe sequence
tattaaagtaaaaacggtcatatct

SEQ ID NO: 103890 - DNA, 25 bp, Probe sequence
tttctgtcttactccctaaaataca

SEQ ID NO: 103891 - DNA, 25 bp, Probe sequence
ttttaatatttctgtcttactccct

SEQ ID NO: 103892 - DNA, 25 bp, Probe sequence
ttaatatttctgtcttactccctaa

SEQ ID NO: 103893 - DNA, 25 bp, Probe sequence
agtgcatctagtatatcatgaaaaa

SEQ ID NO: 103894 - DNA, 25 bp, Probe sequence
acccctcctagtgcatctagtatat

SEQ ID NO: 103895 - DNA, 25 bp, Probe sequence
ctagtgcatctagtatatcatgaaa

SEQ ID NO: 103896 - DNA, 25 bp, Probe sequence
ctcctagtgcatctagtatatcatg

SEQ ID NO: 103897 - DNA, 25 bp, Probe sequence
cccctcctagtgcatctagtatatc

SEQ ID NO: 103898 - DNA, 25 bp, Probe sequence
ccctcctagtgcatctagtatatca

SEQ ID NO: 103899 - DNA, 25 bp, Probe sequence
cctcctagtgcatctagtatatcat

SEQ ID NO: 103900 - DNA, 25 bp, Probe sequence
cctagtgcatctagtatatcatgaa

SEQ ID NO: 103901 - DNA, 25 bp, Probe sequence
gcatctagtatatcatgaaaaaata

SEQ ID NO: 103902 - DNA, 25 bp, Probe sequence
gtgcatctagtatatcatgaaaaaa

SEQ ID NO: 103903 - DNA, 25 bp, Probe sequence
tgcatctagtatatcatgaaaaaat

SEQ ID NO: 103904 - DNA, 25 bp, Probe sequence
tcctagtgcatctagtatatcatga

SEQ ID NO: 103905 - DNA, 25 bp, Probe sequence
tacccctcctagtgcatctagtata

SEQ ID NO: 103906 - DNA, 25 bp, Probe sequence
tagtgcatctagtatatcatgaaaa

SEQ ID NO: 103907 - DNA, 25 bp, Probe sequence
ttacccctcctagtgcatctagtat

SEQ ID NO: 103908 - DNA, 25 bp, Probe sequence
tttgccattaaagagtttagaacgt

SEQ ID NO: 103909 - DNA, 25 bp, Probe sequence
gcattttaatgatgttttaaactct

SEQ ID NO: 103910 - DNA, 25 bp, Probe sequence
gaagtgaatgcttctatcagcattt

SEQ ID NO: 103911 - DNA, 25 bp, Probe sequence
gacattgacgcgcgtcatataatga

SEQ ID NO: 103912 - DNA, 25 bp, Probe sequence
gacgcgcgtcatataatgaaagtaa

SEQ ID NO: 103913 - DNA, 25 bp, Probe sequence
gagagacattgacgcgcgtcatata

SEQ ID NO: 103914 - DNA, 25 bp, Probe sequence
gtttttttgagagacattgacgcgc

SEQ ID NO: 103915 - DNA, 25 bp, Probe sequence
gtgaatgcttctatcagcattttaa

SEQ ID NO: 103916 - DNA, 25 bp, Probe sequence
ggggcagtttttttgagagacattg

SEQ ID NO: 103917 - DNA, 25 bp, Probe sequence
ggcagtttttttgagagacattgac

SEQ ID NO: 103918 - DNA, 25 bp, Probe sequence
tgcttctatcagcattttaatgatg

SEQ ID NO: 103919 - DNA, 25 bp, Probe sequence
tcatttatttgccattaaagagttt

SEQ ID NO: 103920 - DNA, 25 bp, Probe sequence
tttgagagacattgacgcgcgtcat

SEQ ID NO: 103921 - DNA, 25 bp, Probe sequence
ttaggggcagtttttttgagagaca

SEQ ID NO: 103922 - DNA, 25 bp, Probe sequence
ttttttgagagacattgacgcgcgt

SEQ ID NO: 103923 - DNA, 25 bp, Probe sequence
attttaacatatttgcttaagtttg

SEQ ID NO: 103924 - DNA, 25 bp, Probe sequence
atatcaatcttatgcaaatttgaca

SEQ ID NO: 103925 - DNA, 25 bp, Probe sequence
agcaatttgcttaaaattttaacat

SEQ ID NO: 103926 - DNA, 25 bp, Probe sequence
agcgagcaatctgtttgatttaaat

SEQ ID NO: 103927 - DNA, 25 bp, Probe sequence
aaatttgacaattgtttgaatcaat

SEQ ID NO: 103928 - DNA, 25 bp, Probe sequence
aatagcgagcaatctgtttgattta

SEQ ID NO: 103929 - DNA, 25 bp, Probe sequence
aattaatagcgagcaatctgtttga

SEQ ID NO: 103930 - DNA, 25 bp, Probe sequence
aattgaattcgagagtatacatact

SEQ ID NO: 103931 - DNA, 25 bp, Probe sequence
caggcaacggttcttttcaaatata

SEQ ID NO: 103932 - DNA, 25 bp, Probe sequence
catactaggggatcaattaataaat

SEQ ID NO: 103933 - DNA, 25 bp, Probe sequence
gcaacggttcttttcaaatataata

SEQ ID NO: 103934 - DNA, 25 bp, Probe sequence
gaatcaatatataaacaggcaacgg

SEQ ID NO: 103935 - DNA, 25 bp, Probe sequence
gtatacatactaggggatcaattaa

SEQ ID NO: 103936 - DNA, 25 bp, Probe sequence
tataaacaggcaacggttcttttca

SEQ ID NO: 103937 - DNA, 25 bp, Probe sequence
tttgcttaagtttgaaatttgattt

SEQ ID NO: 103938 - DNA, 25 bp, Probe sequence
agcagtaagctggtttcgagtagaa

SEQ ID NO: 103939 - DNA, 25 bp, Probe sequence
actgctttttaaattgttttgagct

SEQ ID NO: 103940 - DNA, 25 bp, Probe sequence
aaaaagcagtaagctggtttcgagt

SEQ ID NO: 103941 - DNA, 25 bp, Probe sequence
aatagtgcgtttaaattgttgattc

SEQ ID NO: 103942 - DNA, 25 bp, Probe sequence
aattgttttgagctacttatactta

SEQ ID NO: 103943 - DNA, 25 bp, Probe sequence
gaatatcgttcattatgacacacta

SEQ ID NO: 103944 - DNA, 25 bp, Probe sequence
gattgatgataggtttgtattagaa

SEQ ID NO: 103945 - DNA, 25 bp, Probe sequence
gttgattcatgtagaatatcgttca

SEQ ID NO: 103946 - DNA, 25 bp, Probe sequence
gttttgagctacttatacttataaa

SEQ ID NO: 103947 - DNA, 25 bp, Probe sequence
gtagaaatcaacttactgcttttta

SEQ ID NO: 103948 - DNA, 25 bp, Probe sequence
gtaagctggtttcgagtagaaatca

SEQ ID NO: 103949 - DNA, 25 bp, Probe sequence
gtgcgtttaaattgttgattcatgt

SEQ ID NO: 103950 - DNA, 25 bp, Probe sequence
tgtagaatatcgttcattatgacac

SEQ ID NO: 103951 - DNA, 25 bp, Probe sequence
tagaaatcaacttactgctttttaa

SEQ ID NO: 103952 - DNA, 25 bp, Probe sequence
tatcgttcattatgacacactataa

SEQ ID NO: 103953 - DNA, 25 bp, Probe sequence
attgaataagttgctttgaaattta

SEQ ID NO: 103954 - DNA, 25 bp, Probe sequence
ataaaagtgaaaggagtaggtgtca

SEQ ID NO: 103955 - DNA, 25 bp, Probe sequence
agtaattgaataagttgctttgaaa

SEQ ID NO: 103956 - DNA, 25 bp, Probe sequence
agttgctttgaaatttataaaagtg

SEQ ID NO: 103957 - DNA, 25 bp, Probe sequence
aaagtaattgaataagttgctttga

SEQ ID NO: 103958 - DNA, 25 bp, Probe sequence
aagtaattgaataagttgctttgaa

SEQ ID NO: 103959 - DNA, 25 bp, Probe sequence
aattgaataagttgctttgaaattt

SEQ ID NO: 103960 - DNA, 25 bp, Probe sequence
gaataagttgctttgaaatttataa

SEQ ID NO: 103961 - DNA, 25 bp, Probe sequence
gttgctttgaaatttataaaagtga

SEQ ID NO: 103962 - DNA, 25 bp, Probe sequence
gtaattgaataagttgctttgaaat

SEQ ID NO: 103963 - DNA, 25 bp, Probe sequence
tgaataagttgctttgaaatttata

SEQ ID NO: 103964 - DNA, 25 bp, Probe sequence
taattgaataagttgctttgaaatt

SEQ ID NO: 103965 - DNA, 25 bp, Probe sequence
taagttgctttgaaatttataaaag

SEQ ID NO: 103966 - DNA, 25 bp, Probe sequence
tataaaagtgaaaggagtaggtgtc

SEQ ID NO: 103967 - DNA, 25 bp, Probe sequence
ttgaataagttgctttgaaatttat

SEQ ID NO: 103968 - DNA, 25 bp, Probe sequence
atttcttaaagtttacaatggtgct

SEQ ID NO: 103969 - DNA, 25 bp, Probe sequence
ataatggtcatgaaatacgaaagga

SEQ ID NO: 103970 - DNA, 25 bp, Probe sequence
atggtcatgaaatacgaaaggaagt

SEQ ID NO: 103971 - DNA, 25 bp, Probe sequence
atggtgctataataatggtcatgaa

SEQ ID NO: 103972 - DNA, 25 bp, Probe sequence
agtttacaatggtgctataataatg

SEQ ID NO: 103973 - DNA, 25 bp, Probe sequence
agctgtgtagaataattaaggtttt

SEQ ID NO: 103974 - DNA, 25 bp, Probe sequence
caatggtgctataataatggtcatg

SEQ ID NO: 103975 - DNA, 25 bp, Probe sequence
cttaaagtttacaatggtgctataa

SEQ ID NO: 103976 - DNA, 25 bp, Probe sequence
gaacaacttattgtaaacttttcat

SEQ ID NO: 103977 - DNA, 25 bp, Probe sequence
ggtgctataataatggtcatgaaat

SEQ ID NO: 103978 - DNA, 25 bp, Probe sequence
tcttaaagtttacaatggtgctata

SEQ ID NO: 103979 - DNA, 25 bp, Probe sequence
taatttatatagaacaacttattgt

SEQ ID NO: 103980 - DNA, 25 bp, Probe sequence
taaagtttacaatggtgctataata

SEQ ID NO: 103981 - DNA, 25 bp, Probe sequence
tacaatggtgctataataatggtca

SEQ ID NO: 103982 - DNA, 25 bp, Probe sequence
ttttcatttcttaaagtttacaatg

SEQ ID NO: 103983 - DNA, 25 bp, Probe sequence
attatattagtgcatactttatgga

SEQ ID NO: 103984 - DNA, 25 bp, Probe sequence
atatcagggaatggctatcaataaa

SEQ ID NO: 103985 - DNA, 25 bp, Probe sequence
atagctaaagtagtatacctgagaa

SEQ ID NO: 103986 - DNA, 25 bp, Probe sequence
agctcaatgtatctctttattgata

SEQ ID NO: 103987 - DNA, 25 bp, Probe sequence
aagttagtgaaatgagagtctgaaa

SEQ ID NO: 103988 - DNA, 25 bp, Probe sequence
aagtgccgttgttatcgttcaattt

SEQ ID NO: 103989 - DNA, 25 bp, Probe sequence
caacagaatgttatgattttgtaga

SEQ ID NO: 103990 - DNA, 25 bp, Probe sequence
catcttttgatattgtattaggctc

SEQ ID NO: 103991 - DNA, 25 bp, Probe sequence
gccgttgttatcgttcaatttaatt

SEQ ID NO: 103992 - DNA, 25 bp, Probe sequence
gaaaatagctcaatgtatctcttta

SEQ ID NO: 103993 - DNA, 25 bp, Probe sequence
gagtctgaaacatatcatcttttga

SEQ ID NO: 103994 - DNA, 25 bp, Probe sequence
gatattgtattaggctcttattttt

SEQ ID NO: 103995 - DNA, 25 bp, Probe sequence
ggaagggatatcagggaatggctat

SEQ ID NO: 103996 - DNA, 25 bp, Probe sequence
taataagtgccgttgttatcgttca

SEQ ID NO: 103997 - DNA, 25 bp, Probe sequence
ttaggctcttatttttatagctaga

SEQ ID NO: 103998 - DNA, 25 bp, Probe sequence
aagagatgaaatttgacgttcggat

SEQ ID NO: 103999 - DNA, 25 bp, Probe sequence
aaggtaaatcgatcgttgattggca

SEQ ID NO: 104000 - DNA, 25 bp, Probe sequence
gcaatcttgtataattttggaataa

SEQ ID NO: 104001 - DNA, 25 bp, Probe sequence
gatgaaatttgacgttcggatttac

SEQ ID NO: 104002 - DNA, 25 bp, Probe sequence
gatcgttgattggcataaagagatg

SEQ ID NO: 104003 - DNA, 25 bp, Probe sequence
gataatcattttcaataggaggaaa

SEQ ID NO: 104004 - DNA, 25 bp, Probe sequence
gatattttgctaaattttttgcgaa

SEQ ID NO: 104005 - DNA, 25 bp, Probe sequence
gtaaatcgatcgttgattggcataa

SEQ ID NO: 104006 - DNA, 25 bp, Probe sequence
gtggggatttatagggatgttaaga

SEQ ID NO: 104007 - DNA, 25 bp, Probe sequence
gggatgttaagatattttgctaaat

SEQ ID NO: 104008 - DNA, 25 bp, Probe sequence
tgtaaatgtatatgcaatcttgtat

SEQ ID NO: 104009 - DNA, 25 bp, Probe sequence
tcgatcgttgattggcataaagaga

SEQ ID NO: 104010 - DNA, 25 bp, Probe sequence
tagcactagctattgtaaatgtata

SEQ ID NO: 104011 - DNA, 25 bp, Probe sequence
tatgcaatcttgtataattttggaa

SEQ ID NO: 104012 - DNA, 25 bp, Probe sequence
ttttgtggggatttatagggatgtt

SEQ ID NO: 104013 - DNA, 25 bp, Probe sequence
attgtttgaatatcaccttaaacca

SEQ ID NO: 104014 - DNA, 25 bp, Probe sequence
atatcaccttaaaccatacagcgaa

SEQ ID NO: 104015 - DNA, 25 bp, Probe sequence
atcaccttaaaccatacagcgaatt

SEQ ID NO: 104016 - DNA, 25 bp, Probe sequence
agcgaattgtatagtttaaggtgta

SEQ ID NO: 104017 - DNA, 25 bp, Probe sequence
acctaatattgtttgaatatcacct

SEQ ID NO: 104018 - DNA, 25 bp, Probe sequence
acagcgaattgtatagtttaaggtg

SEQ ID NO: 104019 - DNA, 25 bp, Probe sequence
aatatcaccttaaaccatacagcga

SEQ ID NO: 104020 - DNA, 25 bp, Probe sequence
caccttaaaccatacagcgaattgt

SEQ ID NO: 104021 - DNA, 25 bp, Probe sequence
gaattgtatagtttaaggtgtattt

SEQ ID NO: 104022 - DNA, 25 bp, Probe sequence
gaatatcaccttaaaccatacagcg

SEQ ID NO: 104023 - DNA, 25 bp, Probe sequence
tgaatatcaccttaaaccatacagc

SEQ ID NO: 104024 - DNA, 25 bp, Probe sequence
tcaccttaaaccatacagcgaattg

SEQ ID NO: 104025 - DNA, 25 bp, Probe sequence
tagttaaatcaaacctaatattgtt

SEQ ID NO: 104026 - DNA, 25 bp, Probe sequence
tatcaccttaaaccatacagcgaat

SEQ ID NO: 104027 - DNA, 25 bp, Probe sequence
tttgaatatcaccttaaaccataca

SEQ ID NO: 104028 - DNA, 25 bp, Probe sequence
attaatcctaattgttgtgataaac

SEQ ID NO: 104029 - DNA, 25 bp, Probe sequence
atttcatattagatacaatttacaa

SEQ ID NO: 104030 - DNA, 25 bp, Probe sequence
atatttttagcatatccgctattga

SEQ ID NO: 104031 - DNA, 25 bp, Probe sequence
ataacttttcatagaatagtagtat

SEQ ID NO: 104032 - DNA, 25 bp, Probe sequence
aaattatatttttagcatatccgct

SEQ ID NO: 104033 - DNA, 25 bp, Probe sequence
aacccccaatttcatattagataca

SEQ ID NO: 104034 - DNA, 25 bp, Probe sequence
aatcgaaaacaaatagcggaatata

SEQ ID NO: 104035 - DNA, 25 bp, Probe sequence
cccccaatttcatattagatacaat

SEQ ID NO: 104036 - DNA, 25 bp, Probe sequence
gcatatccgctattgaagcaaacaa

SEQ ID NO: 104037 - DNA, 25 bp, Probe sequence
gaagcaaacaatctaatcgaaaaca

SEQ ID NO: 104038 - DNA, 25 bp, Probe sequence
taaaacccccaatttcatattagat

SEQ ID NO: 104039 - DNA, 25 bp, Probe sequence
tagtttttaatataacttttcatag

SEQ ID NO: 104040 - DNA, 25 bp, Probe sequence
tatccgctattgaagcaaacaatct

SEQ ID NO: 104041 - DNA, 25 bp, Probe sequence
ttttagcatatccgctattgaagca

SEQ ID NO: 104042 - DNA, 25 bp, Probe sequence
ttacaaaatttatattaatcctaat

SEQ ID NO: 104043 - DNA, 25 bp, Probe sequence
ataccttatttcagcttattaagct

SEQ ID NO: 104044 - DNA, 25 bp, Probe sequence
agcttgaaacaaggtacactagtct

SEQ ID NO: 104045 - DNA, 25 bp, Probe sequence
agccataccttatttcagcttatta

SEQ ID NO: 104046 - DNA, 25 bp, Probe sequence
aagactagccataccttatttcagc

SEQ ID NO: 104047 - DNA, 25 bp, Probe sequence
aagttaaagactagccataccttat

SEQ ID NO: 104048 - DNA, 25 bp, Probe sequence
ctagccataccttatttcagcttat

SEQ ID NO: 104049 - DNA, 25 bp, Probe sequence
gccataccttatttcagcttattaa

SEQ ID NO: 104050 - DNA, 25 bp, Probe sequence
gcattgggacataaaattaacttaa

SEQ ID NO: 104051 - DNA, 25 bp, Probe sequence
gactagccataccttatttcagctt

SEQ ID NO: 104052 - DNA, 25 bp, Probe sequence
ggttaattgcgtttaataacattga

SEQ ID NO: 104053 - DNA, 25 bp, Probe sequence
tgaaacaaggtacactagtcttttt

SEQ ID NO: 104054 - DNA, 25 bp, Probe sequence
taaagactagccataccttatttca

SEQ ID NO: 104055 - DNA, 25 bp, Probe sequence
tagccataccttatttcagcttatt

SEQ ID NO: 104056 - DNA, 25 bp, Probe sequence
tattcagcattgggacataaaatta

SEQ ID NO: 104057 - DNA, 25 bp, Probe sequence
ttaaaacgaagttatttattcagca

SEQ ID NO: 104058 - DNA, 25 bp, Probe sequence
attcagactaataattttcaatttg

SEQ ID NO: 104059 - DNA, 25 bp, Probe sequence
ataaattacatgtgaaccttgctac

SEQ ID NO: 104060 - DNA, 25 bp, Probe sequence
atgataactcattgcatttaaagat

SEQ ID NO: 104061 - DNA, 25 bp, Probe sequence
agatgtgcatcagaggagtggttta

SEQ ID NO: 104062 - DNA, 25 bp, Probe sequence
acatagttggatagagtttcgattt

SEQ ID NO: 104063 - DNA, 25 bp, Probe sequence
aaattttgtgagcaagccatccaat

SEQ ID NO: 104064 - DNA, 25 bp, Probe sequence
aaatgtatttaaccatattctagta

SEQ ID NO: 104065 - DNA, 25 bp, Probe sequence
aagataaatggcatgcgttatgatt

SEQ ID NO: 104066 - DNA, 25 bp, Probe sequence
gcgttatgatttaaagctcttcttt

SEQ ID NO: 104067 - DNA, 25 bp, Probe sequence
gaaccttgctacaacaagatgtgca

SEQ ID NO: 104068 - DNA, 25 bp, Probe sequence
gtgagcaagccatccaattaatata

SEQ ID NO: 104069 - DNA, 25 bp, Probe sequence
tggcaaaatatcttaaacatcaaat

SEQ ID NO: 104070 - DNA, 25 bp, Probe sequence
tgatttaaagctcttctttttttat

SEQ ID NO: 104071 - DNA, 25 bp, Probe sequence
tgaatttttatacttatttgtttag

SEQ ID NO: 104072 - DNA, 25 bp, Probe sequence
ttacatgtgaaccttgctacaacaa

SEQ ID NO: 104073 - DNA, 25 bp, Probe sequence
atcacttgtatttcatatacctatg

SEQ ID NO: 104074 - DNA, 25 bp, Probe sequence
acttgtatttcatatacctatgaag

SEQ ID NO: 104075 - DNA, 25 bp, Probe sequence
aatcacttgtatttcatatacctat

SEQ ID NO: 104076 - DNA, 25 bp, Probe sequence
cacttgtatttcatatacctatgaa

SEQ ID NO: 104077 - DNA, 25 bp, Probe sequence
catatacctatgaagaatagtttat

SEQ ID NO: 104078 - DNA, 25 bp, Probe sequence
cttgtatttcatatacctatgaaga

SEQ ID NO: 104079 - DNA, 25 bp, Probe sequence
gtatttcatatacctatgaagaata

SEQ ID NO: 104080 - DNA, 25 bp, Probe sequence
tgtatttcatatacctatgaagaat

SEQ ID NO: 104081 - DNA, 25 bp, Probe sequence
tcatatacctatgaagaatagttta

SEQ ID NO: 104082 - DNA, 25 bp, Probe sequence
tcacttgtatttcatatacctatga

SEQ ID NO: 104083 - DNA, 25 bp, Probe sequence
taatcacttgtatttcatataccta

SEQ ID NO: 104084 - DNA, 25 bp, Probe sequence
tatagttttaagtgggagggatatt

SEQ ID NO: 104085 - DNA, 25 bp, Probe sequence
tatgaagaatagtttatagttttaa

SEQ ID NO: 104086 - DNA, 25 bp, Probe sequence
ttatagttttaagtgggagggatat

SEQ ID NO: 104087 - DNA, 25 bp, Probe sequence
ttgtatttcatatacctatgaagaa

SEQ ID NO: 104088 - DNA, 25 bp, Probe sequence
atcgacttatgttttgttactgcta

SEQ ID NO: 104089 - DNA, 25 bp, Probe sequence
actacggcattctttgtgaaaactg

SEQ ID NO: 104090 - DNA, 25 bp, Probe sequence
acatgtggcgatataattggtagtg

SEQ ID NO: 104091 - DNA, 25 bp, Probe sequence
aatattttcgtaatgtccgtgtgac

SEQ ID NO: 104092 - DNA, 25 bp, Probe sequence
aattttttgctaatatcttgacaca

SEQ ID NO: 104093 - DNA, 25 bp, Probe sequence
cgacacgaacgatcaagtttctatg

SEQ ID NO: 104094 - DNA, 25 bp, Probe sequence
gcaaaacttataactacggcattct

SEQ ID NO: 104095 - DNA, 25 bp, Probe sequence
gaatgtttcgaaaataagtctgtta

SEQ ID NO: 104096 - DNA, 25 bp, Probe sequence
gaaagctttggtatttggatgaaaa

SEQ ID NO: 104097 - DNA, 25 bp, Probe sequence
gaaattagcgtccttgtgtgctttg

SEQ ID NO: 104098 - DNA, 25 bp, Probe sequence
gttactgctaaaaaacatgtggcga

SEQ ID NO: 104099 - DNA, 25 bp, Probe sequence
gttataagttatctctcgtaattaa

SEQ ID NO: 104100 - DNA, 25 bp, Probe sequence
gtccttgtgtgctttgttaacgttt

SEQ ID NO: 104101 - DNA, 25 bp, Probe sequence
gtgtgctttgttaacgttttgtaat

SEQ ID NO: 104102 - DNA, 25 bp, Probe sequence
ggtagtgaatattagatgttgacaa

SEQ ID NO: 104103 - DNA, 25 bp, Probe sequence
atatcctctatacatatactgaata

SEQ ID NO: 104104 - DNA, 25 bp, Probe sequence
acatgcctaaatttgggtgtgtcaa

SEQ ID NO: 104105 - DNA, 25 bp, Probe sequence
aatatgttgaaacactttaatcatt

SEQ ID NO: 104106 - DNA, 25 bp, Probe sequence
aatttatcaatgtatagccgatttg

SEQ ID NO: 104107 - DNA, 25 bp, Probe sequence
gccgatttgacatgcctaaatttgg

SEQ ID NO: 104108 - DNA, 25 bp, Probe sequence
gaataaatatcctctatacatatac

SEQ ID NO: 104109 - DNA, 25 bp, Probe sequence
gttttgtagcggaacatgttgatat

SEQ ID NO: 104110 - DNA, 25 bp, Probe sequence
gtatagccgatttgacatgcctaaa

SEQ ID NO: 104111 - DNA, 25 bp, Probe sequence
gtagcggaacatgttgatatatgta

SEQ ID NO: 104112 - DNA, 25 bp, Probe sequence
gtaagttttatgtcatgatttgtaa

SEQ ID NO: 104113 - DNA, 25 bp, Probe sequence
tgtagcggttataatttgaaaaggt

SEQ ID NO: 104114 - DNA, 25 bp, Probe sequence
tgaaggcaagtatatttgtaagtac

SEQ ID NO: 104115 - DNA, 25 bp, Probe sequence
taatcatttataattgtagcggtta

SEQ ID NO: 104116 - DNA, 25 bp, Probe sequence
taaatttgggtgtgtcaatggctgt

SEQ ID NO: 104117 - DNA, 25 bp, Probe sequence
tatactgaatatgttttgtagcgga

SEQ ID NO: 104118 - DNA, 25 bp, Probe sequence
atgatggcttgaagatagaaaagga

SEQ ID NO: 104119 - DNA, 25 bp, Probe sequence
aggatatagcattatgcaaaagcaa

SEQ ID NO: 104120 - DNA, 25 bp, Probe sequence
aggtttctcatcaataagcgaaggg

SEQ ID NO: 104121 - DNA, 25 bp, Probe sequence
agaggtttctcatcaataagcgaag

SEQ ID NO: 104122 - DNA, 25 bp, Probe sequence
agaaaaggatatagcattatgcaaa

SEQ ID NO: 104123 - DNA, 25 bp, Probe sequence
aaagaggtttctcatcaataagcga

SEQ ID NO: 104124 - DNA, 25 bp, Probe sequence
aaaagaggtttctcatcaataagcg

SEQ ID NO: 104125 - DNA, 25 bp, Probe sequence
aagaggtttctcatcaataagcgaa

SEQ ID NO: 104126 - DNA, 25 bp, Probe sequence
catcaataagcgaaggggacgatag

SEQ ID NO: 104127 - DNA, 25 bp, Probe sequence
gaaaagaggtttctcatcaataagc

SEQ ID NO: 104128 - DNA, 25 bp, Probe sequence
gaggtttctcatcaataagcgaagg

SEQ ID NO: 104129 - DNA, 25 bp, Probe sequence
gtttctcatcaataagcgaagggga

SEQ ID NO: 104130 - DNA, 25 bp, Probe sequence
ggtttctcatcaataagcgaagggg

SEQ ID NO: 104131 - DNA, 25 bp, Probe sequence
tctcatcaataagcgaaggggacga

SEQ ID NO: 104132 - DNA, 25 bp, Probe sequence
tttctcatcaataagcgaaggggac

SEQ ID NO: 104133 - DNA, 25 bp, Probe sequence
attcgcatcatttttatattgtctt

SEQ ID NO: 104134 - DNA, 25 bp, Probe sequence
attagacactcctttgaaaattgta

SEQ ID NO: 104135 - DNA, 25 bp, Probe sequence
atcatttttatattgtcttacgtat

SEQ ID NO: 104136 - DNA, 25 bp, Probe sequence
aggttatatatacttaacatttata

SEQ ID NO: 104137 - DNA, 25 bp, Probe sequence
aaattgtaatattatctttaactat

SEQ ID NO: 104138 - DNA, 25 bp, Probe sequence
gcatcatttttatattgtcttacgt

SEQ ID NO: 104139 - DNA, 25 bp, Probe sequence
gaattcgcatcatttttatattgtc

SEQ ID NO: 104140 - DNA, 25 bp, Probe sequence
gtaatattatctttaactataacaa

SEQ ID NO: 104141 - DNA, 25 bp, Probe sequence
tggtggacgtcggcgtttaaatagg

SEQ ID NO: 104142 - DNA, 25 bp, Probe sequence
tgcgtaatgaattcgcatcattttt

SEQ ID NO: 104143 - DNA, 25 bp, Probe sequence
tcgcatcatttttatattgtcttac

SEQ ID NO: 104144 - DNA, 25 bp, Probe sequence
taaaaataattggtggacgtcggcg

SEQ ID NO: 104145 - DNA, 25 bp, Probe sequence
tagacactcctttgaaaattgtaat

SEQ ID NO: 104146 - DNA, 25 bp, Probe sequence
tattgtcttacgtataatttgtttt

SEQ ID NO: 104147 - DNA, 25 bp, Probe sequence
ttggtggacgtcggcgtttaaatag

SEQ ID NO: 104148 - DNA, 25 bp, Probe sequence
attctcacatctcgaattgatgaca

SEQ ID NO: 104149 - DNA, 25 bp, Probe sequence
agcgactgttttattctcacatctc

SEQ ID NO: 104150 - DNA, 25 bp, Probe sequence
aaagtcctccaaagttctatatctt

SEQ ID NO: 104151 - DNA, 25 bp, Probe sequence
aacgtagcgactgttttattctcac

SEQ ID NO: 104152 - DNA, 25 bp, Probe sequence
aatgcttcttgtggggaatgttatt

SEQ ID NO: 104153 - DNA, 25 bp, Probe sequence
aattagtcaaagttacaatgagatt

SEQ ID NO: 104154 - DNA, 25 bp, Probe sequence
aattgatgacaatagttactttaac

SEQ ID NO: 104155 - DNA, 25 bp, Probe sequence
caaaattaatgcttcttgtggggaa

SEQ ID NO: 104156 - DNA, 25 bp, Probe sequence
gaataaagtcctccaaagttctata

SEQ ID NO: 104157 - DNA, 25 bp, Probe sequence
gactgttttattctcacatctcgaa

SEQ ID NO: 104158 - DNA, 25 bp, Probe sequence
gttttattctcacatctcgaattga

SEQ ID NO: 104159 - DNA, 25 bp, Probe sequence
gtagcgactgttttattctcacatc

SEQ ID NO: 104160 - DNA, 25 bp, Probe sequence
gtcctccaaagttctatatcttttt

SEQ ID NO: 104161 - DNA, 25 bp, Probe sequence
gtggggaatgttattgatttgtaaa

SEQ ID NO: 104162 - DNA, 25 bp, Probe sequence
tccaaagttctatatctttttttat

SEQ ID NO: 104163 - DNA, 25 bp, Probe sequence
aagcgcgtacttttgatggaggtga

SEQ ID NO: 104164 - DNA, 25 bp, Probe sequence
aagacaatatgtatcatcgtgttta

SEQ ID NO: 104165 - DNA, 25 bp, Probe sequence
gcttctcctataaaggaaagctcaa

SEQ ID NO: 104166 - DNA, 25 bp, Probe sequence
gatcactccttttatcttagtatag

SEQ ID NO: 104167 - DNA, 25 bp, Probe sequence
gatataacttaggcactgtagaact

SEQ ID NO: 104168 - DNA, 25 bp, Probe sequence
gttttttgatgacatatgtactaga

SEQ ID NO: 104169 - DNA, 25 bp, Probe sequence
gtatacaactatgtcatgatgtctt

SEQ ID NO: 104170 - DNA, 25 bp, Probe sequence
gtatcaatgatgtaagcgcgtactt

SEQ ID NO: 104171 - DNA, 25 bp, Probe sequence
gtaggtggcaacgaaaaatagcaaa

SEQ ID NO: 104172 - DNA, 25 bp, Probe sequence
gtaatgtggaaaaactggatcaatt

SEQ ID NO: 104173 - DNA, 25 bp, Probe sequence
gtcatgatgtcttgtgtatcaatga

SEQ ID NO: 104174 - DNA, 25 bp, Probe sequence
ggaggtgatataacttaggcactgt

SEQ ID NO: 104175 - DNA, 25 bp, Probe sequence
ggaaagctcaaagttttttgatgac

SEQ ID NO: 104176 - DNA, 25 bp, Probe sequence
ggcactgtagaactatgaattttgt

SEQ ID NO: 104177 - DNA, 25 bp, Probe sequence
tagcaaaaaaagagcttctcctata

SEQ ID NO: 104178 - DNA, 25 bp, Probe sequence
acccccgtatgttgaaacgagagct

SEQ ID NO: 104179 - DNA, 25 bp, Probe sequence
agagctcaacatatgggggttcttg

SEQ ID NO: 104180 - DNA, 25 bp, Probe sequence
acgagagctcaacatatgggggttc

SEQ ID NO: 104181 - DNA, 25 bp, Probe sequence
acaacaatatgaaaacccccgtatg

SEQ ID NO: 104182 - DNA, 25 bp, Probe sequence
acaatatgaaaacccccgtatgttg

SEQ ID NO: 104183 - DNA, 25 bp, Probe sequence
aaacgagagctcaacatatgggggt

SEQ ID NO: 104184 - DNA, 25 bp, Probe sequence
caacaatatgaaaacccccgtatgt

SEQ ID NO: 104185 - DNA, 25 bp, Probe sequence
caatatgaaaacccccgtatgttga

SEQ ID NO: 104186 - DNA, 25 bp, Probe sequence
cccccgtatgttgaaacgagagctc

SEQ ID NO: 104187 - DNA, 25 bp, Probe sequence
ccccgtatgttgaaacgagagctca

SEQ ID NO: 104188 - DNA, 25 bp, Probe sequence
gctcaacatatgggggttcttgttt

SEQ ID NO: 104189 - DNA, 25 bp, Probe sequence
gagctcaacatatgggggttcttgt

SEQ ID NO: 104190 - DNA, 25 bp, Probe sequence
gagagctcaacatatgggggttctt

SEQ ID NO: 104191 - DNA, 25 bp, Probe sequence
tcaacatatgggggttcttgttttt

SEQ ID NO: 104192 - DNA, 25 bp, Probe sequence
tatgggggttcttgtttttataatg

SEQ ID NO: 104193 - DNA, 25 bp, Probe sequence
attgctgtctaaatgtgcatgtaat

SEQ ID NO: 104194 - DNA, 25 bp, Probe sequence
atcccacatcattgttacaaatgta

SEQ ID NO: 104195 - DNA, 25 bp, Probe sequence
atgtaatgtacaatggtgcagataa

SEQ ID NO: 104196 - DNA, 25 bp, Probe sequence
agctcctttagcgcattctgagtgt

SEQ ID NO: 104197 - DNA, 25 bp, Probe sequence
agcgcattctgagtgtgttagttaa

SEQ ID NO: 104198 - DNA, 25 bp, Probe sequence
acaatttattgtttcgagctccttt

SEQ ID NO: 104199 - DNA, 25 bp, Probe sequence
cctttagcgcattctgagtgtgtta

SEQ ID NO: 104200 - DNA, 25 bp, Probe sequence
gcatcaaatatgctatatcccacat

SEQ ID NO: 104201 - DNA, 25 bp, Probe sequence
gcagataatacacttaagtccttaa

SEQ ID NO: 104202 - DNA, 25 bp, Probe sequence
gaaacgttagttccaagagtcattt

SEQ ID NO: 104203 - DNA, 25 bp, Probe sequence
gacatcggtgcttaaaggagctgga

SEQ ID NO: 104204 - DNA, 25 bp, Probe sequence
gatgtaaatgaatattgctgtctaa

SEQ ID NO: 104205 - DNA, 25 bp, Probe sequence
tgctatatcccacatcattgttaca

SEQ ID NO: 104206 - DNA, 25 bp, Probe sequence
tagttccaagagtcatttttaaaca

SEQ ID NO: 104207 - DNA, 25 bp, Probe sequence
tattgtttcgagctcctttagcgca

SEQ ID NO: 104208 - DNA, 25 bp, Probe sequence
atcatcgacaggcctatgaaacatc

SEQ ID NO: 104209 - DNA, 25 bp, Probe sequence
atcgacaggcctatgaaacatcatg

SEQ ID NO: 104210 - DNA, 25 bp, Probe sequence
acatgcaagcagtgtaggagcactt

SEQ ID NO: 104211 - DNA, 25 bp, Probe sequence
aagggtgtttttgatggaataaatg

SEQ ID NO: 104212 - DNA, 25 bp, Probe sequence
aagtgtttctacatgcaagcagtgt

SEQ ID NO: 104213 - DNA, 25 bp, Probe sequence
aatcacgtgctattgtgaatcaatc

SEQ ID NO: 104214 - DNA, 25 bp, Probe sequence
gcagtgtaggagcactttttttaat

SEQ ID NO: 104215 - DNA, 25 bp, Probe sequence
gcaagcagtgtaggagcactttttt

SEQ ID NO: 104216 - DNA, 25 bp, Probe sequence
gaatcaatcatcgacaggcctatga

SEQ ID NO: 104217 - DNA, 25 bp, Probe sequence
gaaaaagtgtttctacatgcaagca

SEQ ID NO: 104218 - DNA, 25 bp, Probe sequence
gaaaaacaaaaaaatcacgtgctat

SEQ ID NO: 104219 - DNA, 25 bp, Probe sequence
gacaggcctatgaaacatcatgtat

SEQ ID NO: 104220 - DNA, 25 bp, Probe sequence
gtgaatcaatcatcgacaggcctat

SEQ ID NO: 104221 - DNA, 25 bp, Probe sequence
ggcctatgaaacatcatgtattatt

SEQ ID NO: 104222 - DNA, 25 bp, Probe sequence
tcaatcatcgacaggcctatgaaac

SEQ ID NO: 104223 - DNA, 25 bp, Probe sequence
agatatgactgaaaagcgtgaaaca

SEQ ID NO: 104224 - DNA, 25 bp, Probe sequence
aaatttcacttaacaactagtacat

SEQ ID NO: 104225 - DNA, 25 bp, Probe sequence
aaagatgatttaatttcgcgcaaaa

SEQ ID NO: 104226 - DNA, 25 bp, Probe sequence
aacactttgtatttatgggctattt

SEQ ID NO: 104227 - DNA, 25 bp, Probe sequence
aagataaatattaccttctaaatgg

SEQ ID NO: 104228 - DNA, 25 bp, Probe sequence
aatttcgcgcaaaatatttcaaata

SEQ ID NO: 104229 - DNA, 25 bp, Probe sequence
cgaatagaactaatagcccgtaaat

SEQ ID NO: 104230 - DNA, 25 bp, Probe sequence
gaaggtgataacactttgtatttat

SEQ ID NO: 104231 - DNA, 25 bp, Probe sequence
gtataacgatttttaggtgaggtga

SEQ ID NO: 104232 - DNA, 25 bp, Probe sequence
gtagatatttatcaaacttgggtta

SEQ ID NO: 104233 - DNA, 25 bp, Probe sequence
ggtgaggtgattattaagtattgtc

SEQ ID NO: 104234 - DNA, 25 bp, Probe sequence
tgggctattttatttaatgcctgat

SEQ ID NO: 104235 - DNA, 25 bp, Probe sequence
tcaaacttgggttattaattttcag

SEQ ID NO: 104236 - DNA, 25 bp, Probe sequence
tagcccgtaaatagaaggtgataac

SEQ ID NO: 104237 - DNA, 25 bp, Probe sequence
tttatttaatgcctgatttgatttt

SEQ ID NO: 104238 - DNA, 25 bp, Probe sequence
atagttatacgtctacagaagtata

SEQ ID NO: 104239 - DNA, 25 bp, Probe sequence
atacgtctacagaagtatagtaaaa

SEQ ID NO: 104240 - DNA, 25 bp, Probe sequence
agttatacgtctacagaagtatagt

SEQ ID NO: 104241 - DNA, 25 bp, Probe sequence
aaatagttatacgtctacagaagta

SEQ ID NO: 104242 - DNA, 25 bp, Probe sequence
aaaaatagttatacgtctacagaag

SEQ ID NO: 104243 - DNA, 25 bp, Probe sequence
aaaatagttatacgtctacagaagt

SEQ ID NO: 104244 - DNA, 25 bp, Probe sequence
aatagttatacgtctacagaagtat

SEQ ID NO: 104245 - DNA, 25 bp, Probe sequence
gaaaacagacaaagtatgtaaggaa

SEQ ID NO: 104246 - DNA, 25 bp, Probe sequence
gttatacgtctacagaagtatagta

SEQ ID NO: 104247 - DNA, 25 bp, Probe sequence
gtaaggaatagtaaaggagtggtgg

SEQ ID NO: 104248 - DNA, 25 bp, Probe sequence
taaggaatagtaaaggagtggtggg

SEQ ID NO: 104249 - DNA, 25 bp, Probe sequence
taaaaaatagttatacgtctacaga

SEQ ID NO: 104250 - DNA, 25 bp, Probe sequence
tacgtctacagaagtatagtaaaaa

SEQ ID NO: 104251 - DNA, 25 bp, Probe sequence
tagttatacgtctacagaagtatag

SEQ ID NO: 104252 - DNA, 25 bp, Probe sequence
ttatacgtctacagaagtatagtaa

SEQ ID NO: 104253 - DNA, 25 bp, Probe sequence
atcgttcaagttacatcacaacatc

SEQ ID NO: 104254 - DNA, 25 bp, Probe sequence
agcacgtgactagccgattttttta

SEQ ID NO: 104255 - DNA, 25 bp, Probe sequence
aacagatagcttttaatcgttcaag

SEQ ID NO: 104256 - DNA, 25 bp, Probe sequence
cagttgtattgttgattcttttaat

SEQ ID NO: 104257 - DNA, 25 bp, Probe sequence
ctatttgtcggctagcacgtgacta

SEQ ID NO: 104258 - DNA, 25 bp, Probe sequence
gaagaagtcttcagttgtattgttg

SEQ ID NO: 104259 - DNA, 25 bp, Probe sequence
gacagccacctcctaaaagatgata

SEQ ID NO: 104260 - DNA, 25 bp, Probe sequence
gactagccgatttttttatgcataa

SEQ ID NO: 104261 - DNA, 25 bp, Probe sequence
gaggacattttcaatatcttttaaa

SEQ ID NO: 104262 - DNA, 25 bp, Probe sequence
gattgtgctatgatattacttgtaa

SEQ ID NO: 104263 - DNA, 25 bp, Probe sequence
tcaatatttattacttactttcctt

SEQ ID NO: 104264 - DNA, 25 bp, Probe sequence
tactttcctttctatttgtcggcta

SEQ ID NO: 104265 - DNA, 25 bp, Probe sequence
tacatcacaacatcttcaatattta

SEQ ID NO: 104266 - DNA, 25 bp, Probe sequence
tattacttactttcctttctatttg

SEQ ID NO: 104267 - DNA, 25 bp, Probe sequence
ttacttgtaacagggggagcgatta

SEQ ID NO: 104268 - DNA, 25 bp, Probe sequence
attaatcactccactttaacgcaat

SEQ ID NO: 104269 - DNA, 25 bp, Probe sequence
atcactccactttaacgcaatatat

SEQ ID NO: 104270 - DNA, 25 bp, Probe sequence
aaaatagcatactcccatgtgcaaa

SEQ ID NO: 104271 - DNA, 25 bp, Probe sequence
aactcgattaatgcatctttacaat

SEQ ID NO: 104272 - DNA, 25 bp, Probe sequence
aacgcgatggtatttacaacttgta

SEQ ID NO: 104273 - DNA, 25 bp, Probe sequence
aagctgaatatgttgtttgtttaat

SEQ ID NO: 104274 - DNA, 25 bp, Probe sequence
gcatactcccatgtgcaaataatat

SEQ ID NO: 104275 - DNA, 25 bp, Probe sequence
gcaatatattttattagcgttggct

SEQ ID NO: 104276 - DNA, 25 bp, Probe sequence
gactaaatctaccatcttaatcatt

SEQ ID NO: 104277 - DNA, 25 bp, Probe sequence
gatatattaccgtaagtcatactgt

SEQ ID NO: 104278 - DNA, 25 bp, Probe sequence
gtcatactgtatattcccaatttat

SEQ ID NO: 104279 - DNA, 25 bp, Probe sequence
ggctattgttgtttaacgcgatggt

SEQ ID NO: 104280 - DNA, 25 bp, Probe sequence
tatgtactcatctatttaaatctta

SEQ ID NO: 104281 - DNA, 25 bp, Probe sequence
tattcccaatttatacattatgtac

SEQ ID NO: 104282 - DNA, 25 bp, Probe sequence
ttagcgttggctattgttgtttaac

SEQ ID NO: 104283 - DNA, 25 bp, Probe sequence
atagcttaaatcgaagttgtagtgt

SEQ ID NO: 104284 - DNA, 25 bp, Probe sequence
atgacaaatttggccctagcttatt

SEQ ID NO: 104285 - DNA, 25 bp, Probe sequence
atggccttatcaaatcattggtcat

SEQ ID NO: 104286 - DNA, 25 bp, Probe sequence
aagtggcaatattatcgttagtttt

SEQ ID NO: 104287 - DNA, 25 bp, Probe sequence
aatcaactgcgtttgtttttaatat

SEQ ID NO: 104288 - DNA, 25 bp, Probe sequence
caaatttggccctagcttattaaag

SEQ ID NO: 104289 - DNA, 25 bp, Probe sequence
caaatcattggtcatatgcgtatgt

SEQ ID NO: 104290 - DNA, 25 bp, Probe sequence
gaatgaatcctgtaatcaactgcgt

SEQ ID NO: 104291 - DNA, 25 bp, Probe sequence
gaatcctgtaatcaactgcgtttgt

SEQ ID NO: 104292 - DNA, 25 bp, Probe sequence
gaatgttatgagtaggcgcattttt

SEQ ID NO: 104293 - DNA, 25 bp, Probe sequence
tggccctagcttattaaagttaaat

SEQ ID NO: 104294 - DNA, 25 bp, Probe sequence
gagtaggcgcatttttttataaata

SEQ ID NO: 104295 - DNA, 25 bp, Probe sequence
ggtcatatgcgtatgttatacaaga

SEQ ID NO: 104296 - DNA, 25 bp, Probe sequence
taatgtgcgcttattttatgacaaa

SEQ ID NO: 104297 - DNA, 25 bp, Probe sequence
tatcgttagtttttactgtgggctt

SEQ ID NO: 104298 - DNA, 25 bp, Probe sequence
atttagtatcaatcagagatggggt

SEQ ID NO: 104299 - DNA, 25 bp, Probe sequence
atatcataattaccgagaatagctg

SEQ ID NO: 104300 - DNA, 25 bp, Probe sequence
agcctgctatagtagttctgtaaac

SEQ ID NO: 104301 - DNA, 25 bp, Probe sequence
aaaagcctgctatagtagttctgta

SEQ ID NO: 104302 - DNA, 25 bp, Probe sequence
aattaccgagaatagctgaagttgt

SEQ ID NO: 104303 - DNA, 25 bp, Probe sequence
gcaaatattaatgtaccaaaatcga

SEQ ID NO: 104304 - DNA, 25 bp, Probe sequence
gcaaagttgcaaaagcctgctatag

SEQ ID NO: 104305 - DNA, 25 bp, Probe sequence
gaatagctgaagttgtatgtgactc

SEQ ID NO: 104306 - DNA, 25 bp, Probe sequence
gttgtatgtgactcaacggtacttg

SEQ ID NO: 104307 - DNA, 25 bp, Probe sequence
gtagttctgtaaacgattgcatggt

SEQ ID NO: 104308 - DNA, 25 bp, Probe sequence
gtgactcaacggtacttgagcaact

SEQ ID NO: 104309 - DNA, 25 bp, Probe sequence
tgatatactcctttttaatattatt

SEQ ID NO: 104310 - DNA, 25 bp, Probe sequence
tcaacggtacttgagcaactttttt

SEQ ID NO: 104311 - DNA, 25 bp, Probe sequence
tacggcaataagtttttttatggat

SEQ ID NO: 104312 - DNA, 25 bp, Probe sequence
ttctgtaaacgattgcatggtatgc

SEQ ID NO: 104313 - DNA, 25 bp, Probe sequence
atgtatgagatagggtggtttaaat

SEQ ID NO: 104314 - DNA, 25 bp, Probe sequence
atggcagaacgttcatgtttatgta

SEQ ID NO: 104315 - DNA, 25 bp, Probe sequence
accaccttacctcattaaatggacg

SEQ ID NO: 104316 - DNA, 25 bp, Probe sequence
acctcattaaatggacgaccatatg

SEQ ID NO: 104317 - DNA, 25 bp, Probe sequence
aatggacgaccatatgtatgtgaaa

SEQ ID NO: 104318 - DNA, 25 bp, Probe sequence
aatggcagaacgttcatgtttatgt

SEQ ID NO: 104319 - DNA, 25 bp, Probe sequence
caccttacctcattaaatggacgac

SEQ ID NO: 104320 - DNA, 25 bp, Probe sequence
ccttacctcattaaatggacgacca

SEQ ID NO: 104321 - DNA, 25 bp, Probe sequence
gaacgttcatgtttatgtatgagat

SEQ ID NO: 104322 - DNA, 25 bp, Probe sequence
gaaaaccaccttacctcattaaatg

SEQ ID NO: 104323 - DNA, 25 bp, Probe sequence
gaaatggcagaacgttcatgtttat

SEQ ID NO: 104324 - DNA, 25 bp, Probe sequence
gacgaccatatgtatgtgaaatggc

SEQ ID NO: 104325 - DNA, 25 bp, Probe sequence
ggcagaacgttcatgtttatgtatg

SEQ ID NO: 104326 - DNA, 25 bp, Probe sequence
tatgtatgtgaaatggcagaacgtt

SEQ ID NO: 104327 - DNA, 25 bp, Probe sequence
ttacctcattaaatggacgaccata

SEQ ID NO: 104328 - DNA, 25 bp, Probe sequence
atagaatgaagtggtcatcggacta

SEQ ID NO: 104329 - DNA, 25 bp, Probe sequence
atgaagtggtcatcggactatgtta

SEQ ID NO: 104330 - DNA, 25 bp, Probe sequence
agtggtcatcggactatgttaagct

SEQ ID NO: 104331 - DNA, 25 bp, Probe sequence
aagtggtcatcggactatgttaagc

SEQ ID NO: 104332 - DNA, 25 bp, Probe sequence
catcggactatgttaagctttgata

SEQ ID NO: 104333 - DNA, 25 bp, Probe sequence
gaatgaagtggtcatcggactatgt

SEQ ID NO: 104334 - DNA, 25 bp, Probe sequence
gaagtggtcatcggactatgttaag

SEQ ID NO: 104335 - DNA, 25 bp, Probe sequence
gtcatcggactatgttaagctttga

SEQ ID NO: 104336 - DNA, 25 bp, Probe sequence
gtggtcatcggactatgttaagctt

SEQ ID NO: 104337 - DNA, 25 bp, Probe sequence
ggtcatcggactatgttaagctttg

SEQ ID NO: 104338 - DNA, 25 bp, Probe sequence
ggactatgttaagctttgataaaga

SEQ ID NO: 104339 - DNA, 25 bp, Probe sequence
tggtcatcggactatgttaagcttt

SEQ ID NO: 104340 - DNA, 25 bp, Probe sequence
tgaagtggtcatcggactatgttaa

SEQ ID NO: 104341 - DNA, 25 bp, Probe sequence
tcggactatgttaagctttgataaa

SEQ ID NO: 104342 - DNA, 25 bp, Probe sequence
tcatcggactatgttaagctttgat

SEQ ID NO: 104343 - DNA, 25 bp, Probe sequence
gaggacctcccgaggaatacatggc

SEQ ID NO: 104344 - DNA, 25 bp, Probe sequence
aggtgacttaattttgttcaagttg

SEQ ID NO: 104345 - DNA, 25 bp, Probe sequence
acctcccgaggaatacatggcatta

SEQ ID NO: 104346 - DNA, 25 bp, Probe sequence
aatacatggcattaaatacacgttt

SEQ ID NO: 104347 - DNA, 25 bp, Probe sequence
cctcccgaggaatacatggcattaa

SEQ ID NO: 104348 - DNA, 25 bp, Probe sequence
gacctcccgaggaatacatggcatt

SEQ ID NO: 104349 - DNA, 25 bp, Probe sequence
gttcaagttgattttaccacgcttt

SEQ ID NO: 104350 - DNA, 25 bp, Probe sequence
gtgaggacctcccgaggaatacatg

SEQ ID NO: 104351 - DNA, 25 bp, Probe sequence
ggacctcccgaggaatacatggcat

SEQ ID NO: 104352 - DNA, 25 bp, Probe sequence
tcccgaggaatacatggcattaaat

SEQ ID NO: 104353 - DNA, 25 bp, Probe sequence
tcaagttgattttaccacgcttttt

SEQ ID NO: 104354 - DNA, 25 bp, Probe sequence
ttgttcaagttgattttaccacgct

SEQ ID NO: 104355 - DNA, 25 bp, Probe sequence
ttttctttattcactaagacttttg

SEQ ID NO: 104356 - DNA, 25 bp, Probe sequence
ttcactaagacttttgaatgaagtt

SEQ ID NO: 104357 - DNA, 25 bp, Probe sequence
ttctttattcactaagacttttgaa

SEQ ID NO: 104358 - DNA, 25 bp, Probe sequence
atcactatacgcaatcattgtaaat

SEQ ID NO: 104359 - DNA, 25 bp, Probe sequence
atgatcatcgtatagatgtgtcttt

SEQ ID NO: 104360 - DNA, 25 bp, Probe sequence
agacacatcactatacgcaatcatt

SEQ ID NO: 104361 - DNA, 25 bp, Probe sequence
acatcactatacgcaatcattgtaa

SEQ ID NO: 104362 - DNA, 25 bp, Probe sequence
acacatcactatacgcaatcattgt

SEQ ID NO: 104363 - DNA, 25 bp, Probe sequence
aaagacacatcactatacgcaatca

SEQ ID NO: 104364 - DNA, 25 bp, Probe sequence
aaaaagacacatcactatacgcaat

SEQ ID NO: 104365 - DNA, 25 bp, Probe sequence
aaaaaagacacatcactatacgcaa

SEQ ID NO: 104366 - DNA, 25 bp, Probe sequence
aaaagacacatcactatacgcaatc

SEQ ID NO: 104367 - DNA, 25 bp, Probe sequence
aagacacatcactatacgcaatcat

SEQ ID NO: 104368 - DNA, 25 bp, Probe sequence
cactatacgcaatcattgtaaatga

SEQ ID NO: 104369 - DNA, 25 bp, Probe sequence
cacatcactatacgcaatcattgta

SEQ ID NO: 104370 - DNA, 25 bp, Probe sequence
gacacatcactatacgcaatcattg

SEQ ID NO: 104371 - DNA, 25 bp, Probe sequence
gatcatcgtatagatgtgtctttta

SEQ ID NO: 104372 - DNA, 25 bp, Probe sequence
tcattgtaaatgatcatcgtataga

SEQ ID NO: 104373 - DNA, 25 bp, Probe sequence
attaaaatcttgtatgtcattatat

SEQ ID NO: 104374 - DNA, 25 bp, Probe sequence
atacgtcaatgtcgttgtaggtgtg

SEQ ID NO: 104375 - DNA, 25 bp, Probe sequence
aaatgtgtgatagatcgttattaca

SEQ ID NO: 104376 - DNA, 25 bp, Probe sequence
aatctgattatacaaaatactttca

SEQ ID NO: 104377 - DNA, 25 bp, Probe sequence
aatactttcaaaatacgtcaatgtc

SEQ ID NO: 104378 - DNA, 25 bp, Probe sequence
caacctccttgaaaataaatgtgtg

SEQ ID NO: 104379 - DNA, 25 bp, Probe sequence
cgatgtcatatataaggtcgtgaaa

SEQ ID NO: 104380 - DNA, 25 bp, Probe sequence
gatagatcgttattacattaaaatc

SEQ ID NO: 104381 - DNA, 25 bp, Probe sequence
gatataggtttgattatgcgtttaa

SEQ ID NO: 104382 - DNA, 25 bp, Probe sequence
gtattacaaatacaacgatgtcata

SEQ ID NO: 104383 - DNA, 25 bp, Probe sequence
gtaggtgtgtaagcgtttactatat

SEQ ID NO: 104384 - DNA, 25 bp, Probe sequence
gtatgtcattatatatatttgtgta

SEQ ID NO: 104385 - DNA, 25 bp, Probe sequence
gtaagcgtttactatatattatatt

SEQ ID NO: 104386 - DNA, 25 bp, Probe sequence
gtcgttgtaggtgtgtaagcgttta

SEQ ID NO: 104387 - DNA, 25 bp, Probe sequence
tgcgtttaaaacgaatgtattacaa

SEQ ID NO: 104388 - DNA, 25 bp, Probe sequence
ataggctcaaggccattaaatcata

SEQ ID NO: 104389 - DNA, 25 bp, Probe sequence
atgataggctcaaggccattaaatc

SEQ ID NO: 104390 - DNA, 25 bp, Probe sequence
aggaagttatgataggctcaaggcc

SEQ ID NO: 104391 - DNA, 25 bp, Probe sequence
aggccattaaatcataacttccttt

SEQ ID NO: 104392 - DNA, 25 bp, Probe sequence
aggctcaaggccattaaatcataac

SEQ ID NO: 104393 - DNA, 25 bp, Probe sequence
aagttatgataggctcaaggccatt

SEQ ID NO: 104394 - DNA, 25 bp, Probe sequence
caaggccattaaatcataacttcct

SEQ ID NO: 104395 - DNA, 25 bp, Probe sequence
gctcaaggccattaaatcataactt

SEQ ID NO: 104396 - DNA, 25 bp, Probe sequence
gataggctcaaggccattaaatcat

SEQ ID NO: 104397 - DNA, 25 bp, Probe sequence
gttatgataggctcaaggccattaa

SEQ ID NO: 104398 - DNA, 25 bp, Probe sequence
ggaagttatgataggctcaaggcca

SEQ ID NO: 104399 - DNA, 25 bp, Probe sequence
ggctcaaggccattaaatcataact

SEQ ID NO: 104400 - DNA, 25 bp, Probe sequence
tgataggctcaaggccattaaatca

SEQ ID NO: 104401 - DNA, 25 bp, Probe sequence
tcaaggccattaaatcataacttcc

SEQ ID NO: 104402 - DNA, 25 bp, Probe sequence
ttatgataggctcaaggccattaaa

SEQ ID NO: 104403 - DNA, 25 bp, Probe sequence
atatatcgatgtagccaagtaaggt

SEQ ID NO: 104404 - DNA, 25 bp, Probe sequence
agtaaggtggcttgttatattaaca

SEQ ID NO: 104405 - DNA, 25 bp, Probe sequence
aacagatcatgttgtactcaccgta

SEQ ID NO: 104406 - DNA, 25 bp, Probe sequence
aatgatgatcatctatgtttggaac

SEQ ID NO: 104407 - DNA, 25 bp, Probe sequence
catgttgtactcaccgtataacgct

SEQ ID NO: 104408 - DNA, 25 bp, Probe sequence
ctcaccgtataacgctaatctttta

SEQ ID NO: 104409 - DNA, 25 bp, Probe sequence
gcttaacaatatatcgatgtagcca

SEQ ID NO: 104410 - DNA, 25 bp, Probe sequence
gatcatctatgtttggaactgagca

SEQ ID NO: 104411 - DNA, 25 bp, Probe sequence
gatcatgttgtactcaccgtataac

SEQ ID NO: 104412 - DNA, 25 bp, Probe sequence
gttgtactcaccgtataacgctaat

SEQ ID NO: 104413 - DNA, 25 bp, Probe sequence
gtataacgctaatcttttaaaaatg

SEQ ID NO: 104414 - DNA, 25 bp, Probe sequence
gtactcaccgtataacgctaatctt

SEQ ID NO: 104415 - DNA, 25 bp, Probe sequence
gtaagagcgaaagtgggtggacaac

SEQ ID NO: 104416 - DNA, 25 bp, Probe sequence
ggtggcttgttatattaacagatca

SEQ ID NO: 104417 - DNA, 25 bp, Probe sequence
ttggaactgagcaaaaatacgttaa

SEQ ID NO: 104418 - DNA, 25 bp, Probe sequence
atgaagcctcggcaacatctcgaat

SEQ ID NO: 104419 - DNA, 25 bp, Probe sequence
acgtaaacgtaaataagcatcactt

SEQ ID NO: 104420 - DNA, 25 bp, Probe sequence
acatctcgaatgtgccaattccagt

SEQ ID NO: 104421 - DNA, 25 bp, Probe sequence
aagcatcacttatctagagaggtgg

SEQ ID NO: 104422 - DNA, 25 bp, Probe sequence
aatgtgccaattccagtaaccgtaa

SEQ ID NO: 104423 - DNA, 25 bp, Probe sequence
gccaattccagtaaccgtaatggtt

SEQ ID NO: 104424 - DNA, 25 bp, Probe sequence
gcctcggcaacatctcgaatgtgcc

SEQ ID NO: 104425 - DNA, 25 bp, Probe sequence
gccctatgaagcctcggcaacatct

SEQ ID NO: 104426 - DNA, 25 bp, Probe sequence
gcaacatctcgaatgtgccaattcc

SEQ ID NO: 104427 - DNA, 25 bp, Probe sequence
gagaggtggagggactggccctatg

SEQ ID NO: 104428 - DNA, 25 bp, Probe sequence
gattgacgtactaaggattatcttg

SEQ ID NO: 104429 - DNA, 25 bp, Probe sequence
gtaatggtttgaagataagcaggta

SEQ ID NO: 104430 - DNA, 25 bp, Probe sequence
tgtgccaattccagtaaccgtaatg

SEQ ID NO: 104431 - DNA, 25 bp, Probe sequence
tggagggactggccctatgaagcct

SEQ ID NO: 104432 - DNA, 25 bp, Probe sequence
taaggattatcttgtaacgtaaacg

SEQ ID NO: 104433 - DNA, 25 bp, Probe sequence
attacatagaaacgctacccgtaga

SEQ ID NO: 104434 - DNA, 25 bp, Probe sequence
atcggcttattttaatactctgtca

SEQ ID NO: 104435 - DNA, 25 bp, Probe sequence
agcgtttgctcagggtgtggattat

SEQ ID NO: 104436 - DNA, 25 bp, Probe sequence
acgctacccgtagaagtactgatca

SEQ ID NO: 104437 - DNA, 25 bp, Probe sequence
aaatagtcggtaaaggtgtgtatct

SEQ ID NO: 104438 - DNA, 25 bp, Probe sequence
aacaagtgaaatgcctaaggttaga

SEQ ID NO: 104439 - DNA, 25 bp, Probe sequence
aacgtaaatttgcaaactcgatatt

SEQ ID NO: 104440 - DNA, 25 bp, Probe sequence
gggtgtggattataagttttaagca

SEQ ID NO: 104441 - DNA, 25 bp, Probe sequence
ggtgtgtatctttatcggcttattt

SEQ ID NO: 104442 - DNA, 25 bp, Probe sequence
tgttgcgggattgggtttagggacg

SEQ ID NO: 104443 - DNA, 25 bp, Probe sequence
ggttgtatgaagcttttaattgaac

SEQ ID NO: 104444 - DNA, 25 bp, Probe sequence
ggatgtcaggacaacaacgaaaaag

SEQ ID NO: 104445 - DNA, 25 bp, Probe sequence
taatttagttacttcaatccattaa

SEQ ID NO: 104446 - DNA, 25 bp, Probe sequence
taaactttcttaatgaggatgtcag

SEQ ID NO: 104447 - DNA, 25 bp, Probe sequence
tactctgtcataaggagcgtttgct

SEQ ID NO: 104448 - DNA, 25 bp, Probe sequence
ataaccattaagcgaataaggagat

SEQ ID NO: 104449 - DNA, 25 bp, Probe sequence
ataataaccattaagcgaataagga

SEQ ID NO: 104450 - DNA, 25 bp, Probe sequence
atcatgattaagttcctaggaagat

SEQ ID NO: 104451 - DNA, 25 bp, Probe sequence
agtaatttttagtgtaatcatgatt

SEQ ID NO: 104452 - DNA, 25 bp, Probe sequence
aatcatgattaagttcctaggaaga

SEQ ID NO: 104453 - DNA, 25 bp, Probe sequence
ccattaagcgaataaggagatgtta

SEQ ID NO: 104454 - DNA, 25 bp, Probe sequence
gaagattgggtaaataataaccatt

SEQ ID NO: 104455 - DNA, 25 bp, Probe sequence
gaaagtaatttttagtgtaatcatg

SEQ ID NO: 104456 - DNA, 25 bp, Probe sequence
gattaagttcctaggaagattgggt

SEQ ID NO: 104457 - DNA, 25 bp, Probe sequence
gtaatcatgattaagttcctaggaa

SEQ ID NO: 104458 - DNA, 25 bp, Probe sequence
tgggtaaataataaccattaagcga

SEQ ID NO: 104459 - DNA, 25 bp, Probe sequence
tcgagcttgtttttataaagaagaa

SEQ ID NO: 104460 - DNA, 25 bp, Probe sequence
taatcatgattaagttcctaggaag

SEQ ID NO: 104461 - DNA, 25 bp, Probe sequence
ttcctaggaagattgggtaaataat

SEQ ID NO: 104462 - DNA, 25 bp, Probe sequence
ttcgagcttgtttttataaagaaga

SEQ ID NO: 104463 - DNA, 25 bp, Probe sequence
agatgatcatcgtagggtagacaac

SEQ ID NO: 104464 - DNA, 25 bp, Probe sequence
actaatgtttagagcttttgtggtt

SEQ ID NO: 104465 - DNA, 25 bp, Probe sequence
acacgtttttgtatagattcttaat

SEQ ID NO: 104466 - DNA, 25 bp, Probe sequence
aaagctctaagcattggtttacact

SEQ ID NO: 104467 - DNA, 25 bp, Probe sequence
aactgtctatcattagcgaaagtaa

SEQ ID NO: 104468 - DNA, 25 bp, Probe sequence
aagcattggtttacactaatgttta

SEQ ID NO: 104469 - DNA, 25 bp, Probe sequence
gaatagtttgacaacagtgttacga

SEQ ID NO: 104470 - DNA, 25 bp, Probe sequence
gaaatcatcgtttaatagtcaaaga

SEQ ID NO: 104471 - DNA, 25 bp, Probe sequence
gacaacagtgttacgatattattaa

SEQ ID NO: 104472 - DNA, 25 bp, Probe sequence
gacaacatatcattgacttaaggaa

SEQ ID NO: 104473 - DNA, 25 bp, Probe sequence
gagtacattgttgtgaaatcatcgt

SEQ ID NO: 104474 - DNA, 25 bp, Probe sequence
gggtagacaacatatcattgactta

SEQ ID NO: 104475 - DNA, 25 bp, Probe sequence
tgtttagagcttttgtggtttgtaa

SEQ ID NO: 104476 - DNA, 25 bp, Probe sequence
taaacaactgtctatcattagcgaa

SEQ ID NO: 104477 - DNA, 25 bp, Probe sequence
tttatccgagaacacgtttttgtat

SEQ ID NO: 104478 - DNA, 25 bp, Probe sequence
attagtttatttatatttgttggct

SEQ ID NO: 104479 - DNA, 25 bp, Probe sequence
atttgttggctatattttaacatac

SEQ ID NO: 104480 - DNA, 25 bp, Probe sequence
cttttatttataggttcaagctatg

SEQ ID NO: 104481 - DNA, 25 bp, Probe sequence
gttggctatattttaacatactata

SEQ ID NO: 104482 - DNA, 25 bp, Probe sequence
gttcaagctatggataattagttta

SEQ ID NO: 104483 - DNA, 25 bp, Probe sequence
gtttatttatatttgttggctatat

SEQ ID NO: 104484 - DNA, 25 bp, Probe sequence
ggctatattttaacatactataatg

SEQ ID NO: 104485 - DNA, 25 bp, Probe sequence
taatgtaagcgttttaaatttagtg

SEQ ID NO: 104486 - DNA, 25 bp, Probe sequence
tagtttatttatatttgttggctat

SEQ ID NO: 104487 - DNA, 25 bp, Probe sequence
taggttcaagctatggataattagt

SEQ ID NO: 104488 - DNA, 25 bp, Probe sequence
tatttataggttcaagctatggata

SEQ ID NO: 104489 - DNA, 25 bp, Probe sequence
ttcttaaaagaacaggagcgaattt

SEQ ID NO: 104490 - DNA, 25 bp, Probe sequence
ttatatttgttggctatattttaac

SEQ ID NO: 104491 - DNA, 25 bp, Probe sequence
ttgaagataataatgtaagcgtttt

SEQ ID NO: 104492 - DNA, 25 bp, Probe sequence
ttgttggctatattttaacatacta

SEQ ID NO: 104493 - DNA, 25 bp, Probe sequence
attaatttttatacgatgatctgag

SEQ ID NO: 104494 - DNA, 25 bp, Probe sequence
atgacgtcattaatttttatacgat

SEQ ID NO: 104495 - DNA, 25 bp, Probe sequence
acgcaactgcataagaggctctaat

SEQ ID NO: 104496 - DNA, 25 bp, Probe sequence
ctacgcaactgcataagaggctcta

SEQ ID NO: 104497 - DNA, 25 bp, Probe sequence
ctgcttcacttctttcttagaattt

SEQ ID NO: 104498 - DNA, 25 bp, Probe sequence
cgatgatctgagcaactgcataaga

SEQ ID NO: 104499 - DNA, 25 bp, Probe sequence
cgcaactgcataagaggctctaata

SEQ ID NO: 104500 - DNA, 25 bp, Probe sequence
gcttcacttctttcttagaattttt

SEQ ID NO: 104501 - DNA, 25 bp, Probe sequence
gactacgcaactgcataagaggctc

SEQ ID NO: 104502 - DNA, 25 bp, Probe sequence
gtatcgatttttgaaatgacgtcat

SEQ ID NO: 104503 - DNA, 25 bp, Probe sequence
tcacttctttcttagaatttttata

SEQ ID NO: 104504 - DNA, 25 bp, Probe sequence
taaattatttttgtatcgatttttg

SEQ ID NO: 104505 - DNA, 25 bp, Probe sequence
tacgatgatctgagcaactgcataa

SEQ ID NO: 104506 - DNA, 25 bp, Probe sequence
tatacgatgatctgagcaactgcat

SEQ ID NO: 104507 - DNA, 25 bp, Probe sequence
ttgactacgcaactgcataagaggc

SEQ ID NO: 104508 - DNA, 25 bp, Probe sequence
attgcagggcagaatgtgagtattt

SEQ ID NO: 104509 - DNA, 25 bp, Probe sequence
atgtgacgagatttgcattgcaggg

SEQ ID NO: 104510 - DNA, 25 bp, Probe sequence
actgtattgtttgaaaagttctctt

SEQ ID NO: 104511 - DNA, 25 bp, Probe sequence
aaataattgcagtaagaagactctt

SEQ ID NO: 104512 - DNA, 25 bp, Probe sequence
aagttgtagtcatcttactgcttat

SEQ ID NO: 104513 - DNA, 25 bp, Probe sequence
caagaggcctttttataatgacgcc

SEQ ID NO: 104514 - DNA, 25 bp, Probe sequence
gaagactcttaagttgtagtcatct

SEQ ID NO: 104515 - DNA, 25 bp, Probe sequence
gacgagatttgcattgcagggcaga

SEQ ID NO: 104516 - DNA, 25 bp, Probe sequence
gttgtagtcatcttactgcttattt

SEQ ID NO: 104517 - DNA, 25 bp, Probe sequence
gtttgaaaagttctcttattatata

SEQ ID NO: 104518 - DNA, 25 bp, Probe sequence
gtagtcatcttactgcttatttatg

SEQ ID NO: 104519 - DNA, 25 bp, Probe sequence
gtcatcttactgcttatttatgttt

SEQ ID NO: 104520 - DNA, 25 bp, Probe sequence
gggcagaatgtgagtatttcttaat

SEQ ID NO: 104521 - DNA, 25 bp, Probe sequence
ggatttcaagaggcctttttataat

SEQ ID NO: 104522 - DNA, 25 bp, Probe sequence
ttactgcttatttatgtttgttgaa

SEQ ID NO: 104523 - DNA, 25 bp, Probe sequence
attatacatattacaagccgagaga

SEQ ID NO: 104524 - DNA, 25 bp, Probe sequence
atatcttttagtaacaattatacat

SEQ ID NO: 104525 - DNA, 25 bp, Probe sequence
atatgtaacctccattaggtaacaa

SEQ ID NO: 104526 - DNA, 25 bp, Probe sequence
atcagctaagtattcgttattacat

SEQ ID NO: 104527 - DNA, 25 bp, Probe sequence
atgaaaatgtaatagtcttgacgta

SEQ ID NO: 104528 - DNA, 25 bp, Probe sequence
agccgagagataaattgtctatgtc

SEQ ID NO: 104529 - DNA, 25 bp, Probe sequence
agccacataaataagagggggaaat

SEQ ID NO: 104530 - DNA, 25 bp, Probe sequence
acctccattaggtaacaagcaaaat

SEQ ID NO: 104531 - DNA, 25 bp, Probe sequence
actttaattgttaataagccacata

SEQ ID NO: 104532 - DNA, 25 bp, Probe sequence
aacataaatcagctaagtattcgtt

SEQ ID NO: 104533 - DNA, 25 bp, Probe sequence
gaattcaaaatttcctatacgttat

SEQ ID NO: 104534 - DNA, 25 bp, Probe sequence
gatacggatttaactatgaattgaa

SEQ ID NO: 104535 - DNA, 25 bp, Probe sequence
ggtaacaagcaaaatatcttttagt

SEQ ID NO: 104536 - DNA, 25 bp, Probe sequence
tagtcttgacgtattttattaacat

SEQ ID NO: 104537 - DNA, 25 bp, Probe sequence
tttcctatacgttatactttaattg

SEQ ID NO: 104538 - DNA, 25 bp, Probe sequence
agaggtactagcaagcgctttgtta

SEQ ID NO: 104539 - DNA, 25 bp, Probe sequence
agaaaagcgcttgctagcatcatct

SEQ ID NO: 104540 - DNA, 25 bp, Probe sequence
agcgcttgctagcatcatcttttta

SEQ ID NO: 104541 - DNA, 25 bp, Probe sequence
aaagcgcttgctagcatcatctttt

SEQ ID NO: 104542 - DNA, 25 bp, Probe sequence
aaaagcgcttgctagcatcatcttt

SEQ ID NO: 104543 - DNA, 25 bp, Probe sequence
aagcgcttgctagcatcatcttttt

SEQ ID NO: 104544 - DNA, 25 bp, Probe sequence
aagaggtactagcaagcgctttgtt

SEQ ID NO: 104545 - DNA, 25 bp, Probe sequence
cgcttgctagcatcatctttttaag

SEQ ID NO: 104546 - DNA, 25 bp, Probe sequence
gcgcttgctagcatcatctttttaa

SEQ ID NO: 104547 - DNA, 25 bp, Probe sequence
gctagcatcatctttttaagaggta

SEQ ID NO: 104548 - DNA, 25 bp, Probe sequence
gcttgctagcatcatctttttaaga

SEQ ID NO: 104549 - DNA, 25 bp, Probe sequence
gcatcatctttttaagaggtactag

SEQ ID NO: 104550 - DNA, 25 bp, Probe sequence
gaaaagcgcttgctagcatcatctt

SEQ ID NO: 104551 - DNA, 25 bp, Probe sequence
gtatagaaaagcgcttgctagcatc

SEQ ID NO: 104552 - DNA, 25 bp, Probe sequence
ttgctagcatcatctttttaagagg

SEQ ID NO: 104553 - DNA, 25 bp, Probe sequence
attgtaaattctgattgatatgttt

SEQ ID NO: 104554 - DNA, 25 bp, Probe sequence
atcattctccttaacgagtattatt

SEQ ID NO: 104555 - DNA, 25 bp, Probe sequence
atgttaatttatacgagtcatgtaa

SEQ ID NO: 104556 - DNA, 25 bp, Probe sequence
aatttatacgagtcatgtaaaatat

SEQ ID NO: 104557 - DNA, 25 bp, Probe sequence
aattctgattgatatgtttaaaaaa

SEQ ID NO: 104558 - DNA, 25 bp, Probe sequence
cattctccttaacgagtattattta

SEQ ID NO: 104559 - DNA, 25 bp, Probe sequence
gaattgtaaattctgattgatatgt

SEQ ID NO: 104560 - DNA, 25 bp, Probe sequence
gttaatttatacgagtcatgtaaaa

SEQ ID NO: 104561 - DNA, 25 bp, Probe sequence
gtaaattctgattgatatgtttaaa

SEQ ID NO: 104562 - DNA, 25 bp, Probe sequence
gggtatgttaatttatacgagtcat

SEQ ID NO: 104563 - DNA, 25 bp, Probe sequence
ggtatgttaatttatacgagtcatg

SEQ ID NO: 104564 - DNA, 25 bp, Probe sequence
tcattctccttaacgagtattattt

SEQ ID NO: 104565 - DNA, 25 bp, Probe sequence
tacataaatatgggaggctaccttc

SEQ ID NO: 104566 - DNA, 25 bp, Probe sequence
tatgttaatttatacgagtcatgta

SEQ ID NO: 104567 - DNA, 25 bp, Probe sequence
tatattgtactataaaacattttta

SEQ ID NO: 104568 - DNA, 25 bp, Probe sequence
ataagactattatacaaacgatgtg

SEQ ID NO: 104569 - DNA, 25 bp, Probe sequence
atcaatagcatcagtggttatagat

SEQ ID NO: 104570 - DNA, 25 bp, Probe sequence
atgtgtaagttgattcctttttgtt

SEQ ID NO: 104571 - DNA, 25 bp, Probe sequence
aggaatcaatagcatcagtggttat

SEQ ID NO: 104572 - DNA, 25 bp, Probe sequence
acgatgtgtaagttgattccttttt

SEQ ID NO: 104573 - DNA, 25 bp, Probe sequence
aaaggaatcaatagcatcagtggtt

SEQ ID NO: 104574 - DNA, 25 bp, Probe sequence
aaacgatgtgtaagttgattccttt

SEQ ID NO: 104575 - DNA, 25 bp, Probe sequence
aacgatgtgtaagttgattcctttt

SEQ ID NO: 104576 - DNA, 25 bp, Probe sequence
cgatgtgtaagttgattcctttttg

SEQ ID NO: 104577 - DNA, 25 bp, Probe sequence
gcatcagtggttatagataagacta

SEQ ID NO: 104578 - DNA, 25 bp, Probe sequence
gaatcaatagcatcagtggttatag

SEQ ID NO: 104579 - DNA, 25 bp, Probe sequence
gaaaagttcatttaacacttataat

SEQ ID NO: 104580 - DNA, 25 bp, Probe sequence
gatgtgtaagttgattcctttttgt

SEQ ID NO: 104581 - DNA, 25 bp, Probe sequence
tgtgtaagttgattcctttttgttt

SEQ ID NO: 104582 - DNA, 25 bp, Probe sequence
tgtaagttgattcctttttgttttg

SEQ ID NO: 104583 - DNA, 25 bp, Probe sequence
attgatagcaaatgtgtgatggagt

SEQ ID NO: 104584 - DNA, 25 bp, Probe sequence
atatgtagccgatagattattgata

SEQ ID NO: 104585 - DNA, 25 bp, Probe sequence
atagcaaatgtgtgatggagtgatt

SEQ ID NO: 104586 - DNA, 25 bp, Probe sequence
atgatatgtagccgatagattattg

SEQ ID NO: 104587 - DNA, 25 bp, Probe sequence
atgtagccgatagattattgatagc

SEQ ID NO: 104588 - DNA, 25 bp, Probe sequence
agcaaatgtgtgatggagtgatttc

SEQ ID NO: 104589 - DNA, 25 bp, Probe sequence
agccgatagattattgatagcaaat

SEQ ID NO: 104590 - DNA, 25 bp, Probe sequence
gccgatagattattgatagcaaatg

SEQ ID NO: 104591 - DNA, 25 bp, Probe sequence
gatagcaaatgtgtgatggagtgat

SEQ ID NO: 104592 - DNA, 25 bp, Probe sequence
gatatgtagccgatagattattgat

SEQ ID NO: 104593 - DNA, 25 bp, Probe sequence
gtagccgatagattattgatagcaa

SEQ ID NO: 104594 - DNA, 25 bp, Probe sequence
tgtagccgatagattattgatagca

SEQ ID NO: 104595 - DNA, 25 bp, Probe sequence
tgatatgtagccgatagattattga

SEQ ID NO: 104596 - DNA, 25 bp, Probe sequence
tagccgatagattattgatagcaaa

SEQ ID NO: 104597 - DNA, 25 bp, Probe sequence
tatgtagccgatagattattgatag

SEQ ID NO: 104598 - DNA, 25 bp, Probe sequence
atatctcggcacaatgatgctggga

SEQ ID NO: 104599 - DNA, 25 bp, Probe sequence
ataaggcaataaaggtatgggaaat

SEQ ID NO: 104600 - DNA, 25 bp, Probe sequence
atctcggcacaatgatgctgggata

SEQ ID NO: 104601 - DNA, 25 bp, Probe sequence
atgatgctgggatatttttttacaa

SEQ ID NO: 104602 - DNA, 25 bp, Probe sequence
aaatatctcggcacaatgatgctgg

SEQ ID NO: 104603 - DNA, 25 bp, Probe sequence
aatatctcggcacaatgatgctggg

SEQ ID NO: 104604 - DNA, 25 bp, Probe sequence
caatgatgctgggatatttttttac

SEQ ID NO: 104605 - DNA, 25 bp, Probe sequence
ctcggcacaatgatgctgggatatt

SEQ ID NO: 104606 - DNA, 25 bp, Probe sequence
cggcacaatgatgctgggatatttt

SEQ ID NO: 104607 - DNA, 25 bp, Probe sequence
gctgggatatttttttacaaataag

SEQ ID NO: 104608 - DNA, 25 bp, Probe sequence
gcacaatgatgctgggatatttttt

SEQ ID NO: 104609 - DNA, 25 bp, Probe sequence
gatgctgggatatttttttacaaat

SEQ ID NO: 104610 - DNA, 25 bp, Probe sequence
tgatataaatatctcggcacaatga

SEQ ID NO: 104611 - DNA, 25 bp, Probe sequence
tatctcggcacaatgatgctgggat

SEQ ID NO: 104612 - DNA, 25 bp, Probe sequence
tataaatatctcggcacaatgatgc

SEQ ID NO: 104613 - DNA, 25 bp, Probe sequence
attctcctcgcaattatatgattaa

SEQ ID NO: 104614 - DNA, 25 bp, Probe sequence
agtatagttaacgaagcgttgactt

SEQ ID NO: 104615 - DNA, 25 bp, Probe sequence
aaacgtgaacattgcagtatgacat

SEQ ID NO: 104616 - DNA, 25 bp, Probe sequence
aatattctcctcgcaattatatgat

SEQ ID NO: 104617 - DNA, 25 bp, Probe sequence
ctcttttaaacgtgaacattgcagt

SEQ ID NO: 104618 - DNA, 25 bp, Probe sequence
gcagtatgacatatttttagtatag

SEQ ID NO: 104619 - DNA, 25 bp, Probe sequence
gactcttttaaacgtgaacattgca

SEQ ID NO: 104620 - DNA, 25 bp, Probe sequence
gagactcttttaaacgtgaacattg

SEQ ID NO: 104621 - DNA, 25 bp, Probe sequence
gattgagactcttttaaacgtgaac

SEQ ID NO: 104622 - DNA, 25 bp, Probe sequence
gtgaacattgcagtatgacatattt

SEQ ID NO: 104623 - DNA, 25 bp, Probe sequence
ggaatattttatttgcagagattga

SEQ ID NO: 104624 - DNA, 25 bp, Probe sequence
tctcctcgcaattatatgattaaat

SEQ ID NO: 104625 - DNA, 25 bp, Probe sequence
tatactttgttatggaatattttat

SEQ ID NO: 104626 - DNA, 25 bp, Probe sequence
tattttatttgcagagattgagact

SEQ ID NO: 104627 - DNA, 25 bp, Probe sequence
tattctcctcgcaattatatgatta

SEQ ID NO: 104628 - DNA, 25 bp, Probe sequence
acaatcaacccatccgcatgttggc

SEQ ID NO: 104629 - DNA, 25 bp, Probe sequence
aaagggcacttttaacattatacat

SEQ ID NO: 104630 - DNA, 25 bp, Probe sequence
aaaaaaacaatcaacccatccgcat

SEQ ID NO: 104631 - DNA, 25 bp, Probe sequence
aacattatacatgcaacaaatcaat

SEQ ID NO: 104632 - DNA, 25 bp, Probe sequence
cccatccgcatgttggcggcacgat

SEQ ID NO: 104633 - DNA, 25 bp, Probe sequence
cgcatgttggcggcacgattgattg

SEQ ID NO: 104634 - DNA, 25 bp, Probe sequence
gcaacaaatcaatatttctagtttt

SEQ ID NO: 104635 - DNA, 25 bp, Probe sequence
gatttcattttcatgatagtaatca

SEQ ID NO: 104636 - DNA, 25 bp, Probe sequence
ggcacgattgattgacttataagga

SEQ ID NO: 104637 - DNA, 25 bp, Probe sequence
tcaaatcccccttgttgaatatccc

SEQ ID NO: 104638 - DNA, 25 bp, Probe sequence
tccctctccctaaataagcttttat

SEQ ID NO: 104639 - DNA, 25 bp, Probe sequence
tcaacccatccgcatgttggcggca

SEQ ID NO: 104640 - DNA, 25 bp, Probe sequence
taagcttttatatgtaagcgttata

SEQ ID NO: 104641 - DNA, 25 bp, Probe sequence
tataaggagatagatttcattttca

SEQ ID NO: 104642 - DNA, 25 bp, Probe sequence
ttggcggcacgattgattgacttat

SEQ ID NO: 104643 - DNA, 25 bp, Probe sequence
attgacccagttacgatttcatgca

SEQ ID NO: 104644 - DNA, 25 bp, Probe sequence
atttgacatgaaaacgtaattgggt

SEQ ID NO: 104645 - DNA, 25 bp, Probe sequence
atagcaagggttatatagactaatt

SEQ ID NO: 104646 - DNA, 25 bp, Probe sequence
atacaattgacccagttacgatttc

SEQ ID NO: 104647 - DNA, 25 bp, Probe sequence
atgcaagatgatatttgacatgaaa

SEQ ID NO: 104648 - DNA, 25 bp, Probe sequence
acccagttacgatttcatgcaagat

SEQ ID NO: 104649 - DNA, 25 bp, Probe sequence
acatacaattgacccagttacgatt

SEQ ID NO: 104650 - DNA, 25 bp, Probe sequence
acaattgacccagttacgatttcat

SEQ ID NO: 104651 - DNA, 25 bp, Probe sequence
aacatacaattgacccagttacgat

SEQ ID NO: 104652 - DNA, 25 bp, Probe sequence
aattgacccagttacgatttcatgc

SEQ ID NO: 104653 - DNA, 25 bp, Probe sequence
cccagttacgatttcatgcaagatg

SEQ ID NO: 104654 - DNA, 25 bp, Probe sequence
gacccagttacgatttcatgcaaga

SEQ ID NO: 104655 - DNA, 25 bp, Probe sequence
gttacgatttcatgcaagatgatat

SEQ ID NO: 104656 - DNA, 25 bp, Probe sequence
tgacccagttacgatttcatgcaag

SEQ ID NO: 104657 - DNA, 25 bp, Probe sequence
ttgacccagttacgatttcatgcaa

SEQ ID NO: 104658 - DNA, 25 bp, Probe sequence
atatgtctagttgtctgttataatg

SEQ ID NO: 104659 - DNA, 25 bp, Probe sequence
atcaatatgtctagttgtctgttat

SEQ ID NO: 104660 - DNA, 25 bp, Probe sequence
atcactgttcaattgtagtcttaaa

SEQ ID NO: 104661 - DNA, 25 bp, Probe sequence
atcttctacattatatacttttttt

SEQ ID NO: 104662 - DNA, 25 bp, Probe sequence
aattcttttctttacttatcaatat

SEQ ID NO: 104663 - DNA, 25 bp, Probe sequence
ctacattatatactttttttggcaa

SEQ ID NO: 104664 - DNA, 25 bp, Probe sequence
gcacctccgtataaaattcttttct

SEQ ID NO: 104665 - DNA, 25 bp, Probe sequence
gcaaggcacctccgtataaaattct

SEQ ID NO: 104666 - DNA, 25 bp, Probe sequence
gaaaatatcttctacattatatact

SEQ ID NO: 104667 - DNA, 25 bp, Probe sequence
gaaaaatcactgttcaattgtagtc

SEQ ID NO: 104668 - DNA, 25 bp, Probe sequence
gtctagttgtctgttataatgatga

SEQ ID NO: 104669 - DNA, 25 bp, Probe sequence
ggggatagacaatcattggatacat

SEQ ID NO: 104670 - DNA, 25 bp, Probe sequence
tgttcaattgtagtcttaaatttga

SEQ ID NO: 104671 - DNA, 25 bp, Probe sequence
ttttttggcaaagaatgtaggggat

SEQ ID NO: 104672 - DNA, 25 bp, Probe sequence
ttttctttacttatcaatatgtcta

SEQ ID NO: 104673 - DNA, 25 bp, Probe sequence
aaaatttggcattgacgtagtaggt

SEQ ID NO: 104674 - DNA, 25 bp, Probe sequence
aatcaaaaattatgttgtggggaca

SEQ ID NO: 104675 - DNA, 25 bp, Probe sequence
caaatatggttatcgatactttttt

SEQ ID NO: 104676 - DNA, 25 bp, Probe sequence
gccaaatatggttatcgatactttt

SEQ ID NO: 104677 - DNA, 25 bp, Probe sequence
gaagtgtgactaatcaaaaattatg

SEQ ID NO: 104678 - DNA, 25 bp, Probe sequence
gttgtggggacatgatttttaaagt

SEQ ID NO: 104679 - DNA, 25 bp, Probe sequence
gtatcggtgccaaatatggttatcg

SEQ ID NO: 104680 - DNA, 25 bp, Probe sequence
gggacatgatttttaaagtatcggt

SEQ ID NO: 104681 - DNA, 25 bp, Probe sequence
ggcattgacgtagtaggtcattaat

SEQ ID NO: 104682 - DNA, 25 bp, Probe sequence
tgatttttaaagtatcggtgccaaa

SEQ ID NO: 104683 - DNA, 25 bp, Probe sequence
tcggtgccaaatatggttatcgata

SEQ ID NO: 104684 - DNA, 25 bp, Probe sequence
taaagtatcggtgccaaatatggtt

SEQ ID NO: 104685 - DNA, 25 bp, Probe sequence
tatggttatcgatactttttttatt

SEQ ID NO: 104686 - DNA, 25 bp, Probe sequence
tatattaaaatttggcattgacgta

SEQ ID NO: 104687 - DNA, 25 bp, Probe sequence
ttggcattgacgtagtaggtcatta

SEQ ID NO: 104688 - DNA, 25 bp, Probe sequence
aacactcttataaaaattgttggtg

SEQ ID NO: 104689 - DNA, 25 bp, Probe sequence
ctttgtgaattttaaccaacactct

SEQ ID NO: 104690 - DNA, 25 bp, Probe sequence
gttggtgtttttttagttatcatgt

SEQ ID NO: 104691 - DNA, 25 bp, Probe sequence
gttatcatgtctctataataaataa

SEQ ID NO: 104692 - DNA, 25 bp, Probe sequence
gtttttttagttatcatgtctctat

SEQ ID NO: 104693 - DNA, 25 bp, Probe sequence
gtgaattttaaccaacactcttata

SEQ ID NO: 104694 - DNA, 25 bp, Probe sequence
gtgtttttttagttatcatgtctct

SEQ ID NO: 104695 - DNA, 25 bp, Probe sequence
ggtgtttttttagttatcatgtctc

SEQ ID NO: 104696 - DNA, 25 bp, Probe sequence
tgaattttaaccaacactcttataa

SEQ ID NO: 104697 - DNA, 25 bp, Probe sequence
taaccaacactcttataaaaattgt

SEQ ID NO: 104698 - DNA, 25 bp, Probe sequence
ttttagttatcatgtctctataata

SEQ ID NO: 104699 - DNA, 25 bp, Probe sequence
ttttttagttatcatgtctctataa

SEQ ID NO: 104700 - DNA, 25 bp, Probe sequence
ttagttatcatgtctctataataaa

SEQ ID NO: 104701 - DNA, 25 bp, Probe sequence
ttgttggtgtttttttagttatcat

SEQ ID NO: 104702 - DNA, 25 bp, Probe sequence
ttgtgaattttaaccaacactctta

SEQ ID NO: 104703 - DNA, 25 bp, Probe sequence
attatgtggaaatctcggcattttt

SEQ ID NO: 104704 - DNA, 25 bp, Probe sequence
atagacctatgaatttagcatcaaa

SEQ ID NO: 104705 - DNA, 25 bp, Probe sequence
agttgttttatagcatttctttatt

SEQ ID NO: 104706 - DNA, 25 bp, Probe sequence
actttatctagttgttttatagcat

SEQ ID NO: 104707 - DNA, 25 bp, Probe sequence
acttgagctattcatagacctatga

SEQ ID NO: 104708 - DNA, 25 bp, Probe sequence
acaaaacttgagctattcatagacc

SEQ ID NO: 104709 - DNA, 25 bp, Probe sequence
aaacatagtttcttctattatattg

SEQ ID NO: 104710 - DNA, 25 bp, Probe sequence
aaaatgccgagattattatgtggaa

SEQ ID NO: 104711 - DNA, 25 bp, Probe sequence
gcaccgtaacatatgtactattatc

SEQ ID NO: 104712 - DNA, 25 bp, Probe sequence
gttttatagcatttctttattagaa

SEQ ID NO: 104713 - DNA, 25 bp, Probe sequence
gtttcttctattatattgaattgaa

SEQ ID NO: 104714 - DNA, 25 bp, Probe sequence
gtactattatctatccatttggttt

SEQ ID NO: 104715 - DNA, 25 bp, Probe sequence
ggcatttttatattgatagcaccgt

SEQ ID NO: 104716 - DNA, 25 bp, Probe sequence
tgatagcaccgtaacatatgtacta

SEQ ID NO: 104717 - DNA, 25 bp, Probe sequence
tatccatttggtttaactttatcta

SEQ ID NO: 104718 - DNA, 25 bp, Probe sequence
atttagtttctgttcgtgatagtta

SEQ ID NO: 104719 - DNA, 25 bp, Probe sequence
atgatgttcatgaaacttgtgagta

SEQ ID NO: 104720 - DNA, 25 bp, Probe sequence
agtttctgttcgtgatagttataaa

SEQ ID NO: 104721 - DNA, 25 bp, Probe sequence
aaatttagtttctgttcgtgatagt

SEQ ID NO: 104722 - DNA, 25 bp, Probe sequence
aaacttgtgagtaatgctaatatat

SEQ ID NO: 104723 - DNA, 25 bp, Probe sequence
aatttagtttctgttcgtgatagtt

SEQ ID NO: 104724 - DNA, 25 bp, Probe sequence
gatgttcatgaaacttgtgagtaat

SEQ ID NO: 104725 - DNA, 25 bp, Probe sequence
gttcatgaaacttgtgagtaatgct

SEQ ID NO: 104726 - DNA, 25 bp, Probe sequence
taatgatgttcatgaaacttgtgag

SEQ ID NO: 104727 - DNA, 25 bp, Probe sequence
taaatttagtttctgttcgtgatag

SEQ ID NO: 104728 - DNA, 25 bp, Probe sequence
tagtttctgttcgtgatagttataa

SEQ ID NO: 104729 - DNA, 25 bp, Probe sequence
tttagtttctgttcgtgatagttat

SEQ ID NO: 104730 - DNA, 25 bp, Probe sequence
ttagtttctgttcgtgatagttata

SEQ ID NO: 104731 - DNA, 25 bp, Probe sequence
ttctgttcgtgatagttataaacta

SEQ ID NO: 104732 - DNA, 25 bp, Probe sequence
ttgtgagtaatgctaatatataaaa

SEQ ID NO: 104733 - DNA, 25 bp, Probe sequence
atttcttgaattgtattcttgggat

SEQ ID NO: 104734 - DNA, 25 bp, Probe sequence
atatgtatgtattgaacaccttctt

SEQ ID NO: 104735 - DNA, 25 bp, Probe sequence
ataattgagagagtactttcataaa

SEQ ID NO: 104736 - DNA, 25 bp, Probe sequence
atgtatgtattgaacaccttctttt

SEQ ID NO: 104737 - DNA, 25 bp, Probe sequence
aagtaaagttaatcatttcttgaat

SEQ ID NO: 104738 - DNA, 25 bp, Probe sequence
aaggtgttcaaatataagactaaat

SEQ ID NO: 104739 - DNA, 25 bp, Probe sequence
caccttctttttagttataattgag

SEQ ID NO: 104740 - DNA, 25 bp, Probe sequence
gaagaggaacagaattgaggtgaaa

SEQ ID NO: 104741 - DNA, 25 bp, Probe sequence
gagagagtactttcataaataatgt

SEQ ID NO: 104742 - DNA, 25 bp, Probe sequence
gtattcttgggataatatttgtaaa

SEQ ID NO: 104743 - DNA, 25 bp, Probe sequence
gtatgtattgaacaccttcttttta

SEQ ID NO: 104744 - DNA, 25 bp, Probe sequence
tgtattgaacaccttctttttagtt

SEQ ID NO: 104745 - DNA, 25 bp, Probe sequence
tgaacaccttctttttagttataat

SEQ ID NO: 104746 - DNA, 25 bp, Probe sequence
taatcatttcttgaattgtattctt

SEQ ID NO: 104747 - DNA, 25 bp, Probe sequence
tattgaacaccttctttttagttat

SEQ ID NO: 104748 - DNA, 25 bp, Probe sequence
atttttgtgttttttagatgtgcga

SEQ ID NO: 104749 - DNA, 25 bp, Probe sequence
atacaatgattgctgaggatacttt

SEQ ID NO: 104750 - DNA, 25 bp, Probe sequence
agatgtgcgatacaatgattgctga

SEQ ID NO: 104751 - DNA, 25 bp, Probe sequence
actgacacctcgcttataataaata

SEQ ID NO: 104752 - DNA, 25 bp, Probe sequence
aaagcaaggagaacgcagcaacatg

SEQ ID NO: 104753 - DNA, 25 bp, Probe sequence
caatgattgctgaggatactttata

SEQ ID NO: 104754 - DNA, 25 bp, Probe sequence
catgtaagtcttaatttgttatatt

SEQ ID NO: 104755 - DNA, 25 bp, Probe sequence
cgcagcaacatgtaagtcttaattt

SEQ ID NO: 104756 - DNA, 25 bp, Probe sequence
gcaaggagaacgcagcaacatgtaa

SEQ ID NO: 104757 - DNA, 25 bp, Probe sequence
gaacgcagcaacatgtaagtcttaa

SEQ ID NO: 104758 - DNA, 25 bp, Probe sequence
gacacctcgcttataataaatatta

SEQ ID NO: 104759 - DNA, 25 bp, Probe sequence
gattgctgaggatactttataaaaa

SEQ ID NO: 104760 - DNA, 25 bp, Probe sequence
ggagaacgcagcaacatgtaagtct

SEQ ID NO: 104761 - DNA, 25 bp, Probe sequence
tatgggtcaatatttttgtgttttt

SEQ ID NO: 104762 - DNA, 25 bp, Probe sequence
tttgtgttttttagatgtgcgatac

SEQ ID NO: 104763 - DNA, 25 bp, Probe sequence
ataacaattgtctaatcaaggatta

SEQ ID NO: 104764 - DNA, 25 bp, Probe sequence
atgacgtgctttagtttatttattt

SEQ ID NO: 104765 - DNA, 25 bp, Probe sequence
atgatgacgtgctttagtttattta

SEQ ID NO: 104766 - DNA, 25 bp, Probe sequence
acaaaaaagcgcgtcactattatat

SEQ ID NO: 104767 - DNA, 25 bp, Probe sequence
aaagatagtttgacgcaatattaga

SEQ ID NO: 104768 - DNA, 25 bp, Probe sequence
aaaaagcgcgtcactattatataaa

SEQ ID NO: 104769 - DNA, 25 bp, Probe sequence
aaaatgatgacgtgctttagtttat

SEQ ID NO: 104770 - DNA, 25 bp, Probe sequence
aagcgcgtcactattatataaaatg

SEQ ID NO: 104771 - DNA, 25 bp, Probe sequence
gaaacaacctataataatagtttgt

SEQ ID NO: 104772 - DNA, 25 bp, Probe sequence
gacgcaatattagaaacaacctata

SEQ ID NO: 104773 - DNA, 25 bp, Probe sequence
gtttacaaaaaagcgcgtcactatt

SEQ ID NO: 104774 - DNA, 25 bp, Probe sequence
gtaaagacgctaaatgttaatgatt

SEQ ID NO: 104775 - DNA, 25 bp, Probe sequence
tggcttgtaaagacgctaaatgtta

SEQ ID NO: 104776 - DNA, 25 bp, Probe sequence
tgggtttacaaaaaagcgcgtcact

SEQ ID NO: 104777 - DNA, 25 bp, Probe sequence
taacagaatacgatttgggtttaca

SEQ ID NO: 104778 - DNA, 25 bp, Probe sequence
attgttcatattgagttcatatttc

SEQ ID NO: 104779 - DNA, 25 bp, Probe sequence
atttcaaccttatactgacgctaaa

SEQ ID NO: 104780 - DNA, 25 bp, Probe sequence
atatttcaaccttatactgacgcta

SEQ ID NO: 104781 - DNA, 25 bp, Probe sequence
atacatgtaaaatatttttgcgtaa

SEQ ID NO: 104782 - DNA, 25 bp, Probe sequence
atctttttcatttattatacatgta

SEQ ID NO: 104783 - DNA, 25 bp, Probe sequence
aaacaattgttcatattgagttcat

SEQ ID NO: 104784 - DNA, 25 bp, Probe sequence
aaccttatactgacgctaaagaaga

SEQ ID NO: 104785 - DNA, 25 bp, Probe sequence
ctcccttatctttttcatttattat

SEQ ID NO: 104786 - DNA, 25 bp, Probe sequence
ccttatctttttcatttattataca

SEQ ID NO: 104787 - DNA, 25 bp, Probe sequence
gctataaactcccttatctttttca

SEQ ID NO: 104788 - DNA, 25 bp, Probe sequence
gagttcatatttcaaccttatactg

SEQ ID NO: 104789 - DNA, 25 bp, Probe sequence
gttcatatttcaaccttatactgac

SEQ ID NO: 104790 - DNA, 25 bp, Probe sequence
tcatatttcaaccttatactgacgc

SEQ ID NO: 104791 - DNA, 25 bp, Probe sequence
tcaaccttatactgacgctaaagaa

SEQ ID NO: 104792 - DNA, 25 bp, Probe sequence
tataaactcccttatctttttcatt

SEQ ID NO: 104793 - DNA, 25 bp, Probe sequence
attaaaccataaatgaccatcgata

SEQ ID NO: 104794 - DNA, 25 bp, Probe sequence
atcaatataaaagatacctcctgaa

SEQ ID NO: 104795 - DNA, 25 bp, Probe sequence
atgaccatcgatatatttaaatttt

SEQ ID NO: 104796 - DNA, 25 bp, Probe sequence
aggttaatgcctccttcaaaattat

SEQ ID NO: 104797 - DNA, 25 bp, Probe sequence
agtggctagaaagcgctaatcaata

SEQ ID NO: 104798 - DNA, 25 bp, Probe sequence
aaccataaatgaccatcgatatatt

SEQ ID NO: 104799 - DNA, 25 bp, Probe sequence
gcctccttcaaaattattaaaccat

SEQ ID NO: 104800 - DNA, 25 bp, Probe sequence
gaaatgttttttcaggaggtagaga

SEQ ID NO: 104801 - DNA, 25 bp, Probe sequence
gaccatcgatatatttaaattttgt

SEQ ID NO: 104802 - DNA, 25 bp, Probe sequence
gatacctcctgaaataaaaacagaa

SEQ ID NO: 104803 - DNA, 25 bp, Probe sequence
gttaatgcctccttcaaaattatta

SEQ ID NO: 104804 - DNA, 25 bp, Probe sequence
gttaagtggctagaaagcgctaatc

SEQ ID NO: 104805 - DNA, 25 bp, Probe sequence
ggctagaaagcgctaatcaatataa

SEQ ID NO: 104806 - DNA, 25 bp, Probe sequence
taatgcctccttcaaaattattaaa

SEQ ID NO: 104807 - DNA, 25 bp, Probe sequence
tataaaagatacctcctgaaataaa

SEQ ID NO: 104808 - DNA, 25 bp, Probe sequence
acatctcatcttttttttatggatc

SEQ ID NO: 104809 - DNA, 25 bp, Probe sequence
aaattggttgatagctgttaaggtt

SEQ ID NO: 104810 - DNA, 25 bp, Probe sequence
ctcatcttttttttatggatcatta

SEQ ID NO: 104811 - DNA, 25 bp, Probe sequence
ccatgggaacctattgagacactta

SEQ ID NO: 104812 - DNA, 25 bp, Probe sequence
gaatagtgagtaatcagcaatcaaa

SEQ ID NO: 104813 - DNA, 25 bp, Probe sequence
gaacctattgagacacttattgatt

SEQ ID NO: 104814 - DNA, 25 bp, Probe sequence
gagcatcaccatgggaacctattga

SEQ ID NO: 104815 - DNA, 25 bp, Probe sequence
gatagctgttaaggtttgtggtttt

SEQ ID NO: 104816 - DNA, 25 bp, Probe sequence
gttttctaacatctcatcttttttt

SEQ ID NO: 104817 - DNA, 25 bp, Probe sequence
gtttgtggttttgtctttgtgctat

SEQ ID NO: 104818 - DNA, 25 bp, Probe sequence
gtaatagagcatcaccatgggaacc

SEQ ID NO: 104819 - DNA, 25 bp, Probe sequence
gtgctatcgcacataaagtatataa

SEQ ID NO: 104820 - DNA, 25 bp, Probe sequence
tggttttgtctttgtgctatcgcac

SEQ ID NO: 104821 - DNA, 25 bp, Probe sequence
taatggtagcgctttatgttaaaat

SEQ ID NO: 104822 - DNA, 25 bp, Probe sequence
tacagaaggtgagatgttttctaac

SEQ ID NO: 104823 - DNA, 25 bp, Probe sequence
attacattaagtacaattcattttg

SEQ ID NO: 104824 - DNA, 25 bp, Probe sequence
atcgataacaaaatgctatagccag

SEQ ID NO: 104825 - DNA, 25 bp, Probe sequence
agcacggtcttatgtaaaattcatg

SEQ ID NO: 104826 - DNA, 25 bp, Probe sequence
aaatcacattaatctcactgttctg

SEQ ID NO: 104827 - DNA, 25 bp, Probe sequence
aacttccatttctcatcgtagtatc

SEQ ID NO: 104828 - DNA, 25 bp, Probe sequence
aatgaagcaattacactactacttt

SEQ ID NO: 104829 - DNA, 25 bp, Probe sequence
cactgttctgtaaaatgttatcgat

SEQ ID NO: 104830 - DNA, 25 bp, Probe sequence
gctatagccagagcatgattttaat

SEQ ID NO: 104831 - DNA, 25 bp, Probe sequence
gcaattacactactactttatggaa

SEQ ID NO: 104832 - DNA, 25 bp, Probe sequence
gtatcttccttattttagcacggtc

SEQ ID NO: 104833 - DNA, 25 bp, Probe sequence
gtataagttacttcattacattaag

SEQ ID NO: 104834 - DNA, 25 bp, Probe sequence
tgctataacttccatttctcatcgt

SEQ ID NO: 104835 - DNA, 25 bp, Probe sequence
tccttattttagcacggtcttatgt

SEQ ID NO: 104836 - DNA, 25 bp, Probe sequence
taatctcactgttctgtaaaatgtt

SEQ ID NO: 104837 - DNA, 25 bp, Probe sequence
ttctcatcgtagtatcttccttatt

SEQ ID NO: 104838 - DNA, 25 bp, Probe sequence
atagcacttttaaacctcattcaca

SEQ ID NO: 104839 - DNA, 25 bp, Probe sequence
agcacttttaaacctcattcacagc

SEQ ID NO: 104840 - DNA, 25 bp, Probe sequence
acctcattcacagccactgagaaat

SEQ ID NO: 104841 - DNA, 25 bp, Probe sequence
acttttaaacctcattcacagccac

SEQ ID NO: 104842 - DNA, 25 bp, Probe sequence
aaacctcattcacagccactgagaa

SEQ ID NO: 104843 - DNA, 25 bp, Probe sequence
cacttttaaacctcattcacagcca

SEQ ID NO: 104844 - DNA, 25 bp, Probe sequence
cttttaaacctcattcacagccact

SEQ ID NO: 104845 - DNA, 25 bp, Probe sequence
gcacttttaaacctcattcacagcc

SEQ ID NO: 104846 - DNA, 25 bp, Probe sequence
tcattcacagccactgagaaattta

SEQ ID NO: 104847 - DNA, 25 bp, Probe sequence
tcacagccactgagaaatttaaaca

SEQ ID NO: 104848 - DNA, 25 bp, Probe sequence
taaaacggtaaactctataatatga

SEQ ID NO: 104849 - DNA, 25 bp, Probe sequence
taaacctcattcacagccactgaga

SEQ ID NO: 104850 - DNA, 25 bp, Probe sequence
tataatatgaattagggtttaccgt

SEQ ID NO: 104851 - DNA, 25 bp, Probe sequence
ttatagcacttttaaacctcattca

SEQ ID NO: 104852 - DNA, 25 bp, Probe sequence
ttaaacctcattcacagccactgag

SEQ ID NO: 104853 - DNA, 25 bp, Probe sequence
attgtgtatgccttgaaatgctaaa

SEQ ID NO: 104854 - DNA, 25 bp, Probe sequence
atattgtgtatgccttgaaatgcta

SEQ ID NO: 104855 - DNA, 25 bp, Probe sequence
ataaatattgtgtatgccttgaaat

SEQ ID NO: 104856 - DNA, 25 bp, Probe sequence
atgccttgaaatgctaaatgcgtaa

SEQ ID NO: 104857 - DNA, 25 bp, Probe sequence
aaatgcgtaatgaattgttaaagta

SEQ ID NO: 104858 - DNA, 25 bp, Probe sequence
aatgctaaatgcgtaatgaattgtt

SEQ ID NO: 104859 - DNA, 25 bp, Probe sequence
aatattgtgtatgccttgaaatgct

SEQ ID NO: 104860 - DNA, 25 bp, Probe sequence
gccttgaaatgctaaatgcgtaatg

SEQ ID NO: 104861 - DNA, 25 bp, Probe sequence
gtatgccttgaaatgctaaatgcgt

SEQ ID NO: 104862 - DNA, 25 bp, Probe sequence
gtaataaatattgtgtatgccttga

SEQ ID NO: 104863 - DNA, 25 bp, Probe sequence
gtgtatgccttgaaatgctaaatgc

SEQ ID NO: 104864 - DNA, 25 bp, Probe sequence
tatgccttgaaatgctaaatgcgta

SEQ ID NO: 104865 - DNA, 25 bp, Probe sequence
tattgtgtatgccttgaaatgctaa

SEQ ID NO: 104866 - DNA, 25 bp, Probe sequence
ttgtgtatgccttgaaatgctaaat

SEQ ID NO: 104867 - DNA, 25 bp, Probe sequence
ttgtttttgcagcagataaaatgaa

SEQ ID NO: 104868 - DNA, 25 bp, Probe sequence
atattttgattcgatcactgtttat

SEQ ID NO: 104869 - DNA, 25 bp, Probe sequence
ataagtaatattttgattcgatcac

SEQ ID NO: 104870 - DNA, 25 bp, Probe sequence
aatagttttggctgaaaaataacat

SEQ ID NO: 104871 - DNA, 25 bp, Probe sequence
caatttgtaattgatttgtgttaat

SEQ ID NO: 104872 - DNA, 25 bp, Probe sequence
gatgttacacacaatcaatacaatt

SEQ ID NO: 104873 - DNA, 25 bp, Probe sequence
gatcactgtttattggaggatttat

SEQ ID NO: 104874 - DNA, 25 bp, Probe sequence
gattcgatcactgtttattggagga

SEQ ID NO: 104875 - DNA, 25 bp, Probe sequence
gttacacacaatcaatacaatttgt

SEQ ID NO: 104876 - DNA, 25 bp, Probe sequence
gtatcatttattgatgttacacaca

SEQ ID NO: 104877 - DNA, 25 bp, Probe sequence
gtaatattttgattcgatcactgtt

SEQ ID NO: 104878 - DNA, 25 bp, Probe sequence
gtaattgatttgtgttaatgtattt

SEQ ID NO: 104879 - DNA, 25 bp, Probe sequence
tgtatttttaaatagttttggctga

SEQ ID NO: 104880 - DNA, 25 bp, Probe sequence
ttttactggaataaatgtatcattt

SEQ ID NO: 104881 - DNA, 25 bp, Probe sequence
ttcgatcactgtttattggaggatt

SEQ ID NO: 104882 - DNA, 25 bp, Probe sequence
ttgattcgatcactgtttattggag

SEQ ID NO: 104883 - DNA, 25 bp, Probe sequence
aggaacattgttgtttcttactttg

SEQ ID NO: 104884 - DNA, 25 bp, Probe sequence
aggtgtgtttttatattgtgatggg

SEQ ID NO: 104885 - DNA, 25 bp, Probe sequence
acatctttcaaaggaacattgttgt

SEQ ID NO: 104886 - DNA, 25 bp, Probe sequence
aaatatacacatctttcaaaggaac

SEQ ID NO: 104887 - DNA, 25 bp, Probe sequence
aaaaatatacacatctttcaaagga

SEQ ID NO: 104888 - DNA, 25 bp, Probe sequence
caaaggaacattgttgtttcttact

SEQ ID NO: 104889 - DNA, 25 bp, Probe sequence
cattgttgtttcttactttgaaagg

SEQ ID NO: 104890 - DNA, 25 bp, Probe sequence
gaacattgttgtttcttactttgaa

SEQ ID NO: 104891 - DNA, 25 bp, Probe sequence
gaaaggtgtgtttttatattgtgat

SEQ ID NO: 104892 - DNA, 25 bp, Probe sequence
gttgtttcttactttgaaaggtgtg

SEQ ID NO: 104893 - DNA, 25 bp, Probe sequence
gtgatgggatagttattgataattc

SEQ ID NO: 104894 - DNA, 25 bp, Probe sequence
gtgtgtttttatattgtgatgggat

SEQ ID NO: 104895 - DNA, 25 bp, Probe sequence
ggaacattgttgtttcttactttga

SEQ ID NO: 104896 - DNA, 25 bp, Probe sequence
tgtttcttactttgaaaggtgtgtt

SEQ ID NO: 104897 - DNA, 25 bp, Probe sequence
tacacatctttcaaaggaacattgt

SEQ ID NO: 104898 - DNA, 25 bp, Probe sequence
atataatgaaaaggtgagggaggat

SEQ ID NO: 104899 - DNA, 25 bp, Probe sequence
ataggtataatcggatataatgaaa

SEQ ID NO: 104900 - DNA, 25 bp, Probe sequence
ataatgaaaaggtgagggaggattc

SEQ ID NO: 104901 - DNA, 25 bp, Probe sequence
ataatcggatataatgaaaaggtga

SEQ ID NO: 104902 - DNA, 25 bp, Probe sequence
atcggatataatgaaaaggtgaggg

SEQ ID NO: 104903 - DNA, 25 bp, Probe sequence
atgaaaaggtgagggaggattcaaa

SEQ ID NO: 104904 - DNA, 25 bp, Probe sequence
aatgaaaaggtgagggaggattcaa

SEQ ID NO: 104905 - DNA, 25 bp, Probe sequence
aatcggatataatgaaaaggtgagg

SEQ ID NO: 104906 - DNA, 25 bp, Probe sequence
aataggtataatcggatataatgaa

SEQ ID NO: 104907 - DNA, 25 bp, Probe sequence
cggatataatgaaaaggtgagggag

SEQ ID NO: 104908 - DNA, 25 bp, Probe sequence
gatataatgaaaaggtgagggagga

SEQ ID NO: 104909 - DNA, 25 bp, Probe sequence
ggatataatgaaaaggtgagggagg

SEQ ID NO: 104910 - DNA, 25 bp, Probe sequence
taataggtataatcggatataatga

SEQ ID NO: 104911 - DNA, 25 bp, Probe sequence
taatcggatataatgaaaaggtgag

SEQ ID NO: 104912 - DNA, 25 bp, Probe sequence
atacaagacgtttgtagcgagcgtc

SEQ ID NO: 104913 - DNA, 25 bp, Probe sequence
agacgtttgtagcgagcgtcatggt

SEQ ID NO: 104914 - DNA, 25 bp, Probe sequence
agcgagcgtcatggtatagctattt

SEQ ID NO: 104915 - DNA, 25 bp, Probe sequence
acgtttgtagcgagcgtcatggtat

SEQ ID NO: 104916 - DNA, 25 bp, Probe sequence
acaagacgtttgtagcgagcgtcat

SEQ ID NO: 104917 - DNA, 25 bp, Probe sequence
aaataatagctatacaagacgtttg

SEQ ID NO: 104918 - DNA, 25 bp, Probe sequence
aagacgtttgtagcgagcgtcatgg

SEQ ID NO: 104919 - DNA, 25 bp, Probe sequence
cgtttgtagcgagcgtcatggtata

SEQ ID NO: 104920 - DNA, 25 bp, Probe sequence
cgagcgtcatggtatagctatttta

SEQ ID NO: 104921 - DNA, 25 bp, Probe sequence
gcgagcgtcatggtatagctatttt

SEQ ID NO: 104922 - DNA, 25 bp, Probe sequence
gctatacaagacgtttgtagcgagc

SEQ ID NO: 104923 - DNA, 25 bp, Probe sequence
gtttgtagcgagcgtcatggtatag

SEQ ID NO: 104924 - DNA, 25 bp, Probe sequence
gtagcgagcgtcatggtatagctat

SEQ ID NO: 104925 - DNA, 25 bp, Probe sequence
tttgtagcgagcgtcatggtatagc

SEQ ID NO: 104926 - DNA, 25 bp, Probe sequence
ttgtagcgagcgtcatggtatagct

SEQ ID NO: 104927 - DNA, 25 bp, Probe sequence
ataaatcaacctccttgtgttattg

SEQ ID NO: 104928 - DNA, 25 bp, Probe sequence
atcaacctccttgtgttattgaaca

SEQ ID NO: 104929 - DNA, 25 bp, Probe sequence
acctccttgtgttattgaacaatgt

SEQ ID NO: 104930 - DNA, 25 bp, Probe sequence
aaataaatcaacctccttgtgttat

SEQ ID NO: 104931 - DNA, 25 bp, Probe sequence
aatgtgggtgtatttgtctattaat

SEQ ID NO: 104932 - DNA, 25 bp, Probe sequence
cgtattgatgaacattgtgtattgt

SEQ ID NO: 104933 - DNA, 25 bp, Probe sequence
gcgaaatattcaacacattgtctaa

SEQ ID NO: 104934 - DNA, 25 bp, Probe sequence
gaacaatgtgggtgtatttgtctat

SEQ ID NO: 104935 - DNA, 25 bp, Probe sequence
gacaacatgcgaaatattcaacaca

SEQ ID NO: 104936 - DNA, 25 bp, Probe sequence
gtattgtttattcccacttacatat

SEQ ID NO: 104937 - DNA, 25 bp, Probe sequence
tgtttattcccacttacatattata

SEQ ID NO: 104938 - DNA, 25 bp, Probe sequence
tcaacacattgtctaataaggaggt

SEQ ID NO: 104939 - DNA, 25 bp, Probe sequence
tttgtctattaatgaacgtattgat

SEQ ID NO: 104940 - DNA, 25 bp, Probe sequence
ttcccacttacatattataatagac

SEQ ID NO: 104941 - DNA, 25 bp, Probe sequence
ttgtgtattgtttattcccacttac

SEQ ID NO: 104942 - DNA, 25 bp, Probe sequence
actttaagctgtcataccttttaat

SEQ ID NO: 104943 - DNA, 25 bp, Probe sequence
aagtatcagtcattgcaaatgcaat

SEQ ID NO: 104944 - DNA, 25 bp, Probe sequence
aatcaaagtatcagtcattgcaaat

SEQ ID NO: 104945 - DNA, 25 bp, Probe sequence
caaagtatcagtcattgcaaatgca

SEQ ID NO: 104946 - DNA, 25 bp, Probe sequence
ctttaagctgtcataccttttaatt

SEQ ID NO: 104947 - DNA, 25 bp, Probe sequence
gaaactttaagctgtcatacctttt

SEQ ID NO: 104948 - DNA, 25 bp, Probe sequence
gacagtaatcaaagtatcagtcatt

SEQ ID NO: 104949 - DNA, 25 bp, Probe sequence
gaggtatgacagtaatcaaagtatc

SEQ ID NO: 104950 - DNA, 25 bp, Probe sequence
gatgaaactttaagctgtcatacct

SEQ ID NO: 104951 - DNA, 25 bp, Probe sequence
gtaatcaaagtatcagtcattgcaa

SEQ ID NO: 104952 - DNA, 25 bp, Probe sequence
ggatgaaactttaagctgtcatacc

SEQ ID NO: 104953 - DNA, 25 bp, Probe sequence
tgaaactttaagctgtcataccttt

SEQ ID NO: 104954 - DNA, 25 bp, Probe sequence
taagctgtcataccttttaatttag

SEQ ID NO: 104955 - DNA, 25 bp, Probe sequence
tttaagctgtcataccttttaattt

SEQ ID NO: 104956 - DNA, 25 bp, Probe sequence
ttgcaaatgcaataggatgaaactt

SEQ ID NO: 104957 - DNA, 25 bp, Probe sequence
attcttagtagccctgttacaaaat

SEQ ID NO: 104958 - DNA, 25 bp, Probe sequence
acgcttgtttttatgcattgtgcac

SEQ ID NO: 104959 - DNA, 25 bp, Probe sequence
aacttcatcaagacaggcatccaca

SEQ ID NO: 104960 - DNA, 25 bp, Probe sequence
aactttcacactcaatttctacatc

SEQ ID NO: 104961 - DNA, 25 bp, Probe sequence
aatgcatggcacaactagatttacc

SEQ ID NO: 104962 - DNA, 25 bp, Probe sequence
catacacttttgtcatcaaacgctg

SEQ ID NO: 104963 - DNA, 25 bp, Probe sequence
gccattttgaactaacttgctaatc

SEQ ID NO: 104964 - DNA, 25 bp, Probe sequence
gaaaatccatctagttattgccgta

SEQ ID NO: 104965 - DNA, 25 bp, Probe sequence
gactactatttgtccgttacaacta

SEQ ID NO: 104966 - DNA, 25 bp, Probe sequence
gtacccatgacttaaattttatcgc

SEQ ID NO: 104967 - DNA, 25 bp, Probe sequence
gtgtatggtatcttctaacatcatg

SEQ ID NO: 104968 - DNA, 25 bp, Probe sequence
ggcatccacatctaagaaactcatc

SEQ ID NO: 104969 - DNA, 25 bp, Probe sequence
tgctgaactccaatgactactattt

SEQ ID NO: 104970 - DNA, 25 bp, Probe sequence
tcagcatcttgaaatcgcactaaca

SEQ ID NO: 104971 - DNA, 25 bp, Probe sequence
ttctctctcctgcctaatatatatt

SEQ ID NO: 104972 - DNA, 25 bp, Probe sequence
atgatataaatagcctttaacgtaa

SEQ ID NO: 104973 - DNA, 25 bp, Probe sequence
aaactaaacacaagaggactgttag

SEQ ID NO: 104974 - DNA, 25 bp, Probe sequence
aagaaactaaacacaagaggactgt

SEQ ID NO: 104975 - DNA, 25 bp, Probe sequence
ctaaacacaagaggactgttagtat

SEQ ID NO: 104976 - DNA, 25 bp, Probe sequence
ctccttatgatataaatagccttta

SEQ ID NO: 104977 - DNA, 25 bp, Probe sequence
ccttatgatataaatagcctttaac

SEQ ID NO: 104978 - DNA, 25 bp, Probe sequence
gaaactaaacacaagaggactgtta

SEQ ID NO: 104979 - DNA, 25 bp, Probe sequence
gatataaatagcctttaacgtaaga

SEQ ID NO: 104980 - DNA, 25 bp, Probe sequence
gtaagaaactaaacacaagaggact

SEQ ID NO: 104981 - DNA, 25 bp, Probe sequence
tgatataaatagcctttaacgtaag

SEQ ID NO: 104982 - DNA, 25 bp, Probe sequence
tctccttatgatataaatagccttt

SEQ ID NO: 104983 - DNA, 25 bp, Probe sequence
taagaaactaaacacaagaggactg

SEQ ID NO: 104984 - DNA, 25 bp, Probe sequence
taacgtaagaaactaaacacaagag

SEQ ID NO: 104985 - DNA, 25 bp, Probe sequence
tatgatataaatagcctttaacgta

SEQ ID NO: 104986 - DNA, 25 bp, Probe sequence
ttatgatataaatagcctttaacgt

SEQ ID NO: 104987 - DNA, 25 bp, Probe sequence
attatagcgagttattttaagtatt

SEQ ID NO: 104988 - DNA, 25 bp, Probe sequence
ataaaagttatttcctatatatact

SEQ ID NO: 104989 - DNA, 25 bp, Probe sequence
agttatttcctatatatactttgtg

SEQ ID NO: 104990 - DNA, 25 bp, Probe sequence
acactttaattatagcgagttattt

SEQ ID NO: 104991 - DNA, 25 bp, Probe sequence
aacactttaattatagcgagttatt

SEQ ID NO: 104992 - DNA, 25 bp, Probe sequence
aacattgttatatctagaattcata

SEQ ID NO: 104993 - DNA, 25 bp, Probe sequence
aagttatttcctatatatactttgt

SEQ ID NO: 104994 - DNA, 25 bp, Probe sequence
cactttaattatagcgagttatttt

SEQ ID NO: 104995 - DNA, 25 bp, Probe sequence
cattgttatatctagaattcataaa

SEQ ID NO: 104996 - DNA, 25 bp, Probe sequence
gcgagttattttaagtatttaacat

SEQ ID NO: 104997 - DNA, 25 bp, Probe sequence
gaattcataaaagttatttcctata

SEQ ID NO: 104998 - DNA, 25 bp, Probe sequence
tcataaaagttatttcctatatata

SEQ ID NO: 104999 - DNA, 25 bp, Probe sequence
taaacactttaattatagcgagtta

SEQ ID NO: 105000 - DNA, 25 bp, Probe sequence
tatagcgagttattttaagtattta

SEQ ID NO: 105001 - DNA, 25 bp, Probe sequence
ttaacattgttatatctagaattca

SEQ ID NO: 105002 - DNA, 25 bp, Probe sequence
atatcttctatattactcaaaatta

SEQ ID NO: 105003 - DNA, 25 bp, Probe sequence
atactatctgacatttaaagcccct

SEQ ID NO: 105004 - DNA, 25 bp, Probe sequence
actgctgcttttaatatcttctata

SEQ ID NO: 105005 - DNA, 25 bp, Probe sequence
actatctgacatttaaagcccctta

SEQ ID NO: 105006 - DNA, 25 bp, Probe sequence
acagtaattcttaaaaagcagcagt

SEQ ID NO: 105007 - DNA, 25 bp, Probe sequence
cttactgctgcttttaatatcttct

SEQ ID NO: 105008 - DNA, 25 bp, Probe sequence
ctatctgacatttaaagccccttac

SEQ ID NO: 105009 - DNA, 25 bp, Probe sequence
ctgctgcttttaatatcttctatat

SEQ ID NO: 105010 - DNA, 25 bp, Probe sequence
gaaccgaaaatagactgacacagta

SEQ ID NO: 105011 - DNA, 25 bp, Probe sequence
gactgacacagtaattcttaaaaag

SEQ ID NO: 105012 - DNA, 25 bp, Probe sequence
ggcgaaccgaaaatagactgacaca

SEQ ID NO: 105013 - DNA, 25 bp, Probe sequence
tgacatttaaagccccttacaacct

SEQ ID NO: 105014 - DNA, 25 bp, Probe sequence
tctgacatttaaagccccttacaac

SEQ ID NO: 105015 - DNA, 25 bp, Probe sequence
tactgctgcttttaatatcttctat

SEQ ID NO: 105016 - DNA, 25 bp, Probe sequence
tatctgacatttaaagccccttaca

SEQ ID NO: 105017 - DNA, 25 bp, Probe sequence
attagtgatttttgacatctataaa

SEQ ID NO: 105018 - DNA, 25 bp, Probe sequence
acagtttagtgccttcaattttaat

SEQ ID NO: 105019 - DNA, 25 bp, Probe sequence
aacagtttttgtatggaaattagtg

SEQ ID NO: 105020 - DNA, 25 bp, Probe sequence
ctggtgaaacagtttagtgccttca

SEQ ID NO: 105021 - DNA, 25 bp, Probe sequence
gaaacagtttagtgccttcaatttt

SEQ ID NO: 105022 - DNA, 25 bp, Probe sequence
gagtgatgtcagatgaaggggagtt

SEQ ID NO: 105023 - DNA, 25 bp, Probe sequence
gtttagtgccttcaattttaattat

SEQ ID NO: 105024 - DNA, 25 bp, Probe sequence
tgtcagatgaaggggagtttgtact

SEQ ID NO: 105025 - DNA, 25 bp, Probe sequence
gtgccttcaattttaattatttgag

SEQ ID NO: 105026 - DNA, 25 bp, Probe sequence
gtgatttttgacatctataaaagat

SEQ ID NO: 105027 - DNA, 25 bp, Probe sequence
ggtgaaacagtttagtgccttcaat

SEQ ID NO: 105028 - DNA, 25 bp, Probe sequence
ggaaattagtgatttttgacatcta

SEQ ID NO: 105029 - DNA, 25 bp, Probe sequence
tagtgccttcaattttaattatttg

SEQ ID NO: 105030 - DNA, 25 bp, Probe sequence
tatagataattatcaattttctgat

SEQ ID NO: 105031 - DNA, 25 bp, Probe sequence
ttttctgatataattgagtgatgtc

SEQ ID NO: 105032 - DNA, 25 bp, Probe sequence
attgattcgttcatactgaatagat

SEQ ID NO: 105033 - DNA, 25 bp, Probe sequence
atatatcgatatcttagtattttca

SEQ ID NO: 105034 - DNA, 25 bp, Probe sequence
aaataaattgattcgttcatactga

SEQ ID NO: 105035 - DNA, 25 bp, Probe sequence
aaaatgtaattgtatcatccttaat

SEQ ID NO: 105036 - DNA, 25 bp, Probe sequence
aattttttaaaagcatcgtgtatgt

SEQ ID NO: 105037 - DNA, 25 bp, Probe sequence
caatcactccttgttaaaataaaca

SEQ ID NO: 105038 - DNA, 25 bp, Probe sequence
gaagtgtaatagttgtcaagtactg

SEQ ID NO: 105039 - DNA, 25 bp, Probe sequence
gatatcttagtattttcatcggtaa

SEQ ID NO: 105040 - DNA, 25 bp, Probe sequence
gttgtcaagtactgatttcatcgca

SEQ ID NO: 105041 - DNA, 25 bp, Probe sequence
gtattttcatcggtaattactgata

SEQ ID NO: 105042 - DNA, 25 bp, Probe sequence
gtactgatttcatcgcaattattga

SEQ ID NO: 105043 - DNA, 25 bp, Probe sequence
gtaattgtatcatccttaattgtta

SEQ ID NO: 105044 - DNA, 25 bp, Probe sequence
tcgtgtatgtaattcgatttctata

SEQ ID NO: 105045 - DNA, 25 bp, Probe sequence
tacaatctggtaaaaactctttatt

SEQ ID NO: 105046 - DNA, 25 bp, Probe sequence
tactgatatgactgattttttaaat

SEQ ID NO: 105047 - DNA, 25 bp, Probe sequence
ataaatgggtagatttgtgcctgat

SEQ ID NO: 105048 - DNA, 25 bp, Probe sequence
agggcaaaagaactgagcatcgaga

SEQ ID NO: 105049 - DNA, 25 bp, Probe sequence
acttccattatagaaatttgtatta

SEQ ID NO: 105050 - DNA, 25 bp, Probe sequence
acaaagccattatatgagtagtatt

SEQ ID NO: 105051 - DNA, 25 bp, Probe sequence
aaaagaactgagcatcgagatttat

SEQ ID NO: 105052 - DNA, 25 bp, Probe sequence
aatgggtagatttgtgcctgataag

SEQ ID NO: 105053 - DNA, 25 bp, Probe sequence
catcacttccattatagaaatttgt

SEQ ID NO: 105054 - DNA, 25 bp, Probe sequence
gaactgagcatcgagatttatacaa

SEQ ID NO: 105055 - DNA, 25 bp, Probe sequence
gagcatcgagatttatacaagcaat

SEQ ID NO: 105056 - DNA, 25 bp, Probe sequence
gataaggaatcagggcaaaagaact

SEQ ID NO: 105057 - DNA, 25 bp, Probe sequence
gtagatttgtgcctgataaggaatc

SEQ ID NO: 105058 - DNA, 25 bp, Probe sequence
ggcaaaagaactgagcatcgagatt

SEQ ID NO: 105059 - DNA, 25 bp, Probe sequence
tgggtagatttgtgcctgataagga

SEQ ID NO: 105060 - DNA, 25 bp, Probe sequence
tatcatcacttccattatagaaatt

SEQ ID NO: 105061 - DNA, 25 bp, Probe sequence
tttgtattacaaagccattatatga

SEQ ID NO: 105062 - DNA, 25 bp, Probe sequence
attcgtagcatgacattaaggcttt

SEQ ID NO: 105063 - DNA, 25 bp, Probe sequence
attaaggctttagtagtgtattcat

SEQ ID NO: 105064 - DNA, 25 bp, Probe sequence
atacaaagccttaatatcatgcaca

SEQ ID NO: 105065 - DNA, 25 bp, Probe sequence
acaaagccttaatatcatgcacaat

SEQ ID NO: 105066 - DNA, 25 bp, Probe sequence
acaatattcgtagcatgacattaag

SEQ ID NO: 105067 - DNA, 25 bp, Probe sequence
aaagccttaatatcatgcacaatat

SEQ ID NO: 105068 - DNA, 25 bp, Probe sequence
aaggctttagtagtgtattcatttt

SEQ ID NO: 105069 - DNA, 25 bp, Probe sequence
aatatcatgcacaatattcgtagca

SEQ ID NO: 105070 - DNA, 25 bp, Probe sequence
cgtagcatgacattaaggctttagt

SEQ ID NO: 105071 - DNA, 25 bp, Probe sequence
gcatgacattaaggctttagtagtg

SEQ ID NO: 105072 - DNA, 25 bp, Probe sequence
gtaatacatgacattcatttagtta

SEQ ID NO: 105073 - DNA, 25 bp, Probe sequence
ggctttagtagtgtattcattttaa

SEQ ID NO: 105074 - DNA, 25 bp, Probe sequence
tgcacaatattcgtagcatgacatt

SEQ ID NO: 105075 - DNA, 25 bp, Probe sequence
tcatttagttaaatacaaagcctta

SEQ ID NO: 105076 - DNA, 25 bp, Probe sequence
tagtagtgtattcattttaaattta

SEQ ID NO: 105077 - DNA, 25 bp, Probe sequence
atatataggcagagtattgatatct

SEQ ID NO: 105078 - DNA, 25 bp, Probe sequence
atataggcagagtattgatatctat

SEQ ID NO: 105079 - DNA, 25 bp, Probe sequence
ataggcagagtattgatatctatta

SEQ ID NO: 105080 - DNA, 25 bp, Probe sequence
aggcagagtattgatatctattaaa

SEQ ID NO: 105081 - DNA, 25 bp, Probe sequence
agagtattgatatctattaaaaaat

SEQ ID NO: 105082 - DNA, 25 bp, Probe sequence
aatgattttgatgaaggtgaaacgt

SEQ ID NO: 105083 - DNA, 25 bp, Probe sequence
cctctaatatataggcagagtattg

SEQ ID NO: 105084 - DNA, 25 bp, Probe sequence
gcagagtattgatatctattaaaaa

SEQ ID NO: 105085 - DNA, 25 bp, Probe sequence
gacctctaatatataggcagagtat

SEQ ID NO: 105086 - DNA, 25 bp, Probe sequence
ggcagagtattgatatctattaaaa

SEQ ID NO: 105087 - DNA, 25 bp, Probe sequence
tgacctctaatatataggcagagta

SEQ ID NO: 105088 - DNA, 25 bp, Probe sequence
taggcagagtattgatatctattaa

SEQ ID NO: 105089 - DNA, 25 bp, Probe sequence
tataggcagagtattgatatctatt

SEQ ID NO: 105090 - DNA, 25 bp, Probe sequence
tatataggcagagtattgatatcta

SEQ ID NO: 105091 - DNA, 25 bp, Probe sequence
ttgacctctaatatataggcagagt

SEQ ID NO: 105092 - DNA, 25 bp, Probe sequence
agcatcttaaagggacattgtatag

SEQ ID NO: 105093 - DNA, 25 bp, Probe sequence
acctccttatgttgtcagcataaag

SEQ ID NO: 105094 - DNA, 25 bp, Probe sequence
aaaagtatgtgagtgttcctaaata

SEQ ID NO: 105095 - DNA, 25 bp, Probe sequence
aaaatgatggcgaataagtgtctaa

SEQ ID NO: 105096 - DNA, 25 bp, Probe sequence
aacgtaacgtgattttcaagcagta

SEQ ID NO: 105097 - DNA, 25 bp, Probe sequence
aagtgtctaaaagcatcttaaaggg

SEQ ID NO: 105098 - DNA, 25 bp, Probe sequence
gacattgtatagggtaaatcacttc

SEQ ID NO: 105099 - DNA, 25 bp, Probe sequence
gataaacctccttatgttgtcagca

SEQ ID NO: 105100 - DNA, 25 bp, Probe sequence
gattttcaagcagtaattgtaacta

SEQ ID NO: 105101 - DNA, 25 bp, Probe sequence
gtatgtgagtgttcctaaataatat

SEQ ID NO: 105102 - DNA, 25 bp, Probe sequence
gtcagcataaaggataacgtaacgt

SEQ ID NO: 105103 - DNA, 25 bp, Probe sequence
gtaacgtgattttcaagcagtaatt

SEQ ID NO: 105104 - DNA, 25 bp, Probe sequence
gtgagtgttcctaaataatatgatt

SEQ ID NO: 105105 - DNA, 25 bp, Probe sequence
ggcgaataagtgtctaaaagcatct

SEQ ID NO: 105106 - DNA, 25 bp, Probe sequence
taaacctccttatgttgtcagcata

SEQ ID NO: 105107 - DNA, 25 bp, Probe sequence
aacctatactaattcgctttgcaaa

SEQ ID NO: 105108 - DNA, 25 bp, Probe sequence
aatgattatcttctggcgcttttgt

SEQ ID NO: 105109 - DNA, 25 bp, Probe sequence
aattcgctttgcaaaggtataactt

SEQ ID NO: 105110 - DNA, 25 bp, Probe sequence
aattcagtataaaagcgcgagagga

SEQ ID NO: 105111 - DNA, 25 bp, Probe sequence
cagtgttgtagcatctgtatgagga

SEQ ID NO: 105112 - DNA, 25 bp, Probe sequence
cgaatggaacctaatcctttctcct

SEQ ID NO: 105113 - DNA, 25 bp, Probe sequence
cttctggcgcttttgtatgtttcga

SEQ ID NO: 105114 - DNA, 25 bp, Probe sequence
gaacaattattttagttggtgtatt

SEQ ID NO: 105115 - DNA, 25 bp, Probe sequence
gaggaaatgattatcttctggcgct

SEQ ID NO: 105116 - DNA, 25 bp, Probe sequence
gattagttttctactttgaacaatt

SEQ ID NO: 105117 - DNA, 25 bp, Probe sequence
ggtaacctatactaattcgctttgc

SEQ ID NO: 105118 - DNA, 25 bp, Probe sequence
ggcgcttttgtatgtttcgaaatat

SEQ ID NO: 105119 - DNA, 25 bp, Probe sequence
tggtgtattcagtgttgtagcatct

SEQ ID NO: 105120 - DNA, 25 bp, Probe sequence
tctcctttcggtaacctatactaat

SEQ ID NO: 105121 - DNA, 25 bp, Probe sequence
tatcttctggcgcttttgtatgttt

SEQ ID NO: 105122 - DNA, 25 bp, Probe sequence
aggtgattccctaatattttatatt

SEQ ID NO: 105123 - DNA, 25 bp, Probe sequence
aaagcaatagtcttgggcattttaa

SEQ ID NO: 105124 - DNA, 25 bp, Probe sequence
aagcacgaccatacatgattgtgta

SEQ ID NO: 105125 - DNA, 25 bp, Probe sequence
caatgaaatcccgttattgataggg

SEQ ID NO: 105126 - DNA, 25 bp, Probe sequence
gaagccttatttgtcgttgtgccaa

SEQ ID NO: 105127 - DNA, 25 bp, Probe sequence
gacatctacacatcgtatttttata

SEQ ID NO: 105128 - DNA, 25 bp, Probe sequence
gagaatatattcgtgttgaagcctt

SEQ ID NO: 105129 - DNA, 25 bp, Probe sequence
gttgtgccaaatttgaacgatttag

SEQ ID NO: 105130 - DNA, 25 bp, Probe sequence
ggcaataagcacgaccatacatgat

SEQ ID NO: 105131 - DNA, 25 bp, Probe sequence
tgttgaagccttatttgtcgttgtg

SEQ ID NO: 105132 - DNA, 25 bp, Probe sequence
tgaacgatttagattggcaataagc

SEQ ID NO: 105133 - DNA, 25 bp, Probe sequence
tccttaagtaattaggtgattccct

SEQ ID NO: 105134 - DNA, 25 bp, Probe sequence
taaggtttcaaccgagagaatatat

SEQ ID NO: 105135 - DNA, 25 bp, Probe sequence
tagtcttgggcattttaaagtattt

SEQ ID NO: 105136 - DNA, 25 bp, Probe sequence
tttaaaaacacgacatctacacatc

SEQ ID NO: 105137 - DNA, 25 bp, Probe sequence
attccctgattttacattataatgt

SEQ ID NO: 105138 - DNA, 25 bp, Probe sequence
atacactacaagcgaccgatatatt

SEQ ID NO: 105139 - DNA, 25 bp, Probe sequence
ataatatacactacaagcgaccgat

SEQ ID NO: 105140 - DNA, 25 bp, Probe sequence
agggaattccctgattttacattat

SEQ ID NO: 105141 - DNA, 25 bp, Probe sequence
aatgtgattcttttcacaaaaacaa

SEQ ID NO: 105142 - DNA, 25 bp, Probe sequence
ccgatatattgatgcttgctcaaat

SEQ ID NO: 105143 - DNA, 25 bp, Probe sequence
gcgaccgatatattgatgcttgctc

SEQ ID NO: 105144 - DNA, 25 bp, Probe sequence
gactacaggcatcagggaattccct

SEQ ID NO: 105145 - DNA, 25 bp, Probe sequence
gagtagggattcatatatcggtcgc

SEQ ID NO: 105146 - DNA, 25 bp, Probe sequence
gggattcatatatcggtcgcttttt

SEQ ID NO: 105147 - DNA, 25 bp, Probe sequence
ggaatatgcatgactacaggcatca

SEQ ID NO: 105148 - DNA, 25 bp, Probe sequence
tgatgcttgctcaaataaatgttga

SEQ ID NO: 105149 - DNA, 25 bp, Probe sequence
tgcatgactacaggcatcagggaat

SEQ ID NO: 105150 - DNA, 25 bp, Probe sequence
tatatcggtcgctttttttgattta

SEQ ID NO: 105151 - DNA, 25 bp, Probe sequence
ttcatatatcggtcgctttttttga

SEQ ID NO: 105152 - DNA, 25 bp, Probe sequence
agatgtagtgattaaatagcgtaac

SEQ ID NO: 105153 - DNA, 25 bp, Probe sequence
aaatagcgtaacaatgaatcattct

SEQ ID NO: 105154 - DNA, 25 bp, Probe sequence
aagtttcatgagagtattggtgtat

SEQ ID NO: 105155 - DNA, 25 bp, Probe sequence
aatgaatcattcttccaaaccattc

SEQ ID NO: 105156 - DNA, 25 bp, Probe sequence
gcatactttctgacatgtgataaat

SEQ ID NO: 105157 - DNA, 25 bp, Probe sequence
gaatcattcttccaaaccattcatg

SEQ ID NO: 105158 - DNA, 25 bp, Probe sequence
gaatggtttttttacgttgagagag

SEQ ID NO: 105159 - DNA, 25 bp, Probe sequence
gaagcatactttctgacatgtgata

SEQ ID NO: 105160 - DNA, 25 bp, Probe sequence
gagagtaatttttaataagtttcat

SEQ ID NO: 105161 - DNA, 25 bp, Probe sequence
gagtattggtgtattcagatgaagc

SEQ ID NO: 105162 - DNA, 25 bp, Probe sequence
gatgaagcatactttctgacatgtg

SEQ ID NO: 105163 - DNA, 25 bp, Probe sequence
gatacactttgatggatatttattt

SEQ ID NO: 105164 - DNA, 25 bp, Probe sequence
gataaatttattgatacactttgat

SEQ ID NO: 105165 - DNA, 25 bp, Probe sequence
tcttccaaaccattcatgaatttga

SEQ ID NO: 105166 - DNA, 25 bp, Probe sequence
tcattcttccaaaccattcatgaat

SEQ ID NO: 105167 - DNA, 25 bp, Probe sequence
attagccaatcacgcgatttatctc

SEQ ID NO: 105168 - DNA, 25 bp, Probe sequence
atttttctgaaatttaatctatcaa

SEQ ID NO: 105169 - DNA, 25 bp, Probe sequence
atcacgcgatttatctcgctgtttt

SEQ ID NO: 105170 - DNA, 25 bp, Probe sequence
agccaatcacgcgatttatctcgct

SEQ ID NO: 105171 - DNA, 25 bp, Probe sequence
aaagcgagataaaatgagcgtcgta

SEQ ID NO: 105172 - DNA, 25 bp, Probe sequence
aagatattagccaatcacgcgattt

SEQ ID NO: 105173 - DNA, 25 bp, Probe sequence
aatgagcgtcgtaatatcttaaatc

SEQ ID NO: 105174 - DNA, 25 bp, Probe sequence
caatcacgcgatttatctcgctgtt

SEQ ID NO: 105175 - DNA, 25 bp, Probe sequence
cacgcgatttatctcgctgttttta

SEQ ID NO: 105176 - DNA, 25 bp, Probe sequence
gaaagaaaactacatttttgagaga

SEQ ID NO: 105177 - DNA, 25 bp, Probe sequence
gaaatttaatctatcaattacattg

SEQ ID NO: 105178 - DNA, 25 bp, Probe sequence
gagcgtcgtaatatcttaaatcata

SEQ ID NO: 105179 - DNA, 25 bp, Probe sequence
gatttatctcgctgtttttatgaaa

SEQ ID NO: 105180 - DNA, 25 bp, Probe sequence
tatctcgctgtttttatgaaagaaa

SEQ ID NO: 105181 - DNA, 25 bp, Probe sequence
ttacattgatttactaatataatta

SEQ ID NO: 105182 - DNA, 25 bp, Probe sequence
attcggtttataataatcttgtaat

SEQ ID NO: 105183 - DNA, 25 bp, Probe sequence
cattcggtttataataatcttgtaa

SEQ ID NO: 105184 - DNA, 25 bp, Probe sequence
cggtttataataatcttgtaatatt

SEQ ID NO: 105185 - DNA, 25 bp, Probe sequence
gtttcattcggtttataataatctt

SEQ ID NO: 105186 - DNA, 25 bp, Probe sequence
ggtttataataatcttgtaatatta

SEQ ID NO: 105187 - DNA, 25 bp, Probe sequence
tgtttcattcggtttataataatct

SEQ ID NO: 105188 - DNA, 25 bp, Probe sequence
tcggtttataataatcttgtaatat

SEQ ID NO: 105189 - DNA, 25 bp, Probe sequence
tcattcggtttataataatcttgta

SEQ ID NO: 105190 - DNA, 25 bp, Probe sequence
tttgtttcattcggtttataataat

SEQ ID NO: 105191 - DNA, 25 bp, Probe sequence
tttcattcggtttataataatcttg

SEQ ID NO: 105192 - DNA, 25 bp, Probe sequence
ttcattcggtttataataatcttgt

SEQ ID NO: 105193 - DNA, 25 bp, Probe sequence
ttcggtttataataatcttgtaata

SEQ ID NO: 105194 - DNA, 25 bp, Probe sequence
ttgtttcattcggtttataataatc

SEQ ID NO: 105195 - DNA, 25 bp, Probe sequence
atttcgtagttatcaatttcaacag

SEQ ID NO: 105196 - DNA, 25 bp, Probe sequence
atagctgaatagagtgtgtttttta

SEQ ID NO: 105197 - DNA, 25 bp, Probe sequence
atgttactcaatgcatgttaagatg

SEQ ID NO: 105198 - DNA, 25 bp, Probe sequence
acaaatggtttggtaacatatgtta

SEQ ID NO: 105199 - DNA, 25 bp, Probe sequence
cacactctactcaactgttaatagc

SEQ ID NO: 105200 - DNA, 25 bp, Probe sequence
cactctactcaactgttaatagctg

SEQ ID NO: 105201 - DNA, 25 bp, Probe sequence
gtagttatcaatttcaacagaggga

SEQ ID NO: 105202 - DNA, 25 bp, Probe sequence
gtaacatatgttactcaatgcatgt

SEQ ID NO: 105203 - DNA, 25 bp, Probe sequence
gggaatgattaatattactatagtt

SEQ ID NO: 105204 - DNA, 25 bp, Probe sequence
tgtgttttttatttcgtagttatca

SEQ ID NO: 105205 - DNA, 25 bp, Probe sequence
tgcacactctactcaactgttaata

SEQ ID NO: 105206 - DNA, 25 bp, Probe sequence
tctactcaactgttaatagctgaat

SEQ ID NO: 105207 - DNA, 25 bp, Probe sequence
tagagtgtgttttttatttcgtagt

SEQ ID NO: 105208 - DNA, 25 bp, Probe sequence
tttgcacactctactcaactgttaa

SEQ ID NO: 105209 - DNA, 25 bp, Probe sequence
ttcaacaggtttgcacactctactc

SEQ ID NO: 105210 - DNA, 25 bp, Probe sequence
atagtcatgtattagataaaacgaa

SEQ ID NO: 105211 - DNA, 25 bp, Probe sequence
atgattcgactttatattatttata

SEQ ID NO: 105212 - DNA, 25 bp, Probe sequence
aaatacctaaagtatgattcgactt

SEQ ID NO: 105213 - DNA, 25 bp, Probe sequence
aaaacagtgcttgtattttaagtag

SEQ ID NO: 105214 - DNA, 25 bp, Probe sequence
aagattactatttaggagggtgact

SEQ ID NO: 105215 - DNA, 25 bp, Probe sequence
aagtagcatgagtatataattttaa

SEQ ID NO: 105216 - DNA, 25 bp, Probe sequence
cagtgcttgtattttaagtagcatg

SEQ ID NO: 105217 - DNA, 25 bp, Probe sequence
gttttctgtatcatatttgtacaat

SEQ ID NO: 105218 - DNA, 25 bp, Probe sequence
gtatcatatttgtacaatagtcatg

SEQ ID NO: 105219 - DNA, 25 bp, Probe sequence
gtatgattcgactttatattattta

SEQ ID NO: 105220 - DNA, 25 bp, Probe sequence
taaagttttctgtatcatatttgta

SEQ ID NO: 105221 - DNA, 25 bp, Probe sequence
tactataaagttttctgtatcatat

SEQ ID NO: 105222 - DNA, 25 bp, Probe sequence
tatgacgttcgtaaatactataaag

SEQ ID NO: 105223 - DNA, 25 bp, Probe sequence
tttcttatattatgacgttcgtaaa

SEQ ID NO: 105224 - DNA, 25 bp, Probe sequence
tttttttcttatattatgacgttcg

SEQ ID NO: 105225 - DNA, 25 bp, Probe sequence
agtagtttttttctgtgtcgcttgt

SEQ ID NO: 105226 - DNA, 25 bp, Probe sequence
aaacattgtttagtagggaatcagt

SEQ ID NO: 105227 - DNA, 25 bp, Probe sequence
gatatttgtacaattgaggtgtgtt

SEQ ID NO: 105228 - DNA, 25 bp, Probe sequence
gattagtagtttttttctgtgtcgc

SEQ ID NO: 105229 - DNA, 25 bp, Probe sequence
gtagggaatcagtacaggataggta

SEQ ID NO: 105230 - DNA, 25 bp, Probe sequence
ggataggtattgattcttccccgtg

SEQ ID NO: 105231 - DNA, 25 bp, Probe sequence
gtcgcttgttttattgtacagatat

SEQ ID NO: 105232 - DNA, 25 bp, Probe sequence
gtgtcgcttgttttattgtacagat

SEQ ID NO: 105233 - DNA, 25 bp, Probe sequence
ggtagaaattatcatgtaaacattg

SEQ ID NO: 105234 - DNA, 25 bp, Probe sequence
tgaggtgtgttaaaaggaggcgata

SEQ ID NO: 105235 - DNA, 25 bp, Probe sequence
tccccgtgcgaaatcttgattagta

SEQ ID NO: 105236 - DNA, 25 bp, Probe sequence
tcttccccgtgcgaaatcttgatta

SEQ ID NO: 105237 - DNA, 25 bp, Probe sequence
tttttttctgtgtcgcttgttttat

SEQ ID NO: 105238 - DNA, 25 bp, Probe sequence
ttttctgtgtcgcttgttttattgt

SEQ ID NO: 105239 - DNA, 25 bp, Probe sequence
ttctgtgtcgcttgttttattgtac

SEQ ID NO: 105240 - DNA, 25 bp, Probe sequence
atccctctctgaattgaactgtaat

SEQ ID NO: 105241 - DNA, 25 bp, Probe sequence
atgtttgacggtgtatagtattaat

SEQ ID NO: 105242 - DNA, 25 bp, Probe sequence
agcgcattaatgtttgacggtgtat

SEQ ID NO: 105243 - DNA, 25 bp, Probe sequence
acataactgttatttctttggatat

SEQ ID NO: 105244 - DNA, 25 bp, Probe sequence
aaaactgattacaaatacacataga

SEQ ID NO: 105245 - DNA, 25 bp, Probe sequence
ccatccctctctgaattgaactgta

SEQ ID NO: 105246 - DNA, 25 bp, Probe sequence
gcattggtagtagttgtagcgcatt

SEQ ID NO: 105247 - DNA, 25 bp, Probe sequence
gaattgaactgtaatttttgaattt

SEQ ID NO: 105248 - DNA, 25 bp, Probe sequence
gaaagttagttggaagttgatagta

SEQ ID NO: 105249 - DNA, 25 bp, Probe sequence
gaaatatatttttctttgactatac

SEQ ID NO: 105250 - DNA, 25 bp, Probe sequence
gttgtagcgcattaatgtttgacgg

SEQ ID NO: 105251 - DNA, 25 bp, Probe sequence
gttatttctttggatatttatatta

SEQ ID NO: 105252 - DNA, 25 bp, Probe sequence
ggtagtagttgtagcgcattaatgt

SEQ ID NO: 105253 - DNA, 25 bp, Probe sequence
ggaagttgatagtaggagtgggagc

SEQ ID NO: 105254 - DNA, 25 bp, Probe sequence
ttttctttgactatacataactgtt

SEQ ID NO: 105255 - DNA, 25 bp, Probe sequence
ataaaaccacgtatcatgttttagt

SEQ ID NO: 105256 - DNA, 25 bp, Probe sequence
atgcgtggttctttgttatgttgtc

SEQ ID NO: 105257 - DNA, 25 bp, Probe sequence
atgatgcgtggttctttgttatgtt

SEQ ID NO: 105258 - DNA, 25 bp, Probe sequence
catgttttagtatggtgatgatgcc

SEQ ID NO: 105259 - DNA, 25 bp, Probe sequence
gccatatacatgatgcgtggttctt

SEQ ID NO: 105260 - DNA, 25 bp, Probe sequence
gcgtggttctttgttatgttgtcat

SEQ ID NO: 105261 - DNA, 25 bp, Probe sequence
gatgatgccatatacatgatgcgtg

SEQ ID NO: 105262 - DNA, 25 bp, Probe sequence
gatgcgtggttctttgttatgttgt

SEQ ID NO: 105263 - DNA, 25 bp, Probe sequence
gatgccatatacatgatgcgtggtt

SEQ ID NO: 105264 - DNA, 25 bp, Probe sequence
gttgtcataatcttggagcgatatt

SEQ ID NO: 105265 - DNA, 25 bp, Probe sequence
gtggttctttgttatgttgtcataa

SEQ ID NO: 105266 - DNA, 25 bp, Probe sequence
ggtgatgatgccatatacatgatgc

SEQ ID NO: 105267 - DNA, 25 bp, Probe sequence
tacatgatgcgtggttctttgttat

SEQ ID NO: 105268 - DNA, 25 bp, Probe sequence
tatgttgtcataatcttggagcgat

SEQ ID NO: 105269 - DNA, 25 bp, Probe sequence
tatacatgatgcgtggttctttgtt

SEQ ID NO: 105270 - DNA, 25 bp, Probe sequence
attgacttatccggcatttcagatt

SEQ ID NO: 105271 - DNA, 25 bp, Probe sequence
atccggcatttcagattaaaatatt

SEQ ID NO: 105272 - DNA, 25 bp, Probe sequence
agttcaacatattgacttatccggc

SEQ ID NO: 105273 - DNA, 25 bp, Probe sequence
acatattgacttatccggcatttca

SEQ ID NO: 105274 - DNA, 25 bp, Probe sequence
aacatattgacttatccggcatttc

SEQ ID NO: 105275 - DNA, 25 bp, Probe sequence
aagctttttagcaaaagttcaacat

SEQ ID NO: 105276 - DNA, 25 bp, Probe sequence
aagttgctagctatataaagctttt

SEQ ID NO: 105277 - DNA, 25 bp, Probe sequence
catattgacttatccggcatttcag

SEQ ID NO: 105278 - DNA, 25 bp, Probe sequence
cttatccggcatttcagattaaaat

SEQ ID NO: 105279 - DNA, 25 bp, Probe sequence
gctagctatataaagctttttagca

SEQ ID NO: 105280 - DNA, 25 bp, Probe sequence
gacttatccggcatttcagattaaa

SEQ ID NO: 105281 - DNA, 25 bp, Probe sequence
tcaacatattgacttatccggcatt

SEQ ID NO: 105282 - DNA, 25 bp, Probe sequence
tattgacttatccggcatttcagat

SEQ ID NO: 105283 - DNA, 25 bp, Probe sequence
ttcaacatattgacttatccggcat

SEQ ID NO: 105284 - DNA, 25 bp, Probe sequence
ttgacttatccggcatttcagatta

SEQ ID NO: 105285 - DNA, 25 bp, Probe sequence
attgtaataaagtcgtgctaatttt

SEQ ID NO: 105286 - DNA, 25 bp, Probe sequence
attatgaccgataactactcatatg

SEQ ID NO: 105287 - DNA, 25 bp, Probe sequence
atatattatgaccgataactactca

SEQ ID NO: 105288 - DNA, 25 bp, Probe sequence
atgaccgataactactcatatgtaa

SEQ ID NO: 105289 - DNA, 25 bp, Probe sequence
agaaattgtaataaagtcgtgctaa

SEQ ID NO: 105290 - DNA, 25 bp, Probe sequence
ctatccctccttgtaaatatattat

SEQ ID NO: 105291 - DNA, 25 bp, Probe sequence
ctctatccctccttgtaaatatatt

SEQ ID NO: 105292 - DNA, 25 bp, Probe sequence
ccgataactactcatatgtaaatag

SEQ ID NO: 105293 - DNA, 25 bp, Probe sequence
cctccttgtaaatatattatgaccg

SEQ ID NO: 105294 - DNA, 25 bp, Probe sequence
gaccgataactactcatatgtaaat

SEQ ID NO: 105295 - DNA, 25 bp, Probe sequence
tccctccttgtaaatatattatgac

SEQ ID NO: 105296 - DNA, 25 bp, Probe sequence
tctctatccctccttgtaaatatat

SEQ ID NO: 105297 - DNA, 25 bp, Probe sequence
tctatccctccttgtaaatatatta

SEQ ID NO: 105298 - DNA, 25 bp, Probe sequence
taatgattacgttttaaagaaattg

SEQ ID NO: 105299 - DNA, 25 bp, Probe sequence
tatccctccttgtaaatatattatg

SEQ ID NO: 105300 - DNA, 25 bp, Probe sequence
aggagtgagtgtatatgcagctctt

SEQ ID NO: 105301 - DNA, 25 bp, Probe sequence
aaaaagagctgcatgtacacaagga

SEQ ID NO: 105302 - DNA, 25 bp, Probe sequence
aagagctgcatgtacacaaggagtg

SEQ ID NO: 105303 - DNA, 25 bp, Probe sequence
gctgcatgtacacaaggagtgagtg

SEQ ID NO: 105304 - DNA, 25 bp, Probe sequence
gcagctcttaaatatgtgaagtaat

SEQ ID NO: 105305 - DNA, 25 bp, Probe sequence
gagctagggatactcgaaaatatag

SEQ ID NO: 105306 - DNA, 25 bp, Probe sequence
gagctgcatgtacacaaggagtgag

SEQ ID NO: 105307 - DNA, 25 bp, Probe sequence
gagtgagtgtatatgcagctcttaa

SEQ ID NO: 105308 - DNA, 25 bp, Probe sequence
gttagacatacaatatagtcaaatt

SEQ ID NO: 105309 - DNA, 25 bp, Probe sequence
gtttatattaacgagctagggatac

SEQ ID NO: 105310 - DNA, 25 bp, Probe sequence
gtgtatatgcagctcttaaatatgt

SEQ ID NO: 105311 - DNA, 25 bp, Probe sequence
gggatactcgaaaatatagttagac

SEQ ID NO: 105312 - DNA, 25 bp, Probe sequence
tgagtgtatatgcagctcttaaata

SEQ ID NO: 105313 - DNA, 25 bp, Probe sequence
tagagtttatattaacgagctaggg

SEQ ID NO: 105314 - DNA, 25 bp, Probe sequence
tatgcagctcttaaatatgtgaagt

SEQ ID NO: 105315 - DNA, 25 bp, Probe sequence
atatccctgaaataacgtcctaaag

SEQ ID NO: 105316 - DNA, 25 bp, Probe sequence
attacatctatttttaggcttacct

SEQ ID NO: 105317 - DNA, 25 bp, Probe sequence
attaggtggttattgattcatttat

SEQ ID NO: 105318 - DNA, 25 bp, Probe sequence
aggtggttattgattcatttatgaa

SEQ ID NO: 105319 - DNA, 25 bp, Probe sequence
aatgtctagtgataattgatttaat

SEQ ID NO: 105320 - DNA, 25 bp, Probe sequence
gcgtttttattacatctatttttag

SEQ ID NO: 105321 - DNA, 25 bp, Probe sequence
gaggaggcgtttttattacatctat

SEQ ID NO: 105322 - DNA, 25 bp, Probe sequence
gaggcgtttttattacatctatttt

SEQ ID NO: 105323 - DNA, 25 bp, Probe sequence
gtatttaaacgtcttcatagatata

SEQ ID NO: 105324 - DNA, 25 bp, Probe sequence
ggatttatgtatttaatgtctagtg

SEQ ID NO: 105325 - DNA, 25 bp, Probe sequence
tccctgaaataacgtcctaaagatt

SEQ ID NO: 105326 - DNA, 25 bp, Probe sequence
taaatcatcttaaaatatccctgaa

SEQ ID NO: 105327 - DNA, 25 bp, Probe sequence
tacatctatttttaggcttacctaa

SEQ ID NO: 105328 - DNA, 25 bp, Probe sequence
tatgatttgttattaggtggttatt

SEQ ID NO: 105329 - DNA, 25 bp, Probe sequence
tataaatatctgaggaggcgttttt

SEQ ID NO: 105330 - DNA, 25 bp, Probe sequence
atactaattcaaggtggttcaacgc

SEQ ID NO: 105331 - DNA, 25 bp, Probe sequence
aggaagagttgggcggctttctagc

SEQ ID NO: 105332 - DNA, 25 bp, Probe sequence
aggtcacgacattagatagcttcgc

SEQ ID NO: 105333 - DNA, 25 bp, Probe sequence
aatgcataagcctttctaacaaata

SEQ ID NO: 105334 - DNA, 25 bp, Probe sequence
gcatcgctactaatgcataagcctt

SEQ ID NO: 105335 - DNA, 25 bp, Probe sequence
gcaactaatgcatagggtcccaaca

SEQ ID NO: 105336 - DNA, 25 bp, Probe sequence
gaaatctcatttaatttgtcactga

SEQ ID NO: 105337 - DNA, 25 bp, Probe sequence
gaggaggaaattgtctttcgaagag

SEQ ID NO: 105338 - DNA, 25 bp, Probe sequence
gatgcactttttcttctatataatt

SEQ ID NO: 105339 - DNA, 25 bp, Probe sequence
gatagcttcgcaactaatgcatagg

SEQ ID NO: 105340 - DNA, 25 bp, Probe sequence
gggtcccaacatagaaactttcgag

SEQ ID NO: 105341 - DNA, 25 bp, Probe sequence
ggaacgcattagatagcatcgctac

SEQ ID NO: 105342 - DNA, 25 bp, Probe sequence
ggcggctttctagctcataaaattc

SEQ ID NO: 105343 - DNA, 25 bp, Probe sequence
tcgaggcgaaagttcacaaacagga

SEQ ID NO: 105344 - DNA, 25 bp, Probe sequence
ttgtcactgatgcactttttcttct

SEQ ID NO: 105345 - DNA, 25 bp, Probe sequence
attgtatgcttttagaatttatcac

SEQ ID NO: 105346 - DNA, 25 bp, Probe sequence
atttattgtatgcttttagaattta

SEQ ID NO: 105347 - DNA, 25 bp, Probe sequence
atgcttttagaatttatcacatgag

SEQ ID NO: 105348 - DNA, 25 bp, Probe sequence
aaatttattgtatgcttttagaatt

SEQ ID NO: 105349 - DNA, 25 bp, Probe sequence
gcttttagaatttatcacatgagaa

SEQ ID NO: 105350 - DNA, 25 bp, Probe sequence
gaatttatcacatgagaatacaaat

SEQ ID NO: 105351 - DNA, 25 bp, Probe sequence
gtatgcttttagaatttatcacatg

SEQ ID NO: 105352 - DNA, 25 bp, Probe sequence
tgtatgcttttagaatttatcacat

SEQ ID NO: 105353 - DNA, 25 bp, Probe sequence
tgcttttagaatttatcacatgaga

SEQ ID NO: 105354 - DNA, 25 bp, Probe sequence
tagaatttatcacatgagaatacaa

SEQ ID NO: 105355 - DNA, 25 bp, Probe sequence
tatgcttttagaatttatcacatga

SEQ ID NO: 105356 - DNA, 25 bp, Probe sequence
ttattgtatgcttttagaatttatc

SEQ ID NO: 105357 - DNA, 25 bp, Probe sequence
ttatcacatgagaatacaaatggaa

SEQ ID NO: 105358 - DNA, 25 bp, Probe sequence
ttctttttacatattaaatttattg

SEQ ID NO: 105359 - DNA, 25 bp, Probe sequence
ttgtatgcttttagaatttatcaca

SEQ ID NO: 105360 - DNA, 25 bp, Probe sequence
agttaattactatcaacatgtattg

SEQ ID NO: 105361 - DNA, 25 bp, Probe sequence
aaagatttattggtcgcaggcgttt

SEQ ID NO: 105362 - DNA, 25 bp, Probe sequence
aatgatgaactattcgttaacgatg

SEQ ID NO: 105363 - DNA, 25 bp, Probe sequence
gcaggcgtttatatagcgacataac

SEQ ID NO: 105364 - DNA, 25 bp, Probe sequence
gaagtggactgacaaatagcgaaga

SEQ ID NO: 105365 - DNA, 25 bp, Probe sequence
gaagagacatttttagcattgttaa

SEQ ID NO: 105366 - DNA, 25 bp, Probe sequence
gaaatcactttctttctatttaatt

SEQ ID NO: 105367 - DNA, 25 bp, Probe sequence
gacataactatgttttgcaagtctt

SEQ ID NO: 105368 - DNA, 25 bp, Probe sequence
gatgtttttgcattatgttatgttt

SEQ ID NO: 105369 - DNA, 25 bp, Probe sequence
gtttaattatggtgcttgtagtgga

SEQ ID NO: 105370 - DNA, 25 bp, Probe sequence
gttttgcaagtcttattctattgaa

SEQ ID NO: 105371 - DNA, 25 bp, Probe sequence
gtaaggattatttaacaagttgcag

SEQ ID NO: 105372 - DNA, 25 bp, Probe sequence
ggaatggatttcgcaatagtttgtg

SEQ ID NO: 105373 - DNA, 25 bp, Probe sequence
taatccatttgtaagcgttttcgaa

SEQ ID NO: 105374 - DNA, 25 bp, Probe sequence
taagcgttttcgaattaactgttcg

SEQ ID NO: 105375 - DNA, 25 bp, Probe sequence
attgttctttttacgatttttgatg

SEQ ID NO: 105376 - DNA, 25 bp, Probe sequence
aaaccttggtattgttgacagttgt

SEQ ID NO: 105377 - DNA, 25 bp, Probe sequence
aaccgattgcacgaatgtcttgctt

SEQ ID NO: 105378 - DNA, 25 bp, Probe sequence
aaggtaaccgattgcacgaatgtct

SEQ ID NO: 105379 - DNA, 25 bp, Probe sequence
ctgttcattaacaattgaccattat

SEQ ID NO: 105380 - DNA, 25 bp, Probe sequence
gccataattccgttcaatttaacct

SEQ ID NO: 105381 - DNA, 25 bp, Probe sequence
gcacgaatgtcttgcttttattttt

SEQ ID NO: 105382 - DNA, 25 bp, Probe sequence
gaatatttatttaagctttcaactt

SEQ ID NO: 105383 - DNA, 25 bp, Probe sequence
gaatccatctaaaagttaattattt

SEQ ID NO: 105384 - DNA, 25 bp, Probe sequence
gattgcacgaatgtcttgcttttat

SEQ ID NO: 105385 - DNA, 25 bp, Probe sequence
ggacgttattataattaactgttca

SEQ ID NO: 105386 - DNA, 25 bp, Probe sequence
ggaatgctaaaagctaattttgtga

SEQ ID NO: 105387 - DNA, 25 bp, Probe sequence
tgaccattatcaactttttttacaa

SEQ ID NO: 105388 - DNA, 25 bp, Probe sequence
taaaaatgccataattccgttcaat

SEQ ID NO: 105389 - DNA, 25 bp, Probe sequence
tacgatttttgatgaatccatctaa

SEQ ID NO: 105390 - DNA, 25 bp, Probe sequence
atcaaaacacggtcgtcacaattac

SEQ ID NO: 105391 - DNA, 25 bp, Probe sequence
actgttggcgaccgtgttttactag

SEQ ID NO: 105392 - DNA, 25 bp, Probe sequence
acggtcgtcacaattactgttggcg

SEQ ID NO: 105393 - DNA, 25 bp, Probe sequence
acaattactgttggcgaccgtgttt

SEQ ID NO: 105394 - DNA, 25 bp, Probe sequence
aaatcaaaacacggtcgtcacaatt

SEQ ID NO: 105395 - DNA, 25 bp, Probe sequence
aaaacacggtcgtcacaattactgt

SEQ ID NO: 105396 - DNA, 25 bp, Probe sequence
aacacggtcgtcacaattactgttg

SEQ ID NO: 105397 - DNA, 25 bp, Probe sequence
caattactgttggcgaccgtgtttt

SEQ ID NO: 105398 - DNA, 25 bp, Probe sequence
cacaattactgttggcgaccgtgtt

SEQ ID NO: 105399 - DNA, 25 bp, Probe sequence
cacggtcgtcacaattactgttggc

SEQ ID NO: 105400 - DNA, 25 bp, Probe sequence
cggtcgtcacaattactgttggcga

SEQ ID NO: 105401 - DNA, 25 bp, Probe sequence
gtcacaattactgttggcgaccgtg

SEQ ID NO: 105402 - DNA, 25 bp, Probe sequence
tcgtcacaattactgttggcgaccg

SEQ ID NO: 105403 - DNA, 25 bp, Probe sequence
tactgttggcgaccgtgttttacta

SEQ ID NO: 105404 - DNA, 25 bp, Probe sequence
ttactgttggcgaccgtgttttact

SEQ ID NO: 105405 - DNA, 25 bp, Probe sequence
attcggattgaggtgcttatttttt

SEQ ID NO: 105406 - DNA, 25 bp, Probe sequence
atagcaaggtcaaaattttgccaaa

SEQ ID NO: 105407 - DNA, 25 bp, Probe sequence
atctgcccaaatttcgtaagaagcc

SEQ ID NO: 105408 - DNA, 25 bp, Probe sequence
atcgctgtttatatctgcccaaatt

SEQ ID NO: 105409 - DNA, 25 bp, Probe sequence
atgcgccttaaatgtaaacttatta

SEQ ID NO: 105410 - DNA, 25 bp, Probe sequence
acgaatcgctgtttatatctgccca

SEQ ID NO: 105411 - DNA, 25 bp, Probe sequence
acatattttaacgaatcgctgttta

SEQ ID NO: 105412 - DNA, 25 bp, Probe sequence
aagtttacattcggattgaggtgct

SEQ ID NO: 105413 - DNA, 25 bp, Probe sequence
ctgagaagtttaaattcatgttttc

SEQ ID NO: 105414 - DNA, 25 bp, Probe sequence
gaagccttagtcatttcaatagcaa

SEQ ID NO: 105415 - DNA, 25 bp, Probe sequence
gtttatatctgcccaaatttcgtaa

SEQ ID NO: 105416 - DNA, 25 bp, Probe sequence
gtaagaagccttagtcatttcaata

SEQ ID NO: 105417 - DNA, 25 bp, Probe sequence
tagtcatttcaatagcaaggtcaaa

SEQ ID NO: 105418 - DNA, 25 bp, Probe sequence
ttttcttgaaaaacatgcgccttaa

SEQ ID NO: 105419 - DNA, 25 bp, Probe sequence
ttttgccaaaaattatagttatact

SEQ ID NO: 105420 - DNA, 25 bp, Probe sequence
atatggaatcagaatttggaaataa

SEQ ID NO: 105421 - DNA, 25 bp, Probe sequence
atagtttaatatggaatcagaattt

SEQ ID NO: 105422 - DNA, 25 bp, Probe sequence
agggtgatagataatcaacagcaaa

SEQ ID NO: 105423 - DNA, 25 bp, Probe sequence
agtttaatatggaatcagaatttgg

SEQ ID NO: 105424 - DNA, 25 bp, Probe sequence
aaagggtgatagataatcaacagca

SEQ ID NO: 105425 - DNA, 25 bp, Probe sequence
aagggtgatagataatcaacagcaa

SEQ ID NO: 105426 - DNA, 25 bp, Probe sequence
aatagtttaatatggaatcagaatt

SEQ ID NO: 105427 - DNA, 25 bp, Probe sequence
aatatggaatcagaatttggaaata

SEQ ID NO: 105428 - DNA, 25 bp, Probe sequence
gtttaatatggaatcagaatttgga

SEQ ID NO: 105429 - DNA, 25 bp, Probe sequence
gtgatagataatcaacagcaaaata

SEQ ID NO: 105430 - DNA, 25 bp, Probe sequence
gggtgatagataatcaacagcaaaa

SEQ ID NO: 105431 - DNA, 25 bp, Probe sequence
ggtgatagataatcaacagcaaaat

SEQ ID NO: 105432 - DNA, 25 bp, Probe sequence
taatatggaatcagaatttggaaat

SEQ ID NO: 105433 - DNA, 25 bp, Probe sequence
tatggaatcagaatttggaaataaa

SEQ ID NO: 105434 - DNA, 25 bp, Probe sequence
tttaatatggaatcagaatttggaa

SEQ ID NO: 105435 - DNA, 25 bp, Probe sequence
atattatgtatatcatccagtgaaa

SEQ ID NO: 105436 - DNA, 25 bp, Probe sequence
ataagcggcttaatttagattatta

SEQ ID NO: 105437 - DNA, 25 bp, Probe sequence
agctgtggctaaggataaagaatca

SEQ ID NO: 105438 - DNA, 25 bp, Probe sequence
agccccaacatagagttttactcat

SEQ ID NO: 105439 - DNA, 25 bp, Probe sequence
aactaatatatgatgtacttgtaat

SEQ ID NO: 105440 - DNA, 25 bp, Probe sequence
aagtacatattagctgtggctaagg

SEQ ID NO: 105441 - DNA, 25 bp, Probe sequence
aatccacgcgacattgataatcgtt

SEQ ID NO: 105442 - DNA, 25 bp, Probe sequence
gcggagccccaacatagagttttac

SEQ ID NO: 105443 - DNA, 25 bp, Probe sequence
ccacgcgacattgataatcgttatc

SEQ ID NO: 105444 - DNA, 25 bp, Probe sequence
gaaatgtgtcacaaatccacgcgac

SEQ ID NO: 105445 - DNA, 25 bp, Probe sequence
gataatcgttatcaactaatatatg

SEQ ID NO: 105446 - DNA, 25 bp, Probe sequence
gtcacaaatccacgcgacattgata

SEQ ID NO: 105447 - DNA, 25 bp, Probe sequence
tgccccataaccttgtgaattttta

SEQ ID NO: 105448 - DNA, 25 bp, Probe sequence
ttaattgaaaggagttgcatatacg

SEQ ID NO: 105449 - DNA, 25 bp, Probe sequence
ttctgccccataaccttgtgaattt

SEQ ID NO: 105450 - DNA, 25 bp, Probe sequence
atagggacattgggatacaaatcaa

SEQ ID NO: 105451 - DNA, 25 bp, Probe sequence
agactctacaaggctatactcaggg

SEQ ID NO: 105452 - DNA, 25 bp, Probe sequence
actagactctacaaggctatactca

SEQ ID NO: 105453 - DNA, 25 bp, Probe sequence
aatgtactagactctacaaggctat

SEQ ID NO: 105454 - DNA, 25 bp, Probe sequence
aatagttgagtcataggatcattag

SEQ ID NO: 105455 - DNA, 25 bp, Probe sequence
aattatagggacattgggatacaaa

SEQ ID NO: 105456 - DNA, 25 bp, Probe sequence
ctagactctacaaggctatactcag

SEQ ID NO: 105457 - DNA, 25 bp, Probe sequence
gactctacaaggctatactcaggga

SEQ ID NO: 105458 - DNA, 25 bp, Probe sequence
gatttaatagttgagtcataggatc

SEQ ID NO: 105459 - DNA, 25 bp, Probe sequence
gttgagtcataggatcattagataa

SEQ ID NO: 105460 - DNA, 25 bp, Probe sequence
gtactagactctacaaggctatact

SEQ ID NO: 105461 - DNA, 25 bp, Probe sequence
gtcataggatcattagataaagcga

SEQ ID NO: 105462 - DNA, 25 bp, Probe sequence
tcaatgtactagactctacaaggct

SEQ ID NO: 105463 - DNA, 25 bp, Probe sequence
tacaaatcaatgtactagactctac

SEQ ID NO: 105464 - DNA, 25 bp, Probe sequence
tactagactctacaaggctatactc

SEQ ID NO: 105465 - DNA, 25 bp, Probe sequence
ataatggcgtataaggatgagagga

SEQ ID NO: 105466 - DNA, 25 bp, Probe sequence
agtagacatcctctcattactgttg

SEQ ID NO: 105467 - DNA, 25 bp, Probe sequence
actgttgtcgctcttattgtatata

SEQ ID NO: 105468 - DNA, 25 bp, Probe sequence
gctcgcatattcgagtatgttggag

SEQ ID NO: 105469 - DNA, 25 bp, Probe sequence
gaagtgaagcggattggctcgcata

SEQ ID NO: 105470 - DNA, 25 bp, Probe sequence
gaagcggattggctcgcatattcga

SEQ ID NO: 105471 - DNA, 25 bp, Probe sequence
gaacgtagctatgcatatattttga

SEQ ID NO: 105472 - DNA, 25 bp, Probe sequence
gacatcctctcattactgttgtcgc

SEQ ID NO: 105473 - DNA, 25 bp, Probe sequence
gagactaaatttgctgtgaaagggt

SEQ ID NO: 105474 - DNA, 25 bp, Probe sequence
gagtcacgcgataaatcagttacat

SEQ ID NO: 105475 - DNA, 25 bp, Probe sequence
gtatgttggagaacgtagctatgca

SEQ ID NO: 105476 - DNA, 25 bp, Probe sequence
tctcattactgttgtcgctcttatt

SEQ ID NO: 105477 - DNA, 25 bp, Probe sequence
taaagtaatctctatagtgctaatg

SEQ ID NO: 105478 - DNA, 25 bp, Probe sequence
tatagtgctaatgagtcacgcgata

SEQ ID NO: 105479 - DNA, 25 bp, Probe sequence
tattttgatgttgaggagttacaca

SEQ ID NO: 105480 - DNA, 25 bp, Probe sequence
ataaagctgatgatttactttgaca

SEQ ID NO: 105481 - DNA, 25 bp, Probe sequence
acctcattcaagttttaactgcaaa

SEQ ID NO: 105482 - DNA, 25 bp, Probe sequence
actgcaaataataaagctgatgatt

SEQ ID NO: 105483 - DNA, 25 bp, Probe sequence
aactgcaaataataaagctgatgat

SEQ ID NO: 105484 - DNA, 25 bp, Probe sequence
aataaagctgatgatttactttgac

SEQ ID NO: 105485 - DNA, 25 bp, Probe sequence
cacctcattcaagttttaactgcaa

SEQ ID NO: 105486 - DNA, 25 bp, Probe sequence
ctcattcaagttttaactgcaaata

SEQ ID NO: 105487 - DNA, 25 bp, Probe sequence
cctcattcaagttttaactgcaaat

SEQ ID NO: 105488 - DNA, 25 bp, Probe sequence
gtttcacctcattcaagttttaact

SEQ ID NO: 105489 - DNA, 25 bp, Probe sequence
tcattcaagttttaactgcaaataa

SEQ ID NO: 105490 - DNA, 25 bp, Probe sequence
tcacctcattcaagttttaactgca

SEQ ID NO: 105491 - DNA, 25 bp, Probe sequence
taactgcaaataataaagctgatga

SEQ ID NO: 105492 - DNA, 25 bp, Probe sequence
tttcacctcattcaagttttaactg

SEQ ID NO: 105493 - DNA, 25 bp, Probe sequence
ttaactgcaaataataaagctgatg

SEQ ID NO: 105494 - DNA, 25 bp, Probe sequence
ttcacctcattcaagttttaactgc

SEQ ID NO: 105495 - DNA, 25 bp, Probe sequence
atccctatactcttaatgcatcatc

SEQ ID NO: 105496 - DNA, 25 bp, Probe sequence
atgcatcatcacgaataacgtagtg

SEQ ID NO: 105497 - DNA, 25 bp, Probe sequence
aaatccctatactcttaatgcatca

SEQ ID NO: 105498 - DNA, 25 bp, Probe sequence
aaaaaatccctatactcttaatgca

SEQ ID NO: 105499 - DNA, 25 bp, Probe sequence
ctatactcttaatgcatcatcacga

SEQ ID NO: 105500 - DNA, 25 bp, Probe sequence
cgttttgtgtgtatttgtatgtagt

SEQ ID NO: 105501 - DNA, 25 bp, Probe sequence
ccctatactcttaatgcatcatcac

SEQ ID NO: 105502 - DNA, 25 bp, Probe sequence
gatcagactcctttaaatgatataa

SEQ ID NO: 105503 - DNA, 25 bp, Probe sequence
gtttatcatcaaagcaggtgtaata

SEQ ID NO: 105504 - DNA, 25 bp, Probe sequence
gtatagggaattaatgtttatcatc

SEQ ID NO: 105505 - DNA, 25 bp, Probe sequence
tgtgtgtatttgtatgtagttagaa

SEQ ID NO: 105506 - DNA, 25 bp, Probe sequence
taatgtttatcatcaaagcaggtgt

SEQ ID NO: 105507 - DNA, 25 bp, Probe sequence
tactcttaatgcatcatcacgaata

SEQ ID NO: 105508 - DNA, 25 bp, Probe sequence
tataaattatatacgttttgtgtgt

SEQ ID NO: 105509 - DNA, 25 bp, Probe sequence
ttaatgcatcatcacgaataacgta

SEQ ID NO: 105510 - DNA, 25 bp, Probe sequence
atgcaaaatgtcctaaacatatgtt

SEQ ID NO: 105511 - DNA, 25 bp, Probe sequence
atgtcctaaacatatgttttacatg

SEQ ID NO: 105512 - DNA, 25 bp, Probe sequence
acatatgttttacatgagtgaataa

SEQ ID NO: 105513 - DNA, 25 bp, Probe sequence
aaatgtcctaaacatatgttttaca

SEQ ID NO: 105514 - DNA, 25 bp, Probe sequence
aaacatatgttttacatgagtgaat

SEQ ID NO: 105515 - DNA, 25 bp, Probe sequence
aacatatgttttacatgagtgaata

SEQ ID NO: 105516 - DNA, 25 bp, Probe sequence
aatgtcctaaacatatgttttacat

SEQ ID NO: 105517 - DNA, 25 bp, Probe sequence
caaaatgtcctaaacatatgtttta

SEQ ID NO: 105518 - DNA, 25 bp, Probe sequence
ctaaacatatgttttacatgagtga

SEQ ID NO: 105519 - DNA, 25 bp, Probe sequence
gcaaaatgtcctaaacatatgtttt

SEQ ID NO: 105520 - DNA, 25 bp, Probe sequence
gtcctaaacatatgttttacatgag

SEQ ID NO: 105521 - DNA, 25 bp, Probe sequence
tgtcctaaacatatgttttacatga

SEQ ID NO: 105522 - DNA, 25 bp, Probe sequence
tgcaaaatgtcctaaacatatgttt

SEQ ID NO: 105523 - DNA, 25 bp, Probe sequence
tcctaaacatatgttttacatgagt

SEQ ID NO: 105524 - DNA, 25 bp, Probe sequence
taaacatatgttttacatgagtgaa

SEQ ID NO: 105525 - DNA, 25 bp, Probe sequence
attttatgttttacacacgcgagta

SEQ ID NO: 105526 - DNA, 25 bp, Probe sequence
acccagtttgcgcattttatgtttt

SEQ ID NO: 105527 - DNA, 25 bp, Probe sequence
aatgcgcaaacctgacccagtttgc

SEQ ID NO: 105528 - DNA, 25 bp, Probe sequence
caaacctgacccagtttgcgcattt

SEQ ID NO: 105529 - DNA, 25 bp, Probe sequence
ctgacccagtttgcgcattttatgt

SEQ ID NO: 105530 - DNA, 25 bp, Probe sequence
ccagtttgcgcattttatgttttac

SEQ ID NO: 105531 - DNA, 25 bp, Probe sequence
gcgcattttatgttttacacacgcg

SEQ ID NO: 105532 - DNA, 25 bp, Probe sequence
gcattttatgttttacacacgcgag

SEQ ID NO: 105533 - DNA, 25 bp, Probe sequence
gcaaacctgacccagtttgcgcatt

SEQ ID NO: 105534 - DNA, 25 bp, Probe sequence
gacccagtttgcgcattttatgttt

SEQ ID NO: 105535 - DNA, 25 bp, Probe sequence
gtttgcgcattttatgttttacaca

SEQ ID NO: 105536 - DNA, 25 bp, Probe sequence
tgacccagtttgcgcattttatgtt

SEQ ID NO: 105537 - DNA, 25 bp, Probe sequence
tatgttttacacacgcgagtaatgt

SEQ ID NO: 105538 - DNA, 25 bp, Probe sequence
ttacacacgcgagtaatgtgtttac

SEQ ID NO: 105539 - DNA, 25 bp, Probe sequence
ttgcgcattttatgttttacacacg

SEQ ID NO: 105540 - DNA, 25 bp, Probe sequence
aattttcctcctcaggataaagcaa

SEQ ID NO: 105541 - DNA, 25 bp, Probe sequence
atcatctaaatgaagcagttaacta

SEQ ID NO: 105542 - DNA, 25 bp, Probe sequence
agttgtgtgtaagcgttttcttaat

SEQ ID NO: 105543 - DNA, 25 bp, Probe sequence
aacatttgataggtaagggtatgat

SEQ ID NO: 105544 - DNA, 25 bp, Probe sequence
aagctatggcataataaataacatt

SEQ ID NO: 105545 - DNA, 25 bp, Probe sequence
gaagcagttaactatatatattaga

SEQ ID NO: 105546 - DNA, 25 bp, Probe sequence
gaaaagatataagtttttatgcaaa

SEQ ID NO: 105547 - DNA, 25 bp, Probe sequence
gaaatccatttaataaagcaattat

SEQ ID NO: 105548 - DNA, 25 bp, Probe sequence
gataggtaagggtatgataactaaa

SEQ ID NO: 105549 - DNA, 25 bp, Probe sequence
gtgtgtaagcgttttcttaattata

SEQ ID NO: 105550 - DNA, 25 bp, Probe sequence
tgtaagcgttttcttaattataaat

SEQ ID NO: 105551 - DNA, 25 bp, Probe sequence
tgataactaaaacttatcgattttt

SEQ ID NO: 105552 - DNA, 25 bp, Probe sequence
tcctcctcaggataaagcaaataaa

SEQ ID NO: 105553 - DNA, 25 bp, Probe sequence
tatatattagataagctatggcata

SEQ ID NO: 105554 - DNA, 25 bp, Probe sequence
ttttcctcctcaggataaagcaaat

SEQ ID NO: 105555 - DNA, 25 bp, Probe sequence
attttatcacttttaaggcataatg

SEQ ID NO: 105556 - DNA, 25 bp, Probe sequence
atcacttttaaggcataatgacata

SEQ ID NO: 105557 - DNA, 25 bp, Probe sequence
atcggttgaactgatactagagcga

SEQ ID NO: 105558 - DNA, 25 bp, Probe sequence
aaaactctagtatcggttgaactga

SEQ ID NO: 105559 - DNA, 25 bp, Probe sequence
acaatactcctcaaaattttaatag

SEQ ID NO: 105560 - DNA, 25 bp, Probe sequence
aaactctagtatcggttgaactgat

SEQ ID NO: 105561 - DNA, 25 bp, Probe sequence
aaaaactctagtatcggttgaactg

SEQ ID NO: 105562 - DNA, 25 bp, Probe sequence
aactctagtatcggttgaactgata

SEQ ID NO: 105563 - DNA, 25 bp, Probe sequence
aaggcataatgacatagatatattg

SEQ ID NO: 105564 - DNA, 25 bp, Probe sequence
caatactcctcaaaattttaatagt

SEQ ID NO: 105565 - DNA, 25 bp, Probe sequence
ctgatactagagcgagatgtttaaa

SEQ ID NO: 105566 - DNA, 25 bp, Probe sequence
cggttgaactgatactagagcgaga

SEQ ID NO: 105567 - DNA, 25 bp, Probe sequence
gaactgatactagagcgagatgttt

SEQ ID NO: 105568 - DNA, 25 bp, Probe sequence
gttgaactgatactagagcgagatg

SEQ ID NO: 105569 - DNA, 25 bp, Probe sequence
taatattttatcacttttaaggcat

SEQ ID NO: 105570 - DNA, 25 bp, Probe sequence
atgtatggggggtattgttatgtct

SEQ ID NO: 105571 - DNA, 25 bp, Probe sequence
aaaaccccgtacatatgagatgata

SEQ ID NO: 105572 - DNA, 25 bp, Probe sequence
aaccccgtacatatgagatgataat

SEQ ID NO: 105573 - DNA, 25 bp, Probe sequence
aatgactttgtctcatatgtatggg

SEQ ID NO: 105574 - DNA, 25 bp, Probe sequence
ctttgtctcatatgtatggggggta

SEQ ID NO: 105575 - DNA, 25 bp, Probe sequence
gaatataaaaaccccgtacatatga

SEQ ID NO: 105576 - DNA, 25 bp, Probe sequence
gactttgtctcatatgtatgggggg

SEQ ID NO: 105577 - DNA, 25 bp, Probe sequence
gagatgataatgactttgtctcata

SEQ ID NO: 105578 - DNA, 25 bp, Probe sequence
gatgataatgactttgtctcatatg

SEQ ID NO: 105579 - DNA, 25 bp, Probe sequence
gataatgactttgtctcatatgtat

SEQ ID NO: 105580 - DNA, 25 bp, Probe sequence
gtatggggggtattgttatgtcttg

SEQ ID NO: 105581 - DNA, 25 bp, Probe sequence
tgttgaatataaaaaccccgtacat

SEQ ID NO: 105582 - DNA, 25 bp, Probe sequence
tgatgttgaatataaaaaccccgta

SEQ ID NO: 105583 - DNA, 25 bp, Probe sequence
taaaaaccccgtacatatgagatga

SEQ ID NO: 105584 - DNA, 25 bp, Probe sequence
tatggggggtattgttatgtcttgc

SEQ ID NO: 105585 - DNA, 25 bp, Probe sequence
attaattaactctctatactttttg

SEQ ID NO: 105586 - DNA, 25 bp, Probe sequence
atattaattaactctctatactttt

SEQ ID NO: 105587 - DNA, 25 bp, Probe sequence
ataggcgtatagtgatatccatcaa

SEQ ID NO: 105588 - DNA, 25 bp, Probe sequence
aggcgtatagtgatatccatcaaaa

SEQ ID NO: 105589 - DNA, 25 bp, Probe sequence
actctctatactttttggaaagata

SEQ ID NO: 105590 - DNA, 25 bp, Probe sequence
aaatattaattaactctctatactt

SEQ ID NO: 105591 - DNA, 25 bp, Probe sequence
aactctctatactttttggaaagat

SEQ ID NO: 105592 - DNA, 25 bp, Probe sequence
gcgtatagtgatatccatcaaaaac

SEQ ID NO: 105593 - DNA, 25 bp, Probe sequence
gataggcgtatagtgatatccatca

SEQ ID NO: 105594 - DNA, 25 bp, Probe sequence
gtgatatccatcaaaaactataaaa

SEQ ID NO: 105595 - DNA, 25 bp, Probe sequence
taattaactctctatactttttgga

SEQ ID NO: 105596 - DNA, 25 bp, Probe sequence
taactctctatactttttggaaaga

SEQ ID NO: 105597 - DNA, 25 bp, Probe sequence
tatactttttggaaagataggcgta

SEQ ID NO: 105598 - DNA, 25 bp, Probe sequence
ttaactctctatactttttggaaag

SEQ ID NO: 105599 - DNA, 25 bp, Probe sequence
ttaattaactctctatactttttgg

SEQ ID NO: 105600 - DNA, 25 bp, Probe sequence
attatcaaacgcacggctcgaacaa

SEQ ID NO: 105601 - DNA, 25 bp, Probe sequence
atattatcaaacgcacggctcgaac

SEQ ID NO: 105602 - DNA, 25 bp, Probe sequence
atcaaacgcacggctcgaacaagtc

SEQ ID NO: 105603 - DNA, 25 bp, Probe sequence
acgcacggctcgaacaagtcttttt

SEQ ID NO: 105604 - DNA, 25 bp, Probe sequence
caaacgcacggctcgaacaagtctt

SEQ ID NO: 105605 - DNA, 25 bp, Probe sequence
aacgcacggctcgaacaagtctttt

SEQ ID NO: 105606 - DNA, 25 bp, Probe sequence
aagacttggtcgaatcgtggatgat

SEQ ID NO: 105607 - DNA, 25 bp, Probe sequence
gcacggctcgaacaagtctttttta

SEQ ID NO: 105608 - DNA, 25 bp, Probe sequence
gaataaagacttggtcgaatcgtgg

SEQ ID NO: 105609 - DNA, 25 bp, Probe sequence
gacttggtcgaatcgtggatgatat

SEQ ID NO: 105610 - DNA, 25 bp, Probe sequence
gatatattatcaaacgcacggctcg

SEQ ID NO: 105611 - DNA, 25 bp, Probe sequence
ggtcgaatcgtggatgatatattat

SEQ ID NO: 105612 - DNA, 25 bp, Probe sequence
tcaaacgcacggctcgaacaagtct

SEQ ID NO: 105613 - DNA, 25 bp, Probe sequence
taatttatccgtttaatatacaaag

SEQ ID NO: 105614 - DNA, 25 bp, Probe sequence
ttatcaaacgcacggctcgaacaag

SEQ ID NO: 105615 - DNA, 25 bp, Probe sequence
attttcaaattgacgctaatatgcg

SEQ ID NO: 105616 - DNA, 25 bp, Probe sequence
atgaaagcaagttattatgtaggga

SEQ ID NO: 105617 - DNA, 25 bp, Probe sequence
atgttaggtgtgttcttttatagac

SEQ ID NO: 105618 - DNA, 25 bp, Probe sequence
aggtgtgttcttttatagacgataa

SEQ ID NO: 105619 - DNA, 25 bp, Probe sequence
agctgtgtgcatattaagcgaatga

SEQ ID NO: 105620 - DNA, 25 bp, Probe sequence
aagcgaatgattttcaaattgacgc

SEQ ID NO: 105621 - DNA, 25 bp, Probe sequence
cacacttaatgttacgtattgacgt

SEQ ID NO: 105622 - DNA, 25 bp, Probe sequence
gaacaacaacgatgaagaggggttt

SEQ ID NO: 105623 - DNA, 25 bp, Probe sequence
gacgtttaatgttaggtgtgttctt

SEQ ID NO: 105624 - DNA, 25 bp, Probe sequence
gacgataaaagctgtgtgcatatta

SEQ ID NO: 105625 - DNA, 25 bp, Probe sequence
gtgaaagtaagtttatcatacacac

SEQ ID NO: 105626 - DNA, 25 bp, Probe sequence
tacgtattgacgtttaatgttaggt

SEQ ID NO: 105627 - DNA, 25 bp, Probe sequence
tatcatacacacttaatgttacgta

SEQ ID NO: 105628 - DNA, 25 bp, Probe sequence
tatagacgataaaagctgtgtgcat

SEQ ID NO: 105629 - DNA, 25 bp, Probe sequence
ttgacgctaatatgcgaaagtagta

SEQ ID NO: 105630 - DNA, 25 bp, Probe sequence
agcaattattatcatgaaagttttt

SEQ ID NO: 105631 - DNA, 25 bp, Probe sequence
aaatgaggctactcaaggagctcaa

SEQ ID NO: 105632 - DNA, 25 bp, Probe sequence
caaataatctttgagtagccttttt

SEQ ID NO: 105633 - DNA, 25 bp, Probe sequence
gcgatttcgtttcatgatttataaa

SEQ ID NO: 105634 - DNA, 25 bp, Probe sequence
gcaaatttatgatattgtttcttaa

SEQ ID NO: 105635 - DNA, 25 bp, Probe sequence
gagtagcctttttataggttgtgtt

SEQ ID NO: 105636 - DNA, 25 bp, Probe sequence
gaggctactcaaggagctcaaataa

SEQ ID NO: 105637 - DNA, 25 bp, Probe sequence
gatgttttatttataattttctgca

SEQ ID NO: 105638 - DNA, 25 bp, Probe sequence
gatgtttataatttagcgatttcgt

SEQ ID NO: 105639 - DNA, 25 bp, Probe sequence
gtatgcgtttacactaaaatagcaa

SEQ ID NO: 105640 - DNA, 25 bp, Probe sequence
ggttgtgtttgtatgcgtttacact

SEQ ID NO: 105641 - DNA, 25 bp, Probe sequence
taatctttgagtagcctttttatag

SEQ ID NO: 105642 - DNA, 25 bp, Probe sequence
taaacataggaggcttatctaattc

SEQ ID NO: 105643 - DNA, 25 bp, Probe sequence
ttttcttaaacataggaggcttatc

SEQ ID NO: 105644 - DNA, 25 bp, Probe sequence
ttagcgatttcgtttcatgatttat

SEQ ID NO: 105645 - DNA, 25 bp, Probe sequence
gcgccgtttactgttaagtattcac

SEQ ID NO: 105646 - DNA, 25 bp, Probe sequence
atgagttatctatttagttgccaaa

SEQ ID NO: 105647 - DNA, 25 bp, Probe sequence
atgtgcaaacaaagtaatcggtaga

SEQ ID NO: 105648 - DNA, 25 bp, Probe sequence
atggtctttttattttatgcgtatc

SEQ ID NO: 105649 - DNA, 25 bp, Probe sequence
agaccatgatgtgtacttgtttaac

SEQ ID NO: 105650 - DNA, 25 bp, Probe sequence
agaaattcaacatacatagcgccgt

SEQ ID NO: 105651 - DNA, 25 bp, Probe sequence
acatacatagcgccgtttactgtta

SEQ ID NO: 105652 - DNA, 25 bp, Probe sequence
aaattctacataatcaagaccatga

SEQ ID NO: 105653 - DNA, 25 bp, Probe sequence
aacttatgactctatttgtttaaca

SEQ ID NO: 105654 - DNA, 25 bp, Probe sequence
gcgtatcattcgtcatattttttat

SEQ ID NO: 105655 - DNA, 25 bp, Probe sequence
gagtatgttagttttaaatgtcgaa

SEQ ID NO: 105656 - DNA, 25 bp, Probe sequence
gtgtacttgtttaacttatgactct

SEQ ID NO: 105657 - DNA, 25 bp, Probe sequence
tgttaagtattcacattacagatga

SEQ ID NO: 105658 - DNA, 25 bp, Probe sequence
taacaattgcgataatggtcttttt

SEQ ID NO: 105659 - DNA, 25 bp, Probe sequence
ttattttatgcgtatcattcgtcat

SEQ ID NO: 105660 - DNA, 25 bp, Probe sequence
ataaggatgactttgtgagtggcgg

SEQ ID NO: 105661 - DNA, 25 bp, Probe sequence
atgttagcaaaaggcaagggtgtct

SEQ ID NO: 105662 - DNA, 25 bp, Probe sequence
aggcaagggtgtctacaatgaatga

SEQ ID NO: 105663 - DNA, 25 bp, Probe sequence
agggtgtctacaatgaatgatgaag

SEQ ID NO: 105664 - DNA, 25 bp, Probe sequence
agcaaaaggcaagggtgtctacaat

SEQ ID NO: 105665 - DNA, 25 bp, Probe sequence
aaaggcaagggtgtctacaatgaat

SEQ ID NO: 105666 - DNA, 25 bp, Probe sequence
aaaaggcaagggtgtctacaatgaa

SEQ ID NO: 105667 - DNA, 25 bp, Probe sequence
aaggcaagggtgtctacaatgaatg

SEQ ID NO: 105668 - DNA, 25 bp, Probe sequence
caaaaggcaagggtgtctacaatga

SEQ ID NO: 105669 - DNA, 25 bp, Probe sequence
gcaaaaggcaagggtgtctacaatg

SEQ ID NO: 105670 - DNA, 25 bp, Probe sequence
gcaagggtgtctacaatgaatgatg

SEQ ID NO: 105671 - DNA, 25 bp, Probe sequence
gttagcaaaaggcaagggtgtctac

SEQ ID NO: 105672 - DNA, 25 bp, Probe sequence
gtgtctacaatgaatgatgaagata

SEQ ID NO: 105673 - DNA, 25 bp, Probe sequence
gggtgtctacaatgaatgatgaaga

SEQ ID NO: 105674 - DNA, 25 bp, Probe sequence
ggcaagggtgtctacaatgaatgat

SEQ ID NO: 105675 - DNA, 25 bp, Probe sequence
atcactctcgccacattgttatgtt

SEQ ID NO: 105676 - DNA, 25 bp, Probe sequence
atcatccccaatttaatcataccac

SEQ ID NO: 105677 - DNA, 25 bp, Probe sequence
actagcttgatatctgttttaactc

SEQ ID NO: 105678 - DNA, 25 bp, Probe sequence
cataccacggtctatagatgatagg

SEQ ID NO: 105679 - DNA, 25 bp, Probe sequence
ctcctttatcatccccaatttaatc

SEQ ID NO: 105680 - DNA, 25 bp, Probe sequence
ctctcgccacattgttatgttagtt

SEQ ID NO: 105681 - DNA, 25 bp, Probe sequence
cccaatttaatcataccacggtcta

SEQ ID NO: 105682 - DNA, 25 bp, Probe sequence
gaaatcatatatggcattgcatttt

SEQ ID NO: 105683 - DNA, 25 bp, Probe sequence
gacaattttgtgactgaatcagact

SEQ ID NO: 105684 - DNA, 25 bp, Probe sequence
gttcttctacagtgacatttcatta

SEQ ID NO: 105685 - DNA, 25 bp, Probe sequence
gtgactgaatcagactagcttgata

SEQ ID NO: 105686 - DNA, 25 bp, Probe sequence
ggttggttaatgtgtgtgtgttgaa

SEQ ID NO: 105687 - DNA, 25 bp, Probe sequence
tcagcattatatgatgttcttctac

SEQ ID NO: 105688 - DNA, 25 bp, Probe sequence
tttcattacaatatcactctcgcca

SEQ ID NO: 105689 - DNA, 25 bp, Probe sequence
ttaactcaaaccattttcagcatta

SEQ ID NO: 105690 - DNA, 25 bp, Probe sequence
attcaggtgtgcttttttagatgcg

SEQ ID NO: 105691 - DNA, 25 bp, Probe sequence
atatgaaaagcacgcctgctatcaa

SEQ ID NO: 105692 - DNA, 25 bp, Probe sequence
atcaaattcaggtgtgcttttttag

SEQ ID NO: 105693 - DNA, 25 bp, Probe sequence
acgcctgctatcaaattcaggtgtg

SEQ ID NO: 105694 - DNA, 25 bp, Probe sequence
aaagcacgcctgctatcaaattcag

SEQ ID NO: 105695 - DNA, 25 bp, Probe sequence
aagcacgcctgctatcaaattcagg

SEQ ID NO: 105696 - DNA, 25 bp, Probe sequence
caaattcaggtgtgcttttttagat

SEQ ID NO: 105697 - DNA, 25 bp, Probe sequence
gcctgctatcaaattcaggtgtgct

SEQ ID NO: 105698 - DNA, 25 bp, Probe sequence
gctatcaaattcaggtgtgcttttt

SEQ ID NO: 105699 - DNA, 25 bp, Probe sequence
gcacgcctgctatcaaattcaggtg

SEQ ID NO: 105700 - DNA, 25 bp, Probe sequence
gaaaagcacgcctgctatcaaattc

SEQ ID NO: 105701 - DNA, 25 bp, Probe sequence
gtgtgcttttttagatgcgataacg

SEQ ID NO: 105702 - DNA, 25 bp, Probe sequence
ggtgtgcttttttagatgcgataac

SEQ ID NO: 105703 - DNA, 25 bp, Probe sequence
tcaggtgtgcttttttagatgcgat

SEQ ID NO: 105704 - DNA, 25 bp, Probe sequence
ttctcatatgaaaagcacgcctgct

SEQ ID NO: 105705 - DNA, 25 bp, Probe sequence
atagtatcgctattcattaacacag

SEQ ID NO: 105706 - DNA, 25 bp, Probe sequence
aggcacgcatactttgtagtcagtt

SEQ ID NO: 105707 - DNA, 25 bp, Probe sequence
agcgtgcgtgcttttttgaagacat

SEQ ID NO: 105708 - DNA, 25 bp, Probe sequence
aaatattcataaaggcacgcatact

SEQ ID NO: 105709 - DNA, 25 bp, Probe sequence
aattggaaatgaagtgacgcgcaca

SEQ ID NO: 105710 - DNA, 25 bp, Probe sequence
caataattttccatttaagcacaga

SEQ ID NO: 105711 - DNA, 25 bp, Probe sequence
gcgtgcttttttgaagacattgttg

SEQ ID NO: 105712 - DNA, 25 bp, Probe sequence
gcatcagatttaggcattagtttta

SEQ ID NO: 105713 - DNA, 25 bp, Probe sequence
gaatatcggaaattttgtttgaaag

SEQ ID NO: 105714 - DNA, 25 bp, Probe sequence
gacatacttgtgttaatttttcaaa

SEQ ID NO: 105715 - DNA, 25 bp, Probe sequence
gattttactgcatcagatttaggca

SEQ ID NO: 105716 - DNA, 25 bp, Probe sequence
gttctgacatataaagcgtgcgtgc

SEQ ID NO: 105717 - DNA, 25 bp, Probe sequence
gtagtcagttatctgttctgacata

SEQ ID NO: 105718 - DNA, 25 bp, Probe sequence
gtgacgcgcacatatagtatcgcta

SEQ ID NO: 105719 - DNA, 25 bp, Probe sequence
tgtgttgcacacattttttaataaa

SEQ ID NO: 105720 - DNA, 25 bp, Probe sequence
attgtctaactttaattcttagtca

SEQ ID NO: 105721 - DNA, 25 bp, Probe sequence
attatgcctaaattttgatattaca

SEQ ID NO: 105722 - DNA, 25 bp, Probe sequence
aaatgctgaaaatcaattatgccta

SEQ ID NO: 105723 - DNA, 25 bp, Probe sequence
aaaacgggaataatatacctgatat

SEQ ID NO: 105724 - DNA, 25 bp, Probe sequence
aatccataaataataaagaatcctt

SEQ ID NO: 105725 - DNA, 25 bp, Probe sequence
cttagtcattagacagtatccatgt

SEQ ID NO: 105726 - DNA, 25 bp, Probe sequence
gaatccttttaatatggtaggttgt

SEQ ID NO: 105727 - DNA, 25 bp, Probe sequence
gacagtatccatgttaataggattt

SEQ ID NO: 105728 - DNA, 25 bp, Probe sequence
gatatattacatgaggagcggtgca

SEQ ID NO: 105729 - DNA, 25 bp, Probe sequence
gtcattagacagtatccatgttaat

SEQ ID NO: 105730 - DNA, 25 bp, Probe sequence
tggtaggttgttaaacaattgtcta

SEQ ID NO: 105731 - DNA, 25 bp, Probe sequence
taactttaattcttagtcattagac

SEQ ID NO: 105732 - DNA, 25 bp, Probe sequence
taaacaattgtctaactttaattct

SEQ ID NO: 105733 - DNA, 25 bp, Probe sequence
ttttttcttaaatgtaattgcacta

SEQ ID NO: 105734 - DNA, 25 bp, Probe sequence
ttaaatgtaattgcactaaaaacca

SEQ ID NO: 105735 - DNA, 25 bp, Probe sequence
atagttttaagttgaaatacaggag

SEQ ID NO: 105736 - DNA, 25 bp, Probe sequence
agttagtgatacaatagttttaagt

SEQ ID NO: 105737 - DNA, 25 bp, Probe sequence
aagttagtgatacaatagttttaag

SEQ ID NO: 105738 - DNA, 25 bp, Probe sequence
aagttgaaatacaggaggatgaata

SEQ ID NO: 105739 - DNA, 25 bp, Probe sequence
caatagttttaagttgaaatacagg

SEQ ID NO: 105740 - DNA, 25 bp, Probe sequence
gaaagttagtgatacaatagtttta

SEQ ID NO: 105741 - DNA, 25 bp, Probe sequence
gttttaagttgaaatacaggaggat

SEQ ID NO: 105742 - DNA, 25 bp, Probe sequence
gttagtgatacaatagttttaagtt

SEQ ID NO: 105743 - DNA, 25 bp, Probe sequence
gtgatacaatagttttaagttgaaa

SEQ ID NO: 105744 - DNA, 25 bp, Probe sequence
tctgaaagttagtgatacaatagtt

SEQ ID NO: 105745 - DNA, 25 bp, Probe sequence
tagtgatacaatagttttaagttga

SEQ ID NO: 105746 - DNA, 25 bp, Probe sequence
tttttctgaaagttagtgatacaat

SEQ ID NO: 105747 - DNA, 25 bp, Probe sequence
ttttctgaaagttagtgatacaata

SEQ ID NO: 105748 - DNA, 25 bp, Probe sequence
ttaagttgaaatacaggaggatgaa

SEQ ID NO: 105749 - DNA, 25 bp, Probe sequence
ttctgaaagttagtgatacaatagt

SEQ ID NO: 105750 - DNA, 25 bp, Probe sequence
atagcgcaagactaaacaaattgaa

SEQ ID NO: 105751 - DNA, 25 bp, Probe sequence
atagcgacgttaatgcgttgttatc

SEQ ID NO: 105752 - DNA, 25 bp, Probe sequence
atgcgttgttatctctacacttttt

SEQ ID NO: 105753 - DNA, 25 bp, Probe sequence
gcgacgttaatgcgttgttatctct

SEQ ID NO: 105754 - DNA, 25 bp, Probe sequence
gcgttgttatctctacactttttaa

SEQ ID NO: 105755 - DNA, 25 bp, Probe sequence
gacgttaatgcgttgttatctctac

SEQ ID NO: 105756 - DNA, 25 bp, Probe sequence
gttgttatctctacactttttaatt

SEQ ID NO: 105757 - DNA, 25 bp, Probe sequence
gttaatgcgttgttatctctacact

SEQ ID NO: 105758 - DNA, 25 bp, Probe sequence
taagtgtagggaaaatagcgacgtt

SEQ ID NO: 105759 - DNA, 25 bp, Probe sequence
tgttatctctacactttttaatttt

SEQ ID NO: 105760 - DNA, 25 bp, Probe sequence
tcaatatctgaataactttaatggt

SEQ ID NO: 105761 - DNA, 25 bp, Probe sequence
taatgcgttgttatctctacacttt

SEQ ID NO: 105762 - DNA, 25 bp, Probe sequence
taaattgtgactttttcggaatatt

SEQ ID NO: 105763 - DNA, 25 bp, Probe sequence
tttaattttataatagcgcaagact

SEQ ID NO: 105764 - DNA, 25 bp, Probe sequence
ttatctctacactttttaattttat

SEQ ID NO: 105765 - DNA, 25 bp, Probe sequence
attgacgtactcaagtgcgtacgct

SEQ ID NO: 105766 - DNA, 25 bp, Probe sequence
agaatacgatgaactcgttggcaat

SEQ ID NO: 105767 - DNA, 25 bp, Probe sequence
actcgttggcaatattgacgtactc

SEQ ID NO: 105768 - DNA, 25 bp, Probe sequence
aatattgacgtactcaagtgcgtac

SEQ ID NO: 105769 - DNA, 25 bp, Probe sequence
ctcaagtgcgtacgctataattagc

SEQ ID NO: 105770 - DNA, 25 bp, Probe sequence
cgatgaactcgttggcaatattgac

SEQ ID NO: 105771 - DNA, 25 bp, Probe sequence
gctataattagcgtaacagaaaaca

SEQ ID NO: 105772 - DNA, 25 bp, Probe sequence
gcttgtgtacgatagcatataggta

SEQ ID NO: 105773 - DNA, 25 bp, Probe sequence
gaactcgttggcaatattgacgtac

SEQ ID NO: 105774 - DNA, 25 bp, Probe sequence
gacgtactcaagtgcgtacgctata

SEQ ID NO: 105775 - DNA, 25 bp, Probe sequence
gtactcaagtgcgtacgctataatt

SEQ ID NO: 105776 - DNA, 25 bp, Probe sequence
gtacgatagcatataggtattaaga

SEQ ID NO: 105777 - DNA, 25 bp, Probe sequence
gtgcgtacgctataattagcgtaac

SEQ ID NO: 105778 - DNA, 25 bp, Probe sequence
ggcaatattgacgtactcaagtgcg

SEQ ID NO: 105779 - DNA, 25 bp, Probe sequence
tcgttggcaatattgacgtactcaa

SEQ ID NO: 105780 - DNA, 25 bp, Probe sequence
agtcgccttctttcgatatttgtat

SEQ ID NO: 105781 - DNA, 25 bp, Probe sequence
cagtcgccttctttcgatatttgta

SEQ ID NO: 105782 - DNA, 25 bp, Probe sequence
cttctttcgatatttgtattataaa

SEQ ID NO: 105783 - DNA, 25 bp, Probe sequence
ctttcgatatttgtattataaagaa

SEQ ID NO: 105784 - DNA, 25 bp, Probe sequence
cgccttctttcgatatttgtattat

SEQ ID NO: 105785 - DNA, 25 bp, Probe sequence
ccttctttcgatatttgtattataa

SEQ ID NO: 105786 - DNA, 25 bp, Probe sequence
gccttctttcgatatttgtattata

SEQ ID NO: 105787 - DNA, 25 bp, Probe sequence
gtcgccttctttcgatatttgtatt

SEQ ID NO: 105788 - DNA, 25 bp, Probe sequence
tcgccttctttcgatatttgtatta

SEQ ID NO: 105789 - DNA, 25 bp, Probe sequence
tctttcgatatttgtattataaaga

SEQ ID NO: 105790 - DNA, 25 bp, Probe sequence
tcagtcgccttctttcgatatttgt

SEQ ID NO: 105791 - DNA, 25 bp, Probe sequence
ttctttcgatatttgtattataaag

SEQ ID NO: 105792 - DNA, 25 bp, Probe sequence
atccttagtcttatctgagggcatt

SEQ ID NO: 105793 - DNA, 25 bp, Probe sequence
cttagtcttatctgagggcattttt

SEQ ID NO: 105794 - DNA, 25 bp, Probe sequence
gaattaaggtttgtatccttagtct

SEQ ID NO: 105795 - DNA, 25 bp, Probe sequence
gtttgtatccttagtcttatctgag

SEQ ID NO: 105796 - DNA, 25 bp, Probe sequence
gtatccttagtcttatctgagggca

SEQ ID NO: 105797 - DNA, 25 bp, Probe sequence
gtcttatctgagggcatttttatgt

SEQ ID NO: 105798 - DNA, 25 bp, Probe sequence
ggtttgtatccttagtcttatctga

SEQ ID NO: 105799 - DNA, 25 bp, Probe sequence
tgtatccttagtcttatctgagggc

SEQ ID NO: 105800 - DNA, 25 bp, Probe sequence
tccttagtcttatctgagggcattt

SEQ ID NO: 105801 - DNA, 25 bp, Probe sequence
tctgagggcatttttatgttataaa

SEQ ID NO: 105802 - DNA, 25 bp, Probe sequence
tcttatctgagggcatttttatgtt

SEQ ID NO: 105803 - DNA, 25 bp, Probe sequence
tagtcttatctgagggcatttttat

SEQ ID NO: 105804 - DNA, 25 bp, Probe sequence
tatccttagtcttatctgagggcat

SEQ ID NO: 105805 - DNA, 25 bp, Probe sequence
tatctgagggcatttttatgttata

SEQ ID NO: 105806 - DNA, 25 bp, Probe sequence
tttgtatccttagtcttatctgagg

SEQ ID NO: 105807 - DNA, 25 bp, Probe sequence
attactttgtattgtatgttttata

SEQ ID NO: 105808 - DNA, 25 bp, Probe sequence
atattactttgtattgtatgtttta

SEQ ID NO: 105809 - DNA, 25 bp, Probe sequence
atagatactttagcacatattactt

SEQ ID NO: 105810 - DNA, 25 bp, Probe sequence
atacctcttaaatagttgtattata

SEQ ID NO: 105811 - DNA, 25 bp, Probe sequence
atactttagcacatattactttgta

SEQ ID NO: 105812 - DNA, 25 bp, Probe sequence
agtatacctcttaaatagttgtatt

SEQ ID NO: 105813 - DNA, 25 bp, Probe sequence
agatactttagcacatattactttg

SEQ ID NO: 105814 - DNA, 25 bp, Probe sequence
agcacatattactttgtattgtatg

SEQ ID NO: 105815 - DNA, 25 bp, Probe sequence
actttagcacatattactttgtatt

SEQ ID NO: 105816 - DNA, 25 bp, Probe sequence
ctttagcacatattactttgtattg

SEQ ID NO: 105817 - DNA, 25 bp, Probe sequence
gatactttagcacatattactttgt

SEQ ID NO: 105818 - DNA, 25 bp, Probe sequence
tactttagcacatattactttgtat

SEQ ID NO: 105819 - DNA, 25 bp, Probe sequence
tagcacatattactttgtattgtat

SEQ ID NO: 105820 - DNA, 25 bp, Probe sequence
tattatatagatactttagcacata

SEQ ID NO: 105821 - DNA, 25 bp, Probe sequence
ttagcacatattactttgtattgta

SEQ ID NO: 105822 - DNA, 25 bp, Probe sequence
atttatgtctcaggctctctatatg

SEQ ID NO: 105823 - DNA, 25 bp, Probe sequence
atgtctcaggctctctatatggctc

SEQ ID NO: 105824 - DNA, 25 bp, Probe sequence
atggataatggataatactctgaaa

SEQ ID NO: 105825 - DNA, 25 bp, Probe sequence
atggctcgtttttagaacgacagta

SEQ ID NO: 105826 - DNA, 25 bp, Probe sequence
aggctctctatatggctcgttttta

SEQ ID NO: 105827 - DNA, 25 bp, Probe sequence
agtgagttgtgatactgacttttaa

SEQ ID NO: 105828 - DNA, 25 bp, Probe sequence
aaagcacgcttaaaagtgagttgtg

SEQ ID NO: 105829 - DNA, 25 bp, Probe sequence
gctctctatatggctcgtttttaga

SEQ ID NO: 105830 - DNA, 25 bp, Probe sequence
gctttttgatgtgtatggataatgg

SEQ ID NO: 105831 - DNA, 25 bp, Probe sequence
gaacgacagtatatctaaataaagc

SEQ ID NO: 105832 - DNA, 25 bp, Probe sequence
gatactgacttttaagtgtgctttt

SEQ ID NO: 105833 - DNA, 25 bp, Probe sequence
gtatatctaaataaagcacgcttaa

SEQ ID NO: 105834 - DNA, 25 bp, Probe sequence
gtgtgctttttgatgtgtatggata

SEQ ID NO: 105835 - DNA, 25 bp, Probe sequence
tgatttatgtctcaggctctctata

SEQ ID NO: 105836 - DNA, 25 bp, Probe sequence
taagtgtgctttttgatgtgtatgg

SEQ ID NO: 105837 - DNA, 25 bp, Probe sequence
attgagcatggcgattcatgggagt

SEQ ID NO: 105838 - DNA, 25 bp, Probe sequence
atattgagcatggcgattcatggga

SEQ ID NO: 105839 - DNA, 25 bp, Probe sequence
atggcgattcatgggagtgggacag

SEQ ID NO: 105840 - DNA, 25 bp, Probe sequence
aggtatattgagcatggcgattcat

SEQ ID NO: 105841 - DNA, 25 bp, Probe sequence
agcatggcgattcatgggagtggga

SEQ ID NO: 105842 - DNA, 25 bp, Probe sequence
aaaggtatattgagcatggcgattc

SEQ ID NO: 105843 - DNA, 25 bp, Probe sequence
aaaaggtatattgagcatggcgatt

SEQ ID NO: 105844 - DNA, 25 bp, Probe sequence
aaggtatattgagcatggcgattca

SEQ ID NO: 105845 - DNA, 25 bp, Probe sequence
gcatggcgattcatgggagtgggac

SEQ ID NO: 105846 - DNA, 25 bp, Probe sequence
gagcatggcgattcatgggagtggg

SEQ ID NO: 105847 - DNA, 25 bp, Probe sequence
gtatattgagcatggcgattcatgg

SEQ ID NO: 105848 - DNA, 25 bp, Probe sequence
ggtatattgagcatggcgattcatg

SEQ ID NO: 105849 - DNA, 25 bp, Probe sequence
tgagcatggcgattcatgggagtgg

SEQ ID NO: 105850 - DNA, 25 bp, Probe sequence
tattgagcatggcgattcatgggag

SEQ ID NO: 105851 - DNA, 25 bp, Probe sequence
ttgagcatggcgattcatgggagtg

SEQ ID NO: 105852 - DNA, 25 bp, Probe sequence
atgcaacttatcaatttagaaagag

SEQ ID NO: 105853 - DNA, 25 bp, Probe sequence
agtaatgcaacttatcaatttagaa

SEQ ID NO: 105854 - DNA, 25 bp, Probe sequence
acgatttgattaagtaatgcaactt

SEQ ID NO: 105855 - DNA, 25 bp, Probe sequence
aaattattgaattatgtttgacatt

SEQ ID NO: 105856 - DNA, 25 bp, Probe sequence
aatgcaacttatcaatttagaaaga

SEQ ID NO: 105857 - DNA, 25 bp, Probe sequence
caacttatcaatttagaaagaggaa

SEQ ID NO: 105858 - DNA, 25 bp, Probe sequence
gcaacttatcaatttagaaagagga

SEQ ID NO: 105859 - DNA, 25 bp, Probe sequence
gaattatgtttgacatttacataaa

SEQ ID NO: 105860 - DNA, 25 bp, Probe sequence
gaaaaataatcattacgatttgatt

SEQ ID NO: 105861 - DNA, 25 bp, Probe sequence
gagaaaaataatcattacgatttga

SEQ ID NO: 105862 - DNA, 25 bp, Probe sequence
gtaatgcaacttatcaatttagaaa

SEQ ID NO: 105863 - DNA, 25 bp, Probe sequence
tgcaacttatcaatttagaaagagg

SEQ ID NO: 105864 - DNA, 25 bp, Probe sequence
taatgcaacttatcaatttagaaag

SEQ ID NO: 105865 - DNA, 25 bp, Probe sequence
tacgatttgattaagtaatgcaact

SEQ ID NO: 105866 - DNA, 25 bp, Probe sequence
ttgaattatgtttgacatttacata

SEQ ID NO: 105867 - DNA, 25 bp, Probe sequence
aggttcatcttctaaaaattacagt

SEQ ID NO: 105868 - DNA, 25 bp, Probe sequence
catggttttcgcttttgcgggttag

SEQ ID NO: 105869 - DNA, 25 bp, Probe sequence
gcgggttagcatgacttacctaata

SEQ ID NO: 105870 - DNA, 25 bp, Probe sequence
gcttttgcgggttagcatgacttac

SEQ ID NO: 105871 - DNA, 25 bp, Probe sequence
gaaaatattaggttcatcttctaaa

SEQ ID NO: 105872 - DNA, 25 bp, Probe sequence
gttcatcttctaaaaattacagttt

SEQ ID NO: 105873 - DNA, 25 bp, Probe sequence
gttttcgcttttgcgggttagcatg

SEQ ID NO: 105874 - DNA, 25 bp, Probe sequence
ttttgcgggttagcatgacttacct

SEQ ID NO: 105875 - DNA, 25 bp, Probe sequence
ggttttcgcttttgcgggttagcat

SEQ ID NO: 105876 - DNA, 25 bp, Probe sequence
tttgcgggttagcatgacttaccta

SEQ ID NO: 105877 - DNA, 25 bp, Probe sequence
tggttttcgcttttgcgggttagca

SEQ ID NO: 105878 - DNA, 25 bp, Probe sequence
tgcgggttagcatgacttacctaat

SEQ ID NO: 105879 - DNA, 25 bp, Probe sequence
tcgcttttgcgggttagcatgactt

SEQ ID NO: 105880 - DNA, 25 bp, Probe sequence
tttcgcttttgcgggttagcatgac

SEQ ID NO: 105881 - DNA, 25 bp, Probe sequence
ttcgcttttgcgggttagcatgact

SEQ ID NO: 105882 - DNA, 25 bp, Probe sequence
atgtttgtttatttgatgaagtgta

SEQ ID NO: 105883 - DNA, 25 bp, Probe sequence
atgtgcattcatttacaacctttat

SEQ ID NO: 105884 - DNA, 25 bp, Probe sequence
acaacctttattgacaatgattctc

SEQ ID NO: 105885 - DNA, 25 bp, Probe sequence
acaatgattctcaactaatatagta

SEQ ID NO: 105886 - DNA, 25 bp, Probe sequence
aaaagacttgaatgtgctgagaata

SEQ ID NO: 105887 - DNA, 25 bp, Probe sequence
cgatttgttttctgcaacttttttg

SEQ ID NO: 105888 - DNA, 25 bp, Probe sequence
gcattcatttacaacctttattgac

SEQ ID NO: 105889 - DNA, 25 bp, Probe sequence
gaggtgaaaacagtaaaagcatcta

SEQ ID NO: 105890 - DNA, 25 bp, Probe sequence
gatgaagtgtattgcttaaagctag

SEQ ID NO: 105891 - DNA, 25 bp, Probe sequence
gttgaagctggtttttttgtttgat

SEQ ID NO: 105892 - DNA, 25 bp, Probe sequence
gttacgatttgttttctgcaacttt

SEQ ID NO: 105893 - DNA, 25 bp, Probe sequence
gtaatagttacgatttgttttctgc

SEQ ID NO: 105894 - DNA, 25 bp, Probe sequence
gtgctgagaatacgatgtttatgga

SEQ ID NO: 105895 - DNA, 25 bp, Probe sequence
tgcttaaagctagttttaacgtatt

SEQ ID NO: 105896 - DNA, 25 bp, Probe sequence
ttgttttctgcaacttttttgaagt

SEQ ID NO: 105897 - DNA, 25 bp, Probe sequence
atattgtcgcaatgacagacatatg

SEQ ID NO: 105898 - DNA, 25 bp, Probe sequence
atgcatattgtcgcaatgacagaca

SEQ ID NO: 105899 - DNA, 25 bp, Probe sequence
atgtatgcatattgtcgcaatgaca

SEQ ID NO: 105900 - DNA, 25 bp, Probe sequence
gcatattgtcgcaatgacagacata

SEQ ID NO: 105901 - DNA, 25 bp, Probe sequence
gcaatgtatgcatattgtcgcaatg

SEQ ID NO: 105902 - DNA, 25 bp, Probe sequence
gaatttggcatgaagtaggcaatgt

SEQ ID NO: 105903 - DNA, 25 bp, Probe sequence
gacagacatatgaaatagggggatt

SEQ ID NO: 105904 - DNA, 25 bp, Probe sequence
gtatgcatattgtcgcaatgacaga

SEQ ID NO: 105905 - DNA, 25 bp, Probe sequence
gtaggcaatgtatgcatattgtcgc

SEQ ID NO: 105906 - DNA, 25 bp, Probe sequence
gtcgcaatgacagacatatgaaata

SEQ ID NO: 105907 - DNA, 25 bp, Probe sequence
ggcaatgtatgcatattgtcgcaat

SEQ ID NO: 105908 - DNA, 25 bp, Probe sequence
taggcaatgtatgcatattgtcgca

SEQ ID NO: 105909 - DNA, 25 bp, Probe sequence
tatccagtggaaaagaatttggcat

SEQ ID NO: 105910 - DNA, 25 bp, Probe sequence
tttaaaatcgatatccagtggaaaa

SEQ ID NO: 105911 - DNA, 25 bp, Probe sequence
ttatttaaaatcgatatccagtgga

SEQ ID NO: 105912 - DNA, 25 bp, Probe sequence
atctattaggtttatgaagcattga

SEQ ID NO: 105913 - DNA, 25 bp, Probe sequence
aggactgtaagtttaagatatgttg

SEQ ID NO: 105914 - DNA, 25 bp, Probe sequence
agatatgttgtataggagtgactga

SEQ ID NO: 105915 - DNA, 25 bp, Probe sequence
agagagtagctaagactgcctggag

SEQ ID NO: 105916 - DNA, 25 bp, Probe sequence
actctcaaaagtaacaattttcaga

SEQ ID NO: 105917 - DNA, 25 bp, Probe sequence
aagactgcctggagacttatctatt

SEQ ID NO: 105918 - DNA, 25 bp, Probe sequence
ctgcctggagacttatctattaggt

SEQ ID NO: 105919 - DNA, 25 bp, Probe sequence
gcctggagacttatctattaggttt

SEQ ID NO: 105920 - DNA, 25 bp, Probe sequence
gctaagactgcctggagacttatct

SEQ ID NO: 105921 - DNA, 25 bp, Probe sequence
gactgcctggagacttatctattag

SEQ ID NO: 105922 - DNA, 25 bp, Probe sequence
gagtagctaagactgcctggagact

SEQ ID NO: 105923 - DNA, 25 bp, Probe sequence
gtagctaagactgcctggagactta

SEQ ID NO: 105924 - DNA, 25 bp, Probe sequence
ggtttatgaagcattgaacagtgga

SEQ ID NO: 105925 - DNA, 25 bp, Probe sequence
ggagacttatctattaggtttatga

SEQ ID NO: 105926 - DNA, 25 bp, Probe sequence
tagaaattgtatagcagagagtagc

SEQ ID NO: 105927 - DNA, 25 bp, Probe sequence
atatcataacaaatcatgccactat

SEQ ID NO: 105928 - DNA, 25 bp, Probe sequence
atcatgccactatacaggtcaaatc

SEQ ID NO: 105929 - DNA, 25 bp, Probe sequence
atgccactatacaggtcaaatcttg

SEQ ID NO: 105930 - DNA, 25 bp, Probe sequence
aggtcaaatcttgtatagtggcatt

SEQ ID NO: 105931 - DNA, 25 bp, Probe sequence
aacaaatcatgccactatacaggtc

SEQ ID NO: 105932 - DNA, 25 bp, Probe sequence
aatgcagagtttcatctcgaacgct

SEQ ID NO: 105933 - DNA, 25 bp, Probe sequence
ctcgaacgctatatcataacaaatc

SEQ ID NO: 105934 - DNA, 25 bp, Probe sequence
gcatttttaatttatccctttgaat

SEQ ID NO: 105935 - DNA, 25 bp, Probe sequence
gcagagtttcatctcgaacgctata

SEQ ID NO: 105936 - DNA, 25 bp, Probe sequence
gagtttcatctcgaacgctatatca

SEQ ID NO: 105937 - DNA, 25 bp, Probe sequence
gtttcatctcgaacgctatatcata

SEQ ID NO: 105938 - DNA, 25 bp, Probe sequence
gtggcatttttaatttatccctttg

SEQ ID NO: 105939 - DNA, 25 bp, Probe sequence
tcatctcgaacgctatatcataaca

SEQ ID NO: 105940 - DNA, 25 bp, Probe sequence
tagtggcatttttaatttatccctt

SEQ ID NO: 105941 - DNA, 25 bp, Probe sequence
ttttaatttatccctttgaatactg

SEQ ID NO: 105942 - DNA, 25 bp, Probe sequence
atcctttcaatctgttttcatattt

SEQ ID NO: 105943 - DNA, 25 bp, Probe sequence
atgtcattgctatcgaaggtgtttc

SEQ ID NO: 105944 - DNA, 25 bp, Probe sequence
atggcgatgacgtgatttattgaca

SEQ ID NO: 105945 - DNA, 25 bp, Probe sequence
acttccccagttttgtacagtacat

SEQ ID NO: 105946 - DNA, 25 bp, Probe sequence
aaattttctcaaatgtgtgtgattt

SEQ ID NO: 105947 - DNA, 25 bp, Probe sequence
aacacaagcgaaccccattaatgta

SEQ ID NO: 105948 - DNA, 25 bp, Probe sequence
aatcacttcatcatcaccaatactt

SEQ ID NO: 105949 - DNA, 25 bp, Probe sequence
aatatcaatcacttcatcatcacca

SEQ ID NO: 105950 - DNA, 25 bp, Probe sequence
gaaggtgtttcgcaattaatatcaa

SEQ ID NO: 105951 - DNA, 25 bp, Probe sequence
gtacattaacacaagcgaaccccat

SEQ ID NO: 105952 - DNA, 25 bp, Probe sequence
gtcttctttatttttgatttaatct

SEQ ID NO: 105953 - DNA, 25 bp, Probe sequence
ggtataatatcctttcaatctgttt

SEQ ID NO: 105954 - DNA, 25 bp, Probe sequence
tcaccaatacttccccagttttgta

SEQ ID NO: 105955 - DNA, 25 bp, Probe sequence
taatcttccaataatctatgtcatt

SEQ ID NO: 105956 - DNA, 25 bp, Probe sequence
taccgaataacaatggcgatgacgt

SEQ ID NO: 105957 - DNA, 25 bp, Probe sequence
attttgttttcaagttaatcatact

SEQ ID NO: 105958 - DNA, 25 bp, Probe sequence
atttcgttgatcttatataaacact

SEQ ID NO: 105959 - DNA, 25 bp, Probe sequence
atttccactgtatttatctgttaac

SEQ ID NO: 105960 - DNA, 25 bp, Probe sequence
atacccgcaatatttcgttgatctt

SEQ ID NO: 105961 - DNA, 25 bp, Probe sequence
ataaacacttttggctgcttttcct

SEQ ID NO: 105962 - DNA, 25 bp, Probe sequence
atctgttaaccactttatacccgca

SEQ ID NO: 105963 - DNA, 25 bp, Probe sequence
accacattttaggagctggtgatag

SEQ ID NO: 105964 - DNA, 25 bp, Probe sequence
accactttatacccgcaatatttcg

SEQ ID NO: 105965 - DNA, 25 bp, Probe sequence
aactgtataaaattccaccacattt

SEQ ID NO: 105966 - DNA, 25 bp, Probe sequence
ctgcttttccttgacctagattaaa

SEQ ID NO: 105967 - DNA, 25 bp, Probe sequence
gaatttttagtacaatttccactgt

SEQ ID NO: 105968 - DNA, 25 bp, Probe sequence
gagtgtgttttgtagtatcataaat

SEQ ID NO: 105969 - DNA, 25 bp, Probe sequence
tgtaaactgtataaaattccaccac

SEQ ID NO: 105970 - DNA, 25 bp, Probe sequence
tgttaaccactttatacccgcaata

SEQ ID NO: 105971 - DNA, 25 bp, Probe sequence
ttctttgtaagagtgtgttttgtag

SEQ ID NO: 105972 - DNA, 25 bp, Probe sequence
attccttgtacaattctcagtaatt

SEQ ID NO: 105973 - DNA, 25 bp, Probe sequence
attctcagtaattggtgattttaac

SEQ ID NO: 105974 - DNA, 25 bp, Probe sequence
attattccttgtacaattctcagta

SEQ ID NO: 105975 - DNA, 25 bp, Probe sequence
atagctatcgattttgttaatgtta

SEQ ID NO: 105976 - DNA, 25 bp, Probe sequence
atgtaatagctatcgattttgttaa

SEQ ID NO: 105977 - DNA, 25 bp, Probe sequence
aggtgtttgaggtgtgggagataga

SEQ ID NO: 105978 - DNA, 25 bp, Probe sequence
aaaggtgtttgaggtgtgggagata

SEQ ID NO: 105979 - DNA, 25 bp, Probe sequence
aacaatcaagttaatgaaggcgacg

SEQ ID NO: 105980 - DNA, 25 bp, Probe sequence
aataggcaattattccttgtacaat

SEQ ID NO: 105981 - DNA, 25 bp, Probe sequence
cgattttgttaatgttagtaaggca

SEQ ID NO: 105982 - DNA, 25 bp, Probe sequence
gacatgagggcataataggcaatta

SEQ ID NO: 105983 - DNA, 25 bp, Probe sequence
gacatttaatgtaatagctatcgat

SEQ ID NO: 105984 - DNA, 25 bp, Probe sequence
gaggtgtgggagatagacatttaat

SEQ ID NO: 105985 - DNA, 25 bp, Probe sequence
gtaaggcaataatgacatgagggca

SEQ ID NO: 105986 - DNA, 25 bp, Probe sequence
ggcaattattccttgtacaattctc

SEQ ID NO: 105987 - DNA, 25 bp, Probe sequence
aaaagaatcaaaggagtcgatcatt

SEQ ID NO: 105988 - DNA, 25 bp, Probe sequence
aattgtatatttcgaatggcttgta

SEQ ID NO: 105989 - DNA, 25 bp, Probe sequence
ctccctctaatcattcaatcgaatg

SEQ ID NO: 105990 - DNA, 25 bp, Probe sequence
gcgagttattatgaccgttatatga

SEQ ID NO: 105991 - DNA, 25 bp, Probe sequence
gaattgtgatacgctttttaaaagt

SEQ ID NO: 105992 - DNA, 25 bp, Probe sequence
gaatgataaatcacagtattaactt

SEQ ID NO: 105993 - DNA, 25 bp, Probe sequence
gaagtgacgatttttcaacattttt

SEQ ID NO: 105994 - DNA, 25 bp, Probe sequence
gaagcgagttattatgaccgttata

SEQ ID NO: 105995 - DNA, 25 bp, Probe sequence
gaccgttatatgaattgtgatacgc

SEQ ID NO: 105996 - DNA, 25 bp, Probe sequence
gtatatttcgaatggcttgtaatgt

SEQ ID NO: 105997 - DNA, 25 bp, Probe sequence
ggcttgtaatgtaatttatctatga

SEQ ID NO: 105998 - DNA, 25 bp, Probe sequence
tcctccctctaatcattcaatcgaa

SEQ ID NO: 105999 - DNA, 25 bp, Probe sequence
taagcaacgattaattgtatatttc

SEQ ID NO: 106000 - DNA, 25 bp, Probe sequence
tatgtatttatgatttaccctgaaa

SEQ ID NO: 106001 - DNA, 25 bp, Probe sequence
ttatctatgaaaatgaagcgagtta

SEQ ID NO: 106002 - DNA, 25 bp, Probe sequence
cctaactccccacaaatctggaacg

SEQ ID NO: 106003 - DNA, 25 bp, Probe sequence
agtcggcggcaattgaagtgtgatt

SEQ ID NO: 106004 - DNA, 25 bp, Probe sequence
aactccccacaaatctggaacgata

SEQ ID NO: 106005 - DNA, 25 bp, Probe sequence
cttgccctcgttggtgagcaattga

SEQ ID NO: 106006 - DNA, 25 bp, Probe sequence
cccctagtcggcggcaattgaagtg

SEQ ID NO: 106007 - DNA, 25 bp, Probe sequence
gcaattgagggcagatccctttaat

SEQ ID NO: 106008 - DNA, 25 bp, Probe sequence
gagggcagatccctttaattaagta

SEQ ID NO: 106009 - DNA, 25 bp, Probe sequence
gtgtgattgatgtaacttgccctcg

SEQ ID NO: 106010 - DNA, 25 bp, Probe sequence
tggtgagcaattgagggcagatccc

SEQ ID NO: 106011 - DNA, 25 bp, Probe sequence
tccccacaaatctggaacgatacta

SEQ ID NO: 106012 - DNA, 25 bp, Probe sequence
tcttattgccaatgattactacccc

SEQ ID NO: 106013 - DNA, 25 bp, Probe sequence
taacttgccctcgttggtgagcaat

SEQ ID NO: 106014 - DNA, 25 bp, Probe sequence
tacccctagtcggcggcaattgaag

SEQ ID NO: 106015 - DNA, 25 bp, Probe sequence
tattgccaatgattactacccctag

SEQ ID NO: 106016 - DNA, 25 bp, Probe sequence
ttgccaatgattactacccctagtc

SEQ ID NO: 106017 - DNA, 25 bp, Probe sequence
atcatattttctgacttattaaact

SEQ ID NO: 106018 - DNA, 25 bp, Probe sequence
atgcgttcattcatgccattattaa

SEQ ID NO: 106019 - DNA, 25 bp, Probe sequence
agtttaatattctagccgattcctg

SEQ ID NO: 106020 - DNA, 25 bp, Probe sequence
acatcacaaacctctttatttattt

SEQ ID NO: 106021 - DNA, 25 bp, Probe sequence
aaaggcgaagaatgaactggatgat

SEQ ID NO: 106022 - DNA, 25 bp, Probe sequence
aactaagacagcatgcgttcattca

SEQ ID NO: 106023 - DNA, 25 bp, Probe sequence
gccattattaatataagcaccgcaa

SEQ ID NO: 106024 - DNA, 25 bp, Probe sequence
gcttctaatgtgatacaggaacctc

SEQ ID NO: 106025 - DNA, 25 bp, Probe sequence
gcaccgcaacaaaaaagcttctaat

SEQ ID NO: 106026 - DNA, 25 bp, Probe sequence
gaacctcatattccgtatcatgtta

SEQ ID NO: 106027 - DNA, 25 bp, Probe sequence
gaacatctacattttatcatatttt

SEQ ID NO: 106028 - DNA, 25 bp, Probe sequence
gatacaggaacctcatattccgtat

SEQ ID NO: 106029 - DNA, 25 bp, Probe sequence
tgaaatacatcacaaacctctttat

SEQ ID NO: 106030 - DNA, 25 bp, Probe sequence
tccgtatcatgttagaagcttttaa

SEQ ID NO: 106031 - DNA, 25 bp, Probe sequence
tctagccgattcctgaaactaagac

SEQ ID NO: 106032 - DNA, 25 bp, Probe sequence
atatatcatctagtcgtcatttaca

SEQ ID NO: 106033 - DNA, 25 bp, Probe sequence
atatcatctagtcgtcatttacaat

SEQ ID NO: 106034 - DNA, 25 bp, Probe sequence
atcatctagtcgtcatttacaattg

SEQ ID NO: 106035 - DNA, 25 bp, Probe sequence
aacgaattttgatgtttcttgaact

SEQ ID NO: 106036 - DNA, 25 bp, Probe sequence
aattggtaaatatgacttcaaactg

SEQ ID NO: 106037 - DNA, 25 bp, Probe sequence
catctagtcgtcatttacaattggt

SEQ ID NO: 106038 - DNA, 25 bp, Probe sequence
gaattttgatgtttcttgaactata

SEQ ID NO: 106039 - DNA, 25 bp, Probe sequence
gaactatatatcatctagtcgtcat

SEQ ID NO: 106040 - DNA, 25 bp, Probe sequence
gattatgttttaacgaattttgatg

SEQ ID NO: 106041 - DNA, 25 bp, Probe sequence
gtttcttgaactatatatcatctag

SEQ ID NO: 106042 - DNA, 25 bp, Probe sequence
gtaaatatgacttcaaactgtatga

SEQ ID NO: 106043 - DNA, 25 bp, Probe sequence
tctagtcgtcatttacaattggtaa

SEQ ID NO: 106044 - DNA, 25 bp, Probe sequence
tcaaactgtatgaaggtgatggcga

SEQ ID NO: 106045 - DNA, 25 bp, Probe sequence
tatatatcatctagtcgtcatttac

SEQ ID NO: 106046 - DNA, 25 bp, Probe sequence
tttgatgtttcttgaactatatatc

SEQ ID NO: 106047 - DNA, 25 bp, Probe sequence
attatatagttcataatctcgacta

SEQ ID NO: 106048 - DNA, 25 bp, Probe sequence
ataatctcgactataagtggctatt

SEQ ID NO: 106049 - DNA, 25 bp, Probe sequence
ataagtatataatccatttaataat

SEQ ID NO: 106050 - DNA, 25 bp, Probe sequence
atctcgactataagtggctattagc

SEQ ID NO: 106051 - DNA, 25 bp, Probe sequence
agttcataatctcgactataagtgg

SEQ ID NO: 106052 - DNA, 25 bp, Probe sequence
aatctcgactataagtggctattag

SEQ ID NO: 106053 - DNA, 25 bp, Probe sequence
cataatctcgactataagtggctat

SEQ ID NO: 106054 - DNA, 25 bp, Probe sequence
ctcgactataagtggctattagcca

SEQ ID NO: 106055 - DNA, 25 bp, Probe sequence
gaaacacaataagtatataatccat

SEQ ID NO: 106056 - DNA, 25 bp, Probe sequence
gttcataatctcgactataagtggc

SEQ ID NO: 106057 - DNA, 25 bp, Probe sequence
tctcgactataagtggctattagcc

SEQ ID NO: 106058 - DNA, 25 bp, Probe sequence
tcgactataagtggctattagccat

SEQ ID NO: 106059 - DNA, 25 bp, Probe sequence
tcataatctcgactataagtggcta

SEQ ID NO: 106060 - DNA, 25 bp, Probe sequence
taatctcgactataagtggctatta

SEQ ID NO: 106061 - DNA, 25 bp, Probe sequence
tataagtggctattagccattattt

SEQ ID NO: 106062 - DNA, 25 bp, Probe sequence
attacaattaaattcatttgttcaa

SEQ ID NO: 106063 - DNA, 25 bp, Probe sequence
agattataacgataactcttaaaat

SEQ ID NO: 106064 - DNA, 25 bp, Probe sequence
agcactaggtaaaagattataacga

SEQ ID NO: 106065 - DNA, 25 bp, Probe sequence
aaatcacagaaactttatcttttga

SEQ ID NO: 106066 - DNA, 25 bp, Probe sequence
aaactgagtcagaattataaatata

SEQ ID NO: 106067 - DNA, 25 bp, Probe sequence
aattccataaagcactaggtaaaag

SEQ ID NO: 106068 - DNA, 25 bp, Probe sequence
aattgttttataattctgataagaa

SEQ ID NO: 106069 - DNA, 25 bp, Probe sequence
cacagaaactttatcttttgattta

SEQ ID NO: 106070 - DNA, 25 bp, Probe sequence
catttgttcaaaacaatttttcgct

SEQ ID NO: 106071 - DNA, 25 bp, Probe sequence
gaaaattccataaagcactaggtaa

SEQ ID NO: 106072 - DNA, 25 bp, Probe sequence
gaaactttatcttttgatttaattg

SEQ ID NO: 106073 - DNA, 25 bp, Probe sequence
gatttaattgttttataattctgat

SEQ ID NO: 106074 - DNA, 25 bp, Probe sequence
tcacagaaactttatcttttgattt

SEQ ID NO: 106075 - DNA, 25 bp, Probe sequence
tataacgataactcttaaaattaat

SEQ ID NO: 106076 - DNA, 25 bp, Probe sequence
ttatcttttgatttaattgttttat

SEQ ID NO: 106077 - DNA, 25 bp, Probe sequence
attaaagattgagtcagtattaaaa

SEQ ID NO: 106078 - DNA, 25 bp, Probe sequence
agattgagtcagtattaaaaatata

SEQ ID NO: 106079 - DNA, 25 bp, Probe sequence
agttgtgtaaattaaagattgagtc

SEQ ID NO: 106080 - DNA, 25 bp, Probe sequence
aagattgagtcagtattaaaaatat

SEQ ID NO: 106081 - DNA, 25 bp, Probe sequence
aattaaagattgagtcagtattaaa

SEQ ID NO: 106082 - DNA, 25 bp, Probe sequence
gaaaatttcataaagtgttcaaaat

SEQ ID NO: 106083 - DNA, 25 bp, Probe sequence
gttgtgtaaattaaagattgagtca

SEQ ID NO: 106084 - DNA, 25 bp, Probe sequence
gtaaattaaagattgagtcagtatt

SEQ ID NO: 106085 - DNA, 25 bp, Probe sequence
gtgtaaattaaagattgagtcagta

SEQ ID NO: 106086 - DNA, 25 bp, Probe sequence
tgtgtaaattaaagattgagtcagt

SEQ ID NO: 106087 - DNA, 25 bp, Probe sequence
tgttcaaaataatttttcgctttag

SEQ ID NO: 106088 - DNA, 25 bp, Probe sequence
tcaaaataatttttcgctttagttg

SEQ ID NO: 106089 - DNA, 25 bp, Probe sequence
taaattaaagattgagtcagtatta

SEQ ID NO: 106090 - DNA, 25 bp, Probe sequence
ttcgctttagttgtgtaaattaaag

SEQ ID NO: 106091 - DNA, 25 bp, Probe sequence
ttgtgtaaattaaagattgagtcag

SEQ ID NO: 106092 - DNA, 25 bp, Probe sequence
atttcctctagtattattaatattg

SEQ ID NO: 106093 - DNA, 25 bp, Probe sequence
aaatttcctctagtattattaatat

SEQ ID NO: 106094 - DNA, 25 bp, Probe sequence
aatccacgaggatttaatcataaaa

SEQ ID NO: 106095 - DNA, 25 bp, Probe sequence
aatcataaaatttcctctagtatta

SEQ ID NO: 106096 - DNA, 25 bp, Probe sequence
aatttcctctagtattattaatatt

SEQ ID NO: 106097 - DNA, 25 bp, Probe sequence
gaatttgaacttaactttgcatcaa

SEQ ID NO: 106098 - DNA, 25 bp, Probe sequence
gaacttaactttgcatcaaaaataa

SEQ ID NO: 106099 - DNA, 25 bp, Probe sequence
ggatttaatcataaaatttcctcta

SEQ ID NO: 106100 - DNA, 25 bp, Probe sequence
ggaatttgaacttaactttgcatca

SEQ ID NO: 106101 - DNA, 25 bp, Probe sequence
tggaatttgaacttaactttgcatc

SEQ ID NO: 106102 - DNA, 25 bp, Probe sequence
taatcataaaatttcctctagtatt

SEQ ID NO: 106103 - DNA, 25 bp, Probe sequence
taaaatttcctctagtattattaat

SEQ ID NO: 106104 - DNA, 25 bp, Probe sequence
tattggaatttgaacttaactttgc

SEQ ID NO: 106105 - DNA, 25 bp, Probe sequence
tttaatcataaaatttcctctagta

SEQ ID NO: 106106 - DNA, 25 bp, Probe sequence
ttgaacttaactttgcatcaaaaat

SEQ ID NO: 106107 - DNA, 25 bp, Probe sequence
attgaagtttcagtgttattatttt

SEQ ID NO: 106108 - DNA, 25 bp, Probe sequence
atgtatttaaacatcaattgtaata

SEQ ID NO: 106109 - DNA, 25 bp, Probe sequence
agacattgaagtttcagtgttatta

SEQ ID NO: 106110 - DNA, 25 bp, Probe sequence
aaagacattgaagtttcagtgttat

SEQ ID NO: 106111 - DNA, 25 bp, Probe sequence
aagacattgaagtttcagtgttatt

SEQ ID NO: 106112 - DNA, 25 bp, Probe sequence
aagtaaagacattgaagtttcagtg

SEQ ID NO: 106113 - DNA, 25 bp, Probe sequence
cattgaagtttcagtgttattattt

SEQ ID NO: 106114 - DNA, 25 bp, Probe sequence
gacattgaagtttcagtgttattat

SEQ ID NO: 106115 - DNA, 25 bp, Probe sequence
gtttcagtgttattattttaaatat

SEQ ID NO: 106116 - DNA, 25 bp, Probe sequence
gtaaagacattgaagtttcagtgtt

SEQ ID NO: 106117 - DNA, 25 bp, Probe sequence
tgaagtttcagtgttattattttaa

SEQ ID NO: 106118 - DNA, 25 bp, Probe sequence
taagtaaagacattgaagtttcagt

SEQ ID NO: 106119 - DNA, 25 bp, Probe sequence
taaagacattgaagtttcagtgtta

SEQ ID NO: 106120 - DNA, 25 bp, Probe sequence
ttaaatataagcgcaatttatctta

SEQ ID NO: 106121 - DNA, 25 bp, Probe sequence
ttgaagtttcagtgttattatttta

SEQ ID NO: 106122 - DNA, 25 bp, Probe sequence
attgatttatatatagttttgtaat

SEQ ID NO: 106123 - DNA, 25 bp, Probe sequence
atatatagttttgtaatttttgata

SEQ ID NO: 106124 - DNA, 25 bp, Probe sequence
atatagttttgtaatttttgataga

SEQ ID NO: 106125 - DNA, 25 bp, Probe sequence
atagttttgtaatttttgatagaat

SEQ ID NO: 106126 - DNA, 25 bp, Probe sequence
atgattttaaattgaagggtgagtc

SEQ ID NO: 106127 - DNA, 25 bp, Probe sequence
gatgattttaaattgaagggtgagt

SEQ ID NO: 106128 - DNA, 25 bp, Probe sequence
gatagaataacaattaagatgattt

SEQ ID NO: 106129 - DNA, 25 bp, Probe sequence
gatttatatatagttttgtaatttt

SEQ ID NO: 106130 - DNA, 25 bp, Probe sequence
gattttaaattgaagggtgagtctt

SEQ ID NO: 106131 - DNA, 25 bp, Probe sequence
tgattttaaattgaagggtgagtct

SEQ ID NO: 106132 - DNA, 25 bp, Probe sequence
tagttttgtaatttttgatagaata

SEQ ID NO: 106133 - DNA, 25 bp, Probe sequence
tatagttttgtaatttttgatagaa

SEQ ID NO: 106134 - DNA, 25 bp, Probe sequence
tatatatagttttgtaatttttgat

SEQ ID NO: 106135 - DNA, 25 bp, Probe sequence
tatatagttttgtaatttttgatag

SEQ ID NO: 106136 - DNA, 25 bp, Probe sequence
ttgatttatatatagttttgtaatt

SEQ ID NO: 106137 - DNA, 25 bp, Probe sequence
attaccgcttaatatgaaaaataca

SEQ ID NO: 106138 - DNA, 25 bp, Probe sequence
atttcacatcctttctaaaatatat

SEQ ID NO: 106139 - DNA, 25 bp, Probe sequence
ataggtcgcggtattaattattata

SEQ ID NO: 106140 - DNA, 25 bp, Probe sequence
aaatgtaatatttcgatgtataaaa

SEQ ID NO: 106141 - DNA, 25 bp, Probe sequence
aacgcgaaaacataaggattctagt

SEQ ID NO: 106142 - DNA, 25 bp, Probe sequence
aaggattctagtttcaaaagggctg

SEQ ID NO: 106143 - DNA, 25 bp, Probe sequence
aattattatattattaccgcttaat

SEQ ID NO: 106144 - DNA, 25 bp, Probe sequence
ctagtttcaaaagggctgataagta

SEQ ID NO: 106145 - DNA, 25 bp, Probe sequence
gattctagtttcaaaagggctgata

SEQ ID NO: 106146 - DNA, 25 bp, Probe sequence
gtaattctaaacctttttcatcgcg

SEQ ID NO: 106147 - DNA, 25 bp, Probe sequence
taattctaaacctttttcatcgcga

SEQ ID NO: 106148 - DNA, 25 bp, Probe sequence
tcacatcctttctaaaatatatttg

SEQ ID NO: 106149 - DNA, 25 bp, Probe sequence
tacaaattagccccttcaaaacgcg

SEQ ID NO: 106150 - DNA, 25 bp, Probe sequence
tagccccttcaaaacgcgaaaacat

SEQ ID NO: 106151 - DNA, 25 bp, Probe sequence
tttcatcgcgaaaacaattaaatag

SEQ ID NO: 106152 - DNA, 25 bp, Probe sequence
atcttatatatgtatgtttctaaaa

SEQ ID NO: 106153 - DNA, 25 bp, Probe sequence
atgcgtatcttatatatgtatgttt

SEQ ID NO: 106154 - DNA, 25 bp, Probe sequence
agaatataatgtactgtcttttagt

SEQ ID NO: 106155 - DNA, 25 bp, Probe sequence
actgtcttttagtaatgaatgcgta

SEQ ID NO: 106156 - DNA, 25 bp, Probe sequence
gcgtatcttatatatgtatgtttct

SEQ ID NO: 106157 - DNA, 25 bp, Probe sequence
gcaccttcctgatagaatataatgt

SEQ ID NO: 106158 - DNA, 25 bp, Probe sequence
gaatgaatggggttatgaaaaagga

SEQ ID NO: 106159 - DNA, 25 bp, Probe sequence
gttgcaccttcctgatagaatataa

SEQ ID NO: 106160 - DNA, 25 bp, Probe sequence
gtatcttatatatgtatgtttctaa

SEQ ID NO: 106161 - DNA, 25 bp, Probe sequence
gtaatgaatgcgtatcttatatatg

SEQ ID NO: 106162 - DNA, 25 bp, Probe sequence
gtcttttagtaatgaatgcgtatct

SEQ ID NO: 106163 - DNA, 25 bp, Probe sequence
tgttgcaccttcctgatagaatata

SEQ ID NO: 106164 - DNA, 25 bp, Probe sequence
taatgtactgtcttttagtaatgaa

SEQ ID NO: 106165 - DNA, 25 bp, Probe sequence
ttagttgaatgaatggggttatgaa

SEQ ID NO: 106166 - DNA, 25 bp, Probe sequence
ttgcaccttcctgatagaatataat

SEQ ID NO: 106167 - DNA, 25 bp, Probe sequence
attaatgcaactttgtattcgtaca

SEQ ID NO: 106168 - DNA, 25 bp, Probe sequence
attacttaatgacagcgcatcaata

SEQ ID NO: 106169 - DNA, 25 bp, Probe sequence
atctaaccaacacactatcgcaaac

SEQ ID NO: 106170 - DNA, 25 bp, Probe sequence
agcgcatcaataaatctaaccaaca

SEQ ID NO: 106171 - DNA, 25 bp, Probe sequence
acaattacttaatgacagcgcatca

SEQ ID NO: 106172 - DNA, 25 bp, Probe sequence
aaatctaaccaacacactatcgcaa

SEQ ID NO: 106173 - DNA, 25 bp, Probe sequence
ctaaccaacacactatcgcaaacat

SEQ ID NO: 106174 - DNA, 25 bp, Probe sequence
gcatcaataaatctaaccaacacac

SEQ ID NO: 106175 - DNA, 25 bp, Probe sequence
gcaactttgtattcgtacaaggttg

SEQ ID NO: 106176 - DNA, 25 bp, Probe sequence
gacagcgcatcaataaatctaacca

SEQ ID NO: 106177 - DNA, 25 bp, Probe sequence
tgtattcgtacaaggttgtattttt

SEQ ID NO: 106178 - DNA, 25 bp, Probe sequence
tgtatttttttcgcaaacaattact

SEQ ID NO: 106179 - DNA, 25 bp, Probe sequence
taaatctaaccaacacactatcgca

SEQ ID NO: 106180 - DNA, 25 bp, Probe sequence
ttttttcgcaaacaattacttaatg

SEQ ID NO: 106181 - DNA, 25 bp, Probe sequence
ttctatattaatgcaactttgtatt

SEQ ID NO: 106182 - DNA, 25 bp, Probe sequence
attagaattaattgcgctttggata

SEQ ID NO: 106183 - DNA, 25 bp, Probe sequence
agtagaatataacctctgagtagtc

SEQ ID NO: 106184 - DNA, 25 bp, Probe sequence
agttgatttgcattcactatattta

SEQ ID NO: 106185 - DNA, 25 bp, Probe sequence
aacctctgagtagtcattttggggg

SEQ ID NO: 106186 - DNA, 25 bp, Probe sequence
aaggctggtggatgcattcaattat

SEQ ID NO: 106187 - DNA, 25 bp, Probe sequence
gcattcactatatttagtttgttaa

SEQ ID NO: 106188 - DNA, 25 bp, Probe sequence
gaaggtctaaaaaaggctggtggat

SEQ ID NO: 106189 - DNA, 25 bp, Probe sequence
gagtagtcattttggggggtatgta

SEQ ID NO: 106190 - DNA, 25 bp, Probe sequence
gatgagaatgatatacaccccaaaa

SEQ ID NO: 106191 - DNA, 25 bp, Probe sequence
gatatttaactgacttaattttatt

SEQ ID NO: 106192 - DNA, 25 bp, Probe sequence
gtgtttcaagtagtatgtatatttc

SEQ ID NO: 106193 - DNA, 25 bp, Probe sequence
ggggggtatgtatggtgtttcaagt

SEQ ID NO: 106194 - DNA, 25 bp, Probe sequence
ggtggatgcattcaattatttttat

SEQ ID NO: 106195 - DNA, 25 bp, Probe sequence
tggattgaaagacctaactttaagg

SEQ ID NO: 106196 - DNA, 25 bp, Probe sequence
tatacaccccaaaagttggattgaa

SEQ ID NO: 106197 - DNA, 25 bp, Probe sequence
atcttggtgcagttaaatgtatttt

SEQ ID NO: 106198 - DNA, 25 bp, Probe sequence
acatgtaaattcactgtaagtaaag

SEQ ID NO: 106199 - DNA, 25 bp, Probe sequence
aatgctattgagttgatgggttttt

SEQ ID NO: 106200 - DNA, 25 bp, Probe sequence
gctattgagttgatgggtttttcca

SEQ ID NO: 106201 - DNA, 25 bp, Probe sequence
gcaactcctattgtatttgtaaaat

SEQ ID NO: 106202 - DNA, 25 bp, Probe sequence
gagattttaatatcttggtgcagtt

SEQ ID NO: 106203 - DNA, 25 bp, Probe sequence
gagttgatgggtttttccaacagat

SEQ ID NO: 106204 - DNA, 25 bp, Probe sequence
gatgggtttttccaacagataagaa

SEQ ID NO: 106205 - DNA, 25 bp, Probe sequence
gataagtgttatattccattgtgca

SEQ ID NO: 106206 - DNA, 25 bp, Probe sequence
gttgtagattgttttaagtgtgtca

SEQ ID NO: 106207 - DNA, 25 bp, Probe sequence
gttatattccattgtgcaactccta

SEQ ID NO: 106208 - DNA, 25 bp, Probe sequence
gtatgtttcgagattttaatatctt

SEQ ID NO: 106209 - DNA, 25 bp, Probe sequence
tccattgtgcaactcctattgtatt

SEQ ID NO: 106210 - DNA, 25 bp, Probe sequence
tattccattgtgcaactcctattgt

SEQ ID NO: 106211 - DNA, 25 bp, Probe sequence
ttgtgcaactcctattgtatttgta

SEQ ID NO: 106212 - DNA, 25 bp, Probe sequence
attctcctactattttctgatgtcc

SEQ ID NO: 106213 - DNA, 25 bp, Probe sequence
atagtgttatgattcatttgtgttt

SEQ ID NO: 106214 - DNA, 25 bp, Probe sequence
atagctagcaccacaaactaaatat

SEQ ID NO: 106215 - DNA, 25 bp, Probe sequence
actattttctgatgtcccaatactt

SEQ ID NO: 106216 - DNA, 25 bp, Probe sequence
aagcaatctcttttgaagacatgtt

SEQ ID NO: 106217 - DNA, 25 bp, Probe sequence
caaatattatttgacgtgacaatta

SEQ ID NO: 106218 - DNA, 25 bp, Probe sequence
cttacattctcctactattttctga

SEQ ID NO: 106219 - DNA, 25 bp, Probe sequence
ctcctactattttctgatgtcccaa

SEQ ID NO: 106220 - DNA, 25 bp, Probe sequence
gaagacatgttaacctaaatatttt

SEQ ID NO: 106221 - DNA, 25 bp, Probe sequence
gacaaattcatttattatccaaaaa

SEQ ID NO: 106222 - DNA, 25 bp, Probe sequence
gatgtcccaatactttatattattt

SEQ ID NO: 106223 - DNA, 25 bp, Probe sequence
gattcatttgtgtttatagctagca

SEQ ID NO: 106224 - DNA, 25 bp, Probe sequence
gtgtttatagctagcaccacaaact

SEQ ID NO: 106225 - DNA, 25 bp, Probe sequence
ttttctgatgtcccaatactttata

SEQ ID NO: 106226 - DNA, 25 bp, Probe sequence
ttggagttattactagttaaagaca

SEQ ID NO: 106227 - DNA, 25 bp, Probe sequence
attggaacacgaaatggtgaactaa

SEQ ID NO: 106228 - DNA, 25 bp, Probe sequence
atgcttaatttatgtgttgtgatat

SEQ ID NO: 106229 - DNA, 25 bp, Probe sequence
atgtgttgtgatatatagtagggta

SEQ ID NO: 106230 - DNA, 25 bp, Probe sequence
aaagcatgatactcaataaaattgg

SEQ ID NO: 106231 - DNA, 25 bp, Probe sequence
gcttatttattttatcaagaggtaa

SEQ ID NO: 106232 - DNA, 25 bp, Probe sequence
gaatgagtgtcatgcttaatttatg

SEQ ID NO: 106233 - DNA, 25 bp, Probe sequence
gagaagtattatgattgcttattta

SEQ ID NO: 106234 - DNA, 25 bp, Probe sequence
gagtgtcatgcttaatttatgtgtt

SEQ ID NO: 106235 - DNA, 25 bp, Probe sequence
gattgcttatttattttatcaagag

SEQ ID NO: 106236 - DNA, 25 bp, Probe sequence
gttgtgatatatagtagggtattga

SEQ ID NO: 106237 - DNA, 25 bp, Probe sequence
gtattatgattgcttatttatttta

SEQ ID NO: 106238 - DNA, 25 bp, Probe sequence
gtcatgcttaatttatgtgttgtga

SEQ ID NO: 106239 - DNA, 25 bp, Probe sequence
gtgtcatgcttaatttatgtgttgt

SEQ ID NO: 106240 - DNA, 25 bp, Probe sequence
ggtgaactaaattgaatgagtgtca

SEQ ID NO: 106241 - DNA, 25 bp, Probe sequence
tatcaagaggtaaatctgtttaaat

SEQ ID NO: 106242 - DNA, 25 bp, Probe sequence
attacatactcaatgacactatgaa

SEQ ID NO: 106243 - DNA, 25 bp, Probe sequence
attagtgttaaaatgacgttgatac

SEQ ID NO: 106244 - DNA, 25 bp, Probe sequence
atactcaatgacactatgaaggcgt

SEQ ID NO: 106245 - DNA, 25 bp, Probe sequence
ataattacatactcaatgacactat

SEQ ID NO: 106246 - DNA, 25 bp, Probe sequence
atgacactatgaaggcgttctaatt

SEQ ID NO: 106247 - DNA, 25 bp, Probe sequence
aggcgttctaattagtgttaaaatg

SEQ ID NO: 106248 - DNA, 25 bp, Probe sequence
actcaatgacactatgaaggcgttc

SEQ ID NO: 106249 - DNA, 25 bp, Probe sequence
acttaggaaaaggagcacattaact

SEQ ID NO: 106250 - DNA, 25 bp, Probe sequence
aatgacactatgaaggcgttctaat

SEQ ID NO: 106251 - DNA, 25 bp, Probe sequence
ctatgaaggcgttctaattagtgtt

SEQ ID NO: 106252 - DNA, 25 bp, Probe sequence
gacactatgaaggcgttctaattag

SEQ ID NO: 106253 - DNA, 25 bp, Probe sequence
gacgttgatacatagatttaatact

SEQ ID NO: 106254 - DNA, 25 bp, Probe sequence
gatacatagatttaatacttaggaa

SEQ ID NO: 106255 - DNA, 25 bp, Probe sequence
tgaaggcgttctaattagtgttaaa

SEQ ID NO: 106256 - DNA, 25 bp, Probe sequence
tcaatgacactatgaaggcgttcta

SEQ ID NO: 106257 - DNA, 25 bp, Probe sequence
attatacataaagttaacaacaatc

SEQ ID NO: 106258 - DNA, 25 bp, Probe sequence
atacataaagttaacaacaatctta

SEQ ID NO: 106259 - DNA, 25 bp, Probe sequence
ataaaaaactcattatacataaagt

SEQ ID NO: 106260 - DNA, 25 bp, Probe sequence
actcattatacataaagttaacaac

SEQ ID NO: 106261 - DNA, 25 bp, Probe sequence
aaactcattatacataaagttaaca

SEQ ID NO: 106262 - DNA, 25 bp, Probe sequence
aactcattatacataaagttaacaa

SEQ ID NO: 106263 - DNA, 25 bp, Probe sequence
cattatacataaagttaacaacaat

SEQ ID NO: 106264 - DNA, 25 bp, Probe sequence
ctcattatacataaagttaacaaca

SEQ ID NO: 106265 - DNA, 25 bp, Probe sequence
tcattatacataaagttaacaacaa

SEQ ID NO: 106266 - DNA, 25 bp, Probe sequence
taaaaaactcattatacataaagtt

SEQ ID NO: 106267 - DNA, 25 bp, Probe sequence
tacataaagttaacaacaatcttaa

SEQ ID NO: 106268 - DNA, 25 bp, Probe sequence
tatacataaagttaacaacaatctt

SEQ ID NO: 106269 - DNA, 25 bp, Probe sequence
ttatacataaagttaacaacaatct

SEQ ID NO: 106270 - DNA, 25 bp, Probe sequence
atgatgcattgtacaggcgattatt

SEQ ID NO: 106271 - DNA, 25 bp, Probe sequence
aaattagagtgttttctgattgctg

SEQ ID NO: 106272 - DNA, 25 bp, Probe sequence
aatgtcgtcttgaaatacggctgtt

SEQ ID NO: 106273 - DNA, 25 bp, Probe sequence
cagtgacttgttaatgatgcattgt

SEQ ID NO: 106274 - DNA, 25 bp, Probe sequence
cgctttatgtctgatgattgattac

SEQ ID NO: 106275 - DNA, 25 bp, Probe sequence
gctgaagcgctttatgtctgatgat

SEQ ID NO: 106276 - DNA, 25 bp, Probe sequence
gaagcgctttatgtctgatgattga

SEQ ID NO: 106277 - DNA, 25 bp, Probe sequence
gaaaggcatttcagtgacttgttaa

SEQ ID NO: 106278 - DNA, 25 bp, Probe sequence
gaaatacggctgtttctgtataaat

SEQ ID NO: 106279 - DNA, 25 bp, Probe sequence
gacgttattaatacaatgaaaggca

SEQ ID NO: 106280 - DNA, 25 bp, Probe sequence
gattgctgaagcgctttatgtctga

SEQ ID NO: 106281 - DNA, 25 bp, Probe sequence
gtcgtcttgaaatacggctgtttct

SEQ ID NO: 106282 - DNA, 25 bp, Probe sequence
gtgttttctgattgctgaagcgctt

SEQ ID NO: 106283 - DNA, 25 bp, Probe sequence
ggctgtttctgtataaataatcatt

SEQ ID NO: 106284 - DNA, 25 bp, Probe sequence
tagttaaacttaaaatgtcgtcttg

SEQ ID NO: 106285 - DNA, 25 bp, Probe sequence
attatctggaatacgtgcgcgacga

SEQ ID NO: 106286 - DNA, 25 bp, Probe sequence
atacgtgcgcgacgacggtgttaca

SEQ ID NO: 106287 - DNA, 25 bp, Probe sequence
atacgtcactcaagcatcttagata

SEQ ID NO: 106288 - DNA, 25 bp, Probe sequence
catgactactatatattatctggaa

SEQ ID NO: 106289 - DNA, 25 bp, Probe sequence
cgtgcgcgacgacggtgttacattc

SEQ ID NO: 106290 - DNA, 25 bp, Probe sequence
cgtcactcaagcatcttagataaag

SEQ ID NO: 106291 - DNA, 25 bp, Probe sequence
gcgacgacggtgttacattctattg

SEQ ID NO: 106292 - DNA, 25 bp, Probe sequence
gaatacgtgcgcgacgacggtgtta

SEQ ID NO: 106293 - DNA, 25 bp, Probe sequence
gacggtgttacattctattgaaaag

SEQ ID NO: 106294 - DNA, 25 bp, Probe sequence
gacgacggtgttacattctattgaa

SEQ ID NO: 106295 - DNA, 25 bp, Probe sequence
gataaagttgttgtgccatgactac

SEQ ID NO: 106296 - DNA, 25 bp, Probe sequence
gttgttgtgccatgactactatata

SEQ ID NO: 106297 - DNA, 25 bp, Probe sequence
gtgccatgactactatatattatct

SEQ ID NO: 106298 - DNA, 25 bp, Probe sequence
tctggaatacgtgcgcgacgacggt

SEQ ID NO: 106299 - DNA, 25 bp, Probe sequence
tgcgcgacgacggtgttacattcta

SEQ ID NO: 106300 - DNA, 25 bp, Probe sequence
aggagtgttgcttaatttgagtgat

SEQ ID NO: 106301 - DNA, 25 bp, Probe sequence
acgtttagtaggagtgttgcttaat

SEQ ID NO: 106302 - DNA, 25 bp, Probe sequence
aaatcaacatggtacgaaatcataa

SEQ ID NO: 106303 - DNA, 25 bp, Probe sequence
aactatggtgattgtaggaggtgga

SEQ ID NO: 106304 - DNA, 25 bp, Probe sequence
aatcataaaaataagacgccaagta

SEQ ID NO: 106305 - DNA, 25 bp, Probe sequence
aatatggaaattgtacttgctcgtg

SEQ ID NO: 106306 - DNA, 25 bp, Probe sequence
gctcgtgacgtcgggtcatcaacta

SEQ ID NO: 106307 - DNA, 25 bp, Probe sequence
gaaattgtacttgctcgtgacgtcg

SEQ ID NO: 106308 - DNA, 25 bp, Probe sequence
gacgtcgggtcatcaactatggtga

SEQ ID NO: 106309 - DNA, 25 bp, Probe sequence
gacgccaagtataataaatttctta

SEQ ID NO: 106310 - DNA, 25 bp, Probe sequence
gattttgtaaatcaacatggtacga

SEQ ID NO: 106311 - DNA, 25 bp, Probe sequence
gttgcttaatttgagtgattttgta

SEQ ID NO: 106312 - DNA, 25 bp, Probe sequence
gtcgggtcatcaactatggtgattg

SEQ ID NO: 106313 - DNA, 25 bp, Probe sequence
gggtcatcaactatggtgattgtag

SEQ ID NO: 106314 - DNA, 25 bp, Probe sequence
ttgctcgtgacgtcgggtcatcaac

SEQ ID NO: 106315 - DNA, 25 bp, Probe sequence
aagttcgatagtgtattagtattat

SEQ ID NO: 106316 - DNA, 25 bp, Probe sequence
aaggttttgatacataattcggatt

SEQ ID NO: 106317 - DNA, 25 bp, Probe sequence
aattcggattgtttgagtttctttg

SEQ ID NO: 106318 - DNA, 25 bp, Probe sequence
catctctatcaattaagcacttgta

SEQ ID NO: 106319 - DNA, 25 bp, Probe sequence
gagtttctttgtgctgtttcagtat

SEQ ID NO: 106320 - DNA, 25 bp, Probe sequence
gatgattatatatcggaggttagta

SEQ ID NO: 106321 - DNA, 25 bp, Probe sequence
gtttcagtatcagcccaaagttcga

SEQ ID NO: 106322 - DNA, 25 bp, Probe sequence
gtacctatataacggtaacaggtgt

SEQ ID NO: 106323 - DNA, 25 bp, Probe sequence
ggattgtttgagtttctttgtgctg

SEQ ID NO: 106324 - DNA, 25 bp, Probe sequence
tgtttgagtttctttgtgctgtttc

SEQ ID NO: 106325 - DNA, 25 bp, Probe sequence
tcagcccaaagttcgatagtgtatt

SEQ ID NO: 106326 - DNA, 25 bp, Probe sequence
taaatcattttaaaattacttcctg

SEQ ID NO: 106327 - DNA, 25 bp, Probe sequence
tacttcctgtaattgaaggttttga

SEQ ID NO: 106328 - DNA, 25 bp, Probe sequence
ttaagcacttgtacctatataacgg

SEQ ID NO: 106329 - DNA, 25 bp, Probe sequence
ttgtgctgtttcagtatcagcccaa

SEQ ID NO: 106330 - DNA, 25 bp, Probe sequence
atttatcaggtcagactaacgtttg

SEQ ID NO: 106331 - DNA, 25 bp, Probe sequence
atatttatcaggtcagactaacgtt

SEQ ID NO: 106332 - DNA, 25 bp, Probe sequence
atcaggtcagactaacgtttgtctg

SEQ ID NO: 106333 - DNA, 25 bp, Probe sequence
agactaacgtttgtctgaagttatt

SEQ ID NO: 106334 - DNA, 25 bp, Probe sequence
acgtttgtctgaagttattatgacg

SEQ ID NO: 106335 - DNA, 25 bp, Probe sequence
aaatatttatcaggtcagactaacg

SEQ ID NO: 106336 - DNA, 25 bp, Probe sequence
caggtcagactaacgtttgtctgaa

SEQ ID NO: 106337 - DNA, 25 bp, Probe sequence
ctaacgtttgtctgaagttattatg

SEQ ID NO: 106338 - DNA, 25 bp, Probe sequence
ctgaagttattatgacgggagtcta

SEQ ID NO: 106339 - DNA, 25 bp, Probe sequence
gaagttattatgacgggagtctaaa

SEQ ID NO: 106340 - DNA, 25 bp, Probe sequence
gactaacgtttgtctgaagttatta

SEQ ID NO: 106341 - DNA, 25 bp, Probe sequence
gtttgtctgaagttattatgacggg

SEQ ID NO: 106342 - DNA, 25 bp, Probe sequence
ggtcagactaacgtttgtctgaagt

SEQ ID NO: 106343 - DNA, 25 bp, Probe sequence
tatcaggtcagactaacgtttgtct

SEQ ID NO: 106344 - DNA, 25 bp, Probe sequence
ttatcaggtcagactaacgtttgtc

SEQ ID NO: 106345 - DNA, 25 bp, Probe sequence
agcagtaagctttcacattgttggg

SEQ ID NO: 106346 - DNA, 25 bp, Probe sequence
acattgttggggcttattgcttttt

SEQ ID NO: 106347 - DNA, 25 bp, Probe sequence
aacattagtcaggtaacgcttgtaa

SEQ ID NO: 106348 - DNA, 25 bp, Probe sequence
ctttcacattgttggggcttattgc

SEQ ID NO: 106349 - DNA, 25 bp, Probe sequence
gaccaaaggttcaacgatgttaaat

SEQ ID NO: 106350 - DNA, 25 bp, Probe sequence
gatatggtttaagatgaacgggaag

SEQ ID NO: 106351 - DNA, 25 bp, Probe sequence
gtacatataaattttaactagccca

SEQ ID NO: 106352 - DNA, 25 bp, Probe sequence
gtaagctttcacattgttggggctt

SEQ ID NO: 106353 - DNA, 25 bp, Probe sequence
gggcgaccaaaggttcaacgatgtt

SEQ ID NO: 106354 - DNA, 25 bp, Probe sequence
ggtgggcgaccaaaggttcaacgat

SEQ ID NO: 106355 - DNA, 25 bp, Probe sequence
ggtaacgcttgtaaaagtacatata

SEQ ID NO: 106356 - DNA, 25 bp, Probe sequence
tgttggggcttattgcttttttacg

SEQ ID NO: 106357 - DNA, 25 bp, Probe sequence
taactagcccaaaggtgggcgacca

SEQ ID NO: 106358 - DNA, 25 bp, Probe sequence
tagtcaggtaacgcttgtaaaagta

SEQ ID NO: 106359 - DNA, 25 bp, Probe sequence
ttcacattgttggggcttattgctt

SEQ ID NO: 106360 - DNA, 25 bp, Probe sequence
acaggcgctgcacaatgaatgagca

SEQ ID NO: 106361 - DNA, 25 bp, Probe sequence
aaacgctttccatgtctgataatat

SEQ ID NO: 106362 - DNA, 25 bp, Probe sequence
aaacactaggattgcagtattttta

SEQ ID NO: 106363 - DNA, 25 bp, Probe sequence
aaaattgcttgctataagtacgaaa

SEQ ID NO: 106364 - DNA, 25 bp, Probe sequence
aagtaggggtggacatgccagatgt

SEQ ID NO: 106365 - DNA, 25 bp, Probe sequence
gccagatgtccgaaaattttaacgt

SEQ ID NO: 106366 - DNA, 25 bp, Probe sequence
gaatgatgtcgtatgcgatgttgaa

SEQ ID NO: 106367 - DNA, 25 bp, Probe sequence
gaaagcctgcaatatacgttttaaa

SEQ ID NO: 106368 - DNA, 25 bp, Probe sequence
gagcaatgtagttttatgcaattta

SEQ ID NO: 106369 - DNA, 25 bp, Probe sequence
gatgttgaaacaagcatttgtctta

SEQ ID NO: 106370 - DNA, 25 bp, Probe sequence
gatcatctaaataacaggcgctgca

SEQ ID NO: 106371 - DNA, 25 bp, Probe sequence
gataggctactatgtaactaaaagt

SEQ ID NO: 106372 - DNA, 25 bp, Probe sequence
gattctattgtaaacgctttccatg

SEQ ID NO: 106373 - DNA, 25 bp, Probe sequence
gtcgaatatgtaagaaagcctgcaa

SEQ ID NO: 106374 - DNA, 25 bp, Probe sequence
taagctcctttaattttcagcaatt

SEQ ID NO: 106375 - DNA, 25 bp, Probe sequence
atgattttactgctttttgtgtata

SEQ ID NO: 106376 - DNA, 25 bp, Probe sequence
atggtattgctacatttattaaaat

SEQ ID NO: 106377 - DNA, 25 bp, Probe sequence
aaacaatttgtgtggaggacagggt

SEQ ID NO: 106378 - DNA, 25 bp, Probe sequence
aaggattttaggtgactttcagcta

SEQ ID NO: 106379 - DNA, 25 bp, Probe sequence
aatgcgcaatttgttatgagtaact

SEQ ID NO: 106380 - DNA, 25 bp, Probe sequence
aattcatgcctttatactaacaaca

SEQ ID NO: 106381 - DNA, 25 bp, Probe sequence
ctgagggaactgaactttgatggga

SEQ ID NO: 106382 - DNA, 25 bp, Probe sequence
gaacacgagtatttttgtagcgtgc

SEQ ID NO: 106383 - DNA, 25 bp, Probe sequence
gaaacttcattatatctcttaacgt

SEQ ID NO: 106384 - DNA, 25 bp, Probe sequence
gaggacagggtaaattctgtttatt

SEQ ID NO: 106385 - DNA, 25 bp, Probe sequence
gtttgcggaatgtatacatactgag

SEQ ID NO: 106386 - DNA, 25 bp, Probe sequence
gtaggcacattaaagtgtcgaaaac

SEQ ID NO: 106387 - DNA, 25 bp, Probe sequence
gtaacttttttggatagtaggcaca

SEQ ID NO: 106388 - DNA, 25 bp, Probe sequence
ggatttgtgagataagtttgcggaa

SEQ ID NO: 106389 - DNA, 25 bp, Probe sequence
ttgtagcgtgcaaatggtattgcta

SEQ ID NO: 106390 - DNA, 25 bp, Probe sequence
aaatccccgcaccattatttgggtg

SEQ ID NO: 106391 - DNA, 25 bp, Probe sequence
atttattcatctaatactttaagtt

SEQ ID NO: 106392 - DNA, 25 bp, Probe sequence
atttgttatattcactagtttccta

SEQ ID NO: 106393 - DNA, 25 bp, Probe sequence
atatgtgtgtatttattcatctaat

SEQ ID NO: 106394 - DNA, 25 bp, Probe sequence
atccccgcaccattatttgggtgaa

SEQ ID NO: 106395 - DNA, 25 bp, Probe sequence
aatgtggaattgccaaaatttggat

SEQ ID NO: 106396 - DNA, 25 bp, Probe sequence
cccgcaccattatttgggtgaaggg

SEQ ID NO: 106397 - DNA, 25 bp, Probe sequence
ccattatttgggtgaagggatttga

SEQ ID NO: 106398 - DNA, 25 bp, Probe sequence
gaattacgatggaatatgtgtgtat

SEQ ID NO: 106399 - DNA, 25 bp, Probe sequence
gaaaatgattttgaattacgatgga

SEQ ID NO: 106400 - DNA, 25 bp, Probe sequence
gaggaggaatttgttatattcacta

SEQ ID NO: 106401 - DNA, 25 bp, Probe sequence
gataaaaaaatccccgcaccattat

SEQ ID NO: 106402 - DNA, 25 bp, Probe sequence
gatatgtaaaatgtggaattgccaa

SEQ ID NO: 106403 - DNA, 25 bp, Probe sequence
tatattcactagtttcctaaaaaat

SEQ ID NO: 106404 - DNA, 25 bp, Probe sequence
ttgttatattcactagtttcctaaa

SEQ ID NO: 106405 - DNA, 25 bp, Probe sequence
agtttataaaataaatgcgcttaca

SEQ ID NO: 106406 - DNA, 25 bp, Probe sequence
acgtgtcactcctgtagtatatttc

SEQ ID NO: 106407 - DNA, 25 bp, Probe sequence
actcctgtagtatatttcaaacgtt

SEQ ID NO: 106408 - DNA, 25 bp, Probe sequence
cactcctgtagtatatttcaaacgt

SEQ ID NO: 106409 - DNA, 25 bp, Probe sequence
ctcctgtagtatatttcaaacgtta

SEQ ID NO: 106410 - DNA, 25 bp, Probe sequence
ctgtagtatatttcaaacgttagtt

SEQ ID NO: 106411 - DNA, 25 bp, Probe sequence
cgtgtcactcctgtagtatatttca

SEQ ID NO: 106412 - DNA, 25 bp, Probe sequence
cctgtagtatatttcaaacgttagt

SEQ ID NO: 106413 - DNA, 25 bp, Probe sequence
gtcactcctgtagtatatttcaaac

SEQ ID NO: 106414 - DNA, 25 bp, Probe sequence
gtgtcactcctgtagtatatttcaa

SEQ ID NO: 106415 - DNA, 25 bp, Probe sequence
tgtcactcctgtagtatatttcaaa

SEQ ID NO: 106416 - DNA, 25 bp, Probe sequence
tgtagtatatttcaaacgttagttt

SEQ ID NO: 106417 - DNA, 25 bp, Probe sequence
tcctgtagtatatttcaaacgttag

SEQ ID NO: 106418 - DNA, 25 bp, Probe sequence
tcactcctgtagtatatttcaaacg

SEQ ID NO: 106419 - DNA, 25 bp, Probe sequence
tacgtgtcactcctgtagtatattt

SEQ ID NO: 106420 - DNA, 25 bp, Probe sequence
attagcatagatacaccaatcccct

SEQ ID NO: 106421 - DNA, 25 bp, Probe sequence
atcatcgcgtttgcgtagccaatgc

SEQ ID NO: 106422 - DNA, 25 bp, Probe sequence
agaagcgagggcgtcggtcatttca

SEQ ID NO: 106423 - DNA, 25 bp, Probe sequence
actactcgcaatagtgaggggattt

SEQ ID NO: 106424 - DNA, 25 bp, Probe sequence
ctaggtcgcctatttatcatcgcgt

SEQ ID NO: 106425 - DNA, 25 bp, Probe sequence
cgcgtttgcgtagccaatgcgtaaa

SEQ ID NO: 106426 - DNA, 25 bp, Probe sequence
gcgtagccaatgcgtaaaccgcatc

SEQ ID NO: 106427 - DNA, 25 bp, Probe sequence
gcatttttttgctgtaaagttgtta

SEQ ID NO: 106428 - DNA, 25 bp, Probe sequence
gaagtagaagcgagggcgtcggtca

SEQ ID NO: 106429 - DNA, 25 bp, Probe sequence
gttgattttgcatttttttgctgta

SEQ ID NO: 106430 - DNA, 25 bp, Probe sequence
ggtgtagctaggtcgcctatttatc

SEQ ID NO: 106431 - DNA, 25 bp, Probe sequence
tttttcggtgtagctaggtcgccta

SEQ ID NO: 106432 - DNA, 25 bp, Probe sequence
gggcgtcggtcatttcattaattta

SEQ ID NO: 106433 - DNA, 25 bp, Probe sequence
tgaggggatttttttcggtgtagct

SEQ ID NO: 106434 - DNA, 25 bp, Probe sequence
taaaccgcatcaatacaacagtata

SEQ ID NO: 106435 - DNA, 25 bp, Probe sequence
atctgcccgcttttttgattttgaa

SEQ ID NO: 106436 - DNA, 25 bp, Probe sequence
cagttctattaagaagcggacagat

SEQ ID NO: 106437 - DNA, 25 bp, Probe sequence
ctattaagaagcggacagatggaaa

SEQ ID NO: 106438 - DNA, 25 bp, Probe sequence
ctgcccgcttttttgattttgaagt

SEQ ID NO: 106439 - DNA, 25 bp, Probe sequence
cccgcttttttgattttgaagtgct

SEQ ID NO: 106440 - DNA, 25 bp, Probe sequence
ccgcttttttgattttgaagtgctg

SEQ ID NO: 106441 - DNA, 25 bp, Probe sequence
gcccgcttttttgattttgaagtgc

SEQ ID NO: 106442 - DNA, 25 bp, Probe sequence
gcttttttgattttgaagtgctgta

SEQ ID NO: 106443 - DNA, 25 bp, Probe sequence
gaagtgctgtaataaattttacaat

SEQ ID NO: 106444 - DNA, 25 bp, Probe sequence
gaagcggacagatggaaaagatttt

SEQ ID NO: 106445 - DNA, 25 bp, Probe sequence
ggacagatggaaaagatttttactt

SEQ ID NO: 106446 - DNA, 25 bp, Probe sequence
tgcccgcttttttgattttgaagtg

SEQ ID NO: 106447 - DNA, 25 bp, Probe sequence
tctgcccgcttttttgattttgaag

SEQ ID NO: 106448 - DNA, 25 bp, Probe sequence
tttgattttgaagtgctgtaataaa

SEQ ID NO: 106449 - DNA, 25 bp, Probe sequence
ttttttgattttgaagtgctgtaat

SEQ ID NO: 106450 - DNA, 25 bp, Probe sequence
atttacattaaaatatctcgatttc

SEQ ID NO: 106451 - DNA, 25 bp, Probe sequence
atttcgagataaatacactaaaaat

SEQ ID NO: 106452 - DNA, 25 bp, Probe sequence
acattaaaatatctcgatttcgaga

SEQ ID NO: 106453 - DNA, 25 bp, Probe sequence
aaatttacattaaaatatctcgatt

SEQ ID NO: 106454 - DNA, 25 bp, Probe sequence
aaaatttacattaaaatatctcgat

SEQ ID NO: 106455 - DNA, 25 bp, Probe sequence
aatttacattaaaatatctcgattt

SEQ ID NO: 106456 - DNA, 25 bp, Probe sequence
cattaaaatatctcgatttcgagat

SEQ ID NO: 106457 - DNA, 25 bp, Probe sequence
gcgtgcactaaaaatttacattaaa

SEQ ID NO: 106458 - DNA, 25 bp, Probe sequence
gatttcgagataaatacactaaaaa

SEQ ID NO: 106459 - DNA, 25 bp, Probe sequence
gtgcactaaaaatttacattaaaat

SEQ ID NO: 106460 - DNA, 25 bp, Probe sequence
ggcgtgcactaaaaatttacattaa

SEQ ID NO: 106461 - DNA, 25 bp, Probe sequence
tacattaaaatatctcgatttcgag

SEQ ID NO: 106462 - DNA, 25 bp, Probe sequence
tttcgagataaatacactaaaaata

SEQ ID NO: 106463 - DNA, 25 bp, Probe sequence
tttacattaaaatatctcgatttcg

SEQ ID NO: 106464 - DNA, 25 bp, Probe sequence
ttacattaaaatatctcgatttcga

SEQ ID NO: 106465 - DNA, 25 bp, Probe sequence
atgtagtcgtttttattaagcgcaa

SEQ ID NO: 106466 - DNA, 25 bp, Probe sequence
acatatcaactcctatcatgtttga

SEQ ID NO: 106467 - DNA, 25 bp, Probe sequence
acacgtatcttgacattaaatccat

SEQ ID NO: 106468 - DNA, 25 bp, Probe sequence
catgtgacgacattgccgcatttat

SEQ ID NO: 106469 - DNA, 25 bp, Probe sequence
ccattcagctatataatttatctcg

SEQ ID NO: 106470 - DNA, 25 bp, Probe sequence
gccgcatttatgtagtcgtttttat

SEQ ID NO: 106471 - DNA, 25 bp, Probe sequence
gaagtaaaaggtgcatgacagtcat

SEQ ID NO: 106472 - DNA, 25 bp, Probe sequence
gacagtcatgtgacgacattgccgc

SEQ ID NO: 106473 - DNA, 25 bp, Probe sequence
gacattaaatccattcagctatata

SEQ ID NO: 106474 - DNA, 25 bp, Probe sequence
gacattgccgcatttatgtagtcgt

SEQ ID NO: 106475 - DNA, 25 bp, Probe sequence
gatgaaaacacgtatcttgacatta

SEQ ID NO: 106476 - DNA, 25 bp, Probe sequence
gtcgtttttattaagcgcaatttga

SEQ ID NO: 106477 - DNA, 25 bp, Probe sequence
tcaactcctatcatgtttgattata

SEQ ID NO: 106478 - DNA, 25 bp, Probe sequence
tataatatttccctattctatttta

SEQ ID NO: 106479 - DNA, 25 bp, Probe sequence
ttgattataatatttccctattcta

SEQ ID NO: 106480 - DNA, 25 bp, Probe sequence
ataactagtcgttttgcaattttat

SEQ ID NO: 106481 - DNA, 25 bp, Probe sequence
atggtacagttgcaccatcgcaaaa

SEQ ID NO: 106482 - DNA, 25 bp, Probe sequence
agtcgttttgcaattttatattgat

SEQ ID NO: 106483 - DNA, 25 bp, Probe sequence
actagtcgttttgcaattttatatt

SEQ ID NO: 106484 - DNA, 25 bp, Probe sequence
acagttgcaccatcgcaaaatttat

SEQ ID NO: 106485 - DNA, 25 bp, Probe sequence
aaaaagcgatggtacagttgcacca

SEQ ID NO: 106486 - DNA, 25 bp, Probe sequence
aaagcgatggtacagttgcaccatc

SEQ ID NO: 106487 - DNA, 25 bp, Probe sequence
aactagtcgttttgcaattttatat

SEQ ID NO: 106488 - DNA, 25 bp, Probe sequence
gcctcgttttctatttttctataag

SEQ ID NO: 106489 - DNA, 25 bp, Probe sequence
gaattgatagcataaagtttgaaat

SEQ ID NO: 106490 - DNA, 25 bp, Probe sequence
gatggtacagttgcaccatcgcaaa

SEQ ID NO: 106491 - DNA, 25 bp, Probe sequence
gatgcgaacaaaaaagcgatggtac

SEQ ID NO: 106492 - DNA, 25 bp, Probe sequence
gtacagttgcaccatcgcaaaattt

SEQ ID NO: 106493 - DNA, 25 bp, Probe sequence
ggtacagttgcaccatcgcaaaatt

SEQ ID NO: 106494 - DNA, 25 bp, Probe sequence
tggtacagttgcaccatcgcaaaat

SEQ ID NO: 106495 - DNA, 25 bp, Probe sequence
atcgcaggtttttgcgtgaaaaaat

SEQ ID NO: 106496 - DNA, 25 bp, Probe sequence
atgaatcgcaggtttttgcgtgaaa

SEQ ID NO: 106497 - DNA, 25 bp, Probe sequence
agcaataaaaaaagcctgcgattac

SEQ ID NO: 106498 - DNA, 25 bp, Probe sequence
acataaatgaatcgcaggtttttgc

SEQ ID NO: 106499 - DNA, 25 bp, Probe sequence
aaatgaatcgcaggtttttgcgtga

SEQ ID NO: 106500 - DNA, 25 bp, Probe sequence
aaagcctgcgattacataaatgaat

SEQ ID NO: 106501 - DNA, 25 bp, Probe sequence
aaaaaagcctgcgattacataaatg

SEQ ID NO: 106502 - DNA, 25 bp, Probe sequence
aaaagcctgcgattacataaatgaa

SEQ ID NO: 106503 - DNA, 25 bp, Probe sequence
aagcctgcgattacataaatgaatc

SEQ ID NO: 106504 - DNA, 25 bp, Probe sequence
aatgaatcgcaggtttttgcgtgaa

SEQ ID NO: 106505 - DNA, 25 bp, Probe sequence
aataaaaaaagcctgcgattacata

SEQ ID NO: 106506 - DNA, 25 bp, Probe sequence
gcaggtttttgcgtgaaaaaattgt

SEQ ID NO: 106507 - DNA, 25 bp, Probe sequence
gaatacagtatgtctaaatatataa

SEQ ID NO: 106508 - DNA, 25 bp, Probe sequence
gaatcgcaggtttttgcgtgaaaaa

SEQ ID NO: 106509 - DNA, 25 bp, Probe sequence
taaaaaaagcctgcgattacataaa

SEQ ID NO: 106510 - DNA, 25 bp, Probe sequence
attgcaaacggattactttagtctt

SEQ ID NO: 106511 - DNA, 25 bp, Probe sequence
atagcgaattgcaaacggattactt

SEQ ID NO: 106512 - DNA, 25 bp, Probe sequence
atgtgcacaagttatagcgaattgc

SEQ ID NO: 106513 - DNA, 25 bp, Probe sequence
agcgaattgcaaacggattacttta

SEQ ID NO: 106514 - DNA, 25 bp, Probe sequence
acatgtgcacaagttatagcgaatt

SEQ ID NO: 106515 - DNA, 25 bp, Probe sequence
aaatcacgccacaatttaattgtga

SEQ ID NO: 106516 - DNA, 25 bp, Probe sequence
aagtgtgttttattgcagaaaactt

SEQ ID NO: 106517 - DNA, 25 bp, Probe sequence
aattcaaaagtgtgttttattgcag

SEQ ID NO: 106518 - DNA, 25 bp, Probe sequence
cagaaaacttataacatgtgcacaa

SEQ ID NO: 106519 - DNA, 25 bp, Probe sequence
gcacaagttatagcgaattgcaaac

SEQ ID NO: 106520 - DNA, 25 bp, Probe sequence
gaattgcaaacggattactttagtc

SEQ ID NO: 106521 - DNA, 25 bp, Probe sequence
tgcaaacggattactttagtctttt

SEQ ID NO: 106522 - DNA, 25 bp, Probe sequence
taaaatcacgccacaatttaattgt

SEQ ID NO: 106523 - DNA, 25 bp, Probe sequence
tatattataacactaaattttccaa

SEQ ID NO: 106524 - DNA, 25 bp, Probe sequence
ttgcaaacggattactttagtcttt

SEQ ID NO: 106525 - DNA, 25 bp, Probe sequence
atatatctcaaacaggttaggcaat

SEQ ID NO: 106526 - DNA, 25 bp, Probe sequence
atcatcaaacattaatatatctcaa

SEQ ID NO: 106527 - DNA, 25 bp, Probe sequence
agcagattttaatcaaaccgatttt

SEQ ID NO: 106528 - DNA, 25 bp, Probe sequence
agcgcactacaatcagttgaataga

SEQ ID NO: 106529 - DNA, 25 bp, Probe sequence
acaggttaggcaataatgccatagt

SEQ ID NO: 106530 - DNA, 25 bp, Probe sequence
aaataagcgcactacaatcagttga

SEQ ID NO: 106531 - DNA, 25 bp, Probe sequence
aaaccgattttgatacagataaaca

SEQ ID NO: 106532 - DNA, 25 bp, Probe sequence
aaaagcaaaggcacatggtgcgcct

SEQ ID NO: 106533 - DNA, 25 bp, Probe sequence
aaggcacatggtgcgcctttgcttt

SEQ ID NO: 106534 - DNA, 25 bp, Probe sequence
aatgccatagtaaaataagcgcact

SEQ ID NO: 106535 - DNA, 25 bp, Probe sequence
gaagcggctatcatgatactaaata

SEQ ID NO: 106536 - DNA, 25 bp, Probe sequence
gtagcacatcatcaatgaagcggct

SEQ ID NO: 106537 - DNA, 25 bp, Probe sequence
gtgcgcctttgcttttaaatatata

SEQ ID NO: 106538 - DNA, 25 bp, Probe sequence
tggtgcgcctttgcttttaaatata

SEQ ID NO: 106539 - DNA, 25 bp, Probe sequence
tgaaaactttgaatacgaatcatca

SEQ ID NO: 106540 - DNA, 25 bp, Probe sequence
attacaccgatatttaattgtattt

SEQ ID NO: 106541 - DNA, 25 bp, Probe sequence
atttatgttcgcctccgaatgctat

SEQ ID NO: 106542 - DNA, 25 bp, Probe sequence
atcacactatattttgtccaaatga

SEQ ID NO: 106543 - DNA, 25 bp, Probe sequence
atcgttatatttttacaatattctg

SEQ ID NO: 106544 - DNA, 25 bp, Probe sequence
acaactcctatgtataaagggattt

SEQ ID NO: 106545 - DNA, 25 bp, Probe sequence
aatgtgaatatagtttcattgtggt

SEQ ID NO: 106546 - DNA, 25 bp, Probe sequence
gcctccgaatgctatatccagtgta

SEQ ID NO: 106547 - DNA, 25 bp, Probe sequence
gaatgctatatccagtgtaatgtgt

SEQ ID NO: 106548 - DNA, 25 bp, Probe sequence
gtatatcacactatattttgtccaa

SEQ ID NO: 106549 - DNA, 25 bp, Probe sequence
gtgtaatgtgttttgcatatatgaa

SEQ ID NO: 106550 - DNA, 25 bp, Probe sequence
tgttcgcctccgaatgctatatcca

SEQ ID NO: 106551 - DNA, 25 bp, Probe sequence
taaaaattttttcacattatgtata

SEQ ID NO: 106552 - DNA, 25 bp, Probe sequence
taaagggatttattacaccgatatt

SEQ ID NO: 106553 - DNA, 25 bp, Probe sequence
tatatccagtgtaatgtgttttgca

SEQ ID NO: 106554 - DNA, 25 bp, Probe sequence
ttctgaaatttatgttcgcctccga

SEQ ID NO: 106555 - DNA, 25 bp, Probe sequence
acgtgtcattggtggagattgtaaa

SEQ ID NO: 106556 - DNA, 25 bp, Probe sequence
aaggagcgacaatggatgccgctct

SEQ ID NO: 106557 - DNA, 25 bp, Probe sequence
aatggatgccgctcttttttatgta

SEQ ID NO: 106558 - DNA, 25 bp, Probe sequence
cattacgctaatggatgaatatatt

SEQ ID NO: 106559 - DNA, 25 bp, Probe sequence
cttgattgcgagactgtttttttgt

SEQ ID NO: 106560 - DNA, 25 bp, Probe sequence
gcgacaatggatgccgctctttttt

SEQ ID NO: 106561 - DNA, 25 bp, Probe sequence
gcgagactgtttttttgtttggtgt

SEQ ID NO: 106562 - DNA, 25 bp, Probe sequence
gacaatggatgccgctcttttttat

SEQ ID NO: 106563 - DNA, 25 bp, Probe sequence
gacgacgtgtcattggtggagattg

SEQ ID NO: 106564 - DNA, 25 bp, Probe sequence
gagactgtttttttgtttggtgtga

SEQ ID NO: 106565 - DNA, 25 bp, Probe sequence
gagtggaaaacagtcttgattgcga

SEQ ID NO: 106566 - DNA, 25 bp, Probe sequence
gattgcgagactgtttttttgtttg

SEQ ID NO: 106567 - DNA, 25 bp, Probe sequence
gtgaggcaccaatgacgacgtgtca

SEQ ID NO: 106568 - DNA, 25 bp, Probe sequence
ggtgtgaggcaccaatgacgacgtg

SEQ ID NO: 106569 - DNA, 25 bp, Probe sequence
tgtttttttgtttggtgtgaggcac

SEQ ID NO: 106570 - DNA, 25 bp, Probe sequence
atctaacgtgacaatatatgtgcaa

SEQ ID NO: 106571 - DNA, 25 bp, Probe sequence
atgaaatctaacgtgacaatatatg

SEQ ID NO: 106572 - DNA, 25 bp, Probe sequence
atgtgtaatgaaatctaacgtgaca

SEQ ID NO: 106573 - DNA, 25 bp, Probe sequence
aacgtttcgttatttgaatgcaaat

SEQ ID NO: 106574 - DNA, 25 bp, Probe sequence
aacgtgacaatatatgtgcaaattt

SEQ ID NO: 106575 - DNA, 25 bp, Probe sequence
aatgaaatctaacgtgacaatatat

SEQ ID NO: 106576 - DNA, 25 bp, Probe sequence
aatctaacgtgacaatatatgtgca

SEQ ID NO: 106577 - DNA, 25 bp, Probe sequence
ctaacgtgacaatatatgtgcaaat

SEQ ID NO: 106578 - DNA, 25 bp, Probe sequence
gaaatctaacgtgacaatatatgtg

SEQ ID NO: 106579 - DNA, 25 bp, Probe sequence
gtaatgaaatctaacgtgacaatat

SEQ ID NO: 106580 - DNA, 25 bp, Probe sequence
gtgacaatatatgtgcaaattttat

SEQ ID NO: 106581 - DNA, 25 bp, Probe sequence
gtgtaatgaaatctaacgtgacaat

SEQ ID NO: 106582 - DNA, 25 bp, Probe sequence
tctaacgtgacaatatatgtgcaaa

SEQ ID NO: 106583 - DNA, 25 bp, Probe sequence
tatgtgtaatgaaatctaacgtgac

SEQ ID NO: 106584 - DNA, 25 bp, Probe sequence
tttgaatgcaaatatgtgtaatgaa

SEQ ID NO: 106585 - DNA, 25 bp, Probe sequence
atatgttagcatgttatgttaagtg

SEQ ID NO: 106586 - DNA, 25 bp, Probe sequence
atggttgtcttgtttatattatgtg

SEQ ID NO: 106587 - DNA, 25 bp, Probe sequence
agttttatatgttagcatgttatgt

SEQ ID NO: 106588 - DNA, 25 bp, Probe sequence
acgatgtaaattgtccctaagaggt

SEQ ID NO: 106589 - DNA, 25 bp, Probe sequence
aaatcaaagctatggggatagtatt

SEQ ID NO: 106590 - DNA, 25 bp, Probe sequence
aagtgaattaacatggttgtcttgt

SEQ ID NO: 106591 - DNA, 25 bp, Probe sequence
gctatggggatagtatttgaaatga

SEQ ID NO: 106592 - DNA, 25 bp, Probe sequence
gaattaacatggttgtcttgtttat

SEQ ID NO: 106593 - DNA, 25 bp, Probe sequence
gaggtttatagttttatatgttagc

SEQ ID NO: 106594 - DNA, 25 bp, Probe sequence
gatgtaaattgtccctaagaggttt

SEQ ID NO: 106595 - DNA, 25 bp, Probe sequence
gttagcatgttatgttaagtgaatt

SEQ ID NO: 106596 - DNA, 25 bp, Probe sequence
gtcttgtttatattatgtgatttaa

SEQ ID NO: 106597 - DNA, 25 bp, Probe sequence
ggttgtcttgtttatattatgtgat

SEQ ID NO: 106598 - DNA, 25 bp, Probe sequence
taaattgtccctaagaggtttatag

SEQ ID NO: 106599 - DNA, 25 bp, Probe sequence
ttaacatggttgtcttgtttatatt

SEQ ID NO: 106600 - DNA, 25 bp, Probe sequence
atcatcattcctatcagaaaactaa

SEQ ID NO: 106601 - DNA, 25 bp, Probe sequence
atcgcctccactaagttatactaaa

SEQ ID NO: 106602 - DNA, 25 bp, Probe sequence
atcctactttaattatcttattgca

SEQ ID NO: 106603 - DNA, 25 bp, Probe sequence
aactgtcacacaactgtttgaaata

SEQ ID NO: 106604 - DNA, 25 bp, Probe sequence
aaccagccattgttaagttgatgta

SEQ ID NO: 106605 - DNA, 25 bp, Probe sequence
aagattcaacctatagactatcatc

SEQ ID NO: 106606 - DNA, 25 bp, Probe sequence
caatccattttaaaaatctttcaca

SEQ ID NO: 106607 - DNA, 25 bp, Probe sequence
gcggttttataaacacagcacaaaa

SEQ ID NO: 106608 - DNA, 25 bp, Probe sequence
gaaatattactcactttcagatgta

SEQ ID NO: 106609 - DNA, 25 bp, Probe sequence
gttatactaaatattttcatcttca

SEQ ID NO: 106610 - DNA, 25 bp, Probe sequence
gggtgtacgatgtttatggtctgaa

SEQ ID NO: 106611 - DNA, 25 bp, Probe sequence
tttatcgcctccactaagttatact

SEQ ID NO: 106612 - DNA, 25 bp, Probe sequence
tagactatcatcattcctatcagaa

SEQ ID NO: 106613 - DNA, 25 bp, Probe sequence
tttttgaatatagtgtgcggtttta

SEQ ID NO: 106614 - DNA, 25 bp, Probe sequence
ttcatcttcagtataaccagccatt

SEQ ID NO: 106615 - DNA, 25 bp, Probe sequence
atttaattcattatatcgactttta

SEQ ID NO: 106616 - DNA, 25 bp, Probe sequence
atcatctaagatgtagtggtctaga

SEQ ID NO: 106617 - DNA, 25 bp, Probe sequence
atgaatgttgaaacacagaggataa

SEQ ID NO: 106618 - DNA, 25 bp, Probe sequence
aagatgtagtggtctagatgataga

SEQ ID NO: 106619 - DNA, 25 bp, Probe sequence
aattcattatatcgacttttaagaa

SEQ ID NO: 106620 - DNA, 25 bp, Probe sequence
ctaagatgtagtggtctagatgata

SEQ ID NO: 106621 - DNA, 25 bp, Probe sequence
cggtgtatgataatgatttaattca

SEQ ID NO: 106622 - DNA, 25 bp, Probe sequence
gaatcgatatgggaaatgaatgttg

SEQ ID NO: 106623 - DNA, 25 bp, Probe sequence
gatgtagtggtctagatgatagata

SEQ ID NO: 106624 - DNA, 25 bp, Probe sequence
gatagataaatgaatcgatatggga

SEQ ID NO: 106625 - DNA, 25 bp, Probe sequence
gatttaattcattatatcgactttt

SEQ ID NO: 106626 - DNA, 25 bp, Probe sequence
gtagtggtctagatgatagataaat

SEQ ID NO: 106627 - DNA, 25 bp, Probe sequence
taattcattatatcgacttttaaga

SEQ ID NO: 106628 - DNA, 25 bp, Probe sequence
tatgggaaatgaatgttgaaacaca

SEQ ID NO: 106629 - DNA, 25 bp, Probe sequence
ttcattatatcgacttttaagaaag

SEQ ID NO: 106630 - DNA, 25 bp, Probe sequence
atatcacatacaaggtagctacgtt

SEQ ID NO: 106631 - DNA, 25 bp, Probe sequence
atagttacttgctaaagtgattatc

SEQ ID NO: 106632 - DNA, 25 bp, Probe sequence
atcacatacaaggtagctacgttgt

SEQ ID NO: 106633 - DNA, 25 bp, Probe sequence
actctgatatcacatacaaggtagc

SEQ ID NO: 106634 - DNA, 25 bp, Probe sequence
aaactctgatatcacatacaaggta

SEQ ID NO: 106635 - DNA, 25 bp, Probe sequence
aaaaaactctgatatcacatacaag

SEQ ID NO: 106636 - DNA, 25 bp, Probe sequence
aaaactctgatatcacatacaaggt

SEQ ID NO: 106637 - DNA, 25 bp, Probe sequence
cacatacaaggtagctacgttgtta

SEQ ID NO: 106638 - DNA, 25 bp, Probe sequence
catacaaggtagctacgttgttaaa

SEQ ID NO: 106639 - DNA, 25 bp, Probe sequence
ctctgatatcacatacaaggtagct

SEQ ID NO: 106640 - DNA, 25 bp, Probe sequence
ctgatatcacatacaaggtagctac

SEQ ID NO: 106641 - DNA, 25 bp, Probe sequence
gatatcacatacaaggtagctacgt

SEQ ID NO: 106642 - DNA, 25 bp, Probe sequence
tgttaaaaatagttacttgctaaag

SEQ ID NO: 106643 - DNA, 25 bp, Probe sequence
tgctaaagtgattatcagagttttc

SEQ ID NO: 106644 - DNA, 25 bp, Probe sequence
tacttgctaaagtgattatcagagt

SEQ ID NO: 106645 - DNA, 25 bp, Probe sequence
ataacttatttcccagtaaatattg

SEQ ID NO: 106646 - DNA, 25 bp, Probe sequence
atcagcatggtacagtagaactata

SEQ ID NO: 106647 - DNA, 25 bp, Probe sequence
agaatcagcatggtacagtagaact

SEQ ID NO: 106648 - DNA, 25 bp, Probe sequence
agacatcataacttatttcccagta

SEQ ID NO: 106649 - DNA, 25 bp, Probe sequence
catcataacttatttcccagtaaat

SEQ ID NO: 106650 - DNA, 25 bp, Probe sequence
gcattgctaagattatgtagacatc

SEQ ID NO: 106651 - DNA, 25 bp, Probe sequence
gcatggtacagtagaactatagtag

SEQ ID NO: 106652 - DNA, 25 bp, Probe sequence
gaactatagtagaaatcatcaaaga

SEQ ID NO: 106653 - DNA, 25 bp, Probe sequence
gaaatcatcaaagaggagtgacgac

SEQ ID NO: 106654 - DNA, 25 bp, Probe sequence
gacatcataacttatttcccagtaa

SEQ ID NO: 106655 - DNA, 25 bp, Probe sequence
gtagacatcataacttatttcccag

SEQ ID NO: 106656 - DNA, 25 bp, Probe sequence
ggtagtaataagaatcagcatggta

SEQ ID NO: 106657 - DNA, 25 bp, Probe sequence
tgtagacatcataacttatttccca

SEQ ID NO: 106658 - DNA, 25 bp, Probe sequence
tatttcccagtaaatattggtagta

SEQ ID NO: 106659 - DNA, 25 bp, Probe sequence
ttagcattgctaagattatgtagac

SEQ ID NO: 106660 - DNA, 25 bp, Probe sequence
attaacatgattttaaatctatttg

SEQ ID NO: 106661 - DNA, 25 bp, Probe sequence
atttgtaagataaggagatttgtca

SEQ ID NO: 106662 - DNA, 25 bp, Probe sequence
ataaattaacatgattttaaatcta

SEQ ID NO: 106663 - DNA, 25 bp, Probe sequence
atgattttaaatctatttgtaagat

SEQ ID NO: 106664 - DNA, 25 bp, Probe sequence
acatgattttaaatctatttgtaag

SEQ ID NO: 106665 - DNA, 25 bp, Probe sequence
aacatgattttaaatctatttgtaa

SEQ ID NO: 106666 - DNA, 25 bp, Probe sequence
aattaacatgattttaaatctattt

SEQ ID NO: 106667 - DNA, 25 bp, Probe sequence
catgattttaaatctatttgtaaga

SEQ ID NO: 106668 - DNA, 25 bp, Probe sequence
gattttaaatctatttgtaagataa

SEQ ID NO: 106669 - DNA, 25 bp, Probe sequence
tgattttaaatctatttgtaagata

SEQ ID NO: 106670 - DNA, 25 bp, Probe sequence
taacatgattttaaatctatttgta

SEQ ID NO: 106671 - DNA, 25 bp, Probe sequence
taaattaacatgattttaaatctat

SEQ ID NO: 106672 - DNA, 25 bp, Probe sequence
tttgtaagataaggagatttgtcat

SEQ ID NO: 106673 - DNA, 25 bp, Probe sequence
ttaacatgattttaaatctatttgt

SEQ ID NO: 106674 - DNA, 25 bp, Probe sequence
ttgtaagataaggagatttgtcatt

SEQ ID NO: 106675 - DNA, 25 bp, Probe sequence
agctactgcctttttagtgcgcaat

SEQ ID NO: 106676 - DNA, 25 bp, Probe sequence
actgcctttttagtgcgcaatgatg

SEQ ID NO: 106677 - DNA, 25 bp, Probe sequence
aaatgaagctactgcctttttagtg

SEQ ID NO: 106678 - DNA, 25 bp, Probe sequence
aagagaatacgttacaaaaggcagt

SEQ ID NO: 106679 - DNA, 25 bp, Probe sequence
gcctttttagtgcgcaatgatgtat

SEQ ID NO: 106680 - DNA, 25 bp, Probe sequence
gcgcaatgatgtatagcaggtgtgt

SEQ ID NO: 106681 - DNA, 25 bp, Probe sequence
gctactgcctttttagtgcgcaatg

SEQ ID NO: 106682 - DNA, 25 bp, Probe sequence
gcttaaaatgaagctactgcctttt

SEQ ID NO: 106683 - DNA, 25 bp, Probe sequence
gcaggtgtgttgatgataataagtt

SEQ ID NO: 106684 - DNA, 25 bp, Probe sequence
gaagctactgcctttttagtgcgca

SEQ ID NO: 106685 - DNA, 25 bp, Probe sequence
gaaaacattgcttatgtttttgtca

SEQ ID NO: 106686 - DNA, 25 bp, Probe sequence
gatgtatagcaggtgtgttgatgat

SEQ ID NO: 106687 - DNA, 25 bp, Probe sequence
gttagatatagaaaacattgcttat

SEQ ID NO: 106688 - DNA, 25 bp, Probe sequence
tgaagctactgcctttttagtgcgc

SEQ ID NO: 106689 - DNA, 25 bp, Probe sequence
tacgttacaaaaggcagtagcttaa

SEQ ID NO: 106690 - DNA, 25 bp, Probe sequence
ataatagctatgaattacatatcac

SEQ ID NO: 106691 - DNA, 25 bp, Probe sequence
atcgtactgaattgatgataaaatt

SEQ ID NO: 106692 - DNA, 25 bp, Probe sequence
atgatcgtactgaattgatgataaa

SEQ ID NO: 106693 - DNA, 25 bp, Probe sequence
acaaatatgtataatagctatgaat

SEQ ID NO: 106694 - DNA, 25 bp, Probe sequence
aaatgatcgtactgaattgatgata

SEQ ID NO: 106695 - DNA, 25 bp, Probe sequence
aatgatcgtactgaattgatgataa

SEQ ID NO: 106696 - DNA, 25 bp, Probe sequence
caaatgatcgtactgaattgatgat

SEQ ID NO: 106697 - DNA, 25 bp, Probe sequence
caaatatgtataatagctatgaatt

SEQ ID NO: 106698 - DNA, 25 bp, Probe sequence
gaaaacgcttttacaaatatgtata

SEQ ID NO: 106699 - DNA, 25 bp, Probe sequence
gatcgtactgaattgatgataaaat

SEQ ID NO: 106700 - DNA, 25 bp, Probe sequence
gataaaattgtgaaaaagttgttga

SEQ ID NO: 106701 - DNA, 25 bp, Probe sequence
gtataatagctatgaattacatatc

SEQ ID NO: 106702 - DNA, 25 bp, Probe sequence
tgtgaaaaagttgttgaaaacgctt

SEQ ID NO: 106703 - DNA, 25 bp, Probe sequence
tgatcgtactgaattgatgataaaa

SEQ ID NO: 106704 - DNA, 25 bp, Probe sequence
tacaaatatgtataatagctatgaa

SEQ ID NO: 106705 - DNA, 25 bp, Probe sequence
atttttatattgtgcacgccatctt

SEQ ID NO: 106706 - DNA, 25 bp, Probe sequence
atattgtgcacgccatctttataat

SEQ ID NO: 106707 - DNA, 25 bp, Probe sequence
aagcactcattatttaaggcgcatc

SEQ ID NO: 106708 - DNA, 25 bp, Probe sequence
aaggcgcatcattacgtgggtcatt

SEQ ID NO: 106709 - DNA, 25 bp, Probe sequence
aattgagagagcgtttccatagaaa

SEQ ID NO: 106710 - DNA, 25 bp, Probe sequence
gcatcattacgtgggtcattgaaat

SEQ ID NO: 106711 - DNA, 25 bp, Probe sequence
gcacgccatctttataatagttatt

SEQ ID NO: 106712 - DNA, 25 bp, Probe sequence
gaaatgatgagtgtttttttgtgaa

SEQ ID NO: 106713 - DNA, 25 bp, Probe sequence
gacatatttagaaagggatggcgcc

SEQ ID NO: 106714 - DNA, 25 bp, Probe sequence
gagagcgtttccatagaaaatagta

SEQ ID NO: 106715 - DNA, 25 bp, Probe sequence
gagtatttttatattgtgcacgcca

SEQ ID NO: 106716 - DNA, 25 bp, Probe sequence
gttattgtaacattttagacatatt

SEQ ID NO: 106717 - DNA, 25 bp, Probe sequence
ggcgcatcattacgtgggtcattga

SEQ ID NO: 106718 - DNA, 25 bp, Probe sequence
tgtgcacgccatctttataatagtt

SEQ ID NO: 106719 - DNA, 25 bp, Probe sequence
tttatattgtgcacgccatctttat

SEQ ID NO: 106720 - DNA, 25 bp, Probe sequence
attgaatgtttaagaagttgtgtat

SEQ ID NO: 106721 - DNA, 25 bp, Probe sequence
ataacaaacttgagccattaatata

SEQ ID NO: 106722 - DNA, 25 bp, Probe sequence
acctcacctcgaataacaaacttga

SEQ ID NO: 106723 - DNA, 25 bp, Probe sequence
acctcgaataacaaacttgagccat

SEQ ID NO: 106724 - DNA, 25 bp, Probe sequence
acttgagccattaatataataccat

SEQ ID NO: 106725 - DNA, 25 bp, Probe sequence
aacaaacttgagccattaatataat

SEQ ID NO: 106726 - DNA, 25 bp, Probe sequence
caaacttgagccattaatataatac

SEQ ID NO: 106727 - DNA, 25 bp, Probe sequence
ctcgaataacaaacttgagccatta

SEQ ID NO: 106728 - DNA, 25 bp, Probe sequence
gaataacaaacttgagccattaata

SEQ ID NO: 106729 - DNA, 25 bp, Probe sequence
gaatgtttaagaagttgtgtataat

SEQ ID NO: 106730 - DNA, 25 bp, Probe sequence
gaatgtgtattttacataaaacttt

SEQ ID NO: 106731 - DNA, 25 bp, Probe sequence
gaaataaacgtgttgaaatagttag

SEQ ID NO: 106732 - DNA, 25 bp, Probe sequence
gagccattaatataataccataaaa

SEQ ID NO: 106733 - DNA, 25 bp, Probe sequence
tcacctcgaataacaaacttgagcc

SEQ ID NO: 106734 - DNA, 25 bp, Probe sequence
tacctcacctcgaataacaaacttg

SEQ ID NO: 106735 - DNA, 25 bp, Probe sequence
agcgccctgcaatcagagcgctaac

SEQ ID NO: 106736 - DNA, 25 bp, Probe sequence
acaatgcaagcaatcaacaataaaa

SEQ ID NO: 106737 - DNA, 25 bp, Probe sequence
aaaatagcgccctgcaatcagagcg

SEQ ID NO: 106738 - DNA, 25 bp, Probe sequence
aaggatgtcagaattgattaacagc

SEQ ID NO: 106739 - DNA, 25 bp, Probe sequence
gccctgcaatcagagcgctaacatg

SEQ ID NO: 106740 - DNA, 25 bp, Probe sequence
gcaatcacaatatactaaatgtagc

SEQ ID NO: 106741 - DNA, 25 bp, Probe sequence
gcaatcagagcgctaacatgagatg

SEQ ID NO: 106742 - DNA, 25 bp, Probe sequence
gaagttgtcatataaagtgttgaat

SEQ ID NO: 106743 - DNA, 25 bp, Probe sequence
gaaaaggtacgtggttctataactg

SEQ ID NO: 106744 - DNA, 25 bp, Probe sequence
gagatgatgtgactccatgtattca

SEQ ID NO: 106745 - DNA, 25 bp, Probe sequence
gataacattaaaaatagcgccctgc

SEQ ID NO: 106746 - DNA, 25 bp, Probe sequence
gattaacagcggatattagtgggaa

SEQ ID NO: 106747 - DNA, 25 bp, Probe sequence
gtcatagtgatacaaggatgtcaga

SEQ ID NO: 106748 - DNA, 25 bp, Probe sequence
ggtacgtggttctataactgaaaga

SEQ ID NO: 106749 - DNA, 25 bp, Probe sequence
tgatgtgactccatgtattcatgta

SEQ ID NO: 106750 - DNA, 25 bp, Probe sequence
agaaaagtttaagtcagtccatcgt

SEQ ID NO: 106751 - DNA, 25 bp, Probe sequence
agcgttcgtgatagaagttttttga

SEQ ID NO: 106752 - DNA, 25 bp, Probe sequence
aaaacttctatcacacgcatacagg

SEQ ID NO: 106753 - DNA, 25 bp, Probe sequence
aacttctatcacacgcatacaggaa

SEQ ID NO: 106754 - DNA, 25 bp, Probe sequence
aagtttaagtcagtccatcgtagcg

SEQ ID NO: 106755 - DNA, 25 bp, Probe sequence
aatggcgaatagcgattttaaagaa

SEQ ID NO: 106756 - DNA, 25 bp, Probe sequence
aataaaaacttctatcacacgcata

SEQ ID NO: 106757 - DNA, 25 bp, Probe sequence
gaagcgttcgtgatagaagtttttt

SEQ ID NO: 106758 - DNA, 25 bp, Probe sequence
gtagcgcttagataaattaatatga

SEQ ID NO: 106759 - DNA, 25 bp, Probe sequence
gtccatcgtagcgcttagataaatt

SEQ ID NO: 106760 - DNA, 25 bp, Probe sequence
tctatcacacgcatacaggaaattg

SEQ ID NO: 106761 - DNA, 25 bp, Probe sequence
tcagtccatcgtagcgcttagataa

SEQ ID NO: 106762 - DNA, 25 bp, Probe sequence
taagtcagtccatcgtagcgcttag

SEQ ID NO: 106763 - DNA, 25 bp, Probe sequence
tacaggaaattgaagcgttcgtgat

SEQ ID NO: 106764 - DNA, 25 bp, Probe sequence
tttaagtcagtccatcgtagcgctt

SEQ ID NO: 106765 - DNA, 25 bp, Probe sequence
ataaaagcaacacttgtatcatatc

SEQ ID NO: 106766 - DNA, 25 bp, Probe sequence
atcagaatatgcttatcttatacaa

SEQ ID NO: 106767 - DNA, 25 bp, Probe sequence
agaatatgcttatcttatacaaaga

SEQ ID NO: 106768 - DNA, 25 bp, Probe sequence
agcaacacttgtatcatatcagaat

SEQ ID NO: 106769 - DNA, 25 bp, Probe sequence
aaagcaacacttgtatcatatcaga

SEQ ID NO: 106770 - DNA, 25 bp, Probe sequence
aatgatttgacgtttcttgtaagcg

SEQ ID NO: 106771 - DNA, 25 bp, Probe sequence
caacacttgtatcatatcagaatat

SEQ ID NO: 106772 - DNA, 25 bp, Probe sequence
gatttgacgtttcttgtaagcgttt

SEQ ID NO: 106773 - DNA, 25 bp, Probe sequence
tgtaagcgttttaatttaccttgct

SEQ ID NO: 106774 - DNA, 25 bp, Probe sequence
tgacgtttcttgtaagcgttttaat

SEQ ID NO: 106775 - DNA, 25 bp, Probe sequence
taatttaccttgctttattttatag

SEQ ID NO: 106776 - DNA, 25 bp, Probe sequence
taagacgaataacgttattttatgg

SEQ ID NO: 106777 - DNA, 25 bp, Probe sequence
taaaaatgatttgacgtttcttgta

SEQ ID NO: 106778 - DNA, 25 bp, Probe sequence
tatgtgaagtaaaaggagtatgtcc

SEQ ID NO: 106779 - DNA, 25 bp, Probe sequence
tacatcctttcaaatttataaaagc

SEQ ID NO: 106780 - DNA, 25 bp, Probe sequence
atgaattcattcaatacgaagtgtt

SEQ ID NO: 106781 - DNA, 25 bp, Probe sequence
atgagaagctgtcttactgctgttt

SEQ ID NO: 106782 - DNA, 25 bp, Probe sequence
aagacgatttcaatgagaagctgtc

SEQ ID NO: 106783 - DNA, 25 bp, Probe sequence
aatgagaagctgtcttactgctgtt

SEQ ID NO: 106784 - DNA, 25 bp, Probe sequence
aattcattcaatacgaagtgttata

SEQ ID NO: 106785 - DNA, 25 bp, Probe sequence
cagcagtaagacgatttcaatgaga

SEQ ID NO: 106786 - DNA, 25 bp, Probe sequence
gacgatttcaatgagaagctgtctt

SEQ ID NO: 106787 - DNA, 25 bp, Probe sequence
gatttcaatgagaagctgtcttact

SEQ ID NO: 106788 - DNA, 25 bp, Probe sequence
gtgtcaaataggcataatgaattca

SEQ ID NO: 106789 - DNA, 25 bp, Probe sequence
tgagaagctgtcttactgctgtttt

SEQ ID NO: 106790 - DNA, 25 bp, Probe sequence
tcaatgagaagctgtcttactgctg

SEQ ID NO: 106791 - DNA, 25 bp, Probe sequence
taggttatatttaaatgtctttcaa

SEQ ID NO: 106792 - DNA, 25 bp, Probe sequence
tttcaatgagaagctgtcttactgc

SEQ ID NO: 106793 - DNA, 25 bp, Probe sequence
tttaaatgtctttcaaatacacaga

SEQ ID NO: 106794 - DNA, 25 bp, Probe sequence
ttcaataatgtgtcaaataggcata

SEQ ID NO: 106795 - DNA, 25 bp, Probe sequence
atacgtaattgacgacttatttatt

SEQ ID NO: 106796 - DNA, 25 bp, Probe sequence
ataacatcacctctaaatttttttg

SEQ ID NO: 106797 - DNA, 25 bp, Probe sequence
aaagtaataggttagcacgtgtagt

SEQ ID NO: 106798 - DNA, 25 bp, Probe sequence
caattgcaattgtacttttccacta

SEQ ID NO: 106799 - DNA, 25 bp, Probe sequence
catcacctctaaatttttttgaact

SEQ ID NO: 106800 - DNA, 25 bp, Probe sequence
gcaaagggatagctggtattacgtg

SEQ ID NO: 106801 - DNA, 25 bp, Probe sequence
gcaattgtacttttccactaataat

SEQ ID NO: 106802 - DNA, 25 bp, Probe sequence
gaagcgttatgcaaactatatacaa

SEQ ID NO: 106803 - DNA, 25 bp, Probe sequence
gaacatgaatattttctaatttaac

SEQ ID NO: 106804 - DNA, 25 bp, Probe sequence
gaaattacttttgaagcgttatgca

SEQ ID NO: 106805 - DNA, 25 bp, Probe sequence
gatagctggtattacgtgtttatat

SEQ ID NO: 106806 - DNA, 25 bp, Probe sequence
gttatgtaactgtatattgcagcaa

SEQ ID NO: 106807 - DNA, 25 bp, Probe sequence
ggttagcacgtgtagtaagttatgt

SEQ ID NO: 106808 - DNA, 25 bp, Probe sequence
ggatccattgcattttcaatatttt

SEQ ID NO: 106809 - DNA, 25 bp, Probe sequence
tattaaggatccattgcattttcaa

SEQ ID NO: 106810 - DNA, 25 bp, Probe sequence
atgagcacaggcaagggcgacctga

SEQ ID NO: 106811 - DNA, 25 bp, Probe sequence
acaggcaagggcgacctgatgctca

SEQ ID NO: 106812 - DNA, 25 bp, Probe sequence
acctgatgctcatttttgatgcgcg

SEQ ID NO: 106813 - DNA, 25 bp, Probe sequence
aaaatgagcacaggcaagggcgacc

SEQ ID NO: 106814 - DNA, 25 bp, Probe sequence
caggcaagggcgacctgatgctcat

SEQ ID NO: 106815 - DNA, 25 bp, Probe sequence
catttttgatgcgcgatatgttaaa

SEQ ID NO: 106816 - DNA, 25 bp, Probe sequence
ctgatgctcatttttgatgcgcgat

SEQ ID NO: 106817 - DNA, 25 bp, Probe sequence
gcgacctgatgctcatttttgatgc

SEQ ID NO: 106818 - DNA, 25 bp, Probe sequence
gctcatttttgatgcgcgatatgtt

SEQ ID NO: 106819 - DNA, 25 bp, Probe sequence
gcacaggcaagggcgacctgatgct

SEQ ID NO: 106820 - DNA, 25 bp, Probe sequence
gacctgatgctcatttttgatgcgc

SEQ ID NO: 106821 - DNA, 25 bp, Probe sequence
gagcacaggcaagggcgacctgatg

SEQ ID NO: 106822 - DNA, 25 bp, Probe sequence
gatgctcatttttgatgcgcgatat

SEQ ID NO: 106823 - DNA, 25 bp, Probe sequence
ggcgacctgatgctcatttttgatg

SEQ ID NO: 106824 - DNA, 25 bp, Probe sequence
ttgatgcgcgatatgttaaagtgtc

SEQ ID NO: 106825 - DNA, 25 bp, Probe sequence
aatctacactgtatatttaaactat

SEQ ID NO: 106826 - DNA, 25 bp, Probe sequence
aattttccaattgattctttaagag

SEQ ID NO: 106827 - DNA, 25 bp, Probe sequence
catttctcctttgtgtgtagtttaa

SEQ ID NO: 106828 - DNA, 25 bp, Probe sequence
cgttgattttaaaaggaggcaatat

SEQ ID NO: 106829 - DNA, 25 bp, Probe sequence
cgaacaataatctacactgtatatt

SEQ ID NO: 106830 - DNA, 25 bp, Probe sequence
gattctttaagaggtcggggataga

SEQ ID NO: 106831 - DNA, 25 bp, Probe sequence
gtatatttaaactataacgttgatt

SEQ ID NO: 106832 - DNA, 25 bp, Probe sequence
ggtcggggatagatactataatcga

SEQ ID NO: 106833 - DNA, 25 bp, Probe sequence
tctcctttgtgtgtagtttaatata

SEQ ID NO: 106834 - DNA, 25 bp, Probe sequence
taatcgaacaataatctacactgta

SEQ ID NO: 106835 - DNA, 25 bp, Probe sequence
taagaggtcggggatagatactata

SEQ ID NO: 106836 - DNA, 25 bp, Probe sequence
tacaaaattttccaattgattcttt

SEQ ID NO: 106837 - DNA, 25 bp, Probe sequence
tacatttctcctttgtgtgtagttt

SEQ ID NO: 106838 - DNA, 25 bp, Probe sequence
tttccaattgattctttaagaggtc

SEQ ID NO: 106839 - DNA, 25 bp, Probe sequence
tttctcctttgtgtgtagtttaata

SEQ ID NO: 106840 - DNA, 25 bp, Probe sequence
aaacgatagtagtacacgaattcat

SEQ ID NO: 106841 - DNA, 25 bp, Probe sequence
aatgttggtaacgctcatgagtttc

SEQ ID NO: 106842 - DNA, 25 bp, Probe sequence
aattcattaacgtgtacactatcgt

SEQ ID NO: 106843 - DNA, 25 bp, Probe sequence
cattaacgtgtacactatcgttttt

SEQ ID NO: 106844 - DNA, 25 bp, Probe sequence
ctatcgtttttattatgaatgttgg

SEQ ID NO: 106845 - DNA, 25 bp, Probe sequence
cgtgtacactatcgtttttattatg

SEQ ID NO: 106846 - DNA, 25 bp, Probe sequence
cgaattcattaacgtgtacactatc

SEQ ID NO: 106847 - DNA, 25 bp, Probe sequence
gatagtagtacacgaattcattaac

SEQ ID NO: 106848 - DNA, 25 bp, Probe sequence
gttggtaacgctcatgagtttctca

SEQ ID NO: 106849 - DNA, 25 bp, Probe sequence
gtaacgctcatgagtttctcatcta

SEQ ID NO: 106850 - DNA, 25 bp, Probe sequence
tggtaacgctcatgagtttctcatc

SEQ ID NO: 106851 - DNA, 25 bp, Probe sequence
tgtacactatcgtttttattatgaa

SEQ ID NO: 106852 - DNA, 25 bp, Probe sequence
tgaatgttggtaacgctcatgagtt

SEQ ID NO: 106853 - DNA, 25 bp, Probe sequence
taacgtgtacactatcgtttttatt

SEQ ID NO: 106854 - DNA, 25 bp, Probe sequence
tacactatcgtttttattatgaatg

SEQ ID NO: 106855 - DNA, 25 bp, Probe sequence
attgcggttggctctttttatttat

SEQ ID NO: 106856 - DNA, 25 bp, Probe sequence
atagcaaccatatttttagaaaagg

SEQ ID NO: 106857 - DNA, 25 bp, Probe sequence
atccattgcggttggctctttttat

SEQ ID NO: 106858 - DNA, 25 bp, Probe sequence
atgaacaagggccatccattgcggt

SEQ ID NO: 106859 - DNA, 25 bp, Probe sequence
acaagggccatccattgcggttggc

SEQ ID NO: 106860 - DNA, 25 bp, Probe sequence
aagtaatagcaaccatatttttaga

SEQ ID NO: 106861 - DNA, 25 bp, Probe sequence
caagggccatccattgcggttggct

SEQ ID NO: 106862 - DNA, 25 bp, Probe sequence
cattgcggttggctctttttattta

SEQ ID NO: 106863 - DNA, 25 bp, Probe sequence
ccattgcggttggctctttttattt

SEQ ID NO: 106864 - DNA, 25 bp, Probe sequence
gcttcataatgaacaagggccatcc

SEQ ID NO: 106865 - DNA, 25 bp, Probe sequence
tgaacaagggccatccattgcggtt

SEQ ID NO: 106866 - DNA, 25 bp, Probe sequence
tgcggttggctctttttatttataa

SEQ ID NO: 106867 - DNA, 25 bp, Probe sequence
tccattgcggttggctctttttatt

SEQ ID NO: 106868 - DNA, 25 bp, Probe sequence
ttcataatgaacaagggccatccat

SEQ ID NO: 106869 - DNA, 25 bp, Probe sequence
ttgcggttggctctttttatttata

SEQ ID NO: 106870 - DNA, 25 bp, Probe sequence
atttctcttactcacattgtacgtt

SEQ ID NO: 106871 - DNA, 25 bp, Probe sequence
atgcgtctgtagtattgaatttatc

SEQ ID NO: 106872 - DNA, 25 bp, Probe sequence
agcagtatttgatgcgagaattgta

SEQ ID NO: 106873 - DNA, 25 bp, Probe sequence
aaatgaatgcgtctgtagtattgaa

SEQ ID NO: 106874 - DNA, 25 bp, Probe sequence
aagggtgataaggtcatgatttcat

SEQ ID NO: 106875 - DNA, 25 bp, Probe sequence
ctcttactcacattgtacgttaata

SEQ ID NO: 106876 - DNA, 25 bp, Probe sequence
ctcctttatatttctcttactcaca

SEQ ID NO: 106877 - DNA, 25 bp, Probe sequence
gttgcataggcgaatgtttatttga

SEQ ID NO: 106878 - DNA, 25 bp, Probe sequence
gttatagcgtattagttgcataggc

SEQ ID NO: 106879 - DNA, 25 bp, Probe sequence
gtcatgatttcataatgttatagcg

SEQ ID NO: 106880 - DNA, 25 bp, Probe sequence
ggcgaatgtttatttgattaacttt

SEQ ID NO: 106881 - DNA, 25 bp, Probe sequence
tgaatttatctactactttagcagt

SEQ ID NO: 106882 - DNA, 25 bp, Probe sequence
tactcctttatatttctcttactca

SEQ ID NO: 106883 - DNA, 25 bp, Probe sequence
tatctactactttagcagtatttga

SEQ ID NO: 106884 - DNA, 25 bp, Probe sequence
tttatatttctcttactcacattgt

SEQ ID NO: 106885 - DNA, 25 bp, Probe sequence
atctctctatttagcatctatataa

SEQ ID NO: 106886 - DNA, 25 bp, Probe sequence
agaaaaagagagattgccgtgcaaa

SEQ ID NO: 106887 - DNA, 25 bp, Probe sequence
aacaatctctctatttagcatctat

SEQ ID NO: 106888 - DNA, 25 bp, Probe sequence
aatgacttctggatttgcaattctt

SEQ ID NO: 106889 - DNA, 25 bp, Probe sequence
ccccctctaggtatataagtcaatc

SEQ ID NO: 106890 - DNA, 25 bp, Probe sequence
gcaaacattgcacaacaatctctct

SEQ ID NO: 106891 - DNA, 25 bp, Probe sequence
gagagattgccgtgcaaacattgca

SEQ ID NO: 106892 - DNA, 25 bp, Probe sequence
ttgttacacgtctaatgtaccccct

SEQ ID NO: 106893 - DNA, 25 bp, Probe sequence
ggtaaaacttaaatgacttctggat

SEQ ID NO: 106894 - DNA, 25 bp, Probe sequence
tgcctccctgtgattcattgttaca

SEQ ID NO: 106895 - DNA, 25 bp, Probe sequence
tccctgtgattcattgttacacgtc

SEQ ID NO: 106896 - DNA, 25 bp, Probe sequence
tctggatttgcaattcttaggtgac

SEQ ID NO: 106897 - DNA, 25 bp, Probe sequence
tctaatgtaccccctctaggtatat

SEQ ID NO: 106898 - DNA, 25 bp, Probe sequence
taagtcaatcgttgcgttttacttt

SEQ ID NO: 106899 - DNA, 25 bp, Probe sequence
ttgcacaacaatctctctatttagc

SEQ ID NO: 106900 - DNA, 25 bp, Probe sequence
atatatgcagttggagcgaagaccc

SEQ ID NO: 106901 - DNA, 25 bp, Probe sequence
atcactagcctatctcagaatcacc

SEQ ID NO: 106902 - DNA, 25 bp, Probe sequence
aggagcgaagatccaactgtaaacc

SEQ ID NO: 106903 - DNA, 25 bp, Probe sequence
acccaactgtaaaccgcgacattat

SEQ ID NO: 106904 - DNA, 25 bp, Probe sequence
aaaccgcgacattatagagccaatc

SEQ ID NO: 106905 - DNA, 25 bp, Probe sequence
caccaacgaatccttcattattaag

SEQ ID NO: 106906 - DNA, 25 bp, Probe sequence
cagaatcaccaacgaatccttcatt

SEQ ID NO: 106907 - DNA, 25 bp, Probe sequence
gcgaagacccaactgtaaaccgcga

SEQ ID NO: 106908 - DNA, 25 bp, Probe sequence
gcctatctcagaatcaccaacgaat

SEQ ID NO: 106909 - DNA, 25 bp, Probe sequence
gtaaaccatagtgtacttattattt

SEQ ID NO: 106910 - DNA, 25 bp, Probe sequence
ggcggagctattaggtaagatacac

SEQ ID NO: 106911 - DNA, 25 bp, Probe sequence
ggcgaagctattaggtaagatacac

SEQ ID NO: 106912 - DNA, 25 bp, Probe sequence
tcgccaagcgaaaagtgtaactata

SEQ ID NO: 106913 - DNA, 25 bp, Probe sequence
tcttatgcagttggagcgaagatcc

SEQ ID NO: 106914 - DNA, 25 bp, Probe sequence
tagagccaatcactagcctatctca

SEQ ID NO: 106915 - DNA, 25 bp, Probe sequence
attgttgggattctcatcagttcga

SEQ ID NO: 106916 - DNA, 25 bp, Probe sequence
aatttggtgttgatgacgttgaata

SEQ ID NO: 106917 - DNA, 25 bp, Probe sequence
gaactgatgagataatttggattgt

SEQ ID NO: 106918 - DNA, 25 bp, Probe sequence
gatgagataatttggattgttggga

SEQ ID NO: 106919 - DNA, 25 bp, Probe sequence
gatttttttaatttggtgttgatga

SEQ ID NO: 106920 - DNA, 25 bp, Probe sequence
gattgttgggattctcatcagttcg

SEQ ID NO: 106921 - DNA, 25 bp, Probe sequence
gttgatgacgttgaatattgcctaa

SEQ ID NO: 106922 - DNA, 25 bp, Probe sequence
gtgttgatgacgttgaatattgcct

SEQ ID NO: 106923 - DNA, 25 bp, Probe sequence
ggtgttgatgacgttgaatattgcc

SEQ ID NO: 106924 - DNA, 25 bp, Probe sequence
ggattgttgggattctcatcagttc

SEQ ID NO: 106925 - DNA, 25 bp, Probe sequence
tggattgttgggattctcatcagtt

SEQ ID NO: 106926 - DNA, 25 bp, Probe sequence
tcgatttttttaatttggtgttgat

SEQ ID NO: 106927 - DNA, 25 bp, Probe sequence
tttggtgttgatgacgttgaatatt

SEQ ID NO: 106928 - DNA, 25 bp, Probe sequence
tttaatttggtgttgatgacgttga

SEQ ID NO: 106929 - DNA, 25 bp, Probe sequence
ttgttgggattctcatcagttcgat

SEQ ID NO: 106930 - DNA, 25 bp, Probe sequence
atctaactggttgcgcatgcggata

SEQ ID NO: 106931 - DNA, 25 bp, Probe sequence
actggttgcgcatgcggatatgcat

SEQ ID NO: 106932 - DNA, 25 bp, Probe sequence
aaattcattcaatacaacgtgtgtc

SEQ ID NO: 106933 - DNA, 25 bp, Probe sequence
aagcatatctaactggttgcgcatg

SEQ ID NO: 106934 - DNA, 25 bp, Probe sequence
aatcataacgattgagtgcatatta

SEQ ID NO: 106935 - DNA, 25 bp, Probe sequence
gaatacgtaccttgaggggcgttat

SEQ ID NO: 106936 - DNA, 25 bp, Probe sequence
gcggatatgcatgacagttaaatca

SEQ ID NO: 106937 - DNA, 25 bp, Probe sequence
gaataggcgcctgttaaggttcacg

SEQ ID NO: 106938 - DNA, 25 bp, Probe sequence
gtgcatattaatctgaaaattccta

SEQ ID NO: 106939 - DNA, 25 bp, Probe sequence
ggggcgttatactttatataagcat

SEQ ID NO: 106940 - DNA, 25 bp, Probe sequence
ggttcacgtttgaatacgtaccttg

SEQ ID NO: 106941 - DNA, 25 bp, Probe sequence
ggcgcctgttaaggttcacgtttga

SEQ ID NO: 106942 - DNA, 25 bp, Probe sequence
taatgtacctacctaaaatgaaaat

SEQ ID NO: 106943 - DNA, 25 bp, Probe sequence
taccttgaggggcgttatactttat

SEQ ID NO: 106944 - DNA, 25 bp, Probe sequence
ttgacaataataatgtacctaccta

SEQ ID NO: 106945 - DNA, 25 bp, Probe sequence
attcactgatctttagggaactaag

SEQ ID NO: 106946 - DNA, 25 bp, Probe sequence
atgagagtattggcgtttttgtttt

SEQ ID NO: 106947 - DNA, 25 bp, Probe sequence
agtgataatttatactatgtcagta

SEQ ID NO: 106948 - DNA, 25 bp, Probe sequence
aaatgacgtcaatattctctaacat

SEQ ID NO: 106949 - DNA, 25 bp, Probe sequence
aatgagagcggtttattcactgatc

SEQ ID NO: 106950 - DNA, 25 bp, Probe sequence
aatcaaatgacgtcaatattctcta

SEQ ID NO: 106951 - DNA, 25 bp, Probe sequence
gcggtttattcactgatctttaggg

SEQ ID NO: 106952 - DNA, 25 bp, Probe sequence
gagcggtttattcactgatctttag

SEQ ID NO: 106953 - DNA, 25 bp, Probe sequence
gagagcggtttattcactgatcttt

SEQ ID NO: 106954 - DNA, 25 bp, Probe sequence
gagagtattggcgtttttgttttat

SEQ ID NO: 106955 - DNA, 25 bp, Probe sequence
gtttattcactgatctttagggaac

SEQ ID NO: 106956 - DNA, 25 bp, Probe sequence
gtcaatattctctaacatgagagta

SEQ ID NO: 106957 - DNA, 25 bp, Probe sequence
tgtcagtatgattgagagtgattca

SEQ ID NO: 106958 - DNA, 25 bp, Probe sequence
tgacgtcaatattctctaacatgag

SEQ ID NO: 106959 - DNA, 25 bp, Probe sequence
tactatgtcagtatgattgagagtg

SEQ ID NO: 106960 - DNA, 25 bp, Probe sequence
attacattacttctgatatttatta

SEQ ID NO: 106961 - DNA, 25 bp, Probe sequence
agagtgttttgattattgggaggat

SEQ ID NO: 106962 - DNA, 25 bp, Probe sequence
aaagttataattatttgcatactaa

SEQ ID NO: 106963 - DNA, 25 bp, Probe sequence
aacaaagcccgcaagacacctaatc

SEQ ID NO: 106964 - DNA, 25 bp, Probe sequence
aattgagtcgctaatgactatatgt

SEQ ID NO: 106965 - DNA, 25 bp, Probe sequence
caaatcccatgttaacggtgcagaa

SEQ ID NO: 106966 - DNA, 25 bp, Probe sequence
cttgatgcactaaacttttgaaata

SEQ ID NO: 106967 - DNA, 25 bp, Probe sequence
ctctgttatagtttgttttgtcgca

SEQ ID NO: 106968 - DNA, 25 bp, Probe sequence
ccgcaagacacctaatctctgttat

SEQ ID NO: 106969 - DNA, 25 bp, Probe sequence
gaagctttattaggaacagattaca

SEQ ID NO: 106970 - DNA, 25 bp, Probe sequence
gacacctaatctctgttatagtttg

SEQ ID NO: 106971 - DNA, 25 bp, Probe sequence
gtgttgtaaacattctaattggtat

SEQ ID NO: 106972 - DNA, 25 bp, Probe sequence
ggtatattacattcaatgaagcttt

SEQ ID NO: 106973 - DNA, 25 bp, Probe sequence
tacattatgataacaaagcccgcaa

SEQ ID NO: 106974 - DNA, 25 bp, Probe sequence
tttattttcaaatcccatgttaacg

SEQ ID NO: 106975 - DNA, 25 bp, Probe sequence
atatcttaatgattctgttacagta

SEQ ID NO: 106976 - DNA, 25 bp, Probe sequence
atatcgcttggtttaaattagagga

SEQ ID NO: 106977 - DNA, 25 bp, Probe sequence
ataggctgcatttcgctttattttc

SEQ ID NO: 106978 - DNA, 25 bp, Probe sequence
acgtgatatatcgcttggtttaaat

SEQ ID NO: 106979 - DNA, 25 bp, Probe sequence
aaaagtgacacatagcgtttaaata

SEQ ID NO: 106980 - DNA, 25 bp, Probe sequence
aaggctgacgtgatatatcgcttgg

SEQ ID NO: 106981 - DNA, 25 bp, Probe sequence
aatacatggtaatttattcattata

SEQ ID NO: 106982 - DNA, 25 bp, Probe sequence
aatttatatgtggtttgcagtaatg

SEQ ID NO: 106983 - DNA, 25 bp, Probe sequence
ctgtaataattgttttctacttaat

SEQ ID NO: 106984 - DNA, 25 bp, Probe sequence
gctgcatttcgctttattttcaata

SEQ ID NO: 106985 - DNA, 25 bp, Probe sequence
gaatctatgataatctatgttatgt

SEQ ID NO: 106986 - DNA, 25 bp, Probe sequence
gacaatcttagtaatattcatttta

SEQ ID NO: 106987 - DNA, 25 bp, Probe sequence
gtaaattcgaatagcatatcttaat

SEQ ID NO: 106988 - DNA, 25 bp, Probe sequence
tagaggataggctgcatttcgcttt

SEQ ID NO: 106989 - DNA, 25 bp, Probe sequence
ttcgctttattttcaatacatggta

SEQ ID NO: 106990 - DNA, 25 bp, Probe sequence
attggactttattgtattactgcta

SEQ ID NO: 106991 - DNA, 25 bp, Probe sequence
attactgctaaaatacttgtcttta

SEQ ID NO: 106992 - DNA, 25 bp, Probe sequence
atatatagctcttcccatagaaatt

SEQ ID NO: 106993 - DNA, 25 bp, Probe sequence
agctcttcccatagaaattggggag

SEQ ID NO: 106994 - DNA, 25 bp, Probe sequence
aaacttcatttgaggctgtactgag

SEQ ID NO: 106995 - DNA, 25 bp, Probe sequence
aactaaacgcgcattttatgattaa

SEQ ID NO: 106996 - DNA, 25 bp, Probe sequence
aatacttgtctttattaagtgccaa

SEQ ID NO: 106997 - DNA, 25 bp, Probe sequence
gacattaaatatatagctcttccca

SEQ ID NO: 106998 - DNA, 25 bp, Probe sequence
gatacaaactaaacgcgcattttat

SEQ ID NO: 106999 - DNA, 25 bp, Probe sequence
gtactgagtacactagatacaaact

SEQ ID NO: 107000 - DNA, 25 bp, Probe sequence
gtctttattaagtgccaagtggaat

SEQ ID NO: 107001 - DNA, 25 bp, Probe sequence
gtggaataaaacttcatttgaggct

SEQ ID NO: 107002 - DNA, 25 bp, Probe sequence
tagggaaatttattggactttattg

SEQ ID NO: 107003 - DNA, 25 bp, Probe sequence
ttaaatatatagctcttcccataga

SEQ ID NO: 107004 - DNA, 25 bp, Probe sequence
ttcatttgaggctgtactgagtaca

SEQ ID NO: 107005 - DNA, 25 bp, Probe sequence
agggcacatatttcacattacagta

SEQ ID NO: 107006 - DNA, 25 bp, Probe sequence
aaaacagccatatttcaacattaca

SEQ ID NO: 107007 - DNA, 25 bp, Probe sequence
aacttgcactacgacattcaaattc

SEQ ID NO: 107008 - DNA, 25 bp, Probe sequence
aacatatgtgttgattgctttttaa

SEQ ID NO: 107009 - DNA, 25 bp, Probe sequence
aacttacaattattactggaggatt

SEQ ID NO: 107010 - DNA, 25 bp, Probe sequence
aatagcaatcaatacatgtgcagaa

SEQ ID NO: 107011 - DNA, 25 bp, Probe sequence
gacaatttaaacttgcactacgaca

SEQ ID NO: 107012 - DNA, 25 bp, Probe sequence
gagttgcagtttatttgtgcttata

SEQ ID NO: 107013 - DNA, 25 bp, Probe sequence
gttgattgctttttaattgcgttta

SEQ ID NO: 107014 - DNA, 25 bp, Probe sequence
gttaaagactatttcaagggttgat

SEQ ID NO: 107015 - DNA, 25 bp, Probe sequence
gttacatgtcagatatattacagct

SEQ ID NO: 107016 - DNA, 25 bp, Probe sequence
gtgatatagtgagtaccgttgaaag

SEQ ID NO: 107017 - DNA, 25 bp, Probe sequence
gtgtaatttactggctggttttttg

SEQ ID NO: 107018 - DNA, 25 bp, Probe sequence
gggttgattggattctaaagggcac

SEQ ID NO: 107019 - DNA, 25 bp, Probe sequence
tactggctggttttttgtgatatag

SEQ ID NO: 107020 - DNA, 25 bp, Probe sequence
atagatgatactgctagcctaaata

SEQ ID NO: 107021 - DNA, 25 bp, Probe sequence
atgatactgctagcctaaatataac

SEQ ID NO: 107022 - DNA, 25 bp, Probe sequence
agttatagatgatactgctagccta

SEQ ID NO: 107023 - DNA, 25 bp, Probe sequence
agatgatactgctagcctaaatata

SEQ ID NO: 107024 - DNA, 25 bp, Probe sequence
actgctagcctaaatataacaacat

SEQ ID NO: 107025 - DNA, 25 bp, Probe sequence
ctgctagcctaaatataacaacatc

SEQ ID NO: 107026 - DNA, 25 bp, Probe sequence
gctagcctaaatataacaacatcgg

SEQ ID NO: 107027 - DNA, 25 bp, Probe sequence
gagttatagatgatactgctagcct

SEQ ID NO: 107028 - DNA, 25 bp, Probe sequence
gatgatactgctagcctaaatataa

SEQ ID NO: 107029 - DNA, 25 bp, Probe sequence
gatactgctagcctaaatataacaa

SEQ ID NO: 107030 - DNA, 25 bp, Probe sequence
gttatagatgatactgctagcctaa

SEQ ID NO: 107031 - DNA, 25 bp, Probe sequence
gtcttgagttatagatgatactgct

SEQ ID NO: 107032 - DNA, 25 bp, Probe sequence
tagatgatactgctagcctaaatat

SEQ ID NO: 107033 - DNA, 25 bp, Probe sequence
tatagatgatactgctagcctaaat

SEQ ID NO: 107034 - DNA, 25 bp, Probe sequence
ttatagatgatactgctagcctaaa

SEQ ID NO: 107035 - DNA, 25 bp, Probe sequence
attatcagtatcttctattatattg

SEQ ID NO: 107036 - DNA, 25 bp, Probe sequence
atcagtatcttctattatattgtca

SEQ ID NO: 107037 - DNA, 25 bp, Probe sequence
atctgttgttttaacacttattatc

SEQ ID NO: 107038 - DNA, 25 bp, Probe sequence
acctaacatctgttgttttaacact

SEQ ID NO: 107039 - DNA, 25 bp, Probe sequence
acacttattatcagtatcttctatt

SEQ ID NO: 107040 - DNA, 25 bp, Probe sequence
aacatctgttgttttaacacttatt

SEQ ID NO: 107041 - DNA, 25 bp, Probe sequence
cactacctaacatctgttgttttaa

SEQ ID NO: 107042 - DNA, 25 bp, Probe sequence
cttattatcagtatcttctattata

SEQ ID NO: 107043 - DNA, 25 bp, Probe sequence
ctacctaacatctgttgttttaaca

SEQ ID NO: 107044 - DNA, 25 bp, Probe sequence
gttgttttaacacttattatcagta

SEQ ID NO: 107045 - DNA, 25 bp, Probe sequence
gttcactacctaacatctgttgttt

SEQ ID NO: 107046 - DNA, 25 bp, Probe sequence
tgttcactacctaacatctgttgtt

SEQ ID NO: 107047 - DNA, 25 bp, Probe sequence
taacacttattatcagtatcttcta

SEQ ID NO: 107048 - DNA, 25 bp, Probe sequence
ttcactacctaacatctgttgtttt

SEQ ID NO: 107049 - DNA, 25 bp, Probe sequence
ttgttcactacctaacatctgttgt

SEQ ID NO: 107050 - DNA, 25 bp, Probe sequence
attgtgtgtacaagtatgaacctaa

SEQ ID NO: 107051 - DNA, 25 bp, Probe sequence
atgttaaattttattgtgtgtacaa

SEQ ID NO: 107052 - DNA, 25 bp, Probe sequence
acggctaatcaatcgtaatatgtta

SEQ ID NO: 107053 - DNA, 25 bp, Probe sequence
catagtgatttcaagatgcatgact

SEQ ID NO: 107054 - DNA, 25 bp, Probe sequence
ctagacacggctaatcaatcgtaat

SEQ ID NO: 107055 - DNA, 25 bp, Probe sequence
gaacctaagtcacatagtgatttca

SEQ ID NO: 107056 - DNA, 25 bp, Probe sequence
gacacggctaatcaatcgtaatatg

SEQ ID NO: 107057 - DNA, 25 bp, Probe sequence
gatgcatgactaaataccaagtttt

SEQ ID NO: 107058 - DNA, 25 bp, Probe sequence
gtatgaacctaagtcacatagtgat

SEQ ID NO: 107059 - DNA, 25 bp, Probe sequence
gtacaagtatgaacctaagtcacat

SEQ ID NO: 107060 - DNA, 25 bp, Probe sequence
gtcacatagtgatttcaagatgcat

SEQ ID NO: 107061 - DNA, 25 bp, Probe sequence
gtgatttcaagatgcatgactaaat

SEQ ID NO: 107062 - DNA, 25 bp, Probe sequence
gtgtgtacaagtatgaacctaagtc

SEQ ID NO: 107063 - DNA, 25 bp, Probe sequence
ggctaatcaatcgtaatatgttaaa

SEQ ID NO: 107064 - DNA, 25 bp, Probe sequence
tagacacggctaatcaatcgtaata

SEQ ID NO: 107065 - DNA, 25 bp, Probe sequence
attgtcatatcctccttagaatcaa

SEQ ID NO: 107066 - DNA, 25 bp, Probe sequence
atcctccttagaatcaagtgttgat

SEQ ID NO: 107067 - DNA, 25 bp, Probe sequence
atgttattgaagtgtcgtttgatat

SEQ ID NO: 107068 - DNA, 25 bp, Probe sequence
catccagtaatgtttttagtttctc

SEQ ID NO: 107069 - DNA, 25 bp, Probe sequence
cggtcttttgaccagcagatttttg

SEQ ID NO: 107070 - DNA, 25 bp, Probe sequence
gacacgattttaatagtagtacgat

SEQ ID NO: 107071 - DNA, 25 bp, Probe sequence
gtgtcgtttgatatacatgtctgca

SEQ ID NO: 107072 - DNA, 25 bp, Probe sequence
gataatttatcaacacatccagtaa

SEQ ID NO: 107073 - DNA, 25 bp, Probe sequence
gttgatatattttgagtttatttct

SEQ ID NO: 107074 - DNA, 25 bp, Probe sequence
gtttctcggtcttttgaccagcaga

SEQ ID NO: 107075 - DNA, 25 bp, Probe sequence
gtagtacgatggcaaagtgatgtta

SEQ ID NO: 107076 - DNA, 25 bp, Probe sequence
ggggtttgagacacgattttaatag

SEQ ID NO: 107077 - DNA, 25 bp, Probe sequence
tgatatacatgtctgcaatgttgtt

SEQ ID NO: 107078 - DNA, 25 bp, Probe sequence
ttagtttctcggtcttttgaccagc

SEQ ID NO: 107079 - DNA, 25 bp, Probe sequence
ttgaccagcagatttttggaattaa

SEQ ID NO: 107080 - DNA, 25 bp, Probe sequence
atgggctttgtttatgaggtcagtt

SEQ ID NO: 107081 - DNA, 25 bp, Probe sequence
accttaagtgcaatacctcgtgagc

SEQ ID NO: 107082 - DNA, 25 bp, Probe sequence
aagtgcaatacctcgtgagcaaata

SEQ ID NO: 107083 - DNA, 25 bp, Probe sequence
cagtatgggctttgtttatgaggtc

SEQ ID NO: 107084 - DNA, 25 bp, Probe sequence
cttcaatcagtatgggctttgttta

SEQ ID NO: 107085 - DNA, 25 bp, Probe sequence
gcaccttaagtgcaatacctcgtga

SEQ ID NO: 107086 - DNA, 25 bp, Probe sequence
gaggtcagttggcaccttaagtgca

SEQ ID NO: 107087 - DNA, 25 bp, Probe sequence
gttggcaccttaagtgcaatacctc

SEQ ID NO: 107088 - DNA, 25 bp, Probe sequence
gtttatgaggtcagttggcacctta

SEQ ID NO: 107089 - DNA, 25 bp, Probe sequence
gtatgggctttgtttatgaggtcag

SEQ ID NO: 107090 - DNA, 25 bp, Probe sequence
ggtcagttggcaccttaagtgcaat

SEQ ID NO: 107091 - DNA, 25 bp, Probe sequence
ggctttgtttatgaggtcagttggc

SEQ ID NO: 107092 - DNA, 25 bp, Probe sequence
tgtcttcaatcagtatgggctttgt

SEQ ID NO: 107093 - DNA, 25 bp, Probe sequence
tatgaggtcagttggcaccttaagt

SEQ ID NO: 107094 - DNA, 25 bp, Probe sequence
ttaagtgcaatacctcgtgagcaaa

SEQ ID NO: 107095 - DNA, 25 bp, Probe sequence
atgaagtttaatgtgggagtgggac

SEQ ID NO: 107096 - DNA, 25 bp, Probe sequence
ataaataaaaagcccatacagagat

SEQ ID NO: 107097 - DNA, 25 bp, Probe sequence
agatgaagtttaatgtgggagtggg

SEQ ID NO: 107098 - DNA, 25 bp, Probe sequence
aaagcccatacagagatgaagttta

SEQ ID NO: 107099 - DNA, 25 bp, Probe sequence
aaaaagcccatacagagatgaagtt

SEQ ID NO: 107100 - DNA, 25 bp, Probe sequence
aaaagcccatacagagatgaagttt

SEQ ID NO: 107101 - DNA, 25 bp, Probe sequence
aagcccatacagagatgaagtttaa

SEQ ID NO: 107102 - DNA, 25 bp, Probe sequence
aagtttaatgtgggagtgggacaga

SEQ ID NO: 107103 - DNA, 25 bp, Probe sequence
aataaaaagcccatacagagatgaa

SEQ ID NO: 107104 - DNA, 25 bp, Probe sequence
gcccatacagagatgaagtttaatg

SEQ ID NO: 107105 - DNA, 25 bp, Probe sequence
gaataaataaaaagcccatacagag

SEQ ID NO: 107106 - DNA, 25 bp, Probe sequence
gaagtttaatgtgggagtgggacag

SEQ ID NO: 107107 - DNA, 25 bp, Probe sequence
gatgaagtttaatgtgggagtggga

SEQ ID NO: 107108 - DNA, 25 bp, Probe sequence
gagatgaagtttaatgtgggagtgg

SEQ ID NO: 107109 - DNA, 25 bp, Probe sequence
taaaaagcccatacagagatgaagt

SEQ ID NO: 107110 - DNA, 25 bp, Probe sequence
attctctaaaattgacaaacggata

SEQ ID NO: 107111 - DNA, 25 bp, Probe sequence
atttgcaataactattaaatatcat

SEQ ID NO: 107112 - DNA, 25 bp, Probe sequence
acgtgttaagaaagttagcaatgaa

SEQ ID NO: 107113 - DNA, 25 bp, Probe sequence
aaattgacaaacggataactatccg

SEQ ID NO: 107114 - DNA, 25 bp, Probe sequence
aaacgtgttaagaaagttagcaatg

SEQ ID NO: 107115 - DNA, 25 bp, Probe sequence
aattctctaaaattgacaaacggat

SEQ ID NO: 107116 - DNA, 25 bp, Probe sequence
caatgaatttgcaataactattaaa

SEQ ID NO: 107117 - DNA, 25 bp, Probe sequence
gcaatgaatttgcaataactattaa

SEQ ID NO: 107118 - DNA, 25 bp, Probe sequence
gaatttgcaataactattaaatatc

SEQ ID NO: 107119 - DNA, 25 bp, Probe sequence
gaaagttagcaatgaatttgcaata

SEQ ID NO: 107120 - DNA, 25 bp, Probe sequence
gacaaacggataactatccgtttat

SEQ ID NO: 107121 - DNA, 25 bp, Probe sequence
gattacacctacttaaaattctcta

SEQ ID NO: 107122 - DNA, 25 bp, Probe sequence
taaaattgacaaacggataactatc

SEQ ID NO: 107123 - DNA, 25 bp, Probe sequence
taaaattctctaaaattgacaaacg

SEQ ID NO: 107124 - DNA, 25 bp, Probe sequence
tacttaaaattctctaaaattgaca

SEQ ID NO: 107125 - DNA, 25 bp, Probe sequence
ataagcttggtcagccatcaaatat

SEQ ID NO: 107126 - DNA, 25 bp, Probe sequence
agctgttttattagagaacgatcaa

SEQ ID NO: 107127 - DNA, 25 bp, Probe sequence
actgtccaagctgttttattagaga

SEQ ID NO: 107128 - DNA, 25 bp, Probe sequence
acaaaaataagcttggtcagccatc

SEQ ID NO: 107129 - DNA, 25 bp, Probe sequence
aaataagcttggtcagccatcaaat

SEQ ID NO: 107130 - DNA, 25 bp, Probe sequence
aagcttggtcagccatcaaatataa

SEQ ID NO: 107131 - DNA, 25 bp, Probe sequence
aagagaatggttaacatgccttcat

SEQ ID NO: 107132 - DNA, 25 bp, Probe sequence
catgccttcatgtataataacgagt

SEQ ID NO: 107133 - DNA, 25 bp, Probe sequence
gaatggttaacatgccttcatgtat

SEQ ID NO: 107134 - DNA, 25 bp, Probe sequence
gaaaactgtccaagctgttttatta

SEQ ID NO: 107135 - DNA, 25 bp, Probe sequence
gagaatggttaacatgccttcatgt

SEQ ID NO: 107136 - DNA, 25 bp, Probe sequence
gtataataacgagttgatttgaacg

SEQ ID NO: 107137 - DNA, 25 bp, Probe sequence
gtccaagctgttttattagagaacg

SEQ ID NO: 107138 - DNA, 25 bp, Probe sequence
taatttgaaaactgtccaagctgtt

SEQ ID NO: 107139 - DNA, 25 bp, Probe sequence
ttggtcagccatcaaatataatttg

SEQ ID NO: 107140 - DNA, 25 bp, Probe sequence
atcttggaatatgctattcatatga

SEQ ID NO: 107141 - DNA, 25 bp, Probe sequence
atgaagtataagaggagagtcgcag

SEQ ID NO: 107142 - DNA, 25 bp, Probe sequence
agatctatcttggaatatgctattc

SEQ ID NO: 107143 - DNA, 25 bp, Probe sequence
gaatatagagtcatgtcagtcaata

SEQ ID NO: 107144 - DNA, 25 bp, Probe sequence
gatctatcttggaatatgctattca

SEQ ID NO: 107145 - DNA, 25 bp, Probe sequence
gagatctatcttggaatatgctatt

SEQ ID NO: 107146 - DNA, 25 bp, Probe sequence
gagtcatgtcagtcaataggagatc

SEQ ID NO: 107147 - DNA, 25 bp, Probe sequence
gtcaataggagatctatcttggaat

SEQ ID NO: 107148 - DNA, 25 bp, Probe sequence
gtcagtcaataggagatctatcttg

SEQ ID NO: 107149 - DNA, 25 bp, Probe sequence
gtcatgtcagtcaataggagatcta

SEQ ID NO: 107150 - DNA, 25 bp, Probe sequence
ggagatctatcttggaatatgctat

SEQ ID NO: 107151 - DNA, 25 bp, Probe sequence
ggaatatgctattcatatgaagtat

SEQ ID NO: 107152 - DNA, 25 bp, Probe sequence
tcatgtcagtcaataggagatctat

SEQ ID NO: 107153 - DNA, 25 bp, Probe sequence
tagagtcatgtcagtcaataggaga

SEQ ID NO: 107154 - DNA, 25 bp, Probe sequence
tatagagtcatgtcagtcaatagga

SEQ ID NO: 107155 - DNA, 25 bp, Probe sequence
atctttattggggagacgacgaaat

SEQ ID NO: 107156 - DNA, 25 bp, Probe sequence
atgtcattcataatcatttgaacta

SEQ ID NO: 107157 - DNA, 25 bp, Probe sequence
aaagacacataccaacttccgaaat

SEQ ID NO: 107158 - DNA, 25 bp, Probe sequence
aatatgatttatgtctcaccgccaa

SEQ ID NO: 107159 - DNA, 25 bp, Probe sequence
cataccaacttccgaaatgtagatg

SEQ ID NO: 107160 - DNA, 25 bp, Probe sequence
gaaatactttatctttattggggag

SEQ ID NO: 107161 - DNA, 25 bp, Probe sequence
gaaatttcttaaggataggtctata

SEQ ID NO: 107162 - DNA, 25 bp, Probe sequence
gatgaattctctacaataacggaag

SEQ ID NO: 107163 - DNA, 25 bp, Probe sequence
gataggtctatactttataaatcgt

SEQ ID NO: 107164 - DNA, 25 bp, Probe sequence
gtactgaggctggatgataccatta

SEQ ID NO: 107165 - DNA, 25 bp, Probe sequence
gtctcaccgccaaaatgttatctcc

SEQ ID NO: 107166 - DNA, 25 bp, Probe sequence
ggatgataccattaaatgtcattca

SEQ ID NO: 107167 - DNA, 25 bp, Probe sequence
tgttatctccaagtactgaggctgg

SEQ ID NO: 107168 - DNA, 25 bp, Probe sequence
taaccgtagcatccttaaatttaat

SEQ ID NO: 107169 - DNA, 25 bp, Probe sequence
ttgaactaaccgtagcatccttaaa

SEQ ID NO: 107170 - DNA, 25 bp, Probe sequence
attgaatgtttgaatatcatatatt

SEQ ID NO: 107171 - DNA, 25 bp, Probe sequence
atttaagtattattgaatgtttgaa

SEQ ID NO: 107172 - DNA, 25 bp, Probe sequence
atatattgatacagtttctaataat

SEQ ID NO: 107173 - DNA, 25 bp, Probe sequence
atcatatattgatacagtttctaat

SEQ ID NO: 107174 - DNA, 25 bp, Probe sequence
atgatacatatttattgatacaata

SEQ ID NO: 107175 - DNA, 25 bp, Probe sequence
aatgatacatatttattgatacaat

SEQ ID NO: 107176 - DNA, 25 bp, Probe sequence
catatattgatacagtttctaataa

SEQ ID NO: 107177 - DNA, 25 bp, Probe sequence
gaatgatacatatttattgatacaa

SEQ ID NO: 107178 - DNA, 25 bp, Probe sequence
gtattattgaatgtttgaatatcat

SEQ ID NO: 107179 - DNA, 25 bp, Probe sequence
gtgattttataactttttgttcaat

SEQ ID NO: 107180 - DNA, 25 bp, Probe sequence
tgattttataactttttgttcaata

SEQ ID NO: 107181 - DNA, 25 bp, Probe sequence
tcatatattgatacagtttctaata

SEQ ID NO: 107182 - DNA, 25 bp, Probe sequence
taatcacaaaacaatatttaagtat

SEQ ID NO: 107183 - DNA, 25 bp, Probe sequence
tttgttcaataaaattctaggaatg

SEQ ID NO: 107184 - DNA, 25 bp, Probe sequence
ttgagttgcaataaaagtgatttta

SEQ ID NO: 107185 - DNA, 25 bp, Probe sequence
attttatgaagagaaggccttcagt

SEQ ID NO: 107186 - DNA, 25 bp, Probe sequence
atatgcacagatattttatgaagag

SEQ ID NO: 107187 - DNA, 25 bp, Probe sequence
atgcacagatattttatgaagagaa

SEQ ID NO: 107188 - DNA, 25 bp, Probe sequence
agatattttatgaagagaaggcctt

SEQ ID NO: 107189 - DNA, 25 bp, Probe sequence
agacgttagattgagataaatagat

SEQ ID NO: 107190 - DNA, 25 bp, Probe sequence
aagacgttagattgagataaataga

SEQ ID NO: 107191 - DNA, 25 bp, Probe sequence
cagatattttatgaagagaaggcct

SEQ ID NO: 107192 - DNA, 25 bp, Probe sequence
gcacagatattttatgaagagaagg

SEQ ID NO: 107193 - DNA, 25 bp, Probe sequence
gagataaatagataatatgcacaga

SEQ ID NO: 107194 - DNA, 25 bp, Probe sequence
gataatatgcacagatattttatga

SEQ ID NO: 107195 - DNA, 25 bp, Probe sequence
gataaatagataatatgcacagata

SEQ ID NO: 107196 - DNA, 25 bp, Probe sequence
gatattttatgaagagaaggccttc

SEQ ID NO: 107197 - DNA, 25 bp, Probe sequence
tgcacagatattttatgaagagaag

SEQ ID NO: 107198 - DNA, 25 bp, Probe sequence
tatgcacagatattttatgaagaga

SEQ ID NO: 107199 - DNA, 25 bp, Probe sequence
ttaagacgttagattgagataaata

SEQ ID NO: 107200 - DNA, 25 bp, Probe sequence
atagactagcatttccctacataat

SEQ ID NO: 107201 - DNA, 25 bp, Probe sequence
aggcttactatcctcaacttaatat

SEQ ID NO: 107202 - DNA, 25 bp, Probe sequence
catttccctacataatttcctagtt

SEQ ID NO: 107203 - DNA, 25 bp, Probe sequence
agtaagtagattggaaggtgtttgt

SEQ ID NO: 107204 - DNA, 25 bp, Probe sequence
agttttgaaaattgacgcaagtttg

SEQ ID NO: 107205 - DNA, 25 bp, Probe sequence
aaatcatcctaattaggcaatatta

SEQ ID NO: 107206 - DNA, 25 bp, Probe sequence
aagattaaatcatcctaattaggca

SEQ ID NO: 107207 - DNA, 25 bp, Probe sequence
gctcctatttcattatatttgaggc

SEQ ID NO: 107208 - DNA, 25 bp, Probe sequence
gactagcatttccctacataatttc

SEQ ID NO: 107209 - DNA, 25 bp, Probe sequence
gagtatgctcctatttcattatatt

SEQ ID NO: 107210 - DNA, 25 bp, Probe sequence
tgacgcaagtttgaataacgttttt

SEQ ID NO: 107211 - DNA, 25 bp, Probe sequence
tcattatatttgaggcttactatcc

SEQ ID NO: 107212 - DNA, 25 bp, Probe sequence
tactatcctcaacttaatatatgtg

SEQ ID NO: 107213 - DNA, 25 bp, Probe sequence
tagcatttccctacataatttccta

SEQ ID NO: 107214 - DNA, 25 bp, Probe sequence
tttaatagactagcatttccctaca

SEQ ID NO: 107215 - DNA, 25 bp, Probe sequence
atcttcttgagttatatcataattt

SEQ ID NO: 107216 - DNA, 25 bp, Probe sequence
acgcctccgttataaaacgctatat

SEQ ID NO: 107217 - DNA, 25 bp, Probe sequence
aacgctatatttaatgatatgtgat

SEQ ID NO: 107218 - DNA, 25 bp, Probe sequence
aagacgattcagcaagttttaaagt

SEQ ID NO: 107219 - DNA, 25 bp, Probe sequence
aatggtgataaatatatcttcttga

SEQ ID NO: 107220 - DNA, 25 bp, Probe sequence
cataattttaataagacgattcagc

SEQ ID NO: 107221 - DNA, 25 bp, Probe sequence
gcctccgttataaaacgctatattt

SEQ ID NO: 107222 - DNA, 25 bp, Probe sequence
gacgattcagcaagttttaaagtgt

SEQ ID NO: 107223 - DNA, 25 bp, Probe sequence
gataaatatatcttcttgagttata

SEQ ID NO: 107224 - DNA, 25 bp, Probe sequence
gatatgtgatatttaagccattatt

SEQ ID NO: 107225 - DNA, 25 bp, Probe sequence
gattcagcaagttttaaagtgttat

SEQ ID NO: 107226 - DNA, 25 bp, Probe sequence
gtgatatttaagccattattttgaa

SEQ ID NO: 107227 - DNA, 25 bp, Probe sequence
taataagacgattcagcaagtttta

SEQ ID NO: 107228 - DNA, 25 bp, Probe sequence
taaagtgttatttgactacgttgga

SEQ ID NO: 107229 - DNA, 25 bp, Probe sequence
tatatcttcttgagttatatcataa

SEQ ID NO: 107230 - DNA, 25 bp, Probe sequence
attactaacaccatgttacattaaa

SEQ ID NO: 107231 - DNA, 25 bp, Probe sequence
atttctaacttttttgactgacatt

SEQ ID NO: 107232 - DNA, 25 bp, Probe sequence
aaacacctcaatgtagtatttttat

SEQ ID NO: 107233 - DNA, 25 bp, Probe sequence
aacttttttgactgacatttaatat

SEQ ID NO: 107234 - DNA, 25 bp, Probe sequence
aatgcttttagatacataagggact

SEQ ID NO: 107235 - DNA, 25 bp, Probe sequence
aatgaaaatgacacagagacgtatg

SEQ ID NO: 107236 - DNA, 25 bp, Probe sequence
cttttacgatgaattgaagtcaatc

SEQ ID NO: 107237 - DNA, 25 bp, Probe sequence
gaagtcaatcttttgtaaaatacac

SEQ ID NO: 107238 - DNA, 25 bp, Probe sequence
gacgtatgtgttgtttagtgtttta

SEQ ID NO: 107239 - DNA, 25 bp, Probe sequence
gagacgtatgtgttgtttagtgttt

SEQ ID NO: 107240 - DNA, 25 bp, Probe sequence
gatacataagggactttcgaaatat

SEQ ID NO: 107241 - DNA, 25 bp, Probe sequence
gtatttttattactaacaccatgtt

SEQ ID NO: 107242 - DNA, 25 bp, Probe sequence
gtaaaacacctcaatgtagtatttt

SEQ ID NO: 107243 - DNA, 25 bp, Probe sequence
gggactttcgaaatataaatgcatt

SEQ ID NO: 107244 - DNA, 25 bp, Probe sequence
tgaatttctaacttttttgactgac

SEQ ID NO: 107245 - DNA, 25 bp, Probe sequence
ataaggcaagccatgaatcgagagt

SEQ ID NO: 107246 - DNA, 25 bp, Probe sequence
atcgagagtggcttgccttgctaaa

SEQ ID NO: 107247 - DNA, 25 bp, Probe sequence
atgaatcgagagtggcttgccttgc

SEQ ID NO: 107248 - DNA, 25 bp, Probe sequence
agtggcttgccttgctaaataacat

SEQ ID NO: 107249 - DNA, 25 bp, Probe sequence
aatcgagagtggcttgccttgctaa

SEQ ID NO: 107250 - DNA, 25 bp, Probe sequence
catgaatcgagagtggcttgccttg

SEQ ID NO: 107251 - DNA, 25 bp, Probe sequence
gccttgctaaataacataagcttat

SEQ ID NO: 107252 - DNA, 25 bp, Probe sequence
gaatcgagagtggcttgccttgcta

SEQ ID NO: 107253 - DNA, 25 bp, Probe sequence
gagagtggcttgccttgctaaataa

SEQ ID NO: 107254 - DNA, 25 bp, Probe sequence
gagtggcttgccttgctaaataaca

SEQ ID NO: 107255 - DNA, 25 bp, Probe sequence
gtggcttgccttgctaaataacata

SEQ ID NO: 107256 - DNA, 25 bp, Probe sequence
ggcttgccttgctaaataacataag

SEQ ID NO: 107257 - DNA, 25 bp, Probe sequence
tcgagagtggcttgccttgctaaat

SEQ ID NO: 107258 - DNA, 25 bp, Probe sequence
taaggcaagccatgaatcgagagtg

SEQ ID NO: 107259 - DNA, 25 bp, Probe sequence
taagcttattaaatgatatctttat

SEQ ID NO: 107260 - DNA, 25 bp, Probe sequence
atcaaaatcgaccgtaattcctgca

SEQ ID NO: 107261 - DNA, 25 bp, Probe sequence
atcactatgtcacttttaatcaaaa

SEQ ID NO: 107262 - DNA, 25 bp, Probe sequence
caaaatcgaccgtaattcctgcatg

SEQ ID NO: 107263 - DNA, 25 bp, Probe sequence
ctatcactatgtcacttttaatcaa

SEQ ID NO: 107264 - DNA, 25 bp, Probe sequence
ctcttctatcactatgtcactttta

SEQ ID NO: 107265 - DNA, 25 bp, Probe sequence
gccacaccttggtttaagattccaa

SEQ ID NO: 107266 - DNA, 25 bp, Probe sequence
gtcacttttaatcaaaatcgaccgt

SEQ ID NO: 107267 - DNA, 25 bp, Probe sequence
ggtttaagattccaagcgtgtggcc

SEQ ID NO: 107268 - DNA, 25 bp, Probe sequence
ggccacaccttggtttaagattcca

SEQ ID NO: 107269 - DNA, 25 bp, Probe sequence
tctcttctatcactatgtcactttt

SEQ ID NO: 107270 - DNA, 25 bp, Probe sequence
tcttctatcactatgtcacttttaa

SEQ ID NO: 107271 - DNA, 25 bp, Probe sequence
taagattccaagcgtgtggccttct

SEQ ID NO: 107272 - DNA, 25 bp, Probe sequence
ttaagattccaagcgtgtggccttc

SEQ ID NO: 107273 - DNA, 25 bp, Probe sequence
ttctatcactatgtcacttttaatc

SEQ ID NO: 107274 - DNA, 25 bp, Probe sequence
ttctcttctatcactatgtcacttt

SEQ ID NO: 107275 - DNA, 25 bp, Probe sequence
ataaaatgctcctacaaaagaagat

SEQ ID NO: 107276 - DNA, 25 bp, Probe sequence
ataataaaatgctcctacaaaagaa

SEQ ID NO: 107277 - DNA, 25 bp, Probe sequence
actcttgataataaaatgctcctac

SEQ ID NO: 107278 - DNA, 25 bp, Probe sequence
aataaaatgctcctacaaaagaaga

SEQ ID NO: 107279 - DNA, 25 bp, Probe sequence
cttgataataaaatgctcctacaaa

SEQ ID NO: 107280 - DNA, 25 bp, Probe sequence
ctcttgataataaaatgctcctaca

SEQ ID NO: 107281 - DNA, 25 bp, Probe sequence
gataataaaatgctcctacaaaaga

SEQ ID NO: 107282 - DNA, 25 bp, Probe sequence
tgataataaaatgctcctacaaaag

SEQ ID NO: 107283 - DNA, 25 bp, Probe sequence
tcttgataataaaatgctcctacaa

SEQ ID NO: 107284 - DNA, 25 bp, Probe sequence
taataaaatgctcctacaaaagaag

SEQ ID NO: 107285 - DNA, 25 bp, Probe sequence
tactcttgataataaaatgctccta

SEQ ID NO: 107286 - DNA, 25 bp, Probe sequence
ttactcttgataataaaatgctcct

SEQ ID NO: 107287 - DNA, 25 bp, Probe sequence
ttgataataaaatgctcctacaaaa

SEQ ID NO: 107288 - DNA, 25 bp, Probe sequence
atttttatgccaattgggttagcgt

SEQ ID NO: 107289 - DNA, 25 bp, Probe sequence
atagaattcttaacttaacgagata

SEQ ID NO: 107290 - DNA, 25 bp, Probe sequence
atgccaattgggttagcgtaataga

SEQ ID NO: 107291 - DNA, 25 bp, Probe sequence
aggtattatcgttgcaattttatca

SEQ ID NO: 107292 - DNA, 25 bp, Probe sequence
acgagataagttaatgacatgttgt

SEQ ID NO: 107293 - DNA, 25 bp, Probe sequence
acaatgtagttatccattaggggtt

SEQ ID NO: 107294 - DNA, 25 bp, Probe sequence
aacctctagtagataacaatgtagt

SEQ ID NO: 107295 - DNA, 25 bp, Probe sequence
cagtattcagaatttatttggtaga

SEQ ID NO: 107296 - DNA, 25 bp, Probe sequence
catgttgtttagtttcgtgaagtaa

SEQ ID NO: 107297 - DNA, 25 bp, Probe sequence
gaaatagttttgcgaattgattatc

SEQ ID NO: 107298 - DNA, 25 bp, Probe sequence
gacatgttgtttagtttcgtgaagt

SEQ ID NO: 107299 - DNA, 25 bp, Probe sequence
gattatctaaaacagtattcagaat

SEQ ID NO: 107300 - DNA, 25 bp, Probe sequence
gtataagttagaaacctctagtaga

SEQ ID NO: 107301 - DNA, 25 bp, Probe sequence
gtaaaggtattatcgttgcaatttt

SEQ ID NO: 107302 - DNA, 25 bp, Probe sequence
tagttttgcgaattgattatctaaa

SEQ ID NO: 107303 - DNA, 25 bp, Probe sequence
attcattatactatttctaataata

SEQ ID NO: 107304 - DNA, 25 bp, Probe sequence
atactatttctaataatactgcaaa

SEQ ID NO: 107305 - DNA, 25 bp, Probe sequence
ataatactgcaaaaagaggttgaat

SEQ ID NO: 107306 - DNA, 25 bp, Probe sequence
agattcattatactatttctaataa

SEQ ID NO: 107307 - DNA, 25 bp, Probe sequence
actatttctaataatactgcaaaaa

SEQ ID NO: 107308 - DNA, 25 bp, Probe sequence
aaagattcattatactatttctaat

SEQ ID NO: 107309 - DNA, 25 bp, Probe sequence
aaaagattcattatactatttctaa

SEQ ID NO: 107310 - DNA, 25 bp, Probe sequence
aagattcattatactatttctaata

SEQ ID NO: 107311 - DNA, 25 bp, Probe sequence
ctatttctaataatactgcaaaaag

SEQ ID NO: 107312 - DNA, 25 bp, Probe sequence
gattcattatactatttctaataat

SEQ ID NO: 107313 - DNA, 25 bp, Probe sequence
taaaagattcattatactatttcta

SEQ ID NO: 107314 - DNA, 25 bp, Probe sequence
tactatttctaataatactgcaaaa

SEQ ID NO: 107315 - DNA, 25 bp, Probe sequence
tatactatttctaataatactgcaa

SEQ ID NO: 107316 - DNA, 25 bp, Probe sequence
ttatactatttctaataatactgca

SEQ ID NO: 107317 - DNA, 25 bp, Probe sequence
ttcctttctataaaagattcattat

SEQ ID NO: 107318 - DNA, 25 bp, Probe sequence
agaccttagcgatattaggaacagg

SEQ ID NO: 107319 - DNA, 25 bp, Probe sequence
ataattaaaagaccttagcgatatt

SEQ ID NO: 107320 - DNA, 25 bp, Probe sequence
atgcatcgttaaggtctttttatat

SEQ ID NO: 107321 - DNA, 25 bp, Probe sequence
acaggtggttctaaatgcatcgtta

SEQ ID NO: 107322 - DNA, 25 bp, Probe sequence
aaatgcatcgttaaggtctttttat

SEQ ID NO: 107323 - DNA, 25 bp, Probe sequence
caggtggttctaaatgcatcgttaa

SEQ ID NO: 107324 - DNA, 25 bp, Probe sequence
catcgttaaggtctttttatattat

SEQ ID NO: 107325 - DNA, 25 bp, Probe sequence
ctaaatgcatcgttaaggtcttttt

SEQ ID NO: 107326 - DNA, 25 bp, Probe sequence
gcatcgttaaggtctttttatatta

SEQ ID NO: 107327 - DNA, 25 bp, Probe sequence
gaacaggtggttctaaatgcatcgt

SEQ ID NO: 107328 - DNA, 25 bp, Probe sequence
gtggttctaaatgcatcgttaaggt

SEQ ID NO: 107329 - DNA, 25 bp, Probe sequence
gttctaaatgcatcgttaaggtctt

SEQ ID NO: 107330 - DNA, 25 bp, Probe sequence
ggtggttctaaatgcatcgttaagg

SEQ ID NO: 107331 - DNA, 25 bp, Probe sequence
ggttctaaatgcatcgttaaggtct

SEQ ID NO: 107332 - DNA, 25 bp, Probe sequence
ttagcgatattaggaacaggtggtt

SEQ ID NO: 107333 - DNA, 25 bp, Probe sequence
atgccgaggcgtcattgagtataaa

SEQ ID NO: 107334 - DNA, 25 bp, Probe sequence
aggaaagtagttctgcattaagcac

SEQ ID NO: 107335 - DNA, 25 bp, Probe sequence
agagcatgacaacgaggaataacta

SEQ ID NO: 107336 - DNA, 25 bp, Probe sequence
aaagtattatgactcgtgaaaattt

SEQ ID NO: 107337 - DNA, 25 bp, Probe sequence
aacatgtggcactgatagatccatt

SEQ ID NO: 107338 - DNA, 25 bp, Probe sequence
gcacgaagtagagcatgacaacgag

SEQ ID NO: 107339 - DNA, 25 bp, Probe sequence
gaatcgaaatgccgaggcgtcattg

SEQ ID NO: 107340 - DNA, 25 bp, Probe sequence
gactcgtgaaaatttagtgacatga

SEQ ID NO: 107341 - DNA, 25 bp, Probe sequence
gaggatctattagtgttgcagtaac

SEQ ID NO: 107342 - DNA, 25 bp, Probe sequence
gatccatttttttagcaagcattga

SEQ ID NO: 107343 - DNA, 25 bp, Probe sequence
gatagatccatttttttagcaagca

SEQ ID NO: 107344 - DNA, 25 bp, Probe sequence
gatagaggcaatacttttgcgtaaa

SEQ ID NO: 107345 - DNA, 25 bp, Probe sequence
gtagttctgcattaagcacgaagta

SEQ ID NO: 107346 - DNA, 25 bp, Probe sequence
gtgacatgaatcgaaatgccgaggc

SEQ ID NO: 107347 - DNA, 25 bp, Probe sequence
gtgttgcagtaacatgtggcactga

SEQ ID NO: 107348 - DNA, 25 bp, Probe sequence
atagatatttttacgtgtagtcacg

SEQ ID NO: 107349 - DNA, 25 bp, Probe sequence
atgtctgattggctagtttgtatga

SEQ ID NO: 107350 - DNA, 25 bp, Probe sequence
actccgcttacatctcagttttatg

SEQ ID NO: 107351 - DNA, 25 bp, Probe sequence
aaatcaatttcatgtttatgtctga

SEQ ID NO: 107352 - DNA, 25 bp, Probe sequence
aaatcacaactttatgttacgtatt

SEQ ID NO: 107353 - DNA, 25 bp, Probe sequence
aaggctttaaatagcgtcattacgc

SEQ ID NO: 107354 - DNA, 25 bp, Probe sequence
aatttcaaattacgtgctaaagctt

SEQ ID NO: 107355 - DNA, 25 bp, Probe sequence
ctttcctcccaaacattcataaaca

SEQ ID NO: 107356 - DNA, 25 bp, Probe sequence
gcgtcattacgcaattttagaatgc

SEQ ID NO: 107357 - DNA, 25 bp, Probe sequence
gctaattttctaacaattttgcaca

SEQ ID NO: 107358 - DNA, 25 bp, Probe sequence
gacttgtcttgataacatccataga

SEQ ID NO: 107359 - DNA, 25 bp, Probe sequence
gttacgtattaatgacttgtcttga

SEQ ID NO: 107360 - DNA, 25 bp, Probe sequence
gtaatttgactccgcttacatctca

SEQ ID NO: 107361 - DNA, 25 bp, Probe sequence
taagtactatttttgctaattttct

SEQ ID NO: 107362 - DNA, 25 bp, Probe sequence
ttaagtcgaatagccatccttttta

SEQ ID NO: 107363 - DNA, 25 bp, Probe sequence
atttccacatctggatgttaatcag

SEQ ID NO: 107364 - DNA, 25 bp, Probe sequence
ataaaaaatcatttccacatctgga

SEQ ID NO: 107365 - DNA, 25 bp, Probe sequence
atcatttccacatctggatgttaat

SEQ ID NO: 107366 - DNA, 25 bp, Probe sequence
aaatcatttccacatctggatgtta

SEQ ID NO: 107367 - DNA, 25 bp, Probe sequence
aaaaaatcatttccacatctggatg

SEQ ID NO: 107368 - DNA, 25 bp, Probe sequence
aaaaatcatttccacatctggatgt

SEQ ID NO: 107369 - DNA, 25 bp, Probe sequence
aaaatcatttccacatctggatgtt

SEQ ID NO: 107370 - DNA, 25 bp, Probe sequence
aatcatttccacatctggatgttaa

SEQ ID NO: 107371 - DNA, 25 bp, Probe sequence
aataaaaaatcatttccacatctgg

SEQ ID NO: 107372 - DNA, 25 bp, Probe sequence
catttccacatctggatgttaatca

SEQ ID NO: 107373 - DNA, 25 bp, Probe sequence
gatgggaaatgatttttttgatttt

SEQ ID NO: 107374 - DNA, 25 bp, Probe sequence
tggatgttaatcagatgggaaatga

SEQ ID NO: 107375 - DNA, 25 bp, Probe sequence
tcatttccacatctggatgttaatc

SEQ ID NO: 107376 - DNA, 25 bp, Probe sequence
taaaaaatcatttccacatctggat

SEQ ID NO: 107377 - DNA, 25 bp, Probe sequence
ttccacatctggatgttaatcagat

SEQ ID NO: 107378 - DNA, 25 bp, Probe sequence
attggatagtattcatagaggcatg

SEQ ID NO: 107379 - DNA, 25 bp, Probe sequence
atatagtaaacaattccctaatcga

SEQ ID NO: 107380 - DNA, 25 bp, Probe sequence
atcgatttaagagaggccactttgc

SEQ ID NO: 107381 - DNA, 25 bp, Probe sequence
aaatctgaattttattagtatattg

SEQ ID NO: 107382 - DNA, 25 bp, Probe sequence
aattatcagaatatatttacaaatc

SEQ ID NO: 107383 - DNA, 25 bp, Probe sequence
caattccctaatcgaacaaaattat

SEQ ID NO: 107384 - DNA, 25 bp, Probe sequence
catagaggcatgacggtatttgagc

SEQ ID NO: 107385 - DNA, 25 bp, Probe sequence
gagcaggattttaaatcggatttta

SEQ ID NO: 107386 - DNA, 25 bp, Probe sequence
gaggcatgacggtatttgagcagga

SEQ ID NO: 107387 - DNA, 25 bp, Probe sequence
gtatttgagcaggattttaaatcgg

SEQ ID NO: 107388 - DNA, 25 bp, Probe sequence
gtagattgatataaaattcttaatt

SEQ ID NO: 107389 - DNA, 25 bp, Probe sequence
tagtaaacaattccctaatcgaaca

SEQ ID NO: 107390 - DNA, 25 bp, Probe sequence
tataatcgatttaagagaggccact

SEQ ID NO: 107391 - DNA, 25 bp, Probe sequence
ttatgcgcataaacaaagtagattg

SEQ ID NO: 107392 - DNA, 25 bp, Probe sequence
ttccctaatcgaacaaaattatgcg

SEQ ID NO: 107393 - DNA, 25 bp, Probe sequence
atgtgaaaaataattgtcagtttaa

SEQ ID NO: 107394 - DNA, 25 bp, Probe sequence
agaacatttctcaagtcataaacct

SEQ ID NO: 107395 - DNA, 25 bp, Probe sequence
acttttcaatacacctccagtatga

SEQ ID NO: 107396 - DNA, 25 bp, Probe sequence
aacttttcaatacacctccagtatg

SEQ ID NO: 107397 - DNA, 25 bp, Probe sequence
aagtcataaaccttgaaaagtgtat

SEQ ID NO: 107398 - DNA, 25 bp, Probe sequence
cactccttaacttttcaatacacct

SEQ ID NO: 107399 - DNA, 25 bp, Probe sequence
ccttaacttttcaatacacctccag

SEQ ID NO: 107400 - DNA, 25 bp, Probe sequence
gaacatttctcaagtcataaacctt

SEQ ID NO: 107401 - DNA, 25 bp, Probe sequence
tccttaacttttcaatacacctcca

SEQ ID NO: 107402 - DNA, 25 bp, Probe sequence
tccactccttaacttttcaatacac

SEQ ID NO: 107403 - DNA, 25 bp, Probe sequence
tacacctccagtatgataaaaatga

SEQ ID NO: 107404 - DNA, 25 bp, Probe sequence
ttttcaatacacctccagtatgata

SEQ ID NO: 107405 - DNA, 25 bp, Probe sequence
ttaacttttcaatacacctccagta

SEQ ID NO: 107406 - DNA, 25 bp, Probe sequence
ttcaatacacctccagtatgataaa

SEQ ID NO: 107407 - DNA, 25 bp, Probe sequence
ttccactccttaacttttcaataca

SEQ ID NO: 107408 - DNA, 25 bp, Probe sequence
atcttaaagatttttcagctgtccg

SEQ ID NO: 107409 - DNA, 25 bp, Probe sequence
agcacatgtatgagtcctttttagt

SEQ ID NO: 107410 - DNA, 25 bp, Probe sequence
acacaatgcccttaaagcacatgta

SEQ ID NO: 107411 - DNA, 25 bp, Probe sequence
aaatcggacaactgagaaatcttaa

SEQ ID NO: 107412 - DNA, 25 bp, Probe sequence
aaagatttttcagctgtccgatttt

SEQ ID NO: 107413 - DNA, 25 bp, Probe sequence
aaaagactcatacacaatgccctta

SEQ ID NO: 107414 - DNA, 25 bp, Probe sequence
aatacatacggcaaattcaacttta

SEQ ID NO: 107415 - DNA, 25 bp, Probe sequence
gctgtccgatttttttacgtaatct

SEQ ID NO: 107416 - DNA, 25 bp, Probe sequence
gactcatacacaatgcccttaaagc

SEQ ID NO: 107417 - DNA, 25 bp, Probe sequence
gagtcctttttagtagtttatatca

SEQ ID NO: 107418 - DNA, 25 bp, Probe sequence
gatttttcagctgtccgattttttt

SEQ ID NO: 107419 - DNA, 25 bp, Probe sequence
gtatgagtcctttttagtagtttat

SEQ ID NO: 107420 - DNA, 25 bp, Probe sequence
gtaatctaatacatacggcaaattc

SEQ ID NO: 107421 - DNA, 25 bp, Probe sequence
tacggcaaattcaactttaatcaaa

SEQ ID NO: 107422 - DNA, 25 bp, Probe sequence
ttcagctgtccgatttttttacgta

SEQ ID NO: 107423 - DNA, 25 bp, Probe sequence
ataatttacatttaccactgcttgc

SEQ ID NO: 107424 - DNA, 25 bp, Probe sequence
agtattttgttacagcgtatcaatt

SEQ ID NO: 107425 - DNA, 25 bp, Probe sequence
accactgcttgctttaacatataca

SEQ ID NO: 107426 - DNA, 25 bp, Probe sequence
actgcttgctttaacatatacatgt

SEQ ID NO: 107427 - DNA, 25 bp, Probe sequence
acatatacatgtaagcactaactat

SEQ ID NO: 107428 - DNA, 25 bp, Probe sequence
aatttacatttaccactgcttgctt

SEQ ID NO: 107429 - DNA, 25 bp, Probe sequence
caatcgttagctatttgttgtcaaa

SEQ ID NO: 107430 - DNA, 25 bp, Probe sequence
catttaccactgcttgctttaacat

SEQ ID NO: 107431 - DNA, 25 bp, Probe sequence
gatttgatatttatcttctatgaat

SEQ ID NO: 107432 - DNA, 25 bp, Probe sequence
gattgatttgatatttatcttctat

SEQ ID NO: 107433 - DNA, 25 bp, Probe sequence
gttacagcgtatcaattaaaacagg

SEQ ID NO: 107434 - DNA, 25 bp, Probe sequence
gtaagcactaactatagtattttgt

SEQ ID NO: 107435 - DNA, 25 bp, Probe sequence
tacatttaccactgcttgctttaac

SEQ ID NO: 107436 - DNA, 25 bp, Probe sequence
tttacatttaccactgcttgcttta

SEQ ID NO: 107437 - DNA, 25 bp, Probe sequence
tttaccactgcttgctttaacatat

SEQ ID NO: 107438 - DNA, 25 bp, Probe sequence
atagcaaagcagtccaatgcgtaag

SEQ ID NO: 107439 - DNA, 25 bp, Probe sequence
atgatgatacgcactggactgcttg

SEQ ID NO: 107440 - DNA, 25 bp, Probe sequence
atgatacgcactggactgcttgttt

SEQ ID NO: 107441 - DNA, 25 bp, Probe sequence
agcaaagcagtccaatgcgtaaggt

SEQ ID NO: 107442 - DNA, 25 bp, Probe sequence
acatagcaaagcagtccaatgcgta

SEQ ID NO: 107443 - DNA, 25 bp, Probe sequence
aaagcagtccaatgcgtaaggtatg

SEQ ID NO: 107444 - DNA, 25 bp, Probe sequence
cagtccaatgcgtaaggtatgatga

SEQ ID NO: 107445 - DNA, 25 bp, Probe sequence
gcagtccaatgcgtaaggtatgatg

SEQ ID NO: 107446 - DNA, 25 bp, Probe sequence
gatgatacgcactggactgcttgtt

SEQ ID NO: 107447 - DNA, 25 bp, Probe sequence
gatacgcactggactgcttgtttat

SEQ ID NO: 107448 - DNA, 25 bp, Probe sequence
gtatgatgatacgcactggactgct

SEQ ID NO: 107449 - DNA, 25 bp, Probe sequence
gtccaatgcgtaaggtatgatgata

SEQ ID NO: 107450 - DNA, 25 bp, Probe sequence
ggtatgatgatacgcactggactgc

SEQ ID NO: 107451 - DNA, 25 bp, Probe sequence
tgatacgcactggactgcttgttta

SEQ ID NO: 107452 - DNA, 25 bp, Probe sequence
tgatgatacgcactggactgcttgt

SEQ ID NO: 107453 - DNA, 25 bp, Probe sequence
agtgtagtgccgaggactttggtat

SEQ ID NO: 107454 - DNA, 25 bp, Probe sequence
acaatgttcatcacagggaaagtgg

SEQ ID NO: 107455 - DNA, 25 bp, Probe sequence
aaaattacaatgttcatcacaggga

SEQ ID NO: 107456 - DNA, 25 bp, Probe sequence
aagtccttgaatgctacgtcatggc

SEQ ID NO: 107457 - DNA, 25 bp, Probe sequence
cccgagatatcaaccctcaatcatt

SEQ ID NO: 107458 - DNA, 25 bp, Probe sequence
gctacgtcatggcaaagtgtagtgc

SEQ ID NO: 107459 - DNA, 25 bp, Probe sequence
gaatgctacgtcatggcaaagtgta

SEQ ID NO: 107460 - DNA, 25 bp, Probe sequence
gaaaattctgtaaagataggcgtat

SEQ ID NO: 107461 - DNA, 25 bp, Probe sequence
gaaagtccttgaatgctacgtcatg

SEQ ID NO: 107462 - DNA, 25 bp, Probe sequence
gagatatcaaccctcaatcatttga

SEQ ID NO: 107463 - DNA, 25 bp, Probe sequence
gataggcgtatgatatatataattc

SEQ ID NO: 107464 - DNA, 25 bp, Probe sequence
gtccttgaatgctacgtcatggcaa

SEQ ID NO: 107465 - DNA, 25 bp, Probe sequence
tagtgccgaggactttggtatttaa

SEQ ID NO: 107466 - DNA, 25 bp, Probe sequence
tatcaaccctcaatcatttgaaagt

SEQ ID NO: 107467 - DNA, 25 bp, Probe sequence
tttgaaagtccttgaatgctacgtc

SEQ ID NO: 107468 - DNA, 25 bp, Probe sequence
aggccggtgatttcacagatgaagt

SEQ ID NO: 107469 - DNA, 25 bp, Probe sequence
acagatgaagttgtcggctattttc

SEQ ID NO: 107470 - DNA, 25 bp, Probe sequence
caaaaatagtgggcgactcctgtcc

SEQ ID NO: 107471 - DNA, 25 bp, Probe sequence
aagaagccaaactatgattgtaatt

SEQ ID NO: 107472 - DNA, 25 bp, Probe sequence
aataaaaggccggtgatttcacaga

SEQ ID NO: 107473 - DNA, 25 bp, Probe sequence
aatacgggaatgaattagtcataga

SEQ ID NO: 107474 - DNA, 25 bp, Probe sequence
ctgtccccatttgcatgaaatatta

SEQ ID NO: 107475 - DNA, 25 bp, Probe sequence
gcatgaaatattaatactttttaca

SEQ ID NO: 107476 - DNA, 25 bp, Probe sequence
gaagttgtcggctattttcatgact

SEQ ID NO: 107477 - DNA, 25 bp, Probe sequence
gttgtcggctattttcatgactaat

SEQ ID NO: 107478 - DNA, 25 bp, Probe sequence
gtcggctattttcatgactaatgtt

SEQ ID NO: 107479 - DNA, 25 bp, Probe sequence
ggctattttcatgactaatgttaaa

SEQ ID NO: 107480 - DNA, 25 bp, Probe sequence
tcctgtccccatttgcatgaaatat

SEQ ID NO: 107481 - DNA, 25 bp, Probe sequence
taatactttttacaaagtcttatct

SEQ ID NO: 107482 - DNA, 25 bp, Probe sequence
ttcacagatgaagttgtcggctatt

SEQ ID NO: 107483 - DNA, 25 bp, Probe sequence
atagagttaattgtacattgtgatg

SEQ ID NO: 107484 - DNA, 25 bp, Probe sequence
atagacatttaattgtgttttcttg

SEQ ID NO: 107485 - DNA, 25 bp, Probe sequence
aaaacggtgtgtgagtaagtgaact

SEQ ID NO: 107486 - DNA, 25 bp, Probe sequence
aattgacctaattggcagacattaa

SEQ ID NO: 107487 - DNA, 25 bp, Probe sequence
gcatctattgtattggtgccagact

SEQ ID NO: 107488 - DNA, 25 bp, Probe sequence
gaaagctttcgtggtaggatttata

SEQ ID NO: 107489 - DNA, 25 bp, Probe sequence
gacattaaaagagtgtacaacctta

SEQ ID NO: 107490 - DNA, 25 bp, Probe sequence
gacttttttgcgttttatctaaatg

SEQ ID NO: 107491 - DNA, 25 bp, Probe sequence
gactcttagtctggcatctattgta

SEQ ID NO: 107492 - DNA, 25 bp, Probe sequence
gtattggtgccagacttttttgcgt

SEQ ID NO: 107493 - DNA, 25 bp, Probe sequence
gtgccagacttttttgcgttttatc

SEQ ID NO: 107494 - DNA, 25 bp, Probe sequence
gtgttttcttgaaagctttcgtggt

SEQ ID NO: 107495 - DNA, 25 bp, Probe sequence
tacattgtgatgattaattgaccta

SEQ ID NO: 107496 - DNA, 25 bp, Probe sequence
tagtagactcttagtctggcatcta

SEQ ID NO: 107497 - DNA, 25 bp, Probe sequence
tagtctggcatctattgtattggtg

SEQ ID NO: 107498 - DNA, 25 bp, Probe sequence
agattatttcatgactgttagtaac

SEQ ID NO: 107499 - DNA, 25 bp, Probe sequence
aagtggcgaaatgttgattgataat

SEQ ID NO: 107500 - DNA, 25 bp, Probe sequence
aattagataaggtgagtgccattgt

SEQ ID NO: 107501 - DNA, 25 bp, Probe sequence
caagacactcactttgttttgtata

SEQ ID NO: 107502 - DNA, 25 bp, Probe sequence
ctttgttttgtataagtggcgaaat

SEQ ID NO: 107503 - DNA, 25 bp, Probe sequence
gaatcatagattatttcatgactgt

SEQ ID NO: 107504 - DNA, 25 bp, Probe sequence
gaacacaagacactcactttgtttt

SEQ ID NO: 107505 - DNA, 25 bp, Probe sequence
gacactcactttgttttgtataagt

SEQ ID NO: 107506 - DNA, 25 bp, Probe sequence
gactgttagtaacaatcgtaaaagg

SEQ ID NO: 107507 - DNA, 25 bp, Probe sequence
gtataagtggcgaaatgttgattga

SEQ ID NO: 107508 - DNA, 25 bp, Probe sequence
gtaagaacacaagacactcactttg

SEQ ID NO: 107509 - DNA, 25 bp, Probe sequence
ggtgagtgccattgtaagaacacaa

SEQ ID NO: 107510 - DNA, 25 bp, Probe sequence
tggactaaacgcaaaatgaatcata

SEQ ID NO: 107511 - DNA, 25 bp, Probe sequence
tgattgataatttggactaaacgca

SEQ ID NO: 107512 - DNA, 25 bp, Probe sequence
taaggtgagtgccattgtaagaaca

SEQ ID NO: 107513 - DNA, 25 bp, Probe sequence
acctccgtacatcattttgttcacg

SEQ ID NO: 107514 - DNA, 25 bp, Probe sequence
acatcattttgttcacgttaaaata

SEQ ID NO: 107515 - DNA, 25 bp, Probe sequence
cacgttaaaataaatactaatacat

SEQ ID NO: 107516 - DNA, 25 bp, Probe sequence
cacctccgtacatcattttgttcac

SEQ ID NO: 107517 - DNA, 25 bp, Probe sequence
catcattttgttcacgttaaaataa

SEQ ID NO: 107518 - DNA, 25 bp, Probe sequence
ctccgtacatcattttgttcacgtt

SEQ ID NO: 107519 - DNA, 25 bp, Probe sequence
cctccgtacatcattttgttcacgt

SEQ ID NO: 107520 - DNA, 25 bp, Probe sequence
cgtacatcattttgttcacgttaaa

SEQ ID NO: 107521 - DNA, 25 bp, Probe sequence
ccgtacatcattttgttcacgttaa

SEQ ID NO: 107522 - DNA, 25 bp, Probe sequence
gtacatcattttgttcacgttaaaa

SEQ ID NO: 107523 - DNA, 25 bp, Probe sequence
tgttcacgttaaaataaatactaat

SEQ ID NO: 107524 - DNA, 25 bp, Probe sequence
tccgtacatcattttgttcacgtta

SEQ ID NO: 107525 - DNA, 25 bp, Probe sequence
tcattttgttcacgttaaaataaat

SEQ ID NO: 107526 - DNA, 25 bp, Probe sequence
tcacgttaaaataaatactaataca

SEQ ID NO: 107527 - DNA, 25 bp, Probe sequence
tacatcattttgttcacgttaaaat

SEQ ID NO: 107528 - DNA, 25 bp, Probe sequence
acctattgtattgttttcatcatgc

SEQ ID NO: 107529 - DNA, 25 bp, Probe sequence
aacggtaatttctatttattgagat

SEQ ID NO: 107530 - DNA, 25 bp, Probe sequence
aatgatgcataagattttgaatttt

SEQ ID NO: 107531 - DNA, 25 bp, Probe sequence
catgcataatcatcattgccgctgt

SEQ ID NO: 107532 - DNA, 25 bp, Probe sequence
catcatgcataatcatcattgccgc

SEQ ID NO: 107533 - DNA, 25 bp, Probe sequence
gtttatttcgtggacctattgtatt

SEQ ID NO: 107534 - DNA, 25 bp, Probe sequence
gtattgttttcatcatgcataatca

SEQ ID NO: 107535 - DNA, 25 bp, Probe sequence
gtggacctattgtattgttttcatc

SEQ ID NO: 107536 - DNA, 25 bp, Probe sequence
ggacctattgtattgttttcatcat

SEQ ID NO: 107537 - DNA, 25 bp, Probe sequence
tgttttcatcatgcataatcatcat

SEQ ID NO: 107538 - DNA, 25 bp, Probe sequence
tgcataatcatcattgccgctgtcc

SEQ ID NO: 107539 - DNA, 25 bp, Probe sequence
tcattgccgctgtccgaggctaatt

SEQ ID NO: 107540 - DNA, 25 bp, Probe sequence
taccgtttatttcgtggacctattg

SEQ ID NO: 107541 - DNA, 25 bp, Probe sequence
tattgtattgttttcatcatgcata

SEQ ID NO: 107542 - DNA, 25 bp, Probe sequence
ttcgtggacctattgtattgttttc

SEQ ID NO: 107543 - DNA, 25 bp, Probe sequence
attgtatgaaatttgcattattatt

SEQ ID NO: 107544 - DNA, 25 bp, Probe sequence
attattacattttgagataaatcga

SEQ ID NO: 107545 - DNA, 25 bp, Probe sequence
atagttattgtcaattttgtgaatc

SEQ ID NO: 107546 - DNA, 25 bp, Probe sequence
ataatagttattgtcaattttgtga

SEQ ID NO: 107547 - DNA, 25 bp, Probe sequence
agttattgtcaattttgtgaatcaa

SEQ ID NO: 107548 - DNA, 25 bp, Probe sequence
aatataattattacattttgagata

SEQ ID NO: 107549 - DNA, 25 bp, Probe sequence
gaaacaggattcataaaattaataa

SEQ ID NO: 107550 - DNA, 25 bp, Probe sequence
gagataaatcgaaacaggattcata

SEQ ID NO: 107551 - DNA, 25 bp, Probe sequence
gataaatcgaaacaggattcataaa

SEQ ID NO: 107552 - DNA, 25 bp, Probe sequence
gttattgtcaattttgtgaatcaat

SEQ ID NO: 107553 - DNA, 25 bp, Probe sequence
gtatgaaatttgcattattattaaa

SEQ ID NO: 107554 - DNA, 25 bp, Probe sequence
gtcaattttgtgaatcaatataatt

SEQ ID NO: 107555 - DNA, 25 bp, Probe sequence
taatagttattgtcaattttgtgaa

SEQ ID NO: 107556 - DNA, 25 bp, Probe sequence
tagttattgtcaattttgtgaatca

SEQ ID NO: 107557 - DNA, 25 bp, Probe sequence
ttgtcaattttgtgaatcaatataa

SEQ ID NO: 107558 - DNA, 25 bp, Probe sequence
attcgttgccttggcttctttttag

SEQ ID NO: 107559 - DNA, 25 bp, Probe sequence
agaagtcaaggtaacattcgttgcc

SEQ ID NO: 107560 - DNA, 25 bp, Probe sequence
aagtcaaggtaacattcgttgcctt

SEQ ID NO: 107561 - DNA, 25 bp, Probe sequence
aacattcgttgccttggcttctttt

SEQ ID NO: 107562 - DNA, 25 bp, Probe sequence
aaggtaacattcgttgccttggctt

SEQ ID NO: 107563 - DNA, 25 bp, Probe sequence
gaagtcaaggtaacattcgttgcct

SEQ ID NO: 107564 - DNA, 25 bp, Probe sequence
gtaacattcgttgccttggcttctt

SEQ ID NO: 107565 - DNA, 25 bp, Probe sequence
gtcaaggtaacattcgttgccttgg

SEQ ID NO: 107566 - DNA, 25 bp, Probe sequence
tggcttctttttaggttaggtacat

SEQ ID NO: 107567 - DNA, 25 bp, Probe sequence
tgccttggcttctttttaggttagg

SEQ ID NO: 107568 - DNA, 25 bp, Probe sequence
tctttttaggttaggtacataattg

SEQ ID NO: 107569 - DNA, 25 bp, Probe sequence
taacattcgttgccttggcttcttt

SEQ ID NO: 107570 - DNA, 25 bp, Probe sequence
taggttaggtacataattgaaagtt

SEQ ID NO: 107571 - DNA, 25 bp, Probe sequence
ttcgttgccttggcttctttttagg

SEQ ID NO: 107572 - DNA, 25 bp, Probe sequence
ttgccttggcttctttttaggttag

SEQ ID NO: 107573 - DNA, 25 bp, Probe sequence
atactatatatagtggtataacgta

SEQ ID NO: 107574 - DNA, 25 bp, Probe sequence
agtggtataacgtaatgagtagaca

SEQ ID NO: 107575 - DNA, 25 bp, Probe sequence
aacatgtcgaaatgacagaacaatt

SEQ ID NO: 107576 - DNA, 25 bp, Probe sequence
gaatttcactaaatgttaataactt

SEQ ID NO: 107577 - DNA, 25 bp, Probe sequence
gaaatatgaatttcactaaatgtta

SEQ ID NO: 107578 - DNA, 25 bp, Probe sequence
gttgcataaacatgtcgaaatgaca

SEQ ID NO: 107579 - DNA, 25 bp, Probe sequence
gtataacgtaatgagtagacacaat

SEQ ID NO: 107580 - DNA, 25 bp, Probe sequence
gtagacacaatatataggaagaagg

SEQ ID NO: 107581 - DNA, 25 bp, Probe sequence
gtcgaaatgacagaacaattttaaa

SEQ ID NO: 107582 - DNA, 25 bp, Probe sequence
gtgacgttttagttaacagactaat

SEQ ID NO: 107583 - DNA, 25 bp, Probe sequence
ggtataacgtaatgagtagacacaa

SEQ ID NO: 107584 - DNA, 25 bp, Probe sequence
tgtgacgttttagttaacagactaa

SEQ ID NO: 107585 - DNA, 25 bp, Probe sequence
tgttaataactttgtgacgttttag

SEQ ID NO: 107586 - DNA, 25 bp, Probe sequence
taacgtaatgagtagacacaatata

SEQ ID NO: 107587 - DNA, 25 bp, Probe sequence
tatagtggtataacgtaatgagtag

SEQ ID NO: 107588 - DNA, 25 bp, Probe sequence
atacaaggattagtcatgccatgtt

SEQ ID NO: 107589 - DNA, 25 bp, Probe sequence
agcgacctttagccagattttttgt

SEQ ID NO: 107590 - DNA, 25 bp, Probe sequence
actatcatagcgacctttagccaga

SEQ ID NO: 107591 - DNA, 25 bp, Probe sequence
aacttcactattgatagttacgcaa

SEQ ID NO: 107592 - DNA, 25 bp, Probe sequence
gaaatctggttgaagtcgttactat

SEQ ID NO: 107593 - DNA, 25 bp, Probe sequence
gacctttagccagattttttgtgca

SEQ ID NO: 107594 - DNA, 25 bp, Probe sequence
gagggggattatgtaaattgtatta

SEQ ID NO: 107595 - DNA, 25 bp, Probe sequence
gttactatcatagcgacctttagcc

SEQ ID NO: 107596 - DNA, 25 bp, Probe sequence
gtaggaaaatcaaacttcactattg

SEQ ID NO: 107597 - DNA, 25 bp, Probe sequence
gtcatgccatgttatcaagtaggaa

SEQ ID NO: 107598 - DNA, 25 bp, Probe sequence
ggattagtcatgccatgttatcaag

SEQ ID NO: 107599 - DNA, 25 bp, Probe sequence
ggttgaagtcgttactatcatagcg

SEQ ID NO: 107600 - DNA, 25 bp, Probe sequence
tcatagcgacctttagccagatttt

SEQ ID NO: 107601 - DNA, 25 bp, Probe sequence
tacaggacaggatatacaaggatta

SEQ ID NO: 107602 - DNA, 25 bp, Probe sequence
ttagccagattttttgtgcaataga

SEQ ID NO: 107603 - DNA, 25 bp, Probe sequence
actttaacgcttaatcattgaaatt

SEQ ID NO: 107604 - DNA, 25 bp, Probe sequence
aactttaacgcttaatcattgaaat

SEQ ID NO: 107605 - DNA, 25 bp, Probe sequence
aacgcttaatcattgaaattaagac

SEQ ID NO: 107606 - DNA, 25 bp, Probe sequence
ctttaacgcttaatcattgaaatta

SEQ ID NO: 107607 - DNA, 25 bp, Probe sequence
taatagcggaccgtctaaccgtcta

SEQ ID NO: 107608 - DNA, 25 bp, Probe sequence
tctaaccgtctaaggtaagtcttct

SEQ ID NO: 107609 - DNA, 25 bp, Probe sequence
taacgcttaatcattgaaattaaga

SEQ ID NO: 107610 - DNA, 25 bp, Probe sequence
taactttaacgcttaatcattgaaa

SEQ ID NO: 107611 - DNA, 25 bp, Probe sequence
tattttaactttaacgcttaatcat

SEQ ID NO: 107612 - DNA, 25 bp, Probe sequence
tttaacgcttaatcattgaaattaa

SEQ ID NO: 107613 - DNA, 25 bp, Probe sequence
tttaactttaacgcttaatcattga

SEQ ID NO: 107614 - DNA, 25 bp, Probe sequence
ttttaactttaacgcttaatcattg

SEQ ID NO: 107615 - DNA, 25 bp, Probe sequence
ttaacgcttaatcattgaaattaag

SEQ ID NO: 107616 - DNA, 25 bp, Probe sequence
ttaactttaacgcttaatcattgaa

SEQ ID NO: 107617 - DNA, 25 bp, Probe sequence
attaggaggcattttatatttagaa

SEQ ID NO: 107618 - DNA, 25 bp, Probe sequence
atagtatgtcattaggaggcatttt

SEQ ID NO: 107619 - DNA, 25 bp, Probe sequence
agaaaatcagtaatttgacctattt

SEQ ID NO: 107620 - DNA, 25 bp, Probe sequence
aaaattgagcgcttagtatgcaaat

SEQ ID NO: 107621 - DNA, 25 bp, Probe sequence
aagagcctcttaatgatgtactaat

SEQ ID NO: 107622 - DNA, 25 bp, Probe sequence
aataacaacgatgcattactgtatg

SEQ ID NO: 107623 - DNA, 25 bp, Probe sequence
caaagttttgtctgaattactgata

SEQ ID NO: 107624 - DNA, 25 bp, Probe sequence
ctgacacgacataatcaaagttttg

SEQ ID NO: 107625 - DNA, 25 bp, Probe sequence
gcctcttaatgatgtactaatagta

SEQ ID NO: 107626 - DNA, 25 bp, Probe sequence
gaaaggctgatttggtacataataa

SEQ ID NO: 107627 - DNA, 25 bp, Probe sequence
gagcgcttagtatgcaaataacaca

SEQ ID NO: 107628 - DNA, 25 bp, Probe sequence
gtatgcattaataactgacacgaca

SEQ ID NO: 107629 - DNA, 25 bp, Probe sequence
tatgcaaataacacaagagcctctt

SEQ ID NO: 107630 - DNA, 25 bp, Probe sequence
ttactgataatgtcattcaagcaac

SEQ ID NO: 107631 - DNA, 25 bp, Probe sequence
ttgacctattttactgaaaggctga

SEQ ID NO: 107632 - DNA, 25 bp, Probe sequence
atatgtattcggtcgcacacgatac

SEQ ID NO: 107633 - DNA, 25 bp, Probe sequence
atcacgctatataatgtatgttcgc

SEQ ID NO: 107634 - DNA, 25 bp, Probe sequence
atctaacgtatggtatcagtatgta

SEQ ID NO: 107635 - DNA, 25 bp, Probe sequence
atgttcgcggtgtaaacgcgcactt

SEQ ID NO: 107636 - DNA, 25 bp, Probe sequence
aacgcgcacttattttatcagaaca

SEQ ID NO: 107637 - DNA, 25 bp, Probe sequence
aagtgacttgttttaatgatatgca

SEQ ID NO: 107638 - DNA, 25 bp, Probe sequence
cgaacattatttatcgtgtgctcga

SEQ ID NO: 107639 - DNA, 25 bp, Probe sequence
gacgtttatcgtcgcgtgtaacaat

SEQ ID NO: 107640 - DNA, 25 bp, Probe sequence
gggcagctctttaatccatagttat

SEQ ID NO: 107641 - DNA, 25 bp, Probe sequence
ggtcgcacacgatacaaagtgactt

SEQ ID NO: 107642 - DNA, 25 bp, Probe sequence
ggattatatgagttgggcagctctt

SEQ ID NO: 107643 - DNA, 25 bp, Probe sequence
ggagggcttaataaacaatcacatg

SEQ ID NO: 107644 - DNA, 25 bp, Probe sequence
tgctcgaaaaatgtatcacgctata

SEQ ID NO: 107645 - DNA, 25 bp, Probe sequence
taaaaaaggctgtgtaggggtgtct

SEQ ID NO: 107646 - DNA, 25 bp, Probe sequence
taaagagcggtctaattgtcttttt

SEQ ID NO: 107647 - DNA, 25 bp, Probe sequence
ataccaaatttgaaccgataagata

SEQ ID NO: 107648 - DNA, 25 bp, Probe sequence
atcattgtatttgttgttacactga

SEQ ID NO: 107649 - DNA, 25 bp, Probe sequence
atgtcgttatcaaacgaagcccgaa

SEQ ID NO: 107650 - DNA, 25 bp, Probe sequence
aatcatgcatcgtgtcatttagata

SEQ ID NO: 107651 - DNA, 25 bp, Probe sequence
aatacatactgatactcgaaataat

SEQ ID NO: 107652 - DNA, 25 bp, Probe sequence
aatttgtttcatatattttccaata

SEQ ID NO: 107653 - DNA, 25 bp, Probe sequence
aattgtcacaattcagtctaattta

SEQ ID NO: 107654 - DNA, 25 bp, Probe sequence
caattcgtatattttgccaatgatt

SEQ ID NO: 107655 - DNA, 25 bp, Probe sequence
cacaatcaatcatgtattttcactg

SEQ ID NO: 107656 - DNA, 25 bp, Probe sequence
gaagcccgaaatacatactgatact

SEQ ID NO: 107657 - DNA, 25 bp, Probe sequence
gatgtcacaaagaaatgtcgttatc

SEQ ID NO: 107658 - DNA, 25 bp, Probe sequence
gataacgattgattactacgcaaaa

SEQ ID NO: 107659 - DNA, 25 bp, Probe sequence
gttacactgatgaagcgatgtcaca

SEQ ID NO: 107660 - DNA, 25 bp, Probe sequence
gggtaactaacatcacgaaatcatt

SEQ ID NO: 107661 - DNA, 25 bp, Probe sequence
tgtcttgtcggtttttaatataaca

SEQ ID NO: 107662 - DNA, 25 bp, Probe sequence
attgtaagtatactagtaacatttt

SEQ ID NO: 107663 - DNA, 25 bp, Probe sequence
atattgtaagtatactagtaacatt

SEQ ID NO: 107664 - DNA, 25 bp, Probe sequence
aaactttcaatattgtaagtatact

SEQ ID NO: 107665 - DNA, 25 bp, Probe sequence
aactttcaatattgtaagtatacta

SEQ ID NO: 107666 - DNA, 25 bp, Probe sequence
aactaacaaagaaatgaggtgcatg

SEQ ID NO: 107667 - DNA, 25 bp, Probe sequence
aatattgtaagtatactagtaacat

SEQ ID NO: 107668 - DNA, 25 bp, Probe sequence
caatattgtaagtatactagtaaca

SEQ ID NO: 107669 - DNA, 25 bp, Probe sequence
ctttcaatattgtaagtatactagt

SEQ ID NO: 107670 - DNA, 25 bp, Probe sequence
ctaacaaagaaatgaggtgcatgcc

SEQ ID NO: 107671 - DNA, 25 bp, Probe sequence
gaactaacaaagaaatgaggtgcat

SEQ ID NO: 107672 - DNA, 25 bp, Probe sequence
tgtaagtatactagtaacatttttt

SEQ ID NO: 107673 - DNA, 25 bp, Probe sequence
tcaatattgtaagtatactagtaac

SEQ ID NO: 107674 - DNA, 25 bp, Probe sequence
tattgtaagtatactagtaacattt

SEQ ID NO: 107675 - DNA, 25 bp, Probe sequence
tttcaatattgtaagtatactagta

SEQ ID NO: 107676 - DNA, 25 bp, Probe sequence
ttgtaagtatactagtaacattttt

SEQ ID NO: 107677 - DNA, 25 bp, Probe sequence
agaagcgtgtgaaaatatagaatta

SEQ ID NO: 107678 - DNA, 25 bp, Probe sequence
agcgttagaatagaagcgtgtgaaa

SEQ ID NO: 107679 - DNA, 25 bp, Probe sequence
aatacatcctcctgagtatatgact

SEQ ID NO: 107680 - DNA, 25 bp, Probe sequence
catcctcctgagtatatgactatgt

SEQ ID NO: 107681 - DNA, 25 bp, Probe sequence
ctcctgagtatatgactatgtcttc

SEQ ID NO: 107682 - DNA, 25 bp, Probe sequence
gaaagcgttagaatagaagcgtgtg

SEQ ID NO: 107683 - DNA, 25 bp, Probe sequence
gacaatttgttatagaaagcgttag

SEQ ID NO: 107684 - DNA, 25 bp, Probe sequence
gactatgtcttcagtgtaaaagagg

SEQ ID NO: 107685 - DNA, 25 bp, Probe sequence
gagtatatgactatgtcttcagtgt

SEQ ID NO: 107686 - DNA, 25 bp, Probe sequence
gaggaattttgagcaattatgtagt

SEQ ID NO: 107687 - DNA, 25 bp, Probe sequence
gtatatgactatgtcttcagtgtaa

SEQ ID NO: 107688 - DNA, 25 bp, Probe sequence
tcctcctgagtatatgactatgtct

SEQ ID NO: 107689 - DNA, 25 bp, Probe sequence
tacatcctcctgagtatatgactat

SEQ ID NO: 107690 - DNA, 25 bp, Probe sequence
tatgactatgtcttcagtgtaaaag

SEQ ID NO: 107691 - DNA, 25 bp, Probe sequence
ttgagcaattatgtagttttagtta

SEQ ID NO: 107692 - DNA, 25 bp, Probe sequence
attcccgaacaccttgttatagtgc

SEQ ID NO: 107693 - DNA, 25 bp, Probe sequence
accttgttatagtgctcgggaattt

SEQ ID NO: 107694 - DNA, 25 bp, Probe sequence
acaccttgttatagtgctcgggaat

SEQ ID NO: 107695 - DNA, 25 bp, Probe sequence
aacaccttgttatagtgctcgggaa

SEQ ID NO: 107696 - DNA, 25 bp, Probe sequence
aattcccgaacaccttgttatagtg

SEQ ID NO: 107697 - DNA, 25 bp, Probe sequence
cttgttatagtgctcgggaattttt

SEQ ID NO: 107698 - DNA, 25 bp, Probe sequence
ccttgttatagtgctcgggaatttt

SEQ ID NO: 107699 - DNA, 25 bp, Probe sequence
cgaacaccttgttatagtgctcggg

SEQ ID NO: 107700 - DNA, 25 bp, Probe sequence
cccgaacaccttgttatagtgctcg

SEQ ID NO: 107701 - DNA, 25 bp, Probe sequence
ccgaacaccttgttatagtgctcgg

SEQ ID NO: 107702 - DNA, 25 bp, Probe sequence
gaacaccttgttatagtgctcggga

SEQ ID NO: 107703 - DNA, 25 bp, Probe sequence
tgttatagtgctcgggaattttttt

SEQ ID NO: 107704 - DNA, 25 bp, Probe sequence
tcccgaacaccttgttatagtgctc

SEQ ID NO: 107705 - DNA, 25 bp, Probe sequence
ttcccgaacaccttgttatagtgct

SEQ ID NO: 107706 - DNA, 25 bp, Probe sequence
ttatagtgctcgggaatttttttat

SEQ ID NO: 107707 - DNA, 25 bp, Probe sequence
attgaactcagtttcaacacatctt

SEQ ID NO: 107708 - DNA, 25 bp, Probe sequence
atttaattgaactcagtttcaacac

SEQ ID NO: 107709 - DNA, 25 bp, Probe sequence
atataatttaattgaactcagtttc

SEQ ID NO: 107710 - DNA, 25 bp, Probe sequence
atgttaaaaatcttcgcattcttaa

SEQ ID NO: 107711 - DNA, 25 bp, Probe sequence
aaatgttaaaaatcttcgcattctt

SEQ ID NO: 107712 - DNA, 25 bp, Probe sequence
aatgttaaaaatcttcgcattctta

SEQ ID NO: 107713 - DNA, 25 bp, Probe sequence
aattgaactcagtttcaacacatct

SEQ ID NO: 107714 - DNA, 25 bp, Probe sequence
gaaatgttaaaaatcttcgcattct

SEQ ID NO: 107715 - DNA, 25 bp, Probe sequence
gttaaaaatcttcgcattcttaaat

SEQ ID NO: 107716 - DNA, 25 bp, Probe sequence
tgttaaaaatcttcgcattcttaaa

SEQ ID NO: 107717 - DNA, 25 bp, Probe sequence
taattgaactcagtttcaacacatc

SEQ ID NO: 107718 - DNA, 25 bp, Probe sequence
taaaaatcttcgcattcttaaattt

SEQ ID NO: 107719 - DNA, 25 bp, Probe sequence
ttaaaaatcttcgcattcttaaatt

SEQ ID NO: 107720 - DNA, 25 bp, Probe sequence
ttaattgaactcagtttcaacacat

SEQ ID NO: 107721 - DNA, 25 bp, Probe sequence
ttgaactcagtttcaacacatctta

SEQ ID NO: 107722 - DNA, 25 bp, Probe sequence
atttagcttatagttttatcatcat

SEQ ID NO: 107723 - DNA, 25 bp, Probe sequence
aactatttacgcacgactaacattt

SEQ ID NO: 107724 - DNA, 25 bp, Probe sequence
aatatgattggcgcaatttgctgat

SEQ ID NO: 107725 - DNA, 25 bp, Probe sequence
ctcgtgaaacttagatttagcttat

SEQ ID NO: 107726 - DNA, 25 bp, Probe sequence
gcacgactaacatttctgagtgttt

SEQ ID NO: 107727 - DNA, 25 bp, Probe sequence
gactaacatttctgagtgtttaaat

SEQ ID NO: 107728 - DNA, 25 bp, Probe sequence
gagagatacaaactatttacgcacg

SEQ ID NO: 107729 - DNA, 25 bp, Probe sequence
gatacaaactatttacgcacgacta

SEQ ID NO: 107730 - DNA, 25 bp, Probe sequence
gatacgcaaaaatgtttctcgtgaa

SEQ ID NO: 107731 - DNA, 25 bp, Probe sequence
gattggcgcaatttgctgatacgca

SEQ ID NO: 107732 - DNA, 25 bp, Probe sequence
gtttctcgtgaaacttagatttagc

SEQ ID NO: 107733 - DNA, 25 bp, Probe sequence
ggttgcattaaatacacagagtgag

SEQ ID NO: 107734 - DNA, 25 bp, Probe sequence
tgctgatacgcaaaaatgtttctcg

SEQ ID NO: 107735 - DNA, 25 bp, Probe sequence
tttcctggaaaatatgtggttgcat

SEQ ID NO: 107736 - DNA, 25 bp, Probe sequence
tttacgcacgactaacatttctgag

SEQ ID NO: 107737 - DNA, 25 bp, Probe sequence
attgattaagcgtaaaatgttgata

SEQ ID NO: 107738 - DNA, 25 bp, Probe sequence
agtgaattgattaagcgtaaaatgt

SEQ ID NO: 107739 - DNA, 25 bp, Probe sequence
aaagtgaattgattaagcgtaaaat

SEQ ID NO: 107740 - DNA, 25 bp, Probe sequence
aagtgaattgattaagcgtaaaatg

SEQ ID NO: 107741 - DNA, 25 bp, Probe sequence
aattgattaagcgtaaaatgttgat

SEQ ID NO: 107742 - DNA, 25 bp, Probe sequence
gaattgattaagcgtaaaatgttga

SEQ ID NO: 107743 - DNA, 25 bp, Probe sequence
gattaagcgtaaaatgttgataaag

SEQ ID NO: 107744 - DNA, 25 bp, Probe sequence
gtgaattgattaagcgtaaaatgtt

SEQ ID NO: 107745 - DNA, 25 bp, Probe sequence
ggccgaatacatttgtattcggttt

SEQ ID NO: 107746 - DNA, 25 bp, Probe sequence
taaagtgaattgattaagcgtaaaa

SEQ ID NO: 107747 - DNA, 25 bp, Probe sequence
tacttttttaggccgaatacatttg

SEQ ID NO: 107748 - DNA, 25 bp, Probe sequence
ttttttaggccgaatacatttgtat

SEQ ID NO: 107749 - DNA, 25 bp, Probe sequence
ttttaggccgaatacatttgtattc

SEQ ID NO: 107750 - DNA, 25 bp, Probe sequence
tttttaggccgaatacatttgtatt

SEQ ID NO: 107751 - DNA, 25 bp, Probe sequence
ttgattaagcgtaaaatgttgataa

SEQ ID NO: 107752 - DNA, 25 bp, Probe sequence
attgatttttgctagttaacagaaa

SEQ ID NO: 107753 - DNA, 25 bp, Probe sequence
attcttatttcattatacaatttag

SEQ ID NO: 107754 - DNA, 25 bp, Probe sequence
atgttagttaaatttgattgttgaa

SEQ ID NO: 107755 - DNA, 25 bp, Probe sequence
aagttgaacatgaggtctaacgtac

SEQ ID NO: 107756 - DNA, 25 bp, Probe sequence
agtatattgatttttgctagttaac

SEQ ID NO: 107757 - DNA, 25 bp, Probe sequence
acgttaggccttttttgctagcatg

SEQ ID NO: 107758 - DNA, 25 bp, Probe sequence
catgaggtctaacgtacatttatac

SEQ ID NO: 107759 - DNA, 25 bp, Probe sequence
gcaattgatataattcttatttcat

SEQ ID NO: 107760 - DNA, 25 bp, Probe sequence
gaacatgaggtctaacgtacattta

SEQ ID NO: 107761 - DNA, 25 bp, Probe sequence
gttaggccttttttgctagcatgat

SEQ ID NO: 107762 - DNA, 25 bp, Probe sequence
ggccttttttgctagcatgatgaat

SEQ ID NO: 107763 - DNA, 25 bp, Probe sequence
tcattatacaatttagactaatcta

SEQ ID NO: 107764 - DNA, 25 bp, Probe sequence
taatttttttcgaaaagcaattgat

SEQ ID NO: 107765 - DNA, 25 bp, Probe sequence
taggccttttttgctagcatgatga

SEQ ID NO: 107766 - DNA, 25 bp, Probe sequence
tatacgttaggccttttttgctagc

SEQ ID NO: 107767 - DNA, 25 bp, Probe sequence
agttgtctgctgacactttgcaagg

SEQ ID NO: 107768 - DNA, 25 bp, Probe sequence
acattaaatatgtttctccgttgat

SEQ ID NO: 107769 - DNA, 25 bp, Probe sequence
aaatgaaaaagttgtctgctgacac

SEQ ID NO: 107770 - DNA, 25 bp, Probe sequence
aaaagttgtctgctgacactttgca

SEQ ID NO: 107771 - DNA, 25 bp, Probe sequence
aatatgtttctccgttgattcaaat

SEQ ID NO: 107772 - DNA, 25 bp, Probe sequence
cactttatcacgcgacaaaacatta

SEQ ID NO: 107773 - DNA, 25 bp, Probe sequence
gctgacactttgcaaggtttgaagg

SEQ ID NO: 107774 - DNA, 25 bp, Probe sequence
gacactttgcaaggtttgaaggagt

SEQ ID NO: 107775 - DNA, 25 bp, Probe sequence
gtttctccgttgattcaaatgaaaa

SEQ ID NO: 107776 - DNA, 25 bp, Probe sequence
gtctgctgacactttgcaaggtttg

SEQ ID NO: 107777 - DNA, 25 bp, Probe sequence
tgcaaggtttgaaggagtttaactt

SEQ ID NO: 107778 - DNA, 25 bp, Probe sequence
taaatatgtttctccgttgattcaa

SEQ ID NO: 107779 - DNA, 25 bp, Probe sequence
tatgtttctccgttgattcaaatga

SEQ ID NO: 107780 - DNA, 25 bp, Probe sequence
ttatcacgcgacaaaacattaaata

SEQ ID NO: 107781 - DNA, 25 bp, Probe sequence
ttgtctgctgacactttgcaaggtt

SEQ ID NO: 107782 - DNA, 25 bp, Probe sequence
atatgaatatgatgtgtctgatgat

SEQ ID NO: 107783 - DNA, 25 bp, Probe sequence
ataagtgtcatgtacagacacctca

SEQ ID NO: 107784 - DNA, 25 bp, Probe sequence
agtgtcatgtacagacacctcatat

SEQ ID NO: 107785 - DNA, 25 bp, Probe sequence
aagtgtcatgtacagacacctcata

SEQ ID NO: 107786 - DNA, 25 bp, Probe sequence
cactaaatggaacgatatgaatatg

SEQ ID NO: 107787 - DNA, 25 bp, Probe sequence
cacctcatattggtattaaaggaga

SEQ ID NO: 107788 - DNA, 25 bp, Probe sequence
cgatatgaatatgatgtgtctgatg

SEQ ID NO: 107789 - DNA, 25 bp, Probe sequence
gacacctcatattggtattaaagga

SEQ ID NO: 107790 - DNA, 25 bp, Probe sequence
gatgtgtctgatgatataagtgtca

SEQ ID NO: 107791 - DNA, 25 bp, Probe sequence
gtctgatgatataagtgtcatgtac

SEQ ID NO: 107792 - DNA, 25 bp, Probe sequence
gtgtctgatgatataagtgtcatgt

SEQ ID NO: 107793 - DNA, 25 bp, Probe sequence
gtgtcatgtacagacacctcatatt

SEQ ID NO: 107794 - DNA, 25 bp, Probe sequence
tgtcatgtacagacacctcatattg

SEQ ID NO: 107795 - DNA, 25 bp, Probe sequence
tgatgtgtctgatgatataagtgtc

SEQ ID NO: 107796 - DNA, 25 bp, Probe sequence
taagtgtcatgtacagacacctcat

SEQ ID NO: 107797 - DNA, 25 bp, Probe sequence
attagtttcgtatcacgtgtacaca

SEQ ID NO: 107798 - DNA, 25 bp, Probe sequence
atgtatattttgacccaaaacacct

SEQ ID NO: 107799 - DNA, 25 bp, Probe sequence
agcgtttgaagattgtctatactct

SEQ ID NO: 107800 - DNA, 25 bp, Probe sequence
accaaatattaacttgtgtacgcgt

SEQ ID NO: 107801 - DNA, 25 bp, Probe sequence
aaaatccattattatgtattgtata

SEQ ID NO: 107802 - DNA, 25 bp, Probe sequence
aattttcgactttctttatgtgaat

SEQ ID NO: 107803 - DNA, 25 bp, Probe sequence
gaattcatagtcattcatttgactg

SEQ ID NO: 107804 - DNA, 25 bp, Probe sequence
gaatataatcacatgtaagcgtttg

SEQ ID NO: 107805 - DNA, 25 bp, Probe sequence
gatatgaaattttcgactttcttta

SEQ ID NO: 107806 - DNA, 25 bp, Probe sequence
gattgtctatactctaaatgaattc

SEQ ID NO: 107807 - DNA, 25 bp, Probe sequence
tgtgtacgcgtttttttatggaaag

SEQ ID NO: 107808 - DNA, 25 bp, Probe sequence
tcacgtgtacacaagttagttacca

SEQ ID NO: 107809 - DNA, 25 bp, Probe sequence
taacttgtgtacgcgtttttttatg

SEQ ID NO: 107810 - DNA, 25 bp, Probe sequence
tatacaacgtgtttttgtgggtctt

SEQ ID NO: 107811 - DNA, 25 bp, Probe sequence
ttgacccaaaacacctttatttatg

SEQ ID NO: 107812 - DNA, 25 bp, Probe sequence
atacctacattgataattgactttg

SEQ ID NO: 107813 - DNA, 25 bp, Probe sequence
ataccctctctttgtaattagatga

SEQ ID NO: 107814 - DNA, 25 bp, Probe sequence
atggggtatacctacattgataatt

SEQ ID NO: 107815 - DNA, 25 bp, Probe sequence
aaatgctgacttagaatacaaaatt

SEQ ID NO: 107816 - DNA, 25 bp, Probe sequence
aatttacatgtatttttattatctt

SEQ ID NO: 107817 - DNA, 25 bp, Probe sequence
gccgaaagactactcggcagtctaa

SEQ ID NO: 107818 - DNA, 25 bp, Probe sequence
gactttgtaggtataccctctcttt

SEQ ID NO: 107819 - DNA, 25 bp, Probe sequence
gagaggagtgtgagggttgtctgcc

SEQ ID NO: 107820 - DNA, 25 bp, Probe sequence
gagtgtgagggttgtctgccgaaag

SEQ ID NO: 107821 - DNA, 25 bp, Probe sequence
gatatgtgataattaaatgctgact

SEQ ID NO: 107822 - DNA, 25 bp, Probe sequence
gtaggtataccctctctttgtaatt

SEQ ID NO: 107823 - DNA, 25 bp, Probe sequence
gggttgtctgccgaaagactactcg

SEQ ID NO: 107824 - DNA, 25 bp, Probe sequence
ggtataccctctctttgtaattaga

SEQ ID NO: 107825 - DNA, 25 bp, Probe sequence
tacagcttatatatggggtatacct

SEQ ID NO: 107826 - DNA, 25 bp, Probe sequence
tactcggcagtctaaaatcattaca

SEQ ID NO: 107827 - DNA, 25 bp, Probe sequence
attgcgtcttacatagttgtttgaa

SEQ ID NO: 107828 - DNA, 25 bp, Probe sequence
atagttatctcacatatttcaagca

SEQ ID NO: 107829 - DNA, 25 bp, Probe sequence
ataatcatttacttttctgaaaaat

SEQ ID NO: 107830 - DNA, 25 bp, Probe sequence
atctcacatatttcaagcattgatt

SEQ ID NO: 107831 - DNA, 25 bp, Probe sequence
atggcatattaaggctagagtgtga

SEQ ID NO: 107832 - DNA, 25 bp, Probe sequence
aacgattattgcgtcttacatagtt

SEQ ID NO: 107833 - DNA, 25 bp, Probe sequence
aatgtttatttgatcatgattattt

SEQ ID NO: 107834 - DNA, 25 bp, Probe sequence
caagcattgattaagtatatagagc

SEQ ID NO: 107835 - DNA, 25 bp, Probe sequence
gagataccgcattctagtctttttt

SEQ ID NO: 107836 - DNA, 25 bp, Probe sequence
gagtgtgaggagagataccgcattc

SEQ ID NO: 107837 - DNA, 25 bp, Probe sequence
ggagagataccgcattctagtcttt

SEQ ID NO: 107838 - DNA, 25 bp, Probe sequence
taagctgtttttaagatttcaggag

SEQ ID NO: 107839 - DNA, 25 bp, Probe sequence
taccgcattctagtcttttttatta

SEQ ID NO: 107840 - DNA, 25 bp, Probe sequence
tagagcactattttgtatttgttaa

SEQ ID NO: 107841 - DNA, 25 bp, Probe sequence
tatttagctacagataacattttta

SEQ ID NO: 107842 - DNA, 25 bp, Probe sequence
atttcaatattgccataatcatttt

SEQ ID NO: 107843 - DNA, 25 bp, Probe sequence
atataacgcctccatgttaatgaaa

SEQ ID NO: 107844 - DNA, 25 bp, Probe sequence
atcattagtatttttatggctgaaa

SEQ ID NO: 107845 - DNA, 25 bp, Probe sequence
agtaggcgatattaatattttcatt

SEQ ID NO: 107846 - DNA, 25 bp, Probe sequence
aacgcctccatgttaatgaaaagta

SEQ ID NO: 107847 - DNA, 25 bp, Probe sequence
aataatttatttcaatattgccata

SEQ ID NO: 107848 - DNA, 25 bp, Probe sequence
aatattgccataatcattttaaaaa

SEQ ID NO: 107849 - DNA, 25 bp, Probe sequence
cgcctccatgttaatgaaaagtagt

SEQ ID NO: 107850 - DNA, 25 bp, Probe sequence
gcgatattaatattttcattgtttt

SEQ ID NO: 107851 - DNA, 25 bp, Probe sequence
gaaaagtagttgatacgtgaagcta

SEQ ID NO: 107852 - DNA, 25 bp, Probe sequence
gttgatacgtgaagctaaataattt

SEQ ID NO: 107853 - DNA, 25 bp, Probe sequence
taatcattagtatttttatggctga

SEQ ID NO: 107854 - DNA, 25 bp, Probe sequence
tttcattgttttttgtgtacttcaa

SEQ ID NO: 107855 - DNA, 25 bp, Probe sequence
ttgttttttgtgtacttcaattagt

SEQ ID NO: 107856 - DNA, 25 bp, Probe sequence
ttgtgtacttcaattagtataacaa

SEQ ID NO: 107857 - DNA, 25 bp, Probe sequence
atagaaaaatatctcactgctgttt

SEQ ID NO: 107858 - DNA, 25 bp, Probe sequence
agcgaacttttatatgattttaaca

SEQ ID NO: 107859 - DNA, 25 bp, Probe sequence
acttgtggacgtatcaggcaaatga

SEQ ID NO: 107860 - DNA, 25 bp, Probe sequence
acatgagagcttatacatacgtcaa

SEQ ID NO: 107861 - DNA, 25 bp, Probe sequence
ggtacttgtggacgtatcaggcaaa

SEQ ID NO: 107862 - DNA, 25 bp, Probe sequence
ctcactgctgtttttctgaatttat

SEQ ID NO: 107863 - DNA, 25 bp, Probe sequence
gcatctggtacttgtggacgtatca

SEQ ID NO: 107864 - DNA, 25 bp, Probe sequence
gaatttatgcatctggtacttgtgg

SEQ ID NO: 107865 - DNA, 25 bp, Probe sequence
gagcttatacatacgtcaatgacat

SEQ ID NO: 107866 - DNA, 25 bp, Probe sequence
gattttaacagagtgcgaattatgc

SEQ ID NO: 107867 - DNA, 25 bp, Probe sequence
gtttttctgaatttatgcatctggt

SEQ ID NO: 107868 - DNA, 25 bp, Probe sequence
gtcaatgacattaaagcgaactttt

SEQ ID NO: 107869 - DNA, 25 bp, Probe sequence
tctggtacttgtggacgtatcaggc

SEQ ID NO: 107870 - DNA, 25 bp, Probe sequence
taacatgtacctcctttctaaattt

SEQ ID NO: 107871 - DNA, 25 bp, Probe sequence
ttatgcatctggtacttgtggacgt

SEQ ID NO: 107872 - DNA, 25 bp, Probe sequence
atttctgtcttttatgggacggttg

SEQ ID NO: 107873 - DNA, 25 bp, Probe sequence
atgtgtggatttttatgtttttaga

SEQ ID NO: 107874 - DNA, 25 bp, Probe sequence
agggttatagctccttaatgtgtgg

SEQ ID NO: 107875 - DNA, 25 bp, Probe sequence
agagatagtaatttctgtcttttat

SEQ ID NO: 107876 - DNA, 25 bp, Probe sequence
aatccacacattagggttatagctc

SEQ ID NO: 107877 - DNA, 25 bp, Probe sequence
aattaaatccacacattagggttat

SEQ ID NO: 107878 - DNA, 25 bp, Probe sequence
cacacattagggttatagctcctta

SEQ ID NO: 107879 - DNA, 25 bp, Probe sequence
gctccttaatgtgtggatttttatg

SEQ ID NO: 107880 - DNA, 25 bp, Probe sequence
gatagtaatttctgtcttttatggg

SEQ ID NO: 107881 - DNA, 25 bp, Probe sequence
gttatagctccttaatgtgtggatt

SEQ ID NO: 107882 - DNA, 25 bp, Probe sequence
gtaatttctgtcttttatgggacgg

SEQ ID NO: 107883 - DNA, 25 bp, Probe sequence
tatgggacggttgttatcattgcta

SEQ ID NO: 107884 - DNA, 25 bp, Probe sequence
ggatttttatgtttttagacagaag

SEQ ID NO: 107885 - DNA, 25 bp, Probe sequence
ttctgtcttttatgggacggttgtt

SEQ ID NO: 107886 - DNA, 25 bp, Probe sequence
ttagggttatagctccttaatgtgt

SEQ ID NO: 107887 - DNA, 25 bp, Probe sequence
atatcttccagtaaattgattatac

SEQ ID NO: 107888 - DNA, 25 bp, Probe sequence
ataattcctacataggagtgtgaca

SEQ ID NO: 107889 - DNA, 25 bp, Probe sequence
atcaatcgactaaatatcttccagt

SEQ ID NO: 107890 - DNA, 25 bp, Probe sequence
atcgtatgctgaaaatagttgatag

SEQ ID NO: 107891 - DNA, 25 bp, Probe sequence
aaatatgaataattcctacatagga

SEQ ID NO: 107892 - DNA, 25 bp, Probe sequence
aatcgactaaatatcttccagtaaa

SEQ ID NO: 107893 - DNA, 25 bp, Probe sequence
gactaaatatcttccagtaaattga

SEQ ID NO: 107894 - DNA, 25 bp, Probe sequence
gatttgttataatttatcgtatgct

SEQ ID NO: 107895 - DNA, 25 bp, Probe sequence
gattatactaattcacaacgcaaaa

SEQ ID NO: 107896 - DNA, 25 bp, Probe sequence
gttataatttatcgtatgctgaaaa

SEQ ID NO: 107897 - DNA, 25 bp, Probe sequence
ggtatcaatcgactaaatatcttcc

SEQ ID NO: 107898 - DNA, 25 bp, Probe sequence
tcgtattctcccttgaaaaatataa

SEQ ID NO: 107899 - DNA, 25 bp, Probe sequence
tatactaattcacaacgcaaaaata

SEQ ID NO: 107900 - DNA, 25 bp, Probe sequence
tttcgtattctcccttgaaaaatat

SEQ ID NO: 107901 - DNA, 25 bp, Probe sequence
ttctcccttgaaaaatataataatt

SEQ ID NO: 107902 - DNA, 25 bp, Probe sequence
ggcgttcgaactgaatacctcgggt

SEQ ID NO: 107903 - DNA, 25 bp, Probe sequence
atataaaatgacccgaggcgttcga

SEQ ID NO: 107904 - DNA, 25 bp, Probe sequence
aaatgacccgaggcgttcgaactga

SEQ ID NO: 107905 - DNA, 25 bp, Probe sequence
aaagctaggcagtaatgtttgaaaa

SEQ ID NO: 107906 - DNA, 25 bp, Probe sequence
gaactgaatacctcgggtttaattg

SEQ ID NO: 107907 - DNA, 25 bp, Probe sequence
gaaacggatatgatgaggaacattt

SEQ ID NO: 107908 - DNA, 25 bp, Probe sequence
gaaatatgtttaagtccgaactcct

SEQ ID NO: 107909 - DNA, 25 bp, Probe sequence
gacccgaggcgttcgaactgaatac

SEQ ID NO: 107910 - DNA, 25 bp, Probe sequence
gtgagatgacaattgaaacggatat

SEQ ID NO: 107911 - DNA, 25 bp, Probe sequence
tgaatacctcgggtttaattgaata

SEQ ID NO: 107912 - DNA, 25 bp, Probe sequence
tccgaactccttgtttatacttata

SEQ ID NO: 107913 - DNA, 25 bp, Probe sequence
taagtccgaactccttgtttatact

SEQ ID NO: 107914 - DNA, 25 bp, Probe sequence
taagtacatttgctcatatttataa

SEQ ID NO: 107915 - DNA, 25 bp, Probe sequence
taacgtcaattaaagctaggcagta

SEQ ID NO: 107916 - DNA, 25 bp, Probe sequence
tatgtttaagtccgaactccttgtt

SEQ ID NO: 107917 - DNA, 25 bp, Probe sequence
attgtccatcattttaacgttataa

SEQ ID NO: 107918 - DNA, 25 bp, Probe sequence
atattgggggaagagcatctatata

SEQ ID NO: 107919 - DNA, 25 bp, Probe sequence
atagattgtccatcattttaacgtt

SEQ ID NO: 107920 - DNA, 25 bp, Probe sequence
atgcaatgaatagattgtccatcat

SEQ ID NO: 107921 - DNA, 25 bp, Probe sequence
agattgtccatcattttaacgttat

SEQ ID NO: 107922 - DNA, 25 bp, Probe sequence
gaatttaacgacttagaactacaga

SEQ ID NO: 107923 - DNA, 25 bp, Probe sequence
gaatagattgtccatcattttaacg

SEQ ID NO: 107924 - DNA, 25 bp, Probe sequence
gaagagcatctatatatttttttaa

SEQ ID NO: 107925 - DNA, 25 bp, Probe sequence
gagcatctatatatttttttaagta

SEQ ID NO: 107926 - DNA, 25 bp, Probe sequence
gggggaagagcatctatatattttt

SEQ ID NO: 107927 - DNA, 25 bp, Probe sequence
tcccccttaaattattgtgaagtat

SEQ ID NO: 107928 - DNA, 25 bp, Probe sequence
taacgacttagaactacagaagtaa

SEQ ID NO: 107929 - DNA, 25 bp, Probe sequence
tatataagacgtcttatttccccct

SEQ ID NO: 107930 - DNA, 25 bp, Probe sequence
tattgtgaagtatatgcaaaatgca

SEQ ID NO: 107931 - DNA, 25 bp, Probe sequence
ttgtccatcattttaacgttataat

SEQ ID NO: 107932 - DNA, 25 bp, Probe sequence
attacgtcatgcttttttgtttact

SEQ ID NO: 107933 - DNA, 25 bp, Probe sequence
atatgatgttagcgacatggacaat

SEQ ID NO: 107934 - DNA, 25 bp, Probe sequence
ataagctaagtaataagttgataat

SEQ ID NO: 107935 - DNA, 25 bp, Probe sequence
gcagtctaaaataaagcatcattta

SEQ ID NO: 107936 - DNA, 25 bp, Probe sequence
gacaatatgatattacgtcatgctt

SEQ ID NO: 107937 - DNA, 25 bp, Probe sequence
gatagataagtgtaaatttcttgta

SEQ ID NO: 107938 - DNA, 25 bp, Probe sequence
gatattacgtcatgcttttttgttt

SEQ ID NO: 107939 - DNA, 25 bp, Probe sequence
gatttgacgtaatatgatgttagcg

SEQ ID NO: 107940 - DNA, 25 bp, Probe sequence
gttagcgacatggacaatatgatat

SEQ ID NO: 107941 - DNA, 25 bp, Probe sequence
gtatgtaattctttgaaggaagtaa

SEQ ID NO: 107942 - DNA, 25 bp, Probe sequence
gtaaatttcttgtaaacaggtatat

SEQ ID NO: 107943 - DNA, 25 bp, Probe sequence
ggaagtaagtgagaaaggagtatgt

SEQ ID NO: 107944 - DNA, 25 bp, Probe sequence
tgataattactaacaacaataacta

SEQ ID NO: 107945 - DNA, 25 bp, Probe sequence
taatagtatgtaattctttgaagga

SEQ ID NO: 107946 - DNA, 25 bp, Probe sequence
ttgacgtaatatgatgttagcgaca

SEQ ID NO: 107947 - DNA, 25 bp, Probe sequence
attgaatttatagctggctaaaatt

SEQ ID NO: 107948 - DNA, 25 bp, Probe sequence
attagtgatgaacccttagtctttt

SEQ ID NO: 107949 - DNA, 25 bp, Probe sequence
atagctggctaaaattaaaaagact

SEQ ID NO: 107950 - DNA, 25 bp, Probe sequence
aaagactgaggcaccaatcactaga

SEQ ID NO: 107951 - DNA, 25 bp, Probe sequence
aaaaagactgaggcaccaatcacta

SEQ ID NO: 107952 - DNA, 25 bp, Probe sequence
aagactgaggcaccaatcactagaa

SEQ ID NO: 107953 - DNA, 25 bp, Probe sequence
aataattagtgatgaacccttagtc

SEQ ID NO: 107954 - DNA, 25 bp, Probe sequence
aattagtgatgaacccttagtcttt

SEQ ID NO: 107955 - DNA, 25 bp, Probe sequence
gactgaggcaccaatcactagaaaa

SEQ ID NO: 107956 - DNA, 25 bp, Probe sequence
gaggcaccaatcactagaaaaatcg

SEQ ID NO: 107957 - DNA, 25 bp, Probe sequence
gatgaacccttagtctttttaatgt

SEQ ID NO: 107958 - DNA, 25 bp, Probe sequence
gtgatgaacccttagtctttttaat

SEQ ID NO: 107959 - DNA, 25 bp, Probe sequence
ggcaccaatcactagaaaaatcgat

SEQ ID NO: 107960 - DNA, 25 bp, Probe sequence
tagtgatgaacccttagtcttttta

SEQ ID NO: 107961 - DNA, 25 bp, Probe sequence
ttagtgatgaacccttagtcttttt

SEQ ID NO: 107962 - DNA, 25 bp, Probe sequence
atatgaaaacgattccatctagacg

SEQ ID NO: 107963 - DNA, 25 bp, Probe sequence
atgaaaacgattccatctagacgaa

SEQ ID NO: 107964 - DNA, 25 bp, Probe sequence
aaagccaattagccaaatttatata

SEQ ID NO: 107965 - DNA, 25 bp, Probe sequence
aaacataaagccaattagccaaatt

SEQ ID NO: 107966 - DNA, 25 bp, Probe sequence
aaaacgattccatctagacgaataa

SEQ ID NO: 107967 - DNA, 25 bp, Probe sequence
aaaagattatacgcataaacgagaa

SEQ ID NO: 107968 - DNA, 25 bp, Probe sequence
aacgattccatctagacgaataaaa

SEQ ID NO: 107969 - DNA, 25 bp, Probe sequence
gaatagtggcatatattataatcta

SEQ ID NO: 107970 - DNA, 25 bp, Probe sequence
gaaaacgattccatctagacgaata

SEQ ID NO: 107971 - DNA, 25 bp, Probe sequence
gattaaacataaagccaattagcca

SEQ ID NO: 107972 - DNA, 25 bp, Probe sequence
gattccatctagacgaataaaaatg

SEQ ID NO: 107973 - DNA, 25 bp, Probe sequence
gtggcatatattataatctaatgaa

SEQ ID NO: 107974 - DNA, 25 bp, Probe sequence
taaaaggtggatgatatagatatat

SEQ ID NO: 107975 - DNA, 25 bp, Probe sequence
tataatatttatcgtttagttgtaa

SEQ ID NO: 107976 - DNA, 25 bp, Probe sequence
tttgcatataatatttatcgtttag

SEQ ID NO: 107977 - DNA, 25 bp, Probe sequence
atgtaattacttataaggggtgaag

SEQ ID NO: 107978 - DNA, 25 bp, Probe sequence
agcaaccacgtcatatatagtttct

SEQ ID NO: 107979 - DNA, 25 bp, Probe sequence
accacgtcatatatagtttctactt

SEQ ID NO: 107980 - DNA, 25 bp, Probe sequence
acgtcatatatagtttctacttata

SEQ ID NO: 107981 - DNA, 25 bp, Probe sequence
actaatcatgattgaagtaactata

SEQ ID NO: 107982 - DNA, 25 bp, Probe sequence
aatccttatctgaatttttcgaatc

SEQ ID NO: 107983 - DNA, 25 bp, Probe sequence
aatattaattgtataaatccttatc

SEQ ID NO: 107984 - DNA, 25 bp, Probe sequence
aattgtttatttatattagacgctt

SEQ ID NO: 107985 - DNA, 25 bp, Probe sequence
cgcttatgtaaagagggcgtaacct

SEQ ID NO: 107986 - DNA, 25 bp, Probe sequence
cgcaaattataagcaaccacgtcat

SEQ ID NO: 107987 - DNA, 25 bp, Probe sequence
ccttatctgaatttttcgaatcaag

SEQ ID NO: 107988 - DNA, 25 bp, Probe sequence
gaatttttcgaatcaagaacgcaaa

SEQ ID NO: 107989 - DNA, 25 bp, Probe sequence
tgtaaagagggcgtaaccttaaatg

SEQ ID NO: 107990 - DNA, 25 bp, Probe sequence
tgtttatttatattagacgcttatg

SEQ ID NO: 107991 - DNA, 25 bp, Probe sequence
ttttcgaatcaagaacgcaaattat

SEQ ID NO: 107992 - DNA, 25 bp, Probe sequence
attcctcccaatctttggatttttg

SEQ ID NO: 107993 - DNA, 25 bp, Probe sequence
atttaattcctcccaatctttggat

SEQ ID NO: 107994 - DNA, 25 bp, Probe sequence
ctcccaatctttggatttttgtgaa

SEQ ID NO: 107995 - DNA, 25 bp, Probe sequence
cccaatctttggatttttgtgaaag

SEQ ID NO: 107996 - DNA, 25 bp, Probe sequence
cctcccaatctttggatttttgtga

SEQ ID NO: 107997 - DNA, 25 bp, Probe sequence
ccaatctttggatttttgtgaaaga

SEQ ID NO: 107998 - DNA, 25 bp, Probe sequence
ggatttttgtgaaagatgattactt

SEQ ID NO: 107999 - DNA, 25 bp, Probe sequence
tggatttttgtgaaagatgattact

SEQ ID NO: 108000 - DNA, 25 bp, Probe sequence
tcctcccaatctttggatttttgtg

SEQ ID NO: 108001 - DNA, 25 bp, Probe sequence
tcccaatctttggatttttgtgaaa

SEQ ID NO: 108002 - DNA, 25 bp, Probe sequence
taattcctcccaatctttggatttt

SEQ ID NO: 108003 - DNA, 25 bp, Probe sequence
tttgtgaaagatgattactttatca

SEQ ID NO: 108004 - DNA, 25 bp, Probe sequence
tttaattcctcccaatctttggatt

SEQ ID NO: 108005 - DNA, 25 bp, Probe sequence
ttaattcctcccaatctttggattt

SEQ ID NO: 108006 - DNA, 25 bp, Probe sequence
ttcctcccaatctttggatttttgt

SEQ ID NO: 108007 - DNA, 25 bp, Probe sequence
atcggagaaatacctagatatacta

SEQ ID NO: 108008 - DNA, 25 bp, Probe sequence
accaaaatcggagaaatacctagat

SEQ ID NO: 108009 - DNA, 25 bp, Probe sequence
aaatcggagaaatacctagatatac

SEQ ID NO: 108010 - DNA, 25 bp, Probe sequence
aatcggagaaatacctagatatact

SEQ ID NO: 108011 - DNA, 25 bp, Probe sequence
caaaatcggagaaatacctagatat

SEQ ID NO: 108012 - DNA, 25 bp, Probe sequence
cggagaaatacctagatatactaag

SEQ ID NO: 108013 - DNA, 25 bp, Probe sequence
ccaaaatcggagaaatacctagata

SEQ ID NO: 108014 - DNA, 25 bp, Probe sequence
gaaatacctagatatactaagaaaa

SEQ ID NO: 108015 - DNA, 25 bp, Probe sequence
gagaaatacctagatatactaagaa

SEQ ID NO: 108016 - DNA, 25 bp, Probe sequence
gagaatagatgtttaaattaaccaa

SEQ ID NO: 108017 - DNA, 25 bp, Probe sequence
ggagaaatacctagatatactaaga

SEQ ID NO: 108018 - DNA, 25 bp, Probe sequence
tcggagaaatacctagatatactaa

SEQ ID NO: 108019 - DNA, 25 bp, Probe sequence
taaccaaaatcggagaaatacctag

SEQ ID NO: 108020 - DNA, 25 bp, Probe sequence
tagatgtttaaattaaccaaaatcg

SEQ ID NO: 108021 - DNA, 25 bp, Probe sequence
ttcagaggagaatagatgtttaaat

SEQ ID NO: 108022 - DNA, 25 bp, Probe sequence
atcatgattatttactaattcgtat

SEQ ID NO: 108023 - DNA, 25 bp, Probe sequence
atggctttcaataaaaagactcgtt

SEQ ID NO: 108024 - DNA, 25 bp, Probe sequence
accagtctttttgagtatgcttaaa

SEQ ID NO: 108025 - DNA, 25 bp, Probe sequence
acaacttgtctaattgattaaggcg

SEQ ID NO: 108026 - DNA, 25 bp, Probe sequence
aagatgaaggtattacttttgatat

SEQ ID NO: 108027 - DNA, 25 bp, Probe sequence
catgtaccagtctttttgagtatgc

SEQ ID NO: 108028 - DNA, 25 bp, Probe sequence
gactcgttttttatagtgaaggtag

SEQ ID NO: 108029 - DNA, 25 bp, Probe sequence
gattaaggcgaatggctttcaataa

SEQ ID NO: 108030 - DNA, 25 bp, Probe sequence
gtatacatgtaccagtctttttgag

SEQ ID NO: 108031 - DNA, 25 bp, Probe sequence
gtaccagtctttttgagtatgctta

SEQ ID NO: 108032 - DNA, 25 bp, Probe sequence
ggtattacttttgatatatagggct

SEQ ID NO: 108033 - DNA, 25 bp, Probe sequence
taattcgtataatacaacttgtcta

SEQ ID NO: 108034 - DNA, 25 bp, Probe sequence
tatattttttcgaattagactggta

SEQ ID NO: 108035 - DNA, 25 bp, Probe sequence
tatatagggctaaggaagtgttttt

SEQ ID NO: 108036 - DNA, 25 bp, Probe sequence
ttcgaattagactggtatacatgta

SEQ ID NO: 108037 - DNA, 25 bp, Probe sequence
attatcattaacccaactcacagtg

SEQ ID NO: 108038 - DNA, 25 bp, Probe sequence
atgatgatgcttctactcgattata

SEQ ID NO: 108039 - DNA, 25 bp, Probe sequence
aggtgtgggctttattatcattaac

SEQ ID NO: 108040 - DNA, 25 bp, Probe sequence
actcacagtgacgggttaggcaagg

SEQ ID NO: 108041 - DNA, 25 bp, Probe sequence
aaactagatataattgtccgattta

SEQ ID NO: 108042 - DNA, 25 bp, Probe sequence
aatcatgacataggcgctttttttt

SEQ ID NO: 108043 - DNA, 25 bp, Probe sequence
gaatggttaagtttgtctttgaaca

SEQ ID NO: 108044 - DNA, 25 bp, Probe sequence
gataagcgcctatgtgatggtaaat

SEQ ID NO: 108045 - DNA, 25 bp, Probe sequence
gtagttgtgtatgttttgtggtcgt

SEQ ID NO: 108046 - DNA, 25 bp, Probe sequence
gtcatctaattacaggaaatccgca

SEQ ID NO: 108047 - DNA, 25 bp, Probe sequence
tgaattaccgagtacgggcacgctc

SEQ ID NO: 108048 - DNA, 25 bp, Probe sequence
tacgggcacgctcggtgttgtaaag

SEQ ID NO: 108049 - DNA, 25 bp, Probe sequence
tacgatggtatctagttttattatt

SEQ ID NO: 108050 - DNA, 25 bp, Probe sequence
tataaaagtgtaatgttcccctgaa

SEQ ID NO: 108051 - DNA, 25 bp, Probe sequence
ttatataaattacccacatcttttt

SEQ ID NO: 108052 - DNA, 25 bp, Probe sequence
gttagttaggttgtaagccatatgg

SEQ ID NO: 108053 - DNA, 25 bp, Probe sequence
attgcaacttaattttcctgtaaca

SEQ ID NO: 108054 - DNA, 25 bp, Probe sequence
aagccatatggtaattgatagtatt

SEQ ID NO: 108055 - DNA, 25 bp, Probe sequence
aattttcctgtaacatagtgtgatt

SEQ ID NO: 108056 - DNA, 25 bp, Probe sequence
gcaacttaattttcctgtaacatag

SEQ ID NO: 108057 - DNA, 25 bp, Probe sequence
gttaggttgtaagccatatggtaat

SEQ ID NO: 108058 - DNA, 25 bp, Probe sequence
gtaattgcaacttaattttcctgta

SEQ ID NO: 108059 - DNA, 25 bp, Probe sequence
gtgtgattaattttcagtagggggt

SEQ ID NO: 108060 - DNA, 25 bp, Probe sequence
ggttgtaagccatatggtaattgat

SEQ ID NO: 108061 - DNA, 25 bp, Probe sequence
tgattaattttcagtagggggttat

SEQ ID NO: 108062 - DNA, 25 bp, Probe sequence
tttcgttagttaggttgtaagccat

SEQ ID NO: 108063 - DNA, 25 bp, Probe sequence
taaacggaaatatttgtaattgcaa

SEQ ID NO: 108064 - DNA, 25 bp, Probe sequence
ttttcctgtaacatagtgtgattaa

SEQ ID NO: 108065 - DNA, 25 bp, Probe sequence
ttgcaatagattgttgttataatta

SEQ ID NO: 108066 - DNA, 25 bp, Probe sequence
ttgatagtattttaatttgcaatag

SEQ ID NO: 108067 - DNA, 25 bp, Probe sequence
acacgcggtaaaacgaagtcagtca

SEQ ID NO: 108068 - DNA, 25 bp, Probe sequence
cactcccattggcatttacgaagtt

SEQ ID NO: 108069 - DNA, 25 bp, Probe sequence
caccgcgtgtttttaacatagctta

SEQ ID NO: 108070 - DNA, 25 bp, Probe sequence
cccactcccattggcatttacgaag

SEQ ID NO: 108071 - DNA, 25 bp, Probe sequence
ctcccattggcatttacgaagttta

SEQ ID NO: 108072 - DNA, 25 bp, Probe sequence
cccaccgcgtgtttttaacatagct

SEQ ID NO: 108073 - DNA, 25 bp, Probe sequence
ccgcgtgtttttaacatagcttaat

SEQ ID NO: 108074 - DNA, 25 bp, Probe sequence
gcccaccgcgtgtttttaacatagc

SEQ ID NO: 108075 - DNA, 25 bp, Probe sequence
gtataacattattaaacacgcggta

SEQ ID NO: 108076 - DNA, 25 bp, Probe sequence
gtcaattcaaactgatttcgcccac

SEQ ID NO: 108077 - DNA, 25 bp, Probe sequence
ggtaaaacgaagtcagtcaattcaa

SEQ ID NO: 108078 - DNA, 25 bp, Probe sequence
tcccattggcatttacgaagtttaa

SEQ ID NO: 108079 - DNA, 25 bp, Probe sequence
tcccactcccattggcatttacgaa

SEQ ID NO: 108080 - DNA, 25 bp, Probe sequence
tcaattcaaactgatttcgcccacc

SEQ ID NO: 108081 - DNA, 25 bp, Probe sequence
tacgaagtttaaatgtgcaattaga

SEQ ID NO: 108082 - DNA, 25 bp, Probe sequence
attatttgagtttattcctcgaata

SEQ ID NO: 108083 - DNA, 25 bp, Probe sequence
agcgtatacactttaaattctcttt

SEQ ID NO: 108084 - DNA, 25 bp, Probe sequence
acgctttctcgtcaaattaaacaat

SEQ ID NO: 108085 - DNA, 25 bp, Probe sequence
acaaatgtaaacgctttctcgtcaa

SEQ ID NO: 108086 - DNA, 25 bp, Probe sequence
aaatctctccatacagctaatctaa

SEQ ID NO: 108087 - DNA, 25 bp, Probe sequence
aaaatacgacaccagcaaacataat

SEQ ID NO: 108088 - DNA, 25 bp, Probe sequence
cattagaactaagatgtgcatcccg

SEQ ID NO: 108089 - DNA, 25 bp, Probe sequence
gaacaagtattacggtttatcctga

SEQ ID NO: 108090 - DNA, 25 bp, Probe sequence
gtaggatacttactttgagggaaga

SEQ ID NO: 108091 - DNA, 25 bp, Probe sequence
gtaatagctcataaatctctccata

SEQ ID NO: 108092 - DNA, 25 bp, Probe sequence
ggggtgtatttttatgctaatcatc

SEQ ID NO: 108093 - DNA, 25 bp, Probe sequence
ggtttatcctgatacaatcattgtg

SEQ ID NO: 108094 - DNA, 25 bp, Probe sequence
ggaatcaagacccaagcatgtaaat

SEQ ID NO: 108095 - DNA, 25 bp, Probe sequence
tggtcattatgagtgcttggttaag

SEQ ID NO: 108096 - DNA, 25 bp, Probe sequence
tagcctatttaaaagacaatctcca

SEQ ID NO: 108097 - DNA, 25 bp, Probe sequence
atacgacaccaacatattttaacta

SEQ ID NO: 108098 - DNA, 25 bp, Probe sequence
atggcttatacacttacaaatattg

SEQ ID NO: 108099 - DNA, 25 bp, Probe sequence
aggatcatggcttatacacttacaa

SEQ ID NO: 108100 - DNA, 25 bp, Probe sequence
ggtactaaagttgcgaactcgttat

SEQ ID NO: 108101 - DNA, 25 bp, Probe sequence
aatgctgtgatggtactaaagttgc

SEQ ID NO: 108102 - DNA, 25 bp, Probe sequence
aatattgtggaaaacgtgacatttt

SEQ ID NO: 108103 - DNA, 25 bp, Probe sequence
gcaagtatggactaagatataagga

SEQ ID NO: 108104 - DNA, 25 bp, Probe sequence
gacaccaacatattttaactatgaa

SEQ ID NO: 108105 - DNA, 25 bp, Probe sequence
gatcatggcttatacacttacaaat

SEQ ID NO: 108106 - DNA, 25 bp, Probe sequence
gttgcgaactcgttatagataagta

SEQ ID NO: 108107 - DNA, 25 bp, Probe sequence
gtgatggtactaaagttgcgaactc

SEQ ID NO: 108108 - DNA, 25 bp, Probe sequence
gtgacattttcaagtttaaaatacg

SEQ ID NO: 108109 - DNA, 25 bp, Probe sequence
gtggaaaacgtgacattttcaagtt

SEQ ID NO: 108110 - DNA, 25 bp, Probe sequence
ggaaaaggatcatggcttatacact

SEQ ID NO: 108111 - DNA, 25 bp, Probe sequence
taactatgaatgctgtgatggtact

SEQ ID NO: 108112 - DNA, 25 bp, Probe sequence
attaatcatattacactttagtgtg

SEQ ID NO: 108113 - DNA, 25 bp, Probe sequence
ataccaagtgattttaaatacagta

SEQ ID NO: 108114 - DNA, 25 bp, Probe sequence
agtacaacttcaatataaaaatctt

SEQ ID NO: 108115 - DNA, 25 bp, Probe sequence
aactttacataataaggcaagcaca

SEQ ID NO: 108116 - DNA, 25 bp, Probe sequence
aatcttggtttagcatttttatagg

SEQ ID NO: 108117 - DNA, 25 bp, Probe sequence
caatacaccgaattttctgaaaaag

SEQ ID NO: 108118 - DNA, 25 bp, Probe sequence
caatatgtgcaagaagtacaacttc

SEQ ID NO: 108119 - DNA, 25 bp, Probe sequence
caaatgtcttgcctttttcttttgt

SEQ ID NO: 108120 - DNA, 25 bp, Probe sequence
cagtattgaaagtaaagggtggtcg

SEQ ID NO: 108121 - DNA, 25 bp, Probe sequence
gcacaaatgtcttgcctttttcttt

SEQ ID NO: 108122 - DNA, 25 bp, Probe sequence
gaaaaaggttgtaatgtattgctaa

SEQ ID NO: 108123 - DNA, 25 bp, Probe sequence
ggtttagcatttttataggcacaaa

SEQ ID NO: 108124 - DNA, 25 bp, Probe sequence
taaaaacaatacaccgaattttctg

SEQ ID NO: 108125 - DNA, 25 bp, Probe sequence
taaacaacgaaaataccaagtgatt

SEQ ID NO: 108126 - DNA, 25 bp, Probe sequence
tacactttagtgtggtagagaagta

SEQ ID NO: 108127 - DNA, 25 bp, Probe sequence
atactatgacattatctaaaaaata

SEQ ID NO: 108128 - DNA, 25 bp, Probe sequence
atgagccgcataataaaaatgttat

SEQ ID NO: 108129 - DNA, 25 bp, Probe sequence
aaagttatgagccgcataataaaaa

SEQ ID NO: 108130 - DNA, 25 bp, Probe sequence
aaaaatgttataattgtgcataata

SEQ ID NO: 108131 - DNA, 25 bp, Probe sequence
aaaaagttatgagccgcataataaa

SEQ ID NO: 108132 - DNA, 25 bp, Probe sequence
aaaagttatgagccgcataataaaa

SEQ ID NO: 108133 - DNA, 25 bp, Probe sequence
aatactatgacattatctaaaaaat

SEQ ID NO: 108134 - DNA, 25 bp, Probe sequence
gagccgcataataaaaatgttataa

SEQ ID NO: 108135 - DNA, 25 bp, Probe sequence
gtttcttaaaaagttatgagccgca

SEQ ID NO: 108136 - DNA, 25 bp, Probe sequence
gtgcataataaaacatagggagaat

SEQ ID NO: 108137 - DNA, 25 bp, Probe sequence
tgagccgcataataaaaatgttata

SEQ ID NO: 108138 - DNA, 25 bp, Probe sequence
taaaaagttatgagccgcataataa

SEQ ID NO: 108139 - DNA, 25 bp, Probe sequence
tatgagccgcataataaaaatgtta

SEQ ID NO: 108140 - DNA, 25 bp, Probe sequence
tttcttaaaaagttatgagccgcat

SEQ ID NO: 108141 - DNA, 25 bp, Probe sequence
ttcttaaaaagttatgagccgcata

SEQ ID NO: 108142 - DNA, 25 bp, Probe sequence
attttgttgaatcagatatgtaaat

SEQ ID NO: 108143 - DNA, 25 bp, Probe sequence
cagatatgtaaatgaatgtagaaag

SEQ ID NO: 108144 - DNA, 25 bp, Probe sequence
cattttgttgaatcagatatgtaaa

SEQ ID NO: 108145 - DNA, 25 bp, Probe sequence
gaatcagatatgtaaatgaatgtag

SEQ ID NO: 108146 - DNA, 25 bp, Probe sequence
gaatgtagaaaggtaatgatatatc

SEQ ID NO: 108147 - DNA, 25 bp, Probe sequence
gatatgtaaatgaatgtagaaaggt

SEQ ID NO: 108148 - DNA, 25 bp, Probe sequence
gttgaatcagatatgtaaatgaatg

SEQ ID NO: 108149 - DNA, 25 bp, Probe sequence
tgttgaatcagatatgtaaatgaat

SEQ ID NO: 108150 - DNA, 25 bp, Probe sequence
tcattttgttgaatcagatatgtaa

SEQ ID NO: 108151 - DNA, 25 bp, Probe sequence
tttgttgaatcagatatgtaaatga

SEQ ID NO: 108152 - DNA, 25 bp, Probe sequence
ttttgttgaatcagatatgtaaatg

SEQ ID NO: 108153 - DNA, 25 bp, Probe sequence
ttgttgaatcagatatgtaaatgaa

SEQ ID NO: 108154 - DNA, 25 bp, Probe sequence
attatcatttttatagtcactacta

SEQ ID NO: 108155 - DNA, 25 bp, Probe sequence
acttgatatacatacaataccacct

SEQ ID NO: 108156 - DNA, 25 bp, Probe sequence
acaccacactattgttataccctag

SEQ ID NO: 108157 - DNA, 25 bp, Probe sequence
acaagtccgtgaaatttagttaatg

SEQ ID NO: 108158 - DNA, 25 bp, Probe sequence
aaatctgactattattatcattttt

SEQ ID NO: 108159 - DNA, 25 bp, Probe sequence
aaacctccatatttttatctcttag

SEQ ID NO: 108160 - DNA, 25 bp, Probe sequence
aagtgattacaagtccgtgaaattt

SEQ ID NO: 108161 - DNA, 25 bp, Probe sequence
gcatcaagtgactcgtactatttta

SEQ ID NO: 108162 - DNA, 25 bp, Probe sequence
gaattcgaatattttctgtgatgta

SEQ ID NO: 108163 - DNA, 25 bp, Probe sequence
gaatgacctataaaacaccacacta

SEQ ID NO: 108164 - DNA, 25 bp, Probe sequence
gactttgcatcaagtgactcgtact

SEQ ID NO: 108165 - DNA, 25 bp, Probe sequence
gatgcaagcattttatttcgaattc

SEQ ID NO: 108166 - DNA, 25 bp, Probe sequence
gttataccctagtcaattaattcaa

SEQ ID NO: 108167 - DNA, 25 bp, Probe sequence
gtcactactattgactttgcatcaa

SEQ ID NO: 108168 - DNA, 25 bp, Probe sequence
tacatacaataccacctaaaaaaca

SEQ ID NO: 108169 - DNA, 25 bp, Probe sequence
attagggtgaacagttagtgcttgt

SEQ ID NO: 108170 - DNA, 25 bp, Probe sequence
aggcgtcttaaattagggtgaacag

SEQ ID NO: 108171 - DNA, 25 bp, Probe sequence
agtgcttgttacacatgagttaaac

SEQ ID NO: 108172 - DNA, 25 bp, Probe sequence
agttggcatttcgtatatatatatt

SEQ ID NO: 108173 - DNA, 25 bp, Probe sequence
aaaaatgccaactatacctagggat

SEQ ID NO: 108174 - DNA, 25 bp, Probe sequence
aacgaaaaatgccaactatacctag

SEQ ID NO: 108175 - DNA, 25 bp, Probe sequence
aatgccaactatacctagggatgat

SEQ ID NO: 108176 - DNA, 25 bp, Probe sequence
cctacctgaatgaaaggcgtcttaa

SEQ ID NO: 108177 - DNA, 25 bp, Probe sequence
gccaactatacctagggatgatata

SEQ ID NO: 108178 - DNA, 25 bp, Probe sequence
gcttgttacacatgagttaaacgaa

SEQ ID NO: 108179 - DNA, 25 bp, Probe sequence
gaacagttagtgcttgttacacatg

SEQ ID NO: 108180 - DNA, 25 bp, Probe sequence
gacctacctgaatgaaaggcgtctt

SEQ ID NO: 108181 - DNA, 25 bp, Probe sequence
gttagtgcttgttacacatgagtta

SEQ ID NO: 108182 - DNA, 25 bp, Probe sequence
ggtgaacagttagtgcttgttacac

SEQ ID NO: 108183 - DNA, 25 bp, Probe sequence
ggatgatatagttggcatttcgtat

SEQ ID NO: 108184 - DNA, 25 bp, Probe sequence
attgtcattcaatatttctagcttg

SEQ ID NO: 108185 - DNA, 25 bp, Probe sequence
atatttatctacgtccatcatttta

SEQ ID NO: 108186 - DNA, 25 bp, Probe sequence
aggttaatctccttctataaacatg

SEQ ID NO: 108187 - DNA, 25 bp, Probe sequence
ctacgtccatcattttaacagagtt

SEQ ID NO: 108188 - DNA, 25 bp, Probe sequence
cgtccatcattttaacagagttgta

SEQ ID NO: 108189 - DNA, 25 bp, Probe sequence
cgcatatttatctacgtccatcatt

SEQ ID NO: 108190 - DNA, 25 bp, Probe sequence
gcgtcaatacgcatatttatctacg

SEQ ID NO: 108191 - DNA, 25 bp, Probe sequence
gcttgaaatcagccactagaccgat

SEQ ID NO: 108192 - DNA, 25 bp, Probe sequence
gaaatcagccactagaccgataaaa

SEQ ID NO: 108193 - DNA, 25 bp, Probe sequence
tgttataagcatgttaatttttaaa

SEQ ID NO: 108194 - DNA, 25 bp, Probe sequence
tcagccactagaccgataaaataga

SEQ ID NO: 108195 - DNA, 25 bp, Probe sequence
taatctccttctataaacatgttat

SEQ ID NO: 108196 - DNA, 25 bp, Probe sequence
tttctagcttgaaatcagccactag

SEQ ID NO: 108197 - DNA, 25 bp, Probe sequence
ttatctacgtccatcattttaacag

SEQ ID NO: 108198 - DNA, 25 bp, Probe sequence
ttaacagagttgtattgtcattcaa

SEQ ID NO: 108199 - DNA, 25 bp, Probe sequence
atttaatttagtataacacgcgcat

SEQ ID NO: 108200 - DNA, 25 bp, Probe sequence
ataaatcggattttcaaagcgtgtt

SEQ ID NO: 108201 - DNA, 25 bp, Probe sequence
atgcgcataaaaaacagccttgaaa

SEQ ID NO: 108202 - DNA, 25 bp, Probe sequence
acacgcgcataattaaaaacatatc

SEQ ID NO: 108203 - DNA, 25 bp, Probe sequence
aacatatcaggttatgtatgcgcat

SEQ ID NO: 108204 - DNA, 25 bp, Probe sequence
aatcggattttcaaagcgtgttttg

SEQ ID NO: 108205 - DNA, 25 bp, Probe sequence
gcgcataaaaaacagccttgaaaaa

SEQ ID NO: 108206 - DNA, 25 bp, Probe sequence
gtataacacgcgcataattaaaaac

SEQ ID NO: 108207 - DNA, 25 bp, Probe sequence
gtatgcgcataaaaaacagccttga

SEQ ID NO: 108208 - DNA, 25 bp, Probe sequence
tcaaagcgtgttttgaaaggtattt

SEQ ID NO: 108209 - DNA, 25 bp, Probe sequence
taagacaccccgcagtattaaaatt

SEQ ID NO: 108210 - DNA, 25 bp, Probe sequence
taatttagtataacacgcgcataat

SEQ ID NO: 108211 - DNA, 25 bp, Probe sequence
taaatcggattttcaaagcgtgttt

SEQ ID NO: 108212 - DNA, 25 bp, Probe sequence
tagtataacacgcgcataattaaaa

SEQ ID NO: 108213 - DNA, 25 bp, Probe sequence
ttaagacaccccgcagtattaaaat

SEQ ID NO: 108214 - DNA, 25 bp, Probe sequence
attagggtgcttttgtttgtgcatt

SEQ ID NO: 108215 - DNA, 25 bp, Probe sequence
agggtgcttttgtttgtgcatttat

SEQ ID NO: 108216 - DNA, 25 bp, Probe sequence
accaatcatccaaaagcaccctaaa

SEQ ID NO: 108217 - DNA, 25 bp, Probe sequence
aaattagggtgcttttgtttgtgca

SEQ ID NO: 108218 - DNA, 25 bp, Probe sequence
aaactgtataccaatcatccaaaag

SEQ ID NO: 108219 - DNA, 25 bp, Probe sequence
aatcatccaaaagcaccctaaagtt

SEQ ID NO: 108220 - DNA, 25 bp, Probe sequence
caatgtcgtttagctaaaatacatc

SEQ ID NO: 108221 - DNA, 25 bp, Probe sequence
cgtttagctaaaatacatcattata

SEQ ID NO: 108222 - DNA, 25 bp, Probe sequence
ccaatcatccaaaagcaccctaaag

SEQ ID NO: 108223 - DNA, 25 bp, Probe sequence
gtataccaatcatccaaaagcaccc

SEQ ID NO: 108224 - DNA, 25 bp, Probe sequence
gtaaaactgtataccaatcatccaa

SEQ ID NO: 108225 - DNA, 25 bp, Probe sequence
ggtgcttttgtttgtgcatttataa

SEQ ID NO: 108226 - DNA, 25 bp, Probe sequence
tccaaaagcaccctaaagttagact

SEQ ID NO: 108227 - DNA, 25 bp, Probe sequence
tcatccaaaagcaccctaaagttag

SEQ ID NO: 108228 - DNA, 25 bp, Probe sequence
tataccaatcatccaaaagcaccct

SEQ ID NO: 108229 - DNA, 25 bp, Probe sequence
atgtgtacaacaactaccttacaat

SEQ ID NO: 108230 - DNA, 25 bp, Probe sequence
aaagttctcaatgtactatcttatt

SEQ ID NO: 108231 - DNA, 25 bp, Probe sequence
caacaactaccttacaataaaagat

SEQ ID NO: 108232 - DNA, 25 bp, Probe sequence
caaagttgttagtcatttaaggaat

SEQ ID NO: 108233 - DNA, 25 bp, Probe sequence
cataaataaaacatacttccgtaag

SEQ ID NO: 108234 - DNA, 25 bp, Probe sequence
catacttccgtaagtattaccctat

SEQ ID NO: 108235 - DNA, 25 bp, Probe sequence
ctcaatgtactatcttattatgtaa

SEQ ID NO: 108236 - DNA, 25 bp, Probe sequence
gaatgtgtacaacaactaccttaca

SEQ ID NO: 108237 - DNA, 25 bp, Probe sequence
gaaaagttctcaatgtactatctta

SEQ ID NO: 108238 - DNA, 25 bp, Probe sequence
gacgaaaagttctcaatgtactatc

SEQ ID NO: 108239 - DNA, 25 bp, Probe sequence
gatagttgacgaaaagttctcaatg

SEQ ID NO: 108240 - DNA, 25 bp, Probe sequence
gttctcaatgtactatcttattatg

SEQ ID NO: 108241 - DNA, 25 bp, Probe sequence
gtgtacaacaactaccttacaataa

SEQ ID NO: 108242 - DNA, 25 bp, Probe sequence
ggaatgtgtacaacaactaccttac

SEQ ID NO: 108243 - DNA, 25 bp, Probe sequence
tcctcccccataaataaaacatact

SEQ ID NO: 108244 - DNA, 25 bp, Probe sequence
aatataattatttttcgagaagcgg

SEQ ID NO: 108245 - DNA, 25 bp, Probe sequence
aattatttttcgagaagcggtgaag

SEQ ID NO: 108246 - DNA, 25 bp, Probe sequence
cgtccttctttctatgttttataca

SEQ ID NO: 108247 - DNA, 25 bp, Probe sequence
cgagaagcggtgaagaactggtata

SEQ ID NO: 108248 - DNA, 25 bp, Probe sequence
ccttctttctatgttttatacatat

SEQ ID NO: 108249 - DNA, 25 bp, Probe sequence
gcggtgaagaactggtatagatggt

SEQ ID NO: 108250 - DNA, 25 bp, Probe sequence
gaataaagctaactacaaaagatgt

SEQ ID NO: 108251 - DNA, 25 bp, Probe sequence
gaagaactggtatagatggtgttta

SEQ ID NO: 108252 - DNA, 25 bp, Probe sequence
gaagcggtgaagaactggtatagat

SEQ ID NO: 108253 - DNA, 25 bp, Probe sequence
gaactggtatagatggtgtttatta

SEQ ID NO: 108254 - DNA, 25 bp, Probe sequence
gttttatacatatttcaatttaaga

SEQ ID NO: 108255 - DNA, 25 bp, Probe sequence
gtatagatggtgtttattaaattca

SEQ ID NO: 108256 - DNA, 25 bp, Probe sequence
gtccttctttctatgttttatacat

SEQ ID NO: 108257 - DNA, 25 bp, Probe sequence
gtgttgttaacggttaataagcaca

SEQ ID NO: 108258 - DNA, 25 bp, Probe sequence
ttgttaacggttaataagcacatat

SEQ ID NO: 108259 - DNA, 25 bp, Probe sequence
attttcagtgaagcacgcaatgatt

SEQ ID NO: 108260 - DNA, 25 bp, Probe sequence
atctttatacaaattttcagtgaag

SEQ ID NO: 108261 - DNA, 25 bp, Probe sequence
atgagattcgagcactaatttaaat

SEQ ID NO: 108262 - DNA, 25 bp, Probe sequence
agattcgagcactaatttaaatatt

SEQ ID NO: 108263 - DNA, 25 bp, Probe sequence
acaaattttcagtgaagcacgcaat

SEQ ID NO: 108264 - DNA, 25 bp, Probe sequence
aaagcgcccaaatcaatgagattcg

SEQ ID NO: 108265 - DNA, 25 bp, Probe sequence
aaaaagcgcccaaatcaatgagatt

SEQ ID NO: 108266 - DNA, 25 bp, Probe sequence
aaaagggagtcttgatttagcaaag

SEQ ID NO: 108267 - DNA, 25 bp, Probe sequence
aatcaatgagattcgagcactaatt

SEQ ID NO: 108268 - DNA, 25 bp, Probe sequence
gcgcccaaatcaatgagattcgagc

SEQ ID NO: 108269 - DNA, 25 bp, Probe sequence
gagtcttgatttagcaaaggttgat

SEQ ID NO: 108270 - DNA, 25 bp, Probe sequence
gggagtcttgatttagcaaaggttg

SEQ ID NO: 108271 - DNA, 25 bp, Probe sequence
tcagtgaagcacgcaatgatttaaa

SEQ ID NO: 108272 - DNA, 25 bp, Probe sequence
tacaaattaaaaagcgcccaaatca

SEQ ID NO: 108273 - DNA, 25 bp, Probe sequence
ttagcaaaggttgattttaaataca

SEQ ID NO: 108274 - DNA, 25 bp, Probe sequence
attatacgtgttttcaatatccttt

SEQ ID NO: 108275 - DNA, 25 bp, Probe sequence
atatgaaataaatcactttcgttga

SEQ ID NO: 108276 - DNA, 25 bp, Probe sequence
atatcctttgtgtcatgataaggtg

SEQ ID NO: 108277 - DNA, 25 bp, Probe sequence
atgtgtgcagtaacagtgacagctg

SEQ ID NO: 108278 - DNA, 25 bp, Probe sequence
agtgacagctgtataaatttaaaac

SEQ ID NO: 108279 - DNA, 25 bp, Probe sequence
acgtgttttcaatatcctttgtgtc

SEQ ID NO: 108280 - DNA, 25 bp, Probe sequence
aaggtgagactgaggtatgtgtgca

SEQ ID NO: 108281 - DNA, 25 bp, Probe sequence
ctttcgttgaattcgcacttaaaat

SEQ ID NO: 108282 - DNA, 25 bp, Probe sequence
gaggtatgtgtgcagtaacagtgac

SEQ ID NO: 108283 - DNA, 25 bp, Probe sequence
gaggaaagataattatacgtgtttt

SEQ ID NO: 108284 - DNA, 25 bp, Probe sequence
gtgcagtaacagtgacagctgtata

SEQ ID NO: 108285 - DNA, 25 bp, Probe sequence
gtgttttcaatatcctttgtgtcat

SEQ ID NO: 108286 - DNA, 25 bp, Probe sequence
gtgtcatgataaggtgagactgagg

SEQ ID NO: 108287 - DNA, 25 bp, Probe sequence
tcgttgaattcgcacttaaaatgaa

SEQ ID NO: 108288 - DNA, 25 bp, Probe sequence
ttttcaatatcctttgtgtcatgat

SEQ ID NO: 108289 - DNA, 25 bp, Probe sequence
attagcataaccaagtgagcgtaac

SEQ ID NO: 108290 - DNA, 25 bp, Probe sequence
attagtaaaatcgttatattagcat

SEQ ID NO: 108291 - DNA, 25 bp, Probe sequence
atattagcataaccaagtgagcgta

SEQ ID NO: 108292 - DNA, 25 bp, Probe sequence
accaagtgagcgtaacatgttaaaa

SEQ ID NO: 108293 - DNA, 25 bp, Probe sequence
aatttgggagagtaaggaggtatgt

SEQ ID NO: 108294 - DNA, 25 bp, Probe sequence
aatgatatctttatcgaaatattat

SEQ ID NO: 108295 - DNA, 25 bp, Probe sequence
aattaatattgtttagtggttggtg

SEQ ID NO: 108296 - DNA, 25 bp, Probe sequence
gcgtaacatgttaaaaatttgggag

SEQ ID NO: 108297 - DNA, 25 bp, Probe sequence
gcataaccaagtgagcgtaacatgt

SEQ ID NO: 108298 - DNA, 25 bp, Probe sequence
ggttggtgaataaatgtgggaaata

SEQ ID NO: 108299 - DNA, 25 bp, Probe sequence
taatattgtttagtggttggtgaat

SEQ ID NO: 108300 - DNA, 25 bp, Probe sequence
tagcataaccaagtgagcgtaacat

SEQ ID NO: 108301 - DNA, 25 bp, Probe sequence
tagtggttggtgaataaatgtggga

SEQ ID NO: 108302 - DNA, 25 bp, Probe sequence
tatctttatcgaaatattattagta

SEQ ID NO: 108303 - DNA, 25 bp, Probe sequence
tttgggagagtaaggaggtatgtaa

SEQ ID NO: 108304 - DNA, 25 bp, Probe sequence
attacgatagtttttagcgttatag

SEQ ID NO: 108305 - DNA, 25 bp, Probe sequence
atccttctttcataacatgatattt

SEQ ID NO: 108306 - DNA, 25 bp, Probe sequence
atgttcaatgtgcactctagtaaaa

SEQ ID NO: 108307 - DNA, 25 bp, Probe sequence
aatatatccttctttcataacatga

SEQ ID NO: 108308 - DNA, 25 bp, Probe sequence
ctgtatgttcaatgtgcactctagt

SEQ ID NO: 108309 - DNA, 25 bp, Probe sequence
gcactctagtaaaaagcattcatat

SEQ ID NO: 108310 - DNA, 25 bp, Probe sequence
gtatgttcaatgtgcactctagtaa

SEQ ID NO: 108311 - DNA, 25 bp, Probe sequence
gtaaaaagcattcatataacaaaaa

SEQ ID NO: 108312 - DNA, 25 bp, Probe sequence
tgatatttaatcatactgtatgttc

SEQ ID NO: 108313 - DNA, 25 bp, Probe sequence
tactgtatgttcaatgtgcactcta

SEQ ID NO: 108314 - DNA, 25 bp, Probe sequence
tagtttttagcgttatagattatga

SEQ ID NO: 108315 - DNA, 25 bp, Probe sequence
tatgtaattacgatagtttttagcg

SEQ ID NO: 108316 - DNA, 25 bp, Probe sequence
tatatccttctttcataacatgata

SEQ ID NO: 108317 - DNA, 25 bp, Probe sequence
ttttagcgttatagattatgagtca

SEQ ID NO: 108318 - DNA, 25 bp, Probe sequence
ttcaatgtgcactctagtaaaaagc

SEQ ID NO: 108319 - DNA, 25 bp, Probe sequence
atggaagaagtgtgcagggtgtcta

SEQ ID NO: 108320 - DNA, 25 bp, Probe sequence
agaagtgtgcagggtgtctaaaaat

SEQ ID NO: 108321 - DNA, 25 bp, Probe sequence
aaaggtagttgcaagacaagttact

SEQ ID NO: 108322 - DNA, 25 bp, Probe sequence
aaaaatgcaacaatacaaaggtagt

SEQ ID NO: 108323 - DNA, 25 bp, Probe sequence
aacaatacaaaggtagttgcaagac

SEQ ID NO: 108324 - DNA, 25 bp, Probe sequence
aagaagtgtgcagggtgtctaaaaa

SEQ ID NO: 108325 - DNA, 25 bp, Probe sequence
aagtgtgcagggtgtctaaaaatgc

SEQ ID NO: 108326 - DNA, 25 bp, Probe sequence
aatggaagaagtgtgcagggtgtct

SEQ ID NO: 108327 - DNA, 25 bp, Probe sequence
gaagtgtgcagggtgtctaaaaatg

SEQ ID NO: 108328 - DNA, 25 bp, Probe sequence
gaagaagtgtgcagggtgtctaaaa

SEQ ID NO: 108329 - DNA, 25 bp, Probe sequence
gtgcagggtgtctaaaaatgcaaca

SEQ ID NO: 108330 - DNA, 25 bp, Probe sequence
gtgtgcagggtgtctaaaaatgcaa

SEQ ID NO: 108331 - DNA, 25 bp, Probe sequence
ggaagaagtgtgcagggtgtctaaa

SEQ ID NO: 108332 - DNA, 25 bp, Probe sequence
tggaagaagtgtgcagggtgtctaa

SEQ ID NO: 108333 - DNA, 25 bp, Probe sequence
taatggaagaagtgtgcagggtgtc

SEQ ID NO: 108334 - DNA, 25 bp, Probe sequence
agaaatgctgaaattttaaattcga

SEQ ID NO: 108335 - DNA, 25 bp, Probe sequence
agcgcctcctgtattaaagattata

SEQ ID NO: 108336 - DNA, 25 bp, Probe sequence
acagaaatgctgaaattttaaattc

SEQ ID NO: 108337 - DNA, 25 bp, Probe sequence
aaattttaaacagaaatgctgaaat

SEQ ID NO: 108338 - DNA, 25 bp, Probe sequence
aacagaaatgctgaaattttaaatt

SEQ ID NO: 108339 - DNA, 25 bp, Probe sequence
aattttaaattcgaaagcattgaat

SEQ ID NO: 108340 - DNA, 25 bp, Probe sequence
cagaaatgctgaaattttaaattcg

SEQ ID NO: 108341 - DNA, 25 bp, Probe sequence
cgcctcctgtattaaagattataat

SEQ ID NO: 108342 - DNA, 25 bp, Probe sequence
cctcctgtattaaagattataatta

SEQ ID NO: 108343 - DNA, 25 bp, Probe sequence
gcctcctgtattaaagattataatt

SEQ ID NO: 108344 - DNA, 25 bp, Probe sequence
gcgcctcctgtattaaagattataa

SEQ ID NO: 108345 - DNA, 25 bp, Probe sequence
gaaatgctgaaattttaaattcgaa

SEQ ID NO: 108346 - DNA, 25 bp, Probe sequence
gaaattttaaattcgaaagcattga

SEQ ID NO: 108347 - DNA, 25 bp, Probe sequence
taaacagaaatgctgaaattttaaa

SEQ ID NO: 108348 - DNA, 25 bp, Probe sequence
tttaaacagaaatgctgaaatttta

SEQ ID NO: 108349 - DNA, 25 bp, Probe sequence
atatcctttttgttgtgtttatgaa

SEQ ID NO: 108350 - DNA, 25 bp, Probe sequence
aggggcgctacctacaataagtaag

SEQ ID NO: 108351 - DNA, 25 bp, Probe sequence
aagatacgcccatatttttatattt

SEQ ID NO: 108352 - DNA, 25 bp, Probe sequence
gcataaaaaaggggcgctacctaca

SEQ ID NO: 108353 - DNA, 25 bp, Probe sequence
gaagggtgtgacatgaagtttgtgt

SEQ ID NO: 108354 - DNA, 25 bp, Probe sequence
gaagtttgtgtcatatcctttttgt

SEQ ID NO: 108355 - DNA, 25 bp, Probe sequence
gaagcggttcaaaagaagggtgtga

SEQ ID NO: 108356 - DNA, 25 bp, Probe sequence
gtttgtgtcatatcctttttgttgt

SEQ ID NO: 108357 - DNA, 25 bp, Probe sequence
gtaagatacgcccatatttttatat

SEQ ID NO: 108358 - DNA, 25 bp, Probe sequence
gtcatatcctttttgttgtgtttat

SEQ ID NO: 108359 - DNA, 25 bp, Probe sequence
gtgtcatatcctttttgttgtgttt

SEQ ID NO: 108360 - DNA, 25 bp, Probe sequence
gggcgctacctacaataagtaagat

SEQ ID NO: 108361 - DNA, 25 bp, Probe sequence
taagtaagatacgcccatattttta

SEQ ID NO: 108362 - DNA, 25 bp, Probe sequence
tttttgttgtgtttatgaagcataa

SEQ ID NO: 108363 - DNA, 25 bp, Probe sequence
ttgtgtcatatcctttttgttgtgt

SEQ ID NO: 108364 - DNA, 25 bp, Probe sequence
atgtttggagtagtagcctttatct

SEQ ID NO: 108365 - DNA, 25 bp, Probe sequence
agagggctttatttgaaaggaattg

SEQ ID NO: 108366 - DNA, 25 bp, Probe sequence
agtctcactccttttgtatttaatt

SEQ ID NO: 108367 - DNA, 25 bp, Probe sequence
agcaatggtgctttctaagtgatga

SEQ ID NO: 108368 - DNA, 25 bp, Probe sequence
aatcgtacatattagacaaaagcaa

SEQ ID NO: 108369 - DNA, 25 bp, Probe sequence
cactccttttgtatttaatttcatt

SEQ ID NO: 108370 - DNA, 25 bp, Probe sequence
cttagtagatttttgagtgaggata

SEQ ID NO: 108371 - DNA, 25 bp, Probe sequence
gcctttatctaaacttacaattcaa

SEQ ID NO: 108372 - DNA, 25 bp, Probe sequence
gctttctaagtgatgatgtttgtgt

SEQ ID NO: 108373 - DNA, 25 bp, Probe sequence
gtagtagcctttatctaaacttaca

SEQ ID NO: 108374 - DNA, 25 bp, Probe sequence
gtgaggatacagattaatcgtacat

SEQ ID NO: 108375 - DNA, 25 bp, Probe sequence
gtgatgatgtttgtgtaaattgaga

SEQ ID NO: 108376 - DNA, 25 bp, Probe sequence
tgaaagctatcgctacttagtagat

SEQ ID NO: 108377 - DNA, 25 bp, Probe sequence
ttacagagttgaaagctatcgctac

SEQ ID NO: 108378 - DNA, 25 bp, Probe sequence
ttcaatgaatgaaccttacagagtt

SEQ ID NO: 108379 - DNA, 25 bp, Probe sequence
attcaatctctcctttttataaatc

SEQ ID NO: 108380 - DNA, 25 bp, Probe sequence
atcaaaatctcaatgaagcatcttt

SEQ ID NO: 108381 - DNA, 25 bp, Probe sequence
atctcaatgaagcatcttttaatcg

SEQ ID NO: 108382 - DNA, 25 bp, Probe sequence
atgaagcatcttttaatcgtaagtg

SEQ ID NO: 108383 - DNA, 25 bp, Probe sequence
agttaatagttatactgcattgctt

SEQ ID NO: 108384 - DNA, 25 bp, Probe sequence
actgcattgcttaaaatcaaaatct

SEQ ID NO: 108385 - DNA, 25 bp, Probe sequence
aaatctcaatgaagcatcttttaat

SEQ ID NO: 108386 - DNA, 25 bp, Probe sequence
aatctctcctttttataaatcagtt

SEQ ID NO: 108387 - DNA, 25 bp, Probe sequence
caatctctcctttttataaatcagt

SEQ ID NO: 108388 - DNA, 25 bp, Probe sequence
ctcaatgaagcatcttttaatcgta

SEQ ID NO: 108389 - DNA, 25 bp, Probe sequence
gattcaatctctcctttttataaat

SEQ ID NO: 108390 - DNA, 25 bp, Probe sequence
gttatactgcattgcttaaaatcaa

SEQ ID NO: 108391 - DNA, 25 bp, Probe sequence
tctctcctttttataaatcagttaa

SEQ ID NO: 108392 - DNA, 25 bp, Probe sequence
taatagttatactgcattgcttaaa

SEQ ID NO: 108393 - DNA, 25 bp, Probe sequence
ttcaatctctcctttttataaatca

SEQ ID NO: 108394 - DNA, 25 bp, Probe sequence
attggcataatgtacagtgtttttt

SEQ ID NO: 108395 - DNA, 25 bp, Probe sequence
aggtcatagcaatgttatatgccga

SEQ ID NO: 108396 - DNA, 25 bp, Probe sequence
agaaaacctccatgtgcttttgcac

SEQ ID NO: 108397 - DNA, 25 bp, Probe sequence
acactacaatttaattcacgagctt

SEQ ID NO: 108398 - DNA, 25 bp, Probe sequence
aacatgacgattttataagcaattc

SEQ ID NO: 108399 - DNA, 25 bp, Probe sequence
aactatacgctcatattggcataat

SEQ ID NO: 108400 - DNA, 25 bp, Probe sequence
aatgttatatgccgatggaatgtgc

SEQ ID NO: 108401 - DNA, 25 bp, Probe sequence
aattgtagtcttttatggtgtttgc

SEQ ID NO: 108402 - DNA, 25 bp, Probe sequence
cacgagcttttattacgtaagacca

SEQ ID NO: 108403 - DNA, 25 bp, Probe sequence
gcagcgataaatgctacttgttgat

SEQ ID NO: 108404 - DNA, 25 bp, Probe sequence
gtaagaccaactatacgctcatatt

SEQ ID NO: 108405 - DNA, 25 bp, Probe sequence
gtcttttatggtgtttgctagtttt

SEQ ID NO: 108406 - DNA, 25 bp, Probe sequence
gtgcttttgcacttaatatttgtaa

SEQ ID NO: 108407 - DNA, 25 bp, Probe sequence
gtgacataacgtttaaacatgacga

SEQ ID NO: 108408 - DNA, 25 bp, Probe sequence
ggtgtttgctagttttcaaagtgac

SEQ ID NO: 108409 - DNA, 25 bp, Probe sequence
attgtctcatattatccaaaatagc

SEQ ID NO: 108410 - DNA, 25 bp, Probe sequence
atcatcatcgtattgtctcatatta

SEQ ID NO: 108411 - DNA, 25 bp, Probe sequence
atcatcgtattgtctcatattatcc

SEQ ID NO: 108412 - DNA, 25 bp, Probe sequence
atcgtattgtctcatattatccaaa

SEQ ID NO: 108413 - DNA, 25 bp, Probe sequence
agaaccttgttggtaatcaaagcga

SEQ ID NO: 108414 - DNA, 25 bp, Probe sequence
aaccttgttggtaatcaaagcgatt

SEQ ID NO: 108415 - DNA, 25 bp, Probe sequence
aatcaaagcgattcatttataatga

SEQ ID NO: 108416 - DNA, 25 bp, Probe sequence
aataccaacaagatttagaaccttg

SEQ ID NO: 108417 - DNA, 25 bp, Probe sequence
cgtattgtctcatattatccaaaat

SEQ ID NO: 108418 - DNA, 25 bp, Probe sequence
gatttagaaccttgttggtaatcaa

SEQ ID NO: 108419 - DNA, 25 bp, Probe sequence
gttggtaatcaaagcgattcattta

SEQ ID NO: 108420 - DNA, 25 bp, Probe sequence
gtctcatattatccaaaatagcata

SEQ ID NO: 108421 - DNA, 25 bp, Probe sequence
tcatcatcgtattgtctcatattat

SEQ ID NO: 108422 - DNA, 25 bp, Probe sequence
tcatcgtattgtctcatattatcca

SEQ ID NO: 108423 - DNA, 25 bp, Probe sequence
taatgagtcgttttattttgtaaga

SEQ ID NO: 108424 - DNA, 25 bp, Probe sequence
agtttatctgatagtctgattgtaa

SEQ ID NO: 108425 - DNA, 25 bp, Probe sequence
actaattgactggaggcgtatgtaa

SEQ ID NO: 108426 - DNA, 25 bp, Probe sequence
acaggtctgtcttaagggagtcttc

SEQ ID NO: 108427 - DNA, 25 bp, Probe sequence
aagcgcgtaattatacaggtctgtc

SEQ ID NO: 108428 - DNA, 25 bp, Probe sequence
aatagcatggaaaagttgcatcatt

SEQ ID NO: 108429 - DNA, 25 bp, Probe sequence
gaaccccgatgttgtcgtatgtcaa

SEQ ID NO: 108430 - DNA, 25 bp, Probe sequence
gattgtactaattgactggaggcgt

SEQ ID NO: 108431 - DNA, 25 bp, Probe sequence
gtcgtatgtcaaaacatttagtcaa

SEQ ID NO: 108432 - DNA, 25 bp, Probe sequence
gtgaacgtaatctcttaactaggac

SEQ ID NO: 108433 - DNA, 25 bp, Probe sequence
gtgaaattcaagttggcattgagaa

SEQ ID NO: 108434 - DNA, 25 bp, Probe sequence
ggactaactttgcaagcattgaata

SEQ ID NO: 108435 - DNA, 25 bp, Probe sequence
ggcattgagaaaattacaagcgcgt

SEQ ID NO: 108436 - DNA, 25 bp, Probe sequence
taagggagtcttcgaaccccgatgt

SEQ ID NO: 108437 - DNA, 25 bp, Probe sequence
tcttcgaaccccgatgttgtcgtat

SEQ ID NO: 108438 - DNA, 25 bp, Probe sequence
taactaggactaactttgcaagcat

SEQ ID NO: 108439 - DNA, 25 bp, Probe sequence
attagttgtattcagttattaagta

SEQ ID NO: 108440 - DNA, 25 bp, Probe sequence
ataattagttgtattcagttattaa

SEQ ID NO: 108441 - DNA, 25 bp, Probe sequence
agttgtattcagttattaagtaata

SEQ ID NO: 108442 - DNA, 25 bp, Probe sequence
aataaatttttggaggcagaacatc

SEQ ID NO: 108443 - DNA, 25 bp, Probe sequence
aattagttgtattcagttattaagt

SEQ ID NO: 108444 - DNA, 25 bp, Probe sequence
cgtgataattagttgtattcagtta

SEQ ID NO: 108445 - DNA, 25 bp, Probe sequence
gcgtgataattagttgtattcagtt

SEQ ID NO: 108446 - DNA, 25 bp, Probe sequence
gataattagttgtattcagttatta

SEQ ID NO: 108447 - DNA, 25 bp, Probe sequence
gttgtattcagttattaagtaataa

SEQ ID NO: 108448 - DNA, 25 bp, Probe sequence
gtaataaatttttggaggcagaaca

SEQ ID NO: 108449 - DNA, 25 bp, Probe sequence
gtgataattagttgtattcagttat

SEQ ID NO: 108450 - DNA, 25 bp, Probe sequence
taataaatttttggaggcagaacat

SEQ ID NO: 108451 - DNA, 25 bp, Probe sequence
taagtaataaatttttggaggcaga

SEQ ID NO: 108452 - DNA, 25 bp, Probe sequence
tagttgtattcagttattaagtaat

SEQ ID NO: 108453 - DNA, 25 bp, Probe sequence
ttagttgtattcagttattaagtaa

SEQ ID NO: 108454 - DNA, 25 bp, Probe sequence
atcgcttgagttgcctttacagtag

SEQ ID NO: 108455 - DNA, 25 bp, Probe sequence
acatcgcttgagttgcctttacagt

SEQ ID NO: 108456 - DNA, 25 bp, Probe sequence
acactttgtgtgaatgatacgtttt

SEQ ID NO: 108457 - DNA, 25 bp, Probe sequence
catttgaaccctttattgctagttt

SEQ ID NO: 108458 - DNA, 25 bp, Probe sequence
cccactccctaatttgagctggata

SEQ ID NO: 108459 - DNA, 25 bp, Probe sequence
ccttcatttgaaccctttattgcta

SEQ ID NO: 108460 - DNA, 25 bp, Probe sequence
gcttgagttgcctttacagtagaaa

SEQ ID NO: 108461 - DNA, 25 bp, Probe sequence
gaatgatacgttttgtattgaatta

SEQ ID NO: 108462 - DNA, 25 bp, Probe sequence
gaaccctttattgctagtttatgaa

SEQ ID NO: 108463 - DNA, 25 bp, Probe sequence
gaaagctttatgaacatcgcttgag

SEQ ID NO: 108464 - DNA, 25 bp, Probe sequence
gagctggatataccttcatttgaac

SEQ ID NO: 108465 - DNA, 25 bp, Probe sequence
gtcccactccctaatttgagctgga

SEQ ID NO: 108466 - DNA, 25 bp, Probe sequence
ggatataccttcatttgaacccttt

SEQ ID NO: 108467 - DNA, 25 bp, Probe sequence
tgaacatcgcttgagttgcctttac

SEQ ID NO: 108468 - DNA, 25 bp, Probe sequence
tttaagttttacactttgtgtgaat

SEQ ID NO: 108469 - DNA, 25 bp, Probe sequence
atcataacagctttgtctttttttg

SEQ ID NO: 108470 - DNA, 25 bp, Probe sequence
atgtcgtatacatgatgactaacac

SEQ ID NO: 108471 - DNA, 25 bp, Probe sequence
agatcataacagctttgtctttttt

SEQ ID NO: 108472 - DNA, 25 bp, Probe sequence
aaagacaaagctaagatcataacag

SEQ ID NO: 108473 - DNA, 25 bp, Probe sequence
aagatcataacagctttgtcttttt

SEQ ID NO: 108474 - DNA, 25 bp, Probe sequence
cataacagctttgtctttttttgtt

SEQ ID NO: 108475 - DNA, 25 bp, Probe sequence
ctaagatcataacagctttgtcttt

SEQ ID NO: 108476 - DNA, 25 bp, Probe sequence
gctaagatcataacagctttgtctt

SEQ ID NO: 108477 - DNA, 25 bp, Probe sequence
gactaacacataaaagacaaagcta

SEQ ID NO: 108478 - DNA, 25 bp, Probe sequence
gatcataacagctttgtcttttttt

SEQ ID NO: 108479 - DNA, 25 bp, Probe sequence
gtatacatgatgactaacacataaa

SEQ ID NO: 108480 - DNA, 25 bp, Probe sequence
gtaggatgtcgtatacatgatgact

SEQ ID NO: 108481 - DNA, 25 bp, Probe sequence
gtcgtatacatgatgactaacacat

SEQ ID NO: 108482 - DNA, 25 bp, Probe sequence
ggatgtcgtatacatgatgactaac

SEQ ID NO: 108483 - DNA, 25 bp, Probe sequence
tcataacagctttgtctttttttgt

SEQ ID NO: 108484 - DNA, 25 bp, Probe sequence
atatcgtcttaagaaggctagtaag

SEQ ID NO: 108485 - DNA, 25 bp, Probe sequence
atcgtcttaagaaggctagtaagat

SEQ ID NO: 108486 - DNA, 25 bp, Probe sequence
agaaggctagtaagatatcaaataa

SEQ ID NO: 108487 - DNA, 25 bp, Probe sequence
acggaatatcgtcttaagaaggcta

SEQ ID NO: 108488 - DNA, 25 bp, Probe sequence
aagaaggctagtaagatatcaaata

SEQ ID NO: 108489 - DNA, 25 bp, Probe sequence
aaggctagtaagatatcaaataagg

SEQ ID NO: 108490 - DNA, 25 bp, Probe sequence
aatatcgtcttaagaaggctagtaa

SEQ ID NO: 108491 - DNA, 25 bp, Probe sequence
cggaatatcgtcttaagaaggctag

SEQ ID NO: 108492 - DNA, 25 bp, Probe sequence
gaatatcgtcttaagaaggctagta

SEQ ID NO: 108493 - DNA, 25 bp, Probe sequence
gaaggctagtaagatatcaaataag

SEQ ID NO: 108494 - DNA, 25 bp, Probe sequence
gaaatagacggaatatcgtcttaag

SEQ ID NO: 108495 - DNA, 25 bp, Probe sequence
gtaagatatcaaataaggaggttta

SEQ ID NO: 108496 - DNA, 25 bp, Probe sequence
ggaatatcgtcttaagaaggctagt

SEQ ID NO: 108497 - DNA, 25 bp, Probe sequence
taagaaggctagtaagatatcaaat

SEQ ID NO: 108498 - DNA, 25 bp, Probe sequence
tatcgtcttaagaaggctagtaaga

SEQ ID NO: 108499 - DNA, 25 bp, Probe sequence
atcgttgaaggaggcgagtagcaat

SEQ ID NO: 108500 - DNA, 25 bp, Probe sequence
atcccgaagtcttacctcagacaaa

SEQ ID NO: 108501 - DNA, 25 bp, Probe sequence
acttactttaaaatgtattcacatc

SEQ ID NO: 108502 - DNA, 25 bp, Probe sequence
catcccgaagtcttacctcagacaa

SEQ ID NO: 108503 - DNA, 25 bp, Probe sequence
cacatcgttgaaggaggcgagtagc

SEQ ID NO: 108504 - DNA, 25 bp, Probe sequence
ccgaagtcttacctcagacaaacgt

SEQ ID NO: 108505 - DNA, 25 bp, Probe sequence
gaaggaaaacattaaccactcaacg

SEQ ID NO: 108506 - DNA, 25 bp, Probe sequence
gaagtcttacctcagacaaacgtaa

SEQ ID NO: 108507 - DNA, 25 bp, Probe sequence
gaaaacattaaccactcaacgcatc

SEQ ID NO: 108508 - DNA, 25 bp, Probe sequence
gacaaacgtaagactgaccttaggg

SEQ ID NO: 108509 - DNA, 25 bp, Probe sequence
gtattcacatcgttgaaggaggcga

SEQ ID NO: 108510 - DNA, 25 bp, Probe sequence
ggaaaacattaaccactcaacgcat

SEQ ID NO: 108511 - DNA, 25 bp, Probe sequence
tgaccttagggttaagactgacctt

SEQ ID NO: 108512 - DNA, 25 bp, Probe sequence
tcccgaagtcttacctcagacaaac

SEQ ID NO: 108513 - DNA, 25 bp, Probe sequence
ttaagactgaccttagggttataat

SEQ ID NO: 108514 - DNA, 25 bp, Probe sequence
atttatgttataagctcaatagaag

SEQ ID NO: 108515 - DNA, 25 bp, Probe sequence
atgttataagctcaatagaagttta

SEQ ID NO: 108516 - DNA, 25 bp, Probe sequence
actgactcatcagtgatcttttttt

SEQ ID NO: 108517 - DNA, 25 bp, Probe sequence
actcatcagtgatcttttttttcgt

SEQ ID NO: 108518 - DNA, 25 bp, Probe sequence
aaaacgataaataagcgagtgatgt

SEQ ID NO: 108519 - DNA, 25 bp, Probe sequence
aacgataaataagcgagtgatgtta

SEQ ID NO: 108520 - DNA, 25 bp, Probe sequence
aatatagcttcaaataaaaacgata

SEQ ID NO: 108521 - DNA, 25 bp, Probe sequence
catcagtgatcttttttttcgttta

SEQ ID NO: 108522 - DNA, 25 bp, Probe sequence
ctcatcagtgatcttttttttcgtt

SEQ ID NO: 108523 - DNA, 25 bp, Probe sequence
ctgactcatcagtgatctttttttt

SEQ ID NO: 108524 - DNA, 25 bp, Probe sequence
gaaatttatgttataagctcaatag

SEQ ID NO: 108525 - DNA, 25 bp, Probe sequence
gactcatcagtgatcttttttttcg

SEQ ID NO: 108526 - DNA, 25 bp, Probe sequence
tgactcatcagtgatcttttttttc

SEQ ID NO: 108527 - DNA, 25 bp, Probe sequence
tcatcagtgatcttttttttcgttt

SEQ ID NO: 108528 - DNA, 25 bp, Probe sequence
taagctcaatagaagtttaaatata

SEQ ID NO: 108529 - DNA, 25 bp, Probe sequence
ataactgtcattttttacatttcta

SEQ ID NO: 108530 - DNA, 25 bp, Probe sequence
atcaacatgtgtataacttcgccaa

SEQ ID NO: 108531 - DNA, 25 bp, Probe sequence
agcactaataataactgtcattttt

SEQ ID NO: 108532 - DNA, 25 bp, Probe sequence
acttcgccaaatctatgtttttacg

SEQ ID NO: 108533 - DNA, 25 bp, Probe sequence
aaaagtcatacacaccatacacaag

SEQ ID NO: 108534 - DNA, 25 bp, Probe sequence
cacaccatacacaagttatcaacat

SEQ ID NO: 108535 - DNA, 25 bp, Probe sequence
catgtgtataacttcgccaaatcta

SEQ ID NO: 108536 - DNA, 25 bp, Probe sequence
ctatgtttttacgacttatccacca

SEQ ID NO: 108537 - DNA, 25 bp, Probe sequence
gcacctactactattactaagaact

SEQ ID NO: 108538 - DNA, 25 bp, Probe sequence
gagcaaaactcattttgtggataat

SEQ ID NO: 108539 - DNA, 25 bp, Probe sequence
gtcattttttacatttctatatact

SEQ ID NO: 108540 - DNA, 25 bp, Probe sequence
ggaaactttgggaaatgtaatctgt

SEQ ID NO: 108541 - DNA, 25 bp, Probe sequence
tccacagcacctactactattacta

SEQ ID NO: 108542 - DNA, 25 bp, Probe sequence
taatgtgacaagatgagcaaaactc

SEQ ID NO: 108543 - DNA, 25 bp, Probe sequence
tttttacgacttatccaccaatcca

SEQ ID NO: 108544 - DNA, 25 bp, Probe sequence
ataagtgtgcttatatgccctttaa

SEQ ID NO: 108545 - DNA, 25 bp, Probe sequence
ataattctagatgcgtatgtaaaat

SEQ ID NO: 108546 - DNA, 25 bp, Probe sequence
agtgtgcttatatgccctttaaatt

SEQ ID NO: 108547 - DNA, 25 bp, Probe sequence
aaagacgccaattaaatttatgaca

SEQ ID NO: 108548 - DNA, 25 bp, Probe sequence
aatttgacagcattttaaacagcaa

SEQ ID NO: 108549 - DNA, 25 bp, Probe sequence
aatttatgacaaatgtatccaaaat

SEQ ID NO: 108550 - DNA, 25 bp, Probe sequence
cgtgattaattaaaacgtcatcctt

SEQ ID NO: 108551 - DNA, 25 bp, Probe sequence
gaaaatgacagtattgccaaaaaat

SEQ ID NO: 108552 - DNA, 25 bp, Probe sequence
gtataatatattaatgacacacaaa

SEQ ID NO: 108553 - DNA, 25 bp, Probe sequence
gtatccaaaatttaataagtgtgct

SEQ ID NO: 108554 - DNA, 25 bp, Probe sequence
gtgcttatatgccctttaaatttaa

SEQ ID NO: 108555 - DNA, 25 bp, Probe sequence
ggcaaaaataattctagatgcgtat

SEQ ID NO: 108556 - DNA, 25 bp, Probe sequence
tcatcctttattttttggcaaaaat

SEQ ID NO: 108557 - DNA, 25 bp, Probe sequence
tatgtaaacggtttctacctctatt

SEQ ID NO: 108558 - DNA, 25 bp, Probe sequence
tatatgtaaacggtttctacctcta

SEQ ID NO: 108559 - DNA, 25 bp, Probe sequence
atatgtaggggagtcttatttttat

SEQ ID NO: 108560 - DNA, 25 bp, Probe sequence
ataagacttccctatatgtagggga

SEQ ID NO: 108561 - DNA, 25 bp, Probe sequence
atgtaggggagtcttatttttatgc

SEQ ID NO: 108562 - DNA, 25 bp, Probe sequence
aggggagtcttatttttatgctaga

SEQ ID NO: 108563 - DNA, 25 bp, Probe sequence
aaaataagacttccctatatgtagg

SEQ ID NO: 108564 - DNA, 25 bp, Probe sequence
aagacttccctatatgtaggggagt

SEQ ID NO: 108565 - DNA, 25 bp, Probe sequence
aatgctgtactatattcaatgatta

SEQ ID NO: 108566 - DNA, 25 bp, Probe sequence
cctatatgtaggggagtcttatttt

SEQ ID NO: 108567 - DNA, 25 bp, Probe sequence
gacttccctatatgtaggggagtct

SEQ ID NO: 108568 - DNA, 25 bp, Probe sequence
gtaggggagtcttatttttatgcta

SEQ ID NO: 108569 - DNA, 25 bp, Probe sequence
gtaatgctgtactatattcaatgat

SEQ ID NO: 108570 - DNA, 25 bp, Probe sequence
ggggagtcttatttttatgctagaa

SEQ ID NO: 108571 - DNA, 25 bp, Probe sequence
tgtaggggagtcttatttttatgct

SEQ ID NO: 108572 - DNA, 25 bp, Probe sequence
tgctgtactatattcaatgattagt

SEQ ID NO: 108573 - DNA, 25 bp, Probe sequence
tttatgctagaaagtaatgctgtac

SEQ ID NO: 108574 - DNA, 25 bp, Probe sequence
attaaatatgcttacaacaatctta

SEQ ID NO: 108575 - DNA, 25 bp, Probe sequence
atttctgaattcattattatttgtc

SEQ ID NO: 108576 - DNA, 25 bp, Probe sequence
atatcctttaacgcactacaatagt

SEQ ID NO: 108577 - DNA, 25 bp, Probe sequence
atacttcaagaaggatgggttactt

SEQ ID NO: 108578 - DNA, 25 bp, Probe sequence
atacctgtatatgcaattcgtcaat

SEQ ID NO: 108579 - DNA, 25 bp, Probe sequence
atcttaatatcctttaacgcactac

SEQ ID NO: 108580 - DNA, 25 bp, Probe sequence
atgtacgtaaaaccattgtttcaat

SEQ ID NO: 108581 - DNA, 25 bp, Probe sequence
acctgtatatgcaattcgtcaatag

SEQ ID NO: 108582 - DNA, 25 bp, Probe sequence
acaatcttaatatcctttaacgcac

SEQ ID NO: 108583 - DNA, 25 bp, Probe sequence
aacgcactacaatagtgctctgata

SEQ ID NO: 108584 - DNA, 25 bp, Probe sequence
aatagtgctctgataataggttata

SEQ ID NO: 108585 - DNA, 25 bp, Probe sequence
ctatacctgtatatgcaattcgtca

SEQ ID NO: 108586 - DNA, 25 bp, Probe sequence
gcttacaacaatcttaatatccttt

SEQ ID NO: 108587 - DNA, 25 bp, Probe sequence
gtatatgcaattcgtcaatagataa

SEQ ID NO: 108588 - DNA, 25 bp, Probe sequence
taatatcctttaacgcactacaata

SEQ ID NO: 108589 - DNA, 25 bp, Probe sequence
agggtggcaacgcgtagaccacgtc

SEQ ID NO: 108590 - DNA, 25 bp, Probe sequence
aacatatatatgaatctacctactt

SEQ ID NO: 108591 - DNA, 25 bp, Probe sequence
aagacgtacgtcattccataataaa

SEQ ID NO: 108592 - DNA, 25 bp, Probe sequence
cagagagcttgtggttagtgtgaac

SEQ ID NO: 108593 - DNA, 25 bp, Probe sequence
gaagtgcaatttaggtttagtgtat

SEQ ID NO: 108594 - DNA, 25 bp, Probe sequence
gaacaatcggtgataaccgttattt

SEQ ID NO: 108595 - DNA, 25 bp, Probe sequence
gaccacgtcccttgtagggatgtgg

SEQ ID NO: 108596 - DNA, 25 bp, Probe sequence
gagtgatgtttgaaatcgttacttg

SEQ ID NO: 108597 - DNA, 25 bp, Probe sequence
gataaccgttattttagtgaagtgc

SEQ ID NO: 108598 - DNA, 25 bp, Probe sequence
gtagaccacgtcccttgtagggatg

SEQ ID NO: 108599 - DNA, 25 bp, Probe sequence
tgtagggatgtggtctttttttatt

SEQ ID NO: 108600 - DNA, 25 bp, Probe sequence
taagacattgttcgtaggacaagta

SEQ ID NO: 108601 - DNA, 25 bp, Probe sequence
taggtttagtgtatctttataactt

SEQ ID NO: 108602 - DNA, 25 bp, Probe sequence
tagtgttcgatatcagagagcttgt

SEQ ID NO: 108603 - DNA, 25 bp, Probe sequence
tatgaatctacctacttaatttaaa

SEQ ID NO: 108604 - DNA, 25 bp, Probe sequence
atattctacgtatacttaaagcaag

SEQ ID NO: 108605 - DNA, 25 bp, Probe sequence
aaagtggtgacgaagctgtcgccac

SEQ ID NO: 108606 - DNA, 25 bp, Probe sequence
aacaattttgagcatcactattata

SEQ ID NO: 108607 - DNA, 25 bp, Probe sequence
aactggtgtctaatgttattgctta

SEQ ID NO: 108608 - DNA, 25 bp, Probe sequence
ctgtcgccactttttttgtgctgta

SEQ ID NO: 108609 - DNA, 25 bp, Probe sequence
gaagatgattgaagacgccagtatg

SEQ ID NO: 108610 - DNA, 25 bp, Probe sequence
gaacgcatttcattatagcaacaat

SEQ ID NO: 108611 - DNA, 25 bp, Probe sequence
gacgccagtatgtctaacctcagac

SEQ ID NO: 108612 - DNA, 25 bp, Probe sequence
gagtgttacatgaatcaatatccca

SEQ ID NO: 108613 - DNA, 25 bp, Probe sequence
gatttcgttgatgtagtatgagtaa

SEQ ID NO: 108614 - DNA, 25 bp, Probe sequence
gtctaacctcagacaaactggtgtc

SEQ ID NO: 108615 - DNA, 25 bp, Probe sequence
ggagtagggtagggggagaggatga

SEQ ID NO: 108616 - DNA, 25 bp, Probe sequence
tcaatatcccagactcatcattaga

SEQ ID NO: 108617 - DNA, 25 bp, Probe sequence
tagactaggtatattattttttcgt

SEQ ID NO: 108618 - DNA, 25 bp, Probe sequence
tagtgagccaatgcacataacaaca

SEQ ID NO: 108619 - DNA, 25 bp, Probe sequence
attctgatatacaaatcgtctatgg

SEQ ID NO: 108620 - DNA, 25 bp, Probe sequence
agcgatttggctaacgtatgacaat

SEQ ID NO: 108621 - DNA, 25 bp, Probe sequence
aacacataacaatttcatatttctt

SEQ ID NO: 108622 - DNA, 25 bp, Probe sequence
caaatcgtctatggtatgactggga

SEQ ID NO: 108623 - DNA, 25 bp, Probe sequence
cactgaatctcaactaacacataac

SEQ ID NO: 108624 - DNA, 25 bp, Probe sequence
cttcagcaaccgactttatagcacg

SEQ ID NO: 108625 - DNA, 25 bp, Probe sequence
gccctgtgatacttcagcaaccgac

SEQ ID NO: 108626 - DNA, 25 bp, Probe sequence
gagaagttgagggacttggccctgt

SEQ ID NO: 108627 - DNA, 25 bp, Probe sequence
gagggacttggccctgtgatacttc

SEQ ID NO: 108628 - DNA, 25 bp, Probe sequence
gatacttcagcaaccgactttatag

SEQ ID NO: 108629 - DNA, 25 bp, Probe sequence
gtatgactgggaatcgtatacacga

SEQ ID NO: 108630 - DNA, 25 bp, Probe sequence
gtatacacgaaagcgatttggctaa

SEQ ID NO: 108631 - DNA, 25 bp, Probe sequence
gtaattcatcactgaatctcaacta

SEQ ID NO: 108632 - DNA, 25 bp, Probe sequence
ggctaacgtatgacaatgataacaa

SEQ ID NO: 108633 - DNA, 25 bp, Probe sequence
ttggccctgtgatacttcagcaacc

SEQ ID NO: 108634 - DNA, 25 bp, Probe sequence
acagttatcatattcaaagacatct

SEQ ID NO: 108635 - DNA, 25 bp, Probe sequence
aaatcacagttatcatattcaaaga

SEQ ID NO: 108636 - DNA, 25 bp, Probe sequence
aaagcacacaaaagcgattcaaatg

SEQ ID NO: 108637 - DNA, 25 bp, Probe sequence
aagcgattcaaatgagtatgttaat

SEQ ID NO: 108638 - DNA, 25 bp, Probe sequence
aatcaagcttgattgctatgtagtg

SEQ ID NO: 108639 - DNA, 25 bp, Probe sequence
caagcttgattgctatgtagtggga

SEQ ID NO: 108640 - DNA, 25 bp, Probe sequence
gctactaaatcacagttatcatatt

SEQ ID NO: 108641 - DNA, 25 bp, Probe sequence
gcttgattgctatgtagtgggatta

SEQ ID NO: 108642 - DNA, 25 bp, Probe sequence
gcacacaaaagcgattcaaatgagt

SEQ ID NO: 108643 - DNA, 25 bp, Probe sequence
gaattgtaaatctaaatcaagcttg

SEQ ID NO: 108644 - DNA, 25 bp, Probe sequence
gaatgaagctactaaatcacagtta

SEQ ID NO: 108645 - DNA, 25 bp, Probe sequence
gaagctactaaatcacagttatcat

SEQ ID NO: 108646 - DNA, 25 bp, Probe sequence
gacatctagagtacatgagagtgga

SEQ ID NO: 108647 - DNA, 25 bp, Probe sequence
gattgctatgtagtgggattaaata

SEQ ID NO: 108648 - DNA, 25 bp, Probe sequence
gttatcatattcaaagacatctaga

SEQ ID NO: 108649 - DNA, 25 bp, Probe sequence
attttgttctgaacgggttgatata

SEQ ID NO: 108650 - DNA, 25 bp, Probe sequence
gatgataaaattgtacggtttttat

SEQ ID NO: 108651 - DNA, 25 bp, Probe sequence
gtttttccgtacaataatcattaag

SEQ ID NO: 108652 - DNA, 25 bp, Probe sequence
tccgtacaataatcattaagatgat

SEQ ID NO: 108653 - DNA, 25 bp, Probe sequence
taagatgataaaattgtacggtttt

SEQ ID NO: 108654 - DNA, 25 bp, Probe sequence
ttaagatgataaaattgtacggttt

SEQ ID NO: 108655 - DNA, 25 bp, Probe sequence
tttattttgttctgaacgggttgat

SEQ ID NO: 108656 - DNA, 25 bp, Probe sequence
tattttgttctgaacgggttgatat

SEQ ID NO: 108657 - DNA, 25 bp, Probe sequence
tttccgtacaataatcattaagatg

SEQ ID NO: 108658 - DNA, 25 bp, Probe sequence
tttttccgtacaataatcattaaga

SEQ ID NO: 108659 - DNA, 25 bp, Probe sequence
ttttccgtacaataatcattaagat

SEQ ID NO: 108660 - DNA, 25 bp, Probe sequence
ttattttgttctgaacgggttgata

SEQ ID NO: 108661 - DNA, 25 bp, Probe sequence
ttccgtacaataatcattaagatga

SEQ ID NO: 108662 - DNA, 25 bp, Probe sequence
attggtagaatatcaaatggttaaa

SEQ ID NO: 108663 - DNA, 25 bp, Probe sequence
atttgcattatggtctcgatattgg

SEQ ID NO: 108664 - DNA, 25 bp, Probe sequence
atgagaaaaacttggaggtgctcac

SEQ ID NO: 108665 - DNA, 25 bp, Probe sequence
aaaggccgaaaatcaatgttcgatt

SEQ ID NO: 108666 - DNA, 25 bp, Probe sequence
aaggccgaaaatcaatgttcgattt

SEQ ID NO: 108667 - DNA, 25 bp, Probe sequence
gcattatggtctcgatattggtaga

SEQ ID NO: 108668 - DNA, 25 bp, Probe sequence
gatttttatttgcattatggtctcg

SEQ ID NO: 108669 - DNA, 25 bp, Probe sequence
gttcgatttttatttgcattatggt

SEQ ID NO: 108670 - DNA, 25 bp, Probe sequence
tgttcgatttttatttgcattatgg

SEQ ID NO: 108671 - DNA, 25 bp, Probe sequence
tgcattatggtctcgatattggtag

SEQ ID NO: 108672 - DNA, 25 bp, Probe sequence
tcgatttttatttgcattatggtct

SEQ ID NO: 108673 - DNA, 25 bp, Probe sequence
tttgcattatggtctcgatattggt

SEQ ID NO: 108674 - DNA, 25 bp, Probe sequence
ttttatttgcattatggtctcgata

SEQ ID NO: 108675 - DNA, 25 bp, Probe sequence
ttatttgcattatggtctcgatatt

SEQ ID NO: 108676 - DNA, 25 bp, Probe sequence
ttatggtctcgatattggtagaata

SEQ ID NO: 108677 - DNA, 25 bp, Probe sequence
atttttcacttataacattcttcaa

SEQ ID NO: 108678 - DNA, 25 bp, Probe sequence
ataaatacatgagccttctatcttt

SEQ ID NO: 108679 - DNA, 25 bp, Probe sequence
agactgccaataaaatgcaattttt

SEQ ID NO: 108680 - DNA, 25 bp, Probe sequence
acatgagccttctatctttattggt

SEQ ID NO: 108681 - DNA, 25 bp, Probe sequence
aagtctgatgtcgaaaatagctatt

SEQ ID NO: 108682 - DNA, 25 bp, Probe sequence
gccttctatctttattggtaggagg

SEQ ID NO: 108683 - DNA, 25 bp, Probe sequence
gctttgtttgcttctgtatcgattc

SEQ ID NO: 108684 - DNA, 25 bp, Probe sequence
gcttttgctttgtttgcttctgtat

SEQ ID NO: 108685 - DNA, 25 bp, Probe sequence
gtttgcttctgtatcgattcgatta

SEQ ID NO: 108686 - DNA, 25 bp, Probe sequence
gtcatggcaagattggctgtgctat

SEQ ID NO: 108687 - DNA, 25 bp, Probe sequence
ggtgatatttgctagtcataattta

SEQ ID NO: 108688 - DNA, 25 bp, Probe sequence
ggtaggaggcttttgctttgtttgc

SEQ ID NO: 108689 - DNA, 25 bp, Probe sequence
ggctgtgctataatctatcttgtgc

SEQ ID NO: 108690 - DNA, 25 bp, Probe sequence
tgtaaaaaatatcttgtcatggcaa

SEQ ID NO: 108691 - DNA, 25 bp, Probe sequence
tgctataatctatcttgtgcttaag

SEQ ID NO: 108692 - DNA, 25 bp, Probe sequence
atagagacctcatcattgtgttaaa

SEQ ID NO: 108693 - DNA, 25 bp, Probe sequence
ataatccgccgtgagaaactaataa

SEQ ID NO: 108694 - DNA, 25 bp, Probe sequence
atcattatcataatccgccgtgaga

SEQ ID NO: 108695 - DNA, 25 bp, Probe sequence
accaatcctccataacatcaattgt

SEQ ID NO: 108696 - DNA, 25 bp, Probe sequence
caactagaagttgccattaccctaa

SEQ ID NO: 108697 - DNA, 25 bp, Probe sequence
gctactgtcaacatatttcttcgtt

SEQ ID NO: 108698 - DNA, 25 bp, Probe sequence
gaacctcaagtaacttagtggttgg

SEQ ID NO: 108699 - DNA, 25 bp, Probe sequence
gacgtacaaacatatgctactgtca

SEQ ID NO: 108700 - DNA, 25 bp, Probe sequence
gaggataggcatttttttgcgttta

SEQ ID NO: 108701 - DNA, 25 bp, Probe sequence
gatttatctgttcgtccattttctt

SEQ ID NO: 108702 - DNA, 25 bp, Probe sequence
gttgccattaccctaattttattat

SEQ ID NO: 108703 - DNA, 25 bp, Probe sequence
gtaagcgacatcctgtgatttttta

SEQ ID NO: 108704 - DNA, 25 bp, Probe sequence
tcgttgtgatatgccaccaatcctc

SEQ ID NO: 108705 - DNA, 25 bp, Probe sequence
tctgttcgtccattttctttataat

SEQ ID NO: 108706 - DNA, 25 bp, Probe sequence
ttttctgagcaatgacgtgcaacta

SEQ ID NO: 108707 - DNA, 25 bp, Probe sequence
atttctgcgtctctaatgtgcgcat

SEQ ID NO: 108708 - DNA, 25 bp, Probe sequence
atatactgatagtttctgtagggaa

SEQ ID NO: 108709 - DNA, 25 bp, Probe sequence
atcatatgtgagaagcggtgctagc

SEQ ID NO: 108710 - DNA, 25 bp, Probe sequence
agcggtgctagctttttgctggtat

SEQ ID NO: 108711 - DNA, 25 bp, Probe sequence
aatgtgcgcatttattcatatttta

SEQ ID NO: 108712 - DNA, 25 bp, Probe sequence
catggatgacatttctgcgtctcta

SEQ ID NO: 108713 - DNA, 25 bp, Probe sequence
catattttaagtagaaccgcatttt

SEQ ID NO: 108714 - DNA, 25 bp, Probe sequence
gctggtatgggttttcatggatgac

SEQ ID NO: 108715 - DNA, 25 bp, Probe sequence
gctagtattgcaagctcatcatatg

SEQ ID NO: 108716 - DNA, 25 bp, Probe sequence
gctttttgctggtatgggttttcat

SEQ ID NO: 108717 - DNA, 25 bp, Probe sequence
gaaattcattgcacgtgattatcaa

SEQ ID NO: 108718 - DNA, 25 bp, Probe sequence
gggaaaatcgtatatttgcactgat

SEQ ID NO: 108719 - DNA, 25 bp, Probe sequence
tgcactgatgtatattgcagtcata

SEQ ID NO: 108720 - DNA, 25 bp, Probe sequence
taagaaaccggtcgatgaactaaag

SEQ ID NO: 108721 - DNA, 25 bp, Probe sequence
tagtatttgtctaatcattgttata

SEQ ID NO: 108722 - DNA, 25 bp, Probe sequence
atcgggtgcttttttatgttattgg

SEQ ID NO: 108723 - DNA, 25 bp, Probe sequence
atggctgttgttggaattaaggttc

SEQ ID NO: 108724 - DNA, 25 bp, Probe sequence
agttcggcactgctgtgagacgact

SEQ ID NO: 108725 - DNA, 25 bp, Probe sequence
accctataaagttcggcactgctgt

SEQ ID NO: 108726 - DNA, 25 bp, Probe sequence
cactgctgtgagacgactttatcgg

SEQ ID NO: 108727 - DNA, 25 bp, Probe sequence
gagagtcaccctataaagttcggca

SEQ ID NO: 108728 - DNA, 25 bp, Probe sequence
gactttatcgggtgcttttttatgt

SEQ ID NO: 108729 - DNA, 25 bp, Probe sequence
gagacgactttatcgggtgcttttt

SEQ ID NO: 108730 - DNA, 25 bp, Probe sequence
gtcaccctataaagttcggcactgc

SEQ ID NO: 108731 - DNA, 25 bp, Probe sequence
gtgcttttttatgttattggtggga

SEQ ID NO: 108732 - DNA, 25 bp, Probe sequence
gtgagacgactttatcgggtgcttt

SEQ ID NO: 108733 - DNA, 25 bp, Probe sequence
ggcactgctgtgagacgactttatc

SEQ ID NO: 108734 - DNA, 25 bp, Probe sequence
tgttggaattaaggttctatttgaa

SEQ ID NO: 108735 - DNA, 25 bp, Probe sequence
taaagttcggcactgctgtgagacg

SEQ ID NO: 108736 - DNA, 25 bp, Probe sequence
ttggtgggaaatggctgttgttgga

SEQ ID NO: 108737 - DNA, 25 bp, Probe sequence
atagttatccagaattgtgtacaat

SEQ ID NO: 108738 - DNA, 25 bp, Probe sequence
ataagacatcaaggtgtttatccac

SEQ ID NO: 108739 - DNA, 25 bp, Probe sequence
atggaaaaaagctataaacgttgat

SEQ ID NO: 108740 - DNA, 25 bp, Probe sequence
aggtgtttatccacagaaatgggga

SEQ ID NO: 108741 - DNA, 25 bp, Probe sequence
aacggggataagtaataagacatca

SEQ ID NO: 108742 - DNA, 25 bp, Probe sequence
aagacatcaaggtgtttatccacag

SEQ ID NO: 108743 - DNA, 25 bp, Probe sequence
aatactactgtatttcttaaataag

SEQ ID NO: 108744 - DNA, 25 bp, Probe sequence
catgggatataaaaacggggataag

SEQ ID NO: 108745 - DNA, 25 bp, Probe sequence
gaaaacaatactactgtatttctta

SEQ ID NO: 108746 - DNA, 25 bp, Probe sequence
gacatcaaggtgtttatccacagaa

SEQ ID NO: 108747 - DNA, 25 bp, Probe sequence
ggatagttatccagaattgtgtaca

SEQ ID NO: 108748 - DNA, 25 bp, Probe sequence
tcttaaataagaggtacggtagtgt

SEQ ID NO: 108749 - DNA, 25 bp, Probe sequence
tccacagaaatggggatagttatcc

SEQ ID NO: 108750 - DNA, 25 bp, Probe sequence
tcaaggtgtttatccacagaaatgg

SEQ ID NO: 108751 - DNA, 25 bp, Probe sequence
taaacgttgataaacatgggatata

SEQ ID NO: 108752 - DNA, 25 bp, Probe sequence
atagcgaaatattctttatactgaa

SEQ ID NO: 108753 - DNA, 25 bp, Probe sequence
atgaggtttatgtgaattgctgtta

SEQ ID NO: 108754 - DNA, 25 bp, Probe sequence
atgtgaattgctgttatgtttttaa

SEQ ID NO: 108755 - DNA, 25 bp, Probe sequence
aagggattttgaatgtatcagaaca

SEQ ID NO: 108756 - DNA, 25 bp, Probe sequence
ctgttatgtttttaagaagcttatc

SEQ ID NO: 108757 - DNA, 25 bp, Probe sequence
ccgcagtctttcatttcaagtaaat

SEQ ID NO: 108758 - DNA, 25 bp, Probe sequence
cctccgcagtctttcatttcaagta

SEQ ID NO: 108759 - DNA, 25 bp, Probe sequence
gaaaattctttctgcaactaaatat

SEQ ID NO: 108760 - DNA, 25 bp, Probe sequence
gatttttgacatagttagcctccgc

SEQ ID NO: 108761 - DNA, 25 bp, Probe sequence
gtgaagcaaagttctagctttgaga

SEQ ID NO: 108762 - DNA, 25 bp, Probe sequence
ggttttttcagccgcttcataaagg

SEQ ID NO: 108763 - DNA, 25 bp, Probe sequence
tgcggttttttcagccgcttcataa

SEQ ID NO: 108764 - DNA, 25 bp, Probe sequence
tcagccgcttcataaagggattttg

SEQ ID NO: 108765 - DNA, 25 bp, Probe sequence
taatgaggttcatgatttttgacat

SEQ ID NO: 108766 - DNA, 25 bp, Probe sequence
tttgacatagttagcctccgcagtc

SEQ ID NO: 108767 - DNA, 25 bp, Probe sequence
atcagtttgtccacagtctgaaaca

SEQ ID NO: 108768 - DNA, 25 bp, Probe sequence
aaactttctaaataagctaactgat

SEQ ID NO: 108769 - DNA, 25 bp, Probe sequence
aaaatcagtttgtccacagtctgaa

SEQ ID NO: 108770 - DNA, 25 bp, Probe sequence
cacagtctgaaacaagattcctata

SEQ ID NO: 108771 - DNA, 25 bp, Probe sequence
cagtttgtccacagtctgaaacaag

SEQ ID NO: 108772 - DNA, 25 bp, Probe sequence
cctatattctttaggaatcttgttt

SEQ ID NO: 108773 - DNA, 25 bp, Probe sequence
gaatcttgttttttctatttttatg

SEQ ID NO: 108774 - DNA, 25 bp, Probe sequence
gaaacaagattcctatattctttag

SEQ ID NO: 108775 - DNA, 25 bp, Probe sequence
gtttgtccacagtctgaaacaagat

SEQ ID NO: 108776 - DNA, 25 bp, Probe sequence
gtctgaaacaagattcctatattct

SEQ ID NO: 108777 - DNA, 25 bp, Probe sequence
gtccacagtctgaaacaagattcct

SEQ ID NO: 108778 - DNA, 25 bp, Probe sequence
tgttttttctatttttatggtgata

SEQ ID NO: 108779 - DNA, 25 bp, Probe sequence
tctttaggaatcttgttttttctat

SEQ ID NO: 108780 - DNA, 25 bp, Probe sequence
tcttgttttttctatttttatggtg

SEQ ID NO: 108781 - DNA, 25 bp, Probe sequence
taaaaaatcagtttgtccacagtct

SEQ ID NO: 108782 - DNA, 25 bp, Probe sequence
atttgtcgatatttaagttgagtta

SEQ ID NO: 108783 - DNA, 25 bp, Probe sequence
atgatgaagataattagtctatcaa

SEQ ID NO: 108784 - DNA, 25 bp, Probe sequence
agggtgtaatttgttttacaatgat

SEQ ID NO: 108785 - DNA, 25 bp, Probe sequence
aatttgtcgatatttaagttgagtt

SEQ ID NO: 108786 - DNA, 25 bp, Probe sequence
gatgaagataattagtctatcaaaa

SEQ ID NO: 108787 - DNA, 25 bp, Probe sequence
gtaatttgttttacaatgatgaaga

SEQ ID NO: 108788 - DNA, 25 bp, Probe sequence
gggtgtaatttgttttacaatgatg

SEQ ID NO: 108789 - DNA, 25 bp, Probe sequence
ggtgtaatttgttttacaatgatga

SEQ ID NO: 108790 - DNA, 25 bp, Probe sequence
taatttgtcgatatttaagttgagt

SEQ ID NO: 108791 - DNA, 25 bp, Probe sequence
taatattcaagtaattttattgttt

SEQ ID NO: 108792 - DNA, 25 bp, Probe sequence
tagtctatcaaaagaaaggggttgg

SEQ ID NO: 108793 - DNA, 25 bp, Probe sequence
tatcaaaagaaaggggttgggactg

SEQ ID NO: 108794 - DNA, 25 bp, Probe sequence
tttgtcgatatttaagttgagttaa

SEQ ID NO: 108795 - DNA, 25 bp, Probe sequence
ttattgttttttaatttgtcgatat

SEQ ID NO: 108796 - DNA, 25 bp, Probe sequence
ttgtcgatatttaagttgagttaaa

SEQ ID NO: 108797 - DNA, 25 bp, Probe sequence
atctaatcttcaacaaactggcccg

SEQ ID NO: 108798 - DNA, 25 bp, Probe sequence
accatctaatcttcaacaaactggc

SEQ ID NO: 108799 - DNA, 25 bp, Probe sequence
aacagaaccatctaatcttcaacaa

SEQ ID NO: 108800 - DNA, 25 bp, Probe sequence
aatcttcaacaaactggcccgtttg

SEQ ID NO: 108801 - DNA, 25 bp, Probe sequence
cagaaccatctaatcttcaacaaac

SEQ ID NO: 108802 - DNA, 25 bp, Probe sequence
catctaatcttcaacaaactggccc

SEQ ID NO: 108803 - DNA, 25 bp, Probe sequence
ctttgcaacagaaccatctaatctt

SEQ ID NO: 108804 - DNA, 25 bp, Probe sequence
ctaatcttcaacaaactggcccgtt

SEQ ID NO: 108805 - DNA, 25 bp, Probe sequence
gcaacagaaccatctaatcttcaac

SEQ ID NO: 108806 - DNA, 25 bp, Probe sequence
gaaccatctaatcttcaacaaactg

SEQ ID NO: 108807 - DNA, 25 bp, Probe sequence
tctaatcttcaacaaactggcccgt

SEQ ID NO: 108808 - DNA, 25 bp, Probe sequence
tcttcaacaaactggcccgtttgtt

SEQ ID NO: 108809 - DNA, 25 bp, Probe sequence
tcaacaaactggcccgtttgttgaa

SEQ ID NO: 108810 - DNA, 25 bp, Probe sequence
taatcttcaacaaactggcccgttt

SEQ ID NO: 108811 - DNA, 25 bp, Probe sequence
ttgcaacagaaccatctaatcttca

SEQ ID NO: 108812 - DNA, 25 bp, Probe sequence
atgacgttatttctatatgtatcaa

SEQ ID NO: 108813 - DNA, 25 bp, Probe sequence
acgcacctttcagcaactaaaataa

SEQ ID NO: 108814 - DNA, 25 bp, Probe sequence
acgttatttctatatgtatcaagat

SEQ ID NO: 108815 - DNA, 25 bp, Probe sequence
aaatgacgttatttctatatgtatc

SEQ ID NO: 108816 - DNA, 25 bp, Probe sequence
aacgcacctttcagcaactaaaata

SEQ ID NO: 108817 - DNA, 25 bp, Probe sequence
aatgacgttatttctatatgtatca

SEQ ID NO: 108818 - DNA, 25 bp, Probe sequence
caacgcacctttcagcaactaaaat

SEQ ID NO: 108819 - DNA, 25 bp, Probe sequence
cgcacctttcagcaactaaaataaa

SEQ ID NO: 108820 - DNA, 25 bp, Probe sequence
gcacctttcagcaactaaaataaaa

SEQ ID NO: 108821 - DNA, 25 bp, Probe sequence
gacgttatttctatatgtatcaaga

SEQ ID NO: 108822 - DNA, 25 bp, Probe sequence
tcaaaaaaagacaccttttcaggtg

SEQ ID NO: 108823 - DNA, 25 bp, Probe sequence
tgacgttatttctatatgtatcaag

SEQ ID NO: 108824 - DNA, 25 bp, Probe sequence
tcaacgcacctttcagcaactaaaa

SEQ ID NO: 108825 - DNA, 25 bp, Probe sequence
tcaaaaccatcaaaaaaagacacct

SEQ ID NO: 108826 - DNA, 25 bp, Probe sequence
tatttctatatgtatcaagataaga

SEQ ID NO: 108827 - DNA, 25 bp, Probe sequence
attaacaattattagaggtcatcgt

SEQ ID NO: 108828 - DNA, 25 bp, Probe sequence
atcctttttcttattacgcaaaatg

SEQ ID NO: 108829 - DNA, 25 bp, Probe sequence
aaatacgtaaccaacatgattaaca

SEQ ID NO: 108830 - DNA, 25 bp, Probe sequence
caaaatggcccgatttaagcacacc

SEQ ID NO: 108831 - DNA, 25 bp, Probe sequence
ctttattccgttaatgcgccatgac

SEQ ID NO: 108832 - DNA, 25 bp, Probe sequence
gcataaaatcccctttcattttcta

SEQ ID NO: 108833 - DNA, 25 bp, Probe sequence
gcacaccctttattccgttaatgcg

SEQ ID NO: 108834 - DNA, 25 bp, Probe sequence
gacagccatgataattactaatact

SEQ ID NO: 108835 - DNA, 25 bp, Probe sequence
gttaatgcgccatgacagccatgat

SEQ ID NO: 108836 - DNA, 25 bp, Probe sequence
gtaaatctattaccttattattaat

SEQ ID NO: 108837 - DNA, 25 bp, Probe sequence
taagcacaccctttattccgttaat

SEQ ID NO: 108838 - DNA, 25 bp, Probe sequence
taaaatcccctttcattttctaatg

SEQ ID NO: 108839 - DNA, 25 bp, Probe sequence
ttattattaattcaattcgctcata

SEQ ID NO: 108840 - DNA, 25 bp, Probe sequence
ttcttattacgcaaaatggcccgat

SEQ ID NO: 108841 - DNA, 25 bp, Probe sequence
ttcgctcataattaatcctttttct

SEQ ID NO: 108842 - DNA, 25 bp, Probe sequence
attaataactcgtcttcctaagcat

SEQ ID NO: 108843 - DNA, 25 bp, Probe sequence
atcctccaatccttttaataacaat

SEQ ID NO: 108844 - DNA, 25 bp, Probe sequence
actaatttatcatgtcagtgttcgc

SEQ ID NO: 108845 - DNA, 25 bp, Probe sequence
aacaattatagcatctaatcggttc

SEQ ID NO: 108846 - DNA, 25 bp, Probe sequence
aagcatcctccaatccttttaataa

SEQ ID NO: 108847 - DNA, 25 bp, Probe sequence
ctattaataactcgtcttcctaagc

SEQ ID NO: 108848 - DNA, 25 bp, Probe sequence
ctaagcatcctccaatccttttaat

SEQ ID NO: 108849 - DNA, 25 bp, Probe sequence
ctccaatccttttaataacaattat

SEQ ID NO: 108850 - DNA, 25 bp, Probe sequence
gctaaccactaatttatcatgtcag

SEQ ID NO: 108851 - DNA, 25 bp, Probe sequence
gcatcctccaatccttttaataaca

SEQ ID NO: 108852 - DNA, 25 bp, Probe sequence
taataactcgtcttcctaagcatcc

SEQ ID NO: 108853 - DNA, 25 bp, Probe sequence
taagcatcctccaatccttttaata

SEQ ID NO: 108854 - DNA, 25 bp, Probe sequence
tagcatctaatcggttctgttgcaa

SEQ ID NO: 108855 - DNA, 25 bp, Probe sequence
tatagctaaccactaatttatcatg

SEQ ID NO: 108856 - DNA, 25 bp, Probe sequence
ttatagcatctaatcggttctgttg

SEQ ID NO: 108857 - DNA, 25 bp, Probe sequence
attatggaatagagatgttggtaac

SEQ ID NO: 108858 - DNA, 25 bp, Probe sequence
agaaccgtattatggaatagagatg

SEQ ID NO: 108859 - DNA, 25 bp, Probe sequence
accgtattatggaatagagatgttg

SEQ ID NO: 108860 - DNA, 25 bp, Probe sequence
acagaaccgtattatggaatagaga

SEQ ID NO: 108861 - DNA, 25 bp, Probe sequence
aacagaaccgtattatggaatagag

SEQ ID NO: 108862 - DNA, 25 bp, Probe sequence
aaccgtattatggaatagagatgtt

SEQ ID NO: 108863 - DNA, 25 bp, Probe sequence
caacagaaccgtattatggaataga

SEQ ID NO: 108864 - DNA, 25 bp, Probe sequence
cagaaccgtattatggaatagagat

SEQ ID NO: 108865 - DNA, 25 bp, Probe sequence
gcaacagaaccgtattatggaatag

SEQ ID NO: 108866 - DNA, 25 bp, Probe sequence
gaaccgtattatggaatagagatgt

SEQ ID NO: 108867 - DNA, 25 bp, Probe sequence
gtattatggaatagagatgttggta

SEQ ID NO: 108868 - DNA, 25 bp, Probe sequence
tgcaacagaaccgtattatggaata

SEQ ID NO: 108869 - DNA, 25 bp, Probe sequence
tattatggaatagagatgttggtaa

SEQ ID NO: 108870 - DNA, 25 bp, Probe sequence
tttgcaacagaaccgtattatggaa

SEQ ID NO: 108871 - DNA, 25 bp, Probe sequence
ttgcaacagaaccgtattatggaat

SEQ ID NO: 108872 - DNA, 25 bp, Probe sequence
atcctaactcgaaataaataagcat

SEQ ID NO: 108873 - DNA, 25 bp, Probe sequence
agtggccgattgtgcttgatgagct

SEQ ID NO: 108874 - DNA, 25 bp, Probe sequence
actagtggccgattgtgcttgatga

SEQ ID NO: 108875 - DNA, 25 bp, Probe sequence
ctagtggccgattgtgcttgatgag

SEQ ID NO: 108876 - DNA, 25 bp, Probe sequence
gccgattgtgcttgatgagcttggg

SEQ ID NO: 108877 - DNA, 25 bp, Probe sequence
gcttgggacataaatcctaactcga

SEQ ID NO: 108878 - DNA, 25 bp, Probe sequence
gcatatcactaaactgattttttaa

SEQ ID NO: 108879 - DNA, 25 bp, Probe sequence
gattgtgcttgatgagcttgggaca

SEQ ID NO: 108880 - DNA, 25 bp, Probe sequence
gtggccgattgtgcttgatgagctt

SEQ ID NO: 108881 - DNA, 25 bp, Probe sequence
ggacataaatcctaactcgaaataa

SEQ ID NO: 108882 - DNA, 25 bp, Probe sequence
ggccgattgtgcttgatgagcttgg

SEQ ID NO: 108883 - DNA, 25 bp, Probe sequence
tgtgcttgatgagcttgggacataa

SEQ ID NO: 108884 - DNA, 25 bp, Probe sequence
taagcatatcactaaactgattttt

SEQ ID NO: 108885 - DNA, 25 bp, Probe sequence
taaagtttacagtgatatgcttatt

SEQ ID NO: 108886 - DNA, 25 bp, Probe sequence
tagtggccgattgtgcttgatgagc

SEQ ID NO: 108887 - DNA, 25 bp, Probe sequence
atacgaatctatcgacttctttatt

SEQ ID NO: 108888 - DNA, 25 bp, Probe sequence
atctatcgacttctttatttatgat

SEQ ID NO: 108889 - DNA, 25 bp, Probe sequence
atgagacgtagattaactccataat

SEQ ID NO: 108890 - DNA, 25 bp, Probe sequence
atgtgataatacagttacgttaatt

SEQ ID NO: 108891 - DNA, 25 bp, Probe sequence
aagtgcgattaatgtgataatacag

SEQ ID NO: 108892 - DNA, 25 bp, Probe sequence
aattgcagataaggggtacagaaaa

SEQ ID NO: 108893 - DNA, 25 bp, Probe sequence
gcttgggacataaatgattttttaa

SEQ ID NO: 108894 - DNA, 25 bp, Probe sequence
gaatctatcgacttctttatttatg

SEQ ID NO: 108895 - DNA, 25 bp, Probe sequence
gacttctttatttatgatattcatc

SEQ ID NO: 108896 - DNA, 25 bp, Probe sequence
gagatgagacgtagattaactccat

SEQ ID NO: 108897 - DNA, 25 bp, Probe sequence
gatattcatctctttttaatggaaa

SEQ ID NO: 108898 - DNA, 25 bp, Probe sequence
gattacaaaatggagcttgggacat

SEQ ID NO: 108899 - DNA, 25 bp, Probe sequence
ggtacagaaaaactagacttgatta

SEQ ID NO: 108900 - DNA, 25 bp, Probe sequence
ttatgatattcatctctttttaatg

SEQ ID NO: 108901 - DNA, 25 bp, Probe sequence
ttaactccataatcaatacgaatct

SEQ ID NO: 108902 - DNA, 25 bp, Probe sequence
cttacgtttcagtgacggtagactt

SEQ ID NO: 108903 - DNA, 25 bp, Probe sequence
cgtttcagtgacggtagacttacct

SEQ ID NO: 108904 - DNA, 25 bp, Probe sequence
gacttacctttaacatgttacatac

SEQ ID NO: 108905 - DNA, 25 bp, Probe sequence
gacggtagacttacctttaacatgt

SEQ ID NO: 108906 - DNA, 25 bp, Probe sequence
gagtcttacgtttcagtgacggtag

SEQ ID NO: 108907 - DNA, 25 bp, Probe sequence
gaggtgagtcttacgtttcagtgac

SEQ ID NO: 108908 - DNA, 25 bp, Probe sequence
gttagaggtgagtcttacgtttcag

SEQ ID NO: 108909 - DNA, 25 bp, Probe sequence
gtcttacgtttcagtgacggtagac

SEQ ID NO: 108910 - DNA, 25 bp, Probe sequence
gtagacttacctttaacatgttaca

SEQ ID NO: 108911 - DNA, 25 bp, Probe sequence
gtgacggtagacttacctttaacat

SEQ ID NO: 108912 - DNA, 25 bp, Probe sequence
gtgagtcttacgtttcagtgacggt

SEQ ID NO: 108913 - DNA, 25 bp, Probe sequence
ggtgagtcttacgtttcagtgacgg

SEQ ID NO: 108914 - DNA, 25 bp, Probe sequence
tagaggtgagtcttacgtttcagtg

SEQ ID NO: 108915 - DNA, 25 bp, Probe sequence
ttacctttaacatgttacatactaa

SEQ ID NO: 108916 - DNA, 25 bp, Probe sequence
ttcagtgacggtagacttaccttta

SEQ ID NO: 108917 - DNA, 25 bp, Probe sequence
attacaaatgtagtatttatgtcaa

SEQ ID NO: 108918 - DNA, 25 bp, Probe sequence
atcctccttatataagactacattt

SEQ ID NO: 108919 - DNA, 25 bp, Probe sequence
acaaatgtagtatttatgtcaaaat

SEQ ID NO: 108920 - DNA, 25 bp, Probe sequence
aagactacatttgtagtatattaca

SEQ ID NO: 108921 - DNA, 25 bp, Probe sequence
caaatgtagtatttatgtcaaaata

SEQ ID NO: 108922 - DNA, 25 bp, Probe sequence
ctccttatataagactacatttgta

SEQ ID NO: 108923 - DNA, 25 bp, Probe sequence
cctccttatataagactacatttgt

SEQ ID NO: 108924 - DNA, 25 bp, Probe sequence
ccttatataagactacatttgtagt

SEQ ID NO: 108925 - DNA, 25 bp, Probe sequence
gactacatttgtagtatattacaaa

SEQ ID NO: 108926 - DNA, 25 bp, Probe sequence
gtagtatttatgtcaaaataatgtt

SEQ ID NO: 108927 - DNA, 25 bp, Probe sequence
tccttatataagactacatttgtag

SEQ ID NO: 108928 - DNA, 25 bp, Probe sequence
tcctccttatataagactacatttg

SEQ ID NO: 108929 - DNA, 25 bp, Probe sequence
tacaaatgtagtatttatgtcaaaa

SEQ ID NO: 108930 - DNA, 25 bp, Probe sequence
tatcctccttatataagactacatt

SEQ ID NO: 108931 - DNA, 25 bp, Probe sequence
ttacaaatgtagtatttatgtcaaa

SEQ ID NO: 108932 - DNA, 25 bp, Probe sequence
atcaagtcgttgaatatttcctctg

SEQ ID NO: 108933 - DNA, 25 bp, Probe sequence
agtcgttgaatatttcctctgtttt

SEQ ID NO: 108934 - DNA, 25 bp, Probe sequence
aaaacagaggaaacaatcaagtcgt

SEQ ID NO: 108935 - DNA, 25 bp, Probe sequence
aagtcgttgaatatttcctctgttt

SEQ ID NO: 108936 - DNA, 25 bp, Probe sequence
caagtcgttgaatatttcctctgtt

SEQ ID NO: 108937 - DNA, 25 bp, Probe sequence
cagaggaaacaatcaagtcgttgaa

SEQ ID NO: 108938 - DNA, 25 bp, Probe sequence
gaatatttcctctgttttttagttg

SEQ ID NO: 108939 - DNA, 25 bp, Probe sequence
gttgtgtttacaacaatacatagaa

SEQ ID NO: 108940 - DNA, 25 bp, Probe sequence
gttgaatatttcctctgttttttag

SEQ ID NO: 108941 - DNA, 25 bp, Probe sequence
gtcgttgaatatttcctctgttttt

SEQ ID NO: 108942 - DNA, 25 bp, Probe sequence
tgaatatttcctctgttttttagtt

SEQ ID NO: 108943 - DNA, 25 bp, Probe sequence
tcgttgaatatttcctctgtttttt

SEQ ID NO: 108944 - DNA, 25 bp, Probe sequence
tcaagtcgttgaatatttcctctgt

SEQ ID NO: 108945 - DNA, 25 bp, Probe sequence
tacaacaatacatagaaaacagagg

SEQ ID NO: 108946 - DNA, 25 bp, Probe sequence
ttgaatatttcctctgttttttagt

SEQ ID NO: 108947 - DNA, 25 bp, Probe sequence
cttatggggtaggcaattatggaaa

SEQ ID NO: 108948 - DNA, 25 bp, Probe sequence
agaacgaagatgataacctaagtga

SEQ ID NO: 108949 - DNA, 25 bp, Probe sequence
acgaagatgataacctaagtgaggt

SEQ ID NO: 108950 - DNA, 25 bp, Probe sequence
acttatggggtaggcaattatggaa

SEQ ID NO: 108951 - DNA, 25 bp, Probe sequence
aacttatggggtaggcaattatgga

SEQ ID NO: 108952 - DNA, 25 bp, Probe sequence
aaagaacgaagatgataacctaagt

SEQ ID NO: 108953 - DNA, 25 bp, Probe sequence
caaaataacttatggggtaggcaat

SEQ ID NO: 108954 - DNA, 25 bp, Probe sequence
aacgaagatgataacctaagtgagg

SEQ ID NO: 108955 - DNA, 25 bp, Probe sequence
aataacttatggggtaggcaattat

SEQ ID NO: 108956 - DNA, 25 bp, Probe sequence
aatacatgataaactataaactaaa

SEQ ID NO: 108957 - DNA, 25 bp, Probe sequence
gaacgaagatgataacctaagtgag

SEQ ID NO: 108958 - DNA, 25 bp, Probe sequence
gatgataacctaagtgaggttttaa

SEQ ID NO: 108959 - DNA, 25 bp, Probe sequence
tggggtaggcaattatggaaaataa

SEQ ID NO: 108960 - DNA, 25 bp, Probe sequence
taacttatggggtaggcaattatgg

SEQ ID NO: 108961 - DNA, 25 bp, Probe sequence
tatggggtaggcaattatggaaaat

SEQ ID NO: 108962 - DNA, 25 bp, Probe sequence
atccctcaatccgaattgaattttc

SEQ ID NO: 108963 - DNA, 25 bp, Probe sequence
aatcaaagttcgtaattgtctttat

SEQ ID NO: 108964 - DNA, 25 bp, Probe sequence
aataatcaaagttcgtaattgtctt

SEQ ID NO: 108965 - DNA, 25 bp, Probe sequence
ccctcaatccgaattgaattttcgg

SEQ ID NO: 108966 - DNA, 25 bp, Probe sequence
gaattgaattttcggattgagggat

SEQ ID NO: 108967 - DNA, 25 bp, Probe sequence
gaataatcaaagttcgtaattgtct

SEQ ID NO: 108968 - DNA, 25 bp, Probe sequence
gagggatttttatagttctattgca

SEQ ID NO: 108969 - DNA, 25 bp, Probe sequence
gatttttatagttctattgcagaag

SEQ ID NO: 108970 - DNA, 25 bp, Probe sequence
gggatttttatagttctattgcaga

SEQ ID NO: 108971 - DNA, 25 bp, Probe sequence
ggatttttatagttctattgcagaa

SEQ ID NO: 108972 - DNA, 25 bp, Probe sequence
tgagggatttttatagttctattgc

SEQ ID NO: 108973 - DNA, 25 bp, Probe sequence
tgtctttataaaaaaatccctcaat

SEQ ID NO: 108974 - DNA, 25 bp, Probe sequence
tccctcaatccgaattgaattttcg

SEQ ID NO: 108975 - DNA, 25 bp, Probe sequence
tcaaagttcgtaattgtctttataa

SEQ ID NO: 108976 - DNA, 25 bp, Probe sequence
tttatagttctattgcagaagaaaa

SEQ ID NO: 108977 - DNA, 25 bp, Probe sequence
cctatgagggtataataaaacggat

SEQ ID NO: 108978 - DNA, 25 bp, Probe sequence
acctcctataaatacctatgagggt

SEQ ID NO: 108979 - DNA, 25 bp, Probe sequence
acggatagaatcatttgccaaatac

SEQ ID NO: 108980 - DNA, 25 bp, Probe sequence
acttacctcctataaatacctatga

SEQ ID NO: 108981 - DNA, 25 bp, Probe sequence
aaaacggatagaatcatttgccaaa

SEQ ID NO: 108982 - DNA, 25 bp, Probe sequence
aacttaatcaatttatgtggaggaa

SEQ ID NO: 108983 - DNA, 25 bp, Probe sequence
cttacctcctataaatacctatgag

SEQ ID NO: 108984 - DNA, 25 bp, Probe sequence
cggatagaatcatttgccaaatacc

SEQ ID NO: 108985 - DNA, 25 bp, Probe sequence
cctataggggtatttgacaattttg

SEQ ID NO: 108986 - DNA, 25 bp, Probe sequence
gaatcatttgccaaatacctatagg

SEQ ID NO: 108987 - DNA, 25 bp, Probe sequence
gatagaatcatttgccaaataccta

SEQ ID NO: 108988 - DNA, 25 bp, Probe sequence
tgacaattttgttttaatttattat

SEQ ID NO: 108989 - DNA, 25 bp, Probe sequence
tcatttgccaaatacctataggggt

SEQ ID NO: 108990 - DNA, 25 bp, Probe sequence
tataggggtatttgacaattttgtt

SEQ ID NO: 108991 - DNA, 25 bp, Probe sequence
tattaacttaatcaatttatgtgga

SEQ ID NO: 108992 - DNA, 25 bp, Probe sequence
aggtgtgatgtcttatcaagagtaa

SEQ ID NO: 108993 - DNA, 25 bp, Probe sequence
aatctcttttattctctgagttatt

SEQ ID NO: 108994 - DNA, 25 bp, Probe sequence
cactaatctcttttattctctgagt

SEQ ID NO: 108995 - DNA, 25 bp, Probe sequence
ctaatctcttttattctctgagtta

SEQ ID NO: 108996 - DNA, 25 bp, Probe sequence
ctctgagttattttgatatctcctg

SEQ ID NO: 108997 - DNA, 25 bp, Probe sequence
ctgagttattttgatatctcctgga

SEQ ID NO: 108998 - DNA, 25 bp, Probe sequence
cctggagaaggtgtgatgtcttatc

SEQ ID NO: 108999 - DNA, 25 bp, Probe sequence
gaaggtgtgatgtcttatcaagagt

SEQ ID NO: 109000 - DNA, 25 bp, Probe sequence
gagttattttgatatctcctggaga

SEQ ID NO: 109001 - DNA, 25 bp, Probe sequence
gttattttgatatctcctggagaag

SEQ ID NO: 109002 - DNA, 25 bp, Probe sequence
ggagaaggtgtgatgtcttatcaag

SEQ ID NO: 109003 - DNA, 25 bp, Probe sequence
tctcttttattctctgagttatttt

SEQ ID NO: 109004 - DNA, 25 bp, Probe sequence
tatctcctggagaaggtgtgatgtc

SEQ ID NO: 109005 - DNA, 25 bp, Probe sequence
ttattctctgagttattttgatatc

SEQ ID NO: 109006 - DNA, 25 bp, Probe sequence
ttcactaatctcttttattctctga

SEQ ID NO: 109007 - DNA, 25 bp, Probe sequence
attgatactcaatttacttacccta

SEQ ID NO: 109008 - DNA, 25 bp, Probe sequence
attactgttcaataaagctgaccgt

SEQ ID NO: 109009 - DNA, 25 bp, Probe sequence
atcctttcacaatttgtctacagat

SEQ ID NO: 109010 - DNA, 25 bp, Probe sequence
aatttacttaccctagattggacat

SEQ ID NO: 109011 - DNA, 25 bp, Probe sequence
cttaccctagattggacatatactt

SEQ ID NO: 109012 - DNA, 25 bp, Probe sequence
gcgtttaagtacatcctttcacaat

SEQ ID NO: 109013 - DNA, 25 bp, Probe sequence
gaccgttagcgtttaagtacatcct

SEQ ID NO: 109014 - DNA, 25 bp, Probe sequence
gatactcaatttacttaccctagat

SEQ ID NO: 109015 - DNA, 25 bp, Probe sequence
gatttcacctcgttgattatgttca

SEQ ID NO: 109016 - DNA, 25 bp, Probe sequence
gttagcgtttaagtacatcctttca

SEQ ID NO: 109017 - DNA, 25 bp, Probe sequence
gtacatcctttcacaatttgtctac

SEQ ID NO: 109018 - DNA, 25 bp, Probe sequence
ggacatatacttaaattactgttca

SEQ ID NO: 109019 - DNA, 25 bp, Probe sequence
tcacctcgttgattatgttcatata

SEQ ID NO: 109020 - DNA, 25 bp, Probe sequence
taaagctgaccgttagcgtttaagt

SEQ ID NO: 109021 - DNA, 25 bp, Probe sequence
ttcacaatttgtctacagattaata

SEQ ID NO: 109022 - DNA, 25 bp, Probe sequence
attgtgcttgcacaatccttctgct

SEQ ID NO: 109023 - DNA, 25 bp, Probe sequence
atcattgcctcctagatagtgttat

SEQ ID NO: 109024 - DNA, 25 bp, Probe sequence
aaccgcttcaaaccttggtatgaca

SEQ ID NO: 109025 - DNA, 25 bp, Probe sequence
caaatcccaatcatttcccgataaa

SEQ ID NO: 109026 - DNA, 25 bp, Probe sequence
gcttcttcgaatctgcaaatcccaa

SEQ ID NO: 109027 - DNA, 25 bp, Probe sequence
gaaattccgcctattttgacgaaca

SEQ ID NO: 109028 - DNA, 25 bp, Probe sequence
tgacaaggaaatcccgaaattccgc

SEQ ID NO: 109029 - DNA, 25 bp, Probe sequence
gacgaacaatcaactcattctttat

SEQ ID NO: 109030 - DNA, 25 bp, Probe sequence
gtgggatgttctttagcaatttcaa

SEQ ID NO: 109031 - DNA, 25 bp, Probe sequence
gggctctgctttcttatatattatt

SEQ ID NO: 109032 - DNA, 25 bp, Probe sequence
gggattttgggattgtgcttgcaca

SEQ ID NO: 109033 - DNA, 25 bp, Probe sequence
tccttctgcttcttcgaatctgcaa

SEQ ID NO: 109034 - DNA, 25 bp, Probe sequence
tacgcatcccggtgagaatgagaga

SEQ ID NO: 109035 - DNA, 25 bp, Probe sequence
tttgtcatttattacgcatcccggt

SEQ ID NO: 109036 - DNA, 25 bp, Probe sequence
ttgatgttagggtggggctctgctt

SEQ ID NO: 109037 - DNA, 25 bp, Probe sequence
attaagatggatttttgttgacaaa

SEQ ID NO: 109038 - DNA, 25 bp, Probe sequence
atatgttagaaattccgtactaaat

SEQ ID NO: 109039 - DNA, 25 bp, Probe sequence
atatgcgcacaattaactttcttaa

SEQ ID NO: 109040 - DNA, 25 bp, Probe sequence
atgcgcacaattaactttcttaagt

SEQ ID NO: 109041 - DNA, 25 bp, Probe sequence
acgctgatttaacagcgctttaaat

SEQ ID NO: 109042 - DNA, 25 bp, Probe sequence
aaatatgcgcacaattaactttctt

SEQ ID NO: 109043 - DNA, 25 bp, Probe sequence
aaaacgctgatttaacagcgcttta

SEQ ID NO: 109044 - DNA, 25 bp, Probe sequence
aacttcctcctactaatgaactaag

SEQ ID NO: 109045 - DNA, 25 bp, Probe sequence
ctttcttaagttcattttagccaag

SEQ ID NO: 109046 - DNA, 25 bp, Probe sequence
gaagttatcatttgaaagcttgtaa

SEQ ID NO: 109047 - DNA, 25 bp, Probe sequence
gaaattccgtactaaattaagatgg

SEQ ID NO: 109048 - DNA, 25 bp, Probe sequence
gataggaaaattaaatatgcgcaca

SEQ ID NO: 109049 - DNA, 25 bp, Probe sequence
tcattttagccaagaagttatcatt

SEQ ID NO: 109050 - DNA, 25 bp, Probe sequence
ttaacttcctcctactaatgaacta

SEQ ID NO: 109051 - DNA, 25 bp, Probe sequence
ttcctcctactaatgaactaagata

SEQ ID NO: 109052 - DNA, 25 bp, Probe sequence
atatttaatccatagttggctgcta

SEQ ID NO: 109053 - DNA, 25 bp, Probe sequence
atatcttataaacctaataccatga

SEQ ID NO: 109054 - DNA, 25 bp, Probe sequence
ataaacctaataccatgaagaataa

SEQ ID NO: 109055 - DNA, 25 bp, Probe sequence
ataacactatatattatatcttata

SEQ ID NO: 109056 - DNA, 25 bp, Probe sequence
atcatcgataggcactgaaccccta

SEQ ID NO: 109057 - DNA, 25 bp, Probe sequence
agttggctgctatggttagtgtact

SEQ ID NO: 109058 - DNA, 25 bp, Probe sequence
catcgataggcactgaacccctaaa

SEQ ID NO: 109059 - DNA, 25 bp, Probe sequence
cgataggcactgaacccctaaaacg

SEQ ID NO: 109060 - DNA, 25 bp, Probe sequence
ctatcatcgataggcactgaacccc

SEQ ID NO: 109061 - DNA, 25 bp, Probe sequence
gctatggttagtgtactagtctagt

SEQ ID NO: 109062 - DNA, 25 bp, Probe sequence
gattcaaattttatatttaatccat

SEQ ID NO: 109063 - DNA, 25 bp, Probe sequence
gtatataaaacagtactcaattttt

SEQ ID NO: 109064 - DNA, 25 bp, Probe sequence
ggctgctatggttagtgtactagtc

SEQ ID NO: 109065 - DNA, 25 bp, Probe sequence
taaaaaagaacacctatcatcgata

SEQ ID NO: 109066 - DNA, 25 bp, Probe sequence
tagtgtactagtctagttttactag

SEQ ID NO: 109067 - DNA, 25 bp, Probe sequence
atatcggttgttaatacttctatgg

SEQ ID NO: 109068 - DNA, 25 bp, Probe sequence
atacttctatgggacaattcgcttt

SEQ ID NO: 109069 - DNA, 25 bp, Probe sequence
atcggttgttaatacttctatggga

SEQ ID NO: 109070 - DNA, 25 bp, Probe sequence
acttctatgggacaattcgctttaa

SEQ ID NO: 109071 - DNA, 25 bp, Probe sequence
aatacttctatgggacaattcgctt

SEQ ID NO: 109072 - DNA, 25 bp, Probe sequence
aatatcggttgttaatacttctatg

SEQ ID NO: 109073 - DNA, 25 bp, Probe sequence
cttctatgggacaattcgctttaaa

SEQ ID NO: 109074 - DNA, 25 bp, Probe sequence
gttaatacttctatgggacaattcg

SEQ ID NO: 109075 - DNA, 25 bp, Probe sequence
gtaatatcggttgttaatacttcta

SEQ ID NO: 109076 - DNA, 25 bp, Probe sequence
ggttgttaatacttctatgggacaa

SEQ ID NO: 109077 - DNA, 25 bp, Probe sequence
tggtaaataagtaatatcggttgtt

SEQ ID NO: 109078 - DNA, 25 bp, Probe sequence
tcggttgttaatacttctatgggac

SEQ ID NO: 109079 - DNA, 25 bp, Probe sequence
taatacttctatgggacaattcgct

SEQ ID NO: 109080 - DNA, 25 bp, Probe sequence
tacttctatgggacaattcgcttta

SEQ ID NO: 109081 - DNA, 25 bp, Probe sequence
tatcggttgttaatacttctatggg

SEQ ID NO: 109082 - DNA, 25 bp, Probe sequence
acctccgtatgattcattttaatat

SEQ ID NO: 109083 - DNA, 25 bp, Probe sequence
actaattggggtcagtctactatat

SEQ ID NO: 109084 - DNA, 25 bp, Probe sequence
acacctccgtatgattcattttaat

SEQ ID NO: 109085 - DNA, 25 bp, Probe sequence
aaaaacacctccgtatgattcattt

SEQ ID NO: 109086 - DNA, 25 bp, Probe sequence
aaacacctccgtatgattcatttta

SEQ ID NO: 109087 - DNA, 25 bp, Probe sequence
aattcccactaattggggtcagtct

SEQ ID NO: 109088 - DNA, 25 bp, Probe sequence
aattggggtcagtctactatatgat

SEQ ID NO: 109089 - DNA, 25 bp, Probe sequence
cccactaattggggtcagtctacta

SEQ ID NO: 109090 - DNA, 25 bp, Probe sequence
gctataatgatatttgcttactaag

SEQ ID NO: 109091 - DNA, 25 bp, Probe sequence
gaaaaaacacctccgtatgattcat

SEQ ID NO: 109092 - DNA, 25 bp, Probe sequence
gtcagtctactatatgatacggttt

SEQ ID NO: 109093 - DNA, 25 bp, Probe sequence
gtctactatatgatacggtttttta

SEQ ID NO: 109094 - DNA, 25 bp, Probe sequence
gtgtttttatataattcccactaat

SEQ ID NO: 109095 - DNA, 25 bp, Probe sequence
ggggtcagtctactatatgatacgg

SEQ ID NO: 109096 - DNA, 25 bp, Probe sequence
tactatatgatacggttttttaatt

SEQ ID NO: 109097 - DNA, 25 bp, Probe sequence
atatcctctttagtagcaattttct

SEQ ID NO: 109098 - DNA, 25 bp, Probe sequence
atggttttccatatcctctttagta

SEQ ID NO: 109099 - DNA, 25 bp, Probe sequence
acaggttagactattaatttatact

SEQ ID NO: 109100 - DNA, 25 bp, Probe sequence
aaaacgatggttttccatatcctct

SEQ ID NO: 109101 - DNA, 25 bp, Probe sequence
aacgatggttttccatatcctcttt

SEQ ID NO: 109102 - DNA, 25 bp, Probe sequence
cgatggttttccatatcctctttag

SEQ ID NO: 109103 - DNA, 25 bp, Probe sequence
ccatatcctctttagtagcaatttt

SEQ ID NO: 109104 - DNA, 25 bp, Probe sequence
gactattaatttatactaacctgtt

SEQ ID NO: 109105 - DNA, 25 bp, Probe sequence
gatttcaatcaattaattaaaacag

SEQ ID NO: 109106 - DNA, 25 bp, Probe sequence
gttttccatatcctctttagtagca

SEQ ID NO: 109107 - DNA, 25 bp, Probe sequence
gtagcaattttctaacaatatataa

SEQ ID NO: 109108 - DNA, 25 bp, Probe sequence
ggttttccatatcctctttagtagc

SEQ ID NO: 109109 - DNA, 25 bp, Probe sequence
tcctctttagtagcaattttctaac

SEQ ID NO: 109110 - DNA, 25 bp, Probe sequence
ttttccatatcctctttagtagcaa

SEQ ID NO: 109111 - DNA, 25 bp, Probe sequence
ttccatatcctctttagtagcaatt

SEQ ID NO: 109112 - DNA, 25 bp, Probe sequence
atatcccagcggttgagacgactca

SEQ ID NO: 109113 - DNA, 25 bp, Probe sequence
atgttcaacgacttacaaatgcgta

SEQ ID NO: 109114 - DNA, 25 bp, Probe sequence
agacgactcactgctgggattttat

SEQ ID NO: 109115 - DNA, 25 bp, Probe sequence
aactgcgaatcatatgttcaacgac

SEQ ID NO: 109116 - DNA, 25 bp, Probe sequence
aatgtatctattcaaacttttcttt

SEQ ID NO: 109117 - DNA, 25 bp, Probe sequence
ctccaatatggagttgtcgtcttgt

SEQ ID NO: 109118 - DNA, 25 bp, Probe sequence
gaagtattaggtgtacatgctttca

SEQ ID NO: 109119 - DNA, 25 bp, Probe sequence
gacaagaagtcatcaaggttatcaa

SEQ ID NO: 109120 - DNA, 25 bp, Probe sequence
gagcttgctaagaaaattgcaccga

SEQ ID NO: 109121 - DNA, 25 bp, Probe sequence
gagttgtcgtcttgttttatattaa

SEQ ID NO: 109122 - DNA, 25 bp, Probe sequence
gttacaggtgttaagttgctccaat

SEQ ID NO: 109123 - DNA, 25 bp, Probe sequence
gtacatgctttcagaattgcttttg

SEQ ID NO: 109124 - DNA, 25 bp, Probe sequence
ggaagtatacgattttaactgcgaa

SEQ ID NO: 109125 - DNA, 25 bp, Probe sequence
tgcgtaaatcgataacacattcaaa

SEQ ID NO: 109126 - DNA, 25 bp, Probe sequence
tttctttagggtttacttgctgaat

SEQ ID NO: 109127 - DNA, 25 bp, Probe sequence
agcgcaatgattacactattagctg

SEQ ID NO: 109128 - DNA, 25 bp, Probe sequence
acttcgattagataactcttgttaa

SEQ ID NO: 109129 - DNA, 25 bp, Probe sequence
acactattagctgtcgttgtcatcg

SEQ ID NO: 109130 - DNA, 25 bp, Probe sequence
aaggagggagcgcaatgattacact

SEQ ID NO: 109131 - DNA, 25 bp, Probe sequence
aatacttcgattagataactcttgt

SEQ ID NO: 109132 - DNA, 25 bp, Probe sequence
ctttctgttttgttaatcatcttta

SEQ ID NO: 109133 - DNA, 25 bp, Probe sequence
ctgttttgttaatcatctttatagt

SEQ ID NO: 109134 - DNA, 25 bp, Probe sequence
gaaagtaaggagggagcgcaatgat

SEQ ID NO: 109135 - DNA, 25 bp, Probe sequence
gagggagcgcaatgattacactatt

SEQ ID NO: 109136 - DNA, 25 bp, Probe sequence
gataactcttgttaagattttgatg

SEQ ID NO: 109137 - DNA, 25 bp, Probe sequence
gattacactattagctgtcgttgtc

SEQ ID NO: 109138 - DNA, 25 bp, Probe sequence
ggagcgcaatgattacactattagc

SEQ ID NO: 109139 - DNA, 25 bp, Probe sequence
tcatctttatagtttctttataact

SEQ ID NO: 109140 - DNA, 25 bp, Probe sequence
tttccttaaatgttaatacttcgat

SEQ ID NO: 109141 - DNA, 25 bp, Probe sequence
ttatctttctgttttgttaatcatc

SEQ ID NO: 109142 - DNA, 25 bp, Probe sequence
aggcaaagcttcatttcccttaaat

SEQ ID NO: 109143 - DNA, 25 bp, Probe sequence
acgccaactacagtgataacttcgc

SEQ ID NO: 109144 - DNA, 25 bp, Probe sequence
acatccatgtggttcattagcatta

SEQ ID NO: 109145 - DNA, 25 bp, Probe sequence
aaacatgacaacttcacgcaaaaca

SEQ ID NO: 109146 - DNA, 25 bp, Probe sequence
gcttcatttcccttaaatcaagtat

SEQ ID NO: 109147 - DNA, 25 bp, Probe sequence
gaattctctattcacgaaattactt

SEQ ID NO: 109148 - DNA, 25 bp, Probe sequence
gaaatcgtgacgccaactacagtga

SEQ ID NO: 109149 - DNA, 25 bp, Probe sequence
gagattttcaacacactattatagc

SEQ ID NO: 109150 - DNA, 25 bp, Probe sequence
gagtgaggtgagacatccatgtggt

SEQ ID NO: 109151 - DNA, 25 bp, Probe sequence
gtacagtcatcttgagattttcaac

SEQ ID NO: 109152 - DNA, 25 bp, Probe sequence
gtaacttggcttaatctctttttga

SEQ ID NO: 109153 - DNA, 25 bp, Probe sequence
gtaatcattggtttcatcatatcga

SEQ ID NO: 109154 - DNA, 25 bp, Probe sequence
tgacttatttttcatcatttacgat

SEQ ID NO: 109155 - DNA, 25 bp, Probe sequence
tcattctcgataacttactatttgt

SEQ ID NO: 109156 - DNA, 25 bp, Probe sequence
tcatttacgatacatcattctcgat

SEQ ID NO: 109157 - DNA, 25 bp, Probe sequence
attacttagatgtagttgttcgtat

SEQ ID NO: 109158 - DNA, 25 bp, Probe sequence
atttgtcttattacttagatgtagt

SEQ ID NO: 109159 - DNA, 25 bp, Probe sequence
atcatcgtgaccatttgtcttatta

SEQ ID NO: 109160 - DNA, 25 bp, Probe sequence
atcgtgaccatttgtcttattactt

SEQ ID NO: 109161 - DNA, 25 bp, Probe sequence
aaatcatcgtgaccatttgtcttat

SEQ ID NO: 109162 - DNA, 25 bp, Probe sequence
aaaatcatcgtgaccatttgtctta

SEQ ID NO: 109163 - DNA, 25 bp, Probe sequence
aatcatcgtgaccatttgtcttatt

SEQ ID NO: 109164 - DNA, 25 bp, Probe sequence
catcgtgaccatttgtcttattact

SEQ ID NO: 109165 - DNA, 25 bp, Probe sequence
cttggtctttgaaaaatcatcgtga

SEQ ID NO: 109166 - DNA, 25 bp, Probe sequence
ccatttgtcttattacttagatgta

SEQ ID NO: 109167 - DNA, 25 bp, Probe sequence
gaaaaatcatcgtgaccatttgtct

SEQ ID NO: 109168 - DNA, 25 bp, Probe sequence
gaccatttgtcttattacttagatg

SEQ ID NO: 109169 - DNA, 25 bp, Probe sequence
gtgaccatttgtcttattacttaga

SEQ ID NO: 109170 - DNA, 25 bp, Probe sequence
tcgtgaccatttgtcttattactta

SEQ ID NO: 109171 - DNA, 25 bp, Probe sequence
tcatcgtgaccatttgtcttattac

SEQ ID NO: 109172 - DNA, 25 bp, Probe sequence
agctgatttctatgaagagaggtta

SEQ ID NO: 109173 - DNA, 25 bp, Probe sequence
acgtacgttcttatttagctgattt

SEQ ID NO: 109174 - DNA, 25 bp, Probe sequence
aacgtacgttcttatttagctgatt

SEQ ID NO: 109175 - DNA, 25 bp, Probe sequence
cttatttagctgatttctatgaaga

SEQ ID NO: 109176 - DNA, 25 bp, Probe sequence
cgtacgttcttatttagctgatttc

SEQ ID NO: 109177 - DNA, 25 bp, Probe sequence
gaacgtacgttcttatttagctgat

SEQ ID NO: 109178 - DNA, 25 bp, Probe sequence
gatttctatgaagagaggttatgga

SEQ ID NO: 109179 - DNA, 25 bp, Probe sequence
gttcttatttagctgatttctatga

SEQ ID NO: 109180 - DNA, 25 bp, Probe sequence
gggaacgtacgttcttatttagctg

SEQ ID NO: 109181 - DNA, 25 bp, Probe sequence
ggaacgtacgttcttatttagctga

SEQ ID NO: 109182 - DNA, 25 bp, Probe sequence
taagctaaagtagttattatcataa

SEQ ID NO: 109183 - DNA, 25 bp, Probe sequence
tatttagctgatttctatgaagaga

SEQ ID NO: 109184 - DNA, 25 bp, Probe sequence
ttatcataaagggaacgtacgttct

SEQ ID NO: 109185 - DNA, 25 bp, Probe sequence
ttagctgatttctatgaagagaggt

SEQ ID NO: 109186 - DNA, 25 bp, Probe sequence
ttcttatttagctgatttctatgaa

SEQ ID NO: 109187 - DNA, 25 bp, Probe sequence
atcattaactgatacgcagaggcgt

SEQ ID NO: 109188 - DNA, 25 bp, Probe sequence
acttaagtagtagctaacagttgaa

SEQ ID NO: 109189 - DNA, 25 bp, Probe sequence
acagtcattgacgtagctaagtaat

SEQ ID NO: 109190 - DNA, 25 bp, Probe sequence
aaaacctcatcattaactgatacgc

SEQ ID NO: 109191 - DNA, 25 bp, Probe sequence
aatccacgttcattcaatatataag

SEQ ID NO: 109192 - DNA, 25 bp, Probe sequence
gcagaggcgtatcataagtaaaact

SEQ ID NO: 109193 - DNA, 25 bp, Probe sequence
gacattaaatccacgttcattcaat

SEQ ID NO: 109194 - DNA, 25 bp, Probe sequence
gataattgcgcatataacttaagta

SEQ ID NO: 109195 - DNA, 25 bp, Probe sequence
gatatatcacgataattgcgcatat

SEQ ID NO: 109196 - DNA, 25 bp, Probe sequence
gttatttcataatcaacagtcattg

SEQ ID NO: 109197 - DNA, 25 bp, Probe sequence
ggccctatcaaattggtttatatct

SEQ ID NO: 109198 - DNA, 25 bp, Probe sequence
tggagggtgttaaatggtggacatt

SEQ ID NO: 109199 - DNA, 25 bp, Probe sequence
tgcttctttttgtccttattaaatt

SEQ ID NO: 109200 - DNA, 25 bp, Probe sequence
taacagttgaaattaggccctatca

SEQ ID NO: 109201 - DNA, 25 bp, Probe sequence
tagaatgcttctttttgtccttatt

SEQ ID NO: 109202 - DNA, 25 bp, Probe sequence
atcaagaaagatgtagttttttaat

SEQ ID NO: 109203 - DNA, 25 bp, Probe sequence
actgacaatttgcgagactcataaa

SEQ ID NO: 109204 - DNA, 25 bp, Probe sequence
acaatttgcgagactcataaaatgt

SEQ ID NO: 109205 - DNA, 25 bp, Probe sequence
aaactgacaatttgcgagactcata

SEQ ID NO: 109206 - DNA, 25 bp, Probe sequence
aaaaactgacaatttgcgagactca

SEQ ID NO: 109207 - DNA, 25 bp, Probe sequence
aaaactgacaatttgcgagactcat

SEQ ID NO: 109208 - DNA, 25 bp, Probe sequence
aactgacaatttgcgagactcataa

SEQ ID NO: 109209 - DNA, 25 bp, Probe sequence
aatttgcgagactcataaaatgtaa

SEQ ID NO: 109210 - DNA, 25 bp, Probe sequence
ctgacaatttgcgagactcataaaa

SEQ ID NO: 109211 - DNA, 25 bp, Probe sequence
gcgagactcataaaatgtaataatg

SEQ ID NO: 109212 - DNA, 25 bp, Probe sequence
gacaatttgcgagactcataaaatg

SEQ ID NO: 109213 - DNA, 25 bp, Probe sequence
gatttgaaagagtatcaatcaagaa

SEQ ID NO: 109214 - DNA, 25 bp, Probe sequence
tgacaatttgcgagactcataaaat

SEQ ID NO: 109215 - DNA, 25 bp, Probe sequence
taaggggtgtaatatgaagattaat

SEQ ID NO: 109216 - DNA, 25 bp, Probe sequence
tttgcgagactcataaaatgtaata

SEQ ID NO: 109217 - DNA, 25 bp, Probe sequence
atcaccctagttcatacctaaaaga

SEQ ID NO: 109218 - DNA, 25 bp, Probe sequence
caccctagttcatacctaaaagact

SEQ ID NO: 109219 - DNA, 25 bp, Probe sequence
aatcaccctagttcatacctaaaag

SEQ ID NO: 109220 - DNA, 25 bp, Probe sequence
catacctaaaagactttcacacaaa

SEQ ID NO: 109221 - DNA, 25 bp, Probe sequence
gactttcacacaaacaaacaaagga

SEQ ID NO: 109222 - DNA, 25 bp, Probe sequence
gttcatacctaaaagactttcacac

SEQ ID NO: 109223 - DNA, 25 bp, Probe sequence
tcaccctagttcatacctaaaagac

SEQ ID NO: 109224 - DNA, 25 bp, Probe sequence
taaaagactttcacacaaacaaaca

SEQ ID NO: 109225 - DNA, 25 bp, Probe sequence
taaatcaccctagttcatacctaaa

SEQ ID NO: 109226 - DNA, 25 bp, Probe sequence
tagttcatacctaaaagactttcac

SEQ ID NO: 109227 - DNA, 25 bp, Probe sequence
tattttaaatcaccctagttcatac

SEQ ID NO: 109228 - DNA, 25 bp, Probe sequence
tttattttaaatcaccctagttcat

SEQ ID NO: 109229 - DNA, 25 bp, Probe sequence
tttaaatcaccctagttcataccta

SEQ ID NO: 109230 - DNA, 25 bp, Probe sequence
ttttaaatcaccctagttcatacct

SEQ ID NO: 109231 - DNA, 25 bp, Probe sequence
ttaaatcaccctagttcatacctaa

SEQ ID NO: 109232 - DNA, 25 bp, Probe sequence
attgctgtctgagttataagtatta

SEQ ID NO: 109233 - DNA, 25 bp, Probe sequence
aatccgaactgcatacatatttgtt

SEQ ID NO: 109234 - DNA, 25 bp, Probe sequence
aatcatataaatccgaactgcatac

SEQ ID NO: 109235 - DNA, 25 bp, Probe sequence
gctgtctgagttataagtattagtt

SEQ ID NO: 109236 - DNA, 25 bp, Probe sequence
gaactgcatacatatttgttgaaat

SEQ ID NO: 109237 - DNA, 25 bp, Probe sequence
gaaattgctgtctgagttataagta

SEQ ID NO: 109238 - DNA, 25 bp, Probe sequence
gggaaattgctgtctgagttataag

SEQ ID NO: 109239 - DNA, 25 bp, Probe sequence
ggtattatttttcgggaaattgctg

SEQ ID NO: 109240 - DNA, 25 bp, Probe sequence
tccgaactgcatacatatttgttga

SEQ ID NO: 109241 - DNA, 25 bp, Probe sequence
tcgggaaattgctgtctgagttata

SEQ ID NO: 109242 - DNA, 25 bp, Probe sequence
tcatataaatccgaactgcatacat

SEQ ID NO: 109243 - DNA, 25 bp, Probe sequence
tataaatccgaactgcatacatatt

SEQ ID NO: 109244 - DNA, 25 bp, Probe sequence
tttcgggaaattgctgtctgagtta

SEQ ID NO: 109245 - DNA, 25 bp, Probe sequence
tttttcgggaaattgctgtctgagt

SEQ ID NO: 109246 - DNA, 25 bp, Probe sequence
ttttcgggaaattgctgtctgagtt

SEQ ID NO: 109247 - DNA, 25 bp, Probe sequence
atttgacaagttccattcaaccgtt

SEQ ID NO: 109248 - DNA, 25 bp, Probe sequence
atgtgtcaaatacccctagaggtat

SEQ ID NO: 109249 - DNA, 25 bp, Probe sequence
agtcatacctccacttttaattgaa

SEQ ID NO: 109250 - DNA, 25 bp, Probe sequence
agaggtatttgacaagttccattca

SEQ ID NO: 109251 - DNA, 25 bp, Probe sequence
acacaaatgtgtcaaatacccctag

SEQ ID NO: 109252 - DNA, 25 bp, Probe sequence
acaaatgtgtcaaatacccctagag

SEQ ID NO: 109253 - DNA, 25 bp, Probe sequence
aaatgtgtcaaatacccctagaggt

SEQ ID NO: 109254 - DNA, 25 bp, Probe sequence
caagttccattcaaccgtttagaat

SEQ ID NO: 109255 - DNA, 25 bp, Probe sequence
catacctccacttttaattgaataa

SEQ ID NO: 109256 - DNA, 25 bp, Probe sequence
ccctagaggtatttgacaagttcca

SEQ ID NO: 109257 - DNA, 25 bp, Probe sequence
gacaagttccattcaaccgtttaga

SEQ ID NO: 109258 - DNA, 25 bp, Probe sequence
gtcatacctccacttttaattgaat

SEQ ID NO: 109259 - DNA, 25 bp, Probe sequence
ggtatttgacaagttccattcaacc

SEQ ID NO: 109260 - DNA, 25 bp, Probe sequence
tgacaagttccattcaaccgtttag

SEQ ID NO: 109261 - DNA, 25 bp, Probe sequence
tcaaccgtttagaatacccctacag

SEQ ID NO: 109262 - DNA, 25 bp, Probe sequence
attgaaaatcatctcactgctgttt

SEQ ID NO: 109263 - DNA, 25 bp, Probe sequence
atatgtcgtgaatttttagctctaa

SEQ ID NO: 109264 - DNA, 25 bp, Probe sequence
atgatcacgatgaagtcattcaata

SEQ ID NO: 109265 - DNA, 25 bp, Probe sequence
aaggtttatacctcatcctctaaat

SEQ ID NO: 109266 - DNA, 25 bp, Probe sequence
aatgacgtgtcagtgttgtgtttat

SEQ ID NO: 109267 - DNA, 25 bp, Probe sequence
gacgtgtcagtgttgtgtttatatg

SEQ ID NO: 109268 - DNA, 25 bp, Probe sequence
gttactgttttaaatgatcacgatg

SEQ ID NO: 109269 - DNA, 25 bp, Probe sequence
gtttatacctcatcctctaaattat

SEQ ID NO: 109270 - DNA, 25 bp, Probe sequence
gtcagtgttgtgtttatatgtcgtg

SEQ ID NO: 109271 - DNA, 25 bp, Probe sequence
gtgttgtgtttatatgtcgtgaatt

SEQ ID NO: 109272 - DNA, 25 bp, Probe sequence
ggtttatacctcatcctctaaatta

SEQ ID NO: 109273 - DNA, 25 bp, Probe sequence
tgtcgtgaatttttagctctaaata

SEQ ID NO: 109274 - DNA, 25 bp, Probe sequence
tcactgctgttttttaaaggtttat

SEQ ID NO: 109275 - DNA, 25 bp, Probe sequence
taaaggtttatacctcatcctctaa

SEQ ID NO: 109276 - DNA, 25 bp, Probe sequence
ttaagtatttaaatgacgtgtcagt

SEQ ID NO: 109277 - DNA, 25 bp, Probe sequence
atgtacctccaatagtaatttcaat

SEQ ID NO: 109278 - DNA, 25 bp, Probe sequence
aggcatcatcgggagttatcctatc

SEQ ID NO: 109279 - DNA, 25 bp, Probe sequence
aacgatatcctgatgtatttttaat

SEQ ID NO: 109280 - DNA, 25 bp, Probe sequence
aataactttgtctgttgaacactaa

SEQ ID NO: 109281 - DNA, 25 bp, Probe sequence
gaacactaagagcaattttaatttc

SEQ ID NO: 109282 - DNA, 25 bp, Probe sequence
gaaaaccaagataatacctaagtag

SEQ ID NO: 109283 - DNA, 25 bp, Probe sequence
gaaagtgttcaatccgtgttaaatt

SEQ ID NO: 109284 - DNA, 25 bp, Probe sequence
gatagcttggtatgtacctccaata

SEQ ID NO: 109285 - DNA, 25 bp, Probe sequence
gtgttgtaaacattttttttgattg

SEQ ID NO: 109286 - DNA, 25 bp, Probe sequence
gggagttatcctatcaggaaaacca

SEQ ID NO: 109287 - DNA, 25 bp, Probe sequence
gggaaatatcatccataaactttat

SEQ ID NO: 109288 - DNA, 25 bp, Probe sequence
tctgagttaaacgatatcctgatgt

SEQ ID NO: 109289 - DNA, 25 bp, Probe sequence
tatttttaattttgcaccatttcca

SEQ ID NO: 109290 - DNA, 25 bp, Probe sequence
tttgcaccatttccaaaaggataag

SEQ ID NO: 109291 - DNA, 25 bp, Probe sequence
ttgattggagtttttttctgagtta

SEQ ID NO: 109292 - DNA, 25 bp, Probe sequence
atgttgtggtaagttgatcaataca

SEQ ID NO: 109293 - DNA, 25 bp, Probe sequence
accctctttataattagtatctcga

SEQ ID NO: 109294 - DNA, 25 bp, Probe sequence
aatatatttataccctctttataat

SEQ ID NO: 109295 - DNA, 25 bp, Probe sequence
cattattaatgatacactacttatg

SEQ ID NO: 109296 - DNA, 25 bp, Probe sequence
ctttggctacttttacagtaaagcg

SEQ ID NO: 109297 - DNA, 25 bp, Probe sequence
gaattttctttggctacttttacag

SEQ ID NO: 109298 - DNA, 25 bp, Probe sequence
gaaagggaagtctaagagtagtcta

SEQ ID NO: 109299 - DNA, 25 bp, Probe sequence
gatacactacttatgaatatgattc

SEQ ID NO: 109300 - DNA, 25 bp, Probe sequence
gattcagaattttctttggctactt

SEQ ID NO: 109301 - DNA, 25 bp, Probe sequence
gttgcaaccatttgaaagggaagtc

SEQ ID NO: 109302 - DNA, 25 bp, Probe sequence
ggaatttcaatagttgcaaccattt

SEQ ID NO: 109303 - DNA, 25 bp, Probe sequence
taaagcgattttttagttatcttat

SEQ ID NO: 109304 - DNA, 25 bp, Probe sequence
tagtatctcgattttttatgcatga

SEQ ID NO: 109305 - DNA, 25 bp, Probe sequence
ttatgcatgatgatattaccacaaa

SEQ ID NO: 109306 - DNA, 25 bp, Probe sequence
ttaccacaaaagcctaacttataca

SEQ ID NO: 109307 - DNA, 25 bp, Probe sequence
attgagtatctcgatttattgttat

SEQ ID NO: 109308 - DNA, 25 bp, Probe sequence
attgccatactcaactattttgaaa

SEQ ID NO: 109309 - DNA, 25 bp, Probe sequence
atacacaaacagtatttttgctatg

SEQ ID NO: 109310 - DNA, 25 bp, Probe sequence
ataaattgccatactcaactatttt

SEQ ID NO: 109311 - DNA, 25 bp, Probe sequence
atcaaattattgagtatctcgattt

SEQ ID NO: 109312 - DNA, 25 bp, Probe sequence
actttacaaaactagaatgattcaa

SEQ ID NO: 109313 - DNA, 25 bp, Probe sequence
aaattgccatactcaactattttga

SEQ ID NO: 109314 - DNA, 25 bp, Probe sequence
aacagtatttttgctatgatagagt

SEQ ID NO: 109315 - DNA, 25 bp, Probe sequence
ctcgatttattgttatacacaaaca

SEQ ID NO: 109316 - DNA, 25 bp, Probe sequence
gccatactcaactattttgaaaagt

SEQ ID NO: 109317 - DNA, 25 bp, Probe sequence
gaaaagtatcaatttcatattatca

SEQ ID NO: 109318 - DNA, 25 bp, Probe sequence
gagtatctcgatttattgttataca

SEQ ID NO: 109319 - DNA, 25 bp, Probe sequence
gtatttttgctatgatagagttaat

SEQ ID NO: 109320 - DNA, 25 bp, Probe sequence
tcataaattgccatactcaactatt

SEQ ID NO: 109321 - DNA, 25 bp, Probe sequence
tatctcgatttattgttatacacaa

SEQ ID NO: 109322 - DNA, 25 bp, Probe sequence
aagggagtgctcattcaggagtgct

SEQ ID NO: 109323 - DNA, 25 bp, Probe sequence
aatttttatagtcatttattggata

SEQ ID NO: 109324 - DNA, 25 bp, Probe sequence
caggagtgctcttttttgatgtcca

SEQ ID NO: 109325 - DNA, 25 bp, Probe sequence
cattcaggagtgctcttttttgatg

SEQ ID NO: 109326 - DNA, 25 bp, Probe sequence
gctcattcaggagtgctcttttttg

SEQ ID NO: 109327 - DNA, 25 bp, Probe sequence
gagtgctcattcaggagtgctcttt

SEQ ID NO: 109328 - DNA, 25 bp, Probe sequence
gatgtccaaatttagttgcaaatga

SEQ ID NO: 109329 - DNA, 25 bp, Probe sequence
gtgctcattcaggagtgctcttttt

SEQ ID NO: 109330 - DNA, 25 bp, Probe sequence
gtgctcttttttgatgtccaaattt

SEQ ID NO: 109331 - DNA, 25 bp, Probe sequence
gggagtgctcattcaggagtgctct

SEQ ID NO: 109332 - DNA, 25 bp, Probe sequence
ggtcatatcgattaattttattagt

SEQ ID NO: 109333 - DNA, 25 bp, Probe sequence
ggagtgctcttttttgatgtccaaa

SEQ ID NO: 109334 - DNA, 25 bp, Probe sequence
ggcatagaagaaatttttatagtca

SEQ ID NO: 109335 - DNA, 25 bp, Probe sequence
tagtgaggattttacaaacatttgt

SEQ ID NO: 109336 - DNA, 25 bp, Probe sequence
ttatggtcatatcgattaattttat

SEQ ID NO: 109337 - DNA, 25 bp, Probe sequence
atcatatgtcaataattcctataat

SEQ ID NO: 109338 - DNA, 25 bp, Probe sequence
atgtaaagcactatcctaagggtct

SEQ ID NO: 109339 - DNA, 25 bp, Probe sequence
agcactatcctaagggtctttaatc

SEQ ID NO: 109340 - DNA, 25 bp, Probe sequence
agctagctccttttttaacttatat

SEQ ID NO: 109341 - DNA, 25 bp, Probe sequence
actatcctaagggtctttaatcata

SEQ ID NO: 109342 - DNA, 25 bp, Probe sequence
aacttatatatgtaaagcactatcc

SEQ ID NO: 109343 - DNA, 25 bp, Probe sequence
gctggcgattataaagctagctcct

SEQ ID NO: 109344 - DNA, 25 bp, Probe sequence
gctagctccttttttaacttatata

SEQ ID NO: 109345 - DNA, 25 bp, Probe sequence
gataaggagctggcgattataaagc

SEQ ID NO: 109346 - DNA, 25 bp, Probe sequence
gtaaagcactatcctaagggtcttt

SEQ ID NO: 109347 - DNA, 25 bp, Probe sequence
gggtctttaatcatatgtcaataat

SEQ ID NO: 109348 - DNA, 25 bp, Probe sequence
ggcgattataaagctagctcctttt

SEQ ID NO: 109349 - DNA, 25 bp, Probe sequence
taattcctataattaatactcttaa

SEQ ID NO: 109350 - DNA, 25 bp, Probe sequence
taagggtctttaatcatatgtcaat

SEQ ID NO: 109351 - DNA, 25 bp, Probe sequence
tataaagctagctccttttttaact

SEQ ID NO: 109352 - DNA, 25 bp, Probe sequence
attctaattattttcactactcgtt

SEQ ID NO: 109353 - DNA, 25 bp, Probe sequence
agttagattctaattattttcacta

SEQ ID NO: 109354 - DNA, 25 bp, Probe sequence
agattctaattattttcactactcg

SEQ ID NO: 109355 - DNA, 25 bp, Probe sequence
acagattgtttgtgaaatttttgat

SEQ ID NO: 109356 - DNA, 25 bp, Probe sequence
aataatgatattaagacgagtatga

SEQ ID NO: 109357 - DNA, 25 bp, Probe sequence
gaacagattgtttgtgaaatttttg

SEQ ID NO: 109358 - DNA, 25 bp, Probe sequence
gacgagtatgaaaatagttagattc

SEQ ID NO: 109359 - DNA, 25 bp, Probe sequence
gattctaattattttcactactcgt

SEQ ID NO: 109360 - DNA, 25 bp, Probe sequence
gattgtttgtgaaatttttgataat

SEQ ID NO: 109361 - DNA, 25 bp, Probe sequence
gttagattctaattattttcactac

SEQ ID NO: 109362 - DNA, 25 bp, Probe sequence
gtttgtgaaatttttgataatatta

SEQ ID NO: 109363 - DNA, 25 bp, Probe sequence
tctaattattttcactactcgtttt

SEQ ID NO: 109364 - DNA, 25 bp, Probe sequence
tagattctaattattttcactactc

SEQ ID NO: 109365 - DNA, 25 bp, Probe sequence
ttagattctaattattttcactact

SEQ ID NO: 109366 - DNA, 25 bp, Probe sequence
ttctaattattttcactactcgttt

SEQ ID NO: 109367 - DNA, 25 bp, Probe sequence
ataaagagtatgaaatcgaacccgg

SEQ ID NO: 109368 - DNA, 25 bp, Probe sequence
atcgaacccggaaaaagagagtgat

SEQ ID NO: 109369 - DNA, 25 bp, Probe sequence
acgtgaccaataaagagtatgaaat

SEQ ID NO: 109370 - DNA, 25 bp, Probe sequence
taaagagtatgaaatcgaacccgga

SEQ ID NO: 109371 - DNA, 25 bp, Probe sequence
aataaagagtatgaaatcgaacccg

SEQ ID NO: 109372 - DNA, 25 bp, Probe sequence
caataaagagtatgaaatcgaaccc

SEQ ID NO: 109373 - DNA, 25 bp, Probe sequence
cgtgaccaataaagagtatgaaatc

SEQ ID NO: 109374 - DNA, 25 bp, Probe sequence
cgaacccggaaaaagagagtgatga

SEQ ID NO: 109375 - DNA, 25 bp, Probe sequence
gaacccggaaaaagagagtgatgaa

SEQ ID NO: 109376 - DNA, 25 bp, Probe sequence
gaccaataaagagtatgaaatcgaa

SEQ ID NO: 109377 - DNA, 25 bp, Probe sequence
gtgaccaataaagagtatgaaatcg

SEQ ID NO: 109378 - DNA, 25 bp, Probe sequence
tcgaacccggaaaaagagagtgatg

SEQ ID NO: 109379 - DNA, 25 bp, Probe sequence
tgaaatcgaacccggaaaaagagag

SEQ ID NO: 109380 - DNA, 25 bp, Probe sequence
tgaccaataaagagtatgaaatcga

SEQ ID NO: 109381 - DNA, 25 bp, Probe sequence
tatgaaatcgaacccggaaaaagag

SEQ ID NO: 109382 - DNA, 25 bp, Probe sequence
attatgaaatcgatccaggaaaaac

SEQ ID NO: 109383 - DNA, 25 bp, Probe sequence
atcaaattatgaaatcgatccagga

SEQ ID NO: 109384 - DNA, 25 bp, Probe sequence
atgaaatcgatccaggaaaaacaat

SEQ ID NO: 109385 - DNA, 25 bp, Probe sequence
atgattcgatcaaattatgaaatcg

SEQ ID NO: 109386 - DNA, 25 bp, Probe sequence
aaattatgaaatcgatccaggaaaa

SEQ ID NO: 109387 - DNA, 25 bp, Probe sequence
aattatgaaatcgatccaggaaaaa

SEQ ID NO: 109388 - DNA, 25 bp, Probe sequence
caaattatgaaatcgatccaggaaa

SEQ ID NO: 109389 - DNA, 25 bp, Probe sequence
catgattcgatcaaattatgaaatc

SEQ ID NO: 109390 - DNA, 25 bp, Probe sequence
gaaatcgatccaggaaaaacaataa

SEQ ID NO: 109391 - DNA, 25 bp, Probe sequence
tgaaatcgatccaggaaaaacaata

SEQ ID NO: 109392 - DNA, 25 bp, Probe sequence
tcgatccaggaaaaacaataaaaag

SEQ ID NO: 109393 - DNA, 25 bp, Probe sequence
tcatgattcgatcaaattatgaaat

SEQ ID NO: 109394 - DNA, 25 bp, Probe sequence
tcaaattatgaaatcgatccaggaa

SEQ ID NO: 109395 - DNA, 25 bp, Probe sequence
tatgaaatcgatccaggaaaaacaa

SEQ ID NO: 109396 - DNA, 25 bp, Probe sequence
ttatgaaatcgatccaggaaaaaca

SEQ ID NO: 109397 - DNA, 25 bp, Probe sequence
attaaaatatgaaatcaatccagga

SEQ ID NO: 109398 - DNA, 25 bp, Probe sequence
atatgaaatcaatccaggaaagata

SEQ ID NO: 109399 - DNA, 25 bp, Probe sequence
atgaaatcaatccaggaaagataat

SEQ ID NO: 109400 - DNA, 25 bp, Probe sequence
atgactcgattaaaatatgaaatca

SEQ ID NO: 109401 - DNA, 25 bp, Probe sequence
aaatatgaaatcaatccaggaaaga

SEQ ID NO: 109402 - DNA, 25 bp, Probe sequence
aaatcaatccaggaaagataataat

SEQ ID NO: 109403 - DNA, 25 bp, Probe sequence
aaaatatgaaatcaatccaggaaag

SEQ ID NO: 109404 - DNA, 25 bp, Probe sequence
aatatgaaatcaatccaggaaagat

SEQ ID NO: 109405 - DNA, 25 bp, Probe sequence
catgactcgattaaaatatgaaatc

SEQ ID NO: 109406 - DNA, 25 bp, Probe sequence
gaaatcaatccaggaaagataataa

SEQ ID NO: 109407 - DNA, 25 bp, Probe sequence
tgaaatcaatccaggaaagataata

SEQ ID NO: 109408 - DNA, 25 bp, Probe sequence
tcatgactcgattaaaatatgaaat

SEQ ID NO: 109409 - DNA, 25 bp, Probe sequence
taaaatatgaaatcaatccaggaaa

SEQ ID NO: 109410 - DNA, 25 bp, Probe sequence
tatgaaatcaatccaggaaagataa

SEQ ID NO: 109411 - DNA, 25 bp, Probe sequence
ttaaaatatgaaatcaatccaggaa

SEQ ID NO: 109412 - DNA, 25 bp, Probe sequence
atgttgctgtaaaataatgtaaaat

SEQ ID NO: 109413 - DNA, 25 bp, Probe sequence
acgaatttcaaatatgttgctgtaa

SEQ ID NO: 109414 - DNA, 25 bp, Probe sequence
acgattcaacacgaatttcaaatat

SEQ ID NO: 109415 - DNA, 25 bp, Probe sequence
acacgaatttcaaatatgttgctgt

SEQ ID NO: 109416 - DNA, 25 bp, Probe sequence
acacgattcaacacgaatttcaaat

SEQ ID NO: 109417 - DNA, 25 bp, Probe sequence
aaaataaacgtattcatattactga

SEQ ID NO: 109418 - DNA, 25 bp, Probe sequence
aacgtattcatattactgaattgag

SEQ ID NO: 109419 - DNA, 25 bp, Probe sequence
cacacgattcaacacgaatttcaaa

SEQ ID NO: 109420 - DNA, 25 bp, Probe sequence
ctcccacacgattcaacacgaattt

SEQ ID NO: 109421 - DNA, 25 bp, Probe sequence
cccacacgattcaacacgaatttca

SEQ ID NO: 109422 - DNA, 25 bp, Probe sequence
cctcccacacgattcaacacgaatt

SEQ ID NO: 109423 - DNA, 25 bp, Probe sequence
ccacacgattcaacacgaatttcaa

SEQ ID NO: 109424 - DNA, 25 bp, Probe sequence
gaatttcaaatatgttgctgtaaaa

SEQ ID NO: 109425 - DNA, 25 bp, Probe sequence
tcccacacgattcaacacgaatttc

SEQ ID NO: 109426 - DNA, 25 bp, Probe sequence
tcatattactgaattgagggatagt

SEQ ID NO: 109427 - DNA, 25 bp, Probe sequence
atctctgttgttggcaatataaata

SEQ ID NO: 109428 - DNA, 25 bp, Probe sequence
atgatgtaactaaggagatgaagga

SEQ ID NO: 109429 - DNA, 25 bp, Probe sequence
atggttaacatctctgttgttggca

SEQ ID NO: 109430 - DNA, 25 bp, Probe sequence
acatctctgttgttggcaatataaa

SEQ ID NO: 109431 - DNA, 25 bp, Probe sequence
aaattaatggttaacatctctgttg

SEQ ID NO: 109432 - DNA, 25 bp, Probe sequence
aatggttaacatctctgttgttggc

SEQ ID NO: 109433 - DNA, 25 bp, Probe sequence
aatgatcacaaatcacaaattttga

SEQ ID NO: 109434 - DNA, 25 bp, Probe sequence
aatcatttatgatgtaactaaggag

SEQ ID NO: 109435 - DNA, 25 bp, Probe sequence
gatcacaaatcacaaattttgatat

SEQ ID NO: 109436 - DNA, 25 bp, Probe sequence
gatatacataatttgtgatttttta

SEQ ID NO: 109437 - DNA, 25 bp, Probe sequence
gttaacatctctgttgttggcaata

SEQ ID NO: 109438 - DNA, 25 bp, Probe sequence
ggttaacatctctgttgttggcaat

SEQ ID NO: 109439 - DNA, 25 bp, Probe sequence
tggttaacatctctgttgttggcaa

SEQ ID NO: 109440 - DNA, 25 bp, Probe sequence
tgtgattttttatattcaaagctaa

SEQ ID NO: 109441 - DNA, 25 bp, Probe sequence
taacatctctgttgttggcaatata

SEQ ID NO: 109442 - DNA, 25 bp, Probe sequence
atctatgattggattaacactaata

SEQ ID NO: 109443 - DNA, 25 bp, Probe sequence
atgacacgccaagtgttttgataat

SEQ ID NO: 109444 - DNA, 25 bp, Probe sequence
atgaggaaatgtatagagcagtgca

SEQ ID NO: 109445 - DNA, 25 bp, Probe sequence
agagcagtgcatatagataaatcta

SEQ ID NO: 109446 - DNA, 25 bp, Probe sequence
accatccacttaaacttttgataag

SEQ ID NO: 109447 - DNA, 25 bp, Probe sequence
acgccaagtgttttgataatgatat

SEQ ID NO: 109448 - DNA, 25 bp, Probe sequence
acgatgacacgccaagtgttttgat

SEQ ID NO: 109449 - DNA, 25 bp, Probe sequence
acacgccaagtgttttgataatgat

SEQ ID NO: 109450 - DNA, 25 bp, Probe sequence
aacgatgacacgccaagtgttttga

SEQ ID NO: 109451 - DNA, 25 bp, Probe sequence
catccacttaaacttttgataagtt

SEQ ID NO: 109452 - DNA, 25 bp, Probe sequence
cgatgacacgccaagtgttttgata

SEQ ID NO: 109453 - DNA, 25 bp, Probe sequence
gatgacacgccaagtgttttgataa

SEQ ID NO: 109454 - DNA, 25 bp, Probe sequence
ggaaatgtatagagcagtgcatata

SEQ ID NO: 109455 - DNA, 25 bp, Probe sequence
taacgatgacacgccaagtgttttg

SEQ ID NO: 109456 - DNA, 25 bp, Probe sequence
tataaatgaaaaaccatccacttaa

SEQ ID NO: 109457 - DNA, 25 bp, Probe sequence
atgcctctgaatctctaattttaaa

SEQ ID NO: 109458 - DNA, 25 bp, Probe sequence
aaaaagccaatccattgatgttgga

SEQ ID NO: 109459 - DNA, 25 bp, Probe sequence
cttaccgcatactaatgaagcatta

SEQ ID NO: 109460 - DNA, 25 bp, Probe sequence
cgagaacagtgtccgtcatgcttac

SEQ ID NO: 109461 - DNA, 25 bp, Probe sequence
ccttgtatatgcctctgaatctcta

SEQ ID NO: 109462 - DNA, 25 bp, Probe sequence
gaagcattattatatcagtgtttat

SEQ ID NO: 109463 - DNA, 25 bp, Probe sequence
gactccgagaacagtgtccgtcatg

SEQ ID NO: 109464 - DNA, 25 bp, Probe sequence
gttggattgaccttgtatatgcctc

SEQ ID NO: 109465 - DNA, 25 bp, Probe sequence
gtatatgcctctgaatctctaattt

SEQ ID NO: 109466 - DNA, 25 bp, Probe sequence
gtcagactccgagaacagtgtccgt

SEQ ID NO: 109467 - DNA, 25 bp, Probe sequence
ggattgaccttgtatatgcctctga

SEQ ID NO: 109468 - DNA, 25 bp, Probe sequence
tgattcgatgtcagactccgagaac

SEQ ID NO: 109469 - DNA, 25 bp, Probe sequence
tgaccttgtatatgcctctgaatct

SEQ ID NO: 109470 - DNA, 25 bp, Probe sequence
tccgtcatgcttaccgcatactaat

SEQ ID NO: 109471 - DNA, 25 bp, Probe sequence
tcagtgtttatagccgatttaagat

SEQ ID NO: 109472 - DNA, 25 bp, Probe sequence
atttagattatcgcttataattgta

SEQ ID NO: 109473 - DNA, 25 bp, Probe sequence
atttcacctcaaataagctttatat

SEQ ID NO: 109474 - DNA, 25 bp, Probe sequence
atatttagattatcgcttataattg

SEQ ID NO: 109475 - DNA, 25 bp, Probe sequence
atcgcttataattgtaaatttaatg

SEQ ID NO: 109476 - DNA, 25 bp, Probe sequence
cacctcaaataagctttatatttag

SEQ ID NO: 109477 - DNA, 25 bp, Probe sequence
ctttatatttagattatcgcttata

SEQ ID NO: 109478 - DNA, 25 bp, Probe sequence
gctttatatttagattatcgcttat

SEQ ID NO: 109479 - DNA, 25 bp, Probe sequence
gattatcgcttataattgtaaattt

SEQ ID NO: 109480 - DNA, 25 bp, Probe sequence
tcacctcaaataagctttatattta

SEQ ID NO: 109481 - DNA, 25 bp, Probe sequence
tatttcacctcaaataagctttata

SEQ ID NO: 109482 - DNA, 25 bp, Probe sequence
tttcacctcaaataagctttatatt

SEQ ID NO: 109483 - DNA, 25 bp, Probe sequence
ttatatttagattatcgcttataat

SEQ ID NO: 109484 - DNA, 25 bp, Probe sequence
ttatcgcttataattgtaaatttaa

SEQ ID NO: 109485 - DNA, 25 bp, Probe sequence
ttagattatcgcttataattgtaaa

SEQ ID NO: 109486 - DNA, 25 bp, Probe sequence
ttcacctcaaataagctttatattt

SEQ ID NO: 109487 - DNA, 25 bp, Probe sequence
atcaccaaataaaaatctattaatg

SEQ ID NO: 109488 - DNA, 25 bp, Probe sequence
atcccactccatgatttgaaatcac

SEQ ID NO: 109489 - DNA, 25 bp, Probe sequence
actccatgatttgaaatcaccaaat

SEQ ID NO: 109490 - DNA, 25 bp, Probe sequence
aatcaccaaataaaaatctattaat

SEQ ID NO: 109491 - DNA, 25 bp, Probe sequence
cactccatgatttgaaatcaccaaa

SEQ ID NO: 109492 - DNA, 25 bp, Probe sequence
ctatcccactccatgatttgaaatc

SEQ ID NO: 109493 - DNA, 25 bp, Probe sequence
ctccatgatttgaaatcaccaaata

SEQ ID NO: 109494 - DNA, 25 bp, Probe sequence
cccactccatgatttgaaatcacca

SEQ ID NO: 109495 - DNA, 25 bp, Probe sequence
ccactccatgatttgaaatcaccaa

SEQ ID NO: 109496 - DNA, 25 bp, Probe sequence
gaaatcaccaaataaaaatctatta

SEQ ID NO: 109497 - DNA, 25 bp, Probe sequence
tccatgatttgaaatcaccaaataa

SEQ ID NO: 109498 - DNA, 25 bp, Probe sequence
tcccactccatgatttgaaatcacc

SEQ ID NO: 109499 - DNA, 25 bp, Probe sequence
tctatcccactccatgatttgaaat

SEQ ID NO: 109500 - DNA, 25 bp, Probe sequence
tatcccactccatgatttgaaatca

SEQ ID NO: 109501 - DNA, 25 bp, Probe sequence
ttctatcccactccatgatttgaaa

SEQ ID NO: 109502 - DNA, 25 bp, Probe sequence
atcactcgaatgtttttggattctg

SEQ ID NO: 109503 - DNA, 25 bp, Probe sequence
atccaccaagtcctttcgtattaga

SEQ ID NO: 109504 - DNA, 25 bp, Probe sequence
actcagactatacccctttgtgaat

SEQ ID NO: 109505 - DNA, 25 bp, Probe sequence
aattagatcatttttatatttttga

SEQ ID NO: 109506 - DNA, 25 bp, Probe sequence
caagtcctttcgtattagaatacac

SEQ ID NO: 109507 - DNA, 25 bp, Probe sequence
cagactatacccctttgtgaattgt

SEQ ID NO: 109508 - DNA, 25 bp, Probe sequence
ccaccaagtcctttcgtattagaat

SEQ ID NO: 109509 - DNA, 25 bp, Probe sequence
gactatacccctttgtgaattgtaa

SEQ ID NO: 109510 - DNA, 25 bp, Probe sequence
gtttttggattctgaggtgcgggac

SEQ ID NO: 109511 - DNA, 25 bp, Probe sequence
ggattctgaggtgcgggacttggaa

SEQ ID NO: 109512 - DNA, 25 bp, Probe sequence
tagaatacactcagactatacccct

SEQ ID NO: 109513 - DNA, 25 bp, Probe sequence
tacccctttgtgaattgtaaatatt

SEQ ID NO: 109514 - DNA, 25 bp, Probe sequence
ttttatcactcgaatgtttttggat

SEQ ID NO: 109515 - DNA, 25 bp, Probe sequence
ttggattctgaggtgcgggacttgg

SEQ ID NO: 109516 - DNA, 25 bp, Probe sequence
ttctgaggtgcgggacttggaataa

SEQ ID NO: 109517 - DNA, 25 bp, Probe sequence
atgtggcatgttaaacagctaaata

SEQ ID NO: 109518 - DNA, 25 bp, Probe sequence
agctaaatataagctatgcacattt

SEQ ID NO: 109519 - DNA, 25 bp, Probe sequence
actcctgacgcaattatagtatcat

SEQ ID NO: 109520 - DNA, 25 bp, Probe sequence
aacaagcggatactcctgacgcaat

SEQ ID NO: 109521 - DNA, 25 bp, Probe sequence
aattcgaatcattatgtggcatgtt

SEQ ID NO: 109522 - DNA, 25 bp, Probe sequence
caagcggatactcctgacgcaatta

SEQ ID NO: 109523 - DNA, 25 bp, Probe sequence
cattatgtggcatgttaaacagcta

SEQ ID NO: 109524 - DNA, 25 bp, Probe sequence
cggatactcctgacgcaattatagt

SEQ ID NO: 109525 - DNA, 25 bp, Probe sequence
gcacatttaacaagcggatactcct

SEQ ID NO: 109526 - DNA, 25 bp, Probe sequence
gctatgcacatttaacaagcggata

SEQ ID NO: 109527 - DNA, 25 bp, Probe sequence
gacgcaattatagtatcattacata

SEQ ID NO: 109528 - DNA, 25 bp, Probe sequence
gtaaaataggcagagtgttatacat

SEQ ID NO: 109529 - DNA, 25 bp, Probe sequence
tacatattgtttaatcgtttggggt

SEQ ID NO: 109530 - DNA, 25 bp, Probe sequence
tattgtttaatcgtttggggtaatg

SEQ ID NO: 109531 - DNA, 25 bp, Probe sequence
ttaacaagcggatactcctgacgca

SEQ ID NO: 109532 - DNA, 25 bp, Probe sequence
attcgattgcctgtcacatatagga

SEQ ID NO: 109533 - DNA, 25 bp, Probe sequence
atgtgatcatcgcaaaatataagtt

SEQ ID NO: 109534 - DNA, 25 bp, Probe sequence
aaaattcgattgcctgtcacatata

SEQ ID NO: 109535 - DNA, 25 bp, Probe sequence
cattttaaatatgtgatcatcgcaa

SEQ ID NO: 109536 - DNA, 25 bp, Probe sequence
gcggattcctgatattattataaat

SEQ ID NO: 109537 - DNA, 25 bp, Probe sequence
gcatttttgaagcggattcctgata

SEQ ID NO: 109538 - DNA, 25 bp, Probe sequence
gaagcggattcctgatattattata

SEQ ID NO: 109539 - DNA, 25 bp, Probe sequence
gaaataggttgtagattaatcagaa

SEQ ID NO: 109540 - DNA, 25 bp, Probe sequence
gatgcatttttgaagcggattcctg

SEQ ID NO: 109541 - DNA, 25 bp, Probe sequence
gattgcctgtcacatataggagtgt

SEQ ID NO: 109542 - DNA, 25 bp, Probe sequence
gtaaaaattcgattgcctgtcacat

SEQ ID NO: 109543 - DNA, 25 bp, Probe sequence
gtcacatataggagtgttacatttt

SEQ ID NO: 109544 - DNA, 25 bp, Probe sequence
gtgtatattttgtgaactttttgta

SEQ ID NO: 109545 - DNA, 25 bp, Probe sequence
taaactgtcatgatgcatttttgaa

SEQ ID NO: 109546 - DNA, 25 bp, Probe sequence
tattgtgtatattttgtgaactttt

SEQ ID NO: 109547 - DNA, 25 bp, Probe sequence
attattcatgaatcgaactagtacg

SEQ ID NO: 109548 - DNA, 25 bp, Probe sequence
atgcaatgagcatcttgtctagttc

SEQ ID NO: 109549 - DNA, 25 bp, Probe sequence
atgagcatcttgtctagttcgattt

SEQ ID NO: 109550 - DNA, 25 bp, Probe sequence
aatgttgtcacttggattcaaatga

SEQ ID NO: 109551 - DNA, 25 bp, Probe sequence
aatgagcatcttgtctagttcgatt

SEQ ID NO: 109552 - DNA, 25 bp, Probe sequence
aataatgttgtcacttggattcaaa

SEQ ID NO: 109553 - DNA, 25 bp, Probe sequence
catcttgtctagttcgattttttaa

SEQ ID NO: 109554 - DNA, 25 bp, Probe sequence
gcatcttgtctagttcgatttttta

SEQ ID NO: 109555 - DNA, 25 bp, Probe sequence
gcaatgagcatcttgtctagttcga

SEQ ID NO: 109556 - DNA, 25 bp, Probe sequence
gaactagtacgaaatgcaatgagca

SEQ ID NO: 109557 - DNA, 25 bp, Probe sequence
gacattttaaatctaattattcatg

SEQ ID NO: 109558 - DNA, 25 bp, Probe sequence
gagcatcttgtctagttcgattttt

SEQ ID NO: 109559 - DNA, 25 bp, Probe sequence
tgagcatcttgtctagttcgatttt

SEQ ID NO: 109560 - DNA, 25 bp, Probe sequence
tcacttggattcaaatgacatttta

SEQ ID NO: 109561 - DNA, 25 bp, Probe sequence
taaataatgttgtcacttggattca

SEQ ID NO: 109562 - DNA, 25 bp, Probe sequence
atatctatcgttgtgtattgtttgt

SEQ ID NO: 109563 - DNA, 25 bp, Probe sequence
ataagaatgtgttaatcaacgtata

SEQ ID NO: 109564 - DNA, 25 bp, Probe sequence
atctatcgttgtgtattgtttgttt

SEQ ID NO: 109565 - DNA, 25 bp, Probe sequence
atgatatctatcgttgtgtattgtt

SEQ ID NO: 109566 - DNA, 25 bp, Probe sequence
aagaatgtgttaatcaacgtatata

SEQ ID NO: 109567 - DNA, 25 bp, Probe sequence
aatgtgttaatcaacgtatataagt

SEQ ID NO: 109568 - DNA, 25 bp, Probe sequence
gaatgtgttaatcaacgtatataag

SEQ ID NO: 109569 - DNA, 25 bp, Probe sequence
gatgattcttatcatttcaaataag

SEQ ID NO: 109570 - DNA, 25 bp, Probe sequence
gataaaatgatatctatcgttgtgt

SEQ ID NO: 109571 - DNA, 25 bp, Probe sequence
gatatctatcgttgtgtattgtttg

SEQ ID NO: 109572 - DNA, 25 bp, Probe sequence
gtgttaatcaacgtatataagttaa

SEQ ID NO: 109573 - DNA, 25 bp, Probe sequence
tgatatctatcgttgtgtattgttt

SEQ ID NO: 109574 - DNA, 25 bp, Probe sequence
tagatgattcttatcatttcaaata

SEQ ID NO: 109575 - DNA, 25 bp, Probe sequence
tatctatcgttgtgtattgtttgtt

SEQ ID NO: 109576 - DNA, 25 bp, Probe sequence
tatataagttaaaattggtttggat

SEQ ID NO: 109577 - DNA, 25 bp, Probe sequence
aggcttaaaaccgcaaaatcacgct

SEQ ID NO: 109578 - DNA, 25 bp, Probe sequence
acagcacacttgcgtaatagagata

SEQ ID NO: 109579 - DNA, 25 bp, Probe sequence
aaagtggggctttgaatgtgctgag

SEQ ID NO: 109580 - DNA, 25 bp, Probe sequence
aaccgcaaaatcacgctatttcgat

SEQ ID NO: 109581 - DNA, 25 bp, Probe sequence
cactttagaatacagcacacttgcg

SEQ ID NO: 109582 - DNA, 25 bp, Probe sequence
gcaaaatcacgctatttcgattaat

SEQ ID NO: 109583 - DNA, 25 bp, Probe sequence
gaatacagcacacttgcgtaataga

SEQ ID NO: 109584 - DNA, 25 bp, Probe sequence
gaatgtgctgaggtttaatttcgga

SEQ ID NO: 109585 - DNA, 25 bp, Probe sequence
gaaaacacaagtgcactttagaata

SEQ ID NO: 109586 - DNA, 25 bp, Probe sequence
gaaagcggtttaatacatatgagtt

SEQ ID NO: 109587 - DNA, 25 bp, Probe sequence
gaaagttgttcattatgtgctgagg

SEQ ID NO: 109588 - DNA, 25 bp, Probe sequence
gttcattatgtgctgaggttttatt

SEQ ID NO: 109589 - DNA, 25 bp, Probe sequence
gtgctgaggtttaatttcggaaatg

SEQ ID NO: 109590 - DNA, 25 bp, Probe sequence
ggggctttgaatgtgctgaggttta

SEQ ID NO: 109591 - DNA, 25 bp, Probe sequence
ggaaatggttttaagtgatatagaa

SEQ ID NO: 109592 - DNA, 25 bp, Probe sequence
atgcactttattttaatataacaca

SEQ ID NO: 109593 - DNA, 25 bp, Probe sequence
atgacattatcaaacactatattta

SEQ ID NO: 109594 - DNA, 25 bp, Probe sequence
atgtataaaaaaacctcgcaactgt

SEQ ID NO: 109595 - DNA, 25 bp, Probe sequence
aaacctcgcaactgttagttaactg

SEQ ID NO: 109596 - DNA, 25 bp, Probe sequence
aagaaagtcgacgcttgttaacaat

SEQ ID NO: 109597 - DNA, 25 bp, Probe sequence
aagtcgacgcttgttaacaataaca

SEQ ID NO: 109598 - DNA, 25 bp, Probe sequence
ctccttgtatatgcactttatttta

SEQ ID NO: 109599 - DNA, 25 bp, Probe sequence
gctaacttcgttgtgaggtcatttt

SEQ ID NO: 109600 - DNA, 25 bp, Probe sequence
gaatcatttagctaacttcgttgtg

SEQ ID NO: 109601 - DNA, 25 bp, Probe sequence
gaggtcattttgttttaataatatc

SEQ ID NO: 109602 - DNA, 25 bp, Probe sequence
gttgtgaggtcattttgttttaata

SEQ ID NO: 109603 - DNA, 25 bp, Probe sequence
gttagttaactgaatcatttagcta

SEQ ID NO: 109604 - DNA, 25 bp, Probe sequence
tgttttatctccttgtatatgcact

SEQ ID NO: 109605 - DNA, 25 bp, Probe sequence
tatgagtcggtgttatttgtatata

SEQ ID NO: 109606 - DNA, 25 bp, Probe sequence
ttatctccttgtatatgcactttat

SEQ ID NO: 109607 - DNA, 25 bp, Probe sequence
attagcctccttcgtgatgtatgac

SEQ ID NO: 109608 - DNA, 25 bp, Probe sequence
ataatcctaattacttgatagtgag

SEQ ID NO: 109609 - DNA, 25 bp, Probe sequence
atgcaacttataattatttgacata

SEQ ID NO: 109610 - DNA, 25 bp, Probe sequence
atgagaatcattatcacgatttagt

SEQ ID NO: 109611 - DNA, 25 bp, Probe sequence
actaattagcctccttcgtgatgta

SEQ ID NO: 109612 - DNA, 25 bp, Probe sequence
aatatttatgatttacatgcaactt

SEQ ID NO: 109613 - DNA, 25 bp, Probe sequence
gcctccttcgtgatgtatgacaatg

SEQ ID NO: 109614 - DNA, 25 bp, Probe sequence
gaatcattatcaattaggtaacaca

SEQ ID NO: 109615 - DNA, 25 bp, Probe sequence
gaatcattatcacgatttagtatga

SEQ ID NO: 109616 - DNA, 25 bp, Probe sequence
gatttacatgcaacttataattatt

SEQ ID NO: 109617 - DNA, 25 bp, Probe sequence
ggtaacacacaatattatagaattt

SEQ ID NO: 109618 - DNA, 25 bp, Probe sequence
tccttcgtgatgtatgacaatgaga

SEQ ID NO: 109619 - DNA, 25 bp, Probe sequence
taattagcctccttcgtgatgtatg

SEQ ID NO: 109620 - DNA, 25 bp, Probe sequence
tagcctccttcgtgatgtatgacaa

SEQ ID NO: 109621 - DNA, 25 bp, Probe sequence
ttttaaatttgaggaggaagcgctt

SEQ ID NO: 109622 - DNA, 25 bp, Probe sequence
attgaagttctccatttttgtattt

SEQ ID NO: 109623 - DNA, 25 bp, Probe sequence
atattgaagttctccatttttgtat

SEQ ID NO: 109624 - DNA, 25 bp, Probe sequence
agttctccatttttgtattttgcat

SEQ ID NO: 109625 - DNA, 25 bp, Probe sequence
aaatattgaagttctccatttttgt

SEQ ID NO: 109626 - DNA, 25 bp, Probe sequence
aacaatatagtgtggagaacttttg

SEQ ID NO: 109627 - DNA, 25 bp, Probe sequence
aagttctccatttttgtattttgca

SEQ ID NO: 109628 - DNA, 25 bp, Probe sequence
gaagttctccatttttgtattttgc

SEQ ID NO: 109629 - DNA, 25 bp, Probe sequence
gatgatttagcgtattgatagcgaa

SEQ ID NO: 109630 - DNA, 25 bp, Probe sequence
gatttagcgtattgatagcgaaaat

SEQ ID NO: 109631 - DNA, 25 bp, Probe sequence
gttctccatttttgtattttgcata

SEQ ID NO: 109632 - DNA, 25 bp, Probe sequence
gtgatgttgagggaaatatgatgat

SEQ ID NO: 109633 - DNA, 25 bp, Probe sequence
gtgtggagaacttttgatattttat

SEQ ID NO: 109634 - DNA, 25 bp, Probe sequence
ggagaacttttgatattttataaat

SEQ ID NO: 109635 - DNA, 25 bp, Probe sequence
tctccatttttgtattttgcatata

SEQ ID NO: 109636 - DNA, 25 bp, Probe sequence
ttttactgtgatgttgagggaaata

SEQ ID NO: 109637 - DNA, 25 bp, Probe sequence
attttgttaaatggagctacctttg

SEQ ID NO: 109638 - DNA, 25 bp, Probe sequence
atttaaacgcattgccaatcactaa

SEQ ID NO: 109639 - DNA, 25 bp, Probe sequence
acgacatttaaacgcattgccaatc

SEQ ID NO: 109640 - DNA, 25 bp, Probe sequence
aaacgacatttaaacgcattgccaa

SEQ ID NO: 109641 - DNA, 25 bp, Probe sequence
aactataccttaaatatctgaatat

SEQ ID NO: 109642 - DNA, 25 bp, Probe sequence
aacgcattgccaatcactaatggta

SEQ ID NO: 109643 - DNA, 25 bp, Probe sequence
aatggtagtgcgtttaactatacct

SEQ ID NO: 109644 - DNA, 25 bp, Probe sequence
aatggagctacctttgttgtactat

SEQ ID NO: 109645 - DNA, 25 bp, Probe sequence
ctacctttgttgtactattcaaatg

SEQ ID NO: 109646 - DNA, 25 bp, Probe sequence
gcattgccaatcactaatggtagtg

SEQ ID NO: 109647 - DNA, 25 bp, Probe sequence
gagctacctttgttgtactattcaa

SEQ ID NO: 109648 - DNA, 25 bp, Probe sequence
gttaaatggagctacctttgttgta

SEQ ID NO: 109649 - DNA, 25 bp, Probe sequence
tggagctacctttgttgtactattc

SEQ ID NO: 109650 - DNA, 25 bp, Probe sequence
tgacaaactaatcgagagacttaaa

SEQ ID NO: 109651 - DNA, 25 bp, Probe sequence
tagtgcgtttaactataccttaaat

SEQ ID NO: 109652 - DNA, 25 bp, Probe sequence
atactttatgtttttatgatatatt

SEQ ID NO: 109653 - DNA, 25 bp, Probe sequence
atgtttttatgatatatttttaatg

SEQ ID NO: 109654 - DNA, 25 bp, Probe sequence
agcttacaatactttatgtttttat

SEQ ID NO: 109655 - DNA, 25 bp, Probe sequence
acaatactttatgtttttatgatat

SEQ ID NO: 109656 - DNA, 25 bp, Probe sequence
aatactttatgtttttatgatatat

SEQ ID NO: 109657 - DNA, 25 bp, Probe sequence
caatactttatgtttttatgatata

SEQ ID NO: 109658 - DNA, 25 bp, Probe sequence
cttacaatactttatgtttttatga

SEQ ID NO: 109659 - DNA, 25 bp, Probe sequence
gcttacaatactttatgtttttatg

SEQ ID NO: 109660 - DNA, 25 bp, Probe sequence
gtttttatgatatatttttaatgta

SEQ ID NO: 109661 - DNA, 25 bp, Probe sequence
tacaatactttatgtttttatgata

SEQ ID NO: 109662 - DNA, 25 bp, Probe sequence
tactttatgtttttatgatatattt

SEQ ID NO: 109663 - DNA, 25 bp, Probe sequence
tatgtttttatgatatatttttaat

SEQ ID NO: 109664 - DNA, 25 bp, Probe sequence
ttatgtttttatgatatatttttaa

SEQ ID NO: 109665 - DNA, 25 bp, Probe sequence
ttaatgtataaatgaggtggaagat

SEQ ID NO: 109666 - DNA, 25 bp, Probe sequence
ttacaatactttatgtttttatgat

SEQ ID NO: 109667 - DNA, 25 bp, Probe sequence
attcatctgatgagatagccatgtt

SEQ ID NO: 109668 - DNA, 25 bp, Probe sequence
atatgtgccatcattgatttgcatg

SEQ ID NO: 109669 - DNA, 25 bp, Probe sequence
atagcattaaaggggtttgtaacag

SEQ ID NO: 109670 - DNA, 25 bp, Probe sequence
catcattgatttgcatggctataaa

SEQ ID NO: 109671 - DNA, 25 bp, Probe sequence
cgaggaatcccttgagacagtatca

SEQ ID NO: 109672 - DNA, 25 bp, Probe sequence
gaaatatgtgccatcattgatttgc

SEQ ID NO: 109673 - DNA, 25 bp, Probe sequence
gagacagtatcaaatggcattaaga

SEQ ID NO: 109674 - DNA, 25 bp, Probe sequence
gagatagccatgttaagaaattgaa

SEQ ID NO: 109675 - DNA, 25 bp, Probe sequence
gattgtgaccaattgttacagtata

SEQ ID NO: 109676 - DNA, 25 bp, Probe sequence
gttatattttaaagattgtgaccaa

SEQ ID NO: 109677 - DNA, 25 bp, Probe sequence
gtataacgaggaatcccttgagaca

SEQ ID NO: 109678 - DNA, 25 bp, Probe sequence
gtgccatcattgatttgcatggcta

SEQ ID NO: 109679 - DNA, 25 bp, Probe sequence
ggaatcccttgagacagtatcaaat

SEQ ID NO: 109680 - DNA, 25 bp, Probe sequence
ttacagtataacgaggaatcccttg

SEQ ID NO: 109681 - DNA, 25 bp, Probe sequence
tttgcatggctataaatactattca

SEQ ID NO: 109682 - DNA, 25 bp, Probe sequence
attgcaaaacacacccgaaattaat

SEQ ID NO: 109683 - DNA, 25 bp, Probe sequence
attattgcaaaacacacccgaaatt

SEQ ID NO: 109684 - DNA, 25 bp, Probe sequence
aaatgcctttttgcattcaatatta

SEQ ID NO: 109685 - DNA, 25 bp, Probe sequence
aaaggcaatttcttattgaaaaatg

SEQ ID NO: 109686 - DNA, 25 bp, Probe sequence
aaagcagttaaatgcctttttgcat

SEQ ID NO: 109687 - DNA, 25 bp, Probe sequence
aataattattgcaaaacacacccga

SEQ ID NO: 109688 - DNA, 25 bp, Probe sequence
gcctttttgcattcaatattaaata

SEQ ID NO: 109689 - DNA, 25 bp, Probe sequence
gcagttaaatgcctttttgcattca

SEQ ID NO: 109690 - DNA, 25 bp, Probe sequence
gcaaaacacacccgaaattaattat

SEQ ID NO: 109691 - DNA, 25 bp, Probe sequence
gttaaatgcctttttgcattcaata

SEQ ID NO: 109692 - DNA, 25 bp, Probe sequence
gtatcggtaacgctatactttagaa

SEQ ID NO: 109693 - DNA, 25 bp, Probe sequence
tggaagttgtcttttttaattctct

SEQ ID NO: 109694 - DNA, 25 bp, Probe sequence
tcggtaacgctatactttagaaatt

SEQ ID NO: 109695 - DNA, 25 bp, Probe sequence
taattattgcaaaacacacccgaaa

SEQ ID NO: 109696 - DNA, 25 bp, Probe sequence
tattatatcaatttcgaatatttaa

SEQ ID NO: 109697 - DNA, 25 bp, Probe sequence
atatctttacttatttgtttttgtg

SEQ ID NO: 109698 - DNA, 25 bp, Probe sequence
atcagacaacactattaattaatca

SEQ ID NO: 109699 - DNA, 25 bp, Probe sequence
aatgatgacctaaatgttatataca

SEQ ID NO: 109700 - DNA, 25 bp, Probe sequence
aattttgttgcatttcttttgtaat

SEQ ID NO: 109701 - DNA, 25 bp, Probe sequence
gaaataccttattattgttgactat

SEQ ID NO: 109702 - DNA, 25 bp, Probe sequence
gagcatttacaaggtgttccacttt

SEQ ID NO: 109703 - DNA, 25 bp, Probe sequence
gaggtggagcatttacaaggtgttc

SEQ ID NO: 109704 - DNA, 25 bp, Probe sequence
gttgcatttcttttgtaatcatatg

SEQ ID NO: 109705 - DNA, 25 bp, Probe sequence
gttatatacatcagacaacactatt

SEQ ID NO: 109706 - DNA, 25 bp, Probe sequence
tgggatagcacgtaaaagtggcaaa

SEQ ID NO: 109707 - DNA, 25 bp, Probe sequence
tgttccacttttttgtacttaatat

SEQ ID NO: 109708 - DNA, 25 bp, Probe sequence
tccacttttttgtacttaatatctt

SEQ ID NO: 109709 - DNA, 25 bp, Probe sequence
tttgtttttgtgtaatgggatagca

SEQ ID NO: 109710 - DNA, 25 bp, Probe sequence
tttcaactcgaaataccttattatt

SEQ ID NO: 109711 - DNA, 25 bp, Probe sequence
ttgttgactataatgatgacctaaa

SEQ ID NO: 109712 - DNA, 25 bp, Probe sequence
atagtcatcaaaaaatttcttatat

SEQ ID NO: 109713 - DNA, 25 bp, Probe sequence
agtcatcaaaaaatttcttatattt

SEQ ID NO: 109714 - DNA, 25 bp, Probe sequence
accaactccctaaatagtcatcaaa

SEQ ID NO: 109715 - DNA, 25 bp, Probe sequence
aatagtcatcaaaaaatttcttata

SEQ ID NO: 109716 - DNA, 25 bp, Probe sequence
catttcttaccaactccctaaatag

SEQ ID NO: 109717 - DNA, 25 bp, Probe sequence
cttaccaactccctaaatagtcatc

SEQ ID NO: 109718 - DNA, 25 bp, Probe sequence
gtcatcaaaaaatttcttatatttt

SEQ ID NO: 109719 - DNA, 25 bp, Probe sequence
tcttaccaactccctaaatagtcat

SEQ ID NO: 109720 - DNA, 25 bp, Probe sequence
tcatcaaaaaatttcttatatttta

SEQ ID NO: 109721 - DNA, 25 bp, Probe sequence
taccaactccctaaatagtcatcaa

SEQ ID NO: 109722 - DNA, 25 bp, Probe sequence
tagtcatcaaaaaatttcttatatt

SEQ ID NO: 109723 - DNA, 25 bp, Probe sequence
ttcttaccaactccctaaatagtca

SEQ ID NO: 109724 - DNA, 25 bp, Probe sequence
ttaccaactccctaaatagtcatca

SEQ ID NO: 109725 - DNA, 25 bp, Probe sequence
atcactctcatcatacaataatttt

SEQ ID NO: 109726 - DNA, 25 bp, Probe sequence
atcatacaataatttttactcgaat

SEQ ID NO: 109727 - DNA, 25 bp, Probe sequence
agttttatacaaggttagtagctgt

SEQ ID NO: 109728 - DNA, 25 bp, Probe sequence
actctcatcatacaataatttttac

SEQ ID NO: 109729 - DNA, 25 bp, Probe sequence
acttaatcactctcatcatacaata

SEQ ID NO: 109730 - DNA, 25 bp, Probe sequence
aaatgttcttaatattgtcaaaatg

SEQ ID NO: 109731 - DNA, 25 bp, Probe sequence
aaagttacttaatcactctcatcat

SEQ ID NO: 109732 - DNA, 25 bp, Probe sequence
gacaacctccataaagttacttaat

SEQ ID NO: 109733 - DNA, 25 bp, Probe sequence
gttacttaatcactctcatcataca

SEQ ID NO: 109734 - DNA, 25 bp, Probe sequence
gtagacaacctccataaagttactt

SEQ ID NO: 109735 - DNA, 25 bp, Probe sequence
gtagctgtaactgtaaaatgttctt

SEQ ID NO: 109736 - DNA, 25 bp, Probe sequence
taatcactctcatcatacaataatt

SEQ ID NO: 109737 - DNA, 25 bp, Probe sequence
tacaaggttagtagctgtaactgta

SEQ ID NO: 109738 - DNA, 25 bp, Probe sequence
tagataggctttgaaaattagtttt

SEQ ID NO: 109739 - DNA, 25 bp, Probe sequence
ttacttaatcactctcatcatacaa

SEQ ID NO: 109740 - DNA, 25 bp, Probe sequence
attcgcgagatatattcgtatttat

SEQ ID NO: 109741 - DNA, 25 bp, Probe sequence
ataaattcgcgagatatattcgtat

SEQ ID NO: 109742 - DNA, 25 bp, Probe sequence
aaattcgcgagatatattcgtattt

SEQ ID NO: 109743 - DNA, 25 bp, Probe sequence
aaagagattatataacacgaggagt

SEQ ID NO: 109744 - DNA, 25 bp, Probe sequence
aattcgcgagatatattcgtattta

SEQ ID NO: 109745 - DNA, 25 bp, Probe sequence
gcgagatatattcgtatttatagta

SEQ ID NO: 109746 - DNA, 25 bp, Probe sequence
gagatatattcgtatttatagtaaa

SEQ ID NO: 109747 - DNA, 25 bp, Probe sequence
gagattatataacacgaggagtagt

SEQ ID NO: 109748 - DNA, 25 bp, Probe sequence
gatatattcgtatttatagtaaaat

SEQ ID NO: 109749 - DNA, 25 bp, Probe sequence
gattatataacacgaggagtagtaa

SEQ ID NO: 109750 - DNA, 25 bp, Probe sequence
tcgcgagatatattcgtatttatag

SEQ ID NO: 109751 - DNA, 25 bp, Probe sequence
taaattcgcgagatatattcgtatt

SEQ ID NO: 109752 - DNA, 25 bp, Probe sequence
tataaattcgcgagatatattcgta

SEQ ID NO: 109753 - DNA, 25 bp, Probe sequence
ttatataacacgaggagtagtaagt

SEQ ID NO: 109754 - DNA, 25 bp, Probe sequence
ttcgcgagatatattcgtatttata

SEQ ID NO: 109755 - DNA, 25 bp, Probe sequence
ataacaatagttttcttcactgctg

SEQ ID NO: 109756 - DNA, 25 bp, Probe sequence
acaatagttttcttcactgctgttt

SEQ ID NO: 109757 - DNA, 25 bp, Probe sequence
aacagcagtgaagttaactataaca

SEQ ID NO: 109758 - DNA, 25 bp, Probe sequence
caatagttttcttcactgctgtttt

SEQ ID NO: 109759 - DNA, 25 bp, Probe sequence
ctataacaatagttttcttcactgc

SEQ ID NO: 109760 - DNA, 25 bp, Probe sequence
cgtgacggtaggacctcttatttag

SEQ ID NO: 109761 - DNA, 25 bp, Probe sequence
gaaacgtgacggtaggacctcttat

SEQ ID NO: 109762 - DNA, 25 bp, Probe sequence
gacggtaggacctcttatttaggag

SEQ ID NO: 109763 - DNA, 25 bp, Probe sequence
gacctcttatttaggagtatcctga

SEQ ID NO: 109764 - DNA, 25 bp, Probe sequence
gagaaacgtgacggtaggacctctt

SEQ ID NO: 109765 - DNA, 25 bp, Probe sequence
gtaggacctcttatttaggagtatc

SEQ ID NO: 109766 - DNA, 25 bp, Probe sequence
gtgacggtaggacctcttatttagg

SEQ ID NO: 109767 - DNA, 25 bp, Probe sequence
ggacctcttatttaggagtatcctg

SEQ ID NO: 109768 - DNA, 25 bp, Probe sequence
taacaatagttttcttcactgctgt

SEQ ID NO: 109769 - DNA, 25 bp, Probe sequence
tatttaggagtatcctgatttaatg

SEQ ID NO: 109770 - DNA, 25 bp, Probe sequence
atatcatagacattgggtttctgtg

SEQ ID NO: 109771 - DNA, 25 bp, Probe sequence
atctgtttcagtttagcgcctagct

SEQ ID NO: 109772 - DNA, 25 bp, Probe sequence
agcgcctagcttttcaatatttatc

SEQ ID NO: 109773 - DNA, 25 bp, Probe sequence
aaatggtttcaaatgtacagcgaca

SEQ ID NO: 109774 - DNA, 25 bp, Probe sequence
aagccaaggtaaactgaaatatcat

SEQ ID NO: 109775 - DNA, 25 bp, Probe sequence
cacctttctatatctgtttcagttt

SEQ ID NO: 109776 - DNA, 25 bp, Probe sequence
cagtttagcgcctagcttttcaata

SEQ ID NO: 109777 - DNA, 25 bp, Probe sequence
gcgacacctttctatatctgtttca

SEQ ID NO: 109778 - DNA, 25 bp, Probe sequence
gaaagcttttaataccaaattcgat

SEQ ID NO: 109779 - DNA, 25 bp, Probe sequence
gtttcagtttagcgcctagcttttc

SEQ ID NO: 109780 - DNA, 25 bp, Probe sequence
gggtttctgtgtacaaatggtttca

SEQ ID NO: 109781 - DNA, 25 bp, Probe sequence
tgtacagcgacacctttctatatct

SEQ ID NO: 109782 - DNA, 25 bp, Probe sequence
tagcttttcaatatttatctagaat

SEQ ID NO: 109783 - DNA, 25 bp, Probe sequence
tagacattgggtttctgtgtacaaa

SEQ ID NO: 109784 - DNA, 25 bp, Probe sequence
tatatctattgaacgaaagctttta

SEQ ID NO: 109785 - DNA, 25 bp, Probe sequence
attacacttatagcgtaccacattt

SEQ ID NO: 109786 - DNA, 25 bp, Probe sequence
atatgcaacgaatttttatcctata

SEQ ID NO: 109787 - DNA, 25 bp, Probe sequence
atgcaacgaatttttatcctataat

SEQ ID NO: 109788 - DNA, 25 bp, Probe sequence
aacttttcgttaaattgctcatatg

SEQ ID NO: 109789 - DNA, 25 bp, Probe sequence
cttatagcgtaccacatttaaatgt

SEQ ID NO: 109790 - DNA, 25 bp, Probe sequence
cttttcgttaaattgctcatatgca

SEQ ID NO: 109791 - DNA, 25 bp, Probe sequence
gctcatatgcaacgaatttttatcc

SEQ ID NO: 109792 - DNA, 25 bp, Probe sequence
gaaattacacttatagcgtaccaca

SEQ ID NO: 109793 - DNA, 25 bp, Probe sequence
gtatgcaatgaaattacacttatag

SEQ ID NO: 109794 - DNA, 25 bp, Probe sequence
tgataagattttgtaaacttttcgt

SEQ ID NO: 109795 - DNA, 25 bp, Probe sequence
tccccttcacattcttaatcgtgta

SEQ ID NO: 109796 - DNA, 25 bp, Probe sequence
taataactttctttaagagtttgat

SEQ ID NO: 109797 - DNA, 25 bp, Probe sequence
taatcgtgtaatatgtatgcaatga

SEQ ID NO: 109798 - DNA, 25 bp, Probe sequence
tacacttatagcgtaccacatttaa

SEQ ID NO: 109799 - DNA, 25 bp, Probe sequence
ttttatcctataattcaagaacaaa

SEQ ID NO: 109800 - DNA, 25 bp, Probe sequence
ataagaaagatgtttgtgattgaag

SEQ ID NO: 109801 - DNA, 25 bp, Probe sequence
atgtttgtgattgaaggagtgagtg

SEQ ID NO: 109802 - DNA, 25 bp, Probe sequence
agatgtttgtgattgaaggagtgag

SEQ ID NO: 109803 - DNA, 25 bp, Probe sequence
agaaagatgtttgtgattgaaggag

SEQ ID NO: 109804 - DNA, 25 bp, Probe sequence
aaagatgtttgtgattgaaggagtg

SEQ ID NO: 109805 - DNA, 25 bp, Probe sequence
aagaaagatgtttgtgattgaagga

SEQ ID NO: 109806 - DNA, 25 bp, Probe sequence
aagatgtttgtgattgaaggagtga

SEQ ID NO: 109807 - DNA, 25 bp, Probe sequence
aataagaaagatgtttgtgattgaa

SEQ ID NO: 109808 - DNA, 25 bp, Probe sequence
gaaagatgtttgtgattgaaggagt

SEQ ID NO: 109809 - DNA, 25 bp, Probe sequence
gaaataagaaagatgtttgtgattg

SEQ ID NO: 109810 - DNA, 25 bp, Probe sequence
gatgtttgtgattgaaggagtgagt

SEQ ID NO: 109811 - DNA, 25 bp, Probe sequence
gtttgtgattgaaggagtgagtgag

SEQ ID NO: 109812 - DNA, 25 bp, Probe sequence
tgtttgtgattgaaggagtgagtga

SEQ ID NO: 109813 - DNA, 25 bp, Probe sequence
taagaaagatgtttgtgattgaagg

SEQ ID NO: 109814 - DNA, 25 bp, Probe sequence
tttgtgattgaaggagtgagtgagg

SEQ ID NO: 109815 - DNA, 25 bp, Probe sequence
accactcttaaacgtcaatatactt

SEQ ID NO: 109816 - DNA, 25 bp, Probe sequence
acgtcaatatactttaagaaaaatg

SEQ ID NO: 109817 - DNA, 25 bp, Probe sequence
actaaccactcttaaacgtcaatat

SEQ ID NO: 109818 - DNA, 25 bp, Probe sequence
aaaaatgaggcttatattttatata

SEQ ID NO: 109819 - DNA, 25 bp, Probe sequence
aaccactcttaaacgtcaatatact

SEQ ID NO: 109820 - DNA, 25 bp, Probe sequence
aatgaggcttatattttatataact

SEQ ID NO: 109821 - DNA, 25 bp, Probe sequence
cactcttaaacgtcaatatacttta

SEQ ID NO: 109822 - DNA, 25 bp, Probe sequence
ctaaccactcttaaacgtcaatata

SEQ ID NO: 109823 - DNA, 25 bp, Probe sequence
ctcttaaacgtcaatatactttaag

SEQ ID NO: 109824 - DNA, 25 bp, Probe sequence
cggatatatgaaaaacttacttgat

SEQ ID NO: 109825 - DNA, 25 bp, Probe sequence
ccactcttaaacgtcaatatacttt

SEQ ID NO: 109826 - DNA, 25 bp, Probe sequence
gatatatgaaaaacttacttgattt

SEQ ID NO: 109827 - DNA, 25 bp, Probe sequence
ggatatatgaaaaacttacttgatt

SEQ ID NO: 109828 - DNA, 25 bp, Probe sequence
taaccactcttaaacgtcaatatac

SEQ ID NO: 109829 - DNA, 25 bp, Probe sequence
tatgaaaaacttacttgattttaat

SEQ ID NO: 109830 - DNA, 25 bp, Probe sequence
atatcctgagagacatgtactataa

SEQ ID NO: 109831 - DNA, 25 bp, Probe sequence
aactcgagctgaaaagatcatcatt

SEQ ID NO: 109832 - DNA, 25 bp, Probe sequence
aagatcatcatttcagttcgagttt

SEQ ID NO: 109833 - DNA, 25 bp, Probe sequence
catttcagttcgagtttttttgtgt

SEQ ID NO: 109834 - DNA, 25 bp, Probe sequence
gaattttctttatatcctgagagac

SEQ ID NO: 109835 - DNA, 25 bp, Probe sequence
gagacatgtactataatgtttgtga

SEQ ID NO: 109836 - DNA, 25 bp, Probe sequence
gagtttttttgtgtaacatctgttg

SEQ ID NO: 109837 - DNA, 25 bp, Probe sequence
gataggtagcgacaaggacctttta

SEQ ID NO: 109838 - DNA, 25 bp, Probe sequence
gtaacatctgttgataggtagcgac

SEQ ID NO: 109839 - DNA, 25 bp, Probe sequence
gtgcgatataacaagctttttaggc

SEQ ID NO: 109840 - DNA, 25 bp, Probe sequence
ggaccttttaatgttgtgttttgtg

SEQ ID NO: 109841 - DNA, 25 bp, Probe sequence
ggcaccaatatttaaaactcgagct

SEQ ID NO: 109842 - DNA, 25 bp, Probe sequence
taatgttgtgttttgtgcgatataa

SEQ ID NO: 109843 - DNA, 25 bp, Probe sequence
tataaaatcattctaaaaacaccga

SEQ ID NO: 109844 - DNA, 25 bp, Probe sequence
tataacaagctttttaggctattaa

SEQ ID NO: 109845 - DNA, 25 bp, Probe sequence
ataactcacctgaaattacaaaagt

SEQ ID NO: 109846 - DNA, 25 bp, Probe sequence
atcggcttttatttattgccaaatc

SEQ ID NO: 109847 - DNA, 25 bp, Probe sequence
aatgccacataaactttaagtcgat

SEQ ID NO: 109848 - DNA, 25 bp, Probe sequence
catttcgcaaactattactacttta

SEQ ID NO: 109849 - DNA, 25 bp, Probe sequence
gataataatcatataactcacctga

SEQ ID NO: 109850 - DNA, 25 bp, Probe sequence
gatactcatttcgcaaactattact

SEQ ID NO: 109851 - DNA, 25 bp, Probe sequence
gatacaaactagacaatcatttttt

SEQ ID NO: 109852 - DNA, 25 bp, Probe sequence
gattgatactcatttcgcaaactat

SEQ ID NO: 109853 - DNA, 25 bp, Probe sequence
ttaagtcgataatcattttacggtt

SEQ ID NO: 109854 - DNA, 25 bp, Probe sequence
ggcttttatttattgccaaatcttc

SEQ ID NO: 109855 - DNA, 25 bp, Probe sequence
tgaatatgcgtaaataatgcggttt

SEQ ID NO: 109856 - DNA, 25 bp, Probe sequence
tcgcaaactattactactttagagt

SEQ ID NO: 109857 - DNA, 25 bp, Probe sequence
taatcattttacggttatcggcttt

SEQ ID NO: 109858 - DNA, 25 bp, Probe sequence
tacggttatcggcttttatttattg

SEQ ID NO: 109859 - DNA, 25 bp, Probe sequence
tattgccaaatcttcagagatacaa

SEQ ID NO: 109860 - DNA, 25 bp, Probe sequence
ataaaatcaacatacaaatcgtttt

SEQ ID NO: 109861 - DNA, 25 bp, Probe sequence
atcaacatacaaatcgttttatttg

SEQ ID NO: 109862 - DNA, 25 bp, Probe sequence
acatacaaatcgttttatttggagg

SEQ ID NO: 109863 - DNA, 25 bp, Probe sequence
aaataaaatcaacatacaaatcgtt

SEQ ID NO: 109864 - DNA, 25 bp, Probe sequence
aaatcaacatacaaatcgttttatt

SEQ ID NO: 109865 - DNA, 25 bp, Probe sequence
aaaatcaacatacaaatcgttttat

SEQ ID NO: 109866 - DNA, 25 bp, Probe sequence
aacatacaaatcgttttatttggag

SEQ ID NO: 109867 - DNA, 25 bp, Probe sequence
aatcaacatacaaatcgttttattt

SEQ ID NO: 109868 - DNA, 25 bp, Probe sequence
aataaaatcaacatacaaatcgttt

SEQ ID NO: 109869 - DNA, 25 bp, Probe sequence
caacatacaaatcgttttatttgga

SEQ ID NO: 109870 - DNA, 25 bp, Probe sequence
catacaaatcgttttatttggaggt

SEQ ID NO: 109871 - DNA, 25 bp, Probe sequence
gtcatctattaaataaaatcaacat

SEQ ID NO: 109872 - DNA, 25 bp, Probe sequence
tcaacatacaaatcgttttatttgg

SEQ ID NO: 109873 - DNA, 25 bp, Probe sequence
taaaatcaacatacaaatcgtttta

SEQ ID NO: 109874 - DNA, 25 bp, Probe sequence
taaataaaatcaacatacaaatcgt

SEQ ID NO: 109875 - DNA, 25 bp, Probe sequence
acccctaatcatgaagttggtttag

SEQ ID NO: 109876 - DNA, 25 bp, Probe sequence
gacaaccagcggtgactaggggttt

SEQ ID NO: 109877 - DNA, 25 bp, Probe sequence
ttagacaaccagcggtgactagggg

SEQ ID NO: 109878 - DNA, 25 bp, Probe sequence
agacaaccagcggtgactaggggtt

SEQ ID NO: 109879 - DNA, 25 bp, Probe sequence
agttggtttagacaaccagcggtga

SEQ ID NO: 109880 - DNA, 25 bp, Probe sequence
aagttggtttagacaaccagcggtg

SEQ ID NO: 109881 - DNA, 25 bp, Probe sequence
cccctaatcatgaagttggtttaga

SEQ ID NO: 109882 - DNA, 25 bp, Probe sequence
gaagttggtttagacaaccagcggt

SEQ ID NO: 109883 - DNA, 25 bp, Probe sequence
gttggtttagacaaccagcggtgac

SEQ ID NO: 109884 - DNA, 25 bp, Probe sequence
gtttagacaaccagcggtgactagg

SEQ ID NO: 109885 - DNA, 25 bp, Probe sequence
ggtttagacaaccagcggtgactag

SEQ ID NO: 109886 - DNA, 25 bp, Probe sequence
tttagacaaccagcggtgactaggg

SEQ ID NO: 109887 - DNA, 25 bp, Probe sequence
tagacaaccagcggtgactaggggt

SEQ ID NO: 109888 - DNA, 25 bp, Probe sequence
taaaaaacccctaatcatgaagttg

SEQ ID NO: 109889 - DNA, 25 bp, Probe sequence
ttggtttagacaaccagcggtgact

SEQ ID NO: 109890 - DNA, 25 bp, Probe sequence
attcttgtcccattaacgcatttta

SEQ ID NO: 109891 - DNA, 25 bp, Probe sequence
atgtgaatcatatcgtttaaaagca

SEQ ID NO: 109892 - DNA, 25 bp, Probe sequence
acgttgttgaattattcttgtccca

SEQ ID NO: 109893 - DNA, 25 bp, Probe sequence
actccattctagtactaatgcgcat

SEQ ID NO: 109894 - DNA, 25 bp, Probe sequence
aaagtgcaatatgttttcgaaaata

SEQ ID NO: 109895 - DNA, 25 bp, Probe sequence
aatgcgcatgtaatattgttttagt

SEQ ID NO: 109896 - DNA, 25 bp, Probe sequence
gcgactttcataacaaccaaactat

SEQ ID NO: 109897 - DNA, 25 bp, Probe sequence
gaattattcttgtcccattaacgca

SEQ ID NO: 109898 - DNA, 25 bp, Probe sequence
gaaaaaactccattctagtactaat

SEQ ID NO: 109899 - DNA, 25 bp, Probe sequence
gagaattattctcaagtattatagt

SEQ ID NO: 109900 - DNA, 25 bp, Probe sequence
gagacttctgtgagctgattatttt

SEQ ID NO: 109901 - DNA, 25 bp, Probe sequence
gtatgataagtgcaatgactcagta

SEQ ID NO: 109902 - DNA, 25 bp, Probe sequence
gtaaacgcttactatataatgtgaa

SEQ ID NO: 109903 - DNA, 25 bp, Probe sequence
taagcgcgactttcataacaaccaa

SEQ ID NO: 109904 - DNA, 25 bp, Probe sequence
ttaacgcattttaagcgcgactttc

SEQ ID NO: 109905 - DNA, 25 bp, Probe sequence
atcgtttctgaagcgtgtttgtagg

SEQ ID NO: 109906 - DNA, 25 bp, Probe sequence
aaatatcgtttctgaagcgtgtttg

SEQ ID NO: 109907 - DNA, 25 bp, Probe sequence
aatatataggaacacgtatcatgat

SEQ ID NO: 109908 - DNA, 25 bp, Probe sequence
cgtttctgaagcgtgtttgtaggtc

SEQ ID NO: 109909 - DNA, 25 bp, Probe sequence
gcgtgtttgtaggtcagtctagcgg

SEQ ID NO: 109910 - DNA, 25 bp, Probe sequence
gaagcgtgtttgtaggtcagtctag

SEQ ID NO: 109911 - DNA, 25 bp, Probe sequence
gtgtttgtaggtcagtctagcggta

SEQ ID NO: 109912 - DNA, 25 bp, Probe sequence
gtttgtaggtcagtctagcggtaag

SEQ ID NO: 109913 - DNA, 25 bp, Probe sequence
gtaggtcagtctagcggtaagtctt

SEQ ID NO: 109914 - DNA, 25 bp, Probe sequence
ggtcagtctagcggtaagtcttaac

SEQ ID NO: 109915 - DNA, 25 bp, Probe sequence
ggaacacgtatcatgatattaggat

SEQ ID NO: 109916 - DNA, 25 bp, Probe sequence
tcagtctagcggtaagtcttaacat

SEQ ID NO: 109917 - DNA, 25 bp, Probe sequence
taatagcagtaggatggtttttaat

SEQ ID NO: 109918 - DNA, 25 bp, Probe sequence
taagtcttaacatttaacggcgttg

SEQ ID NO: 109919 - DNA, 25 bp, Probe sequence
taacatttaacggcgttgtttagat

SEQ ID NO: 109920 - DNA, 25 bp, Probe sequence
atatgcaaagtcatcgtttgtttta

SEQ ID NO: 109921 - DNA, 25 bp, Probe sequence
atctcgtacattattaaaattttct

SEQ ID NO: 109922 - DNA, 25 bp, Probe sequence
aaatttgagatacttttttgtcatt

SEQ ID NO: 109923 - DNA, 25 bp, Probe sequence
aactaacacaataatctcgtacatt

SEQ ID NO: 109924 - DNA, 25 bp, Probe sequence
gcgaatgtgctgtaaaagtttttcc

SEQ ID NO: 109925 - DNA, 25 bp, Probe sequence
gaagttcaatatgcaaagtcatcgt

SEQ ID NO: 109926 - DNA, 25 bp, Probe sequence
gagatacttttttgtcatttttatg

SEQ ID NO: 109927 - DNA, 25 bp, Probe sequence
gtttttccaaggtgatattacataa

SEQ ID NO: 109928 - DNA, 25 bp, Probe sequence
gttgtcatgtaaaggacgatgatgt

SEQ ID NO: 109929 - DNA, 25 bp, Probe sequence
gtaaagattaattagttgtcatgta

SEQ ID NO: 109930 - DNA, 25 bp, Probe sequence
gtcatcgtttgttttaatatgtgga

SEQ ID NO: 109931 - DNA, 25 bp, Probe sequence
gtgctgtaaaagtttttccaaggtg

SEQ ID NO: 109932 - DNA, 25 bp, Probe sequence
gggataaagtaaagagcgaatgtgc

SEQ ID NO: 109933 - DNA, 25 bp, Probe sequence
tgattttttgaacttaatgaaacta

SEQ ID NO: 109934 - DNA, 25 bp, Probe sequence
ttgtcatttttatgtaactaacaca

SEQ ID NO: 109935 - DNA, 25 bp, Probe sequence
atttacttataccctaacatgattt

SEQ ID NO: 109936 - DNA, 25 bp, Probe sequence
atattttttcaaccattgttatagg

SEQ ID NO: 109937 - DNA, 25 bp, Probe sequence
atatccttgtaatccgataagaatt

SEQ ID NO: 109938 - DNA, 25 bp, Probe sequence
ataccctaacatgatttttatactc

SEQ ID NO: 109939 - DNA, 25 bp, Probe sequence
aacatgatttttatactctttgaaa

SEQ ID NO: 109940 - DNA, 25 bp, Probe sequence
aatgatagccccctatatatatgtt

SEQ ID NO: 109941 - DNA, 25 bp, Probe sequence
aatcgctcaatatccttgtaatccg

SEQ ID NO: 109942 - DNA, 25 bp, Probe sequence
aatatattttacagaattttatcta

SEQ ID NO: 109943 - DNA, 25 bp, Probe sequence
caaccattgttataggaggtcttat

SEQ ID NO: 109944 - DNA, 25 bp, Probe sequence
gccccctatatatatgtttatttac

SEQ ID NO: 109945 - DNA, 25 bp, Probe sequence
gatagccccctatatatatgtttat

SEQ ID NO: 109946 - DNA, 25 bp, Probe sequence
gtttatttacttataccctaacatg

SEQ ID NO: 109947 - DNA, 25 bp, Probe sequence
tcgctcaatatccttgtaatccgat

SEQ ID NO: 109948 - DNA, 25 bp, Probe sequence
taaaaaaatcgctcaatatccttgt

SEQ ID NO: 109949 - DNA, 25 bp, Probe sequence
tagtaatattttttcaaccattgtt

SEQ ID NO: 109950 - DNA, 25 bp, Probe sequence
ataccaaaccataatcatctataga

SEQ ID NO: 109951 - DNA, 25 bp, Probe sequence
ataacaattcacgatataagggctg

SEQ ID NO: 109952 - DNA, 25 bp, Probe sequence
cagttaattagaatagctcaatgct

SEQ ID NO: 109953 - DNA, 25 bp, Probe sequence
gctgtgtttggcatagccctttaga

SEQ ID NO: 109954 - DNA, 25 bp, Probe sequence
gcactcataccaaaccataatcatc

SEQ ID NO: 109955 - DNA, 25 bp, Probe sequence
gcaagtattttctaaaacaatcatt

SEQ ID NO: 109956 - DNA, 25 bp, Probe sequence
gagctgaaattaatataacgtcgtt

SEQ ID NO: 109957 - DNA, 25 bp, Probe sequence
gatataagggctgtgtttggcatag

SEQ ID NO: 109958 - DNA, 25 bp, Probe sequence
gtatataggtttgacgtggatttcg

SEQ ID NO: 109959 - DNA, 25 bp, Probe sequence
gtggatttcgattgcagttaattag

SEQ ID NO: 109960 - DNA, 25 bp, Probe sequence
ggcatagccctttagatatacactt

SEQ ID NO: 109961 - DNA, 25 bp, Probe sequence
taagagcactcataccaaaccataa

SEQ ID NO: 109962 - DNA, 25 bp, Probe sequence
taacgcttatgttataagagcactc

SEQ ID NO: 109963 - DNA, 25 bp, Probe sequence
ttagatatacacttaattcctatta

SEQ ID NO: 109964 - DNA, 25 bp, Probe sequence
ttgacgtggatttcgattgcagtta

SEQ ID NO: 109965 - DNA, 25 bp, Probe sequence
atcttagtttataaacattttctgt

SEQ ID NO: 109966 - DNA, 25 bp, Probe sequence
actaggaaaatatacatttcgtaat

SEQ ID NO: 109967 - DNA, 25 bp, Probe sequence
acatttcgtaataataataatcgtt

SEQ ID NO: 109968 - DNA, 25 bp, Probe sequence
aagctgattttttgtttagatgcgt

SEQ ID NO: 109969 - DNA, 25 bp, Probe sequence
cattttctgttaatttgttatatcc

SEQ ID NO: 109970 - DNA, 25 bp, Probe sequence
gctgattttttgtttagatgcgttt

SEQ ID NO: 109971 - DNA, 25 bp, Probe sequence
gaacaattaatgaacttcttatttt

SEQ ID NO: 109972 - DNA, 25 bp, Probe sequence
gattttttgtttagatgcgtttgtt

SEQ ID NO: 109973 - DNA, 25 bp, Probe sequence
gtgaacaattaatgaacttcttatt

SEQ ID NO: 109974 - DNA, 25 bp, Probe sequence
gtgtgataagctgattttttgttta

SEQ ID NO: 109975 - DNA, 25 bp, Probe sequence
tctgttaatttgttatatcctttta

SEQ ID NO: 109976 - DNA, 25 bp, Probe sequence
taatttgttatatccttttaactag

SEQ ID NO: 109977 - DNA, 25 bp, Probe sequence
taatcgttatcattgaaaaagtgtt

SEQ ID NO: 109978 - DNA, 25 bp, Probe sequence
ttttttgtttagatgcgtttgttga

SEQ ID NO: 109979 - DNA, 25 bp, Probe sequence
ttttgtttagatgcgtttgttgaaa

SEQ ID NO: 109980 - DNA, 25 bp, Probe sequence
atgatttaacatttacgcacatatg

SEQ ID NO: 109981 - DNA, 25 bp, Probe sequence
agatggcagtagtttttttatgatt

SEQ ID NO: 109982 - DNA, 25 bp, Probe sequence
agcgattaacgctttcaattttata

SEQ ID NO: 109983 - DNA, 25 bp, Probe sequence
aacatttacgcacatatgtgttcac

SEQ ID NO: 109984 - DNA, 25 bp, Probe sequence
aatgaatcatataagcactactgct

SEQ ID NO: 109985 - DNA, 25 bp, Probe sequence
aataaggatgctgggctagcgatta

SEQ ID NO: 109986 - DNA, 25 bp, Probe sequence
gctgggctagcgattaacgctttca

SEQ ID NO: 109987 - DNA, 25 bp, Probe sequence
gcactactgctgttgtaaagatggc

SEQ ID NO: 109988 - DNA, 25 bp, Probe sequence
gattacatctaagtatagtcacggc

SEQ ID NO: 109989 - DNA, 25 bp, Probe sequence
gattaacgctttcaattttatataa

SEQ ID NO: 109990 - DNA, 25 bp, Probe sequence
gtatagtcacggctatgttaggaca

SEQ ID NO: 109991 - DNA, 25 bp, Probe sequence
gtcacggctatgttaggacaatgat

SEQ ID NO: 109992 - DNA, 25 bp, Probe sequence
gggctagcgattaacgctttcaatt

SEQ ID NO: 109993 - DNA, 25 bp, Probe sequence
ggatgctgggctagcgattaacgct

SEQ ID NO: 109994 - DNA, 25 bp, Probe sequence
tcatataagcactactgctgttgta

SEQ ID NO: 109995 - DNA, 25 bp, Probe sequence
attctttgtttcaacgtataatcta

SEQ ID NO: 109996 - DNA, 25 bp, Probe sequence
aaaatcgatgcatttgtttgttaaa

SEQ ID NO: 109997 - DNA, 25 bp, Probe sequence
aatggtagtgtgtatatatgtggat

SEQ ID NO: 109998 - DNA, 25 bp, Probe sequence
aatcgatgcatttgtttgttaaata

SEQ ID NO: 109999 - DNA, 25 bp, Probe sequence
aattctttgtttcaacgtataatct

SEQ ID NO: 110000 - DNA, 25 bp, Probe sequence
ctttgtttcaacgtataatctaata

SEQ ID NO: 110001 - DNA, 25 bp, Probe sequence
gcatttgtttgttaaataactttgt

SEQ ID NO: 110002 - DNA, 25 bp, Probe sequence
gatgcatttgtttgttaaataactt

SEQ ID NO: 110003 - DNA, 25 bp, Probe sequence
gtttcaacgtataatctaataatag

SEQ ID NO: 110004 - DNA, 25 bp, Probe sequence
gtatatatgtggataggggtgtagt

SEQ ID NO: 110005 - DNA, 25 bp, Probe sequence
gtaaaatcgatgcatttgtttgtta

SEQ ID NO: 110006 - DNA, 25 bp, Probe sequence
gtgtgtatatatgtggataggggtg

SEQ ID NO: 110007 - DNA, 25 bp, Probe sequence
ggtagtgtgtatatatgtggatagg

SEQ ID NO: 110008 - DNA, 25 bp, Probe sequence
tatgtggataggggtgtagttatta

SEQ ID NO: 110009 - DNA, 25 bp, Probe sequence
ttctttgtttcaacgtataatctaa

SEQ ID NO: 110010 - DNA, 25 bp, Probe sequence
atatcatcatgcaattttagtaagt

SEQ ID NO: 110011 - DNA, 25 bp, Probe sequence
aaatatttattttatgcatcttttt

SEQ ID NO: 110012 - DNA, 25 bp, Probe sequence
aacttgcttcatggatattttgtaa

SEQ ID NO: 110013 - DNA, 25 bp, Probe sequence
aatataccaattgtaacgatgatac

SEQ ID NO: 110014 - DNA, 25 bp, Probe sequence
aattgttttatgcgagttgtttgtt

SEQ ID NO: 110015 - DNA, 25 bp, Probe sequence
cgctcatatgttgcgaatggtgttt

SEQ ID NO: 110016 - DNA, 25 bp, Probe sequence
gcatctttttatattgaaaacctat

SEQ ID NO: 110017 - DNA, 25 bp, Probe sequence
gattaacgagttgtagtgtgctatt

SEQ ID NO: 110018 - DNA, 25 bp, Probe sequence
gtagtgtgctatttatcgaagatgt

SEQ ID NO: 110019 - DNA, 25 bp, Probe sequence
ggtgttttatattaatcattacata

SEQ ID NO: 110020 - DNA, 25 bp, Probe sequence
tcgtcggttatcatatcatcatgca

SEQ ID NO: 110021 - DNA, 25 bp, Probe sequence
tttagggtagaatatatcgctcata

SEQ ID NO: 110022 - DNA, 25 bp, Probe sequence
tttaatataaacttgcttcatggat

SEQ ID NO: 110023 - DNA, 25 bp, Probe sequence
ttatgcgagttgtttgtttaatata

SEQ ID NO: 110024 - DNA, 25 bp, Probe sequence
ttaattaacatttcgtcggttatca

SEQ ID NO: 110025 - DNA, 25 bp, Probe sequence
ataacgtgagcatcaatcatcatac

SEQ ID NO: 110026 - DNA, 25 bp, Probe sequence
ataatatcttgttacgacgcatttg

SEQ ID NO: 110027 - DNA, 25 bp, Probe sequence
atgctcacgtaagttggctggaatc

SEQ ID NO: 110028 - DNA, 25 bp, Probe sequence
agtgattttaaactatactgcctaa

SEQ ID NO: 110029 - DNA, 25 bp, Probe sequence
agttggctggaatcatatcatgtca

SEQ ID NO: 110030 - DNA, 25 bp, Probe sequence
agcatcaatcatcatactcaaacga

SEQ ID NO: 110031 - DNA, 25 bp, Probe sequence
aaaactcacgttaatgttagtcagt

SEQ ID NO: 110032 - DNA, 25 bp, Probe sequence
aaggtgaatacacgatggcatcatt

SEQ ID NO: 110033 - DNA, 25 bp, Probe sequence
cacgatggcatcattcaaaatcatg

SEQ ID NO: 110034 - DNA, 25 bp, Probe sequence
ctcaaacgatgatttaaaactcacg

SEQ ID NO: 110035 - DNA, 25 bp, Probe sequence
gacagtatcattgcgcagtgatttt

SEQ ID NO: 110036 - DNA, 25 bp, Probe sequence
gacgtctgacagtatcattgcgcag

SEQ ID NO: 110037 - DNA, 25 bp, Probe sequence
gagactttaatgctcacgtaagttg

SEQ ID NO: 110038 - DNA, 25 bp, Probe sequence
gttacgacgcatttgagactttaat

SEQ ID NO: 110039 - DNA, 25 bp, Probe sequence
tatactgcctaaatgtttactgtta

SEQ ID NO: 110040 - DNA, 25 bp, Probe sequence
attgttaacgagatgaacggtaaat

SEQ ID NO: 110041 - DNA, 25 bp, Probe sequence
aggactcctctctatttactatcct

SEQ ID NO: 110042 - DNA, 25 bp, Probe sequence
aggttattagttttttacatctcat

SEQ ID NO: 110043 - DNA, 25 bp, Probe sequence
agcgcaatggataatcgaactggaa

SEQ ID NO: 110044 - DNA, 25 bp, Probe sequence
acatctcatattgtatcgtactgta

SEQ ID NO: 110045 - DNA, 25 bp, Probe sequence
aaatgttttagcgcaatggataatc

SEQ ID NO: 110046 - DNA, 25 bp, Probe sequence
aacttgttaggccttaatttcatag

SEQ ID NO: 110047 - DNA, 25 bp, Probe sequence
ctctctatttactatcctcattata

SEQ ID NO: 110048 - DNA, 25 bp, Probe sequence
gcgtgtcaaaacttgttaggcctta

SEQ ID NO: 110049 - DNA, 25 bp, Probe sequence
gaactggaatcatctcgcgtgtcaa

SEQ ID NO: 110050 - DNA, 25 bp, Probe sequence
ggaatcatctcgcgtgtcaaaactt

SEQ ID NO: 110051 - DNA, 25 bp, Probe sequence
tcatctcgcgtgtcaaaacttgtta

SEQ ID NO: 110052 - DNA, 25 bp, Probe sequence
tatcctcattatagtattttgtgaa

SEQ ID NO: 110053 - DNA, 25 bp, Probe sequence
tatcgtactgtattcaaaattgtta

SEQ ID NO: 110054 - DNA, 25 bp, Probe sequence
ttaaggactcctctctatttactat

SEQ ID NO: 110055 - DNA, 25 bp, Probe sequence
atatgactgtggcatagtattatgc

SEQ ID NO: 110056 - DNA, 25 bp, Probe sequence
atgccacaagcatatgtttaacata

SEQ ID NO: 110057 - DNA, 25 bp, Probe sequence
acgattgcagtttaatgtagtatga

SEQ ID NO: 110058 - DNA, 25 bp, Probe sequence
acagttgttcaatataagtgtcaaa

SEQ ID NO: 110059 - DNA, 25 bp, Probe sequence
aaggttgtgtttgtattaatgtgat

SEQ ID NO: 110060 - DNA, 25 bp, Probe sequence
aatattttttgtggataatcagtga

SEQ ID NO: 110061 - DNA, 25 bp, Probe sequence
ctccctcctttatatttatacaatt

SEQ ID NO: 110062 - DNA, 25 bp, Probe sequence
gaaagtactaatattttttgtggat

SEQ ID NO: 110063 - DNA, 25 bp, Probe sequence
gttgtgtttgtattaatgtgatttg

SEQ ID NO: 110064 - DNA, 25 bp, Probe sequence
gtatgaataaaaaatgccacaagca

SEQ ID NO: 110065 - DNA, 25 bp, Probe sequence
gtatgtatacgattgcagtttaatg

SEQ ID NO: 110066 - DNA, 25 bp, Probe sequence
gtctccctcctttatatttatacaa

SEQ ID NO: 110067 - DNA, 25 bp, Probe sequence
taatcagtgatatgtatgtatacga

SEQ ID NO: 110068 - DNA, 25 bp, Probe sequence
tatgtttaacatatgactgtggcat

SEQ ID NO: 110069 - DNA, 25 bp, Probe sequence
tattaatatattacagttgttcaat

SEQ ID NO: 110070 - DNA, 25 bp, Probe sequence
atgatcgaagggggtaagtgtatgt

SEQ ID NO: 110071 - DNA, 25 bp, Probe sequence
atacccccttcaacatgatcgaagg

SEQ ID NO: 110072 - DNA, 25 bp, Probe sequence
ataaagatacccccttcaacatgat

SEQ ID NO: 110073 - DNA, 25 bp, Probe sequence
aaataaagatacccccttcaacatg

SEQ ID NO: 110074 - DNA, 25 bp, Probe sequence
aagaacgatttaatagatataggct

SEQ ID NO: 110075 - DNA, 25 bp, Probe sequence
gataggaggttagacaacccgacgt

SEQ ID NO: 110076 - DNA, 25 bp, Probe sequence
gacaacccgacgtattaatactttg

SEQ ID NO: 110077 - DNA, 25 bp, Probe sequence
gatacccccttcaacatgatcgaag

SEQ ID NO: 110078 - DNA, 25 bp, Probe sequence
ggctaagtttatagataggaggtta

SEQ ID NO: 110079 - DNA, 25 bp, Probe sequence
tcaacatgatcgaagggggtaagtg

SEQ ID NO: 110080 - DNA, 25 bp, Probe sequence
taaagatacccccttcaacatgatc

SEQ ID NO: 110081 - DNA, 25 bp, Probe sequence
taggaggttagacaacccgacgtat

SEQ ID NO: 110082 - DNA, 25 bp, Probe sequence
tagacaacccgacgtattaatactt

SEQ ID NO: 110083 - DNA, 25 bp, Probe sequence
tatgtagtaggggcgtaagttaaga

SEQ ID NO: 110084 - DNA, 25 bp, Probe sequence
ttagacaacccgacgtattaatact

SEQ ID NO: 110085 - DNA, 25 bp, Probe sequence
attcgcttaaacttataccctgtat

SEQ ID NO: 110086 - DNA, 25 bp, Probe sequence
atatcagagtccttttcgtttaata

SEQ ID NO: 110087 - DNA, 25 bp, Probe sequence
agtattcgcttaaacttataccctg

SEQ ID NO: 110088 - DNA, 25 bp, Probe sequence
aacttataccctgtatacgatgaaa

SEQ ID NO: 110089 - DNA, 25 bp, Probe sequence
cttatatcagagtccttttcgttta

SEQ ID NO: 110090 - DNA, 25 bp, Probe sequence
gcttaaacttataccctgtatacga

SEQ ID NO: 110091 - DNA, 25 bp, Probe sequence
gtattcgcttaaacttataccctgt

SEQ ID NO: 110092 - DNA, 25 bp, Probe sequence
tcgcttaaacttataccctgtatac

SEQ ID NO: 110093 - DNA, 25 bp, Probe sequence
tcagagtccttttcgtttaataaag

SEQ ID NO: 110094 - DNA, 25 bp, Probe sequence
taaacttataccctgtatacgatga

SEQ ID NO: 110095 - DNA, 25 bp, Probe sequence
tatcagagtccttttcgtttaataa

SEQ ID NO: 110096 - DNA, 25 bp, Probe sequence
tatatcagagtccttttcgtttaat

SEQ ID NO: 110097 - DNA, 25 bp, Probe sequence
tattcgcttaaacttataccctgta

SEQ ID NO: 110098 - DNA, 25 bp, Probe sequence
ttatatcagagtccttttcgtttaa

SEQ ID NO: 110099 - DNA, 25 bp, Probe sequence
ttcgcttaaacttataccctgtata

SEQ ID NO: 110100 - DNA, 25 bp, Probe sequence
attgtaatgtgttttctcttatagt

SEQ ID NO: 110101 - DNA, 25 bp, Probe sequence
atttaactcatgcctaatcttactt

SEQ ID NO: 110102 - DNA, 25 bp, Probe sequence
agtttatctagcttaccatcacatc

SEQ ID NO: 110103 - DNA, 25 bp, Probe sequence
acacaactcaactatattttcctaa

SEQ ID NO: 110104 - DNA, 25 bp, Probe sequence
aaccatcacagcttaatttaactca

SEQ ID NO: 110105 - DNA, 25 bp, Probe sequence
aatagactgtgttggtaaccatcac

SEQ ID NO: 110106 - DNA, 25 bp, Probe sequence
gcgactcctattttagcatggtgaa

SEQ ID NO: 110107 - DNA, 25 bp, Probe sequence
gcttaccatcacatcttattgaatc

SEQ ID NO: 110108 - DNA, 25 bp, Probe sequence
gcagtagcagctattatcagcactt

SEQ ID NO: 110109 - DNA, 25 bp, Probe sequence
gaatcttatttgtttgcgactccta

SEQ ID NO: 110110 - DNA, 25 bp, Probe sequence
gttgttgtaataatccagcagtagc

SEQ ID NO: 110111 - DNA, 25 bp, Probe sequence
gtaagcgattacacaactcaactat

SEQ ID NO: 110112 - DNA, 25 bp, Probe sequence
tcttacttagtaacacgttggtgta

SEQ ID NO: 110113 - DNA, 25 bp, Probe sequence
tttcaaatctcttaaatgttcacag

SEQ ID NO: 110114 - DNA, 25 bp, Probe sequence
ttgtccaacctccaaagttgtatgt

SEQ ID NO: 110115 - DNA, 25 bp, Probe sequence
attgtgagcgttctaatataaagtt

SEQ ID NO: 110116 - DNA, 25 bp, Probe sequence
agttgcaacgtaaacaattgaagtt

SEQ ID NO: 110117 - DNA, 25 bp, Probe sequence
aactggcatagaggctattttgaaa

SEQ ID NO: 110118 - DNA, 25 bp, Probe sequence
aagttcaggtttgagctttgctttt

SEQ ID NO: 110119 - DNA, 25 bp, Probe sequence
aagttagttgcaacgtaaacaattg

SEQ ID NO: 110120 - DNA, 25 bp, Probe sequence
caggtttgagctttgcttttttcat

SEQ ID NO: 110121 - DNA, 25 bp, Probe sequence
gaagtttttgatgtgattcagttgt

SEQ ID NO: 110122 - DNA, 25 bp, Probe sequence
gaaaatgataaaggcgtgacaaatt

SEQ ID NO: 110123 - DNA, 25 bp, Probe sequence
gagctttgcttttttcatagatgga

SEQ ID NO: 110124 - DNA, 25 bp, Probe sequence
gttgctacaagtttgtaaaactggc

SEQ ID NO: 110125 - DNA, 25 bp, Probe sequence
gtttgatgaaaaattgttgctacaa

SEQ ID NO: 110126 - DNA, 25 bp, Probe sequence
gtttgagctttgcttttttcataga

SEQ ID NO: 110127 - DNA, 25 bp, Probe sequence
ggcgtgacaaattaaagcaaagttc

SEQ ID NO: 110128 - DNA, 25 bp, Probe sequence
tgtaaaactggcatagaggctattt

SEQ ID NO: 110129 - DNA, 25 bp, Probe sequence
ttgatgtgattcagttgtttgatga

SEQ ID NO: 110130 - DNA, 25 bp, Probe sequence
atacgacttacctcaaagacaaata

SEQ ID NO: 110131 - DNA, 25 bp, Probe sequence
agtccctccattaatcgtagacaaa

SEQ ID NO: 110132 - DNA, 25 bp, Probe sequence
agaaagtgtatggaaggggatatga

SEQ ID NO: 110133 - DNA, 25 bp, Probe sequence
aagtttatgatatatttagagcaat

SEQ ID NO: 110134 - DNA, 25 bp, Probe sequence
aagtccctccattaatcgtagacaa

SEQ ID NO: 110135 - DNA, 25 bp, Probe sequence
caaacatttttcattaaagtttatg

SEQ ID NO: 110136 - DNA, 25 bp, Probe sequence
gacttacctcaaagacaaatattaa

SEQ ID NO: 110137 - DNA, 25 bp, Probe sequence
gtatacgacttacctcaaagacaaa

SEQ ID NO: 110138 - DNA, 25 bp, Probe sequence
tccctccattaatcgtagacaaaaa

SEQ ID NO: 110139 - DNA, 25 bp, Probe sequence
tcaaattttagtatacgacttacct

SEQ ID NO: 110140 - DNA, 25 bp, Probe sequence
tcaagtccctccattaatcgtagac

SEQ ID NO: 110141 - DNA, 25 bp, Probe sequence
tcaatgatttgattatttgtattca

SEQ ID NO: 110142 - DNA, 25 bp, Probe sequence
tagtatacgacttacctcaaagaca

SEQ ID NO: 110143 - DNA, 25 bp, Probe sequence
ttttagtatacgacttacctcaaag

SEQ ID NO: 110144 - DNA, 25 bp, Probe sequence
ttagaataaatttacgtttgaagat

SEQ ID NO: 110145 - DNA, 25 bp, Probe sequence
attctcctatattttatcataaaaa

SEQ ID NO: 110146 - DNA, 25 bp, Probe sequence
atagacctcctaatgatataattct

SEQ ID NO: 110147 - DNA, 25 bp, Probe sequence
atggtttgaagagtatttaacattt

SEQ ID NO: 110148 - DNA, 25 bp, Probe sequence
agacctcctaatgatataattctcc

SEQ ID NO: 110149 - DNA, 25 bp, Probe sequence
acctcctaatgatataattctccta

SEQ ID NO: 110150 - DNA, 25 bp, Probe sequence
aattctcctatattttatcataaaa

SEQ ID NO: 110151 - DNA, 25 bp, Probe sequence
ctcctaatgatataattctcctata

SEQ ID NO: 110152 - DNA, 25 bp, Probe sequence
cctcctaatgatataattctcctat

SEQ ID NO: 110153 - DNA, 25 bp, Probe sequence
gacctcctaatgatataattctcct

SEQ ID NO: 110154 - DNA, 25 bp, Probe sequence
gagtatttaacatttataggaggac

SEQ ID NO: 110155 - DNA, 25 bp, Probe sequence
gatataattctcctatattttatca

SEQ ID NO: 110156 - DNA, 25 bp, Probe sequence
gtatttaacatttataggaggacat

SEQ ID NO: 110157 - DNA, 25 bp, Probe sequence
taattctcctatattttatcataaa

SEQ ID NO: 110158 - DNA, 25 bp, Probe sequence
tagacctcctaatgatataattctc

SEQ ID NO: 110159 - DNA, 25 bp, Probe sequence
tataattctcctatattttatcata

SEQ ID NO: 110160 - DNA, 25 bp, Probe sequence
attaaactgactatcaacaccaacg

SEQ ID NO: 110161 - DNA, 25 bp, Probe sequence
attatatattgaatttacgcaaaaa

SEQ ID NO: 110162 - DNA, 25 bp, Probe sequence
atcaacaccaacgatggaaatgcgt

SEQ ID NO: 110163 - DNA, 25 bp, Probe sequence
agtactgaagactaattatcatatt

SEQ ID NO: 110164 - DNA, 25 bp, Probe sequence
accaacgatggaaatgcgtattaga

SEQ ID NO: 110165 - DNA, 25 bp, Probe sequence
actgactatcaacaccaacgatgga

SEQ ID NO: 110166 - DNA, 25 bp, Probe sequence
aaataacatattacttttaagatat

SEQ ID NO: 110167 - DNA, 25 bp, Probe sequence
aacaccaacgatggaaatgcgtatt

SEQ ID NO: 110168 - DNA, 25 bp, Probe sequence
aactgactatcaacaccaacgatgg

SEQ ID NO: 110169 - DNA, 25 bp, Probe sequence
ctgactatcaacaccaacgatggaa

SEQ ID NO: 110170 - DNA, 25 bp, Probe sequence
gactatcaacaccaacgatggaaat

SEQ ID NO: 110171 - DNA, 25 bp, Probe sequence
gatggaaatgcgtattagaataaaa

SEQ ID NO: 110172 - DNA, 25 bp, Probe sequence
taaactgactatcaacaccaacgat

SEQ ID NO: 110173 - DNA, 25 bp, Probe sequence
tatttttgagaaggaggtggaaggc

SEQ ID NO: 110174 - DNA, 25 bp, Probe sequence
ttatcatattaaactgactatcaac

SEQ ID NO: 110175 - DNA, 25 bp, Probe sequence
atttggatgagatatttggagagaa

SEQ ID NO: 110176 - DNA, 25 bp, Probe sequence
atatttcttctcagaaactgctatt

SEQ ID NO: 110177 - DNA, 25 bp, Probe sequence
atatctcttatagaaaagggtgtac

SEQ ID NO: 110178 - DNA, 25 bp, Probe sequence
atctatgactcaaaaggagctagca

SEQ ID NO: 110179 - DNA, 25 bp, Probe sequence
agtcgacaatatatttcttctcaga

SEQ ID NO: 110180 - DNA, 25 bp, Probe sequence
agtttcactatctatgactcaaaag

SEQ ID NO: 110181 - DNA, 25 bp, Probe sequence
aaatagctagagtttcactatctat

SEQ ID NO: 110182 - DNA, 25 bp, Probe sequence
aacccctctctatcactatgtaaaa

SEQ ID NO: 110183 - DNA, 25 bp, Probe sequence
aagggtgtacataacccctctctat

SEQ ID NO: 110184 - DNA, 25 bp, Probe sequence
cccctctctatcactatgtaaaaat

SEQ ID NO: 110185 - DNA, 25 bp, Probe sequence
gaaagataatctaaaagtcgacaat

SEQ ID NO: 110186 - DNA, 25 bp, Probe sequence
gagagaaaccacaataaaagagctt

SEQ ID NO: 110187 - DNA, 25 bp, Probe sequence
gtaactagacaaacaatatctctta

SEQ ID NO: 110188 - DNA, 25 bp, Probe sequence
tgtaaaaatatttgttcggtgttga

SEQ ID NO: 110189 - DNA, 25 bp, Probe sequence
tctcagaaactgctattattttgaa

SEQ ID NO: 110190 - DNA, 25 bp, Probe sequence
atttattctggcgtcaaaatgccca

SEQ ID NO: 110191 - DNA, 25 bp, Probe sequence
ataacacatcagaggttgcccgatt

SEQ ID NO: 110192 - DNA, 25 bp, Probe sequence
atgcccagagtatgggtgtgaccct

SEQ ID NO: 110193 - DNA, 25 bp, Probe sequence
acagtgataaagttacacaacgcat

SEQ ID NO: 110194 - DNA, 25 bp, Probe sequence
aaacttgatatggtgccgagcccta

SEQ ID NO: 110195 - DNA, 25 bp, Probe sequence
aatcatggcaaggcacttaaaactt

SEQ ID NO: 110196 - DNA, 25 bp, Probe sequence
caaagtcatctaacataacacatca

SEQ ID NO: 110197 - DNA, 25 bp, Probe sequence
cacactcgaaaatctgaatattcta

SEQ ID NO: 110198 - DNA, 25 bp, Probe sequence
ccgcacttcacatagtggcggggga

SEQ ID NO: 110199 - DNA, 25 bp, Probe sequence
gagccctaacttagcacaatatagt

SEQ ID NO: 110200 - DNA, 25 bp, Probe sequence
gatttattccagaccatacagtgat

SEQ ID NO: 110201 - DNA, 25 bp, Probe sequence
ggttgcccgatttattccagaccat

SEQ ID NO: 110202 - DNA, 25 bp, Probe sequence
gtgccgagccctaacttagcacaat

SEQ ID NO: 110203 - DNA, 25 bp, Probe sequence
gtggcgggggatttattctggcgtc

SEQ ID NO: 110204 - DNA, 25 bp, Probe sequence
gggtgtgacccttaaatcatggcaa

SEQ ID NO: 110205 - DNA, 25 bp, Probe sequence
ataagaaacgctagtcgcctttgta

SEQ ID NO: 110206 - DNA, 25 bp, Probe sequence
atctaacttgatgtgattcggtaca

SEQ ID NO: 110207 - DNA, 25 bp, Probe sequence
atgtacaccacaatagttagtctaa

SEQ ID NO: 110208 - DNA, 25 bp, Probe sequence
acgccccacaaattcgtttttgatg

SEQ ID NO: 110209 - DNA, 25 bp, Probe sequence
aaattcgtttttgatgtacaccaca

SEQ ID NO: 110210 - DNA, 25 bp, Probe sequence
aacgctagtcgcctttgtaaaatat

SEQ ID NO: 110211 - DNA, 25 bp, Probe sequence
ctttagagtgatgcttgagtgtagt

SEQ ID NO: 110212 - DNA, 25 bp, Probe sequence
gaggcgtttttataatgtgtgattt

SEQ ID NO: 110213 - DNA, 25 bp, Probe sequence
gatgtgattcggtacaattaaatga

SEQ ID NO: 110214 - DNA, 25 bp, Probe sequence
gatgcttgagtgtagtaatgttgaa

SEQ ID NO: 110215 - DNA, 25 bp, Probe sequence
gatatatagtttgaagtggattttg

SEQ ID NO: 110216 - DNA, 25 bp, Probe sequence
gatttggttatttctataattacat

SEQ ID NO: 110217 - DNA, 25 bp, Probe sequence
gtggattttgatttttgttgaacga

SEQ ID NO: 110218 - DNA, 25 bp, Probe sequence
gggttcgatttcaaactttagagtg

SEQ ID NO: 110219 - DNA, 25 bp, Probe sequence
aatgaatgatgtgaggcgtttttat

SEQ ID NO: 110220 - DNA, 25 bp, Probe sequence
actgcatgacgttgaggagtcacac

SEQ ID NO: 110221 - DNA, 25 bp, Probe sequence
aaaaactgcatgacgttgaggagtc

SEQ ID NO: 110222 - DNA, 25 bp, Probe sequence
aatacttcattaacactataataat

SEQ ID NO: 110223 - DNA, 25 bp, Probe sequence
caccgtttctcaaaatacttcatta

SEQ ID NO: 110224 - DNA, 25 bp, Probe sequence
ctcaaaatacttcattaacactata

SEQ ID NO: 110225 - DNA, 25 bp, Probe sequence
cgttgaggagtcacacagtgtaatt

SEQ ID NO: 110226 - DNA, 25 bp, Probe sequence
cccaccgtttctcaaaatacttcat

SEQ ID NO: 110227 - DNA, 25 bp, Probe sequence
ccaccgtttctcaaaatacttcatt

SEQ ID NO: 110228 - DNA, 25 bp, Probe sequence
gcatgacgttgaggagtcacacagt

SEQ ID NO: 110229 - DNA, 25 bp, Probe sequence
gacgttgaggagtcacacagtgtaa

SEQ ID NO: 110230 - DNA, 25 bp, Probe sequence
gaggagtcacacagtgtaattaaaa

SEQ ID NO: 110231 - DNA, 25 bp, Probe sequence
gatacaataaaaaactgcatgacgt

SEQ ID NO: 110232 - DNA, 25 bp, Probe sequence
gtttctcaaaatacttcattaacac

SEQ ID NO: 110233 - DNA, 25 bp, Probe sequence
tcccaccgtttctcaaaatacttca

SEQ ID NO: 110234 - DNA, 25 bp, Probe sequence
ttttgaaaaatatttacatcagtat

SEQ ID NO: 110235 - DNA, 25 bp, Probe sequence
attaccatcattttcttcatctata

SEQ ID NO: 110236 - DNA, 25 bp, Probe sequence
attttcttcatctatatttggcagt

SEQ ID NO: 110237 - DNA, 25 bp, Probe sequence
atcattttcttcatctatatttggc

SEQ ID NO: 110238 - DNA, 25 bp, Probe sequence
atctatatttggcagtactactaaa

SEQ ID NO: 110239 - DNA, 25 bp, Probe sequence
accatcattttcttcatctatattt

SEQ ID NO: 110240 - DNA, 25 bp, Probe sequence
aaatatatgaaggatggatgccact

SEQ ID NO: 110241 - DNA, 25 bp, Probe sequence
aaatattcaaattaccatcattttc

SEQ ID NO: 110242 - DNA, 25 bp, Probe sequence
aagtatgagtgcatttaattatgaa

SEQ ID NO: 110243 - DNA, 25 bp, Probe sequence
aattaccatcattttcttcatctat

SEQ ID NO: 110244 - DNA, 25 bp, Probe sequence
gaatatatacttaatacccaaaata

SEQ ID NO: 110245 - DNA, 25 bp, Probe sequence
ggcagtactactaaagtatgagtgc

SEQ ID NO: 110246 - DNA, 25 bp, Probe sequence
tcatctatatttggcagtactacta

SEQ ID NO: 110247 - DNA, 25 bp, Probe sequence
tcaaattaccatcattttcttcatc

SEQ ID NO: 110248 - DNA, 25 bp, Probe sequence
ttaccatcattttcttcatctatat

SEQ ID NO: 110249 - DNA, 25 bp, Probe sequence
ttcttcatctatatttggcagtact

SEQ ID NO: 110250 - DNA, 25 bp, Probe sequence
attaagcaatcattgtgtgagtatg

SEQ ID NO: 110251 - DNA, 25 bp, Probe sequence
agttgtgtactatatcaattttctg

SEQ ID NO: 110252 - DNA, 25 bp, Probe sequence
aaatcgtaatgctaagtcatacttg

SEQ ID NO: 110253 - DNA, 25 bp, Probe sequence
aaaacattattgtcacactagaaaa

SEQ ID NO: 110254 - DNA, 25 bp, Probe sequence
aacgttttcacaaagtgtattgcac

SEQ ID NO: 110255 - DNA, 25 bp, Probe sequence
aatggttgcttttttcaatgaaaat

SEQ ID NO: 110256 - DNA, 25 bp, Probe sequence
gcattggcagtgaaatatcgcacat

SEQ ID NO: 110257 - DNA, 25 bp, Probe sequence
gacaaggttgttagcattggcagtg

SEQ ID NO: 110258 - DNA, 25 bp, Probe sequence
gagtgcccgcagtctaaaaaattaa

SEQ ID NO: 110259 - DNA, 25 bp, Probe sequence
gatacttacataatggttgcttttt

SEQ ID NO: 110260 - DNA, 25 bp, Probe sequence
gtcatacttgtttgatttagatatt

SEQ ID NO: 110261 - DNA, 25 bp, Probe sequence
tgtattgcacaatcaaactgtaaac

SEQ ID NO: 110262 - DNA, 25 bp, Probe sequence
taattctgacagtaatgtaaacgtt

SEQ ID NO: 110263 - DNA, 25 bp, Probe sequence
taagtatttgtgcaaacgttttcac

SEQ ID NO: 110264 - DNA, 25 bp, Probe sequence
ttatagaagagtgcccgcagtctaa

SEQ ID NO: 110265 - DNA, 25 bp, Probe sequence
attaggagtggggcagaattgataa

SEQ ID NO: 110266 - DNA, 25 bp, Probe sequence
aggagtggggcagaattgataaaga

SEQ ID NO: 110267 - DNA, 25 bp, Probe sequence
agaaccactaatgacgataaagatt

SEQ ID NO: 110268 - DNA, 25 bp, Probe sequence
aaattaggagtggggcagaattgat

SEQ ID NO: 110269 - DNA, 25 bp, Probe sequence
aaccactaatgacgataaagattaa

SEQ ID NO: 110270 - DNA, 25 bp, Probe sequence
aagaaccactaatgacgataaagat

SEQ ID NO: 110271 - DNA, 25 bp, Probe sequence
aattaggagtggggcagaattgata

SEQ ID NO: 110272 - DNA, 25 bp, Probe sequence
gaaccactaatgacgataaagatta

SEQ ID NO: 110273 - DNA, 25 bp, Probe sequence
gaaattaggagtggggcagaattga

SEQ ID NO: 110274 - DNA, 25 bp, Probe sequence
gagtggggcagaattgataaagaac

SEQ ID NO: 110275 - DNA, 25 bp, Probe sequence
ggagtggggcagaattgataaagaa

SEQ ID NO: 110276 - DNA, 25 bp, Probe sequence
tgaaattaggagtggggcagaattg

SEQ ID NO: 110277 - DNA, 25 bp, Probe sequence
ttaggagtggggcagaattgataaa

SEQ ID NO: 110278 - DNA, 25 bp, Probe sequence
taggagtggggcagaattgataaag

SEQ ID NO: 110279 - DNA, 25 bp, Probe sequence
tttgaaattaggagtggggcagaat

SEQ ID NO: 110280 - DNA, 25 bp, Probe sequence
attcacagtaacaatcctcaccatt

SEQ ID NO: 110281 - DNA, 25 bp, Probe sequence
aaagcctgttgtcacaatggtcata

SEQ ID NO: 110282 - DNA, 25 bp, Probe sequence
cgactaatgtgatgacaggctttca

SEQ ID NO: 110283 - DNA, 25 bp, Probe sequence
gccattgccaaaaatttcacacctt

SEQ ID NO: 110284 - DNA, 25 bp, Probe sequence
gcgatggtcatacccattcacagta

SEQ ID NO: 110285 - DNA, 25 bp, Probe sequence
gaatgaatgcatatgtcgccaagcc

SEQ ID NO: 110286 - DNA, 25 bp, Probe sequence
gaacgcactttaaagatggacgtcg

SEQ ID NO: 110287 - DNA, 25 bp, Probe sequence
gacacgacatactttaaaggcttct

SEQ ID NO: 110288 - DNA, 25 bp, Probe sequence
gactggtggcagtgttgaatgaatg

SEQ ID NO: 110289 - DNA, 25 bp, Probe sequence
gagtatataaccttttcgatagtga

SEQ ID NO: 110290 - DNA, 25 bp, Probe sequence
gaggttagtctgaagtttgtctgaa

SEQ ID NO: 110291 - DNA, 25 bp, Probe sequence
gatggacgtcgatgtcgactaatgt

SEQ ID NO: 110292 - DNA, 25 bp, Probe sequence
taagtgtttagcgatggtcataccc

SEQ ID NO: 110293 - DNA, 25 bp, Probe sequence
tatgtcgccaagccattgccaaaaa

SEQ ID NO: 110294 - DNA, 25 bp, Probe sequence
ttcacaccttaaatcatgtcattgt

SEQ ID NO: 110295 - DNA, 25 bp, Probe sequence
attaagcgcttacaccgacgtgata

SEQ ID NO: 110296 - DNA, 25 bp, Probe sequence
accgacgtgatatatttggcttaac

SEQ ID NO: 110297 - DNA, 25 bp, Probe sequence
aaatatgtttctaagtatgtgttta

SEQ ID NO: 110298 - DNA, 25 bp, Probe sequence
aacgaaaatgattgaggtgacagag

SEQ ID NO: 110299 - DNA, 25 bp, Probe sequence
aagcgcttacaccgacgtgatatat

SEQ ID NO: 110300 - DNA, 25 bp, Probe sequence
aagtatgtgtttatgttcagtattt

SEQ ID NO: 110301 - DNA, 25 bp, Probe sequence
aaggatattaagcgcttacaccgac

SEQ ID NO: 110302 - DNA, 25 bp, Probe sequence
gcgcttacaccgacgtgatatattt

SEQ ID NO: 110303 - DNA, 25 bp, Probe sequence
gacgtgatatatttggcttaacgaa

SEQ ID NO: 110304 - DNA, 25 bp, Probe sequence
gatattaagcgcttacaccgacgtg

SEQ ID NO: 110305 - DNA, 25 bp, Probe sequence
gtgtttatgttcagtattttggata

SEQ ID NO: 110306 - DNA, 25 bp, Probe sequence
taagcgcttacaccgacgtgatata

SEQ ID NO: 110307 - DNA, 25 bp, Probe sequence
tacaccgacgtgatatatttggctt

SEQ ID NO: 110308 - DNA, 25 bp, Probe sequence
tatgttcagtattttggataattta

SEQ ID NO: 110309 - DNA, 25 bp, Probe sequence
ttggcttaacgaaaatgattgaggt

SEQ ID NO: 110310 - DNA, 25 bp, Probe sequence
atttgcccgacttagggtgactcaa

SEQ ID NO: 110311 - DNA, 25 bp, Probe sequence
atcatctctatgtctcggggcagat

SEQ ID NO: 110312 - DNA, 25 bp, Probe sequence
atcagtccgctttttcatagaacaa

SEQ ID NO: 110313 - DNA, 25 bp, Probe sequence
atgaagtatccttatttgcccgact

SEQ ID NO: 110314 - DNA, 25 bp, Probe sequence
atgtaggcgccataatcattagtta

SEQ ID NO: 110315 - DNA, 25 bp, Probe sequence
agtgaaaacttctctatcagtccgc

SEQ ID NO: 110316 - DNA, 25 bp, Probe sequence
ccccgacggcatgtgcgtgaagaga

SEQ ID NO: 110317 - DNA, 25 bp, Probe sequence
aagtatcgccaatctattgcaatat

SEQ ID NO: 110318 - DNA, 25 bp, Probe sequence
aatatagttggcaatcctgccccga

SEQ ID NO: 110319 - DNA, 25 bp, Probe sequence
aattccctgttatgaagtatcctta

SEQ ID NO: 110320 - DNA, 25 bp, Probe sequence
gaaagatactgcttctacccttgca

SEQ ID NO: 110321 - DNA, 25 bp, Probe sequence
gggtgactcaatgaatttactcctt

SEQ ID NO: 110322 - DNA, 25 bp, Probe sequence
tcggggcagatcataattccctgtt

SEQ ID NO: 110323 - DNA, 25 bp, Probe sequence
taaactctctaaaaagcggactgaa

SEQ ID NO: 110324 - DNA, 25 bp, Probe sequence
tacccttgcaaatatatcatctcta

SEQ ID NO: 110325 - DNA, 25 bp, Probe sequence
atcggcaagatattgaacggttcaa

SEQ ID NO: 110326 - DNA, 25 bp, Probe sequence
atgctacaatgactatgaaaacgtt

SEQ ID NO: 110327 - DNA, 25 bp, Probe sequence
accgaggctgtaaaatcaaactgtt

SEQ ID NO: 110328 - DNA, 25 bp, Probe sequence
actgttatattttatttgtagctgt

SEQ ID NO: 110329 - DNA, 25 bp, Probe sequence
aaatcacaacaaacatgctacaatg

SEQ ID NO: 110330 - DNA, 25 bp, Probe sequence
aacattatacagatggaggcgttta

SEQ ID NO: 110331 - DNA, 25 bp, Probe sequence
aacgttaacatagcatttcaaattc

SEQ ID NO: 110332 - DNA, 25 bp, Probe sequence
aagtatttaatccagtctcttcata

SEQ ID NO: 110333 - DNA, 25 bp, Probe sequence
ctaagtgttgatttaacgcttatca

SEQ ID NO: 110334 - DNA, 25 bp, Probe sequence
gcatttcaaattcacaacattatac

SEQ ID NO: 110335 - DNA, 25 bp, Probe sequence
gcaattagcatattactgttacaca

SEQ ID NO: 110336 - DNA, 25 bp, Probe sequence
gttgtgtaacagaatgcaattagca

SEQ ID NO: 110337 - DNA, 25 bp, Probe sequence
gtagctgttatataaaaatcggcaa

SEQ ID NO: 110338 - DNA, 25 bp, Probe sequence
taatccagtctcttcatatataaaa

SEQ ID NO: 110339 - DNA, 25 bp, Probe sequence
tagtacagtttctatgttttgacat

SEQ ID NO: 110340 - DNA, 25 bp, Probe sequence
atatgcttctttttcaattgagtat

SEQ ID NO: 110341 - DNA, 25 bp, Probe sequence
atacaattcagaccgaaaagaaagc

SEQ ID NO: 110342 - DNA, 25 bp, Probe sequence
atgcttctttttcaattgagtattg

SEQ ID NO: 110343 - DNA, 25 bp, Probe sequence
aggggcatatgcttctttttcaatt

SEQ ID NO: 110344 - DNA, 25 bp, Probe sequence
agaccgaaaagaaagcatatgcaac

SEQ ID NO: 110345 - DNA, 25 bp, Probe sequence
aagcatatgcaacttcaagagtgaa

SEQ ID NO: 110346 - DNA, 25 bp, Probe sequence
gcatatgcttctttttcaattgagt

SEQ ID NO: 110347 - DNA, 25 bp, Probe sequence
gaaggggcatatgcttctttttcaa

SEQ ID NO: 110348 - DNA, 25 bp, Probe sequence
gaaagcatatgcaacttcaagagtg

SEQ ID NO: 110349 - DNA, 25 bp, Probe sequence
gagtattagcaagacgtagtaagta

SEQ ID NO: 110350 - DNA, 25 bp, Probe sequence
gagtattgagtattagcaagacgta

SEQ ID NO: 110351 - DNA, 25 bp, Probe sequence
gagtgaaggggcatatgcttctttt

SEQ ID NO: 110352 - DNA, 25 bp, Probe sequence
gtgaaggggcatatgcttctttttc

SEQ ID NO: 110353 - DNA, 25 bp, Probe sequence
gggcatatgcttctttttcaattga

SEQ ID NO: 110354 - DNA, 25 bp, Probe sequence
ggggcatatgcttctttttcaattg

SEQ ID NO: 110355 - DNA, 25 bp, Probe sequence
atttgtatggcaatttggcgtcaca

SEQ ID NO: 110356 - DNA, 25 bp, Probe sequence
ataggcaatcgtttcattcgtttat

SEQ ID NO: 110357 - DNA, 25 bp, Probe sequence
acaaacacttacatgatttattggt

SEQ ID NO: 110358 - DNA, 25 bp, Probe sequence
aacaaagacctctaaagttatcaag

SEQ ID NO: 110359 - DNA, 25 bp, Probe sequence
aatgttgccatctatgggataggca

SEQ ID NO: 110360 - DNA, 25 bp, Probe sequence
cattcgtttatattcatatgacaag

SEQ ID NO: 110361 - DNA, 25 bp, Probe sequence
gcaatcgtttcattcgtttatattc

SEQ ID NO: 110362 - DNA, 25 bp, Probe sequence
gaggtctttttaatgttgccatcta

SEQ ID NO: 110363 - DNA, 25 bp, Probe sequence
gatgataccttcagaggtcttttta

SEQ ID NO: 110364 - DNA, 25 bp, Probe sequence
gtctttttaatgttgccatctatgg

SEQ ID NO: 110365 - DNA, 25 bp, Probe sequence
gggataggcaatcgtttcattcgtt

SEQ ID NO: 110366 - DNA, 25 bp, Probe sequence
ggcaatttggcgtcacaaacactta

SEQ ID NO: 110367 - DNA, 25 bp, Probe sequence
tcgtttcattcgtttatattcatat

SEQ ID NO: 110368 - DNA, 25 bp, Probe sequence
tatcaagatgataccttcagaggtc

SEQ ID NO: 110369 - DNA, 25 bp, Probe sequence
ttggcgtcacaaacacttacatgat

SEQ ID NO: 110370 - DNA, 25 bp, Probe sequence
gctttgttactcctttgatgtacat

SEQ ID NO: 110371 - DNA, 25 bp, Probe sequence
gatagttaatgctttgtttattcta

SEQ ID NO: 110372 - DNA, 25 bp, Probe sequence
gattgggcaattacattttggagga

SEQ ID NO: 110373 - DNA, 25 bp, Probe sequence
gttaatgctttgtttattctagtta

SEQ ID NO: 110374 - DNA, 25 bp, Probe sequence
gttactcctttgatgtacattaatc

SEQ ID NO: 110375 - DNA, 25 bp, Probe sequence
gtatattgcaaagctaattaactat

SEQ ID NO: 110376 - DNA, 25 bp, Probe sequence
gggcaattacattttggaggaatta

SEQ ID NO: 110377 - DNA, 25 bp, Probe sequence
tgcaaagctaattaactataacaaa

SEQ ID NO: 110378 - DNA, 25 bp, Probe sequence
tgctttgtttattctagttaatata

SEQ ID NO: 110379 - DNA, 25 bp, Probe sequence
taatattttgtttctttaatgtaga

SEQ ID NO: 110380 - DNA, 25 bp, Probe sequence
taatgctttgtttattctagttaat

SEQ ID NO: 110381 - DNA, 25 bp, Probe sequence
taatgtcttttaatattttgtttct

SEQ ID NO: 110382 - DNA, 25 bp, Probe sequence
tacactattgtatattgcaaagcta

SEQ ID NO: 110383 - DNA, 25 bp, Probe sequence
tactcctttgatgtacattaatcaa

SEQ ID NO: 110384 - DNA, 25 bp, Probe sequence
tttgttactcctttgatgtacatta

SEQ ID NO: 110385 - DNA, 25 bp, Probe sequence
atttataactctatccaaagacata

SEQ ID NO: 110386 - DNA, 25 bp, Probe sequence
atacaacagtaatcatgcattctat

SEQ ID NO: 110387 - DNA, 25 bp, Probe sequence
aaagcatcgaacaatcggaagcata

SEQ ID NO: 110388 - DNA, 25 bp, Probe sequence
aactctatccaaagacatacagtca

SEQ ID NO: 110389 - DNA, 25 bp, Probe sequence
aattatttattcattatagtcttaa

SEQ ID NO: 110390 - DNA, 25 bp, Probe sequence
catgcattctatgatgcttctaact

SEQ ID NO: 110391 - DNA, 25 bp, Probe sequence
cataacatgacctaatatattacta

SEQ ID NO: 110392 - DNA, 25 bp, Probe sequence
ctaactgaattaaagcatcgaacaa

SEQ ID NO: 110393 - DNA, 25 bp, Probe sequence
gaacaatcggaagcatatttctaaa

SEQ ID NO: 110394 - DNA, 25 bp, Probe sequence
gacatacagtcaatacaaagaatta

SEQ ID NO: 110395 - DNA, 25 bp, Probe sequence
gtatctatacaacagtaatcatgca

SEQ ID NO: 110396 - DNA, 25 bp, Probe sequence
ggaagcatatttctaaattatttat

SEQ ID NO: 110397 - DNA, 25 bp, Probe sequence
tgacctaatatattactaacctatt

SEQ ID NO: 110398 - DNA, 25 bp, Probe sequence
tagtcttaaacataacatgacctaa

SEQ ID NO: 110399 - DNA, 25 bp, Probe sequence
ttctatgatgcttctaactgaatta

SEQ ID NO: 110400 - DNA, 25 bp, Probe sequence
attaagtatctttgacagtcatctt

SEQ ID NO: 110401 - DNA, 25 bp, Probe sequence
atgcatctcatataattatttgcta

SEQ ID NO: 110402 - DNA, 25 bp, Probe sequence
agtgattcctccaatttagttgagg

SEQ ID NO: 110403 - DNA, 25 bp, Probe sequence
acagtcatcttagcctcttatttaa

SEQ ID NO: 110404 - DNA, 25 bp, Probe sequence
aagctttatgcttaaaataagtctt

SEQ ID NO: 110405 - DNA, 25 bp, Probe sequence
aagataattggaataacgttgctat

SEQ ID NO: 110406 - DNA, 25 bp, Probe sequence
catcttagcctcttatttaaggaaa

SEQ ID NO: 110407 - DNA, 25 bp, Probe sequence
ctttgacagtcatcttagcctctta

SEQ ID NO: 110408 - DNA, 25 bp, Probe sequence
gaataacgttgctattttataaaat

SEQ ID NO: 110409 - DNA, 25 bp, Probe sequence
gaggataagataaccattaagataa

SEQ ID NO: 110410 - DNA, 25 bp, Probe sequence
gattcctccaatttagttgaggata

SEQ ID NO: 110411 - DNA, 25 bp, Probe sequence
gtcatcttagcctcttatttaagga

SEQ ID NO: 110412 - DNA, 25 bp, Probe sequence
tgacagtcatcttagcctcttattt

SEQ ID NO: 110413 - DNA, 25 bp, Probe sequence
tagtgaaattaatgcatctcatata

SEQ ID NO: 110414 - DNA, 25 bp, Probe sequence
ttgacagtcatcttagcctcttatt

SEQ ID NO: 110415 - DNA, 25 bp, Probe sequence
attcaaaaacaacacgctttatttg

SEQ ID NO: 110416 - DNA, 25 bp, Probe sequence
acgcttacactaaatgtcaaaaatt

SEQ ID NO: 110417 - DNA, 25 bp, Probe sequence
acaacacgctttatttgtaaacgct

SEQ ID NO: 110418 - DNA, 25 bp, Probe sequence
aacgcttacactaaatgtcaaaaat

SEQ ID NO: 110419 - DNA, 25 bp, Probe sequence
caacacgctttatttgtaaacgctt

SEQ ID NO: 110420 - DNA, 25 bp, Probe sequence
cacgctttatttgtaaacgcttaca

SEQ ID NO: 110421 - DNA, 25 bp, Probe sequence
cgctttatttgtaaacgcttacact

SEQ ID NO: 110422 - DNA, 25 bp, Probe sequence
gctttatttgtaaacgcttacacta

SEQ ID NO: 110423 - DNA, 25 bp, Probe sequence
gtaaacgcttacactaaatgtcaaa

SEQ ID NO: 110424 - DNA, 25 bp, Probe sequence
tcaaaaacaacacgctttatttgta

SEQ ID NO: 110425 - DNA, 25 bp, Probe sequence
taattcaaaaacaacacgctttatt

SEQ ID NO: 110426 - DNA, 25 bp, Probe sequence
taaacgcttacactaaatgtcaaaa

SEQ ID NO: 110427 - DNA, 25 bp, Probe sequence
ttatttgtaaacgcttacactaaat

SEQ ID NO: 110428 - DNA, 25 bp, Probe sequence
ttaattcaaaaacaacacgctttat

SEQ ID NO: 110429 - DNA, 25 bp, Probe sequence
ttcaaaaacaacacgctttatttgt

SEQ ID NO: 110430 - DNA, 25 bp, Probe sequence
atatgaaatacaaagcgcccaatcg

SEQ ID NO: 110431 - DNA, 25 bp, Probe sequence
acacattttaatggttgataacaat

SEQ ID NO: 110432 - DNA, 25 bp, Probe sequence
aaagcgcccaatcgaacaaagtatt

SEQ ID NO: 110433 - DNA, 25 bp, Probe sequence
aagggtttgtaatgaattgaatatc

SEQ ID NO: 110434 - DNA, 25 bp, Probe sequence
aatatagcgtttttacactttgtgt

SEQ ID NO: 110435 - DNA, 25 bp, Probe sequence
caagtcacctccatcacatttgata

SEQ ID NO: 110436 - DNA, 25 bp, Probe sequence
cataacgacgtttaaaatcaattag

SEQ ID NO: 110437 - DNA, 25 bp, Probe sequence
gcgcccaatcgaacaaagtatttat

SEQ ID NO: 110438 - DNA, 25 bp, Probe sequence
gaaatacaaagcgcccaatcgaaca

SEQ ID NO: 110439 - DNA, 25 bp, Probe sequence
gaaatatctttttattctgataata

SEQ ID NO: 110440 - DNA, 25 bp, Probe sequence
gtcacctccatcacatttgataaaa

SEQ ID NO: 110441 - DNA, 25 bp, Probe sequence
ggaaaatccatcaatattaaattaa

SEQ ID NO: 110442 - DNA, 25 bp, Probe sequence
tacactttgtgtaaacccttacaag

SEQ ID NO: 110443 - DNA, 25 bp, Probe sequence
tacaaagcgcccaatcgaacaaagt

SEQ ID NO: 110444 - DNA, 25 bp, Probe sequence
tagacacagtatagacacattttaa

SEQ ID NO: 110445 - DNA, 25 bp, Probe sequence
attggatgacttcggcgtggttttt

SEQ ID NO: 110446 - DNA, 25 bp, Probe sequence
ataagcaaattaaaccacgccataa

SEQ ID NO: 110447 - DNA, 25 bp, Probe sequence
atgtttgtgacataagctattttta

SEQ ID NO: 110448 - DNA, 25 bp, Probe sequence
acataaatcaatgtcccacactccc

SEQ ID NO: 110449 - DNA, 25 bp, Probe sequence
aaaccacgccataatcatattggat

SEQ ID NO: 110450 - DNA, 25 bp, Probe sequence
aaagcttatgttgctcatatgtttg

SEQ ID NO: 110451 - DNA, 25 bp, Probe sequence
catattggatgacttcggcgtggtt

SEQ ID NO: 110452 - DNA, 25 bp, Probe sequence
gacttcggcgtggtttttatagttg

SEQ ID NO: 110453 - DNA, 25 bp, Probe sequence
ggatgacttcggcgtggtttttata

SEQ ID NO: 110454 - DNA, 25 bp, Probe sequence
gtggaataggaatactttttggagt

SEQ ID NO: 110455 - DNA, 25 bp, Probe sequence
ggtttttatagttgaagcagggctg

SEQ ID NO: 110456 - DNA, 25 bp, Probe sequence
ggcgtggtttttatagttgaagcag

SEQ ID NO: 110457 - DNA, 25 bp, Probe sequence
tgaagcagggctgagacataaatca

SEQ ID NO: 110458 - DNA, 25 bp, Probe sequence
taagctatttttataatttgtcttt

SEQ ID NO: 110459 - DNA, 25 bp, Probe sequence
tatgttgctcatatgtttgtgacat

SEQ ID NO: 110460 - DNA, 25 bp, Probe sequence
agcgacatttatagtgattcacgat

SEQ ID NO: 110461 - DNA, 25 bp, Probe sequence
aacactctctttctaattactatgt

SEQ ID NO: 110462 - DNA, 25 bp, Probe sequence
aatgttgttcaagtttagtaattat

SEQ ID NO: 110463 - DNA, 25 bp, Probe sequence
cactctctttctaattactatgtaa

SEQ ID NO: 110464 - DNA, 25 bp, Probe sequence
cattaacactctctttctaattact

SEQ ID NO: 110465 - DNA, 25 bp, Probe sequence
ctctctttctaattactatgtaaaa

SEQ ID NO: 110466 - DNA, 25 bp, Probe sequence
gaagttagcgacatttatagtgatt

SEQ ID NO: 110467 - DNA, 25 bp, Probe sequence
gttagcgacatttatagtgattcac

SEQ ID NO: 110468 - DNA, 25 bp, Probe sequence
tgtagtaattatgctttttaaaaat

SEQ ID NO: 110469 - DNA, 25 bp, Probe sequence
taacactctctttctaattactatg

SEQ ID NO: 110470 - DNA, 25 bp, Probe sequence
tactatgtaaaacccaacaattaat

SEQ ID NO: 110471 - DNA, 25 bp, Probe sequence
tagcgacatttatagtgattcacga

SEQ ID NO: 110472 - DNA, 25 bp, Probe sequence
tagtgattcacgataaacatatata

SEQ ID NO: 110473 - DNA, 25 bp, Probe sequence
ttaacactctctttctaattactat

SEQ ID NO: 110474 - DNA, 25 bp, Probe sequence
ttcattaacactctctttctaatta

SEQ ID NO: 110475 - DNA, 25 bp, Probe sequence
agtcatagctgttttggtatagatg

SEQ ID NO: 110476 - DNA, 25 bp, Probe sequence
agtaaagtcatagctgttttggtat

SEQ ID NO: 110477 - DNA, 25 bp, Probe sequence
acagccatgacaaagtaaagtcata

SEQ ID NO: 110478 - DNA, 25 bp, Probe sequence
acaaagtaaagtcatagctgttttg

SEQ ID NO: 110479 - DNA, 25 bp, Probe sequence
aaagtaaagtcatagctgttttggt

SEQ ID NO: 110480 - DNA, 25 bp, Probe sequence
aaagtcatagctgttttggtataga

SEQ ID NO: 110481 - DNA, 25 bp, Probe sequence
aaacagccatgacaaagtaaagtca

SEQ ID NO: 110482 - DNA, 25 bp, Probe sequence
aacagccatgacaaagtaaagtcat

SEQ ID NO: 110483 - DNA, 25 bp, Probe sequence
aagtaaagtcatagctgttttggta

SEQ ID NO: 110484 - DNA, 25 bp, Probe sequence
aagtcatagctgttttggtatagat

SEQ ID NO: 110485 - DNA, 25 bp, Probe sequence
caaagtaaagtcatagctgttttgg

SEQ ID NO: 110486 - DNA, 25 bp, Probe sequence
gacaaagtaaagtcatagctgtttt

SEQ ID NO: 110487 - DNA, 25 bp, Probe sequence
gtaaagtcatagctgttttggtata

SEQ ID NO: 110488 - DNA, 25 bp, Probe sequence
taaagtcatagctgttttggtatag

SEQ ID NO: 110489 - DNA, 25 bp, Probe sequence
atttgataattgtatgacattttta

SEQ ID NO: 110490 - DNA, 25 bp, Probe sequence
atggcaaatttgataattgtatgac

SEQ ID NO: 110491 - DNA, 25 bp, Probe sequence
acttatcaataagcattgtgtacaa

SEQ ID NO: 110492 - DNA, 25 bp, Probe sequence
aaatttgataattgtatgacatttt

SEQ ID NO: 110493 - DNA, 25 bp, Probe sequence
aaatacttatcaataagcattgtgt

SEQ ID NO: 110494 - DNA, 25 bp, Probe sequence
aatacttatcaataagcattgtgta

SEQ ID NO: 110495 - DNA, 25 bp, Probe sequence
aatttgataattgtatgacattttt

SEQ ID NO: 110496 - DNA, 25 bp, Probe sequence
cttatcaataagcattgtgtacaat

SEQ ID NO: 110497 - DNA, 25 bp, Probe sequence
gcaaatttgataattgtatgacatt

SEQ ID NO: 110498 - DNA, 25 bp, Probe sequence
gataattgtatgacatttttaattt

SEQ ID NO: 110499 - DNA, 25 bp, Probe sequence
ggcaaatttgataattgtatgacat

SEQ ID NO: 110500 - DNA, 25 bp, Probe sequence
tggcaaatttgataattgtatgaca

SEQ ID NO: 110501 - DNA, 25 bp, Probe sequence
tacttatcaataagcattgtgtaca

SEQ ID NO: 110502 - DNA, 25 bp, Probe sequence
tttgataattgtatgacatttttaa

SEQ ID NO: 110503 - DNA, 25 bp, Probe sequence
ttgataattgtatgacatttttaat

SEQ ID NO: 110504 - DNA, 25 bp, Probe sequence
atattgacccagtacttaatgcatg

SEQ ID NO: 110505 - DNA, 25 bp, Probe sequence
agacacctaagatgtaatcgtatac

SEQ ID NO: 110506 - DNA, 25 bp, Probe sequence
aaatcacaaacttaaaagcggatga

SEQ ID NO: 110507 - DNA, 25 bp, Probe sequence
aactaacatatttgaagctacacgt

SEQ ID NO: 110508 - DNA, 25 bp, Probe sequence
aagcggatgacacatgaccttttaa

SEQ ID NO: 110509 - DNA, 25 bp, Probe sequence
caatttaatattgacccagtactta

SEQ ID NO: 110510 - DNA, 25 bp, Probe sequence
gaagctacacgtatgttagtgaatt

SEQ ID NO: 110511 - DNA, 25 bp, Probe sequence
gacacatgaccttttaagttatgcg

SEQ ID NO: 110512 - DNA, 25 bp, Probe sequence
gacccagtacttaatgcatgttaca

SEQ ID NO: 110513 - DNA, 25 bp, Probe sequence
gatgtttatttgcttttgtatcgcc

SEQ ID NO: 110514 - DNA, 25 bp, Probe sequence
gtttatttgcttttgtatcgccaat

SEQ ID NO: 110515 - DNA, 25 bp, Probe sequence
gtatcgccaataagcagcattaaac

SEQ ID NO: 110516 - DNA, 25 bp, Probe sequence
gtacgaagactaaagacacctaaga

SEQ ID NO: 110517 - DNA, 25 bp, Probe sequence
tgaccttttaagttatgcgttgaaa

SEQ ID NO: 110518 - DNA, 25 bp, Probe sequence
taatcactggcgaagtacgaagact

SEQ ID NO: 110519 - DNA, 25 bp, Probe sequence
atctggcacttaagctttaatcata

SEQ ID NO: 110520 - DNA, 25 bp, Probe sequence
atgtagtgaaagtcgttgttgaaat

SEQ ID NO: 110521 - DNA, 25 bp, Probe sequence
atgtgtcgagtagccctatttttaa

SEQ ID NO: 110522 - DNA, 25 bp, Probe sequence
agggctatttgatacaactatatgt

SEQ ID NO: 110523 - DNA, 25 bp, Probe sequence
aaatctataccattccaaaaattgt

SEQ ID NO: 110524 - DNA, 25 bp, Probe sequence
aactatatgtgtcgagtagccctat

SEQ ID NO: 110525 - DNA, 25 bp, Probe sequence
aattcaaatctggcacttaagcttt

SEQ ID NO: 110526 - DNA, 25 bp, Probe sequence
caaatctggcacttaagctttaatc

SEQ ID NO: 110527 - DNA, 25 bp, Probe sequence
gaaattaaattcaaatctggcactt

SEQ ID NO: 110528 - DNA, 25 bp, Probe sequence
gtagccctatttttaatgtagtgaa

SEQ ID NO: 110529 - DNA, 25 bp, Probe sequence
gtcgagtagccctatttttaatgta

SEQ ID NO: 110530 - DNA, 25 bp, Probe sequence
ggcacttaagctttaatcatagcat

SEQ ID NO: 110531 - DNA, 25 bp, Probe sequence
tataaagggctatttgatacaacta

SEQ ID NO: 110532 - DNA, 25 bp, Probe sequence
tatatgtgtcgagtagccctatttt

SEQ ID NO: 110533 - DNA, 25 bp, Probe sequence
ttttataaaatctataccattccaa

SEQ ID NO: 110534 - DNA, 25 bp, Probe sequence
atatcaatatatattctgtgtatga

SEQ ID NO: 110535 - DNA, 25 bp, Probe sequence
atccctcctaattattctcaatata

SEQ ID NO: 110536 - DNA, 25 bp, Probe sequence
atgtagacatcctatttttagcgag

SEQ ID NO: 110537 - DNA, 25 bp, Probe sequence
agacatcctatttttagcgaggtag

SEQ ID NO: 110538 - DNA, 25 bp, Probe sequence
agctatcgataacaacttaagaaag

SEQ ID NO: 110539 - DNA, 25 bp, Probe sequence
agcgaggtaggttgataaggcatat

SEQ ID NO: 110540 - DNA, 25 bp, Probe sequence
acatccctcctaattattctcaata

SEQ ID NO: 110541 - DNA, 25 bp, Probe sequence
aaattgctgtttatattgttgtgaa

SEQ ID NO: 110542 - DNA, 25 bp, Probe sequence
aatgagttgacaaaagtcggtatag

SEQ ID NO: 110543 - DNA, 25 bp, Probe sequence
aataaacatgattcaccacataaat

SEQ ID NO: 110544 - DNA, 25 bp, Probe sequence
ctaattattctcaatatagcttttg

SEQ ID NO: 110545 - DNA, 25 bp, Probe sequence
gtttgaatcatgtaacaatcatata

SEQ ID NO: 110546 - DNA, 25 bp, Probe sequence
gtcggtatagatatgtagacatcct

SEQ ID NO: 110547 - DNA, 25 bp, Probe sequence
ggcatatcggataaatttataagcc

SEQ ID NO: 110548 - DNA, 25 bp, Probe sequence
tatacataagctatcgataacaact

SEQ ID NO: 110549 - DNA, 25 bp, Probe sequence
agatacagttaaccctaaggcgcct

SEQ ID NO: 110550 - DNA, 25 bp, Probe sequence
acattggtcatgacaatttgataat

SEQ ID NO: 110551 - DNA, 25 bp, Probe sequence
cagttaaccctaaggcgcctgatat

SEQ ID NO: 110552 - DNA, 25 bp, Probe sequence
gcctgatataagcgtccttagggtt

SEQ ID NO: 110553 - DNA, 25 bp, Probe sequence
gatacagttaaccctaaggcgcctg

SEQ ID NO: 110554 - DNA, 25 bp, Probe sequence
gataatgattgagatatgtatgtta

SEQ ID NO: 110555 - DNA, 25 bp, Probe sequence
gttaaccctaaggcgcctgatataa

SEQ ID NO: 110556 - DNA, 25 bp, Probe sequence
ggattacattggtcatgacaatttg

SEQ ID NO: 110557 - DNA, 25 bp, Probe sequence
ggcgcctgatataagcgtccttagg

SEQ ID NO: 110558 - DNA, 25 bp, Probe sequence
tgatataagcgtccttagggttttt

SEQ ID NO: 110559 - DNA, 25 bp, Probe sequence
taaggcgcctgatataagcgtcctt

SEQ ID NO: 110560 - DNA, 25 bp, Probe sequence
tacagttaaccctaaggcgcctgat

SEQ ID NO: 110561 - DNA, 25 bp, Probe sequence
taaccctaaggcgcctgatataagc

SEQ ID NO: 110562 - DNA, 25 bp, Probe sequence
tagtggattacattggtcatgacaa

SEQ ID NO: 110563 - DNA, 25 bp, Probe sequence
ttagggtttttatagtggattacat

SEQ ID NO: 110564 - DNA, 25 bp, Probe sequence
atatgtaacgtgggtcaataacata

SEQ ID NO: 110565 - DNA, 25 bp, Probe sequence
atgtaacgtgggtcaataacatata

SEQ ID NO: 110566 - DNA, 25 bp, Probe sequence
aacgtgggtcaataacatataaata

SEQ ID NO: 110567 - DNA, 25 bp, Probe sequence
aattgatatgtaacgtgggtcaata

SEQ ID NO: 110568 - DNA, 25 bp, Probe sequence
caaattgcatataaatgactatcac

SEQ ID NO: 110569 - DNA, 25 bp, Probe sequence
cggaattgatatgtaacgtgggtca

SEQ ID NO: 110570 - DNA, 25 bp, Probe sequence
gcaaattgcatataaatgactatca

SEQ ID NO: 110571 - DNA, 25 bp, Probe sequence
gaattgatatgtaacgtgggtcaat

SEQ ID NO: 110572 - DNA, 25 bp, Probe sequence
gatatgtaacgtgggtcaataacat

SEQ ID NO: 110573 - DNA, 25 bp, Probe sequence
gtaacgtgggtcaataacatataaa

SEQ ID NO: 110574 - DNA, 25 bp, Probe sequence
ggaattgatatgtaacgtgggtcaa

SEQ ID NO: 110575 - DNA, 25 bp, Probe sequence
tgtaacgtgggtcaataacatataa

SEQ ID NO: 110576 - DNA, 25 bp, Probe sequence
tgatatgtaacgtgggtcaataaca

SEQ ID NO: 110577 - DNA, 25 bp, Probe sequence
taacgtgggtcaataacatataaat

SEQ ID NO: 110578 - DNA, 25 bp, Probe sequence
ttgatatgtaacgtgggtcaataac

SEQ ID NO: 110579 - DNA, 25 bp, Probe sequence
ataggttaggcttatgtgcgggcat

SEQ ID NO: 110580 - DNA, 25 bp, Probe sequence
atatgcttgtgaatcggttgttttg

SEQ ID NO: 110581 - DNA, 25 bp, Probe sequence
actattgtgacaactatctttggat

SEQ ID NO: 110582 - DNA, 25 bp, Probe sequence
aactgcatggcaaaacaacttagaa

SEQ ID NO: 110583 - DNA, 25 bp, Probe sequence
aatagccggtttacttgtgtgaaat

SEQ ID NO: 110584 - DNA, 25 bp, Probe sequence
gccgtctggtctacagatactatcg

SEQ ID NO: 110585 - DNA, 25 bp, Probe sequence
gcacctttgaggacgaaaacgctgg

SEQ ID NO: 110586 - DNA, 25 bp, Probe sequence
gaaaacgctggtatagttatagcta

SEQ ID NO: 110587 - DNA, 25 bp, Probe sequence
gaaaatcaagtacagccacttaata

SEQ ID NO: 110588 - DNA, 25 bp, Probe sequence
gaaagtgcgaatgccgtctggtcta

SEQ ID NO: 110589 - DNA, 25 bp, Probe sequence
gaggcaagtgagcaataggttaggc

SEQ ID NO: 110590 - DNA, 25 bp, Probe sequence
gatactatcgaaataattcatcttc

SEQ ID NO: 110591 - DNA, 25 bp, Probe sequence
gtgcgggcataggtcagtaatgtat

SEQ ID NO: 110592 - DNA, 25 bp, Probe sequence
ggttgttttgcattttgtatactta

SEQ ID NO: 110593 - DNA, 25 bp, Probe sequence
ttcatcttcgaatatacgttgataa

SEQ ID NO: 110594 - DNA, 25 bp, Probe sequence
aggactatacaatgagaataacctt

SEQ ID NO: 110595 - DNA, 25 bp, Probe sequence
acttgccatgcaaatgagtcataag

SEQ ID NO: 110596 - DNA, 25 bp, Probe sequence
aaccttttgatttttcatgcataag

SEQ ID NO: 110597 - DNA, 25 bp, Probe sequence
gcaacatgtcatgatgagaagcagg

SEQ ID NO: 110598 - DNA, 25 bp, Probe sequence
gaataaccttttgatttttcatgca

SEQ ID NO: 110599 - DNA, 25 bp, Probe sequence
gaagggttctgacaatgaagtgagc

SEQ ID NO: 110600 - DNA, 25 bp, Probe sequence
gagtcataaggcatagttttcaaga

SEQ ID NO: 110601 - DNA, 25 bp, Probe sequence
gatgagaagcaggactatacaatga

SEQ ID NO: 110602 - DNA, 25 bp, Probe sequence
gatttttcatgcataaggcgattca

SEQ ID NO: 110603 - DNA, 25 bp, Probe sequence
gttggcatatattacttgccatgca

SEQ ID NO: 110604 - DNA, 25 bp, Probe sequence
ggcatagttttcaagaagggttctg

SEQ ID NO: 110605 - DNA, 25 bp, Probe sequence
ggcatatattacttgccatgcaaat

SEQ ID NO: 110606 - DNA, 25 bp, Probe sequence
ggcgattcaatcaaaagcaatcacc

SEQ ID NO: 110607 - DNA, 25 bp, Probe sequence
tgaagtgagcaacatgtcatgatga

SEQ ID NO: 110608 - DNA, 25 bp, Probe sequence
ttcatgcataaggcgattcaatcaa

SEQ ID NO: 110609 - DNA, 25 bp, Probe sequence
attaatcatgtatttcgtatgataa

SEQ ID NO: 110610 - DNA, 25 bp, Probe sequence
atgttaaagtggtacattaatcatg

SEQ ID NO: 110611 - DNA, 25 bp, Probe sequence
acattaatcatgtatttcgtatgat

SEQ ID NO: 110612 - DNA, 25 bp, Probe sequence
aacgacaagtgtaatggttaaatgt

SEQ ID NO: 110613 - DNA, 25 bp, Probe sequence
aatggttaaatgtattttatgatga

SEQ ID NO: 110614 - DNA, 25 bp, Probe sequence
caagtgtaatggttaaatgtatttt

SEQ ID NO: 110615 - DNA, 25 bp, Probe sequence
catgtatttcgtatgataattaacg

SEQ ID NO: 110616 - DNA, 25 bp, Probe sequence
gataattaacgacaagtgtaatggt

SEQ ID NO: 110617 - DNA, 25 bp, Probe sequence
gtatgataattaacgacaagtgtaa

SEQ ID NO: 110618 - DNA, 25 bp, Probe sequence
gtacattaatcatgtatttcgtatg

SEQ ID NO: 110619 - DNA, 25 bp, Probe sequence
gtggtacattaatcatgtatttcgt

SEQ ID NO: 110620 - DNA, 25 bp, Probe sequence
ggtacattaatcatgtatttcgtat

SEQ ID NO: 110621 - DNA, 25 bp, Probe sequence
tggataacgattttttgttatgtta

SEQ ID NO: 110622 - DNA, 25 bp, Probe sequence
tatgaatggataacgattttttgtt

SEQ ID NO: 110623 - DNA, 25 bp, Probe sequence
ttatgatgaaatgctataataggca

SEQ ID NO: 110624 - DNA, 25 bp, Probe sequence
atttgtgtatgaaaacgtctgatat

SEQ ID NO: 110625 - DNA, 25 bp, Probe sequence
atagatatagttgaatggaggaagt

SEQ ID NO: 110626 - DNA, 25 bp, Probe sequence
atacacagacatttagagttttgat

SEQ ID NO: 110627 - DNA, 25 bp, Probe sequence
atgtttgcttgtatgttattatttg

SEQ ID NO: 110628 - DNA, 25 bp, Probe sequence
acgaaatgtttgcttgtatgttatt

SEQ ID NO: 110629 - DNA, 25 bp, Probe sequence
acagacatttagagttttgatttta

SEQ ID NO: 110630 - DNA, 25 bp, Probe sequence
aaacgaaatgtttgcttgtatgtta

SEQ ID NO: 110631 - DNA, 25 bp, Probe sequence
aagtaatacacagacatttagagtt

SEQ ID NO: 110632 - DNA, 25 bp, Probe sequence
gcttgtatgttattatttgtgtatg

SEQ ID NO: 110633 - DNA, 25 bp, Probe sequence
gaaatgtttgcttgtatgttattat

SEQ ID NO: 110634 - DNA, 25 bp, Probe sequence
gattttaaaatgagttttcaattgg

SEQ ID NO: 110635 - DNA, 25 bp, Probe sequence
gtttgcttgtatgttattatttgtg

SEQ ID NO: 110636 - DNA, 25 bp, Probe sequence
gtgtatgaaaacgtctgatataatg

SEQ ID NO: 110637 - DNA, 25 bp, Probe sequence
tgaaaacgtctgatataatgtaata

SEQ ID NO: 110638 - DNA, 25 bp, Probe sequence
ttgcttgtatgttattatttgtgta

SEQ ID NO: 110639 - DNA, 25 bp, Probe sequence
ataaatgccctcaaatctatgtgaa

SEQ ID NO: 110640 - DNA, 25 bp, Probe sequence
ataataaatgccctcaaatctatgt

SEQ ID NO: 110641 - DNA, 25 bp, Probe sequence
atgccctcaaatctatgtgaactaa

SEQ ID NO: 110642 - DNA, 25 bp, Probe sequence
aaatgccctcaaatctatgtgaact

SEQ ID NO: 110643 - DNA, 25 bp, Probe sequence
aatgccctcaaatctatgtgaacta

SEQ ID NO: 110644 - DNA, 25 bp, Probe sequence
aataaatgccctcaaatctatgtga

SEQ ID NO: 110645 - DNA, 25 bp, Probe sequence
ccctcaaatctatgtgaactaacat

SEQ ID NO: 110646 - DNA, 25 bp, Probe sequence
gccctcaaatctatgtgaactaaca

SEQ ID NO: 110647 - DNA, 25 bp, Probe sequence
gctatttatgaaatgattatgacat

SEQ ID NO: 110648 - DNA, 25 bp, Probe sequence
gtgaactaacataatttgagggttt

SEQ ID NO: 110649 - DNA, 25 bp, Probe sequence
tgccctcaaatctatgtgaactaac

SEQ ID NO: 110650 - DNA, 25 bp, Probe sequence
taataaatgccctcaaatctatgtg

SEQ ID NO: 110651 - DNA, 25 bp, Probe sequence
taatttgagggttttattttgctat

SEQ ID NO: 110652 - DNA, 25 bp, Probe sequence
taaatgccctcaaatctatgtgaac

SEQ ID NO: 110653 - DNA, 25 bp, Probe sequence
tttattttgctatttatgaaatgat

SEQ ID NO: 110654 - DNA, 25 bp, Probe sequence
ataacgcgattagaaactgttggca

SEQ ID NO: 110655 - DNA, 25 bp, Probe sequence
atgtcagcagtttttcgctatactt

SEQ ID NO: 110656 - DNA, 25 bp, Probe sequence
acgcgattagaaactgttggcaaag

SEQ ID NO: 110657 - DNA, 25 bp, Probe sequence
aattataattcactgaggtgctatc

SEQ ID NO: 110658 - DNA, 25 bp, Probe sequence
caaagtaatgtcagcagtttttcgc

SEQ ID NO: 110659 - DNA, 25 bp, Probe sequence
gcagtttttcgctatacttaacaga

SEQ ID NO: 110660 - DNA, 25 bp, Probe sequence
gaattttacatgcactattatgata

SEQ ID NO: 110661 - DNA, 25 bp, Probe sequence
gaaaaatggtcaacttagcataaaa

SEQ ID NO: 110662 - DNA, 25 bp, Probe sequence
gaaatttagtgatatgaacagcatt

SEQ ID NO: 110663 - DNA, 25 bp, Probe sequence
gataattaaatagtagcgtgttttt

SEQ ID NO: 110664 - DNA, 25 bp, Probe sequence
gtttttcgctatacttaacagaaat

SEQ ID NO: 110665 - DNA, 25 bp, Probe sequence
gtaatgtcagcagtttttcgctata

SEQ ID NO: 110666 - DNA, 25 bp, Probe sequence
gtcagcagtttttcgctatacttaa

SEQ ID NO: 110667 - DNA, 25 bp, Probe sequence
gtgatatgaacagcattatttgaaa

SEQ ID NO: 110668 - DNA, 25 bp, Probe sequence
tgttggcaaagtaatgtcagcagtt

SEQ ID NO: 110669 - DNA, 25 bp, Probe sequence
atcgaagtgagccatctatacttta

SEQ ID NO: 110670 - DNA, 25 bp, Probe sequence
atgcattttacctatgatattttgt

SEQ ID NO: 110671 - DNA, 25 bp, Probe sequence
atgatattttgtatttcggactaaa

SEQ ID NO: 110672 - DNA, 25 bp, Probe sequence
acctatgatattttgtatttcggac

SEQ ID NO: 110673 - DNA, 25 bp, Probe sequence
acgcaaatcgaagtgagccatctat

SEQ ID NO: 110674 - DNA, 25 bp, Probe sequence
aaatcaaacgtaggaggcaatggtc

SEQ ID NO: 110675 - DNA, 25 bp, Probe sequence
cagtaatccttttttttatgcattt

SEQ ID NO: 110676 - DNA, 25 bp, Probe sequence
cttttttttatgcattttacctatg

SEQ ID NO: 110677 - DNA, 25 bp, Probe sequence
gccatctatactttagttaaatcaa

SEQ ID NO: 110678 - DNA, 25 bp, Probe sequence
gcaaatcgaagtgagccatctatac

SEQ ID NO: 110679 - DNA, 25 bp, Probe sequence
gaagtgagccatctatactttagtt

SEQ ID NO: 110680 - DNA, 25 bp, Probe sequence
gagccatctatactttagttaaatc

SEQ ID NO: 110681 - DNA, 25 bp, Probe sequence
gtatttcggactaaaaatcacgcaa

SEQ ID NO: 110682 - DNA, 25 bp, Probe sequence
gtgagccatctatactttagttaaa

SEQ ID NO: 110683 - DNA, 25 bp, Probe sequence
ttcggactaaaaatcacgcaaatcg

SEQ ID NO: 110684 - DNA, 25 bp, Probe sequence
atttgagccattgttattatcgtaa

SEQ ID NO: 110685 - DNA, 25 bp, Probe sequence
ataactgggatatagacgtttttat

SEQ ID NO: 110686 - DNA, 25 bp, Probe sequence
agcaatttgagccattgttattatc

SEQ ID NO: 110687 - DNA, 25 bp, Probe sequence
acgtctatactccagtttataactg

SEQ ID NO: 110688 - DNA, 25 bp, Probe sequence
aacgtctatactccagtttataact

SEQ ID NO: 110689 - DNA, 25 bp, Probe sequence
aatagcaatttgagccattgttatt

SEQ ID NO: 110690 - DNA, 25 bp, Probe sequence
aatttgagccattgttattatcgta

SEQ ID NO: 110691 - DNA, 25 bp, Probe sequence
gcaagataatagcaatttgagccat

SEQ ID NO: 110692 - DNA, 25 bp, Probe sequence
gaaaaacctaagcaagataatagca

SEQ ID NO: 110693 - DNA, 25 bp, Probe sequence
gagccattgttattatcgtaaaaaa

SEQ ID NO: 110694 - DNA, 25 bp, Probe sequence
gataatagcaatttgagccattgtt

SEQ ID NO: 110695 - DNA, 25 bp, Probe sequence
gtctatactccagtttataactggg

SEQ ID NO: 110696 - DNA, 25 bp, Probe sequence
tatactccagtttataactgggata

SEQ ID NO: 110697 - DNA, 25 bp, Probe sequence
tttgagccattgttattatcgtaaa

SEQ ID NO: 110698 - DNA, 25 bp, Probe sequence
ttgagccattgttattatcgtaaaa

SEQ ID NO: 110699 - DNA, 25 bp, Probe sequence
atacattttcattctactatcaagt

SEQ ID NO: 110700 - DNA, 25 bp, Probe sequence
aaatacattttcattctactatcaa

SEQ ID NO: 110701 - DNA, 25 bp, Probe sequence
aatattataattgtatcggcgttta

SEQ ID NO: 110702 - DNA, 25 bp, Probe sequence
ctttgtctgtaattattatagcaca

SEQ ID NO: 110703 - DNA, 25 bp, Probe sequence
ctcgtttcactttgtctgtaattat

SEQ ID NO: 110704 - DNA, 25 bp, Probe sequence
cctcgtttcactttgtctgtaatta

SEQ ID NO: 110705 - DNA, 25 bp, Probe sequence
gtttcactttgtctgtaattattat

SEQ ID NO: 110706 - DNA, 25 bp, Probe sequence
gtatcggcgtttacaaattgaaccg

SEQ ID NO: 110707 - DNA, 25 bp, Probe sequence
gtaaatacattttcattctactatc

SEQ ID NO: 110708 - DNA, 25 bp, Probe sequence
gtctgtaattattatagcacaaaat

SEQ ID NO: 110709 - DNA, 25 bp, Probe sequence
tatcggcgtttacaaattgaaccgg

SEQ ID NO: 110710 - DNA, 25 bp, Probe sequence
tcctcgtttcactttgtctgtaatt

SEQ ID NO: 110711 - DNA, 25 bp, Probe sequence
tcgtttcactttgtctgtaattatt

SEQ ID NO: 110712 - DNA, 25 bp, Probe sequence
tcactttgtctgtaattattatagc

SEQ ID NO: 110713 - DNA, 25 bp, Probe sequence
ttgaaccggtacaattataattgga

SEQ ID NO: 110714 - DNA, 25 bp, Probe sequence
attttagggttagagcccgagacat

SEQ ID NO: 110715 - DNA, 25 bp, Probe sequence
agggttagagcccgagacataaatt

SEQ ID NO: 110716 - DNA, 25 bp, Probe sequence
aggacctacagtgttataatggcgg

SEQ ID NO: 110717 - DNA, 25 bp, Probe sequence
acctacagtgttataatggcgggcc

SEQ ID NO: 110718 - DNA, 25 bp, Probe sequence
ctacagtgttataatggcgggcccc

SEQ ID NO: 110719 - DNA, 25 bp, Probe sequence
cctacagtgttataatggcgggccc

SEQ ID NO: 110720 - DNA, 25 bp, Probe sequence
gacctacagtgttataatggcgggc

SEQ ID NO: 110721 - DNA, 25 bp, Probe sequence
gagcccgagacataaattaatatag

SEQ ID NO: 110722 - DNA, 25 bp, Probe sequence
gttagagcccgagacataaattaat

SEQ ID NO: 110723 - DNA, 25 bp, Probe sequence
gtaggacctacagtgttataatggc

SEQ ID NO: 110724 - DNA, 25 bp, Probe sequence
gggttagagcccgagacataaatta

SEQ ID NO: 110725 - DNA, 25 bp, Probe sequence
tagagcccgagacataaattaatat

SEQ ID NO: 110726 - DNA, 25 bp, Probe sequence
tagggttagagcccgagacataaat

SEQ ID NO: 110727 - DNA, 25 bp, Probe sequence
tagtaggacctacagtgttataatg

SEQ ID NO: 110728 - DNA, 25 bp, Probe sequence
ttagggttagagcccgagacataaa

SEQ ID NO: 110729 - DNA, 25 bp, Probe sequence
actaatcaacgataacgatattgtt

SEQ ID NO: 110730 - DNA, 25 bp, Probe sequence
aaataatgccactaactaagtatag

SEQ ID NO: 110731 - DNA, 25 bp, Probe sequence
caaagtacagttagtggcattatat

SEQ ID NO: 110732 - DNA, 25 bp, Probe sequence
gaaagtctttaacccaaattgatga

SEQ ID NO: 110733 - DNA, 25 bp, Probe sequence
gaaattaaagtagcagtcaaacata

SEQ ID NO: 110734 - DNA, 25 bp, Probe sequence
gatgacttactaatcaacgataacg

SEQ ID NO: 110735 - DNA, 25 bp, Probe sequence
gatacaaagtacagttagtggcatt

SEQ ID NO: 110736 - DNA, 25 bp, Probe sequence
gttaagtagatgattagtgtcacaa

SEQ ID NO: 110737 - DNA, 25 bp, Probe sequence
gtatagtgttaatgtttgagtgttt

SEQ ID NO: 110738 - DNA, 25 bp, Probe sequence
gtagcagtcaaacatagatacaaag

SEQ ID NO: 110739 - DNA, 25 bp, Probe sequence
tgttccaatcccgtgatgttaaaat

SEQ ID NO: 110740 - DNA, 25 bp, Probe sequence
tgagtgtttatgaaagtctttaacc

SEQ ID NO: 110741 - DNA, 25 bp, Probe sequence
tccaatcccgtgatgttaaaatttt

SEQ ID NO: 110742 - DNA, 25 bp, Probe sequence
taacccaaattgatgacttactaat

SEQ ID NO: 110743 - DNA, 25 bp, Probe sequence
ttctgttccaatcccgtgatgttaa

SEQ ID NO: 110744 - DNA, 25 bp, Probe sequence
atgatatacgaatgttgcatgttat

SEQ ID NO: 110745 - DNA, 25 bp, Probe sequence
accttcatatcatagctgtgtttga

SEQ ID NO: 110746 - DNA, 25 bp, Probe sequence
aaaaaagcacagccatgatatacga

SEQ ID NO: 110747 - DNA, 25 bp, Probe sequence
aaaagcacagccatgatatacgaat

SEQ ID NO: 110748 - DNA, 25 bp, Probe sequence
aaccttcatatcatagctgtgtttg

SEQ ID NO: 110749 - DNA, 25 bp, Probe sequence
aagcacagccatgatatacgaatgt

SEQ ID NO: 110750 - DNA, 25 bp, Probe sequence
cagccatgatatacgaatgttgcat

SEQ ID NO: 110751 - DNA, 25 bp, Probe sequence
catatcatagctgtgtttgattcat

SEQ ID NO: 110752 - DNA, 25 bp, Probe sequence
gcatgttatatgctaaaccttcata

SEQ ID NO: 110753 - DNA, 25 bp, Probe sequence
gcacagccatgatatacgaatgttg

SEQ ID NO: 110754 - DNA, 25 bp, Probe sequence
gttgcatgttatatgctaaaccttc

SEQ ID NO: 110755 - DNA, 25 bp, Probe sequence
gttatatgctaaaccttcatatcat

SEQ ID NO: 110756 - DNA, 25 bp, Probe sequence
taaaccttcatatcatagctgtgtt

SEQ ID NO: 110757 - DNA, 25 bp, Probe sequence
tatgctaaaccttcatatcatagct

SEQ ID NO: 110758 - DNA, 25 bp, Probe sequence
tatacgaatgttgcatgttatatgc

SEQ ID NO: 110759 - DNA, 25 bp, Probe sequence
aaaaccctcagcattaaagcaacgc

SEQ ID NO: 110760 - DNA, 25 bp, Probe sequence
aacaatgatgagtatatttcggaag

SEQ ID NO: 110761 - DNA, 25 bp, Probe sequence
aaccctcagcattaaagcaacgcta

SEQ ID NO: 110762 - DNA, 25 bp, Probe sequence
aagcaacgctaagggcctaacaatg

SEQ ID NO: 110763 - DNA, 25 bp, Probe sequence
aagggcctaacaatgatgagtatat

SEQ ID NO: 110764 - DNA, 25 bp, Probe sequence
aattatgattaaaaaccctcagcat

SEQ ID NO: 110765 - DNA, 25 bp, Probe sequence
ccctcagcattaaagcaacgctaag

SEQ ID NO: 110766 - DNA, 25 bp, Probe sequence
gctaagggcctaacaatgatgagta

SEQ ID NO: 110767 - DNA, 25 bp, Probe sequence
gcattaaagcaacgctaagggccta

SEQ ID NO: 110768 - DNA, 25 bp, Probe sequence
gcaacgctaagggcctaacaatgat

SEQ ID NO: 110769 - DNA, 25 bp, Probe sequence
gatgagtatatttcggaagatacgt

SEQ ID NO: 110770 - DNA, 25 bp, Probe sequence
gattaaaaaccctcagcattaaagc

SEQ ID NO: 110771 - DNA, 25 bp, Probe sequence
ggcctaacaatgatgagtatatttc

SEQ ID NO: 110772 - DNA, 25 bp, Probe sequence
taaagcaacgctaagggcctaacaa

SEQ ID NO: 110773 - DNA, 25 bp, Probe sequence
ttatgattaaaaaccctcagcatta

SEQ ID NO: 110774 - DNA, 25 bp, Probe sequence
attaatcatacagttatatacccga

SEQ ID NO: 110775 - DNA, 25 bp, Probe sequence
attatattccttctctttattgtgt

SEQ ID NO: 110776 - DNA, 25 bp, Probe sequence
atttgatgacatatgaagacgtgaa

SEQ ID NO: 110777 - DNA, 25 bp, Probe sequence
atacccgattattatattcatcata

SEQ ID NO: 110778 - DNA, 25 bp, Probe sequence
atacagttatatacccgattattat

SEQ ID NO: 110779 - DNA, 25 bp, Probe sequence
atcatacagttatatacccgattat

SEQ ID NO: 110780 - DNA, 25 bp, Probe sequence
cgtgaatgacttttattgtctacaa

SEQ ID NO: 110781 - DNA, 25 bp, Probe sequence
cgattattatattcatcatatcatg

SEQ ID NO: 110782 - DNA, 25 bp, Probe sequence
gaagacgtgaatgacttttattgtc

SEQ ID NO: 110783 - DNA, 25 bp, Probe sequence
tgtctacaaacagacgtctgaagta

SEQ ID NO: 110784 - DNA, 25 bp, Probe sequence
tatattccttctctttattgtgtaa

SEQ ID NO: 110785 - DNA, 25 bp, Probe sequence
tattgtctacaaacagacgtctgaa

SEQ ID NO: 110786 - DNA, 25 bp, Probe sequence
tattccttctctttattgtgtaatt

SEQ ID NO: 110787 - DNA, 25 bp, Probe sequence
ttctctttattgtgtaattaatcat

SEQ ID NO: 110788 - DNA, 25 bp, Probe sequence
ttccttctctttattgtgtaattaa

SEQ ID NO: 110789 - DNA, 25 bp, Probe sequence
attagagtaagcgaagaacagagaa

SEQ ID NO: 110790 - DNA, 25 bp, Probe sequence
atttcgaaacataattcttctatta

SEQ ID NO: 110791 - DNA, 25 bp, Probe sequence
atatttcgaaacataattcttctat

SEQ ID NO: 110792 - DNA, 25 bp, Probe sequence
agatatttcgaaacataattcttct

SEQ ID NO: 110793 - DNA, 25 bp, Probe sequence
acagagaaaaacgttcttcgcttat

SEQ ID NO: 110794 - DNA, 25 bp, Probe sequence
aagtgataaagatatttcgaaacat

SEQ ID NO: 110795 - DNA, 25 bp, Probe sequence
cagagaaaaacgttcttcgcttatt

SEQ ID NO: 110796 - DNA, 25 bp, Probe sequence
gaacagagaaaaacgttcttcgctt

SEQ ID NO: 110797 - DNA, 25 bp, Probe sequence
gatagtgaatataattagagtaagc

SEQ ID NO: 110798 - DNA, 25 bp, Probe sequence
gatatttcgaaacataattcttcta

SEQ ID NO: 110799 - DNA, 25 bp, Probe sequence
gtgataaagatatttcgaaacataa

SEQ ID NO: 110800 - DNA, 25 bp, Probe sequence
tcgaaacataattcttctattatat

SEQ ID NO: 110801 - DNA, 25 bp, Probe sequence
tatttcgaaacataattcttctatt

SEQ ID NO: 110802 - DNA, 25 bp, Probe sequence
tttcgaaacataattcttctattat

SEQ ID NO: 110803 - DNA, 25 bp, Probe sequence
ttcgaaacataattcttctattata

SEQ ID NO: 110804 - DNA, 25 bp, Probe sequence
attgcttgtatgattgattttttat

SEQ ID NO: 110805 - DNA, 25 bp, Probe sequence
atagatgatcgttcactcacacata

SEQ ID NO: 110806 - DNA, 25 bp, Probe sequence
ataagtcatgatttccttacatatc

SEQ ID NO: 110807 - DNA, 25 bp, Probe sequence
atgaaggtacagaggagtgagaaca

SEQ ID NO: 110808 - DNA, 25 bp, Probe sequence
agatgtcactccttgtaaaaattaa

SEQ ID NO: 110809 - DNA, 25 bp, Probe sequence
catatcataccacagttattgagaa

SEQ ID NO: 110810 - DNA, 25 bp, Probe sequence
ctcacacataagtcatgatttcctt

SEQ ID NO: 110811 - DNA, 25 bp, Probe sequence
cgttcactcacacataagtcatgat

SEQ ID NO: 110812 - DNA, 25 bp, Probe sequence
gagatgaagtgaacggatgtataga

SEQ ID NO: 110813 - DNA, 25 bp, Probe sequence
gatgtatagatgatcgttcactcac

SEQ ID NO: 110814 - DNA, 25 bp, Probe sequence
gatgatcgttcactcacacataagt

SEQ ID NO: 110815 - DNA, 25 bp, Probe sequence
gatcgttcactcacacataagtcat

SEQ ID NO: 110816 - DNA, 25 bp, Probe sequence
gatttccttacatatcataccacag

SEQ ID NO: 110817 - DNA, 25 bp, Probe sequence
tgattgattttttatagtatgttta

SEQ ID NO: 110818 - DNA, 25 bp, Probe sequence
tccttacatatcataccacagttat

SEQ ID NO: 110819 - DNA, 25 bp, Probe sequence
atatcaatgtatggctattttgtaa

SEQ ID NO: 110820 - DNA, 25 bp, Probe sequence
aatcctttactcagttgtctaattc

SEQ ID NO: 110821 - DNA, 25 bp, Probe sequence
aaagcttaagcgaatgcagtgagag

SEQ ID NO: 110822 - DNA, 25 bp, Probe sequence
aattcttttagtatgtgcagtacag

SEQ ID NO: 110823 - DNA, 25 bp, Probe sequence
catggacgaatgattagttgttaat

SEQ ID NO: 110824 - DNA, 25 bp, Probe sequence
gaattaaatcctttactcagttgtc

SEQ ID NO: 110825 - DNA, 25 bp, Probe sequence
gaaccgcgaacatggacgaatgatt

SEQ ID NO: 110826 - DNA, 25 bp, Probe sequence
gagaatggaatttggttgatatgat

SEQ ID NO: 110827 - DNA, 25 bp, Probe sequence
gatatgatttgatggatgattacta

SEQ ID NO: 110828 - DNA, 25 bp, Probe sequence
gattactatcatacattagcgttga

SEQ ID NO: 110829 - DNA, 25 bp, Probe sequence
gtatgtgcagtacagtttaattgaa

SEQ ID NO: 110830 - DNA, 25 bp, Probe sequence
tgtatggctattttgtaatgacaat

SEQ ID NO: 110831 - DNA, 25 bp, Probe sequence
tgcagtgagagatgtcattttaata

SEQ ID NO: 110832 - DNA, 25 bp, Probe sequence
tttactcagttgtctaattctttta

SEQ ID NO: 110833 - DNA, 25 bp, Probe sequence
ttagcgttgaaccgcgaacatggac

SEQ ID NO: 110834 - DNA, 25 bp, Probe sequence
atcatacgcaacttgggattttttc

SEQ ID NO: 110835 - DNA, 25 bp, Probe sequence
atatcatacgcaacttgggattttt

SEQ ID NO: 110836 - DNA, 25 bp, Probe sequence
atcccaagttacaatatcatacgca

SEQ ID NO: 110837 - DNA, 25 bp, Probe sequence
acagtaaatcccaagttacaatatc

SEQ ID NO: 110838 - DNA, 25 bp, Probe sequence
acaatatcatacgcaacttgggatt

SEQ ID NO: 110839 - DNA, 25 bp, Probe sequence
aatcccaagttacaatatcatacgc

SEQ ID NO: 110840 - DNA, 25 bp, Probe sequence
aatatcatacgcaacttgggatttt

SEQ ID NO: 110841 - DNA, 25 bp, Probe sequence
caatatcatacgcaacttgggattt

SEQ ID NO: 110842 - DNA, 25 bp, Probe sequence
catacgcaacttgggattttttcgt

SEQ ID NO: 110843 - DNA, 25 bp, Probe sequence
cccaagttacaatatcatacgcaac

SEQ ID NO: 110844 - DNA, 25 bp, Probe sequence
gttacaatatcatacgcaacttggg

SEQ ID NO: 110845 - DNA, 25 bp, Probe sequence
tcccaagttacaatatcatacgcaa

SEQ ID NO: 110846 - DNA, 25 bp, Probe sequence
tcatacgcaacttgggattttttcg

SEQ ID NO: 110847 - DNA, 25 bp, Probe sequence
taaatcccaagttacaatatcatac

SEQ ID NO: 110848 - DNA, 25 bp, Probe sequence
tacaatatcatacgcaacttgggat

SEQ ID NO: 110849 - DNA, 25 bp, Probe sequence
atgacctttcaatcttatttttata

SEQ ID NO: 110850 - DNA, 25 bp, Probe sequence
agatgacctttcaatcttattttta

SEQ ID NO: 110851 - DNA, 25 bp, Probe sequence
accactcctccaatgataagattga

SEQ ID NO: 110852 - DNA, 25 bp, Probe sequence
actcctccaatgataagattgaaag

SEQ ID NO: 110853 - DNA, 25 bp, Probe sequence
aaccactcctccaatgataagattg

SEQ ID NO: 110854 - DNA, 25 bp, Probe sequence
aaggcaagatgacctttcaatctta

SEQ ID NO: 110855 - DNA, 25 bp, Probe sequence
ccactcctccaatgataagattgaa

SEQ ID NO: 110856 - DNA, 25 bp, Probe sequence
gcaagatgacctttcaatcttattt

SEQ ID NO: 110857 - DNA, 25 bp, Probe sequence
gacctttcaatcttatttttatatt

SEQ ID NO: 110858 - DNA, 25 bp, Probe sequence
gatgacctttcaatcttatttttat

SEQ ID NO: 110859 - DNA, 25 bp, Probe sequence
ggcaagatgacctttcaatcttatt

SEQ ID NO: 110860 - DNA, 25 bp, Probe sequence
tgacctttcaatcttatttttatat

SEQ ID NO: 110861 - DNA, 25 bp, Probe sequence
taaccactcctccaatgataagatt

SEQ ID NO: 110862 - DNA, 25 bp, Probe sequence
tttcaatcttatttttatattttag

SEQ ID NO: 110863 - DNA, 25 bp, Probe sequence
ttaaccactcctccaatgataagat

SEQ ID NO: 110864 - DNA, 25 bp, Probe sequence
ataacatacaaaataaagcgaccaa

SEQ ID NO: 110865 - DNA, 25 bp, Probe sequence
acgaattgtaaactgcgaactggtc

SEQ ID NO: 110866 - DNA, 25 bp, Probe sequence
aagcgaccaattttgcagtgttacg

SEQ ID NO: 110867 - DNA, 25 bp, Probe sequence
gcttcctcccaattatttatgagtt

SEQ ID NO: 110868 - DNA, 25 bp, Probe sequence
gcaattttgaaggtaaacatcatat

SEQ ID NO: 110869 - DNA, 25 bp, Probe sequence
gaactggtcgctttttattgatgtc

SEQ ID NO: 110870 - DNA, 25 bp, Probe sequence
gaccaattttgcagtgttacgaatt

SEQ ID NO: 110871 - DNA, 25 bp, Probe sequence
gattcttgaaaaatgtcggttaact

SEQ ID NO: 110872 - DNA, 25 bp, Probe sequence
gttaatcatatcagaacaatacatt

SEQ ID NO: 110873 - DNA, 25 bp, Probe sequence
gtttgattacataatgattcttgaa

SEQ ID NO: 110874 - DNA, 25 bp, Probe sequence
gtaaactgcgaactggtcgcttttt

SEQ ID NO: 110875 - DNA, 25 bp, Probe sequence
tgtcggttaactttaaggtgacaag

SEQ ID NO: 110876 - DNA, 25 bp, Probe sequence
ggtgacaagttattgcaattttgaa

SEQ ID NO: 110877 - DNA, 25 bp, Probe sequence
ggtcgctttttattgatgtcatgat

SEQ ID NO: 110878 - DNA, 25 bp, Probe sequence
tttgcttcctcccaattatttatga

SEQ ID NO: 110879 - DNA, 25 bp, Probe sequence
attatttgagtaaggagcacttttt

SEQ ID NO: 110880 - DNA, 25 bp, Probe sequence
atttgagtaaggagcactttttcaa

SEQ ID NO: 110881 - DNA, 25 bp, Probe sequence
atattatttgagtaaggagcacttt

SEQ ID NO: 110882 - DNA, 25 bp, Probe sequence
ataaccatttaatcctttatgtatt

SEQ ID NO: 110883 - DNA, 25 bp, Probe sequence
aataaccatttaatcctttatgtat

SEQ ID NO: 110884 - DNA, 25 bp, Probe sequence
aatacttaaaaaactatatacatat

SEQ ID NO: 110885 - DNA, 25 bp, Probe sequence
ctatatacatatactaataatttat

SEQ ID NO: 110886 - DNA, 25 bp, Probe sequence
tgagtaaggagcactttttcaaaaa

SEQ ID NO: 110887 - DNA, 25 bp, Probe sequence
taatttaattttagtatacacattt

SEQ ID NO: 110888 - DNA, 25 bp, Probe sequence
taaggagcactttttcaaaaaatag

SEQ ID NO: 110889 - DNA, 25 bp, Probe sequence
taaccatttaatcctttatgtattt

SEQ ID NO: 110890 - DNA, 25 bp, Probe sequence
tatttgagtaaggagcactttttca

SEQ ID NO: 110891 - DNA, 25 bp, Probe sequence
ttatttgagtaaggagcactttttc

SEQ ID NO: 110892 - DNA, 25 bp, Probe sequence
ttaattttagtatacacatttatat

SEQ ID NO: 110893 - DNA, 25 bp, Probe sequence
ttgagtaaggagcactttttcaaaa

SEQ ID NO: 110894 - DNA, 25 bp, Probe sequence
attggcaaagtcacattttctaatg

SEQ ID NO: 110895 - DNA, 25 bp, Probe sequence
attttctaatgtggctttgcttatc

SEQ ID NO: 110896 - DNA, 25 bp, Probe sequence
atgtggctttgcttatcatttttta

SEQ ID NO: 110897 - DNA, 25 bp, Probe sequence
aattggcaaagtcacattttctaat

SEQ ID NO: 110898 - DNA, 25 bp, Probe sequence
cattttctaatgtggctttgcttat

SEQ ID NO: 110899 - DNA, 25 bp, Probe sequence
gcattctgaaattggcaaagtcaca

SEQ ID NO: 110900 - DNA, 25 bp, Probe sequence
gaaattggcaaagtcacattttcta

SEQ ID NO: 110901 - DNA, 25 bp, Probe sequence
gtggctttgcttatcattttttaag

SEQ ID NO: 110902 - DNA, 25 bp, Probe sequence
ggctttgcttatcattttttaagaa

SEQ ID NO: 110903 - DNA, 25 bp, Probe sequence
tgtggctttgcttatcattttttaa

SEQ ID NO: 110904 - DNA, 25 bp, Probe sequence
tctaatgtggctttgcttatcattt

SEQ ID NO: 110905 - DNA, 25 bp, Probe sequence
taatgtggctttgcttatcattttt

SEQ ID NO: 110906 - DNA, 25 bp, Probe sequence
tttctaatgtggctttgcttatcat

SEQ ID NO: 110907 - DNA, 25 bp, Probe sequence
ttttctaatgtggctttgcttatca

SEQ ID NO: 110908 - DNA, 25 bp, Probe sequence
ttggcaaagtcacattttctaatgt

SEQ ID NO: 110909 - DNA, 25 bp, Probe sequence
ataccgtaaagttgatgctcgtcaa

SEQ ID NO: 110910 - DNA, 25 bp, Probe sequence
ataactttaaatacgtaatatgcta

SEQ ID NO: 110911 - DNA, 25 bp, Probe sequence
agataccgtaaagttgatgctcgtc

SEQ ID NO: 110912 - DNA, 25 bp, Probe sequence
accgtaaagttgatgctcgtcaaat

SEQ ID NO: 110913 - DNA, 25 bp, Probe sequence
acaatcttaatgtgagactaaacaa

SEQ ID NO: 110914 - DNA, 25 bp, Probe sequence
aagatagttttatgctttgtataga

SEQ ID NO: 110915 - DNA, 25 bp, Probe sequence
aagttgatgctcgtcaaataataat

SEQ ID NO: 110916 - DNA, 25 bp, Probe sequence
gataccgtaaagttgatgctcgtca

SEQ ID NO: 110917 - DNA, 25 bp, Probe sequence
gatagttttatgctttgtatagata

SEQ ID NO: 110918 - DNA, 25 bp, Probe sequence
gtaaagttgatgctcgtcaaataat

SEQ ID NO: 110919 - DNA, 25 bp, Probe sequence
gtgagactaaacaataaagctttgt

SEQ ID NO: 110920 - DNA, 25 bp, Probe sequence
tgatgctcgtcaaataataatataa

SEQ ID NO: 110921 - DNA, 25 bp, Probe sequence
taaaaagcaatagataccgtaaagt

SEQ ID NO: 110922 - DNA, 25 bp, Probe sequence
tatgctttgtatagataaaaaccta

SEQ ID NO: 110923 - DNA, 25 bp, Probe sequence
ttggcggttaagtaaaaagcaatag

SEQ ID NO: 110924 - DNA, 25 bp, Probe sequence
atatcaccatattattttatactca

SEQ ID NO: 110925 - DNA, 25 bp, Probe sequence
atcaacttcaacgtatatcaccata

SEQ ID NO: 110926 - DNA, 25 bp, Probe sequence
atcaccatattattttatactcaat

SEQ ID NO: 110927 - DNA, 25 bp, Probe sequence
atgattttgtaaatactgtgaagta

SEQ ID NO: 110928 - DNA, 25 bp, Probe sequence
agttatggaatattgaggtgcgaat

SEQ ID NO: 110929 - DNA, 25 bp, Probe sequence
accatattattttatactcaatgat

SEQ ID NO: 110930 - DNA, 25 bp, Probe sequence
acttcaacgtatatcaccatattat

SEQ ID NO: 110931 - DNA, 25 bp, Probe sequence
aaaatcaacttcaacgtatatcacc

SEQ ID NO: 110932 - DNA, 25 bp, Probe sequence
aatcaacttcaacgtatatcaccat

SEQ ID NO: 110933 - DNA, 25 bp, Probe sequence
caacttcaacgtatatcaccatatt

SEQ ID NO: 110934 - DNA, 25 bp, Probe sequence
gaatggatttaagtggattgatatt

SEQ ID NO: 110935 - DNA, 25 bp, Probe sequence
tcaacgtatatcaccatattatttt

SEQ ID NO: 110936 - DNA, 25 bp, Probe sequence
tcaacttcaacgtatatcaccatat

SEQ ID NO: 110937 - DNA, 25 bp, Probe sequence
tattattttatactcaatgatgtga

SEQ ID NO: 110938 - DNA, 25 bp, Probe sequence
ttatactcaatgatgtgaatggatt

SEQ ID NO: 110939 - DNA, 25 bp, Probe sequence
attacatataggtgtgggtaaattt

SEQ ID NO: 110940 - DNA, 25 bp, Probe sequence
atactattaatatcttttttactat

SEQ ID NO: 110941 - DNA, 25 bp, Probe sequence
agtatatactattaatatctttttt

SEQ ID NO: 110942 - DNA, 25 bp, Probe sequence
acatataggtgtgggtaaattttat

SEQ ID NO: 110943 - DNA, 25 bp, Probe sequence
aaagacaaaataatgagtaggagtt

SEQ ID NO: 110944 - DNA, 25 bp, Probe sequence
catataggtgtgggtaaattttatt

SEQ ID NO: 110945 - DNA, 25 bp, Probe sequence
ctattaatatcttttttactataat

SEQ ID NO: 110946 - DNA, 25 bp, Probe sequence
gtattacatataggtgtgggtaaat

SEQ ID NO: 110947 - DNA, 25 bp, Probe sequence
gtatatactattaatatctttttta

SEQ ID NO: 110948 - DNA, 25 bp, Probe sequence
tgtattacatataggtgtgggtaaa

SEQ ID NO: 110949 - DNA, 25 bp, Probe sequence
tacatataggtgtgggtaaatttta

SEQ ID NO: 110950 - DNA, 25 bp, Probe sequence
taggtgtgggtaaattttatttatg

SEQ ID NO: 110951 - DNA, 25 bp, Probe sequence
tatactattaatatcttttttacta

SEQ ID NO: 110952 - DNA, 25 bp, Probe sequence
tattaatatcttttttactataatt

SEQ ID NO: 110953 - DNA, 25 bp, Probe sequence
ttgtattacatataggtgtgggtaa

SEQ ID NO: 110954 - DNA, 25 bp, Probe sequence
atttcgaacacataggggcgataac

SEQ ID NO: 110955 - DNA, 25 bp, Probe sequence
attaagcgacatttgggtgttgttt

SEQ ID NO: 110956 - DNA, 25 bp, Probe sequence
aagcgacatttgggtgttgtttaat

SEQ ID NO: 110957 - DNA, 25 bp, Probe sequence
aagaagcattaagcgacatttgggt

SEQ ID NO: 110958 - DNA, 25 bp, Probe sequence
gcgacatttgggtgttgtttaatgc

SEQ ID NO: 110959 - DNA, 25 bp, Probe sequence
gcattaagcgacatttgggtgttgt

SEQ ID NO: 110960 - DNA, 25 bp, Probe sequence
gaagcattaagcgacatttgggtgt

SEQ ID NO: 110961 - DNA, 25 bp, Probe sequence
gacatttgggtgttgtttaatgctt

SEQ ID NO: 110962 - DNA, 25 bp, Probe sequence
gagatatttcgaacacataggggcg

SEQ ID NO: 110963 - DNA, 25 bp, Probe sequence
gatatttcgaacacataggggcgat

SEQ ID NO: 110964 - DNA, 25 bp, Probe sequence
gtaaaacgaatttgaagaagcatta

SEQ ID NO: 110965 - DNA, 25 bp, Probe sequence
tgggtgttgtttaatgctttttatt

SEQ ID NO: 110966 - DNA, 25 bp, Probe sequence
taatcaagagatatttcgaacacat

SEQ ID NO: 110967 - DNA, 25 bp, Probe sequence
taagcgacatttgggtgttgtttaa

SEQ ID NO: 110968 - DNA, 25 bp, Probe sequence
ttgggtgttgtttaatgctttttat

SEQ ID NO: 110969 - DNA, 25 bp, Probe sequence
attgaaaaggttattgtagtgtatt

SEQ ID NO: 110970 - DNA, 25 bp, Probe sequence
aaatcttgcgtcaaacatttaaacg

SEQ ID NO: 110971 - DNA, 25 bp, Probe sequence
aaagcatattatcagtattgtagtg

SEQ ID NO: 110972 - DNA, 25 bp, Probe sequence
aatgtgtgggaggcaatttttagag

SEQ ID NO: 110973 - DNA, 25 bp, Probe sequence
aattaatcaaaatcttgcgtcaaac

SEQ ID NO: 110974 - DNA, 25 bp, Probe sequence
gcacatcgacttattttttaaaact

SEQ ID NO: 110975 - DNA, 25 bp, Probe sequence
gaaaatgacagccatctaaggagaa

SEQ ID NO: 110976 - DNA, 25 bp, Probe sequence
gatgacataattttcagtagatagt

SEQ ID NO: 110977 - DNA, 25 bp, Probe sequence
gtagatagttgtaaattaacactga

SEQ ID NO: 110978 - DNA, 25 bp, Probe sequence
gtgtgtggaaaatgacagccatcta

SEQ ID NO: 110979 - DNA, 25 bp, Probe sequence
gtgggaggcaatttttagagataca

SEQ ID NO: 110980 - DNA, 25 bp, Probe sequence
ggttaaacattgttcaaacatcaca

SEQ ID NO: 110981 - DNA, 25 bp, Probe sequence
tgcgtcaaacatttaaacgaatttt

SEQ ID NO: 110982 - DNA, 25 bp, Probe sequence
ttatcagtattgtagtgtgtggaaa

SEQ ID NO: 110983 - DNA, 25 bp, Probe sequence
ttgatgcacatcgacttatttttta

SEQ ID NO: 110984 - DNA, 25 bp, Probe sequence
atataagaacacaaacgtaagtttg

SEQ ID NO: 110985 - DNA, 25 bp, Probe sequence
atgagctttagcgacaataattttt

SEQ ID NO: 110986 - DNA, 25 bp, Probe sequence
agtaaatgagctttagcgacaataa

SEQ ID NO: 110987 - DNA, 25 bp, Probe sequence
accagtttcaaaaagtaaatgagct

SEQ ID NO: 110988 - DNA, 25 bp, Probe sequence
aaatgagctttagcgacaataattt

SEQ ID NO: 110989 - DNA, 25 bp, Probe sequence
aaagtaaatgagctttagcgacaat

SEQ ID NO: 110990 - DNA, 25 bp, Probe sequence
aaaagtaaatgagctttagcgacaa

SEQ ID NO: 110991 - DNA, 25 bp, Probe sequence
aagtaaatgagctttagcgacaata

SEQ ID NO: 110992 - DNA, 25 bp, Probe sequence
aatgagctttagcgacaataatttt

SEQ ID NO: 110993 - DNA, 25 bp, Probe sequence
ccagtttcaaaaagtaaatgagctt

SEQ ID NO: 110994 - DNA, 25 bp, Probe sequence
gagctttagcgacaataatttttaa

SEQ ID NO: 110995 - DNA, 25 bp, Probe sequence
gtaaatgagctttagcgacaataat

SEQ ID NO: 110996 - DNA, 25 bp, Probe sequence
tgagctttagcgacaataattttta

SEQ ID NO: 110997 - DNA, 25 bp, Probe sequence
taaccagtttcaaaaagtaaatgag

SEQ ID NO: 110998 - DNA, 25 bp, Probe sequence
taaatgagctttagcgacaataatt

SEQ ID NO: 110999 - DNA, 25 bp, Probe sequence
atatttaaggcatcgactaacgcat

SEQ ID NO: 111000 - DNA, 25 bp, Probe sequence
agtgctctcttagaagtagattttc

SEQ ID NO: 111001 - DNA, 25 bp, Probe sequence
agtcaataactgcttttaagagagc

SEQ ID NO: 111002 - DNA, 25 bp, Probe sequence
agacaatgcacttctaaatatttaa

SEQ ID NO: 111003 - DNA, 25 bp, Probe sequence
aaaatacgttagacaatgcacttct

SEQ ID NO: 111004 - DNA, 25 bp, Probe sequence
gtagattttcagtcaataactgctt

SEQ ID NO: 111005 - DNA, 25 bp, Probe sequence
gtaattaaataaagtgctctcttag

SEQ ID NO: 111006 - DNA, 25 bp, Probe sequence
ggcatcgactaacgcattgttcaaa

SEQ ID NO: 111007 - DNA, 25 bp, Probe sequence
taaggcatcgactaacgcattgttc

SEQ ID NO: 111008 - DNA, 25 bp, Probe sequence
tgctcatagcatcggacaaaaacca

SEQ ID NO: 111009 - DNA, 25 bp, Probe sequence
tcgactaacgcattgttcaaatata

SEQ ID NO: 111010 - DNA, 25 bp, Probe sequence
tcggacaaaaaccattgacgaactt

SEQ ID NO: 111011 - DNA, 25 bp, Probe sequence
tagcatcggacaaaaaccattgacg

SEQ ID NO: 111012 - DNA, 25 bp, Probe sequence
ttaagagagcattttgtatttgata

SEQ ID NO: 111013 - DNA, 25 bp, Probe sequence
ttgtatttgataatgctcatagcat

SEQ ID NO: 111014 - DNA, 25 bp, Probe sequence
atcattactaggcagtgagcattta

SEQ ID NO: 111015 - DNA, 25 bp, Probe sequence
aagcctagtaacgagggggcaatca

SEQ ID NO: 111016 - DNA, 25 bp, Probe sequence
aatgacatcctcgcttttcatttgt

SEQ ID NO: 111017 - DNA, 25 bp, Probe sequence
cagagtatactatgaatcgtcttat

SEQ ID NO: 111018 - DNA, 25 bp, Probe sequence
cagtatcgctgaaaatccatgaatt

SEQ ID NO: 111019 - DNA, 25 bp, Probe sequence
catcctcgcttttcatttgttaatc

SEQ ID NO: 111020 - DNA, 25 bp, Probe sequence
ctatgaatcgtcttatttgtgaata

SEQ ID NO: 111021 - DNA, 25 bp, Probe sequence
cctcgcttttcatttgttaatcaga

SEQ ID NO: 111022 - DNA, 25 bp, Probe sequence
gcttttcatttgttaatcagagtat

SEQ ID NO: 111023 - DNA, 25 bp, Probe sequence
gaatttcatataaaaaagcctagta

SEQ ID NO: 111024 - DNA, 25 bp, Probe sequence
gaataactgataggattttttggta

SEQ ID NO: 111025 - DNA, 25 bp, Probe sequence
gacagacagtatcgctgaaaatcca

SEQ ID NO: 111026 - DNA, 25 bp, Probe sequence
gagggggcaatcattactaggcagt

SEQ ID NO: 111027 - DNA, 25 bp, Probe sequence
gggcaatcattactaggcagtgagc

SEQ ID NO: 111028 - DNA, 25 bp, Probe sequence
taatcaatagacagacagtatcgct

SEQ ID NO: 111029 - DNA, 25 bp, Probe sequence
atctctctcatgtgataggtctccc

SEQ ID NO: 111030 - DNA, 25 bp, Probe sequence
aaatatcttttcatagtatagcaat

SEQ ID NO: 111031 - DNA, 25 bp, Probe sequence
gaatatgtctgataggaaggcctag

SEQ ID NO: 111032 - DNA, 25 bp, Probe sequence
gaaggcctagtcactcaaatgaatt

SEQ ID NO: 111033 - DNA, 25 bp, Probe sequence
gagatagcacactgtacacataatg

SEQ ID NO: 111034 - DNA, 25 bp, Probe sequence
gataaatcacaaatctctctcatgt

SEQ ID NO: 111035 - DNA, 25 bp, Probe sequence
gatacgtggatgagtgaatatgtct

SEQ ID NO: 111036 - DNA, 25 bp, Probe sequence
gttggagcgttgtgatttttatgag

SEQ ID NO: 111037 - DNA, 25 bp, Probe sequence
gttcacatatttgttagcttttcaa

SEQ ID NO: 111038 - DNA, 25 bp, Probe sequence
gtaagttggaaatacgttggagcgt

SEQ ID NO: 111039 - DNA, 25 bp, Probe sequence
gtatgagtgaggactgctatttata

SEQ ID NO: 111040 - DNA, 25 bp, Probe sequence
ggatgagtttatggttgttccaata

SEQ ID NO: 111041 - DNA, 25 bp, Probe sequence
tgtaatttccttcctaaaactagat

SEQ ID NO: 111042 - DNA, 25 bp, Probe sequence
taacgtcttgctattattggataat

SEQ ID NO: 111043 - DNA, 25 bp, Probe sequence
taggtctcccattaaatcatgctta

SEQ ID NO: 111044 - DNA, 25 bp, Probe sequence
atgtgccggtatttttatgtttatg

SEQ ID NO: 111045 - DNA, 25 bp, Probe sequence
atggcctctaagtattcaatattta

SEQ ID NO: 111046 - DNA, 25 bp, Probe sequence
agccggtacatcatgtgccggtatt

SEQ ID NO: 111047 - DNA, 25 bp, Probe sequence
aaactttcacattcaattaataata

SEQ ID NO: 111048 - DNA, 25 bp, Probe sequence
aataaactttcacattcaattaata

SEQ ID NO: 111049 - DNA, 25 bp, Probe sequence
catcatgtgccggtatttttatgtt

SEQ ID NO: 111050 - DNA, 25 bp, Probe sequence
gaaaattagaaatattccgtgaaat

SEQ ID NO: 111051 - DNA, 25 bp, Probe sequence
gtaaaatggcctctaagtattcaat

SEQ ID NO: 111052 - DNA, 25 bp, Probe sequence
gtgccggtatttttatgtttatgta

SEQ ID NO: 111053 - DNA, 25 bp, Probe sequence
ggtacatcatgtgccggtattttta

SEQ ID NO: 111054 - DNA, 25 bp, Probe sequence
ggtatttttatgtttatgtattatt

SEQ ID NO: 111055 - DNA, 25 bp, Probe sequence
taagccggtacatcatgtgccggta

SEQ ID NO: 111056 - DNA, 25 bp, Probe sequence
ttattaagccggtacatcatgtgcc

SEQ ID NO: 111057 - DNA, 25 bp, Probe sequence
ttttattaagccggtacatcatgtg

SEQ ID NO: 111058 - DNA, 25 bp, Probe sequence
ttttgtagtaaaatggcctctaagt

SEQ ID NO: 111059 - DNA, 25 bp, Probe sequence
agtaccttttacacgatggaatgaa

SEQ ID NO: 111060 - DNA, 25 bp, Probe sequence
attgtcgacaaatatcatactgtat

SEQ ID NO: 111061 - DNA, 25 bp, Probe sequence
atttttgtaaattcactgattcaag

SEQ ID NO: 111062 - DNA, 25 bp, Probe sequence
ataacggcaaatgtaagcgtttaca

SEQ ID NO: 111063 - DNA, 25 bp, Probe sequence
actgattcaagtattttaagtcaat

SEQ ID NO: 111064 - DNA, 25 bp, Probe sequence
acaacagaaataacagcatgctacg

SEQ ID NO: 111065 - DNA, 25 bp, Probe sequence
aaatcgataatgagtcacgtttttt

SEQ ID NO: 111066 - DNA, 25 bp, Probe sequence
aaaaatgtcataatttattgtcgac

SEQ ID NO: 111067 - DNA, 25 bp, Probe sequence
aacagcatgctacgatatttttgta

SEQ ID NO: 111068 - DNA, 25 bp, Probe sequence
aacatttatcattttctcaagtacc

SEQ ID NO: 111069 - DNA, 25 bp, Probe sequence
catagtaacgtgattcagtcgatga

SEQ ID NO: 111070 - DNA, 25 bp, Probe sequence
cattttctcaagtaccttttacacg

SEQ ID NO: 111071 - DNA, 25 bp, Probe sequence
gatggaatgaacttactttttacga

SEQ ID NO: 111072 - DNA, 25 bp, Probe sequence
tgaacttactttttacgaaattatg

SEQ ID NO: 111073 - DNA, 25 bp, Probe sequence
taatgagtcacgtttttttatagaa

SEQ ID NO: 111074 - DNA, 25 bp, Probe sequence
atcaccaagttggcgcaacagcgca

SEQ ID NO: 111075 - DNA, 25 bp, Probe sequence
atggcaaagctaaaccccatcacca

SEQ ID NO: 111076 - DNA, 25 bp, Probe sequence
cagcgcatcataacttggtgatggg

SEQ ID NO: 111077 - DNA, 25 bp, Probe sequence
cataacttggtgatgggattttatc

SEQ ID NO: 111078 - DNA, 25 bp, Probe sequence
ccaagttggcgcaacagcgcatcat

SEQ ID NO: 111079 - DNA, 25 bp, Probe sequence
ccccatcaccaagttggcgcaacag

SEQ ID NO: 111080 - DNA, 25 bp, Probe sequence
ccatcaccaagttggcgcaacagcg

SEQ ID NO: 111081 - DNA, 25 bp, Probe sequence
gcgcaacagcgcatcataacttggt

SEQ ID NO: 111082 - DNA, 25 bp, Probe sequence
gcaacagcgcatcataacttggtga

SEQ ID NO: 111083 - DNA, 25 bp, Probe sequence
gaagtatctaaattaaattcatggc

SEQ ID NO: 111084 - DNA, 25 bp, Probe sequence
gttggcgcaacagcgcatcataact

SEQ ID NO: 111085 - DNA, 25 bp, Probe sequence
tggtgatgggattttatcataacaa

SEQ ID NO: 111086 - DNA, 25 bp, Probe sequence
tcatggcaaagctaaaccccatcac

SEQ ID NO: 111087 - DNA, 25 bp, Probe sequence
taaattcatggcaaagctaaacccc

SEQ ID NO: 111088 - DNA, 25 bp, Probe sequence
taaaccccatcaccaagttggcgca

SEQ ID NO: 111089 - DNA, 25 bp, Probe sequence
atatctttttgaaaattgtagtcat

SEQ ID NO: 111090 - DNA, 25 bp, Probe sequence
atgaagtccctccaaaaatcatttg

SEQ ID NO: 111091 - DNA, 25 bp, Probe sequence
agtccctccaaaaatcatttgataa

SEQ ID NO: 111092 - DNA, 25 bp, Probe sequence
acagctataattgtaaacgctatca

SEQ ID NO: 111093 - DNA, 25 bp, Probe sequence
aagtccctccaaaaatcatttgata

SEQ ID NO: 111094 - DNA, 25 bp, Probe sequence
aatgtaacaatatctttttgaaaat

SEQ ID NO: 111095 - DNA, 25 bp, Probe sequence
aattgtaaacgctatcataaaatgt

SEQ ID NO: 111096 - DNA, 25 bp, Probe sequence
gctataattgtaaacgctatcataa

SEQ ID NO: 111097 - DNA, 25 bp, Probe sequence
gaagtccctccaaaaatcatttgat

SEQ ID NO: 111098 - DNA, 25 bp, Probe sequence
gaaaattgtagtcatatttatgtat

SEQ ID NO: 111099 - DNA, 25 bp, Probe sequence
gtaaacgctatcataaaatgtaaca

SEQ ID NO: 111100 - DNA, 25 bp, Probe sequence
gtccctccaaaaatcatttgataat

SEQ ID NO: 111101 - DNA, 25 bp, Probe sequence
tgaagtccctccaaaaatcatttga

SEQ ID NO: 111102 - DNA, 25 bp, Probe sequence
tcatttgataatatagtttacagct

SEQ ID NO: 111103 - DNA, 25 bp, Probe sequence
tatgaagtccctccaaaaatcattt

SEQ ID NO: 111104 - DNA, 25 bp, Probe sequence
atatcaaccaacagtgtgccacggg

SEQ ID NO: 111105 - DNA, 25 bp, Probe sequence
aaccgttacgagagatgagagctgt

SEQ ID NO: 111106 - DNA, 25 bp, Probe sequence
aatcacgatgattgtctacagttgc

SEQ ID NO: 111107 - DNA, 25 bp, Probe sequence
caaccaacagtgtgccacgggcata

SEQ ID NO: 111108 - DNA, 25 bp, Probe sequence
cacacatcacactctatctaggacc

SEQ ID NO: 111109 - DNA, 25 bp, Probe sequence
gcaggtggatttgaatatactacta

SEQ ID NO: 111110 - DNA, 25 bp, Probe sequence
gcaactcgttaggacaatcacgatg

SEQ ID NO: 111111 - DNA, 25 bp, Probe sequence
gaagacggttgaacgtatagatctc

SEQ ID NO: 111112 - DNA, 25 bp, Probe sequence
gagagctgttgttagttccacacat

SEQ ID NO: 111113 - DNA, 25 bp, Probe sequence
gattgtctacagttgcaggtggatt

SEQ ID NO: 111114 - DNA, 25 bp, Probe sequence
gttgttagttccacacatcacactc

SEQ ID NO: 111115 - DNA, 25 bp, Probe sequence
gtgccacgggcatattaaattgaag

SEQ ID NO: 111116 - DNA, 25 bp, Probe sequence
ggaccaatctaaactatatcaacca

SEQ ID NO: 111117 - DNA, 25 bp, Probe sequence
tcacactctatctaggaccaatcta

SEQ ID NO: 111118 - DNA, 25 bp, Probe sequence
taaaaaagcacctagcaactcgtta

SEQ ID NO: 111119 - DNA, 25 bp, Probe sequence
atattgtaaatgactttacgtgaaa

SEQ ID NO: 111120 - DNA, 25 bp, Probe sequence
aaaaacgacttatggagtgaggaat

SEQ ID NO: 111121 - DNA, 25 bp, Probe sequence
accccttcatcttaatgattactat

SEQ ID NO: 111122 - DNA, 25 bp, Probe sequence
aaaacgacttatggagtgaggaata

SEQ ID NO: 111123 - DNA, 25 bp, Probe sequence
caccccttcatcttaatgattacta

SEQ ID NO: 111124 - DNA, 25 bp, Probe sequence
cttcatcttaatgattactattata

SEQ ID NO: 111125 - DNA, 25 bp, Probe sequence
cccttcatcttaatgattactatta

SEQ ID NO: 111126 - DNA, 25 bp, Probe sequence
ccccttcatcttaatgattactatt

SEQ ID NO: 111127 - DNA, 25 bp, Probe sequence
ccttcatcttaatgattactattat

SEQ ID NO: 111128 - DNA, 25 bp, Probe sequence
gaaaaaacgacttatggagtgagga

SEQ ID NO: 111129 - DNA, 25 bp, Probe sequence
gatatattgtaaatgactttacgtg

SEQ ID NO: 111130 - DNA, 25 bp, Probe sequence
gtcaccccttcatcttaatgattac

SEQ ID NO: 111131 - DNA, 25 bp, Probe sequence
gtgaaaaaacgacttatggagtgag

SEQ ID NO: 111132 - DNA, 25 bp, Probe sequence
tgtcaccccttcatcttaatgatta

SEQ ID NO: 111133 - DNA, 25 bp, Probe sequence
tcaccccttcatcttaatgattact

SEQ ID NO: 111134 - DNA, 25 bp, Probe sequence
ggtacctaattatcttaggtggctg

SEQ ID NO: 111135 - DNA, 25 bp, Probe sequence
atgtaatgggttcatctcgttttgt

SEQ ID NO: 111136 - DNA, 25 bp, Probe sequence
aaaacgagatgaccatcattaatta

SEQ ID NO: 111137 - DNA, 25 bp, Probe sequence
aacgataaaaaaacgagatgaccat

SEQ ID NO: 111138 - DNA, 25 bp, Probe sequence
aatgggttcatctcgttttgtttgt

SEQ ID NO: 111139 - DNA, 25 bp, Probe sequence
aattatcttaggtggctgaatgaat

SEQ ID NO: 111140 - DNA, 25 bp, Probe sequence
ctaattatcttaggtggctgaatga

SEQ ID NO: 111141 - DNA, 25 bp, Probe sequence
gaatgtaatgggttcatctcgtttt

SEQ ID NO: 111142 - DNA, 25 bp, Probe sequence
gaccatcattaattaaaggtaccta

SEQ ID NO: 111143 - DNA, 25 bp, Probe sequence
gttcatctcgttttgtttgtttacg

SEQ ID NO: 111144 - DNA, 25 bp, Probe sequence
gtaatgggttcatctcgttttgttt

SEQ ID NO: 111145 - DNA, 25 bp, Probe sequence
ggtggctgaatgaatgtaatgggtt

SEQ ID NO: 111146 - DNA, 25 bp, Probe sequence
tcatctcgttttgtttgtttacgat

SEQ ID NO: 111147 - DNA, 25 bp, Probe sequence
taatgggttcatctcgttttgtttg

SEQ ID NO: 111148 - DNA, 25 bp, Probe sequence
tatcttaggtggctgaatgaatgta

SEQ ID NO: 111149 - DNA, 25 bp, Probe sequence
atttatcttaaatgttgttgtgttg

SEQ ID NO: 111150 - DNA, 25 bp, Probe sequence
atgtcatgttatattgaaggtgcag

SEQ ID NO: 111151 - DNA, 25 bp, Probe sequence
agtatcgatttaatatcgtattatt

SEQ ID NO: 111152 - DNA, 25 bp, Probe sequence
gcagttgtttttcattctcaagagg

SEQ ID NO: 111153 - DNA, 25 bp, Probe sequence
gaattattttcataccaatacaaat

SEQ ID NO: 111154 - DNA, 25 bp, Probe sequence
gaaggtgcagttgtttttcattctc

SEQ ID NO: 111155 - DNA, 25 bp, Probe sequence
gaaaaatctgaaaacttactataat

SEQ ID NO: 111156 - DNA, 25 bp, Probe sequence
gattcaacgccacaactaaaagtgt

SEQ ID NO: 111157 - DNA, 25 bp, Probe sequence
gttgtttttcattctcaagaggggg

SEQ ID NO: 111158 - DNA, 25 bp, Probe sequence
gttgttgtgttgattcaacgccaca

SEQ ID NO: 111159 - DNA, 25 bp, Probe sequence
ggtgcagttgtttttcattctcaag

SEQ ID NO: 111160 - DNA, 25 bp, Probe sequence
ggaaatgcacatatttgtaaatgat

SEQ ID NO: 111161 - DNA, 25 bp, Probe sequence
tgtgttgattcaacgccacaactaa

SEQ ID NO: 111162 - DNA, 25 bp, Probe sequence
ttttcataccaatacaaattaacta

SEQ ID NO: 111163 - DNA, 25 bp, Probe sequence
ttttcattctcaagagggggtcaaa

SEQ ID NO: 111164 - DNA, 25 bp, Probe sequence
atggttgatcgaataactgtttatc

SEQ ID NO: 111165 - DNA, 25 bp, Probe sequence
agtgaaataaagcgcctgtctcatt

SEQ ID NO: 111166 - DNA, 25 bp, Probe sequence
aatcgtgctgttatcatggcacatc

SEQ ID NO: 111167 - DNA, 25 bp, Probe sequence
aataggctatgtaaatcgtgctgtt

SEQ ID NO: 111168 - DNA, 25 bp, Probe sequence
caggcgtatctgtttatgagcttaa

SEQ ID NO: 111169 - DNA, 25 bp, Probe sequence
gcgcctgtctcattagcgaaaacta

SEQ ID NO: 111170 - DNA, 25 bp, Probe sequence
gaaaactaaagggacaggcgtatct

SEQ ID NO: 111171 - DNA, 25 bp, Probe sequence
gaaataaagcgcctgtctcattagc

SEQ ID NO: 111172 - DNA, 25 bp, Probe sequence
gatcgaataactgtttatcatgatg

SEQ ID NO: 111173 - DNA, 25 bp, Probe sequence
gtagcatcacagtgttgaatttcaa

SEQ ID NO: 111174 - DNA, 25 bp, Probe sequence
ggcacatcagatataagtagcatca

SEQ ID NO: 111175 - DNA, 25 bp, Probe sequence
ggcgtatctgtttatgagcttaata

SEQ ID NO: 111176 - DNA, 25 bp, Probe sequence
tgctgttatcatggcacatcagata

SEQ ID NO: 111177 - DNA, 25 bp, Probe sequence
tcatcttctgaatttaataggctat

SEQ ID NO: 111178 - DNA, 25 bp, Probe sequence
taaagcgcctgtctcattagcgaaa

SEQ ID NO: 111179 - DNA, 25 bp, Probe sequence
ataggctccttatttttgatattga

SEQ ID NO: 111180 - DNA, 25 bp, Probe sequence
ataacactgtcttaaatttccatga

SEQ ID NO: 111181 - DNA, 25 bp, Probe sequence
acactgtcttaaatttccatgaaaa

SEQ ID NO: 111182 - DNA, 25 bp, Probe sequence
aacactgtcttaaatttccatgaaa

SEQ ID NO: 111183 - DNA, 25 bp, Probe sequence
cactgtcttaaatttccatgaaaaa

SEQ ID NO: 111184 - DNA, 25 bp, Probe sequence
gctccttatttttgatattgatgtc

SEQ ID NO: 111185 - DNA, 25 bp, Probe sequence
gatgtcattataacactgtcttaaa

SEQ ID NO: 111186 - DNA, 25 bp, Probe sequence
gatttaataggctccttatttttga

SEQ ID NO: 111187 - DNA, 25 bp, Probe sequence
ggctccttatttttgatattgatgt

SEQ ID NO: 111188 - DNA, 25 bp, Probe sequence
taataggctccttatttttgatatt

SEQ ID NO: 111189 - DNA, 25 bp, Probe sequence
taggctccttatttttgatattgat

SEQ ID NO: 111190 - DNA, 25 bp, Probe sequence
tataacactgtcttaaatttccatg

SEQ ID NO: 111191 - DNA, 25 bp, Probe sequence
tattgatgtcattataacactgtct

SEQ ID NO: 111192 - DNA, 25 bp, Probe sequence
tttaataggctccttatttttgata

SEQ ID NO: 111193 - DNA, 25 bp, Probe sequence
ttgatgtcattataacactgtctta

SEQ ID NO: 111194 - DNA, 25 bp, Probe sequence
attccttttctattcaatattgttt

SEQ ID NO: 111195 - DNA, 25 bp, Probe sequence
atattgttttcaaagtaccatggaa

SEQ ID NO: 111196 - DNA, 25 bp, Probe sequence
atgattccttttctattcaatattg

SEQ ID NO: 111197 - DNA, 25 bp, Probe sequence
actatgattccttttctattcaata

SEQ ID NO: 111198 - DNA, 25 bp, Probe sequence
caatgatgaacagtcttgatagaat

SEQ ID NO: 111199 - DNA, 25 bp, Probe sequence
ctatgattccttttctattcaatat

SEQ ID NO: 111200 - DNA, 25 bp, Probe sequence
gaataatcaatgatgaacagtcttg

SEQ ID NO: 111201 - DNA, 25 bp, Probe sequence
gaacagtcttgatagaatagaattg

SEQ ID NO: 111202 - DNA, 25 bp, Probe sequence
gattccttttctattcaatattgtt

SEQ ID NO: 111203 - DNA, 25 bp, Probe sequence
tgattccttttctattcaatattgt

SEQ ID NO: 111204 - DNA, 25 bp, Probe sequence
tccttttctattcaatattgttttc

SEQ ID NO: 111205 - DNA, 25 bp, Probe sequence
tcaatattgttttcaaagtaccatg

SEQ ID NO: 111206 - DNA, 25 bp, Probe sequence
tatgattccttttctattcaatatt

SEQ ID NO: 111207 - DNA, 25 bp, Probe sequence
ttttctattcaatattgttttcaaa

SEQ ID NO: 111208 - DNA, 25 bp, Probe sequence
ttgttttcaaagtaccatggaaaga

SEQ ID NO: 111209 - DNA, 25 bp, Probe sequence
atgttatgtcggtttgacatgacag

SEQ ID NO: 111210 - DNA, 25 bp, Probe sequence
acaggataagtttggagatgacgga

SEQ ID NO: 111211 - DNA, 25 bp, Probe sequence
aaacgttatcatatacgtgggtata

SEQ ID NO: 111212 - DNA, 25 bp, Probe sequence
aacgctaaaatgttatgtcggtttg

SEQ ID NO: 111213 - DNA, 25 bp, Probe sequence
gctaaaatgttatgtcggtttgaca

SEQ ID NO: 111214 - DNA, 25 bp, Probe sequence
gaacgctaaaatgttatgtcggttt

SEQ ID NO: 111215 - DNA, 25 bp, Probe sequence
gaaaaacgttatcatatacgtgggt

SEQ ID NO: 111216 - DNA, 25 bp, Probe sequence
gacaggataagtttggagatgacgg

SEQ ID NO: 111217 - DNA, 25 bp, Probe sequence
gacatgacaggataagtttggagat

SEQ ID NO: 111218 - DNA, 25 bp, Probe sequence
gagggaatggtattaagaacgctaa

SEQ ID NO: 111219 - DNA, 25 bp, Probe sequence
gttatgtcggtttgacatgacagga

SEQ ID NO: 111220 - DNA, 25 bp, Probe sequence
ggtttgacatgacaggataagtttg

SEQ ID NO: 111221 - DNA, 25 bp, Probe sequence
ggaatggtattaagaacgctaaaat

SEQ ID NO: 111222 - DNA, 25 bp, Probe sequence
tcggtttgacatgacaggataagtt

SEQ ID NO: 111223 - DNA, 25 bp, Probe sequence
tacgtgggtatatgaagagggaatg

SEQ ID NO: 111224 - DNA, 25 bp, Probe sequence
atgactgctataatgagtaatcaat

SEQ ID NO: 111225 - DNA, 25 bp, Probe sequence
aatgtcacaccctcaatgaatatgt

SEQ ID NO: 111226 - DNA, 25 bp, Probe sequence
aatgaatatgtgtatttgcttttaa

SEQ ID NO: 111227 - DNA, 25 bp, Probe sequence
aatactagctactaaagtctattta

SEQ ID NO: 111228 - DNA, 25 bp, Probe sequence
aattcattttcatttatataagtaa

SEQ ID NO: 111229 - DNA, 25 bp, Probe sequence
cgttaatgtcacaccctcaatgaat

SEQ ID NO: 111230 - DNA, 25 bp, Probe sequence
gcttttaaaatggtgactatgtagt

SEQ ID NO: 111231 - DNA, 25 bp, Probe sequence
gacatcatatttatagcgtttgtgt

SEQ ID NO: 111232 - DNA, 25 bp, Probe sequence
gactatgtagttatgtaatttgatt

SEQ ID NO: 111233 - DNA, 25 bp, Probe sequence
gtttattagtgattgggtatttgaa

SEQ ID NO: 111234 - DNA, 25 bp, Probe sequence
gtttaggcgttaatgtcacaccctc

SEQ ID NO: 111235 - DNA, 25 bp, Probe sequence
taaagtctatttatatacgtcaaaa

SEQ ID NO: 111236 - DNA, 25 bp, Probe sequence
tagcgtttgtgtttattagtgattg

SEQ ID NO: 111237 - DNA, 25 bp, Probe sequence
tagttaattagcaaagacatcatat

SEQ ID NO: 111238 - DNA, 25 bp, Probe sequence
taggcgttaatgtcacaccctcaat

SEQ ID NO: 111239 - DNA, 25 bp, Probe sequence
atatgtgacggtgttttatatattt

SEQ ID NO: 111240 - DNA, 25 bp, Probe sequence
ataagtaagtggctttcctcttgat

SEQ ID NO: 111241 - DNA, 25 bp, Probe sequence
aaaagaggcattcactcaatatgtg

SEQ ID NO: 111242 - DNA, 25 bp, Probe sequence
aacaccgtccataagtaagtggctt

SEQ ID NO: 111243 - DNA, 25 bp, Probe sequence
aagtaagtggctttcctcttgataa

SEQ ID NO: 111244 - DNA, 25 bp, Probe sequence
aagtggctttcctcttgataaaaga

SEQ ID NO: 111245 - DNA, 25 bp, Probe sequence
caccgtccataagtaagtggctttc

SEQ ID NO: 111246 - DNA, 25 bp, Probe sequence
cactcaatatgtgacggtgttttat

SEQ ID NO: 111247 - DNA, 25 bp, Probe sequence
ccataagtaagtggctttcctcttg

SEQ ID NO: 111248 - DNA, 25 bp, Probe sequence
gcattcactcaatatgtgacggtgt

SEQ ID NO: 111249 - DNA, 25 bp, Probe sequence
gaggcattcactcaatatgtgacgg

SEQ ID NO: 111250 - DNA, 25 bp, Probe sequence
gtccataagtaagtggctttcctct

SEQ ID NO: 111251 - DNA, 25 bp, Probe sequence
gtaagtggctttcctcttgataaaa

SEQ ID NO: 111252 - DNA, 25 bp, Probe sequence
ggctttcctcttgataaaagaggca

SEQ ID NO: 111253 - DNA, 25 bp, Probe sequence
tacaaaaacaccgtccataagtaag

SEQ ID NO: 111254 - DNA, 25 bp, Probe sequence
attagatattcatgttgacaattta

SEQ ID NO: 111255 - DNA, 25 bp, Probe sequence
atatcaaaatgtttatggcgcaaga

SEQ ID NO: 111256 - DNA, 25 bp, Probe sequence
atcctcctatttgtaattgtaagcg

SEQ ID NO: 111257 - DNA, 25 bp, Probe sequence
agcgatttcttaaaaacgtagatat

SEQ ID NO: 111258 - DNA, 25 bp, Probe sequence
aaaatgtcgcagtatatttagttag

SEQ ID NO: 111259 - DNA, 25 bp, Probe sequence
aacgtagatatgcaatctctttcat

SEQ ID NO: 111260 - DNA, 25 bp, Probe sequence
aatctctttcatattttaatccgaa

SEQ ID NO: 111261 - DNA, 25 bp, Probe sequence
gcaatctctttcatattttaatccg

SEQ ID NO: 111262 - DNA, 25 bp, Probe sequence
gacatctaacgaaatggtggtgcaa

SEQ ID NO: 111263 - DNA, 25 bp, Probe sequence
gtttatggcgcaagattttatagga

SEQ ID NO: 111264 - DNA, 25 bp, Probe sequence
gtaatatcctcctatttgtaattgt

SEQ ID NO: 111265 - DNA, 25 bp, Probe sequence
ggcgcaagattttataggaactttt

SEQ ID NO: 111266 - DNA, 25 bp, Probe sequence
tcgcagtatatttagttagacatct

SEQ ID NO: 111267 - DNA, 25 bp, Probe sequence
tatttgtaattgtaagcgatttctt

SEQ ID NO: 111268 - DNA, 25 bp, Probe sequence
ttaatccgaaaaattgcatatcaaa

SEQ ID NO: 111269 - DNA, 25 bp, Probe sequence
atcagtcactttatctttaatatta

SEQ ID NO: 111270 - DNA, 25 bp, Probe sequence
atggtaagtgtgactggtagaaatc

SEQ ID NO: 111271 - DNA, 25 bp, Probe sequence
agaaatcagtcactttatctttaat

SEQ ID NO: 111272 - DNA, 25 bp, Probe sequence
aaatcagtcactttatctttaatat

SEQ ID NO: 111273 - DNA, 25 bp, Probe sequence
aatcagtcactttatctttaatatt

SEQ ID NO: 111274 - DNA, 25 bp, Probe sequence
cactttatctttaatattatagtta

SEQ ID NO: 111275 - DNA, 25 bp, Probe sequence
cagtcactttatctttaatattata

SEQ ID NO: 111276 - DNA, 25 bp, Probe sequence
ctggtagaaatcagtcactttatct

SEQ ID NO: 111277 - DNA, 25 bp, Probe sequence
gaaatcagtcactttatctttaata

SEQ ID NO: 111278 - DNA, 25 bp, Probe sequence
gttagtaagctaattattggaaaag

SEQ ID NO: 111279 - DNA, 25 bp, Probe sequence
gttagatatctaattgttagtaagc

SEQ ID NO: 111280 - DNA, 25 bp, Probe sequence
gtagaaatcagtcactttatcttta

SEQ ID NO: 111281 - DNA, 25 bp, Probe sequence
gtcactttatctttaatattatagt

SEQ ID NO: 111282 - DNA, 25 bp, Probe sequence
ggtagaaatcagtcactttatcttt

SEQ ID NO: 111283 - DNA, 25 bp, Probe sequence
tagaaatcagtcactttatctttaa

SEQ ID NO: 111284 - DNA, 25 bp, Probe sequence
atttcgtacacttctggctgagtat

SEQ ID NO: 111285 - DNA, 25 bp, Probe sequence
atatttcgtacacttctggctgagt

SEQ ID NO: 111286 - DNA, 25 bp, Probe sequence
acttctggctgagtatatttcggtc

SEQ ID NO: 111287 - DNA, 25 bp, Probe sequence
acacttctggctgagtatatttcgg

SEQ ID NO: 111288 - DNA, 25 bp, Probe sequence
ctggctgagtatatttcggtcggaa

SEQ ID NO: 111289 - DNA, 25 bp, Probe sequence
gctgagtatatttcggtcggaaggg

SEQ ID NO: 111290 - DNA, 25 bp, Probe sequence
gagtatatttcggtcggaagggtat

SEQ ID NO: 111291 - DNA, 25 bp, Probe sequence
gtacacttctggctgagtatatttc

SEQ ID NO: 111292 - DNA, 25 bp, Probe sequence
tggctgagtatatttcggtcggaag

SEQ ID NO: 111293 - DNA, 25 bp, Probe sequence
tctggctgagtatatttcggtcgga

SEQ ID NO: 111294 - DNA, 25 bp, Probe sequence
tcgtacacttctggctgagtatatt

SEQ ID NO: 111295 - DNA, 25 bp, Probe sequence
tatttcgtacacttctggctgagta

SEQ ID NO: 111296 - DNA, 25 bp, Probe sequence
tttcgtacacttctggctgagtata

SEQ ID NO: 111297 - DNA, 25 bp, Probe sequence
ttcgtacacttctggctgagtatat

SEQ ID NO: 111298 - DNA, 25 bp, Probe sequence
ttctggctgagtatatttcggtcgg

SEQ ID NO: 111299 - DNA, 25 bp, Probe sequence
atatcatctttcgataagataacca

SEQ ID NO: 111300 - DNA, 25 bp, Probe sequence
ataaccatatgactttattttttat

SEQ ID NO: 111301 - DNA, 25 bp, Probe sequence
ataagataaccatatgactttattt

SEQ ID NO: 111302 - DNA, 25 bp, Probe sequence
atcatctttcgataagataaccata

SEQ ID NO: 111303 - DNA, 25 bp, Probe sequence
agataaccatatgactttatttttt

SEQ ID NO: 111304 - DNA, 25 bp, Probe sequence
agagatgaatatatcatctttcgat

SEQ ID NO: 111305 - DNA, 25 bp, Probe sequence
aaccatatgactttattttttatca

SEQ ID NO: 111306 - DNA, 25 bp, Probe sequence
aagataaccatatgactttattttt

SEQ ID NO: 111307 - DNA, 25 bp, Probe sequence
ctttcgataagataaccatatgact

SEQ ID NO: 111308 - DNA, 25 bp, Probe sequence
gaatatatcatctttcgataagata

SEQ ID NO: 111309 - DNA, 25 bp, Probe sequence
gataaccatatgactttatttttta

SEQ ID NO: 111310 - DNA, 25 bp, Probe sequence
gataagataaccatatgactttatt

SEQ ID NO: 111311 - DNA, 25 bp, Probe sequence
tcgataagataaccatatgacttta

SEQ ID NO: 111312 - DNA, 25 bp, Probe sequence
taaccatatgactttattttttatc

SEQ ID NO: 111313 - DNA, 25 bp, Probe sequence
ttcgataagataaccatatgacttt

SEQ ID NO: 111314 - DNA, 25 bp, Probe sequence
atacttttgtgaaatcttgcatatt

SEQ ID NO: 111315 - DNA, 25 bp, Probe sequence
atgtcgttatacatactagctgtgt

SEQ ID NO: 111316 - DNA, 25 bp, Probe sequence
actagctgtgtatctacgaatgagt

SEQ ID NO: 111317 - DNA, 25 bp, Probe sequence
aaaatcctccttaatatgtatttat

SEQ ID NO: 111318 - DNA, 25 bp, Probe sequence
aagcgttgtcaatatacttttgtga

SEQ ID NO: 111319 - DNA, 25 bp, Probe sequence
aattatgcaattattatgtcgttat

SEQ ID NO: 111320 - DNA, 25 bp, Probe sequence
aattgctacacataaatttataatt

SEQ ID NO: 111321 - DNA, 25 bp, Probe sequence
gcgataaacttatattagacatgta

SEQ ID NO: 111322 - DNA, 25 bp, Probe sequence
gctgtgtatctacgaatgagtacaa

SEQ ID NO: 111323 - DNA, 25 bp, Probe sequence
gaatgagtacaaacatatttttatt

SEQ ID NO: 111324 - DNA, 25 bp, Probe sequence
gtgaaatcttgcatatttagttatt

SEQ ID NO: 111325 - DNA, 25 bp, Probe sequence
tacatactagctgtgtatctacgaa

SEQ ID NO: 111326 - DNA, 25 bp, Probe sequence
tatgcattttgtgcgataaacttat

SEQ ID NO: 111327 - DNA, 25 bp, Probe sequence
tatgtatttatatgcattttgtgcg

SEQ ID NO: 111328 - DNA, 25 bp, Probe sequence
tattagacatgtatgaaagcgttgt

SEQ ID NO: 111329 - DNA, 25 bp, Probe sequence
ataagacgctcggcacactaaattt

SEQ ID NO: 111330 - DNA, 25 bp, Probe sequence
agacgctcggcacactaaatttgta

SEQ ID NO: 111331 - DNA, 25 bp, Probe sequence
acgctcggcacactaaatttgtatg

SEQ ID NO: 111332 - DNA, 25 bp, Probe sequence
aaataagacgctcggcacactaaat

SEQ ID NO: 111333 - DNA, 25 bp, Probe sequence
aaaataagacgctcggcacactaaa

SEQ ID NO: 111334 - DNA, 25 bp, Probe sequence
aagacgctcggcacactaaatttgt

SEQ ID NO: 111335 - DNA, 25 bp, Probe sequence
aataagacgctcggcacactaaatt

SEQ ID NO: 111336 - DNA, 25 bp, Probe sequence
ctcggcacactaaatttgtatgtgt

SEQ ID NO: 111337 - DNA, 25 bp, Probe sequence
cgctcggcacactaaatttgtatgt

SEQ ID NO: 111338 - DNA, 25 bp, Probe sequence
gacgctcggcacactaaatttgtat

SEQ ID NO: 111339 - DNA, 25 bp, Probe sequence
gtataaaaataagacgctcggcaca

SEQ ID NO: 111340 - DNA, 25 bp, Probe sequence
tgtatgtgtttgagcgtcttttata

SEQ ID NO: 111341 - DNA, 25 bp, Probe sequence
taagacgctcggcacactaaatttg

SEQ ID NO: 111342 - DNA, 25 bp, Probe sequence
taaaaataagacgctcggcacacta

SEQ ID NO: 111343 - DNA, 25 bp, Probe sequence
tttgtatgtgtttgagcgtctttta

SEQ ID NO: 111344 - DNA, 25 bp, Probe sequence
atttaagatacaatgcgtaatatta

SEQ ID NO: 111345 - DNA, 25 bp, Probe sequence
atacaatgcgtaatattaatatgtt

SEQ ID NO: 111346 - DNA, 25 bp, Probe sequence
atgcgtaatattaatatgttattat

SEQ ID NO: 111347 - DNA, 25 bp, Probe sequence
agatacaatgcgtaatattaatatg

SEQ ID NO: 111348 - DNA, 25 bp, Probe sequence
acaatgcgtaatattaatatgttat

SEQ ID NO: 111349 - DNA, 25 bp, Probe sequence
aagatacaatgcgtaatattaatat

SEQ ID NO: 111350 - DNA, 25 bp, Probe sequence
aatgcgtaatattaatatgttatta

SEQ ID NO: 111351 - DNA, 25 bp, Probe sequence
aatttaagatacaatgcgtaatatt

SEQ ID NO: 111352 - DNA, 25 bp, Probe sequence
caatgcgtaatattaatatgttatt

SEQ ID NO: 111353 - DNA, 25 bp, Probe sequence
gaaaaatgaatgaggatgtgatggt

SEQ ID NO: 111354 - DNA, 25 bp, Probe sequence
gatacaatgcgtaatattaatatgt

SEQ ID NO: 111355 - DNA, 25 bp, Probe sequence
taagatacaatgcgtaatattaata

SEQ ID NO: 111356 - DNA, 25 bp, Probe sequence
tacaatgcgtaatattaatatgtta

SEQ ID NO: 111357 - DNA, 25 bp, Probe sequence
tttaagatacaatgcgtaatattaa

SEQ ID NO: 111358 - DNA, 25 bp, Probe sequence
ttaagatacaatgcgtaatattaat

SEQ ID NO: 111359 - DNA, 25 bp, Probe sequence
attatcttggcatttagggagtgtg

SEQ ID NO: 111360 - DNA, 25 bp, Probe sequence
atggcatcgctcttttatttaattt

SEQ ID NO: 111361 - DNA, 25 bp, Probe sequence
aggttgttgacagtattattttata

SEQ ID NO: 111362 - DNA, 25 bp, Probe sequence
agagccacgtattatcttggcattt

SEQ ID NO: 111363 - DNA, 25 bp, Probe sequence
agaatttctataatgaggtgtcaaa

SEQ ID NO: 111364 - DNA, 25 bp, Probe sequence
aatcatcattttaagagccacgtat

SEQ ID NO: 111365 - DNA, 25 bp, Probe sequence
cacgtattatcttggcatttaggga

SEQ ID NO: 111366 - DNA, 25 bp, Probe sequence
cttggcatttagggagtgtgagata

SEQ ID NO: 111367 - DNA, 25 bp, Probe sequence
gcatcgctcttttatttaatttttg

SEQ ID NO: 111368 - DNA, 25 bp, Probe sequence
gacatttaaaatggcatcgctcttt

SEQ ID NO: 111369 - DNA, 25 bp, Probe sequence
gataatgttcatgggaggatgcctt

SEQ ID NO: 111370 - DNA, 25 bp, Probe sequence
gtacgaatgagggcatgtctatggg

SEQ ID NO: 111371 - DNA, 25 bp, Probe sequence
gtgtgagatagtacgaatgagggca

SEQ ID NO: 111372 - DNA, 25 bp, Probe sequence
gggaggatgccttaaaatcatcatt

SEQ ID NO: 111373 - DNA, 25 bp, Probe sequence
tgagggcatgtctatggggataata

SEQ ID NO: 111374 - DNA, 25 bp, Probe sequence
atggttggttctcgttgtattgcag

SEQ ID NO: 111375 - DNA, 25 bp, Probe sequence
aatctgaggtgctacattgttcttt

SEQ ID NO: 111376 - DNA, 25 bp, Probe sequence
ctgaggtgctacattgttcttttat

SEQ ID NO: 111377 - DNA, 25 bp, Probe sequence
cctgtttttttgttgctgtattgcg

SEQ ID NO: 111378 - DNA, 25 bp, Probe sequence
gccgagtgcctgtttttttgttgct

SEQ ID NO: 111379 - DNA, 25 bp, Probe sequence
gcggattatcgtagcattgttgaga

SEQ ID NO: 111380 - DNA, 25 bp, Probe sequence
gatatcacggtttaatccgattctg

SEQ ID NO: 111381 - DNA, 25 bp, Probe sequence
gttgtattgcagatatcacggttta

SEQ ID NO: 111382 - DNA, 25 bp, Probe sequence
gttgagatgtggatatcgctgcatg

SEQ ID NO: 111383 - DNA, 25 bp, Probe sequence
gttgctgtattgcggattatcgtag

SEQ ID NO: 111384 - DNA, 25 bp, Probe sequence
gtttaatccgattctgtattctaat

SEQ ID NO: 111385 - DNA, 25 bp, Probe sequence
gtattctaattaacgcaagtgcagt

SEQ ID NO: 111386 - DNA, 25 bp, Probe sequence
gtgcagtattgatataatctgaggt

SEQ ID NO: 111387 - DNA, 25 bp, Probe sequence
ggatatcgctgcatggttggttctc

SEQ ID NO: 111388 - DNA, 25 bp, Probe sequence
tatcgctgcatggttggttctcgtt

SEQ ID NO: 111389 - DNA, 25 bp, Probe sequence
atgacgtagctcgctaaaatgaact

SEQ ID NO: 111390 - DNA, 25 bp, Probe sequence
atgaactagtaaggtgtggtcagtg

SEQ ID NO: 111391 - DNA, 25 bp, Probe sequence
agctcgctaaaatgaactagtaagg

SEQ ID NO: 111392 - DNA, 25 bp, Probe sequence
acgatgacgtagctcgctaaaatga

SEQ ID NO: 111393 - DNA, 25 bp, Probe sequence
acgtagctcgctaaaatgaactagt

SEQ ID NO: 111394 - DNA, 25 bp, Probe sequence
actaaacgatgacgtagctcgctaa

SEQ ID NO: 111395 - DNA, 25 bp, Probe sequence
aaacgatgacgtagctcgctaaaat

SEQ ID NO: 111396 - DNA, 25 bp, Probe sequence
aactaaacgatgacgtagctcgcta

SEQ ID NO: 111397 - DNA, 25 bp, Probe sequence
aacgatgacgtagctcgctaaaatg

SEQ ID NO: 111398 - DNA, 25 bp, Probe sequence
ctaaacgatgacgtagctcgctaaa

SEQ ID NO: 111399 - DNA, 25 bp, Probe sequence
gatgacgtagctcgctaaaatgaac

SEQ ID NO: 111400 - DNA, 25 bp, Probe sequence
gtagctcgctaaaatgaactagtaa

SEQ ID NO: 111401 - DNA, 25 bp, Probe sequence
ttaactaaacgatgacgtagctcgc

SEQ ID NO: 111402 - DNA, 25 bp, Probe sequence
taactaaacgatgacgtagctcgct

SEQ ID NO: 111403 - DNA, 25 bp, Probe sequence
taaacgatgacgtagctcgctaaaa

SEQ ID NO: 111404 - DNA, 25 bp, Probe sequence
ataatcaacctcactcataagtagt

SEQ ID NO: 111405 - DNA, 25 bp, Probe sequence
ataattaaaatgttgctgtaaatac

SEQ ID NO: 111406 - DNA, 25 bp, Probe sequence
atcaacctcactcataagtagtata

SEQ ID NO: 111407 - DNA, 25 bp, Probe sequence
acctcactcataagtagtatatagt

SEQ ID NO: 111408 - DNA, 25 bp, Probe sequence
aatcaacctcactcataagtagtat

SEQ ID NO: 111409 - DNA, 25 bp, Probe sequence
caacctcactcataagtagtatata

SEQ ID NO: 111410 - DNA, 25 bp, Probe sequence
gataatcaacctcactcataagtag

SEQ ID NO: 111411 - DNA, 25 bp, Probe sequence
tcactcataagtagtatatagtatt

SEQ ID NO: 111412 - DNA, 25 bp, Probe sequence
tcaacctcactcataagtagtatat

SEQ ID NO: 111413 - DNA, 25 bp, Probe sequence
taatcaacctcactcataagtagta

SEQ ID NO: 111414 - DNA, 25 bp, Probe sequence
tactttataccgaacgataatgatt

SEQ ID NO: 111415 - DNA, 25 bp, Probe sequence
tagtatttactttataccgaacgat

SEQ ID NO: 111416 - DNA, 25 bp, Probe sequence
tatagtatttactttataccgaacg

SEQ ID NO: 111417 - DNA, 25 bp, Probe sequence
tatttactttataccgaacgataat

SEQ ID NO: 111418 - DNA, 25 bp, Probe sequence
ttataccgaacgataatgattatca

SEQ ID NO: 111419 - DNA, 25 bp, Probe sequence
attaggactaaggagttgatgcgat

SEQ ID NO: 111420 - DNA, 25 bp, Probe sequence
aatagtctcctttgaatggtttgat

SEQ ID NO: 111421 - DNA, 25 bp, Probe sequence
aattatgacttgtaggcgttgaggt

SEQ ID NO: 111422 - DNA, 25 bp, Probe sequence
catatttttttgtgtagatttgaca

SEQ ID NO: 111423 - DNA, 25 bp, Probe sequence
gaatgctgttaattatgcaggaagg

SEQ ID NO: 111424 - DNA, 25 bp, Probe sequence
gacttgtaggcgttgaggtgttgtt

SEQ ID NO: 111425 - DNA, 25 bp, Probe sequence
gaggtgttgtttcaaaatgtcatac

SEQ ID NO: 111426 - DNA, 25 bp, Probe sequence
gtaggcgttgaggtgttgtttcaaa

SEQ ID NO: 111427 - DNA, 25 bp, Probe sequence
gtcatacataggtggacaatcatat

SEQ ID NO: 111428 - DNA, 25 bp, Probe sequence
gtctcctttgaatggtttgatttag

SEQ ID NO: 111429 - DNA, 25 bp, Probe sequence
gtgttgtttcaaaatgtcatacata

SEQ ID NO: 111430 - DNA, 25 bp, Probe sequence
ggtggacaatcatatttttttgtgt

SEQ ID NO: 111431 - DNA, 25 bp, Probe sequence
tgcgtgcatcatactaaaattagaa

SEQ ID NO: 111432 - DNA, 25 bp, Probe sequence
tagtgaaaatgcgtgcatcatacta

SEQ ID NO: 111433 - DNA, 25 bp, Probe sequence
tatgcaggaaggtgtaacgaaagta

SEQ ID NO: 111434 - DNA, 25 bp, Probe sequence
atattcttggtgtgaagctagtcat

SEQ ID NO: 111435 - DNA, 25 bp, Probe sequence
atcaatacgattatcatctgctctt

SEQ ID NO: 111436 - DNA, 25 bp, Probe sequence
atgcgggatgataggttgaggtgac

SEQ ID NO: 111437 - DNA, 25 bp, Probe sequence
agtatgttgctgaaatttatttgcg

SEQ ID NO: 111438 - DNA, 25 bp, Probe sequence
aaaaacctcgatcatgtagcataac

SEQ ID NO: 111439 - DNA, 25 bp, Probe sequence
gaagttcgacacttttggattcagt

SEQ ID NO: 111440 - DNA, 25 bp, Probe sequence
gaggtgacatctctatatcatatca

SEQ ID NO: 111441 - DNA, 25 bp, Probe sequence
gatcatgtagcataactgaatccaa

SEQ ID NO: 111442 - DNA, 25 bp, Probe sequence
gattcagttcaaatactttgaccga

SEQ ID NO: 111443 - DNA, 25 bp, Probe sequence
gtataggctaacgatttccttggaa

SEQ ID NO: 111444 - DNA, 25 bp, Probe sequence
ggtgttgtggaatgaaatgcgggat

SEQ ID NO: 111445 - DNA, 25 bp, Probe sequence
ggttatgtgggaattgcatcctttt

SEQ ID NO: 111446 - DNA, 25 bp, Probe sequence
ggaattgcatccttttatagtgagg

SEQ ID NO: 111447 - DNA, 25 bp, Probe sequence
tcatctgctctttttggtgttgtgg

SEQ ID NO: 111448 - DNA, 25 bp, Probe sequence
tttatttgcgtgtatcatttgatga

SEQ ID NO: 111449 - DNA, 25 bp, Probe sequence
atttgactggagacgtcatggtaat

SEQ ID NO: 111450 - DNA, 25 bp, Probe sequence
atcatcagcgatttaatatttgact

SEQ ID NO: 111451 - DNA, 25 bp, Probe sequence
acatacgtagcaattggtttcataa

SEQ ID NO: 111452 - DNA, 25 bp, Probe sequence
gaatttaattagagtcattacgcga

SEQ ID NO: 111453 - DNA, 25 bp, Probe sequence
gaaaccagctgtgaatagcgatgca

SEQ ID NO: 111454 - DNA, 25 bp, Probe sequence
gattgcccaaacaaattacatcatt

SEQ ID NO: 111455 - DNA, 25 bp, Probe sequence
gtattggttcattagacgtattagt

SEQ ID NO: 111456 - DNA, 25 bp, Probe sequence
gtgaataggggcagatttggcgatg

SEQ ID NO: 111457 - DNA, 25 bp, Probe sequence
gtggaaggagaggtgactgcaaggt

SEQ ID NO: 111458 - DNA, 25 bp, Probe sequence
ggggcagatttggcgatgaagtgga

SEQ ID NO: 111459 - DNA, 25 bp, Probe sequence
ggtgactgcaaggtaattgcggaat

SEQ ID NO: 111460 - DNA, 25 bp, Probe sequence
tgcggaattaacaatcatcagcgat

SEQ ID NO: 111461 - DNA, 25 bp, Probe sequence
tacgtttccgattgcccaaacaaat

SEQ ID NO: 111462 - DNA, 25 bp, Probe sequence
ttttaactcctttaagatgtgtaat

SEQ ID NO: 111463 - DNA, 25 bp, Probe sequence
ttggatgttagtggcgtattggttc

SEQ ID NO: 111464 - DNA, 25 bp, Probe sequence
attacatgttggcataacctgtttt

SEQ ID NO: 111465 - DNA, 25 bp, Probe sequence
atgttggcataacctgtttttattt

SEQ ID NO: 111466 - DNA, 25 bp, Probe sequence
acatgttggcataacctgtttttat

SEQ ID NO: 111467 - DNA, 25 bp, Probe sequence
acagtattaattacatgttggcata

SEQ ID NO: 111468 - DNA, 25 bp, Probe sequence
aacaggttatcacaacagtattaat

SEQ ID NO: 111469 - DNA, 25 bp, Probe sequence
aattacatgttggcataacctgttt

SEQ ID NO: 111470 - DNA, 25 bp, Probe sequence
gcataacctgtttttatttgtttat

SEQ ID NO: 111471 - DNA, 25 bp, Probe sequence
gaaaacaggttatcacaacagtatt

SEQ ID NO: 111472 - DNA, 25 bp, Probe sequence
gttggcataacctgtttttatttgt

SEQ ID NO: 111473 - DNA, 25 bp, Probe sequence
ggttatcacaacagtattaattaca

SEQ ID NO: 111474 - DNA, 25 bp, Probe sequence
tggcataacctgtttttatttgttt

SEQ ID NO: 111475 - DNA, 25 bp, Probe sequence
tgtttttatttgtttatggatttat

SEQ ID NO: 111476 - DNA, 25 bp, Probe sequence
tacatgttggcataacctgttttta

SEQ ID NO: 111477 - DNA, 25 bp, Probe sequence
tatttgtttatggatttattgggta

SEQ ID NO: 111478 - DNA, 25 bp, Probe sequence
ttgtttatggatttattgggtaata

SEQ ID NO: 111479 - DNA, 25 bp, Probe sequence
aaataaccttattcagtacgcatta

SEQ ID NO: 111480 - DNA, 25 bp, Probe sequence
gtatcgctataacgggcgaacccgt

SEQ ID NO: 111481 - DNA, 25 bp, Probe sequence
ctttcaaaatcttctctcagctact

SEQ ID NO: 111482 - DNA, 25 bp, Probe sequence
ccgtccttcgtacccgaatgaatcg

SEQ ID NO: 111483 - DNA, 25 bp, Probe sequence
ctcagctactaaagactctctgtat

SEQ ID NO: 111484 - DNA, 25 bp, Probe sequence
gcatcaacactccaaggccattttc

SEQ ID NO: 111485 - DNA, 25 bp, Probe sequence
gcagggtgtgttttactttcctctt

SEQ ID NO: 111486 - DNA, 25 bp, Probe sequence
gaatccagtacgccatttaacatca

SEQ ID NO: 111487 - DNA, 25 bp, Probe sequence
gaaagcttatgtttcgcggtaccac

SEQ ID NO: 111488 - DNA, 25 bp, Probe sequence
gacacctcatattggcatcaacact

SEQ ID NO: 111489 - DNA, 25 bp, Probe sequence
gtaatgtgctatcccatacttatta

SEQ ID NO: 111490 - DNA, 25 bp, Probe sequence
gtgtggttaatggttgtctgactca

SEQ ID NO: 111491 - DNA, 25 bp, Probe sequence
ggccattttcaaacacgctttcaaa

SEQ ID NO: 111492 - DNA, 25 bp, Probe sequence
tcgcggtaccacctttatttgttat

SEQ ID NO: 111493 - DNA, 25 bp, Probe sequence
tactttcctctttattgtgtttacg

SEQ ID NO: 111494 - DNA, 25 bp, Probe sequence
atattctttgaagatgatgcgactt

SEQ ID NO: 111495 - DNA, 25 bp, Probe sequence
atataataactctttgtgaatctat

SEQ ID NO: 111496 - DNA, 25 bp, Probe sequence
ataactctttgtgaatctatagata

SEQ ID NO: 111497 - DNA, 25 bp, Probe sequence
ataataactctttgtgaatctatag

SEQ ID NO: 111498 - DNA, 25 bp, Probe sequence
atgatgcgacttcagtaggttggaa

SEQ ID NO: 111499 - DNA, 25 bp, Probe sequence
agatgatgcgacttcagtaggttgg

SEQ ID NO: 111500 - DNA, 25 bp, Probe sequence
aactctttgtgaatctatagatata

SEQ ID NO: 111501 - DNA, 25 bp, Probe sequence
aagatgatgcgacttcagtaggttg

SEQ ID NO: 111502 - DNA, 25 bp, Probe sequence
gcgacttcagtaggttggaagaata

SEQ ID NO: 111503 - DNA, 25 bp, Probe sequence
gagactatatagaagggagtaacgc

SEQ ID NO: 111504 - DNA, 25 bp, Probe sequence
gatgatgcgacttcagtaggttgga

SEQ ID NO: 111505 - DNA, 25 bp, Probe sequence
gatgcgacttcagtaggttggaaga

SEQ ID NO: 111506 - DNA, 25 bp, Probe sequence
gatagttatctatattctttgaaga

SEQ ID NO: 111507 - DNA, 25 bp, Probe sequence
tacacaattttatataataactctt

SEQ ID NO: 111508 - DNA, 25 bp, Probe sequence
tatatagaagggagtaacgctaatt

SEQ ID NO: 111509 - DNA, 25 bp, Probe sequence
atagtatatatgtagaagaggcgga

SEQ ID NO: 111510 - DNA, 25 bp, Probe sequence
atcaattgttcgcctcttttaatta

SEQ ID NO: 111511 - DNA, 25 bp, Probe sequence
aatcaattgttcgcctcttttaatt

SEQ ID NO: 111512 - DNA, 25 bp, Probe sequence
aattgttcgcctcttttaattatgc

SEQ ID NO: 111513 - DNA, 25 bp, Probe sequence
caattgttcgcctcttttaattatg

SEQ ID NO: 111514 - DNA, 25 bp, Probe sequence
cgcctcttttaattatgcgtataat

SEQ ID NO: 111515 - DNA, 25 bp, Probe sequence
gcggaatcaattgttcgcctctttt

SEQ ID NO: 111516 - DNA, 25 bp, Probe sequence
gaagaggcggaatcaattgttcgcc

SEQ ID NO: 111517 - DNA, 25 bp, Probe sequence
gttcgcctcttttaattatgcgtat

SEQ ID NO: 111518 - DNA, 25 bp, Probe sequence
ggaatcaattgttcgcctcttttaa

SEQ ID NO: 111519 - DNA, 25 bp, Probe sequence
ggcggaatcaattgttcgcctcttt

SEQ ID NO: 111520 - DNA, 25 bp, Probe sequence
tgttcgcctcttttaattatgcgta

SEQ ID NO: 111521 - DNA, 25 bp, Probe sequence
tcaattgttcgcctcttttaattat

SEQ ID NO: 111522 - DNA, 25 bp, Probe sequence
ttcgcctcttttaattatgcgtata

SEQ ID NO: 111523 - DNA, 25 bp, Probe sequence
ttgttcgcctcttttaattatgcgt

SEQ ID NO: 111524 - DNA, 25 bp, Probe sequence
attccttgcttatctgttttaagat

SEQ ID NO: 111525 - DNA, 25 bp, Probe sequence
atagaacatgcgttcgcttttgtga

SEQ ID NO: 111526 - DNA, 25 bp, Probe sequence
ataagccgtatagaccacaaggagg

SEQ ID NO: 111527 - DNA, 25 bp, Probe sequence
accacctcacaaccattatagaaca

SEQ ID NO: 111528 - DNA, 25 bp, Probe sequence
acatgcgttcgcttttgtgaagtgt

SEQ ID NO: 111529 - DNA, 25 bp, Probe sequence
acaaccattatagaacatgcgttcg

SEQ ID NO: 111530 - DNA, 25 bp, Probe sequence
aagattgataagccgtatagaccac

SEQ ID NO: 111531 - DNA, 25 bp, Probe sequence
aattattccttgcttatctgtttta

SEQ ID NO: 111532 - DNA, 25 bp, Probe sequence
cttaccacctcacaaccattataga

SEQ ID NO: 111533 - DNA, 25 bp, Probe sequence
gccgtatagaccacaaggaggtgca

SEQ ID NO: 111534 - DNA, 25 bp, Probe sequence
gcgttcgcttttgtgaagtgtattt

SEQ ID NO: 111535 - DNA, 25 bp, Probe sequence
gaagagtagtttgaattattattgt

SEQ ID NO: 111536 - DNA, 25 bp, Probe sequence
gaaaattattccttgcttatctgtt

SEQ ID NO: 111537 - DNA, 25 bp, Probe sequence
gtaatggcgcatgatataattcttt

SEQ ID NO: 111538 - DNA, 25 bp, Probe sequence
ggcgcatgatataattctttattgt

SEQ ID NO: 111539 - DNA, 25 bp, Probe sequence
ataaccctcgtaggcataggcttat

SEQ ID NO: 111540 - DNA, 25 bp, Probe sequence
agacctataagtctctttcctcact

SEQ ID NO: 111541 - DNA, 25 bp, Probe sequence
accctcgtaggcataggcttatggg

SEQ ID NO: 111542 - DNA, 25 bp, Probe sequence
aaataactcgcgagacctataagtc

SEQ ID NO: 111543 - DNA, 25 bp, Probe sequence
aaatgcatagctcttctttttcttg

SEQ ID NO: 111544 - DNA, 25 bp, Probe sequence
aaggatgatgtgaatgttttgtgtt

SEQ ID NO: 111545 - DNA, 25 bp, Probe sequence
catagctcttctttttcttgcatac

SEQ ID NO: 111546 - DNA, 25 bp, Probe sequence
ctataagtctctttcctcactagat

SEQ ID NO: 111547 - DNA, 25 bp, Probe sequence
gctcttctttttcttgcatacgaat

SEQ ID NO: 111548 - DNA, 25 bp, Probe sequence
gaatgttttgtgttcggaatttgca

SEQ ID NO: 111549 - DNA, 25 bp, Probe sequence
gtgttcggaatttgcacaaagatat

SEQ ID NO: 111550 - DNA, 25 bp, Probe sequence
ggatttttttatgtttgggatatag

SEQ ID NO: 111551 - DNA, 25 bp, Probe sequence
taagtctctttcctcactagatagt

SEQ ID NO: 111552 - DNA, 25 bp, Probe sequence
taggcttatgggggatttttttatg

SEQ ID NO: 111553 - DNA, 25 bp, Probe sequence
ttaatatattataaccctcgtaggc

SEQ ID NO: 111554 - DNA, 25 bp, Probe sequence
attaacaaattttattctcttagat

SEQ ID NO: 111555 - DNA, 25 bp, Probe sequence
atctattttatctattacacatata

SEQ ID NO: 111556 - DNA, 25 bp, Probe sequence
atgtgtagacgatttatagttatta

SEQ ID NO: 111557 - DNA, 25 bp, Probe sequence
acacatataactttgaattgcttgc

SEQ ID NO: 111558 - DNA, 25 bp, Probe sequence
aataaagctttacatcaaggaggta

SEQ ID NO: 111559 - DNA, 25 bp, Probe sequence
catgaacacgtctattatttttata

SEQ ID NO: 111560 - DNA, 25 bp, Probe sequence
gaattgcttgctattttaaattaac

SEQ ID NO: 111561 - DNA, 25 bp, Probe sequence
gaatttaattcatgaacacgtctat

SEQ ID NO: 111562 - DNA, 25 bp, Probe sequence
gttattaaattcagagtggtagcaa

SEQ ID NO: 111563 - DNA, 25 bp, Probe sequence
gtaacgcatcactatagggatatct

SEQ ID NO: 111564 - DNA, 25 bp, Probe sequence
gggatatctattttatctattacac

SEQ ID NO: 111565 - DNA, 25 bp, Probe sequence
taactttgaattgcttgctatttta

SEQ ID NO: 111566 - DNA, 25 bp, Probe sequence
tagattttgtccaattatgtgtaga

SEQ ID NO: 111567 - DNA, 25 bp, Probe sequence
tatgtttagctagtaacgcatcact

SEQ ID NO: 111568 - DNA, 25 bp, Probe sequence
tattctcttagattttgtccaatta

SEQ ID NO: 111569 - DNA, 25 bp, Probe sequence
atatacagtgttttattgctaatac

SEQ ID NO: 111570 - DNA, 25 bp, Probe sequence
atctaaaggtgcctagctttctttg

SEQ ID NO: 111571 - DNA, 25 bp, Probe sequence
aaaggtgcctagctttctttgttat

SEQ ID NO: 111572 - DNA, 25 bp, Probe sequence
cagtgttttattgctaatactttga

SEQ ID NO: 111573 - DNA, 25 bp, Probe sequence
ctttctttgttatgattagcactat

SEQ ID NO: 111574 - DNA, 25 bp, Probe sequence
ctaaaggtgcctagctttctttgtt

SEQ ID NO: 111575 - DNA, 25 bp, Probe sequence
gcctagctttctttgttatgattag

SEQ ID NO: 111576 - DNA, 25 bp, Probe sequence
gttaggtatctaaaggtgcctagct

SEQ ID NO: 111577 - DNA, 25 bp, Probe sequence
gttttattgctaatactttgaaagt

SEQ ID NO: 111578 - DNA, 25 bp, Probe sequence
gtgcctagctttctttgttatgatt

SEQ ID NO: 111579 - DNA, 25 bp, Probe sequence
ggtgcctagctttctttgttatgat

SEQ ID NO: 111580 - DNA, 25 bp, Probe sequence
ggtatctaaaggtgcctagctttct

SEQ ID NO: 111581 - DNA, 25 bp, Probe sequence
tagctttctttgttatgattagcac

SEQ ID NO: 111582 - DNA, 25 bp, Probe sequence
tagtatatacagtgttttattgcta

SEQ ID NO: 111583 - DNA, 25 bp, Probe sequence
ttctttgttatgattagcactatca

SEQ ID NO: 111584 - DNA, 25 bp, Probe sequence
atacttacactttaattacaattat

SEQ ID NO: 111585 - DNA, 25 bp, Probe sequence
accatcattttctcctaatacttac

SEQ ID NO: 111586 - DNA, 25 bp, Probe sequence
aaacgattcgtatctttcaggttca

SEQ ID NO: 111587 - DNA, 25 bp, Probe sequence
aagttgttttcagaggcatcctatt

SEQ ID NO: 111588 - DNA, 25 bp, Probe sequence
aataccatcattttctcctaatact

SEQ ID NO: 111589 - DNA, 25 bp, Probe sequence
cattttctcctaatacttacacttt

SEQ ID NO: 111590 - DNA, 25 bp, Probe sequence
gcatcctattttatattttgtcaga

SEQ ID NO: 111591 - DNA, 25 bp, Probe sequence
gaggcatcctattttatattttgtc

SEQ ID NO: 111592 - DNA, 25 bp, Probe sequence
gattcgtatctttcaggttcaaata

SEQ ID NO: 111593 - DNA, 25 bp, Probe sequence
gttttcagaggcatcctattttata

SEQ ID NO: 111594 - DNA, 25 bp, Probe sequence
gtatctttcaggttcaaataccatc

SEQ ID NO: 111595 - DNA, 25 bp, Probe sequence
gtaagttgttttcagaggcatccta

SEQ ID NO: 111596 - DNA, 25 bp, Probe sequence
ggttcaaataccatcattttctcct

SEQ ID NO: 111597 - DNA, 25 bp, Probe sequence
tttatattttgtcagaggtgatctt

SEQ ID NO: 111598 - DNA, 25 bp, Probe sequence
ttctcctaatacttacactttaatt

SEQ ID NO: 111599 - DNA, 25 bp, Probe sequence
agcatataagcttttgttatgagtt

SEQ ID NO: 111600 - DNA, 25 bp, Probe sequence
acgaacgaaagtaacgcatgacgat

SEQ ID NO: 111601 - DNA, 25 bp, Probe sequence
aacgcatgacgattaatttaaaaat

SEQ ID NO: 111602 - DNA, 25 bp, Probe sequence
aagtaacgcatgacgattaatttaa

SEQ ID NO: 111603 - DNA, 25 bp, Probe sequence
aaggggtaatacaatctatatagca

SEQ ID NO: 111604 - DNA, 25 bp, Probe sequence
gaacgaaagtaacgcatgacgatta

SEQ ID NO: 111605 - DNA, 25 bp, Probe sequence
gaaagtaacgcatgacgattaattt

SEQ ID NO: 111606 - DNA, 25 bp, Probe sequence
gtacgaacgaaagtaacgcatgacg

SEQ ID NO: 111607 - DNA, 25 bp, Probe sequence
gtaacgcatgacgattaatttaaaa

SEQ ID NO: 111608 - DNA, 25 bp, Probe sequence
ggagtacgaacgaaagtaacgcatg

SEQ ID NO: 111609 - DNA, 25 bp, Probe sequence
ggggtaatacaatctatatagcata

SEQ ID NO: 111610 - DNA, 25 bp, Probe sequence
tcatttataaaaggagtacgaacga

SEQ ID NO: 111611 - DNA, 25 bp, Probe sequence
taagcttttgttatgagtttcaaaa

SEQ ID NO: 111612 - DNA, 25 bp, Probe sequence
tataagcttttgttatgagtttcaa

SEQ ID NO: 111613 - DNA, 25 bp, Probe sequence
tatatagcatataagcttttgttat

SEQ ID NO: 111614 - DNA, 25 bp, Probe sequence
atatgccaaacgtgttgtgagggtt

SEQ ID NO: 111615 - DNA, 25 bp, Probe sequence
acgtgttgtgagggtttaattgcat

SEQ ID NO: 111616 - DNA, 25 bp, Probe sequence
acttatgcataagtcctgtttgacg

SEQ ID NO: 111617 - DNA, 25 bp, Probe sequence
aaaataccctcacaatacttatgca

SEQ ID NO: 111618 - DNA, 25 bp, Probe sequence
aacgcttgtaaaatgtcttaattca

SEQ ID NO: 111619 - DNA, 25 bp, Probe sequence
aagtcctgtttgacgtgaaaggata

SEQ ID NO: 111620 - DNA, 25 bp, Probe sequence
aataccctcacaatacttatgcata

SEQ ID NO: 111621 - DNA, 25 bp, Probe sequence
gcattaacgcttgtaaaatgtctta

SEQ ID NO: 111622 - DNA, 25 bp, Probe sequence
gcttgtaaaatgtcttaattcatat

SEQ ID NO: 111623 - DNA, 25 bp, Probe sequence
gcataagtcctgtttgacgtgaaag

SEQ ID NO: 111624 - DNA, 25 bp, Probe sequence
gaaaggatatatgccaaacgtgttg

SEQ ID NO: 111625 - DNA, 25 bp, Probe sequence
ggatatatgccaaacgtgttgtgag

SEQ ID NO: 111626 - DNA, 25 bp, Probe sequence
taccctcacaatacttatgcataag

SEQ ID NO: 111627 - DNA, 25 bp, Probe sequence
tatgcataagtcctgtttgacgtga

SEQ ID NO: 111628 - DNA, 25 bp, Probe sequence
ttaattaataaaataccctcacaat

SEQ ID NO: 111629 - DNA, 25 bp, Probe sequence
attgatattcaattactacttttaa

SEQ ID NO: 111630 - DNA, 25 bp, Probe sequence
attctagtcctataacataaaataa

SEQ ID NO: 111631 - DNA, 25 bp, Probe sequence
atatgatattgccagtacagagact

SEQ ID NO: 111632 - DNA, 25 bp, Probe sequence
ataacgatagctacattgaataaaa

SEQ ID NO: 111633 - DNA, 25 bp, Probe sequence
ataatcaagctatgaattcggcaga

SEQ ID NO: 111634 - DNA, 25 bp, Probe sequence
atcaagctatgaattcggcagaaaa

SEQ ID NO: 111635 - DNA, 25 bp, Probe sequence
acctcgcttcttgatttaaaattca

SEQ ID NO: 111636 - DNA, 25 bp, Probe sequence
aatatgtgtatattctagtcctata

SEQ ID NO: 111637 - DNA, 25 bp, Probe sequence
caaagatgctctaataatatgtgta

SEQ ID NO: 111638 - DNA, 25 bp, Probe sequence
gagactttaaataacgatagctaca

SEQ ID NO: 111639 - DNA, 25 bp, Probe sequence
gatattgccagtacagagactttaa

SEQ ID NO: 111640 - DNA, 25 bp, Probe sequence
gtgtatattctagtcctataacata

SEQ ID NO: 111641 - DNA, 25 bp, Probe sequence
ggtactacttagaataacgcaaaat

SEQ ID NO: 111642 - DNA, 25 bp, Probe sequence
taacctcgcttcttgatttaaaatt

SEQ ID NO: 111643 - DNA, 25 bp, Probe sequence
ttcattaacctcgcttcttgattta

SEQ ID NO: 111644 - DNA, 25 bp, Probe sequence
atatcgaattagtagtcaaagtgtt

SEQ ID NO: 111645 - DNA, 25 bp, Probe sequence
atatagtaacacatcacttgattaa

SEQ ID NO: 111646 - DNA, 25 bp, Probe sequence
agacaatactatttttagagtcatt

SEQ ID NO: 111647 - DNA, 25 bp, Probe sequence
acatcacttgattaaagacaatact

SEQ ID NO: 111648 - DNA, 25 bp, Probe sequence
acacccatatagtaacacatcactt

SEQ ID NO: 111649 - DNA, 25 bp, Probe sequence
aagaactacacccatatagtaacac

SEQ ID NO: 111650 - DNA, 25 bp, Probe sequence
cacccatatagtaacacatcacttg

SEQ ID NO: 111651 - DNA, 25 bp, Probe sequence
ctacacccatatagtaacacatcac

SEQ ID NO: 111652 - DNA, 25 bp, Probe sequence
cccatatagtaacacatcacttgat

SEQ ID NO: 111653 - DNA, 25 bp, Probe sequence
gaattagtagtcaaagtgttatggt

SEQ ID NO: 111654 - DNA, 25 bp, Probe sequence
gaactacacccatatagtaacacat

SEQ ID NO: 111655 - DNA, 25 bp, Probe sequence
gtagtcaaagtgttatggtagatat

SEQ ID NO: 111656 - DNA, 25 bp, Probe sequence
gtaacacatcacttgattaaagaca

SEQ ID NO: 111657 - DNA, 25 bp, Probe sequence
taagattgatatcgaattagtagtc

SEQ ID NO: 111658 - DNA, 25 bp, Probe sequence
ttaagaactacacccatatagtaac

SEQ ID NO: 111659 - DNA, 25 bp, Probe sequence
atagtggccttcagaacctttttgg

SEQ ID NO: 111660 - DNA, 25 bp, Probe sequence
agtggccttcagaacctttttggca

SEQ ID NO: 111661 - DNA, 25 bp, Probe sequence
agctgtgttttatagtggccttcag

SEQ ID NO: 111662 - DNA, 25 bp, Probe sequence
aaagctgtgttttatagtggccttc

SEQ ID NO: 111663 - DNA, 25 bp, Probe sequence
cttcagaacctttttggcatttgga

SEQ ID NO: 111664 - DNA, 25 bp, Probe sequence
ccttcagaacctttttggcatttgg

SEQ ID NO: 111665 - DNA, 25 bp, Probe sequence
gaggttctgaaaagctgtgttttat

SEQ ID NO: 111666 - DNA, 25 bp, Probe sequence
gttttatagtggccttcagaacctt

SEQ ID NO: 111667 - DNA, 25 bp, Probe sequence
gtatagaggttctgaaaagctgtgt

SEQ ID NO: 111668 - DNA, 25 bp, Probe sequence
gtgttttatagtggccttcagaacc

SEQ ID NO: 111669 - DNA, 25 bp, Probe sequence
gtggccttcagaacctttttggcat

SEQ ID NO: 111670 - DNA, 25 bp, Probe sequence
ggccttcagaacctttttggcattt

SEQ ID NO: 111671 - DNA, 25 bp, Probe sequence
tcagaacctttttggcatttggaat

SEQ ID NO: 111672 - DNA, 25 bp, Probe sequence
tatagtggccttcagaacctttttg

SEQ ID NO: 111673 - DNA, 25 bp, Probe sequence
tttatagtggccttcagaacctttt

SEQ ID NO: 111674 - DNA, 25 bp, Probe sequence
attggttaaattgtattgtctcaaa

SEQ ID NO: 111675 - DNA, 25 bp, Probe sequence
atgtgttacatgtcgcaatgatggc

SEQ ID NO: 111676 - DNA, 25 bp, Probe sequence
agaattgtcatgaattaaagctcat

SEQ ID NO: 111677 - DNA, 25 bp, Probe sequence
gatgcaaaatggtaaggtattggtt

SEQ ID NO: 111678 - DNA, 25 bp, Probe sequence
gttacatgtcgcaatgatggctttc

SEQ ID NO: 111679 - DNA, 25 bp, Probe sequence
gtattgtctcaaagattagtcactt

SEQ ID NO: 111680 - DNA, 25 bp, Probe sequence
gtaatgatgtgttacatgtcgcaat

SEQ ID NO: 111681 - DNA, 25 bp, Probe sequence
gtctcaaagattagtcacttttaaa

SEQ ID NO: 111682 - DNA, 25 bp, Probe sequence
gtgttacatgtcgcaatgatggctt

SEQ ID NO: 111683 - DNA, 25 bp, Probe sequence
ggtattggttaaattgtattgtctc

SEQ ID NO: 111684 - DNA, 25 bp, Probe sequence
ggttaaattgtattgtctcaaagat

SEQ ID NO: 111685 - DNA, 25 bp, Probe sequence
tgatgtgttacatgtcgcaatgatg

SEQ ID NO: 111686 - DNA, 25 bp, Probe sequence
taaagctcatgtaatgatgtgttac

SEQ ID NO: 111687 - DNA, 25 bp, Probe sequence
tacatgtcgcaatgatggctttcag

SEQ ID NO: 111688 - DNA, 25 bp, Probe sequence
ttgtctcaaagattagtcactttta

SEQ ID NO: 111689 - DNA, 25 bp, Probe sequence
atatgtattcatgtttaatagagta

SEQ ID NO: 111690 - DNA, 25 bp, Probe sequence
atgtaatataactccttagtttatc

SEQ ID NO: 111691 - DNA, 25 bp, Probe sequence
atgtattcatgtttaatagagtaac

SEQ ID NO: 111692 - DNA, 25 bp, Probe sequence
aaatatgtattcatgtttaatagag

SEQ ID NO: 111693 - DNA, 25 bp, Probe sequence
aaaaatatgtattcatgtttaatag

SEQ ID NO: 111694 - DNA, 25 bp, Probe sequence
aaaatatgtattcatgtttaataga

SEQ ID NO: 111695 - DNA, 25 bp, Probe sequence
aatgtaatataactccttagtttat

SEQ ID NO: 111696 - DNA, 25 bp, Probe sequence
aatatgtattcatgtttaatagagt

SEQ ID NO: 111697 - DNA, 25 bp, Probe sequence
gaaaaaatatgtattcatgtttaat

SEQ ID NO: 111698 - DNA, 25 bp, Probe sequence
gtaatataactccttagtttatctt

SEQ ID NO: 111699 - DNA, 25 bp, Probe sequence
tgtaatataactccttagtttatct

SEQ ID NO: 111700 - DNA, 25 bp, Probe sequence
tgtattcatgtttaatagagtaaca

SEQ ID NO: 111701 - DNA, 25 bp, Probe sequence
taatataactccttagtttatcttt

SEQ ID NO: 111702 - DNA, 25 bp, Probe sequence
taactccttagtttatctttaattg

SEQ ID NO: 111703 - DNA, 25 bp, Probe sequence
tataactccttagtttatctttaat

SEQ ID NO: 111704 - DNA, 25 bp, Probe sequence
ataacagcatcttaacaaatgtaag

SEQ ID NO: 111705 - DNA, 25 bp, Probe sequence
agatactgtcagtgaaactgtgaaa

SEQ ID NO: 111706 - DNA, 25 bp, Probe sequence
acaaatgtaagatactgtcagtgaa

SEQ ID NO: 111707 - DNA, 25 bp, Probe sequence
aaataacagcatcttaacaaatgta

SEQ ID NO: 111708 - DNA, 25 bp, Probe sequence
aaaaaataacagcatcttaacaaat

SEQ ID NO: 111709 - DNA, 25 bp, Probe sequence
aacaaatgtaagatactgtcagtga

SEQ ID NO: 111710 - DNA, 25 bp, Probe sequence
aacatgattttatgtcgggataaaa

SEQ ID NO: 111711 - DNA, 25 bp, Probe sequence
aagatactgtcagtgaaactgtgaa

SEQ ID NO: 111712 - DNA, 25 bp, Probe sequence
aataacagcatcttaacaaatgtaa

SEQ ID NO: 111713 - DNA, 25 bp, Probe sequence
caaatgtaagatactgtcagtgaaa

SEQ ID NO: 111714 - DNA, 25 bp, Probe sequence
gatactgtcagtgaaactgtgaaaa

SEQ ID NO: 111715 - DNA, 25 bp, Probe sequence
gtaagatactgtcagtgaaactgtg

SEQ ID NO: 111716 - DNA, 25 bp, Probe sequence
gggataaaaaaataacagcatctta

SEQ ID NO: 111717 - DNA, 25 bp, Probe sequence
taagatactgtcagtgaaactgtga

SEQ ID NO: 111718 - DNA, 25 bp, Probe sequence
tactgtcagtgaaactgtgaaaact

SEQ ID NO: 111719 - DNA, 25 bp, Probe sequence
attacattttgatccagaatagtca

SEQ ID NO: 111720 - DNA, 25 bp, Probe sequence
atggattttgtagttgatgatttaa

SEQ ID NO: 111721 - DNA, 25 bp, Probe sequence
aaagtgctttgataatggattttgt

SEQ ID NO: 111722 - DNA, 25 bp, Probe sequence
aaggttgtgtctatatttaatatct

SEQ ID NO: 111723 - DNA, 25 bp, Probe sequence
aatatcttcctcctaagaatttaag

SEQ ID NO: 111724 - DNA, 25 bp, Probe sequence
aattctaatctcttagttagcatta

SEQ ID NO: 111725 - DNA, 25 bp, Probe sequence
gaatagtcaactggataactttgta

SEQ ID NO: 111726 - DNA, 25 bp, Probe sequence
gaagatttgtattctcaactaagtc

SEQ ID NO: 111727 - DNA, 25 bp, Probe sequence
gaactatcaattgattgtgcttaat

SEQ ID NO: 111728 - DNA, 25 bp, Probe sequence
gagatggatgaaggtgattagtgag

SEQ ID NO: 111729 - DNA, 25 bp, Probe sequence
gttagcattattacattttgatcca

SEQ ID NO: 111730 - DNA, 25 bp, Probe sequence
gtcaaccttattgataatggtgtga

SEQ ID NO: 111731 - DNA, 25 bp, Probe sequence
ggtgtgagaatatttgttcgagatg

SEQ ID NO: 111732 - DNA, 25 bp, Probe sequence
ggaattttcaagtacgagacaatat

SEQ ID NO: 111733 - DNA, 25 bp, Probe sequence
tgtattctcaactaagtcaacctta

SEQ ID NO: 111734 - DNA, 25 bp, Probe sequence
atgataagtatagctagagggggcg

SEQ ID NO: 111735 - DNA, 25 bp, Probe sequence
aaatgataagtatagctagaggggg

SEQ ID NO: 111736 - DNA, 25 bp, Probe sequence
aatgataagtatagctagagggggc

SEQ ID NO: 111737 - DNA, 25 bp, Probe sequence
ctagagggggcgggtatttcttgca

SEQ ID NO: 111738 - DNA, 25 bp, Probe sequence
cgccccctctagcttaaaatgataa

SEQ ID NO: 111739 - DNA, 25 bp, Probe sequence
ccctctagcttaaaatgataagtat

SEQ ID NO: 111740 - DNA, 25 bp, Probe sequence
ccccctctagcttaaaatgataagt

SEQ ID NO: 111741 - DNA, 25 bp, Probe sequence
cccctctagcttaaaatgataagta

SEQ ID NO: 111742 - DNA, 25 bp, Probe sequence
cctctagcttaaaatgataagtata

SEQ ID NO: 111743 - DNA, 25 bp, Probe sequence
gccccctctagcttaaaatgataag

SEQ ID NO: 111744 - DNA, 25 bp, Probe sequence
tagagggggcgggtatttcttgcaa

SEQ ID NO: 111745 - DNA, 25 bp, Probe sequence
tgataagtatagctagagggggcgg

SEQ ID NO: 111746 - DNA, 25 bp, Probe sequence
attccgactagtatgctaagaataa

SEQ ID NO: 111747 - DNA, 25 bp, Probe sequence
attttaaaatatttcaagagggcat

SEQ ID NO: 111748 - DNA, 25 bp, Probe sequence
atataattccgactagtatgctaag

SEQ ID NO: 111749 - DNA, 25 bp, Probe sequence
ataattccgactagtatgctaagaa

SEQ ID NO: 111750 - DNA, 25 bp, Probe sequence
aatataattccgactagtatgctaa

SEQ ID NO: 111751 - DNA, 25 bp, Probe sequence
aattccgactagtatgctaagaata

SEQ ID NO: 111752 - DNA, 25 bp, Probe sequence
cactcctcaaatttttgaatataat

SEQ ID NO: 111753 - DNA, 25 bp, Probe sequence
gaatataattccgactagtatgcta

SEQ ID NO: 111754 - DNA, 25 bp, Probe sequence
gactagtatgctaagaataatatta

SEQ ID NO: 111755 - DNA, 25 bp, Probe sequence
tgaatataattccgactagtatgct

SEQ ID NO: 111756 - DNA, 25 bp, Probe sequence
tccgactagtatgctaagaataata

SEQ ID NO: 111757 - DNA, 25 bp, Probe sequence
taattccgactagtatgctaagaat

SEQ ID NO: 111758 - DNA, 25 bp, Probe sequence
tataattccgactagtatgctaaga

SEQ ID NO: 111759 - DNA, 25 bp, Probe sequence
ttccgactagtatgctaagaataat

SEQ ID NO: 111760 - DNA, 25 bp, Probe sequence
ttgaatataattccgactagtatgc

SEQ ID NO: 111761 - DNA, 25 bp, Probe sequence
attgctaacctcatatttattgaat

SEQ ID NO: 111762 - DNA, 25 bp, Probe sequence
ataagttgtcattacagcgttaata

SEQ ID NO: 111763 - DNA, 25 bp, Probe sequence
aacaaatgcatccttgaatcgagat

SEQ ID NO: 111764 - DNA, 25 bp, Probe sequence
aagacgcttcgaacaaacacgttgt

SEQ ID NO: 111765 - DNA, 25 bp, Probe sequence
aatagtgttatgacctagtcgatta

SEQ ID NO: 111766 - DNA, 25 bp, Probe sequence
gaatcgagatgtggctatgacggtt

SEQ ID NO: 111767 - DNA, 25 bp, Probe sequence
gagccatcccatttaaaagggttct

SEQ ID NO: 111768 - DNA, 25 bp, Probe sequence
gatcaaccttgaaaagacgcttcga

SEQ ID NO: 111769 - DNA, 25 bp, Probe sequence
gatatatatcgtgcactgtcataag

SEQ ID NO: 111770 - DNA, 25 bp, Probe sequence
gattcgtcatttactaacacagcca

SEQ ID NO: 111771 - DNA, 25 bp, Probe sequence
gtgaatatgagtgtgcccttgtgtg

SEQ ID NO: 111772 - DNA, 25 bp, Probe sequence
ggttcgtgtgtgcaggtggtagttc

SEQ ID NO: 111773 - DNA, 25 bp, Probe sequence
ggaatacacaggagccatcccattt

SEQ ID NO: 111774 - DNA, 25 bp, Probe sequence
tgcccttgtgtgattcgtcatttac

SEQ ID NO: 111775 - DNA, 25 bp, Probe sequence
ttagcatcttttgagggttcgtgtg

SEQ ID NO: 111776 - DNA, 25 bp, Probe sequence
atatcagcttgtttcaggttttatg

SEQ ID NO: 111777 - DNA, 25 bp, Probe sequence
atcagcttgtttcaggttttatgaa

SEQ ID NO: 111778 - DNA, 25 bp, Probe sequence
agtttgatatgctctcttcaaagta

SEQ ID NO: 111779 - DNA, 25 bp, Probe sequence
aaagctatatatgaattgagtatta

SEQ ID NO: 111780 - DNA, 25 bp, Probe sequence
aatggagtatatcagcttgtttcag

SEQ ID NO: 111781 - DNA, 25 bp, Probe sequence
aattagtttgatatgctctcttcaa

SEQ ID NO: 111782 - DNA, 25 bp, Probe sequence
caaattagtttgatatgctctcttc

SEQ ID NO: 111783 - DNA, 25 bp, Probe sequence
gcttgtttcaggttttatgaattga

SEQ ID NO: 111784 - DNA, 25 bp, Probe sequence
gagtatatcagcttgtttcaggttt

SEQ ID NO: 111785 - DNA, 25 bp, Probe sequence
gtattaaatttgtgttcaaatcaca

SEQ ID NO: 111786 - DNA, 25 bp, Probe sequence
gtatatcagcttgtttcaggtttta

SEQ ID NO: 111787 - DNA, 25 bp, Probe sequence
gtaaattacagttctataggtttat

SEQ ID NO: 111788 - DNA, 25 bp, Probe sequence
tggagtatatcagcttgtttcaggt

SEQ ID NO: 111789 - DNA, 25 bp, Probe sequence
tgatatgctctcttcaaagtagata

SEQ ID NO: 111790 - DNA, 25 bp, Probe sequence
tatgctctcttcaaagtagatattg

SEQ ID NO: 111791 - DNA, 25 bp, Probe sequence
acgtcagtcttgcttcatacatagt

SEQ ID NO: 111792 - DNA, 25 bp, Probe sequence
actttaaagtcctttctgcatatac

SEQ ID NO: 111793 - DNA, 25 bp, Probe sequence
actttatgtatactgacgtttgtct

SEQ ID NO: 111794 - DNA, 25 bp, Probe sequence
aacgttattgttagtgatttcaagt

SEQ ID NO: 111795 - DNA, 25 bp, Probe sequence
aagtcctttctgcatatactttatg

SEQ ID NO: 111796 - DNA, 25 bp, Probe sequence
gaaacgtcagtcttgcttcatacat

SEQ ID NO: 111797 - DNA, 25 bp, Probe sequence
gtatactgacgtttgtctacgggca

SEQ ID NO: 111798 - DNA, 25 bp, Probe sequence
gtcagtcttgcttcatacatagttt

SEQ ID NO: 111799 - DNA, 25 bp, Probe sequence
gtctacgggcagtgaaacgtcagtc

SEQ ID NO: 111800 - DNA, 25 bp, Probe sequence
gtcttgcttcatacatagtttaaac

SEQ ID NO: 111801 - DNA, 25 bp, Probe sequence
gtcctttctgcatatactttatgta

SEQ ID NO: 111802 - DNA, 25 bp, Probe sequence
ggcagtgaaacgtcagtcttgcttc

SEQ ID NO: 111803 - DNA, 25 bp, Probe sequence
tgacgtttgtctacgggcagtgaaa

SEQ ID NO: 111804 - DNA, 25 bp, Probe sequence
tgcttcatacatagtttaaacgtta

SEQ ID NO: 111805 - DNA, 25 bp, Probe sequence
tactgacgtttgtctacgggcagtg

SEQ ID NO: 111806 - DNA, 25 bp, Probe sequence
attatagcataatcgcctgctgtaa

SEQ ID NO: 111807 - DNA, 25 bp, Probe sequence
atattatagcataatcgcctgctgt

SEQ ID NO: 111808 - DNA, 25 bp, Probe sequence
atctcattttgaattcagtgtgata

SEQ ID NO: 111809 - DNA, 25 bp, Probe sequence
atggtataaaaaactgtactatctt

SEQ ID NO: 111810 - DNA, 25 bp, Probe sequence
actatcttaaattagacagtacagt

SEQ ID NO: 111811 - DNA, 25 bp, Probe sequence
aaactgtactatcttaaattagaca

SEQ ID NO: 111812 - DNA, 25 bp, Probe sequence
cagtaatctcattttgaattcagtg

SEQ ID NO: 111813 - DNA, 25 bp, Probe sequence
ctccccaatttaaataatattatag

SEQ ID NO: 111814 - DNA, 25 bp, Probe sequence
gcctgctgtaaaagattgttcataa

SEQ ID NO: 111815 - DNA, 25 bp, Probe sequence
gcataatcgcctgctgtaaaagatt

SEQ ID NO: 111816 - DNA, 25 bp, Probe sequence
gacagtacagtaatctcattttgaa

SEQ ID NO: 111817 - DNA, 25 bp, Probe sequence
gattgttcataaacttttaaatggt

SEQ ID NO: 111818 - DNA, 25 bp, Probe sequence
gtaatctcattttgaattcagtgtg

SEQ ID NO: 111819 - DNA, 25 bp, Probe sequence
tcgcctgctgtaaaagattgttcat

SEQ ID NO: 111820 - DNA, 25 bp, Probe sequence
tatagcataatcgcctgctgtaaaa

SEQ ID NO: 111821 - DNA, 25 bp, Probe sequence
attcgttatgcatgttcgttcactc

SEQ ID NO: 111822 - DNA, 25 bp, Probe sequence
atgttcgttcactcataaaccctga

SEQ ID NO: 111823 - DNA, 25 bp, Probe sequence
atgtttcacacaaatctgaggaggt

SEQ ID NO: 111824 - DNA, 25 bp, Probe sequence
aacgtctctgtacatttataaaact

SEQ ID NO: 111825 - DNA, 25 bp, Probe sequence
aaccatggtgggtgatttatatcat

SEQ ID NO: 111826 - DNA, 25 bp, Probe sequence
aagttataagtcttcattcgcatta

SEQ ID NO: 111827 - DNA, 25 bp, Probe sequence
gaagtttctaccatgttgccttgaa

SEQ ID NO: 111828 - DNA, 25 bp, Probe sequence
aatgccgaaaatttgctattatcgt

SEQ ID NO: 111829 - DNA, 25 bp, Probe sequence
aatactaggagtagcttcagccatt

SEQ ID NO: 111830 - DNA, 25 bp, Probe sequence
gcttcagccattaaattgtaaccat

SEQ ID NO: 111831 - DNA, 25 bp, Probe sequence
gaaacttcttttacattgattgcat

SEQ ID NO: 111832 - DNA, 25 bp, Probe sequence
gttgccttgaacgacatgactatga

SEQ ID NO: 111833 - DNA, 25 bp, Probe sequence
ggggatttttttgtatctagcacca

SEQ ID NO: 111834 - DNA, 25 bp, Probe sequence
tgatggtcacagtttatttgatgaa

SEQ ID NO: 111835 - DNA, 25 bp, Probe sequence
tcattcgcattaaacgtctctgtac

SEQ ID NO: 111836 - DNA, 25 bp, Probe sequence
ataaaaccacctgtttgcacgggtg

SEQ ID NO: 111837 - DNA, 25 bp, Probe sequence
atttgagtagttggaaaattacaat

SEQ ID NO: 111838 - DNA, 25 bp, Probe sequence
atataataaaaccacctgtttgcac

SEQ ID NO: 111839 - DNA, 25 bp, Probe sequence
atatataataaaaccacctgtttgc

SEQ ID NO: 111840 - DNA, 25 bp, Probe sequence
ataataaaaccacctgtttgcacgg

SEQ ID NO: 111841 - DNA, 25 bp, Probe sequence
gagtagttggaaaattacaataagg

SEQ ID NO: 111842 - DNA, 25 bp, Probe sequence
tgttctaagtttgcgttttaattca

SEQ ID NO: 111843 - DNA, 25 bp, Probe sequence
taataaaaccacctgtttgcacggg

SEQ ID NO: 111844 - DNA, 25 bp, Probe sequence
taaaaccacctgtttgcacgggtgg

SEQ ID NO: 111845 - DNA, 25 bp, Probe sequence
tagttggaaaattacaataaggacg

SEQ ID NO: 111846 - DNA, 25 bp, Probe sequence
tataataaaaccacctgtttgcacg

SEQ ID NO: 111847 - DNA, 25 bp, Probe sequence
tatataataaaaccacctgtttgca

SEQ ID NO: 111848 - DNA, 25 bp, Probe sequence
tatatataataaaaccacctgtttg

SEQ ID NO: 111849 - DNA, 25 bp, Probe sequence
tttgagtagttggaaaattacaata

SEQ ID NO: 111850 - DNA, 25 bp, Probe sequence
ttatatataataaaaccacctgttt

SEQ ID NO: 111851 - DNA, 25 bp, Probe sequence
atattttatcctttccattagttga

SEQ ID NO: 111852 - DNA, 25 bp, Probe sequence
atgacgtatcatctgaccttcagct

SEQ ID NO: 111853 - DNA, 25 bp, Probe sequence
agagaatgaagccggaatggttacc

SEQ ID NO: 111854 - DNA, 25 bp, Probe sequence
acagggctgtgtatttgcagagtaa

SEQ ID NO: 111855 - DNA, 25 bp, Probe sequence
catttactcggatacagggctgtgt

SEQ ID NO: 111856 - DNA, 25 bp, Probe sequence
gcgttccgtattcgttttgagtgac

SEQ ID NO: 111857 - DNA, 25 bp, Probe sequence
gcagctagctacgataataatgaca

SEQ ID NO: 111858 - DNA, 25 bp, Probe sequence
gttgcagattgttgtatatttcact

SEQ ID NO: 111859 - DNA, 25 bp, Probe sequence
gttcaaatctctattcatttactcg

SEQ ID NO: 111860 - DNA, 25 bp, Probe sequence
gttttgagtgacgcagctagctacg

SEQ ID NO: 111861 - DNA, 25 bp, Probe sequence
gtgatgtctatattggttgcagatt

SEQ ID NO: 111862 - DNA, 25 bp, Probe sequence
tggaataaccaacgcgttccgtatt

SEQ ID NO: 111863 - DNA, 25 bp, Probe sequence
tcatctgaccttcagctaaaacgct

SEQ ID NO: 111864 - DNA, 25 bp, Probe sequence
tttattgtgtgttttgtgatgtcta

SEQ ID NO: 111865 - DNA, 25 bp, Probe sequence
ttagttgattgttttcatttgttca

SEQ ID NO: 111866 - DNA, 25 bp, Probe sequence
attcgctttttatagttcatgtatg

SEQ ID NO: 111867 - DNA, 25 bp, Probe sequence
aaaagtctatattgaacatctaatt

SEQ ID NO: 111868 - DNA, 25 bp, Probe sequence
aagcgaattcctaatgctaaaagca

SEQ ID NO: 111869 - DNA, 25 bp, Probe sequence
aagcaatctaacttacttaaatatt

SEQ ID NO: 111870 - DNA, 25 bp, Probe sequence
caatttttattaggtggaactcatc

SEQ ID NO: 111871 - DNA, 25 bp, Probe sequence
cagcattattagcactgaaattaac

SEQ ID NO: 111872 - DNA, 25 bp, Probe sequence
gcaaatttcgcaatgaccttctatt

SEQ ID NO: 111873 - DNA, 25 bp, Probe sequence
gcaatgaccttctatttattcgctt

SEQ ID NO: 111874 - DNA, 25 bp, Probe sequence
gaacatctaattataagcgaattcc

SEQ ID NO: 111875 - DNA, 25 bp, Probe sequence
gaccttctatttattcgctttttat

SEQ ID NO: 111876 - DNA, 25 bp, Probe sequence
gttctcctaatcaatttattcttct

SEQ ID NO: 111877 - DNA, 25 bp, Probe sequence
gtatttagcaaatttcgcaatgacc

SEQ ID NO: 111878 - DNA, 25 bp, Probe sequence
ggaactcatcaattttgtatttagc

SEQ ID NO: 111879 - DNA, 25 bp, Probe sequence
taaatagtgttctcctaatcaattt

SEQ ID NO: 111880 - DNA, 25 bp, Probe sequence
tattcttctttatatcagcattatt

SEQ ID NO: 111881 - DNA, 25 bp, Probe sequence
attctcatagaatttgttcaattaa

SEQ ID NO: 111882 - DNA, 25 bp, Probe sequence
atttgttcaattaagtgtagacgat

SEQ ID NO: 111883 - DNA, 25 bp, Probe sequence
atatctattctcatagaatttgttc

SEQ ID NO: 111884 - DNA, 25 bp, Probe sequence
atctattctcatagaatttgttcaa

SEQ ID NO: 111885 - DNA, 25 bp, Probe sequence
agacgattcactgacacatcataag

SEQ ID NO: 111886 - DNA, 25 bp, Probe sequence
aacaatatctattctcatagaattt

SEQ ID NO: 111887 - DNA, 25 bp, Probe sequence
caatatctattctcatagaatttgt

SEQ ID NO: 111888 - DNA, 25 bp, Probe sequence
gaatttgttcaattaagtgtagacg

SEQ ID NO: 111889 - DNA, 25 bp, Probe sequence
gtagacgattcactgacacatcata

SEQ ID NO: 111890 - DNA, 25 bp, Probe sequence
tgtagacgattcactgacacatcat

SEQ ID NO: 111891 - DNA, 25 bp, Probe sequence
tagacgattcactgacacatcataa

SEQ ID NO: 111892 - DNA, 25 bp, Probe sequence
tatctattctcatagaatttgttca

SEQ ID NO: 111893 - DNA, 25 bp, Probe sequence
tattctcatagaatttgttcaatta

SEQ ID NO: 111894 - DNA, 25 bp, Probe sequence
ttaacaatatctattctcatagaat

SEQ ID NO: 111895 - DNA, 25 bp, Probe sequence
ttctcatagaatttgttcaattaag

SEQ ID NO: 111896 - DNA, 25 bp, Probe sequence
attaggatgaaatactctgagttta

SEQ ID NO: 111897 - DNA, 25 bp, Probe sequence
atatatggagtatttatcagctaaa

SEQ ID NO: 111898 - DNA, 25 bp, Probe sequence
agaggaaacgctactgtcacctctg

SEQ ID NO: 111899 - DNA, 25 bp, Probe sequence
aacagatatgggttttcttcattaa

SEQ ID NO: 111900 - DNA, 25 bp, Probe sequence
aatgccaatcaacaccgaagttctc

SEQ ID NO: 111901 - DNA, 25 bp, Probe sequence
catgagagtaggaaccccaccatac

SEQ ID NO: 111902 - DNA, 25 bp, Probe sequence
ctactgtcacctctgcttgaaataa

SEQ ID NO: 111903 - DNA, 25 bp, Probe sequence
ctgagtttatgaacgtccacaccca

SEQ ID NO: 111904 - DNA, 25 bp, Probe sequence
ccaccatacgggaatttcgaaatca

SEQ ID NO: 111905 - DNA, 25 bp, Probe sequence
cctctttccttttacgactacatat

SEQ ID NO: 111906 - DNA, 25 bp, Probe sequence
gataaagtagccattctaatatatg

SEQ ID NO: 111907 - DNA, 25 bp, Probe sequence
gttttcttcattaaatcatttttct

SEQ ID NO: 111908 - DNA, 25 bp, Probe sequence
tccttttacgactacatatattgtt

SEQ ID NO: 111909 - DNA, 25 bp, Probe sequence
tcaacaccgaagttctcatgtcctc

SEQ ID NO: 111910 - DNA, 25 bp, Probe sequence
tttatgaacgtccacacccaaaaca

SEQ ID NO: 111911 - DNA, 25 bp, Probe sequence
atacataacataatacttattcgat

SEQ ID NO: 111912 - DNA, 25 bp, Probe sequence
atctcctaatctttatatacataac

SEQ ID NO: 111913 - DNA, 25 bp, Probe sequence
acttattcgattgttttcaaaacat

SEQ ID NO: 111914 - DNA, 25 bp, Probe sequence
acttcatctcctaatctttatatac

SEQ ID NO: 111915 - DNA, 25 bp, Probe sequence
cacttcatctcctaatctttatata

SEQ ID NO: 111916 - DNA, 25 bp, Probe sequence
catctcctaatctttatatacataa

SEQ ID NO: 111917 - DNA, 25 bp, Probe sequence
cataatacttattcgattgttttca

SEQ ID NO: 111918 - DNA, 25 bp, Probe sequence
cttcatctcctaatctttatataca

SEQ ID NO: 111919 - DNA, 25 bp, Probe sequence
ctcctaatctttatatacataacat

SEQ ID NO: 111920 - DNA, 25 bp, Probe sequence
gattgttttcaaaacatttgatttt

SEQ ID NO: 111921 - DNA, 25 bp, Probe sequence
tcatctcctaatctttatatacata

SEQ ID NO: 111922 - DNA, 25 bp, Probe sequence
tcacttcatctcctaatctttatat

SEQ ID NO: 111923 - DNA, 25 bp, Probe sequence
taatacttattcgattgttttcaaa

SEQ ID NO: 111924 - DNA, 25 bp, Probe sequence
tacttattcgattgttttcaaaaca

SEQ ID NO: 111925 - DNA, 25 bp, Probe sequence
ttcatctcctaatctttatatacat

SEQ ID NO: 111926 - DNA, 25 bp, Probe sequence
atttgaaaggggatagcgcctcaat

SEQ ID NO: 111927 - DNA, 25 bp, Probe sequence
atatgatgtctgttttgtgtctgaa

SEQ ID NO: 111928 - DNA, 25 bp, Probe sequence
agaattgattaataacagttagcat

SEQ ID NO: 111929 - DNA, 25 bp, Probe sequence
agcgcctcaatataatgtaggtaga

SEQ ID NO: 111930 - DNA, 25 bp, Probe sequence
aaggggatagcgcctcaatataatg

SEQ ID NO: 111931 - DNA, 25 bp, Probe sequence
aattaccttaacaatgattcaagtt

SEQ ID NO: 111932 - DNA, 25 bp, Probe sequence
cagttagcattttattaattacctt

SEQ ID NO: 111933 - DNA, 25 bp, Probe sequence
gagtctcgacggataagaattgatt

SEQ ID NO: 111934 - DNA, 25 bp, Probe sequence
gatgtctgttttgtgtctgaaagtt

SEQ ID NO: 111935 - DNA, 25 bp, Probe sequence
gatttgtataaaaaagagtctcgac

SEQ ID NO: 111936 - DNA, 25 bp, Probe sequence
gtaggtagattgttcatattacgta

SEQ ID NO: 111937 - DNA, 25 bp, Probe sequence
gtactacgacaatatgatgtctgtt

SEQ ID NO: 111938 - DNA, 25 bp, Probe sequence
gtctgttttgtgtctgaaagtttta

SEQ ID NO: 111939 - DNA, 25 bp, Probe sequence
gggatagcgcctcaatataatgtag

SEQ ID NO: 111940 - DNA, 25 bp, Probe sequence
tgtgtctgaaagttttacagttttt

SEQ ID NO: 111941 - DNA, 25 bp, Probe sequence
atagaaacgctatattaacctcata

SEQ ID NO: 111942 - DNA, 25 bp, Probe sequence
aaaaatcatttcaaaggcacataga

SEQ ID NO: 111943 - DNA, 25 bp, Probe sequence
aacgctatattaacctcataatcac

SEQ ID NO: 111944 - DNA, 25 bp, Probe sequence
aagtgacgatcaaacgttgcttaac

SEQ ID NO: 111945 - DNA, 25 bp, Probe sequence
catacttgacgacgaaataatttga

SEQ ID NO: 111946 - DNA, 25 bp, Probe sequence
cgttgcttaacttctttttaatgct

SEQ ID NO: 111947 - DNA, 25 bp, Probe sequence
gctatattaacctcataatcactca

SEQ ID NO: 111948 - DNA, 25 bp, Probe sequence
gaaacgctatattaacctcataatc

SEQ ID NO: 111949 - DNA, 25 bp, Probe sequence
gacgatcaaacgttgcttaacttct

SEQ ID NO: 111950 - DNA, 25 bp, Probe sequence
gagaggttaagtgacgatcaaacgt

SEQ ID NO: 111951 - DNA, 25 bp, Probe sequence
gatcaaacgttgcttaacttctttt

SEQ ID NO: 111952 - DNA, 25 bp, Probe sequence
tgcttaacttctttttaatgcttaa

SEQ ID NO: 111953 - DNA, 25 bp, Probe sequence
tacacatacttgacgacgaaataat

SEQ ID NO: 111954 - DNA, 25 bp, Probe sequence
tattaacctcataatcactcattat

SEQ ID NO: 111955 - DNA, 25 bp, Probe sequence
ttcaaaggcacatagaaacgctata

SEQ ID NO: 111956 - DNA, 25 bp, Probe sequence
atagaagctgacatcggtaaaacaa

SEQ ID NO: 111957 - DNA, 25 bp, Probe sequence
agcttcttttattatgcgtaatgat

SEQ ID NO: 111958 - DNA, 25 bp, Probe sequence
agctgacatcggtaaaacaagaagt

SEQ ID NO: 111959 - DNA, 25 bp, Probe sequence
aaatagaagctgacatcggtaaaac

SEQ ID NO: 111960 - DNA, 25 bp, Probe sequence
aagtgacaacggtttacatgttgct

SEQ ID NO: 111961 - DNA, 25 bp, Probe sequence
ctgacatcggtaaaacaagaagtta

SEQ ID NO: 111962 - DNA, 25 bp, Probe sequence
gcttcttttattatgcgtaatgatg

SEQ ID NO: 111963 - DNA, 25 bp, Probe sequence
gaagttaagtgacaacggtttacat

SEQ ID NO: 111964 - DNA, 25 bp, Probe sequence
gaagctgacatcggtaaaacaagaa

SEQ ID NO: 111965 - DNA, 25 bp, Probe sequence
gttaagtgacaacggtttacatgtt

SEQ ID NO: 111966 - DNA, 25 bp, Probe sequence
gtaatgatgtaaaagacgaatattc

SEQ ID NO: 111967 - DNA, 25 bp, Probe sequence
tctaaatagaagctgacatcggtaa

SEQ ID NO: 111968 - DNA, 25 bp, Probe sequence
tagaagctgacatcggtaaaacaag

SEQ ID NO: 111969 - DNA, 25 bp, Probe sequence
tagcttcttttattatgcgtaatga

SEQ ID NO: 111970 - DNA, 25 bp, Probe sequence
tattatgcgtaatgatgtaaaagac

SEQ ID NO: 111971 - DNA, 25 bp, Probe sequence
atgaatgtaatcgaacaaatctaat

SEQ ID NO: 111972 - DNA, 25 bp, Probe sequence
atgtgaatggagcaatacgccatct

SEQ ID NO: 111973 - DNA, 25 bp, Probe sequence
atggagcaatacgccatctataata

SEQ ID NO: 111974 - DNA, 25 bp, Probe sequence
agcaatacgccatctataataaagc

SEQ ID NO: 111975 - DNA, 25 bp, Probe sequence
aatggagcaatacgccatctataat

SEQ ID NO: 111976 - DNA, 25 bp, Probe sequence
caaggtttaatgtgaatggagcaat

SEQ ID NO: 111977 - DNA, 25 bp, Probe sequence
gctgtatgattcaatgaatgtaatc

SEQ ID NO: 111978 - DNA, 25 bp, Probe sequence
gaatggagcaatacgccatctataa

SEQ ID NO: 111979 - DNA, 25 bp, Probe sequence
gagcaatacgccatctataataaag

SEQ ID NO: 111980 - DNA, 25 bp, Probe sequence
gtttaatgtgaatggagcaatacgc

SEQ ID NO: 111981 - DNA, 25 bp, Probe sequence
gtgaatggagcaatacgccatctat

SEQ ID NO: 111982 - DNA, 25 bp, Probe sequence
ggagcaatacgccatctataataaa

SEQ ID NO: 111983 - DNA, 25 bp, Probe sequence
tggagcaatacgccatctataataa

SEQ ID NO: 111984 - DNA, 25 bp, Probe sequence
tgtgaatggagcaatacgccatcta

SEQ ID NO: 111985 - DNA, 25 bp, Probe sequence
tgaatggagcaatacgccatctata

SEQ ID NO: 111986 - DNA, 25 bp, Probe sequence
atatgacgtggaagagtcctgaatt

SEQ ID NO: 111987 - DNA, 25 bp, Probe sequence
agttcagtgacaacggcctacatgt

SEQ ID NO: 111988 - DNA, 25 bp, Probe sequence
agaagttcagtgacaacggcctaca

SEQ ID NO: 111989 - DNA, 25 bp, Probe sequence
agcttcttttgttatgttcgatgat

SEQ ID NO: 111990 - DNA, 25 bp, Probe sequence
cagtgacaacggcctacatgttgct

SEQ ID NO: 111991 - DNA, 25 bp, Probe sequence
gaagctgtcatcggaaaaacaagaa

SEQ ID NO: 111992 - DNA, 25 bp, Probe sequence
gatgatttgagaacccgaattttcg

SEQ ID NO: 111993 - DNA, 25 bp, Probe sequence
ggaagagtcctgaatttatctgtaa

SEQ ID NO: 111994 - DNA, 25 bp, Probe sequence
tgagaacccgaattttcgatgggtc

SEQ ID NO: 111995 - DNA, 25 bp, Probe sequence
tgcttagcttcttttgttatgttcg

SEQ ID NO: 111996 - DNA, 25 bp, Probe sequence
tctaaatagaagctgtcatcggaaa

SEQ ID NO: 111997 - DNA, 25 bp, Probe sequence
tcttttgttatgttcgatgatttga

SEQ ID NO: 111998 - DNA, 25 bp, Probe sequence
tatctgtaaatccctatctatcggg

SEQ ID NO: 111999 - DNA, 25 bp, Probe sequence
tttatctgtaaatccctatctatcg

SEQ ID NO: 112000 - DNA, 25 bp, Probe sequence
ttcgatgggtccaaatatgacgtgg

SEQ ID NO: 112001 - DNA, 25 bp, Probe sequence
atgattcaatagacgtaagcgaaca

SEQ ID NO: 112002 - DNA, 25 bp, Probe sequence
aggtcaaatacgccaattataataa

SEQ ID NO: 112003 - DNA, 25 bp, Probe sequence
aaaggtcaaatacgccaattataat

SEQ ID NO: 112004 - DNA, 25 bp, Probe sequence
aaggtcaaatacgccaattataata

SEQ ID NO: 112005 - DNA, 25 bp, Probe sequence
ctgtatgattcaatagacgtaagcg

SEQ ID NO: 112006 - DNA, 25 bp, Probe sequence
gctgtatgattcaatagacgtaagc

SEQ ID NO: 112007 - DNA, 25 bp, Probe sequence
gaaaggtcaaatacgccaattataa

SEQ ID NO: 112008 - DNA, 25 bp, Probe sequence
gattcaatagacgtaagcgaacaaa

SEQ ID NO: 112009 - DNA, 25 bp, Probe sequence
gtatgattcaatagacgtaagcgaa

SEQ ID NO: 112010 - DNA, 25 bp, Probe sequence
ggtcaaatacgccaattataataaa

SEQ ID NO: 112011 - DNA, 25 bp, Probe sequence
tgtatgattcaatagacgtaagcga

SEQ ID NO: 112012 - DNA, 25 bp, Probe sequence
tgaaaggtcaaatacgccaattata

SEQ ID NO: 112013 - DNA, 25 bp, Probe sequence
tcaaatacgccaattataataaagc

SEQ ID NO: 112014 - DNA, 25 bp, Probe sequence
tcaatagacgtaagcgaacaaatct

SEQ ID NO: 112015 - DNA, 25 bp, Probe sequence
tagacgtaagcgaacaaatctaata

SEQ ID NO: 112016 - DNA, 25 bp, Probe sequence
agatgcgtgatgtcgctttagtgac

SEQ ID NO: 112017 - DNA, 25 bp, Probe sequence
aagaggttaattcatagcgcagtat

SEQ ID NO: 112018 - DNA, 25 bp, Probe sequence
gcgcagtatctcgcttatataatga

SEQ ID NO: 112019 - DNA, 25 bp, Probe sequence
gcttcttttttgtgttggcgagatg

SEQ ID NO: 112020 - DNA, 25 bp, Probe sequence
gaaaatgaagcgtatcgatgaataa

SEQ ID NO: 112021 - DNA, 25 bp, Probe sequence
gatacttatagatgcgtgatgtcgc

SEQ ID NO: 112022 - DNA, 25 bp, Probe sequence
gatagtatagaggagttaggcaaca

SEQ ID NO: 112023 - DNA, 25 bp, Probe sequence
gatagtagattgttcgtattacgta

SEQ ID NO: 112024 - DNA, 25 bp, Probe sequence
gatttcattaactaacttaacgttg

SEQ ID NO: 112025 - DNA, 25 bp, Probe sequence
gtcgctttagtgacatgaaacaatg

SEQ ID NO: 112026 - DNA, 25 bp, Probe sequence
ggttaattcatagcgcagtatctcg

SEQ ID NO: 112027 - DNA, 25 bp, Probe sequence
ggcaacataagttgcttagcttctt

SEQ ID NO: 112028 - DNA, 25 bp, Probe sequence
taattaatactgttaggatttcatt

SEQ ID NO: 112029 - DNA, 25 bp, Probe sequence
ttagcttcttttttgtgttggcgag

SEQ ID NO: 112030 - DNA, 25 bp, Probe sequence
ttcatagcgcagtatctcgcttata

SEQ ID NO: 112031 - DNA, 25 bp, Probe sequence
attagttcttcattaaccatgattt

SEQ ID NO: 112032 - DNA, 25 bp, Probe sequence
ataacgcagggtatgagcgtactaa

SEQ ID NO: 112033 - DNA, 25 bp, Probe sequence
agtgtcgttaggctgtttttatgtt

SEQ ID NO: 112034 - DNA, 25 bp, Probe sequence
gaagcagcttaacgatgaaatgttg

SEQ ID NO: 112035 - DNA, 25 bp, Probe sequence
gttgaataaatacgtacatcctcca

SEQ ID NO: 112036 - DNA, 25 bp, Probe sequence
gtactaaaaattcacattacttctg

SEQ ID NO: 112037 - DNA, 25 bp, Probe sequence
gtacatcctccaaaaaggggcgtat

SEQ ID NO: 112038 - DNA, 25 bp, Probe sequence
gtctcaatgccctttataataaatg

SEQ ID NO: 112039 - DNA, 25 bp, Probe sequence
gtctgtctcaatgccctttataata

SEQ ID NO: 112040 - DNA, 25 bp, Probe sequence
gtgatgtccattgaatattaattag

SEQ ID NO: 112041 - DNA, 25 bp, Probe sequence
ggggcgtatctaaatcaacagtgtc

SEQ ID NO: 112042 - DNA, 25 bp, Probe sequence
ggctgtttttatgttttataacgca

SEQ ID NO: 112043 - DNA, 25 bp, Probe sequence
taatgtcagtctgtctcaatgccct

SEQ ID NO: 112044 - DNA, 25 bp, Probe sequence
tacttctgaaagtgatgtccattga

SEQ ID NO: 112045 - DNA, 25 bp, Probe sequence
ttaaacgagtgttaatgtcagtctg

SEQ ID NO: 112046 - DNA, 25 bp, Probe sequence
atcccatgtttaatgattttgatac

SEQ ID NO: 112047 - DNA, 25 bp, Probe sequence
atgtcagtctgttttgatgcacctt

SEQ ID NO: 112048 - DNA, 25 bp, Probe sequence
aaaacatatcgaacattgactacgt

SEQ ID NO: 112049 - DNA, 25 bp, Probe sequence
aagacagatagttcaaattacgtaa

SEQ ID NO: 112050 - DNA, 25 bp, Probe sequence
aatgattttgatacgtgttttaata

SEQ ID NO: 112051 - DNA, 25 bp, Probe sequence
aatacgtttgattttcattaataat

SEQ ID NO: 112052 - DNA, 25 bp, Probe sequence
aattacgtaatcataacaatccaat

SEQ ID NO: 112053 - DNA, 25 bp, Probe sequence
gctgcttttttgtacactttgtatc

SEQ ID NO: 112054 - DNA, 25 bp, Probe sequence
gaagcggtttaataatcccatgttt

SEQ ID NO: 112055 - DNA, 25 bp, Probe sequence
gtacactttgtatcgaataacttaa

SEQ ID NO: 112056 - DNA, 25 bp, Probe sequence
gtctgttttgatgcaccttataata

SEQ ID NO: 112057 - DNA, 25 bp, Probe sequence
tcggaaagaacaatgattcccccaa

SEQ ID NO: 112058 - DNA, 25 bp, Probe sequence
taagctgcttttttgtacactttgt

SEQ ID NO: 112059 - DNA, 25 bp, Probe sequence
ttaaatgagcgttaatgtcagtctg

SEQ ID NO: 112060 - DNA, 25 bp, Probe sequence
ttgactacgttattaagctgctttt

SEQ ID NO: 112061 - DNA, 25 bp, Probe sequence
attcaagtatatttaaatcgaggtt

SEQ ID NO: 112062 - DNA, 25 bp, Probe sequence
atcgaggttaattatcgtatgaaac

SEQ ID NO: 112063 - DNA, 25 bp, Probe sequence
acagagtaacatcatcagttgtagt

SEQ ID NO: 112064 - DNA, 25 bp, Probe sequence
acatcatcagttgtagtaaacgata

SEQ ID NO: 112065 - DNA, 25 bp, Probe sequence
aatatatttgtttttcattaagaat

SEQ ID NO: 112066 - DNA, 25 bp, Probe sequence
aattacgtaatgaaaacaatccaat

SEQ ID NO: 112067 - DNA, 25 bp, Probe sequence
gcataatagcttaagaagcgactta

SEQ ID NO: 112068 - DNA, 25 bp, Probe sequence
gaagcgacttaacgacaaaatgtga

SEQ ID NO: 112069 - DNA, 25 bp, Probe sequence
gagcagaacagagtaacatcatcag

SEQ ID NO: 112070 - DNA, 25 bp, Probe sequence
gttgtttttgtaattcaaagagcag

SEQ ID NO: 112071 - DNA, 25 bp, Probe sequence
gtgaattgacatctgtgtccttata

SEQ ID NO: 112072 - DNA, 25 bp, Probe sequence
tgacatctgtgtccttatataagga

SEQ ID NO: 112073 - DNA, 25 bp, Probe sequence
tgaaagtcatttaacctgaacatta

SEQ ID NO: 112074 - DNA, 25 bp, Probe sequence
tcgtatgaaacgatgcacgttataa

SEQ ID NO: 112075 - DNA, 25 bp, Probe sequence
taaacgataatccagtaaaacaact

SEQ ID NO: 112076 - DNA, 25 bp, Probe sequence
aaatttaggcactgtgaaagcgcag

SEQ ID NO: 112077 - DNA, 25 bp, Probe sequence
atgtgaagcacgaccattgctcatt

SEQ ID NO: 112078 - DNA, 25 bp, Probe sequence
agcgcagtgtcttttttgtgtcgaa

SEQ ID NO: 112079 - DNA, 25 bp, Probe sequence
aaacgaacattaaatttaggcactg

SEQ ID NO: 112080 - DNA, 25 bp, Probe sequence
aagtaagtttaatgtgaagcacgac

SEQ ID NO: 112081 - DNA, 25 bp, Probe sequence
gcagtgtcttttttgtgtcgaaatt

SEQ ID NO: 112082 - DNA, 25 bp, Probe sequence
gcacgaccattgctcattataatga

SEQ ID NO: 112083 - DNA, 25 bp, Probe sequence
gaatgaggattgttcgtattgcgta

SEQ ID NO: 112084 - DNA, 25 bp, Probe sequence
gaagcacgaccattgctcattataa

SEQ ID NO: 112085 - DNA, 25 bp, Probe sequence
gaaagcgcagtgtcttttttgtgtc

SEQ ID NO: 112086 - DNA, 25 bp, Probe sequence
gagagtagatcgataggaattgaat

SEQ ID NO: 112087 - DNA, 25 bp, Probe sequence
gaggattgttcgtattgcgtaatag

SEQ ID NO: 112088 - DNA, 25 bp, Probe sequence
gttgagataaagtgttattcgtaaa

SEQ ID NO: 112089 - DNA, 25 bp, Probe sequence
gtgtcttttttgtgtcgaaattgtg

SEQ ID NO: 112090 - DNA, 25 bp, Probe sequence
tttgtgtcgaaattgtgtacagaat

SEQ ID NO: 112091 - DNA, 25 bp, Probe sequence
atttgcttcgttacaaagcattatt

SEQ ID NO: 112092 - DNA, 25 bp, Probe sequence
atcactgacttcaacgtcattgagc

SEQ ID NO: 112093 - DNA, 25 bp, Probe sequence
acgtcattgagctgttttttatttg

SEQ ID NO: 112094 - DNA, 25 bp, Probe sequence
aacagcttaatgatgtaatgaaatt

SEQ ID NO: 112095 - DNA, 25 bp, Probe sequence
cactgacttcaacgtcattgagctg

SEQ ID NO: 112096 - DNA, 25 bp, Probe sequence
gctgttttttatttgcttcgttaca

SEQ ID NO: 112097 - DNA, 25 bp, Probe sequence
gacttcaacgtcattgagctgtttt

SEQ ID NO: 112098 - DNA, 25 bp, Probe sequence
gagctgttttttatttgcttcgtta

SEQ ID NO: 112099 - DNA, 25 bp, Probe sequence
gttaatcactgacttcaacgtcatt

SEQ ID NO: 112100 - DNA, 25 bp, Probe sequence
gtcattgagctgttttttatttgct

SEQ ID NO: 112101 - DNA, 25 bp, Probe sequence
gtgagttaatcactgacttcaacgt

SEQ ID NO: 112102 - DNA, 25 bp, Probe sequence
tgagttaatcactgacttcaacgtc

SEQ ID NO: 112103 - DNA, 25 bp, Probe sequence
tcaacgtcattgagctgttttttat

SEQ ID NO: 112104 - DNA, 25 bp, Probe sequence
taatcactgacttcaacgtcattga

SEQ ID NO: 112105 - DNA, 25 bp, Probe sequence
ttgagctgttttttatttgcttcgt

SEQ ID NO: 112106 - DNA, 25 bp, Probe sequence
attgtatatgtatattttggtaacg

SEQ ID NO: 112107 - DNA, 25 bp, Probe sequence
attgattgtatatgtatattttggt

SEQ ID NO: 112108 - DNA, 25 bp, Probe sequence
atgcaacataataataagtacaaat

SEQ ID NO: 112109 - DNA, 25 bp, Probe sequence
aaattgattgtatatgtatattttg

SEQ ID NO: 112110 - DNA, 25 bp, Probe sequence
aaattaaattgattgtatatgtata

SEQ ID NO: 112111 - DNA, 25 bp, Probe sequence
aattgattgtatatgtatattttgg

SEQ ID NO: 112112 - DNA, 25 bp, Probe sequence
gattgtatatgtatattttggtaac

SEQ ID NO: 112113 - DNA, 25 bp, Probe sequence
gtatatgtatattttggtaacgtaa

SEQ ID NO: 112114 - DNA, 25 bp, Probe sequence
tgtatattttggtaacgtaaaagag

SEQ ID NO: 112115 - DNA, 25 bp, Probe sequence
tgtatatgtatattttggtaacgta

SEQ ID NO: 112116 - DNA, 25 bp, Probe sequence
taatgcaacataataataagtacaa

SEQ ID NO: 112117 - DNA, 25 bp, Probe sequence
tatgtatattttggtaacgtaaaag

SEQ ID NO: 112118 - DNA, 25 bp, Probe sequence
tatatgtatattttggtaacgtaaa

SEQ ID NO: 112119 - DNA, 25 bp, Probe sequence
ttgattgtatatgtatattttggta

SEQ ID NO: 112120 - DNA, 25 bp, Probe sequence
ttgtatatgtatattttggtaacgt

SEQ ID NO: 112121 - DNA, 25 bp, Probe sequence
atattaacatgatagagagaagtga

SEQ ID NO: 112122 - DNA, 25 bp, Probe sequence
atagtactcaacaaatattaacatg

SEQ ID NO: 112123 - DNA, 25 bp, Probe sequence
ataacacaaaggttgatagtactca

SEQ ID NO: 112124 - DNA, 25 bp, Probe sequence
aggttgatagtactcaacaaatatt

SEQ ID NO: 112125 - DNA, 25 bp, Probe sequence
acacaaaggttgatagtactcaaca

SEQ ID NO: 112126 - DNA, 25 bp, Probe sequence
aacacaaaggttgatagtactcaac

SEQ ID NO: 112127 - DNA, 25 bp, Probe sequence
aaggttgatagtactcaacaaatat

SEQ ID NO: 112128 - DNA, 25 bp, Probe sequence
aataacacaaaggttgatagtactc

SEQ ID NO: 112129 - DNA, 25 bp, Probe sequence
cacaaaggttgatagtactcaacaa

SEQ ID NO: 112130 - DNA, 25 bp, Probe sequence
gatagtactcaacaaatattaacat

SEQ ID NO: 112131 - DNA, 25 bp, Probe sequence
ggttgatagtactcaacaaatatta

SEQ ID NO: 112132 - DNA, 25 bp, Probe sequence
tgatagtactcaacaaatattaaca

SEQ ID NO: 112133 - DNA, 25 bp, Probe sequence
taacacaaaggttgatagtactcaa

SEQ ID NO: 112134 - DNA, 25 bp, Probe sequence
tagtactcaacaaatattaacatga

SEQ ID NO: 112135 - DNA, 25 bp, Probe sequence
ttgatagtactcaacaaatattaac

SEQ ID NO: 112136 - DNA, 25 bp, Probe sequence
ataagttagttttgtttgataacat

SEQ ID NO: 112137 - DNA, 25 bp, Probe sequence
ataatcactattttaataagttata

SEQ ID NO: 112138 - DNA, 25 bp, Probe sequence
atgacgttagaacatttaataataa

SEQ ID NO: 112139 - DNA, 25 bp, Probe sequence
atgaattacatgtattaaattgaat

SEQ ID NO: 112140 - DNA, 25 bp, Probe sequence
agttgaataatcactattttaataa

SEQ ID NO: 112141 - DNA, 25 bp, Probe sequence
aaagttgaataatcactattttaat

SEQ ID NO: 112142 - DNA, 25 bp, Probe sequence
aaagttaaatgaattacatgtatta

SEQ ID NO: 112143 - DNA, 25 bp, Probe sequence
aagttgaataatcactattttaata

SEQ ID NO: 112144 - DNA, 25 bp, Probe sequence
gaataatcactattttaataagtta

SEQ ID NO: 112145 - DNA, 25 bp, Probe sequence
gacgttagaacatttaataataaag

SEQ ID NO: 112146 - DNA, 25 bp, Probe sequence
gttgaataatcactattttaataag

SEQ ID NO: 112147 - DNA, 25 bp, Probe sequence
tgaataagttagttttgtttgataa

SEQ ID NO: 112148 - DNA, 25 bp, Probe sequence
taagttagttttgtttgataacata

SEQ ID NO: 112149 - DNA, 25 bp, Probe sequence
ttagttttgtttgataacataaaag

SEQ ID NO: 112150 - DNA, 25 bp, Probe sequence
ttgaataagttagttttgtttgata

SEQ ID NO: 112151 - DNA, 25 bp, Probe sequence
atttccatgtaaagtaacgctctct

SEQ ID NO: 112152 - DNA, 25 bp, Probe sequence
atctacattccaaacagcaacaaca

SEQ ID NO: 112153 - DNA, 25 bp, Probe sequence
agcgaccaatgttcagtatattcac

SEQ ID NO: 112154 - DNA, 25 bp, Probe sequence
acaacttaaattactgtcccgcatt

SEQ ID NO: 112155 - DNA, 25 bp, Probe sequence
aaatcctcaagtaccaaaagctatg

SEQ ID NO: 112156 - DNA, 25 bp, Probe sequence
aacgctctcttaatcgaaataccac

SEQ ID NO: 112157 - DNA, 25 bp, Probe sequence
aagctatgaccactttatcaaaatc

SEQ ID NO: 112158 - DNA, 25 bp, Probe sequence
caaaatcaacgcaagttaacctctc

SEQ ID NO: 112159 - DNA, 25 bp, Probe sequence
ctacccgctatagatcatcatcacc

SEQ ID NO: 112160 - DNA, 25 bp, Probe sequence
ccgaactacccgctatagatcatca

SEQ ID NO: 112161 - DNA, 25 bp, Probe sequence
gcaacaacaaaatcctcaagtacca

SEQ ID NO: 112162 - DNA, 25 bp, Probe sequence
gaaataccacactcacaattgtaaa

SEQ ID NO: 112163 - DNA, 25 bp, Probe sequence
gacactaggccgcttctttttaatt

SEQ ID NO: 112164 - DNA, 25 bp, Probe sequence
gtcccgcattaaacatatctacatt

SEQ ID NO: 112165 - DNA, 25 bp, Probe sequence
tattcacaactgacactaggccgct

SEQ ID NO: 112166 - DNA, 25 bp, Probe sequence
acgctcctatataatgtaaaacgga

SEQ ID NO: 112167 - DNA, 25 bp, Probe sequence
aacgctcctatataatgtaaaacgg

SEQ ID NO: 112168 - DNA, 25 bp, Probe sequence
aagaggaaacgctcctatataatgt

SEQ ID NO: 112169 - DNA, 25 bp, Probe sequence
ctatttttttattatcgaagattgc

SEQ ID NO: 112170 - DNA, 25 bp, Probe sequence
gcgaaagaggaaacgctcctatata

SEQ ID NO: 112171 - DNA, 25 bp, Probe sequence
gaattattcctatttacaaataaat

SEQ ID NO: 112172 - DNA, 25 bp, Probe sequence
gaaacgctcctatataatgtaaaac

SEQ ID NO: 112173 - DNA, 25 bp, Probe sequence
gaaagaggaaacgctcctatataat

SEQ ID NO: 112174 - DNA, 25 bp, Probe sequence
gaggaaacgctcctatataatgtaa

SEQ ID NO: 112175 - DNA, 25 bp, Probe sequence
gattgcgaaagaggaaacgctccta

SEQ ID NO: 112176 - DNA, 25 bp, Probe sequence
ggaaacgctcctatataatgtaaaa

SEQ ID NO: 112177 - DNA, 25 bp, Probe sequence
taatgtaaaacggaattattcctat

SEQ ID NO: 112178 - DNA, 25 bp, Probe sequence
tactatttttttattatcgaagatt

SEQ ID NO: 112179 - DNA, 25 bp, Probe sequence
ttttttattatcgaagattgcgaaa

SEQ ID NO: 112180 - DNA, 25 bp, Probe sequence
ttgcgaaagaggaaacgctcctata

SEQ ID NO: 112181 - DNA, 25 bp, Probe sequence
attgtggcttaattgtttgcaattt

SEQ ID NO: 112182 - DNA, 25 bp, Probe sequence
ataatcatttttgaattgtggctta

SEQ ID NO: 112183 - DNA, 25 bp, Probe sequence
atcatttttgaattgtggcttaatt

SEQ ID NO: 112184 - DNA, 25 bp, Probe sequence
aatcatttttgaattgtggcttaat

SEQ ID NO: 112185 - DNA, 25 bp, Probe sequence
catttttgaattgtggcttaattgt

SEQ ID NO: 112186 - DNA, 25 bp, Probe sequence
gaattgtggcttaattgtttgcaat

SEQ ID NO: 112187 - DNA, 25 bp, Probe sequence
gtataatcatttttgaattgtggct

SEQ ID NO: 112188 - DNA, 25 bp, Probe sequence
gtggcttaattgtttgcaatttatg

SEQ ID NO: 112189 - DNA, 25 bp, Probe sequence
ggcttaattgtttgcaatttatgac

SEQ ID NO: 112190 - DNA, 25 bp, Probe sequence
tgtttgcaatttatgacaattaata

SEQ ID NO: 112191 - DNA, 25 bp, Probe sequence
tgaattgtggcttaattgtttgcaa

SEQ ID NO: 112192 - DNA, 25 bp, Probe sequence
taatcatttttgaattgtggcttaa

SEQ ID NO: 112193 - DNA, 25 bp, Probe sequence
taagatgttcttaggaactttttgt

SEQ ID NO: 112194 - DNA, 25 bp, Probe sequence
taggaactttttgttttcaatctat

SEQ ID NO: 112195 - DNA, 25 bp, Probe sequence
ttgaattgtggcttaattgtttgca

SEQ ID NO: 112196 - DNA, 25 bp, Probe sequence
aacacgttaggtctcgtctaggcaa

SEQ ID NO: 112197 - DNA, 25 bp, Probe sequence
atgatgccagcgatgatacccatta

SEQ ID NO: 112198 - DNA, 25 bp, Probe sequence
agacctcctttgtttgttatgaaat

SEQ ID NO: 112199 - DNA, 25 bp, Probe sequence
actgcctaactgtacaggtgcgttt

SEQ ID NO: 112200 - DNA, 25 bp, Probe sequence
acaagactcacctcacatcaataaa

SEQ ID NO: 112201 - DNA, 25 bp, Probe sequence
aacgtaccgtgatgcagtgtctagt

SEQ ID NO: 112202 - DNA, 25 bp, Probe sequence
aatgattcctgcaatgatacccatg

SEQ ID NO: 112203 - DNA, 25 bp, Probe sequence
caaagccaccatccctattggtata

SEQ ID NO: 112204 - DNA, 25 bp, Probe sequence
cgaattccatgtgaatggccccctt

SEQ ID NO: 112205 - DNA, 25 bp, Probe sequence
gaatggcccccttcaaataagatgt

SEQ ID NO: 112206 - DNA, 25 bp, Probe sequence
gatacccattaagattacctccttt

SEQ ID NO: 112207 - DNA, 25 bp, Probe sequence
gattacctcctttgcttatgagtta

SEQ ID NO: 112208 - DNA, 25 bp, Probe sequence
gttttgtcctcctgtatgttgattt

SEQ ID NO: 112209 - DNA, 25 bp, Probe sequence
tgatacccatgtgaaagacctcctt

SEQ ID NO: 112210 - DNA, 25 bp, Probe sequence
tacaatagccatcgttttgtcctcc

SEQ ID NO: 112211 - DNA, 25 bp, Probe sequence
atatcatcatatctacaatgttcta

SEQ ID NO: 112212 - DNA, 25 bp, Probe sequence
atatctacaatgttctagcttctta

SEQ ID NO: 112213 - DNA, 25 bp, Probe sequence
atcatatctacaatgttctagcttc

SEQ ID NO: 112214 - DNA, 25 bp, Probe sequence
atctacaatgttctagcttcttaaa

SEQ ID NO: 112215 - DNA, 25 bp, Probe sequence
aatgttctagcttcttaaaatatac

SEQ ID NO: 112216 - DNA, 25 bp, Probe sequence
cgatgatatgttgcgatgctaagta

SEQ ID NO: 112217 - DNA, 25 bp, Probe sequence
gctaagtaattaatatatcatcata

SEQ ID NO: 112218 - DNA, 25 bp, Probe sequence
gatatgttgcgatgctaagtaatta

SEQ ID NO: 112219 - DNA, 25 bp, Probe sequence
gttgatgtcgtgataacgatacaaa

SEQ ID NO: 112220 - DNA, 25 bp, Probe sequence
gttgcgatgctaagtaattaatata

SEQ ID NO: 112221 - DNA, 25 bp, Probe sequence
gttctagcttcttaaaatatactaa

SEQ ID NO: 112222 - DNA, 25 bp, Probe sequence
gtaatagttgatgtcgtgataacga

SEQ ID NO: 112223 - DNA, 25 bp, Probe sequence
tcgtgataacgatacaaagatgaag

SEQ ID NO: 112224 - DNA, 25 bp, Probe sequence
tacaatgttctagcttcttaaaata

SEQ ID NO: 112225 - DNA, 25 bp, Probe sequence
ttaatgtaatagttgatgtcgtgat

SEQ ID NO: 112226 - DNA, 25 bp, Probe sequence
atttgcgaatggtgacaagtcaacg

SEQ ID NO: 112227 - DNA, 25 bp, Probe sequence
atttgttgcgagacatgcccactat

SEQ ID NO: 112228 - DNA, 25 bp, Probe sequence
atttgggtgtgctgtttttctatta

SEQ ID NO: 112229 - DNA, 25 bp, Probe sequence
atgcttggttaaacagcgcaacgcc

SEQ ID NO: 112230 - DNA, 25 bp, Probe sequence
agcgcaacgccatatatttgggtgt

SEQ ID NO: 112231 - DNA, 25 bp, Probe sequence
agcccgtgaaaggcgtatgtcataa

SEQ ID NO: 112232 - DNA, 25 bp, Probe sequence
aaggttaggtatgcttctgctggct

SEQ ID NO: 112233 - DNA, 25 bp, Probe sequence
cgtggatgaatgcgtgggtctgaat

SEQ ID NO: 112234 - DNA, 25 bp, Probe sequence
gcgtgggtctgaatatagcccgtga

SEQ ID NO: 112235 - DNA, 25 bp, Probe sequence
gcttctgctggcttattaaagctat

SEQ ID NO: 112236 - DNA, 25 bp, Probe sequence
gtgctgtttttctattacatgatgt

SEQ ID NO: 112237 - DNA, 25 bp, Probe sequence
ggtgacaagtcaacgcaagcatatt

SEQ ID NO: 112238 - DNA, 25 bp, Probe sequence
ggtatgcttctgctggcttattaaa

SEQ ID NO: 112239 - DNA, 25 bp, Probe sequence
ggcgtatgtcataaaatttgcgaat

SEQ ID NO: 112240 - DNA, 25 bp, Probe sequence
tacatgatgtgtttattacgtggat

SEQ ID NO: 112241 - DNA, 25 bp, Probe sequence
atttgagtgttttttgtggcgtgat

SEQ ID NO: 112242 - DNA, 25 bp, Probe sequence
cacttgagtgacgatgttattatat

SEQ ID NO: 112243 - DNA, 25 bp, Probe sequence
gcgtgatagtatagggaacttagac

SEQ ID NO: 112244 - DNA, 25 bp, Probe sequence
gacgatgttattatatttgtcattt

SEQ ID NO: 112245 - DNA, 25 bp, Probe sequence
gagtgttttttgtggcgtgatagta

SEQ ID NO: 112246 - DNA, 25 bp, Probe sequence
gttttttgtggcgtgatagtatagg

SEQ ID NO: 112247 - DNA, 25 bp, Probe sequence
gttattatatttgtcatttgagtgt

SEQ ID NO: 112248 - DNA, 25 bp, Probe sequence
gtcatttgagtgttttttgtggcgt

SEQ ID NO: 112249 - DNA, 25 bp, Probe sequence
gtgttttttgtggcgtgatagtata

SEQ ID NO: 112250 - DNA, 25 bp, Probe sequence
gtggcgtgatagtatagggaactta

SEQ ID NO: 112251 - DNA, 25 bp, Probe sequence
tgagtgacgatgttattatatttgt

SEQ ID NO: 112252 - DNA, 25 bp, Probe sequence
tttttgtggcgtgatagtataggga

SEQ ID NO: 112253 - DNA, 25 bp, Probe sequence
ttttaaatattaacacttgagtgac

SEQ ID NO: 112254 - DNA, 25 bp, Probe sequence
ttgtcatttgagtgttttttgtggc

SEQ ID NO: 112255 - DNA, 25 bp, Probe sequence
ttgagtgttttttgtggcgtgatag

SEQ ID NO: 112256 - DNA, 25 bp, Probe sequence
attttgatgcaggtgtattgcatgt

SEQ ID NO: 112257 - DNA, 25 bp, Probe sequence
atacaggcgctaccgtattaatgaa

SEQ ID NO: 112258 - DNA, 25 bp, Probe sequence
atgacaacacattacaagagttgac

SEQ ID NO: 112259 - DNA, 25 bp, Probe sequence
acaggcgctaccgtattaatgaaac

SEQ ID NO: 112260 - DNA, 25 bp, Probe sequence
aaatacaggcgctaccgtattaatg

SEQ ID NO: 112261 - DNA, 25 bp, Probe sequence
aacacattacaagagttgactatat

SEQ ID NO: 112262 - DNA, 25 bp, Probe sequence
aagagttgactatattatgataaat

SEQ ID NO: 112263 - DNA, 25 bp, Probe sequence
gaaacaattttgatgcaggtgtatt

SEQ ID NO: 112264 - DNA, 25 bp, Probe sequence
gataaatacaggcgctaccgtatta

SEQ ID NO: 112265 - DNA, 25 bp, Probe sequence
ggcgctaccgtattaatgaaacaat

SEQ ID NO: 112266 - DNA, 25 bp, Probe sequence
tgttacttaaacacgtagacgcttt

SEQ ID NO: 112267 - DNA, 25 bp, Probe sequence
taaacacgtagacgctttaacgctt

SEQ ID NO: 112268 - DNA, 25 bp, Probe sequence
tacatacatgttagagtgttactta

SEQ ID NO: 112269 - DNA, 25 bp, Probe sequence
tagacgctttaacgctttaaaggag

SEQ ID NO: 112270 - DNA, 25 bp, Probe sequence
ttatgataaatacaggcgctaccgt

SEQ ID NO: 112271 - DNA, 25 bp, Probe sequence
atttgtgttgctcaggtgttttttt

SEQ ID NO: 112272 - DNA, 25 bp, Probe sequence
aaaatgtcgtttataattcttatct

SEQ ID NO: 112273 - DNA, 25 bp, Probe sequence
aagtatttgtgttgctcaggtgttt

SEQ ID NO: 112274 - DNA, 25 bp, Probe sequence
gaagcatctgacacacaagtatttg

SEQ ID NO: 112275 - DNA, 25 bp, Probe sequence
gaaaagttagtactggttctgaatt

SEQ ID NO: 112276 - DNA, 25 bp, Probe sequence
gttgctcaggtgtttttttgtttgg

SEQ ID NO: 112277 - DNA, 25 bp, Probe sequence
gttagtactggttctgaattaatcg

SEQ ID NO: 112278 - DNA, 25 bp, Probe sequence
gtatttgtgttgctcaggtgttttt

SEQ ID NO: 112279 - DNA, 25 bp, Probe sequence
gtactggttctgaattaatcgaaac

SEQ ID NO: 112280 - DNA, 25 bp, Probe sequence
gtcgtttataattcttatctgaaaa

SEQ ID NO: 112281 - DNA, 25 bp, Probe sequence
gtgttgctcaggtgtttttttgttt

SEQ ID NO: 112282 - DNA, 25 bp, Probe sequence
ggttctgaattaatcgaaacttaga

SEQ ID NO: 112283 - DNA, 25 bp, Probe sequence
tgctcaggtgtttttttgtttggaa

SEQ ID NO: 112284 - DNA, 25 bp, Probe sequence
tcaggtgtttttttgtttggaattg

SEQ ID NO: 112285 - DNA, 25 bp, Probe sequence
tatatagaagcatctgacacacaag

SEQ ID NO: 112286 - DNA, 25 bp, Probe sequence
atagtagtctcacaattcatcattg

SEQ ID NO: 112287 - DNA, 25 bp, Probe sequence
atagcagcactagcatatattttaa

SEQ ID NO: 112288 - DNA, 25 bp, Probe sequence
ataagaatttgtaggaggggcgatg

SEQ ID NO: 112289 - DNA, 25 bp, Probe sequence
ataatgctcttattcctagtggatt

SEQ ID NO: 112290 - DNA, 25 bp, Probe sequence
atgcaattttacatataatgctctt

SEQ ID NO: 112291 - DNA, 25 bp, Probe sequence
agtgcttttttgtgcgatgttaatc

SEQ ID NO: 112292 - DNA, 25 bp, Probe sequence
aaattcggcaaattgtattgacgat

SEQ ID NO: 112293 - DNA, 25 bp, Probe sequence
aaatgctagtgcttttttgtgcgat

SEQ ID NO: 112294 - DNA, 25 bp, Probe sequence
ctagcatatattttaagatcaactt

SEQ ID NO: 112295 - DNA, 25 bp, Probe sequence
gattgagttatggaggtttggtgga

SEQ ID NO: 112296 - DNA, 25 bp, Probe sequence
gtttggtggacatttgtatggattt

SEQ ID NO: 112297 - DNA, 25 bp, Probe sequence
gtcacatgaattaattattttttta

SEQ ID NO: 112298 - DNA, 25 bp, Probe sequence
gtcatagtagtctcacaattcatca

SEQ ID NO: 112299 - DNA, 25 bp, Probe sequence
tgctcttattcctagtggattaata

SEQ ID NO: 112300 - DNA, 25 bp, Probe sequence
ttgtgcgatgttaatcattcgtgat

SEQ ID NO: 112301 - DNA, 25 bp, Probe sequence
attatattgcgtcctacaagcaaag

SEQ ID NO: 112302 - DNA, 25 bp, Probe sequence
atattgcgtcctacaagcaaagttc

SEQ ID NO: 112303 - DNA, 25 bp, Probe sequence
atgcttatgtttgtagggcgttatt

SEQ ID NO: 112304 - DNA, 25 bp, Probe sequence
atgtttgtagggcgttattgtttga

SEQ ID NO: 112305 - DNA, 25 bp, Probe sequence
agttcatgcttatgtttgtagggcg

SEQ ID NO: 112306 - DNA, 25 bp, Probe sequence
agcaaagttcatgcttatgtttgta

SEQ ID NO: 112307 - DNA, 25 bp, Probe sequence
aagggaatgtaatcattttatagtg

SEQ ID NO: 112308 - DNA, 25 bp, Probe sequence
gcgtcctacaagcaaagttcatgct

SEQ ID NO: 112309 - DNA, 25 bp, Probe sequence
gcttatgtttgtagggcgttattgt

SEQ ID NO: 112310 - DNA, 25 bp, Probe sequence
gatgatacagtatatgatttttttg

SEQ ID NO: 112311 - DNA, 25 bp, Probe sequence
gtttgtagggcgttattgtttgaca

SEQ ID NO: 112312 - DNA, 25 bp, Probe sequence
gtttgacaataaaattatttccaat

SEQ ID NO: 112313 - DNA, 25 bp, Probe sequence
tgcgtcctacaagcaaagttcatgc

SEQ ID NO: 112314 - DNA, 25 bp, Probe sequence
tcatgcttatgtttgtagggcgtta

SEQ ID NO: 112315 - DNA, 25 bp, Probe sequence
ttgtagggcgttattgtttgacaat

SEQ ID NO: 112316 - DNA, 25 bp, Probe sequence
atgttctatgttcgaccaatccttt

SEQ ID NO: 112317 - DNA, 25 bp, Probe sequence
aggattggtcgaatgaacttcatgt

SEQ ID NO: 112318 - DNA, 25 bp, Probe sequence
aacttcatgttctatgttcgaccaa

SEQ ID NO: 112319 - DNA, 25 bp, Probe sequence
aagctgaaaagttggattgaatcct

SEQ ID NO: 112320 - DNA, 25 bp, Probe sequence
aagtcgtgattgttgtaataggaat

SEQ ID NO: 112321 - DNA, 25 bp, Probe sequence
gaatcctaaactttatggcggggct

SEQ ID NO: 112322 - DNA, 25 bp, Probe sequence
gaattcctattacatttcacaagct

SEQ ID NO: 112323 - DNA, 25 bp, Probe sequence
ggggctatcaaagtcgtgattgttg

SEQ ID NO: 112324 - DNA, 25 bp, Probe sequence
ggcggggctatcaaagtcgtgattg

SEQ ID NO: 112325 - DNA, 25 bp, Probe sequence
tcctaaactttatggcggggctatc

SEQ ID NO: 112326 - DNA, 25 bp, Probe sequence
tggattgaatcctaaactttatggc

SEQ ID NO: 112327 - DNA, 25 bp, Probe sequence
tcatgttctatgttcgaccaatcct

SEQ ID NO: 112328 - DNA, 25 bp, Probe sequence
taaactttatggcggggctatcaaa

SEQ ID NO: 112329 - DNA, 25 bp, Probe sequence
tatggcggggctatcaaagtcgtga

SEQ ID NO: 112330 - DNA, 25 bp, Probe sequence
ttcctattacatttcacaagctgaa

SEQ ID NO: 112331 - DNA, 25 bp, Probe sequence
attgctaacgttttgcgctataact

SEQ ID NO: 112332 - DNA, 25 bp, Probe sequence
aacgttttgcgctataactactcat

SEQ ID NO: 112333 - DNA, 25 bp, Probe sequence
cccctagtatcttctgtttatatga

SEQ ID NO: 112334 - DNA, 25 bp, Probe sequence
gcgctataactactcatatatgata

SEQ ID NO: 112335 - DNA, 25 bp, Probe sequence
gctgaattgctaacgttttgcgcta

SEQ ID NO: 112336 - DNA, 25 bp, Probe sequence
gctaacgttttgcgctataactact

SEQ ID NO: 112337 - DNA, 25 bp, Probe sequence
gaattgctaacgttttgcgctataa

SEQ ID NO: 112338 - DNA, 25 bp, Probe sequence
gaaaagttgggtgcgctgaattgct

SEQ ID NO: 112339 - DNA, 25 bp, Probe sequence
gatttcacaaagttggggtgtcaaa

SEQ ID NO: 112340 - DNA, 25 bp, Probe sequence
gttgggtgcgctgaattgctaacgt

SEQ ID NO: 112341 - DNA, 25 bp, Probe sequence
gttttgcgctataactactcatata

SEQ ID NO: 112342 - DNA, 25 bp, Probe sequence
gtatcttctgtttatatgaaaagtt

SEQ ID NO: 112343 - DNA, 25 bp, Probe sequence
gtgcgctgaattgctaacgttttgc

SEQ ID NO: 112344 - DNA, 25 bp, Probe sequence
gggtgcgctgaattgctaacgtttt

SEQ ID NO: 112345 - DNA, 25 bp, Probe sequence
tccccctagtatcttctgtttatat

SEQ ID NO: 112346 - DNA, 25 bp, Probe sequence
atccacaggtcgcttaacttaagtt

SEQ ID NO: 112347 - DNA, 25 bp, Probe sequence
agtaaaaagcgacctagtgaacaat

SEQ ID NO: 112348 - DNA, 25 bp, Probe sequence
actcatcgtcgaccacaacaattaa

SEQ ID NO: 112349 - DNA, 25 bp, Probe sequence
acttaagttatattgctagttgcga

SEQ ID NO: 112350 - DNA, 25 bp, Probe sequence
aagcgacctagtgaacaattgacat

SEQ ID NO: 112351 - DNA, 25 bp, Probe sequence
aaaagcatctttactcatcgtcgac

SEQ ID NO: 112352 - DNA, 25 bp, Probe sequence
cgtcgaccacaacaattaatgatga

SEQ ID NO: 112353 - DNA, 25 bp, Probe sequence
gaacaattgacatatatccacaggt

SEQ ID NO: 112354 - DNA, 25 bp, Probe sequence
gacatatatccacaggtcgcttaac

SEQ ID NO: 112355 - DNA, 25 bp, Probe sequence
gatcaccggacaatttaatatagta

SEQ ID NO: 112356 - DNA, 25 bp, Probe sequence
gttatagatcaccggacaatttaat

SEQ ID NO: 112357 - DNA, 25 bp, Probe sequence
tgctttttgttatagatcaccggac

SEQ ID NO: 112358 - DNA, 25 bp, Probe sequence
tctttactcatcgtcgaccacaaca

SEQ ID NO: 112359 - DNA, 25 bp, Probe sequence
taaaggtgctttttgttatagatca

SEQ ID NO: 112360 - DNA, 25 bp, Probe sequence
tatatccacaggtcgcttaacttaa

SEQ ID NO: 112361 - DNA, 25 bp, Probe sequence
atatggtgattatacgcccttaatt

SEQ ID NO: 112362 - DNA, 25 bp, Probe sequence
atcatcattgatagcatcgaattac

SEQ ID NO: 112363 - DNA, 25 bp, Probe sequence
atggtgattatacgcccttaatttt

SEQ ID NO: 112364 - DNA, 25 bp, Probe sequence
aaaccccaattctatgaatgaatta

SEQ ID NO: 112365 - DNA, 25 bp, Probe sequence
aaacaaaaccccaattctatgaatg

SEQ ID NO: 112366 - DNA, 25 bp, Probe sequence
aacaaaaccccaattctatgaatga

SEQ ID NO: 112367 - DNA, 25 bp, Probe sequence
aatatggtgattatacgcccttaat

SEQ ID NO: 112368 - DNA, 25 bp, Probe sequence
caaaaccccaattctatgaatgaat

SEQ ID NO: 112369 - DNA, 25 bp, Probe sequence
gaaaatcatcattgatagcatcgaa

SEQ ID NO: 112370 - DNA, 25 bp, Probe sequence
gatattactgctaagtgtaaaacga

SEQ ID NO: 112371 - DNA, 25 bp, Probe sequence
gtgtaaaacgaaaatcatcattgat

SEQ ID NO: 112372 - DNA, 25 bp, Probe sequence
tggtgattatacgcccttaattttt

SEQ ID NO: 112373 - DNA, 25 bp, Probe sequence
tgattatacgcccttaattttttat

SEQ ID NO: 112374 - DNA, 25 bp, Probe sequence
ttttcaaagatattactgctaagtg

SEQ ID NO: 112375 - DNA, 25 bp, Probe sequence
ttaatatggtgattatacgccctta

SEQ ID NO: 112376 - DNA, 25 bp, Probe sequence
ataggcacctccgaaaatgagtgtt

SEQ ID NO: 112377 - DNA, 25 bp, Probe sequence
attgataaatgttctattttttaga

SEQ ID NO: 112378 - DNA, 25 bp, Probe sequence
atattctaaaaaaggggtgtgcatc

SEQ ID NO: 112379 - DNA, 25 bp, Probe sequence
aggcacctccgaaaatgagtgtttt

SEQ ID NO: 112380 - DNA, 25 bp, Probe sequence
agatgaatatcttctattttatata

SEQ ID NO: 112381 - DNA, 25 bp, Probe sequence
agcgatataggcacctccgaaaatg

SEQ ID NO: 112382 - DNA, 25 bp, Probe sequence
cacctccgaaaatgagtgttttgta

SEQ ID NO: 112383 - DNA, 25 bp, Probe sequence
gcgatataggcacctccgaaaatga

SEQ ID NO: 112384 - DNA, 25 bp, Probe sequence
gaatatcttctattttatatattga

SEQ ID NO: 112385 - DNA, 25 bp, Probe sequence
gagtgttttgtaactattatagcaa

SEQ ID NO: 112386 - DNA, 25 bp, Probe sequence
gatataggcacctccgaaaatgagt

SEQ ID NO: 112387 - DNA, 25 bp, Probe sequence
gtaactattatagcaatattattga

SEQ ID NO: 112388 - DNA, 25 bp, Probe sequence
gtaattatcattaataactaatatc

SEQ ID NO: 112389 - DNA, 25 bp, Probe sequence
ggcacctccgaaaatgagtgttttg

SEQ ID NO: 112390 - DNA, 25 bp, Probe sequence
tgttctattttttagatgaatatct

SEQ ID NO: 112391 - DNA, 25 bp, Probe sequence
atttgtggtaatcatgtaatgctta

SEQ ID NO: 112392 - DNA, 25 bp, Probe sequence
atcaacgtcacatgccatctttgta

SEQ ID NO: 112393 - DNA, 25 bp, Probe sequence
atctagtatctatcaacgtcacatg

SEQ ID NO: 112394 - DNA, 25 bp, Probe sequence
acattcgtttataggtcaactgtag

SEQ ID NO: 112395 - DNA, 25 bp, Probe sequence
caatattgacttttacagaacgttc

SEQ ID NO: 112396 - DNA, 25 bp, Probe sequence
catgccatctttgtaacctaaaaac

SEQ ID NO: 112397 - DNA, 25 bp, Probe sequence
cgtcacatgccatctttgtaaccta

SEQ ID NO: 112398 - DNA, 25 bp, Probe sequence
gacttttacagaacgttcatatatg

SEQ ID NO: 112399 - DNA, 25 bp, Probe sequence
gacgttgtgtcatgctgaatcgagt

SEQ ID NO: 112400 - DNA, 25 bp, Probe sequence
gtatctatcaacgtcacatgccatc

SEQ ID NO: 112401 - DNA, 25 bp, Probe sequence
gtgtcatgctgaatcgagtttgaaa

SEQ ID NO: 112402 - DNA, 25 bp, Probe sequence
ggtcaactgtagtggaagacaatga

SEQ ID NO: 112403 - DNA, 25 bp, Probe sequence
ggttacgttgacgttgtgtcatgct

SEQ ID NO: 112404 - DNA, 25 bp, Probe sequence
ggaaatggtggttacgttgacgttg

SEQ ID NO: 112405 - DNA, 25 bp, Probe sequence
tagtgattttttacattcgtttata

SEQ ID NO: 112406 - DNA, 25 bp, Probe sequence
atagctgtatcagatcatgtgacaa

SEQ ID NO: 112407 - DNA, 25 bp, Probe sequence
agggcattgagattggaagggcatt

SEQ ID NO: 112408 - DNA, 25 bp, Probe sequence
agggcatttggcttgtgcaatatac

SEQ ID NO: 112409 - DNA, 25 bp, Probe sequence
agctaaatgtcttttttgttttgtg

SEQ ID NO: 112410 - DNA, 25 bp, Probe sequence
gacaagttatactcgttttaagaca

SEQ ID NO: 112411 - DNA, 25 bp, Probe sequence
gaaagcctttacataacttgtctag

SEQ ID NO: 112412 - DNA, 25 bp, Probe sequence
gaaatatgatggatggcttgtgtgg

SEQ ID NO: 112413 - DNA, 25 bp, Probe sequence
gagagcgtggtgaggtattgttaat

SEQ ID NO: 112414 - DNA, 25 bp, Probe sequence
gaggagttattgctacatatgtcgt

SEQ ID NO: 112415 - DNA, 25 bp, Probe sequence
gtctttgaatggctcgtttttttag

SEQ ID NO: 112416 - DNA, 25 bp, Probe sequence
gtcgttatggcctattgattttcta

SEQ ID NO: 112417 - DNA, 25 bp, Probe sequence
ggcttgtgtgggcaagtttgctatt

SEQ ID NO: 112418 - DNA, 25 bp, Probe sequence
tggccatgcatctacactttataat

SEQ ID NO: 112419 - DNA, 25 bp, Probe sequence
taggagttggccatgcatctacact

SEQ ID NO: 112420 - DNA, 25 bp, Probe sequence
ttgccttttttatttgtctttgaat

SEQ ID NO: 112421 - DNA, 25 bp, Probe sequence
atgtgccgtagggtagccgagattt

SEQ ID NO: 112422 - DNA, 25 bp, Probe sequence
agtggatcatcatatgtgccgtagg

SEQ ID NO: 112423 - DNA, 25 bp, Probe sequence
gcggttccctgtactcgaaatccgc

SEQ ID NO: 112424 - DNA, 25 bp, Probe sequence
gaacccatgaaccatgtcaggtcct

SEQ ID NO: 112425 - DNA, 25 bp, Probe sequence
gccgagatttagctaacgactttgg

SEQ ID NO: 112426 - DNA, 25 bp, Probe sequence
gcttaattcctttgttgaggccgta

SEQ ID NO: 112427 - DNA, 25 bp, Probe sequence
gaagtctgcccaaagcacgtagtgt

SEQ ID NO: 112428 - DNA, 25 bp, Probe sequence
gaggccgtatttttgcgaagtctgc

SEQ ID NO: 112429 - DNA, 25 bp, Probe sequence
gtcaggtcctgacggaagcagcatt

SEQ ID NO: 112430 - DNA, 25 bp, Probe sequence
gtgtttgaagatttcggtcctatgc

SEQ ID NO: 112431 - DNA, 25 bp, Probe sequence
ggtcctatgcaatatgaacccatga

SEQ ID NO: 112432 - DNA, 25 bp, Probe sequence
taggtggggaggtagcggttccctg

SEQ ID NO: 112433 - DNA, 25 bp, Probe sequence
tccgctttatgcgaggcttaattcc

SEQ ID NO: 112434 - DNA, 25 bp, Probe sequence
tacgttcgatgcttaggtgcacggt

SEQ ID NO: 112435 - DNA, 25 bp, Probe sequence
tatatcttgccgtgctaggtgggga

SEQ ID NO: 112436 - DNA, 25 bp, Probe sequence
attgacaatcaaatgcctacggagg

SEQ ID NO: 112437 - DNA, 25 bp, Probe sequence
atgagggggagtatcttacaataga

SEQ ID NO: 112438 - DNA, 25 bp, Probe sequence
acaatcaaatgcctacggaggacat

SEQ ID NO: 112439 - DNA, 25 bp, Probe sequence
aatgagatacgttatgattattgac

SEQ ID NO: 112440 - DNA, 25 bp, Probe sequence
gaaatgagggggagtatcttacaat

SEQ ID NO: 112441 - DNA, 25 bp, Probe sequence
gaaatgatggtgaaatgagggggag

SEQ ID NO: 112442 - DNA, 25 bp, Probe sequence
gacaatcaaatgcctacggaggaca

SEQ ID NO: 112443 - DNA, 25 bp, Probe sequence
gagatacgttatgattattgacaat

SEQ ID NO: 112444 - DNA, 25 bp, Probe sequence
ggtgaaatgagggggagtatcttac

SEQ ID NO: 112445 - DNA, 25 bp, Probe sequence
gagggggagtatcttacaatagaat

SEQ ID NO: 112446 - DNA, 25 bp, Probe sequence
gggagtatcttacaatagaattatt

SEQ ID NO: 112447 - DNA, 25 bp, Probe sequence
gggggagtatcttacaatagaatta

SEQ ID NO: 112448 - DNA, 25 bp, Probe sequence
tgatttttgtgtcaatgaaaagtaa

SEQ ID NO: 112449 - DNA, 25 bp, Probe sequence
tgacaatcaaatgcctacggaggac

SEQ ID NO: 112450 - DNA, 25 bp, Probe sequence
ttgacaatcaaatgcctacggagga

SEQ ID NO: 112451 - DNA, 25 bp, Probe sequence
atgctataatgagaggtaattgttt

SEQ ID NO: 112452 - DNA, 25 bp, Probe sequence
atgagaggtaattgtttatggaggt

SEQ ID NO: 112453 - DNA, 25 bp, Probe sequence
aggtaattgtttatggaggtgctaa

SEQ ID NO: 112454 - DNA, 25 bp, Probe sequence
agtaaaggtattatcatgctataat

SEQ ID NO: 112455 - DNA, 25 bp, Probe sequence
agaggtaattgtttatggaggtgct

SEQ ID NO: 112456 - DNA, 25 bp, Probe sequence
aatgagaggtaattgtttatggagg

SEQ ID NO: 112457 - DNA, 25 bp, Probe sequence
catgctataatgagaggtaattgtt

SEQ ID NO: 112458 - DNA, 25 bp, Probe sequence
gctataatgagaggtaattgtttat

SEQ ID NO: 112459 - DNA, 25 bp, Probe sequence
gagaggtaattgtttatggaggtgc

SEQ ID NO: 112460 - DNA, 25 bp, Probe sequence
gaggtaattgtttatggaggtgcta

SEQ ID NO: 112461 - DNA, 25 bp, Probe sequence
gtaaaggtattatcatgctataatg

SEQ ID NO: 112462 - DNA, 25 bp, Probe sequence
ggtaattgtttatggaggtgctaac

SEQ ID NO: 112463 - DNA, 25 bp, Probe sequence
tgagaggtaattgtttatggaggtg

SEQ ID NO: 112464 - DNA, 25 bp, Probe sequence
tgctataatgagaggtaattgttta

SEQ ID NO: 112465 - DNA, 25 bp, Probe sequence
taatgagaggtaattgtttatggag

SEQ ID NO: 112466 - DNA, 25 bp, Probe sequence
atttattgattttcaaggaggaaat

SEQ ID NO: 112467 - DNA, 25 bp, Probe sequence
atatttattgattttcaaggaggaa

SEQ ID NO: 112468 - DNA, 25 bp, Probe sequence
atgacaagcgatataatcgtatgta

SEQ ID NO: 112469 - DNA, 25 bp, Probe sequence
agcgatataatcgtatgtataatga

SEQ ID NO: 112470 - DNA, 25 bp, Probe sequence
acatgacaagcgatataatcgtatg

SEQ ID NO: 112471 - DNA, 25 bp, Probe sequence
acaagcgatataatcgtatgtataa

SEQ ID NO: 112472 - DNA, 25 bp, Probe sequence
aaatatttattgattttcaaggagg

SEQ ID NO: 112473 - DNA, 25 bp, Probe sequence
aatatttattgattttcaaggagga

SEQ ID NO: 112474 - DNA, 25 bp, Probe sequence
catgacaagcgatataatcgtatgt

SEQ ID NO: 112475 - DNA, 25 bp, Probe sequence
gcgatataatcgtatgtataatgaa

SEQ ID NO: 112476 - DNA, 25 bp, Probe sequence
gacaagcgatataatcgtatgtata

SEQ ID NO: 112477 - DNA, 25 bp, Probe sequence
tgacaagcgatataatcgtatgtat

SEQ ID NO: 112478 - DNA, 25 bp, Probe sequence
taatcgtatgtataatgaaagaaac

SEQ ID NO: 112479 - DNA, 25 bp, Probe sequence
tacatgacaagcgatataatcgtat

SEQ ID NO: 112480 - DNA, 25 bp, Probe sequence
tattgattttcaaggaggaaatgga

SEQ ID NO: 112481 - DNA, 25 bp, Probe sequence
atttgcggtgtggcggtggtatggt

SEQ ID NO: 112482 - DNA, 25 bp, Probe sequence
gccgttggttgtgatttgttacttc

SEQ ID NO: 112483 - DNA, 25 bp, Probe sequence
gagggatgggtaatctttaggaagc

SEQ ID NO: 112484 - DNA, 25 bp, Probe sequence
gttacagtgtaatcattgtggcttt

SEQ ID NO: 112485 - DNA, 25 bp, Probe sequence
gtactactttatttgcggtgtggcg

SEQ ID NO: 112486 - DNA, 25 bp, Probe sequence
gtatggtttacctagttttactgag

SEQ ID NO: 112487 - DNA, 25 bp, Probe sequence
gtgtaatcattgtggctttttttat

SEQ ID NO: 112488 - DNA, 25 bp, Probe sequence
gtggcggtggtatggtttacctagt

SEQ ID NO: 112489 - DNA, 25 bp, Probe sequence
gtggctttttttatggtgtggtgtg

SEQ ID NO: 112490 - DNA, 25 bp, Probe sequence
gggtaatctttaggaagcaagccgt

SEQ ID NO: 112491 - DNA, 25 bp, Probe sequence
ggtgtggtgtgatgtactactttat

SEQ ID NO: 112492 - DNA, 25 bp, Probe sequence
ggttgtgatttgttacttctaatag

SEQ ID NO: 112493 - DNA, 25 bp, Probe sequence
ggaagcaagccgttggttgtgattt

SEQ ID NO: 112494 - DNA, 25 bp, Probe sequence
tgtcttctattaaacatttttgaat

SEQ ID NO: 112495 - DNA, 25 bp, Probe sequence
ttacctagttttactgagggatggg

SEQ ID NO: 112496 - DNA, 25 bp, Probe sequence
atgtataattaattcttgtcggtaa

SEQ ID NO: 112497 - DNA, 25 bp, Probe sequence
aaatcagcctgtatagcggtgtttt

SEQ ID NO: 112498 - DNA, 25 bp, Probe sequence
aaagcttattaaatcagcctgtata

SEQ ID NO: 112499 - DNA, 25 bp, Probe sequence
aagcctgtatagtatttatttgttg

SEQ ID NO: 112500 - DNA, 25 bp, Probe sequence
gagaaaaatctgtttcttgttctaa

SEQ ID NO: 112501 - DNA, 25 bp, Probe sequence
gttaagcagtttgaaagcctgtata

SEQ ID NO: 112502 - DNA, 25 bp, Probe sequence
gtagttgtacttctttggtctaaag

SEQ ID NO: 112503 - DNA, 25 bp, Probe sequence
gtgtaatttttactgttgttaagca

SEQ ID NO: 112504 - DNA, 25 bp, Probe sequence
gggcgttcagtacagatgacaaagg

SEQ ID NO: 112505 - DNA, 25 bp, Probe sequence
ggcaaacaaaacaactcaacttaag

SEQ ID NO: 112506 - DNA, 25 bp, Probe sequence
tttaggataagggcgttcagtacag

SEQ ID NO: 112507 - DNA, 25 bp, Probe sequence
tagcggtgttttgagagattattta

SEQ ID NO: 112508 - DNA, 25 bp, Probe sequence
tagatgctggcttagtagttgtact

SEQ ID NO: 112509 - DNA, 25 bp, Probe sequence
ttctgttttgcggtttttttgattg

SEQ ID NO: 112510 - DNA, 25 bp, Probe sequence
ttgcggtttttttgattgatatggt

SEQ ID NO: 112511 - DNA, 25 bp, Probe sequence
attcagttttgaatgtttgttcatt

SEQ ID NO: 112512 - DNA, 25 bp, Probe sequence
atattcggaacatcttctgaagaag

SEQ ID NO: 112513 - DNA, 25 bp, Probe sequence
atatattcggaacatcttctgaaga

SEQ ID NO: 112514 - DNA, 25 bp, Probe sequence
ataacgtgacatattgtattcagtt

SEQ ID NO: 112515 - DNA, 25 bp, Probe sequence
aacgtgacatattgtattcagtttt

SEQ ID NO: 112516 - DNA, 25 bp, Probe sequence
aaggatatattcggaacatcttctg

SEQ ID NO: 112517 - DNA, 25 bp, Probe sequence
gcggaataacgtgacatattgtatt

SEQ ID NO: 112518 - DNA, 25 bp, Probe sequence
gaatgtttgttcattcaaattaatg

SEQ ID NO: 112519 - DNA, 25 bp, Probe sequence
gaagatgcggaataacgtgacatat

SEQ ID NO: 112520 - DNA, 25 bp, Probe sequence
gaagaagatgcggaataacgtgaca

SEQ ID NO: 112521 - DNA, 25 bp, Probe sequence
gatgcggaataacgtgacatattgt

SEQ ID NO: 112522 - DNA, 25 bp, Probe sequence
gatatattcggaacatcttctgaag

SEQ ID NO: 112523 - DNA, 25 bp, Probe sequence
gtgacatattgtattcagttttgaa

SEQ ID NO: 112524 - DNA, 25 bp, Probe sequence
ggatatattcggaacatcttctgaa

SEQ ID NO: 112525 - DNA, 25 bp, Probe sequence
tattcggaacatcttctgaagaaga

SEQ ID NO: 112526 - DNA, 25 bp, Probe sequence
agccgcattgagaccgcaaggtctc

SEQ ID NO: 112527 - DNA, 25 bp, Probe sequence
atgcgatgagccgcattgagaccgc

SEQ ID NO: 112528 - DNA, 25 bp, Probe sequence
atggatgcgatgagccgcattgaga

SEQ ID NO: 112529 - DNA, 25 bp, Probe sequence
aaatggatgcgatgagccgcattga

SEQ ID NO: 112530 - DNA, 25 bp, Probe sequence
ccgcattgagaccgcaaggtctctt

SEQ ID NO: 112531 - DNA, 25 bp, Probe sequence
cgcaaggtctcttttttttatgtct

SEQ ID NO: 112532 - DNA, 25 bp, Probe sequence
gccgcattgagaccgcaaggtctct

SEQ ID NO: 112533 - DNA, 25 bp, Probe sequence
gcgatgagccgcattgagaccgcaa

SEQ ID NO: 112534 - DNA, 25 bp, Probe sequence
gcattgagaccgcaaggtctctttt

SEQ ID NO: 112535 - DNA, 25 bp, Probe sequence
gcaaggtctcttttttttatgtcta

SEQ ID NO: 112536 - DNA, 25 bp, Probe sequence
gaccgcaaggtctcttttttttatg

SEQ ID NO: 112537 - DNA, 25 bp, Probe sequence
gagccgcattgagaccgcaaggtct

SEQ ID NO: 112538 - DNA, 25 bp, Probe sequence
gatgcgatgagccgcattgagaccg

SEQ ID NO: 112539 - DNA, 25 bp, Probe sequence
ggatgcgatgagccgcattgagacc

SEQ ID NO: 112540 - DNA, 25 bp, Probe sequence
tgcgatgagccgcattgagaccgca

SEQ ID NO: 112541 - DNA, 25 bp, Probe sequence
atgagccgcattgagaccgtgaggt

SEQ ID NO: 112542 - DNA, 25 bp, Probe sequence
agaccgtgaggtctctttttttatg

SEQ ID NO: 112543 - DNA, 25 bp, Probe sequence
aaatggatgcgatgagccgcattga

SEQ ID NO: 112544 - DNA, 25 bp, Probe sequence
cgtgaggtctctttttttatgtcta

SEQ ID NO: 112545 - DNA, 25 bp, Probe sequence
ccgtgaggtctctttttttatgtct

SEQ ID NO: 112546 - DNA, 25 bp, Probe sequence
gccgcattgagaccgtgaggtctct

SEQ ID NO: 112547 - DNA, 25 bp, Probe sequence
gcattgagaccgtgaggtctctttt

SEQ ID NO: 112548 - DNA, 25 bp, Probe sequence
gaccgtgaggtctctttttttatgt

SEQ ID NO: 112549 - DNA, 25 bp, Probe sequence
gagccgcattgagaccgtgaggtct

SEQ ID NO: 112550 - DNA, 25 bp, Probe sequence
gatgcgatgagccgcattgagaccg

SEQ ID NO: 112551 - DNA, 25 bp, Probe sequence
ggatgcgatgagccgcattgagacc

SEQ ID NO: 112552 - DNA, 25 bp, Probe sequence
gtgaggtctctttttttatgtctaa

SEQ ID NO: 112553 - DNA, 25 bp, Probe sequence
tgagccgcattgagaccgtgaggtc

SEQ ID NO: 112554 - DNA, 25 bp, Probe sequence
tgaggtctctttttttatgtctaaa

SEQ ID NO: 112555 - DNA, 25 bp, Probe sequence
tgcgatgagccgcattgagaccgtg

SEQ ID NO: 112556 - DNA, 25 bp, Probe sequence
atgagccgcattgagtgtgaaattg

SEQ ID NO: 112557 - DNA, 25 bp, Probe sequence
agagtagaacgttgctagacaagaa

SEQ ID NO: 112558 - DNA, 25 bp, Probe sequence
aatgtgcacttttgattatttaaat

SEQ ID NO: 112559 - DNA, 25 bp, Probe sequence
cactaacttttgtcaaagaagtgtt

SEQ ID NO: 112560 - DNA, 25 bp, Probe sequence
gccgcattgagtgtgaaattgatat

SEQ ID NO: 112561 - DNA, 25 bp, Probe sequence
gcagtaagatagtttttaatcataa

SEQ ID NO: 112562 - DNA, 25 bp, Probe sequence
gaagtgttactatataattaatact

SEQ ID NO: 112563 - DNA, 25 bp, Probe sequence
gaaagtaactaattccaaaacagtg

SEQ ID NO: 112564 - DNA, 25 bp, Probe sequence
gacaagaaatgaatgcgatgagccg

SEQ ID NO: 112565 - DNA, 25 bp, Probe sequence
gattatttaaatctgtgactagaag

SEQ ID NO: 112566 - DNA, 25 bp, Probe sequence
gtgaagacattcagaagtattataa

SEQ ID NO: 112567 - DNA, 25 bp, Probe sequence
taactaattccaaaacagtgtaaat

SEQ ID NO: 112568 - DNA, 25 bp, Probe sequence
tattttaataatgtgcacttttgat

SEQ ID NO: 112569 - DNA, 25 bp, Probe sequence
ttttaatcataaatcatcttactgc

SEQ ID NO: 112570 - DNA, 25 bp, Probe sequence
ttatgtctaatatcttttaaatcga

SEQ ID NO: 112571 - DNA, 25 bp, Probe sequence
attttgggttgcttgactgcgacta

SEQ ID NO: 112572 - DNA, 25 bp, Probe sequence
aattttgggttgcttgactgcgact

SEQ ID NO: 112573 - DNA, 25 bp, Probe sequence
aacaattttgggttgcttgactgcg

SEQ ID NO: 112574 - DNA, 25 bp, Probe sequence
ctgcgactagttcagatgccaatag

SEQ ID NO: 112575 - DNA, 25 bp, Probe sequence
gcgactagttcagatgccaatagat

SEQ ID NO: 112576 - DNA, 25 bp, Probe sequence
gcttgactgcgactagttcagatgc

SEQ ID NO: 112577 - DNA, 25 bp, Probe sequence
gactgcgactagttcagatgccaat

SEQ ID NO: 112578 - DNA, 25 bp, Probe sequence
gactagttcagatgccaatagattt

SEQ ID NO: 112579 - DNA, 25 bp, Probe sequence
gatgccaatagatttgatttttgtg

SEQ ID NO: 112580 - DNA, 25 bp, Probe sequence
gttgcttgactgcgactagttcaga

SEQ ID NO: 112581 - DNA, 25 bp, Probe sequence
gttattaacaattttgggttgcttg

SEQ ID NO: 112582 - DNA, 25 bp, Probe sequence
ggttgcttgactgcgactagttcag

SEQ ID NO: 112583 - DNA, 25 bp, Probe sequence
tacaatcatcaattagagatactta

SEQ ID NO: 112584 - DNA, 25 bp, Probe sequence
tttgggttgcttgactgcgactagt

SEQ ID NO: 112585 - DNA, 25 bp, Probe sequence
ttgactgcgactagttcagatgcca

SEQ ID NO: 112586 - DNA, 25 bp, Probe sequence
atgcatgtttcaggctttaattgtg

SEQ ID NO: 112587 - DNA, 25 bp, Probe sequence
atgttattattaagtgtgcacgcag

SEQ ID NO: 112588 - DNA, 25 bp, Probe sequence
aaagagatttcaattactcaataga

SEQ ID NO: 112589 - DNA, 25 bp, Probe sequence
aatgtagctgttaaaagtcaaaaat

SEQ ID NO: 112590 - DNA, 25 bp, Probe sequence
gaatatggtttggataagtctgaga

SEQ ID NO: 112591 - DNA, 25 bp, Probe sequence
gaaaaaggttgtcttcataggagtt

SEQ ID NO: 112592 - DNA, 25 bp, Probe sequence
gagacaatgcatgtttcaggcttta

SEQ ID NO: 112593 - DNA, 25 bp, Probe sequence
gagatggcggtactaaatgttatta

SEQ ID NO: 112594 - DNA, 25 bp, Probe sequence
gtgattgcataagagatggcggtac

SEQ ID NO: 112595 - DNA, 25 bp, Probe sequence
gtgtataaagttttggtgattgcat

SEQ ID NO: 112596 - DNA, 25 bp, Probe sequence
gtgtgcacgcagtatcattagttat

SEQ ID NO: 112597 - DNA, 25 bp, Probe sequence
tgtttcaggctttaattgtgtataa

SEQ ID NO: 112598 - DNA, 25 bp, Probe sequence
tcaagcacactcaaatagtgttata

SEQ ID NO: 112599 - DNA, 25 bp, Probe sequence
taagtctgagacaatgcatgtttca

SEQ ID NO: 112600 - DNA, 25 bp, Probe sequence
tacatcgaatgtagttaggcatata

SEQ ID NO: 112601 - DNA, 25 bp, Probe sequence
atgttcgcgtccgttgaaatgcata

SEQ ID NO: 112602 - DNA, 25 bp, Probe sequence
acgagataaatgttcgcgtccgttg

SEQ ID NO: 112603 - DNA, 25 bp, Probe sequence
aatgttcgcgtccgttgaaatgcat

SEQ ID NO: 112604 - DNA, 25 bp, Probe sequence
gcgtccgttgaaatgcatagaaatc

SEQ ID NO: 112605 - DNA, 25 bp, Probe sequence
gaagtgagacattacgaggaggaac

SEQ ID NO: 112606 - DNA, 25 bp, Probe sequence
taaatgttcgcgtccgttgaaatgc

SEQ ID NO: 112607 - DNA, 25 bp, Probe sequence
gaaatgcatagaaatcttagatatt

SEQ ID NO: 112608 - DNA, 25 bp, Probe sequence
tgagacattacgaggaggaacagtt

SEQ ID NO: 112609 - DNA, 25 bp, Probe sequence
gagatgacgagataaatgttcgcgt

SEQ ID NO: 112610 - DNA, 25 bp, Probe sequence
gagataaatgttcgcgtccgttgaa

SEQ ID NO: 112611 - DNA, 25 bp, Probe sequence
gataaatgttcgcgtccgttgaaat

SEQ ID NO: 112612 - DNA, 25 bp, Probe sequence
gatattatttgaagtgagacattac

SEQ ID NO: 112613 - DNA, 25 bp, Probe sequence
gttcgcgtccgttgaaatgcataga

SEQ ID NO: 112614 - DNA, 25 bp, Probe sequence
gtccgttgaaatgcatagaaatctt

SEQ ID NO: 112615 - DNA, 25 bp, Probe sequence
tcgcgtccgttgaaatgcatagaaa

SEQ ID NO: 112616 - DNA, 25 bp, Probe sequence
attcgtttaatatgctatggttctt

SEQ ID NO: 112617 - DNA, 25 bp, Probe sequence
atatgctatggttctttctcacttt

SEQ ID NO: 112618 - DNA, 25 bp, Probe sequence
acgatgctatattcgtttaatatgc

SEQ ID NO: 112619 - DNA, 25 bp, Probe sequence
acatgtgcaatacgtacgatagaga

SEQ ID NO: 112620 - DNA, 25 bp, Probe sequence
aaaagtgagaaagatcaccgccata

SEQ ID NO: 112621 - DNA, 25 bp, Probe sequence
aatatcgtacatgtgcaatacgtac

SEQ ID NO: 112622 - DNA, 25 bp, Probe sequence
ccgccataaatgtaaacgatgctat

SEQ ID NO: 112623 - DNA, 25 bp, Probe sequence
gaaagatcaccgccataaatgtaaa

SEQ ID NO: 112624 - DNA, 25 bp, Probe sequence
gaaattaagaattgtaggaaggcgt

SEQ ID NO: 112625 - DNA, 25 bp, Probe sequence
gagaaagatcaccgccataaatgta

SEQ ID NO: 112626 - DNA, 25 bp, Probe sequence
gagatggttagagctttgaaattaa

SEQ ID NO: 112627 - DNA, 25 bp, Probe sequence
gatcaccgccataaatgtaaacgat

SEQ ID NO: 112628 - DNA, 25 bp, Probe sequence
gtacgatagagatggttagagcttt

SEQ ID NO: 112629 - DNA, 25 bp, Probe sequence
taatatgctatggttctttctcact

SEQ ID NO: 112630 - DNA, 25 bp, Probe sequence
tatgctatggttctttctcactttt

SEQ ID NO: 112631 - DNA, 25 bp, Probe sequence
atgattgacaaagcaaagcactatt

SEQ ID NO: 112632 - DNA, 25 bp, Probe sequence
atgtaacttgtagcgaggtggagca

SEQ ID NO: 112633 - DNA, 25 bp, Probe sequence
agcaaagcactattgttaaaattta

SEQ ID NO: 112634 - DNA, 25 bp, Probe sequence
aacgctgcaaatatggtattatgta

SEQ ID NO: 112635 - DNA, 25 bp, Probe sequence
aattttgtttgacgaaaacgctgca

SEQ ID NO: 112636 - DNA, 25 bp, Probe sequence
gaaaacgctgcaaatatggtattat

SEQ ID NO: 112637 - DNA, 25 bp, Probe sequence
gacaaagcaaagcactattgttaaa

SEQ ID NO: 112638 - DNA, 25 bp, Probe sequence
gacgaaaacgctgcaaatatggtat

SEQ ID NO: 112639 - DNA, 25 bp, Probe sequence
gtattatgtaacttgtagcgaggtg

SEQ ID NO: 112640 - DNA, 25 bp, Probe sequence
gtaacttgtagcgaggtggagcaat

SEQ ID NO: 112641 - DNA, 25 bp, Probe sequence
ggtattatgtaacttgtagcgaggt

SEQ ID NO: 112642 - DNA, 25 bp, Probe sequence
tatggtattatgtaacttgtagcga

SEQ ID NO: 112643 - DNA, 25 bp, Probe sequence
ttttgtttgacgaaaacgctgcaaa

SEQ ID NO: 112644 - DNA, 25 bp, Probe sequence
ttatgtaacttgtagcgaggtggag

SEQ ID NO: 112645 - DNA, 25 bp, Probe sequence
ttgtttgacgaaaacgctgcaaata

SEQ ID NO: 112646 - DNA, 25 bp, Probe sequence
attctctttatgttaaaatcatcat

SEQ ID NO: 112647 - DNA, 25 bp, Probe sequence
atagagatgttaggcgtttcttagt

SEQ ID NO: 112648 - DNA, 25 bp, Probe sequence
aaatgtcaaatattaattctcttta

SEQ ID NO: 112649 - DNA, 25 bp, Probe sequence
aacactgatgtttcgcttatagatt

SEQ ID NO: 112650 - DNA, 25 bp, Probe sequence
aatgtttaacactgatgtttcgctt

SEQ ID NO: 112651 - DNA, 25 bp, Probe sequence
gcattatgttcaatactctttttat

SEQ ID NO: 112652 - DNA, 25 bp, Probe sequence
gagtgttgggcattatgttcaatac

SEQ ID NO: 112653 - DNA, 25 bp, Probe sequence
gatgttaggcgtttcttagtataag

SEQ ID NO: 112654 - DNA, 25 bp, Probe sequence
gatgtttcgcttatagatttttcag

SEQ ID NO: 112655 - DNA, 25 bp, Probe sequence
gataattatttgagtgttgggcatt

SEQ ID NO: 112656 - DNA, 25 bp, Probe sequence
gttgggcattatgttcaatactctt

SEQ ID NO: 112657 - DNA, 25 bp, Probe sequence
gtttcgcttatagatttttcagtaa

SEQ ID NO: 112658 - DNA, 25 bp, Probe sequence
gtcaaatattaattctctttatgtt

SEQ ID NO: 112659 - DNA, 25 bp, Probe sequence
gggcattatgttcaatactcttttt

SEQ ID NO: 112660 - DNA, 25 bp, Probe sequence
tgttcaatactctttttatttacaa

SEQ ID NO: 112661 - DNA, 25 bp, Probe sequence
attattgattcattgctgataaaaa

SEQ ID NO: 112662 - DNA, 25 bp, Probe sequence
atatacgttaacagattatgatgat

SEQ ID NO: 112663 - DNA, 25 bp, Probe sequence
ataagttgatttgatactgtcgata

SEQ ID NO: 112664 - DNA, 25 bp, Probe sequence
aagcataaagctttgtcggcagttt

SEQ ID NO: 112665 - DNA, 25 bp, Probe sequence
aattttatatttagcgatgtaatac

SEQ ID NO: 112666 - DNA, 25 bp, Probe sequence
cataaagctttgtcggcagtttttt

SEQ ID NO: 112667 - DNA, 25 bp, Probe sequence
gcataaagctttgtcggcagttttt

SEQ ID NO: 112668 - DNA, 25 bp, Probe sequence
gcaataagttgatttgatactgtcg

SEQ ID NO: 112669 - DNA, 25 bp, Probe sequence
gaaaattattgattcattgctgata

SEQ ID NO: 112670 - DNA, 25 bp, Probe sequence
gaaaggctaataaatatatacgtta

SEQ ID NO: 112671 - DNA, 25 bp, Probe sequence
gatgtaatacatttgcaataagttg

SEQ ID NO: 112672 - DNA, 25 bp, Probe sequence
gatactgtcgataaagcataaagct

SEQ ID NO: 112673 - DNA, 25 bp, Probe sequence
gatttgatactgtcgataaagcata

SEQ ID NO: 112674 - DNA, 25 bp, Probe sequence
gttgatttgatactgtcgataaagc

SEQ ID NO: 112675 - DNA, 25 bp, Probe sequence
tgtcggcagtttttttagtttgtat

SEQ ID NO: 112676 - DNA, 25 bp, Probe sequence
atatataatagtaattgcgtaagta

SEQ ID NO: 112677 - DNA, 25 bp, Probe sequence
atctttatgatttaatgattcgcat

SEQ ID NO: 112678 - DNA, 25 bp, Probe sequence
atgattcgcatagtaatggagttac

SEQ ID NO: 112679 - DNA, 25 bp, Probe sequence
atgatttaatgattcgcatagtaat

SEQ ID NO: 112680 - DNA, 25 bp, Probe sequence
atggagttacattttatatataata

SEQ ID NO: 112681 - DNA, 25 bp, Probe sequence
aaaggataatcctatgtaatattaa

SEQ ID NO: 112682 - DNA, 25 bp, Probe sequence
aaaatggctaggataaaaggataat

SEQ ID NO: 112683 - DNA, 25 bp, Probe sequence
aatcctatgtaatattaatgtaatc

SEQ ID NO: 112684 - DNA, 25 bp, Probe sequence
gatttaatgattcgcatagtaatgg

SEQ ID NO: 112685 - DNA, 25 bp, Probe sequence
gattcgcatagtaatggagttacat

SEQ ID NO: 112686 - DNA, 25 bp, Probe sequence
gtaatattaatgtaatctttatgat

SEQ ID NO: 112687 - DNA, 25 bp, Probe sequence
taatgattcgcatagtaatggagtt

SEQ ID NO: 112688 - DNA, 25 bp, Probe sequence
tttacgtatttaaaatggctaggat

SEQ ID NO: 112689 - DNA, 25 bp, Probe sequence
ttcgcatagtaatggagttacattt

SEQ ID NO: 112690 - DNA, 25 bp, Probe sequence
ttgcgtaagtaaataattggaggac

SEQ ID NO: 112691 - DNA, 25 bp, Probe sequence
aggcgtttgacgaacatattccaaa

SEQ ID NO: 112692 - DNA, 25 bp, Probe sequence
agtgaggtgctcgttttgagcaaaa

SEQ ID NO: 112693 - DNA, 25 bp, Probe sequence
aaaggcgtttgacgaacatattcca

SEQ ID NO: 112694 - DNA, 25 bp, Probe sequence
aacacttgcaagcaacgatgatgtt

SEQ ID NO: 112695 - DNA, 25 bp, Probe sequence
aacgatgatgttgatgggtaagtga

SEQ ID NO: 112696 - DNA, 25 bp, Probe sequence
cgtgtataatagtttcgttcgtgat

SEQ ID NO: 112697 - DNA, 25 bp, Probe sequence
cgaacatattccaaacgtgtataat

SEQ ID NO: 112698 - DNA, 25 bp, Probe sequence
gatgggtaagtgaggtgctcgtttt

SEQ ID NO: 112699 - DNA, 25 bp, Probe sequence
gaggtgctcgttttgagcaaaaatg

SEQ ID NO: 112700 - DNA, 25 bp, Probe sequence
gttgatgggtaagtgaggtgctcgt

SEQ ID NO: 112701 - DNA, 25 bp, Probe sequence
gtttcgttcgtgattatacgaataa

SEQ ID NO: 112702 - DNA, 25 bp, Probe sequence
ggtaagtgaggtgctcgttttgagc

SEQ ID NO: 112703 - DNA, 25 bp, Probe sequence
taatagtttcgttcgtgattatacg

SEQ ID NO: 112704 - DNA, 25 bp, Probe sequence
tacgaataaataaacacttgcaagc

SEQ ID NO: 112705 - DNA, 25 bp, Probe sequence
ttgacgaacatattccaaacgtgta

SEQ ID NO: 112706 - DNA, 25 bp, Probe sequence
atggtgctttttgtgttattataaa

SEQ ID NO: 112707 - DNA, 25 bp, Probe sequence
agcatggtgctttttgtgttattat

SEQ ID NO: 112708 - DNA, 25 bp, Probe sequence
actttgtttaacaagcactgtgctt

SEQ ID NO: 112709 - DNA, 25 bp, Probe sequence
acaattatgttggaggtaaacacgc

SEQ ID NO: 112710 - DNA, 25 bp, Probe sequence
aagcactgtgcttattttaatataa

SEQ ID NO: 112711 - DNA, 25 bp, Probe sequence
aatgataattgatggcaatggcgga

SEQ ID NO: 112712 - DNA, 25 bp, Probe sequence
cataaaaattttaatgtactcgatt

SEQ ID NO: 112713 - DNA, 25 bp, Probe sequence
catacttactaagctaaagaataat

SEQ ID NO: 112714 - DNA, 25 bp, Probe sequence
gcatggtgctttttgtgttattata

SEQ ID NO: 112715 - DNA, 25 bp, Probe sequence
gatggcaatggcggaaaatagatgt

SEQ ID NO: 112716 - DNA, 25 bp, Probe sequence
gtactcgattttaaaatacatactt

SEQ ID NO: 112717 - DNA, 25 bp, Probe sequence
tggcggaaaatagatgttgtcatta

SEQ ID NO: 112718 - DNA, 25 bp, Probe sequence
taatctgttacattaaagtttttat

SEQ ID NO: 112719 - DNA, 25 bp, Probe sequence
tttaaaatacatacttactaagcta

SEQ ID NO: 112720 - DNA, 25 bp, Probe sequence
ttaaactcaacaatgatacatcata

SEQ ID NO: 112721 - DNA, 25 bp, Probe sequence
atttgtaatgatataactaagactt

SEQ ID NO: 112722 - DNA, 25 bp, Probe sequence
ataaggagcagtctcttttatttgt

SEQ ID NO: 112723 - DNA, 25 bp, Probe sequence
agactgtttcgataaggaatatatt

SEQ ID NO: 112724 - DNA, 25 bp, Probe sequence
agaatgatgcgtatcgaataatcga

SEQ ID NO: 112725 - DNA, 25 bp, Probe sequence
aaaattgtaaaagtgaggtgatgtt

SEQ ID NO: 112726 - DNA, 25 bp, Probe sequence
aagactgtttcttaaataaggagca

SEQ ID NO: 112727 - DNA, 25 bp, Probe sequence
gcagtctcttttatttgtaatgata

SEQ ID NO: 112728 - DNA, 25 bp, Probe sequence
gcagcgttagacaatctaagactgt

SEQ ID NO: 112729 - DNA, 25 bp, Probe sequence
gaatatatttagaatgatgcgtatc

SEQ ID NO: 112730 - DNA, 25 bp, Probe sequence
gaataatcgattgcagcgttagaca

SEQ ID NO: 112731 - DNA, 25 bp, Probe sequence
gttagacaatctaagactgtttctt

SEQ ID NO: 112732 - DNA, 25 bp, Probe sequence
ggagcagtctcttttatttgtaatg

SEQ ID NO: 112733 - DNA, 25 bp, Probe sequence
taagacttataccatttttgaaaat

SEQ ID NO: 112734 - DNA, 25 bp, Probe sequence
taactaagacttataccatttttga

SEQ ID NO: 112735 - DNA, 25 bp, Probe sequence
taaataaagactgtttcgataagga

SEQ ID NO: 112736 - DNA, 25 bp, Probe sequence
agacatatgtcttgaaaagttgaaa

SEQ ID NO: 112737 - DNA, 25 bp, Probe sequence
actagcttataaaacatgtcatatg

SEQ ID NO: 112738 - DNA, 25 bp, Probe sequence
acatgtcatatgttacaatttttgt

SEQ ID NO: 112739 - DNA, 25 bp, Probe sequence
aatacgggtgtgaatgacattgatg

SEQ ID NO: 112740 - DNA, 25 bp, Probe sequence
gcgtttgagaaataatagtgtagac

SEQ ID NO: 112741 - DNA, 25 bp, Probe sequence
gctcaattactagcttataaaacat

SEQ ID NO: 112742 - DNA, 25 bp, Probe sequence
gagattgataaaactaatacgggtg

SEQ ID NO: 112743 - DNA, 25 bp, Probe sequence
gttattattactatgcgtttgagaa

SEQ ID NO: 112744 - DNA, 25 bp, Probe sequence
gtatttcatatatatttaattttag

SEQ ID NO: 112745 - DNA, 25 bp, Probe sequence
gtgaatgacattgatgttaagctca

SEQ ID NO: 112746 - DNA, 25 bp, Probe sequence
tgttagttttattatgggaagtagg

SEQ ID NO: 112747 - DNA, 25 bp, Probe sequence
tacaatttttgttagttttattatg

SEQ ID NO: 112748 - DNA, 25 bp, Probe sequence
tatgggaagtaggaggaaatgacgc

SEQ ID NO: 112749 - DNA, 25 bp, Probe sequence
ttcagttattattactatgcgtttg

SEQ ID NO: 112750 - DNA, 25 bp, Probe sequence
ttgatgttaagctcaattactagct

SEQ ID NO: 112751 - DNA, 25 bp, Probe sequence
attcagtacctctttctatgataaa

SEQ ID NO: 112752 - DNA, 25 bp, Probe sequence
attatttagaatgatgggtgtagaa

SEQ ID NO: 112753 - DNA, 25 bp, Probe sequence
atattcagtacctctttctatgata

SEQ ID NO: 112754 - DNA, 25 bp, Probe sequence
ataagtacaattgttgcattttatg

SEQ ID NO: 112755 - DNA, 25 bp, Probe sequence
aacaagttacttcattatttagaat

SEQ ID NO: 112756 - DNA, 25 bp, Probe sequence
aagtcattgaattgttatagcagaa

SEQ ID NO: 112757 - DNA, 25 bp, Probe sequence
aatacgtattagattttaagtcatt

SEQ ID NO: 112758 - DNA, 25 bp, Probe sequence
gaataagtacaattgttgcatttta

SEQ ID NO: 112759 - DNA, 25 bp, Probe sequence
gtacctctttctatgataaagttat

SEQ ID NO: 112760 - DNA, 25 bp, Probe sequence
tcagtacctctttctatgataaagt

SEQ ID NO: 112761 - DNA, 25 bp, Probe sequence
tacgtattagattttaagtcattga

SEQ ID NO: 112762 - DNA, 25 bp, Probe sequence
tatagaaagaggtacttttatcgtt

SEQ ID NO: 112763 - DNA, 25 bp, Probe sequence
tatattcagtacctctttctatgat

SEQ ID NO: 112764 - DNA, 25 bp, Probe sequence
tattcagtacctctttctatgataa

SEQ ID NO: 112765 - DNA, 25 bp, Probe sequence
ttatattcagtacctctttctatga

SEQ ID NO: 112766 - DNA, 25 bp, Probe sequence
atcaatacgctaaaatgtttatttt

SEQ ID NO: 112767 - DNA, 25 bp, Probe sequence
atccttagtgattttgtttgctttc

SEQ ID NO: 112768 - DNA, 25 bp, Probe sequence
aaatagttgtataatccttagtgat

SEQ ID NO: 112769 - DNA, 25 bp, Probe sequence
aaaataattctatatccgataaata

SEQ ID NO: 112770 - DNA, 25 bp, Probe sequence
cttagtgattttgtttgctttctag

SEQ ID NO: 112771 - DNA, 25 bp, Probe sequence
gaactaaatagttgtataatcctta

SEQ ID NO: 112772 - DNA, 25 bp, Probe sequence
gattttgtttgctttctagaattta

SEQ ID NO: 112773 - DNA, 25 bp, Probe sequence
gtttgctttctagaatttatttgat

SEQ ID NO: 112774 - DNA, 25 bp, Probe sequence
gtgattttgtttgctttctagaatt

SEQ ID NO: 112775 - DNA, 25 bp, Probe sequence
tgctttctagaatttatttgataaa

SEQ ID NO: 112776 - DNA, 25 bp, Probe sequence
tccttagtgattttgtttgctttct

SEQ ID NO: 112777 - DNA, 25 bp, Probe sequence
taaactaagatttcaacaactaact

SEQ ID NO: 112778 - DNA, 25 bp, Probe sequence
tagcggtttagtgaaatgtagaact

SEQ ID NO: 112779 - DNA, 25 bp, Probe sequence
tagtgattttgtttgctttctagaa

SEQ ID NO: 112780 - DNA, 25 bp, Probe sequence
tttttagcggtttagtgaaatgtag

SEQ ID NO: 112781 - DNA, 25 bp, Probe sequence
ataaacgtacatattaataactagt

SEQ ID NO: 112782 - DNA, 25 bp, Probe sequence
ataacttgctctttttttctaccat

SEQ ID NO: 112783 - DNA, 25 bp, Probe sequence
atctttttgagataacttgctcttt

SEQ ID NO: 112784 - DNA, 25 bp, Probe sequence
atcgcaggagtaaattttattagag

SEQ ID NO: 112785 - DNA, 25 bp, Probe sequence
aaagagtgagttatctttttgagat

SEQ ID NO: 112786 - DNA, 25 bp, Probe sequence
aaaacatccagtgaatgataagata

SEQ ID NO: 112787 - DNA, 25 bp, Probe sequence
gctctttttttctaccatgtataat

SEQ ID NO: 112788 - DNA, 25 bp, Probe sequence
gagataacttgctctttttttctac

SEQ ID NO: 112789 - DNA, 25 bp, Probe sequence
gataacttgctctttttttctacca

SEQ ID NO: 112790 - DNA, 25 bp, Probe sequence
tgagcgttaaattaaacatttttct

SEQ ID NO: 112791 - DNA, 25 bp, Probe sequence
tgctctttttttctaccatgtataa

SEQ ID NO: 112792 - DNA, 25 bp, Probe sequence
tctttttttctaccatgtataattt

SEQ ID NO: 112793 - DNA, 25 bp, Probe sequence
taataactagtaaatcgcaggagta

SEQ ID NO: 112794 - DNA, 25 bp, Probe sequence
ttttctgataaaaacatccagtgaa

SEQ ID NO: 112795 - DNA, 25 bp, Probe sequence
ttgctctttttttctaccatgtata

SEQ ID NO: 112796 - DNA, 25 bp, Probe sequence
attgttgagaacattcatatttatt

SEQ ID NO: 112797 - DNA, 25 bp, Probe sequence
atgtttccgcattttgattatctct

SEQ ID NO: 112798 - DNA, 25 bp, Probe sequence
aaatgcatttgattacgaattagta

SEQ ID NO: 112799 - DNA, 25 bp, Probe sequence
gagatgtttccgcattttgattatc

SEQ ID NO: 112800 - DNA, 25 bp, Probe sequence
gatgtttccgcattttgattatctc

SEQ ID NO: 112801 - DNA, 25 bp, Probe sequence
gatgattgattattggagatgtttc

SEQ ID NO: 112802 - DNA, 25 bp, Probe sequence
gattattggagatgtttccgcattt

SEQ ID NO: 112803 - DNA, 25 bp, Probe sequence
gtttccgcattttgattatctctaa

SEQ ID NO: 112804 - DNA, 25 bp, Probe sequence
tgagaacattcatatttattgggaa

SEQ ID NO: 112805 - DNA, 25 bp, Probe sequence
tacgaattagtatatgatgatttag

SEQ ID NO: 112806 - DNA, 25 bp, Probe sequence
tatctctaaatgcatttgattacga

SEQ ID NO: 112807 - DNA, 25 bp, Probe sequence
tattggagatgtttccgcattttga

SEQ ID NO: 112808 - DNA, 25 bp, Probe sequence
tttgattatctctaaatgcatttga

SEQ ID NO: 112809 - DNA, 25 bp, Probe sequence
ttccgcattttgattatctctaaat

SEQ ID NO: 112810 - DNA, 25 bp, Probe sequence
ttggagatgtttccgcattttgatt

SEQ ID NO: 112811 - DNA, 25 bp, Probe sequence
attgctttattacatttacaagctc

SEQ ID NO: 112812 - DNA, 25 bp, Probe sequence
atgccacatcataactttaaggtgt

SEQ ID NO: 112813 - DNA, 25 bp, Probe sequence
acatgccacatcataactttaaggt

SEQ ID NO: 112814 - DNA, 25 bp, Probe sequence
aaacatgccacatcataactttaag

SEQ ID NO: 112815 - DNA, 25 bp, Probe sequence
aaaacatgccacatcataactttaa

SEQ ID NO: 112816 - DNA, 25 bp, Probe sequence
aagaaaacatgccacatcataactt

SEQ ID NO: 112817 - DNA, 25 bp, Probe sequence
ctttattacatttacaagctcttgt

SEQ ID NO: 112818 - DNA, 25 bp, Probe sequence
gccacatcataactttaaggtgtaa

SEQ ID NO: 112819 - DNA, 25 bp, Probe sequence
gaatataagaaaacatgccacatca

SEQ ID NO: 112820 - DNA, 25 bp, Probe sequence
gaaaacatgccacatcataacttta

SEQ ID NO: 112821 - DNA, 25 bp, Probe sequence
gaaaacagaaattgctttattacat

SEQ ID NO: 112822 - DNA, 25 bp, Probe sequence
gaaattgctttattacatttacaag

SEQ ID NO: 112823 - DNA, 25 bp, Probe sequence
gggttgtattaatgataatcgtatt

SEQ ID NO: 112824 - DNA, 25 bp, Probe sequence
ttacttagggttgtattaatgataa

SEQ ID NO: 112825 - DNA, 25 bp, Probe sequence
tttattacatttacaagctcttgta

SEQ ID NO: 112826 - DNA, 25 bp, Probe sequence
atagtggtactatttttgactgtta

SEQ ID NO: 112827 - DNA, 25 bp, Probe sequence
agtataatttatcttaatcagctat

SEQ ID NO: 112828 - DNA, 25 bp, Probe sequence
agacgaaacacactaaaagctgatg

SEQ ID NO: 112829 - DNA, 25 bp, Probe sequence
acgtatatagagtagttcggatgag

SEQ ID NO: 112830 - DNA, 25 bp, Probe sequence
acatgtgtatgcgagggttttctta

SEQ ID NO: 112831 - DNA, 25 bp, Probe sequence
acaaggtagttggctgatagatgaa

SEQ ID NO: 112832 - DNA, 25 bp, Probe sequence
aagtgttgactttatcaattgaatg

SEQ ID NO: 112833 - DNA, 25 bp, Probe sequence
gcaccttattaattaagcgtgtatc

SEQ ID NO: 112834 - DNA, 25 bp, Probe sequence
gaatgtgtatggttttgtacatatg

SEQ ID NO: 112835 - DNA, 25 bp, Probe sequence
gagctctcgtgtatacaacatgtgt

SEQ ID NO: 112836 - DNA, 25 bp, Probe sequence
gagagcacgagaaatgtcagttttg

SEQ ID NO: 112837 - DNA, 25 bp, Probe sequence
gttgattgttagtaagagctctcgt

SEQ ID NO: 112838 - DNA, 25 bp, Probe sequence
gtaaaattaactattgcaccttatt

SEQ ID NO: 112839 - DNA, 25 bp, Probe sequence
tgcgagggttttcttaattatggta

SEQ ID NO: 112840 - DNA, 25 bp, Probe sequence
tagttcgtgtttgaatgtttttgat

SEQ ID NO: 112841 - DNA, 25 bp, Probe sequence
attcggaacatcttcttcagaagat

SEQ ID NO: 112842 - DNA, 25 bp, Probe sequence
atattcggaacatcttcttcagaag

SEQ ID NO: 112843 - DNA, 25 bp, Probe sequence
atatattcggaacatcttcttcaga

SEQ ID NO: 112844 - DNA, 25 bp, Probe sequence
ataacgtgacatattgtattcagtt

SEQ ID NO: 112845 - DNA, 25 bp, Probe sequence
aacgtgacatattgtattcagtttt

SEQ ID NO: 112846 - DNA, 25 bp, Probe sequence
aaggatatattcggaacatcttctt

SEQ ID NO: 112847 - DNA, 25 bp, Probe sequence
cttcttcagaagatgcggaataacg

SEQ ID NO: 112848 - DNA, 25 bp, Probe sequence
gaagatgcggaataacgtgacatat

SEQ ID NO: 112849 - DNA, 25 bp, Probe sequence
gatgcggaataacgtgacatattgt

SEQ ID NO: 112850 - DNA, 25 bp, Probe sequence
gatatattcggaacatcttcttcag

SEQ ID NO: 112851 - DNA, 25 bp, Probe sequence
gtgacatattgtattcagttttgaa

SEQ ID NO: 112852 - DNA, 25 bp, Probe sequence
ggatatattcggaacatcttcttca

SEQ ID NO: 112853 - DNA, 25 bp, Probe sequence
tatattcggaacatcttcttcagaa

SEQ ID NO: 112854 - DNA, 25 bp, Probe sequence
tattcggaacatcttcttcagaaga

SEQ ID NO: 112855 - DNA, 25 bp, Probe sequence
ttcagttttgaatgtttatttaaca

SEQ ID NO: 112856 - DNA, 25 bp, Probe sequence
attaataacgcgtttcctgtaggat

SEQ ID NO: 112857 - DNA, 25 bp, Probe sequence
ataacgcgtttcctgtaggatggaa

SEQ ID NO: 112858 - DNA, 25 bp, Probe sequence
agattttaccaagcaaaaccgagtg

SEQ ID NO: 112859 - DNA, 25 bp, Probe sequence
acgcgtttcctgtaggatggaaaca

SEQ ID NO: 112860 - DNA, 25 bp, Probe sequence
aataacgcgtttcctgtaggatgga

SEQ ID NO: 112861 - DNA, 25 bp, Probe sequence
gaacactcacaagattaataacgcg

SEQ ID NO: 112862 - DNA, 25 bp, Probe sequence
gaaataatcgctagtgttcgaaaga

SEQ ID NO: 112863 - DNA, 25 bp, Probe sequence
gagttttaaataagcttgaattcat

SEQ ID NO: 112864 - DNA, 25 bp, Probe sequence
gttcgaaagaacactcacaagatta

SEQ ID NO: 112865 - DNA, 25 bp, Probe sequence
taacgcgtttcctgtaggatggaaa

SEQ ID NO: 112866 - DNA, 25 bp, Probe sequence
taataacgcgtttcctgtaggatgg

SEQ ID NO: 112867 - DNA, 25 bp, Probe sequence
ttatttgtacattgaaaactagata

SEQ ID NO: 112868 - DNA, 25 bp, Probe sequence
ttaataacgcgtttcctgtaggatg

SEQ ID NO: 112869 - DNA, 25 bp, Probe sequence
ttaccaagcaaaaccgagtgaataa

SEQ ID NO: 112870 - DNA, 25 bp, Probe sequence
ttcataagaaataatcgctagtgtt

SEQ ID NO: 112871 - DNA, 25 bp, Probe sequence
atggtagccaacttacgttccgcta

SEQ ID NO: 112872 - DNA, 25 bp, Probe sequence
agaagcaagcgattgtcacaagtca

SEQ ID NO: 112873 - DNA, 25 bp, Probe sequence
agcgaggatggtagccaacttacgt

SEQ ID NO: 112874 - DNA, 25 bp, Probe sequence
ccaacttacgttccgctagagtaga

SEQ ID NO: 112875 - DNA, 25 bp, Probe sequence
gcaagcgattgtcacaagtcaagaa

SEQ ID NO: 112876 - DNA, 25 bp, Probe sequence
gaaaggttcttagcgaggatggtag

SEQ ID NO: 112877 - DNA, 25 bp, Probe sequence
gagcgcaacgagtttagtagagcta

SEQ ID NO: 112878 - DNA, 25 bp, Probe sequence
gagctaaatgagtaagcgagagccg

SEQ ID NO: 112879 - DNA, 25 bp, Probe sequence
gagtaagcgagagccgaagaagagg

SEQ ID NO: 112880 - DNA, 25 bp, Probe sequence
gaggaaagaagcaagcgattgtcac

SEQ ID NO: 112881 - DNA, 25 bp, Probe sequence
gaggatggtagccaacttacgttcc

SEQ ID NO: 112882 - DNA, 25 bp, Probe sequence
gattgtcacaagtcaagaaaggttc

SEQ ID NO: 112883 - DNA, 25 bp, Probe sequence
ggttcttagcgaggatggtagccaa

SEQ ID NO: 112884 - DNA, 25 bp, Probe sequence
tacgttccgctagagtagaactgga

SEQ ID NO: 112885 - DNA, 25 bp, Probe sequence
tagccaacttacgttccgctagagt

SEQ ID NO: 112886 - DNA, 25 bp, Probe sequence
atcttactgctcttttatatacttt

SEQ ID NO: 112887 - DNA, 25 bp, Probe sequence
atgatcttactgctcttttatatac

SEQ ID NO: 112888 - DNA, 25 bp, Probe sequence
actgctcttttatatactttattga

SEQ ID NO: 112889 - DNA, 25 bp, Probe sequence
aaatgatcttactgctcttttatat

SEQ ID NO: 112890 - DNA, 25 bp, Probe sequence
aatgatcttactgctcttttatata

SEQ ID NO: 112891 - DNA, 25 bp, Probe sequence
aattgaaaatgatcttactgctctt

SEQ ID NO: 112892 - DNA, 25 bp, Probe sequence
cttactgctcttttatatactttat

SEQ ID NO: 112893 - DNA, 25 bp, Probe sequence
gctcttttatatactttattgaaat

SEQ ID NO: 112894 - DNA, 25 bp, Probe sequence
gcagtaagacggtatctaattgaaa

SEQ ID NO: 112895 - DNA, 25 bp, Probe sequence
gaaaatgatcttactgctcttttat

SEQ ID NO: 112896 - DNA, 25 bp, Probe sequence
gagcagtaagacggtatctaattga

SEQ ID NO: 112897 - DNA, 25 bp, Probe sequence
gagaagagcagtaagacggtatcta

SEQ ID NO: 112898 - DNA, 25 bp, Probe sequence
gatcttactgctcttttatatactt

SEQ ID NO: 112899 - DNA, 25 bp, Probe sequence
tgatcttactgctcttttatatact

SEQ ID NO: 112900 - DNA, 25 bp, Probe sequence
ttactgctcttttatatactttatt

SEQ ID NO: 112901 - DNA, 25 bp, Probe sequence
attacaatgtatttaatcaacttga

SEQ ID NO: 112902 - DNA, 25 bp, Probe sequence
ataactgacctcctaaatttatctt

SEQ ID NO: 112903 - DNA, 25 bp, Probe sequence
actgacctcctaaatttatcttatt

SEQ ID NO: 112904 - DNA, 25 bp, Probe sequence
aactgacctcctaaatttatcttat

SEQ ID NO: 112905 - DNA, 25 bp, Probe sequence
aatatcagtttatacattacaatgt

SEQ ID NO: 112906 - DNA, 25 bp, Probe sequence
caatgtatttaatcaacttgaaaag

SEQ ID NO: 112907 - DNA, 25 bp, Probe sequence
ctgacctcctaaatttatcttattt

SEQ ID NO: 112908 - DNA, 25 bp, Probe sequence
tgtacctttttaaatatcagtttat

SEQ ID NO: 112909 - DNA, 25 bp, Probe sequence
tgacctcctaaatttatcttatttt

SEQ ID NO: 112910 - DNA, 25 bp, Probe sequence
taactgacctcctaaatttatctta

SEQ ID NO: 112911 - DNA, 25 bp, Probe sequence
tacaatgtatttaatcaacttgaaa

SEQ ID NO: 112912 - DNA, 25 bp, Probe sequence
tataactgacctcctaaatttatct

SEQ ID NO: 112913 - DNA, 25 bp, Probe sequence
tattttgtacctttttaaatatcag

SEQ ID NO: 112914 - DNA, 25 bp, Probe sequence
ttataactgacctcctaaatttatc

SEQ ID NO: 112915 - DNA, 25 bp, Probe sequence
tttataactgacctcctaaatttat

SEQ ID NO: 112916 - DNA, 25 bp, Probe sequence
ccttcaaacttagctttggaggagt

SEQ ID NO: 112917 - DNA, 25 bp, Probe sequence
atgtatgctaaatcaacgaattatt

SEQ ID NO: 112918 - DNA, 25 bp, Probe sequence
agctttggaggagttattttttatg

SEQ ID NO: 112919 - DNA, 25 bp, Probe sequence
accccttcaaagagactgagaatag

SEQ ID NO: 112920 - DNA, 25 bp, Probe sequence
aaatatctccttcaaacttagcttt

SEQ ID NO: 112921 - DNA, 25 bp, Probe sequence
aaaccccttcaaagagactgagaat

SEQ ID NO: 112922 - DNA, 25 bp, Probe sequence
aaaatatctccttcaaacttagctt

SEQ ID NO: 112923 - DNA, 25 bp, Probe sequence
aagggattaattcgatgttgatgta

SEQ ID NO: 112924 - DNA, 25 bp, Probe sequence
cttaatgtatgctaaatcaacgaat

SEQ ID NO: 112925 - DNA, 25 bp, Probe sequence
ctccttcaaacttagctttggagga

SEQ ID NO: 112926 - DNA, 25 bp, Probe sequence
gatatttatagatttgttgagaaga

SEQ ID NO: 112927 - DNA, 25 bp, Probe sequence
gattaattcgatgttgatgtatttg

SEQ ID NO: 112928 - DNA, 25 bp, Probe sequence
gttgagaagaaaatatctccttcaa

SEQ ID NO: 112929 - DNA, 25 bp, Probe sequence
tggaggagttattttttatgtcaaa

SEQ ID NO: 112930 - DNA, 25 bp, Probe sequence
tatctccttcaaacttagctttgga

SEQ ID NO: 112931 - DNA, 25 bp, Probe sequence
ataggtcatataatatagtcaaaga

SEQ ID NO: 112932 - DNA, 25 bp, Probe sequence
agttttttctacaatctatcataca

SEQ ID NO: 112933 - DNA, 25 bp, Probe sequence
gaagggctaacatcataaatttttg

SEQ ID NO: 112934 - DNA, 25 bp, Probe sequence
gaaaaaggtcaaaataggtcatata

SEQ ID NO: 112935 - DNA, 25 bp, Probe sequence
gttttttctacaatctatcatacaa

SEQ ID NO: 112936 - DNA, 25 bp, Probe sequence
gggctaacatcataaatttttgaaa

SEQ ID NO: 112937 - DNA, 25 bp, Probe sequence
ggaagggctaacatcataaattttt

SEQ ID NO: 112938 - DNA, 25 bp, Probe sequence
tcctttagttttttctacaatctat

SEQ ID NO: 112939 - DNA, 25 bp, Probe sequence
tctcattcctttagttttttctaca

SEQ ID NO: 112940 - DNA, 25 bp, Probe sequence
tcattcctttagttttttctacaat

SEQ ID NO: 112941 - DNA, 25 bp, Probe sequence
tttagttttttctacaatctatcat

SEQ ID NO: 112942 - DNA, 25 bp, Probe sequence
tttttctacaatctatcatacaata

SEQ ID NO: 112943 - DNA, 25 bp, Probe sequence
ttttttctacaatctatcatacaat

SEQ ID NO: 112944 - DNA, 25 bp, Probe sequence
ttttctacaatctatcatacaataa

SEQ ID NO: 112945 - DNA, 25 bp, Probe sequence
ttctacaatctatcatacaataaaa

SEQ ID NO: 112946 - DNA, 25 bp, Probe sequence
atctttgaaagataccgactatcaa

SEQ ID NO: 112947 - DNA, 25 bp, Probe sequence
atgagcctacagcgatagcataaag

SEQ ID NO: 112948 - DNA, 25 bp, Probe sequence
atgtaactcacatttaatttgtcat

SEQ ID NO: 112949 - DNA, 25 bp, Probe sequence
aatctggtaaaacagtttgcgttag

SEQ ID NO: 112950 - DNA, 25 bp, Probe sequence
cagtttgcgttagtagtcatgttaa

SEQ ID NO: 112951 - DNA, 25 bp, Probe sequence
gaaattcgtgaaagtatccatcaac

SEQ ID NO: 112952 - DNA, 25 bp, Probe sequence
gatactagcaacttacgtcaaaata

SEQ ID NO: 112953 - DNA, 25 bp, Probe sequence
gataccgactatcaacatgatgtaa

SEQ ID NO: 112954 - DNA, 25 bp, Probe sequence
gttcaaaggaaagtggaggtgcaat

SEQ ID NO: 112955 - DNA, 25 bp, Probe sequence
gtatccatcaacgaaacaatctaat

SEQ ID NO: 112956 - DNA, 25 bp, Probe sequence
gtagcattgaactatagaaattcgt

SEQ ID NO: 112957 - DNA, 25 bp, Probe sequence
ggttttttgtttgaagatactagca

SEQ ID NO: 112958 - DNA, 25 bp, Probe sequence
tgggctgtttttttagtagcattga

SEQ ID NO: 112959 - DNA, 25 bp, Probe sequence
taacaagttaatgagcctacagcga

SEQ ID NO: 112960 - DNA, 25 bp, Probe sequence
ttgtcataatgggaatgtgcgttta

SEQ ID NO: 112961 - DNA, 25 bp, Probe sequence
attacccagtgaattatgttatgat

SEQ ID NO: 112962 - DNA, 25 bp, Probe sequence
atagtgctaatatatcattgaaaca

SEQ ID NO: 112963 - DNA, 25 bp, Probe sequence
atggcgaagtttgtaatttgaagta

SEQ ID NO: 112964 - DNA, 25 bp, Probe sequence
agtcgttgaaatgcttatgtagtgc

SEQ ID NO: 112965 - DNA, 25 bp, Probe sequence
acataatattcatttttaagtcgtt

SEQ ID NO: 112966 - DNA, 25 bp, Probe sequence
aatttaagcatattacccagtgaat

SEQ ID NO: 112967 - DNA, 25 bp, Probe sequence
catgttaaaaagcattgtttcgttt

SEQ ID NO: 112968 - DNA, 25 bp, Probe sequence
gcttatgtagtgcagtcttgattct

SEQ ID NO: 112969 - DNA, 25 bp, Probe sequence
gaactaacttgaaaatctgatattt

SEQ ID NO: 112970 - DNA, 25 bp, Probe sequence
gacgagttagacatttgttatgacg

SEQ ID NO: 112971 - DNA, 25 bp, Probe sequence
gttatgacggtcgaagatagcaaat

SEQ ID NO: 112972 - DNA, 25 bp, Probe sequence
gtagtgcagtcttgattcttaggga

SEQ ID NO: 112973 - DNA, 25 bp, Probe sequence
gtcttgattcttagggatagctttt

SEQ ID NO: 112974 - DNA, 25 bp, Probe sequence
tgaaaaaacaactgctttctattta

SEQ ID NO: 112975 - DNA, 25 bp, Probe sequence
taaagttattcttatagcaatcaag

SEQ ID NO: 112976 - DNA, 25 bp, Probe sequence
agttgacttagtttccttgataatt

SEQ ID NO: 112977 - DNA, 25 bp, Probe sequence
agagagtgtacggttgctgtgagta

SEQ ID NO: 112978 - DNA, 25 bp, Probe sequence
agacaagatcaaggtagtatatact

SEQ ID NO: 112979 - DNA, 25 bp, Probe sequence
acgtaaccacatatgataaagttgt

SEQ ID NO: 112980 - DNA, 25 bp, Probe sequence
tccttgataatttggaagcgcccgc

SEQ ID NO: 112981 - DNA, 25 bp, Probe sequence
gaattttataacgtaaccacatatg

SEQ ID NO: 112982 - DNA, 25 bp, Probe sequence
gaatgcaccttcgtaaaatgaatta

SEQ ID NO: 112983 - DNA, 25 bp, Probe sequence
gaaattaatgaatgcaccttcgtaa

SEQ ID NO: 112984 - DNA, 25 bp, Probe sequence
gagtgatgagcattaagttgactta

SEQ ID NO: 112985 - DNA, 25 bp, Probe sequence
gatgcagagagtgtacggttgctgt

SEQ ID NO: 112986 - DNA, 25 bp, Probe sequence
gtacggttgctgtgagtacaacgta

SEQ ID NO: 112987 - DNA, 25 bp, Probe sequence
ggaagcgcccgcaatattattaatg

SEQ ID NO: 112988 - DNA, 25 bp, Probe sequence
taatttggaagcgcccgcaatatta

SEQ ID NO: 112989 - DNA, 25 bp, Probe sequence
taattaaatttatacgatgcagaga

SEQ ID NO: 112990 - DNA, 25 bp, Probe sequence
ttaatgttattcgctaaattcagag

SEQ ID NO: 112991 - DNA, 25 bp, Probe sequence
atttccgtcatcttgaaattttgaa

SEQ ID NO: 112992 - DNA, 25 bp, Probe sequence
atcttgaaattttgaatgtaacaat

SEQ ID NO: 112993 - DNA, 25 bp, Probe sequence
catcttgaaattttgaatgtaacaa

SEQ ID NO: 112994 - DNA, 25 bp, Probe sequence
catttccgtcatcttgaaattttga

SEQ ID NO: 112995 - DNA, 25 bp, Probe sequence
cgtcatcttgaaattttgaatgtaa

SEQ ID NO: 112996 - DNA, 25 bp, Probe sequence
ccgtcatcttgaaattttgaatgta

SEQ ID NO: 112997 - DNA, 25 bp, Probe sequence
gaatgtaacaatattaaactaacct

SEQ ID NO: 112998 - DNA, 25 bp, Probe sequence
gtcatcttgaaattttgaatgtaac

SEQ ID NO: 112999 - DNA, 25 bp, Probe sequence
tccgtcatcttgaaattttgaatgt

SEQ ID NO: 113000 - DNA, 25 bp, Probe sequence
tcttgaaattttgaatgtaacaata

SEQ ID NO: 113001 - DNA, 25 bp, Probe sequence
tcatcttgaaattttgaatgtaaca

SEQ ID NO: 113002 - DNA, 25 bp, Probe sequence
tttccgtcatcttgaaattttgaat

SEQ ID NO: 113003 - DNA, 25 bp, Probe sequence
ttccgtcatcttgaaattttgaatg

SEQ ID NO: 113004 - DNA, 25 bp, Probe sequence
ataacgtgttacttactgatggttt

SEQ ID NO: 113005 - DNA, 25 bp, Probe sequence
atgtatagtatactggtattataat

SEQ ID NO: 113006 - DNA, 25 bp, Probe sequence
agcgccttaggacgtgaattgaatt

SEQ ID NO: 113007 - DNA, 25 bp, Probe sequence
acgtgttacttactgatggtttgac

SEQ ID NO: 113008 - DNA, 25 bp, Probe sequence
acttactgatggtttgacatttgtt

SEQ ID NO: 113009 - DNA, 25 bp, Probe sequence
aagcgccttaggacgtgaattgaat

SEQ ID NO: 113010 - DNA, 25 bp, Probe sequence
gcgccttaggacgtgaattgaatta

SEQ ID NO: 113011 - DNA, 25 bp, Probe sequence
gccttaggacgtgaattgaattata

SEQ ID NO: 113012 - DNA, 25 bp, Probe sequence
gatggtttgacatttgttataaatt

SEQ ID NO: 113013 - DNA, 25 bp, Probe sequence
gttacttactgatggtttgacattt

SEQ ID NO: 113014 - DNA, 25 bp, Probe sequence
gtgaattgaattataacgtgttact

SEQ ID NO: 113015 - DNA, 25 bp, Probe sequence
gtgttacttactgatggtttgacat

SEQ ID NO: 113016 - DNA, 25 bp, Probe sequence
taacgtgttacttactgatggtttg

SEQ ID NO: 113017 - DNA, 25 bp, Probe sequence
tactgatggtttgacatttgttata

SEQ ID NO: 113018 - DNA, 25 bp, Probe sequence
ttataacgtgttacttactgatggt

SEQ ID NO: 113019 - DNA, 25 bp, Probe sequence
attcgaaataatactttgataatat

SEQ ID NO: 113020 - DNA, 25 bp, Probe sequence
atgttcaaaggatttggaggttgag

SEQ ID NO: 113021 - DNA, 25 bp, Probe sequence
atatgttcaaaggatttggaggttg

SEQ ID NO: 113022 - DNA, 25 bp, Probe sequence
atacattcgaaataatactttgata

SEQ ID NO: 113023 - DNA, 25 bp, Probe sequence
acattcgaaataatactttgataat

SEQ ID NO: 113024 - DNA, 25 bp, Probe sequence
aaataatactttgataatatgttca

SEQ ID NO: 113025 - DNA, 25 bp, Probe sequence
aatatgttcaaaggatttggaggtt

SEQ ID NO: 113026 - DNA, 25 bp, Probe sequence
cattcgaaataatactttgataata

SEQ ID NO: 113027 - DNA, 25 bp, Probe sequence
gaaataatactttgataatatgttc

SEQ ID NO: 113028 - DNA, 25 bp, Probe sequence
gttcaaaggatttggaggttgagca

SEQ ID NO: 113029 - DNA, 25 bp, Probe sequence
tgttcaaaggatttggaggttgagc

SEQ ID NO: 113030 - DNA, 25 bp, Probe sequence
tgataatatgttcaaaggatttgga

SEQ ID NO: 113031 - DNA, 25 bp, Probe sequence
tacattcgaaataatactttgataa

SEQ ID NO: 113032 - DNA, 25 bp, Probe sequence
tatgttcaaaggatttggaggttga

SEQ ID NO: 113033 - DNA, 25 bp, Probe sequence
ttcaaaggatttggaggttgagcag

SEQ ID NO: 113034 - DNA, 25 bp, Probe sequence
cgaaatgttaagagtgggagggcaa

SEQ ID NO: 113035 - DNA, 25 bp, Probe sequence
atgtggtcgcgcttttagagcgccc

SEQ ID NO: 113036 - DNA, 25 bp, Probe sequence
agagcgcccatttcgtcacgaaatg

SEQ ID NO: 113037 - DNA, 25 bp, Probe sequence
aaattatgtggtcgcgcttttagag

SEQ ID NO: 113038 - DNA, 25 bp, Probe sequence
aattatgtggtcgcgcttttagagc

SEQ ID NO: 113039 - DNA, 25 bp, Probe sequence
gcgcttttagagcgcccatttcgtc

SEQ ID NO: 113040 - DNA, 25 bp, Probe sequence
gcgcccatttcgtcacgaaatgtta

SEQ ID NO: 113041 - DNA, 25 bp, Probe sequence
gttaaaattatgtggtcgcgctttt

SEQ ID NO: 113042 - DNA, 25 bp, Probe sequence
gtgttaaaattatgtggtcgcgctt

SEQ ID NO: 113043 - DNA, 25 bp, Probe sequence
gtcgcgcttttagagcgcccatttc

SEQ ID NO: 113044 - DNA, 25 bp, Probe sequence
gtggtcgcgcttttagagcgcccat

SEQ ID NO: 113045 - DNA, 25 bp, Probe sequence
ggtcgcgcttttagagcgcccattt

SEQ ID NO: 113046 - DNA, 25 bp, Probe sequence
tggtcgcgcttttagagcgcccatt

SEQ ID NO: 113047 - DNA, 25 bp, Probe sequence
tgtggtcgcgcttttagagcgccca

SEQ ID NO: 113048 - DNA, 25 bp, Probe sequence
tcgcgcttttagagcgcccatttcg

SEQ ID NO: 113049 - DNA, 25 bp, Probe sequence
agtaatgtgggaggaaattccgcta

SEQ ID NO: 113050 - DNA, 25 bp, Probe sequence
aacgatgaagcagataacagagata

SEQ ID NO: 113051 - DNA, 25 bp, Probe sequence
ctgttgtctgctcttaacttgcata

SEQ ID NO: 113052 - DNA, 25 bp, Probe sequence
gcatatagcaagtaatgtgggagga

SEQ ID NO: 113053 - DNA, 25 bp, Probe sequence
gaatattaaatttgattacatgatt

SEQ ID NO: 113054 - DNA, 25 bp, Probe sequence
gattaattcttctgttgtctgctct

SEQ ID NO: 113055 - DNA, 25 bp, Probe sequence
gattacatgatttaaacgatgaagc

SEQ ID NO: 113056 - DNA, 25 bp, Probe sequence
gattgatttattcataagattaatt

SEQ ID NO: 113057 - DNA, 25 bp, Probe sequence
gttgtctgctcttaacttgcatata

SEQ ID NO: 113058 - DNA, 25 bp, Probe sequence
tgtctgctcttaacttgcatatagc

SEQ ID NO: 113059 - DNA, 25 bp, Probe sequence
tgaatgactagattaatgattgatt

SEQ ID NO: 113060 - DNA, 25 bp, Probe sequence
tctgttgtctgctcttaacttgcat

SEQ ID NO: 113061 - DNA, 25 bp, Probe sequence
taatgtgggaggaaattccgctaaa

SEQ ID NO: 113062 - DNA, 25 bp, Probe sequence
tctgctcttaacttgcatatagcaa

SEQ ID NO: 113063 - DNA, 25 bp, Probe sequence
ttctgttgtctgctcttaacttgca

SEQ ID NO: 113064 - DNA, 25 bp, Probe sequence
acttaaaatttatcctgccgaggct

SEQ ID NO: 113065 - DNA, 25 bp, Probe sequence
attgacttgaacgtgatgatctatg

SEQ ID NO: 113066 - DNA, 25 bp, Probe sequence
atgatctatgatctttcaagcactt

SEQ ID NO: 113067 - DNA, 25 bp, Probe sequence
aaatttatcctgccgaggctaaaat

SEQ ID NO: 113068 - DNA, 25 bp, Probe sequence
caagcactttttgccgtgggtagaa

SEQ ID NO: 113069 - DNA, 25 bp, Probe sequence
ctttcaagcactttttgccgtgggt

SEQ ID NO: 113070 - DNA, 25 bp, Probe sequence
cctgccgaggctaaaattgacttga

SEQ ID NO: 113071 - DNA, 25 bp, Probe sequence
gaaatatctttcagtctgtaaaaat

SEQ ID NO: 113072 - DNA, 25 bp, Probe sequence
gatctttcaagcactttttgccgtg

SEQ ID NO: 113073 - DNA, 25 bp, Probe sequence
gatataaacaattacaggctgaaag

SEQ ID NO: 113074 - DNA, 25 bp, Probe sequence
tgccgtgggtagaaagtgctttttt

SEQ ID NO: 113075 - DNA, 25 bp, Probe sequence
taagacagtaggagttatttataac

SEQ ID NO: 113076 - DNA, 25 bp, Probe sequence
tattgtgattattttacctaagaca

SEQ ID NO: 113077 - DNA, 25 bp, Probe sequence
ttccaagttatattacttattgtga

SEQ ID NO: 113078 - DNA, 25 bp, Probe sequence
ttgacaataagtaatttccaagtta

SEQ ID NO: 113079 - DNA, 25 bp, Probe sequence
agtatcttaaacttaataatcaaag

SEQ ID NO: 113080 - DNA, 25 bp, Probe sequence
aaagactgagtgaaatgttataatt

SEQ ID NO: 113081 - DNA, 25 bp, Probe sequence
aatgacgagttacaaagtgaagatg

SEQ ID NO: 113082 - DNA, 25 bp, Probe sequence
gctataatataatgattctttgaga

SEQ ID NO: 113083 - DNA, 25 bp, Probe sequence
gactgagtgaaatgttataattata

SEQ ID NO: 113084 - DNA, 25 bp, Probe sequence
gacgagttacaaagtgaagatgagg

SEQ ID NO: 113085 - DNA, 25 bp, Probe sequence
gttacaaagtgaagatgaggtggaa

SEQ ID NO: 113086 - DNA, 25 bp, Probe sequence
gttataattataatgacgagttaca

SEQ ID NO: 113087 - DNA, 25 bp, Probe sequence
gttttattcatttaaagactgagtg

SEQ ID NO: 113088 - DNA, 25 bp, Probe sequence
gtattgctataatataatgattctt

SEQ ID NO: 113089 - DNA, 25 bp, Probe sequence
gggttttattcatttaaagactgag

SEQ ID NO: 113090 - DNA, 25 bp, Probe sequence
tcaaagttttatagcaagtattgct

SEQ ID NO: 113091 - DNA, 25 bp, Probe sequence
taatcaaagttttatagcaagtatt

SEQ ID NO: 113092 - DNA, 25 bp, Probe sequence
taatgattctttgagaagttaaaac

SEQ ID NO: 113093 - DNA, 25 bp, Probe sequence
ttcaagtatcttaaacttaataatc

SEQ ID NO: 113094 - DNA, 25 bp, Probe sequence
atttatgttcaataagtgtgtactt

SEQ ID NO: 113095 - DNA, 25 bp, Probe sequence
atatgcttatggtatttagctaaaa

SEQ ID NO: 113096 - DNA, 25 bp, Probe sequence
atcattagtgttgccgttttctttt

SEQ ID NO: 113097 - DNA, 25 bp, Probe sequence
aaatggatattctgttatagttata

SEQ ID NO: 113098 - DNA, 25 bp, Probe sequence
cataatttttgaggggtgaatctgt

SEQ ID NO: 113099 - DNA, 25 bp, Probe sequence
cattagtgttgccgttttctttttg

SEQ ID NO: 113100 - DNA, 25 bp, Probe sequence
gcggatcacataatttttgaggggt

SEQ ID NO: 113101 - DNA, 25 bp, Probe sequence
gaatcgaaaatggtgtcatcattag

SEQ ID NO: 113102 - DNA, 25 bp, Probe sequence
gttcaataagtgtgtacttttacgt

SEQ ID NO: 113103 - DNA, 25 bp, Probe sequence
gtgtgtacttttacgttaaatagat

SEQ ID NO: 113104 - DNA, 25 bp, Probe sequence
ggtatttagctaaaagcggatcaca

SEQ ID NO: 113105 - DNA, 25 bp, Probe sequence
tcatcattagtgttgccgttttctt

SEQ ID NO: 113106 - DNA, 25 bp, Probe sequence
tatagaatcgaaaatggtgtcatca

SEQ ID NO: 113107 - DNA, 25 bp, Probe sequence
ttctttttgtctttttattaatatg

SEQ ID NO: 113108 - DNA, 25 bp, Probe sequence
ttgtctttttattaatatgcttatg

SEQ ID NO: 113109 - DNA, 25 bp, Probe sequence
attgatgattcagtttagtacttta

SEQ ID NO: 113110 - DNA, 25 bp, Probe sequence
attcagtttagtactttaagccatt

SEQ ID NO: 113111 - DNA, 25 bp, Probe sequence
atctaaattgaaggaggtaggctcc

SEQ ID NO: 113112 - DNA, 25 bp, Probe sequence
aggcaaaaagatactaagctgaatt

SEQ ID NO: 113113 - DNA, 25 bp, Probe sequence
agcacagctaatctaaattgaagga

SEQ ID NO: 113114 - DNA, 25 bp, Probe sequence
actaagctgaattttattgatgatt

SEQ ID NO: 113115 - DNA, 25 bp, Probe sequence
acagctaatctaaattgaaggaggt

SEQ ID NO: 113116 - DNA, 25 bp, Probe sequence
aaatcaatcaaatagcacagctaat

SEQ ID NO: 113117 - DNA, 25 bp, Probe sequence
aatagcacagctaatctaaattgaa

SEQ ID NO: 113118 - DNA, 25 bp, Probe sequence
gcaaatcaatcaaatagcacagcta

SEQ ID NO: 113119 - DNA, 25 bp, Probe sequence
gatgattcagtttagtactttaagc

SEQ ID NO: 113120 - DNA, 25 bp, Probe sequence
gatactaagctgaattttattgatg

SEQ ID NO: 113121 - DNA, 25 bp, Probe sequence
gattcagtttagtactttaagccat

SEQ ID NO: 113122 - DNA, 25 bp, Probe sequence
tcagtttagtactttaagccatttt

SEQ ID NO: 113123 - DNA, 25 bp, Probe sequence
tacgcaatttacaaaacaggcaaaa

SEQ ID NO: 113124 - DNA, 25 bp, Probe sequence
atgctttagcctcttgttattttta

SEQ ID NO: 113125 - DNA, 25 bp, Probe sequence
agtatataacagaggctaatgcttt

SEQ ID NO: 113126 - DNA, 25 bp, Probe sequence
aatgctttagcctcttgttattttt

SEQ ID NO: 113127 - DNA, 25 bp, Probe sequence
caagtatataacagaggctaatgct

SEQ ID NO: 113128 - DNA, 25 bp, Probe sequence
ctttagcctcttgttatttttatgt

SEQ ID NO: 113129 - DNA, 25 bp, Probe sequence
ctaatgctttagcctcttgttattt

SEQ ID NO: 113130 - DNA, 25 bp, Probe sequence
gctaatgctttagcctcttgttatt

SEQ ID NO: 113131 - DNA, 25 bp, Probe sequence
gctttagcctcttgttatttttatg

SEQ ID NO: 113132 - DNA, 25 bp, Probe sequence
gtatataacagaggctaatgcttta

SEQ ID NO: 113133 - DNA, 25 bp, Probe sequence
gtaaattatttgatttaatgttgac

SEQ ID NO: 113134 - DNA, 25 bp, Probe sequence
tgctttagcctcttgttatttttat

SEQ ID NO: 113135 - DNA, 25 bp, Probe sequence
taatgctttagcctcttgttatttt

SEQ ID NO: 113136 - DNA, 25 bp, Probe sequence
tatataacagaggctaatgctttag

SEQ ID NO: 113137 - DNA, 25 bp, Probe sequence
tttagcctcttgttatttttatgta

SEQ ID NO: 113138 - DNA, 25 bp, Probe sequence
ttagcctcttgttatttttatgtaa

SEQ ID NO: 113139 - DNA, 25 bp, Probe sequence
atgaaccacctggatgtgtgggatt

SEQ ID NO: 113140 - DNA, 25 bp, Probe sequence
acctaaaaatgaaccacctggatgt

SEQ ID NO: 113141 - DNA, 25 bp, Probe sequence
acctggatgtgtgggattaaaaagt

SEQ ID NO: 113142 - DNA, 25 bp, Probe sequence
aaatgaaccacctggatgtgtggga

SEQ ID NO: 113143 - DNA, 25 bp, Probe sequence
aaaagtgaagagaggaggacatatc

SEQ ID NO: 113144 - DNA, 25 bp, Probe sequence
aaaatgaaccacctggatgtgtggg

SEQ ID NO: 113145 - DNA, 25 bp, Probe sequence
aacctaaaaatgaaccacctggatg

SEQ ID NO: 113146 - DNA, 25 bp, Probe sequence
aaccacctggatgtgtgggattaaa

SEQ ID NO: 113147 - DNA, 25 bp, Probe sequence
aatgaaccacctggatgtgtgggat

SEQ ID NO: 113148 - DNA, 25 bp, Probe sequence
cctaaaaatgaaccacctggatgtg

SEQ ID NO: 113149 - DNA, 25 bp, Probe sequence
taacctaaaaatgaaccacctggat

SEQ ID NO: 113150 - DNA, 25 bp, Probe sequence
gaaccacctggatgtgtgggattaa

SEQ ID NO: 113151 - DNA, 25 bp, Probe sequence
ggatgtgtgggattaaaaagtgaag

SEQ ID NO: 113152 - DNA, 25 bp, Probe sequence
tgaaccacctggatgtgtgggatta

SEQ ID NO: 113153 - DNA, 25 bp, Probe sequence
taaaaatgaaccacctggatgtgtg

SEQ ID NO: 113154 - DNA, 25 bp, Probe sequence
ataaaagcttttaccctgagtgtgt

SEQ ID NO: 113155 - DNA, 25 bp, Probe sequence
agcttttaccctgagtgtgttctat

SEQ ID NO: 113156 - DNA, 25 bp, Probe sequence
aaagcttttaccctgagtgtgttct

SEQ ID NO: 113157 - DNA, 25 bp, Probe sequence
aagcttttaccctgagtgtgttcta

SEQ ID NO: 113158 - DNA, 25 bp, Probe sequence
cttttaccctgagtgtgttctatat

SEQ ID NO: 113159 - DNA, 25 bp, Probe sequence
ccctgagtgtgttctatattaatga

SEQ ID NO: 113160 - DNA, 25 bp, Probe sequence
gcttttaccctgagtgtgttctata

SEQ ID NO: 113161 - DNA, 25 bp, Probe sequence
gagtgtgttctatattaatgaattt

SEQ ID NO: 113162 - DNA, 25 bp, Probe sequence
gataaaagcttttaccctgagtgtg

SEQ ID NO: 113163 - DNA, 25 bp, Probe sequence
gtgttctatattaatgaattttcat

SEQ ID NO: 113164 - DNA, 25 bp, Probe sequence
taaaagcttttaccctgagtgtgtt

SEQ ID NO: 113165 - DNA, 25 bp, Probe sequence
taccctgagtgtgttctatattaat

SEQ ID NO: 113166 - DNA, 25 bp, Probe sequence
tttaccctgagtgtgttctatatta

SEQ ID NO: 113167 - DNA, 25 bp, Probe sequence
ttttaccctgagtgtgttctatatt

SEQ ID NO: 113168 - DNA, 25 bp, Probe sequence
ttaccctgagtgtgttctatattaa

SEQ ID NO: 113169 - DNA, 25 bp, Probe sequence
attgtaaaattctttttgcatcgct

SEQ ID NO: 113170 - DNA, 25 bp, Probe sequence
ataacttgttttgactagctagcct

SEQ ID NO: 113171 - DNA, 25 bp, Probe sequence
aacttgttttgactagctagcctag

SEQ ID NO: 113172 - DNA, 25 bp, Probe sequence
aatgtaagctatcatctttatagtt

SEQ ID NO: 113173 - DNA, 25 bp, Probe sequence
aattctttttgcatcgctataaata

SEQ ID NO: 113174 - DNA, 25 bp, Probe sequence
gcttaaatgtaagctatcatcttta

SEQ ID NO: 113175 - DNA, 25 bp, Probe sequence
gcatcgctataaataatttctcatg

SEQ ID NO: 113176 - DNA, 25 bp, Probe sequence
gatggtgagaaactatcatgagaga

SEQ ID NO: 113177 - DNA, 25 bp, Probe sequence
gattttttggggtgaatgcattata

SEQ ID NO: 113178 - DNA, 25 bp, Probe sequence
gttttgactagctagcctaggttaa

SEQ ID NO: 113179 - DNA, 25 bp, Probe sequence
gtttgattttttggggtgaatgcat

SEQ ID NO: 113180 - DNA, 25 bp, Probe sequence
tcatctttatagtttgattttttgg

SEQ ID NO: 113181 - DNA, 25 bp, Probe sequence
taaaattctttttgcatcgctataa

SEQ ID NO: 113182 - DNA, 25 bp, Probe sequence
tagctagcctaggttaaaatacaag

SEQ ID NO: 113183 - DNA, 25 bp, Probe sequence
tataaataatttctcatgatggtga

SEQ ID NO: 113184 - DNA, 25 bp, Probe sequence
acaataattgatgaaagactgacta

SEQ ID NO: 113185 - DNA, 25 bp, Probe sequence
aaattgttgagtcttggacattgta

SEQ ID NO: 113186 - DNA, 25 bp, Probe sequence
aacttataactgataatactgttta

SEQ ID NO: 113187 - DNA, 25 bp, Probe sequence
aatggctattcgatttagaagaaca

SEQ ID NO: 113188 - DNA, 25 bp, Probe sequence
gcatttcattagtttatgtcccaga

SEQ ID NO: 113189 - DNA, 25 bp, Probe sequence
gaagatccctcaatcgaggggtctt

SEQ ID NO: 113190 - DNA, 25 bp, Probe sequence
gattcatatctttcaattaatttaa

SEQ ID NO: 113191 - DNA, 25 bp, Probe sequence
gtaaattttgtaatggctattcgat

SEQ ID NO: 113192 - DNA, 25 bp, Probe sequence
gtcccagattcatatctttcaatta

SEQ ID NO: 113193 - DNA, 25 bp, Probe sequence
ggacattgtaaaatgctcccttcaa

SEQ ID NO: 113194 - DNA, 25 bp, Probe sequence
ggagcatttcattagtttatgtccc

SEQ ID NO: 113195 - DNA, 25 bp, Probe sequence
tcattagtttatgtcccagattcat

SEQ ID NO: 113196 - DNA, 25 bp, Probe sequence
tcaatcgaggggtctttttttaatg

SEQ ID NO: 113197 - DNA, 25 bp, Probe sequence
taaaaagaagatccctcaatcgagg

SEQ ID NO: 113198 - DNA, 25 bp, Probe sequence
ttatgtcccagattcatatctttca

SEQ ID NO: 113199 - DNA, 25 bp, Probe sequence
attgctttgagatattttatctatg

SEQ ID NO: 113200 - DNA, 25 bp, Probe sequence
attatcgtactaaatgattgctttg

SEQ ID NO: 113201 - DNA, 25 bp, Probe sequence
attatatactgtggttcaatcatta

SEQ ID NO: 113202 - DNA, 25 bp, Probe sequence
atcactactttctaaaataatgttt

SEQ ID NO: 113203 - DNA, 25 bp, Probe sequence
atgattgctttgagatattttatct

SEQ ID NO: 113204 - DNA, 25 bp, Probe sequence
agttatgtagaattactgtatgata

SEQ ID NO: 113205 - DNA, 25 bp, Probe sequence
aacattttatgaaattatcgtacta

SEQ ID NO: 113206 - DNA, 25 bp, Probe sequence
aagggggattatatactgtggttca

SEQ ID NO: 113207 - DNA, 25 bp, Probe sequence
ccttatcactactttctaaaataat

SEQ ID NO: 113208 - DNA, 25 bp, Probe sequence
gaatgataaggctttcaagttatgt

SEQ ID NO: 113209 - DNA, 25 bp, Probe sequence
gataaggctttcaagttatgtagaa

SEQ ID NO: 113210 - DNA, 25 bp, Probe sequence
gggggattatatactgtggttcaat

SEQ ID NO: 113211 - DNA, 25 bp, Probe sequence
ggctttcaagttatgtagaattact

SEQ ID NO: 113212 - DNA, 25 bp, Probe sequence
tcgtactaaatgattgctttgagat

SEQ ID NO: 113213 - DNA, 25 bp, Probe sequence
tactgtatgataaaggtattaccaa

SEQ ID NO: 113214 - DNA, 25 bp, Probe sequence
atttattcccacggcaaatattgtc

SEQ ID NO: 113215 - DNA, 25 bp, Probe sequence
acggcaaatattgtcgtgggctttt

SEQ ID NO: 113216 - DNA, 25 bp, Probe sequence
aacaatgtttagtgctccccaaaat

SEQ ID NO: 113217 - DNA, 25 bp, Probe sequence
aatgtttagtgctccccaaaattga

SEQ ID NO: 113218 - DNA, 25 bp, Probe sequence
gcatcttgtagaatttagttgtatt

SEQ ID NO: 113219 - DNA, 25 bp, Probe sequence
gcaaatattgtcgtgggcttttttt

SEQ ID NO: 113220 - DNA, 25 bp, Probe sequence
gaattttaaaagcatcttgtagaat

SEQ ID NO: 113221 - DNA, 25 bp, Probe sequence
gaaattcattttgattatttttgat

SEQ ID NO: 113222 - DNA, 25 bp, Probe sequence
gtttagtgctccccaaaattgaagt

SEQ ID NO: 113223 - DNA, 25 bp, Probe sequence
gtttatagtgtgtagtatatgtcta

SEQ ID NO: 113224 - DNA, 25 bp, Probe sequence
gtatatgtctatactagtagtaact

SEQ ID NO: 113225 - DNA, 25 bp, Probe sequence
gtgctccccaaaattgaagtttgaa

SEQ ID NO: 113226 - DNA, 25 bp, Probe sequence
tagtttattaacagtaagttcttat

SEQ ID NO: 113227 - DNA, 25 bp, Probe sequence
tataacaatgtttagtgctccccaa

SEQ ID NO: 113228 - DNA, 25 bp, Probe sequence
tattgtcgtgggctttttttaatgt

SEQ ID NO: 113229 - DNA, 25 bp, Probe sequence
ataaccgcaactagcgatatggagg

SEQ ID NO: 113230 - DNA, 25 bp, Probe sequence
agaggagcctcatatgtaaatgtat

SEQ ID NO: 113231 - DNA, 25 bp, Probe sequence
aactaataaccgcaactagcgatat

SEQ ID NO: 113232 - DNA, 25 bp, Probe sequence
aacgcttgcaaaactaataaccgca

SEQ ID NO: 113233 - DNA, 25 bp, Probe sequence
ccgcaactagcgatatggaggaaac

SEQ ID NO: 113234 - DNA, 25 bp, Probe sequence
gcaaaactaataaccgcaactagcg

SEQ ID NO: 113235 - DNA, 25 bp, Probe sequence
gtatgatttaagaaaacgcttgcaa

SEQ ID NO: 113236 - DNA, 25 bp, Probe sequence
gtatgaggactcttttttttggcaa

SEQ ID NO: 113237 - DNA, 25 bp, Probe sequence
gtgatacttgtaaaatagaacctat

SEQ ID NO: 113238 - DNA, 25 bp, Probe sequence
tgaggactcttttttttggcaaaat

SEQ ID NO: 113239 - DNA, 25 bp, Probe sequence
taaatattaattagaggagcctcat

SEQ ID NO: 113240 - DNA, 25 bp, Probe sequence
tagaacctattatgagtatgattta

SEQ ID NO: 113241 - DNA, 25 bp, Probe sequence
tatgtaaatgtatgaggactctttt

SEQ ID NO: 113242 - DNA, 25 bp, Probe sequence
tatgaggactcttttttttggcaaa

SEQ ID NO: 113243 - DNA, 25 bp, Probe sequence
ttttggcaaaatttaagtgatactt

SEQ ID NO: 113244 - DNA, 25 bp, Probe sequence
attaatacaactagaatttccattt

SEQ ID NO: 113245 - DNA, 25 bp, Probe sequence
atacaactagaatttccatttacag

SEQ ID NO: 113246 - DNA, 25 bp, Probe sequence
atcagcaacatgtacatgtcatata

SEQ ID NO: 113247 - DNA, 25 bp, Probe sequence
acatcagcaacatgtacatgtcata

SEQ ID NO: 113248 - DNA, 25 bp, Probe sequence
acaactagaatttccatttacagaa

SEQ ID NO: 113249 - DNA, 25 bp, Probe sequence
aaacatcagcaacatgtacatgtca

SEQ ID NO: 113250 - DNA, 25 bp, Probe sequence
aacatgtacatgtcatatatacaag

SEQ ID NO: 113251 - DNA, 25 bp, Probe sequence
aagaaagcgcttttatattataatt

SEQ ID NO: 113252 - DNA, 25 bp, Probe sequence
ccatttacagaaacatcagcaacat

SEQ ID NO: 113253 - DNA, 25 bp, Probe sequence
gaatttccatttacagaaacatcag

SEQ ID NO: 113254 - DNA, 25 bp, Probe sequence
gaaacatcagcaacatgtacatgtc

SEQ ID NO: 113255 - DNA, 25 bp, Probe sequence
gacagtaattagcaataataaacgc

SEQ ID NO: 113256 - DNA, 25 bp, Probe sequence
gtcatatatacaagaaagcgctttt

SEQ ID NO: 113257 - DNA, 25 bp, Probe sequence
taaacgctataaattactaaaatca

SEQ ID NO: 113258 - DNA, 25 bp, Probe sequence
ttccatttacagaaacatcagcaac

SEQ ID NO: 113259 - DNA, 25 bp, Probe sequence
agttaaacaaattcttatacaatat

SEQ ID NO: 113260 - DNA, 25 bp, Probe sequence
agattacttgtctctgtgaaattaa

SEQ ID NO: 113261 - DNA, 25 bp, Probe sequence
acaatattattaggaggcaatcacc

SEQ ID NO: 113262 - DNA, 25 bp, Probe sequence
aaactagtgcatgaattctaatatt

SEQ ID NO: 113263 - DNA, 25 bp, Probe sequence
aattctaatattattcattatacat

SEQ ID NO: 113264 - DNA, 25 bp, Probe sequence
gcgagcttagttcattttaaagtaa

SEQ ID NO: 113265 - DNA, 25 bp, Probe sequence
gaattcgcgagcttagttcatttta

SEQ ID NO: 113266 - DNA, 25 bp, Probe sequence
gagttttttgtatgtaaagtatatt

SEQ ID NO: 113267 - DNA, 25 bp, Probe sequence
gatatagtctttctagaaaatctgt

SEQ ID NO: 113268 - DNA, 25 bp, Probe sequence
gtaaaacacagattacttgtctctg

SEQ ID NO: 113269 - DNA, 25 bp, Probe sequence
gtctctgtgaaattaatacgtttat

SEQ ID NO: 113270 - DNA, 25 bp, Probe sequence
ggaatgatattttaaattactcttt

SEQ ID NO: 113271 - DNA, 25 bp, Probe sequence
tcatttccattcactttaatacacg

SEQ ID NO: 113272 - DNA, 25 bp, Probe sequence
tatacatattgaattcgcgagctta

SEQ ID NO: 113273 - DNA, 25 bp, Probe sequence
ttccattcactttaatacacggaat

SEQ ID NO: 113274 - DNA, 25 bp, Probe sequence
atactacgagttcattttcagggga

SEQ ID NO: 113275 - DNA, 25 bp, Probe sequence
atcatagaatcagcataatacgaaa

SEQ ID NO: 113276 - DNA, 25 bp, Probe sequence
acgagttcattttcaggggataacg

SEQ ID NO: 113277 - DNA, 25 bp, Probe sequence
actacgagttcattttcaggggata

SEQ ID NO: 113278 - DNA, 25 bp, Probe sequence
acaatactacgagttcattttcagg

SEQ ID NO: 113279 - DNA, 25 bp, Probe sequence
aacaatactacgagttcattttcag

SEQ ID NO: 113280 - DNA, 25 bp, Probe sequence
aatactacgagttcattttcagggg

SEQ ID NO: 113281 - DNA, 25 bp, Probe sequence
ctacgagttcattttcaggggataa

SEQ ID NO: 113282 - DNA, 25 bp, Probe sequence
gagttcattttcaggggataacgaa

SEQ ID NO: 113283 - DNA, 25 bp, Probe sequence
gaatatcatagaatcagcataatac

SEQ ID NO: 113284 - DNA, 25 bp, Probe sequence
gaatcagcataatacgaaataaata

SEQ ID NO: 113285 - DNA, 25 bp, Probe sequence
gttcattttcaggggataacgaata

SEQ ID NO: 113286 - DNA, 25 bp, Probe sequence
tcattttcaggggataacgaatatc

SEQ ID NO: 113287 - DNA, 25 bp, Probe sequence
taacgaatatcatagaatcagcata

SEQ ID NO: 113288 - DNA, 25 bp, Probe sequence
tactacgagttcattttcaggggat

SEQ ID NO: 113289 - DNA, 25 bp, Probe sequence
atataaacatatacgctatgtcttt

SEQ ID NO: 113290 - DNA, 25 bp, Probe sequence
atagtgtatatgtgaattaatgtat

SEQ ID NO: 113291 - DNA, 25 bp, Probe sequence
ataaacatatacgctatgtctttag

SEQ ID NO: 113292 - DNA, 25 bp, Probe sequence
atgtaatcgatgatatctatggaat

SEQ ID NO: 113293 - DNA, 25 bp, Probe sequence
acatatacgctatgtctttagtctt

SEQ ID NO: 113294 - DNA, 25 bp, Probe sequence
aaacatatacgctatgtctttagtc

SEQ ID NO: 113295 - DNA, 25 bp, Probe sequence
aacatatacgctatgtctttagtct

SEQ ID NO: 113296 - DNA, 25 bp, Probe sequence
aatcgatgatatctatggaatatac

SEQ ID NO: 113297 - DNA, 25 bp, Probe sequence
gaattgataatgtaatcgatgatat

SEQ ID NO: 113298 - DNA, 25 bp, Probe sequence
gatgatatctatggaatatacattg

SEQ ID NO: 113299 - DNA, 25 bp, Probe sequence
gatatctatggaatatacattgaat

SEQ ID NO: 113300 - DNA, 25 bp, Probe sequence
gtaatcgatgatatctatggaatat

SEQ ID NO: 113301 - DNA, 25 bp, Probe sequence
gtgaattaatgtattcgatagaatt

SEQ ID NO: 113302 - DNA, 25 bp, Probe sequence
taatgtaatcgatgatatctatgga

SEQ ID NO: 113303 - DNA, 25 bp, Probe sequence
taaacatatacgctatgtctttagt

SEQ ID NO: 113304 - DNA, 25 bp, Probe sequence
atttgttagaattacattatatgat

SEQ ID NO: 113305 - DNA, 25 bp, Probe sequence
atgtgcgctgagtatatattcttat

SEQ ID NO: 113306 - DNA, 25 bp, Probe sequence
agtatgtgcgctgagtatatattct

SEQ ID NO: 113307 - DNA, 25 bp, Probe sequence
agaaaagtatgtgcgctgagtatat

SEQ ID NO: 113308 - DNA, 25 bp, Probe sequence
aaagtatgtgcgctgagtatatatt

SEQ ID NO: 113309 - DNA, 25 bp, Probe sequence
aagtatgtgcgctgagtatatattc

SEQ ID NO: 113310 - DNA, 25 bp, Probe sequence
aatagaaaagtatgtgcgctgagta

SEQ ID NO: 113311 - DNA, 25 bp, Probe sequence
gcgctgagtatatattcttatttaa

SEQ ID NO: 113312 - DNA, 25 bp, Probe sequence
gctgagtatatattcttatttaaga

SEQ ID NO: 113313 - DNA, 25 bp, Probe sequence
gaaaagtatgtgcgctgagtatata

SEQ ID NO: 113314 - DNA, 25 bp, Probe sequence
gtatgtgcgctgagtatatattctt

SEQ ID NO: 113315 - DNA, 25 bp, Probe sequence
gtgcgctgagtatatattcttattt

SEQ ID NO: 113316 - DNA, 25 bp, Probe sequence
tgtgcgctgagtatatattcttatt

SEQ ID NO: 113317 - DNA, 25 bp, Probe sequence
tgcgctgagtatatattcttattta

SEQ ID NO: 113318 - DNA, 25 bp, Probe sequence
tatgtgcgctgagtatatattctta

SEQ ID NO: 113319 - DNA, 25 bp, Probe sequence
agcgaattgaaaacaagcttagatt

SEQ ID NO: 113320 - DNA, 25 bp, Probe sequence
agcctttgagattactgttgtgagc

SEQ ID NO: 113321 - DNA, 25 bp, Probe sequence
aagtattgcactttattgaaattta

SEQ ID NO: 113322 - DNA, 25 bp, Probe sequence
aagtcacatgcctttttttgttcta

SEQ ID NO: 113323 - DNA, 25 bp, Probe sequence
aaggtatttcattgagaatgctttt

SEQ ID NO: 113324 - DNA, 25 bp, Probe sequence
aatgcaccaatagtaagcctttgag

SEQ ID NO: 113325 - DNA, 25 bp, Probe sequence
aattgcaattcttaaactgtgattc

SEQ ID NO: 113326 - DNA, 25 bp, Probe sequence
cacatgcctttttttgttctaatgc

SEQ ID NO: 113327 - DNA, 25 bp, Probe sequence
gcctttttttgttctaatgcaccaa

SEQ ID NO: 113328 - DNA, 25 bp, Probe sequence
gcaattcttaaactgtgattcatat

SEQ ID NO: 113329 - DNA, 25 bp, Probe sequence
gaatgcttttaagtcacatgccttt

SEQ ID NO: 113330 - DNA, 25 bp, Probe sequence
gattactgttgtgagcaatgttatt

SEQ ID NO: 113331 - DNA, 25 bp, Probe sequence
gtagcttaaggtatttcattgagaa

SEQ ID NO: 113332 - DNA, 25 bp, Probe sequence
gtgattcatattaatatttgtagca

SEQ ID NO: 113333 - DNA, 25 bp, Probe sequence
taggtatgtagcttaaggtatttca

SEQ ID NO: 113334 - DNA, 25 bp, Probe sequence
aacttaaccaggtccatgtggcctg

SEQ ID NO: 113335 - DNA, 25 bp, Probe sequence
agggcaaataatactattttttatg

SEQ ID NO: 113336 - DNA, 25 bp, Probe sequence
actatattgatatacatttttgtat

SEQ ID NO: 113337 - DNA, 25 bp, Probe sequence
cttaaccaggtccatgtggcctggt

SEQ ID NO: 113338 - DNA, 25 bp, Probe sequence
ctgtttagaaattcccagatataaa

SEQ ID NO: 113339 - DNA, 25 bp, Probe sequence
gctaagatattaattttaagggcaa

SEQ ID NO: 113340 - DNA, 25 bp, Probe sequence
gaatagatgcaatttaatttgttac

SEQ ID NO: 113341 - DNA, 25 bp, Probe sequence
gatgcaatttaatttgttacagaaa

SEQ ID NO: 113342 - DNA, 25 bp, Probe sequence
gattaacttaaccaggtccatgtgg

SEQ ID NO: 113343 - DNA, 25 bp, Probe sequence
tttttctgtttagaaattcccagat

SEQ ID NO: 113344 - DNA, 25 bp, Probe sequence
taacttaaccaggtccatgtggcct

SEQ ID NO: 113345 - DNA, 25 bp, Probe sequence
tacagaaatgtaattgtctatgaat

SEQ ID NO: 113346 - DNA, 25 bp, Probe sequence
tagaaattcccagatataaaacaaa

SEQ ID NO: 113347 - DNA, 25 bp, Probe sequence
tatgattaacttaaccaggtccatg

SEQ ID NO: 113348 - DNA, 25 bp, Probe sequence
ttaacttaaccaggtccatgtggcc

SEQ ID NO: 113349 - DNA, 25 bp, Probe sequence
tataccaggtccgtgaggcctggtt

SEQ ID NO: 113350 - DNA, 25 bp, Probe sequence
ataaatttaattcatctttacatta

SEQ ID NO: 113351 - DNA, 25 bp, Probe sequence
agcttataccaggtccgtgaggcct

SEQ ID NO: 113352 - DNA, 25 bp, Probe sequence
taccaggtccgtgaggcctggtttt

SEQ ID NO: 113353 - DNA, 25 bp, Probe sequence
acacagtatcaaaccatttaaaaca

SEQ ID NO: 113354 - DNA, 25 bp, Probe sequence
aaagtgtaaaataacagtcttagat

SEQ ID NO: 113355 - DNA, 25 bp, Probe sequence
aattcatctttacattaaaagtaca

SEQ ID NO: 113356 - DNA, 25 bp, Probe sequence
cagcttataccaggtccgtgaggcc

SEQ ID NO: 113357 - DNA, 25 bp, Probe sequence
gcttataccaggtccgtgaggcctg

SEQ ID NO: 113358 - DNA, 25 bp, Probe sequence
gcaattaaacacagtatcaaaccat

SEQ ID NO: 113359 - DNA, 25 bp, Probe sequence
gaaaagcaattaaacacagtatcaa

SEQ ID NO: 113360 - DNA, 25 bp, Probe sequence
gaaatgtatcttatgtttgagatta

SEQ ID NO: 113361 - DNA, 25 bp, Probe sequence
tacagcttataccaggtccgtgagg

SEQ ID NO: 113362 - DNA, 25 bp, Probe sequence
tacgatgggaatacaaatttttata

SEQ ID NO: 113363 - DNA, 25 bp, Probe sequence
ttatgaaatgtatcttatgtttgag

SEQ ID NO: 113364 - DNA, 25 bp, Probe sequence
atgcaatagatgtatttttcatata

SEQ ID NO: 113365 - DNA, 25 bp, Probe sequence
acaatatgacccaggtccttgtggc

SEQ ID NO: 113366 - DNA, 25 bp, Probe sequence
aatatgacccaggtccttgtggcct

SEQ ID NO: 113367 - DNA, 25 bp, Probe sequence
caatatgacccaggtccttgtggcc

SEQ ID NO: 113368 - DNA, 25 bp, Probe sequence
cacatgcaatagatgtatttttcat

SEQ ID NO: 113369 - DNA, 25 bp, Probe sequence
catgcaatagatgtatttttcatat

SEQ ID NO: 113370 - DNA, 25 bp, Probe sequence
gcaatagatgtatttttcatataaa

SEQ ID NO: 113371 - DNA, 25 bp, Probe sequence
gattacacatgcaatagatgtattt

SEQ ID NO: 113372 - DNA, 25 bp, Probe sequence
taaagatacggaataaaacttatat

SEQ ID NO: 113373 - DNA, 25 bp, Probe sequence
tacaatatgacccaggtccttgtgg

SEQ ID NO: 113374 - DNA, 25 bp, Probe sequence
tacacatgcaatagatgtatttttc

SEQ ID NO: 113375 - DNA, 25 bp, Probe sequence
tatgacccaggtccttgtggcctgg

SEQ ID NO: 113376 - DNA, 25 bp, Probe sequence
tttatgattacacatgcaatagatg

SEQ ID NO: 113377 - DNA, 25 bp, Probe sequence
tttttatgattacacatgcaataga

SEQ ID NO: 113378 - DNA, 25 bp, Probe sequence
ttttttatgattacacatgcaatag

SEQ ID NO: 113379 - DNA, 25 bp, Probe sequence
aaagcattttcctagaatcatctat

SEQ ID NO: 113380 - DNA, 25 bp, Probe sequence
aaaaaagcattttcctagaatcatc

SEQ ID NO: 113381 - DNA, 25 bp, Probe sequence
aacaacgttcatacgaacttacatg

SEQ ID NO: 113382 - DNA, 25 bp, Probe sequence
aagcattttcctagaatcatctatt

SEQ ID NO: 113383 - DNA, 25 bp, Probe sequence
caaacaacgttcatacgaacttaca

SEQ ID NO: 113384 - DNA, 25 bp, Probe sequence
caacgttcatacgaacttacatgtt

SEQ ID NO: 113385 - DNA, 25 bp, Probe sequence
catctatttaacaaacaacgttcat

SEQ ID NO: 113386 - DNA, 25 bp, Probe sequence
catacgaacttacatgtttagttaa

SEQ ID NO: 113387 - DNA, 25 bp, Probe sequence
gcattttcctagaatcatctattta

SEQ ID NO: 113388 - DNA, 25 bp, Probe sequence
gaatcatctatttaacaaacaacgt

SEQ ID NO: 113389 - DNA, 25 bp, Probe sequence
gaacttacatgtttagttaaatgac

SEQ ID NO: 113390 - DNA, 25 bp, Probe sequence
gttcatacgaacttacatgtttagt

SEQ ID NO: 113391 - DNA, 25 bp, Probe sequence
taaatgacataggaaaacgcttttt

SEQ ID NO: 113392 - DNA, 25 bp, Probe sequence
ttttcctagaatcatctatttaaca

SEQ ID NO: 113393 - DNA, 25 bp, Probe sequence
ttaacaaacaacgttcatacgaact

SEQ ID NO: 113394 - DNA, 25 bp, Probe sequence
atatcacataatatttaattacttc

SEQ ID NO: 113395 - DNA, 25 bp, Probe sequence
atcacataatatttaattacttctt

SEQ ID NO: 113396 - DNA, 25 bp, Probe sequence
accacttatatctattttttataat

SEQ ID NO: 113397 - DNA, 25 bp, Probe sequence
acttatatctattttttataattat

SEQ ID NO: 113398 - DNA, 25 bp, Probe sequence
acaccacttatatctattttttata

SEQ ID NO: 113399 - DNA, 25 bp, Probe sequence
acaacaccacttatatctatttttt

SEQ ID NO: 113400 - DNA, 25 bp, Probe sequence
aacaccacttatatctattttttat

SEQ ID NO: 113401 - DNA, 25 bp, Probe sequence
caacaccacttatatctatttttta

SEQ ID NO: 113402 - DNA, 25 bp, Probe sequence
cacttatatctattttttataatta

SEQ ID NO: 113403 - DNA, 25 bp, Probe sequence
caccacttatatctattttttataa

SEQ ID NO: 113404 - DNA, 25 bp, Probe sequence
ccacttatatctattttttataatt

SEQ ID NO: 113405 - DNA, 25 bp, Probe sequence
tacaacaccacttatatctattttt

SEQ ID NO: 113406 - DNA, 25 bp, Probe sequence
tatcacataatatttaattacttct

SEQ ID NO: 113407 - DNA, 25 bp, Probe sequence
ttacaacaccacttatatctatttt

SEQ ID NO: 113408 - DNA, 25 bp, Probe sequence
ataaaaacgcgcaactaatgttacg

SEQ ID NO: 113409 - DNA, 25 bp, Probe sequence
atgttacgcgtttgaattaatcata

SEQ ID NO: 113410 - DNA, 25 bp, Probe sequence
acgcgtttgaattaatcatatgata

SEQ ID NO: 113411 - DNA, 25 bp, Probe sequence
actaatgttacgcgtttgaattaat

SEQ ID NO: 113412 - DNA, 25 bp, Probe sequence
aaaacgcgcaactaatgttacgcgt

SEQ ID NO: 113413 - DNA, 25 bp, Probe sequence
aatgttacgcgtttgaattaatcat

SEQ ID NO: 113414 - DNA, 25 bp, Probe sequence
caactaatgttacgcgtttgaatta

SEQ ID NO: 113415 - DNA, 25 bp, Probe sequence
cgcaactaatgttacgcgtttgaat

SEQ ID NO: 113416 - DNA, 25 bp, Probe sequence
gcgcaactaatgttacgcgtttgaa

SEQ ID NO: 113417 - DNA, 25 bp, Probe sequence
gcaactaatgttacgcgtttgaatt

SEQ ID NO: 113418 - DNA, 25 bp, Probe sequence
gaaggtataataaaaacgcgcaact

SEQ ID NO: 113419 - DNA, 25 bp, Probe sequence
gttacgcgtttgaattaatcatatg

SEQ ID NO: 113420 - DNA, 25 bp, Probe sequence
ggtataataaaaacgcgcaactaat

SEQ ID NO: 113421 - DNA, 25 bp, Probe sequence
taaaaacgcgcaactaatgttacgc

SEQ ID NO: 113422 - DNA, 25 bp, Probe sequence
tacgcgtttgaattaatcatatgat

SEQ ID NO: 113423 - DNA, 25 bp, Probe sequence
attgtatacgattgctcaattattt

SEQ ID NO: 113424 - DNA, 25 bp, Probe sequence
attcgataattgtatacgattgctc

SEQ ID NO: 113425 - DNA, 25 bp, Probe sequence
atcatacagcattagttttttactt

SEQ ID NO: 113426 - DNA, 25 bp, Probe sequence
atgtgtttatctttctattttacta

SEQ ID NO: 113427 - DNA, 25 bp, Probe sequence
actatcaatgtgtttatctttctat

SEQ ID NO: 113428 - DNA, 25 bp, Probe sequence
aatgatgctatattaatggtgtatg

SEQ ID NO: 113429 - DNA, 25 bp, Probe sequence
cactccttacactatcaatgtgttt

SEQ ID NO: 113430 - DNA, 25 bp, Probe sequence
catacagcattagttttttactttt

SEQ ID NO: 113431 - DNA, 25 bp, Probe sequence
cgttcactccttacactatcaatgt

SEQ ID NO: 113432 - DNA, 25 bp, Probe sequence
gaatgaattcataagtttttaaaat

SEQ ID NO: 113433 - DNA, 25 bp, Probe sequence
gaagggtaattactcaggattacgt

SEQ ID NO: 113434 - DNA, 25 bp, Probe sequence
gttcactccttacactatcaatgtg

SEQ ID NO: 113435 - DNA, 25 bp, Probe sequence
gtattaaatttgtggaggcatgtaa

SEQ ID NO: 113436 - DNA, 25 bp, Probe sequence
ggattacgtaatcatacagcattag

SEQ ID NO: 113437 - DNA, 25 bp, Probe sequence
ttttcatgaagggtaattactcagg

SEQ ID NO: 113438 - DNA, 25 bp, Probe sequence
atgcctcgggaaaggttccaataga

SEQ ID NO: 113439 - DNA, 25 bp, Probe sequence
atgtttaattaagaaatgcctcggg

SEQ ID NO: 113440 - DNA, 25 bp, Probe sequence
aatgcctcgggaaaggttccaatag

SEQ ID NO: 113441 - DNA, 25 bp, Probe sequence
aaaagcattggaaggatgattttta

SEQ ID NO: 113442 - DNA, 25 bp, Probe sequence
aatgtttaattaagaaatgcctcgg

SEQ ID NO: 113443 - DNA, 25 bp, Probe sequence
caatgtttaattaagaaatgcctcg

SEQ ID NO: 113444 - DNA, 25 bp, Probe sequence
tcgggaaaggttccaatagaaagat

SEQ ID NO: 113445 - DNA, 25 bp, Probe sequence
gaaatgcctcgggaaaggttccaat

SEQ ID NO: 113446 - DNA, 25 bp, Probe sequence
gcaatgtttaattaagaaatgcctc

SEQ ID NO: 113447 - DNA, 25 bp, Probe sequence
gttccaatagaaagataaaaagcat

SEQ ID NO: 113448 - DNA, 25 bp, Probe sequence
tgtttaattaagaaatgcctcggga

SEQ ID NO: 113449 - DNA, 25 bp, Probe sequence
tgcctcgggaaaggttccaatagaa

SEQ ID NO: 113450 - DNA, 25 bp, Probe sequence
taattaagaaatgcctcgggaaagg

SEQ ID NO: 113451 - DNA, 25 bp, Probe sequence
ttaattaagaaatgcctcgggaaag

SEQ ID NO: 113452 - DNA, 25 bp, Probe sequence
atagtcgataatatgatgcctaggc

SEQ ID NO: 113453 - DNA, 25 bp, Probe sequence
atcaataataaacgaataggggtgt

SEQ ID NO: 113454 - DNA, 25 bp, Probe sequence
atgcctaggcagaaatattatcgat

SEQ ID NO: 113455 - DNA, 25 bp, Probe sequence
agtcgataatatgatgcctaggcag

SEQ ID NO: 113456 - DNA, 25 bp, Probe sequence
aaagatagtcgataatatgatgcct

SEQ ID NO: 113457 - DNA, 25 bp, Probe sequence
aatatgatgcctaggcagaaatatt

SEQ ID NO: 113458 - DNA, 25 bp, Probe sequence
cctaggcagaaatattatcgattat

SEQ ID NO: 113459 - DNA, 25 bp, Probe sequence
gcctaggcagaaatattatcgatta

SEQ ID NO: 113460 - DNA, 25 bp, Probe sequence
gaaatattatcgattatttttttat

SEQ ID NO: 113461 - DNA, 25 bp, Probe sequence
gatgcctaggcagaaatattatcga

SEQ ID NO: 113462 - DNA, 25 bp, Probe sequence
gatagtcgataatatgatgcctagg

SEQ ID NO: 113463 - DNA, 25 bp, Probe sequence
gtcgataatatgatgcctaggcaga

SEQ ID NO: 113464 - DNA, 25 bp, Probe sequence
tgcctaggcagaaatattatcgatt

SEQ ID NO: 113465 - DNA, 25 bp, Probe sequence
tcgataatatgatgcctaggcagaa

SEQ ID NO: 113466 - DNA, 25 bp, Probe sequence
tagtcgataatatgatgcctaggca

SEQ ID NO: 113467 - DNA, 25 bp, Probe sequence
ataccatggttaaaatgcatattca

SEQ ID NO: 113468 - DNA, 25 bp, Probe sequence
agaaatatttcgctttagattagga

SEQ ID NO: 113469 - DNA, 25 bp, Probe sequence
aagagtgatgtctgattcgttgatc

SEQ ID NO: 113470 - DNA, 25 bp, Probe sequence
gaagttgtgtgctatcgctattttt

SEQ ID NO: 113471 - DNA, 25 bp, Probe sequence
gaacaaacatacttttgtatttata

SEQ ID NO: 113472 - DNA, 25 bp, Probe sequence
gacttacatgaagttgtgtgctatc

SEQ ID NO: 113473 - DNA, 25 bp, Probe sequence
gttaaaacagagaataccatggtta

SEQ ID NO: 113474 - DNA, 25 bp, Probe sequence
gtagtgatagcatatgacttacatg

SEQ ID NO: 113475 - DNA, 25 bp, Probe sequence
gtgatgtctgattcgttgatcattt

SEQ ID NO: 113476 - DNA, 25 bp, Probe sequence
tgtgtgctatcgctatttttagtta

SEQ ID NO: 113477 - DNA, 25 bp, Probe sequence
tgacaaaactaattaactccgtata

SEQ ID NO: 113478 - DNA, 25 bp, Probe sequence
tcgtgtatgtttaaagagtgatgtc

SEQ ID NO: 113479 - DNA, 25 bp, Probe sequence
taactccgtataattatgaaacata

SEQ ID NO: 113480 - DNA, 25 bp, Probe sequence
ttccaaaaagttaatcgttcgatga

SEQ ID NO: 113481 - DNA, 25 bp, Probe sequence
ttcgttgatcatttatttttgtaca

SEQ ID NO: 113482 - DNA, 25 bp, Probe sequence
attgagaactgtaattagccgtaat

SEQ ID NO: 113483 - DNA, 25 bp, Probe sequence
atacttaaaattctcttgctattga

SEQ ID NO: 113484 - DNA, 25 bp, Probe sequence
aaatcaatcgtatataagcacttta

SEQ ID NO: 113485 - DNA, 25 bp, Probe sequence
aaacccccactgcaatgattatcgc

SEQ ID NO: 113486 - DNA, 25 bp, Probe sequence
aagcactttaaagctagtaggttct

SEQ ID NO: 113487 - DNA, 25 bp, Probe sequence
aagctagtaggttctgctaacttta

SEQ ID NO: 113488 - DNA, 25 bp, Probe sequence
aattctcttgctattgaaatgttag

SEQ ID NO: 113489 - DNA, 25 bp, Probe sequence
gcatatgtttagctttgaatactta

SEQ ID NO: 113490 - DNA, 25 bp, Probe sequence
gagactctaaccttcaatattatta

SEQ ID NO: 113491 - DNA, 25 bp, Probe sequence
gagtattttgtccaacgcaattaat

SEQ ID NO: 113492 - DNA, 25 bp, Probe sequence
gtcttagagtattttgtccaacgca

SEQ ID NO: 113493 - DNA, 25 bp, Probe sequence
ggggacttaaagcatatgtttagct

SEQ ID NO: 113494 - DNA, 25 bp, Probe sequence
ggttctgctaactttaaagtgcttt

SEQ ID NO: 113495 - DNA, 25 bp, Probe sequence
tgtatatacataaacccccactgca

SEQ ID NO: 113496 - DNA, 25 bp, Probe sequence
tcgcaatgggggaaagaggggactt

SEQ ID NO: 113497 - DNA, 25 bp, Probe sequence
attagctgcatgaacgcatattaat

SEQ ID NO: 113498 - DNA, 25 bp, Probe sequence
ataacaactatatcaatgtttaata

SEQ ID NO: 113499 - DNA, 25 bp, Probe sequence
acagagatgaatataggttacgttt

SEQ ID NO: 113500 - DNA, 25 bp, Probe sequence
cgtttctttctttgcacggggatgc

SEQ ID NO: 113501 - DNA, 25 bp, Probe sequence
ccgatattagctgcatgaacgcata

SEQ ID NO: 113502 - DNA, 25 bp, Probe sequence
gcatgaacgcatattaattaggaga

SEQ ID NO: 113503 - DNA, 25 bp, Probe sequence
gcacggggatgcattaatctaaaat

SEQ ID NO: 113504 - DNA, 25 bp, Probe sequence
gaaaggacagctaatatcagttatg

SEQ ID NO: 113505 - DNA, 25 bp, Probe sequence
taaattctggattattggaacgatt

SEQ ID NO: 113506 - DNA, 25 bp, Probe sequence
tacgtttctttctttgcacggggat

SEQ ID NO: 113507 - DNA, 25 bp, Probe sequence
taggttacgtttctttctttgcacg

SEQ ID NO: 113508 - DNA, 25 bp, Probe sequence
tatcagttatgtattgttattatta

SEQ ID NO: 113509 - DNA, 25 bp, Probe sequence
tataggttacgtttctttctttgca

SEQ ID NO: 113510 - DNA, 25 bp, Probe sequence
ttctttctttgcacggggatgcatt

SEQ ID NO: 113511 - DNA, 25 bp, Probe sequence
ttctttgcacggggatgcattaatc

SEQ ID NO: 113512 - DNA, 25 bp, Probe sequence
atttgtatgtattgttcgatatgta

SEQ ID NO: 113513 - DNA, 25 bp, Probe sequence
atatttatagagtcgcctggcagtc

SEQ ID NO: 113514 - DNA, 25 bp, Probe sequence
ataacgcttatatgtaactttcaaa

SEQ ID NO: 113515 - DNA, 25 bp, Probe sequence
aaagggttatttagtcatagatgta

SEQ ID NO: 113516 - DNA, 25 bp, Probe sequence
aaccacatcacataaattgagttca

SEQ ID NO: 113517 - DNA, 25 bp, Probe sequence
aagtggtgtggctaataatgttgat

SEQ ID NO: 113518 - DNA, 25 bp, Probe sequence
cctttgctactctatggttatatta

SEQ ID NO: 113519 - DNA, 25 bp, Probe sequence
gaacgtatgatttactaagactatt

SEQ ID NO: 113520 - DNA, 25 bp, Probe sequence
gagaggcatctatcgcaaaagaatg

SEQ ID NO: 113521 - DNA, 25 bp, Probe sequence
gagttcatacccaatttaagtggtg

SEQ ID NO: 113522 - DNA, 25 bp, Probe sequence
gatttatagatgaaccgcctaatcg

SEQ ID NO: 113523 - DNA, 25 bp, Probe sequence
gtatcaactttttatcagacataga

SEQ ID NO: 113524 - DNA, 25 bp, Probe sequence
gtcgcctggcagtcatttgggaaat

SEQ ID NO: 113525 - DNA, 25 bp, Probe sequence
gtgacatcaaccttaagtatcaact

SEQ ID NO: 113526 - DNA, 25 bp, Probe sequence
tacctcctttgctactctatggtta

SEQ ID NO: 113527 - DNA, 25 bp, Probe sequence
attcatcatatcatttttaacctaa

SEQ ID NO: 113528 - DNA, 25 bp, Probe sequence
atgaatcattcatactattgtaact

SEQ ID NO: 113529 - DNA, 25 bp, Probe sequence
aaaatatgtcctgaggtgagattga

SEQ ID NO: 113530 - DNA, 25 bp, Probe sequence
aacttttgaaaatgtcattcacttt

SEQ ID NO: 113531 - DNA, 25 bp, Probe sequence
aagcattcaatatttgatgattgtt

SEQ ID NO: 113532 - DNA, 25 bp, Probe sequence
aatattgtattcatcatatcatttt

SEQ ID NO: 113533 - DNA, 25 bp, Probe sequence
catcatatcatttttaacctaattg

SEQ ID NO: 113534 - DNA, 25 bp, Probe sequence
catatcatttttaacctaattgaaa

SEQ ID NO: 113535 - DNA, 25 bp, Probe sequence
gaatcattcatactattgtaacttt

SEQ ID NO: 113536 - DNA, 25 bp, Probe sequence
gaaaatgtcattcactttagataag

SEQ ID NO: 113537 - DNA, 25 bp, Probe sequence
gtattcatcatatcatttttaacct

SEQ ID NO: 113538 - DNA, 25 bp, Probe sequence
gtcattcactttagataagtgtgat

SEQ ID NO: 113539 - DNA, 25 bp, Probe sequence
tcattcatactattgtaacttttga

SEQ ID NO: 113540 - DNA, 25 bp, Probe sequence
tcactcctacataataatattgtat

SEQ ID NO: 113541 - DNA, 25 bp, Probe sequence
tatgttaaaatatgtcctgaggtga

SEQ ID NO: 113542 - DNA, 25 bp, Probe sequence
attcgagtgttcggatttaaacatt

SEQ ID NO: 113543 - DNA, 25 bp, Probe sequence
atatacttttattcgagtgttcgga

SEQ ID NO: 113544 - DNA, 25 bp, Probe sequence
aagcaacaatgaaacataattactt

SEQ ID NO: 113545 - DNA, 25 bp, Probe sequence
aagacgcatatacttttattcgagt

SEQ ID NO: 113546 - DNA, 25 bp, Probe sequence
aatcaagacgcatatacttttattc

SEQ ID NO: 113547 - DNA, 25 bp, Probe sequence
aatagcttgttaagtatgttggtta

SEQ ID NO: 113548 - DNA, 25 bp, Probe sequence
gcatatacttttattcgagtgttcg

SEQ ID NO: 113549 - DNA, 25 bp, Probe sequence
gaaacataattacttaatagcttgt

SEQ ID NO: 113550 - DNA, 25 bp, Probe sequence
gacgcatatacttttattcgagtgt

SEQ ID NO: 113551 - DNA, 25 bp, Probe sequence
gagtgttcggatttaaacatttatt

SEQ ID NO: 113552 - DNA, 25 bp, Probe sequence
gtatgttggttaataatcaagacgc

SEQ ID NO: 113553 - DNA, 25 bp, Probe sequence
ggttaataatcaagacgcatatact

SEQ ID NO: 113554 - DNA, 25 bp, Probe sequence
ggatttaaacatttattaatactga

SEQ ID NO: 113555 - DNA, 25 bp, Probe sequence
tcaagacgcatatacttttattcga

SEQ ID NO: 113556 - DNA, 25 bp, Probe sequence
tacttttattcgagtgttcggattt

SEQ ID NO: 113557 - DNA, 25 bp, Probe sequence
agttacaaactcatcttttgggtat

SEQ ID NO: 113558 - DNA, 25 bp, Probe sequence
agagttacaaactcatcttttgggt

SEQ ID NO: 113559 - DNA, 25 bp, Probe sequence
actcatcttttgggtatagaatacc

SEQ ID NO: 113560 - DNA, 25 bp, Probe sequence
acaaactcatcttttgggtatagaa

SEQ ID NO: 113561 - DNA, 25 bp, Probe sequence
aaactcatcttttgggtatagaata

SEQ ID NO: 113562 - DNA, 25 bp, Probe sequence
gaataccttcgaggtgagtttttat

SEQ ID NO: 113563 - DNA, 25 bp, Probe sequence
gagttacaaactcatcttttgggta

SEQ ID NO: 113564 - DNA, 25 bp, Probe sequence
gattacctatgtaactaaacattaa

SEQ ID NO: 113565 - DNA, 25 bp, Probe sequence
gttacaaactcatcttttgggtata

SEQ ID NO: 113566 - DNA, 25 bp, Probe sequence
gtatagaataccttcgaggtgagtt

SEQ ID NO: 113567 - DNA, 25 bp, Probe sequence
gggtatagaataccttcgaggtgag

SEQ ID NO: 113568 - DNA, 25 bp, Probe sequence
tacaaactcatcttttgggtataga

SEQ ID NO: 113569 - DNA, 25 bp, Probe sequence
tagaataccttcgaggtgagttttt

SEQ ID NO: 113570 - DNA, 25 bp, Probe sequence
ttagattacctatgtaactaaacat

SEQ ID NO: 113571 - DNA, 25 bp, Probe sequence
ttacaaactcatcttttgggtatag

SEQ ID NO: 113572 - DNA, 25 bp, Probe sequence
attgacatttaagacgaggcagctg

SEQ ID NO: 113573 - DNA, 25 bp, Probe sequence
atataccttcttcattcggaggcgt

SEQ ID NO: 113574 - DNA, 25 bp, Probe sequence
ataattgctaagagtttgggctgag

SEQ ID NO: 113575 - DNA, 25 bp, Probe sequence
atcgcacaatataccttcttcattc

SEQ ID NO: 113576 - DNA, 25 bp, Probe sequence
aagacgaggcagctgaaccttatat

SEQ ID NO: 113577 - DNA, 25 bp, Probe sequence
cattcggaggcgtatcgtgcgattt

SEQ ID NO: 113578 - DNA, 25 bp, Probe sequence
gcacaatataccttcttcattcgga

SEQ ID NO: 113579 - DNA, 25 bp, Probe sequence
gaatcgcacaatataccttcttcat

SEQ ID NO: 113580 - DNA, 25 bp, Probe sequence
gagtttgggctgagccatttctaac

SEQ ID NO: 113581 - DNA, 25 bp, Probe sequence
gtatcgtgcgattttttgtattata

SEQ ID NO: 113582 - DNA, 25 bp, Probe sequence
ggaggcgtatcgtgcgattttttgt

SEQ ID NO: 113583 - DNA, 25 bp, Probe sequence
ggcagctgaaccttatatataattg

SEQ ID NO: 113584 - DNA, 25 bp, Probe sequence
tgggctgagccatttctaacaatat

SEQ ID NO: 113585 - DNA, 25 bp, Probe sequence
tcttcattcggaggcgtatcgtgcg

SEQ ID NO: 113586 - DNA, 25 bp, Probe sequence
taccttcttcattcggaggcgtatc

SEQ ID NO: 113587 - DNA, 25 bp, Probe sequence
ataaccacatgagctttttgataag

SEQ ID NO: 113588 - DNA, 25 bp, Probe sequence
agttctcccaaggaagactactcgg

SEQ ID NO: 113589 - DNA, 25 bp, Probe sequence
actactcgggtacactttgctatga

SEQ ID NO: 113590 - DNA, 25 bp, Probe sequence
aaagtgtactttgttattgataata

SEQ ID NO: 113591 - DNA, 25 bp, Probe sequence
aacatacagatttcaactatttacc

SEQ ID NO: 113592 - DNA, 25 bp, Probe sequence
aatcacgtcttatgtatacgggaat

SEQ ID NO: 113593 - DNA, 25 bp, Probe sequence
ctatttaccaaatcacgtcttatgt

SEQ ID NO: 113594 - DNA, 25 bp, Probe sequence
ctcgggtacactttgctatgagcaa

SEQ ID NO: 113595 - DNA, 25 bp, Probe sequence
gagtagcgactgtataatttctatt

SEQ ID NO: 113596 - DNA, 25 bp, Probe sequence
gtgatagtagttaaagttctcccaa

SEQ ID NO: 113597 - DNA, 25 bp, Probe sequence
ggaagactactcgggtacactttgc

SEQ ID NO: 113598 - DNA, 25 bp, Probe sequence
gaggttaacgtttatatgtagtgat

SEQ ID NO: 113599 - DNA, 25 bp, Probe sequence
tcatcaccattgtttataagaattt

SEQ ID NO: 113600 - DNA, 25 bp, Probe sequence
taatactcattatagtttatacact

SEQ ID NO: 113601 - DNA, 25 bp, Probe sequence
ttagtagttaaaattctcttgaagt

SEQ ID NO: 113602 - DNA, 25 bp, Probe sequence
attggtgacgtggcattatgaaata

SEQ ID NO: 113603 - DNA, 25 bp, Probe sequence
attacaaattggtgacgtggcatta

SEQ ID NO: 113604 - DNA, 25 bp, Probe sequence
ataccgtgaatgattaataagattt

SEQ ID NO: 113605 - DNA, 25 bp, Probe sequence
atcgctccttttcaaaaatcatcag

SEQ ID NO: 113606 - DNA, 25 bp, Probe sequence
acaaattggtgacgtggcattatga

SEQ ID NO: 113607 - DNA, 25 bp, Probe sequence
aagatttatattacaggaggacatt

SEQ ID NO: 113608 - DNA, 25 bp, Probe sequence
aatggcgtataattataccgtgaat

SEQ ID NO: 113609 - DNA, 25 bp, Probe sequence
aatcatcagttctttataaatttta

SEQ ID NO: 113610 - DNA, 25 bp, Probe sequence
catcagttctttataaattttatca

SEQ ID NO: 113611 - DNA, 25 bp, Probe sequence
gctccttttcaaaaatcatcagttc

SEQ ID NO: 113612 - DNA, 25 bp, Probe sequence
gtttatcgctccttttcaaaaatca

SEQ ID NO: 113613 - DNA, 25 bp, Probe sequence
ggtgacgtggcattatgaaataaaa

SEQ ID NO: 113614 - DNA, 25 bp, Probe sequence
tcataaagcaaaggggtaacgataa

SEQ ID NO: 113615 - DNA, 25 bp, Probe sequence
tttcaaaaatcatcagttctttata

SEQ ID NO: 113616 - DNA, 25 bp, Probe sequence
ttatcgctccttttcaaaaatcatc

SEQ ID NO: 113617 - DNA, 25 bp, Probe sequence
aacgaccttctattgaaatgttcta

SEQ ID NO: 113618 - DNA, 25 bp, Probe sequence
aacgcgaatgcgtatgcaacttaga

SEQ ID NO: 113619 - DNA, 25 bp, Probe sequence
aagaatctgaaatatcactcgataa

SEQ ID NO: 113620 - DNA, 25 bp, Probe sequence
cagcccctttcaagttatcgtttgg

SEQ ID NO: 113621 - DNA, 25 bp, Probe sequence
gaaatgttctaatactttagtagta

SEQ ID NO: 113622 - DNA, 25 bp, Probe sequence
gactatgaaagaaacgaccttctat

SEQ ID NO: 113623 - DNA, 25 bp, Probe sequence
gactgcaatgaaatttaacgcgaat

SEQ ID NO: 113624 - DNA, 25 bp, Probe sequence
gtagtaaatctatatattccaatta

SEQ ID NO: 113625 - DNA, 25 bp, Probe sequence
gggctgttatttttgaaagtatcca

SEQ ID NO: 113626 - DNA, 25 bp, Probe sequence
gggtatatataatgcgtatgactat

SEQ ID NO: 113627 - DNA, 25 bp, Probe sequence
tgtagtattatagttagggtggaaa

SEQ ID NO: 113628 - DNA, 25 bp, Probe sequence
taaatatttaacagcccctttcaag

SEQ ID NO: 113629 - DNA, 25 bp, Probe sequence
tagaatatgatgtcttttactaata

SEQ ID NO: 113630 - DNA, 25 bp, Probe sequence
tattccaattattatttgtagtatt

SEQ ID NO: 113631 - DNA, 25 bp, Probe sequence
ttatcgtttggggctgttatttttg

SEQ ID NO: 113632 - DNA, 25 bp, Probe sequence
attttttattgccagccgtgttacg

SEQ ID NO: 113633 - DNA, 25 bp, Probe sequence
atgataaagaaaggtgggtagcaat

SEQ ID NO: 113634 - DNA, 25 bp, Probe sequence
aatgctccattttttattgccagcc

SEQ ID NO: 113635 - DNA, 25 bp, Probe sequence
cagccgtgttacgtatcttgaaaaa

SEQ ID NO: 113636 - DNA, 25 bp, Probe sequence
gccagccgtgttacgtatcttgaaa

SEQ ID NO: 113637 - DNA, 25 bp, Probe sequence
gctccattttttattgccagccgtg

SEQ ID NO: 113638 - DNA, 25 bp, Probe sequence
gataggggagcaatcatctaattta

SEQ ID NO: 113639 - DNA, 25 bp, Probe sequence
ggggagcaatcatctaatttaatta

SEQ ID NO: 113640 - DNA, 25 bp, Probe sequence
tgaaatcgacgatatagatatgata

SEQ ID NO: 113641 - DNA, 25 bp, Probe sequence
tgctccattttttattgccagccgt

SEQ ID NO: 113642 - DNA, 25 bp, Probe sequence
tccattttttattgccagccgtgtt

SEQ ID NO: 113643 - DNA, 25 bp, Probe sequence
taattagaagataaatgctccattt

SEQ ID NO: 113644 - DNA, 25 bp, Probe sequence
tattgccagccgtgttacgtatctt

SEQ ID NO: 113645 - DNA, 25 bp, Probe sequence
ttttattgccagccgtgttacgtat

SEQ ID NO: 113646 - DNA, 25 bp, Probe sequence
ttgccagccgtgttacgtatcttga

SEQ ID NO: 113647 - DNA, 25 bp, Probe sequence
attcaatgcgtgccaccaggttttt

SEQ ID NO: 113648 - DNA, 25 bp, Probe sequence
atcattcaatgcgtgccaccaggtt

SEQ ID NO: 113649 - DNA, 25 bp, Probe sequence
atgcgtgccaccaggtttttatgtt

SEQ ID NO: 113650 - DNA, 25 bp, Probe sequence
aacctgatggcagcatcattcaatg

SEQ ID NO: 113651 - DNA, 25 bp, Probe sequence
caatgcgtgccaccaggtttttatg

SEQ ID NO: 113652 - DNA, 25 bp, Probe sequence
cagcatcattcaatgcgtgccacca

SEQ ID NO: 113653 - DNA, 25 bp, Probe sequence
cattcaatgcgtgccaccaggtttt

SEQ ID NO: 113654 - DNA, 25 bp, Probe sequence
gcgtgccaccaggtttttatgtttt

SEQ ID NO: 113655 - DNA, 25 bp, Probe sequence
gcagcatcattcaatgcgtgccacc

SEQ ID NO: 113656 - DNA, 25 bp, Probe sequence
gatggcagcatcattcaatgcgtgc

SEQ ID NO: 113657 - DNA, 25 bp, Probe sequence
gtgccaccaggtttttatgttttgt

SEQ ID NO: 113658 - DNA, 25 bp, Probe sequence
ggcagcatcattcaatgcgtgccac

SEQ ID NO: 113659 - DNA, 25 bp, Probe sequence
tcattcaatgcgtgccaccaggttt

SEQ ID NO: 113660 - DNA, 25 bp, Probe sequence
tcaatgcgtgccaccaggtttttat

SEQ ID NO: 113661 - DNA, 25 bp, Probe sequence
ttcaatgcgtgccaccaggttttta

SEQ ID NO: 113662 - DNA, 25 bp, Probe sequence
attgcgaatatacaaagacaccatt

SEQ ID NO: 113663 - DNA, 25 bp, Probe sequence
atgatgatgttgtgtgattgtataa

SEQ ID NO: 113664 - DNA, 25 bp, Probe sequence
aagacaccattatatccatatgcta

SEQ ID NO: 113665 - DNA, 25 bp, Probe sequence
cctgcatctagactcctttacataa

SEQ ID NO: 113666 - DNA, 25 bp, Probe sequence
gcatctagactcctttacataagaa

SEQ ID NO: 113667 - DNA, 25 bp, Probe sequence
gaaaaaaggcgacatgttatctcaa

SEQ ID NO: 113668 - DNA, 25 bp, Probe sequence
gatacgttttgatatttcgcatgat

SEQ ID NO: 113669 - DNA, 25 bp, Probe sequence
gattgtataaacttattcgtatttt

SEQ ID NO: 113670 - DNA, 25 bp, Probe sequence
gttatctcaatttacctgcatctag

SEQ ID NO: 113671 - DNA, 25 bp, Probe sequence
ggaaatacttttaacaactgatgac

SEQ ID NO: 113672 - DNA, 25 bp, Probe sequence
ggcgacatgttatctcaatttacct

SEQ ID NO: 113673 - DNA, 25 bp, Probe sequence
taatgttaaggatgttgtcgcaata

SEQ ID NO: 113674 - DNA, 25 bp, Probe sequence
tcaatttacctgcatctagactcct

SEQ ID NO: 113675 - DNA, 25 bp, Probe sequence
taatcatcgccgagttttaaaattt

SEQ ID NO: 113676 - DNA, 25 bp, Probe sequence
taagaaataatcatcgccgagtttt

SEQ ID NO: 113677 - DNA, 25 bp, Probe sequence
attttaatgtcttttgaagtatcga

SEQ ID NO: 113678 - DNA, 25 bp, Probe sequence
atattttaatgtcttttgaagtatc

SEQ ID NO: 113679 - DNA, 25 bp, Probe sequence
ataaaattaaagggatgtggagaca

SEQ ID NO: 113680 - DNA, 25 bp, Probe sequence
atgtcttttgaagtatcgaaaaatg

SEQ ID NO: 113681 - DNA, 25 bp, Probe sequence
atggtggtaataaattcagattaaa

SEQ ID NO: 113682 - DNA, 25 bp, Probe sequence
aaattcagattaaagatatgcaaat

SEQ ID NO: 113683 - DNA, 25 bp, Probe sequence
aatattttaatgtcttttgaagtat

SEQ ID NO: 113684 - DNA, 25 bp, Probe sequence
gaagtatcgaaaaatgtattacaca

SEQ ID NO: 113685 - DNA, 25 bp, Probe sequence
gataatattttaatgtcttttgaag

SEQ ID NO: 113686 - DNA, 25 bp, Probe sequence
gttgataatattttaatgtcttttg

SEQ ID NO: 113687 - DNA, 25 bp, Probe sequence
gtaagttgataatattttaatgtct

SEQ ID NO: 113688 - DNA, 25 bp, Probe sequence
taatattttaatgtcttttgaagta

SEQ ID NO: 113689 - DNA, 25 bp, Probe sequence
taatgtcttttgaagtatcgaaaaa

SEQ ID NO: 113690 - DNA, 25 bp, Probe sequence
tttaatgtcttttgaagtatcgaaa

SEQ ID NO: 113691 - DNA, 25 bp, Probe sequence
ttttaatgtcttttgaagtatcgaa

SEQ ID NO: 113692 - DNA, 25 bp, Probe sequence
atttctttgttatgcaaatcaaaac

SEQ ID NO: 113693 - DNA, 25 bp, Probe sequence
atcccatgttaatattaacagtttt

SEQ ID NO: 113694 - DNA, 25 bp, Probe sequence
atggatatcccatgttaatattaac

SEQ ID NO: 113695 - DNA, 25 bp, Probe sequence
acagttttaatttctttgttatgca

SEQ ID NO: 113696 - DNA, 25 bp, Probe sequence
aatggatatcccatgttaatattaa

SEQ ID NO: 113697 - DNA, 25 bp, Probe sequence
cagttttaatttctttgttatgcaa

SEQ ID NO: 113698 - DNA, 25 bp, Probe sequence
gatatcccatgttaatattaacagt

SEQ ID NO: 113699 - DNA, 25 bp, Probe sequence
gttttaatttctttgttatgcaaat

SEQ ID NO: 113700 - DNA, 25 bp, Probe sequence
ggatatcccatgttaatattaacag

SEQ ID NO: 113701 - DNA, 25 bp, Probe sequence
tggatatcccatgttaatattaaca

SEQ ID NO: 113702 - DNA, 25 bp, Probe sequence
taatttctttgttatgcaaatcaaa

SEQ ID NO: 113703 - DNA, 25 bp, Probe sequence
tataatggatatcccatgttaatat

SEQ ID NO: 113704 - DNA, 25 bp, Probe sequence
ttttaatttctttgttatgcaaatc

SEQ ID NO: 113705 - DNA, 25 bp, Probe sequence
ttaatttctttgttatgcaaatcaa

SEQ ID NO: 113706 - DNA, 25 bp, Probe sequence
ttctttgttatgcaaatcaaaacat

SEQ ID NO: 113707 - DNA, 25 bp, Probe sequence
atgcatatcaacttaagcaatactt

SEQ ID NO: 113708 - DNA, 25 bp, Probe sequence
atgatagtgtgatagtggaaaagtt

SEQ ID NO: 113709 - DNA, 25 bp, Probe sequence
aactgagttctacataacatttttc

SEQ ID NO: 113710 - DNA, 25 bp, Probe sequence
aatcgcgctatatgcatatcaactt

SEQ ID NO: 113711 - DNA, 25 bp, Probe sequence
aattctaacatttggaagttgtatt

SEQ ID NO: 113712 - DNA, 25 bp, Probe sequence
catttttctaatacaccgccttaat

SEQ ID NO: 113713 - DNA, 25 bp, Probe sequence
gcaatacttattttaactgagttct

SEQ ID NO: 113714 - DNA, 25 bp, Probe sequence
gaagttgtattaaatcatgatagtg

SEQ ID NO: 113715 - DNA, 25 bp, Probe sequence
gagcaatcgcgctatatgcatatca

SEQ ID NO: 113716 - DNA, 25 bp, Probe sequence
tctaatacaccgccttaattcaaac

SEQ ID NO: 113717 - DNA, 25 bp, Probe sequence
tcaaaccctaattctaacatttgga

SEQ ID NO: 113718 - DNA, 25 bp, Probe sequence
tcaacgagcaatcgcgctatatgca

SEQ ID NO: 113719 - DNA, 25 bp, Probe sequence
taattcaaaccctaattctaacatt

SEQ ID NO: 113720 - DNA, 25 bp, Probe sequence
taacatttttctaatacaccgcctt

SEQ ID NO: 113721 - DNA, 25 bp, Probe sequence
ttttctaatacaccgccttaattca

SEQ ID NO: 113722 - DNA, 25 bp, Probe sequence
attaggtaacgaaaaacacagatat

SEQ ID NO: 113723 - DNA, 25 bp, Probe sequence
actattcggtaggcaaagcttatga

SEQ ID NO: 113724 - DNA, 25 bp, Probe sequence
gcgttttactattcggtaggcaaag

SEQ ID NO: 113725 - DNA, 25 bp, Probe sequence
gaaaaacacagatatttattaatca

SEQ ID NO: 113726 - DNA, 25 bp, Probe sequence
gttttactattcggtaggcaaagct

SEQ ID NO: 113727 - DNA, 25 bp, Probe sequence
ggtaggcaaagcttatgatagtata

SEQ ID NO: 113728 - DNA, 25 bp, Probe sequence
ggcaaagcttatgatagtataatta

SEQ ID NO: 113729 - DNA, 25 bp, Probe sequence
tgtaagcgttttactattcggtagg

SEQ ID NO: 113730 - DNA, 25 bp, Probe sequence
taagcgttttactattcggtaggca

SEQ ID NO: 113731 - DNA, 25 bp, Probe sequence
taatcaaaagtgaggttaggctaaa

SEQ ID NO: 113732 - DNA, 25 bp, Probe sequence
tactattcggtaggcaaagcttatg

SEQ ID NO: 113733 - DNA, 25 bp, Probe sequence
ttcggtaggcaaagcttatgatagt

SEQ ID NO: 113734 - DNA, 25 bp, Probe sequence
tattcggtaggcaaagcttatgata

SEQ ID NO: 113735 - DNA, 25 bp, Probe sequence
tttactattcggtaggcaaagctta

SEQ ID NO: 113736 - DNA, 25 bp, Probe sequence
ttgtaagcgttttactattcggtag

SEQ ID NO: 113737 - DNA, 25 bp, Probe sequence
atactaaacgaagtgattttttgct

SEQ ID NO: 113738 - DNA, 25 bp, Probe sequence
agacaatcattgtttattaagtatt

SEQ ID NO: 113739 - DNA, 25 bp, Probe sequence
acctcatactaaacgaagtgatttt

SEQ ID NO: 113740 - DNA, 25 bp, Probe sequence
aagttgtggtataatgccgttatta

SEQ ID NO: 113741 - DNA, 25 bp, Probe sequence
catacctcatactaaacgaagtgat

SEQ ID NO: 113742 - DNA, 25 bp, Probe sequence
gcaagttgtggtataatgccgttat

SEQ ID NO: 113743 - DNA, 25 bp, Probe sequence
gaagtgattttttgcttcgttattt

SEQ ID NO: 113744 - DNA, 25 bp, Probe sequence
gacatacctcatactaaacgaagtg

SEQ ID NO: 113745 - DNA, 25 bp, Probe sequence
gagcaagttgtggtataatgccgtt

SEQ ID NO: 113746 - DNA, 25 bp, Probe sequence
gttgtggtataatgccgttattaaa

SEQ ID NO: 113747 - DNA, 25 bp, Probe sequence
gtggtataatgccgttattaaaact

SEQ ID NO: 113748 - DNA, 25 bp, Probe sequence
ggtataatgccgttattaaaacttg

SEQ ID NO: 113749 - DNA, 25 bp, Probe sequence
tgtttattaagtattgagcaagttg

SEQ ID NO: 113750 - DNA, 25 bp, Probe sequence
tgattttttgcttcgttatttttat

SEQ ID NO: 113751 - DNA, 25 bp, Probe sequence
tataatgccgttattaaaacttgtt

SEQ ID NO: 113752 - DNA, 25 bp, Probe sequence
atatcatacatactggagtgactat

SEQ ID NO: 113753 - DNA, 25 bp, Probe sequence
atcgattatgtcatttcttttaaca

SEQ ID NO: 113754 - DNA, 25 bp, Probe sequence
atgacgacgtaaatcttgaggtgaa

SEQ ID NO: 113755 - DNA, 25 bp, Probe sequence
atgattcatttctcaatgacgacgt

SEQ ID NO: 113756 - DNA, 25 bp, Probe sequence
agtagtatgttttaatctggcgtct

SEQ ID NO: 113757 - DNA, 25 bp, Probe sequence
acatctataattattcgttttcatt

SEQ ID NO: 113758 - DNA, 25 bp, Probe sequence
aatcgccaattaatatcatacatac

SEQ ID NO: 113759 - DNA, 25 bp, Probe sequence
aatttcccaattaatctataaagat

SEQ ID NO: 113760 - DNA, 25 bp, Probe sequence
aattacacgttagcatatcgattat

SEQ ID NO: 113761 - DNA, 25 bp, Probe sequence
gaataactgacacatttttttgatc

SEQ ID NO: 113762 - DNA, 25 bp, Probe sequence
gacacatttttttgatcatagctat

SEQ ID NO: 113763 - DNA, 25 bp, Probe sequence
gatcatagctatatactttgtgaat

SEQ ID NO: 113764 - DNA, 25 bp, Probe sequence
gttttaatctggcgtctattacaaa

SEQ ID NO: 113765 - DNA, 25 bp, Probe sequence
taaagtcttagattggttgggagtt

SEQ ID NO: 113766 - DNA, 25 bp, Probe sequence
ttcatttttgaaagtaatcgccaat

SEQ ID NO: 113767 - DNA, 25 bp, Probe sequence
attataatcaaacacgaggttttca

SEQ ID NO: 113768 - DNA, 25 bp, Probe sequence
atcattataatcaaacacgaggttt

SEQ ID NO: 113769 - DNA, 25 bp, Probe sequence
aggtagtgctctgaacactatcatt

SEQ ID NO: 113770 - DNA, 25 bp, Probe sequence
agaaggtagtgctctgaacactatc

SEQ ID NO: 113771 - DNA, 25 bp, Probe sequence
aaatatcaactgactatatagataa

SEQ ID NO: 113772 - DNA, 25 bp, Probe sequence
aaggtagtgctctgaacactatcat

SEQ ID NO: 113773 - DNA, 25 bp, Probe sequence
cactatcattataatcaaacacgag

SEQ ID NO: 113774 - DNA, 25 bp, Probe sequence
gctctgaacactatcattataatca

SEQ ID NO: 113775 - DNA, 25 bp, Probe sequence
gaaggtagtgctctgaacactatca

SEQ ID NO: 113776 - DNA, 25 bp, Probe sequence
gaacactatcattataatcaaacac

SEQ ID NO: 113777 - DNA, 25 bp, Probe sequence
gataaagaaggtagtgctctgaaca

SEQ ID NO: 113778 - DNA, 25 bp, Probe sequence
gtagtgctctgaacactatcattat

SEQ ID NO: 113779 - DNA, 25 bp, Probe sequence
gtgctctgaacactatcattataat

SEQ ID NO: 113780 - DNA, 25 bp, Probe sequence
ggtagtgctctgaacactatcatta

SEQ ID NO: 113781 - DNA, 25 bp, Probe sequence
tgctctgaacactatcattataatc

SEQ ID NO: 113782 - DNA, 25 bp, Probe sequence
attgaacctatttagctttaagaag

SEQ ID NO: 113783 - DNA, 25 bp, Probe sequence
attttatgctataatatttctatta

SEQ ID NO: 113784 - DNA, 25 bp, Probe sequence
atatttctattatgcgaagattaag

SEQ ID NO: 113785 - DNA, 25 bp, Probe sequence
atgaccttattttatgctataatat

SEQ ID NO: 113786 - DNA, 25 bp, Probe sequence
agatgaccttattttatgctataat

SEQ ID NO: 113787 - DNA, 25 bp, Probe sequence
acctatttagctttaagaaggcata

SEQ ID NO: 113788 - DNA, 25 bp, Probe sequence
aagatgaccttattttatgctataa

SEQ ID NO: 113789 - DNA, 25 bp, Probe sequence
aaggcataacaagatgaccttattt

SEQ ID NO: 113790 - DNA, 25 bp, Probe sequence
gaacctatttagctttaagaaggca

SEQ ID NO: 113791 - DNA, 25 bp, Probe sequence
gaccttattttatgctataatattt

SEQ ID NO: 113792 - DNA, 25 bp, Probe sequence
gatgaccttattttatgctataata

SEQ ID NO: 113793 - DNA, 25 bp, Probe sequence
tgaacctatttagctttaagaaggc

SEQ ID NO: 113794 - DNA, 25 bp, Probe sequence
taattgaacctatttagctttaaga

SEQ ID NO: 113795 - DNA, 25 bp, Probe sequence
taatatttctattatgcgaagatta

SEQ ID NO: 113796 - DNA, 25 bp, Probe sequence
tatttagctttaagaaggcataaca

SEQ ID NO: 113797 - DNA, 25 bp, Probe sequence
attggggaatgcttagtatgtgaat

SEQ ID NO: 113798 - DNA, 25 bp, Probe sequence
agcctaaatcgctaaagctcaaggg

SEQ ID NO: 113799 - DNA, 25 bp, Probe sequence
aaatcgctaaagctcaaggggagta

SEQ ID NO: 113800 - DNA, 25 bp, Probe sequence
aactgcataagagagcctaaatcgc

SEQ ID NO: 113801 - DNA, 25 bp, Probe sequence
ctccaacgtagagtttctcgaaaga

SEQ ID NO: 113802 - DNA, 25 bp, Probe sequence
gaacatttatatacactccaacgta

SEQ ID NO: 113803 - DNA, 25 bp, Probe sequence
gagtttctcgaaagatactttgtgt

SEQ ID NO: 113804 - DNA, 25 bp, Probe sequence
gatgctactgcacaactgcataaga

SEQ ID NO: 113805 - DNA, 25 bp, Probe sequence
taaggttaagagggacgcagttgga

SEQ ID NO: 113806 - DNA, 25 bp, Probe sequence
gttaagagggacgcagttggatgct

SEQ ID NO: 113807 - DNA, 25 bp, Probe sequence
gatactttgtgttggagtgttttta

SEQ ID NO: 113808 - DNA, 25 bp, Probe sequence
ggtatgtgacatattggggaatgct

SEQ ID NO: 113809 - DNA, 25 bp, Probe sequence
ggagtgtttttaattaggtatgtga

SEQ ID NO: 113810 - DNA, 25 bp, Probe sequence
tgcacaactgcataagagagcctaa

SEQ ID NO: 113811 - DNA, 25 bp, Probe sequence
tacactccaacgtagagtttctcga

SEQ ID NO: 113812 - DNA, 25 bp, Probe sequence
ataaatccctctaatcgctaaagcg

SEQ ID NO: 113813 - DNA, 25 bp, Probe sequence
atcgctaaagcgaaaagtgggatta

SEQ ID NO: 113814 - DNA, 25 bp, Probe sequence
acgctgtgaagttagatagatgagt

SEQ ID NO: 113815 - DNA, 25 bp, Probe sequence
aacagttgtttgtttgtgcagcaac

SEQ ID NO: 113816 - DNA, 25 bp, Probe sequence
aaatccctctaatcgctaaagcgaa

SEQ ID NO: 113817 - DNA, 25 bp, Probe sequence
aaaggtgaagaggaacgcagttgga

SEQ ID NO: 113818 - DNA, 25 bp, Probe sequence
aaaagcctctaatcactaaaggtga

SEQ ID NO: 113819 - DNA, 25 bp, Probe sequence
ctattttcttttagtatgtggactt

SEQ ID NO: 113820 - DNA, 25 bp, Probe sequence
gctaaggcacaactgcataaatccc

SEQ ID NO: 113821 - DNA, 25 bp, Probe sequence
gttgtttgtttgtgcagcaactgca

SEQ ID NO: 113822 - DNA, 25 bp, Probe sequence
gtttgtgcagcaactgcataaaagc

SEQ ID NO: 113823 - DNA, 25 bp, Probe sequence
gtgaagaggaacgcagttggatgct

SEQ ID NO: 113824 - DNA, 25 bp, Probe sequence
ggcacaactgcataaatccctctaa

SEQ ID NO: 113825 - DNA, 25 bp, Probe sequence
tgcataaatccctctaatcgctaaa

SEQ ID NO: 113826 - DNA, 25 bp, Probe sequence
ttcttttagtatgtggacttatata

SEQ ID NO: 113827 - DNA, 25 bp, Probe sequence
attatgccccttattgctacatgta

SEQ ID NO: 113828 - DNA, 25 bp, Probe sequence
agtgaatgatagcaacgcgagtatg

SEQ ID NO: 113829 - DNA, 25 bp, Probe sequence
accattctaattatgccccttattg

SEQ ID NO: 113830 - DNA, 25 bp, Probe sequence
aatacatgtttgagataaggggttt

SEQ ID NO: 113831 - DNA, 25 bp, Probe sequence
aattatgccccttattgctacatgt

SEQ ID NO: 113832 - DNA, 25 bp, Probe sequence
cattctaattatgccccttattgct

SEQ ID NO: 113833 - DNA, 25 bp, Probe sequence
ccattctaattatgccccttattgc

SEQ ID NO: 113834 - DNA, 25 bp, Probe sequence
gccccttattgctacatgtaaaaaa

SEQ ID NO: 113835 - DNA, 25 bp, Probe sequence
tgccccttattgctacatgtaaaaa

SEQ ID NO: 113836 - DNA, 25 bp, Probe sequence
tctaattatgccccttattgctaca

SEQ ID NO: 113837 - DNA, 25 bp, Probe sequence
taattatgccccttattgctacatg

SEQ ID NO: 113838 - DNA, 25 bp, Probe sequence
tatgccccttattgctacatgtaaa

SEQ ID NO: 113839 - DNA, 25 bp, Probe sequence
tttagtgaatgatagcaacgcgagt

SEQ ID NO: 113840 - DNA, 25 bp, Probe sequence
ttatgccccttattgctacatgtaa

SEQ ID NO: 113841 - DNA, 25 bp, Probe sequence
ttctaattatgccccttattgctac

SEQ ID NO: 113842 - DNA, 25 bp, Probe sequence
attgttgtataatggttgtgagcac

SEQ ID NO: 113843 - DNA, 25 bp, Probe sequence
atatgactgttgttttagaaatgat

SEQ ID NO: 113844 - DNA, 25 bp, Probe sequence
ataattgtaatatgactgttgtttt

SEQ ID NO: 113845 - DNA, 25 bp, Probe sequence
atgactgttgttttagaaatgattg

SEQ ID NO: 113846 - DNA, 25 bp, Probe sequence
aaatgattgttgtataatggttgtg

SEQ ID NO: 113847 - DNA, 25 bp, Probe sequence
aatggttgtgagcacaagacgatat

SEQ ID NO: 113848 - DNA, 25 bp, Probe sequence
aattgtaatatgactgttgttttag

SEQ ID NO: 113849 - DNA, 25 bp, Probe sequence
gactgttgttttagaaatgattgtt

SEQ ID NO: 113850 - DNA, 25 bp, Probe sequence
gattgttgtataatggttgtgagca

SEQ ID NO: 113851 - DNA, 25 bp, Probe sequence
gttgtataatggttgtgagcacaag

SEQ ID NO: 113852 - DNA, 25 bp, Probe sequence
gtaatatgactgttgttttagaaat

SEQ ID NO: 113853 - DNA, 25 bp, Probe sequence
gtgagcacaagacgatataaataaa

SEQ ID NO: 113854 - DNA, 25 bp, Probe sequence
ggttgtgagcacaagacgatataaa

SEQ ID NO: 113855 - DNA, 25 bp, Probe sequence
ttgtgagcacaagacgatataaata

SEQ ID NO: 113856 - DNA, 25 bp, Probe sequence
ttgtaatatgactgttgttttagaa

SEQ ID NO: 113857 - DNA, 25 bp, Probe sequence
attaatcgtgcttaaccgacaagtt

SEQ ID NO: 113858 - DNA, 25 bp, Probe sequence
atacttgtcggttattttattacat

SEQ ID NO: 113859 - DNA, 25 bp, Probe sequence
atcgcaatacttgtcggttatttta

SEQ ID NO: 113860 - DNA, 25 bp, Probe sequence
aaattaatcgtgcttaaccgacaag

SEQ ID NO: 113861 - DNA, 25 bp, Probe sequence
aaatcgcaatacttgtcggttattt

SEQ ID NO: 113862 - DNA, 25 bp, Probe sequence
cttgtcggttattttattacatggc

SEQ ID NO: 113863 - DNA, 25 bp, Probe sequence
gcaatacttgtcggttattttatta

SEQ ID NO: 113864 - DNA, 25 bp, Probe sequence
gatgtttcattttaaaggagtacta

SEQ ID NO: 113865 - DNA, 25 bp, Probe sequence
gttaaatcgcaatacttgtcggtta

SEQ ID NO: 113866 - DNA, 25 bp, Probe sequence
gtcggttattttattacatggcata

SEQ ID NO: 113867 - DNA, 25 bp, Probe sequence
gtgcttaaccgacaagttaaatcgc

SEQ ID NO: 113868 - DNA, 25 bp, Probe sequence
taatttttatgatttgcgaagggga

SEQ ID NO: 113869 - DNA, 25 bp, Probe sequence
taatcgtgcttaaccgacaagttaa

SEQ ID NO: 113870 - DNA, 25 bp, Probe sequence
ttaaattaatcgtgcttaaccgaca

SEQ ID NO: 113871 - DNA, 25 bp, Probe sequence
ttacatggcataatacagtgaatat

SEQ ID NO: 113872 - DNA, 25 bp, Probe sequence
atagtttattgagggaggtgtcaca

SEQ ID NO: 113873 - DNA, 25 bp, Probe sequence
agcgtatatagaatgaaggttgggt

SEQ ID NO: 113874 - DNA, 25 bp, Probe sequence
aaaactattcacttgattaattgta

SEQ ID NO: 113875 - DNA, 25 bp, Probe sequence
aactattcacttgattaattgtatt

SEQ ID NO: 113876 - DNA, 25 bp, Probe sequence
aattgtttataaaatggaagcgtat

SEQ ID NO: 113877 - DNA, 25 bp, Probe sequence
ctattcacttgattaattgtattaa

SEQ ID NO: 113878 - DNA, 25 bp, Probe sequence
gaatgaaggttgggtatatagttta

SEQ ID NO: 113879 - DNA, 25 bp, Probe sequence
gaaggttgggtatatagtttattga

SEQ ID NO: 113880 - DNA, 25 bp, Probe sequence
gatgaatagtttttttattgttgga

SEQ ID NO: 113881 - DNA, 25 bp, Probe sequence
gataaaactattcacttgattaatt

SEQ ID NO: 113882 - DNA, 25 bp, Probe sequence
gggtatatagtttattgagggaggt

SEQ ID NO: 113883 - DNA, 25 bp, Probe sequence
ggttgggtatatagtttattgaggg

SEQ ID NO: 113884 - DNA, 25 bp, Probe sequence
ggaagcgtatatagaatgaaggttg

SEQ ID NO: 113885 - DNA, 25 bp, Probe sequence
tatgataaaactattcacttgatta

SEQ ID NO: 113886 - DNA, 25 bp, Probe sequence
tattgttggaataacttttggtaat

SEQ ID NO: 113887 - DNA, 25 bp, Probe sequence
atatactgctcgttatgcggctatc

SEQ ID NO: 113888 - DNA, 25 bp, Probe sequence
atcaaacttcaccaaattgcgctaa

SEQ ID NO: 113889 - DNA, 25 bp, Probe sequence
atcatctatcaaacttcaccaaatt

SEQ ID NO: 113890 - DNA, 25 bp, Probe sequence
atcttccttatattaagtgccatta

SEQ ID NO: 113891 - DNA, 25 bp, Probe sequence
atgtatcatctatcaaacttcacca

SEQ ID NO: 113892 - DNA, 25 bp, Probe sequence
atgtgatatataaacctagggcata

SEQ ID NO: 113893 - DNA, 25 bp, Probe sequence
acttcaccaaattgcgctaaacaaa

SEQ ID NO: 113894 - DNA, 25 bp, Probe sequence
aaagctgattactattcattatttg

SEQ ID NO: 113895 - DNA, 25 bp, Probe sequence
gcggctatcttccttatattaagtg

SEQ ID NO: 113896 - DNA, 25 bp, Probe sequence
gaaatcagctttttttgaaatgtat

SEQ ID NO: 113897 - DNA, 25 bp, Probe sequence
gatatatactgctcgttatgcggct

SEQ ID NO: 113898 - DNA, 25 bp, Probe sequence
gtgccattagtgcaaaacctcttaa

SEQ ID NO: 113899 - DNA, 25 bp, Probe sequence
tagggcataaagtccttaggcaatg

SEQ ID NO: 113900 - DNA, 25 bp, Probe sequence
tagtgcaaaacctcttaacaattag

SEQ ID NO: 113901 - DNA, 25 bp, Probe sequence
ttatgcggctatcttccttatatta

SEQ ID NO: 113902 - DNA, 25 bp, Probe sequence
atttgatgcatcttgctcgatacat

SEQ ID NO: 113903 - DNA, 25 bp, Probe sequence
atcttgctcgatacatttgcccgat

SEQ ID NO: 113904 - DNA, 25 bp, Probe sequence
aaaacctccctatttgatgcatctt

SEQ ID NO: 113905 - DNA, 25 bp, Probe sequence
catttgcccgataatatattgatat

SEQ ID NO: 113906 - DNA, 25 bp, Probe sequence
cttgctcgatacatttgcccgataa

SEQ ID NO: 113907 - DNA, 25 bp, Probe sequence
ctccctatttgatgcatcttgctcg

SEQ ID NO: 113908 - DNA, 25 bp, Probe sequence
ccctatttgatgcatcttgctcgat

SEQ ID NO: 113909 - DNA, 25 bp, Probe sequence
gctcgatacatttgcccgataatat

SEQ ID NO: 113910 - DNA, 25 bp, Probe sequence
gcatcttgctcgatacatttgcccg

SEQ ID NO: 113911 - DNA, 25 bp, Probe sequence
gatgcatcttgctcgatacatttgc

SEQ ID NO: 113912 - DNA, 25 bp, Probe sequence
gatacatttgcccgataatatattg

SEQ ID NO: 113913 - DNA, 25 bp, Probe sequence
gtttaaaacctccctatttgatgca

SEQ ID NO: 113914 - DNA, 25 bp, Probe sequence
tatatttaatgctctattatttagt

SEQ ID NO: 113915 - DNA, 25 bp, Probe sequence
tattgatatctaatctttatttatt

SEQ ID NO: 113916 - DNA, 25 bp, Probe sequence
ttagtcataattttgcattaaataa

SEQ ID NO: 113917 - DNA, 25 bp, Probe sequence
atttagtaattctcagtgcagtttt

SEQ ID NO: 113918 - DNA, 25 bp, Probe sequence
acccatttttcagaattttatcact

SEQ ID NO: 113919 - DNA, 25 bp, Probe sequence
aaaaccaatctatagcacgttaaag

SEQ ID NO: 113920 - DNA, 25 bp, Probe sequence
aacttcttctactatttatacccat

SEQ ID NO: 113921 - DNA, 25 bp, Probe sequence
aagtgtatatacgttattccgattg

SEQ ID NO: 113922 - DNA, 25 bp, Probe sequence
ctttgttatagcttaactcttccaa

SEQ ID NO: 113923 - DNA, 25 bp, Probe sequence
ctcttccaagttaacttcttctact

SEQ ID NO: 113924 - DNA, 25 bp, Probe sequence
gcacttttatttttcaaactcgact

SEQ ID NO: 113925 - DNA, 25 bp, Probe sequence
gttgtgcattttgacttatttttaa

SEQ ID NO: 113926 - DNA, 25 bp, Probe sequence
gtttcgatattcaatgtgtgtctaa

SEQ ID NO: 113927 - DNA, 25 bp, Probe sequence
ttattccgattgataacgggtaaca

SEQ ID NO: 113928 - DNA, 25 bp, Probe sequence
tgatcatgcattaaagcacttttat

SEQ ID NO: 113929 - DNA, 25 bp, Probe sequence
tactatttatacccatttttcagaa

SEQ ID NO: 113930 - DNA, 25 bp, Probe sequence
taccttaatttaatcgccaatacaa

SEQ ID NO: 113931 - DNA, 25 bp, Probe sequence
ttagcgcaattaaatgtttcgatat

SEQ ID NO: 113932 - DNA, 25 bp, Probe sequence
ataacaaaatcaccctagacaatca

SEQ ID NO: 113933 - DNA, 25 bp, Probe sequence
atcataacaaaatcaccctagacaa

SEQ ID NO: 113934 - DNA, 25 bp, Probe sequence
agtctagggtgttagtatttatact

SEQ ID NO: 113935 - DNA, 25 bp, Probe sequence
aaatcaccctagacaatcatgatga

SEQ ID NO: 113936 - DNA, 25 bp, Probe sequence
aacaaaatcaccctagacaatcatg

SEQ ID NO: 113937 - DNA, 25 bp, Probe sequence
aatcatgatgaaagtctagggtgtt

SEQ ID NO: 113938 - DNA, 25 bp, Probe sequence
gaataaagtctcactttccaaagtt

SEQ ID NO: 113939 - DNA, 25 bp, Probe sequence
gaaaaaaacaggacattatcataac

SEQ ID NO: 113940 - DNA, 25 bp, Probe sequence
gaaagtctagggtgttagtatttat

SEQ ID NO: 113941 - DNA, 25 bp, Probe sequence
gagaaaatatacaactcatttacaa

SEQ ID NO: 113942 - DNA, 25 bp, Probe sequence
tgaatacattatcattatagagaaa

SEQ ID NO: 113943 - DNA, 25 bp, Probe sequence
tcaccctagacaatcatgatgaaag

SEQ ID NO: 113944 - DNA, 25 bp, Probe sequence
tatacaactcatttacaataatgtt

SEQ ID NO: 113945 - DNA, 25 bp, Probe sequence
tatttatactaaattaattgcgctt

SEQ ID NO: 113946 - DNA, 25 bp, Probe sequence
ttatcataacaaaatcaccctagac

SEQ ID NO: 113947 - DNA, 25 bp, Probe sequence
agacacttaaagcaaggggaggttg

SEQ ID NO: 113948 - DNA, 25 bp, Probe sequence
acctcctttcacactatatatcgaa

SEQ ID NO: 113949 - DNA, 25 bp, Probe sequence
cacttaaagcaaggggaggttgagt

SEQ ID NO: 113950 - DNA, 25 bp, Probe sequence
aaatagctatgattaagacacttaa

SEQ ID NO: 113951 - DNA, 25 bp, Probe sequence
aaaggcaatagatatatgtaactaa

SEQ ID NO: 113952 - DNA, 25 bp, Probe sequence
aaacctcctttcacactatatatcg

SEQ ID NO: 113953 - DNA, 25 bp, Probe sequence
aacctcctttcacactatatatcga

SEQ ID NO: 113954 - DNA, 25 bp, Probe sequence
aatggctaattttattttctatgtt

SEQ ID NO: 113955 - DNA, 25 bp, Probe sequence
ctcctttcacactatatatcgaaat

SEQ ID NO: 113956 - DNA, 25 bp, Probe sequence
cctcctttcacactatatatcgaaa

SEQ ID NO: 113957 - DNA, 25 bp, Probe sequence
cctttcacactatatatcgaaataa

SEQ ID NO: 113958 - DNA, 25 bp, Probe sequence
tggctaattttattttctatgttta

SEQ ID NO: 113959 - DNA, 25 bp, Probe sequence
taaaacctcctttcacactatatat

SEQ ID NO: 113960 - DNA, 25 bp, Probe sequence
tttaaaacctcctttcacactatat

SEQ ID NO: 113961 - DNA, 25 bp, Probe sequence
ttaaaacctcctttcacactatata

SEQ ID NO: 113962 - DNA, 25 bp, Probe sequence
atatatctatattaaagtgcttttg

SEQ ID NO: 113963 - DNA, 25 bp, Probe sequence
agtgttggctaaattgttaagcata

SEQ ID NO: 113964 - DNA, 25 bp, Probe sequence
acaatgcttttgaaaatctgttttc

SEQ ID NO: 113965 - DNA, 25 bp, Probe sequence
aaagtgcttttgtggtcgctaactc

SEQ ID NO: 113966 - DNA, 25 bp, Probe sequence
aactcaatttatcctctaaagtata

SEQ ID NO: 113967 - DNA, 25 bp, Probe sequence
caacgagatgtgatacttaattttc

SEQ ID NO: 113968 - DNA, 25 bp, Probe sequence
gcttttgtggtcgctaactcaattt

SEQ ID NO: 113969 - DNA, 25 bp, Probe sequence
gagtactttgaaattggttagtcga

SEQ ID NO: 113970 - DNA, 25 bp, Probe sequence
gtactgcaatcgtagacatatatct

SEQ ID NO: 113971 - DNA, 25 bp, Probe sequence
gtcgattttaaggtgctcatttttt

SEQ ID NO: 113972 - DNA, 25 bp, Probe sequence
gtcgctaactcaatttatcctctaa

SEQ ID NO: 113973 - DNA, 25 bp, Probe sequence
gtgaaagcaagttgtttatttatac

SEQ ID NO: 113974 - DNA, 25 bp, Probe sequence
ggttagtcgattttaaggtgctcat

SEQ ID NO: 113975 - DNA, 25 bp, Probe sequence
tggtcgctaactcaatttatcctct

SEQ ID NO: 113976 - DNA, 25 bp, Probe sequence
taaggtgctcattttttgtattata

SEQ ID NO: 113977 - DNA, 25 bp, Probe sequence
acataagaacctctaacttcgttag

SEQ ID NO: 113978 - DNA, 25 bp, Probe sequence
catatcgtgcgatcgggaacggtat

SEQ ID NO: 113979 - DNA, 25 bp, Probe sequence
gccacactcatatgacatcggatga

SEQ ID NO: 113980 - DNA, 25 bp, Probe sequence
gcatcaacatcaattcatcttactt

SEQ ID NO: 113981 - DNA, 25 bp, Probe sequence
gcacatagcttttaatattccgttc

SEQ ID NO: 113982 - DNA, 25 bp, Probe sequence
gaagttctaataccaccatatcgtg

SEQ ID NO: 113983 - DNA, 25 bp, Probe sequence
gaagcagctgttcgcagtttaatca

SEQ ID NO: 113984 - DNA, 25 bp, Probe sequence
gaacttctaacgcatctctgtggtt

SEQ ID NO: 113985 - DNA, 25 bp, Probe sequence
gagtgtggcttaaggatctatgggg

SEQ ID NO: 113986 - DNA, 25 bp, Probe sequence
gatgtttactttgataggccagatt

SEQ ID NO: 113987 - DNA, 25 bp, Probe sequence
gggcttttcatcaatcccttttatt

SEQ ID NO: 113988 - DNA, 25 bp, Probe sequence
gggagaacagttgtccaatcacata

SEQ ID NO: 113989 - DNA, 25 bp, Probe sequence
ggactattagccttcgactttgtta

SEQ ID NO: 113990 - DNA, 25 bp, Probe sequence
tagtacttttaaccagctatgctaa

SEQ ID NO: 113991 - DNA, 25 bp, Probe sequence
ttgacgcgcgtgaatctcttttata

SEQ ID NO: 113992 - DNA, 25 bp, Probe sequence
atatagacaatgtatgtgaggtgaa

SEQ ID NO: 113993 - DNA, 25 bp, Probe sequence
atgtcaagtaaattcgtgatataat

SEQ ID NO: 113994 - DNA, 25 bp, Probe sequence
aggctaacctaattaattgtataat

SEQ ID NO: 113995 - DNA, 25 bp, Probe sequence
agtaaattcgtgatataatatagac

SEQ ID NO: 113996 - DNA, 25 bp, Probe sequence
actgagaatatttatcatgtcaagt

SEQ ID NO: 113997 - DNA, 25 bp, Probe sequence
aaactgagaatatttatcatgtcaa

SEQ ID NO: 113998 - DNA, 25 bp, Probe sequence
aactgagaatatttatcatgtcaag

SEQ ID NO: 113999 - DNA, 25 bp, Probe sequence
ctgagaatatttatcatgtcaagta

SEQ ID NO: 114000 - DNA, 25 bp, Probe sequence
gagaatatttatcatgtcaagtaaa

SEQ ID NO: 114001 - DNA, 25 bp, Probe sequence
ggctaacctaattaattgtataata

SEQ ID NO: 114002 - DNA, 25 bp, Probe sequence
tcatgtcaagtaaattcgtgatata

SEQ ID NO: 114003 - DNA, 25 bp, Probe sequence
tagacaatgtatgtgaggtgaaagt

SEQ ID NO: 114004 - DNA, 25 bp, Probe sequence
taggctaacctaattaattgtataa

SEQ ID NO: 114005 - DNA, 25 bp, Probe sequence
tttatcatgtcaagtaaattcgtga

SEQ ID NO: 114006 - DNA, 25 bp, Probe sequence
ttatcatgtcaagtaaattcgtgat

SEQ ID NO: 114007 - DNA, 25 bp, Probe sequence
atatggataattgctttaggcttct

SEQ ID NO: 114008 - DNA, 25 bp, Probe sequence
atggataattgctttaggcttcttt

SEQ ID NO: 114009 - DNA, 25 bp, Probe sequence
aagaagccataaagatatccatgat

SEQ ID NO: 114010 - DNA, 25 bp, Probe sequence
catatggataattgctttaggcttc

SEQ ID NO: 114011 - DNA, 25 bp, Probe sequence
gccataaagatatccatgattgaac

SEQ ID NO: 114012 - DNA, 25 bp, Probe sequence
gaagccataaagatatccatgattg

SEQ ID NO: 114013 - DNA, 25 bp, Probe sequence
gacatatggataattgctttaggct

SEQ ID NO: 114014 - DNA, 25 bp, Probe sequence
gataattgctttaggcttctttttt

SEQ ID NO: 114015 - DNA, 25 bp, Probe sequence
gattgaactgataaagacatatgga

SEQ ID NO: 114016 - DNA, 25 bp, Probe sequence
ggataattgctttaggcttcttttt

SEQ ID NO: 114017 - DNA, 25 bp, Probe sequence
tggataattgctttaggcttctttt

SEQ ID NO: 114018 - DNA, 25 bp, Probe sequence
taattgctttaggcttcttttttat

SEQ ID NO: 114019 - DNA, 25 bp, Probe sequence
taaagatatccatgattgaactgat

SEQ ID NO: 114020 - DNA, 25 bp, Probe sequence
tatggataattgctttaggcttctt

SEQ ID NO: 114021 - DNA, 25 bp, Probe sequence
ttgctttaggcttcttttttattag

SEQ ID NO: 114022 - DNA, 25 bp, Probe sequence
attggcatcaatagcgttagacttt

SEQ ID NO: 114023 - DNA, 25 bp, Probe sequence
attaatttaaagtttgcttagcact

SEQ ID NO: 114024 - DNA, 25 bp, Probe sequence
atagcgttagactttagacttacct

SEQ ID NO: 114025 - DNA, 25 bp, Probe sequence
aaagcaaaatcatttcgatataaat

SEQ ID NO: 114026 - DNA, 25 bp, Probe sequence
aatgaaataagataggagattcctg

SEQ ID NO: 114027 - DNA, 25 bp, Probe sequence
aatactgttaatattgattacacta

SEQ ID NO: 114028 - DNA, 25 bp, Probe sequence
gcgttagactttagacttaccttag

SEQ ID NO: 114029 - DNA, 25 bp, Probe sequence
gcatcaatagcgttagactttagac

SEQ ID NO: 114030 - DNA, 25 bp, Probe sequence
gcacttattataaatgatattggca

SEQ ID NO: 114031 - DNA, 25 bp, Probe sequence
gttaacctcatataagatattaatt

SEQ ID NO: 114032 - DNA, 25 bp, Probe sequence
gtttgcttagcacttattataaatg

SEQ ID NO: 114033 - DNA, 25 bp, Probe sequence
tggcatcaatagcgttagactttag

SEQ ID NO: 114034 - DNA, 25 bp, Probe sequence
tgaaaaggtgaatatgtgttaaaat

SEQ ID NO: 114035 - DNA, 25 bp, Probe sequence
taatattgattacactaacataata

SEQ ID NO: 114036 - DNA, 25 bp, Probe sequence
tagcgttagactttagacttacctt

SEQ ID NO: 114037 - DNA, 25 bp, Probe sequence
atccttaaatggagattctcggttt

SEQ ID NO: 114038 - DNA, 25 bp, Probe sequence
atgatgataaaaataaaaccgagga

SEQ ID NO: 114039 - DNA, 25 bp, Probe sequence
aggaaatccttaaatggagattctc

SEQ ID NO: 114040 - DNA, 25 bp, Probe sequence
accgaggaaatccttaaatggagat

SEQ ID NO: 114041 - DNA, 25 bp, Probe sequence
aaatccttaaatggagattctcggt

SEQ ID NO: 114042 - DNA, 25 bp, Probe sequence
aatccttaaatggagattctcggtt

SEQ ID NO: 114043 - DNA, 25 bp, Probe sequence
catgatgataaaaataaaaccgagg

SEQ ID NO: 114044 - DNA, 25 bp, Probe sequence
cgaggaaatccttaaatggagattc

SEQ ID NO: 114045 - DNA, 25 bp, Probe sequence
ccgaggaaatccttaaatggagatt

SEQ ID NO: 114046 - DNA, 25 bp, Probe sequence
gaaatccttaaatggagattctcgg

SEQ ID NO: 114047 - DNA, 25 bp, Probe sequence
gaggaaatccttaaatggagattct

SEQ ID NO: 114048 - DNA, 25 bp, Probe sequence
ggaaatccttaaatggagattctcg

SEQ ID NO: 114049 - DNA, 25 bp, Probe sequence
tgatgataaaaataaaaccgaggaa

SEQ ID NO: 114050 - DNA, 25 bp, Probe sequence
tccttaaatggagattctcggtttt

SEQ ID NO: 114051 - DNA, 25 bp, Probe sequence
taaatggagattctcggttttttcg

SEQ ID NO: 114052 - DNA, 25 bp, Probe sequence
attatcagagttggtgttttgacac

SEQ ID NO: 114053 - DNA, 25 bp, Probe sequence
ataatatactactcaacagttgtta

SEQ ID NO: 114054 - DNA, 25 bp, Probe sequence
acttatttcaacttacatgattgta

SEQ ID NO: 114055 - DNA, 25 bp, Probe sequence
aaacctgttgtaaagtgtatagaag

SEQ ID NO: 114056 - DNA, 25 bp, Probe sequence
aactaaacttatttcaacttacatg

SEQ ID NO: 114057 - DNA, 25 bp, Probe sequence
ccttccttattcacatttatctaga

SEQ ID NO: 114058 - DNA, 25 bp, Probe sequence
ccttattcacatttatctagattat

SEQ ID NO: 114059 - DNA, 25 bp, Probe sequence
gaagattttgttattatcagagttg

SEQ ID NO: 114060 - DNA, 25 bp, Probe sequence
gacaataattttgatagcatccatg

SEQ ID NO: 114061 - DNA, 25 bp, Probe sequence
gaccttccttattcacatttatcta

SEQ ID NO: 114062 - DNA, 25 bp, Probe sequence
gatagcatccatgtatagtgatagt

SEQ ID NO: 114063 - DNA, 25 bp, Probe sequence
gatagtatttacaacaattattata

SEQ ID NO: 114064 - DNA, 25 bp, Probe sequence
gttttgacacaaaatgttaatcatc

SEQ ID NO: 114065 - DNA, 25 bp, Probe sequence
gtagaccttccttattcacatttat

SEQ ID NO: 114066 - DNA, 25 bp, Probe sequence
ttgtagaccttccttattcacattt

SEQ ID NO: 114067 - DNA, 25 bp, Probe sequence
ataaactgcaatcctatgatgtgac

SEQ ID NO: 114068 - DNA, 25 bp, Probe sequence
atgaccataaactgcaatcctatga

SEQ ID NO: 114069 - DNA, 25 bp, Probe sequence
actgcaatcctatgatgtgacaata

SEQ ID NO: 114070 - DNA, 25 bp, Probe sequence
aaactgcaatcctatgatgtgacaa

SEQ ID NO: 114071 - DNA, 25 bp, Probe sequence
aactgcaatcctatgatgtgacaat

SEQ ID NO: 114072 - DNA, 25 bp, Probe sequence
aatcctatgatgtgacaatatgagg

SEQ ID NO: 114073 - DNA, 25 bp, Probe sequence
gcaatcctatgatgtgacaatatga

SEQ ID NO: 114074 - DNA, 25 bp, Probe sequence
gaccataaactgcaatcctatgatg

SEQ ID NO: 114075 - DNA, 25 bp, Probe sequence
gatgtgacaatatgaggaggataac

SEQ ID NO: 114076 - DNA, 25 bp, Probe sequence
gatgaccataaactgcaatcctatg

SEQ ID NO: 114077 - DNA, 25 bp, Probe sequence
gtgacaatatgaggaggataactta

SEQ ID NO: 114078 - DNA, 25 bp, Probe sequence
gtgtatattgatgaccataaactgc

SEQ ID NO: 114079 - DNA, 25 bp, Probe sequence
tgatgaccataaactgcaatcctat

SEQ ID NO: 114080 - DNA, 25 bp, Probe sequence
taaactgcaatcctatgatgtgaca

SEQ ID NO: 114081 - DNA, 25 bp, Probe sequence
ttgatgaccataaactgcaatccta

SEQ ID NO: 114082 - DNA, 25 bp, Probe sequence
aatgtgcaacttgtccgtttttagt

SEQ ID NO: 114083 - DNA, 25 bp, Probe sequence
atgtgcaacttgtccgtttttagta

SEQ ID NO: 114084 - DNA, 25 bp, Probe sequence
aacggacaagtttcgcagctttata

SEQ ID NO: 114085 - DNA, 25 bp, Probe sequence
cagctttataatgtgcaacttgtcc

SEQ ID NO: 114086 - DNA, 25 bp, Probe sequence
cggacaagtttcgcagctttataat

SEQ ID NO: 114087 - DNA, 25 bp, Probe sequence
gctttataatgtgcaacttgtccgt

SEQ ID NO: 114088 - DNA, 25 bp, Probe sequence
gcaacttgtccgtttttagtatgtt

SEQ ID NO: 114089 - DNA, 25 bp, Probe sequence
gacaagtttcgcagctttataatgt

SEQ ID NO: 114090 - DNA, 25 bp, Probe sequence
gtttcgcagctttataatgtgcaac

SEQ ID NO: 114091 - DNA, 25 bp, Probe sequence
gtgcaacttgtccgtttttagtatg

SEQ ID NO: 114092 - DNA, 25 bp, Probe sequence
taatgtgcaacttgtccgtttttag

SEQ ID NO: 114093 - DNA, 25 bp, Probe sequence
taaaacggacaagtttcgcagcttt

SEQ ID NO: 114094 - DNA, 25 bp, Probe sequence
tatatagaactatcgatactaaacg

SEQ ID NO: 114095 - DNA, 25 bp, Probe sequence
tataatgtgcaacttgtccgttttt

SEQ ID NO: 114096 - DNA, 25 bp, Probe sequence
ttcgcagctttataatgtgcaactt

SEQ ID NO: 114097 - DNA, 25 bp, Probe sequence
attcacttcaccttaattaaattgt

SEQ ID NO: 114098 - DNA, 25 bp, Probe sequence
ataaagttttctgcagttaatttga

SEQ ID NO: 114099 - DNA, 25 bp, Probe sequence
atcattgctaattcacttcacctta

SEQ ID NO: 114100 - DNA, 25 bp, Probe sequence
aagcaatggttattcctacttacgg

SEQ ID NO: 114101 - DNA, 25 bp, Probe sequence
aaggtgttataatgtttgtacgaag

SEQ ID NO: 114102 - DNA, 25 bp, Probe sequence
aatgttatgagcggtattttggggc

SEQ ID NO: 114103 - DNA, 25 bp, Probe sequence
aatgcaaatatattacgtgtgtagc

SEQ ID NO: 114104 - DNA, 25 bp, Probe sequence
gcaaacttactcaaaagcgattaat

SEQ ID NO: 114105 - DNA, 25 bp, Probe sequence
gaaatgcatgtatctatctaaatga

SEQ ID NO: 114106 - DNA, 25 bp, Probe sequence
gagcggtattttggggcaacacttt

SEQ ID NO: 114107 - DNA, 25 bp, Probe sequence
tggggcaacactttatttgattttt

SEQ ID NO: 114108 - DNA, 25 bp, Probe sequence
tcctacttacggaaatcattgctaa

SEQ ID NO: 114109 - DNA, 25 bp, Probe sequence
taaatattccctaaaagcaatggtt

SEQ ID NO: 114110 - DNA, 25 bp, Probe sequence
ttgtacgaagagcaaacttactcaa

SEQ ID NO: 114111 - DNA, 25 bp, Probe sequence
ttacgtgtgtagctaaaggtgttat

SEQ ID NO: 114112 - DNA, 25 bp, Probe sequence
atcgaggaaattaaagtgtggcaca

SEQ ID NO: 114113 - DNA, 25 bp, Probe sequence
agcttggagcaaatacacatatacc

SEQ ID NO: 114114 - DNA, 25 bp, Probe sequence
agcaaatacacatataccatcgagg

SEQ ID NO: 114115 - DNA, 25 bp, Probe sequence
acacatataccatcgaggaaattaa

SEQ ID NO: 114116 - DNA, 25 bp, Probe sequence
aaatacacatataccatcgaggaaa

SEQ ID NO: 114117 - DNA, 25 bp, Probe sequence
aatacacatataccatcgaggaaat

SEQ ID NO: 114118 - DNA, 25 bp, Probe sequence
caaatacacatataccatcgaggaa

SEQ ID NO: 114119 - DNA, 25 bp, Probe sequence
gcaaatacacatataccatcgagga

SEQ ID NO: 114120 - DNA, 25 bp, Probe sequence
gagcaaatacacatataccatcgag

SEQ ID NO: 114121 - DNA, 25 bp, Probe sequence
gaggaaattaaagtgtggcacattg

SEQ ID NO: 114122 - DNA, 25 bp, Probe sequence
gtaagcttggagcaaatacacatat

SEQ ID NO: 114123 - DNA, 25 bp, Probe sequence
ggagcaaatacacatataccatcga

SEQ ID NO: 114124 - DNA, 25 bp, Probe sequence
tcgaggaaattaaagtgtggcacat

SEQ ID NO: 114125 - DNA, 25 bp, Probe sequence
tacacatataccatcgaggaaatta

SEQ ID NO: 114126 - DNA, 25 bp, Probe sequence
tatatataagtaagcttggagcaaa

SEQ ID NO: 114127 - DNA, 25 bp, Probe sequence
attaaatactgtagccacgagtcat

SEQ ID NO: 114128 - DNA, 25 bp, Probe sequence
acaagttataagcaaacatacatat

SEQ ID NO: 114129 - DNA, 25 bp, Probe sequence
aaattaaatcataggtgggtgctaa

SEQ ID NO: 114130 - DNA, 25 bp, Probe sequence
aaaaatgctcatggtataatacaag

SEQ ID NO: 114131 - DNA, 25 bp, Probe sequence
aactgattttagagtccacggtaca

SEQ ID NO: 114132 - DNA, 25 bp, Probe sequence
aatactgtagccacgagtcataatt

SEQ ID NO: 114133 - DNA, 25 bp, Probe sequence
aattcttcatattttacatagcaat

SEQ ID NO: 114134 - DNA, 25 bp, Probe sequence
gccacgagtcataattcttcatatt

SEQ ID NO: 114135 - DNA, 25 bp, Probe sequence
gaagtttgatatttcaatgtttcta

SEQ ID NO: 114136 - DNA, 25 bp, Probe sequence
gagtcataattcttcatattttaca

SEQ ID NO: 114137 - DNA, 25 bp, Probe sequence
gatatttcaatgtttctaaattttt

SEQ ID NO: 114138 - DNA, 25 bp, Probe sequence
gtagccacgagtcataattcttcat

SEQ ID NO: 114139 - DNA, 25 bp, Probe sequence
gtccacggtacagaagtttgatatt

SEQ ID NO: 114140 - DNA, 25 bp, Probe sequence
tacatagcaatttaactgattttag

SEQ ID NO: 114141 - DNA, 25 bp, Probe sequence
tagagtccacggtacagaagtttga

SEQ ID NO: 114142 - DNA, 25 bp, Probe sequence
atgtccaggcatgtcgtctattgat

SEQ ID NO: 114143 - DNA, 25 bp, Probe sequence
ccaggcatgtcgtctattgatatag

SEQ ID NO: 114144 - DNA, 25 bp, Probe sequence
gcattataaaaaccaagtgcacatg

SEQ ID NO: 114145 - DNA, 25 bp, Probe sequence
gaagagtgactatgataatacattt

SEQ ID NO: 114146 - DNA, 25 bp, Probe sequence
gatataggtgagatgcttggacttt

SEQ ID NO: 114147 - DNA, 25 bp, Probe sequence
gtacatatgacagtaaggactaggt

SEQ ID NO: 114148 - DNA, 25 bp, Probe sequence
gtgcacatggtaatacacttggctt

SEQ ID NO: 114149 - DNA, 25 bp, Probe sequence
ggtgagatgcttggacttttttatt

SEQ ID NO: 114150 - DNA, 25 bp, Probe sequence
ggtaatacacttggcttttatggga

SEQ ID NO: 114151 - DNA, 25 bp, Probe sequence
ggactaggtacagtcatagtacttc

SEQ ID NO: 114152 - DNA, 25 bp, Probe sequence
tgcttggacttttttattattgata

SEQ ID NO: 114153 - DNA, 25 bp, Probe sequence
taaatatgtccaggcatgtcgtcta

SEQ ID NO: 114154 - DNA, 25 bp, Probe sequence
tacacttggcttttatgggaaatga

SEQ ID NO: 114155 - DNA, 25 bp, Probe sequence
tacagtcatagtacttcgagcaaaa

SEQ ID NO: 114156 - DNA, 25 bp, Probe sequence
ttaaagttaccgaaattgaagcatt

SEQ ID NO: 114157 - DNA, 25 bp, Probe sequence
attgtgagtgatatttattagggaa

SEQ ID NO: 114158 - DNA, 25 bp, Probe sequence
attagggaaagctattcttcatata

SEQ ID NO: 114159 - DNA, 25 bp, Probe sequence
aaatctttgttagaactctttccat

SEQ ID NO: 114160 - DNA, 25 bp, Probe sequence
aagctattcttcatataaattagtt

SEQ ID NO: 114161 - DNA, 25 bp, Probe sequence
catttttgttgtgctactattttta

SEQ ID NO: 114162 - DNA, 25 bp, Probe sequence
gacagcatttttgttgtgctactat

SEQ ID NO: 114163 - DNA, 25 bp, Probe sequence
gagttgtgacagcatttttgttgtg

SEQ ID NO: 114164 - DNA, 25 bp, Probe sequence
gttgtgctactatttttatagtcta

SEQ ID NO: 114165 - DNA, 25 bp, Probe sequence
gtgctactatttttatagtctaata

SEQ ID NO: 114166 - DNA, 25 bp, Probe sequence
gtgacagcatttttgttgtgctact

SEQ ID NO: 114167 - DNA, 25 bp, Probe sequence
gggaaagctattcttcatataaatt

SEQ ID NO: 114168 - DNA, 25 bp, Probe sequence
tccatagagttgtgacagcattttt

SEQ ID NO: 114169 - DNA, 25 bp, Probe sequence
tctttccatagagttgtgacagcat

SEQ ID NO: 114170 - DNA, 25 bp, Probe sequence
tctttgttagaactctttccataga

SEQ ID NO: 114171 - DNA, 25 bp, Probe sequence
tttttgttgtgctactatttttata

SEQ ID NO: 114172 - DNA, 25 bp, Probe sequence
atcaattgggatgcctttgaaaatt

SEQ ID NO: 114173 - DNA, 25 bp, Probe sequence
atcgagctatccaatttaaaaagta

SEQ ID NO: 114174 - DNA, 25 bp, Probe sequence
atgagcacacatacttaaatagaag

SEQ ID NO: 114175 - DNA, 25 bp, Probe sequence
aagacatgacaaatcgagctatcca

SEQ ID NO: 114176 - DNA, 25 bp, Probe sequence
aatcattatcaattgggatgccttt

SEQ ID NO: 114177 - DNA, 25 bp, Probe sequence
catacttaaatagaagtccacggac

SEQ ID NO: 114178 - DNA, 25 bp, Probe sequence
gaagacttatctgtgggcgtttttt

SEQ ID NO: 114179 - DNA, 25 bp, Probe sequence
gaactatgaagacttatctgtgggc

SEQ ID NO: 114180 - DNA, 25 bp, Probe sequence
gacaaatcgagctatccaatttaaa

SEQ ID NO: 114181 - DNA, 25 bp, Probe sequence
gacatgacaaatcgagctatccaat

SEQ ID NO: 114182 - DNA, 25 bp, Probe sequence
gacttatctgtgggcgttttttatt

SEQ ID NO: 114183 - DNA, 25 bp, Probe sequence
gatgcctttgaaaattgataattta

SEQ ID NO: 114184 - DNA, 25 bp, Probe sequence
gttataatgatgttcatgataatca

SEQ ID NO: 114185 - DNA, 25 bp, Probe sequence
gtccacggacaagtttttgaactat

SEQ ID NO: 114186 - DNA, 25 bp, Probe sequence
taaatggtatgagcacacatactta

SEQ ID NO: 114187 - DNA, 25 bp, Probe sequence
attttttatttaatgagccactcaa

SEQ ID NO: 114188 - DNA, 25 bp, Probe sequence
atgagccactcaagactatttattt

SEQ ID NO: 114189 - DNA, 25 bp, Probe sequence
aggttaattctttatgatagcgcat

SEQ ID NO: 114190 - DNA, 25 bp, Probe sequence
agcgcattcatttattctgttttat

SEQ ID NO: 114191 - DNA, 25 bp, Probe sequence
actcaagactatttattttttcaat

SEQ ID NO: 114192 - DNA, 25 bp, Probe sequence
aacttattgctatgaaaggcacttt

SEQ ID NO: 114193 - DNA, 25 bp, Probe sequence
aacggtatcaggttaattctttatg

SEQ ID NO: 114194 - DNA, 25 bp, Probe sequence
ctatgactgataataccaaggaggt

SEQ ID NO: 114195 - DNA, 25 bp, Probe sequence
gccactcaagactatttattttttc

SEQ ID NO: 114196 - DNA, 25 bp, Probe sequence
gaaccattaagttatcaagaggatc

SEQ ID NO: 114197 - DNA, 25 bp, Probe sequence
gatagcgcattcatttattctgttt

SEQ ID NO: 114198 - DNA, 25 bp, Probe sequence
gtcaaaggacacaacttattgctat

SEQ ID NO: 114199 - DNA, 25 bp, Probe sequence
ggcactttattataaggcttttcat

SEQ ID NO: 114200 - DNA, 25 bp, Probe sequence
taaggcttttcatagcattttttat

SEQ ID NO: 114201 - DNA, 25 bp, Probe sequence
tattctgttttatactatgactgat

SEQ ID NO: 114202 - DNA, 25 bp, Probe sequence
agtacgttataatgcacactgtgca

SEQ ID NO: 114203 - DNA, 25 bp, Probe sequence
actaacgaagtatacttgtgtgcac

SEQ ID NO: 114204 - DNA, 25 bp, Probe sequence
aaattaaggaggtctattattcaca

SEQ ID NO: 114205 - DNA, 25 bp, Probe sequence
aaccttgttaactgagagattttga

SEQ ID NO: 114206 - DNA, 25 bp, Probe sequence
caaaagttcgtatgactgcattata

SEQ ID NO: 114207 - DNA, 25 bp, Probe sequence
gcgacttgcaattaattttcagtac

SEQ ID NO: 114208 - DNA, 25 bp, Probe sequence
gcacactgtgcaaaattaaggaggt

SEQ ID NO: 114209 - DNA, 25 bp, Probe sequence
gaaaaataacctatgcgacttgcaa

SEQ ID NO: 114210 - DNA, 25 bp, Probe sequence
gagattttgatatgtattcttcgaa

SEQ ID NO: 114211 - DNA, 25 bp, Probe sequence
gggttgggacatatgttccagcctt

SEQ ID NO: 114212 - DNA, 25 bp, Probe sequence
ggacatatgttccagccttttttaa

SEQ ID NO: 114213 - DNA, 25 bp, Probe sequence
taattaatcaattttcctatacaaa

SEQ ID NO: 114214 - DNA, 25 bp, Probe sequence
tatggtttaaaccttgttaactgag

SEQ ID NO: 114215 - DNA, 25 bp, Probe sequence
ttaacatttggttgggttgggacat

SEQ ID NO: 114216 - DNA, 25 bp, Probe sequence
ttgtgtgcacaaatggtttttatac

SEQ ID NO: 114217 - DNA, 25 bp, Probe sequence
atcatatgatggatatccgaaactt

SEQ ID NO: 114218 - DNA, 25 bp, Probe sequence
atccgaaactttacaattgaatcac

SEQ ID NO: 114219 - DNA, 25 bp, Probe sequence
aaagcaattcgtctctactcttatc

SEQ ID NO: 114220 - DNA, 25 bp, Probe sequence
caattgaatcactttgttttaacct

SEQ ID NO: 114221 - DNA, 25 bp, Probe sequence
cttaaaagcaattcgtctctactct

SEQ ID NO: 114222 - DNA, 25 bp, Probe sequence
gctttttatatttattcagtctatt

SEQ ID NO: 114223 - DNA, 25 bp, Probe sequence
gagcgtctaacaaatagagaggtac

SEQ ID NO: 114224 - DNA, 25 bp, Probe sequence
gatggatatccgaaactttacaatt

SEQ ID NO: 114225 - DNA, 25 bp, Probe sequence
gggcgaattgctttttatatttatt

SEQ ID NO: 114226 - DNA, 25 bp, Probe sequence
ttcgtctctactcttatcgggcgaa

SEQ ID NO: 114227 - DNA, 25 bp, Probe sequence
tctctactcttatcgggcgaattgc

SEQ ID NO: 114228 - DNA, 25 bp, Probe sequence
tcagtctattaatatgagcgtctaa

SEQ ID NO: 114229 - DNA, 25 bp, Probe sequence
taaccttaaaagcaattcgtctcta

SEQ ID NO: 114230 - DNA, 25 bp, Probe sequence
tactcttatcgggcgaattgctttt

SEQ ID NO: 114231 - DNA, 25 bp, Probe sequence
ttatcgggcgaattgctttttatat

SEQ ID NO: 114232 - DNA, 25 bp, Probe sequence
atcatttctatctcaccctattatg

SEQ ID NO: 114233 - DNA, 25 bp, Probe sequence
atctcaccctattatgatgtgacat

SEQ ID NO: 114234 - DNA, 25 bp, Probe sequence
agaatttaaaacatgtggggctaat

SEQ ID NO: 114235 - DNA, 25 bp, Probe sequence
aaacatgtggggctaatgtgtaaga

SEQ ID NO: 114236 - DNA, 25 bp, Probe sequence
aatatagattgagcacgaagtgatt

SEQ ID NO: 114237 - DNA, 25 bp, Probe sequence
aattgttagcggttctttatcattt

SEQ ID NO: 114238 - DNA, 25 bp, Probe sequence
aattgtcgaaaaacagtgtgtacat

SEQ ID NO: 114239 - DNA, 25 bp, Probe sequence
cagtgtgtacatgatataataaatt

SEQ ID NO: 114240 - DNA, 25 bp, Probe sequence
catttctatctcaccctattatgat

SEQ ID NO: 114241 - DNA, 25 bp, Probe sequence
gctaatgtgtaagagtctgagatat

SEQ ID NO: 114242 - DNA, 25 bp, Probe sequence
gcaacatttaagatcttcaaattga

SEQ ID NO: 114243 - DNA, 25 bp, Probe sequence
gagcacgaagtgatttgaaataagg

SEQ ID NO: 114244 - DNA, 25 bp, Probe sequence
gatgtgacatttattttacaaacta

SEQ ID NO: 114245 - DNA, 25 bp, Probe sequence
tacaaactaatttgttttgaacctg

SEQ ID NO: 114246 - DNA, 25 bp, Probe sequence
ttctatctcaccctattatgatgtg

SEQ ID NO: 114247 - DNA, 25 bp, Probe sequence
attagtggtgctttattttgaattt

SEQ ID NO: 114248 - DNA, 25 bp, Probe sequence
atagttgatcaattacacattagtg

SEQ ID NO: 114249 - DNA, 25 bp, Probe sequence
acatatataaagcactactaatcgt

SEQ ID NO: 114250 - DNA, 25 bp, Probe sequence
aaattcgttgttatgcgattctgat

SEQ ID NO: 114251 - DNA, 25 bp, Probe sequence
aaagcactactaatcgtagttgata

SEQ ID NO: 114252 - DNA, 25 bp, Probe sequence
aagagtatacgcattcatttaagat

SEQ ID NO: 114253 - DNA, 25 bp, Probe sequence
aattacacattagtggtgctttatt

SEQ ID NO: 114254 - DNA, 25 bp, Probe sequence
gcgattctgatacaagattatgata

SEQ ID NO: 114255 - DNA, 25 bp, Probe sequence
gatgacattgataagtatgagtaat

SEQ ID NO: 114256 - DNA, 25 bp, Probe sequence
gttatgcgattctgatacaagatta

SEQ ID NO: 114257 - DNA, 25 bp, Probe sequence
gtatacgcattcatttaagattaga

SEQ ID NO: 114258 - DNA, 25 bp, Probe sequence
gtatgagtaatgtattaggtaacca

SEQ ID NO: 114259 - DNA, 25 bp, Probe sequence
ggtaaccattaaattcgttgttatg

SEQ ID NO: 114260 - DNA, 25 bp, Probe sequence
tactaatcgtagttgatagttgatc

SEQ ID NO: 114261 - DNA, 25 bp, Probe sequence
ttcgttgttatgcgattctgataca

SEQ ID NO: 114262 - DNA, 25 bp, Probe sequence
attttaaaacatttgctactattat

SEQ ID NO: 114263 - DNA, 25 bp, Probe sequence
atttgctactattataatatatatg

SEQ ID NO: 114264 - DNA, 25 bp, Probe sequence
atatgtaactaaaaggtggagtaat

SEQ ID NO: 114265 - DNA, 25 bp, Probe sequence
acatttgctactattataatatata

SEQ ID NO: 114266 - DNA, 25 bp, Probe sequence
aaacatttgctactattataatata

SEQ ID NO: 114267 - DNA, 25 bp, Probe sequence
aaaacatttgctactattataatat

SEQ ID NO: 114268 - DNA, 25 bp, Probe sequence
aacatttgctactattataatatat

SEQ ID NO: 114269 - DNA, 25 bp, Probe sequence
gaaattttaaaacatttgctactat

SEQ ID NO: 114270 - DNA, 25 bp, Probe sequence
gagtaatatgttttttggttacagt

SEQ ID NO: 114271 - DNA, 25 bp, Probe sequence
ggagtaatatgttttttggttacag

SEQ ID NO: 114272 - DNA, 25 bp, Probe sequence
tggagtaatatgttttttggttaca

SEQ ID NO: 114273 - DNA, 25 bp, Probe sequence
taaaacatttgctactattataata

SEQ ID NO: 114274 - DNA, 25 bp, Probe sequence
tttaaaacatttgctactattataa

SEQ ID NO: 114275 - DNA, 25 bp, Probe sequence
ttttaaaacatttgctactattata

SEQ ID NO: 114276 - DNA, 25 bp, Probe sequence
ttaaaacatttgctactattataat

SEQ ID NO: 114277 - DNA, 25 bp, Probe sequence
atacatcaatgcagcttcaacgtta

SEQ ID NO: 114278 - DNA, 25 bp, Probe sequence
atcaatgcagcttcaacgttataat

SEQ ID NO: 114279 - DNA, 25 bp, Probe sequence
atgcgttttgttacttagaattgat

SEQ ID NO: 114280 - DNA, 25 bp, Probe sequence
atgcagcttcaacgttataataaga

SEQ ID NO: 114281 - DNA, 25 bp, Probe sequence
acatcaatgcagcttcaacgttata

SEQ ID NO: 114282 - DNA, 25 bp, Probe sequence
acatgcgttttgttacttagaattg

SEQ ID NO: 114283 - DNA, 25 bp, Probe sequence
caatgcagcttcaacgttataataa

SEQ ID NO: 114284 - DNA, 25 bp, Probe sequence
catcaatgcagcttcaacgttataa

SEQ ID NO: 114285 - DNA, 25 bp, Probe sequence
gcgttttgttacttagaattgatac

SEQ ID NO: 114286 - DNA, 25 bp, Probe sequence
gcagcttcaacgttataataagata

SEQ ID NO: 114287 - DNA, 25 bp, Probe sequence
gatacatcaatgcagcttcaacgtt

SEQ ID NO: 114288 - DNA, 25 bp, Probe sequence
gatagatgttagtcatatgttaaat

SEQ ID NO: 114289 - DNA, 25 bp, Probe sequence
tcaatgcagcttcaacgttataata

SEQ ID NO: 114290 - DNA, 25 bp, Probe sequence
tacatcaatgcagcttcaacgttat

SEQ ID NO: 114291 - DNA, 25 bp, Probe sequence
ttgttacttagaattgatacatcaa

SEQ ID NO: 114292 - DNA, 25 bp, Probe sequence
atttcccaactatatccatttacaa

SEQ ID NO: 114293 - DNA, 25 bp, Probe sequence
atgcctactactatttaaattttat

SEQ ID NO: 114294 - DNA, 25 bp, Probe sequence
atgagtcaatgatcgttttaaacaa

SEQ ID NO: 114295 - DNA, 25 bp, Probe sequence
aattgtttactgtgaggcatttttg

SEQ ID NO: 114296 - DNA, 25 bp, Probe sequence
gaagagaagttatatttttagcatg

SEQ ID NO: 114297 - DNA, 25 bp, Probe sequence
gatggctttcagtagagtagtggat

SEQ ID NO: 114298 - DNA, 25 bp, Probe sequence
gattaacaggattcaactttgtaaa

SEQ ID NO: 114299 - DNA, 25 bp, Probe sequence
gtagtggattcgaattcacgaacta

SEQ ID NO: 114300 - DNA, 25 bp, Probe sequence
gtgggattgtaaattttgtgctatt

SEQ ID NO: 114301 - DNA, 25 bp, Probe sequence
tggtgacaatcgcttaaatggagga

SEQ ID NO: 114302 - DNA, 25 bp, Probe sequence
tgtgctattttcatataagggcaaa

SEQ ID NO: 114303 - DNA, 25 bp, Probe sequence
tcacgaactatactggaagcttttt

SEQ ID NO: 114304 - DNA, 25 bp, Probe sequence
tattgtatcgttgcaaatttcccaa

SEQ ID NO: 114305 - DNA, 25 bp, Probe sequence
ttttcaaaacaaatgcctactacta

SEQ ID NO: 114306 - DNA, 25 bp, Probe sequence
ttagtttgtaaattcacttgtctta

SEQ ID NO: 114307 - DNA, 25 bp, Probe sequence
atcattatatagtcaacttagttgc

SEQ ID NO: 114308 - DNA, 25 bp, Probe sequence
actgaacttcagtatcacaaacata

SEQ ID NO: 114309 - DNA, 25 bp, Probe sequence
aacttagttgcattattttgatttt

SEQ ID NO: 114310 - DNA, 25 bp, Probe sequence
cacatgatgtgaattgctagtatat

SEQ ID NO: 114311 - DNA, 25 bp, Probe sequence
gaattgctagtatatatcagtacaa

SEQ ID NO: 114312 - DNA, 25 bp, Probe sequence
gaatttacgtagaatgaccaagaca

SEQ ID NO: 114313 - DNA, 25 bp, Probe sequence
gaccaagacaaagcattttaattag

SEQ ID NO: 114314 - DNA, 25 bp, Probe sequence
gttataaatttattccatggaacat

SEQ ID NO: 114315 - DNA, 25 bp, Probe sequence
gtattgaagttcatttttttatgta

SEQ ID NO: 114316 - DNA, 25 bp, Probe sequence
gtatcacaaacatatggtggtattg

SEQ ID NO: 114317 - DNA, 25 bp, Probe sequence
ggaacataaacagttaggtcattaa

SEQ ID NO: 114318 - DNA, 25 bp, Probe sequence
taacctaaattgtattgggctttat

SEQ ID NO: 114319 - DNA, 25 bp, Probe sequence
taaaaaactagcaatctcacatgat

SEQ ID NO: 114320 - DNA, 25 bp, Probe sequence
tattttttacctaactaccattcat

SEQ ID NO: 114321 - DNA, 25 bp, Probe sequence
ttacctaactaccattcatacaaaa

SEQ ID NO: 114322 - DNA, 25 bp, Probe sequence
atttactgtaaaatttgacgcataa

SEQ ID NO: 114323 - DNA, 25 bp, Probe sequence
atttgacgcataaaacgacggtaga

SEQ ID NO: 114324 - DNA, 25 bp, Probe sequence
aagtagctttgtgtggtttgttatt

SEQ ID NO: 114325 - DNA, 25 bp, Probe sequence
aaggttatttcttttgatgaagcaa

SEQ ID NO: 114326 - DNA, 25 bp, Probe sequence
aataagtagctttgtgtggtttgtt

SEQ ID NO: 114327 - DNA, 25 bp, Probe sequence
gctttgtgtggtttgttattatctt

SEQ ID NO: 114328 - DNA, 25 bp, Probe sequence
gacgcataaaacgacggtagaagga

SEQ ID NO: 114329 - DNA, 25 bp, Probe sequence
gtgtggtttgttattatcttgtaat

SEQ ID NO: 114330 - DNA, 25 bp, Probe sequence
ggttcatatttttataaatgctgat

SEQ ID NO: 114331 - DNA, 25 bp, Probe sequence
tgtaaaattactatacttgttaaag

SEQ ID NO: 114332 - DNA, 25 bp, Probe sequence
taaatgctgatttgatagtgtataa

SEQ ID NO: 114333 - DNA, 25 bp, Probe sequence
taggatatcggttcatatttttata

SEQ ID NO: 114334 - DNA, 25 bp, Probe sequence
tattacgatttccatattatcaaaa

SEQ ID NO: 114335 - DNA, 25 bp, Probe sequence
tttcgttttatattacgatttccat

SEQ ID NO: 114336 - DNA, 25 bp, Probe sequence
ttaacattttaggatatcggttcat

SEQ ID NO: 114337 - DNA, 25 bp, Probe sequence
attggagcgattgtcataaattaga

SEQ ID NO: 114338 - DNA, 25 bp, Probe sequence
agtagtgtgttttcaattggatagt

SEQ ID NO: 114339 - DNA, 25 bp, Probe sequence
aactgactacatctatttttgtaat

SEQ ID NO: 114340 - DNA, 25 bp, Probe sequence
caggtgtacttgcctttctaattac

SEQ ID NO: 114341 - DNA, 25 bp, Probe sequence
gaatatcaaccttaaattggagcga

SEQ ID NO: 114342 - DNA, 25 bp, Probe sequence
gagctcatctcaaaagtagaatgtg

SEQ ID NO: 114343 - DNA, 25 bp, Probe sequence
gattaactgctatagttctaaagta

SEQ ID NO: 114344 - DNA, 25 bp, Probe sequence
gtttaattaaactgactacatctat

SEQ ID NO: 114345 - DNA, 25 bp, Probe sequence
taatacgttgtagatgtggtcattt

SEQ ID NO: 114346 - DNA, 25 bp, Probe sequence
taaacaggtgtacttgcctttctaa

SEQ ID NO: 114347 - DNA, 25 bp, Probe sequence
taaagtatagctacgtattaatttt

SEQ ID NO: 114348 - DNA, 25 bp, Probe sequence
tacttgcctttctaattacactttt

SEQ ID NO: 114349 - DNA, 25 bp, Probe sequence
ttaatgttagtttgagctcatctca

SEQ ID NO: 114350 - DNA, 25 bp, Probe sequence
ttgcctttctaattacacttttatt

SEQ ID NO: 114351 - DNA, 25 bp, Probe sequence
ttgatttggtattcgtattgtgtta

SEQ ID NO: 114352 - DNA, 25 bp, Probe sequence
atttaatttgcatttgttggtaatt

SEQ ID NO: 114353 - DNA, 25 bp, Probe sequence
atttgcatttgttggtaattttgac

SEQ ID NO: 114354 - DNA, 25 bp, Probe sequence
accttgatatgtattgcaaaattta

SEQ ID NO: 114355 - DNA, 25 bp, Probe sequence
aatttaatttgcatttgttggtaat

SEQ ID NO: 114356 - DNA, 25 bp, Probe sequence
caccttgatatgtattgcaaaattt

SEQ ID NO: 114357 - DNA, 25 bp, Probe sequence
catttgttggtaattttgacaacgt

SEQ ID NO: 114358 - DNA, 25 bp, Probe sequence
gcatttgttggtaattttgacaacg

SEQ ID NO: 114359 - DNA, 25 bp, Probe sequence
tgttggtaattttgacaacgtatta

SEQ ID NO: 114360 - DNA, 25 bp, Probe sequence
tgatatgtattgcaaaatttaattt

SEQ ID NO: 114361 - DNA, 25 bp, Probe sequence
taatttgcatttgttggtaattttg

SEQ ID NO: 114362 - DNA, 25 bp, Probe sequence
tttgttggtaattttgacaacgtat

SEQ ID NO: 114363 - DNA, 25 bp, Probe sequence
tttgcatttgttggtaattttgaca

SEQ ID NO: 114364 - DNA, 25 bp, Probe sequence
tttaatttgcatttgttggtaattt

SEQ ID NO: 114365 - DNA, 25 bp, Probe sequence
ttaatttgcatttgttggtaatttt

SEQ ID NO: 114366 - DNA, 25 bp, Probe sequence
ttgcatttgttggtaattttgacaa

SEQ ID NO: 114367 - DNA, 25 bp, Probe sequence
atttgcttatcggcacatttttaat

SEQ ID NO: 114368 - DNA, 25 bp, Probe sequence
atagaatttgcttatcggcacattt

SEQ ID NO: 114369 - DNA, 25 bp, Probe sequence
atcggcacatttttaatttatacat

SEQ ID NO: 114370 - DNA, 25 bp, Probe sequence
agtaacagtttgaaggaatcgtagt

SEQ ID NO: 114371 - DNA, 25 bp, Probe sequence
aagcgagatgacattatgggacgta

SEQ ID NO: 114372 - DNA, 25 bp, Probe sequence
gcgagatgacattatgggacgtaaa

SEQ ID NO: 114373 - DNA, 25 bp, Probe sequence
gcttatcggcacatttttaatttat

SEQ ID NO: 114374 - DNA, 25 bp, Probe sequence
gaatttgcttatcggcacattttta

SEQ ID NO: 114375 - DNA, 25 bp, Probe sequence
gaatcgtagttcaataatgttaatt

SEQ ID NO: 114376 - DNA, 25 bp, Probe sequence
gaaggaatcgtagttcaataatgtt

SEQ ID NO: 114377 - DNA, 25 bp, Probe sequence
gaaattgagtgtcgaaagcatagaa

SEQ ID NO: 114378 - DNA, 25 bp, Probe sequence
gttcgaaagcgagatgacattatgg

SEQ ID NO: 114379 - DNA, 25 bp, Probe sequence
gttaattaaacagttcgaaagcgag

SEQ ID NO: 114380 - DNA, 25 bp, Probe sequence
ggcacatttttaatttatacatatt

SEQ ID NO: 114381 - DNA, 25 bp, Probe sequence
ttgagtgtcgaaagcatagaatttg

SEQ ID NO: 114382 - DNA, 25 bp, Probe sequence
atgaagtggtttgaaggttgttaat

SEQ ID NO: 114383 - DNA, 25 bp, Probe sequence
atatgtattcttgattgaatcagaa

SEQ ID NO: 114384 - DNA, 25 bp, Probe sequence
ataaacctttgagtcacttcatttt

SEQ ID NO: 114385 - DNA, 25 bp, Probe sequence
acctttgagtcacttcatttttata

SEQ ID NO: 114386 - DNA, 25 bp, Probe sequence
aacctttgagtcacttcatttttat

SEQ ID NO: 114387 - DNA, 25 bp, Probe sequence
aataaacctttgagtcacttcattt

SEQ ID NO: 114388 - DNA, 25 bp, Probe sequence
catttttatatgtattcttgattga

SEQ ID NO: 114389 - DNA, 25 bp, Probe sequence
ctttgagtcacttcatttttatatg

SEQ ID NO: 114390 - DNA, 25 bp, Probe sequence
cctttgagtcacttcatttttatat

SEQ ID NO: 114391 - DNA, 25 bp, Probe sequence
gttgttaataaacctttgagtcact

SEQ ID NO: 114392 - DNA, 25 bp, Probe sequence
gttaataaacctttgagtcacttca

SEQ ID NO: 114393 - DNA, 25 bp, Probe sequence
tgaagtggtttgaaggttgttaata

SEQ ID NO: 114394 - DNA, 25 bp, Probe sequence
taataaacctttgagtcacttcatt

SEQ ID NO: 114395 - DNA, 25 bp, Probe sequence
taaacctttgagtcacttcattttt

SEQ ID NO: 114396 - DNA, 25 bp, Probe sequence
tttgagtcacttcatttttatatgt

SEQ ID NO: 114397 - DNA, 25 bp, Probe sequence
atcatgacatgacatcatttatgta

SEQ ID NO: 114398 - DNA, 25 bp, Probe sequence
atgacatgacatcatttatgtagtt

SEQ ID NO: 114399 - DNA, 25 bp, Probe sequence
atgacatcatttatgtagttttata

SEQ ID NO: 114400 - DNA, 25 bp, Probe sequence
aaaactataaaactgtatcatgaca

SEQ ID NO: 114401 - DNA, 25 bp, Probe sequence
aactgtatcatgacatgacatcatt

SEQ ID NO: 114402 - DNA, 25 bp, Probe sequence
aagtaaattgaagcgagttgtagta

SEQ ID NO: 114403 - DNA, 25 bp, Probe sequence
aatattgtctattttaagtaaattg

SEQ ID NO: 114404 - DNA, 25 bp, Probe sequence
gaagcgagttgtagtaaaataataa

SEQ ID NO: 114405 - DNA, 25 bp, Probe sequence
gacatgacatcatttatgtagtttt

SEQ ID NO: 114406 - DNA, 25 bp, Probe sequence
gacatcatttatgtagttttatata

SEQ ID NO: 114407 - DNA, 25 bp, Probe sequence
gtatcatgacatgacatcatttatg

SEQ ID NO: 114408 - DNA, 25 bp, Probe sequence
gtaaattgaagcgagttgtagtaaa

SEQ ID NO: 114409 - DNA, 25 bp, Probe sequence
taataatgacaaggagttggtggct

SEQ ID NO: 114410 - DNA, 25 bp, Probe sequence
taaatattttcatatgattaacaaa

SEQ ID NO: 114411 - DNA, 25 bp, Probe sequence
tataaaactgtatcatgacatgaca

SEQ ID NO: 114412 - DNA, 25 bp, Probe sequence
attggtgaaattattcgttagtaat

SEQ ID NO: 114413 - DNA, 25 bp, Probe sequence
attcaagctgcagccatgccaataa

SEQ ID NO: 114414 - DNA, 25 bp, Probe sequence
attattcgttagtaatgaactcatg

SEQ ID NO: 114415 - DNA, 25 bp, Probe sequence
atgaactcatgaatgcttgtagcca

SEQ ID NO: 114416 - DNA, 25 bp, Probe sequence
aagctgcagccatgccaataaaatt

SEQ ID NO: 114417 - DNA, 25 bp, Probe sequence
aattcaagctgcagccatgccaata

SEQ ID NO: 114418 - DNA, 25 bp, Probe sequence
gctgcagccatgccaataaaattgg

SEQ ID NO: 114419 - DNA, 25 bp, Probe sequence
gcagccatgccaataaaattggtga

SEQ ID NO: 114420 - DNA, 25 bp, Probe sequence
gaatgcttgtagccatgaaagttca

SEQ ID NO: 114421 - DNA, 25 bp, Probe sequence
gaactcatgaatgcttgtagccatg

SEQ ID NO: 114422 - DNA, 25 bp, Probe sequence
gtaattcaagctgcagccatgccaa

SEQ ID NO: 114423 - DNA, 25 bp, Probe sequence
tgcttgtagccatgaaagttcaata

SEQ ID NO: 114424 - DNA, 25 bp, Probe sequence
tcaagctgcagccatgccaataaaa

SEQ ID NO: 114425 - DNA, 25 bp, Probe sequence
taattcaagctgcagccatgccaat

SEQ ID NO: 114426 - DNA, 25 bp, Probe sequence
ttcaagctgcagccatgccaataaa

SEQ ID NO: 114427 - DNA, 25 bp, Probe sequence
atcattaacagtaccaaattcgcat

SEQ ID NO: 114428 - DNA, 25 bp, Probe sequence
acagtaccaaattcgcatatgatgt

SEQ ID NO: 114429 - DNA, 25 bp, Probe sequence
aacagtaccaaattcgcatatgatg

SEQ ID NO: 114430 - DNA, 25 bp, Probe sequence
aactgtaatttagtgattttatcat

SEQ ID NO: 114431 - DNA, 25 bp, Probe sequence
aattcgcatatgatgtaataagctt

SEQ ID NO: 114432 - DNA, 25 bp, Probe sequence
cattaacagtaccaaattcgcatat

SEQ ID NO: 114433 - DNA, 25 bp, Probe sequence
gcttattgcaaaatatgtttttcgg

SEQ ID NO: 114434 - DNA, 25 bp, Probe sequence
gcatatgatgtaataagctttttgt

SEQ ID NO: 114435 - DNA, 25 bp, Probe sequence
gcaaaatatgtttttcggtaactgt

SEQ ID NO: 114436 - DNA, 25 bp, Probe sequence
gtaccaaattcgcatatgatgtaat

SEQ ID NO: 114437 - DNA, 25 bp, Probe sequence
gtgattttatcattaacagtaccaa

SEQ ID NO: 114438 - DNA, 25 bp, Probe sequence
taacagtaccaaattcgcatatgat

SEQ ID NO: 114439 - DNA, 25 bp, Probe sequence
tttcggtaactgtaatttagtgatt

SEQ ID NO: 114440 - DNA, 25 bp, Probe sequence
ttatcattaacagtaccaaattcgc

SEQ ID NO: 114441 - DNA, 25 bp, Probe sequence
ttaacagtaccaaattcgcatatga

SEQ ID NO: 114442 - DNA, 25 bp, Probe sequence
attaataaagtcaatcatatcatat

SEQ ID NO: 114443 - DNA, 25 bp, Probe sequence
attaaacgcataaatataacgatta

SEQ ID NO: 114444 - DNA, 25 bp, Probe sequence
ataaagtcaatcatatcatattaaa

SEQ ID NO: 114445 - DNA, 25 bp, Probe sequence
atcatatcatattaaacgcataaat

SEQ ID NO: 114446 - DNA, 25 bp, Probe sequence
agtcaatcatatcatattaaacgca

SEQ ID NO: 114447 - DNA, 25 bp, Probe sequence
aagtcaatcatatcatattaaacgc

SEQ ID NO: 114448 - DNA, 25 bp, Probe sequence
aatcatatcatattaaacgcataaa

SEQ ID NO: 114449 - DNA, 25 bp, Probe sequence
caatcatatcatattaaacgcataa

SEQ ID NO: 114450 - DNA, 25 bp, Probe sequence
gtattaataaagtcaatcatatcat

SEQ ID NO: 114451 - DNA, 25 bp, Probe sequence
gtcaatcatatcatattaaacgcat

SEQ ID NO: 114452 - DNA, 25 bp, Probe sequence
tcatatcatattaaacgcataaata

SEQ ID NO: 114453 - DNA, 25 bp, Probe sequence
tcaatcatatcatattaaacgcata

SEQ ID NO: 114454 - DNA, 25 bp, Probe sequence
taaagtcaatcatatcatattaaac

SEQ ID NO: 114455 - DNA, 25 bp, Probe sequence
tacttaagcgctcctttaaaaatgt

SEQ ID NO: 114456 - DNA, 25 bp, Probe sequence
ttacttaagcgctcctttaaaaatg

SEQ ID NO: 114457 - DNA, 25 bp, Probe sequence
attgcttacttgttatagatgaaag

SEQ ID NO: 114458 - DNA, 25 bp, Probe sequence
atagatgaaaggtacagcgttttaa

SEQ ID NO: 114459 - DNA, 25 bp, Probe sequence
atagacaacgtaattaataaaggag

SEQ ID NO: 114460 - DNA, 25 bp, Probe sequence
atgtggtcatgattgaaacagaacg

SEQ ID NO: 114461 - DNA, 25 bp, Probe sequence
aaaatgtggtcatgattgaaacaga

SEQ ID NO: 114462 - DNA, 25 bp, Probe sequence
cgtattgcttacttgttatagatga

SEQ ID NO: 114463 - DNA, 25 bp, Probe sequence
gttatagatgaaaggtacagcgttt

SEQ ID NO: 114464 - DNA, 25 bp, Probe sequence
gtattgcttacttgttatagatgaa

SEQ ID NO: 114465 - DNA, 25 bp, Probe sequence
gtcatgattgaaacagaacgtaaaa

SEQ ID NO: 114466 - DNA, 25 bp, Probe sequence
gtggtcatgattgaaacagaacgta

SEQ ID NO: 114467 - DNA, 25 bp, Probe sequence
ggtcatgattgaaacagaacgtaaa

SEQ ID NO: 114468 - DNA, 25 bp, Probe sequence
ggtatgtattaattaaaatgtggtc

SEQ ID NO: 114469 - DNA, 25 bp, Probe sequence
tcgtattgcttacttgttatagatg

SEQ ID NO: 114470 - DNA, 25 bp, Probe sequence
tagatgaaaggtacagcgttttaaa

SEQ ID NO: 114471 - DNA, 25 bp, Probe sequence
tattgcttacttgttatagatgaaa

SEQ ID NO: 114472 - DNA, 25 bp, Probe sequence
atatcgattttgtgttttttattga

SEQ ID NO: 114473 - DNA, 25 bp, Probe sequence
atcgattttgtgttttttattgaga

SEQ ID NO: 114474 - DNA, 25 bp, Probe sequence
agaaattatataggagtgtcaatcg

SEQ ID NO: 114475 - DNA, 25 bp, Probe sequence
actgctatctaaaacgcaaagttga

SEQ ID NO: 114476 - DNA, 25 bp, Probe sequence
aacgcaaagttgatcaaaatatcga

SEQ ID NO: 114477 - DNA, 25 bp, Probe sequence
ctgctatctaaaacgcaaagttgat

SEQ ID NO: 114478 - DNA, 25 bp, Probe sequence
gctatctaaaacgcaaagttgatca

SEQ ID NO: 114479 - DNA, 25 bp, Probe sequence
gcaaagttgatcaaaatatcgattt

SEQ ID NO: 114480 - DNA, 25 bp, Probe sequence
gagaaattatataggagtgtcaatc

SEQ ID NO: 114481 - DNA, 25 bp, Probe sequence
gattttgtgttttttattgagaaat

SEQ ID NO: 114482 - DNA, 25 bp, Probe sequence
tgctatctaaaacgcaaagttgatc

SEQ ID NO: 114483 - DNA, 25 bp, Probe sequence
tcgattttgtgttttttattgagaa

SEQ ID NO: 114484 - DNA, 25 bp, Probe sequence
tatcgattttgtgttttttattgag

SEQ ID NO: 114485 - DNA, 25 bp, Probe sequence
tatctaaaacgcaaagttgatcaaa

SEQ ID NO: 114486 - DNA, 25 bp, Probe sequence
tttgtgttttttattgagaaattat

SEQ ID NO: 114487 - DNA, 25 bp, Probe sequence
atcgtaacaaacacccctaacattg

SEQ ID NO: 114488 - DNA, 25 bp, Probe sequence
acccctaacattgtttagctgatga

SEQ ID NO: 114489 - DNA, 25 bp, Probe sequence
acacccctaacattgtttagctgat

SEQ ID NO: 114490 - DNA, 25 bp, Probe sequence
aaacacccctaacattgtttagctg

SEQ ID NO: 114491 - DNA, 25 bp, Probe sequence
aacacccctaacattgtttagctga

SEQ ID NO: 114492 - DNA, 25 bp, Probe sequence
caaacacccctaacattgtttagct

SEQ ID NO: 114493 - DNA, 25 bp, Probe sequence
cacccctaacattgtttagctgatg

SEQ ID NO: 114494 - DNA, 25 bp, Probe sequence
ccctaacattgtttagctgatgata

SEQ ID NO: 114495 - DNA, 25 bp, Probe sequence
cccctaacattgtttagctgatgat

SEQ ID NO: 114496 - DNA, 25 bp, Probe sequence
gctgatgataacaatattaggggtg

SEQ ID NO: 114497 - DNA, 25 bp, Probe sequence
tgataacaatattaggggtgtttgt

SEQ ID NO: 114498 - DNA, 25 bp, Probe sequence
tcgtaacaaacacccctaacattgt

SEQ ID NO: 114499 - DNA, 25 bp, Probe sequence
taatcgtaacaaacacccctaacat

SEQ ID NO: 114500 - DNA, 25 bp, Probe sequence
taacattgtttagctgatgataaca

SEQ ID NO: 114501 - DNA, 25 bp, Probe sequence
tacataatcgtaacaaacaccccta

SEQ ID NO: 114502 - DNA, 25 bp, Probe sequence
atattcattttcttttacatgtaaa

SEQ ID NO: 114503 - DNA, 25 bp, Probe sequence
atgtacccactttcattactcaatt

SEQ ID NO: 114504 - DNA, 25 bp, Probe sequence
accatatcatgatagcatattcatt

SEQ ID NO: 114505 - DNA, 25 bp, Probe sequence
aagacatgctagttatagttataat

SEQ ID NO: 114506 - DNA, 25 bp, Probe sequence
aatgtacccactttcattactcaat

SEQ ID NO: 114507 - DNA, 25 bp, Probe sequence
cccactttcattactcaatttaatt

SEQ ID NO: 114508 - DNA, 25 bp, Probe sequence
gatgtatatattcattttcttttac

SEQ ID NO: 114509 - DNA, 25 bp, Probe sequence
gatagcatattcatttaaagacatg

SEQ ID NO: 114510 - DNA, 25 bp, Probe sequence
gtatatattcattttcttttacatg

SEQ ID NO: 114511 - DNA, 25 bp, Probe sequence
gtacccactttcattactcaattta

SEQ ID NO: 114512 - DNA, 25 bp, Probe sequence
tcaaaattaccatatcatgatagca

SEQ ID NO: 114513 - DNA, 25 bp, Probe sequence
tacccactttcattactcaatttaa

SEQ ID NO: 114514 - DNA, 25 bp, Probe sequence
tattgagctatttaatttgatttta

SEQ ID NO: 114515 - DNA, 25 bp, Probe sequence
ttcatttaaagacatgctagttata

SEQ ID NO: 114516 - DNA, 25 bp, Probe sequence
ttcattactcaatttaatttattta

SEQ ID NO: 114517 - DNA, 25 bp, Probe sequence
acattactttaattgtcatgacaaa

SEQ ID NO: 114518 - DNA, 25 bp, Probe sequence
aaaactgcttgataggctaagaaac

SEQ ID NO: 114519 - DNA, 25 bp, Probe sequence
aactaacaagcttacgcgtgctaat

SEQ ID NO: 114520 - DNA, 25 bp, Probe sequence
aagcttacgcgtgctaattgttttt

SEQ ID NO: 114521 - DNA, 25 bp, Probe sequence
caagcagttttttaactaacaagct

SEQ ID NO: 114522 - DNA, 25 bp, Probe sequence
gctaagaaacctttcaagcagtttt

SEQ ID NO: 114523 - DNA, 25 bp, Probe sequence
gcgtgctaattgtttttctattctt

SEQ ID NO: 114524 - DNA, 25 bp, Probe sequence
gctaattgtttttctattcttaata

SEQ ID NO: 114525 - DNA, 25 bp, Probe sequence
gcttacgcgtgctaattgtttttct

SEQ ID NO: 114526 - DNA, 25 bp, Probe sequence
gataggctaagaaacctttcaagca

SEQ ID NO: 114527 - DNA, 25 bp, Probe sequence
tctattcttaataaattctaaacat

SEQ ID NO: 114528 - DNA, 25 bp, Probe sequence
taacaagcttacgcgtgctaattgt

SEQ ID NO: 114529 - DNA, 25 bp, Probe sequence
taaacattactttaattgtcatgac

SEQ ID NO: 114530 - DNA, 25 bp, Probe sequence
tacgcgtgctaattgtttttctatt

SEQ ID NO: 114531 - DNA, 25 bp, Probe sequence
ttttaactaacaagcttacgcgtgc

SEQ ID NO: 114532 - DNA, 25 bp, Probe sequence
actttctttgattcaatgccatgct

SEQ ID NO: 114533 - DNA, 25 bp, Probe sequence
aaagttctcctccagacatactatc

SEQ ID NO: 114534 - DNA, 25 bp, Probe sequence
aaagttgattgtttattaattcaca

SEQ ID NO: 114535 - DNA, 25 bp, Probe sequence
ctcttttcggattggtaatcattaa

SEQ ID NO: 114536 - DNA, 25 bp, Probe sequence
cctccagacatactatccgtttttt

SEQ ID NO: 114537 - DNA, 25 bp, Probe sequence
gacatactatccgtttttttctctt

SEQ ID NO: 114538 - DNA, 25 bp, Probe sequence
gattcaatgccatgctaaaattaaa

SEQ ID NO: 114539 - DNA, 25 bp, Probe sequence
gtttattaattcacaactttctttg

SEQ ID NO: 114540 - DNA, 25 bp, Probe sequence
tccagacatactatccgtttttttc

SEQ ID NO: 114541 - DNA, 25 bp, Probe sequence
tctttgattcaatgccatgctaaaa

SEQ ID NO: 114542 - DNA, 25 bp, Probe sequence
tcacaactttctttgattcaatgcc

SEQ ID NO: 114543 - DNA, 25 bp, Probe sequence
taattcacaactttctttgattcaa

SEQ ID NO: 114544 - DNA, 25 bp, Probe sequence
taatatatatgttatcatttttaaa

SEQ ID NO: 114545 - DNA, 25 bp, Probe sequence
taaagttctcctccagacatactat

SEQ ID NO: 114546 - DNA, 25 bp, Probe sequence
ttttctcttttcggattggtaatca

SEQ ID NO: 114547 - DNA, 25 bp, Probe sequence
attgtgaatattttgtgacattgag

SEQ ID NO: 114548 - DNA, 25 bp, Probe sequence
attttgtgacattgagggatggagt

SEQ ID NO: 114549 - DNA, 25 bp, Probe sequence
atttcttaatacttttattgtgaat

SEQ ID NO: 114550 - DNA, 25 bp, Probe sequence
atattttgtgacattgagggatgga

SEQ ID NO: 114551 - DNA, 25 bp, Probe sequence
atagcacattaatttcttaatactt

SEQ ID NO: 114552 - DNA, 25 bp, Probe sequence
agcacattaatttcttaatactttt

SEQ ID NO: 114553 - DNA, 25 bp, Probe sequence
cattgagggatggagtggatgagat

SEQ ID NO: 114554 - DNA, 25 bp, Probe sequence
gaatattttgtgacattgagggatg

SEQ ID NO: 114555 - DNA, 25 bp, Probe sequence
gaaaatgtgttgtttcaatttaacg

SEQ ID NO: 114556 - DNA, 25 bp, Probe sequence
gacattgagggatggagtggatgag

SEQ ID NO: 114557 - DNA, 25 bp, Probe sequence
gtgaatattttgtgacattgaggga

SEQ ID NO: 114558 - DNA, 25 bp, Probe sequence
gtgacattgagggatggagtggatg

SEQ ID NO: 114559 - DNA, 25 bp, Probe sequence
tgtgttgtttcaatttaacggaaat

SEQ ID NO: 114560 - DNA, 25 bp, Probe sequence
taatttcttaatacttttattgtga

SEQ ID NO: 114561 - DNA, 25 bp, Probe sequence
ttcaatttaacggaaatagcacatt

SEQ ID NO: 114562 - DNA, 25 bp, Probe sequence
atttgcattttatctaactaagttt

SEQ ID NO: 114563 - DNA, 25 bp, Probe sequence
atctacaataatctcatttgcattt

SEQ ID NO: 114564 - DNA, 25 bp, Probe sequence
atctcatttgcattttatctaacta

SEQ ID NO: 114565 - DNA, 25 bp, Probe sequence
aaattgtgtattttgcataaattaa

SEQ ID NO: 114566 - DNA, 25 bp, Probe sequence
aacttttgcttagaaaaatgatgct

SEQ ID NO: 114567 - DNA, 25 bp, Probe sequence
aactcatcacctagcaatattattt

SEQ ID NO: 114568 - DNA, 25 bp, Probe sequence
aaccgagataactcatcacctagca

SEQ ID NO: 114569 - DNA, 25 bp, Probe sequence
gactatctacaataatctcatttgc

SEQ ID NO: 114570 - DNA, 25 bp, Probe sequence
gagataactcatcacctagcaatat

SEQ ID NO: 114571 - DNA, 25 bp, Probe sequence
gaggatattcagtagatagtttttt

SEQ ID NO: 114572 - DNA, 25 bp, Probe sequence
gatgctatgaggatattcagtagat

SEQ ID NO: 114573 - DNA, 25 bp, Probe sequence
gatagtttttttatgatctaatatt

SEQ ID NO: 114574 - DNA, 25 bp, Probe sequence
gatatcgttttgtaattaaccgaga

SEQ ID NO: 114575 - DNA, 25 bp, Probe sequence
tcatcacctagcaatattatttaca

SEQ ID NO: 114576 - DNA, 25 bp, Probe sequence
tatctaactaagtttaacttttgct

SEQ ID NO: 114577 - DNA, 25 bp, Probe sequence
attgatagatctggcatgagtaaaa

SEQ ID NO: 114578 - DNA, 25 bp, Probe sequence
atctggcatgagtaaaatctggagc

SEQ ID NO: 114579 - DNA, 25 bp, Probe sequence
aattgatagatctggcatgagtaaa

SEQ ID NO: 114580 - DNA, 25 bp, Probe sequence
cggctcaattgatagatctggcatg

SEQ ID NO: 114581 - DNA, 25 bp, Probe sequence
gctcaattgatagatctggcatgag

SEQ ID NO: 114582 - DNA, 25 bp, Probe sequence
gcatgagtaaaatctggagcagaat

SEQ ID NO: 114583 - DNA, 25 bp, Probe sequence
ggcatgagtaaaatctggagcagaa

SEQ ID NO: 114584 - DNA, 25 bp, Probe sequence
ggctcaattgatagatctggcatga

SEQ ID NO: 114585 - DNA, 25 bp, Probe sequence
tggcatgagtaaaatctggagcaga

SEQ ID NO: 114586 - DNA, 25 bp, Probe sequence
tctggcatgagtaaaatctggagca

SEQ ID NO: 114587 - DNA, 25 bp, Probe sequence
tctggagcagaatataaagttctta

SEQ ID NO: 114588 - DNA, 25 bp, Probe sequence
tcggctcaattgatagatctggcat

SEQ ID NO: 114589 - DNA, 25 bp, Probe sequence
tcaattgatagatctggcatgagta

SEQ ID NO: 114590 - DNA, 25 bp, Probe sequence
ttcggctcaattgatagatctggca

SEQ ID NO: 114591 - DNA, 25 bp, Probe sequence
ttgatagatctggcatgagtaaaat

SEQ ID NO: 114592 - DNA, 25 bp, Probe sequence
atttagttttcttattaaattgatg

SEQ ID NO: 114593 - DNA, 25 bp, Probe sequence
atatataagttgtatttagttttct

SEQ ID NO: 114594 - DNA, 25 bp, Probe sequence
ctttcctcaaatatataagttgtat

SEQ ID NO: 114595 - DNA, 25 bp, Probe sequence
gctttcctcaaatatataagttgta

SEQ ID NO: 114596 - DNA, 25 bp, Probe sequence
ggctttcctcaaatatataagttgt

SEQ ID NO: 114597 - DNA, 25 bp, Probe sequence
tggctttcctcaaatatataagttg

SEQ ID NO: 114598 - DNA, 25 bp, Probe sequence
tgtatttagttttcttattaaattg

SEQ ID NO: 114599 - DNA, 25 bp, Probe sequence
tataagttgtatttagttttcttat

SEQ ID NO: 114600 - DNA, 25 bp, Probe sequence
tatataagttgtatttagttttctt

SEQ ID NO: 114601 - DNA, 25 bp, Probe sequence
tatttagttttcttattaaattgat

SEQ ID NO: 114602 - DNA, 25 bp, Probe sequence
tttcctcaaatatataagttgtatt

SEQ ID NO: 114603 - DNA, 25 bp, Probe sequence
ttcctcaaatatataagttgtattt

SEQ ID NO: 114604 - DNA, 25 bp, Probe sequence
atagttataaacgcattcaattcct

SEQ ID NO: 114605 - DNA, 25 bp, Probe sequence
ataaacgcattcaattcctaattaa

SEQ ID NO: 114606 - DNA, 25 bp, Probe sequence
atgcatttatgattaagcacttatg

SEQ ID NO: 114607 - DNA, 25 bp, Probe sequence
acgcattcaattcctaattaaaaat

SEQ ID NO: 114608 - DNA, 25 bp, Probe sequence
acttgtaataaaatttgattcaact

SEQ ID NO: 114609 - DNA, 25 bp, Probe sequence
gaaaaagttattcattcaaatgtga

SEQ ID NO: 114610 - DNA, 25 bp, Probe sequence
gagaatgcatttatgattaagcact

SEQ ID NO: 114611 - DNA, 25 bp, Probe sequence
gattaagcacttatgataacttgta

SEQ ID NO: 114612 - DNA, 25 bp, Probe sequence
gttataaacgcattcaattcctaat

SEQ ID NO: 114613 - DNA, 25 bp, Probe sequence
gttattcattcaaatgtgatagtta

SEQ ID NO: 114614 - DNA, 25 bp, Probe sequence
taataaacactactttctaatgaaa

SEQ ID NO: 114615 - DNA, 25 bp, Probe sequence
taagcacttatgataacttgtaata

SEQ ID NO: 114616 - DNA, 25 bp, Probe sequence
taaacactactttctaatgaaaaag

SEQ ID NO: 114617 - DNA, 25 bp, Probe sequence
taaacgcattcaattcctaattaaa

SEQ ID NO: 114618 - DNA, 25 bp, Probe sequence
ttaatttaactcgttgaagtatatt

SEQ ID NO: 114619 - DNA, 25 bp, Probe sequence
atcaatcccctttattttaatatgt

SEQ ID NO: 114620 - DNA, 25 bp, Probe sequence
atgatcaatcccctttattttaata

SEQ ID NO: 114621 - DNA, 25 bp, Probe sequence
agcatgaattgcaatctgtcgtgga

SEQ ID NO: 114622 - DNA, 25 bp, Probe sequence
actttttacgaatatttagcatgaa

SEQ ID NO: 114623 - DNA, 25 bp, Probe sequence
aacagctttaagcatgacatggaga

SEQ ID NO: 114624 - DNA, 25 bp, Probe sequence
aatcccctttattttaatatgtcat

SEQ ID NO: 114625 - DNA, 25 bp, Probe sequence
aattgcaatctgtcgtggaaaagaa

SEQ ID NO: 114626 - DNA, 25 bp, Probe sequence
gcatgaattgcaatctgtcgtggaa

SEQ ID NO: 114627 - DNA, 25 bp, Probe sequence
gcaatctgtcgtggaaaagaagaat

SEQ ID NO: 114628 - DNA, 25 bp, Probe sequence
gaataacagctttaagcatgacatg

SEQ ID NO: 114629 - DNA, 25 bp, Probe sequence
gaaactttttacgaatatttagcat

SEQ ID NO: 114630 - DNA, 25 bp, Probe sequence
gatcaatcccctttattttaatatg

SEQ ID NO: 114631 - DNA, 25 bp, Probe sequence
gtcaaatgtagcaatgttgtaatac

SEQ ID NO: 114632 - DNA, 25 bp, Probe sequence
tgaattgcaatctgtcgtggaaaag

SEQ ID NO: 114633 - DNA, 25 bp, Probe sequence
tacaatatagaaactttttacgaat

SEQ ID NO: 114634 - DNA, 25 bp, Probe sequence
tgagtaaggaaatgtgggtaagggg

SEQ ID NO: 114635 - DNA, 25 bp, Probe sequence
attgcaatccacatacctaattcat

SEQ ID NO: 114636 - DNA, 25 bp, Probe sequence
atgttttactctttatatttaaatg

SEQ ID NO: 114637 - DNA, 25 bp, Probe sequence
acatacctaattcattaacgttaat

SEQ ID NO: 114638 - DNA, 25 bp, Probe sequence
acattctttttaaattgcaatccac

SEQ ID NO: 114639 - DNA, 25 bp, Probe sequence
acatgttacaaatattacattcttt

SEQ ID NO: 114640 - DNA, 25 bp, Probe sequence
aaaaagattcgattgactaaatgtt

SEQ ID NO: 114641 - DNA, 25 bp, Probe sequence
aagtattttggtgtatattgatata

SEQ ID NO: 114642 - DNA, 25 bp, Probe sequence
aatccacatacctaattcattaacg

SEQ ID NO: 114643 - DNA, 25 bp, Probe sequence
gcatcgtttttcttatgaattttat

SEQ ID NO: 114644 - DNA, 25 bp, Probe sequence
gaatgattagcatcgtttttcttat

SEQ ID NO: 114645 - DNA, 25 bp, Probe sequence
gaaaattcgatgctttacatttaaa

SEQ ID NO: 114646 - DNA, 25 bp, Probe sequence
gactaaatgttttactctttatatt

SEQ ID NO: 114647 - DNA, 25 bp, Probe sequence
gattagcatcgtttttcttatgaat

SEQ ID NO: 114648 - DNA, 25 bp, Probe sequence
tgcaatccacatacctaattcatta

SEQ ID NO: 114649 - DNA, 25 bp, Probe sequence
atgtcaaaatcaaccaatccgtaat

SEQ ID NO: 114650 - DNA, 25 bp, Probe sequence
aaaggtgaaatcaacttataaaatg

SEQ ID NO: 114651 - DNA, 25 bp, Probe sequence
aaaatcaaccaatccgtaatgtatt

SEQ ID NO: 114652 - DNA, 25 bp, Probe sequence
aatcaaccaatccgtaatgtatttt

SEQ ID NO: 114653 - DNA, 25 bp, Probe sequence
caatccgtaatgtattttaaaatgt

SEQ ID NO: 114654 - DNA, 25 bp, Probe sequence
gaagaagtataaatgaggtgttgaa

SEQ ID NO: 114655 - DNA, 25 bp, Probe sequence
gatggaacagtgtattctaattgga

SEQ ID NO: 114656 - DNA, 25 bp, Probe sequence
gatatactgtttttattttgcaata

SEQ ID NO: 114657 - DNA, 25 bp, Probe sequence
gttatgtcaaaatcaaccaatccgt

SEQ ID NO: 114658 - DNA, 25 bp, Probe sequence
gtcaaaatcaaccaatccgtaatgt

SEQ ID NO: 114659 - DNA, 25 bp, Probe sequence
ggaacagtgtattctaattggatat

SEQ ID NO: 114660 - DNA, 25 bp, Probe sequence
tcaaccaatccgtaatgtattttaa

SEQ ID NO: 114661 - DNA, 25 bp, Probe sequence
taaaatgttaatatagttctgaaga

SEQ ID NO: 114662 - DNA, 25 bp, Probe sequence
tattctaattggatatactgttttt

SEQ ID NO: 114663 - DNA, 25 bp, Probe sequence
ttggatatactgtttttattttgca

SEQ ID NO: 114664 - DNA, 25 bp, Probe sequence
ataaaattcatttctgccacactcc

SEQ ID NO: 114665 - DNA, 25 bp, Probe sequence
aaatgtaattttatcgtcacaattt

SEQ ID NO: 114666 - DNA, 25 bp, Probe sequence
aaacagtcattataattgagtattt

SEQ ID NO: 114667 - DNA, 25 bp, Probe sequence
cacactcctttttgattgaattagc

SEQ ID NO: 114668 - DNA, 25 bp, Probe sequence
ctgccacactcctttttgattgaat

SEQ ID NO: 114669 - DNA, 25 bp, Probe sequence
gcattttacgatcataaacagtcat

SEQ ID NO: 114670 - DNA, 25 bp, Probe sequence
gaaaagtgaaagcgtactcattata

SEQ ID NO: 114671 - DNA, 25 bp, Probe sequence
gaaagcgtactcattataatacaaa

SEQ ID NO: 114672 - DNA, 25 bp, Probe sequence
gattgaattagcattttacgatcat

SEQ ID NO: 114673 - DNA, 25 bp, Probe sequence
gattgtttttggtaatttatgattg

SEQ ID NO: 114674 - DNA, 25 bp, Probe sequence
ggggcaagattaggagtgtggcaga

SEQ ID NO: 114675 - DNA, 25 bp, Probe sequence
ggagtgtggcagagatgaaattttt

SEQ ID NO: 114676 - DNA, 25 bp, Probe sequence
tgggtgtttgtgattgtttttggta

SEQ ID NO: 114677 - DNA, 25 bp, Probe sequence
taatacaaagtgagatggggtgatg

SEQ ID NO: 114678 - DNA, 25 bp, Probe sequence
ttatcgtcacaatttgggtgtttgt

SEQ ID NO: 114679 - DNA, 25 bp, Probe sequence
atcgtgttaacggtagcttatacaa

SEQ ID NO: 114680 - DNA, 25 bp, Probe sequence
atgaattgatatgaaggtgttttta

SEQ ID NO: 114681 - DNA, 25 bp, Probe sequence
agctgtaaaaacactttctattaat

SEQ ID NO: 114682 - DNA, 25 bp, Probe sequence
aaaatatgagtgtcttaaagtgaaa

SEQ ID NO: 114683 - DNA, 25 bp, Probe sequence
aacggtagcttatacaaagctgtaa

SEQ ID NO: 114684 - DNA, 25 bp, Probe sequence
aagttatgccaaacgaagcagatat

SEQ ID NO: 114685 - DNA, 25 bp, Probe sequence
cactttctattaattcagtttttat

SEQ ID NO: 114686 - DNA, 25 bp, Probe sequence
gaatgaagaaatagacaccacaaat

SEQ ID NO: 114687 - DNA, 25 bp, Probe sequence
gacaccacaaatgtatagacttttt

SEQ ID NO: 114688 - DNA, 25 bp, Probe sequence
gagcttcatattaagttgtaagttc

SEQ ID NO: 114689 - DNA, 25 bp, Probe sequence
gattgttagcaaagagcttcatatt

SEQ ID NO: 114690 - DNA, 25 bp, Probe sequence
gttcaatgaatatatgttagtttta

SEQ ID NO: 114691 - DNA, 25 bp, Probe sequence
gtatagacttttttaatattttgca

SEQ ID NO: 114692 - DNA, 25 bp, Probe sequence
tagttttatacatcgtgttaacggt

SEQ ID NO: 114693 - DNA, 25 bp, Probe sequence
tatacatcgtgttaacggtagctta

SEQ ID NO: 114694 - DNA, 25 bp, Probe sequence
ataacatggaggtgaatccctagaa

SEQ ID NO: 114695 - DNA, 25 bp, Probe sequence
atggaggtgaatccctagaaatagg

SEQ ID NO: 114696 - DNA, 25 bp, Probe sequence
aatgtatgcaatagatttaatctgt

SEQ ID NO: 114697 - DNA, 25 bp, Probe sequence
gcgtgttacccatgagtgacacata

SEQ ID NO: 114698 - DNA, 25 bp, Probe sequence
gcaataacatttttttctgggggtg

SEQ ID NO: 114699 - DNA, 25 bp, Probe sequence
gaatgcgtgttacccatgagtgaca

SEQ ID NO: 114700 - DNA, 25 bp, Probe sequence
gaagcaataacatttttttctgggg

SEQ ID NO: 114701 - DNA, 25 bp, Probe sequence
gagtgacacatataacatggaggtg

SEQ ID NO: 114702 - DNA, 25 bp, Probe sequence
gataaatttgaatgcgtgttaccca

SEQ ID NO: 114703 - DNA, 25 bp, Probe sequence
gttacccatgagtgacacatataac

SEQ ID NO: 114704 - DNA, 25 bp, Probe sequence
gtagttgtaatttaagccatagtga

SEQ ID NO: 114705 - DNA, 25 bp, Probe sequence
gggaaggcgataacatgtagttgta

SEQ ID NO: 114706 - DNA, 25 bp, Probe sequence
gggggtgtctaaatgggaaggcgat

SEQ ID NO: 114707 - DNA, 25 bp, Probe sequence
tctgggggtgtctaaatgggaaggc

SEQ ID NO: 114708 - DNA, 25 bp, Probe sequence
taatctgttaacataagcactttat

SEQ ID NO: 114709 - DNA, 25 bp, Probe sequence
attggaactcaatatctttaatgat

SEQ ID NO: 114710 - DNA, 25 bp, Probe sequence
attcgcattaattgagtttgttgaa

SEQ ID NO: 114711 - DNA, 25 bp, Probe sequence
atatataaaccaactaagaatgatt

SEQ ID NO: 114712 - DNA, 25 bp, Probe sequence
agcgataattcgcattaattgagtt

SEQ ID NO: 114713 - DNA, 25 bp, Probe sequence
aactcaatatctttaatgatttaat

SEQ ID NO: 114714 - DNA, 25 bp, Probe sequence
aagatacatagattggagagatata

SEQ ID NO: 114715 - DNA, 25 bp, Probe sequence
aatagtattggaactcaatatcttt

SEQ ID NO: 114716 - DNA, 25 bp, Probe sequence
cgcattaattgagtttgttgaaaaa

SEQ ID NO: 114717 - DNA, 25 bp, Probe sequence
gcgataattcgcattaattgagttt

SEQ ID NO: 114718 - DNA, 25 bp, Probe sequence
gaatattttttattgaaagcgataa

SEQ ID NO: 114719 - DNA, 25 bp, Probe sequence
gataattcgcattaattgagtttgt

SEQ ID NO: 114720 - DNA, 25 bp, Probe sequence
ggaactcaatatctttaatgattta

SEQ ID NO: 114721 - DNA, 25 bp, Probe sequence
tgatttaattcatttttggttggtt

SEQ ID NO: 114722 - DNA, 25 bp, Probe sequence
tcgcattaattgagtttgttgaaaa

SEQ ID NO: 114723 - DNA, 25 bp, Probe sequence
taattcgcattaattgagtttgttg

SEQ ID NO: 114724 - DNA, 25 bp, Probe sequence
atactcaggtacattcaaaatcttt

SEQ ID NO: 114725 - DNA, 25 bp, Probe sequence
acgtttatgaatgccttttaatgtg

SEQ ID NO: 114726 - DNA, 25 bp, Probe sequence
actcaggtacattcaaaatctttta

SEQ ID NO: 114727 - DNA, 25 bp, Probe sequence
acaatactcaggtacattcaaaatc

SEQ ID NO: 114728 - DNA, 25 bp, Probe sequence
aaaacaatactcaggtacattcaaa

SEQ ID NO: 114729 - DNA, 25 bp, Probe sequence
aatgagttggtttttactatttgat

SEQ ID NO: 114730 - DNA, 25 bp, Probe sequence
gataaaacaatactcaggtacattc

SEQ ID NO: 114731 - DNA, 25 bp, Probe sequence
gtttatgaatgccttttaatgtgta

SEQ ID NO: 114732 - DNA, 25 bp, Probe sequence
tgagttggtttttactatttgataa

SEQ ID NO: 114733 - DNA, 25 bp, Probe sequence
tgaatgccttttaatgtgtacatta

SEQ ID NO: 114734 - DNA, 25 bp, Probe sequence
tcaggtacattcaaaatcttttaaa

SEQ ID NO: 114735 - DNA, 25 bp, Probe sequence
taaattttacgtttatgaatgcctt

SEQ ID NO: 114736 - DNA, 25 bp, Probe sequence
tacgtttatgaatgccttttaatgt

SEQ ID NO: 114737 - DNA, 25 bp, Probe sequence
tatgaatgccttttaatgtgtacat

SEQ ID NO: 114738 - DNA, 25 bp, Probe sequence
tttacgtttatgaatgccttttaat

SEQ ID NO: 114739 - DNA, 25 bp, Probe sequence
atgggagcttctttttagtctttgc

SEQ ID NO: 114740 - DNA, 25 bp, Probe sequence
acaaaaaaagaagccctcattaatg

SEQ ID NO: 114741 - DNA, 25 bp, Probe sequence
aagccctcattaatgggagcttctt

SEQ ID NO: 114742 - DNA, 25 bp, Probe sequence
aagaagccctcattaatgggagctt

SEQ ID NO: 114743 - DNA, 25 bp, Probe sequence
aatgggagcttctttttagtctttg

SEQ ID NO: 114744 - DNA, 25 bp, Probe sequence
cctcattaatgggagcttcttttta

SEQ ID NO: 114745 - DNA, 25 bp, Probe sequence
gccctcattaatgggagcttctttt

SEQ ID NO: 114746 - DNA, 25 bp, Probe sequence
gcttctttttagtctttgcatttta

SEQ ID NO: 114747 - DNA, 25 bp, Probe sequence
gagcttctttttagtctttgcattt

SEQ ID NO: 114748 - DNA, 25 bp, Probe sequence
gggagcttctttttagtctttgcat

SEQ ID NO: 114749 - DNA, 25 bp, Probe sequence
ggagcttctttttagtctttgcatt

SEQ ID NO: 114750 - DNA, 25 bp, Probe sequence
tagtctttgcattttattttataaa

SEQ ID NO: 114751 - DNA, 25 bp, Probe sequence
tttagtctttgcattttattttata

SEQ ID NO: 114752 - DNA, 25 bp, Probe sequence
ttaatgggagcttctttttagtctt

SEQ ID NO: 114753 - DNA, 25 bp, Probe sequence
ttctttttagtctttgcattttatt

SEQ ID NO: 114754 - DNA, 25 bp, Probe sequence
attctttctatttattgtgtgtaat

SEQ ID NO: 114755 - DNA, 25 bp, Probe sequence
acttatgtgctctacaatcttatgg

SEQ ID NO: 114756 - DNA, 25 bp, Probe sequence
aaatcatacgctttccattgagtaa

SEQ ID NO: 114757 - DNA, 25 bp, Probe sequence
aatgcgatttgtagtgttatgtgaa

SEQ ID NO: 114758 - DNA, 25 bp, Probe sequence
aattttacttatgtgctctacaatc

SEQ ID NO: 114759 - DNA, 25 bp, Probe sequence
gctaggggggctgtgaaatcatacg

SEQ ID NO: 114760 - DNA, 25 bp, Probe sequence
gctaaacaaacctcaagctctaaaa

SEQ ID NO: 114761 - DNA, 25 bp, Probe sequence
gattaagcaacataatgcgatttgt

SEQ ID NO: 114762 - DNA, 25 bp, Probe sequence
gttgcttaagctaaacaaacctcaa

SEQ ID NO: 114763 - DNA, 25 bp, Probe sequence
gtttgagctcatgggttgcttaagc

SEQ ID NO: 114764 - DNA, 25 bp, Probe sequence
gtatgatttctacaagctagggggg

SEQ ID NO: 114765 - DNA, 25 bp, Probe sequence
gtgctctacaatcttatgggattta

SEQ ID NO: 114766 - DNA, 25 bp, Probe sequence
ggggctgtgaaatcatacgctttcc

SEQ ID NO: 114767 - DNA, 25 bp, Probe sequence
ggaagtgtttgagctcatgggttgc

SEQ ID NO: 114768 - DNA, 25 bp, Probe sequence
tacgctttccattgagtaatgagtg

SEQ ID NO: 114769 - DNA, 25 bp, Probe sequence
atatcgcttaactaatattgaagaa

SEQ ID NO: 114770 - DNA, 25 bp, Probe sequence
atatgccattaactaattcttaact

SEQ ID NO: 114771 - DNA, 25 bp, Probe sequence
aggagtcaaaataagaggagggcat

SEQ ID NO: 114772 - DNA, 25 bp, Probe sequence
actagataacactataaaacacttc

SEQ ID NO: 114773 - DNA, 25 bp, Probe sequence
aacacttctgatattttgaactaag

SEQ ID NO: 114774 - DNA, 25 bp, Probe sequence
aactcctcatttcttcaatttgata

SEQ ID NO: 114775 - DNA, 25 bp, Probe sequence
ctaactcctcatttcttcaatttga

SEQ ID NO: 114776 - DNA, 25 bp, Probe sequence
ctcctcatttcttcaatttgataag

SEQ ID NO: 114777 - DNA, 25 bp, Probe sequence
cctcatttcttcaatttgataagtt

SEQ ID NO: 114778 - DNA, 25 bp, Probe sequence
gccattaactaattcttaacttcgt

SEQ ID NO: 114779 - DNA, 25 bp, Probe sequence
gaaggcaaataatatgccattaact

SEQ ID NO: 114780 - DNA, 25 bp, Probe sequence
gaggagggcatttttttaggtgaga

SEQ ID NO: 114781 - DNA, 25 bp, Probe sequence
ggtgagaaaatatttatctgaacta

SEQ ID NO: 114782 - DNA, 25 bp, Probe sequence
tcttaacttcgtttaaatatcgctt

SEQ ID NO: 114783 - DNA, 25 bp, Probe sequence
ttcgtttaaatatcgcttaactaat

SEQ ID NO: 114784 - DNA, 25 bp, Probe sequence
atacttcaatcaactattatatcaa

SEQ ID NO: 114785 - DNA, 25 bp, Probe sequence
actcctgttcgttatacttcaatca

SEQ ID NO: 114786 - DNA, 25 bp, Probe sequence
acttcaatcaactattatatcaatt

SEQ ID NO: 114787 - DNA, 25 bp, Probe sequence
aatatattgttattcattagatatg

SEQ ID NO: 114788 - DNA, 25 bp, Probe sequence
ctcctgttcgttatacttcaatcaa

SEQ ID NO: 114789 - DNA, 25 bp, Probe sequence
ctgttcgttatacttcaatcaacta

SEQ ID NO: 114790 - DNA, 25 bp, Probe sequence
cctgttcgttatacttcaatcaact

SEQ ID NO: 114791 - DNA, 25 bp, Probe sequence
gactcctgttcgttatacttcaatc

SEQ ID NO: 114792 - DNA, 25 bp, Probe sequence
gttcgttatacttcaatcaactatt

SEQ ID NO: 114793 - DNA, 25 bp, Probe sequence
gttattcattagatatgacttgtaa

SEQ ID NO: 114794 - DNA, 25 bp, Probe sequence
tggactcctgttcgttatacttcaa

SEQ ID NO: 114795 - DNA, 25 bp, Probe sequence
tgttcgttatacttcaatcaactat

SEQ ID NO: 114796 - DNA, 25 bp, Probe sequence
tcctgttcgttatacttcaatcaac

SEQ ID NO: 114797 - DNA, 25 bp, Probe sequence
tcgttatacttcaatcaactattat

SEQ ID NO: 114798 - DNA, 25 bp, Probe sequence
ttcaatcaactattatatcaattaa

SEQ ID NO: 114799 - DNA, 25 bp, Probe sequence
agctagaaacctctgatattcattt

SEQ ID NO: 114800 - DNA, 25 bp, Probe sequence
acctctgatattcatttatgtacga

SEQ ID NO: 114801 - DNA, 25 bp, Probe sequence
aaacacatttagaacggagtataca

SEQ ID NO: 114802 - DNA, 25 bp, Probe sequence
aatgggttgctcctataatatatat

SEQ ID NO: 114803 - DNA, 25 bp, Probe sequence
gaaatttcaatgtctagttttttat

SEQ ID NO: 114804 - DNA, 25 bp, Probe sequence
gacgaaagaaatgggttgctcctat

SEQ ID NO: 114805 - DNA, 25 bp, Probe sequence
gagggtttcagctagaaacctctga

SEQ ID NO: 114806 - DNA, 25 bp, Probe sequence
gaggttaatggcattgataagcccg

SEQ ID NO: 114807 - DNA, 25 bp, Probe sequence
ggataatgacaatgcttttaaagtt

SEQ ID NO: 114808 - DNA, 25 bp, Probe sequence
ggcattgataagcccgtttttaatt

SEQ ID NO: 114809 - DNA, 25 bp, Probe sequence
taaaaaaagcctatctccataaaag

SEQ ID NO: 114810 - DNA, 25 bp, Probe sequence
taaagttttagctacatccaataca

SEQ ID NO: 114811 - DNA, 25 bp, Probe sequence
tagttttttatagagggtttcagct

SEQ ID NO: 114812 - DNA, 25 bp, Probe sequence
tttgtaattgctcctatcattaata

SEQ ID NO: 114813 - DNA, 25 bp, Probe sequence
tttagctacatccaatacatattat

SEQ ID NO: 114814 - DNA, 25 bp, Probe sequence
acgaactattcaatcgattctataa

SEQ ID NO: 114815 - DNA, 25 bp, Probe sequence
actattcaatcgattctataattaa

SEQ ID NO: 114816 - DNA, 25 bp, Probe sequence
aaacgaactattcaatcgattctat

SEQ ID NO: 114817 - DNA, 25 bp, Probe sequence
aaaacgaactattcaatcgattcta

SEQ ID NO: 114818 - DNA, 25 bp, Probe sequence
aactattcaatcgattctataatta

SEQ ID NO: 114819 - DNA, 25 bp, Probe sequence
aacgaactattcaatcgattctata

SEQ ID NO: 114820 - DNA, 25 bp, Probe sequence
cgaactattcaatcgattctataat

SEQ ID NO: 114821 - DNA, 25 bp, Probe sequence
gaactattcaatcgattctataatt

SEQ ID NO: 114822 - DNA, 25 bp, Probe sequence
gagtaggtaaaacgaactattcaat

SEQ ID NO: 114823 - DNA, 25 bp, Probe sequence
gtaaccaaatattgaagaggtgtac

SEQ ID NO: 114824 - DNA, 25 bp, Probe sequence
gtgagtaggtaaaacgaactattca

SEQ ID NO: 114825 - DNA, 25 bp, Probe sequence
ggtaaaacgaactattcaatcgatt

SEQ ID NO: 114826 - DNA, 25 bp, Probe sequence
taaaacgaactattcaatcgattct

SEQ ID NO: 114827 - DNA, 25 bp, Probe sequence
tattcaatcgattctataattaaaa

SEQ ID NO: 114828 - DNA, 25 bp, Probe sequence
ttcaatcgattctataattaaaaat

SEQ ID NO: 114829 - DNA, 25 bp, Probe sequence
ataatttcctcctaatgtataatga

SEQ ID NO: 114830 - DNA, 25 bp, Probe sequence
atctaatttattcaagtactttcgc

SEQ ID NO: 114831 - DNA, 25 bp, Probe sequence
agtactttcgcaagatttattatct

SEQ ID NO: 114832 - DNA, 25 bp, Probe sequence
aaacgcacttattaattaactacat

SEQ ID NO: 114833 - DNA, 25 bp, Probe sequence
aatactgtgttttatctgcgaaatg

SEQ ID NO: 114834 - DNA, 25 bp, Probe sequence
caagcaaatatgagttgtagcccaa

SEQ ID NO: 114835 - DNA, 25 bp, Probe sequence
gacaatgttaacttttaaacgcact

SEQ ID NO: 114836 - DNA, 25 bp, Probe sequence
gagctatgcttattattacaatttg

SEQ ID NO: 114837 - DNA, 25 bp, Probe sequence
gagttgtagcccaaaatacttgtta

SEQ ID NO: 114838 - DNA, 25 bp, Probe sequence
gttttatctgcgaaatgtatcattt

SEQ ID NO: 114839 - DNA, 25 bp, Probe sequence
gtatcattttctaattcgtttcaca

SEQ ID NO: 114840 - DNA, 25 bp, Probe sequence
gtagctcatactcgagtccgatgca

SEQ ID NO: 114841 - DNA, 25 bp, Probe sequence
gtccgatgcaaataatttcctccta

SEQ ID NO: 114842 - DNA, 25 bp, Probe sequence
gtgtgtttttacttgaattttgact

SEQ ID NO: 114843 - DNA, 25 bp, Probe sequence
tatttggtacgtagctcatactcga

SEQ ID NO: 114844 - DNA, 25 bp, Probe sequence
atatcaatccgggttttattatgtt

SEQ ID NO: 114845 - DNA, 25 bp, Probe sequence
atcattagcatagtcatcaaagcct

SEQ ID NO: 114846 - DNA, 25 bp, Probe sequence
agcatagtcatcaaagccttatcaa

SEQ ID NO: 114847 - DNA, 25 bp, Probe sequence
agccttatcaagttttatttatagt

SEQ ID NO: 114848 - DNA, 25 bp, Probe sequence
aacacgaactcggattgataaaata

SEQ ID NO: 114849 - DNA, 25 bp, Probe sequence
aagtacgtagagatttcaacagaag

SEQ ID NO: 114850 - DNA, 25 bp, Probe sequence
aattatgacacttaacggtatcgat

SEQ ID NO: 114851 - DNA, 25 bp, Probe sequence
gacacttaacggtatcgatttcttt

SEQ ID NO: 114852 - DNA, 25 bp, Probe sequence
gtatagaactgatttaagtacgtag

SEQ ID NO: 114853 - DNA, 25 bp, Probe sequence
gtcatcaaagccttatcaagtttta

SEQ ID NO: 114854 - DNA, 25 bp, Probe sequence
ggtatcgatttcttttgatttcaaa

SEQ ID NO: 114855 - DNA, 25 bp, Probe sequence
tcaatccgggttttattatgttctt

SEQ ID NO: 114856 - DNA, 25 bp, Probe sequence
tatgttcttttatattatgttttac

SEQ ID NO: 114857 - DNA, 25 bp, Probe sequence
tatgttttacagtatatgtgttgat

SEQ ID NO: 114858 - DNA, 25 bp, Probe sequence
tatttaaacacgaactcggattgat

SEQ ID NO: 114859 - DNA, 25 bp, Probe sequence
atttcttaactggagattacctatt

SEQ ID NO: 114860 - DNA, 25 bp, Probe sequence
ataacactatttcttaactggagat

SEQ ID NO: 114861 - DNA, 25 bp, Probe sequence
atctcggttttatgctatgagaaaa

SEQ ID NO: 114862 - DNA, 25 bp, Probe sequence
aactggagattacctattattcatt

SEQ ID NO: 114863 - DNA, 25 bp, Probe sequence
cacctagtaagcattccttgtttta

SEQ ID NO: 114864 - DNA, 25 bp, Probe sequence
cgtggttaaatagggaatacataca

SEQ ID NO: 114865 - DNA, 25 bp, Probe sequence
gcattccttgttttactgggtgttt

SEQ ID NO: 114866 - DNA, 25 bp, Probe sequence
gaattcaaggtaaaataacactatt

SEQ ID NO: 114867 - DNA, 25 bp, Probe sequence
gaatacatacatataatctcggttt

SEQ ID NO: 114868 - DNA, 25 bp, Probe sequence
gaaggcacctagtaagcattccttg

SEQ ID NO: 114869 - DNA, 25 bp, Probe sequence
ggagattacctattattcattattt

SEQ ID NO: 114870 - DNA, 25 bp, Probe sequence
ggcacctagtaagcattccttgttt

SEQ ID NO: 114871 - DNA, 25 bp, Probe sequence
taagcattccttgttttactgggtg

SEQ ID NO: 114872 - DNA, 25 bp, Probe sequence
tactgggtgtttttttgaattcaag

SEQ ID NO: 114873 - DNA, 25 bp, Probe sequence
tataatctcggttttatgctatgag

SEQ ID NO: 114874 - DNA, 25 bp, Probe sequence
attatgttcaatttaaacatgcaat

SEQ ID NO: 114875 - DNA, 25 bp, Probe sequence
atttaaatctataattatgttcaat

SEQ ID NO: 114876 - DNA, 25 bp, Probe sequence
atgtggcgttgttatatttaaatct

SEQ ID NO: 114877 - DNA, 25 bp, Probe sequence
accaaattatatcttatgtggcgtt

SEQ ID NO: 114878 - DNA, 25 bp, Probe sequence
aaacacaatgtaagctattatgatg

SEQ ID NO: 114879 - DNA, 25 bp, Probe sequence
aacaccaaattatatcttatgtggc

SEQ ID NO: 114880 - DNA, 25 bp, Probe sequence
aacgccacataagatgcgtaacacc

SEQ ID NO: 114881 - DNA, 25 bp, Probe sequence
cacataagatgcgtaacaccaaatt

SEQ ID NO: 114882 - DNA, 25 bp, Probe sequence
gccacataagatgcgtaacaccaaa

SEQ ID NO: 114883 - DNA, 25 bp, Probe sequence
gcgtaacaccaaattatatcttatg

SEQ ID NO: 114884 - DNA, 25 bp, Probe sequence
gacatgttaaacacaatgtaagcta

SEQ ID NO: 114885 - DNA, 25 bp, Probe sequence
gatgcgtaacaccaaattatatctt

SEQ ID NO: 114886 - DNA, 25 bp, Probe sequence
gtggcgttgttatatttaaatctat

SEQ ID NO: 114887 - DNA, 25 bp, Probe sequence
tcttatgtggcgttgttatatttaa

SEQ ID NO: 114888 - DNA, 25 bp, Probe sequence
taagatgcgtaacaccaaattatat

SEQ ID NO: 114889 - DNA, 25 bp, Probe sequence
attgcttttttgctatactgaatca

SEQ ID NO: 114890 - DNA, 25 bp, Probe sequence
atcaattgcttttttgctatactga

SEQ ID NO: 114891 - DNA, 25 bp, Probe sequence
aatgcagtgtgaatgatgaggtgag

SEQ ID NO: 114892 - DNA, 25 bp, Probe sequence
aatactgatattttgaggagaagat

SEQ ID NO: 114893 - DNA, 25 bp, Probe sequence
caattgcttttttgctatactgaat

SEQ ID NO: 114894 - DNA, 25 bp, Probe sequence
gcttttttgctatactgaatcaata

SEQ ID NO: 114895 - DNA, 25 bp, Probe sequence
gcagtgtgaatgatgaggtgagagt

SEQ ID NO: 114896 - DNA, 25 bp, Probe sequence
gagagtattcagtgtaaaaagcaac

SEQ ID NO: 114897 - DNA, 25 bp, Probe sequence
gatgaggtgagagtattcagtgtaa

SEQ ID NO: 114898 - DNA, 25 bp, Probe sequence
gatattgttttgtatcaattgcttt

SEQ ID NO: 114899 - DNA, 25 bp, Probe sequence
gttttgtatcaattgcttttttgct

SEQ ID NO: 114900 - DNA, 25 bp, Probe sequence
gtatcaattgcttttttgctatact

SEQ ID NO: 114901 - DNA, 25 bp, Probe sequence
tcaagctcaatgcagtgtgaatgat

SEQ ID NO: 114902 - DNA, 25 bp, Probe sequence
ttgctatactgaatcaatactgata

SEQ ID NO: 114903 - DNA, 25 bp, Probe sequence
ttgtatcaattgcttttttgctata

SEQ ID NO: 114904 - DNA, 25 bp, Probe sequence
attgtgactgagatgaacttttatg

SEQ ID NO: 114905 - DNA, 25 bp, Probe sequence
atatcacttgaaaaatttcatgtag

SEQ ID NO: 114906 - DNA, 25 bp, Probe sequence
atgtcttagacactacaacactata

SEQ ID NO: 114907 - DNA, 25 bp, Probe sequence
actacaacactatattggcagtagt

SEQ ID NO: 114908 - DNA, 25 bp, Probe sequence
acactacaacactatattggcagta

SEQ ID NO: 114909 - DNA, 25 bp, Probe sequence
gaaaagatgatggataggctataaa

SEQ ID NO: 114910 - DNA, 25 bp, Probe sequence
gacactacaacactatattggcagt

SEQ ID NO: 114911 - DNA, 25 bp, Probe sequence
gactgagatgaacttttatgtctta

SEQ ID NO: 114912 - DNA, 25 bp, Probe sequence
gagatgaacttttatgtcttagaca

SEQ ID NO: 114913 - DNA, 25 bp, Probe sequence
gatgaacttttatgtcttagacact

SEQ ID NO: 114914 - DNA, 25 bp, Probe sequence
gtaattgtgactgagatgaactttt

SEQ ID NO: 114915 - DNA, 25 bp, Probe sequence
gtcttagacactacaacactatatt

SEQ ID NO: 114916 - DNA, 25 bp, Probe sequence
ggataggctataaagtaattgtgac

SEQ ID NO: 114917 - DNA, 25 bp, Probe sequence
tagacactacaacactatattggca

SEQ ID NO: 114918 - DNA, 25 bp, Probe sequence
tatgtcttagacactacaacactat

SEQ ID NO: 114919 - DNA, 25 bp, Probe sequence
atacaacatcaatcattttagtggc

SEQ ID NO: 114920 - DNA, 25 bp, Probe sequence
atcttatgattacactccaaaccta

SEQ ID NO: 114921 - DNA, 25 bp, Probe sequence
atcgggtcaagatcattccggatgc

SEQ ID NO: 114922 - DNA, 25 bp, Probe sequence
atgttagtctatctcattattataa

SEQ ID NO: 114923 - DNA, 25 bp, Probe sequence
acactccaaacctaatataatatcg

SEQ ID NO: 114924 - DNA, 25 bp, Probe sequence
aagacgcataaaccactatgattta

SEQ ID NO: 114925 - DNA, 25 bp, Probe sequence
ccgtcccgctctcaataaatgttag

SEQ ID NO: 114926 - DNA, 25 bp, Probe sequence
gaaacagggtaatagcttaaagcta

SEQ ID NO: 114927 - DNA, 25 bp, Probe sequence
ggtgcgttgaatcttatgattacac

SEQ ID NO: 114928 - DNA, 25 bp, Probe sequence
ggatgaatgtgttaatctatggcag

SEQ ID NO: 114929 - DNA, 25 bp, Probe sequence
ggcagattacacgtcatccgatttt

SEQ ID NO: 114930 - DNA, 25 bp, Probe sequence
ggcatgcgccaaaattatatgtctg

SEQ ID NO: 114931 - DNA, 25 bp, Probe sequence
tctatggcagattacacgtcatccg

SEQ ID NO: 114932 - DNA, 25 bp, Probe sequence
tcaatcattttagtggcatgcgcca

SEQ ID NO: 114933 - DNA, 25 bp, Probe sequence
tacacgtcatccgattttttataga

SEQ ID NO: 114934 - DNA, 25 bp, Probe sequence
atggtaataactgacattgatgtct

SEQ ID NO: 114935 - DNA, 25 bp, Probe sequence
agcttttatttatactgatatcttg

SEQ ID NO: 114936 - DNA, 25 bp, Probe sequence
agccatttaaatgacttactgtttt

SEQ ID NO: 114937 - DNA, 25 bp, Probe sequence
acgagcatattaagcttttatttat

SEQ ID NO: 114938 - DNA, 25 bp, Probe sequence
aaaacagtaagccatttaaatgact

SEQ ID NO: 114939 - DNA, 25 bp, Probe sequence
gcctactttctaaaaattggttcat

SEQ ID NO: 114940 - DNA, 25 bp, Probe sequence
gacattgatgtctatagagtgggac

SEQ ID NO: 114941 - DNA, 25 bp, Probe sequence
gagaaaatatagttatagctgtcta

SEQ ID NO: 114942 - DNA, 25 bp, Probe sequence
gatgtctatagagtgggacgagaaa

SEQ ID NO: 114943 - DNA, 25 bp, Probe sequence
gttcattaaatatatatacccactt

SEQ ID NO: 114944 - DNA, 25 bp, Probe sequence
tgacttactgttttttgaattaggc

SEQ ID NO: 114945 - DNA, 25 bp, Probe sequence
tactgttttttgaattaggccaaca

SEQ ID NO: 114946 - DNA, 25 bp, Probe sequence
tatagctgtctataacgagcatatt

SEQ ID NO: 114947 - DNA, 25 bp, Probe sequence
tatactgatatcttgaatttaatta

SEQ ID NO: 114948 - DNA, 25 bp, Probe sequence
tatatacccacttttaattgttaat

SEQ ID NO: 114949 - DNA, 25 bp, Probe sequence
attctgttattaagcgcgcacaatt

SEQ ID NO: 114950 - DNA, 25 bp, Probe sequence
aactaaatattccaacaaatcacaa

SEQ ID NO: 114951 - DNA, 25 bp, Probe sequence
aagcgcgcacaattaattagagata

SEQ ID NO: 114952 - DNA, 25 bp, Probe sequence
aagtaaatttgattgtgccttatca

SEQ ID NO: 114953 - DNA, 25 bp, Probe sequence
aatgtaacctattatgtatgctaaa

SEQ ID NO: 114954 - DNA, 25 bp, Probe sequence
aatgttgtttaattcgtgtactaat

SEQ ID NO: 114955 - DNA, 25 bp, Probe sequence
gaatattctgttattaagcgcgcac

SEQ ID NO: 114956 - DNA, 25 bp, Probe sequence
gacgttaaagtgcaataggtttcta

SEQ ID NO: 114957 - DNA, 25 bp, Probe sequence
gtatgctaaatgaaaaacacaccaa

SEQ ID NO: 114958 - DNA, 25 bp, Probe sequence
gtgccttatcaactaaatattccaa

SEQ ID NO: 114959 - DNA, 25 bp, Probe sequence
tcctttcttcccctaatacaatagt

SEQ ID NO: 114960 - DNA, 25 bp, Probe sequence
tcttcccctaatacaatagtttaag

SEQ ID NO: 114961 - DNA, 25 bp, Probe sequence
taggaaaatcaacttattggtgtgt

SEQ ID NO: 114962 - DNA, 25 bp, Probe sequence
tattcttttggtgtactttggtata

SEQ ID NO: 114963 - DNA, 25 bp, Probe sequence
ttcgtgtactaatattcttttggtg

SEQ ID NO: 114964 - DNA, 25 bp, Probe sequence
attcgattagaaaatggcactttaa

SEQ ID NO: 114965 - DNA, 25 bp, Probe sequence
atatcaattcagtatcaagctaata

SEQ ID NO: 114966 - DNA, 25 bp, Probe sequence
agactataatagactgtaccgaaca

SEQ ID NO: 114967 - DNA, 25 bp, Probe sequence
acgttctgtgtttatttgtcggaat

SEQ ID NO: 114968 - DNA, 25 bp, Probe sequence
acaattgagattgacacagatttaa

SEQ ID NO: 114969 - DNA, 25 bp, Probe sequence
aacaacatgttgtgcataaatagtt

SEQ ID NO: 114970 - DNA, 25 bp, Probe sequence
aatagggcattacacttttatgaat

SEQ ID NO: 114971 - DNA, 25 bp, Probe sequence
gctaataagctttttcttgatttct

SEQ ID NO: 114972 - DNA, 25 bp, Probe sequence
gctttttcttgatttctgttgatac

SEQ ID NO: 114973 - DNA, 25 bp, Probe sequence
gactgtaccgaacaaacgttctgtg

SEQ ID NO: 114974 - DNA, 25 bp, Probe sequence
gtattggtgcctagttggaacgttt

SEQ ID NO: 114975 - DNA, 25 bp, Probe sequence
ggcactttaaatcatagtgtgtctt

SEQ ID NO: 114976 - DNA, 25 bp, Probe sequence
tggaacgttttacgaacattcgatt

SEQ ID NO: 114977 - DNA, 25 bp, Probe sequence
tgttcaagtttttctaatttagtat

SEQ ID NO: 114978 - DNA, 25 bp, Probe sequence
tttatcgcctcttttatataaaatt

SEQ ID NO: 114979 - DNA, 25 bp, Probe sequence
attcaacccatataagctactattt

SEQ ID NO: 114980 - DNA, 25 bp, Probe sequence
agtgatttttatacattcaacccat

SEQ ID NO: 114981 - DNA, 25 bp, Probe sequence
agataaccatagtaaccatgttgtt

SEQ ID NO: 114982 - DNA, 25 bp, Probe sequence
aaatctatgcaattggtttacattt

SEQ ID NO: 114983 - DNA, 25 bp, Probe sequence
aacccatataagctactattttctc

SEQ ID NO: 114984 - DNA, 25 bp, Probe sequence
aatacaatgctgagataaccatagt

SEQ ID NO: 114985 - DNA, 25 bp, Probe sequence
ccatataagctactattttctcaaa

SEQ ID NO: 114986 - DNA, 25 bp, Probe sequence
gaaaataagtagcttcattatagtt

SEQ ID NO: 114987 - DNA, 25 bp, Probe sequence
gatatccaatgatgtaaatactaca

SEQ ID NO: 114988 - DNA, 25 bp, Probe sequence
gtagcttcattatagttaatacaat

SEQ ID NO: 114989 - DNA, 25 bp, Probe sequence
gtaaccatgttgttaaagcattttt

SEQ ID NO: 114990 - DNA, 25 bp, Probe sequence
tgtactgagcaaatggaagatatcc

SEQ ID NO: 114991 - DNA, 25 bp, Probe sequence
tacattcaacccatataagctacta

SEQ ID NO: 114992 - DNA, 25 bp, Probe sequence
tatgcaattggtttacatttgagaa

SEQ ID NO: 114993 - DNA, 25 bp, Probe sequence
ttttctcaaatataaatctatgcaa

SEQ ID NO: 114994 - DNA, 25 bp, Probe sequence
atgtctgtatttgtcaattattgag

SEQ ID NO: 114995 - DNA, 25 bp, Probe sequence
actgctatgtctgtatttgtcaatt

SEQ ID NO: 114996 - DNA, 25 bp, Probe sequence
acagctaatcatctggtctgaatta

SEQ ID NO: 114997 - DNA, 25 bp, Probe sequence
aacagctaatcatctggtctgaatt

SEQ ID NO: 114998 - DNA, 25 bp, Probe sequence
caaacagctaatcatctggtctgaa

SEQ ID NO: 114999 - DNA, 25 bp, Probe sequence
gctatgtctgtatttgtcaattatt

SEQ ID NO: 115000 - DNA, 25 bp, Probe sequence
gcagatgattagactgctatgtctg

SEQ ID NO: 115001 - DNA, 25 bp, Probe sequence
gacaaacagctaatcatctggtctg

SEQ ID NO: 115002 - DNA, 25 bp, Probe sequence
gagtaacattacaggaggaaattat

SEQ ID NO: 115003 - DNA, 25 bp, Probe sequence
gatgattagactgctatgtctgtat

SEQ ID NO: 115004 - DNA, 25 bp, Probe sequence
gattagactgctatgtctgtatttg

SEQ ID NO: 115005 - DNA, 25 bp, Probe sequence
tgtcaattattgagtaacattacag

SEQ ID NO: 115006 - DNA, 25 bp, Probe sequence
tctggtctgaattagcagatgatta

SEQ ID NO: 115007 - DNA, 25 bp, Probe sequence
taatcatctggtctgaattagcaga

SEQ ID NO: 115008 - DNA, 25 bp, Probe sequence
tagactgctatgtctgtatttgtca

SEQ ID NO: 115009 - DNA, 25 bp, Probe sequence
atagcgattcgtttcgtcttgtctc

SEQ ID NO: 115010 - DNA, 25 bp, Probe sequence
aagcgtatgcatattttgaaaaagt

SEQ ID NO: 115011 - DNA, 25 bp, Probe sequence
aatagcgattcgtttcgtcttgtct

SEQ ID NO: 115012 - DNA, 25 bp, Probe sequence
aattaaaagaccttcacatgtaaag

SEQ ID NO: 115013 - DNA, 25 bp, Probe sequence
catgttgaaggtcttttctctatgc

SEQ ID NO: 115014 - DNA, 25 bp, Probe sequence
ctacatgttgaaggtcttttctcta

SEQ ID NO: 115015 - DNA, 25 bp, Probe sequence
gaaggtcttttctctatgcttaaaa

SEQ ID NO: 115016 - DNA, 25 bp, Probe sequence
gttgaaggtcttttctctatgctta

SEQ ID NO: 115017 - DNA, 25 bp, Probe sequence
gtcttgtctcctacatgttgaaggt

SEQ ID NO: 115018 - DNA, 25 bp, Probe sequence
gtctcctacatgttgaaggtctttt

SEQ ID NO: 115019 - DNA, 25 bp, Probe sequence
ggtcttttctctatgcttaaaagcg

SEQ ID NO: 115020 - DNA, 25 bp, Probe sequence
tcgtcttgtctcctacatgttgaag

SEQ ID NO: 115021 - DNA, 25 bp, Probe sequence
tcacatgtaaagggaaatagcgatt

SEQ ID NO: 115022 - DNA, 25 bp, Probe sequence
ttctctatgcttaaaagcgtatgca

SEQ ID NO: 115023 - DNA, 25 bp, Probe sequence
ttcgtcttgtctcctacatgttgaa

SEQ ID NO: 115024 - DNA, 25 bp, Probe sequence
atttcacatcaagcacacagattaa

SEQ ID NO: 115025 - DNA, 25 bp, Probe sequence
atatttcacatcaagcacacagatt

SEQ ID NO: 115026 - DNA, 25 bp, Probe sequence
aggggtgatgcgccaattaaagaag

SEQ ID NO: 115027 - DNA, 25 bp, Probe sequence
aaaggggtgatgcgccaattaaaga

SEQ ID NO: 115028 - DNA, 25 bp, Probe sequence
aaagcatttatttatatttcacatc

SEQ ID NO: 115029 - DNA, 25 bp, Probe sequence
cacatcaagcacacagattaagcca

SEQ ID NO: 115030 - DNA, 25 bp, Probe sequence
catttatttatatttcacatcaagc

SEQ ID NO: 115031 - DNA, 25 bp, Probe sequence
ctttaaaggggtgatgcgccaatta

SEQ ID NO: 115032 - DNA, 25 bp, Probe sequence
gcacacagattaagccaaaagagga

SEQ ID NO: 115033 - DNA, 25 bp, Probe sequence
gacactttaaaggggtgatgcgcca

SEQ ID NO: 115034 - DNA, 25 bp, Probe sequence
gagacactttaaaggggtgatgcgc

SEQ ID NO: 115035 - DNA, 25 bp, Probe sequence
tgatgcgccaattaaagaagggtta

SEQ ID NO: 115036 - DNA, 25 bp, Probe sequence
tcaagcacacagattaagccaaaag

SEQ ID NO: 115037 - DNA, 25 bp, Probe sequence
tatttatatttcacatcaagcacac

SEQ ID NO: 115038 - DNA, 25 bp, Probe sequence
tttatatttcacatcaagcacacag

SEQ ID NO: 115039 - DNA, 25 bp, Probe sequence
ataccagtgggctccaaacatagag

SEQ ID NO: 115040 - DNA, 25 bp, Probe sequence
agtgggctccaaacatagagaaatt

SEQ ID NO: 115041 - DNA, 25 bp, Probe sequence
aaaggaaatctgggacgtcaatcaa

SEQ ID NO: 115042 - DNA, 25 bp, Probe sequence
aatgttctgttgtcagtcgttggtt

SEQ ID NO: 115043 - DNA, 25 bp, Probe sequence
ctgggacgtcaatcaatgtcctaga

SEQ ID NO: 115044 - DNA, 25 bp, Probe sequence
gaatgaacatgtacttgtaacaagt

SEQ ID NO: 115045 - DNA, 25 bp, Probe sequence
gactctaaaatgttctgttgtcagt

SEQ ID NO: 115046 - DNA, 25 bp, Probe sequence
gttcatttcaataccagtgggctcc

SEQ ID NO: 115047 - DNA, 25 bp, Probe sequence
gtaacaagttcatttcaataccagt

SEQ ID NO: 115048 - DNA, 25 bp, Probe sequence
gtcagtcgttggttgaatgaacatg

SEQ ID NO: 115049 - DNA, 25 bp, Probe sequence
gtcctagactctaaaatgttctgtt

SEQ ID NO: 115050 - DNA, 25 bp, Probe sequence
ggaaatctgggacgtcaatcaatgt

SEQ ID NO: 115051 - DNA, 25 bp, Probe sequence
taaaggtcttaatcattgctcccct

SEQ ID NO: 115052 - DNA, 25 bp, Probe sequence
tttcaataccagtgggctccaaaca

SEQ ID NO: 115053 - DNA, 25 bp, Probe sequence
ttctgttgtcagtcgttggttgaat

SEQ ID NO: 115054 - DNA, 25 bp, Probe sequence
acccactccctataatgttttgact

SEQ ID NO: 115055 - DNA, 25 bp, Probe sequence
agtggtgctttatcatgtctgaccc

SEQ ID NO: 115056 - DNA, 25 bp, Probe sequence
actccctataatgttttgactatgt

SEQ ID NO: 115057 - DNA, 25 bp, Probe sequence
aagtggtgctttatcatgtctgacc

SEQ ID NO: 115058 - DNA, 25 bp, Probe sequence
cactccctataatgttttgactatg

SEQ ID NO: 115059 - DNA, 25 bp, Probe sequence
ctccctataatgttttgactatgtt

SEQ ID NO: 115060 - DNA, 25 bp, Probe sequence
ccctataatgttttgactatgttgt

SEQ ID NO: 115061 - DNA, 25 bp, Probe sequence
cccactccctataatgttttgacta

SEQ ID NO: 115062 - DNA, 25 bp, Probe sequence
ccactccctataatgttttgactat

SEQ ID NO: 115063 - DNA, 25 bp, Probe sequence
gaagtggtgctttatcatgtctgac

SEQ ID NO: 115064 - DNA, 25 bp, Probe sequence
gacccactccctataatgttttgac

SEQ ID NO: 115065 - DNA, 25 bp, Probe sequence
gtggtgctttatcatgtctgaccca

SEQ ID NO: 115066 - DNA, 25 bp, Probe sequence
tggtgctttatcatgtctgacccac

SEQ ID NO: 115067 - DNA, 25 bp, Probe sequence
tgacccactccctataatgttttga

SEQ ID NO: 115068 - DNA, 25 bp, Probe sequence
tccctataatgttttgactatgttg

SEQ ID NO: 115069 - DNA, 25 bp, Probe sequence
attataaaatacggcattattgtcg

SEQ ID NO: 115070 - DNA, 25 bp, Probe sequence
atatcatatagtattataccaattt

SEQ ID NO: 115071 - DNA, 25 bp, Probe sequence
ataccaattttaaaattcatttgcg

SEQ ID NO: 115072 - DNA, 25 bp, Probe sequence
atcatatagtattataccaatttta

SEQ ID NO: 115073 - DNA, 25 bp, Probe sequence
agtacatcctttctcatgtctttaa

SEQ ID NO: 115074 - DNA, 25 bp, Probe sequence
aatatcatatagtattataccaatt

SEQ ID NO: 115075 - DNA, 25 bp, Probe sequence
aattataaaatacggcattattgtc

SEQ ID NO: 115076 - DNA, 25 bp, Probe sequence
gtacatcctttctcatgtctttaat

SEQ ID NO: 115077 - DNA, 25 bp, Probe sequence
tcagtacatcctttctcatgtcttt

SEQ ID NO: 115078 - DNA, 25 bp, Probe sequence
taaaattcatttgcgaaaattgaaa

SEQ ID NO: 115079 - DNA, 25 bp, Probe sequence
tacatcctttctcatgtctttaata

SEQ ID NO: 115080 - DNA, 25 bp, Probe sequence
taccaattttaaaattcatttgcga

SEQ ID NO: 115081 - DNA, 25 bp, Probe sequence
tatagtattataccaattttaaaat

SEQ ID NO: 115082 - DNA, 25 bp, Probe sequence
tttaaaattcatttgcgaaaattga

SEQ ID NO: 115083 - DNA, 25 bp, Probe sequence
ttctcagtacatcctttctcatgtc

SEQ ID NO: 115084 - DNA, 25 bp, Probe sequence
ataacataattcattttcataataa

SEQ ID NO: 115085 - DNA, 25 bp, Probe sequence
atcacgataaagtctggaatactat

SEQ ID NO: 115086 - DNA, 25 bp, Probe sequence
acatgtttttgtataatgaatctgt

SEQ ID NO: 115087 - DNA, 25 bp, Probe sequence
aacataattcattttcataataaac

SEQ ID NO: 115088 - DNA, 25 bp, Probe sequence
aagtctggaatactataacataatt

SEQ ID NO: 115089 - DNA, 25 bp, Probe sequence
aatgaatctgttaaggagtgcaatc

SEQ ID NO: 115090 - DNA, 25 bp, Probe sequence
aatactataacataattcattttca

SEQ ID NO: 115091 - DNA, 25 bp, Probe sequence
aattcattttcataataaacatgtt

SEQ ID NO: 115092 - DNA, 25 bp, Probe sequence
ctataacataattcattttcataat

SEQ ID NO: 115093 - DNA, 25 bp, Probe sequence
gataaagtctggaatactataacat

SEQ ID NO: 115094 - DNA, 25 bp, Probe sequence
gtttttgtataatgaatctgttaag

SEQ ID NO: 115095 - DNA, 25 bp, Probe sequence
tcattttcataataaacatgttttt

SEQ ID NO: 115096 - DNA, 25 bp, Probe sequence
taatttaatcacgataaagtctgga

SEQ ID NO: 115097 - DNA, 25 bp, Probe sequence
tactataacataattcattttcata

SEQ ID NO: 115098 - DNA, 25 bp, Probe sequence
ttaatcacgataaagtctggaatac

SEQ ID NO: 115099 - DNA, 25 bp, Probe sequence
ataaaaatgtcacgcagatgctatt

SEQ ID NO: 115100 - DNA, 25 bp, Probe sequence
atgtcacgcagatgctatttaaatg

SEQ ID NO: 115101 - DNA, 25 bp, Probe sequence
atggttaacatgtcaacttactatg

SEQ ID NO: 115102 - DNA, 25 bp, Probe sequence
acgcagatgctatttaaatgtgata

SEQ ID NO: 115103 - DNA, 25 bp, Probe sequence
aaatgtcacgcagatgctatttaaa

SEQ ID NO: 115104 - DNA, 25 bp, Probe sequence
aaaaatgtcacgcagatgctattta

SEQ ID NO: 115105 - DNA, 25 bp, Probe sequence
aatggtaaacattgatattaactat

SEQ ID NO: 115106 - DNA, 25 bp, Probe sequence
catgtcaacttactatgtgtataat

SEQ ID NO: 115107 - DNA, 25 bp, Probe sequence
gaatttatggttaacatgtcaactt

SEQ ID NO: 115108 - DNA, 25 bp, Probe sequence
gtataaaaatgtcacgcagatgcta

SEQ ID NO: 115109 - DNA, 25 bp, Probe sequence
gtcaacttactatgtgtataatggt

SEQ ID NO: 115110 - DNA, 25 bp, Probe sequence
gtcacgcagatgctatttaaatgtg

SEQ ID NO: 115111 - DNA, 25 bp, Probe sequence
ggttaacatgtcaacttactatgtg

SEQ ID NO: 115112 - DNA, 25 bp, Probe sequence
taacatgtcaacttactatgtgtat

SEQ ID NO: 115113 - DNA, 25 bp, Probe sequence
tatggttaacatgtcaacttactat

SEQ ID NO: 115114 - DNA, 25 bp, Probe sequence
atcatgtcatgttaaatgttcgcat

SEQ ID NO: 115115 - DNA, 25 bp, Probe sequence
aaatgttcgcatataatcacgagat

SEQ ID NO: 115116 - DNA, 25 bp, Probe sequence
cattttgccttacactactagacgt

SEQ ID NO: 115117 - DNA, 25 bp, Probe sequence
gaatagcacaacttaaattcgtgtg

SEQ ID NO: 115118 - DNA, 25 bp, Probe sequence
gaagcatactgttatttactggaat

SEQ ID NO: 115119 - DNA, 25 bp, Probe sequence
gatgttctgaccttttattttatgt

SEQ ID NO: 115120 - DNA, 25 bp, Probe sequence
gtagtttggctataatgatgttctg

SEQ ID NO: 115121 - DNA, 25 bp, Probe sequence
gtcacctttagaagcagttaagtta

SEQ ID NO: 115122 - DNA, 25 bp, Probe sequence
gtgtgaatcagagtagtttggctat

SEQ ID NO: 115123 - DNA, 25 bp, Probe sequence
ggttggaacattttgccttacacta

SEQ ID NO: 115124 - DNA, 25 bp, Probe sequence
ggaacattttgccttacactactag

SEQ ID NO: 115125 - DNA, 25 bp, Probe sequence
ggctataatgatgttctgacctttt

SEQ ID NO: 115126 - DNA, 25 bp, Probe sequence
taatgtattcgagtatttttattga

SEQ ID NO: 115127 - DNA, 25 bp, Probe sequence
tacactactagacgtgaatagcaca

SEQ ID NO: 115128 - DNA, 25 bp, Probe sequence
tattttatgtcacctttagaagcag

SEQ ID NO: 115129 - DNA, 25 bp, Probe sequence
atcacgctatcattgcactgaatgt

SEQ ID NO: 115130 - DNA, 25 bp, Probe sequence
atcattgcactgaatgttagcgtga

SEQ ID NO: 115131 - DNA, 25 bp, Probe sequence
atgttagcgtgatttttttattaat

SEQ ID NO: 115132 - DNA, 25 bp, Probe sequence
agaaggactaaattgatgatgctgt

SEQ ID NO: 115133 - DNA, 25 bp, Probe sequence
aaatcacgctatcattgcactgaat

SEQ ID NO: 115134 - DNA, 25 bp, Probe sequence
aacatttatgatggttagcaaaacg

SEQ ID NO: 115135 - DNA, 25 bp, Probe sequence
aattgatgatgctgtcatgatggtt

SEQ ID NO: 115136 - DNA, 25 bp, Probe sequence
cacgctatcattgcactgaatgtta

SEQ ID NO: 115137 - DNA, 25 bp, Probe sequence
gcactgaatgttagcgtgatttttt

SEQ ID NO: 115138 - DNA, 25 bp, Probe sequence
gaaaaatcacgctatcattgcactg

SEQ ID NO: 115139 - DNA, 25 bp, Probe sequence
gatgctgtcatgatggttaataaca

SEQ ID NO: 115140 - DNA, 25 bp, Probe sequence
ggttagcaaaacgaattagaagatc

SEQ ID NO: 115141 - DNA, 25 bp, Probe sequence
tgaactagtatataatcgtttgttt

SEQ ID NO: 115142 - DNA, 25 bp, Probe sequence
ttagaagatcgaaagtatacgtaaa

SEQ ID NO: 115143 - DNA, 25 bp, Probe sequence
ttaattaagcctgagttgaactagt

SEQ ID NO: 115144 - DNA, 25 bp, Probe sequence
ataagaaaaactgttaatctttgct

SEQ ID NO: 115145 - DNA, 25 bp, Probe sequence
atcaattcacctccaatgatatgtg

SEQ ID NO: 115146 - DNA, 25 bp, Probe sequence
acctccaatgatatgtgttatttat

SEQ ID NO: 115147 - DNA, 25 bp, Probe sequence
aatagtgagactttgtgttagtatg

SEQ ID NO: 115148 - DNA, 25 bp, Probe sequence
aattcacctccaatgatatgtgtta

SEQ ID NO: 115149 - DNA, 25 bp, Probe sequence
gcaaaggattaacagttttgtcgtt

SEQ ID NO: 115150 - DNA, 25 bp, Probe sequence
gaacttgtatggttcaaatttaaat

SEQ ID NO: 115151 - DNA, 25 bp, Probe sequence
gaacaattgaagtttacaacttgtt

SEQ ID NO: 115152 - DNA, 25 bp, Probe sequence
gagactttgtgttagtatgatgaac

SEQ ID NO: 115153 - DNA, 25 bp, Probe sequence
gttgttacaactttcaatagtgaga

SEQ ID NO: 115154 - DNA, 25 bp, Probe sequence
gttaatctttgctattatactatga

SEQ ID NO: 115155 - DNA, 25 bp, Probe sequence
gttagtatgatgaacttgtatggtt

SEQ ID NO: 115156 - DNA, 25 bp, Probe sequence
tctttgctattatactatgatttaa

SEQ ID NO: 115157 - DNA, 25 bp, Probe sequence
tacaacttgttgttacaactttcaa

SEQ ID NO: 115158 - DNA, 25 bp, Probe sequence
ttcacctccaatgatatgtgttatt

SEQ ID NO: 115159 - DNA, 25 bp, Probe sequence
atgtatgatatagactttgatgtta

SEQ ID NO: 115160 - DNA, 25 bp, Probe sequence
agaaatgaatcgtatagttgtaaat

SEQ ID NO: 115161 - DNA, 25 bp, Probe sequence
acaatttgtcattagtttacatata

SEQ ID NO: 115162 - DNA, 25 bp, Probe sequence
aagtgaaaacttacaatttgtcatt

SEQ ID NO: 115163 - DNA, 25 bp, Probe sequence
aatgttgccttaaatgatatgatga

SEQ ID NO: 115164 - DNA, 25 bp, Probe sequence
ctcctttaattgaccactagctatt

SEQ ID NO: 115165 - DNA, 25 bp, Probe sequence
gaatcgactcctttaattgaccact

SEQ ID NO: 115166 - DNA, 25 bp, Probe sequence
gactcctttaattgaccactagcta

SEQ ID NO: 115167 - DNA, 25 bp, Probe sequence
gatatatcattctataaagacaata

SEQ ID NO: 115168 - DNA, 25 bp, Probe sequence
gatatcattgattgagcgaattaat

SEQ ID NO: 115169 - DNA, 25 bp, Probe sequence
gtctgaatcgactcctttaattgac

SEQ ID NO: 115170 - DNA, 25 bp, Probe sequence
tcgactcctttaattgaccactagc

SEQ ID NO: 115171 - DNA, 25 bp, Probe sequence
tttgatgttaaaatgttgccttaaa

SEQ ID NO: 115172 - DNA, 25 bp, Probe sequence
ttaattgaccactagctattgtaag

SEQ ID NO: 115173 - DNA, 25 bp, Probe sequence
ttgaccactagctattgtaagtgaa

SEQ ID NO: 115174 - DNA, 25 bp, Probe sequence
attagagttagccctcctaagctag

SEQ ID NO: 115175 - DNA, 25 bp, Probe sequence
atgtctgtacttttatgttgttata

SEQ ID NO: 115176 - DNA, 25 bp, Probe sequence
aacactagcatggaacgtgctttcc

SEQ ID NO: 115177 - DNA, 25 bp, Probe sequence
aatgatgtctgtacttttatgttgt

SEQ ID NO: 115178 - DNA, 25 bp, Probe sequence
gccctcctaagctagtgtttttatt

SEQ ID NO: 115179 - DNA, 25 bp, Probe sequence
gcatggaacgtgctttccaaattgc

SEQ ID NO: 115180 - DNA, 25 bp, Probe sequence
gcaaagtaacaatacgcaattagag

SEQ ID NO: 115181 - DNA, 25 bp, Probe sequence
gcaattagagttagccctcctaagc

SEQ ID NO: 115182 - DNA, 25 bp, Probe sequence
gaacgtgctttccaaattgcaaagt

SEQ ID NO: 115183 - DNA, 25 bp, Probe sequence
gacatactcacaaaaaacactagca

SEQ ID NO: 115184 - DNA, 25 bp, Probe sequence
gagttagccctcctaagctagtgtt

SEQ ID NO: 115185 - DNA, 25 bp, Probe sequence
gttagccctcctaagctagtgtttt

SEQ ID NO: 115186 - DNA, 25 bp, Probe sequence
gttataaaggaagacatactcacaa

SEQ ID NO: 115187 - DNA, 25 bp, Probe sequence
gtgctttccaaattgcaaagtaaca

SEQ ID NO: 115188 - DNA, 25 bp, Probe sequence
tacgcaattagagttagccctccta

SEQ ID NO: 115189 - DNA, 25 bp, Probe sequence
atttaatcttcattatacactgaaa

SEQ ID NO: 115190 - DNA, 25 bp, Probe sequence
atgagtatattttaggaggacgact

SEQ ID NO: 115191 - DNA, 25 bp, Probe sequence
atgacatgactataaatcgtttgat

SEQ ID NO: 115192 - DNA, 25 bp, Probe sequence
actgaaatattgtatcattgctatg

SEQ ID NO: 115193 - DNA, 25 bp, Probe sequence
aactccttaattcataagcttaaga

SEQ ID NO: 115194 - DNA, 25 bp, Probe sequence
aatcgtttgattgccattttctttt

SEQ ID NO: 115195 - DNA, 25 bp, Probe sequence
aataactccttaattcataagctta

SEQ ID NO: 115196 - DNA, 25 bp, Probe sequence
gccattttctttttaactgaaatat

SEQ ID NO: 115197 - DNA, 25 bp, Probe sequence
gattatttaatcttcattatacact

SEQ ID NO: 115198 - DNA, 25 bp, Probe sequence
gattgccattttctttttaactgaa

SEQ ID NO: 115199 - DNA, 25 bp, Probe sequence
gtatcattgctatgagtatatttta

SEQ ID NO: 115200 - DNA, 25 bp, Probe sequence
tgattgccattttctttttaactga

SEQ ID NO: 115201 - DNA, 25 bp, Probe sequence
tcgtttgattgccattttcttttta

SEQ ID NO: 115202 - DNA, 25 bp, Probe sequence
tttgattgccattttctttttaact

SEQ ID NO: 115203 - DNA, 25 bp, Probe sequence
ttatacactgaaaatgacatgacta

SEQ ID NO: 115204 - DNA, 25 bp, Probe sequence
attggaaattatctctcgtatacat

SEQ ID NO: 115205 - DNA, 25 bp, Probe sequence
attaattcatcctcatacttcactt

SEQ ID NO: 115206 - DNA, 25 bp, Probe sequence
attacgggaaattaattcatcctca

SEQ ID NO: 115207 - DNA, 25 bp, Probe sequence
atctctcgtatacatggctttaaat

SEQ ID NO: 115208 - DNA, 25 bp, Probe sequence
aaattaattcatcctcatacttcac

SEQ ID NO: 115209 - DNA, 25 bp, Probe sequence
aagagtctatattgtaattggaaat

SEQ ID NO: 115210 - DNA, 25 bp, Probe sequence
aatcattataatattaggctctttt

SEQ ID NO: 115211 - DNA, 25 bp, Probe sequence
aattatctctcgtatacatggcttt

SEQ ID NO: 115212 - DNA, 25 bp, Probe sequence
tcctcatacttcacttactaatgaa

SEQ ID NO: 115213 - DNA, 25 bp, Probe sequence
tcatcctcatacttcacttactaat

SEQ ID NO: 115214 - DNA, 25 bp, Probe sequence
taattcatcctcatacttcacttac

SEQ ID NO: 115215 - DNA, 25 bp, Probe sequence
taatattaggctcttttttacgttg

SEQ ID NO: 115216 - DNA, 25 bp, Probe sequence
tacatggctttaaatgttcatcatt

SEQ ID NO: 115217 - DNA, 25 bp, Probe sequence
ttacgttgaaatgaggttttaagca

SEQ ID NO: 115218 - DNA, 25 bp, Probe sequence
ttaagcattaaacattacgggaaat

SEQ ID NO: 115219 - DNA, 25 bp, Probe sequence
attatgactatttcatagttcgata

SEQ ID NO: 115220 - DNA, 25 bp, Probe sequence
atagttcgataatgtaatttgttga

SEQ ID NO: 115221 - DNA, 25 bp, Probe sequence
atactccaaaagcaaattatgacta

SEQ ID NO: 115222 - DNA, 25 bp, Probe sequence
gcacaagtgcttttttatactccaa

SEQ ID NO: 115223 - DNA, 25 bp, Probe sequence
gataagatatattgttgtaggccaa

SEQ ID NO: 115224 - DNA, 25 bp, Probe sequence
gtttaaagcacttgtgtttttgcac

SEQ ID NO: 115225 - DNA, 25 bp, Probe sequence
gtatagtccgagtcgaaaatcgtaa

SEQ ID NO: 115226 - DNA, 25 bp, Probe sequence
gtatgtcagtctattgtatagtccg

SEQ ID NO: 115227 - DNA, 25 bp, Probe sequence
gtctattgtatagtccgagtcgaaa

SEQ ID NO: 115228 - DNA, 25 bp, Probe sequence
gtgactatgctaatgttaatggatg

SEQ ID NO: 115229 - DNA, 25 bp, Probe sequence
gtgtttttgcacaagtgctttttta

SEQ ID NO: 115230 - DNA, 25 bp, Probe sequence
tgtaggccaaacagttttttagcta

SEQ ID NO: 115231 - DNA, 25 bp, Probe sequence
taggaagtataattgcgtattgaga

SEQ ID NO: 115232 - DNA, 25 bp, Probe sequence
tttatattgattccacaaatgagta

SEQ ID NO: 115233 - DNA, 25 bp, Probe sequence
ttagtgataaacttgttgacaacag

SEQ ID NO: 115234 - DNA, 25 bp, Probe sequence
attagggggtctctttgacttagag

SEQ ID NO: 115235 - DNA, 25 bp, Probe sequence
attgtcagtgtgcttatatttctta

SEQ ID NO: 115236 - DNA, 25 bp, Probe sequence
atatgtcgatgataaatgtactgat

SEQ ID NO: 115237 - DNA, 25 bp, Probe sequence
aggctatggaattatcagaaatcaa

SEQ ID NO: 115238 - DNA, 25 bp, Probe sequence
aaaagatacaaatcaatgacttgaa

SEQ ID NO: 115239 - DNA, 25 bp, Probe sequence
aactaattgtcagtgtgcttatatt

SEQ ID NO: 115240 - DNA, 25 bp, Probe sequence
cacaaattagggggtctctttgact

SEQ ID NO: 115241 - DNA, 25 bp, Probe sequence
gcgaaggctatggaattatcagaaa

SEQ ID NO: 115242 - DNA, 25 bp, Probe sequence
gcataaactaattgtcagtgtgctt

SEQ ID NO: 115243 - DNA, 25 bp, Probe sequence
gagaacaaagaaactaatatccaag

SEQ ID NO: 115244 - DNA, 25 bp, Probe sequence
gataaatgtactgatttttaacaat

SEQ ID NO: 115245 - DNA, 25 bp, Probe sequence
gggggtctctttgacttagagaaca

SEQ ID NO: 115246 - DNA, 25 bp, Probe sequence
gggtctctttgacttagagaacaaa

SEQ ID NO: 115247 - DNA, 25 bp, Probe sequence
ggagcgaaggctatggaattatcag

SEQ ID NO: 115248 - DNA, 25 bp, Probe sequence
taggcatatgtcgatgataaatgta

SEQ ID NO: 115249 - DNA, 25 bp, Probe sequence
attagattttggaatatgatttgtt

SEQ ID NO: 115250 - DNA, 25 bp, Probe sequence
atttaagtacaattcggtagataga

SEQ ID NO: 115251 - DNA, 25 bp, Probe sequence
atatttaagtacaattcggtagata

SEQ ID NO: 115252 - DNA, 25 bp, Probe sequence
agtacaattcggtagatagagttag

SEQ ID NO: 115253 - DNA, 25 bp, Probe sequence
agatagagttagaatatatttttta

SEQ ID NO: 115254 - DNA, 25 bp, Probe sequence
aagtacaattcggtagatagagtta

SEQ ID NO: 115255 - DNA, 25 bp, Probe sequence
aatatttaagtacaattcggtagat

SEQ ID NO: 115256 - DNA, 25 bp, Probe sequence
gatttgtttatgaatatttaagtac

SEQ ID NO: 115257 - DNA, 25 bp, Probe sequence
gattttggaatatgatttgtttatg

SEQ ID NO: 115258 - DNA, 25 bp, Probe sequence
gtacaattcggtagatagagttaga

SEQ ID NO: 115259 - DNA, 25 bp, Probe sequence
taagtacaattcggtagatagagtt

SEQ ID NO: 115260 - DNA, 25 bp, Probe sequence
tacaattcggtagatagagttagaa

SEQ ID NO: 115261 - DNA, 25 bp, Probe sequence
tagattttggaatatgatttgttta

SEQ ID NO: 115262 - DNA, 25 bp, Probe sequence
tatatattttaaaaccgaggctcta

SEQ ID NO: 115263 - DNA, 25 bp, Probe sequence
tttggaatatgatttgtttatgaat

SEQ ID NO: 115264 - DNA, 25 bp, Probe sequence
attgttaaccatttgattacatcgt

SEQ ID NO: 115265 - DNA, 25 bp, Probe sequence
atcgttataacaatagcttttgaca

SEQ ID NO: 115266 - DNA, 25 bp, Probe sequence
agcttttgacaaaatgtattgtgct

SEQ ID NO: 115267 - DNA, 25 bp, Probe sequence
aaccatttgattacatcgttataac

SEQ ID NO: 115268 - DNA, 25 bp, Probe sequence
cactatgataaaaggttgtattctt

SEQ ID NO: 115269 - DNA, 25 bp, Probe sequence
catttgattacatcgttataacaat

SEQ ID NO: 115270 - DNA, 25 bp, Probe sequence
ctaacagcaaaggaatgacagcaag

SEQ ID NO: 115271 - DNA, 25 bp, Probe sequence
gcatacttaaaatactaacagcaaa

SEQ ID NO: 115272 - DNA, 25 bp, Probe sequence
gattacatcgttataacaatagctt

SEQ ID NO: 115273 - DNA, 25 bp, Probe sequence
gttaaccatttgattacatcgttat

SEQ ID NO: 115274 - DNA, 25 bp, Probe sequence
gtattgtgctatagtatttgcatac

SEQ ID NO: 115275 - DNA, 25 bp, Probe sequence
gtattctttttatattgttaaccat

SEQ ID NO: 115276 - DNA, 25 bp, Probe sequence
gtgctatagtatttgcatacttaaa

SEQ ID NO: 115277 - DNA, 25 bp, Probe sequence
tgaatacattttacactatgataaa

SEQ ID NO: 115278 - DNA, 25 bp, Probe sequence
tttgcatacttaaaatactaacagc

SEQ ID NO: 115279 - DNA, 25 bp, Probe sequence
atcctcttagcctgtttaagtaaca

SEQ ID NO: 115280 - DNA, 25 bp, Probe sequence
agactatcctcttagcctgtttaag

SEQ ID NO: 115281 - DNA, 25 bp, Probe sequence
agaggattttttggtatcatttaat

SEQ ID NO: 115282 - DNA, 25 bp, Probe sequence
agacaagactatcctcttagcctgt

SEQ ID NO: 115283 - DNA, 25 bp, Probe sequence
aagacaagactatcctcttagcctg

SEQ ID NO: 115284 - DNA, 25 bp, Probe sequence
aagactatcctcttagcctgtttaa

SEQ ID NO: 115285 - DNA, 25 bp, Probe sequence
aatatatcaagacaagactatcctc

SEQ ID NO: 115286 - DNA, 25 bp, Probe sequence
caagactatcctcttagcctgttta

SEQ ID NO: 115287 - DNA, 25 bp, Probe sequence
ctatcctcttagcctgtttaagtaa

SEQ ID NO: 115288 - DNA, 25 bp, Probe sequence
gactatcctcttagcctgtttaagt

SEQ ID NO: 115289 - DNA, 25 bp, Probe sequence
gtaacaggttgagaggattttttgg

SEQ ID NO: 115290 - DNA, 25 bp, Probe sequence
ggtatcatttaatcagagttatata

SEQ ID NO: 115291 - DNA, 25 bp, Probe sequence
ggttgagaggattttttggtatcat

SEQ ID NO: 115292 - DNA, 25 bp, Probe sequence
tcaagacaagactatcctcttagcc

SEQ ID NO: 115293 - DNA, 25 bp, Probe sequence
tttttggtatcatttaatcagagtt

SEQ ID NO: 115294 - DNA, 25 bp, Probe sequence
acgtttgctttttgtgtggctactt

SEQ ID NO: 115295 - DNA, 25 bp, Probe sequence
aaacgatttgatttaaggcaagcat

SEQ ID NO: 115296 - DNA, 25 bp, Probe sequence
aacgtttgctttttgtgtggctact

SEQ ID NO: 115297 - DNA, 25 bp, Probe sequence
ctttttgtgtggctactttgctaaa

SEQ ID NO: 115298 - DNA, 25 bp, Probe sequence
gctttttgtgtggctactttgctaa

SEQ ID NO: 115299 - DNA, 25 bp, Probe sequence
gttagcacaactatgtttgtttttc

SEQ ID NO: 115300 - DNA, 25 bp, Probe sequence
gtttgctttttgtgtggctactttg

SEQ ID NO: 115301 - DNA, 25 bp, Probe sequence
gtgtggctactttgctaaaatatgt

SEQ ID NO: 115302 - DNA, 25 bp, Probe sequence
ggctactttgctaaaatatgtaatg

SEQ ID NO: 115303 - DNA, 25 bp, Probe sequence
tgtttgtttttctttgttcgacatt

SEQ ID NO: 115304 - DNA, 25 bp, Probe sequence
tctttgttcgacatttttacgaaca

SEQ ID NO: 115305 - DNA, 25 bp, Probe sequence
tacgaacaaacgtttgctttttgtg

SEQ ID NO: 115306 - DNA, 25 bp, Probe sequence
tttgtgtggctactttgctaaaata

SEQ ID NO: 115307 - DNA, 25 bp, Probe sequence
ttaaggcaagcatagttagcacaac

SEQ ID NO: 115308 - DNA, 25 bp, Probe sequence
ttgctttttgtgtggctactttgct

SEQ ID NO: 115309 - DNA, 25 bp, Probe sequence
agagttgctaaacataaatcgaaac

SEQ ID NO: 115310 - DNA, 25 bp, Probe sequence
aaatcgaaactgagagtgggacaga

SEQ ID NO: 115311 - DNA, 25 bp, Probe sequence
aataggaatgcatgagtgcaactca

SEQ ID NO: 115312 - DNA, 25 bp, Probe sequence
ctttgtcattagccacagctattgt

SEQ ID NO: 115313 - DNA, 25 bp, Probe sequence
gaattatgttaagatagggtcaatc

SEQ ID NO: 115314 - DNA, 25 bp, Probe sequence
gatagggtcaatctagagttgctaa

SEQ ID NO: 115315 - DNA, 25 bp, Probe sequence
gttctttgtcattagccacagctat

SEQ ID NO: 115316 - DNA, 25 bp, Probe sequence
gtcaatctagagttgctaaacataa

SEQ ID NO: 115317 - DNA, 25 bp, Probe sequence
gtcattagccacagctattgtgtac

SEQ ID NO: 115318 - DNA, 25 bp, Probe sequence
gggtcaatctagagttgctaaacat

SEQ ID NO: 115319 - DNA, 25 bp, Probe sequence
tagtggttctttgtcattagccaca

SEQ ID NO: 115320 - DNA, 25 bp, Probe sequence
tagggtcaatctagagttgctaaac

SEQ ID NO: 115321 - DNA, 25 bp, Probe sequence
tatgtagtggttctttgtcattagc

SEQ ID NO: 115322 - DNA, 25 bp, Probe sequence
ttctttgtcattagccacagctatt

SEQ ID NO: 115323 - DNA, 25 bp, Probe sequence
ttgtcattagccacagctattgtgt

SEQ ID NO: 115324 - DNA, 25 bp, Probe sequence
atatttattttagcttttcaatgta

SEQ ID NO: 115325 - DNA, 25 bp, Probe sequence
atatcattgtagagcttaggtcatt

SEQ ID NO: 115326 - DNA, 25 bp, Probe sequence
aggtcattgatttatggctcggact

SEQ ID NO: 115327 - DNA, 25 bp, Probe sequence
aattaatgattgatattgacttgta

SEQ ID NO: 115328 - DNA, 25 bp, Probe sequence
cattgatttatggctcggactttta

SEQ ID NO: 115329 - DNA, 25 bp, Probe sequence
cggacttttatggcgatatgaacca

SEQ ID NO: 115330 - DNA, 25 bp, Probe sequence
gcttaggtcattgatttatggctcg

SEQ ID NO: 115331 - DNA, 25 bp, Probe sequence
gaaccatgtaaattaagcaagcaat

SEQ ID NO: 115332 - DNA, 25 bp, Probe sequence
gatttatggctcggacttttatggc

SEQ ID NO: 115333 - DNA, 25 bp, Probe sequence
ggataaatacaattgaggtgaaccc

SEQ ID NO: 115334 - DNA, 25 bp, Probe sequence
ggctcggacttttatggcgatatga

SEQ ID NO: 115335 - DNA, 25 bp, Probe sequence
tgtagagcttaggtcattgatttat

SEQ ID NO: 115336 - DNA, 25 bp, Probe sequence
tgtagattggtgttatatttttgat

SEQ ID NO: 115337 - DNA, 25 bp, Probe sequence
tatggctcggacttttatggcgata

SEQ ID NO: 115338 - DNA, 25 bp, Probe sequence
tattttagcttttcaatgtagattg

SEQ ID NO: 115339 - DNA, 25 bp, Probe sequence
atataatgcgcataatgattaataa

SEQ ID NO: 115340 - DNA, 25 bp, Probe sequence
ataatgcgcataatgattaataatg

SEQ ID NO: 115341 - DNA, 25 bp, Probe sequence
atgcgcataatgattaataatgagg

SEQ ID NO: 115342 - DNA, 25 bp, Probe sequence
atgattaataatgaggaggcgttaa

SEQ ID NO: 115343 - DNA, 25 bp, Probe sequence
agatttattatataatgcgcataat

SEQ ID NO: 115344 - DNA, 25 bp, Probe sequence
aatgattaataatgaggaggcgtta

SEQ ID NO: 115345 - DNA, 25 bp, Probe sequence
aatgcgcataatgattaataatgag

SEQ ID NO: 115346 - DNA, 25 bp, Probe sequence
gatttattatataatgcgcataatg

SEQ ID NO: 115347 - DNA, 25 bp, Probe sequence
gttagatttattatataatgcgcat

SEQ ID NO: 115348 - DNA, 25 bp, Probe sequence
taatgcgcataatgattaataatga

SEQ ID NO: 115349 - DNA, 25 bp, Probe sequence
tagatttattatataatgcgcataa

SEQ ID NO: 115350 - DNA, 25 bp, Probe sequence
tataatgcgcataatgattaataat

SEQ ID NO: 115351 - DNA, 25 bp, Probe sequence
tatataatgcgcataatgattaata

SEQ ID NO: 115352 - DNA, 25 bp, Probe sequence
ttaataatgaggaggcgttaataaa

SEQ ID NO: 115353 - DNA, 25 bp, Probe sequence
ttagatttattatataatgcgcata

SEQ ID NO: 115354 - DNA, 25 bp, Probe sequence
atttattttaatagtgtcatcacct

SEQ ID NO: 115355 - DNA, 25 bp, Probe sequence
atttgtgcgtttcaatgagttctag

SEQ ID NO: 115356 - DNA, 25 bp, Probe sequence
agtgtcatcaccttgttaaaataat

SEQ ID NO: 115357 - DNA, 25 bp, Probe sequence
agaacttagtacgtatcatttgtgc

SEQ ID NO: 115358 - DNA, 25 bp, Probe sequence
caccttgttaaaataatgtcttact

SEQ ID NO: 115359 - DNA, 25 bp, Probe sequence
cttataactttatgggagtgggaca

SEQ ID NO: 115360 - DNA, 25 bp, Probe sequence
gcgtttcaatgagttctagtttttt

SEQ ID NO: 115361 - DNA, 25 bp, Probe sequence
gagttgtaagttatttggatattta

SEQ ID NO: 115362 - DNA, 25 bp, Probe sequence
gaggtcgaattaagatgttgagttg

SEQ ID NO: 115363 - DNA, 25 bp, Probe sequence
gatgttgagttgtaagttatttgga

SEQ ID NO: 115364 - DNA, 25 bp, Probe sequence
gtacgtatcatttgtgcgtttcaat

SEQ ID NO: 115365 - DNA, 25 bp, Probe sequence
tgagttctagttttttttatatgtt

SEQ ID NO: 115366 - DNA, 25 bp, Probe sequence
tagtacgtatcatttgtgcgtttca

SEQ ID NO: 115367 - DNA, 25 bp, Probe sequence
ttaatagtgtcatcaccttgttaaa

SEQ ID NO: 115368 - DNA, 25 bp, Probe sequence
ttctagttttttttatatgttatat

SEQ ID NO: 115369 - DNA, 25 bp, Probe sequence
atcatgaaattcgttttggcggtga

SEQ ID NO: 115370 - DNA, 25 bp, Probe sequence
atcgttgcttaattttgtcatagaa

SEQ ID NO: 115371 - DNA, 25 bp, Probe sequence
aaacatcgttgcttaattttgtcat

SEQ ID NO: 115372 - DNA, 25 bp, Probe sequence
aacatcatgaaattcgttttggcgg

SEQ ID NO: 115373 - DNA, 25 bp, Probe sequence
caagctcctttaaatgatgtatatt

SEQ ID NO: 115374 - DNA, 25 bp, Probe sequence
catgaaattcgttttggcggtgaaa

SEQ ID NO: 115375 - DNA, 25 bp, Probe sequence
catcgttgcttaattttgtcataga

SEQ ID NO: 115376 - DNA, 25 bp, Probe sequence
cccaagctcctttaaatgatgtata

SEQ ID NO: 115377 - DNA, 25 bp, Probe sequence
gctcctttaaatgatgtatattttt

SEQ ID NO: 115378 - DNA, 25 bp, Probe sequence
gcttaattttgtcatagaacattta

SEQ ID NO: 115379 - DNA, 25 bp, Probe sequence
gaaatttaatctagacatagttgga

SEQ ID NO: 115380 - DNA, 25 bp, Probe sequence
gaaataaatataaaacatcgttgct

SEQ ID NO: 115381 - DNA, 25 bp, Probe sequence
gttgcttaattttgtcatagaacat

SEQ ID NO: 115382 - DNA, 25 bp, Probe sequence
gtcatagaacatttaaattaacatc

SEQ ID NO: 115383 - DNA, 25 bp, Probe sequence
gtcccaagctcctttaaatgatgta

SEQ ID NO: 115384 - DNA, 25 bp, Probe sequence
atagacagtggttctaaggtgaatc

SEQ ID NO: 115385 - DNA, 25 bp, Probe sequence
agtggttctaaggtgaatcatgttt

SEQ ID NO: 115386 - DNA, 25 bp, Probe sequence
agacagtggttctaaggtgaatcat

SEQ ID NO: 115387 - DNA, 25 bp, Probe sequence
acagtggttctaaggtgaatcatgt

SEQ ID NO: 115388 - DNA, 25 bp, Probe sequence
aaggtgaatcatgttttaaataaga

SEQ ID NO: 115389 - DNA, 25 bp, Probe sequence
cagtggttctaaggtgaatcatgtt

SEQ ID NO: 115390 - DNA, 25 bp, Probe sequence
gaaaatagacagtggttctaaggtg

SEQ ID NO: 115391 - DNA, 25 bp, Probe sequence
gacagtggttctaaggtgaatcatg

SEQ ID NO: 115392 - DNA, 25 bp, Probe sequence
gatatgataatagagctgtgtaaaa

SEQ ID NO: 115393 - DNA, 25 bp, Probe sequence
gttctaaggtgaatcatgttttaaa

SEQ ID NO: 115394 - DNA, 25 bp, Probe sequence
gtggttctaaggtgaatcatgtttt

SEQ ID NO: 115395 - DNA, 25 bp, Probe sequence
ggtgaatcatgttttaaataagaaa

SEQ ID NO: 115396 - DNA, 25 bp, Probe sequence
ggttctaaggtgaatcatgttttaa

SEQ ID NO: 115397 - DNA, 25 bp, Probe sequence
tatgatatgataatagagctgtgta

SEQ ID NO: 115398 - DNA, 25 bp, Probe sequence
tatagaacgtaatcatattatgata

SEQ ID NO: 115399 - DNA, 25 bp, Probe sequence
attttctcattaagtagcatcatat

SEQ ID NO: 115400 - DNA, 25 bp, Probe sequence
ataaataagaatcccgactttgcgg

SEQ ID NO: 115401 - DNA, 25 bp, Probe sequence
atcatatgtatcaatttggtcataa

SEQ ID NO: 115402 - DNA, 25 bp, Probe sequence
accaagcgttacctaattttctcat

SEQ ID NO: 115403 - DNA, 25 bp, Probe sequence
aatcagcataaataagaatcccgac

SEQ ID NO: 115404 - DNA, 25 bp, Probe sequence
gcgttacctaattttctcattaagt

SEQ ID NO: 115405 - DNA, 25 bp, Probe sequence
gcgggattctctgtattgaaaagta

SEQ ID NO: 115406 - DNA, 25 bp, Probe sequence
gaaggaaattcaataaccaagcgtt

SEQ ID NO: 115407 - DNA, 25 bp, Probe sequence
gaaggtgtttttggtagtgaattat

SEQ ID NO: 115408 - DNA, 25 bp, Probe sequence
gactttgcgggattctctgtattga

SEQ ID NO: 115409 - DNA, 25 bp, Probe sequence
gagtcactgatcatagacaaaaaca

SEQ ID NO: 115410 - DNA, 25 bp, Probe sequence
gataattaattgagtcactgatcat

SEQ ID NO: 115411 - DNA, 25 bp, Probe sequence
gtttaatgaataatagtcgactaac

SEQ ID NO: 115412 - DNA, 25 bp, Probe sequence
gtcgactaactattaaattgagctg

SEQ ID NO: 115413 - DNA, 25 bp, Probe sequence
tagtgaattatcaaaaatacctttt

SEQ ID NO: 115414 - DNA, 25 bp, Probe sequence
atatctctgtactatgagaagtaaa

SEQ ID NO: 115415 - DNA, 25 bp, Probe sequence
atatgtaatcatatctctgtactat

SEQ ID NO: 115416 - DNA, 25 bp, Probe sequence
atagatattatcagtttacaaagga

SEQ ID NO: 115417 - DNA, 25 bp, Probe sequence
atcatatctctgtactatgagaagt

SEQ ID NO: 115418 - DNA, 25 bp, Probe sequence
aaagcgtcaaacaatgtaactattt

SEQ ID NO: 115419 - DNA, 25 bp, Probe sequence
caaagtgtttgaccaaatttgactt

SEQ ID NO: 115420 - DNA, 25 bp, Probe sequence
gcgtcaaacaatgtaactatttaaa

SEQ ID NO: 115421 - DNA, 25 bp, Probe sequence
gaccaaatttgacttaatatgtaaa

SEQ ID NO: 115422 - DNA, 25 bp, Probe sequence
gagaaaagcgtcaaacaatgtaact

SEQ ID NO: 115423 - DNA, 25 bp, Probe sequence
gatattatcagtttacaaaggaaag

SEQ ID NO: 115424 - DNA, 25 bp, Probe sequence
gtttgaccaaatttgacttaatatg

SEQ ID NO: 115425 - DNA, 25 bp, Probe sequence
gtaatcatatctctgtactatgaga

SEQ ID NO: 115426 - DNA, 25 bp, Probe sequence
gtgtttgaccaaatttgacttaata

SEQ ID NO: 115427 - DNA, 25 bp, Probe sequence
taactatttaaagtcaaagtgtttg

SEQ ID NO: 115428 - DNA, 25 bp, Probe sequence
tatgtaatcatatctctgtactatg

SEQ ID NO: 115429 - DNA, 25 bp, Probe sequence
agagtagactaagcagtctgctctt

SEQ ID NO: 115430 - DNA, 25 bp, Probe sequence
actatactttgagcggaaatatgat

SEQ ID NO: 115431 - DNA, 25 bp, Probe sequence
aatcctttgtttgtaagtcgctcta

SEQ ID NO: 115432 - DNA, 25 bp, Probe sequence
aattgtttactatactttgagcgga

SEQ ID NO: 115433 - DNA, 25 bp, Probe sequence
gctctttttgtatgagtaaaccgag

SEQ ID NO: 115434 - DNA, 25 bp, Probe sequence
gaagctagttgaaccgtaactatat

SEQ ID NO: 115435 - DNA, 25 bp, Probe sequence
gactaagcagtctgctctttttgta

SEQ ID NO: 115436 - DNA, 25 bp, Probe sequence
gattgaatgaagctagttgaaccgt

SEQ ID NO: 115437 - DNA, 25 bp, Probe sequence
gtttgtaagtcgctctagacattac

SEQ ID NO: 115438 - DNA, 25 bp, Probe sequence
gtacatatgttgtttctaatgctca

SEQ ID NO: 115439 - DNA, 25 bp, Probe sequence
gtaaaccgaggtgtcaataaattgt

SEQ ID NO: 115440 - DNA, 25 bp, Probe sequence
gtaactatatgaaatgttcccttca

SEQ ID NO: 115441 - DNA, 25 bp, Probe sequence
gtcgctctagacattacatttagta

SEQ ID NO: 115442 - DNA, 25 bp, Probe sequence
ggaacatttcaatcctttgtttgta

SEQ ID NO: 115443 - DNA, 25 bp, Probe sequence
tatgttgtttctaatgctcattaat

SEQ ID NO: 115444 - DNA, 25 bp, Probe sequence
gtggacccgtacgttaatcgtgcgg

SEQ ID NO: 115445 - DNA, 25 bp, Probe sequence
atataagactactatttctttgtaa

SEQ ID NO: 115446 - DNA, 25 bp, Probe sequence
accaatgctttaattttcaatacgt

SEQ ID NO: 115447 - DNA, 25 bp, Probe sequence
aacacaacacttaaaccaatgcttt

SEQ ID NO: 115448 - DNA, 25 bp, Probe sequence
aacgctgcatgatacaaacgaaggt

SEQ ID NO: 115449 - DNA, 25 bp, Probe sequence
aagtatgtgtaaaacgctgcatgat

SEQ ID NO: 115450 - DNA, 25 bp, Probe sequence
aatgaatccgatttacgagtgagta

SEQ ID NO: 115451 - DNA, 25 bp, Probe sequence
gtgaaaatgttaatggttgcgtgat

SEQ ID NO: 115452 - DNA, 25 bp, Probe sequence
ggttgcgtgataatttctatattta

SEQ ID NO: 115453 - DNA, 25 bp, Probe sequence
tgactccctttagtagtggacccgt

SEQ ID NO: 115454 - DNA, 25 bp, Probe sequence
tcttattcccattatacatcaattt

SEQ ID NO: 115455 - DNA, 25 bp, Probe sequence
tcaatacgtagctataatttgttgt

SEQ ID NO: 115456 - DNA, 25 bp, Probe sequence
taaaggtgtaccttcgataacgaat

SEQ ID NO: 115457 - DNA, 25 bp, Probe sequence
tatcattcaccccatgtaattttgt

SEQ ID NO: 115458 - DNA, 25 bp, Probe sequence
tttatttatttcttattcccattat

SEQ ID NO: 115459 - DNA, 25 bp, Probe sequence
accagtatgacagacaacacaatta

SEQ ID NO: 115460 - DNA, 25 bp, Probe sequence
aacacaattaattaggttgtctcga

SEQ ID NO: 115461 - DNA, 25 bp, Probe sequence
aatgaaccagtatgacagacaacac

SEQ ID NO: 115462 - DNA, 25 bp, Probe sequence
aattaggttgtctcgaatattggtt

SEQ ID NO: 115463 - DNA, 25 bp, Probe sequence
aattgttaattaggggagagatgat

SEQ ID NO: 115464 - DNA, 25 bp, Probe sequence
gaaccagtatgacagacaacacaat

SEQ ID NO: 115465 - DNA, 25 bp, Probe sequence
gatacttaaatagttagttgtttat

SEQ ID NO: 115466 - DNA, 25 bp, Probe sequence
gtatgacagacaacacaattaatta

SEQ ID NO: 115467 - DNA, 25 bp, Probe sequence
gtctcgaatattggttcttattttt

SEQ ID NO: 115468 - DNA, 25 bp, Probe sequence
ggggagagatgatacttaaatagtt

SEQ ID NO: 115469 - DNA, 25 bp, Probe sequence
ggttgtctcgaatattggttcttat

SEQ ID NO: 115470 - DNA, 25 bp, Probe sequence
tcgaatattggttcttatttttata

SEQ ID NO: 115471 - DNA, 25 bp, Probe sequence
tagttgtttattttacggatagtga

SEQ ID NO: 115472 - DNA, 25 bp, Probe sequence
taggttgtctcgaatattggttctt

SEQ ID NO: 115473 - DNA, 25 bp, Probe sequence
ttacggatagtgaaatttattttga

SEQ ID NO: 115474 - DNA, 25 bp, Probe sequence
agagcattgttttatgtcttagtct

SEQ ID NO: 115475 - DNA, 25 bp, Probe sequence
actaatgtgacttttcggattctag

SEQ ID NO: 115476 - DNA, 25 bp, Probe sequence
aagggtatacatttgactacagcga

SEQ ID NO: 115477 - DNA, 25 bp, Probe sequence
caaccactggttgtgacatatcctt

SEQ ID NO: 115478 - DNA, 25 bp, Probe sequence
ctggttgtgacatatccttatttac

SEQ ID NO: 115479 - DNA, 25 bp, Probe sequence
gcgggacttaaaaaggcaaccactg

SEQ ID NO: 115480 - DNA, 25 bp, Probe sequence
gaatagtactattgcaagtgtaaag

SEQ ID NO: 115481 - DNA, 25 bp, Probe sequence
gaaaatgtattgcaagcgctttatc

SEQ ID NO: 115482 - DNA, 25 bp, Probe sequence
gacttttcggattctagagcattgt

SEQ ID NO: 115483 - DNA, 25 bp, Probe sequence
gattagcgagtcagtataagggtat

SEQ ID NO: 115484 - DNA, 25 bp, Probe sequence
gtatacatttgactacagcgaataa

SEQ ID NO: 115485 - DNA, 25 bp, Probe sequence
gtgacatatccttatttacatttat

SEQ ID NO: 115486 - DNA, 25 bp, Probe sequence
taagttttatgcttgcaatttttga

SEQ ID NO: 115487 - DNA, 25 bp, Probe sequence
ttgcaagcgctttatcaaattattt

SEQ ID NO: 115488 - DNA, 25 bp, Probe sequence
ttgttttatgtcttagtctcaaata

SEQ ID NO: 115489 - DNA, 25 bp, Probe sequence
acgcttctccgcttatttttatata

SEQ ID NO: 115490 - DNA, 25 bp, Probe sequence
aacgcttctccgcttatttttatat

SEQ ID NO: 115491 - DNA, 25 bp, Probe sequence
aagcggggagcacaaacgcttctcc

SEQ ID NO: 115492 - DNA, 25 bp, Probe sequence
aatacgctagtgctcagaactattt

SEQ ID NO: 115493 - DNA, 25 bp, Probe sequence
gctagtgctcagaactatttagcat

SEQ ID NO: 115494 - DNA, 25 bp, Probe sequence
gcttctccgcttatttttatataaa

SEQ ID NO: 115495 - DNA, 25 bp, Probe sequence
gtatagtttttattcaaatacgcta

SEQ ID NO: 115496 - DNA, 25 bp, Probe sequence
gtgctcagaactatttagcattaat

SEQ ID NO: 115497 - DNA, 25 bp, Probe sequence
tacgctagtgctcagaactatttag

SEQ ID NO: 115498 - DNA, 25 bp, Probe sequence
tagcattaattaaagcttatgagta

SEQ ID NO: 115499 - DNA, 25 bp, Probe sequence
tatataaaatttcctaattacaagg

SEQ ID NO: 115500 - DNA, 25 bp, Probe sequence
ttatgagtaagcggggagcacaaac

SEQ ID NO: 115501 - DNA, 25 bp, Probe sequence
ttattcaaatacgctagtgctcaga

SEQ ID NO: 115502 - DNA, 25 bp, Probe sequence
ttttattcaaatacgctagtgctca

SEQ ID NO: 115503 - DNA, 25 bp, Probe sequence
ttcaaatacgctagtgctcagaact

SEQ ID NO: 115504 - DNA, 25 bp, Probe sequence
ataatagtaatatcattttgttaaa

SEQ ID NO: 115505 - DNA, 25 bp, Probe sequence
agtaaacgcttaatgacacttattt

SEQ ID NO: 115506 - DNA, 25 bp, Probe sequence
acgcttaatgacacttattttttga

SEQ ID NO: 115507 - DNA, 25 bp, Probe sequence
aacgcttaatgacacttattttttg

SEQ ID NO: 115508 - DNA, 25 bp, Probe sequence
aagtaaacgcttaatgacacttatt

SEQ ID NO: 115509 - DNA, 25 bp, Probe sequence
aataatagtaatatcattttgttaa

SEQ ID NO: 115510 - DNA, 25 bp, Probe sequence
aatagtaatatcattttgttaaatg

SEQ ID NO: 115511 - DNA, 25 bp, Probe sequence
cgcttaatgacacttattttttgaa

SEQ ID NO: 115512 - DNA, 25 bp, Probe sequence
gcttaatgacacttattttttgaaa

SEQ ID NO: 115513 - DNA, 25 bp, Probe sequence
gtaaacgcttaatgacacttatttt

SEQ ID NO: 115514 - DNA, 25 bp, Probe sequence
tgtaaaagatgttaagtaaacgctt

SEQ ID NO: 115515 - DNA, 25 bp, Probe sequence
taatagtaatatcattttgttaaat

SEQ ID NO: 115516 - DNA, 25 bp, Probe sequence
taaacgcttaatgacacttattttt

SEQ ID NO: 115517 - DNA, 25 bp, Probe sequence
tagaataactatttaaaggagatta

SEQ ID NO: 115518 - DNA, 25 bp, Probe sequence
ttaatgacacttattttttgaaaat

SEQ ID NO: 115519 - DNA, 25 bp, Probe sequence
ataacctgccacagagttgagactg

SEQ ID NO: 115520 - DNA, 25 bp, Probe sequence
agttgaggattattatgtcggtata

SEQ ID NO: 115521 - DNA, 25 bp, Probe sequence
acagactaataatcatgaggtaact

SEQ ID NO: 115522 - DNA, 25 bp, Probe sequence
aacacatatttaacttgtattctta

SEQ ID NO: 115523 - DNA, 25 bp, Probe sequence
gcttgtatttataacctgccacaga

SEQ ID NO: 115524 - DNA, 25 bp, Probe sequence
gaataaagtttttgagttcacgctt

SEQ ID NO: 115525 - DNA, 25 bp, Probe sequence
gaagtattattcataacagactaat

SEQ ID NO: 115526 - DNA, 25 bp, Probe sequence
gagttgagactgtggtaggtttttt

SEQ ID NO: 115527 - DNA, 25 bp, Probe sequence
gttcacgcttaaaaagttcacgctt

SEQ ID NO: 115528 - DNA, 25 bp, Probe sequence
gtatgacagggtattcacttttatt

SEQ ID NO: 115529 - DNA, 25 bp, Probe sequence
gtactgccataattttagttgagga

SEQ ID NO: 115530 - DNA, 25 bp, Probe sequence
tgagactgtggtaggttttttattt

SEQ ID NO: 115531 - DNA, 25 bp, Probe sequence
taacttgtattcttaaactggtata

SEQ ID NO: 115532 - DNA, 25 bp, Probe sequence
ttttaaacattaagtactgccataa

SEQ ID NO: 115533 - DNA, 25 bp, Probe sequence
ttcacgcttgtatttataacctgcc

SEQ ID NO: 115534 - DNA, 25 bp, Probe sequence
cggcgatgtaaatgtcgggcttttt

SEQ ID NO: 115535 - DNA, 25 bp, Probe sequence
atatatagcctagttaagtatgcaa

SEQ ID NO: 115536 - DNA, 25 bp, Probe sequence
atatagcctagttaagtatgcaaag

SEQ ID NO: 115537 - DNA, 25 bp, Probe sequence
atagtttaacaataagctatgtaaa

SEQ ID NO: 115538 - DNA, 25 bp, Probe sequence
atagcctagttaagtatgcaaaggg

SEQ ID NO: 115539 - DNA, 25 bp, Probe sequence
agtatgcaaagggagcgttagattt

SEQ ID NO: 115540 - DNA, 25 bp, Probe sequence
cgatgtaaatgtcgggcttttttat

SEQ ID NO: 115541 - DNA, 25 bp, Probe sequence
ccggcgatgtaaatgtcgggctttt

SEQ ID NO: 115542 - DNA, 25 bp, Probe sequence
ggtccggcgatgtaaatgtcgggct

SEQ ID NO: 115543 - DNA, 25 bp, Probe sequence
gcgatgtaaatgtcgggctttttta

SEQ ID NO: 115544 - DNA, 25 bp, Probe sequence
gtccggcgatgtaaatgtcgggctt

SEQ ID NO: 115545 - DNA, 25 bp, Probe sequence
gatgtaaatgtcgggcttttttatt

SEQ ID NO: 115546 - DNA, 25 bp, Probe sequence
gttaagtatgcaaagggagcgttag

SEQ ID NO: 115547 - DNA, 25 bp, Probe sequence
ggcgatgtaaatgtcgggctttttt

SEQ ID NO: 115548 - DNA, 25 bp, Probe sequence
tccggcgatgtaaatgtcgggcttt

SEQ ID NO: 115549 - DNA, 25 bp, Probe sequence
atttagttgcttaatcgggctatat

SEQ ID NO: 115550 - DNA, 25 bp, Probe sequence
agttatatgtgcttttgtaaattac

SEQ ID NO: 115551 - DNA, 25 bp, Probe sequence
agttgcttaatcgggctatatttga

SEQ ID NO: 115552 - DNA, 25 bp, Probe sequence
aatcgggctatatttgatatagtta

SEQ ID NO: 115553 - DNA, 25 bp, Probe sequence
gcgatttagttgcttaatcgggcta

SEQ ID NO: 115554 - DNA, 25 bp, Probe sequence
gcttaatcgggctatatttgatata

SEQ ID NO: 115555 - DNA, 25 bp, Probe sequence
gatatagttatatgtgcttttgtaa

SEQ ID NO: 115556 - DNA, 25 bp, Probe sequence
gatttagttgcttaatcgggctata

SEQ ID NO: 115557 - DNA, 25 bp, Probe sequence
gttgcttaatcgggctatatttgat

SEQ ID NO: 115558 - DNA, 25 bp, Probe sequence
tagttgcttaatcgggctatatttg

SEQ ID NO: 115559 - DNA, 25 bp, Probe sequence
tatagttatatgtgcttttgtaaat

SEQ ID NO: 115560 - DNA, 25 bp, Probe sequence
tttagttgcttaatcgggctatatt

SEQ ID NO: 115561 - DNA, 25 bp, Probe sequence
ttatatgtgcttttgtaaattacaa

SEQ ID NO: 115562 - DNA, 25 bp, Probe sequence
ttagttgcttaatcgggctatattt

SEQ ID NO: 115563 - DNA, 25 bp, Probe sequence
ttgcttaatcgggctatatttgata

SEQ ID NO: 115564 - DNA, 25 bp, Probe sequence
acaacctttgtggatgtaggctttt

SEQ ID NO: 115565 - DNA, 25 bp, Probe sequence
aatgcattgcagaatttgttgtgag

SEQ ID NO: 115566 - DNA, 25 bp, Probe sequence
ctttgtggatgtaggcttttttatt

SEQ ID NO: 115567 - DNA, 25 bp, Probe sequence
gcttttttattatgtgtttttcagg

SEQ ID NO: 115568 - DNA, 25 bp, Probe sequence
gcattgcagaatttgttgtgagtat

SEQ ID NO: 115569 - DNA, 25 bp, Probe sequence
gcagaatttgttgtgagtattgata

SEQ ID NO: 115570 - DNA, 25 bp, Probe sequence
gagtattgatatagcagtgtttgta

SEQ ID NO: 115571 - DNA, 25 bp, Probe sequence
gtttttcaggggataatgcattgca

SEQ ID NO: 115572 - DNA, 25 bp, Probe sequence
gtataggtgtttatttgatggagga

SEQ ID NO: 115573 - DNA, 25 bp, Probe sequence
gtagcctacaacctttgtggatgta

SEQ ID NO: 115574 - DNA, 25 bp, Probe sequence
tttgtagcctacaacctttgtggat

SEQ ID NO: 115575 - DNA, 25 bp, Probe sequence
tgtggatgtaggcttttttattatg

SEQ ID NO: 115576 - DNA, 25 bp, Probe sequence
tgagatataaggggacagtgatgtg

SEQ ID NO: 115577 - DNA, 25 bp, Probe sequence
tagcagtgtttgtataggtgtttat

SEQ ID NO: 115578 - DNA, 25 bp, Probe sequence
ttttattatgtgtttttcaggggat

SEQ ID NO: 115579 - DNA, 25 bp, Probe sequence
attgcattttcctattcacgatttt

SEQ ID NO: 115580 - DNA, 25 bp, Probe sequence
aagcttacttgtttattatacagat

SEQ ID NO: 115581 - DNA, 25 bp, Probe sequence
aaggcgagagtaaagcttacttgtt

SEQ ID NO: 115582 - DNA, 25 bp, Probe sequence
cagactactcctctttataactata

SEQ ID NO: 115583 - DNA, 25 bp, Probe sequence
ctttctcattgcattttcctattca

SEQ ID NO: 115584 - DNA, 25 bp, Probe sequence
gcattttcctattcacgattttaag

SEQ ID NO: 115585 - DNA, 25 bp, Probe sequence
gaacccaacatactacaaacgaatt

SEQ ID NO: 115586 - DNA, 25 bp, Probe sequence
gaacagactactcctctttataact

SEQ ID NO: 115587 - DNA, 25 bp, Probe sequence
gatttaaaatccaagagtcagaaca

SEQ ID NO: 115588 - DNA, 25 bp, Probe sequence
gtcagaacagactactcctctttat

SEQ ID NO: 115589 - DNA, 25 bp, Probe sequence
gtaatcgataaaaaattctccattg

SEQ ID NO: 115590 - DNA, 25 bp, Probe sequence
tctcattgcattttcctattcacga

SEQ ID NO: 115591 - DNA, 25 bp, Probe sequence
tcacgattttaagaacccaacatac

SEQ ID NO: 115592 - DNA, 25 bp, Probe sequence
taacctttctcattgcattttccta

SEQ ID NO: 115593 - DNA, 25 bp, Probe sequence
tttacttaacctttctcattgcatt

SEQ ID NO: 115594 - DNA, 25 bp, Probe sequence
ggcacggggactgatttctttaaca

SEQ ID NO: 115595 - DNA, 25 bp, Probe sequence
atttatcccatcttttttttatgat

SEQ ID NO: 115596 - DNA, 25 bp, Probe sequence
agctataaataagtcagtttctcta

SEQ ID NO: 115597 - DNA, 25 bp, Probe sequence
aatcatagttttatagtatcatgtt

SEQ ID NO: 115598 - DNA, 25 bp, Probe sequence
cggggactgatttctttaacaccat

SEQ ID NO: 115599 - DNA, 25 bp, Probe sequence
gaatgtaagacaatcaacaaaccaa

SEQ ID NO: 115600 - DNA, 25 bp, Probe sequence
gattttccggcacggggactgattt

SEQ ID NO: 115601 - DNA, 25 bp, Probe sequence
gatttacaaatttatcccatctttt

SEQ ID NO: 115602 - DNA, 25 bp, Probe sequence
gggactgatttctttaacaccatta

SEQ ID NO: 115603 - DNA, 25 bp, Probe sequence
taacaccattaaacacagatttttt

SEQ ID NO: 115604 - DNA, 25 bp, Probe sequence
taaataagtcagtttctctaaaaat

SEQ ID NO: 115605 - DNA, 25 bp, Probe sequence
tagtatcatgttggctaagctataa

SEQ ID NO: 115606 - DNA, 25 bp, Probe sequence
ttatgattttccggcacggggactg

SEQ ID NO: 115607 - DNA, 25 bp, Probe sequence
tatcccatcttttttttatgatttt

SEQ ID NO: 115608 - DNA, 25 bp, Probe sequence
ttccggcacggggactgatttcttt

SEQ ID NO: 115609 - DNA, 25 bp, Probe sequence
attgtattttttagtcaatgcaaat

SEQ ID NO: 115610 - DNA, 25 bp, Probe sequence
atattatattacttttattgataga

SEQ ID NO: 115611 - DNA, 25 bp, Probe sequence
agattgccgtaataataatcgtact

SEQ ID NO: 115612 - DNA, 25 bp, Probe sequence
agctcttaaaagcgttattgtattt

SEQ ID NO: 115613 - DNA, 25 bp, Probe sequence
actggtcaaagatgggagctcttaa

SEQ ID NO: 115614 - DNA, 25 bp, Probe sequence
aaatactggtcaaagatgggagctc

SEQ ID NO: 115615 - DNA, 25 bp, Probe sequence
aaatcaacttatttgtatgagatga

SEQ ID NO: 115616 - DNA, 25 bp, Probe sequence
aaacttgtaatatatcgaaagattt

SEQ ID NO: 115617 - DNA, 25 bp, Probe sequence
gaatatgtattgaagaagatgtgtt

SEQ ID NO: 115618 - DNA, 25 bp, Probe sequence
gaagatgtgttattaatttggaaaa

SEQ ID NO: 115619 - DNA, 25 bp, Probe sequence
gatgggagctcttaaaagcgttatt

SEQ ID NO: 115620 - DNA, 25 bp, Probe sequence
ggagctcttaaaagcgttattgtat

SEQ ID NO: 115621 - DNA, 25 bp, Probe sequence
tgatttgttaagaaattacgtttgt

SEQ ID NO: 115622 - DNA, 25 bp, Probe sequence
tgatagaaatatattacttttttaa

SEQ ID NO: 115623 - DNA, 25 bp, Probe sequence
tagtcaatgcaaatagattgccgta

SEQ ID NO: 115624 - DNA, 25 bp, Probe sequence
atgaaataatggcgtcattactata

SEQ ID NO: 115625 - DNA, 25 bp, Probe sequence
aatggcgtcattactataaaatatt

SEQ ID NO: 115626 - DNA, 25 bp, Probe sequence
ctttatgttgtaatgcatttttcta

SEQ ID NO: 115627 - DNA, 25 bp, Probe sequence
gcgtcattactataaaatattactt

SEQ ID NO: 115628 - DNA, 25 bp, Probe sequence
gatagaactaaaaggaggggcaaag

SEQ ID NO: 115629 - DNA, 25 bp, Probe sequence
gtttattgcgaaaaatatcattcaa

SEQ ID NO: 115630 - DNA, 25 bp, Probe sequence
gtaatgcatttttctataagataga

SEQ ID NO: 115631 - DNA, 25 bp, Probe sequence
ggtagttgtttattgcgaaaaatat

SEQ ID NO: 115632 - DNA, 25 bp, Probe sequence
tggcgtcattactataaaatattac

SEQ ID NO: 115633 - DNA, 25 bp, Probe sequence
tgttgtaatgcatttttctataaga

SEQ ID NO: 115634 - DNA, 25 bp, Probe sequence
taagagggtagttgtttattgcgaa

SEQ ID NO: 115635 - DNA, 25 bp, Probe sequence
tactttatgttgtaatgcatttttc

SEQ ID NO: 115636 - DNA, 25 bp, Probe sequence
ttatgttgtaatgcatttttctata

SEQ ID NO: 115637 - DNA, 25 bp, Probe sequence
ttaagagggtagttgtttattgcga

SEQ ID NO: 115638 - DNA, 25 bp, Probe sequence
ttgtaatgcatttttctataagata

SEQ ID NO: 115639 - DNA, 25 bp, Probe sequence
atatcgatacaaattaattgctata

SEQ ID NO: 115640 - DNA, 25 bp, Probe sequence
atcaaatcgtacgttgtcgtttgta

SEQ ID NO: 115641 - DNA, 25 bp, Probe sequence
atgcaattttagtgtataattccat

SEQ ID NO: 115642 - DNA, 25 bp, Probe sequence
aaatgtttgcaatcaaatcgtacgt

SEQ ID NO: 115643 - DNA, 25 bp, Probe sequence
caaatcgtacgttgtcgtttgtaat

SEQ ID NO: 115644 - DNA, 25 bp, Probe sequence
gcaatcaaatcgtacgttgtcgttt

SEQ ID NO: 115645 - DNA, 25 bp, Probe sequence
gttagtaaagtattattgtggataa

SEQ ID NO: 115646 - DNA, 25 bp, Probe sequence
gtttgcaatcaaatcgtacgttgtc

SEQ ID NO: 115647 - DNA, 25 bp, Probe sequence
gtataattccattaacagagattaa

SEQ ID NO: 115648 - DNA, 25 bp, Probe sequence
gtcgtttgtaattcttaaaatagca

SEQ ID NO: 115649 - DNA, 25 bp, Probe sequence
ggattacattaggtagagttcatat

SEQ ID NO: 115650 - DNA, 25 bp, Probe sequence
tcgtacgttgtcgtttgtaattctt

SEQ ID NO: 115651 - DNA, 25 bp, Probe sequence
taaagctaggattacattaggtaga

SEQ ID NO: 115652 - DNA, 25 bp, Probe sequence
taggtagagttcatattaataataa

SEQ ID NO: 115653 - DNA, 25 bp, Probe sequence
tttagtgtataattccattaacaga

SEQ ID NO: 115654 - DNA, 25 bp, Probe sequence
attcatgaagaagccaccttaaaag

SEQ ID NO: 115655 - DNA, 25 bp, Probe sequence
attcatcaacagttaattattttaa

SEQ ID NO: 115656 - DNA, 25 bp, Probe sequence
attaataattaattcatcaacagtt

SEQ ID NO: 115657 - DNA, 25 bp, Probe sequence
atatgattcatgaagaagccacctt

SEQ ID NO: 115658 - DNA, 25 bp, Probe sequence
ataatttggcttggcgaaaaaatag

SEQ ID NO: 115659 - DNA, 25 bp, Probe sequence
atgattcatgaagaagccaccttaa

SEQ ID NO: 115660 - DNA, 25 bp, Probe sequence
atgttatataatttggcttggcgaa

SEQ ID NO: 115661 - DNA, 25 bp, Probe sequence
cttggattttccaaatatattgttt

SEQ ID NO: 115662 - DNA, 25 bp, Probe sequence
gatgttatataatttggcttggcga

SEQ ID NO: 115663 - DNA, 25 bp, Probe sequence
gattcatgaagaagccaccttaaaa

SEQ ID NO: 115664 - DNA, 25 bp, Probe sequence
gttatataatttggcttggcgaaaa

SEQ ID NO: 115665 - DNA, 25 bp, Probe sequence
ggattttccaaatatattgtttgaa

SEQ ID NO: 115666 - DNA, 25 bp, Probe sequence
tcatgaagaagccaccttaaaaggt

SEQ ID NO: 115667 - DNA, 25 bp, Probe sequence
tatgattcatgaagaagccacctta

SEQ ID NO: 115668 - DNA, 25 bp, Probe sequence
tatataatttggcttggcgaaaaaa

SEQ ID NO: 115669 - DNA, 25 bp, Probe sequence
attaatgcatggctgcaaagcaaat

SEQ ID NO: 115670 - DNA, 25 bp, Probe sequence
attatgcttaactatcaatatcaat

SEQ ID NO: 115671 - DNA, 25 bp, Probe sequence
ataacaacattttaaactagcaata

SEQ ID NO: 115672 - DNA, 25 bp, Probe sequence
ataatatcaaagtcatcatttcaat

SEQ ID NO: 115673 - DNA, 25 bp, Probe sequence
caggtgtggactattacttttttca

SEQ ID NO: 115674 - DNA, 25 bp, Probe sequence
gcaatctagtatagtccacattcta

SEQ ID NO: 115675 - DNA, 25 bp, Probe sequence
gaaaattctggtatataatgctgtt

SEQ ID NO: 115676 - DNA, 25 bp, Probe sequence
gactattacttttttcactttatat

SEQ ID NO: 115677 - DNA, 25 bp, Probe sequence
gatgcaatctagtatagtccacatt

SEQ ID NO: 115678 - DNA, 25 bp, Probe sequence
gtatagtccacattctaaacaggtg

SEQ ID NO: 115679 - DNA, 25 bp, Probe sequence
tggactattacttttttcactttat

SEQ ID NO: 115680 - DNA, 25 bp, Probe sequence
tgttaagacaacgtttacttcaagt

SEQ ID NO: 115681 - DNA, 25 bp, Probe sequence
tctggtatataatgctgttagtgaa

SEQ ID NO: 115682 - DNA, 25 bp, Probe sequence
tcatttcaatgatgcaatctagtat

SEQ ID NO: 115683 - DNA, 25 bp, Probe sequence
taaacaggtgtggactattactttt

SEQ ID NO: 115684 - DNA, 25 bp, Probe sequence
ataagactcaagattattgttaata

SEQ ID NO: 115685 - DNA, 25 bp, Probe sequence
agtttgttcatcgcaagttaattat

SEQ ID NO: 115686 - DNA, 25 bp, Probe sequence
aaattggcactaagtttacgagata

SEQ ID NO: 115687 - DNA, 25 bp, Probe sequence
aacacccatcaacaaattataccgt

SEQ ID NO: 115688 - DNA, 25 bp, Probe sequence
caatctatgtggttgtaggctgtat

SEQ ID NO: 115689 - DNA, 25 bp, Probe sequence
catcaacaaattataccgtttttct

SEQ ID NO: 115690 - DNA, 25 bp, Probe sequence
gctgtattttttgcagtttatcaat

SEQ ID NO: 115691 - DNA, 25 bp, Probe sequence
gaaagttggaagtaacataatctta

SEQ ID NO: 115692 - DNA, 25 bp, Probe sequence
gttaatagtttgttcatcgcaagtt

SEQ ID NO: 115693 - DNA, 25 bp, Probe sequence
gtaggctgtattttttgcagtttat

SEQ ID NO: 115694 - DNA, 25 bp, Probe sequence
gtggttgtaggctgtattttttgca

SEQ ID NO: 115695 - DNA, 25 bp, Probe sequence
tacgagatatgataaatacctatta

SEQ ID NO: 115696 - DNA, 25 bp, Probe sequence
tatagtctacaatctatgtggttgt

SEQ ID NO: 115697 - DNA, 25 bp, Probe sequence
tattgttaatagtttgttcatcgca

SEQ ID NO: 115698 - DNA, 25 bp, Probe sequence
tttatcaataaacacccatcaacaa

SEQ ID NO: 115699 - DNA, 25 bp, Probe sequence
ataagttctgacacctaaaatatag

SEQ ID NO: 115700 - DNA, 25 bp, Probe sequence
acctctttgtctcgatatgatagtc

SEQ ID NO: 115701 - DNA, 25 bp, Probe sequence
acgattcatgttgtaggctttttaa

SEQ ID NO: 115702 - DNA, 25 bp, Probe sequence
aatgacaatttatccccgtaaatat

SEQ ID NO: 115703 - DNA, 25 bp, Probe sequence
aataatcttttcaaattccgcatag

SEQ ID NO: 115704 - DNA, 25 bp, Probe sequence
aattccgcatagatatagagacgct

SEQ ID NO: 115705 - DNA, 25 bp, Probe sequence
gctaataaacctctttgtctcgata

SEQ ID NO: 115706 - DNA, 25 bp, Probe sequence
gacgctaataaacctctttgtctcg

SEQ ID NO: 115707 - DNA, 25 bp, Probe sequence
gatagtctgcaacgattcatgttgt

SEQ ID NO: 115708 - DNA, 25 bp, Probe sequence
ggctaaatatataagttctgacacc

SEQ ID NO: 115709 - DNA, 25 bp, Probe sequence
tgtctcgatatgatagtctgcaacg

SEQ ID NO: 115710 - DNA, 25 bp, Probe sequence
tcatgttgtaggctttttaatttta

SEQ ID NO: 115711 - DNA, 25 bp, Probe sequence
taaacctctttgtctcgatatgata

SEQ ID NO: 115712 - DNA, 25 bp, Probe sequence
tacatctcgtttttaaatgacaatt

SEQ ID NO: 115713 - DNA, 25 bp, Probe sequence
ttataagttatacatctcgttttta

SEQ ID NO: 115714 - DNA, 25 bp, Probe sequence
aaagtgtcactgctgctagtggccc

SEQ ID NO: 115715 - DNA, 25 bp, Probe sequence
aaatggaatgttactatatagttca

SEQ ID NO: 115716 - DNA, 25 bp, Probe sequence
aataatgctttacttctatatttaa

SEQ ID NO: 115717 - DNA, 25 bp, Probe sequence
caaaagcacgacggaggtattcaat

SEQ ID NO: 115718 - DNA, 25 bp, Probe sequence
ctgctgctagtggcccttttataat

SEQ ID NO: 115719 - DNA, 25 bp, Probe sequence
gcccttttataatttttagatcacg

SEQ ID NO: 115720 - DNA, 25 bp, Probe sequence
gaatattctccttttcatttatgaa

SEQ ID NO: 115721 - DNA, 25 bp, Probe sequence
gagcgtgaagaaaaatgtgagttat

SEQ ID NO: 115722 - DNA, 25 bp, Probe sequence
gatcacgatatgatttattatcaat

SEQ ID NO: 115723 - DNA, 25 bp, Probe sequence
gtgcaaaagcacgacggaggtattc

SEQ ID NO: 115724 - DNA, 25 bp, Probe sequence
tgctagtggcccttttataattttt

SEQ ID NO: 115725 - DNA, 25 bp, Probe sequence
tgctcattgtaaaagtgtcactgct

SEQ ID NO: 115726 - DNA, 25 bp, Probe sequence
tatagaatattctccttttcattta

SEQ ID NO: 115727 - DNA, 25 bp, Probe sequence
tatatagttcaatgtgtattatcac

SEQ ID NO: 115728 - DNA, 25 bp, Probe sequence
ttctccttttcatttatgaatttgt

SEQ ID NO: 115729 - DNA, 25 bp, Probe sequence
attatagggctgtttttttatgctt

SEQ ID NO: 115730 - DNA, 25 bp, Probe sequence
acttattcaaacagtccttattata

SEQ ID NO: 115731 - DNA, 25 bp, Probe sequence
aaatcgataacagttggtgtggtaa

SEQ ID NO: 115732 - DNA, 25 bp, Probe sequence
cagtccttattatagggctgttttt

SEQ ID NO: 115733 - DNA, 25 bp, Probe sequence
gctttaaatcgataacagttggtgt

SEQ ID NO: 115734 - DNA, 25 bp, Probe sequence
gttggtgtggtaaaagcactagccg

SEQ ID NO: 115735 - DNA, 25 bp, Probe sequence
gtgtggtaaaagcactagccgttat

SEQ ID NO: 115736 - DNA, 25 bp, Probe sequence
gtggtaaaagcactagccgttattt

SEQ ID NO: 115737 - DNA, 25 bp, Probe sequence
ggctgtttttttatgctttaaatcg

SEQ ID NO: 115738 - DNA, 25 bp, Probe sequence
tggtaaaagcactagccgttatttt

SEQ ID NO: 115739 - DNA, 25 bp, Probe sequence
tcaaacagtccttattatagggctg

SEQ ID NO: 115740 - DNA, 25 bp, Probe sequence
tatagggctgtttttttatgcttta

SEQ ID NO: 115741 - DNA, 25 bp, Probe sequence
tttaacttattcaaacagtccttat

SEQ ID NO: 115742 - DNA, 25 bp, Probe sequence
ttattcaaacagtccttattatagg

SEQ ID NO: 115743 - DNA, 25 bp, Probe sequence
ttgtccaataaattgtggagatcta

SEQ ID NO: 115744 - DNA, 25 bp, Probe sequence
atatcttactacttaattaataatt

SEQ ID NO: 115745 - DNA, 25 bp, Probe sequence
ataccacatcgcataatatcttact

SEQ ID NO: 115746 - DNA, 25 bp, Probe sequence
atcgcataatatcttactacttaat

SEQ ID NO: 115747 - DNA, 25 bp, Probe sequence
acaataataggataccacatcgcat

SEQ ID NO: 115748 - DNA, 25 bp, Probe sequence
aaatctcataataattcagtaatct

SEQ ID NO: 115749 - DNA, 25 bp, Probe sequence
aaaagcgccaatacagaactttaat

SEQ ID NO: 115750 - DNA, 25 bp, Probe sequence
aagtctgtatatggcgataacaaga

SEQ ID NO: 115751 - DNA, 25 bp, Probe sequence
aataggataccacatcgcataatat

SEQ ID NO: 115752 - DNA, 25 bp, Probe sequence
aattcagtaatcttgttttcattta

SEQ ID NO: 115753 - DNA, 25 bp, Probe sequence
cacatcgcataatatcttactactt

SEQ ID NO: 115754 - DNA, 25 bp, Probe sequence
gcgccaatacagaactttaataatg

SEQ ID NO: 115755 - DNA, 25 bp, Probe sequence
gaattaaagtctgtatatggcgata

SEQ ID NO: 115756 - DNA, 25 bp, Probe sequence
tgtccgacttttgattttgaataaa

SEQ ID NO: 115757 - DNA, 25 bp, Probe sequence
taatcttgttttcatttaaaaggcg

SEQ ID NO: 115758 - DNA, 25 bp, Probe sequence
tatttattgtttttaaaatctcata

SEQ ID NO: 115759 - DNA, 25 bp, Probe sequence
atgtttttcactcctgctttaaaat

SEQ ID NO: 115760 - DNA, 25 bp, Probe sequence
aaagtttatagttgagacattcatg

SEQ ID NO: 115761 - DNA, 25 bp, Probe sequence
aaaaagtttatagttgagacattca

SEQ ID NO: 115762 - DNA, 25 bp, Probe sequence
aaaagtttatagttgagacattcat

SEQ ID NO: 115763 - DNA, 25 bp, Probe sequence
aagtttatagttgagacattcatgt

SEQ ID NO: 115764 - DNA, 25 bp, Probe sequence
gtttttcactcctgctttaaaatag

SEQ ID NO: 115765 - DNA, 25 bp, Probe sequence
tgtttttcactcctgctttaaaata

SEQ ID NO: 115766 - DNA, 25 bp, Probe sequence
tcactcctgctttaaaatagggtta

SEQ ID NO: 115767 - DNA, 25 bp, Probe sequence
tatgtttttcactcctgctttaaaa

SEQ ID NO: 115768 - DNA, 25 bp, Probe sequence
tttcactcctgctttaaaatagggt

SEQ ID NO: 115769 - DNA, 25 bp, Probe sequence
tttttcactcctgctttaaaatagg

SEQ ID NO: 115770 - DNA, 25 bp, Probe sequence
ttttcactcctgctttaaaataggg

SEQ ID NO: 115771 - DNA, 25 bp, Probe sequence
ttcactcctgctttaaaatagggtt

SEQ ID NO: 115772 - DNA, 25 bp, Probe sequence
atttgtaatctatacccaatttatt

SEQ ID NO: 115773 - DNA, 25 bp, Probe sequence
atatcatttgtaatctatacccaat

SEQ ID NO: 115774 - DNA, 25 bp, Probe sequence
atacccaatttattgcaaaacacaa

SEQ ID NO: 115775 - DNA, 25 bp, Probe sequence
atcatttgtaatctatacccaattt

SEQ ID NO: 115776 - DNA, 25 bp, Probe sequence
atctatacccaatttattgcaaaac

SEQ ID NO: 115777 - DNA, 25 bp, Probe sequence
aatattgggcctcctgaaatatcat

SEQ ID NO: 115778 - DNA, 25 bp, Probe sequence
aatttaactatttgatgaaactgtg

SEQ ID NO: 115779 - DNA, 25 bp, Probe sequence
gcctcctgaaatatcatttgtaatc

SEQ ID NO: 115780 - DNA, 25 bp, Probe sequence
gcaaaacacaaactaatttaactat

SEQ ID NO: 115781 - DNA, 25 bp, Probe sequence
gaaatatcatttgtaatctataccc

SEQ ID NO: 115782 - DNA, 25 bp, Probe sequence
gtaatctatacccaatttattgcaa

SEQ ID NO: 115783 - DNA, 25 bp, Probe sequence
gggcctcctgaaatatcatttgtaa

SEQ ID NO: 115784 - DNA, 25 bp, Probe sequence
tgtaatctatacccaatttattgca

SEQ ID NO: 115785 - DNA, 25 bp, Probe sequence
tattgggcctcctgaaatatcattt

SEQ ID NO: 115786 - DNA, 25 bp, Probe sequence
ttgggcctcctgaaatatcatttgt

SEQ ID NO: 115787 - DNA, 25 bp, Probe sequence
atcattgagacgtttcagactggat

SEQ ID NO: 115788 - DNA, 25 bp, Probe sequence
acatcattgagacgtttcagactgg

SEQ ID NO: 115789 - DNA, 25 bp, Probe sequence
aaaacagtctgaaacatcattgaga

SEQ ID NO: 115790 - DNA, 25 bp, Probe sequence
aacatcattgagacgtttcagactg

SEQ ID NO: 115791 - DNA, 25 bp, Probe sequence
aagcttgtaagactaaaacatatct

SEQ ID NO: 115792 - DNA, 25 bp, Probe sequence
cattgagacgtttcagactggatat

SEQ ID NO: 115793 - DNA, 25 bp, Probe sequence
gaattgtaatctttaataagcttgt

SEQ ID NO: 115794 - DNA, 25 bp, Probe sequence
gaaatatatgtaaatagtcttaaat

SEQ ID NO: 115795 - DNA, 25 bp, Probe sequence
gacgtttcagactggatataaaatg

SEQ ID NO: 115796 - DNA, 25 bp, Probe sequence
gagacgtttcagactggatataaaa

SEQ ID NO: 115797 - DNA, 25 bp, Probe sequence
gagagtgtgaaatgtctattaagaa

SEQ ID NO: 115798 - DNA, 25 bp, Probe sequence
gtatgagagtgtgaaatgtctatta

SEQ ID NO: 115799 - DNA, 25 bp, Probe sequence
ttaaaagctccttgttgaagaaata

SEQ ID NO: 115800 - DNA, 25 bp, Probe sequence
ttgagacgtttcagactggatataa

SEQ ID NO: 115801 - DNA, 25 bp, Probe sequence
ttgtaatctttaataagcttgtaag

SEQ ID NO: 115802 - DNA, 25 bp, Probe sequence
atagcttcttaataaatatgataac

SEQ ID NO: 115803 - DNA, 25 bp, Probe sequence
ataacactttaaatagcgcttaata

SEQ ID NO: 115804 - DNA, 25 bp, Probe sequence
ataataacactttaaatagcgctta

SEQ ID NO: 115805 - DNA, 25 bp, Probe sequence
actagtataaaaatagcttcttaat

SEQ ID NO: 115806 - DNA, 25 bp, Probe sequence
aatatgataacactattttccaata

SEQ ID NO: 115807 - DNA, 25 bp, Probe sequence
caaaatcacttttgcacatttacaa

SEQ ID NO: 115808 - DNA, 25 bp, Probe sequence
caaacaagtgagcatatatagggat

SEQ ID NO: 115809 - DNA, 25 bp, Probe sequence
caaatactagttttctgataagatt

SEQ ID NO: 115810 - DNA, 25 bp, Probe sequence
catttacaaatactagttttctgat

SEQ ID NO: 115811 - DNA, 25 bp, Probe sequence
gaatgctaaagtttattaattcaaa

SEQ ID NO: 115812 - DNA, 25 bp, Probe sequence
gactgacacctactagtataaaaat

SEQ ID NO: 115813 - DNA, 25 bp, Probe sequence
gataacactattttccaataggtaa

SEQ ID NO: 115814 - DNA, 25 bp, Probe sequence
taaagttgtataattcgttaatatt

SEQ ID NO: 115815 - DNA, 25 bp, Probe sequence
tagcgcttaataaatgaagggggca

SEQ ID NO: 115816 - DNA, 25 bp, Probe sequence
ttcgttaatatttttagaatcagat

SEQ ID NO: 115817 - DNA, 25 bp, Probe sequence
attctgtactcttcattgcgtttta

SEQ ID NO: 115818 - DNA, 25 bp, Probe sequence
atactttttattgaagaggtgttat

SEQ ID NO: 115819 - DNA, 25 bp, Probe sequence
aaacactcactcctttaaaattctg

SEQ ID NO: 115820 - DNA, 25 bp, Probe sequence
aaaattctgtactcttcattgcgtt

SEQ ID NO: 115821 - DNA, 25 bp, Probe sequence
aagagaatacattttgagctatcaa

SEQ ID NO: 115822 - DNA, 25 bp, Probe sequence
aatggtttaatatatttggtactca

SEQ ID NO: 115823 - DNA, 25 bp, Probe sequence
cactcactcctttaaaattctgtac

SEQ ID NO: 115824 - DNA, 25 bp, Probe sequence
ctcactcctttaaaattctgtactc

SEQ ID NO: 115825 - DNA, 25 bp, Probe sequence
ctcctttaaaattctgtactcttca

SEQ ID NO: 115826 - DNA, 25 bp, Probe sequence
gtcacattatcttttaaactaaaat

SEQ ID NO: 115827 - DNA, 25 bp, Probe sequence
tctgtactcttcattgcgttttacc

SEQ ID NO: 115828 - DNA, 25 bp, Probe sequence
tcaaaagcaaaggttttcgctaccg

SEQ ID NO: 115829 - DNA, 25 bp, Probe sequence
taatatatttggtactcattttaat

SEQ ID NO: 115830 - DNA, 25 bp, Probe sequence
taaactaaaatcatcattacttatg

SEQ ID NO: 115831 - DNA, 25 bp, Probe sequence
ttttgagctatcaatactttttatt

SEQ ID NO: 115832 - DNA, 25 bp, Probe sequence
ataaagcgttatacatagacacaag

SEQ ID NO: 115833 - DNA, 25 bp, Probe sequence
agtatgtcttttgtataacgctttt

SEQ ID NO: 115834 - DNA, 25 bp, Probe sequence
agcgttatacatagacacaagtatg

SEQ ID NO: 115835 - DNA, 25 bp, Probe sequence
aaagcgttatacatagacacaagta

SEQ ID NO: 115836 - DNA, 25 bp, Probe sequence
aagtatgtcttttgtataacgcttt

SEQ ID NO: 115837 - DNA, 25 bp, Probe sequence
aataaagcgttatacatagacacaa

SEQ ID NO: 115838 - DNA, 25 bp, Probe sequence
caagtatgtcttttgtataacgctt

SEQ ID NO: 115839 - DNA, 25 bp, Probe sequence
cacaagtatgtcttttgtataacgc

SEQ ID NO: 115840 - DNA, 25 bp, Probe sequence
gcttttaaaatacaactacataacg

SEQ ID NO: 115841 - DNA, 25 bp, Probe sequence
gacacaagtatgtcttttgtataac

SEQ ID NO: 115842 - DNA, 25 bp, Probe sequence
gtatgtcttttgtataacgctttta

SEQ ID NO: 115843 - DNA, 25 bp, Probe sequence
taacgcttttaaaatacaactacat

SEQ ID NO: 115844 - DNA, 25 bp, Probe sequence
taaagcgttatacatagacacaagt

SEQ ID NO: 115845 - DNA, 25 bp, Probe sequence
tatgtcttttgtataacgcttttaa

SEQ ID NO: 115846 - DNA, 25 bp, Probe sequence
ttttaaaatacaactacataacgct

SEQ ID NO: 115847 - DNA, 25 bp, Probe sequence
atagaacctatatgatttgaattta

SEQ ID NO: 115848 - DNA, 25 bp, Probe sequence
atcaaataaaaaacaactactcaat

SEQ ID NO: 115849 - DNA, 25 bp, Probe sequence
agttgtatgaaaaatagaacctata

SEQ ID NO: 115850 - DNA, 25 bp, Probe sequence
acctatatgatttgaatttatgaga

SEQ ID NO: 115851 - DNA, 25 bp, Probe sequence
aaaacttattgttatcatatcaaat

SEQ ID NO: 115852 - DNA, 25 bp, Probe sequence
caaataaaaaacaactactcaatag

SEQ ID NO: 115853 - DNA, 25 bp, Probe sequence
cacccctaaaacatagaatattctg

SEQ ID NO: 115854 - DNA, 25 bp, Probe sequence
ctcaatagtagagtagttgtatgaa

SEQ ID NO: 115855 - DNA, 25 bp, Probe sequence
gaatattctgaaaaaacttattgtt

SEQ ID NO: 115856 - DNA, 25 bp, Probe sequence
gaacctatatgatttgaatttatga

SEQ ID NO: 115857 - DNA, 25 bp, Probe sequence
gaaaaaacttattgttatcatatca

SEQ ID NO: 115858 - DNA, 25 bp, Probe sequence
gacacccctaaaacatagaatattc

SEQ ID NO: 115859 - DNA, 25 bp, Probe sequence
tttgacacccctaaaacatagaata

SEQ ID NO: 115860 - DNA, 25 bp, Probe sequence
ttttgacacccctaaaacatagaat

SEQ ID NO: 115861 - DNA, 25 bp, Probe sequence
ttgacacccctaaaacatagaatat

SEQ ID NO: 115862 - DNA, 25 bp, Probe sequence
attggttattgatcgacactggact

SEQ ID NO: 115863 - DNA, 25 bp, Probe sequence
attgatcgacactggacttttattt

SEQ ID NO: 115864 - DNA, 25 bp, Probe sequence
atatgcacattcttgtaaatggatt

SEQ ID NO: 115865 - DNA, 25 bp, Probe sequence
atcactgatttatatgcacattctt

SEQ ID NO: 115866 - DNA, 25 bp, Probe sequence
actgatttatatgcacattcttgta

SEQ ID NO: 115867 - DNA, 25 bp, Probe sequence
aagttcaggaaattatggaattggt

SEQ ID NO: 115868 - DNA, 25 bp, Probe sequence
cactggacttttatttggagacgtt

SEQ ID NO: 115869 - DNA, 25 bp, Probe sequence
gcacattcttgtaaatggattatca

SEQ ID NO: 115870 - DNA, 25 bp, Probe sequence
gacactggacttttatttggagacg

SEQ ID NO: 115871 - DNA, 25 bp, Probe sequence
gatcgacactggacttttatttgga

SEQ ID NO: 115872 - DNA, 25 bp, Probe sequence
gtttattaaaattttgcaatcactg

SEQ ID NO: 115873 - DNA, 25 bp, Probe sequence
ggttattgatcgacactggactttt

SEQ ID NO: 115874 - DNA, 25 bp, Probe sequence
ggaattggttattgatcgacactgg

SEQ ID NO: 115875 - DNA, 25 bp, Probe sequence
taattatatttatttttaagttcag

SEQ ID NO: 115876 - DNA, 25 bp, Probe sequence
tactgacctccttaatcattattaa

SEQ ID NO: 115877 - DNA, 25 bp, Probe sequence
attgccagaaatttcagtcacgaat

SEQ ID NO: 115878 - DNA, 25 bp, Probe sequence
atattgccagaaatttcagtcacga

SEQ ID NO: 115879 - DNA, 25 bp, Probe sequence
ataacgttgaataatctctttaagt

SEQ ID NO: 115880 - DNA, 25 bp, Probe sequence
atcattttcagttaaatattgccag

SEQ ID NO: 115881 - DNA, 25 bp, Probe sequence
atgtgaattttattaataacgttga

SEQ ID NO: 115882 - DNA, 25 bp, Probe sequence
aatattgccagaaatttcagtcacg

SEQ ID NO: 115883 - DNA, 25 bp, Probe sequence
cgttgaataatctctttaagttaat

SEQ ID NO: 115884 - DNA, 25 bp, Probe sequence
gccagaaatttcagtcacgaataga

SEQ ID NO: 115885 - DNA, 25 bp, Probe sequence
gaaatttcagtcacgaatagaaaaa

SEQ ID NO: 115886 - DNA, 25 bp, Probe sequence
gggacaatcattttcagttaaatat

SEQ ID NO: 115887 - DNA, 25 bp, Probe sequence
ggttggcaaatttgaattttatgtg

SEQ ID NO: 115888 - DNA, 25 bp, Probe sequence
taataacgttgaataatctctttaa

SEQ ID NO: 115889 - DNA, 25 bp, Probe sequence
taacgttgaataatctctttaagtt

SEQ ID NO: 115890 - DNA, 25 bp, Probe sequence
tattgccagaaatttcagtcacgaa

SEQ ID NO: 115891 - DNA, 25 bp, Probe sequence
ttgccagaaatttcagtcacgaata

SEQ ID NO: 115892 - DNA, 25 bp, Probe sequence
atttatgctttacccattcgaaaat

SEQ ID NO: 115893 - DNA, 25 bp, Probe sequence
atagcattgtttgattgaaggataa

SEQ ID NO: 115894 - DNA, 25 bp, Probe sequence
atacatttatgctttacccattcga

SEQ ID NO: 115895 - DNA, 25 bp, Probe sequence
atcattttcatttatagcattgttt

SEQ ID NO: 115896 - DNA, 25 bp, Probe sequence
accttaatcattttcatttatagca

SEQ ID NO: 115897 - DNA, 25 bp, Probe sequence
acatttatgctttacccattcgaaa

SEQ ID NO: 115898 - DNA, 25 bp, Probe sequence
aaaatacatttatgctttacccatt

SEQ ID NO: 115899 - DNA, 25 bp, Probe sequence
aataccttaatcattttcatttata

SEQ ID NO: 115900 - DNA, 25 bp, Probe sequence
cccattcgaaaataccttaatcatt

SEQ ID NO: 115901 - DNA, 25 bp, Probe sequence
gagtatctgaaatgagggatttact

SEQ ID NO: 115902 - DNA, 25 bp, Probe sequence
gattgaaggataaaaagttgttgtt

SEQ ID NO: 115903 - DNA, 25 bp, Probe sequence
tgctttacccattcgaaaatacctt

SEQ ID NO: 115904 - DNA, 25 bp, Probe sequence
tacccattcgaaaataccttaatca

SEQ ID NO: 115905 - DNA, 25 bp, Probe sequence
tatgctttacccattcgaaaatacc

SEQ ID NO: 115906 - DNA, 25 bp, Probe sequence
tataacctcctaatttaaaatacat

SEQ ID NO: 115907 - DNA, 25 bp, Probe sequence
attgttcgtggaggagcgattttag

SEQ ID NO: 115908 - DNA, 25 bp, Probe sequence
attaggttgcttttgtgtaagtgct

SEQ ID NO: 115909 - DNA, 25 bp, Probe sequence
atcattgttcgtggaggagcgattt

SEQ ID NO: 115910 - DNA, 25 bp, Probe sequence
atgaattaggttgcttttgtgtaag

SEQ ID NO: 115911 - DNA, 25 bp, Probe sequence
aggttgcttttgtgtaagtgctgtc

SEQ ID NO: 115912 - DNA, 25 bp, Probe sequence
aagtattatcattgttcgtggagga

SEQ ID NO: 115913 - DNA, 25 bp, Probe sequence
gcttttgtgtaagtgctgtcttata

SEQ ID NO: 115914 - DNA, 25 bp, Probe sequence
gagaagtattatcattgttcgtgga

SEQ ID NO: 115915 - DNA, 25 bp, Probe sequence
gttgcttttgtgtaagtgctgtctt

SEQ ID NO: 115916 - DNA, 25 bp, Probe sequence
gtattatcattgttcgtggaggagc

SEQ ID NO: 115917 - DNA, 25 bp, Probe sequence
aagtgctgtcttataattgagaagt

SEQ ID NO: 115918 - DNA, 25 bp, Probe sequence
gtgctgtcttataattgagaagtat

SEQ ID NO: 115919 - DNA, 25 bp, Probe sequence
gtgtaagtgctgtcttataattgag

SEQ ID NO: 115920 - DNA, 25 bp, Probe sequence
ggttgcttttgtgtaagtgctgtct

SEQ ID NO: 115921 - DNA, 25 bp, Probe sequence
ttatcattgttcgtggaggagcgat

SEQ ID NO: 115922 - DNA, 25 bp, Probe sequence
agtcggtacaatcacagtctcagct

SEQ ID NO: 115923 - DNA, 25 bp, Probe sequence
actagagtcggtacaatcacagtct

SEQ ID NO: 115924 - DNA, 25 bp, Probe sequence
acagtctcagctttttattgtgaag

SEQ ID NO: 115925 - DNA, 25 bp, Probe sequence
acaatcacagtctcagctttttatt

SEQ ID NO: 115926 - DNA, 25 bp, Probe sequence
aaagctgagacatgaattgatggac

SEQ ID NO: 115927 - DNA, 25 bp, Probe sequence
aatcacagtctcagctttttattgt

SEQ ID NO: 115928 - DNA, 25 bp, Probe sequence
gagacatgaattgatggacatctat

SEQ ID NO: 115929 - DNA, 25 bp, Probe sequence
gatggacatctatcgagttagagat

SEQ ID NO: 115930 - DNA, 25 bp, Probe sequence
gatttaatctaatttactagagtcg

SEQ ID NO: 115931 - DNA, 25 bp, Probe sequence
gtatatacacatttgtattttagta

SEQ ID NO: 115932 - DNA, 25 bp, Probe sequence
gtacaatcacagtctcagcttttta

SEQ ID NO: 115933 - DNA, 25 bp, Probe sequence
gtctcagctttttattgtgaagtat

SEQ ID NO: 115934 - DNA, 25 bp, Probe sequence
ggtacaatcacagtctcagcttttt

SEQ ID NO: 115935 - DNA, 25 bp, Probe sequence
ggacatctatcgagttagagattta

SEQ ID NO: 115936 - DNA, 25 bp, Probe sequence
tcggtacaatcacagtctcagcttt

SEQ ID NO: 115937 - DNA, 25 bp, Probe sequence
attttagcttcaaaatgaaagcctt

SEQ ID NO: 115938 - DNA, 25 bp, Probe sequence
atgaaagccttttgctatggaaaat

SEQ ID NO: 115939 - DNA, 25 bp, Probe sequence
agccttttgctatggaaaatgatat

SEQ ID NO: 115940 - DNA, 25 bp, Probe sequence
aaagccttttgctatggaaaatgat

SEQ ID NO: 115941 - DNA, 25 bp, Probe sequence
aaaatgaaagccttttgctatggaa

SEQ ID NO: 115942 - DNA, 25 bp, Probe sequence
aacaactcctctagatagtttaata

SEQ ID NO: 115943 - DNA, 25 bp, Probe sequence
aatacataaaggaggttgcagtcgc

SEQ ID NO: 115944 - DNA, 25 bp, Probe sequence
aatgaaagccttttgctatggaaaa

SEQ ID NO: 115945 - DNA, 25 bp, Probe sequence
caactcctctagatagtttaataat

SEQ ID NO: 115946 - DNA, 25 bp, Probe sequence
gcttcaaaatgaaagccttttgcta

SEQ ID NO: 115947 - DNA, 25 bp, Probe sequence
gaaagccttttgctatggaaaatga

SEQ ID NO: 115948 - DNA, 25 bp, Probe sequence
gtaacaactcctctagatagtttaa

SEQ ID NO: 115949 - DNA, 25 bp, Probe sequence
tgtaacaactcctctagatagttta

SEQ ID NO: 115950 - DNA, 25 bp, Probe sequence
tcctctagatagtttaataattttt

SEQ ID NO: 115951 - DNA, 25 bp, Probe sequence
ttattatagctaaatttatatcata

SEQ ID NO: 115952 - DNA, 25 bp, Probe sequence
atatagttgaatagcatctagcctt

SEQ ID NO: 115953 - DNA, 25 bp, Probe sequence
atatctcgatatttagattcattac

SEQ ID NO: 115954 - DNA, 25 bp, Probe sequence
atagcatctagccttatggcatcat

SEQ ID NO: 115955 - DNA, 25 bp, Probe sequence
atagttgaatagcatctagccttat

SEQ ID NO: 115956 - DNA, 25 bp, Probe sequence
agcatctagccttatggcatcatta

SEQ ID NO: 115957 - DNA, 25 bp, Probe sequence
aacgtttactaaatatctcgatatt

SEQ ID NO: 115958 - DNA, 25 bp, Probe sequence
catctagccttatggcatcattaat

SEQ ID NO: 115959 - DNA, 25 bp, Probe sequence
ctagccttatggcatcattaatgat

SEQ ID NO: 115960 - DNA, 25 bp, Probe sequence
gcatctagccttatggcatcattaa

SEQ ID NO: 115961 - DNA, 25 bp, Probe sequence
gaatagcatctagccttatggcatc

SEQ ID NO: 115962 - DNA, 25 bp, Probe sequence
gttgaatagcatctagccttatggc

SEQ ID NO: 115963 - DNA, 25 bp, Probe sequence
gtaaacgtttactaaatatctcgat

SEQ ID NO: 115964 - DNA, 25 bp, Probe sequence
tgaatagcatctagccttatggcat

SEQ ID NO: 115965 - DNA, 25 bp, Probe sequence
tcgatatttagattcattacatgta

SEQ ID NO: 115966 - DNA, 25 bp, Probe sequence
taagctatacaattgttaattttta

SEQ ID NO: 115967 - DNA, 25 bp, Probe sequence
accgtgtaactccttaatctaagat

SEQ ID NO: 115968 - DNA, 25 bp, Probe sequence
caccgtgtaactccttaatctaaga

SEQ ID NO: 115969 - DNA, 25 bp, Probe sequence
cgtgtaactccttaatctaagattg

SEQ ID NO: 115970 - DNA, 25 bp, Probe sequence
ccgtgtaactccttaatctaagatt

SEQ ID NO: 115971 - DNA, 25 bp, Probe sequence
gagtttatttttagtctgagtaagt

SEQ ID NO: 115972 - DNA, 25 bp, Probe sequence
gaggagtttatttttagtctgagta

SEQ ID NO: 115973 - DNA, 25 bp, Probe sequence
gattgaggagtttatttttagtctg

SEQ ID NO: 115974 - DNA, 25 bp, Probe sequence
gtaactccttaatctaagattgagg

SEQ ID NO: 115975 - DNA, 25 bp, Probe sequence
gtgtaactccttaatctaagattga

SEQ ID NO: 115976 - DNA, 25 bp, Probe sequence
ggagtttatttttagtctgagtaag

SEQ ID NO: 115977 - DNA, 25 bp, Probe sequence
tgaggagtttatttttagtctgagt

SEQ ID NO: 115978 - DNA, 25 bp, Probe sequence
tcaccgtgtaactccttaatctaag

SEQ ID NO: 115979 - DNA, 25 bp, Probe sequence
taactccttaatctaagattgagga

SEQ ID NO: 115980 - DNA, 25 bp, Probe sequence
ttatttttagtctgagtaagtaaat

SEQ ID NO: 115981 - DNA, 25 bp, Probe sequence
ttgaggagtttatttttagtctgag

SEQ ID NO: 115982 - DNA, 25 bp, Probe sequence
ataagatgtacgatgtttggtggat

SEQ ID NO: 115983 - DNA, 25 bp, Probe sequence
atgtacgatgtttggtggatatgat

SEQ ID NO: 115984 - DNA, 25 bp, Probe sequence
agatgtacgatgtttggtggatatg

SEQ ID NO: 115985 - DNA, 25 bp, Probe sequence
acgatgtttggtggatatgatgaat

SEQ ID NO: 115986 - DNA, 25 bp, Probe sequence
aagatgtacgatgtttggtggatat

SEQ ID NO: 115987 - DNA, 25 bp, Probe sequence
ctcttgataagatgtacgatgtttg

SEQ ID NO: 115988 - DNA, 25 bp, Probe sequence
cgatgtttggtggatatgatgaatt

SEQ ID NO: 115989 - DNA, 25 bp, Probe sequence
gatgtacgatgtttggtggatatga

SEQ ID NO: 115990 - DNA, 25 bp, Probe sequence
gatgtttggtggatatgatgaatta

SEQ ID NO: 115991 - DNA, 25 bp, Probe sequence
gataagatgtacgatgtttggtgga

SEQ ID NO: 115992 - DNA, 25 bp, Probe sequence
gtacgatgtttggtggatatgatga

SEQ ID NO: 115993 - DNA, 25 bp, Probe sequence
tgtacgatgtttggtggatatgatg

SEQ ID NO: 115994 - DNA, 25 bp, Probe sequence
tcttgataagatgtacgatgtttgg

SEQ ID NO: 115995 - DNA, 25 bp, Probe sequence
taagatgtacgatgtttggtggata

SEQ ID NO: 115996 - DNA, 25 bp, Probe sequence
tacgatgtttggtggatatgatgaa

SEQ ID NO: 115997 - DNA, 25 bp, Probe sequence
atagatcaatctagggagtgggaca

SEQ ID NO: 115998 - DNA, 25 bp, Probe sequence
ataagtgtagtatctatagatcaat

SEQ ID NO: 115999 - DNA, 25 bp, Probe sequence
agtgtagtatctatagatcaatcta

SEQ ID NO: 116000 - DNA, 25 bp, Probe sequence
agtatctatagatcaatctagggag

SEQ ID NO: 116001 - DNA, 25 bp, Probe sequence
actttaataagtgtagtatctatag

SEQ ID NO: 116002 - DNA, 25 bp, Probe sequence
aagtgtagtatctatagatcaatct

SEQ ID NO: 116003 - DNA, 25 bp, Probe sequence
aataagtgtagtatctatagatcaa

SEQ ID NO: 116004 - DNA, 25 bp, Probe sequence
gtatctatagatcaatctagggagt

SEQ ID NO: 116005 - DNA, 25 bp, Probe sequence
gtagtatctatagatcaatctaggg

SEQ ID NO: 116006 - DNA, 25 bp, Probe sequence
gtgtagtatctatagatcaatctag

SEQ ID NO: 116007 - DNA, 25 bp, Probe sequence
tgtagtatctatagatcaatctagg

SEQ ID NO: 116008 - DNA, 25 bp, Probe sequence
taataagtgtagtatctatagatca

SEQ ID NO: 116009 - DNA, 25 bp, Probe sequence
taagtgtagtatctatagatcaatc

SEQ ID NO: 116010 - DNA, 25 bp, Probe sequence
tagatcaatctagggagtgggacag

SEQ ID NO: 116011 - DNA, 25 bp, Probe sequence
tagtatctatagatcaatctaggga

SEQ ID NO: 116012 - DNA, 25 bp, Probe sequence
ataagccacagctaatgtgtattta

SEQ ID NO: 116013 - DNA, 25 bp, Probe sequence
agccacagctaatgtgtatttaaaa

SEQ ID NO: 116014 - DNA, 25 bp, Probe sequence
actcatgcataagaaatactaattt

SEQ ID NO: 116015 - DNA, 25 bp, Probe sequence
aaactcatgcataagaaatactaat

SEQ ID NO: 116016 - DNA, 25 bp, Probe sequence
aaaactcatgcataagaaatactaa

SEQ ID NO: 116017 - DNA, 25 bp, Probe sequence
aactcatgcataagaaatactaatt

SEQ ID NO: 116018 - DNA, 25 bp, Probe sequence
aagccacagctaatgtgtatttaaa

SEQ ID NO: 116019 - DNA, 25 bp, Probe sequence
aataggaatacatgagtaaaactca

SEQ ID NO: 116020 - DNA, 25 bp, Probe sequence
cacagctaatgtgtatttaaaaata

SEQ ID NO: 116021 - DNA, 25 bp, Probe sequence
cataagccacagctaatgtgtattt

SEQ ID NO: 116022 - DNA, 25 bp, Probe sequence
gccacagctaatgtgtatttaaaaa

SEQ ID NO: 116023 - DNA, 25 bp, Probe sequence
gagtaaaactcatgcataagaaata

SEQ ID NO: 116024 - DNA, 25 bp, Probe sequence
tcataagccacagctaatgtgtatt

SEQ ID NO: 116025 - DNA, 25 bp, Probe sequence
taagccacagctaatgtgtatttaa

SEQ ID NO: 116026 - DNA, 25 bp, Probe sequence
ttcataagccacagctaatgtgtat

SEQ ID NO: 116027 - DNA, 25 bp, Probe sequence
attgtagattttaggatgttgattt

SEQ ID NO: 116028 - DNA, 25 bp, Probe sequence
atgttttattcataccaattttgtg

SEQ ID NO: 116029 - DNA, 25 bp, Probe sequence
gacttagcctttgtctgcttatgtt

SEQ ID NO: 116030 - DNA, 25 bp, Probe sequence
gatgttgatttttgacttagccttt

SEQ ID NO: 116031 - DNA, 25 bp, Probe sequence
gatacagtgacagatgtttattgat

SEQ ID NO: 116032 - DNA, 25 bp, Probe sequence
gatttttgacttagcctttgtctgc

SEQ ID NO: 116033 - DNA, 25 bp, Probe sequence
gttccagctagtcaaacattgagtt

SEQ ID NO: 116034 - DNA, 25 bp, Probe sequence
gtgatttatgttttattcataccaa

SEQ ID NO: 116035 - DNA, 25 bp, Probe sequence
tgtattttcttttggttaactattg

SEQ ID NO: 116036 - DNA, 25 bp, Probe sequence
tgttataggtgtattttcttttggt

SEQ ID NO: 116037 - DNA, 25 bp, Probe sequence
taagctagtttaaattttttgtgat

SEQ ID NO: 116038 - DNA, 25 bp, Probe sequence
tatgttaaatgttccagctagtcaa

SEQ ID NO: 116039 - DNA, 25 bp, Probe sequence
tttgacttagcctttgtctgcttat

SEQ ID NO: 116040 - DNA, 25 bp, Probe sequence
ttagcctttgtctgcttatgttaaa

SEQ ID NO: 116041 - DNA, 25 bp, Probe sequence
ttgtctgcttatgttaaatgttcca

SEQ ID NO: 116042 - DNA, 25 bp, Probe sequence
attgagaaagcattttttattttat

SEQ ID NO: 116043 - DNA, 25 bp, Probe sequence
aagcccggcaaccgtcttatataga

SEQ ID NO: 116044 - DNA, 25 bp, Probe sequence
aatgatgcgtaaactcttatcgaga

SEQ ID NO: 116045 - DNA, 25 bp, Probe sequence
aatactactattgctttctcaattt

SEQ ID NO: 116046 - DNA, 25 bp, Probe sequence
ctttctcaatttttctatcgatatt

SEQ ID NO: 116047 - DNA, 25 bp, Probe sequence
ccggcaaccgtcttatatagaaatg

SEQ ID NO: 116048 - DNA, 25 bp, Probe sequence
gaaacaatactactattgctttctc

SEQ ID NO: 116049 - DNA, 25 bp, Probe sequence
gtgccaattcacataaagttttaac

SEQ ID NO: 116050 - DNA, 25 bp, Probe sequence
tcgagagtggtggagggatgtgccc

SEQ ID NO: 116051 - DNA, 25 bp, Probe sequence
tggagggatgtgccctacgaagccc

SEQ ID NO: 116052 - DNA, 25 bp, Probe sequence
tgacgaaattttactaaggtgttag

SEQ ID NO: 116053 - DNA, 25 bp, Probe sequence
tatagaaatggtgccaattcacata

SEQ ID NO: 116054 - DNA, 25 bp, Probe sequence
ttattttattaagcaacacagggag

SEQ ID NO: 116055 - DNA, 25 bp, Probe sequence
ttaagcaacacagggaggaatcaac

SEQ ID NO: 116056 - DNA, 25 bp, Probe sequence
ttgctttctcaatttttctatcgat

SEQ ID NO: 116057 - DNA, 25 bp, Probe sequence
atgatgaatctatttcgctagttat

SEQ ID NO: 116058 - DNA, 25 bp, Probe sequence
acatggatagtgactactacatcat

SEQ ID NO: 116059 - DNA, 25 bp, Probe sequence
aacatttaattattccgaggaggca

SEQ ID NO: 116060 - DNA, 25 bp, Probe sequence
aatggctcagtaacgtgatgttgct

SEQ ID NO: 116061 - DNA, 25 bp, Probe sequence
gcatgcgtgctactcatttattctt

SEQ ID NO: 116062 - DNA, 25 bp, Probe sequence
gatgttgctgggctttttaatttaa

SEQ ID NO: 116063 - DNA, 25 bp, Probe sequence
gtaaaatcctatatgcatgcgtgct

SEQ ID NO: 116064 - DNA, 25 bp, Probe sequence
gtgctactcatttattcttattttt

SEQ ID NO: 116065 - DNA, 25 bp, Probe sequence
tgtttagataatttttcagtgggta

SEQ ID NO: 116066 - DNA, 25 bp, Probe sequence
tcccactccctcaagttaatgatga

SEQ ID NO: 116067 - DNA, 25 bp, Probe sequence
taacgtgatgttgctgggcttttta

SEQ ID NO: 116068 - DNA, 25 bp, Probe sequence
taggaatgagatgctattacggata

SEQ ID NO: 116069 - DNA, 25 bp, Probe sequence
ttctttattatttcagtcccactcc

SEQ ID NO: 116070 - DNA, 25 bp, Probe sequence
ttcttatttttaatttcacatggat

SEQ ID NO: 116071 - DNA, 25 bp, Probe sequence
ttcgctagttataaaatgacgtcaa

SEQ ID NO: 116072 - DNA, 25 bp, Probe sequence
acttagtcggtataaccatcggcta

SEQ ID NO: 116073 - DNA, 25 bp, Probe sequence
attgcatatgattaacgagatactg

SEQ ID NO: 116074 - DNA, 25 bp, Probe sequence
attcctaatacactgcacatgccac

SEQ ID NO: 116075 - DNA, 25 bp, Probe sequence
atatattttatcacccctaaaatga

SEQ ID NO: 116076 - DNA, 25 bp, Probe sequence
atgccacttagtcggtataaccatc

SEQ ID NO: 116077 - DNA, 25 bp, Probe sequence
acactgcacatgccacttagtcggt

SEQ ID NO: 116078 - DNA, 25 bp, Probe sequence
acaaaacgagacatatattgcatat

SEQ ID NO: 116079 - DNA, 25 bp, Probe sequence
aaaaactcgctaatgatatccaata

SEQ ID NO: 116080 - DNA, 25 bp, Probe sequence
aactcgctaatgatatccaataata

SEQ ID NO: 116081 - DNA, 25 bp, Probe sequence
aatacactgcacatgccacttagtc

SEQ ID NO: 116082 - DNA, 25 bp, Probe sequence
catcggctaggtggtttttgtatta

SEQ ID NO: 116083 - DNA, 25 bp, Probe sequence
gcacatgccacttagtcggtataac

SEQ ID NO: 116084 - DNA, 25 bp, Probe sequence
gtcggtataaccatcggctaggtgg

SEQ ID NO: 116085 - DNA, 25 bp, Probe sequence
tacttttttattcctaatacactgc

SEQ ID NO: 116086 - DNA, 25 bp, Probe sequence
tactgaatatattttatcaccccta

SEQ ID NO: 116087 - DNA, 25 bp, Probe sequence
attatgtgcacttattatcatttat

SEQ ID NO: 116088 - DNA, 25 bp, Probe sequence
ataccatattacaaatgtcctagtg

SEQ ID NO: 116089 - DNA, 25 bp, Probe sequence
acaaatgtcctagtgaaatgataac

SEQ ID NO: 116090 - DNA, 25 bp, Probe sequence
aaatcataaatagcatcataccata

SEQ ID NO: 116091 - DNA, 25 bp, Probe sequence
aatccattgagaaattatgtgcact

SEQ ID NO: 116092 - DNA, 25 bp, Probe sequence
aattaactgaacgcattattacaaa

SEQ ID NO: 116093 - DNA, 25 bp, Probe sequence
gcatcataccatattacaaatgtcc

SEQ ID NO: 116094 - DNA, 25 bp, Probe sequence
gaataactcctttcaaacgattgga

SEQ ID NO: 116095 - DNA, 25 bp, Probe sequence
gaacgcattattacaaagtcttttt

SEQ ID NO: 116096 - DNA, 25 bp, Probe sequence
gagagcggattagagttgtacttta

SEQ ID NO: 116097 - DNA, 25 bp, Probe sequence
gagaaattatgtgcacttattatca

SEQ ID NO: 116098 - DNA, 25 bp, Probe sequence
gtgcacttattatcatttatatttt

SEQ ID NO: 116099 - DNA, 25 bp, Probe sequence
taactcctttcaaacgattggaata

SEQ ID NO: 116100 - DNA, 25 bp, Probe sequence
tacaaagtctttttgactacaaatt

SEQ ID NO: 116101 - DNA, 25 bp, Probe sequence
tagagttgtactttagagttattaa

SEQ ID NO: 116102 - DNA, 25 bp, Probe sequence
attaatacagtatccatgagatgtt

SEQ ID NO: 116103 - DNA, 25 bp, Probe sequence
atacagtatccatgagatgttcatc

SEQ ID NO: 116104 - DNA, 25 bp, Probe sequence
atccatgagatgttcatctatatat

SEQ ID NO: 116105 - DNA, 25 bp, Probe sequence
acagtatccatgagatgttcatcta

SEQ ID NO: 116106 - DNA, 25 bp, Probe sequence
aaatgaacatttatacgaaatagta

SEQ ID NO: 116107 - DNA, 25 bp, Probe sequence
aatacagtatccatgagatgttcat

SEQ ID NO: 116108 - DNA, 25 bp, Probe sequence
aatagtaaatttcatcaagtaggag

SEQ ID NO: 116109 - DNA, 25 bp, Probe sequence
cagtatccatgagatgttcatctat

SEQ ID NO: 116110 - DNA, 25 bp, Probe sequence
gtatccatgagatgttcatctatat

SEQ ID NO: 116111 - DNA, 25 bp, Probe sequence
gtaaatttcatcaagtaggaggaaa

SEQ ID NO: 116112 - DNA, 25 bp, Probe sequence
tgagatgttcatctatatatgatga

SEQ ID NO: 116113 - DNA, 25 bp, Probe sequence
tcttattaatacagtatccatgaga

SEQ ID NO: 116114 - DNA, 25 bp, Probe sequence
taatacagtatccatgagatgttca

SEQ ID NO: 116115 - DNA, 25 bp, Probe sequence
tacagtatccatgagatgttcatct

SEQ ID NO: 116116 - DNA, 25 bp, Probe sequence
tagtaaatttcatcaagtaggagga

SEQ ID NO: 116117 - DNA, 25 bp, Probe sequence
atgtcattgttataatatggtttac

SEQ ID NO: 116118 - DNA, 25 bp, Probe sequence
acgcacgccgttgtaaatatatttt

SEQ ID NO: 116119 - DNA, 25 bp, Probe sequence
acttacgcacgccgttgtaaatata

SEQ ID NO: 116120 - DNA, 25 bp, Probe sequence
aaatttttataagatgtcatgtcat

SEQ ID NO: 116121 - DNA, 25 bp, Probe sequence
aacttacgcacgccgttgtaaatat

SEQ ID NO: 116122 - DNA, 25 bp, Probe sequence
aatatggtttacatcatgaattaaa

SEQ ID NO: 116123 - DNA, 25 bp, Probe sequence
cttacgcacgccgttgtaaatatat

SEQ ID NO: 116124 - DNA, 25 bp, Probe sequence
cgcacgccgttgtaaatatattttt

SEQ ID NO: 116125 - DNA, 25 bp, Probe sequence
gcacgccgttgtaaatatattttta

SEQ ID NO: 116126 - DNA, 25 bp, Probe sequence
gatgtcatgtcattgttataatatg

SEQ ID NO: 116127 - DNA, 25 bp, Probe sequence
gttataatatggtttacatcatgaa

SEQ ID NO: 116128 - DNA, 25 bp, Probe sequence
tgaattaaaaacttacgcacgccgt

SEQ ID NO: 116129 - DNA, 25 bp, Probe sequence
tcatagatgattttgatattagaca

SEQ ID NO: 116130 - DNA, 25 bp, Probe sequence
taagatgtcatgtcattgttataat

SEQ ID NO: 116131 - DNA, 25 bp, Probe sequence
tacgcacgccgttgtaaatatattt

SEQ ID NO: 116132 - DNA, 25 bp, Probe sequence
attcttgacttccggaaatgggtat

SEQ ID NO: 116133 - DNA, 25 bp, Probe sequence
aaacagcgttgttaagccattcttg

SEQ ID NO: 116134 - DNA, 25 bp, Probe sequence
cacattactgtggctttttttgttt

SEQ ID NO: 116135 - DNA, 25 bp, Probe sequence
cagcgttgttaagccattcttgact

SEQ ID NO: 116136 - DNA, 25 bp, Probe sequence
cggattgatagataagctttgtact

SEQ ID NO: 116137 - DNA, 25 bp, Probe sequence
gctttgtacttatttatatcagtcc

SEQ ID NO: 116138 - DNA, 25 bp, Probe sequence
gaatataacaaaaagccacattact

SEQ ID NO: 116139 - DNA, 25 bp, Probe sequence
gacttccggaaatgggtattgatac

SEQ ID NO: 116140 - DNA, 25 bp, Probe sequence
gataccattttgatactgaatataa

SEQ ID NO: 116141 - DNA, 25 bp, Probe sequence
gttgttaagccattcttgacttccg

SEQ ID NO: 116142 - DNA, 25 bp, Probe sequence
gtacttatttatatcagtccgattt

SEQ ID NO: 116143 - DNA, 25 bp, Probe sequence
gggtattgataccattttgatactg

SEQ ID NO: 116144 - DNA, 25 bp, Probe sequence
tgttaagccattcttgacttccgga

SEQ ID NO: 116145 - DNA, 25 bp, Probe sequence
taagccattcttgacttccggaaat

SEQ ID NO: 116146 - DNA, 25 bp, Probe sequence
tatttatatcagtccgattttttga

SEQ ID NO: 116147 - DNA, 25 bp, Probe sequence
atatgacaataaggagactacacgc

SEQ ID NO: 116148 - DNA, 25 bp, Probe sequence
aacaagtacttgtctaaagatattt

SEQ ID NO: 116149 - DNA, 25 bp, Probe sequence
aacagctcgaactatagcatcattt

SEQ ID NO: 116150 - DNA, 25 bp, Probe sequence
aactatgtcataaactgaatttgtt

SEQ ID NO: 116151 - DNA, 25 bp, Probe sequence
aatccttctttctatatttgaatat

SEQ ID NO: 116152 - DNA, 25 bp, Probe sequence
aattatcattattaagtctattata

SEQ ID NO: 116153 - DNA, 25 bp, Probe sequence
gctcgaactatagcatcattttact

SEQ ID NO: 116154 - DNA, 25 bp, Probe sequence
gcatcattttactaatgaatgcatt

SEQ ID NO: 116155 - DNA, 25 bp, Probe sequence
gaatgcattaaagtaactatgatta

SEQ ID NO: 116156 - DNA, 25 bp, Probe sequence
gaactatagcatcattttactaatg

SEQ ID NO: 116157 - DNA, 25 bp, Probe sequence
gagaaactggttgttatcattataa

SEQ ID NO: 116158 - DNA, 25 bp, Probe sequence
gttaatccttctttctatatttgaa

SEQ ID NO: 116159 - DNA, 25 bp, Probe sequence
ggtttcaaatgattataactatgtc

SEQ ID NO: 116160 - DNA, 25 bp, Probe sequence
ggttgttatcattataatggtttca

SEQ ID NO: 116161 - DNA, 25 bp, Probe sequence
tattaataacaaacagctcgaacta

SEQ ID NO: 116162 - DNA, 25 bp, Probe sequence
attatcgagctaaagttcactgaaa

SEQ ID NO: 116163 - DNA, 25 bp, Probe sequence
attatcgagctgaaggtcaccgaaa

SEQ ID NO: 116164 - DNA, 25 bp, Probe sequence
atcgagctaaagttcactgaaatga

SEQ ID NO: 116165 - DNA, 25 bp, Probe sequence
aggtcaccgaaatgattataattaa

SEQ ID NO: 116166 - DNA, 25 bp, Probe sequence
aaattatcgagctaaagttcactga

SEQ ID NO: 116167 - DNA, 25 bp, Probe sequence
aattatcgagctgaaggtcaccgaa

SEQ ID NO: 116168 - DNA, 25 bp, Probe sequence
cgaaattatcgagctgaaggtcacc

SEQ ID NO: 116169 - DNA, 25 bp, Probe sequence
gctgaaggtcaccgaaatgattata

SEQ ID NO: 116170 - DNA, 25 bp, Probe sequence
gaaggtcaccgaaatgattataatt

SEQ ID NO: 116171 - DNA, 25 bp, Probe sequence
gaaattatcgagctgaaggtcaccg

SEQ ID NO: 116172 - DNA, 25 bp, Probe sequence
gagctgaaggtcaccgaaatgatta

SEQ ID NO: 116173 - DNA, 25 bp, Probe sequence
gagctaaagttcactgaaatgatta

SEQ ID NO: 116174 - DNA, 25 bp, Probe sequence
gattatgatcaaacgaaattatcga

SEQ ID NO: 116175 - DNA, 25 bp, Probe sequence
tcgagctgaaggtcaccgaaatgat

SEQ ID NO: 116176 - DNA, 25 bp, Probe sequence
tatcgagctgaaggtcaccgaaatg

SEQ ID NO: 116177 - DNA, 25 bp, Probe sequence
ataaactgagcctttcattgtcata

SEQ ID NO: 116178 - DNA, 25 bp, Probe sequence
aaacgaacgtgtcatagaagtaatc

SEQ ID NO: 116179 - DNA, 25 bp, Probe sequence
aaactgagcctttcattgtcataga

SEQ ID NO: 116180 - DNA, 25 bp, Probe sequence
aactgagcctttcattgtcatagat

SEQ ID NO: 116181 - DNA, 25 bp, Probe sequence
aagtataaactgagcctttcattgt

SEQ ID NO: 116182 - DNA, 25 bp, Probe sequence
aaggcataaaggcttagtttgtaca

SEQ ID NO: 116183 - DNA, 25 bp, Probe sequence
ctgagcctttcattgtcatagatag

SEQ ID NO: 116184 - DNA, 25 bp, Probe sequence
gcctttcattgtcatagataggtga

SEQ ID NO: 116185 - DNA, 25 bp, Probe sequence
gcataaaggcttagtttgtacaaaa

SEQ ID NO: 116186 - DNA, 25 bp, Probe sequence
gaacgtgtcatagaagtaatcatta

SEQ ID NO: 116187 - DNA, 25 bp, Probe sequence
gagcctttcattgtcatagataggt

SEQ ID NO: 116188 - DNA, 25 bp, Probe sequence
gtttgtacaaaacgaacgtgtcata

SEQ ID NO: 116189 - DNA, 25 bp, Probe sequence
gtataaactgagcctttcattgtca

SEQ ID NO: 116190 - DNA, 25 bp, Probe sequence
gtaatcattatttttatgaaacact

SEQ ID NO: 116191 - DNA, 25 bp, Probe sequence
taaactgagcctttcattgtcatag

SEQ ID NO: 116192 - DNA, 25 bp, Probe sequence
atggacctgtaatctagttaggggt

SEQ ID NO: 116193 - DNA, 25 bp, Probe sequence
tggacctgtaatctagttaggggtt

SEQ ID NO: 116194 - DNA, 25 bp, Probe sequence
attcaagcatggacctgtaatctag

SEQ ID NO: 116195 - DNA, 25 bp, Probe sequence
aaatgggaatcatgcaattcaagca

SEQ ID NO: 116196 - DNA, 25 bp, Probe sequence
aaacccttagctagattgaaaatgg

SEQ ID NO: 116197 - DNA, 25 bp, Probe sequence
aaaacccttagctagattgaaaatg

SEQ ID NO: 116198 - DNA, 25 bp, Probe sequence
aagcatggacctgtaatctagttag

SEQ ID NO: 116199 - DNA, 25 bp, Probe sequence
aattcaagcatggacctgtaatcta

SEQ ID NO: 116200 - DNA, 25 bp, Probe sequence
caattcaagcatggacctgtaatct

SEQ ID NO: 116201 - DNA, 25 bp, Probe sequence
caagcatggacctgtaatctagtta

SEQ ID NO: 116202 - DNA, 25 bp, Probe sequence
gcatggacctgtaatctagttaggg

SEQ ID NO: 116203 - DNA, 25 bp, Probe sequence
gcaattcaagcatggacctgtaatc

SEQ ID NO: 116204 - DNA, 25 bp, Probe sequence
tctttaatgaaggttcttcatcttt

SEQ ID NO: 116205 - DNA, 25 bp, Probe sequence
tcaagcatggacctgtaatctagtt

SEQ ID NO: 116206 - DNA, 25 bp, Probe sequence
ttttatctttaatgaaggttcttca

SEQ ID NO: 116207 - DNA, 25 bp, Probe sequence
ataaactcgtcatattaatgtgatg

SEQ ID NO: 116208 - DNA, 25 bp, Probe sequence
atgcttgacttgcgaatgtatatat

SEQ ID NO: 116209 - DNA, 25 bp, Probe sequence
aatatgttatgcttgacttgcgaat

SEQ ID NO: 116210 - DNA, 25 bp, Probe sequence
gcaaagcaattgttaaatatgttat

SEQ ID NO: 116211 - DNA, 25 bp, Probe sequence
gaatgtatatatttgcgctgatgat

SEQ ID NO: 116212 - DNA, 25 bp, Probe sequence
gagtttatttgattttgacgtatat

SEQ ID NO: 116213 - DNA, 25 bp, Probe sequence
gatgttctcaacaaagtgtatcatt

SEQ ID NO: 116214 - DNA, 25 bp, Probe sequence
gttctcaacaaagtgtatcatttac

SEQ ID NO: 116215 - DNA, 25 bp, Probe sequence
gttatgcttgacttgcgaatgtata

SEQ ID NO: 116216 - DNA, 25 bp, Probe sequence
gtgatgagtttatttgattttgacg

SEQ ID NO: 116217 - DNA, 25 bp, Probe sequence
tcaataacattataaactcgtcata

SEQ ID NO: 116218 - DNA, 25 bp, Probe sequence
taagtatggtttttaatcattggta

SEQ ID NO: 116219 - DNA, 25 bp, Probe sequence
taaaatgaatgatgttctcaacaaa

SEQ ID NO: 116220 - DNA, 25 bp, Probe sequence
tagactgtaattgtttattgtttaa

SEQ ID NO: 116221 - DNA, 25 bp, Probe sequence
tttgcgctgatgataattcaataac

SEQ ID NO: 116222 - DNA, 25 bp, Probe sequence
atagcacataactcaacgattttga

SEQ ID NO: 116223 - DNA, 25 bp, Probe sequence
atacaaatagcacataactcaacga

SEQ ID NO: 116224 - DNA, 25 bp, Probe sequence
ataactttcccatcagtccaatttg

SEQ ID NO: 116225 - DNA, 25 bp, Probe sequence
ataaaataactttcccatcagtcca

SEQ ID NO: 116226 - DNA, 25 bp, Probe sequence
atgtgcttggatatgtggcaataat

SEQ ID NO: 116227 - DNA, 25 bp, Probe sequence
acgattttgattgagcgtatgtgct

SEQ ID NO: 116228 - DNA, 25 bp, Probe sequence
aataattcagtattcctgtctttgt

SEQ ID NO: 116229 - DNA, 25 bp, Probe sequence
gagcgtatgtgctatttttatattt

SEQ ID NO: 116230 - DNA, 25 bp, Probe sequence
gtattcctgtctttgttgttattca

SEQ ID NO: 116231 - DNA, 25 bp, Probe sequence
gtaatatgtgcttggatatgtggca

SEQ ID NO: 116232 - DNA, 25 bp, Probe sequence
gtccaatttgacagcgaaaaaagac

SEQ ID NO: 116233 - DNA, 25 bp, Probe sequence
tgttctgttaacttaatatctttat

SEQ ID NO: 116234 - DNA, 25 bp, Probe sequence
tcagtattcctgtctttgttgttat

SEQ ID NO: 116235 - DNA, 25 bp, Probe sequence
tattcataatatgttctgttaactt

SEQ ID NO: 116236 - DNA, 25 bp, Probe sequence
ttcctgtctttgttgttattcataa

SEQ ID NO: 116237 - DNA, 25 bp, Probe sequence
atagtgtgaactgacattgcttttt

SEQ ID NO: 116238 - DNA, 25 bp, Probe sequence
agtaatagtgtgaactgacattgct

SEQ ID NO: 116239 - DNA, 25 bp, Probe sequence
agtgtgaactgacattgctttttaa

SEQ ID NO: 116240 - DNA, 25 bp, Probe sequence
agcaatgtcagtaatagtgtgaact

SEQ ID NO: 116241 - DNA, 25 bp, Probe sequence
aaagcaatgtcagtaatagtgtgaa

SEQ ID NO: 116242 - DNA, 25 bp, Probe sequence
aaaagcaatgtcagtaatagtgtga

SEQ ID NO: 116243 - DNA, 25 bp, Probe sequence
aagcaatgtcagtaatagtgtgaac

SEQ ID NO: 116244 - DNA, 25 bp, Probe sequence
aatagtgtgaactgacattgctttt

SEQ ID NO: 116245 - DNA, 25 bp, Probe sequence
gcaatgtcagtaatagtgtgaactg

SEQ ID NO: 116246 - DNA, 25 bp, Probe sequence
gtaatagtgtgaactgacattgctt

SEQ ID NO: 116247 - DNA, 25 bp, Probe sequence
gtgtgaactgacattgctttttaat

SEQ ID NO: 116248 - DNA, 25 bp, Probe sequence
tgtgaactgacattgctttttaatt

SEQ ID NO: 116249 - DNA, 25 bp, Probe sequence
taatagtgtgaactgacattgcttt

SEQ ID NO: 116250 - DNA, 25 bp, Probe sequence
tacacataacaaaaagcaatgtcag

SEQ ID NO: 116251 - DNA, 25 bp, Probe sequence
tagtgtgaactgacattgcttttta

SEQ ID NO: 116252 - DNA, 25 bp, Probe sequence
atatgcttattatatatttttttga

SEQ ID NO: 116253 - DNA, 25 bp, Probe sequence
atgcaagtgtctttgattcatcaat

SEQ ID NO: 116254 - DNA, 25 bp, Probe sequence
agttgttggtaattgagcacatcat

SEQ ID NO: 116255 - DNA, 25 bp, Probe sequence
agcacatcatgttaaaataccagtt

SEQ ID NO: 116256 - DNA, 25 bp, Probe sequence
actaaggcactattacataactggg

SEQ ID NO: 116257 - DNA, 25 bp, Probe sequence
aaagtgcatagatatatttgttaat

SEQ ID NO: 116258 - DNA, 25 bp, Probe sequence
aaaatgcaagtgtctttgattcatc

SEQ ID NO: 116259 - DNA, 25 bp, Probe sequence
aataccagttttaaaatgctataat

SEQ ID NO: 116260 - DNA, 25 bp, Probe sequence
aatatttgtactaactaaggcacta

SEQ ID NO: 116261 - DNA, 25 bp, Probe sequence
gattcatcaataacccctaaaaaag

SEQ ID NO: 116262 - DNA, 25 bp, Probe sequence
gtactaactaaggcactattacata

SEQ ID NO: 116263 - DNA, 25 bp, Probe sequence
gggataagaaacatcagttgttggt

SEQ ID NO: 116264 - DNA, 25 bp, Probe sequence
ggcactattacataactgggataag

SEQ ID NO: 116265 - DNA, 25 bp, Probe sequence
tgaagtaccccttttatatgttaat

SEQ ID NO: 116266 - DNA, 25 bp, Probe sequence
tttgattcatcaataacccctaaaa

SEQ ID NO: 116267 - DNA, 25 bp, Probe sequence
atttttgggatacaaattgatatca

SEQ ID NO: 116268 - DNA, 25 bp, Probe sequence
atttgattatgtcctatttttacgt

SEQ ID NO: 116269 - DNA, 25 bp, Probe sequence
atatttgattatgtcctatttttac

SEQ ID NO: 116270 - DNA, 25 bp, Probe sequence
atgattagggacatatttgattatg

SEQ ID NO: 116271 - DNA, 25 bp, Probe sequence
atgtcctatttttacgtaaagatat

SEQ ID NO: 116272 - DNA, 25 bp, Probe sequence
gatatcaattatgattagggacata

SEQ ID NO: 116273 - DNA, 25 bp, Probe sequence
gattatgtcctatttttacgtaaag

SEQ ID NO: 116274 - DNA, 25 bp, Probe sequence
tgtcctatttttacgtaaagatatt

SEQ ID NO: 116275 - DNA, 25 bp, Probe sequence
tgattatgtcctatttttacgtaaa

SEQ ID NO: 116276 - DNA, 25 bp, Probe sequence
tatgtcctatttttacgtaaagata

SEQ ID NO: 116277 - DNA, 25 bp, Probe sequence
tatttgattatgtcctatttttacg

SEQ ID NO: 116278 - DNA, 25 bp, Probe sequence
tttgattatgtcctatttttacgta

SEQ ID NO: 116279 - DNA, 25 bp, Probe sequence
tttttgggatacaaattgatatcaa

SEQ ID NO: 116280 - DNA, 25 bp, Probe sequence
ttatgtcctatttttacgtaaagat

SEQ ID NO: 116281 - DNA, 25 bp, Probe sequence
ttgattatgtcctatttttacgtaa

SEQ ID NO: 116282 - DNA, 25 bp, Probe sequence
actagtaattatcagcatttggtta

SEQ ID NO: 116283 - DNA, 25 bp, Probe sequence
aaatatgaaagcttaggtgaaatta

SEQ ID NO: 116284 - DNA, 25 bp, Probe sequence
aaagctatagaattagtattggatt

SEQ ID NO: 116285 - DNA, 25 bp, Probe sequence
aactagtatacattgtggtaaaagt

SEQ ID NO: 116286 - DNA, 25 bp, Probe sequence
aatgaccagttgttactagtaatta

SEQ ID NO: 116287 - DNA, 25 bp, Probe sequence
catcacaggtttttacataatttaa

SEQ ID NO: 116288 - DNA, 25 bp, Probe sequence
gaacatcacaggtttttacataatt

SEQ ID NO: 116289 - DNA, 25 bp, Probe sequence
gttactagtaattatcagcatttgg

SEQ ID NO: 116290 - DNA, 25 bp, Probe sequence
gtaaaagtagtaatgaccagttgtt

SEQ ID NO: 116291 - DNA, 25 bp, Probe sequence
gtaattatcagcatttggttaaaaa

SEQ ID NO: 116292 - DNA, 25 bp, Probe sequence
gtcttttttgtgaacatcacaggtt

SEQ ID NO: 116293 - DNA, 25 bp, Probe sequence
tgtgaacatcacaggtttttacata

SEQ ID NO: 116294 - DNA, 25 bp, Probe sequence
tgataaactagtatacattgtggta

SEQ ID NO: 116295 - DNA, 25 bp, Probe sequence
tgactgaatcttgcttgaaaatata

SEQ ID NO: 116296 - DNA, 25 bp, Probe sequence
tagtattggattaaaaatgtctttt

SEQ ID NO: 116297 - DNA, 25 bp, Probe sequence
attattcatttataaagtccttcag

SEQ ID NO: 116298 - DNA, 25 bp, Probe sequence
ataaagtttcagctaaacacataaa

SEQ ID NO: 116299 - DNA, 25 bp, Probe sequence
agtttcagctaaacacataaaatta

SEQ ID NO: 116300 - DNA, 25 bp, Probe sequence
aaataaagtttcagctaaacacata

SEQ ID NO: 116301 - DNA, 25 bp, Probe sequence
aaagtttcagctaaacacataaaat

SEQ ID NO: 116302 - DNA, 25 bp, Probe sequence
aagtttcagctaaacacataaaatt

SEQ ID NO: 116303 - DNA, 25 bp, Probe sequence
aataaagtttcagctaaacacataa

SEQ ID NO: 116304 - DNA, 25 bp, Probe sequence
cagctaaacacataaaattaaatta

SEQ ID NO: 116305 - DNA, 25 bp, Probe sequence
gtttcagctaaacacataaaattaa

SEQ ID NO: 116306 - DNA, 25 bp, Probe sequence
tcagctaaacacataaaattaaatt

SEQ ID NO: 116307 - DNA, 25 bp, Probe sequence
taaagtttcagctaaacacataaaa

SEQ ID NO: 116308 - DNA, 25 bp, Probe sequence
taaataaagtttcagctaaacacat

SEQ ID NO: 116309 - DNA, 25 bp, Probe sequence
tttcagctaaacacataaaattaaa

SEQ ID NO: 116310 - DNA, 25 bp, Probe sequence
ttaaataaagtttcagctaaacaca

SEQ ID NO: 116311 - DNA, 25 bp, Probe sequence
ttcagctaaacacataaaattaaat

SEQ ID NO: 116312 - DNA, 25 bp, Probe sequence
atagtttgctattgacaggtgttaa

SEQ ID NO: 116313 - DNA, 25 bp, Probe sequence
ataaatcgcatatccttgtgagcat

SEQ ID NO: 116314 - DNA, 25 bp, Probe sequence
atccttgtgagcataaatcaacttg

SEQ ID NO: 116315 - DNA, 25 bp, Probe sequence
acttgtgtcttgttatacatttcta

SEQ ID NO: 116316 - DNA, 25 bp, Probe sequence
aaaggatcgcattgtatcaggcatt

SEQ ID NO: 116317 - DNA, 25 bp, Probe sequence
aatcaacttgattagcattgcaaaa

SEQ ID NO: 116318 - DNA, 25 bp, Probe sequence
gtatcaggcattttcattgttgtaa

SEQ ID NO: 116319 - DNA, 25 bp, Probe sequence
gtagtctataaacgctttagttcga

SEQ ID NO: 116320 - DNA, 25 bp, Probe sequence
gtcaacgactactaatataacatta

SEQ ID NO: 116321 - DNA, 25 bp, Probe sequence
ggtgttccaggcttgtaaaattgtt

SEQ ID NO: 116322 - DNA, 25 bp, Probe sequence
ggtgttaaagctactgatactatgt

SEQ ID NO: 116323 - DNA, 25 bp, Probe sequence
ggattttgattggtgttccaggctt

SEQ ID NO: 116324 - DNA, 25 bp, Probe sequence
tcatatgctcattcagtcaacgact

SEQ ID NO: 116325 - DNA, 25 bp, Probe sequence
tatacatttctaatttaactcttga

SEQ ID NO: 116326 - DNA, 25 bp, Probe sequence
tatttgcctgatacaacttgtgtct

SEQ ID NO: 116327 - DNA, 25 bp, Probe sequence
attcataactacggctagcagtttt

SEQ ID NO: 116328 - DNA, 25 bp, Probe sequence
atattcataactacggctagcagtt

SEQ ID NO: 116329 - DNA, 25 bp, Probe sequence
atgagatattcataactacggctag

SEQ ID NO: 116330 - DNA, 25 bp, Probe sequence
agatattcataactacggctagcag

SEQ ID NO: 116331 - DNA, 25 bp, Probe sequence
agaactgctagctgaaatgttatga

SEQ ID NO: 116332 - DNA, 25 bp, Probe sequence
actgctagctgaaatgttatgagat

SEQ ID NO: 116333 - DNA, 25 bp, Probe sequence
aagaactgctagctgaaatgttatg

SEQ ID NO: 116334 - DNA, 25 bp, Probe sequence
ctgctagctgaaatgttatgagata

SEQ ID NO: 116335 - DNA, 25 bp, Probe sequence
gctagctgaaatgttatgagatatt

SEQ ID NO: 116336 - DNA, 25 bp, Probe sequence
gaactgctagctgaaatgttatgag

SEQ ID NO: 116337 - DNA, 25 bp, Probe sequence
gagatattcataactacggctagca

SEQ ID NO: 116338 - DNA, 25 bp, Probe sequence
gatattcataactacggctagcagt

SEQ ID NO: 116339 - DNA, 25 bp, Probe sequence
tgagatattcataactacggctagc

SEQ ID NO: 116340 - DNA, 25 bp, Probe sequence
tattcataactacggctagcagttt

SEQ ID NO: 116341 - DNA, 25 bp, Probe sequence
ttcataactacggctagcagttttt

SEQ ID NO: 116342 - DNA, 25 bp, Probe sequence
atcgttacgatttatgattattatt

SEQ ID NO: 116343 - DNA, 25 bp, Probe sequence
agggcgaagatgtagtcaaagaaaa

SEQ ID NO: 116344 - DNA, 25 bp, Probe sequence
aaagcgtaatcgttacgatttatga

SEQ ID NO: 116345 - DNA, 25 bp, Probe sequence
cagtaaaatcattcctaatttggaa

SEQ ID NO: 116346 - DNA, 25 bp, Probe sequence
ctgctgtttgttgttgatttatatt

SEQ ID NO: 116347 - DNA, 25 bp, Probe sequence
cctaatttggaatcatcttactgct

SEQ ID NO: 116348 - DNA, 25 bp, Probe sequence
gagatatacgtagatagggcgaaga

SEQ ID NO: 116349 - DNA, 25 bp, Probe sequence
gatagggcgaagatgtagtcaaaga

SEQ ID NO: 116350 - DNA, 25 bp, Probe sequence
gtttgttgttgatttatattcatga

SEQ ID NO: 116351 - DNA, 25 bp, Probe sequence
gtagatagggcgaagatgtagtcaa

SEQ ID NO: 116352 - DNA, 25 bp, Probe sequence
tgatttatattcatgattttgttat

SEQ ID NO: 116353 - DNA, 25 bp, Probe sequence
tgctgtttgttgttgatttatattc

SEQ ID NO: 116354 - DNA, 25 bp, Probe sequence
tacataacgacatgaaaggcaatta

SEQ ID NO: 116355 - DNA, 25 bp, Probe sequence
ttattatcataatacataacgacat

SEQ ID NO: 116356 - DNA, 25 bp, Probe sequence
ttactgctgtttgttgttgatttat

SEQ ID NO: 116357 - DNA, 25 bp, Probe sequence
atatttatgttattcattatacatg

SEQ ID NO: 116358 - DNA, 25 bp, Probe sequence
atacatgaatgatatagttctgaaa

SEQ ID NO: 116359 - DNA, 25 bp, Probe sequence
acgtacacactccttgttgtgcttt

SEQ ID NO: 116360 - DNA, 25 bp, Probe sequence
actccttgttgtgctttattttcag

SEQ ID NO: 116361 - DNA, 25 bp, Probe sequence
acactccttgttgtgctttattttc

SEQ ID NO: 116362 - DNA, 25 bp, Probe sequence
acacactccttgttgtgctttattt

SEQ ID NO: 116363 - DNA, 25 bp, Probe sequence
aaaacgtacacactccttgttgtgc

SEQ ID NO: 116364 - DNA, 25 bp, Probe sequence
aacgtacacactccttgttgtgctt

SEQ ID NO: 116365 - DNA, 25 bp, Probe sequence
ctgaaaaacgtacacactccttgtt

SEQ ID NO: 116366 - DNA, 25 bp, Probe sequence
gaaaaacgtacacactccttgttgt

SEQ ID NO: 116367 - DNA, 25 bp, Probe sequence
gttgtgctttattttcagaagtatt

SEQ ID NO: 116368 - DNA, 25 bp, Probe sequence
gttctgaaaaacgtacacactcctt

SEQ ID NO: 116369 - DNA, 25 bp, Probe sequence
gtacacactccttgttgtgctttat

SEQ ID NO: 116370 - DNA, 25 bp, Probe sequence
gtgctttattttcagaagtatttaa

SEQ ID NO: 116371 - DNA, 25 bp, Probe sequence
tccttgttgtgctttattttcagaa

SEQ ID NO: 116372 - DNA, 25 bp, Probe sequence
atatatatgtatcataacatgaatg

SEQ ID NO: 116373 - DNA, 25 bp, Probe sequence
atatatgtatcataacatgaatgga

SEQ ID NO: 116374 - DNA, 25 bp, Probe sequence
atatgtatcataacatgaatggaga

SEQ ID NO: 116375 - DNA, 25 bp, Probe sequence
atgtatcataacatgaatggagaat

SEQ ID NO: 116376 - DNA, 25 bp, Probe sequence
aatatatatgtatcataacatgaat

SEQ ID NO: 116377 - DNA, 25 bp, Probe sequence
ctcccttaaaagtatgttaatatat

SEQ ID NO: 116378 - DNA, 25 bp, Probe sequence
gctattttcctcccttaaaagtatg

SEQ ID NO: 116379 - DNA, 25 bp, Probe sequence
gttaatatatatgtatcataacatg

SEQ ID NO: 116380 - DNA, 25 bp, Probe sequence
gtatcataacatgaatggagaatat

SEQ ID NO: 116381 - DNA, 25 bp, Probe sequence
tgtatcataacatgaatggagaata

SEQ ID NO: 116382 - DNA, 25 bp, Probe sequence
tcctcccttaaaagtatgttaatat

SEQ ID NO: 116383 - DNA, 25 bp, Probe sequence
tatgtatcataacatgaatggagaa

SEQ ID NO: 116384 - DNA, 25 bp, Probe sequence
tatcataacatgaatggagaatata

SEQ ID NO: 116385 - DNA, 25 bp, Probe sequence
tatatatgtatcataacatgaatgg

SEQ ID NO: 116386 - DNA, 25 bp, Probe sequence
tatatgtatcataacatgaatggag

SEQ ID NO: 116387 - DNA, 25 bp, Probe sequence
atattcgtatgatttgatgttttaa

SEQ ID NO: 116388 - DNA, 25 bp, Probe sequence
aggagtttgttgctaattttatttg

SEQ ID NO: 116389 - DNA, 25 bp, Probe sequence
aaactaacatgatgagcaatctcaa

SEQ ID NO: 116390 - DNA, 25 bp, Probe sequence
aagtagctggatatcatattgattt

SEQ ID NO: 116391 - DNA, 25 bp, Probe sequence
aatccaagtttgtagaattcttatt

SEQ ID NO: 116392 - DNA, 25 bp, Probe sequence
caacattttaaactcggataaagct

SEQ ID NO: 116393 - DNA, 25 bp, Probe sequence
ccatttcgatttgtgctatgataat

SEQ ID NO: 116394 - DNA, 25 bp, Probe sequence
gctaaacataattaactaccaacat

SEQ ID NO: 116395 - DNA, 25 bp, Probe sequence
gagcaatctcaatatatttatcaag

SEQ ID NO: 116396 - DNA, 25 bp, Probe sequence
gatgttttaattagtccaccatttc

SEQ ID NO: 116397 - DNA, 25 bp, Probe sequence
gattagtatatattccaacgaaaca

SEQ ID NO: 116398 - DNA, 25 bp, Probe sequence
gtccaccatttcgatttgtgctatg

SEQ ID NO: 116399 - DNA, 25 bp, Probe sequence
taattagtccaccatttcgatttgt

SEQ ID NO: 116400 - DNA, 25 bp, Probe sequence
tagttgaggttgctttttatgtttt

SEQ ID NO: 116401 - DNA, 25 bp, Probe sequence
ttatcaagaaagcacagtttttaaa

SEQ ID NO: 116402 - DNA, 25 bp, Probe sequence
atagtcaactcaataattttaagga

SEQ ID NO: 116403 - DNA, 25 bp, Probe sequence
atactaatctctttttgtctacgat

SEQ ID NO: 116404 - DNA, 25 bp, Probe sequence
atctctttttgtctacgataacgta

SEQ ID NO: 116405 - DNA, 25 bp, Probe sequence
atgattgattctatttacacgtaca

SEQ ID NO: 116406 - DNA, 25 bp, Probe sequence
aattacatgttatagtcaactcaat

SEQ ID NO: 116407 - DNA, 25 bp, Probe sequence
gaatcgttgatttgcaatattgtat

SEQ ID NO: 116408 - DNA, 25 bp, Probe sequence
gacatatccattatctttgttagat

SEQ ID NO: 116409 - DNA, 25 bp, Probe sequence
gataacgtaatatgattgattctat

SEQ ID NO: 116410 - DNA, 25 bp, Probe sequence
gattctatttacacgtacaaatggt

SEQ ID NO: 116411 - DNA, 25 bp, Probe sequence
gtattaaacgaattgcaactatata

SEQ ID NO: 116412 - DNA, 25 bp, Probe sequence
gtaccgaaaatcatacaaagggtct

SEQ ID NO: 116413 - DNA, 25 bp, Probe sequence
gggtctgaaatgaaagtttcttaga

SEQ ID NO: 116414 - DNA, 25 bp, Probe sequence
ggtttaaggtgacatatccattatc

SEQ ID NO: 116415 - DNA, 25 bp, Probe sequence
ggaacagataaatcgtaccgaaaat

SEQ ID NO: 116416 - DNA, 25 bp, Probe sequence
tgtatgtggatttgttttttttatt

SEQ ID NO: 116417 - DNA, 25 bp, Probe sequence
attcttagtaaaatacacttttgat

SEQ ID NO: 116418 - DNA, 25 bp, Probe sequence
atttggataatgtttcatgtataat

SEQ ID NO: 116419 - DNA, 25 bp, Probe sequence
aaaattatcaattcttttgcttgta

SEQ ID NO: 116420 - DNA, 25 bp, Probe sequence
aattcttttgcttgtaatcatttaa

SEQ ID NO: 116421 - DNA, 25 bp, Probe sequence
gattatttcatcttttttggtggaa

SEQ ID NO: 116422 - DNA, 25 bp, Probe sequence
gtatctgctttgaaaactaatgtaa

SEQ ID NO: 116423 - DNA, 25 bp, Probe sequence
gtatgcaatttgttagtggttttca

SEQ ID NO: 116424 - DNA, 25 bp, Probe sequence
gtcattataaatgtaagggttttca

SEQ ID NO: 116425 - DNA, 25 bp, Probe sequence
tgtttaactgttaccactaatgata

SEQ ID NO: 116426 - DNA, 25 bp, Probe sequence
tgttagtggttttcaatatttataa

SEQ ID NO: 116427 - DNA, 25 bp, Probe sequence
taactgttaccactaatgatattgt

SEQ ID NO: 116428 - DNA, 25 bp, Probe sequence
taccactaatgatattgtgtatgca

SEQ ID NO: 116429 - DNA, 25 bp, Probe sequence
tagtgattatttcatcttttttggt

SEQ ID NO: 116430 - DNA, 25 bp, Probe sequence
tatcaattcttttgcttgtaatcat

SEQ ID NO: 116431 - DNA, 25 bp, Probe sequence
ttggtggaaaagtatctgctttgaa

SEQ ID NO: 116432 - DNA, 25 bp, Probe sequence
aggaatacgttatgttacaatatgt

SEQ ID NO: 116433 - DNA, 25 bp, Probe sequence
agttgtaacaatcagtttgtaaggg

SEQ ID NO: 116434 - DNA, 25 bp, Probe sequence
aaaggaatacgttatgttacaatat

SEQ ID NO: 116435 - DNA, 25 bp, Probe sequence
aaagttgtaacaatcagtttgtaag

SEQ ID NO: 116436 - DNA, 25 bp, Probe sequence
aagttgtaacaatcagtttgtaagg

SEQ ID NO: 116437 - DNA, 25 bp, Probe sequence
aaggaatacgttatgttacaatatg

SEQ ID NO: 116438 - DNA, 25 bp, Probe sequence
caaaaagttgtaacaatcagtttgt

SEQ ID NO: 116439 - DNA, 25 bp, Probe sequence
gttgtaacaatcagtttgtaagggc

SEQ ID NO: 116440 - DNA, 25 bp, Probe sequence
gtaacaatcagtttgtaagggcttt

SEQ ID NO: 116441 - DNA, 25 bp, Probe sequence
gtcaaaaagttgtaacaatcagttt

SEQ ID NO: 116442 - DNA, 25 bp, Probe sequence
ggaatacgttatgttacaatatgtt

SEQ ID NO: 116443 - DNA, 25 bp, Probe sequence
tgtaacaatcagtttgtaagggctt

SEQ ID NO: 116444 - DNA, 25 bp, Probe sequence
tcaaaaagttgtaacaatcagtttg

SEQ ID NO: 116445 - DNA, 25 bp, Probe sequence
taacaatcagtttgtaagggcttta

SEQ ID NO: 116446 - DNA, 25 bp, Probe sequence
ttgtaacaatcagtttgtaagggct

SEQ ID NO: 116447 - DNA, 25 bp, Probe sequence
atcatatgtgatttaacgagcttgg

SEQ ID NO: 116448 - DNA, 25 bp, Probe sequence
aacaatgcccgtgtaacacgctctt

SEQ ID NO: 116449 - DNA, 25 bp, Probe sequence
aatgcccgtgtaacacgctcttttc

SEQ ID NO: 116450 - DNA, 25 bp, Probe sequence
aattttattttagcagcagttgact

SEQ ID NO: 116451 - DNA, 25 bp, Probe sequence
cagaaaacaaagccctaagctcgtt

SEQ ID NO: 116452 - DNA, 25 bp, Probe sequence
cgtgtaacacgctcttttcaaaaat

SEQ ID NO: 116453 - DNA, 25 bp, Probe sequence
gcccgtgtaacacgctcttttcaaa

SEQ ID NO: 116454 - DNA, 25 bp, Probe sequence
gctcgttaattttattttagcagca

SEQ ID NO: 116455 - DNA, 25 bp, Probe sequence
gcagttgactgtaaaacaatgcccg

SEQ ID NO: 116456 - DNA, 25 bp, Probe sequence
gactgtaaaacaatgcccgtgtaac

SEQ ID NO: 116457 - DNA, 25 bp, Probe sequence
gatttaacgagcttgggacagaaaa

SEQ ID NO: 116458 - DNA, 25 bp, Probe sequence
gtaaaacaatgcccgtgtaacacgc

SEQ ID NO: 116459 - DNA, 25 bp, Probe sequence
gtgatttaacgagcttgggacagaa

SEQ ID NO: 116460 - DNA, 25 bp, Probe sequence
ggacagaaaacaaagccctaagctc

SEQ ID NO: 116461 - DNA, 25 bp, Probe sequence
taacacgctcttttcaaaaatagtc

SEQ ID NO: 116462 - DNA, 25 bp, Probe sequence
atttctaattaaacgctcaactata

SEQ ID NO: 116463 - DNA, 25 bp, Probe sequence
atagttgatcaaaaagacagcagta

SEQ ID NO: 116464 - DNA, 25 bp, Probe sequence
atagctatatttttgtatttatgtt

SEQ ID NO: 116465 - DNA, 25 bp, Probe sequence
actgctgttttttatagtaatagct

SEQ ID NO: 116466 - DNA, 25 bp, Probe sequence
aagacagcagtaggataatttcaat

SEQ ID NO: 116467 - DNA, 25 bp, Probe sequence
aattaaacgctcaactatatatagt

SEQ ID NO: 116468 - DNA, 25 bp, Probe sequence
ctaattaaacgctcaactatatata

SEQ ID NO: 116469 - DNA, 25 bp, Probe sequence
gctatatttttgtatttatgttttc

SEQ ID NO: 116470 - DNA, 25 bp, Probe sequence
gcagtaggataatttcaatttggaa

SEQ ID NO: 116471 - DNA, 25 bp, Probe sequence
gaatttctaattaaacgctcaacta

SEQ ID NO: 116472 - DNA, 25 bp, Probe sequence
gacagcagtaggataatttcaattt

SEQ ID NO: 116473 - DNA, 25 bp, Probe sequence
gagaatttctaattaaacgctcaac

SEQ ID NO: 116474 - DNA, 25 bp, Probe sequence
gtaatagctatatttttgtatttat

SEQ ID NO: 116475 - DNA, 25 bp, Probe sequence
tgtatttatgttttctagtttaaca

SEQ ID NO: 116476 - DNA, 25 bp, Probe sequence
ttctaattaaacgctcaactatata

SEQ ID NO: 116477 - DNA, 25 bp, Probe sequence
attgtgggtaggtagattaacgtat

SEQ ID NO: 116478 - DNA, 25 bp, Probe sequence
attatcaaacattttaggaatctta

SEQ ID NO: 116479 - DNA, 25 bp, Probe sequence
atagacattgtgggtaggtagatta

SEQ ID NO: 116480 - DNA, 25 bp, Probe sequence
acgctttacacatttcttttacaat

SEQ ID NO: 116481 - DNA, 25 bp, Probe sequence
acaatttataacatttctgtaatat

SEQ ID NO: 116482 - DNA, 25 bp, Probe sequence
aaatactacaaaaacctgcttgtga

SEQ ID NO: 116483 - DNA, 25 bp, Probe sequence
aacctgcttgtgaaaacgctttaca

SEQ ID NO: 116484 - DNA, 25 bp, Probe sequence
aatacccacaatgtaattttaatag

SEQ ID NO: 116485 - DNA, 25 bp, Probe sequence
ctttatcctttcatctctttatttg

SEQ ID NO: 116486 - DNA, 25 bp, Probe sequence
gaatcttaaaaatgtgatgttcaac

SEQ ID NO: 116487 - DNA, 25 bp, Probe sequence
gaagagagcattaaaatacccacaa

SEQ ID NO: 116488 - DNA, 25 bp, Probe sequence
gatgttcaacaagacgaagagagca

SEQ ID NO: 116489 - DNA, 25 bp, Probe sequence
tcctttcatctctttatttgtagtc

SEQ ID NO: 116490 - DNA, 25 bp, Probe sequence
tcatctctttatttgtagtctaaca

SEQ ID NO: 116491 - DNA, 25 bp, Probe sequence
tacacatttcttttacaatttataa

SEQ ID NO: 116492 - DNA, 25 bp, Probe sequence
attcataaaatgcgatagagatagt

SEQ ID NO: 116493 - DNA, 25 bp, Probe sequence
attattttacatatttattcataaa

SEQ ID NO: 116494 - DNA, 25 bp, Probe sequence
atgcgatagagatagttagagttgt

SEQ ID NO: 116495 - DNA, 25 bp, Probe sequence
aaatgcgatagagatagttagagtt

SEQ ID NO: 116496 - DNA, 25 bp, Probe sequence
aaaatgcgatagagatagttagagt

SEQ ID NO: 116497 - DNA, 25 bp, Probe sequence
aatgcgatagagatagttagagttg

SEQ ID NO: 116498 - DNA, 25 bp, Probe sequence
gcgatagagatagttagagttgtaa

SEQ ID NO: 116499 - DNA, 25 bp, Probe sequence
gagttgtaagtataaatgcttattt

SEQ ID NO: 116500 - DNA, 25 bp, Probe sequence
gagatagttagagttgtaagtataa

SEQ ID NO: 116501 - DNA, 25 bp, Probe sequence
gatagttagagttgtaagtataaat

SEQ ID NO: 116502 - DNA, 25 bp, Probe sequence
gatagagatagttagagttgtaagt

SEQ ID NO: 116503 - DNA, 25 bp, Probe sequence
gttagagttgtaagtataaatgctt

SEQ ID NO: 116504 - DNA, 25 bp, Probe sequence
gtaagtataaatgcttatttatcaa

SEQ ID NO: 116505 - DNA, 25 bp, Probe sequence
tgcgatagagatagttagagttgta

SEQ ID NO: 116506 - DNA, 25 bp, Probe sequence
tagagatagttagagttgtaagtat

SEQ ID NO: 116507 - DNA, 25 bp, Probe sequence
attgaatcgcaaacgtaaacttagt

SEQ ID NO: 116508 - DNA, 25 bp, Probe sequence
atattaaatgaaacaggaggctttt

SEQ ID NO: 116509 - DNA, 25 bp, Probe sequence
acttgtgaattgaatcgcaaacgta

SEQ ID NO: 116510 - DNA, 25 bp, Probe sequence
aattgaatcgcaaacgtaaacttag

SEQ ID NO: 116511 - DNA, 25 bp, Probe sequence
cttgtgaattgaatcgcaaacgtaa

SEQ ID NO: 116512 - DNA, 25 bp, Probe sequence
gaattgaatcgcaaacgtaaactta

SEQ ID NO: 116513 - DNA, 25 bp, Probe sequence
gatattaaatgaaacaggaggcttt

SEQ ID NO: 116514 - DNA, 25 bp, Probe sequence
gtgaattgaatcgcaaacgtaaact

SEQ ID NO: 116515 - DNA, 25 bp, Probe sequence
tgtgaattgaatcgcaaacgtaaac

SEQ ID NO: 116516 - DNA, 25 bp, Probe sequence
tgaattgaatcgcaaacgtaaactt

SEQ ID NO: 116517 - DNA, 25 bp, Probe sequence
tgaatcgcaaacgtaaacttagtaa

SEQ ID NO: 116518 - DNA, 25 bp, Probe sequence
taaatgaaacaggaggcttttatag

SEQ ID NO: 116519 - DNA, 25 bp, Probe sequence
ttaaatgaaacaggaggcttttata

SEQ ID NO: 116520 - DNA, 25 bp, Probe sequence
ttgaatcgcaaacgtaaacttagta

SEQ ID NO: 116521 - DNA, 25 bp, Probe sequence
ttgtgaattgaatcgcaaacgtaaa

SEQ ID NO: 116522 - DNA, 25 bp, Probe sequence
attgttatactactagagactgatt

SEQ ID NO: 116523 - DNA, 25 bp, Probe sequence
agcatattttcgaggttgtcattac

SEQ ID NO: 116524 - DNA, 25 bp, Probe sequence
acctcgtttttatttatatgcaaga

SEQ ID NO: 116525 - DNA, 25 bp, Probe sequence
acatgttaatgtttctttacttagt

SEQ ID NO: 116526 - DNA, 25 bp, Probe sequence
aacatctgtcatacaataatattgt

SEQ ID NO: 116527 - DNA, 25 bp, Probe sequence
aatacattacttcaatgattagtga

SEQ ID NO: 116528 - DNA, 25 bp, Probe sequence
ctaggttactagctaatgtgacaag

SEQ ID NO: 116529 - DNA, 25 bp, Probe sequence
gaaaaaataacatctgtcatacaat

SEQ ID NO: 116530 - DNA, 25 bp, Probe sequence
gacaacctcgtttttatttatatgc

SEQ ID NO: 116531 - DNA, 25 bp, Probe sequence
gagactgatttattagcatgattac

SEQ ID NO: 116532 - DNA, 25 bp, Probe sequence
gatagaactagacgttaactattta

SEQ ID NO: 116533 - DNA, 25 bp, Probe sequence
gttaactatttaaagcatattttcg

SEQ ID NO: 116534 - DNA, 25 bp, Probe sequence
gtaagaataattatcttcaaccaaa

SEQ ID NO: 116535 - DNA, 25 bp, Probe sequence
taatgacaacctcgtttttatttat

SEQ ID NO: 116536 - DNA, 25 bp, Probe sequence
tatatgcaagaactaggttactagc

SEQ ID NO: 116537 - DNA, 25 bp, Probe sequence
acatcgtttgtcggttttaatactg

SEQ ID NO: 116538 - DNA, 25 bp, Probe sequence
aacttataataaatcaatcacaatc

SEQ ID NO: 116539 - DNA, 25 bp, Probe sequence
aatcaatcacaatcactttgtgtta

SEQ ID NO: 116540 - DNA, 25 bp, Probe sequence
aataaatcaatcacaatcactttgt

SEQ ID NO: 116541 - DNA, 25 bp, Probe sequence
caaatacaacatcgtttgtcggttt

SEQ ID NO: 116542 - DNA, 25 bp, Probe sequence
cactttgtgttaaaatatgtgtcaa

SEQ ID NO: 116543 - DNA, 25 bp, Probe sequence
catcgtttgtcggttttaatactga

SEQ ID NO: 116544 - DNA, 25 bp, Probe sequence
gatgttttattttgttagtaccaca

SEQ ID NO: 116545 - DNA, 25 bp, Probe sequence
gtaccacaataaaagctaagttcga

SEQ ID NO: 116546 - DNA, 25 bp, Probe sequence
gtcggttttaatactgataaacgat

SEQ ID NO: 116547 - DNA, 25 bp, Probe sequence
gtgtcaaaggaagtgagggtttgtc

SEQ ID NO: 116548 - DNA, 25 bp, Probe sequence
tgttttattttgttagtaccacaat

SEQ ID NO: 116549 - DNA, 25 bp, Probe sequence
tcgtttgtcggttttaatactgata

SEQ ID NO: 116550 - DNA, 25 bp, Probe sequence
tcaatcacaatcactttgtgttaaa

SEQ ID NO: 116551 - DNA, 25 bp, Probe sequence
tacaacatcgtttgtcggttttaat

SEQ ID NO: 116552 - DNA, 25 bp, Probe sequence
attttacagcagattcacaatattc

SEQ ID NO: 116553 - DNA, 25 bp, Probe sequence
atattcgtgtataatcaaatcatga

SEQ ID NO: 116554 - DNA, 25 bp, Probe sequence
ataaaatgtcatgttcttcctctca

SEQ ID NO: 116555 - DNA, 25 bp, Probe sequence
atcatgattaaattacaagcaagtg

SEQ ID NO: 116556 - DNA, 25 bp, Probe sequence
agctaaccagtctttatatagattg

SEQ ID NO: 116557 - DNA, 25 bp, Probe sequence
aatgttaccattttgagatgaaagt

SEQ ID NO: 116558 - DNA, 25 bp, Probe sequence
caagcaagtgggtattaatcccaag

SEQ ID NO: 116559 - DNA, 25 bp, Probe sequence
gcagattcacaatattctaataagg

SEQ ID NO: 116560 - DNA, 25 bp, Probe sequence
gttcttcctctcaaatatagaagtg

SEQ ID NO: 116561 - DNA, 25 bp, Probe sequence
gtcatgttcttcctctcaaatatag

SEQ ID NO: 116562 - DNA, 25 bp, Probe sequence
taatcccaagaagctttaatttaat

SEQ ID NO: 116563 - DNA, 25 bp, Probe sequence
taaaatgtcatgttcttcctctcaa

SEQ ID NO: 116564 - DNA, 25 bp, Probe sequence
tagattggttagttttttcttgctt

SEQ ID NO: 116565 - DNA, 25 bp, Probe sequence
tagttgattattttacagcagattc

SEQ ID NO: 116566 - DNA, 25 bp, Probe sequence
ttatcatttaaaaagctaaccagtc

SEQ ID NO: 116567 - DNA, 25 bp, Probe sequence
attctaacctagacaattaagatta

SEQ ID NO: 116568 - DNA, 25 bp, Probe sequence
attagtccaagaccttatgtctttt

SEQ ID NO: 116569 - DNA, 25 bp, Probe sequence
attattagtccaagaccttatgtct

SEQ ID NO: 116570 - DNA, 25 bp, Probe sequence
atgtcttttttgattctaaaaatgt

SEQ ID NO: 116571 - DNA, 25 bp, Probe sequence
agtagtaccagtccaaaataattct

SEQ ID NO: 116572 - DNA, 25 bp, Probe sequence
aagattagattgaatcgcatgattc

SEQ ID NO: 116573 - DNA, 25 bp, Probe sequence
cagtccaaaataattctaacctaga

SEQ ID NO: 116574 - DNA, 25 bp, Probe sequence
ctggatagtagtaccagtccaaaat

SEQ ID NO: 116575 - DNA, 25 bp, Probe sequence
gacaattattagtccaagaccttat

SEQ ID NO: 116576 - DNA, 25 bp, Probe sequence
gatagtagtaccagtccaaaataat

SEQ ID NO: 116577 - DNA, 25 bp, Probe sequence
gtatatgacataaggcatggacaat

SEQ ID NO: 116578 - DNA, 25 bp, Probe sequence
gtccaaaataattctaacctagaca

SEQ ID NO: 116579 - DNA, 25 bp, Probe sequence
gtccaagaccttatgtcttttttga

SEQ ID NO: 116580 - DNA, 25 bp, Probe sequence
taccagtccaaaataattctaacct

SEQ ID NO: 116581 - DNA, 25 bp, Probe sequence
tagtccaagaccttatgtctttttt

SEQ ID NO: 116582 - DNA, 25 bp, Probe sequence
attggcgttttgtcggatatttgat

SEQ ID NO: 116583 - DNA, 25 bp, Probe sequence
attttattggcgttttgtcggatat

SEQ ID NO: 116584 - DNA, 25 bp, Probe sequence
atatagatacatcatagcattttat

SEQ ID NO: 116585 - DNA, 25 bp, Probe sequence
catagcattttattggcgttttgtc

SEQ ID NO: 116586 - DNA, 25 bp, Probe sequence
ctctcctcataagttgcttagttca

SEQ ID NO: 116587 - DNA, 25 bp, Probe sequence
ctcctcataagttgcttagttcata

SEQ ID NO: 116588 - DNA, 25 bp, Probe sequence
ctctctcctcataagttgcttagtt

SEQ ID NO: 116589 - DNA, 25 bp, Probe sequence
gcgttttgtcggatatttgatatat

SEQ ID NO: 116590 - DNA, 25 bp, Probe sequence
gcttagttcatatagatacatcata

SEQ ID NO: 116591 - DNA, 25 bp, Probe sequence
gcattttattggcgttttgtcggat

SEQ ID NO: 116592 - DNA, 25 bp, Probe sequence
gttgcttagttcatatagatacatc

SEQ ID NO: 116593 - DNA, 25 bp, Probe sequence
tctctctcctcataagttgcttagt

SEQ ID NO: 116594 - DNA, 25 bp, Probe sequence
taagttgcttagttcatatagatac

SEQ ID NO: 116595 - DNA, 25 bp, Probe sequence
tagcattttattggcgttttgtcgg

SEQ ID NO: 116596 - DNA, 25 bp, Probe sequence
ttattggcgttttgtcggatatttg

SEQ ID NO: 116597 - DNA, 25 bp, Probe sequence
atagtttttaagttgccgagttgca

SEQ ID NO: 116598 - DNA, 25 bp, Probe sequence
acttccaagagtgcacaattcattt

SEQ ID NO: 116599 - DNA, 25 bp, Probe sequence
aagacagtgacttgcacttccaaga

SEQ ID NO: 116600 - DNA, 25 bp, Probe sequence
aatacataatacttcatagttttta

SEQ ID NO: 116601 - DNA, 25 bp, Probe sequence
aatattcttttaaacagcataacta

SEQ ID NO: 116602 - DNA, 25 bp, Probe sequence
gaagggagccttatttatgttctag

SEQ ID NO: 116603 - DNA, 25 bp, Probe sequence
gaagtaagaatcatcattggtaatt

SEQ ID NO: 116604 - DNA, 25 bp, Probe sequence
gaaaatttatatctaacttgtttca

SEQ ID NO: 116605 - DNA, 25 bp, Probe sequence
gagccttatttatgttctaggttct

SEQ ID NO: 116606 - DNA, 25 bp, Probe sequence
gagtgcacaattcattttctagttg

SEQ ID NO: 116607 - DNA, 25 bp, Probe sequence
gttgccgagttgcattacaaattgg

SEQ ID NO: 116608 - DNA, 25 bp, Probe sequence
gttctaggttctgatttcattttga

SEQ ID NO: 116609 - DNA, 25 bp, Probe sequence
tacatatgcatttcaatattctttt

SEQ ID NO: 116610 - DNA, 25 bp, Probe sequence
tatgattttgatgatgtcgtaattc

SEQ ID NO: 116611 - DNA, 25 bp, Probe sequence
ttttctagttgaatattttcttgaa

SEQ ID NO: 116612 - DNA, 25 bp, Probe sequence
ataagtctagttaatgtgtaacgta

SEQ ID NO: 116613 - DNA, 25 bp, Probe sequence
agtgcaacttgaccaactctacaaa

SEQ ID NO: 116614 - DNA, 25 bp, Probe sequence
agaaagtcaaagtcaaaagtgcaac

SEQ ID NO: 116615 - DNA, 25 bp, Probe sequence
acattagctagatttttttattcaa

SEQ ID NO: 116616 - DNA, 25 bp, Probe sequence
aaagtgcaacttgaccaactctaca

SEQ ID NO: 116617 - DNA, 25 bp, Probe sequence
aaaagtgcaacttgaccaactctac

SEQ ID NO: 116618 - DNA, 25 bp, Probe sequence
aacttgaccaactctacaaattaga

SEQ ID NO: 116619 - DNA, 25 bp, Probe sequence
aagtgcaacttgaccaactctacaa

SEQ ID NO: 116620 - DNA, 25 bp, Probe sequence
gcaacttgaccaactctacaaatta

SEQ ID NO: 116621 - DNA, 25 bp, Probe sequence
gaccaactctacaaattagaggtga

SEQ ID NO: 116622 - DNA, 25 bp, Probe sequence
gataaatgattatattgggactata

SEQ ID NO: 116623 - DNA, 25 bp, Probe sequence
gtaacgtaacattagctagattttt

SEQ ID NO: 116624 - DNA, 25 bp, Probe sequence
gtgcaacttgaccaactctacaaat

SEQ ID NO: 116625 - DNA, 25 bp, Probe sequence
gggactataatataattaaggtcaa

SEQ ID NO: 116626 - DNA, 25 bp, Probe sequence
tgtgtaacgtaacattagctagatt

SEQ ID NO: 116627 - DNA, 25 bp, Probe sequence
attaatcgcattcttggttttttag

SEQ ID NO: 116628 - DNA, 25 bp, Probe sequence
atcgcattcttggttttttagattt

SEQ ID NO: 116629 - DNA, 25 bp, Probe sequence
atgattaatcgcattcttggttttt

SEQ ID NO: 116630 - DNA, 25 bp, Probe sequence
atgtgatgattaatcgcattcttgg

SEQ ID NO: 116631 - DNA, 25 bp, Probe sequence
aattgaaccaagaatgtgatgatta

SEQ ID NO: 116632 - DNA, 25 bp, Probe sequence
gcattcttggttttttagatttgaa

SEQ ID NO: 116633 - DNA, 25 bp, Probe sequence
gatgattaatcgcattcttggtttt

SEQ ID NO: 116634 - DNA, 25 bp, Probe sequence
gattaatcgcattcttggtttttta

SEQ ID NO: 116635 - DNA, 25 bp, Probe sequence
gtgatgattaatcgcattcttggtt

SEQ ID NO: 116636 - DNA, 25 bp, Probe sequence
tgtgatgattaatcgcattcttggt

SEQ ID NO: 116637 - DNA, 25 bp, Probe sequence
tgattaatcgcattcttggtttttt

SEQ ID NO: 116638 - DNA, 25 bp, Probe sequence
tgatgattaatcgcattcttggttt

SEQ ID NO: 116639 - DNA, 25 bp, Probe sequence
tcgcattcttggttttttagatttg

SEQ ID NO: 116640 - DNA, 25 bp, Probe sequence
taatcgcattcttggttttttagat

SEQ ID NO: 116641 - DNA, 25 bp, Probe sequence
ttaatcgcattcttggttttttaga

SEQ ID NO: 116642 - DNA, 25 bp, Probe sequence
attaatattatatcagaggttatcg

SEQ ID NO: 116643 - DNA, 25 bp, Probe sequence
attatatcagaggttatcgaggggg

SEQ ID NO: 116644 - DNA, 25 bp, Probe sequence
atattatatcagaggttatcgaggg

SEQ ID NO: 116645 - DNA, 25 bp, Probe sequence
atatcagaggttatcgagggggtga

SEQ ID NO: 116646 - DNA, 25 bp, Probe sequence
atcagaggttatcgagggggtgaag

SEQ ID NO: 116647 - DNA, 25 bp, Probe sequence
aatattatatcagaggttatcgagg

SEQ ID NO: 116648 - DNA, 25 bp, Probe sequence
cagaggttatcgagggggtgaagta

SEQ ID NO: 116649 - DNA, 25 bp, Probe sequence
gaggttatcgagggggtgaagtaat

SEQ ID NO: 116650 - DNA, 25 bp, Probe sequence
tcagaggttatcgagggggtgaagt

SEQ ID NO: 116651 - DNA, 25 bp, Probe sequence
taatattatatcagaggttatcgag

SEQ ID NO: 116652 - DNA, 25 bp, Probe sequence
ttatatcagaggttatcgagggggt

SEQ ID NO: 116653 - DNA, 25 bp, Probe sequence
tatcagaggttatcgagggggtgaa

SEQ ID NO: 116654 - DNA, 25 bp, Probe sequence
tatatcagaggttatcgagggggtg

SEQ ID NO: 116655 - DNA, 25 bp, Probe sequence
tattatatcagaggttatcgagggg

SEQ ID NO: 116656 - DNA, 25 bp, Probe sequence
ttaatattatatcagaggttatcga

SEQ ID NO: 116657 - DNA, 25 bp, Probe sequence
attaggtacggcgttcgctataatg

SEQ ID NO: 116658 - DNA, 25 bp, Probe sequence
agatttgtgttatattgattttgta

SEQ ID NO: 116659 - DNA, 25 bp, Probe sequence
gaaacttttagatttgtgttatatt

SEQ ID NO: 116660 - DNA, 25 bp, Probe sequence
gatactttaactcacaaaggagaga

SEQ ID NO: 116661 - DNA, 25 bp, Probe sequence
gattttgtaagatactttaactcac

SEQ ID NO: 116662 - DNA, 25 bp, Probe sequence
gtattaacaattatagcttttacat

SEQ ID NO: 116663 - DNA, 25 bp, Probe sequence
gtaaacttagttattgtaatgtgaa

SEQ ID NO: 116664 - DNA, 25 bp, Probe sequence
ggtacggcgttcgctataatgcaaa

SEQ ID NO: 116665 - DNA, 25 bp, Probe sequence
ggcgttcgctataatgcaaagaagt

SEQ ID NO: 116666 - DNA, 25 bp, Probe sequence
tgctaaatatctcatcaatataaaa

SEQ ID NO: 116667 - DNA, 25 bp, Probe sequence
tacggcgttcgctataatgcaaaga

SEQ ID NO: 116668 - DNA, 25 bp, Probe sequence
tacatacttataatttttgaaactt

SEQ ID NO: 116669 - DNA, 25 bp, Probe sequence
taggtacggcgttcgctataatgca

SEQ ID NO: 116670 - DNA, 25 bp, Probe sequence
tatattaggtacggcgttcgctata

SEQ ID NO: 116671 - DNA, 25 bp, Probe sequence
tttatatattaggtacggcgttcgc

SEQ ID NO: 116672 - DNA, 25 bp, Probe sequence
attataatataattgccttgataca

SEQ ID NO: 116673 - DNA, 25 bp, Probe sequence
atctgggcagcttcaataataagaa

SEQ ID NO: 116674 - DNA, 25 bp, Probe sequence
agtgatgggttagaggttattgagc

SEQ ID NO: 116675 - DNA, 25 bp, Probe sequence
aaagacatatttcattttatactaa

SEQ ID NO: 116676 - DNA, 25 bp, Probe sequence
aaaagccgcctttatctgggcagct

SEQ ID NO: 116677 - DNA, 25 bp, Probe sequence
aattcaacatgaagcatttaatttt

SEQ ID NO: 116678 - DNA, 25 bp, Probe sequence
catctttgtattaaggctttttcta

SEQ ID NO: 116679 - DNA, 25 bp, Probe sequence
ccgcctttatctgggcagcttcaat

SEQ ID NO: 116680 - DNA, 25 bp, Probe sequence
gcctttatctgggcagcttcaataa

SEQ ID NO: 116681 - DNA, 25 bp, Probe sequence
gcatttaattttacagtgatgatta

SEQ ID NO: 116682 - DNA, 25 bp, Probe sequence
gacatctttgtattaaggctttttc

SEQ ID NO: 116683 - DNA, 25 bp, Probe sequence
gattactcgtaaatgacatctttgt

SEQ ID NO: 116684 - DNA, 25 bp, Probe sequence
tgggttagaggttattgagctttaa

SEQ ID NO: 116685 - DNA, 25 bp, Probe sequence
taatggccaaaaataaaagccgcct

SEQ ID NO: 116686 - DNA, 25 bp, Probe sequence
ttgccttgatacaaagattactcgt

SEQ ID NO: 116687 - DNA, 25 bp, Probe sequence
attttgaccatattatacagtttaa

SEQ ID NO: 116688 - DNA, 25 bp, Probe sequence
atctatgttaaattaatacctggta

SEQ ID NO: 116689 - DNA, 25 bp, Probe sequence
atggctattcaaatttaagcgcatt

SEQ ID NO: 116690 - DNA, 25 bp, Probe sequence
agcgcattaaaaccaatttcatact

SEQ ID NO: 116691 - DNA, 25 bp, Probe sequence
aactagtcaatattcctacctctga

SEQ ID NO: 116692 - DNA, 25 bp, Probe sequence
aatgattttatctgaatggctattc

SEQ ID NO: 116693 - DNA, 25 bp, Probe sequence
gaaatttgtatagtaacatctcata

SEQ ID NO: 116694 - DNA, 25 bp, Probe sequence
gtaacatctcatatattttgaccat

SEQ ID NO: 116695 - DNA, 25 bp, Probe sequence
tcctacctctgacttgagtttaaaa

SEQ ID NO: 116696 - DNA, 25 bp, Probe sequence
tctacctccactttaattatatata

SEQ ID NO: 116697 - DNA, 25 bp, Probe sequence
tcattctacctccactttaattata

SEQ ID NO: 116698 - DNA, 25 bp, Probe sequence
tcaatattcctacctctgacttgag

SEQ ID NO: 116699 - DNA, 25 bp, Probe sequence
tattcctacctctgacttgagttta

SEQ ID NO: 116700 - DNA, 25 bp, Probe sequence
tttcatactgaaatttgacgataat

SEQ ID NO: 116701 - DNA, 25 bp, Probe sequence
ttaactagtcaatattcctacctct

SEQ ID NO: 116702 - DNA, 25 bp, Probe sequence
atcattcttcattagtttaaagcaa

SEQ ID NO: 116703 - DNA, 25 bp, Probe sequence
actcttacgcatagtttacattaaa

SEQ ID NO: 116704 - DNA, 25 bp, Probe sequence
aaatcaatcattcttcattagttta

SEQ ID NO: 116705 - DNA, 25 bp, Probe sequence
cactcccacttatagaaaactctta

SEQ ID NO: 116706 - DNA, 25 bp, Probe sequence
cccacttatagaaaactcttacgca

SEQ ID NO: 116707 - DNA, 25 bp, Probe sequence
gaaaactcttacgcatagtttacat

SEQ ID NO: 116708 - DNA, 25 bp, Probe sequence
gaaatcggaatttgttagaggaggg

SEQ ID NO: 116709 - DNA, 25 bp, Probe sequence
gaaattctaaaatcaatcattcttc

SEQ ID NO: 116710 - DNA, 25 bp, Probe sequence
gaggaatgattttttaatttctgca

SEQ ID NO: 116711 - DNA, 25 bp, Probe sequence
gatcactcccacttatagaaaactc

SEQ ID NO: 116712 - DNA, 25 bp, Probe sequence
gattttttaatttctgcagctttat

SEQ ID NO: 116713 - DNA, 25 bp, Probe sequence
ggaatttgttagaggaggggattag

SEQ ID NO: 116714 - DNA, 25 bp, Probe sequence
tttttaatttctgcagctttattga

SEQ ID NO: 116715 - DNA, 25 bp, Probe sequence
ttctgcagctttattgaaattctaa

SEQ ID NO: 116716 - DNA, 25 bp, Probe sequence
ttgatcactcccacttatagaaaac

SEQ ID NO: 116717 - DNA, 25 bp, Probe sequence
atatctccagtctttttgtgttgga

SEQ ID NO: 116718 - DNA, 25 bp, Probe sequence
atctccagtctttttgtgttggata

SEQ ID NO: 116719 - DNA, 25 bp, Probe sequence
acttgtaataattttttctatgagt

SEQ ID NO: 116720 - DNA, 25 bp, Probe sequence
acatatctccagtctttttgtgttg

SEQ ID NO: 116721 - DNA, 25 bp, Probe sequence
catatctccagtctttttgtgttgg

SEQ ID NO: 116722 - DNA, 25 bp, Probe sequence
ctccagtctttttgtgttggataaa

SEQ ID NO: 116723 - DNA, 25 bp, Probe sequence
gacatatctccagtctttttgtgtt

SEQ ID NO: 116724 - DNA, 25 bp, Probe sequence
gagacatatctccagtctttttgtg

SEQ ID NO: 116725 - DNA, 25 bp, Probe sequence
gtaaattaggctggagacatatctc

SEQ ID NO: 116726 - DNA, 25 bp, Probe sequence
ggagacatatctccagtctttttgt

SEQ ID NO: 116727 - DNA, 25 bp, Probe sequence
tgtgttggataaaaactttgggaat

SEQ ID NO: 116728 - DNA, 25 bp, Probe sequence
taataattttttctatgagtaaact

SEQ ID NO: 116729 - DNA, 25 bp, Probe sequence
taaacttgtaataattttttctatg

SEQ ID NO: 116730 - DNA, 25 bp, Probe sequence
tagattgaaagtaggaggcatatgt

SEQ ID NO: 116731 - DNA, 25 bp, Probe sequence
tatgctttgtaaattaggctggaga

SEQ ID NO: 116732 - DNA, 25 bp, Probe sequence
gtaacctcgacgattttgtcgaggt

SEQ ID NO: 116733 - DNA, 25 bp, Probe sequence
attttgtcgaggtttacttatatgg

SEQ ID NO: 116734 - DNA, 25 bp, Probe sequence
atgtaacctcgacgattttgtcgag

SEQ ID NO: 116735 - DNA, 25 bp, Probe sequence
cgaggtttacttatatggggggatg

SEQ ID NO: 116736 - DNA, 25 bp, Probe sequence
aatgtaacctcgacgattttgtcga

SEQ ID NO: 116737 - DNA, 25 bp, Probe sequence
cgattttgtcgaggtttacttatat

SEQ ID NO: 116738 - DNA, 25 bp, Probe sequence
gaggtttacttatatggggggatgt

SEQ ID NO: 116739 - DNA, 25 bp, Probe sequence
gacgattttgtcgaggtttacttat

SEQ ID NO: 116740 - DNA, 25 bp, Probe sequence
gattttgtcgaggtttacttatatg

SEQ ID NO: 116741 - DNA, 25 bp, Probe sequence
tgtcgaggtttacttatatgggggg

SEQ ID NO: 116742 - DNA, 25 bp, Probe sequence
tttgtcgaggtttacttatatgggg

SEQ ID NO: 116743 - DNA, 25 bp, Probe sequence
tcgaggtttacttatatggggggat

SEQ ID NO: 116744 - DNA, 25 bp, Probe sequence
taatgtaacctcgacgattttgtcg

SEQ ID NO: 116745 - DNA, 25 bp, Probe sequence
ttttgtcgaggtttacttatatggg

SEQ ID NO: 116746 - DNA, 25 bp, Probe sequence
ttgtcgaggtttacttatatggggg

SEQ ID NO: 116747 - DNA, 25 bp, Probe sequence
agtgtagaaacttatctgaaaaatt

SEQ ID NO: 116748 - DNA, 25 bp, Probe sequence
aaatgcctactttcttagtaatatt

SEQ ID NO: 116749 - DNA, 25 bp, Probe sequence
aaatgttttttcttgatctataact

SEQ ID NO: 116750 - DNA, 25 bp, Probe sequence
gaattttattcattcaaataggaga

SEQ ID NO: 116751 - DNA, 25 bp, Probe sequence
gaatatacgtataacttactactaa

SEQ ID NO: 116752 - DNA, 25 bp, Probe sequence
gttttttcttgatctataactaaat

SEQ ID NO: 116753 - DNA, 25 bp, Probe sequence
gtataacttactactaacaaaggat

SEQ ID NO: 116754 - DNA, 25 bp, Probe sequence
ggattaataatcttttttataagtg

SEQ ID NO: 116755 - DNA, 25 bp, Probe sequence
tgcctactttcttagtaatatttta

SEQ ID NO: 116756 - DNA, 25 bp, Probe sequence
taagatgtgttagaatatacgtata

SEQ ID NO: 116757 - DNA, 25 bp, Probe sequence
tatacgtataacttactactaacaa

SEQ ID NO: 116758 - DNA, 25 bp, Probe sequence
ttttctcatttaattttaatgttag

SEQ ID NO: 116759 - DNA, 25 bp, Probe sequence
ttatcattataacagtatttcttaa

SEQ ID NO: 116760 - DNA, 25 bp, Probe sequence
ttaaatgcctactttcttagtaata

SEQ ID NO: 116761 - DNA, 25 bp, Probe sequence
ttgatctataactaaattttaagca

SEQ ID NO: 116762 - DNA, 25 bp, Probe sequence
attcatcgactgtaaggagtgagat

SEQ ID NO: 116763 - DNA, 25 bp, Probe sequence
atttctatagtgttgcttttttggt

SEQ ID NO: 116764 - DNA, 25 bp, Probe sequence
atgtggatactattcatcgactgta

SEQ ID NO: 116765 - DNA, 25 bp, Probe sequence
actatgtgtcatactttactaaaag

SEQ ID NO: 116766 - DNA, 25 bp, Probe sequence
aatagttttgctacaacgaatatgt

SEQ ID NO: 116767 - DNA, 25 bp, Probe sequence
aattgtattttgtttgatgctttaa

SEQ ID NO: 116768 - DNA, 25 bp, Probe sequence
gaaagtgctttaatgctttaactgt

SEQ ID NO: 116769 - DNA, 25 bp, Probe sequence
gatgctttaatacaatgtggatact

SEQ ID NO: 116770 - DNA, 25 bp, Probe sequence
gatatgtcaagcaacactatttcta

SEQ ID NO: 116771 - DNA, 25 bp, Probe sequence
gtatcttttaaatcaaatgtgcaat

SEQ ID NO: 116772 - DNA, 25 bp, Probe sequence
gtgcaattgttaatatagctctata

SEQ ID NO: 116773 - DNA, 25 bp, Probe sequence
tctatattagagtgttttggatgaa

SEQ ID NO: 116774 - DNA, 25 bp, Probe sequence
taaccatttaactatgtgtcatact

SEQ ID NO: 116775 - DNA, 25 bp, Probe sequence
tacaataattgcttagtatctttta

SEQ ID NO: 116776 - DNA, 25 bp, Probe sequence
tttggatgaaacatttgctatgata

SEQ ID NO: 116777 - DNA, 25 bp, Probe sequence
agcaacgcactatgaaaggagactc

SEQ ID NO: 116778 - DNA, 25 bp, Probe sequence
acgtgtaatattttgaggtgaagat

SEQ ID NO: 116779 - DNA, 25 bp, Probe sequence
aacttacgtgtaatattttgaggtg

SEQ ID NO: 116780 - DNA, 25 bp, Probe sequence
aattaagcaacgcactatgaaagga

SEQ ID NO: 116781 - DNA, 25 bp, Probe sequence
caacgcactatgaaaggagactctt

SEQ ID NO: 116782 - DNA, 25 bp, Probe sequence
ctttggagtctctttttttattgat

SEQ ID NO: 116783 - DNA, 25 bp, Probe sequence
ctctttggagtctctttttttattg

SEQ ID NO: 116784 - DNA, 25 bp, Probe sequence
gcactatgaaaggagactctttgga

SEQ ID NO: 116785 - DNA, 25 bp, Probe sequence
gactctttggagtctctttttttat

SEQ ID NO: 116786 - DNA, 25 bp, Probe sequence
gagtctctttttttattgatttcaa

SEQ ID NO: 116787 - DNA, 25 bp, Probe sequence
gatattaattaagcaacgcactatg

SEQ ID NO: 116788 - DNA, 25 bp, Probe sequence
ggagtctctttttttattgatttca

SEQ ID NO: 116789 - DNA, 25 bp, Probe sequence
tggagtctctttttttattgatttc

SEQ ID NO: 116790 - DNA, 25 bp, Probe sequence
tagtagttaaacttacgtgtaatat

SEQ ID NO: 116791 - DNA, 25 bp, Probe sequence
tttggagtctctttttttattgatt

SEQ ID NO: 116792 - DNA, 25 bp, Probe sequence
ataagtctattatgtaccaaattta

SEQ ID NO: 116793 - DNA, 25 bp, Probe sequence
atggtgtacgaggtctttaatttat

SEQ ID NO: 116794 - DNA, 25 bp, Probe sequence
caaacatacccctttgtttgaagtg

SEQ ID NO: 116795 - DNA, 25 bp, Probe sequence
ccctttgtttagcgtcgtgtattca

SEQ ID NO: 116796 - DNA, 25 bp, Probe sequence
gacctcgttacatttatggtgtacg

SEQ ID NO: 116797 - DNA, 25 bp, Probe sequence
gagtcagtaaaaagacctcgttaca

SEQ ID NO: 116798 - DNA, 25 bp, Probe sequence
gatcgatgtgtaacattacgttcta

SEQ ID NO: 116799 - DNA, 25 bp, Probe sequence
gtattcgcttacattatgaacagat

SEQ ID NO: 116800 - DNA, 25 bp, Probe sequence
gtattcagacacgacgtttttttat

SEQ ID NO: 116801 - DNA, 25 bp, Probe sequence
tgaagtgaaaaatttctcccatccc

SEQ ID NO: 116802 - DNA, 25 bp, Probe sequence
taatttgtataattttcgaactggt

SEQ ID NO: 116803 - DNA, 25 bp, Probe sequence
taatcacataacaaacatacccctt

SEQ ID NO: 116804 - DNA, 25 bp, Probe sequence
tactattgtattcgcttacattatg

SEQ ID NO: 116805 - DNA, 25 bp, Probe sequence
tacgttctaataatttaatgttgca

SEQ ID NO: 116806 - DNA, 25 bp, Probe sequence
tatgcactttttatacattaacgat

SEQ ID NO: 116807 - DNA, 25 bp, Probe sequence
atataacatgattttaaacatttgg

SEQ ID NO: 116808 - DNA, 25 bp, Probe sequence
ataacatgattttaaacatttggaa

SEQ ID NO: 116809 - DNA, 25 bp, Probe sequence
ataactaatataacatgattttaaa

SEQ ID NO: 116810 - DNA, 25 bp, Probe sequence
acatgattttaaacatttggaagaa

SEQ ID NO: 116811 - DNA, 25 bp, Probe sequence
aacatgattttaaacatttggaaga

SEQ ID NO: 116812 - DNA, 25 bp, Probe sequence
aactaatataacatgattttaaaca

SEQ ID NO: 116813 - DNA, 25 bp, Probe sequence
aatataacatgattttaaacatttg

SEQ ID NO: 116814 - DNA, 25 bp, Probe sequence
catgattttaaacatttggaagaaa

SEQ ID NO: 116815 - DNA, 25 bp, Probe sequence
ggaagaaatatgcatatttgccaat

SEQ ID NO: 116816 - DNA, 25 bp, Probe sequence
tcacccattttcaaaaatttactat

SEQ ID NO: 116817 - DNA, 25 bp, Probe sequence
taactaatataacatgattttaaac

SEQ ID NO: 116818 - DNA, 25 bp, Probe sequence
taacatgattttaaacatttggaag

SEQ ID NO: 116819 - DNA, 25 bp, Probe sequence
tactattacgaacttaagttaatat

SEQ ID NO: 116820 - DNA, 25 bp, Probe sequence
tataacatgattttaaacatttgga

SEQ ID NO: 116821 - DNA, 25 bp, Probe sequence
tataactaatataacatgattttaa

SEQ ID NO: 116822 - DNA, 25 bp, Probe sequence
attatcaatgttaatttgaccatta

SEQ ID NO: 116823 - DNA, 25 bp, Probe sequence
atttcctttatctattatcaatgtt

SEQ ID NO: 116824 - DNA, 25 bp, Probe sequence
atgtatacacctcgtatcaaattca

SEQ ID NO: 116825 - DNA, 25 bp, Probe sequence
acctcgtatcaaattcaatttatct

SEQ ID NO: 116826 - DNA, 25 bp, Probe sequence
aagcaatttcctttatctattatca

SEQ ID NO: 116827 - DNA, 25 bp, Probe sequence
aatagtgttcgtaagtgttttgtat

SEQ ID NO: 116828 - DNA, 25 bp, Probe sequence
gcaatttcctttatctattatcaat

SEQ ID NO: 116829 - DNA, 25 bp, Probe sequence
gaattgtgttaaaatgttatggaat

SEQ ID NO: 116830 - DNA, 25 bp, Probe sequence
gatatgtatacacctcgtatcaaat

SEQ ID NO: 116831 - DNA, 25 bp, Probe sequence
gtgttttgtattattgaattgtgtt

SEQ ID NO: 116832 - DNA, 25 bp, Probe sequence
gtgttcgtaagtgttttgtattatt

SEQ ID NO: 116833 - DNA, 25 bp, Probe sequence
tcttaactatattatgaatgacaaa

SEQ ID NO: 116834 - DNA, 25 bp, Probe sequence
tacacctcgtatcaaattcaattta

SEQ ID NO: 116835 - DNA, 25 bp, Probe sequence
ttcctttatctattatcaatgttaa

SEQ ID NO: 116836 - DNA, 25 bp, Probe sequence
ttgaccattaaaaatagtgttcgta

SEQ ID NO: 116837 - DNA, 25 bp, Probe sequence
atagtgttaaaatgtattgacgaat

SEQ ID NO: 116838 - DNA, 25 bp, Probe sequence
ataaatgctttttacgtaaatcaag

SEQ ID NO: 116839 - DNA, 25 bp, Probe sequence
atcaaacatttatcgttgtaatacg

SEQ ID NO: 116840 - DNA, 25 bp, Probe sequence
atcaagtttgatacagaaaggacta

SEQ ID NO: 116841 - DNA, 25 bp, Probe sequence
atgctttttacgtaaatcaagtttg

SEQ ID NO: 116842 - DNA, 25 bp, Probe sequence
atgcagacgtattttagtacgacgt

SEQ ID NO: 116843 - DNA, 25 bp, Probe sequence
aactgggattagatattctatccgt

SEQ ID NO: 116844 - DNA, 25 bp, Probe sequence
aatgatattaaaatgcagacgtatt

SEQ ID NO: 116845 - DNA, 25 bp, Probe sequence
aatgctagtatgtatatgattttga

SEQ ID NO: 116846 - DNA, 25 bp, Probe sequence
caaacatttatcgttgtaatacgtt

SEQ ID NO: 116847 - DNA, 25 bp, Probe sequence
gcagacgtattttagtacgacgtaa

SEQ ID NO: 116848 - DNA, 25 bp, Probe sequence
gatattctatccgttaaattaatta

SEQ ID NO: 116849 - DNA, 25 bp, Probe sequence
gattttaaaatgctagtatgtatat

SEQ ID NO: 116850 - DNA, 25 bp, Probe sequence
gggattagatattctatccgttaaa

SEQ ID NO: 116851 - DNA, 25 bp, Probe sequence
tacagaaaggactaaatcaaacatt

SEQ ID NO: 116852 - DNA, 25 bp, Probe sequence
attatttgatatttcatctgactga

SEQ ID NO: 116853 - DNA, 25 bp, Probe sequence
agcttttttgcttttataataatcg

SEQ ID NO: 116854 - DNA, 25 bp, Probe sequence
aaatctcctcaaaagctgtagtttc

SEQ ID NO: 116855 - DNA, 25 bp, Probe sequence
caacagctttgttcacgttatcata

SEQ ID NO: 116856 - DNA, 25 bp, Probe sequence
cacgttatcatatatgtgagcaaag

SEQ ID NO: 116857 - DNA, 25 bp, Probe sequence
ctcctcaaaagctgtagtttcaact

SEQ ID NO: 116858 - DNA, 25 bp, Probe sequence
gctgtagtttcaacttttgaggaga

SEQ ID NO: 116859 - DNA, 25 bp, Probe sequence
gctttgttcacgttatcatatatgt

SEQ ID NO: 116860 - DNA, 25 bp, Probe sequence
gatatttcatctgactgattttttt

SEQ ID NO: 116861 - DNA, 25 bp, Probe sequence
gtgagcaaagcttttttgcttttat

SEQ ID NO: 116862 - DNA, 25 bp, Probe sequence
ggagatagtatcttatattcttaaa

SEQ ID NO: 116863 - DNA, 25 bp, Probe sequence
tctgactgattttttttatgcacaa

SEQ ID NO: 116864 - DNA, 25 bp, Probe sequence
tatcattcaacagctttgttcacgt

SEQ ID NO: 116865 - DNA, 25 bp, Probe sequence
tatattcttaaaagacatccacaga

SEQ ID NO: 116866 - DNA, 25 bp, Probe sequence
ttatgcacaaaaaaatctcctcaaa

SEQ ID NO: 116867 - DNA, 25 bp, Probe sequence
atagtttgtgagacttttcaatgac

SEQ ID NO: 116868 - DNA, 25 bp, Probe sequence
agatatttactttcaatagtttgtg

SEQ ID NO: 116869 - DNA, 25 bp, Probe sequence
aacagcaccagtttatatgaataac

SEQ ID NO: 116870 - DNA, 25 bp, Probe sequence
cattcactttctattttaagatatt

SEQ ID NO: 116871 - DNA, 25 bp, Probe sequence
cttagttattatttagtatatccta

SEQ ID NO: 116872 - DNA, 25 bp, Probe sequence
gcaattggatcaaacagcaccagtt

SEQ ID NO: 116873 - DNA, 25 bp, Probe sequence
gactcgtaagtctgcaattggatca

SEQ ID NO: 116874 - DNA, 25 bp, Probe sequence
gatgttcctcctatttttctaaact

SEQ ID NO: 116875 - DNA, 25 bp, Probe sequence
gtatatcctaaatagcagtgcttaa

SEQ ID NO: 116876 - DNA, 25 bp, Probe sequence
gtctgcaattggatcaaacagcacc

SEQ ID NO: 116877 - DNA, 25 bp, Probe sequence
gtgagacttttcaatgactcgtaag

SEQ ID NO: 116878 - DNA, 25 bp, Probe sequence
ggatcaaacagcaccagtttatatg

SEQ ID NO: 116879 - DNA, 25 bp, Probe sequence
taaccattcactttctattttaaga

SEQ ID NO: 116880 - DNA, 25 bp, Probe sequence
taaattaaccattcactttctattt

SEQ ID NO: 116881 - DNA, 25 bp, Probe sequence
tacttaaattaaccattcactttct

SEQ ID NO: 116882 - DNA, 25 bp, Probe sequence
atatagtgtctcttggtacaataac

SEQ ID NO: 116883 - DNA, 25 bp, Probe sequence
atagtatatgtagtgatcatttgat

SEQ ID NO: 116884 - DNA, 25 bp, Probe sequence
aaatatagtgtctcttggtacaata

SEQ ID NO: 116885 - DNA, 25 bp, Probe sequence
aacaatacaactactagggggcact

SEQ ID NO: 116886 - DNA, 25 bp, Probe sequence
caatacaactactagggggcacttt

SEQ ID NO: 116887 - DNA, 25 bp, Probe sequence
gcattgataattttaggtgctcaga

SEQ ID NO: 116888 - DNA, 25 bp, Probe sequence
gaaacagcattgataattttaggtg

SEQ ID NO: 116889 - DNA, 25 bp, Probe sequence
gtatatgtagtgatcatttgataaa

SEQ ID NO: 116890 - DNA, 25 bp, Probe sequence
gtctcttggtacaataacaatacaa

SEQ ID NO: 116891 - DNA, 25 bp, Probe sequence
gtgtctcttggtacaataacaatac

SEQ ID NO: 116892 - DNA, 25 bp, Probe sequence
tctacttttgtttatagtatatgta

SEQ ID NO: 116893 - DNA, 25 bp, Probe sequence
tagtgtctcttggtacaataacaat

SEQ ID NO: 116894 - DNA, 25 bp, Probe sequence
taggtgctcagaaatttgaatttta

SEQ ID NO: 116895 - DNA, 25 bp, Probe sequence
tatagtgtctcttggtacaataaca

SEQ ID NO: 116896 - DNA, 25 bp, Probe sequence
ttaaaaatatagtgtctcttggtac

SEQ ID NO: 116897 - DNA, 25 bp, Probe sequence
attgtcttcatatagtttggtctat

SEQ ID NO: 116898 - DNA, 25 bp, Probe sequence
atagcaataggttaaacaaaggagg

SEQ ID NO: 116899 - DNA, 25 bp, Probe sequence
aattgtcttcatatagtttggtcta

SEQ ID NO: 116900 - DNA, 25 bp, Probe sequence
gaattgtcttcatatagtttggtct

SEQ ID NO: 116901 - DNA, 25 bp, Probe sequence
gatataatagcaataggttaaacaa

SEQ ID NO: 116902 - DNA, 25 bp, Probe sequence
gtagatttagtatgaattgtcttca

SEQ ID NO: 116903 - DNA, 25 bp, Probe sequence
gtcttcatatagtttggtctataat

SEQ ID NO: 116904 - DNA, 25 bp, Probe sequence
tgtcgaaattgcaaaagatgtataa

SEQ ID NO: 116905 - DNA, 25 bp, Probe sequence
tgtcttcatatagtttggtctataa

SEQ ID NO: 116906 - DNA, 25 bp, Probe sequence
tcttcatatagtttggtctataata

SEQ ID NO: 116907 - DNA, 25 bp, Probe sequence
taatttaaatttgtcgaaattgcaa

SEQ ID NO: 116908 - DNA, 25 bp, Probe sequence
tagtttggtctataatataatttat

SEQ ID NO: 116909 - DNA, 25 bp, Probe sequence
tataaaagattttactgtttgattt

SEQ ID NO: 116910 - DNA, 25 bp, Probe sequence
ttacattagtagatttagtatgaat

SEQ ID NO: 116911 - DNA, 25 bp, Probe sequence
ttgtcttcatatagtttggtctata

SEQ ID NO: 116912 - DNA, 25 bp, Probe sequence
attgttaatcgtagtatgtttgaat

SEQ ID NO: 116913 - DNA, 25 bp, Probe sequence
atagtattgttaatcgtagtatgtt

SEQ ID NO: 116914 - DNA, 25 bp, Probe sequence
ataatagtattgttaatcgtagtat

SEQ ID NO: 116915 - DNA, 25 bp, Probe sequence
atggtcatttttattgaatgtaata

SEQ ID NO: 116916 - DNA, 25 bp, Probe sequence
agtattgttaatcgtagtatgtttg

SEQ ID NO: 116917 - DNA, 25 bp, Probe sequence
acataatagtattgttaatcgtagt

SEQ ID NO: 116918 - DNA, 25 bp, Probe sequence
aatcgtagtatgtttgaattaataa

SEQ ID NO: 116919 - DNA, 25 bp, Probe sequence
aatagtattgttaatcgtagtatgt

SEQ ID NO: 116920 - DNA, 25 bp, Probe sequence
gtattgttaatcgtagtatgtttga

SEQ ID NO: 116921 - DNA, 25 bp, Probe sequence
tgttaatcgtagtatgtttgaatta

SEQ ID NO: 116922 - DNA, 25 bp, Probe sequence
tcgtagtatgtttgaattaataaga

SEQ ID NO: 116923 - DNA, 25 bp, Probe sequence
taatagtattgttaatcgtagtatg

SEQ ID NO: 116924 - DNA, 25 bp, Probe sequence
tagtattgttaatcgtagtatgttt

SEQ ID NO: 116925 - DNA, 25 bp, Probe sequence
tattgttaatcgtagtatgtttgaa

SEQ ID NO: 116926 - DNA, 25 bp, Probe sequence
ttgttaatcgtagtatgtttgaatt

SEQ ID NO: 116927 - DNA, 25 bp, Probe sequence
attatgatattataccatgttacaa

SEQ ID NO: 116928 - DNA, 25 bp, Probe sequence
attatccagtatacaattatagcat

SEQ ID NO: 116929 - DNA, 25 bp, Probe sequence
attatagcatatttttggaaacaat

SEQ ID NO: 116930 - DNA, 25 bp, Probe sequence
agcaatttattgttctatgttttat

SEQ ID NO: 116931 - DNA, 25 bp, Probe sequence
aactaattcataataccgtatgttt

SEQ ID NO: 116932 - DNA, 25 bp, Probe sequence
aagatgagccataattgtaaaacta

SEQ ID NO: 116933 - DNA, 25 bp, Probe sequence
aagtcgttacatttatagcaatttt

SEQ ID NO: 116934 - DNA, 25 bp, Probe sequence
catgttacaagatggttttaataat

SEQ ID NO: 116935 - DNA, 25 bp, Probe sequence
gaaaatgctgattagtaggatataa

SEQ ID NO: 116936 - DNA, 25 bp, Probe sequence
gacgcaaagtcgttacatttatagc

SEQ ID NO: 116937 - DNA, 25 bp, Probe sequence
gttctatgttttatttgtatattta

SEQ ID NO: 116938 - DNA, 25 bp, Probe sequence
gtgtaacttattttacggcattata

SEQ ID NO: 116939 - DNA, 25 bp, Probe sequence
tcataataccgtatgttttattttt

SEQ ID NO: 116940 - DNA, 25 bp, Probe sequence
tattaacatcaacaaaacgtgtata

SEQ ID NO: 116941 - DNA, 25 bp, Probe sequence
tttattgttctatgttttatttgta

SEQ ID NO: 116942 - DNA, 25 bp, Probe sequence
atttatttagcataggtctttttgt

SEQ ID NO: 116943 - DNA, 25 bp, Probe sequence
atcgtcattacgaagatatcttccg

SEQ ID NO: 116944 - DNA, 25 bp, Probe sequence
atgaccgtataaatgattcgacact

SEQ ID NO: 116945 - DNA, 25 bp, Probe sequence
agctcaattgtataatcgaatttgt

SEQ ID NO: 116946 - DNA, 25 bp, Probe sequence
aacctatggcattttgtcagagggg

SEQ ID NO: 116947 - DNA, 25 bp, Probe sequence
ggcattttgtcagaggggagtaact

SEQ ID NO: 116948 - DNA, 25 bp, Probe sequence
gcttagtgagacctttgctatttat

SEQ ID NO: 116949 - DNA, 25 bp, Probe sequence
gcataggtctttttgtttgtactta

SEQ ID NO: 116950 - DNA, 25 bp, Probe sequence
gaataacctatggcattttgtcaga

SEQ ID NO: 116951 - DNA, 25 bp, Probe sequence
gacactttatcgtcattacgaagat

SEQ ID NO: 116952 - DNA, 25 bp, Probe sequence
gatatcttccggtaaagtgggcaat

SEQ ID NO: 116953 - DNA, 25 bp, Probe sequence
gattcgacactttatcgtcattacg

SEQ ID NO: 116954 - DNA, 25 bp, Probe sequence
gtaacttaagaatcatgaccgtata

SEQ ID NO: 116955 - DNA, 25 bp, Probe sequence
gggagtaacttaagaatcatgaccg

SEQ ID NO: 116956 - DNA, 25 bp, Probe sequence
taaattgcttagtgagacctttgct

SEQ ID NO: 116957 - DNA, 25 bp, Probe sequence
attaggtgttaatgtgtcataatga

SEQ ID NO: 116958 - DNA, 25 bp, Probe sequence
aggtgttaatgtgtcataatgataa

SEQ ID NO: 116959 - DNA, 25 bp, Probe sequence
agtgattttattgaatggagtggac

SEQ ID NO: 116960 - DNA, 25 bp, Probe sequence
agcaaattaggtgttaatgtgtcat

SEQ ID NO: 116961 - DNA, 25 bp, Probe sequence
aaattaggtgttaatgtgtcataat

SEQ ID NO: 116962 - DNA, 25 bp, Probe sequence
aattaggtgttaatgtgtcataatg

SEQ ID NO: 116963 - DNA, 25 bp, Probe sequence
caaattaggtgttaatgtgtcataa

SEQ ID NO: 116964 - DNA, 25 bp, Probe sequence
gcaaattaggtgttaatgtgtcata

SEQ ID NO: 116965 - DNA, 25 bp, Probe sequence
gattttattgaatggagtggacatt

SEQ ID NO: 116966 - DNA, 25 bp, Probe sequence
gtgattttattgaatggagtggaca

SEQ ID NO: 116967 - DNA, 25 bp, Probe sequence
ggtgttaatgtgtcataatgataag

SEQ ID NO: 116968 - DNA, 25 bp, Probe sequence
tgtgtcataatgataagtgatttta

SEQ ID NO: 116969 - DNA, 25 bp, Probe sequence
tgattttattgaatggagtggacat

SEQ ID NO: 116970 - DNA, 25 bp, Probe sequence
taggtgttaatgtgtcataatgata

SEQ ID NO: 116971 - DNA, 25 bp, Probe sequence
ttaggtgttaatgtgtcataatgat

SEQ ID NO: 116972 - DNA, 25 bp, Probe sequence
atagcaatctaagtttagttaatat

SEQ ID NO: 116973 - DNA, 25 bp, Probe sequence
actggaacttagattgcttttttag

SEQ ID NO: 116974 - DNA, 25 bp, Probe sequence
aactagtaacaatgagaggtgtaac

SEQ ID NO: 116975 - DNA, 25 bp, Probe sequence
cttagattgcttttttagtttgtat

SEQ ID NO: 116976 - DNA, 25 bp, Probe sequence
ctggaacttagattgcttttttagt

SEQ ID NO: 116977 - DNA, 25 bp, Probe sequence
gaacttagattgcttttttagtttg

SEQ ID NO: 116978 - DNA, 25 bp, Probe sequence
gattttaactggaacttagattgct

SEQ ID NO: 116979 - DNA, 25 bp, Probe sequence
ggtaaactagtaacaatgagaggtg

SEQ ID NO: 116980 - DNA, 25 bp, Probe sequence
taatatagattttaactggaactta

SEQ ID NO: 116981 - DNA, 25 bp, Probe sequence
taactggaacttagattgctttttt

SEQ ID NO: 116982 - DNA, 25 bp, Probe sequence
taagacgattggttttcaaaatggt

SEQ ID NO: 116983 - DNA, 25 bp, Probe sequence
tataatagcaatctaagtttagtta

SEQ ID NO: 116984 - DNA, 25 bp, Probe sequence
tattttataagacgattggttttca

SEQ ID NO: 116985 - DNA, 25 bp, Probe sequence
ttttaactggaacttagattgcttt

SEQ ID NO: 116986 - DNA, 25 bp, Probe sequence
ttaactggaacttagattgcttttt

SEQ ID NO: 116987 - DNA, 25 bp, Probe sequence
agaacagtgaaattctcattcatta

SEQ ID NO: 116988 - DNA, 25 bp, Probe sequence
acagtgaaattctcattcattatat

SEQ ID NO: 116989 - DNA, 25 bp, Probe sequence
aaattctcattcattatatataagt

SEQ ID NO: 116990 - DNA, 25 bp, Probe sequence
aaacctttcttagagaagattatct

SEQ ID NO: 116991 - DNA, 25 bp, Probe sequence
aacagtgaaattctcattcattata

SEQ ID NO: 116992 - DNA, 25 bp, Probe sequence
aacctttcttagagaagattatcta

SEQ ID NO: 116993 - DNA, 25 bp, Probe sequence
aagaacagtgaaattctcattcatt

SEQ ID NO: 116994 - DNA, 25 bp, Probe sequence
aattctcattcattatatataagta

SEQ ID NO: 116995 - DNA, 25 bp, Probe sequence
cagtgaaattctcattcattatata

SEQ ID NO: 116996 - DNA, 25 bp, Probe sequence
gaacagtgaaattctcattcattat

SEQ ID NO: 116997 - DNA, 25 bp, Probe sequence
gaaattctcattcattatatataag

SEQ ID NO: 116998 - DNA, 25 bp, Probe sequence
gagaagattatctaggaaaggtttt

SEQ ID NO: 116999 - DNA, 25 bp, Probe sequence
gtgaaattctcattcattatatata

SEQ ID NO: 117000 - DNA, 25 bp, Probe sequence
taaattaattataagttcaacaagt

SEQ ID NO: 117001 - DNA, 25 bp, Probe sequence
tataaaaacctttcttagagaagat

SEQ ID NO: 117002 - DNA, 25 bp, Probe sequence
atttataaaacattccgcatatttt

SEQ ID NO: 117003 - DNA, 25 bp, Probe sequence
atgcagaacatttacactatattta

SEQ ID NO: 117004 - DNA, 25 bp, Probe sequence
atgtgtttgaatatcaagcacaaat

SEQ ID NO: 117005 - DNA, 25 bp, Probe sequence
actatatttataaaacattccgcat

SEQ ID NO: 117006 - DNA, 25 bp, Probe sequence
cagaacatttacactatatttataa

SEQ ID NO: 117007 - DNA, 25 bp, Probe sequence
ctatatttataaaacattccgcata

SEQ ID NO: 117008 - DNA, 25 bp, Probe sequence
gcagaacatttacactatatttata

SEQ ID NO: 117009 - DNA, 25 bp, Probe sequence
gataccttaaaaaaatatgcagaac

SEQ ID NO: 117010 - DNA, 25 bp, Probe sequence
tgcagaacatttacactatatttat

SEQ ID NO: 117011 - DNA, 25 bp, Probe sequence
taatttgcaatagataccttaaaaa

SEQ ID NO: 117012 - DNA, 25 bp, Probe sequence
tatgcagaacatttacactatattt

SEQ ID NO: 117013 - DNA, 25 bp, Probe sequence
tatcaagcacaaatattattataac

SEQ ID NO: 117014 - DNA, 25 bp, Probe sequence
tataaaacattccgcatattttaaa

SEQ ID NO: 117015 - DNA, 25 bp, Probe sequence
tatttataaaacattccgcatattt

SEQ ID NO: 117016 - DNA, 25 bp, Probe sequence
ttgtatgtgtttgaatatcaagcac

SEQ ID NO: 117017 - DNA, 25 bp, Probe sequence
acaataatttttaactaatagtcag

SEQ ID NO: 117018 - DNA, 25 bp, Probe sequence
aaaattctgagttgtcaagttatta

SEQ ID NO: 117019 - DNA, 25 bp, Probe sequence
aatagtcagaatattcattgatttc

SEQ ID NO: 117020 - DNA, 25 bp, Probe sequence
aattctgagttgtcaagttattatt

SEQ ID NO: 117021 - DNA, 25 bp, Probe sequence
ctgagttgtcaagttattattttgg

SEQ ID NO: 117022 - DNA, 25 bp, Probe sequence
gagttgtcaagttattattttggtg

SEQ ID NO: 117023 - DNA, 25 bp, Probe sequence
gttgtcaagttattattttggtgaa

SEQ ID NO: 117024 - DNA, 25 bp, Probe sequence
gtcaagttattattttggtgaaaat

SEQ ID NO: 117025 - DNA, 25 bp, Probe sequence
gtcagaatattcattgatttcaaaa

SEQ ID NO: 117026 - DNA, 25 bp, Probe sequence
tcagaatattcattgatttcaaaat

SEQ ID NO: 117027 - DNA, 25 bp, Probe sequence
taaaattctgagttgtcaagttatt

SEQ ID NO: 117028 - DNA, 25 bp, Probe sequence
tagtcagaatattcattgatttcaa

SEQ ID NO: 117029 - DNA, 25 bp, Probe sequence
tataataaaattctgagttgtcaag

SEQ ID NO: 117030 - DNA, 25 bp, Probe sequence
ttctgagttgtcaagttattatttt

SEQ ID NO: 117031 - DNA, 25 bp, Probe sequence
ttgtcaagttattattttggtgaaa

SEQ ID NO: 117032 - DNA, 25 bp, Probe sequence
attcgaattccataacgcaatcata

SEQ ID NO: 117033 - DNA, 25 bp, Probe sequence
attcttaacatctcatacatgtaag

SEQ ID NO: 117034 - DNA, 25 bp, Probe sequence
atctcatacatgtaagaatagtcct

SEQ ID NO: 117035 - DNA, 25 bp, Probe sequence
aggactattcttaacatctcataca

SEQ ID NO: 117036 - DNA, 25 bp, Probe sequence
aaaaggactattcttaacatctcat

SEQ ID NO: 117037 - DNA, 25 bp, Probe sequence
aacgcaatcataaaaggactattct

SEQ ID NO: 117038 - DNA, 25 bp, Probe sequence
aaggactattcttaacatctcatac

SEQ ID NO: 117039 - DNA, 25 bp, Probe sequence
catgtaagaatagtcctttaatcgt

SEQ ID NO: 117040 - DNA, 25 bp, Probe sequence
cattgattcgaattccataacgcaa

SEQ ID NO: 117041 - DNA, 25 bp, Probe sequence
ctattcttaacatctcatacatgta

SEQ ID NO: 117042 - DNA, 25 bp, Probe sequence
gaattccataacgcaatcataaaag

SEQ ID NO: 117043 - DNA, 25 bp, Probe sequence
gactattcttaacatctcatacatg

SEQ ID NO: 117044 - DNA, 25 bp, Probe sequence
ggactattcttaacatctcatacat

SEQ ID NO: 117045 - DNA, 25 bp, Probe sequence
tcgaattccataacgcaatcataaa

SEQ ID NO: 117046 - DNA, 25 bp, Probe sequence
ttgattcgaattccataacgcaatc

SEQ ID NO: 117047 - DNA, 25 bp, Probe sequence
attctctacttatttatgccttaac

SEQ ID NO: 117048 - DNA, 25 bp, Probe sequence
atttatgccttaactttgctcaaaa

SEQ ID NO: 117049 - DNA, 25 bp, Probe sequence
atatcggcttaaagttacattttat

SEQ ID NO: 117050 - DNA, 25 bp, Probe sequence
atctctcccttatatctatatatat

SEQ ID NO: 117051 - DNA, 25 bp, Probe sequence
agttacattttattatttttgattg

SEQ ID NO: 117052 - DNA, 25 bp, Probe sequence
acttatttatgccttaactttgctc

SEQ ID NO: 117053 - DNA, 25 bp, Probe sequence
aaatcattctaaatatcggcttaaa

SEQ ID NO: 117054 - DNA, 25 bp, Probe sequence
aactttgctcaaaatgccaattata

SEQ ID NO: 117055 - DNA, 25 bp, Probe sequence
aatgccaattatatactcacaaatc

SEQ ID NO: 117056 - DNA, 25 bp, Probe sequence
caatctctcccttatatctatatat

SEQ ID NO: 117057 - DNA, 25 bp, Probe sequence
tctctacttatttatgccttaactt

SEQ ID NO: 117058 - DNA, 25 bp, Probe sequence
tacaatctctcccttatatctatat

SEQ ID NO: 117059 - DNA, 25 bp, Probe sequence
tatctatatatattctctacttatt

SEQ ID NO: 117060 - DNA, 25 bp, Probe sequence
tatattctctacttatttatgcctt

SEQ ID NO: 117061 - DNA, 25 bp, Probe sequence
tatatactcacaaatcattctaaat

SEQ ID NO: 117062 - DNA, 25 bp, Probe sequence
atagtataatattttgtgggcaagt

SEQ ID NO: 117063 - DNA, 25 bp, Probe sequence
agtgtatacatttttaacggcaagc

SEQ ID NO: 117064 - DNA, 25 bp, Probe sequence
agacgtctgtgttctaagaaaagct

SEQ ID NO: 117065 - DNA, 25 bp, Probe sequence
aacggcaagcagttattattgaggt

SEQ ID NO: 117066 - DNA, 25 bp, Probe sequence
caaggcatgctttattatagtgtat

SEQ ID NO: 117067 - DNA, 25 bp, Probe sequence
cttttcttagacgtctgtgttctaa

SEQ ID NO: 117068 - DNA, 25 bp, Probe sequence
gcaatacgaagattcaaggcatgct

SEQ ID NO: 117069 - DNA, 25 bp, Probe sequence
gaagattcaaggcatgctttattat

SEQ ID NO: 117070 - DNA, 25 bp, Probe sequence
gtatacatttttaacggcaagcagt

SEQ ID NO: 117071 - DNA, 25 bp, Probe sequence
gtgttctaagaaaagctttttgctt

SEQ ID NO: 117072 - DNA, 25 bp, Probe sequence
gggcaagttgaattgatggtggcta

SEQ ID NO: 117073 - DNA, 25 bp, Probe sequence
ggcaagcagttattattgaggttat

SEQ ID NO: 117074 - DNA, 25 bp, Probe sequence
ggcatgctttattatagtgtataca

SEQ ID NO: 117075 - DNA, 25 bp, Probe sequence
tgaggttatattttagtcagttttt

SEQ ID NO: 117076 - DNA, 25 bp, Probe sequence
tatattttagtcagtttttattact

SEQ ID NO: 117077 - DNA, 25 bp, Probe sequence
attatgattatatggtagtacttat

SEQ ID NO: 117078 - DNA, 25 bp, Probe sequence
attttccgtatattgcctgctaaac

SEQ ID NO: 117079 - DNA, 25 bp, Probe sequence
ataagtgatttctattgaatatgta

SEQ ID NO: 117080 - DNA, 25 bp, Probe sequence
acatttttatagtaacatatctttt

SEQ ID NO: 117081 - DNA, 25 bp, Probe sequence
acatatcttttatttaattgtctat

SEQ ID NO: 117082 - DNA, 25 bp, Probe sequence
aacgggctcattaggcgacatgttc

SEQ ID NO: 117083 - DNA, 25 bp, Probe sequence
catgtcgtctttttacatttttata

SEQ ID NO: 117084 - DNA, 25 bp, Probe sequence
ctcattaggcgacatgttcctgcat

SEQ ID NO: 117085 - DNA, 25 bp, Probe sequence
ccgtatattgcctgctaaacatgtc

SEQ ID NO: 117086 - DNA, 25 bp, Probe sequence
gcctgctaaacatgtcagatttgaa

SEQ ID NO: 117087 - DNA, 25 bp, Probe sequence
gaagtattttccgtatattgcctgc

SEQ ID NO: 117088 - DNA, 25 bp, Probe sequence
gaaaggaaaatcatactgtggtaga

SEQ ID NO: 117089 - DNA, 25 bp, Probe sequence
gtctttttaacgggctcattaggcg

SEQ ID NO: 117090 - DNA, 25 bp, Probe sequence
ggctcattaggcgacatgttcctgc

SEQ ID NO: 117091 - DNA, 25 bp, Probe sequence
tattgcctgctaaacatgtcagatt

SEQ ID NO: 117092 - DNA, 25 bp, Probe sequence
atttatgcactgcgcaatttaacaa

SEQ ID NO: 117093 - DNA, 25 bp, Probe sequence
atacaattatactttgatgtccatt

SEQ ID NO: 117094 - DNA, 25 bp, Probe sequence
atgtcgtctatttatgcactgcgca

SEQ ID NO: 117095 - DNA, 25 bp, Probe sequence
acaattatactttgatgtccattta

SEQ ID NO: 117096 - DNA, 25 bp, Probe sequence
aattatactttgatgtccatttaac

SEQ ID NO: 117097 - DNA, 25 bp, Probe sequence
catgtcgtctatttatgcactgcgc

SEQ ID NO: 117098 - DNA, 25 bp, Probe sequence
gtctatttatgcactgcgcaattta

SEQ ID NO: 117099 - DNA, 25 bp, Probe sequence
gtcgtctatttatgcactgcgcaat

SEQ ID NO: 117100 - DNA, 25 bp, Probe sequence
ggttcaataggggacatgttcctgc

SEQ ID NO: 117101 - DNA, 25 bp, Probe sequence
tgtcgtctatttatgcactgcgcaa

SEQ ID NO: 117102 - DNA, 25 bp, Probe sequence
tcctgcatgtcgtctatttatgcac

SEQ ID NO: 117103 - DNA, 25 bp, Probe sequence
tcgtctatttatgcactgcgcaatt

SEQ ID NO: 117104 - DNA, 25 bp, Probe sequence
tatgcactgcgcaatttaacaataa

SEQ ID NO: 117105 - DNA, 25 bp, Probe sequence
tttaacgggttcaataggggacatg

SEQ ID NO: 117106 - DNA, 25 bp, Probe sequence
ttcaataggggacatgttcctgcat

SEQ ID NO: 117107 - DNA, 25 bp, Probe sequence
actccgtttgattggcttttataat

SEQ ID NO: 117108 - DNA, 25 bp, Probe sequence
acttcaacactccgtttgattggct

SEQ ID NO: 117109 - DNA, 25 bp, Probe sequence
aaaagccaatcaatgggaaatgttg

SEQ ID NO: 117110 - DNA, 25 bp, Probe sequence
aacactccgtttgattggcttttat

SEQ ID NO: 117111 - DNA, 25 bp, Probe sequence
caacactccgtttgattggctttta

SEQ ID NO: 117112 - DNA, 25 bp, Probe sequence
cactccgtttgattggcttttataa

SEQ ID NO: 117113 - DNA, 25 bp, Probe sequence
gacttcaacactccgtttgattggc

SEQ ID NO: 117114 - DNA, 25 bp, Probe sequence
gttgacttcaacactccgtttgatt

SEQ ID NO: 117115 - DNA, 25 bp, Probe sequence
gattggcttttataatgtgttacta

SEQ ID NO: 117116 - DNA, 25 bp, Probe sequence
ggaaatgttgacttcaacactccgt

SEQ ID NO: 117117 - DNA, 25 bp, Probe sequence
tgttgacttcaacactccgtttgat

SEQ ID NO: 117118 - DNA, 25 bp, Probe sequence
tccgtttgattggcttttataatgt

SEQ ID NO: 117119 - DNA, 25 bp, Probe sequence
ttcaacactccgtttgattggcttt

SEQ ID NO: 117120 - DNA, 25 bp, Probe sequence
ttgacttcaacactccgtttgattg

SEQ ID NO: 117121 - DNA, 25 bp, Probe sequence
ttggcttttataatgtgttactaag

SEQ ID NO: 117122 - DNA, 25 bp, Probe sequence
attgtgcggtagaagaatttgaaat

SEQ ID NO: 117123 - DNA, 25 bp, Probe sequence
aaattgtgcggtagaagaatttgaa

SEQ ID NO: 117124 - DNA, 25 bp, Probe sequence
aaattaaattgtgcggtagaagaat

SEQ ID NO: 117125 - DNA, 25 bp, Probe sequence
aaattgaattggcttgattaaaagg

SEQ ID NO: 117126 - DNA, 25 bp, Probe sequence
aaatacatcatacaataaaattaaa

SEQ ID NO: 117127 - DNA, 25 bp, Probe sequence
aattgtgcggtagaagaatttgaaa

SEQ ID NO: 117128 - DNA, 25 bp, Probe sequence
aattaaattgtgcggtagaagaatt

SEQ ID NO: 117129 - DNA, 25 bp, Probe sequence
cattttaaatacatcatacaataaa

SEQ ID NO: 117130 - DNA, 25 bp, Probe sequence
tgtgcggtagaagaatttgaaatta

SEQ ID NO: 117131 - DNA, 25 bp, Probe sequence
tcattttaaatacatcatacaataa

SEQ ID NO: 117132 - DNA, 25 bp, Probe sequence
taaaattaaattgtgcggtagaaga

SEQ ID NO: 117133 - DNA, 25 bp, Probe sequence
taaatacatcatacaataaaattaa

SEQ ID NO: 117134 - DNA, 25 bp, Probe sequence
taaattgtgcggtagaagaatttga

SEQ ID NO: 117135 - DNA, 25 bp, Probe sequence
ttaaatacatcatacaataaaatta

SEQ ID NO: 117136 - DNA, 25 bp, Probe sequence
ttgtgcggtagaagaatttgaaatt

SEQ ID NO: 117137 - DNA, 25 bp, Probe sequence
attgcatcgctatttatgaatcgta

SEQ ID NO: 117138 - DNA, 25 bp, Probe sequence
atagcataccaaatatatcataaac

SEQ ID NO: 117139 - DNA, 25 bp, Probe sequence
aatgcagttttctattaaagttgtt

SEQ ID NO: 117140 - DNA, 25 bp, Probe sequence
aattagaggccatttgctgtttata

SEQ ID NO: 117141 - DNA, 25 bp, Probe sequence
catgtcacctccaacattcatattt

SEQ ID NO: 117142 - DNA, 25 bp, Probe sequence
gaattaactattgcatcgctattta

SEQ ID NO: 117143 - DNA, 25 bp, Probe sequence
gaaattgcgagagtagtatggataa

SEQ ID NO: 117144 - DNA, 25 bp, Probe sequence
gagtattattaaccagtgcgtcatc

SEQ ID NO: 117145 - DNA, 25 bp, Probe sequence
gaggccatttgctgtttataataag

SEQ ID NO: 117146 - DNA, 25 bp, Probe sequence
gtcatcagttactttttgtatttat

SEQ ID NO: 117147 - DNA, 25 bp, Probe sequence
gtgcgtcatcttcaaaattagaggc

SEQ ID NO: 117148 - DNA, 25 bp, Probe sequence
tcacctccaacattcatatttttaa

SEQ ID NO: 117149 - DNA, 25 bp, Probe sequence
taaagattagtacagcatagtgcaa

SEQ ID NO: 117150 - DNA, 25 bp, Probe sequence
tatgaatcgtaaacactattatgaa

SEQ ID NO: 117151 - DNA, 25 bp, Probe sequence
ttaaccagtgcgtcatcttcaaaat

SEQ ID NO: 117152 - DNA, 25 bp, Probe sequence
atatcttacgaactatatacccatt

SEQ ID NO: 117153 - DNA, 25 bp, Probe sequence
atacccattcatatatgctttttaa

SEQ ID NO: 117154 - DNA, 25 bp, Probe sequence
atcttacgaactatatacccattca

SEQ ID NO: 117155 - DNA, 25 bp, Probe sequence
acccattcatatatgctttttaaac

SEQ ID NO: 117156 - DNA, 25 bp, Probe sequence
acgaactatatacccattcatatat

SEQ ID NO: 117157 - DNA, 25 bp, Probe sequence
actatatacccattcatatatgctt

SEQ ID NO: 117158 - DNA, 25 bp, Probe sequence
cttacgaactatatacccattcata

SEQ ID NO: 117159 - DNA, 25 bp, Probe sequence
gctttttaaacgtcattgtcacaat

SEQ ID NO: 117160 - DNA, 25 bp, Probe sequence
gaactatatacccattcatatatgc

SEQ ID NO: 117161 - DNA, 25 bp, Probe sequence
tgctttttaaacgtcattgtcacaa

SEQ ID NO: 117162 - DNA, 25 bp, Probe sequence
tatgctttttaaacgtcattgtcac

SEQ ID NO: 117163 - DNA, 25 bp, Probe sequence
tatacccattcatatatgcttttta

SEQ ID NO: 117164 - DNA, 25 bp, Probe sequence
tatatgctttttaaacgtcattgtc

SEQ ID NO: 117165 - DNA, 25 bp, Probe sequence
ttacgaactatatacccattcatat

SEQ ID NO: 117166 - DNA, 25 bp, Probe sequence
ttctctatatcttacgaactatata

SEQ ID NO: 117167 - DNA, 25 bp, Probe sequence
atatctttttaaaataagctagaat

SEQ ID NO: 117168 - DNA, 25 bp, Probe sequence
ataagctagaatttctatataataa

SEQ ID NO: 117169 - DNA, 25 bp, Probe sequence
agtatatctttttaaaataagctag

SEQ ID NO: 117170 - DNA, 25 bp, Probe sequence
aaataagctagaatttctatataat

SEQ ID NO: 117171 - DNA, 25 bp, Probe sequence
aataagctagaatttctatataata

SEQ ID NO: 117172 - DNA, 25 bp, Probe sequence
gctagaatttctatataataaatgt

SEQ ID NO: 117173 - DNA, 25 bp, Probe sequence
gtatatctttttaaaataagctaga

SEQ ID NO: 117174 - DNA, 25 bp, Probe sequence
taagtatatctttttaaaataagct

SEQ ID NO: 117175 - DNA, 25 bp, Probe sequence
taacgtaaaagggaatgatgacata

SEQ ID NO: 117176 - DNA, 25 bp, Probe sequence
tatctttttaaaataagctagaatt

SEQ ID NO: 117177 - DNA, 25 bp, Probe sequence
tatatctttttaaaataagctagaa

SEQ ID NO: 117178 - DNA, 25 bp, Probe sequence
tttaaaataagctagaatttctata

SEQ ID NO: 117179 - DNA, 25 bp, Probe sequence
agtcgattgccgagtagtatcattt

SEQ ID NO: 117180 - DNA, 25 bp, Probe sequence
aaactcgacagttcgatgtaagtcg

SEQ ID NO: 117181 - DNA, 25 bp, Probe sequence
aaaactcgacagttcgatgtaagtc

SEQ ID NO: 117182 - DNA, 25 bp, Probe sequence
aagtcgattgccgagtagtatcatt

SEQ ID NO: 117183 - DNA, 25 bp, Probe sequence
cagttcgatgtaagtcgattgccga

SEQ ID NO: 117184 - DNA, 25 bp, Probe sequence
cgattgccgagtagtatcattttct

SEQ ID NO: 117185 - DNA, 25 bp, Probe sequence
cgatgtaagtcgattgccgagtagt

SEQ ID NO: 117186 - DNA, 25 bp, Probe sequence
gacagttcgatgtaagtcgattgcc

SEQ ID NO: 117187 - DNA, 25 bp, Probe sequence
gatgtaagtcgattgccgagtagta

SEQ ID NO: 117188 - DNA, 25 bp, Probe sequence
gattgccgagtagtatcattttcta

SEQ ID NO: 117189 - DNA, 25 bp, Probe sequence
gttcgatgtaagtcgattgccgagt

SEQ ID NO: 117190 - DNA, 25 bp, Probe sequence
gtaagtcgattgccgagtagtatca

SEQ ID NO: 117191 - DNA, 25 bp, Probe sequence
gtcgattgccgagtagtatcatttt

SEQ ID NO: 117192 - DNA, 25 bp, Probe sequence
tgtaagtcgattgccgagtagtatc

SEQ ID NO: 117193 - DNA, 25 bp, Probe sequence
tcgattgccgagtagtatcattttc

SEQ ID NO: 117194 - DNA, 25 bp, Probe sequence
atagaaagtagcataaaggtcaatt

SEQ ID NO: 117195 - DNA, 25 bp, Probe sequence
atacaaaacctctttaaatcatatt

SEQ ID NO: 117196 - DNA, 25 bp, Probe sequence
agtttaagcaattcttgtaacacaa

SEQ ID NO: 117197 - DNA, 25 bp, Probe sequence
aagcaattcttgtaacacaattatc

SEQ ID NO: 117198 - DNA, 25 bp, Probe sequence
aagtttaagcaattcttgtaacaca

SEQ ID NO: 117199 - DNA, 25 bp, Probe sequence
aatacaaaacctctttaaatcatat

SEQ ID NO: 117200 - DNA, 25 bp, Probe sequence
aattcttgtaacacaattatccaaa

SEQ ID NO: 117201 - DNA, 25 bp, Probe sequence
gcaattcttgtaacacaattatcca

SEQ ID NO: 117202 - DNA, 25 bp, Probe sequence
gaatacaaaacctctttaaatcata

SEQ ID NO: 117203 - DNA, 25 bp, Probe sequence
gacgtgaaaaattgcaagataagtt

SEQ ID NO: 117204 - DNA, 25 bp, Probe sequence
gataagtttaagcaattcttgtaac

SEQ ID NO: 117205 - DNA, 25 bp, Probe sequence
gtttaagcaattcttgtaacacaat

SEQ ID NO: 117206 - DNA, 25 bp, Probe sequence
tgtaacacaattatccaaaaatgat

SEQ ID NO: 117207 - DNA, 25 bp, Probe sequence
tcttgtaacacaattatccaaaaat

SEQ ID NO: 117208 - DNA, 25 bp, Probe sequence
tacaaaacctctttaaatcatattt

SEQ ID NO: 117209 - DNA, 25 bp, Probe sequence
attagcgacgataggtggctttttt

SEQ ID NO: 117210 - DNA, 25 bp, Probe sequence
attaagtcacttgcgtcgtttatta

SEQ ID NO: 117211 - DNA, 25 bp, Probe sequence
acttgcgtcgtttattagcgacgat

SEQ ID NO: 117212 - DNA, 25 bp, Probe sequence
aacgagctggtgagaaattgaattc

SEQ ID NO: 117213 - DNA, 25 bp, Probe sequence
aagtcacttgcgtcgtttattagcg

SEQ ID NO: 117214 - DNA, 25 bp, Probe sequence
caacccgctttatgaagtgaaatca

SEQ ID NO: 117215 - DNA, 25 bp, Probe sequence
gccaacccgctttatgaagtgaaat

SEQ ID NO: 117216 - DNA, 25 bp, Probe sequence
gcgacgataggtggcttttttattt

SEQ ID NO: 117217 - DNA, 25 bp, Probe sequence
gaatatgatattaagtcacttgcgt

SEQ ID NO: 117218 - DNA, 25 bp, Probe sequence
gagaaattgaattctcgccaacccg

SEQ ID NO: 117219 - DNA, 25 bp, Probe sequence
gatattaagtcacttgcgtcgttta

SEQ ID NO: 117220 - DNA, 25 bp, Probe sequence
gtcacttgcgtcgtttattagcgac

SEQ ID NO: 117221 - DNA, 25 bp, Probe sequence
tcgccaacccgctttatgaagtgaa

SEQ ID NO: 117222 - DNA, 25 bp, Probe sequence
taagtcacttgcgtcgtttattagc

SEQ ID NO: 117223 - DNA, 25 bp, Probe sequence
tacaatgaaaaaacgagctggtgag

SEQ ID NO: 117224 - DNA, 25 bp, Probe sequence
attttgcgttgctaagactttgctt

SEQ ID NO: 117225 - DNA, 25 bp, Probe sequence
atattttgcgttgctaagactttgc

SEQ ID NO: 117226 - DNA, 25 bp, Probe sequence
agactttgcttctatttactaaatc

SEQ ID NO: 117227 - DNA, 25 bp, Probe sequence
aaatattttgcgttgctaagacttt

SEQ ID NO: 117228 - DNA, 25 bp, Probe sequence
gcgttgctaagactttgcttctatt

SEQ ID NO: 117229 - DNA, 25 bp, Probe sequence
gctaagactttgcttctatttacta

SEQ ID NO: 117230 - DNA, 25 bp, Probe sequence
gactttgcttctatttactaaatct

SEQ ID NO: 117231 - DNA, 25 bp, Probe sequence
gttgctaagactttgcttctattta

SEQ ID NO: 117232 - DNA, 25 bp, Probe sequence
tgctaagactttgcttctatttact

SEQ ID NO: 117233 - DNA, 25 bp, Probe sequence
tgcgttgctaagactttgcttctat

SEQ ID NO: 117234 - DNA, 25 bp, Probe sequence
taataccctccatttaaatcaaaat

SEQ ID NO: 117235 - DNA, 25 bp, Probe sequence
taagactttgcttctatttactaaa

SEQ ID NO: 117236 - DNA, 25 bp, Probe sequence
tttgcgttgctaagactttgcttct

SEQ ID NO: 117237 - DNA, 25 bp, Probe sequence
tttgcttctatttactaaatctaaa

SEQ ID NO: 117238 - DNA, 25 bp, Probe sequence
ttgcgttgctaagactttgcttcta

SEQ ID NO: 117239 - DNA, 25 bp, Probe sequence
agttcacgacgtccagttcaacata

SEQ ID NO: 117240 - DNA, 25 bp, Probe sequence
agttagcatattaaaaccttttgat

SEQ ID NO: 117241 - DNA, 25 bp, Probe sequence
aaaactgaacgtactatgaatttag

SEQ ID NO: 117242 - DNA, 25 bp, Probe sequence
aactcggtagtatttacagtctcta

SEQ ID NO: 117243 - DNA, 25 bp, Probe sequence
cgacgtccagttcaacatatcattt

SEQ ID NO: 117244 - DNA, 25 bp, Probe sequence
gaatttagttcacgacgtccagttc

SEQ ID NO: 117245 - DNA, 25 bp, Probe sequence
gagtgcttaagtttcgaagaacaat

SEQ ID NO: 117246 - DNA, 25 bp, Probe sequence
gagtgaggtgtttaaaggagaggaa

SEQ ID NO: 117247 - DNA, 25 bp, Probe sequence
gataagatcgtcaattgtttgcatt

SEQ ID NO: 117248 - DNA, 25 bp, Probe sequence
gatagaatcattttgagtgaggtgt

SEQ ID NO: 117249 - DNA, 25 bp, Probe sequence
gtagtatttacagtctctatagagt

SEQ ID NO: 117250 - DNA, 25 bp, Probe sequence
ggtgatatattatttgagtgcttaa

SEQ ID NO: 117251 - DNA, 25 bp, Probe sequence
tcgtcaattgtttgcatttatctaa

SEQ ID NO: 117252 - DNA, 25 bp, Probe sequence
ttgtttggccaaaggtagattaata

SEQ ID NO: 117253 - DNA, 25 bp, Probe sequence
ttgtattatactttattcaattgag

SEQ ID NO: 117254 - DNA, 25 bp, Probe sequence
actgtagtaactacttttcaaaatg

SEQ ID NO: 117255 - DNA, 25 bp, Probe sequence
aagtggttacagttaatgtacttag

SEQ ID NO: 117256 - DNA, 25 bp, Probe sequence
aatacactgtagtaactacttttca

SEQ ID NO: 117257 - DNA, 25 bp, Probe sequence
aatatcataacatacttttaaacca

SEQ ID NO: 117258 - DNA, 25 bp, Probe sequence
gaaaaatgtctaaatacactgtagt

SEQ ID NO: 117259 - DNA, 25 bp, Probe sequence
gttaatgtacttagacactataaaa

SEQ ID NO: 117260 - DNA, 25 bp, Probe sequence
gtagtaactacttttcaaaatgaat

SEQ ID NO: 117261 - DNA, 25 bp, Probe sequence
gtctaaatacactgtagtaactact

SEQ ID NO: 117262 - DNA, 25 bp, Probe sequence
gtgacacctcaaatataaatcaaat

SEQ ID NO: 117263 - DNA, 25 bp, Probe sequence
ggttacagttaatgtacttagacac

SEQ ID NO: 117264 - DNA, 25 bp, Probe sequence
tgaataaagtggttacagttaatgt

SEQ ID NO: 117265 - DNA, 25 bp, Probe sequence
tacactgtagtaactacttttcaaa

SEQ ID NO: 117266 - DNA, 25 bp, Probe sequence
tacagttaatgtacttagacactat

SEQ ID NO: 117267 - DNA, 25 bp, Probe sequence
tatcataacatacttttaaaccaaa

SEQ ID NO: 117268 - DNA, 25 bp, Probe sequence
ttgtgacacctcaaatataaatcaa

SEQ ID NO: 117269 - DNA, 25 bp, Probe sequence
attagttatgcaacaaatttgtcta

SEQ ID NO: 117270 - DNA, 25 bp, Probe sequence
atttgtctattgtgtcgaatagtat

SEQ ID NO: 117271 - DNA, 25 bp, Probe sequence
ataatatgtagtggagtagatcaac

SEQ ID NO: 117272 - DNA, 25 bp, Probe sequence
atctcctttatgtccataagactct

SEQ ID NO: 117273 - DNA, 25 bp, Probe sequence
atgtccataagactcttactaattt

SEQ ID NO: 117274 - DNA, 25 bp, Probe sequence
acaaatttgtctattgtgtcgaata

SEQ ID NO: 117275 - DNA, 25 bp, Probe sequence
aagactcttactaatttattatatt

SEQ ID NO: 117276 - DNA, 25 bp, Probe sequence
ctttatgtccataagactcttacta

SEQ ID NO: 117277 - DNA, 25 bp, Probe sequence
ctcctttatgtccataagactctta

SEQ ID NO: 117278 - DNA, 25 bp, Probe sequence
gcaacaaatttgtctattgtgtcga

SEQ ID NO: 117279 - DNA, 25 bp, Probe sequence
taagactcttactaatttattatat

SEQ ID NO: 117280 - DNA, 25 bp, Probe sequence
tattatattttgtattagttatgca

SEQ ID NO: 117281 - DNA, 25 bp, Probe sequence
tattgtgtcgaatagtattgtaaaa

SEQ ID NO: 117282 - DNA, 25 bp, Probe sequence
ttatctcctttatgtccataagact

SEQ ID NO: 117283 - DNA, 25 bp, Probe sequence
ttatgtccataagactcttactaat

SEQ ID NO: 117284 - DNA, 25 bp, Probe sequence
atcaaaggtcatcccccatgattga

SEQ ID NO: 117285 - DNA, 25 bp, Probe sequence
aggtcatcccccatgattgatagtg

SEQ ID NO: 117286 - DNA, 25 bp, Probe sequence
acttttgatcctatgttcatgttgc

SEQ ID NO: 117287 - DNA, 25 bp, Probe sequence
aagggatcaaaggtcatcccccatg

SEQ ID NO: 117288 - DNA, 25 bp, Probe sequence
aaggtcatcccccatgattgatagt

SEQ ID NO: 117289 - DNA, 25 bp, Probe sequence
caaaggtcatcccccatgattgata

SEQ ID NO: 117290 - DNA, 25 bp, Probe sequence
gggatcaaaggtcatcccccatgat

SEQ ID NO: 117291 - DNA, 25 bp, Probe sequence
gtcatcccccatgattgatagtggg

SEQ ID NO: 117292 - DNA, 25 bp, Probe sequence
gtgggggatgacttttgatcctatg

SEQ ID NO: 117293 - DNA, 25 bp, Probe sequence
gggggatgacttttgatcctatgtt

SEQ ID NO: 117294 - DNA, 25 bp, Probe sequence
ggtcatcccccatgattgatagtgg

SEQ ID NO: 117295 - DNA, 25 bp, Probe sequence
ggatgacttttgatcctatgttcat

SEQ ID NO: 117296 - DNA, 25 bp, Probe sequence
tgatagtgggggatgacttttgatc

SEQ ID NO: 117297 - DNA, 25 bp, Probe sequence
tgacttttgatcctatgttcatgtt

SEQ ID NO: 117298 - DNA, 25 bp, Probe sequence
tcaaaggtcatcccccatgattgat

SEQ ID NO: 117299 - DNA, 25 bp, Probe sequence
atatacctgtgcgtatttaaccaat

SEQ ID NO: 117300 - DNA, 25 bp, Probe sequence
atggtgacgtgacaaatcaaataga

SEQ ID NO: 117301 - DNA, 25 bp, Probe sequence
acctgtgcgtatttaaccaatttgt

SEQ ID NO: 117302 - DNA, 25 bp, Probe sequence
acctgttttatatacctgtgcgtat

SEQ ID NO: 117303 - DNA, 25 bp, Probe sequence
actaacattatagtacctgttttat

SEQ ID NO: 117304 - DNA, 25 bp, Probe sequence
gaattggtttattacaaatgtttct

SEQ ID NO: 117305 - DNA, 25 bp, Probe sequence
gaatctcaatggtgacgtgacaaat

SEQ ID NO: 117306 - DNA, 25 bp, Probe sequence
gtacctgttttatatacctgtgcgt

SEQ ID NO: 117307 - DNA, 25 bp, Probe sequence
tgtgcgtatttaaccaatttgtaat

SEQ ID NO: 117308 - DNA, 25 bp, Probe sequence
tctatttattactcctaacatttat

SEQ ID NO: 117309 - DNA, 25 bp, Probe sequence
tactcttaatttacattttcactgt

SEQ ID NO: 117310 - DNA, 25 bp, Probe sequence
tatactcttaatttacattttcact

SEQ ID NO: 117311 - DNA, 25 bp, Probe sequence
ttttgaatctcaatggtgacgtgac

SEQ ID NO: 117312 - DNA, 25 bp, Probe sequence
ttactcctaacatttattaattatt

SEQ ID NO: 117313 - DNA, 25 bp, Probe sequence
ttaaccaatttgtaatatactctta

SEQ ID NO: 117314 - DNA, 25 bp, Probe sequence
attcctccacatcctaacaaaatca

SEQ ID NO: 117315 - DNA, 25 bp, Probe sequence
atcatctttatagctaattaattat

SEQ ID NO: 117316 - DNA, 25 bp, Probe sequence
atcatttacatttaatttactaata

SEQ ID NO: 117317 - DNA, 25 bp, Probe sequence
acatttaatttactaataataacat

SEQ ID NO: 117318 - DNA, 25 bp, Probe sequence
catttacatttaatttactaataat

SEQ ID NO: 117319 - DNA, 25 bp, Probe sequence
ctccacatcctaacaaaatcattta

SEQ ID NO: 117320 - DNA, 25 bp, Probe sequence
cctccacatcctaacaaaatcattt

SEQ ID NO: 117321 - DNA, 25 bp, Probe sequence
gaataacgattgttattttcctcaa

SEQ ID NO: 117322 - DNA, 25 bp, Probe sequence
gattgttattttcctcaaaaataat

SEQ ID NO: 117323 - DNA, 25 bp, Probe sequence
tgattcacaagaatcatctttatag

SEQ ID NO: 117324 - DNA, 25 bp, Probe sequence
tcctccacatcctaacaaaatcatt

SEQ ID NO: 117325 - DNA, 25 bp, Probe sequence
tcatttacatttaatttactaataa

SEQ ID NO: 117326 - DNA, 25 bp, Probe sequence
tttcctcaaaaataattagacataa

SEQ ID NO: 117327 - DNA, 25 bp, Probe sequence
ttttcctcaaaaataattagacata

SEQ ID NO: 117328 - DNA, 25 bp, Probe sequence
ttcctccacatcctaacaaaatcat

SEQ ID NO: 117329 - DNA, 25 bp, Probe sequence
attcgagtgatttatacaaagtgat

SEQ ID NO: 117330 - DNA, 25 bp, Probe sequence
aaatgttatgtcaaagttccttgta

SEQ ID NO: 117331 - DNA, 25 bp, Probe sequence
aaggcgtaatataaattcgagtgat

SEQ ID NO: 117332 - DNA, 25 bp, Probe sequence
aatgcgactttagtatgatgtctta

SEQ ID NO: 117333 - DNA, 25 bp, Probe sequence
gaatacattgtgaggcaattatcaa

SEQ ID NO: 117334 - DNA, 25 bp, Probe sequence
gaaaaacttattactatgtagcgta

SEQ ID NO: 117335 - DNA, 25 bp, Probe sequence
gatgctcctatattaaatttttgtt

SEQ ID NO: 117336 - DNA, 25 bp, Probe sequence
gatatttatacaacttcattactaa

SEQ ID NO: 117337 - DNA, 25 bp, Probe sequence
gattgatgctcctatattaaatttt

SEQ ID NO: 117338 - DNA, 25 bp, Probe sequence
gttccttgtaatttgaatgttttgt

SEQ ID NO: 117339 - DNA, 25 bp, Probe sequence
gttatgtcaaagttccttgtaattt

SEQ ID NO: 117340 - DNA, 25 bp, Probe sequence
gtaagttgtattattaggcatctag

SEQ ID NO: 117341 - DNA, 25 bp, Probe sequence
tcattactaatacattatagcctta

SEQ ID NO: 117342 - DNA, 25 bp, Probe sequence
taggcatctaggttcaaatttttaa

SEQ ID NO: 117343 - DNA, 25 bp, Probe sequence
ttatagccttaaattgtagtacttt

SEQ ID NO: 117344 - DNA, 25 bp, Probe sequence
acgttggtccatgcgtggtgtgaat

SEQ ID NO: 117345 - DNA, 25 bp, Probe sequence
aaggcatcgaccttatctgaccagt

SEQ ID NO: 117346 - DNA, 25 bp, Probe sequence
cagtatacgagttatatcttttttt

SEQ ID NO: 117347 - DNA, 25 bp, Probe sequence
catcgaccttatctgaccagtatac

SEQ ID NO: 117348 - DNA, 25 bp, Probe sequence
catttggtgagttggcatcagacta

SEQ ID NO: 117349 - DNA, 25 bp, Probe sequence
gcgtggtgtgaatgttttctaaatc

SEQ ID NO: 117350 - DNA, 25 bp, Probe sequence
gaagacgaatacgttggtccatgcg

SEQ ID NO: 117351 - DNA, 25 bp, Probe sequence
gaatacgttggtccatgcgtggtgt

SEQ ID NO: 117352 - DNA, 25 bp, Probe sequence
gaccttatctgaccagtatacgagt

SEQ ID NO: 117353 - DNA, 25 bp, Probe sequence
gtatatggcattaaggcatcgacct

SEQ ID NO: 117354 - DNA, 25 bp, Probe sequence
gtccatgcgtggtgtgaatgttttc

SEQ ID NO: 117355 - DNA, 25 bp, Probe sequence
gtgaatgttttctaaatctaactgg

SEQ ID NO: 117356 - DNA, 25 bp, Probe sequence
ggggaaatcatttggtgagttggca

SEQ ID NO: 117357 - DNA, 25 bp, Probe sequence
ggtgagttggcatcagactaaaatg

SEQ ID NO: 117358 - DNA, 25 bp, Probe sequence
ttatctgaccagtatacgagttata

SEQ ID NO: 117359 - DNA, 25 bp, Probe sequence
agtgttagctggttaaactttacat

SEQ ID NO: 117360 - DNA, 25 bp, Probe sequence
acctagggataattttattgacgtg

SEQ ID NO: 117361 - DNA, 25 bp, Probe sequence
aattttattgacgtgaacaacattg

SEQ ID NO: 117362 - DNA, 25 bp, Probe sequence
caacattgagattatctttagacat

SEQ ID NO: 117363 - DNA, 25 bp, Probe sequence
ctatatttattagttgtggttgtta

SEQ ID NO: 117364 - DNA, 25 bp, Probe sequence
gaagttactatatttattagttgtg

SEQ ID NO: 117365 - DNA, 25 bp, Probe sequence
gacgtgaacaacattgagattatct

SEQ ID NO: 117366 - DNA, 25 bp, Probe sequence
gatatagaaggggacttaaccattt

SEQ ID NO: 117367 - DNA, 25 bp, Probe sequence
gttagctggttaaactttacattat

SEQ ID NO: 117368 - DNA, 25 bp, Probe sequence
gtgaacaacattgagattatcttta

SEQ ID NO: 117369 - DNA, 25 bp, Probe sequence
gtgttagctggttaaactttacatt

SEQ ID NO: 117370 - DNA, 25 bp, Probe sequence
ggataattttattgacgtgaacaac

SEQ ID NO: 117371 - DNA, 25 bp, Probe sequence
tgaattgattataatgattgtctta

SEQ ID NO: 117372 - DNA, 25 bp, Probe sequence
tagctggttaaactttacattatta

SEQ ID NO: 117373 - DNA, 25 bp, Probe sequence
tagttgtggttgttaatgtattaat

SEQ ID NO: 117374 - DNA, 25 bp, Probe sequence
attacacaatatttacaagggctta

SEQ ID NO: 117375 - DNA, 25 bp, Probe sequence
attatgtgtacattttgtgactaat

SEQ ID NO: 117376 - DNA, 25 bp, Probe sequence
agcgtttttgaaaaaattgcttcat

SEQ ID NO: 117377 - DNA, 25 bp, Probe sequence
actacaaatgtagggcttaacatta

SEQ ID NO: 117378 - DNA, 25 bp, Probe sequence
aaagttgagaatagctttcaattaa

SEQ ID NO: 117379 - DNA, 25 bp, Probe sequence
caatatttacaagggcttatgggaa

SEQ ID NO: 117380 - DNA, 25 bp, Probe sequence
gacgtgggttcacacatttgttaaa

SEQ ID NO: 117381 - DNA, 25 bp, Probe sequence
gtacattttgtgactaatagcgttt

SEQ ID NO: 117382 - DNA, 25 bp, Probe sequence
gtgacgtgggttcacacatttgtta

SEQ ID NO: 117383 - DNA, 25 bp, Probe sequence
gtgggttcacacatttgttaaaatt

SEQ ID NO: 117384 - DNA, 25 bp, Probe sequence
ggttcacacatttgttaaaattatg

SEQ ID NO: 117385 - DNA, 25 bp, Probe sequence
tgtgactaatagcgtttttgaaaaa

SEQ ID NO: 117386 - DNA, 25 bp, Probe sequence
tgacctcctaatactacaaatgtag

SEQ ID NO: 117387 - DNA, 25 bp, Probe sequence
taaatcaaggtgtgacgtgggttca

SEQ ID NO: 117388 - DNA, 25 bp, Probe sequence
tttttgacctcctaatactacaaat

SEQ ID NO: 117389 - DNA, 25 bp, Probe sequence
atttaggttaaagttgcagatgaag

SEQ ID NO: 117390 - DNA, 25 bp, Probe sequence
atttgataggtagtcctttggtata

SEQ ID NO: 117391 - DNA, 25 bp, Probe sequence
ataggtagtcctttggtatacagaa

SEQ ID NO: 117392 - DNA, 25 bp, Probe sequence
tgataggtagtcctttggtatacag

SEQ ID NO: 117393 - DNA, 25 bp, Probe sequence
gataggtagtcctttggtatacaga

SEQ ID NO: 117394 - DNA, 25 bp, Probe sequence
gttgcagatgaagttggaataacaa

SEQ ID NO: 117395 - DNA, 25 bp, Probe sequence
ggttaaagttgcagatgaagttgga

SEQ ID NO: 117396 - DNA, 25 bp, Probe sequence
taatttgataggtagtcctttggta

SEQ ID NO: 117397 - DNA, 25 bp, Probe sequence
taaagttgcagatgaagttggaata

SEQ ID NO: 117398 - DNA, 25 bp, Probe sequence
taggtagtcctttggtatacagaaa

SEQ ID NO: 117399 - DNA, 25 bp, Probe sequence
tagtcctttggtatacagaaaaaat

SEQ ID NO: 117400 - DNA, 25 bp, Probe sequence
tttgataggtagtcctttggtatac

SEQ ID NO: 117401 - DNA, 25 bp, Probe sequence
ttaataatttgataggtagtccttt

SEQ ID NO: 117402 - DNA, 25 bp, Probe sequence
ttaggttaaagttgcagatgaagtt

SEQ ID NO: 117403 - DNA, 25 bp, Probe sequence
ttgataggtagtcctttggtataca

SEQ ID NO: 117404 - DNA, 25 bp, Probe sequence
attattttgaaaatctgccacaatt

SEQ ID NO: 117405 - DNA, 25 bp, Probe sequence
atttacacatcatactatagtccta

SEQ ID NO: 117406 - DNA, 25 bp, Probe sequence
atagtcctaatcttaccctataaag

SEQ ID NO: 117407 - DNA, 25 bp, Probe sequence
atactatagtcctaatcttacccta

SEQ ID NO: 117408 - DNA, 25 bp, Probe sequence
aatgtaacctccgaatgataagtca

SEQ ID NO: 117409 - DNA, 25 bp, Probe sequence
aatttatattatttacacatcatac

SEQ ID NO: 117410 - DNA, 25 bp, Probe sequence
gctttactataccttaatttatatt

SEQ ID NO: 117411 - DNA, 25 bp, Probe sequence
gaaaatctgccacaattgtaaaatt

SEQ ID NO: 117412 - DNA, 25 bp, Probe sequence
gagttagctttactataccttaatt

SEQ ID NO: 117413 - DNA, 25 bp, Probe sequence
gataagtcatttctgagttagcttt

SEQ ID NO: 117414 - DNA, 25 bp, Probe sequence
gtcatttctgagttagctttactat

SEQ ID NO: 117415 - DNA, 25 bp, Probe sequence
gtcctaatcttaccctataaagaat

SEQ ID NO: 117416 - DNA, 25 bp, Probe sequence
tacacatcatactatagtcctaatc

SEQ ID NO: 117417 - DNA, 25 bp, Probe sequence
ttagctttactataccttaatttat

SEQ ID NO: 117418 - DNA, 25 bp, Probe sequence
ttctgagttagctttactatacctt

SEQ ID NO: 117419 - DNA, 25 bp, Probe sequence
atttgatcgattaatgtcccaggtt

SEQ ID NO: 117420 - DNA, 25 bp, Probe sequence
aaagccttcatttattcaatgtcta

SEQ ID NO: 117421 - DNA, 25 bp, Probe sequence
aagaacaaagtgaaatgctcccttc

SEQ ID NO: 117422 - DNA, 25 bp, Probe sequence
ctcccttcaaagccttcatttattc

SEQ ID NO: 117423 - DNA, 25 bp, Probe sequence
cccttcaaagccttcatttattcaa

SEQ ID NO: 117424 - DNA, 25 bp, Probe sequence
ccaggtttttcttgttattcattgc

SEQ ID NO: 117425 - DNA, 25 bp, Probe sequence
gccttcatttattcaatgtctactt

SEQ ID NO: 117426 - DNA, 25 bp, Probe sequence
gatcgattaatgtcccaggtttttc

SEQ ID NO: 117427 - DNA, 25 bp, Probe sequence
gattaatgtcccaggtttttcttgt

SEQ ID NO: 117428 - DNA, 25 bp, Probe sequence
gttcattaaaactcagttattaggg

SEQ ID NO: 117429 - DNA, 25 bp, Probe sequence
gtcccaggtttttcttgttattcat

SEQ ID NO: 117430 - DNA, 25 bp, Probe sequence
ggtttttcttgttattcattgcaat

SEQ ID NO: 117431 - DNA, 25 bp, Probe sequence
tcttgttattcattgcaattgcaaa

SEQ ID NO: 117432 - DNA, 25 bp, Probe sequence
taatgtcccaggtttttcttgttat

SEQ ID NO: 117433 - DNA, 25 bp, Probe sequence
ttgaagggagcatttgatcgattaa

SEQ ID NO: 117434 - DNA, 25 bp, Probe sequence
attgtcaatatcctaactttgttag

SEQ ID NO: 117435 - DNA, 25 bp, Probe sequence
atacaactaaagtaattcacaattc

SEQ ID NO: 117436 - DNA, 25 bp, Probe sequence
atgctatatctataatatacaacta

SEQ ID NO: 117437 - DNA, 25 bp, Probe sequence
agttcgatttttgattgaaaaagca

SEQ ID NO: 117438 - DNA, 25 bp, Probe sequence
aaattgcttgttatgctatatctat

SEQ ID NO: 117439 - DNA, 25 bp, Probe sequence
aactaatttacatagcaaaagacgt

SEQ ID NO: 117440 - DNA, 25 bp, Probe sequence
aagtaattcacaattcaaacttttg

SEQ ID NO: 117441 - DNA, 25 bp, Probe sequence
caatatcctaactttgttagtttat

SEQ ID NO: 117442 - DNA, 25 bp, Probe sequence
cttctcctcctattgtcaatatcct

SEQ ID NO: 117443 - DNA, 25 bp, Probe sequence
ctattgtcaatatcctaactttgtt

SEQ ID NO: 117444 - DNA, 25 bp, Probe sequence
ctcctcctattgtcaatatcctaac

SEQ ID NO: 117445 - DNA, 25 bp, Probe sequence
gaaattgcttgttatgctatatcta

SEQ ID NO: 117446 - DNA, 25 bp, Probe sequence
tcctattgtcaatatcctaactttg

SEQ ID NO: 117447 - DNA, 25 bp, Probe sequence
tagcaaaagacgtaaattcaaacaa

SEQ ID NO: 117448 - DNA, 25 bp, Probe sequence
ttctcctcctattgtcaatatccta

SEQ ID NO: 117449 - DNA, 25 bp, Probe sequence
acatgtttgtggcacctcttttgtt

SEQ ID NO: 117450 - DNA, 25 bp, Probe sequence
aaataacatgtttgtggcacctctt

SEQ ID NO: 117451 - DNA, 25 bp, Probe sequence
aagaggcgccacaacatgtttggat

SEQ ID NO: 117452 - DNA, 25 bp, Probe sequence
aatggttttctttttctatacaatg

SEQ ID NO: 117453 - DNA, 25 bp, Probe sequence
catagcttttttagttgtagagtct

SEQ ID NO: 117454 - DNA, 25 bp, Probe sequence
gcacctcttttgtttagtatggaat

SEQ ID NO: 117455 - DNA, 25 bp, Probe sequence
gaatttctaatttagtatctataca

SEQ ID NO: 117456 - DNA, 25 bp, Probe sequence
gacattgatttctgtaccaaatttg

SEQ ID NO: 117457 - DNA, 25 bp, Probe sequence
gtaccaaatttgtgattatgcatat

SEQ ID NO: 117458 - DNA, 25 bp, Probe sequence
gtaatacaaaagaggcgccacaaca

SEQ ID NO: 117459 - DNA, 25 bp, Probe sequence
gtggcacctcttttgtttagtatgg

SEQ ID NO: 117460 - DNA, 25 bp, Probe sequence
ggcgccacaacatgtttggatgaac

SEQ ID NO: 117461 - DNA, 25 bp, Probe sequence
tctaggacattgatttctgtaccaa

SEQ ID NO: 117462 - DNA, 25 bp, Probe sequence
taacgatagttttttttcatagctt

SEQ ID NO: 117463 - DNA, 25 bp, Probe sequence
tttgtggcacctcttttgtttagta

SEQ ID NO: 117464 - DNA, 25 bp, Probe sequence
agctagatcaggttcaaagggtttg

SEQ ID NO: 117465 - DNA, 25 bp, Probe sequence
acccctagtgtgtgcgatttattta

SEQ ID NO: 117466 - DNA, 25 bp, Probe sequence
acactttcctacgctagttcaagct

SEQ ID NO: 117467 - DNA, 25 bp, Probe sequence
acttatgtcaataggttgtcttcat

SEQ ID NO: 117468 - DNA, 25 bp, Probe sequence
aaacgcacaaccatccataggaaag

SEQ ID NO: 117469 - DNA, 25 bp, Probe sequence
aaaaaaacgcacaaccatccatagg

SEQ ID NO: 117470 - DNA, 25 bp, Probe sequence
aaaacacccctagtgtgtgcgattt

SEQ ID NO: 117471 - DNA, 25 bp, Probe sequence
gcctcatctcagtataaaacacccc

SEQ ID NO: 117472 - DNA, 25 bp, Probe sequence
gaaagttatgcgttcacaatatata

SEQ ID NO: 117473 - DNA, 25 bp, Probe sequence
gtatagtaacactttcctacgctag

SEQ ID NO: 117474 - DNA, 25 bp, Probe sequence
gtaagacgtttgtaaacttatgtca

SEQ ID NO: 117475 - DNA, 25 bp, Probe sequence
gggtttgagggcaagcctcatctca

SEQ ID NO: 117476 - DNA, 25 bp, Probe sequence
ggttgtcttcatgaaatttcgttta

SEQ ID NO: 117477 - DNA, 25 bp, Probe sequence
tacatcctcctaataaaaaaacgca

SEQ ID NO: 117478 - DNA, 25 bp, Probe sequence
tagttcaagctagatcaggttcaaa

SEQ ID NO: 117479 - DNA, 25 bp, Probe sequence
attcctcccaaattggataattatt

SEQ ID NO: 117480 - DNA, 25 bp, Probe sequence
atatataatgattttgaggtgaaca

SEQ ID NO: 117481 - DNA, 25 bp, Probe sequence
atagcactatttattcatttatcta

SEQ ID NO: 117482 - DNA, 25 bp, Probe sequence
agcactatttattcatttatctaaa

SEQ ID NO: 117483 - DNA, 25 bp, Probe sequence
aaagacaacaacattagattaatat

SEQ ID NO: 117484 - DNA, 25 bp, Probe sequence
aacttttctaagtctatagcactat

SEQ ID NO: 117485 - DNA, 25 bp, Probe sequence
aagtctatagcactatttattcatt

SEQ ID NO: 117486 - DNA, 25 bp, Probe sequence
ctatagcactatttattcatttatc

SEQ ID NO: 117487 - DNA, 25 bp, Probe sequence
gattaattcctcccaaattggataa

SEQ ID NO: 117488 - DNA, 25 bp, Probe sequence
tcgttaaacttttctaagtctatag

SEQ ID NO: 117489 - DNA, 25 bp, Probe sequence
taattcctcccaaattggataatta

SEQ ID NO: 117490 - DNA, 25 bp, Probe sequence
tatataaatcttacccggttgtact

SEQ ID NO: 117491 - DNA, 25 bp, Probe sequence
tatatataaatcttacccggttgta

SEQ ID NO: 117492 - DNA, 25 bp, Probe sequence
ttttctaagtctatagcactattta

SEQ ID NO: 117493 - DNA, 25 bp, Probe sequence
ttcatttatctaaagacaacaacat

SEQ ID NO: 117494 - DNA, 25 bp, Probe sequence
acaggtcaatgaagtttatggatag

SEQ ID NO: 117495 - DNA, 25 bp, Probe sequence
aacattttgatgtgtacgctataag

SEQ ID NO: 117496 - DNA, 25 bp, Probe sequence
aacatatatcattcgaattactaat

SEQ ID NO: 117497 - DNA, 25 bp, Probe sequence
aacgatatatagtatttcctttgta

SEQ ID NO: 117498 - DNA, 25 bp, Probe sequence
aagtactatctattaaacattttga

SEQ ID NO: 117499 - DNA, 25 bp, Probe sequence
ctaacttatttagatacaggtcaat

SEQ ID NO: 117500 - DNA, 25 bp, Probe sequence
gcgacatatggaatttgcgaaacga

SEQ ID NO: 117501 - DNA, 25 bp, Probe sequence
gaaaagttatccatttgtaaaatca

SEQ ID NO: 117502 - DNA, 25 bp, Probe sequence
gatttgattgattcaggtgatgtga

SEQ ID NO: 117503 - DNA, 25 bp, Probe sequence
gtacgctataagttagatatatctc

SEQ ID NO: 117504 - DNA, 25 bp, Probe sequence
gtaaatagttgaagcgacatatgga

SEQ ID NO: 117505 - DNA, 25 bp, Probe sequence
tatggatagtactttttttgtaact

SEQ ID NO: 117506 - DNA, 25 bp, Probe sequence
tataaaactacaacgaaacacagaa

SEQ ID NO: 117507 - DNA, 25 bp, Probe sequence
tttggcaaacaatttaatctatata

SEQ ID NO: 117508 - DNA, 25 bp, Probe sequence
ttgtaactagatttgattgattcag

SEQ ID NO: 117509 - DNA, 25 bp, Probe sequence
attgaagattctaactatacgaagg

SEQ ID NO: 117510 - DNA, 25 bp, Probe sequence
aagcatggttttggtaaagttaatg

SEQ ID NO: 117511 - DNA, 25 bp, Probe sequence
aagattctaactatacgaaggagaa

SEQ ID NO: 117512 - DNA, 25 bp, Probe sequence
aatattgaagattctaactatacga

SEQ ID NO: 117513 - DNA, 25 bp, Probe sequence
gctataatagttttgcaatttgcaa

SEQ ID NO: 117514 - DNA, 25 bp, Probe sequence
gcatggttttggtaaagttaatgta

SEQ ID NO: 117515 - DNA, 25 bp, Probe sequence
gaagattctaactatacgaaggaga

SEQ ID NO: 117516 - DNA, 25 bp, Probe sequence
gattctaactatacgaaggagaaat

SEQ ID NO: 117517 - DNA, 25 bp, Probe sequence
gtgctataatagttttgcaatttgc

SEQ ID NO: 117518 - DNA, 25 bp, Probe sequence
tgaagattctaactatacgaaggag

SEQ ID NO: 117519 - DNA, 25 bp, Probe sequence
tgaatttaaagcatggttttggtaa

SEQ ID NO: 117520 - DNA, 25 bp, Probe sequence
tgctataatagttttgcaatttgca

SEQ ID NO: 117521 - DNA, 25 bp, Probe sequence
tattgaagattctaactatacgaag

SEQ ID NO: 117522 - DNA, 25 bp, Probe sequence
ttgcaatttgcaaattttactgaaa

SEQ ID NO: 117523 - DNA, 25 bp, Probe sequence
ttgaagattctaactatacgaagga

SEQ ID NO: 117524 - DNA, 25 bp, Probe sequence
atttcaatggaatgttgttgctaac

SEQ ID NO: 117525 - DNA, 25 bp, Probe sequence
atgatgaagttgatttagatgaaaa

SEQ ID NO: 117526 - DNA, 25 bp, Probe sequence
acccgaagtattcattgtgagtaat

SEQ ID NO: 117527 - DNA, 25 bp, Probe sequence
acaaaatgttgttctttaattaatg

SEQ ID NO: 117528 - DNA, 25 bp, Probe sequence
aatggaatgttgttgctaactaatt

SEQ ID NO: 117529 - DNA, 25 bp, Probe sequence
gctaactaattaaacaactatgtgt

SEQ ID NO: 117530 - DNA, 25 bp, Probe sequence
gaatgttgttgctaactaattaaac

SEQ ID NO: 117531 - DNA, 25 bp, Probe sequence
gacagaattataaataaacccgaag

SEQ ID NO: 117532 - DNA, 25 bp, Probe sequence
gatagctataaatgatgaagttgat

SEQ ID NO: 117533 - DNA, 25 bp, Probe sequence
gtgagtaattatgaatacttcgggt

SEQ ID NO: 117534 - DNA, 25 bp, Probe sequence
tgttgttctttaattaatgttagtt

SEQ ID NO: 117535 - DNA, 25 bp, Probe sequence
tgaatacttcgggttcttttttatg

SEQ ID NO: 117536 - DNA, 25 bp, Probe sequence
taaacaactatgtgtcattaacaaa

SEQ ID NO: 117537 - DNA, 25 bp, Probe sequence
tatgatttatgttaatttcaatgga

SEQ ID NO: 117538 - DNA, 25 bp, Probe sequence
ttcgggttcttttttatgatttatg

SEQ ID NO: 117539 - DNA, 25 bp, Probe sequence
attatacacaatttcatagcgcata

SEQ ID NO: 117540 - DNA, 25 bp, Probe sequence
atttcatagcgcataatgttttaaa

SEQ ID NO: 117541 - DNA, 25 bp, Probe sequence
acacaatttcatagcgcataatgtt

SEQ ID NO: 117542 - DNA, 25 bp, Probe sequence
aaaaatacacattatagcaattata

SEQ ID NO: 117543 - DNA, 25 bp, Probe sequence
aagttcattgtgttgtcatcaaaaa

SEQ ID NO: 117544 - DNA, 25 bp, Probe sequence
aattaagttcattgtgttgtcatca

SEQ ID NO: 117545 - DNA, 25 bp, Probe sequence
ctccttcgtgctttattctaatgta

SEQ ID NO: 117546 - DNA, 25 bp, Probe sequence
ccttcgtgctttattctaatgtaat

SEQ ID NO: 117547 - DNA, 25 bp, Probe sequence
gctttattctaatgtaatatacaca

SEQ ID NO: 117548 - DNA, 25 bp, Probe sequence
gaacacattgtgaactgacataaat

SEQ ID NO: 117549 - DNA, 25 bp, Probe sequence
gaaattcaaatttgtgaacacattg

SEQ ID NO: 117550 - DNA, 25 bp, Probe sequence
gttcattgtgttgtcatcaaaaaaa

SEQ ID NO: 117551 - DNA, 25 bp, Probe sequence
gtgaactgacataaattatacacaa

SEQ ID NO: 117552 - DNA, 25 bp, Probe sequence
tacacaattatacattgaaattcaa

SEQ ID NO: 117553 - DNA, 25 bp, Probe sequence
tatacacaatttcatagcgcataat

SEQ ID NO: 117554 - DNA, 25 bp, Probe sequence
ataccccaactttcatttacttgca

SEQ ID NO: 117555 - DNA, 25 bp, Probe sequence
accccaactttcatttacttgcatt

SEQ ID NO: 117556 - DNA, 25 bp, Probe sequence
actttcatttacttgcattactgca

SEQ ID NO: 117557 - DNA, 25 bp, Probe sequence
aactttcatttacttgcattactgc

SEQ ID NO: 117558 - DNA, 25 bp, Probe sequence
cgataccccaactttcatttacttg

SEQ ID NO: 117559 - DNA, 25 bp, Probe sequence
cccaactttcatttacttgcattac

SEQ ID NO: 117560 - DNA, 25 bp, Probe sequence
gcattactgcatttagataatttag

SEQ ID NO: 117561 - DNA, 25 bp, Probe sequence
gaaaatcatttaatggagggcgagt

SEQ ID NO: 117562 - DNA, 25 bp, Probe sequence
gataatttagttggggtactcattt

SEQ ID NO: 117563 - DNA, 25 bp, Probe sequence
gataccccaactttcatttacttgc

SEQ ID NO: 117564 - DNA, 25 bp, Probe sequence
gttggggtactcatttataataatt

SEQ ID NO: 117565 - DNA, 25 bp, Probe sequence
gttgagacgataccccaactttcat

SEQ ID NO: 117566 - DNA, 25 bp, Probe sequence
tcatttacttgcattactgcattta

SEQ ID NO: 117567 - DNA, 25 bp, Probe sequence
tttagttggggtactcatttataat

SEQ ID NO: 117568 - DNA, 25 bp, Probe sequence
ttacttgcattactgcatttagata

SEQ ID NO: 117569 - DNA, 25 bp, Probe sequence
agctactaacaatgggtggtgagtt

SEQ ID NO: 117570 - DNA, 25 bp, Probe sequence
acttcacttcaaagttagtagcttt

SEQ ID NO: 117571 - DNA, 25 bp, Probe sequence
aaagctactaacaatgggtggtgag

SEQ ID NO: 117572 - DNA, 25 bp, Probe sequence
aaacttcacttcaaagttagtagct

SEQ ID NO: 117573 - DNA, 25 bp, Probe sequence
aaaaagctactaacaatgggtggtg

SEQ ID NO: 117574 - DNA, 25 bp, Probe sequence
aaaagctactaacaatgggtggtga

SEQ ID NO: 117575 - DNA, 25 bp, Probe sequence
aagctactaacaatgggtggtgagt

SEQ ID NO: 117576 - DNA, 25 bp, Probe sequence
cacttcaaagttagtagctttttga

SEQ ID NO: 117577 - DNA, 25 bp, Probe sequence
cttcacttcaaagttagtagctttt

SEQ ID NO: 117578 - DNA, 25 bp, Probe sequence
gctactaacaatgggtggtgagttt

SEQ ID NO: 117579 - DNA, 25 bp, Probe sequence
gaaaaagctactaacaatgggtggt

SEQ ID NO: 117580 - DNA, 25 bp, Probe sequence
tcacttcaaagttagtagctttttg

SEQ ID NO: 117581 - DNA, 25 bp, Probe sequence
tcaagctcatcatatataaagaaaa

SEQ ID NO: 117582 - DNA, 25 bp, Probe sequence
taacaatgggtggtgagtttaatta

SEQ ID NO: 117583 - DNA, 25 bp, Probe sequence
tactaacaatgggtggtgagtttaa

SEQ ID NO: 117584 - DNA, 25 bp, Probe sequence
atttcagttaaatcttattttacat

SEQ ID NO: 117585 - DNA, 25 bp, Probe sequence
atcatatttatcctaagctttgata

SEQ ID NO: 117586 - DNA, 25 bp, Probe sequence
agtttatctcactagaaatctaagt

SEQ ID NO: 117587 - DNA, 25 bp, Probe sequence
agcagtttatctcactagaaatcta

SEQ ID NO: 117588 - DNA, 25 bp, Probe sequence
aaataaagcagtttatctcactaga

SEQ ID NO: 117589 - DNA, 25 bp, Probe sequence
aaatcttattttacatgatgaatga

SEQ ID NO: 117590 - DNA, 25 bp, Probe sequence
aaagcagtttatctcactagaaatc

SEQ ID NO: 117591 - DNA, 25 bp, Probe sequence
aaaagcttaggacatcatatttatc

SEQ ID NO: 117592 - DNA, 25 bp, Probe sequence
aatgtgcagttctatttattaaaat

SEQ ID NO: 117593 - DNA, 25 bp, Probe sequence
gaaaaagcttaggacatcatattta

SEQ ID NO: 117594 - DNA, 25 bp, Probe sequence
gacatcatatttatcctaagctttg

SEQ ID NO: 117595 - DNA, 25 bp, Probe sequence
tgtttattcgaaaaagttgtacaag

SEQ ID NO: 117596 - DNA, 25 bp, Probe sequence
gtatttcgaataaatgtgcagttct

SEQ ID NO: 117597 - DNA, 25 bp, Probe sequence
gtagaaaggtgaatatatttaactg

SEQ ID NO: 117598 - DNA, 25 bp, Probe sequence
tatcctaagctttgataattagtaa

SEQ ID NO: 117599 - DNA, 25 bp, Probe sequence
attgatttccaagcagattttattt

SEQ ID NO: 117600 - DNA, 25 bp, Probe sequence
aaatgacgtaactgtcaacagatat

SEQ ID NO: 117601 - DNA, 25 bp, Probe sequence
aaccaactactgccaatgtttattt

SEQ ID NO: 117602 - DNA, 25 bp, Probe sequence
aagttaaccaactactgccaatgtt

SEQ ID NO: 117603 - DNA, 25 bp, Probe sequence
aatgattaaagtgttggttccaagc

SEQ ID NO: 117604 - DNA, 25 bp, Probe sequence
ctgtcaacagatatacttagtaatg

SEQ ID NO: 117605 - DNA, 25 bp, Probe sequence
gcagattttatttatcatttaattt

SEQ ID NO: 117606 - DNA, 25 bp, Probe sequence
gaagatgtgtaatgtaattgtttaa

SEQ ID NO: 117607 - DNA, 25 bp, Probe sequence
gaaatttatttatcatcttgacttt

SEQ ID NO: 117608 - DNA, 25 bp, Probe sequence
gtgttggttccaagcaatgatactt

SEQ ID NO: 117609 - DNA, 25 bp, Probe sequence
ggttccaagcaatgatactttagaa

SEQ ID NO: 117610 - DNA, 25 bp, Probe sequence
tcagatatgctaattgcttaaaaaa

SEQ ID NO: 117611 - DNA, 25 bp, Probe sequence
taaatagcaagtggaggtacaagta

SEQ ID NO: 117612 - DNA, 25 bp, Probe sequence
taaatatctacaaagttaaccaact

SEQ ID NO: 117613 - DNA, 25 bp, Probe sequence
tactgccaatgtttattttagatag

SEQ ID NO: 117614 - DNA, 25 bp, Probe sequence
atttgtggtacaattagtaaggata

SEQ ID NO: 117615 - DNA, 25 bp, Probe sequence
atgaatttctatacaattatgggaa

SEQ ID NO: 117616 - DNA, 25 bp, Probe sequence
agtcccatttatttgtggtacaatt

SEQ ID NO: 117617 - DNA, 25 bp, Probe sequence
agttcctattatctgtatctttttt

SEQ ID NO: 117618 - DNA, 25 bp, Probe sequence
aacagtcccatttatttgtggtaca

SEQ ID NO: 117619 - DNA, 25 bp, Probe sequence
aactaatacagttcctattatctgt

SEQ ID NO: 117620 - DNA, 25 bp, Probe sequence
aatacagatggtaggaaacaactaa

SEQ ID NO: 117621 - DNA, 25 bp, Probe sequence
ctattatctgtatctttttttatta

SEQ ID NO: 117622 - DNA, 25 bp, Probe sequence
gaaacaactaatacagttcctatta

SEQ ID NO: 117623 - DNA, 25 bp, Probe sequence
gttcctattatctgtatcttttttt

SEQ ID NO: 117624 - DNA, 25 bp, Probe sequence
ggtttaacagtcccatttatttgtg

SEQ ID NO: 117625 - DNA, 25 bp, Probe sequence
tcctattatctgtatctttttttat

SEQ ID NO: 117626 - DNA, 25 bp, Probe sequence
tatgggaaaggtatggtgaattgaa

SEQ ID NO: 117627 - DNA, 25 bp, Probe sequence
ttttcaaatggtttaacagtcccat

SEQ ID NO: 117628 - DNA, 25 bp, Probe sequence
ttaacagtcccatttatttgtggta

SEQ ID NO: 117629 - DNA, 25 bp, Probe sequence
agttagcgtattttagtctcattga

SEQ ID NO: 117630 - DNA, 25 bp, Probe sequence
agcgtattttagtctcattgattaa

SEQ ID NO: 117631 - DNA, 25 bp, Probe sequence
acgaagttagcgtattttagtctca

SEQ ID NO: 117632 - DNA, 25 bp, Probe sequence
aagttagcgtattttagtctcattg

SEQ ID NO: 117633 - DNA, 25 bp, Probe sequence
cgtattttagtctcattgattaaaa

SEQ ID NO: 117634 - DNA, 25 bp, Probe sequence
cgaagttagcgtattttagtctcat

SEQ ID NO: 117635 - DNA, 25 bp, Probe sequence
gcgtattttagtctcattgattaaa

SEQ ID NO: 117636 - DNA, 25 bp, Probe sequence
gaagttagcgtattttagtctcatt

SEQ ID NO: 117637 - DNA, 25 bp, Probe sequence
gttagcgtattttagtctcattgat

SEQ ID NO: 117638 - DNA, 25 bp, Probe sequence
gtattttagtctcattgattaaaat

SEQ ID NO: 117639 - DNA, 25 bp, Probe sequence
tgaaatgtttaatttacgaaatctt

SEQ ID NO: 117640 - DNA, 25 bp, Probe sequence
taatttacgaaatcttaggagggca

SEQ ID NO: 117641 - DNA, 25 bp, Probe sequence
taacgaagttagcgtattttagtct

SEQ ID NO: 117642 - DNA, 25 bp, Probe sequence
tagcgtattttagtctcattgatta

SEQ ID NO: 117643 - DNA, 25 bp, Probe sequence
ttagcgtattttagtctcattgatt

SEQ ID NO: 117644 - DNA, 25 bp, Probe sequence
aaagctgtagcatatgctacggctt

SEQ ID NO: 117645 - DNA, 25 bp, Probe sequence
catatgctacggcttttttgtttta

SEQ ID NO: 117646 - DNA, 25 bp, Probe sequence
ctagcgatgctaacaaaagaattga

SEQ ID NO: 117647 - DNA, 25 bp, Probe sequence
gcatatgctacggcttttttgtttt

SEQ ID NO: 117648 - DNA, 25 bp, Probe sequence
gaaattgatttgagatatcgttaac

SEQ ID NO: 117649 - DNA, 25 bp, Probe sequence
gacatgcatgttatactagcgatgc

SEQ ID NO: 117650 - DNA, 25 bp, Probe sequence
gagatatcgttaacatgtgacatgc

SEQ ID NO: 117651 - DNA, 25 bp, Probe sequence
gatatcgttaacatgtgacatgcat

SEQ ID NO: 117652 - DNA, 25 bp, Probe sequence
gattatctataaagattcagtcatt

SEQ ID NO: 117653 - DNA, 25 bp, Probe sequence
gattcagtcattaaaagctgtagca

SEQ ID NO: 117654 - DNA, 25 bp, Probe sequence
gtagcatatgctacggcttttttgt

SEQ ID NO: 117655 - DNA, 25 bp, Probe sequence
gtgacatgcatgttatactagcgat

SEQ ID NO: 117656 - DNA, 25 bp, Probe sequence
tgcatgttatactagcgatgctaac

SEQ ID NO: 117657 - DNA, 25 bp, Probe sequence
tagcatatgctacggcttttttgtt

SEQ ID NO: 117658 - DNA, 25 bp, Probe sequence
tatgctacggcttttttgttttagg

SEQ ID NO: 117659 - DNA, 25 bp, Probe sequence
attttgatacctttatcaagtgtta

SEQ ID NO: 117660 - DNA, 25 bp, Probe sequence
atattttgatacctttatcaagtgt

SEQ ID NO: 117661 - DNA, 25 bp, Probe sequence
ataaagctatattttgataccttta

SEQ ID NO: 117662 - DNA, 25 bp, Probe sequence
agctatattttgatacctttatcaa

SEQ ID NO: 117663 - DNA, 25 bp, Probe sequence
aaagctatattttgatacctttatc

SEQ ID NO: 117664 - DNA, 25 bp, Probe sequence
aagctatattttgatacctttatca

SEQ ID NO: 117665 - DNA, 25 bp, Probe sequence
aataaagctatattttgataccttt

SEQ ID NO: 117666 - DNA, 25 bp, Probe sequence
ctatattttgatacctttatcaagt

SEQ ID NO: 117667 - DNA, 25 bp, Probe sequence
gctaataaagctatattttgatacc

SEQ ID NO: 117668 - DNA, 25 bp, Probe sequence
gctatattttgatacctttatcaag

SEQ ID NO: 117669 - DNA, 25 bp, Probe sequence
tcgttcgaaattaacacaatttaat

SEQ ID NO: 117670 - DNA, 25 bp, Probe sequence
taataaagctatattttgatacctt

SEQ ID NO: 117671 - DNA, 25 bp, Probe sequence
tattttgatacctttatcaagtgtt

SEQ ID NO: 117672 - DNA, 25 bp, Probe sequence
tttaaaactattgctaataaagcta

SEQ ID NO: 117673 - DNA, 25 bp, Probe sequence
ttttgatacctttatcaagtgttaa

SEQ ID NO: 117674 - DNA, 25 bp, Probe sequence
atagtagttatttactgtatattta

SEQ ID NO: 117675 - DNA, 25 bp, Probe sequence
ataacgggataagtactataaggag

SEQ ID NO: 117676 - DNA, 25 bp, Probe sequence
agttatttactgtatatttagttat

SEQ ID NO: 117677 - DNA, 25 bp, Probe sequence
acgggataagtactataaggagttg

SEQ ID NO: 117678 - DNA, 25 bp, Probe sequence
actgtatatttagttataataacgg

SEQ ID NO: 117679 - DNA, 25 bp, Probe sequence
aatagtagttatttactgtatattt

SEQ ID NO: 117680 - DNA, 25 bp, Probe sequence
gataagtactataaggagttgtaac

SEQ ID NO: 117681 - DNA, 25 bp, Probe sequence
gttatttactgtatatttagttata

SEQ ID NO: 117682 - DNA, 25 bp, Probe sequence
gtagttatttactgtatatttagtt

SEQ ID NO: 117683 - DNA, 25 bp, Probe sequence
gggataagtactataaggagttgta

SEQ ID NO: 117684 - DNA, 25 bp, Probe sequence
taataacgggataagtactataagg

SEQ ID NO: 117685 - DNA, 25 bp, Probe sequence
taacgggataagtactataaggagt

SEQ ID NO: 117686 - DNA, 25 bp, Probe sequence
taagtactataaggagttgtaacga

SEQ ID NO: 117687 - DNA, 25 bp, Probe sequence
tagttatttactgtatatttagtta

SEQ ID NO: 117688 - DNA, 25 bp, Probe sequence
tatttactgtatatttagttataat

SEQ ID NO: 117689 - DNA, 25 bp, Probe sequence
attaccatacacctaaattatcatc

SEQ ID NO: 117690 - DNA, 25 bp, Probe sequence
atattgatgatacccagattagtaa

SEQ ID NO: 117691 - DNA, 25 bp, Probe sequence
ataggctcgtagtatacttattaaa

SEQ ID NO: 117692 - DNA, 25 bp, Probe sequence
atgtgcgtatatctataggctcgta

SEQ ID NO: 117693 - DNA, 25 bp, Probe sequence
agtaatttaatgtgcgtatatctat

SEQ ID NO: 117694 - DNA, 25 bp, Probe sequence
agtagaggtcttttgcttattaatc

SEQ ID NO: 117695 - DNA, 25 bp, Probe sequence
aaattatcatcaatctgaattcaga

SEQ ID NO: 117696 - DNA, 25 bp, Probe sequence
gcgtatatctataggctcgtagtat

SEQ ID NO: 117697 - DNA, 25 bp, Probe sequence
gaggttaatcatcgataacgtttaa

SEQ ID NO: 117698 - DNA, 25 bp, Probe sequence
gatttctcattaccatacacctaaa

SEQ ID NO: 117699 - DNA, 25 bp, Probe sequence
ggtcttttgcttattaatctgggtt

SEQ ID NO: 117700 - DNA, 25 bp, Probe sequence
tgacgatttctcattaccatacacc

SEQ ID NO: 117701 - DNA, 25 bp, Probe sequence
taatctgggtttttatatgaggtta

SEQ ID NO: 117702 - DNA, 25 bp, Probe sequence
tacacctaaattatcatcaatctga

SEQ ID NO: 117703 - DNA, 25 bp, Probe sequence
tacccagattagtaagtagaggtct

SEQ ID NO: 117704 - DNA, 25 bp, Probe sequence
atgtgattacgtgctctattattta

SEQ ID NO: 117705 - DNA, 25 bp, Probe sequence
atggatgtgattacgtgctctatta

SEQ ID NO: 117706 - DNA, 25 bp, Probe sequence
acctctacttcttatggacaatata

SEQ ID NO: 117707 - DNA, 25 bp, Probe sequence
aaaaaagagcacgaaatcatggatg

SEQ ID NO: 117708 - DNA, 25 bp, Probe sequence
ctcacctctacttcttatggacaat

SEQ ID NO: 117709 - DNA, 25 bp, Probe sequence
ctctacttcttatggacaatataat

SEQ ID NO: 117710 - DNA, 25 bp, Probe sequence
gaattattatgttgaacgttcgatt

SEQ ID NO: 117711 - DNA, 25 bp, Probe sequence
gattacgtgctctattatttaaaca

SEQ ID NO: 117712 - DNA, 25 bp, Probe sequence
gttgaacgttcgatttaatattaag

SEQ ID NO: 117713 - DNA, 25 bp, Probe sequence
gtgctctattatttaaacaaagtta

SEQ ID NO: 117714 - DNA, 25 bp, Probe sequence
gtgattacgtgctctattatttaaa

SEQ ID NO: 117715 - DNA, 25 bp, Probe sequence
ggatgtgattacgtgctctattatt

SEQ ID NO: 117716 - DNA, 25 bp, Probe sequence
tcacctctacttcttatggacaata

SEQ ID NO: 117717 - DNA, 25 bp, Probe sequence
tcatggatgtgattacgtgctctat

SEQ ID NO: 117718 - DNA, 25 bp, Probe sequence
ttacgtgctctattatttaaacaaa

SEQ ID NO: 117719 - DNA, 25 bp, Probe sequence
attgcggcttaagacgctctcatta

SEQ ID NO: 117720 - DNA, 25 bp, Probe sequence
atcaattgcggcttaagacgctctc

SEQ ID NO: 117721 - DNA, 25 bp, Probe sequence
agagtacctcctgtatagtgtttaa

SEQ ID NO: 117722 - DNA, 25 bp, Probe sequence
aatattgtagcatatgttttatcaa

SEQ ID NO: 117723 - DNA, 25 bp, Probe sequence
aattgcggcttaagacgctctcatt

SEQ ID NO: 117724 - DNA, 25 bp, Probe sequence
caattgcggcttaagacgctctcat

SEQ ID NO: 117725 - DNA, 25 bp, Probe sequence
catatgttttatcaattgcggctta

SEQ ID NO: 117726 - DNA, 25 bp, Probe sequence
gcggcttaagacgctctcattaaaa

SEQ ID NO: 117727 - DNA, 25 bp, Probe sequence
gacgctctcattaaaattagtattt

SEQ ID NO: 117728 - DNA, 25 bp, Probe sequence
gagtacctcctgtatagtgtttaaa

SEQ ID NO: 117729 - DNA, 25 bp, Probe sequence
gttttatcaattgcggcttaagacg

SEQ ID NO: 117730 - DNA, 25 bp, Probe sequence
ggcttaagacgctctcattaaaatt

SEQ ID NO: 117731 - DNA, 25 bp, Probe sequence
tgcggcttaagacgctctcattaaa

SEQ ID NO: 117732 - DNA, 25 bp, Probe sequence
taagacgctctcattaaaattagta

SEQ ID NO: 117733 - DNA, 25 bp, Probe sequence
tacctcctgtatagtgtttaaaaat

SEQ ID NO: 117734 - DNA, 25 bp, Probe sequence
agcgtaatatgtagtcctaacaatt

SEQ ID NO: 117735 - DNA, 25 bp, Probe sequence
accaaaagcgtaatatgtagtccta

SEQ ID NO: 117736 - DNA, 25 bp, Probe sequence
acatgtgtggtcttaaatcaacgcg

SEQ ID NO: 117737 - DNA, 25 bp, Probe sequence
aaatcaacgcgtgttattgtcgata

SEQ ID NO: 117738 - DNA, 25 bp, Probe sequence
aaaacacgcgccaatataaaaccat

SEQ ID NO: 117739 - DNA, 25 bp, Probe sequence
aacacgcgccaatataaaaccattt

SEQ ID NO: 117740 - DNA, 25 bp, Probe sequence
cacgcgccaatataaaaccatttaa

SEQ ID NO: 117741 - DNA, 25 bp, Probe sequence
catattacgcttttataccttaaat

SEQ ID NO: 117742 - DNA, 25 bp, Probe sequence
gtagtcctaacaattaggtaacata

SEQ ID NO: 117743 - DNA, 25 bp, Probe sequence
gttcataatgaacatgtgtggtctt

SEQ ID NO: 117744 - DNA, 25 bp, Probe sequence
gtaacatattacgcttttatacctt

SEQ ID NO: 117745 - DNA, 25 bp, Probe sequence
gtggtcttaaatcaacgcgtgttat

SEQ ID NO: 117746 - DNA, 25 bp, Probe sequence
gtgtggtcttaaatcaacgcgtgtt

SEQ ID NO: 117747 - DNA, 25 bp, Probe sequence
tcaacgcgtgttattgtcgatataa

SEQ ID NO: 117748 - DNA, 25 bp, Probe sequence
taaataataaaaacacgcgccaata

SEQ ID NO: 117749 - DNA, 25 bp, Probe sequence
atcttttctcaattatatgatataa

SEQ ID NO: 117750 - DNA, 25 bp, Probe sequence
accttttgcttatcttttctcaatt

SEQ ID NO: 117751 - DNA, 25 bp, Probe sequence
caccttttgcttatcttttctcaat

SEQ ID NO: 117752 - DNA, 25 bp, Probe sequence
cttatcttttctcaattatatgata

SEQ ID NO: 117753 - DNA, 25 bp, Probe sequence
cttttgcttatcttttctcaattat

SEQ ID NO: 117754 - DNA, 25 bp, Probe sequence
ccttttgcttatcttttctcaatta

SEQ ID NO: 117755 - DNA, 25 bp, Probe sequence
gcttatcttttctcaattatatgat

SEQ ID NO: 117756 - DNA, 25 bp, Probe sequence
tgcttatcttttctcaattatatga

SEQ ID NO: 117757 - DNA, 25 bp, Probe sequence
tcttttctcaattatatgatataat

SEQ ID NO: 117758 - DNA, 25 bp, Probe sequence
tatcttttctcaattatatgatata

SEQ ID NO: 117759 - DNA, 25 bp, Probe sequence
tttgcttatcttttctcaattatat

SEQ ID NO: 117760 - DNA, 25 bp, Probe sequence
ttttgcttatcttttctcaattata

SEQ ID NO: 117761 - DNA, 25 bp, Probe sequence
ttatcttttctcaattatatgatat

SEQ ID NO: 117762 - DNA, 25 bp, Probe sequence
ttgcttatcttttctcaattatatg

SEQ ID NO: 117763 - DNA, 25 bp, Probe sequence
atctacttgctttttaatatttagt

SEQ ID NO: 117764 - DNA, 25 bp, Probe sequence
agaatttatatagagggggagcgtg

SEQ ID NO: 117765 - DNA, 25 bp, Probe sequence
aagacttgagaatttatatagaggg

SEQ ID NO: 117766 - DNA, 25 bp, Probe sequence
aatctacttgctttttaatatttag

SEQ ID NO: 117767 - DNA, 25 bp, Probe sequence
aatttatatagagggggagcgtgtc

SEQ ID NO: 117768 - DNA, 25 bp, Probe sequence
cttgctttttaatatttagtaagat

SEQ ID NO: 117769 - DNA, 25 bp, Probe sequence
gaatttatatagagggggagcgtgt

SEQ ID NO: 117770 - DNA, 25 bp, Probe sequence
gacttgagaatttatatagaggggg

SEQ ID NO: 117771 - DNA, 25 bp, Probe sequence
gagaatttatatagagggggagcgt

SEQ ID NO: 117772 - DNA, 25 bp, Probe sequence
gataaacttttagtaagacttgaga

SEQ ID NO: 117773 - DNA, 25 bp, Probe sequence
gtaagacttgagaatttatatagag

SEQ ID NO: 117774 - DNA, 25 bp, Probe sequence
tctacttgctttttaatatttagta

SEQ ID NO: 117775 - DNA, 25 bp, Probe sequence
taaacttttagtaagacttgagaat

SEQ ID NO: 117776 - DNA, 25 bp, Probe sequence
taaatctacttgctttttaatattt

SEQ ID NO: 117777 - DNA, 25 bp, Probe sequence
tacttgctttttaatatttagtaag

SEQ ID NO: 117778 - DNA, 25 bp, Probe sequence
aaattacctcaagagacctgttaat

SEQ ID NO: 117779 - DNA, 25 bp, Probe sequence
atatttgtgattatgactgtgtcat

SEQ ID NO: 117780 - DNA, 25 bp, Probe sequence
agtggctgttatgttgtcttcttga

SEQ ID NO: 117781 - DNA, 25 bp, Probe sequence
agatatcgacaattgagctgcgccg

SEQ ID NO: 117782 - DNA, 25 bp, Probe sequence
acaaatattctataaattacctcaa

SEQ ID NO: 117783 - DNA, 25 bp, Probe sequence
acaattgagctgcgccgattttata

SEQ ID NO: 117784 - DNA, 25 bp, Probe sequence
aaatggcgtgagatatcgacaattg

SEQ ID NO: 117785 - DNA, 25 bp, Probe sequence
aagagacctgttaatatttgtgatt

SEQ ID NO: 117786 - DNA, 25 bp, Probe sequence
cagtcacttttattgggttttagca

SEQ ID NO: 117787 - DNA, 25 bp, Probe sequence
gacatgtcagtcacttttattgggt

SEQ ID NO: 117788 - DNA, 25 bp, Probe sequence
gagctgcgccgattttatatttata

SEQ ID NO: 117789 - DNA, 25 bp, Probe sequence
gtcttcttgatgacatgtcagtcac

SEQ ID NO: 117790 - DNA, 25 bp, Probe sequence
gggttttagcaattcacgatattaa

SEQ ID NO: 117791 - DNA, 25 bp, Probe sequence
ggctgttatgttgtcttcttgatga

SEQ ID NO: 117792 - DNA, 25 bp, Probe sequence
taattactgattaaagtggctgtta

SEQ ID NO: 117793 - DNA, 25 bp, Probe sequence
atttagtacgagatgacttctgtca

SEQ ID NO: 117794 - DNA, 25 bp, Probe sequence
atgacttctgtcattaagcaatgct

SEQ ID NO: 117795 - DNA, 25 bp, Probe sequence
acgagatgacttctgtcattaagca

SEQ ID NO: 117796 - DNA, 25 bp, Probe sequence
gacttctgtcattaagcaatgctaa

SEQ ID NO: 117797 - DNA, 25 bp, Probe sequence
aagcaatgctaaacattggctattt

SEQ ID NO: 117798 - DNA, 25 bp, Probe sequence
aatgctaaacattggctatttatat

SEQ ID NO: 117799 - DNA, 25 bp, Probe sequence
aatactagccaatatttagtacgag

SEQ ID NO: 117800 - DNA, 25 bp, Probe sequence
cttctgtcattaagcaatgctaaac

SEQ ID NO: 117801 - DNA, 25 bp, Probe sequence
gagatgacttctgtcattaagcaat

SEQ ID NO: 117802 - DNA, 25 bp, Probe sequence
gtacgagatgacttctgtcattaag

SEQ ID NO: 117803 - DNA, 25 bp, Probe sequence
tgacttctgtcattaagcaatgcta

SEQ ID NO: 117804 - DNA, 25 bp, Probe sequence
tgctaaacattggctatttatatac

SEQ ID NO: 117805 - DNA, 25 bp, Probe sequence
tagccaatatttagtacgagatgac

SEQ ID NO: 117806 - DNA, 25 bp, Probe sequence
tagtacgagatgacttctgtcatta

SEQ ID NO: 117807 - DNA, 25 bp, Probe sequence
tttagtacgagatgacttctgtcat

SEQ ID NO: 117808 - DNA, 25 bp, Probe sequence
atagcaaaacagagcgctttaagat

SEQ ID NO: 117809 - DNA, 25 bp, Probe sequence
acgagattactcatgattatcaaat

SEQ ID NO: 117810 - DNA, 25 bp, Probe sequence
aaattactaaatgtggtggcgaaat

SEQ ID NO: 117811 - DNA, 25 bp, Probe sequence
aaaacgtgaactacctgttgttgca

SEQ ID NO: 117812 - DNA, 25 bp, Probe sequence
aattattatttctgaagcggaggtt

SEQ ID NO: 117813 - DNA, 25 bp, Probe sequence
gaagcggaggttttaattgtctcaa

SEQ ID NO: 117814 - DNA, 25 bp, Probe sequence
gaaatcgaaaatgtttcacaacaaa

SEQ ID NO: 117815 - DNA, 25 bp, Probe sequence
gatgttttgcaattttatttttaat

SEQ ID NO: 117816 - DNA, 25 bp, Probe sequence
gtgaactacctgttgttgcatagtc

SEQ ID NO: 117817 - DNA, 25 bp, Probe sequence
gtggtggcgaaattagaatcatgat

SEQ ID NO: 117818 - DNA, 25 bp, Probe sequence
ggttttaattgtctcaagaatgtta

SEQ ID NO: 117819 - DNA, 25 bp, Probe sequence
tgttgttgcatagtcatttttgaaa

SEQ ID NO: 117820 - DNA, 25 bp, Probe sequence
tcctttttgttttgatattacgaga

SEQ ID NO: 117821 - DNA, 25 bp, Probe sequence
taatagtttgaggagtgtatcgcta

SEQ ID NO: 117822 - DNA, 25 bp, Probe sequence
tacctgttgttgcatagtcattttt

SEQ ID NO: 117823 - DNA, 25 bp, Probe sequence
attgacgtgtaatctcgtttttaca

SEQ ID NO: 117824 - DNA, 25 bp, Probe sequence
atctcgtttttacatggcttaggtt

SEQ ID NO: 117825 - DNA, 25 bp, Probe sequence
acgagattacacaacaattgacgtg

SEQ ID NO: 117826 - DNA, 25 bp, Probe sequence
acgtgtaatctcgtttttacatggc

SEQ ID NO: 117827 - DNA, 25 bp, Probe sequence
acaacaattgacgtgtaatctcgtt

SEQ ID NO: 117828 - DNA, 25 bp, Probe sequence
aaacgagattacacaacaattgacg

SEQ ID NO: 117829 - DNA, 25 bp, Probe sequence
aacaattgacgtgtaatctcgtttt

SEQ ID NO: 117830 - DNA, 25 bp, Probe sequence
aatgggcgtgccattaaaattacgg

SEQ ID NO: 117831 - DNA, 25 bp, Probe sequence
aatctcgtttttacatggcttaggt

SEQ ID NO: 117832 - DNA, 25 bp, Probe sequence
caattgacgtgtaatctcgttttta

SEQ ID NO: 117833 - DNA, 25 bp, Probe sequence
ccgtaattttaatgggcgtgccatt

SEQ ID NO: 117834 - DNA, 25 bp, Probe sequence
gtgtaatctcgtttttacatggctt

SEQ ID NO: 117835 - DNA, 25 bp, Probe sequence
tgacgtgtaatctcgtttttacatg

SEQ ID NO: 117836 - DNA, 25 bp, Probe sequence
tctcgtttttacatggcttaggttt

SEQ ID NO: 117837 - DNA, 25 bp, Probe sequence
taatctcgtttttacatggcttagg

SEQ ID NO: 117838 - DNA, 25 bp, Probe sequence
atcgtaatgatttttttattgggat

SEQ ID NO: 117839 - DNA, 25 bp, Probe sequence
acctagtctttttatgcaatctaag

SEQ ID NO: 117840 - DNA, 25 bp, Probe sequence
acattttctcttgtcgttaatttgt

SEQ ID NO: 117841 - DNA, 25 bp, Probe sequence
aatctcttttagatgcatgattcta

SEQ ID NO: 117842 - DNA, 25 bp, Probe sequence
aattatgtaatccacgtttactcaa

SEQ ID NO: 117843 - DNA, 25 bp, Probe sequence
caaaattgacattttctcttgtcgt

SEQ ID NO: 117844 - DNA, 25 bp, Probe sequence
ctcttgtcgttaatttgtcacattt

SEQ ID NO: 117845 - DNA, 25 bp, Probe sequence
ccacgtttactcaaatttgaagctt

SEQ ID NO: 117846 - DNA, 25 bp, Probe sequence
gaagcttaaatattaatctctttta

SEQ ID NO: 117847 - DNA, 25 bp, Probe sequence
gatgcatgattctacttattaaaat

SEQ ID NO: 117848 - DNA, 25 bp, Probe sequence
gtcgttaatttgtcacattttaatt

SEQ ID NO: 117849 - DNA, 25 bp, Probe sequence
taatccacgtttactcaaatttgaa

SEQ ID NO: 117850 - DNA, 25 bp, Probe sequence
taaaattttctaacatatacattat

SEQ ID NO: 117851 - DNA, 25 bp, Probe sequence
tattaaacctagtctttttatgcaa

SEQ ID NO: 117852 - DNA, 25 bp, Probe sequence
ttttctcttgtcgttaatttgtcac

SEQ ID NO: 117853 - DNA, 25 bp, Probe sequence
attcatttgataccttaactgtcca

SEQ ID NO: 117854 - DNA, 25 bp, Probe sequence
attcaacctgaaaacataaagatag

SEQ ID NO: 117855 - DNA, 25 bp, Probe sequence
atttgataccttaactgtccatttt

SEQ ID NO: 117856 - DNA, 25 bp, Probe sequence
atagtcggacagttgatggtattca

SEQ ID NO: 117857 - DNA, 25 bp, Probe sequence
atgcttatacaaatgatactaatct

SEQ ID NO: 117858 - DNA, 25 bp, Probe sequence
cttaactgtccatttttttatacat

SEQ ID NO: 117859 - DNA, 25 bp, Probe sequence
gcaatttgttttatcaggttttttg

SEQ ID NO: 117860 - DNA, 25 bp, Probe sequence
gatactaatctgataaggcaatttg

SEQ ID NO: 117861 - DNA, 25 bp, Probe sequence
gtgtagggaaaatctttatgacgtt

SEQ ID NO: 117862 - DNA, 25 bp, Probe sequence
ggttatgatatagagtgtagggaaa

SEQ ID NO: 117863 - DNA, 25 bp, Probe sequence
ggttttttgatgaagaatagtcgga

SEQ ID NO: 117864 - DNA, 25 bp, Probe sequence
ggacagttgatggtattcatttgat

SEQ ID NO: 117865 - DNA, 25 bp, Probe sequence
tgataccttaactgtccattttttt

SEQ ID NO: 117866 - DNA, 25 bp, Probe sequence
tcatttgataccttaactgtccatt

SEQ ID NO: 117867 - DNA, 25 bp, Probe sequence
taaggcaatttgttttatcaggttt

SEQ ID NO: 117868 - DNA, 25 bp, Probe sequence
attgaaaccactaactagcatctga

SEQ ID NO: 117869 - DNA, 25 bp, Probe sequence
accactaactagcatctgactcgat

SEQ ID NO: 117870 - DNA, 25 bp, Probe sequence
actaactagcatctgactcgatgtt

SEQ ID NO: 117871 - DNA, 25 bp, Probe sequence
aaacatcgagtcagaaaaaggtggt

SEQ ID NO: 117872 - DNA, 25 bp, Probe sequence
aaaccactaactagcatctgactcg

SEQ ID NO: 117873 - DNA, 25 bp, Probe sequence
aaccactaactagcatctgactcga

SEQ ID NO: 117874 - DNA, 25 bp, Probe sequence
cactaactagcatctgactcgatgt

SEQ ID NO: 117875 - DNA, 25 bp, Probe sequence
ctaactagcatctgactcgatgttt

SEQ ID NO: 117876 - DNA, 25 bp, Probe sequence
ccactaactagcatctgactcgatg

SEQ ID NO: 117877 - DNA, 25 bp, Probe sequence
gaaaccactaactagcatctgactc

SEQ ID NO: 117878 - DNA, 25 bp, Probe sequence
ggttattgaaaccactaactagcat

SEQ ID NO: 117879 - DNA, 25 bp, Probe sequence
tcgagtcagaaaaaggtggttattg

SEQ ID NO: 117880 - DNA, 25 bp, Probe sequence
tgaaaccactaactagcatctgact

SEQ ID NO: 117881 - DNA, 25 bp, Probe sequence
tattgaaaccactaactagcatctg

SEQ ID NO: 117882 - DNA, 25 bp, Probe sequence
ttgaaaccactaactagcatctgac

SEQ ID NO: 117883 - DNA, 25 bp, Probe sequence
atagtgatgctcttgagaattgaat

SEQ ID NO: 117884 - DNA, 25 bp, Probe sequence
atagttctgactacagcgaaatgtg

SEQ ID NO: 117885 - DNA, 25 bp, Probe sequence
atcatatagtgatgctcttgagaat

SEQ ID NO: 117886 - DNA, 25 bp, Probe sequence
agcttaacaaaatcatagttctgac

SEQ ID NO: 117887 - DNA, 25 bp, Probe sequence
aaatcatagttctgactacagcgaa

SEQ ID NO: 117888 - DNA, 25 bp, Probe sequence
aagacatgatatgattaatgctgaa

SEQ ID NO: 117889 - DNA, 25 bp, Probe sequence
aatacatttatcgagcaattacata

SEQ ID NO: 117890 - DNA, 25 bp, Probe sequence
gactacagcgaaatgtgtggttaat

SEQ ID NO: 117891 - DNA, 25 bp, Probe sequence
gatgctcttgagaattgaattaata

SEQ ID NO: 117892 - DNA, 25 bp, Probe sequence
ggttaatcatatagtgatgctcttg

SEQ ID NO: 117893 - DNA, 25 bp, Probe sequence
tcctcctcgtttacttttatagctt

SEQ ID NO: 117894 - DNA, 25 bp, Probe sequence
tacagcgaaatgtgtggttaatcat

SEQ ID NO: 117895 - DNA, 25 bp, Probe sequence
tatcgagcaattacataagacataa

SEQ ID NO: 117896 - DNA, 25 bp, Probe sequence
ttctgactacagcgaaatgtgtggt

SEQ ID NO: 117897 - DNA, 25 bp, Probe sequence
ttcctcctcgtttacttttatagct

SEQ ID NO: 117898 - DNA, 25 bp, Probe sequence
attctcctttttctcaataaattat

SEQ ID NO: 117899 - DNA, 25 bp, Probe sequence
atcattctcctttttctcaataaat

SEQ ID NO: 117900 - DNA, 25 bp, Probe sequence
actaaatgaattggaagtgtgaaca

SEQ ID NO: 117901 - DNA, 25 bp, Probe sequence
aactaaatgaattggaagtgtgaac

SEQ ID NO: 117902 - DNA, 25 bp, Probe sequence
cattctcctttttctcaataaatta

SEQ ID NO: 117903 - DNA, 25 bp, Probe sequence
ctcctttttctcaataaattatatt

SEQ ID NO: 117904 - DNA, 25 bp, Probe sequence
tggtttatcattctcctttttctca

SEQ ID NO: 117905 - DNA, 25 bp, Probe sequence
tcctttttctcaataaattatatta

SEQ ID NO: 117906 - DNA, 25 bp, Probe sequence
tctcctttttctcaataaattatat

SEQ ID NO: 117907 - DNA, 25 bp, Probe sequence
tcattctcctttttctcaataaatt

SEQ ID NO: 117908 - DNA, 25 bp, Probe sequence
taaatgaattggaagtgtgaacaac

SEQ ID NO: 117909 - DNA, 25 bp, Probe sequence
tatcattctcctttttctcaataaa

SEQ ID NO: 117910 - DNA, 25 bp, Probe sequence
tttatcattctcctttttctcaata

SEQ ID NO: 117911 - DNA, 25 bp, Probe sequence
ttatcattctcctttttctcaataa

SEQ ID NO: 117912 - DNA, 25 bp, Probe sequence
ttctcctttttctcaataaattata

SEQ ID NO: 117913 - DNA, 25 bp, Probe sequence
atcatggtttacaatcctaaaatac

SEQ ID NO: 117914 - DNA, 25 bp, Probe sequence
acagtattttaggtttatcatggtt

SEQ ID NO: 117915 - DNA, 25 bp, Probe sequence
acaatcctaaaatactgttttcatt

SEQ ID NO: 117916 - DNA, 25 bp, Probe sequence
aatcctaaaatactgttttcatttg

SEQ ID NO: 117917 - DNA, 25 bp, Probe sequence
cagtattttaggtttatcatggttt

SEQ ID NO: 117918 - DNA, 25 bp, Probe sequence
catggtttacaatcctaaaatactg

SEQ ID NO: 117919 - DNA, 25 bp, Probe sequence
gtttatcatggtttacaatcctaaa

SEQ ID NO: 117920 - DNA, 25 bp, Probe sequence
ggtttatcatggtttacaatcctaa

SEQ ID NO: 117921 - DNA, 25 bp, Probe sequence
tggtttacaatcctaaaatactgtt

SEQ ID NO: 117922 - DNA, 25 bp, Probe sequence
taggtttatcatggtttacaatcct

SEQ ID NO: 117923 - DNA, 25 bp, Probe sequence
tattttaggtttatcatggtttaca

SEQ ID NO: 117924 - DNA, 25 bp, Probe sequence
ttttaggtttatcatggtttacaat

SEQ ID NO: 117925 - DNA, 25 bp, Probe sequence
ttaggtttatcatggtttacaatcc

SEQ ID NO: 117926 - DNA, 25 bp, Probe sequence
ttatcatggtttacaatcctaaaat

SEQ ID NO: 117927 - DNA, 25 bp, Probe sequence
ttacaatcctaaaatactgttttca

SEQ ID NO: 117928 - DNA, 25 bp, Probe sequence
ataaattttgtgcttgttagaggtg

SEQ ID NO: 117929 - DNA, 25 bp, Probe sequence
atcttgacaacttgttcttagaaag

SEQ ID NO: 117930 - DNA, 25 bp, Probe sequence
aaattttgtgcttgttagaggtgaa

SEQ ID NO: 117931 - DNA, 25 bp, Probe sequence
aaataaattttgtgcttgttagagg

SEQ ID NO: 117932 - DNA, 25 bp, Probe sequence
aaatcttgacaacttgttcttagaa

SEQ ID NO: 117933 - DNA, 25 bp, Probe sequence
aaaaatcttgacaacttgttcttag

SEQ ID NO: 117934 - DNA, 25 bp, Probe sequence
aaaatcttgacaacttgttcttaga

SEQ ID NO: 117935 - DNA, 25 bp, Probe sequence
aatcttgacaacttgttcttagaaa

SEQ ID NO: 117936 - DNA, 25 bp, Probe sequence
aattttgtgcttgttagaggtgaag

SEQ ID NO: 117937 - DNA, 25 bp, Probe sequence
gaaaaaatcttgacaacttgttctt

SEQ ID NO: 117938 - DNA, 25 bp, Probe sequence
tgacaacttgttcttagaaagttaa

SEQ ID NO: 117939 - DNA, 25 bp, Probe sequence
tcttgacaacttgttcttagaaagt

SEQ ID NO: 117940 - DNA, 25 bp, Probe sequence
taaaataaattttgtgcttgttaga

SEQ ID NO: 117941 - DNA, 25 bp, Probe sequence
ttttgtgcttgttagaggtgaagcc

SEQ ID NO: 117942 - DNA, 25 bp, Probe sequence
ttgtgcttgttagaggtgaagccat

SEQ ID NO: 117943 - DNA, 25 bp, Probe sequence
attggcgaacgaggtaactggatac

SEQ ID NO: 117944 - DNA, 25 bp, Probe sequence
attgcgaaaaataattggcgaacga

SEQ ID NO: 117945 - DNA, 25 bp, Probe sequence
atacctcatccgccaattaaaattt

SEQ ID NO: 117946 - DNA, 25 bp, Probe sequence
aataattggcgaacgaggtaactgg

SEQ ID NO: 117947 - DNA, 25 bp, Probe sequence
acctcatccgccaattaaaatttgt

SEQ ID NO: 117948 - DNA, 25 bp, Probe sequence
cctcatccgccaattaaaatttgtt

SEQ ID NO: 117949 - DNA, 25 bp, Probe sequence
gaggtaactggatacctcatccgcc

SEQ ID NO: 117950 - DNA, 25 bp, Probe sequence
ggatacctcatccgccaattaaaat

SEQ ID NO: 117951 - DNA, 25 bp, Probe sequence
tggcgaacgaggtaactggatacct

SEQ ID NO: 117952 - DNA, 25 bp, Probe sequence
tggatacctcatccgccaattaaaa

SEQ ID NO: 117953 - DNA, 25 bp, Probe sequence
tcatccgccaattaaaatttgttaa

SEQ ID NO: 117954 - DNA, 25 bp, Probe sequence
taattggcgaacgaggtaactggat

SEQ ID NO: 117955 - DNA, 25 bp, Probe sequence
taaaaagtcccgcttaaaatgattg

SEQ ID NO: 117956 - DNA, 25 bp, Probe sequence
tacctcatccgccaattaaaatttg

SEQ ID NO: 117957 - DNA, 25 bp, Probe sequence
tataaaaagtcccgcttaaaatgat

SEQ ID NO: 117958 - DNA, 25 bp, Probe sequence
attaagttatgagtgtgacgatgat

SEQ ID NO: 117959 - DNA, 25 bp, Probe sequence
ataacctatgttatagattatgaaa

SEQ ID NO: 117960 - DNA, 25 bp, Probe sequence
aacaactcctaattgtatattatca

SEQ ID NO: 117961 - DNA, 25 bp, Probe sequence
aactcctaattgtatattatcaact

SEQ ID NO: 117962 - DNA, 25 bp, Probe sequence
aattgattacttgtattgtacattg

SEQ ID NO: 117963 - DNA, 25 bp, Probe sequence
gaaacaactcctaattgtatattat

SEQ ID NO: 117964 - DNA, 25 bp, Probe sequence
gattacttgtattgtacattgaaat

SEQ ID NO: 117965 - DNA, 25 bp, Probe sequence
gattatgaaatatctatgacatagg

SEQ ID NO: 117966 - DNA, 25 bp, Probe sequence
gttgtagaaacaactcctaattgta

SEQ ID NO: 117967 - DNA, 25 bp, Probe sequence
gttaattgcaacattattttataaa

SEQ ID NO: 117968 - DNA, 25 bp, Probe sequence
gtagaaacaactcctaattgtatat

SEQ ID NO: 117969 - DNA, 25 bp, Probe sequence
gtacattgaaatggtagttaattgc

SEQ ID NO: 117970 - DNA, 25 bp, Probe sequence
ggtagttaattgcaacattatttta

SEQ ID NO: 117971 - DNA, 25 bp, Probe sequence
tcctaattgtatattatcaactgat

SEQ ID NO: 117972 - DNA, 25 bp, Probe sequence
tatcaattgattacttgtattgtac

SEQ ID NO: 117973 - DNA, 25 bp, Probe sequence
attatgtgttgttatatgagatgat

SEQ ID NO: 117974 - DNA, 25 bp, Probe sequence
attatactagcacatctatttccgt

SEQ ID NO: 117975 - DNA, 25 bp, Probe sequence
agcacatctatttccgtataacaat

SEQ ID NO: 117976 - DNA, 25 bp, Probe sequence
aatggttatcaattatactagcaca

SEQ ID NO: 117977 - DNA, 25 bp, Probe sequence
catctatttccgtataacaataata

SEQ ID NO: 117978 - DNA, 25 bp, Probe sequence
ctagcacatctatttccgtataaca

SEQ ID NO: 117979 - DNA, 25 bp, Probe sequence
gcacatctatttccgtataacaata

SEQ ID NO: 117980 - DNA, 25 bp, Probe sequence
gagatgattaaccattgcaattgat

SEQ ID NO: 117981 - DNA, 25 bp, Probe sequence
gatgattaaccattgcaattgataa

SEQ ID NO: 117982 - DNA, 25 bp, Probe sequence
ggttatcaattatactagcacatct

SEQ ID NO: 117983 - DNA, 25 bp, Probe sequence
tcctcctaaggatacaaattatgtg

SEQ ID NO: 117984 - DNA, 25 bp, Probe sequence
tactagcacatctatttccgtataa

SEQ ID NO: 117985 - DNA, 25 bp, Probe sequence
tatactagcacatctatttccgtat

SEQ ID NO: 117986 - DNA, 25 bp, Probe sequence
tatttatgattttactaaagactta

SEQ ID NO: 117987 - DNA, 25 bp, Probe sequence
ttgttttcctcctaaggatacaaat

SEQ ID NO: 117988 - DNA, 25 bp, Probe sequence
acggtacaacaactggtttagtgat

SEQ ID NO: 117989 - DNA, 25 bp, Probe sequence
actggtttagtgatgactgaagaaa

SEQ ID NO: 117990 - DNA, 25 bp, Probe sequence
acaactggtttagtgatgactgaag

SEQ ID NO: 117991 - DNA, 25 bp, Probe sequence
acaacaactggtttagtgatgactg

SEQ ID NO: 117992 - DNA, 25 bp, Probe sequence
aacaactggtttagtgatgactgaa

SEQ ID NO: 117993 - DNA, 25 bp, Probe sequence
aactggtttagtgatgactgaagaa

SEQ ID NO: 117994 - DNA, 25 bp, Probe sequence
caactggtttagtgatgactgaaga

SEQ ID NO: 117995 - DNA, 25 bp, Probe sequence
caacaactggtttagtgatgactga

SEQ ID NO: 117996 - DNA, 25 bp, Probe sequence
cggtacaacaactggtttagtgatg

SEQ ID NO: 117997 - DNA, 25 bp, Probe sequence
gatgactgaagaaacgtcgttaata

SEQ ID NO: 117998 - DNA, 25 bp, Probe sequence
gtgatgactgaagaaacgtcgttaa

SEQ ID NO: 117999 - DNA, 25 bp, Probe sequence
gtacaacaactggtttagtgatgac

SEQ ID NO: 118000 - DNA, 25 bp, Probe sequence
ggtacaacaactggtttagtgatga

SEQ ID NO: 118001 - DNA, 25 bp, Probe sequence
tacaacaactggtttagtgatgact

SEQ ID NO: 118002 - DNA, 25 bp, Probe sequence
tagtgatgactgaagaaacgtcgtt

SEQ ID NO: 118003 - DNA, 25 bp, Probe sequence
atatcattttgatttattttgaaga

SEQ ID NO: 118004 - DNA, 25 bp, Probe sequence
atacaatcaaatgttttcatcttat

SEQ ID NO: 118005 - DNA, 25 bp, Probe sequence
ataatcatcaattatatcattttga

SEQ ID NO: 118006 - DNA, 25 bp, Probe sequence
atgatttatagtagtagtatcgata

SEQ ID NO: 118007 - DNA, 25 bp, Probe sequence
acaatcaaatgttttcatcttatta

SEQ ID NO: 118008 - DNA, 25 bp, Probe sequence
aaatgttttcatcttattaatgatt

SEQ ID NO: 118009 - DNA, 25 bp, Probe sequence
aactatacaatcaaatgttttcatc

SEQ ID NO: 118010 - DNA, 25 bp, Probe sequence
aatgatattttggggcgtatgattt

SEQ ID NO: 118011 - DNA, 25 bp, Probe sequence
aatcaaatgttttcatcttattaat

SEQ ID NO: 118012 - DNA, 25 bp, Probe sequence
aataatgatattttggggcgtatga

SEQ ID NO: 118013 - DNA, 25 bp, Probe sequence
gaatgtgctttgaaaataatcatca

SEQ ID NO: 118014 - DNA, 25 bp, Probe sequence
gatattttggggcgtatgatttata

SEQ ID NO: 118015 - DNA, 25 bp, Probe sequence
ggggcgtatgatttatagtagtagt

SEQ ID NO: 118016 - DNA, 25 bp, Probe sequence
tattttggggcgtatgatttatagt

SEQ ID NO: 118017 - DNA, 25 bp, Probe sequence
tttggggcgtatgatttatagtagt

SEQ ID NO: 118018 - DNA, 25 bp, Probe sequence
attaaacaagtgtatgcttaggcat

SEQ ID NO: 118019 - DNA, 25 bp, Probe sequence
acgtgaatgcatacacaattgaata

SEQ ID NO: 118020 - DNA, 25 bp, Probe sequence
aaaccaataaaaaggcatggacatt

SEQ ID NO: 118021 - DNA, 25 bp, Probe sequence
cacggaaatgactttcgtcccttat

SEQ ID NO: 118022 - DNA, 25 bp, Probe sequence
gaacatttctacgtgaatgcataca

SEQ ID NO: 118023 - DNA, 25 bp, Probe sequence
gaaagacaatccgttatcaatatta

SEQ ID NO: 118024 - DNA, 25 bp, Probe sequence
gaggatgaaagtcattttttagtta

SEQ ID NO: 118025 - DNA, 25 bp, Probe sequence
gttcgaatagggaggtcagtgacat

SEQ ID NO: 118026 - DNA, 25 bp, Probe sequence
gtttaacagaacatttctacgtgaa

SEQ ID NO: 118027 - DNA, 25 bp, Probe sequence
gtgactgcaagttattccaattatt

SEQ ID NO: 118028 - DNA, 25 bp, Probe sequence
gggagaataatcgtgactgcaagtt

SEQ ID NO: 118029 - DNA, 25 bp, Probe sequence
ggtggtaccacggaaatgactttcg

SEQ ID NO: 118030 - DNA, 25 bp, Probe sequence
ttcgtcccttatttttaagaggatg

SEQ ID NO: 118031 - DNA, 25 bp, Probe sequence
ttaggcataaatttgggtggtacca

SEQ ID NO: 118032 - DNA, 25 bp, Probe sequence
ttgaaagttttccgatataattata

SEQ ID NO: 118033 - DNA, 25 bp, Probe sequence
ataggatttcctattaggatccaat

SEQ ID NO: 118034 - DNA, 25 bp, Probe sequence
atgcttcgcacaactgcataaaagc

SEQ ID NO: 118035 - DNA, 25 bp, Probe sequence
aggatccaatttatcttgattttat

SEQ ID NO: 118036 - DNA, 25 bp, Probe sequence
aaaccccatgtataaggatatctga

SEQ ID NO: 118037 - DNA, 25 bp, Probe sequence
caccaattaggtttcgattcattta

SEQ ID NO: 118038 - DNA, 25 bp, Probe sequence
gcttcgcatcactgcatataaagtc

SEQ ID NO: 118039 - DNA, 25 bp, Probe sequence
gcttctcacaactgcatataaagtc

SEQ ID NO: 118040 - DNA, 25 bp, Probe sequence
gaagtagattgatatccttaacatg

SEQ ID NO: 118041 - DNA, 25 bp, Probe sequence
gatatccttaacatggggttttatt

SEQ ID NO: 118042 - DNA, 25 bp, Probe sequence
gaggcacagcggaatacagatgatg

SEQ ID NO: 118043 - DNA, 25 bp, Probe sequence
gaggaacagcggaatacagatgatg

SEQ ID NO: 118044 - DNA, 25 bp, Probe sequence
gtggattacagatgatgcttcgcat

SEQ ID NO: 118045 - DNA, 25 bp, Probe sequence
ggattcaccaattaggtttcgattc

SEQ ID NO: 118046 - DNA, 25 bp, Probe sequence
tcacctattaggatccaattcattt

SEQ ID NO: 118047 - DNA, 25 bp, Probe sequence
agaggcacagtggattacagatgat

SEQ ID NO: 118048 - DNA, 25 bp, Probe sequence
atagtggtcatgtataatgtttatg

SEQ ID NO: 118049 - DNA, 25 bp, Probe sequence
atagtgacacaatttaaacatgata

SEQ ID NO: 118050 - DNA, 25 bp, Probe sequence
ataacgtcagaaacatttatgtatg

SEQ ID NO: 118051 - DNA, 25 bp, Probe sequence
actatccagtcatattttataacgt

SEQ ID NO: 118052 - DNA, 25 bp, Probe sequence
acaaactatccagtcatattttata

SEQ ID NO: 118053 - DNA, 25 bp, Probe sequence
ccagtcatattttataacgtgaatt

SEQ ID NO: 118054 - DNA, 25 bp, Probe sequence
gaattaattgcggatacttacaaaa

SEQ ID NO: 118055 - DNA, 25 bp, Probe sequence
gaacattaagtcatctatagagatt

SEQ ID NO: 118056 - DNA, 25 bp, Probe sequence
gaaaattctttacattatttcatta

SEQ ID NO: 118057 - DNA, 25 bp, Probe sequence
gatacttacaaaatacatagtggtc

SEQ ID NO: 118058 - DNA, 25 bp, Probe sequence
gattgtgttgttgttttatcataat

SEQ ID NO: 118059 - DNA, 25 bp, Probe sequence
gttgttgttttatcataattgcaat

SEQ ID NO: 118060 - DNA, 25 bp, Probe sequence
gtatcaaattcagacaaactatcca

SEQ ID NO: 118061 - DNA, 25 bp, Probe sequence
tctatagagattgtgttgttgtttt

SEQ ID NO: 118062 - DNA, 25 bp, Probe sequence
tcagacaaactatccagtcatattt

SEQ ID NO: 118063 - DNA, 25 bp, Probe sequence
attaatgatacgtcctggtcttctt

SEQ ID NO: 118064 - DNA, 25 bp, Probe sequence
attatcataagaggtcaggacaaag

SEQ ID NO: 118065 - DNA, 25 bp, Probe sequence
atattaatgatacgtcctggtcttc

SEQ ID NO: 118066 - DNA, 25 bp, Probe sequence
cgtcctggtcttctttttatggagt

SEQ ID NO: 118067 - DNA, 25 bp, Probe sequence
atgatacgtcctggtcttcttttta

SEQ ID NO: 118068 - DNA, 25 bp, Probe sequence
acgtcctggtcttctttttatggag

SEQ ID NO: 118069 - DNA, 25 bp, Probe sequence
aatgatacgtcctggtcttcttttt

SEQ ID NO: 118070 - DNA, 25 bp, Probe sequence
ctggtcttctttttatggagtgtta

SEQ ID NO: 118071 - DNA, 25 bp, Probe sequence
cctggtcttctttttatggagtgtt

SEQ ID NO: 118072 - DNA, 25 bp, Probe sequence
gaggtcaggacaaaggtatatatta

SEQ ID NO: 118073 - DNA, 25 bp, Probe sequence
gtcctggtcttctttttatggagtg

SEQ ID NO: 118074 - DNA, 25 bp, Probe sequence
ggtcttctttttatggagtgttatt

SEQ ID NO: 118075 - DNA, 25 bp, Probe sequence
taatgatacgtcctggtcttctttt

SEQ ID NO: 118076 - DNA, 25 bp, Probe sequence
tacgtcctggtcttctttttatgga

SEQ ID NO: 118077 - DNA, 25 bp, Probe sequence
ttaatgatacgtcctggtcttcttt

SEQ ID NO: 118078 - DNA, 25 bp, Probe sequence
atagctgcagttaaaataatgtaaa

SEQ ID NO: 118079 - DNA, 25 bp, Probe sequence
acatgaagcatgttatctgatataa

SEQ ID NO: 118080 - DNA, 25 bp, Probe sequence
aaatagctgcagttaaaataatgta

SEQ ID NO: 118081 - DNA, 25 bp, Probe sequence
aagcaacaagaatacatttcaaaca

SEQ ID NO: 118082 - DNA, 25 bp, Probe sequence
aatacatttcaaacatgttatttga

SEQ ID NO: 118083 - DNA, 25 bp, Probe sequence
catgaagcatgttatctgatataat

SEQ ID NO: 118084 - DNA, 25 bp, Probe sequence
gcatgttatctgatataatttgaac

SEQ ID NO: 118085 - DNA, 25 bp, Probe sequence
gcaacaagaatacatttcaaacatg

SEQ ID NO: 118086 - DNA, 25 bp, Probe sequence
gaatacatttcaaacatgttatttg

SEQ ID NO: 118087 - DNA, 25 bp, Probe sequence
gaagcatgttatctgatataatttg

SEQ ID NO: 118088 - DNA, 25 bp, Probe sequence
gagcaaatagaaatacatgaagcat

SEQ ID NO: 118089 - DNA, 25 bp, Probe sequence
gatataatttgaacatcataataat

SEQ ID NO: 118090 - DNA, 25 bp, Probe sequence
gttatctgatataatttgaacatca

SEQ ID NO: 118091 - DNA, 25 bp, Probe sequence
taataattaaggaggattggcattt

SEQ ID NO: 118092 - DNA, 25 bp, Probe sequence
ttgataaattaaatagctgcagtta

SEQ ID NO: 118093 - DNA, 25 bp, Probe sequence
attgctccagtttttgtttgtgttt

SEQ ID NO: 118094 - DNA, 25 bp, Probe sequence
atgacgactggggcatttctttaat

SEQ ID NO: 118095 - DNA, 25 bp, Probe sequence
accaatgacgactggggcatttctt

SEQ ID NO: 118096 - DNA, 25 bp, Probe sequence
aatgaattgctccagtttttgtttg

SEQ ID NO: 118097 - DNA, 25 bp, Probe sequence
caatgacgactggggcatttcttta

SEQ ID NO: 118098 - DNA, 25 bp, Probe sequence
gaattgctccagtttttgtttgtgt

SEQ ID NO: 118099 - DNA, 25 bp, Probe sequence
gactggggcatttctttaatgaatt

SEQ ID NO: 118100 - DNA, 25 bp, Probe sequence
gacgactggggcatttctttaatga

SEQ ID NO: 118101 - DNA, 25 bp, Probe sequence
gttataaccaatgacgactggggca

SEQ ID NO: 118102 - DNA, 25 bp, Probe sequence
ggggcatttctttaatgaattgctc

SEQ ID NO: 118103 - DNA, 25 bp, Probe sequence
ggcatttctttaatgaattgctcca

SEQ ID NO: 118104 - DNA, 25 bp, Probe sequence
tgctccagtttttgtttgtgttttt

SEQ ID NO: 118105 - DNA, 25 bp, Probe sequence
taaccaatgacgactggggcatttc

SEQ ID NO: 118106 - DNA, 25 bp, Probe sequence
ttaatgaattgctccagtttttgtt

SEQ ID NO: 118107 - DNA, 25 bp, Probe sequence
ttctttaatgaattgctccagtttt

SEQ ID NO: 118108 - DNA, 25 bp, Probe sequence
atttgaagcacttttgtagcatcat

SEQ ID NO: 118109 - DNA, 25 bp, Probe sequence
agtcatactcgaagatgttgattat

SEQ ID NO: 118110 - DNA, 25 bp, Probe sequence
acttttgtagcatcattcattttaa

SEQ ID NO: 118111 - DNA, 25 bp, Probe sequence
aagcacttttgtagcatcattcatt

SEQ ID NO: 118112 - DNA, 25 bp, Probe sequence
cgaagatgttgattatgagctagaa

SEQ ID NO: 118113 - DNA, 25 bp, Probe sequence
gcacttttgtagcatcattcatttt

SEQ ID NO: 118114 - DNA, 25 bp, Probe sequence
gaagcacttttgtagcatcattcat

SEQ ID NO: 118115 - DNA, 25 bp, Probe sequence
gaaaagtcatactcgaagatgttga

SEQ ID NO: 118116 - DNA, 25 bp, Probe sequence
gatgtgcatgaaaagtcatactcga

SEQ ID NO: 118117 - DNA, 25 bp, Probe sequence
gatagatttgtagcagttggtttga

SEQ ID NO: 118118 - DNA, 25 bp, Probe sequence
gatttgtagcagttggtttgataaa

SEQ ID NO: 118119 - DNA, 25 bp, Probe sequence
ggtgataaatttgaagcacttttgt

SEQ ID NO: 118120 - DNA, 25 bp, Probe sequence
tgttcaatattacatgatgtgcatg

SEQ ID NO: 118121 - DNA, 25 bp, Probe sequence
tgataaaaccatgttcaatattaca

SEQ ID NO: 118122 - DNA, 25 bp, Probe sequence
tatgagctagaattagtggtgataa

SEQ ID NO: 118123 - DNA, 25 bp, Probe sequence
tattcgttcacaggggggactcctt

SEQ ID NO: 118124 - DNA, 25 bp, Probe sequence
attactgggcgtgagaatcattctc

SEQ ID NO: 118125 - DNA, 25 bp, Probe sequence
atcatcacaagcaattttaaatatc

SEQ ID NO: 118126 - DNA, 25 bp, Probe sequence
aaatatctaatccaaatgttacatt

SEQ ID NO: 118127 - DNA, 25 bp, Probe sequence
aatcattctcatgccccaaaatata

SEQ ID NO: 118128 - DNA, 25 bp, Probe sequence
gcagtttggtgatcgtacagtgtgt

SEQ ID NO: 118129 - DNA, 25 bp, Probe sequence
gaatgtacgtggaagcgttttctaa

SEQ ID NO: 118130 - DNA, 25 bp, Probe sequence
gacaacgctagaaacgatatcactt

SEQ ID NO: 118131 - DNA, 25 bp, Probe sequence
gacatgcagtttggtgatcgtacag

SEQ ID NO: 118132 - DNA, 25 bp, Probe sequence
gagaaagtttatcatcacaagcaat

SEQ ID NO: 118133 - DNA, 25 bp, Probe sequence
gatcgtacagtgtgtatttgtcttt

SEQ ID NO: 118134 - DNA, 25 bp, Probe sequence
gatatcactttagggggttaagcgt

SEQ ID NO: 118135 - DNA, 25 bp, Probe sequence
gttacattgttcgacatgcagtttg

SEQ ID NO: 118136 - DNA, 25 bp, Probe sequence
ttgtctttaaaatgtttcgcttaat

SEQ ID NO: 118137 - DNA, 25 bp, Probe sequence
ttcgcttaatgataatgacaacgct

SEQ ID NO: 118138 - DNA, 25 bp, Probe sequence
atcccttttgagttaaaatgttatg

SEQ ID NO: 118139 - DNA, 25 bp, Probe sequence
atggtaaacacagtgcataatacta

SEQ ID NO: 118140 - DNA, 25 bp, Probe sequence
aatccaatgcttagttatgataaac

SEQ ID NO: 118141 - DNA, 25 bp, Probe sequence
aataagcagattacatgacaatatg

SEQ ID NO: 118142 - DNA, 25 bp, Probe sequence
cacagtgcataatactaaaatccaa

SEQ ID NO: 118143 - DNA, 25 bp, Probe sequence
gaatggagatacacaataacttgga

SEQ ID NO: 118144 - DNA, 25 bp, Probe sequence
gaagggatttttttaataagcagat

SEQ ID NO: 118145 - DNA, 25 bp, Probe sequence
gacaatatgatagtgggctgattta

SEQ ID NO: 118146 - DNA, 25 bp, Probe sequence
gagttaaaatgttatgttcctttca

SEQ ID NO: 118147 - DNA, 25 bp, Probe sequence
gatacacaataacttggaagggatt

SEQ ID NO: 118148 - DNA, 25 bp, Probe sequence
gatagtgggctgatttaaaataaat

SEQ ID NO: 118149 - DNA, 25 bp, Probe sequence
tgttatgttcctttcaaaattaaat

SEQ ID NO: 118150 - DNA, 25 bp, Probe sequence
tgacaaaaatggtaaacacagtgca

SEQ ID NO: 118151 - DNA, 25 bp, Probe sequence
taaaatgttatgttcctttcaaaat

SEQ ID NO: 118152 - DNA, 25 bp, Probe sequence
taaaatccaatgcttagttatgata

SEQ ID NO: 118153 - DNA, 25 bp, Probe sequence
actgatttaactaggaggtcgtgtc

SEQ ID NO: 118154 - DNA, 25 bp, Probe sequence
actaggaggtcgtgtcatgaatgtt

SEQ ID NO: 118155 - DNA, 25 bp, Probe sequence
aagaattgtaattttggagaatgtg

SEQ ID NO: 118156 - DNA, 25 bp, Probe sequence
gaatgtttgtttaaaagtatttctg

SEQ ID NO: 118157 - DNA, 25 bp, Probe sequence
gaagtagctatggctttttttagtt

SEQ ID NO: 118158 - DNA, 25 bp, Probe sequence
gatttaactaggaggtcgtgtcatg

SEQ ID NO: 118159 - DNA, 25 bp, Probe sequence
gtagctatggctttttttagtttat

SEQ ID NO: 118160 - DNA, 25 bp, Probe sequence
ggtcgtgtcatgaatgtttgtttaa

SEQ ID NO: 118161 - DNA, 25 bp, Probe sequence
ggaggtcgtgtcatgaatgtttgtt

SEQ ID NO: 118162 - DNA, 25 bp, Probe sequence
ggctttttttagtttatagactgat

SEQ ID NO: 118163 - DNA, 25 bp, Probe sequence
tagctatggctttttttagtttata

SEQ ID NO: 118164 - DNA, 25 bp, Probe sequence
taggaggtcgtgtcatgaatgtttg

SEQ ID NO: 118165 - DNA, 25 bp, Probe sequence
tatggctttttttagtttatagact

SEQ ID NO: 118166 - DNA, 25 bp, Probe sequence
tatttctgacaattttataagataa

SEQ ID NO: 118167 - DNA, 25 bp, Probe sequence
ttaactaggaggtcgtgtcatgaat

SEQ ID NO: 118168 - DNA, 25 bp, Probe sequence
atatttgaggataggtgttattaat

SEQ ID NO: 118169 - DNA, 25 bp, Probe sequence
atgtagttttttgtatctgtctatt

SEQ ID NO: 118170 - DNA, 25 bp, Probe sequence
agttttttgtatctgtctattatta

SEQ ID NO: 118171 - DNA, 25 bp, Probe sequence
aaggatttctaaagtcataaattat

SEQ ID NO: 118172 - DNA, 25 bp, Probe sequence
aatgtagttttttgtatctgtctat

SEQ ID NO: 118173 - DNA, 25 bp, Probe sequence
gaaattcagaaatgtagtgacacaa

SEQ ID NO: 118174 - DNA, 25 bp, Probe sequence
gttaatgtagttttttgtatctgtc

SEQ ID NO: 118175 - DNA, 25 bp, Probe sequence
gttttttgtatctgtctattattat

SEQ ID NO: 118176 - DNA, 25 bp, Probe sequence
gtatctgtctattattataaatata

SEQ ID NO: 118177 - DNA, 25 bp, Probe sequence
gtagttttttgtatctgtctattat

SEQ ID NO: 118178 - DNA, 25 bp, Probe sequence
ggagtagcaaaattcttgaaattca

SEQ ID NO: 118179 - DNA, 25 bp, Probe sequence
tgatggttaaaatatggagtagcaa

SEQ ID NO: 118180 - DNA, 25 bp, Probe sequence
tttgtatctgtctattattataaat

SEQ ID NO: 118181 - DNA, 25 bp, Probe sequence
tttttgtatctgtctattattataa

SEQ ID NO: 118182 - DNA, 25 bp, Probe sequence
ttaatgtagttttttgtatctgtct

SEQ ID NO: 118183 - DNA, 25 bp, Probe sequence
attgtgtttatttgaatggtgagct

SEQ ID NO: 118184 - DNA, 25 bp, Probe sequence
atttgaatggtgagcttattgggat

SEQ ID NO: 118185 - DNA, 25 bp, Probe sequence
atatccaaaggtataattattttat

SEQ ID NO: 118186 - DNA, 25 bp, Probe sequence
aagtgaatgcaatagttgtttatgt

SEQ ID NO: 118187 - DNA, 25 bp, Probe sequence
catgctatagagtgtggctttttgc

SEQ ID NO: 118188 - DNA, 25 bp, Probe sequence
gagtgtggctttttgctatatccaa

SEQ ID NO: 118189 - DNA, 25 bp, Probe sequence
gatagaagccatgctatagagtgtg

SEQ ID NO: 118190 - DNA, 25 bp, Probe sequence
gttgtttatgttttgaacaagcgag

SEQ ID NO: 118191 - DNA, 25 bp, Probe sequence
gtgtggctttttgctatatccaaag

SEQ ID NO: 118192 - DNA, 25 bp, Probe sequence
gtggctttttgctatatccaaaggt

SEQ ID NO: 118193 - DNA, 25 bp, Probe sequence
ggtgagcttattgggataaatcata

SEQ ID NO: 118194 - DNA, 25 bp, Probe sequence
ggctttttgctatatccaaaggtat

SEQ ID NO: 118195 - DNA, 25 bp, Probe sequence
tgcaatagttgtttatgttttgaac

SEQ ID NO: 118196 - DNA, 25 bp, Probe sequence
tgctatagagtgtggctttttgcta

SEQ ID NO: 118197 - DNA, 25 bp, Probe sequence
tagagtgtggctttttgctatatcc

SEQ ID NO: 118198 - DNA, 25 bp, Probe sequence
agtgattgttatttttcgtggtcaa

SEQ ID NO: 118199 - DNA, 25 bp, Probe sequence
aaacggtttcatgcatttaccagtt

SEQ ID NO: 118200 - DNA, 25 bp, Probe sequence
aacataattcaacacttacattttt

SEQ ID NO: 118201 - DNA, 25 bp, Probe sequence
cactgctattttacaaacggtttca

SEQ ID NO: 118202 - DNA, 25 bp, Probe sequence
gcatttaccagttaacacttcatta

SEQ ID NO: 118203 - DNA, 25 bp, Probe sequence
gaattatgcattttcgaagtaaaca

SEQ ID NO: 118204 - DNA, 25 bp, Probe sequence
gagtaggcattgagtattattggca

SEQ ID NO: 118205 - DNA, 25 bp, Probe sequence
gatggtattatttttatttgaggta

SEQ ID NO: 118206 - DNA, 25 bp, Probe sequence
gatatatatttctttgcattttgtt

SEQ ID NO: 118207 - DNA, 25 bp, Probe sequence
gtaaacgtcactcaactatgattgg

SEQ ID NO: 118208 - DNA, 25 bp, Probe sequence
gggtagacaaacactccaaattgtt

SEQ ID NO: 118209 - DNA, 25 bp, Probe sequence
tcacgtgccaagattactatagagt

SEQ ID NO: 118210 - DNA, 25 bp, Probe sequence
taatgcgagtacactgctattttac

SEQ ID NO: 118211 - DNA, 25 bp, Probe sequence
taaatttgtacttactaatgcgagt

SEQ ID NO: 118212 - DNA, 25 bp, Probe sequence
ttttgtttgcaatgttgggtagaca

SEQ ID NO: 118213 - DNA, 25 bp, Probe sequence
attttgtctatattataaagtgttt

SEQ ID NO: 118214 - DNA, 25 bp, Probe sequence
atattttgtctatattataaagtgt

SEQ ID NO: 118215 - DNA, 25 bp, Probe sequence
ataactatattttgtctatattata

SEQ ID NO: 118216 - DNA, 25 bp, Probe sequence
agataactatattttgtctatatta

SEQ ID NO: 118217 - DNA, 25 bp, Probe sequence
actatattttgtctatattataaag

SEQ ID NO: 118218 - DNA, 25 bp, Probe sequence
aactatattttgtctatattataaa

SEQ ID NO: 118219 - DNA, 25 bp, Probe sequence
aagatagataactatattttgtcta

SEQ ID NO: 118220 - DNA, 25 bp, Probe sequence
ctatattttgtctatattataaagt

SEQ ID NO: 118221 - DNA, 25 bp, Probe sequence
gataactatattttgtctatattat

SEQ ID NO: 118222 - DNA, 25 bp, Probe sequence
gatagataactatattttgtctata

SEQ ID NO: 118223 - DNA, 25 bp, Probe sequence
gttgtataaataggataacttaata

SEQ ID NO: 118224 - DNA, 25 bp, Probe sequence
taactatattttgtctatattataa

SEQ ID NO: 118225 - DNA, 25 bp, Probe sequence
tagataactatattttgtctatatt

SEQ ID NO: 118226 - DNA, 25 bp, Probe sequence
tttgtctatattataaagtgtttat

SEQ ID NO: 118227 - DNA, 25 bp, Probe sequence
ttttgtctatattataaagtgttta

SEQ ID NO: 118228 - DNA, 25 bp, Probe sequence
atataatcgttaagtatcaatttta

SEQ ID NO: 118229 - DNA, 25 bp, Probe sequence
atgtaactttcctaaaattgactat

SEQ ID NO: 118230 - DNA, 25 bp, Probe sequence
atgctatttaatgccaggttaatgt

SEQ ID NO: 118231 - DNA, 25 bp, Probe sequence
acgactatgctatttaatgccaggt

SEQ ID NO: 118232 - DNA, 25 bp, Probe sequence
actttcctaaaattgactatataat

SEQ ID NO: 118233 - DNA, 25 bp, Probe sequence
aaaacgactatgctatttaatgcca

SEQ ID NO: 118234 - DNA, 25 bp, Probe sequence
aacgactatgctatttaatgccagg

SEQ ID NO: 118235 - DNA, 25 bp, Probe sequence
aatgccaggttaatgtaactttcct

SEQ ID NO: 118236 - DNA, 25 bp, Probe sequence
cttctgtcattattttaagttcaaa

SEQ ID NO: 118237 - DNA, 25 bp, Probe sequence
gactatgctatttaatgccaggtta

SEQ ID NO: 118238 - DNA, 25 bp, Probe sequence
gtatcaattttaaggagagtttaca

SEQ ID NO: 118239 - DNA, 25 bp, Probe sequence
gtaactttcctaaaattgactatat

SEQ ID NO: 118240 - DNA, 25 bp, Probe sequence
tgccaggttaatgtaactttcctaa

SEQ ID NO: 118241 - DNA, 25 bp, Probe sequence
tacttctgtcattattttaagttca

SEQ ID NO: 118242 - DNA, 25 bp, Probe sequence
ttgactatataatcgttaagtatca

SEQ ID NO: 118243 - DNA, 25 bp, Probe sequence
attatttactttgctcttctatttt

SEQ ID NO: 118244 - DNA, 25 bp, Probe sequence
ataactatatcaattatttactttg

SEQ ID NO: 118245 - DNA, 25 bp, Probe sequence
atgacatttaaaagtaggggagaca

SEQ ID NO: 118246 - DNA, 25 bp, Probe sequence
atggtcttaacctgttttcaatttg

SEQ ID NO: 118247 - DNA, 25 bp, Probe sequence
acaatagttcctaggattactctca

SEQ ID NO: 118248 - DNA, 25 bp, Probe sequence
aacctgttttcaatttgcatatgtg

SEQ ID NO: 118249 - DNA, 25 bp, Probe sequence
aattctatatcaaaatgcttatgta

SEQ ID NO: 118250 - DNA, 25 bp, Probe sequence
cttaacctgttttcaatttgcatat

SEQ ID NO: 118251 - DNA, 25 bp, Probe sequence
gagacaaaaaatggtcttaacctgt

SEQ ID NO: 118252 - DNA, 25 bp, Probe sequence
gttcctaggattactctcaaaataa

SEQ ID NO: 118253 - DNA, 25 bp, Probe sequence
gttttcaatttgcatatgtgataaa

SEQ ID NO: 118254 - DNA, 25 bp, Probe sequence
ggtcttaacctgttttcaatttgca

SEQ ID NO: 118255 - DNA, 25 bp, Probe sequence
ggattactctcaaaataactatatc

SEQ ID NO: 118256 - DNA, 25 bp, Probe sequence
tagttcctaggattactctcaaaat

SEQ ID NO: 118257 - DNA, 25 bp, Probe sequence
tatttactttgctcttctatttttt

SEQ ID NO: 118258 - DNA, 25 bp, Probe sequence
attagtatttcttatgcatgagttt

SEQ ID NO: 118259 - DNA, 25 bp, Probe sequence
atttcttatgcatgagttttactca

SEQ ID NO: 118260 - DNA, 25 bp, Probe sequence
agttttactcatgtattcatttttt

SEQ ID NO: 118261 - DNA, 25 bp, Probe sequence
aaattagtatttcttatgcatgagt

SEQ ID NO: 118262 - DNA, 25 bp, Probe sequence
gagttttactcatgtattcattttt

SEQ ID NO: 118263 - DNA, 25 bp, Probe sequence
gttttactcatgtattcatttttta

SEQ ID NO: 118264 - DNA, 25 bp, Probe sequence
gtattcattttttaagtagacatta

SEQ ID NO: 118265 - DNA, 25 bp, Probe sequence
tgagttttactcatgtattcatttt

SEQ ID NO: 118266 - DNA, 25 bp, Probe sequence
tcatgtattcattttttaagtagac

SEQ ID NO: 118267 - DNA, 25 bp, Probe sequence
tagtatttcttatgcatgagtttta

SEQ ID NO: 118268 - DNA, 25 bp, Probe sequence
taggacatcgataaaaaaatacttt

SEQ ID NO: 118269 - DNA, 25 bp, Probe sequence
tttttaagtagacattagctacagc

SEQ ID NO: 118270 - DNA, 25 bp, Probe sequence
tatttcttatgcatgagttttactc

SEQ ID NO: 118271 - DNA, 25 bp, Probe sequence
tattcattttttaagtagacattag

SEQ ID NO: 118272 - DNA, 25 bp, Probe sequence
tttactcatgtattcattttttaag

SEQ ID NO: 118273 - DNA, 25 bp, Probe sequence
atgctctttatgattctaaatgctt

SEQ ID NO: 118274 - DNA, 25 bp, Probe sequence
aatccgaaattaatcatgcatgcta

SEQ ID NO: 118275 - DNA, 25 bp, Probe sequence
aatccgcatcatttgttgttaataa

SEQ ID NO: 118276 - DNA, 25 bp, Probe sequence
aatcatgcatgctatatatactata

SEQ ID NO: 118277 - DNA, 25 bp, Probe sequence
aatatcgttaactgtaagctatctt

SEQ ID NO: 118278 - DNA, 25 bp, Probe sequence
gaatagtaatggtgcacagtataga

SEQ ID NO: 118279 - DNA, 25 bp, Probe sequence
gaagtccatacaaaatccgcatcat

SEQ ID NO: 118280 - DNA, 25 bp, Probe sequence
gatgttgactccttataatatatgt

SEQ ID NO: 118281 - DNA, 25 bp, Probe sequence
gatgatatttgctttttattttcca

SEQ ID NO: 118282 - DNA, 25 bp, Probe sequence
gattatctaattttcatttgcttta

SEQ ID NO: 118283 - DNA, 25 bp, Probe sequence
gtaaggatgttcaattgtttcaaat

SEQ ID NO: 118284 - DNA, 25 bp, Probe sequence
gtaagctatctttagttttaatata

SEQ ID NO: 118285 - DNA, 25 bp, Probe sequence
ggctatatatagtatgctctttatg

SEQ ID NO: 118286 - DNA, 25 bp, Probe sequence
tgttaatttttgttcaccaccttat

SEQ ID NO: 118287 - DNA, 25 bp, Probe sequence
tgttcaccaccttatacttctattt

SEQ ID NO: 118288 - DNA, 25 bp, Probe sequence
atagtgtcatgtttagtctaatttt

SEQ ID NO: 118289 - DNA, 25 bp, Probe sequence
aggaaagcaaatcaagtacatagtt

SEQ ID NO: 118290 - DNA, 25 bp, Probe sequence
agtataaaaattaggttcttcatct

SEQ ID NO: 118291 - DNA, 25 bp, Probe sequence
acatggaattcaaatttcttatttt

SEQ ID NO: 118292 - DNA, 25 bp, Probe sequence
acaacttcgtacaatatctagatga

SEQ ID NO: 118293 - DNA, 25 bp, Probe sequence
aaatcacctcatatagtgtcatgtt

SEQ ID NO: 118294 - DNA, 25 bp, Probe sequence
aaagggtttgacaacatggaattca

SEQ ID NO: 118295 - DNA, 25 bp, Probe sequence
aattctgcaaatatattaacacata

SEQ ID NO: 118296 - DNA, 25 bp, Probe sequence
gaaatctttttcaattatatgtact

SEQ ID NO: 118297 - DNA, 25 bp, Probe sequence
gatgaacattaattgtatttctaga

SEQ ID NO: 118298 - DNA, 25 bp, Probe sequence
gtttaacttattcatacaacttcgt

SEQ ID NO: 118299 - DNA, 25 bp, Probe sequence
tgttaacctccttgaacatttaaat

SEQ ID NO: 118300 - DNA, 25 bp, Probe sequence
tgtttagtctaatttttaagtcagg

SEQ ID NO: 118301 - DNA, 25 bp, Probe sequence
taacctccttgaacatttaaattga

SEQ ID NO: 118302 - DNA, 25 bp, Probe sequence
taaatttcttatttcagtatagttt

SEQ ID NO: 118303 - DNA, 25 bp, Probe sequence
atttctgaagttatcggctaaagtt

SEQ ID NO: 118304 - DNA, 25 bp, Probe sequence
atcatttctgaagttatcggctaaa

SEQ ID NO: 118305 - DNA, 25 bp, Probe sequence
acatcatttctgaagttatcggcta

SEQ ID NO: 118306 - DNA, 25 bp, Probe sequence
aaacatcatttctgaagttatcggc

SEQ ID NO: 118307 - DNA, 25 bp, Probe sequence
aaaacatcatttctgaagttatcgg

SEQ ID NO: 118308 - DNA, 25 bp, Probe sequence
aacatcatttctgaagttatcggct

SEQ ID NO: 118309 - DNA, 25 bp, Probe sequence
aattatatttatttgtacatgaaca

SEQ ID NO: 118310 - DNA, 25 bp, Probe sequence
catcatttctgaagttatcggctaa

SEQ ID NO: 118311 - DNA, 25 bp, Probe sequence
catttctgaagttatcggctaaagt

SEQ ID NO: 118312 - DNA, 25 bp, Probe sequence
gaagttatcggctaaagttataaat

SEQ ID NO: 118313 - DNA, 25 bp, Probe sequence
gaaaaacatcatttctgaagttatc

SEQ ID NO: 118314 - DNA, 25 bp, Probe sequence
tctgaagttatcggctaaagttata

SEQ ID NO: 118315 - DNA, 25 bp, Probe sequence
tcatttctgaagttatcggctaaag

SEQ ID NO: 118316 - DNA, 25 bp, Probe sequence
tttctgaagttatcggctaaagtta

SEQ ID NO: 118317 - DNA, 25 bp, Probe sequence
ttctgaagttatcggctaaagttat

SEQ ID NO: 118318 - DNA, 25 bp, Probe sequence
agaatattgcagttgagacatatca

SEQ ID NO: 118319 - DNA, 25 bp, Probe sequence
aaagacatagctaattttattgatt

SEQ ID NO: 118320 - DNA, 25 bp, Probe sequence
aagtatcgtatgtatttttaatata

SEQ ID NO: 118321 - DNA, 25 bp, Probe sequence
caatttcgagggttagtcaaagttg

SEQ ID NO: 118322 - DNA, 25 bp, Probe sequence
gcaactgataaattactgagtgatg

SEQ ID NO: 118323 - DNA, 25 bp, Probe sequence
gaaaattttgagtataggttagctt

SEQ ID NO: 118324 - DNA, 25 bp, Probe sequence
gagtgatgatgagtgattattttaa

SEQ ID NO: 118325 - DNA, 25 bp, Probe sequence
gtagatttttagttagaggcattat

SEQ ID NO: 118326 - DNA, 25 bp, Probe sequence
ggttagcttttaattatgaatctta

SEQ ID NO: 118327 - DNA, 25 bp, Probe sequence
ggaagcatttcaatttcgagggtta

SEQ ID NO: 118328 - DNA, 25 bp, Probe sequence
tcatccttctattttttttaacgat

SEQ ID NO: 118329 - DNA, 25 bp, Probe sequence
tttcatcatccttctatttttttta

SEQ ID NO: 118330 - DNA, 25 bp, Probe sequence
ttatgtttggaatttcgtcgggaat

SEQ ID NO: 118331 - DNA, 25 bp, Probe sequence
ttttgccattacatagaaatatcta

SEQ ID NO: 118332 - DNA, 25 bp, Probe sequence
ttcgtcgggaataatttttgccatt

SEQ ID NO: 118333 - DNA, 25 bp, Probe sequence
atttcacctattatatacatcatac

SEQ ID NO: 118334 - DNA, 25 bp, Probe sequence
atatacatcatacactttaaaaatt

SEQ ID NO: 118335 - DNA, 25 bp, Probe sequence
atctgatttggaattaaagtgcatg

SEQ ID NO: 118336 - DNA, 25 bp, Probe sequence
atgaagtataagtcaccttcatata

SEQ ID NO: 118337 - DNA, 25 bp, Probe sequence
aaatttcacctattatatacatcat

SEQ ID NO: 118338 - DNA, 25 bp, Probe sequence
aagtgcatgaagtataagtcacctt

SEQ ID NO: 118339 - DNA, 25 bp, Probe sequence
cacctattatatacatcatacactt

SEQ ID NO: 118340 - DNA, 25 bp, Probe sequence
ctattatatacatcatacactttaa

SEQ ID NO: 118341 - DNA, 25 bp, Probe sequence
ctcccaattccatttaaatatatag

SEQ ID NO: 118342 - DNA, 25 bp, Probe sequence
cctactcccaattccatttaaatat

SEQ ID NO: 118343 - DNA, 25 bp, Probe sequence
gaaaatttcacctattatatacatc

SEQ ID NO: 118344 - DNA, 25 bp, Probe sequence
tcctactcccaattccatttaaata

SEQ ID NO: 118345 - DNA, 25 bp, Probe sequence
tactcccaattccatttaaatatat

SEQ ID NO: 118346 - DNA, 25 bp, Probe sequence
ttcctactcccaattccatttaaat

SEQ ID NO: 118347 - DNA, 25 bp, Probe sequence
ttcacctattatatacatcatacac

SEQ ID NO: 118348 - DNA, 25 bp, Probe sequence
attatccgcatttacaaaaggtaat

SEQ ID NO: 118349 - DNA, 25 bp, Probe sequence
atttctcctttgagtattgttggaa

SEQ ID NO: 118350 - DNA, 25 bp, Probe sequence
ataattgaaattatccgcatttaca

SEQ ID NO: 118351 - DNA, 25 bp, Probe sequence
atccgcatttacaaaaggtaatagg

SEQ ID NO: 118352 - DNA, 25 bp, Probe sequence
aatttctcctttgagtattgttgga

SEQ ID NO: 118353 - DNA, 25 bp, Probe sequence
aattgaaattatccgcatttacaaa

SEQ ID NO: 118354 - DNA, 25 bp, Probe sequence
cgaatttctcctttgagtattgttg

SEQ ID NO: 118355 - DNA, 25 bp, Probe sequence
cctttgagtattgttggaatgttta

SEQ ID NO: 118356 - DNA, 25 bp, Probe sequence
gaatttctcctttgagtattgttgg

SEQ ID NO: 118357 - DNA, 25 bp, Probe sequence
gaaattatccgcatttacaaaaggt

SEQ ID NO: 118358 - DNA, 25 bp, Probe sequence
gagtattgttggaatgtttaattat

SEQ ID NO: 118359 - DNA, 25 bp, Probe sequence
tcgaatttctcctttgagtattgtt

SEQ ID NO: 118360 - DNA, 25 bp, Probe sequence
tctcctttgagtattgttggaatgt

SEQ ID NO: 118361 - DNA, 25 bp, Probe sequence
ttctcctttgagtattgttggaatg

SEQ ID NO: 118362 - DNA, 25 bp, Probe sequence
ttgaaattatccgcatttacaaaag

SEQ ID NO: 118363 - DNA, 25 bp, Probe sequence
attattctctaatcaattgcattaa

SEQ ID NO: 118364 - DNA, 25 bp, Probe sequence
atctcctttgcgtgaattacccaaa

SEQ ID NO: 118365 - DNA, 25 bp, Probe sequence
acagttagtagtgttatttaagcaa

SEQ ID NO: 118366 - DNA, 25 bp, Probe sequence
aaacgacacgttacaattattctct

SEQ ID NO: 118367 - DNA, 25 bp, Probe sequence
gctattacaccgattcggaattaaa

SEQ ID NO: 118368 - DNA, 25 bp, Probe sequence
gaattacccaaagtatataagctat

SEQ ID NO: 118369 - DNA, 25 bp, Probe sequence
gaaaatctcctttgcgtgaattacc

SEQ ID NO: 118370 - DNA, 25 bp, Probe sequence
gacacgttacaattattctctaatc

SEQ ID NO: 118371 - DNA, 25 bp, Probe sequence
gataattgaattttctaactacttg

SEQ ID NO: 118372 - DNA, 25 bp, Probe sequence
ggttgtgtttattttgtatgcgctt

SEQ ID NO: 118373 - DNA, 25 bp, Probe sequence
tgtatgcgcttacaatttaggtgta

SEQ ID NO: 118374 - DNA, 25 bp, Probe sequence
taaagtaggcgggagttatatatta

SEQ ID NO: 118375 - DNA, 25 bp, Probe sequence
tataagctattacaccgattcggaa

SEQ ID NO: 118376 - DNA, 25 bp, Probe sequence
tttggacagaaacagtacttaataa

SEQ ID NO: 118377 - DNA, 25 bp, Probe sequence
ttatcatttttaagttttggacaga

SEQ ID NO: 118378 - DNA, 25 bp, Probe sequence
atttatgtgcaccccctgaaaataa

SEQ ID NO: 118379 - DNA, 25 bp, Probe sequence
atatgtcaaatgcatgatttttatt

SEQ ID NO: 118380 - DNA, 25 bp, Probe sequence
acgcttttcaattactatatgtcaa

SEQ ID NO: 118381 - DNA, 25 bp, Probe sequence
caccccctgaaaataatgcctctat

SEQ ID NO: 118382 - DNA, 25 bp, Probe sequence
gcctctattttgatgcggggtgcac

SEQ ID NO: 118383 - DNA, 25 bp, Probe sequence
gaaacgcttttcaattactatatgt

SEQ ID NO: 118384 - DNA, 25 bp, Probe sequence
gatgcggggtgcactttcttaattt

SEQ ID NO: 118385 - DNA, 25 bp, Probe sequence
gatttttattatttatgtgcacccc

SEQ ID NO: 118386 - DNA, 25 bp, Probe sequence
gtagaaatgctaggttaaatgtcga

SEQ ID NO: 118387 - DNA, 25 bp, Probe sequence
gtgcaccccctgaaaataatgcctc

SEQ ID NO: 118388 - DNA, 25 bp, Probe sequence
tgctaggttaaatgtcgaaggagat

SEQ ID NO: 118389 - DNA, 25 bp, Probe sequence
taatgcctctattttgatgcggggt

SEQ ID NO: 118390 - DNA, 25 bp, Probe sequence
tttattatttatgtgcaccccctga

SEQ ID NO: 118391 - DNA, 25 bp, Probe sequence
ttttgatgcggggtgcactttctta

SEQ ID NO: 118392 - DNA, 25 bp, Probe sequence
ttatttatgtgcaccccctgaaaat

SEQ ID NO: 118393 - DNA, 25 bp, Probe sequence
actaattgggttttatgcatctcgt

SEQ ID NO: 118394 - DNA, 25 bp, Probe sequence
aaatatgtatttgctgtaaacagtt

SEQ ID NO: 118395 - DNA, 25 bp, Probe sequence
aaacagtttttgtaacacatgacac

SEQ ID NO: 118396 - DNA, 25 bp, Probe sequence
aactaagcgaggtgcattattattt

SEQ ID NO: 118397 - DNA, 25 bp, Probe sequence
aatgacggtaatgataacactagta

SEQ ID NO: 118398 - DNA, 25 bp, Probe sequence
gcatctcgtaggtttgtagaaatac

SEQ ID NO: 118399 - DNA, 25 bp, Probe sequence
gaaatactaaactaagcgaggtgca

SEQ ID NO: 118400 - DNA, 25 bp, Probe sequence
gatacaatgctctatttaataatga

SEQ ID NO: 118401 - DNA, 25 bp, Probe sequence
gttttatgcatctcgtaggtttgta

SEQ ID NO: 118402 - DNA, 25 bp, Probe sequence
gttagatctatggtatattatattt

SEQ ID NO: 118403 - DNA, 25 bp, Probe sequence
gtttttaatgtaatgttagatctat

SEQ ID NO: 118404 - DNA, 25 bp, Probe sequence
gtgcattattatttttgattaagaa

SEQ ID NO: 118405 - DNA, 25 bp, Probe sequence
tgggttttatgcatctcgtaggttt

SEQ ID NO: 118406 - DNA, 25 bp, Probe sequence
tgtaacacatgacacatatggttgt

SEQ ID NO: 118407 - DNA, 25 bp, Probe sequence
taattgatacaatgctctatttaat

SEQ ID NO: 118408 - DNA, 25 bp, Probe sequence
attttattggtatattagccttggc

SEQ ID NO: 118409 - DNA, 25 bp, Probe sequence
atattagccttggcgtttgctgctt

SEQ ID NO: 118410 - DNA, 25 bp, Probe sequence
aggcaagattacctgcctctttttt

SEQ ID NO: 118411 - DNA, 25 bp, Probe sequence
acgtgtttatgaactagacgttcta

SEQ ID NO: 118412 - DNA, 25 bp, Probe sequence
acagctttagtcagaaggtatcatt

SEQ ID NO: 118413 - DNA, 25 bp, Probe sequence
aaagaggcattgatatacactaaaa

SEQ ID NO: 118414 - DNA, 25 bp, Probe sequence
aaggttagagtgaaacgtgtttatg

SEQ ID NO: 118415 - DNA, 25 bp, Probe sequence
caagattacctgcctcttttttagt

SEQ ID NO: 118416 - DNA, 25 bp, Probe sequence
gccttggcgtttgctgcttatatat

SEQ ID NO: 118417 - DNA, 25 bp, Probe sequence
gacgttctagtatagttactacagc

SEQ ID NO: 118418 - DNA, 25 bp, Probe sequence
gaggtgataaaatttgtcaactatt

SEQ ID NO: 118419 - DNA, 25 bp, Probe sequence
gtatagttactacagctttagtcag

SEQ ID NO: 118420 - DNA, 25 bp, Probe sequence
tggcgtttgctgcttatatattatt

SEQ ID NO: 118421 - DNA, 25 bp, Probe sequence
ttagccttggcgtttgctgcttata

SEQ ID NO: 118422 - DNA, 25 bp, Probe sequence
ttaaatatgcgtgttaattcttggt

SEQ ID NO: 118423 - DNA, 25 bp, Probe sequence
aacctttcttatgtgattttcttca

SEQ ID NO: 118424 - DNA, 25 bp, Probe sequence
aatgatatttgaggtatgctttgca

SEQ ID NO: 118425 - DNA, 25 bp, Probe sequence
gctttgcaacctaaatattggaata

SEQ ID NO: 118426 - DNA, 25 bp, Probe sequence
gaagagtgtgtactattacgttatt

SEQ ID NO: 118427 - DNA, 25 bp, Probe sequence
gacacataattgacatttaaatctc

SEQ ID NO: 118428 - DNA, 25 bp, Probe sequence
gagtatgtatattggattgatagac

SEQ ID NO: 118429 - DNA, 25 bp, Probe sequence
gatgattgaagatttacaagggggt

SEQ ID NO: 118430 - DNA, 25 bp, Probe sequence
gatagctatggccaattaataagaa

SEQ ID NO: 118431 - DNA, 25 bp, Probe sequence
gatttacaacctttcttatgtgatt

SEQ ID NO: 118432 - DNA, 25 bp, Probe sequence
gattttcttcactaattatatcatg

SEQ ID NO: 118433 - DNA, 25 bp, Probe sequence
gtatgctttgcaacctaaatattgg

SEQ ID NO: 118434 - DNA, 25 bp, Probe sequence
gtgtgtactattacgttattagagt

SEQ ID NO: 118435 - DNA, 25 bp, Probe sequence
ggattgatagacacataattgacat

SEQ ID NO: 118436 - DNA, 25 bp, Probe sequence
tatatcatgatagctatggccaatt

SEQ ID NO: 118437 - DNA, 25 bp, Probe sequence
tttgaggtatgctttgcaacctaaa

SEQ ID NO: 118438 - DNA, 25 bp, Probe sequence
attactgtattttcggggcttatgc

SEQ ID NO: 118439 - DNA, 25 bp, Probe sequence
agagccccgtaatcacggaactctt

SEQ ID NO: 118440 - DNA, 25 bp, Probe sequence
ataattaaaaaaccacgtctcgatg

SEQ ID NO: 118441 - DNA, 25 bp, Probe sequence
aaatctctacgcatgcaaatggtga

SEQ ID NO: 118442 - DNA, 25 bp, Probe sequence
aaacaagtgtcagacgcgtgtcaat

SEQ ID NO: 118443 - DNA, 25 bp, Probe sequence
aaaatcttggtgtagtgttggtgta

SEQ ID NO: 118444 - DNA, 25 bp, Probe sequence
aactcttttgtttggtaatgcgtat

SEQ ID NO: 118445 - DNA, 25 bp, Probe sequence
aagcatgcttgttttaattactgta

SEQ ID NO: 118446 - DNA, 25 bp, Probe sequence
gacgcgtgtcaattgtgtgtcaaaa

SEQ ID NO: 118447 - DNA, 25 bp, Probe sequence
gttggtgtagttcaggtgcagtata

SEQ ID NO: 118448 - DNA, 25 bp, Probe sequence
ggcttatgcgggggacgttttggtg

SEQ ID NO: 118449 - DNA, 25 bp, Probe sequence
gtctcgatggacgtggttatttttt

SEQ ID NO: 118450 - DNA, 25 bp, Probe sequence
gggacgttttggtgacgcatcatac

SEQ ID NO: 118451 - DNA, 25 bp, Probe sequence
ggtgacgcatcatactatattactg

SEQ ID NO: 118452 - DNA, 25 bp, Probe sequence
tataggatttcgggcccctgaaaag

SEQ ID NO: 118453 - DNA, 25 bp, Probe sequence
atttcggtgatttaaaagctacgca

SEQ ID NO: 118454 - DNA, 25 bp, Probe sequence
ataagacttaaatgcgaattcaggc

SEQ ID NO: 118455 - DNA, 25 bp, Probe sequence
agctacgcacgtttttgttatcttc

SEQ ID NO: 118456 - DNA, 25 bp, Probe sequence
aaatgtttatatttttcactattat

SEQ ID NO: 118457 - DNA, 25 bp, Probe sequence
gcggataaacaaactaattgcatca

SEQ ID NO: 118458 - DNA, 25 bp, Probe sequence
gcacgtttttgttatcttcaaattt

SEQ ID NO: 118459 - DNA, 25 bp, Probe sequence
gaattcaggcaacttaattgtgtta

SEQ ID NO: 118460 - DNA, 25 bp, Probe sequence
gaacttaaattagcaataccttgta

SEQ ID NO: 118461 - DNA, 25 bp, Probe sequence
gagctatttatctaaaaaggttcaa

SEQ ID NO: 118462 - DNA, 25 bp, Probe sequence
gttaagcgaataacatttcggtgat

SEQ ID NO: 118463 - DNA, 25 bp, Probe sequence
gttttgaatgcctaactgtatttct

SEQ ID NO: 118464 - DNA, 25 bp, Probe sequence
gtacattataagatgttgtgcggat

SEQ ID NO: 118465 - DNA, 25 bp, Probe sequence
gtgttaaatacagttttgaatgcct

SEQ ID NO: 118466 - DNA, 25 bp, Probe sequence
tgcctaactgtatttcttttctctt

SEQ ID NO: 118467 - DNA, 25 bp, Probe sequence
tatttcttttctctttaaaatacag

SEQ ID NO: 118468 - DNA, 25 bp, Probe sequence
atttcaaaggtgagggagagattta

SEQ ID NO: 118469 - DNA, 25 bp, Probe sequence
atatgttatgtaagtaatcagtatt

SEQ ID NO: 118470 - DNA, 25 bp, Probe sequence
atcagtattatttcaaaggtgaggg

SEQ ID NO: 118471 - DNA, 25 bp, Probe sequence
atgtaagtaatcagtattatttcaa

SEQ ID NO: 118472 - DNA, 25 bp, Probe sequence
atgttatgtaagtaatcagtattat

SEQ ID NO: 118473 - DNA, 25 bp, Probe sequence
aagtaatcagtattatttcaaaggt

SEQ ID NO: 118474 - DNA, 25 bp, Probe sequence
aatcagtattatttcaaaggtgagg

SEQ ID NO: 118475 - DNA, 25 bp, Probe sequence
caatatgttatgtaagtaatcagta

SEQ ID NO: 118476 - DNA, 25 bp, Probe sequence
cagtattatttcaaaggtgagggag

SEQ ID NO: 118477 - DNA, 25 bp, Probe sequence
gtattatttcaaaggtgagggagag

SEQ ID NO: 118478 - DNA, 25 bp, Probe sequence
gtaagtaatcagtattatttcaaag

SEQ ID NO: 118479 - DNA, 25 bp, Probe sequence
gtaatcagtattatttcaaaggtga

SEQ ID NO: 118480 - DNA, 25 bp, Probe sequence
tcagtattatttcaaaggtgaggga

SEQ ID NO: 118481 - DNA, 25 bp, Probe sequence
taatcagtattatttcaaaggtgag

SEQ ID NO: 118482 - DNA, 25 bp, Probe sequence
ttcaaaggtgagggagagatttaaa

SEQ ID NO: 118483 - DNA, 25 bp, Probe sequence
atttgcagaaatttgagcctctgtt

SEQ ID NO: 118484 - DNA, 25 bp, Probe sequence
atttgagcctctgttaagatttaga

SEQ ID NO: 118485 - DNA, 25 bp, Probe sequence
atagacaatataggagatggggaaa

SEQ ID NO: 118486 - DNA, 25 bp, Probe sequence
atactttaatgttatgcactcagtt

SEQ ID NO: 118487 - DNA, 25 bp, Probe sequence
actttaatgttatgcactcagttta

SEQ ID NO: 118488 - DNA, 25 bp, Probe sequence
aaaataaactgggtgagcatacttt

SEQ ID NO: 118489 - DNA, 25 bp, Probe sequence
aactgggtgagcatactttaatgtt

SEQ ID NO: 118490 - DNA, 25 bp, Probe sequence
aatgttatgcactcagtttatttta

SEQ ID NO: 118491 - DNA, 25 bp, Probe sequence
cactcagtttattttatttgcagaa

SEQ ID NO: 118492 - DNA, 25 bp, Probe sequence
ctgggtgagcatactttaatgttat

SEQ ID NO: 118493 - DNA, 25 bp, Probe sequence
gcctctgttaagatttagatacata

SEQ ID NO: 118494 - DNA, 25 bp, Probe sequence
gaaatttgagcctctgttaagattt

SEQ ID NO: 118495 - DNA, 25 bp, Probe sequence
gttatgcactcagtttattttattt

SEQ ID NO: 118496 - DNA, 25 bp, Probe sequence
gagcctctgttaagatttagataca

SEQ ID NO: 118497 - DNA, 25 bp, Probe sequence
tatgcactcagtttattttatttgc

SEQ ID NO: 118498 - DNA, 25 bp, Probe sequence
aaatgatttacttatattagcttaa

SEQ ID NO: 118499 - DNA, 25 bp, Probe sequence
aaagatgcattttcatgctcgtagt

SEQ ID NO: 118500 - DNA, 25 bp, Probe sequence
aaaacgacactacgaaaagatgcat

SEQ ID NO: 118501 - DNA, 25 bp, Probe sequence
aacgacactacgaaaagatgcattt

SEQ ID NO: 118502 - DNA, 25 bp, Probe sequence
aagatgcattttcatgctcgtagtg

SEQ ID NO: 118503 - DNA, 25 bp, Probe sequence
catgctcgtagtgtcgaatattatt

SEQ ID NO: 118504 - DNA, 25 bp, Probe sequence
cattttcatgctcgtagtgtcgaat

SEQ ID NO: 118505 - DNA, 25 bp, Probe sequence
gctcgtagtgtcgaatattattatc

SEQ ID NO: 118506 - DNA, 25 bp, Probe sequence
gcattttcatgctcgtagtgtcgaa

SEQ ID NO: 118507 - DNA, 25 bp, Probe sequence
gaaaagatgcattttcatgctcgta

SEQ ID NO: 118508 - DNA, 25 bp, Probe sequence
gaaaatgatttacttatattagctt

SEQ ID NO: 118509 - DNA, 25 bp, Probe sequence
gatgcattttcatgctcgtagtgtc

SEQ ID NO: 118510 - DNA, 25 bp, Probe sequence
tgcattttcatgctcgtagtgtcga

SEQ ID NO: 118511 - DNA, 25 bp, Probe sequence
ttttcatgctcgtagtgtcgaatat

SEQ ID NO: 118512 - DNA, 25 bp, Probe sequence
ttcatgctcgtagtgtcgaatatta

SEQ ID NO: 118513 - DNA, 25 bp, Probe sequence
atcaccggtatagactttatactat

SEQ ID NO: 118514 - DNA, 25 bp, Probe sequence
acattaaaccacttgtgtttttcat

SEQ ID NO: 118515 - DNA, 25 bp, Probe sequence
aaccacttgtgtttttcattgattt

SEQ ID NO: 118516 - DNA, 25 bp, Probe sequence
aattgtcaatcaccggtatagactt

SEQ ID NO: 118517 - DNA, 25 bp, Probe sequence
ctactattattatacattaaaccac

SEQ ID NO: 118518 - DNA, 25 bp, Probe sequence
ccacttgtgtttttcattgatttga

SEQ ID NO: 118519 - DNA, 25 bp, Probe sequence
gccgtaaaattgtcaatcaccggta

SEQ ID NO: 118520 - DNA, 25 bp, Probe sequence
gaacattataaattttccatgatta

SEQ ID NO: 118521 - DNA, 25 bp, Probe sequence
gattaaattgattttcaagccgtaa

SEQ ID NO: 118522 - DNA, 25 bp, Probe sequence
gtttgtaatcgcgtacttaaggaga

SEQ ID NO: 118523 - DNA, 25 bp, Probe sequence
gtcaatcaccggtatagactttata

SEQ ID NO: 118524 - DNA, 25 bp, Probe sequence
tgtaatcgcgtacttaaggagaaaa

SEQ ID NO: 118525 - DNA, 25 bp, Probe sequence
tcaagccgtaaaattgtcaatcacc

SEQ ID NO: 118526 - DNA, 25 bp, Probe sequence
taaaattgtcaatcaccggtataga

SEQ ID NO: 118527 - DNA, 25 bp, Probe sequence
tactatagtttgtaatcgcgtactt

SEQ ID NO: 118528 - DNA, 25 bp, Probe sequence
aaatagtggtggatagtggggagat

SEQ ID NO: 118529 - DNA, 25 bp, Probe sequence
atagtggtggatagtggggagatgt

SEQ ID NO: 118530 - DNA, 25 bp, Probe sequence
atgataaatcgggcatttttttgtt

SEQ ID NO: 118531 - DNA, 25 bp, Probe sequence
agtggtggatagtggggagatgtgg

SEQ ID NO: 118532 - DNA, 25 bp, Probe sequence
gggtttagcccgatttatcttaatg

SEQ ID NO: 118533 - DNA, 25 bp, Probe sequence
gtttagcccgatttatcttaatgat

SEQ ID NO: 118534 - DNA, 25 bp, Probe sequence
gtggtggatagtggggagatgtggt

SEQ ID NO: 118535 - DNA, 25 bp, Probe sequence
ggtggatagtggggagatgtggtaa

SEQ ID NO: 118536 - DNA, 25 bp, Probe sequence
ggtttagcccgatttatcttaatga

SEQ ID NO: 118537 - DNA, 25 bp, Probe sequence
ggatagtggggagatgtggtaaatt

SEQ ID NO: 118538 - DNA, 25 bp, Probe sequence
tggggagatgtggtaaattatatat

SEQ ID NO: 118539 - DNA, 25 bp, Probe sequence
tgataaatcgggcatttttttgttt

SEQ ID NO: 118540 - DNA, 25 bp, Probe sequence
tagtggggagatgtggtaaattata

SEQ ID NO: 118541 - DNA, 25 bp, Probe sequence
tttagcccgatttatcttaatgata

SEQ ID NO: 118542 - DNA, 25 bp, Probe sequence
ttagcccgatttatcttaatgataa

SEQ ID NO: 118543 - DNA, 25 bp, Probe sequence
ataagggtgtattgtcactatttgt

SEQ ID NO: 118544 - DNA, 25 bp, Probe sequence
aaaacatcttcatttaatctttata

SEQ ID NO: 118545 - DNA, 25 bp, Probe sequence
aactttttatactggcctcttatgc

SEQ ID NO: 118546 - DNA, 25 bp, Probe sequence
ctggcctcttatgccgtaaaaaaga

SEQ ID NO: 118547 - DNA, 25 bp, Probe sequence
gaatggctacattaaataagggtgt

SEQ ID NO: 118548 - DNA, 25 bp, Probe sequence
gacgaggtcagattaacttgtttgt

SEQ ID NO: 118549 - DNA, 25 bp, Probe sequence
gagaattttaaggtagacgaggtca

SEQ ID NO: 118550 - DNA, 25 bp, Probe sequence
gattacaactttgtttatttaattg

SEQ ID NO: 118551 - DNA, 25 bp, Probe sequence
gattaacttgtttgttataggcaaa

SEQ ID NO: 118552 - DNA, 25 bp, Probe sequence
ggcaaactttttatactggcctctt

SEQ ID NO: 118553 - DNA, 25 bp, Probe sequence
tgtcactatttgtttttactaaagt

SEQ ID NO: 118554 - DNA, 25 bp, Probe sequence
tataaattttgattacaactttgtt

SEQ ID NO: 118555 - DNA, 25 bp, Probe sequence
tatactggcctcttatgccgtaaaa

SEQ ID NO: 118556 - DNA, 25 bp, Probe sequence
tttactaaagtaatgctgtgataga

SEQ ID NO: 118557 - DNA, 25 bp, Probe sequence
ttttatactggcctcttatgccgta

SEQ ID NO: 118558 - DNA, 25 bp, Probe sequence
atagttcacaagccattcaacgtat

SEQ ID NO: 118559 - DNA, 25 bp, Probe sequence
atgtttatagttcacaagccattca

SEQ ID NO: 118560 - DNA, 25 bp, Probe sequence
agttcacaagccattcaacgtattg

SEQ ID NO: 118561 - DNA, 25 bp, Probe sequence
aaaattttgatattgtctatgttta

SEQ ID NO: 118562 - DNA, 25 bp, Probe sequence
caacgtattgtaaactaaggatagt

SEQ ID NO: 118563 - DNA, 25 bp, Probe sequence
caagccattcaacgtattgtaaact

SEQ ID NO: 118564 - DNA, 25 bp, Probe sequence
gccattcaacgtattgtaaactaag

SEQ ID NO: 118565 - DNA, 25 bp, Probe sequence
gatattgtctatgtttatagttcac

SEQ ID NO: 118566 - DNA, 25 bp, Probe sequence
gttcacaagccattcaacgtattgt

SEQ ID NO: 118567 - DNA, 25 bp, Probe sequence
gtttatagttcacaagccattcaac

SEQ ID NO: 118568 - DNA, 25 bp, Probe sequence
tctatgtttatagttcacaagccat

SEQ ID NO: 118569 - DNA, 25 bp, Probe sequence
tcacaagccattcaacgtattgtaa

SEQ ID NO: 118570 - DNA, 25 bp, Probe sequence
taaggatagtgtatttttttaatag

SEQ ID NO: 118571 - DNA, 25 bp, Probe sequence
tttttaatagtaatttgtcaggagg

SEQ ID NO: 118572 - DNA, 25 bp, Probe sequence
ttatagttcacaagccattcaacgt

SEQ ID NO: 118573 - DNA, 25 bp, Probe sequence
atatctgatgatttttttactaatt

SEQ ID NO: 118574 - DNA, 25 bp, Probe sequence
agtgtttaagtatcgtgtcaaaatt

SEQ ID NO: 118575 - DNA, 25 bp, Probe sequence
agataacatatctgatgattttttt

SEQ ID NO: 118576 - DNA, 25 bp, Probe sequence
actttgtacagttagacgaagataa

SEQ ID NO: 118577 - DNA, 25 bp, Probe sequence
aatttttagaacatgtagaaggaca

SEQ ID NO: 118578 - DNA, 25 bp, Probe sequence
aattcaacacaaatcatcagataac

SEQ ID NO: 118579 - DNA, 25 bp, Probe sequence
gtatcgtgtcaaaattaagtcaaaa

SEQ ID NO: 118580 - DNA, 25 bp, Probe sequence
gtcaaaaattatttgcgcaacattt

SEQ ID NO: 118581 - DNA, 25 bp, Probe sequence
ggacatttaagtttttcgaagtcat

SEQ ID NO: 118582 - DNA, 25 bp, Probe sequence
taaaagtgtttaagtatcgtgtcaa

SEQ ID NO: 118583 - DNA, 25 bp, Probe sequence
taaatgaaatgatggtgacgatcga

SEQ ID NO: 118584 - DNA, 25 bp, Probe sequence
tatatacacaaataattcaacacaa

SEQ ID NO: 118585 - DNA, 25 bp, Probe sequence
tatataattattaactttgtacagt

SEQ ID NO: 118586 - DNA, 25 bp, Probe sequence
tatttgcgcaacattttaactttaa

SEQ ID NO: 118587 - DNA, 25 bp, Probe sequence
ttgcgcaacattttaactttaaaca

SEQ ID NO: 118588 - DNA, 25 bp, Probe sequence
attaagcgacataacgaggcaaggg

SEQ ID NO: 118589 - DNA, 25 bp, Probe sequence
atttttctgaatataagggcaatag

SEQ ID NO: 118590 - DNA, 25 bp, Probe sequence
atgatactttagcctcgtttttgat

SEQ ID NO: 118591 - DNA, 25 bp, Probe sequence
actttagcctcgtttttgatatgta

SEQ ID NO: 118592 - DNA, 25 bp, Probe sequence
acatgatactttagcctcgtttttg

SEQ ID NO: 118593 - DNA, 25 bp, Probe sequence
gcctcgtttttgatatgtatttttc

SEQ ID NO: 118594 - DNA, 25 bp, Probe sequence
gcgacataacgaggcaagggtacat

SEQ ID NO: 118595 - DNA, 25 bp, Probe sequence
gatactttagcctcgtttttgatat

SEQ ID NO: 118596 - DNA, 25 bp, Probe sequence
gtacatgatactttagcctcgtttt

SEQ ID NO: 118597 - DNA, 25 bp, Probe sequence
gggtacatgatactttagcctcgtt

SEQ ID NO: 118598 - DNA, 25 bp, Probe sequence
ggtacatgatactttagcctcgttt

SEQ ID NO: 118599 - DNA, 25 bp, Probe sequence
ggcaagggtacatgatactttagcc

SEQ ID NO: 118600 - DNA, 25 bp, Probe sequence
tcgtttttgatatgtatttttctga

SEQ ID NO: 118601 - DNA, 25 bp, Probe sequence
taacgaggcaagggtacatgatact

SEQ ID NO: 118602 - DNA, 25 bp, Probe sequence
ttagcctcgtttttgatatgtattt

SEQ ID NO: 118603 - DNA, 25 bp, Probe sequence
atatacatttaacttttcacagcga

SEQ ID NO: 118604 - DNA, 25 bp, Probe sequence
atacatttaacttttcacagcgaat

SEQ ID NO: 118605 - DNA, 25 bp, Probe sequence
atgttatatcactggctttttaata

SEQ ID NO: 118606 - DNA, 25 bp, Probe sequence
gcgaattaggtaatggtgagagcct

SEQ ID NO: 118607 - DNA, 25 bp, Probe sequence
gcatgtatgttatatcactggcttt

SEQ ID NO: 118608 - DNA, 25 bp, Probe sequence
gacgcgtaatatacatttaactttt

SEQ ID NO: 118609 - DNA, 25 bp, Probe sequence
gagagcctagtaaaagcatgtatgt

SEQ ID NO: 118610 - DNA, 25 bp, Probe sequence
ttgagttaataagggtggtaccgcg

SEQ ID NO: 118611 - DNA, 25 bp, Probe sequence
gtaatgagagaactctaagttgagt

SEQ ID NO: 118612 - DNA, 25 bp, Probe sequence
gtaatggtgagagcctagtaaaagc

SEQ ID NO: 118613 - DNA, 25 bp, Probe sequence
tgtatgttatatcactggcttttta

SEQ ID NO: 118614 - DNA, 25 bp, Probe sequence
taagggtggtaccgcgagcaatcgt

SEQ ID NO: 118615 - DNA, 25 bp, Probe sequence
taaagacagacgcgtaatatacatt

SEQ ID NO: 118616 - DNA, 25 bp, Probe sequence
tatcactggctttttaatatttaaa

SEQ ID NO: 118617 - DNA, 25 bp, Probe sequence
tttaacttttcacagcgaattaggt

SEQ ID NO: 118618 - DNA, 25 bp, Probe sequence
agtaagcacagatattgaatttgat

SEQ ID NO: 118619 - DNA, 25 bp, Probe sequence
aaatgcgttatagttgctattctca

SEQ ID NO: 118620 - DNA, 25 bp, Probe sequence
aaatgaccaagttactggttatatg

SEQ ID NO: 118621 - DNA, 25 bp, Probe sequence
aaagctctcttcataatcatgttgt

SEQ ID NO: 118622 - DNA, 25 bp, Probe sequence
aatggtacaaattctctgaagctta

SEQ ID NO: 118623 - DNA, 25 bp, Probe sequence
aatcatgttgtagtttttgttgaca

SEQ ID NO: 118624 - DNA, 25 bp, Probe sequence
caaattctctgaagcttataaatgc

SEQ ID NO: 118625 - DNA, 25 bp, Probe sequence
ccaagttactggttatatgtgttaa

SEQ ID NO: 118626 - DNA, 25 bp, Probe sequence
gctctcttcataatcatgttgtagt

SEQ ID NO: 118627 - DNA, 25 bp, Probe sequence
gctattctcaattatgttcgcgata

SEQ ID NO: 118628 - DNA, 25 bp, Probe sequence
gatgatataaattaaagctctcttc

SEQ ID NO: 118629 - DNA, 25 bp, Probe sequence
gatgaagagagtttttttgtgaata

SEQ ID NO: 118630 - DNA, 25 bp, Probe sequence
gttgctattctcaattatgttcgcg

SEQ ID NO: 118631 - DNA, 25 bp, Probe sequence
gtagtttttgttgacatgatgaaga

SEQ ID NO: 118632 - DNA, 25 bp, Probe sequence
tatgttcgcgataattttaagtaaa

SEQ ID NO: 118633 - DNA, 25 bp, Probe sequence
atactttgaatggacgaaccatata

SEQ ID NO: 118634 - DNA, 25 bp, Probe sequence
atgaatcgtttttaatgatcttttt

SEQ ID NO: 118635 - DNA, 25 bp, Probe sequence
accatataatgaatcgtttttaatg

SEQ ID NO: 118636 - DNA, 25 bp, Probe sequence
actttgaatggacgaaccatataat

SEQ ID NO: 118637 - DNA, 25 bp, Probe sequence
aatgaatcgtttttaatgatctttt

SEQ ID NO: 118638 - DNA, 25 bp, Probe sequence
cgaaccatataatgaatcgttttta

SEQ ID NO: 118639 - DNA, 25 bp, Probe sequence
gaatcgtttttaatgatctttttat

SEQ ID NO: 118640 - DNA, 25 bp, Probe sequence
gaaccatataatgaatcgtttttaa

SEQ ID NO: 118641 - DNA, 25 bp, Probe sequence
gtttttaatgatctttttatacaag

SEQ ID NO: 118642 - DNA, 25 bp, Probe sequence
ggacgaaccatataatgaatcgttt

SEQ ID NO: 118643 - DNA, 25 bp, Probe sequence
tgaatcgtttttaatgatcttttta

SEQ ID NO: 118644 - DNA, 25 bp, Probe sequence
tcgtttttaatgatctttttataca

SEQ ID NO: 118645 - DNA, 25 bp, Probe sequence
taatgaatcgtttttaatgatcttt

SEQ ID NO: 118646 - DNA, 25 bp, Probe sequence
tatatactttgaatggacgaaccat

SEQ ID NO: 118647 - DNA, 25 bp, Probe sequence
tatactttgaatggacgaaccatat

SEQ ID NO: 118648 - DNA, 25 bp, Probe sequence
agtgtagacgattcatgtcttattt

SEQ ID NO: 118649 - DNA, 25 bp, Probe sequence
agacgattcatgtcttattttttta

SEQ ID NO: 118650 - DNA, 25 bp, Probe sequence
actttcttaaattaacaatatctat

SEQ ID NO: 118651 - DNA, 25 bp, Probe sequence
ctttcttaaattaacaatatctatt

SEQ ID NO: 118652 - DNA, 25 bp, Probe sequence
ctactttcttaaattaacaatatct

SEQ ID NO: 118653 - DNA, 25 bp, Probe sequence
gcctactttcttaaattaacaatat

SEQ ID NO: 118654 - DNA, 25 bp, Probe sequence
gacgattcatgtcttatttttttaa

SEQ ID NO: 118655 - DNA, 25 bp, Probe sequence
gtagacgattcatgtcttatttttt

SEQ ID NO: 118656 - DNA, 25 bp, Probe sequence
gtgtagacgattcatgtcttatttt

SEQ ID NO: 118657 - DNA, 25 bp, Probe sequence
tgtagacgattcatgtcttattttt

SEQ ID NO: 118658 - DNA, 25 bp, Probe sequence
tactttcttaaattaacaatatcta

SEQ ID NO: 118659 - DNA, 25 bp, Probe sequence
tagacgattcatgtcttattttttt

SEQ ID NO: 118660 - DNA, 25 bp, Probe sequence
atcttactactgtctttttagggat

SEQ ID NO: 118661 - DNA, 25 bp, Probe sequence
atgtaatatgcttactttttttatt

SEQ ID NO: 118662 - DNA, 25 bp, Probe sequence
atggacgattgattggaggaacgaa

SEQ ID NO: 118663 - DNA, 25 bp, Probe sequence
agatgggcatagcgaagccattcaa

SEQ ID NO: 118664 - DNA, 25 bp, Probe sequence
aacatagtagtttatcaagtattga

SEQ ID NO: 118665 - DNA, 25 bp, Probe sequence
aagagttgtcttatggacgattgat

SEQ ID NO: 118666 - DNA, 25 bp, Probe sequence
aagttcatatttaatgtcaaaacat

SEQ ID NO: 118667 - DNA, 25 bp, Probe sequence
ccagcctgctttcctaatttttaat

SEQ ID NO: 118668 - DNA, 25 bp, Probe sequence
gcctgctttcctaatttttaatgtc

SEQ ID NO: 118669 - DNA, 25 bp, Probe sequence
gcttactttttttattagcaggtgt

SEQ ID NO: 118670 - DNA, 25 bp, Probe sequence
gaaaatatcttactactgtcttttt

SEQ ID NO: 118671 - DNA, 25 bp, Probe sequence
gtattgagtgagtaacattagattt

SEQ ID NO: 118672 - DNA, 25 bp, Probe sequence
gtgccagatgggcatagcgaagcca

SEQ ID NO: 118673 - DNA, 25 bp, Probe sequence
tgctttcctaatttttaatgtcatc

SEQ ID NO: 118674 - DNA, 25 bp, Probe sequence
tactactgtctttttagggatttat

SEQ ID NO: 118675 - DNA, 25 bp, Probe sequence
atagattgacaaagcgcctgattag

SEQ ID NO: 118676 - DNA, 25 bp, Probe sequence
atactaaacctcatgtcgatattaa

SEQ ID NO: 118677 - DNA, 25 bp, Probe sequence
ataacactttcacatatgcaagaat

SEQ ID NO: 118678 - DNA, 25 bp, Probe sequence
aaatgatcataacactttcacatat

SEQ ID NO: 118679 - DNA, 25 bp, Probe sequence
aaagagtctttaattgagcgtccag

SEQ ID NO: 118680 - DNA, 25 bp, Probe sequence
aaagcgcctgattagtattatcctt

SEQ ID NO: 118681 - DNA, 25 bp, Probe sequence
gcctgattagtattatccttataac

SEQ ID NO: 118682 - DNA, 25 bp, Probe sequence
gacatgaggttttttgtttctaaat

SEQ ID NO: 118683 - DNA, 25 bp, Probe sequence
gagcgtccagagagacgtcaaagac

SEQ ID NO: 118684 - DNA, 25 bp, Probe sequence
gattcttctatgtaaataggctgat

SEQ ID NO: 118685 - DNA, 25 bp, Probe sequence
gtagtaatactacgattcttctatg

SEQ ID NO: 118686 - DNA, 25 bp, Probe sequence
ggttaacatttttactgagatcggt

SEQ ID NO: 118687 - DNA, 25 bp, Probe sequence
ggctgattgtatatactaaacctca

SEQ ID NO: 118688 - DNA, 25 bp, Probe sequence
tttactgagatcggttaatttttca

SEQ ID NO: 118689 - DNA, 25 bp, Probe sequence
ttgtgttgtgctataattacgataa

SEQ ID NO: 118690 - DNA, 25 bp, Probe sequence
ataccctcatgttcgacaactataa

SEQ ID NO: 118691 - DNA, 25 bp, Probe sequence
agttttcatatgcttgtttatctaa

SEQ ID NO: 118692 - DNA, 25 bp, Probe sequence
acaactataagtcaatttctatgga

SEQ ID NO: 118693 - DNA, 25 bp, Probe sequence
aaggtgggggagttgaatgataaat

SEQ ID NO: 118694 - DNA, 25 bp, Probe sequence
aataataccctcatgttcgacaact

SEQ ID NO: 118695 - DNA, 25 bp, Probe sequence
cttgtcacactttttgtctctttac

SEQ ID NO: 118696 - DNA, 25 bp, Probe sequence
gcaacttgtcacactttttgtctct

SEQ ID NO: 118697 - DNA, 25 bp, Probe sequence
gacttgtagcaacttgtcacacttt

SEQ ID NO: 118698 - DNA, 25 bp, Probe sequence
gtacgagagactgaaaaaggtgggg

SEQ ID NO: 118699 - DNA, 25 bp, Probe sequence
gtttatctaataataccctcatgtt

SEQ ID NO: 118700 - DNA, 25 bp, Probe sequence
gtcacactttttgtctctttacata

SEQ ID NO: 118701 - DNA, 25 bp, Probe sequence
ggacgaaaatgacttgtagcaactt

SEQ ID NO: 118702 - DNA, 25 bp, Probe sequence
taaagagatttttttattatcggag

SEQ ID NO: 118703 - DNA, 25 bp, Probe sequence
taccccttttaattcagtacgagag

SEQ ID NO: 118704 - DNA, 25 bp, Probe sequence
ttttgtctctttacatatactgatg

SEQ ID NO: 118705 - DNA, 25 bp, Probe sequence
atcaatcaaactgtatcggtggggc

SEQ ID NO: 118706 - DNA, 25 bp, Probe sequence
atattacagcctcattattttaatg

SEQ ID NO: 118707 - DNA, 25 bp, Probe sequence
atcaaactgtatcggtggggctgta

SEQ ID NO: 118708 - DNA, 25 bp, Probe sequence
atcggtggggctgtaattaaccatt

SEQ ID NO: 118709 - DNA, 25 bp, Probe sequence
aactgtatcggtggggctgtaatta

SEQ ID NO: 118710 - DNA, 25 bp, Probe sequence
aagaagtttatattacagcctcatt

SEQ ID NO: 118711 - DNA, 25 bp, Probe sequence
caatcaaactgtatcggtggggctg

SEQ ID NO: 118712 - DNA, 25 bp, Probe sequence
caaactgtatcggtggggctgtaat

SEQ ID NO: 118713 - DNA, 25 bp, Probe sequence
ctgtatcggtggggctgtaattaac

SEQ ID NO: 118714 - DNA, 25 bp, Probe sequence
gctgtaattaaccatttacttaaag

SEQ ID NO: 118715 - DNA, 25 bp, Probe sequence
gaagtttatattacagcctcattat

SEQ ID NO: 118716 - DNA, 25 bp, Probe sequence
gtatcggtggggctgtaattaacca

SEQ ID NO: 118717 - DNA, 25 bp, Probe sequence
gtttatattacagcctcattatttt

SEQ ID NO: 118718 - DNA, 25 bp, Probe sequence
gtggggctgtaattaaccatttact

SEQ ID NO: 118719 - DNA, 25 bp, Probe sequence
ttatattacagcctcattattttaa

SEQ ID NO: 118720 - DNA, 25 bp, Probe sequence
atatcaggggctgcttaaccgcatc

SEQ ID NO: 118721 - DNA, 25 bp, Probe sequence
ataggactaatactggaatcacata

SEQ ID NO: 118722 - DNA, 25 bp, Probe sequence
agaagttcgatctataggaggcata

SEQ ID NO: 118723 - DNA, 25 bp, Probe sequence
accgcatccgaatattacaaacact

SEQ ID NO: 118724 - DNA, 25 bp, Probe sequence
aacaggccaataagacgtttgtcat

SEQ ID NO: 118725 - DNA, 25 bp, Probe sequence
aatccaaccaattaagaatacgagt

SEQ ID NO: 118726 - DNA, 25 bp, Probe sequence
ctgcttaaccgcatccgaatattac

SEQ ID NO: 118727 - DNA, 25 bp, Probe sequence
cggtatgacgcgcttttgtcatttt

SEQ ID NO: 118728 - DNA, 25 bp, Probe sequence
gacgtttgtcattcgtgcacataac

SEQ ID NO: 118729 - DNA, 25 bp, Probe sequence
gtatcatatttttaatcttgcgtaa

SEQ ID NO: 118730 - DNA, 25 bp, Probe sequence
gtgcacataacggtatgacgcgctt

SEQ ID NO: 118731 - DNA, 25 bp, Probe sequence
tgtgatttaatcaacaggccaataa

SEQ ID NO: 118732 - DNA, 25 bp, Probe sequence
tcttgcgtaatttttatcgttaact

SEQ ID NO: 118733 - DNA, 25 bp, Probe sequence
taatgtaacataacgtccctccttt

SEQ ID NO: 118734 - DNA, 25 bp, Probe sequence
tagtgtttaatatcaggggctgctt

SEQ ID NO: 118735 - DNA, 25 bp, Probe sequence
atgcgttttacctatgtatttctat

SEQ ID NO: 118736 - DNA, 25 bp, Probe sequence
atgcatgcgttttacctatgtattt

SEQ ID NO: 118737 - DNA, 25 bp, Probe sequence
actttttcttatgcatgcgttttac

SEQ ID NO: 118738 - DNA, 25 bp, Probe sequence
acactttttcttatgcatgcgtttt

SEQ ID NO: 118739 - DNA, 25 bp, Probe sequence
aaacactttttcttatgcatgcgtt

SEQ ID NO: 118740 - DNA, 25 bp, Probe sequence
aaggattcgcacagcgttgaatgat

SEQ ID NO: 118741 - DNA, 25 bp, Probe sequence
cttatgcatgcgttttacctatgta

SEQ ID NO: 118742 - DNA, 25 bp, Probe sequence
gcgttttacctatgtatttctattt

SEQ ID NO: 118743 - DNA, 25 bp, Probe sequence
gcatgcgttttacctatgtatttct

SEQ ID NO: 118744 - DNA, 25 bp, Probe sequence
gaaacactttttcttatgcatgcgt

SEQ ID NO: 118745 - DNA, 25 bp, Probe sequence
ggattcgcacagcgttgaatgataa

SEQ ID NO: 118746 - DNA, 25 bp, Probe sequence
tcgcacagcgttgaatgataaagaa

SEQ ID NO: 118747 - DNA, 25 bp, Probe sequence
tatgcatgcgttttacctatgtatt

SEQ ID NO: 118748 - DNA, 25 bp, Probe sequence
ttttcttatgcatgcgttttaccta

SEQ ID NO: 118749 - DNA, 25 bp, Probe sequence
ttcttatgcatgcgttttacctatg

SEQ ID NO: 118750 - DNA, 25 bp, Probe sequence
aggtgtttatttgtcgacaacttga

SEQ ID NO: 118751 - DNA, 25 bp, Probe sequence
atggtgaggtgtttatttgtcgaca

SEQ ID NO: 118752 - DNA, 25 bp, Probe sequence
agtagtcctttcttatggtgaggtg

SEQ ID NO: 118753 - DNA, 25 bp, Probe sequence
agtcctttcttatggtgaggtgttt

SEQ ID NO: 118754 - DNA, 25 bp, Probe sequence
aaagtagtcctttcttatggtgagg

SEQ ID NO: 118755 - DNA, 25 bp, Probe sequence
aagtagtcctttcttatggtgaggt

SEQ ID NO: 118756 - DNA, 25 bp, Probe sequence
ctttcttatggtgaggtgtttattt

SEQ ID NO: 118757 - DNA, 25 bp, Probe sequence
gaggtgtttatttgtcgacaacttg

SEQ ID NO: 118758 - DNA, 25 bp, Probe sequence
gtagtcctttcttatggtgaggtgt

SEQ ID NO: 118759 - DNA, 25 bp, Probe sequence
gtcctttcttatggtgaggtgttta

SEQ ID NO: 118760 - DNA, 25 bp, Probe sequence
gtgaggtgtttatttgtcgacaact

SEQ ID NO: 118761 - DNA, 25 bp, Probe sequence
ggtgaggtgtttatttgtcgacaac

SEQ ID NO: 118762 - DNA, 25 bp, Probe sequence
tgaggtgtttatttgtcgacaactt

SEQ ID NO: 118763 - DNA, 25 bp, Probe sequence
tagtcctttcttatggtgaggtgtt

SEQ ID NO: 118764 - DNA, 25 bp, Probe sequence
tatggtgaggtgtttatttgtcgac

SEQ ID NO: 118765 - DNA, 25 bp, Probe sequence
attgaaccatacattatgccacaca

SEQ ID NO: 118766 - DNA, 25 bp, Probe sequence
attatggcatgcaatttcaaatatg

SEQ ID NO: 118767 - DNA, 25 bp, Probe sequence
atatcattcgtttcattttaacatg

SEQ ID NO: 118768 - DNA, 25 bp, Probe sequence
atgccacacattttacattatctaa

SEQ ID NO: 118769 - DNA, 25 bp, Probe sequence
accatacattatgccacacatttta

SEQ ID NO: 118770 - DNA, 25 bp, Probe sequence
aacatgattgtaacttttcggtata

SEQ ID NO: 118771 - DNA, 25 bp, Probe sequence
aagttcgcaattcaatttatttaat

SEQ ID NO: 118772 - DNA, 25 bp, Probe sequence
caccttcttcatatcattcgtttca

SEQ ID NO: 118773 - DNA, 25 bp, Probe sequence
cttttcggtatagttattgaaccat

SEQ ID NO: 118774 - DNA, 25 bp, Probe sequence
ccttcttcatatcattcgtttcatt

SEQ ID NO: 118775 - DNA, 25 bp, Probe sequence
gcaatttcaaatatgctatacaata

SEQ ID NO: 118776 - DNA, 25 bp, Probe sequence
gaagattagcttagagaggtcgtaa

SEQ ID NO: 118777 - DNA, 25 bp, Probe sequence
tcttcatatcattcgtttcatttta

SEQ ID NO: 118778 - DNA, 25 bp, Probe sequence
tacattatgccacacattttacatt

SEQ ID NO: 118779 - DNA, 25 bp, Probe sequence
ttatctaaaagttcgcaattcaatt

SEQ ID NO: 118780 - DNA, 25 bp, Probe sequence
acatcaaatacgtcaaggcatatcc

SEQ ID NO: 118781 - DNA, 25 bp, Probe sequence
aacgcacctatgtaggtgtgttttt

SEQ ID NO: 118782 - DNA, 25 bp, Probe sequence
aatacgtcaaggcatatccaaatca

SEQ ID NO: 118783 - DNA, 25 bp, Probe sequence
aatatgtgaagctagacgtacatca

SEQ ID NO: 118784 - DNA, 25 bp, Probe sequence
catagtgatatttaagggagattga

SEQ ID NO: 118785 - DNA, 25 bp, Probe sequence
ccaaatcaaacgcacctatgtaggt

SEQ ID NO: 118786 - DNA, 25 bp, Probe sequence
gtttttttagtttatccaatgattg

SEQ ID NO: 118787 - DNA, 25 bp, Probe sequence
gtaaagcgtaaatgtcatagtgata

SEQ ID NO: 118788 - DNA, 25 bp, Probe sequence
gtaatgagcatttgtgcgcatatga

SEQ ID NO: 118789 - DNA, 25 bp, Probe sequence
gtgaagctagacgtacatcaaatac

SEQ ID NO: 118790 - DNA, 25 bp, Probe sequence
gtgtgtttttttagtttatccaatg

SEQ ID NO: 118791 - DNA, 25 bp, Probe sequence
ggcatatccaaatcaaacgcaccta

SEQ ID NO: 118792 - DNA, 25 bp, Probe sequence
tgcgcatatgatgatgtaaagcgta

SEQ ID NO: 118793 - DNA, 25 bp, Probe sequence
tagtttatccaatgattgatgttat

SEQ ID NO: 118794 - DNA, 25 bp, Probe sequence
tatccaaatcaaacgcacctatgta

SEQ ID NO: 118795 - DNA, 25 bp, Probe sequence
attctgtctttttatatggctttat

SEQ ID NO: 118796 - DNA, 25 bp, Probe sequence
attagcagtttatattctgtctttt

SEQ ID NO: 118797 - DNA, 25 bp, Probe sequence
atttatgtatgtttatttgattcaa

SEQ ID NO: 118798 - DNA, 25 bp, Probe sequence
atctatctatgttttaactacttaa

SEQ ID NO: 118799 - DNA, 25 bp, Probe sequence
atggctttataacttacgtgatttt

SEQ ID NO: 118800 - DNA, 25 bp, Probe sequence
agtattttcatttacgaattctgat

SEQ ID NO: 118801 - DNA, 25 bp, Probe sequence
aatgcaagcgccatacttactgatg

SEQ ID NO: 118802 - DNA, 25 bp, Probe sequence
caagcgccatacttactgatgaata

SEQ ID NO: 118803 - DNA, 25 bp, Probe sequence
gaattctgattttaatgcaagcgcc

SEQ ID NO: 118804 - DNA, 25 bp, Probe sequence
gaaccagtgtttgaatatttacttt

SEQ ID NO: 118805 - DNA, 25 bp, Probe sequence
gaaacaagttcagtatgtacgagta

SEQ ID NO: 118806 - DNA, 25 bp, Probe sequence
gtacgagtatttgaaccagtgtttg

SEQ ID NO: 118807 - DNA, 25 bp, Probe sequence
ggcagaatatacaactgttaactat

SEQ ID NO: 118808 - DNA, 25 bp, Probe sequence
taaactattttatatctatctatgt

SEQ ID NO: 118809 - DNA, 25 bp, Probe sequence
tacgtgattttggtttgataaggaa

SEQ ID NO: 118810 - DNA, 25 bp, Probe sequence
ataactctatgattcgcaaataata

SEQ ID NO: 118811 - DNA, 25 bp, Probe sequence
ataatcccgataaacaatcagcatt

SEQ ID NO: 118812 - DNA, 25 bp, Probe sequence
actgcttatcatatagagttcgtaa

SEQ ID NO: 118813 - DNA, 25 bp, Probe sequence
aaatgattgtcatcgggatttattt

SEQ ID NO: 118814 - DNA, 25 bp, Probe sequence
aacaatcagcattactgcttatcat

SEQ ID NO: 118815 - DNA, 25 bp, Probe sequence
aactataactctatgattcgcaaat

SEQ ID NO: 118816 - DNA, 25 bp, Probe sequence
aatcagcattactgcttatcatata

SEQ ID NO: 118817 - DNA, 25 bp, Probe sequence
aataactataactctatgattcgca

SEQ ID NO: 118818 - DNA, 25 bp, Probe sequence
aataatcgcaataataatcccgata

SEQ ID NO: 118819 - DNA, 25 bp, Probe sequence
cccgataaacaatcagcattactgc

SEQ ID NO: 118820 - DNA, 25 bp, Probe sequence
gcattactgcttatcatatagagtt

SEQ ID NO: 118821 - DNA, 25 bp, Probe sequence
gattgtcatcgggatttatttttat

SEQ ID NO: 118822 - DNA, 25 bp, Probe sequence
gttcgtaataactataactctatga

SEQ ID NO: 118823 - DNA, 25 bp, Probe sequence
gtcatcgggatttatttttatcaat

SEQ ID NO: 118824 - DNA, 25 bp, Probe sequence
tagtgtactacattaaataatcgca

SEQ ID NO: 118825 - DNA, 25 bp, Probe sequence
atttcagttattcattccttacaat

SEQ ID NO: 118826 - DNA, 25 bp, Probe sequence
atttacgttataatagtttgatgaa

SEQ ID NO: 118827 - DNA, 25 bp, Probe sequence
atacgtaatgaatcacatgacaatc

SEQ ID NO: 118828 - DNA, 25 bp, Probe sequence
aatttaggattacacttcagttgca

SEQ ID NO: 118829 - DNA, 25 bp, Probe sequence
cacttcagttgcattgtattatttt

SEQ ID NO: 118830 - DNA, 25 bp, Probe sequence
cattctatgatgtaaggtcgcattt

SEQ ID NO: 118831 - DNA, 25 bp, Probe sequence
gaatcacatgacaatcttcaaattg

SEQ ID NO: 118832 - DNA, 25 bp, Probe sequence
gatgtaaggtcgcatttttaatata

SEQ ID NO: 118833 - DNA, 25 bp, Probe sequence
gattacacttcagttgcattgtatt

SEQ ID NO: 118834 - DNA, 25 bp, Probe sequence
gttgcattgtattattttacgtgtg

SEQ ID NO: 118835 - DNA, 25 bp, Probe sequence
gtttgatgaattttattgaggagta

SEQ ID NO: 118836 - DNA, 25 bp, Probe sequence
taaggtcgcatttttaatatattta

SEQ ID NO: 118837 - DNA, 25 bp, Probe sequence
taaatttcagttattcattccttac

SEQ ID NO: 118838 - DNA, 25 bp, Probe sequence
taggattacacttcagttgcattgt

SEQ ID NO: 118839 - DNA, 25 bp, Probe sequence
tattcattccttacaataaatttag

SEQ ID NO: 118840 - DNA, 25 bp, Probe sequence
attctgtatcactctcacaatattt

SEQ ID NO: 118841 - DNA, 25 bp, Probe sequence
atcaattctgtatcactctcacaat

SEQ ID NO: 118842 - DNA, 25 bp, Probe sequence
atcactctcacaatatttatatcat

SEQ ID NO: 118843 - DNA, 25 bp, Probe sequence
atgtcatcatttacagttgagcatt

SEQ ID NO: 118844 - DNA, 25 bp, Probe sequence
agttgagcattgtctatcaattctg

SEQ ID NO: 118845 - DNA, 25 bp, Probe sequence
aatgcttaatgtcatcatttacagt

SEQ ID NO: 118846 - DNA, 25 bp, Probe sequence
gaggtttctatttggaagtctcggt

SEQ ID NO: 118847 - DNA, 25 bp, Probe sequence
gattgcggtagttttaaaatgctta

SEQ ID NO: 118848 - DNA, 25 bp, Probe sequence
gtaaatgtaccgaggtttctatttg

SEQ ID NO: 118849 - DNA, 25 bp, Probe sequence
gtaaaattaatcgagaggtgccatt

SEQ ID NO: 118850 - DNA, 25 bp, Probe sequence
gtctatcaattctgtatcactctca

SEQ ID NO: 118851 - DNA, 25 bp, Probe sequence
ggaagtctcggtatttttatgttga

SEQ ID NO: 118852 - DNA, 25 bp, Probe sequence
taattttccagtctttgatataata

SEQ ID NO: 118853 - DNA, 25 bp, Probe sequence
tttatgttgagattgcggtagtttt

SEQ ID NO: 118854 - DNA, 25 bp, Probe sequence
ttatatattaattttccagtctttg

SEQ ID NO: 118855 - DNA, 25 bp, Probe sequence
atttcactatgaaccattatgtatt

SEQ ID NO: 118856 - DNA, 25 bp, Probe sequence
agtacattgatttatgtgccaaaat

SEQ ID NO: 118857 - DNA, 25 bp, Probe sequence
aaggtcacattttttatgtgcaata

SEQ ID NO: 118858 - DNA, 25 bp, Probe sequence
aatcgatattgaacccataagtcca

SEQ ID NO: 118859 - DNA, 25 bp, Probe sequence
gaagattatggcgtgatttattatt

SEQ ID NO: 118860 - DNA, 25 bp, Probe sequence
gaaccattatgtattgtttggtaac

SEQ ID NO: 118861 - DNA, 25 bp, Probe sequence
gacagagaaccattattaaacgtat

SEQ ID NO: 118862 - DNA, 25 bp, Probe sequence
gaggttgagctcttagttcttaagt

SEQ ID NO: 118863 - DNA, 25 bp, Probe sequence
gatagttcgaatttcactatgaacc

SEQ ID NO: 118864 - DNA, 25 bp, Probe sequence
gttcttaagtaaatgtgtcctccac

SEQ ID NO: 118865 - DNA, 25 bp, Probe sequence
gtaggtcctagtacattgatttatg

SEQ ID NO: 118866 - DNA, 25 bp, Probe sequence
gtgccaaaatcgatattgaacccat

SEQ ID NO: 118867 - DNA, 25 bp, Probe sequence
gtgtcctccacataaggtcacattt

SEQ ID NO: 118868 - DNA, 25 bp, Probe sequence
tgaacccataagtccaatttgacag

SEQ ID NO: 118869 - DNA, 25 bp, Probe sequence
tatggcgtgatttattattggaagg

SEQ ID NO: 118870 - DNA, 25 bp, Probe sequence
atgagtacctcctttaataaatata

SEQ ID NO: 118871 - DNA, 25 bp, Probe sequence
agataatcgtcatgagtgtaaattc

SEQ ID NO: 118872 - DNA, 25 bp, Probe sequence
actgagttttgtgatataattgtag

SEQ ID NO: 118873 - DNA, 25 bp, Probe sequence
aaagcgtttatgactacactaagtg

SEQ ID NO: 118874 - DNA, 25 bp, Probe sequence
aagttgtaccattgatattttataa

SEQ ID NO: 118875 - DNA, 25 bp, Probe sequence
aagtcattctgataagttgtaccat

SEQ ID NO: 118876 - DNA, 25 bp, Probe sequence
aatgatactacatctattaaaagaa

SEQ ID NO: 118877 - DNA, 25 bp, Probe sequence
aatacacataactacttatatactt

SEQ ID NO: 118878 - DNA, 25 bp, Probe sequence
cattctgataagttgtaccattgat

SEQ ID NO: 118879 - DNA, 25 bp, Probe sequence
gcgtttatgactacactaagtggta

SEQ ID NO: 118880 - DNA, 25 bp, Probe sequence
gaaaacgcctatagataatcgtcat

SEQ ID NO: 118881 - DNA, 25 bp, Probe sequence
gagtgtaaattcagtttactcaaaa

SEQ ID NO: 118882 - DNA, 25 bp, Probe sequence
gtagactgtgaagttatgtagtatg

SEQ ID NO: 118883 - DNA, 25 bp, Probe sequence
ggtgatttaagcgtaagtcattctg

SEQ ID NO: 118884 - DNA, 25 bp, Probe sequence
ttaagatagcatagtttcatttgaa

SEQ ID NO: 118885 - DNA, 25 bp, Probe sequence
attgcgggttaaaagtatcattctc

SEQ ID NO: 118886 - DNA, 25 bp, Probe sequence
attctcgagttgctaacaatgtcat

SEQ ID NO: 118887 - DNA, 25 bp, Probe sequence
acaatgtcatgttcaacttagtcat

SEQ ID NO: 118888 - DNA, 25 bp, Probe sequence
aaatcatcagttggtagttttttat

SEQ ID NO: 118889 - DNA, 25 bp, Probe sequence
aaagtatcattctcgagttgctaac

SEQ ID NO: 118890 - DNA, 25 bp, Probe sequence
aaaaaactaccaatgataaatcatc

SEQ ID NO: 118891 - DNA, 25 bp, Probe sequence
gcgggttaaaagtatcattctcgag

SEQ ID NO: 118892 - DNA, 25 bp, Probe sequence
gctattttagtgttattgcgggtta

SEQ ID NO: 118893 - DNA, 25 bp, Probe sequence
gagttgctaacaatgtcatgttcaa

SEQ ID NO: 118894 - DNA, 25 bp, Probe sequence
gataaatcatcagttggtagttttt

SEQ ID NO: 118895 - DNA, 25 bp, Probe sequence
gtatcattctcgagttgctaacaat

SEQ ID NO: 118896 - DNA, 25 bp, Probe sequence
gtcatgttcaacttagtcatgataa

SEQ ID NO: 118897 - DNA, 25 bp, Probe sequence
tctcgagttgctaacaatgtcatgt

SEQ ID NO: 118898 - DNA, 25 bp, Probe sequence
taaaagtatcattctcgagttgcta

SEQ ID NO: 118899 - DNA, 25 bp, Probe sequence
ttgctattttagtgttattgcgggt

SEQ ID NO: 118900 - DNA, 25 bp, Probe sequence
gtactaaaaaatgaggggtgagacg

SEQ ID NO: 118901 - DNA, 25 bp, Probe sequence
agtgttatgatatgtgaggaatgtt

SEQ ID NO: 118902 - DNA, 25 bp, Probe sequence
aatacagttatttgttgagtcggtt

SEQ ID NO: 118903 - DNA, 25 bp, Probe sequence
catgctgatttgtcaatttgagtgc

SEQ ID NO: 118904 - DNA, 25 bp, Probe sequence
cttcgttaattgagtgatatgacac

SEQ ID NO: 118905 - DNA, 25 bp, Probe sequence
gcaacacttcgttaattgagtgata

SEQ ID NO: 118906 - DNA, 25 bp, Probe sequence
gaggaatgtttaagactaggtacta

SEQ ID NO: 118907 - DNA, 25 bp, Probe sequence
gagtgatatgacacttgaactattt

SEQ ID NO: 118908 - DNA, 25 bp, Probe sequence
gagtgcaacacttcgttaattgagt

SEQ ID NO: 118909 - DNA, 25 bp, Probe sequence
gttgagtcggttaaatagaaagtgt

SEQ ID NO: 118910 - DNA, 25 bp, Probe sequence
gtcaatttgagtgcaacacttcgtt

SEQ ID NO: 118911 - DNA, 25 bp, Probe sequence
taaatttccgactaaataatagcta

SEQ ID NO: 118912 - DNA, 25 bp, Probe sequence
tacagttatttgttgagtcggttaa

SEQ ID NO: 118913 - DNA, 25 bp, Probe sequence
tttgtcaatttgagtgcaacacttc

SEQ ID NO: 118914 - DNA, 25 bp, Probe sequence
ttaccatgctgatttgtcaatttga

SEQ ID NO: 118915 - DNA, 25 bp, Probe sequence
gcgggggaaattctaagcaacctag

SEQ ID NO: 118916 - DNA, 25 bp, Probe sequence
tagtcaactttgcgggggaaattct

SEQ ID NO: 118917 - DNA, 25 bp, Probe sequence
agaggaacgcttgagctaaagctca

SEQ ID NO: 118918 - DNA, 25 bp, Probe sequence
aagctcattgacgcagtggttgact

SEQ ID NO: 118919 - DNA, 25 bp, Probe sequence
taaggttccagaatttctccctaag

SEQ ID NO: 118920 - DNA, 25 bp, Probe sequence
aatggagaattgtctgacctagtca

SEQ ID NO: 118921 - DNA, 25 bp, Probe sequence
gataaggttccagaatttctcccta

SEQ ID NO: 118922 - DNA, 25 bp, Probe sequence
gctaaagctcattgacgcagtggtt

SEQ ID NO: 118923 - DNA, 25 bp, Probe sequence
gaagattagaggaacgcttgagcta

SEQ ID NO: 118924 - DNA, 25 bp, Probe sequence
gacgcagtggttgactggtcatcca

SEQ ID NO: 118925 - DNA, 25 bp, Probe sequence
gaggtacacctgagctaaagctcat

SEQ ID NO: 118926 - DNA, 25 bp, Probe sequence
gaggtacgcctgagctaaagctcaa

SEQ ID NO: 118927 - DNA, 25 bp, Probe sequence
ggttgactggtcatccaatggagaa

SEQ ID NO: 118928 - DNA, 25 bp, Probe sequence
tctgacctagtcaactttgcggggg

SEQ ID NO: 118929 - DNA, 25 bp, Probe sequence
tctccctaagaaacactaatcaata

SEQ ID NO: 118930 - DNA, 25 bp, Probe sequence
agtattgtcgactcagtttttttct

SEQ ID NO: 118931 - DNA, 25 bp, Probe sequence
acatctgggtcgtcagtattgtcga

SEQ ID NO: 118932 - DNA, 25 bp, Probe sequence
aaagatgattcaagagcaacacata

SEQ ID NO: 118933 - DNA, 25 bp, Probe sequence
aatcttacatctgggtcgtcagtat

SEQ ID NO: 118934 - DNA, 25 bp, Probe sequence
caagagcaacacataaaggagataa

SEQ ID NO: 118935 - DNA, 25 bp, Probe sequence
gattcaagagcaacacataaaggag

SEQ ID NO: 118936 - DNA, 25 bp, Probe sequence
gtcagtattgtcgactcagtttttt

SEQ ID NO: 118937 - DNA, 25 bp, Probe sequence
gggtcgtcagtattgtcgactcagt

SEQ ID NO: 118938 - DNA, 25 bp, Probe sequence
tgtcgactcagtttttttctttaat

SEQ ID NO: 118939 - DNA, 25 bp, Probe sequence
tctgggtcgtcagtattgtcgactc

SEQ ID NO: 118940 - DNA, 25 bp, Probe sequence
tcgtcagtattgtcgactcagtttt

SEQ ID NO: 118941 - DNA, 25 bp, Probe sequence
tcttacatctgggtcgtcagtattg

SEQ ID NO: 118942 - DNA, 25 bp, Probe sequence
taaatcttacatctgggtcgtcagt

SEQ ID NO: 118943 - DNA, 25 bp, Probe sequence
tattgtcgactcagtttttttcttt

SEQ ID NO: 118944 - DNA, 25 bp, Probe sequence
ttacatctgggtcgtcagtattgtc

SEQ ID NO: 118945 - DNA, 25 bp, Probe sequence
attgcggatttgctagaacatgagg

SEQ ID NO: 118946 - DNA, 25 bp, Probe sequence
ataacctattaacagtctaatttag

SEQ ID NO: 118947 - DNA, 25 bp, Probe sequence
ataacacgctgatttttgttgcaat

SEQ ID NO: 118948 - DNA, 25 bp, Probe sequence
actctttacaaacattcatacacct

SEQ ID NO: 118949 - DNA, 25 bp, Probe sequence
aacatgtgcgttagaagtggtacca

SEQ ID NO: 118950 - DNA, 25 bp, Probe sequence
catacacctgttaatattatttctt

SEQ ID NO: 118951 - DNA, 25 bp, Probe sequence
gcatcccgaaagttatactaaagaa

SEQ ID NO: 118952 - DNA, 25 bp, Probe sequence
gaagtggtaccattcatgtccttac

SEQ ID NO: 118953 - DNA, 25 bp, Probe sequence
gaacatgaggttattgttgctaata

SEQ ID NO: 118954 - DNA, 25 bp, Probe sequence
gttatattggtggaacatgtgcgtt

SEQ ID NO: 118955 - DNA, 25 bp, Probe sequence
ggtggtgaaggctactatgaatttt

SEQ ID NO: 118956 - DNA, 25 bp, Probe sequence
ggggtgcatatttttagatacacaa

SEQ ID NO: 118957 - DNA, 25 bp, Probe sequence
tgttgcaatgagatgtgcatcccga

SEQ ID NO: 118958 - DNA, 25 bp, Probe sequence
taccattcatgtccttacgagataa

SEQ ID NO: 118959 - DNA, 25 bp, Probe sequence
ttaacttaacacgtaggtggtgaag

SEQ ID NO: 118960 - DNA, 25 bp, Probe sequence
atatagaacgtattgggtaccataa

SEQ ID NO: 118961 - DNA, 25 bp, Probe sequence
atagaagtgttcaaagcatagagtt

SEQ ID NO: 118962 - DNA, 25 bp, Probe sequence
agaataactcgtttacactgacagt

SEQ ID NO: 118963 - DNA, 25 bp, Probe sequence
accataatggtgccctttttctttg

SEQ ID NO: 118964 - DNA, 25 bp, Probe sequence
aaagcatagagttggaggtaataga

SEQ ID NO: 118965 - DNA, 25 bp, Probe sequence
cataatggtgccctttttctttgaa

SEQ ID NO: 118966 - DNA, 25 bp, Probe sequence
gacagttattactcaatgatacgtt

SEQ ID NO: 118967 - DNA, 25 bp, Probe sequence
gttgggaatatcacatgttagtaat

SEQ ID NO: 118968 - DNA, 25 bp, Probe sequence
gttattactcaatgatacgttggga

SEQ ID NO: 118969 - DNA, 25 bp, Probe sequence
ggtaccataatggtgccctttttct

SEQ ID NO: 118970 - DNA, 25 bp, Probe sequence
tggtgccctttttctttgaattatt

SEQ ID NO: 118971 - DNA, 25 bp, Probe sequence
taatggtgccctttttctttgaatt

SEQ ID NO: 118972 - DNA, 25 bp, Probe sequence
tacactgacagttattactcaatga

SEQ ID NO: 118973 - DNA, 25 bp, Probe sequence
tacgttgggaatatcacatgttagt

SEQ ID NO: 118974 - DNA, 25 bp, Probe sequence
tttagcgtaaaattgttctaacaat

SEQ ID NO: 118975 - DNA, 25 bp, Probe sequence
atttgtcgaggcaagaacataggtt

SEQ ID NO: 118976 - DNA, 25 bp, Probe sequence
atcactatgatccgctgctatatat

SEQ ID NO: 118977 - DNA, 25 bp, Probe sequence
aaatcactatgatccgctgctatat

SEQ ID NO: 118978 - DNA, 25 bp, Probe sequence
aacatattctgagtgtggaaacaca

SEQ ID NO: 118979 - DNA, 25 bp, Probe sequence
cactatgatccgctgctatatattt

SEQ ID NO: 118980 - DNA, 25 bp, Probe sequence
gctgctatatatttgtcgaggcaag

SEQ ID NO: 118981 - DNA, 25 bp, Probe sequence
gctatatatttgtcgaggcaagaac

SEQ ID NO: 118982 - DNA, 25 bp, Probe sequence
gaacataggttgaagaggagaattt

SEQ ID NO: 118983 - DNA, 25 bp, Probe sequence
gatccgctgctatatatttgtcgag

SEQ ID NO: 118984 - DNA, 25 bp, Probe sequence
gtcgaggcaagaacataggttgaag

SEQ ID NO: 118985 - DNA, 25 bp, Probe sequence
gtgctaacatattctgagtgtggaa

SEQ ID NO: 118986 - DNA, 25 bp, Probe sequence
tggaaacacaaaaatcactatgatc

SEQ ID NO: 118987 - DNA, 25 bp, Probe sequence
tccgctgctatatatttgtcgaggc

SEQ ID NO: 118988 - DNA, 25 bp, Probe sequence
tatgatccgctgctatatatttgtc

SEQ ID NO: 118989 - DNA, 25 bp, Probe sequence
tattgtgctaacatattctgagtgt

SEQ ID NO: 118990 - DNA, 25 bp, Probe sequence
atctactaagtgccattgaaaagga

SEQ ID NO: 118991 - DNA, 25 bp, Probe sequence
atgcttatataaacaaaaatctact

SEQ ID NO: 118992 - DNA, 25 bp, Probe sequence
agtgccattgaaaaggacttagtag

SEQ ID NO: 118993 - DNA, 25 bp, Probe sequence
aaatctactaagtgccattgaaaag

SEQ ID NO: 118994 - DNA, 25 bp, Probe sequence
aaaaatctactaagtgccattgaaa

SEQ ID NO: 118995 - DNA, 25 bp, Probe sequence
aaaatctactaagtgccattgaaaa

SEQ ID NO: 118996 - DNA, 25 bp, Probe sequence
aatctactaagtgccattgaaaagg

SEQ ID NO: 118997 - DNA, 25 bp, Probe sequence
ctactaagtgccattgaaaaggact

SEQ ID NO: 118998 - DNA, 25 bp, Probe sequence
gccattgaaaaggacttagtagatt

SEQ ID NO: 118999 - DNA, 25 bp, Probe sequence
gatttattaaatatatgcgtagcaa

SEQ ID NO: 119000 - DNA, 25 bp, Probe sequence
gtgccattgaaaaggacttagtaga

SEQ ID NO: 119001 - DNA, 25 bp, Probe sequence
tgaaaaggacttagtagatttatta

SEQ ID NO: 119002 - DNA, 25 bp, Probe sequence
tctactaagtgccattgaaaaggac

SEQ ID NO: 119003 - DNA, 25 bp, Probe sequence
tactaagtgccattgaaaaggactt

SEQ ID NO: 119004 - DNA, 25 bp, Probe sequence
tttattaaatatatgcgtagcaaca

SEQ ID NO: 119005 - DNA, 25 bp, Probe sequence
actttggatcattttcagtttatca

SEQ ID NO: 119006 - DNA, 25 bp, Probe sequence
aacattatcctcaactttcaaattt

SEQ ID NO: 119007 - DNA, 25 bp, Probe sequence
cattatcctcaactttcaaatttaa

SEQ ID NO: 119008 - DNA, 25 bp, Probe sequence
ctaaagcattgttaagaagtgtgac

SEQ ID NO: 119009 - DNA, 25 bp, Probe sequence
gaatttgttctataattaacaggtt

SEQ ID NO: 119010 - DNA, 25 bp, Probe sequence
gaaataatcacttttacctaaatct

SEQ ID NO: 119011 - DNA, 25 bp, Probe sequence
gactgtggaacagataccttatcat

SEQ ID NO: 119012 - DNA, 25 bp, Probe sequence
gataccttatcatagttacttaaac

SEQ ID NO: 119013 - DNA, 25 bp, Probe sequence
gttaatgaggttcttgataggtaaa

SEQ ID NO: 119014 - DNA, 25 bp, Probe sequence
gtaaagacgaagatgactgtggaac

SEQ ID NO: 119015 - DNA, 25 bp, Probe sequence
ggatcattttcagtttatcattaaa

SEQ ID NO: 119016 - DNA, 25 bp, Probe sequence
ggaacagataccttatcatagttac

SEQ ID NO: 119017 - DNA, 25 bp, Probe sequence
taaagatgaatgtcacttaataagt

SEQ ID NO: 119018 - DNA, 25 bp, Probe sequence
ttacttaaactttggatcattttca

SEQ ID NO: 119019 - DNA, 25 bp, Probe sequence
ttacctaaatctaaagcattgttaa

SEQ ID NO: 119020 - DNA, 25 bp, Probe sequence
acttaacctaagtaacaggaggatg

SEQ ID NO: 119021 - DNA, 25 bp, Probe sequence
atagcgcttacattttttataattg

SEQ ID NO: 119022 - DNA, 25 bp, Probe sequence
agtttacaatagcgcttacattttt

SEQ ID NO: 119023 - DNA, 25 bp, Probe sequence
agcatttaagtttacaatagcgctt

SEQ ID NO: 119024 - DNA, 25 bp, Probe sequence
agcgcttacattttttataattgta

SEQ ID NO: 119025 - DNA, 25 bp, Probe sequence
acaatagcgcttacattttttataa

SEQ ID NO: 119026 - DNA, 25 bp, Probe sequence
aagtttacaatagcgcttacatttt

SEQ ID NO: 119027 - DNA, 25 bp, Probe sequence
aatagcgcttacattttttataatt

SEQ ID NO: 119028 - DNA, 25 bp, Probe sequence
gtttacaatagcgcttacatttttt

SEQ ID NO: 119029 - DNA, 25 bp, Probe sequence
gtagcatttaagtttacaatagcgc

SEQ ID NO: 119030 - DNA, 25 bp, Probe sequence
taacctaagtaacaggaggatggaa

SEQ ID NO: 119031 - DNA, 25 bp, Probe sequence
tacaatagcgcttacattttttata

SEQ ID NO: 119032 - DNA, 25 bp, Probe sequence
tagcgcttacattttttataattgt

SEQ ID NO: 119033 - DNA, 25 bp, Probe sequence
tttacaatagcgcttacatttttta

SEQ ID NO: 119034 - DNA, 25 bp, Probe sequence
ttacaatagcgcttacattttttat

SEQ ID NO: 119035 - DNA, 25 bp, Probe sequence
atagcccattccatactttataaaa

SEQ ID NO: 119036 - DNA, 25 bp, Probe sequence
ataaatggctatagcccattccata

SEQ ID NO: 119037 - DNA, 25 bp, Probe sequence
atggctatagcccattccatacttt

SEQ ID NO: 119038 - DNA, 25 bp, Probe sequence
agatgatataaatggctatagccca

SEQ ID NO: 119039 - DNA, 25 bp, Probe sequence
agcccattccatactttataaaagt

SEQ ID NO: 119040 - DNA, 25 bp, Probe sequence
aaatggctatagcccattccatact

SEQ ID NO: 119041 - DNA, 25 bp, Probe sequence
aatggctatagcccattccatactt

SEQ ID NO: 119042 - DNA, 25 bp, Probe sequence
ctatagcccattccatactttataa

SEQ ID NO: 119043 - DNA, 25 bp, Probe sequence
gcccattccatactttataaaagta

SEQ ID NO: 119044 - DNA, 25 bp, Probe sequence
gctatagcccattccatactttata

SEQ ID NO: 119045 - DNA, 25 bp, Probe sequence
gatataaatggctatagcccattcc

SEQ ID NO: 119046 - DNA, 25 bp, Probe sequence
taaatggctatagcccattccatac

SEQ ID NO: 119047 - DNA, 25 bp, Probe sequence
tagcccattccatactttataaaag

SEQ ID NO: 119048 - DNA, 25 bp, Probe sequence
tataaatggctatagcccattccat

SEQ ID NO: 119049 - DNA, 25 bp, Probe sequence
tatagcccattccatactttataaa

SEQ ID NO: 119050 - DNA, 25 bp, Probe sequence
attctttccaacatacttttcactt

SEQ ID NO: 119051 - DNA, 25 bp, Probe sequence
attacatcgacaatgtttttgtatt

SEQ ID NO: 119052 - DNA, 25 bp, Probe sequence
actccttaaaataacattacatcga

SEQ ID NO: 119053 - DNA, 25 bp, Probe sequence
acatacttttcactttttaagtcag

SEQ ID NO: 119054 - DNA, 25 bp, Probe sequence
acatcgacaatgtttttgtattaga

SEQ ID NO: 119055 - DNA, 25 bp, Probe sequence
acaatgtttttgtattagaaatgta

SEQ ID NO: 119056 - DNA, 25 bp, Probe sequence
aattctttccaacatacttttcact

SEQ ID NO: 119057 - DNA, 25 bp, Probe sequence
catacttttcactttttaagtcagt

SEQ ID NO: 119058 - DNA, 25 bp, Probe sequence
tccaacatacttttcactttttaag

SEQ ID NO: 119059 - DNA, 25 bp, Probe sequence
tctttccaacatacttttcactttt

SEQ ID NO: 119060 - DNA, 25 bp, Probe sequence
taaattctttccaacatacttttca

SEQ ID NO: 119061 - DNA, 25 bp, Probe sequence
tacttttcactttttaagtcagtat

SEQ ID NO: 119062 - DNA, 25 bp, Probe sequence
tagaatatgattttgtatgattaca

SEQ ID NO: 119063 - DNA, 25 bp, Probe sequence
tttactccttaaaataacattacat

SEQ ID NO: 119064 - DNA, 25 bp, Probe sequence
ttctttccaacatacttttcacttt

SEQ ID NO: 119065 - DNA, 25 bp, Probe sequence
attaagcgtttatcatttatcttta

SEQ ID NO: 119066 - DNA, 25 bp, Probe sequence
ataacgagttgcttcatatttcttt

SEQ ID NO: 119067 - DNA, 25 bp, Probe sequence
agcgtttatcatttatctttagtaa

SEQ ID NO: 119068 - DNA, 25 bp, Probe sequence
aacgagttgcttcatatttcttttg

SEQ ID NO: 119069 - DNA, 25 bp, Probe sequence
gtaattagattagcgagggggaaat

SEQ ID NO: 119070 - DNA, 25 bp, Probe sequence
cgagttgcttcatatttcttttgtt

SEQ ID NO: 119071 - DNA, 25 bp, Probe sequence
gcttcatatttcttttgttaccctt

SEQ ID NO: 119072 - DNA, 25 bp, Probe sequence
gacagggaaaatgatttgtttagat

SEQ ID NO: 119073 - DNA, 25 bp, Probe sequence
gacaaaagcaaaattaagcgtttat

SEQ ID NO: 119074 - DNA, 25 bp, Probe sequence
gttgcttcatatttcttttgttacc

SEQ ID NO: 119075 - DNA, 25 bp, Probe sequence
gtttatcatttatctttagtaatta

SEQ ID NO: 119076 - DNA, 25 bp, Probe sequence
tgcttcatatttcttttgttaccct

SEQ ID NO: 119077 - DNA, 25 bp, Probe sequence
tcatatttcttttgttaccctttgt

SEQ ID NO: 119078 - DNA, 25 bp, Probe sequence
ttagattagcgagggggaaatgaca

SEQ ID NO: 119079 - DNA, 25 bp, Probe sequence
ttcatatttcttttgttaccctttg

SEQ ID NO: 119080 - DNA, 25 bp, Probe sequence
attccctagagacattttaagattg

SEQ ID NO: 119081 - DNA, 25 bp, Probe sequence
atcattagtgaatcttattttaaag

SEQ ID NO: 119082 - DNA, 25 bp, Probe sequence
atggattaatctaaataagtgcgga

SEQ ID NO: 119083 - DNA, 25 bp, Probe sequence
agaatcattagtgaatcttatttta

SEQ ID NO: 119084 - DNA, 25 bp, Probe sequence
aagtgcggataatataaacataaca

SEQ ID NO: 119085 - DNA, 25 bp, Probe sequence
cctagagacattttaagattgttaa

SEQ ID NO: 119086 - DNA, 25 bp, Probe sequence
gaatcattagtgaatcttattttaa

SEQ ID NO: 119087 - DNA, 25 bp, Probe sequence
gtgcggataatataaacataacaac

SEQ ID NO: 119088 - DNA, 25 bp, Probe sequence
ggattaatctaaataagtgcggata

SEQ ID NO: 119089 - DNA, 25 bp, Probe sequence
tccctagagacattttaagattgtt

SEQ ID NO: 119090 - DNA, 25 bp, Probe sequence
tatttttattccctagagacatttt

SEQ ID NO: 119091 - DNA, 25 bp, Probe sequence
tattccctagagacattttaagatt

SEQ ID NO: 119092 - DNA, 25 bp, Probe sequence
tttattccctagagacattttaaga

SEQ ID NO: 119093 - DNA, 25 bp, Probe sequence
ttttattccctagagacattttaag

SEQ ID NO: 119094 - DNA, 25 bp, Probe sequence
ttattccctagagacattttaagat

SEQ ID NO: 119095 - DNA, 25 bp, Probe sequence
aacacgcaataagttgattgatgta

SEQ ID NO: 119096 - DNA, 25 bp, Probe sequence
aattactgtaagccctttgctgtat

SEQ ID NO: 119097 - DNA, 25 bp, Probe sequence
gccctttgctgtatatgctacaatt

SEQ ID NO: 119098 - DNA, 25 bp, Probe sequence
gctacaattcttattgatggagggt

SEQ ID NO: 119099 - DNA, 25 bp, Probe sequence
gaaagactagatatgctattcattc

SEQ ID NO: 119100 - DNA, 25 bp, Probe sequence
gtaagccctttgctgtatatgctac

SEQ ID NO: 119101 - DNA, 25 bp, Probe sequence
ggcaaggctattaataaagactttt

SEQ ID NO: 119102 - DNA, 25 bp, Probe sequence
tggaaaatacttatcctagtctttt

SEQ ID NO: 119103 - DNA, 25 bp, Probe sequence
tgctattcattcttaagtcatcaac

SEQ ID NO: 119104 - DNA, 25 bp, Probe sequence
tattctaattaacaggttttccgat

SEQ ID NO: 119105 - DNA, 25 bp, Probe sequence
tctgacaatttagaattcgtattca

SEQ ID NO: 119106 - DNA, 25 bp, Probe sequence
tcaacgagtaagtaatgactttcta

SEQ ID NO: 119107 - DNA, 25 bp, Probe sequence
tttggaattgttacgtatttctgac

SEQ ID NO: 119108 - DNA, 25 bp, Probe sequence
ttcattcttaagtcatcaacgagta

SEQ ID NO: 119109 - DNA, 25 bp, Probe sequence
ttgattatcaaattactgtaagccc

SEQ ID NO: 119110 - DNA, 25 bp, Probe sequence
atcagagcacgataaataattacga

SEQ ID NO: 119111 - DNA, 25 bp, Probe sequence
agagcacgataaataattacgacca

SEQ ID NO: 119112 - DNA, 25 bp, Probe sequence
agcacgataaataattacgaccaat

SEQ ID NO: 119113 - DNA, 25 bp, Probe sequence
aatcagagcacgataaataattacg

SEQ ID NO: 119114 - DNA, 25 bp, Probe sequence
cacgataaataattacgaccaatta

SEQ ID NO: 119115 - DNA, 25 bp, Probe sequence
cagagcacgataaataattacgacc

SEQ ID NO: 119116 - DNA, 25 bp, Probe sequence
cgataaataattacgaccaattaat

SEQ ID NO: 119117 - DNA, 25 bp, Probe sequence
gcacgataaataattacgaccaatt

SEQ ID NO: 119118 - DNA, 25 bp, Probe sequence
gagcacgataaataattacgaccaa

SEQ ID NO: 119119 - DNA, 25 bp, Probe sequence
gataaataattacgaccaattaatt

SEQ ID NO: 119120 - DNA, 25 bp, Probe sequence
tcagagcacgataaataattacgac

SEQ ID NO: 119121 - DNA, 25 bp, Probe sequence
taatcagagcacgataaataattac

SEQ ID NO: 119122 - DNA, 25 bp, Probe sequence
tagttaaaagacggaggaatgaaat

SEQ ID NO: 119123 - DNA, 25 bp, Probe sequence
attcaatgtcctagtcgtgacgatg

SEQ ID NO: 119124 - DNA, 25 bp, Probe sequence
ataattcaatgtcctagtcgtgacg

SEQ ID NO: 119125 - DNA, 25 bp, Probe sequence
acgatgttatcttggcagtagtcaa

SEQ ID NO: 119126 - DNA, 25 bp, Probe sequence
aattcaatgtcctagtcgtgacgat

SEQ ID NO: 119127 - DNA, 25 bp, Probe sequence
caatgtcctagtcgtgacgatgtta

SEQ ID NO: 119128 - DNA, 25 bp, Probe sequence
cataattcaatgtcctagtcgtgac

SEQ ID NO: 119129 - DNA, 25 bp, Probe sequence
cgatgttatcttggcagtagtcaac

SEQ ID NO: 119130 - DNA, 25 bp, Probe sequence
gacgatgttatcttggcagtagtca

SEQ ID NO: 119131 - DNA, 25 bp, Probe sequence
gatgagtctgggacataattcaatg

SEQ ID NO: 119132 - DNA, 25 bp, Probe sequence
gatgttatcttggcagtagtcaact

SEQ ID NO: 119133 - DNA, 25 bp, Probe sequence
gtcgatgagtctgggacataattca

SEQ ID NO: 119134 - DNA, 25 bp, Probe sequence
gtgacgatgttatcttggcagtagt

SEQ ID NO: 119135 - DNA, 25 bp, Probe sequence
taattcaatgtcctagtcgtgacga

SEQ ID NO: 119136 - DNA, 25 bp, Probe sequence
tcaatgtcctagtcgtgacgatgtt

SEQ ID NO: 119137 - DNA, 25 bp, Probe sequence
ttcaatgtcctagtcgtgacgatgt

SEQ ID NO: 119138 - DNA, 25 bp, Probe sequence
attgtctttacaatagtttgctatg

SEQ ID NO: 119139 - DNA, 25 bp, Probe sequence
atttattttcggctataaagccaat

SEQ ID NO: 119140 - DNA, 25 bp, Probe sequence
atacacacatatcaaacgtgattgt

SEQ ID NO: 119141 - DNA, 25 bp, Probe sequence
aagccaatacacacatatcaaacgt

SEQ ID NO: 119142 - DNA, 25 bp, Probe sequence
caaacgtgattgtgtaaagggtgca

SEQ ID NO: 119143 - DNA, 25 bp, Probe sequence
cggctataaagccaatacacacata

SEQ ID NO: 119144 - DNA, 25 bp, Probe sequence
gccaatacacacatatcaaacgtga

SEQ ID NO: 119145 - DNA, 25 bp, Probe sequence
gctataaagccaatacacacatatc

SEQ ID NO: 119146 - DNA, 25 bp, Probe sequence
gaggtaattaaccaataggaggaat

SEQ ID NO: 119147 - DNA, 25 bp, Probe sequence
gtaaagggtgcaatatttatatatt

SEQ ID NO: 119148 - DNA, 25 bp, Probe sequence
gtctttacaatagtttgctatggag

SEQ ID NO: 119149 - DNA, 25 bp, Probe sequence
ggcattatgttatatttattttcgg

SEQ ID NO: 119150 - DNA, 25 bp, Probe sequence
taaagccaatacacacatatcaaac

SEQ ID NO: 119151 - DNA, 25 bp, Probe sequence
tagtttgctatggaggtaattaacc

SEQ ID NO: 119152 - DNA, 25 bp, Probe sequence
ttatgttatatttattttcggctat

SEQ ID NO: 119153 - DNA, 25 bp, Probe sequence
atgtaaatcattctaataaaacgac

SEQ ID NO: 119154 - DNA, 25 bp, Probe sequence
aggaagaagacacctttaatgttgc

SEQ ID NO: 119155 - DNA, 25 bp, Probe sequence
agacacctttaatgttgctttatta

SEQ ID NO: 119156 - DNA, 25 bp, Probe sequence
agaagacacctttaatgttgcttta

SEQ ID NO: 119157 - DNA, 25 bp, Probe sequence
aaatcattctaataaaacgacaact

SEQ ID NO: 119158 - DNA, 25 bp, Probe sequence
aagaagacacctttaatgttgcttt

SEQ ID NO: 119159 - DNA, 25 bp, Probe sequence
aagacacctttaatgttgctttatt

SEQ ID NO: 119160 - DNA, 25 bp, Probe sequence
aatgttgctttattaaaatgtaaat

SEQ ID NO: 119161 - DNA, 25 bp, Probe sequence
aatcattctaataaaacgacaactg

SEQ ID NO: 119162 - DNA, 25 bp, Probe sequence
gaagaagacacctttaatgttgctt

SEQ ID NO: 119163 - DNA, 25 bp, Probe sequence
gaagacacctttaatgttgctttat

SEQ ID NO: 119164 - DNA, 25 bp, Probe sequence
gacacctttaatgttgctttattaa

SEQ ID NO: 119165 - DNA, 25 bp, Probe sequence
gttgctttattaaaatgtaaatcat

SEQ ID NO: 119166 - DNA, 25 bp, Probe sequence
gtaaatcattctaataaaacgacaa

SEQ ID NO: 119167 - DNA, 25 bp, Probe sequence
ggaagaagacacctttaatgttgct

SEQ ID NO: 119168 - DNA, 25 bp, Probe sequence
atttgcttattcaatgcattaaatg

SEQ ID NO: 119169 - DNA, 25 bp, Probe sequence
atgacatattaaaatgccagtatta

SEQ ID NO: 119170 - DNA, 25 bp, Probe sequence
aaatgccagtattaaacgataatgt

SEQ ID NO: 119171 - DNA, 25 bp, Probe sequence
aaaatgggcatgtttaattaaatca

SEQ ID NO: 119172 - DNA, 25 bp, Probe sequence
aactgtaccgagtcagactttggta

SEQ ID NO: 119173 - DNA, 25 bp, Probe sequence
gagtcagactttggtacagtttttt

SEQ ID NO: 119174 - DNA, 25 bp, Probe sequence
gataatttaaattcacaatgagcat

SEQ ID NO: 119175 - DNA, 25 bp, Probe sequence
gtttttttatttgcttattcaatgc

SEQ ID NO: 119176 - DNA, 25 bp, Probe sequence
gtatgtatgtcacatttctggtgta

SEQ ID NO: 119177 - DNA, 25 bp, Probe sequence
gtcacatttctggtgtaaactgtac

SEQ ID NO: 119178 - DNA, 25 bp, Probe sequence
ggtgtaaactgtaccgagtcagact

SEQ ID NO: 119179 - DNA, 25 bp, Probe sequence
tggtacagtttttttatttgcttat

SEQ ID NO: 119180 - DNA, 25 bp, Probe sequence
taggcattaggtatattgctataat

SEQ ID NO: 119181 - DNA, 25 bp, Probe sequence
ttttaacctcagtatgtatgtcaca

SEQ ID NO: 119182 - DNA, 25 bp, Probe sequence
ttatgtaatttttaacctcagtatg

SEQ ID NO: 119183 - DNA, 25 bp, Probe sequence
attagacgttatattttgtgatttg

SEQ ID NO: 119184 - DNA, 25 bp, Probe sequence
atttataaacaatcgaggtgtagcg

SEQ ID NO: 119185 - DNA, 25 bp, Probe sequence
atttaatgaatctcagaactccttt

SEQ ID NO: 119186 - DNA, 25 bp, Probe sequence
acgtaaagaggagttgctgagataa

SEQ ID NO: 119187 - DNA, 25 bp, Probe sequence
acgttatattttgtgatttgtcagt

SEQ ID NO: 119188 - DNA, 25 bp, Probe sequence
aatgaatctcagaactccttttgaa

SEQ ID NO: 119189 - DNA, 25 bp, Probe sequence
aattatacgcaatattaactttgaa

SEQ ID NO: 119190 - DNA, 25 bp, Probe sequence
gaatctcagaactccttttgaaaat

SEQ ID NO: 119191 - DNA, 25 bp, Probe sequence
gaactccttttgaaaattatacgca

SEQ ID NO: 119192 - DNA, 25 bp, Probe sequence
gacttatgttacgtatacagcaatc

SEQ ID NO: 119193 - DNA, 25 bp, Probe sequence
gatttgtcagtatcatattataatg

SEQ ID NO: 119194 - DNA, 25 bp, Probe sequence
gttacgtatacagcaatcaatttta

SEQ ID NO: 119195 - DNA, 25 bp, Probe sequence
ggagttgctgagataatttaatgaa

SEQ ID NO: 119196 - DNA, 25 bp, Probe sequence
tgctgagaacaaatcaataaacgta

SEQ ID NO: 119197 - DNA, 25 bp, Probe sequence
taatgacttatgttacgtatacagc

SEQ ID NO: 119198 - DNA, 25 bp, Probe sequence
ataaagcatttaattttctatcatt

SEQ ID NO: 119199 - DNA, 25 bp, Probe sequence
atgtcctgctcttattatttttgat

SEQ ID NO: 119200 - DNA, 25 bp, Probe sequence
agcatttaattttctatcattacta

SEQ ID NO: 119201 - DNA, 25 bp, Probe sequence
aatctgatgcttatgtcctgctctt

SEQ ID NO: 119202 - DNA, 25 bp, Probe sequence
cttatgtcctgctcttattattttt

SEQ ID NO: 119203 - DNA, 25 bp, Probe sequence
ctatcattactatgctcacataatc

SEQ ID NO: 119204 - DNA, 25 bp, Probe sequence
gctcacataatctaaatattgttcg

SEQ ID NO: 119205 - DNA, 25 bp, Probe sequence
gaaatctgatgcttatgtcctgctc

SEQ ID NO: 119206 - DNA, 25 bp, Probe sequence
gttttaacaatattatgattagcca

SEQ ID NO: 119207 - DNA, 25 bp, Probe sequence
tcgaacacgtaaaagtaatttctat

SEQ ID NO: 119208 - DNA, 25 bp, Probe sequence
tcctgctcttattatttttgatata

SEQ ID NO: 119209 - DNA, 25 bp, Probe sequence
tcattactatgctcacataatctaa

SEQ ID NO: 119210 - DNA, 25 bp, Probe sequence
taatttctatttaaggtggtaattg

SEQ ID NO: 119211 - DNA, 25 bp, Probe sequence
taatctaaatattgttcgaacacgt

SEQ ID NO: 119212 - DNA, 25 bp, Probe sequence
tatgattagccaaatataaagcatt

SEQ ID NO: 119213 - DNA, 25 bp, Probe sequence
attatgcctgtatttcttttcaacg

SEQ ID NO: 119214 - DNA, 25 bp, Probe sequence
agagtgggagattcccgctcttttc

SEQ ID NO: 119215 - DNA, 25 bp, Probe sequence
agtgaagtcatttgtttcaagcata

SEQ ID NO: 119216 - DNA, 25 bp, Probe sequence
agaatctctgattaatagtgaagtc

SEQ ID NO: 119217 - DNA, 25 bp, Probe sequence
aaaattagtgaactcaggcagaaga

SEQ ID NO: 119218 - DNA, 25 bp, Probe sequence
aatgcgtatggcgtagttaaagaaa

SEQ ID NO: 119219 - DNA, 25 bp, Probe sequence
aatacaaaattggtgctggacataa

SEQ ID NO: 119220 - DNA, 25 bp, Probe sequence
cgagtctattcgaatgtaatggtga

SEQ ID NO: 119221 - DNA, 25 bp, Probe sequence
ccgctcttttctatttgccaaaaag

SEQ ID NO: 119222 - DNA, 25 bp, Probe sequence
gaacaaacttttacaagaatctctg

SEQ ID NO: 119223 - DNA, 25 bp, Probe sequence
gtatttcttttcaacgtcttacgag

SEQ ID NO: 119224 - DNA, 25 bp, Probe sequence
ggtgctggacataaaattatgcctg

SEQ ID NO: 119225 - DNA, 25 bp, Probe sequence
ggtatttatttaatgcgtatggcgt

SEQ ID NO: 119226 - DNA, 25 bp, Probe sequence
tgcctgtatttcttttcaacgtctt

SEQ ID NO: 119227 - DNA, 25 bp, Probe sequence
tcaacgtcttacgagtctattcgaa

SEQ ID NO: 119228 - DNA, 25 bp, Probe sequence
attgcactttttaagtgtctacttt

SEQ ID NO: 119229 - DNA, 25 bp, Probe sequence
agttaagattgatatgctccctata

SEQ ID NO: 119230 - DNA, 25 bp, Probe sequence
aaagttacgttatatggacatgatt

SEQ ID NO: 119231 - DNA, 25 bp, Probe sequence
aagtgtctactttatagggagcata

SEQ ID NO: 119232 - DNA, 25 bp, Probe sequence
aatgtcgactattattggaaaattt

SEQ ID NO: 119233 - DNA, 25 bp, Probe sequence
aattgtttaagcattgttacactaa

SEQ ID NO: 119234 - DNA, 25 bp, Probe sequence
ctttatttgattttataggcttaat

SEQ ID NO: 119235 - DNA, 25 bp, Probe sequence
cctatcttacggcaaactttatttg

SEQ ID NO: 119236 - DNA, 25 bp, Probe sequence
gctccctataaatattgcacttttt

SEQ ID NO: 119237 - DNA, 25 bp, Probe sequence
gaaaattttctgttgaaatgcctat

SEQ ID NO: 119238 - DNA, 25 bp, Probe sequence
gaaatgcctatcttacggcaaactt

SEQ ID NO: 119239 - DNA, 25 bp, Probe sequence
gtataaaattttgtggtggcctaga

SEQ ID NO: 119240 - DNA, 25 bp, Probe sequence
gggagcatatttgatactagctttt

SEQ ID NO: 119241 - DNA, 25 bp, Probe sequence
tgtggtggcctagaatgatttttaa

SEQ ID NO: 119242 - DNA, 25 bp, Probe sequence
tgatactagcttttggttttttatt

SEQ ID NO: 119243 - DNA, 25 bp, Probe sequence
ataaattcagttgatacgctattaa

SEQ ID NO: 119244 - DNA, 25 bp, Probe sequence
atcggtatattaacattaaacagtt

SEQ ID NO: 119245 - DNA, 25 bp, Probe sequence
aaattcagttgatacgctattaaaa

SEQ ID NO: 119246 - DNA, 25 bp, Probe sequence
aattcagttgatacgctattaaaat

SEQ ID NO: 119247 - DNA, 25 bp, Probe sequence
cagttgatacgctattaaaatatat

SEQ ID NO: 119248 - DNA, 25 bp, Probe sequence
gaataaattcagttgatacgctatt

SEQ ID NO: 119249 - DNA, 25 bp, Probe sequence
gataatttcttaatatcggtatatt

SEQ ID NO: 119250 - DNA, 25 bp, Probe sequence
gttaggtatctggaaaatgtttgat

SEQ ID NO: 119251 - DNA, 25 bp, Probe sequence
gtttgataatttcttaatatcggta

SEQ ID NO: 119252 - DNA, 25 bp, Probe sequence
gtgttaggtatctggaaaatgtttg

SEQ ID NO: 119253 - DNA, 25 bp, Probe sequence
tgtagaaatagttaacattttccag

SEQ ID NO: 119254 - DNA, 25 bp, Probe sequence
tagaaatagttaacattttccagtt

SEQ ID NO: 119255 - DNA, 25 bp, Probe sequence
tttagtgttaggtatctggaaaatg

SEQ ID NO: 119256 - DNA, 25 bp, Probe sequence
ttaaacagttaatacatagatgtgt

SEQ ID NO: 119257 - DNA, 25 bp, Probe sequence
ttcagttgatacgctattaaaatat

SEQ ID NO: 119258 - DNA, 25 bp, Probe sequence
ctccaacgcctaactcggattaagg

SEQ ID NO: 119259 - DNA, 25 bp, Probe sequence
atctccaacgcctaactcggattaa

SEQ ID NO: 119260 - DNA, 25 bp, Probe sequence
cttagtaggtcgaatctccaacgcc

SEQ ID NO: 119261 - DNA, 25 bp, Probe sequence
ataaacaatctataccacacctttt

SEQ ID NO: 119262 - DNA, 25 bp, Probe sequence
agtaggtcgaatctccaacgcctaa

SEQ ID NO: 119263 - DNA, 25 bp, Probe sequence
acgcctaactcggattaaggagtat

SEQ ID NO: 119264 - DNA, 25 bp, Probe sequence
aatctataccacacctttttcttag

SEQ ID NO: 119265 - DNA, 25 bp, Probe sequence
ccaacgcctaactcggattaaggag

SEQ ID NO: 119266 - DNA, 25 bp, Probe sequence
gttgcgtatagttatataaacaatc

SEQ ID NO: 119267 - DNA, 25 bp, Probe sequence
ggattaaggagtattcaaacatttt

SEQ ID NO: 119268 - DNA, 25 bp, Probe sequence
ggagtattcaaacattttaaggagg

SEQ ID NO: 119269 - DNA, 25 bp, Probe sequence
tctataccacacctttttcttagta

SEQ ID NO: 119270 - DNA, 25 bp, Probe sequence
taaacaatctataccacaccttttt

SEQ ID NO: 119271 - DNA, 25 bp, Probe sequence
tagtaggtcgaatctccaacgccta

SEQ ID NO: 119272 - DNA, 25 bp, Probe sequence
tataccacacctttttcttagtagg

SEQ ID NO: 119273 - DNA, 25 bp, Probe sequence
atataacgtctttgaggttggggca

SEQ ID NO: 119274 - DNA, 25 bp, Probe sequence
ataactattagattcaagagaggag

SEQ ID NO: 119275 - DNA, 25 bp, Probe sequence
acgtctttgaggttggggcatattt

SEQ ID NO: 119276 - DNA, 25 bp, Probe sequence
aagatgatataagtacacctagagt

SEQ ID NO: 119277 - DNA, 25 bp, Probe sequence
aatagatggatatcccgctctcttt

SEQ ID NO: 119278 - DNA, 25 bp, Probe sequence
gctctctttttttccaattcaatat

SEQ ID NO: 119279 - DNA, 25 bp, Probe sequence
gcatatttatgttccaaccttaatt

SEQ ID NO: 119280 - DNA, 25 bp, Probe sequence
gaggttggggcatatttatgttcca

SEQ ID NO: 119281 - DNA, 25 bp, Probe sequence
gtacacctagagtaataatcaagat

SEQ ID NO: 119282 - DNA, 25 bp, Probe sequence
ggggcatatttatgttccaacctta

SEQ ID NO: 119283 - DNA, 25 bp, Probe sequence
gggacgataagtctattttgtaaat

SEQ ID NO: 119284 - DNA, 25 bp, Probe sequence
gggtgggacgataagtctattttgt

SEQ ID NO: 119285 - DNA, 25 bp, Probe sequence
tctctttttttccaattcaatattt

SEQ ID NO: 119286 - DNA, 25 bp, Probe sequence
tttatactgataagggtgggacgat

SEQ ID NO: 119287 - DNA, 25 bp, Probe sequence
ttatgttccaaccttaatttatatt

SEQ ID NO: 119288 - DNA, 25 bp, Probe sequence
attatcctgtatgtatagtgattaa

SEQ ID NO: 119289 - DNA, 25 bp, Probe sequence
atcgtcatgtgatttttttatgcca

SEQ ID NO: 119290 - DNA, 25 bp, Probe sequence
atgtgatttttttatgccatttttt

SEQ ID NO: 119291 - DNA, 25 bp, Probe sequence
aaagtcatatgacgacaatgtatcg

SEQ ID NO: 119292 - DNA, 25 bp, Probe sequence
aacgctttattattttgagtgcaac

SEQ ID NO: 119293 - DNA, 25 bp, Probe sequence
aatagtgtacatcaagtgtttttta

SEQ ID NO: 119294 - DNA, 25 bp, Probe sequence
caactgttaattatcctgtatgtat

SEQ ID NO: 119295 - DNA, 25 bp, Probe sequence
gccattttttacgaagtgatccatt

SEQ ID NO: 119296 - DNA, 25 bp, Probe sequence
gacaatgtatcgtcatgtgattttt

SEQ ID NO: 119297 - DNA, 25 bp, Probe sequence
gtacatcaagtgttttttaacttat

SEQ ID NO: 119298 - DNA, 25 bp, Probe sequence
gtgcaactgttaattatcctgtatg

SEQ ID NO: 119299 - DNA, 25 bp, Probe sequence
tgagtgcaactgttaattatcctgt

SEQ ID NO: 119300 - DNA, 25 bp, Probe sequence
tacgaagtgatccattttgaatttg

SEQ ID NO: 119301 - DNA, 25 bp, Probe sequence
tattgaacattttaaaacgctttat

SEQ ID NO: 119302 - DNA, 25 bp, Probe sequence
ttatgccattttttacgaagtgatc

SEQ ID NO: 119303 - DNA, 25 bp, Probe sequence
atattgttctaacctctttcatcgt

SEQ ID NO: 119304 - DNA, 25 bp, Probe sequence
atggtcaattgaaaggggtaacgat

SEQ ID NO: 119305 - DNA, 25 bp, Probe sequence
acctctttcatcgtctgtttggact

SEQ ID NO: 119306 - DNA, 25 bp, Probe sequence
aagaggtcagaacaagtcaccgaaa

SEQ ID NO: 119307 - DNA, 25 bp, Probe sequence
aaggcaacataaggaggtgcgtcaa

SEQ ID NO: 119308 - DNA, 25 bp, Probe sequence
ctttcatcgtctgtttggactacat

SEQ ID NO: 119309 - DNA, 25 bp, Probe sequence
gatgatattgttctaacctctttca

SEQ ID NO: 119310 - DNA, 25 bp, Probe sequence
gtcaccgaaatataatggttgtcat

SEQ ID NO: 119311 - DNA, 25 bp, Probe sequence
gtcatggacaatttacttatatttt

SEQ ID NO: 119312 - DNA, 25 bp, Probe sequence
gtcgttttaactaaggcaacataag

SEQ ID NO: 119313 - DNA, 25 bp, Probe sequence
ggggtaacgattaatctgttatctt

SEQ ID NO: 119314 - DNA, 25 bp, Probe sequence
tggactacatattctaaacatcaaa

SEQ ID NO: 119315 - DNA, 25 bp, Probe sequence
tcgtctgtttggactacatattcta

SEQ ID NO: 119316 - DNA, 25 bp, Probe sequence
taatctgttatcttaagtaaattga

SEQ ID NO: 119317 - DNA, 25 bp, Probe sequence
ttacttatattttatgatggtcaat

SEQ ID NO: 119318 - DNA, 25 bp, Probe sequence
atatagaactatttttatgagcaaa

SEQ ID NO: 119319 - DNA, 25 bp, Probe sequence
atagaactatttttatgagcaaatg

SEQ ID NO: 119320 - DNA, 25 bp, Probe sequence
atgagcaaatgtttttatgattgat

SEQ ID NO: 119321 - DNA, 25 bp, Probe sequence
agaactatttttatgagcaaatgtt

SEQ ID NO: 119322 - DNA, 25 bp, Probe sequence
agcaaatgtttttatgattgatgtt

SEQ ID NO: 119323 - DNA, 25 bp, Probe sequence
actatttttatgagcaaatgttttt

SEQ ID NO: 119324 - DNA, 25 bp, Probe sequence
aaatgtttttatgattgatgttata

SEQ ID NO: 119325 - DNA, 25 bp, Probe sequence
aactatttttatgagcaaatgtttt

SEQ ID NO: 119326 - DNA, 25 bp, Probe sequence
gcaaatgtttttatgattgatgtta

SEQ ID NO: 119327 - DNA, 25 bp, Probe sequence
gaactatttttatgagcaaatgttt

SEQ ID NO: 119328 - DNA, 25 bp, Probe sequence
gagcaaatgtttttatgattgatgt

SEQ ID NO: 119329 - DNA, 25 bp, Probe sequence
tgagcaaatgtttttatgattgatg

SEQ ID NO: 119330 - DNA, 25 bp, Probe sequence
tttatgagcaaatgtttttatgatt

SEQ ID NO: 119331 - DNA, 25 bp, Probe sequence
ttttatgagcaaatgtttttatgat

SEQ ID NO: 119332 - DNA, 25 bp, Probe sequence
tttttatgagcaaatgtttttatga

SEQ ID NO: 119333 - DNA, 25 bp, Probe sequence
atcccaattttagaaattagccacg

SEQ ID NO: 119334 - DNA, 25 bp, Probe sequence
atttcattttcatatggaatctagt

SEQ ID NO: 119335 - DNA, 25 bp, Probe sequence
atttgtttatactagatttcatttt

SEQ ID NO: 119336 - DNA, 25 bp, Probe sequence
acaatatttgttcattttttaggca

SEQ ID NO: 119337 - DNA, 25 bp, Probe sequence
catatggaatctagtttttttaatc

SEQ ID NO: 119338 - DNA, 25 bp, Probe sequence
gccacgcaattgtttataatgatat

SEQ ID NO: 119339 - DNA, 25 bp, Probe sequence
gcatctgatacattgaatctaaaat

SEQ ID NO: 119340 - DNA, 25 bp, Probe sequence
gcaaatgtgttgtagcatctgatac

SEQ ID NO: 119341 - DNA, 25 bp, Probe sequence
gaattaaacgatacaagggggatat

SEQ ID NO: 119342 - DNA, 25 bp, Probe sequence
gaaattagccacgcaattgtttata

SEQ ID NO: 119343 - DNA, 25 bp, Probe sequence
gtagcatctgatacattgaatctaa

SEQ ID NO: 119344 - DNA, 25 bp, Probe sequence
gtgttgtagcatctgatacattgaa

SEQ ID NO: 119345 - DNA, 25 bp, Probe sequence
taggcaaatgtgttgtagcatctga

SEQ ID NO: 119346 - DNA, 25 bp, Probe sequence
ttagccacgcaattgtttataatga

SEQ ID NO: 119347 - DNA, 25 bp, Probe sequence
ttgtttatactagatttcattttca

SEQ ID NO: 119348 - DNA, 25 bp, Probe sequence
ataagcacgtttgttcgtttttgcg

SEQ ID NO: 119349 - DNA, 25 bp, Probe sequence
attttgaatccttgtatagtattga

SEQ ID NO: 119350 - DNA, 25 bp, Probe sequence
atattcgcaaaacacttgtatttta

SEQ ID NO: 119351 - DNA, 25 bp, Probe sequence
acacttgtattttattttgaatcct

SEQ ID NO: 119352 - DNA, 25 bp, Probe sequence
cttgtattttattttgaatccttgt

SEQ ID NO: 119353 - DNA, 25 bp, Probe sequence
cgtttttgcgttttgatttcaagat

SEQ ID NO: 119354 - DNA, 25 bp, Probe sequence
gcaatttcaattaggaggtctcgct

SEQ ID NO: 119355 - DNA, 25 bp, Probe sequence
gaatccttgtatagtattgataaga

SEQ ID NO: 119356 - DNA, 25 bp, Probe sequence
gaacaaatattcgcaaaacacttgt

SEQ ID NO: 119357 - DNA, 25 bp, Probe sequence
gatttcaagattttatacgaacaaa

SEQ ID NO: 119358 - DNA, 25 bp, Probe sequence
gtattttattttgaatccttgtata

SEQ ID NO: 119359 - DNA, 25 bp, Probe sequence
taagcacgtttgttcgtttttgcgt

SEQ ID NO: 119360 - DNA, 25 bp, Probe sequence
taaaaatataagcacgtttgttcgt

SEQ ID NO: 119361 - DNA, 25 bp, Probe sequence
tttgcgttttgatttcaagatttta

SEQ ID NO: 119362 - DNA, 25 bp, Probe sequence
ttcgtttttgcgttttgatttcaag

SEQ ID NO: 119363 - DNA, 25 bp, Probe sequence
atctcctataaaccgtacaattaat

SEQ ID NO: 119364 - DNA, 25 bp, Probe sequence
ataacttgacacttatctcctataa

SEQ ID NO: 119365 - DNA, 25 bp, Probe sequence
acttatctcctataaaccgtacaat

SEQ ID NO: 119366 - DNA, 25 bp, Probe sequence
aaacttagcaaatatccttatagga

SEQ ID NO: 119367 - DNA, 25 bp, Probe sequence
aagtgatattcatctcataaagcta

SEQ ID NO: 119368 - DNA, 25 bp, Probe sequence
caatagttttataatcgagcttcaa

SEQ ID NO: 119369 - DNA, 25 bp, Probe sequence
gaatttcatataaagagcaaaccct

SEQ ID NO: 119370 - DNA, 25 bp, Probe sequence
gacacttatctcctataaaccgtac

SEQ ID NO: 119371 - DNA, 25 bp, Probe sequence
gagcaaaccctagaaaaggaggtgt

SEQ ID NO: 119372 - DNA, 25 bp, Probe sequence
gaaatagcattcaatatagtgcaaa

SEQ ID NO: 119373 - DNA, 25 bp, Probe sequence
gtgcaaattgataacttgacactta

SEQ ID NO: 119374 - DNA, 25 bp, Probe sequence
gggatacactacaaatcgagactat

SEQ ID NO: 119375 - DNA, 25 bp, Probe sequence
tctaactttatgggatacactacaa

SEQ ID NO: 119376 - DNA, 25 bp, Probe sequence
tacaaatcgagactataaggttttt

SEQ ID NO: 119377 - DNA, 25 bp, Probe sequence
tataatcgagcttcaaaactttaga

SEQ ID NO: 119378 - DNA, 25 bp, Probe sequence
atcttctcttctgcaatattaatta

SEQ ID NO: 119379 - DNA, 25 bp, Probe sequence
atctaattagacagcactttatcgg

SEQ ID NO: 119380 - DNA, 25 bp, Probe sequence
atgttttaggcttcgtatttactat

SEQ ID NO: 119381 - DNA, 25 bp, Probe sequence
atgtaaacctataaagatgagtgct

SEQ ID NO: 119382 - DNA, 25 bp, Probe sequence
agatgtaacacatcttctcttctgc

SEQ ID NO: 119383 - DNA, 25 bp, Probe sequence
aattaggatttatttctaagttgag

SEQ ID NO: 119384 - DNA, 25 bp, Probe sequence
cacaaattagtgagggagctttttt

SEQ ID NO: 119385 - DNA, 25 bp, Probe sequence
cacatcttctcttctgcaatattaa

SEQ ID NO: 119386 - DNA, 25 bp, Probe sequence
gacagcactttatcggtaataacta

SEQ ID NO: 119387 - DNA, 25 bp, Probe sequence
gatgagtgcttttctaaccaataaa

SEQ ID NO: 119388 - DNA, 25 bp, Probe sequence
ggagcttttttaagttgtagtctca

SEQ ID NO: 119389 - DNA, 25 bp, Probe sequence
tgaaagtaagacggaccttatatta

SEQ ID NO: 119390 - DNA, 25 bp, Probe sequence
taagttgtagtctcaatctaattag

SEQ ID NO: 119391 - DNA, 25 bp, Probe sequence
tttttgtctccctcacaaattagtg

SEQ ID NO: 119392 - DNA, 25 bp, Probe sequence
tttaggcttcgtatttactatattt

SEQ ID NO: 119393 - DNA, 25 bp, Probe sequence
atactaacatattgaagttttcaga

SEQ ID NO: 119394 - DNA, 25 bp, Probe sequence
aactagtatttatgagaggatgaac

SEQ ID NO: 119395 - DNA, 25 bp, Probe sequence
aactcctatttattttgatgtctta

SEQ ID NO: 119396 - DNA, 25 bp, Probe sequence
aatgtctctctataattgaagaaaa

SEQ ID NO: 119397 - DNA, 25 bp, Probe sequence
caaagtaatgtctctctataattga

SEQ ID NO: 119398 - DNA, 25 bp, Probe sequence
ctcctatttattttgatgtcttaat

SEQ ID NO: 119399 - DNA, 25 bp, Probe sequence
gaacgtatgaattaaactagtattt

SEQ ID NO: 119400 - DNA, 25 bp, Probe sequence
gtatttatttacaactcctatttat

SEQ ID NO: 119401 - DNA, 25 bp, Probe sequence
gtaatgtctctctataattgaagaa

SEQ ID NO: 119402 - DNA, 25 bp, Probe sequence
tacaactcctatttattttgatgtc

SEQ ID NO: 119403 - DNA, 25 bp, Probe sequence
tatttacaactcctatttattttga

SEQ ID NO: 119404 - DNA, 25 bp, Probe sequence
tatttatttacaactcctatttatt

SEQ ID NO: 119405 - DNA, 25 bp, Probe sequence
ttattttgatgtcttaatactaaca

SEQ ID NO: 119406 - DNA, 25 bp, Probe sequence
ttgaagttttcagacaaagtaatgt

SEQ ID NO: 119407 - DNA, 25 bp, Probe sequence
ttactttaaatattagaacgtatga

SEQ ID NO: 119408 - DNA, 25 bp, Probe sequence
gaattggaccctatcgtccattagt

SEQ ID NO: 119409 - DNA, 25 bp, Probe sequence
attggaccctatcgtccattagtat

SEQ ID NO: 119410 - DNA, 25 bp, Probe sequence
attcgaattggaccctatcgtccat

SEQ ID NO: 119411 - DNA, 25 bp, Probe sequence
attacgtaagtaaacattcgaattg

SEQ ID NO: 119412 - DNA, 25 bp, Probe sequence
atagtaccactgtttacatagtaaa

SEQ ID NO: 119413 - DNA, 25 bp, Probe sequence
atgaatttaatatagtaccactgtt

SEQ ID NO: 119414 - DNA, 25 bp, Probe sequence
tcgaattggaccctatcgtccatta

SEQ ID NO: 119415 - DNA, 25 bp, Probe sequence
acattcgaattggaccctatcgtcc

SEQ ID NO: 119416 - DNA, 25 bp, Probe sequence
aacattcgaattggaccctatcgtc

SEQ ID NO: 119417 - DNA, 25 bp, Probe sequence
aatatagtaccactgtttacatagt

SEQ ID NO: 119418 - DNA, 25 bp, Probe sequence
ctatcgtccattagtatgaatttaa

SEQ ID NO: 119419 - DNA, 25 bp, Probe sequence
ccctatcgtccattagtatgaattt

SEQ ID NO: 119420 - DNA, 25 bp, Probe sequence
gaccctatcgtccattagtatgaat

SEQ ID NO: 119421 - DNA, 25 bp, Probe sequence
gtaaacattcgaattggaccctatc

SEQ ID NO: 119422 - DNA, 25 bp, Probe sequence
tacatagtaaatcggtggttctttt

SEQ ID NO: 119423 - DNA, 25 bp, Probe sequence
aggtttgaggcgttttcttatacat

SEQ ID NO: 119424 - DNA, 25 bp, Probe sequence
aaatgtcttgaatgttagaatttta

SEQ ID NO: 119425 - DNA, 25 bp, Probe sequence
aaacatgctattgacacattttatt

SEQ ID NO: 119426 - DNA, 25 bp, Probe sequence
cagagtcattgttcattttaatatt

SEQ ID NO: 119427 - DNA, 25 bp, Probe sequence
cattttaatattgaacgcccttact

SEQ ID NO: 119428 - DNA, 25 bp, Probe sequence
cgcccttacttaattaaatgtcttg

SEQ ID NO: 119429 - DNA, 25 bp, Probe sequence
gacacattttattaggtttgaggcg

SEQ ID NO: 119430 - DNA, 25 bp, Probe sequence
gatgcttcgtgattatatggtatga

SEQ ID NO: 119431 - DNA, 25 bp, Probe sequence
gatttcaaacagagtcattgttcat

SEQ ID NO: 119432 - DNA, 25 bp, Probe sequence
taattctaaacatgctattgacaca

SEQ ID NO: 119433 - DNA, 25 bp, Probe sequence
taatattgaacgcccttacttaatt

SEQ ID NO: 119434 - DNA, 25 bp, Probe sequence
tagaaagcttacaaacgaatatatt

SEQ ID NO: 119435 - DNA, 25 bp, Probe sequence
tatacatttaagatgcttcgtgatt

SEQ ID NO: 119436 - DNA, 25 bp, Probe sequence
ttgaacgcccttacttaattaaatg

SEQ ID NO: 119437 - DNA, 25 bp, Probe sequence
ttgaggcgttttcttatacatttaa

SEQ ID NO: 119438 - DNA, 25 bp, Probe sequence
atctctttgtctttttgggaggaca

SEQ ID NO: 119439 - DNA, 25 bp, Probe sequence
acgctttcatatcgatagtatcata

SEQ ID NO: 119440 - DNA, 25 bp, Probe sequence
aaatatggctgaagaatgtcaatta

SEQ ID NO: 119441 - DNA, 25 bp, Probe sequence
gctagtgtaggaatctctttgtctt

SEQ ID NO: 119442 - DNA, 25 bp, Probe sequence
gacaacgctttcatatcgatagtat

SEQ ID NO: 119443 - DNA, 25 bp, Probe sequence
gagacgggagatttctacgagccaa

SEQ ID NO: 119444 - DNA, 25 bp, Probe sequence
gatttctacgagccaaactgctagt

SEQ ID NO: 119445 - DNA, 25 bp, Probe sequence
gtcaattaaacaaaatggcgtcata

SEQ ID NO: 119446 - DNA, 25 bp, Probe sequence
gtgcggattgatatttctagttttc

SEQ ID NO: 119447 - DNA, 25 bp, Probe sequence
gtgtaggaatctctttgtctttttg

SEQ ID NO: 119448 - DNA, 25 bp, Probe sequence
gggagatttctacgagccaaactgc

SEQ ID NO: 119449 - DNA, 25 bp, Probe sequence
ggcgtcataaataaattagtgcgga

SEQ ID NO: 119450 - DNA, 25 bp, Probe sequence
tacaaaaaccattgacaacgctttc

SEQ ID NO: 119451 - DNA, 25 bp, Probe sequence
tacgagccaaactgctagtgtagga

SEQ ID NO: 119452 - DNA, 25 bp, Probe sequence
taggaatctctttgtctttttggga

SEQ ID NO: 119453 - DNA, 25 bp, Probe sequence
agacttttgtataaacattgtgata

SEQ ID NO: 119454 - DNA, 25 bp, Probe sequence
acgagagatttgttcgaacatgtac

SEQ ID NO: 119455 - DNA, 25 bp, Probe sequence
acttgtagattagacttttgtataa

SEQ ID NO: 119456 - DNA, 25 bp, Probe sequence
aaacgagagatttgttcgaacatgt

SEQ ID NO: 119457 - DNA, 25 bp, Probe sequence
gaaacgagagatttgttcgaacatg

SEQ ID NO: 119458 - DNA, 25 bp, Probe sequence
gagaaacgagagatttgttcgaaca

SEQ ID NO: 119459 - DNA, 25 bp, Probe sequence
gagagatttgttcgaacatgtacaa

SEQ ID NO: 119460 - DNA, 25 bp, Probe sequence
gagatttgttcgaacatgtacaatt

SEQ ID NO: 119461 - DNA, 25 bp, Probe sequence
gatttgttcgaacatgtacaattga

SEQ ID NO: 119462 - DNA, 25 bp, Probe sequence
gattagacttttgtataaacattgt

SEQ ID NO: 119463 - DNA, 25 bp, Probe sequence
gttaatatttgaatcgagaaacgag

SEQ ID NO: 119464 - DNA, 25 bp, Probe sequence
gtagattagacttttgtataaacat

SEQ ID NO: 119465 - DNA, 25 bp, Probe sequence
gtgatacaatcaatttaagttaata

SEQ ID NO: 119466 - DNA, 25 bp, Probe sequence
tgttcgaacatgtacaattgaagga

SEQ ID NO: 119467 - DNA, 25 bp, Probe sequence
ttcgaacatgtacaattgaaggatt

SEQ ID NO: 119468 - DNA, 25 bp, Probe sequence
atacgagatacattagtcaattgaa

SEQ ID NO: 119469 - DNA, 25 bp, Probe sequence
agtcaattgaaactatgcatcacta

SEQ ID NO: 119470 - DNA, 25 bp, Probe sequence
aactggtgtcctgttttaagggcat

SEQ ID NO: 119471 - DNA, 25 bp, Probe sequence
actatgcatcactaaatgtatgata

SEQ ID NO: 119472 - DNA, 25 bp, Probe sequence
aacgttgttattaaaggtgtgagat

SEQ ID NO: 119473 - DNA, 25 bp, Probe sequence
aagggcatcagtttttttatacgag

SEQ ID NO: 119474 - DNA, 25 bp, Probe sequence
aatcataaactggtgtcctgtttta

SEQ ID NO: 119475 - DNA, 25 bp, Probe sequence
cataaactggtgtcctgttttaagg

SEQ ID NO: 119476 - DNA, 25 bp, Probe sequence
ctggtgtcctgttttaagggcatca

SEQ ID NO: 119477 - DNA, 25 bp, Probe sequence
gaaactatgcatcactaaatgtatg

SEQ ID NO: 119478 - DNA, 25 bp, Probe sequence
gtacaatcataaactggtgtcctgt

SEQ ID NO: 119479 - DNA, 25 bp, Probe sequence
gtcctgttttaagggcatcagtttt

SEQ ID NO: 119480 - DNA, 25 bp, Probe sequence
gggcatcagtttttttatacgagat

SEQ ID NO: 119481 - DNA, 25 bp, Probe sequence
ggtgtcctgttttaagggcatcagt

SEQ ID NO: 119482 - DNA, 25 bp, Probe sequence
tcagtttttttatacgagatacatt

SEQ ID NO: 119483 - DNA, 25 bp, Probe sequence
acgcttcatataaaggtcgagtcaa

SEQ ID NO: 119484 - DNA, 25 bp, Probe sequence
aaaggtcgagtcaatatatgatacg

SEQ ID NO: 119485 - DNA, 25 bp, Probe sequence
aatgatgttcaaatgacaagataca

SEQ ID NO: 119486 - DNA, 25 bp, Probe sequence
aatgactcgtgtacataacgtttga

SEQ ID NO: 119487 - DNA, 25 bp, Probe sequence
catatgggcacgatttaatgactcg

SEQ ID NO: 119488 - DNA, 25 bp, Probe sequence
ctcgtgtacataacgtttgaagtat

SEQ ID NO: 119489 - DNA, 25 bp, Probe sequence
cgatttaatgactcgtgtacataac

SEQ ID NO: 119490 - DNA, 25 bp, Probe sequence
gaatgtttgtaataaaaacgcttca

SEQ ID NO: 119491 - DNA, 25 bp, Probe sequence
gaagcgttttatttgctatgagcta

SEQ ID NO: 119492 - DNA, 25 bp, Probe sequence
gactcgtgtacataacgtttgaagt

SEQ ID NO: 119493 - DNA, 25 bp, Probe sequence
gttgtaatcatatgggcacgattta

SEQ ID NO: 119494 - DNA, 25 bp, Probe sequence
gttttatttgctatgagctagtata

SEQ ID NO: 119495 - DNA, 25 bp, Probe sequence
gggcacgatttaatgactcgtgtac

SEQ ID NO: 119496 - DNA, 25 bp, Probe sequence
taaagtcatatgtgacatcaattaa

SEQ ID NO: 119497 - DNA, 25 bp, Probe sequence
tatgatacgactttatatgaagcgt

SEQ ID NO: 119498 - DNA, 25 bp, Probe sequence
atcatcctttcgatttacttaaaat

SEQ ID NO: 119499 - DNA, 25 bp, Probe sequence
accataaaatcgtgtaatagtcttt

SEQ ID NO: 119500 - DNA, 25 bp, Probe sequence
aaatgtaccataaaatcgtgtaata

SEQ ID NO: 119501 - DNA, 25 bp, Probe sequence
aatagtctttactaaaactctatga

SEQ ID NO: 119502 - DNA, 25 bp, Probe sequence
catcctttcgatttacttaaaatgt

SEQ ID NO: 119503 - DNA, 25 bp, Probe sequence
ctctatgatagaatactttgagtag

SEQ ID NO: 119504 - DNA, 25 bp, Probe sequence
gaatcatcctttcgatttacttaaa

SEQ ID NO: 119505 - DNA, 25 bp, Probe sequence
gtaggattttattaaggagatgtat

SEQ ID NO: 119506 - DNA, 25 bp, Probe sequence
gtaatagtctttactaaaactctat

SEQ ID NO: 119507 - DNA, 25 bp, Probe sequence
gtctttactaaaactctatgataga

SEQ ID NO: 119508 - DNA, 25 bp, Probe sequence
tgaatcatcctttcgatttacttaa

SEQ ID NO: 119509 - DNA, 25 bp, Probe sequence
taaaatcgtgtaatagtctttacta

SEQ ID NO: 119510 - DNA, 25 bp, Probe sequence
tagtctttactaaaactctatgata

SEQ ID NO: 119511 - DNA, 25 bp, Probe sequence
tttgagtaggattttattaaggaga

SEQ ID NO: 119512 - DNA, 25 bp, Probe sequence
ttcgatttacttaaaatgtaccata

SEQ ID NO: 119513 - DNA, 25 bp, Probe sequence
atattttagctgtagattgttttat

SEQ ID NO: 119514 - DNA, 25 bp, Probe sequence
atatcaatgttttaagctttatgtt

SEQ ID NO: 119515 - DNA, 25 bp, Probe sequence
atgtgtcttgggtgaaattttttgc

SEQ ID NO: 119516 - DNA, 25 bp, Probe sequence
aaacctgacatatttttgaaatcct

SEQ ID NO: 119517 - DNA, 25 bp, Probe sequence
aagctttatgttagaaaacctgaca

SEQ ID NO: 119518 - DNA, 25 bp, Probe sequence
aagtcgaaatcgcagttatatcaat

SEQ ID NO: 119519 - DNA, 25 bp, Probe sequence
aattttttgcggagatttatcagat

SEQ ID NO: 119520 - DNA, 25 bp, Probe sequence
gcggagatttatcagattattttta

SEQ ID NO: 119521 - DNA, 25 bp, Probe sequence
gctgtagattgttttatgtcgtttt

SEQ ID NO: 119522 - DNA, 25 bp, Probe sequence
gaaatcgcagttatatcaatgtttt

SEQ ID NO: 119523 - DNA, 25 bp, Probe sequence
gattgttttatgtcgttttagaagt

SEQ ID NO: 119524 - DNA, 25 bp, Probe sequence
gtcttgggtgaaattttttgcggag

SEQ ID NO: 119525 - DNA, 25 bp, Probe sequence
gtcgttttagaagtcgaaatcgcag

SEQ ID NO: 119526 - DNA, 25 bp, Probe sequence
tcaccctaaatgataatgtgtcttg

SEQ ID NO: 119527 - DNA, 25 bp, Probe sequence
tagattaaatttcaccctaaatgat

SEQ ID NO: 119528 - DNA, 25 bp, Probe sequence
atcaagggctagagcgttttgcttt

SEQ ID NO: 119529 - DNA, 25 bp, Probe sequence
agggctagagcgttttgctttagct

SEQ ID NO: 119530 - DNA, 25 bp, Probe sequence
agcgttttgctttagctcttttttg

SEQ ID NO: 119531 - DNA, 25 bp, Probe sequence
caagggctagagcgttttgctttag

SEQ ID NO: 119532 - DNA, 25 bp, Probe sequence
cagtaatatcaagggctagagcgtt

SEQ ID NO: 119533 - DNA, 25 bp, Probe sequence
gcgttttgctttagctcttttttga

SEQ ID NO: 119534 - DNA, 25 bp, Probe sequence
gctagagcgttttgctttagctctt

SEQ ID NO: 119535 - DNA, 25 bp, Probe sequence
gctttagctcttttttgatttggaa

SEQ ID NO: 119536 - DNA, 25 bp, Probe sequence
gttttgctttagctcttttttgatt

SEQ ID NO: 119537 - DNA, 25 bp, Probe sequence
gggctagagcgttttgctttagctc

SEQ ID NO: 119538 - DNA, 25 bp, Probe sequence
gggaaatcagtaatatcaagggcta

SEQ ID NO: 119539 - DNA, 25 bp, Probe sequence
tgctttagctcttttttgatttgga

SEQ ID NO: 119540 - DNA, 25 bp, Probe sequence
tacgctaaacaatgatgggaaatca

SEQ ID NO: 119541 - DNA, 25 bp, Probe sequence
tttgctttagctcttttttgatttg

SEQ ID NO: 119542 - DNA, 25 bp, Probe sequence
tttagctcttttttgatttggaaag

SEQ ID NO: 119543 - DNA, 25 bp, Probe sequence
attacttctcatcgaattcatttgc

SEQ ID NO: 119544 - DNA, 25 bp, Probe sequence
atcgaattcatttgcagaacgttct

SEQ ID NO: 119545 - DNA, 25 bp, Probe sequence
aagagggaccttactacgcattatt

SEQ ID NO: 119546 - DNA, 25 bp, Probe sequence
aatatctttttgtttatcgatcggt

SEQ ID NO: 119547 - DNA, 25 bp, Probe sequence
gccatattcatattacttctcatcg

SEQ ID NO: 119548 - DNA, 25 bp, Probe sequence
gaggcgataaaagaacgtcgcgaaa

SEQ ID NO: 119549 - DNA, 25 bp, Probe sequence
gttatactactattgatattctaaa

SEQ ID NO: 119550 - DNA, 25 bp, Probe sequence
gtattttcattttagttatactact

SEQ ID NO: 119551 - DNA, 25 bp, Probe sequence
gtattacttgaaaatagccatattc

SEQ ID NO: 119552 - DNA, 25 bp, Probe sequence
gtcgcgaaaacgttgagtattactt

SEQ ID NO: 119553 - DNA, 25 bp, Probe sequence
ggaggtgatgagatgaggcgataaa

SEQ ID NO: 119554 - DNA, 25 bp, Probe sequence
tgcagaacgttctaaggtaagaccc

SEQ ID NO: 119555 - DNA, 25 bp, Probe sequence
taaaaatttcgcctcatctaattta

SEQ ID NO: 119556 - DNA, 25 bp, Probe sequence
tactacgcattattaagggggtaat

SEQ ID NO: 119557 - DNA, 25 bp, Probe sequence
tttatcgatcggtattttcatttta

SEQ ID NO: 119558 - DNA, 25 bp, Probe sequence
gggagttcaacatgtcacttacccc

SEQ ID NO: 119559 - DNA, 25 bp, Probe sequence
aaacctttaggtgctcttagatgga

SEQ ID NO: 119560 - DNA, 25 bp, Probe sequence
atatagaacttcagtataccttttg

SEQ ID NO: 119561 - DNA, 25 bp, Probe sequence
atcttgccagtggatatgggagttc

SEQ ID NO: 119562 - DNA, 25 bp, Probe sequence
agggaggtggtatttatgacaagag

SEQ ID NO: 119563 - DNA, 25 bp, Probe sequence
actagtgactgagtgggtgttttta

SEQ ID NO: 119564 - DNA, 25 bp, Probe sequence
aactgcccaaactagtgactgagtg

SEQ ID NO: 119565 - DNA, 25 bp, Probe sequence
aactctctatcttaacattgcaact

SEQ ID NO: 119566 - DNA, 25 bp, Probe sequence
caacatgtcacttaccccaatttgt

SEQ ID NO: 119567 - DNA, 25 bp, Probe sequence
gctgtgacgagcttaataattcaag

SEQ ID NO: 119568 - DNA, 25 bp, Probe sequence
gcaaaagacctttaccacattaaat

SEQ ID NO: 119569 - DNA, 25 bp, Probe sequence
gtcacttaccccaatttgtggaatg

SEQ ID NO: 119570 - DNA, 25 bp, Probe sequence
ataggcatacaataactgcccaaac

SEQ ID NO: 119571 - DNA, 25 bp, Probe sequence
ggtgctcttagatggatgttaatca

SEQ ID NO: 119572 - DNA, 25 bp, Probe sequence
tatatggagttctttcttttttaca

SEQ ID NO: 119573 - DNA, 25 bp, Probe sequence
attgctaaacgtagttactgcatta

SEQ ID NO: 119574 - DNA, 25 bp, Probe sequence
aaataaggccatatcttttgaaata

SEQ ID NO: 119575 - DNA, 25 bp, Probe sequence
aaatatggatagcttaatgtgaata

SEQ ID NO: 119576 - DNA, 25 bp, Probe sequence
aaacaatgtattgctaaacgtagtt

SEQ ID NO: 119577 - DNA, 25 bp, Probe sequence
aacgtagttactgcattaggattat

SEQ ID NO: 119578 - DNA, 25 bp, Probe sequence
caagtttggcaactacaaagaaaca

SEQ ID NO: 119579 - DNA, 25 bp, Probe sequence
ctattaggtattagtttatgaatta

SEQ ID NO: 119580 - DNA, 25 bp, Probe sequence
gaattaacaagtttggcaactacaa

SEQ ID NO: 119581 - DNA, 25 bp, Probe sequence
gaaatatcatggagtgagcctttta

SEQ ID NO: 119582 - DNA, 25 bp, Probe sequence
gagccttttaaatcatctaatttta

SEQ ID NO: 119583 - DNA, 25 bp, Probe sequence
gagtgagccttttaaatcatctaat

SEQ ID NO: 119584 - DNA, 25 bp, Probe sequence
gtattgctaaacgtagttactgcat

SEQ ID NO: 119585 - DNA, 25 bp, Probe sequence
ggccatatcttttgaaatatcatgg

SEQ ID NO: 119586 - DNA, 25 bp, Probe sequence
tggagtgagccttttaaatcatcta

SEQ ID NO: 119587 - DNA, 25 bp, Probe sequence
tagttactgcattaggattattata

SEQ ID NO: 119588 - DNA, 25 bp, Probe sequence
attttgtaataatgtttgtgcgaat

SEQ ID NO: 119589 - DNA, 25 bp, Probe sequence
cacgttttgtccacctcaataagat

SEQ ID NO: 119590 - DNA, 25 bp, Probe sequence
aatatagcatttggtttatgattcc

SEQ ID NO: 119591 - DNA, 25 bp, Probe sequence
aattgtgtaattggcatatatgatg

SEQ ID NO: 119592 - DNA, 25 bp, Probe sequence
ctaatgatttcatggttgtctgtcc

SEQ ID NO: 119593 - DNA, 25 bp, Probe sequence
gaaattatcattgccattaaatctt

SEQ ID NO: 119594 - DNA, 25 bp, Probe sequence
gatgatattaaaggctgaacacagt

SEQ ID NO: 119595 - DNA, 25 bp, Probe sequence
gataatctcttagttttagaaattg

SEQ ID NO: 119596 - DNA, 25 bp, Probe sequence
gatttcatggttgtctgtccacgtt

SEQ ID NO: 119597 - DNA, 25 bp, Probe sequence
gttaattttaatgcagtattctata

SEQ ID NO: 119598 - DNA, 25 bp, Probe sequence
gtgcgaattattttttattgacaat

SEQ ID NO: 119599 - DNA, 25 bp, Probe sequence
tgtccacctcaataagataatctct

SEQ ID NO: 119600 - DNA, 25 bp, Probe sequence
tcatggttgtctgtccacgttttgt

SEQ ID NO: 119601 - DNA, 25 bp, Probe sequence
tatcattgccattaaatcttgaata

SEQ ID NO: 119602 - DNA, 25 bp, Probe sequence
ttggcatatatgatgatttgtgata

SEQ ID NO: 119603 - DNA, 25 bp, Probe sequence
atattactttctcaccattagtaaa

SEQ ID NO: 119604 - DNA, 25 bp, Probe sequence
atatgaagtcatattctttgaataa

SEQ ID NO: 119605 - DNA, 25 bp, Probe sequence
aaatagtttgaatcttttgatttca

SEQ ID NO: 119606 - DNA, 25 bp, Probe sequence
aaaatattactttctcaccattagt

SEQ ID NO: 119607 - DNA, 25 bp, Probe sequence
aatctaataagaatgtgaggtttga

SEQ ID NO: 119608 - DNA, 25 bp, Probe sequence
aataaaatattactttctcaccatt

SEQ ID NO: 119609 - DNA, 25 bp, Probe sequence
gaatcttttgatttcaattctggta

SEQ ID NO: 119610 - DNA, 25 bp, Probe sequence
gaatcgtgtggtaaacataatttat

SEQ ID NO: 119611 - DNA, 25 bp, Probe sequence
gagtgtaaagaatcgtgtggtaaac

SEQ ID NO: 119612 - DNA, 25 bp, Probe sequence
gtgaggtttgatttaatatgaagtc

SEQ ID NO: 119613 - DNA, 25 bp, Probe sequence
ggaggtgaaaatggtcgaggaagtt

SEQ ID NO: 119614 - DNA, 25 bp, Probe sequence
ggactattgaatttgcaatctaata

SEQ ID NO: 119615 - DNA, 25 bp, Probe sequence
tgatttcaattctggtaggactatt

SEQ ID NO: 119616 - DNA, 25 bp, Probe sequence
tctggtaggactattgaatttgcaa

SEQ ID NO: 119617 - DNA, 25 bp, Probe sequence
tactttctcaccattagtaaaatga

SEQ ID NO: 119618 - DNA, 25 bp, Probe sequence
atatctcaatatctaaaatctaaaa

SEQ ID NO: 119619 - DNA, 25 bp, Probe sequence
agtggttgtaaacttcaatgaatat

SEQ ID NO: 119620 - DNA, 25 bp, Probe sequence
agactctaatctaataaaaatacat

SEQ ID NO: 119621 - DNA, 25 bp, Probe sequence
aaaagcaatcgtttgtctttgacaa

SEQ ID NO: 119622 - DNA, 25 bp, Probe sequence
aatctaaaagactactggagttagt

SEQ ID NO: 119623 - DNA, 25 bp, Probe sequence
aattaaagtctaaagatatctcaat

SEQ ID NO: 119624 - DNA, 25 bp, Probe sequence
ctggagttagtagtttgaatattga

SEQ ID NO: 119625 - DNA, 25 bp, Probe sequence
gcaatcgtttgtctttgacaaagta

SEQ ID NO: 119626 - DNA, 25 bp, Probe sequence
gaatattgaaagactctaatctaat

SEQ ID NO: 119627 - DNA, 25 bp, Probe sequence
gaaggctatatgactccggaaaaat

SEQ ID NO: 119628 - DNA, 25 bp, Probe sequence
gaagtgatgatagccattaatgaat

SEQ ID NO: 119629 - DNA, 25 bp, Probe sequence
gaaaagtcgttaatatgttgaaaga

SEQ ID NO: 119630 - DNA, 25 bp, Probe sequence
ggctatatgactccggaaaaattaa

SEQ ID NO: 119631 - DNA, 25 bp, Probe sequence
ggcgtaaggtataaaagcaatcgtt

SEQ ID NO: 119632 - DNA, 25 bp, Probe sequence
ttgagaaggctatatgactccggaa

SEQ ID NO: 119633 - DNA, 25 bp, Probe sequence
aaagctcaaatgtaccaaattgtta

SEQ ID NO: 119634 - DNA, 25 bp, Probe sequence
aagctatgtttatttgatttaacta

SEQ ID NO: 119635 - DNA, 25 bp, Probe sequence
aatagtacattccaatttgtgaaaa

SEQ ID NO: 119636 - DNA, 25 bp, Probe sequence
aatagattggaatggatcgtcttga

SEQ ID NO: 119637 - DNA, 25 bp, Probe sequence
gaatggacattcgagcgttaatcag

SEQ ID NO: 119638 - DNA, 25 bp, Probe sequence
gttaatcttaataaatctctacttt

SEQ ID NO: 119639 - DNA, 25 bp, Probe sequence
gtcaggagggaatttcactcctaca

SEQ ID NO: 119640 - DNA, 25 bp, Probe sequence
gtctacttcgaaggggcatttccat

SEQ ID NO: 119641 - DNA, 25 bp, Probe sequence
gggaatttcactcctacaatttaat

SEQ ID NO: 119642 - DNA, 25 bp, Probe sequence
ggggcatttccattatattgttata

SEQ ID NO: 119643 - DNA, 25 bp, Probe sequence
ggagtatgtcgtttcatttagaatt

SEQ ID NO: 119644 - DNA, 25 bp, Probe sequence
tggatcgtcttgaaatgctcccttc

SEQ ID NO: 119645 - DNA, 25 bp, Probe sequence
taatacttgcttcaacactgtacaa

SEQ ID NO: 119646 - DNA, 25 bp, Probe sequence
tttcaatgtctacttcgaaggggca

SEQ ID NO: 119647 - DNA, 25 bp, Probe sequence
ttcgagcgttaatcagtcaggaggg

SEQ ID NO: 119648 - DNA, 25 bp, Probe sequence
ataatacttctcaaatctcgtcaaa

SEQ ID NO: 119649 - DNA, 25 bp, Probe sequence
agtgcatttcatttaaactaaacat

SEQ ID NO: 119650 - DNA, 25 bp, Probe sequence
acttctcaaatctcgtcaaattaaa

SEQ ID NO: 119651 - DNA, 25 bp, Probe sequence
caacggcttcaaatgagtagtttca

SEQ ID NO: 119652 - DNA, 25 bp, Probe sequence
caaacatctccatattaaaaactta

SEQ ID NO: 119653 - DNA, 25 bp, Probe sequence
ctactcaactgatcttaattaataa

SEQ ID NO: 119654 - DNA, 25 bp, Probe sequence
gaaaagtcacaaacatctccatatt

SEQ ID NO: 119655 - DNA, 25 bp, Probe sequence
gattgttaatacatcactttcataa

SEQ ID NO: 119656 - DNA, 25 bp, Probe sequence
gtttatttgaaatgatgcacaccta

SEQ ID NO: 119657 - DNA, 25 bp, Probe sequence
gtaattttatatcatcaacggcttc

SEQ ID NO: 119658 - DNA, 25 bp, Probe sequence
tgcacacctataaaaatcttaatca

SEQ ID NO: 119659 - DNA, 25 bp, Probe sequence
taatctgtagtatcttgttttggaa

SEQ ID NO: 119660 - DNA, 25 bp, Probe sequence
taaacacaactactcaactgatctt

SEQ ID NO: 119661 - DNA, 25 bp, Probe sequence
tatacttagtaattcgattgttaat

SEQ ID NO: 119662 - DNA, 25 bp, Probe sequence
ttgtcagatgacacataacagcatt

SEQ ID NO: 119663 - DNA, 25 bp, Probe sequence
attatacatcaaacaatacattaag

SEQ ID NO: 119664 - DNA, 25 bp, Probe sequence
aactagttcgatatttaaaatgtat

SEQ ID NO: 119665 - DNA, 25 bp, Probe sequence
aatcatagcgacttttcatgctgga

SEQ ID NO: 119666 - DNA, 25 bp, Probe sequence
aatttttaatcatagcgacttttca

SEQ ID NO: 119667 - DNA, 25 bp, Probe sequence
gcgacttttcatgctggaacacata

SEQ ID NO: 119668 - DNA, 25 bp, Probe sequence
gaattgttaaagtttgtatcgcatt

SEQ ID NO: 119669 - DNA, 25 bp, Probe sequence
gacttttcatgctggaacacatata

SEQ ID NO: 119670 - DNA, 25 bp, Probe sequence
gtttgtatcgcattatcgcgaagtt

SEQ ID NO: 119671 - DNA, 25 bp, Probe sequence
tcgcattatcgcgaagttgaataaa

SEQ ID NO: 119672 - DNA, 25 bp, Probe sequence
tcatagcgacttttcatgctggaac

SEQ ID NO: 119673 - DNA, 25 bp, Probe sequence
tcatgctggaacacatatattaatg

SEQ ID NO: 119674 - DNA, 25 bp, Probe sequence
tagcgacttttcatgctggaacaca

SEQ ID NO: 119675 - DNA, 25 bp, Probe sequence
ttaaagtttgtatcgcattatcgcg

SEQ ID NO: 119676 - DNA, 25 bp, Probe sequence
tattaatgattgaattttactgtta

SEQ ID NO: 119677 - DNA, 25 bp, Probe sequence
tttactgttaaaagttctatgattt

SEQ ID NO: 119678 - DNA, 25 bp, Probe sequence
atagaggctctttttattttgccca

SEQ ID NO: 119679 - DNA, 25 bp, Probe sequence
atgacatttgtcatttcaaatctat

SEQ ID NO: 119680 - DNA, 25 bp, Probe sequence
aggagtctcgattatagaggctctt

SEQ ID NO: 119681 - DNA, 25 bp, Probe sequence
aaggagtctcgattatagaggctct

SEQ ID NO: 119682 - DNA, 25 bp, Probe sequence
aatctatgacaaagtgttctatttt

SEQ ID NO: 119683 - DNA, 25 bp, Probe sequence
gacaaagtgttctattttaaatcta

SEQ ID NO: 119684 - DNA, 25 bp, Probe sequence
gacatttgtcatttcaaatctatga

SEQ ID NO: 119685 - DNA, 25 bp, Probe sequence
gagtctcgattatagaggctctttt

SEQ ID NO: 119686 - DNA, 25 bp, Probe sequence
gtctcgattatagaggctcttttta

SEQ ID NO: 119687 - DNA, 25 bp, Probe sequence
gtgttctattttaaatctaataaat

SEQ ID NO: 119688 - DNA, 25 bp, Probe sequence
ggagtctcgattatagaggctcttt

SEQ ID NO: 119689 - DNA, 25 bp, Probe sequence
tgtaaacctaataatgacatttgtc

SEQ ID NO: 119690 - DNA, 25 bp, Probe sequence
tagaggctctttttattttgcccaa

SEQ ID NO: 119691 - DNA, 25 bp, Probe sequence
tttatttgtaaggagtctcgattat

SEQ ID NO: 119692 - DNA, 25 bp, Probe sequence
ttcaaatctatgacaaagtgttcta

SEQ ID NO: 119693 - DNA, 25 bp, Probe sequence
attttggtactcgcaatttagattt

SEQ ID NO: 119694 - DNA, 25 bp, Probe sequence
atacttttattttggtactcgcaat

SEQ ID NO: 119695 - DNA, 25 bp, Probe sequence
aagagacttggaaagtgagtcaata

SEQ ID NO: 119696 - DNA, 25 bp, Probe sequence
aagtattgagtgttttgatttaaga

SEQ ID NO: 119697 - DNA, 25 bp, Probe sequence
aagtgagtcaataatcaaaatctta

SEQ ID NO: 119698 - DNA, 25 bp, Probe sequence
aatcttactcaatacttttattttg

SEQ ID NO: 119699 - DNA, 25 bp, Probe sequence
caatacttttattttggtactcgca

SEQ ID NO: 119700 - DNA, 25 bp, Probe sequence
caaaatcttactcaatacttttatt

SEQ ID NO: 119701 - DNA, 25 bp, Probe sequence
gagtgttttgatttaagagacttgg

SEQ ID NO: 119702 - DNA, 25 bp, Probe sequence
ggtactcgcaatttagatttgttaa

SEQ ID NO: 119703 - DNA, 25 bp, Probe sequence
tacttttattttggtactcgcaatt

SEQ ID NO: 119704 - DNA, 25 bp, Probe sequence
tactcaatacttttattttggtact

SEQ ID NO: 119705 - DNA, 25 bp, Probe sequence
ttattttggtactcgcaatttagat

SEQ ID NO: 119706 - DNA, 25 bp, Probe sequence
ttttattttggtactcgcaatttag

SEQ ID NO: 119707 - DNA, 25 bp, Probe sequence
ttggtactcgcaatttagatttgtt

SEQ ID NO: 119708 - DNA, 25 bp, Probe sequence
attattaccataactttatatataa

SEQ ID NO: 119709 - DNA, 25 bp, Probe sequence
atatacttgaagcatcgatttatta

SEQ ID NO: 119710 - DNA, 25 bp, Probe sequence
atagtgcgtatcgagcgtaatggat

SEQ ID NO: 119711 - DNA, 25 bp, Probe sequence
ataaccatagtgcgtatcgagcgta

SEQ ID NO: 119712 - DNA, 25 bp, Probe sequence
accatagtgcgtatcgagcgtaatg

SEQ ID NO: 119713 - DNA, 25 bp, Probe sequence
aaccatagtgcgtatcgagcgtaat

SEQ ID NO: 119714 - DNA, 25 bp, Probe sequence
aaggcataataaccatagtgcgtat

SEQ ID NO: 119715 - DNA, 25 bp, Probe sequence
gcatcgatttattattaccataact

SEQ ID NO: 119716 - DNA, 25 bp, Probe sequence
gagcgtaatggattattatgccttt

SEQ ID NO: 119717 - DNA, 25 bp, Probe sequence
gatttattattaccataactttata

SEQ ID NO: 119718 - DNA, 25 bp, Probe sequence
gtaatggattattatgcctttgatt

SEQ ID NO: 119719 - DNA, 25 bp, Probe sequence
gtgcgtatcgagcgtaatggattat

SEQ ID NO: 119720 - DNA, 25 bp, Probe sequence
ggcataataaccatagtgcgtatcg

SEQ ID NO: 119721 - DNA, 25 bp, Probe sequence
tgaagcatcgatttattattaccat

SEQ ID NO: 119722 - DNA, 25 bp, Probe sequence
taataaccatagtgcgtatcgagcg

SEQ ID NO: 119723 - DNA, 25 bp, Probe sequence
attgttattcaatttcccacatttt

SEQ ID NO: 119724 - DNA, 25 bp, Probe sequence
atgatatttgtgaaagcgcttgctt

SEQ ID NO: 119725 - DNA, 25 bp, Probe sequence
aggtcactcatagtattttgaagat

SEQ ID NO: 119726 - DNA, 25 bp, Probe sequence
agttcatcattgttataatcaaatt

SEQ ID NO: 119727 - DNA, 25 bp, Probe sequence
acagaattaggtcactcatagtatt

SEQ ID NO: 119728 - DNA, 25 bp, Probe sequence
aaactgacagatattgatgttcaat

SEQ ID NO: 119729 - DNA, 25 bp, Probe sequence
gaatttatgttataacggtcattta

SEQ ID NO: 119730 - DNA, 25 bp, Probe sequence
gaatatgacgtgaaagattcgtgaa

SEQ ID NO: 119731 - DNA, 25 bp, Probe sequence
gaaagcgcttgcttaggaggtgtat

SEQ ID NO: 119732 - DNA, 25 bp, Probe sequence
gattttagttcatcattgttataat

SEQ ID NO: 119733 - DNA, 25 bp, Probe sequence
gattcgtgaattcaagtttatgtcg

SEQ ID NO: 119734 - DNA, 25 bp, Probe sequence
gttattcaatttcccacatttttat

SEQ ID NO: 119735 - DNA, 25 bp, Probe sequence
tcaagtttatgtcgaatttatgtta

SEQ ID NO: 119736 - DNA, 25 bp, Probe sequence
tcaatttcccacatttttattagtt

SEQ ID NO: 119737 - DNA, 25 bp, Probe sequence
ttcccacatttttattagttgattt

SEQ ID NO: 119738 - DNA, 25 bp, Probe sequence
atacatgtgttacgaattgctttta

SEQ ID NO: 119739 - DNA, 25 bp, Probe sequence
agcaattcataacgcagttgaatac

SEQ ID NO: 119740 - DNA, 25 bp, Probe sequence
acgcagttgaatacatgtgttacga

SEQ ID NO: 119741 - DNA, 25 bp, Probe sequence
acatgtgttacgaattgcttttata

SEQ ID NO: 119742 - DNA, 25 bp, Probe sequence
aaaaagcaattcataacgcagttga

SEQ ID NO: 119743 - DNA, 25 bp, Probe sequence
aaaagcaattcataacgcagttgaa

SEQ ID NO: 119744 - DNA, 25 bp, Probe sequence
aacgcagttgaatacatgtgttacg

SEQ ID NO: 119745 - DNA, 25 bp, Probe sequence
aatacatgtgttacgaattgctttt

SEQ ID NO: 119746 - DNA, 25 bp, Probe sequence
cataacgcagttgaatacatgtgtt

SEQ ID NO: 119747 - DNA, 25 bp, Probe sequence
cgcagttgaatacatgtgttacgaa

SEQ ID NO: 119748 - DNA, 25 bp, Probe sequence
gcagttgaatacatgtgttacgaat

SEQ ID NO: 119749 - DNA, 25 bp, Probe sequence
gaatacatgtgttacgaattgcttt

SEQ ID NO: 119750 - DNA, 25 bp, Probe sequence
gttgaatacatgtgttacgaattgc

SEQ ID NO: 119751 - DNA, 25 bp, Probe sequence
tcataacgcagttgaatacatgtgt

SEQ ID NO: 119752 - DNA, 25 bp, Probe sequence
tacatgtgttacgaattgcttttat

SEQ ID NO: 119753 - DNA, 25 bp, Probe sequence
atactatcatctagtgtttttcaat

SEQ ID NO: 119754 - DNA, 25 bp, Probe sequence
atcatctagtgtttttcaataatac

SEQ ID NO: 119755 - DNA, 25 bp, Probe sequence
atctagtgtttttcaataatacatt

SEQ ID NO: 119756 - DNA, 25 bp, Probe sequence
agtgtttttcaataatacatttgtt

SEQ ID NO: 119757 - DNA, 25 bp, Probe sequence
actatactatcatctagtgtttttc

SEQ ID NO: 119758 - DNA, 25 bp, Probe sequence
actatcatctagtgtttttcaataa

SEQ ID NO: 119759 - DNA, 25 bp, Probe sequence
acatttgtttttctcaaaagcacaa

SEQ ID NO: 119760 - DNA, 25 bp, Probe sequence
aatacatttgtttttctcaaaagca

SEQ ID NO: 119761 - DNA, 25 bp, Probe sequence
aattctatactatactatcatctag

SEQ ID NO: 119762 - DNA, 25 bp, Probe sequence
caaaagcacaaacggaggtacataa

SEQ ID NO: 119763 - DNA, 25 bp, Probe sequence
tgtttttctcaaaagcacaaacgga

SEQ ID NO: 119764 - DNA, 25 bp, Probe sequence
tctatactatactatcatctagtgt

SEQ ID NO: 119765 - DNA, 25 bp, Probe sequence
tcaaaagcacaaacggaggtacata

SEQ ID NO: 119766 - DNA, 25 bp, Probe sequence
tcaataatacatttgtttttctcaa

SEQ ID NO: 119767 - DNA, 25 bp, Probe sequence
taattctatactatactatcatcta

SEQ ID NO: 119768 - DNA, 25 bp, Probe sequence
atatcttgtggttaaggctttttat

SEQ ID NO: 119769 - DNA, 25 bp, Probe sequence
atgcagtgacaatctaacattaatt

SEQ ID NO: 119770 - DNA, 25 bp, Probe sequence
agttatactatggaggatttgaaat

SEQ ID NO: 119771 - DNA, 25 bp, Probe sequence
aaatcaagtattaactagtcacgga

SEQ ID NO: 119772 - DNA, 25 bp, Probe sequence
aagatatcttgtggttaaggctttt

SEQ ID NO: 119773 - DNA, 25 bp, Probe sequence
aattgttaaaatcactgcaagcatc

SEQ ID NO: 119774 - DNA, 25 bp, Probe sequence
caagtattaactagtcacggaaggt

SEQ ID NO: 119775 - DNA, 25 bp, Probe sequence
gaaaatgacttcagttatactatgg

SEQ ID NO: 119776 - DNA, 25 bp, Probe sequence
gacttcagttatactatggaggatt

SEQ ID NO: 119777 - DNA, 25 bp, Probe sequence
ggtaaataaatttgatcattctgaa

SEQ ID NO: 119778 - DNA, 25 bp, Probe sequence
tggttaaggctttttatttatgtga

SEQ ID NO: 119779 - DNA, 25 bp, Probe sequence
taagccttaacacatgatatttgaa

SEQ ID NO: 119780 - DNA, 25 bp, Probe sequence
taaaatcactgcaagcatcttgatt

SEQ ID NO: 119781 - DNA, 25 bp, Probe sequence
taaaaaatgcagtgacaatctaaca

SEQ ID NO: 119782 - DNA, 25 bp, Probe sequence
tattaactagtcacggaaggtaggt

SEQ ID NO: 119783 - DNA, 25 bp, Probe sequence
atatctgctttacaccattaaaaag

SEQ ID NO: 119784 - DNA, 25 bp, Probe sequence
agtatatctgctttacaccattaaa

SEQ ID NO: 119785 - DNA, 25 bp, Probe sequence
aaaaagcggcaaatgctatagataa

SEQ ID NO: 119786 - DNA, 25 bp, Probe sequence
aacagaatactagttaatacacttt

SEQ ID NO: 119787 - DNA, 25 bp, Probe sequence
aagcatctgccgtgtaagaatttat

SEQ ID NO: 119788 - DNA, 25 bp, Probe sequence
aagtatatctgctttacaccattaa

SEQ ID NO: 119789 - DNA, 25 bp, Probe sequence
aatctaaagcatctgccgtgtaaga

SEQ ID NO: 119790 - DNA, 25 bp, Probe sequence
aatactagttaatacactttatact

SEQ ID NO: 119791 - DNA, 25 bp, Probe sequence
gataatctaaagcatctgccgtgta

SEQ ID NO: 119792 - DNA, 25 bp, Probe sequence
gtatatctgctttacaccattaaaa

SEQ ID NO: 119793 - DNA, 25 bp, Probe sequence
tctaaagcatctgccgtgtaagaat

SEQ ID NO: 119794 - DNA, 25 bp, Probe sequence
taatctaaagcatctgccgtgtaag

SEQ ID NO: 119795 - DNA, 25 bp, Probe sequence
taaagcatctgccgtgtaagaattt

SEQ ID NO: 119796 - DNA, 25 bp, Probe sequence
tagttaatacactttatactagaaa

SEQ ID NO: 119797 - DNA, 25 bp, Probe sequence
tttacaccattaaaaagcggcaaat

SEQ ID NO: 119798 - DNA, 25 bp, Probe sequence
atttagtctcccatctatttaaata

SEQ ID NO: 119799 - DNA, 25 bp, Probe sequence
atatacccattattgtaagcttttt

SEQ ID NO: 119800 - DNA, 25 bp, Probe sequence
ataactatttagtactgtaaagcga

SEQ ID NO: 119801 - DNA, 25 bp, Probe sequence
atcttgagcatgtttaattgtaatt

SEQ ID NO: 119802 - DNA, 25 bp, Probe sequence
aagtgtactattcaataactattta

SEQ ID NO: 119803 - DNA, 25 bp, Probe sequence
aatcatcttgagcatgtttaattgt

SEQ ID NO: 119804 - DNA, 25 bp, Probe sequence
aattttctgattttttaatcatctt

SEQ ID NO: 119805 - DNA, 25 bp, Probe sequence
gagcatgtttaattgtaattttgat

SEQ ID NO: 119806 - DNA, 25 bp, Probe sequence
gatggggttaaattataatatgtat

SEQ ID NO: 119807 - DNA, 25 bp, Probe sequence
gattttttaatcatcttgagcatgt

SEQ ID NO: 119808 - DNA, 25 bp, Probe sequence
gtaagctttttaagtgtactattca

SEQ ID NO: 119809 - DNA, 25 bp, Probe sequence
gtctcccatctatttaaatataccc

SEQ ID NO: 119810 - DNA, 25 bp, Probe sequence
tcccatctatttaaatatacccatt

SEQ ID NO: 119811 - DNA, 25 bp, Probe sequence
tagtctcccatctatttaaatatac

SEQ ID NO: 119812 - DNA, 25 bp, Probe sequence
tttttaatcatcttgagcatgttta

SEQ ID NO: 119813 - DNA, 25 bp, Probe sequence
aaagattcctaacaagagagggtgt

SEQ ID NO: 119814 - DNA, 25 bp, Probe sequence
atatgtagtttctatattgcgtagt

SEQ ID NO: 119815 - DNA, 25 bp, Probe sequence
atgtagtttctatattgcgtagttg

SEQ ID NO: 119816 - DNA, 25 bp, Probe sequence
agttgagcagtttatgatatcataa

SEQ ID NO: 119817 - DNA, 25 bp, Probe sequence
aatcgtaaagattcctaacaagaga

SEQ ID NO: 119818 - DNA, 25 bp, Probe sequence
gcgtagttgagcagtttatgatatc

SEQ ID NO: 119819 - DNA, 25 bp, Probe sequence
gattcctaacaagagagggtgttta

SEQ ID NO: 119820 - DNA, 25 bp, Probe sequence
gtttctatattgcgtagttgagcag

SEQ ID NO: 119821 - DNA, 25 bp, Probe sequence
gtagtttctatattgcgtagttgag

SEQ ID NO: 119822 - DNA, 25 bp, Probe sequence
gtagttgagcagtttatgatatcat

SEQ ID NO: 119823 - DNA, 25 bp, Probe sequence
tgatatgtagtttctatattgcgta

SEQ ID NO: 119824 - DNA, 25 bp, Probe sequence
tagtttctatattgcgtagttgagc

SEQ ID NO: 119825 - DNA, 25 bp, Probe sequence
tatattgcgtagttgagcagtttat

SEQ ID NO: 119826 - DNA, 25 bp, Probe sequence
tattgcgtagttgagcagtttatga

SEQ ID NO: 119827 - DNA, 25 bp, Probe sequence
ttctatattgcgtagttgagcagtt

SEQ ID NO: 119828 - DNA, 25 bp, Probe sequence
atgtgaggattgtgttattatataa

SEQ ID NO: 119829 - DNA, 25 bp, Probe sequence
aagtcactttgttagcgaatgcttg

SEQ ID NO: 119830 - DNA, 25 bp, Probe sequence
gcgggcttacctattatattgggga

SEQ ID NO: 119831 - DNA, 25 bp, Probe sequence
gctcgcttttttatgaaatttttgt

SEQ ID NO: 119832 - DNA, 25 bp, Probe sequence
gaagtaattctgggtatgttttata

SEQ ID NO: 119833 - DNA, 25 bp, Probe sequence
gaaactttactgttgaattatgtga

SEQ ID NO: 119834 - DNA, 25 bp, Probe sequence
gattactgattttataaagtcactt

SEQ ID NO: 119835 - DNA, 25 bp, Probe sequence
gattgtattagttgttactttatta

SEQ ID NO: 119836 - DNA, 25 bp, Probe sequence
gttcgataatacactttaatcttaa

SEQ ID NO: 119837 - DNA, 25 bp, Probe sequence
gtgaagagtgattaatggattgagt

SEQ ID NO: 119838 - DNA, 25 bp, Probe sequence
ggggagctcgcttttttatgaaatt

SEQ ID NO: 119839 - DNA, 25 bp, Probe sequence
ggattgagtttcatcggtagaacaa

SEQ ID NO: 119840 - DNA, 25 bp, Probe sequence
taaagcgggcttacctattatattg

SEQ ID NO: 119841 - DNA, 25 bp, Probe sequence
tattatattggggagctcgcttttt

SEQ ID NO: 119842 - DNA, 25 bp, Probe sequence
ttcttatcattcaaatacgacgatt

SEQ ID NO: 119843 - DNA, 25 bp, Probe sequence
atttcgcactttagcccatttacaa

SEQ ID NO: 119844 - DNA, 25 bp, Probe sequence
atacgaatgctataaactgaatgtt

SEQ ID NO: 119845 - DNA, 25 bp, Probe sequence
atcaaatttcgcactttagcccatt

SEQ ID NO: 119846 - DNA, 25 bp, Probe sequence
actttagcccatttacaatatcaat

SEQ ID NO: 119847 - DNA, 25 bp, Probe sequence
aaactgaatgttttctcatattaat

SEQ ID NO: 119848 - DNA, 25 bp, Probe sequence
aatcaaatttcgcactttagcccat

SEQ ID NO: 119849 - DNA, 25 bp, Probe sequence
caatgtacagtatatacgaatgcta

SEQ ID NO: 119850 - DNA, 25 bp, Probe sequence
caaatttcgcactttagcccattta

SEQ ID NO: 119851 - DNA, 25 bp, Probe sequence
cgcactttagcccatttacaatatc

SEQ ID NO: 119852 - DNA, 25 bp, Probe sequence
gcactttagcccatttacaatatca

SEQ ID NO: 119853 - DNA, 25 bp, Probe sequence
gaatgttttctcatattaataagga

SEQ ID NO: 119854 - DNA, 25 bp, Probe sequence
gaaacattcggtttttaatttgcat

SEQ ID NO: 119855 - DNA, 25 bp, Probe sequence
tttcgcactttagcccatttacaat

SEQ ID NO: 119856 - DNA, 25 bp, Probe sequence
tttagcccatttacaatatcaataa

SEQ ID NO: 119857 - DNA, 25 bp, Probe sequence
ttcgcactttagcccatttacaata

SEQ ID NO: 119858 - DNA, 25 bp, Probe sequence
atttgtgtaacattttgcaggaatc

SEQ ID NO: 119859 - DNA, 25 bp, Probe sequence
atgagattatctaacaattcgcaat

SEQ ID NO: 119860 - DNA, 25 bp, Probe sequence
aaaataataatggctcgctcctgta

SEQ ID NO: 119861 - DNA, 25 bp, Probe sequence
aacatgatgacaacagataaaccaa

SEQ ID NO: 119862 - DNA, 25 bp, Probe sequence
aacattttgcaggaatctgtaattc

SEQ ID NO: 119863 - DNA, 25 bp, Probe sequence
aatggctcgctcctgtaaattatta

SEQ ID NO: 119864 - DNA, 25 bp, Probe sequence
caattcgcaatttctgtttgaactg

SEQ ID NO: 119865 - DNA, 25 bp, Probe sequence
gctcctgtaaattattacgggggcg

SEQ ID NO: 119866 - DNA, 25 bp, Probe sequence
gcaatttctgtttgaactgaattta

SEQ ID NO: 119867 - DNA, 25 bp, Probe sequence
gaacgcgtcaaagatatacttaata

SEQ ID NO: 119868 - DNA, 25 bp, Probe sequence
gagggtttaacaattacgataatat

SEQ ID NO: 119869 - DNA, 25 bp, Probe sequence
gatgcggatatacttgaacgcgtca

SEQ ID NO: 119870 - DNA, 25 bp, Probe sequence
gggtaatgtttgtctgtaaggaagt

SEQ ID NO: 119871 - DNA, 25 bp, Probe sequence
ggctcgctcctgtaaattattacgg

SEQ ID NO: 119872 - DNA, 25 bp, Probe sequence
taataatggctcgctcctgtaaatt

SEQ ID NO: 119873 - DNA, 25 bp, Probe sequence
attaattcacaaccaaaacaaacat

SEQ ID NO: 119874 - DNA, 25 bp, Probe sequence
atatcattaattcacaaccaaaaca

SEQ ID NO: 119875 - DNA, 25 bp, Probe sequence
atataggcactccctaaattaattt

SEQ ID NO: 119876 - DNA, 25 bp, Probe sequence
atacagtatatcattaattcacaac

SEQ ID NO: 119877 - DNA, 25 bp, Probe sequence
atcattaattcacaaccaaaacaaa

SEQ ID NO: 119878 - DNA, 25 bp, Probe sequence
agtatatcattaattcacaaccaaa

SEQ ID NO: 119879 - DNA, 25 bp, Probe sequence
acagtatatcattaattcacaacca

SEQ ID NO: 119880 - DNA, 25 bp, Probe sequence
cagtatatcattaattcacaaccaa

SEQ ID NO: 119881 - DNA, 25 bp, Probe sequence
gtatatcattaattcacaaccaaaa

SEQ ID NO: 119882 - DNA, 25 bp, Probe sequence
tcattaattcacaaccaaaacaaac

SEQ ID NO: 119883 - DNA, 25 bp, Probe sequence
tacagtatatcattaattcacaacc

SEQ ID NO: 119884 - DNA, 25 bp, Probe sequence
tatcattaattcacaaccaaaacaa

SEQ ID NO: 119885 - DNA, 25 bp, Probe sequence
tataggcactccctaaattaattta

SEQ ID NO: 119886 - DNA, 25 bp, Probe sequence
tatatcattaattcacaaccaaaac

SEQ ID NO: 119887 - DNA, 25 bp, Probe sequence
ttaattcacaaccaaaacaaacatt

SEQ ID NO: 119888 - DNA, 25 bp, Probe sequence
attgtcacaacgttattttgcctat

SEQ ID NO: 119889 - DNA, 25 bp, Probe sequence
caacgttattttgcctatttttgcg

SEQ ID NO: 119890 - DNA, 25 bp, Probe sequence
cacaacgttattttgcctatttttg

SEQ ID NO: 119891 - DNA, 25 bp, Probe sequence
cattgtcacaacgttattttgccta

SEQ ID NO: 119892 - DNA, 25 bp, Probe sequence
gcctatttttgcgaaatagcgtttt

SEQ ID NO: 119893 - DNA, 25 bp, Probe sequence
gctggtcttaaatttgttatatttt

SEQ ID NO: 119894 - DNA, 25 bp, Probe sequence
gttattttgcctatttttgcgaaat

SEQ ID NO: 119895 - DNA, 25 bp, Probe sequence
gtcacaacgttattttgcctatttt

SEQ ID NO: 119896 - DNA, 25 bp, Probe sequence
tgtcacaacgttattttgcctattt

SEQ ID NO: 119897 - DNA, 25 bp, Probe sequence
tacattgtcacaacgttattttgcc

SEQ ID NO: 119898 - DNA, 25 bp, Probe sequence
tacttttttgctggtcttaaatttg

SEQ ID NO: 119899 - DNA, 25 bp, Probe sequence
tttgctggtcttaaatttgttatat

SEQ ID NO: 119900 - DNA, 25 bp, Probe sequence
tttttgctggtcttaaatttgttat

SEQ ID NO: 119901 - DNA, 25 bp, Probe sequence
ttattttgcctatttttgcgaaata

SEQ ID NO: 119902 - DNA, 25 bp, Probe sequence
ttgtcacaacgttattttgcctatt

SEQ ID NO: 119903 - DNA, 25 bp, Probe sequence
attttctgacattataacttgaaat

SEQ ID NO: 119904 - DNA, 25 bp, Probe sequence
atcacaaatctgtaaagaattttct

SEQ ID NO: 119905 - DNA, 25 bp, Probe sequence
atctgtaaagaattttctgacatta

SEQ ID NO: 119906 - DNA, 25 bp, Probe sequence
acaaatctgtaaagaattttctgac

SEQ ID NO: 119907 - DNA, 25 bp, Probe sequence
aaatctgtaaagaattttctgacat

SEQ ID NO: 119908 - DNA, 25 bp, Probe sequence
aaagaattttctgacattataactt

SEQ ID NO: 119909 - DNA, 25 bp, Probe sequence
aagaattttctgacattataacttg

SEQ ID NO: 119910 - DNA, 25 bp, Probe sequence
aatctgtaaagaattttctgacatt

SEQ ID NO: 119911 - DNA, 25 bp, Probe sequence
aattttctgacattataacttgaaa

SEQ ID NO: 119912 - DNA, 25 bp, Probe sequence
gaattttctgacattataacttgaa

SEQ ID NO: 119913 - DNA, 25 bp, Probe sequence
agaattttctgacattataacttga

SEQ ID NO: 119914 - DNA, 25 bp, Probe sequence
tctgtaaagaattttctgacattat

SEQ ID NO: 119915 - DNA, 25 bp, Probe sequence
taaagaattttctgacattataact

SEQ ID NO: 119916 - DNA, 25 bp, Probe sequence
ttttctgacattataacttgaaata

SEQ ID NO: 119917 - DNA, 25 bp, Probe sequence
ttctgacattataacttgaaataag

SEQ ID NO: 119918 - DNA, 25 bp, Probe sequence
agtatactatttcagattaatcttt

SEQ ID NO: 119919 - DNA, 25 bp, Probe sequence
aaagctctgttataacagcatgatt

SEQ ID NO: 119920 - DNA, 25 bp, Probe sequence
aacagcatgatttttgatattattt

SEQ ID NO: 119921 - DNA, 25 bp, Probe sequence
aagcgagtatgtttagaagtctagg

SEQ ID NO: 119922 - DNA, 25 bp, Probe sequence
aagtgttgaaatttagagtatagca

SEQ ID NO: 119923 - DNA, 25 bp, Probe sequence
aatacttgaataaactagttcttga

SEQ ID NO: 119924 - DNA, 25 bp, Probe sequence
gaagtctaggatgcataatcttagg

SEQ ID NO: 119925 - DNA, 25 bp, Probe sequence
gagtatagcacttaaactacatcat

SEQ ID NO: 119926 - DNA, 25 bp, Probe sequence
gatattatttttagtatcgatatta

SEQ ID NO: 119927 - DNA, 25 bp, Probe sequence
gtatagcacttaaactacatcataa

SEQ ID NO: 119928 - DNA, 25 bp, Probe sequence
ggatgcataatcttaggcttctttt

SEQ ID NO: 119929 - DNA, 25 bp, Probe sequence
tgcataatcttaggcttcttttaaa

SEQ ID NO: 119930 - DNA, 25 bp, Probe sequence
tcttaggcttcttttaaagtgttga

SEQ ID NO: 119931 - DNA, 25 bp, Probe sequence
taatctttaaaagctctgttataac

SEQ ID NO: 119932 - DNA, 25 bp, Probe sequence
taatcttaggcttcttttaaagtgt

SEQ ID NO: 119933 - DNA, 25 bp, Probe sequence
atgctataattcattttgtatgatt

SEQ ID NO: 119934 - DNA, 25 bp, Probe sequence
atgatttacagagagtttatttaac

SEQ ID NO: 119935 - DNA, 25 bp, Probe sequence
agtttatttaacgagaaggtgtctg

SEQ ID NO: 119936 - DNA, 25 bp, Probe sequence
aatgacgaatagactgagaaatgct

SEQ ID NO: 119937 - DNA, 25 bp, Probe sequence
aatgctataattcattttgtatgat

SEQ ID NO: 119938 - DNA, 25 bp, Probe sequence
aattcattttgtatgatttacagag

SEQ ID NO: 119939 - DNA, 25 bp, Probe sequence
gctataattcattttgtatgattta

SEQ ID NO: 119940 - DNA, 25 bp, Probe sequence
gagaaatgctataattcattttgta

SEQ ID NO: 119941 - DNA, 25 bp, Probe sequence
gagagtttatttaacgagaaggtgt

SEQ ID NO: 119942 - DNA, 25 bp, Probe sequence
gatttacagagagtttatttaacga

SEQ ID NO: 119943 - DNA, 25 bp, Probe sequence
gttaacaaaatgacgaatagactga

SEQ ID NO: 119944 - DNA, 25 bp, Probe sequence
gtttatttaacgagaaggtgtctgc

SEQ ID NO: 119945 - DNA, 25 bp, Probe sequence
gtatgatttacagagagtttattta

SEQ ID NO: 119946 - DNA, 25 bp, Probe sequence
tagactgagaaatgctataattcat

SEQ ID NO: 119947 - DNA, 25 bp, Probe sequence
tttacagagagtttatttaacgaga

SEQ ID NO: 119948 - DNA, 25 bp, Probe sequence
atcagtcaatgagtggttttaattt

SEQ ID NO: 119949 - DNA, 25 bp, Probe sequence
accacttgtgatcgacttctaaatc

SEQ ID NO: 119950 - DNA, 25 bp, Probe sequence
acttctaaatcagtcaatgagtggt

SEQ ID NO: 119951 - DNA, 25 bp, Probe sequence
acttgtgatcgacttctaaatcagt

SEQ ID NO: 119952 - DNA, 25 bp, Probe sequence
acaaatgttctatatggaggcagta

SEQ ID NO: 119953 - DNA, 25 bp, Probe sequence
aaaccacttgtgatcgacttctaaa

SEQ ID NO: 119954 - DNA, 25 bp, Probe sequence
aaccacttgtgatcgacttctaaat

SEQ ID NO: 119955 - DNA, 25 bp, Probe sequence
caatgagtggttttaattttacttg

SEQ ID NO: 119956 - DNA, 25 bp, Probe sequence
ccacttgtgatcgacttctaaatca

SEQ ID NO: 119957 - DNA, 25 bp, Probe sequence
gaacaaatgttctatatggaggcag

SEQ ID NO: 119958 - DNA, 25 bp, Probe sequence
gatcgacttctaaatcagtcaatga

SEQ ID NO: 119959 - DNA, 25 bp, Probe sequence
gtgatcgacttctaaatcagtcaat

SEQ ID NO: 119960 - DNA, 25 bp, Probe sequence
taaaaccacttgtgatcgacttcta

SEQ ID NO: 119961 - DNA, 25 bp, Probe sequence
ttacttttaaaaccacttgtgatcg

SEQ ID NO: 119962 - DNA, 25 bp, Probe sequence
ttgtgatcgacttctaaatcagtca

SEQ ID NO: 119963 - DNA, 25 bp, Probe sequence
atcgcaaagacctttgttatcctat

SEQ ID NO: 119964 - DNA, 25 bp, Probe sequence
atcctataaaggtgcgtgagttatt

SEQ ID NO: 119965 - DNA, 25 bp, Probe sequence
agataatctttttattctactacat

SEQ ID NO: 119966 - DNA, 25 bp, Probe sequence
aaaggtgcgtgagttattgaataaa

SEQ ID NO: 119967 - DNA, 25 bp, Probe sequence
aaggtgcgtgagttattgaataaaa

SEQ ID NO: 119968 - DNA, 25 bp, Probe sequence
caaagacctttgttatcctataaag

SEQ ID NO: 119969 - DNA, 25 bp, Probe sequence
cgcaaagacctttgttatcctataa

SEQ ID NO: 119970 - DNA, 25 bp, Probe sequence
gcaaagacctttgttatcctataaa

SEQ ID NO: 119971 - DNA, 25 bp, Probe sequence
gataatctttttattctactacata

SEQ ID NO: 119972 - DNA, 25 bp, Probe sequence
gattatcgcaaagacctttgttatc

SEQ ID NO: 119973 - DNA, 25 bp, Probe sequence
gttatcctataaaggtgcgtgagtt

SEQ ID NO: 119974 - DNA, 25 bp, Probe sequence
gtttagataatctttttattctact

SEQ ID NO: 119975 - DNA, 25 bp, Probe sequence
taatctttttattctactacataaa

SEQ ID NO: 119976 - DNA, 25 bp, Probe sequence
tttgttatcctataaaggtgcgtga

SEQ ID NO: 119977 - DNA, 25 bp, Probe sequence
ttatcgcaaagacctttgttatcct

SEQ ID NO: 119978 - DNA, 25 bp, Probe sequence
ataggtttatttctgacaacttaat

SEQ ID NO: 119979 - DNA, 25 bp, Probe sequence
agctaaagtgaagtacgacggtata

SEQ ID NO: 119980 - DNA, 25 bp, Probe sequence
aagataggtttatttctgacaactt

SEQ ID NO: 119981 - DNA, 25 bp, Probe sequence
cagatatactacttgtttgtttttg

SEQ ID NO: 119982 - DNA, 25 bp, Probe sequence
ctacgaattctcgatttttttatat

SEQ ID NO: 119983 - DNA, 25 bp, Probe sequence
cgttattaaactacgaattctcgat

SEQ ID NO: 119984 - DNA, 25 bp, Probe sequence
gaggtttgacaaagctaaagtgaag

SEQ ID NO: 119985 - DNA, 25 bp, Probe sequence
gatatactacttgtttgtttttgtg

SEQ ID NO: 119986 - DNA, 25 bp, Probe sequence
gtagtatgtcattctagtagctaga

SEQ ID NO: 119987 - DNA, 25 bp, Probe sequence
ggtttatttctgacaacttaataga

SEQ ID NO: 119988 - DNA, 25 bp, Probe sequence
ggataagaacgagaatttcgttatt

SEQ ID NO: 119989 - DNA, 25 bp, Probe sequence
taacaagtagtatgtcattctagta

SEQ ID NO: 119990 - DNA, 25 bp, Probe sequence
tacgaattctcgatttttttatatt

SEQ ID NO: 119991 - DNA, 25 bp, Probe sequence
tagctagaacagatatactacttgt

SEQ ID NO: 119992 - DNA, 25 bp, Probe sequence
tatactacttgtttgtttttgtgga

SEQ ID NO: 119993 - DNA, 25 bp, Probe sequence
acaccttacctgtatgataagtttt

SEQ ID NO: 119994 - DNA, 25 bp, Probe sequence
aaaatgtatcaagggggatcattaa

SEQ ID NO: 119995 - DNA, 25 bp, Probe sequence
aagcgttttctaagcatgatgagtt

SEQ ID NO: 119996 - DNA, 25 bp, Probe sequence
aagcatgatgagttgtttatcaata

SEQ ID NO: 119997 - DNA, 25 bp, Probe sequence
aatacttattacaccttacctgtat

SEQ ID NO: 119998 - DNA, 25 bp, Probe sequence
aatacaatttaatcaaggcatataa

SEQ ID NO: 119999 - DNA, 25 bp, Probe sequence
aattttctttctgctcaatgaaata

SEQ ID NO: 120000 - DNA, 25 bp, Probe sequence
cttattacaccttacctgtatgata

SEQ ID NO: 120001 - DNA, 25 bp, Probe sequence
cctaaattaagcgttttctaagcat

SEQ ID NO: 120002 - DNA, 25 bp, Probe sequence
ccacaattttctttctgctcaatga

SEQ ID NO: 120003 - DNA, 25 bp, Probe sequence
gaattgaatcattcacgaaattgat

SEQ ID NO: 120004 - DNA, 25 bp, Probe sequence
gaaatattaaagtttggcgccacaa

SEQ ID NO: 120005 - DNA, 25 bp, Probe sequence
gttttgcttatatactctgattaaa

SEQ ID NO: 120006 - DNA, 25 bp, Probe sequence
taagttttgcttatatactctgatt

SEQ ID NO: 120007 - DNA, 25 bp, Probe sequence
taaagtttggcgccacaattttctt

SEQ ID NO: 120008 - DNA, 25 bp, Probe sequence
atttcaatcggtatttgaggcactt

SEQ ID NO: 120009 - DNA, 25 bp, Probe sequence
atatcacagtaaaatttcaatcggt

SEQ ID NO: 120010 - DNA, 25 bp, Probe sequence
aaaatacttctataaactttatgat

SEQ ID NO: 120011 - DNA, 25 bp, Probe sequence
aatcggtatttgaggcactttgata

SEQ ID NO: 120012 - DNA, 25 bp, Probe sequence
cggcctcttcttgtattttatgtta

SEQ ID NO: 120013 - DNA, 25 bp, Probe sequence
gcctcttcttgtattttatgttaga

SEQ ID NO: 120014 - DNA, 25 bp, Probe sequence
gatagtgctcaaaaatacttctata

SEQ ID NO: 120015 - DNA, 25 bp, Probe sequence
gtgctcaaaaatacttctataaact

SEQ ID NO: 120016 - DNA, 25 bp, Probe sequence
ggcctcttcttgtattttatgttag

SEQ ID NO: 120017 - DNA, 25 bp, Probe sequence
tcggttcaaaacctttgtgttcttg

SEQ ID NO: 120018 - DNA, 25 bp, Probe sequence
tcaaaacctttgtgttcttggccgg

SEQ ID NO: 120019 - DNA, 25 bp, Probe sequence
tcggtatttgaggcactttgatagt

SEQ ID NO: 120020 - DNA, 25 bp, Probe sequence
ttatgatataataggtcggttcaaa

SEQ ID NO: 120021 - DNA, 25 bp, Probe sequence
ttcaaaacctttgtgttcttggccg

SEQ ID NO: 120022 - DNA, 25 bp, Probe sequence
ttgaggcactttgatagtgctcaaa

SEQ ID NO: 120023 - DNA, 25 bp, Probe sequence
atagccaatacgttaacattaatgt

SEQ ID NO: 120024 - DNA, 25 bp, Probe sequence
aacatcagatgtgctaaaccaaagt

SEQ ID NO: 120025 - DNA, 25 bp, Probe sequence
aacgaacttgttcatacaacatcag

SEQ ID NO: 120026 - DNA, 25 bp, Probe sequence
aagaaatagccaatacgttaacatt

SEQ ID NO: 120027 - DNA, 25 bp, Probe sequence
caaagtacaacttccgaggttcagg

SEQ ID NO: 120028 - DNA, 25 bp, Probe sequence
caacttccgaggttcaggacacatc

SEQ ID NO: 120029 - DNA, 25 bp, Probe sequence
cttccgaggttcaggacacatcaga

SEQ ID NO: 120030 - DNA, 25 bp, Probe sequence
cgaggttcaggacacatcagaatgt

SEQ ID NO: 120031 - DNA, 25 bp, Probe sequence
gtacaacttccgaggttcaggacac

SEQ ID NO: 120032 - DNA, 25 bp, Probe sequence
gaatgtgtaaacaagttcgttttat

SEQ ID NO: 120033 - DNA, 25 bp, Probe sequence
gaacttgttcatacaacatcagatg

SEQ ID NO: 120034 - DNA, 25 bp, Probe sequence
gttactgtaaatgtttggagaggca

SEQ ID NO: 120035 - DNA, 25 bp, Probe sequence
ggagaggcaatattaacaattaatc

SEQ ID NO: 120036 - DNA, 25 bp, Probe sequence
tgtgctaaaccaaagtacaacttcc

SEQ ID NO: 120037 - DNA, 25 bp, Probe sequence
tatagcaaaaacgaacttgttcata

SEQ ID NO: 120038 - DNA, 25 bp, Probe sequence
atatgcaatgatggactaatgtcaa

SEQ ID NO: 120039 - DNA, 25 bp, Probe sequence
ataaaataatccatcaactgcaaaa

SEQ ID NO: 120040 - DNA, 25 bp, Probe sequence
aaatatgcaatgatggactaatgtc

SEQ ID NO: 120041 - DNA, 25 bp, Probe sequence
aaaataatccatcaactgcaaaaaa

SEQ ID NO: 120042 - DNA, 25 bp, Probe sequence
aaaataaaataatccatcaactgca

SEQ ID NO: 120043 - DNA, 25 bp, Probe sequence
aataatccatcaactgcaaaaaaat

SEQ ID NO: 120044 - DNA, 25 bp, Probe sequence
aataaaataatccatcaactgcaaa

SEQ ID NO: 120045 - DNA, 25 bp, Probe sequence
ctcggtctcaaatgttcttgtaaaa

SEQ ID NO: 120046 - DNA, 25 bp, Probe sequence
gtctcggtctcaaatgttcttgtaa

SEQ ID NO: 120047 - DNA, 25 bp, Probe sequence
tgcaatgatggactaatgtcaaaaa

SEQ ID NO: 120048 - DNA, 25 bp, Probe sequence
tcggtctcaaatgttcttgtaaaaa

SEQ ID NO: 120049 - DNA, 25 bp, Probe sequence
tctcaaatgttcttgtaaaaaaact

SEQ ID NO: 120050 - DNA, 25 bp, Probe sequence
tctcggtctcaaatgttcttgtaaa

SEQ ID NO: 120051 - DNA, 25 bp, Probe sequence
taatccatcaactgcaaaaaaatat

SEQ ID NO: 120052 - DNA, 25 bp, Probe sequence
taaaataatccatcaactgcaaaaa

SEQ ID NO: 120053 - DNA, 25 bp, Probe sequence
attacacatcctttaatatcttagg

SEQ ID NO: 120054 - DNA, 25 bp, Probe sequence
atatggaattaagctatgaaagtta

SEQ ID NO: 120055 - DNA, 25 bp, Probe sequence
atcatattcatttaaattacggcta

SEQ ID NO: 120056 - DNA, 25 bp, Probe sequence
atcttaggactattttatcatattc

SEQ ID NO: 120057 - DNA, 25 bp, Probe sequence
aggactattttatcatattcattta

SEQ ID NO: 120058 - DNA, 25 bp, Probe sequence
acacatcctttaatatcttaggact

SEQ ID NO: 120059 - DNA, 25 bp, Probe sequence
aaatattacacatcctttaatatct

SEQ ID NO: 120060 - DNA, 25 bp, Probe sequence
cacatcctttaatatcttaggacta

SEQ ID NO: 120061 - DNA, 25 bp, Probe sequence
catcctttaatatcttaggactatt

SEQ ID NO: 120062 - DNA, 25 bp, Probe sequence
catattcatttaaattacggctaaa

SEQ ID NO: 120063 - DNA, 25 bp, Probe sequence
tcttaggactattttatcatattca

SEQ ID NO: 120064 - DNA, 25 bp, Probe sequence
taatatcttaggactattttatcat

SEQ ID NO: 120065 - DNA, 25 bp, Probe sequence
tacacatcctttaatatcttaggac

SEQ ID NO: 120066 - DNA, 25 bp, Probe sequence
taggactattttatcatattcattt

SEQ ID NO: 120067 - DNA, 25 bp, Probe sequence
ttaggactattttatcatattcatt

SEQ ID NO: 120068 - DNA, 25 bp, Probe sequence
attaaatgctgaccaagtacttatc

SEQ ID NO: 120069 - DNA, 25 bp, Probe sequence
attagcgatagactttgaccaaact

SEQ ID NO: 120070 - DNA, 25 bp, Probe sequence
agggatttatattaaatgctgacca

SEQ ID NO: 120071 - DNA, 25 bp, Probe sequence
aaatgctgaccaagtacttatcgtt

SEQ ID NO: 120072 - DNA, 25 bp, Probe sequence
aaactatatgcaatcacgaaattaa

SEQ ID NO: 120073 - DNA, 25 bp, Probe sequence
aatgctgaccaagtacttatcgtta

SEQ ID NO: 120074 - DNA, 25 bp, Probe sequence
aattagcgatagactttgaccaaac

SEQ ID NO: 120075 - DNA, 25 bp, Probe sequence
ctatatgcaatcacgaaattaaatg

SEQ ID NO: 120076 - DNA, 25 bp, Probe sequence
gttaaattagcgatagactttgacc

SEQ ID NO: 120077 - DNA, 25 bp, Probe sequence
tacagtaatgttaaattttgactaa

SEQ ID NO: 120078 - DNA, 25 bp, Probe sequence
tagcgatagactttgaccaaactaa

SEQ ID NO: 120079 - DNA, 25 bp, Probe sequence
tatattaaatgctgaccaagtactt

SEQ ID NO: 120080 - DNA, 25 bp, Probe sequence
ttttgactaaattcaagggatttat

SEQ ID NO: 120081 - DNA, 25 bp, Probe sequence
ttaaatgctgaccaagtacttatcg

SEQ ID NO: 120082 - DNA, 25 bp, Probe sequence
ttagcgatagactttgaccaaacta

SEQ ID NO: 120083 - DNA, 25 bp, Probe sequence
atttcctccattggtgtgcaaagac

SEQ ID NO: 120084 - DNA, 25 bp, Probe sequence
atcatataggataggcgtgtaatag

SEQ ID NO: 120085 - DNA, 25 bp, Probe sequence
agatttatttcctccattggtgtgc

SEQ ID NO: 120086 - DNA, 25 bp, Probe sequence
aaggttgagatttatttcctccatt

SEQ ID NO: 120087 - DNA, 25 bp, Probe sequence
aatcatctgtatcattacactagtt

SEQ ID NO: 120088 - DNA, 25 bp, Probe sequence
gacatttccgatatataatcttaat

SEQ ID NO: 120089 - DNA, 25 bp, Probe sequence
gttattccactttgagagacatcga

SEQ ID NO: 120090 - DNA, 25 bp, Probe sequence
gtactcaataatcatctgtatcatt

SEQ ID NO: 120091 - DNA, 25 bp, Probe sequence
gtgtgcaaagactataccatttata

SEQ ID NO: 120092 - DNA, 25 bp, Probe sequence
gggagtcagatttttttattatagt

SEQ ID NO: 120093 - DNA, 25 bp, Probe sequence
tctcagggttttaaatttgtactca

SEQ ID NO: 120094 - DNA, 25 bp, Probe sequence
tcaagttagacatttccgatatata

SEQ ID NO: 120095 - DNA, 25 bp, Probe sequence
taaatttattttagttttgcacaat

SEQ ID NO: 120096 - DNA, 25 bp, Probe sequence
tagtgcgttttagtttgtattgagt

SEQ ID NO: 120097 - DNA, 25 bp, Probe sequence
ttattatagttattccactttgaga

SEQ ID NO: 120098 - DNA, 25 bp, Probe sequence
atttgccacttgattagtacttcat

SEQ ID NO: 120099 - DNA, 25 bp, Probe sequence
atgactatatgtttgttggtatttt

SEQ ID NO: 120100 - DNA, 25 bp, Probe sequence
atgatatgctatttttatggtttat

SEQ ID NO: 120101 - DNA, 25 bp, Probe sequence
aagtattgattcatcattttcttta

SEQ ID NO: 120102 - DNA, 25 bp, Probe sequence
gaagcactcataatcggctgttaat

SEQ ID NO: 120103 - DNA, 25 bp, Probe sequence
gaaacgagtatttgccacttgatta

SEQ ID NO: 120104 - DNA, 25 bp, Probe sequence
gataaccatattgttctgtttgaga

SEQ ID NO: 120105 - DNA, 25 bp, Probe sequence
gattagtacttcattattatgtcga

SEQ ID NO: 120106 - DNA, 25 bp, Probe sequence
gattcatcattttctttatgttaaa

SEQ ID NO: 120107 - DNA, 25 bp, Probe sequence
gttacatttatgattatcagcacat

SEQ ID NO: 120108 - DNA, 25 bp, Probe sequence
ggtgcttataatgttgggcagttac

SEQ ID NO: 120109 - DNA, 25 bp, Probe sequence
tagccgtttataaagcacatgcata

SEQ ID NO: 120110 - DNA, 25 bp, Probe sequence
tattttctatttacttcttaataca

SEQ ID NO: 120111 - DNA, 25 bp, Probe sequence
ttatcagcacatgtttagcttataa

SEQ ID NO: 120112 - DNA, 25 bp, Probe sequence
ttggtattttttatggtgcttataa

SEQ ID NO: 120113 - DNA, 25 bp, Probe sequence
atgagcttaagttaagtcgcctaac

SEQ ID NO: 120114 - DNA, 25 bp, Probe sequence
aaatccaagtgctaagaggtataca

SEQ ID NO: 120115 - DNA, 25 bp, Probe sequence
taagtttcctatctgtaccgtattt

SEQ ID NO: 120116 - DNA, 25 bp, Probe sequence
ctatctgtaccgtattttaatattg

SEQ ID NO: 120117 - DNA, 25 bp, Probe sequence
cctgaagcgcttggattttttggtt

SEQ ID NO: 120118 - DNA, 25 bp, Probe sequence
gcctaacttttattatcagcccaat

SEQ ID NO: 120119 - DNA, 25 bp, Probe sequence
gcgcttggattttttggtttctata

SEQ ID NO: 120120 - DNA, 25 bp, Probe sequence
gcccaatcagtttcatcaagtataa

SEQ ID NO: 120121 - DNA, 25 bp, Probe sequence
gaatatttaagtttcctatctgtac

SEQ ID NO: 120122 - DNA, 25 bp, Probe sequence
gttatgcctgaagcgcttggatttt

SEQ ID NO: 120123 - DNA, 25 bp, Probe sequence
gtcgcctaacttttattatcagccc

SEQ ID NO: 120124 - DNA, 25 bp, Probe sequence
ggtatacagttatgcctgaagcgct

SEQ ID NO: 120125 - DNA, 25 bp, Probe sequence
tcagcccaatcagtttcatcaagta

SEQ ID NO: 120126 - DNA, 25 bp, Probe sequence
tttcctatctgtaccgtattttaat

SEQ ID NO: 120127 - DNA, 25 bp, Probe sequence
ttatcagcccaatcagtttcatcaa

SEQ ID NO: 120128 - DNA, 25 bp, Probe sequence
acatcctttcattagaccttagtac

SEQ ID NO: 120129 - DNA, 25 bp, Probe sequence
aatcacttgctttttgaattgtttt

SEQ ID NO: 120130 - DNA, 25 bp, Probe sequence
catcctttcattagaccttagtacg

SEQ ID NO: 120131 - DNA, 25 bp, Probe sequence
cacttgctttttgaattgtttttat

SEQ ID NO: 120132 - DNA, 25 bp, Probe sequence
cattagaccttagtacgatttatta

SEQ ID NO: 120133 - DNA, 25 bp, Probe sequence
ctttcattagaccttagtacgattt

SEQ ID NO: 120134 - DNA, 25 bp, Probe sequence
gaaatcacttgctttttgaattgtt

SEQ ID NO: 120135 - DNA, 25 bp, Probe sequence
gacatcctttcattagaccttagta

SEQ ID NO: 120136 - DNA, 25 bp, Probe sequence
tgaattgtttttatataacgttaat

SEQ ID NO: 120137 - DNA, 25 bp, Probe sequence
tcctttcattagaccttagtacgat

SEQ ID NO: 120138 - DNA, 25 bp, Probe sequence
tagaccttagtacgatttattaaga

SEQ ID NO: 120139 - DNA, 25 bp, Probe sequence
tattaagaaatcacttgctttttga

SEQ ID NO: 120140 - DNA, 25 bp, Probe sequence
ttttgacatcctttcattagacctt

SEQ ID NO: 120141 - DNA, 25 bp, Probe sequence
ttgacatcctttcattagaccttag

SEQ ID NO: 120142 - DNA, 25 bp, Probe sequence
ttgctttttgaattgtttttatata

SEQ ID NO: 120143 - DNA, 25 bp, Probe sequence
attcatttgcaaaataacagaacat

SEQ ID NO: 120144 - DNA, 25 bp, Probe sequence
atagttgaaatagaacacgtgttcg

SEQ ID NO: 120145 - DNA, 25 bp, Probe sequence
atcattattaatttgagtatatcat

SEQ ID NO: 120146 - DNA, 25 bp, Probe sequence
aaacctcctaatcattattaatttg

SEQ ID NO: 120147 - DNA, 25 bp, Probe sequence
aacctcctaatcattattaatttga

SEQ ID NO: 120148 - DNA, 25 bp, Probe sequence
caaacctcctaatcattattaattt

SEQ ID NO: 120149 - DNA, 25 bp, Probe sequence
cacgtgttcgtatataataaggttc

SEQ ID NO: 120150 - DNA, 25 bp, Probe sequence
cctcctaatcattattaatttgagt

SEQ ID NO: 120151 - DNA, 25 bp, Probe sequence
ccaaacctcctaatcattattaatt

SEQ ID NO: 120152 - DNA, 25 bp, Probe sequence
gaacatttgttctaaaatagttgaa

SEQ ID NO: 120153 - DNA, 25 bp, Probe sequence
gaacacgtgttcgtatataataagg

SEQ ID NO: 120154 - DNA, 25 bp, Probe sequence
gaaatagaacacgtgttcgtatata

SEQ ID NO: 120155 - DNA, 25 bp, Probe sequence
gtatataataaggttcaagtaaggg

SEQ ID NO: 120156 - DNA, 25 bp, Probe sequence
gtgttcgtatataataaggttcaag

SEQ ID NO: 120157 - DNA, 25 bp, Probe sequence
tgtaatacttaaaaattcatttgca

SEQ ID NO: 120158 - DNA, 25 bp, Probe sequence
atatataactgtgattcgtataaaa

SEQ ID NO: 120159 - DNA, 25 bp, Probe sequence
atatcacaatagatttcacaataat

SEQ ID NO: 120160 - DNA, 25 bp, Probe sequence
atcacaatagatttcacaataatat

SEQ ID NO: 120161 - DNA, 25 bp, Probe sequence
agtctctaaagataaatatttcata

SEQ ID NO: 120162 - DNA, 25 bp, Probe sequence
acggtttaaggaatatataactgtg

SEQ ID NO: 120163 - DNA, 25 bp, Probe sequence
aatatctaagaatacatgggaattt

SEQ ID NO: 120164 - DNA, 25 bp, Probe sequence
catatatcacaatagatttcacaat

SEQ ID NO: 120165 - DNA, 25 bp, Probe sequence
gaatacatgggaatttatcaaaaga

SEQ ID NO: 120166 - DNA, 25 bp, Probe sequence
gataaatatttcatatatcacaata

SEQ ID NO: 120167 - DNA, 25 bp, Probe sequence
gatttcacaataatatctaagaata

SEQ ID NO: 120168 - DNA, 25 bp, Probe sequence
gattcgtataaaataagtctctaaa

SEQ ID NO: 120169 - DNA, 25 bp, Probe sequence
gtgattcgtataaaataagtctcta

SEQ ID NO: 120170 - DNA, 25 bp, Probe sequence
gggaatttatcaaaagagacttaat

SEQ ID NO: 120171 - DNA, 25 bp, Probe sequence
tgactatacggtttaaggaatatat

SEQ ID NO: 120172 - DNA, 25 bp, Probe sequence
ttcatatatcacaatagatttcaca

SEQ ID NO: 120173 - DNA, 25 bp, Probe sequence
atagtaacacaatggcaacggaggg

SEQ ID NO: 120174 - DNA, 25 bp, Probe sequence
acaatggcaacggaggggtaaatca

SEQ ID NO: 120175 - DNA, 25 bp, Probe sequence
acattgtaaatgagctgttgacaca

SEQ ID NO: 120176 - DNA, 25 bp, Probe sequence
aaattttcagaataataacattgta

SEQ ID NO: 120177 - DNA, 25 bp, Probe sequence
aacggagataaatcatctacaataa

SEQ ID NO: 120178 - DNA, 25 bp, Probe sequence
aatgagctgttgacacagtgcaata

SEQ ID NO: 120179 - DNA, 25 bp, Probe sequence
aatcaccttatttcgaaattttcag

SEQ ID NO: 120180 - DNA, 25 bp, Probe sequence
gctgttgacacagtgcaatagtaaa

SEQ ID NO: 120181 - DNA, 25 bp, Probe sequence
gagctgttgacacagtgcaatagta

SEQ ID NO: 120182 - DNA, 25 bp, Probe sequence
gagtatagtaacacaatggcaacgg

SEQ ID NO: 120183 - DNA, 25 bp, Probe sequence
gataaacggagataaatcatctaca

SEQ ID NO: 120184 - DNA, 25 bp, Probe sequence
gttgacacagtgcaatagtaaataa

SEQ ID NO: 120185 - DNA, 25 bp, Probe sequence
gtaacacaatggcaacggaggggta

SEQ ID NO: 120186 - DNA, 25 bp, Probe sequence
gtaaatgagctgttgacacagtgca

SEQ ID NO: 120187 - DNA, 25 bp, Probe sequence
tcaccttatttcgaaattttcagaa

SEQ ID NO: 120188 - DNA, 25 bp, Probe sequence
atgcgttatgtggtgtctttttatt

SEQ ID NO: 120189 - DNA, 25 bp, Probe sequence
atgggtgatgggaattagcacgcca

SEQ ID NO: 120190 - DNA, 25 bp, Probe sequence
agtgttgacaaatgtgaacgaccta

SEQ ID NO: 120191 - DNA, 25 bp, Probe sequence
taaggtggcaccacggtaacgcgtc

SEQ ID NO: 120192 - DNA, 25 bp, Probe sequence
cacggtaacgcgtccttacaggtat

SEQ ID NO: 120193 - DNA, 25 bp, Probe sequence
gcgtccttacaggtatatgcgttat

SEQ ID NO: 120194 - DNA, 25 bp, Probe sequence
gcacgccatatcttgtgaattggac

SEQ ID NO: 120195 - DNA, 25 bp, Probe sequence
gaaattgggttttgtctgcaacaga

SEQ ID NO: 120196 - DNA, 25 bp, Probe sequence
gtagcagatatgaaacgtagcaaat

SEQ ID NO: 120197 - DNA, 25 bp, Probe sequence
gtgaacgacctatgtaatataatga

SEQ ID NO: 120198 - DNA, 25 bp, Probe sequence
gtgaactaacaccgagattaatgaa

SEQ ID NO: 120199 - DNA, 25 bp, Probe sequence
gtggatgatgtgaactaacaccgag

SEQ ID NO: 120200 - DNA, 25 bp, Probe sequence
gggaattagcacgccatatcttgtg

SEQ ID NO: 120201 - DNA, 25 bp, Probe sequence
tcttgtgaattggactttggaaaac

SEQ ID NO: 120202 - DNA, 25 bp, Probe sequence
ttatgttaactaaggtggcaccacg

SEQ ID NO: 120203 - DNA, 25 bp, Probe sequence
aagtaatatgagcaaacccaaacgt

SEQ ID NO: 120204 - DNA, 25 bp, Probe sequence
attaggcgaatactgtttgaaaaag

SEQ ID NO: 120205 - DNA, 25 bp, Probe sequence
atgagcaaacccaaacgttcatatt

SEQ ID NO: 120206 - DNA, 25 bp, Probe sequence
aacattaactattgtatacttattt

SEQ ID NO: 120207 - DNA, 25 bp, Probe sequence
aactattgtatacttatttagatta

SEQ ID NO: 120208 - DNA, 25 bp, Probe sequence
aagtatacgcaattaaagcgtttat

SEQ ID NO: 120209 - DNA, 25 bp, Probe sequence
aatatgagcaaacccaaacgttcat

SEQ ID NO: 120210 - DNA, 25 bp, Probe sequence
gcaattaaagcgtttatgttttagt

SEQ ID NO: 120211 - DNA, 25 bp, Probe sequence
gttcatattactttttttgaaattg

SEQ ID NO: 120212 - DNA, 25 bp, Probe sequence
gttttaacattaactattgtatact

SEQ ID NO: 120213 - DNA, 25 bp, Probe sequence
gtatgcaaaaatctaaatattacta

SEQ ID NO: 120214 - DNA, 25 bp, Probe sequence
gtaatatgagcaaacccaaacgttc

SEQ ID NO: 120215 - DNA, 25 bp, Probe sequence
ggcgaatactgtttgaaaaagtgaa

SEQ ID NO: 120216 - DNA, 25 bp, Probe sequence
tgagcaaacccaaacgttcatatta

SEQ ID NO: 120217 - DNA, 25 bp, Probe sequence
tacttatttagattagatttattat

SEQ ID NO: 120218 - DNA, 25 bp, Probe sequence
atttgtcaatctaatgtttttcatt

SEQ ID NO: 120219 - DNA, 25 bp, Probe sequence
atatatagcgtcatatttgagtttt

SEQ ID NO: 120220 - DNA, 25 bp, Probe sequence
atagcgtcatatttgagttttaatg

SEQ ID NO: 120221 - DNA, 25 bp, Probe sequence
agttattgatactataggctctttt

SEQ ID NO: 120222 - DNA, 25 bp, Probe sequence
actataggctcttttttatgctttt

SEQ ID NO: 120223 - DNA, 25 bp, Probe sequence
aaaactagtatgtatttgtcaatct

SEQ ID NO: 120224 - DNA, 25 bp, Probe sequence
aatggttatctgagtatgaaatgca

SEQ ID NO: 120225 - DNA, 25 bp, Probe sequence
gcgaaattttaattatttcacacta

SEQ ID NO: 120226 - DNA, 25 bp, Probe sequence
gctcttttttatgctttttttagcg

SEQ ID NO: 120227 - DNA, 25 bp, Probe sequence
gaaatgcaagtaagtgaggtagtta

SEQ ID NO: 120228 - DNA, 25 bp, Probe sequence
gatgttttattgatttagttttatg

SEQ ID NO: 120229 - DNA, 25 bp, Probe sequence
gatgttagggcttatagttattgat

SEQ ID NO: 120230 - DNA, 25 bp, Probe sequence
gatactataggctcttttttatgct

SEQ ID NO: 120231 - DNA, 25 bp, Probe sequence
gtaaatgatgttagggcttatagtt

SEQ ID NO: 120232 - DNA, 25 bp, Probe sequence
tataggctcttttttatgctttttt

SEQ ID NO: 120233 - DNA, 25 bp, Probe sequence
ataagtccccttatggaatttcaca

SEQ ID NO: 120234 - DNA, 25 bp, Probe sequence
atcgaagttatataagtccccttat

SEQ ID NO: 120235 - DNA, 25 bp, Probe sequence
ataggaagtaatgtgtgtgacgcaa

SEQ ID NO: 120236 - DNA, 25 bp, Probe sequence
atggtattatattgtttggagtgat

SEQ ID NO: 120237 - DNA, 25 bp, Probe sequence
aacttacttatgctataatcatggt

SEQ ID NO: 120238 - DNA, 25 bp, Probe sequence
aaggtaccctacatcataatcatta

SEQ ID NO: 120239 - DNA, 25 bp, Probe sequence
aatcattatctaatatcgtcacata

SEQ ID NO: 120240 - DNA, 25 bp, Probe sequence
aatttcacattctagtttacataat

SEQ ID NO: 120241 - DNA, 25 bp, Probe sequence
gtccccttatggaatttcacattct

SEQ ID NO: 120242 - DNA, 25 bp, Probe sequence
gtgtgtgacgcaaaaggtaccctac

SEQ ID NO: 120243 - DNA, 25 bp, Probe sequence
gtgacgcaaaaggtaccctacatca

SEQ ID NO: 120244 - DNA, 25 bp, Probe sequence
ggtaccctacatcataatcattatc

SEQ ID NO: 120245 - DNA, 25 bp, Probe sequence
taatatcgtcacataacttacttat

SEQ ID NO: 120246 - DNA, 25 bp, Probe sequence
taatcaaaacgacttatacaaaatc

SEQ ID NO: 120247 - DNA, 25 bp, Probe sequence
taactacaaacatactttactaata

SEQ ID NO: 120248 - DNA, 25 bp, Probe sequence
atacttgattcatctatattttata

SEQ ID NO: 120249 - DNA, 25 bp, Probe sequence
ataacaagtctagaattatcgcatt

SEQ ID NO: 120250 - DNA, 25 bp, Probe sequence
atcgataagtgtctagattaatata

SEQ ID NO: 120251 - DNA, 25 bp, Probe sequence
acaagtctagaattatcgcattctt

SEQ ID NO: 120252 - DNA, 25 bp, Probe sequence
aagtctagaattatcgcattcttaa

SEQ ID NO: 120253 - DNA, 25 bp, Probe sequence
caagtctagaattatcgcattctta

SEQ ID NO: 120254 - DNA, 25 bp, Probe sequence
ctagaattatcgcattcttaaatag

SEQ ID NO: 120255 - DNA, 25 bp, Probe sequence
gaaaataaaatcgataagtgtctag

SEQ ID NO: 120256 - DNA, 25 bp, Probe sequence
gattaatatacttgattcatctata

SEQ ID NO: 120257 - DNA, 25 bp, Probe sequence
gattcatctatattttataacaagt

SEQ ID NO: 120258 - DNA, 25 bp, Probe sequence
gtctagaattatcgcattcttaaat

SEQ ID NO: 120259 - DNA, 25 bp, Probe sequence
gtctagattaatatacttgattcat

SEQ ID NO: 120260 - DNA, 25 bp, Probe sequence
gtgtctagattaatatacttgattc

SEQ ID NO: 120261 - DNA, 25 bp, Probe sequence
tcatctatattttataacaagtcta

SEQ ID NO: 120262 - DNA, 25 bp, Probe sequence
tatacttgattcatctatattttat

SEQ ID NO: 120263 - DNA, 25 bp, Probe sequence
atattttgaatcaagtcaaccatgt

SEQ ID NO: 120264 - DNA, 25 bp, Probe sequence
agtcgatgattttgtgcatatagtt

SEQ ID NO: 120265 - DNA, 25 bp, Probe sequence
acaactatagcactgtattccatct

SEQ ID NO: 120266 - DNA, 25 bp, Probe sequence
aactatagcactgtattccatctct

SEQ ID NO: 120267 - DNA, 25 bp, Probe sequence
aacgttcattatagtattatccata

SEQ ID NO: 120268 - DNA, 25 bp, Probe sequence
cactgtattccatctctttcgaaat

SEQ ID NO: 120269 - DNA, 25 bp, Probe sequence
cttacatattaagaaccaacgttca

SEQ ID NO: 120270 - DNA, 25 bp, Probe sequence
ctatagcactgtattccatctcttt

SEQ ID NO: 120271 - DNA, 25 bp, Probe sequence
gaatcaagtcaaccatgtaaaatat

SEQ ID NO: 120272 - DNA, 25 bp, Probe sequence
gaaccaacgttcattatagtattat

SEQ ID NO: 120273 - DNA, 25 bp, Probe sequence
gattttgtgcatatagttgtcgaat

SEQ ID NO: 120274 - DNA, 25 bp, Probe sequence
gtattccatctctttcgaaataatt

SEQ ID NO: 120275 - DNA, 25 bp, Probe sequence
tccatctctttcgaaataattgtta

SEQ ID NO: 120276 - DNA, 25 bp, Probe sequence
tcgaaataattgttactgcagtgta

SEQ ID NO: 120277 - DNA, 25 bp, Probe sequence
tactgcagtgtaacttaaaagtcga

SEQ ID NO: 120278 - DNA, 25 bp, Probe sequence
atttcattactttccttgtatacat

SEQ ID NO: 120279 - DNA, 25 bp, Probe sequence
agcagtcagtttcaagcaatattct

SEQ ID NO: 120280 - DNA, 25 bp, Probe sequence
actttccttgtatacattttattat

SEQ ID NO: 120281 - DNA, 25 bp, Probe sequence
acaatagcagtcagtttcaagcaat

SEQ ID NO: 120282 - DNA, 25 bp, Probe sequence
aaatcattgttccttgcgacatgga

SEQ ID NO: 120283 - DNA, 25 bp, Probe sequence
aatgtattataccaaaggagtgatt

SEQ ID NO: 120284 - DNA, 25 bp, Probe sequence
caagcaatattctatctactattag

SEQ ID NO: 120285 - DNA, 25 bp, Probe sequence
gaaaaatcattgttccttgcgacat

SEQ ID NO: 120286 - DNA, 25 bp, Probe sequence
gtttcaagcaatattctatctacta

SEQ ID NO: 120287 - DNA, 25 bp, Probe sequence
gtaacattatcgtttaggagacaaa

SEQ ID NO: 120288 - DNA, 25 bp, Probe sequence
gtcagtttcaagcaatattctatct

SEQ ID NO: 120289 - DNA, 25 bp, Probe sequence
ggaaatcgtaacattatcgtttagg

SEQ ID NO: 120290 - DNA, 25 bp, Probe sequence
tgttccttgcgacatggaaatcgta

SEQ ID NO: 120291 - DNA, 25 bp, Probe sequence
tccttttatttcattactttccttg

SEQ ID NO: 120292 - DNA, 25 bp, Probe sequence
tcattactttccttgtatacatttt

SEQ ID NO: 120293 - DNA, 25 bp, Probe sequence
ataaaccaagattttcacattacta

SEQ ID NO: 120294 - DNA, 25 bp, Probe sequence
actaattgtgagaatcttggttttt

SEQ ID NO: 120295 - DNA, 25 bp, Probe sequence
acattactaattgtgagaatcttgg

SEQ ID NO: 120296 - DNA, 25 bp, Probe sequence
aaaccaagattttcacattactaat

SEQ ID NO: 120297 - DNA, 25 bp, Probe sequence
aaccaagattttcacattactaatt

SEQ ID NO: 120298 - DNA, 25 bp, Probe sequence
ccaagattttcacattactaattgt

SEQ ID NO: 120299 - DNA, 25 bp, Probe sequence
gaacaatataaaccaagattttcac

SEQ ID NO: 120300 - DNA, 25 bp, Probe sequence
gaaatatatatttatcgtaagggat

SEQ ID NO: 120301 - DNA, 25 bp, Probe sequence
gtttttttgagggtttatgaatgat

SEQ ID NO: 120302 - DNA, 25 bp, Probe sequence
gtgagaatcttggtttttttgaggg

SEQ ID NO: 120303 - DNA, 25 bp, Probe sequence
tggtttttttgagggtttatgaatg

SEQ ID NO: 120304 - DNA, 25 bp, Probe sequence
tgagaatcttggtttttttgagggt

SEQ ID NO: 120305 - DNA, 25 bp, Probe sequence
ttatcgtaagggattttatagtaat

SEQ ID NO: 120306 - DNA, 25 bp, Probe sequence
ttttttgagggtttatgaatgatag

SEQ ID NO: 120307 - DNA, 25 bp, Probe sequence
ttgtgagaatcttggtttttttgag

SEQ ID NO: 120308 - DNA, 25 bp, Probe sequence
attgattacatctttatcttaacct

SEQ ID NO: 120309 - DNA, 25 bp, Probe sequence
atagtatttgtattgattacatctt

SEQ ID NO: 120310 - DNA, 25 bp, Probe sequence
atctttatcttaaccttgaattatt

SEQ ID NO: 120311 - DNA, 25 bp, Probe sequence
aaatattgcttcattagtaaaatta

SEQ ID NO: 120312 - DNA, 25 bp, Probe sequence
aatatcctccctgtatgaacaacaa

SEQ ID NO: 120313 - DNA, 25 bp, Probe sequence
cttgaattattaacctcatttttag

SEQ ID NO: 120314 - DNA, 25 bp, Probe sequence
cctccctgtatgaacaacaaatagt

SEQ ID NO: 120315 - DNA, 25 bp, Probe sequence
gaaatatcctccctgtatgaacaac

SEQ ID NO: 120316 - DNA, 25 bp, Probe sequence
gattacatctttatcttaaccttga

SEQ ID NO: 120317 - DNA, 25 bp, Probe sequence
gttaatctaaaaaatattgcttcat

SEQ ID NO: 120318 - DNA, 25 bp, Probe sequence
tgaaatatcctccctgtatgaacaa

SEQ ID NO: 120319 - DNA, 25 bp, Probe sequence
taaccttgaattattaacctcattt

SEQ ID NO: 120320 - DNA, 25 bp, Probe sequence
tacatctttatcttaaccttgaatt

SEQ ID NO: 120321 - DNA, 25 bp, Probe sequence
tatcctccctgtatgaacaacaaat

SEQ ID NO: 120322 - DNA, 25 bp, Probe sequence
tattaacctcatttttagaaactgt

SEQ ID NO: 120323 - DNA, 25 bp, Probe sequence
atatcttactgctgttctctattta

SEQ ID NO: 120324 - DNA, 25 bp, Probe sequence
atcttactgctgttctctatttata

SEQ ID NO: 120325 - DNA, 25 bp, Probe sequence
actgctgttctctatttatacaata

SEQ ID NO: 120326 - DNA, 25 bp, Probe sequence
acttcgtattgaatggcttcgcttt

SEQ ID NO: 120327 - DNA, 25 bp, Probe sequence
aaaatatcttactgctgttctctat

SEQ ID NO: 120328 - DNA, 25 bp, Probe sequence
aacagcagtaagataattttcaatt

SEQ ID NO: 120329 - DNA, 25 bp, Probe sequence
aatacttcgtattgaatggcttcgc

SEQ ID NO: 120330 - DNA, 25 bp, Probe sequence
cttactgctgttctctatttataca

SEQ ID NO: 120331 - DNA, 25 bp, Probe sequence
gctgttctctatttatacaatactt

SEQ ID NO: 120332 - DNA, 25 bp, Probe sequence
gaaaatatcttactgctgttctcta

SEQ ID NO: 120333 - DNA, 25 bp, Probe sequence
gacataaatccctaaaaaaacagca

SEQ ID NO: 120334 - DNA, 25 bp, Probe sequence
gttctctatttatacaatacttcgt

SEQ ID NO: 120335 - DNA, 25 bp, Probe sequence
gtattgaatggcttcgctttgcccg

SEQ ID NO: 120336 - DNA, 25 bp, Probe sequence
ttcgtattgaatggcttcgctttgc

SEQ ID NO: 120337 - DNA, 25 bp, Probe sequence
tattgaatggcttcgctttgcccgt

SEQ ID NO: 120338 - DNA, 25 bp, Probe sequence
attctccttcgattcttgtattctt

SEQ ID NO: 120339 - DNA, 25 bp, Probe sequence
ataacatgtgtgagtcattctatca

SEQ ID NO: 120340 - DNA, 25 bp, Probe sequence
atgaggtcgaaactgtgacgataat

SEQ ID NO: 120341 - DNA, 25 bp, Probe sequence
atgtgtgagtcattctatcattaca

SEQ ID NO: 120342 - DNA, 25 bp, Probe sequence
aatatgatataattcttccgttaga

SEQ ID NO: 120343 - DNA, 25 bp, Probe sequence
caacttatatgaggtcgaaactgtg

SEQ ID NO: 120344 - DNA, 25 bp, Probe sequence
cgattcttgtattctttattattat

SEQ ID NO: 120345 - DNA, 25 bp, Probe sequence
ccttcgattcttgtattctttatta

SEQ ID NO: 120346 - DNA, 25 bp, Probe sequence
gaaactgtgacgataatatgatata

SEQ ID NO: 120347 - DNA, 25 bp, Probe sequence
gtattctttattattataacatgtg

SEQ ID NO: 120348 - DNA, 25 bp, Probe sequence
gtcattctatcattacaacttatat

SEQ ID NO: 120349 - DNA, 25 bp, Probe sequence
gtgagtcattctatcattacaactt

SEQ ID NO: 120350 - DNA, 25 bp, Probe sequence
tctccttcgattcttgtattcttta

SEQ ID NO: 120351 - DNA, 25 bp, Probe sequence
tcttccgttagaatatcgaatgaaa

SEQ ID NO: 120352 - DNA, 25 bp, Probe sequence
ttattctccttcgattcttgtattc

SEQ ID NO: 120353 - DNA, 25 bp, Probe sequence
atttcttttcgaaaatctctgtatt

SEQ ID NO: 120354 - DNA, 25 bp, Probe sequence
actgtcaccttctatattgggactt

SEQ ID NO: 120355 - DNA, 25 bp, Probe sequence
aaatctctgtattgaggcccgacca

SEQ ID NO: 120356 - DNA, 25 bp, Probe sequence
caccttctatattgggacttattcc

SEQ ID NO: 120357 - DNA, 25 bp, Probe sequence
cttactgtcaccttctatattggga

SEQ ID NO: 120358 - DNA, 25 bp, Probe sequence
ctgtcaccttctatattgggactta

SEQ ID NO: 120359 - DNA, 25 bp, Probe sequence
ccttctatattgggacttattccgc

SEQ ID NO: 120360 - DNA, 25 bp, Probe sequence
gcttactgtcaccttctatattggg

SEQ ID NO: 120361 - DNA, 25 bp, Probe sequence
gcacattattgtaagttggcttact

SEQ ID NO: 120362 - DNA, 25 bp, Probe sequence
gaaaatctctgtattgaggcccgac

SEQ ID NO: 120363 - DNA, 25 bp, Probe sequence
gtaagttggcttactgtcaccttct

SEQ ID NO: 120364 - DNA, 25 bp, Probe sequence
gtcaccttctatattgggacttatt

SEQ ID NO: 120365 - DNA, 25 bp, Probe sequence
ggcttactgtcaccttctatattgg

SEQ ID NO: 120366 - DNA, 25 bp, Probe sequence
tactgtcaccttctatattgggact

SEQ ID NO: 120367 - DNA, 25 bp, Probe sequence
ttcttttcgaaaatctctgtattga

SEQ ID NO: 120368 - DNA, 25 bp, Probe sequence
attgcagggtctagggcattgattc

SEQ ID NO: 120369 - DNA, 25 bp, Probe sequence
attcatgcccgagactatattcaat

SEQ ID NO: 120370 - DNA, 25 bp, Probe sequence
atagacattaactggtcgtgaggct

SEQ ID NO: 120371 - DNA, 25 bp, Probe sequence
acattaactggtcgtgaggctggga

SEQ ID NO: 120372 - DNA, 25 bp, Probe sequence
aactggtcgtgaggctgggacataa

SEQ ID NO: 120373 - DNA, 25 bp, Probe sequence
catgcccgagactatattcaattta

SEQ ID NO: 120374 - DNA, 25 bp, Probe sequence
cattgattcatgcccgagactatat

SEQ ID NO: 120375 - DNA, 25 bp, Probe sequence
gcagggtctagggcattgattcatg

SEQ ID NO: 120376 - DNA, 25 bp, Probe sequence
gattcatgcccgagactatattcaa

SEQ ID NO: 120377 - DNA, 25 bp, Probe sequence
ttaactggtcgtgaggctgggacat

SEQ ID NO: 120378 - DNA, 25 bp, Probe sequence
ggtctagggcattgattcatgcccg

SEQ ID NO: 120379 - DNA, 25 bp, Probe sequence
tgcccgagactatattcaatttaat

SEQ ID NO: 120380 - DNA, 25 bp, Probe sequence
tagggcattgattcatgcccgagac

SEQ ID NO: 120381 - DNA, 25 bp, Probe sequence
ttgattcatgcccgagactatattc

SEQ ID NO: 120382 - DNA, 25 bp, Probe sequence
ttcatgcccgagactatattcaatt

SEQ ID NO: 120383 - DNA, 25 bp, Probe sequence
atcggtttacattcatatttgtcat

SEQ ID NO: 120384 - DNA, 25 bp, Probe sequence
aagtctcattatcaccaccttttaa

SEQ ID NO: 120385 - DNA, 25 bp, Probe sequence
cacatcagcacagtgaacacccctt

SEQ ID NO: 120386 - DNA, 25 bp, Probe sequence
gcaacgctataacttgaattttcag

SEQ ID NO: 120387 - DNA, 25 bp, Probe sequence
gaaagggtgcgatgccgaagcgatt

SEQ ID NO: 120388 - DNA, 25 bp, Probe sequence
gatgaggcgcatcaatcatgagtaa

SEQ ID NO: 120389 - DNA, 25 bp, Probe sequence
gattaagagcaagttcgcattccga

SEQ ID NO: 120390 - DNA, 25 bp, Probe sequence
gattactgtctgctaacagctgaat

SEQ ID NO: 120391 - DNA, 25 bp, Probe sequence
ggagtgcatcacttgtatatagatt

SEQ ID NO: 120392 - DNA, 25 bp, Probe sequence
tgaacaccccttctctaaattacaa

SEQ ID NO: 120393 - DNA, 25 bp, Probe sequence
ttttttattattgtgtgcccttcct

SEQ ID NO: 120394 - DNA, 25 bp, Probe sequence
tacaaatacagttatcaccgcatta

SEQ ID NO: 120395 - DNA, 25 bp, Probe sequence
tattttattttttagcacatcagca

SEQ ID NO: 120396 - DNA, 25 bp, Probe sequence
ttcgcattccgaacttgttcttttt

SEQ ID NO: 120397 - DNA, 25 bp, Probe sequence
ttgtgtgcccttcctaacaattagg

SEQ ID NO: 120398 - DNA, 25 bp, Probe sequence
atgtctcaaccttattgtttatcat

SEQ ID NO: 120399 - DNA, 25 bp, Probe sequence
acgattatgtctcaaccttattgtt

SEQ ID NO: 120400 - DNA, 25 bp, Probe sequence
aacttatgatcacaaatttcgaaat

SEQ ID NO: 120401 - DNA, 25 bp, Probe sequence
caaatttcgaaatacgttacactat

SEQ ID NO: 120402 - DNA, 25 bp, Probe sequence
caaccttattgtttatcattgaata

SEQ ID NO: 120403 - DNA, 25 bp, Probe sequence
gaataaacttatgatcacaaatttc

SEQ ID NO: 120404 - DNA, 25 bp, Probe sequence
gacgtcaacgtataataatttcaag

SEQ ID NO: 120405 - DNA, 25 bp, Probe sequence
gatacgattatgtctcaaccttatt

SEQ ID NO: 120406 - DNA, 25 bp, Probe sequence
gattatgtctcaaccttattgttta

SEQ ID NO: 120407 - DNA, 25 bp, Probe sequence
gtctcaaccttattgtttatcattg

SEQ ID NO: 120408 - DNA, 25 bp, Probe sequence
tacgattatgtctcaaccttattgt

SEQ ID NO: 120409 - DNA, 25 bp, Probe sequence
tagtaatttaacacaaaggattgat

SEQ ID NO: 120410 - DNA, 25 bp, Probe sequence
ttatgtctcaaccttattgtttatc

SEQ ID NO: 120411 - DNA, 25 bp, Probe sequence
ttcaaggttgagatacgattatgtc

SEQ ID NO: 120412 - DNA, 25 bp, Probe sequence
ttcgaaatacgttacactatttata

SEQ ID NO: 120413 - DNA, 25 bp, Probe sequence
atccccgaagcacagaaaattatac

SEQ ID NO: 120414 - DNA, 25 bp, Probe sequence
aacaaagtaatccccgaagcacaga

SEQ ID NO: 120415 - DNA, 25 bp, Probe sequence
atcatatacataccacactttaaac

SEQ ID NO: 120416 - DNA, 25 bp, Probe sequence
agccctattcaactaatttaaagca

SEQ ID NO: 120417 - DNA, 25 bp, Probe sequence
accacactttaaacaagcatcatga

SEQ ID NO: 120418 - DNA, 25 bp, Probe sequence
aaacatgcttggacatatactctaa

SEQ ID NO: 120419 - DNA, 25 bp, Probe sequence
gaaaattatactgtgactcggggaa

SEQ ID NO: 120420 - DNA, 25 bp, Probe sequence
gaaagtatttatttctttttgtcat

SEQ ID NO: 120421 - DNA, 25 bp, Probe sequence
gatgactgtagaaaacatgcttgga

SEQ ID NO: 120422 - DNA, 25 bp, Probe sequence
gtgactcggggaatttttatgcatt

SEQ ID NO: 120423 - DNA, 25 bp, Probe sequence
ggaagaacagcacatttttagttag

SEQ ID NO: 120424 - DNA, 25 bp, Probe sequence
taatcctttatatttagttagccct

SEQ ID NO: 120425 - DNA, 25 bp, Probe sequence
taaagcatcatatacataccacact

SEQ ID NO: 120426 - DNA, 25 bp, Probe sequence
tttctttttgtcattaatcctttat

SEQ ID NO: 120427 - DNA, 25 bp, Probe sequence
ttatatttagttagccctattcaac

SEQ ID NO: 120428 - DNA, 25 bp, Probe sequence
atttggctgagaaactcatcgcgtt

SEQ ID NO: 120429 - DNA, 25 bp, Probe sequence
atataattttctattgcaaacaatg

SEQ ID NO: 120430 - DNA, 25 bp, Probe sequence
agcatataaaaacaccttacttctt

SEQ ID NO: 120431 - DNA, 25 bp, Probe sequence
acctcgtcgttgtacaccataatta

SEQ ID NO: 120432 - DNA, 25 bp, Probe sequence
aaaaaagagttctcaatttggctga

SEQ ID NO: 120433 - DNA, 25 bp, Probe sequence
catataaaaacaccttacttcttgg

SEQ ID NO: 120434 - DNA, 25 bp, Probe sequence
ctcatcgcgttaagtatttgtaata

SEQ ID NO: 120435 - DNA, 25 bp, Probe sequence
ctcgtcgttgtacaccataattata

SEQ ID NO: 120436 - DNA, 25 bp, Probe sequence
gctgagaaactcatcgcgttaagta

SEQ ID NO: 120437 - DNA, 25 bp, Probe sequence
gaaactcatcgcgttaagtatttgt

SEQ ID NO: 120438 - DNA, 25 bp, Probe sequence
gagaaactcatcgcgttaagtattt

SEQ ID NO: 120439 - DNA, 25 bp, Probe sequence
gtcgttgtacaccataattatatta

SEQ ID NO: 120440 - DNA, 25 bp, Probe sequence
ggtgttagttaaaatcaatgattca

SEQ ID NO: 120441 - DNA, 25 bp, Probe sequence
tctattgcaaacaatgttggtgata

SEQ ID NO: 120442 - DNA, 25 bp, Probe sequence
ttggctgagaaactcatcgcgttaa

SEQ ID NO: 120443 - DNA, 25 bp, Probe sequence
atttcactcaaatattctttgcaat

SEQ ID NO: 120444 - DNA, 25 bp, Probe sequence
acctccaagactaaaattcattcaa

SEQ ID NO: 120445 - DNA, 25 bp, Probe sequence
aaatacatgcaaatttcactcaaat

SEQ ID NO: 120446 - DNA, 25 bp, Probe sequence
aatctgaaacctccaagactaaaat

SEQ ID NO: 120447 - DNA, 25 bp, Probe sequence
aatcatctgcttaacttgtattata

SEQ ID NO: 120448 - DNA, 25 bp, Probe sequence
aattcattcaatatgcttattcgca

SEQ ID NO: 120449 - DNA, 25 bp, Probe sequence
cactcaaatattctttgcaatatgg

SEQ ID NO: 120450 - DNA, 25 bp, Probe sequence
gcagttattaccaaattgcaataca

SEQ ID NO: 120451 - DNA, 25 bp, Probe sequence
gcaatatggaataatcatctgctta

SEQ ID NO: 120452 - DNA, 25 bp, Probe sequence
gaaacctccaagactaaaattcatt

SEQ ID NO: 120453 - DNA, 25 bp, Probe sequence
ggaataatcatctgcttaacttgta

SEQ ID NO: 120454 - DNA, 25 bp, Probe sequence
tgcaaatttcactcaaatattcttt

SEQ ID NO: 120455 - DNA, 25 bp, Probe sequence
tgcttattcgcatattacaaaaaat

SEQ ID NO: 120456 - DNA, 25 bp, Probe sequence
tctgcttaacttgtattatagtgca

SEQ ID NO: 120457 - DNA, 25 bp, Probe sequence
ttatagtgcagttattaccaaattg

SEQ ID NO: 120458 - DNA, 25 bp, Probe sequence
atacctttatcctctgaaaatcaag

SEQ ID NO: 120459 - DNA, 25 bp, Probe sequence
atcctctgaaaatcaagtttgacga

SEQ ID NO: 120460 - DNA, 25 bp, Probe sequence
acctttatcctctgaaaatcaagtt

SEQ ID NO: 120461 - DNA, 25 bp, Probe sequence
cttccatacttcaaaaactctatac

SEQ ID NO: 120462 - DNA, 25 bp, Probe sequence
cttatttttatacctttatcctctg

SEQ ID NO: 120463 - DNA, 25 bp, Probe sequence
cccttccatacttcaaaaactctat

SEQ ID NO: 120464 - DNA, 25 bp, Probe sequence
gtaaaactacgtataataacattat

SEQ ID NO: 120465 - DNA, 25 bp, Probe sequence
tccatacttcaaaaactctatactt

SEQ ID NO: 120466 - DNA, 25 bp, Probe sequence
tacttcaaaaactctatacttattt

SEQ ID NO: 120467 - DNA, 25 bp, Probe sequence
tcaaaaactctatacttatttttat

SEQ ID NO: 120468 - DNA, 25 bp, Probe sequence
tatacctttatcctctgaaaatcaa

SEQ ID NO: 120469 - DNA, 25 bp, Probe sequence
tattaaagaccccttccatacttca

SEQ ID NO: 120470 - DNA, 25 bp, Probe sequence
tatttttatacctttatcctctgaa

SEQ ID NO: 120471 - DNA, 25 bp, Probe sequence
tttgacgacttgaaacaaacaaagt

SEQ ID NO: 120472 - DNA, 25 bp, Probe sequence
tttatacctttatcctctgaaaatc

SEQ ID NO: 120473 - DNA, 25 bp, Probe sequence
attggagatgcttccttttatatta

SEQ ID NO: 120474 - DNA, 25 bp, Probe sequence
attaaattggagatgcttcctttta

SEQ ID NO: 120475 - DNA, 25 bp, Probe sequence
aggaagcatcctacgattaaattgg

SEQ ID NO: 120476 - DNA, 25 bp, Probe sequence
agcatcctacgattaaattggagat

SEQ ID NO: 120477 - DNA, 25 bp, Probe sequence
aaattggagatgcttccttttatat

SEQ ID NO: 120478 - DNA, 25 bp, Probe sequence
aacaaaaaggaagcatcctacgatt

SEQ ID NO: 120479 - DNA, 25 bp, Probe sequence
aattggagatgcttccttttatatt

SEQ ID NO: 120480 - DNA, 25 bp, Probe sequence
cctacgattaaattggagatgcttc

SEQ ID NO: 120481 - DNA, 25 bp, Probe sequence
gaagcatcctacgattaaattggag

SEQ ID NO: 120482 - DNA, 25 bp, Probe sequence
gagatgcttccttttatattattcg

SEQ ID NO: 120483 - DNA, 25 bp, Probe sequence
gattaaattggagatgcttcctttt

SEQ ID NO: 120484 - DNA, 25 bp, Probe sequence
ggagatgcttccttttatattattc

SEQ ID NO: 120485 - DNA, 25 bp, Probe sequence
taaattggagatgcttccttttata

SEQ ID NO: 120486 - DNA, 25 bp, Probe sequence
ttaaattggagatgcttccttttat

SEQ ID NO: 120487 - DNA, 25 bp, Probe sequence
ttggagatgcttccttttatattat

SEQ ID NO: 120488 - DNA, 25 bp, Probe sequence
attcactttttaaatagtaactgat

SEQ ID NO: 120489 - DNA, 25 bp, Probe sequence
atataaactcatattttaaacttat

SEQ ID NO: 120490 - DNA, 25 bp, Probe sequence
aactgatgacttttattcacaattt

SEQ ID NO: 120491 - DNA, 25 bp, Probe sequence
ctgatgacttttattcacaatttca

SEQ ID NO: 120492 - DNA, 25 bp, Probe sequence
gaaaataaaattcttcaaattcact

SEQ ID NO: 120493 - DNA, 25 bp, Probe sequence
gacttttattcacaatttcatataa

SEQ ID NO: 120494 - DNA, 25 bp, Probe sequence
gatgacttttattcacaatttcata

SEQ ID NO: 120495 - DNA, 25 bp, Probe sequence
gttgtttaaatcaaattatgccaga

SEQ ID NO: 120496 - DNA, 25 bp, Probe sequence
gtttaaatcaaattatgccagaaaa

SEQ ID NO: 120497 - DNA, 25 bp, Probe sequence
gtaactgatgacttttattcacaat

SEQ ID NO: 120498 - DNA, 25 bp, Probe sequence
gtgttgtttaaatcaaattatgcca

SEQ ID NO: 120499 - DNA, 25 bp, Probe sequence
tgacttttattcacaatttcatata

SEQ ID NO: 120500 - DNA, 25 bp, Probe sequence
tagtaactgatgacttttattcaca

SEQ ID NO: 120501 - DNA, 25 bp, Probe sequence
tttattcacaatttcatataaactc

SEQ ID NO: 120502 - DNA, 25 bp, Probe sequence
ttcttcaaattcactttttaaatag

SEQ ID NO: 120503 - DNA, 25 bp, Probe sequence
attctattctgatataaaacgcaat

SEQ ID NO: 120504 - DNA, 25 bp, Probe sequence
atctcatattaggcttcatttcaat

SEQ ID NO: 120505 - DNA, 25 bp, Probe sequence
aggcttcatttcaataattatgcgt

SEQ ID NO: 120506 - DNA, 25 bp, Probe sequence
agtttactattctattctgatataa

SEQ ID NO: 120507 - DNA, 25 bp, Probe sequence
aaaacgcaatacttagtatgcgaat

SEQ ID NO: 120508 - DNA, 25 bp, Probe sequence
aatgccttagtttactattctattc

SEQ ID NO: 120509 - DNA, 25 bp, Probe sequence
gccttagtttactattctattctga

SEQ ID NO: 120510 - DNA, 25 bp, Probe sequence
gcgaattgtttatattttaccaaat

SEQ ID NO: 120511 - DNA, 25 bp, Probe sequence
gaataagttcttcaaatgccttagt

SEQ ID NO: 120512 - DNA, 25 bp, Probe sequence
gaaaatctcatattaggcttcattt

SEQ ID NO: 120513 - DNA, 25 bp, Probe sequence
gacatggaataagttcttcaaatgc

SEQ ID NO: 120514 - DNA, 25 bp, Probe sequence
gttcttcaaatgccttagtttacta

SEQ ID NO: 120515 - DNA, 25 bp, Probe sequence
gtatgcgaattgtttatattttacc

SEQ ID NO: 120516 - DNA, 25 bp, Probe sequence
tcttcaaatgccttagtttactatt

SEQ ID NO: 120517 - DNA, 25 bp, Probe sequence
tatattttaccaaatttactaattg

SEQ ID NO: 120518 - DNA, 25 bp, Probe sequence
atttcatcgcttgttattatctaaa

SEQ ID NO: 120519 - DNA, 25 bp, Probe sequence
atacatgtcgtatccataaagtgaa

SEQ ID NO: 120520 - DNA, 25 bp, Probe sequence
aactaaaggcgcttatagaattcat

SEQ ID NO: 120521 - DNA, 25 bp, Probe sequence
aactcacattttaatacgaagcatt

SEQ ID NO: 120522 - DNA, 25 bp, Probe sequence
aagtgaatttacatcttgttcagat

SEQ ID NO: 120523 - DNA, 25 bp, Probe sequence
aatgagtatctgtatatagcaattg

SEQ ID NO: 120524 - DNA, 25 bp, Probe sequence
cgccattccacctatatttctattg

SEQ ID NO: 120525 - DNA, 25 bp, Probe sequence
gcatattgaaacacgccattccacc

SEQ ID NO: 120526 - DNA, 25 bp, Probe sequence
gaattcataaatttcatcgcttgtt

SEQ ID NO: 120527 - DNA, 25 bp, Probe sequence
gaatatcggtcagttgattttgatt

SEQ ID NO: 120528 - DNA, 25 bp, Probe sequence
gaatatttcgttttatgtagtacat

SEQ ID NO: 120529 - DNA, 25 bp, Probe sequence
gttatggttgctattgagtatgtca

SEQ ID NO: 120530 - DNA, 25 bp, Probe sequence
tatttctattgtgagtctatttcaa

SEQ ID NO: 120531 - DNA, 25 bp, Probe sequence
tattgatttgattacgtttttagga

SEQ ID NO: 120532 - DNA, 25 bp, Probe sequence
ttactgctgtttgttattgatttga

SEQ ID NO: 120533 - DNA, 25 bp, Probe sequence
atgttgaaacgcttacaatgtaata

SEQ ID NO: 120534 - DNA, 25 bp, Probe sequence
agtagatttacctatttatctgcta

SEQ ID NO: 120535 - DNA, 25 bp, Probe sequence
agcgttgattcttctaggtttatag

SEQ ID NO: 120536 - DNA, 25 bp, Probe sequence
acaaaagcgttgattcttctaggtt

SEQ ID NO: 120537 - DNA, 25 bp, Probe sequence
aatatcactatttagttatttgtta

SEQ ID NO: 120538 - DNA, 25 bp, Probe sequence
caccctccacaaaaatgttgaaacg

SEQ ID NO: 120539 - DNA, 25 bp, Probe sequence
gaaccactgtttatttgttttatag

SEQ ID NO: 120540 - DNA, 25 bp, Probe sequence
gactttgattgacgtctcagacatg

SEQ ID NO: 120541 - DNA, 25 bp, Probe sequence
gatcctatgactttgattgacgtct

SEQ ID NO: 120542 - DNA, 25 bp, Probe sequence
gatttacctatttatctgctaaaaa

SEQ ID NO: 120543 - DNA, 25 bp, Probe sequence
gattcttctaggtttatagatgtat

SEQ ID NO: 120544 - DNA, 25 bp, Probe sequence
gttgttcttatacattagtcacagc

SEQ ID NO: 120545 - DNA, 25 bp, Probe sequence
gtacttaaaaaattgatcctatgac

SEQ ID NO: 120546 - DNA, 25 bp, Probe sequence
tttacaccctccacaaaaatgttga

SEQ ID NO: 120547 - DNA, 25 bp, Probe sequence
ttatttgttttatagttgttcttat

SEQ ID NO: 120548 - DNA, 25 bp, Probe sequence
atcacaaatcaataaccatgtttta

SEQ ID NO: 120549 - DNA, 25 bp, Probe sequence
agttaatggcattctgttaattctg

SEQ ID NO: 120550 - DNA, 25 bp, Probe sequence
aaacattttcacacatcatttcaat

SEQ ID NO: 120551 - DNA, 25 bp, Probe sequence
aacacaaggccttaccgcaatatta

SEQ ID NO: 120552 - DNA, 25 bp, Probe sequence
aaggccttaccgcaatattaattgt

SEQ ID NO: 120553 - DNA, 25 bp, Probe sequence
aatgtgcgattttgaacttggaagt

SEQ ID NO: 120554 - DNA, 25 bp, Probe sequence
gaacttggaagtaacatttcataat

SEQ ID NO: 120555 - DNA, 25 bp, Probe sequence
gtcatatactgacttttcactattg

SEQ ID NO: 120556 - DNA, 25 bp, Probe sequence
tgttaattctgattgcagtacttaa

SEQ ID NO: 120557 - DNA, 25 bp, Probe sequence
tgaccgtagtttaaacattttcaca

SEQ ID NO: 120558 - DNA, 25 bp, Probe sequence
taaatttttcaagctacaatcatta

SEQ ID NO: 120559 - DNA, 25 bp, Probe sequence
tacacctcatattacgactttttct

SEQ ID NO: 120560 - DNA, 25 bp, Probe sequence
tactgtaacacaaggccttaccgca

SEQ ID NO: 120561 - DNA, 25 bp, Probe sequence
tagttattatctttattttcacaaa

SEQ ID NO: 120562 - DNA, 25 bp, Probe sequence
ttctatacaatagttgctttttaaa

SEQ ID NO: 120563 - DNA, 25 bp, Probe sequence
atatgcccgtaaaagacaatatacg

SEQ ID NO: 120564 - DNA, 25 bp, Probe sequence
atgcccgtaaaagacaatatacgtt

SEQ ID NO: 120565 - DNA, 25 bp, Probe sequence
aaagacaatatacgttataacaacg

SEQ ID NO: 120566 - DNA, 25 bp, Probe sequence
caaatattccccttttatatgcccg

SEQ ID NO: 120567 - DNA, 25 bp, Probe sequence
gcccgtaaaagacaatatacgttat

SEQ ID NO: 120568 - DNA, 25 bp, Probe sequence
gcagtaaacccttacgacactttag

SEQ ID NO: 120569 - DNA, 25 bp, Probe sequence
gacaatatacgttataacaacgttt

SEQ ID NO: 120570 - DNA, 25 bp, Probe sequence
tgcccgtaaaagacaatatacgtta

SEQ ID NO: 120571 - DNA, 25 bp, Probe sequence
tcaaatattccccttttatatgccc

SEQ ID NO: 120572 - DNA, 25 bp, Probe sequence
tatgcccgtaaaagacaatatacgt

SEQ ID NO: 120573 - DNA, 25 bp, Probe sequence
tatatgcccgtaaaagacaatatac

SEQ ID NO: 120574 - DNA, 25 bp, Probe sequence
tttcaaatattccccttttatatgc

SEQ ID NO: 120575 - DNA, 25 bp, Probe sequence
tttatatgcccgtaaaagacaatat

SEQ ID NO: 120576 - DNA, 25 bp, Probe sequence
ttatatgcccgtaaaagacaatata

SEQ ID NO: 120577 - DNA, 25 bp, Probe sequence
ttcaaatattccccttttatatgcc

SEQ ID NO: 120578 - DNA, 25 bp, Probe sequence
atatcttttagggttagacgtcaat

SEQ ID NO: 120579 - DNA, 25 bp, Probe sequence
atcttacacactattaacatgcttt

SEQ ID NO: 120580 - DNA, 25 bp, Probe sequence
atgttaaacatgtttttcagtacat

SEQ ID NO: 120581 - DNA, 25 bp, Probe sequence
agtaattatcacactatgggatgaa

SEQ ID NO: 120582 - DNA, 25 bp, Probe sequence
agtatcatataccaattaatcgatt

SEQ ID NO: 120583 - DNA, 25 bp, Probe sequence
agcatgaattgttaacagcgatgat

SEQ ID NO: 120584 - DNA, 25 bp, Probe sequence
aacacgcctcctaaattgctatctt

SEQ ID NO: 120585 - DNA, 25 bp, Probe sequence
aacatgctttaaacctttattatga

SEQ ID NO: 120586 - DNA, 25 bp, Probe sequence
cagcgatgatagaaattgcgttatt

SEQ ID NO: 120587 - DNA, 25 bp, Probe sequence
gctatctttgcaaatttaggaagcg

SEQ ID NO: 120588 - DNA, 25 bp, Probe sequence
gtacgtcactccttatatcgttatg

SEQ ID NO: 120589 - DNA, 25 bp, Probe sequence
gtcactccttatatcgttatgttaa

SEQ ID NO: 120590 - DNA, 25 bp, Probe sequence
tcagtacatgttaatcttacacact

SEQ ID NO: 120591 - DNA, 25 bp, Probe sequence
tcaataaaaataaacacgcctccta

SEQ ID NO: 120592 - DNA, 25 bp, Probe sequence
ttaggaagcgtgtcattaacataat

SEQ ID NO: 120593 - DNA, 25 bp, Probe sequence
attgcatcaccctggttctaactat

SEQ ID NO: 120594 - DNA, 25 bp, Probe sequence
ataacgaattgcatcaccctggttc

SEQ ID NO: 120595 - DNA, 25 bp, Probe sequence
agcgcaccatatttcactataattg

SEQ ID NO: 120596 - DNA, 25 bp, Probe sequence
aattctgtgtagttaatcatatcaa

SEQ ID NO: 120597 - DNA, 25 bp, Probe sequence
caatttatgcaagatagcgcaccat

SEQ ID NO: 120598 - DNA, 25 bp, Probe sequence
cacttccttattatgtattatgtac

SEQ ID NO: 120599 - DNA, 25 bp, Probe sequence
cgaattgcatcaccctggttctaac

SEQ ID NO: 120600 - DNA, 25 bp, Probe sequence
ccaggataacgaattgcatcaccct

SEQ ID NO: 120601 - DNA, 25 bp, Probe sequence
gcatcaccctggttctaactattat

SEQ ID NO: 120602 - DNA, 25 bp, Probe sequence
gcaccatatttcactataattgatt

SEQ ID NO: 120603 - DNA, 25 bp, Probe sequence
gcaagatagcgcaccatatttcact

SEQ ID NO: 120604 - DNA, 25 bp, Probe sequence
gattaatttttagtcacaacttagt

SEQ ID NO: 120605 - DNA, 25 bp, Probe sequence
tgtatcacttccttattatgtatta

SEQ ID NO: 120606 - DNA, 25 bp, Probe sequence
tcaccctggttctaactattatttt

SEQ ID NO: 120607 - DNA, 25 bp, Probe sequence
tattatgtacttttaaattctgtgt

SEQ ID NO: 120608 - DNA, 25 bp, Probe sequence
attacctcctctatctatctaatta

SEQ ID NO: 120609 - DNA, 25 bp, Probe sequence
acctcctctatctatctaattataa

SEQ ID NO: 120610 - DNA, 25 bp, Probe sequence
aattacctcctctatctatctaatt

SEQ ID NO: 120611 - DNA, 25 bp, Probe sequence
ctctatctatctaattataaattta

SEQ ID NO: 120612 - DNA, 25 bp, Probe sequence
ctcctctatctatctaattataaat

SEQ ID NO: 120613 - DNA, 25 bp, Probe sequence
cctcctctatctatctaattataaa

SEQ ID NO: 120614 - DNA, 25 bp, Probe sequence
cctctatctatctaattataaattt

SEQ ID NO: 120615 - DNA, 25 bp, Probe sequence
gaaatggaagtaattaacactgaaa

SEQ ID NO: 120616 - DNA, 25 bp, Probe sequence
ggattgaaatggaagtaattaacac

SEQ ID NO: 120617 - DNA, 25 bp, Probe sequence
tcctctatctatctaattataaatt

SEQ ID NO: 120618 - DNA, 25 bp, Probe sequence
tacctcctctatctatctaattata

SEQ ID NO: 120619 - DNA, 25 bp, Probe sequence
tagtctataaaggattgaaatggaa

SEQ ID NO: 120620 - DNA, 25 bp, Probe sequence
tatctaattataaatttagtctata

SEQ ID NO: 120621 - DNA, 25 bp, Probe sequence
ttagtctataaaggattgaaatgga

SEQ ID NO: 120622 - DNA, 25 bp, Probe sequence
ttacctcctctatctatctaattat

SEQ ID NO: 120623 - DNA, 25 bp, Probe sequence
atatggttagctaactatgcaatga

SEQ ID NO: 120624 - DNA, 25 bp, Probe sequence
actatgatgtcattttgatgtctat

SEQ ID NO: 120625 - DNA, 25 bp, Probe sequence
aacacaatttttatcataaagtgtg

SEQ ID NO: 120626 - DNA, 25 bp, Probe sequence
gcataatttatgaaaacgtttaaca

SEQ ID NO: 120627 - DNA, 25 bp, Probe sequence
gaaataatgattttgcataatttat

SEQ ID NO: 120628 - DNA, 25 bp, Probe sequence
gatgtctatatggttagctaactat

SEQ ID NO: 120629 - DNA, 25 bp, Probe sequence
gatgtcattttgatgtctatatggt

SEQ ID NO: 120630 - DNA, 25 bp, Probe sequence
gtcattttgatgtctatatggttag

SEQ ID NO: 120631 - DNA, 25 bp, Probe sequence
gtctatatggttagctaactatgca

SEQ ID NO: 120632 - DNA, 25 bp, Probe sequence
tccttcttctatcatttcatttttt

SEQ ID NO: 120633 - DNA, 25 bp, Probe sequence
tatgatgtcattttgatgtctatat

SEQ ID NO: 120634 - DNA, 25 bp, Probe sequence
tttgatgtctatatggttagctaac

SEQ ID NO: 120635 - DNA, 25 bp, Probe sequence
ttaatttaacacaatttttatcata

SEQ ID NO: 120636 - DNA, 25 bp, Probe sequence
ttcattttttattactaagttatct

SEQ ID NO: 120637 - DNA, 25 bp, Probe sequence
ttgcacttgaaaatactatgatgtc

SEQ ID NO: 120638 - DNA, 25 bp, Probe sequence
attaatatcatgaattccgttactt

SEQ ID NO: 120639 - DNA, 25 bp, Probe sequence
atatcatgaattccgttactttatt

SEQ ID NO: 120640 - DNA, 25 bp, Probe sequence
ataaaatgctgattaagtacctacc

SEQ ID NO: 120641 - DNA, 25 bp, Probe sequence
atcatgaattccgttactttattta

SEQ ID NO: 120642 - DNA, 25 bp, Probe sequence
aaaatgctgattaagtacctaccac

SEQ ID NO: 120643 - DNA, 25 bp, Probe sequence
aatatcatgaattccgttactttat

SEQ ID NO: 120644 - DNA, 25 bp, Probe sequence
catgaattccgttactttatttata

SEQ ID NO: 120645 - DNA, 25 bp, Probe sequence
tcatgaattccgttactttatttat

SEQ ID NO: 120646 - DNA, 25 bp, Probe sequence
taatatcatgaattccgttacttta

SEQ ID NO: 120647 - DNA, 25 bp, Probe sequence
taaaatgctgattaagtacctacca

SEQ ID NO: 120648 - DNA, 25 bp, Probe sequence
tatcatgaattccgttactttattt

SEQ ID NO: 120649 - DNA, 25 bp, Probe sequence
tataaaatgctgattaagtacctac

SEQ ID NO: 120650 - DNA, 25 bp, Probe sequence
ttaatatcatgaattccgttacttt

SEQ ID NO: 120651 - DNA, 25 bp, Probe sequence
attttcaatgacagacaccattttt

SEQ ID NO: 120652 - DNA, 25 bp, Probe sequence
atattctctattttcaatgacagac

SEQ ID NO: 120653 - DNA, 25 bp, Probe sequence
atacaactatattctctattttcaa

SEQ ID NO: 120654 - DNA, 25 bp, Probe sequence
acacatgatttgaatattatgtttg

SEQ ID NO: 120655 - DNA, 25 bp, Probe sequence
acaactatattctctattttcaatg

SEQ ID NO: 120656 - DNA, 25 bp, Probe sequence
aaatgtgttgacctttatatttatt

SEQ ID NO: 120657 - DNA, 25 bp, Probe sequence
aactatattctctattttcaatgac

SEQ ID NO: 120658 - DNA, 25 bp, Probe sequence
aatattataaaatgtgttgaccttt

SEQ ID NO: 120659 - DNA, 25 bp, Probe sequence
ctatattctctattttcaatgacag

SEQ ID NO: 120660 - DNA, 25 bp, Probe sequence
ctctattttcaatgacagacaccat

SEQ ID NO: 120661 - DNA, 25 bp, Probe sequence
gacagacaccatttttaatattata

SEQ ID NO: 120662 - DNA, 25 bp, Probe sequence
tattatgtttgatgtcctattaaaa

SEQ ID NO: 120663 - DNA, 25 bp, Probe sequence
tttgatgtcctattaaaacagttaa

SEQ ID NO: 120664 - DNA, 25 bp, Probe sequence
ttcaatgacagacaccatttttaat

SEQ ID NO: 120665 - DNA, 25 bp, Probe sequence
ttctctattttcaatgacagacacc

SEQ ID NO: 120666 - DNA, 25 bp, Probe sequence
attgcatcgcaaacgatttttcagt

SEQ ID NO: 120667 - DNA, 25 bp, Probe sequence
atattcaaatgctattgcatcgcaa

SEQ ID NO: 120668 - DNA, 25 bp, Probe sequence
atattataacatttttgaccctaag

SEQ ID NO: 120669 - DNA, 25 bp, Probe sequence
aatgctattgcatcgcaaacgattt

SEQ ID NO: 120670 - DNA, 25 bp, Probe sequence
cacccgcatgatcaaaatttaggag

SEQ ID NO: 120671 - DNA, 25 bp, Probe sequence
catcgcaaacgatttttcagtaaaa

SEQ ID NO: 120672 - DNA, 25 bp, Probe sequence
ctaaacacccgcatgatcaaaattt

SEQ ID NO: 120673 - DNA, 25 bp, Probe sequence
gcaaccttgtaaataagtgttactg

SEQ ID NO: 120674 - DNA, 25 bp, Probe sequence
tgaaaccttttacaattctatacgt

SEQ ID NO: 120675 - DNA, 25 bp, Probe sequence
gagcggtttctaaacacccgcatga

SEQ ID NO: 120676 - DNA, 25 bp, Probe sequence
gaccctaagatttgaatgaaacctt

SEQ ID NO: 120677 - DNA, 25 bp, Probe sequence
gtttctaaacacccgcatgatcaaa

SEQ ID NO: 120678 - DNA, 25 bp, Probe sequence
gtaagttatttattgagcggtttct

SEQ ID NO: 120679 - DNA, 25 bp, Probe sequence
taacatttttgaccctaagatttga

SEQ ID NO: 120680 - DNA, 25 bp, Probe sequence
tacttcaaaatattgcaaccttgta

SEQ ID NO: 120681 - DNA, 25 bp, Probe sequence
atattacagtactacgtattagaaa

SEQ ID NO: 120682 - DNA, 25 bp, Probe sequence
atcagcgagtattttaaacacgtgt

SEQ ID NO: 120683 - DNA, 25 bp, Probe sequence
atctttgaatcagcgagtattttaa

SEQ ID NO: 120684 - DNA, 25 bp, Probe sequence
atcatctttgaatcagcgagtattt

SEQ ID NO: 120685 - DNA, 25 bp, Probe sequence
aaatcatctttgaatcagcgagtat

SEQ ID NO: 120686 - DNA, 25 bp, Probe sequence
aatcatctttgaatcagcgagtatt

SEQ ID NO: 120687 - DNA, 25 bp, Probe sequence
cagcgagtattttaaacacgtgtta

SEQ ID NO: 120688 - DNA, 25 bp, Probe sequence
gaatcagcgagtattttaaacacgt

SEQ ID NO: 120689 - DNA, 25 bp, Probe sequence
gaaaatcatctttgaatcagcgagt

SEQ ID NO: 120690 - DNA, 25 bp, Probe sequence
gatgattttttaggaagtatattac

SEQ ID NO: 120691 - DNA, 25 bp, Probe sequence
gtatattacagtactacgtattaga

SEQ ID NO: 120692 - DNA, 25 bp, Probe sequence
ggaagtatattacagtactacgtat

SEQ ID NO: 120693 - DNA, 25 bp, Probe sequence
tcatctttgaatcagcgagtatttt

SEQ ID NO: 120694 - DNA, 25 bp, Probe sequence
tcagcgagtattttaaacacgtgtt

SEQ ID NO: 120695 - DNA, 25 bp, Probe sequence
ttacagtactacgtattagaaaatc

SEQ ID NO: 120696 - DNA, 25 bp, Probe sequence
aggagcaccgactgatgtgatgtca

SEQ ID NO: 120697 - DNA, 25 bp, Probe sequence
agcaccgactgatgtgatgtcaatc

SEQ ID NO: 120698 - DNA, 25 bp, Probe sequence
actgatgtgatgtcaatcggtgctc

SEQ ID NO: 120699 - DNA, 25 bp, Probe sequence
aaggagcaccgactgatgtgatgtc

SEQ ID NO: 120700 - DNA, 25 bp, Probe sequence
cggtgctcctctatttatcaaagaa

SEQ ID NO: 120701 - DNA, 25 bp, Probe sequence
cgactgatgtgatgtcaatcggtgc

SEQ ID NO: 120702 - DNA, 25 bp, Probe sequence
gctcctctatttatcaaagaaacaa

SEQ ID NO: 120703 - DNA, 25 bp, Probe sequence
gcaccgactgatgtgatgtcaatcg

SEQ ID NO: 120704 - DNA, 25 bp, Probe sequence
gagcaccgactgatgtgatgtcaat

SEQ ID NO: 120705 - DNA, 25 bp, Probe sequence
gatgtgatgtcaatcggtgctcctc

SEQ ID NO: 120706 - DNA, 25 bp, Probe sequence
gtgctcctctatttatcaaagaaac

SEQ ID NO: 120707 - DNA, 25 bp, Probe sequence
ggtgctcctctatttatcaaagaaa

SEQ ID NO: 120708 - DNA, 25 bp, Probe sequence
ggagcaccgactgatgtgatgtcaa

SEQ ID NO: 120709 - DNA, 25 bp, Probe sequence
tgatgtgatgtcaatcggtgctcct

SEQ ID NO: 120710 - DNA, 25 bp, Probe sequence
tcggtgctcctctatttatcaaaga

SEQ ID NO: 120711 - DNA, 25 bp, Probe sequence
ataatgacacataagaatcggttta

SEQ ID NO: 120712 - DNA, 25 bp, Probe sequence
accaatccctatgttcatttaaaat

SEQ ID NO: 120713 - DNA, 25 bp, Probe sequence
aatccctatgttcatttaaaataat

SEQ ID NO: 120714 - DNA, 25 bp, Probe sequence
cataagaatcggtttatatttttgt

SEQ ID NO: 120715 - DNA, 25 bp, Probe sequence
gcgacttgtatgatttcaatttaat

SEQ ID NO: 120716 - DNA, 25 bp, Probe sequence
gaacaatttatttatgctccagaat

SEQ ID NO: 120717 - DNA, 25 bp, Probe sequence
gagtaataaaaaaccaatccctatg

SEQ ID NO: 120718 - DNA, 25 bp, Probe sequence
gttgaacaatttatttatgctccag

SEQ ID NO: 120719 - DNA, 25 bp, Probe sequence
gtatgatttcaatttaattctcaat

SEQ ID NO: 120720 - DNA, 25 bp, Probe sequence
gtagcgacttgtatgatttcaattt

SEQ ID NO: 120721 - DNA, 25 bp, Probe sequence
gtgttgaacaatttatttatgctcc

SEQ ID NO: 120722 - DNA, 25 bp, Probe sequence
taaaaaaccaatccctatgttcatt

SEQ ID NO: 120723 - DNA, 25 bp, Probe sequence
tatgctccagaatataataacacaa

SEQ ID NO: 120724 - DNA, 25 bp, Probe sequence
tattgtagcgacttgtatgatttca

SEQ ID NO: 120725 - DNA, 25 bp, Probe sequence
ttttgtttaatattgtagcgacttg

SEQ ID NO: 120726 - DNA, 25 bp, Probe sequence
attcatttcactcaatttcatttaa

SEQ ID NO: 120727 - DNA, 25 bp, Probe sequence
atttcactcaatttcatttaaatta

SEQ ID NO: 120728 - DNA, 25 bp, Probe sequence
atattcatttcactcaatttcattt

SEQ ID NO: 120729 - DNA, 25 bp, Probe sequence
atatttaaaatattcatttcactca

SEQ ID NO: 120730 - DNA, 25 bp, Probe sequence
aaatattcatttcactcaatttcat

SEQ ID NO: 120731 - DNA, 25 bp, Probe sequence
aaaatattcatttcactcaatttca

SEQ ID NO: 120732 - DNA, 25 bp, Probe sequence
aatattcatttcactcaatttcatt

SEQ ID NO: 120733 - DNA, 25 bp, Probe sequence
aatttttagtccaaactataatgct

SEQ ID NO: 120734 - DNA, 25 bp, Probe sequence
gtccaaactataatgctatatttaa

SEQ ID NO: 120735 - DNA, 25 bp, Probe sequence
tcatttcactcaatttcatttaaat

SEQ ID NO: 120736 - DNA, 25 bp, Probe sequence
taaaatattcatttcactcaatttc

SEQ ID NO: 120737 - DNA, 25 bp, Probe sequence
tagtccaaactataatgctatattt

SEQ ID NO: 120738 - DNA, 25 bp, Probe sequence
tattcatttcactcaatttcattta

SEQ ID NO: 120739 - DNA, 25 bp, Probe sequence
ttagtccaaactataatgctatatt

SEQ ID NO: 120740 - DNA, 25 bp, Probe sequence
ttcatttcactcaatttcatttaaa

SEQ ID NO: 120741 - DNA, 25 bp, Probe sequence
attattttatcctttggttatgaat

SEQ ID NO: 120742 - DNA, 25 bp, Probe sequence
atttcacaattattttatcctttgg

SEQ ID NO: 120743 - DNA, 25 bp, Probe sequence
atataattctttaaactctattgat

SEQ ID NO: 120744 - DNA, 25 bp, Probe sequence
atatgtatctatcaaaattcgtctt

SEQ ID NO: 120745 - DNA, 25 bp, Probe sequence
agttgtaactgtactattttgtagt

SEQ ID NO: 120746 - DNA, 25 bp, Probe sequence
accttgcatcgatagaaatagtctt

SEQ ID NO: 120747 - DNA, 25 bp, Probe sequence
aagactatttctaccttgcatcgat

SEQ ID NO: 120748 - DNA, 25 bp, Probe sequence
aattcgtcttatttattcactctga

SEQ ID NO: 120749 - DNA, 25 bp, Probe sequence
ctccatttgatttatagttgtatta

SEQ ID NO: 120750 - DNA, 25 bp, Probe sequence
gcaacactcctctttcatttgtgaa

SEQ ID NO: 120751 - DNA, 25 bp, Probe sequence
gaaatagtctttttatacttaattg

SEQ ID NO: 120752 - DNA, 25 bp, Probe sequence
tatttcttatactccatttgattta

SEQ ID NO: 120753 - DNA, 25 bp, Probe sequence
tattatgtgcaattataccactata

SEQ ID NO: 120754 - DNA, 25 bp, Probe sequence
ttataccactatatttatttcttat

SEQ ID NO: 120755 - DNA, 25 bp, Probe sequence
ttcactctgacatatccaaatacgc

SEQ ID NO: 120756 - DNA, 25 bp, Probe sequence
atagctgcttgataaaacatacgaa

SEQ ID NO: 120757 - DNA, 25 bp, Probe sequence
acacgtcacagaattgacaccgtat

SEQ ID NO: 120758 - DNA, 25 bp, Probe sequence
aaaaatcacaaatcatcgttaaatt

SEQ ID NO: 120759 - DNA, 25 bp, Probe sequence
aatggctcgcattgtattatgttta

SEQ ID NO: 120760 - DNA, 25 bp, Probe sequence
caattttcttcaaacattccaactt

SEQ ID NO: 120761 - DNA, 25 bp, Probe sequence
catagatcgttaaatggctcgcatt

SEQ ID NO: 120762 - DNA, 25 bp, Probe sequence
gaattcatacaatatcgatgtccat

SEQ ID NO: 120763 - DNA, 25 bp, Probe sequence
gaaatgcttgcttgttaaaacgaat

SEQ ID NO: 120764 - DNA, 25 bp, Probe sequence
gacaccgtataatagccaattggga

SEQ ID NO: 120765 - DNA, 25 bp, Probe sequence
gatgtccatttaaacatagatcgtt

SEQ ID NO: 120766 - DNA, 25 bp, Probe sequence
gtttaaattttatcatagctgcttg

SEQ ID NO: 120767 - DNA, 25 bp, Probe sequence
gtttgttcacacacgtcacagaatt

SEQ ID NO: 120768 - DNA, 25 bp, Probe sequence
gtcacagtttgttcacacacgtcac

SEQ ID NO: 120769 - DNA, 25 bp, Probe sequence
ggttcgttcacatagaaatgcttgc

SEQ ID NO: 120770 - DNA, 25 bp, Probe sequence
tcccctttggttcgttcacatagaa

SEQ ID NO: 120771 - DNA, 25 bp, Probe sequence
attctcgtctctctaattacttaaa

SEQ ID NO: 120772 - DNA, 25 bp, Probe sequence
atcgtactgatggaaagtttttact

SEQ ID NO: 120773 - DNA, 25 bp, Probe sequence
agtttttactttttatctgtcagat

SEQ ID NO: 120774 - DNA, 25 bp, Probe sequence
aaatgattctcgtctctctaattac

SEQ ID NO: 120775 - DNA, 25 bp, Probe sequence
aacgcataagaagataactctactt

SEQ ID NO: 120776 - DNA, 25 bp, Probe sequence
caaaattacgttatagatgcttttt

SEQ ID NO: 120777 - DNA, 25 bp, Probe sequence
ctctacttcttcaaaattacgttat

SEQ ID NO: 120778 - DNA, 25 bp, Probe sequence
gataactctacttcttcaaaattac

SEQ ID NO: 120779 - DNA, 25 bp, Probe sequence
tgaactgacgaaatttacaaaatga

SEQ ID NO: 120780 - DNA, 25 bp, Probe sequence
tgcacttaaagttttgaactgacga

SEQ ID NO: 120781 - DNA, 25 bp, Probe sequence
tcgtctctctaattacttaaaacgg

SEQ ID NO: 120782 - DNA, 25 bp, Probe sequence
tctcgtctctctaattacttaaaac

SEQ ID NO: 120783 - DNA, 25 bp, Probe sequence
taaaaaagcatctaaaacgcataag

SEQ ID NO: 120784 - DNA, 25 bp, Probe sequence
tacaaaatgattctcgtctctctaa

SEQ ID NO: 120785 - DNA, 25 bp, Probe sequence
tatctgtcagattttttgaatttga

SEQ ID NO: 120786 - DNA, 25 bp, Probe sequence
atagactcctccatttttcaaaaat

SEQ ID NO: 120787 - DNA, 25 bp, Probe sequence
attactaattttagtcacgcattag

SEQ ID NO: 120788 - DNA, 25 bp, Probe sequence
attttagtcacgcattagaaacact

SEQ ID NO: 120789 - DNA, 25 bp, Probe sequence
atcatgagaacttaattattactaa

SEQ ID NO: 120790 - DNA, 25 bp, Probe sequence
aaatacctattatcatgagaactta

SEQ ID NO: 120791 - DNA, 25 bp, Probe sequence
aaaatacctattatcatgagaactt

SEQ ID NO: 120792 - DNA, 25 bp, Probe sequence
aatacctattatcatgagaacttaa

SEQ ID NO: 120793 - DNA, 25 bp, Probe sequence
aattttagtcacgcattagaaacac

SEQ ID NO: 120794 - DNA, 25 bp, Probe sequence
tactaattttagtcacgcattagaa

SEQ ID NO: 120795 - DNA, 25 bp, Probe sequence
tacctattatcatgagaacttaatt

SEQ ID NO: 120796 - DNA, 25 bp, Probe sequence
tagactcctccatttttcaaaaata

SEQ ID NO: 120797 - DNA, 25 bp, Probe sequence
tatcatgagaacttaattattacta

SEQ ID NO: 120798 - DNA, 25 bp, Probe sequence
tatagactcctccatttttcaaaaa

SEQ ID NO: 120799 - DNA, 25 bp, Probe sequence
ttattactaattttagtcacgcatt

SEQ ID NO: 120800 - DNA, 25 bp, Probe sequence
ttatagactcctccatttttcaaaa

SEQ ID NO: 120801 - DNA, 25 bp, Probe sequence
attgctcactcgaggggtttaccgc

SEQ ID NO: 120802 - DNA, 25 bp, Probe sequence
ataaaagctacgtcactgtggcact

SEQ ID NO: 120803 - DNA, 25 bp, Probe sequence
ataagccatgttctgttccatcgta

SEQ ID NO: 120804 - DNA, 25 bp, Probe sequence
atcgctgatacattaacgcatccgc

SEQ ID NO: 120805 - DNA, 25 bp, Probe sequence
gcgaagtgtgtctcgtttatacgtt

SEQ ID NO: 120806 - DNA, 25 bp, Probe sequence
gcgttccaccttttatatttctata

SEQ ID NO: 120807 - DNA, 25 bp, Probe sequence
gctcctaccaaatttggattgctca

SEQ ID NO: 120808 - DNA, 25 bp, Probe sequence
gaaaaaagctctccatcatctagga

SEQ ID NO: 120809 - DNA, 25 bp, Probe sequence
gtgataaccatctgtctacaccact

SEQ ID NO: 120810 - DNA, 25 bp, Probe sequence
ggtattttattcttagcttgtgttt

SEQ ID NO: 120811 - DNA, 25 bp, Probe sequence
tgttccatcgtactcatcacgtgca

SEQ ID NO: 120812 - DNA, 25 bp, Probe sequence
tgcactagtcacactggtactcagg

SEQ ID NO: 120813 - DNA, 25 bp, Probe sequence
tctacaccacttcatttcgcgaagt

SEQ ID NO: 120814 - DNA, 25 bp, Probe sequence
taacgcatccgcttactattttaaa

SEQ ID NO: 120815 - DNA, 25 bp, Probe sequence
ttccgttaaacaagtgctcctacca

SEQ ID NO: 120816 - DNA, 25 bp, Probe sequence
attataacatagtcattattagtaa

SEQ ID NO: 120817 - DNA, 25 bp, Probe sequence
ataacatagtcattattagtaagac

SEQ ID NO: 120818 - DNA, 25 bp, Probe sequence
agtcattattagtaagacagttaaa

SEQ ID NO: 120819 - DNA, 25 bp, Probe sequence
acatagtcattattagtaagacagt

SEQ ID NO: 120820 - DNA, 25 bp, Probe sequence
aaattataacatagtcattattagt

SEQ ID NO: 120821 - DNA, 25 bp, Probe sequence
aacatagtcattattagtaagacag

SEQ ID NO: 120822 - DNA, 25 bp, Probe sequence
aattataacatagtcattattagta

SEQ ID NO: 120823 - DNA, 25 bp, Probe sequence
catagtcattattagtaagacagtt

SEQ ID NO: 120824 - DNA, 25 bp, Probe sequence
gtcattattagtaagacagttaaac

SEQ ID NO: 120825 - DNA, 25 bp, Probe sequence
taacatagtcattattagtaagaca

SEQ ID NO: 120826 - DNA, 25 bp, Probe sequence
tagtaagacagttaaacttttgtat

SEQ ID NO: 120827 - DNA, 25 bp, Probe sequence
tagtcattattagtaagacagttaa

SEQ ID NO: 120828 - DNA, 25 bp, Probe sequence
tataacatagtcattattagtaaga

SEQ ID NO: 120829 - DNA, 25 bp, Probe sequence
tattagtaagacagttaaacttttg

SEQ ID NO: 120830 - DNA, 25 bp, Probe sequence
ttataacatagtcattattagtaag

SEQ ID NO: 120831 - DNA, 25 bp, Probe sequence
attccaacattaacggtaaatgtat

SEQ ID NO: 120832 - DNA, 25 bp, Probe sequence
attactgatcatgatttgactttta

SEQ ID NO: 120833 - DNA, 25 bp, Probe sequence
attattgtgttaatgctgaaatcac

SEQ ID NO: 120834 - DNA, 25 bp, Probe sequence
aaattgtgtgtaaaattccaacatt

SEQ ID NO: 120835 - DNA, 25 bp, Probe sequence
aaattactgatcatgatttgacttt

SEQ ID NO: 120836 - DNA, 25 bp, Probe sequence
cttgcctcaaaaataaaaattactg

SEQ ID NO: 120837 - DNA, 25 bp, Probe sequence
gctgaaatcacgttaaaataagctt

SEQ ID NO: 120838 - DNA, 25 bp, Probe sequence
gatcatgatttgacttttataacaa

SEQ ID NO: 120839 - DNA, 25 bp, Probe sequence
gatttgacttttataacaaaattca

SEQ ID NO: 120840 - DNA, 25 bp, Probe sequence
gttaatgctgaaatcacgttaaaat

SEQ ID NO: 120841 - DNA, 25 bp, Probe sequence
gtgttaatgctgaaatcacgttaaa

SEQ ID NO: 120842 - DNA, 25 bp, Probe sequence
gtgtgtaaaattccaacattaacgg

SEQ ID NO: 120843 - DNA, 25 bp, Probe sequence
tataagcaaaacttttcaattaatt

SEQ ID NO: 120844 - DNA, 25 bp, Probe sequence
tattcatttttataagcaaaacttt

SEQ ID NO: 120845 - DNA, 25 bp, Probe sequence
ttgtgttaatgctgaaatcacgtta

SEQ ID NO: 120846 - DNA, 25 bp, Probe sequence
aggttcttcatcttttatggtggga

SEQ ID NO: 120847 - DNA, 25 bp, Probe sequence
agacgttgtaatgacacgacaccta

SEQ ID NO: 120848 - DNA, 25 bp, Probe sequence
aagaaatccacctacgattcgaaat

SEQ ID NO: 120849 - DNA, 25 bp, Probe sequence
aatcctcagttataccatatttatg

SEQ ID NO: 120850 - DNA, 25 bp, Probe sequence
aatcagtcattcacatacattttga

SEQ ID NO: 120851 - DNA, 25 bp, Probe sequence
gacacgacacctaacataaatacaa

SEQ ID NO: 120852 - DNA, 25 bp, Probe sequence
gattatattttctcatagtcatctt

SEQ ID NO: 120853 - DNA, 25 bp, Probe sequence
gtttatcaattccctgtgtacgtta

SEQ ID NO: 120854 - DNA, 25 bp, Probe sequence
gtttttcatattcacatctttagct

SEQ ID NO: 120855 - DNA, 25 bp, Probe sequence
gtttgcaacatattttcacaatcat

SEQ ID NO: 120856 - DNA, 25 bp, Probe sequence
gtattcatacgctaatgctatatta

SEQ ID NO: 120857 - DNA, 25 bp, Probe sequence
gtagctgaggatttttttaggttct

SEQ ID NO: 120858 - DNA, 25 bp, Probe sequence
gtcatcttagacgctgttttaaatt

SEQ ID NO: 120859 - DNA, 25 bp, Probe sequence
tgaataagtggttgttcccattttt

SEQ ID NO: 120860 - DNA, 25 bp, Probe sequence
tccactcaacataaaatcctcagtt

SEQ ID NO: 120861 - DNA, 25 bp, Probe sequence
atcagatgaactatttattttccaa

SEQ ID NO: 120862 - DNA, 25 bp, Probe sequence
acaaaagtttgttcatgattaatat

SEQ ID NO: 120863 - DNA, 25 bp, Probe sequence
aagccgttatcaatcttcattttgc

SEQ ID NO: 120864 - DNA, 25 bp, Probe sequence
aatcgcccagctattaatataggct

SEQ ID NO: 120865 - DNA, 25 bp, Probe sequence
aatataggctggacgattcttttta

SEQ ID NO: 120866 - DNA, 25 bp, Probe sequence
caagcataaatcgcccagctattaa

SEQ ID NO: 120867 - DNA, 25 bp, Probe sequence
gcataaatcgcccagctattaatat

SEQ ID NO: 120868 - DNA, 25 bp, Probe sequence
gattttaacaatgaactttatggat

SEQ ID NO: 120869 - DNA, 25 bp, Probe sequence
gttcatgattaatataagccgttat

SEQ ID NO: 120870 - DNA, 25 bp, Probe sequence
gttatcaatcttcattttgcaagca

SEQ ID NO: 120871 - DNA, 25 bp, Probe sequence
ggacgattctttttattatcataat

SEQ ID NO: 120872 - DNA, 25 bp, Probe sequence
taggctggacgattctttttattat

SEQ ID NO: 120873 - DNA, 25 bp, Probe sequence
tataaatcattttctttaattttcg

SEQ ID NO: 120874 - DNA, 25 bp, Probe sequence
tttgcaagcataaatcgcccagcta

SEQ ID NO: 120875 - DNA, 25 bp, Probe sequence
ttttcgactaaaatgcttaatatat

SEQ ID NO: 120876 - DNA, 25 bp, Probe sequence
attttttcgttatacaatactcatt

SEQ ID NO: 120877 - DNA, 25 bp, Probe sequence
aacaaaatccgctttcaagttctag

SEQ ID NO: 120878 - DNA, 25 bp, Probe sequence
aatccgctttcaagttctagaacta

SEQ ID NO: 120879 - DNA, 25 bp, Probe sequence
caatcatcagtttcagacaaaatat

SEQ ID NO: 120880 - DNA, 25 bp, Probe sequence
cagaacatagcacatgtcatgtcac

SEQ ID NO: 120881 - DNA, 25 bp, Probe sequence
gacaatacaatcatcagtttcagac

SEQ ID NO: 120882 - DNA, 25 bp, Probe sequence
gatttacgcacagatttgaacatta

SEQ ID NO: 120883 - DNA, 25 bp, Probe sequence
gtatgaaggtcgttttttgtgctaa

SEQ ID NO: 120884 - DNA, 25 bp, Probe sequence
gtcatgtcacaagaattttactttg

SEQ ID NO: 120885 - DNA, 25 bp, Probe sequence
ggtcgttttttgtgctaacattcaa

SEQ ID NO: 120886 - DNA, 25 bp, Probe sequence
ggtaatgatttacgcacagatttga

SEQ ID NO: 120887 - DNA, 25 bp, Probe sequence
tgacgaccaaacaaaaattcttgta

SEQ ID NO: 120888 - DNA, 25 bp, Probe sequence
taaagcctcaatattattagtatga

SEQ ID NO: 120889 - DNA, 25 bp, Probe sequence
tacaatactcattcattttaacaaa

SEQ ID NO: 120890 - DNA, 25 bp, Probe sequence
tttgtgctaacattcaagtttaatt

SEQ ID NO: 120891 - DNA, 25 bp, Probe sequence
attcattggtctatgtttttaatct

SEQ ID NO: 120892 - DNA, 25 bp, Probe sequence
atgtttttaatcttaatcaaatcca

SEQ ID NO: 120893 - DNA, 25 bp, Probe sequence
aacaggtgttgtatatataatcatt

SEQ ID NO: 120894 - DNA, 25 bp, Probe sequence
aataatataatttcatgcgatgcaa

SEQ ID NO: 120895 - DNA, 25 bp, Probe sequence
aatttcatgcgatgcaattcattgg

SEQ ID NO: 120896 - DNA, 25 bp, Probe sequence
catttatctagttctacttacttta

SEQ ID NO: 120897 - DNA, 25 bp, Probe sequence
ctcgatgcgtagataattgtttaaa

SEQ ID NO: 120898 - DNA, 25 bp, Probe sequence
ctctttctattattctcgatgcgta

SEQ ID NO: 120899 - DNA, 25 bp, Probe sequence
gcgatgcaattcattggtctatgtt

SEQ ID NO: 120900 - DNA, 25 bp, Probe sequence
tctatttctctttctattattctcg

SEQ ID NO: 120901 - DNA, 25 bp, Probe sequence
tctattattctcgatgcgtagataa

SEQ ID NO: 120902 - DNA, 25 bp, Probe sequence
taatcaaatccaaataaagcatata

SEQ ID NO: 120903 - DNA, 25 bp, Probe sequence
tataatcatttatctagttctactt

SEQ ID NO: 120904 - DNA, 25 bp, Probe sequence
tttctctttctattattctcgatgc

SEQ ID NO: 120905 - DNA, 25 bp, Probe sequence
tttctttctatttctctttctatta

SEQ ID NO: 120906 - DNA, 25 bp, Probe sequence
ataaatgtaatgcattcctaactaa

SEQ ID NO: 120907 - DNA, 25 bp, Probe sequence
atgacaagttgtttattttagaagt

SEQ ID NO: 120908 - DNA, 25 bp, Probe sequence
agtgcaatctactgactctagctaa

SEQ ID NO: 120909 - DNA, 25 bp, Probe sequence
aatctactgactctagctaaactag

SEQ ID NO: 120910 - DNA, 25 bp, Probe sequence
ctgactctagctaaactagatgaca

SEQ ID NO: 120911 - DNA, 25 bp, Probe sequence
gcatgtttagtgcaatctactgact

SEQ ID NO: 120912 - DNA, 25 bp, Probe sequence
gcaatctactgactctagctaaact

SEQ ID NO: 120913 - DNA, 25 bp, Probe sequence
gaagtctcatgcatgtttagtgcaa

SEQ ID NO: 120914 - DNA, 25 bp, Probe sequence
gaagtttaataattcagtttatata

SEQ ID NO: 120915 - DNA, 25 bp, Probe sequence
gtctcatgcatgtttagtgcaatct

SEQ ID NO: 120916 - DNA, 25 bp, Probe sequence
gtgcaatctactgactctagctaaa

SEQ ID NO: 120917 - DNA, 25 bp, Probe sequence
tgtttagtgcaatctactgactcta

SEQ ID NO: 120918 - DNA, 25 bp, Probe sequence
tagtgcaatctactgactctagcta

SEQ ID NO: 120919 - DNA, 25 bp, Probe sequence
tttgaagtctcatgcatgtttagtg

SEQ ID NO: 120920 - DNA, 25 bp, Probe sequence
tttagtgcaatctactgactctagc

SEQ ID NO: 120921 - DNA, 25 bp, Probe sequence
agctagttaataagtgtctaattta

SEQ ID NO: 120922 - DNA, 25 bp, Probe sequence
acacaaaatgtgattagctagttaa

SEQ ID NO: 120923 - DNA, 25 bp, Probe sequence
aaaaactagcaatcacacaaaatgt

SEQ ID NO: 120924 - DNA, 25 bp, Probe sequence
aaaaaaactagcaatcacacaaaat

SEQ ID NO: 120925 - DNA, 25 bp, Probe sequence
aaaaaactagcaatcacacaaaatg

SEQ ID NO: 120926 - DNA, 25 bp, Probe sequence
aaaactagcaatcacacaaaatgtg

SEQ ID NO: 120927 - DNA, 25 bp, Probe sequence
cacaaaatgtgattagctagttaat

SEQ ID NO: 120928 - DNA, 25 bp, Probe sequence
gctagttaataagtgtctaatttaa

SEQ ID NO: 120929 - DNA, 25 bp, Probe sequence
gattagctagttaataagtgtctaa

SEQ ID NO: 120930 - DNA, 25 bp, Probe sequence
gtgattagctagttaataagtgtct

SEQ ID NO: 120931 - DNA, 25 bp, Probe sequence
tgattagctagttaataagtgtcta

SEQ ID NO: 120932 - DNA, 25 bp, Probe sequence
taataagtgtctaatttaagttaat

SEQ ID NO: 120933 - DNA, 25 bp, Probe sequence
taagtgtctaatttaagttaattgt

SEQ ID NO: 120934 - DNA, 25 bp, Probe sequence
tagctagttaataagtgtctaattt

SEQ ID NO: 120935 - DNA, 25 bp, Probe sequence
ttaagttaattgttaatctataaga

SEQ ID NO: 120936 - DNA, 25 bp, Probe sequence
atattttactgtcatttgccgtttt

SEQ ID NO: 120937 - DNA, 25 bp, Probe sequence
actgtcatttgccgtttttatcaaa

SEQ ID NO: 120938 - DNA, 25 bp, Probe sequence
actcactctcctttataaatatttt

SEQ ID NO: 120939 - DNA, 25 bp, Probe sequence
aaactcactctcctttataaatatt

SEQ ID NO: 120940 - DNA, 25 bp, Probe sequence
aactcactctcctttataaatattt

SEQ ID NO: 120941 - DNA, 25 bp, Probe sequence
aatattttactgtcatttgccgttt

SEQ ID NO: 120942 - DNA, 25 bp, Probe sequence
cactctcctttataaatattttact

SEQ ID NO: 120943 - DNA, 25 bp, Probe sequence
ctcactctcctttataaatatttta

SEQ ID NO: 120944 - DNA, 25 bp, Probe sequence
tcactctcctttataaatattttac

SEQ ID NO: 120945 - DNA, 25 bp, Probe sequence
taaactcactctcctttataaatat

SEQ ID NO: 120946 - DNA, 25 bp, Probe sequence
tactgtcatttgccgtttttatcaa

SEQ ID NO: 120947 - DNA, 25 bp, Probe sequence
tattttactgtcatttgccgttttt

SEQ ID NO: 120948 - DNA, 25 bp, Probe sequence
tttactgtcatttgccgtttttatc

SEQ ID NO: 120949 - DNA, 25 bp, Probe sequence
ttttactgtcatttgccgtttttat

SEQ ID NO: 120950 - DNA, 25 bp, Probe sequence
ttactgtcatttgccgtttttatca

SEQ ID NO: 120951 - DNA, 25 bp, Probe sequence
atgtttgttttcaagcttaattaag

SEQ ID NO: 120952 - DNA, 25 bp, Probe sequence
agccgttttaatataatcgtatcgc

SEQ ID NO: 120953 - DNA, 25 bp, Probe sequence
aatggatgacatctcattttaaatg

SEQ ID NO: 120954 - DNA, 25 bp, Probe sequence
aatcgtatcgcaactttagcaaata

SEQ ID NO: 120955 - DNA, 25 bp, Probe sequence
aataatatactgactacatttctta

SEQ ID NO: 120956 - DNA, 25 bp, Probe sequence
cagttgcatcatataatcattaatt

SEQ ID NO: 120957 - DNA, 25 bp, Probe sequence
catacttccgcaataacattataat

SEQ ID NO: 120958 - DNA, 25 bp, Probe sequence
gaatttctaaacagttgcatcatat

SEQ ID NO: 120959 - DNA, 25 bp, Probe sequence
gattcataaatgtttgttttcaagc

SEQ ID NO: 120960 - DNA, 25 bp, Probe sequence
tgttgttaatcttatcacattcatt

SEQ ID NO: 120961 - DNA, 25 bp, Probe sequence
tcctttcatacttccgcaataacat

SEQ ID NO: 120962 - DNA, 25 bp, Probe sequence
tcgtctgtagaaaagtatcatgaat

SEQ ID NO: 120963 - DNA, 25 bp, Probe sequence
taattataatatattcgtctgtaga

SEQ ID NO: 120964 - DNA, 25 bp, Probe sequence
tactgactacatttcttaatacaaa

SEQ ID NO: 120965 - DNA, 25 bp, Probe sequence
ttatcacattcattgtggattcata

SEQ ID NO: 120966 - DNA, 25 bp, Probe sequence
attcaacgctaacaattaatctcat

SEQ ID NO: 120967 - DNA, 25 bp, Probe sequence
acctttacttcatttacattattca

SEQ ID NO: 120968 - DNA, 25 bp, Probe sequence
actatagtagacatggttacctttt

SEQ ID NO: 120969 - DNA, 25 bp, Probe sequence
aactaacagtaatttatgtagcttt

SEQ ID NO: 120970 - DNA, 25 bp, Probe sequence
aattaatctcattattcatatgtat

SEQ ID NO: 120971 - DNA, 25 bp, Probe sequence
aattctcataataacctttacttca

SEQ ID NO: 120972 - DNA, 25 bp, Probe sequence
gaagcattaagattacttatcattt

SEQ ID NO: 120973 - DNA, 25 bp, Probe sequence
gtcatgtaatattttgaacgcttaa

SEQ ID NO: 120974 - DNA, 25 bp, Probe sequence
gtctacacctcacgatattatcact

SEQ ID NO: 120975 - DNA, 25 bp, Probe sequence
tgtagcttttgtaattctcataata

SEQ ID NO: 120976 - DNA, 25 bp, Probe sequence
tcatatgtatattttgtagttgcta

SEQ ID NO: 120977 - DNA, 25 bp, Probe sequence
tattatcactattcatattaacatt

SEQ ID NO: 120978 - DNA, 25 bp, Probe sequence
ttatcaaaactattatgtcatgtaa

SEQ ID NO: 120979 - DNA, 25 bp, Probe sequence
ttcatttacattattcatcttttta

SEQ ID NO: 120980 - DNA, 25 bp, Probe sequence
ttgtagttgctatttttatcaaaac

SEQ ID NO: 120981 - DNA, 25 bp, Probe sequence
attcattttacgtaattattagccg

SEQ ID NO: 120982 - DNA, 25 bp, Probe sequence
atttctattcattttacgtaattat

SEQ ID NO: 120983 - DNA, 25 bp, Probe sequence
atatcattatggtaaaactttaaca

SEQ ID NO: 120984 - DNA, 25 bp, Probe sequence
atcatttatgtggcaaaaacgttga

SEQ ID NO: 120985 - DNA, 25 bp, Probe sequence
acctcctgaggtttgataatgatat

SEQ ID NO: 120986 - DNA, 25 bp, Probe sequence
acgttgaatttaagccatttctatt

SEQ ID NO: 120987 - DNA, 25 bp, Probe sequence
aaatcgcaatcatttatgtggcaaa

SEQ ID NO: 120988 - DNA, 25 bp, Probe sequence
aaactttaacacaagcattacataa

SEQ ID NO: 120989 - DNA, 25 bp, Probe sequence
aagccatttctattcattttacgta

SEQ ID NO: 120990 - DNA, 25 bp, Probe sequence
aagcattacataaatcgcaatcatt

SEQ ID NO: 120991 - DNA, 25 bp, Probe sequence
aatttaagccatttctattcatttt

SEQ ID NO: 120992 - DNA, 25 bp, Probe sequence
gccatttctattcattttacgtaat

SEQ ID NO: 120993 - DNA, 25 bp, Probe sequence
gacattcacctcctgaggtttgata

SEQ ID NO: 120994 - DNA, 25 bp, Probe sequence
gtaattattagccgtatatgtgtaa

SEQ ID NO: 120995 - DNA, 25 bp, Probe sequence
tagacattcacctcctgaggtttga

SEQ ID NO: 120996 - DNA, 25 bp, Probe sequence
atactccacatgcaatcataaacat

SEQ ID NO: 120997 - DNA, 25 bp, Probe sequence
aaatttgtccacgttatcattccga

SEQ ID NO: 120998 - DNA, 25 bp, Probe sequence
aaacatgtggagttgactattaaat

SEQ ID NO: 120999 - DNA, 25 bp, Probe sequence
aaaaatactccacatgcaatcataa

SEQ ID NO: 121000 - DNA, 25 bp, Probe sequence
aaaatcagcacttaaaactttatct

SEQ ID NO: 121001 - DNA, 25 bp, Probe sequence
aatatcacatgagactgtgtattca

SEQ ID NO: 121002 - DNA, 25 bp, Probe sequence
ctctctttcttatatctttttaata

SEQ ID NO: 121003 - DNA, 25 bp, Probe sequence
gagactgtgtattcaaaatgagttt

SEQ ID NO: 121004 - DNA, 25 bp, Probe sequence
gttacataaaaatactccacatgca

SEQ ID NO: 121005 - DNA, 25 bp, Probe sequence
gtccacgttatcattccgagtatat

SEQ ID NO: 121006 - DNA, 25 bp, Probe sequence
tcctctctttcttatatctttttaa

SEQ ID NO: 121007 - DNA, 25 bp, Probe sequence
tcattccgagtatattttgttacat

SEQ ID NO: 121008 - DNA, 25 bp, Probe sequence
tcagcacttaaaactttatcttttt

SEQ ID NO: 121009 - DNA, 25 bp, Probe sequence
ttagttaaatttgtccacgttatca

SEQ ID NO: 121010 - DNA, 25 bp, Probe sequence
tttgtccacgttatcattccgagta

SEQ ID NO: 121011 - DNA, 25 bp, Probe sequence
atatgtcacttaatctcattctgta

SEQ ID NO: 121012 - DNA, 25 bp, Probe sequence
aacactcattttcttaccatttgta

SEQ ID NO: 121013 - DNA, 25 bp, Probe sequence
aagccacgcaaataagcaactttta

SEQ ID NO: 121014 - DNA, 25 bp, Probe sequence
aagtctgtcatttcattgttctcta

SEQ ID NO: 121015 - DNA, 25 bp, Probe sequence
aataaagtccgctatgtttatacat

SEQ ID NO: 121016 - DNA, 25 bp, Probe sequence
catagcttactattttgttttataa

SEQ ID NO: 121017 - DNA, 25 bp, Probe sequence
gcctccttatacactacatatttat

SEQ ID NO: 121018 - DNA, 25 bp, Probe sequence
gaccgtatatagtgcatctttctcg

SEQ ID NO: 121019 - DNA, 25 bp, Probe sequence
gtcaagaaattctacctttattaca

SEQ ID NO: 121020 - DNA, 25 bp, Probe sequence
gtgcatctttctcgaattattacat

SEQ ID NO: 121021 - DNA, 25 bp, Probe sequence
gtgactaaatcaacttcttttgcaa

SEQ ID NO: 121022 - DNA, 25 bp, Probe sequence
tggacatatatttattacaaccata

SEQ ID NO: 121023 - DNA, 25 bp, Probe sequence
tacataggacattttttgtgactaa

SEQ ID NO: 121024 - DNA, 25 bp, Probe sequence
tagatttgtaacactcattttctta

SEQ ID NO: 121025 - DNA, 25 bp, Probe sequence
ttgtttgcctccttatacactacat

SEQ ID NO: 121026 - DNA, 25 bp, Probe sequence
ataatattttatcataattaggtaa

SEQ ID NO: 121027 - DNA, 25 bp, Probe sequence
aataatattttatcataattaggta

SEQ ID NO: 121028 - DNA, 25 bp, Probe sequence
aatattttatcataattaggtaaat

SEQ ID NO: 121029 - DNA, 25 bp, Probe sequence
cttccttgtcgttttatgaataata

SEQ ID NO: 121030 - DNA, 25 bp, Probe sequence
cttgtcgttttatgaataatatttt

SEQ ID NO: 121031 - DNA, 25 bp, Probe sequence
ccttccttgtcgttttatgaataat

SEQ ID NO: 121032 - DNA, 25 bp, Probe sequence
ccttgtcgttttatgaataatattt

SEQ ID NO: 121033 - DNA, 25 bp, Probe sequence
gaataatattttatcataattaggt

SEQ ID NO: 121034 - DNA, 25 bp, Probe sequence
gtcgttttatgaataatattttatc

SEQ ID NO: 121035 - DNA, 25 bp, Probe sequence
tccttgtcgttttatgaataatatt

SEQ ID NO: 121036 - DNA, 25 bp, Probe sequence
tcccttccttgtcgttttatgaata

SEQ ID NO: 121037 - DNA, 25 bp, Probe sequence
tcgttttatgaataatattttatca

SEQ ID NO: 121038 - DNA, 25 bp, Probe sequence
ttcccttccttgtcgttttatgaat

SEQ ID NO: 121039 - DNA, 25 bp, Probe sequence
ttccttgtcgttttatgaataatat

SEQ ID NO: 121040 - DNA, 25 bp, Probe sequence
ttgtcgttttatgaataatatttta

SEQ ID NO: 121041 - DNA, 25 bp, Probe sequence
attagtcatcaacctcatttgacat

SEQ ID NO: 121042 - DNA, 25 bp, Probe sequence
acaataattagtcatcaacctcatt

SEQ ID NO: 121043 - DNA, 25 bp, Probe sequence
aaaggtctatgtacaataattagtc

SEQ ID NO: 121044 - DNA, 25 bp, Probe sequence
aataattagtcatcaacctcatttg

SEQ ID NO: 121045 - DNA, 25 bp, Probe sequence
caacctcatttgacatatcatgaat

SEQ ID NO: 121046 - DNA, 25 bp, Probe sequence
catcaacctcatttgacatatcatg

SEQ ID NO: 121047 - DNA, 25 bp, Probe sequence
catatcatgaatgtcagtcgttgta

SEQ ID NO: 121048 - DNA, 25 bp, Probe sequence
gaatacgtaacataaaaaggtctat

SEQ ID NO: 121049 - DNA, 25 bp, Probe sequence
gaatgtcagtcgttgtaaaactaag

SEQ ID NO: 121050 - DNA, 25 bp, Probe sequence
gttatttagtacatagacctttatt

SEQ ID NO: 121051 - DNA, 25 bp, Probe sequence
gtacaataattagtcatcaacctca

SEQ ID NO: 121052 - DNA, 25 bp, Probe sequence
gtcagtcgttgtaaaactaagttat

SEQ ID NO: 121053 - DNA, 25 bp, Probe sequence
gtcatcaacctcatttgacatatca

SEQ ID NO: 121054 - DNA, 25 bp, Probe sequence
tcatgaatgtcagtcgttgtaaaac

SEQ ID NO: 121055 - DNA, 25 bp, Probe sequence
tagtcatcaacctcatttgacatat

SEQ ID NO: 121056 - DNA, 25 bp, Probe sequence
atatagcagttcagttacaatttat

SEQ ID NO: 121057 - DNA, 25 bp, Probe sequence
agttctccaaaatatttagagatac

SEQ ID NO: 121058 - DNA, 25 bp, Probe sequence
agcagttcagttacaatttatatag

SEQ ID NO: 121059 - DNA, 25 bp, Probe sequence
agcgcaatttaagttctccaaaata

SEQ ID NO: 121060 - DNA, 25 bp, Probe sequence
accgctacatacttataagcgcaat

SEQ ID NO: 121061 - DNA, 25 bp, Probe sequence
acgtttgtatatagcagttcagtta

SEQ ID NO: 121062 - DNA, 25 bp, Probe sequence
aaaccgctacatacttataagcgca

SEQ ID NO: 121063 - DNA, 25 bp, Probe sequence
gcacgtttgtatatagcagttcagt

SEQ ID NO: 121064 - DNA, 25 bp, Probe sequence
gcaatttaagttctccaaaatattt

SEQ ID NO: 121065 - DNA, 25 bp, Probe sequence
gagatacttataatatgcacgtttg

SEQ ID NO: 121066 - DNA, 25 bp, Probe sequence
gatacttataatatgcacgtttgta

SEQ ID NO: 121067 - DNA, 25 bp, Probe sequence
gttcagttacaatttatatagttat

SEQ ID NO: 121068 - DNA, 25 bp, Probe sequence
tgaaaaaaccgctacatacttataa

SEQ ID NO: 121069 - DNA, 25 bp, Probe sequence
taagcgcaatttaagttctccaaaa

SEQ ID NO: 121070 - DNA, 25 bp, Probe sequence
tataagcgcaatttaagttctccaa

SEQ ID NO: 121071 - DNA, 25 bp, Probe sequence
atagcttgtcaattttcttttagta

SEQ ID NO: 121072 - DNA, 25 bp, Probe sequence
atacccacatgacatatgtttatgt

SEQ ID NO: 121073 - DNA, 25 bp, Probe sequence
atcatttttcaattgtgtatacact

SEQ ID NO: 121074 - DNA, 25 bp, Probe sequence
atcttcctttctattctattacaat

SEQ ID NO: 121075 - DNA, 25 bp, Probe sequence
aaattatttcaatcatttttcaatt

SEQ ID NO: 121076 - DNA, 25 bp, Probe sequence
aatatacccacatgacatatgttta

SEQ ID NO: 121077 - DNA, 25 bp, Probe sequence
catcttcctttctattctattacaa

SEQ ID NO: 121078 - DNA, 25 bp, Probe sequence
cttcctttctattctattacaatga

SEQ ID NO: 121079 - DNA, 25 bp, Probe sequence
ctattctattacaatgattttacat

SEQ ID NO: 121080 - DNA, 25 bp, Probe sequence
gcttgtcaattttcttttagtaaag

SEQ ID NO: 121081 - DNA, 25 bp, Probe sequence
gtgtatacactaattatagcttgtc

SEQ ID NO: 121082 - DNA, 25 bp, Probe sequence
tcctttctattctattacaatgatt

SEQ ID NO: 121083 - DNA, 25 bp, Probe sequence
tagcttgtcaattttcttttagtaa

SEQ ID NO: 121084 - DNA, 25 bp, Probe sequence
tatgtttatgtatatttttcaaaat

SEQ ID NO: 121085 - DNA, 25 bp, Probe sequence
tttacataaaatatacccacatgac

SEQ ID NO: 121086 - DNA, 25 bp, Probe sequence
atttttatcaaaggaggcgaagaca

SEQ ID NO: 121087 - DNA, 25 bp, Probe sequence
attttagtcacattactattttagc

SEQ ID NO: 121088 - DNA, 25 bp, Probe sequence
accctcactctgtaaaacggataat

SEQ ID NO: 121089 - DNA, 25 bp, Probe sequence
cactctgtaaaacggataatttgaa

SEQ ID NO: 121090 - DNA, 25 bp, Probe sequence
ctcactctgtaaaacggataatttg

SEQ ID NO: 121091 - DNA, 25 bp, Probe sequence
ccctcactctgtaaaacggataatt

SEQ ID NO: 121092 - DNA, 25 bp, Probe sequence
ttaaccctcactctgtaaaacggat

SEQ ID NO: 121093 - DNA, 25 bp, Probe sequence
gcatttttatcaaaggaggcgaaga

SEQ ID NO: 121094 - DNA, 25 bp, Probe sequence
gaaaataaaaatgatgctgtctaaa

SEQ ID NO: 121095 - DNA, 25 bp, Probe sequence
gatgctgtctaaaattttagtcaca

SEQ ID NO: 121096 - DNA, 25 bp, Probe sequence
tgctgtctaaaattttagtcacatt

SEQ ID NO: 121097 - DNA, 25 bp, Probe sequence
taaccctcactctgtaaaacggata

SEQ ID NO: 121098 - DNA, 25 bp, Probe sequence
tactattttagcatttttatcaaag

SEQ ID NO: 121099 - DNA, 25 bp, Probe sequence
tttagtcacattactattttagcat

SEQ ID NO: 121100 - DNA, 25 bp, Probe sequence
ttagcatttttatcaaaggaggcga

SEQ ID NO: 121101 - DNA, 25 bp, Probe sequence
attgatagtcacctgctttttatta

SEQ ID NO: 121102 - DNA, 25 bp, Probe sequence
attatgtgtatattattttgcttta

SEQ ID NO: 121103 - DNA, 25 bp, Probe sequence
atcgtttattgatagtcacctgctt

SEQ ID NO: 121104 - DNA, 25 bp, Probe sequence
atgtgtatattattttgctttaatt

SEQ ID NO: 121105 - DNA, 25 bp, Probe sequence
agtcacctgctttttattattatgt

SEQ ID NO: 121106 - DNA, 25 bp, Probe sequence
agcaggcaagctatcgtttattgat

SEQ ID NO: 121107 - DNA, 25 bp, Probe sequence
aaagcaggcaagctatcgtttattg

SEQ ID NO: 121108 - DNA, 25 bp, Probe sequence
gaaaaagcaggcaagctatcgttta

SEQ ID NO: 121109 - DNA, 25 bp, Probe sequence
gatagtcacctgctttttattatta

SEQ ID NO: 121110 - DNA, 25 bp, Probe sequence
gattttttagacaaatgttctatag

SEQ ID NO: 121111 - DNA, 25 bp, Probe sequence
gttctatagaaaaagcaggcaagct

SEQ ID NO: 121112 - DNA, 25 bp, Probe sequence
gtttattgatagtcacctgcttttt

SEQ ID NO: 121113 - DNA, 25 bp, Probe sequence
tgatagtcacctgctttttattatt

SEQ ID NO: 121114 - DNA, 25 bp, Probe sequence
tagtcacctgctttttattattatg

SEQ ID NO: 121115 - DNA, 25 bp, Probe sequence
ttattgatagtcacctgctttttat

SEQ ID NO: 121116 - DNA, 25 bp, Probe sequence
aaaacctcaataactatgctttaat

SEQ ID NO: 121117 - DNA, 25 bp, Probe sequence
aactgttgttgagatggcttttttg

SEQ ID NO: 121118 - DNA, 25 bp, Probe sequence
cacaacaaaaaacctccatcttctc

SEQ ID NO: 121119 - DNA, 25 bp, Probe sequence
gaataggaggattattgcacaacaa

SEQ ID NO: 121120 - DNA, 25 bp, Probe sequence
gagatggcttttttgaacctacctt

SEQ ID NO: 121121 - DNA, 25 bp, Probe sequence
gatcatagttacattattggagagt

SEQ ID NO: 121122 - DNA, 25 bp, Probe sequence
ggtgatttgagttcattggttggat

SEQ ID NO: 121123 - DNA, 25 bp, Probe sequence
tggtttgtggttttaactgttgttg

SEQ ID NO: 121124 - DNA, 25 bp, Probe sequence
ggataggtttgattggtttgtggtt

SEQ ID NO: 121125 - DNA, 25 bp, Probe sequence
ggagagtgatacattggtgatttga

SEQ ID NO: 121126 - DNA, 25 bp, Probe sequence
tgatacatactagcaggtcgcaggc

SEQ ID NO: 121127 - DNA, 25 bp, Probe sequence
tgagttcattggttggataggtttg

SEQ ID NO: 121128 - DNA, 25 bp, Probe sequence
tctccttccattcatctcgtaagaa

SEQ ID NO: 121129 - DNA, 25 bp, Probe sequence
ttacacccgaccccgaagatgaatt

SEQ ID NO: 121130 - DNA, 25 bp, Probe sequence
tatactatatatcacaaaacctcaa

SEQ ID NO: 121131 - DNA, 25 bp, Probe sequence
atttatgtgtttgtttagaatatag

SEQ ID NO: 121132 - DNA, 25 bp, Probe sequence
atctcccatttatgtgtttgtttag

SEQ ID NO: 121133 - DNA, 25 bp, Probe sequence
atgtgtttgtttagaatatagagaa

SEQ ID NO: 121134 - DNA, 25 bp, Probe sequence
catctcccatttatgtgtttgttta

SEQ ID NO: 121135 - DNA, 25 bp, Probe sequence
catttatgtgtttgtttagaatata

SEQ ID NO: 121136 - DNA, 25 bp, Probe sequence
ctcccatttatgtgtttgtttagaa

SEQ ID NO: 121137 - DNA, 25 bp, Probe sequence
cccatttatgtgtttgtttagaata

SEQ ID NO: 121138 - DNA, 25 bp, Probe sequence
cccatctcccatttatgtgtttgtt

SEQ ID NO: 121139 - DNA, 25 bp, Probe sequence
ccatctcccatttatgtgtttgttt

SEQ ID NO: 121140 - DNA, 25 bp, Probe sequence
ccatttatgtgtttgtttagaatat

SEQ ID NO: 121141 - DNA, 25 bp, Probe sequence
tcccatttatgtgtttgtttagaat

SEQ ID NO: 121142 - DNA, 25 bp, Probe sequence
tctcccatttatgtgtttgtttaga

SEQ ID NO: 121143 - DNA, 25 bp, Probe sequence
tatagagaaattagctgatttcaag

SEQ ID NO: 121144 - DNA, 25 bp, Probe sequence
tttatgtgtttgtttagaatataga

SEQ ID NO: 121145 - DNA, 25 bp, Probe sequence
ttatgtgtttgtttagaatatagag

SEQ ID NO: 121146 - DNA, 25 bp, Probe sequence
attctcaaagaaaacaagtagcatt

SEQ ID NO: 121147 - DNA, 25 bp, Probe sequence
atcacccatttatgtgtttgtaaaa

SEQ ID NO: 121148 - DNA, 25 bp, Probe sequence
agctcatcacccatttatgtgtttg

SEQ ID NO: 121149 - DNA, 25 bp, Probe sequence
actacttattctcaaagaaaacaag

SEQ ID NO: 121150 - DNA, 25 bp, Probe sequence
cacccatttatgtgtttgtaaaact

SEQ ID NO: 121151 - DNA, 25 bp, Probe sequence
catcacccatttatgtgtttgtaaa

SEQ ID NO: 121152 - DNA, 25 bp, Probe sequence
ctcaaagaaaacaagtagcatttaa

SEQ ID NO: 121153 - DNA, 25 bp, Probe sequence
ctcatcacccatttatgtgtttgta

SEQ ID NO: 121154 - DNA, 25 bp, Probe sequence
gctcatcacccatttatgtgtttgt

SEQ ID NO: 121155 - DNA, 25 bp, Probe sequence
gaaaacaagtagcatttaataaatt

SEQ ID NO: 121156 - DNA, 25 bp, Probe sequence
tcatcacccatttatgtgtttgtaa

SEQ ID NO: 121157 - DNA, 25 bp, Probe sequence
tcacccatttatgtgtttgtaaaac

SEQ ID NO: 121158 - DNA, 25 bp, Probe sequence
tatgtgtttgtaaaacttttatgtt

SEQ ID NO: 121159 - DNA, 25 bp, Probe sequence
ttatgtgtttgtaaaacttttatgt

SEQ ID NO: 121160 - DNA, 25 bp, Probe sequence
ttctcaaagaaaacaagtagcattt

SEQ ID NO: 121161 - DNA, 25 bp, Probe sequence
ataacatgcgttcttaaataactat

SEQ ID NO: 121162 - DNA, 25 bp, Probe sequence
agtctctaatcaataacatgcgttc

SEQ ID NO: 121163 - DNA, 25 bp, Probe sequence
agagtctctaatcaataacatgcgt

SEQ ID NO: 121164 - DNA, 25 bp, Probe sequence
aacatgcgttcttaaataactatat

SEQ ID NO: 121165 - DNA, 25 bp, Probe sequence
aatcaataacatgcgttcttaaata

SEQ ID NO: 121166 - DNA, 25 bp, Probe sequence
caataacatgcgttcttaaataact

SEQ ID NO: 121167 - DNA, 25 bp, Probe sequence
catgcgttcttaaataactatattc

SEQ ID NO: 121168 - DNA, 25 bp, Probe sequence
ctaatcaataacatgcgttcttaaa

SEQ ID NO: 121169 - DNA, 25 bp, Probe sequence
ctctaatcaataacatgcgttctta

SEQ ID NO: 121170 - DNA, 25 bp, Probe sequence
gcgttcttaaataactatattcagt

SEQ ID NO: 121171 - DNA, 25 bp, Probe sequence
gagtctctaatcaataacatgcgtt

SEQ ID NO: 121172 - DNA, 25 bp, Probe sequence
gtctctaatcaataacatgcgttct

SEQ ID NO: 121173 - DNA, 25 bp, Probe sequence
tctctaatcaataacatgcgttctt

SEQ ID NO: 121174 - DNA, 25 bp, Probe sequence
tctaatcaataacatgcgttcttaa

SEQ ID NO: 121175 - DNA, 25 bp, Probe sequence
tagagtctctaatcaataacatgcg

SEQ ID NO: 121176 - DNA, 25 bp, Probe sequence
attatatcacaggaaagcgcataca

SEQ ID NO: 121177 - DNA, 25 bp, Probe sequence
atatcacaggaaagcgcatacagtt

SEQ ID NO: 121178 - DNA, 25 bp, Probe sequence
atcacaggaaagcgcatacagttat

SEQ ID NO: 121179 - DNA, 25 bp, Probe sequence
acatgcttttctttacaaaagtatt

SEQ ID NO: 121180 - DNA, 25 bp, Probe sequence
aaagtattatatcacaggaaagcgc

SEQ ID NO: 121181 - DNA, 25 bp, Probe sequence
aaaattctcaaactttgtgataaat

SEQ ID NO: 121182 - DNA, 25 bp, Probe sequence
caaactttgtgataaatacatattt

SEQ ID NO: 121183 - DNA, 25 bp, Probe sequence
cacacatgcttttctttacaaaagt

SEQ ID NO: 121184 - DNA, 25 bp, Probe sequence
cacaggaaagcgcatacagttatta

SEQ ID NO: 121185 - DNA, 25 bp, Probe sequence
caggaaagcgcatacagttattaaa

SEQ ID NO: 121186 - DNA, 25 bp, Probe sequence
cccacacatgcttttctttacaaaa

SEQ ID NO: 121187 - DNA, 25 bp, Probe sequence
gcgcatacagttattaaaaacctaa

SEQ ID NO: 121188 - DNA, 25 bp, Probe sequence
gaaagcgcatacagttattaaaaac

SEQ ID NO: 121189 - DNA, 25 bp, Probe sequence
gtgaaaaaattctcaaactttgtga

SEQ ID NO: 121190 - DNA, 25 bp, Probe sequence
gtattatatcacaggaaagcgcata

SEQ ID NO: 121191 - DNA, 25 bp, Probe sequence
atagcacagacatttttagtcatgt

SEQ ID NO: 121192 - DNA, 25 bp, Probe sequence
agcacagacatttttagtcatgtgt

SEQ ID NO: 121193 - DNA, 25 bp, Probe sequence
agccacaatagcacagacattttta

SEQ ID NO: 121194 - DNA, 25 bp, Probe sequence
acaatagcacagacatttttagtca

SEQ ID NO: 121195 - DNA, 25 bp, Probe sequence
aaagccacaatagcacagacatttt

SEQ ID NO: 121196 - DNA, 25 bp, Probe sequence
aaaaagccacaatagcacagacatt

SEQ ID NO: 121197 - DNA, 25 bp, Probe sequence
aaaagccacaatagcacagacattt

SEQ ID NO: 121198 - DNA, 25 bp, Probe sequence
aagccacaatagcacagacattttt

SEQ ID NO: 121199 - DNA, 25 bp, Probe sequence
cacagacatttttagtcatgtgtat

SEQ ID NO: 121200 - DNA, 25 bp, Probe sequence
catgtgtattgtgacttttaagtta

SEQ ID NO: 121201 - DNA, 25 bp, Probe sequence
ccacaatagcacagacatttttagt

SEQ ID NO: 121202 - DNA, 25 bp, Probe sequence
gccacaatagcacagacatttttag

SEQ ID NO: 121203 - DNA, 25 bp, Probe sequence
gacatttttagtcatgtgtattgtg

SEQ ID NO: 121204 - DNA, 25 bp, Probe sequence
tgtgacttttaagttatggttcact

SEQ ID NO: 121205 - DNA, 25 bp, Probe sequence
tcaaccaatttaaaaaagccacaat

SEQ ID NO: 121206 - DNA, 25 bp, Probe sequence
ataaaatgcaagcttttctcatttg

SEQ ID NO: 121207 - DNA, 25 bp, Probe sequence
aaatcattacaaattatttcaaact

SEQ ID NO: 121208 - DNA, 25 bp, Probe sequence
aacagttttctcaataaaatgcaag

SEQ ID NO: 121209 - DNA, 25 bp, Probe sequence
aactaacagttttctcaataaaatg

SEQ ID NO: 121210 - DNA, 25 bp, Probe sequence
caataaaatgcaagcttttctcatt

SEQ ID NO: 121211 - DNA, 25 bp, Probe sequence
caaacttcacaattaaaactaacag

SEQ ID NO: 121212 - DNA, 25 bp, Probe sequence
cagttttctcaataaaatgcaagct

SEQ ID NO: 121213 - DNA, 25 bp, Probe sequence
ctaacagttttctcaataaaatgca

SEQ ID NO: 121214 - DNA, 25 bp, Probe sequence
ctcccctactaataattaaaatcat

SEQ ID NO: 121215 - DNA, 25 bp, Probe sequence
gttttctcaataaaatgcaagcttt

SEQ ID NO: 121216 - DNA, 25 bp, Probe sequence
tgtccactcccctactaataattaa

SEQ ID NO: 121217 - DNA, 25 bp, Probe sequence
tctcaataaaatgcaagcttttctc

SEQ ID NO: 121218 - DNA, 25 bp, Probe sequence
tcaaacttcacaattaaaactaaca

SEQ ID NO: 121219 - DNA, 25 bp, Probe sequence
tcaataaaatgcaagcttttctcat

SEQ ID NO: 121220 - DNA, 25 bp, Probe sequence
ttacaaattatttcaaacttcacaa

SEQ ID NO: 121221 - DNA, 25 bp, Probe sequence
attgatacactatgcttgttagcta

SEQ ID NO: 121222 - DNA, 25 bp, Probe sequence
attatatattgatacactatgcttg

SEQ ID NO: 121223 - DNA, 25 bp, Probe sequence
atattgatacactatgcttgttagc

SEQ ID NO: 121224 - DNA, 25 bp, Probe sequence
ataatcacgttcctttaaattcata

SEQ ID NO: 121225 - DNA, 25 bp, Probe sequence
atcacgttcctttaaattcatatta

SEQ ID NO: 121226 - DNA, 25 bp, Probe sequence
atgcttgttagctaaagtgtatcga

SEQ ID NO: 121227 - DNA, 25 bp, Probe sequence
actatgcttgttagctaaagtgtat

SEQ ID NO: 121228 - DNA, 25 bp, Probe sequence
aaagtgtatcgaaaggagaacagac

SEQ ID NO: 121229 - DNA, 25 bp, Probe sequence
aatcacgttcctttaaattcatatt

SEQ ID NO: 121230 - DNA, 25 bp, Probe sequence
cacgttcctttaaattcatattata

SEQ ID NO: 121231 - DNA, 25 bp, Probe sequence
gcttgttagctaaagtgtatcgaaa

SEQ ID NO: 121232 - DNA, 25 bp, Probe sequence
gatacactatgcttgttagctaaag

SEQ ID NO: 121233 - DNA, 25 bp, Probe sequence
gttcctttaaattcatattatatat

SEQ ID NO: 121234 - DNA, 25 bp, Probe sequence
gttagctaaagtgtatcgaaaggag

SEQ ID NO: 121235 - DNA, 25 bp, Probe sequence
tataatcacgttcctttaaattcat

SEQ ID NO: 121236 - DNA, 25 bp, Probe sequence
atagaaattaaagcgttgtcctcac

SEQ ID NO: 121237 - DNA, 25 bp, Probe sequence
aaaaatgccttactgctgttgttta

SEQ ID NO: 121238 - DNA, 25 bp, Probe sequence
aaaacagcagcatgaggcgtttcat

SEQ ID NO: 121239 - DNA, 25 bp, Probe sequence
gccacttcatctcttaataatttta

SEQ ID NO: 121240 - DNA, 25 bp, Probe sequence
gccttaagcaaacttctgccacttc

SEQ ID NO: 121241 - DNA, 25 bp, Probe sequence
gccttactgctgttgtttatgtaca

SEQ ID NO: 121242 - DNA, 25 bp, Probe sequence
gtatttagtaatttcgccttgcggc

SEQ ID NO: 121243 - DNA, 25 bp, Probe sequence
gcagcatgaggcgtttcattataaa

SEQ ID NO: 121244 - DNA, 25 bp, Probe sequence
gattatgattactcacttatgatag

SEQ ID NO: 121245 - DNA, 25 bp, Probe sequence
gttgtttatgtacaattcgctataa

SEQ ID NO: 121246 - DNA, 25 bp, Probe sequence
tcgccttgcggcattgccttaagca

SEQ ID NO: 121247 - DNA, 25 bp, Probe sequence
tgtcctcacgcatcagtatttagta

SEQ ID NO: 121248 - DNA, 25 bp, Probe sequence
taagcaaacttctgccacttcatct

SEQ ID NO: 121249 - DNA, 25 bp, Probe sequence
taaagcgttgtcctcacgcatcagt

SEQ ID NO: 121250 - DNA, 25 bp, Probe sequence
ttctgccacttcatctcttaataat

SEQ ID NO: 121251 - DNA, 25 bp, Probe sequence
atagaatgcaatttatcgtctctgt

SEQ ID NO: 121252 - DNA, 25 bp, Probe sequence
accttccttttcaattatatagaat

SEQ ID NO: 121253 - DNA, 25 bp, Probe sequence
aagttgattatctttcctaatatat

SEQ ID NO: 121254 - DNA, 25 bp, Probe sequence
aatttatcgtctctgtataattgag

SEQ ID NO: 121255 - DNA, 25 bp, Probe sequence
cttccttttcaattatatagaatgc

SEQ ID NO: 121256 - DNA, 25 bp, Probe sequence
gaatgcaatttatcgtctctgtata

SEQ ID NO: 121257 - DNA, 25 bp, Probe sequence
gacaagttgattatctttcctaata

SEQ ID NO: 121258 - DNA, 25 bp, Probe sequence
gagacaagttgattatctttcctaa

SEQ ID NO: 121259 - DNA, 25 bp, Probe sequence
gattatctttcctaatatatataca

SEQ ID NO: 121260 - DNA, 25 bp, Probe sequence
tgcaatttatcgtctctgtataatt

SEQ ID NO: 121261 - DNA, 25 bp, Probe sequence
tcaaaaactaaagggatgtgacgtt

SEQ ID NO: 121262 - DNA, 25 bp, Probe sequence
taaccttccttttcaattatataga

SEQ ID NO: 121263 - DNA, 25 bp, Probe sequence
tatcgtctctgtataattgagacaa

SEQ ID NO: 121264 - DNA, 25 bp, Probe sequence
tatctttcctaatatatatacaata

SEQ ID NO: 121265 - DNA, 25 bp, Probe sequence
ttaaccttccttttcaattatatag

SEQ ID NO: 121266 - DNA, 25 bp, Probe sequence
atttcatttaagacactgcatactg

SEQ ID NO: 121267 - DNA, 25 bp, Probe sequence
atgacctgctgaatggattatctta

SEQ ID NO: 121268 - DNA, 25 bp, Probe sequence
aagacactgcatactgtcgagcata

SEQ ID NO: 121269 - DNA, 25 bp, Probe sequence
cactgcatactgtcgagcatattga

SEQ ID NO: 121270 - DNA, 25 bp, Probe sequence
ctgtcgagcatattgaatgacctgc

SEQ ID NO: 121271 - DNA, 25 bp, Probe sequence
cgatatttcatttaagacactgcat

SEQ ID NO: 121272 - DNA, 25 bp, Probe sequence
cctgctgaatggattatcttataat

SEQ ID NO: 121273 - DNA, 25 bp, Probe sequence
gcatattgaatgacctgctgaatgg

SEQ ID NO: 121274 - DNA, 25 bp, Probe sequence
gaatgacctgctgaatggattatct

SEQ ID NO: 121275 - DNA, 25 bp, Probe sequence
gacactgcatactgtcgagcatatt

SEQ ID NO: 121276 - DNA, 25 bp, Probe sequence
gacctgctgaatggattatcttata

SEQ ID NO: 121277 - DNA, 25 bp, Probe sequence
gatacatgaatcgatatttcattta

SEQ ID NO: 121278 - DNA, 25 bp, Probe sequence
gtcgagcatattgaatgacctgctg

SEQ ID NO: 121279 - DNA, 25 bp, Probe sequence
tgcatactgtcgagcatattgaatg

SEQ ID NO: 121280 - DNA, 25 bp, Probe sequence
ttaagacactgcatactgtcgagca

SEQ ID NO: 121281 - DNA, 25 bp, Probe sequence
attgttctatcattcgctttttttc

SEQ ID NO: 121282 - DNA, 25 bp, Probe sequence
attcgctttttttctagactatatt

SEQ ID NO: 121283 - DNA, 25 bp, Probe sequence
atattttacaatgcccaaaactatt

SEQ ID NO: 121284 - DNA, 25 bp, Probe sequence
aactattttaataatcattgaacaa

SEQ ID NO: 121285 - DNA, 25 bp, Probe sequence
aatcaattgttctatcattcgcttt

SEQ ID NO: 121286 - DNA, 25 bp, Probe sequence
gctttttttctagactatattatga

SEQ ID NO: 121287 - DNA, 25 bp, Probe sequence
gaattaaaacgcacatgttaaacaa

SEQ ID NO: 121288 - DNA, 25 bp, Probe sequence
gaaattatattttacaatgcccaaa

SEQ ID NO: 121289 - DNA, 25 bp, Probe sequence
gagcgaatgacaaggattgattacg

SEQ ID NO: 121290 - DNA, 25 bp, Probe sequence
gtaaatcaattgttctatcattcgc

SEQ ID NO: 121291 - DNA, 25 bp, Probe sequence
tgttctatcattcgctttttttcta

SEQ ID NO: 121292 - DNA, 25 bp, Probe sequence
tcattcgctttttttctagactata

SEQ ID NO: 121293 - DNA, 25 bp, Probe sequence
tcaattgttctatcattcgcttttt

SEQ ID NO: 121294 - DNA, 25 bp, Probe sequence
tacaatgcccaaaactattttaata

SEQ ID NO: 121295 - DNA, 25 bp, Probe sequence
tatcattcgctttttttctagacta

SEQ ID NO: 121296 - DNA, 25 bp, Probe sequence
atctataggtctacaaatggcctta

SEQ ID NO: 121297 - DNA, 25 bp, Probe sequence
atggccttagattctattagggggc

SEQ ID NO: 121298 - DNA, 25 bp, Probe sequence
agattctattagggggcatattaat

SEQ ID NO: 121299 - DNA, 25 bp, Probe sequence
agccccctaatatatctataggtct

SEQ ID NO: 121300 - DNA, 25 bp, Probe sequence
aacaaagaagccccctaatatatct

SEQ ID NO: 121301 - DNA, 25 bp, Probe sequence
aagaagccccctaatatatctatag

SEQ ID NO: 121302 - DNA, 25 bp, Probe sequence
caaagaagccccctaatatatctat

SEQ ID NO: 121303 - DNA, 25 bp, Probe sequence
cttagattctattagggggcatatt

SEQ ID NO: 121304 - DNA, 25 bp, Probe sequence
ctataggtctacaaatggccttaga

SEQ ID NO: 121305 - DNA, 25 bp, Probe sequence
ctacaaatggccttagattctatta

SEQ ID NO: 121306 - DNA, 25 bp, Probe sequence
gccccctaatatatctataggtcta

SEQ ID NO: 121307 - DNA, 25 bp, Probe sequence
gaagccccctaatatatctataggt

SEQ ID NO: 121308 - DNA, 25 bp, Probe sequence
ggtctacaaatggccttagattcta

SEQ ID NO: 121309 - DNA, 25 bp, Probe sequence
ggccttagattctattagggggcat

SEQ ID NO: 121310 - DNA, 25 bp, Probe sequence
taggtctacaaatggccttagattc

SEQ ID NO: 121311 - DNA, 25 bp, Probe sequence
atcacctcctgttaatttctgcatt

SEQ ID NO: 121312 - DNA, 25 bp, Probe sequence
actgaaattcaatccgaaaatcaat

SEQ ID NO: 121313 - DNA, 25 bp, Probe sequence
aacgcttccaacctctatataataa

SEQ ID NO: 121314 - DNA, 25 bp, Probe sequence
aataaaaccttcatactgaaattca

SEQ ID NO: 121315 - DNA, 25 bp, Probe sequence
aatttctgcattggaaaacgcttcc

SEQ ID NO: 121316 - DNA, 25 bp, Probe sequence
cacctcctgttaatttctgcattgg

SEQ ID NO: 121317 - DNA, 25 bp, Probe sequence
cttccaacctctatataataacagt

SEQ ID NO: 121318 - DNA, 25 bp, Probe sequence
cgcttccaacctctatataataaca

SEQ ID NO: 121319 - DNA, 25 bp, Probe sequence
cctcctgttaatttctgcattggaa

SEQ ID NO: 121320 - DNA, 25 bp, Probe sequence
gcaaacgattgcataaaacgataaa

SEQ ID NO: 121321 - DNA, 25 bp, Probe sequence
gaaaacgcttccaacctctatataa

SEQ ID NO: 121322 - DNA, 25 bp, Probe sequence
gataaaaataaaaccttcatactga

SEQ ID NO: 121323 - DNA, 25 bp, Probe sequence
gtcaaaagatttgtgcaaacgattg

SEQ ID NO: 121324 - DNA, 25 bp, Probe sequence
taataacagtttagttactctttct

SEQ ID NO: 121325 - DNA, 25 bp, Probe sequence
taatcacctcctgttaatttctgca

SEQ ID NO: 121326 - DNA, 25 bp, Probe sequence
attaatcaaacatgtcgtctgggac

SEQ ID NO: 121327 - DNA, 25 bp, Probe sequence
atagtacctctatttctctatagta

SEQ ID NO: 121328 - DNA, 25 bp, Probe sequence
acctctatttctctatagtacatgc

SEQ ID NO: 121329 - DNA, 25 bp, Probe sequence
actgggtgtagctcacattgtccat

SEQ ID NO: 121330 - DNA, 25 bp, Probe sequence
aaatatggcgggatgcttttaaggt

SEQ ID NO: 121331 - DNA, 25 bp, Probe sequence
aatagatattgcttgtgtaattttt

SEQ ID NO: 121332 - DNA, 25 bp, Probe sequence
caaagttttcgtattttctatgtca

SEQ ID NO: 121333 - DNA, 25 bp, Probe sequence
gtcaacttaactgggtgtagctcac

SEQ ID NO: 121334 - DNA, 25 bp, Probe sequence
gtcgtctgggacatatatcaatgaa

SEQ ID NO: 121335 - DNA, 25 bp, Probe sequence
gtgtagctcacattgtccattagaa

SEQ ID NO: 121336 - DNA, 25 bp, Probe sequence
tgaaatacttcgttcaaagttttcg

SEQ ID NO: 121337 - DNA, 25 bp, Probe sequence
tagtacatgctatcataacacagta

SEQ ID NO: 121338 - DNA, 25 bp, Probe sequence
tttgtagccacatagaacttcatta

SEQ ID NO: 121339 - DNA, 25 bp, Probe sequence
tttcgtattttctatgtcaacttaa

SEQ ID NO: 121340 - DNA, 25 bp, Probe sequence
ttattacttcacaaaatgcttaaaa

SEQ ID NO: 121341 - DNA, 25 bp, Probe sequence
ataaggtctcaggctcaatggtcaa

SEQ ID NO: 121342 - DNA, 25 bp, Probe sequence
actaatgctatcttaatagtatgta

SEQ ID NO: 121343 - DNA, 25 bp, Probe sequence
aaattcataaggtctcaggctcaat

SEQ ID NO: 121344 - DNA, 25 bp, Probe sequence
aaggtctcaggctcaatggtcaata

SEQ ID NO: 121345 - DNA, 25 bp, Probe sequence
aatcattgaatatatcatgcgtaga

SEQ ID NO: 121346 - DNA, 25 bp, Probe sequence
aattatttactaatgctatcttaat

SEQ ID NO: 121347 - DNA, 25 bp, Probe sequence
ctaaattcataaggtctcaggctca

SEQ ID NO: 121348 - DNA, 25 bp, Probe sequence
gaaattgtctctttaacattaccta

SEQ ID NO: 121349 - DNA, 25 bp, Probe sequence
gaggatagatatcgttaatttataa

SEQ ID NO: 121350 - DNA, 25 bp, Probe sequence
gtatgtaagtaaaacgtctacactt

SEQ ID NO: 121351 - DNA, 25 bp, Probe sequence
gtctctttaacattacctaaattca

SEQ ID NO: 121352 - DNA, 25 bp, Probe sequence
tctatccctcttattcatcaaataa

SEQ ID NO: 121353 - DNA, 25 bp, Probe sequence
taaaacgtaatctatttatcgaaat

SEQ ID NO: 121354 - DNA, 25 bp, Probe sequence
tatccctcttattcatcaaataata

SEQ ID NO: 121355 - DNA, 25 bp, Probe sequence
tatatcatgcgtagaaaatttcgat

SEQ ID NO: 121356 - DNA, 25 bp, Probe sequence
attacttacctcacttgttgatttt

SEQ ID NO: 121357 - DNA, 25 bp, Probe sequence
atttttcattagtattgtatcacaa

SEQ ID NO: 121358 - DNA, 25 bp, Probe sequence
atcacaaaatagacatacactacac

SEQ ID NO: 121359 - DNA, 25 bp, Probe sequence
acctcacttgttgatttttcattag

SEQ ID NO: 121360 - DNA, 25 bp, Probe sequence
acttacctcacttgttgatttttca

SEQ ID NO: 121361 - DNA, 25 bp, Probe sequence
caaaatagacatacactacactaaa

SEQ ID NO: 121362 - DNA, 25 bp, Probe sequence
cacttgttgatttttcattagtatt

SEQ ID NO: 121363 - DNA, 25 bp, Probe sequence
cttacctcacttgttgatttttcat

SEQ ID NO: 121364 - DNA, 25 bp, Probe sequence
ctcacttgttgatttttcattagta

SEQ ID NO: 121365 - DNA, 25 bp, Probe sequence
gttgatttttcattagtattgtatc

SEQ ID NO: 121366 - DNA, 25 bp, Probe sequence
tacttacctcacttgttgatttttc

SEQ ID NO: 121367 - DNA, 25 bp, Probe sequence
tacctcacttgttgatttttcatta

SEQ ID NO: 121368 - DNA, 25 bp, Probe sequence
ttttcattagtattgtatcacaaaa

SEQ ID NO: 121369 - DNA, 25 bp, Probe sequence
ttacctcacttgttgatttttcatt

SEQ ID NO: 121370 - DNA, 25 bp, Probe sequence
ttacttacctcacttgttgattttt

SEQ ID NO: 121371 - DNA, 25 bp, Probe sequence
attgtaactcaaactaagctttgtc

SEQ ID NO: 121372 - DNA, 25 bp, Probe sequence
attatatatatttattgtaactcaa

SEQ ID NO: 121373 - DNA, 25 bp, Probe sequence
ataagcaaacttactcatgtttttt

SEQ ID NO: 121374 - DNA, 25 bp, Probe sequence
actcaaactaagctttgtcaaaaat

SEQ ID NO: 121375 - DNA, 25 bp, Probe sequence
aagcaaacttactcatgttttttat

SEQ ID NO: 121376 - DNA, 25 bp, Probe sequence
aatgacataagcaaacttactcatg

SEQ ID NO: 121377 - DNA, 25 bp, Probe sequence
cttactcatgttttttattatattc

SEQ ID NO: 121378 - DNA, 25 bp, Probe sequence
gcaaacttactcatgttttttatta

SEQ ID NO: 121379 - DNA, 25 bp, Probe sequence
gacataagcaaacttactcatgttt

SEQ ID NO: 121380 - DNA, 25 bp, Probe sequence
gatttttcaaagatatcgtataatg

SEQ ID NO: 121381 - DNA, 25 bp, Probe sequence
gattgatttttcaaagatatcgtat

SEQ ID NO: 121382 - DNA, 25 bp, Probe sequence
gttttttattatattccttaatgat

SEQ ID NO: 121383 - DNA, 25 bp, Probe sequence
gtaactcaaactaagctttgtcaaa

SEQ ID NO: 121384 - DNA, 25 bp, Probe sequence
tcatgttttttattatattccttaa

SEQ ID NO: 121385 - DNA, 25 bp, Probe sequence
tactcatgttttttattatattcct

SEQ ID NO: 121386 - DNA, 25 bp, Probe sequence
attaataagttatcgtattgcaacg

SEQ ID NO: 121387 - DNA, 25 bp, Probe sequence
atacaattaaaaatccatccgttat

SEQ ID NO: 121388 - DNA, 25 bp, Probe sequence
atctcaactacctatacaaaatcat

SEQ ID NO: 121389 - DNA, 25 bp, Probe sequence
atccatccgttataaacgcatgtat

SEQ ID NO: 121390 - DNA, 25 bp, Probe sequence
atgggtcatacggatggattatttt

SEQ ID NO: 121391 - DNA, 25 bp, Probe sequence
actatatctcaactacctatacaaa

SEQ ID NO: 121392 - DNA, 25 bp, Probe sequence
aaatccatccgttataaacgcatgt

SEQ ID NO: 121393 - DNA, 25 bp, Probe sequence
aactacctatacaaaatcatacaat

SEQ ID NO: 121394 - DNA, 25 bp, Probe sequence
caaacatgggtcatacggatggatt

SEQ ID NO: 121395 - DNA, 25 bp, Probe sequence
gcaacgattactttcaaacatgggt

SEQ ID NO: 121396 - DNA, 25 bp, Probe sequence
gattactttcaaacatgggtcatac

SEQ ID NO: 121397 - DNA, 25 bp, Probe sequence
gtattgcaacgattactttcaaaca

SEQ ID NO: 121398 - DNA, 25 bp, Probe sequence
tccgttataaacgcatgtattaata

SEQ ID NO: 121399 - DNA, 25 bp, Probe sequence
taaactatatctcaactacctatac

SEQ ID NO: 121400 - DNA, 25 bp, Probe sequence
tactttcaaacatgggtcatacgga

SEQ ID NO: 121401 - DNA, 25 bp, Probe sequence
atttaaactatcctcattctactaa

SEQ ID NO: 121402 - DNA, 25 bp, Probe sequence
actatcctcattctactaattaata

SEQ ID NO: 121403 - DNA, 25 bp, Probe sequence
aaactatcctcattctactaattaa

SEQ ID NO: 121404 - DNA, 25 bp, Probe sequence
aactatcctcattctactaattaat

SEQ ID NO: 121405 - DNA, 25 bp, Probe sequence
cattctactaattaataacatattg

SEQ ID NO: 121406 - DNA, 25 bp, Probe sequence
ctttatatttaaactatcctcattc

SEQ ID NO: 121407 - DNA, 25 bp, Probe sequence
tcctcattctactaattaataacat

SEQ ID NO: 121408 - DNA, 25 bp, Probe sequence
tccctttatatttaaactatcctca

SEQ ID NO: 121409 - DNA, 25 bp, Probe sequence
taaactatcctcattctactaatta

SEQ ID NO: 121410 - DNA, 25 bp, Probe sequence
tatcctcattctactaattaataac

SEQ ID NO: 121411 - DNA, 25 bp, Probe sequence
tatatttaaactatcctcattctac

SEQ ID NO: 121412 - DNA, 25 bp, Probe sequence
tatttaaactatcctcattctacta

SEQ ID NO: 121413 - DNA, 25 bp, Probe sequence
tttaaactatcctcattctactaat

SEQ ID NO: 121414 - DNA, 25 bp, Probe sequence
ttaaactatcctcattctactaatt

SEQ ID NO: 121415 - DNA, 25 bp, Probe sequence
ttcaatcacctatccctttatattt

SEQ ID NO: 121416 - DNA, 25 bp, Probe sequence
atatgtttccagtatgatgtattat

SEQ ID NO: 121417 - DNA, 25 bp, Probe sequence
atctttttttgaatttattgcacat

SEQ ID NO: 121418 - DNA, 25 bp, Probe sequence
aaacaagttgtcgatagatgtatcc

SEQ ID NO: 121419 - DNA, 25 bp, Probe sequence
aatacatccatcgacaagaacaaga

SEQ ID NO: 121420 - DNA, 25 bp, Probe sequence
gcccaaaaaaatacatccatcgaca

SEQ ID NO: 121421 - DNA, 25 bp, Probe sequence
gcaaaaatgcattcaaccatgttga

SEQ ID NO: 121422 - DNA, 25 bp, Probe sequence
gactttactgcaaaaatgcattcaa

SEQ ID NO: 121423 - DNA, 25 bp, Probe sequence
gatgtattattttgactttactgca

SEQ ID NO: 121424 - DNA, 25 bp, Probe sequence
gattattgttctttatctttttttg

SEQ ID NO: 121425 - DNA, 25 bp, Probe sequence
gttgattattgttctttatcttttt

SEQ ID NO: 121426 - DNA, 25 bp, Probe sequence
gtcgatagatgtatccatgttatca

SEQ ID NO: 121427 - DNA, 25 bp, Probe sequence
tgcacatattttattgcccaaaaaa

SEQ ID NO: 121428 - DNA, 25 bp, Probe sequence
tcaaccatgttgattattgttcttt

SEQ ID NO: 121429 - DNA, 25 bp, Probe sequence
tattgcacatattttattgcccaaa

SEQ ID NO: 121430 - DNA, 25 bp, Probe sequence
tattgttctttatctttttttgaat

SEQ ID NO: 121431 - DNA, 25 bp, Probe sequence
atgagtattcaacacactttggaaa

SEQ ID NO: 121432 - DNA, 25 bp, Probe sequence
acctattttacatgattgtctattt

SEQ ID NO: 121433 - DNA, 25 bp, Probe sequence
aaatgagtattcaacacactttgga

SEQ ID NO: 121434 - DNA, 25 bp, Probe sequence
aattacctattttacatgattgtct

SEQ ID NO: 121435 - DNA, 25 bp, Probe sequence
catgtccattaattacctattttac

SEQ ID NO: 121436 - DNA, 25 bp, Probe sequence
gatatatatccattgaaaatttatt

SEQ ID NO: 121437 - DNA, 25 bp, Probe sequence
gattgtctatttagtttgaatgcac

SEQ ID NO: 121438 - DNA, 25 bp, Probe sequence
gttcttactcctaactaatgatata

SEQ ID NO: 121439 - DNA, 25 bp, Probe sequence
gtctatttagtttgaatgcacataa

SEQ ID NO: 121440 - DNA, 25 bp, Probe sequence
gtccattaattacctattttacatg

SEQ ID NO: 121441 - DNA, 25 bp, Probe sequence
tgaatgcacataaataaatccataa

SEQ ID NO: 121442 - DNA, 25 bp, Probe sequence
taatacatagttttcatgtccatta

SEQ ID NO: 121443 - DNA, 25 bp, Probe sequence
tactcctaactaatgatatatatcc

SEQ ID NO: 121444 - DNA, 25 bp, Probe sequence
tagttttcatgtccattaattacct

SEQ ID NO: 121445 - DNA, 25 bp, Probe sequence
tttcatgtccattaattacctattt

SEQ ID NO: 121446 - DNA, 25 bp, Probe sequence
atatttttcatattacgcataacaa

SEQ ID NO: 121447 - DNA, 25 bp, Probe sequence
atacatttattttaacacatgcact

SEQ ID NO: 121448 - DNA, 25 bp, Probe sequence
ataagcgtcaattgtttgaacatat

SEQ ID NO: 121449 - DNA, 25 bp, Probe sequence
acatggtttatctatcttggttatc

SEQ ID NO: 121450 - DNA, 25 bp, Probe sequence
aaatcacattgatgtcacagatacg

SEQ ID NO: 121451 - DNA, 25 bp, Probe sequence
aaatcgattaacaaacaacgtcagt

SEQ ID NO: 121452 - DNA, 25 bp, Probe sequence
aacaacgtcagttgaatatgccttt

SEQ ID NO: 121453 - DNA, 25 bp, Probe sequence
cacatgcactgatttacgactacta

SEQ ID NO: 121454 - DNA, 25 bp, Probe sequence
gaatatgccttttgagacatttcaa

SEQ ID NO: 121455 - DNA, 25 bp, Probe sequence
gaaagtcttcaacataattttaagt

SEQ ID NO: 121456 - DNA, 25 bp, Probe sequence
gagacatttcaaactttacaattgt

SEQ ID NO: 121457 - DNA, 25 bp, Probe sequence
tgatttacgactactaaacaccttt

SEQ ID NO: 121458 - DNA, 25 bp, Probe sequence
taaacacctctgattacgaatattt

SEQ ID NO: 121459 - DNA, 25 bp, Probe sequence
ttatctatcttggttatctatttat

SEQ ID NO: 121460 - DNA, 25 bp, Probe sequence
ttgttgctaatcgatatatttgctt

SEQ ID NO: 121461 - DNA, 25 bp, Probe sequence
attagctattatgttttatcctcaa

SEQ ID NO: 121462 - DNA, 25 bp, Probe sequence
agcatgttcatattgctggcgacat

SEQ ID NO: 121463 - DNA, 25 bp, Probe sequence
acacttgtgtatttattacttaaca

SEQ ID NO: 121464 - DNA, 25 bp, Probe sequence
aaagcctcatatcagcatataacct

SEQ ID NO: 121465 - DNA, 25 bp, Probe sequence
catctacccgtctattttacttgag

SEQ ID NO: 121466 - DNA, 25 bp, Probe sequence
cttcagtttgttttcatctacccgt

SEQ ID NO: 121467 - DNA, 25 bp, Probe sequence
ctgactccttcagtttgttttcatc

SEQ ID NO: 121468 - DNA, 25 bp, Probe sequence
gctggcgacattataagtctatccc

SEQ ID NO: 121469 - DNA, 25 bp, Probe sequence
gagacaactcttcaattcaagcatg

SEQ ID NO: 121470 - DNA, 25 bp, Probe sequence
gatatatacctttactcatgtctat

SEQ ID NO: 121471 - DNA, 25 bp, Probe sequence
tcatgtctatgttttttcactacca

SEQ ID NO: 121472 - DNA, 25 bp, Probe sequence
taagtctatcccaaagttataataa

SEQ ID NO: 121473 - DNA, 25 bp, Probe sequence
taacattgactcatcttaactcttg

SEQ ID NO: 121474 - DNA, 25 bp, Probe sequence
taggcaatagctttatgagacttat

SEQ ID NO: 121475 - DNA, 25 bp, Probe sequence
ttcactaccaattagacgattcgtt

SEQ ID NO: 121476 - DNA, 25 bp, Probe sequence
attacctcctagtgaaacgtttgtg

SEQ ID NO: 121477 - DNA, 25 bp, Probe sequence
agatattgattttagggagatagta

SEQ ID NO: 121478 - DNA, 25 bp, Probe sequence
acctcctagtgaaacgtttgtgcat

SEQ ID NO: 121479 - DNA, 25 bp, Probe sequence
acgtttgtgcatttcaactttatac

SEQ ID NO: 121480 - DNA, 25 bp, Probe sequence
aaacgtttgtgcatttcaactttat

SEQ ID NO: 121481 - DNA, 25 bp, Probe sequence
ctcctagtgaaacgtttgtgcattt

SEQ ID NO: 121482 - DNA, 25 bp, Probe sequence
gcatttcaactttatacattaaaat

SEQ ID NO: 121483 - DNA, 25 bp, Probe sequence
gaaacgtttgtgcatttcaacttta

SEQ ID NO: 121484 - DNA, 25 bp, Probe sequence
gtttgtgcatttcaactttatacat

SEQ ID NO: 121485 - DNA, 25 bp, Probe sequence
gtgaaacgtttgtgcatttcaactt

SEQ ID NO: 121486 - DNA, 25 bp, Probe sequence
gtgcatttcaactttatacattaaa

SEQ ID NO: 121487 - DNA, 25 bp, Probe sequence
ttattacctcctagtgaaacgtttg

SEQ ID NO: 121488 - DNA, 25 bp, Probe sequence
tacctcctagtgaaacgtttgtgca

SEQ ID NO: 121489 - DNA, 25 bp, Probe sequence
ttacctcctagtgaaacgtttgtgc

SEQ ID NO: 121490 - DNA, 25 bp, Probe sequence
ttgtgcatttcaactttatacatta

SEQ ID NO: 121491 - DNA, 25 bp, Probe sequence
aggtaaaatagtctacgtgcttcca

SEQ ID NO: 121492 - DNA, 25 bp, Probe sequence
atagtctacgtgcttccatttttta

SEQ ID NO: 121493 - DNA, 25 bp, Probe sequence
agtctacgtgcttccattttttatt

SEQ ID NO: 121494 - DNA, 25 bp, Probe sequence
acggaagcacttgtaggtaaaatag

SEQ ID NO: 121495 - DNA, 25 bp, Probe sequence
aaatagtctacgtgcttccattttt

SEQ ID NO: 121496 - DNA, 25 bp, Probe sequence
aaaatagtctacgtgcttccatttt

SEQ ID NO: 121497 - DNA, 25 bp, Probe sequence
aatagtctacgtgcttccatttttt

SEQ ID NO: 121498 - DNA, 25 bp, Probe sequence
ctacgtgcttccattttttattcta

SEQ ID NO: 121499 - DNA, 25 bp, Probe sequence
gtaaaatagtctacgtgcttccatt

SEQ ID NO: 121500 - DNA, 25 bp, Probe sequence
gtctacgtgcttccattttttattc

SEQ ID NO: 121501 - DNA, 25 bp, Probe sequence
ggtaaaatagtctacgtgcttccat

SEQ ID NO: 121502 - DNA, 25 bp, Probe sequence
tctacgtgcttccattttttattct

SEQ ID NO: 121503 - DNA, 25 bp, Probe sequence
taaaatagtctacgtgcttccattt

SEQ ID NO: 121504 - DNA, 25 bp, Probe sequence
tacgtgcttccattttttattctaa

SEQ ID NO: 121505 - DNA, 25 bp, Probe sequence
tagtctacgtgcttccattttttat

SEQ ID NO: 121506 - DNA, 25 bp, Probe sequence
attcaagaactcctatcagcaaaat

SEQ ID NO: 121507 - DNA, 25 bp, Probe sequence
attttgataatttgacctaacagtc

SEQ ID NO: 121508 - DNA, 25 bp, Probe sequence
ataataattgcaattctttagtgaa

SEQ ID NO: 121509 - DNA, 25 bp, Probe sequence
agaactcctatcagcaaaatgtata

SEQ ID NO: 121510 - DNA, 25 bp, Probe sequence
acagtcttataattatattatcgtt

SEQ ID NO: 121511 - DNA, 25 bp, Probe sequence
aactcctatcagcaaaatgtataat

SEQ ID NO: 121512 - DNA, 25 bp, Probe sequence
aatgtataatatttgattcgctaat

SEQ ID NO: 121513 - DNA, 25 bp, Probe sequence
aatttgacctaacagtcttataatt

SEQ ID NO: 121514 - DNA, 25 bp, Probe sequence
aattgcaattctttagtgaaatatt

SEQ ID NO: 121515 - DNA, 25 bp, Probe sequence
caagaactcctatcagcaaaatgta

SEQ ID NO: 121516 - DNA, 25 bp, Probe sequence
gacctaacagtcttataattatatt

SEQ ID NO: 121517 - DNA, 25 bp, Probe sequence
gataatttgacctaacagtcttata

SEQ ID NO: 121518 - DNA, 25 bp, Probe sequence
gattcgctaattaatcaatttaact

SEQ ID NO: 121519 - DNA, 25 bp, Probe sequence
ttatcgtttaattagggaggatgca

SEQ ID NO: 121520 - DNA, 25 bp, Probe sequence
ttgacctaacagtcttataattata

SEQ ID NO: 121521 - DNA, 25 bp, Probe sequence
atctgagtgttaattgatcatcaat

SEQ ID NO: 121522 - DNA, 25 bp, Probe sequence
aaagttcagctcattttcaatacga

SEQ ID NO: 121523 - DNA, 25 bp, Probe sequence
aacaaagcctgttactatatttctc

SEQ ID NO: 121524 - DNA, 25 bp, Probe sequence
aattctcggaatatgtgtttaatac

SEQ ID NO: 121525 - DNA, 25 bp, Probe sequence
aattgattttgaaaccattatcctt

SEQ ID NO: 121526 - DNA, 25 bp, Probe sequence
cattatccttaaatcttcatacaaa

SEQ ID NO: 121527 - DNA, 25 bp, Probe sequence
gaaaccattatccttaaatcttcat

SEQ ID NO: 121528 - DNA, 25 bp, Probe sequence
gaaattgtctttttcaattgatttt

SEQ ID NO: 121529 - DNA, 25 bp, Probe sequence
gatcatcaataacaatactcagatt

SEQ ID NO: 121530 - DNA, 25 bp, Probe sequence
gttactatatttctctagcttcact

SEQ ID NO: 121531 - DNA, 25 bp, Probe sequence
tgaaagaataataccaaaccctaag

SEQ ID NO: 121532 - DNA, 25 bp, Probe sequence
tagcttcactgatcattaaacttag

SEQ ID NO: 121533 - DNA, 25 bp, Probe sequence
tatttctctagcttcactgatcatt

SEQ ID NO: 121534 - DNA, 25 bp, Probe sequence
ttaaacttagtttcagcataataaa

SEQ ID NO: 121535 - DNA, 25 bp, Probe sequence
ttcaatacgattcaattaccgcaat

SEQ ID NO: 121536 - DNA, 25 bp, Probe sequence
attacttgcaccttcggcgatagag

SEQ ID NO: 121537 - DNA, 25 bp, Probe sequence
atagagtcttaacgctctattctct

SEQ ID NO: 121538 - DNA, 25 bp, Probe sequence
agtattatccttttgcctgagagtt

SEQ ID NO: 121539 - DNA, 25 bp, Probe sequence
aaaacaggatagcaatcgctaccct

SEQ ID NO: 121540 - DNA, 25 bp, Probe sequence
aatcaccaattcaggaacgcgttac

SEQ ID NO: 121541 - DNA, 25 bp, Probe sequence
caccttcggcgatagagtcttaacg

SEQ ID NO: 121542 - DNA, 25 bp, Probe sequence
cttgcaccttcggcgatagagtctt

SEQ ID NO: 121543 - DNA, 25 bp, Probe sequence
cttttgcctgagagtttcgtaataa

SEQ ID NO: 121544 - DNA, 25 bp, Probe sequence
gcgttacagtattatccttttgcct

SEQ ID NO: 121545 - DNA, 25 bp, Probe sequence
gctaccctgtttataaatcaccaat

SEQ ID NO: 121546 - DNA, 25 bp, Probe sequence
gcaatcgctaccctgtttataaatc

SEQ ID NO: 121547 - DNA, 25 bp, Probe sequence
gaacgcgttacagtattatcctttt

SEQ ID NO: 121548 - DNA, 25 bp, Probe sequence
gtaataaattacttgcaccttcggc

SEQ ID NO: 121549 - DNA, 25 bp, Probe sequence
ggatagcaatcgctaccctgtttat

SEQ ID NO: 121550 - DNA, 25 bp, Probe sequence
tatccttttgcctgagagtttcgta

SEQ ID NO: 121551 - DNA, 25 bp, Probe sequence
attatttcacatcctttttaatagt

SEQ ID NO: 121552 - DNA, 25 bp, Probe sequence
atttcacatcctttttaatagtact

SEQ ID NO: 121553 - DNA, 25 bp, Probe sequence
cacatcctttttaatagtactcatt

SEQ ID NO: 121554 - DNA, 25 bp, Probe sequence
catcctttttaatagtactcattta

SEQ ID NO: 121555 - DNA, 25 bp, Probe sequence
gaacggagttacatatcctttttct

SEQ ID NO: 121556 - DNA, 25 bp, Probe sequence
gagttacatatcctttttctttata

SEQ ID NO: 121557 - DNA, 25 bp, Probe sequence
gttacatatcctttttctttatata

SEQ ID NO: 121558 - DNA, 25 bp, Probe sequence
ggagttacatatcctttttctttat

SEQ ID NO: 121559 - DNA, 25 bp, Probe sequence
taatagtactcatttaaattctagt

SEQ ID NO: 121560 - DNA, 25 bp, Probe sequence
taataaattatttcacatccttttt

SEQ ID NO: 121561 - DNA, 25 bp, Probe sequence
taagaacggagttacatatcctttt

SEQ ID NO: 121562 - DNA, 25 bp, Probe sequence
taaattatttcacatcctttttaat

SEQ ID NO: 121563 - DNA, 25 bp, Probe sequence
tacatatcctttttctttatataaa

SEQ ID NO: 121564 - DNA, 25 bp, Probe sequence
tatcctttttctttatataaatcaa

SEQ ID NO: 121565 - DNA, 25 bp, Probe sequence
ttcacatcctttttaatagtactca

SEQ ID NO: 121566 - DNA, 25 bp, Probe sequence
atataatcacgtaggaggtgttttt

SEQ ID NO: 121567 - DNA, 25 bp, Probe sequence
ataatcacgtaggaggtgtttttat

SEQ ID NO: 121568 - DNA, 25 bp, Probe sequence
acatataatcacgtaggaggtgttt

SEQ ID NO: 121569 - DNA, 25 bp, Probe sequence
catataatcacgtaggaggtgtttt

SEQ ID NO: 121570 - DNA, 25 bp, Probe sequence
ctacatataatcacgtaggaggtgt

SEQ ID NO: 121571 - DNA, 25 bp, Probe sequence
cctcctacatataatcacgtaggag

SEQ ID NO: 121572 - DNA, 25 bp, Probe sequence
cctacatataatcacgtaggaggtg

SEQ ID NO: 121573 - DNA, 25 bp, Probe sequence
tcctacatataatcacgtaggaggt

SEQ ID NO: 121574 - DNA, 25 bp, Probe sequence
tcacgtaggaggtgtttttattact

SEQ ID NO: 121575 - DNA, 25 bp, Probe sequence
taatcacgtaggaggtgtttttatt

SEQ ID NO: 121576 - DNA, 25 bp, Probe sequence
tacatataatcacgtaggaggtgtt

SEQ ID NO: 121577 - DNA, 25 bp, Probe sequence
taggaggtgtttttattacttcaat

SEQ ID NO: 121578 - DNA, 25 bp, Probe sequence
tataatcacgtaggaggtgttttta

SEQ ID NO: 121579 - DNA, 25 bp, Probe sequence
atttcaattgaaaatcttttatcat

SEQ ID NO: 121580 - DNA, 25 bp, Probe sequence
atgttgtcatgatgaattatgcgac

SEQ ID NO: 121581 - DNA, 25 bp, Probe sequence
acctcttattttgagatttcacctt

SEQ ID NO: 121582 - DNA, 25 bp, Probe sequence
aaggtgaaacctcttattttgagat

SEQ ID NO: 121583 - DNA, 25 bp, Probe sequence
aatcttttatcatttcatacgtgtg

SEQ ID NO: 121584 - DNA, 25 bp, Probe sequence
aattatgcgacaattctaaaattta

SEQ ID NO: 121585 - DNA, 25 bp, Probe sequence
catttcatacgtgtgcataattaaa

SEQ ID NO: 121586 - DNA, 25 bp, Probe sequence
ctcttattttgagatttcacctttt

SEQ ID NO: 121587 - DNA, 25 bp, Probe sequence
gaaacctcttattttgagatttcac

SEQ ID NO: 121588 - DNA, 25 bp, Probe sequence
tcttttatcatttcatacgtgtgca

SEQ ID NO: 121589 - DNA, 25 bp, Probe sequence
tacgtgtgcataattaaaaaggtga

SEQ ID NO: 121590 - DNA, 25 bp, Probe sequence
tatcatttcatacgtgtgcataatt

SEQ ID NO: 121591 - DNA, 25 bp, Probe sequence
tattttgagatttcaccttttttat

SEQ ID NO: 121592 - DNA, 25 bp, Probe sequence
ttttatcatttcatacgtgtgcata

SEQ ID NO: 121593 - DNA, 25 bp, Probe sequence
ttttgagatttcaccttttttattg

SEQ ID NO: 121594 - DNA, 25 bp, Probe sequence
attcctccttatcatttctaaatac

SEQ ID NO: 121595 - DNA, 25 bp, Probe sequence
ataccaacatctataatatttgcaa

SEQ ID NO: 121596 - DNA, 25 bp, Probe sequence
acgactttattattataccaacatc

SEQ ID NO: 121597 - DNA, 25 bp, Probe sequence
aaaattttacaaccatgcgctacac

SEQ ID NO: 121598 - DNA, 25 bp, Probe sequence
aaccatgcgctacacaatcgtcagg

SEQ ID NO: 121599 - DNA, 25 bp, Probe sequence
aattttacaaccatgcgctacacaa

SEQ ID NO: 121600 - DNA, 25 bp, Probe sequence
caaccatgcgctacacaatcgtcag

SEQ ID NO: 121601 - DNA, 25 bp, Probe sequence
catgcgctacacaatcgtcaggtta

SEQ ID NO: 121602 - DNA, 25 bp, Probe sequence
cgctacacaatcgtcaggttaaatt

SEQ ID NO: 121603 - DNA, 25 bp, Probe sequence
cctccttatcatttctaaatacgac

SEQ ID NO: 121604 - DNA, 25 bp, Probe sequence
tgcgctacacaatcgtcaggttaaa

SEQ ID NO: 121605 - DNA, 25 bp, Probe sequence
tacaaccatgcgctacacaatcgtc

SEQ ID NO: 121606 - DNA, 25 bp, Probe sequence
ttttacaaccatgcgctacacaatc

SEQ ID NO: 121607 - DNA, 25 bp, Probe sequence
ttattcctccttatcatttctaaat

SEQ ID NO: 121608 - DNA, 25 bp, Probe sequence
ttatcatttctaaatacgactttat

SEQ ID NO: 121609 - DNA, 25 bp, Probe sequence
aactacctacctctattcaaagtct

SEQ ID NO: 121610 - DNA, 25 bp, Probe sequence
ataacggtctcatttaagagaccga

SEQ ID NO: 121611 - DNA, 25 bp, Probe sequence
agaaattatttctatctttttgaca

SEQ ID NO: 121612 - DNA, 25 bp, Probe sequence
acctctattcaaagtctttcacttt

SEQ ID NO: 121613 - DNA, 25 bp, Probe sequence
acctacctctattcaaagtctttca

SEQ ID NO: 121614 - DNA, 25 bp, Probe sequence
actacctacctctattcaaagtctt

SEQ ID NO: 121615 - DNA, 25 bp, Probe sequence
ctacctacctctattcaaagtcttt

SEQ ID NO: 121616 - DNA, 25 bp, Probe sequence
aagagaccgaacaagtaatcatact

SEQ ID NO: 121617 - DNA, 25 bp, Probe sequence
aagtctttcactttaaatcatatat

SEQ ID NO: 121618 - DNA, 25 bp, Probe sequence
ctacctctattcaaagtctttcact

SEQ ID NO: 121619 - DNA, 25 bp, Probe sequence
ctctattcaaagtctttcactttaa

SEQ ID NO: 121620 - DNA, 25 bp, Probe sequence
cctacctctattcaaagtctttcac

SEQ ID NO: 121621 - DNA, 25 bp, Probe sequence
gaaattatttctatctttttgacaa

SEQ ID NO: 121622 - DNA, 25 bp, Probe sequence
gtctttcactttaaatcatatatga

SEQ ID NO: 121623 - DNA, 25 bp, Probe sequence
tacctacctctattcaaagtctttc

SEQ ID NO: 121624 - DNA, 25 bp, Probe sequence
atttgcttaaattctactacttatt

SEQ ID NO: 121625 - DNA, 25 bp, Probe sequence
ataatcatcctcctaaaatgtctgt

SEQ ID NO: 121626 - DNA, 25 bp, Probe sequence
atcctcctaaaatgtctgtaagtaa

SEQ ID NO: 121627 - DNA, 25 bp, Probe sequence
atgaaatgaacctttatcttctata

SEQ ID NO: 121628 - DNA, 25 bp, Probe sequence
acttattattttctctactcattta

SEQ ID NO: 121629 - DNA, 25 bp, Probe sequence
aataacaagcagtgactggttcaac

SEQ ID NO: 121630 - DNA, 25 bp, Probe sequence
ctactacttattattttctctactc

SEQ ID NO: 121631 - DNA, 25 bp, Probe sequence
ctgaccaaatgtgcataaatctcat

SEQ ID NO: 121632 - DNA, 25 bp, Probe sequence
cgaacggagtatgaaatgaaccttt

SEQ ID NO: 121633 - DNA, 25 bp, Probe sequence
gcatacatctgaccaaatgtgcata

SEQ ID NO: 121634 - DNA, 25 bp, Probe sequence
gagatttatgcatacatctgaccaa

SEQ ID NO: 121635 - DNA, 25 bp, Probe sequence
tgaacctttatcttctataatttaa

SEQ ID NO: 121636 - DNA, 25 bp, Probe sequence
taaaaagttaacagatttgccataa

SEQ ID NO: 121637 - DNA, 25 bp, Probe sequence
tttgccataaaatcatacgaacgga

SEQ ID NO: 121638 - DNA, 25 bp, Probe sequence
ttctctactcatttaatataactca

SEQ ID NO: 121639 - DNA, 25 bp, Probe sequence
atttatcgcatttcttgaagagagc

SEQ ID NO: 121640 - DNA, 25 bp, Probe sequence
atttcttgaagagagcattatcatt

SEQ ID NO: 121641 - DNA, 25 bp, Probe sequence
agatatgcccccttcaagttttatt

SEQ ID NO: 121642 - DNA, 25 bp, Probe sequence
aaataaagagatatgcccccttcaa

SEQ ID NO: 121643 - DNA, 25 bp, Probe sequence
acaactcctagtaacatatgtaaac

SEQ ID NO: 121644 - DNA, 25 bp, Probe sequence
aacagtaatgtttacgactcaaaat

SEQ ID NO: 121645 - DNA, 25 bp, Probe sequence
ctcgcattcaactatacaactccta

SEQ ID NO: 121646 - DNA, 25 bp, Probe sequence
ccccttcaagttttatttatcgcat

SEQ ID NO: 121647 - DNA, 25 bp, Probe sequence
gttttatttatcgcatttcttgaag

SEQ ID NO: 121648 - DNA, 25 bp, Probe sequence
tgtttacgactcaaaattagacaaa

SEQ ID NO: 121649 - DNA, 25 bp, Probe sequence
tgcccccttcaagttttatttatcg

SEQ ID NO: 121650 - DNA, 25 bp, Probe sequence
tcacctcgcattcaactatacaact

SEQ ID NO: 121651 - DNA, 25 bp, Probe sequence
tcaactatacaactcctagtaacat

SEQ ID NO: 121652 - DNA, 25 bp, Probe sequence
taaagagatatgcccccttcaagtt

SEQ ID NO: 121653 - DNA, 25 bp, Probe sequence
tatgcccccttcaagttttatttat

SEQ ID NO: 121654 - DNA, 25 bp, Probe sequence
atttggcctccttatatgttcatct

SEQ ID NO: 121655 - DNA, 25 bp, Probe sequence
atatgttcatctttactattataaa

SEQ ID NO: 121656 - DNA, 25 bp, Probe sequence
cttatatgttcatctttactattat

SEQ ID NO: 121657 - DNA, 25 bp, Probe sequence
ctccttatatgttcatctttactat

SEQ ID NO: 121658 - DNA, 25 bp, Probe sequence
cctccttatatgttcatctttacta

SEQ ID NO: 121659 - DNA, 25 bp, Probe sequence
ccttatatgttcatctttactatta

SEQ ID NO: 121660 - DNA, 25 bp, Probe sequence
gcctccttatatgttcatctttact

SEQ ID NO: 121661 - DNA, 25 bp, Probe sequence
gatttggcctccttatatgttcatc

SEQ ID NO: 121662 - DNA, 25 bp, Probe sequence
gttcatctttactattataaagtat

SEQ ID NO: 121663 - DNA, 25 bp, Probe sequence
ggcctccttatatgttcatctttac

SEQ ID NO: 121664 - DNA, 25 bp, Probe sequence
tggcctccttatatgttcatcttta

SEQ ID NO: 121665 - DNA, 25 bp, Probe sequence
tccttatatgttcatctttactatt

SEQ ID NO: 121666 - DNA, 25 bp, Probe sequence
tcaaaatttagaaatcccgagattt

SEQ ID NO: 121667 - DNA, 25 bp, Probe sequence
tataaagtataaatgtgctatttta

SEQ ID NO: 121668 - DNA, 25 bp, Probe sequence
tatatgttcatctttactattataa

SEQ ID NO: 121669 - DNA, 25 bp, Probe sequence
attcatgtcttggtatcaatcatta

SEQ ID NO: 121670 - DNA, 25 bp, Probe sequence
atgtcttggtatcaatcattaaaat

SEQ ID NO: 121671 - DNA, 25 bp, Probe sequence
accaacctcactcaagttaaatctt

SEQ ID NO: 121672 - DNA, 25 bp, Probe sequence
acctcactcaagttaaatcttaatc

SEQ ID NO: 121673 - DNA, 25 bp, Probe sequence
aagcgcttattcatgtcttggtatc

SEQ ID NO: 121674 - DNA, 25 bp, Probe sequence
aatgtaccaacctcactcaagttaa

SEQ ID NO: 121675 - DNA, 25 bp, Probe sequence
aataagcgcttattcatgtcttggt

SEQ ID NO: 121676 - DNA, 25 bp, Probe sequence
cattattcaatgtaccaacctcact

SEQ ID NO: 121677 - DNA, 25 bp, Probe sequence
gcgcttattcatgtcttggtatcaa

SEQ ID NO: 121678 - DNA, 25 bp, Probe sequence
gcttattcatgtcttggtatcaatc

SEQ ID NO: 121679 - DNA, 25 bp, Probe sequence
gaggttgaacattattcaatgtacc

SEQ ID NO: 121680 - DNA, 25 bp, Probe sequence
gtaccaacctcactcaagttaaatc

SEQ ID NO: 121681 - DNA, 25 bp, Probe sequence
tcaatgtaccaacctcactcaagtt

SEQ ID NO: 121682 - DNA, 25 bp, Probe sequence
tattcaatgtaccaacctcactcaa

SEQ ID NO: 121683 - DNA, 25 bp, Probe sequence
tttattctcctttatgaaaaaagag

SEQ ID NO: 121684 - DNA, 25 bp, Probe sequence
attcttaattaattcatccatattt

SEQ ID NO: 121685 - DNA, 25 bp, Probe sequence
attcatccatatttttaattttatt

SEQ ID NO: 121686 - DNA, 25 bp, Probe sequence
atacattttgacataatcattattc

SEQ ID NO: 121687 - DNA, 25 bp, Probe sequence
aatgcggtaactatcatttaccctt

SEQ ID NO: 121688 - DNA, 25 bp, Probe sequence
aatcattattcgtattattctttaa

SEQ ID NO: 121689 - DNA, 25 bp, Probe sequence
catttacccttatacattttgacat

SEQ ID NO: 121690 - DNA, 25 bp, Probe sequence
ctatcatttacccttatacattttg

SEQ ID NO: 121691 - DNA, 25 bp, Probe sequence
ggcctcccgattttaaatatgaaca

SEQ ID NO: 121692 - DNA, 25 bp, Probe sequence
tggaactaatcccaatatttatttt

SEQ ID NO: 121693 - DNA, 25 bp, Probe sequence
tgaacattcgaaatttattcaatat

SEQ ID NO: 121694 - DNA, 25 bp, Probe sequence
tcgtattattctttaaaatcacatg

SEQ ID NO: 121695 - DNA, 25 bp, Probe sequence
tcaatagtgttgtttaaatgcggta

SEQ ID NO: 121696 - DNA, 25 bp, Probe sequence
taactatcatttacccttatacatt

SEQ ID NO: 121697 - DNA, 25 bp, Probe sequence
tacccttatacattttgacataatc

SEQ ID NO: 121698 - DNA, 25 bp, Probe sequence
tattcaatattgctattttaaacta

SEQ ID NO: 121699 - DNA, 25 bp, Probe sequence
attaaatcacctattaagcattagt

SEQ ID NO: 121700 - DNA, 25 bp, Probe sequence
atcacctattaagcattagttatac

SEQ ID NO: 121701 - DNA, 25 bp, Probe sequence
agcattagttatactattataccta

SEQ ID NO: 121702 - DNA, 25 bp, Probe sequence
acctattaagcattagttatactat

SEQ ID NO: 121703 - DNA, 25 bp, Probe sequence
aaatcacctattaagcattagttat

SEQ ID NO: 121704 - DNA, 25 bp, Probe sequence
aagcattagttatactattatacct

SEQ ID NO: 121705 - DNA, 25 bp, Probe sequence
aatcacctattaagcattagttata

SEQ ID NO: 121706 - DNA, 25 bp, Probe sequence
cacctattaagcattagttatacta

SEQ ID NO: 121707 - DNA, 25 bp, Probe sequence
cctattaagcattagttatactatt

SEQ ID NO: 121708 - DNA, 25 bp, Probe sequence
gcattagttatactattatacctaa

SEQ ID NO: 121709 - DNA, 25 bp, Probe sequence
tcacctattaagcattagttatact

SEQ ID NO: 121710 - DNA, 25 bp, Probe sequence
taaatcacctattaagcattagtta

SEQ ID NO: 121711 - DNA, 25 bp, Probe sequence
tagttatactattatacctaatttt

SEQ ID NO: 121712 - DNA, 25 bp, Probe sequence
ttagttatactattatacctaattt

SEQ ID NO: 121713 - DNA, 25 bp, Probe sequence
ttaaatcacctattaagcattagtt

SEQ ID NO: 121714 - DNA, 25 bp, Probe sequence
attggcgcaacgaatcattttaaaa

SEQ ID NO: 121715 - DNA, 25 bp, Probe sequence
atatttactatgctgttattttcca

SEQ ID NO: 121716 - DNA, 25 bp, Probe sequence
atgctgttattttccatggggcgtt

SEQ ID NO: 121717 - DNA, 25 bp, Probe sequence
aaagcgagtgactacactaatttgg

SEQ ID NO: 121718 - DNA, 25 bp, Probe sequence
aactcgtcccatggaagtaaagcat

SEQ ID NO: 121719 - DNA, 25 bp, Probe sequence
aacgtacagcgagttaaggatagtg

SEQ ID NO: 121720 - DNA, 25 bp, Probe sequence
caaacacattaattttacttgcctt

SEQ ID NO: 121721 - DNA, 25 bp, Probe sequence
gatatttctttcatgtcacaaacac

SEQ ID NO: 121722 - DNA, 25 bp, Probe sequence
gttattttccatggggcgttttcat

SEQ ID NO: 121723 - DNA, 25 bp, Probe sequence
ggggcgttttcatgtatgaggagag

SEQ ID NO: 121724 - DNA, 25 bp, Probe sequence
taaaatattaactcgtcccatggaa

SEQ ID NO: 121725 - DNA, 25 bp, Probe sequence
tacactaatttgggtggaaccgcgg

SEQ ID NO: 121726 - DNA, 25 bp, Probe sequence
tacgtaacttattttgtattatata

SEQ ID NO: 121727 - DNA, 25 bp, Probe sequence
tataccgatatttctttcatgtcac

SEQ ID NO: 121728 - DNA, 25 bp, Probe sequence
ttacttgcctttaaataatctatca

SEQ ID NO: 121729 - DNA, 25 bp, Probe sequence
attgccagtatctcttttctattca

SEQ ID NO: 121730 - DNA, 25 bp, Probe sequence
atctatgtggctacttgaatacctt

SEQ ID NO: 121731 - DNA, 25 bp, Probe sequence
atgtggctacttgaataccttttat

SEQ ID NO: 121732 - DNA, 25 bp, Probe sequence
aggtattcaaataaacacatctatg

SEQ ID NO: 121733 - DNA, 25 bp, Probe sequence
aaattgccagtatctcttttctatt

SEQ ID NO: 121734 - DNA, 25 bp, Probe sequence
aaaagactttccaccatatgtggtg

SEQ ID NO: 121735 - DNA, 25 bp, Probe sequence
cacatctatgtggctacttgaatac

SEQ ID NO: 121736 - DNA, 25 bp, Probe sequence
caccatatgtggtggctatataatt

SEQ ID NO: 121737 - DNA, 25 bp, Probe sequence
cttgaataccttttattattttatg

SEQ ID NO: 121738 - DNA, 25 bp, Probe sequence
ccagtatctcttttctattcaaaaa

SEQ ID NO: 121739 - DNA, 25 bp, Probe sequence
gactttccaccatatgtggtggcta

SEQ ID NO: 121740 - DNA, 25 bp, Probe sequence
ggttagtaaaattgccagtatctct

SEQ ID NO: 121741 - DNA, 25 bp, Probe sequence
ggctacttgaataccttttattatt

SEQ ID NO: 121742 - DNA, 25 bp, Probe sequence
tgccagtatctcttttctattcaaa

SEQ ID NO: 121743 - DNA, 25 bp, Probe sequence
ttaaaaagactttccaccatatgtg

SEQ ID NO: 121744 - DNA, 25 bp, Probe sequence
attcattctatgatgctttaatatc

SEQ ID NO: 121745 - DNA, 25 bp, Probe sequence
ataatcatttatacttttcaccttg

SEQ ID NO: 121746 - DNA, 25 bp, Probe sequence
atctttgcattgacttactcatttt

SEQ ID NO: 121747 - DNA, 25 bp, Probe sequence
aaacatctttgcattgacttactca

SEQ ID NO: 121748 - DNA, 25 bp, Probe sequence
gcgctccttttcatatatcatttat

SEQ ID NO: 121749 - DNA, 25 bp, Probe sequence
gcattgacttactcatttttcttta

SEQ ID NO: 121750 - DNA, 25 bp, Probe sequence
gcaattgattgatttaaacatcttt

SEQ ID NO: 121751 - DNA, 25 bp, Probe sequence
tgacttactcatttttctttaattt

SEQ ID NO: 121752 - DNA, 25 bp, Probe sequence
tctatgatgctttaatatctactta

SEQ ID NO: 121753 - DNA, 25 bp, Probe sequence
tcatttatacttttcaccttgtcat

SEQ ID NO: 121754 - DNA, 25 bp, Probe sequence
taaaagcagtttcaattttagacta

SEQ ID NO: 121755 - DNA, 25 bp, Probe sequence
tatctacttaattatatcatgcaat

SEQ ID NO: 121756 - DNA, 25 bp, Probe sequence
tatatcatttatattcattctatga

SEQ ID NO: 121757 - DNA, 25 bp, Probe sequence
ttatacttttcaccttgtcataaaa

SEQ ID NO: 121758 - DNA, 25 bp, Probe sequence
ttcaccttgtcataaaagcagtttc

SEQ ID NO: 121759 - DNA, 25 bp, Probe sequence
attaatattcgtgttgagggagtca

SEQ ID NO: 121760 - DNA, 25 bp, Probe sequence
agtgtcagacactaacttgtgatgt

SEQ ID NO: 121761 - DNA, 25 bp, Probe sequence
agaacctatagaatatcaatttgat

SEQ ID NO: 121762 - DNA, 25 bp, Probe sequence
acatcacatattagtgtcagacact

SEQ ID NO: 121763 - DNA, 25 bp, Probe sequence
catgaaattgaatatactttatagt

SEQ ID NO: 121764 - DNA, 25 bp, Probe sequence
ctcgccctcacattaattatacatg

SEQ ID NO: 121765 - DNA, 25 bp, Probe sequence
cctcgccctcacattaattatacat

SEQ ID NO: 121766 - DNA, 25 bp, Probe sequence
gccctcacattaattatacatgaaa

SEQ ID NO: 121767 - DNA, 25 bp, Probe sequence
gacaacaaaaaaacatcacatatta

SEQ ID NO: 121768 - DNA, 25 bp, Probe sequence
gacactaacttgtgatgtttatttt

SEQ ID NO: 121769 - DNA, 25 bp, Probe sequence
gtcagacactaacttgtgatgttta

SEQ ID NO: 121770 - DNA, 25 bp, Probe sequence
gtgtcagacactaacttgtgatgtt

SEQ ID NO: 121771 - DNA, 25 bp, Probe sequence
tcgccctcacattaattatacatga

SEQ ID NO: 121772 - DNA, 25 bp, Probe sequence
taacttgtgatgtttattttatata

SEQ ID NO: 121773 - DNA, 25 bp, Probe sequence
ttgagggagtcaacagaggtattaa

SEQ ID NO: 121774 - DNA, 25 bp, Probe sequence
atatctttaatacggaaccttatgg

SEQ ID NO: 121775 - DNA, 25 bp, Probe sequence
agtcaattgcacagtaaaactatgc

SEQ ID NO: 121776 - DNA, 25 bp, Probe sequence
aaaactatgcatttataagtataat

SEQ ID NO: 121777 - DNA, 25 bp, Probe sequence
aatatatctgtaatttatggtcaat

SEQ ID NO: 121778 - DNA, 25 bp, Probe sequence
cacaaagacttttagattttgttct

SEQ ID NO: 121779 - DNA, 25 bp, Probe sequence
cctccaaatatcaacggaactttat

SEQ ID NO: 121780 - DNA, 25 bp, Probe sequence
gaagagttgcttatatagtaaattg

SEQ ID NO: 121781 - DNA, 25 bp, Probe sequence
gaaacatatttcacatcaaaatcac

SEQ ID NO: 121782 - DNA, 25 bp, Probe sequence
ggaactttatagtcaattgcacagt

SEQ ID NO: 121783 - DNA, 25 bp, Probe sequence
tccctccctccaaatatcaacggaa

SEQ ID NO: 121784 - DNA, 25 bp, Probe sequence
tacaaaacctatatctttaatacgg

SEQ ID NO: 121785 - DNA, 25 bp, Probe sequence
tatagtaaattgtgaagccgttaaa

SEQ ID NO: 121786 - DNA, 25 bp, Probe sequence
tacggaaccttatggtatgaatcaa

SEQ ID NO: 121787 - DNA, 25 bp, Probe sequence
tttgttctaaaaatctcttaataat

SEQ ID NO: 121788 - DNA, 25 bp, Probe sequence
ttcacatcaaaatcacaaagacttt

SEQ ID NO: 121789 - DNA, 25 bp, Probe sequence
atagtttaacgtaatatgtcatact

SEQ ID NO: 121790 - DNA, 25 bp, Probe sequence
atctctccttttcttaattaactca

SEQ ID NO: 121791 - DNA, 25 bp, Probe sequence
aaaaagccaaagccaatgttctatt

SEQ ID NO: 121792 - DNA, 25 bp, Probe sequence
aatgttctattgactttgacttttc

SEQ ID NO: 121793 - DNA, 25 bp, Probe sequence
ctatctctccttttcttaattaact

SEQ ID NO: 121794 - DNA, 25 bp, Probe sequence
ctctccttttcttaattaactcata

SEQ ID NO: 121795 - DNA, 25 bp, Probe sequence
ccttttcttaattaactcatatagt

SEQ ID NO: 121796 - DNA, 25 bp, Probe sequence
gccaaagccaatgttctattgactt

SEQ ID NO: 121797 - DNA, 25 bp, Probe sequence
gacaacattctaattgtattgttta

SEQ ID NO: 121798 - DNA, 25 bp, Probe sequence
gactttgacttttcagatcatgaca

SEQ ID NO: 121799 - DNA, 25 bp, Probe sequence
gacttttcagatcatgacaacattc

SEQ ID NO: 121800 - DNA, 25 bp, Probe sequence
gttctattgactttgacttttcaga

SEQ ID NO: 121801 - DNA, 25 bp, Probe sequence
gtaatatgtcatactatccaaataa

SEQ ID NO: 121802 - DNA, 25 bp, Probe sequence
gtcatactatccaaataaaaagcca

SEQ ID NO: 121803 - DNA, 25 bp, Probe sequence
tcagatcatgacaacattctaattg

SEQ ID NO: 121804 - DNA, 25 bp, Probe sequence
attcctccatttaatcattaaatta

SEQ ID NO: 121805 - DNA, 25 bp, Probe sequence
ataaaattcctccatttaatcatta

SEQ ID NO: 121806 - DNA, 25 bp, Probe sequence
acaatgtcttttcgccaaatttaag

SEQ ID NO: 121807 - DNA, 25 bp, Probe sequence
aaattcctccatttaatcattaaat

SEQ ID NO: 121808 - DNA, 25 bp, Probe sequence
aataaaattcctccatttaatcatt

SEQ ID NO: 121809 - DNA, 25 bp, Probe sequence
aattcctccatttaatcattaaatt

SEQ ID NO: 121810 - DNA, 25 bp, Probe sequence
tcctccatttaatcattaaattaat

SEQ ID NO: 121811 - DNA, 25 bp, Probe sequence
taaaattcctccatttaatcattaa

SEQ ID NO: 121812 - DNA, 25 bp, Probe sequence
taaacaatgtcttttcgccaaattt

SEQ ID NO: 121813 - DNA, 25 bp, Probe sequence
tttaaacaatgtcttttcgccaaat

SEQ ID NO: 121814 - DNA, 25 bp, Probe sequence
ttaaacaatgtcttttcgccaaatt

SEQ ID NO: 121815 - DNA, 25 bp, Probe sequence
ttcctccatttaatcattaaattaa

SEQ ID NO: 121816 - DNA, 25 bp, Probe sequence
attagcactcacttatctcaagtgc

SEQ ID NO: 121817 - DNA, 25 bp, Probe sequence
atctcaagtgctaattataatttat

SEQ ID NO: 121818 - DNA, 25 bp, Probe sequence
atgttaaagactcgaaatttcaatt

SEQ ID NO: 121819 - DNA, 25 bp, Probe sequence
agcactcacttatctcaagtgctaa

SEQ ID NO: 121820 - DNA, 25 bp, Probe sequence
acttatctcaagtgctaattataat

SEQ ID NO: 121821 - DNA, 25 bp, Probe sequence
aagtgctaattataatttatcaaat

SEQ ID NO: 121822 - DNA, 25 bp, Probe sequence
cactcacttatctcaagtgctaatt

SEQ ID NO: 121823 - DNA, 25 bp, Probe sequence
cattagcactcacttatctcaagtg

SEQ ID NO: 121824 - DNA, 25 bp, Probe sequence
ctcattagcactcacttatctcaag

SEQ ID NO: 121825 - DNA, 25 bp, Probe sequence
cctcattagcactcacttatctcaa

SEQ ID NO: 121826 - DNA, 25 bp, Probe sequence
gtcaatgttaaagactcgaaatttc

SEQ ID NO: 121827 - DNA, 25 bp, Probe sequence
tggtcaaagtaagtcaatgttaaag

SEQ ID NO: 121828 - DNA, 25 bp, Probe sequence
tcattagcactcacttatctcaagt

SEQ ID NO: 121829 - DNA, 25 bp, Probe sequence
ttatcaaattggtcaaagtaagtca

SEQ ID NO: 121830 - DNA, 25 bp, Probe sequence
ttagcactcacttatctcaagtgct

SEQ ID NO: 121831 - DNA, 25 bp, Probe sequence
atttattcttgtttagagggagtga

SEQ ID NO: 121832 - DNA, 25 bp, Probe sequence
atcctgttggactatctgctgttat

SEQ ID NO: 121833 - DNA, 25 bp, Probe sequence
aactcatgcataagggagtgggaca

SEQ ID NO: 121834 - DNA, 25 bp, Probe sequence
caatcggctacatcctgttggacta

SEQ ID NO: 121835 - DNA, 25 bp, Probe sequence
ctcagactgtttatccaatcggcta

SEQ ID NO: 121836 - DNA, 25 bp, Probe sequence
cccgcttctcagactgtttatccaa

SEQ ID NO: 121837 - DNA, 25 bp, Probe sequence
gactatctgctgttattcttacttt

SEQ ID NO: 121838 - DNA, 25 bp, Probe sequence
gattcattttgatatttattcttgt

SEQ ID NO: 121839 - DNA, 25 bp, Probe sequence
gttggactatctgctgttattctta

SEQ ID NO: 121840 - DNA, 25 bp, Probe sequence
gtttatccaatcggctacatcctgt

SEQ ID NO: 121841 - DNA, 25 bp, Probe sequence
ggttgtctaatatatcgattcattt

SEQ ID NO: 121842 - DNA, 25 bp, Probe sequence
ggctacatcctgttggactatctgc

SEQ ID NO: 121843 - DNA, 25 bp, Probe sequence
tgctgttattcttacttttaacttt

SEQ ID NO: 121844 - DNA, 25 bp, Probe sequence
taacgtttaatcaatggttgtctaa

SEQ ID NO: 121845 - DNA, 25 bp, Probe sequence
ttagccagatgtaatatgtccttaa

SEQ ID NO: 121846 - DNA, 25 bp, Probe sequence
gacgttaatttatcctaggctccct

SEQ ID NO: 121847 - DNA, 25 bp, Probe sequence
ataacattgtaaagcccaggacgtt

SEQ ID NO: 121848 - DNA, 25 bp, Probe sequence
agcccaggacgttaatttatcctag

SEQ ID NO: 121849 - DNA, 25 bp, Probe sequence
actctgtcgatgactgccaatataa

SEQ ID NO: 121850 - DNA, 25 bp, Probe sequence
acattgtaaagcccaggacgttaat

SEQ ID NO: 121851 - DNA, 25 bp, Probe sequence
actttattcattgtaaattgttaat

SEQ ID NO: 121852 - DNA, 25 bp, Probe sequence
aactctgtcgatgactgccaatata

SEQ ID NO: 121853 - DNA, 25 bp, Probe sequence
cattttaactctgtcgatgactgcc

SEQ ID NO: 121854 - DNA, 25 bp, Probe sequence
gctcattttaactctgtcgatgact

SEQ ID NO: 121855 - DNA, 25 bp, Probe sequence
tgtaaagcccaggacgttaatttat

SEQ ID NO: 121856 - DNA, 25 bp, Probe sequence
tctgtcgatgactgccaatataaca

SEQ ID NO: 121857 - DNA, 25 bp, Probe sequence
taactctgtcgatgactgccaatat

SEQ ID NO: 121858 - DNA, 25 bp, Probe sequence
ttttaactctgtcgatgactgccaa

SEQ ID NO: 121859 - DNA, 25 bp, Probe sequence
ttagttattaaactttattcattgt

SEQ ID NO: 121860 - DNA, 25 bp, Probe sequence
ttaactctgtcgatgactgccaata

SEQ ID NO: 121861 - DNA, 25 bp, Probe sequence
aacgtattgattgtgtttccaacac

SEQ ID NO: 121862 - DNA, 25 bp, Probe sequence
aacgccataatcttggatgaacttt

SEQ ID NO: 121863 - DNA, 25 bp, Probe sequence
aatgattgcacaacggttagacttt

SEQ ID NO: 121864 - DNA, 25 bp, Probe sequence
ccgtattatctttcgcatctttgat

SEQ ID NO: 121865 - DNA, 25 bp, Probe sequence
gcatctttgatataataacgttttt

SEQ ID NO: 121866 - DNA, 25 bp, Probe sequence
gcaaaattttaagctaaccccatca

SEQ ID NO: 121867 - DNA, 25 bp, Probe sequence
gatgaactcacttttaggaggtgac

SEQ ID NO: 121868 - DNA, 25 bp, Probe sequence
gttaaaatatttcttgttgtaatca

SEQ ID NO: 121869 - DNA, 25 bp, Probe sequence
gtgtttccaacacaatttattaaat

SEQ ID NO: 121870 - DNA, 25 bp, Probe sequence
ggtaaatgcaaacgccataatcttg

SEQ ID NO: 121871 - DNA, 25 bp, Probe sequence
tgcacaacggttagacttttgttaa

SEQ ID NO: 121872 - DNA, 25 bp, Probe sequence
taagctaaccccatcaaataaatga

SEQ ID NO: 121873 - DNA, 25 bp, Probe sequence
taaacccgtattatctttcgcatct

SEQ ID NO: 121874 - DNA, 25 bp, Probe sequence
tttatccttctcactttcataaaat

SEQ ID NO: 121875 - DNA, 25 bp, Probe sequence
ttatttaaatacatacttgcgatat

SEQ ID NO: 121876 - DNA, 25 bp, Probe sequence
attacaccctttcattcgtttgaca

SEQ ID NO: 121877 - DNA, 25 bp, Probe sequence
accctttcattcgtttgacacatca

SEQ ID NO: 121878 - DNA, 25 bp, Probe sequence
aatagattatatcatgtttctgtat

SEQ ID NO: 121879 - DNA, 25 bp, Probe sequence
caccctttcattcgtttgacacatc

SEQ ID NO: 121880 - DNA, 25 bp, Probe sequence
cattcgtttgacacatcaatagatt

SEQ ID NO: 121881 - DNA, 25 bp, Probe sequence
ctttcattcgtttgacacatcaata

SEQ ID NO: 121882 - DNA, 25 bp, Probe sequence
ccctttcattcgtttgacacatcaa

SEQ ID NO: 121883 - DNA, 25 bp, Probe sequence
cctttcattcgtttgacacatcaat

SEQ ID NO: 121884 - DNA, 25 bp, Probe sequence
tcattacaccctttcattcgtttga

SEQ ID NO: 121885 - DNA, 25 bp, Probe sequence
tcattcgtttgacacatcaatagat

SEQ ID NO: 121886 - DNA, 25 bp, Probe sequence
tttcattcgtttgacacatcaatag

SEQ ID NO: 121887 - DNA, 25 bp, Probe sequence
ttacaccctttcattcgtttgacac

SEQ ID NO: 121888 - DNA, 25 bp, Probe sequence
ttcattcgtttgacacatcaataga

SEQ ID NO: 121889 - DNA, 25 bp, Probe sequence
ttcgtttgacacatcaatagattat

SEQ ID NO: 121890 - DNA, 25 bp, Probe sequence
ttgacacatcaatagattatatcat

SEQ ID NO: 121891 - DNA, 25 bp, Probe sequence
atttagtaacattttctaataatat

SEQ ID NO: 121892 - DNA, 25 bp, Probe sequence
atgttcaccttccatacttaaaatt

SEQ ID NO: 121893 - DNA, 25 bp, Probe sequence
agtaacattttctaataatataaga

SEQ ID NO: 121894 - DNA, 25 bp, Probe sequence
aacattttctaataatataagatta

SEQ ID NO: 121895 - DNA, 25 bp, Probe sequence
gatgttcaccttccatacttaaaat

SEQ ID NO: 121896 - DNA, 25 bp, Probe sequence
gtaacattttctaataatataagat

SEQ ID NO: 121897 - DNA, 25 bp, Probe sequence
tgttcaccttccatacttaaaattt

SEQ ID NO: 121898 - DNA, 25 bp, Probe sequence
tccatacttaaaatttagtaacatt

SEQ ID NO: 121899 - DNA, 25 bp, Probe sequence
tcaccttccatacttaaaatttagt

SEQ ID NO: 121900 - DNA, 25 bp, Probe sequence
taacattttctaataatataagatt

SEQ ID NO: 121901 - DNA, 25 bp, Probe sequence
tagtaacattttctaataatataag

SEQ ID NO: 121902 - DNA, 25 bp, Probe sequence
tttagtaacattttctaataatata

SEQ ID NO: 121903 - DNA, 25 bp, Probe sequence
ttagtaacattttctaataatataa

SEQ ID NO: 121904 - DNA, 25 bp, Probe sequence
ttcaccttccatacttaaaatttag

SEQ ID NO: 121905 - DNA, 25 bp, Probe sequence
ttccatacttaaaatttagtaacat

SEQ ID NO: 121906 - DNA, 25 bp, Probe sequence
attacatcaaccaatcgtgtcaaga

SEQ ID NO: 121907 - DNA, 25 bp, Probe sequence
atatcaattacatcaaccaatcgtg

SEQ ID NO: 121908 - DNA, 25 bp, Probe sequence
atcaattacatcaaccaatcgtgtc

SEQ ID NO: 121909 - DNA, 25 bp, Probe sequence
atcgtgtcaagaaactttattaaat

SEQ ID NO: 121910 - DNA, 25 bp, Probe sequence
aaactaatcatatcaattacatcaa

SEQ ID NO: 121911 - DNA, 25 bp, Probe sequence
aaccaatcgtgtcaagaaactttat

SEQ ID NO: 121912 - DNA, 25 bp, Probe sequence
aatcatatcaattacatcaaccaat

SEQ ID NO: 121913 - DNA, 25 bp, Probe sequence
aattacatcaaccaatcgtgtcaag

SEQ ID NO: 121914 - DNA, 25 bp, Probe sequence
caattacatcaaccaatcgtgtcaa

SEQ ID NO: 121915 - DNA, 25 bp, Probe sequence
catcaaccaatcgtgtcaagaaact

SEQ ID NO: 121916 - DNA, 25 bp, Probe sequence
ccaatcgtgtcaagaaactttatta

SEQ ID NO: 121917 - DNA, 25 bp, Probe sequence
tcatatcaattacatcaaccaatcg

SEQ ID NO: 121918 - DNA, 25 bp, Probe sequence
tcaaccaatcgtgtcaagaaacttt

SEQ ID NO: 121919 - DNA, 25 bp, Probe sequence
tacatcaaccaatcgtgtcaagaaa

SEQ ID NO: 121920 - DNA, 25 bp, Probe sequence
ttacatcaaccaatcgtgtcaagaa

SEQ ID NO: 121921 - DNA, 25 bp, Probe sequence
aggtactttatatttcactgtcaaa

SEQ ID NO: 121922 - DNA, 25 bp, Probe sequence
aagtgttagcatccttactgctgtt

SEQ ID NO: 121923 - DNA, 25 bp, Probe sequence
aatgtcaggtactttatatttcact

SEQ ID NO: 121924 - DNA, 25 bp, Probe sequence
aatagcagtaagacttttctaagtg

SEQ ID NO: 121925 - DNA, 25 bp, Probe sequence
catccttactgctgttttcatttgt

SEQ ID NO: 121926 - DNA, 25 bp, Probe sequence
gaattcctgtgtgcattaaagataa

SEQ ID NO: 121927 - DNA, 25 bp, Probe sequence
gacttttctaagtgttagcatcctt

SEQ ID NO: 121928 - DNA, 25 bp, Probe sequence
gttaatcatatttgtttcgtatcga

SEQ ID NO: 121929 - DNA, 25 bp, Probe sequence
gttagcatccttactgctgttttca

SEQ ID NO: 121930 - DNA, 25 bp, Probe sequence
gtatcgaattcctgtgtgcattaaa

SEQ ID NO: 121931 - DNA, 25 bp, Probe sequence
gtaacaatataatgtcaggtacttt

SEQ ID NO: 121932 - DNA, 25 bp, Probe sequence
tactgctgttttcatttgtaacaat

SEQ ID NO: 121933 - DNA, 25 bp, Probe sequence
tatatttcactgtcaaagattatta

SEQ ID NO: 121934 - DNA, 25 bp, Probe sequence
tttcgtatcgaattcctgtgtgcat

SEQ ID NO: 121935 - DNA, 25 bp, Probe sequence
ttttgtaattacacagttaatcata

SEQ ID NO: 121936 - DNA, 25 bp, Probe sequence
attttgattatgtatcacgttcata

SEQ ID NO: 121937 - DNA, 25 bp, Probe sequence
atttgaaataccctgttcgcaatta

SEQ ID NO: 121938 - DNA, 25 bp, Probe sequence
atcacgttcataatactttccaatt

SEQ ID NO: 121939 - DNA, 25 bp, Probe sequence
acgttcataatactttccaatttga

SEQ ID NO: 121940 - DNA, 25 bp, Probe sequence
actcccttgagcctacaattttgat

SEQ ID NO: 121941 - DNA, 25 bp, Probe sequence
aatgataatcatttcttttattttt

SEQ ID NO: 121942 - DNA, 25 bp, Probe sequence
ccttgagcctacaattttgattatg

SEQ ID NO: 121943 - DNA, 25 bp, Probe sequence
ccactcccttgagcctacaattttg

SEQ ID NO: 121944 - DNA, 25 bp, Probe sequence
gaaataccctgttcgcaattattag

SEQ ID NO: 121945 - DNA, 25 bp, Probe sequence
gagttatatcaaccaatacagtgta

SEQ ID NO: 121946 - DNA, 25 bp, Probe sequence
gttcgcaattattagttgagttata

SEQ ID NO: 121947 - DNA, 25 bp, Probe sequence
gtgggacgacgataaagaaatactt

SEQ ID NO: 121948 - DNA, 25 bp, Probe sequence
tccaatttgaaataccctgttcgca

SEQ ID NO: 121949 - DNA, 25 bp, Probe sequence
taccctgttcgcaattattagttga

SEQ ID NO: 121950 - DNA, 25 bp, Probe sequence
ttccaaaccgtttaacagtatatca

SEQ ID NO: 121951 - DNA, 25 bp, Probe sequence
ataaataactattttctcaatcaat

SEQ ID NO: 121952 - DNA, 25 bp, Probe sequence
ataactattttctcaatcaatagaa

SEQ ID NO: 121953 - DNA, 25 bp, Probe sequence
atccattttcattagattagctaaa

SEQ ID NO: 121954 - DNA, 25 bp, Probe sequence
agctaaatattatcactttttttct

SEQ ID NO: 121955 - DNA, 25 bp, Probe sequence
agcctcctctactcatttaaaatgt

SEQ ID NO: 121956 - DNA, 25 bp, Probe sequence
aaatccattttcattagattagcta

SEQ ID NO: 121957 - DNA, 25 bp, Probe sequence
cagcctcctctactcatttaaaatg

SEQ ID NO: 121958 - DNA, 25 bp, Probe sequence
cctcctctactcatttaaaatgtat

SEQ ID NO: 121959 - DNA, 25 bp, Probe sequence
gcctcctctactcatttaaaatgta

SEQ ID NO: 121960 - DNA, 25 bp, Probe sequence
gattagctaaatattatcacttttt

SEQ ID NO: 121961 - DNA, 25 bp, Probe sequence
gtccaataaatccattttcattaga

SEQ ID NO: 121962 - DNA, 25 bp, Probe sequence
tccaataaatccattttcattagat

SEQ ID NO: 121963 - DNA, 25 bp, Probe sequence
tcctctactcatttaaaatgtattt

SEQ ID NO: 121964 - DNA, 25 bp, Probe sequence
ttttgtccaataaatccattttcat

SEQ ID NO: 121965 - DNA, 25 bp, Probe sequence
ttgtccaataaatccattttcatta

SEQ ID NO: 121966 - DNA, 25 bp, Probe sequence
atttacagtgatgctattagtcgaa

SEQ ID NO: 121967 - DNA, 25 bp, Probe sequence
atatcttgcctaatactaacaacat

SEQ ID NO: 121968 - DNA, 25 bp, Probe sequence
atcttgcctaatactaacaacattt

SEQ ID NO: 121969 - DNA, 25 bp, Probe sequence
acagtgatgctattagtcgaaatgt

SEQ ID NO: 121970 - DNA, 25 bp, Probe sequence
aaatatatcttgcctaatactaaca

SEQ ID NO: 121971 - DNA, 25 bp, Probe sequence
aaaatatatctaattatgctttata

SEQ ID NO: 121972 - DNA, 25 bp, Probe sequence
aacaacatttacagtgatgctatta

SEQ ID NO: 121973 - DNA, 25 bp, Probe sequence
cttgcctaatactaacaacatttac

SEQ ID NO: 121974 - DNA, 25 bp, Probe sequence
gaatcaccggaaatcaaaatatatc

SEQ ID NO: 121975 - DNA, 25 bp, Probe sequence
gtgatgctattagtcgaaatgtctt

SEQ ID NO: 121976 - DNA, 25 bp, Probe sequence
ggaaatcaaaatatatcttgcctaa

SEQ ID NO: 121977 - DNA, 25 bp, Probe sequence
tgcctaatactaacaacatttacag

SEQ ID NO: 121978 - DNA, 25 bp, Probe sequence
tcaaaatatatcttgcctaatacta

SEQ ID NO: 121979 - DNA, 25 bp, Probe sequence
tactaacaacatttacagtgatgct

SEQ ID NO: 121980 - DNA, 25 bp, Probe sequence
tatgctttataaatgaatcaccgga

SEQ ID NO: 121981 - DNA, 25 bp, Probe sequence
atcattaacacacttcaatcgcgca

SEQ ID NO: 121982 - DNA, 25 bp, Probe sequence
atgataatcaatttgttttctcgga

SEQ ID NO: 121983 - DNA, 25 bp, Probe sequence
aaagcacgaccgaagtatcattaac

SEQ ID NO: 121984 - DNA, 25 bp, Probe sequence
aaaccagtattgaataccttttcat

SEQ ID NO: 121985 - DNA, 25 bp, Probe sequence
aacacacttcaatcgcgcaattaaa

SEQ ID NO: 121986 - DNA, 25 bp, Probe sequence
aatcgcgcaattaaacaatctattt

SEQ ID NO: 121987 - DNA, 25 bp, Probe sequence
gaataccttttcattgtatcattga

SEQ ID NO: 121988 - DNA, 25 bp, Probe sequence
gtatcattgagaagcacaagttgtt

SEQ ID NO: 121989 - DNA, 25 bp, Probe sequence
gtaattcaaatcgcatacaataaca

SEQ ID NO: 121990 - DNA, 25 bp, Probe sequence
tgtaactcttacactaatttaggtt

SEQ ID NO: 121991 - DNA, 25 bp, Probe sequence
tgttttctcggaaatattttgcttt

SEQ ID NO: 121992 - DNA, 25 bp, Probe sequence
tccccctttgtattgcaataaacca

SEQ ID NO: 121993 - DNA, 25 bp, Probe sequence
tctgctatcattcggtctgatggaa

SEQ ID NO: 121994 - DNA, 25 bp, Probe sequence
taggttctgctatcattcggtctga

SEQ ID NO: 121995 - DNA, 25 bp, Probe sequence
tttaaatccccctttgtattgcaat

SEQ ID NO: 121996 - DNA, 25 bp, Probe sequence
attatttatacattgcttgacttaa

SEQ ID NO: 121997 - DNA, 25 bp, Probe sequence
atttatagaagcgaatcattcatat

SEQ ID NO: 121998 - DNA, 25 bp, Probe sequence
aaatcagccttcacaattgattata

SEQ ID NO: 121999 - DNA, 25 bp, Probe sequence
aagcgttaattatttatacattgct

SEQ ID NO: 122000 - DNA, 25 bp, Probe sequence
aatgactgatttcttgttagacgca

SEQ ID NO: 122001 - DNA, 25 bp, Probe sequence
taaaaaaatactcttgcctacccat

SEQ ID NO: 122002 - DNA, 25 bp, Probe sequence
aattgattataattttgccaaccaa

SEQ ID NO: 122003 - DNA, 25 bp, Probe sequence
ctcttgcctacccatcttaaggtta

SEQ ID NO: 122004 - DNA, 25 bp, Probe sequence
gcctacccatcttaaggttagcaag

SEQ ID NO: 122005 - DNA, 25 bp, Probe sequence
gacaataaaataaatcagccttcac

SEQ ID NO: 122006 - DNA, 25 bp, Probe sequence
gatattttaccatattttcaataaa

SEQ ID NO: 122007 - DNA, 25 bp, Probe sequence
gatttcttgttagacgcaaagctat

SEQ ID NO: 122008 - DNA, 25 bp, Probe sequence
tagacgcaaagctattttatttata

SEQ ID NO: 122009 - DNA, 25 bp, Probe sequence
tttgccaaccaattaaatgactgat

SEQ ID NO: 122010 - DNA, 25 bp, Probe sequence
ttaactttagatattttaccatatt

SEQ ID NO: 122011 - DNA, 25 bp, Probe sequence
attacaaatataactcactatcatc

SEQ ID NO: 122012 - DNA, 25 bp, Probe sequence
atataactcactatcatcatacaat

SEQ ID NO: 122013 - DNA, 25 bp, Probe sequence
ataactcactatcatcatacaatat

SEQ ID NO: 122014 - DNA, 25 bp, Probe sequence
atcatcatacaatattatggcttta

SEQ ID NO: 122015 - DNA, 25 bp, Probe sequence
actcactatcatcatacaatattat

SEQ ID NO: 122016 - DNA, 25 bp, Probe sequence
aactcactatcatcatacaatatta

SEQ ID NO: 122017 - DNA, 25 bp, Probe sequence
aatataactcactatcatcatacaa

SEQ ID NO: 122018 - DNA, 25 bp, Probe sequence
caaatataactcactatcatcatac

SEQ ID NO: 122019 - DNA, 25 bp, Probe sequence
gcgacactcctttaattacaaatat

SEQ ID NO: 122020 - DNA, 25 bp, Probe sequence
gacactcctttaattacaaatataa

SEQ ID NO: 122021 - DNA, 25 bp, Probe sequence
tgcgacactcctttaattacaaata

SEQ ID NO: 122022 - DNA, 25 bp, Probe sequence
taactcactatcatcatacaatatt

SEQ ID NO: 122023 - DNA, 25 bp, Probe sequence
tacaaatataactcactatcatcat

SEQ ID NO: 122024 - DNA, 25 bp, Probe sequence
tataactcactatcatcatacaata

SEQ ID NO: 122025 - DNA, 25 bp, Probe sequence
ttgcgacactcctttaattacaaat

SEQ ID NO: 122026 - DNA, 25 bp, Probe sequence
accaccctagttataaatgcaattc

SEQ ID NO: 122027 - DNA, 25 bp, Probe sequence
agcgttcactaatgtttgttgtact

SEQ ID NO: 122028 - DNA, 25 bp, Probe sequence
aaatcgactatacagttgtgcataa

SEQ ID NO: 122029 - DNA, 25 bp, Probe sequence
aaacaaatcattaactactcatctt

SEQ ID NO: 122030 - DNA, 25 bp, Probe sequence
aactactcatctttatacgaattta

SEQ ID NO: 122031 - DNA, 25 bp, Probe sequence
cgcccatcctcaaaagggacgaacg

SEQ ID NO: 122032 - DNA, 25 bp, Probe sequence
gcaattcaacacatttatcacttta

SEQ ID NO: 122033 - DNA, 25 bp, Probe sequence
gatgacacagatagtcgatttgaaa

SEQ ID NO: 122034 - DNA, 25 bp, Probe sequence
tcaaaagggacgaacgttatcgcgg

SEQ ID NO: 122035 - DNA, 25 bp, Probe sequence
gttgtgcataaagtagcgttcacta

SEQ ID NO: 122036 - DNA, 25 bp, Probe sequence
gtttgttgtacttttcaccaaccag

SEQ ID NO: 122037 - DNA, 25 bp, Probe sequence
tactgtttttaaattaccattccat

SEQ ID NO: 122038 - DNA, 25 bp, Probe sequence
tttacacatcctatttactgttttt

SEQ ID NO: 122039 - DNA, 25 bp, Probe sequence
ttatcactttaaatcgactatacag

SEQ ID NO: 122040 - DNA, 25 bp, Probe sequence
ttcaccaaccagtacatctctgata

SEQ ID NO: 122041 - DNA, 25 bp, Probe sequence
atttctcatcaattataacatcttg

SEQ ID NO: 122042 - DNA, 25 bp, Probe sequence
atcttgataaattgtatgtctcgaa

SEQ ID NO: 122043 - DNA, 25 bp, Probe sequence
atgtctcgaatcacttaacaacgaa

SEQ ID NO: 122044 - DNA, 25 bp, Probe sequence
acctcatttctcatcaattataaca

SEQ ID NO: 122045 - DNA, 25 bp, Probe sequence
acgaacctcatttctcatcaattat

SEQ ID NO: 122046 - DNA, 25 bp, Probe sequence
aattgtatgtctcgaatcacttaac

SEQ ID NO: 122047 - DNA, 25 bp, Probe sequence
ctcatttctcatcaattataacatc

SEQ ID NO: 122048 - DNA, 25 bp, Probe sequence
gaatcacttaacaacgaataaaata

SEQ ID NO: 122049 - DNA, 25 bp, Probe sequence
gaacctcatttctcatcaattataa

SEQ ID NO: 122050 - DNA, 25 bp, Probe sequence
gataaattgtatgtctcgaatcact

SEQ ID NO: 122051 - DNA, 25 bp, Probe sequence
gtatgtctcgaatcacttaacaacg

SEQ ID NO: 122052 - DNA, 25 bp, Probe sequence
gtctcgaatcacttaacaacgaata

SEQ ID NO: 122053 - DNA, 25 bp, Probe sequence
tacgaacctcatttctcatcaatta

SEQ ID NO: 122054 - DNA, 25 bp, Probe sequence
tataatctaatatcattttcattca

SEQ ID NO: 122055 - DNA, 25 bp, Probe sequence
ttacgaacctcatttctcatcaatt

SEQ ID NO: 122056 - DNA, 25 bp, Probe sequence
attagccaccactattatgtactta

SEQ ID NO: 122057 - DNA, 25 bp, Probe sequence
aggaatacataattagattcatgca

SEQ ID NO: 122058 - DNA, 25 bp, Probe sequence
agccaccactattatgtacttaaaa

SEQ ID NO: 122059 - DNA, 25 bp, Probe sequence
acattagccaccactattatgtact

SEQ ID NO: 122060 - DNA, 25 bp, Probe sequence
cacattagccaccactattatgtac

SEQ ID NO: 122061 - DNA, 25 bp, Probe sequence
cattagccaccactattatgtactt

SEQ ID NO: 122062 - DNA, 25 bp, Probe sequence
ccacattagccaccactattatgta

SEQ ID NO: 122063 - DNA, 25 bp, Probe sequence
ccaccactattatgtacttaaaaat

SEQ ID NO: 122064 - DNA, 25 bp, Probe sequence
gccaccactattatgtacttaaaaa

SEQ ID NO: 122065 - DNA, 25 bp, Probe sequence
gaatacataattagattcatgcata

SEQ ID NO: 122066 - DNA, 25 bp, Probe sequence
ggaatacataattagattcatgcat

SEQ ID NO: 122067 - DNA, 25 bp, Probe sequence
tagccaccactattatgtacttaaa

SEQ ID NO: 122068 - DNA, 25 bp, Probe sequence
ttagccaccactattatgtacttaa

SEQ ID NO: 122069 - DNA, 25 bp, Probe sequence
attgtgatgtcccagactctatcat

SEQ ID NO: 122070 - DNA, 25 bp, Probe sequence
ataagtaatttattgttgccattgt

SEQ ID NO: 122071 - DNA, 25 bp, Probe sequence
atgtcccagactctatcatcatgaa

SEQ ID NO: 122072 - DNA, 25 bp, Probe sequence
aacattgtagagcctaggacattgt

SEQ ID NO: 122073 - DNA, 25 bp, Probe sequence
aactgtctttcgtcattttcgacgt

SEQ ID NO: 122074 - DNA, 25 bp, Probe sequence
caaaaactgtctttcgtcattttcg

SEQ ID NO: 122075 - DNA, 25 bp, Probe sequence
gaattattctcatcaaaaactgtct

SEQ ID NO: 122076 - DNA, 25 bp, Probe sequence
gacattgtgatgtcccagactctat

SEQ ID NO: 122077 - DNA, 25 bp, Probe sequence
gactctatcatcatgaattattctc

SEQ ID NO: 122078 - DNA, 25 bp, Probe sequence
gtcattttcgacgttgaaacttcaa

SEQ ID NO: 122079 - DNA, 25 bp, Probe sequence
gtctttcgtcattttcgacgttgaa

SEQ ID NO: 122080 - DNA, 25 bp, Probe sequence
gtcccagactctatcatcatgaatt

SEQ ID NO: 122081 - DNA, 25 bp, Probe sequence
gtgatgtcccagactctatcatcat

SEQ ID NO: 122082 - DNA, 25 bp, Probe sequence
tgtagagcctaggacattgtgatgt

SEQ ID NO: 122083 - DNA, 25 bp, Probe sequence
ttctcatcaaaaactgtctttcgtc

SEQ ID NO: 122084 - DNA, 25 bp, Probe sequence
atattttaccattttctacacatgc

SEQ ID NO: 122085 - DNA, 25 bp, Probe sequence
atcaatgttccaataatagcacctt

SEQ ID NO: 122086 - DNA, 25 bp, Probe sequence
atcgctttattcttgtcttttttat

SEQ ID NO: 122087 - DNA, 25 bp, Probe sequence
agcaccttacatactatttttctac

SEQ ID NO: 122088 - DNA, 25 bp, Probe sequence
accattttctacacatgcttttcga

SEQ ID NO: 122089 - DNA, 25 bp, Probe sequence
acacatgcttttcgataggcttttt

SEQ ID NO: 122090 - DNA, 25 bp, Probe sequence
catactatttttctacttttctgtt

SEQ ID NO: 122091 - DNA, 25 bp, Probe sequence
gacactcctcacaattttatcaatg

SEQ ID NO: 122092 - DNA, 25 bp, Probe sequence
gttccaataatagcaccttacatac

SEQ ID NO: 122093 - DNA, 25 bp, Probe sequence
gtttatcgctttattcttgtctttt

SEQ ID NO: 122094 - DNA, 25 bp, Probe sequence
gtttggacactcctcacaattttat

SEQ ID NO: 122095 - DNA, 25 bp, Probe sequence
tgcttttcgataggcttttttaagt

SEQ ID NO: 122096 - DNA, 25 bp, Probe sequence
tcctcacaattttatcaatgttcca

SEQ ID NO: 122097 - DNA, 25 bp, Probe sequence
tttgcagatattttttcatttgtaa

SEQ ID NO: 122098 - DNA, 25 bp, Probe sequence
tttctgtttaactttatttataatg

SEQ ID NO: 122099 - DNA, 25 bp, Probe sequence
attgaaaagcatatccaaaatttaa

SEQ ID NO: 122100 - DNA, 25 bp, Probe sequence
attcacttaaaattctaaagcaaat

SEQ ID NO: 122101 - DNA, 25 bp, Probe sequence
ataaacagtaacagcattttgaata

SEQ ID NO: 122102 - DNA, 25 bp, Probe sequence
actgtgttagtgtttatttgatggg

SEQ ID NO: 122103 - DNA, 25 bp, Probe sequence
aaagcaaatatgaaagcgccccttc

SEQ ID NO: 122104 - DNA, 25 bp, Probe sequence
aatatgaaagcgccccttcaacttt

SEQ ID NO: 122105 - DNA, 25 bp, Probe sequence
cccttcaactttacactgtgttagt

SEQ ID NO: 122106 - DNA, 25 bp, Probe sequence
ccccttcaactttacactgtgttag

SEQ ID NO: 122107 - DNA, 25 bp, Probe sequence
gcaaatatgaaagcgccccttcaac

SEQ ID NO: 122108 - DNA, 25 bp, Probe sequence
gttagtgtttatttgatggggcgct

SEQ ID NO: 122109 - DNA, 25 bp, Probe sequence
gtaatgattcaaattcacttaaaat

SEQ ID NO: 122110 - DNA, 25 bp, Probe sequence
gtgaaagtatgtatccataatatta

SEQ ID NO: 122111 - DNA, 25 bp, Probe sequence
gtgtttatttgatggggcgctttca

SEQ ID NO: 122112 - DNA, 25 bp, Probe sequence
tgatggggcgctttcaaaatattga

SEQ ID NO: 122113 - DNA, 25 bp, Probe sequence
tattgttcaatcatttgttttagta

SEQ ID NO: 122114 - DNA, 25 bp, Probe sequence
atatatttatataccactaaggagg

SEQ ID NO: 122115 - DNA, 25 bp, Probe sequence
agtgaaacctccttggatgtatata

SEQ ID NO: 122116 - DNA, 25 bp, Probe sequence
acctccttggatgtatatatttata

SEQ ID NO: 122117 - DNA, 25 bp, Probe sequence
actaaggaggttcgctaaacattat

SEQ ID NO: 122118 - DNA, 25 bp, Probe sequence
aacctccttggatgtatatatttat

SEQ ID NO: 122119 - DNA, 25 bp, Probe sequence
aaggaggttcgctaaacattataat

SEQ ID NO: 122120 - DNA, 25 bp, Probe sequence
ccactaaggaggttcgctaaacatt

SEQ ID NO: 122121 - DNA, 25 bp, Probe sequence
gaagtttttatgttatagtatagta

SEQ ID NO: 122122 - DNA, 25 bp, Probe sequence
gaaacctccttggatgtatatattt

SEQ ID NO: 122123 - DNA, 25 bp, Probe sequence
gtgaaacctccttggatgtatatat

SEQ ID NO: 122124 - DNA, 25 bp, Probe sequence
ggttcgctaaacattataatatgaa

SEQ ID NO: 122125 - DNA, 25 bp, Probe sequence
ggaggttcgctaaacattataatat

SEQ ID NO: 122126 - DNA, 25 bp, Probe sequence
taccactaaggaggttcgctaaaca

SEQ ID NO: 122127 - DNA, 25 bp, Probe sequence
tataccactaaggaggttcgctaaa

SEQ ID NO: 122128 - DNA, 25 bp, Probe sequence
tatataccactaaggaggttcgcta

SEQ ID NO: 122129 - DNA, 25 bp, Probe sequence
attgatattcccattttagcatttt

SEQ ID NO: 122130 - DNA, 25 bp, Probe sequence
attcccattttagcattttttgagt

SEQ ID NO: 122131 - DNA, 25 bp, Probe sequence
atattgatattcccattttagcatt

SEQ ID NO: 122132 - DNA, 25 bp, Probe sequence
atattcccattttagcattttttga

SEQ ID NO: 122133 - DNA, 25 bp, Probe sequence
ataacctcacttaattcgaatattg

SEQ ID NO: 122134 - DNA, 25 bp, Probe sequence
acctcacttaattcgaatattgata

SEQ ID NO: 122135 - DNA, 25 bp, Probe sequence
ccattttagcattttttgagttaag

SEQ ID NO: 122136 - DNA, 25 bp, Probe sequence
gatagtataagaaaggtgtgacaaa

SEQ ID NO: 122137 - DNA, 25 bp, Probe sequence
gatattcccattttagcattttttg

SEQ ID NO: 122138 - DNA, 25 bp, Probe sequence
gtataacctcacttaattcgaatat

SEQ ID NO: 122139 - DNA, 25 bp, Probe sequence
tgtataacctcacttaattcgaata

SEQ ID NO: 122140 - DNA, 25 bp, Probe sequence
tgatattcccattttagcatttttt

SEQ ID NO: 122141 - DNA, 25 bp, Probe sequence
tcccattttagcattttttgagtta

SEQ ID NO: 122142 - DNA, 25 bp, Probe sequence
tagcattttttgagttaagatagta

SEQ ID NO: 122143 - DNA, 25 bp, Probe sequence
ttgatattcccattttagcattttt

SEQ ID NO: 122144 - DNA, 25 bp, Probe sequence
atattctactatgcttgcgaactag

SEQ ID NO: 122145 - DNA, 25 bp, Probe sequence
atgcttgcgaactagtcagttttag

SEQ ID NO: 122146 - DNA, 25 bp, Probe sequence
atggtgtggttacacttgccttacg

SEQ ID NO: 122147 - DNA, 25 bp, Probe sequence
acacttgccttacgttgaaaattat

SEQ ID NO: 122148 - DNA, 25 bp, Probe sequence
aaactgactagtacacgaggcatat

SEQ ID NO: 122149 - DNA, 25 bp, Probe sequence
gccttacgttgaaaattatgacttt

SEQ ID NO: 122150 - DNA, 25 bp, Probe sequence
gctataatcaaatcaaaactgacta

SEQ ID NO: 122151 - DNA, 25 bp, Probe sequence
gactagtacacgaggcatattctac

SEQ ID NO: 122152 - DNA, 25 bp, Probe sequence
gaggcatattctactatgcttgcga

SEQ ID NO: 122153 - DNA, 25 bp, Probe sequence
gattaaatcgattacctttgatatt

SEQ ID NO: 122154 - DNA, 25 bp, Probe sequence
gttacacttgccttacgttgaaaat

SEQ ID NO: 122155 - DNA, 25 bp, Probe sequence
gtcagttttagttttatggtgtggt

SEQ ID NO: 122156 - DNA, 25 bp, Probe sequence
tggttacacttgccttacgttgaaa

SEQ ID NO: 122157 - DNA, 25 bp, Probe sequence
tctactatgcttgcgaactagtcag

SEQ ID NO: 122158 - DNA, 25 bp, Probe sequence
ttacctttgatattttagctataat

SEQ ID NO: 122159 - DNA, 25 bp, Probe sequence
atcgatagagtccgtattgccgtag

SEQ ID NO: 122160 - DNA, 25 bp, Probe sequence
agtcttgcgtatcgatagagtccgt

SEQ ID NO: 122161 - DNA, 25 bp, Probe sequence
aagacaaagtcttgcgtatcgatag

SEQ ID NO: 122162 - DNA, 25 bp, Probe sequence
aagtcttgcgtatcgatagagtccg

SEQ ID NO: 122163 - DNA, 25 bp, Probe sequence
caaagtcttgcgtatcgatagagtc

SEQ ID NO: 122164 - DNA, 25 bp, Probe sequence
cttgcgtatcgatagagtccgtatt

SEQ ID NO: 122165 - DNA, 25 bp, Probe sequence
cgtatcgatagagtccgtattgccg

SEQ ID NO: 122166 - DNA, 25 bp, Probe sequence
gcgtatcgatagagtccgtattgcc

SEQ ID NO: 122167 - DNA, 25 bp, Probe sequence
gaaacgcataaaaatacgcaagaca

SEQ ID NO: 122168 - DNA, 25 bp, Probe sequence
gacaaagtcttgcgtatcgatagag

SEQ ID NO: 122169 - DNA, 25 bp, Probe sequence
gtatcgatagagtccgtattgccgt

SEQ ID NO: 122170 - DNA, 25 bp, Probe sequence
gtcttgcgtatcgatagagtccgta

SEQ ID NO: 122171 - DNA, 25 bp, Probe sequence
tgcgtatcgatagagtccgtattgc

SEQ ID NO: 122172 - DNA, 25 bp, Probe sequence
tcttgcgtatcgatagagtccgtat

SEQ ID NO: 122173 - DNA, 25 bp, Probe sequence
tatcgatagagtccgtattgccgta

SEQ ID NO: 122174 - DNA, 25 bp, Probe sequence
aaaagcaaacttacgaacaactcag

SEQ ID NO: 122175 - DNA, 25 bp, Probe sequence
aacttacgaacaactcagatgacta

SEQ ID NO: 122176 - DNA, 25 bp, Probe sequence
aactcagatgactatcttatgatgt

SEQ ID NO: 122177 - DNA, 25 bp, Probe sequence
aagcaaacttacgaacaactcagat

SEQ ID NO: 122178 - DNA, 25 bp, Probe sequence
ctatcttatgatgttatattaccac

SEQ ID NO: 122179 - DNA, 25 bp, Probe sequence
gctcccttgatcaaagagtgttagg

SEQ ID NO: 122180 - DNA, 25 bp, Probe sequence
gcaaacttacgaacaactcagatga

SEQ ID NO: 122181 - DNA, 25 bp, Probe sequence
gaacaactcagatgactatcttatg

SEQ ID NO: 122182 - DNA, 25 bp, Probe sequence
gatgttatattaccacataattaaa

SEQ ID NO: 122183 - DNA, 25 bp, Probe sequence
gatgactatcttatgatgttatatt

SEQ ID NO: 122184 - DNA, 25 bp, Probe sequence
gatcaaagagtgttaggcccaaatt

SEQ ID NO: 122185 - DNA, 25 bp, Probe sequence
gggctcccttgatcaaagagtgtta

SEQ ID NO: 122186 - DNA, 25 bp, Probe sequence
tgggctcccttgatcaaagagtgtt

SEQ ID NO: 122187 - DNA, 25 bp, Probe sequence
tcaaagagtgttaggcccaaattaa

SEQ ID NO: 122188 - DNA, 25 bp, Probe sequence
tacgaacaactcagatgactatctt

SEQ ID NO: 122189 - DNA, 25 bp, Probe sequence
atattcctacacaatcttagttaga

SEQ ID NO: 122190 - DNA, 25 bp, Probe sequence
atatacgatcacttaactttgcatg

SEQ ID NO: 122191 - DNA, 25 bp, Probe sequence
agggacgaatatccgtgttgccacc

SEQ ID NO: 122192 - DNA, 25 bp, Probe sequence
agcacctcttcttgtgttcaatgta

SEQ ID NO: 122193 - DNA, 25 bp, Probe sequence
actactcagcataatctttcagtct

SEQ ID NO: 122194 - DNA, 25 bp, Probe sequence
acttttcataaagcacctcttcttg

SEQ ID NO: 122195 - DNA, 25 bp, Probe sequence
acatctccctcggcaaactatttta

SEQ ID NO: 122196 - DNA, 25 bp, Probe sequence
aaagaaaaagcccttgcacagcctg

SEQ ID NO: 122197 - DNA, 25 bp, Probe sequence
aacatgcctaattgtaatcatcatt

SEQ ID NO: 122198 - DNA, 25 bp, Probe sequence
cagtctatggattatattcctacac

SEQ ID NO: 122199 - DNA, 25 bp, Probe sequence
gcgtgcattaaataaacccactcaa

SEQ ID NO: 122200 - DNA, 25 bp, Probe sequence
gcacagcctgaaactgcacaaggga

SEQ ID NO: 122201 - DNA, 25 bp, Probe sequence
gataactactttcacatatttttgc

SEQ ID NO: 122202 - DNA, 25 bp, Probe sequence
gattgctacctatttcatttaccat

SEQ ID NO: 122203 - DNA, 25 bp, Probe sequence
tgttgccaccctcattggtttaaaa

SEQ ID NO: 122204 - DNA, 25 bp, Probe sequence
attcgacctaaatctactgtttcat

SEQ ID NO: 122205 - DNA, 25 bp, Probe sequence
attacttcgccttaaacaatgattt

SEQ ID NO: 122206 - DNA, 25 bp, Probe sequence
ataaatatttatcctgtcgtcatta

SEQ ID NO: 122207 - DNA, 25 bp, Probe sequence
agtcattggttcttatacatttgat

SEQ ID NO: 122208 - DNA, 25 bp, Probe sequence
aaggtataatgctcaatcatctaac

SEQ ID NO: 122209 - DNA, 25 bp, Probe sequence
aatgatttaggtactcttgttgaat

SEQ ID NO: 122210 - DNA, 25 bp, Probe sequence
aataaaaaatcctaacatctcatgt

SEQ ID NO: 122211 - DNA, 25 bp, Probe sequence
caccaatcatacgtccgtcgacgat

SEQ ID NO: 122212 - DNA, 25 bp, Probe sequence
cattcatatttattacttcgcctta

SEQ ID NO: 122213 - DNA, 25 bp, Probe sequence
gctcaatcatctaacattttcagta

SEQ ID NO: 122214 - DNA, 25 bp, Probe sequence
gatacaccccattcatatttattac

SEQ ID NO: 122215 - DNA, 25 bp, Probe sequence
gttgaatagtatttgtcccacacca

SEQ ID NO: 122216 - DNA, 25 bp, Probe sequence
taatttgtatactattcctactttt

SEQ ID NO: 122217 - DNA, 25 bp, Probe sequence
tatcctgtcgtcattaatcgtaata

SEQ ID NO: 122218 - DNA, 25 bp, Probe sequence
tatttgtcccacaccaatcatacgt

SEQ ID NO: 122219 - DNA, 25 bp, Probe sequence
agtaaaaagcggtatgtgaactctt

SEQ ID NO: 122220 - DNA, 25 bp, Probe sequence
actctttattgtttcacataccgct

SEQ ID NO: 122221 - DNA, 25 bp, Probe sequence
aagcggtatgtgaactctttattgt

SEQ ID NO: 122222 - DNA, 25 bp, Probe sequence
aatgaatgcgggaacttatttatat

SEQ ID NO: 122223 - DNA, 25 bp, Probe sequence
aatcaagactttaattataccattt

SEQ ID NO: 122224 - DNA, 25 bp, Probe sequence
cggtatgtgaactctttattgtttc

SEQ ID NO: 122225 - DNA, 25 bp, Probe sequence
gaatgcgggaacttatttatatata

SEQ ID NO: 122226 - DNA, 25 bp, Probe sequence
gaactctttattgtttcacataccg

SEQ ID NO: 122227 - DNA, 25 bp, Probe sequence
tgtttcacataccgcttaattcatt

SEQ ID NO: 122228 - DNA, 25 bp, Probe sequence
tgcgggaacttatttatatatattt

SEQ ID NO: 122229 - DNA, 25 bp, Probe sequence
tctttattgtttcacataccgctta

SEQ ID NO: 122230 - DNA, 25 bp, Probe sequence
tcaagactttaattataccattttt

SEQ ID NO: 122231 - DNA, 25 bp, Probe sequence
tattgtttcacataccgcttaattc

SEQ ID NO: 122232 - DNA, 25 bp, Probe sequence
tttattgtttcacataccgcttaat

SEQ ID NO: 122233 - DNA, 25 bp, Probe sequence
ttgtttcacataccgcttaattcat

SEQ ID NO: 122234 - DNA, 25 bp, Probe sequence
atgaacacctcattatttacgtatg

SEQ ID NO: 122235 - DNA, 25 bp, Probe sequence
agctattctacatactacttataac

SEQ ID NO: 122236 - DNA, 25 bp, Probe sequence
acacctcattatttacgtatgtatt

SEQ ID NO: 122237 - DNA, 25 bp, Probe sequence
aaaataagctattctacatactact

SEQ ID NO: 122238 - DNA, 25 bp, Probe sequence
catattaacatactagagcagggag

SEQ ID NO: 122239 - DNA, 25 bp, Probe sequence
gaatactattttataacgcaagtta

SEQ ID NO: 122240 - DNA, 25 bp, Probe sequence
gaaacgctattcgtttcatcctttt

SEQ ID NO: 122241 - DNA, 25 bp, Probe sequence
gagcagggagtaaaaatagtcatag

SEQ ID NO: 122242 - DNA, 25 bp, Probe sequence
gtatcacaatttctttttttggaat

SEQ ID NO: 122243 - DNA, 25 bp, Probe sequence
tcatcctttttaataccacttctcg

SEQ ID NO: 122244 - DNA, 25 bp, Probe sequence
taacgcaagttaaatctttcttaca

SEQ ID NO: 122245 - DNA, 25 bp, Probe sequence
tttaacaattattatgtatcacaat

SEQ ID NO: 122246 - DNA, 25 bp, Probe sequence
ttagccttatacatattaacatact

SEQ ID NO: 122247 - DNA, 25 bp, Probe sequence
ttcttacaaaatttattagccttat

SEQ ID NO: 122248 - DNA, 25 bp, Probe sequence
ttctacatactacttataacttaaa

SEQ ID NO: 122249 - DNA, 25 bp, Probe sequence
attatagcatattagagccccttat

SEQ ID NO: 122250 - DNA, 25 bp, Probe sequence
atattgtaaataattaggggctctt

SEQ ID NO: 122251 - DNA, 25 bp, Probe sequence
atataattttcattttcccaataat

SEQ ID NO: 122252 - DNA, 25 bp, Probe sequence
atatctcacctcttttacatataat

SEQ ID NO: 122253 - DNA, 25 bp, Probe sequence
atatgatactttttttgctttttat

SEQ ID NO: 122254 - DNA, 25 bp, Probe sequence
atgcagttgcttttaaatttacttt

SEQ ID NO: 122255 - DNA, 25 bp, Probe sequence
agcatattagagccccttatatatt

SEQ ID NO: 122256 - DNA, 25 bp, Probe sequence
aaatttactttactcaaattgctga

SEQ ID NO: 122257 - DNA, 25 bp, Probe sequence
aattgctgatatttccgaataccaa

SEQ ID NO: 122258 - DNA, 25 bp, Probe sequence
ctcacctcttttacatataattttc

SEQ ID NO: 122259 - DNA, 25 bp, Probe sequence
gatactttttttgctttttatactg

SEQ ID NO: 122260 - DNA, 25 bp, Probe sequence
tacatataattttcattttcccaat

SEQ ID NO: 122261 - DNA, 25 bp, Probe sequence
tagagccccttatatattgtaaata

SEQ ID NO: 122262 - DNA, 25 bp, Probe sequence
tttccgaataccaaatatgatactt

SEQ ID NO: 122263 - DNA, 25 bp, Probe sequence
ttcattttcccaataattatagcat

SEQ ID NO: 122264 - DNA, 25 bp, Probe sequence
attcacttctggtgttaactagaca

SEQ ID NO: 122265 - DNA, 25 bp, Probe sequence
agattcacttctggtgttaactaga

SEQ ID NO: 122266 - DNA, 25 bp, Probe sequence
aaacaccagaagattcacttctggt

SEQ ID NO: 122267 - DNA, 25 bp, Probe sequence
aaaaacaccagaagattcacttctg

SEQ ID NO: 122268 - DNA, 25 bp, Probe sequence
aaaaaacaccagaagattcacttct

SEQ ID NO: 122269 - DNA, 25 bp, Probe sequence
aaaacaccagaagattcacttctgg

SEQ ID NO: 122270 - DNA, 25 bp, Probe sequence
aagattcacttctggtgttaactag

SEQ ID NO: 122271 - DNA, 25 bp, Probe sequence
cacttctggtgttaactagacaaaa

SEQ ID NO: 122272 - DNA, 25 bp, Probe sequence
gaagattcacttctggtgttaacta

SEQ ID NO: 122273 - DNA, 25 bp, Probe sequence
gattcacttctggtgttaactagac

SEQ ID NO: 122274 - DNA, 25 bp, Probe sequence
gtaaaaaacaccagaagattcactt

SEQ ID NO: 122275 - DNA, 25 bp, Probe sequence
tcacttctggtgttaactagacaaa

SEQ ID NO: 122276 - DNA, 25 bp, Probe sequence
taaaaaacaccagaagattcacttc

SEQ ID NO: 122277 - DNA, 25 bp, Probe sequence
tagtataacgtctaaaattcccatt

SEQ ID NO: 122278 - DNA, 25 bp, Probe sequence
ttcacttctggtgttaactagacaa

SEQ ID NO: 122279 - DNA, 25 bp, Probe sequence
ataataagtcacgccatacataggt

SEQ ID NO: 122280 - DNA, 25 bp, Probe sequence
acgttgtttcggtcgcaactcgagt

SEQ ID NO: 122281 - DNA, 25 bp, Probe sequence
actttgcacctcctgtataataagt

SEQ ID NO: 122282 - DNA, 25 bp, Probe sequence
aagcgtttgcactctacgttgtttc

SEQ ID NO: 122283 - DNA, 25 bp, Probe sequence
cataggtgacatttcgttattgagt

SEQ ID NO: 122284 - DNA, 25 bp, Probe sequence
ctctacgttgtttcggtcgcaactc

SEQ ID NO: 122285 - DNA, 25 bp, Probe sequence
cgtttgcactctacgttgtttcggt

SEQ ID NO: 122286 - DNA, 25 bp, Probe sequence
cgccatacataggtgacatttcgtt

SEQ ID NO: 122287 - DNA, 25 bp, Probe sequence
cctcctgtataataagtcacgccat

SEQ ID NO: 122288 - DNA, 25 bp, Probe sequence
gcacctcctgtataataagtcacgc

SEQ ID NO: 122289 - DNA, 25 bp, Probe sequence
gacatttcgttattgagtcaagcgt

SEQ ID NO: 122290 - DNA, 25 bp, Probe sequence
gagtcaagcgtttgcactctacgtt

SEQ ID NO: 122291 - DNA, 25 bp, Probe sequence
gtcaagcgtttgcactctacgttgt

SEQ ID NO: 122292 - DNA, 25 bp, Probe sequence
tgcactctacgttgtttcggtcgca

SEQ ID NO: 122293 - DNA, 25 bp, Probe sequence
ttgtttcggtcgcaactcgagtcat

SEQ ID NO: 122294 - DNA, 25 bp, Probe sequence
atttgagcggttgtatgtagctact

SEQ ID NO: 122295 - DNA, 25 bp, Probe sequence
atgttcttgaacctatatttgagcg

SEQ ID NO: 122296 - DNA, 25 bp, Probe sequence
agctacttataactactcaactatt

SEQ ID NO: 122297 - DNA, 25 bp, Probe sequence
acctatatttgagcggttgtatgta

SEQ ID NO: 122298 - DNA, 25 bp, Probe sequence
cttgaacctatatttgagcggttgt

SEQ ID NO: 122299 - DNA, 25 bp, Probe sequence
cttataactactcaactattgcatc

SEQ ID NO: 122300 - DNA, 25 bp, Probe sequence
gcggttgtatgtagctacttataac

SEQ ID NO: 122301 - DNA, 25 bp, Probe sequence
gctacttataactactcaactattg

SEQ ID NO: 122302 - DNA, 25 bp, Probe sequence
gagcggttgtatgtagctacttata

SEQ ID NO: 122303 - DNA, 25 bp, Probe sequence
gttcttgaacctatatttgagcggt

SEQ ID NO: 122304 - DNA, 25 bp, Probe sequence
gtatgtagctacttataactactca

SEQ ID NO: 122305 - DNA, 25 bp, Probe sequence
gtagctacttataactactcaacta

SEQ ID NO: 122306 - DNA, 25 bp, Probe sequence
ggttgtatgtagctacttataacta

SEQ ID NO: 122307 - DNA, 25 bp, Probe sequence
tacttataactactcaactattgca

SEQ ID NO: 122308 - DNA, 25 bp, Probe sequence
ttgagcggttgtatgtagctactta

SEQ ID NO: 122309 - DNA, 25 bp, Probe sequence
attttatattactcccattatgaaa

SEQ ID NO: 122310 - DNA, 25 bp, Probe sequence
aacattccagtcactagtagtttaa

SEQ ID NO: 122311 - DNA, 25 bp, Probe sequence
aactactagcaaacattccagtcac

SEQ ID NO: 122312 - DNA, 25 bp, Probe sequence
aagcactaactacgaattactttga

SEQ ID NO: 122313 - DNA, 25 bp, Probe sequence
caactccgtaaaaaatttgtggcat

SEQ ID NO: 122314 - DNA, 25 bp, Probe sequence
ccagaacacctctattatgtcaaaa

SEQ ID NO: 122315 - DNA, 25 bp, Probe sequence
gcaaacattccagtcactagtagtt

SEQ ID NO: 122316 - DNA, 25 bp, Probe sequence
gaacacctctattatgtcaaaatat

SEQ ID NO: 122317 - DNA, 25 bp, Probe sequence
gtcaaaatattgtatatccttttct

SEQ ID NO: 122318 - DNA, 25 bp, Probe sequence
gtcactagtagtttaaataatcgat

SEQ ID NO: 122319 - DNA, 25 bp, Probe sequence
tactttgaaaatgaacaactccgta

SEQ ID NO: 122320 - DNA, 25 bp, Probe sequence
tactcccattatgaaataaagcact

SEQ ID NO: 122321 - DNA, 25 bp, Probe sequence
tatccttttctattttatattactc

SEQ ID NO: 122322 - DNA, 25 bp, Probe sequence
tattgtatatccttttctattttat

SEQ ID NO: 122323 - DNA, 25 bp, Probe sequence
ttttctattttatattactcccatt

SEQ ID NO: 122324 - DNA, 25 bp, Probe sequence
atttattctagtgacaggataacta

SEQ ID NO: 122325 - DNA, 25 bp, Probe sequence
acaggataactaaaatatatttctt

SEQ ID NO: 122326 - DNA, 25 bp, Probe sequence
aaatttattctagtgacaggataac

SEQ ID NO: 122327 - DNA, 25 bp, Probe sequence
aactaaaatatatttcttatgcaat

SEQ ID NO: 122328 - DNA, 25 bp, Probe sequence
aatatatttcttatgcaataatttc

SEQ ID NO: 122329 - DNA, 25 bp, Probe sequence
aatttattctagtgacaggataact

SEQ ID NO: 122330 - DNA, 25 bp, Probe sequence
cttttaaatttattctagtgacagg

SEQ ID NO: 122331 - DNA, 25 bp, Probe sequence
ccttttaaatttattctagtgacag

SEQ ID NO: 122332 - DNA, 25 bp, Probe sequence
gacaggataactaaaatatatttct

SEQ ID NO: 122333 - DNA, 25 bp, Probe sequence
gataactaaaatatatttcttatgc

SEQ ID NO: 122334 - DNA, 25 bp, Probe sequence
tattctagtgacaggataactaaaa

SEQ ID NO: 122335 - DNA, 25 bp, Probe sequence
tttaaatttattctagtgacaggat

SEQ ID NO: 122336 - DNA, 25 bp, Probe sequence
tttattctagtgacaggataactaa

SEQ ID NO: 122337 - DNA, 25 bp, Probe sequence
ttttaaatttattctagtgacagga

SEQ ID NO: 122338 - DNA, 25 bp, Probe sequence
ttaaatttattctagtgacaggata

SEQ ID NO: 122339 - DNA, 25 bp, Probe sequence
attatgtatattttcctcagtcttc

SEQ ID NO: 122340 - DNA, 25 bp, Probe sequence
atcttaggactgatgcacgttcatt

SEQ ID NO: 122341 - DNA, 25 bp, Probe sequence
atgtatattttcctcagtcttcagc

SEQ ID NO: 122342 - DNA, 25 bp, Probe sequence
atgtcttcatctaattatatatttt

SEQ ID NO: 122343 - DNA, 25 bp, Probe sequence
aaagcgtatgaggaggtttgtagca

SEQ ID NO: 122344 - DNA, 25 bp, Probe sequence
ctgatgcacgttcatttaaaatagc

SEQ ID NO: 122345 - DNA, 25 bp, Probe sequence
cgcctccaatgtcttcatctaatta

SEQ ID NO: 122346 - DNA, 25 bp, Probe sequence
cctccaatgtcttcatctaattata

SEQ ID NO: 122347 - DNA, 25 bp, Probe sequence
cctcagtcttcagccttaatcatga

SEQ ID NO: 122348 - DNA, 25 bp, Probe sequence
gatatatcttaggactgatgcacgt

SEQ ID NO: 122349 - DNA, 25 bp, Probe sequence
gtcttcagccttaatcatgatatat

SEQ ID NO: 122350 - DNA, 25 bp, Probe sequence
ggactgatgcacgttcatttaaaat

SEQ ID NO: 122351 - DNA, 25 bp, Probe sequence
tcagtcttcagccttaatcatgata

SEQ ID NO: 122352 - DNA, 25 bp, Probe sequence
tcagccttaatcatgatatatctta

SEQ ID NO: 122353 - DNA, 25 bp, Probe sequence
ttaggactgatgcacgttcatttaa

SEQ ID NO: 122354 - DNA, 25 bp, Probe sequence
taactagttccacattaggagtttt

SEQ ID NO: 122355 - DNA, 25 bp, Probe sequence
atttggtttcaagcacggatactac

SEQ ID NO: 122356 - DNA, 25 bp, Probe sequence
atactacttgatgaacagattacta

SEQ ID NO: 122357 - DNA, 25 bp, Probe sequence
ataacaaaactcctaatgtactagt

SEQ ID NO: 122358 - DNA, 25 bp, Probe sequence
agcacggatactacttgatgaacag

SEQ ID NO: 122359 - DNA, 25 bp, Probe sequence
aactcctaatgtactagtttagaat

SEQ ID NO: 122360 - DNA, 25 bp, Probe sequence
cacggatactacttgatgaacagat

SEQ ID NO: 122361 - DNA, 25 bp, Probe sequence
ctagttccacattaggagttttaat

SEQ ID NO: 122362 - DNA, 25 bp, Probe sequence
gagttttaatttggtttcaagcacg

SEQ ID NO: 122363 - DNA, 25 bp, Probe sequence
ggatactacttgatgaacagattac

SEQ ID NO: 122364 - DNA, 25 bp, Probe sequence
tctgcataacaaaactcctaatgta

SEQ ID NO: 122365 - DNA, 25 bp, Probe sequence
tagaattttttaactagttccacat

SEQ ID NO: 122366 - DNA, 25 bp, Probe sequence
ttggtttcaagcacggatactactt

SEQ ID NO: 122367 - DNA, 25 bp, Probe sequence
tttttaactagttccacattaggag

SEQ ID NO: 122368 - DNA, 25 bp, Probe sequence
ttattctgcataacaaaactcctaa

SEQ ID NO: 122369 - DNA, 25 bp, Probe sequence
atatacactatttttcaagaattga

SEQ ID NO: 122370 - DNA, 25 bp, Probe sequence
atgacaacctccttatgtaaattat

SEQ ID NO: 122371 - DNA, 25 bp, Probe sequence
agattcttcatggctattttagttt

SEQ ID NO: 122372 - DNA, 25 bp, Probe sequence
acaacccattactgctcggcaaaat

SEQ ID NO: 122373 - DNA, 25 bp, Probe sequence
aaatttttcaatattgctaagcata

SEQ ID NO: 122374 - DNA, 25 bp, Probe sequence
aaacacatacgatttagagcataaa

SEQ ID NO: 122375 - DNA, 25 bp, Probe sequence
aaaataaccatgaagctctacctat

SEQ ID NO: 122376 - DNA, 25 bp, Probe sequence
aaccatgaagctctacctattgatt

SEQ ID NO: 122377 - DNA, 25 bp, Probe sequence
caagaattgaaccgctttttcattt

SEQ ID NO: 122378 - DNA, 25 bp, Probe sequence
gctaagcataattgatggatacttt

SEQ ID NO: 122379 - DNA, 25 bp, Probe sequence
gaaattgaaccttataaacacatac

SEQ ID NO: 122380 - DNA, 25 bp, Probe sequence
ggatactttaacaacccattactgc

SEQ ID NO: 122381 - DNA, 25 bp, Probe sequence
tgaagctctacctattgattaaata

SEQ ID NO: 122382 - DNA, 25 bp, Probe sequence
tactgctcggcaaaattaataatgg

SEQ ID NO: 122383 - DNA, 25 bp, Probe sequence
tatagttagttattaccaaaatgta

SEQ ID NO: 122384 - DNA, 25 bp, Probe sequence
tttgaacttactcttcccaaatcct

SEQ ID NO: 122385 - DNA, 25 bp, Probe sequence
aaaatcatttacatactcacaccaa

SEQ ID NO: 122386 - DNA, 25 bp, Probe sequence
aacgctcaaacacgtcttagcctac

SEQ ID NO: 122387 - DNA, 25 bp, Probe sequence
aatatcaaattcactcttttaacat

SEQ ID NO: 122388 - DNA, 25 bp, Probe sequence
cacgttcagctaagatactctgtgg

SEQ ID NO: 122389 - DNA, 25 bp, Probe sequence
ctcacaccaaatcatatgctctctt

SEQ ID NO: 122390 - DNA, 25 bp, Probe sequence
cgtggtaccacctatattcaagaag

SEQ ID NO: 122391 - DNA, 25 bp, Probe sequence
gcctactattaatcacgttcagcta

SEQ ID NO: 122392 - DNA, 25 bp, Probe sequence
gcttcatctcttcaagcactctaga

SEQ ID NO: 122393 - DNA, 25 bp, Probe sequence
gcactctagattatgattaacgctc

SEQ ID NO: 122394 - DNA, 25 bp, Probe sequence
gaaatttgaaatgcttcatctcttc

SEQ ID NO: 122395 - DNA, 25 bp, Probe sequence
gacggatattccgtggtaccaccta

SEQ ID NO: 122396 - DNA, 25 bp, Probe sequence
taatcataccaatactatcatcgtg

SEQ ID NO: 122397 - DNA, 25 bp, Probe sequence
tactctgtgggctaccttcagtaaa

SEQ ID NO: 122398 - DNA, 25 bp, Probe sequence
tactcttcccaaatcctatattaaa

SEQ ID NO: 122399 - DNA, 25 bp, Probe sequence
attctatcctaagcataattcaact

SEQ ID NO: 122400 - DNA, 25 bp, Probe sequence
atgcactgctaatattagatatctt

SEQ ID NO: 122401 - DNA, 25 bp, Probe sequence
aaagttccaagttaatgcactgcta

SEQ ID NO: 122402 - DNA, 25 bp, Probe sequence
aaaccttaataatgaattctatcct

SEQ ID NO: 122403 - DNA, 25 bp, Probe sequence
aaaaatagatgtacaacctttgctt

SEQ ID NO: 122404 - DNA, 25 bp, Probe sequence
aagcataattcaacttaaatggatg

SEQ ID NO: 122405 - DNA, 25 bp, Probe sequence
aagtaaacgagacatcatctatttt

SEQ ID NO: 122406 - DNA, 25 bp, Probe sequence
aatagactgtctcgttttttgatgt

SEQ ID NO: 122407 - DNA, 25 bp, Probe sequence
gactgtctcgttttttgatgtgaaa

SEQ ID NO: 122408 - DNA, 25 bp, Probe sequence
gagacatcatctatttttaactaat

SEQ ID NO: 122409 - DNA, 25 bp, Probe sequence
gatgtacaacctttgcttaaacctt

SEQ ID NO: 122410 - DNA, 25 bp, Probe sequence
gttccaagttaatgcactgctaata

SEQ ID NO: 122411 - DNA, 25 bp, Probe sequence
tttgctatagcatcataaagtaaac

SEQ ID NO: 122412 - DNA, 25 bp, Probe sequence
tttttaactaatagactgtctcgtt

SEQ ID NO: 122413 - DNA, 25 bp, Probe sequence
ttcaaatcataagttaaagttccaa

SEQ ID NO: 122414 - DNA, 25 bp, Probe sequence
acaaagttcaggctctcaatttgtc

SEQ ID NO: 122415 - DNA, 25 bp, Probe sequence
aaagttcaggctctcaatttgtccg

SEQ ID NO: 122416 - DNA, 25 bp, Probe sequence
aacaaagttcaggctctcaatttgt

SEQ ID NO: 122417 - DNA, 25 bp, Probe sequence
aagttcaggctctcaatttgtccgt

SEQ ID NO: 122418 - DNA, 25 bp, Probe sequence
caaagttcaggctctcaatttgtcc

SEQ ID NO: 122419 - DNA, 25 bp, Probe sequence
catttaaaaagagcctgaacaaagt

SEQ ID NO: 122420 - DNA, 25 bp, Probe sequence
ccgcccatgcctgatatacatttaa

SEQ ID NO: 122421 - DNA, 25 bp, Probe sequence
cgcccatgcctgatatacatttaaa

SEQ ID NO: 122422 - DNA, 25 bp, Probe sequence
gaacaaagttcaggctctcaatttg

SEQ ID NO: 122423 - DNA, 25 bp, Probe sequence
gatatacatttaaaaagagcctgaa

SEQ ID NO: 122424 - DNA, 25 bp, Probe sequence
tgaacaaagttcaggctctcaattt

SEQ ID NO: 122425 - DNA, 25 bp, Probe sequence
tcaggctctcaatttgtccgtatat

SEQ ID NO: 122426 - DNA, 25 bp, Probe sequence
tacatttaaaaagagcctgaacaaa

SEQ ID NO: 122427 - DNA, 25 bp, Probe sequence
tatacatttaaaaagagcctgaaca

SEQ ID NO: 122428 - DNA, 25 bp, Probe sequence
ttcaggctctcaatttgtccgtata

SEQ ID NO: 122429 - DNA, 25 bp, Probe sequence
agtacgatgcttaaataaattataa

SEQ ID NO: 122430 - DNA, 25 bp, Probe sequence
acgcccccatatatactaacaatac

SEQ ID NO: 122431 - DNA, 25 bp, Probe sequence
aaatgttatcaattgtgtactaatt

SEQ ID NO: 122432 - DNA, 25 bp, Probe sequence
aaacgcccccatatatactaacaat

SEQ ID NO: 122433 - DNA, 25 bp, Probe sequence
aacgcccccatatatactaacaata

SEQ ID NO: 122434 - DNA, 25 bp, Probe sequence
cgcccccatatatactaacaataca

SEQ ID NO: 122435 - DNA, 25 bp, Probe sequence
gcccccatatatactaacaatacaa

SEQ ID NO: 122436 - DNA, 25 bp, Probe sequence
gaaaaatgttatcaattgtgtacta

SEQ ID NO: 122437 - DNA, 25 bp, Probe sequence
gtgtactaattaaaagtttcgtgct

SEQ ID NO: 122438 - DNA, 25 bp, Probe sequence
gtttttgacaaaatgatgaacgttg

SEQ ID NO: 122439 - DNA, 25 bp, Probe sequence
tgaaacgcccccatatatactaaca

SEQ ID NO: 122440 - DNA, 25 bp, Probe sequence
taaaatccaattaagtacgatgctt

SEQ ID NO: 122441 - DNA, 25 bp, Probe sequence
taaaagtttcgtgcttacattattt

SEQ ID NO: 122442 - DNA, 25 bp, Probe sequence
ttgaaacgcccccatatatactaac

SEQ ID NO: 122443 - DNA, 25 bp, Probe sequence
ttcgtgcttacattatttttaaaat

SEQ ID NO: 122444 - DNA, 25 bp, Probe sequence
attatataatatttgaacctttcgg

SEQ ID NO: 122445 - DNA, 25 bp, Probe sequence
atatttgaacctttcggtatacatt

SEQ ID NO: 122446 - DNA, 25 bp, Probe sequence
acattataaaaaagctccgatcaaa

SEQ ID NO: 122447 - DNA, 25 bp, Probe sequence
aaagctccgatcaaagttaaactat

SEQ ID NO: 122448 - DNA, 25 bp, Probe sequence
cacttttttatattctctttcaact

SEQ ID NO: 122449 - DNA, 25 bp, Probe sequence
ctttcaactctaccattatataata

SEQ ID NO: 122450 - DNA, 25 bp, Probe sequence
gcgtcaactttgattggagcttttc

SEQ ID NO: 122451 - DNA, 25 bp, Probe sequence
gagcttttcacttttataacacatc

SEQ ID NO: 122452 - DNA, 25 bp, Probe sequence
gattggagcttttcacttttataac

SEQ ID NO: 122453 - DNA, 25 bp, Probe sequence
gttaaactatttgagcgtcaacttt

SEQ ID NO: 122454 - DNA, 25 bp, Probe sequence
tgaacctttcggtatacattataaa

SEQ ID NO: 122455 - DNA, 25 bp, Probe sequence
tcctcacttttttatattctctttc

SEQ ID NO: 122456 - DNA, 25 bp, Probe sequence
tttatatcctcacttttttatattc

SEQ ID NO: 122457 - DNA, 25 bp, Probe sequence
ttttcacttttataacacatcaatg

SEQ ID NO: 122458 - DNA, 25 bp, Probe sequence
ttctctttcaactctaccattatat

SEQ ID NO: 122459 - DNA, 25 bp, Probe sequence
attggatattacaatgcaacatatt

SEQ ID NO: 122460 - DNA, 25 bp, Probe sequence
ataagctatgcatctgctactcatt

SEQ ID NO: 122461 - DNA, 25 bp, Probe sequence
atgcatctgctactcatttttgtaa

SEQ ID NO: 122462 - DNA, 25 bp, Probe sequence
acataagctatgcatctgctactca

SEQ ID NO: 122463 - DNA, 25 bp, Probe sequence
aagctatgcatctgctactcatttt

SEQ ID NO: 122464 - DNA, 25 bp, Probe sequence
aagactatactagattggatattac

SEQ ID NO: 122465 - DNA, 25 bp, Probe sequence
ccctattcgttaaagactatactag

SEQ ID NO: 122466 - DNA, 25 bp, Probe sequence
gctactcatttttgtaatttaatat

SEQ ID NO: 122467 - DNA, 25 bp, Probe sequence
gctatgcatctgctactcatttttg

SEQ ID NO: 122468 - DNA, 25 bp, Probe sequence
gcaacatattaacatacaaactttt

SEQ ID NO: 122469 - DNA, 25 bp, Probe sequence
gatacataagctatgcatctgctac

SEQ ID NO: 122470 - DNA, 25 bp, Probe sequence
taacatacaaactttttgcttaaag

SEQ ID NO: 122471 - DNA, 25 bp, Probe sequence
tacacccctattcgttaaagactat

SEQ ID NO: 122472 - DNA, 25 bp, Probe sequence
tagcagatacataagctatgcatct

SEQ ID NO: 122473 - DNA, 25 bp, Probe sequence
tatgcatctgctactcatttttgta

SEQ ID NO: 122474 - DNA, 25 bp, Probe sequence
atatcataggtctattccctataca

SEQ ID NO: 122475 - DNA, 25 bp, Probe sequence
atacaaacattgaaatcacaacgtt

SEQ ID NO: 122476 - DNA, 25 bp, Probe sequence
aggtctattccctatacaaacattg

SEQ ID NO: 122477 - DNA, 25 bp, Probe sequence
aaatgctgagtattattttgcaaca

SEQ ID NO: 122478 - DNA, 25 bp, Probe sequence
aacttccctattatatcataggtct

SEQ ID NO: 122479 - DNA, 25 bp, Probe sequence
aatcacaacgtttatatatttgtaa

SEQ ID NO: 122480 - DNA, 25 bp, Probe sequence
gtatatatacctccatgattaacta

SEQ ID NO: 122481 - DNA, 25 bp, Probe sequence
gtctattccctatacaaacattgaa

SEQ ID NO: 122482 - DNA, 25 bp, Probe sequence
tcgtcaaaactatattaaaatgctg

SEQ ID NO: 122483 - DNA, 25 bp, Probe sequence
tcaacttttttcgtcaaaactatat

SEQ ID NO: 122484 - DNA, 25 bp, Probe sequence
tatacctccatgattaactaattta

SEQ ID NO: 122485 - DNA, 25 bp, Probe sequence
tatatttgtaaatcaacttttttcg

SEQ ID NO: 122486 - DNA, 25 bp, Probe sequence
tattttttcaacttccctattatat

SEQ ID NO: 122487 - DNA, 25 bp, Probe sequence
ttttttcaacttccctattatatca

SEQ ID NO: 122488 - DNA, 25 bp, Probe sequence
ttttcaacttccctattatatcata

SEQ ID NO: 122489 - DNA, 25 bp, Probe sequence
attttagcgattaaatgtggcattt

SEQ ID NO: 122490 - DNA, 25 bp, Probe sequence
atgacaatgccatctcttttttata

SEQ ID NO: 122491 - DNA, 25 bp, Probe sequence
actcctcactttaatgtttgttctc

SEQ ID NO: 122492 - DNA, 25 bp, Probe sequence
aactcctcactttaatgtttgttct

SEQ ID NO: 122493 - DNA, 25 bp, Probe sequence
aatgcattttagcaaatatgtcata

SEQ ID NO: 122494 - DNA, 25 bp, Probe sequence
caatgccatctcttttttataagtg

SEQ ID NO: 122495 - DNA, 25 bp, Probe sequence
ctcactttaatgtttgttctcttaa

SEQ ID NO: 122496 - DNA, 25 bp, Probe sequence
cgtataaaactcctcactttaatgt

SEQ ID NO: 122497 - DNA, 25 bp, Probe sequence
gacaatgccatctcttttttataag

SEQ ID NO: 122498 - DNA, 25 bp, Probe sequence
gttctcttaaatgcattttagcaaa

SEQ ID NO: 122499 - DNA, 25 bp, Probe sequence
tgtttgttctcttaaatgcatttta

SEQ ID NO: 122500 - DNA, 25 bp, Probe sequence
tgacaatgccatctcttttttataa

SEQ ID NO: 122501 - DNA, 25 bp, Probe sequence
tcctcactttaatgtttgttctctt

SEQ ID NO: 122502 - DNA, 25 bp, Probe sequence
taaaactcctcactttaatgtttgt

SEQ ID NO: 122503 - DNA, 25 bp, Probe sequence
taaatgtggcattttgcttttaaaa

SEQ ID NO: 122504 - DNA, 25 bp, Probe sequence
atgtgattaacctgccaactgcttt

SEQ ID NO: 122505 - DNA, 25 bp, Probe sequence
agaagcgggtgcttctacttggttc

SEQ ID NO: 122506 - DNA, 25 bp, Probe sequence
actgctttatgcgtcgctacaggtg

SEQ ID NO: 122507 - DNA, 25 bp, Probe sequence
acaattcacatttaagtcaacacta

SEQ ID NO: 122508 - DNA, 25 bp, Probe sequence
aagtcaacactataactgtaattat

SEQ ID NO: 122509 - DNA, 25 bp, Probe sequence
caactgctttatgcgtcgctacagg

SEQ ID NO: 122510 - DNA, 25 bp, Probe sequence
gctacaggtgagaagcgggtgcttc

SEQ ID NO: 122511 - DNA, 25 bp, Probe sequence
gttaatcatatcaacaattcacatt

SEQ ID NO: 122512 - DNA, 25 bp, Probe sequence
gtttcgtattcaacgttgttaatca

SEQ ID NO: 122513 - DNA, 25 bp, Probe sequence
gtattcaacgttgttaatcatatca

SEQ ID NO: 122514 - DNA, 25 bp, Probe sequence
gtaatgtgattaacctgccaactgc

SEQ ID NO: 122515 - DNA, 25 bp, Probe sequence
tggttcgtttcgtattcaacgttgt

SEQ ID NO: 122516 - DNA, 25 bp, Probe sequence
tgcttctacttggttcgtttcgtat

SEQ ID NO: 122517 - DNA, 25 bp, Probe sequence
tctacttggttcgtttcgtattcaa

SEQ ID NO: 122518 - DNA, 25 bp, Probe sequence
tttatgcgtcgctacaggtgagaag

SEQ ID NO: 122519 - DNA, 25 bp, Probe sequence
atctttacctttcacttgttcaact

SEQ ID NO: 122520 - DNA, 25 bp, Probe sequence
aacatgcaacctctaactcaattta

SEQ ID NO: 122521 - DNA, 25 bp, Probe sequence
aaccctgtaaaacttgatacgcaat

SEQ ID NO: 122522 - DNA, 25 bp, Probe sequence
aagtggctacatacctttaagatat

SEQ ID NO: 122523 - DNA, 25 bp, Probe sequence
aaggtagcacatcacattctgtgac

SEQ ID NO: 122524 - DNA, 25 bp, Probe sequence
cacttgttcaacttatgtaccataa

SEQ ID NO: 122525 - DNA, 25 bp, Probe sequence
ctatttcggcatctttacctttcac

SEQ ID NO: 122526 - DNA, 25 bp, Probe sequence
gatatgcaaccactttggcaattat

SEQ ID NO: 122527 - DNA, 25 bp, Probe sequence
gttcctattcgaaaactgtcccaat

SEQ ID NO: 122528 - DNA, 25 bp, Probe sequence
gtaatatacaggattcatcacgcat

SEQ ID NO: 122529 - DNA, 25 bp, Probe sequence
ggtttatatctatttcggcatcttt

SEQ ID NO: 122530 - DNA, 25 bp, Probe sequence
tgtgacagtacagttcctattcgaa

SEQ ID NO: 122531 - DNA, 25 bp, Probe sequence
tcatcacgcataatcaaccctgtaa

SEQ ID NO: 122532 - DNA, 25 bp, Probe sequence
taagctccctttccatgttttagag

SEQ ID NO: 122533 - DNA, 25 bp, Probe sequence
ttcactttcatacccttttttacag

SEQ ID NO: 122534 - DNA, 25 bp, Probe sequence
attgaacaacaatcatcgttttaac

SEQ ID NO: 122535 - DNA, 25 bp, Probe sequence
atatgacaccaacaaacatttatgt

SEQ ID NO: 122536 - DNA, 25 bp, Probe sequence
atcatcgttttaacattaaacctat

SEQ ID NO: 122537 - DNA, 25 bp, Probe sequence
atcccgcccctatacaagggacgag

SEQ ID NO: 122538 - DNA, 25 bp, Probe sequence
agggacgagatcgtcgtggtaccac

SEQ ID NO: 122539 - DNA, 25 bp, Probe sequence
acaccaacaaacatttatgtctgaa

SEQ ID NO: 122540 - DNA, 25 bp, Probe sequence
aaacagggaatatatgacaccaaca

SEQ ID NO: 122541 - DNA, 25 bp, Probe sequence
aacaacaatcatcgttttaacatta

SEQ ID NO: 122542 - DNA, 25 bp, Probe sequence
ccctcctatttgctttataaatact

SEQ ID NO: 122543 - DNA, 25 bp, Probe sequence
ccgcccctatacaagggacgagatc

SEQ ID NO: 122544 - DNA, 25 bp, Probe sequence
gggaatatatgacaccaacaaacat

SEQ ID NO: 122545 - DNA, 25 bp, Probe sequence
tcccgcccctatacaagggacgaga

SEQ ID NO: 122546 - DNA, 25 bp, Probe sequence
tctgacctcgttaaaaaattgaaca

SEQ ID NO: 122547 - DNA, 25 bp, Probe sequence
taaatacttttatctgacctcgtta

SEQ ID NO: 122548 - DNA, 25 bp, Probe sequence
ttatctgacctcgttaaaaaattga

SEQ ID NO: 122549 - DNA, 25 bp, Probe sequence
attgattagatcatcttgtcttcaa

SEQ ID NO: 122550 - DNA, 25 bp, Probe sequence
attcattatacaccaatcattttaa

SEQ ID NO: 122551 - DNA, 25 bp, Probe sequence
attagatcatcttgtcttcaatcat

SEQ ID NO: 122552 - DNA, 25 bp, Probe sequence
atcatcttgtcttcaatcatttaaa

SEQ ID NO: 122553 - DNA, 25 bp, Probe sequence
agatcatcttgtcttcaatcattta

SEQ ID NO: 122554 - DNA, 25 bp, Probe sequence
aacgatttagatttgtattcattat

SEQ ID NO: 122555 - DNA, 25 bp, Probe sequence
catcttgtcttcaatcatttaaacg

SEQ ID NO: 122556 - DNA, 25 bp, Probe sequence
cattatacaccaatcattttaaaat

SEQ ID NO: 122557 - DNA, 25 bp, Probe sequence
gatcatcttgtcttcaatcatttaa

SEQ ID NO: 122558 - DNA, 25 bp, Probe sequence
gtcttcaatcatttaaacgatttag

SEQ ID NO: 122559 - DNA, 25 bp, Probe sequence
tggctttctgtgtaatattgattag

SEQ ID NO: 122560 - DNA, 25 bp, Probe sequence
tgattagatcatcttgtcttcaatc

SEQ ID NO: 122561 - DNA, 25 bp, Probe sequence
tcttgtcttcaatcatttaaacgat

SEQ ID NO: 122562 - DNA, 25 bp, Probe sequence
tagatcatcttgtcttcaatcattt

SEQ ID NO: 122563 - DNA, 25 bp, Probe sequence
ttagatcatcttgtcttcaatcatt

SEQ ID NO: 122564 - DNA, 25 bp, Probe sequence
agagttaggctataaattaattgta

SEQ ID NO: 122565 - DNA, 25 bp, Probe sequence
accctctttattttgattatgccta

SEQ ID NO: 122566 - DNA, 25 bp, Probe sequence
aactccgaagtcagagttaggctat

SEQ ID NO: 122567 - DNA, 25 bp, Probe sequence
aacattatatcgttacttattaagt

SEQ ID NO: 122568 - DNA, 25 bp, Probe sequence
aagaatccctcaatttaattcattt

SEQ ID NO: 122569 - DNA, 25 bp, Probe sequence
caccctctttattttgattatgcct

SEQ ID NO: 122570 - DNA, 25 bp, Probe sequence
catcaccctctttattttgattatg

SEQ ID NO: 122571 - DNA, 25 bp, Probe sequence
cttattaagtaatttgcatgacaat

SEQ ID NO: 122572 - DNA, 25 bp, Probe sequence
ctctttattttgattatgcctaatt

SEQ ID NO: 122573 - DNA, 25 bp, Probe sequence
gatgaaaaaagaatccctcaattta

SEQ ID NO: 122574 - DNA, 25 bp, Probe sequence
gtaatttgcatgacaatattattgt

SEQ ID NO: 122575 - DNA, 25 bp, Probe sequence
tccgaagtcagagttaggctataaa

SEQ ID NO: 122576 - DNA, 25 bp, Probe sequence
tccctcaatttaattcatttaacca

SEQ ID NO: 122577 - DNA, 25 bp, Probe sequence
tacatcaccctctttattttgatta

SEQ ID NO: 122578 - DNA, 25 bp, Probe sequence
ttgattatgcctaattatactataa

SEQ ID NO: 122579 - DNA, 25 bp, Probe sequence
attacttacatacatcaacgcgtac

SEQ ID NO: 122580 - DNA, 25 bp, Probe sequence
atagtcattacttacatacatcaac

SEQ ID NO: 122581 - DNA, 25 bp, Probe sequence
agtaatgacttatttatagtgtaat

SEQ ID NO: 122582 - DNA, 25 bp, Probe sequence
agcaccccttgatttttatatgtta

SEQ ID NO: 122583 - DNA, 25 bp, Probe sequence
agcgttttccgttgatatatttatc

SEQ ID NO: 122584 - DNA, 25 bp, Probe sequence
acttacatacatcaacgcgtacgta

SEQ ID NO: 122585 - DNA, 25 bp, Probe sequence
acatacatcaacgcgtacgtaaagt

SEQ ID NO: 122586 - DNA, 25 bp, Probe sequence
aaagcaccccttgatttttatatgt

SEQ ID NO: 122587 - DNA, 25 bp, Probe sequence
caacgcgtacgtaaagtaatgactt

SEQ ID NO: 122588 - DNA, 25 bp, Probe sequence
caccccttgatttttatatgttata

SEQ ID NO: 122589 - DNA, 25 bp, Probe sequence
gaaagcgttttccgttgatatattt

SEQ ID NO: 122590 - DNA, 25 bp, Probe sequence
gtcattacttacatacatcaacgcg

SEQ ID NO: 122591 - DNA, 25 bp, Probe sequence
tgaattttgaaagcgttttccgttg

SEQ ID NO: 122592 - DNA, 25 bp, Probe sequence
tccgttgatatatttatctttttta

SEQ ID NO: 122593 - DNA, 25 bp, Probe sequence
tatatgttatactttatggaattag

SEQ ID NO: 122594 - DNA, 25 bp, Probe sequence
atatttttatgctgctattttaaat

SEQ ID NO: 122595 - DNA, 25 bp, Probe sequence
atcatttcatgattatgtctacttt

SEQ ID NO: 122596 - DNA, 25 bp, Probe sequence
agaaactatctcatagagtatttat

SEQ ID NO: 122597 - DNA, 25 bp, Probe sequence
acaagtgcctatatagacttagcta

SEQ ID NO: 122598 - DNA, 25 bp, Probe sequence
aaagtccaacttttgagatgcacat

SEQ ID NO: 122599 - DNA, 25 bp, Probe sequence
aagacataatcatgattgttcttga

SEQ ID NO: 122600 - DNA, 25 bp, Probe sequence
gactgtgatgtcgtaattaaagaaa

SEQ ID NO: 122601 - DNA, 25 bp, Probe sequence
gagtatttatacacgacctaatttc

SEQ ID NO: 122602 - DNA, 25 bp, Probe sequence
gagatgcacattatcatttcatgat

SEQ ID NO: 122603 - DNA, 25 bp, Probe sequence
gatgagcactccataaagtcaggtt

SEQ ID NO: 122604 - DNA, 25 bp, Probe sequence
gattgttcttgatgagcactccata

SEQ ID NO: 122605 - DNA, 25 bp, Probe sequence
gtctactttttaatatttttatgct

SEQ ID NO: 122606 - DNA, 25 bp, Probe sequence
tatacacgacctaatttcaaataaa

SEQ ID NO: 122607 - DNA, 25 bp, Probe sequence
ttttagcatattcgactgtgatgtc

SEQ ID NO: 122608 - DNA, 25 bp, Probe sequence
ttaacctccagaactaatttatata

SEQ ID NO: 122609 - DNA, 25 bp, Probe sequence
atttattccaattcattaactctaa

SEQ ID NO: 122610 - DNA, 25 bp, Probe sequence
agcgcattactaaaatttctttatt

SEQ ID NO: 122611 - DNA, 25 bp, Probe sequence
acaatttatctaaatcgcccctcgt

SEQ ID NO: 122612 - DNA, 25 bp, Probe sequence
aaaatacacgcgctgttaccacttt

SEQ ID NO: 122613 - DNA, 25 bp, Probe sequence
aaaagcagcaacaacttcgtgaaaa

SEQ ID NO: 122614 - DNA, 25 bp, Probe sequence
aacaatctattacttataacttaca

SEQ ID NO: 122615 - DNA, 25 bp, Probe sequence
aattgcttgattcacaacaatctat

SEQ ID NO: 122616 - DNA, 25 bp, Probe sequence
gcccctcgtctttttctatgacgaa

SEQ ID NO: 122617 - DNA, 25 bp, Probe sequence
gcatgtttcctcaatcaaattagat

SEQ ID NO: 122618 - DNA, 25 bp, Probe sequence
tgtatttctaattttcacctatgca

SEQ ID NO: 122619 - DNA, 25 bp, Probe sequence
tcacctatgcatgtttcctcaatca

SEQ ID NO: 122620 - DNA, 25 bp, Probe sequence
taagcatctattttaagcgcattac

SEQ ID NO: 122621 - DNA, 25 bp, Probe sequence
taaattttcctcaacttgtaggtcg

SEQ ID NO: 122622 - DNA, 25 bp, Probe sequence
tatgacgaatgattacacttgtgta

SEQ ID NO: 122623 - DNA, 25 bp, Probe sequence
ttgctaatcctcaaatctagttaaa

SEQ ID NO: 122624 - DNA, 25 bp, Probe sequence
atatttacattataaccgaactatt

SEQ ID NO: 122625 - DNA, 25 bp, Probe sequence
atacttcttatatttccttctatca

SEQ ID NO: 122626 - DNA, 25 bp, Probe sequence
atctttacacattttttacattact

SEQ ID NO: 122627 - DNA, 25 bp, Probe sequence
atcctacacattatctttacacatt

SEQ ID NO: 122628 - DNA, 25 bp, Probe sequence
acttcttatatttccttctatcatt

SEQ ID NO: 122629 - DNA, 25 bp, Probe sequence
aacatcctacacattatctttacac

SEQ ID NO: 122630 - DNA, 25 bp, Probe sequence
cattttttacattactttacatata

SEQ ID NO: 122631 - DNA, 25 bp, Probe sequence
cttatatttccttctatcatttgca

SEQ ID NO: 122632 - DNA, 25 bp, Probe sequence
gcctccctaacttataattatattt

SEQ ID NO: 122633 - DNA, 25 bp, Probe sequence
ggtatgcctccctaacttataatta

SEQ ID NO: 122634 - DNA, 25 bp, Probe sequence
tacacattatctttacacatttttt

SEQ ID NO: 122635 - DNA, 25 bp, Probe sequence
tacacattttttacattactttaca

SEQ ID NO: 122636 - DNA, 25 bp, Probe sequence
tatgcctccctaacttataattata

SEQ ID NO: 122637 - DNA, 25 bp, Probe sequence
tatttccttctatcatttgcatgac

SEQ ID NO: 122638 - DNA, 25 bp, Probe sequence
ttctatcatttgcatgacttactct

SEQ ID NO: 122639 - DNA, 25 bp, Probe sequence
atttattcctaagcttatgtacaaa

SEQ ID NO: 122640 - DNA, 25 bp, Probe sequence
atcaatcattggtgactctttatta

SEQ ID NO: 122641 - DNA, 25 bp, Probe sequence
aaattcgctttgtctaatgtgtaat

SEQ ID NO: 122642 - DNA, 25 bp, Probe sequence
aaagttgctagactcacctaatttt

SEQ ID NO: 122643 - DNA, 25 bp, Probe sequence
aaggcgaacctagcaattaaagttg

SEQ ID NO: 122644 - DNA, 25 bp, Probe sequence
cattggtgactctttattatttcta

SEQ ID NO: 122645 - DNA, 25 bp, Probe sequence
ctagactcacctaattttattttgc

SEQ ID NO: 122646 - DNA, 25 bp, Probe sequence
gcttatgtacaaattcgctttgtct

SEQ ID NO: 122647 - DNA, 25 bp, Probe sequence
gttgccaacttcaattcatttaaaa

SEQ ID NO: 122648 - DNA, 25 bp, Probe sequence
gttttactcatttattcctaagctt

SEQ ID NO: 122649 - DNA, 25 bp, Probe sequence
tcctgttgccaacttcaattcattt

SEQ ID NO: 122650 - DNA, 25 bp, Probe sequence
tctatcctgttgccaacttcaattc

SEQ ID NO: 122651 - DNA, 25 bp, Probe sequence
taataaacactacataatcaatcat

SEQ ID NO: 122652 - DNA, 25 bp, Probe sequence
ttatttctatcctgttgccaacttc

SEQ ID NO: 122653 - DNA, 25 bp, Probe sequence
ttattatttctatcctgttgccaac

SEQ ID NO: 122654 - DNA, 25 bp, Probe sequence
agctaaacgcatttcgtttgtgaaa

SEQ ID NO: 122655 - DNA, 25 bp, Probe sequence
actgtttctttatgaaatggctttc

SEQ ID NO: 122656 - DNA, 25 bp, Probe sequence
aactggcattatatgtgcaacaatt

SEQ ID NO: 122657 - DNA, 25 bp, Probe sequence
aagtgcataataaacatatctatat

SEQ ID NO: 122658 - DNA, 25 bp, Probe sequence
aatattatagctaaacgcatttcgt

SEQ ID NO: 122659 - DNA, 25 bp, Probe sequence
aattttcaattggttattatatatg

SEQ ID NO: 122660 - DNA, 25 bp, Probe sequence
catggaattttacacatttttaccg

SEQ ID NO: 122661 - DNA, 25 bp, Probe sequence
ccctttactgtttctttatgaaatg

SEQ ID NO: 122662 - DNA, 25 bp, Probe sequence
gcaccattaaagctttttcaagatg

SEQ ID NO: 122663 - DNA, 25 bp, Probe sequence
gaatagccacaaatagcaccattaa

SEQ ID NO: 122664 - DNA, 25 bp, Probe sequence
gaaatggctttcaactaatattata

SEQ ID NO: 122665 - DNA, 25 bp, Probe sequence
gtaaatgtcacagaatagccacaaa

SEQ ID NO: 122666 - DNA, 25 bp, Probe sequence
gtaaatctatgtaaatgtcacagaa

SEQ ID NO: 122667 - DNA, 25 bp, Probe sequence
gtgcaacaatttttttgtaaatcta

SEQ ID NO: 122668 - DNA, 25 bp, Probe sequence
gtgaataatccatgaattttacaat

SEQ ID NO: 122669 - DNA, 25 bp, Probe sequence
atacatccatacttctattttataa

SEQ ID NO: 122670 - DNA, 25 bp, Probe sequence
agattgccattcatacactatcatt

SEQ ID NO: 122671 - DNA, 25 bp, Probe sequence
acttttactttctcatctatttaat

SEQ ID NO: 122672 - DNA, 25 bp, Probe sequence
acaggggtttttatatgcaacttat

SEQ ID NO: 122673 - DNA, 25 bp, Probe sequence
aaacgcctttccattgttgataaat

SEQ ID NO: 122674 - DNA, 25 bp, Probe sequence
aatattaaattgcgtacttggctca

SEQ ID NO: 122675 - DNA, 25 bp, Probe sequence
aattgcgtacttggctcaaaacttt

SEQ ID NO: 122676 - DNA, 25 bp, Probe sequence
caaataacctattaattacgtcata

SEQ ID NO: 122677 - DNA, 25 bp, Probe sequence
gccattcatacactatcattatcaa

SEQ ID NO: 122678 - DNA, 25 bp, Probe sequence
gctcaaaacttttactttctcatct

SEQ ID NO: 122679 - DNA, 25 bp, Probe sequence
gtttgaaggtgataatgtacatgta

SEQ ID NO: 122680 - DNA, 25 bp, Probe sequence
tgaaccaaaaaacgcctttccattg

SEQ ID NO: 122681 - DNA, 25 bp, Probe sequence
tcatttcagaaatacatccatactt

SEQ ID NO: 122682 - DNA, 25 bp, Probe sequence
taaacatttatatagattgccattc

SEQ ID NO: 122683 - DNA, 25 bp, Probe sequence
ttacccctgttgaatatactaaagt

SEQ ID NO: 122684 - DNA, 25 bp, Probe sequence
ataactgatttatctttaactctaa

SEQ ID NO: 122685 - DNA, 25 bp, Probe sequence
accacaaattgatatgtcattccat

SEQ ID NO: 122686 - DNA, 25 bp, Probe sequence
aaagattagtagccacaattttgac

SEQ ID NO: 122687 - DNA, 25 bp, Probe sequence
caatttatggtaaaacccagtatcg

SEQ ID NO: 122688 - DNA, 25 bp, Probe sequence
gccacaattttgactactaatctta

SEQ ID NO: 122689 - DNA, 25 bp, Probe sequence
gacatacctttctataactgattta

SEQ ID NO: 122690 - DNA, 25 bp, Probe sequence
gacgacatacctttctataactgat

SEQ ID NO: 122691 - DNA, 25 bp, Probe sequence
gatatgtcattccatcaaaactaat

SEQ ID NO: 122692 - DNA, 25 bp, Probe sequence
gttttaatgtacttcaatttatggt

SEQ ID NO: 122693 - DNA, 25 bp, Probe sequence
gtaaaacccagtatcgatttaacat

SEQ ID NO: 122694 - DNA, 25 bp, Probe sequence
gtcattccatcaaaactaatgtatt

SEQ ID NO: 122695 - DNA, 25 bp, Probe sequence
tgtattgaattgatgtaaacgtttt

SEQ ID NO: 122696 - DNA, 25 bp, Probe sequence
taatcttagttaaaattcagtatct

SEQ ID NO: 122697 - DNA, 25 bp, Probe sequence
tacctttctataactgatttatctt

SEQ ID NO: 122698 - DNA, 25 bp, Probe sequence
tatctttaactctaaattaccacaa

SEQ ID NO: 122699 - DNA, 25 bp, Probe sequence
ctaaccatttagagccttaaactga

SEQ ID NO: 122700 - DNA, 25 bp, Probe sequence
atttgatttatattcgtttgactgt

SEQ ID NO: 122701 - DNA, 25 bp, Probe sequence
acctctgttctaaccatttagagcc

SEQ ID NO: 122702 - DNA, 25 bp, Probe sequence
aaactttcattttcatcattttaat

SEQ ID NO: 122703 - DNA, 25 bp, Probe sequence
aataacctctgttctaaccatttag

SEQ ID NO: 122704 - DNA, 25 bp, Probe sequence
cataaactttcattttcatcatttt

SEQ ID NO: 122705 - DNA, 25 bp, Probe sequence
cattttaatgactctttattgctaa

SEQ ID NO: 122706 - DNA, 25 bp, Probe sequence
ctccaaataacctctgttctaacca

SEQ ID NO: 122707 - DNA, 25 bp, Probe sequence
ccaaataacctctgttctaaccatt

SEQ ID NO: 122708 - DNA, 25 bp, Probe sequence
gccttaaactgaacttgaccagtta

SEQ ID NO: 122709 - DNA, 25 bp, Probe sequence
gatttatattcgtttgactgttgaa

SEQ ID NO: 122710 - DNA, 25 bp, Probe sequence
gtttgactgttgaatgtttatcata

SEQ ID NO: 122711 - DNA, 25 bp, Probe sequence
tagagccttaaactgaacttgacca

SEQ ID NO: 122712 - DNA, 25 bp, Probe sequence
ttatcataaactttcattttcatca

SEQ ID NO: 122713 - DNA, 25 bp, Probe sequence
ttaatgactctttattgctaacttt

SEQ ID NO: 122714 - DNA, 25 bp, Probe sequence
atatcgacaaaattctttactcaat

SEQ ID NO: 122715 - DNA, 25 bp, Probe sequence
atacattaaaccatactatctaaag

SEQ ID NO: 122716 - DNA, 25 bp, Probe sequence
ataacttggataaaacgcattacat

SEQ ID NO: 122717 - DNA, 25 bp, Probe sequence
atgtaacacaaatagcgataaacga

SEQ ID NO: 122718 - DNA, 25 bp, Probe sequence
atgtatactgctttttgtgctaatt

SEQ ID NO: 122719 - DNA, 25 bp, Probe sequence
aaaatatctaaccatcagtttacta

SEQ ID NO: 122720 - DNA, 25 bp, Probe sequence
aactaatataaacgcaaactgatgg

SEQ ID NO: 122721 - DNA, 25 bp, Probe sequence
aagttattatttttccgcacgatat

SEQ ID NO: 122722 - DNA, 25 bp, Probe sequence
aatattgggtaaatctgaatgagta

SEQ ID NO: 122723 - DNA, 25 bp, Probe sequence
cagcccctaattcaatatttatttt

SEQ ID NO: 122724 - DNA, 25 bp, Probe sequence
ctaaccatcagtttactatatcata

SEQ ID NO: 122725 - DNA, 25 bp, Probe sequence
gaaatcagcccctaattcaatattt

SEQ ID NO: 122726 - DNA, 25 bp, Probe sequence
tctttactcaatttatgtatactgc

SEQ ID NO: 122727 - DNA, 25 bp, Probe sequence
tttgtgctaattattcttatggatt

SEQ ID NO: 122728 - DNA, 25 bp, Probe sequence
ttatttttccgcacgatatatcgac

SEQ ID NO: 122729 - DNA, 25 bp, Probe sequence
attgttactgccatattaaactatt

SEQ ID NO: 122730 - DNA, 25 bp, Probe sequence
attataaaaattgttactgccatat

SEQ ID NO: 122731 - DNA, 25 bp, Probe sequence
ataaaaattgttactgccatattaa

SEQ ID NO: 122732 - DNA, 25 bp, Probe sequence
actgccatattaaactatttgcccg

SEQ ID NO: 122733 - DNA, 25 bp, Probe sequence
aaattgttactgccatattaaacta

SEQ ID NO: 122734 - DNA, 25 bp, Probe sequence
ctgccatattaaactatttgcccgt

SEQ ID NO: 122735 - DNA, 25 bp, Probe sequence
gccatattaaactatttgcccgttt

SEQ ID NO: 122736 - DNA, 25 bp, Probe sequence
gcccgttttaattatttagatatat

SEQ ID NO: 122737 - DNA, 25 bp, Probe sequence
gatatatatatttccatactattta

SEQ ID NO: 122738 - DNA, 25 bp, Probe sequence
gttactgccatattaaactatttgc

SEQ ID NO: 122739 - DNA, 25 bp, Probe sequence
tgccatattaaactatttgcccgtt

SEQ ID NO: 122740 - DNA, 25 bp, Probe sequence
tactgccatattaaactatttgccc

SEQ ID NO: 122741 - DNA, 25 bp, Probe sequence
tagatatatatatttccatactatt

SEQ ID NO: 122742 - DNA, 25 bp, Probe sequence
tagtctatatcaaaatatctaaatt

SEQ ID NO: 122743 - DNA, 25 bp, Probe sequence
ttgcccgttttaattatttagatat

SEQ ID NO: 122744 - DNA, 25 bp, Probe sequence
aacaatgtaagttgggctccaacgt

SEQ ID NO: 122745 - DNA, 25 bp, Probe sequence
atctatcttatgcctattttctctg

SEQ ID NO: 122746 - DNA, 25 bp, Probe sequence
agttgggctccaacgtttgtgcgaa

SEQ ID NO: 122747 - DNA, 25 bp, Probe sequence
caacgtttgtgcgaaatctatctta

SEQ ID NO: 122748 - DNA, 25 bp, Probe sequence
ctatcttatgcctattttctctgct

SEQ ID NO: 122749 - DNA, 25 bp, Probe sequence
ctccaacgtttgtgcgaaatctatc

SEQ ID NO: 122750 - DNA, 25 bp, Probe sequence
gaaatctatcttatgcctattttct

SEQ ID NO: 122751 - DNA, 25 bp, Probe sequence
gtgcgaaatctatcttatgcctatt

SEQ ID NO: 122752 - DNA, 25 bp, Probe sequence
ggctccaacgtttgtgcgaaatcta

SEQ ID NO: 122753 - DNA, 25 bp, Probe sequence
tcttatgcctattttctctgctaag

SEQ ID NO: 122754 - DNA, 25 bp, Probe sequence
tatgcctattttctctgctaagttc

SEQ ID NO: 122755 - DNA, 25 bp, Probe sequence
tatcttatgcctattttctctgcta

SEQ ID NO: 122756 - DNA, 25 bp, Probe sequence
ttatgcctattttctctgctaagtt

SEQ ID NO: 122757 - DNA, 25 bp, Probe sequence
ttgggctccaacgtttgtgcgaaat

SEQ ID NO: 122758 - DNA, 25 bp, Probe sequence
ttgtgcgaaatctatcttatgccta

SEQ ID NO: 122759 - DNA, 25 bp, Probe sequence
atgatcgtttcacctattttatttt

SEQ ID NO: 122760 - DNA, 25 bp, Probe sequence
actacattataactttattttggat

SEQ ID NO: 122761 - DNA, 25 bp, Probe sequence
aaaatccattattatttattagaat

SEQ ID NO: 122762 - DNA, 25 bp, Probe sequence
aataatgatcgtttcacctatttta

SEQ ID NO: 122763 - DNA, 25 bp, Probe sequence
ctcttcttttcgaacagtattaact

SEQ ID NO: 122764 - DNA, 25 bp, Probe sequence
gaatgtaagtgaggagggatgtact

SEQ ID NO: 122765 - DNA, 25 bp, Probe sequence
gaacagtattaactacattataact

SEQ ID NO: 122766 - DNA, 25 bp, Probe sequence
gtattaactacattataactttatt

SEQ ID NO: 122767 - DNA, 25 bp, Probe sequence
tgatcgtttcacctattttattttt

SEQ ID NO: 122768 - DNA, 25 bp, Probe sequence
tctttacctcttcttttcgaacagt

SEQ ID NO: 122769 - DNA, 25 bp, Probe sequence
taatgatcgtttcacctattttatt

SEQ ID NO: 122770 - DNA, 25 bp, Probe sequence
tacctcttcttttcgaacagtatta

SEQ ID NO: 122771 - DNA, 25 bp, Probe sequence
tatacaacaaacacaaagatcacaa

SEQ ID NO: 122772 - DNA, 25 bp, Probe sequence
tttacctcttcttttcgaacagtat

SEQ ID NO: 122773 - DNA, 25 bp, Probe sequence
ttcttttcgaacagtattaactaca

SEQ ID NO: 122774 - DNA, 25 bp, Probe sequence
atcagtagaatataaaaacacccac

SEQ ID NO: 122775 - DNA, 25 bp, Probe sequence
atccagaatcacaaataatctttca

SEQ ID NO: 122776 - DNA, 25 bp, Probe sequence
atgactgtggttctggattttttat

SEQ ID NO: 122777 - DNA, 25 bp, Probe sequence
aaatatgcagacgataacttccaca

SEQ ID NO: 122778 - DNA, 25 bp, Probe sequence
aaacacccactaaaaatatgcagac

SEQ ID NO: 122779 - DNA, 25 bp, Probe sequence
aatgattatgactgtggttctggat

SEQ ID NO: 122780 - DNA, 25 bp, Probe sequence
caatcatgatgcagtctcaaacgac

SEQ ID NO: 122781 - DNA, 25 bp, Probe sequence
aatctttcaatcatgatgcagtctc

SEQ ID NO: 122782 - DNA, 25 bp, Probe sequence
cccgtccacgtcgtaactgaatcag

SEQ ID NO: 122783 - DNA, 25 bp, Probe sequence
gcagacgataacttccacatagatt

SEQ ID NO: 122784 - DNA, 25 bp, Probe sequence
gatgcagtctcaaacgactgagtaa

SEQ ID NO: 122785 - DNA, 25 bp, Probe sequence
gattagcgaggtgttttttagtgta

SEQ ID NO: 122786 - DNA, 25 bp, Probe sequence
gtccacgtcgtaactgaatcagtag

SEQ ID NO: 122787 - DNA, 25 bp, Probe sequence
ggttctggattttttatatcgtagt

SEQ ID NO: 122788 - DNA, 25 bp, Probe sequence
taacttccacatagattagcgaggt

SEQ ID NO: 122789 - DNA, 25 bp, Probe sequence
acgtcattctttagtacgctgtaat

SEQ ID NO: 122790 - DNA, 25 bp, Probe sequence
aataaccaaggagatgataacgtca

SEQ ID NO: 122791 - DNA, 25 bp, Probe sequence
ccattcccttttcatcaaattcaaa

SEQ ID NO: 122792 - DNA, 25 bp, Probe sequence
gatgatttcttcgcattgtttctag

SEQ ID NO: 122793 - DNA, 25 bp, Probe sequence
gataacgtcattctttagtacgctg

SEQ ID NO: 122794 - DNA, 25 bp, Probe sequence
gatttcttcgcattgtttctagctt

SEQ ID NO: 122795 - DNA, 25 bp, Probe sequence
gttcgatgatttcttcgcattgttt

SEQ ID NO: 122796 - DNA, 25 bp, Probe sequence
gtcattctttagtacgctgtaatcc

SEQ ID NO: 122797 - DNA, 25 bp, Probe sequence
tccattcccttttcatcaaattcaa

SEQ ID NO: 122798 - DNA, 25 bp, Probe sequence
tctagctttaatttatcattattta

SEQ ID NO: 122799 - DNA, 25 bp, Probe sequence
taatccattcccttttcatcaaatt

SEQ ID NO: 122800 - DNA, 25 bp, Probe sequence
ttagtacgctgtaatccattccctt

SEQ ID NO: 122801 - DNA, 25 bp, Probe sequence
ttcttcgcattgtttctagctttaa

SEQ ID NO: 122802 - DNA, 25 bp, Probe sequence
ttcgcattgtttctagctttaattt

SEQ ID NO: 122803 - DNA, 25 bp, Probe sequence
ttgtttctagctttaatttatcatt

SEQ ID NO: 122804 - DNA, 25 bp, Probe sequence
attgtaaaggttattacactgactt

SEQ ID NO: 122805 - DNA, 25 bp, Probe sequence
attacactgacttttccgaaaattg

SEQ ID NO: 122806 - DNA, 25 bp, Probe sequence
acactgacttttccgaaaattgtgg

SEQ ID NO: 122807 - DNA, 25 bp, Probe sequence
aagaaagaacaaggaggcacttact

SEQ ID NO: 122808 - DNA, 25 bp, Probe sequence
aattgtaaaggttattacactgact

SEQ ID NO: 122809 - DNA, 25 bp, Probe sequence
cactgacttttccgaaaattgtggt

SEQ ID NO: 122810 - DNA, 25 bp, Probe sequence
tgtaaaggttattacactgactttt

SEQ ID NO: 122811 - DNA, 25 bp, Probe sequence
tcaaaaatccacaaaattgtaaagg

SEQ ID NO: 122812 - DNA, 25 bp, Probe sequence
tacactgacttttccgaaaattgtg

SEQ ID NO: 122813 - DNA, 25 bp, Probe sequence
tattacactgacttttccgaaaatt

SEQ ID NO: 122814 - DNA, 25 bp, Probe sequence
ttattacactgacttttccgaaaat

SEQ ID NO: 122815 - DNA, 25 bp, Probe sequence
ttacactgacttttccgaaaattgt

SEQ ID NO: 122816 - DNA, 25 bp, Probe sequence
ttgtaaaggttattacactgacttt

SEQ ID NO: 122817 - DNA, 25 bp, Probe sequence
atacaaaaagcgtctacctcctaca

SEQ ID NO: 122818 - DNA, 25 bp, Probe sequence
atcttcttcgactacttaattcttt

SEQ ID NO: 122819 - DNA, 25 bp, Probe sequence
agatgatcattagataactacttga

SEQ ID NO: 122820 - DNA, 25 bp, Probe sequence
ctttctgcacttggttttttattgt

SEQ ID NO: 122821 - DNA, 25 bp, Probe sequence
cctcctacatataattgtagcggag

SEQ ID NO: 122822 - DNA, 25 bp, Probe sequence
gcggagatagacgcttaatatttat

SEQ ID NO: 122823 - DNA, 25 bp, Probe sequence
gcaactttctgcacttggtttttta

SEQ ID NO: 122824 - DNA, 25 bp, Probe sequence
gataactacttgatcattatgaacc

SEQ ID NO: 122825 - DNA, 25 bp, Probe sequence
gttttcataatcttcttcgactact

SEQ ID NO: 122826 - DNA, 25 bp, Probe sequence
tgaaaagagacattacactagttaa

SEQ ID NO: 122827 - DNA, 25 bp, Probe sequence
tgcacttggttttttattgtttata

SEQ ID NO: 122828 - DNA, 25 bp, Probe sequence
taattctttaagatattcgtgaaaa

SEQ ID NO: 122829 - DNA, 25 bp, Probe sequence
taatgttttcataatcttcttcgac

SEQ ID NO: 122830 - DNA, 25 bp, Probe sequence
tacactagttaattttcaaacaata

SEQ ID NO: 122831 - DNA, 25 bp, Probe sequence
ttatgaaccaagtgcaactttctgc

SEQ ID NO: 122832 - DNA, 25 bp, Probe sequence
atactatttcatttctcattttatc

SEQ ID NO: 122833 - DNA, 25 bp, Probe sequence
agttttatgactatactattacaga

SEQ ID NO: 122834 - DNA, 25 bp, Probe sequence
aagtaatgatcctccatcgtttgct

SEQ ID NO: 122835 - DNA, 25 bp, Probe sequence
cattttatcattcatacagttttat

SEQ ID NO: 122836 - DNA, 25 bp, Probe sequence
ctcattttatcattcatacagtttt

SEQ ID NO: 122837 - DNA, 25 bp, Probe sequence
gctttttatactatttcatttctca

SEQ ID NO: 122838 - DNA, 25 bp, Probe sequence
tgctttttatactatttcatttctc

SEQ ID NO: 122839 - DNA, 25 bp, Probe sequence
tacagttttatgactatactattac

SEQ ID NO: 122840 - DNA, 25 bp, Probe sequence
tttgctttttatactatttcatttc

SEQ ID NO: 122841 - DNA, 25 bp, Probe sequence
tttctcattttatcattcatacagt

SEQ ID NO: 122842 - DNA, 25 bp, Probe sequence
tttatactatttcatttctcatttt

SEQ ID NO: 122843 - DNA, 25 bp, Probe sequence
tttttatactatttcatttctcatt

SEQ ID NO: 122844 - DNA, 25 bp, Probe sequence
ttttatactatttcatttctcattt

SEQ ID NO: 122845 - DNA, 25 bp, Probe sequence
ttatactatttcatttctcatttta

SEQ ID NO: 122846 - DNA, 25 bp, Probe sequence
ttctcattttatcattcatacagtt

SEQ ID NO: 122847 - DNA, 25 bp, Probe sequence
acgatggacacgatgtatacatttt

SEQ ID NO: 122848 - DNA, 25 bp, Probe sequence
acaattctattttaatgctgttgac

SEQ ID NO: 122849 - DNA, 25 bp, Probe sequence
aatgctgttgacaacgatggacacg

SEQ ID NO: 122850 - DNA, 25 bp, Probe sequence
aattctattttaatgctgttgacaa

SEQ ID NO: 122851 - DNA, 25 bp, Probe sequence
caacgatggacacgatgtatacatt

SEQ ID NO: 122852 - DNA, 25 bp, Probe sequence
cattttaagatttatctctttaatg

SEQ ID NO: 122853 - DNA, 25 bp, Probe sequence
gctgttgacaacgatggacacgatg

SEQ ID NO: 122854 - DNA, 25 bp, Probe sequence
gaaaacaattctattttaatgctgt

SEQ ID NO: 122855 - DNA, 25 bp, Probe sequence
gacaacgatggacacgatgtataca

SEQ ID NO: 122856 - DNA, 25 bp, Probe sequence
gatggacacgatgtatacattttaa

SEQ ID NO: 122857 - DNA, 25 bp, Probe sequence
gttgacaacgatggacacgatgtat

SEQ ID NO: 122858 - DNA, 25 bp, Probe sequence
ggacacgatgtatacattttaagat

SEQ ID NO: 122859 - DNA, 25 bp, Probe sequence
tgtatacattttaagatttatctct

SEQ ID NO: 122860 - DNA, 25 bp, Probe sequence
tgctgttgacaacgatggacacgat

SEQ ID NO: 122861 - DNA, 25 bp, Probe sequence
tctattttaatgctgttgacaacga

SEQ ID NO: 122862 - DNA, 25 bp, Probe sequence
atacttgacctcctgcattttaaaa

SEQ ID NO: 122863 - DNA, 25 bp, Probe sequence
atcatacgacaatttatggtttgat

SEQ ID NO: 122864 - DNA, 25 bp, Probe sequence
atggtttgattacaattttcatgct

SEQ ID NO: 122865 - DNA, 25 bp, Probe sequence
acttgacctcctgcattttaaaatt

SEQ ID NO: 122866 - DNA, 25 bp, Probe sequence
acaattttcatgctttaatcaaaag

SEQ ID NO: 122867 - DNA, 25 bp, Probe sequence
aaaattctaactacatcatacgaca

SEQ ID NO: 122868 - DNA, 25 bp, Probe sequence
aattctaactacatcatacgacaat

SEQ ID NO: 122869 - DNA, 25 bp, Probe sequence
ctaactacatcatacgacaatttat

SEQ ID NO: 122870 - DNA, 25 bp, Probe sequence
cctcctgcattttaaaattctaact

SEQ ID NO: 122871 - DNA, 25 bp, Probe sequence
gacctcctgcattttaaaattctaa

SEQ ID NO: 122872 - DNA, 25 bp, Probe sequence
tacttgacctcctgcattttaaaat

SEQ ID NO: 122873 - DNA, 25 bp, Probe sequence
tttgattacaattttcatgctttaa

SEQ ID NO: 122874 - DNA, 25 bp, Probe sequence
ttacaattttcatgctttaatcaaa

SEQ ID NO: 122875 - DNA, 25 bp, Probe sequence
ttgacctcctgcattttaaaattct

SEQ ID NO: 122876 - DNA, 25 bp, Probe sequence
ttctaactacatcatacgacaattt

SEQ ID NO: 122877 - DNA, 25 bp, Probe sequence
attatactattatccgacaaaaaat

SEQ ID NO: 122878 - DNA, 25 bp, Probe sequence
atttcactctatttaaacagctgtg

SEQ ID NO: 122879 - DNA, 25 bp, Probe sequence
ataatcttatttctacttattaaat

SEQ ID NO: 122880 - DNA, 25 bp, Probe sequence
agactatttcactctatttaaacag

SEQ ID NO: 122881 - DNA, 25 bp, Probe sequence
agaattagactatttcactctattt

SEQ ID NO: 122882 - DNA, 25 bp, Probe sequence
agcgcaaaataatcttatttctact

SEQ ID NO: 122883 - DNA, 25 bp, Probe sequence
actcaagcattatactattatccga

SEQ ID NO: 122884 - DNA, 25 bp, Probe sequence
actatttcactctatttaaacagct

SEQ ID NO: 122885 - DNA, 25 bp, Probe sequence
aagcattatactattatccgacaaa

SEQ ID NO: 122886 - DNA, 25 bp, Probe sequence
aaggttatagcgcaaaataatctta

SEQ ID NO: 122887 - DNA, 25 bp, Probe sequence
aattagactatttcactctatttaa

SEQ ID NO: 122888 - DNA, 25 bp, Probe sequence
gcattatactattatccgacaaaaa

SEQ ID NO: 122889 - DNA, 25 bp, Probe sequence
gactatttcactctatttaaacagc

SEQ ID NO: 122890 - DNA, 25 bp, Probe sequence
tcaagcattatactattatccgaca

SEQ ID NO: 122891 - DNA, 25 bp, Probe sequence
tatttcactctatttaaacagctgt

SEQ ID NO: 122892 - DNA, 25 bp, Probe sequence
attattaaactcatcagtccaattt

SEQ ID NO: 122893 - DNA, 25 bp, Probe sequence
atttaagtataactacatactagtt

SEQ ID NO: 122894 - DNA, 25 bp, Probe sequence
atttgacagagtgctcatattattt

SEQ ID NO: 122895 - DNA, 25 bp, Probe sequence
agagtgctcatattatttaagtata

SEQ ID NO: 122896 - DNA, 25 bp, Probe sequence
acagagtgctcatattatttaagta

SEQ ID NO: 122897 - DNA, 25 bp, Probe sequence
aatttgacagagtgctcatattatt

SEQ ID NO: 122898 - DNA, 25 bp, Probe sequence
caattattaaactcatcagtccaat

SEQ ID NO: 122899 - DNA, 25 bp, Probe sequence
cttcaattattaaactcatcagtcc

SEQ ID NO: 122900 - DNA, 25 bp, Probe sequence
ccaatttgacagagtgctcatatta

SEQ ID NO: 122901 - DNA, 25 bp, Probe sequence
gacagagtgctcatattatttaagt

SEQ ID NO: 122902 - DNA, 25 bp, Probe sequence
gtgctcatattatttaagtataact

SEQ ID NO: 122903 - DNA, 25 bp, Probe sequence
tccaatttgacagagtgctcatatt

SEQ ID NO: 122904 - DNA, 25 bp, Probe sequence
tcaattattaaactcatcagtccaa

SEQ ID NO: 122905 - DNA, 25 bp, Probe sequence
taacttcaattattaaactcatcag

SEQ ID NO: 122906 - DNA, 25 bp, Probe sequence
ttattaaactcatcagtccaatttg

SEQ ID NO: 122907 - DNA, 25 bp, Probe sequence
atttattgccataatattttcgaaa

SEQ ID NO: 122908 - DNA, 25 bp, Probe sequence
atgcttctcctcctaatttatcatt

SEQ ID NO: 122909 - DNA, 25 bp, Probe sequence
atgaatttattgccataatattttc

SEQ ID NO: 122910 - DNA, 25 bp, Probe sequence
aaatgaatttattgccataatattt

SEQ ID NO: 122911 - DNA, 25 bp, Probe sequence
aatttatcattactattataacgta

SEQ ID NO: 122912 - DNA, 25 bp, Probe sequence
aatttattgccataatattttcgaa

SEQ ID NO: 122913 - DNA, 25 bp, Probe sequence
aattctatactattataaaatctat

SEQ ID NO: 122914 - DNA, 25 bp, Probe sequence
cctaatttatcattactattataac

SEQ ID NO: 122915 - DNA, 25 bp, Probe sequence
gaatttattgccataatattttcga

SEQ ID NO: 122916 - DNA, 25 bp, Probe sequence
gaaattctatactattataaaatct

SEQ ID NO: 122917 - DNA, 25 bp, Probe sequence
tactattataacgtaattttgctta

SEQ ID NO: 122918 - DNA, 25 bp, Probe sequence
tataacgtaattttgcttaaggata

SEQ ID NO: 122919 - DNA, 25 bp, Probe sequence
tattgccataatattttcgaaattc

SEQ ID NO: 122920 - DNA, 25 bp, Probe sequence
ttataacgtaattttgcttaaggat

SEQ ID NO: 122921 - DNA, 25 bp, Probe sequence
ttttcgaaattctatactattataa

SEQ ID NO: 122922 - DNA, 25 bp, Probe sequence
attattgagcgctatgttgttccca

SEQ ID NO: 122923 - DNA, 25 bp, Probe sequence
atatcttagtaagcatgcaacactc

SEQ ID NO: 122924 - DNA, 25 bp, Probe sequence
atgttacaataatctttgtgtgaat

SEQ ID NO: 122925 - DNA, 25 bp, Probe sequence
aagtgttgacagttagcaggaaaat

SEQ ID NO: 122926 - DNA, 25 bp, Probe sequence
cgtaactgtcgctataaggtgaaga

SEQ ID NO: 122927 - DNA, 25 bp, Probe sequence
gcgctatgttgttcccaatgcggac

SEQ ID NO: 122928 - DNA, 25 bp, Probe sequence
gcaacactcttttttgtttattcat

SEQ ID NO: 122929 - DNA, 25 bp, Probe sequence
gtagcagttgtatattattgagcgc

SEQ ID NO: 122930 - DNA, 25 bp, Probe sequence
gtaagcatgcaacactcttttttgt

SEQ ID NO: 122931 - DNA, 25 bp, Probe sequence
gtgtcacgtaactgtcgctataagg

SEQ ID NO: 122932 - DNA, 25 bp, Probe sequence
ggacgtgtcacgtaactgtcgctat

SEQ ID NO: 122933 - DNA, 25 bp, Probe sequence
ggacatcagcattttcaataaagtg

SEQ ID NO: 122934 - DNA, 25 bp, Probe sequence
tgttgttcccaatgcggacgtgtca

SEQ ID NO: 122935 - DNA, 25 bp, Probe sequence
ttcccaatgcggacgtgtcacgtaa

SEQ ID NO: 122936 - DNA, 25 bp, Probe sequence
ttgagcgctatgttgttcccaatgc

SEQ ID NO: 122937 - DNA, 25 bp, Probe sequence
attcaaaattatggttcttcatctt

SEQ ID NO: 122938 - DNA, 25 bp, Probe sequence
atagattcaaaattatggttcttca

SEQ ID NO: 122939 - DNA, 25 bp, Probe sequence
agattcaaaattatggttcttcatc

SEQ ID NO: 122940 - DNA, 25 bp, Probe sequence
acgttcaatacaaacacccacaatt

SEQ ID NO: 122941 - DNA, 25 bp, Probe sequence
aatacaaacacccacaattgtgggt

SEQ ID NO: 122942 - DNA, 25 bp, Probe sequence
caatacaaacacccacaattgtggg

SEQ ID NO: 122943 - DNA, 25 bp, Probe sequence
cgttcaatacaaacacccacaattg

SEQ ID NO: 122944 - DNA, 25 bp, Probe sequence
gttcaatacaaacacccacaattgt

SEQ ID NO: 122945 - DNA, 25 bp, Probe sequence
gatagattcaaaattatggttcttc

SEQ ID NO: 122946 - DNA, 25 bp, Probe sequence
gattcaaaattatggttcttcatct

SEQ ID NO: 122947 - DNA, 25 bp, Probe sequence
tcaatacaaacacccacaattgtgg

SEQ ID NO: 122948 - DNA, 25 bp, Probe sequence
tacgttcaatacaaacacccacaat

SEQ ID NO: 122949 - DNA, 25 bp, Probe sequence
tagattcaaaattatggttcttcat

SEQ ID NO: 122950 - DNA, 25 bp, Probe sequence
ttcaatacaaacacccacaattgtg

SEQ ID NO: 122951 - DNA, 25 bp, Probe sequence
ttcaaaattatggttcttcatcttt

SEQ ID NO: 122952 - DNA, 25 bp, Probe sequence
atcaattgcgatatacgaatcctca

SEQ ID NO: 122953 - DNA, 25 bp, Probe sequence
atcaacttagaatttacaagtctta

SEQ ID NO: 122954 - DNA, 25 bp, Probe sequence
atccctctatcaaattaccattcat

SEQ ID NO: 122955 - DNA, 25 bp, Probe sequence
atggagctaccctattttacaatca

SEQ ID NO: 122956 - DNA, 25 bp, Probe sequence
aattatatggagctaccctatttta

SEQ ID NO: 122957 - DNA, 25 bp, Probe sequence
caagtcttatttgtttaattatctt

SEQ ID NO: 122958 - DNA, 25 bp, Probe sequence
ctctatcaaattaccattcatcgtc

SEQ ID NO: 122959 - DNA, 25 bp, Probe sequence
gctaccctattttacaatcaactta

SEQ ID NO: 122960 - DNA, 25 bp, Probe sequence
gtttaattatctttagtatttcatc

SEQ ID NO: 122961 - DNA, 25 bp, Probe sequence
ggagctaccctattttacaatcaac

SEQ ID NO: 122962 - DNA, 25 bp, Probe sequence
tcatccctctatcaaattaccattc

SEQ ID NO: 122963 - DNA, 25 bp, Probe sequence
taccctattttacaatcaacttaga

SEQ ID NO: 122964 - DNA, 25 bp, Probe sequence
tttagtatttcatcattagttttta

SEQ ID NO: 122965 - DNA, 25 bp, Probe sequence
ttatctttagtatttcatcattagt

SEQ ID NO: 122966 - DNA, 25 bp, Probe sequence
ttgcgatatacgaatcctcatccct

SEQ ID NO: 122967 - DNA, 25 bp, Probe sequence
attcgacaatatagcgttatcactt

SEQ ID NO: 122968 - DNA, 25 bp, Probe sequence
atagcgttatcactttttttaggct

SEQ ID NO: 122969 - DNA, 25 bp, Probe sequence
atcgttacgtgataacgtttattcg

SEQ ID NO: 122970 - DNA, 25 bp, Probe sequence
acgtttattcgacaatatagcgtta

SEQ ID NO: 122971 - DNA, 25 bp, Probe sequence
acaatatagcgttatcacttttttt

SEQ ID NO: 122972 - DNA, 25 bp, Probe sequence
aatatagcgttatcactttttttag

SEQ ID NO: 122973 - DNA, 25 bp, Probe sequence
gaaatcttatttataggaggcatat

SEQ ID NO: 122974 - DNA, 25 bp, Probe sequence
gacaatatagcgttatcactttttt

SEQ ID NO: 122975 - DNA, 25 bp, Probe sequence
gtgataacgtttattcgacaatata

SEQ ID NO: 122976 - DNA, 25 bp, Probe sequence
tcgacaatatagcgttatcactttt

SEQ ID NO: 122977 - DNA, 25 bp, Probe sequence
taacgtttattcgacaatatagcgt

SEQ ID NO: 122978 - DNA, 25 bp, Probe sequence
tacgtgataacgtttattcgacaat

SEQ ID NO: 122979 - DNA, 25 bp, Probe sequence
tagcgttatcactttttttaggctt

SEQ ID NO: 122980 - DNA, 25 bp, Probe sequence
tatagcgttatcactttttttaggc

SEQ ID NO: 122981 - DNA, 25 bp, Probe sequence
tattcgacaatatagcgttatcact

SEQ ID NO: 122982 - DNA, 25 bp, Probe sequence
atcattcacttcaagttatgctgtc

SEQ ID NO: 122983 - DNA, 25 bp, Probe sequence
acctttggttcaatcattcacttca

SEQ ID NO: 122984 - DNA, 25 bp, Probe sequence
acttcaagttatgctgtcaaacaac

SEQ ID NO: 122985 - DNA, 25 bp, Probe sequence
aacctttggttcaatcattcacttc

SEQ ID NO: 122986 - DNA, 25 bp, Probe sequence
caatcattcacttcaagttatgctg

SEQ ID NO: 122987 - DNA, 25 bp, Probe sequence
caagttatgctgtcaaacaacaatc

SEQ ID NO: 122988 - DNA, 25 bp, Probe sequence
cattcacttcaagttatgctgtcaa

SEQ ID NO: 122989 - DNA, 25 bp, Probe sequence
ctttggttcaatcattcacttcaag

SEQ ID NO: 122990 - DNA, 25 bp, Probe sequence
cctttggttcaatcattcacttcaa

SEQ ID NO: 122991 - DNA, 25 bp, Probe sequence
gaaacctttggttcaatcattcact

SEQ ID NO: 122992 - DNA, 25 bp, Probe sequence
gttatgctgtcaaacaacaatcaaa

SEQ ID NO: 122993 - DNA, 25 bp, Probe sequence
ggttcaatcattcacttcaagttat

SEQ ID NO: 122994 - DNA, 25 bp, Probe sequence
taactcaatatgaaacctttggttc

SEQ ID NO: 122995 - DNA, 25 bp, Probe sequence
ttcacttcaagttatgctgtcaaac

SEQ ID NO: 122996 - DNA, 25 bp, Probe sequence
ttggttcaatcattcacttcaagtt

SEQ ID NO: 122997 - DNA, 25 bp, Probe sequence
attcagatataaatcattctactat

SEQ ID NO: 122998 - DNA, 25 bp, Probe sequence
ataaatcattctactatttgactaa

SEQ ID NO: 122999 - DNA, 25 bp, Probe sequence
accctattgaagttagatttgcgct

SEQ ID NO: 123000 - DNA, 25 bp, Probe sequence
aaagcgcaaaccctattgaagttag

SEQ ID NO: 123001 - DNA, 25 bp, Probe sequence
aagttagatttgcgctttagctgtt

SEQ ID NO: 123002 - DNA, 25 bp, Probe sequence
aatcattctactatttgactaaaaa

SEQ ID NO: 123003 - DNA, 25 bp, Probe sequence
cccactccatttctgaaaattcaga

SEQ ID NO: 123004 - DNA, 25 bp, Probe sequence
gcgcaaaccctattgaagttagatt

SEQ ID NO: 123005 - DNA, 25 bp, Probe sequence
gaagttagatttgcgctttagctgt

SEQ ID NO: 123006 - DNA, 25 bp, Probe sequence
gatataaatcattctactatttgac

SEQ ID NO: 123007 - DNA, 25 bp, Probe sequence
gatttgcgctttagctgtttaaatt

SEQ ID NO: 123008 - DNA, 25 bp, Probe sequence
gttagatttgcgctttagctgttta

SEQ ID NO: 123009 - DNA, 25 bp, Probe sequence
tgactaaaaaaagcgcaaaccctat

SEQ ID NO: 123010 - DNA, 25 bp, Probe sequence
tccccactccatttctgaaaattca

SEQ ID NO: 123011 - DNA, 25 bp, Probe sequence
tagatttgcgctttagctgtttaaa

SEQ ID NO: 123012 - DNA, 25 bp, Probe sequence
tccgttatagtcacctaggcatact

SEQ ID NO: 123013 - DNA, 25 bp, Probe sequence
aggcatactaaccagctatatttct

SEQ ID NO: 123014 - DNA, 25 bp, Probe sequence
agtcacctaggcatactaaccagct

SEQ ID NO: 123015 - DNA, 25 bp, Probe sequence
agaataactacttcgatactccgtt

SEQ ID NO: 123016 - DNA, 25 bp, Probe sequence
agctatatttctacctcaagttatt

SEQ ID NO: 123017 - DNA, 25 bp, Probe sequence
actaaccagctatatttctacctca

SEQ ID NO: 123018 - DNA, 25 bp, Probe sequence
acttcgatactccgttatagtcacc

SEQ ID NO: 123019 - DNA, 25 bp, Probe sequence
aactacttcgatactccgttatagt

SEQ ID NO: 123020 - DNA, 25 bp, Probe sequence
aaccagctatatttctacctcaagt

SEQ ID NO: 123021 - DNA, 25 bp, Probe sequence
cacctaggcatactaaccagctata

SEQ ID NO: 123022 - DNA, 25 bp, Probe sequence
gatactccgttatagtcacctaggc

SEQ ID NO: 123023 - DNA, 25 bp, Probe sequence
gtaactagaataactacttcgatac

SEQ ID NO: 123024 - DNA, 25 bp, Probe sequence
tgaatgtcatccttcttaaaataag

SEQ ID NO: 123025 - DNA, 25 bp, Probe sequence
tactccgttatagtcacctaggcat

SEQ ID NO: 123026 - DNA, 25 bp, Probe sequence
ttcgatactccgttatagtcaccta

SEQ ID NO: 123027 - DNA, 25 bp, Probe sequence
ataacaactagattttatcactata

SEQ ID NO: 123028 - DNA, 25 bp, Probe sequence
atcactatatttttactagaacaag

SEQ ID NO: 123029 - DNA, 25 bp, Probe sequence
agtctgaaaatacatctaaagttgt

SEQ ID NO: 123030 - DNA, 25 bp, Probe sequence
actatatttttactagaacaagata

SEQ ID NO: 123031 - DNA, 25 bp, Probe sequence
acatctaaagttgtatagtgtatta

SEQ ID NO: 123032 - DNA, 25 bp, Probe sequence
acaactagattttatcactatattt

SEQ ID NO: 123033 - DNA, 25 bp, Probe sequence
aaagttgtatagtgtattactagca

SEQ ID NO: 123034 - DNA, 25 bp, Probe sequence
aacaactagattttatcactatatt

SEQ ID NO: 123035 - DNA, 25 bp, Probe sequence
aactagattttatcactatattttt

SEQ ID NO: 123036 - DNA, 25 bp, Probe sequence
gaacaagatagtctgaaaatacatc

SEQ ID NO: 123037 - DNA, 25 bp, Probe sequence
gatagtctgaaaatacatctaaagt

SEQ ID NO: 123038 - DNA, 25 bp, Probe sequence
gttgtatagtgtattactagcaata

SEQ ID NO: 123039 - DNA, 25 bp, Probe sequence
gtttataacaactagattttatcac

SEQ ID NO: 123040 - DNA, 25 bp, Probe sequence
gtatagtgtattactagcaataatt

SEQ ID NO: 123041 - DNA, 25 bp, Probe sequence
tagtgtattactagcaataattata

SEQ ID NO: 123042 - DNA, 25 bp, Probe sequence
agagcctactcattacattcttagg

SEQ ID NO: 123043 - DNA, 25 bp, Probe sequence
aaagtacattaagagcctactcatt

SEQ ID NO: 123044 - DNA, 25 bp, Probe sequence
aagagcctactcattacattcttag

SEQ ID NO: 123045 - DNA, 25 bp, Probe sequence
aatttatttagctatgcaattatat

SEQ ID NO: 123046 - DNA, 25 bp, Probe sequence
cattaagagcctactcattacattc

SEQ ID NO: 123047 - DNA, 25 bp, Probe sequence
gcctactcattacattcttaggaat

SEQ ID NO: 123048 - DNA, 25 bp, Probe sequence
gaatatgagtaggctctaatttatt

SEQ ID NO: 123049 - DNA, 25 bp, Probe sequence
gacagaaaagtacattaagagccta

SEQ ID NO: 123050 - DNA, 25 bp, Probe sequence
gagcctactcattacattcttagga

SEQ ID NO: 123051 - DNA, 25 bp, Probe sequence
gagtaggctctaatttatttagcta

SEQ ID NO: 123052 - DNA, 25 bp, Probe sequence
gtaggctctaatttatttagctatg

SEQ ID NO: 123053 - DNA, 25 bp, Probe sequence
gtacattaagagcctactcattaca

SEQ ID NO: 123054 - DNA, 25 bp, Probe sequence
ggctctaatttatttagctatgcaa

SEQ ID NO: 123055 - DNA, 25 bp, Probe sequence
ttaggaatgaatatgagtaggctct

SEQ ID NO: 123056 - DNA, 25 bp, Probe sequence
ttaagagcctactcattacattctt

SEQ ID NO: 123057 - DNA, 25 bp, Probe sequence
attctttatgcattttccctaatta

SEQ ID NO: 123058 - DNA, 25 bp, Probe sequence
atcataagataatgttcactctatt

SEQ ID NO: 123059 - DNA, 25 bp, Probe sequence
atcctattctttatgcattttccct

SEQ ID NO: 123060 - DNA, 25 bp, Probe sequence
actagctctctgatgatttcaaata

SEQ ID NO: 123061 - DNA, 25 bp, Probe sequence
aaaacactagttcacagcgaccact

SEQ ID NO: 123062 - DNA, 25 bp, Probe sequence
ctagttcacagcgaccactagctct

SEQ ID NO: 123063 - DNA, 25 bp, Probe sequence
cgaccactagctctctgatgatttc

SEQ ID NO: 123064 - DNA, 25 bp, Probe sequence
gcacgttaccaccaaacttaaacat

SEQ ID NO: 123065 - DNA, 25 bp, Probe sequence
gttcactctattaatgatacgttca

SEQ ID NO: 123066 - DNA, 25 bp, Probe sequence
gtccttttatcctattctttatgca

SEQ ID NO: 123067 - DNA, 25 bp, Probe sequence
tgtaagggcgcgattgcacgttacc

SEQ ID NO: 123068 - DNA, 25 bp, Probe sequence
taaacgtaggacatgttagttataa

SEQ ID NO: 123069 - DNA, 25 bp, Probe sequence
tatgcattttccctaattataatta

SEQ ID NO: 123070 - DNA, 25 bp, Probe sequence
tatttcctcctatttataattattt

SEQ ID NO: 123071 - DNA, 25 bp, Probe sequence
tattacttgtccttttatcctattc

SEQ ID NO: 123072 - DNA, 25 bp, Probe sequence
atttctcactgctgttctttttatt

SEQ ID NO: 123073 - DNA, 25 bp, Probe sequence
aaatttctcactgctgttcttttta

SEQ ID NO: 123074 - DNA, 25 bp, Probe sequence
aaccatacatatgctatatttagtt

SEQ ID NO: 123075 - DNA, 25 bp, Probe sequence
aaggaaagccattaaaccaatcaat

SEQ ID NO: 123076 - DNA, 25 bp, Probe sequence
aatttctcactgctgttctttttat

SEQ ID NO: 123077 - DNA, 25 bp, Probe sequence
aattaattgctttcacattgtttac

SEQ ID NO: 123078 - DNA, 25 bp, Probe sequence
gaaaatttctcactgctgttctttt

SEQ ID NO: 123079 - DNA, 25 bp, Probe sequence
gaaagccattaaaccaatcaatagt

SEQ ID NO: 123080 - DNA, 25 bp, Probe sequence
gtttataaattaattgctttcacat

SEQ ID NO: 123081 - DNA, 25 bp, Probe sequence
tgctgttctttttatttactctaaa

SEQ ID NO: 123082 - DNA, 25 bp, Probe sequence
taattgctttcacattgtttacaaa

SEQ ID NO: 123083 - DNA, 25 bp, Probe sequence
tatttactctaaaggaaagccatta

SEQ ID NO: 123084 - DNA, 25 bp, Probe sequence
tttctcactgctgttctttttattt

SEQ ID NO: 123085 - DNA, 25 bp, Probe sequence
ttacaaagttaaccatacatatgct

SEQ ID NO: 123086 - DNA, 25 bp, Probe sequence
ttgctttcacattgtttacaaagtt

SEQ ID NO: 123087 - DNA, 25 bp, Probe sequence
atctccaacagtccggtctattaaa

SEQ ID NO: 123088 - DNA, 25 bp, Probe sequence
actgctgaaataatgcatctccaac

SEQ ID NO: 123089 - DNA, 25 bp, Probe sequence
aaataatgcatctccaacagtccgg

SEQ ID NO: 123090 - DNA, 25 bp, Probe sequence
aaaaaaccgaactgctgaaataatg

SEQ ID NO: 123091 - DNA, 25 bp, Probe sequence
aataatgcatctccaacagtccggt

SEQ ID NO: 123092 - DNA, 25 bp, Probe sequence
caacagtccggtctattaaactatt

SEQ ID NO: 123093 - DNA, 25 bp, Probe sequence
ctccaacagtccggtctattaaact

SEQ ID NO: 123094 - DNA, 25 bp, Probe sequence
ccaacagtccggtctattaaactat

SEQ ID NO: 123095 - DNA, 25 bp, Probe sequence
gaactgctgaaataatgcatctcca

SEQ ID NO: 123096 - DNA, 25 bp, Probe sequence
gaaataatgcatctccaacagtccg

SEQ ID NO: 123097 - DNA, 25 bp, Probe sequence
ggaatctatttttagcacagcaaaa

SEQ ID NO: 123098 - DNA, 25 bp, Probe sequence
tctccaacagtccggtctattaaac

SEQ ID NO: 123099 - DNA, 25 bp, Probe sequence
tacttatctttattaaacaattgac

SEQ ID NO: 123100 - DNA, 25 bp, Probe sequence
tatctttattaaacaattgacatga

SEQ ID NO: 123101 - DNA, 25 bp, Probe sequence
ttagcacagcaaaaaaccgaactgc

SEQ ID NO: 123102 - DNA, 25 bp, Probe sequence
ataatcatcttccaaagatcatatt

SEQ ID NO: 123103 - DNA, 25 bp, Probe sequence
ataattgttatgtcatcattttcaa

SEQ ID NO: 123104 - DNA, 25 bp, Probe sequence
atcattttcaaatgctttctacgaa

SEQ ID NO: 123105 - DNA, 25 bp, Probe sequence
atcgggttagcgctttcatttttgc

SEQ ID NO: 123106 - DNA, 25 bp, Probe sequence
atgacacaagttaacagctctttat

SEQ ID NO: 123107 - DNA, 25 bp, Probe sequence
agaaatttttacttacattcatata

SEQ ID NO: 123108 - DNA, 25 bp, Probe sequence
agcgcttgatactattgataactat

SEQ ID NO: 123109 - DNA, 25 bp, Probe sequence
acttgtcgactaaatcgggttagcg

SEQ ID NO: 123110 - DNA, 25 bp, Probe sequence
acagctctttatattgcttatcgta

SEQ ID NO: 123111 - DNA, 25 bp, Probe sequence
aaaatcttcaataacattcatgtca

SEQ ID NO: 123112 - DNA, 25 bp, Probe sequence
aatatgttgtcaccctttattcttc

SEQ ID NO: 123113 - DNA, 25 bp, Probe sequence
gcccctttttgtttaatttatgcat

SEQ ID NO: 123114 - DNA, 25 bp, Probe sequence
gctttctacgaaatgatatgacaca

SEQ ID NO: 123115 - DNA, 25 bp, Probe sequence
gttagcgctttcatttttgcaataa

SEQ ID NO: 123116 - DNA, 25 bp, Probe sequence
tataaaacttttagcgcttgatact

SEQ ID NO: 123117 - DNA, 25 bp, Probe sequence
atcacgacgtcgattgaggagttga

SEQ ID NO: 123118 - DNA, 25 bp, Probe sequence
acgacgtcgattgaggagttgaaaa

SEQ ID NO: 123119 - DNA, 25 bp, Probe sequence
atgtgaaaacgctttctttctcaat

SEQ ID NO: 123120 - DNA, 25 bp, Probe sequence
acgctttctttctcaatattataca

SEQ ID NO: 123121 - DNA, 25 bp, Probe sequence
acataacatttctaattattcaaaa

SEQ ID NO: 123122 - DNA, 25 bp, Probe sequence
aaaacgctttctttctcaatattat

SEQ ID NO: 123123 - DNA, 25 bp, Probe sequence
aacgctttctttctcaatattatac

SEQ ID NO: 123124 - DNA, 25 bp, Probe sequence
gctttctttctcaatattatacata

SEQ ID NO: 123125 - DNA, 25 bp, Probe sequence
gaatttaatacaatcacgacgtcga

SEQ ID NO: 123126 - DNA, 25 bp, Probe sequence
gttatgtgaaaacgctttctttctc

SEQ ID NO: 123127 - DNA, 25 bp, Probe sequence
gtgaaaacgctttctttctcaatat

SEQ ID NO: 123128 - DNA, 25 bp, Probe sequence
tccccctttgttatgtgaaaacgct

SEQ ID NO: 123129 - DNA, 25 bp, Probe sequence
tcctttttctagtattaattattgt

SEQ ID NO: 123130 - DNA, 25 bp, Probe sequence
tctttctcaatattatacataacat

SEQ ID NO: 123131 - DNA, 25 bp, Probe sequence
tatcctttttctagtattaattatt

SEQ ID NO: 123132 - DNA, 25 bp, Probe sequence
attcttccaacacccatataatttg

SEQ ID NO: 123133 - DNA, 25 bp, Probe sequence
atttgggtcgttagatgaatgccta

SEQ ID NO: 123134 - DNA, 25 bp, Probe sequence
ataaaaggcattcttccaacaccca

SEQ ID NO: 123135 - DNA, 25 bp, Probe sequence
acctaatctgcaacgattttaaaag

SEQ ID NO: 123136 - DNA, 25 bp, Probe sequence
acacccatataatttgggtcgttag

SEQ ID NO: 123137 - DNA, 25 bp, Probe sequence
aatttgggtcgttagatgaatgcct

SEQ ID NO: 123138 - DNA, 25 bp, Probe sequence
cattcttccaacacccatataattt

SEQ ID NO: 123139 - DNA, 25 bp, Probe sequence
ccaacacccatataatttgggtcgt

SEQ ID NO: 123140 - DNA, 25 bp, Probe sequence
gtaacctaatctgcaacgattttaa

SEQ ID NO: 123141 - DNA, 25 bp, Probe sequence
gtcgttagatgaatgcctaattttg

SEQ ID NO: 123142 - DNA, 25 bp, Probe sequence
gggtcgttagatgaatgcctaattt

SEQ ID NO: 123143 - DNA, 25 bp, Probe sequence
tcttccaacacccatataatttggg

SEQ ID NO: 123144 - DNA, 25 bp, Probe sequence
taacctaatctgcaacgattttaaa

SEQ ID NO: 123145 - DNA, 25 bp, Probe sequence
tagatgaatgcctaattttgtgaat

SEQ ID NO: 123146 - DNA, 25 bp, Probe sequence
ttgggtcgttagatgaatgcctaat

SEQ ID NO: 123147 - DNA, 25 bp, Probe sequence
atttcattttcatagtttaccatat

SEQ ID NO: 123148 - DNA, 25 bp, Probe sequence
aacatgttttcatttcattttcata

SEQ ID NO: 123149 - DNA, 25 bp, Probe sequence
aataacatgttttcatttcattttc

SEQ ID NO: 123150 - DNA, 25 bp, Probe sequence
catgttttcatttcattttcatagt

SEQ ID NO: 123151 - DNA, 25 bp, Probe sequence
catttcattttcatagtttaccata

SEQ ID NO: 123152 - DNA, 25 bp, Probe sequence
cattttcatagtttaccatatttta

SEQ ID NO: 123153 - DNA, 25 bp, Probe sequence
gttttcatttcattttcatagttta

SEQ ID NO: 123154 - DNA, 25 bp, Probe sequence
tgttttcatttcattttcatagttt

SEQ ID NO: 123155 - DNA, 25 bp, Probe sequence
tccttgtaaacgttttattcattat

SEQ ID NO: 123156 - DNA, 25 bp, Probe sequence
tcctccttgtaaacgttttattcat

SEQ ID NO: 123157 - DNA, 25 bp, Probe sequence
taacatgttttcatttcattttcat

SEQ ID NO: 123158 - DNA, 25 bp, Probe sequence
ttttcatttcattttcatagtttac

SEQ ID NO: 123159 - DNA, 25 bp, Probe sequence
ttcatttcattttcatagtttacca

SEQ ID NO: 123160 - DNA, 25 bp, Probe sequence
ttcattttcatagtttaccatattt

SEQ ID NO: 123161 - DNA, 25 bp, Probe sequence
ttgtaaacgttttattcattataat

SEQ ID NO: 123162 - DNA, 25 bp, Probe sequence
atacaaaaaataatagccactctaa

SEQ ID NO: 123163 - DNA, 25 bp, Probe sequence
ataattttaattactgctatcagtc

SEQ ID NO: 123164 - DNA, 25 bp, Probe sequence
atggctgtaagtttaaaattgtcga

SEQ ID NO: 123165 - DNA, 25 bp, Probe sequence
agtagtctatagtttccttggaata

SEQ ID NO: 123166 - DNA, 25 bp, Probe sequence
agccactctaaaagtaatatactct

SEQ ID NO: 123167 - DNA, 25 bp, Probe sequence
actgctatcagtcataatctttaat

SEQ ID NO: 123168 - DNA, 25 bp, Probe sequence
aacaatcgttaagtgcagtatacct

SEQ ID NO: 123169 - DNA, 25 bp, Probe sequence
aagtgcagtatacctttatttctat

SEQ ID NO: 123170 - DNA, 25 bp, Probe sequence
gcagtatacctttatttctatacaa

SEQ ID NO: 123171 - DNA, 25 bp, Probe sequence
gaaattgaacaagtgtcgaagtatt

SEQ ID NO: 123172 - DNA, 25 bp, Probe sequence
gataatattctacttcaacatgaca

SEQ ID NO: 123173 - DNA, 25 bp, Probe sequence
gttaagtagtctatagtttccttgg

SEQ ID NO: 123174 - DNA, 25 bp, Probe sequence
gtaatatactcttagaatggctgta

SEQ ID NO: 123175 - DNA, 25 bp, Probe sequence
gtgtcgaagtattataacaatcgtt

SEQ ID NO: 123176 - DNA, 25 bp, Probe sequence
tctacttcaacatgacatattagtt

SEQ ID NO: 123177 - DNA, 25 bp, Probe sequence
attctcatacattcaacctaacgct

SEQ ID NO: 123178 - DNA, 25 bp, Probe sequence
atacatgaaatgatcgcgttgcctt

SEQ ID NO: 123179 - DNA, 25 bp, Probe sequence
atcatatgtatagttcaaccctaaa

SEQ ID NO: 123180 - DNA, 25 bp, Probe sequence
agcttactgctatgattgattattc

SEQ ID NO: 123181 - DNA, 25 bp, Probe sequence
acatttcgattttctcagtcattat

SEQ ID NO: 123182 - DNA, 25 bp, Probe sequence
acatcactcaccaacatgagcggct

SEQ ID NO: 123183 - DNA, 25 bp, Probe sequence
aatatttttccatcttcagcttaaa

SEQ ID NO: 123184 - DNA, 25 bp, Probe sequence
aattttcgtttctatcttctattat

SEQ ID NO: 123185 - DNA, 25 bp, Probe sequence
ccttactcacctctacgaattattt

SEQ ID NO: 123186 - DNA, 25 bp, Probe sequence
gaatgcctaccttttattttgaaat

SEQ ID NO: 123187 - DNA, 25 bp, Probe sequence
gatcgcgttgcctttcaaaataaac

SEQ ID NO: 123188 - DNA, 25 bp, Probe sequence
gtaccttctaagattcattgtttat

SEQ ID NO: 123189 - DNA, 25 bp, Probe sequence
ggtaagcacctgaatgcctaccttt

SEQ ID NO: 123190 - DNA, 25 bp, Probe sequence
tagtgaacgtcattgtaccttctaa

SEQ ID NO: 123191 - DNA, 25 bp, Probe sequence
ttgagtcaacattactgcttttaag

SEQ ID NO: 123192 - DNA, 25 bp, Probe sequence
atatcctcctataacaaatgcactt

SEQ ID NO: 123193 - DNA, 25 bp, Probe sequence
ataagtaacaacctcatttaagtgc

SEQ ID NO: 123194 - DNA, 25 bp, Probe sequence
atcctcctataacaaatgcacttaa

SEQ ID NO: 123195 - DNA, 25 bp, Probe sequence
agtaacaacctcatttaagtgcatt

SEQ ID NO: 123196 - DNA, 25 bp, Probe sequence
aagtaacaacctcatttaagtgcat

SEQ ID NO: 123197 - DNA, 25 bp, Probe sequence
cacttaaataagtaacaacctcatt

SEQ ID NO: 123198 - DNA, 25 bp, Probe sequence
gtatatcctcctataacaaatgcac

SEQ ID NO: 123199 - DNA, 25 bp, Probe sequence
gtaacaacctcatttaagtgcattt

SEQ ID NO: 123200 - DNA, 25 bp, Probe sequence
tgtatatcctcctataacaaatgca

SEQ ID NO: 123201 - DNA, 25 bp, Probe sequence
taagtaacaacctcatttaagtgca

SEQ ID NO: 123202 - DNA, 25 bp, Probe sequence
taacaacctcatttaagtgcatttg

SEQ ID NO: 123203 - DNA, 25 bp, Probe sequence
tatcctcctataacaaatgcactta

SEQ ID NO: 123204 - DNA, 25 bp, Probe sequence
tatatcctcctataacaaatgcact

SEQ ID NO: 123205 - DNA, 25 bp, Probe sequence
ttaagtgcatttgtttaattattaa

SEQ ID NO: 123206 - DNA, 25 bp, Probe sequence
ttgtatatcctcctataacaaatgc

SEQ ID NO: 123207 - DNA, 25 bp, Probe sequence
atacccatactactctattataaac

SEQ ID NO: 123208 - DNA, 25 bp, Probe sequence
ataaatacccatactactctattat

SEQ ID NO: 123209 - DNA, 25 bp, Probe sequence
ataataaatacccatactactctat

SEQ ID NO: 123210 - DNA, 25 bp, Probe sequence
acgcctcctaattaacatgtaataa

SEQ ID NO: 123211 - DNA, 25 bp, Probe sequence
aaatacccatactactctattataa

SEQ ID NO: 123212 - DNA, 25 bp, Probe sequence
aaacgcctcctaattaacatgtaat

SEQ ID NO: 123213 - DNA, 25 bp, Probe sequence
aacgcctcctaattaacatgtaata

SEQ ID NO: 123214 - DNA, 25 bp, Probe sequence
aataataaatacccatactactcta

SEQ ID NO: 123215 - DNA, 25 bp, Probe sequence
aataaatacccatactactctatta

SEQ ID NO: 123216 - DNA, 25 bp, Probe sequence
cccatactactctattataaacata

SEQ ID NO: 123217 - DNA, 25 bp, Probe sequence
gcctcctaattaacatgtaataatg

SEQ ID NO: 123218 - DNA, 25 bp, Probe sequence
taataataaatacccatactactct

SEQ ID NO: 123219 - DNA, 25 bp, Probe sequence
taaaaacgcctcctaattaacatgt

SEQ ID NO: 123220 - DNA, 25 bp, Probe sequence
taaatacccatactactctattata

SEQ ID NO: 123221 - DNA, 25 bp, Probe sequence
tacccatactactctattataaaca

SEQ ID NO: 123222 - DNA, 25 bp, Probe sequence
atttcgcaccttataatagtttaca

SEQ ID NO: 123223 - DNA, 25 bp, Probe sequence
ataaatcaacacatagtaacagaga

SEQ ID NO: 123224 - DNA, 25 bp, Probe sequence
actcctaatttcgcaccttataata

SEQ ID NO: 123225 - DNA, 25 bp, Probe sequence
acaataaatcaacacatagtaacag

SEQ ID NO: 123226 - DNA, 25 bp, Probe sequence
aaatcaacacatagtaacagagaaa

SEQ ID NO: 123227 - DNA, 25 bp, Probe sequence
aatagtttacaataaatcaacacat

SEQ ID NO: 123228 - DNA, 25 bp, Probe sequence
ctcctaatttcgcaccttataatag

SEQ ID NO: 123229 - DNA, 25 bp, Probe sequence
ctaatttcgcaccttataatagttt

SEQ ID NO: 123230 - DNA, 25 bp, Probe sequence
cgcaccttataatagtttacaataa

SEQ ID NO: 123231 - DNA, 25 bp, Probe sequence
cctaatttcgcaccttataatagtt

SEQ ID NO: 123232 - DNA, 25 bp, Probe sequence
tcctaatttcgcaccttataatagt

SEQ ID NO: 123233 - DNA, 25 bp, Probe sequence
tcgcaccttataatagtttacaata

SEQ ID NO: 123234 - DNA, 25 bp, Probe sequence
taatttcgcaccttataatagttta

SEQ ID NO: 123235 - DNA, 25 bp, Probe sequence
tttcgcaccttataatagtttacaa

SEQ ID NO: 123236 - DNA, 25 bp, Probe sequence
ttcgcaccttataatagtttacaat

SEQ ID NO: 123237 - DNA, 25 bp, Probe sequence
attatatcatcttcaatatggtaaa

SEQ ID NO: 123238 - DNA, 25 bp, Probe sequence
atgaatttgaaatcaagggagcata

SEQ ID NO: 123239 - DNA, 25 bp, Probe sequence
agttctcactccttataagttatta

SEQ ID NO: 123240 - DNA, 25 bp, Probe sequence
aaagttctcactccttataagttat

SEQ ID NO: 123241 - DNA, 25 bp, Probe sequence
aagttctcactccttataagttatt

SEQ ID NO: 123242 - DNA, 25 bp, Probe sequence
aagttattatatcatcttcaatatg

SEQ ID NO: 123243 - DNA, 25 bp, Probe sequence
ctcactccttataagttattatatc

SEQ ID NO: 123244 - DNA, 25 bp, Probe sequence
gttctcactccttataagttattat

SEQ ID NO: 123245 - DNA, 25 bp, Probe sequence
gttattatatcatcttcaatatggt

SEQ ID NO: 123246 - DNA, 25 bp, Probe sequence
ggtaaactaatgatatgaatttgaa

SEQ ID NO: 123247 - DNA, 25 bp, Probe sequence
tcatcttcaatatggtaaactaatg

SEQ ID NO: 123248 - DNA, 25 bp, Probe sequence
tatcatcttcaatatggtaaactaa

SEQ ID NO: 123249 - DNA, 25 bp, Probe sequence
tataagttattatatcatcttcaat

SEQ ID NO: 123250 - DNA, 25 bp, Probe sequence
tatatcatcttcaatatggtaaact

SEQ ID NO: 123251 - DNA, 25 bp, Probe sequence
ttctcactccttataagttattata

SEQ ID NO: 123252 - DNA, 25 bp, Probe sequence
atttgtttagtaatacatctttatt

SEQ ID NO: 123253 - DNA, 25 bp, Probe sequence
atatttgatttggatcgtaaaactt

SEQ ID NO: 123254 - DNA, 25 bp, Probe sequence
atgagccacaccctaattagtaaga

SEQ ID NO: 123255 - DNA, 25 bp, Probe sequence
acttaaaaatgagccacaccctaat

SEQ ID NO: 123256 - DNA, 25 bp, Probe sequence
aatgagccacaccctaattagtaag

SEQ ID NO: 123257 - DNA, 25 bp, Probe sequence
gccacaccctaattagtaagattgg

SEQ ID NO: 123258 - DNA, 25 bp, Probe sequence
gaaaatttgtttagtaatacatctt

SEQ ID NO: 123259 - DNA, 25 bp, Probe sequence
gagccacaccctaattagtaagatt

SEQ ID NO: 123260 - DNA, 25 bp, Probe sequence
gatgtggctcatttttttatttttg

SEQ ID NO: 123261 - DNA, 25 bp, Probe sequence
gattggatgtggctcatttttttat

SEQ ID NO: 123262 - DNA, 25 bp, Probe sequence
gtaagattggatgtggctcattttt

SEQ ID NO: 123263 - DNA, 25 bp, Probe sequence
tgtggctcatttttttatttttgaa

SEQ ID NO: 123264 - DNA, 25 bp, Probe sequence
tacgaattttatccatatttgattt

SEQ ID NO: 123265 - DNA, 25 bp, Probe sequence
ttaaaaatgagccacaccctaatta

SEQ ID NO: 123266 - DNA, 25 bp, Probe sequence
ttggatgtggctcatttttttattt

SEQ ID NO: 123267 - DNA, 25 bp, Probe sequence
atcaaaggtatttagtataacattg

SEQ ID NO: 123268 - DNA, 25 bp, Probe sequence
atgcaagctttattcttttaaatca

SEQ ID NO: 123269 - DNA, 25 bp, Probe sequence
agtaaaatgcaagctttattctttt

SEQ ID NO: 123270 - DNA, 25 bp, Probe sequence
acaagtaaaatgcaagctttattct

SEQ ID NO: 123271 - DNA, 25 bp, Probe sequence
aaatgcaagctttattcttttaaat

SEQ ID NO: 123272 - DNA, 25 bp, Probe sequence
aagtaaaatgcaagctttattcttt

SEQ ID NO: 123273 - DNA, 25 bp, Probe sequence
aatgcaagctttattcttttaaatc

SEQ ID NO: 123274 - DNA, 25 bp, Probe sequence
aatcaaaggtatttagtataacatt

SEQ ID NO: 123275 - DNA, 25 bp, Probe sequence
caagtaaaatgcaagctttattctt

SEQ ID NO: 123276 - DNA, 25 bp, Probe sequence
caagctttattcttttaaatcaaag

SEQ ID NO: 123277 - DNA, 25 bp, Probe sequence
caaaggtatttagtataacattgtt

SEQ ID NO: 123278 - DNA, 25 bp, Probe sequence
gcaagctttattcttttaaatcaaa

SEQ ID NO: 123279 - DNA, 25 bp, Probe sequence
gtaaaatgcaagctttattctttta

SEQ ID NO: 123280 - DNA, 25 bp, Probe sequence
tgcaagctttattcttttaaatcaa

SEQ ID NO: 123281 - DNA, 25 bp, Probe sequence
taaaatgcaagctttattcttttaa

SEQ ID NO: 123282 - DNA, 25 bp, Probe sequence
attgtatgtgtacataccctcataa

SEQ ID NO: 123283 - DNA, 25 bp, Probe sequence
atgattgtatgtgtacataccctca

SEQ ID NO: 123284 - DNA, 25 bp, Probe sequence
atgtgtacataccctcataagtgtt

SEQ ID NO: 123285 - DNA, 25 bp, Probe sequence
agaacctttatctatagaaccatta

SEQ ID NO: 123286 - DNA, 25 bp, Probe sequence
aacacttatgattgtatgtgtacat

SEQ ID NO: 123287 - DNA, 25 bp, Probe sequence
aacctttatctatagaaccattata

SEQ ID NO: 123288 - DNA, 25 bp, Probe sequence
gaacctttatctatagaaccattat

SEQ ID NO: 123289 - DNA, 25 bp, Probe sequence
gattgtatgtgtacataccctcata

SEQ ID NO: 123290 - DNA, 25 bp, Probe sequence
gtatgtgtacataccctcataagtg

SEQ ID NO: 123291 - DNA, 25 bp, Probe sequence
gtacgaaaaaacacttatgattgta

SEQ ID NO: 123292 - DNA, 25 bp, Probe sequence
tgtatgtgtacataccctcataagt

SEQ ID NO: 123293 - DNA, 25 bp, Probe sequence
tgattgtatgtgtacataccctcat

SEQ ID NO: 123294 - DNA, 25 bp, Probe sequence
taaaatacttttttccatcagtccg

SEQ ID NO: 123295 - DNA, 25 bp, Probe sequence
tatgtgtacataccctcataagtgt

SEQ ID NO: 123296 - DNA, 25 bp, Probe sequence
tatagaaccattatagtacgaaaaa

SEQ ID NO: 123297 - DNA, 25 bp, Probe sequence
atacattctatagtcacttacttga

SEQ ID NO: 123298 - DNA, 25 bp, Probe sequence
aatcgtaatgtctgtcattgacacc

SEQ ID NO: 123299 - DNA, 25 bp, Probe sequence
aataattgctatcccattttcatgg

SEQ ID NO: 123300 - DNA, 25 bp, Probe sequence
caatgcctacattacacgactaatt

SEQ ID NO: 123301 - DNA, 25 bp, Probe sequence
catgtttttgaatctctgtaggcga

SEQ ID NO: 123302 - DNA, 25 bp, Probe sequence
cgtccacctcactttcaattagaaa

SEQ ID NO: 123303 - DNA, 25 bp, Probe sequence
gctatcccattttcatggttagcat

SEQ ID NO: 123304 - DNA, 25 bp, Probe sequence
gaatctctgtaggcgataaactcta

SEQ ID NO: 123305 - DNA, 25 bp, Probe sequence
gaactgtaacatttacgtacttagt

SEQ ID NO: 123306 - DNA, 25 bp, Probe sequence
gttaccgtgtctaaaactacatgtt

SEQ ID NO: 123307 - DNA, 25 bp, Probe sequence
gtaaatcctcaaccaatgcctacat

SEQ ID NO: 123308 - DNA, 25 bp, Probe sequence
gtcattgacaccatacattctatag

SEQ ID NO: 123309 - DNA, 25 bp, Probe sequence
gtccagataattattgtaaatcctc

SEQ ID NO: 123310 - DNA, 25 bp, Probe sequence
tctaatttataacaccatactggta

SEQ ID NO: 123311 - DNA, 25 bp, Probe sequence
taggtttttcaagagccatatattc

SEQ ID NO: 123312 - DNA, 25 bp, Probe sequence
attataacataattcacttacgaaa

SEQ ID NO: 123313 - DNA, 25 bp, Probe sequence
atatgtgttttctaaacaacacttt

SEQ ID NO: 123314 - DNA, 25 bp, Probe sequence
ataacataattcacttacgaaagtt

SEQ ID NO: 123315 - DNA, 25 bp, Probe sequence
ataattcacttacgaaagttgataa

SEQ ID NO: 123316 - DNA, 25 bp, Probe sequence
acataattcacttacgaaagttgat

SEQ ID NO: 123317 - DNA, 25 bp, Probe sequence
aacataattcacttacgaaagttga

SEQ ID NO: 123318 - DNA, 25 bp, Probe sequence
aatatgtgttttctaaacaacactt

SEQ ID NO: 123319 - DNA, 25 bp, Probe sequence
aattcacttacgaaagttgataaat

SEQ ID NO: 123320 - DNA, 25 bp, Probe sequence
cataattcacttacgaaagttgata

SEQ ID NO: 123321 - DNA, 25 bp, Probe sequence
tctaaacaacacttttaagcttcgt

SEQ ID NO: 123322 - DNA, 25 bp, Probe sequence
taacataattcacttacgaaagttg

SEQ ID NO: 123323 - DNA, 25 bp, Probe sequence
tatgtgttttctaaacaacactttt

SEQ ID NO: 123324 - DNA, 25 bp, Probe sequence
tataacataattcacttacgaaagt

SEQ ID NO: 123325 - DNA, 25 bp, Probe sequence
ttctaaacaacacttttaagcttcg

SEQ ID NO: 123326 - DNA, 25 bp, Probe sequence
ttataacataattcacttacgaaag

SEQ ID NO: 123327 - DNA, 25 bp, Probe sequence
atattgacagtaattaaccgaacga

SEQ ID NO: 123328 - DNA, 25 bp, Probe sequence
atagctgctttgttccttttttaat

SEQ ID NO: 123329 - DNA, 25 bp, Probe sequence
atcataaatagctgctttgttcctt

SEQ ID NO: 123330 - DNA, 25 bp, Probe sequence
aaatacacatattcaagagctcgag

SEQ ID NO: 123331 - DNA, 25 bp, Probe sequence
aaaacgatgctattgatatgacaca

SEQ ID NO: 123332 - DNA, 25 bp, Probe sequence
aagtcaatgtactaggcacacaatt

SEQ ID NO: 123333 - DNA, 25 bp, Probe sequence
cagtaattaaccgaacgaaaatgcg

SEQ ID NO: 123334 - DNA, 25 bp, Probe sequence
cgatgctattgatatgacacaaatc

SEQ ID NO: 123335 - DNA, 25 bp, Probe sequence
gagctcgagatataagtcaatgtac

SEQ ID NO: 123336 - DNA, 25 bp, Probe sequence
ggaacaaaacgatgctattgatatg

SEQ ID NO: 123337 - DNA, 25 bp, Probe sequence
tcgaaatcgacttccttttttctat

SEQ ID NO: 123338 - DNA, 25 bp, Probe sequence
taaatagctgctttgttcctttttt

SEQ ID NO: 123339 - DNA, 25 bp, Probe sequence
tacacatattcaagagctcgagata

SEQ ID NO: 123340 - DNA, 25 bp, Probe sequence
tagctgctttgttccttttttaatt

SEQ ID NO: 123341 - DNA, 25 bp, Probe sequence
tataagttaaattctattttacatg

SEQ ID NO: 123342 - DNA, 25 bp, Probe sequence
atttcttatgaatgagtttcacgca

SEQ ID NO: 123343 - DNA, 25 bp, Probe sequence
atgcatattagctatgactaacgat

SEQ ID NO: 123344 - DNA, 25 bp, Probe sequence
acgcatgtattcttctttctatatg

SEQ ID NO: 123345 - DNA, 25 bp, Probe sequence
catgtattcttctttctatatgcat

SEQ ID NO: 123346 - DNA, 25 bp, Probe sequence
gaaatacgttttctttagatattag

SEQ ID NO: 123347 - DNA, 25 bp, Probe sequence
gagtttcacgcatgtattcttcttt

SEQ ID NO: 123348 - DNA, 25 bp, Probe sequence
gtttcacgcatgtattcttctttct

SEQ ID NO: 123349 - DNA, 25 bp, Probe sequence
tgtattcttctttctatatgcatat

SEQ ID NO: 123350 - DNA, 25 bp, Probe sequence
tgagtttcacgcatgtattcttctt

SEQ ID NO: 123351 - DNA, 25 bp, Probe sequence
tcttctttctatatgcatattagct

SEQ ID NO: 123352 - DNA, 25 bp, Probe sequence
tcacgcatgtattcttctttctata

SEQ ID NO: 123353 - DNA, 25 bp, Probe sequence
tacgttttctttagatattagtatt

SEQ ID NO: 123354 - DNA, 25 bp, Probe sequence
tatgactaacgataaagaaccacta

SEQ ID NO: 123355 - DNA, 25 bp, Probe sequence
tattcttctttctatatgcatatta

SEQ ID NO: 123356 - DNA, 25 bp, Probe sequence
ttcacgcatgtattcttctttctat

SEQ ID NO: 123357 - DNA, 25 bp, Probe sequence
atacacatacatcttcattttttat

SEQ ID NO: 123358 - DNA, 25 bp, Probe sequence
atcatacacatacatcttcattttt

SEQ ID NO: 123359 - DNA, 25 bp, Probe sequence
aactttatttcattgtcgtatattc

SEQ ID NO: 123360 - DNA, 25 bp, Probe sequence
aacgcattgtcattgaatactcgat

SEQ ID NO: 123361 - DNA, 25 bp, Probe sequence
aatctccctatctcatgtttattaa

SEQ ID NO: 123362 - DNA, 25 bp, Probe sequence
caaaattatcaacgcattgtcattg

SEQ ID NO: 123363 - DNA, 25 bp, Probe sequence
ctccctatctcatgtttattaaagt

SEQ ID NO: 123364 - DNA, 25 bp, Probe sequence
gctatttctctgtaaaatcattttt

SEQ ID NO: 123365 - DNA, 25 bp, Probe sequence
gaatactcgattttgattagaatat

SEQ ID NO: 123366 - DNA, 25 bp, Probe sequence
gaaaaatcattcttatcatacacat

SEQ ID NO: 123367 - DNA, 25 bp, Probe sequence
gagatgaacatcgcataacagtaga

SEQ ID NO: 123368 - DNA, 25 bp, Probe sequence
gtaaactaaaagctatttctctgta

SEQ ID NO: 123369 - DNA, 25 bp, Probe sequence
taattgtcatctcataacacaagag

SEQ ID NO: 123370 - DNA, 25 bp, Probe sequence
taaacattatactactatttgagat

SEQ ID NO: 123371 - DNA, 25 bp, Probe sequence
tattcaacataattgtcatctcata

SEQ ID NO: 123372 - DNA, 25 bp, Probe sequence
atttggttcgattctctttagtaga

SEQ ID NO: 123373 - DNA, 25 bp, Probe sequence
agtagatcaactttttcattcaatt

SEQ ID NO: 123374 - DNA, 25 bp, Probe sequence
aactgagtcactaaaaagtgtcgtt

SEQ ID NO: 123375 - DNA, 25 bp, Probe sequence
aatttggttcgattctctttagtag

SEQ ID NO: 123376 - DNA, 25 bp, Probe sequence
cactaaaaagtgtcgttatattaag

SEQ ID NO: 123377 - DNA, 25 bp, Probe sequence
gaccttaatataactgagtcactaa

SEQ ID NO: 123378 - DNA, 25 bp, Probe sequence
gatcaactttttcattcaattaaaa

SEQ ID NO: 123379 - DNA, 25 bp, Probe sequence
gattctctttagtagatcaactttt

SEQ ID NO: 123380 - DNA, 25 bp, Probe sequence
gtataaaatttggttcgattctctt

SEQ ID NO: 123381 - DNA, 25 bp, Probe sequence
ggttcgattctctttagtagatcaa

SEQ ID NO: 123382 - DNA, 25 bp, Probe sequence
taaaatttggttcgattctctttag

SEQ ID NO: 123383 - DNA, 25 bp, Probe sequence
tagatcaactttttcattcaattaa

SEQ ID NO: 123384 - DNA, 25 bp, Probe sequence
ttctctttagtagatcaactttttc

SEQ ID NO: 123385 - DNA, 25 bp, Probe sequence
ttcgattctctttagtagatcaact

SEQ ID NO: 123386 - DNA, 25 bp, Probe sequence
ttggttcgattctctttagtagatc

SEQ ID NO: 123387 - DNA, 25 bp, Probe sequence
cataccaaaaaacaccaagcaaccg

SEQ ID NO: 123388 - DNA, 25 bp, Probe sequence
ctgctgtgttgtttagaattatgct

SEQ ID NO: 123389 - DNA, 25 bp, Probe sequence
cgttacttggtgtcattacaaatgt

SEQ ID NO: 123390 - DNA, 25 bp, Probe sequence
cgaaacgttacttggtgtcattaca

SEQ ID NO: 123391 - DNA, 25 bp, Probe sequence
gcaaccgaaacgttacttggtgtca

SEQ ID NO: 123392 - DNA, 25 bp, Probe sequence
gctctctcatattatgtttatagct

SEQ ID NO: 123393 - DNA, 25 bp, Probe sequence
gaacgctttagattgttttgtaaca

SEQ ID NO: 123394 - DNA, 25 bp, Probe sequence
gttcactcaattttatcatcatcat

SEQ ID NO: 123395 - DNA, 25 bp, Probe sequence
gtttatagctatattattttgtaca

SEQ ID NO: 123396 - DNA, 25 bp, Probe sequence
gtaacagaaagtaattcataccaaa

SEQ ID NO: 123397 - DNA, 25 bp, Probe sequence
tgtacaatattttaagttcactcaa

SEQ ID NO: 123398 - DNA, 25 bp, Probe sequence
tctgttctctgctgtgttgtttaga

SEQ ID NO: 123399 - DNA, 25 bp, Probe sequence
tatgctaaaaatatacgctctctca

SEQ ID NO: 123400 - DNA, 25 bp, Probe sequence
tatacgctctctcatattatgttta

SEQ ID NO: 123401 - DNA, 25 bp, Probe sequence
tattattttaaattatgtcactact

SEQ ID NO: 123402 - DNA, 25 bp, Probe sequence
atagggacgacatttgccgcgttac

SEQ ID NO: 123403 - DNA, 25 bp, Probe sequence
ataacgacatttatttcaagtctat

SEQ ID NO: 123404 - DNA, 25 bp, Probe sequence
acactagctctcagcatcactagct

SEQ ID NO: 123405 - DNA, 25 bp, Probe sequence
aaaagacacctctaactattctatt

SEQ ID NO: 123406 - DNA, 25 bp, Probe sequence
aattgtgcactcattttaatagtaa

SEQ ID NO: 123407 - DNA, 25 bp, Probe sequence
cacatttcctcctattcaataaaaa

SEQ ID NO: 123408 - DNA, 25 bp, Probe sequence
cagcatcactagctttctgtagaaa

SEQ ID NO: 123409 - DNA, 25 bp, Probe sequence
ctataacgttaattctatttactca

SEQ ID NO: 123410 - DNA, 25 bp, Probe sequence
ctctcagcatcactagctttctgta

SEQ ID NO: 123411 - DNA, 25 bp, Probe sequence
gacacctctaactattctatttaca

SEQ ID NO: 123412 - DNA, 25 bp, Probe sequence
gtaagagatgtcattcattcaattt

SEQ ID NO: 123413 - DNA, 25 bp, Probe sequence
gtccttaacactagctctcagcatc

SEQ ID NO: 123414 - DNA, 25 bp, Probe sequence
tctgtagaaaagctccaaacgaaat

SEQ ID NO: 123415 - DNA, 25 bp, Probe sequence
tacatttagtccttaacactagctc

SEQ ID NO: 123416 - DNA, 25 bp, Probe sequence
ttaccaccctatttcacaaaaattg

SEQ ID NO: 123417 - DNA, 25 bp, Probe sequence
ataaacactataacattaaaatatg

SEQ ID NO: 123418 - DNA, 25 bp, Probe sequence
atgttaaaatctgtacttagaactc

SEQ ID NO: 123419 - DNA, 25 bp, Probe sequence
aaatatgttaaaatctgtacttaga

SEQ ID NO: 123420 - DNA, 25 bp, Probe sequence
aaaatatgttaaaatctgtacttag

SEQ ID NO: 123421 - DNA, 25 bp, Probe sequence
ctctctcttttttgtcaaactataa

SEQ ID NO: 123422 - DNA, 25 bp, Probe sequence
ctctcttttttgtcaaactataata

SEQ ID NO: 123423 - DNA, 25 bp, Probe sequence
cctctctcttttttgtcaaactata

SEQ ID NO: 123424 - DNA, 25 bp, Probe sequence
gttaaaatctgtacttagaactctt

SEQ ID NO: 123425 - DNA, 25 bp, Probe sequence
gtcaaactataataaacactataac

SEQ ID NO: 123426 - DNA, 25 bp, Probe sequence
tcctctctcttttttgtcaaactat

SEQ ID NO: 123427 - DNA, 25 bp, Probe sequence
tctctcttttttgtcaaactataat

SEQ ID NO: 123428 - DNA, 25 bp, Probe sequence
tctcttttttgtcaaactataataa

SEQ ID NO: 123429 - DNA, 25 bp, Probe sequence
taaaatctgtacttagaactctttt

SEQ ID NO: 123430 - DNA, 25 bp, Probe sequence
tttttgtcaaactataataaacact

SEQ ID NO: 123431 - DNA, 25 bp, Probe sequence
ttaaaatctgtacttagaactcttt

SEQ ID NO: 123432 - DNA, 25 bp, Probe sequence
atttgctgcgctatactatttataa

SEQ ID NO: 123433 - DNA, 25 bp, Probe sequence
atgaaaacctctttttatgctatta

SEQ ID NO: 123434 - DNA, 25 bp, Probe sequence
aatgaaaacctctttttatgctatt

SEQ ID NO: 123435 - DNA, 25 bp, Probe sequence
aatttaggattgagtagtcaacatt

SEQ ID NO: 123436 - DNA, 25 bp, Probe sequence
catttgctgcgctatactatttata

SEQ ID NO: 123437 - DNA, 25 bp, Probe sequence
cttaatgaaaacctctttttatgct

SEQ ID NO: 123438 - DNA, 25 bp, Probe sequence
gcatttgctgcgctatactatttat

SEQ ID NO: 123439 - DNA, 25 bp, Probe sequence
gattgagtagtcaacatttgaaaaa

SEQ ID NO: 123440 - DNA, 25 bp, Probe sequence
ggattgagtagtcaacatttgaaaa

SEQ ID NO: 123441 - DNA, 25 bp, Probe sequence
tgaaaaattaataccaacaacaaca

SEQ ID NO: 123442 - DNA, 25 bp, Probe sequence
tgaaaacctctttttatgctattaa

SEQ ID NO: 123443 - DNA, 25 bp, Probe sequence
taatgaaaacctctttttatgctat

SEQ ID NO: 123444 - DNA, 25 bp, Probe sequence
taggattgagtagtcaacatttgaa

SEQ ID NO: 123445 - DNA, 25 bp, Probe sequence
ttaatgaaaacctctttttatgcta

SEQ ID NO: 123446 - DNA, 25 bp, Probe sequence
ttaataccaacaacaacaaaaagag

SEQ ID NO: 123447 - DNA, 25 bp, Probe sequence
atattaccattaaattgcaacaatt

SEQ ID NO: 123448 - DNA, 25 bp, Probe sequence
atgtgatatacattctcaaccttaa

SEQ ID NO: 123449 - DNA, 25 bp, Probe sequence
acttgctttctattcaattgtcaaa

SEQ ID NO: 123450 - DNA, 25 bp, Probe sequence
aaatcaaaccgaatgaggctaaatt

SEQ ID NO: 123451 - DNA, 25 bp, Probe sequence
aaaacttgtatgtgctaacttatgc

SEQ ID NO: 123452 - DNA, 25 bp, Probe sequence
aaaacaaatcactctattacatatt

SEQ ID NO: 123453 - DNA, 25 bp, Probe sequence
cccaacaatcccaaaacttgtatgt

SEQ ID NO: 123454 - DNA, 25 bp, Probe sequence
gcaacaattctacatatatttcttc

SEQ ID NO: 123455 - DNA, 25 bp, Probe sequence
gagcatctactgtctcatcttttta

SEQ ID NO: 123456 - DNA, 25 bp, Probe sequence
gaggctaaattggttatttttcaag

SEQ ID NO: 123457 - DNA, 25 bp, Probe sequence
gatacgcattgaatttttattacat

SEQ ID NO: 123458 - DNA, 25 bp, Probe sequence
gtgctaacttatgcataaaactaca

SEQ ID NO: 123459 - DNA, 25 bp, Probe sequence
gtgtaaataaacttgctttctattc

SEQ ID NO: 123460 - DNA, 25 bp, Probe sequence
tctactgtctcatctttttagaata

SEQ ID NO: 123461 - DNA, 25 bp, Probe sequence
ttattacatataactctcatgaaaa

SEQ ID NO: 123462 - DNA, 25 bp, Probe sequence
atatttttttcatgctaaacttatt

SEQ ID NO: 123463 - DNA, 25 bp, Probe sequence
atgaaaacgctttctcgaatatttt

SEQ ID NO: 123464 - DNA, 25 bp, Probe sequence
acgctttctcgaatatttttttcat

SEQ ID NO: 123465 - DNA, 25 bp, Probe sequence
aacacaagggtttggaggagtagca

SEQ ID NO: 123466 - DNA, 25 bp, Probe sequence
catgctaaacttattgtaaacacaa

SEQ ID NO: 123467 - DNA, 25 bp, Probe sequence
ctttctcgaatatttttttcatgct

SEQ ID NO: 123468 - DNA, 25 bp, Probe sequence
ctcgaatatttttttcatgctaaac

SEQ ID NO: 123469 - DNA, 25 bp, Probe sequence
gctttctcgaatatttttttcatgc

SEQ ID NO: 123470 - DNA, 25 bp, Probe sequence
gaatatttttttcatgctaaactta

SEQ ID NO: 123471 - DNA, 25 bp, Probe sequence
tgttttttatgaaaacgctttctcg

SEQ ID NO: 123472 - DNA, 25 bp, Probe sequence
tgaaaacgctttctcgaatattttt

SEQ ID NO: 123473 - DNA, 25 bp, Probe sequence
tttttttcatgctaaacttattgta

SEQ ID NO: 123474 - DNA, 25 bp, Probe sequence
ttttatgaaaacgctttctcgaata

SEQ ID NO: 123475 - DNA, 25 bp, Probe sequence
ttttcatgctaaacttattgtaaac

SEQ ID NO: 123476 - DNA, 25 bp, Probe sequence
ttctcgaatatttttttcatgctaa

SEQ ID NO: 123477 - DNA, 25 bp, Probe sequence
ataatcaatgttctaggctcctaaa

SEQ ID NO: 123478 - DNA, 25 bp, Probe sequence
atcaatgttctaggctcctaaatgt

SEQ ID NO: 123479 - DNA, 25 bp, Probe sequence
aaatctttgattatgaactcacaac

SEQ ID NO: 123480 - DNA, 25 bp, Probe sequence
aacaataatttaggagtctggaaca

SEQ ID NO: 123481 - DNA, 25 bp, Probe sequence
aatgttctaggctcctaaatgttat

SEQ ID NO: 123482 - DNA, 25 bp, Probe sequence
aataatcaatgttctaggctcctaa

SEQ ID NO: 123483 - DNA, 25 bp, Probe sequence
caataatcaatgttctaggctccta

SEQ ID NO: 123484 - DNA, 25 bp, Probe sequence
gttctgaaacatttataaatctttg

SEQ ID NO: 123485 - DNA, 25 bp, Probe sequence
gttatattggcagttctgaaacatt

SEQ ID NO: 123486 - DNA, 25 bp, Probe sequence
ggcagttctgaaacatttataaatc

SEQ ID NO: 123487 - DNA, 25 bp, Probe sequence
taatcaatgttctaggctcctaaat

SEQ ID NO: 123488 - DNA, 25 bp, Probe sequence
taggctcctaaatgttatattggca

SEQ ID NO: 123489 - DNA, 25 bp, Probe sequence
taggagtctggaacaataatcaatg

SEQ ID NO: 123490 - DNA, 25 bp, Probe sequence
tattggcagttctgaaacatttata

SEQ ID NO: 123491 - DNA, 25 bp, Probe sequence
ttgattatgaactcacaacagcgct

SEQ ID NO: 123492 - DNA, 25 bp, Probe sequence
ataattaacattctttctcccatcc

SEQ ID NO: 123493 - DNA, 25 bp, Probe sequence
atcaaaccttcaattcgtctctata

SEQ ID NO: 123494 - DNA, 25 bp, Probe sequence
atcacctctataaacaaaaatcctc

SEQ ID NO: 123495 - DNA, 25 bp, Probe sequence
aaaaatcctcacatcatgaattaag

SEQ ID NO: 123496 - DNA, 25 bp, Probe sequence
aatacgctacattatctttgtcgat

SEQ ID NO: 123497 - DNA, 25 bp, Probe sequence
aattcgtctctatagagcgttctct

SEQ ID NO: 123498 - DNA, 25 bp, Probe sequence
ccagactttaactgtcggctctaga

SEQ ID NO: 123499 - DNA, 25 bp, Probe sequence
gagcgttctctttattatcttctag

SEQ ID NO: 123500 - DNA, 25 bp, Probe sequence
gagtactataggcatctcattgata

SEQ ID NO: 123501 - DNA, 25 bp, Probe sequence
gatatgattcttactaacagacatt

SEQ ID NO: 123502 - DNA, 25 bp, Probe sequence
tgccggttgggaatttcaccctgcc

SEQ ID NO: 123503 - DNA, 25 bp, Probe sequence
tgaaacatattagcaggtcgcaggc

SEQ ID NO: 123504 - DNA, 25 bp, Probe sequence
tctcccatccagactttaactgtcg

SEQ ID NO: 123505 - DNA, 25 bp, Probe sequence
tcaccctgccccgaaagaattatat

SEQ ID NO: 123506 - DNA, 25 bp, Probe sequence
taagcctatttgtacacatttttac

SEQ ID NO: 123507 - DNA, 25 bp, Probe sequence
atatcaaccttagtgtttgtgttaa

SEQ ID NO: 123508 - DNA, 25 bp, Probe sequence
atatcatccatccttttgtaattca

SEQ ID NO: 123509 - DNA, 25 bp, Probe sequence
atagtcatatcgtgtaatataccaa

SEQ ID NO: 123510 - DNA, 25 bp, Probe sequence
agctattatttcactttcacaacca

SEQ ID NO: 123511 - DNA, 25 bp, Probe sequence
acttttcatttaatatcaaccttag

SEQ ID NO: 123512 - DNA, 25 bp, Probe sequence
aaattcaactaaggtgattggccat

SEQ ID NO: 123513 - DNA, 25 bp, Probe sequence
aaagcttcttaatcaatacccttga

SEQ ID NO: 123514 - DNA, 25 bp, Probe sequence
aagatatggctaatcacctttttca

SEQ ID NO: 123515 - DNA, 25 bp, Probe sequence
aattatagcaatttggtatttccaa

SEQ ID NO: 123516 - DNA, 25 bp, Probe sequence
gataatctatttaacgtctaggagg

SEQ ID NO: 123517 - DNA, 25 bp, Probe sequence
ggtgattggccatacactcaagata

SEQ ID NO: 123518 - DNA, 25 bp, Probe sequence
ggctaatcacctttttcaatgcaaa

SEQ ID NO: 123519 - DNA, 25 bp, Probe sequence
tctataatttatctttaataccctt

SEQ ID NO: 123520 - DNA, 25 bp, Probe sequence
tcactttcacaaccattaaaccatt

SEQ ID NO: 123521 - DNA, 25 bp, Probe sequence
ttctatttatgatttttagtcgtaa

SEQ ID NO: 123522 - DNA, 25 bp, Probe sequence
atttattgcgatagaaagcgtcttt

SEQ ID NO: 123523 - DNA, 25 bp, Probe sequence
atacttgagcaagttatatcataac

SEQ ID NO: 123524 - DNA, 25 bp, Probe sequence
agacgctttctatttattgcgatag

SEQ ID NO: 123525 - DNA, 25 bp, Probe sequence
agcgtctttttatacttgagcaagt

SEQ ID NO: 123526 - DNA, 25 bp, Probe sequence
acgctttctatttattgcgatagaa

SEQ ID NO: 123527 - DNA, 25 bp, Probe sequence
aaagacgctttctatttattgcgat

SEQ ID NO: 123528 - DNA, 25 bp, Probe sequence
aaagcgtctttttatacttgagcaa

SEQ ID NO: 123529 - DNA, 25 bp, Probe sequence
aagcgtctttttatacttgagcaag

SEQ ID NO: 123530 - DNA, 25 bp, Probe sequence
aagacgctttctatttattgcgata

SEQ ID NO: 123531 - DNA, 25 bp, Probe sequence
cgtctttttatacttgagcaagtta

SEQ ID NO: 123532 - DNA, 25 bp, Probe sequence
gcgtctttttatacttgagcaagtt

SEQ ID NO: 123533 - DNA, 25 bp, Probe sequence
gacgctttctatttattgcgataga

SEQ ID NO: 123534 - DNA, 25 bp, Probe sequence
tatatcataacttaactctatcaaa

SEQ ID NO: 123535 - DNA, 25 bp, Probe sequence
tatttattgcgatagaaagcgtctt

SEQ ID NO: 123536 - DNA, 25 bp, Probe sequence
ttatatcataacttaactctatcaa

SEQ ID NO: 123537 - DNA, 25 bp, Probe sequence
attcagtttgactacgataataaag

SEQ ID NO: 123538 - DNA, 25 bp, Probe sequence
ataatcttattattcacgtattaaa

SEQ ID NO: 123539 - DNA, 25 bp, Probe sequence
atctatgcattgttacatattcata

SEQ ID NO: 123540 - DNA, 25 bp, Probe sequence
atccacacctcttaggtcattgttg

SEQ ID NO: 123541 - DNA, 25 bp, Probe sequence
aggtcattgttgttatacattcagt

SEQ ID NO: 123542 - DNA, 25 bp, Probe sequence
accgtttaacaattttatctatgca

SEQ ID NO: 123543 - DNA, 25 bp, Probe sequence
actttacgttgatctacgaatcata

SEQ ID NO: 123544 - DNA, 25 bp, Probe sequence
aacattactttacgttgatctacga

SEQ ID NO: 123545 - DNA, 25 bp, Probe sequence
aaccatttatcaacattactttacg

SEQ ID NO: 123546 - DNA, 25 bp, Probe sequence
cacctcttaggtcattgttgttata

SEQ ID NO: 123547 - DNA, 25 bp, Probe sequence
cataaatgttttatctttttgtata

SEQ ID NO: 123548 - DNA, 25 bp, Probe sequence
gatctacgaatcataaatgttttat

SEQ ID NO: 123549 - DNA, 25 bp, Probe sequence
tgttgttatacattcagtttgacta

SEQ ID NO: 123550 - DNA, 25 bp, Probe sequence
tgcattgttacatattcataaataa

SEQ ID NO: 123551 - DNA, 25 bp, Probe sequence
tatacattcagtttgactacgataa

SEQ ID NO: 123552 - DNA, 25 bp, Probe sequence
atacatcatatcacattaaattaat

SEQ ID NO: 123553 - DNA, 25 bp, Probe sequence
acacttaatttagcgattacgcaaa

SEQ ID NO: 123554 - DNA, 25 bp, Probe sequence
aaattaattacttatgtcttatatt

SEQ ID NO: 123555 - DNA, 25 bp, Probe sequence
aagtaataatacatcatatcacatt

SEQ ID NO: 123556 - DNA, 25 bp, Probe sequence
aattttgttctatctactatttagc

SEQ ID NO: 123557 - DNA, 25 bp, Probe sequence
ctcccgattacaaattttgttctat

SEQ ID NO: 123558 - DNA, 25 bp, Probe sequence
gttctatctactatttagcaaagta

SEQ ID NO: 123559 - DNA, 25 bp, Probe sequence
tgttacctcccgattacaaattttg

SEQ ID NO: 123560 - DNA, 25 bp, Probe sequence
taattacttatgtcttatatttaac

SEQ ID NO: 123561 - DNA, 25 bp, Probe sequence
taacacttaatttagcgattacgca

SEQ ID NO: 123562 - DNA, 25 bp, Probe sequence
tacaaattttgttctatctactatt

SEQ ID NO: 123563 - DNA, 25 bp, Probe sequence
tacttatgtcttatatttaacactt

SEQ ID NO: 123564 - DNA, 25 bp, Probe sequence
tatgtcttatatttaacacttaatt

SEQ ID NO: 123565 - DNA, 25 bp, Probe sequence
ttttgttctatctactatttagcaa

SEQ ID NO: 123566 - DNA, 25 bp, Probe sequence
ttgttctatctactatttagcaaag

SEQ ID NO: 123567 - DNA, 25 bp, Probe sequence
acaacttattatacgaggagtacta

SEQ ID NO: 123568 - DNA, 25 bp, Probe sequence
aaacaccctaacatcttcatataaa

SEQ ID NO: 123569 - DNA, 25 bp, Probe sequence
aacaccctaacatcttcatataaat

SEQ ID NO: 123570 - DNA, 25 bp, Probe sequence
aatttcggtcgatgtgttagtgatg

SEQ ID NO: 123571 - DNA, 25 bp, Probe sequence
aattaacaacttattatacgaggag

SEQ ID NO: 123572 - DNA, 25 bp, Probe sequence
caccctaacatcttcatataaattt

SEQ ID NO: 123573 - DNA, 25 bp, Probe sequence
gaaacaccctaacatcttcatataa

SEQ ID NO: 123574 - DNA, 25 bp, Probe sequence
gttgaaacaccctaacatcttcata

SEQ ID NO: 123575 - DNA, 25 bp, Probe sequence
gtgaaatttcggtcgatgtgttagt

SEQ ID NO: 123576 - DNA, 25 bp, Probe sequence
ggtcgatgtgttagtgatgttgaaa

SEQ ID NO: 123577 - DNA, 25 bp, Probe sequence
tgttgaaacaccctaacatcttcat

SEQ ID NO: 123578 - DNA, 25 bp, Probe sequence
tcggtcgatgtgttagtgatgttga

SEQ ID NO: 123579 - DNA, 25 bp, Probe sequence
taacatcttcatataaatttatttt

SEQ ID NO: 123580 - DNA, 25 bp, Probe sequence
tttcggtcgatgtgttagtgatgtt

SEQ ID NO: 123581 - DNA, 25 bp, Probe sequence
tttattgtgaaatttcggtcgatgt

SEQ ID NO: 123582 - DNA, 25 bp, Probe sequence
aaatccatattacaatttcatttat

SEQ ID NO: 123583 - DNA, 25 bp, Probe sequence
aacattagcgtcaattgaaagtgta

SEQ ID NO: 123584 - DNA, 25 bp, Probe sequence
aatacagtctgctaatttttcaaac

SEQ ID NO: 123585 - DNA, 25 bp, Probe sequence
aattttaatcgtatatatgtttcat

SEQ ID NO: 123586 - DNA, 25 bp, Probe sequence
gctaatttttcaaactaatgctttt

SEQ ID NO: 123587 - DNA, 25 bp, Probe sequence
gaatctagccttaaccatattgcat

SEQ ID NO: 123588 - DNA, 25 bp, Probe sequence
gatttgacgctaaaatacagtctgc

SEQ ID NO: 123589 - DNA, 25 bp, Probe sequence
gtatcaaatctacaaaaatccatat

SEQ ID NO: 123590 - DNA, 25 bp, Probe sequence
ggatttctctcctttataatattga

SEQ ID NO: 123591 - DNA, 25 bp, Probe sequence
tgacgtaattttaaacattagcgtc

SEQ ID NO: 123592 - DNA, 25 bp, Probe sequence
taatgctttttaggtaggtacaatg

SEQ ID NO: 123593 - DNA, 25 bp, Probe sequence
tagccttaaccatattgcattcaaa

SEQ ID NO: 123594 - DNA, 25 bp, Probe sequence
tatataatgaatctagccttaacca

SEQ ID NO: 123595 - DNA, 25 bp, Probe sequence
ttcatttatggtgatttgacgctaa

SEQ ID NO: 123596 - DNA, 25 bp, Probe sequence
ttctctcctttataatattgacgta

SEQ ID NO: 123597 - DNA, 25 bp, Probe sequence
attgaacttgagtcaccacttaaac

SEQ ID NO: 123598 - DNA, 25 bp, Probe sequence
atttaattcttgagttgcatatagt

SEQ ID NO: 123599 - DNA, 25 bp, Probe sequence
aaatacgtgtcatcaagtgcaaaat

SEQ ID NO: 123600 - DNA, 25 bp, Probe sequence
aaaaacccccataagcacaatgcct

SEQ ID NO: 123601 - DNA, 25 bp, Probe sequence
aaaagtcacatacctagatataagt

SEQ ID NO: 123602 - DNA, 25 bp, Probe sequence
aagcacaatgcctatgagggtttaa

SEQ ID NO: 123603 - DNA, 25 bp, Probe sequence
caacttgtatattttgtactctaat

SEQ ID NO: 123604 - DNA, 25 bp, Probe sequence
gcgagactaatttccttttctactc

SEQ ID NO: 123605 - DNA, 25 bp, Probe sequence
gacttcttcttcattaataactatg

SEQ ID NO: 123606 - DNA, 25 bp, Probe sequence
gagataacctttcatattattttca

SEQ ID NO: 123607 - DNA, 25 bp, Probe sequence
gtcaccacttaaactcaaaaatacg

SEQ ID NO: 123608 - DNA, 25 bp, Probe sequence
taactcgggcttttacttagctgaa

SEQ ID NO: 123609 - DNA, 25 bp, Probe sequence
tagtaattgtttttattcattttct

SEQ ID NO: 123610 - DNA, 25 bp, Probe sequence
ttagctgaattttgacttcttcttc

SEQ ID NO: 123611 - DNA, 25 bp, Probe sequence
ttccttttctactcctgttgaatca

SEQ ID NO: 123612 - DNA, 25 bp, Probe sequence
ataatatagcctccttgattcttat

SEQ ID NO: 123613 - DNA, 25 bp, Probe sequence
atcacgcttttataatatatagcta

SEQ ID NO: 123614 - DNA, 25 bp, Probe sequence
atgataatcatccaggaggtctagc

SEQ ID NO: 123615 - DNA, 25 bp, Probe sequence
atgattgtttatgatacgatatgta

SEQ ID NO: 123616 - DNA, 25 bp, Probe sequence
actattgttttatgattgtttatga

SEQ ID NO: 123617 - DNA, 25 bp, Probe sequence
aaaacatttatatcacgcttttata

SEQ ID NO: 123618 - DNA, 25 bp, Probe sequence
aaaattttaacaacatctgcatgtc

SEQ ID NO: 123619 - DNA, 25 bp, Probe sequence
aacatctgcatgtctttttcttaca

SEQ ID NO: 123620 - DNA, 25 bp, Probe sequence
aatgatttttatttctttgttatat

SEQ ID NO: 123621 - DNA, 25 bp, Probe sequence
gcctccttgattcttattaaaattt

SEQ ID NO: 123622 - DNA, 25 bp, Probe sequence
gcaaacattgtgtctacaagttaat

SEQ ID NO: 123623 - DNA, 25 bp, Probe sequence
gactttagcaaacattgtgtctaca

SEQ ID NO: 123624 - DNA, 25 bp, Probe sequence
tgcatgtctttttcttacaaccatt

SEQ ID NO: 123625 - DNA, 25 bp, Probe sequence
tagctaattttttgcctatattttt

SEQ ID NO: 123626 - DNA, 25 bp, Probe sequence
tatagcctccttgattcttattaaa

SEQ ID NO: 123627 - DNA, 25 bp, Probe sequence
atttgatgacgttgttgcgtataaa

SEQ ID NO: 123628 - DNA, 25 bp, Probe sequence
atcataactatgcatctaatcgcta

SEQ ID NO: 123629 - DNA, 25 bp, Probe sequence
atctaatcgctatagttatacaaca

SEQ ID NO: 123630 - DNA, 25 bp, Probe sequence
acaatttgatgacgttgttgcgtat

SEQ ID NO: 123631 - DNA, 25 bp, Probe sequence
aatcgctatagttatacaacaagat

SEQ ID NO: 123632 - DNA, 25 bp, Probe sequence
caatacaatgtatcatgctataatg

SEQ ID NO: 123633 - DNA, 25 bp, Probe sequence
cataactatgcatctaatcgctata

SEQ ID NO: 123634 - DNA, 25 bp, Probe sequence
gcatctaatcgctatagttatacaa

SEQ ID NO: 123635 - DNA, 25 bp, Probe sequence
gatgacgttgttgcgtataaaaaat

SEQ ID NO: 123636 - DNA, 25 bp, Probe sequence
gataaaatgtcaatgtagcgttaat

SEQ ID NO: 123637 - DNA, 25 bp, Probe sequence
gatataacatataatgaggtttgat

SEQ ID NO: 123638 - DNA, 25 bp, Probe sequence
gattttcgaaatcataactatgcat

SEQ ID NO: 123639 - DNA, 25 bp, Probe sequence
gtagcgttaatacaaaacaatacaa

SEQ ID NO: 123640 - DNA, 25 bp, Probe sequence
taactatgcatctaatcgctatagt

SEQ ID NO: 123641 - DNA, 25 bp, Probe sequence
tatgcatctaatcgctatagttata

SEQ ID NO: 123642 - DNA, 25 bp, Probe sequence
attacgacaccttcctgaacgaagc

SEQ ID NO: 123643 - DNA, 25 bp, Probe sequence
agcattttttaattttcatgcaaat

SEQ ID NO: 123644 - DNA, 25 bp, Probe sequence
aaaatgcttcattcagcaaataggt

SEQ ID NO: 123645 - DNA, 25 bp, Probe sequence
aacaccatataatgcctatcaaaat

SEQ ID NO: 123646 - DNA, 25 bp, Probe sequence
caatctttgttgccgtttaaataat

SEQ ID NO: 123647 - DNA, 25 bp, Probe sequence
gcttcattcagcaaataggtaaatt

SEQ ID NO: 123648 - DNA, 25 bp, Probe sequence
gacaccttcctgaacgaagcatttt

SEQ ID NO: 123649 - DNA, 25 bp, Probe sequence
gttgccgtttaaataatgtgaatgt

SEQ ID NO: 123650 - DNA, 25 bp, Probe sequence
gtaaattacgacaccttcctgaacg

SEQ ID NO: 123651 - DNA, 25 bp, Probe sequence
gtcaataaattctccaaactagtcg

SEQ ID NO: 123652 - DNA, 25 bp, Probe sequence
tagtcgaaaataaaacaggctggga

SEQ ID NO: 123653 - DNA, 25 bp, Probe sequence
taaattctccaaactagtcgaaaat

SEQ ID NO: 123654 - DNA, 25 bp, Probe sequence
ttcctgaacgaagcattttttaatt

SEQ ID NO: 123655 - DNA, 25 bp, Probe sequence
tttaacaccatataatgcctatcaa

SEQ ID NO: 123656 - DNA, 25 bp, Probe sequence
ttttcatgcaaattttttaacacca

SEQ ID NO: 123657 - DNA, 25 bp, Probe sequence
attcatctaaccttttcatcagttg

SEQ ID NO: 123658 - DNA, 25 bp, Probe sequence
atgtcccaagccctgacaattcatc

SEQ ID NO: 123659 - DNA, 25 bp, Probe sequence
accttttcatcagttgagtgatttt

SEQ ID NO: 123660 - DNA, 25 bp, Probe sequence
aacttaatgtcccaagccctgacaa

SEQ ID NO: 123661 - DNA, 25 bp, Probe sequence
aagccctgacaattcatctaacctt

SEQ ID NO: 123662 - DNA, 25 bp, Probe sequence
caattcatctaaccttttcatcagt

SEQ ID NO: 123663 - DNA, 25 bp, Probe sequence
cttaatgtcccaagccctgacaatt

SEQ ID NO: 123664 - DNA, 25 bp, Probe sequence
cctgacaattcatctaaccttttca

SEQ ID NO: 123665 - DNA, 25 bp, Probe sequence
ccaagccctgacaattcatctaacc

SEQ ID NO: 123666 - DNA, 25 bp, Probe sequence
gccctgacaattcatctaacctttt

SEQ ID NO: 123667 - DNA, 25 bp, Probe sequence
gacaattcatctaaccttttcatca

SEQ ID NO: 123668 - DNA, 25 bp, Probe sequence
tcccaagccctgacaattcatctaa

SEQ ID NO: 123669 - DNA, 25 bp, Probe sequence
tctaaccttttcatcagttgagtga

SEQ ID NO: 123670 - DNA, 25 bp, Probe sequence
tcatctaaccttttcatcagttgag

SEQ ID NO: 123671 - DNA, 25 bp, Probe sequence
taatgtcccaagccctgacaattca

SEQ ID NO: 123672 - DNA, 25 bp, Probe sequence
atatcgcctcacctttttgatgtat

SEQ ID NO: 123673 - DNA, 25 bp, Probe sequence
atatctctcaaacattaatcaaatt

SEQ ID NO: 123674 - DNA, 25 bp, Probe sequence
atcgcctcacctttttgatgtatta

SEQ ID NO: 123675 - DNA, 25 bp, Probe sequence
aaagccgaagtcacaacatatagtc

SEQ ID NO: 123676 - DNA, 25 bp, Probe sequence
aaaacacttagagcaatcaaccact

SEQ ID NO: 123677 - DNA, 25 bp, Probe sequence
aacaaatctgagttgaatacatgag

SEQ ID NO: 123678 - DNA, 25 bp, Probe sequence
aacatatagtcatcacttcagccta

SEQ ID NO: 123679 - DNA, 25 bp, Probe sequence
aattctagtaatatctctcaaacat

SEQ ID NO: 123680 - DNA, 25 bp, Probe sequence
gccgaagtcacaacatatagtcatc

SEQ ID NO: 123681 - DNA, 25 bp, Probe sequence
gagcaatcaaccactaaaattctag

SEQ ID NO: 123682 - DNA, 25 bp, Probe sequence
gatgtattataccctgttatcataa

SEQ ID NO: 123683 - DNA, 25 bp, Probe sequence
gttatcataacaaatctgagttgaa

SEQ ID NO: 123684 - DNA, 25 bp, Probe sequence
gtattataccctgttatcataacaa

SEQ ID NO: 123685 - DNA, 25 bp, Probe sequence
tcacctttttgatgtattataccct

SEQ ID NO: 123686 - DNA, 25 bp, Probe sequence
tatagtcatcacttcagcctaacat

SEQ ID NO: 123687 - DNA, 25 bp, Probe sequence
acgctcctttttaatatatgaataa

SEQ ID NO: 123688 - DNA, 25 bp, Probe sequence
acatattatcatttatataccgaaa

SEQ ID NO: 123689 - DNA, 25 bp, Probe sequence
acaacgctcctttttaatatatgaa

SEQ ID NO: 123690 - DNA, 25 bp, Probe sequence
aaagctaaagattttcgatacatat

SEQ ID NO: 123691 - DNA, 25 bp, Probe sequence
aacaacgctcctttttaatatatga

SEQ ID NO: 123692 - DNA, 25 bp, Probe sequence
aacgctcctttttaatatatgaata

SEQ ID NO: 123693 - DNA, 25 bp, Probe sequence
caacgctcctttttaatatatgaat

SEQ ID NO: 123694 - DNA, 25 bp, Probe sequence
ccgaaaatcttttatttagctatat

SEQ ID NO: 123695 - DNA, 25 bp, Probe sequence
gctcctttttaatatatgaataact

SEQ ID NO: 123696 - DNA, 25 bp, Probe sequence
gctaaagattttcgatacatattat

SEQ ID NO: 123697 - DNA, 25 bp, Probe sequence
gatacatattatcatttatataccg

SEQ ID NO: 123698 - DNA, 25 bp, Probe sequence
gattttcgatacatattatcattta

SEQ ID NO: 123699 - DNA, 25 bp, Probe sequence
taccgaaaatcttttatttagctat

SEQ ID NO: 123700 - DNA, 25 bp, Probe sequence
tataccgaaaatcttttatttagct

SEQ ID NO: 123701 - DNA, 25 bp, Probe sequence
ttatcatttatataccgaaaatctt

SEQ ID NO: 123702 - DNA, 25 bp, Probe sequence
atcgttcagacctatttgtctgcaa

SEQ ID NO: 123703 - DNA, 25 bp, Probe sequence
aaaggcttacatttaaattatcgct

SEQ ID NO: 123704 - DNA, 25 bp, Probe sequence
aaaagaggttgctgggtttcattgg

SEQ ID NO: 123705 - DNA, 25 bp, Probe sequence
aattatcgctttggagggatttagg

SEQ ID NO: 123706 - DNA, 25 bp, Probe sequence
ctcttatcgttcagacctatttgtc

SEQ ID NO: 123707 - DNA, 25 bp, Probe sequence
ctccaccactcaggataagagaatc

SEQ ID NO: 123708 - DNA, 25 bp, Probe sequence
cgctcttatcgttcagacctatttg

SEQ ID NO: 123709 - DNA, 25 bp, Probe sequence
gcttacatttaaattatcgctttgg

SEQ ID NO: 123710 - DNA, 25 bp, Probe sequence
gaattaatgtcaatttttcacaaat

SEQ ID NO: 123711 - DNA, 25 bp, Probe sequence
gacctatttgtctgcaaacggtttg

SEQ ID NO: 123712 - DNA, 25 bp, Probe sequence
gaggttgctgggtttcattgggtcc

SEQ ID NO: 123713 - DNA, 25 bp, Probe sequence
gttgctgggtttcattgggtccatg

SEQ ID NO: 123714 - DNA, 25 bp, Probe sequence
tgggtttcattgggtccatgtccct

SEQ ID NO: 123715 - DNA, 25 bp, Probe sequence
tgcaaacggtttggcacctttcttt

SEQ ID NO: 123716 - DNA, 25 bp, Probe sequence
tgctgggtttcattgggtccatgtc

SEQ ID NO: 123717 - DNA, 25 bp, Probe sequence
atttataggcaattttattacaaca

SEQ ID NO: 123718 - DNA, 25 bp, Probe sequence
atagtctaacaatggttggctcctc

SEQ ID NO: 123719 - DNA, 25 bp, Probe sequence
atggttggctcctcttattttatgt

SEQ ID NO: 123720 - DNA, 25 bp, Probe sequence
agtctaacaatggttggctcctctt

SEQ ID NO: 123721 - DNA, 25 bp, Probe sequence
acaatgcacatttaaggtgaccttc

SEQ ID NO: 123722 - DNA, 25 bp, Probe sequence
gctcctcttattttatgtgctaaaa

SEQ ID NO: 123723 - DNA, 25 bp, Probe sequence
gagccaaccgttgttatagtctaac

SEQ ID NO: 123724 - DNA, 25 bp, Probe sequence
gttggctcctcttattttatgtgct

SEQ ID NO: 123725 - DNA, 25 bp, Probe sequence
gtctaacaatggttggctcctctta

SEQ ID NO: 123726 - DNA, 25 bp, Probe sequence
ggttggctcctcttattttatgtgc

SEQ ID NO: 123727 - DNA, 25 bp, Probe sequence
ggcaattttattacaacaatgcaca

SEQ ID NO: 123728 - DNA, 25 bp, Probe sequence
ggctcctcttattttatgtgctaaa

SEQ ID NO: 123729 - DNA, 25 bp, Probe sequence
taacaatggttggctcctcttattt

SEQ ID NO: 123730 - DNA, 25 bp, Probe sequence
tactaattaaagagccaaccgttgt

SEQ ID NO: 123731 - DNA, 25 bp, Probe sequence
ttggctcctcttattttatgtgcta

SEQ ID NO: 123732 - DNA, 25 bp, Probe sequence
attcaacgtatatcacacatcttca

SEQ ID NO: 123733 - DNA, 25 bp, Probe sequence
atatcacacatcttcaaagcttgat

SEQ ID NO: 123734 - DNA, 25 bp, Probe sequence
atcacacatcttcaaagcttgatag

SEQ ID NO: 123735 - DNA, 25 bp, Probe sequence
acgtatatcacacatcttcaaagct

SEQ ID NO: 123736 - DNA, 25 bp, Probe sequence
aacgtatatcacacatcttcaaagc

SEQ ID NO: 123737 - DNA, 25 bp, Probe sequence
caaagcttgatagttcccatgcgca

SEQ ID NO: 123738 - DNA, 25 bp, Probe sequence
catacccctcattcaacgtatatca

SEQ ID NO: 123739 - DNA, 25 bp, Probe sequence
cccctcattcaacgtatatcacaca

SEQ ID NO: 123740 - DNA, 25 bp, Probe sequence
cctcattcaacgtatatcacacatc

SEQ ID NO: 123741 - DNA, 25 bp, Probe sequence
gcatacccctcattcaacgtatatc

SEQ ID NO: 123742 - DNA, 25 bp, Probe sequence
gtatatcacacatcttcaaagcttg

SEQ ID NO: 123743 - DNA, 25 bp, Probe sequence
tcattcaacgtatatcacacatctt

SEQ ID NO: 123744 - DNA, 25 bp, Probe sequence
tcaacgtatatcacacatcttcaaa

SEQ ID NO: 123745 - DNA, 25 bp, Probe sequence
tacccctcattcaacgtatatcaca

SEQ ID NO: 123746 - DNA, 25 bp, Probe sequence
ttcaaagcttgatagttcccatgcg

SEQ ID NO: 123747 - DNA, 25 bp, Probe sequence
attgatatgattgttataatgctca

SEQ ID NO: 123748 - DNA, 25 bp, Probe sequence
attctagcagtggttatgtttaaaa

SEQ ID NO: 123749 - DNA, 25 bp, Probe sequence
attttatgacattctagcagtggtt

SEQ ID NO: 123750 - DNA, 25 bp, Probe sequence
atatcgttatatcattcgtctacta

SEQ ID NO: 123751 - DNA, 25 bp, Probe sequence
ataacgattttatgacattctagca

SEQ ID NO: 123752 - DNA, 25 bp, Probe sequence
atcgttatatcattcgtctactatt

SEQ ID NO: 123753 - DNA, 25 bp, Probe sequence
aaatcatttacattataattataac

SEQ ID NO: 123754 - DNA, 25 bp, Probe sequence
aatgctcaatacatatcgttatatc

SEQ ID NO: 123755 - DNA, 25 bp, Probe sequence
gcgttattcctccaaaatcatttac

SEQ ID NO: 123756 - DNA, 25 bp, Probe sequence
gacattctagcagtggttatgttta

SEQ ID NO: 123757 - DNA, 25 bp, Probe sequence
gttataatgctcaatacatatcgtt

SEQ ID NO: 123758 - DNA, 25 bp, Probe sequence
gttattcctccaaaatcatttacat

SEQ ID NO: 123759 - DNA, 25 bp, Probe sequence
gtagacgaattgattcattgatatg

SEQ ID NO: 123760 - DNA, 25 bp, Probe sequence
tcgttatatcattcgtctactatta

SEQ ID NO: 123761 - DNA, 25 bp, Probe sequence
tttatgacattctagcagtggttat

SEQ ID NO: 123762 - DNA, 25 bp, Probe sequence
atgttgtcatgttcgtgtcattttg

SEQ ID NO: 123763 - DNA, 25 bp, Probe sequence
actccctcttaaatgcatccaggtt

SEQ ID NO: 123764 - DNA, 25 bp, Probe sequence
aatgcatccaggttttatgtagtaa

SEQ ID NO: 123765 - DNA, 25 bp, Probe sequence
aataactccctcttaaatgcatcca

SEQ ID NO: 123766 - DNA, 25 bp, Probe sequence
aattatgttgtcatgttcgtgtcat

SEQ ID NO: 123767 - DNA, 25 bp, Probe sequence
gcaacacctctaaaaataaatacaa

SEQ ID NO: 123768 - DNA, 25 bp, Probe sequence
gagtcgtaatacaactttacaatta

SEQ ID NO: 123769 - DNA, 25 bp, Probe sequence
gttcgtgtcattttgagtcgtaata

SEQ ID NO: 123770 - DNA, 25 bp, Probe sequence
gtcatgttcgtgtcattttgagtcg

SEQ ID NO: 123771 - DNA, 25 bp, Probe sequence
tgaaagcgttttacacttaataact

SEQ ID NO: 123772 - DNA, 25 bp, Probe sequence
taacacttctacaatccaaaaatat

SEQ ID NO: 123773 - DNA, 25 bp, Probe sequence
taaagtatttccactactaatttgg

SEQ ID NO: 123774 - DNA, 25 bp, Probe sequence
tacacttaataactccctcttaaat

SEQ ID NO: 123775 - DNA, 25 bp, Probe sequence
tatgtgatatagtgaaagcgtttta

SEQ ID NO: 123776 - DNA, 25 bp, Probe sequence
ttaaattaacacttctacaatccaa

SEQ ID NO: 123777 - DNA, 25 bp, Probe sequence
attttttgctgttgagattttgtta

SEQ ID NO: 123778 - DNA, 25 bp, Probe sequence
atacctatctataaacggacaatgt

SEQ ID NO: 123779 - DNA, 25 bp, Probe sequence
atgagtttgcatggtcttgaattgt

SEQ ID NO: 123780 - DNA, 25 bp, Probe sequence
aaaatagaccacgcatacctatcta

SEQ ID NO: 123781 - DNA, 25 bp, Probe sequence
aatggagatttattttttgctgttg

SEQ ID NO: 123782 - DNA, 25 bp, Probe sequence
cacgcatacctatctataaacggac

SEQ ID NO: 123783 - DNA, 25 bp, Probe sequence
gaccacgcatacctatctataaacg

SEQ ID NO: 123784 - DNA, 25 bp, Probe sequence
gagatttattttttgctgttgagat

SEQ ID NO: 123785 - DNA, 25 bp, Probe sequence
gttgagattttgttatagatgttta

SEQ ID NO: 123786 - DNA, 25 bp, Probe sequence
gttatagatgtttaaacctgtaatt

SEQ ID NO: 123787 - DNA, 25 bp, Probe sequence
gtttgcatggtcttgaattgtatta

SEQ ID NO: 123788 - DNA, 25 bp, Probe sequence
ggacaatgtttataaatgagtttgc

SEQ ID NO: 123789 - DNA, 25 bp, Probe sequence
tggttttaatagttcacttagtggt

SEQ ID NO: 123790 - DNA, 25 bp, Probe sequence
tgaattgtattaaatttcttttggt

SEQ ID NO: 123791 - DNA, 25 bp, Probe sequence
ttcacttagtggtatgtcaacattt

SEQ ID NO: 123792 - DNA, 25 bp, Probe sequence
atagtagagtcgcctatctctcagg

SEQ ID NO: 123793 - DNA, 25 bp, Probe sequence
ataggtgacatatagccgcaccaat

SEQ ID NO: 123794 - DNA, 25 bp, Probe sequence
agaggaggtgtataaggtgatgctt

SEQ ID NO: 123795 - DNA, 25 bp, Probe sequence
aaattaacaaaatctactctcatag

SEQ ID NO: 123796 - DNA, 25 bp, Probe sequence
aaatacttattttcgttatctcaat

SEQ ID NO: 123797 - DNA, 25 bp, Probe sequence
caccagtcatcagtggctgtgccat

SEQ ID NO: 123798 - DNA, 25 bp, Probe sequence
cagtggctgtgccattgcgtttttt

SEQ ID NO: 123799 - DNA, 25 bp, Probe sequence
cattgcgtttttttcttattggcta

SEQ ID NO: 123800 - DNA, 25 bp, Probe sequence
cctatctctcaggcgtcaatttaga

SEQ ID NO: 123801 - DNA, 25 bp, Probe sequence
gtcaatttagacgcagagaggaggt

SEQ ID NO: 123802 - DNA, 25 bp, Probe sequence
ggtgatgcttattttcgttcacatc

SEQ ID NO: 123803 - DNA, 25 bp, Probe sequence
tcgttcacatcatagcaccagtcat

SEQ ID NO: 123804 - DNA, 25 bp, Probe sequence
tagccgcaccaataaaaatcccctc

SEQ ID NO: 123805 - DNA, 25 bp, Probe sequence
tttcgttatctcaattatactgcta

SEQ ID NO: 123806 - DNA, 25 bp, Probe sequence
ttatactgctaatctttctctttgt

SEQ ID NO: 123807 - DNA, 25 bp, Probe sequence
atgatgttagattatattctcgtat

SEQ ID NO: 123808 - DNA, 25 bp, Probe sequence
aatcccaaattataatagtttcaat

SEQ ID NO: 123809 - DNA, 25 bp, Probe sequence
ctcttcagtctcttgtcacaataaa

SEQ ID NO: 123810 - DNA, 25 bp, Probe sequence
ctgtcttgatgattgaatgactcag

SEQ ID NO: 123811 - DNA, 25 bp, Probe sequence
ccagttaaactgtcttgatgattga

SEQ ID NO: 123812 - DNA, 25 bp, Probe sequence
gaatgactcagtattttggttttgt

SEQ ID NO: 123813 - DNA, 25 bp, Probe sequence
gtttctaggcttaccattttcataa

SEQ ID NO: 123814 - DNA, 25 bp, Probe sequence
gtagacgattcactaaactccaaaa

SEQ ID NO: 123815 - DNA, 25 bp, Probe sequence
gtcacaataaaatcgcctaacctct

SEQ ID NO: 123816 - DNA, 25 bp, Probe sequence
tcgcctaacctcttagtttaacaat

SEQ ID NO: 123817 - DNA, 25 bp, Probe sequence
taatttcgtttctaggcttaccatt

SEQ ID NO: 123818 - DNA, 25 bp, Probe sequence
taaaagctcttcagtctcttgtcac

SEQ ID NO: 123819 - DNA, 25 bp, Probe sequence
tatattctcgtataatttcgtttct

SEQ ID NO: 123820 - DNA, 25 bp, Probe sequence
tttaattaataggctgttatctgga

SEQ ID NO: 123821 - DNA, 25 bp, Probe sequence
ttggttttgttttgtctaatttgag

SEQ ID NO: 123822 - DNA, 25 bp, Probe sequence
attttgtcaggattgggtgaatgtc

SEQ ID NO: 123823 - DNA, 25 bp, Probe sequence
atattttgtcaggattgggtgaatg

SEQ ID NO: 123824 - DNA, 25 bp, Probe sequence
atagtatattttgtcaggattgggt

SEQ ID NO: 123825 - DNA, 25 bp, Probe sequence
aggattgggtgaatgtctaagtttt

SEQ ID NO: 123826 - DNA, 25 bp, Probe sequence
caggattgggtgaatgtctaagttt

SEQ ID NO: 123827 - DNA, 25 bp, Probe sequence
gattgggtgaatgtctaagttttaa

SEQ ID NO: 123828 - DNA, 25 bp, Probe sequence
gttatagtatattttgtcaggattg

SEQ ID NO: 123829 - DNA, 25 bp, Probe sequence
gtatattttgtcaggattgggtgaa

SEQ ID NO: 123830 - DNA, 25 bp, Probe sequence
gtcaggattgggtgaatgtctaagt

SEQ ID NO: 123831 - DNA, 25 bp, Probe sequence
ggattgggtgaatgtctaagtttta

SEQ ID NO: 123832 - DNA, 25 bp, Probe sequence
tcaggattgggtgaatgtctaagtt

SEQ ID NO: 123833 - DNA, 25 bp, Probe sequence
tagtatattttgtcaggattgggtg

SEQ ID NO: 123834 - DNA, 25 bp, Probe sequence
tttgtcaggattgggtgaatgtcta

SEQ ID NO: 123835 - DNA, 25 bp, Probe sequence
ttttgtcaggattgggtgaatgtct

SEQ ID NO: 123836 - DNA, 25 bp, Probe sequence
ttgtcaggattgggtgaatgtctaa

SEQ ID NO: 123837 - DNA, 25 bp, Probe sequence
attgttgattttgttgttaatttct

SEQ ID NO: 123838 - DNA, 25 bp, Probe sequence
atcatttcgaataaatagaatcaca

SEQ ID NO: 123839 - DNA, 25 bp, Probe sequence
aaatcatttatcaatgtatggatgg

SEQ ID NO: 123840 - DNA, 25 bp, Probe sequence
cagagatgtttaaaattgttgattt

SEQ ID NO: 123841 - DNA, 25 bp, Probe sequence
catttatcaatgtatggatggatga

SEQ ID NO: 123842 - DNA, 25 bp, Probe sequence
gctcctctaagtattcgtataaata

SEQ ID NO: 123843 - DNA, 25 bp, Probe sequence
gaatcacagagatgtttaaaattgt

SEQ ID NO: 123844 - DNA, 25 bp, Probe sequence
gtgctcctctaagtattcgtataaa

SEQ ID NO: 123845 - DNA, 25 bp, Probe sequence
tgtgctcctctaagtattcgtataa

SEQ ID NO: 123846 - DNA, 25 bp, Probe sequence
tgttgattttgttgttaatttctaa

SEQ ID NO: 123847 - DNA, 25 bp, Probe sequence
tgctcctctaagtattcgtataaat

SEQ ID NO: 123848 - DNA, 25 bp, Probe sequence
tttgtgctcctctaagtattcgtat

SEQ ID NO: 123849 - DNA, 25 bp, Probe sequence
ttttgtgctcctctaagtattcgta

SEQ ID NO: 123850 - DNA, 25 bp, Probe sequence
ttgttgttaatttctaaaaatcatt

SEQ ID NO: 123851 - DNA, 25 bp, Probe sequence
ttgtgctcctctaagtattcgtata

SEQ ID NO: 123852 - DNA, 25 bp, Probe sequence
aaattattgaacacatgctcatggt

SEQ ID NO: 123853 - DNA, 25 bp, Probe sequence
catgctcatggtgtatatttaaatt

SEQ ID NO: 123854 - DNA, 25 bp, Probe sequence
gctcctctgtttattcatgatgctt

SEQ ID NO: 123855 - DNA, 25 bp, Probe sequence
gctcatggtgtatatttaaatttgt

SEQ ID NO: 123856 - DNA, 25 bp, Probe sequence
gaacacatgctcatggtgtatattt

SEQ ID NO: 123857 - DNA, 25 bp, Probe sequence
gaccgatgtttttcattaaaattat

SEQ ID NO: 123858 - DNA, 25 bp, Probe sequence
gatgcttttgatatagacgtttttt

SEQ ID NO: 123859 - DNA, 25 bp, Probe sequence
gttatattcgaccgatgtttttcat

SEQ ID NO: 123860 - DNA, 25 bp, Probe sequence
gtgctcctctgtttattcatgatgc

SEQ ID NO: 123861 - DNA, 25 bp, Probe sequence
tgtgctcctctgtttattcatgatg

SEQ ID NO: 123862 - DNA, 25 bp, Probe sequence
tcctctgtttattcatgatgctttt

SEQ ID NO: 123863 - DNA, 25 bp, Probe sequence
tctgtttattcatgatgcttttgat

SEQ ID NO: 123864 - DNA, 25 bp, Probe sequence
tattcgaccgatgtttttcattaaa

SEQ ID NO: 123865 - DNA, 25 bp, Probe sequence
tttttttatgttatattcgaccgat

SEQ ID NO: 123866 - DNA, 25 bp, Probe sequence
ttttatgttatattcgaccgatgtt

SEQ ID NO: 123867 - DNA, 25 bp, Probe sequence
attcgagatatgttgcaacgctcgt

SEQ ID NO: 123868 - DNA, 25 bp, Probe sequence
atgttgcaacgctcgtttaaagtca

SEQ ID NO: 123869 - DNA, 25 bp, Probe sequence
acaattcgagatatgttgcaacgct

SEQ ID NO: 123870 - DNA, 25 bp, Probe sequence
aagctcctttacaattcgagatatg

SEQ ID NO: 123871 - DNA, 25 bp, Probe sequence
caacgctcgtttaaagtcaatttgt

SEQ ID NO: 123872 - DNA, 25 bp, Probe sequence
gctcctttacaattcgagatatgtt

SEQ ID NO: 123873 - DNA, 25 bp, Probe sequence
gcaacgctcgtttaaagtcaatttg

SEQ ID NO: 123874 - DNA, 25 bp, Probe sequence
gagatatgttgcaacgctcgtttaa

SEQ ID NO: 123875 - DNA, 25 bp, Probe sequence
gatatgttgcaacgctcgtttaaag

SEQ ID NO: 123876 - DNA, 25 bp, Probe sequence
gttgcaacgctcgtttaaagtcaat

SEQ ID NO: 123877 - DNA, 25 bp, Probe sequence
tgcaacgctcgtttaaagtcaattt

SEQ ID NO: 123878 - DNA, 25 bp, Probe sequence
tcaagctcctttacaattcgagata

SEQ ID NO: 123879 - DNA, 25 bp, Probe sequence
tatgttgcaacgctcgtttaaagtc

SEQ ID NO: 123880 - DNA, 25 bp, Probe sequence
tttcaagctcctttacaattcgaga

SEQ ID NO: 123881 - DNA, 25 bp, Probe sequence
ttcaagctcctttacaattcgagat

SEQ ID NO: 123882 - DNA, 25 bp, Probe sequence
atcactctttaaaaaatcaacttca

SEQ ID NO: 123883 - DNA, 25 bp, Probe sequence
atgtaaccgttttcttaatcactct

SEQ ID NO: 123884 - DNA, 25 bp, Probe sequence
aaaatcaacttcacgaatgaattga

SEQ ID NO: 123885 - DNA, 25 bp, Probe sequence
aacttcacgaatgaattgatgatac

SEQ ID NO: 123886 - DNA, 25 bp, Probe sequence
aattcagtatatttagttggttatg

SEQ ID NO: 123887 - DNA, 25 bp, Probe sequence
cactctttaaaaaatcaacttcacg

SEQ ID NO: 123888 - DNA, 25 bp, Probe sequence
ctttaaaaaatcaacttcacgaatg

SEQ ID NO: 123889 - DNA, 25 bp, Probe sequence
gtatatttagttggttatgtaaccg

SEQ ID NO: 123890 - DNA, 25 bp, Probe sequence
tgtaaccgttttcttaatcactctt

SEQ ID NO: 123891 - DNA, 25 bp, Probe sequence
tcactctttaaaaaatcaacttcac

SEQ ID NO: 123892 - DNA, 25 bp, Probe sequence
tcaacttcacgaatgaattgatgat

SEQ ID NO: 123893 - DNA, 25 bp, Probe sequence
taatcactctttaaaaaatcaactt

SEQ ID NO: 123894 - DNA, 25 bp, Probe sequence
taaaaaatcaacttcacgaatgaat

SEQ ID NO: 123895 - DNA, 25 bp, Probe sequence
tatgtaaccgttttcttaatcactc

SEQ ID NO: 123896 - DNA, 25 bp, Probe sequence
ttcagtatatttagttggttatgta

SEQ ID NO: 123897 - DNA, 25 bp, Probe sequence
attattagcgattagttcccctatt

SEQ ID NO: 123898 - DNA, 25 bp, Probe sequence
atacatgaattgactcatttattta

SEQ ID NO: 123899 - DNA, 25 bp, Probe sequence
aactcaatatcacgcaattaaaatt

SEQ ID NO: 123900 - DNA, 25 bp, Probe sequence
aatctttcactttattatgtattgt

SEQ ID NO: 123901 - DNA, 25 bp, Probe sequence
gcttaaaactcaatatcacgcaatt

SEQ ID NO: 123902 - DNA, 25 bp, Probe sequence
gaaaatatatggcggaatggtgaac

SEQ ID NO: 123903 - DNA, 25 bp, Probe sequence
gagtatatttggaactagtaatgta

SEQ ID NO: 123904 - DNA, 25 bp, Probe sequence
gatacacatttactatatacatttt

SEQ ID NO: 123905 - DNA, 25 bp, Probe sequence
gtatctagatacacatttactatat

SEQ ID NO: 123906 - DNA, 25 bp, Probe sequence
ggcggaatggtgaacaattcatgta

SEQ ID NO: 123907 - DNA, 25 bp, Probe sequence
tgactttttaggattattttggtct

SEQ ID NO: 123908 - DNA, 25 bp, Probe sequence
tcatgtatttaaaatctttcacttt

SEQ ID NO: 123909 - DNA, 25 bp, Probe sequence
tagcgattagttcccctattattta

SEQ ID NO: 123910 - DNA, 25 bp, Probe sequence
tatgcagtcaatcaatgaaacatgt

SEQ ID NO: 123911 - DNA, 25 bp, Probe sequence
ttagttcccctattatttatgacaa

SEQ ID NO: 123912 - DNA, 25 bp, Probe sequence
atttttacctatagactagtttgat

SEQ ID NO: 123913 - DNA, 25 bp, Probe sequence
atcaacaatctttcacatccaacat

SEQ ID NO: 123914 - DNA, 25 bp, Probe sequence
atctttcacatccaacatttttact

SEQ ID NO: 123915 - DNA, 25 bp, Probe sequence
caaacattatttgagacattctttt

SEQ ID NO: 123916 - DNA, 25 bp, Probe sequence
ctacatctcaaaattctcatcaaca

SEQ ID NO: 123917 - DNA, 25 bp, Probe sequence
gactagtttgatatttatctacatc

SEQ ID NO: 123918 - DNA, 25 bp, Probe sequence
gagacattcttttcaaattaattat

SEQ ID NO: 123919 - DNA, 25 bp, Probe sequence
gtatgacacctgctaattcaaacat

SEQ ID NO: 123920 - DNA, 25 bp, Probe sequence
tgatatttagttaattgttctttta

SEQ ID NO: 123921 - DNA, 25 bp, Probe sequence
tgacacctgctaattcaaacattat

SEQ ID NO: 123922 - DNA, 25 bp, Probe sequence
tcacatccaacatttttactttagt

SEQ ID NO: 123923 - DNA, 25 bp, Probe sequence
tacttagtatgacacctgctaattc

SEQ ID NO: 123924 - DNA, 25 bp, Probe sequence
tattatattttcattgtaaacgttt

SEQ ID NO: 123925 - DNA, 25 bp, Probe sequence
ttatctacatctcaaaattctcatc

SEQ ID NO: 123926 - DNA, 25 bp, Probe sequence
ttctcatcaacaatctttcacatcc

SEQ ID NO: 123927 - DNA, 25 bp, Probe sequence
agcccataatatattaaaacgtcat

SEQ ID NO: 123928 - DNA, 25 bp, Probe sequence
accattccgcattaactttggcaag

SEQ ID NO: 123929 - DNA, 25 bp, Probe sequence
acgtcatttttatttcaattagcgg

SEQ ID NO: 123930 - DNA, 25 bp, Probe sequence
acaaaccacctagcccataatatat

SEQ ID NO: 123931 - DNA, 25 bp, Probe sequence
aaaccacctagcccataatatatta

SEQ ID NO: 123932 - DNA, 25 bp, Probe sequence
aaaccattccgcattaactttggca

SEQ ID NO: 123933 - DNA, 25 bp, Probe sequence
aaccattccgcattaactttggcaa

SEQ ID NO: 123934 - DNA, 25 bp, Probe sequence
aaccacctagcccataatatattaa

SEQ ID NO: 123935 - DNA, 25 bp, Probe sequence
caaaccacctagcccataatatatt

SEQ ID NO: 123936 - DNA, 25 bp, Probe sequence
cattccgcattaactttggcaagtt

SEQ ID NO: 123937 - DNA, 25 bp, Probe sequence
ccacctagcccataatatattaaaa

SEQ ID NO: 123938 - DNA, 25 bp, Probe sequence
gtcatttttatttcaattagcggaa

SEQ ID NO: 123939 - DNA, 25 bp, Probe sequence
tccgcattaactttggcaagttgga

SEQ ID NO: 123940 - DNA, 25 bp, Probe sequence
taaactcaaatttccttaattcata

SEQ ID NO: 123941 - DNA, 25 bp, Probe sequence
tacaaaccacctagcccataatata

SEQ ID NO: 123942 - DNA, 25 bp, Probe sequence
acattgtcaatcgcgtctaataccc

SEQ ID NO: 123943 - DNA, 25 bp, Probe sequence
acattacgtttaattaaccagacat

SEQ ID NO: 123944 - DNA, 25 bp, Probe sequence
aaaactttgcacctaatattcatcg

SEQ ID NO: 123945 - DNA, 25 bp, Probe sequence
aaccagacattgtcaatcgcgtcta

SEQ ID NO: 123946 - DNA, 25 bp, Probe sequence
aattattttgtattcatatttatct

SEQ ID NO: 123947 - DNA, 25 bp, Probe sequence
ctttgcacctaatattcatcgctta

SEQ ID NO: 123948 - DNA, 25 bp, Probe sequence
ccctgctgtccgaatacaaaattat

SEQ ID NO: 123949 - DNA, 25 bp, Probe sequence
gcaactaaatttcttttaccattag

SEQ ID NO: 123950 - DNA, 25 bp, Probe sequence
gtattcatatttatctgttctcttt

SEQ ID NO: 123951 - DNA, 25 bp, Probe sequence
tgcacctaatattcatcgcttaaat

SEQ ID NO: 123952 - DNA, 25 bp, Probe sequence
tcatatttatctgttctctttcctc

SEQ ID NO: 123953 - DNA, 25 bp, Probe sequence
tcatcgcttaaataaacattacgtt

SEQ ID NO: 123954 - DNA, 25 bp, Probe sequence
taaacctcaattacattcaaattca

SEQ ID NO: 123955 - DNA, 25 bp, Probe sequence
tacccctgctgtccgaatacaaaat

SEQ ID NO: 123956 - DNA, 25 bp, Probe sequence
ttcaaattcaaaaactttgcaccta

SEQ ID NO: 123957 - DNA, 25 bp, Probe sequence
attgctaaacgattatgacgctaaa

SEQ ID NO: 123958 - DNA, 25 bp, Probe sequence
attccattgtcatgtattgctaaac

SEQ ID NO: 123959 - DNA, 25 bp, Probe sequence
attaataaatattccattgtcatgt

SEQ ID NO: 123960 - DNA, 25 bp, Probe sequence
atattccattgtcatgtattgctaa

SEQ ID NO: 123961 - DNA, 25 bp, Probe sequence
ataacttactacaaatactgaaaat

SEQ ID NO: 123962 - DNA, 25 bp, Probe sequence
agaaaacatctgtataacttactac

SEQ ID NO: 123963 - DNA, 25 bp, Probe sequence
aaatattccattgtcatgtattgct

SEQ ID NO: 123964 - DNA, 25 bp, Probe sequence
aacatctgtataacttactacaaat

SEQ ID NO: 123965 - DNA, 25 bp, Probe sequence
aacgattatgacgctaaaaaggaat

SEQ ID NO: 123966 - DNA, 25 bp, Probe sequence
cattgtcatgtattgctaaacgatt

SEQ ID NO: 123967 - DNA, 25 bp, Probe sequence
gctaaacgattatgacgctaaaaag

SEQ ID NO: 123968 - DNA, 25 bp, Probe sequence
gatcgtaaaatctaaactaaggaga

SEQ ID NO: 123969 - DNA, 25 bp, Probe sequence
gtattgctaaacgattatgacgcta

SEQ ID NO: 123970 - DNA, 25 bp, Probe sequence
tccattgtcatgtattgctaaacga

SEQ ID NO: 123971 - DNA, 25 bp, Probe sequence
ttgtcatgtattgctaaacgattat

SEQ ID NO: 123972 - DNA, 25 bp, Probe sequence
attgaaataattgcactttgttgat

SEQ ID NO: 123973 - DNA, 25 bp, Probe sequence
attgcactttgttgattatttaatc

SEQ ID NO: 123974 - DNA, 25 bp, Probe sequence
aatttagcaccctgctatttagcaa

SEQ ID NO: 123975 - DNA, 25 bp, Probe sequence
caaagtaatctacatttccctaact

SEQ ID NO: 123976 - DNA, 25 bp, Probe sequence
ctttcgtaaatttagcaccctgcta

SEQ ID NO: 123977 - DNA, 25 bp, Probe sequence
tgttagttctttaattccgtttgat

SEQ ID NO: 123978 - DNA, 25 bp, Probe sequence
tctaaataattctactttcgtaaat

SEQ ID NO: 123979 - DNA, 25 bp, Probe sequence
tctttaattccgtttgataattgaa

SEQ ID NO: 123980 - DNA, 25 bp, Probe sequence
tactttcgtaaatttagcaccctgc

SEQ ID NO: 123981 - DNA, 25 bp, Probe sequence
tagcaaagtaatctacatttcccta

SEQ ID NO: 123982 - DNA, 25 bp, Probe sequence
tagcaccctgctatttagcaaagta

SEQ ID NO: 123983 - DNA, 25 bp, Probe sequence
tagttctttaattccgtttgataat

SEQ ID NO: 123984 - DNA, 25 bp, Probe sequence
tatgttagttctttaattccgtttg

SEQ ID NO: 123985 - DNA, 25 bp, Probe sequence
tttccctaactaaaaattatcatgt

SEQ ID NO: 123986 - DNA, 25 bp, Probe sequence
ttggaagtttctaaataattctact

SEQ ID NO: 123987 - DNA, 25 bp, Probe sequence
attctagattatttcacttatttat

SEQ ID NO: 123988 - DNA, 25 bp, Probe sequence
atttatgatgctgaaaaccggtcat

SEQ ID NO: 123989 - DNA, 25 bp, Probe sequence
atttattctagattatttcacttat

SEQ ID NO: 123990 - DNA, 25 bp, Probe sequence
acaatttattcatttatgatgctga

SEQ ID NO: 123991 - DNA, 25 bp, Probe sequence
aatttattctagattatttcactta

SEQ ID NO: 123992 - DNA, 25 bp, Probe sequence
catttatgatgctgaaaaccggtca

SEQ ID NO: 123993 - DNA, 25 bp, Probe sequence
ctagattatttcacttatttataaa

SEQ ID NO: 123994 - DNA, 25 bp, Probe sequence
gatacaatttattcatttatgatgc

SEQ ID NO: 123995 - DNA, 25 bp, Probe sequence
gattatttcacttatttataaaatt

SEQ ID NO: 123996 - DNA, 25 bp, Probe sequence
tgatacaatttattcatttatgatg

SEQ ID NO: 123997 - DNA, 25 bp, Probe sequence
tcatttatgatgctgaaaaccggtc

SEQ ID NO: 123998 - DNA, 25 bp, Probe sequence
tattctagattatttcacttattta

SEQ ID NO: 123999 - DNA, 25 bp, Probe sequence
tttattctagattatttcacttatt

SEQ ID NO: 124000 - DNA, 25 bp, Probe sequence
ttattctagattatttcacttattt

SEQ ID NO: 124001 - DNA, 25 bp, Probe sequence
ttctagattatttcacttatttata

SEQ ID NO: 124002 - DNA, 25 bp, Probe sequence
agcttctactctcatggcaatttat

SEQ ID NO: 124003 - DNA, 25 bp, Probe sequence
acattcgcatgtacttcgttttact

SEQ ID NO: 124004 - DNA, 25 bp, Probe sequence
aaactgaagcttctactctcatggc

SEQ ID NO: 124005 - DNA, 25 bp, Probe sequence
aaaaccatgatttcgaagtcttcat

SEQ ID NO: 124006 - DNA, 25 bp, Probe sequence
aactgattattaactattgtccgtt

SEQ ID NO: 124007 - DNA, 25 bp, Probe sequence
aatcttctatatatcatttcgtaat

SEQ ID NO: 124008 - DNA, 25 bp, Probe sequence
aattgatgatatacacttttggttg

SEQ ID NO: 124009 - DNA, 25 bp, Probe sequence
catttcgtaatatcgctagcttcat

SEQ ID NO: 124010 - DNA, 25 bp, Probe sequence
ctgtccacgcatggtcgttgactta

SEQ ID NO: 124011 - DNA, 25 bp, Probe sequence
gcctagtctcatagtaaacggctac

SEQ ID NO: 124012 - DNA, 25 bp, Probe sequence
gtaaacggctactacattcgcatgt

SEQ ID NO: 124013 - DNA, 25 bp, Probe sequence
ggagaggattacttcgtatactgtt

SEQ ID NO: 124014 - DNA, 25 bp, Probe sequence
tgtacttcgttttactgtccacgca

SEQ ID NO: 124015 - DNA, 25 bp, Probe sequence
tgaactacatctttaaatcttatta

SEQ ID NO: 124016 - DNA, 25 bp, Probe sequence
tattcaattataatgcctagtctca

SEQ ID NO: 124017 - DNA, 25 bp, Probe sequence
atatgttcataccattttgcaaata

SEQ ID NO: 124018 - DNA, 25 bp, Probe sequence
acgcgaatacgatttaacactctca

SEQ ID NO: 124019 - DNA, 25 bp, Probe sequence
aacatagtcccctgttcatattctt

SEQ ID NO: 124020 - DNA, 25 bp, Probe sequence
aaccagatactctcaacaaaatgta

SEQ ID NO: 124021 - DNA, 25 bp, Probe sequence
aatactgggtcattcaatcattaag

SEQ ID NO: 124022 - DNA, 25 bp, Probe sequence
cactctcaatcttctcgaactgaat

SEQ ID NO: 124023 - DNA, 25 bp, Probe sequence
cccctgttcatattcttcaatcttt

SEQ ID NO: 124024 - DNA, 25 bp, Probe sequence
gaatcgtctacacatagttaaacaa

SEQ ID NO: 124025 - DNA, 25 bp, Probe sequence
gaaaatttcgaaacagcttaagata

SEQ ID NO: 124026 - DNA, 25 bp, Probe sequence
gataatgcagaatcgtctacacata

SEQ ID NO: 124027 - DNA, 25 bp, Probe sequence
gtaaactaacatagtcccctgttca

SEQ ID NO: 124028 - DNA, 25 bp, Probe sequence
gtggataggcgattttattttgaca

SEQ ID NO: 124029 - DNA, 25 bp, Probe sequence
tgcaaatataaccagatactctcaa

SEQ ID NO: 124030 - DNA, 25 bp, Probe sequence
ttaacactctcaatcttctcgaact

SEQ ID NO: 124031 - DNA, 25 bp, Probe sequence
ttcttcaatctttaaatcttatcga

SEQ ID NO: 124032 - DNA, 25 bp, Probe sequence
attaatgcattgtactaaagtttca

SEQ ID NO: 124033 - DNA, 25 bp, Probe sequence
atttcacgctatttccattaaatta

SEQ ID NO: 124034 - DNA, 25 bp, Probe sequence
atgaatgaatcgtatacacttaggt

SEQ ID NO: 124035 - DNA, 25 bp, Probe sequence
agcggagaatgaatgatatctttat

SEQ ID NO: 124036 - DNA, 25 bp, Probe sequence
aaaactatcgattcacatataaata

SEQ ID NO: 124037 - DNA, 25 bp, Probe sequence
ctatttccattaaattagcggagaa

SEQ ID NO: 124038 - DNA, 25 bp, Probe sequence
gaatatttcacgctatttccattaa

SEQ ID NO: 124039 - DNA, 25 bp, Probe sequence
gaatctgaatatttcacgctatttc

SEQ ID NO: 124040 - DNA, 25 bp, Probe sequence
gaatcgtatacacttaggtagtcaa

SEQ ID NO: 124041 - DNA, 25 bp, Probe sequence
gaatgaatgatatctttatactaat

SEQ ID NO: 124042 - DNA, 25 bp, Probe sequence
gtatacacttaggtagtcaaatcta

SEQ ID NO: 124043 - DNA, 25 bp, Probe sequence
tgtactaaagtttcaattattttat

SEQ ID NO: 124044 - DNA, 25 bp, Probe sequence
tgctcttttaagaatctgaatattt

SEQ ID NO: 124045 - DNA, 25 bp, Probe sequence
tctgaatatttcacgctatttccat

SEQ ID NO: 124046 - DNA, 25 bp, Probe sequence
taattttaaaactatcgattcacat

SEQ ID NO: 124047 - DNA, 25 bp, Probe sequence
attaaattatcatttccactggaga

SEQ ID NO: 124048 - DNA, 25 bp, Probe sequence
agttcgaaaaacgcactttatgatt

SEQ ID NO: 124049 - DNA, 25 bp, Probe sequence
acaattcattgtatttccgttaaat

SEQ ID NO: 124050 - DNA, 25 bp, Probe sequence
aaactaactatttacatgaatctat

SEQ ID NO: 124051 - DNA, 25 bp, Probe sequence
aaaacgcactttatgattgtatagt

SEQ ID NO: 124052 - DNA, 25 bp, Probe sequence
aaaatacatttaaaagcacgtcatt

SEQ ID NO: 124053 - DNA, 25 bp, Probe sequence
aacggagaattcggattacctagat

SEQ ID NO: 124054 - DNA, 25 bp, Probe sequence
gcatttttaaaccgctattgacata

SEQ ID NO: 124055 - DNA, 25 bp, Probe sequence
gtcattttcaaaccgccataaaaca

SEQ ID NO: 124056 - DNA, 25 bp, Probe sequence
ggattacctagatagatttacctct

SEQ ID NO: 124057 - DNA, 25 bp, Probe sequence
tgtacattcttaaacaatcataaat

SEQ ID NO: 124058 - DNA, 25 bp, Probe sequence
tccactggagaatcatgtcgactaa

SEQ ID NO: 124059 - DNA, 25 bp, Probe sequence
tcaaaccgccataaaacagcatttt

SEQ ID NO: 124060 - DNA, 25 bp, Probe sequence
taaaagcacgtcattttcaaaccgc

SEQ ID NO: 124061 - DNA, 25 bp, Probe sequence
tagatttacctctagagtgttaaaa

SEQ ID NO: 124062 - DNA, 25 bp, Probe sequence
attcaaatcattttcctctcataaa

SEQ ID NO: 124063 - DNA, 25 bp, Probe sequence
acaaataattttgaatccgtattca

SEQ ID NO: 124064 - DNA, 25 bp, Probe sequence
aaacctcctctaacttattcagtct

SEQ ID NO: 124065 - DNA, 25 bp, Probe sequence
aaaattctatttatcattattacta

SEQ ID NO: 124066 - DNA, 25 bp, Probe sequence
aatggtttaatttcatgattcagtt

SEQ ID NO: 124067 - DNA, 25 bp, Probe sequence
aattcacgcttatagatagttcagg

SEQ ID NO: 124068 - DNA, 25 bp, Probe sequence
cagtctatttgacaatgaaccttat

SEQ ID NO: 124069 - DNA, 25 bp, Probe sequence
ctacaattcaaatcattttcctctc

SEQ ID NO: 124070 - DNA, 25 bp, Probe sequence
ctcctctaacttattcagtctattt

SEQ ID NO: 124071 - DNA, 25 bp, Probe sequence
gaaccttattataaattcacgctta

SEQ ID NO: 124072 - DNA, 25 bp, Probe sequence
gatagttcaggttgtagtgtgtcga

SEQ ID NO: 124073 - DNA, 25 bp, Probe sequence
gattcagttgataatcatcaatcac

SEQ ID NO: 124074 - DNA, 25 bp, Probe sequence
gtagtgtgtcgatagcattgtttta

SEQ ID NO: 124075 - DNA, 25 bp, Probe sequence
gtgtcgatagcattgttttaaaact

SEQ ID NO: 124076 - DNA, 25 bp, Probe sequence
ttttcctctcataaaatggtttaat

SEQ ID NO: 124077 - DNA, 25 bp, Probe sequence
atatttaacgtacacattagcccta

SEQ ID NO: 124078 - DNA, 25 bp, Probe sequence
atttaacgtacacattagccctaga

SEQ ID NO: 124079 - DNA, 25 bp, Probe sequence
atttcgtataaattcgcattttagt

SEQ ID NO: 124080 - DNA, 25 bp, Probe sequence
acgtacacattagccctagagactt

SEQ ID NO: 124081 - DNA, 25 bp, Probe sequence
acagggaatatttaacgtacacatt

SEQ ID NO: 124082 - DNA, 25 bp, Probe sequence
acacattagccctagagactttaaa

SEQ ID NO: 124083 - DNA, 25 bp, Probe sequence
aacgtacacattagccctagagact

SEQ ID NO: 124084 - DNA, 25 bp, Probe sequence
cattagccctagagactttaaaatt

SEQ ID NO: 124085 - DNA, 25 bp, Probe sequence
cgtacacattagccctagagacttt

SEQ ID NO: 124086 - DNA, 25 bp, Probe sequence
gaatatttaacgtacacattagccc

SEQ ID NO: 124087 - DNA, 25 bp, Probe sequence
gtataaattcgcattttagtgttaa

SEQ ID NO: 124088 - DNA, 25 bp, Probe sequence
gtacacattagccctagagacttta

SEQ ID NO: 124089 - DNA, 25 bp, Probe sequence
tttaacgtacacattagccctagag

SEQ ID NO: 124090 - DNA, 25 bp, Probe sequence
tttataaatttgatgtattacaggg

SEQ ID NO: 124091 - DNA, 25 bp, Probe sequence
ttaacgtacacattagccctagaga

SEQ ID NO: 124092 - DNA, 25 bp, Probe sequence
atcccacttatatattattactcgt

SEQ ID NO: 124093 - DNA, 25 bp, Probe sequence
agttctttataggattgtaagttga

SEQ ID NO: 124094 - DNA, 25 bp, Probe sequence
aaccaattcttcttaaatcatcatg

SEQ ID NO: 124095 - DNA, 25 bp, Probe sequence
aatctggttttgttatctatactaa

SEQ ID NO: 124096 - DNA, 25 bp, Probe sequence
aatcatcatgattctatcccactta

SEQ ID NO: 124097 - DNA, 25 bp, Probe sequence
catgattctatcccacttatatatt

SEQ ID NO: 124098 - DNA, 25 bp, Probe sequence
ctattcgttcttcatcatttactaa

SEQ ID NO: 124099 - DNA, 25 bp, Probe sequence
gaatcactattcgttcttcatcatt

SEQ ID NO: 124100 - DNA, 25 bp, Probe sequence
gttagatttgaatcactattcgttc

SEQ ID NO: 124101 - DNA, 25 bp, Probe sequence
tctctatctttattatcttttattg

SEQ ID NO: 124102 - DNA, 25 bp, Probe sequence
tactcgttaatctggttttgttatc

SEQ ID NO: 124103 - DNA, 25 bp, Probe sequence
tatgttaatatctatagttctttat

SEQ ID NO: 124104 - DNA, 25 bp, Probe sequence
tatatttaaacttctctatctttat

SEQ ID NO: 124105 - DNA, 25 bp, Probe sequence
ttcatcatttactaagctactttgt

SEQ ID NO: 124106 - DNA, 25 bp, Probe sequence
ttgatatccatcaactttcagattg

SEQ ID NO: 124107 - DNA, 25 bp, Probe sequence
atcctacttactattgaacaaacaa

SEQ ID NO: 124108 - DNA, 25 bp, Probe sequence
acttaacaatcctacttactattga

SEQ ID NO: 124109 - DNA, 25 bp, Probe sequence
aacaatcctacttactattgaacaa

SEQ ID NO: 124110 - DNA, 25 bp, Probe sequence
aacttaacaatcctacttactattg

SEQ ID NO: 124111 - DNA, 25 bp, Probe sequence
aatcctacttactattgaacaaaca

SEQ ID NO: 124112 - DNA, 25 bp, Probe sequence
aattttaaattaagtgactcagata

SEQ ID NO: 124113 - DNA, 25 bp, Probe sequence
cctacttactattgaacaaacaaat

SEQ ID NO: 124114 - DNA, 25 bp, Probe sequence
gactcagataatagacaaaaaacct

SEQ ID NO: 124115 - DNA, 25 bp, Probe sequence
taagtgactcagataatagacaaaa

SEQ ID NO: 124116 - DNA, 25 bp, Probe sequence
taacaatcctacttactattgaaca

SEQ ID NO: 124117 - DNA, 25 bp, Probe sequence
taaacttaacaatcctacttactat

SEQ ID NO: 124118 - DNA, 25 bp, Probe sequence
tagcgcttaaaatgggtaaaaccat

SEQ ID NO: 124119 - DNA, 25 bp, Probe sequence
tattattagattacgattttaaact

SEQ ID NO: 124120 - DNA, 25 bp, Probe sequence
tttaatctttaaatattcactaata

SEQ ID NO: 124121 - DNA, 25 bp, Probe sequence
ttaacaatcctacttactattgaac

SEQ ID NO: 124122 - DNA, 25 bp, Probe sequence
atataattataatctttttcactaa

SEQ ID NO: 124123 - DNA, 25 bp, Probe sequence
ataagtgtctaatagttgtcataat

SEQ ID NO: 124124 - DNA, 25 bp, Probe sequence
atgcctacacctctaaactattaaa

SEQ ID NO: 124125 - DNA, 25 bp, Probe sequence
aaattttataatgcctacacctcta

SEQ ID NO: 124126 - DNA, 25 bp, Probe sequence
aacacaatacatagcaaccaaacat

SEQ ID NO: 124127 - DNA, 25 bp, Probe sequence
aatatcgtagcaacatgttctctgt

SEQ ID NO: 124128 - DNA, 25 bp, Probe sequence
gcttcttcttcccttttataatata

SEQ ID NO: 124129 - DNA, 25 bp, Probe sequence
gcttcgtactgacacacataacaca

SEQ ID NO: 124130 - DNA, 25 bp, Probe sequence
gcaacatgttctctgttgaacacaa

SEQ ID NO: 124131 - DNA, 25 bp, Probe sequence
gacacacataacacaatacatagca

SEQ ID NO: 124132 - DNA, 25 bp, Probe sequence
gttgtcataattactcatgaactat

SEQ ID NO: 124133 - DNA, 25 bp, Probe sequence
gtagtgtacgtcaacgacattttga

SEQ ID NO: 124134 - DNA, 25 bp, Probe sequence
gtgctatgcttcgtactgacacaca

SEQ ID NO: 124135 - DNA, 25 bp, Probe sequence
tatattcatttttgtagtgtacgtc

SEQ ID NO: 124136 - DNA, 25 bp, Probe sequence
ttcactaaagtgctatgcttcgtac

SEQ ID NO: 124137 - DNA, 25 bp, Probe sequence
atgactgattacctataattgtaaa

SEQ ID NO: 124138 - DNA, 25 bp, Probe sequence
actgattacctataattgtaaaata

SEQ ID NO: 124139 - DNA, 25 bp, Probe sequence
aaatgactgattacctataattgta

SEQ ID NO: 124140 - DNA, 25 bp, Probe sequence
aaaaatgactgattacctataattg

SEQ ID NO: 124141 - DNA, 25 bp, Probe sequence
aaaaaatgactgattacctataatt

SEQ ID NO: 124142 - DNA, 25 bp, Probe sequence
aaaaaaatgactgattacctataat

SEQ ID NO: 124143 - DNA, 25 bp, Probe sequence
aaaatgactgattacctataattgt

SEQ ID NO: 124144 - DNA, 25 bp, Probe sequence
aatgactgattacctataattgtaa

SEQ ID NO: 124145 - DNA, 25 bp, Probe sequence
gactgattacctataattgtaaaat

SEQ ID NO: 124146 - DNA, 25 bp, Probe sequence
tgactgattacctataattgtaaaa

SEQ ID NO: 124147 - DNA, 25 bp, Probe sequence
tcaacttactacttcttttctattt

SEQ ID NO: 124148 - DNA, 25 bp, Probe sequence
taaaaaaatgactgattacctataa

SEQ ID NO: 124149 - DNA, 25 bp, Probe sequence
tttcaacttactacttcttttctat

SEQ ID NO: 124150 - DNA, 25 bp, Probe sequence
ttaaaaaaatgactgattacctata

SEQ ID NO: 124151 - DNA, 25 bp, Probe sequence
ttcaacttactacttcttttctatt

SEQ ID NO: 124152 - DNA, 25 bp, Probe sequence
attatctttcatgtgcttcaatgta

SEQ ID NO: 124153 - DNA, 25 bp, Probe sequence
ataccttcctttaaatgaattatct

SEQ ID NO: 124154 - DNA, 25 bp, Probe sequence
atctttcatgtgcttcaatgtaata

SEQ ID NO: 124155 - DNA, 25 bp, Probe sequence
aattatctttcatgtgcttcaatgt

SEQ ID NO: 124156 - DNA, 25 bp, Probe sequence
catgtgcttcaatgtaatactatga

SEQ ID NO: 124157 - DNA, 25 bp, Probe sequence
ctttcatgtgcttcaatgtaatact

SEQ ID NO: 124158 - DNA, 25 bp, Probe sequence
gaattatctttcatgtgcttcaatg

SEQ ID NO: 124159 - DNA, 25 bp, Probe sequence
gataataccttcctttaaatgaatt

SEQ ID NO: 124160 - DNA, 25 bp, Probe sequence
tgataataccttcctttaaatgaat

SEQ ID NO: 124161 - DNA, 25 bp, Probe sequence
tctttcatgtgcttcaatgtaatac

SEQ ID NO: 124162 - DNA, 25 bp, Probe sequence
taataccttcctttaaatgaattat

SEQ ID NO: 124163 - DNA, 25 bp, Probe sequence
taccttcctttaaatgaattatctt

SEQ ID NO: 124164 - DNA, 25 bp, Probe sequence
tatctttcatgtgcttcaatgtaat

SEQ ID NO: 124165 - DNA, 25 bp, Probe sequence
ttatctttcatgtgcttcaatgtaa

SEQ ID NO: 124166 - DNA, 25 bp, Probe sequence
ttcatgtgcttcaatgtaatactat

SEQ ID NO: 124167 - DNA, 25 bp, Probe sequence
attacttctaaatatctcgcaagat

SEQ ID NO: 124168 - DNA, 25 bp, Probe sequence
atcattacttctaaatatctcgcaa

SEQ ID NO: 124169 - DNA, 25 bp, Probe sequence
atctcgcaagattcattatagtaat

SEQ ID NO: 124170 - DNA, 25 bp, Probe sequence
acttctaaatatctcgcaagattca

SEQ ID NO: 124171 - DNA, 25 bp, Probe sequence
aaagtccattattttgtatcattac

SEQ ID NO: 124172 - DNA, 25 bp, Probe sequence
aattctaaagtccattattttgtat

SEQ ID NO: 124173 - DNA, 25 bp, Probe sequence
cattattttgtatcattacttctaa

SEQ ID NO: 124174 - DNA, 25 bp, Probe sequence
ctcgcaagattcattatagtaattt

SEQ ID NO: 124175 - DNA, 25 bp, Probe sequence
gtatcattacttctaaatatctcgc

SEQ ID NO: 124176 - DNA, 25 bp, Probe sequence
gtaatgactagtttatcatcgtata

SEQ ID NO: 124177 - DNA, 25 bp, Probe sequence
gtccattattttgtatcattacttc

SEQ ID NO: 124178 - DNA, 25 bp, Probe sequence
gtggtaatgactagtttatcatcgt

SEQ ID NO: 124179 - DNA, 25 bp, Probe sequence
tgactagtttatcatcgtataataa

SEQ ID NO: 124180 - DNA, 25 bp, Probe sequence
tctaaagtccattattttgtatcat

SEQ ID NO: 124181 - DNA, 25 bp, Probe sequence
taaatatctcgcaagattcattata

SEQ ID NO: 124182 - DNA, 25 bp, Probe sequence
attacatgcacctttacaacataca

SEQ ID NO: 124183 - DNA, 25 bp, Probe sequence
atgctgttaacgtatagatgctaat

SEQ ID NO: 124184 - DNA, 25 bp, Probe sequence
atgcacctttacaacatacatgcca

SEQ ID NO: 124185 - DNA, 25 bp, Probe sequence
acctttacaacatacatgccaatgg

SEQ ID NO: 124186 - DNA, 25 bp, Probe sequence
caacatacatgccaatggaagtttt

SEQ ID NO: 124187 - DNA, 25 bp, Probe sequence
caacattacatgcacctttacaaca

SEQ ID NO: 124188 - DNA, 25 bp, Probe sequence
cttccattggttatgctgttaacgt

SEQ ID NO: 124189 - DNA, 25 bp, Probe sequence
gccgtatcatttggcgttcaacatt

SEQ ID NO: 124190 - DNA, 25 bp, Probe sequence
gctaatgtaatctgaacgccgtatc

SEQ ID NO: 124191 - DNA, 25 bp, Probe sequence
gaaaacttccattggttatgctgtt

SEQ ID NO: 124192 - DNA, 25 bp, Probe sequence
gatgctaatgtaatctgaacgccgt

SEQ ID NO: 124193 - DNA, 25 bp, Probe sequence
gttcaacattacatgcacctttaca

SEQ ID NO: 124194 - DNA, 25 bp, Probe sequence
gtatcatttggcgttcaacattaca

SEQ ID NO: 124195 - DNA, 25 bp, Probe sequence
gtaatctgaacgccgtatcatttgg

SEQ ID NO: 124196 - DNA, 25 bp, Probe sequence
ggcgttcaacattacatgcaccttt

SEQ ID NO: 124197 - DNA, 25 bp, Probe sequence
atcgaatttttagcgacaatgttat

SEQ ID NO: 124198 - DNA, 25 bp, Probe sequence
aggcacctccatgacttatattgta

SEQ ID NO: 124199 - DNA, 25 bp, Probe sequence
agcgacaatgttataatgaatggta

SEQ ID NO: 124200 - DNA, 25 bp, Probe sequence
acacatgtcctaatatcgaattttt

SEQ ID NO: 124201 - DNA, 25 bp, Probe sequence
aaggcacctccatgacttatattgt

SEQ ID NO: 124202 - DNA, 25 bp, Probe sequence
aatgctcatattaaatacacatgtc

SEQ ID NO: 124203 - DNA, 25 bp, Probe sequence
aatacacatgtcctaatatcgaatt

SEQ ID NO: 124204 - DNA, 25 bp, Probe sequence
cacctccatgacttatattgtacca

SEQ ID NO: 124205 - DNA, 25 bp, Probe sequence
ctagttgaaaaggagtgtagtcatc

SEQ ID NO: 124206 - DNA, 25 bp, Probe sequence
cctccatgacttatattgtaccaaa

SEQ ID NO: 124207 - DNA, 25 bp, Probe sequence
gcacctccatgacttatattgtacc

SEQ ID NO: 124208 - DNA, 25 bp, Probe sequence
gtaccaaaaattataaaatgctcat

SEQ ID NO: 124209 - DNA, 25 bp, Probe sequence
gtcctaatatcgaatttttagcgac

SEQ ID NO: 124210 - DNA, 25 bp, Probe sequence
ggcacctccatgacttatattgtac

SEQ ID NO: 124211 - DNA, 25 bp, Probe sequence
tccatgacttatattgtaccaaaaa

SEQ ID NO: 124212 - DNA, 25 bp, Probe sequence
cttaatctaagctcgaacgggtata

SEQ ID NO: 124213 - DNA, 25 bp, Probe sequence
atattataacaattgcgtttgaagt

SEQ ID NO: 124214 - DNA, 25 bp, Probe sequence
atctaagctcgaacgggtataatat

SEQ ID NO: 124215 - DNA, 25 bp, Probe sequence
atgtatgcttaatctaagctcgaac

SEQ ID NO: 124216 - DNA, 25 bp, Probe sequence
acatcaaggttagcaattttaaaca

SEQ ID NO: 124217 - DNA, 25 bp, Probe sequence
aacagatgttaaaagtgaggagaat

SEQ ID NO: 124218 - DNA, 25 bp, Probe sequence
aagctcgaacgggtataatatgatt

SEQ ID NO: 124219 - DNA, 25 bp, Probe sequence
aattgcgtttgaagtgataacatca

SEQ ID NO: 124220 - DNA, 25 bp, Probe sequence
gcttaatctaagctcgaacgggtat

SEQ ID NO: 124221 - DNA, 25 bp, Probe sequence
gctcgaacgggtataatatgattaa

SEQ ID NO: 124222 - DNA, 25 bp, Probe sequence
gaagtgataacatcaaggttagcaa

SEQ ID NO: 124223 - DNA, 25 bp, Probe sequence
gataacatcaaggttagcaatttta

SEQ ID NO: 124224 - DNA, 25 bp, Probe sequence
gtatgcttaatctaagctcgaacgg

SEQ ID NO: 124225 - DNA, 25 bp, Probe sequence
taatctaagctcgaacgggtataat

SEQ ID NO: 124226 - DNA, 25 bp, Probe sequence
taacaattgcgtttgaagtgataac

SEQ ID NO: 124227 - DNA, 25 bp, Probe sequence
acgttctcgatcacaactattttta

SEQ ID NO: 124228 - DNA, 25 bp, Probe sequence
acgttacgttctcgatcacaactat

SEQ ID NO: 124229 - DNA, 25 bp, Probe sequence
cacgttacgttctcgatcacaacta

SEQ ID NO: 124230 - DNA, 25 bp, Probe sequence
ctatttttattagtaacagcatatt

SEQ ID NO: 124231 - DNA, 25 bp, Probe sequence
cgttctcgatcacaactatttttat

SEQ ID NO: 124232 - DNA, 25 bp, Probe sequence
cgttacgttctcgatcacaactatt

SEQ ID NO: 124233 - DNA, 25 bp, Probe sequence
gccaaataaacgagatgacattaga

SEQ ID NO: 124234 - DNA, 25 bp, Probe sequence
gatcacaactatttttattagtaac

SEQ ID NO: 124235 - DNA, 25 bp, Probe sequence
gttacgttctcgatcacaactattt

SEQ ID NO: 124236 - DNA, 25 bp, Probe sequence
tctcgatcacaactatttttattag

SEQ ID NO: 124237 - DNA, 25 bp, Probe sequence
taaatgccaaataaacgagatgaca

SEQ ID NO: 124238 - DNA, 25 bp, Probe sequence
tacgttctcgatcacaactattttt

SEQ ID NO: 124239 - DNA, 25 bp, Probe sequence
tttattagtaacagcatatttattt

SEQ ID NO: 124240 - DNA, 25 bp, Probe sequence
ttacgttctcgatcacaactatttt

SEQ ID NO: 124241 - DNA, 25 bp, Probe sequence
ttctcgatcacaactatttttatta

SEQ ID NO: 124242 - DNA, 25 bp, Probe sequence
atcagccaattttaccaatctccac

SEQ ID NO: 124243 - DNA, 25 bp, Probe sequence
agatgtgttcgcagaaatttgttct

SEQ ID NO: 124244 - DNA, 25 bp, Probe sequence
acgctttacttatatcattatcgac

SEQ ID NO: 124245 - DNA, 25 bp, Probe sequence
acttctacgctagtcaatcagccaa

SEQ ID NO: 124246 - DNA, 25 bp, Probe sequence
aagatgcttttgcatatgccctgcc

SEQ ID NO: 124247 - DNA, 25 bp, Probe sequence
aatcaaacaatacgtgtctcccctt

SEQ ID NO: 124248 - DNA, 25 bp, Probe sequence
cacacgcgcctttttcataagtgat

SEQ ID NO: 124249 - DNA, 25 bp, Probe sequence
catacttatattttcattgagccga

SEQ ID NO: 124250 - DNA, 25 bp, Probe sequence
ctccactttcgcgtttcaaatcaaa

SEQ ID NO: 124251 - DNA, 25 bp, Probe sequence
gagccgaaccttatatacacattac

SEQ ID NO: 124252 - DNA, 25 bp, Probe sequence
gttatccttgcactttgattacgct

SEQ ID NO: 124253 - DNA, 25 bp, Probe sequence
tctcccctttcttcttatataacaa

SEQ ID NO: 124254 - DNA, 25 bp, Probe sequence
tttgttctgcattctacttctacgc

SEQ ID NO: 124255 - DNA, 25 bp, Probe sequence
ttacatataccttacttgcacaaat

SEQ ID NO: 124256 - DNA, 25 bp, Probe sequence
ttcaaatactcatgtcacacgcgcc

SEQ ID NO: 124257 - DNA, 25 bp, Probe sequence
atagcaaggtgttattatttgtttt

SEQ ID NO: 124258 - DNA, 25 bp, Probe sequence
atcaaatgtatatagaccttgtttt

SEQ ID NO: 124259 - DNA, 25 bp, Probe sequence
aaaactatgttatattcacgatgat

SEQ ID NO: 124260 - DNA, 25 bp, Probe sequence
aacctaatgctctagtctgatgtca

SEQ ID NO: 124261 - DNA, 25 bp, Probe sequence
aatgctctagtctgatgtcatgggt

SEQ ID NO: 124262 - DNA, 25 bp, Probe sequence
cccctaaacctaatgctctagtctg

SEQ ID NO: 124263 - DNA, 25 bp, Probe sequence
gctctagtctgatgtcatgggttat

SEQ ID NO: 124264 - DNA, 25 bp, Probe sequence
gatgtcatgggttattgattggtga

SEQ ID NO: 124265 - DNA, 25 bp, Probe sequence
gttattatttgtttttaggctatgt

SEQ ID NO: 124266 - DNA, 25 bp, Probe sequence
ggctatgtaatagcttacaatcaaa

SEQ ID NO: 124267 - DNA, 25 bp, Probe sequence
tgtatatagaccttgtttttttatt

SEQ ID NO: 124268 - DNA, 25 bp, Probe sequence
tcaatttctacccctaaacctaatg

SEQ ID NO: 124269 - DNA, 25 bp, Probe sequence
tctacccctaaacctaatgctctag

SEQ ID NO: 124270 - DNA, 25 bp, Probe sequence
tacccctaaacctaatgctctagtc

SEQ ID NO: 124271 - DNA, 25 bp, Probe sequence
tattcacgatgattaacttacaaag

SEQ ID NO: 124272 - DNA, 25 bp, Probe sequence
atgtttcagtatactcatctgtccg

SEQ ID NO: 124273 - DNA, 25 bp, Probe sequence
agaggagctcatgtttcagtatact

SEQ ID NO: 124274 - DNA, 25 bp, Probe sequence
agcgaccgtggttcaaaaatcatac

SEQ ID NO: 124275 - DNA, 25 bp, Probe sequence
cacaaaaccgagcgaccgtggttca

SEQ ID NO: 124276 - DNA, 25 bp, Probe sequence
aatcggacagaggagctcatgtttc

SEQ ID NO: 124277 - DNA, 25 bp, Probe sequence
cagtatactcatctgtccgatatct

SEQ ID NO: 124278 - DNA, 25 bp, Probe sequence
cggacagaggagctcatgtttcagt

SEQ ID NO: 124279 - DNA, 25 bp, Probe sequence
ccgagcgaccgtggttcaaaaatca

SEQ ID NO: 124280 - DNA, 25 bp, Probe sequence
gagctcatgtttcagtatactcatc

SEQ ID NO: 124281 - DNA, 25 bp, Probe sequence
gtatactcatctgtccgatatcttt

SEQ ID NO: 124282 - DNA, 25 bp, Probe sequence
tcatctgtccgatatcttttaattc

SEQ ID NO: 124283 - DNA, 25 bp, Probe sequence
ttcaaaaatcataccacggccgctc

SEQ ID NO: 124284 - DNA, 25 bp, Probe sequence
tactcatctgtccgatatcttttaa

SEQ ID NO: 124285 - DNA, 25 bp, Probe sequence
tttcgcattaaaaatcggacagagg

SEQ ID NO: 124286 - DNA, 25 bp, Probe sequence
tttcagtatactcatctgtccgata

SEQ ID NO: 124287 - DNA, 25 bp, Probe sequence
attgagacacatttataacagttta

SEQ ID NO: 124288 - DNA, 25 bp, Probe sequence
atattcatacttataggtgtagtga

SEQ ID NO: 124289 - DNA, 25 bp, Probe sequence
atccaactatacaaagcattctaat

SEQ ID NO: 124290 - DNA, 25 bp, Probe sequence
accataatacgcttcatatcgtcga

SEQ ID NO: 124291 - DNA, 25 bp, Probe sequence
acatccatatctccttaattaaagg

SEQ ID NO: 124292 - DNA, 25 bp, Probe sequence
aaggttctaacatcaattttgcaaa

SEQ ID NO: 124293 - DNA, 25 bp, Probe sequence
aattttgcaaaatccaactatacaa

SEQ ID NO: 124294 - DNA, 25 bp, Probe sequence
gcattctaatcactatattcatact

SEQ ID NO: 124295 - DNA, 25 bp, Probe sequence
gtcaaatcgtgatgttttatttatt

SEQ ID NO: 124296 - DNA, 25 bp, Probe sequence
ggtgtagtgattcattagctgattt

SEQ ID NO: 124297 - DNA, 25 bp, Probe sequence
tcttcattttaccataatacgcttc

SEQ ID NO: 124298 - DNA, 25 bp, Probe sequence
taaagtgctttagtcaaatcgtgat

SEQ ID NO: 124299 - DNA, 25 bp, Probe sequence
tacgcttcatatcgtcgatgaacat

SEQ ID NO: 124300 - DNA, 25 bp, Probe sequence
tattaaaaccagtcgccatttttat

SEQ ID NO: 124301 - DNA, 25 bp, Probe sequence
ttattatttcttcattttaccataa

SEQ ID NO: 124302 - DNA, 25 bp, Probe sequence
atcagtccgatacatgaccgaacta

SEQ ID NO: 124303 - DNA, 25 bp, Probe sequence
atcattgcacttaatacgccaaaca

SEQ ID NO: 124304 - DNA, 25 bp, Probe sequence
atgtcaaaactatcattgcacttaa

SEQ ID NO: 124305 - DNA, 25 bp, Probe sequence
aagtgaaacgcttttccatcagtcc

SEQ ID NO: 124306 - DNA, 25 bp, Probe sequence
caaacattttcaggccgttcttaat

SEQ ID NO: 124307 - DNA, 25 bp, Probe sequence
gaagttaggacacgtttactagcct

SEQ ID NO: 124308 - DNA, 25 bp, Probe sequence
gaaaactttacacttcaaaatgcaa

SEQ ID NO: 124309 - DNA, 25 bp, Probe sequence
gatttgctcggcagtaatgaccaat

SEQ ID NO: 124310 - DNA, 25 bp, Probe sequence
gatttacatgattactctactagat

SEQ ID NO: 124311 - DNA, 25 bp, Probe sequence
tgctcggcagtaatgaccaattaga

SEQ ID NO: 124312 - DNA, 25 bp, Probe sequence
tccgatacatgaccgaactaatagt

SEQ ID NO: 124313 - DNA, 25 bp, Probe sequence
tcaggccgttcttaatgagtcatta

SEQ ID NO: 124314 - DNA, 25 bp, Probe sequence
tactctactagatttgctcggcagt

SEQ ID NO: 124315 - DNA, 25 bp, Probe sequence
tacgccaaacattttcaggccgttc

SEQ ID NO: 124316 - DNA, 25 bp, Probe sequence
ttccatcagtccgatacatgaccga

SEQ ID NO: 124317 - DNA, 25 bp, Probe sequence
atctgcccgttttggcatagagcta

SEQ ID NO: 124318 - DNA, 25 bp, Probe sequence
aacttccgttatcaagctcatctgc

SEQ ID NO: 124319 - DNA, 25 bp, Probe sequence
ctgcccgttttggcatagagctagc

SEQ ID NO: 124320 - DNA, 25 bp, Probe sequence
cgtcgtccattctgagctaaagcta

SEQ ID NO: 124321 - DNA, 25 bp, Probe sequence
gcccgttttggcatagagctagcca

SEQ ID NO: 124322 - DNA, 25 bp, Probe sequence
gctcatctgcccgttttggcataga

SEQ ID NO: 124323 - DNA, 25 bp, Probe sequence
gctagccatgtttgattgcccagct

SEQ ID NO: 124324 - DNA, 25 bp, Probe sequence
gagctagccatgtttgattgcccag

SEQ ID NO: 124325 - DNA, 25 bp, Probe sequence
gtcgtccattctgagctaaagctag

SEQ ID NO: 124326 - DNA, 25 bp, Probe sequence
ggcatagagctagccatgtttgatt

SEQ ID NO: 124327 - DNA, 25 bp, Probe sequence
tccattctgagctaaagctaggaca

SEQ ID NO: 124328 - DNA, 25 bp, Probe sequence
tcgtccattctgagctaaagctagg

SEQ ID NO: 124329 - DNA, 25 bp, Probe sequence
tcatctgcccgttttggcatagagc

SEQ ID NO: 124330 - DNA, 25 bp, Probe sequence
tagagctagccatgtttgattgccc

SEQ ID NO: 124331 - DNA, 25 bp, Probe sequence
tagccatgtttgattgcccagcttc

SEQ ID NO: 124332 - DNA, 25 bp, Probe sequence
tattcctctatttaaaggattgaaa

SEQ ID NO: 124333 - DNA, 25 bp, Probe sequence
agtctattcctctatttaaaggatt

SEQ ID NO: 124334 - DNA, 25 bp, Probe sequence
acccacaaagtctcggactctgtcg

SEQ ID NO: 124335 - DNA, 25 bp, Probe sequence
cacaaagtctcggactctgtcggca

SEQ ID NO: 124336 - DNA, 25 bp, Probe sequence
cagtctattcctctatttaaaggat

SEQ ID NO: 124337 - DNA, 25 bp, Probe sequence
ctacccacaaagtctcggactctgt

SEQ ID NO: 124338 - DNA, 25 bp, Probe sequence
ctattcctctatttaaaggattgaa

SEQ ID NO: 124339 - DNA, 25 bp, Probe sequence
cggcagtctattcctctatttaaag

SEQ ID NO: 124340 - DNA, 25 bp, Probe sequence
cccacaaagtctcggactctgtcgg

SEQ ID NO: 124341 - DNA, 25 bp, Probe sequence
ccacaaagtctcggactctgtcggc

SEQ ID NO: 124342 - DNA, 25 bp, Probe sequence
gcagtctattcctctatttaaagga

SEQ ID NO: 124343 - DNA, 25 bp, Probe sequence
gtctattcctctatttaaaggattg

SEQ ID NO: 124344 - DNA, 25 bp, Probe sequence
ggcagtctattcctctatttaaagg

SEQ ID NO: 124345 - DNA, 25 bp, Probe sequence
tctattcctctatttaaaggattga

SEQ ID NO: 124346 - DNA, 25 bp, Probe sequence
tacccacaaagtctcggactctgtc

SEQ ID NO: 124347 - DNA, 25 bp, Probe sequence
atagcactcctttgttgtgatgttt

SEQ ID NO: 124348 - DNA, 25 bp, Probe sequence
agcactcctttgttgtgatgtttat

SEQ ID NO: 124349 - DNA, 25 bp, Probe sequence
acgttcgatattactttaccacatc

SEQ ID NO: 124350 - DNA, 25 bp, Probe sequence
actcctttgttgtgatgtttattaa

SEQ ID NO: 124351 - DNA, 25 bp, Probe sequence
aacgttcgatattactttaccacat

SEQ ID NO: 124352 - DNA, 25 bp, Probe sequence
cgatattactttaccacatctcgct

SEQ ID NO: 124353 - DNA, 25 bp, Probe sequence
gcactcctttgttgtgatgtttatt

SEQ ID NO: 124354 - DNA, 25 bp, Probe sequence
gttcgatattactttaccacatctc

SEQ ID NO: 124355 - DNA, 25 bp, Probe sequence
gttatagcactcctttgttgtgatg

SEQ ID NO: 124356 - DNA, 25 bp, Probe sequence
gtgatgtttattaaaacgttcgata

SEQ ID NO: 124357 - DNA, 25 bp, Probe sequence
ggttatagcactcctttgttgtgat

SEQ ID NO: 124358 - DNA, 25 bp, Probe sequence
tcgatattactttaccacatctcgc

SEQ ID NO: 124359 - DNA, 25 bp, Probe sequence
tagcactcctttgttgtgatgttta

SEQ ID NO: 124360 - DNA, 25 bp, Probe sequence
tatagcactcctttgttgtgatgtt

SEQ ID NO: 124361 - DNA, 25 bp, Probe sequence
ttcgatattactttaccacatctcg

SEQ ID NO: 124362 - DNA, 25 bp, Probe sequence
atacaaaaagcgatgcctcacctct

SEQ ID NO: 124363 - DNA, 25 bp, Probe sequence
atgcctcacctctcgaaacaggtgt

SEQ ID NO: 124364 - DNA, 25 bp, Probe sequence
aaacaggtgtgttacatcgctttta

SEQ ID NO: 124365 - DNA, 25 bp, Probe sequence
aattttgactcctttgtgacaacat

SEQ ID NO: 124366 - DNA, 25 bp, Probe sequence
gacaacatagttattcattatacca

SEQ ID NO: 124367 - DNA, 25 bp, Probe sequence
gactcctttgtgacaacatagttat

SEQ ID NO: 124368 - DNA, 25 bp, Probe sequence
gttacatcgcttttattatttatta

SEQ ID NO: 124369 - DNA, 25 bp, Probe sequence
gttattcattataccactattttta

SEQ ID NO: 124370 - DNA, 25 bp, Probe sequence
ggtgtgttacatcgcttttattatt

SEQ ID NO: 124371 - DNA, 25 bp, Probe sequence
tctgctcaatttattattagtttac

SEQ ID NO: 124372 - DNA, 25 bp, Probe sequence
tcattaatcatttcactttctgctc

SEQ ID NO: 124373 - DNA, 25 bp, Probe sequence
tcattataccactatttttattttt

SEQ ID NO: 124374 - DNA, 25 bp, Probe sequence
tcatttcactttctgctcaatttat

SEQ ID NO: 124375 - DNA, 25 bp, Probe sequence
taatcatttcactttctgctcaatt

SEQ ID NO: 124376 - DNA, 25 bp, Probe sequence
ttcactttctgctcaatttattatt

SEQ ID NO: 124377 - DNA, 25 bp, Probe sequence
atttcttgaaacacagattacatct

SEQ ID NO: 124378 - DNA, 25 bp, Probe sequence
accctatcgctataaaaaattcatc

SEQ ID NO: 124379 - DNA, 25 bp, Probe sequence
actagatttgataaaacttacactt

SEQ ID NO: 124380 - DNA, 25 bp, Probe sequence
aaattgtctatttttcgacaaatat

SEQ ID NO: 124381 - DNA, 25 bp, Probe sequence
aacttacacttttataatgatatca

SEQ ID NO: 124382 - DNA, 25 bp, Probe sequence
aactgtataataaaccctatcgcta

SEQ ID NO: 124383 - DNA, 25 bp, Probe sequence
aagagtcaatttcacatttgtatta

SEQ ID NO: 124384 - DNA, 25 bp, Probe sequence
aattttatgcacaatcactagattt

SEQ ID NO: 124385 - DNA, 25 bp, Probe sequence
aattgcaataatacacatttcttga

SEQ ID NO: 124386 - DNA, 25 bp, Probe sequence
gatcaagtcaacaagagttaagttt

SEQ ID NO: 124387 - DNA, 25 bp, Probe sequence
gttaagtttactttataatgaagcg

SEQ ID NO: 124388 - DNA, 25 bp, Probe sequence
tctgttatctacctttctgtttggg

SEQ ID NO: 124389 - DNA, 25 bp, Probe sequence
tatctacctttctgtttggggaatt

SEQ ID NO: 124390 - DNA, 25 bp, Probe sequence
ttttatccggacacaagaaattgca

SEQ ID NO: 124391 - DNA, 25 bp, Probe sequence
ttggggaattttatccggacacaag

SEQ ID NO: 124392 - DNA, 25 bp, Probe sequence
atttttaaatcttagacgtgaacat

SEQ ID NO: 124393 - DNA, 25 bp, Probe sequence
atatttaggagaactgatttgtgat

SEQ ID NO: 124394 - DNA, 25 bp, Probe sequence
atacattgagttattatatttttaa

SEQ ID NO: 124395 - DNA, 25 bp, Probe sequence
aaatggccttgattactcaatagtt

SEQ ID NO: 124396 - DNA, 25 bp, Probe sequence
aatcgctccaattcatttttacgtg

SEQ ID NO: 124397 - DNA, 25 bp, Probe sequence
caaatcgctccaattcatttttacg

SEQ ID NO: 124398 - DNA, 25 bp, Probe sequence
catttttacgtgtattaactattat

SEQ ID NO: 124399 - DNA, 25 bp, Probe sequence
gctccaattcatttttacgtgtatt

SEQ ID NO: 124400 - DNA, 25 bp, Probe sequence
gaactgatttgtgatatgatattaa

SEQ ID NO: 124401 - DNA, 25 bp, Probe sequence
gacgtgaacatgataaaatggcctt

SEQ ID NO: 124402 - DNA, 25 bp, Probe sequence
gataaaatggccttgattactcaat

SEQ ID NO: 124403 - DNA, 25 bp, Probe sequence
gattactcaatagttatatttagga

SEQ ID NO: 124404 - DNA, 25 bp, Probe sequence
ggccttgattactcaatagttatat

SEQ ID NO: 124405 - DNA, 25 bp, Probe sequence
tccaattcatttttacgtgtattaa

SEQ ID NO: 124406 - DNA, 25 bp, Probe sequence
tcgctccaattcatttttacgtgta

SEQ ID NO: 124407 - DNA, 25 bp, Probe sequence
atctatggacaatacatgacatcat

SEQ ID NO: 124408 - DNA, 25 bp, Probe sequence
atccttggataatgacttgtagtct

SEQ ID NO: 124409 - DNA, 25 bp, Probe sequence
aggttgtttggccaatacatgtaca

SEQ ID NO: 124410 - DNA, 25 bp, Probe sequence
acatgcaataccgcattgtaactaa

SEQ ID NO: 124411 - DNA, 25 bp, Probe sequence
aactgcgttacgtgtatctatggac

SEQ ID NO: 124412 - DNA, 25 bp, Probe sequence
aagtttttccttttcatggctctat

SEQ ID NO: 124413 - DNA, 25 bp, Probe sequence
catggctctatatcaaatcggactt

SEQ ID NO: 124414 - DNA, 25 bp, Probe sequence
gatgcttaggattttatattttgat

SEQ ID NO: 124415 - DNA, 25 bp, Probe sequence
gatttttatcacaggttgtttggcc

SEQ ID NO: 124416 - DNA, 25 bp, Probe sequence
gtagtctttttcaactgcgttacgt

SEQ ID NO: 124417 - DNA, 25 bp, Probe sequence
tgaacactataatgcccaaacttta

SEQ ID NO: 124418 - DNA, 25 bp, Probe sequence
tattaattttttcagatgttcggtt

SEQ ID NO: 124419 - DNA, 25 bp, Probe sequence
tattcattttataacatccttggat

SEQ ID NO: 124420 - DNA, 25 bp, Probe sequence
ttttgttttttacgatgcttaggat

SEQ ID NO: 124421 - DNA, 25 bp, Probe sequence
ttctataataaaacggactccatga

SEQ ID NO: 124422 - DNA, 25 bp, Probe sequence
attacagtgatacggtcatacgatt

SEQ ID NO: 124423 - DNA, 25 bp, Probe sequence
atcactgtttatttaactgtagtat

SEQ ID NO: 124424 - DNA, 25 bp, Probe sequence
atctatcattatttagttattgttg

SEQ ID NO: 124425 - DNA, 25 bp, Probe sequence
accctttattacagtgatacggtca

SEQ ID NO: 124426 - DNA, 25 bp, Probe sequence
aactgtagtatatcattaaataatt

SEQ ID NO: 124427 - DNA, 25 bp, Probe sequence
aatacactaatcgcacgtactcacc

SEQ ID NO: 124428 - DNA, 25 bp, Probe sequence
cacgtactcaccctttattacagtg

SEQ ID NO: 124429 - DNA, 25 bp, Probe sequence
gatacggtcatacgattagtgtgtt

SEQ ID NO: 124430 - DNA, 25 bp, Probe sequence
gattagtgtgttatctatcattatt

SEQ ID NO: 124431 - DNA, 25 bp, Probe sequence
gtactcaccctttattacagtgata

SEQ ID NO: 124432 - DNA, 25 bp, Probe sequence
gtgtgttatctatcattatttagtt

SEQ ID NO: 124433 - DNA, 25 bp, Probe sequence
ggtcatacgattagtgtgttatcta

SEQ ID NO: 124434 - DNA, 25 bp, Probe sequence
tgattaaaacgttttcataatttga

SEQ ID NO: 124435 - DNA, 25 bp, Probe sequence
tccccttatcactgtttatttaact

SEQ ID NO: 124436 - DNA, 25 bp, Probe sequence
tctccccttatcactgtttatttaa

SEQ ID NO: 124437 - DNA, 25 bp, Probe sequence
attactgatagatgacttctttcaa

SEQ ID NO: 124438 - DNA, 25 bp, Probe sequence
atttcattcttcaatagcatatcat

SEQ ID NO: 124439 - DNA, 25 bp, Probe sequence
ataaatctcctctaatttcattctt

SEQ ID NO: 124440 - DNA, 25 bp, Probe sequence
atctcctctaatttcattcttcaat

SEQ ID NO: 124441 - DNA, 25 bp, Probe sequence
agcatatcataatcttggcatatta

SEQ ID NO: 124442 - DNA, 25 bp, Probe sequence
actgatagatgacttctttcaatta

SEQ ID NO: 124443 - DNA, 25 bp, Probe sequence
aaatattactgatagatgacttctt

SEQ ID NO: 124444 - DNA, 25 bp, Probe sequence
aatctcctctaatttcattcttcaa

SEQ ID NO: 124445 - DNA, 25 bp, Probe sequence
aatagcatatcataatcttggcata

SEQ ID NO: 124446 - DNA, 25 bp, Probe sequence
aatatataaatctcctctaatttca

SEQ ID NO: 124447 - DNA, 25 bp, Probe sequence
ctctaatttcattcttcaatagcat

SEQ ID NO: 124448 - DNA, 25 bp, Probe sequence
tcctctaatttcattcttcaatagc

SEQ ID NO: 124449 - DNA, 25 bp, Probe sequence
tctcctctaatttcattcttcaata

SEQ ID NO: 124450 - DNA, 25 bp, Probe sequence
taagaaacgcggtttaatgatttca

SEQ ID NO: 124451 - DNA, 25 bp, Probe sequence
ttggcatattaagaaacgcggttta

SEQ ID NO: 124452 - DNA, 25 bp, Probe sequence
atcctatttgatatatgttctatac

SEQ ID NO: 124453 - DNA, 25 bp, Probe sequence
atgctacctaacttcatattcaaga

SEQ ID NO: 124454 - DNA, 25 bp, Probe sequence
acctaacttcatattcaagataatc

SEQ ID NO: 124455 - DNA, 25 bp, Probe sequence
aaatgctacctaacttcatattcaa

SEQ ID NO: 124456 - DNA, 25 bp, Probe sequence
aaaatgctacctaacttcatattca

SEQ ID NO: 124457 - DNA, 25 bp, Probe sequence
aacaaaatgctacctaacttcatat

SEQ ID NO: 124458 - DNA, 25 bp, Probe sequence
aatgctacctaacttcatattcaag

SEQ ID NO: 124459 - DNA, 25 bp, Probe sequence
aataactgaatattacacaattata

SEQ ID NO: 124460 - DNA, 25 bp, Probe sequence
caatcctatttgatatatgttctat

SEQ ID NO: 124461 - DNA, 25 bp, Probe sequence
caaaatgctacctaacttcatattc

SEQ ID NO: 124462 - DNA, 25 bp, Probe sequence
gctacctaacttcatattcaagata

SEQ ID NO: 124463 - DNA, 25 bp, Probe sequence
gatatatgttctatactatacatta

SEQ ID NO: 124464 - DNA, 25 bp, Probe sequence
gttctatactatacattatttacat

SEQ ID NO: 124465 - DNA, 25 bp, Probe sequence
gtaacaaaatgctacctaacttcat

SEQ ID NO: 124466 - DNA, 25 bp, Probe sequence
tattcaagataatcaatcctatttg

SEQ ID NO: 124467 - DNA, 25 bp, Probe sequence
attataccctaactttcaatatatc

SEQ ID NO: 124468 - DNA, 25 bp, Probe sequence
atagcacttaagtatcatttttata

SEQ ID NO: 124469 - DNA, 25 bp, Probe sequence
ataccctaactttcaatatatcaaa

SEQ ID NO: 124470 - DNA, 25 bp, Probe sequence
actcctcttagtttgcattttacat

SEQ ID NO: 124471 - DNA, 25 bp, Probe sequence
acactcctcttagtttgcattttac

SEQ ID NO: 124472 - DNA, 25 bp, Probe sequence
ctacactcctcttagtttgcatttt

SEQ ID NO: 124473 - DNA, 25 bp, Probe sequence
cctcttagtttgcattttacataaa

SEQ ID NO: 124474 - DNA, 25 bp, Probe sequence
ggttatactctaaatatagcactta

SEQ ID NO: 124475 - DNA, 25 bp, Probe sequence
tctacactcctcttagtttgcattt

SEQ ID NO: 124476 - DNA, 25 bp, Probe sequence
taattattataccctaactttcaat

SEQ ID NO: 124477 - DNA, 25 bp, Probe sequence
tcaatatatcaaaccatttaacttt

SEQ ID NO: 124478 - DNA, 25 bp, Probe sequence
taactttcaatatatcaaaccattt

SEQ ID NO: 124479 - DNA, 25 bp, Probe sequence
tttctacactcctcttagtttgcat

SEQ ID NO: 124480 - DNA, 25 bp, Probe sequence
tttacataaaaacggcgatattaat

SEQ ID NO: 124481 - DNA, 25 bp, Probe sequence
ttaactttaacatggttatactcta

SEQ ID NO: 124482 - DNA, 25 bp, Probe sequence
atatgatataactttgtggtgcgca

SEQ ID NO: 124483 - DNA, 25 bp, Probe sequence
ataactttgtggtgcgcatcatata

SEQ ID NO: 124484 - DNA, 25 bp, Probe sequence
aacacaaccattattcatattgagg

SEQ ID NO: 124485 - DNA, 25 bp, Probe sequence
aactttgtggtgcgcatcatatatt

SEQ ID NO: 124486 - DNA, 25 bp, Probe sequence
catatattcaagcttcgttaggttg

SEQ ID NO: 124487 - DNA, 25 bp, Probe sequence
ctttgtggtgcgcatcatatattca

SEQ ID NO: 124488 - DNA, 25 bp, Probe sequence
gccccccataaaataatactatgtt

SEQ ID NO: 124489 - DNA, 25 bp, Probe sequence
gaggtttcatttcacataattttaa

SEQ ID NO: 124490 - DNA, 25 bp, Probe sequence
gatataactttgtggtgcgcatcat

SEQ ID NO: 124491 - DNA, 25 bp, Probe sequence
gttattttaacacaaccattattca

SEQ ID NO: 124492 - DNA, 25 bp, Probe sequence
gtttcatttcacataattttaataa

SEQ ID NO: 124493 - DNA, 25 bp, Probe sequence
tgtggtgcgcatcatatattcaagc

SEQ ID NO: 124494 - DNA, 25 bp, Probe sequence
tcgtatgccccccataaaataatac

SEQ ID NO: 124495 - DNA, 25 bp, Probe sequence
tatgccccccataaaataatactat

SEQ ID NO: 124496 - DNA, 25 bp, Probe sequence
ttcatattgaggtttcatttcacat

SEQ ID NO: 124497 - DNA, 25 bp, Probe sequence
atatcttattgacagtaacgcctat

SEQ ID NO: 124498 - DNA, 25 bp, Probe sequence
atacgtgaacaaatctcacatttta

SEQ ID NO: 124499 - DNA, 25 bp, Probe sequence
atcaatcaaaaaagcgctactatca

SEQ ID NO: 124500 - DNA, 25 bp, Probe sequence
agccctccctaattaatattcataa

SEQ ID NO: 124501 - DNA, 25 bp, Probe sequence
aaatctcacattttaaaatcaatca

SEQ ID NO: 124502 - DNA, 25 bp, Probe sequence
aaagcgctactatcaatatcttatt

SEQ ID NO: 124503 - DNA, 25 bp, Probe sequence
aaaatccgctattatacgtgaacaa

SEQ ID NO: 124504 - DNA, 25 bp, Probe sequence
aagactgtacataaaaaatccgcta

SEQ ID NO: 124505 - DNA, 25 bp, Probe sequence
aatacattttgatgcaatagtgttt

SEQ ID NO: 124506 - DNA, 25 bp, Probe sequence
cttattcttgtcatcaagctatcaa

SEQ ID NO: 124507 - DNA, 25 bp, Probe sequence
gacagtaacgcctatatttatcata

SEQ ID NO: 124508 - DNA, 25 bp, Probe sequence
gtaacgcctatatttatcatatatt

SEQ ID NO: 124509 - DNA, 25 bp, Probe sequence
tacagccctccctaattaatattca

SEQ ID NO: 124510 - DNA, 25 bp, Probe sequence
tattaaaacttattcttgtcatcaa

SEQ ID NO: 124511 - DNA, 25 bp, Probe sequence
ttatacagccctccctaattaatat

SEQ ID NO: 124512 - DNA, 25 bp, Probe sequence
atagcacttttacaaatatattatt

SEQ ID NO: 124513 - DNA, 25 bp, Probe sequence
ataaccccagataatataatcatta

SEQ ID NO: 124514 - DNA, 25 bp, Probe sequence
agataaattgaatcgacttggtata

SEQ ID NO: 124515 - DNA, 25 bp, Probe sequence
actttaacaatgattagttggctaa

SEQ ID NO: 124516 - DNA, 25 bp, Probe sequence
aatcaatgtcatgctaatcttaaaa

SEQ ID NO: 124517 - DNA, 25 bp, Probe sequence
aatactactaattacatcctgtgac

SEQ ID NO: 124518 - DNA, 25 bp, Probe sequence
aatttaaacaatctactcactaatc

SEQ ID NO: 124519 - DNA, 25 bp, Probe sequence
aattacatcctgtgactaataatgt

SEQ ID NO: 124520 - DNA, 25 bp, Probe sequence
gaatcgacttggtataaagcacaat

SEQ ID NO: 124521 - DNA, 25 bp, Probe sequence
gaacattaaactcatcatattatag

SEQ ID NO: 124522 - DNA, 25 bp, Probe sequence
gacctccaatttgaacattaaactc

SEQ ID NO: 124523 - DNA, 25 bp, Probe sequence
gtcatgctaatcttaaaatactact

SEQ ID NO: 124524 - DNA, 25 bp, Probe sequence
tctactcactaatcaatgtcatgct

SEQ ID NO: 124525 - DNA, 25 bp, Probe sequence
ttgaaacaaatatataaccccagat

SEQ ID NO: 124526 - DNA, 25 bp, Probe sequence
ttaatctaaatataacaatccacaa

SEQ ID NO: 124527 - DNA, 25 bp, Probe sequence
attaaagcgtgtgccatttgagtcc

SEQ ID NO: 124528 - DNA, 25 bp, Probe sequence
atttgagtccacttttatggttctt

SEQ ID NO: 124529 - DNA, 25 bp, Probe sequence
agcgtgtgccatttgagtccacttt

SEQ ID NO: 124530 - DNA, 25 bp, Probe sequence
aaagcgtgtgccatttgagtccact

SEQ ID NO: 124531 - DNA, 25 bp, Probe sequence
aagcgtgtgccatttgagtccactt

SEQ ID NO: 124532 - DNA, 25 bp, Probe sequence
cgtgtgccatttgagtccactttta

SEQ ID NO: 124533 - DNA, 25 bp, Probe sequence
gccatttgagtccacttttatggtt

SEQ ID NO: 124534 - DNA, 25 bp, Probe sequence
gagtccacttttatggttcttcatc

SEQ ID NO: 124535 - DNA, 25 bp, Probe sequence
gtgtgccatttgagtccacttttat

SEQ ID NO: 124536 - DNA, 25 bp, Probe sequence
gtgccatttgagtccacttttatgg

SEQ ID NO: 124537 - DNA, 25 bp, Probe sequence
tgtgccatttgagtccacttttatg

SEQ ID NO: 124538 - DNA, 25 bp, Probe sequence
tgagtccacttttatggttcttcat

SEQ ID NO: 124539 - DNA, 25 bp, Probe sequence
tctattaaagcgtgtgccatttgag

SEQ ID NO: 124540 - DNA, 25 bp, Probe sequence
ttaaagcgtgtgccatttgagtcca

SEQ ID NO: 124541 - DNA, 25 bp, Probe sequence
ttgagtccacttttatggttcttca

SEQ ID NO: 124542 - DNA, 25 bp, Probe sequence
aggtttctaataggttatgttatgt

SEQ ID NO: 124543 - DNA, 25 bp, Probe sequence
acttttatttgtattgtatagagag

SEQ ID NO: 124544 - DNA, 25 bp, Probe sequence
aaggtttctaataggttatgttatg

SEQ ID NO: 124545 - DNA, 25 bp, Probe sequence
caaggtttctaataggttatgttat

SEQ ID NO: 124546 - DNA, 25 bp, Probe sequence
cttttatttgtattgtatagagaga

SEQ ID NO: 124547 - DNA, 25 bp, Probe sequence
gtttctaataggttatgttatgtaa

SEQ ID NO: 124548 - DNA, 25 bp, Probe sequence
ggtttctaataggttatgttatgta

SEQ ID NO: 124549 - DNA, 25 bp, Probe sequence
tttacaaggtttctaataggttatg

SEQ ID NO: 124550 - DNA, 25 bp, Probe sequence
tctaataggttatgttatgtaaata

SEQ ID NO: 124551 - DNA, 25 bp, Probe sequence
tacaaggtttctaataggttatgtt

SEQ ID NO: 124552 - DNA, 25 bp, Probe sequence
tttctaataggttatgttatgtaaa

SEQ ID NO: 124553 - DNA, 25 bp, Probe sequence
tttatttgtattgtatagagagaaa

SEQ ID NO: 124554 - DNA, 25 bp, Probe sequence
ttttatttgtattgtatagagagaa

SEQ ID NO: 124555 - DNA, 25 bp, Probe sequence
ttacaaggtttctaataggttatgt

SEQ ID NO: 124556 - DNA, 25 bp, Probe sequence
ttctaataggttatgttatgtaaat

SEQ ID NO: 124557 - DNA, 25 bp, Probe sequence
atacaatatgtcacgttattccgca

SEQ ID NO: 124558 - DNA, 25 bp, Probe sequence
agaagatgttccgaatatatcctta

SEQ ID NO: 124559 - DNA, 25 bp, Probe sequence
acaatatgtcacgttattccgcatc

SEQ ID NO: 124560 - DNA, 25 bp, Probe sequence
aaaactgaatacaatatgtcacgtt

SEQ ID NO: 124561 - DNA, 25 bp, Probe sequence
aactgaatacaatatgtcacgttat

SEQ ID NO: 124562 - DNA, 25 bp, Probe sequence
aatgaacaaacattcaaaactgaat

SEQ ID NO: 124563 - DNA, 25 bp, Probe sequence
aatacaatatgtcacgttattccgc

SEQ ID NO: 124564 - DNA, 25 bp, Probe sequence
aatatgtcacgttattccgcatctt

SEQ ID NO: 124565 - DNA, 25 bp, Probe sequence
caatatgtcacgttattccgcatct

SEQ ID NO: 124566 - DNA, 25 bp, Probe sequence
gttattccgcatcttcttcagaaga

SEQ ID NO: 124567 - DNA, 25 bp, Probe sequence
tcttcttcagaagatgttccgaata

SEQ ID NO: 124568 - DNA, 25 bp, Probe sequence
tcagaagatgttccgaatatatcct

SEQ ID NO: 124569 - DNA, 25 bp, Probe sequence
tacaatatgtcacgttattccgcat

SEQ ID NO: 124570 - DNA, 25 bp, Probe sequence
ttattccgcatcttcttcagaagat

SEQ ID NO: 124571 - DNA, 25 bp, Probe sequence
ttcttcagaagatgttccgaatata

SEQ ID NO: 124572 - DNA, 25 bp, Probe sequence
taattccttacgctttttacttcag

SEQ ID NO: 124573 - DNA, 25 bp, Probe sequence
attagtgccgtttgacgacttttat

SEQ ID NO: 124574 - DNA, 25 bp, Probe sequence
atttcctaactcaattaattcaaca

SEQ ID NO: 124575 - DNA, 25 bp, Probe sequence
agctaacgcttttttaatttgtcat

SEQ ID NO: 124576 - DNA, 25 bp, Probe sequence
acaaacttatactcactttatggat

SEQ ID NO: 124577 - DNA, 25 bp, Probe sequence
acaactttcatgtcgtttaacttct

SEQ ID NO: 124578 - DNA, 25 bp, Probe sequence
aataccacttccgtagttagaatat

SEQ ID NO: 124579 - DNA, 25 bp, Probe sequence
cagttttcaatgttcgtttgtcact

SEQ ID NO: 124580 - DNA, 25 bp, Probe sequence
gcttttttaatttgtcatactacca

SEQ ID NO: 124581 - DNA, 25 bp, Probe sequence
gttcgtttgtcacttacaacattta

SEQ ID NO: 124582 - DNA, 25 bp, Probe sequence
gttagaatattcttttcttcaattt

SEQ ID NO: 124583 - DNA, 25 bp, Probe sequence
ggattattttctattcgtaagtact

SEQ ID NO: 124584 - DNA, 25 bp, Probe sequence
ttatttagtagaccttcgtttgaat

SEQ ID NO: 124585 - DNA, 25 bp, Probe sequence
tattagttaataccacttccgtagt

SEQ ID NO: 124586 - DNA, 25 bp, Probe sequence
taacttcttaaatattacacttact

SEQ ID NO: 124587 - DNA, 25 bp, Probe sequence
attacttactataaatataactgta

SEQ ID NO: 124588 - DNA, 25 bp, Probe sequence
atatcaccatctttcttatataata

SEQ ID NO: 124589 - DNA, 25 bp, Probe sequence
ataactgtagtattgcgcgcgtgtc

SEQ ID NO: 124590 - DNA, 25 bp, Probe sequence
atcaccatctttcttatataataat

SEQ ID NO: 124591 - DNA, 25 bp, Probe sequence
actgtagtattgcgcgcgtgtcaat

SEQ ID NO: 124592 - DNA, 25 bp, Probe sequence
ctatatcaccatctttcttatataa

SEQ ID NO: 124593 - DNA, 25 bp, Probe sequence
gcgcgcgtgtcaatatttacatgat

SEQ ID NO: 124594 - DNA, 25 bp, Probe sequence
gcgcgtgtcaatatttacatgatga

SEQ ID NO: 124595 - DNA, 25 bp, Probe sequence
gtattgcgcgcgtgtcaatatttac

SEQ ID NO: 124596 - DNA, 25 bp, Probe sequence
gtagtattgcgcgcgtgtcaatatt

SEQ ID NO: 124597 - DNA, 25 bp, Probe sequence
gtcaatatttacatgatgatttcat

SEQ ID NO: 124598 - DNA, 25 bp, Probe sequence
gtgtcaatatttacatgatgatttc

SEQ ID NO: 124599 - DNA, 25 bp, Probe sequence
tcaccatctttcttatataataatt

SEQ ID NO: 124600 - DNA, 25 bp, Probe sequence
taactgtagtattgcgcgcgtgtca

SEQ ID NO: 124601 - DNA, 25 bp, Probe sequence
ttgcgcgcgtgtcaatatttacatg

SEQ ID NO: 124602 - DNA, 25 bp, Probe sequence
attttatgatacgatattagatgaa

SEQ ID NO: 124603 - DNA, 25 bp, Probe sequence
ataatcacctttttcttcattataa

SEQ ID NO: 124604 - DNA, 25 bp, Probe sequence
ataattttatgatacgatattagat

SEQ ID NO: 124605 - DNA, 25 bp, Probe sequence
aataattttatgatacgatattaga

SEQ ID NO: 124606 - DNA, 25 bp, Probe sequence
aattttatgatacgatattagatga

SEQ ID NO: 124607 - DNA, 25 bp, Probe sequence
cacctttttcttcattataataatt

SEQ ID NO: 124608 - DNA, 25 bp, Probe sequence
taattttatgatacgatattagatg

SEQ ID NO: 124609 - DNA, 25 bp, Probe sequence
taatcacctttttcttcattataat

SEQ ID NO: 124610 - DNA, 25 bp, Probe sequence
tttatgatacgatattagatgaaaa

SEQ ID NO: 124611 - DNA, 25 bp, Probe sequence
tttttcttcattataataattttat

SEQ ID NO: 124612 - DNA, 25 bp, Probe sequence
ttttatgatacgatattagatgaaa

SEQ ID NO: 124613 - DNA, 25 bp, Probe sequence
ttttcttcattataataattttatg

SEQ ID NO: 124614 - DNA, 25 bp, Probe sequence
ttatgatacgatattagatgaaaat

SEQ ID NO: 124615 - DNA, 25 bp, Probe sequence
atttatactcttttaatctctgact

SEQ ID NO: 124616 - DNA, 25 bp, Probe sequence
atagtagattcattttatatcgtta

SEQ ID NO: 124617 - DNA, 25 bp, Probe sequence
actcttttaatctctgactaaagtt

SEQ ID NO: 124618 - DNA, 25 bp, Probe sequence
acaaatttatactcttttaatctct

SEQ ID NO: 124619 - DNA, 25 bp, Probe sequence
aaagttttacatcgctatcagtatt

SEQ ID NO: 124620 - DNA, 25 bp, Probe sequence
aaacaaatgctcacatagtagattc

SEQ ID NO: 124621 - DNA, 25 bp, Probe sequence
catcgctatcagtattatgtatgat

SEQ ID NO: 124622 - DNA, 25 bp, Probe sequence
gactaaagttttacatcgctatcag

SEQ ID NO: 124623 - DNA, 25 bp, Probe sequence
gttttacatcgctatcagtattatg

SEQ ID NO: 124624 - DNA, 25 bp, Probe sequence
gtcactatgtgagtttttattttac

SEQ ID NO: 124625 - DNA, 25 bp, Probe sequence
tgctcacatagtagattcattttat

SEQ ID NO: 124626 - DNA, 25 bp, Probe sequence
tcattttatatcgttaactattaac

SEQ ID NO: 124627 - DNA, 25 bp, Probe sequence
taacttgatatgtcactatgtgagt

SEQ ID NO: 124628 - DNA, 25 bp, Probe sequence
ttatactcttttaatctctgactaa

SEQ ID NO: 124629 - DNA, 25 bp, Probe sequence
ttaacgtttaacttgatatgtcact

SEQ ID NO: 124630 - DNA, 25 bp, Probe sequence
attcctgtaattaataccacaatga

SEQ ID NO: 124631 - DNA, 25 bp, Probe sequence
atcttccctacaagattgtactgaa

SEQ ID NO: 124632 - DNA, 25 bp, Probe sequence
atctcttactgcttttctatgttat

SEQ ID NO: 124633 - DNA, 25 bp, Probe sequence
atcctgttacaaatcttccctacaa

SEQ ID NO: 124634 - DNA, 25 bp, Probe sequence
atgaagaaaatctcttactgctttt

SEQ ID NO: 124635 - DNA, 25 bp, Probe sequence
aaatctcttactgcttttctatgtt

SEQ ID NO: 124636 - DNA, 25 bp, Probe sequence
caccatcctgttacaaatcttccct

SEQ ID NO: 124637 - DNA, 25 bp, Probe sequence
ctcttactgcttttctatgttatga

SEQ ID NO: 124638 - DNA, 25 bp, Probe sequence
cccaccatcctgttacaaatcttcc

SEQ ID NO: 124639 - DNA, 25 bp, Probe sequence
cctgttacaaatcttccctacaaga

SEQ ID NO: 124640 - DNA, 25 bp, Probe sequence
gcaattcctgtaattaataccacaa

SEQ ID NO: 124641 - DNA, 25 bp, Probe sequence
gtttaaagcaattcctgtaattaat

SEQ ID NO: 124642 - DNA, 25 bp, Probe sequence
gtactgaagtcaaacaactaatact

SEQ ID NO: 124643 - DNA, 25 bp, Probe sequence
taaagtaatattgaatctcgaaatt

SEQ ID NO: 124644 - DNA, 25 bp, Probe sequence
ttccctacaagattgtactgaagtc

SEQ ID NO: 124645 - DNA, 25 bp, Probe sequence
attctattcaatttaatctatggat

SEQ ID NO: 124646 - DNA, 25 bp, Probe sequence
atctatggatactgtgtccccacac

SEQ ID NO: 124647 - DNA, 25 bp, Probe sequence
atctcaacctctgtcatattcatgt

SEQ ID NO: 124648 - DNA, 25 bp, Probe sequence
caacctctgtcatattcatgtgatt

SEQ ID NO: 124649 - DNA, 25 bp, Probe sequence
gttgtcttattcgtatgttatattc

SEQ ID NO: 124650 - DNA, 25 bp, Probe sequence
gttatcatacttctttacatcacta

SEQ ID NO: 124651 - DNA, 25 bp, Probe sequence
gtagatgtaaattcttcttacaatt

SEQ ID NO: 124652 - DNA, 25 bp, Probe sequence
tgccctatcctattcataagcataa

SEQ ID NO: 124653 - DNA, 25 bp, Probe sequence
tccccacacgacagcaaaagttatc

SEQ ID NO: 124654 - DNA, 25 bp, Probe sequence
tctattgccctatcctattcataag

SEQ ID NO: 124655 - DNA, 25 bp, Probe sequence
tcatgtgattaaatacgttgtctta

SEQ ID NO: 124656 - DNA, 25 bp, Probe sequence
taatcagtatttacactttatttgc

SEQ ID NO: 124657 - DNA, 25 bp, Probe sequence
tacttctttacatcactaagtcaat

SEQ ID NO: 124658 - DNA, 25 bp, Probe sequence
tattcgtatgttatattctattcaa

SEQ ID NO: 124659 - DNA, 25 bp, Probe sequence
ttaagatatctcaacctctgtcata

SEQ ID NO: 124660 - DNA, 25 bp, Probe sequence
attataaattatagcatatttcaga

SEQ ID NO: 124661 - DNA, 25 bp, Probe sequence
atttaaccattataaattatagcat

SEQ ID NO: 124662 - DNA, 25 bp, Probe sequence
ataaattatagcatatttcagaaat

SEQ ID NO: 124663 - DNA, 25 bp, Probe sequence
aaattatagcatatttcagaaatag

SEQ ID NO: 124664 - DNA, 25 bp, Probe sequence
aatacatatttttacgaaataagat

SEQ ID NO: 124665 - DNA, 25 bp, Probe sequence
aattatagcatatttcagaaatagt

SEQ ID NO: 124666 - DNA, 25 bp, Probe sequence
caccaccttctgttaatttaaccat

SEQ ID NO: 124667 - DNA, 25 bp, Probe sequence
caccttctgttaatttaaccattat

SEQ ID NO: 124668 - DNA, 25 bp, Probe sequence
cattataaattatagcatatttcag

SEQ ID NO: 124669 - DNA, 25 bp, Probe sequence
tccacaccaccttctgttaatttaa

SEQ ID NO: 124670 - DNA, 25 bp, Probe sequence
taaccattataaattatagcatatt

SEQ ID NO: 124671 - DNA, 25 bp, Probe sequence
taaattatagcatatttcagaaata

SEQ ID NO: 124672 - DNA, 25 bp, Probe sequence
tataaattatagcatatttcagaaa

SEQ ID NO: 124673 - DNA, 25 bp, Probe sequence
ttataaattatagcatatttcagaa

SEQ ID NO: 124674 - DNA, 25 bp, Probe sequence
ttctgttaatttaaccattataaat

SEQ ID NO: 124675 - DNA, 25 bp, Probe sequence
attaatgtcactatgttttccgata

SEQ ID NO: 124676 - DNA, 25 bp, Probe sequence
atgttttccgataatattaccaatc

SEQ ID NO: 124677 - DNA, 25 bp, Probe sequence
atgtcactatgttttccgataatat

SEQ ID NO: 124678 - DNA, 25 bp, Probe sequence
aaattaatgtcactatgttttccga

SEQ ID NO: 124679 - DNA, 25 bp, Probe sequence
aaagatatcatttatacatttttaa

SEQ ID NO: 124680 - DNA, 25 bp, Probe sequence
aatgtcactatgttttccgataata

SEQ ID NO: 124681 - DNA, 25 bp, Probe sequence
aattaatgtcactatgttttccgat

SEQ ID NO: 124682 - DNA, 25 bp, Probe sequence
cactatgttttccgataatattacc

SEQ ID NO: 124683 - DNA, 25 bp, Probe sequence
ctatgttttccgataatattaccaa

SEQ ID NO: 124684 - DNA, 25 bp, Probe sequence
cgataatattaccaatcatcgaatg

SEQ ID NO: 124685 - DNA, 25 bp, Probe sequence
gttttccgataatattaccaatcat

SEQ ID NO: 124686 - DNA, 25 bp, Probe sequence
gtcactatgttttccgataatatta

SEQ ID NO: 124687 - DNA, 25 bp, Probe sequence
taatgtcactatgttttccgataat

SEQ ID NO: 124688 - DNA, 25 bp, Probe sequence
ttaatgtcactatgttttccgataa

SEQ ID NO: 124689 - DNA, 25 bp, Probe sequence
ttccgataatattaccaatcatcga

SEQ ID NO: 124690 - DNA, 25 bp, Probe sequence
accaaaattaattgtctttactcat

SEQ ID NO: 124691 - DNA, 25 bp, Probe sequence
aaatcatggttagtatgtaagttaa

SEQ ID NO: 124692 - DNA, 25 bp, Probe sequence
aatattatgaaatgagtgaactgat

SEQ ID NO: 124693 - DNA, 25 bp, Probe sequence
aattgtctttactcataatgttttt

SEQ ID NO: 124694 - DNA, 25 bp, Probe sequence
caaaattaattgtctttactcataa

SEQ ID NO: 124695 - DNA, 25 bp, Probe sequence
ctttcctcaccaaaattaattgtct

SEQ ID NO: 124696 - DNA, 25 bp, Probe sequence
gtctttactcataatgtttttattg

SEQ ID NO: 124697 - DNA, 25 bp, Probe sequence
tgtaagttaatttagttatttgcga

SEQ ID NO: 124698 - DNA, 25 bp, Probe sequence
tcctcaccaaaattaattgtcttta

SEQ ID NO: 124699 - DNA, 25 bp, Probe sequence
tcaccaaaattaattgtctttactc

SEQ ID NO: 124700 - DNA, 25 bp, Probe sequence
tagttatttgcgaaattggattata

SEQ ID NO: 124701 - DNA, 25 bp, Probe sequence
tttcctcaccaaaattaattgtctt

SEQ ID NO: 124702 - DNA, 25 bp, Probe sequence
ttaattgtctttactcataatgttt

SEQ ID NO: 124703 - DNA, 25 bp, Probe sequence
ttgtacattaaaatcatggttagta

SEQ ID NO: 124704 - DNA, 25 bp, Probe sequence
ttgtctttactcataatgtttttat

SEQ ID NO: 124705 - DNA, 25 bp, Probe sequence
atttacacaacaggtcagctaaaca

SEQ ID NO: 124706 - DNA, 25 bp, Probe sequence
atctaaaatttatattgttgctaac

SEQ ID NO: 124707 - DNA, 25 bp, Probe sequence
atgactcgaaatatcaaaatcagta

SEQ ID NO: 124708 - DNA, 25 bp, Probe sequence
actacctttaatgactcgaaatatc

SEQ ID NO: 124709 - DNA, 25 bp, Probe sequence
aaactatgaatgcttttacaaaatc

SEQ ID NO: 124710 - DNA, 25 bp, Probe sequence
aattgtttctgattctcacagatta

SEQ ID NO: 124711 - DNA, 25 bp, Probe sequence
gaacaaccgggcagaatgaaaatca

SEQ ID NO: 124712 - DNA, 25 bp, Probe sequence
gatattctaattgtttctgattctc

SEQ ID NO: 124713 - DNA, 25 bp, Probe sequence
gattaatttacacaacaggtcagct

SEQ ID NO: 124714 - DNA, 25 bp, Probe sequence
gattctcacagattaatttacacaa

SEQ ID NO: 124715 - DNA, 25 bp, Probe sequence
tgttgctaacaaactacctttaatg

SEQ ID NO: 124716 - DNA, 25 bp, Probe sequence
tcaaaacgatttttactctgtccgg

SEQ ID NO: 124717 - DNA, 25 bp, Probe sequence
taacaaactacctttaatgactcga

SEQ ID NO: 124718 - DNA, 25 bp, Probe sequence
taaaaaatgaacaaccgggcagaat

SEQ ID NO: 124719 - DNA, 25 bp, Probe sequence
ttcaagttattattcactaaagtta

SEQ ID NO: 124720 - DNA, 25 bp, Probe sequence
atgacatttcaattaaaccttctac

SEQ ID NO: 124721 - DNA, 25 bp, Probe sequence
aaatcacactatcatcttttaaaat

SEQ ID NO: 124722 - DNA, 25 bp, Probe sequence
aaccttctacattatagttccaagc

SEQ ID NO: 124723 - DNA, 25 bp, Probe sequence
aagtgtgattacaagcaaatctgta

SEQ ID NO: 124724 - DNA, 25 bp, Probe sequence
aattcaactttatcattatgacatt

SEQ ID NO: 124725 - DNA, 25 bp, Probe sequence
ctttaaatatttttcgatgctaaca

SEQ ID NO: 124726 - DNA, 25 bp, Probe sequence
gccacttcctatagcaaatgtttaa

SEQ ID NO: 124727 - DNA, 25 bp, Probe sequence
gctaacaaaaaatcacactatcatc

SEQ ID NO: 124728 - DNA, 25 bp, Probe sequence
gcagaaacaattcaactttatcatt

SEQ ID NO: 124729 - DNA, 25 bp, Probe sequence
gttccaagcatcttacacatgaatg

SEQ ID NO: 124730 - DNA, 25 bp, Probe sequence
gttactttctcaagttttatacaat

SEQ ID NO: 124731 - DNA, 25 bp, Probe sequence
taagccacttcctatagcaaatgtt

SEQ ID NO: 124732 - DNA, 25 bp, Probe sequence
tatacaatactcttttattattcaa

SEQ ID NO: 124733 - DNA, 25 bp, Probe sequence
tatagttccaagcatcttacacatg

SEQ ID NO: 124734 - DNA, 25 bp, Probe sequence
tattattcaataagccacttcctat

SEQ ID NO: 124735 - DNA, 25 bp, Probe sequence
ataccttgagtttaccagtactatc

SEQ ID NO: 124736 - DNA, 25 bp, Probe sequence
atacgccatcatacttacttttttg

SEQ ID NO: 124737 - DNA, 25 bp, Probe sequence
aaatgccaatagagacgacctttta

SEQ ID NO: 124738 - DNA, 25 bp, Probe sequence
aaatccatatttcatttcaaacgaa

SEQ ID NO: 124739 - DNA, 25 bp, Probe sequence
aaaactcacttagtatataccttga

SEQ ID NO: 124740 - DNA, 25 bp, Probe sequence
aagaccatccctattaaatgccaat

SEQ ID NO: 124741 - DNA, 25 bp, Probe sequence
aatcagtccaagggcttacaatcgt

SEQ ID NO: 124742 - DNA, 25 bp, Probe sequence
ctatcacaaataggctacacttttt

SEQ ID NO: 124743 - DNA, 25 bp, Probe sequence
gccatcatacttacttttttgtttt

SEQ ID NO: 124744 - DNA, 25 bp, Probe sequence
gacgaccttttatttgttattcatt

SEQ ID NO: 124745 - DNA, 25 bp, Probe sequence
gagtttaccagtactatcacaaata

SEQ ID NO: 124746 - DNA, 25 bp, Probe sequence
gggcttacaatcgtatacgccatca

SEQ ID NO: 124747 - DNA, 25 bp, Probe sequence
tacactttttgggaaaatcagtcca

SEQ ID NO: 124748 - DNA, 25 bp, Probe sequence
tttgctccttcttttaaaactcact

SEQ ID NO: 124749 - DNA, 25 bp, Probe sequence
ttaacaatcgataaccacaatactt

SEQ ID NO: 124750 - DNA, 25 bp, Probe sequence
atatctaactctaacacatcttatg

SEQ ID NO: 124751 - DNA, 25 bp, Probe sequence
atctaactctaacacatcttatgtg

SEQ ID NO: 124752 - DNA, 25 bp, Probe sequence
atcgcgatatctaactctaacacat

SEQ ID NO: 124753 - DNA, 25 bp, Probe sequence
aaaatcacatttctatatatcattg

SEQ ID NO: 124754 - DNA, 25 bp, Probe sequence
aactctaacacatcttatgtggcat

SEQ ID NO: 124755 - DNA, 25 bp, Probe sequence
aagcgactatcgcgatatctaactc

SEQ ID NO: 124756 - DNA, 25 bp, Probe sequence
ctatcgcgatatctaactctaacac

SEQ ID NO: 124757 - DNA, 25 bp, Probe sequence
gcgactatcgcgatatctaactcta

SEQ ID NO: 124758 - DNA, 25 bp, Probe sequence
gcgatatctaactctaacacatctt

SEQ ID NO: 124759 - DNA, 25 bp, Probe sequence
gactatcgcgatatctaactctaac

SEQ ID NO: 124760 - DNA, 25 bp, Probe sequence
gatatctaactctaacacatcttat

SEQ ID NO: 124761 - DNA, 25 bp, Probe sequence
tcgcgatatctaactctaacacatc

SEQ ID NO: 124762 - DNA, 25 bp, Probe sequence
tcagtgattaaacatacaagatata

SEQ ID NO: 124763 - DNA, 25 bp, Probe sequence
taaaaaatattaagcgactatcgcg

SEQ ID NO: 124764 - DNA, 25 bp, Probe sequence
tatagacaagtaaatcagtgattaa

SEQ ID NO: 124765 - DNA, 25 bp, Probe sequence
attattatcctaacagaaattgcgt

SEQ ID NO: 124766 - DNA, 25 bp, Probe sequence
agtggtatcataccgatatgaacca

SEQ ID NO: 124767 - DNA, 25 bp, Probe sequence
agctatatttatgacattcaaatta

SEQ ID NO: 124768 - DNA, 25 bp, Probe sequence
aatcttagctatatttatgacattc

SEQ ID NO: 124769 - DNA, 25 bp, Probe sequence
cataccgatatgaaccaaatagaaa

SEQ ID NO: 124770 - DNA, 25 bp, Probe sequence
cttagctatatttatgacattcaaa

SEQ ID NO: 124771 - DNA, 25 bp, Probe sequence
ctttttcattattatcctaacagaa

SEQ ID NO: 124772 - DNA, 25 bp, Probe sequence
gcgttaaagcgatataatcttagct

SEQ ID NO: 124773 - DNA, 25 bp, Probe sequence
gaaattgcgttaaagcgatataatc

SEQ ID NO: 124774 - DNA, 25 bp, Probe sequence
gagataatttgttacgagtgataat

SEQ ID NO: 124775 - DNA, 25 bp, Probe sequence
gataatacgaagtggtatcataccg

SEQ ID NO: 124776 - DNA, 25 bp, Probe sequence
gttacgagtgataatacgaagtggt

SEQ ID NO: 124777 - DNA, 25 bp, Probe sequence
ggtatcataccgatatgaaccaaat

SEQ ID NO: 124778 - DNA, 25 bp, Probe sequence
tacgaagtggtatcataccgatatg

SEQ ID NO: 124779 - DNA, 25 bp, Probe sequence
ttctttttcattattatcctaacag

SEQ ID NO: 124780 - DNA, 25 bp, Probe sequence
attgctggcagtactctactttaat

SEQ ID NO: 124781 - DNA, 25 bp, Probe sequence
attaattgctggcagtactctactt

SEQ ID NO: 124782 - DNA, 25 bp, Probe sequence
aaactcttaattatgcggagaagca

SEQ ID NO: 124783 - DNA, 25 bp, Probe sequence
aaacgtgcataatcaaaaagacaga

SEQ ID NO: 124784 - DNA, 25 bp, Probe sequence
aacataacagttcaattcatcctta

SEQ ID NO: 124785 - DNA, 25 bp, Probe sequence
caattcatccttaacaatctgtctt

SEQ ID NO: 124786 - DNA, 25 bp, Probe sequence
catccttaacaatctgtctttatat

SEQ ID NO: 124787 - DNA, 25 bp, Probe sequence
gctggcagtactctactttaataat

SEQ ID NO: 124788 - DNA, 25 bp, Probe sequence
gacagattgtaggtggaatattcga

SEQ ID NO: 124789 - DNA, 25 bp, Probe sequence
gataagtagtctccgcatattttaa

SEQ ID NO: 124790 - DNA, 25 bp, Probe sequence
gtagtctccgcatattttaatgcta

SEQ ID NO: 124791 - DNA, 25 bp, Probe sequence
ggtggaatattcgaacataacagtt

SEQ ID NO: 124792 - DNA, 25 bp, Probe sequence
ggtcatttaataggactaatagtct

SEQ ID NO: 124793 - DNA, 25 bp, Probe sequence
tatgcggagaagcactttatcgata

SEQ ID NO: 124794 - DNA, 25 bp, Probe sequence
tttatcgataagtagtctccgcata

SEQ ID NO: 124795 - DNA, 25 bp, Probe sequence
atctcccaatctatactttaatcac

SEQ ID NO: 124796 - DNA, 25 bp, Probe sequence
actcagcacctcaaaataacattta

SEQ ID NO: 124797 - DNA, 25 bp, Probe sequence
aatacatgtttcatttcctactcag

SEQ ID NO: 124798 - DNA, 25 bp, Probe sequence
cctactcagcacctcaaaataacat

SEQ ID NO: 124799 - DNA, 25 bp, Probe sequence
tcccaatctatactttaatcacgta

SEQ ID NO: 124800 - DNA, 25 bp, Probe sequence
tctcccaatctatactttaatcacg

SEQ ID NO: 124801 - DNA, 25 bp, Probe sequence
tactttaatcacgtatttgaccttt

SEQ ID NO: 124802 - DNA, 25 bp, Probe sequence
tacatgtttcatttcctactcagca

SEQ ID NO: 124803 - DNA, 25 bp, Probe sequence
tattttatctcccaatctatacttt

SEQ ID NO: 124804 - DNA, 25 bp, Probe sequence
tttcctactcagcacctcaaaataa

SEQ ID NO: 124805 - DNA, 25 bp, Probe sequence
ttttatctcccaatctatactttaa

SEQ ID NO: 124806 - DNA, 25 bp, Probe sequence
ttatctcccaatctatactttaatc

SEQ ID NO: 124807 - DNA, 25 bp, Probe sequence
ttaatcacgtatttgacctttaaat

SEQ ID NO: 124808 - DNA, 25 bp, Probe sequence
ttgacctttaaatacatgtttcatt

SEQ ID NO: 124809 - DNA, 25 bp, Probe sequence
ttcctactcagcacctcaaaataac

SEQ ID NO: 124810 - DNA, 25 bp, Probe sequence
ataatctgctttcttattgtttaaa

SEQ ID NO: 124811 - DNA, 25 bp, Probe sequence
atctgctttcttattgtttaaagtc

SEQ ID NO: 124812 - DNA, 25 bp, Probe sequence
aaatggggatataactacatagttt

SEQ ID NO: 124813 - DNA, 25 bp, Probe sequence
aatgttcacctctaataatagttat

SEQ ID NO: 124814 - DNA, 25 bp, Probe sequence
aatagttatgttatcaaagtatcac

SEQ ID NO: 124815 - DNA, 25 bp, Probe sequence
ctgctttcttattgtttaaagtcgc

SEQ ID NO: 124816 - DNA, 25 bp, Probe sequence
gaattttatataatctgctttctta

SEQ ID NO: 124817 - DNA, 25 bp, Probe sequence
gttcacctctaataatagttatgtt

SEQ ID NO: 124818 - DNA, 25 bp, Probe sequence
gttatcaaagtatcacaatttaata

SEQ ID NO: 124819 - DNA, 25 bp, Probe sequence
gtatcacaatttaataaactttaat

SEQ ID NO: 124820 - DNA, 25 bp, Probe sequence
taactacatagtttggaggaatcaa

SEQ ID NO: 124821 - DNA, 25 bp, Probe sequence
taaagtcgctataaaatggggatat

SEQ ID NO: 124822 - DNA, 25 bp, Probe sequence
tataatctgctttcttattgtttaa

SEQ ID NO: 124823 - DNA, 25 bp, Probe sequence
tatataatctgctttcttattgttt

SEQ ID NO: 124824 - DNA, 25 bp, Probe sequence
tttcttattgtttaaagtcgctata

SEQ ID NO: 124825 - DNA, 25 bp, Probe sequence
attgtttcagtattgcctttgtttt

SEQ ID NO: 124826 - DNA, 25 bp, Probe sequence
atattatcatttttaaagcatatca

SEQ ID NO: 124827 - DNA, 25 bp, Probe sequence
aacaatttggtgtacgcctttcata

SEQ ID NO: 124828 - DNA, 25 bp, Probe sequence
aactacattgtttcagtattgcctt

SEQ ID NO: 124829 - DNA, 25 bp, Probe sequence
aagcatatcattgtttagttttttt

SEQ ID NO: 124830 - DNA, 25 bp, Probe sequence
aaggcaatacttaacaatttggtgt

SEQ ID NO: 124831 - DNA, 25 bp, Probe sequence
aatacaatgattggccaaactacat

SEQ ID NO: 124832 - DNA, 25 bp, Probe sequence
aatttggtgtacgcctttcatagtt

SEQ ID NO: 124833 - DNA, 25 bp, Probe sequence
gcctttcatagttatcattattaaa

SEQ ID NO: 124834 - DNA, 25 bp, Probe sequence
gatgattttgtttttataaggcaat

SEQ ID NO: 124835 - DNA, 25 bp, Probe sequence
gattggccaaactacattgtttcag

SEQ ID NO: 124836 - DNA, 25 bp, Probe sequence
gtacgcctttcatagttatcattat

SEQ ID NO: 124837 - DNA, 25 bp, Probe sequence
ggtgtacgcctttcatagttatcat

SEQ ID NO: 124838 - DNA, 25 bp, Probe sequence
tcagtattgcctttgttttaatttt

SEQ ID NO: 124839 - DNA, 25 bp, Probe sequence
tagttactttataaaacattacata

SEQ ID NO: 124840 - DNA, 25 bp, Probe sequence
aacagaggttttcgctaatgattgc

SEQ ID NO: 124841 - DNA, 25 bp, Probe sequence
aatgattgcgaagacctctgttttt

SEQ ID NO: 124842 - DNA, 25 bp, Probe sequence
caccaacaaaacagaggttttcgct

SEQ ID NO: 124843 - DNA, 25 bp, Probe sequence
cctctgttttttggtgtctatttga

SEQ ID NO: 124844 - DNA, 25 bp, Probe sequence
gcgaagacctctgttttttggtgtc

SEQ ID NO: 124845 - DNA, 25 bp, Probe sequence
gctaatgattgcgaagacctctgtt

SEQ ID NO: 124846 - DNA, 25 bp, Probe sequence
gaagacctctgttttttggtgtcta

SEQ ID NO: 124847 - DNA, 25 bp, Probe sequence
gacctctgttttttggtgtctattt

SEQ ID NO: 124848 - DNA, 25 bp, Probe sequence
gattgcgaagacctctgttttttgg

SEQ ID NO: 124849 - DNA, 25 bp, Probe sequence
gttttttggtgtctatttgatgtta

SEQ ID NO: 124850 - DNA, 25 bp, Probe sequence
ggtgtctatttgatgttatattgtg

SEQ ID NO: 124851 - DNA, 25 bp, Probe sequence
tgattggcgtaagtaacttttctta

SEQ ID NO: 124852 - DNA, 25 bp, Probe sequence
tctgttttttggtgtctatttgatg

SEQ ID NO: 124853 - DNA, 25 bp, Probe sequence
ttgtgattggcgtaagtaacttttc

SEQ ID NO: 124854 - DNA, 25 bp, Probe sequence
ttgatgttatattgtgattggcgta

SEQ ID NO: 124855 - DNA, 25 bp, Probe sequence
ataaaacagttccgaaaccaatatg

SEQ ID NO: 124856 - DNA, 25 bp, Probe sequence
atgatgttcatactttagtcttagt

SEQ ID NO: 124857 - DNA, 25 bp, Probe sequence
atgtatcttcgttgatgtcgatgat

SEQ ID NO: 124858 - DNA, 25 bp, Probe sequence
accaaatgcgctatgtatcttcgtt

SEQ ID NO: 124859 - DNA, 25 bp, Probe sequence
actactttattacaacatatttttg

SEQ ID NO: 124860 - DNA, 25 bp, Probe sequence
aaatgcgctatgtatcttcgttgat

SEQ ID NO: 124861 - DNA, 25 bp, Probe sequence
gcgctatgtatcttcgttgatgtcg

SEQ ID NO: 124862 - DNA, 25 bp, Probe sequence
gaataggctccggaactaaatgatg

SEQ ID NO: 124863 - DNA, 25 bp, Probe sequence
gaaaccaatatgaataggctccgga

SEQ ID NO: 124864 - DNA, 25 bp, Probe sequence
gaaatgacgcattgattgtgttctt

SEQ ID NO: 124865 - DNA, 25 bp, Probe sequence
gacgcattgattgtgttcttaatta

SEQ ID NO: 124866 - DNA, 25 bp, Probe sequence
gatgtcgatgatatgtttgcttaaa

SEQ ID NO: 124867 - DNA, 25 bp, Probe sequence
gatatgtttgcttaaaaactacttt

SEQ ID NO: 124868 - DNA, 25 bp, Probe sequence
ggctccggaactaaatgatgttcat

SEQ ID NO: 124869 - DNA, 25 bp, Probe sequence
taagttttaaaataccaaatgcgct

SEQ ID NO: 124870 - DNA, 25 bp, Probe sequence
ataacttattatagcaaaaattctt

SEQ ID NO: 124871 - DNA, 25 bp, Probe sequence
agtgagtgagacatagtgtgataaa

SEQ ID NO: 124872 - DNA, 25 bp, Probe sequence
gtgagtgagacatagtgtgataaag

SEQ ID NO: 124873 - DNA, 25 bp, Probe sequence
aaagtgagtgagacatagtgtgata

SEQ ID NO: 124874 - DNA, 25 bp, Probe sequence
aacttattatagcaaaaattctttg

SEQ ID NO: 124875 - DNA, 25 bp, Probe sequence
aagtgagtgagacatagtgtgataa

SEQ ID NO: 124876 - DNA, 25 bp, Probe sequence
gcaaaaattctttgatatactaaag

SEQ ID NO: 124877 - DNA, 25 bp, Probe sequence
gaaagtgagtgagacatagtgtgat

SEQ ID NO: 124878 - DNA, 25 bp, Probe sequence
gagtgagacatagtgtgataaagaa

SEQ ID NO: 124879 - DNA, 25 bp, Probe sequence
gatgttactttagtattttggaaag

SEQ ID NO: 124880 - DNA, 25 bp, Probe sequence
gtattttggaaagtgagtgagacat

SEQ ID NO: 124881 - DNA, 25 bp, Probe sequence
ggaaagtgagtgagacatagtgtga

SEQ ID NO: 124882 - DNA, 25 bp, Probe sequence
tagcaaaaattctttgatatactaa

SEQ ID NO: 124883 - DNA, 25 bp, Probe sequence
tatagcaaaaattctttgatatact

SEQ ID NO: 124884 - DNA, 25 bp, Probe sequence
tttgatatactaaagatgttacttt

SEQ ID NO: 124885 - DNA, 25 bp, Probe sequence
attttacatacatgaacttttccaa

SEQ ID NO: 124886 - DNA, 25 bp, Probe sequence
atgaacttttccaatgtacgatact

SEQ ID NO: 124887 - DNA, 25 bp, Probe sequence
agcgctcgctaagattttacgatga

SEQ ID NO: 124888 - DNA, 25 bp, Probe sequence
actattattataaagcgctcgctaa

SEQ ID NO: 124889 - DNA, 25 bp, Probe sequence
aacattgtggagcccagaactttga

SEQ ID NO: 124890 - DNA, 25 bp, Probe sequence
aagattttacgatgattagaggtta

SEQ ID NO: 124891 - DNA, 25 bp, Probe sequence
caatataacattgtggagcccagaa

SEQ ID NO: 124892 - DNA, 25 bp, Probe sequence
ccagaactttgattaatgtatatga

SEQ ID NO: 124893 - DNA, 25 bp, Probe sequence
gctcgctaagattttacgatgatta

SEQ ID NO: 124894 - DNA, 25 bp, Probe sequence
gaacttttccaatgtacgatactat

SEQ ID NO: 124895 - DNA, 25 bp, Probe sequence
gtaatgcttaagtatgattatttca

SEQ ID NO: 124896 - DNA, 25 bp, Probe sequence
ggagcccagaactttgattaatgta

SEQ ID NO: 124897 - DNA, 25 bp, Probe sequence
taaagcgctcgctaagattttacga

SEQ ID NO: 124898 - DNA, 25 bp, Probe sequence
tttccaatgtacgatactattatta

SEQ ID NO: 124899 - DNA, 25 bp, Probe sequence
ttgtggagcccagaactttgattaa

SEQ ID NO: 124900 - DNA, 25 bp, Probe sequence
acaagcataaatattcagactcaaa

SEQ ID NO: 124901 - DNA, 25 bp, Probe sequence
aactacggagggatgtggctgtctt

SEQ ID NO: 124902 - DNA, 25 bp, Probe sequence
aatatagccacacgcctaaactacg

SEQ ID NO: 124903 - DNA, 25 bp, Probe sequence
cagactcaaatatagccacacgcct

SEQ ID NO: 124904 - DNA, 25 bp, Probe sequence
gccacacgcctaaactacggaggga

SEQ ID NO: 124905 - DNA, 25 bp, Probe sequence
gcatgtccctttttaaaattacaag

SEQ ID NO: 124906 - DNA, 25 bp, Probe sequence
gactcaaatatagccacacgcctaa

SEQ ID NO: 124907 - DNA, 25 bp, Probe sequence
gattgtaattatgtatcagatttaa

SEQ ID NO: 124908 - DNA, 25 bp, Probe sequence
gggatgtggctgtcttttttgattg

SEQ ID NO: 124909 - DNA, 25 bp, Probe sequence
tgtggctgtcttttttgattgtaat

SEQ ID NO: 124910 - DNA, 25 bp, Probe sequence
tcgtatatagcatgtccctttttaa

SEQ ID NO: 124911 - DNA, 25 bp, Probe sequence
tacggagggatgtggctgtcttttt

SEQ ID NO: 124912 - DNA, 25 bp, Probe sequence
tagccacacgcctaaactacggagg

SEQ ID NO: 124913 - DNA, 25 bp, Probe sequence
tatagcatgtccctttttaaaatta

SEQ ID NO: 124914 - DNA, 25 bp, Probe sequence
ttatcgtatatagcatgtccctttt

SEQ ID NO: 124915 - DNA, 25 bp, Probe sequence
attactaaacttcatcgtttatcaa

SEQ ID NO: 124916 - DNA, 25 bp, Probe sequence
attaaatccattgatgcgatgttca

SEQ ID NO: 124917 - DNA, 25 bp, Probe sequence
ataatgtgtgtgtttatacatatat

SEQ ID NO: 124918 - DNA, 25 bp, Probe sequence
atgtgtgtgtttatacatatatgat

SEQ ID NO: 124919 - DNA, 25 bp, Probe sequence
aaatccattgatgcgatgttcagag

SEQ ID NO: 124920 - DNA, 25 bp, Probe sequence
aaacttcatcgtttatcaatattaa

SEQ ID NO: 124921 - DNA, 25 bp, Probe sequence
aatattaaatccattgatgcgatgt

SEQ ID NO: 124922 - DNA, 25 bp, Probe sequence
gatttattactaaacttcatcgttt

SEQ ID NO: 124923 - DNA, 25 bp, Probe sequence
gtttatacatatatgatttattact

SEQ ID NO: 124924 - DNA, 25 bp, Probe sequence
tgatttattactaaacttcatcgtt

SEQ ID NO: 124925 - DNA, 25 bp, Probe sequence
taaatccattgatgcgatgttcaga

SEQ ID NO: 124926 - DNA, 25 bp, Probe sequence
tactaaacttcatcgtttatcaata

SEQ ID NO: 124927 - DNA, 25 bp, Probe sequence
tattaaatccattgatgcgatgttc

SEQ ID NO: 124928 - DNA, 25 bp, Probe sequence
ttattactaaacttcatcgtttatc

SEQ ID NO: 124929 - DNA, 25 bp, Probe sequence
ttaaatccattgatgcgatgttcag

SEQ ID NO: 124930 - DNA, 25 bp, Probe sequence
attctcaattaaatatcgctaaatg

SEQ ID NO: 124931 - DNA, 25 bp, Probe sequence
attagagtgctaaaataaggtatta

SEQ ID NO: 124932 - DNA, 25 bp, Probe sequence
atcgctaaatgatacattttctcaa

SEQ ID NO: 124933 - DNA, 25 bp, Probe sequence
atgagtttgttatactaagtttaat

SEQ ID NO: 124934 - DNA, 25 bp, Probe sequence
acattttctcaattagagtgctaaa

SEQ ID NO: 124935 - DNA, 25 bp, Probe sequence
acagtgtttctaaattataatcatt

SEQ ID NO: 124936 - DNA, 25 bp, Probe sequence
aaatgatacattttctcaattagag

SEQ ID NO: 124937 - DNA, 25 bp, Probe sequence
aaaaatgatatttattctcaattaa

SEQ ID NO: 124938 - DNA, 25 bp, Probe sequence
aattataatcattctcatttagata

SEQ ID NO: 124939 - DNA, 25 bp, Probe sequence
gagaatgagtttgttatactaagtt

SEQ ID NO: 124940 - DNA, 25 bp, Probe sequence
gatacattttctcaattagagtgct

SEQ ID NO: 124941 - DNA, 25 bp, Probe sequence
gatacagtgtttctaaattataatc

SEQ ID NO: 124942 - DNA, 25 bp, Probe sequence
tcacaaattgatacagtgtttctaa

SEQ ID NO: 124943 - DNA, 25 bp, Probe sequence
taatcattctcatttagataattaa

SEQ ID NO: 124944 - DNA, 25 bp, Probe sequence
tttattctcaattaaatatcgctaa

SEQ ID NO: 124945 - DNA, 25 bp, Probe sequence
atgataggcatttgggtcacttaca

SEQ ID NO: 124946 - DNA, 25 bp, Probe sequence
acgacatgataggcatttgggtcac

SEQ ID NO: 124947 - DNA, 25 bp, Probe sequence
acttacaataacccaatgtctatat

SEQ ID NO: 124948 - DNA, 25 bp, Probe sequence
catgataggcatttgggtcacttac

SEQ ID NO: 124949 - DNA, 25 bp, Probe sequence
gacagataaatatcatacgacatga

SEQ ID NO: 124950 - DNA, 25 bp, Probe sequence
gacatgataggcatttgggtcactt

SEQ ID NO: 124951 - DNA, 25 bp, Probe sequence
gataggcatttgggtcacttacaat

SEQ ID NO: 124952 - DNA, 25 bp, Probe sequence
gtcacttacaataacccaatgtcta

SEQ ID NO: 124953 - DNA, 25 bp, Probe sequence
ggtcacttacaataacccaatgtct

SEQ ID NO: 124954 - DNA, 25 bp, Probe sequence
ggcatttgggtcacttacaataacc

SEQ ID NO: 124955 - DNA, 25 bp, Probe sequence
tcatacgacatgataggcatttggg

SEQ ID NO: 124956 - DNA, 25 bp, Probe sequence
tcacttacaataacccaatgtctat

SEQ ID NO: 124957 - DNA, 25 bp, Probe sequence
taaacatcactacaatagacagata

SEQ ID NO: 124958 - DNA, 25 bp, Probe sequence
tacaataacccaatgtctatattat

SEQ ID NO: 124959 - DNA, 25 bp, Probe sequence
taggcatttgggtcacttacaataa

SEQ ID NO: 124960 - DNA, 25 bp, Probe sequence
atttgaccgattttaaagcatatca

SEQ ID NO: 124961 - DNA, 25 bp, Probe sequence
aaaagtctattaatatatacattta

SEQ ID NO: 124962 - DNA, 25 bp, Probe sequence
aataactctaaatttgatgttgaat

SEQ ID NO: 124963 - DNA, 25 bp, Probe sequence
ctttttaatcagagttacatccaaa

SEQ ID NO: 124964 - DNA, 25 bp, Probe sequence
gcatatcatcatttactttttaatc

SEQ ID NO: 124965 - DNA, 25 bp, Probe sequence
gagttacatccaaatgatagatttc

SEQ ID NO: 124966 - DNA, 25 bp, Probe sequence
gatgttgaattaatttgaccgattt

SEQ ID NO: 124967 - DNA, 25 bp, Probe sequence
gatagatttcacgttataccttcac

SEQ ID NO: 124968 - DNA, 25 bp, Probe sequence
gatttcacgttataccttcacgtat

SEQ ID NO: 124969 - DNA, 25 bp, Probe sequence
gtttgtaagcaaatgactaaaagtc

SEQ ID NO: 124970 - DNA, 25 bp, Probe sequence
taaactactaatgttaataactcta

SEQ ID NO: 124971 - DNA, 25 bp, Probe sequence
taccttcacgtataatattatgtat

SEQ ID NO: 124972 - DNA, 25 bp, Probe sequence
tattatgtatcgtttgtaagcaaat

SEQ ID NO: 124973 - DNA, 25 bp, Probe sequence
ttttttcattttcaaggctaattat

SEQ ID NO: 124974 - DNA, 25 bp, Probe sequence
ttcaaggctaattattgtattttta

SEQ ID NO: 124975 - DNA, 25 bp, Probe sequence
atactcccttcaaaagtaagcattg

SEQ ID NO: 124976 - DNA, 25 bp, Probe sequence
actcccttcaaaagtaagcattgta

SEQ ID NO: 124977 - DNA, 25 bp, Probe sequence
aaatactcccttcaaaagtaagcat

SEQ ID NO: 124978 - DNA, 25 bp, Probe sequence
aaatgtaaactttgcagggagcttt

SEQ ID NO: 124979 - DNA, 25 bp, Probe sequence
aaaaatgtaaactttgcagggagct

SEQ ID NO: 124980 - DNA, 25 bp, Probe sequence
aaaatgtaaactttgcagggagctt

SEQ ID NO: 124981 - DNA, 25 bp, Probe sequence
aatgtaaactttgcagggagcttta

SEQ ID NO: 124982 - DNA, 25 bp, Probe sequence
aatactcccttcaaaagtaagcatt

SEQ ID NO: 124983 - DNA, 25 bp, Probe sequence
ctcccttcaaaagtaagcattgtaa

SEQ ID NO: 124984 - DNA, 25 bp, Probe sequence
gtaaaaatgtaaactttgcagggag

SEQ ID NO: 124985 - DNA, 25 bp, Probe sequence
tgtaaaaatgtaaactttgcaggga

SEQ ID NO: 124986 - DNA, 25 bp, Probe sequence
tcccttcaaaagtaagcattgtaaa

SEQ ID NO: 124987 - DNA, 25 bp, Probe sequence
taaaaatgtaaactttgcagggagc

SEQ ID NO: 124988 - DNA, 25 bp, Probe sequence
tactcccttcaaaagtaagcattgt

SEQ ID NO: 124989 - DNA, 25 bp, Probe sequence
ttgtaaaaatgtaaactttgcaggg

SEQ ID NO: 124990 - DNA, 25 bp, Probe sequence
attcattttgttggtattatcatat

SEQ ID NO: 124991 - DNA, 25 bp, Probe sequence
attcaagcaaattcattttgttggt

SEQ ID NO: 124992 - DNA, 25 bp, Probe sequence
atctcaacataattatacgctgtgt

SEQ ID NO: 124993 - DNA, 25 bp, Probe sequence
agcatgatgatgaagacgattgagt

SEQ ID NO: 124994 - DNA, 25 bp, Probe sequence
acaagttgttataaaatcaattgct

SEQ ID NO: 124995 - DNA, 25 bp, Probe sequence
aaatcttgcacttagcgataactat

SEQ ID NO: 124996 - DNA, 25 bp, Probe sequence
aatcaattgctatttaagcatgatg

SEQ ID NO: 124997 - DNA, 25 bp, Probe sequence
aattatacgctgtgtacgatttttt

SEQ ID NO: 124998 - DNA, 25 bp, Probe sequence
cgctgtgtacgatttttttacataa

SEQ ID NO: 124999 - DNA, 25 bp, Probe sequence
gcgataactatattgagataactac

SEQ ID NO: 125000 - DNA, 25 bp, Probe sequence
gaaaacataggtaatctgaaataat

SEQ ID NO: 125001 - DNA, 25 bp, Probe sequence
tgcacttagcgataactatattgag

SEQ ID NO: 125002 - DNA, 25 bp, Probe sequence
taacgcacaaaaatatctcaacata

SEQ ID NO: 125003 - DNA, 25 bp, Probe sequence
tatacgctgtgtacgatttttttac

SEQ ID NO: 125004 - DNA, 25 bp, Probe sequence
tttacataaatcttgcacttagcga

SEQ ID NO: 125005 - DNA, 25 bp, Probe sequence
atatacgacttctttcttcacttat

SEQ ID NO: 125006 - DNA, 25 bp, Probe sequence
acgacttctttcttcacttattaag

SEQ ID NO: 125007 - DNA, 25 bp, Probe sequence
aaggcgaaattttatctcaaatcat

SEQ ID NO: 125008 - DNA, 25 bp, Probe sequence
aatatacgacttctttcttcactta

SEQ ID NO: 125009 - DNA, 25 bp, Probe sequence
aatatagtatacaatgtcacattta

SEQ ID NO: 125010 - DNA, 25 bp, Probe sequence
ctttcttcacttattaaggcgaaat

SEQ ID NO: 125011 - DNA, 25 bp, Probe sequence
cttctttcttcacttattaaggcga

SEQ ID NO: 125012 - DNA, 25 bp, Probe sequence
ctcccgatcatgacattcttattct

SEQ ID NO: 125013 - DNA, 25 bp, Probe sequence
cccgatcatgacattcttattcttc

SEQ ID NO: 125014 - DNA, 25 bp, Probe sequence
cctcccgatcatgacattcttattc

SEQ ID NO: 125015 - DNA, 25 bp, Probe sequence
gaaattttatctcaaatcatgtgcg

SEQ ID NO: 125016 - DNA, 25 bp, Probe sequence
gacttctttcttcacttattaaggc

SEQ ID NO: 125017 - DNA, 25 bp, Probe sequence
taatatacgacttctttcttcactt

SEQ ID NO: 125018 - DNA, 25 bp, Probe sequence
tttaatatacgacttctttcttcac

SEQ ID NO: 125019 - DNA, 25 bp, Probe sequence
ttcttattcttctttaaatatagta

SEQ ID NO: 125020 - DNA, 25 bp, Probe sequence
acctgccattatatatttcactatt

SEQ ID NO: 125021 - DNA, 25 bp, Probe sequence
acaaaattatgcgcttcctaacctg

SEQ ID NO: 125022 - DNA, 25 bp, Probe sequence
aacaaaattatgcgcttcctaacct

SEQ ID NO: 125023 - DNA, 25 bp, Probe sequence
aacctgccattatatatttcactat

SEQ ID NO: 125024 - DNA, 25 bp, Probe sequence
cttcctaacctgccattatatattt

SEQ ID NO: 125025 - DNA, 25 bp, Probe sequence
ctaacctgccattatatatttcact

SEQ ID NO: 125026 - DNA, 25 bp, Probe sequence
ctgccattatatatttcactatttc

SEQ ID NO: 125027 - DNA, 25 bp, Probe sequence
cctaacctgccattatatatttcac

SEQ ID NO: 125028 - DNA, 25 bp, Probe sequence
ccattatatatttcactatttctgt

SEQ ID NO: 125029 - DNA, 25 bp, Probe sequence
gccattatatatttcactatttctg

SEQ ID NO: 125030 - DNA, 25 bp, Probe sequence
gcttcctaacctgccattatatatt

SEQ ID NO: 125031 - DNA, 25 bp, Probe sequence
tcctaacctgccattatatatttca

SEQ ID NO: 125032 - DNA, 25 bp, Probe sequence
taacctgccattatatatttcacta

SEQ ID NO: 125033 - DNA, 25 bp, Probe sequence
tttacctccaaaatgaacaggttag

SEQ ID NO: 125034 - DNA, 25 bp, Probe sequence
ttcctaacctgccattatatatttc

SEQ ID NO: 125035 - DNA, 25 bp, Probe sequence
atattttaacttcatctttgtttcg

SEQ ID NO: 125036 - DNA, 25 bp, Probe sequence
atcttatccctctacttaaaattca

SEQ ID NO: 125037 - DNA, 25 bp, Probe sequence
atccctctacttaaaattcatatat

SEQ ID NO: 125038 - DNA, 25 bp, Probe sequence
aacttcatctttgtttcgtctaata

SEQ ID NO: 125039 - DNA, 25 bp, Probe sequence
cttatccctctacttaaaattcata

SEQ ID NO: 125040 - DNA, 25 bp, Probe sequence
tccctctacttaaaattcatatatt

SEQ ID NO: 125041 - DNA, 25 bp, Probe sequence
tcttatccctctacttaaaattcat

SEQ ID NO: 125042 - DNA, 25 bp, Probe sequence
taacttcatctttgtttcgtctaat

SEQ ID NO: 125043 - DNA, 25 bp, Probe sequence
tatccctctacttaaaattcatata

SEQ ID NO: 125044 - DNA, 25 bp, Probe sequence
tatattttaacttcatctttgtttc

SEQ ID NO: 125045 - DNA, 25 bp, Probe sequence
tattttaacttcatctttgtttcgt

SEQ ID NO: 125046 - DNA, 25 bp, Probe sequence
ttttaacttcatctttgtttcgtct

SEQ ID NO: 125047 - DNA, 25 bp, Probe sequence
tttaacttcatctttgtttcgtcta

SEQ ID NO: 125048 - DNA, 25 bp, Probe sequence
ttatccctctacttaaaattcatat

SEQ ID NO: 125049 - DNA, 25 bp, Probe sequence
ttaacttcatctttgtttcgtctaa

SEQ ID NO: 125050 - DNA, 25 bp, Probe sequence
atttcatcattcttaatatcgttaa

SEQ ID NO: 125051 - DNA, 25 bp, Probe sequence
atactatctcaatatgtacaaagct

SEQ ID NO: 125052 - DNA, 25 bp, Probe sequence
agaccaacttgtatcttaaacaaat

SEQ ID NO: 125053 - DNA, 25 bp, Probe sequence
cttaatatcgttaaagaccaacttg

SEQ ID NO: 125054 - DNA, 25 bp, Probe sequence
cgtcagttatgctattttaccttta

SEQ ID NO: 125055 - DNA, 25 bp, Probe sequence
gccgttcttcattatatagacttcg

SEQ ID NO: 125056 - DNA, 25 bp, Probe sequence
gctcagtcttatttcatcattctta

SEQ ID NO: 125057 - DNA, 25 bp, Probe sequence
gcattttttgccgttcttcattata

SEQ ID NO: 125058 - DNA, 25 bp, Probe sequence
gacttcgtcagttatgctattttac

SEQ ID NO: 125059 - DNA, 25 bp, Probe sequence
gatgttgtaaatataatgttgtctt

SEQ ID NO: 125060 - DNA, 25 bp, Probe sequence
gttcttcattatatagacttcgtca

SEQ ID NO: 125061 - DNA, 25 bp, Probe sequence
gtacaaagcttgttatttattcagc

SEQ ID NO: 125062 - DNA, 25 bp, Probe sequence
tatcttaaacaaatactatctcaat

SEQ ID NO: 125063 - DNA, 25 bp, Probe sequence
tattcagcattttttgccgttcttc

SEQ ID NO: 125064 - DNA, 25 bp, Probe sequence
ttttttgccgttcttcattatatag

SEQ ID NO: 125065 - DNA, 25 bp, Probe sequence
atcattcgtttatcaaatcattttt

SEQ ID NO: 125066 - DNA, 25 bp, Probe sequence
atgaaaacaacactcttttaatatt

SEQ ID NO: 125067 - DNA, 25 bp, Probe sequence
aaaaatacgaaagcgcttcctatat

SEQ ID NO: 125068 - DNA, 25 bp, Probe sequence
aaaagcctcctttaagtcattcatc

SEQ ID NO: 125069 - DNA, 25 bp, Probe sequence
aacattatcattcgtttatcaaatc

SEQ ID NO: 125070 - DNA, 25 bp, Probe sequence
aattataaaaatttgctcatatcca

SEQ ID NO: 125071 - DNA, 25 bp, Probe sequence
cactcttttaatattagacaaccca

SEQ ID NO: 125072 - DNA, 25 bp, Probe sequence
gcctcctttaagtcattcatcacta

SEQ ID NO: 125073 - DNA, 25 bp, Probe sequence
gcgcttcctatattggtatgcaagt

SEQ ID NO: 125074 - DNA, 25 bp, Probe sequence
gaaagcgcttcctatattggtatgc

SEQ ID NO: 125075 - DNA, 25 bp, Probe sequence
gaggtgctactttaatttcatataa

SEQ ID NO: 125076 - DNA, 25 bp, Probe sequence
gtatttatgaggtgctactttaatt

SEQ ID NO: 125077 - DNA, 25 bp, Probe sequence
gtcattcatcactaaattgtatcaa

SEQ ID NO: 125078 - DNA, 25 bp, Probe sequence
tagacaacccaattcaatattatga

SEQ ID NO: 125079 - DNA, 25 bp, Probe sequence
ttcctacttttctaaacatttatct

SEQ ID NO: 125080 - DNA, 25 bp, Probe sequence
attatgactaacattggtacctttt

SEQ ID NO: 125081 - DNA, 25 bp, Probe sequence
atgactaacattggtacctttttat

SEQ ID NO: 125082 - DNA, 25 bp, Probe sequence
aggtactaatgttaatcaaaattat

SEQ ID NO: 125083 - DNA, 25 bp, Probe sequence
actaatgttaatcaaaattatgact

SEQ ID NO: 125084 - DNA, 25 bp, Probe sequence
aattatgactaacattggtaccttt

SEQ ID NO: 125085 - DNA, 25 bp, Probe sequence
gtactaatgttaatcaaaattatga

SEQ ID NO: 125086 - DNA, 25 bp, Probe sequence
ggtactaatgttaatcaaaattatg

SEQ ID NO: 125087 - DNA, 25 bp, Probe sequence
tgactaacattggtacctttttatt

SEQ ID NO: 125088 - DNA, 25 bp, Probe sequence
taacattggtacctttttattatct

SEQ ID NO: 125089 - DNA, 25 bp, Probe sequence
tactaatgttaatcaaaattatgac

SEQ ID NO: 125090 - DNA, 25 bp, Probe sequence
tatgactaacattggtaccttttta

SEQ ID NO: 125091 - DNA, 25 bp, Probe sequence
ttatgactaacattggtaccttttt

SEQ ID NO: 125092 - DNA, 25 bp, Probe sequence
atagcatttttaagtgtcgagttct

SEQ ID NO: 125093 - DNA, 25 bp, Probe sequence
ataaccattgtttatcgttcattta

SEQ ID NO: 125094 - DNA, 25 bp, Probe sequence
atgattatctaccttattagtgcag

SEQ ID NO: 125095 - DNA, 25 bp, Probe sequence
agcatttttaagtgtcgagttctaa

SEQ ID NO: 125096 - DNA, 25 bp, Probe sequence
aaaaacaatgattatctaccttatt

SEQ ID NO: 125097 - DNA, 25 bp, Probe sequence
aacaatgattatctaccttattagt

SEQ ID NO: 125098 - DNA, 25 bp, Probe sequence
aagtgtcgagttctaaagacttaat

SEQ ID NO: 125099 - DNA, 25 bp, Probe sequence
aacatacatatgattatagcatttt

SEQ ID NO: 125100 - DNA, 25 bp, Probe sequence
caatgattatctaccttattagtgc

SEQ ID NO: 125101 - DNA, 25 bp, Probe sequence
gattatagcatttttaagtgtcgag

SEQ ID NO: 125102 - DNA, 25 bp, Probe sequence
gattatctaccttattagtgcagat

SEQ ID NO: 125103 - DNA, 25 bp, Probe sequence
gtcgagttctaaagacttaatatga

SEQ ID NO: 125104 - DNA, 25 bp, Probe sequence
tgaattttaagttcttttactctgt

SEQ ID NO: 125105 - DNA, 25 bp, Probe sequence
tagtgcagatagataaccattgttt

SEQ ID NO: 125106 - DNA, 25 bp, Probe sequence
tatctaccttattagtgcagataga

SEQ ID NO: 125107 - DNA, 25 bp, Probe sequence
attctttatgtcattttaacgcatt

SEQ ID NO: 125108 - DNA, 25 bp, Probe sequence
attaaatctgaatcgttactttatt

SEQ ID NO: 125109 - DNA, 25 bp, Probe sequence
attttattaaatctgaatcgttact

SEQ ID NO: 125110 - DNA, 25 bp, Probe sequence
atctgaatcgttactttatttaatt

SEQ ID NO: 125111 - DNA, 25 bp, Probe sequence
atgtcattttaacgcattaatctat

SEQ ID NO: 125112 - DNA, 25 bp, Probe sequence
agtgtagcgatttatattttattaa

SEQ ID NO: 125113 - DNA, 25 bp, Probe sequence
aagtgtagcgatttatattttatta

SEQ ID NO: 125114 - DNA, 25 bp, Probe sequence
aatctgaatcgttactttatttaat

SEQ ID NO: 125115 - DNA, 25 bp, Probe sequence
cgcattaatctattaaagtgtagcg

SEQ ID NO: 125116 - DNA, 25 bp, Probe sequence
ccctataattttattctttatgtca

SEQ ID NO: 125117 - DNA, 25 bp, Probe sequence
gtcattttaacgcattaatctatta

SEQ ID NO: 125118 - DNA, 25 bp, Probe sequence
tctttatgtcattttaacgcattaa

SEQ ID NO: 125119 - DNA, 25 bp, Probe sequence
tataattttattctttatgtcattt

SEQ ID NO: 125120 - DNA, 25 bp, Probe sequence
tttatgtcattttaacgcattaatc

SEQ ID NO: 125121 - DNA, 25 bp, Probe sequence
ttattctttatgtcattttaacgca

SEQ ID NO: 125122 - DNA, 25 bp, Probe sequence
atataacaaattttctactcacaaa

SEQ ID NO: 125123 - DNA, 25 bp, Probe sequence
actctactcttcacagtttaacaga

SEQ ID NO: 125124 - DNA, 25 bp, Probe sequence
aaatttccgtatattctcattctat

SEQ ID NO: 125125 - DNA, 25 bp, Probe sequence
aacaatctacttttcctagtttcat

SEQ ID NO: 125126 - DNA, 25 bp, Probe sequence
aatgttcgcaatactttaatctaat

SEQ ID NO: 125127 - DNA, 25 bp, Probe sequence
aatatttcttcttacatttcataat

SEQ ID NO: 125128 - DNA, 25 bp, Probe sequence
ctcaactacactatccaacttttta

SEQ ID NO: 125129 - DNA, 25 bp, Probe sequence
gaatttattcactttacttctccta

SEQ ID NO: 125130 - DNA, 25 bp, Probe sequence
gaaactttcgatcatattaattatt

SEQ ID NO: 125131 - DNA, 25 bp, Probe sequence
gacataaattgactacgcttctttc

SEQ ID NO: 125132 - DNA, 25 bp, Probe sequence
gactacgcttctttcaaaatcgact

SEQ ID NO: 125133 - DNA, 25 bp, Probe sequence
tcactttacttctcctattgtatgg

SEQ ID NO: 125134 - DNA, 25 bp, Probe sequence
tatatttttgcattttagtttttct

SEQ ID NO: 125135 - DNA, 25 bp, Probe sequence
ttcgtttttaactctactcttcaca

SEQ ID NO: 125136 - DNA, 25 bp, Probe sequence
ttctcattctattttattttttaca

SEQ ID NO: 125137 - DNA, 25 bp, Probe sequence
attaagaacccccagcatatgcttt

SEQ ID NO: 125138 - DNA, 25 bp, Probe sequence
agcctttcctcttcaaatagtcttt

SEQ ID NO: 125139 - DNA, 25 bp, Probe sequence
acaatatggatcgagcatcttgcat

SEQ ID NO: 125140 - DNA, 25 bp, Probe sequence
aaagcgacgatatatataatctaac

SEQ ID NO: 125141 - DNA, 25 bp, Probe sequence
caaactttgaatagcctttcctctt

SEQ ID NO: 125142 - DNA, 25 bp, Probe sequence
ctttcctcttcaaatagtctttatt

SEQ ID NO: 125143 - DNA, 25 bp, Probe sequence
gctgggggtttctcatacaatatgg

SEQ ID NO: 125144 - DNA, 25 bp, Probe sequence
gcatatgctttatatagcttgctgg

SEQ ID NO: 125145 - DNA, 25 bp, Probe sequence
gaatagcctttcctcttcaaatagt

SEQ ID NO: 125146 - DNA, 25 bp, Probe sequence
gaacccccagcatatgctttatata

SEQ ID NO: 125147 - DNA, 25 bp, Probe sequence
gatcgagcatcttgcatgtataaac

SEQ ID NO: 125148 - DNA, 25 bp, Probe sequence
tatagcttgctgggggtttctcata

SEQ ID NO: 125149 - DNA, 25 bp, Probe sequence
tttcatgcgatgagattgttttaga

SEQ ID NO: 125150 - DNA, 25 bp, Probe sequence
ttaaaatattaagaacccccagcat

SEQ ID NO: 125151 - DNA, 25 bp, Probe sequence
ttaatcttattaaaggtctctagga

SEQ ID NO: 125152 - DNA, 25 bp, Probe sequence
atatttaatttaagtcacacgttag

SEQ ID NO: 125153 - DNA, 25 bp, Probe sequence
acatacttactttagttcatacact

SEQ ID NO: 125154 - DNA, 25 bp, Probe sequence
aactgcttcaacctaaccttaatga

SEQ ID NO: 125155 - DNA, 25 bp, Probe sequence
caaactgcttcaacctaaccttaat

SEQ ID NO: 125156 - DNA, 25 bp, Probe sequence
aatatagtacgaaaactctcataaa

SEQ ID NO: 125157 - DNA, 25 bp, Probe sequence
caacctaaccttaatgaatgcatat

SEQ ID NO: 125158 - DNA, 25 bp, Probe sequence
ccactctctttcaattacactttaa

SEQ ID NO: 125159 - DNA, 25 bp, Probe sequence
gaagtagtctagctgaatgtggttt

SEQ ID NO: 125160 - DNA, 25 bp, Probe sequence
gttcatacactttcaatttatacac

SEQ ID NO: 125161 - DNA, 25 bp, Probe sequence
gttattaattctaactcatatttaa

SEQ ID NO: 125162 - DNA, 25 bp, Probe sequence
gtctagctgaatgtggtttaatgtt

SEQ ID NO: 125163 - DNA, 25 bp, Probe sequence
taaataccaaactgcttcaacctaa

SEQ ID NO: 125164 - DNA, 25 bp, Probe sequence
tacactttaaataccaaactgcttc

SEQ ID NO: 125165 - DNA, 25 bp, Probe sequence
tatacactgaagtagtctagctgaa

SEQ ID NO: 125166 - DNA, 25 bp, Probe sequence
ttattctcaaatgaacatacttact

SEQ ID NO: 125167 - DNA, 25 bp, Probe sequence
atatacataagagccccttaatttc

SEQ ID NO: 125168 - DNA, 25 bp, Probe sequence
atacataagagccccttaatttcca

SEQ ID NO: 125169 - DNA, 25 bp, Probe sequence
ataagagccccttaatttccatact

SEQ ID NO: 125170 - DNA, 25 bp, Probe sequence
atgacatatacataatttttaagag

SEQ ID NO: 125171 - DNA, 25 bp, Probe sequence
acataagagccccttaatttccata

SEQ ID NO: 125172 - DNA, 25 bp, Probe sequence
aaatcaaccaacaatttaatgacat

SEQ ID NO: 125173 - DNA, 25 bp, Probe sequence
caaccaacaatttaatgacatatac

SEQ ID NO: 125174 - DNA, 25 bp, Probe sequence
cataagagccccttaatttccatac

SEQ ID NO: 125175 - DNA, 25 bp, Probe sequence
ctataatataaagcgaggtgttgtt

SEQ ID NO: 125176 - DNA, 25 bp, Probe sequence
gactataatataaagcgaggtgttg

SEQ ID NO: 125177 - DNA, 25 bp, Probe sequence
taagagccccttaatttccatactt

SEQ ID NO: 125178 - DNA, 25 bp, Probe sequence
tacataagagccccttaatttccat

SEQ ID NO: 125179 - DNA, 25 bp, Probe sequence
tatacataagagccccttaatttcc

SEQ ID NO: 125180 - DNA, 25 bp, Probe sequence
tttttatatacataagagcccctta

SEQ ID NO: 125181 - DNA, 25 bp, Probe sequence
ttatatacataagagccccttaatt

SEQ ID NO: 125182 - DNA, 25 bp, Probe sequence
attatagcatatttataccgtttta

SEQ ID NO: 125183 - DNA, 25 bp, Probe sequence
atgaatgcgctttcaaaaattatct

SEQ ID NO: 125184 - DNA, 25 bp, Probe sequence
agctacttcaactcactatattaga

SEQ ID NO: 125185 - DNA, 25 bp, Probe sequence
aaattatctactattcttaatccta

SEQ ID NO: 125186 - DNA, 25 bp, Probe sequence
aaatttccccctcatgatgattatg

SEQ ID NO: 125187 - DNA, 25 bp, Probe sequence
aaataccccttttatcagataattg

SEQ ID NO: 125188 - DNA, 25 bp, Probe sequence
ctatcttgtattatcattaccgtca

SEQ ID NO: 125189 - DNA, 25 bp, Probe sequence
gaaagttgtctatcttgtattatca

SEQ ID NO: 125190 - DNA, 25 bp, Probe sequence
gacaagctacttcaactcactatat

SEQ ID NO: 125191 - DNA, 25 bp, Probe sequence
gattatgacaagctacttcaactca

SEQ ID NO: 125192 - DNA, 25 bp, Probe sequence
taatcctaatgtcatgcgaaacttt

SEQ ID NO: 125193 - DNA, 25 bp, Probe sequence
tatcattaccgtcaaaatacccctt

SEQ ID NO: 125194 - DNA, 25 bp, Probe sequence
tataccgttttatgaatgcgctttc

SEQ ID NO: 125195 - DNA, 25 bp, Probe sequence
tattcttaatcctaatgtcatgcga

SEQ ID NO: 125196 - DNA, 25 bp, Probe sequence
ttccccctcatgatgattatgacaa

SEQ ID NO: 125197 - DNA, 25 bp, Probe sequence
attagttctaagtttgtcacattta

SEQ ID NO: 125198 - DNA, 25 bp, Probe sequence
atcaacacttgatattagttctaag

SEQ ID NO: 125199 - DNA, 25 bp, Probe sequence
atctcgtgatgccatctattagcat

SEQ ID NO: 125200 - DNA, 25 bp, Probe sequence
aaatcgtcatcctttgtctattttc

SEQ ID NO: 125201 - DNA, 25 bp, Probe sequence
aactatcgcaaaaacttcttatatt

SEQ ID NO: 125202 - DNA, 25 bp, Probe sequence
gccatctattagcatttttatattc

SEQ ID NO: 125203 - DNA, 25 bp, Probe sequence
gcgtgatttgctcttccaaaaaagt

SEQ ID NO: 125204 - DNA, 25 bp, Probe sequence
gatagtcataaatctcgtgatgcca

SEQ ID NO: 125205 - DNA, 25 bp, Probe sequence
gttgattgcgtgatttgctcttcca

SEQ ID NO: 125206 - DNA, 25 bp, Probe sequence
gtcacatttagtattctattacagc

SEQ ID NO: 125207 - DNA, 25 bp, Probe sequence
gtcatcctttgtctattttctaatt

SEQ ID NO: 125208 - DNA, 25 bp, Probe sequence
gtctattttctaattactcatatat

SEQ ID NO: 125209 - DNA, 25 bp, Probe sequence
tcgtgttaggttgatttagcagata

SEQ ID NO: 125210 - DNA, 25 bp, Probe sequence
tcttatattatttgttgattgcgtg

SEQ ID NO: 125211 - DNA, 25 bp, Probe sequence
ttacagctattttaaaactatcgca

SEQ ID NO: 125212 - DNA, 25 bp, Probe sequence
atttcactttcaatgaactgttttt

SEQ ID NO: 125213 - DNA, 25 bp, Probe sequence
agtagaatttatttcactttcaatg

SEQ ID NO: 125214 - DNA, 25 bp, Probe sequence
agttttcattcctttagctatccta

SEQ ID NO: 125215 - DNA, 25 bp, Probe sequence
agctatcctaacccacagattagtg

SEQ ID NO: 125216 - DNA, 25 bp, Probe sequence
caaccttttcaatagtagttttcat

SEQ ID NO: 125217 - DNA, 25 bp, Probe sequence
ctttagctatcctaacccacagatt

SEQ ID NO: 125218 - DNA, 25 bp, Probe sequence
ctaacccacagattagtgatttcta

SEQ ID NO: 125219 - DNA, 25 bp, Probe sequence
gactaatttacaaccttttcaatag

SEQ ID NO: 125220 - DNA, 25 bp, Probe sequence
gttgtatttaactaacagttcatta

SEQ ID NO: 125221 - DNA, 25 bp, Probe sequence
gtgatttctatacaattcctctttt

SEQ ID NO: 125222 - DNA, 25 bp, Probe sequence
tcaatgaactgttttttatttacgt

SEQ ID NO: 125223 - DNA, 25 bp, Probe sequence
taatcatagacatgttgtatttaac

SEQ ID NO: 125224 - DNA, 25 bp, Probe sequence
tactatattactgtctaatcataga

SEQ ID NO: 125225 - DNA, 25 bp, Probe sequence
tatacaattcctcttttgtctttac

SEQ ID NO: 125226 - DNA, 25 bp, Probe sequence
ttcattcctttagctatcctaaccc

SEQ ID NO: 125227 - DNA, 25 bp, Probe sequence
ataatcatataaggaggttcttttc

SEQ ID NO: 125228 - DNA, 25 bp, Probe sequence
atcaattaatcactttttccaaaat

SEQ ID NO: 125229 - DNA, 25 bp, Probe sequence
atcactttttccaaaataatcatat

SEQ ID NO: 125230 - DNA, 25 bp, Probe sequence
atcatataaggaggttcttttcatt

SEQ ID NO: 125231 - DNA, 25 bp, Probe sequence
actttttccaaaataatcatataag

SEQ ID NO: 125232 - DNA, 25 bp, Probe sequence
aaaataatcatataaggaggttctt

SEQ ID NO: 125233 - DNA, 25 bp, Probe sequence
aatcatataaggaggttcttttcat

SEQ ID NO: 125234 - DNA, 25 bp, Probe sequence
aatcactttttccaaaataatcata

SEQ ID NO: 125235 - DNA, 25 bp, Probe sequence
aataatcatataaggaggttctttt

SEQ ID NO: 125236 - DNA, 25 bp, Probe sequence
cactttttccaaaataatcatataa

SEQ ID NO: 125237 - DNA, 25 bp, Probe sequence
tcactttttccaaaataatcatata

SEQ ID NO: 125238 - DNA, 25 bp, Probe sequence
tcaattaatcactttttccaaaata

SEQ ID NO: 125239 - DNA, 25 bp, Probe sequence
taatcatataaggaggttcttttca

SEQ ID NO: 125240 - DNA, 25 bp, Probe sequence
taatcactttttccaaaataatcat

SEQ ID NO: 125241 - DNA, 25 bp, Probe sequence
ttaatcactttttccaaaataatca

SEQ ID NO: 125242 - DNA, 25 bp, Probe sequence
atgcttccataatttgatgttcttg

SEQ ID NO: 125243 - DNA, 25 bp, Probe sequence
aacaataaatttcaaggtatacaca

SEQ ID NO: 125244 - DNA, 25 bp, Probe sequence
aacatggttttctttttatcatgat

SEQ ID NO: 125245 - DNA, 25 bp, Probe sequence
aaccatgcttccataatttgatgtt

SEQ ID NO: 125246 - DNA, 25 bp, Probe sequence
aataaaccatgcttccataatttga

SEQ ID NO: 125247 - DNA, 25 bp, Probe sequence
ccatgcttccataatttgatgttct

SEQ ID NO: 125248 - DNA, 25 bp, Probe sequence
gcttccataatttgatgttcttgaa

SEQ ID NO: 125249 - DNA, 25 bp, Probe sequence
gacaaaaataaaccatgcttccata

SEQ ID NO: 125250 - DNA, 25 bp, Probe sequence
gagacaaaaataaaccatgcttcca

SEQ ID NO: 125251 - DNA, 25 bp, Probe sequence
gttttctttttatcatgattaatta

SEQ ID NO: 125252 - DNA, 25 bp, Probe sequence
gtaaacatggttttctttttatcat

SEQ ID NO: 125253 - DNA, 25 bp, Probe sequence
tggttttctttttatcatgattaat

SEQ ID NO: 125254 - DNA, 25 bp, Probe sequence
tccataatttgatgttcttgaaaac

SEQ ID NO: 125255 - DNA, 25 bp, Probe sequence
taaaccatgcttccataatttgatg

SEQ ID NO: 125256 - DNA, 25 bp, Probe sequence
ttcaaggtatacacaaattttttgt

SEQ ID NO: 125257 - DNA, 25 bp, Probe sequence
atcatttccttaacgctaaaactgt

SEQ ID NO: 125258 - DNA, 25 bp, Probe sequence
atcatttatcatttccttaacgcta

SEQ ID NO: 125259 - DNA, 25 bp, Probe sequence
agaactatttgctgtgatatgtcat

SEQ ID NO: 125260 - DNA, 25 bp, Probe sequence
aacgcgtttatgcttccacaaaatt

SEQ ID NO: 125261 - DNA, 25 bp, Probe sequence
cttacacgagcattaattattaacg

SEQ ID NO: 125262 - DNA, 25 bp, Probe sequence
ccctccatgtcagtcttattttcat

SEQ ID NO: 125263 - DNA, 25 bp, Probe sequence
gaacacatgttcgtataatgtaatt

SEQ ID NO: 125264 - DNA, 25 bp, Probe sequence
gttgcaaaacagaacacatgttcgt

SEQ ID NO: 125265 - DNA, 25 bp, Probe sequence
gtttatgcttccacaaaatttttgt

SEQ ID NO: 125266 - DNA, 25 bp, Probe sequence
gtcagtcttattttcattttattaa

SEQ ID NO: 125267 - DNA, 25 bp, Probe sequence
gtgatatgtcattattcgattttaa

SEQ ID NO: 125268 - DNA, 25 bp, Probe sequence
tccctcttttttacttacacgagca

SEQ ID NO: 125269 - DNA, 25 bp, Probe sequence
tattaacgcgtttatgcttccacaa

SEQ ID NO: 125270 - DNA, 25 bp, Probe sequence
tattcgattttaattaatccctctt

SEQ ID NO: 125271 - DNA, 25 bp, Probe sequence
ttaacaatcatttatcatttcctta

SEQ ID NO: 125272 - DNA, 25 bp, Probe sequence
attataagaagggacccaacacaga

SEQ ID NO: 125273 - DNA, 25 bp, Probe sequence
agtgtagttgggtcatgttataatt

SEQ ID NO: 125274 - DNA, 25 bp, Probe sequence
agttgggtcatgttataatttttat

SEQ ID NO: 125275 - DNA, 25 bp, Probe sequence
aagggacccaacacagaaaattcat

SEQ ID NO: 125276 - DNA, 25 bp, Probe sequence
aatttttatacataaggcacctcgt

SEQ ID NO: 125277 - DNA, 25 bp, Probe sequence
caagttgggcaaagtgtcttatttt

SEQ ID NO: 125278 - DNA, 25 bp, Probe sequence
cataaggcacctcgttaatttagtt

SEQ ID NO: 125279 - DNA, 25 bp, Probe sequence
gacccaacacagaaaattcatttta

SEQ ID NO: 125280 - DNA, 25 bp, Probe sequence
gtgcaagttgggcaaagtgtcttat

SEQ ID NO: 125281 - DNA, 25 bp, Probe sequence
gggacccaacacagaaaattcattt

SEQ ID NO: 125282 - DNA, 25 bp, Probe sequence
ggtagtgtagttgggtcatgttata

SEQ ID NO: 125283 - DNA, 25 bp, Probe sequence
ggcacctcgttaatttagtttagtg

SEQ ID NO: 125284 - DNA, 25 bp, Probe sequence
tcattttattgaattttacatttat

SEQ ID NO: 125285 - DNA, 25 bp, Probe sequence
tatacataaggcacctcgttaattt

SEQ ID NO: 125286 - DNA, 25 bp, Probe sequence
tttacatttatgtgcaagttgggca

SEQ ID NO: 125287 - DNA, 25 bp, Probe sequence
agacggcaccctaggaaagcgaagc

SEQ ID NO: 125288 - DNA, 25 bp, Probe sequence
acggcaccctaggaaagcgaagcca

SEQ ID NO: 125289 - DNA, 25 bp, Probe sequence
aaattatcttactgctgttttttag

SEQ ID NO: 125290 - DNA, 25 bp, Probe sequence
aattgaaaattatcttactgctgtt

SEQ ID NO: 125291 - DNA, 25 bp, Probe sequence
ctgagacggcaccctaggaaagcga

SEQ ID NO: 125292 - DNA, 25 bp, Probe sequence
gcgaagccattcaatacgaagtatt

SEQ ID NO: 125293 - DNA, 25 bp, Probe sequence
gcaccctaggaaagcgaagccattc

SEQ ID NO: 125294 - DNA, 25 bp, Probe sequence
gaacagcagtaagatattttctaat

SEQ ID NO: 125295 - DNA, 25 bp, Probe sequence
gatttatgtcccagcctctaaatgt

SEQ ID NO: 125296 - DNA, 25 bp, Probe sequence
ggaaagcgaagccattcaatacgaa

SEQ ID NO: 125297 - DNA, 25 bp, Probe sequence
tcttactgctgttttttagggattt

SEQ ID NO: 125298 - DNA, 25 bp, Probe sequence
tactgctgttttttagggatttatg

SEQ ID NO: 125299 - DNA, 25 bp, Probe sequence
tagggatttatgtcccagcctctaa

SEQ ID NO: 125300 - DNA, 25 bp, Probe sequence
tttatgtcccagcctctaaatgtta

SEQ ID NO: 125301 - DNA, 25 bp, Probe sequence
ttatcttactgctgttttttaggga

SEQ ID NO: 125302 - DNA, 25 bp, Probe sequence
atctacatttcattatactatcata

SEQ ID NO: 125303 - DNA, 25 bp, Probe sequence
atcgtgaatgctaacttaagattgt

SEQ ID NO: 125304 - DNA, 25 bp, Probe sequence
atgaccttatatgctaatgttaaca

SEQ ID NO: 125305 - DNA, 25 bp, Probe sequence
agtcttatacaccgagaaatcacct

SEQ ID NO: 125306 - DNA, 25 bp, Probe sequence
aacaatgactattatcgtgaatgct

SEQ ID NO: 125307 - DNA, 25 bp, Probe sequence
aatgccgaggaacctctgtttcaac

SEQ ID NO: 125308 - DNA, 25 bp, Probe sequence
aatacctatctacatttcattatac

SEQ ID NO: 125309 - DNA, 25 bp, Probe sequence
caacgtgacatgaccttatatgcta

SEQ ID NO: 125310 - DNA, 25 bp, Probe sequence
cttaatatccccaccatctataaaa

SEQ ID NO: 125311 - DNA, 25 bp, Probe sequence
ctcaatttcacctctgttaaattaa

SEQ ID NO: 125312 - DNA, 25 bp, Probe sequence
gaacctctgtttcaacgtgacatga

SEQ ID NO: 125313 - DNA, 25 bp, Probe sequence
gaaatcacctcaaacaattttatat

SEQ ID NO: 125314 - DNA, 25 bp, Probe sequence
gtgagcaagctaatgattattttca

SEQ ID NO: 125315 - DNA, 25 bp, Probe sequence
taatcattaaataaatacccacttt

SEQ ID NO: 125316 - DNA, 25 bp, Probe sequence
tacccacttttacgaaatatattca

SEQ ID NO: 125317 - DNA, 25 bp, Probe sequence
atgcttcctaatatcggtgcttaca

SEQ ID NO: 125318 - DNA, 25 bp, Probe sequence
aacaccgatattagagaaattatgc

SEQ ID NO: 125319 - DNA, 25 bp, Probe sequence
aattatgcttcctaatatcggtgct

SEQ ID NO: 125320 - DNA, 25 bp, Probe sequence
cttcctaatatcggtgcttacatcc

SEQ ID NO: 125321 - DNA, 25 bp, Probe sequence
ctaatatcggtgcttacatccttta

SEQ ID NO: 125322 - DNA, 25 bp, Probe sequence
cctaatatcggtgcttacatccttt

SEQ ID NO: 125323 - DNA, 25 bp, Probe sequence
gcttcctaatatcggtgcttacatc

SEQ ID NO: 125324 - DNA, 25 bp, Probe sequence
gaaattatgcttcctaatatcggtg

SEQ ID NO: 125325 - DNA, 25 bp, Probe sequence
gagaaattatgcttcctaatatcgg

SEQ ID NO: 125326 - DNA, 25 bp, Probe sequence
tgcttcctaatatcggtgcttacat

SEQ ID NO: 125327 - DNA, 25 bp, Probe sequence
tcctaatatcggtgcttacatcctt

SEQ ID NO: 125328 - DNA, 25 bp, Probe sequence
taatatcggtgcttacatcctttat

SEQ ID NO: 125329 - DNA, 25 bp, Probe sequence
tatgcttcctaatatcggtgcttac

SEQ ID NO: 125330 - DNA, 25 bp, Probe sequence
ttatgcttcctaatatcggtgctta

SEQ ID NO: 125331 - DNA, 25 bp, Probe sequence
ttcctaatatcggtgcttacatcct

SEQ ID NO: 125332 - DNA, 25 bp, Probe sequence
aaattggtataatgttgtaaatgct

SEQ ID NO: 125333 - DNA, 25 bp, Probe sequence
aatgttgtaaatgctaaaggaggtt

SEQ ID NO: 125334 - DNA, 25 bp, Probe sequence
cattaccttttattactataaattg

SEQ ID NO: 125335 - DNA, 25 bp, Probe sequence
gcaattaatttatttcattaccttt

SEQ ID NO: 125336 - DNA, 25 bp, Probe sequence
gaatttgcaattaatttatttcatt

SEQ ID NO: 125337 - DNA, 25 bp, Probe sequence
tgttgtaaatgctaaaggaggtttt

SEQ ID NO: 125338 - DNA, 25 bp, Probe sequence
tgcaattaatttatttcattacctt

SEQ ID NO: 125339 - DNA, 25 bp, Probe sequence
tcattaccttttattactataaatt

SEQ ID NO: 125340 - DNA, 25 bp, Probe sequence
tcatccttaacaaaaattaacaaag

SEQ ID NO: 125341 - DNA, 25 bp, Probe sequence
taatgttgtaaatgctaaaggaggt

SEQ ID NO: 125342 - DNA, 25 bp, Probe sequence
tatttcattaccttttattactata

SEQ ID NO: 125343 - DNA, 25 bp, Probe sequence
tttgcaattaatttatttcattacc

SEQ ID NO: 125344 - DNA, 25 bp, Probe sequence
ttatttcattaccttttattactat

SEQ ID NO: 125345 - DNA, 25 bp, Probe sequence
ttcattaccttttattactataaat

SEQ ID NO: 125346 - DNA, 25 bp, Probe sequence
ttgcaattaatttatttcattacct

SEQ ID NO: 125347 - DNA, 25 bp, Probe sequence
atctctacgtgacaaccgtagcgtc

SEQ ID NO: 125348 - DNA, 25 bp, Probe sequence
acgtgacaaccgtagcgtcaacata

SEQ ID NO: 125349 - DNA, 25 bp, Probe sequence
acaaccgtagcgtcaacataaacaa

SEQ ID NO: 125350 - DNA, 25 bp, Probe sequence
aaaacgaatgtctttaatctctacg

SEQ ID NO: 125351 - DNA, 25 bp, Probe sequence
aacgaatgtctttaatctctacgtg

SEQ ID NO: 125352 - DNA, 25 bp, Probe sequence
aaccgtagcgtcaacataaacaatc

SEQ ID NO: 125353 - DNA, 25 bp, Probe sequence
ctttaatctctacgtgacaaccgta

SEQ ID NO: 125354 - DNA, 25 bp, Probe sequence
ctctacgtgacaaccgtagcgtcaa

SEQ ID NO: 125355 - DNA, 25 bp, Probe sequence
cgaatgtctttaatctctacgtgac

SEQ ID NO: 125356 - DNA, 25 bp, Probe sequence
ccgtagcgtcaacataaacaatcgt

SEQ ID NO: 125357 - DNA, 25 bp, Probe sequence
gcgtcaacataaacaatcgttttaa

SEQ ID NO: 125358 - DNA, 25 bp, Probe sequence
gtagcgtcaacataaacaatcgttt

SEQ ID NO: 125359 - DNA, 25 bp, Probe sequence
gtctttaatctctacgtgacaaccg

SEQ ID NO: 125360 - DNA, 25 bp, Probe sequence
gtgacaaccgtagcgtcaacataaa

SEQ ID NO: 125361 - DNA, 25 bp, Probe sequence
tacgtgacaaccgtagcgtcaacat

SEQ ID NO: 125362 - DNA, 25 bp, Probe sequence
atagcgcaacaaaaccattcaatca

SEQ ID NO: 125363 - DNA, 25 bp, Probe sequence
cacagaattatactacacaacccca

SEQ ID NO: 125364 - DNA, 25 bp, Probe sequence
ccccaagtctggtaccagcagactt

SEQ ID NO: 125365 - DNA, 25 bp, Probe sequence
gcagacttggggttatttatgtgtg

SEQ ID NO: 125366 - DNA, 25 bp, Probe sequence
gatattatttaagtgtatccacaga

SEQ ID NO: 125367 - DNA, 25 bp, Probe sequence
gttcaaggtactaatcactttcaac

SEQ ID NO: 125368 - DNA, 25 bp, Probe sequence
gtgtgtaggatcattttttattttt

SEQ ID NO: 125369 - DNA, 25 bp, Probe sequence
ggtaccagcagacttggggttattt

SEQ ID NO: 125370 - DNA, 25 bp, Probe sequence
ggtactaatcactttcaactaaaat

SEQ ID NO: 125371 - DNA, 25 bp, Probe sequence
tggggttatttatgtgtgtaggatc

SEQ ID NO: 125372 - DNA, 25 bp, Probe sequence
tcactttcaactaaaatagcgcaac

SEQ ID NO: 125373 - DNA, 25 bp, Probe sequence
tcacctcaacatcgacattataaca

SEQ ID NO: 125374 - DNA, 25 bp, Probe sequence
tactacacaaccccaagtctggtac

SEQ ID NO: 125375 - DNA, 25 bp, Probe sequence
tattgattgcgatatattgtgttca

SEQ ID NO: 125376 - DNA, 25 bp, Probe sequence
tttatttcacctcaacatcgacatt

SEQ ID NO: 125377 - DNA, 25 bp, Probe sequence
attattcgttaattcaccaacaaca

SEQ ID NO: 125378 - DNA, 25 bp, Probe sequence
atataggcatacaatttttttaaag

SEQ ID NO: 125379 - DNA, 25 bp, Probe sequence
atgttcgtattttggcagcagattt

SEQ ID NO: 125380 - DNA, 25 bp, Probe sequence
acacctccgttcgactaaagtatca

SEQ ID NO: 125381 - DNA, 25 bp, Probe sequence
aacaacactttatctttggtataat

SEQ ID NO: 125382 - DNA, 25 bp, Probe sequence
aattcaccaacaacactttatcttt

SEQ ID NO: 125383 - DNA, 25 bp, Probe sequence
catactgaaggatgacctacaccta

SEQ ID NO: 125384 - DNA, 25 bp, Probe sequence
ctacacctccgttcgactaaagtat

SEQ ID NO: 125385 - DNA, 25 bp, Probe sequence
gcagcagattttacatattattcgt

SEQ ID NO: 125386 - DNA, 25 bp, Probe sequence
gaaggatgacctacacctattctaa

SEQ ID NO: 125387 - DNA, 25 bp, Probe sequence
gaacatatgttcgtattttggcagc

SEQ ID NO: 125388 - DNA, 25 bp, Probe sequence
gacctacacctattctaacataaaa

SEQ ID NO: 125389 - DNA, 25 bp, Probe sequence
gtattttggcagcagattttacata

SEQ ID NO: 125390 - DNA, 25 bp, Probe sequence
ggatgacctacacctattctaacat

SEQ ID NO: 125391 - DNA, 25 bp, Probe sequence
tccgttcgactaaagtatcatactg

SEQ ID NO: 125392 - DNA, 25 bp, Probe sequence
attattccttctttcaaagtatcat

SEQ ID NO: 125393 - DNA, 25 bp, Probe sequence
acgattgtgagatgccttattataa

SEQ ID NO: 125394 - DNA, 25 bp, Probe sequence
aacattcaagcatcacatctctaca

SEQ ID NO: 125395 - DNA, 25 bp, Probe sequence
aatgtaaaaggcaccccacgattgt

SEQ ID NO: 125396 - DNA, 25 bp, Probe sequence
aagcatcacatctctacaaatgtaa

SEQ ID NO: 125397 - DNA, 25 bp, Probe sequence
aatttcaaccaataatctgatgagt

SEQ ID NO: 125398 - DNA, 25 bp, Probe sequence
gcaccccacgattgtgagatgcctt

SEQ ID NO: 125399 - DNA, 25 bp, Probe sequence
gcaacttgtcaaacactatacctaa

SEQ ID NO: 125400 - DNA, 25 bp, Probe sequence
gagtatgactcggattattggtttt

SEQ ID NO: 125401 - DNA, 25 bp, Probe sequence
gatatattttattcagcaacttgtc

SEQ ID NO: 125402 - DNA, 25 bp, Probe sequence
ggcaaatcacttcaaacattcaagc

SEQ ID NO: 125403 - DNA, 25 bp, Probe sequence
tgactcggattattggttttttatt

SEQ ID NO: 125404 - DNA, 25 bp, Probe sequence
tagttttatacatctctcctaacaa

SEQ ID NO: 125405 - DNA, 25 bp, Probe sequence
tataacttttggcaaatcacttcaa

SEQ ID NO: 125406 - DNA, 25 bp, Probe sequence
tatacatctctcctaacaaaattta

SEQ ID NO: 125407 - DNA, 25 bp, Probe sequence
attatagccagactttctctatttt

SEQ ID NO: 125408 - DNA, 25 bp, Probe sequence
atgttgtttgattttgtttatacca

SEQ ID NO: 125409 - DNA, 25 bp, Probe sequence
atgtaattcgtgattgcaactttat

SEQ ID NO: 125410 - DNA, 25 bp, Probe sequence
actttattatagccagactttctct

SEQ ID NO: 125411 - DNA, 25 bp, Probe sequence
aattatctctccttttttatgtaat

SEQ ID NO: 125412 - DNA, 25 bp, Probe sequence
cagactttctctattttttgaatta

SEQ ID NO: 125413 - DNA, 25 bp, Probe sequence
ctttctctattttttgaattaactg

SEQ ID NO: 125414 - DNA, 25 bp, Probe sequence
ctctccttttttatgtaattcgtga

SEQ ID NO: 125415 - DNA, 25 bp, Probe sequence
gccagactttctctattttttgaat

SEQ ID NO: 125416 - DNA, 25 bp, Probe sequence
gcaactttattatagccagactttc

SEQ ID NO: 125417 - DNA, 25 bp, Probe sequence
tgattttgtttataccaagtttcaa

SEQ ID NO: 125418 - DNA, 25 bp, Probe sequence
tgattaactaactaatttacaatac

SEQ ID NO: 125419 - DNA, 25 bp, Probe sequence
tacaatacctaaaatgttgtttgat

SEQ ID NO: 125420 - DNA, 25 bp, Probe sequence
tagccagactttctctattttttga

SEQ ID NO: 125421 - DNA, 25 bp, Probe sequence
tatctctccttttttatgtaattcg

SEQ ID NO: 125422 - DNA, 25 bp, Probe sequence
attttgcatctattttgttgtaagc

SEQ ID NO: 125423 - DNA, 25 bp, Probe sequence
atttagttaatcaattttgcatcta

SEQ ID NO: 125424 - DNA, 25 bp, Probe sequence
atcaattttgcatctattttgttgt

SEQ ID NO: 125425 - DNA, 25 bp, Probe sequence
atctattttgttgtaagctatataa

SEQ ID NO: 125426 - DNA, 25 bp, Probe sequence
aatcaattttgcatctattttgttg

SEQ ID NO: 125427 - DNA, 25 bp, Probe sequence
aattttgcatctattttgttgtaag

SEQ ID NO: 125428 - DNA, 25 bp, Probe sequence
gcatctattttgttgtaagctatat

SEQ ID NO: 125429 - DNA, 25 bp, Probe sequence
gttgtaagctatataaaaggagtga

SEQ ID NO: 125430 - DNA, 25 bp, Probe sequence
gttaatcaattttgcatctattttg

SEQ ID NO: 125431 - DNA, 25 bp, Probe sequence
tcaattttgcatctattttgttgta

SEQ ID NO: 125432 - DNA, 25 bp, Probe sequence
taatcaattttgcatctattttgtt

SEQ ID NO: 125433 - DNA, 25 bp, Probe sequence
tagttaatcaattttgcatctattt

SEQ ID NO: 125434 - DNA, 25 bp, Probe sequence
tttgcatctattttgttgtaagcta

SEQ ID NO: 125435 - DNA, 25 bp, Probe sequence
ttttgcatctattttgttgtaagct

SEQ ID NO: 125436 - DNA, 25 bp, Probe sequence
ttgcatctattttgttgtaagctat

SEQ ID NO: 125437 - DNA, 25 bp, Probe sequence
atatcaaggtttataactttatcat

SEQ ID NO: 125438 - DNA, 25 bp, Probe sequence
acatcaaaataatcacatgtttgtg

SEQ ID NO: 125439 - DNA, 25 bp, Probe sequence
aaagtaaaacagcataatatcaagg

SEQ ID NO: 125440 - DNA, 25 bp, Probe sequence
aactcagaattccaattttataata

SEQ ID NO: 125441 - DNA, 25 bp, Probe sequence
aatattgcttgacatatcaaactag

SEQ ID NO: 125442 - DNA, 25 bp, Probe sequence
caaactagatagtactattttgaat

SEQ ID NO: 125443 - DNA, 25 bp, Probe sequence
caccccaaaagctagactgaaaaat

SEQ ID NO: 125444 - DNA, 25 bp, Probe sequence
gaatgtacaccccaaaagctagact

SEQ ID NO: 125445 - DNA, 25 bp, Probe sequence
gtttgtgtggaatgtacaccccaaa

SEQ ID NO: 125446 - DNA, 25 bp, Probe sequence
gtagacaactcagaattccaatttt

SEQ ID NO: 125447 - DNA, 25 bp, Probe sequence
gtacaccccaaaagctagactgaaa

SEQ ID NO: 125448 - DNA, 25 bp, Probe sequence
ggtttataactttatcattatcaat

SEQ ID NO: 125449 - DNA, 25 bp, Probe sequence
tctattttttgaggtgtatttttat

SEQ ID NO: 125450 - DNA, 25 bp, Probe sequence
tcattatcaataatacctcatataa

SEQ ID NO: 125451 - DNA, 25 bp, Probe sequence
taatcaaaaattcattgtaaacttt

SEQ ID NO: 125452 - DNA, 25 bp, Probe sequence
atggctgcaccattcttaatgacta

SEQ ID NO: 125453 - DNA, 25 bp, Probe sequence
aatgctgattatgtatggacgccta

SEQ ID NO: 125454 - DNA, 25 bp, Probe sequence
aatactttattgtttgcctatactg

SEQ ID NO: 125455 - DNA, 25 bp, Probe sequence
aattttttcataatggctgcaccat

SEQ ID NO: 125456 - DNA, 25 bp, Probe sequence
aattgtctatttcatctgcattata

SEQ ID NO: 125457 - DNA, 25 bp, Probe sequence
ctacagttacgttatttattttgag

SEQ ID NO: 125458 - DNA, 25 bp, Probe sequence
gcaccattcttaatgactaatgctg

SEQ ID NO: 125459 - DNA, 25 bp, Probe sequence
gagtttgattattttcttgatattt

SEQ ID NO: 125460 - DNA, 25 bp, Probe sequence
gatgtcgttcatttaacaattttca

SEQ ID NO: 125461 - DNA, 25 bp, Probe sequence
gtttgcctatactgttttatttatg

SEQ ID NO: 125462 - DNA, 25 bp, Probe sequence
tgttatttacctaatttatagtcta

SEQ ID NO: 125463 - DNA, 25 bp, Probe sequence
tcatctgcattataaattttttcat

SEQ ID NO: 125464 - DNA, 25 bp, Probe sequence
tatggacgcctatgactacagttac

SEQ ID NO: 125465 - DNA, 25 bp, Probe sequence
tagtctaattgtctatttcatctgc

SEQ ID NO: 125466 - DNA, 25 bp, Probe sequence
tatgaacacttttatattatctaga

SEQ ID NO: 125467 - DNA, 25 bp, Probe sequence
atttcgtcgattagattaaactcat

SEQ ID NO: 125468 - DNA, 25 bp, Probe sequence
aactagcccgaaaaggagcaataca

SEQ ID NO: 125469 - DNA, 25 bp, Probe sequence
ataacacatatacattgatttggaa

SEQ ID NO: 125470 - DNA, 25 bp, Probe sequence
agcaccgaaatgcttacctacttcc

SEQ ID NO: 125471 - DNA, 25 bp, Probe sequence
agcccgaaggctagcttatgaatag

SEQ ID NO: 125472 - DNA, 25 bp, Probe sequence
gcacaaaaaaactagcccgaaggct

SEQ ID NO: 125473 - DNA, 25 bp, Probe sequence
gaaaggcgctccttgaaaacgccca

SEQ ID NO: 125474 - DNA, 25 bp, Probe sequence
ggcgctccttgaaaacgcccaaggt

SEQ ID NO: 125475 - DNA, 25 bp, Probe sequence
ggctactattgcattatctaatttt

SEQ ID NO: 125476 - DNA, 25 bp, Probe sequence
tgcttacctacttcccataaacaat

SEQ ID NO: 125477 - DNA, 25 bp, Probe sequence
tcaagaccaaattcatcaaaacact

SEQ ID NO: 125478 - DNA, 25 bp, Probe sequence
taaactcattttaggaatttcgcaa

SEQ ID NO: 125479 - DNA, 25 bp, Probe sequence
tatcaaattgacataccttattgta

SEQ ID NO: 125480 - DNA, 25 bp, Probe sequence
tatagcgttttttagatcatttcaa

SEQ ID NO: 125481 - DNA, 25 bp, Probe sequence
tttattctccttagtaattagtact

SEQ ID NO: 125482 - DNA, 25 bp, Probe sequence
atttcataacttgccaaacctttat

SEQ ID NO: 125483 - DNA, 25 bp, Probe sequence
aggtttggcagacatttcataactt

SEQ ID NO: 125484 - DNA, 25 bp, Probe sequence
agacatttcataacttgccaaacct

SEQ ID NO: 125485 - DNA, 25 bp, Probe sequence
acatttcataacttgccaaaccttt

SEQ ID NO: 125486 - DNA, 25 bp, Probe sequence
aaggtttggcagacatttcataact

SEQ ID NO: 125487 - DNA, 25 bp, Probe sequence
cagacatttcataacttgccaaacc

SEQ ID NO: 125488 - DNA, 25 bp, Probe sequence
catttcataacttgccaaaccttta

SEQ ID NO: 125489 - DNA, 25 bp, Probe sequence
gcagacatttcataacttgccaaac

SEQ ID NO: 125490 - DNA, 25 bp, Probe sequence
gacatttcataacttgccaaacctt

SEQ ID NO: 125491 - DNA, 25 bp, Probe sequence
gtttggcagacatttcataacttgc

SEQ ID NO: 125492 - DNA, 25 bp, Probe sequence
gtagatatttcttttttatataaag

SEQ ID NO: 125493 - DNA, 25 bp, Probe sequence
ggtttggcagacatttcataacttg

SEQ ID NO: 125494 - DNA, 25 bp, Probe sequence
taaaggtttggcagacatttcataa

SEQ ID NO: 125495 - DNA, 25 bp, Probe sequence
tataaaggtttggcagacatttcat

SEQ ID NO: 125496 - DNA, 25 bp, Probe sequence
tttcataacttgccaaacctttata

SEQ ID NO: 125497 - DNA, 25 bp, Probe sequence
attaaccggaaggctagctataaca

SEQ ID NO: 125498 - DNA, 25 bp, Probe sequence
agtatgaaaactatgctctctatca

SEQ ID NO: 125499 - DNA, 25 bp, Probe sequence
acgtcctttgaatacgtctagaaag

SEQ ID NO: 125500 - DNA, 25 bp, Probe sequence
acaggctatatagttcactcctact

SEQ ID NO: 125501 - DNA, 25 bp, Probe sequence
aaaaaacacccagtgacatgcttgg

SEQ ID NO: 125502 - DNA, 25 bp, Probe sequence
aactatgctctctatcataagaaaa

SEQ ID NO: 125503 - DNA, 25 bp, Probe sequence
aatagttgatgcatgtgtaacacat

SEQ ID NO: 125504 - DNA, 25 bp, Probe sequence
catacaatctaaaaagacgtccttt

SEQ ID NO: 125505 - DNA, 25 bp, Probe sequence
cctgcctaaaaaaggattatccact

SEQ ID NO: 125506 - DNA, 25 bp, Probe sequence
ggttactaggccacttaacaggcta

SEQ ID NO: 125507 - DNA, 25 bp, Probe sequence
gctaaagtcatatatactacggggg

SEQ ID NO: 125508 - DNA, 25 bp, Probe sequence
gaaggctagctataacatacaatct

SEQ ID NO: 125509 - DNA, 25 bp, Probe sequence
gacatgcttgggtgaacaaggatgt

SEQ ID NO: 125510 - DNA, 25 bp, Probe sequence
gttcactcctactatatacaattaa

SEQ ID NO: 125511 - DNA, 25 bp, Probe sequence
gtaaactattatacgggaatgctaa

SEQ ID NO: 125512 - DNA, 25 bp, Probe sequence
attgctttctataataaacaactat

SEQ ID NO: 125513 - DNA, 25 bp, Probe sequence
actacacatattcaatcaagacatt

SEQ ID NO: 125514 - DNA, 25 bp, Probe sequence
aagataattttcactacacatattc

SEQ ID NO: 125515 - DNA, 25 bp, Probe sequence
aatcaagacattgctttctataata

SEQ ID NO: 125516 - DNA, 25 bp, Probe sequence
aattttcactacacatattcaatca

SEQ ID NO: 125517 - DNA, 25 bp, Probe sequence
caagacattgctttctataataaac

SEQ ID NO: 125518 - DNA, 25 bp, Probe sequence
gacattgctttctataataaacaac

SEQ ID NO: 125519 - DNA, 25 bp, Probe sequence
gataattttcactacacatattcaa

SEQ ID NO: 125520 - DNA, 25 bp, Probe sequence
gtgcatgaatgagaatttgatgaaa

SEQ ID NO: 125521 - DNA, 25 bp, Probe sequence
tcactacacatattcaatcaagaca

SEQ ID NO: 125522 - DNA, 25 bp, Probe sequence
taattttcactacacatattcaatc

SEQ ID NO: 125523 - DNA, 25 bp, Probe sequence
tattcaatcaagacattgctttcta

SEQ ID NO: 125524 - DNA, 25 bp, Probe sequence
ttttcactacacatattcaatcaag

SEQ ID NO: 125525 - DNA, 25 bp, Probe sequence
ttcaatcaagacattgctttctata

SEQ ID NO: 125526 - DNA, 25 bp, Probe sequence
ttcactacacatattcaatcaagac

SEQ ID NO: 125527 - DNA, 25 bp, Probe sequence
atatcaacaacttcattttatattg

SEQ ID NO: 125528 - DNA, 25 bp, Probe sequence
atcaacaacttcattttatattgag

SEQ ID NO: 125529 - DNA, 25 bp, Probe sequence
atgataaatatcaacaacttcattt

SEQ ID NO: 125530 - DNA, 25 bp, Probe sequence
acaacttcattttatattgagaaaa

SEQ ID NO: 125531 - DNA, 25 bp, Probe sequence
aaatatcaacaacttcattttatat

SEQ ID NO: 125532 - DNA, 25 bp, Probe sequence
aacaacttcattttatattgagaaa

SEQ ID NO: 125533 - DNA, 25 bp, Probe sequence
aatatcaacaacttcattttatatt

SEQ ID NO: 125534 - DNA, 25 bp, Probe sequence
caacaacttcattttatattgagaa

SEQ ID NO: 125535 - DNA, 25 bp, Probe sequence
gatgataaatatcaacaacttcatt

SEQ ID NO: 125536 - DNA, 25 bp, Probe sequence
gataaatatcaacaacttcatttta

SEQ ID NO: 125537 - DNA, 25 bp, Probe sequence
tgataaatatcaacaacttcatttt

SEQ ID NO: 125538 - DNA, 25 bp, Probe sequence
tcaacaacttcattttatattgaga

SEQ ID NO: 125539 - DNA, 25 bp, Probe sequence
taacacacttatttaagatgataaa

SEQ ID NO: 125540 - DNA, 25 bp, Probe sequence
taaatatcaacaacttcattttata

SEQ ID NO: 125541 - DNA, 25 bp, Probe sequence
tatcaacaacttcattttatattga

SEQ ID NO: 125542 - DNA, 25 bp, Probe sequence
accatcgaaaccagccaaagttagc

SEQ ID NO: 125543 - DNA, 25 bp, Probe sequence
atttaaccatcgaaaccagccaaag

SEQ ID NO: 125544 - DNA, 25 bp, Probe sequence
ataaccatttaaccatcgaaaccag

SEQ ID NO: 125545 - DNA, 25 bp, Probe sequence
accatttaaccatcgaaaccagcca

SEQ ID NO: 125546 - DNA, 25 bp, Probe sequence
aaccatcgaaaccagccaaagttag

SEQ ID NO: 125547 - DNA, 25 bp, Probe sequence
catcgaaaccagccaaagttagcga

SEQ ID NO: 125548 - DNA, 25 bp, Probe sequence
catttaaccatcgaaaccagccaaa

SEQ ID NO: 125549 - DNA, 25 bp, Probe sequence
cgaaaccagccaaagttagcgatgg

SEQ ID NO: 125550 - DNA, 25 bp, Probe sequence
ccatcgaaaccagccaaagttagcg

SEQ ID NO: 125551 - DNA, 25 bp, Probe sequence
ccatttaaccatcgaaaccagccaa

SEQ ID NO: 125552 - DNA, 25 bp, Probe sequence
taaccatcgaaaccagccaaagtta

SEQ ID NO: 125553 - DNA, 25 bp, Probe sequence
tcgaaaccagccaaagttagcgatg

SEQ ID NO: 125554 - DNA, 25 bp, Probe sequence
taaccatttaaccatcgaaaccagc

SEQ ID NO: 125555 - DNA, 25 bp, Probe sequence
tttaaccatcgaaaccagccaaagt

SEQ ID NO: 125556 - DNA, 25 bp, Probe sequence
ttaaccatcgaaaccagccaaagtt

SEQ ID NO: 125557 - DNA, 25 bp, Probe sequence
attctcgctttgttcaaaactatct

SEQ ID NO: 125558 - DNA, 25 bp, Probe sequence
agcatattatagcacatatactttt

SEQ ID NO: 125559 - DNA, 25 bp, Probe sequence
actttcagattattctcgctttgtt

SEQ ID NO: 125560 - DNA, 25 bp, Probe sequence
cacatatactttttttactgcttgt

SEQ ID NO: 125561 - DNA, 25 bp, Probe sequence
cgctttgttcaaaactatctataga

SEQ ID NO: 125562 - DNA, 25 bp, Probe sequence
gcttgtatactttcagattattctc

SEQ ID NO: 125563 - DNA, 25 bp, Probe sequence
gattattctcgctttgttcaaaact

SEQ ID NO: 125564 - DNA, 25 bp, Probe sequence
gtatactttcagattattctcgctt

SEQ ID NO: 125565 - DNA, 25 bp, Probe sequence
tcagattattctcgctttgttcaaa

SEQ ID NO: 125566 - DNA, 25 bp, Probe sequence
taacttatggtactttttatagatt

SEQ ID NO: 125567 - DNA, 25 bp, Probe sequence
tactttttttactgcttgtatactt

SEQ ID NO: 125568 - DNA, 25 bp, Probe sequence
tatagcacatatactttttttactg

SEQ ID NO: 125569 - DNA, 25 bp, Probe sequence
tatagattttaaattttttcagcca

SEQ ID NO: 125570 - DNA, 25 bp, Probe sequence
tttttataaaacttacaaacagcag

SEQ ID NO: 125571 - DNA, 25 bp, Probe sequence
tttactgcttgtatactttcagatt

SEQ ID NO: 125572 - DNA, 25 bp, Probe sequence
attccatataaacttgttattatcc

SEQ ID NO: 125573 - DNA, 25 bp, Probe sequence
ataatagattatttttgttggagta

SEQ ID NO: 125574 - DNA, 25 bp, Probe sequence
ataattccatataaacttgttatta

SEQ ID NO: 125575 - DNA, 25 bp, Probe sequence
agcataattccatataaacttgtta

SEQ ID NO: 125576 - DNA, 25 bp, Probe sequence
aaagcataattccatataaacttgt

SEQ ID NO: 125577 - DNA, 25 bp, Probe sequence
catataaacttgttattatccgaaa

SEQ ID NO: 125578 - DNA, 25 bp, Probe sequence
ctctaaagcataattccatataaac

SEQ ID NO: 125579 - DNA, 25 bp, Probe sequence
gcataattccatataaacttgttat

SEQ ID NO: 125580 - DNA, 25 bp, Probe sequence
gattatttttgttggagtaattatt

SEQ ID NO: 125581 - DNA, 25 bp, Probe sequence
ggagtaattattagttatatacaat

SEQ ID NO: 125582 - DNA, 25 bp, Probe sequence
tgttattatccgaaatttttgtata

SEQ ID NO: 125583 - DNA, 25 bp, Probe sequence
tccatataaacttgttattatccga

SEQ ID NO: 125584 - DNA, 25 bp, Probe sequence
tatccgaaatttttgtataatagat

SEQ ID NO: 125585 - DNA, 25 bp, Probe sequence
tataaacttgttattatccgaaatt

SEQ ID NO: 125586 - DNA, 25 bp, Probe sequence
ttgttattatccgaaatttttgtat

SEQ ID NO: 125587 - DNA, 25 bp, Probe sequence
agaaagctatgagcgtaatgctcat

SEQ ID NO: 125588 - DNA, 25 bp, Probe sequence
agcgtaatgctcataacttagtata

SEQ ID NO: 125589 - DNA, 25 bp, Probe sequence
actacacctactttctaagaaagct

SEQ ID NO: 125590 - DNA, 25 bp, Probe sequence
actttctaagaaagctatgagcgta

SEQ ID NO: 125591 - DNA, 25 bp, Probe sequence
acacctactttctaagaaagctatg

SEQ ID NO: 125592 - DNA, 25 bp, Probe sequence
aagaaagctatgagcgtaatgctca

SEQ ID NO: 125593 - DNA, 25 bp, Probe sequence
cacctactttctaagaaagctatga

SEQ ID NO: 125594 - DNA, 25 bp, Probe sequence
ctttctaagaaagctatgagcgtaa

SEQ ID NO: 125595 - DNA, 25 bp, Probe sequence
ctacacctactttctaagaaagcta

SEQ ID NO: 125596 - DNA, 25 bp, Probe sequence
ctaagaaagctatgagcgtaatgct

SEQ ID NO: 125597 - DNA, 25 bp, Probe sequence
gcgtaatgctcataacttagtatag

SEQ ID NO: 125598 - DNA, 25 bp, Probe sequence
gaaagctatgagcgtaatgctcata

SEQ ID NO: 125599 - DNA, 25 bp, Probe sequence
gagcgtaatgctcataacttagtat

SEQ ID NO: 125600 - DNA, 25 bp, Probe sequence
taagaaagctatgagcgtaatgctc

SEQ ID NO: 125601 - DNA, 25 bp, Probe sequence
tacacctactttctaagaaagctat

SEQ ID NO: 125602 - DNA, 25 bp, Probe sequence
atcgtatgtgtcgccaactttaagt

SEQ ID NO: 125603 - DNA, 25 bp, Probe sequence
aaatcgtatgtgtcgccaactttaa

SEQ ID NO: 125604 - DNA, 25 bp, Probe sequence
aacttactttgattagatggctcta

SEQ ID NO: 125605 - DNA, 25 bp, Probe sequence
gcagtttccgatgaagccggttttg

SEQ ID NO: 125606 - DNA, 25 bp, Probe sequence
ccgcagtttccgatgaagccggttt

SEQ ID NO: 125607 - DNA, 25 bp, Probe sequence
gactttaccgcagtttccgatgaag

SEQ ID NO: 125608 - DNA, 25 bp, Probe sequence
gtatattaaccgactttaccgcagt

SEQ ID NO: 125609 - DNA, 25 bp, Probe sequence
gtatgtgtcgccaactttaagtgtt

SEQ ID NO: 125610 - DNA, 25 bp, Probe sequence
gtgttttaatgctatctggtatatt

SEQ ID NO: 125611 - DNA, 25 bp, Probe sequence
ggctctactacaacatttaaatcgt

SEQ ID NO: 125612 - DNA, 25 bp, Probe sequence
tgtgtcgccaactttaagtgtttta

SEQ ID NO: 125613 - DNA, 25 bp, Probe sequence
taagtgttttaatgctatctggtat

SEQ ID NO: 125614 - DNA, 25 bp, Probe sequence
tttaccgcagtttccgatgaagccg

SEQ ID NO: 125615 - DNA, 25 bp, Probe sequence
ttagatggctctactacaacattta

SEQ ID NO: 125616 - DNA, 25 bp, Probe sequence
ttaaatcgtatgtgtcgccaacttt

SEQ ID NO: 125617 - DNA, 25 bp, Probe sequence
agtaatgcgcctcttgttcatgcgt

SEQ ID NO: 125618 - DNA, 25 bp, Probe sequence
aatgtttcaccttatataacttaag

SEQ ID NO: 125619 - DNA, 25 bp, Probe sequence
cacatagtaatgcgcctcttgttca

SEQ ID NO: 125620 - DNA, 25 bp, Probe sequence
cgcctcttgttcatgcgtcgtatta

SEQ ID NO: 125621 - DNA, 25 bp, Probe sequence
cctcttgttcatgcgtcgtattagc

SEQ ID NO: 125622 - DNA, 25 bp, Probe sequence
gcgtcgtattagcatttaataacct

SEQ ID NO: 125623 - DNA, 25 bp, Probe sequence
gacacatcacatagtaatgcgcctc

SEQ ID NO: 125624 - DNA, 25 bp, Probe sequence
gacgcatctatacttgatgtgtagt

SEQ ID NO: 125625 - DNA, 25 bp, Probe sequence
gttcatgcgtcgtattagcatttaa

SEQ ID NO: 125626 - DNA, 25 bp, Probe sequence
gtatttacaattagtttgaacatgt

SEQ ID NO: 125627 - DNA, 25 bp, Probe sequence
tgaacatgttcatacctcataaata

SEQ ID NO: 125628 - DNA, 25 bp, Probe sequence
taatctgatactaacataataaact

SEQ ID NO: 125629 - DNA, 25 bp, Probe sequence
taagtagtatcaagacgcatctata

SEQ ID NO: 125630 - DNA, 25 bp, Probe sequence
taaactgttttaatgcggacttaca

SEQ ID NO: 125631 - DNA, 25 bp, Probe sequence
tttaatgcggacttacatagggtaa

SEQ ID NO: 125632 - DNA, 25 bp, Probe sequence
agcagttaccacttgaaccagttgc

SEQ ID NO: 125633 - DNA, 25 bp, Probe sequence
agttaccacttgaaccagttgctat

SEQ ID NO: 125634 - DNA, 25 bp, Probe sequence
accacttgaaccagttgctattgtt

SEQ ID NO: 125635 - DNA, 25 bp, Probe sequence
acgtagcagttaccacttgaaccag

SEQ ID NO: 125636 - DNA, 25 bp, Probe sequence
aacgtagtacgtccatcatttaaga

SEQ ID NO: 125637 - DNA, 25 bp, Probe sequence
aagacgtagcagttaccacttgaac

SEQ ID NO: 125638 - DNA, 25 bp, Probe sequence
cacttgaaccagttgctattgtttc

SEQ ID NO: 125639 - DNA, 25 bp, Probe sequence
cttgaaccagttgctattgtttcaa

SEQ ID NO: 125640 - DNA, 25 bp, Probe sequence
gcagttaccacttgaaccagttgct

SEQ ID NO: 125641 - DNA, 25 bp, Probe sequence
gacgtagcagttaccacttgaacca

SEQ ID NO: 125642 - DNA, 25 bp, Probe sequence
gttaccacttgaaccagttgctatt

SEQ ID NO: 125643 - DNA, 25 bp, Probe sequence
gtagcagttaccacttgaaccagtt

SEQ ID NO: 125644 - DNA, 25 bp, Probe sequence
gtagtacgtccatcatttaagacgt

SEQ ID NO: 125645 - DNA, 25 bp, Probe sequence
gtccatcatttaagacgtagcagtt

SEQ ID NO: 125646 - DNA, 25 bp, Probe sequence
ttaagacgtagcagttaccacttga

SEQ ID NO: 125647 - DNA, 25 bp, Probe sequence
atctttcctttcgtgtataatgttg

SEQ ID NO: 125648 - DNA, 25 bp, Probe sequence
aatgttgttatcaacctaaggtagt

SEQ ID NO: 125649 - DNA, 25 bp, Probe sequence
ctttcctttcgtgtataatgttgtt

SEQ ID NO: 125650 - DNA, 25 bp, Probe sequence
ctatctttcctttcgtgtataatgt

SEQ ID NO: 125651 - DNA, 25 bp, Probe sequence
cctttcgtgtataatgttgttatca

SEQ ID NO: 125652 - DNA, 25 bp, Probe sequence
gttgttatcaacctaaggtagtgat

SEQ ID NO: 125653 - DNA, 25 bp, Probe sequence
gtataatgttgttatcaacctaagg

SEQ ID NO: 125654 - DNA, 25 bp, Probe sequence
tcctttcgtgtataatgttgttatc

SEQ ID NO: 125655 - DNA, 25 bp, Probe sequence
tctttcctttcgtgtataatgttgt

SEQ ID NO: 125656 - DNA, 25 bp, Probe sequence
tctatctttcctttcgtgtataatg

SEQ ID NO: 125657 - DNA, 25 bp, Probe sequence
tatctttcctttcgtgtataatgtt

SEQ ID NO: 125658 - DNA, 25 bp, Probe sequence
tttcctttcgtgtataatgttgtta

SEQ ID NO: 125659 - DNA, 25 bp, Probe sequence
ttctatctttcctttcgtgtataat

SEQ ID NO: 125660 - DNA, 25 bp, Probe sequence
ttcgtgtataatgttgttatcaacc

SEQ ID NO: 125661 - DNA, 25 bp, Probe sequence
ttcctttcgtgtataatgttgttat

SEQ ID NO: 125662 - DNA, 25 bp, Probe sequence
atactcctattaaggaggtgaatga

SEQ ID NO: 125663 - DNA, 25 bp, Probe sequence
actcctattaaggaggtgaatgact

SEQ ID NO: 125664 - DNA, 25 bp, Probe sequence
ctatactcctattaaggaggtgaat

SEQ ID NO: 125665 - DNA, 25 bp, Probe sequence
ctttctgctatactcctattaagga

SEQ ID NO: 125666 - DNA, 25 bp, Probe sequence
ctcctattaaggaggtgaatgactt

SEQ ID NO: 125667 - DNA, 25 bp, Probe sequence
ctgctatactcctattaaggaggtg

SEQ ID NO: 125668 - DNA, 25 bp, Probe sequence
cctttctgctatactcctattaagg

SEQ ID NO: 125669 - DNA, 25 bp, Probe sequence
gctatactcctattaaggaggtgaa

SEQ ID NO: 125670 - DNA, 25 bp, Probe sequence
tcctttctgctatactcctattaag

SEQ ID NO: 125671 - DNA, 25 bp, Probe sequence
tctgctatactcctattaaggaggt

SEQ ID NO: 125672 - DNA, 25 bp, Probe sequence
tactcctattaaggaggtgaatgac

SEQ ID NO: 125673 - DNA, 25 bp, Probe sequence
tatactcctattaaggaggtgaatg

SEQ ID NO: 125674 - DNA, 25 bp, Probe sequence
tttctgctatactcctattaaggag

SEQ ID NO: 125675 - DNA, 25 bp, Probe sequence
ttctgctatactcctattaaggagg

SEQ ID NO: 125676 - DNA, 25 bp, Probe sequence
atatttattacctactacctcactt

SEQ ID NO: 125677 - DNA, 25 bp, Probe sequence
accaatccattatttcataatacta

SEQ ID NO: 125678 - DNA, 25 bp, Probe sequence
acctcacttttaaatatatgtggat

SEQ ID NO: 125679 - DNA, 25 bp, Probe sequence
aagcaatcttaactttaagtcttat

SEQ ID NO: 125680 - DNA, 25 bp, Probe sequence
aattgaagtattaatcatgcttatt

SEQ ID NO: 125681 - DNA, 25 bp, Probe sequence
cattatttcataatactaaccttaa

SEQ ID NO: 125682 - DNA, 25 bp, Probe sequence
cttatatttattacctactacctca

SEQ ID NO: 125683 - DNA, 25 bp, Probe sequence
cctactacctcacttttaaatatat

SEQ ID NO: 125684 - DNA, 25 bp, Probe sequence
gtcttatatttattacctactacct

SEQ ID NO: 125685 - DNA, 25 bp, Probe sequence
taatactaaccttaaatttacagag

SEQ ID NO: 125686 - DNA, 25 bp, Probe sequence
taagtcttatatttattacctacta

SEQ ID NO: 125687 - DNA, 25 bp, Probe sequence
tactacctcacttttaaatatatgt

SEQ ID NO: 125688 - DNA, 25 bp, Probe sequence
tacctactacctcacttttaaatat

SEQ ID NO: 125689 - DNA, 25 bp, Probe sequence
tatatttattacctactacctcact

SEQ ID NO: 125690 - DNA, 25 bp, Probe sequence
ttatatttattacctactacctcac

SEQ ID NO: 125691 - DNA, 25 bp, Probe sequence
attgattaatagcgcctatgtggcg

SEQ ID NO: 125692 - DNA, 25 bp, Probe sequence
atagcgcctatgtggcgctttaata

SEQ ID NO: 125693 - DNA, 25 bp, Probe sequence
aacgcctactagtgtgaaaacgtat

SEQ ID NO: 125694 - DNA, 25 bp, Probe sequence
acgcctactagtgtgaaaacgtatt

SEQ ID NO: 125695 - DNA, 25 bp, Probe sequence
acgtattgattaatagcgcctatgt

SEQ ID NO: 125696 - DNA, 25 bp, Probe sequence
aaacgtattgattaatagcgcctat

SEQ ID NO: 125697 - DNA, 25 bp, Probe sequence
aacgtattgattaatagcgcctatg

SEQ ID NO: 125698 - DNA, 25 bp, Probe sequence
aatagcgcctatgtggcgctttaat

SEQ ID NO: 125699 - DNA, 25 bp, Probe sequence
cgcctatgtggcgctttaatatata

SEQ ID NO: 125700 - DNA, 25 bp, Probe sequence
cctatgtggcgctttaatatataaa

SEQ ID NO: 125701 - DNA, 25 bp, Probe sequence
gcctactagtgtgaaaacgtattga

SEQ ID NO: 125702 - DNA, 25 bp, Probe sequence
gcctatgtggcgctttaatatataa

SEQ ID NO: 125703 - DNA, 25 bp, Probe sequence
gaaaacgtattgattaatagcgcct

SEQ ID NO: 125704 - DNA, 25 bp, Probe sequence
gattaatagcgcctatgtggcgctt

SEQ ID NO: 125705 - DNA, 25 bp, Probe sequence
ttaatagcgcctatgtggcgcttta

SEQ ID NO: 125706 - DNA, 25 bp, Probe sequence
atttgaattgacttacattttaata

SEQ ID NO: 125707 - DNA, 25 bp, Probe sequence
aggacgaagcgagttatattgttaa

SEQ ID NO: 125708 - DNA, 25 bp, Probe sequence
agattcatacactgcacatcataat

SEQ ID NO: 125709 - DNA, 25 bp, Probe sequence
aaaagttacctactacattctatgt

SEQ ID NO: 125710 - DNA, 25 bp, Probe sequence
aagtctttactctacactcaaacaa

SEQ ID NO: 125711 - DNA, 25 bp, Probe sequence
aatacaagtctttactctacactca

SEQ ID NO: 125712 - DNA, 25 bp, Probe sequence
aataaatctatctactcaaatataa

SEQ ID NO: 125713 - DNA, 25 bp, Probe sequence
cactcaaacaagattcatacactgc

SEQ ID NO: 125714 - DNA, 25 bp, Probe sequence
ctaactaataactcgcttcgttcta

SEQ ID NO: 125715 - DNA, 25 bp, Probe sequence
ctatgtagcaggcaacttttattac

SEQ ID NO: 125716 - DNA, 25 bp, Probe sequence
gctcaactaactaataactcgcttc

SEQ ID NO: 125717 - DNA, 25 bp, Probe sequence
tcatcttaacaactttaatttttca

SEQ ID NO: 125718 - DNA, 25 bp, Probe sequence
taactcgcttcgttctaaaaggacg

SEQ ID NO: 125719 - DNA, 25 bp, Probe sequence
tacattctatgtagcaggcaacttt

SEQ ID NO: 125720 - DNA, 25 bp, Probe sequence
tacactgcacatcataataaatcta

SEQ ID NO: 125721 - DNA, 25 bp, Probe sequence
ataacacgctactttctgcatttta

SEQ ID NO: 125722 - DNA, 25 bp, Probe sequence
ataatatcctgcatctttctcatac

SEQ ID NO: 125723 - DNA, 25 bp, Probe sequence
agctaaataatatcctgcatctttc

SEQ ID NO: 125724 - DNA, 25 bp, Probe sequence
aacgaaatcaaataacacgctactt

SEQ ID NO: 125725 - DNA, 25 bp, Probe sequence
aattaagcatacccgatatcagtgt

SEQ ID NO: 125726 - DNA, 25 bp, Probe sequence
cacgctactttctgcattttaaatt

SEQ ID NO: 125727 - DNA, 25 bp, Probe sequence
gcatacccgatatcagtgttaataa

SEQ ID NO: 125728 - DNA, 25 bp, Probe sequence
gcatctttctcatacaatttactat

SEQ ID NO: 125729 - DNA, 25 bp, Probe sequence
gatactagacagttaatttcataga

SEQ ID NO: 125730 - DNA, 25 bp, Probe sequence
gtagttaataaccatcgatttgaaa

SEQ ID NO: 125731 - DNA, 25 bp, Probe sequence
gtgtgtacaaagtcattaatttagc

SEQ ID NO: 125732 - DNA, 25 bp, Probe sequence
tcctgcatctttctcatacaattta

SEQ ID NO: 125733 - DNA, 25 bp, Probe sequence
taagatcgttgatactagacagtta

SEQ ID NO: 125734 - DNA, 25 bp, Probe sequence
tatcctctttaaaaataatgtgtgt

SEQ ID NO: 125735 - DNA, 25 bp, Probe sequence
tattattaaatactttatcctcttt

SEQ ID NO: 125736 - DNA, 25 bp, Probe sequence
attcgcgtgctggcagttttttatt

SEQ ID NO: 125737 - DNA, 25 bp, Probe sequence
ctattcgcgtgctggcagtttttta

SEQ ID NO: 125738 - DNA, 25 bp, Probe sequence
ctgccctattcgcgtgctggcagtt

SEQ ID NO: 125739 - DNA, 25 bp, Probe sequence
cgtgctggcagttttttattgcgaa

SEQ ID NO: 125740 - DNA, 25 bp, Probe sequence
cgcgtgctggcagttttttattgcg

SEQ ID NO: 125741 - DNA, 25 bp, Probe sequence
cctattcgcgtgctggcagtttttt

SEQ ID NO: 125742 - DNA, 25 bp, Probe sequence
gctggcagttttttattgcgaattt

SEQ ID NO: 125743 - DNA, 25 bp, Probe sequence
gcgtgctggcagttttttattgcga

SEQ ID NO: 125744 - DNA, 25 bp, Probe sequence
gcagttttttattgcgaattttaag

SEQ ID NO: 125745 - DNA, 25 bp, Probe sequence
gtgctggcagttttttattgcgaat

SEQ ID NO: 125746 - DNA, 25 bp, Probe sequence
tggcagttttttattgcgaatttta

SEQ ID NO: 125747 - DNA, 25 bp, Probe sequence
tgctggcagttttttattgcgaatt

SEQ ID NO: 125748 - DNA, 25 bp, Probe sequence
tcgcgtgctggcagttttttattgc

SEQ ID NO: 125749 - DNA, 25 bp, Probe sequence
tattcgcgtgctggcagttttttat

SEQ ID NO: 125750 - DNA, 25 bp, Probe sequence
ttcgcgtgctggcagttttttattg

SEQ ID NO: 125751 - DNA, 25 bp, Probe sequence
attttcatttatgatattatctaat

SEQ ID NO: 125752 - DNA, 25 bp, Probe sequence
atttctattttcatttatgatatta

SEQ ID NO: 125753 - DNA, 25 bp, Probe sequence
atacacatcagtaacatttctattt

SEQ ID NO: 125754 - DNA, 25 bp, Probe sequence
acatttctattttcatttatgatat

SEQ ID NO: 125755 - DNA, 25 bp, Probe sequence
acacatcagtaacatttctattttc

SEQ ID NO: 125756 - DNA, 25 bp, Probe sequence
aacatttctattttcatttatgata

SEQ ID NO: 125757 - DNA, 25 bp, Probe sequence
aatacacatcagtaacatttctatt

SEQ ID NO: 125758 - DNA, 25 bp, Probe sequence
catttctattttcatttatgatatt

SEQ ID NO: 125759 - DNA, 25 bp, Probe sequence
ctattttcatttatgatattatcta

SEQ ID NO: 125760 - DNA, 25 bp, Probe sequence
gtaatacacatcagtaacatttcta

SEQ ID NO: 125761 - DNA, 25 bp, Probe sequence
tcatttatgatattatctaattatt

SEQ ID NO: 125762 - DNA, 25 bp, Probe sequence
taatacacatcagtaacatttctat

SEQ ID NO: 125763 - DNA, 25 bp, Probe sequence
taacatttctattttcatttatgat

SEQ ID NO: 125764 - DNA, 25 bp, Probe sequence
tacacatcagtaacatttctatttt

SEQ ID NO: 125765 - DNA, 25 bp, Probe sequence
ttctattttcatttatgatattatc

SEQ ID NO: 125766 - DNA, 25 bp, Probe sequence
attcattcctgcactcgcaatatgc

SEQ ID NO: 125767 - DNA, 25 bp, Probe sequence
ataactcccgcaccataatgattta

SEQ ID NO: 125768 - DNA, 25 bp, Probe sequence
atcaagcactcattcattcctgcac

SEQ ID NO: 125769 - DNA, 25 bp, Probe sequence
actatacctagttaaccgcttgtga

SEQ ID NO: 125770 - DNA, 25 bp, Probe sequence
atgtggtttcttttaattatgtcaa

SEQ ID NO: 125771 - DNA, 25 bp, Probe sequence
aataactatccatctttaacaagaa

SEQ ID NO: 125772 - DNA, 25 bp, Probe sequence
aataccattatgaatctcaattaca

SEQ ID NO: 125773 - DNA, 25 bp, Probe sequence
gcactcgcaatatgcattacttata

SEQ ID NO: 125774 - DNA, 25 bp, Probe sequence
gaactagtgttttaatctattacat

SEQ ID NO: 125775 - DNA, 25 bp, Probe sequence
gtaaaatgcacaagtacacctttaa

SEQ ID NO: 125776 - DNA, 25 bp, Probe sequence
gtcaaccacccataaggattttaat

SEQ ID NO: 125777 - DNA, 25 bp, Probe sequence
gtggatgcactctcatattatggca

SEQ ID NO: 125778 - DNA, 25 bp, Probe sequence
ggcccattaaatgtcttatctcttt

SEQ ID NO: 125779 - DNA, 25 bp, Probe sequence
tatggcaataccataactcccgcac

SEQ ID NO: 125780 - DNA, 25 bp, Probe sequence
ttcttttaattatgtcaaccaccca

SEQ ID NO: 125781 - DNA, 25 bp, Probe sequence
attatgaccaatttatgaccaccaa

SEQ ID NO: 125782 - DNA, 25 bp, Probe sequence
attttcatacgctctaatatttatt

SEQ ID NO: 125783 - DNA, 25 bp, Probe sequence
atgaccaccaattattacacacata

SEQ ID NO: 125784 - DNA, 25 bp, Probe sequence
aaatcagtatcgtgtattctttata

SEQ ID NO: 125785 - DNA, 25 bp, Probe sequence
caaatacgtattcactgcctgcaac

SEQ ID NO: 125786 - DNA, 25 bp, Probe sequence
cacccaacatcacctcataattaac

SEQ ID NO: 125787 - DNA, 25 bp, Probe sequence
cattcccggcattaagggcggtatg

SEQ ID NO: 125788 - DNA, 25 bp, Probe sequence
catatttttctataactcttccttt

SEQ ID NO: 125789 - DNA, 25 bp, Probe sequence
gcaatataatgattctctcagcatc

SEQ ID NO: 125790 - DNA, 25 bp, Probe sequence
gaaactgttttacatcattcccggc

SEQ ID NO: 125791 - DNA, 25 bp, Probe sequence
ggaacgaatcatactcgtctatcat

SEQ ID NO: 125792 - DNA, 25 bp, Probe sequence
taaatttgtgcacccaacatcacct

SEQ ID NO: 125793 - DNA, 25 bp, Probe sequence
tactcgtctatcatggaatgttcta

SEQ ID NO: 125794 - DNA, 25 bp, Probe sequence
ttcactgcctgcaacgtgtggaatg

SEQ ID NO: 125795 - DNA, 25 bp, Probe sequence
ttctctcagcatcttatatcaccta

SEQ ID NO: 125796 - DNA, 25 bp, Probe sequence
ataaccgcactttctattaatatag

SEQ ID NO: 125797 - DNA, 25 bp, Probe sequence
atgcatcctaaaaaggcaagcaccg

SEQ ID NO: 125798 - DNA, 25 bp, Probe sequence
agtacttacctttcaaatatatcta

SEQ ID NO: 125799 - DNA, 25 bp, Probe sequence
aaggcaagcaccgaagtacttacct

SEQ ID NO: 125800 - DNA, 25 bp, Probe sequence
aatatatctaatactttcacttttt

SEQ ID NO: 125801 - DNA, 25 bp, Probe sequence
aattattatagtttagattcactgt

SEQ ID NO: 125802 - DNA, 25 bp, Probe sequence
cactgtataaataaccgcactttct

SEQ ID NO: 125803 - DNA, 25 bp, Probe sequence
gcaccgaagtacttacctttcaaat

SEQ ID NO: 125804 - DNA, 25 bp, Probe sequence
gcaagcaccgaagtacttacctttc

SEQ ID NO: 125805 - DNA, 25 bp, Probe sequence
gaagtgcggtttaatctatatatat

SEQ ID NO: 125806 - DNA, 25 bp, Probe sequence
gattcactgtataaataaccgcact

SEQ ID NO: 125807 - DNA, 25 bp, Probe sequence
gtataaataaccgcactttctatta

SEQ ID NO: 125808 - DNA, 25 bp, Probe sequence
tcactttttatatcaaaatcggatt

SEQ ID NO: 125809 - DNA, 25 bp, Probe sequence
taatctatatatatatgcatcctaa

SEQ ID NO: 125810 - DNA, 25 bp, Probe sequence
tatctaatactttcactttttatat

SEQ ID NO: 125811 - DNA, 25 bp, Probe sequence
atccaacattcccaaaaagtatcta

SEQ ID NO: 125812 - DNA, 25 bp, Probe sequence
atgccatatgcgttaattgcctatt

SEQ ID NO: 125813 - DNA, 25 bp, Probe sequence
acaactcaatgttaaatgccatatg

SEQ ID NO: 125814 - DNA, 25 bp, Probe sequence
aacagaggatttctaagcatcttga

SEQ ID NO: 125815 - DNA, 25 bp, Probe sequence
aacattgtttatatattcacacttt

SEQ ID NO: 125816 - DNA, 25 bp, Probe sequence
aagtcatatagtcgattcctatcgt

SEQ ID NO: 125817 - DNA, 25 bp, Probe sequence
aatgcattcatttttgcaaattcta

SEQ ID NO: 125818 - DNA, 25 bp, Probe sequence
cagcccgaaggctaacttacgaata

SEQ ID NO: 125819 - DNA, 25 bp, Probe sequence
cttatatacaaaactctttctctaa

SEQ ID NO: 125820 - DNA, 25 bp, Probe sequence
gcgttaattgcctattttgctataa

SEQ ID NO: 125821 - DNA, 25 bp, Probe sequence
gaaataaaaagtcagcccgaaggct

SEQ ID NO: 125822 - DNA, 25 bp, Probe sequence
gacgaatacttctagctcaaaatta

SEQ ID NO: 125823 - DNA, 25 bp, Probe sequence
taccgaagtacttgcctaaatatca

SEQ ID NO: 125824 - DNA, 25 bp, Probe sequence
tttttatctcctttatccaacattc

SEQ ID NO: 125825 - DNA, 25 bp, Probe sequence
ttggtttctactgttaattttatat

SEQ ID NO: 125826 - DNA, 25 bp, Probe sequence
atcttctggatctatgtaacactca

SEQ ID NO: 125827 - DNA, 25 bp, Probe sequence
aggcagattactcctgcctcttttc

SEQ ID NO: 125828 - DNA, 25 bp, Probe sequence
aacactcaattacttcagattcttt

SEQ ID NO: 125829 - DNA, 25 bp, Probe sequence
aacagtgataatcttctggatctat

SEQ ID NO: 125830 - DNA, 25 bp, Probe sequence
caattacttcagattctttaccttt

SEQ ID NO: 125831 - DNA, 25 bp, Probe sequence
cttcctttaattactttctctctat

SEQ ID NO: 125832 - DNA, 25 bp, Probe sequence
gcctcttttcttttgaacagtgata

SEQ ID NO: 125833 - DNA, 25 bp, Probe sequence
tcctttaattactttctctctatct

SEQ ID NO: 125834 - DNA, 25 bp, Probe sequence
tcctgcctcttttcttttgaacagt

SEQ ID NO: 125835 - DNA, 25 bp, Probe sequence
tctggatctatgtaacactcaatta

SEQ ID NO: 125836 - DNA, 25 bp, Probe sequence
tctcctcaaaaagttgtgctttttc

SEQ ID NO: 125837 - DNA, 25 bp, Probe sequence
tcagattctttacctttaacttcct

SEQ ID NO: 125838 - DNA, 25 bp, Probe sequence
tacttcagattctttacctttaact

SEQ ID NO: 125839 - DNA, 25 bp, Probe sequence
tttctctctatctcctcaaaaagtt

SEQ ID NO: 125840 - DNA, 25 bp, Probe sequence
tttttcgagaggcagattactcctg

SEQ ID NO: 125841 - DNA, 25 bp, Probe sequence
agtgaaatactcttatcctttctct

SEQ ID NO: 125842 - DNA, 25 bp, Probe sequence
acttctcacctttagtgaaatactc

SEQ ID NO: 125843 - DNA, 25 bp, Probe sequence
ctttctcttcttgcgttaatgttgc

SEQ ID NO: 125844 - DNA, 25 bp, Probe sequence
ctcttcttgcgttaatgttgctaat

SEQ ID NO: 125845 - DNA, 25 bp, Probe sequence
cctttagtgaaatactcttatcctt

SEQ ID NO: 125846 - DNA, 25 bp, Probe sequence
gtgaaatactcttatcctttctctt

SEQ ID NO: 125847 - DNA, 25 bp, Probe sequence
tgaaatactcttatcctttctcttc

SEQ ID NO: 125848 - DNA, 25 bp, Probe sequence
tctcttcttgcgttaatgttgctaa

SEQ ID NO: 125849 - DNA, 25 bp, Probe sequence
tcttcttgcgttaatgttgctaatt

SEQ ID NO: 125850 - DNA, 25 bp, Probe sequence
tcacctttagtgaaatactcttatc

SEQ ID NO: 125851 - DNA, 25 bp, Probe sequence
tttctcttcttgcgttaatgttgct

SEQ ID NO: 125852 - DNA, 25 bp, Probe sequence
ttttacttctcacctttagtgaaat

SEQ ID NO: 125853 - DNA, 25 bp, Probe sequence
ttacttctcacctttagtgaaatac

SEQ ID NO: 125854 - DNA, 25 bp, Probe sequence
ttcttgcgttaatgttgctaattag

SEQ ID NO: 125855 - DNA, 25 bp, Probe sequence
ttctcttcttgcgttaatgttgcta

SEQ ID NO: 125856 - DNA, 25 bp, Probe sequence
atttttttttgatatagctccctat

SEQ ID NO: 125857 - DNA, 25 bp, Probe sequence
atctagttacacaatattatccctt

SEQ ID NO: 125858 - DNA, 25 bp, Probe sequence
agctccctatgtaacaaacactttt

SEQ ID NO: 125859 - DNA, 25 bp, Probe sequence
aagtcatatttcacggatccacatt

SEQ ID NO: 125860 - DNA, 25 bp, Probe sequence
aatattatcccttactgcaacacag

SEQ ID NO: 125861 - DNA, 25 bp, Probe sequence
aatattctttaaatgaccactcaca

SEQ ID NO: 125862 - DNA, 25 bp, Probe sequence
ctcagcgtaaaaaacaccactagaa

SEQ ID NO: 125863 - DNA, 25 bp, Probe sequence
ctcacactttgttttttgctatttg

SEQ ID NO: 125864 - DNA, 25 bp, Probe sequence
ccactaagttattttgtttcatatg

SEQ ID NO: 125865 - DNA, 25 bp, Probe sequence
gcaacacaggacgtttctcagcgta

SEQ ID NO: 125866 - DNA, 25 bp, Probe sequence
gaccactcacactttgttttttgct

SEQ ID NO: 125867 - DNA, 25 bp, Probe sequence
gatagattgaccagcgatgtttaaa

SEQ ID NO: 125868 - DNA, 25 bp, Probe sequence
gttttaatctacggccaatctcaaa

SEQ ID NO: 125869 - DNA, 25 bp, Probe sequence
gtttcatatggttttaatctacggc

SEQ ID NO: 125870 - DNA, 25 bp, Probe sequence
tcacggatccacatttacgataaac

SEQ ID NO: 125871 - DNA, 25 bp, Probe sequence
ataataagcgttctcccttttatct

SEQ ID NO: 125872 - DNA, 25 bp, Probe sequence
atcctcactaactcaatatgataat

SEQ ID NO: 125873 - DNA, 25 bp, Probe sequence
agctagggtgaattagtaaactaat

SEQ ID NO: 125874 - DNA, 25 bp, Probe sequence
actaatcctcactaactcaatatga

SEQ ID NO: 125875 - DNA, 25 bp, Probe sequence
aaactaatcctcactaactcaatat

SEQ ID NO: 125876 - DNA, 25 bp, Probe sequence
aactaatcctcactaactcaatatg

SEQ ID NO: 125877 - DNA, 25 bp, Probe sequence
aatatgataatcgtttttactgtaa

SEQ ID NO: 125878 - DNA, 25 bp, Probe sequence
gtaaactaatcctcactaactcaat

SEQ ID NO: 125879 - DNA, 25 bp, Probe sequence
gggagtccgttaattataataagcg

SEQ ID NO: 125880 - DNA, 25 bp, Probe sequence
tctcccttttatctttataacgctt

SEQ ID NO: 125881 - DNA, 25 bp, Probe sequence
taataagcgttctcccttttatctt

SEQ ID NO: 125882 - DNA, 25 bp, Probe sequence
taatcctcactaactcaatatgata

SEQ ID NO: 125883 - DNA, 25 bp, Probe sequence
tataataagcgttctcccttttatc

SEQ ID NO: 125884 - DNA, 25 bp, Probe sequence
tttatctttataacgctttaatata

SEQ ID NO: 125885 - DNA, 25 bp, Probe sequence
ttctcccttttatctttataacgct

SEQ ID NO: 125886 - DNA, 25 bp, Probe sequence
atagtattttattaggagccacaca

SEQ ID NO: 125887 - DNA, 25 bp, Probe sequence
atcttgccattttttcaattctcaa

SEQ ID NO: 125888 - DNA, 25 bp, Probe sequence
aggagccacacactacatgtgaccc

SEQ ID NO: 125889 - DNA, 25 bp, Probe sequence
aggcctatgccaaaaacacaaactt

SEQ ID NO: 125890 - DNA, 25 bp, Probe sequence
aggcttttcacattaacctaatata

SEQ ID NO: 125891 - DNA, 25 bp, Probe sequence
accattttaaactgctatacctcgt

SEQ ID NO: 125892 - DNA, 25 bp, Probe sequence
acaaacttacgttcgctttatagcg

SEQ ID NO: 125893 - DNA, 25 bp, Probe sequence
caaactttagcttgtattagcgtta

SEQ ID NO: 125894 - DNA, 25 bp, Probe sequence
caaagactgtataccttccgatttt

SEQ ID NO: 125895 - DNA, 25 bp, Probe sequence
gcgcgttttatcaattgtttagctt

SEQ ID NO: 125896 - DNA, 25 bp, Probe sequence
gcgttaacaaagttcgcacaccttg

SEQ ID NO: 125897 - DNA, 25 bp, Probe sequence
gcacaccttgcacaaatcttgccat

SEQ ID NO: 125898 - DNA, 25 bp, Probe sequence
gaacaaacagcgaacaaacttaact

SEQ ID NO: 125899 - DNA, 25 bp, Probe sequence
tacgttcgctttatagcgcgtttta

SEQ ID NO: 125900 - DNA, 25 bp, Probe sequence
ttctacacctctttcttttaattat

SEQ ID NO: 125901 - DNA, 25 bp, Probe sequence
attattgaatttatcgagtacacat

SEQ ID NO: 125902 - DNA, 25 bp, Probe sequence
atagcctcgtgataattagtacaca

SEQ ID NO: 125903 - DNA, 25 bp, Probe sequence
atctgcatgtaactgttgatattat

SEQ ID NO: 125904 - DNA, 25 bp, Probe sequence
agaaattttagtgatagttgtatat

SEQ ID NO: 125905 - DNA, 25 bp, Probe sequence
acctccatatttatattgattgtgt

SEQ ID NO: 125906 - DNA, 25 bp, Probe sequence
aaaattgagtgtgtacttgtgtgta

SEQ ID NO: 125907 - DNA, 25 bp, Probe sequence
aacattgatatatatagcctcgtga

SEQ ID NO: 125908 - DNA, 25 bp, Probe sequence
gtacttcgtgtactatctgcatgta

SEQ ID NO: 125909 - DNA, 25 bp, Probe sequence
gtacacaaagtacacagaaatttta

SEQ ID NO: 125910 - DNA, 25 bp, Probe sequence
gtgtacattgtgtacttcgtgtact

SEQ ID NO: 125911 - DNA, 25 bp, Probe sequence
gtgtactatctgcatgtaactgttg

SEQ ID NO: 125912 - DNA, 25 bp, Probe sequence
tacacagttaaatacacaccttttt

SEQ ID NO: 125913 - DNA, 25 bp, Probe sequence
tactttcgtgtactggttaaaacat

SEQ ID NO: 125914 - DNA, 25 bp, Probe sequence
taccatacacagttaaatacacacc

SEQ ID NO: 125915 - DNA, 25 bp, Probe sequence
tttatattgattgtgtaccatacac

SEQ ID NO: 125916 - DNA, 25 bp, Probe sequence
ataataagaatgtgtaatttctata

SEQ ID NO: 125917 - DNA, 25 bp, Probe sequence
acctcttaatgaaacaacagagcaa

SEQ ID NO: 125918 - DNA, 25 bp, Probe sequence
aaacaacagagcaaagatgttataa

SEQ ID NO: 125919 - DNA, 25 bp, Probe sequence
aacaacagagcaaagatgttataat

SEQ ID NO: 125920 - DNA, 25 bp, Probe sequence
cacctcttaatgaaacaacagagca

SEQ ID NO: 125921 - DNA, 25 bp, Probe sequence
cagagcaaagatgttataataagaa

SEQ ID NO: 125922 - DNA, 25 bp, Probe sequence
cctcttaatgaaacaacagagcaaa

SEQ ID NO: 125923 - DNA, 25 bp, Probe sequence
gcacctcttaatgaaacaacagagc

SEQ ID NO: 125924 - DNA, 25 bp, Probe sequence
gaaacaacagagcaaagatgttata

SEQ ID NO: 125925 - DNA, 25 bp, Probe sequence
tgcacctcttaatgaaacaacagag

SEQ ID NO: 125926 - DNA, 25 bp, Probe sequence
tttgcacctcttaatgaaacaacag

SEQ ID NO: 125927 - DNA, 25 bp, Probe sequence
tttttgcacctcttaatgaaacaac

SEQ ID NO: 125928 - DNA, 25 bp, Probe sequence
ttttgcacctcttaatgaaacaaca

SEQ ID NO: 125929 - DNA, 25 bp, Probe sequence
ttaatgaaacaacagagcaaagatg

SEQ ID NO: 125930 - DNA, 25 bp, Probe sequence
ttgcacctcttaatgaaacaacaga

SEQ ID NO: 125931 - DNA, 25 bp, Probe sequence
attacaaactttataaaatcagcgt

SEQ ID NO: 125932 - DNA, 25 bp, Probe sequence
atttctatgaccaaattacgaccac

SEQ ID NO: 125933 - DNA, 25 bp, Probe sequence
ataaaatcagcgtttaacagtcgtt

SEQ ID NO: 125934 - DNA, 25 bp, Probe sequence
caaattacgaccacccaatattaca

SEQ ID NO: 125935 - DNA, 25 bp, Probe sequence
ctatgaccaaattacgaccacccaa

SEQ ID NO: 125936 - DNA, 25 bp, Probe sequence
gaccacccaatattacaaactttat

SEQ ID NO: 125937 - DNA, 25 bp, Probe sequence
tctatgaccaaattacgaccaccca

SEQ ID NO: 125938 - DNA, 25 bp, Probe sequence
tacaaactttataaaatcagcgttt

SEQ ID NO: 125939 - DNA, 25 bp, Probe sequence
tacgaccacccaatattacaaactt

SEQ ID NO: 125940 - DNA, 25 bp, Probe sequence
tataaaatcagcgtttaacagtcgt

SEQ ID NO: 125941 - DNA, 25 bp, Probe sequence
tatgaccaaattacgaccacccaat

SEQ ID NO: 125942 - DNA, 25 bp, Probe sequence
tttctatgaccaaattacgaccacc

SEQ ID NO: 125943 - DNA, 25 bp, Probe sequence
ttctatgaccaaattacgaccaccc

SEQ ID NO: 125944 - DNA, 25 bp, Probe sequence
ttacaaactttataaaatcagcgtt

SEQ ID NO: 125945 - DNA, 25 bp, Probe sequence
ttacgaccacccaatattacaaact

SEQ ID NO: 125946 - DNA, 25 bp, Probe sequence
agtcatatttcattttcgttcttta

SEQ ID NO: 125947 - DNA, 25 bp, Probe sequence
acctccatttgtttagtcatatttc

SEQ ID NO: 125948 - DNA, 25 bp, Probe sequence
aaatgataaacctccatttgtttag

SEQ ID NO: 125949 - DNA, 25 bp, Probe sequence
aaacctccatttgtttagtcatatt

SEQ ID NO: 125950 - DNA, 25 bp, Probe sequence
catatttcattttcgttctttacaa

SEQ ID NO: 125951 - DNA, 25 bp, Probe sequence
ctccatttgtttagtcatatttcat

SEQ ID NO: 125952 - DNA, 25 bp, Probe sequence
gataaacctccatttgtttagtcat

SEQ ID NO: 125953 - DNA, 25 bp, Probe sequence
gttctttacaatttatctatgaatt

SEQ ID NO: 125954 - DNA, 25 bp, Probe sequence
gtttagtcatatttcattttcgttc

SEQ ID NO: 125955 - DNA, 25 bp, Probe sequence
gtcatatttcattttcgttctttac

SEQ ID NO: 125956 - DNA, 25 bp, Probe sequence
tcattttcgttctttacaatttatc

SEQ ID NO: 125957 - DNA, 25 bp, Probe sequence
tatttcattttcgttctttacaatt

SEQ ID NO: 125958 - DNA, 25 bp, Probe sequence
ttttcgttctttacaatttatctat

SEQ ID NO: 125959 - DNA, 25 bp, Probe sequence
ttagtcatatttcattttcgttctt

SEQ ID NO: 125960 - DNA, 25 bp, Probe sequence
ttcgttctttacaatttatctatga

SEQ ID NO: 125961 - DNA, 25 bp, Probe sequence
atttggtcaaaatttcaagtcataa

SEQ ID NO: 125962 - DNA, 25 bp, Probe sequence
agtttagcacttaacattaaagagt

SEQ ID NO: 125963 - DNA, 25 bp, Probe sequence
agagtgctaacatacatttataata

SEQ ID NO: 125964 - DNA, 25 bp, Probe sequence
acttaacattaaagagtgctaacat

SEQ ID NO: 125965 - DNA, 25 bp, Probe sequence
acattaaagagtgctaacatacatt

SEQ ID NO: 125966 - DNA, 25 bp, Probe sequence
aagagtgctaacatacatttataat

SEQ ID NO: 125967 - DNA, 25 bp, Probe sequence
gagtgctaacatacatttataataa

SEQ ID NO: 125968 - DNA, 25 bp, Probe sequence
gtcaaaatttcaagtcataaccttt

SEQ ID NO: 125969 - DNA, 25 bp, Probe sequence
gtgctaacatacatttataataatc

SEQ ID NO: 125970 - DNA, 25 bp, Probe sequence
tgtaacttcaagttatttacgataa

SEQ ID NO: 125971 - DNA, 25 bp, Probe sequence
tcaaaatttcaagtcataacctttt

SEQ ID NO: 125972 - DNA, 25 bp, Probe sequence
tcaagtcataaccttttaattaagt

SEQ ID NO: 125973 - DNA, 25 bp, Probe sequence
taaagagtgctaacatacatttata

SEQ ID NO: 125974 - DNA, 25 bp, Probe sequence
taaagtttagcacttaacattaaag

SEQ ID NO: 125975 - DNA, 25 bp, Probe sequence
ttcaagtcataaccttttaattaag

SEQ ID NO: 125976 - DNA, 25 bp, Probe sequence
atattactttacaagtccgagtata

SEQ ID NO: 125977 - DNA, 25 bp, Probe sequence
acacctccctttttcatgtaagtat

SEQ ID NO: 125978 - DNA, 25 bp, Probe sequence
aaatatgcgttgaaaatgcatttat

SEQ ID NO: 125979 - DNA, 25 bp, Probe sequence
aatgcatttatatttggaatttgaa

SEQ ID NO: 125980 - DNA, 25 bp, Probe sequence
cacctccctttttcatgtaagtatt

SEQ ID NO: 125981 - DNA, 25 bp, Probe sequence
ctccctttttcatgtaagtattaat

SEQ ID NO: 125982 - DNA, 25 bp, Probe sequence
gtctattaagtattctttactaaag

SEQ ID NO: 125983 - DNA, 25 bp, Probe sequence
taaatattactttacaagtccgagt

SEQ ID NO: 125984 - DNA, 25 bp, Probe sequence
tacaagtccgagtataaattttata

SEQ ID NO: 125985 - DNA, 25 bp, Probe sequence
tataaattttatacttagtctatta

SEQ ID NO: 125986 - DNA, 25 bp, Probe sequence
tattaatattcttgaaattttcgta

SEQ ID NO: 125987 - DNA, 25 bp, Probe sequence
tattcttgaaattttcgtaaatatt

SEQ ID NO: 125988 - DNA, 25 bp, Probe sequence
ttttcatgtaagtattaatctaagt

SEQ ID NO: 125989 - DNA, 25 bp, Probe sequence
ttactttacaagtccgagtataaat

SEQ ID NO: 125990 - DNA, 25 bp, Probe sequence
ttagtctattaagtattctttacta

SEQ ID NO: 125991 - DNA, 25 bp, Probe sequence
agttattcattatgtagtagttctt

SEQ ID NO: 125992 - DNA, 25 bp, Probe sequence
agccgctgctaatgtgcacttaaga

SEQ ID NO: 125993 - DNA, 25 bp, Probe sequence
aagaatcattagttattcattatgt

SEQ ID NO: 125994 - DNA, 25 bp, Probe sequence
aatcattagttattcattatgtagt

SEQ ID NO: 125995 - DNA, 25 bp, Probe sequence
cgctgctaatgtgcacttaagaata

SEQ ID NO: 125996 - DNA, 25 bp, Probe sequence
ccgctgctaatgtgcacttaagaat

SEQ ID NO: 125997 - DNA, 25 bp, Probe sequence
gccgctgctaatgtgcacttaagaa

SEQ ID NO: 125998 - DNA, 25 bp, Probe sequence
gctgctaatgtgcacttaagaatag

SEQ ID NO: 125999 - DNA, 25 bp, Probe sequence
gctaatgtgcacttaagaataggaa

SEQ ID NO: 126000 - DNA, 25 bp, Probe sequence
gtgcacttaagaataggaatacatg

SEQ ID NO: 126001 - DNA, 25 bp, Probe sequence
tcttacacattagccgctgctaatg

SEQ ID NO: 126002 - DNA, 25 bp, Probe sequence
tagccgctgctaatgtgcacttaag

SEQ ID NO: 126003 - DNA, 25 bp, Probe sequence
ttattcattatgtagtagttcttac

SEQ ID NO: 126004 - DNA, 25 bp, Probe sequence
ttagccgctgctaatgtgcacttaa

SEQ ID NO: 126005 - DNA, 25 bp, Probe sequence
ttcattatgtagtagttcttacaca

SEQ ID NO: 126006 - DNA, 25 bp, Probe sequence
atatataagatctatcaaggatgcg

SEQ ID NO: 126007 - DNA, 25 bp, Probe sequence
atataagatctatcaaggatgcgat

SEQ ID NO: 126008 - DNA, 25 bp, Probe sequence
ataagatctatcaaggatgcgatgt

SEQ ID NO: 126009 - DNA, 25 bp, Probe sequence
agttatatataagatctatcaagga

SEQ ID NO: 126010 - DNA, 25 bp, Probe sequence
aagttatatataagatctatcaagg

SEQ ID NO: 126011 - DNA, 25 bp, Probe sequence
gcgtttcaacataacttttagtaag

SEQ ID NO: 126012 - DNA, 25 bp, Probe sequence
gttatatataagatctatcaaggat

SEQ ID NO: 126013 - DNA, 25 bp, Probe sequence
gtaagttatatataagatctatcaa

SEQ ID NO: 126014 - DNA, 25 bp, Probe sequence
tgcgtttcaacataacttttagtaa

SEQ ID NO: 126015 - DNA, 25 bp, Probe sequence
taagatctatcaaggatgcgatgtt

SEQ ID NO: 126016 - DNA, 25 bp, Probe sequence
tataagatctatcaaggatgcgatg

SEQ ID NO: 126017 - DNA, 25 bp, Probe sequence
tatataagatctatcaaggatgcga

SEQ ID NO: 126018 - DNA, 25 bp, Probe sequence
tttgcgtttcaacataacttttagt

SEQ ID NO: 126019 - DNA, 25 bp, Probe sequence
ttttgcgtttcaacataacttttag

SEQ ID NO: 126020 - DNA, 25 bp, Probe sequence
ttgcgtttcaacataacttttagta

SEQ ID NO: 126021 - DNA, 25 bp, Probe sequence
atttaacacatgtcatgactaaaca

SEQ ID NO: 126022 - DNA, 25 bp, Probe sequence
agcgcccgaaataatatttaacaca

SEQ ID NO: 126023 - DNA, 25 bp, Probe sequence
acatagatttatgagagatttttca

SEQ ID NO: 126024 - DNA, 25 bp, Probe sequence
aacacatgtcatgactaaacataga

SEQ ID NO: 126025 - DNA, 25 bp, Probe sequence
cacatgtcatgactaaacatagatt

SEQ ID NO: 126026 - DNA, 25 bp, Probe sequence
gcgcccgaaataatatttaacacat

SEQ ID NO: 126027 - DNA, 25 bp, Probe sequence
gaagcgcccgaaataatatttaaca

SEQ ID NO: 126028 - DNA, 25 bp, Probe sequence
gaaataatatttaacacatgtcatg

SEQ ID NO: 126029 - DNA, 25 bp, Probe sequence
gagatttttcataagtctatgttta

SEQ ID NO: 126030 - DNA, 25 bp, Probe sequence
gatttttcataagtctatgtttatt

SEQ ID NO: 126031 - DNA, 25 bp, Probe sequence
tgtcatgactaaacatagatttatg

SEQ ID NO: 126032 - DNA, 25 bp, Probe sequence
tgagagatttttcataagtctatgt

SEQ ID NO: 126033 - DNA, 25 bp, Probe sequence
tcataagtctatgtttattttttta

SEQ ID NO: 126034 - DNA, 25 bp, Probe sequence
taatatttaacacatgtcatgacta

SEQ ID NO: 126035 - DNA, 25 bp, Probe sequence
ttttcataagtctatgtttattttt

SEQ ID NO: 126036 - DNA, 25 bp, Probe sequence
aaaggccgcgagcttgggaggggct

SEQ ID NO: 126037 - DNA, 25 bp, Probe sequence
actctactagcaaatgttactcact

SEQ ID NO: 126038 - DNA, 25 bp, Probe sequence
aactcatacttttagtactatacga

SEQ ID NO: 126039 - DNA, 25 bp, Probe sequence
aatacatagcactgagtccaaggaa

SEQ ID NO: 126040 - DNA, 25 bp, Probe sequence
cgcgagcttgggaggggctcacgac

SEQ ID NO: 126041 - DNA, 25 bp, Probe sequence
gttactcacttgctaattttacatg

SEQ ID NO: 126042 - DNA, 25 bp, Probe sequence
gtccaaggaaactaactctactagc

SEQ ID NO: 126043 - DNA, 25 bp, Probe sequence
gggctcacgaccatacttattatta

SEQ ID NO: 126044 - DNA, 25 bp, Probe sequence
gggatggcttaataactcatacttt

SEQ ID NO: 126045 - DNA, 25 bp, Probe sequence
tgttttacagttattttttcaatct

SEQ ID NO: 126046 - DNA, 25 bp, Probe sequence
tgttgtttacgatagcttacatgct

SEQ ID NO: 126047 - DNA, 25 bp, Probe sequence
tcatatattttaacggtgggtctca

SEQ ID NO: 126048 - DNA, 25 bp, Probe sequence
taatgaggattaactctccccttct

SEQ ID NO: 126049 - DNA, 25 bp, Probe sequence
tttaacggtgggtctcataatgagg

SEQ ID NO: 126050 - DNA, 25 bp, Probe sequence
ttttcaatctatttttggggatgtt

SEQ ID NO: 126051 - DNA, 25 bp, Probe sequence
atctctgtgatctagttatattaaa

SEQ ID NO: 126052 - DNA, 25 bp, Probe sequence
actattttccatcacatctctgtga

SEQ ID NO: 126053 - DNA, 25 bp, Probe sequence
acagttaagtatttatttcctacag

SEQ ID NO: 126054 - DNA, 25 bp, Probe sequence
caactattttccatcacatctctgt

SEQ ID NO: 126055 - DNA, 25 bp, Probe sequence
cacatctctgtgatctagttatatt

SEQ ID NO: 126056 - DNA, 25 bp, Probe sequence
catgctaaaagcatttattttccaa

SEQ ID NO: 126057 - DNA, 25 bp, Probe sequence
gtatttatttcctacagttaggcaa

SEQ ID NO: 126058 - DNA, 25 bp, Probe sequence
gtgatctagttatattaaaacatgc

SEQ ID NO: 126059 - DNA, 25 bp, Probe sequence
tgctaaaagcatttattttccaatt

SEQ ID NO: 126060 - DNA, 25 bp, Probe sequence
taagtatttatttcctacagttagg

SEQ ID NO: 126061 - DNA, 25 bp, Probe sequence
tacaaattacatttaacagttaagt

SEQ ID NO: 126062 - DNA, 25 bp, Probe sequence
tatttcctacagttaggcaatataa

SEQ ID NO: 126063 - DNA, 25 bp, Probe sequence
tattttccatcacatctctgtgatc

SEQ ID NO: 126064 - DNA, 25 bp, Probe sequence
ttttccatcacatctctgtgatcta

SEQ ID NO: 126065 - DNA, 25 bp, Probe sequence
ttccatcacatctctgtgatctagt

SEQ ID NO: 126066 - DNA, 25 bp, Probe sequence
ataaagtcagttaacggcgtattca

SEQ ID NO: 126067 - DNA, 25 bp, Probe sequence
agtcagttaacggcgtattcaattg

SEQ ID NO: 126068 - DNA, 25 bp, Probe sequence
acggcgtattcaattgtaaatcttg

SEQ ID NO: 126069 - DNA, 25 bp, Probe sequence
aaagtcagttaacggcgtattcaat

SEQ ID NO: 126070 - DNA, 25 bp, Probe sequence
aacggcgtattcaattgtaaatctt

SEQ ID NO: 126071 - DNA, 25 bp, Probe sequence
aagtcagttaacggcgtattcaatt

SEQ ID NO: 126072 - DNA, 25 bp, Probe sequence
gataataaagtcagttaacggcgta

SEQ ID NO: 126073 - DNA, 25 bp, Probe sequence
gttaacggcgtattcaattgtaaat

SEQ ID NO: 126074 - DNA, 25 bp, Probe sequence
gtattcaattgtaaatcttgttgga

SEQ ID NO: 126075 - DNA, 25 bp, Probe sequence
gtcagttaacggcgtattcaattgt

SEQ ID NO: 126076 - DNA, 25 bp, Probe sequence
ggattttaacaagataactagcaaa

SEQ ID NO: 126077 - DNA, 25 bp, Probe sequence
ggcgtattcaattgtaaatcttgtt

SEQ ID NO: 126078 - DNA, 25 bp, Probe sequence
tgtaaatcttgttggattttaacaa

SEQ ID NO: 126079 - DNA, 25 bp, Probe sequence
tcagttaacggcgtattcaattgta

SEQ ID NO: 126080 - DNA, 25 bp, Probe sequence
ttaacggcgtattcaattgtaaatc

SEQ ID NO: 126081 - DNA, 25 bp, Probe sequence
atcctatggcgcaatttttaacaaa

SEQ ID NO: 126082 - DNA, 25 bp, Probe sequence
aacagtgtagcacaagattcaactt

SEQ ID NO: 126083 - DNA, 25 bp, Probe sequence
aatttgaaattgacagtttccataa

SEQ ID NO: 126084 - DNA, 25 bp, Probe sequence
aatttctatttcactctacaatcct

SEQ ID NO: 126085 - DNA, 25 bp, Probe sequence
aatttatcaatttctatttcactct

SEQ ID NO: 126086 - DNA, 25 bp, Probe sequence
caacttgtttcctacactgttttat

SEQ ID NO: 126087 - DNA, 25 bp, Probe sequence
gacagtttccataaataaaatgcta

SEQ ID NO: 126088 - DNA, 25 bp, Probe sequence
gattcaacttgtttcctacactgtt

SEQ ID NO: 126089 - DNA, 25 bp, Probe sequence
gtttcctacactgttttataaatga

SEQ ID NO: 126090 - DNA, 25 bp, Probe sequence
tctacaatcctatggcgcaattttt

SEQ ID NO: 126091 - DNA, 25 bp, Probe sequence
tctatttcactctacaatcctatgg

SEQ ID NO: 126092 - DNA, 25 bp, Probe sequence
tcactctacaatcctatggcgcaat

SEQ ID NO: 126093 - DNA, 25 bp, Probe sequence
taaaatgctacaatttcctaccccg

SEQ ID NO: 126094 - DNA, 25 bp, Probe sequence
tttcactctacaatcctatggcgca

SEQ ID NO: 126095 - DNA, 25 bp, Probe sequence
ttcctaccccgtgaatcttattttg

SEQ ID NO: 126096 - DNA, 25 bp, Probe sequence
atatggtatcggttccacatttgtt

SEQ ID NO: 126097 - DNA, 25 bp, Probe sequence
atagttatatggtatcggttccaca

SEQ ID NO: 126098 - DNA, 25 bp, Probe sequence
atgctgttaacaatttatattctat

SEQ ID NO: 126099 - DNA, 25 bp, Probe sequence
atggtatcggttccacatttgtttt

SEQ ID NO: 126100 - DNA, 25 bp, Probe sequence
cagtcctccttttataatttatgct

SEQ ID NO: 126101 - DNA, 25 bp, Probe sequence
cccagtcctccttttataatttatg

SEQ ID NO: 126102 - DNA, 25 bp, Probe sequence
cctccttttataatttatgctgtta

SEQ ID NO: 126103 - DNA, 25 bp, Probe sequence
gctgttaacaatttatattctatta

SEQ ID NO: 126104 - DNA, 25 bp, Probe sequence
gttatatggtatcggttccacattt

SEQ ID NO: 126105 - DNA, 25 bp, Probe sequence
gtcctccttttataatttatgctgt

SEQ ID NO: 126106 - DNA, 25 bp, Probe sequence
tggtatcggttccacatttgtttta

SEQ ID NO: 126107 - DNA, 25 bp, Probe sequence
taacttttaacctatccatttatag

SEQ ID NO: 126108 - DNA, 25 bp, Probe sequence
tatagcaaattttacctacgttctt

SEQ ID NO: 126109 - DNA, 25 bp, Probe sequence
tattctattatagcaaattttacct

SEQ ID NO: 126110 - DNA, 25 bp, Probe sequence
ttaacctatccatttatagttatat

SEQ ID NO: 126111 - DNA, 25 bp, Probe sequence
atttctgcttctttcataaaaagat

SEQ ID NO: 126112 - DNA, 25 bp, Probe sequence
ataatatttctgcttctttcataaa

SEQ ID NO: 126113 - DNA, 25 bp, Probe sequence
atgtcccaacatcaacctttagtta

SEQ ID NO: 126114 - DNA, 25 bp, Probe sequence
acaaaatgtcccaacatcaaccttt

SEQ ID NO: 126115 - DNA, 25 bp, Probe sequence
aaataatatttctgcttctttcata

SEQ ID NO: 126116 - DNA, 25 bp, Probe sequence
aaaatgtcccaacatcaacctttag

SEQ ID NO: 126117 - DNA, 25 bp, Probe sequence
aaccgctttaaataatatttctgct

SEQ ID NO: 126118 - DNA, 25 bp, Probe sequence
aatgtcccaacatcaacctttagtt

SEQ ID NO: 126119 - DNA, 25 bp, Probe sequence
aatatttctgcttctttcataaaaa

SEQ ID NO: 126120 - DNA, 25 bp, Probe sequence
caacctttagttaaatgtcaggaca

SEQ ID NO: 126121 - DNA, 25 bp, Probe sequence
catcaacctttagttaaatgtcagg

SEQ ID NO: 126122 - DNA, 25 bp, Probe sequence
gtcaggacaatgaatattctatgta

SEQ ID NO: 126123 - DNA, 25 bp, Probe sequence
tgtcccaacatcaacctttagttaa

SEQ ID NO: 126124 - DNA, 25 bp, Probe sequence
tcccaacatcaacctttagttaaat

SEQ ID NO: 126125 - DNA, 25 bp, Probe sequence
ttgtataacaaaatgtcccaacatc

SEQ ID NO: 126126 - DNA, 25 bp, Probe sequence
attagcggaagtagccatagaatct

SEQ ID NO: 126127 - DNA, 25 bp, Probe sequence
atctaatatctattttattgttaaa

SEQ ID NO: 126128 - DNA, 25 bp, Probe sequence
agcggaagtagccatagaatctaat

SEQ ID NO: 126129 - DNA, 25 bp, Probe sequence
aattagcggaagtagccatagaatc

SEQ ID NO: 126130 - DNA, 25 bp, Probe sequence
ctacttactcacttttaaattagcg

SEQ ID NO: 126131 - DNA, 25 bp, Probe sequence
gcggaagtagccatagaatctaata

SEQ ID NO: 126132 - DNA, 25 bp, Probe sequence
gactacttactcacttttaaattag

SEQ ID NO: 126133 - DNA, 25 bp, Probe sequence
gaatctaatatctattttattgtta

SEQ ID NO: 126134 - DNA, 25 bp, Probe sequence
gaagtagccatagaatctaatatct

SEQ ID NO: 126135 - DNA, 25 bp, Probe sequence
gtagccatagaatctaatatctatt

SEQ ID NO: 126136 - DNA, 25 bp, Probe sequence
ttagcggaagtagccatagaatcta

SEQ ID NO: 126137 - DNA, 25 bp, Probe sequence
tactcacttttaaattagcggaagt

SEQ ID NO: 126138 - DNA, 25 bp, Probe sequence
tacttactcacttttaaattagcgg

SEQ ID NO: 126139 - DNA, 25 bp, Probe sequence
tagcggaagtagccatagaatctaa

SEQ ID NO: 126140 - DNA, 25 bp, Probe sequence
ttactcacttttaaattagcggaag

SEQ ID NO: 126141 - DNA, 25 bp, Probe sequence
atttgatcaacatcatttgcataat

SEQ ID NO: 126142 - DNA, 25 bp, Probe sequence
atcacttttatttgatcaacatcat

SEQ ID NO: 126143 - DNA, 25 bp, Probe sequence
caatcacttttatttgatcaacatc

SEQ ID NO: 126144 - DNA, 25 bp, Probe sequence
cacttttatttgatcaacatcattt

SEQ ID NO: 126145 - DNA, 25 bp, Probe sequence
ctccttttccaatcacttttatttg

SEQ ID NO: 126146 - DNA, 25 bp, Probe sequence
ccttttccaatcacttttatttgat

SEQ ID NO: 126147 - DNA, 25 bp, Probe sequence
gatcaacatcatttgcataataatc

SEQ ID NO: 126148 - DNA, 25 bp, Probe sequence
tccaatcacttttatttgatcaaca

SEQ ID NO: 126149 - DNA, 25 bp, Probe sequence
tccttttccaatcacttttatttga

SEQ ID NO: 126150 - DNA, 25 bp, Probe sequence
tctccttttccaatcacttttattt

SEQ ID NO: 126151 - DNA, 25 bp, Probe sequence
tcaacatcatttgcataataatctt

SEQ ID NO: 126152 - DNA, 25 bp, Probe sequence
ttttccaatcacttttatttgatca

SEQ ID NO: 126153 - DNA, 25 bp, Probe sequence
ttatttgatcaacatcatttgcata

SEQ ID NO: 126154 - DNA, 25 bp, Probe sequence
ttccaatcacttttatttgatcaac

SEQ ID NO: 126155 - DNA, 25 bp, Probe sequence
ttgatcaacatcatttgcataataa

SEQ ID NO: 126156 - DNA, 25 bp, Probe sequence
atatctctacgtgttaatttattaa

SEQ ID NO: 126157 - DNA, 25 bp, Probe sequence
agtcccagactgttctataattaat

SEQ ID NO: 126158 - DNA, 25 bp, Probe sequence
aacctatactatatttatcaacaca

SEQ ID NO: 126159 - DNA, 25 bp, Probe sequence
aagcctgagacatacttagtcccag

SEQ ID NO: 126160 - DNA, 25 bp, Probe sequence
ccctcatttccgataagtttagtat

SEQ ID NO: 126161 - DNA, 25 bp, Probe sequence
gacatacttagtcccagactgttct

SEQ ID NO: 126162 - DNA, 25 bp, Probe sequence
gttttcaaccttatacacaatattt

SEQ ID NO: 126163 - DNA, 25 bp, Probe sequence
ggtgatgattttcttgttttcaacc

SEQ ID NO: 126164 - DNA, 25 bp, Probe sequence
ggaaggcgattaattacgattcatc

SEQ ID NO: 126165 - DNA, 25 bp, Probe sequence
tcaacacaacagtttttcctttcat

SEQ ID NO: 126166 - DNA, 25 bp, Probe sequence
taatcattcaaagctaacatcacat

SEQ ID NO: 126167 - DNA, 25 bp, Probe sequence
tacgattcatcattatatctctacg

SEQ ID NO: 126168 - DNA, 25 bp, Probe sequence
tttcctttcattttcaaacataaca

SEQ ID NO: 126169 - DNA, 25 bp, Probe sequence
tttcttgttttcaaccttatacaca

SEQ ID NO: 126170 - DNA, 25 bp, Probe sequence
ttcatcattatatctctacgtgtta

SEQ ID NO: 126171 - DNA, 25 bp, Probe sequence
atttcctccttcgtgtttgaatgaa

SEQ ID NO: 126172 - DNA, 25 bp, Probe sequence
acgagttagagcgtaattgttagat

SEQ ID NO: 126173 - DNA, 25 bp, Probe sequence
aatatcttagtttcaagacggcgtt

SEQ ID NO: 126174 - DNA, 25 bp, Probe sequence
aattgattacaatgaatacctaaat

SEQ ID NO: 126175 - DNA, 25 bp, Probe sequence
ctatgtattcaaacgagttagagcg

SEQ ID NO: 126176 - DNA, 25 bp, Probe sequence
ctatttcctccttcgtgtttgaatg

SEQ ID NO: 126177 - DNA, 25 bp, Probe sequence
gacggcgttttatactgtaaaatgg

SEQ ID NO: 126178 - DNA, 25 bp, Probe sequence
cctccttcgtgtttgaatgaattat

SEQ ID NO: 126179 - DNA, 25 bp, Probe sequence
gaatacctaaatattatacattatt

SEQ ID NO: 126180 - DNA, 25 bp, Probe sequence
gtttcaagacggcgttttatactgt

SEQ ID NO: 126181 - DNA, 25 bp, Probe sequence
gtgtttgaatgaattatatctatgt

SEQ ID NO: 126182 - DNA, 25 bp, Probe sequence
tgtaataattacgacttttttcata

SEQ ID NO: 126183 - DNA, 25 bp, Probe sequence
tcaagacggcgttttatactgtaaa

SEQ ID NO: 126184 - DNA, 25 bp, Probe sequence
tatatctatgtattcaaacgagtta

SEQ ID NO: 126185 - DNA, 25 bp, Probe sequence
ttcctccttcgtgtttgaatgaatt

SEQ ID NO: 126186 - DNA, 25 bp, Probe sequence
attcactctttgttgataagtacgc

SEQ ID NO: 126187 - DNA, 25 bp, Probe sequence
ataagtacgcatgttctctattgac

SEQ ID NO: 126188 - DNA, 25 bp, Probe sequence
atccacaagttattcactctttgtt

SEQ ID NO: 126189 - DNA, 25 bp, Probe sequence
agctatccacagacttatcctagtt

SEQ ID NO: 126190 - DNA, 25 bp, Probe sequence
acgttatcaacaccttttatccaca

SEQ ID NO: 126191 - DNA, 25 bp, Probe sequence
actaatcaattatttattttctgtt

SEQ ID NO: 126192 - DNA, 25 bp, Probe sequence
aaattcattgttaagacactttctt

SEQ ID NO: 126193 - DNA, 25 bp, Probe sequence
aacgctgatattatagctatccaca

SEQ ID NO: 126194 - DNA, 25 bp, Probe sequence
aattcgctatagttagagttatttt

SEQ ID NO: 126195 - DNA, 25 bp, Probe sequence
cacagacttatcctagttatccaca

SEQ ID NO: 126196 - DNA, 25 bp, Probe sequence
cttatcctagttatccacaagtaaa

SEQ ID NO: 126197 - DNA, 25 bp, Probe sequence
gttctctattgacattgtttttatc

SEQ ID NO: 126198 - DNA, 25 bp, Probe sequence
tcaacaccttttatccacaagttat

SEQ ID NO: 126199 - DNA, 25 bp, Probe sequence
taactctaactgtaaattcgctata

SEQ ID NO: 126200 - DNA, 25 bp, Probe sequence
ttttcccacctgatatccacaataa

SEQ ID NO: 126201 - DNA, 25 bp, Probe sequence
atcaatcaatgttcaagtcgcaaca

SEQ ID NO: 126202 - DNA, 25 bp, Probe sequence
atgaatcttgaacatcaatcaatgt

SEQ ID NO: 126203 - DNA, 25 bp, Probe sequence
aagtcgcaacattgttatattgaca

SEQ ID NO: 126204 - DNA, 25 bp, Probe sequence
caatcaatgttcaagtcgcaacatt

SEQ ID NO: 126205 - DNA, 25 bp, Probe sequence
caagtcgcaacattgttatattgac

SEQ ID NO: 126206 - DNA, 25 bp, Probe sequence
catgaatcttgaacatcaatcaatg

SEQ ID NO: 126207 - DNA, 25 bp, Probe sequence
catcaatcaatgttcaagtcgcaac

SEQ ID NO: 126208 - DNA, 25 bp, Probe sequence
gcaacattgttatattgacagtctt

SEQ ID NO: 126209 - DNA, 25 bp, Probe sequence
gttcaagtcgcaacattgttatatt

SEQ ID NO: 126210 - DNA, 25 bp, Probe sequence
gtcgcaacattgttatattgacagt

SEQ ID NO: 126211 - DNA, 25 bp, Probe sequence
tgttcaagtcgcaacattgttatat

SEQ ID NO: 126212 - DNA, 25 bp, Probe sequence
tcgcaacattgttatattgacagtc

SEQ ID NO: 126213 - DNA, 25 bp, Probe sequence
tcaatcaatgttcaagtcgcaacat

SEQ ID NO: 126214 - DNA, 25 bp, Probe sequence
tcaagtcgcaacattgttatattga

SEQ ID NO: 126215 - DNA, 25 bp, Probe sequence
ttcaagtcgcaacattgttatattg

SEQ ID NO: 126216 - DNA, 25 bp, Probe sequence
acagtttcaataatgttcatcgtaa

SEQ ID NO: 126217 - DNA, 25 bp, Probe sequence
aaacgtcagctatcacatgacagaa

SEQ ID NO: 126218 - DNA, 25 bp, Probe sequence
aaaaacgtcagctatcacatgacag

SEQ ID NO: 126219 - DNA, 25 bp, Probe sequence
cactcccctaattgcaatataaaaa

SEQ ID NO: 126220 - DNA, 25 bp, Probe sequence
cagaatcccaacataataaatcatt

SEQ ID NO: 126221 - DNA, 25 bp, Probe sequence
ctcactcccctaattgcaatataaa

SEQ ID NO: 126222 - DNA, 25 bp, Probe sequence
cgtaatcatgttaataactgacgtt

SEQ ID NO: 126223 - DNA, 25 bp, Probe sequence
gctatcacatgacagaagactatga

SEQ ID NO: 126224 - DNA, 25 bp, Probe sequence
gcaatataaaaacgtcagctatcac

SEQ ID NO: 126225 - DNA, 25 bp, Probe sequence
gacagaagactatgaacagtttcaa

SEQ ID NO: 126226 - DNA, 25 bp, Probe sequence
gttcatcgtaatcatgttaataact

SEQ ID NO: 126227 - DNA, 25 bp, Probe sequence
gtttcaataatgttcatcgtaatca

SEQ ID NO: 126228 - DNA, 25 bp, Probe sequence
tctcactcccctaattgcaatataa

SEQ ID NO: 126229 - DNA, 25 bp, Probe sequence
tcagctatcacatgacagaagacta

SEQ ID NO: 126230 - DNA, 25 bp, Probe sequence
taatgttcatcgtaatcatgttaat

SEQ ID NO: 126231 - DNA, 25 bp, Probe sequence
attttattatactctttaggactcg

SEQ ID NO: 126232 - DNA, 25 bp, Probe sequence
atactctttaggactcgaacgttag

SEQ ID NO: 126233 - DNA, 25 bp, Probe sequence
atactgaacatcaaccgacaacttc

SEQ ID NO: 126234 - DNA, 25 bp, Probe sequence
atgttttatctttcaattacttatt

SEQ ID NO: 126235 - DNA, 25 bp, Probe sequence
acgctttaagtcctatttctgtttg

SEQ ID NO: 126236 - DNA, 25 bp, Probe sequence
aaccgacaacttcaaatattattat

SEQ ID NO: 126237 - DNA, 25 bp, Probe sequence
gacttgtaaacgtcccaataatatt

SEQ ID NO: 126238 - DNA, 25 bp, Probe sequence
gatatataccattcacggaaggagt

SEQ ID NO: 126239 - DNA, 25 bp, Probe sequence
gattatccattgttcaatcgtatct

SEQ ID NO: 126240 - DNA, 25 bp, Probe sequence
gttcaatcgtatctaactttatatt

SEQ ID NO: 126241 - DNA, 25 bp, Probe sequence
tgttgattctcctatattatgcttt

SEQ ID NO: 126242 - DNA, 25 bp, Probe sequence
tctcctatattatgcttttcattca

SEQ ID NO: 126243 - DNA, 25 bp, Probe sequence
tatttgttgacatactaaagcagat

SEQ ID NO: 126244 - DNA, 25 bp, Probe sequence
tttctgtttgaatgggacttgtaaa

SEQ ID NO: 126245 - DNA, 25 bp, Probe sequence
tttcaacttaaatttcttatctttg

SEQ ID NO: 126246 - DNA, 25 bp, Probe sequence
atatcataggctgctagttaacatc

SEQ ID NO: 126247 - DNA, 25 bp, Probe sequence
atatatcataggctgctagttaaca

SEQ ID NO: 126248 - DNA, 25 bp, Probe sequence
atagatatatcataggctgctagtt

SEQ ID NO: 126249 - DNA, 25 bp, Probe sequence
aggcaatgatgcgctaattagttat

SEQ ID NO: 126250 - DNA, 25 bp, Probe sequence
aaaggcaatgatgcgctaattagtt

SEQ ID NO: 126251 - DNA, 25 bp, Probe sequence
aagacaaaggcaatgatgcgctaat

SEQ ID NO: 126252 - DNA, 25 bp, Probe sequence
aaggcaatgatgcgctaattagtta

SEQ ID NO: 126253 - DNA, 25 bp, Probe sequence
aatgatgcgctaattagttatagat

SEQ ID NO: 126254 - DNA, 25 bp, Probe sequence
gcaatgatgcgctaattagttatag

SEQ ID NO: 126255 - DNA, 25 bp, Probe sequence
gacaaaggcaatgatgcgctaatta

SEQ ID NO: 126256 - DNA, 25 bp, Probe sequence
gatgcgctaattagttatagatata

SEQ ID NO: 126257 - DNA, 25 bp, Probe sequence
gatatatcataggctgctagttaac

SEQ ID NO: 126258 - DNA, 25 bp, Probe sequence
gttatagatatatcataggctgcta

SEQ ID NO: 126259 - DNA, 25 bp, Probe sequence
ggcaatgatgcgctaattagttata

SEQ ID NO: 126260 - DNA, 25 bp, Probe sequence
tagatatatcataggctgctagtta

SEQ ID NO: 126261 - DNA, 25 bp, Probe sequence
acctttcttgacttgtgacaatcgc

SEQ ID NO: 126262 - DNA, 25 bp, Probe sequence
aagaacctttcttgacttgtgacaa

SEQ ID NO: 126263 - DNA, 25 bp, Probe sequence
caacgttctactctagcggaacgta

SEQ ID NO: 126264 - DNA, 25 bp, Probe sequence
cttcgtcgctaagaacctttcttga

SEQ ID NO: 126265 - DNA, 25 bp, Probe sequence
ctctcgcttactcatttagctctac

SEQ ID NO: 126266 - DNA, 25 bp, Probe sequence
gcggaacgtaagtttgctaccttcg

SEQ ID NO: 126267 - DNA, 25 bp, Probe sequence
gcttactcatttagctctactaaac

SEQ ID NO: 126268 - DNA, 25 bp, Probe sequence
gaacgtaagtttgctaccttcgtcg

SEQ ID NO: 126269 - DNA, 25 bp, Probe sequence
gaacctttcttgacttgtgacaatc

SEQ ID NO: 126270 - DNA, 25 bp, Probe sequence
gtcgctaagaacctttcttgacttg

SEQ ID NO: 126271 - DNA, 25 bp, Probe sequence
tggcaacgttctactctagcggaac

SEQ ID NO: 126272 - DNA, 25 bp, Probe sequence
tgacttgtgacaatcgcttgcttct

SEQ ID NO: 126273 - DNA, 25 bp, Probe sequence
tcgcttactcatttagctctactaa

SEQ ID NO: 126274 - DNA, 25 bp, Probe sequence
tcttgacttgtgacaatcgcttgct

SEQ ID NO: 126275 - DNA, 25 bp, Probe sequence
tagctctactaaactcgttgcactc

SEQ ID NO: 126276 - DNA, 25 bp, Probe sequence
attgtctgacaatcgctttctttaa

SEQ ID NO: 126277 - DNA, 25 bp, Probe sequence
atttttcttaatgcattgtctgaca

SEQ ID NO: 126278 - DNA, 25 bp, Probe sequence
atttctttttagtcaagcgctcgca

SEQ ID NO: 126279 - DNA, 25 bp, Probe sequence
agcgctcgcataagcaatatcactt

SEQ ID NO: 126280 - DNA, 25 bp, Probe sequence
ctccgctttaatttttcttaatgca

SEQ ID NO: 126281 - DNA, 25 bp, Probe sequence
ctcgcatactgctttattttcaaaa

SEQ ID NO: 126282 - DNA, 25 bp, Probe sequence
gctcatttacaaaagtaaactccgc

SEQ ID NO: 126283 - DNA, 25 bp, Probe sequence
gcgctcgcatactgctttattttca

SEQ ID NO: 126284 - DNA, 25 bp, Probe sequence
gcataagcaatatcactttaaccaa

SEQ ID NO: 126285 - DNA, 25 bp, Probe sequence
gaatagattgtcaagcgctcgcata

SEQ ID NO: 126286 - DNA, 25 bp, Probe sequence
gattgtcaagcgctcgcataagcaa

SEQ ID NO: 126287 - DNA, 25 bp, Probe sequence
gtctgacaatcgctttctttaaaaa

SEQ ID NO: 126288 - DNA, 25 bp, Probe sequence
tcaagcgctcgcatactgctttatt

SEQ ID NO: 126289 - DNA, 25 bp, Probe sequence
ttagtcaagcgctcgcatactgctt

SEQ ID NO: 126290 - DNA, 25 bp, Probe sequence
ttcaatgtacaatttctttttagtc

SEQ ID NO: 126291 - DNA, 25 bp, Probe sequence
attcaattactatgtttaccaatca

SEQ ID NO: 126292 - DNA, 25 bp, Probe sequence
atagaaattccatacaactcataaa

SEQ ID NO: 126293 - DNA, 25 bp, Probe sequence
ataattatcttttgtgctactttaa

SEQ ID NO: 126294 - DNA, 25 bp, Probe sequence
atcttacatatacacgaattagctc

SEQ ID NO: 126295 - DNA, 25 bp, Probe sequence
atgccattacctatatcataagtag

SEQ ID NO: 126296 - DNA, 25 bp, Probe sequence
caagtcacaatttatgccattacct

SEQ ID NO: 126297 - DNA, 25 bp, Probe sequence
cgaattagctctatttgtattgtac

SEQ ID NO: 126298 - DNA, 25 bp, Probe sequence
gaattgactgtctttcaaatcaaag

SEQ ID NO: 126299 - DNA, 25 bp, Probe sequence
gaaaagccgagattgcgaagtatta

SEQ ID NO: 126300 - DNA, 25 bp, Probe sequence
gacaatctcggctttaaacatttta

SEQ ID NO: 126301 - DNA, 25 bp, Probe sequence
ggaacgtgtttaatcatactaacta

SEQ ID NO: 126302 - DNA, 25 bp, Probe sequence
taaacacaatttcttcttattcaat

SEQ ID NO: 126303 - DNA, 25 bp, Probe sequence
taaattacgacaatctcggctttaa

SEQ ID NO: 126304 - DNA, 25 bp, Probe sequence
ttaatttcatcctatcaagtcacaa

SEQ ID NO: 126305 - DNA, 25 bp, Probe sequence
ttgttaacacaacgctatttataat

SEQ ID NO: 126306 - DNA, 25 bp, Probe sequence
acgacaattagatatcttcttcact

SEQ ID NO: 126307 - DNA, 25 bp, Probe sequence
aatttcataatctaagactactttt

SEQ ID NO: 126308 - DNA, 25 bp, Probe sequence
aattattaatactatatcgcgacat

SEQ ID NO: 126309 - DNA, 25 bp, Probe sequence
cacactttttcttaaatttactcat

SEQ ID NO: 126310 - DNA, 25 bp, Probe sequence
gcaatccacctatttaaaacgacaa

SEQ ID NO: 126311 - DNA, 25 bp, Probe sequence
gacacaccatcatttctaaatttca

SEQ ID NO: 126312 - DNA, 25 bp, Probe sequence
gactactttttttattctaatagca

SEQ ID NO: 126313 - DNA, 25 bp, Probe sequence
gatacttaatgtaattttcacttcc

SEQ ID NO: 126314 - DNA, 25 bp, Probe sequence
gatatcttcttcacttaaattatta

SEQ ID NO: 126315 - DNA, 25 bp, Probe sequence
ggtcatactatattttaaaacgcac

SEQ ID NO: 126316 - DNA, 25 bp, Probe sequence
tgtggatacacattaaactacgtta

SEQ ID NO: 126317 - DNA, 25 bp, Probe sequence
tgtaattttcacttccaaaacattt

SEQ ID NO: 126318 - DNA, 25 bp, Probe sequence
tacccctcgatttcaatttaataat

SEQ ID NO: 126319 - DNA, 25 bp, Probe sequence
tatcgcgacatttatgtggatacac

SEQ ID NO: 126320 - DNA, 25 bp, Probe sequence
ttttattctaatagcaatccaccta

SEQ ID NO: 126321 - DNA, 25 bp, Probe sequence
attttaagcgctgtatccaccatat

SEQ ID NO: 126322 - DNA, 25 bp, Probe sequence
agcgctgtatccaccatatttatat

SEQ ID NO: 126323 - DNA, 25 bp, Probe sequence
cttcattttaagcgctgtatccacc

SEQ ID NO: 126324 - DNA, 25 bp, Probe sequence
gctgtatccaccatatttatatttc

SEQ ID NO: 126325 - DNA, 25 bp, Probe sequence
gtatccaccatatttatatttcaaa

SEQ ID NO: 126326 - DNA, 25 bp, Probe sequence
tccaccatatttatatttcaaatta

SEQ ID NO: 126327 - DNA, 25 bp, Probe sequence
tcgaaataatttctaatcttctttt

SEQ ID NO: 126328 - DNA, 25 bp, Probe sequence
tcattttaagcgctgtatccaccat

SEQ ID NO: 126329 - DNA, 25 bp, Probe sequence
tcaaattattatatacccatcgaaa

SEQ ID NO: 126330 - DNA, 25 bp, Probe sequence
taagcgctgtatccaccatatttat

SEQ ID NO: 126331 - DNA, 25 bp, Probe sequence
tatatacccatcgaaataatttcta

SEQ ID NO: 126332 - DNA, 25 bp, Probe sequence
ttatcttcattttaagcgctgtatc

SEQ ID NO: 126333 - DNA, 25 bp, Probe sequence
ttacactcctacttattaaaaatat

SEQ ID NO: 126334 - DNA, 25 bp, Probe sequence
ttaagcgctgtatccaccatattta

SEQ ID NO: 126335 - DNA, 25 bp, Probe sequence
ttcattacactcctacttattaaaa

SEQ ID NO: 126336 - DNA, 25 bp, Probe sequence
atatcaatattttatttatctctga

SEQ ID NO: 126337 - DNA, 25 bp, Probe sequence
actggtatttgctaaaatctatgtt

SEQ ID NO: 126338 - DNA, 25 bp, Probe sequence
acttatcaattttgtcgtttgcaat

SEQ ID NO: 126339 - DNA, 25 bp, Probe sequence
aacatttatttaattgcacttatca

SEQ ID NO: 126340 - DNA, 25 bp, Probe sequence
aattttgtcgtttgcaattttgctg

SEQ ID NO: 126341 - DNA, 25 bp, Probe sequence
gctgtagatgatacttttaagctaa

SEQ ID NO: 126342 - DNA, 25 bp, Probe sequence
gcacttatcaattttgtcgtttgca

SEQ ID NO: 126343 - DNA, 25 bp, Probe sequence
gcaattttgctgtagatgatacttt

SEQ ID NO: 126344 - DNA, 25 bp, Probe sequence
gaatatcataactggtatttgctaa

SEQ ID NO: 126345 - DNA, 25 bp, Probe sequence
gtttataagaaaattcttcgtacag

SEQ ID NO: 126346 - DNA, 25 bp, Probe sequence
tgtcgtttgcaattttgctgtagat

SEQ ID NO: 126347 - DNA, 25 bp, Probe sequence
taaagttattgtcttttatatcaat

SEQ ID NO: 126348 - DNA, 25 bp, Probe sequence
tactaacatttatttaattgcactt

SEQ ID NO: 126349 - DNA, 25 bp, Probe sequence
taggatggaatacctaaagcctaaa

SEQ ID NO: 126350 - DNA, 25 bp, Probe sequence
ttgcacttatcaattttgtcgtttg

SEQ ID NO: 126351 - DNA, 25 bp, Probe sequence
attactctaatgataacaaatttta

SEQ ID NO: 126352 - DNA, 25 bp, Probe sequence
atgagaacctccaattgattccaaa

SEQ ID NO: 126353 - DNA, 25 bp, Probe sequence
atgacctttaattactctaatgata

SEQ ID NO: 126354 - DNA, 25 bp, Probe sequence
agaacctccaattgattccaaaagt

SEQ ID NO: 126355 - DNA, 25 bp, Probe sequence
acctccaattgattccaaaagttat

SEQ ID NO: 126356 - DNA, 25 bp, Probe sequence
acaaattttatatgcactgaccata

SEQ ID NO: 126357 - DNA, 25 bp, Probe sequence
aaatgacctttaattactctaatga

SEQ ID NO: 126358 - DNA, 25 bp, Probe sequence
cctccaattgattccaaaagttatt

SEQ ID NO: 126359 - DNA, 25 bp, Probe sequence
gaacctccaattgattccaaaagtt

SEQ ID NO: 126360 - DNA, 25 bp, Probe sequence
gacctttaattactctaatgataac

SEQ ID NO: 126361 - DNA, 25 bp, Probe sequence
gagaacctccaattgattccaaaag

SEQ ID NO: 126362 - DNA, 25 bp, Probe sequence
gattccaaaagttattaaatgacct

SEQ ID NO: 126363 - DNA, 25 bp, Probe sequence
tgagaacctccaattgattccaaaa

SEQ ID NO: 126364 - DNA, 25 bp, Probe sequence
taacaaattttatatgcactgacca

SEQ ID NO: 126365 - DNA, 25 bp, Probe sequence
taaatgacctttaattactctaatg

SEQ ID NO: 126366 - DNA, 25 bp, Probe sequence
atcttaattatcattgtataacaaa

SEQ ID NO: 126367 - DNA, 25 bp, Probe sequence
agatcttaattatcattgtataaca

SEQ ID NO: 126368 - DNA, 25 bp, Probe sequence
actagatcttaattatcattgtata

SEQ ID NO: 126369 - DNA, 25 bp, Probe sequence
aaactagatcttaattatcattgta

SEQ ID NO: 126370 - DNA, 25 bp, Probe sequence
aaaactagatcttaattatcattgt

SEQ ID NO: 126371 - DNA, 25 bp, Probe sequence
aactagatcttaattatcattgtat

SEQ ID NO: 126372 - DNA, 25 bp, Probe sequence
ctagatcttaattatcattgtataa

SEQ ID NO: 126373 - DNA, 25 bp, Probe sequence
gatcttaattatcattgtataacaa

SEQ ID NO: 126374 - DNA, 25 bp, Probe sequence
tcccacacgttttaaaactagatct

SEQ ID NO: 126375 - DNA, 25 bp, Probe sequence
tcttaattatcattgtataacaaat

SEQ ID NO: 126376 - DNA, 25 bp, Probe sequence
taaaactagatcttaattatcattg

SEQ ID NO: 126377 - DNA, 25 bp, Probe sequence
tagatcttaattatcattgtataac

SEQ ID NO: 126378 - DNA, 25 bp, Probe sequence
tttaaaactagatcttaattatcat

SEQ ID NO: 126379 - DNA, 25 bp, Probe sequence
ttttaaaactagatcttaattatca

SEQ ID NO: 126380 - DNA, 25 bp, Probe sequence
ttaaaactagatcttaattatcatt

SEQ ID NO: 126381 - DNA, 25 bp, Probe sequence
atttataatctatttcattttattt

SEQ ID NO: 126382 - DNA, 25 bp, Probe sequence
atttcattttatttttatatgatga

SEQ ID NO: 126383 - DNA, 25 bp, Probe sequence
atacggatttataatctatttcatt

SEQ ID NO: 126384 - DNA, 25 bp, Probe sequence
atgatgataattatagcatatggaa

SEQ ID NO: 126385 - DNA, 25 bp, Probe sequence
acggatttataatctatttcatttt

SEQ ID NO: 126386 - DNA, 25 bp, Probe sequence
cggatttataatctatttcatttta

SEQ ID NO: 126387 - DNA, 25 bp, Probe sequence
gataattatagcatatggaatattt

SEQ ID NO: 126388 - DNA, 25 bp, Probe sequence
gatttataatctatttcattttatt

SEQ ID NO: 126389 - DNA, 25 bp, Probe sequence
ggatttataatctatttcattttat

SEQ ID NO: 126390 - DNA, 25 bp, Probe sequence
tacggatttataatctatttcattt

SEQ ID NO: 126391 - DNA, 25 bp, Probe sequence
tagcatatggaatatttcatgctaa

SEQ ID NO: 126392 - DNA, 25 bp, Probe sequence
tatagcatatggaatatttcatgct

SEQ ID NO: 126393 - DNA, 25 bp, Probe sequence
tatacggatttataatctatttcat

SEQ ID NO: 126394 - DNA, 25 bp, Probe sequence
tttataatctatttcattttatttt

SEQ ID NO: 126395 - DNA, 25 bp, Probe sequence
ttataatctatttcattttattttt

SEQ ID NO: 126396 - DNA, 25 bp, Probe sequence
atttacacagaatgatataaccgca

SEQ ID NO: 126397 - DNA, 25 bp, Probe sequence
atgttcgattattcttaatttaagt

SEQ ID NO: 126398 - DNA, 25 bp, Probe sequence
agtactttgatatctacagagaatc

SEQ ID NO: 126399 - DNA, 25 bp, Probe sequence
agtttatttatgttcgattattctt

SEQ ID NO: 126400 - DNA, 25 bp, Probe sequence
accgcatacagatctcaatccaatt

SEQ ID NO: 126401 - DNA, 25 bp, Probe sequence
aacgttagtactttgatatctacag

SEQ ID NO: 126402 - DNA, 25 bp, Probe sequence
gcatacagatctcaatccaattaaa

SEQ ID NO: 126403 - DNA, 25 bp, Probe sequence
gatctcaatccaattaaatatttaa

SEQ ID NO: 126404 - DNA, 25 bp, Probe sequence
gtagttgttatattctagattcata

SEQ ID NO: 126405 - DNA, 25 bp, Probe sequence
taaccgcatacagatctcaatccaa

SEQ ID NO: 126406 - DNA, 25 bp, Probe sequence
tagattcatatttatatttacacag

SEQ ID NO: 126407 - DNA, 25 bp, Probe sequence
tatctacagagaatcaattattgaa

SEQ ID NO: 126408 - DNA, 25 bp, Probe sequence
tataaccgcatacagatctcaatcc

SEQ ID NO: 126409 - DNA, 25 bp, Probe sequence
tatttatgttcgattattcttaatt

SEQ ID NO: 126410 - DNA, 25 bp, Probe sequence
ttaaaacgttagtactttgatatct

SEQ ID NO: 126411 - DNA, 25 bp, Probe sequence
attacatctttaagctcttaatcta

SEQ ID NO: 126412 - DNA, 25 bp, Probe sequence
agacattacatctttaagctcttaa

SEQ ID NO: 126413 - DNA, 25 bp, Probe sequence
agagctcaagacattacatctttaa

SEQ ID NO: 126414 - DNA, 25 bp, Probe sequence
acattacatctttaagctcttaatc

SEQ ID NO: 126415 - DNA, 25 bp, Probe sequence
aaaaaagagctcaagacattacatc

SEQ ID NO: 126416 - DNA, 25 bp, Probe sequence
aaaagagctcaagacattacatctt

SEQ ID NO: 126417 - DNA, 25 bp, Probe sequence
aagagctcaagacattacatcttta

SEQ ID NO: 126418 - DNA, 25 bp, Probe sequence
caagacattacatctttaagctctt

SEQ ID NO: 126419 - DNA, 25 bp, Probe sequence
catctttaagctcttaatctataaa

SEQ ID NO: 126420 - DNA, 25 bp, Probe sequence
gctcaagacattacatctttaagct

SEQ ID NO: 126421 - DNA, 25 bp, Probe sequence
gaagaaccaacaaaaaagagctcaa

SEQ ID NO: 126422 - DNA, 25 bp, Probe sequence
gaaccaacaaaaaagagctcaagac

SEQ ID NO: 126423 - DNA, 25 bp, Probe sequence
gacattacatctttaagctcttaat

SEQ ID NO: 126424 - DNA, 25 bp, Probe sequence
gagctcaagacattacatctttaag

SEQ ID NO: 126425 - DNA, 25 bp, Probe sequence
tacatctttaagctcttaatctata

SEQ ID NO: 126426 - DNA, 25 bp, Probe sequence
aacattccacaacaaattttactga

SEQ ID NO: 126427 - DNA, 25 bp, Probe sequence
aagtaaaaggtcgctcgactaatct

SEQ ID NO: 126428 - DNA, 25 bp, Probe sequence
aaggcaattttgtatttacacacaa

SEQ ID NO: 126429 - DNA, 25 bp, Probe sequence
ccacctcttctttgtaatcttttag

SEQ ID NO: 126430 - DNA, 25 bp, Probe sequence
gacattataatactacatctttttg

SEQ ID NO: 126431 - DNA, 25 bp, Probe sequence
gttacgcatcattcgaataatcatt

SEQ ID NO: 126432 - DNA, 25 bp, Probe sequence
gtgtgtacatagaattaaccttgat

SEQ ID NO: 126433 - DNA, 25 bp, Probe sequence
tcaacttctatatagtaccaccaaa

SEQ ID NO: 126434 - DNA, 25 bp, Probe sequence
taagcgttacgcatcattcgaataa

SEQ ID NO: 126435 - DNA, 25 bp, Probe sequence
taaacattcaaactacttcctatat

SEQ ID NO: 126436 - DNA, 25 bp, Probe sequence
tacacacaaaaccacctcttctttg

SEQ ID NO: 126437 - DNA, 25 bp, Probe sequence
tacgtatatcgttaacattccacaa

SEQ ID NO: 126438 - DNA, 25 bp, Probe sequence
tttttacctgtttatttctcaatat

SEQ ID NO: 126439 - DNA, 25 bp, Probe sequence
ttatttctcaatatacttttgcata

SEQ ID NO: 126440 - DNA, 25 bp, Probe sequence
ttcattaatatttcatcaacttcta

SEQ ID NO: 126441 - DNA, 25 bp, Probe sequence
attttaatgctattttgcattttaa

SEQ ID NO: 126442 - DNA, 25 bp, Probe sequence
atcactgtgatattctagctaattt

SEQ ID NO: 126443 - DNA, 25 bp, Probe sequence
atctatagctgatatcactgtgata

SEQ ID NO: 126444 - DNA, 25 bp, Probe sequence
aacgaggacttatgtgtctgtatct

SEQ ID NO: 126445 - DNA, 25 bp, Probe sequence
aatcagaacaatattcccttctatt

SEQ ID NO: 126446 - DNA, 25 bp, Probe sequence
cttatgtgtctgtatctatgttgat

SEQ ID NO: 126447 - DNA, 25 bp, Probe sequence
ctattttattcctaattcaaattga

SEQ ID NO: 126448 - DNA, 25 bp, Probe sequence
gaaatctatagctgatatcactgtg

SEQ ID NO: 126449 - DNA, 25 bp, Probe sequence
gacttatgtgtctgtatctatgttg

SEQ ID NO: 126450 - DNA, 25 bp, Probe sequence
gtatctatgttgattcatttataat

SEQ ID NO: 126451 - DNA, 25 bp, Probe sequence
gtgtctgtatctatgttgattcatt

SEQ ID NO: 126452 - DNA, 25 bp, Probe sequence
tgtgatattctagctaatttttaaa

SEQ ID NO: 126453 - DNA, 25 bp, Probe sequence
tgcattttaaaaacgaggacttatg

SEQ ID NO: 126454 - DNA, 25 bp, Probe sequence
tcccttctattttattcctaattca

SEQ ID NO: 126455 - DNA, 25 bp, Probe sequence
tattcccttctattttattcctaat

SEQ ID NO: 126456 - DNA, 25 bp, Probe sequence
attactcgataataacaatccctct

SEQ ID NO: 126457 - DNA, 25 bp, Probe sequence
atatagtctatttacgtcgtcgatt

SEQ ID NO: 126458 - DNA, 25 bp, Probe sequence
atccctctttgaagtacacattgta

SEQ ID NO: 126459 - DNA, 25 bp, Probe sequence
aacaatccctctttgaagtacacat

SEQ ID NO: 126460 - DNA, 25 bp, Probe sequence
aacttttcaagatgacgttatatag

SEQ ID NO: 126461 - DNA, 25 bp, Probe sequence
aagctatcatcgaatagtccgacga

SEQ ID NO: 126462 - DNA, 25 bp, Probe sequence
aatccagtcaaaaaagctatcatcg

SEQ ID NO: 126463 - DNA, 25 bp, Probe sequence
gctttcattttagtaaatccagtca

SEQ ID NO: 126464 - DNA, 25 bp, Probe sequence
gaatagtccgacgatagctttaacg

SEQ ID NO: 126465 - DNA, 25 bp, Probe sequence
gatagctttaacggtgtgtgattca

SEQ ID NO: 126466 - DNA, 25 bp, Probe sequence
gtttcaaatatcataacttttcaag

SEQ ID NO: 126467 - DNA, 25 bp, Probe sequence
gggattttgttatatagtacttgct

SEQ ID NO: 126468 - DNA, 25 bp, Probe sequence
ggtgtgtgattcacaatcacagtca

SEQ ID NO: 126469 - DNA, 25 bp, Probe sequence
tacgtcgtcgatttaaaatgtcata

SEQ ID NO: 126470 - DNA, 25 bp, Probe sequence
tatatagtacttgctttcattttag

SEQ ID NO: 126471 - DNA, 25 bp, Probe sequence
attcgacatacctttactacatcat

SEQ ID NO: 126472 - DNA, 25 bp, Probe sequence
atcgctttcaatattatcttaccct

SEQ ID NO: 126473 - DNA, 25 bp, Probe sequence
acctttactacatcatttacaaaat

SEQ ID NO: 126474 - DNA, 25 bp, Probe sequence
acctcgtttggatcgctttcaatat

SEQ ID NO: 126475 - DNA, 25 bp, Probe sequence
aaattaaaatctatagcgcactcta

SEQ ID NO: 126476 - DNA, 25 bp, Probe sequence
aaatctatagcgcactctacattat

SEQ ID NO: 126477 - DNA, 25 bp, Probe sequence
catacctttactacatcatttacaa

SEQ ID NO: 126478 - DNA, 25 bp, Probe sequence
ccctattcgacatacctttactaca

SEQ ID NO: 126479 - DNA, 25 bp, Probe sequence
cgctttcaatattatcttaccctat

SEQ ID NO: 126480 - DNA, 25 bp, Probe sequence
gacatacctttactacatcatttac

SEQ ID NO: 126481 - DNA, 25 bp, Probe sequence
tctatagcgcactctacattatacc

SEQ ID NO: 126482 - DNA, 25 bp, Probe sequence
tcaatattatcttaccctattcgac

SEQ ID NO: 126483 - DNA, 25 bp, Probe sequence
taccctattcgacatacctttacta

SEQ ID NO: 126484 - DNA, 25 bp, Probe sequence
tattatcttaccctattcgacatac

SEQ ID NO: 126485 - DNA, 25 bp, Probe sequence
tattatcacctcgtttggatcgctt

SEQ ID NO: 126486 - DNA, 25 bp, Probe sequence
attatcttcaacttttagggtgcac

SEQ ID NO: 126487 - DNA, 25 bp, Probe sequence
ataatgtgacactaagtttcgctat

SEQ ID NO: 126488 - DNA, 25 bp, Probe sequence
atcttcaacttttagggtgcacatt

SEQ ID NO: 126489 - DNA, 25 bp, Probe sequence
atgtgcgccctataaagttaaaatt

SEQ ID NO: 126490 - DNA, 25 bp, Probe sequence
atgtgacactaagtttcgctattga

SEQ ID NO: 126491 - DNA, 25 bp, Probe sequence
aataatgtgcgccctataaagttaa

SEQ ID NO: 126492 - DNA, 25 bp, Probe sequence
ctgctgtttctatttatcacatatt

SEQ ID NO: 126493 - DNA, 25 bp, Probe sequence
gaagcgaaaaataatgtgcgcccta

SEQ ID NO: 126494 - DNA, 25 bp, Probe sequence
gaaaaataatgtgcgccctataaag

SEQ ID NO: 126495 - DNA, 25 bp, Probe sequence
gacactaagtttcgctattgaagcg

SEQ ID NO: 126496 - DNA, 25 bp, Probe sequence
gtttctatttatcacatattgtata

SEQ ID NO: 126497 - DNA, 25 bp, Probe sequence
tgactttcacatttgaaatcatctt

SEQ ID NO: 126498 - DNA, 25 bp, Probe sequence
tcaacttttagggtgcacattattt

SEQ ID NO: 126499 - DNA, 25 bp, Probe sequence
tttagggtgcacattatttggactt

SEQ ID NO: 126500 - DNA, 25 bp, Probe sequence
ttcacatttgaaatcatcttactgc

SEQ ID NO: 126501 - DNA, 25 bp, Probe sequence
attatattcacataggatttattct

SEQ ID NO: 126502 - DNA, 25 bp, Probe sequence
atcattatattcacataggatttat

SEQ ID NO: 126503 - DNA, 25 bp, Probe sequence
acctctatcattatattcacatagg

SEQ ID NO: 126504 - DNA, 25 bp, Probe sequence
cacataggatttattctatcacatt

SEQ ID NO: 126505 - DNA, 25 bp, Probe sequence
ctatcacattaatgagtacgtatga

SEQ ID NO: 126506 - DNA, 25 bp, Probe sequence
ccacctctatcattatattcacata

SEQ ID NO: 126507 - DNA, 25 bp, Probe sequence
gagtacgtatgaaacaataagtgga

SEQ ID NO: 126508 - DNA, 25 bp, Probe sequence
ggatttattctatcacattaatgag

SEQ ID NO: 126509 - DNA, 25 bp, Probe sequence
tccacctctatcattatattcacat

SEQ ID NO: 126510 - DNA, 25 bp, Probe sequence
taggatttattctatcacattaatg

SEQ ID NO: 126511 - DNA, 25 bp, Probe sequence
tattctatcacattaatgagtacgt

SEQ ID NO: 126512 - DNA, 25 bp, Probe sequence
tttccacctctatcattatattcac

SEQ ID NO: 126513 - DNA, 25 bp, Probe sequence
ttttccacctctatcattatattca

SEQ ID NO: 126514 - DNA, 25 bp, Probe sequence
ttcacataggatttattctatcaca

SEQ ID NO: 126515 - DNA, 25 bp, Probe sequence
ttccacctctatcattatattcaca

SEQ ID NO: 126516 - DNA, 25 bp, Probe sequence
atcacttcaataactactttcctac

SEQ ID NO: 126517 - DNA, 25 bp, Probe sequence
agtagtttgatggcaatgttgctat

SEQ ID NO: 126518 - DNA, 25 bp, Probe sequence
aaaactacttccaacatgaaagtag

SEQ ID NO: 126519 - DNA, 25 bp, Probe sequence
aatgttgctatactagccccatcac

SEQ ID NO: 126520 - DNA, 25 bp, Probe sequence
catcacttcaataactactttccta

SEQ ID NO: 126521 - DNA, 25 bp, Probe sequence
ctagccccatcacttcaataactac

SEQ ID NO: 126522 - DNA, 25 bp, Probe sequence
cccatcacttcaataactactttcc

SEQ ID NO: 126523 - DNA, 25 bp, Probe sequence
ccccatcacttcaataactactttc

SEQ ID NO: 126524 - DNA, 25 bp, Probe sequence
ccatcacttcaataactactttcct

SEQ ID NO: 126525 - DNA, 25 bp, Probe sequence
gcaatgttgctatactagccccatc

SEQ ID NO: 126526 - DNA, 25 bp, Probe sequence
gaaagtagtttgatggcaatgttgc

SEQ ID NO: 126527 - DNA, 25 bp, Probe sequence
gatggcaatgttgctatactagccc

SEQ ID NO: 126528 - DNA, 25 bp, Probe sequence
ggcaatgttgctatactagccccat

SEQ ID NO: 126529 - DNA, 25 bp, Probe sequence
tggcaatgttgctatactagcccca

SEQ ID NO: 126530 - DNA, 25 bp, Probe sequence
tagccccatcacttcaataactact

SEQ ID NO: 126531 - DNA, 25 bp, Probe sequence
cggaacatatcgagaattccccgat

SEQ ID NO: 126532 - DNA, 25 bp, Probe sequence
attccccgatatattccgatctaaa

SEQ ID NO: 126533 - DNA, 25 bp, Probe sequence
atcgagaattccccgatatattccg

SEQ ID NO: 126534 - DNA, 25 bp, Probe sequence
aattctataatgacgtatatttgcg

SEQ ID NO: 126535 - DNA, 25 bp, Probe sequence
gctcagttgtattattatctttaaa

SEQ ID NO: 126536 - DNA, 25 bp, Probe sequence
gaattccccgatatattccgatcta

SEQ ID NO: 126537 - DNA, 25 bp, Probe sequence
gagaattccccgatatattccgatc

SEQ ID NO: 126538 - DNA, 25 bp, Probe sequence
gaccggaacatatcgagaattcccc

SEQ ID NO: 126539 - DNA, 25 bp, Probe sequence
gttgctcagttgtattattatcttt

SEQ ID NO: 126540 - DNA, 25 bp, Probe sequence
tgcgaaataaaaaagaccggaacat

SEQ ID NO: 126541 - DNA, 25 bp, Probe sequence
tccccgatatattccgatctaaaag

SEQ ID NO: 126542 - DNA, 25 bp, Probe sequence
tataactattgattagctatgcata

SEQ ID NO: 126543 - DNA, 25 bp, Probe sequence
tattccgatctaaaagttacttata

SEQ ID NO: 126544 - DNA, 25 bp, Probe sequence
tattgattagctatgcataaatggc

SEQ ID NO: 126545 - DNA, 25 bp, Probe sequence
ttattgttgctcagttgtattatta

SEQ ID NO: 126546 - DNA, 25 bp, Probe sequence
atttgcaattttttatgtaatcgtt

SEQ ID NO: 126547 - DNA, 25 bp, Probe sequence
atagccttgttttttacacagtgat

SEQ ID NO: 126548 - DNA, 25 bp, Probe sequence
atcttaaaatcctcctacaagtaat

SEQ ID NO: 126549 - DNA, 25 bp, Probe sequence
actacacaaaaagacgacctacaca

SEQ ID NO: 126550 - DNA, 25 bp, Probe sequence
aaatccgtgcaggttacaacaaaat

SEQ ID NO: 126551 - DNA, 25 bp, Probe sequence
aatcccccataatttcagatatgat

SEQ ID NO: 126552 - DNA, 25 bp, Probe sequence
cagtgattacaacgaaatcccccat

SEQ ID NO: 126553 - DNA, 25 bp, Probe sequence
cagagactactgtaacatctataaa

SEQ ID NO: 126554 - DNA, 25 bp, Probe sequence
gacgacctacacaacagtactagtc

SEQ ID NO: 126555 - DNA, 25 bp, Probe sequence
gtactagtcatgtaagtcgttttta

SEQ ID NO: 126556 - DNA, 25 bp, Probe sequence
gtaacatctataaaatccgtgcagg

SEQ ID NO: 126557 - DNA, 25 bp, Probe sequence
gtaatcgttttgcaatctatgtcta

SEQ ID NO: 126558 - DNA, 25 bp, Probe sequence
tgcaatctatgtctattttctatta

SEQ ID NO: 126559 - DNA, 25 bp, Probe sequence
tcctcctacaagtaatttgtttctc

SEQ ID NO: 126560 - DNA, 25 bp, Probe sequence
ttctatcgagaattgtcatgacagt

SEQ ID NO: 126561 - DNA, 25 bp, Probe sequence
atagcatctcgttatttgttatatt

SEQ ID NO: 126562 - DNA, 25 bp, Probe sequence
atagctatagcatctcgttatttgt

SEQ ID NO: 126563 - DNA, 25 bp, Probe sequence
atctcgttatttgttatatttaaag

SEQ ID NO: 126564 - DNA, 25 bp, Probe sequence
atgcctatatcttaattactagctt

SEQ ID NO: 126565 - DNA, 25 bp, Probe sequence
agcatctcgttatttgttatattta

SEQ ID NO: 126566 - DNA, 25 bp, Probe sequence
acctcctatgcctatatcttaatta

SEQ ID NO: 126567 - DNA, 25 bp, Probe sequence
aattaatagctatagcatctcgtta

SEQ ID NO: 126568 - DNA, 25 bp, Probe sequence
cacctcctatgcctatatcttaatt

SEQ ID NO: 126569 - DNA, 25 bp, Probe sequence
cctcctatgcctatatcttaattac

SEQ ID NO: 126570 - DNA, 25 bp, Probe sequence
gcctatatcttaattactagcttaa

SEQ ID NO: 126571 - DNA, 25 bp, Probe sequence
gctatagcatctcgttatttgttat

SEQ ID NO: 126572 - DNA, 25 bp, Probe sequence
gtagtgtgtgattcacctcctatgc

SEQ ID NO: 126573 - DNA, 25 bp, Probe sequence
tcctatgcctatatcttaattacta

SEQ ID NO: 126574 - DNA, 25 bp, Probe sequence
taattactagcttaaaaatggtcaa

SEQ ID NO: 126575 - DNA, 25 bp, Probe sequence
tagtgtgtgattcacctcctatgcc

SEQ ID NO: 126576 - DNA, 25 bp, Probe sequence
attcaaagattatgccaacacatta

SEQ ID NO: 126577 - DNA, 25 bp, Probe sequence
attatgccaacacattaaatctttg

SEQ ID NO: 126578 - DNA, 25 bp, Probe sequence
atgccaacacattaaatctttgaat

SEQ ID NO: 126579 - DNA, 25 bp, Probe sequence
acattcaaagattatgccaacacat

SEQ ID NO: 126580 - DNA, 25 bp, Probe sequence
aaacattcaaagattatgccaacac

SEQ ID NO: 126581 - DNA, 25 bp, Probe sequence
aacattcaaagattatgccaacaca

SEQ ID NO: 126582 - DNA, 25 bp, Probe sequence
caacacattaaatctttgaatgttt

SEQ ID NO: 126583 - DNA, 25 bp, Probe sequence
caaagattatgccaacacattaaat

SEQ ID NO: 126584 - DNA, 25 bp, Probe sequence
cattcaaagattatgccaacacatt

SEQ ID NO: 126585 - DNA, 25 bp, Probe sequence
gccaacacattaaatctttgaatgt

SEQ ID NO: 126586 - DNA, 25 bp, Probe sequence
gattatgccaacacattaaatcttt

SEQ ID NO: 126587 - DNA, 25 bp, Probe sequence
tcaaagattatgccaacacattaaa

SEQ ID NO: 126588 - DNA, 25 bp, Probe sequence
tatgccaacacattaaatctttgaa

SEQ ID NO: 126589 - DNA, 25 bp, Probe sequence
ttatgccaacacattaaatctttga

SEQ ID NO: 126590 - DNA, 25 bp, Probe sequence
ttcaaagattatgccaacacattaa

SEQ ID NO: 126591 - DNA, 25 bp, Probe sequence
attatttaattatatctagttttga

SEQ ID NO: 126592 - DNA, 25 bp, Probe sequence
attatatctagttttgattacaaat

SEQ ID NO: 126593 - DNA, 25 bp, Probe sequence
atatctagttttgattacaaatcat

SEQ ID NO: 126594 - DNA, 25 bp, Probe sequence
atctagttttgattacaaatcatag

SEQ ID NO: 126595 - DNA, 25 bp, Probe sequence
aagtcattatttaattatatctagt

SEQ ID NO: 126596 - DNA, 25 bp, Probe sequence
aattatatctagttttgattacaaa

SEQ ID NO: 126597 - DNA, 25 bp, Probe sequence
cattatttaattatatctagttttg

SEQ ID NO: 126598 - DNA, 25 bp, Probe sequence
gtcattatttaattatatctagttt

SEQ ID NO: 126599 - DNA, 25 bp, Probe sequence
tctagttttgattacaaatcataga

SEQ ID NO: 126600 - DNA, 25 bp, Probe sequence
taattatatctagttttgattacaa

SEQ ID NO: 126601 - DNA, 25 bp, Probe sequence
tatatctagttttgattacaaatca

SEQ ID NO: 126602 - DNA, 25 bp, Probe sequence
tatttaattatatctagttttgatt

SEQ ID NO: 126603 - DNA, 25 bp, Probe sequence
ttatatctagttttgattacaaatc

SEQ ID NO: 126604 - DNA, 25 bp, Probe sequence
ttaattatatctagttttgattaca

SEQ ID NO: 126605 - DNA, 25 bp, Probe sequence
ttgattacaaatcatagagttagac

SEQ ID NO: 126606 - DNA, 25 bp, Probe sequence
aaatcacatcttcgaccctttattt

SEQ ID NO: 126607 - DNA, 25 bp, Probe sequence
aaatcaatgtctagactctatagtg

SEQ ID NO: 126608 - DNA, 25 bp, Probe sequence
aaatctttaatggttctttatcaat

SEQ ID NO: 126609 - DNA, 25 bp, Probe sequence
aaactattcttgggagtcggacata

SEQ ID NO: 126610 - DNA, 25 bp, Probe sequence
cccctctcatgttttgtatctttaa

SEQ ID NO: 126611 - DNA, 25 bp, Probe sequence
gctaacttactatataattcttttt

SEQ ID NO: 126612 - DNA, 25 bp, Probe sequence
gaaccactacatcataaatctttaa

SEQ ID NO: 126613 - DNA, 25 bp, Probe sequence
gaaatgtcgactgtagatagtggtg

SEQ ID NO: 126614 - DNA, 25 bp, Probe sequence
gaaattttgattttagcaatctatt

SEQ ID NO: 126615 - DNA, 25 bp, Probe sequence
gactctatagtgttgtatttggcag

SEQ ID NO: 126616 - DNA, 25 bp, Probe sequence
gatatgaaatcacatcttcgaccct

SEQ ID NO: 126617 - DNA, 25 bp, Probe sequence
gattactgtattacattgtacatga

SEQ ID NO: 126618 - DNA, 25 bp, Probe sequence
gtatttggcagtagttgacggggcc

SEQ ID NO: 126619 - DNA, 25 bp, Probe sequence
taatgatacaaagtttaatacccgt

SEQ ID NO: 126620 - DNA, 25 bp, Probe sequence
ttatcacctcataagattactgtat

SEQ ID NO: 126621 - DNA, 25 bp, Probe sequence
ataggcatggtgcattcatatctca

SEQ ID NO: 126622 - DNA, 25 bp, Probe sequence
ataatcgctagtgttatatagaaaa

SEQ ID NO: 126623 - DNA, 25 bp, Probe sequence
acgacgaggttaggacctactgaat

SEQ ID NO: 126624 - DNA, 25 bp, Probe sequence
actcctttcattaaaataatcgcta

SEQ ID NO: 126625 - DNA, 25 bp, Probe sequence
catcatgaattatgtcctatgcgct

SEQ ID NO: 126626 - DNA, 25 bp, Probe sequence
gcattcatatctcaactatttaata

SEQ ID NO: 126627 - DNA, 25 bp, Probe sequence
gacactcctttcattaaaataatcg

SEQ ID NO: 126628 - DNA, 25 bp, Probe sequence
ggtgcattcatatctcaactattta

SEQ ID NO: 126629 - DNA, 25 bp, Probe sequence
ggttaggacctactgaatttatgcg

SEQ ID NO: 126630 - DNA, 25 bp, Probe sequence
ggttcatgacactcctttcattaaa

SEQ ID NO: 126631 - DNA, 25 bp, Probe sequence
ggcatggtgcattcatatctcaact

SEQ ID NO: 126632 - DNA, 25 bp, Probe sequence
tgaattatgtcctatgcgctttgtc

SEQ ID NO: 126633 - DNA, 25 bp, Probe sequence
taggacctactgaatttatgcgata

SEQ ID NO: 126634 - DNA, 25 bp, Probe sequence
tatgcgataggcatggtgcattcat

SEQ ID NO: 126635 - DNA, 25 bp, Probe sequence
tattactatatatgcatcatgaatt

SEQ ID NO: 126636 - DNA, 25 bp, Probe sequence
atttagacacaattagacaaaaagt

SEQ ID NO: 126637 - DNA, 25 bp, Probe sequence
atagttagacacaatttagacacaa

SEQ ID NO: 126638 - DNA, 25 bp, Probe sequence
ataagcatagttagacacaatttag

SEQ ID NO: 126639 - DNA, 25 bp, Probe sequence
agttagacacaatttagacacaatt

SEQ ID NO: 126640 - DNA, 25 bp, Probe sequence
agcatagttagacacaatttagaca

SEQ ID NO: 126641 - DNA, 25 bp, Probe sequence
aagcatagttagacacaatttagac

SEQ ID NO: 126642 - DNA, 25 bp, Probe sequence
aataagcatagttagacacaattta

SEQ ID NO: 126643 - DNA, 25 bp, Probe sequence
cacaatttagacacaattagacaaa

SEQ ID NO: 126644 - DNA, 25 bp, Probe sequence
catagttagacacaatttagacaca

SEQ ID NO: 126645 - DNA, 25 bp, Probe sequence
gcatagttagacacaatttagacac

SEQ ID NO: 126646 - DNA, 25 bp, Probe sequence
gacacaatttagacacaattagaca

SEQ ID NO: 126647 - DNA, 25 bp, Probe sequence
gttagacacaatttagacacaatta

SEQ ID NO: 126648 - DNA, 25 bp, Probe sequence
taagcatagttagacacaatttaga

SEQ ID NO: 126649 - DNA, 25 bp, Probe sequence
tagacacaatttagacacaattaga

SEQ ID NO: 126650 - DNA, 25 bp, Probe sequence
tagttagacacaatttagacacaat

SEQ ID NO: 126651 - DNA, 25 bp, Probe sequence
atttaactgttaacatatactaatt

SEQ ID NO: 126652 - DNA, 25 bp, Probe sequence
atagcaaagtgctacactcctctat

SEQ ID NO: 126653 - DNA, 25 bp, Probe sequence
agtgctacactcctctattataact

SEQ ID NO: 126654 - DNA, 25 bp, Probe sequence
agcaaagtgctacactcctctatta

SEQ ID NO: 126655 - DNA, 25 bp, Probe sequence
acactcctctattataacttattta

SEQ ID NO: 126656 - DNA, 25 bp, Probe sequence
aaagtgctacactcctctattataa

SEQ ID NO: 126657 - DNA, 25 bp, Probe sequence
cactcctctattataacttatttaa

SEQ ID NO: 126658 - DNA, 25 bp, Probe sequence
catatactaattatacagaattcct

SEQ ID NO: 126659 - DNA, 25 bp, Probe sequence
ctacactcctctattataacttatt

SEQ ID NO: 126660 - DNA, 25 bp, Probe sequence
gctacactcctctattataacttat

SEQ ID NO: 126661 - DNA, 25 bp, Probe sequence
gcaaagtgctacactcctctattat

SEQ ID NO: 126662 - DNA, 25 bp, Probe sequence
tgctacactcctctattataactta

SEQ ID NO: 126663 - DNA, 25 bp, Probe sequence
tcctctattataacttatttaactg

SEQ ID NO: 126664 - DNA, 25 bp, Probe sequence
tacactcctctattataacttattt

SEQ ID NO: 126665 - DNA, 25 bp, Probe sequence
tagcaaagtgctacactcctctatt

SEQ ID NO: 126666 - DNA, 25 bp, Probe sequence
attccattataggatgcagacagct

SEQ ID NO: 126667 - DNA, 25 bp, Probe sequence
agggggaaatttatcattatgtatt

SEQ ID NO: 126668 - DNA, 25 bp, Probe sequence
agtatatacccttactacgcttata

SEQ ID NO: 126669 - DNA, 25 bp, Probe sequence
acaacatggtattgagtcacttctt

SEQ ID NO: 126670 - DNA, 25 bp, Probe sequence
aaaaagctgtctacaattccattat

SEQ ID NO: 126671 - DNA, 25 bp, Probe sequence
aacacagtcgtaagtatataccctt

SEQ ID NO: 126672 - DNA, 25 bp, Probe sequence
gagtcacttctttgaacacagtcgt

SEQ ID NO: 126673 - DNA, 25 bp, Probe sequence
gatgcagacagcttaacgattacta

SEQ ID NO: 126674 - DNA, 25 bp, Probe sequence
gtgcggtgtttctactcaatacaaa

SEQ ID NO: 126675 - DNA, 25 bp, Probe sequence
tgcttcttattcgtgcggtgtttct

SEQ ID NO: 126676 - DNA, 25 bp, Probe sequence
taatttgttgcttcttattcgtgcg

SEQ ID NO: 126677 - DNA, 25 bp, Probe sequence
tatacccttactacgcttataaata

SEQ ID NO: 126678 - DNA, 25 bp, Probe sequence
ttattcgtgcggtgtttctactcaa

SEQ ID NO: 126679 - DNA, 25 bp, Probe sequence
ttctactcaatacaaactttaataa

SEQ ID NO: 126680 - DNA, 25 bp, Probe sequence
ttcgtgcggtgtttctactcaatac

SEQ ID NO: 126681 - DNA, 25 bp, Probe sequence
atttgtgagtttttacccaatactg

SEQ ID NO: 126682 - DNA, 25 bp, Probe sequence
aacgcaagcccctatataatgttta

SEQ ID NO: 126683 - DNA, 25 bp, Probe sequence
aattcaaaacgcaagcccctatata

SEQ ID NO: 126684 - DNA, 25 bp, Probe sequence
caaaacgcaagcccctatataatgt

SEQ ID NO: 126685 - DNA, 25 bp, Probe sequence
ctttgccctgaaccatctggaacag

SEQ ID NO: 126686 - DNA, 25 bp, Probe sequence
gccctgaaccatctggaacagagtt

SEQ ID NO: 126687 - DNA, 25 bp, Probe sequence
gaaccatctggaacagagttatttg

SEQ ID NO: 126688 - DNA, 25 bp, Probe sequence
gagtttttacccaatactgtgtaat

SEQ ID NO: 126689 - DNA, 25 bp, Probe sequence
gtgagtttttacccaatactgtgta

SEQ ID NO: 126690 - DNA, 25 bp, Probe sequence
ggaacagagttatttgtgagttttt

SEQ ID NO: 126691 - DNA, 25 bp, Probe sequence
taattaattcaaaacgcaagcccct

SEQ ID NO: 126692 - DNA, 25 bp, Probe sequence
tacccaatactgtgtaattataaag

SEQ ID NO: 126693 - DNA, 25 bp, Probe sequence
ttgccctgaaccatctggaacagag

SEQ ID NO: 126694 - DNA, 25 bp, Probe sequence
ttaattcaaaacgcaagcccctata

SEQ ID NO: 126695 - DNA, 25 bp, Probe sequence
ttcaaaacgcaagcccctatataat

SEQ ID NO: 126696 - DNA, 25 bp, Probe sequence
atgcataaataactgtgctagcaca

SEQ ID NO: 126697 - DNA, 25 bp, Probe sequence
agcacaatcccattatgctaatccc

SEQ ID NO: 126698 - DNA, 25 bp, Probe sequence
acagtacacaaaacttaattagtca

SEQ ID NO: 126699 - DNA, 25 bp, Probe sequence
aacttaattagtcatgtgcactgtt

SEQ ID NO: 126700 - DNA, 25 bp, Probe sequence
aatacatgaataactatagcaaatt

SEQ ID NO: 126701 - DNA, 25 bp, Probe sequence
aattagtcatgtgcactgttttatt

SEQ ID NO: 126702 - DNA, 25 bp, Probe sequence
ctgtgctagcacaatcccattatgc

SEQ ID NO: 126703 - DNA, 25 bp, Probe sequence
ctgttttattgcgatttttaattca

SEQ ID NO: 126704 - DNA, 25 bp, Probe sequence
gtaagtaatagataggcatgacaat

SEQ ID NO: 126705 - DNA, 25 bp, Probe sequence
gtcatgtgcactgttttattgcgat

SEQ ID NO: 126706 - DNA, 25 bp, Probe sequence
gtgctagcacaatcccattatgcta

SEQ ID NO: 126707 - DNA, 25 bp, Probe sequence
gtgcactgttttattgcgattttta

SEQ ID NO: 126708 - DNA, 25 bp, Probe sequence
taatccccaaccttttaaatacatg

SEQ ID NO: 126709 - DNA, 25 bp, Probe sequence
tagtttacacccatttcattatttt

SEQ ID NO: 126710 - DNA, 25 bp, Probe sequence
tatgctaatccccaaccttttaaat

SEQ ID NO: 126711 - DNA, 25 bp, Probe sequence
attcccacatcatcgcaaataatgc

SEQ ID NO: 126712 - DNA, 25 bp, Probe sequence
ataatcaatgctatgtttaaacgtc

SEQ ID NO: 126713 - DNA, 25 bp, Probe sequence
atcaatgctatgtttaaacgtcatg

SEQ ID NO: 126714 - DNA, 25 bp, Probe sequence
actattcccacatcatcgcaaataa

SEQ ID NO: 126715 - DNA, 25 bp, Probe sequence
aaaataactattcccacatcatcgc

SEQ ID NO: 126716 - DNA, 25 bp, Probe sequence
aatgctatgtttaaacgtcatgtaa

SEQ ID NO: 126717 - DNA, 25 bp, Probe sequence
aatgcgaagacttagaaatagttat

SEQ ID NO: 126718 - DNA, 25 bp, Probe sequence
caatgctatgtttaaacgtcatgta

SEQ ID NO: 126719 - DNA, 25 bp, Probe sequence
ctattcccacatcatcgcaaataat

SEQ ID NO: 126720 - DNA, 25 bp, Probe sequence
cgcaaataatgcgaagacttagaaa

SEQ ID NO: 126721 - DNA, 25 bp, Probe sequence
cccacatcatcgcaaataatgcgaa

SEQ ID NO: 126722 - DNA, 25 bp, Probe sequence
tcaatgctatgtttaaacgtcatgt

SEQ ID NO: 126723 - DNA, 25 bp, Probe sequence
taatcaatgctatgtttaaacgtca

SEQ ID NO: 126724 - DNA, 25 bp, Probe sequence
tattcccacatcatcgcaaataatg

SEQ ID NO: 126725 - DNA, 25 bp, Probe sequence
ttcccacatcatcgcaaataatgcg

SEQ ID NO: 126726 - DNA, 25 bp, Probe sequence
attattataccacaaaacaagataa

SEQ ID NO: 126727 - DNA, 25 bp, Probe sequence
ataattattataccacaaaacaaga

SEQ ID NO: 126728 - DNA, 25 bp, Probe sequence
acctctcatcaataaatttagaatg

SEQ ID NO: 126729 - DNA, 25 bp, Probe sequence
aattattataccacaaaacaagata

SEQ ID NO: 126730 - DNA, 25 bp, Probe sequence
cacctctcatcaataaatttagaat

SEQ ID NO: 126731 - DNA, 25 bp, Probe sequence
cttcacctctcatcaataaatttag

SEQ ID NO: 126732 - DNA, 25 bp, Probe sequence
ctctcatcaataaatttagaatgta

SEQ ID NO: 126733 - DNA, 25 bp, Probe sequence
cctctcatcaataaatttagaatgt

SEQ ID NO: 126734 - DNA, 25 bp, Probe sequence
tctcatcaataaatttagaatgtaa

SEQ ID NO: 126735 - DNA, 25 bp, Probe sequence
tcacctctcatcaataaatttagaa

SEQ ID NO: 126736 - DNA, 25 bp, Probe sequence
taattattataccacaaaacaagat

SEQ ID NO: 126737 - DNA, 25 bp, Probe sequence
tattataccacaaaacaagataaat

SEQ ID NO: 126738 - DNA, 25 bp, Probe sequence
ttattataccacaaaacaagataaa

SEQ ID NO: 126739 - DNA, 25 bp, Probe sequence
ttcacctctcatcaataaatttaga

SEQ ID NO: 126740 - DNA, 25 bp, Probe sequence
attgctcattttccttataattata

SEQ ID NO: 126741 - DNA, 25 bp, Probe sequence
ataacaaatcattcacctttactaa

SEQ ID NO: 126742 - DNA, 25 bp, Probe sequence
atggtctaaagtctgattattcaac

SEQ ID NO: 126743 - DNA, 25 bp, Probe sequence
caccattttgtctgcttcttttaaa

SEQ ID NO: 126744 - DNA, 25 bp, Probe sequence
cttccccacttgaccatggtctaaa

SEQ ID NO: 126745 - DNA, 25 bp, Probe sequence
gcaaacaccattttgtctgcttctt

SEQ ID NO: 126746 - DNA, 25 bp, Probe sequence
gtaaacttttttcataaattgctca

SEQ ID NO: 126747 - DNA, 25 bp, Probe sequence
tcttgtctttctattttcgattgat

SEQ ID NO: 126748 - DNA, 25 bp, Probe sequence
tcaaactgttttatttattacttat

SEQ ID NO: 126749 - DNA, 25 bp, Probe sequence
taatatccctacgttattaataact

SEQ ID NO: 126750 - DNA, 25 bp, Probe sequence
taatcgttaaaatcttgtctttcta

SEQ ID NO: 126751 - DNA, 25 bp, Probe sequence
tactaatatatgctgttcttcccca

SEQ ID NO: 126752 - DNA, 25 bp, Probe sequence
tagttttaattctacgatttgtacg

SEQ ID NO: 126753 - DNA, 25 bp, Probe sequence
tatctcctttgtccattacttttta

SEQ ID NO: 126754 - DNA, 25 bp, Probe sequence
tattttaccatttttacgctttcat

SEQ ID NO: 126755 - DNA, 25 bp, Probe sequence
aaagttcctccttgagtgcttacgc

SEQ ID NO: 126756 - DNA, 25 bp, Probe sequence
aagccgttgcataatatgtagtcat

SEQ ID NO: 126757 - DNA, 25 bp, Probe sequence
aatgcaaacgtatacatttttatac

SEQ ID NO: 126758 - DNA, 25 bp, Probe sequence
caaaaaaatagcgtcaatgcattga

SEQ ID NO: 126759 - DNA, 25 bp, Probe sequence
ctccttgagtgcttacgcacgtatt

SEQ ID NO: 126760 - DNA, 25 bp, Probe sequence
cgcacgtatttttcaaagtaattat

SEQ ID NO: 126761 - DNA, 25 bp, Probe sequence
gcgtcaatgcattgaaatactgcag

SEQ ID NO: 126762 - DNA, 25 bp, Probe sequence
gcttacgcacgtatttttcaaagta

SEQ ID NO: 126763 - DNA, 25 bp, Probe sequence
gaaagttcctccttgagtgcttacg

SEQ ID NO: 126764 - DNA, 25 bp, Probe sequence
gagtgcttacgcacgtatttttcaa

SEQ ID NO: 126765 - DNA, 25 bp, Probe sequence
gatagttatactaaatgcaaacgta

SEQ ID NO: 126766 - DNA, 25 bp, Probe sequence
gtagtcattaattacaatattttat

SEQ ID NO: 126767 - DNA, 25 bp, Probe sequence
tactgcagattaaatgtgtattttt

SEQ ID NO: 126768 - DNA, 25 bp, Probe sequence
tatacaatttaagccgttgcataat

SEQ ID NO: 126769 - DNA, 25 bp, Probe sequence
ttcctccttgagtgcttacgcacgt

SEQ ID NO: 126770 - DNA, 25 bp, Probe sequence
attgttatttcataccttgtcacta

SEQ ID NO: 126771 - DNA, 25 bp, Probe sequence
ataccttgtcactaacataatatta

SEQ ID NO: 126772 - DNA, 25 bp, Probe sequence
accttgtcactaacataatattaaa

SEQ ID NO: 126773 - DNA, 25 bp, Probe sequence
actattgttatttcataccttgtca

SEQ ID NO: 126774 - DNA, 25 bp, Probe sequence
aagtcactattgttatttcatacct

SEQ ID NO: 126775 - DNA, 25 bp, Probe sequence
caatgtttaacaatgaaagtaccgg

SEQ ID NO: 126776 - DNA, 25 bp, Probe sequence
cactattgttatttcataccttgtc

SEQ ID NO: 126777 - DNA, 25 bp, Probe sequence
ccggtactttcaatgtttaacaatg

SEQ ID NO: 126778 - DNA, 25 bp, Probe sequence
gtcactattgttatttcataccttg

SEQ ID NO: 126779 - DNA, 25 bp, Probe sequence
tcataccttgtcactaacataatat

SEQ ID NO: 126780 - DNA, 25 bp, Probe sequence
tatttcataccttgtcactaacata

SEQ ID NO: 126781 - DNA, 25 bp, Probe sequence
tattgttatttcataccttgtcact

SEQ ID NO: 126782 - DNA, 25 bp, Probe sequence
tttcataccttgtcactaacataat

SEQ ID NO: 126783 - DNA, 25 bp, Probe sequence
ttatttcataccttgtcactaacat

SEQ ID NO: 126784 - DNA, 25 bp, Probe sequence
ttgttatttcataccttgtcactaa

SEQ ID NO: 126785 - DNA, 25 bp, Probe sequence
atgcttcctcatcaattgtaaaaat

SEQ ID NO: 126786 - DNA, 25 bp, Probe sequence
agggaatgcttcctcatcaattgta

SEQ ID NO: 126787 - DNA, 25 bp, Probe sequence
accgtttccatactgctatgtcact

SEQ ID NO: 126788 - DNA, 25 bp, Probe sequence
aaagcaagctcattcaagttgttta

SEQ ID NO: 126789 - DNA, 25 bp, Probe sequence
caagttgtttatttgtcgaattcga

SEQ ID NO: 126790 - DNA, 25 bp, Probe sequence
gcgttatcatttcttgatttactca

SEQ ID NO: 126791 - DNA, 25 bp, Probe sequence
gctccctctcacaaattctgtaagg

SEQ ID NO: 126792 - DNA, 25 bp, Probe sequence
gatttttgcgttatcatttcttgat

SEQ ID NO: 126793 - DNA, 25 bp, Probe sequence
gtcttgacctcctaattattaaagg

SEQ ID NO: 126794 - DNA, 25 bp, Probe sequence
tgtcctatttaaaggagcccgaata

SEQ ID NO: 126795 - DNA, 25 bp, Probe sequence
tcatttacaactttgatttttgcgt

SEQ ID NO: 126796 - DNA, 25 bp, Probe sequence
taaaattttatcatctttcaactaa

SEQ ID NO: 126797 - DNA, 25 bp, Probe sequence
taaattttatacacgtgtcctattt

SEQ ID NO: 126798 - DNA, 25 bp, Probe sequence
tactgctatgtcactatgtatatca

SEQ ID NO: 126799 - DNA, 25 bp, Probe sequence
tttacttaccgtttccatactgcta

SEQ ID NO: 126800 - DNA, 25 bp, Probe sequence
atttatacgtctgaattcatttata

SEQ ID NO: 126801 - DNA, 25 bp, Probe sequence
atacttcctttcgaaggatataatc

SEQ ID NO: 126802 - DNA, 25 bp, Probe sequence
atacgtctgaattcatttatatata

SEQ ID NO: 126803 - DNA, 25 bp, Probe sequence
ataatctaaatttatacgtctgaat

SEQ ID NO: 126804 - DNA, 25 bp, Probe sequence
aaatttatacgtctgaattcattta

SEQ ID NO: 126805 - DNA, 25 bp, Probe sequence
acaatatcatatttcgcaatcactg

SEQ ID NO: 126806 - DNA, 25 bp, Probe sequence
aatctaaatttatacgtctgaattc

SEQ ID NO: 126807 - DNA, 25 bp, Probe sequence
cgtctgaattcatttatatatagta

SEQ ID NO: 126808 - DNA, 25 bp, Probe sequence
cccaatacttcctttcgaaggatat

SEQ ID NO: 126809 - DNA, 25 bp, Probe sequence
ccaatacttcctttcgaaggatata

SEQ ID NO: 126810 - DNA, 25 bp, Probe sequence
gcccaatacttcctttcgaaggata

SEQ ID NO: 126811 - DNA, 25 bp, Probe sequence
gaattcatttatatatagtaacaaa

SEQ ID NO: 126812 - DNA, 25 bp, Probe sequence
gacaatatcatatttcgcaatcact

SEQ ID NO: 126813 - DNA, 25 bp, Probe sequence
tgcccaatacttcctttcgaaggat

SEQ ID NO: 126814 - DNA, 25 bp, Probe sequence
tcctttcgaaggatataatctaaat

SEQ ID NO: 126815 - DNA, 25 bp, Probe sequence
attttacctattatttcactacgat

SEQ ID NO: 126816 - DNA, 25 bp, Probe sequence
atcctatacaacttcaaaattccta

SEQ ID NO: 126817 - DNA, 25 bp, Probe sequence
atgaagcatgaatccccatattatt

SEQ ID NO: 126818 - DNA, 25 bp, Probe sequence
aactaacaatcctatacaacttcaa

SEQ ID NO: 126819 - DNA, 25 bp, Probe sequence
aatgtgctattcctcattactcatc

SEQ ID NO: 126820 - DNA, 25 bp, Probe sequence
aatacactgcgtacgaactactttt

SEQ ID NO: 126821 - DNA, 25 bp, Probe sequence
ctattcctcattactcatcatttta

SEQ ID NO: 126822 - DNA, 25 bp, Probe sequence
gcgtcactaactaacaatcctatac

SEQ ID NO: 126823 - DNA, 25 bp, Probe sequence
gaatccccatattattttacctatt

SEQ ID NO: 126824 - DNA, 25 bp, Probe sequence
gaactacttttaatattgcgtcact

SEQ ID NO: 126825 - DNA, 25 bp, Probe sequence
gagacttacaaatacactgcgtacg

SEQ ID NO: 126826 - DNA, 25 bp, Probe sequence
gataccattatttactctaagttaa

SEQ ID NO: 126827 - DNA, 25 bp, Probe sequence
tcactacgataccattatttactct

SEQ ID NO: 126828 - DNA, 25 bp, Probe sequence
tcatcattttaatcagagacttaca

SEQ ID NO: 126829 - DNA, 25 bp, Probe sequence
tttaacccctatctttttatatatg

SEQ ID NO: 126830 - DNA, 25 bp, Probe sequence
attatcacttaattacttacaactc

SEQ ID NO: 126831 - DNA, 25 bp, Probe sequence
ataaacgctatataaatggcctttt

SEQ ID NO: 126832 - DNA, 25 bp, Probe sequence
atcacttaattacttacaactcaat

SEQ ID NO: 126833 - DNA, 25 bp, Probe sequence
atggccttttattttatggtctacg

SEQ ID NO: 126834 - DNA, 25 bp, Probe sequence
agaccatttatatgcgcgttgtttt

SEQ ID NO: 126835 - DNA, 25 bp, Probe sequence
accatttatatgcgcgttgttttaa

SEQ ID NO: 126836 - DNA, 25 bp, Probe sequence
aaaagaccatttatatgcgcgttgt

SEQ ID NO: 126837 - DNA, 25 bp, Probe sequence
cttaattacttacaactcaattcaa

SEQ ID NO: 126838 - DNA, 25 bp, Probe sequence
gttccatttattatcacttaattac

SEQ ID NO: 126839 - DNA, 25 bp, Probe sequence
ggtctacgtgttttggaatacgtat

SEQ ID NO: 126840 - DNA, 25 bp, Probe sequence
ggaatacgtattgttccatttatta

SEQ ID NO: 126841 - DNA, 25 bp, Probe sequence
ggccttttattttatggtctacgtg

SEQ ID NO: 126842 - DNA, 25 bp, Probe sequence
tatatgcgcgttgttttaaataaac

SEQ ID NO: 126843 - DNA, 25 bp, Probe sequence
tattttatggtctacgtgttttgga

SEQ ID NO: 126844 - DNA, 25 bp, Probe sequence
ttatggtctacgtgttttggaatac

SEQ ID NO: 126845 - DNA, 25 bp, Probe sequence
attcaatagcattaaattttacgta

SEQ ID NO: 126846 - DNA, 25 bp, Probe sequence
atacacaaattcggtctataacacg

SEQ ID NO: 126847 - DNA, 25 bp, Probe sequence
agtattgccatatcataaatttaat

SEQ ID NO: 126848 - DNA, 25 bp, Probe sequence
acctttatcaacaaaatggcaactc

SEQ ID NO: 126849 - DNA, 25 bp, Probe sequence
aaatagtaaatgactccaacaagtt

SEQ ID NO: 126850 - DNA, 25 bp, Probe sequence
aaagtcgccatttaatattagtatt

SEQ ID NO: 126851 - DNA, 25 bp, Probe sequence
aatggcaactcttataacatagtga

SEQ ID NO: 126852 - DNA, 25 bp, Probe sequence
ctccaacaagttagtcaattagaca

SEQ ID NO: 126853 - DNA, 25 bp, Probe sequence
gcttgaccctcactttttaaaatat

SEQ ID NO: 126854 - DNA, 25 bp, Probe sequence
gaccctcactttttaaaatatgtca

SEQ ID NO: 126855 - DNA, 25 bp, Probe sequence
gataacctttagtatacctttatca

SEQ ID NO: 126856 - DNA, 25 bp, Probe sequence
gtattacaaagtattgccatatcat

SEQ ID NO: 126857 - DNA, 25 bp, Probe sequence
ggtctataacacgaaacatatctag

SEQ ID NO: 126858 - DNA, 25 bp, Probe sequence
tttacgtatacacaaattcggtcta

SEQ ID NO: 126859 - DNA, 25 bp, Probe sequence
ttcaatttaatgtcatgtttttcat

SEQ ID NO: 126860 - DNA, 25 bp, Probe sequence
attgcaacaaatcataagcgtttta

SEQ ID NO: 126861 - DNA, 25 bp, Probe sequence
atcggttttatctcatgatgtcatc

SEQ ID NO: 126862 - DNA, 25 bp, Probe sequence
acactcattttaatcatccacaata

SEQ ID NO: 126863 - DNA, 25 bp, Probe sequence
aacataagccctattgttacaattt

SEQ ID NO: 126864 - DNA, 25 bp, Probe sequence
caaacttaagttttatattgcaaca

SEQ ID NO: 126865 - DNA, 25 bp, Probe sequence
catgatgtcatctagtttttcttta

SEQ ID NO: 126866 - DNA, 25 bp, Probe sequence
cttattctatcggttttatctcatg

SEQ ID NO: 126867 - DNA, 25 bp, Probe sequence
ccctacactcattttaatcatccac

SEQ ID NO: 126868 - DNA, 25 bp, Probe sequence
gtcatctagtttttctttatttaca

SEQ ID NO: 126869 - DNA, 25 bp, Probe sequence
tcatccacaatattttgttctttca

SEQ ID NO: 126870 - DNA, 25 bp, Probe sequence
taagcgttttatagttttgagtagt

SEQ ID NO: 126871 - DNA, 25 bp, Probe sequence
tagaaacacaacttacaacaaactt

SEQ ID NO: 126872 - DNA, 25 bp, Probe sequence
tattacttattctatcggttttatc

SEQ ID NO: 126873 - DNA, 25 bp, Probe sequence
ttttaccctacactcattttaatca

SEQ ID NO: 126874 - DNA, 25 bp, Probe sequence
ttctaataactaaaagcctttcata

SEQ ID NO: 126875 - DNA, 25 bp, Probe sequence
atttgtccgatttatttgagaacca

SEQ ID NO: 126876 - DNA, 25 bp, Probe sequence
atcttagtcaatcaagttaatcaga

SEQ ID NO: 126877 - DNA, 25 bp, Probe sequence
atctttaacatttgtccgatttatt

SEQ ID NO: 126878 - DNA, 25 bp, Probe sequence
agaaaagcagtcgaacaatgatgtt

SEQ ID NO: 126879 - DNA, 25 bp, Probe sequence
caactgctttttattatgcttcaaa

SEQ ID NO: 126880 - DNA, 25 bp, Probe sequence
cgccattgtccaactgctttttatt

SEQ ID NO: 126881 - DNA, 25 bp, Probe sequence
ccattgtccaactgctttttattat

SEQ ID NO: 126882 - DNA, 25 bp, Probe sequence
gctttttattatgcttcaaagtcaa

SEQ ID NO: 126883 - DNA, 25 bp, Probe sequence
gaacaatgatgttacaatcgccatt

SEQ ID NO: 126884 - DNA, 25 bp, Probe sequence
gatgttacaatcgccattgtccaac

SEQ ID NO: 126885 - DNA, 25 bp, Probe sequence
gttacaatcgccattgtccaactgc

SEQ ID NO: 126886 - DNA, 25 bp, Probe sequence
gtaaaatctttaacatttgtccgat

SEQ ID NO: 126887 - DNA, 25 bp, Probe sequence
gtccaactgctttttattatgcttc

SEQ ID NO: 126888 - DNA, 25 bp, Probe sequence
tcaagttaatcagaaaagcagtcga

SEQ ID NO: 126889 - DNA, 25 bp, Probe sequence
tacaatcgccattgtccaactgctt

SEQ ID NO: 126890 - DNA, 25 bp, Probe sequence
attatcttagaatcatcatggcatt

SEQ ID NO: 126891 - DNA, 25 bp, Probe sequence
atcttagaatcatcatggcatttat

SEQ ID NO: 126892 - DNA, 25 bp, Probe sequence
atcgacatacttatatatggttacg

SEQ ID NO: 126893 - DNA, 25 bp, Probe sequence
atggcatttatgatgtcttaaagct

SEQ ID NO: 126894 - DNA, 25 bp, Probe sequence
acgatgtcccatgcttacatatttt

SEQ ID NO: 126895 - DNA, 25 bp, Probe sequence
aatatcacaatttcaatgcgatgtt

SEQ ID NO: 126896 - DNA, 25 bp, Probe sequence
gatgtcccatgcttacatattttta

SEQ ID NO: 126897 - DNA, 25 bp, Probe sequence
gttacgatgtcccatgcttacatat

SEQ ID NO: 126898 - DNA, 25 bp, Probe sequence
gtcccatgcttacatatttttataa

SEQ ID NO: 126899 - DNA, 25 bp, Probe sequence
tggttacgatgtcccatgcttacat

SEQ ID NO: 126900 - DNA, 25 bp, Probe sequence
taaagtccctattaaattatcttag

SEQ ID NO: 126901 - DNA, 25 bp, Probe sequence
taaagctgatatcgacatacttata

SEQ ID NO: 126902 - DNA, 25 bp, Probe sequence
tatggttacgatgtcccatgcttac

SEQ ID NO: 126903 - DNA, 25 bp, Probe sequence
tatgatgtcttaaagctgatatcga

SEQ ID NO: 126904 - DNA, 25 bp, Probe sequence
ttcaatgcgatgttattattcttaa

SEQ ID NO: 126905 - DNA, 25 bp, Probe sequence
attatgaacgatgacttgacaacaa

SEQ ID NO: 126906 - DNA, 25 bp, Probe sequence
atcaggttagatgttcgctttttat

SEQ ID NO: 126907 - DNA, 25 bp, Probe sequence
atctcctcctttatggttgattata

SEQ ID NO: 126908 - DNA, 25 bp, Probe sequence
agttgattgagcgtcaggttcattt

SEQ ID NO: 126909 - DNA, 25 bp, Probe sequence
acttgacaacaagctaatcaggatt

SEQ ID NO: 126910 - DNA, 25 bp, Probe sequence
aaccgcatacatatactattacatt

SEQ ID NO: 126911 - DNA, 25 bp, Probe sequence
aatacggttgtaaattagttgattg

SEQ ID NO: 126912 - DNA, 25 bp, Probe sequence
ctattacattaattcatttcccata

SEQ ID NO: 126913 - DNA, 25 bp, Probe sequence
gaacgtgatatcttcattatgaacg

SEQ ID NO: 126914 - DNA, 25 bp, Probe sequence
gagcgtcaggttcatttaaatatca

SEQ ID NO: 126915 - DNA, 25 bp, Probe sequence
gatgttcgctttttatgtaaccgca

SEQ ID NO: 126916 - DNA, 25 bp, Probe sequence
gttcgctttttatgtaaccgcatac

SEQ ID NO: 126917 - DNA, 25 bp, Probe sequence
taattctttaattctatagtacaaa

SEQ ID NO: 126918 - DNA, 25 bp, Probe sequence
ttcatttcccataaacaaacaatac

SEQ ID NO: 126919 - DNA, 25 bp, Probe sequence
ttctatctcctcctttatggttgat

SEQ ID NO: 126920 - DNA, 25 bp, Probe sequence
atccccatttatgtgttggctttta

SEQ ID NO: 126921 - DNA, 25 bp, Probe sequence
atgcgattaaactcaaaaagccaac

SEQ ID NO: 126922 - DNA, 25 bp, Probe sequence
atgtgttggcttttatttatattat

SEQ ID NO: 126923 - DNA, 25 bp, Probe sequence
agccaacacattctgggcgtatccc

SEQ ID NO: 126924 - DNA, 25 bp, Probe sequence
acacattctgggcgtatccccattt

SEQ ID NO: 126925 - DNA, 25 bp, Probe sequence
aaaagccaacacattctgggcgtat

SEQ ID NO: 126926 - DNA, 25 bp, Probe sequence
aattgctctttaacaatgcgattaa

SEQ ID NO: 126927 - DNA, 25 bp, Probe sequence
aattgactttaattgctctttaaca

SEQ ID NO: 126928 - DNA, 25 bp, Probe sequence
cattctgggcgtatccccatttatg

SEQ ID NO: 126929 - DNA, 25 bp, Probe sequence
catttatgtgttggcttttatttat

SEQ ID NO: 126930 - DNA, 25 bp, Probe sequence
gactttaattgctctttaacaatgc

SEQ ID NO: 126931 - DNA, 25 bp, Probe sequence
gttggcttttatttatattattact

SEQ ID NO: 126932 - DNA, 25 bp, Probe sequence
gtatccccatttatgtgttggcttt

SEQ ID NO: 126933 - DNA, 25 bp, Probe sequence
ggcgtatccccatttatgtgttggc

SEQ ID NO: 126934 - DNA, 25 bp, Probe sequence
tctgggcgtatccccatttatgtgt

SEQ ID NO: 126935 - DNA, 25 bp, Probe sequence
attgtctacgtcttgcttgtttata

SEQ ID NO: 126936 - DNA, 25 bp, Probe sequence
atgattctaatctgtaaagtgtttt

SEQ ID NO: 126937 - DNA, 25 bp, Probe sequence
atgtctaaattttaattcatcatct

SEQ ID NO: 126938 - DNA, 25 bp, Probe sequence
acgtcttgcttgtttatattaatta

SEQ ID NO: 126939 - DNA, 25 bp, Probe sequence
aaaattgtctacgtcttgcttgttt

SEQ ID NO: 126940 - DNA, 25 bp, Probe sequence
aatacactccttaaaattgtctacg

SEQ ID NO: 126941 - DNA, 25 bp, Probe sequence
cactccttaaaattgtctacgtctt

SEQ ID NO: 126942 - DNA, 25 bp, Probe sequence
ctaatctaaatgtaaggtgttccgc

SEQ ID NO: 126943 - DNA, 25 bp, Probe sequence
gtatatccattatcaattagcaagt

SEQ ID NO: 126944 - DNA, 25 bp, Probe sequence
gtctacgtcttgcttgtttatatta

SEQ ID NO: 126945 - DNA, 25 bp, Probe sequence
tgtaaggtgttccgctttttaaatg

SEQ ID NO: 126946 - DNA, 25 bp, Probe sequence
tgttccgctttttaaatgtctaaat

SEQ ID NO: 126947 - DNA, 25 bp, Probe sequence
tctgtaaagtgtttttactctcttt

SEQ ID NO: 126948 - DNA, 25 bp, Probe sequence
tactctcttttttataattattcta

SEQ ID NO: 126949 - DNA, 25 bp, Probe sequence
ttcatcatctagtatatccattatc

SEQ ID NO: 126950 - DNA, 25 bp, Probe sequence
atattcatatactgtctttattatt

SEQ ID NO: 126951 - DNA, 25 bp, Probe sequence
agtcctcgcgacacgaaattgccat

SEQ ID NO: 126952 - DNA, 25 bp, Probe sequence
agcaatctatcataagctcttaatt

SEQ ID NO: 126953 - DNA, 25 bp, Probe sequence
aacttagcgtttggtcattcgtctt

SEQ ID NO: 126954 - DNA, 25 bp, Probe sequence
gcaatttttaatcctatccttactt

SEQ ID NO: 126955 - DNA, 25 bp, Probe sequence
gattacccgtcatttttctttatgc

SEQ ID NO: 126956 - DNA, 25 bp, Probe sequence
gtacttatagtcatttttcctaatt

SEQ ID NO: 126957 - DNA, 25 bp, Probe sequence
ggttgtcacttgataagtcctcgcg

SEQ ID NO: 126958 - DNA, 25 bp, Probe sequence
tggtcattcgtcttattcaacatac

SEQ ID NO: 126959 - DNA, 25 bp, Probe sequence
tctacagtgtaatcttatttcttat

SEQ ID NO: 126960 - DNA, 25 bp, Probe sequence
tcaacatacgactggaaaactcata

SEQ ID NO: 126961 - DNA, 25 bp, Probe sequence
tagctcttatggttgattacccgtc

SEQ ID NO: 126962 - DNA, 25 bp, Probe sequence
tacttcttttcaaaaactaccatat

SEQ ID NO: 126963 - DNA, 25 bp, Probe sequence
tattcgctcctttaatagtacttat

SEQ ID NO: 126964 - DNA, 25 bp, Probe sequence
ttactttaaatttctcaatctacag

SEQ ID NO: 126965 - DNA, 25 bp, Probe sequence
atttcttctgttaatgcactgtact

SEQ ID NO: 126966 - DNA, 25 bp, Probe sequence
atatgataccactatgcttgcttat

SEQ ID NO: 126967 - DNA, 25 bp, Probe sequence
atagcgccattgatacacattttta

SEQ ID NO: 126968 - DNA, 25 bp, Probe sequence
atacagttggacacacatacgagca

SEQ ID NO: 126969 - DNA, 25 bp, Probe sequence
aaccccctcactactatgcaagtga

SEQ ID NO: 126970 - DNA, 25 bp, Probe sequence
cattaacacgatcatatttcttctg

SEQ ID NO: 126971 - DNA, 25 bp, Probe sequence
gcttgcttatctctatagcgccatt

SEQ ID NO: 126972 - DNA, 25 bp, Probe sequence
gcactgtactttattcaaacgcgct

SEQ ID NO: 126973 - DNA, 25 bp, Probe sequence
gacattaatttacgtcccagaccct

SEQ ID NO: 126974 - DNA, 25 bp, Probe sequence
gattttaatcgcatttcctataaca

SEQ ID NO: 126975 - DNA, 25 bp, Probe sequence
gtgtttcttatgcagttggacgcgt

SEQ ID NO: 126976 - DNA, 25 bp, Probe sequence
tgtgctttattttcatcaatgtcat

SEQ ID NO: 126977 - DNA, 25 bp, Probe sequence
taacattgtagcgcccaggacatta

SEQ ID NO: 126978 - DNA, 25 bp, Probe sequence
taccctttgttcactgcgattttaa

SEQ ID NO: 126979 - DNA, 25 bp, Probe sequence
tatgcgaacaactgtataccctttg

SEQ ID NO: 126980 - DNA, 25 bp, Probe sequence
agcgcttcacttaaatttacagtac

SEQ ID NO: 126981 - DNA, 25 bp, Probe sequence
acatcgtattataaacttccacatt

SEQ ID NO: 126982 - DNA, 25 bp, Probe sequence
aaacgtaacccgcttcaaatcatat

SEQ ID NO: 126983 - DNA, 25 bp, Probe sequence
aacttccacatttcaaattaactat

SEQ ID NO: 126984 - DNA, 25 bp, Probe sequence
gcttcaaatcatatttactatcctt

SEQ ID NO: 126985 - DNA, 25 bp, Probe sequence
gacaatacgtacttattcatactta

SEQ ID NO: 126986 - DNA, 25 bp, Probe sequence
gattatctctctcttacatttgtac

SEQ ID NO: 126987 - DNA, 25 bp, Probe sequence
gttgtgccatacattgttcaaattc

SEQ ID NO: 126988 - DNA, 25 bp, Probe sequence
gtactgccaattaaagcgcttcact

SEQ ID NO: 126989 - DNA, 25 bp, Probe sequence
gtgattgtaccatatttactaacat

SEQ ID NO: 126990 - DNA, 25 bp, Probe sequence
tcatacttataattcatcattttca

SEQ ID NO: 126991 - DNA, 25 bp, Probe sequence
tacatttgtacacatttccctttaa

SEQ ID NO: 126992 - DNA, 25 bp, Probe sequence
tttactaacattgcagtactgccaa

SEQ ID NO: 126993 - DNA, 25 bp, Probe sequence
tttactcgcccattataccaattaa

SEQ ID NO: 126994 - DNA, 25 bp, Probe sequence
ttaaatttactcgcccattatacca

SEQ ID NO: 126995 - DNA, 25 bp, Probe sequence
attctctatgccataccactttatg

SEQ ID NO: 126996 - DNA, 25 bp, Probe sequence
attattctctatgccataccacttt

SEQ ID NO: 126997 - DNA, 25 bp, Probe sequence
acaacactctcctatttattattct

SEQ ID NO: 126998 - DNA, 25 bp, Probe sequence
aaaatcaattgacatactactggga

SEQ ID NO: 126999 - DNA, 25 bp, Probe sequence
aacactctcctatttattattctct

SEQ ID NO: 127000 - DNA, 25 bp, Probe sequence
cactctcctatttattattctctat

SEQ ID NO: 127001 - DNA, 25 bp, Probe sequence
ctctatgccataccactttatgaga

SEQ ID NO: 127002 - DNA, 25 bp, Probe sequence
ctctcctatttattattctctatgc

SEQ ID NO: 127003 - DNA, 25 bp, Probe sequence
gccataccactttatgagatatgta

SEQ ID NO: 127004 - DNA, 25 bp, Probe sequence
gacatactactgggaacgtattaaa

SEQ ID NO: 127005 - DNA, 25 bp, Probe sequence
gatatgtaaaacttgttacaactat

SEQ ID NO: 127006 - DNA, 25 bp, Probe sequence
tcctatttattattctctatgccat

SEQ ID NO: 127007 - DNA, 25 bp, Probe sequence
tcaattgacatactactgggaacgt

SEQ ID NO: 127008 - DNA, 25 bp, Probe sequence
tttattattctctatgccataccac

SEQ ID NO: 127009 - DNA, 25 bp, Probe sequence
ttacaacactctcctatttattatt

SEQ ID NO: 127010 - DNA, 25 bp, Probe sequence
attttaacctactgccattgcatcg

SEQ ID NO: 127011 - DNA, 25 bp, Probe sequence
actgccattgcatcgattaaacttt

SEQ ID NO: 127012 - DNA, 25 bp, Probe sequence
aacctactgccattgcatcgattaa

SEQ ID NO: 127013 - DNA, 25 bp, Probe sequence
aatggcagtaggttttttatgtctt

SEQ ID NO: 127014 - DNA, 25 bp, Probe sequence
aattttaacctactgccattgcatc

SEQ ID NO: 127015 - DNA, 25 bp, Probe sequence
ctgccattgcatcgattaaactttt

SEQ ID NO: 127016 - DNA, 25 bp, Probe sequence
cctactgccattgcatcgattaaac

SEQ ID NO: 127017 - DNA, 25 bp, Probe sequence
gccattgcatcgattaaacttttca

SEQ ID NO: 127018 - DNA, 25 bp, Probe sequence
gcatcgattaaacttttcaatggca

SEQ ID NO: 127019 - DNA, 25 bp, Probe sequence
gattaaacttttcaatggcagtagg

SEQ ID NO: 127020 - DNA, 25 bp, Probe sequence
tggcagtaggttttttatgtcttta

SEQ ID NO: 127021 - DNA, 25 bp, Probe sequence
taattttaacctactgccattgcat

SEQ ID NO: 127022 - DNA, 25 bp, Probe sequence
taacctactgccattgcatcgatta

SEQ ID NO: 127023 - DNA, 25 bp, Probe sequence
tttaacctactgccattgcatcgat

SEQ ID NO: 127024 - DNA, 25 bp, Probe sequence
ttaacctactgccattgcatcgatt

SEQ ID NO: 127025 - DNA, 25 bp, Probe sequence
attcgtgattacattctatactttt

SEQ ID NO: 127026 - DNA, 25 bp, Probe sequence
atgcatgcgcttagcgcaggcgctc

SEQ ID NO: 127027 - DNA, 25 bp, Probe sequence
atgttcagaactacaattcataaga

SEQ ID NO: 127028 - DNA, 25 bp, Probe sequence
agttggttttattaattctgattat

SEQ ID NO: 127029 - DNA, 25 bp, Probe sequence
aatactttttatataattcgtgatt

SEQ ID NO: 127030 - DNA, 25 bp, Probe sequence
cgctcctacttttcaactttagttg

SEQ ID NO: 127031 - DNA, 25 bp, Probe sequence
gctcttatgcatgcgcttagcgcag

SEQ ID NO: 127032 - DNA, 25 bp, Probe sequence
gaagaggtctccaatactttttata

SEQ ID NO: 127033 - DNA, 25 bp, Probe sequence
gaaaatctttaactcttgaaacaca

SEQ ID NO: 127034 - DNA, 25 bp, Probe sequence
gaggtctccaatactttttatataa

SEQ ID NO: 127035 - DNA, 25 bp, Probe sequence
gattacattctatacttttaattgt

SEQ ID NO: 127036 - DNA, 25 bp, Probe sequence
ggcttctttctaaaataactaagtg

SEQ ID NO: 127037 - DNA, 25 bp, Probe sequence
tctgctgtatggaaagttggtttta

SEQ ID NO: 127038 - DNA, 25 bp, Probe sequence
tatctatatatgaagaggtctccaa

SEQ ID NO: 127039 - DNA, 25 bp, Probe sequence
tttaattgtattttctgctgtatgg

SEQ ID NO: 127040 - DNA, 25 bp, Probe sequence
atgccggtcaaagcgaatagaaggt

SEQ ID NO: 127041 - DNA, 25 bp, Probe sequence
atagccttcaaaatgccggtcaaag

SEQ ID NO: 127042 - DNA, 25 bp, Probe sequence
agccttcaaaatgccggtcaaagcg

SEQ ID NO: 127043 - DNA, 25 bp, Probe sequence
aaatgccggtcaaagcgaatagaag

SEQ ID NO: 127044 - DNA, 25 bp, Probe sequence
aaatagccttcaaaatgccggtcaa

SEQ ID NO: 127045 - DNA, 25 bp, Probe sequence
aaaatagccttcaaaatgccggtca

SEQ ID NO: 127046 - DNA, 25 bp, Probe sequence
caaaatgccggtcaaagcgaataga

SEQ ID NO: 127047 - DNA, 25 bp, Probe sequence
aatagccttcaaaatgccggtcaaa

SEQ ID NO: 127048 - DNA, 25 bp, Probe sequence
cttcaaaatgccggtcaaagcgaat

SEQ ID NO: 127049 - DNA, 25 bp, Probe sequence
ccggtcaaagcgaatagaaggttat

SEQ ID NO: 127050 - DNA, 25 bp, Probe sequence
ccttcaaaatgccggtcaaagcgaa

SEQ ID NO: 127051 - DNA, 25 bp, Probe sequence
gccttcaaaatgccggtcaaagcga

SEQ ID NO: 127052 - DNA, 25 bp, Probe sequence
gccggtcaaagcgaatagaaggtta

SEQ ID NO: 127053 - DNA, 25 bp, Probe sequence
tcaaaatgccggtcaaagcgaatag

SEQ ID NO: 127054 - DNA, 25 bp, Probe sequence
tagccttcaaaatgccggtcaaagc

SEQ ID NO: 127055 - DNA, 25 bp, Probe sequence
attataacatgcacacttttaaaca

SEQ ID NO: 127056 - DNA, 25 bp, Probe sequence
agagattagccaccatctatccaac

SEQ ID NO: 127057 - DNA, 25 bp, Probe sequence
acatacccttgtctaactagctatt

SEQ ID NO: 127058 - DNA, 25 bp, Probe sequence
aagaagagcaccaaccttttcggct

SEQ ID NO: 127059 - DNA, 25 bp, Probe sequence
caccatctatccaacttgctcaata

SEQ ID NO: 127060 - DNA, 25 bp, Probe sequence
ccctgttatcgtttgttcatcatat

SEQ ID NO: 127061 - DNA, 25 bp, Probe sequence
ccaaccttttcggctgatatgctcc

SEQ ID NO: 127062 - DNA, 25 bp, Probe sequence
gctgatatgctcccttcaaaataga

SEQ ID NO: 127063 - DNA, 25 bp, Probe sequence
ggcatcacccctttattaagagatt

SEQ ID NO: 127064 - DNA, 25 bp, Probe sequence
taaacagttgagtgacatacccttg

SEQ ID NO: 127065 - DNA, 25 bp, Probe sequence
tataaccataggcatcaccccttta

SEQ ID NO: 127066 - DNA, 25 bp, Probe sequence
ttgtctaactagctatttcttcccc

SEQ ID NO: 127067 - DNA, 25 bp, Probe sequence
tttctcattttttattctctgataa

SEQ ID NO: 127068 - DNA, 25 bp, Probe sequence
ttttcatttcttaatcaactcgata

SEQ ID NO: 127069 - DNA, 25 bp, Probe sequence
ttcatagtataagttttttcatttc

SEQ ID NO: 127070 - DNA, 25 bp, Probe sequence
attaatgcttaccaagacgaattgc

SEQ ID NO: 127071 - DNA, 25 bp, Probe sequence
agacgaattgcatttggaagagatt

SEQ ID NO: 127072 - DNA, 25 bp, Probe sequence
aagacgaattgcatttggaagagat

SEQ ID NO: 127073 - DNA, 25 bp, Probe sequence
gcctccctagaaaaagataaagttg

SEQ ID NO: 127074 - DNA, 25 bp, Probe sequence
gctgatggttttaaatttcaagtaa

SEQ ID NO: 127075 - DNA, 25 bp, Probe sequence
gcttaccaagacgaattgcatttgg

SEQ ID NO: 127076 - DNA, 25 bp, Probe sequence
gcatttggaagagattcctaagttt

SEQ ID NO: 127077 - DNA, 25 bp, Probe sequence
gaattgcatttggaagagattccta

SEQ ID NO: 127078 - DNA, 25 bp, Probe sequence
gaaattaatgcttaccaagacgaat

SEQ ID NO: 127079 - DNA, 25 bp, Probe sequence
tgcttaccaagacgaattgcatttg

SEQ ID NO: 127080 - DNA, 25 bp, Probe sequence
tcgctgatggttttaaatttcaagt

SEQ ID NO: 127081 - DNA, 25 bp, Probe sequence
taatgcttaccaagacgaattgcat

SEQ ID NO: 127082 - DNA, 25 bp, Probe sequence
ttaccaagacgaattgcatttggaa

SEQ ID NO: 127083 - DNA, 25 bp, Probe sequence
ttaatgcttaccaagacgaattgca

SEQ ID NO: 127084 - DNA, 25 bp, Probe sequence
ttcgctgatggttttaaatttcaag

SEQ ID NO: 127085 - DNA, 25 bp, Probe sequence
attatcccaaaatcacaaatgcgat

SEQ ID NO: 127086 - DNA, 25 bp, Probe sequence
atatcttacttatggaatgaaatgt

SEQ ID NO: 127087 - DNA, 25 bp, Probe sequence
atagtatacttaaatgcataaacca

SEQ ID NO: 127088 - DNA, 25 bp, Probe sequence
aaatgcgattttggagttgttaggg

SEQ ID NO: 127089 - DNA, 25 bp, Probe sequence
aaccatataaaaggtgatgctaata

SEQ ID NO: 127090 - DNA, 25 bp, Probe sequence
aatgtttgattatcccaaaatcaca

SEQ ID NO: 127091 - DNA, 25 bp, Probe sequence
gcgattttggagttgttaggggctc

SEQ ID NO: 127092 - DNA, 25 bp, Probe sequence
gtatacttaaatgcataaaccatat

SEQ ID NO: 127093 - DNA, 25 bp, Probe sequence
gtgaaacatatcttacttatggaat

SEQ ID NO: 127094 - DNA, 25 bp, Probe sequence
gggctctaacgcaaatacaccccta

SEQ ID NO: 127095 - DNA, 25 bp, Probe sequence
ggggctctaacgcaaatacacccct

SEQ ID NO: 127096 - DNA, 25 bp, Probe sequence
tgaaatgtttgattatcccaaaatc

SEQ ID NO: 127097 - DNA, 25 bp, Probe sequence
taacggtagttgttatagtatactt

SEQ ID NO: 127098 - DNA, 25 bp, Probe sequence
taggggctctaacgcaaatacaccc

SEQ ID NO: 127099 - DNA, 25 bp, Probe sequence
ttaggggctctaacgcaaatacacc

SEQ ID NO: 127100 - DNA, 25 bp, Probe sequence
ataactttactgctctttgtacatt

SEQ ID NO: 127101 - DNA, 25 bp, Probe sequence
agaaaataactttactgctctttgt

SEQ ID NO: 127102 - DNA, 25 bp, Probe sequence
actgctctttgtacattactcatca

SEQ ID NO: 127103 - DNA, 25 bp, Probe sequence
aaataactttactgctctttgtaca

SEQ ID NO: 127104 - DNA, 25 bp, Probe sequence
aacactagtatctggattactagca

SEQ ID NO: 127105 - DNA, 25 bp, Probe sequence
aactttactgctctttgtacattac

SEQ ID NO: 127106 - DNA, 25 bp, Probe sequence
caaaggagcagtaagacattttcta

SEQ ID NO: 127107 - DNA, 25 bp, Probe sequence
ctttgtacattactcatcaactatt

SEQ ID NO: 127108 - DNA, 25 bp, Probe sequence
gctctttgtacattactcatcaact

SEQ ID NO: 127109 - DNA, 25 bp, Probe sequence
gtacattactcatcaactattgtaa

SEQ ID NO: 127110 - DNA, 25 bp, Probe sequence
ggattactagcatacaaaggagcag

SEQ ID NO: 127111 - DNA, 25 bp, Probe sequence
ggagcagtaagacattttctaatag

SEQ ID NO: 127112 - DNA, 25 bp, Probe sequence
tactcatcaactattgtaaattaaa

SEQ ID NO: 127113 - DNA, 25 bp, Probe sequence
tatctggattactagcatacaaagg

SEQ ID NO: 127114 - DNA, 25 bp, Probe sequence
tttactgctctttgtacattactca

SEQ ID NO: 127115 - DNA, 25 bp, Probe sequence
attaaattttgtcattattacttat

SEQ ID NO: 127116 - DNA, 25 bp, Probe sequence
attttgtcattattacttattattt

SEQ ID NO: 127117 - DNA, 25 bp, Probe sequence
actgtccattttatcttaattaaat

SEQ ID NO: 127118 - DNA, 25 bp, Probe sequence
aaattttgtcattattacttattat

SEQ ID NO: 127119 - DNA, 25 bp, Probe sequence
cactgtccattttatcttaattaaa

SEQ ID NO: 127120 - DNA, 25 bp, Probe sequence
cattattacttattatttgcaaaat

SEQ ID NO: 127121 - DNA, 25 bp, Probe sequence
ctccactgtccattttatcttaatt

SEQ ID NO: 127122 - DNA, 25 bp, Probe sequence
ccactgtccattttatcttaattaa

SEQ ID NO: 127123 - DNA, 25 bp, Probe sequence
gtcattattacttattatttgcaaa

SEQ ID NO: 127124 - DNA, 25 bp, Probe sequence
tgtccattttatcttaattaaattt

SEQ ID NO: 127125 - DNA, 25 bp, Probe sequence
tgtcattattacttattatttgcaa

SEQ ID NO: 127126 - DNA, 25 bp, Probe sequence
tccactgtccattttatcttaatta

SEQ ID NO: 127127 - DNA, 25 bp, Probe sequence
tcattattacttattatttgcaaaa

SEQ ID NO: 127128 - DNA, 25 bp, Probe sequence
tttgtcattattacttattatttgc

SEQ ID NO: 127129 - DNA, 25 bp, Probe sequence
ttgtcattattacttattatttgca

SEQ ID NO: 127130 - DNA, 25 bp, Probe sequence
actccatacttctcataaaatcata

SEQ ID NO: 127131 - DNA, 25 bp, Probe sequence
acataacacccttaattgtcagact

SEQ ID NO: 127132 - DNA, 25 bp, Probe sequence
aaatcatattaacataacaccctta

SEQ ID NO: 127133 - DNA, 25 bp, Probe sequence
aaagcacccttctagtcgattaatc

SEQ ID NO: 127134 - DNA, 25 bp, Probe sequence
aacacccttaattgtcagactattt

SEQ ID NO: 127135 - DNA, 25 bp, Probe sequence
aattttaatacatgattgattctaa

SEQ ID NO: 127136 - DNA, 25 bp, Probe sequence
cttcctttttacgcatttctgccaa

SEQ ID NO: 127137 - DNA, 25 bp, Probe sequence
cctttttacgcatttctgccaaatt

SEQ ID NO: 127138 - DNA, 25 bp, Probe sequence
gcacccttctagtcgattaatctaa

SEQ ID NO: 127139 - DNA, 25 bp, Probe sequence
gtcgattaatctaaaagggtgccat

SEQ ID NO: 127140 - DNA, 25 bp, Probe sequence
tgaagtaaaagctaagtcgacctaa

SEQ ID NO: 127141 - DNA, 25 bp, Probe sequence
tcgacctaaaaaagcacccttctag

SEQ ID NO: 127142 - DNA, 25 bp, Probe sequence
taaaagggtgccatatactttaatt

SEQ ID NO: 127143 - DNA, 25 bp, Probe sequence
tacgcatttctgccaaattaagatg

SEQ ID NO: 127144 - DNA, 25 bp, Probe sequence
ttgctactccatacttctcataaaa

SEQ ID NO: 127145 - DNA, 25 bp, Probe sequence
attgcactctataaaggccactcat

SEQ ID NO: 127146 - DNA, 25 bp, Probe sequence
attgctcacactgtactttccatat

SEQ ID NO: 127147 - DNA, 25 bp, Probe sequence
atttatttgcacaggcgctttaact

SEQ ID NO: 127148 - DNA, 25 bp, Probe sequence
actttgtccattaagtcaccctaat

SEQ ID NO: 127149 - DNA, 25 bp, Probe sequence
aacgacattttcctccatattggaa

SEQ ID NO: 127150 - DNA, 25 bp, Probe sequence
cgatctattcgatcactatcctcct

SEQ ID NO: 127151 - DNA, 25 bp, Probe sequence
gctttaactgtactgccgaactttc

SEQ ID NO: 127152 - DNA, 25 bp, Probe sequence
gctattatcgcattcatccataaca

SEQ ID NO: 127153 - DNA, 25 bp, Probe sequence
ggcgatcttattaactttgtccatt

SEQ ID NO: 127154 - DNA, 25 bp, Probe sequence
ggccactcatatattaacctttaat

SEQ ID NO: 127155 - DNA, 25 bp, Probe sequence
tgagccacatccgggatagcatccg

SEQ ID NO: 127156 - DNA, 25 bp, Probe sequence
tccccctttccattaatcattattg

SEQ ID NO: 127157 - DNA, 25 bp, Probe sequence
tagcatccgccgatctattcgatca

SEQ ID NO: 127158 - DNA, 25 bp, Probe sequence
tatcctcctcgtctacaaatacata

SEQ ID NO: 127159 - DNA, 25 bp, Probe sequence
ttatattcaatttctggcgatctta

SEQ ID NO: 127160 - DNA, 25 bp, Probe sequence
agtaacgtctctatacactatatat

SEQ ID NO: 127161 - DNA, 25 bp, Probe sequence
acgtctctatacactatatatagtc

SEQ ID NO: 127162 - DNA, 25 bp, Probe sequence
aacgtctctatacactatatatagt

SEQ ID NO: 127163 - DNA, 25 bp, Probe sequence
aagtaacgtctctatacactatata

SEQ ID NO: 127164 - DNA, 25 bp, Probe sequence
caagtaacgtctctatacactatat

SEQ ID NO: 127165 - DNA, 25 bp, Probe sequence
ctatacactatatatagtcacatat

SEQ ID NO: 127166 - DNA, 25 bp, Probe sequence
ctctatacactatatatagtcacat

SEQ ID NO: 127167 - DNA, 25 bp, Probe sequence
cgtctctatacactatatatagtca

SEQ ID NO: 127168 - DNA, 25 bp, Probe sequence
gtaacgtctctatacactatatata

SEQ ID NO: 127169 - DNA, 25 bp, Probe sequence
gtctctatacactatatatagtcac

SEQ ID NO: 127170 - DNA, 25 bp, Probe sequence
tctctatacactatatatagtcaca

SEQ ID NO: 127171 - DNA, 25 bp, Probe sequence
tctatacactatatatagtcacata

SEQ ID NO: 127172 - DNA, 25 bp, Probe sequence
taacgtctctatacactatatatag

SEQ ID NO: 127173 - DNA, 25 bp, Probe sequence
tacactatatatagtcacatatatt

SEQ ID NO: 127174 - DNA, 25 bp, Probe sequence
tatacactatatatagtcacatata

SEQ ID NO: 127175 - DNA, 25 bp, Probe sequence
attgctattggtcattactaaaaca

SEQ ID NO: 127176 - DNA, 25 bp, Probe sequence
atttgttttattttcgagccacagc

SEQ ID NO: 127177 - DNA, 25 bp, Probe sequence
ataactagatgttcacattcttgaa

SEQ ID NO: 127178 - DNA, 25 bp, Probe sequence
atgaaaggagtatttttgcgttaat

SEQ ID NO: 127179 - DNA, 25 bp, Probe sequence
aatactcccttcaacatagacactt

SEQ ID NO: 127180 - DNA, 25 bp, Probe sequence
taactgttagacttggttacttagt

SEQ ID NO: 127181 - DNA, 25 bp, Probe sequence
cagcgacctattcaattgctattgg

SEQ ID NO: 127182 - DNA, 25 bp, Probe sequence
ctcccttcaacatagacacttaact

SEQ ID NO: 127183 - DNA, 25 bp, Probe sequence
gacacttaacttgtgttatgtatga

SEQ ID NO: 127184 - DNA, 25 bp, Probe sequence
gagccacagcgacctattcaattgc

SEQ ID NO: 127185 - DNA, 25 bp, Probe sequence
gtagttccgttgaattaacaatatt

SEQ ID NO: 127186 - DNA, 25 bp, Probe sequence
gtaataatgtagtagttccgttgaa

SEQ ID NO: 127187 - DNA, 25 bp, Probe sequence
tagtaaggaatatttccctatgaaa

SEQ ID NO: 127188 - DNA, 25 bp, Probe sequence
tttcgagccacagcgacctattcaa

SEQ ID NO: 127189 - DNA, 25 bp, Probe sequence
ttctgaacataaaaaatactccctt

SEQ ID NO: 127190 - DNA, 25 bp, Probe sequence
attctcgctgttaaatgatttcact

SEQ ID NO: 127191 - DNA, 25 bp, Probe sequence
atcatcattatatattgagtaccag

SEQ ID NO: 127192 - DNA, 25 bp, Probe sequence
atgcatacgcatcggcttatttgta

SEQ ID NO: 127193 - DNA, 25 bp, Probe sequence
aaagcaactctatctaattaaaatt

SEQ ID NO: 127194 - DNA, 25 bp, Probe sequence
aaaacacaaagcaactctatctaat

SEQ ID NO: 127195 - DNA, 25 bp, Probe sequence
aacacaaaaaaaccgatgcatacgc

SEQ ID NO: 127196 - DNA, 25 bp, Probe sequence
aagtcatcctcctggttgattattc

SEQ ID NO: 127197 - DNA, 25 bp, Probe sequence
ctcctggttgattattctcgctgtt

SEQ ID NO: 127198 - DNA, 25 bp, Probe sequence
gcatcggcttatttgtaatacagta

SEQ ID NO: 127199 - DNA, 25 bp, Probe sequence
gataagtagtagcatctgcgttaaa

SEQ ID NO: 127200 - DNA, 25 bp, Probe sequence
gatttcacttaatcaactgttaaga

SEQ ID NO: 127201 - DNA, 25 bp, Probe sequence
gtagcatctgcgttaaaaacacaaa

SEQ ID NO: 127202 - DNA, 25 bp, Probe sequence
tgagtaccagtgtattttatattac

SEQ ID NO: 127203 - DNA, 25 bp, Probe sequence
tatcattttacgtttgtactataaa

SEQ ID NO: 127204 - DNA, 25 bp, Probe sequence
tattgattactttgtttttattttg

SEQ ID NO: 127205 - DNA, 25 bp, Probe sequence
ataccaatcatttacatcactgtca

SEQ ID NO: 127206 - DNA, 25 bp, Probe sequence
acccattataccaatcatttacatc

SEQ ID NO: 127207 - DNA, 25 bp, Probe sequence
actgtcatacgaacatatatttaaa

SEQ ID NO: 127208 - DNA, 25 bp, Probe sequence
actttatacactacaaatcatttat

SEQ ID NO: 127209 - DNA, 25 bp, Probe sequence
acatcactgtcatacgaacatatat

SEQ ID NO: 127210 - DNA, 25 bp, Probe sequence
aatacccattataccaatcatttac

SEQ ID NO: 127211 - DNA, 25 bp, Probe sequence
aatatttttccataatacccattat

SEQ ID NO: 127212 - DNA, 25 bp, Probe sequence
aatatactttatacactacaaatca

SEQ ID NO: 127213 - DNA, 25 bp, Probe sequence
caatcatttacatcactgtcatacg

SEQ ID NO: 127214 - DNA, 25 bp, Probe sequence
catttacatcactgtcatacgaaca

SEQ ID NO: 127215 - DNA, 25 bp, Probe sequence
ctactcttaatcattttagtgaatt

SEQ ID NO: 127216 - DNA, 25 bp, Probe sequence
ggtaatatttttccataatacccat

SEQ ID NO: 127217 - DNA, 25 bp, Probe sequence
tctcctccgggtaatatttttccat

SEQ ID NO: 127218 - DNA, 25 bp, Probe sequence
ttttccataatacccattataccaa

SEQ ID NO: 127219 - DNA, 25 bp, Probe sequence
ttataactactcttaatcattttag

SEQ ID NO: 127220 - DNA, 25 bp, Probe sequence
attcaatctcttttattctacttca

SEQ ID NO: 127221 - DNA, 25 bp, Probe sequence
atattcaatctcttttattctactt

SEQ ID NO: 127222 - DNA, 25 bp, Probe sequence
atctcttttattctacttcatttgt

SEQ ID NO: 127223 - DNA, 25 bp, Probe sequence
caatctcttttattctacttcattt

SEQ ID NO: 127224 - DNA, 25 bp, Probe sequence
caatgttcattaatattcaatctct

SEQ ID NO: 127225 - DNA, 25 bp, Probe sequence
cttttattctacttcatttgtttct

SEQ ID NO: 127226 - DNA, 25 bp, Probe sequence
ctcttttattctacttcatttgttt

SEQ ID NO: 127227 - DNA, 25 bp, Probe sequence
gttcattaatattcaatctctttta

SEQ ID NO: 127228 - DNA, 25 bp, Probe sequence
gtttcttgaagtcaataactttttg

SEQ ID NO: 127229 - DNA, 25 bp, Probe sequence
tgaacgattactttatttattctat

SEQ ID NO: 127230 - DNA, 25 bp, Probe sequence
tcaatctcttttattctacttcatt

SEQ ID NO: 127231 - DNA, 25 bp, Probe sequence
tattctacttcatttgtttcttgaa

SEQ ID NO: 127232 - DNA, 25 bp, Probe sequence
tttattctacttcatttgtttcttg

SEQ ID NO: 127233 - DNA, 25 bp, Probe sequence
ttcaatctcttttattctacttcat

SEQ ID NO: 127234 - DNA, 25 bp, Probe sequence
ttcatttgtttcttgaagtcaataa

SEQ ID NO: 127235 - DNA, 25 bp, Probe sequence
attttgtacgtttagcatatattat

SEQ ID NO: 127236 - DNA, 25 bp, Probe sequence
attttaccagcattccaaaacaaat

SEQ ID NO: 127237 - DNA, 25 bp, Probe sequence
agaacttattttaccagcattccaa

SEQ ID NO: 127238 - DNA, 25 bp, Probe sequence
accagcattccaaaacaaatcaaca

SEQ ID NO: 127239 - DNA, 25 bp, Probe sequence
aagaacttattttaccagcattcca

SEQ ID NO: 127240 - DNA, 25 bp, Probe sequence
aagtaattttgtacgtttagcatat

SEQ ID NO: 127241 - DNA, 25 bp, Probe sequence
cagcattccaaaacaaatcaacata

SEQ ID NO: 127242 - DNA, 25 bp, Probe sequence
cttattttaccagcattccaaaaca

SEQ ID NO: 127243 - DNA, 25 bp, Probe sequence
gcattccaaaacaaatcaacataaa

SEQ ID NO: 127244 - DNA, 25 bp, Probe sequence
gaacttattttaccagcattccaaa

SEQ ID NO: 127245 - DNA, 25 bp, Probe sequence
gtaattttgtacgtttagcatatat

SEQ ID NO: 127246 - DNA, 25 bp, Probe sequence
tttgtacgtttagcatatattatac

SEQ ID NO: 127247 - DNA, 25 bp, Probe sequence
tttaccagcattccaaaacaaatca

SEQ ID NO: 127248 - DNA, 25 bp, Probe sequence
ttattttaccagcattccaaaacaa

SEQ ID NO: 127249 - DNA, 25 bp, Probe sequence
ttaccagcattccaaaacaaatcaa

SEQ ID NO: 127250 - DNA, 25 bp, Probe sequence
atttttgcttagtctatcactaaaa

SEQ ID NO: 127251 - DNA, 25 bp, Probe sequence
atcccccttaatcattttaagacat

SEQ ID NO: 127252 - DNA, 25 bp, Probe sequence
acaatttttgcttagtctatcacta

SEQ ID NO: 127253 - DNA, 25 bp, Probe sequence
aaatagaccaactactataattatt

SEQ ID NO: 127254 - DNA, 25 bp, Probe sequence
aacaatttttgcttagtctatcact

SEQ ID NO: 127255 - DNA, 25 bp, Probe sequence
aagcagttagcctattattttaaat

SEQ ID NO: 127256 - DNA, 25 bp, Probe sequence
aatcattttaagacatctacatcat

SEQ ID NO: 127257 - DNA, 25 bp, Probe sequence
cattttaagacatctacatcatagc

SEQ ID NO: 127258 - DNA, 25 bp, Probe sequence
gcaaatcccccttaatcattttaag

SEQ ID NO: 127259 - DNA, 25 bp, Probe sequence
gacatctacatcatagcaaataaca

SEQ ID NO: 127260 - DNA, 25 bp, Probe sequence
tctacatcatagcaaataacaattt

SEQ ID NO: 127261 - DNA, 25 bp, Probe sequence
taaaaaaagcagttagcctattatt

SEQ ID NO: 127262 - DNA, 25 bp, Probe sequence
ttgcttagtctatcactaaaagtat

SEQ ID NO: 127263 - DNA, 25 bp, Probe sequence
tattattttaaatagaccaactact

SEQ ID NO: 127264 - DNA, 25 bp, Probe sequence
ttaagacatctacatcatagcaaat

SEQ ID NO: 127265 - DNA, 25 bp, Probe sequence
attatcgattcttctattgaacaaa

SEQ ID NO: 127266 - DNA, 25 bp, Probe sequence
acttatttaccacaaattgagcact

SEQ ID NO: 127267 - DNA, 25 bp, Probe sequence
aaatcattattggttcttacacatt

SEQ ID NO: 127268 - DNA, 25 bp, Probe sequence
aaaacagatatacacttgtcccttt

SEQ ID NO: 127269 - DNA, 25 bp, Probe sequence
aatataacattgtagggcctaataa

SEQ ID NO: 127270 - DNA, 25 bp, Probe sequence
aatttattttatttctcagactcat

SEQ ID NO: 127271 - DNA, 25 bp, Probe sequence
catatgtgccctcaacttcagatat

SEQ ID NO: 127272 - DNA, 25 bp, Probe sequence
gaagttggaacacatatgtgccctc

SEQ ID NO: 127273 - DNA, 25 bp, Probe sequence
gaacacatatgtgccctcaacttca

SEQ ID NO: 127274 - DNA, 25 bp, Probe sequence
gactcatacaatggttatttaactt

SEQ ID NO: 127275 - DNA, 25 bp, Probe sequence
gactcactattatcgattcttctat

SEQ ID NO: 127276 - DNA, 25 bp, Probe sequence
gagcactaagactcactattatcga

SEQ ID NO: 127277 - DNA, 25 bp, Probe sequence
gatatacacttgtccctttaataca

SEQ ID NO: 127278 - DNA, 25 bp, Probe sequence
tgtccctttaatacatatagccatt

SEQ ID NO: 127279 - DNA, 25 bp, Probe sequence
tatttctcagactcatacaatggtt

SEQ ID NO: 127280 - DNA, 25 bp, Probe sequence
attgaacgatttatctagtatctag

SEQ ID NO: 127281 - DNA, 25 bp, Probe sequence
atttcttactttaattacactacat

SEQ ID NO: 127282 - DNA, 25 bp, Probe sequence
actttaattacactacatcaatttt

SEQ ID NO: 127283 - DNA, 25 bp, Probe sequence
acactacatcaattttaatcataat

SEQ ID NO: 127284 - DNA, 25 bp, Probe sequence
aatattgaacgatttatctagtatc

SEQ ID NO: 127285 - DNA, 25 bp, Probe sequence
cttactttaattacactacatcaat

SEQ ID NO: 127286 - DNA, 25 bp, Probe sequence
tggcctccttattaataaaatattg

SEQ ID NO: 127287 - DNA, 25 bp, Probe sequence
tgaacgatttatctagtatctagga

SEQ ID NO: 127288 - DNA, 25 bp, Probe sequence
tctagtatctaggaaatttattatt

SEQ ID NO: 127289 - DNA, 25 bp, Probe sequence
tcttactttaattacactacatcaa

SEQ ID NO: 127290 - DNA, 25 bp, Probe sequence
taattacactacatcaattttaatc

SEQ ID NO: 127291 - DNA, 25 bp, Probe sequence
tatttcttactttaattacactaca

SEQ ID NO: 127292 - DNA, 25 bp, Probe sequence
tattatttcttactttaattacact

SEQ ID NO: 127293 - DNA, 25 bp, Probe sequence
ttacactacatcaattttaatcata

SEQ ID NO: 127294 - DNA, 25 bp, Probe sequence
ttcttactttaattacactacatca

SEQ ID NO: 127295 - DNA, 25 bp, Probe sequence
attacaatacaatcccctattagaa

SEQ ID NO: 127296 - DNA, 25 bp, Probe sequence
atttacaaataattggttttcatat

SEQ ID NO: 127297 - DNA, 25 bp, Probe sequence
atcccctattagaatgatttatgta

SEQ ID NO: 127298 - DNA, 25 bp, Probe sequence
atgtataaacacttttgactttcaa

SEQ ID NO: 127299 - DNA, 25 bp, Probe sequence
acaatacaatcccctattagaatga

SEQ ID NO: 127300 - DNA, 25 bp, Probe sequence
aaatcttaacgataattctattaca

SEQ ID NO: 127301 - DNA, 25 bp, Probe sequence
aataattggttttcatatgtataaa

SEQ ID NO: 127302 - DNA, 25 bp, Probe sequence
aatacctccttctatatatttattt

SEQ ID NO: 127303 - DNA, 25 bp, Probe sequence
aattctattacaatacaatccccta

SEQ ID NO: 127304 - DNA, 25 bp, Probe sequence
ctattacaatacaatcccctattag

SEQ ID NO: 127305 - DNA, 25 bp, Probe sequence
gaaatacctccttctatatatttat

SEQ ID NO: 127306 - DNA, 25 bp, Probe sequence
tacaatcccctattagaatgattta

SEQ ID NO: 127307 - DNA, 25 bp, Probe sequence
tacctccttctatatatttatttat

SEQ ID NO: 127308 - DNA, 25 bp, Probe sequence
ttctattacaatacaatcccctatt

SEQ ID NO: 127309 - DNA, 25 bp, Probe sequence
ttgactttcaaatcttaacgataat

SEQ ID NO: 127310 - DNA, 25 bp, Probe sequence
atttgttctcctttaatactcacat

SEQ ID NO: 127311 - DNA, 25 bp, Probe sequence
atccctaacaaaaacacgaacatat

SEQ ID NO: 127312 - DNA, 25 bp, Probe sequence
aaaaaagtatcacataactcttgaa

SEQ ID NO: 127313 - DNA, 25 bp, Probe sequence
cacatccctaacaaaaacacgaaca

SEQ ID NO: 127314 - DNA, 25 bp, Probe sequence
cacataactcttgaaaacgattaca

SEQ ID NO: 127315 - DNA, 25 bp, Probe sequence
cctttaatactcacattttaccaca

SEQ ID NO: 127316 - DNA, 25 bp, Probe sequence
gttctcctttaatactcacatttta

SEQ ID NO: 127317 - DNA, 25 bp, Probe sequence
gtatcacataactcttgaaaacgat

SEQ ID NO: 127318 - DNA, 25 bp, Probe sequence
tctcctttaatactcacattttacc

SEQ ID NO: 127319 - DNA, 25 bp, Probe sequence
taatactcacattttaccacatccc

SEQ ID NO: 127320 - DNA, 25 bp, Probe sequence
tacaaaatcgtttatgatgtattta

SEQ ID NO: 127321 - DNA, 25 bp, Probe sequence
tttcgggttaaaattcattagtatg

SEQ ID NO: 127322 - DNA, 25 bp, Probe sequence
ttaccacatccctaacaaaaacacg

SEQ ID NO: 127323 - DNA, 25 bp, Probe sequence
ttcattagtatgacacaatttaaaa

SEQ ID NO: 127324 - DNA, 25 bp, Probe sequence
ttgttctcctttaatactcacattt

SEQ ID NO: 127325 - DNA, 25 bp, Probe sequence
aggacaactgttctcataattttaa

SEQ ID NO: 127326 - DNA, 25 bp, Probe sequence
aaaggacaactgttctcataatttt

SEQ ID NO: 127327 - DNA, 25 bp, Probe sequence
aacagttgtcctttttcacatatat

SEQ ID NO: 127328 - DNA, 25 bp, Probe sequence
aatacaaaaggacaactgttctcat

SEQ ID NO: 127329 - DNA, 25 bp, Probe sequence
caaaaggacaactgttctcataatt

SEQ ID NO: 127330 - DNA, 25 bp, Probe sequence
gacaactgttctcataattttaaca

SEQ ID NO: 127331 - DNA, 25 bp, Probe sequence
gttctcataattttaacagttgtcc

SEQ ID NO: 127332 - DNA, 25 bp, Probe sequence
ggacaactgttctcataattttaac

SEQ ID NO: 127333 - DNA, 25 bp, Probe sequence
tcataattttaacagttgtcctttt

SEQ ID NO: 127334 - DNA, 25 bp, Probe sequence
taacagttgtcctttttcacatata

SEQ ID NO: 127335 - DNA, 25 bp, Probe sequence
tacaaaaggacaactgttctcataa

SEQ ID NO: 127336 - DNA, 25 bp, Probe sequence
tttaacagttgtcctttttcacata

SEQ ID NO: 127337 - DNA, 25 bp, Probe sequence
ttttaacagttgtcctttttcacat

SEQ ID NO: 127338 - DNA, 25 bp, Probe sequence
ttaacagttgtcctttttcacatat

SEQ ID NO: 127339 - DNA, 25 bp, Probe sequence
ttctcataattttaacagttgtcct

SEQ ID NO: 127340 - DNA, 25 bp, Probe sequence
attctatctttcaaaatgtttatgt

SEQ ID NO: 127341 - DNA, 25 bp, Probe sequence
atttctctatgtattcgttttaagt

SEQ ID NO: 127342 - DNA, 25 bp, Probe sequence
agaattctattcagttaacaaacat

SEQ ID NO: 127343 - DNA, 25 bp, Probe sequence
accttttttaaactctaatcatatg

SEQ ID NO: 127344 - DNA, 25 bp, Probe sequence
aaatatacgctattacttgtaattt

SEQ ID NO: 127345 - DNA, 25 bp, Probe sequence
aacatattccttatcattctatctt

SEQ ID NO: 127346 - DNA, 25 bp, Probe sequence
aatccatttctctatgtattcgttt

SEQ ID NO: 127347 - DNA, 25 bp, Probe sequence
aatcaatccatttctctatgtattc

SEQ ID NO: 127348 - DNA, 25 bp, Probe sequence
caattactgatttcgtacttaacct

SEQ ID NO: 127349 - DNA, 25 bp, Probe sequence
ggttaagtacaattactgatttcgt

SEQ ID NO: 127350 - DNA, 25 bp, Probe sequence
taagtatatacagaattctattcag

SEQ ID NO: 127351 - DNA, 25 bp, Probe sequence
taacaaacatattccttatcattct

SEQ ID NO: 127352 - DNA, 25 bp, Probe sequence
tacgctattacttgtaatttttcaa

SEQ ID NO: 127353 - DNA, 25 bp, Probe sequence
tattccttatcattctatctttcaa

SEQ ID NO: 127354 - DNA, 25 bp, Probe sequence
ttccttatcattctatctttcaaaa

SEQ ID NO: 127355 - DNA, 25 bp, Probe sequence
atttcctctaataattatgactaca

SEQ ID NO: 127356 - DNA, 25 bp, Probe sequence
atctgttgcaattttatgtgacgaa

SEQ ID NO: 127357 - DNA, 25 bp, Probe sequence
atgactacaattagcacatttcctt

SEQ ID NO: 127358 - DNA, 25 bp, Probe sequence
aactgttgcacttaatttgataaat

SEQ ID NO: 127359 - DNA, 25 bp, Probe sequence
aatgtatgactatatatttcctcta

SEQ ID NO: 127360 - DNA, 25 bp, Probe sequence
aatacaattgacaccatttagcatg

SEQ ID NO: 127361 - DNA, 25 bp, Probe sequence
aattcagctgatattatctgttgca

SEQ ID NO: 127362 - DNA, 25 bp, Probe sequence
caattatcattgtcaagtagcgttc

SEQ ID NO: 127363 - DNA, 25 bp, Probe sequence
caattagcacatttccttagacaaa

SEQ ID NO: 127364 - DNA, 25 bp, Probe sequence
catttagcatgaccgttatccctgt

SEQ ID NO: 127365 - DNA, 25 bp, Probe sequence
cgttccactccttaatatgtataac

SEQ ID NO: 127366 - DNA, 25 bp, Probe sequence
gctatatcatctttgcattaataca

SEQ ID NO: 127367 - DNA, 25 bp, Probe sequence
gaccgttatccctgtaattcagctg

SEQ ID NO: 127368 - DNA, 25 bp, Probe sequence
tgtcaagtagcgttcaatctttttt

SEQ ID NO: 127369 - DNA, 25 bp, Probe sequence
tgtatcattgctatatcatctttgc

SEQ ID NO: 127370 - DNA, 25 bp, Probe sequence
attatacaaatctatcttgcttttg

SEQ ID NO: 127371 - DNA, 25 bp, Probe sequence
atcattatcattaatatggattata

SEQ ID NO: 127372 - DNA, 25 bp, Probe sequence
atcttgcttttgtaaaatatttcat

SEQ ID NO: 127373 - DNA, 25 bp, Probe sequence
acccgcattctgttgataataagaa

SEQ ID NO: 127374 - DNA, 25 bp, Probe sequence
acttacacccgcattctgttgataa

SEQ ID NO: 127375 - DNA, 25 bp, Probe sequence
acacccgcattctgttgataataag

SEQ ID NO: 127376 - DNA, 25 bp, Probe sequence
aaatctatcttgcttttgtaaaata

SEQ ID NO: 127377 - DNA, 25 bp, Probe sequence
aatctatcttgcttttgtaaaatat

SEQ ID NO: 127378 - DNA, 25 bp, Probe sequence
cacccgcattctgttgataataaga

SEQ ID NO: 127379 - DNA, 25 bp, Probe sequence
cttacacccgcattctgttgataat

SEQ ID NO: 127380 - DNA, 25 bp, Probe sequence
gcttttgtaaaatatttcatagagg

SEQ ID NO: 127381 - DNA, 25 bp, Probe sequence
gattatacaaatctatcttgctttt

SEQ ID NO: 127382 - DNA, 25 bp, Probe sequence
tacacccgcattctgttgataataa

SEQ ID NO: 127383 - DNA, 25 bp, Probe sequence
tatacaaatctatcttgcttttgta

SEQ ID NO: 127384 - DNA, 25 bp, Probe sequence
ttacacccgcattctgttgataata

SEQ ID NO: 127385 - DNA, 25 bp, Probe sequence
attttattaatcgtgagctcaagga

SEQ ID NO: 127386 - DNA, 25 bp, Probe sequence
atacattttccatattcaaattatt

SEQ ID NO: 127387 - DNA, 25 bp, Probe sequence
atggtgtgccgagcttttttatcga

SEQ ID NO: 127388 - DNA, 25 bp, Probe sequence
agaattttattaatcgtgagctcaa

SEQ ID NO: 127389 - DNA, 25 bp, Probe sequence
aaatggtgtgccgagcttttttatc

SEQ ID NO: 127390 - DNA, 25 bp, Probe sequence
aaaaatcacaaaaaagctcggcact

SEQ ID NO: 127391 - DNA, 25 bp, Probe sequence
aaaagctcggcactaaaatggtgtg

SEQ ID NO: 127392 - DNA, 25 bp, Probe sequence
aacttattaaatacaatctatacaa

SEQ ID NO: 127393 - DNA, 25 bp, Probe sequence
aatcacaaaaaagctcggcactaaa

SEQ ID NO: 127394 - DNA, 25 bp, Probe sequence
gagctcaaggattacattaacttat

SEQ ID NO: 127395 - DNA, 25 bp, Probe sequence
gtgccgagcttttttatcgaataac

SEQ ID NO: 127396 - DNA, 25 bp, Probe sequence
gtgtgccgagcttttttatcgaata

SEQ ID NO: 127397 - DNA, 25 bp, Probe sequence
ggtgtgccgagcttttttatcgaat

SEQ ID NO: 127398 - DNA, 25 bp, Probe sequence
tgagagaataatacattttccatat

SEQ ID NO: 127399 - DNA, 25 bp, Probe sequence
tcgtgagctcaaggattacattaac

SEQ ID NO: 127400 - DNA, 25 bp, Probe sequence
attaaatatgtacccatcagttttt

SEQ ID NO: 127401 - DNA, 25 bp, Probe sequence
atatgtacccatcagtttttttctt

SEQ ID NO: 127402 - DNA, 25 bp, Probe sequence
atataagatgaagtaccatttagta

SEQ ID NO: 127403 - DNA, 25 bp, Probe sequence
agtaccatttagtaatatattccct

SEQ ID NO: 127404 - DNA, 25 bp, Probe sequence
accatttagtaatatattccctagt

SEQ ID NO: 127405 - DNA, 25 bp, Probe sequence
aatatgtacccatcagtttttttct

SEQ ID NO: 127406 - DNA, 25 bp, Probe sequence
catttagtaatatattccctagttt

SEQ ID NO: 127407 - DNA, 25 bp, Probe sequence
catcagtttttttcttaaacataat

SEQ ID NO: 127408 - DNA, 25 bp, Probe sequence
catattaaatatgtacccatcagtt

SEQ ID NO: 127409 - DNA, 25 bp, Probe sequence
tatgtacccatcagtttttttctta

SEQ ID NO: 127410 - DNA, 25 bp, Probe sequence
gtaccatttagtaatatattcccta

SEQ ID NO: 127411 - DNA, 25 bp, Probe sequence
taaatatgtacccatcagttttttt

SEQ ID NO: 127412 - DNA, 25 bp, Probe sequence
tagtaatatattccctagtttttgt

SEQ ID NO: 127413 - DNA, 25 bp, Probe sequence
tattaaatatgtacccatcagtttt

SEQ ID NO: 127414 - DNA, 25 bp, Probe sequence
ttagtaatatattccctagtttttg

SEQ ID NO: 127415 - DNA, 25 bp, Probe sequence
atacaaaccctttctgtgtaatggt

SEQ ID NO: 127416 - DNA, 25 bp, Probe sequence
ataagtcgccctatacagtattttc

SEQ ID NO: 127417 - DNA, 25 bp, Probe sequence
aacacactcaaattatttatcattg

SEQ ID NO: 127418 - DNA, 25 bp, Probe sequence
aactgcaacattttaatcatttgta

SEQ ID NO: 127419 - DNA, 25 bp, Probe sequence
gcctttctagtgcattattgatttg

SEQ ID NO: 127420 - DNA, 25 bp, Probe sequence
gcataaggcgactttacttactaat

SEQ ID NO: 127421 - DNA, 25 bp, Probe sequence
gacacaattaataatgcctcatctt

SEQ ID NO: 127422 - DNA, 25 bp, Probe sequence
gatacctgtaaagttgccatatttc

SEQ ID NO: 127423 - DNA, 25 bp, Probe sequence
gttgccatatttccgtttagaatca

SEQ ID NO: 127424 - DNA, 25 bp, Probe sequence
gtatttaagtaatgcctttctagtg

SEQ ID NO: 127425 - DNA, 25 bp, Probe sequence
gtattttctgcataaggcgacttta

SEQ ID NO: 127426 - DNA, 25 bp, Probe sequence
gtgcattattgatttgatacctgta

SEQ ID NO: 127427 - DNA, 25 bp, Probe sequence
tggtaagttcatacccataactgca

SEQ ID NO: 127428 - DNA, 25 bp, Probe sequence
tagaatcaatagtcgctagacacaa

SEQ ID NO: 127429 - DNA, 25 bp, Probe sequence
ttcatacccataactgcaacatttt

SEQ ID NO: 127430 - DNA, 25 bp, Probe sequence
ataaataattacagacgactttcgt

SEQ ID NO: 127431 - DNA, 25 bp, Probe sequence
atcgtttcacctcatttatgaactt

SEQ ID NO: 127432 - DNA, 25 bp, Probe sequence
atgactcctttttcatttgaatata

SEQ ID NO: 127433 - DNA, 25 bp, Probe sequence
atgtgtgcttataccgcagcatcat

SEQ ID NO: 127434 - DNA, 25 bp, Probe sequence
agacttatttctaccatgttactga

SEQ ID NO: 127435 - DNA, 25 bp, Probe sequence
agaagccatgtgtgcttataccgca

SEQ ID NO: 127436 - DNA, 25 bp, Probe sequence
acctcatttatgaacttatttctta

SEQ ID NO: 127437 - DNA, 25 bp, Probe sequence
cagcatcatgactcctttttcattt

SEQ ID NO: 127438 - DNA, 25 bp, Probe sequence
gccatgtgtgcttataccgcagcat

SEQ ID NO: 127439 - DNA, 25 bp, Probe sequence
gcatcatgactcctttttcatttga

SEQ ID NO: 127440 - DNA, 25 bp, Probe sequence
gacgactttcgtattacattttaga

SEQ ID NO: 127441 - DNA, 25 bp, Probe sequence
gttactgaacaaatttgctttagat

SEQ ID NO: 127442 - DNA, 25 bp, Probe sequence
tcgtattacattttagacttatttc

SEQ ID NO: 127443 - DNA, 25 bp, Probe sequence
ttataccgcagcatcatgactcctt

SEQ ID NO: 127444 - DNA, 25 bp, Probe sequence
ttatttctaccatgttactgaacaa

SEQ ID NO: 127445 - DNA, 25 bp, Probe sequence
atattacaagcttttttgccccaga

SEQ ID NO: 127446 - DNA, 25 bp, Probe sequence
acttcaagtacattatatttgctgt

SEQ ID NO: 127447 - DNA, 25 bp, Probe sequence
aattgtgtcttcgtgatgtctgtat

SEQ ID NO: 127448 - DNA, 25 bp, Probe sequence
cattaatcacctttctttatttgaa

SEQ ID NO: 127449 - DNA, 25 bp, Probe sequence
cttcgtgatgtctgtatgcaaatac

SEQ ID NO: 127450 - DNA, 25 bp, Probe sequence
gcgttaagttttaattgtgtcttcg

SEQ ID NO: 127451 - DNA, 25 bp, Probe sequence
gcttttttgccccagaaaactagca

SEQ ID NO: 127452 - DNA, 25 bp, Probe sequence
gcactgattcatttaacttcaagta

SEQ ID NO: 127453 - DNA, 25 bp, Probe sequence
gacattttatggaaactctcaaaca

SEQ ID NO: 127454 - DNA, 25 bp, Probe sequence
gacttaagcactgattcatttaact

SEQ ID NO: 127455 - DNA, 25 bp, Probe sequence
gttgttatattttgacttaagcact

SEQ ID NO: 127456 - DNA, 25 bp, Probe sequence
gttacgacttagacattttatggaa

SEQ ID NO: 127457 - DNA, 25 bp, Probe sequence
gtatgcaaatacattcttagttgtt

SEQ ID NO: 127458 - DNA, 25 bp, Probe sequence
gtgtcttcgtgatgtctgtatgcaa

SEQ ID NO: 127459 - DNA, 25 bp, Probe sequence
ttgccccagaaaactagcagttgct

SEQ ID NO: 127460 - DNA, 25 bp, Probe sequence
atgtcctttagttgattttgaatac

SEQ ID NO: 127461 - DNA, 25 bp, Probe sequence
acttttaactcccattcatgtcttt

SEQ ID NO: 127462 - DNA, 25 bp, Probe sequence
acttgtttaatttatctctttctat

SEQ ID NO: 127463 - DNA, 25 bp, Probe sequence
aaataaagacctaccagcactcgac

SEQ ID NO: 127464 - DNA, 25 bp, Probe sequence
aacgtttgttaattgattgcttctt

SEQ ID NO: 127465 - DNA, 25 bp, Probe sequence
aattgattgcttctttagctttcaa

SEQ ID NO: 127466 - DNA, 25 bp, Probe sequence
ctcccattcatgtcttttatataag

SEQ ID NO: 127467 - DNA, 25 bp, Probe sequence
gcactcgactgataggccttttaat

SEQ ID NO: 127468 - DNA, 25 bp, Probe sequence
gcttctttagctttcaatggtgtgt

SEQ ID NO: 127469 - DNA, 25 bp, Probe sequence
gacctaccagcactcgactgatagg

SEQ ID NO: 127470 - DNA, 25 bp, Probe sequence
gactgataggccttttaatatctat

SEQ ID NO: 127471 - DNA, 25 bp, Probe sequence
gatgactttggaaagttgtccgtta

SEQ ID NO: 127472 - DNA, 25 bp, Probe sequence
ggtgtgtcacccattgattaatata

SEQ ID NO: 127473 - DNA, 25 bp, Probe sequence
ttagctttcaatggtgtgtcaccca

SEQ ID NO: 127474 - DNA, 25 bp, Probe sequence
ttgaatacatcattaacttttaaga

SEQ ID NO: 127475 - DNA, 25 bp, Probe sequence
atatgtttataacctgtttgtttat

SEQ ID NO: 127476 - DNA, 25 bp, Probe sequence
ataacctgtttgtttatgacatatt

SEQ ID NO: 127477 - DNA, 25 bp, Probe sequence
ataatatgtttataacctgtttgtt

SEQ ID NO: 127478 - DNA, 25 bp, Probe sequence
aacctgtttgtttatgacatatttt

SEQ ID NO: 127479 - DNA, 25 bp, Probe sequence
cctgtttgtttatgacatattttca

SEQ ID NO: 127480 - DNA, 25 bp, Probe sequence
gtttatgacatattttcaaacaata

SEQ ID NO: 127481 - DNA, 25 bp, Probe sequence
gtttataacctgtttgtttatgaca

SEQ ID NO: 127482 - DNA, 25 bp, Probe sequence
tgtttataacctgtttgtttatgac

SEQ ID NO: 127483 - DNA, 25 bp, Probe sequence
tgtttgtttatgacatattttcaaa

SEQ ID NO: 127484 - DNA, 25 bp, Probe sequence
tcaaacaataagtgaacattcctat

SEQ ID NO: 127485 - DNA, 25 bp, Probe sequence
taatatgtttataacctgtttgttt

SEQ ID NO: 127486 - DNA, 25 bp, Probe sequence
taacctgtttgtttatgacatattt

SEQ ID NO: 127487 - DNA, 25 bp, Probe sequence
tatgtttataacctgtttgtttatg

SEQ ID NO: 127488 - DNA, 25 bp, Probe sequence
tttataacctgtttgtttatgacat

SEQ ID NO: 127489 - DNA, 25 bp, Probe sequence
ttataacctgtttgtttatgacata

SEQ ID NO: 127490 - DNA, 25 bp, Probe sequence
attgcctcctttatttaggcgatgg

SEQ ID NO: 127491 - DNA, 25 bp, Probe sequence
atttaactgttcgattatatgtata

SEQ ID NO: 127492 - DNA, 25 bp, Probe sequence
actaatataatttaactgttcgatt

SEQ ID NO: 127493 - DNA, 25 bp, Probe sequence
aaactgcgcttttgataatcgtaaa

SEQ ID NO: 127494 - DNA, 25 bp, Probe sequence
aactgtttaaactgcgcttttgata

SEQ ID NO: 127495 - DNA, 25 bp, Probe sequence
aagaactgtttaaactgcgcttttg

SEQ ID NO: 127496 - DNA, 25 bp, Probe sequence
gcgatgggtcattatcctttatgtt

SEQ ID NO: 127497 - DNA, 25 bp, Probe sequence
gcaaaagacgttataaatcattcat

SEQ ID NO: 127498 - DNA, 25 bp, Probe sequence
gacatcaattttaatatacatgctt

SEQ ID NO: 127499 - DNA, 25 bp, Probe sequence
gggtcattatcctttatgtttagac

SEQ ID NO: 127500 - DNA, 25 bp, Probe sequence
tgtaaaattgcctcctttatttagg

SEQ ID NO: 127501 - DNA, 25 bp, Probe sequence
tcattcattattttgatggggtgtt

SEQ ID NO: 127502 - DNA, 25 bp, Probe sequence
taatatacatgcttattctataata

SEQ ID NO: 127503 - DNA, 25 bp, Probe sequence
tatcctttatgtttagacatcaatt

SEQ ID NO: 127504 - DNA, 25 bp, Probe sequence
ttaggcgatgggtcattatccttta

SEQ ID NO: 127505 - DNA, 25 bp, Probe sequence
attttcaatcgctaaaggcccattc

SEQ ID NO: 127506 - DNA, 25 bp, Probe sequence
acattttcaatcgctaaaggcccat

SEQ ID NO: 127507 - DNA, 25 bp, Probe sequence
aaattaactgtaaatcttatgctta

SEQ ID NO: 127508 - DNA, 25 bp, Probe sequence
aacattttcaatcgctaaaggccca

SEQ ID NO: 127509 - DNA, 25 bp, Probe sequence
caatcgctaaaggcccattcgtaaa

SEQ ID NO: 127510 - DNA, 25 bp, Probe sequence
cattttcaatcgctaaaggcccatt

SEQ ID NO: 127511 - DNA, 25 bp, Probe sequence
gttgggatgctactttataacattt

SEQ ID NO: 127512 - DNA, 25 bp, Probe sequence
gtaaatcttatgcttacaactcatt

SEQ ID NO: 127513 - DNA, 25 bp, Probe sequence
gggatgctactttataacattttca

SEQ ID NO: 127514 - DNA, 25 bp, Probe sequence
ggatgctactttataacattttcaa

SEQ ID NO: 127515 - DNA, 25 bp, Probe sequence
tcaatcgctaaaggcccattcgtaa

SEQ ID NO: 127516 - DNA, 25 bp, Probe sequence
taacattttcaatcgctaaaggccc

SEQ ID NO: 127517 - DNA, 25 bp, Probe sequence
tttcaatcgctaaaggcccattcgt

SEQ ID NO: 127518 - DNA, 25 bp, Probe sequence
ttttcaatcgctaaaggcccattcg

SEQ ID NO: 127519 - DNA, 25 bp, Probe sequence
ttcaatcgctaaaggcccattcgta

SEQ ID NO: 127520 - DNA, 25 bp, Probe sequence
attctacattcattatatacttcat

SEQ ID NO: 127521 - DNA, 25 bp, Probe sequence
ataataacttatttgcttgctccat

SEQ ID NO: 127522 - DNA, 25 bp, Probe sequence
atcccctatacaatttattctacat

SEQ ID NO: 127523 - DNA, 25 bp, Probe sequence
agagtaataaaataacctgcaacat

SEQ ID NO: 127524 - DNA, 25 bp, Probe sequence
acctgcaacatagactttaacatcc

SEQ ID NO: 127525 - DNA, 25 bp, Probe sequence
acatccaagtttcaggttagcgtaa

SEQ ID NO: 127526 - DNA, 25 bp, Probe sequence
aaattatttactttgttatattatg

SEQ ID NO: 127527 - DNA, 25 bp, Probe sequence
gctccattcactttttaagagtaat

SEQ ID NO: 127528 - DNA, 25 bp, Probe sequence
gtttcaggttagcgtaatgtaaatt

SEQ ID NO: 127529 - DNA, 25 bp, Probe sequence
gttattatcccctatacaatttatt

SEQ ID NO: 127530 - DNA, 25 bp, Probe sequence
taacttatttgcttgctccattcac

SEQ ID NO: 127531 - DNA, 25 bp, Probe sequence
tacattcattatatacttcatttta

SEQ ID NO: 127532 - DNA, 25 bp, Probe sequence
tagactttaacatccaagtttcagg

SEQ ID NO: 127533 - DNA, 25 bp, Probe sequence
tatcttaggtaagttattgcataat

SEQ ID NO: 127534 - DNA, 25 bp, Probe sequence
ttgcttgctccattcactttttaag

SEQ ID NO: 127535 - DNA, 25 bp, Probe sequence
atgaacctcctttatcttgtatgtc

SEQ ID NO: 127536 - DNA, 25 bp, Probe sequence
atgtccactataaaccatggagcga

SEQ ID NO: 127537 - DNA, 25 bp, Probe sequence
aaaccatggagcgaactctatagca

SEQ ID NO: 127538 - DNA, 25 bp, Probe sequence
aaaatgaacctcctttatcttgtat

SEQ ID NO: 127539 - DNA, 25 bp, Probe sequence
aatgaacctcctttatcttgtatgt

SEQ ID NO: 127540 - DNA, 25 bp, Probe sequence
cactataaaccatggagcgaactct

SEQ ID NO: 127541 - DNA, 25 bp, Probe sequence
catggagcgaactctatagcaagcc

SEQ ID NO: 127542 - DNA, 25 bp, Probe sequence
ctcctttatcttgtatgtccactat

SEQ ID NO: 127543 - DNA, 25 bp, Probe sequence
gcgaactctatagcaagccagaggt

SEQ ID NO: 127544 - DNA, 25 bp, Probe sequence
gtatgtccactataaaccatggagc

SEQ ID NO: 127545 - DNA, 25 bp, Probe sequence
ggagcgaactctatagcaagccaga

SEQ ID NO: 127546 - DNA, 25 bp, Probe sequence
tgaacctcctttatcttgtatgtcc

SEQ ID NO: 127547 - DNA, 25 bp, Probe sequence
tcctttatcttgtatgtccactata

SEQ ID NO: 127548 - DNA, 25 bp, Probe sequence
tcttgtatgtccactataaaccatg

SEQ ID NO: 127549 - DNA, 25 bp, Probe sequence
tatcttgtatgtccactataaacca

SEQ ID NO: 127550 - DNA, 25 bp, Probe sequence
attgccatctttgtttgaatacttc

SEQ ID NO: 127551 - DNA, 25 bp, Probe sequence
atacttcttattttattactcaaat

SEQ ID NO: 127552 - DNA, 25 bp, Probe sequence
atcctttcagttatatttgggcatc

SEQ ID NO: 127553 - DNA, 25 bp, Probe sequence
cattttacatttcatcgtttttaat

SEQ ID NO: 127554 - DNA, 25 bp, Probe sequence
ctttcagttatatttgggcatctaa

SEQ ID NO: 127555 - DNA, 25 bp, Probe sequence
gccatctttgtttgaatacttctta

SEQ ID NO: 127556 - DNA, 25 bp, Probe sequence
gactatcctttcagttatatttggg

SEQ ID NO: 127557 - DNA, 25 bp, Probe sequence
gttgttttatatattgccatctttg

SEQ ID NO: 127558 - DNA, 25 bp, Probe sequence
gttttatatattgccatctttgttt

SEQ ID NO: 127559 - DNA, 25 bp, Probe sequence
tgggcatctaaagtaatgttgtttt

SEQ ID NO: 127560 - DNA, 25 bp, Probe sequence
tgcgactatcctttcagttatattt

SEQ ID NO: 127561 - DNA, 25 bp, Probe sequence
tacatttcatcgtttttaattactt

SEQ ID NO: 127562 - DNA, 25 bp, Probe sequence
tactcaaatttaaatttgtctcttt

SEQ ID NO: 127563 - DNA, 25 bp, Probe sequence
tatatattgccatctttgtttgaat

SEQ ID NO: 127564 - DNA, 25 bp, Probe sequence
ttaacattttacatttcatcgtttt

SEQ ID NO: 127565 - DNA, 25 bp, Probe sequence
ataccatttttatagtgtcgagatt

SEQ ID NO: 127566 - DNA, 25 bp, Probe sequence
atctcgacactataccatttttata

SEQ ID NO: 127567 - DNA, 25 bp, Probe sequence
agtgtcgagattttataagtatcgc

SEQ ID NO: 127568 - DNA, 25 bp, Probe sequence
actataccatttttatagtgtcgag

SEQ ID NO: 127569 - DNA, 25 bp, Probe sequence
acactataccatttttatagtgtcg

SEQ ID NO: 127570 - DNA, 25 bp, Probe sequence
aatctcgacactataccatttttat

SEQ ID NO: 127571 - DNA, 25 bp, Probe sequence
cactataccatttttatagtgtcga

SEQ ID NO: 127572 - DNA, 25 bp, Probe sequence
ctataccatttttatagtgtcgaga

SEQ ID NO: 127573 - DNA, 25 bp, Probe sequence
ctcgacactataccatttttatagt

SEQ ID NO: 127574 - DNA, 25 bp, Probe sequence
gtgtcgagattttataagtatcgcc

SEQ ID NO: 127575 - DNA, 25 bp, Probe sequence
tgtcgagattttataagtatcgcca

SEQ ID NO: 127576 - DNA, 25 bp, Probe sequence
tcgacactataccatttttatagtg

SEQ ID NO: 127577 - DNA, 25 bp, Probe sequence
tctcgacactataccatttttatag

SEQ ID NO: 127578 - DNA, 25 bp, Probe sequence
tagtgtcgagattttataagtatcg

SEQ ID NO: 127579 - DNA, 25 bp, Probe sequence
tataccatttttatagtgtcgagat

SEQ ID NO: 127580 - DNA, 25 bp, Probe sequence
attttctaatcatcccttaaatatt

SEQ ID NO: 127581 - DNA, 25 bp, Probe sequence
agttcctgcgtcatttttgcgctac

SEQ ID NO: 127582 - DNA, 25 bp, Probe sequence
accatattttctaatcatcccttaa

SEQ ID NO: 127583 - DNA, 25 bp, Probe sequence
acctcttatattaattttggtatca

SEQ ID NO: 127584 - DNA, 25 bp, Probe sequence
actaaagtgtagtctattcaccata

SEQ ID NO: 127585 - DNA, 25 bp, Probe sequence
aaaagtatacatatcactcaactaa

SEQ ID NO: 127586 - DNA, 25 bp, Probe sequence
aattttggtatcaattctttctcca

SEQ ID NO: 127587 - DNA, 25 bp, Probe sequence
gtctattcaccatattttctaatca

SEQ ID NO: 127588 - DNA, 25 bp, Probe sequence
tggtatcaattctttctccagttcc

SEQ ID NO: 127589 - DNA, 25 bp, Probe sequence
tgtagtctattcaccatattttcta

SEQ ID NO: 127590 - DNA, 25 bp, Probe sequence
ttttgcgctacctgaatcgtctaca

SEQ ID NO: 127591 - DNA, 25 bp, Probe sequence
tccagttcctgcgtcatttttgcgc

SEQ ID NO: 127592 - DNA, 25 bp, Probe sequence
taatcatcccttaaatattaatatt

SEQ ID NO: 127593 - DNA, 25 bp, Probe sequence
tatacttaacctcttatattaattt

SEQ ID NO: 127594 - DNA, 25 bp, Probe sequence
ttcaccatattttctaatcatccct

SEQ ID NO: 127595 - DNA, 25 bp, Probe sequence
attctaatgaatttatctataactt

SEQ ID NO: 127596 - DNA, 25 bp, Probe sequence
atagtgtaatataccacaactttaa

SEQ ID NO: 127597 - DNA, 25 bp, Probe sequence
agatcgactatatgcttttcatgct

SEQ ID NO: 127598 - DNA, 25 bp, Probe sequence
actcattcccccataatattctaat

SEQ ID NO: 127599 - DNA, 25 bp, Probe sequence
acaactaatgaatccctataaacta

SEQ ID NO: 127600 - DNA, 25 bp, Probe sequence
aaatacacgggtcatatccctcgtt

SEQ ID NO: 127601 - DNA, 25 bp, Probe sequence
aaatacactataagtctcaattaaa

SEQ ID NO: 127602 - DNA, 25 bp, Probe sequence
aacattgcttaccacttttcaaaat

SEQ ID NO: 127603 - DNA, 25 bp, Probe sequence
gcttttcatgcttattatatacaac

SEQ ID NO: 127604 - DNA, 25 bp, Probe sequence
gcttaccacttttcaaaatacacgg

SEQ ID NO: 127605 - DNA, 25 bp, Probe sequence
gactatatgcttttcatgcttatta

SEQ ID NO: 127606 - DNA, 25 bp, Probe sequence
ggtcatatccctcgttaaaaactat

SEQ ID NO: 127607 - DNA, 25 bp, Probe sequence
tacacgggtcatatccctcgttaaa

SEQ ID NO: 127608 - DNA, 25 bp, Probe sequence
taaaaacattgcttaccacttttca

SEQ ID NO: 127609 - DNA, 25 bp, Probe sequence
ttaaactttatgaaacgtgttatat

SEQ ID NO: 127610 - DNA, 25 bp, Probe sequence
atagttacacagggcaaacgctgaa

SEQ ID NO: 127611 - DNA, 25 bp, Probe sequence
aactatcatttctaaatcgcgcatt

SEQ ID NO: 127612 - DNA, 25 bp, Probe sequence
aaccgtcattatatttctggattca

SEQ ID NO: 127613 - DNA, 25 bp, Probe sequence
aagtcaattttcataaaccgtcatt

SEQ ID NO: 127614 - DNA, 25 bp, Probe sequence
aatcgcgcattatgaagtcaatttt

SEQ ID NO: 127615 - DNA, 25 bp, Probe sequence
aatcccctcactactgctaatagtg

SEQ ID NO: 127616 - DNA, 25 bp, Probe sequence
aattgcgtttgtctttttagtatga

SEQ ID NO: 127617 - DNA, 25 bp, Probe sequence
aattctatattaatgtcttccgcaa

SEQ ID NO: 127618 - DNA, 25 bp, Probe sequence
gcaaatctcaaatatctggaaccta

SEQ ID NO: 127619 - DNA, 25 bp, Probe sequence
gaatgatcgaacttataatttctta

SEQ ID NO: 127620 - DNA, 25 bp, Probe sequence
gattagatcggcctatactaaagta

SEQ ID NO: 127621 - DNA, 25 bp, Probe sequence
gttctattgtagtcatggttaatca

SEQ ID NO: 127622 - DNA, 25 bp, Probe sequence
gtcttccgcaatttataatctaaca

SEQ ID NO: 127623 - DNA, 25 bp, Probe sequence
tctggaacctaataaatcccctcac

SEQ ID NO: 127624 - DNA, 25 bp, Probe sequence
ttcttattgattgcttctactgaca

SEQ ID NO: 127625 - DNA, 25 bp, Probe sequence
attcatttccttccaattgtgatgt

SEQ ID NO: 127626 - DNA, 25 bp, Probe sequence
acatgtaattacattgtgatttgta

SEQ ID NO: 127627 - DNA, 25 bp, Probe sequence
acatgtacgattagatttgtaatac

SEQ ID NO: 127628 - DNA, 25 bp, Probe sequence
aaaattgccttcattacattatata

SEQ ID NO: 127629 - DNA, 25 bp, Probe sequence
aatcgttatttgtaatactaagtat

SEQ ID NO: 127630 - DNA, 25 bp, Probe sequence
aatacataaaaattgccttcattac

SEQ ID NO: 127631 - DNA, 25 bp, Probe sequence
cattacattatataacctttgttag

SEQ ID NO: 127632 - DNA, 25 bp, Probe sequence
ctaagtattccaaaaatgcatgagt

SEQ ID NO: 127633 - DNA, 25 bp, Probe sequence
gccttcattacattatataaccttt

SEQ ID NO: 127634 - DNA, 25 bp, Probe sequence
gatagttacgcaaaattaatgatgt

SEQ ID NO: 127635 - DNA, 25 bp, Probe sequence
gtttatcaaaattttacatgtacga

SEQ ID NO: 127636 - DNA, 25 bp, Probe sequence
gtgatttgtaatctaatgatagtta

SEQ ID NO: 127637 - DNA, 25 bp, Probe sequence
tccaattgtgatgtatagatgtgta

SEQ ID NO: 127638 - DNA, 25 bp, Probe sequence
tttccttccaattgtgatgtataga

SEQ ID NO: 127639 - DNA, 25 bp, Probe sequence
ttatattcatttccttccaattgtg

SEQ ID NO: 127640 - DNA, 25 bp, Probe sequence
aggtcactccttattttgataatac

SEQ ID NO: 127641 - DNA, 25 bp, Probe sequence
agaacacaatcgtctggttatcgtc

SEQ ID NO: 127642 - DNA, 25 bp, Probe sequence
actccttattttgataatactcttt

SEQ ID NO: 127643 - DNA, 25 bp, Probe sequence
acacaatcgtctggttatcgtccac

SEQ ID NO: 127644 - DNA, 25 bp, Probe sequence
aatactctttaattaaggctcttga

SEQ ID NO: 127645 - DNA, 25 bp, Probe sequence
ctttcccttgaaccactatgattag

SEQ ID NO: 127646 - DNA, 25 bp, Probe sequence
gttctttcccttgaaccactatgat

SEQ ID NO: 127647 - DNA, 25 bp, Probe sequence
gaacacaatcgtctggttatcgtcc

SEQ ID NO: 127648 - DNA, 25 bp, Probe sequence
gtcactccttattttgataatactc

SEQ ID NO: 127649 - DNA, 25 bp, Probe sequence
tgaaccactatgattagaacacaat

SEQ ID NO: 127650 - DNA, 25 bp, Probe sequence
tcccttgaaccactatgattagaac

SEQ ID NO: 127651 - DNA, 25 bp, Probe sequence
tttcccttgaaccactatgattaga

SEQ ID NO: 127652 - DNA, 25 bp, Probe sequence
taaggctcttgagttatcgtccggt

SEQ ID NO: 127653 - DNA, 25 bp, Probe sequence
ttaggtcactccttattttgataat

SEQ ID NO: 127654 - DNA, 25 bp, Probe sequence
ttctttcccttgaaccactatgatt

SEQ ID NO: 127655 - DNA, 25 bp, Probe sequence
atactctacacatttcatattcccc

SEQ ID NO: 127656 - DNA, 25 bp, Probe sequence
atacgtgtaaatcaataatccatag

SEQ ID NO: 127657 - DNA, 25 bp, Probe sequence
aggaaagtccatttatactctacac

SEQ ID NO: 127658 - DNA, 25 bp, Probe sequence
acgtgtaaatcaataatccatagtt

SEQ ID NO: 127659 - DNA, 25 bp, Probe sequence
aagtccatttatactctacacattt

SEQ ID NO: 127660 - DNA, 25 bp, Probe sequence
aataatccatagttgaattaattct

SEQ ID NO: 127661 - DNA, 25 bp, Probe sequence
aattaattctattcctaagacatta

SEQ ID NO: 127662 - DNA, 25 bp, Probe sequence
aattctattcctaagacattaaata

SEQ ID NO: 127663 - DNA, 25 bp, Probe sequence
catttatactctacacatttcatat

SEQ ID NO: 127664 - DNA, 25 bp, Probe sequence
gaaagtccatttatactctacacat

SEQ ID NO: 127665 - DNA, 25 bp, Probe sequence
gttgaattaattctattcctaagac

SEQ ID NO: 127666 - DNA, 25 bp, Probe sequence
gtccatttatactctacacatttca

SEQ ID NO: 127667 - DNA, 25 bp, Probe sequence
ggaaagtccatttatactctacaca

SEQ ID NO: 127668 - DNA, 25 bp, Probe sequence
tccatttatactctacacatttcat

SEQ ID NO: 127669 - DNA, 25 bp, Probe sequence
tatactctacacatttcatattccc

SEQ ID NO: 127670 - DNA, 25 bp, Probe sequence
atagttgcatatactgtcttaaggc

SEQ ID NO: 127671 - DNA, 25 bp, Probe sequence
ataaaaatctgctggctggtggtaa

SEQ ID NO: 127672 - DNA, 25 bp, Probe sequence
aaaatctgctggctggtggtaaatt

SEQ ID NO: 127673 - DNA, 25 bp, Probe sequence
aaggcatgatattaaaggatttcta

SEQ ID NO: 127674 - DNA, 25 bp, Probe sequence
aatctgctggctggtggtaaatttc

SEQ ID NO: 127675 - DNA, 25 bp, Probe sequence
ctttaggatttcgtatagttgcata

SEQ ID NO: 127676 - DNA, 25 bp, Probe sequence
gctggctggtggtaaatttcaaaag

SEQ ID NO: 127677 - DNA, 25 bp, Probe sequence
gcatatactgtcttaaggcatgata

SEQ ID NO: 127678 - DNA, 25 bp, Probe sequence
gatagtattgggtttcctctaattt

SEQ ID NO: 127679 - DNA, 25 bp, Probe sequence
gttgcatatactgtcttaaggcatg

SEQ ID NO: 127680 - DNA, 25 bp, Probe sequence
ggatttctaatttttttgatagtat

SEQ ID NO: 127681 - DNA, 25 bp, Probe sequence
tctgctggctggtggtaaatttcaa

SEQ ID NO: 127682 - DNA, 25 bp, Probe sequence
tataataaaaatctgctggctggtg

SEQ ID NO: 127683 - DNA, 25 bp, Probe sequence
tatactgtcttaaggcatgatatta

SEQ ID NO: 127684 - DNA, 25 bp, Probe sequence
tttttgatagtattgggtttcctct

SEQ ID NO: 127685 - DNA, 25 bp, Probe sequence
attgtataccttaattcttagataa

SEQ ID NO: 127686 - DNA, 25 bp, Probe sequence
attcttagataagacgactcgctta

SEQ ID NO: 127687 - DNA, 25 bp, Probe sequence
atctcaaaaaatgacctcttaaatt

SEQ ID NO: 127688 - DNA, 25 bp, Probe sequence
agcaactcttgctaaaccatcttct

SEQ ID NO: 127689 - DNA, 25 bp, Probe sequence
actcttgctaaaccatcttctttta

SEQ ID NO: 127690 - DNA, 25 bp, Probe sequence
aaccatcttcttttaattattacat

SEQ ID NO: 127691 - DNA, 25 bp, Probe sequence
aatcaattgtataccttaattctta

SEQ ID NO: 127692 - DNA, 25 bp, Probe sequence
aattatctcaaaaaatgacctctta

SEQ ID NO: 127693 - DNA, 25 bp, Probe sequence
cttgctaaaccatcttcttttaatt

SEQ ID NO: 127694 - DNA, 25 bp, Probe sequence
gctaaaccatcttcttttaattatt

SEQ ID NO: 127695 - DNA, 25 bp, Probe sequence
taagacgactcgcttatcagacact

SEQ ID NO: 127696 - DNA, 25 bp, Probe sequence
tattacattatttagtcgttagggg

SEQ ID NO: 127697 - DNA, 25 bp, Probe sequence
tttttatctaaatgagcaactcttg

SEQ ID NO: 127698 - DNA, 25 bp, Probe sequence
ttactgtaatcaattgtatacctta

SEQ ID NO: 127699 - DNA, 25 bp, Probe sequence
ttaattctccattttttatctaaat

SEQ ID NO: 127700 - DNA, 25 bp, Probe sequence
atactcaccacacagtgtattatat

SEQ ID NO: 127701 - DNA, 25 bp, Probe sequence
agaacagcatgacaaaataattttt

SEQ ID NO: 127702 - DNA, 25 bp, Probe sequence
accacacagtgtattatattaagaa

SEQ ID NO: 127703 - DNA, 25 bp, Probe sequence
actcaccacacagtgtattatatta

SEQ ID NO: 127704 - DNA, 25 bp, Probe sequence
acagcatgacaaaataatttttcga

SEQ ID NO: 127705 - DNA, 25 bp, Probe sequence
aaataatttttcgaatataatatat

SEQ ID NO: 127706 - DNA, 25 bp, Probe sequence
caccacacagtgtattatattaaga

SEQ ID NO: 127707 - DNA, 25 bp, Probe sequence
ctcaccacacagtgtattatattaa

SEQ ID NO: 127708 - DNA, 25 bp, Probe sequence
ccacacagtgtattatattaagaac

SEQ ID NO: 127709 - DNA, 25 bp, Probe sequence
gcatgacaaaataatttttcgaata

SEQ ID NO: 127710 - DNA, 25 bp, Probe sequence
gaacagcatgacaaaataatttttc

SEQ ID NO: 127711 - DNA, 25 bp, Probe sequence
gtattatattaagaacagcatgaca

SEQ ID NO: 127712 - DNA, 25 bp, Probe sequence
tactcaccacacagtgtattatatt

SEQ ID NO: 127713 - DNA, 25 bp, Probe sequence
tattatattaagaacagcatgacaa

SEQ ID NO: 127714 - DNA, 25 bp, Probe sequence
ttatattaagaacagcatgacaaaa

SEQ ID NO: 127715 - DNA, 25 bp, Probe sequence
attcctagcttccttgaaacatcac

SEQ ID NO: 127716 - DNA, 25 bp, Probe sequence
attcgcttcagtgaaagctctaatt

SEQ ID NO: 127717 - DNA, 25 bp, Probe sequence
atactcaaaaattcctagcttcctt

SEQ ID NO: 127718 - DNA, 25 bp, Probe sequence
acatcactatcttcatataaactta

SEQ ID NO: 127719 - DNA, 25 bp, Probe sequence
aataggacaatttgaagcttcactt

SEQ ID NO: 127720 - DNA, 25 bp, Probe sequence
aattccatatatgtgtttggtgatc

SEQ ID NO: 127721 - DNA, 25 bp, Probe sequence
gcttccttgaaacatcactatcttc

SEQ ID NO: 127722 - DNA, 25 bp, Probe sequence
gcattattagtttgctcttgatatt

SEQ ID NO: 127723 - DNA, 25 bp, Probe sequence
gaagcttcactttttcgagcattat

SEQ ID NO: 127724 - DNA, 25 bp, Probe sequence
gatatgtttcatataaacttctcta

SEQ ID NO: 127725 - DNA, 25 bp, Probe sequence
gtttgctcttgatatttagactttt

SEQ ID NO: 127726 - DNA, 25 bp, Probe sequence
gtgatcatattgtaaatctgtatta

SEQ ID NO: 127727 - DNA, 25 bp, Probe sequence
tataaattctaatttttctccgctt

SEQ ID NO: 127728 - DNA, 25 bp, Probe sequence
ttttctccgcttaataaatactcaa

SEQ ID NO: 127729 - DNA, 25 bp, Probe sequence
ttagactttttattcgcttcagtga

SEQ ID NO: 127730 - DNA, 25 bp, Probe sequence
atacgattttcctgtgatttttact

SEQ ID NO: 127731 - DNA, 25 bp, Probe sequence
atggacctgactagattgcatttct

SEQ ID NO: 127732 - DNA, 25 bp, Probe sequence
actttgccattttttgctgattagc

SEQ ID NO: 127733 - DNA, 25 bp, Probe sequence
aaattcatactttgcttttgttata

SEQ ID NO: 127734 - DNA, 25 bp, Probe sequence
aagtatatcattttttcttcacgat

SEQ ID NO: 127735 - DNA, 25 bp, Probe sequence
gctttctcctcttataaatatcttc

SEQ ID NO: 127736 - DNA, 25 bp, Probe sequence
gcaatatcctatccaaaatcgcatt

SEQ ID NO: 127737 - DNA, 25 bp, Probe sequence
gagcttcttctaatatttcttatct

SEQ ID NO: 127738 - DNA, 25 bp, Probe sequence
tccattaatatcacctttacttccc

SEQ ID NO: 127739 - DNA, 25 bp, Probe sequence
gtattagccattagctttctcctct

SEQ ID NO: 127740 - DNA, 25 bp, Probe sequence
tcgcatttgcgattttgggatcatc

SEQ ID NO: 127741 - DNA, 25 bp, Probe sequence
tactcctcatgataaaatgccacct

SEQ ID NO: 127742 - DNA, 25 bp, Probe sequence
tatcggttgtctgtgaatcgtctac

SEQ ID NO: 127743 - DNA, 25 bp, Probe sequence
ttcccccatttagagcttcttctaa

SEQ ID NO: 127744 - DNA, 25 bp, Probe sequence
ttgcaatcaaaactatactcctcat

SEQ ID NO: 127745 - DNA, 25 bp, Probe sequence
atagcttcaggcatactcgtgcttc

SEQ ID NO: 127746 - DNA, 25 bp, Probe sequence
agatacacgttcatagcttcaggca

SEQ ID NO: 127747 - DNA, 25 bp, Probe sequence
cacgttcatagcttcaggcatactc

SEQ ID NO: 127748 - DNA, 25 bp, Probe sequence
cgtgcttcactattattcgaatcag

SEQ ID NO: 127749 - DNA, 25 bp, Probe sequence
gcgtgtatcgatgcctaatgacgaa

SEQ ID NO: 127750 - DNA, 25 bp, Probe sequence
gcatactcgtgcttcactattattc

SEQ ID NO: 127751 - DNA, 25 bp, Probe sequence
gaatcaggtgcaacaacttaaagaa

SEQ ID NO: 127752 - DNA, 25 bp, Probe sequence
gaggtattctttaaatgatattcaa

SEQ ID NO: 127753 - DNA, 25 bp, Probe sequence
gatataaagacgactatggacattt

SEQ ID NO: 127754 - DNA, 25 bp, Probe sequence
gtagactaaatgaagtacatgcgtg

SEQ ID NO: 127755 - DNA, 25 bp, Probe sequence
gtacatgcgtgtatcgatgcctaat

SEQ ID NO: 127756 - DNA, 25 bp, Probe sequence
tggacatttataaacacattacaaa

SEQ ID NO: 127757 - DNA, 25 bp, Probe sequence
tcttcataagatacacgttcatagc

SEQ ID NO: 127758 - DNA, 25 bp, Probe sequence
tcaggcatactcgtgcttcactatt

SEQ ID NO: 127759 - DNA, 25 bp, Probe sequence
tattcgaatcaggtgcaacaactta

SEQ ID NO: 127760 - DNA, 25 bp, Probe sequence
atcgaggtgttttgtatatatcgtc

SEQ ID NO: 127761 - DNA, 25 bp, Probe sequence
aggtgttttgtatatatcgtccgac

SEQ ID NO: 127762 - DNA, 25 bp, Probe sequence
acgcaaaaaaacacctcgacataat

SEQ ID NO: 127763 - DNA, 25 bp, Probe sequence
acataatatcgaggtgttttgtata

SEQ ID NO: 127764 - DNA, 25 bp, Probe sequence
aaaaaacacctcgacataatatcga

SEQ ID NO: 127765 - DNA, 25 bp, Probe sequence
aatatcgaggtgttttgtatatatc

SEQ ID NO: 127766 - DNA, 25 bp, Probe sequence
cacacaaacgcaaaaaaacacctcg

SEQ ID NO: 127767 - DNA, 25 bp, Probe sequence
caaaaaaacacctcgacataatatc

SEQ ID NO: 127768 - DNA, 25 bp, Probe sequence
caaacgcaaaaaaacacctcgacat

SEQ ID NO: 127769 - DNA, 25 bp, Probe sequence
cgaggtgttttgtatatatcgtccg

SEQ ID NO: 127770 - DNA, 25 bp, Probe sequence
gcaaaaaaacacctcgacataatat

SEQ ID NO: 127771 - DNA, 25 bp, Probe sequence
gacataatatcgaggtgttttgtat

SEQ ID NO: 127772 - DNA, 25 bp, Probe sequence
gaggtgttttgtatatatcgtccga

SEQ ID NO: 127773 - DNA, 25 bp, Probe sequence
gtgttttgtatatatcgtccgacaa

SEQ ID NO: 127774 - DNA, 25 bp, Probe sequence
ggtgttttgtatatatcgtccgaca

SEQ ID NO: 127775 - DNA, 25 bp, Probe sequence
ttccggggcttatcgtggggtggat

SEQ ID NO: 127776 - DNA, 25 bp, Probe sequence
acaataccgttaataatcttataat

SEQ ID NO: 127777 - DNA, 25 bp, Probe sequence
aaacagtttcataacctaatagatg

SEQ ID NO: 127778 - DNA, 25 bp, Probe sequence
aatcttataatttcacaagcttttt

SEQ ID NO: 127779 - DNA, 25 bp, Probe sequence
aataaatgcttctattcaagctata

SEQ ID NO: 127780 - DNA, 25 bp, Probe sequence
ctgttgttcgtttctgcttatatat

SEQ ID NO: 127781 - DNA, 25 bp, Probe sequence
gttcgtttctgcttatatatcttgt

SEQ ID NO: 127782 - DNA, 25 bp, Probe sequence
gttaactgttgttcgtttctgctta

SEQ ID NO: 127783 - DNA, 25 bp, Probe sequence
tgtaacacaataagtttccggggct

SEQ ID NO: 127784 - DNA, 25 bp, Probe sequence
ggggcttatcgtggggtggatataa

SEQ ID NO: 127785 - DNA, 25 bp, Probe sequence
tgatttcatttgtttcatttttaaa

SEQ ID NO: 127786 - DNA, 25 bp, Probe sequence
tctgcttatatatcttgtaacacaa

SEQ ID NO: 127787 - DNA, 25 bp, Probe sequence
taatttcatttattttgttaactgt

SEQ ID NO: 127788 - DNA, 25 bp, Probe sequence
tattcaagctataaacagtttcata

SEQ ID NO: 127789 - DNA, 25 bp, Probe sequence
ttcacaagctttttgtcaatggcaa

SEQ ID NO: 127790 - DNA, 25 bp, Probe sequence
atcgttgcactcatttgctttatat

SEQ ID NO: 127791 - DNA, 25 bp, Probe sequence
caataaaaaagcgcgcaccccatca

SEQ ID NO: 127792 - DNA, 25 bp, Probe sequence
aagtccgatatcttattcaataaaa

SEQ ID NO: 127793 - DNA, 25 bp, Probe sequence
caaactagcttgatcatatttttag

SEQ ID NO: 127794 - DNA, 25 bp, Probe sequence
gcgcaccccatcataagtttgttga

SEQ ID NO: 127795 - DNA, 25 bp, Probe sequence
gatggggtactctgagctagacaat

SEQ ID NO: 127796 - DNA, 25 bp, Probe sequence
gtggcaaacattatcgttgcactca

SEQ ID NO: 127797 - DNA, 25 bp, Probe sequence
ggtggtcgcgtttggttcaacgata

SEQ ID NO: 127798 - DNA, 25 bp, Probe sequence
ggttcaacgataatactttcacttc

SEQ ID NO: 127799 - DNA, 25 bp, Probe sequence
ggacatttattcctctctaacaatt

SEQ ID NO: 127800 - DNA, 25 bp, Probe sequence
tgagttcacgctttaaatctttatt

SEQ ID NO: 127801 - DNA, 25 bp, Probe sequence
tcatatttttagattcgcactcaaa

SEQ ID NO: 127802 - DNA, 25 bp, Probe sequence
taatataggggtggtcgcgtttggt

SEQ ID NO: 127803 - DNA, 25 bp, Probe sequence
taagtttgttgagttcacgctttaa

SEQ ID NO: 127804 - DNA, 25 bp, Probe sequence
tactttcacttcattcagttctagt

SEQ ID NO: 127805 - DNA, 25 bp, Probe sequence
atcctccttatatacgtcgacttaa

SEQ ID NO: 127806 - DNA, 25 bp, Probe sequence
atgtttgctcagtgacctgtaacaa

SEQ ID NO: 127807 - DNA, 25 bp, Probe sequence
aaatgtttgctcagtgacctgtaac

SEQ ID NO: 127808 - DNA, 25 bp, Probe sequence
cagtgacctgtaacaataccatcat

SEQ ID NO: 127809 - DNA, 25 bp, Probe sequence
ctcagtgacctgtaacaataccatc

SEQ ID NO: 127810 - DNA, 25 bp, Probe sequence
ctccttatatacgtcgacttaattt

SEQ ID NO: 127811 - DNA, 25 bp, Probe sequence
gtttgctcagtgacctgtaacaata

SEQ ID NO: 127812 - DNA, 25 bp, Probe sequence
gtgacctgtaacaataccatcataa

SEQ ID NO: 127813 - DNA, 25 bp, Probe sequence
tgacctgtaacaataccatcataaa

SEQ ID NO: 127814 - DNA, 25 bp, Probe sequence
tgctcagtgacctgtaacaatacca

SEQ ID NO: 127815 - DNA, 25 bp, Probe sequence
tcctccttatatacgtcgacttaat

SEQ ID NO: 127816 - DNA, 25 bp, Probe sequence
tcgacttaatttaaaatgtttgctc

SEQ ID NO: 127817 - DNA, 25 bp, Probe sequence
taaaatgtttgctcagtgacctgta

SEQ ID NO: 127818 - DNA, 25 bp, Probe sequence
tatcctccttatatacgtcgactta

SEQ ID NO: 127819 - DNA, 25 bp, Probe sequence
ttaaaatgtttgctcagtgacctgt

SEQ ID NO: 127820 - DNA, 25 bp, Probe sequence
attatcgttaattgccactctcatc

SEQ ID NO: 127821 - DNA, 25 bp, Probe sequence
acaactttattgttacgaatctatc

SEQ ID NO: 127822 - DNA, 25 bp, Probe sequence
aaaatagaccgctaaaagttgatct

SEQ ID NO: 127823 - DNA, 25 bp, Probe sequence
cactctcatctatctaatatgatta

SEQ ID NO: 127824 - DNA, 25 bp, Probe sequence
catgcctcacttaaaatagaccgct

SEQ ID NO: 127825 - DNA, 25 bp, Probe sequence
gcctcacttaaaatagaccgctaaa

SEQ ID NO: 127826 - DNA, 25 bp, Probe sequence
gccactctcatctatctaatatgat

SEQ ID NO: 127827 - DNA, 25 bp, Probe sequence
gttacgaatctatcagtgattaatt

SEQ ID NO: 127828 - DNA, 25 bp, Probe sequence
ggtaatcgtcaatagacaactttat

SEQ ID NO: 127829 - DNA, 25 bp, Probe sequence
tatgattaaatcatgcctcacttaa

SEQ ID NO: 127830 - DNA, 25 bp, Probe sequence
tatcgttaattgccactctcatcta

SEQ ID NO: 127831 - DNA, 25 bp, Probe sequence
tttattgttacgaatctatcagtga

SEQ ID NO: 127832 - DNA, 25 bp, Probe sequence
ttttgcaatagtaaggtaatcgtca

SEQ ID NO: 127833 - DNA, 25 bp, Probe sequence
ttaattgccactctcatctatctaa

SEQ ID NO: 127834 - DNA, 25 bp, Probe sequence
ttgccactctcatctatctaatatg

SEQ ID NO: 127835 - DNA, 25 bp, Probe sequence
caaagcggccgggtgtgtcagtaac

SEQ ID NO: 127836 - DNA, 25 bp, Probe sequence
catcgcttttcttaaagtccaacgt

SEQ ID NO: 127837 - DNA, 25 bp, Probe sequence
catttagtgatagacttctccacga

SEQ ID NO: 127838 - DNA, 25 bp, Probe sequence
ccctccttattcgtctacatttagt

SEQ ID NO: 127839 - DNA, 25 bp, Probe sequence
gaaaactatcttacacagcgccatg

SEQ ID NO: 127840 - DNA, 25 bp, Probe sequence
gacttctccacgaaaactatcttac

SEQ ID NO: 127841 - DNA, 25 bp, Probe sequence
gtaaattcgtaccttgaatcatttt

SEQ ID NO: 127842 - DNA, 25 bp, Probe sequence
gtcagttcaactattttcgagatat

SEQ ID NO: 127843 - DNA, 25 bp, Probe sequence
gtccaacgttagttatattacacga

SEQ ID NO: 127844 - DNA, 25 bp, Probe sequence
tcgagatattttttatttccttctt

SEQ ID NO: 127845 - DNA, 25 bp, Probe sequence
tcaaggcttttcacataatttttct

SEQ ID NO: 127846 - DNA, 25 bp, Probe sequence
tacacagcgccatggcaaagcggcc

SEQ ID NO: 127847 - DNA, 25 bp, Probe sequence
taatttttctatctgtctaacacat

SEQ ID NO: 127848 - DNA, 25 bp, Probe sequence
taacacatacttttatattttactt

SEQ ID NO: 127849 - DNA, 25 bp, Probe sequence
ttcgcttcatcgcttttcttaaagt

SEQ ID NO: 127850 - DNA, 25 bp, Probe sequence
atattgctttatgttatttcgcttc

SEQ ID NO: 127851 - DNA, 25 bp, Probe sequence
atatcggatatttaaagacattcat

SEQ ID NO: 127852 - DNA, 25 bp, Probe sequence
accaatcattggcagtcgttttttg

SEQ ID NO: 127853 - DNA, 25 bp, Probe sequence
aaacgactaccaatcattggcagtc

SEQ ID NO: 127854 - DNA, 25 bp, Probe sequence
aaagacattcataatattgctttat

SEQ ID NO: 127855 - DNA, 25 bp, Probe sequence
gctttatgttatttcgcttcttatt

SEQ ID NO: 127856 - DNA, 25 bp, Probe sequence
gcttcttattttatccttacttcaa

SEQ ID NO: 127857 - DNA, 25 bp, Probe sequence
gaaaaaacgactaccaatcattggc

SEQ ID NO: 127858 - DNA, 25 bp, Probe sequence
gttatttcgcttcttattttatcct

SEQ ID NO: 127859 - DNA, 25 bp, Probe sequence
tggcagtcgttttttgtgtctggat

SEQ ID NO: 127860 - DNA, 25 bp, Probe sequence
tcattggcagtcgttttttgtgtct

SEQ ID NO: 127861 - DNA, 25 bp, Probe sequence
tagaagaaacacgtccaacaatttt

SEQ ID NO: 127862 - DNA, 25 bp, Probe sequence
tatttcgcttcttattttatcctta

SEQ ID NO: 127863 - DNA, 25 bp, Probe sequence
ttcttattttatccttacttcaaag

SEQ ID NO: 127864 - DNA, 25 bp, Probe sequence
ttgctttatgttatttcgcttctta

SEQ ID NO: 127865 - DNA, 25 bp, Probe sequence
ataccttaatagtttaatatcattc

SEQ ID NO: 127866 - DNA, 25 bp, Probe sequence
aatagtttaatatcattcttaataa

SEQ ID NO: 127867 - DNA, 25 bp, Probe sequence
ctgattcaactttgttcgattttat

SEQ ID NO: 127868 - DNA, 25 bp, Probe sequence
cgtttttctgattcaactttgttcg

SEQ ID NO: 127869 - DNA, 25 bp, Probe sequence
gcgaacttttcgtttttctgattca

SEQ ID NO: 127870 - DNA, 25 bp, Probe sequence
gaatggatgctcctttttttaaaat

SEQ ID NO: 127871 - DNA, 25 bp, Probe sequence
gtttttctgattcaactttgttcga

SEQ ID NO: 127872 - DNA, 25 bp, Probe sequence
tcgtttttctgattcaactttgttc

SEQ ID NO: 127873 - DNA, 25 bp, Probe sequence
ttcgtttttctgattcaactttgtt

SEQ ID NO: 127874 - DNA, 25 bp, Probe sequence
tttctgattcaactttgttcgattt

SEQ ID NO: 127875 - DNA, 25 bp, Probe sequence
tttcgtttttctgattcaactttgt

SEQ ID NO: 127876 - DNA, 25 bp, Probe sequence
tttttctgattcaactttgttcgat

SEQ ID NO: 127877 - DNA, 25 bp, Probe sequence
ttttcgtttttctgattcaactttg

SEQ ID NO: 127878 - DNA, 25 bp, Probe sequence
ttttctgattcaactttgttcgatt

SEQ ID NO: 127879 - DNA, 25 bp, Probe sequence
ttctgattcaactttgttcgatttt

SEQ ID NO: 127880 - DNA, 25 bp, Probe sequence
agcaaataccccacagtacttcatt

SEQ ID NO: 127881 - DNA, 25 bp, Probe sequence
accaagcaaataccccacagtactt

SEQ ID NO: 127882 - DNA, 25 bp, Probe sequence
acagtacttcattagcatgtattgt

SEQ ID NO: 127883 - DNA, 25 bp, Probe sequence
aaataccccacagtacttcattagc

SEQ ID NO: 127884 - DNA, 25 bp, Probe sequence
aatgctttacaataacatgcaagtg

SEQ ID NO: 127885 - DNA, 25 bp, Probe sequence
aataccaagcaaataccccacagta

SEQ ID NO: 127886 - DNA, 25 bp, Probe sequence
catgcaagtgtcaattaaggggagc

SEQ ID NO: 127887 - DNA, 25 bp, Probe sequence
ccccacagtacttcattagcatgta

SEQ ID NO: 127888 - DNA, 25 bp, Probe sequence
gcatgtattgtgggtttttctactt

SEQ ID NO: 127889 - DNA, 25 bp, Probe sequence
gtgtcaattaaggggagcacttgca

SEQ ID NO: 127890 - DNA, 25 bp, Probe sequence
gggagcacttgcaaaaatagtatag

SEQ ID NO: 127891 - DNA, 25 bp, Probe sequence
ggcagaatgctttacaataacatgc

SEQ ID NO: 127892 - DNA, 25 bp, Probe sequence
taccccacagtacttcattagcatg

SEQ ID NO: 127893 - DNA, 25 bp, Probe sequence
tagttgttttttactattagggcag

SEQ ID NO: 127894 - DNA, 25 bp, Probe sequence
ttttactattagggcagaatgcttt

SEQ ID NO: 127895 - DNA, 25 bp, Probe sequence
attttacgttgaatgttcctctata

SEQ ID NO: 127896 - DNA, 25 bp, Probe sequence
ataaccattcacttatagaatgatt

SEQ ID NO: 127897 - DNA, 25 bp, Probe sequence
atcacttctgaaaataaccattcac

SEQ ID NO: 127898 - DNA, 25 bp, Probe sequence
acgtaaaaatgtaatcacttctgaa

SEQ ID NO: 127899 - DNA, 25 bp, Probe sequence
acttctgaaaataaccattcactta

SEQ ID NO: 127900 - DNA, 25 bp, Probe sequence
cgttgaatgttcctctatatgtcct

SEQ ID NO: 127901 - DNA, 25 bp, Probe sequence
gaattttacgttgaatgttcctcta

SEQ ID NO: 127902 - DNA, 25 bp, Probe sequence
gaaaataaccattcacttatagaat

SEQ ID NO: 127903 - DNA, 25 bp, Probe sequence
gttgaatgttcctctatatgtccta

SEQ ID NO: 127904 - DNA, 25 bp, Probe sequence
gtaacgtaaaaatgtaatcacttct

SEQ ID NO: 127905 - DNA, 25 bp, Probe sequence
gtaatcacttctgaaaataaccatt

SEQ ID NO: 127906 - DNA, 25 bp, Probe sequence
tacgttgaatgttcctctatatgtc

SEQ ID NO: 127907 - DNA, 25 bp, Probe sequence
tttacgttgaatgttcctctatatg

SEQ ID NO: 127908 - DNA, 25 bp, Probe sequence
ttaaatactcatgtaacgtaaaaat

SEQ ID NO: 127909 - DNA, 25 bp, Probe sequence
ttgaatgttcctctatatgtcctag

SEQ ID NO: 127910 - DNA, 25 bp, Probe sequence
acatgttgtggtaaagggggctctc

SEQ ID NO: 127911 - DNA, 25 bp, Probe sequence
aagcccccttttcacaatatgcatt

SEQ ID NO: 127912 - DNA, 25 bp, Probe sequence
aatggattttattttcaaatgtgta

SEQ ID NO: 127913 - DNA, 25 bp, Probe sequence
caatatgcatttacatgttgtggta

SEQ ID NO: 127914 - DNA, 25 bp, Probe sequence
ctatgtcataaataaaagccccctt

SEQ ID NO: 127915 - DNA, 25 bp, Probe sequence
cccttttcacaatatgcatttacat

SEQ ID NO: 127916 - DNA, 25 bp, Probe sequence
cccccttttcacaatatgcatttac

SEQ ID NO: 127917 - DNA, 25 bp, Probe sequence
gcccccttttcacaatatgcattta

SEQ ID NO: 127918 - DNA, 25 bp, Probe sequence
gctctcattttctacgaatactaaa

SEQ ID NO: 127919 - DNA, 25 bp, Probe sequence
gttgtggtaaagggggctctcattt

SEQ ID NO: 127920 - DNA, 25 bp, Probe sequence
gtggtaaagggggctctcattttct

SEQ ID NO: 127921 - DNA, 25 bp, Probe sequence
gggctctcattttctacgaatacta

SEQ ID NO: 127922 - DNA, 25 bp, Probe sequence
tggtaaagggggctctcattttcta

SEQ ID NO: 127923 - DNA, 25 bp, Probe sequence
taaaagcccccttttcacaatatgc

SEQ ID NO: 127924 - DNA, 25 bp, Probe sequence
ttctacgaatactaaaatggatttt

SEQ ID NO: 127925 - DNA, 25 bp, Probe sequence
ataactttaacatactccacagata

SEQ ID NO: 127926 - DNA, 25 bp, Probe sequence
atcccttctttcaataatcttcata

SEQ ID NO: 127927 - DNA, 25 bp, Probe sequence
actgtttcatgctataatctacatt

SEQ ID NO: 127928 - DNA, 25 bp, Probe sequence
actttaacatactccacagatattt

SEQ ID NO: 127929 - DNA, 25 bp, Probe sequence
aacatactccacagatattttagaa

SEQ ID NO: 127930 - DNA, 25 bp, Probe sequence
aagtctactgtttcatgctataatc

SEQ ID NO: 127931 - DNA, 25 bp, Probe sequence
aatgcacttaattatatttcaaagg

SEQ ID NO: 127932 - DNA, 25 bp, Probe sequence
aataatcttcataatttataacttt

SEQ ID NO: 127933 - DNA, 25 bp, Probe sequence
cccttctttcaataatcttcataat

SEQ ID NO: 127934 - DNA, 25 bp, Probe sequence
gctataatctacattaaatgcactt

SEQ ID NO: 127935 - DNA, 25 bp, Probe sequence
gtttcatgctataatctacattaaa

SEQ ID NO: 127936 - DNA, 25 bp, Probe sequence
tgttatcccttctttcaataatctt

SEQ ID NO: 127937 - DNA, 25 bp, Probe sequence
tctactgtttcatgctataatctac

SEQ ID NO: 127938 - DNA, 25 bp, Probe sequence
tactccacagatattttagaagtct

SEQ ID NO: 127939 - DNA, 25 bp, Probe sequence
ttagaagtctactgtttcatgctat

SEQ ID NO: 127940 - DNA, 25 bp, Probe sequence
agcaataaatgcttttcgttacata

SEQ ID NO: 127941 - DNA, 25 bp, Probe sequence
agcattgctctgaatacgttatatt

SEQ ID NO: 127942 - DNA, 25 bp, Probe sequence
actagcattgctctgaatacgttat

SEQ ID NO: 127943 - DNA, 25 bp, Probe sequence
aatgcttttcgttacataaatttga

SEQ ID NO: 127944 - DNA, 25 bp, Probe sequence
aatctatcattcaagcaataaatgc

SEQ ID NO: 127945 - DNA, 25 bp, Probe sequence
caacatacacgcatatctatcccaa

SEQ ID NO: 127946 - DNA, 25 bp, Probe sequence
cataaatttgactagcattgctctg

SEQ ID NO: 127947 - DNA, 25 bp, Probe sequence
gctttatttttcgctcaattacatc

SEQ ID NO: 127948 - DNA, 25 bp, Probe sequence
gaatcacaagatgttgtcgtgttat

SEQ ID NO: 127949 - DNA, 25 bp, Probe sequence
gatgttgtcgtgttatgatttagtg

SEQ ID NO: 127950 - DNA, 25 bp, Probe sequence
gatgaattgctttatttttcgctca

SEQ ID NO: 127951 - DNA, 25 bp, Probe sequence
tcgctcaattacatctagaatcaca

SEQ ID NO: 127952 - DNA, 25 bp, Probe sequence
tatttttcgctcaattacatctaga

SEQ ID NO: 127953 - DNA, 25 bp, Probe sequence
ttagtgtttcattaacaacatacac

SEQ ID NO: 127954 - DNA, 25 bp, Probe sequence
ttgtcgtgttatgatttagtgtttc

SEQ ID NO: 127955 - DNA, 25 bp, Probe sequence
ataacataattgcaattttatttta

SEQ ID NO: 127956 - DNA, 25 bp, Probe sequence
atcatgaccgcttttatggctttta

SEQ ID NO: 127957 - DNA, 25 bp, Probe sequence
atgaccgcttttatggcttttatat

SEQ ID NO: 127958 - DNA, 25 bp, Probe sequence
accgcttttatggcttttatattat

SEQ ID NO: 127959 - DNA, 25 bp, Probe sequence
aacacatcgattaaatcgcacgtga

SEQ ID NO: 127960 - DNA, 25 bp, Probe sequence
aatcgcacgtgaaataaggtctaaa

SEQ ID NO: 127961 - DNA, 25 bp, Probe sequence
aatatcatgaccgcttttatggctt

SEQ ID NO: 127962 - DNA, 25 bp, Probe sequence
gaatgccagtattgttttattaaca

SEQ ID NO: 127963 - DNA, 25 bp, Probe sequence
gttgaatgccagtattgttttatta

SEQ ID NO: 127964 - DNA, 25 bp, Probe sequence
gtattgttttattaacacatcgatt

SEQ ID NO: 127965 - DNA, 25 bp, Probe sequence
gtagtcaatatcatgaccgctttta

SEQ ID NO: 127966 - DNA, 25 bp, Probe sequence
gtacatgttgaatgccagtattgtt

SEQ ID NO: 127967 - DNA, 25 bp, Probe sequence
taaaaagccataaaagtagtcaata

SEQ ID NO: 127968 - DNA, 25 bp, Probe sequence
ttttattttattatcgtacatgttg

SEQ ID NO: 127969 - DNA, 25 bp, Probe sequence
ttatcgtacatgttgaatgccagta

SEQ ID NO: 127970 - DNA, 25 bp, Probe sequence
attttactcaaccattctatattgt

SEQ ID NO: 127971 - DNA, 25 bp, Probe sequence
atgacagtcttatgagcgttcagat

SEQ ID NO: 127972 - DNA, 25 bp, Probe sequence
atgagcgttcagatttcagtcgtta

SEQ ID NO: 127973 - DNA, 25 bp, Probe sequence
aaatgacagtcttatgagcgttcag

SEQ ID NO: 127974 - DNA, 25 bp, Probe sequence
aaatctgaacgcaaatgacagtctt

SEQ ID NO: 127975 - DNA, 25 bp, Probe sequence
aaaatattttactcaaccattctat

SEQ ID NO: 127976 - DNA, 25 bp, Probe sequence
aatattttactcaaccattctatat

SEQ ID NO: 127977 - DNA, 25 bp, Probe sequence
gaacgcaaatgacagtcttatgagc

SEQ ID NO: 127978 - DNA, 25 bp, Probe sequence
gacagtcttatgagcgttcagattt

SEQ ID NO: 127979 - DNA, 25 bp, Probe sequence
gagcgttcagatttcagtcgttaat

SEQ ID NO: 127980 - DNA, 25 bp, Probe sequence
gtcttatgagcgttcagatttcagt

SEQ ID NO: 127981 - DNA, 25 bp, Probe sequence
tcaaccattctatattgtgtaaaaa

SEQ ID NO: 127982 - DNA, 25 bp, Probe sequence
tactcaaccattctatattgtgtaa

SEQ ID NO: 127983 - DNA, 25 bp, Probe sequence
tttactcaaccattctatattgtgt

SEQ ID NO: 127984 - DNA, 25 bp, Probe sequence
ttatgagcgttcagatttcagtcgt

SEQ ID NO: 127985 - DNA, 25 bp, Probe sequence
atttttgaaatgtccatgctccaat

SEQ ID NO: 127986 - DNA, 25 bp, Probe sequence
atctaacacgatattcatttctaaa

SEQ ID NO: 127987 - DNA, 25 bp, Probe sequence
atctccttctatttaacaatacctt

SEQ ID NO: 127988 - DNA, 25 bp, Probe sequence
atgttcatatacaattacccctgtt

SEQ ID NO: 127989 - DNA, 25 bp, Probe sequence
aaatttttcctcaagcaaccacatt

SEQ ID NO: 127990 - DNA, 25 bp, Probe sequence
aaatgaaccaacttgacttcaatga

SEQ ID NO: 127991 - DNA, 25 bp, Probe sequence
caattacccctgttataatgtcaat

SEQ ID NO: 127992 - DNA, 25 bp, Probe sequence
caatatactttcatcatctaacacg

SEQ ID NO: 127993 - DNA, 25 bp, Probe sequence
gtccatgctccaattaatagtttag

SEQ ID NO: 127994 - DNA, 25 bp, Probe sequence
gatttatgatatctccttctattta

SEQ ID NO: 127995 - DNA, 25 bp, Probe sequence
gttacctatacttcaatatactttc

SEQ ID NO: 127996 - DNA, 25 bp, Probe sequence
gtttagcaagttcaaatttacccat

SEQ ID NO: 127997 - DNA, 25 bp, Probe sequence
gtttgtatcttatagtgtcgattca

SEQ ID NO: 127998 - DNA, 25 bp, Probe sequence
gtgtcgattcagagcttgtgtaaga

SEQ ID NO: 127999 - DNA, 25 bp, Probe sequence
taatacttttcaactagttacctat

SEQ ID NO: 128000 - DNA, 25 bp, Probe sequence
attgctcccgttttataattactat

SEQ ID NO: 128001 - DNA, 25 bp, Probe sequence
acatgtaattacgcttattttaaca

SEQ ID NO: 128002 - DNA, 25 bp, Probe sequence
aagtataattatttttgctcttaat

SEQ ID NO: 128003 - DNA, 25 bp, Probe sequence
ctattttgtcttaggagatgtcact

SEQ ID NO: 128004 - DNA, 25 bp, Probe sequence
gctcccgttttataattactattgt

SEQ ID NO: 128005 - DNA, 25 bp, Probe sequence
gtatccccctatttacatgtaatta

SEQ ID NO: 128006 - DNA, 25 bp, Probe sequence
tgttgtaaaaaggttagctaagcta

SEQ ID NO: 128007 - DNA, 25 bp, Probe sequence
tccccctatttacatgtaattacgc

SEQ ID NO: 128008 - DNA, 25 bp, Probe sequence
taagctaactattttgtcttaggag

SEQ ID NO: 128009 - DNA, 25 bp, Probe sequence
tagtatccccctatttacatgtaat

SEQ ID NO: 128010 - DNA, 25 bp, Probe sequence
tatattgatttctaattgctcccgt

SEQ ID NO: 128011 - DNA, 25 bp, Probe sequence
tatttttgctcttaataattatata

SEQ ID NO: 128012 - DNA, 25 bp, Probe sequence
tattgatttctaattgctcccgttt

SEQ ID NO: 128013 - DNA, 25 bp, Probe sequence
tttctaattgctcccgttttataat

SEQ ID NO: 128014 - DNA, 25 bp, Probe sequence
ttagctaagctaactattttgtctt

SEQ ID NO: 128015 - DNA, 25 bp, Probe sequence
atttgtctgtccccaagacgcaaat

SEQ ID NO: 128016 - DNA, 25 bp, Probe sequence
atctctattcatcatttgtctgtcc

SEQ ID NO: 128017 - DNA, 25 bp, Probe sequence
atgatgtactgattggcatgctttt

SEQ ID NO: 128018 - DNA, 25 bp, Probe sequence
agcatgccaatctctattcatcatt

SEQ ID NO: 128019 - DNA, 25 bp, Probe sequence
aaaagcatgccaatctctattcatc

SEQ ID NO: 128020 - DNA, 25 bp, Probe sequence
aagcatgccaatctctattcatcat

SEQ ID NO: 128021 - DNA, 25 bp, Probe sequence
catgccaatctctattcatcatttg

SEQ ID NO: 128022 - DNA, 25 bp, Probe sequence
cccaagacgcaaatatgatgtactg

SEQ ID NO: 128023 - DNA, 25 bp, Probe sequence
ccaatctctattcatcatttgtctg

SEQ ID NO: 128024 - DNA, 25 bp, Probe sequence
gtctgtccccaagacgcaaatatga

SEQ ID NO: 128025 - DNA, 25 bp, Probe sequence
gtccccaagacgcaaatatgatgta

SEQ ID NO: 128026 - DNA, 25 bp, Probe sequence
tgccaatctctattcatcatttgtc

SEQ ID NO: 128027 - DNA, 25 bp, Probe sequence
tctctattcatcatttgtctgtccc

SEQ ID NO: 128028 - DNA, 25 bp, Probe sequence
ttgtctgtccccaagacgcaaatat

SEQ ID NO: 128029 - DNA, 25 bp, Probe sequence
ttcatcatttgtctgtccccaagac

SEQ ID NO: 128030 - DNA, 25 bp, Probe sequence
atatatcaaacttagcattttatct

SEQ ID NO: 128031 - DNA, 25 bp, Probe sequence
agatgtttgtaattcatattattat

SEQ ID NO: 128032 - DNA, 25 bp, Probe sequence
aaatattaaattgctggctatatct

SEQ ID NO: 128033 - DNA, 25 bp, Probe sequence
aacttagcattttatctattacaaa

SEQ ID NO: 128034 - DNA, 25 bp, Probe sequence
aatatgatgcctcctatgtttcttc

SEQ ID NO: 128035 - DNA, 25 bp, Probe sequence
ctatgtttcttcttagatgtttgta

SEQ ID NO: 128036 - DNA, 25 bp, Probe sequence
cctcctatgtttcttcttagatgtt

SEQ ID NO: 128037 - DNA, 25 bp, Probe sequence
gcctcctatgtttcttcttagatgt

SEQ ID NO: 128038 - DNA, 25 bp, Probe sequence
gtttcttcttagatgtttgtaattc

SEQ ID NO: 128039 - DNA, 25 bp, Probe sequence
tgcctcctatgtttcttcttagatg

SEQ ID NO: 128040 - DNA, 25 bp, Probe sequence
tcctatgtttcttcttagatgtttg

SEQ ID NO: 128041 - DNA, 25 bp, Probe sequence
tcaaacttagcattttatctattac

SEQ ID NO: 128042 - DNA, 25 bp, Probe sequence
tacaaatattaaattgctggctata

SEQ ID NO: 128043 - DNA, 25 bp, Probe sequence
tagcattttatctattacaaatatt

SEQ ID NO: 128044 - DNA, 25 bp, Probe sequence
ttcatattattatacaattacttaa

SEQ ID NO: 128045 - DNA, 25 bp, Probe sequence
atttaatatgtagtggtccctacac

SEQ ID NO: 128046 - DNA, 25 bp, Probe sequence
atattaaaacatctctaatgattta

SEQ ID NO: 128047 - DNA, 25 bp, Probe sequence
ataatattgtattttagggagtaag

SEQ ID NO: 128048 - DNA, 25 bp, Probe sequence
atgatttaatatgtagtggtcccta

SEQ ID NO: 128049 - DNA, 25 bp, Probe sequence
aaacatctctaatgatttaatatgt

SEQ ID NO: 128050 - DNA, 25 bp, Probe sequence
aaaacatctctaatgatttaatatg

SEQ ID NO: 128051 - DNA, 25 bp, Probe sequence
aatgatttaatatgtagtggtccct

SEQ ID NO: 128052 - DNA, 25 bp, Probe sequence
aatattaaaacatctctaatgattt

SEQ ID NO: 128053 - DNA, 25 bp, Probe sequence
gaaatattaaaacatctctaatgat

SEQ ID NO: 128054 - DNA, 25 bp, Probe sequence
gacagaaatattaaaacatctctaa

SEQ ID NO: 128055 - DNA, 25 bp, Probe sequence
gatttaatatgtagtggtccctaca

SEQ ID NO: 128056 - DNA, 25 bp, Probe sequence
tgtattttagggagtaagacagaaa

SEQ ID NO: 128057 - DNA, 25 bp, Probe sequence
tgatttaatatgtagtggtccctac

SEQ ID NO: 128058 - DNA, 25 bp, Probe sequence
tattgtattttagggagtaagacag

SEQ ID NO: 128059 - DNA, 25 bp, Probe sequence
tttaatatgtagtggtccctacaca

SEQ ID NO: 128060 - DNA, 25 bp, Probe sequence
attttttcatgatatactagatgca

SEQ ID NO: 128061 - DNA, 25 bp, Probe sequence
acttttattttttcatgatatacta

SEQ ID NO: 128062 - DNA, 25 bp, Probe sequence
aacttttattttttcatgatatact

SEQ ID NO: 128063 - DNA, 25 bp, Probe sequence
caaaacttttattttttcatgatat

SEQ ID NO: 128064 - DNA, 25 bp, Probe sequence
cttttattttttcatgatatactag

SEQ ID NO: 128065 - DNA, 25 bp, Probe sequence
gatatactagatgcactaggagggg

SEQ ID NO: 128066 - DNA, 25 bp, Probe sequence
tccaaaacttttattttttcatgat

SEQ ID NO: 128067 - DNA, 25 bp, Probe sequence
tctccaaaacttttattttttcatg

SEQ ID NO: 128068 - DNA, 25 bp, Probe sequence
tcatgatatactagatgcactagga

SEQ ID NO: 128069 - DNA, 25 bp, Probe sequence
taaaaatcatctccaaaacttttat

SEQ ID NO: 128070 - DNA, 25 bp, Probe sequence
tactagatgcactaggaggggtaaa

SEQ ID NO: 128071 - DNA, 25 bp, Probe sequence
tatactagatgcactaggaggggta

SEQ ID NO: 128072 - DNA, 25 bp, Probe sequence
tttcatgatatactagatgcactag

SEQ ID NO: 128073 - DNA, 25 bp, Probe sequence
tttattttttcatgatatactagat

SEQ ID NO: 128074 - DNA, 25 bp, Probe sequence
tttttcatgatatactagatgcact

SEQ ID NO: 128075 - DNA, 25 bp, Probe sequence
aagcattcacttctacaattttaaa

SEQ ID NO: 128076 - DNA, 25 bp, Probe sequence
aatgtctctcaaaaaaactgcccct

SEQ ID NO: 128077 - DNA, 25 bp, Probe sequence
cgcgcgtcaatgtctctcaaaaaaa

SEQ ID NO: 128078 - DNA, 25 bp, Probe sequence
cctttctttttatcattactttcat

SEQ ID NO: 128079 - DNA, 25 bp, Probe sequence
gttctaaactctttaatggcaaata

SEQ ID NO: 128080 - DNA, 25 bp, Probe sequence
gttatcctttctttttatcattact

SEQ ID NO: 128081 - DNA, 25 bp, Probe sequence
tgtctctcaaaaaaactgcccctaa

SEQ ID NO: 128082 - DNA, 25 bp, Probe sequence
taaatacgttctaaactctttaatg

SEQ ID NO: 128083 - DNA, 25 bp, Probe sequence
tactttcattatatgacgcgcgtca

SEQ ID NO: 128084 - DNA, 25 bp, Probe sequence
tacgttctaaactctttaatggcaa

SEQ ID NO: 128085 - DNA, 25 bp, Probe sequence
tatgacgcgcgtcaatgtctctcaa

SEQ ID NO: 128086 - DNA, 25 bp, Probe sequence
tatcctttctttttatcattacttt

SEQ ID NO: 128087 - DNA, 25 bp, Probe sequence
ttaagttatcctttctttttatcat

SEQ ID NO: 128088 - DNA, 25 bp, Probe sequence
ttcacttctacaattttaaatacgt

SEQ ID NO: 128089 - DNA, 25 bp, Probe sequence
ttctttttatcattactttcattat

SEQ ID NO: 128090 - DNA, 25 bp, Probe sequence
atatttattaattgatcccctagta

SEQ ID NO: 128091 - DNA, 25 bp, Probe sequence
atactctcgaattcaatttaaatca

SEQ ID NO: 128092 - DNA, 25 bp, Probe sequence
agaaccgttgcctgtttatatattg

SEQ ID NO: 128093 - DNA, 25 bp, Probe sequence
aacagattgctcgctattaatttta

SEQ ID NO: 128094 - DNA, 25 bp, Probe sequence
aatcaaacagattgctcgctattaa

SEQ ID NO: 128095 - DNA, 25 bp, Probe sequence
aattgatcccctagtatgtatactc

SEQ ID NO: 128096 - DNA, 25 bp, Probe sequence
ccgttgcctgtttatatattgattc

SEQ ID NO: 128097 - DNA, 25 bp, Probe sequence
gaaaagaaccgttgcctgtttatat

SEQ ID NO: 128098 - DNA, 25 bp, Probe sequence
gatcccctagtatgtatactctcga

SEQ ID NO: 128099 - DNA, 25 bp, Probe sequence
gattcaaacaattgtcaaatttgca

SEQ ID NO: 128100 - DNA, 25 bp, Probe sequence
gattgctcgctattaattttataaa

SEQ ID NO: 128101 - DNA, 25 bp, Probe sequence
gttgcctgtttatatattgattcaa

SEQ ID NO: 128102 - DNA, 25 bp, Probe sequence
gtatgtatactctcgaattcaattt

SEQ ID NO: 128103 - DNA, 25 bp, Probe sequence
tatatttgaaaagaaccgttgcctg

SEQ ID NO: 128104 - DNA, 25 bp, Probe sequence
tattaattgatcccctagtatgtat

SEQ ID NO: 128105 - DNA, 25 bp, Probe sequence
actcgaaaccagcttactgcttttt

SEQ ID NO: 128106 - DNA, 25 bp, Probe sequence
aagcagtaagttgatttctactcga

SEQ ID NO: 128107 - DNA, 25 bp, Probe sequence
aagtataagtagctcaaaacaattt

SEQ ID NO: 128108 - DNA, 25 bp, Probe sequence
catattcattatagtgtgtcataat

SEQ ID NO: 128109 - DNA, 25 bp, Probe sequence
ccagcttactgcttttttattctaa

SEQ ID NO: 128110 - DNA, 25 bp, Probe sequence
gcttactgcttttttattctaatac

SEQ ID NO: 128111 - DNA, 25 bp, Probe sequence
gaatcaacaatttaaacgcactatt

SEQ ID NO: 128112 - DNA, 25 bp, Probe sequence
gaacgatattctacatgaatcaaca

SEQ ID NO: 128113 - DNA, 25 bp, Probe sequence
gaaaccagcttactgcttttttatt

SEQ ID NO: 128114 - DNA, 25 bp, Probe sequence
gttgatttctactcgaaaccagctt

SEQ ID NO: 128115 - DNA, 25 bp, Probe sequence
gtgtcataatgaacgatattctaca

SEQ ID NO: 128116 - DNA, 25 bp, Probe sequence
tctaatacaaacctatcatcaatcg

SEQ ID NO: 128117 - DNA, 25 bp, Probe sequence
taaacgcactatttttataagtata

SEQ ID NO: 128118 - DNA, 25 bp, Probe sequence
ttattctaatacaaacctatcatca

SEQ ID NO: 128119 - DNA, 25 bp, Probe sequence
ttctactcgaaaccagcttactgct

SEQ ID NO: 128120 - DNA, 25 bp, Probe sequence
atttcaaagcaacttattcaattac

SEQ ID NO: 128121 - DNA, 25 bp, Probe sequence
ataaatttcaaagcaacttattcaa

SEQ ID NO: 128122 - DNA, 25 bp, Probe sequence
agcaacttattcaattactttatta

SEQ ID NO: 128123 - DNA, 25 bp, Probe sequence
aaatttcaaagcaacttattcaatt

SEQ ID NO: 128124 - DNA, 25 bp, Probe sequence
aaagcaacttattcaattactttat

SEQ ID NO: 128125 - DNA, 25 bp, Probe sequence
aagcaacttattcaattactttatt

SEQ ID NO: 128126 - DNA, 25 bp, Probe sequence
aatttcaaagcaacttattcaatta

SEQ ID NO: 128127 - DNA, 25 bp, Probe sequence
caaagcaacttattcaattacttta

SEQ ID NO: 128128 - DNA, 25 bp, Probe sequence
tcaaagcaacttattcaattacttt

SEQ ID NO: 128129 - DNA, 25 bp, Probe sequence
tcaattactttattatcttaactta

SEQ ID NO: 128130 - DNA, 25 bp, Probe sequence
taaatttcaaagcaacttattcaat

SEQ ID NO: 128131 - DNA, 25 bp, Probe sequence
tataaatttcaaagcaacttattca

SEQ ID NO: 128132 - DNA, 25 bp, Probe sequence
tttcaaagcaacttattcaattact

SEQ ID NO: 128133 - DNA, 25 bp, Probe sequence
tttcacttttataaatttcaaagca

SEQ ID NO: 128134 - DNA, 25 bp, Probe sequence
ttcaaagcaacttattcaattactt

SEQ ID NO: 128135 - DNA, 25 bp, Probe sequence
attatagcaccattgtaaactttaa

SEQ ID NO: 128136 - DNA, 25 bp, Probe sequence
atagcaccattgtaaactttaagaa

SEQ ID NO: 128137 - DNA, 25 bp, Probe sequence
acttcctttcgtatttcatgaccat

SEQ ID NO: 128138 - DNA, 25 bp, Probe sequence
aaaccttaattattctacacagctg

SEQ ID NO: 128139 - DNA, 25 bp, Probe sequence
aaaaccttaattattctacacagct

SEQ ID NO: 128140 - DNA, 25 bp, Probe sequence
aagtttacaataagttgttctatat

SEQ ID NO: 128141 - DNA, 25 bp, Probe sequence
catgaccattattatagcaccattg

SEQ ID NO: 128142 - DNA, 25 bp, Probe sequence
cttcctttcgtatttcatgaccatt

SEQ ID NO: 128143 - DNA, 25 bp, Probe sequence
cctttcgtatttcatgaccattatt

SEQ ID NO: 128144 - DNA, 25 bp, Probe sequence
gaccattattatagcaccattgtaa

SEQ ID NO: 128145 - DNA, 25 bp, Probe sequence
tttcatgaccattattatagcacca

SEQ ID NO: 128146 - DNA, 25 bp, Probe sequence
tttacttcctttcgtatttcatgac

SEQ ID NO: 128147 - DNA, 25 bp, Probe sequence
tttttacttcctttcgtatttcatg

SEQ ID NO: 128148 - DNA, 25 bp, Probe sequence
ttacttcctttcgtatttcatgacc

SEQ ID NO: 128149 - DNA, 25 bp, Probe sequence
ttcctttcgtatttcatgaccatta

SEQ ID NO: 128150 - DNA, 25 bp, Probe sequence
attgatagccattccctgatatccc

SEQ ID NO: 128151 - DNA, 25 bp, Probe sequence
ataacattctgttgtaatcctttta

SEQ ID NO: 128152 - DNA, 25 bp, Probe sequence
aaagagatacattgagctattttct

SEQ ID NO: 128153 - DNA, 25 bp, Probe sequence
aaacctcttcttttattgatagcca

SEQ ID NO: 128154 - DNA, 25 bp, Probe sequence
aaacgttgttatatatctttctaca

SEQ ID NO: 128155 - DNA, 25 bp, Probe sequence
cccccttacatttcattgtccatta

SEQ ID NO: 128156 - DNA, 25 bp, Probe sequence
gaacgataacaacggcacttattat

SEQ ID NO: 128157 - DNA, 25 bp, Probe sequence
gactctcatttcactaacttatata

SEQ ID NO: 128158 - DNA, 25 bp, Probe sequence
gagctattttctcaggtatactact

SEQ ID NO: 128159 - DNA, 25 bp, Probe sequence
gatatgtttcagactctcatttcac

SEQ ID NO: 128160 - DNA, 25 bp, Probe sequence
tccctgatatcccttccataaagta

SEQ ID NO: 128161 - DNA, 25 bp, Probe sequence
tcgaaatcccccttacatttcattg

SEQ ID NO: 128162 - DNA, 25 bp, Probe sequence
tctgttgtaatccttttaaacctct

SEQ ID NO: 128163 - DNA, 25 bp, Probe sequence
tacaaatatctaactttctagctat

SEQ ID NO: 128164 - DNA, 25 bp, Probe sequence
ttctcaggtatactactttagctat

SEQ ID NO: 128165 - DNA, 25 bp, Probe sequence
atttcatctctttatgccaatcaac

SEQ ID NO: 128166 - DNA, 25 bp, Probe sequence
atacaagattgcatatacatttaca

SEQ ID NO: 128167 - DNA, 25 bp, Probe sequence
atcttaacatccctataaatcccca

SEQ ID NO: 128168 - DNA, 25 bp, Probe sequence
agcaaaatatcttaacatccctata

SEQ ID NO: 128169 - DNA, 25 bp, Probe sequence
aatccgaacgtcaaatttcatctct

SEQ ID NO: 128170 - DNA, 25 bp, Probe sequence
caatcaacgatcgatttaccttttt

SEQ ID NO: 128171 - DNA, 25 bp, Probe sequence
aatttcctcctattgaaaatgatta

SEQ ID NO: 128172 - DNA, 25 bp, Probe sequence
gccaatcaacgatcgatttaccttt

SEQ ID NO: 128173 - DNA, 25 bp, Probe sequence
gaacgtcaaatttcatctctttatg

SEQ ID NO: 128174 - DNA, 25 bp, Probe sequence
gaaaatgattatcaattattccaaa

SEQ ID NO: 128175 - DNA, 25 bp, Probe sequence
gtcaaatttcatctctttatgccaa

SEQ ID NO: 128176 - DNA, 25 bp, Probe sequence
tgctatttatttttttattttcgca

SEQ ID NO: 128177 - DNA, 25 bp, Probe sequence
tctctttatgccaatcaacgatcga

SEQ ID NO: 128178 - DNA, 25 bp, Probe sequence
tagctagtgctatttatttttttat

SEQ ID NO: 128179 - DNA, 25 bp, Probe sequence
tatacatttacaatagctagtgcta

SEQ ID NO: 128180 - DNA, 25 bp, Probe sequence
attcgctgtatggtttaaggtgata

SEQ ID NO: 128181 - DNA, 25 bp, Probe sequence
accttaaactatacaattcgctgta

SEQ ID NO: 128182 - DNA, 25 bp, Probe sequence
acaccttaaactatacaattcgctg

SEQ ID NO: 128183 - DNA, 25 bp, Probe sequence
actatacaattcgctgtatggttta

SEQ ID NO: 128184 - DNA, 25 bp, Probe sequence
acaattcgctgtatggtttaaggtg

SEQ ID NO: 128185 - DNA, 25 bp, Probe sequence
aaactatacaattcgctgtatggtt

SEQ ID NO: 128186 - DNA, 25 bp, Probe sequence
aatacaccttaaactatacaattcg

SEQ ID NO: 128187 - DNA, 25 bp, Probe sequence
aattcgctgtatggtttaaggtgat

SEQ ID NO: 128188 - DNA, 25 bp, Probe sequence
caattcgctgtatggtttaaggtga

SEQ ID NO: 128189 - DNA, 25 bp, Probe sequence
caccttaaactatacaattcgctgt

SEQ ID NO: 128190 - DNA, 25 bp, Probe sequence
gctgtatggtttaaggtgatattca

SEQ ID NO: 128191 - DNA, 25 bp, Probe sequence
ggtgatattcaaacaatattaggtt

SEQ ID NO: 128192 - DNA, 25 bp, Probe sequence
tgtatggtttaaggtgatattcaaa

SEQ ID NO: 128193 - DNA, 25 bp, Probe sequence
tacaccttaaactatacaattcgct

SEQ ID NO: 128194 - DNA, 25 bp, Probe sequence
ttcgctgtatggtttaaggtgatat

SEQ ID NO: 128195 - DNA, 25 bp, Probe sequence
attccgctatttgttttcgattaga

SEQ ID NO: 128196 - DNA, 25 bp, Probe sequence
atctttcacctttcctttgaatcat

SEQ ID NO: 128197 - DNA, 25 bp, Probe sequence
actcattaatatactactattctat

SEQ ID NO: 128198 - DNA, 25 bp, Probe sequence
acacattgaactttgtatattactt

SEQ ID NO: 128199 - DNA, 25 bp, Probe sequence
aattttctaattacacattgaactt

SEQ ID NO: 128200 - DNA, 25 bp, Probe sequence
ctttcctttgaatcattactcatta

SEQ ID NO: 128201 - DNA, 25 bp, Probe sequence
ctttgtatattacttgtttatcaca

SEQ ID NO: 128202 - DNA, 25 bp, Probe sequence
gaatcattactcattaatatactac

SEQ ID NO: 128203 - DNA, 25 bp, Probe sequence
gttttcgattagattgtttgcttca

SEQ ID NO: 128204 - DNA, 25 bp, Probe sequence
gtttttacataaatatattccgcta

SEQ ID NO: 128205 - DNA, 25 bp, Probe sequence
gtttatcacaacaattaggattaat

SEQ ID NO: 128206 - DNA, 25 bp, Probe sequence
gtatctaatatgaaattgggggttt

SEQ ID NO: 128207 - DNA, 25 bp, Probe sequence
tgtttgcttcaatagcggatatgct

SEQ ID NO: 128208 - DNA, 25 bp, Probe sequence
tcacctttcctttgaatcattactc

SEQ ID NO: 128209 - DNA, 25 bp, Probe sequence
tatattccgctatttgttttcgatt

SEQ ID NO: 128210 - DNA, 25 bp, Probe sequence
agactagtgtaccttgtttcaagct

SEQ ID NO: 128211 - DNA, 25 bp, Probe sequence
actttaattaaagcatcttcaatat

SEQ ID NO: 128212 - DNA, 25 bp, Probe sequence
aaagactagtgtaccttgtttcaag

SEQ ID NO: 128213 - DNA, 25 bp, Probe sequence
aaagcatcttcaatatttaaatttt

SEQ ID NO: 128214 - DNA, 25 bp, Probe sequence
aagttaattttatgtcccaatgctg

SEQ ID NO: 128215 - DNA, 25 bp, Probe sequence
gctgaaataaggtatggctagtctt

SEQ ID NO: 128216 - DNA, 25 bp, Probe sequence
gctgaataaataacttcgttttaat

SEQ ID NO: 128217 - DNA, 25 bp, Probe sequence
gttattaaacgcaattaaccttgat

SEQ ID NO: 128218 - DNA, 25 bp, Probe sequence
gtatggctagtctttaactttaatt

SEQ ID NO: 128219 - DNA, 25 bp, Probe sequence
gtaccttgtttcaagcttaataagc

SEQ ID NO: 128220 - DNA, 25 bp, Probe sequence
taattttatgtcccaatgctgaata

SEQ ID NO: 128221 - DNA, 25 bp, Probe sequence
taaggtatggctagtctttaacttt

SEQ ID NO: 128222 - DNA, 25 bp, Probe sequence
tagtgtaccttgtttcaagcttaat

SEQ ID NO: 128223 - DNA, 25 bp, Probe sequence
ttttatgtcccaatgctgaataaat

SEQ ID NO: 128224 - DNA, 25 bp, Probe sequence
ttgttatcgttcaatgttattaaac

SEQ ID NO: 128225 - DNA, 25 bp, Probe sequence
attttaatctatatcaacgtgtttg

SEQ ID NO: 128226 - DNA, 25 bp, Probe sequence
atattaattggatggcttgctcaca

SEQ ID NO: 128227 - DNA, 25 bp, Probe sequence
acgtgtttgatttgatattttttat

SEQ ID NO: 128228 - DNA, 25 bp, Probe sequence
aaatcgaaactctatccaactatgt

SEQ ID NO: 128229 - DNA, 25 bp, Probe sequence
aactcttcttatcaacctacataca

SEQ ID NO: 128230 - DNA, 25 bp, Probe sequence
cactcctctgatgcacatcttgttg

SEQ ID NO: 128231 - DNA, 25 bp, Probe sequence
gaaactctatccaactatgttataa

SEQ ID NO: 128232 - DNA, 25 bp, Probe sequence
gagctttaaatcataacgcatgcca

SEQ ID NO: 128233 - DNA, 25 bp, Probe sequence
gatgtttaagatattttgccaaatt

SEQ ID NO: 128234 - DNA, 25 bp, Probe sequence
gatgcacatcttgttgtagcaaggt

SEQ ID NO: 128235 - DNA, 25 bp, Probe sequence
gtagcaaggttcacatgtaatttat

SEQ ID NO: 128236 - DNA, 25 bp, Probe sequence
gtctgaatattttgtatcttaactg

SEQ ID NO: 128237 - DNA, 25 bp, Probe sequence
ggatggcttgctcacaaaatttata

SEQ ID NO: 128238 - DNA, 25 bp, Probe sequence
taacgcatgccatttatctttaaat

SEQ ID NO: 128239 - DNA, 25 bp, Probe sequence
ttatcattcaaactcttcttatcaa

SEQ ID NO: 128240 - DNA, 25 bp, Probe sequence
ataaactattcttcataggtatatg

SEQ ID NO: 128241 - DNA, 25 bp, Probe sequence
actataaactattcttcataggtat

SEQ ID NO: 128242 - DNA, 25 bp, Probe sequence
actattcttcataggtatatgaaat

SEQ ID NO: 128243 - DNA, 25 bp, Probe sequence
aaactattcttcataggtatatgaa

SEQ ID NO: 128244 - DNA, 25 bp, Probe sequence
aaactataaactattcttcataggt

SEQ ID NO: 128245 - DNA, 25 bp, Probe sequence
aaaactataaactattcttcatagg

SEQ ID NO: 128246 - DNA, 25 bp, Probe sequence
aactattcttcataggtatatgaaa

SEQ ID NO: 128247 - DNA, 25 bp, Probe sequence
aactataaactattcttcataggta

SEQ ID NO: 128248 - DNA, 25 bp, Probe sequence
cttaaaactataaactattcttcat

SEQ ID NO: 128249 - DNA, 25 bp, Probe sequence
ctataaactattcttcataggtata

SEQ ID NO: 128250 - DNA, 25 bp, Probe sequence
taaaactataaactattcttcatag

SEQ ID NO: 128251 - DNA, 25 bp, Probe sequence
taaactattcttcataggtatatga

SEQ ID NO: 128252 - DNA, 25 bp, Probe sequence
tataaactattcttcataggtatat

SEQ ID NO: 128253 - DNA, 25 bp, Probe sequence
ttaaaactataaactattcttcata

SEQ ID NO: 128254 - DNA, 25 bp, Probe sequence
acagacttattttcgaaacattcag

SEQ ID NO: 128255 - DNA, 25 bp, Probe sequence
aagaatgccgtagttataagttttg

SEQ ID NO: 128256 - DNA, 25 bp, Probe sequence
aatttctgttatagtctttcttgtc

SEQ ID NO: 128257 - DNA, 25 bp, Probe sequence
cttacatcctcacatatacaaatat

SEQ ID NO: 128258 - DNA, 25 bp, Probe sequence
gcacacaaggacgctaatttctgtt

SEQ ID NO: 128259 - DNA, 25 bp, Probe sequence
gaaacttgatcgttcgtgtcgaatt

SEQ ID NO: 128260 - DNA, 25 bp, Probe sequence
gtgtcgaatttttatgcattttctg

SEQ ID NO: 128261 - DNA, 25 bp, Probe sequence
tgtcaacatctaatattcactacca

SEQ ID NO: 128262 - DNA, 25 bp, Probe sequence
taacattaattttgtcacacggaca

SEQ ID NO: 128263 - DNA, 25 bp, Probe sequence
tatcgccacatgttttttagcagta

SEQ ID NO: 128264 - DNA, 25 bp, Probe sequence
tatagtctttcttgtcgtttaatta

SEQ ID NO: 128265 - DNA, 25 bp, Probe sequence
ttttcatccaaataccaaagctttc

SEQ ID NO: 128266 - DNA, 25 bp, Probe sequence
ttcactaccaattatatcgccacat

SEQ ID NO: 128267 - DNA, 25 bp, Probe sequence
ttgatttactcctgtttgtctttct

SEQ ID NO: 128268 - DNA, 25 bp, Probe sequence
ttgtctttctcaaatcaattgtcaa

SEQ ID NO: 128269 - DNA, 25 bp, Probe sequence
atatacttgccttcaaattctcaat

SEQ ID NO: 128270 - DNA, 25 bp, Probe sequence
atattatatatattccacgctcaca

SEQ ID NO: 128271 - DNA, 25 bp, Probe sequence
atatcaacatgttccgctacaaaac

SEQ ID NO: 128272 - DNA, 25 bp, Probe sequence
atcggctatacattgataaattttt

SEQ ID NO: 128273 - DNA, 25 bp, Probe sequence
acttgccttcaaattctcaattaat

SEQ ID NO: 128274 - DNA, 25 bp, Probe sequence
acagccattgacacacccaaattta

SEQ ID NO: 128275 - DNA, 25 bp, Probe sequence
acacacccaaatttaggcatgtcaa

SEQ ID NO: 128276 - DNA, 25 bp, Probe sequence
aaaacttacattacatatatcaaca

SEQ ID NO: 128277 - DNA, 25 bp, Probe sequence
aattctcaattaatttagtcattac

SEQ ID NO: 128278 - DNA, 25 bp, Probe sequence
catatatcaacatgttccgctacaa

SEQ ID NO: 128279 - DNA, 25 bp, Probe sequence
cttttcaaattataaccgctacaat

SEQ ID NO: 128280 - DNA, 25 bp, Probe sequence
gttccgctacaaaacatattcagta

SEQ ID NO: 128281 - DNA, 25 bp, Probe sequence
gtacttacaaatatacttgccttca

SEQ ID NO: 128282 - DNA, 25 bp, Probe sequence
taaccgctacaattataaatgatta

SEQ ID NO: 128283 - DNA, 25 bp, Probe sequence
ttaggcatgtcaaatcggctataca

SEQ ID NO: 128284 - DNA, 25 bp, Probe sequence
atgctatatccttttctatcttcaa

SEQ ID NO: 128285 - DNA, 25 bp, Probe sequence
atgagaaacctcttttcttcaattt

SEQ ID NO: 128286 - DNA, 25 bp, Probe sequence
aatttattgcttttgcataatgcta

SEQ ID NO: 128287 - DNA, 25 bp, Probe sequence
ccccttcgcttattgatgagaaacc

SEQ ID NO: 128288 - DNA, 25 bp, Probe sequence
gctatatccttttctatcttcaagc

SEQ ID NO: 128289 - DNA, 25 bp, Probe sequence
gcataatgctatatccttttctatc

SEQ ID NO: 128290 - DNA, 25 bp, Probe sequence
gtccccttcgcttattgatgagaaa

SEQ ID NO: 128291 - DNA, 25 bp, Probe sequence
tccttttctatcttcaagccatcat

SEQ ID NO: 128292 - DNA, 25 bp, Probe sequence
taatgctatatccttttctatcttc

SEQ ID NO: 128293 - DNA, 25 bp, Probe sequence
tatccttttctatcttcaagccatc

SEQ ID NO: 128294 - DNA, 25 bp, Probe sequence
tatatccttttctatcttcaagcca

SEQ ID NO: 128295 - DNA, 25 bp, Probe sequence
tttgcataatgctatatccttttct

SEQ ID NO: 128296 - DNA, 25 bp, Probe sequence
ttttcttcaatttattgcttttgca

SEQ ID NO: 128297 - DNA, 25 bp, Probe sequence
ttcgcttattgatgagaaacctctt

SEQ ID NO: 128298 - DNA, 25 bp, Probe sequence
ttgatgagaaacctcttttcttcaa

SEQ ID NO: 128299 - DNA, 25 bp, Probe sequence
attacaattttcaaaggagtgtcta

SEQ ID NO: 128300 - DNA, 25 bp, Probe sequence
atgcgaattcattacgcatcattat

SEQ ID NO: 128301 - DNA, 25 bp, Probe sequence
aaacaaattatacgtaagacaatat

SEQ ID NO: 128302 - DNA, 25 bp, Probe sequence
aaaaatgatgcgaattcattacgca

SEQ ID NO: 128303 - DNA, 25 bp, Probe sequence
aacatgtttatttttgattatattt

SEQ ID NO: 128304 - DNA, 25 bp, Probe sequence
catgtttatttttgattatattttg

SEQ ID NO: 128305 - DNA, 25 bp, Probe sequence
gccgacgtccaccaattatttttat

SEQ ID NO: 128306 - DNA, 25 bp, Probe sequence
tgcgaattcattacgcatcattata

SEQ ID NO: 128307 - DNA, 25 bp, Probe sequence
taaacatgtttatttttgattatat

SEQ ID NO: 128308 - DNA, 25 bp, Probe sequence
tacaattttcaaaggagtgtctaat

SEQ ID NO: 128309 - DNA, 25 bp, Probe sequence
tacgcatcattataaatgttaagta

SEQ ID NO: 128310 - DNA, 25 bp, Probe sequence
tatatataaccttaaattaacctat

SEQ ID NO: 128311 - DNA, 25 bp, Probe sequence
tatttaaacgccgacgtccaccaat

SEQ ID NO: 128312 - DNA, 25 bp, Probe sequence
tttatttttgattatattttgttat

SEQ ID NO: 128313 - DNA, 25 bp, Probe sequence
ttttgattatattttgttatagtta

SEQ ID NO: 128314 - DNA, 25 bp, Probe sequence
attgtcatcaattcgagatgtgaga

SEQ ID NO: 128315 - DNA, 25 bp, Probe sequence
attatctgttaatctcattgtaact

SEQ ID NO: 128316 - DNA, 25 bp, Probe sequence
ataacattccccacaagaagcatta

SEQ ID NO: 128317 - DNA, 25 bp, Probe sequence
atcaataacattccccacaagaagc

SEQ ID NO: 128318 - DNA, 25 bp, Probe sequence
agatatagaactttggaggacttta

SEQ ID NO: 128319 - DNA, 25 bp, Probe sequence
acattccccacaagaagcattaatt

SEQ ID NO: 128320 - DNA, 25 bp, Probe sequence
aatctcattgtaactttgactaatt

SEQ ID NO: 128321 - DNA, 25 bp, Probe sequence
aatatttcctattaattatctgtta

SEQ ID NO: 128322 - DNA, 25 bp, Probe sequence
caaatcaataacattccccacaaga

SEQ ID NO: 128323 - DNA, 25 bp, Probe sequence
gttaaagtaactattgtcatcaatt

SEQ ID NO: 128324 - DNA, 25 bp, Probe sequence
gtaactattgtcatcaattcgagat

SEQ ID NO: 128325 - DNA, 25 bp, Probe sequence
gtgagaataaaacagtcgctacgtt

SEQ ID NO: 128326 - DNA, 25 bp, Probe sequence
tatagaactttggaggactttattc

SEQ ID NO: 128327 - DNA, 25 bp, Probe sequence
ttacaaatcaataacattccccaca

SEQ ID NO: 128328 - DNA, 25 bp, Probe sequence
ttccccacaagaagcattaattttg

SEQ ID NO: 128329 - DNA, 25 bp, Probe sequence
attgatccagtttttccacattaca

SEQ ID NO: 128330 - DNA, 25 bp, Probe sequence
atatttcccccatatttataatatt

SEQ ID NO: 128331 - DNA, 25 bp, Probe sequence
agttgtatactgtctaatcttctac

SEQ ID NO: 128332 - DNA, 25 bp, Probe sequence
acttaattctagtacatatgtcatc

SEQ ID NO: 128333 - DNA, 25 bp, Probe sequence
aacacgatgatacatattgtcttga

SEQ ID NO: 128334 - DNA, 25 bp, Probe sequence
aactttgagctttcctttataggag

SEQ ID NO: 128335 - DNA, 25 bp, Probe sequence
aattcatagttctacagtgcctaag

SEQ ID NO: 128336 - DNA, 25 bp, Probe sequence
ctacttatttatatttcccccatat

SEQ ID NO: 128337 - DNA, 25 bp, Probe sequence
gatacacaagacatcatgacatagt

SEQ ID NO: 128338 - DNA, 25 bp, Probe sequence
gtacgcgcttacatcattgatacac

SEQ ID NO: 128339 - DNA, 25 bp, Probe sequence
ggagaagctctttttttgctatttt

SEQ ID NO: 128340 - DNA, 25 bp, Probe sequence
tgcctaagttatatcacctccatca

SEQ ID NO: 128341 - DNA, 25 bp, Probe sequence
tcacctccatcaaaagtacgcgctt

SEQ ID NO: 128342 - DNA, 25 bp, Probe sequence
tactgtctaatcttctactatacta

SEQ ID NO: 128343 - DNA, 25 bp, Probe sequence
tttttgctatttttcgttgccacct

SEQ ID NO: 128344 - DNA, 25 bp, Probe sequence
gagctctcgtttcaacatacggggg

SEQ ID NO: 128345 - DNA, 25 bp, Probe sequence
agctctcgtttcaacatacgggggt

SEQ ID NO: 128346 - DNA, 25 bp, Probe sequence
acaagaacccccatatgttgagctc

SEQ ID NO: 128347 - DNA, 25 bp, Probe sequence
caagaacccccatatgttgagctct

SEQ ID NO: 128348 - DNA, 25 bp, Probe sequence
caacatacgggggttttcatattgt

SEQ ID NO: 128349 - DNA, 25 bp, Probe sequence
catacgggggttttcatattgttgt

SEQ ID NO: 128350 - DNA, 25 bp, Probe sequence
catatgttgagctctcgtttcaaca

SEQ ID NO: 128351 - DNA, 25 bp, Probe sequence
gctctcgtttcaacatacgggggtt

SEQ ID NO: 128352 - DNA, 25 bp, Probe sequence
cccatatgttgagctctcgtttcaa

SEQ ID NO: 128353 - DNA, 25 bp, Probe sequence
ccccatatgttgagctctcgtttca

SEQ ID NO: 128354 - DNA, 25 bp, Probe sequence
gttgagctctcgtttcaacatacgg

SEQ ID NO: 128355 - DNA, 25 bp, Probe sequence
tgagctctcgtttcaacatacgggg

SEQ ID NO: 128356 - DNA, 25 bp, Probe sequence
ttataaaaacaagaacccccatatg

SEQ ID NO: 128357 - DNA, 25 bp, Probe sequence
ttcaacatacgggggttttcatatt

SEQ ID NO: 128358 - DNA, 25 bp, Probe sequence
ttgagctctcgtttcaacatacggg

SEQ ID NO: 128359 - DNA, 25 bp, Probe sequence
attgtcacctctatatttttcattc

SEQ ID NO: 128360 - DNA, 25 bp, Probe sequence
attcttttctattttatcacatgca

SEQ ID NO: 128361 - DNA, 25 bp, Probe sequence
agacagcaatattcatttacatcat

SEQ ID NO: 128362 - DNA, 25 bp, Probe sequence
acctctatatttttcattcttttct

SEQ ID NO: 128363 - DNA, 25 bp, Probe sequence
acaataaattgttccagctccttta

SEQ ID NO: 128364 - DNA, 25 bp, Probe sequence
aaatccatttaactaacacactcag

SEQ ID NO: 128365 - DNA, 25 bp, Probe sequence
aactaacacactcagaatgcgctaa

SEQ ID NO: 128366 - DNA, 25 bp, Probe sequence
gaatgcgctaaaggagctcgaaaca

SEQ ID NO: 128367 - DNA, 25 bp, Probe sequence
gactcttggaactaacgtttcattt

SEQ ID NO: 128368 - DNA, 25 bp, Probe sequence
gatgctatatagcgttttttgttag

SEQ ID NO: 128369 - DNA, 25 bp, Probe sequence
gtacattacatgcacatttagacag

SEQ ID NO: 128370 - DNA, 25 bp, Probe sequence
ggacttaagtgtattatctgcacca

SEQ ID NO: 128371 - DNA, 25 bp, Probe sequence
ttttatcacatgcactattgtttaa

SEQ ID NO: 128372 - DNA, 25 bp, Probe sequence
ttatctgcaccattgtacattacat

SEQ ID NO: 128373 - DNA, 25 bp, Probe sequence
ttccagctcctttaagcaccgatgt

SEQ ID NO: 128374 - DNA, 25 bp, Probe sequence
atattattcatttattccatcaaaa

SEQ ID NO: 128375 - DNA, 25 bp, Probe sequence
ataggcctgtcgatgattgattcac

SEQ ID NO: 128376 - DNA, 25 bp, Probe sequence
acactgcttgcatgtagaaacactt

SEQ ID NO: 128377 - DNA, 25 bp, Probe sequence
aaaaaagtgctcctacactgcttgc

SEQ ID NO: 128378 - DNA, 25 bp, Probe sequence
aaaagtgctcctacactgcttgcat

SEQ ID NO: 128379 - DNA, 25 bp, Probe sequence
catgatgtttcataggcctgtcgat

SEQ ID NO: 128380 - DNA, 25 bp, Probe sequence
catttattccatcaaaaacaccctt

SEQ ID NO: 128381 - DNA, 25 bp, Probe sequence
gatgtttcataggcctgtcgatgat

SEQ ID NO: 128382 - DNA, 25 bp, Probe sequence
gatgattgattcacaatagcacgtg

SEQ ID NO: 128383 - DNA, 25 bp, Probe sequence
gtagaaacactttttcattgtaatg

SEQ ID NO: 128384 - DNA, 25 bp, Probe sequence
ggcctgtcgatgattgattcacaat

SEQ ID NO: 128385 - DNA, 25 bp, Probe sequence
tgcttgcatgtagaaacactttttc

SEQ ID NO: 128386 - DNA, 25 bp, Probe sequence
tgctcctacactgcttgcatgtaga

SEQ ID NO: 128387 - DNA, 25 bp, Probe sequence
tagcacgtgatttttttgtttttca

SEQ ID NO: 128388 - DNA, 25 bp, Probe sequence
ttttttgtttttcaatattattcat

SEQ ID NO: 128389 - DNA, 25 bp, Probe sequence
atcaccttctatttacgggctatta

SEQ ID NO: 128390 - DNA, 25 bp, Probe sequence
agttctattcgttattctatttaca

SEQ ID NO: 128391 - DNA, 25 bp, Probe sequence
aaatatctactaccatttagaaggt

SEQ ID NO: 128392 - DNA, 25 bp, Probe sequence
aaatagcccataaatacaaagtgtt

SEQ ID NO: 128393 - DNA, 25 bp, Probe sequence
aatcacctcacctaaaaatcgttat

SEQ ID NO: 128394 - DNA, 25 bp, Probe sequence
gcgcgaaattaaatcatctttttgt

SEQ ID NO: 128395 - DNA, 25 bp, Probe sequence
gacaatacttaataatcacctcacc

SEQ ID NO: 128396 - DNA, 25 bp, Probe sequence
gttttccaattatctgtttcacgct

SEQ ID NO: 128397 - DNA, 25 bp, Probe sequence
gtattactttatgtactagttgtta

SEQ ID NO: 128398 - DNA, 25 bp, Probe sequence
gtttcacgcttttcagtcatatctt

SEQ ID NO: 128399 - DNA, 25 bp, Probe sequence
gtattttgcctttttacaatcattt

SEQ ID NO: 128400 - DNA, 25 bp, Probe sequence
gtgttatcaccttctatttacgggc

SEQ ID NO: 128401 - DNA, 25 bp, Probe sequence
tcagtcatatctttcacaaccttat

SEQ ID NO: 128402 - DNA, 25 bp, Probe sequence
tacgggctattagttctattcgtta

SEQ ID NO: 128403 - DNA, 25 bp, Probe sequence
tattctatttacagatcattctatc

SEQ ID NO: 128404 - DNA, 25 bp, Probe sequence
actcctttactattccttacatact

SEQ ID NO: 128405 - DNA, 25 bp, Probe sequence
actattccttacatactttgtctgt

SEQ ID NO: 128406 - DNA, 25 bp, Probe sequence
actttgtctgttttctctatttatt

SEQ ID NO: 128407 - DNA, 25 bp, Probe sequence
catactttgtctgttttctctattt

SEQ ID NO: 128408 - DNA, 25 bp, Probe sequence
ccttacatactttgtctgttttctc

SEQ ID NO: 128409 - DNA, 25 bp, Probe sequence
gacgtataactattttttatcattt

SEQ ID NO: 128410 - DNA, 25 bp, Probe sequence
tcctttactattccttacatacttt

SEQ ID NO: 128411 - DNA, 25 bp, Probe sequence
taatttttttactatacttctgtag

SEQ ID NO: 128412 - DNA, 25 bp, Probe sequence
tacatactttgtctgttttctctat

SEQ ID NO: 128413 - DNA, 25 bp, Probe sequence
tacttctgtagacgtataactattt

SEQ ID NO: 128414 - DNA, 25 bp, Probe sequence
tattccttacatactttgtctgttt

SEQ ID NO: 128415 - DNA, 25 bp, Probe sequence
tttactattccttacatactttgtc

SEQ ID NO: 128416 - DNA, 25 bp, Probe sequence
tttatcattttttatctctagagaa

SEQ ID NO: 128417 - DNA, 25 bp, Probe sequence
tttttactatacttctgtagacgta

SEQ ID NO: 128418 - DNA, 25 bp, Probe sequence
ttccttacatactttgtctgttttc

SEQ ID NO: 128419 - DNA, 25 bp, Probe sequence
aaatgtcctcattgtcactcttatg

SEQ ID NO: 128420 - DNA, 25 bp, Probe sequence
aaaaaaatcggctagtcacgtgcta

SEQ ID NO: 128421 - DNA, 25 bp, Probe sequence
caacaatacaactgaagacttcttc

SEQ ID NO: 128422 - DNA, 25 bp, Probe sequence
cattatcattttattattaccctat

SEQ ID NO: 128423 - DNA, 25 bp, Probe sequence
cgctccccctgttacaagtaatatc

SEQ ID NO: 128424 - DNA, 25 bp, Probe sequence
ccaccacttctcatatcattatcat

SEQ ID NO: 128425 - DNA, 25 bp, Probe sequence
gaagacttcttcattttatgcataa

SEQ ID NO: 128426 - DNA, 25 bp, Probe sequence
gaacgattaaaagctatctgttata

SEQ ID NO: 128427 - DNA, 25 bp, Probe sequence
gatgttgtgatgtaacttgaacgat

SEQ ID NO: 128428 - DNA, 25 bp, Probe sequence
gtaatatcatagcacaatctttttt

SEQ ID NO: 128429 - DNA, 25 bp, Probe sequence
tactttgtgtaatatatcatctttt

SEQ ID NO: 128430 - DNA, 25 bp, Probe sequence
tagtcacgtgctagccgacaaatag

SEQ ID NO: 128431 - DNA, 25 bp, Probe sequence
tatctgttatatagctctacccctt

SEQ ID NO: 128432 - DNA, 25 bp, Probe sequence
tatcatcttttaggaggtggctgtc

SEQ ID NO: 128433 - DNA, 25 bp, Probe sequence
ttgtcactcttatgttatactttgt

SEQ ID NO: 128434 - DNA, 25 bp, Probe sequence
atgggagtatgctattttttatcta

SEQ ID NO: 128435 - DNA, 25 bp, Probe sequence
agtcttatataactacatttactaa

SEQ ID NO: 128436 - DNA, 25 bp, Probe sequence
acaagttgtaaataccatcgcgtta

SEQ ID NO: 128437 - DNA, 25 bp, Probe sequence
aacaaacaacatattcagcttattt

SEQ ID NO: 128438 - DNA, 25 bp, Probe sequence
gaatatacagtatgacttacggtaa

SEQ ID NO: 128439 - DNA, 25 bp, Probe sequence
gatggtagatttagtcttatataac

SEQ ID NO: 128440 - DNA, 25 bp, Probe sequence
gatgcattaatcgagttataatcat

SEQ ID NO: 128441 - DNA, 25 bp, Probe sequence
gatatattatttgcacatgggagta

SEQ ID NO: 128442 - DNA, 25 bp, Probe sequence
gttaaacaacaatagccaacgctaa

SEQ ID NO: 128443 - DNA, 25 bp, Probe sequence
gtaaataccatcgcgttaaacaaca

SEQ ID NO: 128444 - DNA, 25 bp, Probe sequence
tcattctcttacgttacaagttgta

SEQ ID NO: 128445 - DNA, 25 bp, Probe sequence
tcagcttatttttcattctcttacg

SEQ ID NO: 128446 - DNA, 25 bp, Probe sequence
tatattgcgttaaagtggagtgatt

SEQ ID NO: 128447 - DNA, 25 bp, Probe sequence
tatttttcattctcttacgttacaa

SEQ ID NO: 128448 - DNA, 25 bp, Probe sequence
tttacagttttacaattcaatatca

SEQ ID NO: 128449 - DNA, 25 bp, Probe sequence
atatcaattgcgtttgttattttaa

SEQ ID NO: 128450 - DNA, 25 bp, Probe sequence
ataaattctttaatcatgtcatata

SEQ ID NO: 128451 - DNA, 25 bp, Probe sequence
acatacgcatatgaccaatgatttg

SEQ ID NO: 128452 - DNA, 25 bp, Probe sequence
aaagcttacatgtcttttatcttgt

SEQ ID NO: 128453 - DNA, 25 bp, Probe sequence
aaactaacgataatattgccactta

SEQ ID NO: 128454 - DNA, 25 bp, Probe sequence
aacgcagttgattacaggattcatt

SEQ ID NO: 128455 - DNA, 25 bp, Probe sequence
aaggccattcaatttcttatattaa

SEQ ID NO: 128456 - DNA, 25 bp, Probe sequence
aataagctagggccaaatttgtcat

SEQ ID NO: 128457 - DNA, 25 bp, Probe sequence
cattctttggctatttaactttaat

SEQ ID NO: 128458 - DNA, 25 bp, Probe sequence
gccacttataagtttttcacactac

SEQ ID NO: 128459 - DNA, 25 bp, Probe sequence
gtcttttatcttgtataacatacgc

SEQ ID NO: 128460 - DNA, 25 bp, Probe sequence
ggattcattccatatatcaattgcg

SEQ ID NO: 128461 - DNA, 25 bp, Probe sequence
tgcgcctactcataacattctttgg

SEQ ID NO: 128462 - DNA, 25 bp, Probe sequence
ttttcacactacaacttcgatttaa

SEQ ID NO: 128463 - DNA, 25 bp, Probe sequence
ttatgcatcattttcaaagcttaca

SEQ ID NO: 128464 - DNA, 25 bp, Probe sequence
agttgctcaagtaccgttgagtcac

SEQ ID NO: 128465 - DNA, 25 bp, Probe sequence
accccatctctgattgatactaaat

SEQ ID NO: 128466 - DNA, 25 bp, Probe sequence
acagaactactatagcaggcttttg

SEQ ID NO: 128467 - DNA, 25 bp, Probe sequence
acaacttcagctattctcggtaatt

SEQ ID NO: 128468 - DNA, 25 bp, Probe sequence
aaattatcgattttggtacattaat

SEQ ID NO: 128469 - DNA, 25 bp, Probe sequence
aacttattgccgtaattatactata

SEQ ID NO: 128470 - DNA, 25 bp, Probe sequence
ccatgcaatcgtttacagaactact

SEQ ID NO: 128471 - DNA, 25 bp, Probe sequence
gcataccatgcaatcgtttacagaa

SEQ ID NO: 128472 - DNA, 25 bp, Probe sequence
gcaactttgcaaacaattattttgt

SEQ ID NO: 128473 - DNA, 25 bp, Probe sequence
gtacattaatatttgcataccatgc

SEQ ID NO: 128474 - DNA, 25 bp, Probe sequence
gtaccgttgagtcacatacaacttc

SEQ ID NO: 128475 - DNA, 25 bp, Probe sequence
gtcacatacaacttcagctattctc

SEQ ID NO: 128476 - DNA, 25 bp, Probe sequence
tcagctattctcggtaattatgata

SEQ ID NO: 128477 - DNA, 25 bp, Probe sequence
tatagcaggcttttgcaactttgca

SEQ ID NO: 128478 - DNA, 25 bp, Probe sequence
ttcttaccccatctctgattgatac

SEQ ID NO: 128479 - DNA, 25 bp, Probe sequence
ataaacatgaacgttctgccatttc

SEQ ID NO: 128480 - DNA, 25 bp, Probe sequence
atgaacgttctgccatttcacatac

SEQ ID NO: 128481 - DNA, 25 bp, Probe sequence
accaccctatctcatacataaacat

SEQ ID NO: 128482 - DNA, 25 bp, Probe sequence
aaacatgaacgttctgccatttcac

SEQ ID NO: 128483 - DNA, 25 bp, Probe sequence
aacgttctgccatttcacatacata

SEQ ID NO: 128484 - DNA, 25 bp, Probe sequence
caccctatctcatacataaacatga

SEQ ID NO: 128485 - DNA, 25 bp, Probe sequence
catacatatggtcgtccatttaatg

SEQ ID NO: 128486 - DNA, 25 bp, Probe sequence
ctatttaaaccaccctatctcatac

SEQ ID NO: 128487 - DNA, 25 bp, Probe sequence
cgttctgccatttcacatacatatg

SEQ ID NO: 128488 - DNA, 25 bp, Probe sequence
gccatttcacatacatatggtcgtc

SEQ ID NO: 128489 - DNA, 25 bp, Probe sequence
acatgaacgttctgccatttcacat

SEQ ID NO: 128490 - DNA, 25 bp, Probe sequence
taaaccaccctatctcatacataaa

SEQ ID NO: 128491 - DNA, 25 bp, Probe sequence
tttcacatacatatggtcgtccatt

SEQ ID NO: 128492 - DNA, 25 bp, Probe sequence
tttaaaccaccctatctcatacata

SEQ ID NO: 128493 - DNA, 25 bp, Probe sequence
ttaatgaggtaaggtggttttctcg

SEQ ID NO: 128494 - DNA, 25 bp, Probe sequence
atatttactcctctattttttctct

SEQ ID NO: 128495 - DNA, 25 bp, Probe sequence
atagtccgatgaccacttcattcta

SEQ ID NO: 128496 - DNA, 25 bp, Probe sequence
acatagtccgatgaccacttcattc

SEQ ID NO: 128497 - DNA, 25 bp, Probe sequence
agtccgatgaccacttcattctatt

SEQ ID NO: 128498 - DNA, 25 bp, Probe sequence
aaagcttaacatagtccgatgacca

SEQ ID NO: 128499 - DNA, 25 bp, Probe sequence
ctctattttttctctttatcaaagc

SEQ ID NO: 128500 - DNA, 25 bp, Probe sequence
ccgatgaccacttcattctattagt

SEQ ID NO: 128501 - DNA, 25 bp, Probe sequence
gcttaacatagtccgatgaccactt

SEQ ID NO: 128502 - DNA, 25 bp, Probe sequence
gatgaccacttcattctattagtgc

SEQ ID NO: 128503 - DNA, 25 bp, Probe sequence
gtccgatgaccacttcattctatta

SEQ ID NO: 128504 - DNA, 25 bp, Probe sequence
tgaccacttcattctattagtgcaa

SEQ ID NO: 128505 - DNA, 25 bp, Probe sequence
tcctctattttttctctttatcaaa

SEQ ID NO: 128506 - DNA, 25 bp, Probe sequence
taacatagtccgatgaccacttcat

SEQ ID NO: 128507 - DNA, 25 bp, Probe sequence
tagtccgatgaccacttcattctat

SEQ ID NO: 128508 - DNA, 25 bp, Probe sequence
tttttctctttatcaaagcttaaca

SEQ ID NO: 128509 - DNA, 25 bp, Probe sequence
atttaatgccatgtattcctcggga

SEQ ID NO: 128510 - DNA, 25 bp, Probe sequence
aaacgtgtatttaatgccatgtatt

SEQ ID NO: 128511 - DNA, 25 bp, Probe sequence
aacttcattcaaaagtcttagtgaa

SEQ ID NO: 128512 - DNA, 25 bp, Probe sequence
aagcgtggtaaaatcaacttgaaca

SEQ ID NO: 128513 - DNA, 25 bp, Probe sequence
aatgccatgtattcctcgggaggtc

SEQ ID NO: 128514 - DNA, 25 bp, Probe sequence
catgtattcctcgggaggtcctcac

SEQ ID NO: 128515 - DNA, 25 bp, Probe sequence
gccatgtattcctcgggaggtcctc

SEQ ID NO: 128516 - DNA, 25 bp, Probe sequence
ccatgtattcctcgggaggtcctca

SEQ ID NO: 128517 - DNA, 25 bp, Probe sequence
gtatttaatgccatgtattcctcgg

SEQ ID NO: 128518 - DNA, 25 bp, Probe sequence
gtcacctttataaatattaaacgtg

SEQ ID NO: 128519 - DNA, 25 bp, Probe sequence
gtgtatttaatgccatgtattcctc

SEQ ID NO: 128520 - DNA, 25 bp, Probe sequence
tgaacaaaattaagtcacctttata

SEQ ID NO: 128521 - DNA, 25 bp, Probe sequence
tgccatgtattcctcgggaggtcct

SEQ ID NO: 128522 - DNA, 25 bp, Probe sequence
taaacttcattcaaaagtcttagtg

SEQ ID NO: 128523 - DNA, 25 bp, Probe sequence
tttaatgccatgtattcctcgggag

SEQ ID NO: 128524 - DNA, 25 bp, Probe sequence
attgcgtatagtgatgtgtcttttt

SEQ ID NO: 128525 - DNA, 25 bp, Probe sequence
atgattgcgtatagtgatgtgtctt

SEQ ID NO: 128526 - DNA, 25 bp, Probe sequence
aagacacatctatacgatgatcatt

SEQ ID NO: 128527 - DNA, 25 bp, Probe sequence
caatgattgcgtatagtgatgtgtc

SEQ ID NO: 128528 - DNA, 25 bp, Probe sequence
catctatacgatgatcatttacaat

SEQ ID NO: 128529 - DNA, 25 bp, Probe sequence
cgatgatcatttacaatgattgcgt

SEQ ID NO: 128530 - DNA, 25 bp, Probe sequence
cgtatagtgatgtgtctttttttgt

SEQ ID NO: 128531 - DNA, 25 bp, Probe sequence
gcgtatagtgatgtgtctttttttg

SEQ ID NO: 128532 - DNA, 25 bp, Probe sequence
gacacatctatacgatgatcattta

SEQ ID NO: 128533 - DNA, 25 bp, Probe sequence
gattgcgtatagtgatgtgtctttt

SEQ ID NO: 128534 - DNA, 25 bp, Probe sequence
gtatagtgatgtgtctttttttgta

SEQ ID NO: 128535 - DNA, 25 bp, Probe sequence
tgattgcgtatagtgatgtgtcttt

SEQ ID NO: 128536 - DNA, 25 bp, Probe sequence
tgcgtatagtgatgtgtcttttttt

SEQ ID NO: 128537 - DNA, 25 bp, Probe sequence
tctatacgatgatcatttacaatga

SEQ ID NO: 128538 - DNA, 25 bp, Probe sequence
ttgcgtatagtgatgtgtctttttt

SEQ ID NO: 128539 - DNA, 25 bp, Probe sequence
atcacacatttattttcaaggaggt

SEQ ID NO: 128540 - DNA, 25 bp, Probe sequence
atcaaacctatatcaatacacaaat

SEQ ID NO: 128541 - DNA, 25 bp, Probe sequence
atcagattatcttttcatatagtga

SEQ ID NO: 128542 - DNA, 25 bp, Probe sequence
agtaaacgcttacacacctacaacg

SEQ ID NO: 128543 - DNA, 25 bp, Probe sequence
acacctacaacgacattgacgtatt

SEQ ID NO: 128544 - DNA, 25 bp, Probe sequence
aaattttttcacgaccttatatatg

SEQ ID NO: 128545 - DNA, 25 bp, Probe sequence
aacgatctatcacacatttattttc

SEQ ID NO: 128546 - DNA, 25 bp, Probe sequence
ctccatatcatctttcctaacaata

SEQ ID NO: 128547 - DNA, 25 bp, Probe sequence
gcttacacacctacaacgacattga

SEQ ID NO: 128548 - DNA, 25 bp, Probe sequence
gacattgacgtattttgaaagtatt

SEQ ID NO: 128549 - DNA, 25 bp, Probe sequence
gaccttatatatgacatcgttgtat

SEQ ID NO: 128550 - DNA, 25 bp, Probe sequence
tcatctttcctaacaatacatctaa

SEQ ID NO: 128551 - DNA, 25 bp, Probe sequence
taaacgcataatcaaacctatatca

SEQ ID NO: 128552 - DNA, 25 bp, Probe sequence
tatgacatcgttgtatttgtaatac

SEQ ID NO: 128553 - DNA, 25 bp, Probe sequence
ttgtaatacattcgttttaaacgca

SEQ ID NO: 128554 - DNA, 25 bp, Probe sequence
atttaatggccttgagcctatcata

SEQ ID NO: 128555 - DNA, 25 bp, Probe sequence
atgatttaatggccttgagcctatc

SEQ ID NO: 128556 - DNA, 25 bp, Probe sequence
atggccttgagcctatcataacttc

SEQ ID NO: 128557 - DNA, 25 bp, Probe sequence
agttatgatttaatggccttgagcc

SEQ ID NO: 128558 - DNA, 25 bp, Probe sequence
aatggccttgagcctatcataactt

SEQ ID NO: 128559 - DNA, 25 bp, Probe sequence
ccttgagcctatcataacttccttt

SEQ ID NO: 128560 - DNA, 25 bp, Probe sequence
gccttgagcctatcataacttcctt

SEQ ID NO: 128561 - DNA, 25 bp, Probe sequence
gatttaatggccttgagcctatcat

SEQ ID NO: 128562 - DNA, 25 bp, Probe sequence
gttatgatttaatggccttgagcct

SEQ ID NO: 128563 - DNA, 25 bp, Probe sequence
ggaagttatgatttaatggccttga

SEQ ID NO: 128564 - DNA, 25 bp, Probe sequence
tggccttgagcctatcataacttcc

SEQ ID NO: 128565 - DNA, 25 bp, Probe sequence
tgatttaatggccttgagcctatca

SEQ ID NO: 128566 - DNA, 25 bp, Probe sequence
taatggccttgagcctatcataact

SEQ ID NO: 128567 - DNA, 25 bp, Probe sequence
tttaatggccttgagcctatcataa

SEQ ID NO: 128568 - DNA, 25 bp, Probe sequence
ttaatggccttgagcctatcataac

SEQ ID NO: 128569 - DNA, 25 bp, Probe sequence
agcgttatacggtgagtacaacatg

SEQ ID NO: 128570 - DNA, 25 bp, Probe sequence
aacaagccaccttacttggctacat

SEQ ID NO: 128571 - DNA, 25 bp, Probe sequence
aagccaccttacttggctacatcga

SEQ ID NO: 128572 - DNA, 25 bp, Probe sequence
aagattagcgttatacggtgagtac

SEQ ID NO: 128573 - DNA, 25 bp, Probe sequence
caccttacttggctacatcgatata

SEQ ID NO: 128574 - DNA, 25 bp, Probe sequence
cttacttggctacatcgatatattg

SEQ ID NO: 128575 - DNA, 25 bp, Probe sequence
gagtacaacatgatctgttaatata

SEQ ID NO: 128576 - DNA, 25 bp, Probe sequence
gttccaaacatagatgatcatcatt

SEQ ID NO: 128577 - DNA, 25 bp, Probe sequence
gttaatataacaagccaccttactt

SEQ ID NO: 128578 - DNA, 25 bp, Probe sequence
gtatttttgctcagttccaaacata

SEQ ID NO: 128579 - DNA, 25 bp, Probe sequence
ggctacatcgatatattgttaagca

SEQ ID NO: 128580 - DNA, 25 bp, Probe sequence
tgctcagttccaaacatagatgatc

SEQ ID NO: 128581 - DNA, 25 bp, Probe sequence
tacggtgagtacaacatgatctgtt

SEQ ID NO: 128582 - DNA, 25 bp, Probe sequence
tttattttaacgtatttttgctcag

SEQ ID NO: 128583 - DNA, 25 bp, Probe sequence
ttaacgtatttttgctcagttccaa

SEQ ID NO: 128584 - DNA, 25 bp, Probe sequence
agtgatgcttatttacgtttacgtt

SEQ ID NO: 128585 - DNA, 25 bp, Probe sequence
accattacggttactggaattggca

SEQ ID NO: 128586 - DNA, 25 bp, Probe sequence
acaagataatccttagtacgtcaat

SEQ ID NO: 128587 - DNA, 25 bp, Probe sequence
cattcgagatgttgccgaggcttca

SEQ ID NO: 128588 - DNA, 25 bp, Probe sequence
ctttacctgcttatcttcaaaccat

SEQ ID NO: 128589 - DNA, 25 bp, Probe sequence
ctgcttatcttcaaaccattacggt

SEQ ID NO: 128590 - DNA, 25 bp, Probe sequence
ccacctctctagataagtgatgctt

SEQ ID NO: 128591 - DNA, 25 bp, Probe sequence
gatgttgccgaggcttcatagggcc

SEQ ID NO: 128592 - DNA, 25 bp, Probe sequence
gcacattcgagatgttgccgaggct

SEQ ID NO: 128593 - DNA, 25 bp, Probe sequence
ggttactggaattggcacattcgag

SEQ ID NO: 128594 - DNA, 25 bp, Probe sequence
tgccgaggcttcatagggccagtcc

SEQ ID NO: 128595 - DNA, 25 bp, Probe sequence
tccctccacctctctagataagtga

SEQ ID NO: 128596 - DNA, 25 bp, Probe sequence
taatccttagtacgtcaatcataaa

SEQ ID NO: 128597 - DNA, 25 bp, Probe sequence
tacgtttacgttacaagataatcct

SEQ ID NO: 128598 - DNA, 25 bp, Probe sequence
tacctgcttatcttcaaaccattac

SEQ ID NO: 128599 - DNA, 25 bp, Probe sequence
atttacgtttatcagcatttctatg

SEQ ID NO: 128600 - DNA, 25 bp, Probe sequence
atcttattattctttgtccgttctg

SEQ ID NO: 128601 - DNA, 25 bp, Probe sequence
acaccctgagcaaacgctccttatg

SEQ ID NO: 128602 - DNA, 25 bp, Probe sequence
aaagatacacacctttaccgactat

SEQ ID NO: 128603 - DNA, 25 bp, Probe sequence
aaaacttataatccacaccctgagc

SEQ ID NO: 128604 - DNA, 25 bp, Probe sequence
aaccttaggcatttcacttgttaat

SEQ ID NO: 128605 - DNA, 25 bp, Probe sequence
aatacacttcaccaattcattttaa

SEQ ID NO: 128606 - DNA, 25 bp, Probe sequence
ccctttgtttaatatcgagtttgca

SEQ ID NO: 128607 - DNA, 25 bp, Probe sequence
gcatttctatgatcagtacttctac

SEQ ID NO: 128608 - DNA, 25 bp, Probe sequence
gcaaacgctccttatgacagagtat

SEQ ID NO: 128609 - DNA, 25 bp, Probe sequence
gttgtcctgacatcctcattaagaa

SEQ ID NO: 128610 - DNA, 25 bp, Probe sequence
gtacttctacgggtagcgtttctat

SEQ ID NO: 128611 - DNA, 25 bp, Probe sequence
gtaatttacatcatcttaacatata

SEQ ID NO: 128612 - DNA, 25 bp, Probe sequence
gtccgttctgacatttaatatctaa

SEQ ID NO: 128613 - DNA, 25 bp, Probe sequence
taactttttcgttgttgtcctgaca

SEQ ID NO: 128614 - DNA, 25 bp, Probe sequence
tatttacccaatcttcctaggaact

SEQ ID NO: 128615 - DNA, 25 bp, Probe sequence
atctccttattcgcttaatggttat

SEQ ID NO: 128616 - DNA, 25 bp, Probe sequence
aggaacttaatcatgattacactaa

SEQ ID NO: 128617 - DNA, 25 bp, Probe sequence
acatctccttattcgcttaatggtt

SEQ ID NO: 128618 - DNA, 25 bp, Probe sequence
gttattatttacccaatcttcctag

SEQ ID NO: 128619 - DNA, 25 bp, Probe sequence
tggttattatttacccaatcttcct

SEQ ID NO: 128620 - DNA, 25 bp, Probe sequence
tgattacactaaaaattactttctt

SEQ ID NO: 128621 - DNA, 25 bp, Probe sequence
tccttattcgcttaatggttattat

SEQ ID NO: 128622 - DNA, 25 bp, Probe sequence
tcttcctaggaacttaatcatgatt

SEQ ID NO: 128623 - DNA, 25 bp, Probe sequence
taacatctccttattcgcttaatgg

SEQ ID NO: 128624 - DNA, 25 bp, Probe sequence
tacccaatcttcctaggaacttaat

SEQ ID NO: 128625 - DNA, 25 bp, Probe sequence
tattatttacccaatcttcctagga

SEQ ID NO: 128626 - DNA, 25 bp, Probe sequence
tttaacatctccttattcgcttaat

SEQ ID NO: 128627 - DNA, 25 bp, Probe sequence
tttttaacatctccttattcgctta

SEQ ID NO: 128628 - DNA, 25 bp, Probe sequence
ttcttctttataaaaacaagctcga

SEQ ID NO: 128629 - DNA, 25 bp, Probe sequence
atctatacaaaaacgtgttctcgga

SEQ ID NO: 128630 - DNA, 25 bp, Probe sequence
atgatttcacaacaatgtactcttg

SEQ ID NO: 128631 - DNA, 25 bp, Probe sequence
acaaaccacaaaagctctaaacatt

SEQ ID NO: 128632 - DNA, 25 bp, Probe sequence
cattccccttccttaagtcaatgat

SEQ ID NO: 128633 - DNA, 25 bp, Probe sequence
gactattaaacgatgatttcacaac

SEQ ID NO: 128634 - DNA, 25 bp, Probe sequence
gatgatcatctttgactattaaacg

SEQ ID NO: 128635 - DNA, 25 bp, Probe sequence
gatatgttgtctaccctacgatgat

SEQ ID NO: 128636 - DNA, 25 bp, Probe sequence
gttgtcaaactattctaacttttat

SEQ ID NO: 128637 - DNA, 25 bp, Probe sequence
gtactcttgttaattactttcgcta

SEQ ID NO: 128638 - DNA, 25 bp, Probe sequence
gtaaaccaatgcttagagctttcta

SEQ ID NO: 128639 - DNA, 25 bp, Probe sequence
gtaacactgttgtcaaactattcta

SEQ ID NO: 128640 - DNA, 25 bp, Probe sequence
gtcaatgatatgttgtctaccctac

SEQ ID NO: 128641 - DNA, 25 bp, Probe sequence
tactttcgctaatgatagacagttg

SEQ ID NO: 128642 - DNA, 25 bp, Probe sequence
ttaataatatcgtaacactgttgtc

SEQ ID NO: 128643 - DNA, 25 bp, Probe sequence
ttgtctaccctacgatgatcatctt

SEQ ID NO: 128644 - DNA, 25 bp, Probe sequence
attcgctcctgttcttttaagaagt

SEQ ID NO: 128645 - DNA, 25 bp, Probe sequence
attatcttcaatattcattatagta

SEQ ID NO: 128646 - DNA, 25 bp, Probe sequence
ataaactaattatccatagcttgaa

SEQ ID NO: 128647 - DNA, 25 bp, Probe sequence
acgcttacattattatcttcaatat

SEQ ID NO: 128648 - DNA, 25 bp, Probe sequence
actaattatccatagcttgaaccta

SEQ ID NO: 128649 - DNA, 25 bp, Probe sequence
aaacgcttacattattatcttcaat

SEQ ID NO: 128650 - DNA, 25 bp, Probe sequence
aattatccatagcttgaacctataa

SEQ ID NO: 128651 - DNA, 25 bp, Probe sequence
aattcgctcctgttcttttaagaag

SEQ ID NO: 128652 - DNA, 25 bp, Probe sequence
gctcctgttcttttaagaagttaat

SEQ ID NO: 128653 - DNA, 25 bp, Probe sequence
gcttacattattatcttcaatattc

SEQ ID NO: 128654 - DNA, 25 bp, Probe sequence
tccactaaatttaaaacgcttacat

SEQ ID NO: 128655 - DNA, 25 bp, Probe sequence
tcgctcctgttcttttaagaagtta

SEQ ID NO: 128656 - DNA, 25 bp, Probe sequence
tacattattatcttcaatattcatt

SEQ ID NO: 128657 - DNA, 25 bp, Probe sequence
tatccatagcttgaacctataaata

SEQ ID NO: 128658 - DNA, 25 bp, Probe sequence
tatcttcaatattcattatagtatg

SEQ ID NO: 128659 - DNA, 25 bp, Probe sequence
atgcagttgctcagatcatcgtata

SEQ ID NO: 128660 - DNA, 25 bp, Probe sequence
atgacgtcatttcaaaaatcgatac

SEQ ID NO: 128661 - DNA, 25 bp, Probe sequence
agttgctcagatcatcgtataaaaa

SEQ ID NO: 128662 - DNA, 25 bp, Probe sequence
agttgctcagtcaactgtatacctt

SEQ ID NO: 128663 - DNA, 25 bp, Probe sequence
acgtcatttcaaaaatcgatacaaa

SEQ ID NO: 128664 - DNA, 25 bp, Probe sequence
cagttgctcagatcatcgtataaaa

SEQ ID NO: 128665 - DNA, 25 bp, Probe sequence
gctcagatcatcgtataaaaattaa

SEQ ID NO: 128666 - DNA, 25 bp, Probe sequence
gcagttgctcagatcatcgtataaa

SEQ ID NO: 128667 - DNA, 25 bp, Probe sequence
gacgtcatttcaaaaatcgatacaa

SEQ ID NO: 128668 - DNA, 25 bp, Probe sequence
gttgcgtagtcaactgtataccttt

SEQ ID NO: 128669 - DNA, 25 bp, Probe sequence
gttgctcagtcaactgtataccttt

SEQ ID NO: 128670 - DNA, 25 bp, Probe sequence
gttgctcagatcatcgtataaaaat

SEQ ID NO: 128671 - DNA, 25 bp, Probe sequence
tgcagttgctcagatcatcgtataa

SEQ ID NO: 128672 - DNA, 25 bp, Probe sequence
taatgacgtcatttcaaaaatcgat

SEQ ID NO: 128673 - DNA, 25 bp, Probe sequence
tatgcagttgctcagatcatcgtat

SEQ ID NO: 128674 - DNA, 25 bp, Probe sequence
atatcaacgttaatataacttctat

SEQ ID NO: 128675 - DNA, 25 bp, Probe sequence
ataagcagtaagatgactacaactt

SEQ ID NO: 128676 - DNA, 25 bp, Probe sequence
agtcttcttactgcaattatttttc

SEQ ID NO: 128677 - DNA, 25 bp, Probe sequence
aagaaatactcacattctgccctgc

SEQ ID NO: 128678 - DNA, 25 bp, Probe sequence
aagagaacttttcaaacaatacagt

SEQ ID NO: 128679 - DNA, 25 bp, Probe sequence
cacattctgccctgcaatgcaaatc

SEQ ID NO: 128680 - DNA, 25 bp, Probe sequence
gccctgcaatgcaaatctcgtcaca

SEQ ID NO: 128681 - DNA, 25 bp, Probe sequence
gcgtcattataaaaaggcctcttga

SEQ ID NO: 128682 - DNA, 25 bp, Probe sequence
gcaaatctcgtcacatataaatatt

SEQ ID NO: 128683 - DNA, 25 bp, Probe sequence
gactacaacttaagagtcttcttac

SEQ ID NO: 128684 - DNA, 25 bp, Probe sequence
gttatttttgctatttcaacaaaca

SEQ ID NO: 128685 - DNA, 25 bp, Probe sequence
tgcaatgcaaatctcgtcacatata

SEQ ID NO: 128686 - DNA, 25 bp, Probe sequence
tcttactgcaattatttttcaaata

SEQ ID NO: 128687 - DNA, 25 bp, Probe sequence
tataaaaaggcctcttgaaatccgt

SEQ ID NO: 128688 - DNA, 25 bp, Probe sequence
tacagttgttatttttgctatttca

SEQ ID NO: 128689 - DNA, 25 bp, Probe sequence
atttccccctcttatttatgtggct

SEQ ID NO: 128690 - DNA, 25 bp, Probe sequence
atctctcggcttgtaatatgtataa

SEQ ID NO: 128691 - DNA, 25 bp, Probe sequence
acgtcaagactattacattttcatt

SEQ ID NO: 128692 - DNA, 25 bp, Probe sequence
aacgaatacttagctgatttatgtt

SEQ ID NO: 128693 - DNA, 25 bp, Probe sequence
aattcatagttaaatccgtatctta

SEQ ID NO: 128694 - DNA, 25 bp, Probe sequence
caatttatctctcggcttgtaatat

SEQ ID NO: 128695 - DNA, 25 bp, Probe sequence
cccctcttatttatgtggcttatta

SEQ ID NO: 128696 - DNA, 25 bp, Probe sequence
gcttgttacctaatggaggttacat

SEQ ID NO: 128697 - DNA, 25 bp, Probe sequence
gaattcaattcatagttaaatccgt

SEQ ID NO: 128698 - DNA, 25 bp, Probe sequence
gacatagacaatttatctctcggct

SEQ ID NO: 128699 - DNA, 25 bp, Probe sequence
gatattttgcttgttacctaatgga

SEQ ID NO: 128700 - DNA, 25 bp, Probe sequence
taaaaatacttatctacattacttt

SEQ ID NO: 128701 - DNA, 25 bp, Probe sequence
tacccctattttctatgtaataacg

SEQ ID NO: 128702 - DNA, 25 bp, Probe sequence
tatctacattacttttacccctatt

SEQ ID NO: 128703 - DNA, 25 bp, Probe sequence
ttccccctcttatttatgtggctta

SEQ ID NO: 128704 - DNA, 25 bp, Probe sequence
atgctagcaagcgcttttctatact

SEQ ID NO: 128705 - DNA, 25 bp, Probe sequence
atgatgctagcaagcgcttttctat

SEQ ID NO: 128706 - DNA, 25 bp, Probe sequence
agcaagcgcttttctatactatata

SEQ ID NO: 128707 - DNA, 25 bp, Probe sequence
acaaagcgcttgctagtacctctta

SEQ ID NO: 128708 - DNA, 25 bp, Probe sequence
aacaaagcgcttgctagtacctctt

SEQ ID NO: 128709 - DNA, 25 bp, Probe sequence
aagcgcttgctagtacctcttaaaa

SEQ ID NO: 128710 - DNA, 25 bp, Probe sequence
aagatgatgctagcaagcgcttttc

SEQ ID NO: 128711 - DNA, 25 bp, Probe sequence
caaagcgcttgctagtacctcttaa

SEQ ID NO: 128712 - DNA, 25 bp, Probe sequence
gcgcttgctagtacctcttaaaaag

SEQ ID NO: 128713 - DNA, 25 bp, Probe sequence
gctagtacctcttaaaaagatgatg

SEQ ID NO: 128714 - DNA, 25 bp, Probe sequence
gctagcaagcgcttttctatactat

SEQ ID NO: 128715 - DNA, 25 bp, Probe sequence
gcttgctagtacctcttaaaaagat

SEQ ID NO: 128716 - DNA, 25 bp, Probe sequence
gatgatgctagcaagcgcttttcta

SEQ ID NO: 128717 - DNA, 25 bp, Probe sequence
gatgctagcaagcgcttttctatac

SEQ ID NO: 128718 - DNA, 25 bp, Probe sequence
taacaaagcgcttgctagtacctct

SEQ ID NO: 128719 - DNA, 25 bp, Probe sequence
attaacatacccttatttctaacat

SEQ ID NO: 128720 - DNA, 25 bp, Probe sequence
atgtaatctattcaattcatatttt

SEQ ID NO: 128721 - DNA, 25 bp, Probe sequence
aacatatcaatcagaatttacaatt

SEQ ID NO: 128722 - DNA, 25 bp, Probe sequence
aaggtagcctcccatatttatgtaa

SEQ ID NO: 128723 - DNA, 25 bp, Probe sequence
aatctattcaattcatattttacat

SEQ ID NO: 128724 - DNA, 25 bp, Probe sequence
aataatactcgttaaggagaatgat

SEQ ID NO: 128725 - DNA, 25 bp, Probe sequence
caattcatattttacatgactcgta

SEQ ID NO: 128726 - DNA, 25 bp, Probe sequence
catattttacatgactcgtataaat

SEQ ID NO: 128727 - DNA, 25 bp, Probe sequence
gcctcccatatttatgtaatctatt

SEQ ID NO: 128728 - DNA, 25 bp, Probe sequence
gactcgtataaattaacataccctt

SEQ ID NO: 128729 - DNA, 25 bp, Probe sequence
ggtagcctcccatatttatgtaatc

SEQ ID NO: 128730 - DNA, 25 bp, Probe sequence
tcccatatttatgtaatctattcaa

SEQ ID NO: 128731 - DNA, 25 bp, Probe sequence
tctaacatttttttaaacatatcaa

SEQ ID NO: 128732 - DNA, 25 bp, Probe sequence
taacatacccttatttctaacattt

SEQ ID NO: 128733 - DNA, 25 bp, Probe sequence
tagcctcccatatttatgtaatcta

SEQ ID NO: 128734 - DNA, 25 bp, Probe sequence
attgattccttttttatgttatata

SEQ ID NO: 128735 - DNA, 25 bp, Probe sequence
atcaacttacacatcgtttgtataa

SEQ ID NO: 128736 - DNA, 25 bp, Probe sequence
atctataaccactgatgctattgat

SEQ ID NO: 128737 - DNA, 25 bp, Probe sequence
aggaatcaacttacacatcgtttgt

SEQ ID NO: 128738 - DNA, 25 bp, Probe sequence
accactgatgctattgattcctttt

SEQ ID NO: 128739 - DNA, 25 bp, Probe sequence
aaaggaatcaacttacacatcgttt

SEQ ID NO: 128740 - DNA, 25 bp, Probe sequence
aatagtcttatctataaccactgat

SEQ ID NO: 128741 - DNA, 25 bp, Probe sequence
cacatcgtttgtataatagtcttat

SEQ ID NO: 128742 - DNA, 25 bp, Probe sequence
cactgatgctattgattcctttttt

SEQ ID NO: 128743 - DNA, 25 bp, Probe sequence
gctattgattccttttttatgttat

SEQ ID NO: 128744 - DNA, 25 bp, Probe sequence
gatgctattgattccttttttatgt

SEQ ID NO: 128745 - DNA, 25 bp, Probe sequence
gattccttttttatgttatatattt

SEQ ID NO: 128746 - DNA, 25 bp, Probe sequence
gtcttatctataaccactgatgcta

SEQ ID NO: 128747 - DNA, 25 bp, Probe sequence
taaccactgatgctattgattcctt

SEQ ID NO: 128748 - DNA, 25 bp, Probe sequence
ttacctttcattataagtgttaaat

SEQ ID NO: 128749 - DNA, 25 bp, Probe sequence
atttgctatcaataatctatcggct

SEQ ID NO: 128750 - DNA, 25 bp, Probe sequence
atcaataatctatcggctacatatc

SEQ ID NO: 128751 - DNA, 25 bp, Probe sequence
atcacacatttgctatcaataatct

SEQ ID NO: 128752 - DNA, 25 bp, Probe sequence
actccatcacacatttgctatcaat

SEQ ID NO: 128753 - DNA, 25 bp, Probe sequence
acacatttgctatcaataatctatc

SEQ ID NO: 128754 - DNA, 25 bp, Probe sequence
caataatctatcggctacatatcat

SEQ ID NO: 128755 - DNA, 25 bp, Probe sequence
cactccatcacacatttgctatcaa

SEQ ID NO: 128756 - DNA, 25 bp, Probe sequence
ctatcaataatctatcggctacata

SEQ ID NO: 128757 - DNA, 25 bp, Probe sequence
ctccatcacacatttgctatcaata

SEQ ID NO: 128758 - DNA, 25 bp, Probe sequence
ccatcacacatttgctatcaataat

SEQ ID NO: 128759 - DNA, 25 bp, Probe sequence
gctatcaataatctatcggctacat

SEQ ID NO: 128760 - DNA, 25 bp, Probe sequence
tgctatcaataatctatcggctaca

SEQ ID NO: 128761 - DNA, 25 bp, Probe sequence
tccatcacacatttgctatcaataa

SEQ ID NO: 128762 - DNA, 25 bp, Probe sequence
tcactccatcacacatttgctatca

SEQ ID NO: 128763 - DNA, 25 bp, Probe sequence
ttgctatcaataatctatcggctac

SEQ ID NO: 128764 - DNA, 25 bp, Probe sequence
attctctataaatgcaatattttta

SEQ ID NO: 128765 - DNA, 25 bp, Probe sequence
atttctattctctataaatgcaata

SEQ ID NO: 128766 - DNA, 25 bp, Probe sequence
atataacatttctattctctataaa

SEQ ID NO: 128767 - DNA, 25 bp, Probe sequence
atcttaatataacatttctattctc

SEQ ID NO: 128768 - DNA, 25 bp, Probe sequence
acatttctattctctataaatgcaa

SEQ ID NO: 128769 - DNA, 25 bp, Probe sequence
aacatttctattctctataaatgca

SEQ ID NO: 128770 - DNA, 25 bp, Probe sequence
aatataacatttctattctctataa

SEQ ID NO: 128771 - DNA, 25 bp, Probe sequence
cttaatataacatttctattctcta

SEQ ID NO: 128772 - DNA, 25 bp, Probe sequence
ctattctctataaatgcaatatttt

SEQ ID NO: 128773 - DNA, 25 bp, Probe sequence
gtatttatcttaatataacatttct

SEQ ID NO: 128774 - DNA, 25 bp, Probe sequence
taatataacatttctattctctata

SEQ ID NO: 128775 - DNA, 25 bp, Probe sequence
taacatttctattctctataaatgc

SEQ ID NO: 128776 - DNA, 25 bp, Probe sequence
tataacatttctattctctataaat

SEQ ID NO: 128777 - DNA, 25 bp, Probe sequence
ttaatataacatttctattctctat

SEQ ID NO: 128778 - DNA, 25 bp, Probe sequence
ttctattctctataaatgcaatatt

SEQ ID NO: 128779 - DNA, 25 bp, Probe sequence
atatcccagcatcattgtgccgaga

SEQ ID NO: 128780 - DNA, 25 bp, Probe sequence
atcccagcatcattgtgccgagata

SEQ ID NO: 128781 - DNA, 25 bp, Probe sequence
aaatatcccagcatcattgtgccga

SEQ ID NO: 128782 - DNA, 25 bp, Probe sequence
aaaaaatatcccagcatcattgtgc

SEQ ID NO: 128783 - DNA, 25 bp, Probe sequence
aaaatatcccagcatcattgtgccg

SEQ ID NO: 128784 - DNA, 25 bp, Probe sequence
aatatcccagcatcattgtgccgag

SEQ ID NO: 128785 - DNA, 25 bp, Probe sequence
cagcatcattgtgccgagatattta

SEQ ID NO: 128786 - DNA, 25 bp, Probe sequence
catacctttattgccttatttgtaa

SEQ ID NO: 128787 - DNA, 25 bp, Probe sequence
cccagcatcattgtgccgagatatt

SEQ ID NO: 128788 - DNA, 25 bp, Probe sequence
cccatacctttattgccttatttgt

SEQ ID NO: 128789 - DNA, 25 bp, Probe sequence
ccatacctttattgccttatttgta

SEQ ID NO: 128790 - DNA, 25 bp, Probe sequence
gcatcattgtgccgagatatttata

SEQ ID NO: 128791 - DNA, 25 bp, Probe sequence
tcccatacctttattgccttatttg

SEQ ID NO: 128792 - DNA, 25 bp, Probe sequence
tcattgtgccgagatatttatatca

SEQ ID NO: 128793 - DNA, 25 bp, Probe sequence
tatcccagcatcattgtgccgagat

SEQ ID NO: 128794 - DNA, 25 bp, Probe sequence
atttaatcatataattgcgaggaga

SEQ ID NO: 128795 - DNA, 25 bp, Probe sequence
atctctgcaaataaaatattccata

SEQ ID NO: 128796 - DNA, 25 bp, Probe sequence
atgtcatactgcaatgttcacgttt

SEQ ID NO: 128797 - DNA, 25 bp, Probe sequence
agtctcaatctctgcaaataaaata

SEQ ID NO: 128798 - DNA, 25 bp, Probe sequence
agtatatactttacatttttataat

SEQ ID NO: 128799 - DNA, 25 bp, Probe sequence
aaatatgtcatactgcaatgttcac

SEQ ID NO: 128800 - DNA, 25 bp, Probe sequence
aaaagagtctcaatctctgcaaata

SEQ ID NO: 128801 - DNA, 25 bp, Probe sequence
aagtcaacgcttcgttaactatact

SEQ ID NO: 128802 - DNA, 25 bp, Probe sequence
catactgcaatgttcacgtttaaaa

SEQ ID NO: 128803 - DNA, 25 bp, Probe sequence
gcttcgttaactatactaaaaatat

SEQ ID NO: 128804 - DNA, 25 bp, Probe sequence
gttcacgtttaaaagagtctcaatc

SEQ ID NO: 128805 - DNA, 25 bp, Probe sequence
tcaacgcttcgttaactatactaaa

SEQ ID NO: 128806 - DNA, 25 bp, Probe sequence
tataattcttaacaatactatttta

SEQ ID NO: 128807 - DNA, 25 bp, Probe sequence
tattttatcaaatatttaccacaat

SEQ ID NO: 128808 - DNA, 25 bp, Probe sequence
tttcatttttatttaatttaatcat

SEQ ID NO: 128809 - DNA, 25 bp, Probe sequence
atattttttgattcatctcctcttt

SEQ ID NO: 128810 - DNA, 25 bp, Probe sequence
atgccatctttcattgattactatc

SEQ ID NO: 128811 - DNA, 25 bp, Probe sequence
atgtataatgttaaaagtgcccttt

SEQ ID NO: 128812 - DNA, 25 bp, Probe sequence
agtgcccttttataacgcttacata

SEQ ID NO: 128813 - DNA, 25 bp, Probe sequence
aaatctatctccttataagtcaatc

SEQ ID NO: 128814 - DNA, 25 bp, Probe sequence
caatcgtgccgccaacatgcggatg

SEQ ID NO: 128815 - DNA, 25 bp, Probe sequence
gccgccaacatgcggatgggttgat

SEQ ID NO: 128816 - DNA, 25 bp, Probe sequence
gcggatgggttgattgtttttttgt

SEQ ID NO: 128817 - DNA, 25 bp, Probe sequence
gaaaatgaaatctatctccttataa

SEQ ID NO: 128818 - DNA, 25 bp, Probe sequence
gaaatattgatttgttgcatgtata

SEQ ID NO: 128819 - DNA, 25 bp, Probe sequence
gattcatctcctctttttgaacttg

SEQ ID NO: 128820 - DNA, 25 bp, Probe sequence
gtttttttgtccatcatattttttg

SEQ ID NO: 128821 - DNA, 25 bp, Probe sequence
gggagagggatattcaacaaggggg

SEQ ID NO: 128822 - DNA, 25 bp, Probe sequence
gggttgattgtttttttgtccatca

SEQ ID NO: 128823 - DNA, 25 bp, Probe sequence
taagtcaatcaatcgtgccgccaac

SEQ ID NO: 128824 - DNA, 25 bp, Probe sequence
attctctattattttatcatgaatt

SEQ ID NO: 128825 - DNA, 25 bp, Probe sequence
ataacgaattctctattattttatc

SEQ ID NO: 128826 - DNA, 25 bp, Probe sequence
acgaattctctattattttatcatg

SEQ ID NO: 128827 - DNA, 25 bp, Probe sequence
aacgaattctctattattttatcat

SEQ ID NO: 128828 - DNA, 25 bp, Probe sequence
aataacgaattctctattattttat

SEQ ID NO: 128829 - DNA, 25 bp, Probe sequence
aattctctattattttatcatgaat

SEQ ID NO: 128830 - DNA, 25 bp, Probe sequence
ctctattattttatcatgaattaaa

SEQ ID NO: 128831 - DNA, 25 bp, Probe sequence
cgaattctctattattttatcatga

SEQ ID NO: 128832 - DNA, 25 bp, Probe sequence
ccctaaataacgaattctctattat

SEQ ID NO: 128833 - DNA, 25 bp, Probe sequence
cctaaataacgaattctctattatt

SEQ ID NO: 128834 - DNA, 25 bp, Probe sequence
gaattctctattattttatcatgaa

SEQ ID NO: 128835 - DNA, 25 bp, Probe sequence
tccccctaaataacgaattctctat

SEQ ID NO: 128836 - DNA, 25 bp, Probe sequence
tctctattattttatcatgaattaa

SEQ ID NO: 128837 - DNA, 25 bp, Probe sequence
taacgaattctctattattttatca

SEQ ID NO: 128838 - DNA, 25 bp, Probe sequence
ttctctattattttatcatgaatta

SEQ ID NO: 128839 - DNA, 25 bp, Probe sequence
attagtctatataacccttgctata

SEQ ID NO: 128840 - DNA, 25 bp, Probe sequence
atcgtaactgggtcaattgtatgtt

SEQ ID NO: 128841 - DNA, 25 bp, Probe sequence
atgtcaaatatcatcttgcatgaaa

SEQ ID NO: 128842 - DNA, 25 bp, Probe sequence
acccaattacgttttcatgtcaaat

SEQ ID NO: 128843 - DNA, 25 bp, Probe sequence
caattagtctatataacccttgcta

SEQ ID NO: 128844 - DNA, 25 bp, Probe sequence
caattacgttttcatgtcaaatatc

SEQ ID NO: 128845 - DNA, 25 bp, Probe sequence
tcttgcatgaaatcgtaactgggtc

SEQ ID NO: 128846 - DNA, 25 bp, Probe sequence
catcttgcatgaaatcgtaactggg

SEQ ID NO: 128847 - DNA, 25 bp, Probe sequence
gcatgaaatcgtaactgggtcaatt

SEQ ID NO: 128848 - DNA, 25 bp, Probe sequence
gaaatcgtaactgggtcaattgtat

SEQ ID NO: 128849 - DNA, 25 bp, Probe sequence
gttttcatgtcaaatatcatcttgc

SEQ ID NO: 128850 - DNA, 25 bp, Probe sequence
gtctatataacccttgctatatttt

SEQ ID NO: 128851 - DNA, 25 bp, Probe sequence
tacgttttcatgtcaaatatcatct

SEQ ID NO: 128852 - DNA, 25 bp, Probe sequence
tataacccttgctatattttcaaaa

SEQ ID NO: 128853 - DNA, 25 bp, Probe sequence
tttcatgtcaaatatcatcttgcat

SEQ ID NO: 128854 - DNA, 25 bp, Probe sequence
atatattttatgtatccaatgattg

SEQ ID NO: 128855 - DNA, 25 bp, Probe sequence
agaattttatacggaggtgccttgc

SEQ ID NO: 128856 - DNA, 25 bp, Probe sequence
aacagacaactagacatattgataa

SEQ ID NO: 128857 - DNA, 25 bp, Probe sequence
caatgattgtctatcccctacattc

SEQ ID NO: 128858 - DNA, 25 bp, Probe sequence
ctacattctttgccaaaaaaagtat

SEQ ID NO: 128859 - DNA, 25 bp, Probe sequence
gaagatattttctttttcactttca

SEQ ID NO: 128860 - DNA, 25 bp, Probe sequence
gactacaattgaacagtgatttttc

SEQ ID NO: 128861 - DNA, 25 bp, Probe sequence
gatattttctttttcactttcaaat

SEQ ID NO: 128862 - DNA, 25 bp, Probe sequence
gatttttcatcattataacagacaa

SEQ ID NO: 128863 - DNA, 25 bp, Probe sequence
tgtcttaacctacctttatatattt

SEQ ID NO: 128864 - DNA, 25 bp, Probe sequence
tgaacagtgatttttcatcattata

SEQ ID NO: 128865 - DNA, 25 bp, Probe sequence
taacctacctttatatattttatgt

SEQ ID NO: 128866 - DNA, 25 bp, Probe sequence
tatccaatgattgtctatcccctac

SEQ ID NO: 128867 - DNA, 25 bp, Probe sequence
ttcactttcaaatttaagactacaa

SEQ ID NO: 128868 - DNA, 25 bp, Probe sequence
ttcatcattataacagacaactaga

SEQ ID NO: 128869 - DNA, 25 bp, Probe sequence
atttttgattagtcacacttcaatt

SEQ ID NO: 128870 - DNA, 25 bp, Probe sequence
acctactacgtcaatgccaaatttt

SEQ ID NO: 128871 - DNA, 25 bp, Probe sequence
actacgtcaatgccaaattttaata

SEQ ID NO: 128872 - DNA, 25 bp, Probe sequence
aaatcatgtccccacaacataattt

SEQ ID NO: 128873 - DNA, 25 bp, Probe sequence
aaagtatcgataaccatatttggca

SEQ ID NO: 128874 - DNA, 25 bp, Probe sequence
catatttggcaccgatactttaaaa

SEQ ID NO: 128875 - DNA, 25 bp, Probe sequence
gccaaattttaatataattcctctt

SEQ ID NO: 128876 - DNA, 25 bp, Probe sequence
gtcacacttcaattaatttatttta

SEQ ID NO: 128877 - DNA, 25 bp, Probe sequence
tgtccccacaacataatttttgatt

SEQ ID NO: 128878 - DNA, 25 bp, Probe sequence
taaccatatttggcaccgatacttt

SEQ ID NO: 128879 - DNA, 25 bp, Probe sequence
taatgacctactacgtcaatgccaa

SEQ ID NO: 128880 - DNA, 25 bp, Probe sequence
taatataattcctcttttattttat

SEQ ID NO: 128881 - DNA, 25 bp, Probe sequence
tactttaaaaatcatgtccccacaa

SEQ ID NO: 128882 - DNA, 25 bp, Probe sequence
tttctttattaatgacctactacgt

SEQ ID NO: 128883 - DNA, 25 bp, Probe sequence
ttcctgctttttctttattaatgac

SEQ ID NO: 128884 - DNA, 25 bp, Probe sequence
agagtgttggttaaaattcacaaag

SEQ ID NO: 128885 - DNA, 25 bp, Probe sequence
agacatgataactaaaaaaacacca

SEQ ID NO: 128886 - DNA, 25 bp, Probe sequence
acaccaacaatttttataagagtgt

SEQ ID NO: 128887 - DNA, 25 bp, Probe sequence
aacaccaacaatttttataagagtg

SEQ ID NO: 128888 - DNA, 25 bp, Probe sequence
caccaacaatttttataagagtgtt

SEQ ID NO: 128889 - DNA, 25 bp, Probe sequence
catgataactaaaaaaacaccaaca

SEQ ID NO: 128890 - DNA, 25 bp, Probe sequence
gacatgataactaaaaaaacaccaa

SEQ ID NO: 128891 - DNA, 25 bp, Probe sequence
gagacatgataactaaaaaaacacc

SEQ ID NO: 128892 - DNA, 25 bp, Probe sequence
gagtgttggttaaaattcacaaagg

SEQ ID NO: 128893 - DNA, 25 bp, Probe sequence
gtgttggttaaaattcacaaaggtg

SEQ ID NO: 128894 - DNA, 25 bp, Probe sequence
tgttggttaaaattcacaaaggtgt

SEQ ID NO: 128895 - DNA, 25 bp, Probe sequence
tgataactaaaaaaacaccaacaat

SEQ ID NO: 128896 - DNA, 25 bp, Probe sequence
taagagtgttggttaaaattcacaa

SEQ ID NO: 128897 - DNA, 25 bp, Probe sequence
ttaaaattcacaaaggtgtaacaat

SEQ ID NO: 128898 - DNA, 25 bp, Probe sequence
atttccacataataatctcggcatt

SEQ ID NO: 128899 - DNA, 25 bp, Probe sequence
aaaccaaatggatagataatagtac

SEQ ID NO: 128900 - DNA, 25 bp, Probe sequence
aaaaatgccgagatttccacataat

SEQ ID NO: 128901 - DNA, 25 bp, Probe sequence
aatgccgagatttccacataataat

SEQ ID NO: 128902 - DNA, 25 bp, Probe sequence
gaaatgctataaaacaactagataa

SEQ ID NO: 128903 - DNA, 25 bp, Probe sequence
gtacatatgttacggtgctatcaat

SEQ ID NO: 128904 - DNA, 25 bp, Probe sequence
ggtgctatcaatataaaaatgccga

SEQ ID NO: 128905 - DNA, 25 bp, Probe sequence
ggtctatgaatagctcaagttttgt

SEQ ID NO: 128906 - DNA, 25 bp, Probe sequence
tgaatagctcaagttttgtttttta

SEQ ID NO: 128907 - DNA, 25 bp, Probe sequence
tccacataataatctcggcattttt

SEQ ID NO: 128908 - DNA, 25 bp, Probe sequence
taatttttcaattcaatataataga

SEQ ID NO: 128909 - DNA, 25 bp, Probe sequence
tacggtttcattctaataaagaaat

SEQ ID NO: 128910 - DNA, 25 bp, Probe sequence
tagtacatatgttacggtgctatca

SEQ ID NO: 128911 - DNA, 25 bp, Probe sequence
tatgttacggtgctatcaatataaa

SEQ ID NO: 128912 - DNA, 25 bp, Probe sequence
ttgatgctaaattcataggtctatg

SEQ ID NO: 128913 - DNA, 25 bp, Probe sequence
attactcacaagtttcatgaacatc

SEQ ID NO: 128914 - DNA, 25 bp, Probe sequence
atatattagcattactcacaagttt

SEQ ID NO: 128915 - DNA, 25 bp, Probe sequence
atctcctttatataatgattagttt

SEQ ID NO: 128916 - DNA, 25 bp, Probe sequence
atgactatctcctttatataatgat

SEQ ID NO: 128917 - DNA, 25 bp, Probe sequence
agtttataactatcacgaacagaaa

SEQ ID NO: 128918 - DNA, 25 bp, Probe sequence
agcattactcacaagtttcatgaac

SEQ ID NO: 128919 - DNA, 25 bp, Probe sequence
aaatatgctcttttatatattagca

SEQ ID NO: 128920 - DNA, 25 bp, Probe sequence
aactatcacgaacagaaactaaatt

SEQ ID NO: 128921 - DNA, 25 bp, Probe sequence
ctcttttatatattagcattactca

SEQ ID NO: 128922 - DNA, 25 bp, Probe sequence
gaaactaaatttaaatatgctcttt

SEQ ID NO: 128923 - DNA, 25 bp, Probe sequence
gactatctcctttatataatgatta

SEQ ID NO: 128924 - DNA, 25 bp, Probe sequence
tcacaagtttcatgaacatcattac

SEQ ID NO: 128925 - DNA, 25 bp, Probe sequence
tactcacaagtttcatgaacatcat

SEQ ID NO: 128926 - DNA, 25 bp, Probe sequence
tattagcattactcacaagtttcat

SEQ ID NO: 128927 - DNA, 25 bp, Probe sequence
ttagcattactcacaagtttcatga

SEQ ID NO: 128928 - DNA, 25 bp, Probe sequence
attctgttcctcttcaattgttata

SEQ ID NO: 128929 - DNA, 25 bp, Probe sequence
attatttcattattttaccattatt

SEQ ID NO: 128930 - DNA, 25 bp, Probe sequence
atattatcccaagaatacaattcaa

SEQ ID NO: 128931 - DNA, 25 bp, Probe sequence
acattatttatgaaagtactctctc

SEQ ID NO: 128932 - DNA, 25 bp, Probe sequence
aatacatacatatttagtcttatat

SEQ ID NO: 128933 - DNA, 25 bp, Probe sequence
ctgttcctcttcaattgttatatgt

SEQ ID NO: 128934 - DNA, 25 bp, Probe sequence
cctcttcaattgttatatgtatatc

SEQ ID NO: 128935 - DNA, 25 bp, Probe sequence
cctcaattctgttcctcttcaattg

SEQ ID NO: 128936 - DNA, 25 bp, Probe sequence
gaattgtaccttattacattattta

SEQ ID NO: 128937 - DNA, 25 bp, Probe sequence
gaaggtgttcaatacatacatattt

SEQ ID NO: 128938 - DNA, 25 bp, Probe sequence
gaaagtactctctcaattataacta

SEQ ID NO: 128939 - DNA, 25 bp, Probe sequence
gaaatgattaactttactttagaat

SEQ ID NO: 128940 - DNA, 25 bp, Probe sequence
gtactctctcaattataactaaaaa

SEQ ID NO: 128941 - DNA, 25 bp, Probe sequence
tattttacaaatattatcccaagaa

SEQ ID NO: 128942 - DNA, 25 bp, Probe sequence
ttagtcttatatttgaacaccttca

SEQ ID NO: 128943 - DNA, 25 bp, Probe sequence
aacacaaaaatattgacccatatat

SEQ ID NO: 128944 - DNA, 25 bp, Probe sequence
aagacttacatgttgctgcgttctc

SEQ ID NO: 128945 - DNA, 25 bp, Probe sequence
aatcattgtatcgcacatctaaaaa

SEQ ID NO: 128946 - DNA, 25 bp, Probe sequence
aatcatctacatttatatttaatat

SEQ ID NO: 128947 - DNA, 25 bp, Probe sequence
cagcaatcattgtatcgcacatcta

SEQ ID NO: 128948 - DNA, 25 bp, Probe sequence
ctatttttataaagtatcctcagca

SEQ ID NO: 128949 - DNA, 25 bp, Probe sequence
gcgttctccttgctttaataaatta

SEQ ID NO: 128950 - DNA, 25 bp, Probe sequence
gcaatcattgtatcgcacatctaaa

SEQ ID NO: 128951 - DNA, 25 bp, Probe sequence
gtatcctcagcaatcattgtatcgc

SEQ ID NO: 128952 - DNA, 25 bp, Probe sequence
gtatcgcacatctaaaaaacacaaa

SEQ ID NO: 128953 - DNA, 25 bp, Probe sequence
tgcgttctccttgctttaataaatt

SEQ ID NO: 128954 - DNA, 25 bp, Probe sequence
tcctcagcaatcattgtatcgcaca

SEQ ID NO: 128955 - DNA, 25 bp, Probe sequence
taaagtatcctcagcaatcattgta

SEQ ID NO: 128956 - DNA, 25 bp, Probe sequence
tatttattataagcgaggtgtcagt

SEQ ID NO: 128957 - DNA, 25 bp, Probe sequence
ttaagacttacatgttgctgcgttc

SEQ ID NO: 128958 - DNA, 25 bp, Probe sequence
atattgcgtcaaactatctttaaat

SEQ ID NO: 128959 - DNA, 25 bp, Probe sequence
ataaactaaagcacgtcatcatttt

SEQ ID NO: 128960 - DNA, 25 bp, Probe sequence
aggttgtttctaatattgcgtcaaa

SEQ ID NO: 128961 - DNA, 25 bp, Probe sequence
aatcattaacatttagcgtctttac

SEQ ID NO: 128962 - DNA, 25 bp, Probe sequence
caaatcgtattctgttatctaactt

SEQ ID NO: 128963 - DNA, 25 bp, Probe sequence
ctaacttttatactactatgtctta

SEQ ID NO: 128964 - DNA, 25 bp, Probe sequence
ctgttatctaacttttatactacta

SEQ ID NO: 128965 - DNA, 25 bp, Probe sequence
gcgtcaaactatctttaaatattcg

SEQ ID NO: 128966 - DNA, 25 bp, Probe sequence
gcacgtcatcattttatataatagt

SEQ ID NO: 128967 - DNA, 25 bp, Probe sequence
gtaaacccaaatcgtattctgttat

SEQ ID NO: 128968 - DNA, 25 bp, Probe sequence
taatagtgacgcgcttttttgtaaa

SEQ ID NO: 128969 - DNA, 25 bp, Probe sequence
taatccttgattagacaattgttat

SEQ ID NO: 128970 - DNA, 25 bp, Probe sequence
taacatttagcgtctttacaagcca

SEQ ID NO: 128971 - DNA, 25 bp, Probe sequence
taaatattcgttaatccttgattag

SEQ ID NO: 128972 - DNA, 25 bp, Probe sequence
tactactatgtcttaaatcattaac

SEQ ID NO: 128973 - DNA, 25 bp, Probe sequence
atttcttctttagcgtcagtataag

SEQ ID NO: 128974 - DNA, 25 bp, Probe sequence
cttctttagcgtcagtataaggttg

SEQ ID NO: 128975 - DNA, 25 bp, Probe sequence
ctatttcttctttagcgtcagtata

SEQ ID NO: 128976 - DNA, 25 bp, Probe sequence
ccctatttcttctttagcgtcagta

SEQ ID NO: 128977 - DNA, 25 bp, Probe sequence
cctatttcttctttagcgtcagtat

SEQ ID NO: 128978 - DNA, 25 bp, Probe sequence
gcgtcagtataaggttgaaatatga

SEQ ID NO: 128979 - DNA, 25 bp, Probe sequence
gaaatatgaactcaatatgaacaat

SEQ ID NO: 128980 - DNA, 25 bp, Probe sequence
tccctatttcttctttagcgtcagt

SEQ ID NO: 128981 - DNA, 25 bp, Probe sequence
tcttctttagcgtcagtataaggtt

SEQ ID NO: 128982 - DNA, 25 bp, Probe sequence
tctttagcgtcagtataaggttgaa

SEQ ID NO: 128983 - DNA, 25 bp, Probe sequence
tatgaacaattgtttttttacgcaa

SEQ ID NO: 128984 - DNA, 25 bp, Probe sequence
tatttcttctttagcgtcagtataa

SEQ ID NO: 128985 - DNA, 25 bp, Probe sequence
tttcttctttagcgtcagtataagg

SEQ ID NO: 128986 - DNA, 25 bp, Probe sequence
tttacgcaaaaatattttacatgta

SEQ ID NO: 128987 - DNA, 25 bp, Probe sequence
ttagcgtcagtataaggttgaaata

SEQ ID NO: 128988 - DNA, 25 bp, Probe sequence
attgattagcgctttctagccactt

SEQ ID NO: 128989 - DNA, 25 bp, Probe sequence
ataattttgaaggaggcattaacct

SEQ ID NO: 128990 - DNA, 25 bp, Probe sequence
atcgatggtcatttatggtttaata

SEQ ID NO: 128991 - DNA, 25 bp, Probe sequence
agcgctttctagccacttaacattt

SEQ ID NO: 128992 - DNA, 25 bp, Probe sequence
acatttaatttctaccattcaacaa

SEQ ID NO: 128993 - DNA, 25 bp, Probe sequence
aacatttctgtttttatttcaggag

SEQ ID NO: 128994 - DNA, 25 bp, Probe sequence
aatatatcgatggtcatttatggtt

SEQ ID NO: 128995 - DNA, 25 bp, Probe sequence
gccacttaacatttaatttctacca

SEQ ID NO: 128996 - DNA, 25 bp, Probe sequence
gctttctagccacttaacatttaat

SEQ ID NO: 128997 - DNA, 25 bp, Probe sequence
gattagcgctttctagccacttaac

SEQ ID NO: 128998 - DNA, 25 bp, Probe sequence
ggaggtatcttttatattgattagc

SEQ ID NO: 128999 - DNA, 25 bp, Probe sequence
tgtttttatttcaggaggtatcttt

SEQ ID NO: 129000 - DNA, 25 bp, Probe sequence
tctctacctcctgaaaaaacatttc

SEQ ID NO: 129001 - DNA, 25 bp, Probe sequence
ttagcgctttctagccacttaacat

SEQ ID NO: 129002 - DNA, 25 bp, Probe sequence
ttctaccattcaacaaaatttaaat

SEQ ID NO: 129003 - DNA, 25 bp, Probe sequence
atcacattaaaaaagacattaccgt

SEQ ID NO: 129004 - DNA, 25 bp, Probe sequence
acggtaatgtctatcacattaaaaa

SEQ ID NO: 129005 - DNA, 25 bp, Probe sequence
aaacggtaatgtctatcacattaaa

SEQ ID NO: 129006 - DNA, 25 bp, Probe sequence
aaaaaacggtaatgtctatcacatt

SEQ ID NO: 129007 - DNA, 25 bp, Probe sequence
aaaaacggtaatgtctatcacatta

SEQ ID NO: 129008 - DNA, 25 bp, Probe sequence
aaaacggtaatgtctatcacattaa

SEQ ID NO: 129009 - DNA, 25 bp, Probe sequence
aacggtaatgtctatcacattaaaa

SEQ ID NO: 129010 - DNA, 25 bp, Probe sequence
cactaaaaaacggtaatgtctatca

SEQ ID NO: 129011 - DNA, 25 bp, Probe sequence
ctaaaaaacggtaatgtctatcaca

SEQ ID NO: 129012 - DNA, 25 bp, Probe sequence
ctatcacattaaaaaagacattacc

SEQ ID NO: 129013 - DNA, 25 bp, Probe sequence
cggtaatgtctatcacattaaaaaa

SEQ ID NO: 129014 - DNA, 25 bp, Probe sequence
ggtaatgtctatcacattaaaaaag

SEQ ID NO: 129015 - DNA, 25 bp, Probe sequence
tcacattaaaaaagacattaccgtt

SEQ ID NO: 129016 - DNA, 25 bp, Probe sequence
taaaaaacggtaatgtctatcacat

SEQ ID NO: 129017 - DNA, 25 bp, Probe sequence
tatcacattaaaaaagacattaccg

SEQ ID NO: 129018 - DNA, 25 bp, Probe sequence
attattataatgtcaaacttctttc

SEQ ID NO: 129019 - DNA, 25 bp, Probe sequence
ataagtgtctcaataggttcccatg

SEQ ID NO: 129020 - DNA, 25 bp, Probe sequence
atctcaccttctgtatatttatatt

SEQ ID NO: 129021 - DNA, 25 bp, Probe sequence
aacataaagcgctaccattattata

SEQ ID NO: 129022 - DNA, 25 bp, Probe sequence
aaccttaacagctatcaaccaattt

SEQ ID NO: 129023 - DNA, 25 bp, Probe sequence
gcgatagcacaaagacaaaaccaca

SEQ ID NO: 129024 - DNA, 25 bp, Probe sequence
gctctattactatctactatgtata

SEQ ID NO: 129025 - DNA, 25 bp, Probe sequence
gaaaacatctcaccttctgtatatt

SEQ ID NO: 129026 - DNA, 25 bp, Probe sequence
gacaaaaccacaaaccttaacagct

SEQ ID NO: 129027 - DNA, 25 bp, Probe sequence
gattactcactattcattttaacat

SEQ ID NO: 129028 - DNA, 25 bp, Probe sequence
gtcaaacttctttcattaatgatcc

SEQ ID NO: 129029 - DNA, 25 bp, Probe sequence
ggtgatgctctattactatctacta

SEQ ID NO: 129030 - DNA, 25 bp, Probe sequence
taggttcccatggtgatgctctatt

SEQ ID NO: 129031 - DNA, 25 bp, Probe sequence
tttgattgctgattactcactattc

SEQ ID NO: 129032 - DNA, 25 bp, Probe sequence
ttatatactttatgtgcgatagcac

SEQ ID NO: 129033 - DNA, 25 bp, Probe sequence
atatcactttcctatttaattgttt

SEQ ID NO: 129034 - DNA, 25 bp, Probe sequence
atcgataacattttacagaacagtg

SEQ ID NO: 129035 - DNA, 25 bp, Probe sequence
aaagtagtagtgtaattgcttcatt

SEQ ID NO: 129036 - DNA, 25 bp, Probe sequence
cagtgagattaatgtgatttttttc

SEQ ID NO: 129037 - DNA, 25 bp, Probe sequence
gctctggctatagcattttgttatc

SEQ ID NO: 129038 - DNA, 25 bp, Probe sequence
gctatagcattttgttatcgataac

SEQ ID NO: 129039 - DNA, 25 bp, Probe sequence
gcttcattaaaatcatgctctggct

SEQ ID NO: 129040 - DNA, 25 bp, Probe sequence
gactcttctttccataaagtagtag

SEQ ID NO: 129041 - DNA, 25 bp, Probe sequence
gactattaacaatatcactttccta

SEQ ID NO: 129042 - DNA, 25 bp, Probe sequence
gtaacttatactattcatgaatttt

SEQ ID NO: 129043 - DNA, 25 bp, Probe sequence
ggaagatactacgatgagaaatgga

SEQ ID NO: 129044 - DNA, 25 bp, Probe sequence
ggctgactcttctttccataaagta

SEQ ID NO: 129045 - DNA, 25 bp, Probe sequence
tgaattttacataagaccgtgctaa

SEQ ID NO: 129046 - DNA, 25 bp, Probe sequence
tataccattttttcagactattaac

SEQ ID NO: 129047 - DNA, 25 bp, Probe sequence
tttcattttaaatctgttcatcaaa

SEQ ID NO: 129048 - DNA, 25 bp, Probe sequence
attcatattatagagtttaccgttt

SEQ ID NO: 129049 - DNA, 25 bp, Probe sequence
atttctcagtggctgtgaatgaggt

SEQ ID NO: 129050 - DNA, 25 bp, Probe sequence
aaaccctaattcatattatagagtt

SEQ ID NO: 129051 - DNA, 25 bp, Probe sequence
aacttgcatcatagttatattaaca

SEQ ID NO: 129052 - DNA, 25 bp, Probe sequence
cagtggctgtgaatgaggtttaaaa

SEQ ID NO: 129053 - DNA, 25 bp, Probe sequence
catattatagagtttaccgttttat

SEQ ID NO: 129054 - DNA, 25 bp, Probe sequence
cggtaaaccctaattcatattatag

SEQ ID NO: 129055 - DNA, 25 bp, Probe sequence
gtttaaatttctcagtggctgtgaa

SEQ ID NO: 129056 - DNA, 25 bp, Probe sequence
gttttatttttttaacttgcatcat

SEQ ID NO: 129057 - DNA, 25 bp, Probe sequence
gtgaatgaggtttaaaagtgctata

SEQ ID NO: 129058 - DNA, 25 bp, Probe sequence
gtggctgtgaatgaggtttaaaagt

SEQ ID NO: 129059 - DNA, 25 bp, Probe sequence
tgtttaaatttctcagtggctgtga

SEQ ID NO: 129060 - DNA, 25 bp, Probe sequence
taaatttctcagtggctgtgaatga

SEQ ID NO: 129061 - DNA, 25 bp, Probe sequence
tatttttttaacttgcatcatagtt

SEQ ID NO: 129062 - DNA, 25 bp, Probe sequence
tttatttttttaacttgcatcatag

SEQ ID NO: 129063 - DNA, 25 bp, Probe sequence
attttatctgctgcaaaaacaatca

SEQ ID NO: 129064 - DNA, 25 bp, Probe sequence
atttagcatttcaaggcatacacaa

SEQ ID NO: 129065 - DNA, 25 bp, Probe sequence
atgatttcattttatctgctgcaaa

SEQ ID NO: 129066 - DNA, 25 bp, Probe sequence
agcatttcaaggcatacacaatatt

SEQ ID NO: 129067 - DNA, 25 bp, Probe sequence
acaatatttattactatgatttcat

SEQ ID NO: 129068 - DNA, 25 bp, Probe sequence
aacaattcattacgcatttagcatt

SEQ ID NO: 129069 - DNA, 25 bp, Probe sequence
aattcattacgcatttagcatttca

SEQ ID NO: 129070 - DNA, 25 bp, Probe sequence
caaggcatacacaatatttattact

SEQ ID NO: 129071 - DNA, 25 bp, Probe sequence
gttcattattatttaatttttgtga

SEQ ID NO: 129072 - DNA, 25 bp, Probe sequence
tacaatctaaggttctttttattat

SEQ ID NO: 129073 - DNA, 25 bp, Probe sequence
tacgcatttagcatttcaaggcata

SEQ ID NO: 129074 - DNA, 25 bp, Probe sequence
taccctaatttttgttcattattat

SEQ ID NO: 129075 - DNA, 25 bp, Probe sequence
tattataccctaatttttgttcatt

SEQ ID NO: 129076 - DNA, 25 bp, Probe sequence
ttttactttaacaattcattacgca

SEQ ID NO: 129077 - DNA, 25 bp, Probe sequence
ttttgtgaattttatgttttctata

SEQ ID NO: 129078 - DNA, 25 bp, Probe sequence
attacttatgttatttttcagccaa

SEQ ID NO: 129079 - DNA, 25 bp, Probe sequence
ataaatcctccaataaacagtgatc

SEQ ID NO: 129080 - DNA, 25 bp, Probe sequence
aaatcctccaataaacagtgatcga

SEQ ID NO: 129081 - DNA, 25 bp, Probe sequence
aaatgatacatttattccagtaaaa

SEQ ID NO: 129082 - DNA, 25 bp, Probe sequence
aatacattaacacaaatcaattaca

SEQ ID NO: 129083 - DNA, 25 bp, Probe sequence
aattgtattgattgtgtgtaacatc

SEQ ID NO: 129084 - DNA, 25 bp, Probe sequence
cttatgttatttttcagccaaaact

SEQ ID NO: 129085 - DNA, 25 bp, Probe sequence
ctccaataaacagtgatcgaatcaa

SEQ ID NO: 129086 - DNA, 25 bp, Probe sequence
gattgtgtgtaacatcaataaatga

SEQ ID NO: 129087 - DNA, 25 bp, Probe sequence
gtgatcgaatcaaaatattacttat

SEQ ID NO: 129088 - DNA, 25 bp, Probe sequence
tgttatttttcagccaaaactattt

SEQ ID NO: 129089 - DNA, 25 bp, Probe sequence
tcctccaataaacagtgatcgaatc

SEQ ID NO: 129090 - DNA, 25 bp, Probe sequence
tatgttatttttcagccaaaactat

SEQ ID NO: 129091 - DNA, 25 bp, Probe sequence
tattacttatgttatttttcagcca

SEQ ID NO: 129092 - DNA, 25 bp, Probe sequence
ttacttatgttatttttcagccaaa

SEQ ID NO: 129093 - DNA, 25 bp, Probe sequence
attatcaataactatcccatcacaa

SEQ ID NO: 129094 - DNA, 25 bp, Probe sequence
atcacaatataaaaacacacctttc

SEQ ID NO: 129095 - DNA, 25 bp, Probe sequence
atcccatcacaatataaaaacacac

SEQ ID NO: 129096 - DNA, 25 bp, Probe sequence
acaacaatgttcctttgaaagatgt

SEQ ID NO: 129097 - DNA, 25 bp, Probe sequence
aactatcccatcacaatataaaaac

SEQ ID NO: 129098 - DNA, 25 bp, Probe sequence
aatgttcctttgaaagatgtgtata

SEQ ID NO: 129099 - DNA, 25 bp, Probe sequence
aataactatcccatcacaatataaa

SEQ ID NO: 129100 - DNA, 25 bp, Probe sequence
caatataaaaacacacctttcaaag

SEQ ID NO: 129101 - DNA, 25 bp, Probe sequence
gaattatcaataactatcccatcac

SEQ ID NO: 129102 - DNA, 25 bp, Probe sequence
gaaacaacaatgttcctttgaaaga

SEQ ID NO: 129103 - DNA, 25 bp, Probe sequence
gatgtgtatattttttagttctagt

SEQ ID NO: 129104 - DNA, 25 bp, Probe sequence
gtaagaaacaacaatgttcctttga

SEQ ID NO: 129105 - DNA, 25 bp, Probe sequence
tgtgtatattttttagttctagtta

SEQ ID NO: 129106 - DNA, 25 bp, Probe sequence
tcaataactatcccatcacaatata

SEQ ID NO: 129107 - DNA, 25 bp, Probe sequence
tatcaataactatcccatcacaata

SEQ ID NO: 129108 - DNA, 25 bp, Probe sequence
attatatccgattatacctattata

SEQ ID NO: 129109 - DNA, 25 bp, Probe sequence
accttttcattatatccgattatac

SEQ ID NO: 129110 - DNA, 25 bp, Probe sequence
caccttttcattatatccgattata

SEQ ID NO: 129111 - DNA, 25 bp, Probe sequence
cattatatccgattatacctattat

SEQ ID NO: 129112 - DNA, 25 bp, Probe sequence
cttttcattatatccgattatacct

SEQ ID NO: 129113 - DNA, 25 bp, Probe sequence
ctcaccttttcattatatccgatta

SEQ ID NO: 129114 - DNA, 25 bp, Probe sequence
ccctcaccttttcattatatccgat

SEQ ID NO: 129115 - DNA, 25 bp, Probe sequence
cctcaccttttcattatatccgatt

SEQ ID NO: 129116 - DNA, 25 bp, Probe sequence
ccttttcattatatccgattatacc

SEQ ID NO: 129117 - DNA, 25 bp, Probe sequence
tcattatatccgattatacctatta

SEQ ID NO: 129118 - DNA, 25 bp, Probe sequence
tcaccttttcattatatccgattat

SEQ ID NO: 129119 - DNA, 25 bp, Probe sequence
tatccgattatacctattataacag

SEQ ID NO: 129120 - DNA, 25 bp, Probe sequence
tatatccgattatacctattataac

SEQ ID NO: 129121 - DNA, 25 bp, Probe sequence
ttttcattatatccgattataccta

SEQ ID NO: 129122 - DNA, 25 bp, Probe sequence
ttcattatatccgattatacctatt

SEQ ID NO: 129123 - DNA, 25 bp, Probe sequence
ataccatgacgctcgctacaaacgt

SEQ ID NO: 129124 - DNA, 25 bp, Probe sequence
atagctataccatgacgctcgctac

SEQ ID NO: 129125 - DNA, 25 bp, Probe sequence
accatgacgctcgctacaaacgtct

SEQ ID NO: 129126 - DNA, 25 bp, Probe sequence
acgctcgctacaaacgtcttgtata

SEQ ID NO: 129127 - DNA, 25 bp, Probe sequence
acgtcttgtatagctattatttcta

SEQ ID NO: 129128 - DNA, 25 bp, Probe sequence
aaatagctataccatgacgctcgct

SEQ ID NO: 129129 - DNA, 25 bp, Probe sequence
aaacgtcttgtatagctattatttc

SEQ ID NO: 129130 - DNA, 25 bp, Probe sequence
catgacgctcgctacaaacgtcttg

SEQ ID NO: 129131 - DNA, 25 bp, Probe sequence
ctataccatgacgctcgctacaaac

SEQ ID NO: 129132 - DNA, 25 bp, Probe sequence
gctcgctacaaacgtcttgtatagc

SEQ ID NO: 129133 - DNA, 25 bp, Probe sequence
gacgctcgctacaaacgtcttgtat

SEQ ID NO: 129134 - DNA, 25 bp, Probe sequence
tgacgctcgctacaaacgtcttgta

SEQ ID NO: 129135 - DNA, 25 bp, Probe sequence
tagctataccatgacgctcgctaca

SEQ ID NO: 129136 - DNA, 25 bp, Probe sequence
tataccatgacgctcgctacaaacg

SEQ ID NO: 129137 - DNA, 25 bp, Probe sequence
ttgtatagctattatttctatttat

SEQ ID NO: 129138 - DNA, 25 bp, Probe sequence
attaatagacaaatacacccacatt

SEQ ID NO: 129139 - DNA, 25 bp, Probe sequence
atatttcgcatgttgtctattataa

SEQ ID NO: 129140 - DNA, 25 bp, Probe sequence
ataacacaaggaggttgatttattt

SEQ ID NO: 129141 - DNA, 25 bp, Probe sequence
acctccttattagacaatgtgttga

SEQ ID NO: 129142 - DNA, 25 bp, Probe sequence
acacaatgttcatcaatacgttcat

SEQ ID NO: 129143 - DNA, 25 bp, Probe sequence
acaatacacaatgttcatcaatacg

SEQ ID NO: 129144 - DNA, 25 bp, Probe sequence
aaatacacccacattgttcaataac

SEQ ID NO: 129145 - DNA, 25 bp, Probe sequence
aattacctccttattagacaatgtg

SEQ ID NO: 129146 - DNA, 25 bp, Probe sequence
cacccacattgttcaataacacaag

SEQ ID NO: 129147 - DNA, 25 bp, Probe sequence
gacaatgtgttgaatatttcgcatg

SEQ ID NO: 129148 - DNA, 25 bp, Probe sequence
gacaaatacacccacattgttcaat

SEQ ID NO: 129149 - DNA, 25 bp, Probe sequence
gttgaatatttcgcatgttgtctat

SEQ ID NO: 129150 - DNA, 25 bp, Probe sequence
gttcatcaatacgttcattaataga

SEQ ID NO: 129151 - DNA, 25 bp, Probe sequence
tttcgcatgttgtctattataatat

SEQ ID NO: 129152 - DNA, 25 bp, Probe sequence
ttattaattacctccttattagaca

SEQ ID NO: 129153 - DNA, 25 bp, Probe sequence
agtttcatcctattgcatttgcaat

SEQ ID NO: 129154 - DNA, 25 bp, Probe sequence
aagtttcatcctattgcatttgcaa

SEQ ID NO: 129155 - DNA, 25 bp, Probe sequence
cagcttaaagtttcatcctattgca

SEQ ID NO: 129156 - DNA, 25 bp, Probe sequence
catcctattgcatttgcaatgactg

SEQ ID NO: 129157 - DNA, 25 bp, Probe sequence
ctttgattactgtcatacctctttt

SEQ ID NO: 129158 - DNA, 25 bp, Probe sequence
gcttaaagtttcatcctattgcatt

SEQ ID NO: 129159 - DNA, 25 bp, Probe sequence
gcatttgcaatgactgatactttga

SEQ ID NO: 129160 - DNA, 25 bp, Probe sequence
gcaatgactgatactttgattactg

SEQ ID NO: 129161 - DNA, 25 bp, Probe sequence
gacagcttaaagtttcatcctattg

SEQ ID NO: 129162 - DNA, 25 bp, Probe sequence
gactgatactttgattactgtcata

SEQ ID NO: 129163 - DNA, 25 bp, Probe sequence
gatactttgattactgtcatacctc

SEQ ID NO: 129164 - DNA, 25 bp, Probe sequence
gtttcatcctattgcatttgcaatg

SEQ ID NO: 129165 - DNA, 25 bp, Probe sequence
ggtatgacagcttaaagtttcatcc

SEQ ID NO: 129166 - DNA, 25 bp, Probe sequence
taaagtttcatcctattgcatttgc

SEQ ID NO: 129167 - DNA, 25 bp, Probe sequence
tactttgattactgtcatacctctt

SEQ ID NO: 129168 - DNA, 25 bp, Probe sequence
atatcttgttgctgctaattctatt

SEQ ID NO: 129169 - DNA, 25 bp, Probe sequence
acttccattttggtcaatttgcttt

SEQ ID NO: 129170 - DNA, 25 bp, Probe sequence
aatcgtactaattttcagcgtttga

SEQ ID NO: 129171 - DNA, 25 bp, Probe sequence
caagcgttttcctaggagttttcat

SEQ ID NO: 129172 - DNA, 25 bp, Probe sequence
ctagttgtgccatgcattttctcat

SEQ ID NO: 129173 - DNA, 25 bp, Probe sequence
ctagatgttaattcttcgctgctta

SEQ ID NO: 129174 - DNA, 25 bp, Probe sequence
ccaaattttgcttactatctttcta

SEQ ID NO: 129175 - DNA, 25 bp, Probe sequence
gctgattctttgttgttgcactatc

SEQ ID NO: 129176 - DNA, 25 bp, Probe sequence
gatgtgtgctgtttcttgttgcttc

SEQ ID NO: 129177 - DNA, 25 bp, Probe sequence
gatgtggatgcctgtcttgatgaag

SEQ ID NO: 129178 - DNA, 25 bp, Probe sequence
gatgttcacttttctagatgtttat

SEQ ID NO: 129179 - DNA, 25 bp, Probe sequence
gttgtttatagttatcgcatctctt

SEQ ID NO: 129180 - DNA, 25 bp, Probe sequence
gtttcttgttgcttcattatcttga

SEQ ID NO: 129181 - DNA, 25 bp, Probe sequence
tgcactatcttggtgacgtttctag

SEQ ID NO: 129182 - DNA, 25 bp, Probe sequence
tttcgttgtctaatgcactttttca

SEQ ID NO: 129183 - DNA, 25 bp, Probe sequence
atactaacagtcctcttgtgtttag

SEQ ID NO: 129184 - DNA, 25 bp, Probe sequence
acagtcctcttgtgtttagtttctt

SEQ ID NO: 129185 - DNA, 25 bp, Probe sequence
actaacagtcctcttgtgtttagtt

SEQ ID NO: 129186 - DNA, 25 bp, Probe sequence
aaaggctatttatatcataaggaga

SEQ ID NO: 129187 - DNA, 25 bp, Probe sequence
aacagtcctcttgtgtttagtttct

SEQ ID NO: 129188 - DNA, 25 bp, Probe sequence
cagtcctcttgtgtttagtttctta

SEQ ID NO: 129189 - DNA, 25 bp, Probe sequence
cttacgttaaaggctatttatatca

SEQ ID NO: 129190 - DNA, 25 bp, Probe sequence
ctaacagtcctcttgtgtttagttt

SEQ ID NO: 129191 - DNA, 25 bp, Probe sequence
gttaaaggctatttatatcataagg

SEQ ID NO: 129192 - DNA, 25 bp, Probe sequence
gtcctcttgtgtttagtttcttacg

SEQ ID NO: 129193 - DNA, 25 bp, Probe sequence
tcctcttgtgtttagtttcttacgt

SEQ ID NO: 129194 - DNA, 25 bp, Probe sequence
taacagtcctcttgtgtttagtttc

SEQ ID NO: 129195 - DNA, 25 bp, Probe sequence
tactaacagtcctcttgtgtttagt

SEQ ID NO: 129196 - DNA, 25 bp, Probe sequence
tacgttaaaggctatttatatcata

SEQ ID NO: 129197 - DNA, 25 bp, Probe sequence
ttcttacgttaaaggctatttatat

SEQ ID NO: 129198 - DNA, 25 bp, Probe sequence
atacttaaaataactcgctataatt

SEQ ID NO: 129199 - DNA, 25 bp, Probe sequence
ataactcgctataattaaagtgttt

SEQ ID NO: 129200 - DNA, 25 bp, Probe sequence
ataacttttatgaattctagatata

SEQ ID NO: 129201 - DNA, 25 bp, Probe sequence
atgaattctagatataacaatgtta

SEQ ID NO: 129202 - DNA, 25 bp, Probe sequence
actcgctataattaaagtgtttaat

SEQ ID NO: 129203 - DNA, 25 bp, Probe sequence
aaataacttttatgaattctagata

SEQ ID NO: 129204 - DNA, 25 bp, Probe sequence
aacttttatgaattctagatataac

SEQ ID NO: 129205 - DNA, 25 bp, Probe sequence
aataactcgctataattaaagtgtt

SEQ ID NO: 129206 - DNA, 25 bp, Probe sequence
aataacttttatgaattctagatat

SEQ ID NO: 129207 - DNA, 25 bp, Probe sequence
aatacttaaaataactcgctataat

SEQ ID NO: 129208 - DNA, 25 bp, Probe sequence
gaattctagatataacaatgttaaa

SEQ ID NO: 129209 - DNA, 25 bp, Probe sequence
ggaaataacttttatgaattctaga

SEQ ID NO: 129210 - DNA, 25 bp, Probe sequence
taactcgctataattaaagtgttta

SEQ ID NO: 129211 - DNA, 25 bp, Probe sequence
taaatacttaaaataactcgctata

SEQ ID NO: 129212 - DNA, 25 bp, Probe sequence
tacttaaaataactcgctataatta

SEQ ID NO: 129213 - DNA, 25 bp, Probe sequence
atagaagatattaaaagcagcagta

SEQ ID NO: 129214 - DNA, 25 bp, Probe sequence
actgtgtcagtctattttcggttcg

SEQ ID NO: 129215 - DNA, 25 bp, Probe sequence
actgctgctttttaagaattactgt

SEQ ID NO: 129216 - DNA, 25 bp, Probe sequence
aaggggctttaaatgtcagatagta

SEQ ID NO: 129217 - DNA, 25 bp, Probe sequence
ctgtgtcagtctattttcggttcgc

SEQ ID NO: 129218 - DNA, 25 bp, Probe sequence
gctgctttttaagaattactgtgtc

SEQ ID NO: 129219 - DNA, 25 bp, Probe sequence
gctttttaagaattactgtgtcagt

SEQ ID NO: 129220 - DNA, 25 bp, Probe sequence
gaattactgtgtcagtctattttcg

SEQ ID NO: 129221 - DNA, 25 bp, Probe sequence
gtaaggggctttaaatgtcagatag

SEQ ID NO: 129222 - DNA, 25 bp, Probe sequence
ggttgtaaggggctttaaatgtcag

SEQ ID NO: 129223 - DNA, 25 bp, Probe sequence
ggggctttaaatgtcagatagtatt

SEQ ID NO: 129224 - DNA, 25 bp, Probe sequence
tactgtgtcagtctattttcggttc

SEQ ID NO: 129225 - DNA, 25 bp, Probe sequence
ttactgctgctttttaagaattact

SEQ ID NO: 129226 - DNA, 25 bp, Probe sequence
ttactgtgtcagtctattttcggtt

SEQ ID NO: 129227 - DNA, 25 bp, Probe sequence
ttaagctttaattttgagtaatata

SEQ ID NO: 129228 - DNA, 25 bp, Probe sequence
aaggcactaaactgtttcaccagtt

SEQ ID NO: 129229 - DNA, 25 bp, Probe sequence
aatcactaatttccatacaaaaact

SEQ ID NO: 129230 - DNA, 25 bp, Probe sequence
cactaatttccatacaaaaactgtt

SEQ ID NO: 129231 - DNA, 25 bp, Probe sequence
catctgacatcactcaattatatca

SEQ ID NO: 129232 - DNA, 25 bp, Probe sequence
cttcatctgacatcactcaattata

SEQ ID NO: 129233 - DNA, 25 bp, Probe sequence
cccttcatctgacatcactcaatta

SEQ ID NO: 129234 - DNA, 25 bp, Probe sequence
ccttcatctgacatcactcaattat

SEQ ID NO: 129235 - DNA, 25 bp, Probe sequence
gaaggcactaaactgtttcaccagt

SEQ ID NO: 129236 - DNA, 25 bp, Probe sequence
gacatcactcaattatatcagaaaa

SEQ ID NO: 129237 - DNA, 25 bp, Probe sequence
gatgtcaaaaatcactaatttccat

SEQ ID NO: 129238 - DNA, 25 bp, Probe sequence
gtcaaaaatcactaatttccataca

SEQ ID NO: 129239 - DNA, 25 bp, Probe sequence
ggcactaaactgtttcaccagttta

SEQ ID NO: 129240 - DNA, 25 bp, Probe sequence
tcatctgacatcactcaattatatc

SEQ ID NO: 129241 - DNA, 25 bp, Probe sequence
tatttatcttttatagatgtcaaaa

SEQ ID NO: 129242 - DNA, 25 bp, Probe sequence
ttgaaggcactaaactgtttcacca

SEQ ID NO: 129243 - DNA, 25 bp, Probe sequence
attgcgatgaaatcagtacttgaca

SEQ ID NO: 129244 - DNA, 25 bp, Probe sequence
attacacttcataatattgtttatt

SEQ ID NO: 129245 - DNA, 25 bp, Probe sequence
acaaattttattttactatctatca

SEQ ID NO: 129246 - DNA, 25 bp, Probe sequence
aatcagtcatatcagtaattaccga

SEQ ID NO: 129247 - DNA, 25 bp, Probe sequence
ctcctttttgcttatctattcagta

SEQ ID NO: 129248 - DNA, 25 bp, Probe sequence
cgaattacatacacgatgcttttaa

SEQ ID NO: 129249 - DNA, 25 bp, Probe sequence
gagtttttaccagattgtaacaatt

SEQ ID NO: 129250 - DNA, 25 bp, Probe sequence
gatatcgatatattttgcattattt

SEQ ID NO: 129251 - DNA, 25 bp, Probe sequence
gtacttgacaactattacacttcat

SEQ ID NO: 129252 - DNA, 25 bp, Probe sequence
gtaacaatttttttattctcaatat

SEQ ID NO: 129253 - DNA, 25 bp, Probe sequence
gtaactcctttttgcttatctattc

SEQ ID NO: 129254 - DNA, 25 bp, Probe sequence
ggatgatacaattacatttttttca

SEQ ID NO: 129255 - DNA, 25 bp, Probe sequence
tatgtaactcctttttgcttatcta

SEQ ID NO: 129256 - DNA, 25 bp, Probe sequence
tattttgcattatttaacatttaaa

SEQ ID NO: 129257 - DNA, 25 bp, Probe sequence
ttttgcttatctattcagtatgaac

SEQ ID NO: 129258 - DNA, 25 bp, Probe sequence
attgcttgtataaatctcgatgctc

SEQ ID NO: 129259 - DNA, 25 bp, Probe sequence
ataaatctcgatgctcagttctttt

SEQ ID NO: 129260 - DNA, 25 bp, Probe sequence
atcaggcacaaatctacccatttat

SEQ ID NO: 129261 - DNA, 25 bp, Probe sequence
actcatataatggctttgtaataca

SEQ ID NO: 129262 - DNA, 25 bp, Probe sequence
aaatctcgatgctcagttcttttgc

SEQ ID NO: 129263 - DNA, 25 bp, Probe sequence
aatctcgatgctcagttcttttgcc

SEQ ID NO: 129264 - DNA, 25 bp, Probe sequence
aatactactcatataatggctttgt

SEQ ID NO: 129265 - DNA, 25 bp, Probe sequence
cacaaatctacccatttataacttt

SEQ ID NO: 129266 - DNA, 25 bp, Probe sequence
cttatcaggcacaaatctacccatt

SEQ ID NO: 129267 - DNA, 25 bp, Probe sequence
ctttatcttttttaatactactcat

SEQ ID NO: 129268 - DNA, 25 bp, Probe sequence
ttcttttgccctgattccttatcag

SEQ ID NO: 129269 - DNA, 25 bp, Probe sequence
ggcacaaatctacccatttataact

SEQ ID NO: 129270 - DNA, 25 bp, Probe sequence
ttccttatcaggcacaaatctaccc

SEQ ID NO: 129271 - DNA, 25 bp, Probe sequence
ttgccctgattccttatcaggcaca

SEQ ID NO: 129272 - DNA, 25 bp, Probe sequence
ttgtaatacaaatttctataatgga

SEQ ID NO: 129273 - DNA, 25 bp, Probe sequence
attgtgcatgatattaaggctttgt

SEQ ID NO: 129274 - DNA, 25 bp, Probe sequence
atgaatacactactaaagccttaat

SEQ ID NO: 129275 - DNA, 25 bp, Probe sequence
atgtcatgctacgaatattgtgcat

SEQ ID NO: 129276 - DNA, 25 bp, Probe sequence
actaaagccttaatgtcatgctacg

SEQ ID NO: 129277 - DNA, 25 bp, Probe sequence
actaaatgaatgtcatgtattacat

SEQ ID NO: 129278 - DNA, 25 bp, Probe sequence
aaatgaatacactactaaagcctta

SEQ ID NO: 129279 - DNA, 25 bp, Probe sequence
aaagccttaatgtcatgctacgaat

SEQ ID NO: 129280 - DNA, 25 bp, Probe sequence
aatacactactaaagccttaatgtc

SEQ ID NO: 129281 - DNA, 25 bp, Probe sequence
cactactaaagccttaatgtcatgc

SEQ ID NO: 129282 - DNA, 25 bp, Probe sequence
gccttaatgtcatgctacgaatatt

SEQ ID NO: 129283 - DNA, 25 bp, Probe sequence
gatattaaggctttgtatttaacta

SEQ ID NO: 129284 - DNA, 25 bp, Probe sequence
gtgcatgatattaaggctttgtatt

SEQ ID NO: 129285 - DNA, 25 bp, Probe sequence
taatgtcatgctacgaatattgtgc

SEQ ID NO: 129286 - DNA, 25 bp, Probe sequence
taaggctttgtatttaactaaatga

SEQ ID NO: 129287 - DNA, 25 bp, Probe sequence
tacactactaaagccttaatgtcat

SEQ ID NO: 129288 - DNA, 25 bp, Probe sequence
atatcaatactctgcctatatatta

SEQ ID NO: 129289 - DNA, 25 bp, Probe sequence
atagatatcaatactctgcctatat

SEQ ID NO: 129290 - DNA, 25 bp, Probe sequence
atactctgcctatatattagaggtc

SEQ ID NO: 129291 - DNA, 25 bp, Probe sequence
atcaatactctgcctatatattaga

SEQ ID NO: 129292 - DNA, 25 bp, Probe sequence
agatatcaatactctgcctatatat

SEQ ID NO: 129293 - DNA, 25 bp, Probe sequence
acgtttcaccttcatcaaaatcatt

SEQ ID NO: 129294 - DNA, 25 bp, Probe sequence
actctgcctatatattagaggtcaa

SEQ ID NO: 129295 - DNA, 25 bp, Probe sequence
cgtttcaccttcatcaaaatcattt

SEQ ID NO: 129296 - DNA, 25 bp, Probe sequence
ccttcatcaaaatcatttatttttt

SEQ ID NO: 129297 - DNA, 25 bp, Probe sequence
gatatcaatactctgcctatatatt

SEQ ID NO: 129298 - DNA, 25 bp, Probe sequence
gtttcaccttcatcaaaatcattta

SEQ ID NO: 129299 - DNA, 25 bp, Probe sequence
tcaccttcatcaaaatcatttattt

SEQ ID NO: 129300 - DNA, 25 bp, Probe sequence
tagatatcaatactctgcctatata

SEQ ID NO: 129301 - DNA, 25 bp, Probe sequence
ttaatagatatcaatactctgccta

SEQ ID NO: 129302 - DNA, 25 bp, Probe sequence
ttcaccttcatcaaaatcatttatt

SEQ ID NO: 129303 - DNA, 25 bp, Probe sequence
attcgccatcattttaatcatatta

SEQ ID NO: 129304 - DNA, 25 bp, Probe sequence
attactgcttgaaaatcacgttacg

SEQ ID NO: 129305 - DNA, 25 bp, Probe sequence
atcacgttacgttatcctttatgct

SEQ ID NO: 129306 - DNA, 25 bp, Probe sequence
atcatattatttaggaacactcaca

SEQ ID NO: 129307 - DNA, 25 bp, Probe sequence
acgttatcctttatgctgacaacat

SEQ ID NO: 129308 - DNA, 25 bp, Probe sequence
acaatgtccctttaagatgctttta

SEQ ID NO: 129309 - DNA, 25 bp, Probe sequence
gatgcttttagacacttattcgcca

SEQ ID NO: 129310 - DNA, 25 bp, Probe sequence
gttacgttatcctttatgctgacaa

SEQ ID NO: 129311 - DNA, 25 bp, Probe sequence
gtgatttaccctatacaatgtccct

SEQ ID NO: 129312 - DNA, 25 bp, Probe sequence
ggaacactcacatacttttcttatt

SEQ ID NO: 129313 - DNA, 25 bp, Probe sequence
tgctgacaacataaggaggtttatc

SEQ ID NO: 129314 - DNA, 25 bp, Probe sequence
tcacatacttttcttatttttttca

SEQ ID NO: 129315 - DNA, 25 bp, Probe sequence
taccctatacaatgtccctttaaga

SEQ ID NO: 129316 - DNA, 25 bp, Probe sequence
tagacacttattcgccatcatttta

SEQ ID NO: 129317 - DNA, 25 bp, Probe sequence
ttcaattagttacaattactgcttg

SEQ ID NO: 129318 - DNA, 25 bp, Probe sequence
atttcgaaacatacaaaagcgccag

SEQ ID NO: 129319 - DNA, 25 bp, Probe sequence
agaagataatcatttcctctcgcgc

SEQ ID NO: 129320 - DNA, 25 bp, Probe sequence
agcgccagaagataatcatttcctc

SEQ ID NO: 129321 - DNA, 25 bp, Probe sequence
aaagttatacctttgcaaagcgaat

SEQ ID NO: 129322 - DNA, 25 bp, Probe sequence
aacactgaatacaccaactaaaata

SEQ ID NO: 129323 - DNA, 25 bp, Probe sequence
ctctcgcgcttttatactgaattat

SEQ ID NO: 129324 - DNA, 25 bp, Probe sequence
gctacaacactgaatacaccaacta

SEQ ID NO: 129325 - DNA, 25 bp, Probe sequence
gcaaagcgaattagtataggttacc

SEQ ID NO: 129326 - DNA, 25 bp, Probe sequence
gaaaactaatcatttattctctaaa

SEQ ID NO: 129327 - DNA, 25 bp, Probe sequence
gaaacatacaaaagcgccagaagat

SEQ ID NO: 129328 - DNA, 25 bp, Probe sequence
gaaaggattaggttccattcgattt

SEQ ID NO: 129329 - DNA, 25 bp, Probe sequence
gatgctacaacactgaatacaccaa

SEQ ID NO: 129330 - DNA, 25 bp, Probe sequence
gattaggttccattcgatttataaa

SEQ ID NO: 129331 - DNA, 25 bp, Probe sequence
tcctcatacagatgctacaacactg

SEQ ID NO: 129332 - DNA, 25 bp, Probe sequence
tcctctcgcgcttttatactgaatt

SEQ ID NO: 129333 - DNA, 25 bp, Probe sequence
aatactttaaaatgcccaagactat

SEQ ID NO: 129334 - DNA, 25 bp, Probe sequence
aaggcttcaacacgaatatattctc

SEQ ID NO: 129335 - DNA, 25 bp, Probe sequence
aatgcccaagactattgctttaatt

SEQ ID NO: 129336 - DNA, 25 bp, Probe sequence
ctaaatcgttcaaatttggcacaac

SEQ ID NO: 129337 - DNA, 25 bp, Probe sequence
gcttattgccaatctaaatcgttca

SEQ ID NO: 129338 - DNA, 25 bp, Probe sequence
gaatatattctctcggttgaaacct

SEQ ID NO: 129339 - DNA, 25 bp, Probe sequence
gatgtgtagatgtcgtgtttttaaa

SEQ ID NO: 129340 - DNA, 25 bp, Probe sequence
gtatggtcgtgcttattgccaatct

SEQ ID NO: 129341 - DNA, 25 bp, Probe sequence
ggaatcacctaattacttaaggaat

SEQ ID NO: 129342 - DNA, 25 bp, Probe sequence
ggcacaacgacaaataaggcttcaa

SEQ ID NO: 129343 - DNA, 25 bp, Probe sequence
tcggttgaaaccttacttattcatt

SEQ ID NO: 129344 - DNA, 25 bp, Probe sequence
taaggaatttccctatcaataacgg

SEQ ID NO: 129345 - DNA, 25 bp, Probe sequence
tacacaatcatgtatggtcgtgctt

SEQ ID NO: 129346 - DNA, 25 bp, Probe sequence
tatatcctcctacgtataaaaatac

SEQ ID NO: 129347 - DNA, 25 bp, Probe sequence
ttaattagattgtacattttttcac

SEQ ID NO: 129348 - DNA, 25 bp, Probe sequence
atatgcccctttactccataatatt

SEQ ID NO: 129349 - DNA, 25 bp, Probe sequence
atgcccctttactccataatattta

SEQ ID NO: 129350 - DNA, 25 bp, Probe sequence
aaatatgcccctttactccataata

SEQ ID NO: 129351 - DNA, 25 bp, Probe sequence
aaaatatgcccctttactccataat

SEQ ID NO: 129352 - DNA, 25 bp, Probe sequence
aatatgcccctttactccataatat

SEQ ID NO: 129353 - DNA, 25 bp, Probe sequence
ctttactccataatatttatttcaa

SEQ ID NO: 129354 - DNA, 25 bp, Probe sequence
cctttactccataatatttatttca

SEQ ID NO: 129355 - DNA, 25 bp, Probe sequence
gcccctttactccataatatttatt

SEQ ID NO: 129356 - DNA, 25 bp, Probe sequence
tgcccctttactccataatatttat

SEQ ID NO: 129357 - DNA, 25 bp, Probe sequence
tactccataatatttatttcaaaaa

SEQ ID NO: 129358 - DNA, 25 bp, Probe sequence
tatgcccctttactccataatattt

SEQ ID NO: 129359 - DNA, 25 bp, Probe sequence
tttactccataatatttatttcaaa

SEQ ID NO: 129360 - DNA, 25 bp, Probe sequence
ttactccataatatttatttcaaaa

SEQ ID NO: 129361 - DNA, 25 bp, Probe sequence
ataatgtaaaatcagggaattccct

SEQ ID NO: 129362 - DNA, 25 bp, Probe sequence
attccctgatgcctgtagtcatgca

SEQ ID NO: 129363 - DNA, 25 bp, Probe sequence
atatgaatccctactcaacatttat

SEQ ID NO: 129364 - DNA, 25 bp, Probe sequence
ataccaaatcattttgtttttgtga

SEQ ID NO: 129365 - DNA, 25 bp, Probe sequence
atcggtcgcttgtagtgtatattat

SEQ ID NO: 129366 - DNA, 25 bp, Probe sequence
agcatcaatatatcggtcgcttgta

SEQ ID NO: 129367 - DNA, 25 bp, Probe sequence
accctttcacacgtattgtatacca

SEQ ID NO: 129368 - DNA, 25 bp, Probe sequence
aatatatcggtcgcttgtagtgtat

SEQ ID NO: 129369 - DNA, 25 bp, Probe sequence
gcatattccttatacattttccctt

SEQ ID NO: 129370 - DNA, 25 bp, Probe sequence
gcctgtagtcatgcatattccttat

SEQ ID NO: 129371 - DNA, 25 bp, Probe sequence
gcgaccgatatatgaatccctactc

SEQ ID NO: 129372 - DNA, 25 bp, Probe sequence
gaatccctactcaacatttatttga

SEQ ID NO: 129373 - DNA, 25 bp, Probe sequence
gagcaagcatcaatatatcggtcgc

SEQ ID NO: 129374 - DNA, 25 bp, Probe sequence
gtcgcttgtagtgtatattattatc

SEQ ID NO: 129375 - DNA, 25 bp, Probe sequence
taccaaccctttcacacgtattgta

SEQ ID NO: 129376 - DNA, 25 bp, Probe sequence
acatgtcagaaagtatgcttcatct

SEQ ID NO: 129377 - DNA, 25 bp, Probe sequence
acaccaatactctcatgaaacttat

SEQ ID NO: 129378 - DNA, 25 bp, Probe sequence
aaatatccatcaaagtgtatcaata

SEQ ID NO: 129379 - DNA, 25 bp, Probe sequence
aagtatgcttcatctgaatacacca

SEQ ID NO: 129380 - DNA, 25 bp, Probe sequence
gcttcatctgaatacaccaatactc

SEQ ID NO: 129381 - DNA, 25 bp, Probe sequence
gaatacaccaatactctcatgaaac

SEQ ID NO: 129382 - DNA, 25 bp, Probe sequence
gaatgattcattgttacgctattta

SEQ ID NO: 129383 - DNA, 25 bp, Probe sequence
gttacgctatttaatcactacatct

SEQ ID NO: 129384 - DNA, 25 bp, Probe sequence
tctctcaacgtaaaaaaaccattca

SEQ ID NO: 129385 - DNA, 25 bp, Probe sequence
tcaataaatttatcacatgtcagaa

SEQ ID NO: 129386 - DNA, 25 bp, Probe sequence
taatccccactcttttttaaatgat

SEQ ID NO: 129387 - DNA, 25 bp, Probe sequence
taaatgatttaaccatattttattt

SEQ ID NO: 129388 - DNA, 25 bp, Probe sequence
tactctcatgaaacttattaaaaat

SEQ ID NO: 129389 - DNA, 25 bp, Probe sequence
tacgctatttaatcactacatctta

SEQ ID NO: 129390 - DNA, 25 bp, Probe sequence
ttattaaaaattactctctcaacgt

SEQ ID NO: 129391 - DNA, 25 bp, Probe sequence
attctctcaaaaatgtagttttctt

SEQ ID NO: 129392 - DNA, 25 bp, Probe sequence
attacgacgctcattttatctcgct

SEQ ID NO: 129393 - DNA, 25 bp, Probe sequence
acgctcattttatctcgctttatgt

SEQ ID NO: 129394 - DNA, 25 bp, Probe sequence
acgacgctcattttatctcgcttta

SEQ ID NO: 129395 - DNA, 25 bp, Probe sequence
aacagcgagataaatcgcgtgattg

SEQ ID NO: 129396 - DNA, 25 bp, Probe sequence
aatcgcgtgattggctaatatcttt

SEQ ID NO: 129397 - DNA, 25 bp, Probe sequence
cagaaaaatctttttattctctcaa

SEQ ID NO: 129398 - DNA, 25 bp, Probe sequence
cattttatctcgctttatgtaaagt

SEQ ID NO: 129399 - DNA, 25 bp, Probe sequence
cttcccccatttactttgatcaaat

SEQ ID NO: 129400 - DNA, 25 bp, Probe sequence
gctcattttatctcgctttatgtaa

SEQ ID NO: 129401 - DNA, 25 bp, Probe sequence
gatcaaataaaatttactttctaat

SEQ ID NO: 129402 - DNA, 25 bp, Probe sequence
gtagttttctttcataaaaacagcg

SEQ ID NO: 129403 - DNA, 25 bp, Probe sequence
gatttaagatattacgacgctcatt

SEQ ID NO: 129404 - DNA, 25 bp, Probe sequence
gattggctaatatctttatgattta

SEQ ID NO: 129405 - DNA, 25 bp, Probe sequence
tcccccatttactttgatcaaataa

SEQ ID NO: 129406 - DNA, 25 bp, Probe sequence
attacaagattattataaaccgaat

SEQ ID NO: 129407 - DNA, 25 bp, Probe sequence
atcatccctcatttttataatatta

SEQ ID NO: 129408 - DNA, 25 bp, Probe sequence
agattattataaaccgaatgaaaca

SEQ ID NO: 129409 - DNA, 25 bp, Probe sequence
acaagattattataaaccgaatgaa

SEQ ID NO: 129410 - DNA, 25 bp, Probe sequence
aatcatccctcatttttataatatt

SEQ ID NO: 129411 - DNA, 25 bp, Probe sequence
caagattattataaaccgaatgaaa

SEQ ID NO: 129412 - DNA, 25 bp, Probe sequence
cgaatcatccctcatttttataata

SEQ ID NO: 129413 - DNA, 25 bp, Probe sequence
gaatcatccctcatttttataatat

SEQ ID NO: 129414 - DNA, 25 bp, Probe sequence
gattattataaaccgaatgaaacaa

SEQ ID NO: 129415 - DNA, 25 bp, Probe sequence
tcatccctcatttttataatattac

SEQ ID NO: 129416 - DNA, 25 bp, Probe sequence
tacaagattattataaaccgaatga

SEQ ID NO: 129417 - DNA, 25 bp, Probe sequence
ttacaagattattataaaccgaatg

SEQ ID NO: 129418 - DNA, 25 bp, Probe sequence
attccctctgttgaaattgataact

SEQ ID NO: 129419 - DNA, 25 bp, Probe sequence
attcagctattaacagttgagtaga

SEQ ID NO: 129420 - DNA, 25 bp, Probe sequence
atttactcatcttaacatgcattga

SEQ ID NO: 129421 - DNA, 25 bp, Probe sequence
atattaatcattccctctgttgaaa

SEQ ID NO: 129422 - DNA, 25 bp, Probe sequence
aaaaaacacactctattcagctatt

SEQ ID NO: 129423 - DNA, 25 bp, Probe sequence
aacacactctattcagctattaaca

SEQ ID NO: 129424 - DNA, 25 bp, Probe sequence
cactctattcagctattaacagttg

SEQ ID NO: 129425 - DNA, 25 bp, Probe sequence
ctatcttttatatttactcatctta

SEQ ID NO: 129426 - DNA, 25 bp, Probe sequence
ccaaaccatttgttataaactatag

SEQ ID NO: 129427 - DNA, 25 bp, Probe sequence
ccactccctatcttttatatttact

SEQ ID NO: 129428 - DNA, 25 bp, Probe sequence
gtaatattaatcattccctctgttg

SEQ ID NO: 129429 - DNA, 25 bp, Probe sequence
tgagtagagtgtgcaaacctgttga

SEQ ID NO: 129430 - DNA, 25 bp, Probe sequence
tcatcttaacatgcattgagtaaca

SEQ ID NO: 129431 - DNA, 25 bp, Probe sequence
taatcattccctctgttgaaattga

SEQ ID NO: 129432 - DNA, 25 bp, Probe sequence
taacatatgttaccaaaccatttgt

SEQ ID NO: 129433 - DNA, 25 bp, Probe sequence
atatactcatgctacttaaaataca

SEQ ID NO: 129434 - DNA, 25 bp, Probe sequence
agtcaccctcctaaatagtaatctt

SEQ ID NO: 129435 - DNA, 25 bp, Probe sequence
actttatagtatttacgaacgtcat

SEQ ID NO: 129436 - DNA, 25 bp, Probe sequence
acatgactattgtacaaatatgata

SEQ ID NO: 129437 - DNA, 25 bp, Probe sequence
aagtcgaatcatactttaggtattt

SEQ ID NO: 129438 - DNA, 25 bp, Probe sequence
aattatatactcatgctacttaaaa

SEQ ID NO: 129439 - DNA, 25 bp, Probe sequence
ccacttttcgttttatctaatacat

SEQ ID NO: 129440 - DNA, 25 bp, Probe sequence
gctacttaaaatacaagcactgttt

SEQ ID NO: 129441 - DNA, 25 bp, Probe sequence
gaatcatactttaggtatttaccac

SEQ ID NO: 129442 - DNA, 25 bp, Probe sequence
tcatactttaggtatttaccacttt

SEQ ID NO: 129443 - DNA, 25 bp, Probe sequence
tcaccctcctaaatagtaatcttta

SEQ ID NO: 129444 - DNA, 25 bp, Probe sequence
tacaagcactgtttttataaataat

SEQ ID NO: 129445 - DNA, 25 bp, Probe sequence
tagtatttacgaacgtcataatata

SEQ ID NO: 129446 - DNA, 25 bp, Probe sequence
ttaaaattatatactcatgctactt

SEQ ID NO: 129447 - DNA, 25 bp, Probe sequence
ttcgttttatctaatacatgactat

SEQ ID NO: 129448 - DNA, 25 bp, Probe sequence
atgtttacatgataatttctaccta

SEQ ID NO: 129449 - DNA, 25 bp, Probe sequence
actactaatcaagatttcgcacggg

SEQ ID NO: 129450 - DNA, 25 bp, Probe sequence
acacctcaattgtacaaatatctgt

SEQ ID NO: 129451 - DNA, 25 bp, Probe sequence
aatcaagatttcgcacggggaagaa

SEQ ID NO: 129452 - DNA, 25 bp, Probe sequence
caatacctatcctgtactgattccc

SEQ ID NO: 129453 - DNA, 25 bp, Probe sequence
ctgattccctactaaacaatgttta

SEQ ID NO: 129454 - DNA, 25 bp, Probe sequence
cctccttttaacacacctcaattgt

SEQ ID NO: 129455 - DNA, 25 bp, Probe sequence
gcgacacagaaaaaaactactaatc

SEQ ID NO: 129456 - DNA, 25 bp, Probe sequence
gcacggggaagaatcaatacctatc

SEQ ID NO: 129457 - DNA, 25 bp, Probe sequence
gaagaatcaatacctatcctgtact

SEQ ID NO: 129458 - DNA, 25 bp, Probe sequence
gtactgattccctactaaacaatgt

SEQ ID NO: 129459 - DNA, 25 bp, Probe sequence
gtacaataaaacaagcgacacagaa

SEQ ID NO: 129460 - DNA, 25 bp, Probe sequence
tacatgataatttctacctatttag

SEQ ID NO: 129461 - DNA, 25 bp, Probe sequence
tatcctgtactgattccctactaaa

SEQ ID NO: 129462 - DNA, 25 bp, Probe sequence
ttttaacacacctcaattgtacaaa

SEQ ID NO: 129463 - DNA, 25 bp, Probe sequence
attacagttcaattcagagagggat

SEQ ID NO: 129464 - DNA, 25 bp, Probe sequence
atacaccgtcaaacattaatgcgct

SEQ ID NO: 129465 - DNA, 25 bp, Probe sequence
atgtgtatttgtaatcagtttttga

SEQ ID NO: 129466 - DNA, 25 bp, Probe sequence
actatcaacttccaactaactttca

SEQ ID NO: 129467 - DNA, 25 bp, Probe sequence
acattaatgcgctacaactactacc

SEQ ID NO: 129468 - DNA, 25 bp, Probe sequence
aactactaccaatgcatttaatata

SEQ ID NO: 129469 - DNA, 25 bp, Probe sequence
aatgcgctacaactactaccaatgc

SEQ ID NO: 129470 - DNA, 25 bp, Probe sequence
aatatatttcattttctatgtgtat

SEQ ID NO: 129471 - DNA, 25 bp, Probe sequence
aattaatactatacaccgtcaaaca

SEQ ID NO: 129472 - DNA, 25 bp, Probe sequence
cttccaactaactttcaatataatt

SEQ ID NO: 129473 - DNA, 25 bp, Probe sequence
gctacaactactaccaatgcattta

SEQ ID NO: 129474 - DNA, 25 bp, Probe sequence
gttcaattcagagagggatgggata

SEQ ID NO: 129475 - DNA, 25 bp, Probe sequence
tcctactatcaacttccaactaact

SEQ ID NO: 129476 - DNA, 25 bp, Probe sequence
tcattttctatgtgtatttgtaatc

SEQ ID NO: 129477 - DNA, 25 bp, Probe sequence
tcaacttccaactaactttcaatat

SEQ ID NO: 129478 - DNA, 25 bp, Probe sequence
atcaccatactaaaacatgatacgt

SEQ ID NO: 129479 - DNA, 25 bp, Probe sequence
atcatgtatatggcatcatcaccat

SEQ ID NO: 129480 - DNA, 25 bp, Probe sequence
atcgctccaagattatgacaacata

SEQ ID NO: 129481 - DNA, 25 bp, Probe sequence
accacgcatcatgtatatggcatca

SEQ ID NO: 129482 - DNA, 25 bp, Probe sequence
aaacatgatacgtggttttatttga

SEQ ID NO: 129483 - DNA, 25 bp, Probe sequence
aacaaagaaccacgcatcatgtata

SEQ ID NO: 129484 - DNA, 25 bp, Probe sequence
aacataacaaagaaccacgcatcat

SEQ ID NO: 129485 - DNA, 25 bp, Probe sequence
aagaaccacgcatcatgtatatggc

SEQ ID NO: 129486 - DNA, 25 bp, Probe sequence
aatatcgctccaagattatgacaac

SEQ ID NO: 129487 - DNA, 25 bp, Probe sequence
cacgcatcatgtatatggcatcatc

SEQ ID NO: 129488 - DNA, 25 bp, Probe sequence
gcatcatgtatatggcatcatcacc

SEQ ID NO: 129489 - DNA, 25 bp, Probe sequence
gaaccacgcatcatgtatatggcat

SEQ ID NO: 129490 - DNA, 25 bp, Probe sequence
gacaacataacaaagaaccacgcat

SEQ ID NO: 129491 - DNA, 25 bp, Probe sequence
gtatatggcatcatcaccatactaa

SEQ ID NO: 129492 - DNA, 25 bp, Probe sequence
ggcatcatcaccatactaaaacatg

SEQ ID NO: 129493 - DNA, 25 bp, Probe sequence
atctgaaatgccggataagtcaata

SEQ ID NO: 129494 - DNA, 25 bp, Probe sequence
agctttatatagctagcaacttata

SEQ ID NO: 129495 - DNA, 25 bp, Probe sequence
aaaagctttatatagctagcaactt

SEQ ID NO: 129496 - DNA, 25 bp, Probe sequence
aagtcaatatgttgaacttttgcta

SEQ ID NO: 129497 - DNA, 25 bp, Probe sequence
aatattttaatctgaaatgccggat

SEQ ID NO: 129498 - DNA, 25 bp, Probe sequence
caatatgttgaacttttgctaaaaa

SEQ ID NO: 129499 - DNA, 25 bp, Probe sequence
ctccttattcttattattctaatcg

SEQ ID NO: 129500 - DNA, 25 bp, Probe sequence
gaatatatctccttattcttattat

SEQ ID NO: 129501 - DNA, 25 bp, Probe sequence
gaaatgccggataagtcaatatgtt

SEQ ID NO: 129502 - DNA, 25 bp, Probe sequence
gtcaatatgttgaacttttgctaaa

SEQ ID NO: 129503 - DNA, 25 bp, Probe sequence
tgaacttttgctaaaaagctttata

SEQ ID NO: 129504 - DNA, 25 bp, Probe sequence
tccttattcttattattctaatcgg

SEQ ID NO: 129505 - DNA, 25 bp, Probe sequence
tctccttattcttattattctaatc

SEQ ID NO: 129506 - DNA, 25 bp, Probe sequence
taatctgaaatgccggataagtcaa

SEQ ID NO: 129507 - DNA, 25 bp, Probe sequence
tttaatctgaaatgccggataagtc

SEQ ID NO: 129508 - DNA, 25 bp, Probe sequence
attagcacgactttattacaatttc

SEQ ID NO: 129509 - DNA, 25 bp, Probe sequence
atttacatatgagtagttatcggtc

SEQ ID NO: 129510 - DNA, 25 bp, Probe sequence
atcggtcataatatatttacaagga

SEQ ID NO: 129511 - DNA, 25 bp, Probe sequence
agcacgactttattacaatttcttt

SEQ ID NO: 129512 - DNA, 25 bp, Probe sequence
aaaattagcacgactttattacaat

SEQ ID NO: 129513 - DNA, 25 bp, Probe sequence
aacgtaatcattactatttacatat

SEQ ID NO: 129514 - DNA, 25 bp, Probe sequence
gcacgactttattacaatttcttta

SEQ ID NO: 129515 - DNA, 25 bp, Probe sequence
gagtagttatcggtcataatatatt

SEQ ID NO: 129516 - DNA, 25 bp, Probe sequence
gttatcggtcataatatatttacaa

SEQ ID NO: 129517 - DNA, 25 bp, Probe sequence
gtaatcattactatttacatatgag

SEQ ID NO: 129518 - DNA, 25 bp, Probe sequence
ggtcataatatatttacaaggaggg

SEQ ID NO: 129519 - DNA, 25 bp, Probe sequence
tacaatttctttaaaacgtaatcat

SEQ ID NO: 129520 - DNA, 25 bp, Probe sequence
tagcacgactttattacaatttctt

SEQ ID NO: 129521 - DNA, 25 bp, Probe sequence
ttagcacgactttattacaatttct

SEQ ID NO: 129522 - DNA, 25 bp, Probe sequence
ttacatatgagtagttatcggtcat

SEQ ID NO: 129523 - DNA, 25 bp, Probe sequence
agagctgcatatacactcactcctt

SEQ ID NO: 129524 - DNA, 25 bp, Probe sequence
aattgttttaatttgactatattgt

SEQ ID NO: 129525 - DNA, 25 bp, Probe sequence
cactcactccttgtgtacatgcagc

SEQ ID NO: 129526 - DNA, 25 bp, Probe sequence
ctcactccttgtgtacatgcagctc

SEQ ID NO: 129527 - DNA, 25 bp, Probe sequence
ctgcatatacactcactccttgtgt

SEQ ID NO: 129528 - DNA, 25 bp, Probe sequence
ccctagctcgttaatataaactcta

SEQ ID NO: 129529 - DNA, 25 bp, Probe sequence
gagtatccctagctcgttaatataa

SEQ ID NO: 129530 - DNA, 25 bp, Probe sequence
gtctaactatattttcgagtatccc

SEQ ID NO: 129531 - DNA, 25 bp, Probe sequence
tccttgtgtacatgcagctcttttt

SEQ ID NO: 129532 - DNA, 25 bp, Probe sequence
taaactctatacttaactatttcct

SEQ ID NO: 129533 - DNA, 25 bp, Probe sequence
tacttcacatatttaagagctgcat

SEQ ID NO: 129534 - DNA, 25 bp, Probe sequence
tatacttaactatttccttacatta

SEQ ID NO: 129535 - DNA, 25 bp, Probe sequence
tattttcgagtatccctagctcgtt

SEQ ID NO: 129536 - DNA, 25 bp, Probe sequence
ttccttacattacttcacatattta

SEQ ID NO: 129537 - DNA, 25 bp, Probe sequence
ttgactatattgtatgtctaactat

SEQ ID NO: 129538 - DNA, 25 bp, Probe sequence
atacacctttgttcgctatttttct

SEQ ID NO: 129539 - DNA, 25 bp, Probe sequence
ataaatcctattccccattttcatt

SEQ ID NO: 129540 - DNA, 25 bp, Probe sequence
atcatattatacacctttgttcgct

SEQ ID NO: 129541 - DNA, 25 bp, Probe sequence
aaatacataaatcctattccccatt

SEQ ID NO: 129542 - DNA, 25 bp, Probe sequence
aaaaacgcctcctcagatatttata

SEQ ID NO: 129543 - DNA, 25 bp, Probe sequence
aacgcctcctcagatatttatatat

SEQ ID NO: 129544 - DNA, 25 bp, Probe sequence
aatgaatcaataaccacctaataac

SEQ ID NO: 129545 - DNA, 25 bp, Probe sequence
aataaccacctaataacaaatcata

SEQ ID NO: 129546 - DNA, 25 bp, Probe sequence
cacctttgttcgctatttttctaag

SEQ ID NO: 129547 - DNA, 25 bp, Probe sequence
gatgtaataaaaacgcctcctcaga

SEQ ID NO: 129548 - DNA, 25 bp, Probe sequence
tccccattttcattttttaattcat

SEQ ID NO: 129549 - DNA, 25 bp, Probe sequence
taatctttaggacgttatttcaggg

SEQ ID NO: 129550 - DNA, 25 bp, Probe sequence
taatcttagtaattttcttttcaat

SEQ ID NO: 129551 - DNA, 25 bp, Probe sequence
taggacgttatttcagggatatttt

SEQ ID NO: 129552 - DNA, 25 bp, Probe sequence
ttaaatcaattatcactagacatta

SEQ ID NO: 129553 - DNA, 25 bp, Probe sequence
atgcgttcctttattttctgcgaat

SEQ ID NO: 129554 - DNA, 25 bp, Probe sequence
atgagatttctactctaccaaactc

SEQ ID NO: 129555 - DNA, 25 bp, Probe sequence
agcgatgctatctaatgcgttcctt

SEQ ID NO: 129556 - DNA, 25 bp, Probe sequence
cccaactcttcctgtttgtgaactt

SEQ ID NO: 129557 - DNA, 25 bp, Probe sequence
gcgttgaaccaccttgaattagtat

SEQ ID NO: 129558 - DNA, 25 bp, Probe sequence
gaagctatctaatgtcgtgacctaa

SEQ ID NO: 129559 - DNA, 25 bp, Probe sequence
gaaagtttctatgttgggaccctat

SEQ ID NO: 129560 - DNA, 25 bp, Probe sequence
gaaagacaatttcctcctctattta

SEQ ID NO: 129561 - DNA, 25 bp, Probe sequence
tgtttgtgaactttcgcctcgaaag

SEQ ID NO: 129562 - DNA, 25 bp, Probe sequence
gggaccctatgcattagttgcgaag

SEQ ID NO: 129563 - DNA, 25 bp, Probe sequence
taatttattcattcgcaacccctaa

SEQ ID NO: 129564 - DNA, 25 bp, Probe sequence
tatgagctagaaagccgcccaactc

SEQ ID NO: 129565 - DNA, 25 bp, Probe sequence
tactctaccaaactctcttcgaaag

SEQ ID NO: 129566 - DNA, 25 bp, Probe sequence
tttcctcctctatttattagcaaac

SEQ ID NO: 129567 - DNA, 25 bp, Probe sequence
tttagcctttcttcaaatttatttg

SEQ ID NO: 129568 - DNA, 25 bp, Probe sequence
atttccatttgtattctcatgtgat

SEQ ID NO: 129569 - DNA, 25 bp, Probe sequence
agttaatttccatttgtattctcat

SEQ ID NO: 129570 - DNA, 25 bp, Probe sequence
aatttccatttgtattctcatgtga

SEQ ID NO: 129571 - DNA, 25 bp, Probe sequence
gttaatttccatttgtattctcatg

SEQ ID NO: 129572 - DNA, 25 bp, Probe sequence
gtattctcatgtgataaattctaaa

SEQ ID NO: 129573 - DNA, 25 bp, Probe sequence
gtgataaattctaaaagcatacaat

SEQ ID NO: 129574 - DNA, 25 bp, Probe sequence
tccatttgtattctcatgtgataaa

SEQ ID NO: 129575 - DNA, 25 bp, Probe sequence
taatttccatttgtattctcatgtg

SEQ ID NO: 129576 - DNA, 25 bp, Probe sequence
tagttaatttccatttgtattctca

SEQ ID NO: 129577 - DNA, 25 bp, Probe sequence
tttccatttgtattctcatgtgata

SEQ ID NO: 129578 - DNA, 25 bp, Probe sequence
ttagttaatttccatttgtattctc

SEQ ID NO: 129579 - DNA, 25 bp, Probe sequence
ttaatttccatttgtattctcatgt

SEQ ID NO: 129580 - DNA, 25 bp, Probe sequence
ttctcatgtgataaattctaaaagc

SEQ ID NO: 129581 - DNA, 25 bp, Probe sequence
ttccatttgtattctcatgtgataa

SEQ ID NO: 129582 - DNA, 25 bp, Probe sequence
ttgtattctcatgtgataaattcta

SEQ ID NO: 129583 - DNA, 25 bp, Probe sequence
atgtctcttcaatacatgttgatag

SEQ ID NO: 129584 - DNA, 25 bp, Probe sequence
acctgcaacttgttaaataatcctt

SEQ ID NO: 129585 - DNA, 25 bp, Probe sequence
actattgcgaaatccattcctcttc

SEQ ID NO: 129586 - DNA, 25 bp, Probe sequence
aacgcctgcgaccaataaatctttt

SEQ ID NO: 129587 - DNA, 25 bp, Probe sequence
aataatccttacatcgttaacgaat

SEQ ID NO: 129588 - DNA, 25 bp, Probe sequence
caatgctaaaaatgtctcttcaata

SEQ ID NO: 129589 - DNA, 25 bp, Probe sequence
cacttctttacctgcaacttgttaa

SEQ ID NO: 129590 - DNA, 25 bp, Probe sequence
cttcaaattttcacaaactattgcg

SEQ ID NO: 129591 - DNA, 25 bp, Probe sequence
ctcttccactacaagcaccataatt

SEQ ID NO: 129592 - DNA, 25 bp, Probe sequence
gaatcagctcaactttattaacttc

SEQ ID NO: 129593 - DNA, 25 bp, Probe sequence
gttatgtcgctatataaacgcctgc

SEQ ID NO: 129594 - DNA, 25 bp, Probe sequence
tgtttcttcgctatttgtcagtcca

SEQ ID NO: 129595 - DNA, 25 bp, Probe sequence
taacgaatagttcatcatttagttg

SEQ ID NO: 129596 - DNA, 25 bp, Probe sequence
ttcgaaaacgcttacaaatggatta

SEQ ID NO: 129597 - DNA, 25 bp, Probe sequence
ttccatcaattaaatgtttcttcgc

SEQ ID NO: 129598 - DNA, 25 bp, Probe sequence
attgaacggaattatggcattttta

SEQ ID NO: 129599 - DNA, 25 bp, Probe sequence
attagcttttagcattccaaacaaa

SEQ ID NO: 129600 - DNA, 25 bp, Probe sequence
atttctcacaaaattagcttttagc

SEQ ID NO: 129601 - DNA, 25 bp, Probe sequence
agacattcgtgcaatcggttacctt

SEQ ID NO: 129602 - DNA, 25 bp, Probe sequence
acattcgtgcaatcggttaccttaa

SEQ ID NO: 129603 - DNA, 25 bp, Probe sequence
acaactgtcaacaataccaaggttt

SEQ ID NO: 129604 - DNA, 25 bp, Probe sequence
aaagcaagacattcgtgcaatcggt

SEQ ID NO: 129605 - DNA, 25 bp, Probe sequence
ctgtcaacaataccaaggttttatt

SEQ ID NO: 129606 - DNA, 25 bp, Probe sequence
gaacagttaattataataacgtcca

SEQ ID NO: 129607 - DNA, 25 bp, Probe sequence
gataatggtcaattgttaatgaaca

SEQ ID NO: 129608 - DNA, 25 bp, Probe sequence
gtgcaatcggttaccttaaattgtt

SEQ ID NO: 129609 - DNA, 25 bp, Probe sequence
ggttttattaactatatttctcaca

SEQ ID NO: 129610 - DNA, 25 bp, Probe sequence
taattaacttttagatggattcatc

SEQ ID NO: 129611 - DNA, 25 bp, Probe sequence
taccttaaattgtttacaactgtca

SEQ ID NO: 129612 - DNA, 25 bp, Probe sequence
ttatggcatttttaacttaattgta

SEQ ID NO: 129613 - DNA, 25 bp, Probe sequence
attgtgacgaccgtgttttgattta

SEQ ID NO: 129614 - DNA, 25 bp, Probe sequence
acagtaattgtgacgaccgtgtttt

SEQ ID NO: 129615 - DNA, 25 bp, Probe sequence
aaacacggtcgccaacagtaattgt

SEQ ID NO: 129616 - DNA, 25 bp, Probe sequence
aaaacacggtcgccaacagtaattg

SEQ ID NO: 129617 - DNA, 25 bp, Probe sequence
aacacggtcgccaacagtaattgtg

SEQ ID NO: 129618 - DNA, 25 bp, Probe sequence
cacggtcgccaacagtaattgtgac

SEQ ID NO: 129619 - DNA, 25 bp, Probe sequence
aattgtgacgaccgtgttttgattt

SEQ ID NO: 129620 - DNA, 25 bp, Probe sequence
ctagtaaaacacggtcgccaacagt

SEQ ID NO: 129621 - DNA, 25 bp, Probe sequence
cggtcgccaacagtaattgtgacga

SEQ ID NO: 129622 - DNA, 25 bp, Probe sequence
gccaacagtaattgtgacgaccgtg

SEQ ID NO: 129623 - DNA, 25 bp, Probe sequence
ccaacagtaattgtgacgaccgtgt

SEQ ID NO: 129624 - DNA, 25 bp, Probe sequence
gtaaaacacggtcgccaacagtaat

SEQ ID NO: 129625 - DNA, 25 bp, Probe sequence
gtaattgtgacgaccgtgttttgat

SEQ ID NO: 129626 - DNA, 25 bp, Probe sequence
tcgccaacagtaattgtgacgaccg

SEQ ID NO: 129627 - DNA, 25 bp, Probe sequence
tagtaaaacacggtcgccaacagta

SEQ ID NO: 129628 - DNA, 25 bp, Probe sequence
atttaaggcgcatgtttttcaagaa

SEQ ID NO: 129629 - DNA, 25 bp, Probe sequence
agcgattcgttaaaatatgtcagtt

SEQ ID NO: 129630 - DNA, 25 bp, Probe sequence
aaaataagcacctcaatccgaatgt

SEQ ID NO: 129631 - DNA, 25 bp, Probe sequence
aacatgaatttaaacttctcagtat

SEQ ID NO: 129632 - DNA, 25 bp, Probe sequence
aataagtttacatttaaggcgcatg

SEQ ID NO: 129633 - DNA, 25 bp, Probe sequence
cagtataactataatttttggcaaa

SEQ ID NO: 129634 - DNA, 25 bp, Probe sequence
ctcaatccgaatgtaaacttttata

SEQ ID NO: 129635 - DNA, 25 bp, Probe sequence
gcacctcaatccgaatgtaaacttt

SEQ ID NO: 129636 - DNA, 25 bp, Probe sequence
gaaatgactaaggcttcttacgaaa

SEQ ID NO: 129637 - DNA, 25 bp, Probe sequence
ggcttcttacgaaatttgggcagat

SEQ ID NO: 129638 - DNA, 25 bp, Probe sequence
tgggcagatataaacagcgattcgt

SEQ ID NO: 129639 - DNA, 25 bp, Probe sequence
taagcacctcaatccgaatgtaaac

SEQ ID NO: 129640 - DNA, 25 bp, Probe sequence
taaacttctcagtataactataatt

SEQ ID NO: 129641 - DNA, 25 bp, Probe sequence
ttgaccttgctattgaaatgactaa

SEQ ID NO: 129642 - DNA, 25 bp, Probe sequence
ttggcaaaattttgaccttgctatt

SEQ ID NO: 129643 - DNA, 25 bp, Probe sequence
atttccaaattctgattccatatta

SEQ ID NO: 129644 - DNA, 25 bp, Probe sequence
gctgttgattatctatcaccctttt

SEQ ID NO: 129645 - DNA, 25 bp, Probe sequence
gaggggatttattttgctgttgatt

SEQ ID NO: 129646 - DNA, 25 bp, Probe sequence
gattatctatcaccctttttatttc

SEQ ID NO: 129647 - DNA, 25 bp, Probe sequence
gttgattatctatcaccctttttat

SEQ ID NO: 129648 - DNA, 25 bp, Probe sequence
gtgaggggatttattttgctgttga

SEQ ID NO: 129649 - DNA, 25 bp, Probe sequence
ggggatttattttgctgttgattat

SEQ ID NO: 129650 - DNA, 25 bp, Probe sequence
tccaaattctgattccatattaaac

SEQ ID NO: 129651 - DNA, 25 bp, Probe sequence
tctatcaccctttttatttccaaat

SEQ ID NO: 129652 - DNA, 25 bp, Probe sequence
tcaccctttttatttccaaattctg

SEQ ID NO: 129653 - DNA, 25 bp, Probe sequence
tttgctgttgattatctatcaccct

SEQ ID NO: 129654 - DNA, 25 bp, Probe sequence
tttatttccaaattctgattccata

SEQ ID NO: 129655 - DNA, 25 bp, Probe sequence
tttattttgctgttgattatctatc

SEQ ID NO: 129656 - DNA, 25 bp, Probe sequence
ttatctatcaccctttttatttcca

SEQ ID NO: 129657 - DNA, 25 bp, Probe sequence
ttctgattccatattaaactattat

SEQ ID NO: 129658 - DNA, 25 bp, Probe sequence
agtaaaactctatgttggggctccg

SEQ ID NO: 129659 - DNA, 25 bp, Probe sequence
attctttatccttagccacagctaa

SEQ ID NO: 129660 - DNA, 25 bp, Probe sequence
attaagccgcttatattatttattt

SEQ ID NO: 129661 - DNA, 25 bp, Probe sequence
attacaagtacatcatatattagtt

SEQ ID NO: 129662 - DNA, 25 bp, Probe sequence
atttatttcactggatgatatacat

SEQ ID NO: 129663 - DNA, 25 bp, Probe sequence
aaaattcacaaggttatggggcaga

SEQ ID NO: 129664 - DNA, 25 bp, Probe sequence
aataatctaaattaagccgcttata

SEQ ID NO: 129665 - DNA, 25 bp, Probe sequence
cgtatatgcaactcctttcaattaa

SEQ ID NO: 129666 - DNA, 25 bp, Probe sequence
gcaactcctttcaattaataatcta

SEQ ID NO: 129667 - DNA, 25 bp, Probe sequence
gacacatttcttttaaaaattcaca

SEQ ID NO: 129668 - DNA, 25 bp, Probe sequence
gatttgtgacacatttcttttaaaa

SEQ ID NO: 129669 - DNA, 25 bp, Probe sequence
gtaatgattctttatccttagccac

SEQ ID NO: 129670 - DNA, 25 bp, Probe sequence
gtcgcgtggatttgtgacacatttc

SEQ ID NO: 129671 - DNA, 25 bp, Probe sequence
tccttagccacagctaatatgtact

SEQ ID NO: 129672 - DNA, 25 bp, Probe sequence
taacgattatcaatgtcgcgtggat

SEQ ID NO: 129673 - DNA, 25 bp, Probe sequence
attcgctttatctaatgatcctatg

SEQ ID NO: 129674 - DNA, 25 bp, Probe sequence
atttgtatcccaatgtccctataat

SEQ ID NO: 129675 - DNA, 25 bp, Probe sequence
atcatttttcgaaatacttaattct

SEQ ID NO: 129676 - DNA, 25 bp, Probe sequence
atgtccctataattgattattcgct

SEQ ID NO: 129677 - DNA, 25 bp, Probe sequence
agtatagccttgtagagtctagtac

SEQ ID NO: 129678 - DNA, 25 bp, Probe sequence
agccttgtagagtctagtacattga

SEQ ID NO: 129679 - DNA, 25 bp, Probe sequence
ctaatgatcctatgactcaactatt

SEQ ID NO: 129680 - DNA, 25 bp, Probe sequence
gctttatctaatgatcctatgactc

SEQ ID NO: 129681 - DNA, 25 bp, Probe sequence
gactcaactattaaatcatttttcg

SEQ ID NO: 129682 - DNA, 25 bp, Probe sequence
gatcctatgactcaactattaaatc

SEQ ID NO: 129683 - DNA, 25 bp, Probe sequence
gattattcgctttatctaatgatcc

SEQ ID NO: 129684 - DNA, 25 bp, Probe sequence
gtatcccaatgtccctataattgat

SEQ ID NO: 129685 - DNA, 25 bp, Probe sequence
gtctagtacattgatttgtatccca

SEQ ID NO: 129686 - DNA, 25 bp, Probe sequence
tccctgagtatagccttgtagagtc

SEQ ID NO: 129687 - DNA, 25 bp, Probe sequence
ttgatttgtatcccaatgtccctat

SEQ ID NO: 129688 - DNA, 25 bp, Probe sequence
atagagattactttagttcactagt

SEQ ID NO: 129689 - DNA, 25 bp, Probe sequence
atcgcgtgactcattagcactatag

SEQ ID NO: 129690 - DNA, 25 bp, Probe sequence
acagcaaatttagtctctttcctct

SEQ ID NO: 129691 - DNA, 25 bp, Probe sequence
catagctacgttctccaacatactc

SEQ ID NO: 129692 - DNA, 25 bp, Probe sequence
ctacgttctccaacatactcgaata

SEQ ID NO: 129693 - DNA, 25 bp, Probe sequence
ctctcatccttatacgccattataa

SEQ ID NO: 129694 - DNA, 25 bp, Probe sequence
ccgcttcacttcaaatttacttatt

SEQ ID NO: 129695 - DNA, 25 bp, Probe sequence
cctttataccctttcacagcaaatt

SEQ ID NO: 129696 - DNA, 25 bp, Probe sequence
ccaatccgcttcacttcaaatttac

SEQ ID NO: 129697 - DNA, 25 bp, Probe sequence
gaatatgcgagccaatccgcttcac

SEQ ID NO: 129698 - DNA, 25 bp, Probe sequence
gagcgacaacagtaatgagaggatg

SEQ ID NO: 129699 - DNA, 25 bp, Probe sequence
gttctccaacatactcgaatatgcg

SEQ ID NO: 129700 - DNA, 25 bp, Probe sequence
gtaactcctcaacatcaaaatatat

SEQ ID NO: 129701 - DNA, 25 bp, Probe sequence
gtaactgatttatcgcgtgactcat

SEQ ID NO: 129702 - DNA, 25 bp, Probe sequence
tatatgcatagctacgttctccaac

SEQ ID NO: 129703 - DNA, 25 bp, Probe sequence
atcagctttattatttgcagttaaa

SEQ ID NO: 129704 - DNA, 25 bp, Probe sequence
atcatcagctttattatttgcagtt

SEQ ID NO: 129705 - DNA, 25 bp, Probe sequence
aaatcatcagctttattatttgcag

SEQ ID NO: 129706 - DNA, 25 bp, Probe sequence
aagtaaatcatcagctttattattt

SEQ ID NO: 129707 - DNA, 25 bp, Probe sequence
aatcatcagctttattatttgcagt

SEQ ID NO: 129708 - DNA, 25 bp, Probe sequence
caaagtaaatcatcagctttattat

SEQ ID NO: 129709 - DNA, 25 bp, Probe sequence
cagctttattatttgcagttaaaac

SEQ ID NO: 129710 - DNA, 25 bp, Probe sequence
catcagctttattatttgcagttaa

SEQ ID NO: 129711 - DNA, 25 bp, Probe sequence
gctttattatttgcagttaaaactt

SEQ ID NO: 129712 - DNA, 25 bp, Probe sequence
gcagttaaaacttgaatgaggtgaa

SEQ ID NO: 129713 - DNA, 25 bp, Probe sequence
gtaaatcatcagctttattatttgc

SEQ ID NO: 129714 - DNA, 25 bp, Probe sequence
gtcaaagtaaatcatcagctttatt

SEQ ID NO: 129715 - DNA, 25 bp, Probe sequence
tcatcagctttattatttgcagtta

SEQ ID NO: 129716 - DNA, 25 bp, Probe sequence
tcagctttattatttgcagttaaaa

SEQ ID NO: 129717 - DNA, 25 bp, Probe sequence
taaatcatcagctttattatttgca

SEQ ID NO: 129718 - DNA, 25 bp, Probe sequence
ataaacttgtattctaactacatac

SEQ ID NO: 129719 - DNA, 25 bp, Probe sequence
actacatacaaatacacacaaaacg

SEQ ID NO: 129720 - DNA, 25 bp, Probe sequence
aattccctatactttatctgtatca

SEQ ID NO: 129721 - DNA, 25 bp, Probe sequence
cattaattccctatactttatctgt

SEQ ID NO: 129722 - DNA, 25 bp, Probe sequence
gatgcattaagagtatagggatttt

SEQ ID NO: 129723 - DNA, 25 bp, Probe sequence
gataaacattaattccctatacttt

SEQ ID NO: 129724 - DNA, 25 bp, Probe sequence
gtatcactacgttattcgtgatgat

SEQ ID NO: 129725 - DNA, 25 bp, Probe sequence
taattatatcatttaaaggagtctg

SEQ ID NO: 129726 - DNA, 25 bp, Probe sequence
tacacctgctttgatgataaacatt

SEQ ID NO: 129727 - DNA, 25 bp, Probe sequence
tactttatctgtatcactacgttat

SEQ ID NO: 129728 - DNA, 25 bp, Probe sequence
tacgttattcgtgatgatgcattaa

SEQ ID NO: 129729 - DNA, 25 bp, Probe sequence
tattacacctgctttgatgataaac

SEQ ID NO: 129730 - DNA, 25 bp, Probe sequence
ttatctgtatcactacgttattcgt

SEQ ID NO: 129731 - DNA, 25 bp, Probe sequence
ttctaactacatacaaatacacaca

SEQ ID NO: 129732 - DNA, 25 bp, Probe sequence
ttccctatactttatctgtatcact

SEQ ID NO: 129733 - DNA, 25 bp, Probe sequence
atcactccattaattttattcactc

SEQ ID NO: 129734 - DNA, 25 bp, Probe sequence
actccattaattttattcactcatg

SEQ ID NO: 129735 - DNA, 25 bp, Probe sequence
aacatatgtttaggacattttgcat

SEQ ID NO: 129736 - DNA, 25 bp, Probe sequence
aattttattcactcatgtaaaacat

SEQ ID NO: 129737 - DNA, 25 bp, Probe sequence
cactccattaattttattcactcat

SEQ ID NO: 129738 - DNA, 25 bp, Probe sequence
cattaattttattcactcatgtaaa

SEQ ID NO: 129739 - DNA, 25 bp, Probe sequence
ctccattaattttattcactcatgt

SEQ ID NO: 129740 - DNA, 25 bp, Probe sequence
ccattaattttattcactcatgtaa

SEQ ID NO: 129741 - DNA, 25 bp, Probe sequence
tccattaattttattcactcatgta

SEQ ID NO: 129742 - DNA, 25 bp, Probe sequence
tcactccattaattttattcactca

SEQ ID NO: 129743 - DNA, 25 bp, Probe sequence
tatcactccattaattttattcact

SEQ ID NO: 129744 - DNA, 25 bp, Probe sequence
tattcactcatgtaaaacatatgtt

SEQ ID NO: 129745 - DNA, 25 bp, Probe sequence
tttatcactccattaattttattca

SEQ ID NO: 129746 - DNA, 25 bp, Probe sequence
ttatcactccattaattttattcac

SEQ ID NO: 129747 - DNA, 25 bp, Probe sequence
ttaattttattcactcatgtaaaac

SEQ ID NO: 129748 - DNA, 25 bp, Probe sequence
attactcgcgtgtgtaaaacataaa

SEQ ID NO: 129749 - DNA, 25 bp, Probe sequence
ataaaatgcgcaaactgggtcaggt

SEQ ID NO: 129750 - DNA, 25 bp, Probe sequence
acattactcgcgtgtgtaaaacata

SEQ ID NO: 129751 - DNA, 25 bp, Probe sequence
aaatgcgcaaactgggtcaggtttg

SEQ ID NO: 129752 - DNA, 25 bp, Probe sequence
aaaatgcgcaaactgggtcaggttt

SEQ ID NO: 129753 - DNA, 25 bp, Probe sequence
aacacattactcgcgtgtgtaaaac

SEQ ID NO: 129754 - DNA, 25 bp, Probe sequence
aacataaaatgcgcaaactgggtca

SEQ ID NO: 129755 - DNA, 25 bp, Probe sequence
aatgcgcaaactgggtcaggtttgc

SEQ ID NO: 129756 - DNA, 25 bp, Probe sequence
cacattactcgcgtgtgtaaaacat

SEQ ID NO: 129757 - DNA, 25 bp, Probe sequence
cataaaatgcgcaaactgggtcagg

SEQ ID NO: 129758 - DNA, 25 bp, Probe sequence
gcaaactgggtcaggtttgcgcatt

SEQ ID NO: 129759 - DNA, 25 bp, Probe sequence
gtaaacacattactcgcgtgtgtaa

SEQ ID NO: 129760 - DNA, 25 bp, Probe sequence
taaaatgcgcaaactgggtcaggtt

SEQ ID NO: 129761 - DNA, 25 bp, Probe sequence
taaacacattactcgcgtgtgtaaa

SEQ ID NO: 129762 - DNA, 25 bp, Probe sequence
tactcgcgtgtgtaaaacataaaat

SEQ ID NO: 129763 - DNA, 25 bp, Probe sequence
atagttaactgcttcatttagatga

SEQ ID NO: 129764 - DNA, 25 bp, Probe sequence
acctatcaaatgttttttcttatat

SEQ ID NO: 129765 - DNA, 25 bp, Probe sequence
acttttttatttgctttatcctgag

SEQ ID NO: 129766 - DNA, 25 bp, Probe sequence
aatggatttctttagtatttataat

SEQ ID NO: 129767 - DNA, 25 bp, Probe sequence
aatgttatttattatgccatagctt

SEQ ID NO: 129768 - DNA, 25 bp, Probe sequence
catacccttacctatcaaatgtttt

SEQ ID NO: 129769 - DNA, 25 bp, Probe sequence
gcataaaaacttatatcttttcaaa

SEQ ID NO: 129770 - DNA, 25 bp, Probe sequence
gcttacacacaacttttttatttgc

SEQ ID NO: 129771 - DNA, 25 bp, Probe sequence
gatgattattttatatttttgcata

SEQ ID NO: 129772 - DNA, 25 bp, Probe sequence
gttatcatacccttacctatcaaat

SEQ ID NO: 129773 - DNA, 25 bp, Probe sequence
taccttctttactcaaattaaaatg

SEQ ID NO: 129774 - DNA, 25 bp, Probe sequence
tatgccatagcttatctaatatata

SEQ ID NO: 129775 - DNA, 25 bp, Probe sequence
ttaagaaaacgcttacacacaactt

SEQ ID NO: 129776 - DNA, 25 bp, Probe sequence
tttagttatcatacccttacctatc

SEQ ID NO: 129777 - DNA, 25 bp, Probe sequence
tttatttgctttatcctgaggagga

SEQ ID NO: 129778 - DNA, 25 bp, Probe sequence
atatctatgtcattatgccttaaaa

SEQ ID NO: 129779 - DNA, 25 bp, Probe sequence
atcagttcaaccgatactagagttt

SEQ ID NO: 129780 - DNA, 25 bp, Probe sequence
atctcgctctagtatcagttcaacc

SEQ ID NO: 129781 - DNA, 25 bp, Probe sequence
atgtcattatgccttaaaagtgata

SEQ ID NO: 129782 - DNA, 25 bp, Probe sequence
acatctcgctctagtatcagttcaa

SEQ ID NO: 129783 - DNA, 25 bp, Probe sequence
aaacatctcgctctagtatcagttc

SEQ ID NO: 129784 - DNA, 25 bp, Probe sequence
aatatatctatgtcattatgcctta

SEQ ID NO: 129785 - DNA, 25 bp, Probe sequence
cagttcaaccgatactagagttttt

SEQ ID NO: 129786 - DNA, 25 bp, Probe sequence
ctcgctctagtatcagttcaaccga

SEQ ID NO: 129787 - DNA, 25 bp, Probe sequence
cgctctagtatcagttcaaccgata

SEQ ID NO: 129788 - DNA, 25 bp, Probe sequence
tctcgctctagtatcagttcaaccg

SEQ ID NO: 129789 - DNA, 25 bp, Probe sequence
tcaaccgatactagagttttttttg

SEQ ID NO: 129790 - DNA, 25 bp, Probe sequence
tttaaacatctcgctctagtatcag

SEQ ID NO: 129791 - DNA, 25 bp, Probe sequence
tttgaaaataacttcattttatcaa

SEQ ID NO: 129792 - DNA, 25 bp, Probe sequence
ttaaacatctcgctctagtatcagt

SEQ ID NO: 129793 - DNA, 25 bp, Probe sequence
attatcatctcatatgtacggggtt

SEQ ID NO: 129794 - DNA, 25 bp, Probe sequence
atctcatatgtacggggtttttata

SEQ ID NO: 129795 - DNA, 25 bp, Probe sequence
acaataccccccatacatatgagac

SEQ ID NO: 129796 - DNA, 25 bp, Probe sequence
aacaataccccccatacatatgaga

SEQ ID NO: 129797 - DNA, 25 bp, Probe sequence
aagtcattatcatctcatatgtacg

SEQ ID NO: 129798 - DNA, 25 bp, Probe sequence
aataccccccatacatatgagacaa

SEQ ID NO: 129799 - DNA, 25 bp, Probe sequence
caaagtcattatcatctcatatgta

SEQ ID NO: 129800 - DNA, 25 bp, Probe sequence
cataacaataccccccatacatatg

SEQ ID NO: 129801 - DNA, 25 bp, Probe sequence
ccccccatacatatgagacaaagtc

SEQ ID NO: 129802 - DNA, 25 bp, Probe sequence
gtcattatcatctcatatgtacggg

SEQ ID NO: 129803 - DNA, 25 bp, Probe sequence
tgtacggggtttttatattcaacat

SEQ ID NO: 129804 - DNA, 25 bp, Probe sequence
tcatctcatatgtacggggttttta

SEQ ID NO: 129805 - DNA, 25 bp, Probe sequence
tacggggtttttatattcaacatca

SEQ ID NO: 129806 - DNA, 25 bp, Probe sequence
taccccccatacatatgagacaaag

SEQ ID NO: 129807 - DNA, 25 bp, Probe sequence
tatcatctcatatgtacggggtttt

SEQ ID NO: 129808 - DNA, 25 bp, Probe sequence
atacgcctatctttccaaaaagtat

SEQ ID NO: 129809 - DNA, 25 bp, Probe sequence
atggatatcactatacgcctatctt

SEQ ID NO: 129810 - DNA, 25 bp, Probe sequence
acgcctatctttccaaaaagtatag

SEQ ID NO: 129811 - DNA, 25 bp, Probe sequence
actatacgcctatctttccaaaaag

SEQ ID NO: 129812 - DNA, 25 bp, Probe sequence
ctatacgcctatctttccaaaaagt

SEQ ID NO: 129813 - DNA, 25 bp, Probe sequence
gcctatctttccaaaaagtatagag

SEQ ID NO: 129814 - DNA, 25 bp, Probe sequence
gatggatatcactatacgcctatct

SEQ ID NO: 129815 - DNA, 25 bp, Probe sequence
gatatcactatacgcctatctttcc

SEQ ID NO: 129816 - DNA, 25 bp, Probe sequence
ggatatcactatacgcctatctttc

SEQ ID NO: 129817 - DNA, 25 bp, Probe sequence
tggatatcactatacgcctatcttt

SEQ ID NO: 129818 - DNA, 25 bp, Probe sequence
tcctttttatagtttttgatggata

SEQ ID NO: 129819 - DNA, 25 bp, Probe sequence
tacgcctatctttccaaaaagtata

SEQ ID NO: 129820 - DNA, 25 bp, Probe sequence
tatacgcctatctttccaaaaagta

SEQ ID NO: 129821 - DNA, 25 bp, Probe sequence
tattcctttttatagtttttgatgg

SEQ ID NO: 129822 - DNA, 25 bp, Probe sequence
ttgatggatatcactatacgcctat

SEQ ID NO: 129823 - DNA, 25 bp, Probe sequence
atatcatccacgattcgaccaagtc

SEQ ID NO: 129824 - DNA, 25 bp, Probe sequence
atcatccacgattcgaccaagtctt

SEQ ID NO: 129825 - DNA, 25 bp, Probe sequence
atccacgattcgaccaagtctttat

SEQ ID NO: 129826 - DNA, 25 bp, Probe sequence
aaaaaagacttgttcgagccgtgcg

SEQ ID NO: 129827 - DNA, 25 bp, Probe sequence
aaaagacttgttcgagccgtgcgtt

SEQ ID NO: 129828 - DNA, 25 bp, Probe sequence
aatatatcatccacgattcgaccaa

SEQ ID NO: 129829 - DNA, 25 bp, Probe sequence
cacgattcgaccaagtctttattct

SEQ ID NO: 129830 - DNA, 25 bp, Probe sequence
cttgttcgagccgtgcgtttgataa

SEQ ID NO: 129831 - DNA, 25 bp, Probe sequence
cgagccgtgcgtttgataatatatc

SEQ ID NO: 129832 - DNA, 25 bp, Probe sequence
gaccaagtctttattctttgtatat

SEQ ID NO: 129833 - DNA, 25 bp, Probe sequence
gataatatatcatccacgattcgac

SEQ ID NO: 129834 - DNA, 25 bp, Probe sequence
gattcgaccaagtctttattctttg

SEQ ID NO: 129835 - DNA, 25 bp, Probe sequence
gttcgagccgtgcgtttgataatat

SEQ ID NO: 129836 - DNA, 25 bp, Probe sequence
ttattctttgtatattaaacggata

SEQ ID NO: 129837 - DNA, 25 bp, Probe sequence
ttcgaccaagtctttattctttgta

SEQ ID NO: 129838 - DNA, 25 bp, Probe sequence
ataataacttgctttcatttcggtt

SEQ ID NO: 129839 - DNA, 25 bp, Probe sequence
aacgtcaatacgtaacattaagtgt

SEQ ID NO: 129840 - DNA, 25 bp, Probe sequence
aatccctacataataacttgctttc

SEQ ID NO: 129841 - DNA, 25 bp, Probe sequence
aatcattcgcttaatatgcacacag

SEQ ID NO: 129842 - DNA, 25 bp, Probe sequence
aatactactttcgcatattagcgtc

SEQ ID NO: 129843 - DNA, 25 bp, Probe sequence
cacctaacattaaacgtcaatacgt

SEQ ID NO: 129844 - DNA, 25 bp, Probe sequence
cctcttcatcgttgttgttcatttt

SEQ ID NO: 129845 - DNA, 25 bp, Probe sequence
gcgtcaatttgaaaatcattcgctt

SEQ ID NO: 129846 - DNA, 25 bp, Probe sequence
gaacacacctaacattaaacgtcaa

SEQ ID NO: 129847 - DNA, 25 bp, Probe sequence
gtatgataaacttactttcacaaaa

SEQ ID NO: 129848 - DNA, 25 bp, Probe sequence
tgcacacagcttttatcgtctataa

SEQ ID NO: 129849 - DNA, 25 bp, Probe sequence
tcatcgttgttgttcattttaaaaa

SEQ ID NO: 129850 - DNA, 25 bp, Probe sequence
tactttcgcatattagcgtcaattt

SEQ ID NO: 129851 - DNA, 25 bp, Probe sequence
tatcgtctataaaagaacacaccta

SEQ ID NO: 129852 - DNA, 25 bp, Probe sequence
tatgcacacagcttttatcgtctat

SEQ ID NO: 129853 - DNA, 25 bp, Probe sequence
atttgagctccttgagtagcctcat

SEQ ID NO: 129854 - DNA, 25 bp, Probe sequence
atctcattttttagcatttttacaa

SEQ ID NO: 129855 - DNA, 25 bp, Probe sequence
acacaacctataaaaaggctactca

SEQ ID NO: 129856 - DNA, 25 bp, Probe sequence
aaacatctcattttttagcattttt

SEQ ID NO: 129857 - DNA, 25 bp, Probe sequence
aactttcatgataataattgctatt

SEQ ID NO: 129858 - DNA, 25 bp, Probe sequence
aattgctattttagtgtaaacgcat

SEQ ID NO: 129859 - DNA, 25 bp, Probe sequence
caaagattatttgagctccttgagt

SEQ ID NO: 129860 - DNA, 25 bp, Probe sequence
cgctttttatccaaaaactttcatg

SEQ ID NO: 129861 - DNA, 25 bp, Probe sequence
gctaaattataaacatcttctacta

SEQ ID NO: 129862 - DNA, 25 bp, Probe sequence
gaattagataagcctcctatgttta

SEQ ID NO: 129863 - DNA, 25 bp, Probe sequence
gagctccttgagtagcctcattttt

SEQ ID NO: 129864 - DNA, 25 bp, Probe sequence
gataagcctcctatgtttaagaaaa

SEQ ID NO: 129865 - DNA, 25 bp, Probe sequence
gtagcctcattttttataaatcatg

SEQ ID NO: 129866 - DNA, 25 bp, Probe sequence
gtaaacgcatacaaacacaacctat

SEQ ID NO: 129867 - DNA, 25 bp, Probe sequence
tacaataattaacgctttttatcca

SEQ ID NO: 129868 - DNA, 25 bp, Probe sequence
attattattttatctttggcaacta

SEQ ID NO: 129869 - DNA, 25 bp, Probe sequence
atacttaacagtaaacggcgctatg

SEQ ID NO: 129870 - DNA, 25 bp, Probe sequence
acggcgctatgtatgttgaatttct

SEQ ID NO: 129871 - DNA, 25 bp, Probe sequence
aaaagaccattatcgcaattgttaa

SEQ ID NO: 129872 - DNA, 25 bp, Probe sequence
catactctatatgatgttattaaac

SEQ ID NO: 129873 - DNA, 25 bp, Probe sequence
gacatttaaaactaacatactctat

SEQ ID NO: 129874 - DNA, 25 bp, Probe sequence
gattactttgtttgcacattcgtat

SEQ ID NO: 129875 - DNA, 25 bp, Probe sequence
gttgaatttctaccgattactttgt

SEQ ID NO: 129876 - DNA, 25 bp, Probe sequence
gttaaacaagtacacatcatggtct

SEQ ID NO: 129877 - DNA, 25 bp, Probe sequence
gtacacatcatggtcttgattatgt

SEQ ID NO: 129878 - DNA, 25 bp, Probe sequence
tgcacattcgtatattcgacattta

SEQ ID NO: 129879 - DNA, 25 bp, Probe sequence
tttgtttgcacattcgtatattcga

SEQ ID NO: 129880 - DNA, 25 bp, Probe sequence
tttatatttttcatctgtaatgtga

SEQ ID NO: 129881 - DNA, 25 bp, Probe sequence
ttctccttcctcataaaaaatatga

SEQ ID NO: 129882 - DNA, 25 bp, Probe sequence
ttctaccgattactttgtttgcaca

SEQ ID NO: 129883 - DNA, 25 bp, Probe sequence
atattttaatatcttcatcattcat

SEQ ID NO: 129884 - DNA, 25 bp, Probe sequence
atcattcattgtagacacccttgcc

SEQ ID NO: 129885 - DNA, 25 bp, Probe sequence
atcttcatcattcattgtagacacc

SEQ ID NO: 129886 - DNA, 25 bp, Probe sequence
aaagtcatccttatattttaatatc

SEQ ID NO: 129887 - DNA, 25 bp, Probe sequence
cactcacaaagtcatccttatattt

SEQ ID NO: 129888 - DNA, 25 bp, Probe sequence
cttgccttttgctaacattttctac

SEQ ID NO: 129889 - DNA, 25 bp, Probe sequence
cttcatcattcattgtagacaccct

SEQ ID NO: 129890 - DNA, 25 bp, Probe sequence
ctcacaaagtcatccttatatttta

SEQ ID NO: 129891 - DNA, 25 bp, Probe sequence
cgccactcacaaagtcatccttata

SEQ ID NO: 129892 - DNA, 25 bp, Probe sequence
cccttgccttttgctaacattttct

SEQ ID NO: 129893 - DNA, 25 bp, Probe sequence
ccttgccttttgctaacattttcta

SEQ ID NO: 129894 - DNA, 25 bp, Probe sequence
gccactcacaaagtcatccttatat

SEQ ID NO: 129895 - DNA, 25 bp, Probe sequence
gtcatccttatattttaatatcttc

SEQ ID NO: 129896 - DNA, 25 bp, Probe sequence
tcatcattcattgtagacacccttg

SEQ ID NO: 129897 - DNA, 25 bp, Probe sequence
ttttaatatcttcatcattcattgt

SEQ ID NO: 129898 - DNA, 25 bp, Probe sequence
accattgatttcaacatcttggttg

SEQ ID NO: 129899 - DNA, 25 bp, Probe sequence
acataacaatgtggcgagagtgata

SEQ ID NO: 129900 - DNA, 25 bp, Probe sequence
aacacacacacattaaccaaccatt

SEQ ID NO: 129901 - DNA, 25 bp, Probe sequence
aattgtcttgttatacttgtcacct

SEQ ID NO: 129902 - DNA, 25 bp, Probe sequence
cacacattaaccaaccattgatttc

SEQ ID NO: 129903 - DNA, 25 bp, Probe sequence
gcaatgccatatatgatttcaacac

SEQ ID NO: 129904 - DNA, 25 bp, Probe sequence
gaaatgtcactgtagaagaacatca

SEQ ID NO: 129905 - DNA, 25 bp, Probe sequence
gaccgtggtatgattaaattgggga

SEQ ID NO: 129906 - DNA, 25 bp, Probe sequence
gatatcaagctagtctgattcagtc

SEQ ID NO: 129907 - DNA, 25 bp, Probe sequence
gatttcaacacacacacattaacca

SEQ ID NO: 129908 - DNA, 25 bp, Probe sequence
gttatacttgtcacctatcatctat

SEQ ID NO: 129909 - DNA, 25 bp, Probe sequence
gtcacctatcatctatagaccgtgg

SEQ ID NO: 129910 - DNA, 25 bp, Probe sequence
gtctgattcagtcacaaaattgtct

SEQ ID NO: 129911 - DNA, 25 bp, Probe sequence
gtggcgagagtgatattgtaatgaa

SEQ ID NO: 129912 - DNA, 25 bp, Probe sequence
tcaacatcttggttggttttttatt

SEQ ID NO: 129913 - DNA, 25 bp, Probe sequence
atttgatagcaggcgtgcttttcat

SEQ ID NO: 129914 - DNA, 25 bp, Probe sequence
atagcaggcgtgcttttcatatgag

SEQ ID NO: 129915 - DNA, 25 bp, Probe sequence
agcaggcgtgcttttcatatgagaa

SEQ ID NO: 129916 - DNA, 25 bp, Probe sequence
aaagcacacctgaatttgatagcag

SEQ ID NO: 129917 - DNA, 25 bp, Probe sequence
aaaaagcacacctgaatttgatagc

SEQ ID NO: 129918 - DNA, 25 bp, Probe sequence
gcatctaaaaaagcacacctgaatt

SEQ ID NO: 129919 - DNA, 25 bp, Probe sequence
gcacacctgaatttgatagcaggcg

SEQ ID NO: 129920 - DNA, 25 bp, Probe sequence
gaatttgatagcaggcgtgcttttc

SEQ ID NO: 129921 - DNA, 25 bp, Probe sequence
gatagcaggcgtgcttttcatatga

SEQ ID NO: 129922 - DNA, 25 bp, Probe sequence
gttatcgcatctaaaaaagcacacc

SEQ ID NO: 129923 - DNA, 25 bp, Probe sequence
tgatagcaggcgtgcttttcatatg

SEQ ID NO: 129924 - DNA, 25 bp, Probe sequence
tcgcatctaaaaaagcacacctgaa

SEQ ID NO: 129925 - DNA, 25 bp, Probe sequence
tagcaggcgtgcttttcatatgaga

SEQ ID NO: 129926 - DNA, 25 bp, Probe sequence
tatcgcatctaaaaaagcacacctg

SEQ ID NO: 129927 - DNA, 25 bp, Probe sequence
ttgatagcaggcgtgcttttcatat

SEQ ID NO: 129928 - DNA, 25 bp, Probe sequence
attttgctttaattttctgtgctta

SEQ ID NO: 129929 - DNA, 25 bp, Probe sequence
atttccgatattcatttcccttaga

SEQ ID NO: 129930 - DNA, 25 bp, Probe sequence
atgcgtgcctttatgaatattttcg

SEQ ID NO: 129931 - DNA, 25 bp, Probe sequence
atgtcttcaaaaaagcacgcacgct

SEQ ID NO: 129932 - DNA, 25 bp, Probe sequence
acttcagtttcaacaatgtcttcaa

SEQ ID NO: 129933 - DNA, 25 bp, Probe sequence
aactgactacaaagtatgcgtgcct

SEQ ID NO: 129934 - DNA, 25 bp, Probe sequence
aactaatgcctaaatctgatgcagt

SEQ ID NO: 129935 - DNA, 25 bp, Probe sequence
gcgtcacttcatttccaattaaaac

SEQ ID NO: 129936 - DNA, 25 bp, Probe sequence
gcacgcacgctttatatgtcagaac

SEQ ID NO: 129937 - DNA, 25 bp, Probe sequence
gaatattttcgctgtgttaatgaat

SEQ ID NO: 129938 - DNA, 25 bp, Probe sequence
gtgtgcaacacaattttatatataa

SEQ ID NO: 129939 - DNA, 25 bp, Probe sequence
tcctttcaaacaaaatttccgatat

SEQ ID NO: 129940 - DNA, 25 bp, Probe sequence
tagcgatactatatgtgcgcgtcac

SEQ ID NO: 129941 - DNA, 25 bp, Probe sequence
tatatgtgcgcgtcacttcatttcc

SEQ ID NO: 129942 - DNA, 25 bp, Probe sequence
ttcatttcccttagaataacgattt

SEQ ID NO: 129943 - DNA, 25 bp, Probe sequence
atttaggcataattgattttcagca

SEQ ID NO: 129944 - DNA, 25 bp, Probe sequence
atatcaggtatattattcccgtttt

SEQ ID NO: 129945 - DNA, 25 bp, Probe sequence
aaatcctattaacatggatactgtc

SEQ ID NO: 129946 - DNA, 25 bp, Probe sequence
aaaaatcattttcttgtaatatcaa

SEQ ID NO: 129947 - DNA, 25 bp, Probe sequence
caacctaccatattaaaaggattct

SEQ ID NO: 129948 - DNA, 25 bp, Probe sequence
cgctcctcatgtaatatatcaggta

SEQ ID NO: 129949 - DNA, 25 bp, Probe sequence
gcaccgctcctcatgtaatatatca

SEQ ID NO: 129950 - DNA, 25 bp, Probe sequence
gacaattgtttaacaacctaccata

SEQ ID NO: 129951 - DNA, 25 bp, Probe sequence
gatactgtctaatgactaagaatta

SEQ ID NO: 129952 - DNA, 25 bp, Probe sequence
gattctttattatttatggatttga

SEQ ID NO: 129953 - DNA, 25 bp, Probe sequence
ggtttttagtgcaattacatttaag

SEQ ID NO: 129954 - DNA, 25 bp, Probe sequence
ggcataattgattttcagcatttaa

SEQ ID NO: 129955 - DNA, 25 bp, Probe sequence
taacatggatactgtctaatgacta

SEQ ID NO: 129956 - DNA, 25 bp, Probe sequence
tatcaggtatattattcccgttttt

SEQ ID NO: 129957 - DNA, 25 bp, Probe sequence
tttttggtttttagtgcaattacat

SEQ ID NO: 129958 - DNA, 25 bp, Probe sequence
attgtatcactaactttcagaaaaa

SEQ ID NO: 129959 - DNA, 25 bp, Probe sequence
attcatcctcctgtatttcaactta

SEQ ID NO: 129960 - DNA, 25 bp, Probe sequence
actattgtatcactaactttcagaa

SEQ ID NO: 129961 - DNA, 25 bp, Probe sequence
aaaactattgtatcactaactttca

SEQ ID NO: 129962 - DNA, 25 bp, Probe sequence
aactattgtatcactaactttcaga

SEQ ID NO: 129963 - DNA, 25 bp, Probe sequence
catcctcctgtatttcaacttaaaa

SEQ ID NO: 129964 - DNA, 25 bp, Probe sequence
ctattgtatcactaactttcagaaa

SEQ ID NO: 129965 - DNA, 25 bp, Probe sequence
ctcctgtatttcaacttaaaactat

SEQ ID NO: 129966 - DNA, 25 bp, Probe sequence
cctgtatttcaacttaaaactattg

SEQ ID NO: 129967 - DNA, 25 bp, Probe sequence
gttattcatcctcctgtatttcaac

SEQ ID NO: 129968 - DNA, 25 bp, Probe sequence
tcctcctgtatttcaacttaaaact

SEQ ID NO: 129969 - DNA, 25 bp, Probe sequence
tcatcctcctgtatttcaacttaaa

SEQ ID NO: 129970 - DNA, 25 bp, Probe sequence
tattcatcctcctgtatttcaactt

SEQ ID NO: 129971 - DNA, 25 bp, Probe sequence
ttattcatcctcctgtatttcaact

SEQ ID NO: 129972 - DNA, 25 bp, Probe sequence
ttcatcctcctgtatttcaacttaa

SEQ ID NO: 129973 - DNA, 25 bp, Probe sequence
atttcaatttgtttagtcttgcgct

SEQ ID NO: 129974 - DNA, 25 bp, Probe sequence
atttgtttagtcttgcgctattata

SEQ ID NO: 129975 - DNA, 25 bp, Probe sequence
atatgttattcttttattgttacta

SEQ ID NO: 129976 - DNA, 25 bp, Probe sequence
agtcttgcgctattataaaattaaa

SEQ ID NO: 129977 - DNA, 25 bp, Probe sequence
acgcattaacgtcgctattttccct

SEQ ID NO: 129978 - DNA, 25 bp, Probe sequence
aattccttattataatatgttattc

SEQ ID NO: 129979 - DNA, 25 bp, Probe sequence
cgcattaacgtcgctattttcccta

SEQ ID NO: 129980 - DNA, 25 bp, Probe sequence
gctattttccctacacttaaatact

SEQ ID NO: 129981 - DNA, 25 bp, Probe sequence
gagataacaacgcattaacgtcgct

SEQ ID NO: 129982 - DNA, 25 bp, Probe sequence
gtcacaatttaaaattccttattat

SEQ ID NO: 129983 - DNA, 25 bp, Probe sequence
tccctacacttaaatactagtttct

SEQ ID NO: 129984 - DNA, 25 bp, Probe sequence
tcgctattttccctacacttaaata

SEQ ID NO: 129985 - DNA, 25 bp, Probe sequence
taatattccgaaaaagtcacaattt

SEQ ID NO: 129986 - DNA, 25 bp, Probe sequence
tattcttttattgttactaatttca

SEQ ID NO: 129987 - DNA, 25 bp, Probe sequence
ttaccattaaagttattcagatatt

SEQ ID NO: 129988 - DNA, 25 bp, Probe sequence
attgccaacgagttcatcgtattct

SEQ ID NO: 129989 - DNA, 25 bp, Probe sequence
acgagttcatcgtattcttaatacc

SEQ ID NO: 129990 - DNA, 25 bp, Probe sequence
ctttgttttctgttacgctaattat

SEQ ID NO: 129991 - DNA, 25 bp, Probe sequence
ctcctttgttttctgttacgctaat

SEQ ID NO: 129992 - DNA, 25 bp, Probe sequence
gccaacgagttcatcgtattcttaa

SEQ ID NO: 129993 - DNA, 25 bp, Probe sequence
gctaattatagcgtacgcacttgag

SEQ ID NO: 129994 - DNA, 25 bp, Probe sequence
gcacttgagtacgtcaatattgcca

SEQ ID NO: 129995 - DNA, 25 bp, Probe sequence
gagtacgtcaatattgccaacgagt

SEQ ID NO: 129996 - DNA, 25 bp, Probe sequence
gtattcttaatacctatatgctatc

SEQ ID NO: 129997 - DNA, 25 bp, Probe sequence
gtacgcacttgagtacgtcaatatt

SEQ ID NO: 129998 - DNA, 25 bp, Probe sequence
gtcaatattgccaacgagttcatcg

SEQ ID NO: 129999 - DNA, 25 bp, Probe sequence
tgttttctgttacgctaattatagc

SEQ ID NO: 130000 - DNA, 25 bp, Probe sequence
taatacctatatgctatcgtacaca

SEQ ID NO: 130001 - DNA, 25 bp, Probe sequence
tagcgtacgcacttgagtacgtcaa

SEQ ID NO: 130002 - DNA, 25 bp, Probe sequence
tacctatatgctatcgtacacaagc

SEQ ID NO: 130003 - DNA, 25 bp, Probe sequence
atttctttataatacaaatatcgaa

SEQ ID NO: 130004 - DNA, 25 bp, Probe sequence
ataatttctttataatacaaatatc

SEQ ID NO: 130005 - DNA, 25 bp, Probe sequence
acaaatatcgaaagaaggcgactga

SEQ ID NO: 130006 - DNA, 25 bp, Probe sequence
aaatatcgaaagaaggcgactgact

SEQ ID NO: 130007 - DNA, 25 bp, Probe sequence
aatgttataatttctttataataca

SEQ ID NO: 130008 - DNA, 25 bp, Probe sequence
aatttctttataatacaaatatcga

SEQ ID NO: 130009 - DNA, 25 bp, Probe sequence
caaatatcgaaagaaggcgactgac

SEQ ID NO: 130010 - DNA, 25 bp, Probe sequence
gtaaatgttataatttctttataat

SEQ ID NO: 130011 - DNA, 25 bp, Probe sequence
taatttctttataatacaaatatcg

SEQ ID NO: 130012 - DNA, 25 bp, Probe sequence
tacaaatatcgaaagaaggcgactg

SEQ ID NO: 130013 - DNA, 25 bp, Probe sequence
tagtaaatgttataatttctttata

SEQ ID NO: 130014 - DNA, 25 bp, Probe sequence
ttagtaaatgttataatttctttat

SEQ ID NO: 130015 - DNA, 25 bp, Probe sequence
ataaaaatgccctcagataagacta

SEQ ID NO: 130016 - DNA, 25 bp, Probe sequence
atgccctcagataagactaaggata

SEQ ID NO: 130017 - DNA, 25 bp, Probe sequence
aaatgccctcagataagactaagga

SEQ ID NO: 130018 - DNA, 25 bp, Probe sequence
acataaaaatgccctcagataagac

SEQ ID NO: 130019 - DNA, 25 bp, Probe sequence
aaaaatgccctcagataagactaag

SEQ ID NO: 130020 - DNA, 25 bp, Probe sequence
aaaatgccctcagataagactaagg

SEQ ID NO: 130021 - DNA, 25 bp, Probe sequence
aacataaaaatgccctcagataaga

SEQ ID NO: 130022 - DNA, 25 bp, Probe sequence
aatgccctcagataagactaaggat

SEQ ID NO: 130023 - DNA, 25 bp, Probe sequence
cataaaaatgccctcagataagact

SEQ ID NO: 130024 - DNA, 25 bp, Probe sequence
gccctcagataagactaaggataca

SEQ ID NO: 130025 - DNA, 25 bp, Probe sequence
gactaaggatacaaaccttaattca

SEQ ID NO: 130026 - DNA, 25 bp, Probe sequence
tcagataagactaaggatacaaacc

SEQ ID NO: 130027 - DNA, 25 bp, Probe sequence
taaaaatgccctcagataagactaa

SEQ ID NO: 130028 - DNA, 25 bp, Probe sequence
tataacataaaaatgccctcagata

SEQ ID NO: 130029 - DNA, 25 bp, Probe sequence
tttataacataaaaatgccctcaga

SEQ ID NO: 130030 - DNA, 25 bp, Probe sequence
attttatgatatgtttttcatttta

SEQ ID NO: 130031 - DNA, 25 bp, Probe sequence
agtaatatgtgctaaagtatctata

SEQ ID NO: 130032 - DNA, 25 bp, Probe sequence
agcgcttcattttataaaacaattt

SEQ ID NO: 130033 - DNA, 25 bp, Probe sequence
aacaattttatgatatgtttttcat

SEQ ID NO: 130034 - DNA, 25 bp, Probe sequence
aagcgcttcattttataaaacaatt

SEQ ID NO: 130035 - DNA, 25 bp, Probe sequence
aagtaatatgtgctaaagtatctat

SEQ ID NO: 130036 - DNA, 25 bp, Probe sequence
aagtatctatataatacaactattt

SEQ ID NO: 130037 - DNA, 25 bp, Probe sequence
aatacaactatttaagaggtatact

SEQ ID NO: 130038 - DNA, 25 bp, Probe sequence
gcgcttcattttataaaacaatttt

SEQ ID NO: 130039 - DNA, 25 bp, Probe sequence
gaagcgcttcattttataaaacaat

SEQ ID NO: 130040 - DNA, 25 bp, Probe sequence
ggaagcgcttcattttataaaacaa

SEQ ID NO: 130041 - DNA, 25 bp, Probe sequence
tggaagcgcttcattttataaaaca

SEQ ID NO: 130042 - DNA, 25 bp, Probe sequence
taatatgtgctaaagtatctatata

SEQ ID NO: 130043 - DNA, 25 bp, Probe sequence
tacaatacaaagtaatatgtgctaa

SEQ ID NO: 130044 - DNA, 25 bp, Probe sequence
tatgtgctaaagtatctatataata

SEQ ID NO: 130045 - DNA, 25 bp, Probe sequence
agtcagtatcacaactcacttttaa

SEQ ID NO: 130046 - DNA, 25 bp, Probe sequence
agtatcacaactcacttttaagcgt

SEQ ID NO: 130047 - DNA, 25 bp, Probe sequence
agcacacttaaaagtcagtatcaca

SEQ ID NO: 130048 - DNA, 25 bp, Probe sequence
aactcacttttaagcgtgctttatt

SEQ ID NO: 130049 - DNA, 25 bp, Probe sequence
aacgagccatatagagagcctgaga

SEQ ID NO: 130050 - DNA, 25 bp, Probe sequence
cacaactcacttttaagcgtgcttt

SEQ ID NO: 130051 - DNA, 25 bp, Probe sequence
ccatacacatcaaaaagcacactta

SEQ ID NO: 130052 - DNA, 25 bp, Probe sequence
gcgtgctttatttagatatactgtc

SEQ ID NO: 130053 - DNA, 25 bp, Probe sequence
gctttatttagatatactgtcgttc

SEQ ID NO: 130054 - DNA, 25 bp, Probe sequence
gagccatatagagagcctgagacat

SEQ ID NO: 130055 - DNA, 25 bp, Probe sequence
tactgtcgttctaaaaacgagccat

SEQ ID NO: 130056 - DNA, 25 bp, Probe sequence
tatccattatccatacacatcaaaa

SEQ ID NO: 130057 - DNA, 25 bp, Probe sequence
tatagagagcctgagacataaatca

SEQ ID NO: 130058 - DNA, 25 bp, Probe sequence
tattatccattatccatacacatca

SEQ ID NO: 130059 - DNA, 25 bp, Probe sequence
ttttcagagtattatccattatcca

SEQ ID NO: 130060 - DNA, 25 bp, Probe sequence
atcgccatgctcaatatacctttta

SEQ ID NO: 130061 - DNA, 25 bp, Probe sequence
atgaatcgccatgctcaatatacct

SEQ ID NO: 130062 - DNA, 25 bp, Probe sequence
actcccatgaatcgccatgctcaat

SEQ ID NO: 130063 - DNA, 25 bp, Probe sequence
acttaatatgctttaattcacttca

SEQ ID NO: 130064 - DNA, 25 bp, Probe sequence
aatcgccatgctcaatatacctttt

SEQ ID NO: 130065 - DNA, 25 bp, Probe sequence
aatattcattaacttaatatgcttt

SEQ ID NO: 130066 - DNA, 25 bp, Probe sequence
ctcccatgaatcgccatgctcaata

SEQ ID NO: 130067 - DNA, 25 bp, Probe sequence
cgccatgctcaatataccttttaaa

SEQ ID NO: 130068 - DNA, 25 bp, Probe sequence
ccatgctcaatataccttttaaaat

SEQ ID NO: 130069 - DNA, 25 bp, Probe sequence
gccatgctcaatataccttttaaaa

SEQ ID NO: 130070 - DNA, 25 bp, Probe sequence
gaatcgccatgctcaatataccttt

SEQ ID NO: 130071 - DNA, 25 bp, Probe sequence
tgaatcgccatgctcaatatacctt

SEQ ID NO: 130072 - DNA, 25 bp, Probe sequence
tgctcaatataccttttaaaattta

SEQ ID NO: 130073 - DNA, 25 bp, Probe sequence
tcccatgaatcgccatgctcaatat

SEQ ID NO: 130074 - DNA, 25 bp, Probe sequence
tcgccatgctcaatataccttttaa

SEQ ID NO: 130075 - DNA, 25 bp, Probe sequence
agttgcattacttaatcaaatcgta

SEQ ID NO: 130076 - DNA, 25 bp, Probe sequence
aatgtcaaacataattcaataattt

SEQ ID NO: 130077 - DNA, 25 bp, Probe sequence
aatcgtaatgattatttttctcaat

SEQ ID NO: 130078 - DNA, 25 bp, Probe sequence
caattatttgcttatttttatgtaa

SEQ ID NO: 130079 - DNA, 25 bp, Probe sequence
cataattcaataatttttttctatt

SEQ ID NO: 130080 - DNA, 25 bp, Probe sequence
gcttttcctctttctaaattgataa

SEQ ID NO: 130081 - DNA, 25 bp, Probe sequence
tgattatttttctcaattatttgct

SEQ ID NO: 130082 - DNA, 25 bp, Probe sequence
tgcttttcctctttctaaattgata

SEQ ID NO: 130083 - DNA, 25 bp, Probe sequence
tcctctttctaaattgataagttgc

SEQ ID NO: 130084 - DNA, 25 bp, Probe sequence
tctcaattatttgcttatttttatg

SEQ ID NO: 130085 - DNA, 25 bp, Probe sequence
tatttttctcaattatttgcttatt

SEQ ID NO: 130086 - DNA, 25 bp, Probe sequence
tttctcaattatttgcttattttta

SEQ ID NO: 130087 - DNA, 25 bp, Probe sequence
ttttcctctttctaaattgataagt

SEQ ID NO: 130088 - DNA, 25 bp, Probe sequence
ttctaaattgataagttgcattact

SEQ ID NO: 130089 - DNA, 25 bp, Probe sequence
ttgcttttcctctttctaaattgat

SEQ ID NO: 130090 - DNA, 25 bp, Probe sequence
attaggtaagtcatgctaacccgca

SEQ ID NO: 130091 - DNA, 25 bp, Probe sequence
aggtaagtcatgctaacccgcaaaa

SEQ ID NO: 130092 - DNA, 25 bp, Probe sequence
agtcatgctaacccgcaaaagcgaa

SEQ ID NO: 130093 - DNA, 25 bp, Probe sequence
actgtaatttttagaagatgaacct

SEQ ID NO: 130094 - DNA, 25 bp, Probe sequence
gctaacccgcaaaagcgaaaaccat

SEQ ID NO: 130095 - DNA, 25 bp, Probe sequence
ctaacccgcaaaagcgaaaaccatg

SEQ ID NO: 130096 - DNA, 25 bp, Probe sequence
aagtcatgctaacccgcaaaagcga

SEQ ID NO: 130097 - DNA, 25 bp, Probe sequence
catgctaacccgcaaaagcgaaaac

SEQ ID NO: 130098 - DNA, 25 bp, Probe sequence
gtaagtcatgctaacccgcaaaagc

SEQ ID NO: 130099 - DNA, 25 bp, Probe sequence
gtcatgctaacccgcaaaagcgaaa

SEQ ID NO: 130100 - DNA, 25 bp, Probe sequence
ggtaagtcatgctaacccgcaaaag

SEQ ID NO: 130101 - DNA, 25 bp, Probe sequence
taagtcatgctaacccgcaaaagcg

SEQ ID NO: 130102 - DNA, 25 bp, Probe sequence
taggtaagtcatgctaacccgcaaa

SEQ ID NO: 130103 - DNA, 25 bp, Probe sequence
ttaggtaagtcatgctaacccgcaa

SEQ ID NO: 130104 - DNA, 25 bp, Probe sequence
tttagaagatgaacctaatattttc

SEQ ID NO: 130105 - DNA, 25 bp, Probe sequence
attacgatttgattatatactatat

SEQ ID NO: 130106 - DNA, 25 bp, Probe sequence
attttgataatctttccataaacat

SEQ ID NO: 130107 - DNA, 25 bp, Probe sequence
atctttccataaacatcgtattctc

SEQ ID NO: 130108 - DNA, 25 bp, Probe sequence
atgaatgcacatttatattttgata

SEQ ID NO: 130109 - DNA, 25 bp, Probe sequence
acatcgtattctcagcacattcaag

SEQ ID NO: 130110 - DNA, 25 bp, Probe sequence
ctagctttaagcaatacacttcatc

SEQ ID NO: 130111 - DNA, 25 bp, Probe sequence
gcagaaaacaaatcgtaactattac

SEQ ID NO: 130112 - DNA, 25 bp, Probe sequence
gcaatacacttcatcaaataaacaa

SEQ ID NO: 130113 - DNA, 25 bp, Probe sequence
gtattctcagcacattcaagtcttt

SEQ ID NO: 130114 - DNA, 25 bp, Probe sequence
tgttttcacctcaactaaaacttca

SEQ ID NO: 130115 - DNA, 25 bp, Probe sequence
tgcttttactgttttcacctcaact

SEQ ID NO: 130116 - DNA, 25 bp, Probe sequence
tcaaacaaaaaaaccagcttcaacg

SEQ ID NO: 130117 - DNA, 25 bp, Probe sequence
taaacatcgtattctcagcacattc

SEQ ID NO: 130118 - DNA, 25 bp, Probe sequence
tagatgcttttactgttttcacctc

SEQ ID NO: 130119 - DNA, 25 bp, Probe sequence
ttctcagcacattcaagtcttttga

SEQ ID NO: 130120 - DNA, 25 bp, Probe sequence
atatgcatacattgcctacttcatg

SEQ ID NO: 130121 - DNA, 25 bp, Probe sequence
acattgcctacttcatgccaaattc

SEQ ID NO: 130122 - DNA, 25 bp, Probe sequence
aaatccccctatttcatatgtctgt

SEQ ID NO: 130123 - DNA, 25 bp, Probe sequence
aattcttttccactggatatcgatt

SEQ ID NO: 130124 - DNA, 25 bp, Probe sequence
catgccaaattcttttccactggat

SEQ ID NO: 130125 - DNA, 25 bp, Probe sequence
catacattgcctacttcatgccaaa

SEQ ID NO: 130126 - DNA, 25 bp, Probe sequence
cttcatgccaaattcttttccactg

SEQ ID NO: 130127 - DNA, 25 bp, Probe sequence
ctatttcatatgtctgtcattgcga

SEQ ID NO: 130128 - DNA, 25 bp, Probe sequence
ccccctatttcatatgtctgtcatt

SEQ ID NO: 130129 - DNA, 25 bp, Probe sequence
gccaaattcttttccactggatatc

SEQ ID NO: 130130 - DNA, 25 bp, Probe sequence
gcctacttcatgccaaattcttttc

SEQ ID NO: 130131 - DNA, 25 bp, Probe sequence
gcgacaatatgcatacattgcctac

SEQ ID NO: 130132 - DNA, 25 bp, Probe sequence
gttaaatccccctatttcatatgtc

SEQ ID NO: 130133 - DNA, 25 bp, Probe sequence
tatgtctgtcattgcgacaatatgc

SEQ ID NO: 130134 - DNA, 25 bp, Probe sequence
ttttccactggatatcgattttaaa

SEQ ID NO: 130135 - DNA, 25 bp, Probe sequence
attttccactgttcaatgcttcata

SEQ ID NO: 130136 - DNA, 25 bp, Probe sequence
actctctgctatacaatttctattg

SEQ ID NO: 130137 - DNA, 25 bp, Probe sequence
aacttacagtccttattttccactg

SEQ ID NO: 130138 - DNA, 25 bp, Probe sequence
aacatatcttaaacttacagtcctt

SEQ ID NO: 130139 - DNA, 25 bp, Probe sequence
aatagataagtctccaggcagtctt

SEQ ID NO: 130140 - DNA, 25 bp, Probe sequence
caatattagtcttttcattttctga

SEQ ID NO: 130141 - DNA, 25 bp, Probe sequence
caatgcttcataaacctaatagata

SEQ ID NO: 130142 - DNA, 25 bp, Probe sequence
cactgttcaatgcttcataaaccta

SEQ ID NO: 130143 - DNA, 25 bp, Probe sequence
cagtcttagctactctctgctatac

SEQ ID NO: 130144 - DNA, 25 bp, Probe sequence
cagtcactcctatacaacatatctt

SEQ ID NO: 130145 - DNA, 25 bp, Probe sequence
cattttctgaaaattgttacttttg

SEQ ID NO: 130146 - DNA, 25 bp, Probe sequence
gctactctctgctatacaatttcta

SEQ ID NO: 130147 - DNA, 25 bp, Probe sequence
tccaggcagtcttagctactctctg

SEQ ID NO: 130148 - DNA, 25 bp, Probe sequence
gtccttattttccactgttcaatgc

SEQ ID NO: 130149 - DNA, 25 bp, Probe sequence
taagtctccaggcagtcttagctac

SEQ ID NO: 130150 - DNA, 25 bp, Probe sequence
atttgacctgtatagtggcatgatt

SEQ ID NO: 130151 - DNA, 25 bp, Probe sequence
atagcgttcgagatgaaactctgca

SEQ ID NO: 130152 - DNA, 25 bp, Probe sequence
atgccactatacaagatttgacctg

SEQ ID NO: 130153 - DNA, 25 bp, Probe sequence
agatttgacctgtatagtggcatga

SEQ ID NO: 130154 - DNA, 25 bp, Probe sequence
acctgtatagtggcatgatttgtta

SEQ ID NO: 130155 - DNA, 25 bp, Probe sequence
aaattaaaaatgccactatacaaga

SEQ ID NO: 130156 - DNA, 25 bp, Probe sequence
caagatttgacctgtatagtggcat

SEQ ID NO: 130157 - DNA, 25 bp, Probe sequence
gccactatacaagatttgacctgta

SEQ ID NO: 130158 - DNA, 25 bp, Probe sequence
gcgttcgagatgaaactctgcattt

SEQ ID NO: 130159 - DNA, 25 bp, Probe sequence
gagatgaaactctgcatttatatga

SEQ ID NO: 130160 - DNA, 25 bp, Probe sequence
gatttgttatgatatagcgttcgag

SEQ ID NO: 130161 - DNA, 25 bp, Probe sequence
gttcgagatgaaactctgcatttat

SEQ ID NO: 130162 - DNA, 25 bp, Probe sequence
gtatagtggcatgatttgttatgat

SEQ ID NO: 130163 - DNA, 25 bp, Probe sequence
tgacctgtatagtggcatgatttgt

SEQ ID NO: 130164 - DNA, 25 bp, Probe sequence
tgaaactctgcatttatatgaacaa

SEQ ID NO: 130165 - DNA, 25 bp, Probe sequence
atgtactgtacaaaactggggaagt

SEQ ID NO: 130166 - DNA, 25 bp, Probe sequence
atggctaaactattatttcatttac

SEQ ID NO: 130167 - DNA, 25 bp, Probe sequence
aggatattataccttgctctaccct

SEQ ID NO: 130168 - DNA, 25 bp, Probe sequence
actggggaagtattggtgatgatga

SEQ ID NO: 130169 - DNA, 25 bp, Probe sequence
acattaatggggttcgcttgtgtta

SEQ ID NO: 130170 - DNA, 25 bp, Probe sequence
aaatcacgtcatcgccattgttatt

SEQ ID NO: 130171 - DNA, 25 bp, Probe sequence
aatggggttcgcttgtgttaatgta

SEQ ID NO: 130172 - DNA, 25 bp, Probe sequence
cacgtcatcgccattgttattcggt

SEQ ID NO: 130173 - DNA, 25 bp, Probe sequence
cttgtcaatctatgctttagttaaa

SEQ ID NO: 130174 - DNA, 25 bp, Probe sequence
gaaacaccttcgatagcaatgacat

SEQ ID NO: 130175 - DNA, 25 bp, Probe sequence
gttcgcttgtgttaatgtactgtac

SEQ ID NO: 130176 - DNA, 25 bp, Probe sequence
gttaaaacatttagcgcttatattt

SEQ ID NO: 130177 - DNA, 25 bp, Probe sequence
gtcaataaatcacgtcatcgccatt

SEQ ID NO: 130178 - DNA, 25 bp, Probe sequence
tgatattaattgcgaaacaccttcg

SEQ ID NO: 130179 - DNA, 25 bp, Probe sequence
tcatcgccattgttattcggtatat

SEQ ID NO: 130180 - DNA, 25 bp, Probe sequence
attgcgggtataaagtggttaacag

SEQ ID NO: 130181 - DNA, 25 bp, Probe sequence
atctaggtcaaggaaaagcagccaa

SEQ ID NO: 130182 - DNA, 25 bp, Probe sequence
atgatactacaaaacacactcttac

SEQ ID NO: 130183 - DNA, 25 bp, Probe sequence
agatcaacgaaatattgcgggtata

SEQ ID NO: 130184 - DNA, 25 bp, Probe sequence
actacaaaacacactcttacaaaga

SEQ ID NO: 130185 - DNA, 25 bp, Probe sequence
acagtttacatatttatgatactac

SEQ ID NO: 130186 - DNA, 25 bp, Probe sequence
aaatctataattttaatctaggtca

SEQ ID NO: 130187 - DNA, 25 bp, Probe sequence
aacacactcttacaaagaaaatcta

SEQ ID NO: 130188 - DNA, 25 bp, Probe sequence
ctatcaccagctcctaaaatgtggt

SEQ ID NO: 130189 - DNA, 25 bp, Probe sequence
ccagctcctaaaatgtggtggaatt

SEQ ID NO: 130190 - DNA, 25 bp, Probe sequence
gaaaagcagccaaaagtgtttatat

SEQ ID NO: 130191 - DNA, 25 bp, Probe sequence
gatactacaaaacacactcttacaa

SEQ ID NO: 130192 - DNA, 25 bp, Probe sequence
gtggtggaattttatacagtttaca

SEQ ID NO: 130193 - DNA, 25 bp, Probe sequence
gtggttaacagataaatacagtgga

SEQ ID NO: 130194 - DNA, 25 bp, Probe sequence
tgtactaaaaattcaacttttcatt

SEQ ID NO: 130195 - DNA, 25 bp, Probe sequence
attgccttactaacattaacaaaat

SEQ ID NO: 130196 - DNA, 25 bp, Probe sequence
attatgccctcatgtcattattgcc

SEQ ID NO: 130197 - DNA, 25 bp, Probe sequence
atcaccaattactgagaattgtaca

SEQ ID NO: 130198 - DNA, 25 bp, Probe sequence
acattaaatgtctatctcccacacc

SEQ ID NO: 130199 - DNA, 25 bp, Probe sequence
acaaaatcgatagctattacattaa

SEQ ID NO: 130200 - DNA, 25 bp, Probe sequence
ctcatgtcattattgccttactaac

SEQ ID NO: 130201 - DNA, 25 bp, Probe sequence
cgtcgccttcattaacttgattgtt

SEQ ID NO: 130202 - DNA, 25 bp, Probe sequence
ccctcatgtcattattgccttacta

SEQ ID NO: 130203 - DNA, 25 bp, Probe sequence
gcctattatgccctcatgtcattat

SEQ ID NO: 130204 - DNA, 25 bp, Probe sequence
gattgttaaaatcaccaattactga

SEQ ID NO: 130205 - DNA, 25 bp, Probe sequence
gtcattattgccttactaacattaa

SEQ ID NO: 130206 - DNA, 25 bp, Probe sequence
ggaataattgcctattatgccctca

SEQ ID NO: 130207 - DNA, 25 bp, Probe sequence
tgccctcatgtcattattgccttac

SEQ ID NO: 130208 - DNA, 25 bp, Probe sequence
taattgcctattatgccctcatgtc

SEQ ID NO: 130209 - DNA, 25 bp, Probe sequence
tatgccctcatgtcattattgcctt

SEQ ID NO: 130210 - DNA, 25 bp, Probe sequence
ataacggtcataataactcgcttca

SEQ ID NO: 130211 - DNA, 25 bp, Probe sequence
atgttgaaaaatcgtcacttcttta

SEQ ID NO: 130212 - DNA, 25 bp, Probe sequence
acattacaagccattcgaaatatac

SEQ ID NO: 130213 - DNA, 25 bp, Probe sequence
aactcgcttcattttcatagataaa

SEQ ID NO: 130214 - DNA, 25 bp, Probe sequence
aatgatcgactcctttgattctttt

SEQ ID NO: 130215 - DNA, 25 bp, Probe sequence
aataactcgcttcattttcatagat

SEQ ID NO: 130216 - DNA, 25 bp, Probe sequence
aatactgtgatttatcattcgattg

SEQ ID NO: 130217 - DNA, 25 bp, Probe sequence
gcgtatcacaattcatataacggtc

SEQ ID NO: 130218 - DNA, 25 bp, Probe sequence
gaaaaatcgtcacttctttattgta

SEQ ID NO: 130219 - DNA, 25 bp, Probe sequence
gaaatatacaattaatcgttgctta

SEQ ID NO: 130220 - DNA, 25 bp, Probe sequence
gataaattacattacaagccattcg

SEQ ID NO: 130221 - DNA, 25 bp, Probe sequence
ggtcataataactcgcttcattttc

SEQ ID NO: 130222 - DNA, 25 bp, Probe sequence
tcgactcctttgattctttttattt

SEQ ID NO: 130223 - DNA, 25 bp, Probe sequence
tcgtcacttctttattgtaaaaaca

SEQ ID NO: 130224 - DNA, 25 bp, Probe sequence
taatcgttgcttatattttttattt

SEQ ID NO: 130225 - DNA, 25 bp, Probe sequence
attgccgccgactaggggtagtaat

SEQ ID NO: 130226 - DNA, 25 bp, Probe sequence
actaggggtagtaatcattggcaat

SEQ ID NO: 130227 - DNA, 25 bp, Probe sequence
aaagggatctgccctcaattgctca

SEQ ID NO: 130228 - DNA, 25 bp, Probe sequence
catcaatcacacttcaattgccgcc

SEQ ID NO: 130229 - DNA, 25 bp, Probe sequence
ctcaattgctcaccaacgagggcaa

SEQ ID NO: 130230 - DNA, 25 bp, Probe sequence
cgagggcaagttacatcaatcacac

SEQ ID NO: 130231 - DNA, 25 bp, Probe sequence
gccgccgactaggggtagtaatcat

SEQ ID NO: 130232 - DNA, 25 bp, Probe sequence
gttccagatttgtggggagttaggg

SEQ ID NO: 130233 - DNA, 25 bp, Probe sequence
gtatcgttccagatttgtggggagt

SEQ ID NO: 130234 - DNA, 25 bp, Probe sequence
gggcaagttacatcaatcacacttc

SEQ ID NO: 130235 - DNA, 25 bp, Probe sequence
ggggtagtaatcattggcaataaga

SEQ ID NO: 130236 - DNA, 25 bp, Probe sequence
tgccctcaattgctcaccaacgagg

SEQ ID NO: 130237 - DNA, 25 bp, Probe sequence
tgctcaccaacgagggcaagttaca

SEQ ID NO: 130238 - DNA, 25 bp, Probe sequence
ttcaattgccgccgactaggggtag

SEQ ID NO: 130239 - DNA, 25 bp, Probe sequence
ttacttaattaaagggatctgccct

SEQ ID NO: 130240 - DNA, 25 bp, Probe sequence
attagaagcttttttgttgcggtgc

SEQ ID NO: 130241 - DNA, 25 bp, Probe sequence
acttcttacaagtctaatattacat

SEQ ID NO: 130242 - DNA, 25 bp, Probe sequence
aaaagcttctaacatgatacggaat

SEQ ID NO: 130243 - DNA, 25 bp, Probe sequence
aatcatcactccaatgtttatatat

SEQ ID NO: 130244 - DNA, 25 bp, Probe sequence
gcttttttgttgcggtgcttatatt

SEQ ID NO: 130245 - DNA, 25 bp, Probe sequence
gaatgaacgcatgctgtcttagttt

SEQ ID NO: 130246 - DNA, 25 bp, Probe sequence
gaggttcctgtatcacattagaagc

SEQ ID NO: 130247 - DNA, 25 bp, Probe sequence
gatgtatttcacaaatttatcacta

SEQ ID NO: 130248 - DNA, 25 bp, Probe sequence
gtcttagtttcaggaatcggctaga

SEQ ID NO: 130249 - DNA, 25 bp, Probe sequence
tctcgtctctctctatttattaact

SEQ ID NO: 130250 - DNA, 25 bp, Probe sequence
tctctctatttattaacttcttaca

SEQ ID NO: 130251 - DNA, 25 bp, Probe sequence
taatatcatccagttcattcttcgc

SEQ ID NO: 130252 - DNA, 25 bp, Probe sequence
tattaaacttccgttctttgaatat

SEQ ID NO: 130253 - DNA, 25 bp, Probe sequence
tttatataaactctctcgtctctct

SEQ ID NO: 130254 - DNA, 25 bp, Probe sequence
ttaatttcttactaatatcatccag

SEQ ID NO: 130255 - DNA, 25 bp, Probe sequence
attgactcaatctttaatttataca

SEQ ID NO: 130256 - DNA, 25 bp, Probe sequence
atattgactcaatctttaatttata

SEQ ID NO: 130257 - DNA, 25 bp, Probe sequence
catttctccaccttatatttttaat

SEQ ID NO: 130258 - DNA, 25 bp, Probe sequence
ctcaatctttaatttatacaactaa

SEQ ID NO: 130259 - DNA, 25 bp, Probe sequence
gaaaaattattttgaacactttatg

SEQ ID NO: 130260 - DNA, 25 bp, Probe sequence
gactcaatctttaatttatacaact

SEQ ID NO: 130261 - DNA, 25 bp, Probe sequence
tgactcaatctttaatttatacaac

SEQ ID NO: 130262 - DNA, 25 bp, Probe sequence
tgaacactttatgaaatttttattt

SEQ ID NO: 130263 - DNA, 25 bp, Probe sequence
tccaccttatatttttaatattgac

SEQ ID NO: 130264 - DNA, 25 bp, Probe sequence
tctccaccttatatttttaatattg

SEQ ID NO: 130265 - DNA, 25 bp, Probe sequence
tatttcaaacttctattaaccctat

SEQ ID NO: 130266 - DNA, 25 bp, Probe sequence
tatatttttaatattgactcaatct

SEQ ID NO: 130267 - DNA, 25 bp, Probe sequence
tattgactcaatctttaatttatac

SEQ ID NO: 130268 - DNA, 25 bp, Probe sequence
tttctccaccttatatttttaatat

SEQ ID NO: 130269 - DNA, 25 bp, Probe sequence
ttctccaccttatatttttaatatt

SEQ ID NO: 130270 - DNA, 25 bp, Probe sequence
catcaccttcatacagtttgaagtc

SEQ ID NO: 130271 - DNA, 25 bp, Probe sequence
cgccatcaccttcatacagtttgaa

SEQ ID NO: 130272 - DNA, 25 bp, Probe sequence
ccaattgtaaatgacgactagatga

SEQ ID NO: 130273 - DNA, 25 bp, Probe sequence
gccatcaccttcatacagtttgaag

SEQ ID NO: 130274 - DNA, 25 bp, Probe sequence
gaaacatcaaaattcgttaaaacat

SEQ ID NO: 130275 - DNA, 25 bp, Probe sequence
gacgactagatgatatatagttcaa

SEQ ID NO: 130276 - DNA, 25 bp, Probe sequence
gttcaagaaacatcaaaattcgtta

SEQ ID NO: 130277 - DNA, 25 bp, Probe sequence
gtttgaagtcatatttaccaattgt

SEQ ID NO: 130278 - DNA, 25 bp, Probe sequence
gtaaatgacgactagatgatatata

SEQ ID NO: 130279 - DNA, 25 bp, Probe sequence
tcgccatcaccttcatacagtttga

SEQ ID NO: 130280 - DNA, 25 bp, Probe sequence
tcaccttcatacagtttgaagtcat

SEQ ID NO: 130281 - DNA, 25 bp, Probe sequence
tcaaattttattatgttcaaaactt

SEQ ID NO: 130282 - DNA, 25 bp, Probe sequence
tacagtttgaagtcatatttaccaa

SEQ ID NO: 130283 - DNA, 25 bp, Probe sequence
ttaccaattgtaaatgacgactaga

SEQ ID NO: 130284 - DNA, 25 bp, Probe sequence
ttgaagtcatatttaccaattgtaa

SEQ ID NO: 130285 - DNA, 25 bp, Probe sequence
atagccacttatagtcgagattatg

SEQ ID NO: 130286 - DNA, 25 bp, Probe sequence
atacttattgtgtttcttaatacct

SEQ ID NO: 130287 - DNA, 25 bp, Probe sequence
aaatggattatatacttattgtgtt

SEQ ID NO: 130288 - DNA, 25 bp, Probe sequence
aatagccacttatagtcgagattat

SEQ ID NO: 130289 - DNA, 25 bp, Probe sequence
ctaatagccacttatagtcgagatt

SEQ ID NO: 130290 - DNA, 25 bp, Probe sequence
gccacttatagtcgagattatgaac

SEQ ID NO: 130291 - DNA, 25 bp, Probe sequence
gctaatagccacttatagtcgagat

SEQ ID NO: 130292 - DNA, 25 bp, Probe sequence
gattatatacttattgtgtttctta

SEQ ID NO: 130293 - DNA, 25 bp, Probe sequence
ggattatatacttattgtgtttctt

SEQ ID NO: 130294 - DNA, 25 bp, Probe sequence
ggctaatagccacttatagtcgaga

SEQ ID NO: 130295 - DNA, 25 bp, Probe sequence
tggctaatagccacttatagtcgag

SEQ ID NO: 130296 - DNA, 25 bp, Probe sequence
tcccgaaaaataatggctaatagcc

SEQ ID NO: 130297 - DNA, 25 bp, Probe sequence
tacttattgtgtttcttaatacctt

SEQ ID NO: 130298 - DNA, 25 bp, Probe sequence
tagccacttatagtcgagattatga

SEQ ID NO: 130299 - DNA, 25 bp, Probe sequence
ttatatacttattgtgtttcttaat

SEQ ID NO: 130300 - DNA, 25 bp, Probe sequence
atcttttacctagtgctttatggaa

SEQ ID NO: 130301 - DNA, 25 bp, Probe sequence
atcgttataatcttttacctagtgc

SEQ ID NO: 130302 - DNA, 25 bp, Probe sequence
aagtttctgtgatttattattaatt

SEQ ID NO: 130303 - DNA, 25 bp, Probe sequence
ctagtgctttatggaattttcattc

SEQ ID NO: 130304 - DNA, 25 bp, Probe sequence
ctccaccttatatttataattctga

SEQ ID NO: 130305 - DNA, 25 bp, Probe sequence
gagttatcgttataatcttttacct

SEQ ID NO: 130306 - DNA, 25 bp, Probe sequence
gttatcgttataatcttttacctag

SEQ ID NO: 130307 - DNA, 25 bp, Probe sequence
gttataatcttttacctagtgcttt

SEQ ID NO: 130308 - DNA, 25 bp, Probe sequence
tggaattttcattccaaacttctat

SEQ ID NO: 130309 - DNA, 25 bp, Probe sequence
tctgactcagtttttaatatttaca

SEQ ID NO: 130310 - DNA, 25 bp, Probe sequence
taatcttttacctagtgctttatgg

SEQ ID NO: 130311 - DNA, 25 bp, Probe sequence
tatatttataattctgactcagttt

SEQ ID NO: 130312 - DNA, 25 bp, Probe sequence
ttacctagtgctttatggaattttc

SEQ ID NO: 130313 - DNA, 25 bp, Probe sequence
ttaaatcttcttatcagaattataa

SEQ ID NO: 130314 - DNA, 25 bp, Probe sequence
ttgtattttaaatcttcttatcaga

SEQ ID NO: 130315 - DNA, 25 bp, Probe sequence
atttttaatactgactcaatcttta

SEQ ID NO: 130316 - DNA, 25 bp, Probe sequence
atatttttaatactgactcaatctt

SEQ ID NO: 130317 - DNA, 25 bp, Probe sequence
aatactgactcaatctttaatttac

SEQ ID NO: 130318 - DNA, 25 bp, Probe sequence
caccttatatttttaatactgactc

SEQ ID NO: 130319 - DNA, 25 bp, Probe sequence
catttctccaccttatatttttaat

SEQ ID NO: 130320 - DNA, 25 bp, Probe sequence
ctcaatctttaatttacacaactaa

SEQ ID NO: 130321 - DNA, 25 bp, Probe sequence
ctgactcaatctttaatttacacaa

SEQ ID NO: 130322 - DNA, 25 bp, Probe sequence
gaaaaattattttgaacactttatg

SEQ ID NO: 130323 - DNA, 25 bp, Probe sequence
gaaattttcatttcaaacttctatt

SEQ ID NO: 130324 - DNA, 25 bp, Probe sequence
gactcaatctttaatttacacaact

SEQ ID NO: 130325 - DNA, 25 bp, Probe sequence
tccaccttatatttttaatactgac

SEQ ID NO: 130326 - DNA, 25 bp, Probe sequence
tctccaccttatatttttaatactg

SEQ ID NO: 130327 - DNA, 25 bp, Probe sequence
tactgactcaatctttaatttacac

SEQ ID NO: 130328 - DNA, 25 bp, Probe sequence
ttctccaccttatatttttaatact

SEQ ID NO: 130329 - DNA, 25 bp, Probe sequence
ttgaacactttatgaaattttcatt

SEQ ID NO: 130330 - DNA, 25 bp, Probe sequence
attttatgattaaatcctcgtggat

SEQ ID NO: 130331 - DNA, 25 bp, Probe sequence
atgcaaagttaagttcaaattccaa

SEQ ID NO: 130332 - DNA, 25 bp, Probe sequence
aatactagaggaaattttatgatta

SEQ ID NO: 130333 - DNA, 25 bp, Probe sequence
caaagttaagttcaaattccaatat

SEQ ID NO: 130334 - DNA, 25 bp, Probe sequence
gcaaagttaagttcaaattccaata

SEQ ID NO: 130335 - DNA, 25 bp, Probe sequence
gaaattttatgattaaatcctcgtg

SEQ ID NO: 130336 - DNA, 25 bp, Probe sequence
gatgcaaagttaagttcaaattcca

SEQ ID NO: 130337 - DNA, 25 bp, Probe sequence
gttcaaattccaatattaataatac

SEQ ID NO: 130338 - DNA, 25 bp, Probe sequence
gttaagttcaaattccaatattaat

SEQ ID NO: 130339 - DNA, 25 bp, Probe sequence
tgattaaatcctcgtggattttaat

SEQ ID NO: 130340 - DNA, 25 bp, Probe sequence
tgcaaagttaagttcaaattccaat

SEQ ID NO: 130341 - DNA, 25 bp, Probe sequence
taagttcaaattccaatattaataa

SEQ ID NO: 130342 - DNA, 25 bp, Probe sequence
tatgattaaatcctcgtggatttta

SEQ ID NO: 130343 - DNA, 25 bp, Probe sequence
ttttatgattaaatcctcgtggatt

SEQ ID NO: 130344 - DNA, 25 bp, Probe sequence
ttcacatccccatttttatttttga

SEQ ID NO: 130345 - DNA, 25 bp, Probe sequence
atacatctttactaacattcatttt

SEQ ID NO: 130346 - DNA, 25 bp, Probe sequence
ataacactgaaacttcaatgtcttt

SEQ ID NO: 130347 - DNA, 25 bp, Probe sequence
atctttactaacattcatttttcgg

SEQ ID NO: 130348 - DNA, 25 bp, Probe sequence
acttcaatgtctttacttattacaa

SEQ ID NO: 130349 - DNA, 25 bp, Probe sequence
acatctttactaacattcatttttc

SEQ ID NO: 130350 - DNA, 25 bp, Probe sequence
aaatacatctttactaacattcatt

SEQ ID NO: 130351 - DNA, 25 bp, Probe sequence
aacttcaatgtctttacttattaca

SEQ ID NO: 130352 - DNA, 25 bp, Probe sequence
aagataaattgcgcttatatttaaa

SEQ ID NO: 130353 - DNA, 25 bp, Probe sequence
aatgtctttacttattacaattgat

SEQ ID NO: 130354 - DNA, 25 bp, Probe sequence
cactgaaacttcaatgtctttactt

SEQ ID NO: 130355 - DNA, 25 bp, Probe sequence
ctgaaacttcaatgtctttacttat

SEQ ID NO: 130356 - DNA, 25 bp, Probe sequence
gaaacttcaatgtctttacttatta

SEQ ID NO: 130357 - DNA, 25 bp, Probe sequence
gtctttacttattacaattgatgtt

SEQ ID NO: 130358 - DNA, 25 bp, Probe sequence
tctttactaacattcatttttcggt

SEQ ID NO: 130359 - DNA, 25 bp, Probe sequence
ttcaatgtctttacttattacaatt

SEQ ID NO: 130360 - DNA, 25 bp, Probe sequence
atcatcttaattgttattctatcaa

SEQ ID NO: 130361 - DNA, 25 bp, Probe sequence
atcttaattgttattctatcaaaaa

SEQ ID NO: 130362 - DNA, 25 bp, Probe sequence
agactcacccttcaatttaaaatca

SEQ ID NO: 130363 - DNA, 25 bp, Probe sequence
actcacccttcaatttaaaatcatc

SEQ ID NO: 130364 - DNA, 25 bp, Probe sequence
aaatcatcttaattgttattctatc

SEQ ID NO: 130365 - DNA, 25 bp, Probe sequence
aaaatcatcttaattgttattctat

SEQ ID NO: 130366 - DNA, 25 bp, Probe sequence
aatcatcttaattgttattctatca

SEQ ID NO: 130367 - DNA, 25 bp, Probe sequence
aattaatattttacaatttcctgca

SEQ ID NO: 130368 - DNA, 25 bp, Probe sequence
aattgttattctatcaaaaattaca

SEQ ID NO: 130369 - DNA, 25 bp, Probe sequence
cacccttcaatttaaaatcatctta

SEQ ID NO: 130370 - DNA, 25 bp, Probe sequence
ctcacccttcaatttaaaatcatct

SEQ ID NO: 130371 - DNA, 25 bp, Probe sequence
cccttcaatttaaaatcatcttaat

SEQ ID NO: 130372 - DNA, 25 bp, Probe sequence
gactcacccttcaatttaaaatcat

SEQ ID NO: 130373 - DNA, 25 bp, Probe sequence
tcatcttaattgttattctatcaaa

SEQ ID NO: 130374 - DNA, 25 bp, Probe sequence
tcacccttcaatttaaaatcatctt

SEQ ID NO: 130375 - DNA, 25 bp, Probe sequence
attacatttcattttatacttatca

SEQ ID NO: 130376 - DNA, 25 bp, Probe sequence
actagaatccttatgttttcgcgtt

SEQ ID NO: 130377 - DNA, 25 bp, Probe sequence
acttatcagcccttttgaaactaga

SEQ ID NO: 130378 - DNA, 25 bp, Probe sequence
cagcccttttgaaactagaatcctt

SEQ ID NO: 130379 - DNA, 25 bp, Probe sequence
cattttatacttatcagcccttttg

SEQ ID NO: 130380 - DNA, 25 bp, Probe sequence
ctatttaattgttttcgcgatgaaa

SEQ ID NO: 130381 - DNA, 25 bp, Probe sequence
gaatccttatgttttcgcgttttga

SEQ ID NO: 130382 - DNA, 25 bp, Probe sequence
tatgttttcgcgttttgaaggggct

SEQ ID NO: 130383 - DNA, 25 bp, Probe sequence
tgtatttttcatattaagcggtaat

SEQ ID NO: 130384 - DNA, 25 bp, Probe sequence
tcgcgttttgaaggggctaatttgt

SEQ ID NO: 130385 - DNA, 25 bp, Probe sequence
taataccgcgacctatttaattgtt

SEQ ID NO: 130386 - DNA, 25 bp, Probe sequence
tataataattaataccgcgacctat

SEQ ID NO: 130387 - DNA, 25 bp, Probe sequence
tatacttatcagcccttttgaaact

SEQ ID NO: 130388 - DNA, 25 bp, Probe sequence
ttttatacatcgaaatattacattt

SEQ ID NO: 130389 - DNA, 25 bp, Probe sequence
ttaattttcatgtatttttcatatt

SEQ ID NO: 130390 - DNA, 25 bp, Probe sequence
ataaccccattcattcaactaataa

SEQ ID NO: 130391 - DNA, 25 bp, Probe sequence
aaccccattcattcaactaataaat

SEQ ID NO: 130392 - DNA, 25 bp, Probe sequence
cgtactgttttttagaaacatacat

SEQ ID NO: 130393 - DNA, 25 bp, Probe sequence
ccccattcattcaactaataaatta

SEQ ID NO: 130394 - DNA, 25 bp, Probe sequence
gaaacatacatatataagatacgca

SEQ ID NO: 130395 - DNA, 25 bp, Probe sequence
gacagtacattatattctatcagga

SEQ ID NO: 130396 - DNA, 25 bp, Probe sequence
gatacgcattcattactaaaagaca

SEQ ID NO: 130397 - DNA, 25 bp, Probe sequence
tcataaccccattcattcaactaat

SEQ ID NO: 130398 - DNA, 25 bp, Probe sequence
tacgcattcattactaaaagacagt

SEQ ID NO: 130399 - DNA, 25 bp, Probe sequence
tataagatacgcattcattactaaa

SEQ ID NO: 130400 - DNA, 25 bp, Probe sequence
tatattctatcaggaaggtgcaaca

SEQ ID NO: 130401 - DNA, 25 bp, Probe sequence
tttcataaccccattcattcaacta

SEQ ID NO: 130402 - DNA, 25 bp, Probe sequence
ttttcataaccccattcattcaact

SEQ ID NO: 130403 - DNA, 25 bp, Probe sequence
tttttcataaccccattcattcaac

SEQ ID NO: 130404 - DNA, 25 bp, Probe sequence
ttcataaccccattcattcaactaa

SEQ ID NO: 130405 - DNA, 25 bp, Probe sequence
attgatgcgctgtcattaagtaatt

SEQ ID NO: 130406 - DNA, 25 bp, Probe sequence
atgtttgcgatagtgtgttggttag

SEQ ID NO: 130407 - DNA, 25 bp, Probe sequence
aatacaaccttgtacgaatacaaag

SEQ ID NO: 130408 - DNA, 25 bp, Probe sequence
gcgctgtcattaagtaattgtttgc

SEQ ID NO: 130409 - DNA, 25 bp, Probe sequence
gatgcgctgtcattaagtaattgtt

SEQ ID NO: 130410 - DNA, 25 bp, Probe sequence
gatttattgatgcgctgtcattaag

SEQ ID NO: 130411 - DNA, 25 bp, Probe sequence
gttagatttattgatgcgctgtcat

SEQ ID NO: 130412 - DNA, 25 bp, Probe sequence
gtttgcgatagtgtgttggttagat

SEQ ID NO: 130413 - DNA, 25 bp, Probe sequence
gtacgaatacaaagttgcattaata

SEQ ID NO: 130414 - DNA, 25 bp, Probe sequence
gtcattaagtaattgtttgcgaaaa

SEQ ID NO: 130415 - DNA, 25 bp, Probe sequence
gtgttggttagatttattgatgcgc

SEQ ID NO: 130416 - DNA, 25 bp, Probe sequence
tggttagatttattgatgcgctgtc

SEQ ID NO: 130417 - DNA, 25 bp, Probe sequence
tgtttgcgaaaaaaatacaaccttg

SEQ ID NO: 130418 - DNA, 25 bp, Probe sequence
tgcgatagtgtgttggttagattta

SEQ ID NO: 130419 - DNA, 25 bp, Probe sequence
ttattgatgcgctgtcattaagtaa

SEQ ID NO: 130420 - DNA, 25 bp, Probe sequence
atatacatactacttgaaacaccat

SEQ ID NO: 130421 - DNA, 25 bp, Probe sequence
atcattctcatcatattctaggttg

SEQ ID NO: 130422 - DNA, 25 bp, Probe sequence
atccaaagcgcaattaattctaata

SEQ ID NO: 130423 - DNA, 25 bp, Probe sequence
aaactctctttatccaaagcgcaat

SEQ ID NO: 130424 - DNA, 25 bp, Probe sequence
ctcatcatattctaggttgttttta

SEQ ID NO: 130425 - DNA, 25 bp, Probe sequence
gactactcagaggttatattctact

SEQ ID NO: 130426 - DNA, 25 bp, Probe sequence
gaggttatattctactaattatgat

SEQ ID NO: 130427 - DNA, 25 bp, Probe sequence
gttaggtctttcaatccaacttttg

SEQ ID NO: 130428 - DNA, 25 bp, Probe sequence
gtctttcaatccaacttttggggtg

SEQ ID NO: 130429 - DNA, 25 bp, Probe sequence
taattgaatgcatccaccagccttt

SEQ ID NO: 130430 - DNA, 25 bp, Probe sequence
taccccccaaaatgactactcagag

SEQ ID NO: 130431 - DNA, 25 bp, Probe sequence
tacttgaaacaccatacataccccc

SEQ ID NO: 130432 - DNA, 25 bp, Probe sequence
tacataccccccaaaatgactactc

SEQ ID NO: 130433 - DNA, 25 bp, Probe sequence
tagaccttcttctaaactctcttta

SEQ ID NO: 130434 - DNA, 25 bp, Probe sequence
ttggggtgtatatcattctcatcat

SEQ ID NO: 130435 - DNA, 25 bp, Probe sequence
attattttatatattgacacactta

SEQ ID NO: 130436 - DNA, 25 bp, Probe sequence
attttccactttacttacagtgaat

SEQ ID NO: 130437 - DNA, 25 bp, Probe sequence
actgcaccaagatattaaaatctcg

SEQ ID NO: 130438 - DNA, 25 bp, Probe sequence
aaaatacatttaactgcaccaagat

SEQ ID NO: 130439 - DNA, 25 bp, Probe sequence
aacccatcaactcaatagcattgaa

SEQ ID NO: 130440 - DNA, 25 bp, Probe sequence
aatacaataggagttgcacaatgga

SEQ ID NO: 130441 - DNA, 25 bp, Probe sequence
ctttacttacagtgaatttacatgt

SEQ ID NO: 130442 - DNA, 25 bp, Probe sequence
cattcttatctgttggaaaaaccca

SEQ ID NO: 130443 - DNA, 25 bp, Probe sequence
gcacaatggaatataacacttatct

SEQ ID NO: 130444 - DNA, 25 bp, Probe sequence
gaataattcattcttatctgttgga

SEQ ID NO: 130445 - DNA, 25 bp, Probe sequence
gacacacttaaaacaatctacaact

SEQ ID NO: 130446 - DNA, 25 bp, Probe sequence
ggaaaaacccatcaactcaatagca

SEQ ID NO: 130447 - DNA, 25 bp, Probe sequence
tacatttaactgcaccaagatatta

SEQ ID NO: 130448 - DNA, 25 bp, Probe sequence
taccttaacgcatttaaaaatacat

SEQ ID NO: 130449 - DNA, 25 bp, Probe sequence
ttccatattttccactttacttaca

SEQ ID NO: 130450 - DNA, 25 bp, Probe sequence
atttgtcatttgttattccgtgatt

SEQ ID NO: 130451 - DNA, 25 bp, Probe sequence
atatttagtttgtggtgctagctat

SEQ ID NO: 130452 - DNA, 25 bp, Probe sequence
ataatatttgtctttaactagtaat

SEQ ID NO: 130453 - DNA, 25 bp, Probe sequence
agagattgcttttatattactttaa

SEQ ID NO: 130454 - DNA, 25 bp, Probe sequence
aacactatattttgattttgttcaa

SEQ ID NO: 130455 - DNA, 25 bp, Probe sequence
aacatgtcttcaaaagagattgctt

SEQ ID NO: 130456 - DNA, 25 bp, Probe sequence
aatatttaggttaacatgtcttcaa

SEQ ID NO: 130457 - DNA, 25 bp, Probe sequence
catcccttacttttaattgtcacgt

SEQ ID NO: 130458 - DNA, 25 bp, Probe sequence
cttacttttaattgtcacgtcaaat

SEQ ID NO: 130459 - DNA, 25 bp, Probe sequence
gtcttcatcccttacttttaattgt

SEQ ID NO: 130460 - DNA, 25 bp, Probe sequence
gtggtgctagctataaacacaaatg

SEQ ID NO: 130461 - DNA, 25 bp, Probe sequence
tgtctttaactagtaataactccaa

SEQ ID NO: 130462 - DNA, 25 bp, Probe sequence
tgttcaattgtttttgtttttggat

SEQ ID NO: 130463 - DNA, 25 bp, Probe sequence
tataaagtattgggacatcagaaaa

SEQ ID NO: 130464 - DNA, 25 bp, Probe sequence
tattccgtgatttttagttatttat

SEQ ID NO: 130465 - DNA, 25 bp, Probe sequence
atttaaacagatttacctcttgata

SEQ ID NO: 130466 - DNA, 25 bp, Probe sequence
atttcaataccctactatatatcac

SEQ ID NO: 130467 - DNA, 25 bp, Probe sequence
atatcacaacacataaattaagcat

SEQ ID NO: 130468 - DNA, 25 bp, Probe sequence
agttcaccatttcgtgttccaattt

SEQ ID NO: 130469 - DNA, 25 bp, Probe sequence
aacagatttacctcttgataaaata

SEQ ID NO: 130470 - DNA, 25 bp, Probe sequence
aattttattgagtatcatgctttta

SEQ ID NO: 130471 - DNA, 25 bp, Probe sequence
aattaagcatgacactcattcaatt

SEQ ID NO: 130472 - DNA, 25 bp, Probe sequence
cattcaatttagttcaccatttcgt

SEQ ID NO: 130473 - DNA, 25 bp, Probe sequence
ccatttcgtgttccaattttattga

SEQ ID NO: 130474 - DNA, 25 bp, Probe sequence
gacactcattcaatttagttcacca

SEQ ID NO: 130475 - DNA, 25 bp, Probe sequence
tcaccatttcgtgttccaattttat

SEQ ID NO: 130476 - DNA, 25 bp, Probe sequence
taaataagcaatcataatacttctc

SEQ ID NO: 130477 - DNA, 25 bp, Probe sequence
taccctactatatatcacaacacat

SEQ ID NO: 130478 - DNA, 25 bp, Probe sequence
tttagttcaccatttcgtgttccaa

SEQ ID NO: 130479 - DNA, 25 bp, Probe sequence
tttatattatttcaataccctacta

SEQ ID NO: 130480 - DNA, 25 bp, Probe sequence
attagaacgccttcatagtgtcatt

SEQ ID NO: 130481 - DNA, 25 bp, Probe sequence
atgtgctccttttcctaagtattaa

SEQ ID NO: 130482 - DNA, 25 bp, Probe sequence
agtgtcattgagtatgtaattattg

SEQ ID NO: 130483 - DNA, 25 bp, Probe sequence
acgccttcatagtgtcattgagtat

SEQ ID NO: 130484 - DNA, 25 bp, Probe sequence
aacactaattagaacgccttcatag

SEQ ID NO: 130485 - DNA, 25 bp, Probe sequence
gccttcatagtgtcattgagtatgt

SEQ ID NO: 130486 - DNA, 25 bp, Probe sequence
gctccttttcctaagtattaaatct

SEQ ID NO: 130487 - DNA, 25 bp, Probe sequence
gaacgccttcatagtgtcattgagt

SEQ ID NO: 130488 - DNA, 25 bp, Probe sequence
gttaatgtgctccttttcctaagta

SEQ ID NO: 130489 - DNA, 25 bp, Probe sequence
gtattaaatctatgtatcaacgtca

SEQ ID NO: 130490 - DNA, 25 bp, Probe sequence
gtgctccttttcctaagtattaaat

SEQ ID NO: 130491 - DNA, 25 bp, Probe sequence
tcaacgtcattttaacactaattag

SEQ ID NO: 130492 - DNA, 25 bp, Probe sequence
taatgtgctccttttcctaagtatt

SEQ ID NO: 130493 - DNA, 25 bp, Probe sequence
taaatctatgtatcaacgtcatttt

SEQ ID NO: 130494 - DNA, 25 bp, Probe sequence
tagaacgccttcatagtgtcattga

SEQ ID NO: 130495 - DNA, 25 bp, Probe sequence
attgttgttaactttatgtataatg

SEQ ID NO: 130496 - DNA, 25 bp, Probe sequence
agattgttgttaactttatgtataa

SEQ ID NO: 130497 - DNA, 25 bp, Probe sequence
aagattgttgttaactttatgtata

SEQ ID NO: 130498 - DNA, 25 bp, Probe sequence
gattgttgttaactttatgtataat

SEQ ID NO: 130499 - DNA, 25 bp, Probe sequence
gttgttaactttatgtataatgagt

SEQ ID NO: 130500 - DNA, 25 bp, Probe sequence
gttaactttatgtataatgagtttt

SEQ ID NO: 130501 - DNA, 25 bp, Probe sequence
tgttaactttatgtataatgagttt

SEQ ID NO: 130502 - DNA, 25 bp, Probe sequence
tgttgttaactttatgtataatgag

SEQ ID NO: 130503 - DNA, 25 bp, Probe sequence
taagattgttgttaactttatgtat

SEQ ID NO: 130504 - DNA, 25 bp, Probe sequence
taactttatgtataatgagtttttt

SEQ ID NO: 130505 - DNA, 25 bp, Probe sequence
ttaagattgttgttaactttatgta

SEQ ID NO: 130506 - DNA, 25 bp, Probe sequence
ttaactttatgtataatgagttttt

SEQ ID NO: 130507 - DNA, 25 bp, Probe sequence
ttgttaactttatgtataatgagtt

SEQ ID NO: 130508 - DNA, 25 bp, Probe sequence
ttgttgttaactttatgtataatga

SEQ ID NO: 130509 - DNA, 25 bp, Probe sequence
attgcatttatcaaatttgtcttat

SEQ ID NO: 130510 - DNA, 25 bp, Probe sequence
attctaactttatctctcattttgt

SEQ ID NO: 130511 - DNA, 25 bp, Probe sequence
ataatcgcctgtacaatgcatcatt

SEQ ID NO: 130512 - DNA, 25 bp, Probe sequence
atcatcagacataaagcgcttcagc

SEQ ID NO: 130513 - DNA, 25 bp, Probe sequence
atctctcattttgtaatcaatcatc

SEQ ID NO: 130514 - DNA, 25 bp, Probe sequence
acaatgcatcattaacaagtcactg

SEQ ID NO: 130515 - DNA, 25 bp, Probe sequence
aacagccgtatttcaagacgacatt

SEQ ID NO: 130516 - DNA, 25 bp, Probe sequence
aagtcactgaaatgcctttcattgt

SEQ ID NO: 130517 - DNA, 25 bp, Probe sequence
caaatttgtcttattgattcaatct

SEQ ID NO: 130518 - DNA, 25 bp, Probe sequence
gcctttcattgtattaataacgtca

SEQ ID NO: 130519 - DNA, 25 bp, Probe sequence
gcgcttcagcaatcagaaaacactc

SEQ ID NO: 130520 - DNA, 25 bp, Probe sequence
gaaaacactctaattttctattaga

SEQ ID NO: 130521 - DNA, 25 bp, Probe sequence
gattatttatacagaaacagccgta

SEQ ID NO: 130522 - DNA, 25 bp, Probe sequence
gattcaatctaatttgtactaacaa

SEQ ID NO: 130523 - DNA, 25 bp, Probe sequence
tcaagacgacattttaagtttaact

SEQ ID NO: 130524 - DNA, 25 bp, Probe sequence
atagtagtcatggcacaacaacttt

SEQ ID NO: 130525 - DNA, 25 bp, Probe sequence
acaactttatctaagatgcttgagt

SEQ ID NO: 130526 - DNA, 25 bp, Probe sequence
aatagaatgtaacaccgtcgtcgcg

SEQ ID NO: 130527 - DNA, 25 bp, Probe sequence
cacaacaactttatctaagatgctt

SEQ ID NO: 130528 - DNA, 25 bp, Probe sequence
catggcacaacaactttatctaaga

SEQ ID NO: 130529 - DNA, 25 bp, Probe sequence
ctttatctaagatgcttgagtgacg

SEQ ID NO: 130530 - DNA, 25 bp, Probe sequence
cccctctttctcttttcaatagaat

SEQ ID NO: 130531 - DNA, 25 bp, Probe sequence
cctctttctcttttcaatagaatgt

SEQ ID NO: 130532 - DNA, 25 bp, Probe sequence
gataatatatagtagtcatggcaca

SEQ ID NO: 130533 - DNA, 25 bp, Probe sequence
gtagtcatggcacaacaactttatc

SEQ ID NO: 130534 - DNA, 25 bp, Probe sequence
gtcatggcacaacaactttatctaa

SEQ ID NO: 130535 - DNA, 25 bp, Probe sequence
ggcacaacaactttatctaagatgc

SEQ ID NO: 130536 - DNA, 25 bp, Probe sequence
tcccctctttctcttttcaatagaa

SEQ ID NO: 130537 - DNA, 25 bp, Probe sequence
tatctaagatgcttgagtgacgtat

SEQ ID NO: 130538 - DNA, 25 bp, Probe sequence
tatatagtagtcatggcacaacaac

SEQ ID NO: 130539 - DNA, 25 bp, Probe sequence
attaagcaacactcctactaaacgt

SEQ ID NO: 130540 - DNA, 25 bp, Probe sequence
atcactcaaattaagcaacactcct

SEQ ID NO: 130541 - DNA, 25 bp, Probe sequence
cacctcctacaatcaccatagttga

SEQ ID NO: 130542 - DNA, 25 bp, Probe sequence
cgagcaagtacaatttccatatttt

SEQ ID NO: 130543 - DNA, 25 bp, Probe sequence
gaaatttattatacttggcgtctta

SEQ ID NO: 130544 - DNA, 25 bp, Probe sequence
gacgtcacgagcaagtacaatttcc

SEQ ID NO: 130545 - DNA, 25 bp, Probe sequence
gatttcgtaccatgttgatttacaa

SEQ ID NO: 130546 - DNA, 25 bp, Probe sequence
gtcacgagcaagtacaatttccata

SEQ ID NO: 130547 - DNA, 25 bp, Probe sequence
gtcttatttttatgatttcgtacca

SEQ ID NO: 130548 - DNA, 25 bp, Probe sequence
ggcgtcttatttttatgatttcgta

SEQ ID NO: 130549 - DNA, 25 bp, Probe sequence
tgacccgacgtcacgagcaagtaca

SEQ ID NO: 130550 - DNA, 25 bp, Probe sequence
tcaccatagttgatgacccgacgtc

SEQ ID NO: 130551 - DNA, 25 bp, Probe sequence
tagttgatgacccgacgtcacgagc

SEQ ID NO: 130552 - DNA, 25 bp, Probe sequence
tatacttggcgtcttatttttatga

SEQ ID NO: 130553 - DNA, 25 bp, Probe sequence
ttgatgacccgacgtcacgagcaag

SEQ ID NO: 130554 - DNA, 25 bp, Probe sequence
ataatactaatacactatcgaactt

SEQ ID NO: 130555 - DNA, 25 bp, Probe sequence
agaaactcaaacaatccgaattatg

SEQ ID NO: 130556 - DNA, 25 bp, Probe sequence
aatccgaattatgtatcaaaacctt

SEQ ID NO: 130557 - DNA, 25 bp, Probe sequence
aatacactatcgaactttgggctga

SEQ ID NO: 130558 - DNA, 25 bp, Probe sequence
cacctgttaccgttatataggtaca

SEQ ID NO: 130559 - DNA, 25 bp, Probe sequence
cgaactttgggctgatactgaaaca

SEQ ID NO: 130560 - DNA, 25 bp, Probe sequence
ccgttatataggtacaagtgcttaa

SEQ ID NO: 130561 - DNA, 25 bp, Probe sequence
gaaacagcacaaagaaactcaaaca

SEQ ID NO: 130562 - DNA, 25 bp, Probe sequence
gtatcaaaaccttcaattacaggaa

SEQ ID NO: 130563 - DNA, 25 bp, Probe sequence
ggtacaagtgcttaattgatagaga

SEQ ID NO: 130564 - DNA, 25 bp, Probe sequence
taatcatctttattgtacctaacat

SEQ ID NO: 130565 - DNA, 25 bp, Probe sequence
taacctccgatatataatcatcttt

SEQ ID NO: 130566 - DNA, 25 bp, Probe sequence
ttttatactaacctccgatatataa

SEQ ID NO: 130567 - DNA, 25 bp, Probe sequence
ttgggctgatactgaaacagcacaa

SEQ ID NO: 130568 - DNA, 25 bp, Probe sequence
ttgtacctaacattttattaagata

SEQ ID NO: 130569 - DNA, 25 bp, Probe sequence
agactcccgtcataataacttcaga

SEQ ID NO: 130570 - DNA, 25 bp, Probe sequence
actcccgtcataataacttcagaca

SEQ ID NO: 130571 - DNA, 25 bp, Probe sequence
aacgttagtctgacctgataaatat

SEQ ID NO: 130572 - DNA, 25 bp, Probe sequence
caaacgttagtctgacctgataaat

SEQ ID NO: 130573 - DNA, 25 bp, Probe sequence
ctcccgtcataataacttcagacaa

SEQ ID NO: 130574 - DNA, 25 bp, Probe sequence
ccgtcataataacttcagacaaacg

SEQ ID NO: 130575 - DNA, 25 bp, Probe sequence
gacaaacgttagtctgacctgataa

SEQ ID NO: 130576 - DNA, 25 bp, Probe sequence
gactcccgtcataataacttcagac

SEQ ID NO: 130577 - DNA, 25 bp, Probe sequence
gttagtctgacctgataaatatttt

SEQ ID NO: 130578 - DNA, 25 bp, Probe sequence
tcccgtcataataacttcagacaaa

SEQ ID NO: 130579 - DNA, 25 bp, Probe sequence
taataacttcagacaaacgttagtc

SEQ ID NO: 130580 - DNA, 25 bp, Probe sequence
tagactcccgtcataataacttcag

SEQ ID NO: 130581 - DNA, 25 bp, Probe sequence
tagtctgacctgataaatattttat

SEQ ID NO: 130582 - DNA, 25 bp, Probe sequence
tttagactcccgtcataataacttc

SEQ ID NO: 130583 - DNA, 25 bp, Probe sequence
tttttagactcccgtcataataact

SEQ ID NO: 130584 - DNA, 25 bp, Probe sequence
atgtacttttacaagcgttacctga

SEQ ID NO: 130585 - DNA, 25 bp, Probe sequence
aaagcaataagccccaacaatgtga

SEQ ID NO: 130586 - DNA, 25 bp, Probe sequence
taacttcccgttcatcttaaaccat

SEQ ID NO: 130587 - DNA, 25 bp, Probe sequence
aactttatttctttacatatatcat

SEQ ID NO: 130588 - DNA, 25 bp, Probe sequence
caagcgttacctgactaatgtttta

SEQ ID NO: 130589 - DNA, 25 bp, Probe sequence
cttcccgttcatcttaaaccatatc

SEQ ID NO: 130590 - DNA, 25 bp, Probe sequence
cattttaataacttcccgttcatct

SEQ ID NO: 130591 - DNA, 25 bp, Probe sequence
ctttgggctagttaaaatttatatg

SEQ ID NO: 130592 - DNA, 25 bp, Probe sequence
ccgttcatcttaaaccatatctgtt

SEQ ID NO: 130593 - DNA, 25 bp, Probe sequence
gccccaacaatgtgaaagcttactg

SEQ ID NO: 130594 - DNA, 25 bp, Probe sequence
tgtgaaagcttactgcttgtttaaa

SEQ ID NO: 130595 - DNA, 25 bp, Probe sequence
tgttatttaacatcgttgaaccttt

SEQ ID NO: 130596 - DNA, 25 bp, Probe sequence
tacttttacaagcgttacctgacta

SEQ ID NO: 130597 - DNA, 25 bp, Probe sequence
taacatcgttgaacctttggtcgcc

SEQ ID NO: 130598 - DNA, 25 bp, Probe sequence
tatatcattttaataacttcccgtt

SEQ ID NO: 130599 - DNA, 25 bp, Probe sequence
attgctcattcattgtgcagcgcct

SEQ ID NO: 130600 - DNA, 25 bp, Probe sequence
aaaacgtatattgcaggctttctta

SEQ ID NO: 130601 - DNA, 25 bp, Probe sequence
aaaatactgcaatcctagtgtttta

SEQ ID NO: 130602 - DNA, 25 bp, Probe sequence
cataaaactacattgctcattcatt

SEQ ID NO: 130603 - DNA, 25 bp, Probe sequence
catagtagcctatcatttgttaatt

SEQ ID NO: 130604 - DNA, 25 bp, Probe sequence
gcttgtttcaacatcgcatacgaca

SEQ ID NO: 130605 - DNA, 25 bp, Probe sequence
gcatacgacatcattcattattcat

SEQ ID NO: 130606 - DNA, 25 bp, Probe sequence
gaatttatccagtttctatttgtct

SEQ ID NO: 130607 - DNA, 25 bp, Probe sequence
gacttttcgtacttatagcaagcaa

SEQ ID NO: 130608 - DNA, 25 bp, Probe sequence
gatgatcatttgttgacttttcgta

SEQ ID NO: 130609 - DNA, 25 bp, Probe sequence
gtttctatttgtctgcaattgctga

SEQ ID NO: 130610 - DNA, 25 bp, Probe sequence
gtgcagcgcctgttatttagatgat

SEQ ID NO: 130611 - DNA, 25 bp, Probe sequence
ggctttcttacatattcgacattca

SEQ ID NO: 130612 - DNA, 25 bp, Probe sequence
taaattccgcttaacttttgctatt

SEQ ID NO: 130613 - DNA, 25 bp, Probe sequence
ttcggacatctggcatgtccacccc

SEQ ID NO: 130614 - DNA, 25 bp, Probe sequence
atactcgtgttcatatttatatttt

SEQ ID NO: 130615 - DNA, 25 bp, Probe sequence
agttcagttccctcagtatgtatac

SEQ ID NO: 130616 - DNA, 25 bp, Probe sequence
aaacttatctcacaaatccatctat

SEQ ID NO: 130617 - DNA, 25 bp, Probe sequence
cactttaatgtgcctactatccaaa

SEQ ID NO: 130618 - DNA, 25 bp, Probe sequence
cagtaaaatcattccatctattgaa

SEQ ID NO: 130619 - DNA, 25 bp, Probe sequence
cctgtcctccacacaaattgttttc

SEQ ID NO: 130620 - DNA, 25 bp, Probe sequence
gaagtttcccatcaaagttcagttc

SEQ ID NO: 130621 - DNA, 25 bp, Probe sequence
gttttcgacactttaatgtgcctac

SEQ ID NO: 130622 - DNA, 25 bp, Probe sequence
gtttatttggcatactttagctgaa

SEQ ID NO: 130623 - DNA, 25 bp, Probe sequence
tgaaagtcacctaaaatcctttacg

SEQ ID NO: 130624 - DNA, 25 bp, Probe sequence
tgaaatgattcactgcttttttaag

SEQ ID NO: 130625 - DNA, 25 bp, Probe sequence
taaacagaatttaccctgtcctcca

SEQ ID NO: 130626 - DNA, 25 bp, Probe sequence
tacattccgcaaacttatctcacaa

SEQ ID NO: 130627 - DNA, 25 bp, Probe sequence
tagcaataccatttgcacgctacaa

SEQ ID NO: 130628 - DNA, 25 bp, Probe sequence
ttccctcagtatgtatacattccgc

SEQ ID NO: 130629 - DNA, 25 bp, Probe sequence
attccacattttacatatcgtaatt

SEQ ID NO: 130630 - DNA, 25 bp, Probe sequence
ataaatacacacatattccatcgta

SEQ ID NO: 130631 - DNA, 25 bp, Probe sequence
atcccttcacccaaataatggtgcg

SEQ ID NO: 130632 - DNA, 25 bp, Probe sequence
atccaaattttggcaattccacatt

SEQ ID NO: 130633 - DNA, 25 bp, Probe sequence
acacacatattccatcgtaattcaa

SEQ ID NO: 130634 - DNA, 25 bp, Probe sequence
cacccaaataatggtgcggggattt

SEQ ID NO: 130635 - DNA, 25 bp, Probe sequence
aataaatatatcactttcccacttt

SEQ ID NO: 130636 - DNA, 25 bp, Probe sequence
aatataacaaattcctcctctcatt

SEQ ID NO: 130637 - DNA, 25 bp, Probe sequence
caaaatcattttcaaatcccttcac

SEQ ID NO: 130638 - DNA, 25 bp, Probe sequence
ggcaattccacattttacatatcgt

SEQ ID NO: 130639 - DNA, 25 bp, Probe sequence
tcctcctctcatttttaaaataaat

SEQ ID NO: 130640 - DNA, 25 bp, Probe sequence
taacaaattcctcctctcattttta

SEQ ID NO: 130641 - DNA, 25 bp, Probe sequence
taaatatatcactttcccactttta

SEQ ID NO: 130642 - DNA, 25 bp, Probe sequence
tattccatcgtaattcaaaatcatt

SEQ ID NO: 130643 - DNA, 25 bp, Probe sequence
ttcaaatcccttcacccaaataatg

SEQ ID NO: 130644 - DNA, 25 bp, Probe sequence
agcgcatttattttataaactaacg

SEQ ID NO: 130645 - DNA, 25 bp, Probe sequence
acgtttgaaatatactacaggagtg

SEQ ID NO: 130646 - DNA, 25 bp, Probe sequence
actaacgtttgaaatatactacagg

SEQ ID NO: 130647 - DNA, 25 bp, Probe sequence
aaatatactacaggagtgacacgta

SEQ ID NO: 130648 - DNA, 25 bp, Probe sequence
aactaacgtttgaaatatactacag

SEQ ID NO: 130649 - DNA, 25 bp, Probe sequence
aacgtttgaaatatactacaggagt

SEQ ID NO: 130650 - DNA, 25 bp, Probe sequence
ctaacgtttgaaatatactacagga

SEQ ID NO: 130651 - DNA, 25 bp, Probe sequence
gcgcatttattttataaactaacgt

SEQ ID NO: 130652 - DNA, 25 bp, Probe sequence
gaaatatactacaggagtgacacgt

SEQ ID NO: 130653 - DNA, 25 bp, Probe sequence
gtttgaaatatactacaggagtgac

SEQ ID NO: 130654 - DNA, 25 bp, Probe sequence
gtaagcgcatttattttataaacta

SEQ ID NO: 130655 - DNA, 25 bp, Probe sequence
tgaaatatactacaggagtgacacg

SEQ ID NO: 130656 - DNA, 25 bp, Probe sequence
taacgtttgaaatatactacaggag

SEQ ID NO: 130657 - DNA, 25 bp, Probe sequence
taagcgcatttattttataaactaa

SEQ ID NO: 130658 - DNA, 25 bp, Probe sequence
ttgaaatatactacaggagtgacac

SEQ ID NO: 130659 - DNA, 25 bp, Probe sequence
aggggattggtgtatctatgctaat

SEQ ID NO: 130660 - DNA, 25 bp, Probe sequence
agtactatatttttcattaacatgt

SEQ ID NO: 130661 - DNA, 25 bp, Probe sequence
aaataggcgacctagctacaccgaa

SEQ ID NO: 130662 - DNA, 25 bp, Probe sequence
aaatcccctcactattgcgagtagt

SEQ ID NO: 130663 - DNA, 25 bp, Probe sequence
aattaatgaaatgaccgacgccctc

SEQ ID NO: 130664 - DNA, 25 bp, Probe sequence
cctcgcttctacttcaatttaacaa

SEQ ID NO: 130665 - DNA, 25 bp, Probe sequence
gcgacctagctacaccgaaaaaaat

SEQ ID NO: 130666 - DNA, 25 bp, Probe sequence
gcattggctacgcaaacgcgatgat

SEQ ID NO: 130667 - DNA, 25 bp, Probe sequence
gacgacattttatgcatgtattgta

SEQ ID NO: 130668 - DNA, 25 bp, Probe sequence
gatgcggtttacgcattggctacgc

SEQ ID NO: 130669 - DNA, 25 bp, Probe sequence
gtttacgcattggctacgcaaacgc

SEQ ID NO: 130670 - DNA, 25 bp, Probe sequence
gtatgttacattttctatattactt

SEQ ID NO: 130671 - DNA, 25 bp, Probe sequence
ggtgtatctatgctaattcctgtta

SEQ ID NO: 130672 - DNA, 25 bp, Probe sequence
tatgctaattcctgttaactgtatt

SEQ ID NO: 130673 - DNA, 25 bp, Probe sequence
tatactgttgtattgatgcggttta

SEQ ID NO: 130674 - DNA, 25 bp, Probe sequence
atttattacagcacttcaaaatcaa

SEQ ID NO: 130675 - DNA, 25 bp, Probe sequence
atctgtccgcttcttaatagaactg

SEQ ID NO: 130676 - DNA, 25 bp, Probe sequence
acatctatactattgtaaaatttat

SEQ ID NO: 130677 - DNA, 25 bp, Probe sequence
aaatttattacagcacttcaaaatc

SEQ ID NO: 130678 - DNA, 25 bp, Probe sequence
aaaatttattacagcacttcaaaat

SEQ ID NO: 130679 - DNA, 25 bp, Probe sequence
aacatctatactattgtaaaattta

SEQ ID NO: 130680 - DNA, 25 bp, Probe sequence
aatttattacagcacttcaaaatca

SEQ ID NO: 130681 - DNA, 25 bp, Probe sequence
caaaatcaaaaaagcgggcagatga

SEQ ID NO: 130682 - DNA, 25 bp, Probe sequence
caaaaaagcgggcagatgaaaagta

SEQ ID NO: 130683 - DNA, 25 bp, Probe sequence
catctgtccgcttcttaatagaact

SEQ ID NO: 130684 - DNA, 25 bp, Probe sequence
gtaaaaatcttttccatctgtccgc

SEQ ID NO: 130685 - DNA, 25 bp, Probe sequence
tccatctgtccgcttcttaatagaa

SEQ ID NO: 130686 - DNA, 25 bp, Probe sequence
ccatctgtccgcttcttaatagaac

SEQ ID NO: 130687 - DNA, 25 bp, Probe sequence
taaaatttattacagcacttcaaaa

SEQ ID NO: 130688 - DNA, 25 bp, Probe sequence
tttattacagcacttcaaaatcaaa

SEQ ID NO: 130689 - DNA, 25 bp, Probe sequence
atttttagtgtatttatctcgaaat

SEQ ID NO: 130690 - DNA, 25 bp, Probe sequence
atatttttagtgtatttatctcgaa

SEQ ID NO: 130691 - DNA, 25 bp, Probe sequence
atataccctctttatatttttagtg

SEQ ID NO: 130692 - DNA, 25 bp, Probe sequence
ctctttatatttttagtgtatttat

SEQ ID NO: 130693 - DNA, 25 bp, Probe sequence
gaaatcgagatattttaatgtaaat

SEQ ID NO: 130694 - DNA, 25 bp, Probe sequence
tctcgaaatcgagatattttaatgt

SEQ ID NO: 130695 - DNA, 25 bp, Probe sequence
taccctctttatatttttagtgtat

SEQ ID NO: 130696 - DNA, 25 bp, Probe sequence
tataccctctttatatttttagtgt

SEQ ID NO: 130697 - DNA, 25 bp, Probe sequence
tatatttttagtgtatttatctcga

SEQ ID NO: 130698 - DNA, 25 bp, Probe sequence
tatataccctctttatatttttagt

SEQ ID NO: 130699 - DNA, 25 bp, Probe sequence
tatttttagtgtatttatctcgaaa

SEQ ID NO: 130700 - DNA, 25 bp, Probe sequence
tttttagtgtatttatctcgaaatc

SEQ ID NO: 130701 - DNA, 25 bp, Probe sequence
ttatataccctctttatatttttag

SEQ ID NO: 130702 - DNA, 25 bp, Probe sequence
ttatatttttagtgtatttatctcg

SEQ ID NO: 130703 - DNA, 25 bp, Probe sequence
ttaatgtaaatttttagtgcacgcc

SEQ ID NO: 130704 - DNA, 25 bp, Probe sequence
attgcgcttaataaaaacgactaca

SEQ ID NO: 130705 - DNA, 25 bp, Probe sequence
atagctgaatggatttaatgtcaag

SEQ ID NO: 130706 - DNA, 25 bp, Probe sequence
ataaatgcggcaatgtcgtcacatg

SEQ ID NO: 130707 - DNA, 25 bp, Probe sequence
acgtgttttcatctttatttcaaat

SEQ ID NO: 130708 - DNA, 25 bp, Probe sequence
acatgactgtcatgcaccttttact

SEQ ID NO: 130709 - DNA, 25 bp, Probe sequence
aaaacgactacataaatgcggcaat

SEQ ID NO: 130710 - DNA, 25 bp, Probe sequence
caatgtcgtcacatgactgtcatgc

SEQ ID NO: 130711 - DNA, 25 bp, Probe sequence
aatgcggcaatgtcgtcacatgact

SEQ ID NO: 130712 - DNA, 25 bp, Probe sequence
catgcaccttttacttcgtttaagt

SEQ ID NO: 130713 - DNA, 25 bp, Probe sequence
gcggcaatgtcgtcacatgactgtc

SEQ ID NO: 130714 - DNA, 25 bp, Probe sequence
gatacgtgttttcatctttatttca

SEQ ID NO: 130715 - DNA, 25 bp, Probe sequence
gtcgtcacatgactgtcatgcacct

SEQ ID NO: 130716 - DNA, 25 bp, Probe sequence
tcatctttatttcaaattgcgctta

SEQ ID NO: 130717 - DNA, 25 bp, Probe sequence
taatgtcaagatacgtgttttcatc

SEQ ID NO: 130718 - DNA, 25 bp, Probe sequence
ttttaatttatttcgatttcgagat

SEQ ID NO: 130719 - DNA, 25 bp, Probe sequence
atataaaattgcaaaacgactagtt

SEQ ID NO: 130720 - DNA, 25 bp, Probe sequence
atcgcttttttgttcgcatcaatat

SEQ ID NO: 130721 - DNA, 25 bp, Probe sequence
aaaatagaaaacgaggcgatgcata

SEQ ID NO: 130722 - DNA, 25 bp, Probe sequence
aacgactagttattttgcatttcaa

SEQ ID NO: 130723 - DNA, 25 bp, Probe sequence
aattttgcgatggtgcaactgtacc

SEQ ID NO: 130724 - DNA, 25 bp, Probe sequence
aattcattttcttttctggtatact

SEQ ID NO: 130725 - DNA, 25 bp, Probe sequence
caactgtaccatcgcttttttgttc

SEQ ID NO: 130726 - DNA, 25 bp, Probe sequence
catttcaaactttatgctatcaatt

SEQ ID NO: 130727 - DNA, 25 bp, Probe sequence
gctatcaattcattttcttttctgg

SEQ ID NO: 130728 - DNA, 25 bp, Probe sequence
gcttttttgttcgcatcaatataaa

SEQ ID NO: 130729 - DNA, 25 bp, Probe sequence
tggtgcaactgtaccatcgcttttt

SEQ ID NO: 130730 - DNA, 25 bp, Probe sequence
tgcaactgtaccatcgcttttttgt

SEQ ID NO: 130731 - DNA, 25 bp, Probe sequence
tcattttcttttctggtatactttt

SEQ ID NO: 130732 - DNA, 25 bp, Probe sequence
taccatcgcttttttgttcgcatca

SEQ ID NO: 130733 - DNA, 25 bp, Probe sequence
tatactttttatactaacttataga

SEQ ID NO: 130734 - DNA, 25 bp, Probe sequence
attcatttatgtaatcgcaggcttt

SEQ ID NO: 130735 - DNA, 25 bp, Probe sequence
atcgcaggctttttttattgctaac

SEQ ID NO: 130736 - DNA, 25 bp, Probe sequence
atgtaatcgcaggctttttttattg

SEQ ID NO: 130737 - DNA, 25 bp, Probe sequence
aaaacctgcgattcatttatgtaat

SEQ ID NO: 130738 - DNA, 25 bp, Probe sequence
aattttatatatttagacatactgt

SEQ ID NO: 130739 - DNA, 25 bp, Probe sequence
caattttttcacgcaaaaacctgcg

SEQ ID NO: 130740 - DNA, 25 bp, Probe sequence
gcaggctttttttattgctaacttt

SEQ ID NO: 130741 - DNA, 25 bp, Probe sequence
gcaaaaacctgcgattcatttatgt

SEQ ID NO: 130742 - DNA, 25 bp, Probe sequence
gtaatcgcaggctttttttattgct

SEQ ID NO: 130743 - DNA, 25 bp, Probe sequence
tcatttatgtaatcgcaggcttttt

SEQ ID NO: 130744 - DNA, 25 bp, Probe sequence
tcatccatactttattaatacaatt

SEQ ID NO: 130745 - DNA, 25 bp, Probe sequence
tatatttagacatactgtattctat

SEQ ID NO: 130746 - DNA, 25 bp, Probe sequence
tattaatacaattttttcacgcaaa

SEQ ID NO: 130747 - DNA, 25 bp, Probe sequence
tttttcacgcaaaaacctgcgattc

SEQ ID NO: 130748 - DNA, 25 bp, Probe sequence
ttatgtaatcgcaggctttttttat

SEQ ID NO: 130749 - DNA, 25 bp, Probe sequence
attcgctataacttgtgcacatgtt

SEQ ID NO: 130750 - DNA, 25 bp, Probe sequence
agtaatccgtttgcaattcgctata

SEQ ID NO: 130751 - DNA, 25 bp, Probe sequence
acaattaaattgtggcgtgatttta

SEQ ID NO: 130752 - DNA, 25 bp, Probe sequence
aaagtaatccgtttgcaattcgcta

SEQ ID NO: 130753 - DNA, 25 bp, Probe sequence
aagactaaagtaatccgtttgcaat

SEQ ID NO: 130754 - DNA, 25 bp, Probe sequence
aatccgtttgcaattcgctataact

SEQ ID NO: 130755 - DNA, 25 bp, Probe sequence
cacatgttataagttttctgcaata

SEQ ID NO: 130756 - DNA, 25 bp, Probe sequence
gcaataaaacacacttttgaatttt

SEQ ID NO: 130757 - DNA, 25 bp, Probe sequence
gcaattcgctataacttgtgcacat

SEQ ID NO: 130758 - DNA, 25 bp, Probe sequence
gtttgcaattcgctataacttgtgc

SEQ ID NO: 130759 - DNA, 25 bp, Probe sequence
gtaatccgtttgcaattcgctataa

SEQ ID NO: 130760 - DNA, 25 bp, Probe sequence
gtgatatttttcacaattaaattgt

SEQ ID NO: 130761 - DNA, 25 bp, Probe sequence
tccgtttgcaattcgctataacttg

SEQ ID NO: 130762 - DNA, 25 bp, Probe sequence
ttttctgcaataaaacacacttttg

SEQ ID NO: 130763 - DNA, 25 bp, Probe sequence
ttgtgcacatgttataagttttctg

SEQ ID NO: 130764 - DNA, 25 bp, Probe sequence
agccgcttcattgatgatgtgctac

SEQ ID NO: 130765 - DNA, 25 bp, Probe sequence
aaaagcaaaggcgcaccatgtgcct

SEQ ID NO: 130766 - DNA, 25 bp, Probe sequence
aatcggtttgattaaaatctgcttt

SEQ ID NO: 130767 - DNA, 25 bp, Probe sequence
aatctgctttattttatcatctatt

SEQ ID NO: 130768 - DNA, 25 bp, Probe sequence
ctattcaactgattgtagtgcgctt

SEQ ID NO: 130769 - DNA, 25 bp, Probe sequence
gcgcttattttactatggcattatt

SEQ ID NO: 130770 - DNA, 25 bp, Probe sequence
gctttattttatcatctattcaact

SEQ ID NO: 130771 - DNA, 25 bp, Probe sequence
gcaccatgtgcctttgctttttatt

SEQ ID NO: 130772 - DNA, 25 bp, Probe sequence
gtatcatgatagccgcttcattgat

SEQ ID NO: 130773 - DNA, 25 bp, Probe sequence
gtagtgcgcttattttactatggca

SEQ ID NO: 130774 - DNA, 25 bp, Probe sequence
tggcattattgcctaacctgtttga

SEQ ID NO: 130775 - DNA, 25 bp, Probe sequence
tgtgcctttgctttttattttgttt

SEQ ID NO: 130776 - DNA, 25 bp, Probe sequence
tgtttatctgtatcaaaatcggttt

SEQ ID NO: 130777 - DNA, 25 bp, Probe sequence
tgatgattcgtattcaaagttttca

SEQ ID NO: 130778 - DNA, 25 bp, Probe sequence
tattgcctaacctgtttgagatata

SEQ ID NO: 130779 - DNA, 25 bp, Probe sequence
atatcggtgtaataaatccctttat

SEQ ID NO: 130780 - DNA, 25 bp, Probe sequence
accacaatgaaactatattcacatt

SEQ ID NO: 130781 - DNA, 25 bp, Probe sequence
acactggatatagcattcggaggcg

SEQ ID NO: 130782 - DNA, 25 bp, Probe sequence
aaatccctttatacataggagttgt

SEQ ID NO: 130783 - DNA, 25 bp, Probe sequence
aacacattacactggatatagcatt

SEQ ID NO: 130784 - DNA, 25 bp, Probe sequence
aacgatatatttatcatttggacaa

SEQ ID NO: 130785 - DNA, 25 bp, Probe sequence
cattacactggatatagcattcgga

SEQ ID NO: 130786 - DNA, 25 bp, Probe sequence
ctggatatagcattcggaggcgaac

SEQ ID NO: 130787 - DNA, 25 bp, Probe sequence
gatatagcattcggaggcgaacata

SEQ ID NO: 130788 - DNA, 25 bp, Probe sequence
gtgatatactaatttataacatcta

SEQ ID NO: 130789 - DNA, 25 bp, Probe sequence
ggaggcgaacataaatttcagaata

SEQ ID NO: 130790 - DNA, 25 bp, Probe sequence
ttcggaggcgaacataaatttcaga

SEQ ID NO: 130791 - DNA, 25 bp, Probe sequence
tgcaaaacacattacactggatata

SEQ ID NO: 130792 - DNA, 25 bp, Probe sequence
tgctttcatatatgcaaaacacatt

SEQ ID NO: 130793 - DNA, 25 bp, Probe sequence
tattcacattttgaaattgctttca

SEQ ID NO: 130794 - DNA, 25 bp, Probe sequence
attgtcgctcctttttattatgtat

SEQ ID NO: 130795 - DNA, 25 bp, Probe sequence
atctccaccaatgacacgtcgtcat

SEQ ID NO: 130796 - DNA, 25 bp, Probe sequence
atgacacgtcgtcattggtgcctca

SEQ ID NO: 130797 - DNA, 25 bp, Probe sequence
atgtatttttacaatctccaccaat

SEQ ID NO: 130798 - DNA, 25 bp, Probe sequence
agactgttttccactcaatatattc

SEQ ID NO: 130799 - DNA, 25 bp, Probe sequence
acaaaaaaacagtctcgcaatcaag

SEQ ID NO: 130800 - DNA, 25 bp, Probe sequence
aagagcggcatccattgtcgctcct

SEQ ID NO: 130801 - DNA, 25 bp, Probe sequence
caatcaagactgttttccactcaat

SEQ ID NO: 130802 - DNA, 25 bp, Probe sequence
caatatattcatccattagcgtaat

SEQ ID NO: 130803 - DNA, 25 bp, Probe sequence
ctcgcaatcaagactgttttccact

SEQ ID NO: 130804 - DNA, 25 bp, Probe sequence
gttttccactcaatatattcatcca

SEQ ID NO: 130805 - DNA, 25 bp, Probe sequence
gtcgctcctttttattatgtatttt

SEQ ID NO: 130806 - DNA, 25 bp, Probe sequence
gtgcctcacaccaaacaaaaaaaca

SEQ ID NO: 130807 - DNA, 25 bp, Probe sequence
tcgtcattggtgcctcacaccaaac

SEQ ID NO: 130808 - DNA, 25 bp, Probe sequence
ttacaatctccaccaatgacacgtc

SEQ ID NO: 130809 - DNA, 25 bp, Probe sequence
attgtcacgttagatttcattacac

SEQ ID NO: 130810 - DNA, 25 bp, Probe sequence
atttcattacacatatttgcattca

SEQ ID NO: 130811 - DNA, 25 bp, Probe sequence
atttgcacatatattgtcacgttag

SEQ ID NO: 130812 - DNA, 25 bp, Probe sequence
atattgtcacgttagatttcattac

SEQ ID NO: 130813 - DNA, 25 bp, Probe sequence
atatattgtcacgttagatttcatt

SEQ ID NO: 130814 - DNA, 25 bp, Probe sequence
acgttagatttcattacacatattt

SEQ ID NO: 130815 - DNA, 25 bp, Probe sequence
aaatttgcacatatattgtcacgtt

SEQ ID NO: 130816 - DNA, 25 bp, Probe sequence
cacatatattgtcacgttagatttc

SEQ ID NO: 130817 - DNA, 25 bp, Probe sequence
gatttcattacacatatttgcattc

SEQ ID NO: 130818 - DNA, 25 bp, Probe sequence
gttagatttcattacacatatttgc

SEQ ID NO: 130819 - DNA, 25 bp, Probe sequence
gtcacgttagatttcattacacata

SEQ ID NO: 130820 - DNA, 25 bp, Probe sequence
tagatttcattacacatatttgcat

SEQ ID NO: 130821 - DNA, 25 bp, Probe sequence
tttgcattcaaataacgaaacgttt

SEQ ID NO: 130822 - DNA, 25 bp, Probe sequence
ttcattacacatatttgcattcaaa

SEQ ID NO: 130823 - DNA, 25 bp, Probe sequence
ttgcacatatattgtcacgttagat

SEQ ID NO: 130824 - DNA, 25 bp, Probe sequence
acctcttagggacaatttacatcgt

SEQ ID NO: 130825 - DNA, 25 bp, Probe sequence
acaagacaaccatgttaattcactt

SEQ ID NO: 130826 - DNA, 25 bp, Probe sequence
aagacaaccatgttaattcacttaa

SEQ ID NO: 130827 - DNA, 25 bp, Probe sequence
aatactatccccatagctttgattt

SEQ ID NO: 130828 - DNA, 25 bp, Probe sequence
aattcacttaacataacatgctaac

SEQ ID NO: 130829 - DNA, 25 bp, Probe sequence
caaatactatccccatagctttgat

SEQ ID NO: 130830 - DNA, 25 bp, Probe sequence
cacataatataaacaagacaaccat

SEQ ID NO: 130831 - DNA, 25 bp, Probe sequence
cacttaacataacatgctaacatat

SEQ ID NO: 130832 - DNA, 25 bp, Probe sequence
catataaaactataaacctcttagg

SEQ ID NO: 130833 - DNA, 25 bp, Probe sequence
tcccttttttcatttcaaatactat

SEQ ID NO: 130834 - DNA, 25 bp, Probe sequence
tcatttcaaatactatccccatagc

SEQ ID NO: 130835 - DNA, 25 bp, Probe sequence
tactatccccatagctttgatttaa

SEQ ID NO: 130836 - DNA, 25 bp, Probe sequence
tagggacaatttacatcgtcccttt

SEQ ID NO: 130837 - DNA, 25 bp, Probe sequence
tttcatttcaaatactatccccata

SEQ ID NO: 130838 - DNA, 25 bp, Probe sequence
ttcaaatactatccccatagctttg

SEQ ID NO: 130839 - DNA, 25 bp, Probe sequence
atatacgggggcgcttttgcaatca

SEQ ID NO: 130840 - DNA, 25 bp, Probe sequence
atcatcactccttttaagttatttt

SEQ ID NO: 130841 - DNA, 25 bp, Probe sequence
agatatacgggggcgcttttgcaat

SEQ ID NO: 130842 - DNA, 25 bp, Probe sequence
catcactccttttaagttattttag

SEQ ID NO: 130843 - DNA, 25 bp, Probe sequence
gcgcttttgcaatcactattttgat

SEQ ID NO: 130844 - DNA, 25 bp, Probe sequence
gcttttgcaatcactattttgatta

SEQ ID NO: 130845 - DNA, 25 bp, Probe sequence
gcaatcactattttgattagcatgt

SEQ ID NO: 130846 - DNA, 25 bp, Probe sequence
gatatacgggggcgcttttgcaatc

SEQ ID NO: 130847 - DNA, 25 bp, Probe sequence
gttattttagatatacgggggcgct

SEQ ID NO: 130848 - DNA, 25 bp, Probe sequence
ggcgcttttgcaatcactattttga

SEQ ID NO: 130849 - DNA, 25 bp, Probe sequence
tcactccttttaagttattttagat

SEQ ID NO: 130850 - DNA, 25 bp, Probe sequence
tagatatacgggggcgcttttgcaa

SEQ ID NO: 130851 - DNA, 25 bp, Probe sequence
tatacgggggcgcttttgcaatcac

SEQ ID NO: 130852 - DNA, 25 bp, Probe sequence
tattttagatatacgggggcgcttt

SEQ ID NO: 130853 - DNA, 25 bp, Probe sequence
ttagatatacgggggcgcttttgca

SEQ ID NO: 130854 - DNA, 25 bp, Probe sequence
acctctctctatgtttattttattt

SEQ ID NO: 130855 - DNA, 25 bp, Probe sequence
actttttactctatatttcaaacag

SEQ ID NO: 130856 - DNA, 25 bp, Probe sequence
aaaactacttatgttgtcattaata

SEQ ID NO: 130857 - DNA, 25 bp, Probe sequence
aacagttgtgtgacagttttttgat

SEQ ID NO: 130858 - DNA, 25 bp, Probe sequence
caatggctggttatactgaagatga

SEQ ID NO: 130859 - DNA, 25 bp, Probe sequence
cagaccataaacatcgtacaccctt

SEQ ID NO: 130860 - DNA, 25 bp, Probe sequence
gagctatttattttttgtttttgtg

SEQ ID NO: 130861 - DNA, 25 bp, Probe sequence
gtctataggttgaatctttactttt

SEQ ID NO: 130862 - DNA, 25 bp, Probe sequence
tcaacttttatctgttatcaaatca

SEQ ID NO: 130863 - DNA, 25 bp, Probe sequence
taaaaccgcacactatattcaaaaa

SEQ ID NO: 130864 - DNA, 25 bp, Probe sequence
tacactttatctttcgagctattta

SEQ ID NO: 130865 - DNA, 25 bp, Probe sequence
tacatcaacttaacaatggctggtt

SEQ ID NO: 130866 - DNA, 25 bp, Probe sequence
tttgataacttttttacatctgaaa

SEQ ID NO: 130867 - DNA, 25 bp, Probe sequence
tttttgtttttgtgctgtgtttata

SEQ ID NO: 130868 - DNA, 25 bp, Probe sequence
ttcccaaaaacctctctctatgttt

SEQ ID NO: 130869 - DNA, 25 bp, Probe sequence
caacattcatttcccatatcgattc

SEQ ID NO: 130870 - DNA, 25 bp, Probe sequence
catttcccatatcgattcatttatc

SEQ ID NO: 130871 - DNA, 25 bp, Probe sequence
cattcatttcccatatcgattcatt

SEQ ID NO: 130872 - DNA, 25 bp, Probe sequence
gatttttttattttctcatttcact

SEQ ID NO: 130873 - DNA, 25 bp, Probe sequence
gtttcaacattcatttcccatatcg

SEQ ID NO: 130874 - DNA, 25 bp, Probe sequence
gtgtttcaacattcatttcccatat

SEQ ID NO: 130875 - DNA, 25 bp, Probe sequence
tctagaccactacatcttagatgat

SEQ ID NO: 130876 - DNA, 25 bp, Probe sequence
tctatcatctagaccactacatctt

SEQ ID NO: 130877 - DNA, 25 bp, Probe sequence
tatcatctagaccactacatcttag

SEQ ID NO: 130878 - DNA, 25 bp, Probe sequence
tatcgattcatttatctatcatcta

SEQ ID NO: 130879 - DNA, 25 bp, Probe sequence
tttatcctctgtgtttcaacattca

SEQ ID NO: 130880 - DNA, 25 bp, Probe sequence
tttttattttctcatttcactcttt

SEQ ID NO: 130881 - DNA, 25 bp, Probe sequence
ttttctcatttcactctttcttaaa

SEQ ID NO: 130882 - DNA, 25 bp, Probe sequence
ttcactctttcttaaaagtcgatat

SEQ ID NO: 130883 - DNA, 25 bp, Probe sequence
ttctcatttcactctttcttaaaag

SEQ ID NO: 130884 - DNA, 25 bp, Probe sequence
agctaccttgtatgtgatatcagag

SEQ ID NO: 130885 - DNA, 25 bp, Probe sequence
accttgtatgtgatatcagagtttt

SEQ ID NO: 130886 - DNA, 25 bp, Probe sequence
acgtagctaccttgtatgtgatatc

SEQ ID NO: 130887 - DNA, 25 bp, Probe sequence
actctgataatcactttagcaagta

SEQ ID NO: 130888 - DNA, 25 bp, Probe sequence
aacaacgtagctaccttgtatgtga

SEQ ID NO: 130889 - DNA, 25 bp, Probe sequence
caacgtagctaccttgtatgtgata

SEQ ID NO: 130890 - DNA, 25 bp, Probe sequence
gctaccttgtatgtgatatcagagt

SEQ ID NO: 130891 - DNA, 25 bp, Probe sequence
gaaaactctgataatcactttagca

SEQ ID NO: 130892 - DNA, 25 bp, Probe sequence
gataatcactttagcaagtaactat

SEQ ID NO: 130893 - DNA, 25 bp, Probe sequence
gtatgtgatatcagagttttttatt

SEQ ID NO: 130894 - DNA, 25 bp, Probe sequence
gtagctaccttgtatgtgatatcag

SEQ ID NO: 130895 - DNA, 25 bp, Probe sequence
tagcaagtaactatttttaacaacg

SEQ ID NO: 130896 - DNA, 25 bp, Probe sequence
tatttttaacaacgtagctaccttg

SEQ ID NO: 130897 - DNA, 25 bp, Probe sequence
ttttaacaacgtagctaccttgtat

SEQ ID NO: 130898 - DNA, 25 bp, Probe sequence
ttaacaacgtagctaccttgtatgt

SEQ ID NO: 130899 - DNA, 25 bp, Probe sequence
agttctactgtaccatgctgattct

SEQ ID NO: 130900 - DNA, 25 bp, Probe sequence
actcctctttgatgatttctactat

SEQ ID NO: 130901 - DNA, 25 bp, Probe sequence
actatagttctactgtaccatgctg

SEQ ID NO: 130902 - DNA, 25 bp, Probe sequence
catgctgattcttattactaccaat

SEQ ID NO: 130903 - DNA, 25 bp, Probe sequence
gctgattcttattactaccaatatt

SEQ ID NO: 130904 - DNA, 25 bp, Probe sequence
gatgtctacataatcttagcaatgc

SEQ ID NO: 130905 - DNA, 25 bp, Probe sequence
gatgatttctactatagttctactg

SEQ ID NO: 130906 - DNA, 25 bp, Probe sequence
gtcactcctctttgatgatttctac

SEQ ID NO: 130907 - DNA, 25 bp, Probe sequence
gtctacataatcttagcaatgctaa

SEQ ID NO: 130908 - DNA, 25 bp, Probe sequence
gggaaataagttatgatgtctacat

SEQ ID NO: 130909 - DNA, 25 bp, Probe sequence
tcgtcactcctctttgatgatttct

SEQ ID NO: 130910 - DNA, 25 bp, Probe sequence
tactgtaccatgctgattcttatta

SEQ ID NO: 130911 - DNA, 25 bp, Probe sequence
taccatgctgattcttattactacc

SEQ ID NO: 130912 - DNA, 25 bp, Probe sequence
tattactaccaatatttactgggaa

SEQ ID NO: 130913 - DNA, 25 bp, Probe sequence
ttctactgtaccatgctgattctta

SEQ ID NO: 130914 - DNA, 25 bp, Probe sequence
atcatgttaatttatttttattact

SEQ ID NO: 130915 - DNA, 25 bp, Probe sequence
atctccttatcttacaaatagattt

SEQ ID NO: 130916 - DNA, 25 bp, Probe sequence
atgacaaatctccttatcttacaaa

SEQ ID NO: 130917 - DNA, 25 bp, Probe sequence
acaaatctccttatcttacaaatag

SEQ ID NO: 130918 - DNA, 25 bp, Probe sequence
aaatctccttatcttacaaatagat

SEQ ID NO: 130919 - DNA, 25 bp, Probe sequence
aatgacaaatctccttatcttacaa

SEQ ID NO: 130920 - DNA, 25 bp, Probe sequence
aatctccttatcttacaaatagatt

SEQ ID NO: 130921 - DNA, 25 bp, Probe sequence
caaatctccttatcttacaaataga

SEQ ID NO: 130922 - DNA, 25 bp, Probe sequence
ctccttatcttacaaatagatttaa

SEQ ID NO: 130923 - DNA, 25 bp, Probe sequence
gacaaatctccttatcttacaaata

SEQ ID NO: 130924 - DNA, 25 bp, Probe sequence
gatttaaaatcatgttaatttattt

SEQ ID NO: 130925 - DNA, 25 bp, Probe sequence
tgacaaatctccttatcttacaaat

SEQ ID NO: 130926 - DNA, 25 bp, Probe sequence
tccttatcttacaaatagatttaaa

SEQ ID NO: 130927 - DNA, 25 bp, Probe sequence
tctccttatcttacaaatagattta

SEQ ID NO: 130928 - DNA, 25 bp, Probe sequence
tcatgttaatttatttttattactt

SEQ ID NO: 130929 - DNA, 25 bp, Probe sequence
atcatcaacacacctgctatacatc

SEQ ID NO: 130930 - DNA, 25 bp, Probe sequence
acctgctatacatcattgcgcacta

SEQ ID NO: 130931 - DNA, 25 bp, Probe sequence
actgccttttgtaacgtattctctt

SEQ ID NO: 130932 - DNA, 25 bp, Probe sequence
acataagcaatgttttctatatcta

SEQ ID NO: 130933 - DNA, 25 bp, Probe sequence
acacacctgctatacatcattgcgc

SEQ ID NO: 130934 - DNA, 25 bp, Probe sequence
aaaaaggcagtagcttcattttaag

SEQ ID NO: 130935 - DNA, 25 bp, Probe sequence
aacttattatcatcaacacacctgc

SEQ ID NO: 130936 - DNA, 25 bp, Probe sequence
aagctactgccttttgtaacgtatt

SEQ ID NO: 130937 - DNA, 25 bp, Probe sequence
cttcattttaagctactgccttttg

SEQ ID NO: 130938 - DNA, 25 bp, Probe sequence
gccttttgtaacgtattctctttca

SEQ ID NO: 130939 - DNA, 25 bp, Probe sequence
gctatacatcattgcgcactaaaaa

SEQ ID NO: 130940 - DNA, 25 bp, Probe sequence
gcaatgttttctatatctaacacta

SEQ ID NO: 130941 - DNA, 25 bp, Probe sequence
tgcgcactaaaaaggcagtagcttc

SEQ ID NO: 130942 - DNA, 25 bp, Probe sequence
tatctaacactaatatttaacttat

SEQ ID NO: 130943 - DNA, 25 bp, Probe sequence
ttttgtaacgtattctctttcaact

SEQ ID NO: 130944 - DNA, 25 bp, Probe sequence
attttatcatcaattcagtacgatc

SEQ ID NO: 130945 - DNA, 25 bp, Probe sequence
atcatcaattcagtacgatcatttg

SEQ ID NO: 130946 - DNA, 25 bp, Probe sequence
actttttcacaattttatcatcaat

SEQ ID NO: 130947 - DNA, 25 bp, Probe sequence
acaactttttcacaattttatcatc

SEQ ID NO: 130948 - DNA, 25 bp, Probe sequence
acaattttatcatcaattcagtacg

SEQ ID NO: 130949 - DNA, 25 bp, Probe sequence
aacaactttttcacaattttatcat

SEQ ID NO: 130950 - DNA, 25 bp, Probe sequence
aactttttcacaattttatcatcaa

SEQ ID NO: 130951 - DNA, 25 bp, Probe sequence
aattcatagctattatacatatttg

SEQ ID NO: 130952 - DNA, 25 bp, Probe sequence
catatttgtaaaagcgttttcaaca

SEQ ID NO: 130953 - DNA, 25 bp, Probe sequence
gcgttttcaacaactttttcacaat

SEQ ID NO: 130954 - DNA, 25 bp, Probe sequence
gtgatatgtaattcatagctattat

SEQ ID NO: 130955 - DNA, 25 bp, Probe sequence
tcaacaactttttcacaattttatc

SEQ ID NO: 130956 - DNA, 25 bp, Probe sequence
ttcaacaactttttcacaattttat

SEQ ID NO: 130957 - DNA, 25 bp, Probe sequence
ttcacaattttatcatcaattcagt

SEQ ID NO: 130958 - DNA, 25 bp, Probe sequence
ttcatagctattatacatatttgta

SEQ ID NO: 130959 - DNA, 25 bp, Probe sequence
agtgtctatcattttaaatatctaa

SEQ ID NO: 130960 - DNA, 25 bp, Probe sequence
cttagtgtctatcattttaaatatc

SEQ ID NO: 130961 - DNA, 25 bp, Probe sequence
ctttcttagtgtctatcattttaaa

SEQ ID NO: 130962 - DNA, 25 bp, Probe sequence
ctccctttcttagtgtctatcattt

SEQ ID NO: 130963 - DNA, 25 bp, Probe sequence
ccctttcttagtgtctatcatttta

SEQ ID NO: 130964 - DNA, 25 bp, Probe sequence
cctttcttagtgtctatcattttaa

SEQ ID NO: 130965 - DNA, 25 bp, Probe sequence
gtgtctatcattttaaatatctaaa

SEQ ID NO: 130966 - DNA, 25 bp, Probe sequence
tccctttcttagtgtctatcatttt

SEQ ID NO: 130967 - DNA, 25 bp, Probe sequence
tcttagtgtctatcattttaaatat

SEQ ID NO: 130968 - DNA, 25 bp, Probe sequence
tactaatagcctccctttcttagtg

SEQ ID NO: 130969 - DNA, 25 bp, Probe sequence
tagtgtctatcattttaaatatcta

SEQ ID NO: 130970 - DNA, 25 bp, Probe sequence
tttcttagtgtctatcattttaaat

SEQ ID NO: 130971 - DNA, 25 bp, Probe sequence
ttactaatagcctccctttcttagt

SEQ ID NO: 130972 - DNA, 25 bp, Probe sequence
ttagtgtctatcattttaaatatct

SEQ ID NO: 130973 - DNA, 25 bp, Probe sequence
ttcttagtgtctatcattttaaata

SEQ ID NO: 130974 - DNA, 25 bp, Probe sequence
acccacgtaatgatgcgccttaaat

SEQ ID NO: 130975 - DNA, 25 bp, Probe sequence
acactcatcatttcaatgacccacg

SEQ ID NO: 130976 - DNA, 25 bp, Probe sequence
aactattataaagatggcgtgcaca

SEQ ID NO: 130977 - DNA, 25 bp, Probe sequence
aatgacccacgtaatgatgcgcctt

SEQ ID NO: 130978 - DNA, 25 bp, Probe sequence
caatttcacttcattttcacaaaaa

SEQ ID NO: 130979 - DNA, 25 bp, Probe sequence
catccctttctaaatatgtctaaaa

SEQ ID NO: 130980 - DNA, 25 bp, Probe sequence
ctctctcaatttcacttcattttca

SEQ ID NO: 130981 - DNA, 25 bp, Probe sequence
gcgccatccctttctaaatatgtct

SEQ ID NO: 130982 - DNA, 25 bp, Probe sequence
gatggcgtgcacaatataaaaatac

SEQ ID NO: 130983 - DNA, 25 bp, Probe sequence
gatgcgccttaaataatgagtgctt

SEQ ID NO: 130984 - DNA, 25 bp, Probe sequence
gtattactattttctatggaaacgc

SEQ ID NO: 130985 - DNA, 25 bp, Probe sequence
tggaaacgctctctcaatttcactt

SEQ ID NO: 130986 - DNA, 25 bp, Probe sequence
tctcaatttcacttcattttcacaa

SEQ ID NO: 130987 - DNA, 25 bp, Probe sequence
ttttctatggaaacgctctctcaat

SEQ ID NO: 130988 - DNA, 25 bp, Probe sequence
ttcacaaaaaaacactcatcatttc

SEQ ID NO: 130989 - DNA, 25 bp, Probe sequence
atttcattatacacaacttcttaaa

SEQ ID NO: 130990 - DNA, 25 bp, Probe sequence
actatttcaacacgtttatttcatt

SEQ ID NO: 130991 - DNA, 25 bp, Probe sequence
acaacttcttaaacattcaataaat

SEQ ID NO: 130992 - DNA, 25 bp, Probe sequence
aacacgtttatttcattatacacaa

SEQ ID NO: 130993 - DNA, 25 bp, Probe sequence
caagtttgttattcgaggtgaggta

SEQ ID NO: 130994 - DNA, 25 bp, Probe sequence
gtattatattaatggctcaagtttg

SEQ ID NO: 130995 - DNA, 25 bp, Probe sequence
gtaaaatacacattcttttatggta

SEQ ID NO: 130996 - DNA, 25 bp, Probe sequence
ggctcaagtttgttattcgaggtga

SEQ ID NO: 130997 - DNA, 25 bp, Probe sequence
tcaacacgtttatttcattatacac

SEQ ID NO: 130998 - DNA, 25 bp, Probe sequence
taactatttcaacacgtttatttca

SEQ ID NO: 130999 - DNA, 25 bp, Probe sequence
tacacaacttcttaaacattcaata

SEQ ID NO: 131000 - DNA, 25 bp, Probe sequence
tacacattcttttatggtattatat

SEQ ID NO: 131001 - DNA, 25 bp, Probe sequence
tatacacaacttcttaaacattcaa

SEQ ID NO: 131002 - DNA, 25 bp, Probe sequence
tttatttcattatacacaacttctt

SEQ ID NO: 131003 - DNA, 25 bp, Probe sequence
ttaatggctcaagtttgttattcga

SEQ ID NO: 131004 - DNA, 25 bp, Probe sequence
atccatttttattacaattcaacac

SEQ ID NO: 131005 - DNA, 25 bp, Probe sequence
aatcattttatattttcccactaat

SEQ ID NO: 131006 - DNA, 25 bp, Probe sequence
ctgacatccttgtatcactatgaca

SEQ ID NO: 131007 - DNA, 25 bp, Probe sequence
gctgttaatcaattctgacatcctt

SEQ ID NO: 131008 - DNA, 25 bp, Probe sequence
gcagggcgctatttttaatgttatc

SEQ ID NO: 131009 - DNA, 25 bp, Probe sequence
gaatacatggagtcacatcatctca

SEQ ID NO: 131010 - DNA, 25 bp, Probe sequence
gacaacttcattacagttactttta

SEQ ID NO: 131011 - DNA, 25 bp, Probe sequence
gattgcttgcattgttttctaaaaa

SEQ ID NO: 131012 - DNA, 25 bp, Probe sequence
gttagcgctctgattgcagggcgct

SEQ ID NO: 131013 - DNA, 25 bp, Probe sequence
gttacttttattgttgattgcttgc

SEQ ID NO: 131014 - DNA, 25 bp, Probe sequence
gttatcgctacatttagtatattgt

SEQ ID NO: 131015 - DNA, 25 bp, Probe sequence
gtcacatcatctcatgttagcgctc

SEQ ID NO: 131016 - DNA, 25 bp, Probe sequence
gtgattgctattttctttcagttat

SEQ ID NO: 131017 - DNA, 25 bp, Probe sequence
tcagttatagaaccacgtacctttt

SEQ ID NO: 131018 - DNA, 25 bp, Probe sequence
ttcccactaatatccgctgttaatc

SEQ ID NO: 131019 - DNA, 25 bp, Probe sequence
attttttgttcatattaatttatct

SEQ ID NO: 131020 - DNA, 25 bp, Probe sequence
atctaagcgctacgatggactgact

SEQ ID NO: 131021 - DNA, 25 bp, Probe sequence
atcacgaacgcttcaatttcctgta

SEQ ID NO: 131022 - DNA, 25 bp, Probe sequence
agcgctacgatggactgacttaaac

SEQ ID NO: 131023 - DNA, 25 bp, Probe sequence
acgaacgcttcaatttcctgtatgc

SEQ ID NO: 131024 - DNA, 25 bp, Probe sequence
aaaaacttctatcacgaacgcttca

SEQ ID NO: 131025 - DNA, 25 bp, Probe sequence
aacttctatcacgaacgcttcaatt

SEQ ID NO: 131026 - DNA, 25 bp, Probe sequence
aatttatctaagcgctacgatggac

SEQ ID NO: 131027 - DNA, 25 bp, Probe sequence
caatttcctgtatgcgtgtgataga

SEQ ID NO: 131028 - DNA, 25 bp, Probe sequence
ctttaaaatcgctattcgccattta

SEQ ID NO: 131029 - DNA, 25 bp, Probe sequence
gctacgatggactgacttaaacttt

SEQ ID NO: 131030 - DNA, 25 bp, Probe sequence
gcttcaatttcctgtatgcgtgtga

SEQ ID NO: 131031 - DNA, 25 bp, Probe sequence
gatggactgacttaaacttttcttt

SEQ ID NO: 131032 - DNA, 25 bp, Probe sequence
gtatgcgtgtgatagaagtttttat

SEQ ID NO: 131033 - DNA, 25 bp, Probe sequence
ttttctttaaaatcgctattcgcca

SEQ ID NO: 131034 - DNA, 25 bp, Probe sequence
attctgatatgatacaagtgttgct

SEQ ID NO: 131035 - DNA, 25 bp, Probe sequence
atttcaatcactactatttttacca

SEQ ID NO: 131036 - DNA, 25 bp, Probe sequence
acatactccttttacttcacataat

SEQ ID NO: 131037 - DNA, 25 bp, Probe sequence
acaagtgttgcttttataaatttga

SEQ ID NO: 131038 - DNA, 25 bp, Probe sequence
aacgcttacaagaaacgtcaaatca

SEQ ID NO: 131039 - DNA, 25 bp, Probe sequence
aatttagtgtatttctttgtataag

SEQ ID NO: 131040 - DNA, 25 bp, Probe sequence
caatcactactatttttaccataaa

SEQ ID NO: 131041 - DNA, 25 bp, Probe sequence
gatatgatacaagtgttgcttttat

SEQ ID NO: 131042 - DNA, 25 bp, Probe sequence
gttattcgtcttaaaattcaattga

SEQ ID NO: 131043 - DNA, 25 bp, Probe sequence
gtataagataagcatattctgatat

SEQ ID NO: 131044 - DNA, 25 bp, Probe sequence
tacaagaaacgtcaaatcattttta

SEQ ID NO: 131045 - DNA, 25 bp, Probe sequence
tacttcacataattttttaacattt

SEQ ID NO: 131046 - DNA, 25 bp, Probe sequence
tactccttttacttcacataatttt

SEQ ID NO: 131047 - DNA, 25 bp, Probe sequence
taccataaaataacgttattcgtct

SEQ ID NO: 131048 - DNA, 25 bp, Probe sequence
ttaacatttcaatcactactatttt

SEQ ID NO: 131049 - DNA, 25 bp, Probe sequence
atttataacacttcgtattgaatga

SEQ ID NO: 131050 - DNA, 25 bp, Probe sequence
agcagtaagacagcttctcattgaa

SEQ ID NO: 131051 - DNA, 25 bp, Probe sequence
aacacttcgtattgaatgaattcat

SEQ ID NO: 131052 - DNA, 25 bp, Probe sequence
aacagcagtaagacagcttctcatt

SEQ ID NO: 131053 - DNA, 25 bp, Probe sequence
cagcttctcattgaaatcgtcttac

SEQ ID NO: 131054 - DNA, 25 bp, Probe sequence
gcctatttgacacattattgaaatt

SEQ ID NO: 131055 - DNA, 25 bp, Probe sequence
gcttctcattgaaatcgtcttactg

SEQ ID NO: 131056 - DNA, 25 bp, Probe sequence
gaattcattatgcctatttgacaca

SEQ ID NO: 131057 - DNA, 25 bp, Probe sequence
gaatgaattcattatgcctatttga

SEQ ID NO: 131058 - DNA, 25 bp, Probe sequence
gacagcttctcattgaaatcgtctt

SEQ ID NO: 131059 - DNA, 25 bp, Probe sequence
gtaagacagcttctcattgaaatcg

SEQ ID NO: 131060 - DNA, 25 bp, Probe sequence
tctcattgaaatcgtcttactgctg

SEQ ID NO: 131061 - DNA, 25 bp, Probe sequence
tcattatgcctatttgacacattat

SEQ ID NO: 131062 - DNA, 25 bp, Probe sequence
taaatataacctaaaaacagcagta

SEQ ID NO: 131063 - DNA, 25 bp, Probe sequence
tatgcctatttgacacattattgaa

SEQ ID NO: 131064 - DNA, 25 bp, Probe sequence
agctatccctttgctgcaatataca

SEQ ID NO: 131065 - DNA, 25 bp, Probe sequence
aaatattcatgttcacattttttaa

SEQ ID NO: 131066 - DNA, 25 bp, Probe sequence
aaataagtcgtcaattacgtatata

SEQ ID NO: 131067 - DNA, 25 bp, Probe sequence
aaacacgtaataccagctatccctt

SEQ ID NO: 131068 - DNA, 25 bp, Probe sequence
aacttactacacgtgctaacctatt

SEQ ID NO: 131069 - DNA, 25 bp, Probe sequence
aatgcaatggatccttaatatttta

SEQ ID NO: 131070 - DNA, 25 bp, Probe sequence
cacgtgctaacctattactttgtaa

SEQ ID NO: 131071 - DNA, 25 bp, Probe sequence
ccctttgctgcaatatacagttaca

SEQ ID NO: 131072 - DNA, 25 bp, Probe sequence
cctttttctaatcatacgccttaat

SEQ ID NO: 131073 - DNA, 25 bp, Probe sequence
gcataacgcttcaaaagtaatttct

SEQ ID NO: 131074 - DNA, 25 bp, Probe sequence
gttacataacttactacacgtgcta

SEQ ID NO: 131075 - DNA, 25 bp, Probe sequence
gtatatagtttgcataacgcttcaa

SEQ ID NO: 131076 - DNA, 25 bp, Probe sequence
taataccagctatccctttgctgca

SEQ ID NO: 131077 - DNA, 25 bp, Probe sequence
taatcatacgccttaattgttaaat

SEQ ID NO: 131078 - DNA, 25 bp, Probe sequence
tattctgttttatcacctattatta

SEQ ID NO: 131079 - DNA, 25 bp, Probe sequence
atatcgcgcatcaaaaatgagcatc

SEQ ID NO: 131080 - DNA, 25 bp, Probe sequence
atcgcgcatcaaaaatgagcatcag

SEQ ID NO: 131081 - DNA, 25 bp, Probe sequence
actttaacatatcgcgcatcaaaaa

SEQ ID NO: 131082 - DNA, 25 bp, Probe sequence
acactttaacatatcgcgcatcaaa

SEQ ID NO: 131083 - DNA, 25 bp, Probe sequence
aaaaatgagcatcaggtcgcccttg

SEQ ID NO: 131084 - DNA, 25 bp, Probe sequence
aacatatcgcgcatcaaaaatgagc

SEQ ID NO: 131085 - DNA, 25 bp, Probe sequence
caaaaatgagcatcaggtcgccctt

SEQ ID NO: 131086 - DNA, 25 bp, Probe sequence
cactttaacatatcgcgcatcaaaa

SEQ ID NO: 131087 - DNA, 25 bp, Probe sequence
ctttaacatatcgcgcatcaaaaat

SEQ ID NO: 131088 - DNA, 25 bp, Probe sequence
gcgcatcaaaaatgagcatcaggtc

SEQ ID NO: 131089 - DNA, 25 bp, Probe sequence
gcatcaaaaatgagcatcaggtcgc

SEQ ID NO: 131090 - DNA, 25 bp, Probe sequence
gacactttaacatatcgcgcatcaa

SEQ ID NO: 131091 - DNA, 25 bp, Probe sequence
tcgcgcatcaaaaatgagcatcagg

SEQ ID NO: 131092 - DNA, 25 bp, Probe sequence
tcaaaaatgagcatcaggtcgccct

SEQ ID NO: 131093 - DNA, 25 bp, Probe sequence
ttaacatatcgcgcatcaaaaatga

SEQ ID NO: 131094 - DNA, 25 bp, Probe sequence
ctatccccgacctcttaaagaatca

SEQ ID NO: 131095 - DNA, 25 bp, Probe sequence
atccccgacctcttaaagaatcaat

SEQ ID NO: 131096 - DNA, 25 bp, Probe sequence
atattaaactacacacaaaggagaa

SEQ ID NO: 131097 - DNA, 25 bp, Probe sequence
agtatattgcctccttttaaaatca

SEQ ID NO: 131098 - DNA, 25 bp, Probe sequence
aattttgtatattaaactacacaca

SEQ ID NO: 131099 - DNA, 25 bp, Probe sequence
cagtgtagattattgttcgattata

SEQ ID NO: 131100 - DNA, 25 bp, Probe sequence
cgattatagtatctatccccgacct

SEQ ID NO: 131101 - DNA, 25 bp, Probe sequence
ccccgacctcttaaagaatcaattg

SEQ ID NO: 131102 - DNA, 25 bp, Probe sequence
gacctcttaaagaatcaattggaaa

SEQ ID NO: 131103 - DNA, 25 bp, Probe sequence
gttcgattatagtatctatccccga

SEQ ID NO: 131104 - DNA, 25 bp, Probe sequence
tgcctccttttaaaatcaacgttat

SEQ ID NO: 131105 - DNA, 25 bp, Probe sequence
tcgattatagtatctatccccgacc

SEQ ID NO: 131106 - DNA, 25 bp, Probe sequence
tatacagtgtagattattgttcgat

SEQ ID NO: 131107 - DNA, 25 bp, Probe sequence
tatattgcctccttttaaaatcaac

SEQ ID NO: 131108 - DNA, 25 bp, Probe sequence
tattgcctccttttaaaatcaacgt

SEQ ID NO: 131109 - DNA, 25 bp, Probe sequence
atgaattcgtgtactactatcgttt

SEQ ID NO: 131110 - DNA, 25 bp, Probe sequence
actcatgagcgttaccaacattcat

SEQ ID NO: 131111 - DNA, 25 bp, Probe sequence
aactcatgagcgttaccaacattca

SEQ ID NO: 131112 - DNA, 25 bp, Probe sequence
gcgttaccaacattcataataaaaa

SEQ ID NO: 131113 - DNA, 25 bp, Probe sequence
gaattcgtgtactactatcgttttt

SEQ ID NO: 131114 - DNA, 25 bp, Probe sequence
gaaactcatgagcgttaccaacatt

SEQ ID NO: 131115 - DNA, 25 bp, Probe sequence
gagcgttaccaacattcataataaa

SEQ ID NO: 131116 - DNA, 25 bp, Probe sequence
gagaaactcatgagcgttaccaaca

SEQ ID NO: 131117 - DNA, 25 bp, Probe sequence
gatgagaaactcatgagcgttacca

SEQ ID NO: 131118 - DNA, 25 bp, Probe sequence
gatagtgtacacgttaatgaattcg

SEQ ID NO: 131119 - DNA, 25 bp, Probe sequence
gttaatgaattcgtgtactactatc

SEQ ID NO: 131120 - DNA, 25 bp, Probe sequence
tgagcgttaccaacattcataataa

SEQ ID NO: 131121 - DNA, 25 bp, Probe sequence
tcgtgtactactatcgttttttatt

SEQ ID NO: 131122 - DNA, 25 bp, Probe sequence
tcatgagcgttaccaacattcataa

SEQ ID NO: 131123 - DNA, 25 bp, Probe sequence
ttcgtgtactactatcgttttttat

SEQ ID NO: 131124 - DNA, 25 bp, Probe sequence
attcttatacctataatccttttct

SEQ ID NO: 131125 - DNA, 25 bp, Probe sequence
atggatggcccttgttcattatgaa

SEQ ID NO: 131126 - DNA, 25 bp, Probe sequence
agccaaccgcaatggatggcccttg

SEQ ID NO: 131127 - DNA, 25 bp, Probe sequence
agagccaaccgcaatggatggccct

SEQ ID NO: 131128 - DNA, 25 bp, Probe sequence
aaatatggttgctattacttaattt

SEQ ID NO: 131129 - DNA, 25 bp, Probe sequence
caatggatggcccttgttcattatg

SEQ ID NO: 131130 - DNA, 25 bp, Probe sequence
cgcaatggatggcccttgttcatta

SEQ ID NO: 131131 - DNA, 25 bp, Probe sequence
gccaaccgcaatggatggcccttgt

SEQ ID NO: 131132 - DNA, 25 bp, Probe sequence
gcaatggatggcccttgttcattat

SEQ ID NO: 131133 - DNA, 25 bp, Probe sequence
gagccaaccgcaatggatggccctt

SEQ ID NO: 131134 - DNA, 25 bp, Probe sequence
gatggcccttgttcattatgaagca

SEQ ID NO: 131135 - DNA, 25 bp, Probe sequence
ggatggcccttgttcattatgaagc

SEQ ID NO: 131136 - DNA, 25 bp, Probe sequence
tcttatacctataatccttttctaa

SEQ ID NO: 131137 - DNA, 25 bp, Probe sequence
tataaataaaaagagccaaccgcaa

SEQ ID NO: 131138 - DNA, 25 bp, Probe sequence
tatggttgctattacttaattttta

SEQ ID NO: 131139 - DNA, 25 bp, Probe sequence
atgaaatcatgaccttatcaccctt

SEQ ID NO: 131140 - DNA, 25 bp, Probe sequence
accttatcacccttatctatacaat

SEQ ID NO: 131141 - DNA, 25 bp, Probe sequence
acattcgcctatgcaactaatacgc

SEQ ID NO: 131142 - DNA, 25 bp, Probe sequence
aatcatgaccttatcacccttatct

SEQ ID NO: 131143 - DNA, 25 bp, Probe sequence
aattcaatactacagacgcattcat

SEQ ID NO: 131144 - DNA, 25 bp, Probe sequence
aattctcgcatcaaatactgctaaa

SEQ ID NO: 131145 - DNA, 25 bp, Probe sequence
caactcctaataacttatttacttg

SEQ ID NO: 131146 - DNA, 25 bp, Probe sequence
cacccttatctatacaattctcgca

SEQ ID NO: 131147 - DNA, 25 bp, Probe sequence
gcctatgcaactaatacgctataac

SEQ ID NO: 131148 - DNA, 25 bp, Probe sequence
gacgcattcattttttaatctatta

SEQ ID NO: 131149 - DNA, 25 bp, Probe sequence
gttaatcaaataaacattcgcctat

SEQ ID NO: 131150 - DNA, 25 bp, Probe sequence
taatctattaacgtacaatgtgagt

SEQ ID NO: 131151 - DNA, 25 bp, Probe sequence
tacacctttcaactcctaataactt

SEQ ID NO: 131152 - DNA, 25 bp, Probe sequence
tactacagacgcattcattttttaa

SEQ ID NO: 131153 - DNA, 25 bp, Probe sequence
ttatctatacaattctcgcatcaaa

SEQ ID NO: 131154 - DNA, 25 bp, Probe sequence
atgtttgcacggcaatctctctttt

SEQ ID NO: 131155 - DNA, 25 bp, Probe sequence
agagagattgttgtgcaatgtttgc

SEQ ID NO: 131156 - DNA, 25 bp, Probe sequence
acgcaacgattgacttatataccta

SEQ ID NO: 131157 - DNA, 25 bp, Probe sequence
caatgaatcacagggaggcaataat

SEQ ID NO: 131158 - DNA, 25 bp, Probe sequence
gcaatgtttgcacggcaatctctct

SEQ ID NO: 131159 - DNA, 25 bp, Probe sequence
gacgtgtaacaatgaatcacaggga

SEQ ID NO: 131160 - DNA, 25 bp, Probe sequence
gagggggtacattagacgtgtaaca

SEQ ID NO: 131161 - DNA, 25 bp, Probe sequence
gattgacttatatacctagaggggg

SEQ ID NO: 131162 - DNA, 25 bp, Probe sequence
gttttacctttcattcatacatcct

SEQ ID NO: 131163 - DNA, 25 bp, Probe sequence
gtcacctaagaattgcaaatccaga

SEQ ID NO: 131164 - DNA, 25 bp, Probe sequence
tccagaagtcatttaagttttacct

SEQ ID NO: 131165 - DNA, 25 bp, Probe sequence
taatattaattacgacttcttttat

SEQ ID NO: 131166 - DNA, 25 bp, Probe sequence
tacgacttcttttatatagatgcta

SEQ ID NO: 131167 - DNA, 25 bp, Probe sequence
tacctttcattcatacatcctttaa

SEQ ID NO: 131168 - DNA, 25 bp, Probe sequence
ttcattcatacatcctttaatatta

SEQ ID NO: 131169 - DNA, 25 bp, Probe sequence
atagctccgcctattaggttccatc

SEQ ID NO: 131170 - DNA, 25 bp, Probe sequence
atcttcgctccaactgcataagagc

SEQ ID NO: 131171 - DNA, 25 bp, Probe sequence
atcttcgctcctactgcatatatag

SEQ ID NO: 131172 - DNA, 25 bp, Probe sequence
atggtttacagttggatcttcgctc

SEQ ID NO: 131173 - DNA, 25 bp, Probe sequence
agcttcgcctattaggttccatcat

SEQ ID NO: 131174 - DNA, 25 bp, Probe sequence
acggtttacagttggatcttcgctc

SEQ ID NO: 131175 - DNA, 25 bp, Probe sequence
aaggattcgttggtgattctgagat

SEQ ID NO: 131176 - DNA, 25 bp, Probe sequence
cagttgggtcttcgctccaactgca

SEQ ID NO: 131177 - DNA, 25 bp, Probe sequence
ccgcctattaggttccatcattatt

SEQ ID NO: 131178 - DNA, 25 bp, Probe sequence
gctccaactgcatatatagttacac

SEQ ID NO: 131179 - DNA, 25 bp, Probe sequence
gcttagcgaattagtgtatcttacc

SEQ ID NO: 131180 - DNA, 25 bp, Probe sequence
gcttggcgaattagtgtatcttacc

SEQ ID NO: 131181 - DNA, 25 bp, Probe sequence
gattggctctataatgtcgcggttt

SEQ ID NO: 131182 - DNA, 25 bp, Probe sequence
tgtcgcggtttacagttgggtcttc

SEQ ID NO: 131183 - DNA, 25 bp, Probe sequence
tgagataggctagtgattggctcta

SEQ ID NO: 131184 - DNA, 25 bp, Probe sequence
atcgaactgatgagaatcccaacaa

SEQ ID NO: 131185 - DNA, 25 bp, Probe sequence
atccaaattatctcatcagttcgat

SEQ ID NO: 131186 - DNA, 25 bp, Probe sequence
aggcaatattcaacgtcatcaacac

SEQ ID NO: 131187 - DNA, 25 bp, Probe sequence
acaatccaaattatctcatcagttc

SEQ ID NO: 131188 - DNA, 25 bp, Probe sequence
aatattcaacgtcatcaacaccaaa

SEQ ID NO: 131189 - DNA, 25 bp, Probe sequence
caacgtcatcaacaccaaattaaaa

SEQ ID NO: 131190 - DNA, 25 bp, Probe sequence
gcaatattcaacgtcatcaacacca

SEQ ID NO: 131191 - DNA, 25 bp, Probe sequence
gaatcccaacaatccaaattatctc

SEQ ID NO: 131192 - DNA, 25 bp, Probe sequence
gaactgatgagaatcccaacaatcc

SEQ ID NO: 131193 - DNA, 25 bp, Probe sequence
gagaatcccaacaatccaaattatc

SEQ ID NO: 131194 - DNA, 25 bp, Probe sequence
gatgagaatcccaacaatccaaatt

SEQ ID NO: 131195 - DNA, 25 bp, Probe sequence
tcccaacaatccaaattatctcatc

SEQ ID NO: 131196 - DNA, 25 bp, Probe sequence
tattcaacgtcatcaacaccaaatt

SEQ ID NO: 131197 - DNA, 25 bp, Probe sequence
ttaggcaatattcaacgtcatcaac

SEQ ID NO: 131198 - DNA, 25 bp, Probe sequence
ttcaacgtcatcaacaccaaattaa

SEQ ID NO: 131199 - DNA, 25 bp, Probe sequence
atataaagtataacgcccctcaagg

SEQ ID NO: 131200 - DNA, 25 bp, Probe sequence
acaggcgcctattcattgttaaata

SEQ ID NO: 131201 - DNA, 25 bp, Probe sequence
aacgtgaaccttaacaggcgcctat

SEQ ID NO: 131202 - DNA, 25 bp, Probe sequence
gcccctcaaggtacgtattcaaacg

SEQ ID NO: 131203 - DNA, 25 bp, Probe sequence
gaacatacttatttcactatgcctt

SEQ ID NO: 131204 - DNA, 25 bp, Probe sequence
gacacacgttgtattgaatgaattt

SEQ ID NO: 131205 - DNA, 25 bp, Probe sequence
gatttaactgtcatgcatatccgca

SEQ ID NO: 131206 - DNA, 25 bp, Probe sequence
gtataacgcccctcaaggtacgtat

SEQ ID NO: 131207 - DNA, 25 bp, Probe sequence
ggaattttcagattaatatgcactc

SEQ ID NO: 131208 - DNA, 25 bp, Probe sequence
tcacatctttctcttagactactcc

SEQ ID NO: 131209 - DNA, 25 bp, Probe sequence
taatatgcactcaatcgttatgatt

SEQ ID NO: 131210 - DNA, 25 bp, Probe sequence
tatccgcatgcgcaaccagttagat

SEQ ID NO: 131211 - DNA, 25 bp, Probe sequence
tatttcactatgccttttactttcc

SEQ ID NO: 131212 - DNA, 25 bp, Probe sequence
ttttctcacatctttctcttagact

SEQ ID NO: 131213 - DNA, 25 bp, Probe sequence
ttattttcattttaggtaggtacat

SEQ ID NO: 131214 - DNA, 25 bp, Probe sequence
attacttagttccctaaagatcagt

SEQ ID NO: 131215 - DNA, 25 bp, Probe sequence
acgccaatactctcatgttagagaa

SEQ ID NO: 131216 - DNA, 25 bp, Probe sequence
aaaacaaaaacgccaatactctcat

SEQ ID NO: 131217 - DNA, 25 bp, Probe sequence
aaaacgccaatactctcatgttaga

SEQ ID NO: 131218 - DNA, 25 bp, Probe sequence
aatcactctcaatcatactgacata

SEQ ID NO: 131219 - DNA, 25 bp, Probe sequence
cactctcaatcatactgacatagta

SEQ ID NO: 131220 - DNA, 25 bp, Probe sequence
cttagttccctaaagatcagtgaat

SEQ ID NO: 131221 - DNA, 25 bp, Probe sequence
gaatattgacgtcatttgatttaca

SEQ ID NO: 131222 - DNA, 25 bp, Probe sequence
gatcagtgaataaaccgctctcatt

SEQ ID NO: 131223 - DNA, 25 bp, Probe sequence
tgttagagaatattgacgtcatttg

SEQ ID NO: 131224 - DNA, 25 bp, Probe sequence
tgacatagtataaattatcacttta

SEQ ID NO: 131225 - DNA, 25 bp, Probe sequence
tgaatcactctcaatcatactgaca

SEQ ID NO: 131226 - DNA, 25 bp, Probe sequence
tcagtgaataaaccgctctcattta

SEQ ID NO: 131227 - DNA, 25 bp, Probe sequence
taaaccgctctcatttatatttata

SEQ ID NO: 131228 - DNA, 25 bp, Probe sequence
tatcactttattacttagttcccta

SEQ ID NO: 131229 - DNA, 25 bp, Probe sequence
attaggtgtcttgcgggctttgtta

SEQ ID NO: 131230 - DNA, 25 bp, Probe sequence
atataccaattagaatgtttacaac

SEQ ID NO: 131231 - DNA, 25 bp, Probe sequence
atatttcaaaagtttagtgcatcaa

SEQ ID NO: 131232 - DNA, 25 bp, Probe sequence
atcataatgtaatctgttcctaata

SEQ ID NO: 131233 - DNA, 25 bp, Probe sequence
atctgttcctaataaagcttcattg

SEQ ID NO: 131234 - DNA, 25 bp, Probe sequence
atcctcccaataatcaaaacactct

SEQ ID NO: 131235 - DNA, 25 bp, Probe sequence
acagagattaggtgtcttgcgggct

SEQ ID NO: 131236 - DNA, 25 bp, Probe sequence
acactttttctgcaccgttaacatg

SEQ ID NO: 131237 - DNA, 25 bp, Probe sequence
aattaaatatcctcccaataatcaa

SEQ ID NO: 131238 - DNA, 25 bp, Probe sequence
cttgcgggctttgttatcataatgt

SEQ ID NO: 131239 - DNA, 25 bp, Probe sequence
gtcattagcgactcaattattttaa

SEQ ID NO: 131240 - DNA, 25 bp, Probe sequence
gtgtcttgcgggctttgttatcata

SEQ ID NO: 131241 - DNA, 25 bp, Probe sequence
tgtttacaacactttttctgcaccg

SEQ ID NO: 131242 - DNA, 25 bp, Probe sequence
taatcaaaacactctatacatatag

SEQ ID NO: 131243 - DNA, 25 bp, Probe sequence
ttttctgcaccgttaacatgggatt

SEQ ID NO: 131244 - DNA, 25 bp, Probe sequence
atttgtcgattttactacataacat

SEQ ID NO: 131245 - DNA, 25 bp, Probe sequence
atattttatgcatcttactgtaaca

SEQ ID NO: 131246 - DNA, 25 bp, Probe sequence
atcacgtcagcctttatatttaaac

SEQ ID NO: 131247 - DNA, 25 bp, Probe sequence
aaagcgaaatgcagcctatcctcta

SEQ ID NO: 131248 - DNA, 25 bp, Probe sequence
aatattgcactgattttcattaatt

SEQ ID NO: 131249 - DNA, 25 bp, Probe sequence
caagcgatatatcacgtcagccttt

SEQ ID NO: 131250 - DNA, 25 bp, Probe sequence
gcagcctatcctctaatttaaacca

SEQ ID NO: 131251 - DNA, 25 bp, Probe sequence
gaatattactaagattgtcatacca

SEQ ID NO: 131252 - DNA, 25 bp, Probe sequence
gatatgctattcgaatttacttttt

SEQ ID NO: 131253 - DNA, 25 bp, Probe sequence
gttaatttcattactgcaaaccaca

SEQ ID NO: 131254 - DNA, 25 bp, Probe sequence
gtcataccaattattcattgcatcg

SEQ ID NO: 131255 - DNA, 25 bp, Probe sequence
tcctctaatttaaaccaagcgatat

SEQ ID NO: 131256 - DNA, 25 bp, Probe sequence
taactgttattttcattatattttt

SEQ ID NO: 131257 - DNA, 25 bp, Probe sequence
tatttaaacgctatgtgtcactttt

SEQ ID NO: 131258 - DNA, 25 bp, Probe sequence
ttttctctattttgtagcatatcac

SEQ ID NO: 131259 - DNA, 25 bp, Probe sequence
attccacttggcacttaataaagac

SEQ ID NO: 131260 - DNA, 25 bp, Probe sequence
atgtctaaacattacttttatttat

SEQ ID NO: 131261 - DNA, 25 bp, Probe sequence
agtacagcctcaaatgaagttttat

SEQ ID NO: 131262 - DNA, 25 bp, Probe sequence
agtttgtatctagtgtactcagtac

SEQ ID NO: 131263 - DNA, 25 bp, Probe sequence
agcagtaatacaataaagtccaata

SEQ ID NO: 131264 - DNA, 25 bp, Probe sequence
aaatgcgcgtttagtttgtatctag

SEQ ID NO: 131265 - DNA, 25 bp, Probe sequence
aactctccccaatttctatgggaag

SEQ ID NO: 131266 - DNA, 25 bp, Probe sequence
aatttccctaacttcaatatccact

SEQ ID NO: 131267 - DNA, 25 bp, Probe sequence
gaagttttattccacttggcactta

SEQ ID NO: 131268 - DNA, 25 bp, Probe sequence
gttttattccacttggcacttaata

SEQ ID NO: 131269 - DNA, 25 bp, Probe sequence
ggaagagctatatatttaatgtcta

SEQ ID NO: 131270 - DNA, 25 bp, Probe sequence
tgtactcagtacagcctcaaatgaa

SEQ ID NO: 131271 - DNA, 25 bp, Probe sequence
tccaataaatttccctaacttcaat

SEQ ID NO: 131272 - DNA, 25 bp, Probe sequence
tccctaacttcaatatccacttttt

SEQ ID NO: 131273 - DNA, 25 bp, Probe sequence
taacttcaatatccactttttaaga

SEQ ID NO: 131274 - DNA, 25 bp, Probe sequence
atatatctgacatgtaacttctctt

SEQ ID NO: 131275 - DNA, 25 bp, Probe sequence
atatggctgttttatactgtaatgt

SEQ ID NO: 131276 - DNA, 25 bp, Probe sequence
acatcttttgtgaattatcttatct

SEQ ID NO: 131277 - DNA, 25 bp, Probe sequence
aaccagccagtaaattacactttct

SEQ ID NO: 131278 - DNA, 25 bp, Probe sequence
gctaaactttattctcgcaattcac

SEQ ID NO: 131279 - DNA, 25 bp, Probe sequence
gcaatcaacacatatgtttctgcac

SEQ ID NO: 131280 - DNA, 25 bp, Probe sequence
gtttctgcacatgtattgattgcta

SEQ ID NO: 131281 - DNA, 25 bp, Probe sequence
gtaatgtgaaatatgtgccctttag

SEQ ID NO: 131282 - DNA, 25 bp, Probe sequence
gtgccctttagaatccaatcaaccc

SEQ ID NO: 131283 - DNA, 25 bp, Probe sequence
tcaacccttgaaatagtctttaaca

SEQ ID NO: 131284 - DNA, 25 bp, Probe sequence
tcaacggtactcactatatcacaaa

SEQ ID NO: 131285 - DNA, 25 bp, Probe sequence
taacttctcttattttcgtacatta

SEQ ID NO: 131286 - DNA, 25 bp, Probe sequence
tacactttctttacaaaacattaca

SEQ ID NO: 131287 - DNA, 25 bp, Probe sequence
tagctcaactattacagctttcgta

SEQ ID NO: 131288 - DNA, 25 bp, Probe sequence
tttatttctttcaacggtactcact

SEQ ID NO: 131289 - DNA, 25 bp, Probe sequence
atttaggctagcagtatcatctata

SEQ ID NO: 131290 - DNA, 25 bp, Probe sequence
atatttaggctagcagtatcatcta

SEQ ID NO: 131291 - DNA, 25 bp, Probe sequence
atgttgttatatttaggctagcagt

SEQ ID NO: 131292 - DNA, 25 bp, Probe sequence
aggctagcagtatcatctataactc

SEQ ID NO: 131293 - DNA, 25 bp, Probe sequence
agcagtatcatctataactcaagac

SEQ ID NO: 131294 - DNA, 25 bp, Probe sequence
cagtatcatctataactcaagacta

SEQ ID NO: 131295 - DNA, 25 bp, Probe sequence
ctagcagtatcatctataactcaag

SEQ ID NO: 131296 - DNA, 25 bp, Probe sequence
ccgatgttgttatatttaggctagc

SEQ ID NO: 131297 - DNA, 25 bp, Probe sequence
gctagcagtatcatctataactcaa

SEQ ID NO: 131298 - DNA, 25 bp, Probe sequence
gcagtatcatctataactcaagact

SEQ ID NO: 131299 - DNA, 25 bp, Probe sequence
gatgttgttatatttaggctagcag

SEQ ID NO: 131300 - DNA, 25 bp, Probe sequence
gttgttatatttaggctagcagtat

SEQ ID NO: 131301 - DNA, 25 bp, Probe sequence
gttatatttaggctagcagtatcat

SEQ ID NO: 131302 - DNA, 25 bp, Probe sequence
ggctagcagtatcatctataactca

SEQ ID NO: 131303 - DNA, 25 bp, Probe sequence
ttaggctagcagtatcatctataac

SEQ ID NO: 131304 - DNA, 25 bp, Probe sequence
agtgttaaaacaacagatgttaggt

SEQ ID NO: 131305 - DNA, 25 bp, Probe sequence
agatactgataataagtgttaaaac

SEQ ID NO: 131306 - DNA, 25 bp, Probe sequence
acaacagatgttaggtagtgaacaa

SEQ ID NO: 131307 - DNA, 25 bp, Probe sequence
aaacaacagatgttaggtagtgaac

SEQ ID NO: 131308 - DNA, 25 bp, Probe sequence
aaaacaacagatgttaggtagtgaa

SEQ ID NO: 131309 - DNA, 25 bp, Probe sequence
aacaacagatgttaggtagtgaaca

SEQ ID NO: 131310 - DNA, 25 bp, Probe sequence
aagatactgataataagtgttaaaa

SEQ ID NO: 131311 - DNA, 25 bp, Probe sequence
aagtgttaaaacaacagatgttagg

SEQ ID NO: 131312 - DNA, 25 bp, Probe sequence
gaagatactgataataagtgttaaa

SEQ ID NO: 131313 - DNA, 25 bp, Probe sequence
gacaatataatagaagatactgata

SEQ ID NO: 131314 - DNA, 25 bp, Probe sequence
gatactgataataagtgttaaaaca

SEQ ID NO: 131315 - DNA, 25 bp, Probe sequence
gttaaaacaacagatgttaggtagt

SEQ ID NO: 131316 - DNA, 25 bp, Probe sequence
gtgttaaaacaacagatgttaggta

SEQ ID NO: 131317 - DNA, 25 bp, Probe sequence
taaaacaacagatgttaggtagtga

SEQ ID NO: 131318 - DNA, 25 bp, Probe sequence
tactgataataagtgttaaaacaac

SEQ ID NO: 131319 - DNA, 25 bp, Probe sequence
attacgattgattagccgtgtctag

SEQ ID NO: 131320 - DNA, 25 bp, Probe sequence
atcactatgtgacttaggttcatac

SEQ ID NO: 131321 - DNA, 25 bp, Probe sequence
atgtgacttaggttcatacttgtac

SEQ ID NO: 131322 - DNA, 25 bp, Probe sequence
acttggtatttagtcatgcatcttg

SEQ ID NO: 131323 - DNA, 25 bp, Probe sequence
aaaacttggtatttagtcatgcatc

SEQ ID NO: 131324 - DNA, 25 bp, Probe sequence
gaaatcactatgtgacttaggttca

SEQ ID NO: 131325 - DNA, 25 bp, Probe sequence
gacttaggttcatacttgtacacac

SEQ ID NO: 131326 - DNA, 25 bp, Probe sequence
gtcatgcatcttgaaatcactatgt

SEQ ID NO: 131327 - DNA, 25 bp, Probe sequence
gtgacttaggttcatacttgtacac

SEQ ID NO: 131328 - DNA, 25 bp, Probe sequence
ggtatttagtcatgcatcttgaaat

SEQ ID NO: 131329 - DNA, 25 bp, Probe sequence
ggttcatacttgtacacacaataaa

SEQ ID NO: 131330 - DNA, 25 bp, Probe sequence
tgcatcttgaaatcactatgtgact

SEQ ID NO: 131331 - DNA, 25 bp, Probe sequence
tttagtcatgcatcttgaaatcact

SEQ ID NO: 131332 - DNA, 25 bp, Probe sequence
ttaggttcatacttgtacacacaat

SEQ ID NO: 131333 - DNA, 25 bp, Probe sequence
ttaacatattacgattgattagccg

SEQ ID NO: 131334 - DNA, 25 bp, Probe sequence
ataaactcaaaatatatcaacactt

SEQ ID NO: 131335 - DNA, 25 bp, Probe sequence
atcaacacttgattctaaggaggat

SEQ ID NO: 131336 - DNA, 25 bp, Probe sequence
atcactttgccatcgtactactatt

SEQ ID NO: 131337 - DNA, 25 bp, Probe sequence
actttgccatcgtactactattaaa

SEQ ID NO: 131338 - DNA, 25 bp, Probe sequence
aaatctgctggtcaaaagaccgaga

SEQ ID NO: 131339 - DNA, 25 bp, Probe sequence
aaaacattactggatgtgttgataa

SEQ ID NO: 131340 - DNA, 25 bp, Probe sequence
aacaacattgcagacatgtatatca

SEQ ID NO: 131341 - DNA, 25 bp, Probe sequence
aacgacacttcaataacatcacttt

SEQ ID NO: 131342 - DNA, 25 bp, Probe sequence
aataacatcactttgccatcgtact

SEQ ID NO: 131343 - DNA, 25 bp, Probe sequence
gacatgtatatcaaacgacacttca

SEQ ID NO: 131344 - DNA, 25 bp, Probe sequence
gaccgagaaactaaaaacattactg

SEQ ID NO: 131345 - DNA, 25 bp, Probe sequence
gtactactattaaaatcgtgtctca

SEQ ID NO: 131346 - DNA, 25 bp, Probe sequence
taacatcactttgccatcgtactac

SEQ ID NO: 131347 - DNA, 25 bp, Probe sequence
tattaaaatcgtgtctcaaacccct

SEQ ID NO: 131348 - DNA, 25 bp, Probe sequence
ttaattccaaaaatctgctggtcaa

SEQ ID NO: 131349 - DNA, 25 bp, Probe sequence
acttaaggtgccaactgacctcata

SEQ ID NO: 131350 - DNA, 25 bp, Probe sequence
acaaagcccatactgattgaagaca

SEQ ID NO: 131351 - DNA, 25 bp, Probe sequence
aactgacctcataaacaaagcccat

SEQ ID NO: 131352 - DNA, 25 bp, Probe sequence
ctgacctcataaacaaagcccatac

SEQ ID NO: 131353 - DNA, 25 bp, Probe sequence
gccaactgacctcataaacaaagcc

SEQ ID NO: 131354 - DNA, 25 bp, Probe sequence
gctcacgaggtattgcacttaaggt

SEQ ID NO: 131355 - DNA, 25 bp, Probe sequence
gcacttaaggtgccaactgacctca

SEQ ID NO: 131356 - DNA, 25 bp, Probe sequence
gacctcataaacaaagcccatactg

SEQ ID NO: 131357 - DNA, 25 bp, Probe sequence
gaggtattgcacttaaggtgccaac

SEQ ID NO: 131358 - DNA, 25 bp, Probe sequence
ggtgccaactgacctcataaacaaa

SEQ ID NO: 131359 - DNA, 25 bp, Probe sequence
ggtattgcacttaaggtgccaactg

SEQ ID NO: 131360 - DNA, 25 bp, Probe sequence
taaggtgccaactgacctcataaac

SEQ ID NO: 131361 - DNA, 25 bp, Probe sequence
taaacaaagcccatactgattgaag

SEQ ID NO: 131362 - DNA, 25 bp, Probe sequence
tatttgctcacgaggtattgcactt

SEQ ID NO: 131363 - DNA, 25 bp, Probe sequence
tttgctcacgaggtattgcacttaa

SEQ ID NO: 131364 - DNA, 25 bp, Probe sequence
atctctgtatgggctttttatttat

SEQ ID NO: 131365 - DNA, 25 bp, Probe sequence
actcccacattaaacttcatctctg

SEQ ID NO: 131366 - DNA, 25 bp, Probe sequence
acttcatctctgtatgggcttttta

SEQ ID NO: 131367 - DNA, 25 bp, Probe sequence
aaacttcatctctgtatgggctttt

SEQ ID NO: 131368 - DNA, 25 bp, Probe sequence
cacattaaacttcatctctgtatgg

SEQ ID NO: 131369 - DNA, 25 bp, Probe sequence
cattaaacttcatctctgtatgggc

SEQ ID NO: 131370 - DNA, 25 bp, Probe sequence
ctctgtatgggctttttatttattc

SEQ ID NO: 131371 - DNA, 25 bp, Probe sequence
ctcccacattaaacttcatctctgt

SEQ ID NO: 131372 - DNA, 25 bp, Probe sequence
cccacattaaacttcatctctgtat

SEQ ID NO: 131373 - DNA, 25 bp, Probe sequence
gctttttatttattcttttgagaat

SEQ ID NO: 131374 - DNA, 25 bp, Probe sequence
tgggctttttatttattcttttgag

SEQ ID NO: 131375 - DNA, 25 bp, Probe sequence
tgtatgggctttttatttattcttt

SEQ ID NO: 131376 - DNA, 25 bp, Probe sequence
tatgggctttttatttattcttttg

SEQ ID NO: 131377 - DNA, 25 bp, Probe sequence
ttaaacttcatctctgtatgggctt

SEQ ID NO: 131378 - DNA, 25 bp, Probe sequence
ttcatctctgtatgggctttttatt

SEQ ID NO: 131379 - DNA, 25 bp, Probe sequence
atccgtttgtcaattttagagaatt

SEQ ID NO: 131380 - DNA, 25 bp, Probe sequence
actcttttcttttatgatatttaat

SEQ ID NO: 131381 - DNA, 25 bp, Probe sequence
acactcttttcttttatgatattta

SEQ ID NO: 131382 - DNA, 25 bp, Probe sequence
aattcattgctaactttcttaacac

SEQ ID NO: 131383 - DNA, 25 bp, Probe sequence
caacactcttttcttttatgatatt

SEQ ID NO: 131384 - DNA, 25 bp, Probe sequence
cattgctaactttcttaacacgttt

SEQ ID NO: 131385 - DNA, 25 bp, Probe sequence
gcaaattcattgctaactttcttaa

SEQ ID NO: 131386 - DNA, 25 bp, Probe sequence
gatagttatccgtttgtcaatttta

SEQ ID NO: 131387 - DNA, 25 bp, Probe sequence
gttatccgtttgtcaattttagaga

SEQ ID NO: 131388 - DNA, 25 bp, Probe sequence
ggatagttatccgtttgtcaatttt

SEQ ID NO: 131389 - DNA, 25 bp, Probe sequence
tgctaactttcttaacacgttttat

SEQ ID NO: 131390 - DNA, 25 bp, Probe sequence
tagagaattttaagtaggtgtaatc

SEQ ID NO: 131391 - DNA, 25 bp, Probe sequence
tatcaacactcttttcttttatgat

SEQ ID NO: 131392 - DNA, 25 bp, Probe sequence
tttaatagttattgcaaattcattg

SEQ ID NO: 131393 - DNA, 25 bp, Probe sequence
ttcattgctaactttcttaacacgt

SEQ ID NO: 131394 - DNA, 25 bp, Probe sequence
atcgttctctaataaaacagcttgg

SEQ ID NO: 131395 - DNA, 25 bp, Probe sequence
atgaaggcatgttaaccattctctt

SEQ ID NO: 131396 - DNA, 25 bp, Probe sequence
aacagcttggacagttttcaaatta

SEQ ID NO: 131397 - DNA, 25 bp, Probe sequence
aactcgttattatacatgaaggcat

SEQ ID NO: 131398 - DNA, 25 bp, Probe sequence
aaggcatgttaaccattctcttcca

SEQ ID NO: 131399 - DNA, 25 bp, Probe sequence
gcttggacagttttcaaattatatt

SEQ ID NO: 131400 - DNA, 25 bp, Probe sequence
gatggctgaccaagcttatttttgt

SEQ ID NO: 131401 - DNA, 25 bp, Probe sequence
gttcaaatcaactcgttattataca

SEQ ID NO: 131402 - DNA, 25 bp, Probe sequence
ggctgaccaagcttatttttgttta

SEQ ID NO: 131403 - DNA, 25 bp, Probe sequence
tgaccaagcttatttttgtttacgt

SEQ ID NO: 131404 - DNA, 25 bp, Probe sequence
taaccattctcttccactgaaaaca

SEQ ID NO: 131405 - DNA, 25 bp, Probe sequence
taaacgttcaaatcaactcgttatt

SEQ ID NO: 131406 - DNA, 25 bp, Probe sequence
tatatttgatggctgaccaagctta

SEQ ID NO: 131407 - DNA, 25 bp, Probe sequence
ttaaccattctcttccactgaaaac

SEQ ID NO: 131408 - DNA, 25 bp, Probe sequence
ttgatcgttctctaataaaacagct

SEQ ID NO: 131409 - DNA, 25 bp, Probe sequence
attccaagatagatctcctattgac

SEQ ID NO: 131410 - DNA, 25 bp, Probe sequence
atagatctcctattgactgacatga

SEQ ID NO: 131411 - DNA, 25 bp, Probe sequence
atagcatattccaagatagatctcc

SEQ ID NO: 131412 - DNA, 25 bp, Probe sequence
actctcctcttatacttcatatgaa

SEQ ID NO: 131413 - DNA, 25 bp, Probe sequence
gcatattccaagatagatctcctat

SEQ ID NO: 131414 - DNA, 25 bp, Probe sequence
gactctatattcagttatagttcat

SEQ ID NO: 131415 - DNA, 25 bp, Probe sequence
gactgacatgactctatattcagtt

SEQ ID NO: 131416 - DNA, 25 bp, Probe sequence
gatctcctattgactgacatgactc

SEQ ID NO: 131417 - DNA, 25 bp, Probe sequence
tgacatgactctatattcagttata

SEQ ID NO: 131418 - DNA, 25 bp, Probe sequence
tcctattgactgacatgactctata

SEQ ID NO: 131419 - DNA, 25 bp, Probe sequence
tcctcttatacttcatatgaatagc

SEQ ID NO: 131420 - DNA, 25 bp, Probe sequence
tctcctattgactgacatgactcta

SEQ ID NO: 131421 - DNA, 25 bp, Probe sequence
tctcctcttatacttcatatgaata

SEQ ID NO: 131422 - DNA, 25 bp, Probe sequence
tagatctcctattgactgacatgac

SEQ ID NO: 131423 - DNA, 25 bp, Probe sequence
tattgactgacatgactctatattc

SEQ ID NO: 131424 - DNA, 25 bp, Probe sequence
attgtttttgactataaatcgtaat

SEQ ID NO: 131425 - DNA, 25 bp, Probe sequence
attcatctacatttcggaagttggt

SEQ ID NO: 131426 - DNA, 25 bp, Probe sequence
attaacactccctcaatgatctatt

SEQ ID NO: 131427 - DNA, 25 bp, Probe sequence
atagacctatccttaagaaatttca

SEQ ID NO: 131428 - DNA, 25 bp, Probe sequence
agagaattcatctacatttcggaag

SEQ ID NO: 131429 - DNA, 25 bp, Probe sequence
actccctcaatgatctatttcaagt

SEQ ID NO: 131430 - DNA, 25 bp, Probe sequence
aacttccgttattgtagagaattca

SEQ ID NO: 131431 - DNA, 25 bp, Probe sequence
ccagcctcagtacttggagataaca

SEQ ID NO: 131432 - DNA, 25 bp, Probe sequence
gtatcatccagcctcagtacttgga

SEQ ID NO: 131433 - DNA, 25 bp, Probe sequence
ggagataacattttggcggtgagac

SEQ ID NO: 131434 - DNA, 25 bp, Probe sequence
ggatgctacggttagttcaaatgat

SEQ ID NO: 131435 - DNA, 25 bp, Probe sequence
ggaagttggtatgtgtcttttttat

SEQ ID NO: 131436 - DNA, 25 bp, Probe sequence
ggcggtgagacataaatcatatttt

SEQ ID NO: 131437 - DNA, 25 bp, Probe sequence
taatggtatcatccagcctcagtac

SEQ ID NO: 131438 - DNA, 25 bp, Probe sequence
tttcgtcgtctccccaataaagata

SEQ ID NO: 131439 - DNA, 25 bp, Probe sequence
attagaaactgtatcaatatatgat

SEQ ID NO: 131440 - DNA, 25 bp, Probe sequence
atattgttttgtgattatattcaaa

SEQ ID NO: 131441 - DNA, 25 bp, Probe sequence
atacttaaatattgttttgtgatta

SEQ ID NO: 131442 - DNA, 25 bp, Probe sequence
aatatatgatattcaaacattcaat

SEQ ID NO: 131443 - DNA, 25 bp, Probe sequence
cattcctagaattttattgaacaaa

SEQ ID NO: 131444 - DNA, 25 bp, Probe sequence
gatattcaaacattcaataatactt

SEQ ID NO: 131445 - DNA, 25 bp, Probe sequence
gattatattcaaaattattgtatca

SEQ ID NO: 131446 - DNA, 25 bp, Probe sequence
tcattcctagaattttattgaacaa

SEQ ID NO: 131447 - DNA, 25 bp, Probe sequence
taaaattattagaaactgtatcaat

SEQ ID NO: 131448 - DNA, 25 bp, Probe sequence
taaaatcacttttattgcaactcaa

SEQ ID NO: 131449 - DNA, 25 bp, Probe sequence
tacacctcttcccatttaaattatt

SEQ ID NO: 131450 - DNA, 25 bp, Probe sequence
tatcattcctagaattttattgaac

SEQ ID NO: 131451 - DNA, 25 bp, Probe sequence
tatttacacctcttcccatttaaat

SEQ ID NO: 131452 - DNA, 25 bp, Probe sequence
ttacacctcttcccatttaaattat

SEQ ID NO: 131453 - DNA, 25 bp, Probe sequence
ttgtatcaataaatatgtatcattc

SEQ ID NO: 131454 - DNA, 25 bp, Probe sequence
attatctatttatctcaatctaacg

SEQ ID NO: 131455 - DNA, 25 bp, Probe sequence
atattatctatttatctcaatctaa

SEQ ID NO: 131456 - DNA, 25 bp, Probe sequence
aggccttctcttcataaaatatctg

SEQ ID NO: 131457 - DNA, 25 bp, Probe sequence
actgaaggccttctcttcataaaat

SEQ ID NO: 131458 - DNA, 25 bp, Probe sequence
ctgtgcatattatctatttatctca

SEQ ID NO: 131459 - DNA, 25 bp, Probe sequence
ccttctcttcataaaatatctgtgc

SEQ ID NO: 131460 - DNA, 25 bp, Probe sequence
gcatattatctatttatctcaatct

SEQ ID NO: 131461 - DNA, 25 bp, Probe sequence
gaaggccttctcttcataaaatatc

SEQ ID NO: 131462 - DNA, 25 bp, Probe sequence
gtgcatattatctatttatctcaat

SEQ ID NO: 131463 - DNA, 25 bp, Probe sequence
ggccttctcttcataaaatatctgt

SEQ ID NO: 131464 - DNA, 25 bp, Probe sequence
tctatttatctcaatctaacgtctt

SEQ ID NO: 131465 - DNA, 25 bp, Probe sequence
tatctgtgcatattatctatttatc

SEQ ID NO: 131466 - DNA, 25 bp, Probe sequence
tatctatttatctcaatctaacgtc

SEQ ID NO: 131467 - DNA, 25 bp, Probe sequence
tatttatctcaatctaacgtcttaa

SEQ ID NO: 131468 - DNA, 25 bp, Probe sequence
ttctcttcataaaatatctgtgcat

SEQ ID NO: 131469 - DNA, 25 bp, Probe sequence
attcaaacttgcgtcaattttcaaa

SEQ ID NO: 131470 - DNA, 25 bp, Probe sequence
atttcacatatattaagttgaggat

SEQ ID NO: 131471 - DNA, 25 bp, Probe sequence
aggatagtaagcctcaaatataatg

SEQ ID NO: 131472 - DNA, 25 bp, Probe sequence
aaacgttattcaaacttgcgtcaat

SEQ ID NO: 131473 - DNA, 25 bp, Probe sequence
aatctacttactttatactataata

SEQ ID NO: 131474 - DNA, 25 bp, Probe sequence
caaacttgcgtcaattttcaaaact

SEQ ID NO: 131475 - DNA, 25 bp, Probe sequence
caccttccaatctacttactttata

SEQ ID NO: 131476 - DNA, 25 bp, Probe sequence
ctttatactataatattgcctaatt

SEQ ID NO: 131477 - DNA, 25 bp, Probe sequence
ccttccaatctacttactttatact

SEQ ID NO: 131478 - DNA, 25 bp, Probe sequence
gcctaattaggatgatttaatctta

SEQ ID NO: 131479 - DNA, 25 bp, Probe sequence
gttattcaaacttgcgtcaattttc

SEQ ID NO: 131480 - DNA, 25 bp, Probe sequence
gggaaatgctagtctattaaaagaa

SEQ ID NO: 131481 - DNA, 25 bp, Probe sequence
tgcgtcaattttcaaaactttttag

SEQ ID NO: 131482 - DNA, 25 bp, Probe sequence
tccaatctacttactttatactata

SEQ ID NO: 131483 - DNA, 25 bp, Probe sequence
tatgtagggaaatgctagtctatta

SEQ ID NO: 131484 - DNA, 25 bp, Probe sequence
atttatcaccatttttcaaaataat

SEQ ID NO: 131485 - DNA, 25 bp, Probe sequence
ataacactttaaaacttgctgaatc

SEQ ID NO: 131486 - DNA, 25 bp, Probe sequence
atcacatatcattaaatatagcgtt

SEQ ID NO: 131487 - DNA, 25 bp, Probe sequence
atggcttaaatatcacatatcatta

SEQ ID NO: 131488 - DNA, 25 bp, Probe sequence
actttaaaacttgctgaatcgtctt

SEQ ID NO: 131489 - DNA, 25 bp, Probe sequence
acttgctgaatcgtcttattaaaat

SEQ ID NO: 131490 - DNA, 25 bp, Probe sequence
acactttaaaacttgctgaatcgtc

SEQ ID NO: 131491 - DNA, 25 bp, Probe sequence
aaacttgctgaatcgtcttattaaa

SEQ ID NO: 131492 - DNA, 25 bp, Probe sequence
aataatggcttaaatatcacatatc

SEQ ID NO: 131493 - DNA, 25 bp, Probe sequence
gctgaatcgtcttattaaaattatg

SEQ ID NO: 131494 - DNA, 25 bp, Probe sequence
gatatatttatcaccatttttcaaa

SEQ ID NO: 131495 - DNA, 25 bp, Probe sequence
tccaacgtagtcaaataacacttta

SEQ ID NO: 131496 - DNA, 25 bp, Probe sequence
taaaacttgctgaatcgtcttatta

SEQ ID NO: 131497 - DNA, 25 bp, Probe sequence
tagcgttttataacggaggcgtttg

SEQ ID NO: 131498 - DNA, 25 bp, Probe sequence
tatagcgttttataacggaggcgtt

SEQ ID NO: 131499 - DNA, 25 bp, Probe sequence
atttcgaaagtcccttatgtatcta

SEQ ID NO: 131500 - DNA, 25 bp, Probe sequence
atgcatttatatttcgaaagtccct

SEQ ID NO: 131501 - DNA, 25 bp, Probe sequence
acttcatttaaatcaatttcatctt

SEQ ID NO: 131502 - DNA, 25 bp, Probe sequence
aacactaaacaacacatacgtctct

SEQ ID NO: 131503 - DNA, 25 bp, Probe sequence
aacctcccacatttaatcattaact

SEQ ID NO: 131504 - DNA, 25 bp, Probe sequence
aagtcccttatgtatctaaaagcat

SEQ ID NO: 131505 - DNA, 25 bp, Probe sequence
aatttcatcttacaatttatcgtgt

SEQ ID NO: 131506 - DNA, 25 bp, Probe sequence
catacgtctctgtgtcattttcatt

SEQ ID NO: 131507 - DNA, 25 bp, Probe sequence
gatttaacctcccacatttaatcat

SEQ ID NO: 131508 - DNA, 25 bp, Probe sequence
gattgacttcaattcatcgtaaaag

SEQ ID NO: 131509 - DNA, 25 bp, Probe sequence
gttatacttttgccattttttaatg

SEQ ID NO: 131510 - DNA, 25 bp, Probe sequence
gtcatatatatgtttacttcattta

SEQ ID NO: 131511 - DNA, 25 bp, Probe sequence
gtcattttcattttttgtatgtcat

SEQ ID NO: 131512 - DNA, 25 bp, Probe sequence
gtctctgtgtcattttcattttttg

SEQ ID NO: 131513 - DNA, 25 bp, Probe sequence
taacttctattatatatgattcata

SEQ ID NO: 131514 - DNA, 25 bp, Probe sequence
atttagcaaggcaagccactctcga

SEQ ID NO: 131515 - DNA, 25 bp, Probe sequence
atgttatttagcaaggcaagccact

SEQ ID NO: 131516 - DNA, 25 bp, Probe sequence
agatatcatttaataagcttatgtt

SEQ ID NO: 131517 - DNA, 25 bp, Probe sequence
agcttatgttatttagcaaggcaag

SEQ ID NO: 131518 - DNA, 25 bp, Probe sequence
agccactctcgattcatggcttgcc

SEQ ID NO: 131519 - DNA, 25 bp, Probe sequence
aagccactctcgattcatggcttgc

SEQ ID NO: 131520 - DNA, 25 bp, Probe sequence
ctctcgattcatggcttgccttatt

SEQ ID NO: 131521 - DNA, 25 bp, Probe sequence
gcaagccactctcgattcatggctt

SEQ ID NO: 131522 - DNA, 25 bp, Probe sequence
gttatttagcaaggcaagccactct

SEQ ID NO: 131523 - DNA, 25 bp, Probe sequence
tgttatttagcaaggcaagccactc

SEQ ID NO: 131524 - DNA, 25 bp, Probe sequence
taagcttatgttatttagcaaggca

SEQ ID NO: 131525 - DNA, 25 bp, Probe sequence
tagcaaggcaagccactctcgattc

SEQ ID NO: 131526 - DNA, 25 bp, Probe sequence
tatttagcaaggcaagccactctcg

SEQ ID NO: 131527 - DNA, 25 bp, Probe sequence
tttagcaaggcaagccactctcgat

SEQ ID NO: 131528 - DNA, 25 bp, Probe sequence
ttagcaaggcaagccactctcgatt

SEQ ID NO: 131529 - DNA, 25 bp, Probe sequence
agagaaggccacacgcttggaatct

SEQ ID NO: 131530 - DNA, 25 bp, Probe sequence
agaaggccacacgcttggaatctta

SEQ ID NO: 131531 - DNA, 25 bp, Probe sequence
aaggccacacgcttggaatcttaaa

SEQ ID NO: 131532 - DNA, 25 bp, Probe sequence
caggaattacggtcgattttgatta

SEQ ID NO: 131533 - DNA, 25 bp, Probe sequence
catgcaggaattacggtcgattttg

SEQ ID NO: 131534 - DNA, 25 bp, Probe sequence
gccacacgcttggaatcttaaacca

SEQ ID NO: 131535 - DNA, 25 bp, Probe sequence
gaatcttaaaccaaggtgtggccct

SEQ ID NO: 131536 - DNA, 25 bp, Probe sequence
gaagagaaggccacacgcttggaat

SEQ ID NO: 131537 - DNA, 25 bp, Probe sequence
gaaggccacacgcttggaatcttaa

SEQ ID NO: 131538 - DNA, 25 bp, Probe sequence
gagaaggccacacgcttggaatctt

SEQ ID NO: 131539 - DNA, 25 bp, Probe sequence
gatagaagagaaggccacacgcttg

SEQ ID NO: 131540 - DNA, 25 bp, Probe sequence
ggtcgattttgattaaaagtgacat

SEQ ID NO: 131541 - DNA, 25 bp, Probe sequence
ggccacacgcttggaatcttaaacc

SEQ ID NO: 131542 - DNA, 25 bp, Probe sequence
tgcaggaattacggtcgattttgat

SEQ ID NO: 131543 - DNA, 25 bp, Probe sequence
tagaagagaaggccacacgcttgga

SEQ ID NO: 131544 - DNA, 25 bp, Probe sequence
atcttcttttgtaggagcattttat

SEQ ID NO: 131545 - DNA, 25 bp, Probe sequence
aggagcattttattatcaagagtaa

SEQ ID NO: 131546 - DNA, 25 bp, Probe sequence
cttcttttgtaggagcattttatta

SEQ ID NO: 131547 - DNA, 25 bp, Probe sequence
cttttgtaggagcattttattatca

SEQ ID NO: 131548 - DNA, 25 bp, Probe sequence
gagcattttattatcaagagtaaat

SEQ ID NO: 131549 - DNA, 25 bp, Probe sequence
gtaggagcattttattatcaagagt

SEQ ID NO: 131550 - DNA, 25 bp, Probe sequence
ggagcattttattatcaagagtaaa

SEQ ID NO: 131551 - DNA, 25 bp, Probe sequence
tgtaggagcattttattatcaagag

SEQ ID NO: 131552 - DNA, 25 bp, Probe sequence
tcttttgtaggagcattttattatc

SEQ ID NO: 131553 - DNA, 25 bp, Probe sequence
tcttcttttgtaggagcattttatt

SEQ ID NO: 131554 - DNA, 25 bp, Probe sequence
taggagcattttattatcaagagta

SEQ ID NO: 131555 - DNA, 25 bp, Probe sequence
tttgtaggagcattttattatcaag

SEQ ID NO: 131556 - DNA, 25 bp, Probe sequence
ttttgtaggagcattttattatcaa

SEQ ID NO: 131557 - DNA, 25 bp, Probe sequence
ttcttttgtaggagcattttattat

SEQ ID NO: 131558 - DNA, 25 bp, Probe sequence
ttgtaggagcattttattatcaaga

SEQ ID NO: 131559 - DNA, 25 bp, Probe sequence
atctatattatttttatctatttca

SEQ ID NO: 131560 - DNA, 25 bp, Probe sequence
actacattgttatctactagaggtt

SEQ ID NO: 131561 - DNA, 25 bp, Probe sequence
acttcacgaaactaaacaacatgtc

SEQ ID NO: 131562 - DNA, 25 bp, Probe sequence
acaacatgtcattaacttatctcgt

SEQ ID NO: 131563 - DNA, 25 bp, Probe sequence
aaattgcaacgataatacctttact

SEQ ID NO: 131564 - DNA, 25 bp, Probe sequence
aaacccctaatggataactacattg

SEQ ID NO: 131565 - DNA, 25 bp, Probe sequence
ctattacgctaacccaattggcata

SEQ ID NO: 131566 - DNA, 25 bp, Probe sequence
ctagaggtttctaacttatactatt

SEQ ID NO: 131567 - DNA, 25 bp, Probe sequence
ggcattcctcctttaatctatatta

SEQ ID NO: 131568 - DNA, 25 bp, Probe sequence
tctaccaaataaattctgaatactg

SEQ ID NO: 131569 - DNA, 25 bp, Probe sequence
tcaattcaatatttttacttcacga

SEQ ID NO: 131570 - DNA, 25 bp, Probe sequence
tcaattcgcaaaactatttctttat

SEQ ID NO: 131571 - DNA, 25 bp, Probe sequence
tactgttttagataatcaattcgca

SEQ ID NO: 131572 - DNA, 25 bp, Probe sequence
tttacttctattacgctaacccaat

SEQ ID NO: 131573 - DNA, 25 bp, Probe sequence
ttaagaattctattttctaccaaat

SEQ ID NO: 131574 - DNA, 25 bp, Probe sequence
attcaacctctttttgcagtattat

SEQ ID NO: 131575 - DNA, 25 bp, Probe sequence
acctctttttgcagtattattagaa

SEQ ID NO: 131576 - DNA, 25 bp, Probe sequence
aacctctttttgcagtattattaga

SEQ ID NO: 131577 - DNA, 25 bp, Probe sequence
caacctctttttgcagtattattag

SEQ ID NO: 131578 - DNA, 25 bp, Probe sequence
ctttttgcagtattattagaaatag

SEQ ID NO: 131579 - DNA, 25 bp, Probe sequence
ctctttttgcagtattattagaaat

SEQ ID NO: 131580 - DNA, 25 bp, Probe sequence
cctctttttgcagtattattagaaa

SEQ ID NO: 131581 - DNA, 25 bp, Probe sequence
gttattcaacctctttttgcagtat

SEQ ID NO: 131582 - DNA, 25 bp, Probe sequence
tgttattcaacctctttttgcagta

SEQ ID NO: 131583 - DNA, 25 bp, Probe sequence
tctttttgcagtattattagaaata

SEQ ID NO: 131584 - DNA, 25 bp, Probe sequence
tcaacctctttttgcagtattatta

SEQ ID NO: 131585 - DNA, 25 bp, Probe sequence
tagaaatagtataatgaatctttta

SEQ ID NO: 131586 - DNA, 25 bp, Probe sequence
tattcaacctctttttgcagtatta

SEQ ID NO: 131587 - DNA, 25 bp, Probe sequence
ttattcaacctctttttgcagtatt

SEQ ID NO: 131588 - DNA, 25 bp, Probe sequence
ttcaacctctttttgcagtattatt

SEQ ID NO: 131589 - DNA, 25 bp, Probe sequence
tttagaaccacctgttcctaatatc

SEQ ID NO: 131590 - DNA, 25 bp, Probe sequence
atcgctaaggtcttttaattatatt

SEQ ID NO: 131591 - DNA, 25 bp, Probe sequence
agaccttaacgatgcatttagaacc

SEQ ID NO: 131592 - DNA, 25 bp, Probe sequence
agaaccacctgttcctaatatcgct

SEQ ID NO: 131593 - DNA, 25 bp, Probe sequence
acgatgcatttagaaccacctgttc

SEQ ID NO: 131594 - DNA, 25 bp, Probe sequence
aaaaagaccttaacgatgcatttag

SEQ ID NO: 131595 - DNA, 25 bp, Probe sequence
aatatcgctaaggtcttttaattat

SEQ ID NO: 131596 - DNA, 25 bp, Probe sequence
cctgttcctaatatcgctaaggtct

SEQ ID NO: 131597 - DNA, 25 bp, Probe sequence
ccacctgttcctaatatcgctaagg

SEQ ID NO: 131598 - DNA, 25 bp, Probe sequence
gcatttagaaccacctgttcctaat

SEQ ID NO: 131599 - DNA, 25 bp, Probe sequence
gttcctaatatcgctaaggtctttt

SEQ ID NO: 131600 - DNA, 25 bp, Probe sequence
gatgcatttagaaccacctgttcct

SEQ ID NO: 131601 - DNA, 25 bp, Probe sequence
tcctaatatcgctaaggtcttttaa

SEQ ID NO: 131602 - DNA, 25 bp, Probe sequence
taacgatgcatttagaaccacctgt

SEQ ID NO: 131603 - DNA, 25 bp, Probe sequence
tagaaccacctgttcctaatatcgc

SEQ ID NO: 131604 - DNA, 25 bp, Probe sequence
aaccatctccctatagttattcctc

SEQ ID NO: 131605 - DNA, 25 bp, Probe sequence
aatggatctatcagtgccacatgtt

SEQ ID NO: 131606 - DNA, 25 bp, Probe sequence
gcctcggcatttcgattcatgtcac

SEQ ID NO: 131607 - DNA, 25 bp, Probe sequence
gcaacactaatagatcctcttacca

SEQ ID NO: 131608 - DNA, 25 bp, Probe sequence
gaactactttcctttatactcaatg

SEQ ID NO: 131609 - DNA, 25 bp, Probe sequence
gatcctcttaccattaatatatttc

SEQ ID NO: 131610 - DNA, 25 bp, Probe sequence
gattcatgtcactaaattttcacga

SEQ ID NO: 131611 - DNA, 25 bp, Probe sequence
gtattgcctctatcaatgcttgcta

SEQ ID NO: 131612 - DNA, 25 bp, Probe sequence
gtgcttaatgcagaactactttcct

SEQ ID NO: 131613 - DNA, 25 bp, Probe sequence
gtgccacatgttactgcaacactaa

SEQ ID NO: 131614 - DNA, 25 bp, Probe sequence
tgtcatgctctacttcgtgcttaat

SEQ ID NO: 131615 - DNA, 25 bp, Probe sequence
tccaaaaccatctccctatagttat

SEQ ID NO: 131616 - DNA, 25 bp, Probe sequence
tatagttattcctcgttgtcatgct

SEQ ID NO: 131617 - DNA, 25 bp, Probe sequence
tttatactcaatgacgcctcggcat

SEQ ID NO: 131618 - DNA, 25 bp, Probe sequence
ttcacgagtcataatactttattca

SEQ ID NO: 131619 - DNA, 25 bp, Probe sequence
atttgtgacaatttttagcattcta

SEQ ID NO: 131620 - DNA, 25 bp, Probe sequence
aatgacttactatataacctcctat

SEQ ID NO: 131621 - DNA, 25 bp, Probe sequence
cgccttaccctcatcatatttgatg

SEQ ID NO: 131622 - DNA, 25 bp, Probe sequence
gcctttaacaaactattgagctttc

SEQ ID NO: 131623 - DNA, 25 bp, Probe sequence
gaatttattttacacgtgactacac

SEQ ID NO: 131624 - DNA, 25 bp, Probe sequence
gaattacatttcatacaaactagcc

SEQ ID NO: 131625 - DNA, 25 bp, Probe sequence
gatgcatcattttatagtcaaagaa

SEQ ID NO: 131626 - DNA, 25 bp, Probe sequence
gatatctcaagctttagcacgtaat

SEQ ID NO: 131627 - DNA, 25 bp, Probe sequence
gtaatgacgctatttaaagccttta

SEQ ID NO: 131628 - DNA, 25 bp, Probe sequence
gtcaaattacactctatcgccaata

SEQ ID NO: 131629 - DNA, 25 bp, Probe sequence
ggatggctattcgacttaaatgact

SEQ ID NO: 131630 - DNA, 25 bp, Probe sequence
tacaaactagccaatcagacataaa

SEQ ID NO: 131631 - DNA, 25 bp, Probe sequence
tactatataacctcctattttccgc

SEQ ID NO: 131632 - DNA, 25 bp, Probe sequence
tatgtctcctaacctaattgaattt

SEQ ID NO: 131633 - DNA, 25 bp, Probe sequence
ttgagctttctatttttttcatttt

SEQ ID NO: 131634 - DNA, 25 bp, Probe sequence
atttcccatctgattaacatccaga

SEQ ID NO: 131635 - DNA, 25 bp, Probe sequence
atcaaaaaaatcatttcccatctga

SEQ ID NO: 131636 - DNA, 25 bp, Probe sequence
atcatttcccatctgattaacatcc

SEQ ID NO: 131637 - DNA, 25 bp, Probe sequence
atctgattaacatccagatgtggaa

SEQ ID NO: 131638 - DNA, 25 bp, Probe sequence
aaatcaaaaaaatcatttcccatct

SEQ ID NO: 131639 - DNA, 25 bp, Probe sequence
aaatcatttcccatctgattaacat

SEQ ID NO: 131640 - DNA, 25 bp, Probe sequence
aaaaatcatttcccatctgattaac

SEQ ID NO: 131641 - DNA, 25 bp, Probe sequence
aaaaaaatcatttcccatctgatta

SEQ ID NO: 131642 - DNA, 25 bp, Probe sequence
aacatccagatgtggaaatgatttt

SEQ ID NO: 131643 - DNA, 25 bp, Probe sequence
catttcccatctgattaacatccag

SEQ ID NO: 131644 - DNA, 25 bp, Probe sequence
gatgtggaaatgattttttatttta

SEQ ID NO: 131645 - DNA, 25 bp, Probe sequence
tcccatctgattaacatccagatgt

SEQ ID NO: 131646 - DNA, 25 bp, Probe sequence
tcatttcccatctgattaacatcca

SEQ ID NO: 131647 - DNA, 25 bp, Probe sequence
tcaaaaaaatcatttcccatctgat

SEQ ID NO: 131648 - DNA, 25 bp, Probe sequence
tttcccatctgattaacatccagat

SEQ ID NO: 131649 - DNA, 25 bp, Probe sequence
atattccatttgactctgaggtgat

SEQ ID NO: 131650 - DNA, 25 bp, Probe sequence
ataccgtcatgcctctatgaatact

SEQ ID NO: 131651 - DNA, 25 bp, Probe sequence
aaatccgatttaaaatcctgctcaa

SEQ ID NO: 131652 - DNA, 25 bp, Probe sequence
aaatcctgctcaaataccgtcatgc

SEQ ID NO: 131653 - DNA, 25 bp, Probe sequence
caatctactttgtttatgcgcataa

SEQ ID NO: 131654 - DNA, 25 bp, Probe sequence
catgcctctatgaatactatccaat

SEQ ID NO: 131655 - DNA, 25 bp, Probe sequence
ctcaaataccgtcatgcctctatga

SEQ ID NO: 131656 - DNA, 25 bp, Probe sequence
cgcataattttgttcgattagggaa

SEQ ID NO: 131657 - DNA, 25 bp, Probe sequence
gcaaagtggcctctcttaaatcgat

SEQ ID NO: 131658 - DNA, 25 bp, Probe sequence
gaatactatccaatatactaataaa

SEQ ID NO: 131659 - DNA, 25 bp, Probe sequence
gaattttatatcaatctactttgtt

SEQ ID NO: 131660 - DNA, 25 bp, Probe sequence
gttcgattagggaattgtttactat

SEQ ID NO: 131661 - DNA, 25 bp, Probe sequence
gtttactatattccatttgactctg

SEQ ID NO: 131662 - DNA, 25 bp, Probe sequence
gtggcctctcttaaatcgattataa

SEQ ID NO: 131663 - DNA, 25 bp, Probe sequence
tccatttgactctgaggtgatacga

SEQ ID NO: 131664 - DNA, 25 bp, Probe sequence
attatttttcacattttatacactt

SEQ ID NO: 131665 - DNA, 25 bp, Probe sequence
atacacttttcaaggtttatgactt

SEQ ID NO: 131666 - DNA, 25 bp, Probe sequence
aggtttatgacttgagaaatgttct

SEQ ID NO: 131667 - DNA, 25 bp, Probe sequence
actgacaattatttttcacatttta

SEQ ID NO: 131668 - DNA, 25 bp, Probe sequence
cacattttatacacttttcaaggtt

SEQ ID NO: 131669 - DNA, 25 bp, Probe sequence
gacaattatttttcacattttatac

SEQ ID NO: 131670 - DNA, 25 bp, Probe sequence
gacttgagaaatgttctcattttta

SEQ ID NO: 131671 - DNA, 25 bp, Probe sequence
ggaggtgtattgaaaagttaaggag

SEQ ID NO: 131672 - DNA, 25 bp, Probe sequence
tctcatttttatcatactggaggtg

SEQ ID NO: 131673 - DNA, 25 bp, Probe sequence
tcatttttatcatactggaggtgta

SEQ ID NO: 131674 - DNA, 25 bp, Probe sequence
taaactgacaattatttttcacatt

SEQ ID NO: 131675 - DNA, 25 bp, Probe sequence
tttatcatactggaggtgtattgaa

SEQ ID NO: 131676 - DNA, 25 bp, Probe sequence
tttttcacattttatacacttttca

SEQ ID NO: 131677 - DNA, 25 bp, Probe sequence
ttttcacattttatacacttttcaa

SEQ ID NO: 131678 - DNA, 25 bp, Probe sequence
ttcacattttatacacttttcaagg

SEQ ID NO: 131679 - DNA, 25 bp, Probe sequence
attacgtaaaaaaatcggacagctg

SEQ ID NO: 131680 - DNA, 25 bp, Probe sequence
acatgtgctttaagggcattgtgta

SEQ ID NO: 131681 - DNA, 25 bp, Probe sequence
aagatttctcagttgtccgatttta

SEQ ID NO: 131682 - DNA, 25 bp, Probe sequence
aatcggacagctgaaaaatctttaa

SEQ ID NO: 131683 - DNA, 25 bp, Probe sequence
aatctttaagatttctcagttgtcc

SEQ ID NO: 131684 - DNA, 25 bp, Probe sequence
gaatttgccgtatgtattagattac

SEQ ID NO: 131685 - DNA, 25 bp, Probe sequence
gatttctcagttgtccgattttaaa

SEQ ID NO: 131686 - DNA, 25 bp, Probe sequence
gattaaagttgaatttgccgtatgt

SEQ ID NO: 131687 - DNA, 25 bp, Probe sequence
gttgtccgattttaaatatagctat

SEQ ID NO: 131688 - DNA, 25 bp, Probe sequence
gggcattgtgtatgagtcttttttg

SEQ ID NO: 131689 - DNA, 25 bp, Probe sequence
ggactcatacatgtgctttaagggc

SEQ ID NO: 131690 - DNA, 25 bp, Probe sequence
tgtgtatgagtcttttttgattaaa

SEQ ID NO: 131691 - DNA, 25 bp, Probe sequence
taaactactaaaaaggactcataca

SEQ ID NO: 131692 - DNA, 25 bp, Probe sequence
tacattaaacgtattttttgatata

SEQ ID NO: 131693 - DNA, 25 bp, Probe sequence
ttctcagttgtccgattttaaatat

SEQ ID NO: 131694 - DNA, 25 bp, Probe sequence
acatgtatatgttaaagcaagcagt

SEQ ID NO: 131695 - DNA, 25 bp, Probe sequence
aacttcctgttttaattgatacgct

SEQ ID NO: 131696 - DNA, 25 bp, Probe sequence
aactttgcaatatattaaatctttt

SEQ ID NO: 131697 - DNA, 25 bp, Probe sequence
aagcaagcagtggtaaatgtaaatt

SEQ ID NO: 131698 - DNA, 25 bp, Probe sequence
aatcaatcataattatttgacaaca

SEQ ID NO: 131699 - DNA, 25 bp, Probe sequence
aattattcattaactttgcaatata

SEQ ID NO: 131700 - DNA, 25 bp, Probe sequence
cttcctgttttaattgatacgctgt

SEQ ID NO: 131701 - DNA, 25 bp, Probe sequence
cctgttttaattgatacgctgtaac

SEQ ID NO: 131702 - DNA, 25 bp, Probe sequence
gctaacgattgttttaatctacatt

SEQ ID NO: 131703 - DNA, 25 bp, Probe sequence
gataaatatcaaatcaatcataatt

SEQ ID NO: 131704 - DNA, 25 bp, Probe sequence
gatacgctgtaacaaaatactatag

SEQ ID NO: 131705 - DNA, 25 bp, Probe sequence
tactatagttagtgcttacatgtat

SEQ ID NO: 131706 - DNA, 25 bp, Probe sequence
tagataacttcctgttttaattgat

SEQ ID NO: 131707 - DNA, 25 bp, Probe sequence
tagttagtgcttacatgtatatgtt

SEQ ID NO: 131708 - DNA, 25 bp, Probe sequence
tttgacaacaaatagctaacgattg

SEQ ID NO: 131709 - DNA, 25 bp, Probe sequence
ataccttacgcattggactgctttg

SEQ ID NO: 131710 - DNA, 25 bp, Probe sequence
ataaacaagcagtccagtgcgtatc

SEQ ID NO: 131711 - DNA, 25 bp, Probe sequence
atcatcataccttacgcattggact

SEQ ID NO: 131712 - DNA, 25 bp, Probe sequence
agcagtccagtgcgtatcatcatac

SEQ ID NO: 131713 - DNA, 25 bp, Probe sequence
accttacgcattggactgctttgct

SEQ ID NO: 131714 - DNA, 25 bp, Probe sequence
aacaagcagtccagtgcgtatcatc

SEQ ID NO: 131715 - DNA, 25 bp, Probe sequence
caagcagtccagtgcgtatcatcat

SEQ ID NO: 131716 - DNA, 25 bp, Probe sequence
catcataccttacgcattggactgc

SEQ ID NO: 131717 - DNA, 25 bp, Probe sequence
cagtccagtgcgtatcatcatacct

SEQ ID NO: 131718 - DNA, 25 bp, Probe sequence
cttacgcattggactgctttgctat

SEQ ID NO: 131719 - DNA, 25 bp, Probe sequence
ccagtgcgtatcatcataccttacg

SEQ ID NO: 131720 - DNA, 25 bp, Probe sequence
gtatcatcataccttacgcattgga

SEQ ID NO: 131721 - DNA, 25 bp, Probe sequence
gtccagtgcgtatcatcatacctta

SEQ ID NO: 131722 - DNA, 25 bp, Probe sequence
tcataccttacgcattggactgctt

SEQ ID NO: 131723 - DNA, 25 bp, Probe sequence
tacgcattggactgctttgctatgt

SEQ ID NO: 131724 - DNA, 25 bp, Probe sequence
atatcatacgcctatctttacagaa

SEQ ID NO: 131725 - DNA, 25 bp, Probe sequence
aatgattgagggttgatatctcggg

SEQ ID NO: 131726 - DNA, 25 bp, Probe sequence
caaagtcctcggcactacactttgc

SEQ ID NO: 131727 - DNA, 25 bp, Probe sequence
ccactttccctgtgatgaacattgt

SEQ ID NO: 131728 - DNA, 25 bp, Probe sequence
gcattcaaggactttcaaatgattg

SEQ ID NO: 131729 - DNA, 25 bp, Probe sequence
gaattatatatatcatacgcctatc

SEQ ID NO: 131730 - DNA, 25 bp, Probe sequence
gacgtagcattcaaggactttcaaa

SEQ ID NO: 131731 - DNA, 25 bp, Probe sequence
gttaaataccaaagtcctcggcact

SEQ ID NO: 131732 - DNA, 25 bp, Probe sequence
ggcactacactttgccatgacgtag

SEQ ID NO: 131733 - DNA, 25 bp, Probe sequence
tcctcggcactacactttgccatga

SEQ ID NO: 131734 - DNA, 25 bp, Probe sequence
taaataccaaagtcctcggcactac

SEQ ID NO: 131735 - DNA, 25 bp, Probe sequence
tacactttgccatgacgtagcattc

SEQ ID NO: 131736 - DNA, 25 bp, Probe sequence
tacgcctatctttacagaattttca

SEQ ID NO: 131737 - DNA, 25 bp, Probe sequence
ttgccatgacgtagcattcaaggac

SEQ ID NO: 131738 - DNA, 25 bp, Probe sequence
ttccctgtgatgaacattgtaattt

SEQ ID NO: 131739 - DNA, 25 bp, Probe sequence
attttagctaactttatttctgatt

SEQ ID NO: 131740 - DNA, 25 bp, Probe sequence
atagccgacaacttcatctgtgaaa

SEQ ID NO: 131741 - DNA, 25 bp, Probe sequence
atgactaattcattcccgtatttat

SEQ ID NO: 131742 - DNA, 25 bp, Probe sequence
acaggagtcgcccactatttttgtg

SEQ ID NO: 131743 - DNA, 25 bp, Probe sequence
acaatcatagtttggcttcttttta

SEQ ID NO: 131744 - DNA, 25 bp, Probe sequence
aatggggacaggagtcgcccactat

SEQ ID NO: 131745 - DNA, 25 bp, Probe sequence
gccttcatttcatttatatttttgg

SEQ ID NO: 131746 - DNA, 25 bp, Probe sequence
gaaaatagccgacaacttcatctgt

SEQ ID NO: 131747 - DNA, 25 bp, Probe sequence
gtcgcccactatttttgtgtcttca

SEQ ID NO: 131748 - DNA, 25 bp, Probe sequence
tgtgtcttcaatttcatgatcatta

SEQ ID NO: 131749 - DNA, 25 bp, Probe sequence
tgatcattatttaacattagtcatg

SEQ ID NO: 131750 - DNA, 25 bp, Probe sequence
tgaaatcaccggccttttattttag

SEQ ID NO: 131751 - DNA, 25 bp, Probe sequence
tcatctgtgaaatcaccggcctttt

SEQ ID NO: 131752 - DNA, 25 bp, Probe sequence
ttttggtcatattactttatatcta

SEQ ID NO: 131753 - DNA, 25 bp, Probe sequence
ttcattcccgtatttattaattaca

SEQ ID NO: 131754 - DNA, 25 bp, Probe sequence
aaatcctaccacgaaagctttcaag

SEQ ID NO: 131755 - DNA, 25 bp, Probe sequence
acaatgtacaattaactctattttc

SEQ ID NO: 131756 - DNA, 25 bp, Probe sequence
aacaacacattaacttctcatttag

SEQ ID NO: 131757 - DNA, 25 bp, Probe sequence
aacgcaaaaaagtctggcaccaata

SEQ ID NO: 131758 - DNA, 25 bp, Probe sequence
ctctattttcagttcacttactcac

SEQ ID NO: 131759 - DNA, 25 bp, Probe sequence
gcaccaatacaatagatgccagact

SEQ ID NO: 131760 - DNA, 25 bp, Probe sequence
gatgccagactaagagtctactata

SEQ ID NO: 131761 - DNA, 25 bp, Probe sequence
gtattccttctctcaatttacttat

SEQ ID NO: 131762 - DNA, 25 bp, Probe sequence
ggtcaattaatcatcacaatgtaca

SEQ ID NO: 131763 - DNA, 25 bp, Probe sequence
tgtacactcttttaatgtctgccaa

SEQ ID NO: 131764 - DNA, 25 bp, Probe sequence
tgaactttttaaggttgtacactct

SEQ ID NO: 131765 - DNA, 25 bp, Probe sequence
taatgtctgccaattaggtcaatta

SEQ ID NO: 131766 - DNA, 25 bp, Probe sequence
taaatgtctatttagtgaacttttt

SEQ ID NO: 131767 - DNA, 25 bp, Probe sequence
ttttcagttcacttactcacacacc

SEQ ID NO: 131768 - DNA, 25 bp, Probe sequence
ttacttatataaatcctaccacgaa

SEQ ID NO: 131769 - DNA, 25 bp, Probe sequence
attatcaatcaacatttcgccactt

SEQ ID NO: 131770 - DNA, 25 bp, Probe sequence
aatcaacatttcgccacttatacaa

SEQ ID NO: 131771 - DNA, 25 bp, Probe sequence
caatggcactcaccttatctaattt

SEQ ID NO: 131772 - DNA, 25 bp, Probe sequence
caacatttcgccacttatacaaaac

SEQ ID NO: 131773 - DNA, 25 bp, Probe sequence
caaagtgagtgtcttgtgttcttac

SEQ ID NO: 131774 - DNA, 25 bp, Probe sequence
catttcgccacttatacaaaacaaa

SEQ ID NO: 131775 - DNA, 25 bp, Probe sequence
gagtgtcttgtgttcttacaatggc

SEQ ID NO: 131776 - DNA, 25 bp, Probe sequence
gttcttacaatggcactcaccttat

SEQ ID NO: 131777 - DNA, 25 bp, Probe sequence
gttactaacagtcatgaaataatct

SEQ ID NO: 131778 - DNA, 25 bp, Probe sequence
gtgttcttacaatggcactcacctt

SEQ ID NO: 131779 - DNA, 25 bp, Probe sequence
tgcgtttagtccaaattatcaatca

SEQ ID NO: 131780 - DNA, 25 bp, Probe sequence
tcaatcaacatttcgccacttatac

SEQ ID NO: 131781 - DNA, 25 bp, Probe sequence
tatgattcattttgcgtttagtcca

SEQ ID NO: 131782 - DNA, 25 bp, Probe sequence
ttacaatggcactcaccttatctaa

SEQ ID NO: 131783 - DNA, 25 bp, Probe sequence
ttccttttacgattgttactaacag

SEQ ID NO: 131784 - DNA, 25 bp, Probe sequence
attagcctcggacagcggcaatgat

SEQ ID NO: 131785 - DNA, 25 bp, Probe sequence
agcctcggacagcggcaatgatgat

SEQ ID NO: 131786 - DNA, 25 bp, Probe sequence
aaaatcttatgcatcattatttgaa

SEQ ID NO: 131787 - DNA, 25 bp, Probe sequence
aaaattcaaaatcttatgcatcatt

SEQ ID NO: 131788 - DNA, 25 bp, Probe sequence
aacaatacaataggtccacgaaata

SEQ ID NO: 131789 - DNA, 25 bp, Probe sequence
aacggtaatttctatctcaataaat

SEQ ID NO: 131790 - DNA, 25 bp, Probe sequence
aattagcctcggacagcggcaatga

SEQ ID NO: 131791 - DNA, 25 bp, Probe sequence
aattcaaaatcttatgcatcattat

SEQ ID NO: 131792 - DNA, 25 bp, Probe sequence
cctcggacagcggcaatgatgatta

SEQ ID NO: 131793 - DNA, 25 bp, Probe sequence
gaaaacaatacaataggtccacgaa

SEQ ID NO: 131794 - DNA, 25 bp, Probe sequence
gtttttgttttatatgacaatcaat

SEQ ID NO: 131795 - DNA, 25 bp, Probe sequence
ggcaatgatgattatgcatgatgaa

SEQ ID NO: 131796 - DNA, 25 bp, Probe sequence
tacaataggtccacgaaataaacgg

SEQ ID NO: 131797 - DNA, 25 bp, Probe sequence
tatgacaatcaattatatacttata

SEQ ID NO: 131798 - DNA, 25 bp, Probe sequence
ttagcctcggacagcggcaatgatg

SEQ ID NO: 131799 - DNA, 25 bp, Probe sequence
attatattgattcacaaaattgaca

SEQ ID NO: 131800 - DNA, 25 bp, Probe sequence
ataataatgcaaatttcatacaatt

SEQ ID NO: 131801 - DNA, 25 bp, Probe sequence
atcctgtttcgatttatctcaaaat

SEQ ID NO: 131802 - DNA, 25 bp, Probe sequence
atgaatcctgtttcgatttatctca

SEQ ID NO: 131803 - DNA, 25 bp, Probe sequence
aattttatgaatcctgtttcgattt

SEQ ID NO: 131804 - DNA, 25 bp, Probe sequence
cctgtttcgatttatctcaaaatgt

SEQ ID NO: 131805 - DNA, 25 bp, Probe sequence
gctccccctaattattaattttatg

SEQ ID NO: 131806 - DNA, 25 bp, Probe sequence
gaatcctgtttcgatttatctcaaa

SEQ ID NO: 131807 - DNA, 25 bp, Probe sequence
gtttcgatttatctcaaaatgtaat

SEQ ID NO: 131808 - DNA, 25 bp, Probe sequence
tgtgctccccctaattattaatttt

SEQ ID NO: 131809 - DNA, 25 bp, Probe sequence
tgaatcctgtttcgatttatctcaa

SEQ ID NO: 131810 - DNA, 25 bp, Probe sequence
tgctccccctaattattaattttat

SEQ ID NO: 131811 - DNA, 25 bp, Probe sequence
tatgaatcctgtttcgatttatctc

SEQ ID NO: 131812 - DNA, 25 bp, Probe sequence
ttaattttatgaatcctgtttcgat

SEQ ID NO: 131813 - DNA, 25 bp, Probe sequence
ttgattcacaaaattgacaataact

SEQ ID NO: 131814 - DNA, 25 bp, Probe sequence
aggcaacgaatgttaccttgacttc

SEQ ID NO: 131815 - DNA, 25 bp, Probe sequence
agaagccaaggcaacgaatgttacc

SEQ ID NO: 131816 - DNA, 25 bp, Probe sequence
agaattgcttttattaactttcaat

SEQ ID NO: 131817 - DNA, 25 bp, Probe sequence
aacgaatgttaccttgacttctaat

SEQ ID NO: 131818 - DNA, 25 bp, Probe sequence
aagccaaggcaacgaatgttacctt

SEQ ID NO: 131819 - DNA, 25 bp, Probe sequence
aatgttaccttgacttctaatacat

SEQ ID NO: 131820 - DNA, 25 bp, Probe sequence
caacgaatgttaccttgacttctaa

SEQ ID NO: 131821 - DNA, 25 bp, Probe sequence
cgaatgttaccttgacttctaatac

SEQ ID NO: 131822 - DNA, 25 bp, Probe sequence
gcaacgaatgttaccttgacttcta

SEQ ID NO: 131823 - DNA, 25 bp, Probe sequence
gaatgttaccttgacttctaataca

SEQ ID NO: 131824 - DNA, 25 bp, Probe sequence
ggcaacgaatgttaccttgacttct

SEQ ID NO: 131825 - DNA, 25 bp, Probe sequence
tgttaccttgacttctaatacatat

SEQ ID NO: 131826 - DNA, 25 bp, Probe sequence
tgcttttattaactttcaattatgt

SEQ ID NO: 131827 - DNA, 25 bp, Probe sequence
taactttcaattatgtacctaacct

SEQ ID NO: 131828 - DNA, 25 bp, Probe sequence
tatatttttctaaagaattgctttt

SEQ ID NO: 131829 - DNA, 25 bp, Probe sequence
atatattgtgtctactcattacgtt

SEQ ID NO: 131830 - DNA, 25 bp, Probe sequence
catatttctacacaattatttcatt

SEQ ID NO: 131831 - DNA, 25 bp, Probe sequence
ccccttcttcctatatattgtgtct

SEQ ID NO: 131832 - DNA, 25 bp, Probe sequence
gaaattcatatttctacacaattat

SEQ ID NO: 131833 - DNA, 25 bp, Probe sequence
gtctactcattacgttataccacta

SEQ ID NO: 131834 - DNA, 25 bp, Probe sequence
tgtcatttcgacatgtttatgcaac

SEQ ID NO: 131835 - DNA, 25 bp, Probe sequence
tcaaatttttattagtctgttaact

SEQ ID NO: 131836 - DNA, 25 bp, Probe sequence
tactcattacgttataccactatat

SEQ ID NO: 131837 - DNA, 25 bp, Probe sequence
taccccttcttcctatatattgtgt

SEQ ID NO: 131838 - DNA, 25 bp, Probe sequence
ttagtctgttaactaaaacgtcaca

SEQ ID NO: 131839 - DNA, 25 bp, Probe sequence
ttacgttataccactatatatagta

SEQ ID NO: 131840 - DNA, 25 bp, Probe sequence
taaaacgtcacaaagttattaacat

SEQ ID NO: 131841 - DNA, 25 bp, Probe sequence
ttaaaattgttctgtcatttcgaca

SEQ ID NO: 131842 - DNA, 25 bp, Probe sequence
ttcttcctatatattgtgtctactc

SEQ ID NO: 131843 - DNA, 25 bp, Probe sequence
ttgtgtctactcattacgttatacc

SEQ ID NO: 131844 - DNA, 25 bp, Probe sequence
attttcctacttgataacatggcat

SEQ ID NO: 131845 - DNA, 25 bp, Probe sequence
atacaatttacataatccccctctt

SEQ ID NO: 131846 - DNA, 25 bp, Probe sequence
atctatcatttttattattgctttc

SEQ ID NO: 131847 - DNA, 25 bp, Probe sequence
actaatccttgtatatcctgtcctg

SEQ ID NO: 131848 - DNA, 25 bp, Probe sequence
aaatctggctaaaggtcgctatgat

SEQ ID NO: 131849 - DNA, 25 bp, Probe sequence
aacatggcatgactaatccttgtat

SEQ ID NO: 131850 - DNA, 25 bp, Probe sequence
cttcaaccagatttcaatttatcca

SEQ ID NO: 131851 - DNA, 25 bp, Probe sequence
gtaacgacttcaaccagatttcaat

SEQ ID NO: 131852 - DNA, 25 bp, Probe sequence
gtcctgtatttcattttgatctatc

SEQ ID NO: 131853 - DNA, 25 bp, Probe sequence
gtgaagtttgattttcctacttgat

SEQ ID NO: 131854 - DNA, 25 bp, Probe sequence
tcgctatgatagtaacgacttcaac

SEQ ID NO: 131855 - DNA, 25 bp, Probe sequence
tctattgcacaaaaaatctggctaa

SEQ ID NO: 131856 - DNA, 25 bp, Probe sequence
tatcctgtcctgtatttcattttga

SEQ ID NO: 131857 - DNA, 25 bp, Probe sequence
ttattattgctttctattgcacaaa

SEQ ID NO: 131858 - DNA, 25 bp, Probe sequence
ttctccctccacttttaatacaatt

SEQ ID NO: 131859 - DNA, 25 bp, Probe sequence
atatctttttacatcattacacctt

SEQ ID NO: 131860 - DNA, 25 bp, Probe sequence
atcctttatatctttttacatcatt

SEQ ID NO: 131861 - DNA, 25 bp, Probe sequence
agcaacatcctttatatctttttac

SEQ ID NO: 131862 - DNA, 25 bp, Probe sequence
acatcattacaccttaaaatattta

SEQ ID NO: 131863 - DNA, 25 bp, Probe sequence
acatcctttatatctttttacatca

SEQ ID NO: 131864 - DNA, 25 bp, Probe sequence
aacatcctttatatctttttacatc

SEQ ID NO: 131865 - DNA, 25 bp, Probe sequence
cctttatatctttttacatcattac

SEQ ID NO: 131866 - DNA, 25 bp, Probe sequence
gcaacatcctttatatctttttaca

SEQ ID NO: 131867 - DNA, 25 bp, Probe sequence
gagcaacatcctttatatcttttta

SEQ ID NO: 131868 - DNA, 25 bp, Probe sequence
gttgagcaacatcctttatatcttt

SEQ ID NO: 131869 - DNA, 25 bp, Probe sequence
tgagcaacatcctttatatcttttt

SEQ ID NO: 131870 - DNA, 25 bp, Probe sequence
tctttttacatcattacaccttaaa

SEQ ID NO: 131871 - DNA, 25 bp, Probe sequence
tatctttttacatcattacacctta

SEQ ID NO: 131872 - DNA, 25 bp, Probe sequence
ttatatctttttacatcattacacc

SEQ ID NO: 131873 - DNA, 25 bp, Probe sequence
ttacatcattacaccttaaaatatt

SEQ ID NO: 131874 - DNA, 25 bp, Probe sequence
attagtacatcattaagaggctctt

SEQ ID NO: 131875 - DNA, 25 bp, Probe sequence
atttgcatactaagcgctcaatttt

SEQ ID NO: 131876 - DNA, 25 bp, Probe sequence
atcagtaattcagacaaaactttga

SEQ ID NO: 131877 - DNA, 25 bp, Probe sequence
agcctttcagtaaaataggtcaaat

SEQ ID NO: 131878 - DNA, 25 bp, Probe sequence
aaatgcctcctaatgacatactatt

SEQ ID NO: 131879 - DNA, 25 bp, Probe sequence
aaaactttgattatgtcgtgtcagt

SEQ ID NO: 131880 - DNA, 25 bp, Probe sequence
gcctcctaatgacatactattagta

SEQ ID NO: 131881 - DNA, 25 bp, Probe sequence
gcatactaagcgctcaattttaaat

SEQ ID NO: 131882 - DNA, 25 bp, Probe sequence
gaggctcttgtgttatttgcatact

SEQ ID NO: 131883 - DNA, 25 bp, Probe sequence
gttgcttgaatgacattatcagtaa

SEQ ID NO: 131884 - DNA, 25 bp, Probe sequence
gtgttatttgcatactaagcgctca

SEQ ID NO: 131885 - DNA, 25 bp, Probe sequence
ggctcttgtgttatttgcatactaa

SEQ ID NO: 131886 - DNA, 25 bp, Probe sequence
taagaggctcttgtgttatttgcat

SEQ ID NO: 131887 - DNA, 25 bp, Probe sequence
ttctaaatataaaatgcctcctaat

SEQ ID NO: 131888 - DNA, 25 bp, Probe sequence
ttgattatgtcgtgtcagttattaa

SEQ ID NO: 131889 - DNA, 25 bp, Probe sequence
atatctttcgttataacccctcatt

SEQ ID NO: 131890 - DNA, 25 bp, Probe sequence
agcgtgatacatttttcgagcacac

SEQ ID NO: 131891 - DNA, 25 bp, Probe sequence
aagtgcgcgtttacaccgcgaacat

SEQ ID NO: 131892 - DNA, 25 bp, Probe sequence
catacatactgataccatacgttag

SEQ ID NO: 131893 - DNA, 25 bp, Probe sequence
cccctacacagccttttttatattg

SEQ ID NO: 131894 - DNA, 25 bp, Probe sequence
gacaattagaccgctctttaaacta

SEQ ID NO: 131895 - DNA, 25 bp, Probe sequence
gacacactcatacattgttacacgc

SEQ ID NO: 131896 - DNA, 25 bp, Probe sequence
gagctgcccaactcatataatcctt

SEQ ID NO: 131897 - DNA, 25 bp, Probe sequence
gtcactttgtatcgtgtgcgaccga

SEQ ID NO: 131898 - DNA, 25 bp, Probe sequence
gtgattgtttattaagccctccttt

SEQ ID NO: 131899 - DNA, 25 bp, Probe sequence
taatcatccttattttctattttta

SEQ ID NO: 131900 - DNA, 25 bp, Probe sequence
taagccctcctttatcttattaaat

SEQ ID NO: 131901 - DNA, 25 bp, Probe sequence
taacccctcattataatcatcctta

SEQ ID NO: 131902 - DNA, 25 bp, Probe sequence
tagtccagctacaatatctttcgtt

SEQ ID NO: 131903 - DNA, 25 bp, Probe sequence
tatgttgttgctcaacctatcccat

SEQ ID NO: 131904 - DNA, 25 bp, Probe sequence
atttttcttattgatatttctattc

SEQ ID NO: 131905 - DNA, 25 bp, Probe sequence
atcgttacattatttcgagtatcag

SEQ ID NO: 131906 - DNA, 25 bp, Probe sequence
agttacccattttatgtgttgcata

SEQ ID NO: 131907 - DNA, 25 bp, Probe sequence
agacattttatcttatcggttcaaa

SEQ ID NO: 131908 - DNA, 25 bp, Probe sequence
aaacaaatttgactcatctttttca

SEQ ID NO: 131909 - DNA, 25 bp, Probe sequence
gacacgatgcatgatttttgaattt

SEQ ID NO: 131910 - DNA, 25 bp, Probe sequence
gacatttctttgtgacatcgcttca

SEQ ID NO: 131911 - DNA, 25 bp, Probe sequence
gacatcgcttcatcagtgtaacaac

SEQ ID NO: 131912 - DNA, 25 bp, Probe sequence
gactcatctttttcaatatctaaat

SEQ ID NO: 131913 - DNA, 25 bp, Probe sequence
gatttcgtgatgttagttacccatt

SEQ ID NO: 131914 - DNA, 25 bp, Probe sequence
gtatttcgggcttcgtttgataacg

SEQ ID NO: 131915 - DNA, 25 bp, Probe sequence
gtatttccaaaatatcacttgttat

SEQ ID NO: 131916 - DNA, 25 bp, Probe sequence
gtatcagtatgtatttcgggcttcg

SEQ ID NO: 131917 - DNA, 25 bp, Probe sequence
tgcgtagtaatcaatcgttatcatt

SEQ ID NO: 131918 - DNA, 25 bp, Probe sequence
ttatcattgttatttatcgttacat

SEQ ID NO: 131919 - DNA, 25 bp, Probe sequence
atgcacctcatttctttgttagttc

SEQ ID NO: 131920 - DNA, 25 bp, Probe sequence
acctcatttctttgttagttctata

SEQ ID NO: 131921 - DNA, 25 bp, Probe sequence
aaaatgttactagtatacttacaat

SEQ ID NO: 131922 - DNA, 25 bp, Probe sequence
aatgttactagtatacttacaatat

SEQ ID NO: 131923 - DNA, 25 bp, Probe sequence
cacctcatttctttgttagttctat

SEQ ID NO: 131924 - DNA, 25 bp, Probe sequence
catgcacctcatttctttgttagtt

SEQ ID NO: 131925 - DNA, 25 bp, Probe sequence
catttctttgttagttctatattaa

SEQ ID NO: 131926 - DNA, 25 bp, Probe sequence
ctcatttctttgttagttctatatt

SEQ ID NO: 131927 - DNA, 25 bp, Probe sequence
cctcatttctttgttagttctatat

SEQ ID NO: 131928 - DNA, 25 bp, Probe sequence
gcacctcatttctttgttagttcta

SEQ ID NO: 131929 - DNA, 25 bp, Probe sequence
gttactagtatacttacaatattga

SEQ ID NO: 131930 - DNA, 25 bp, Probe sequence
tgcacctcatttctttgttagttct

SEQ ID NO: 131931 - DNA, 25 bp, Probe sequence
tctttgttagttctatattaaaaca

SEQ ID NO: 131932 - DNA, 25 bp, Probe sequence
tcatttctttgttagttctatatta

SEQ ID NO: 131933 - DNA, 25 bp, Probe sequence
tactagtatacttacaatattgaaa

SEQ ID NO: 131934 - DNA, 25 bp, Probe sequence
attgctcaaaattcctcttttacac

SEQ ID NO: 131935 - DNA, 25 bp, Probe sequence
atattttcacacgcttctattctaa

SEQ ID NO: 131936 - DNA, 25 bp, Probe sequence
atatattcattttttgttattctaa

SEQ ID NO: 131937 - DNA, 25 bp, Probe sequence
atcactctgtttacatatttttaac

SEQ ID NO: 131938 - DNA, 25 bp, Probe sequence
acacgcttctattctaacgctttct

SEQ ID NO: 131939 - DNA, 25 bp, Probe sequence
aactaaaactacataattgctcaaa

SEQ ID NO: 131940 - DNA, 25 bp, Probe sequence
aacgctttctataacaaattgtcat

SEQ ID NO: 131941 - DNA, 25 bp, Probe sequence
aattctatattttcacacgcttcta

SEQ ID NO: 131942 - DNA, 25 bp, Probe sequence
aattcctcttttacactgaagacat

SEQ ID NO: 131943 - DNA, 25 bp, Probe sequence
aattgtcatatatattcattttttg

SEQ ID NO: 131944 - DNA, 25 bp, Probe sequence
gcttctattctaacgctttctataa

SEQ ID NO: 131945 - DNA, 25 bp, Probe sequence
gacatagtcatatactcaggaggat

SEQ ID NO: 131946 - DNA, 25 bp, Probe sequence
gttattctaaatcactctgtttaca

SEQ ID NO: 131947 - DNA, 25 bp, Probe sequence
ttttccacctcaaattatatttaat

SEQ ID NO: 131948 - DNA, 25 bp, Probe sequence
ttcacacgcttctattctaacgctt

SEQ ID NO: 131949 - DNA, 25 bp, Probe sequence
attcccgagcactataacaaggtgt

SEQ ID NO: 131950 - DNA, 25 bp, Probe sequence
agcataaaaaaattcccgagcacta

SEQ ID NO: 131951 - DNA, 25 bp, Probe sequence
aaattcccgagcactataacaaggt

SEQ ID NO: 131952 - DNA, 25 bp, Probe sequence
aaaattcccgagcactataacaagg

SEQ ID NO: 131953 - DNA, 25 bp, Probe sequence
aaaaattcccgagcactataacaag

SEQ ID NO: 131954 - DNA, 25 bp, Probe sequence
aattcccgagcactataacaaggtg

SEQ ID NO: 131955 - DNA, 25 bp, Probe sequence
cactataacaaggtgttcgggaatt

SEQ ID NO: 131956 - DNA, 25 bp, Probe sequence
cataaaaaaattcccgagcactata

SEQ ID NO: 131957 - DNA, 25 bp, Probe sequence
cgagcactataacaaggtgttcggg

SEQ ID NO: 131958 - DNA, 25 bp, Probe sequence
cccgagcactataacaaggtgttcg

SEQ ID NO: 131959 - DNA, 25 bp, Probe sequence
gcataaaaaaattcccgagcactat

SEQ ID NO: 131960 - DNA, 25 bp, Probe sequence
gcactataacaaggtgttcgggaat

SEQ ID NO: 131961 - DNA, 25 bp, Probe sequence
gagcactataacaaggtgttcggga

SEQ ID NO: 131962 - DNA, 25 bp, Probe sequence
tcccgagcactataacaaggtgttc

SEQ ID NO: 131963 - DNA, 25 bp, Probe sequence
ttcccgagcactataacaaggtgtt

SEQ ID NO: 131964 - DNA, 25 bp, Probe sequence
attatacactttttgacatattttt

SEQ ID NO: 131965 - DNA, 25 bp, Probe sequence
atgcgaagatttttaacatttctga

SEQ ID NO: 131966 - DNA, 25 bp, Probe sequence
agatgtgttgaaactgagttcaatt

SEQ ID NO: 131967 - DNA, 25 bp, Probe sequence
gcgaagatttttaacatttctgatg

SEQ ID NO: 131968 - DNA, 25 bp, Probe sequence
gaatgcgaagatttttaacatttct

SEQ ID NO: 131969 - DNA, 25 bp, Probe sequence
gaaactgagttcaattaaattatat

SEQ ID NO: 131970 - DNA, 25 bp, Probe sequence
gagttcaattaaattatatgttttt

SEQ ID NO: 131971 - DNA, 25 bp, Probe sequence
gtttttattatacactttttgacat

SEQ ID NO: 131972 - DNA, 25 bp, Probe sequence
tgcgaagatttttaacatttctgat

SEQ ID NO: 131973 - DNA, 25 bp, Probe sequence
tatacactttttgacatatttttta

SEQ ID NO: 131974 - DNA, 25 bp, Probe sequence
tattatacactttttgacatatttt

SEQ ID NO: 131975 - DNA, 25 bp, Probe sequence
tttttattatacactttttgacata

SEQ ID NO: 131976 - DNA, 25 bp, Probe sequence
tttattatacactttttgacatatt

SEQ ID NO: 131977 - DNA, 25 bp, Probe sequence
ttattatacactttttgacatattt

SEQ ID NO: 131978 - DNA, 25 bp, Probe sequence
ttatacactttttgacatatttttt

SEQ ID NO: 131979 - DNA, 25 bp, Probe sequence
ataagctaaatctaagtttcacgag

SEQ ID NO: 131980 - DNA, 25 bp, Probe sequence
aaattgcgccaatcatattaataca

SEQ ID NO: 131981 - DNA, 25 bp, Probe sequence
aacactcagaaatgttagtcgtgcg

SEQ ID NO: 131982 - DNA, 25 bp, Probe sequence
aatagtttgtatctctcactctgtg

SEQ ID NO: 131983 - DNA, 25 bp, Probe sequence
ctcactctgtgtatttaatgcaacc

SEQ ID NO: 131984 - DNA, 25 bp, Probe sequence
cgagaaacatttttgcgtatcagca

SEQ ID NO: 131985 - DNA, 25 bp, Probe sequence
gcgccaatcatattaatacaaattt

SEQ ID NO: 131986 - DNA, 25 bp, Probe sequence
gcgtatcagcaaattgcgccaatca

SEQ ID NO: 131987 - DNA, 25 bp, Probe sequence
gaaatgttagtcgtgcgtaaatagt

SEQ ID NO: 131988 - DNA, 25 bp, Probe sequence
gtttcacgagaaacatttttgcgta

SEQ ID NO: 131989 - DNA, 25 bp, Probe sequence
gtttgtatctctcactctgtgtatt

SEQ ID NO: 131990 - DNA, 25 bp, Probe sequence
gtatctctcactctgtgtatttaat

SEQ ID NO: 131991 - DNA, 25 bp, Probe sequence
gtcgtgcgtaaatagtttgtatctc

SEQ ID NO: 131992 - DNA, 25 bp, Probe sequence
tgcaaccacatattttccaggaaat

SEQ ID NO: 131993 - DNA, 25 bp, Probe sequence
taatgcaaccacatattttccagga

SEQ ID NO: 131994 - DNA, 25 bp, Probe sequence
attctactttatcaacattttacgc

SEQ ID NO: 131995 - DNA, 25 bp, Probe sequence
atcaattcactttaaaatcattttc

SEQ ID NO: 131996 - DNA, 25 bp, Probe sequence
actttatcaacattttacgcttaat

SEQ ID NO: 131997 - DNA, 25 bp, Probe sequence
aacattttacgcttaatcaattcac

SEQ ID NO: 131998 - DNA, 25 bp, Probe sequence
cattttacgcttaatcaattcactt

SEQ ID NO: 131999 - DNA, 25 bp, Probe sequence
ctactttatcaacattttacgctta

SEQ ID NO: 132000 - DNA, 25 bp, Probe sequence
cctttctaattctactttatcaaca

SEQ ID NO: 132001 - DNA, 25 bp, Probe sequence
tctactttatcaacattttacgctt

SEQ ID NO: 132002 - DNA, 25 bp, Probe sequence
tcaacattttacgcttaatcaattc

SEQ ID NO: 132003 - DNA, 25 bp, Probe sequence
tacaaatgtattcggcctaaaaaag

SEQ ID NO: 132004 - DNA, 25 bp, Probe sequence
tacgcttaatcaattcactttaaaa

SEQ ID NO: 132005 - DNA, 25 bp, Probe sequence
ttttacgcttaatcaattcacttta

SEQ ID NO: 132006 - DNA, 25 bp, Probe sequence
ttatcaacattttacgcttaatcaa

SEQ ID NO: 132007 - DNA, 25 bp, Probe sequence
ttcactttaaaatcattttcaacaa

SEQ ID NO: 132008 - DNA, 25 bp, Probe sequence
ttctaattctactttatcaacattt

SEQ ID NO: 132009 - DNA, 25 bp, Probe sequence
attttactgtaatttcaacaatcaa

SEQ ID NO: 132010 - DNA, 25 bp, Probe sequence
atatactatttttacactattacaa

SEQ ID NO: 132011 - DNA, 25 bp, Probe sequence
agacctcatgttcaacttattcatt

SEQ ID NO: 132012 - DNA, 25 bp, Probe sequence
aaatgtacgttagacctcatgttca

SEQ ID NO: 132013 - DNA, 25 bp, Probe sequence
aatattactccatttcaatttctag

SEQ ID NO: 132014 - DNA, 25 bp, Probe sequence
aattatatcaattgcttttcgaaaa

SEQ ID NO: 132015 - DNA, 25 bp, Probe sequence
caacttattcattttacattgtata

SEQ ID NO: 132016 - DNA, 25 bp, Probe sequence
catgctagcaaaaaaggcctaacgt

SEQ ID NO: 132017 - DNA, 25 bp, Probe sequence
ctccatttcaatttctagattagtc

SEQ ID NO: 132018 - DNA, 25 bp, Probe sequence
gtacgttagacctcatgttcaactt

SEQ ID NO: 132019 - DNA, 25 bp, Probe sequence
tttaaattattcatcatgctagcaa

SEQ ID NO: 132020 - DNA, 25 bp, Probe sequence
ttttcatcaccttaaattttactgt

SEQ ID NO: 132021 - DNA, 25 bp, Probe sequence
ttctaaatttttcatcaccttaaat

SEQ ID NO: 132022 - DNA, 25 bp, Probe sequence
ttctgttaactagcaaaaatcaata

SEQ ID NO: 132023 - DNA, 25 bp, Probe sequence
ttgttttcttcctatttatataact

SEQ ID NO: 132024 - DNA, 25 bp, Probe sequence
actccttcaaaccttgcaaagtgtc

SEQ ID NO: 132025 - DNA, 25 bp, Probe sequence
aaactccttcaaaccttgcaaagtg

SEQ ID NO: 132026 - DNA, 25 bp, Probe sequence
aactttttcatttgaatcaacggag

SEQ ID NO: 132027 - DNA, 25 bp, Probe sequence
aaccttgcaaagtgtcagcagacaa

SEQ ID NO: 132028 - DNA, 25 bp, Probe sequence
caaaccttgcaaagtgtcagcagac

SEQ ID NO: 132029 - DNA, 25 bp, Probe sequence
catatttaatgttttgtcgcgtgat

SEQ ID NO: 132030 - DNA, 25 bp, Probe sequence
ccttcaaaccttgcaaagtgtcagc

SEQ ID NO: 132031 - DNA, 25 bp, Probe sequence
gcagacaactttttcatttgaatca

SEQ ID NO: 132032 - DNA, 25 bp, Probe sequence
gaatcaacggagaaacatatttaat

SEQ ID NO: 132033 - DNA, 25 bp, Probe sequence
gacaactttttcatttgaatcaacg

SEQ ID NO: 132034 - DNA, 25 bp, Probe sequence
gtcagcagacaactttttcatttga

SEQ ID NO: 132035 - DNA, 25 bp, Probe sequence
gtgtcagcagacaactttttcattt

SEQ ID NO: 132036 - DNA, 25 bp, Probe sequence
taatgttttgtcgcgtgataaagtg

SEQ ID NO: 132037 - DNA, 25 bp, Probe sequence
tatttaatgttttgtcgcgtgataa

SEQ ID NO: 132038 - DNA, 25 bp, Probe sequence
ttaaactccttcaaaccttgcaaag

SEQ ID NO: 132039 - DNA, 25 bp, Probe sequence
attcatttctcctttaataccaata

SEQ ID NO: 132040 - DNA, 25 bp, Probe sequence
atattcatatcgttccatttagtga

SEQ ID NO: 132041 - DNA, 25 bp, Probe sequence
atcagacacatcatattcatatcgt

SEQ ID NO: 132042 - DNA, 25 bp, Probe sequence
atcatcagacacatcatattcatat

SEQ ID NO: 132043 - DNA, 25 bp, Probe sequence
atcatattcatatcgttccatttag

SEQ ID NO: 132044 - DNA, 25 bp, Probe sequence
atgaggtgtctgtacatgacactta

SEQ ID NO: 132045 - DNA, 25 bp, Probe sequence
cacatcatattcatatcgttccatt

SEQ ID NO: 132046 - DNA, 25 bp, Probe sequence
cacttatatcatcagacacatcata

SEQ ID NO: 132047 - DNA, 25 bp, Probe sequence
catttctcctttaataccaatatga

SEQ ID NO: 132048 - DNA, 25 bp, Probe sequence
catattcatatcgttccatttagtg

SEQ ID NO: 132049 - DNA, 25 bp, Probe sequence
gacacatcatattcatatcgttcca

SEQ ID NO: 132050 - DNA, 25 bp, Probe sequence
gacacttatatcatcagacacatca

SEQ ID NO: 132051 - DNA, 25 bp, Probe sequence
gtacatgacacttatatcatcagac

SEQ ID NO: 132052 - DNA, 25 bp, Probe sequence
gtctgtacatgacacttatatcatc

SEQ ID NO: 132053 - DNA, 25 bp, Probe sequence
ttctcctttaataccaatatgaggt

SEQ ID NO: 132054 - DNA, 25 bp, Probe sequence
atttcatatctttttgttatacaat

SEQ ID NO: 132055 - DNA, 25 bp, Probe sequence
atgactatgaattctttctttccat

SEQ ID NO: 132056 - DNA, 25 bp, Probe sequence
acgcgtacacaagttaatatttggt

SEQ ID NO: 132057 - DNA, 25 bp, Probe sequence
acttgtgtacacgtgatacgaaact

SEQ ID NO: 132058 - DNA, 25 bp, Probe sequence
aaacgcttacatgtgattatattca

SEQ ID NO: 132059 - DNA, 25 bp, Probe sequence
ctatgaattctttctttccataaaa

SEQ ID NO: 132060 - DNA, 25 bp, Probe sequence
gaaactaatttttattattcatttg

SEQ ID NO: 132061 - DNA, 25 bp, Probe sequence
gaaagtcgaaaatttcatatctttt

SEQ ID NO: 132062 - DNA, 25 bp, Probe sequence
gacaatcttcaaacgcttacatgtg

SEQ ID NO: 132063 - DNA, 25 bp, Probe sequence
tcctccttttatctttgaattcatt

SEQ ID NO: 132064 - DNA, 25 bp, Probe sequence
tctatttcctccttttatctttgaa

SEQ ID NO: 132065 - DNA, 25 bp, Probe sequence
taaagttttttatacagtcaaatga

SEQ ID NO: 132066 - DNA, 25 bp, Probe sequence
tatagacaatcttcaaacgcttaca

SEQ ID NO: 132067 - DNA, 25 bp, Probe sequence
ttggtaactaacttgtgtacacgtg

SEQ ID NO: 132068 - DNA, 25 bp, Probe sequence
ttccataaaaaaacgcgtacacaag

SEQ ID NO: 132069 - DNA, 25 bp, Probe sequence
atcacatatctactacttgtaatga

SEQ ID NO: 132070 - DNA, 25 bp, Probe sequence
agtagtctttcggcagacaaccctc

SEQ ID NO: 132071 - DNA, 25 bp, Probe sequence
acatgtaaattttttgtgacaactt

SEQ ID NO: 132072 - DNA, 25 bp, Probe sequence
acactcctctcatctaattacaaag

SEQ ID NO: 132073 - DNA, 25 bp, Probe sequence
aattatcaatgtaggtataccccat

SEQ ID NO: 132074 - DNA, 25 bp, Probe sequence
cattacttcttcttgtttatatatt

SEQ ID NO: 132075 - DNA, 25 bp, Probe sequence
gaattttgtattctaagtcagcatt

SEQ ID NO: 132076 - DNA, 25 bp, Probe sequence
gagagggtatacctacaaagtcaat

SEQ ID NO: 132077 - DNA, 25 bp, Probe sequence
gtatacctacaaagtcaattatcaa

SEQ ID NO: 132078 - DNA, 25 bp, Probe sequence
gtaggtataccccatatataagctg

SEQ ID NO: 132079 - DNA, 25 bp, Probe sequence
gtaatgattttagactgccgagtag

SEQ ID NO: 132080 - DNA, 25 bp, Probe sequence
gtcagcatttaattatcacatatct

SEQ ID NO: 132081 - DNA, 25 bp, Probe sequence
tttagactgccgagtagtctttcgg

SEQ ID NO: 132082 - DNA, 25 bp, Probe sequence
taccccatatataagctgtatttaa

SEQ ID NO: 132083 - DNA, 25 bp, Probe sequence
tataatttaacactttgttttgcaa

SEQ ID NO: 132084 - DNA, 25 bp, Probe sequence
atttcaaacaactatgtaagacgca

SEQ ID NO: 132085 - DNA, 25 bp, Probe sequence
atttcgatactttttgttcgttgat

SEQ ID NO: 132086 - DNA, 25 bp, Probe sequence
atgtaagacgcaataatcgttatta

SEQ ID NO: 132087 - DNA, 25 bp, Probe sequence
agactagaatgcggtatctctcctc

SEQ ID NO: 132088 - DNA, 25 bp, Probe sequence
acactctagccttaatatgccatta

SEQ ID NO: 132089 - DNA, 25 bp, Probe sequence
aacaaatacaaaatagtgctctata

SEQ ID NO: 132090 - DNA, 25 bp, Probe sequence
gatactttttgttcgttgattttat

SEQ ID NO: 132091 - DNA, 25 bp, Probe sequence
gttgattttatttattgattctttt

SEQ ID NO: 132092 - DNA, 25 bp, Probe sequence
gtgctctatatacttaatcaatgct

SEQ ID NO: 132093 - DNA, 25 bp, Probe sequence
tcctcacactctagccttaatatgc

SEQ ID NO: 132094 - DNA, 25 bp, Probe sequence
tcattcctcctgaaatcttaaaaac

SEQ ID NO: 132095 - DNA, 25 bp, Probe sequence
taaaaatgttatctgtagctaaata

SEQ ID NO: 132096 - DNA, 25 bp, Probe sequence
taaacatttttatcaatttcaaaca

SEQ ID NO: 132097 - DNA, 25 bp, Probe sequence
ttatttctatttatttcgatacttt

SEQ ID NO: 132098 - DNA, 25 bp, Probe sequence
ttatcaaggctttatttttgtgaaa

SEQ ID NO: 132099 - DNA, 25 bp, Probe sequence
attaatatcgcctacttttctaata

SEQ ID NO: 132100 - DNA, 25 bp, Probe sequence
atctctcttttccatacaaatattt

SEQ ID NO: 132101 - DNA, 25 bp, Probe sequence
atcgcctacttttctaatatttatt

SEQ ID NO: 132102 - DNA, 25 bp, Probe sequence
aaattatttagcttcacgtatcaac

SEQ ID NO: 132103 - DNA, 25 bp, Probe sequence
aacagttttgttatactaattgaag

SEQ ID NO: 132104 - DNA, 25 bp, Probe sequence
aatattaatatcgcctacttttcta

SEQ ID NO: 132105 - DNA, 25 bp, Probe sequence
aattatctctcttttccatacaaat

SEQ ID NO: 132106 - DNA, 25 bp, Probe sequence
cttttattataactttttcagccat

SEQ ID NO: 132107 - DNA, 25 bp, Probe sequence
gcttcacgtatcaactacttttcat

SEQ ID NO: 132108 - DNA, 25 bp, Probe sequence
gtatcaactacttttcattaacatg

SEQ ID NO: 132109 - DNA, 25 bp, Probe sequence
taactttttcagccataaaaatact

SEQ ID NO: 132110 - DNA, 25 bp, Probe sequence
tacaaatattttattccttacactt

SEQ ID NO: 132111 - DNA, 25 bp, Probe sequence
tacttttcattaacatggaggcgtt

SEQ ID NO: 132112 - DNA, 25 bp, Probe sequence
tagcttcacgtatcaactacttttc

SEQ ID NO: 132113 - DNA, 25 bp, Probe sequence
tattccttacacttttattataact

SEQ ID NO: 132114 - DNA, 25 bp, Probe sequence
attcgcactctgttaaaatcatata

SEQ ID NO: 132115 - DNA, 25 bp, Probe sequence
agtaccagatgcataaattcagaaa

SEQ ID NO: 132116 - DNA, 25 bp, Probe sequence
acgtccacaagtaccagatgcataa

SEQ ID NO: 132117 - DNA, 25 bp, Probe sequence
acagcagtgagatatttttctattt

SEQ ID NO: 132118 - DNA, 25 bp, Probe sequence
aaagttcgctttaatgtcattgacg

SEQ ID NO: 132119 - DNA, 25 bp, Probe sequence
gcctgatacgtccacaagtaccaga

SEQ ID NO: 132120 - DNA, 25 bp, Probe sequence
gctgttctttatttgcataattcgc

SEQ ID NO: 132121 - DNA, 25 bp, Probe sequence
gacgtatgtataagctctcatgttt

SEQ ID NO: 132122 - DNA, 25 bp, Probe sequence
gatacgtccacaagtaccagatgca

SEQ ID NO: 132123 - DNA, 25 bp, Probe sequence
gtcattgacgtatgtataagctctc

SEQ ID NO: 132124 - DNA, 25 bp, Probe sequence
tcatttgcctgatacgtccacaagt

SEQ ID NO: 132125 - DNA, 25 bp, Probe sequence
taagctctcatgtttaataatatta

SEQ ID NO: 132126 - DNA, 25 bp, Probe sequence
tttgcctgatacgtccacaagtacc

SEQ ID NO: 132127 - DNA, 25 bp, Probe sequence
tttgcataattcgcactctgttaaa

SEQ ID NO: 132128 - DNA, 25 bp, Probe sequence
ttttctatttgaaatatcttactgc

SEQ ID NO: 132129 - DNA, 25 bp, Probe sequence
aaagacagaaattactatctcttct

SEQ ID NO: 132130 - DNA, 25 bp, Probe sequence
aaaacataaaaatccacacattaag

SEQ ID NO: 132131 - DNA, 25 bp, Probe sequence
aaaatccacacattaaggagctata

SEQ ID NO: 132132 - DNA, 25 bp, Probe sequence
aattactatctcttctgtctaaaaa

SEQ ID NO: 132133 - DNA, 25 bp, Probe sequence
caaccgtcccataaaagacagaaat

SEQ ID NO: 132134 - DNA, 25 bp, Probe sequence
cacacattaaggagctataacccta

SEQ ID NO: 132135 - DNA, 25 bp, Probe sequence
ctatctcttctgtctaaaaacataa

SEQ ID NO: 132136 - DNA, 25 bp, Probe sequence
gctataaccctaatgtgtggattta

SEQ ID NO: 132137 - DNA, 25 bp, Probe sequence
gcaatgataacaaccgtcccataaa

SEQ ID NO: 132138 - DNA, 25 bp, Probe sequence
gaaattactatctcttctgtctaaa

SEQ ID NO: 132139 - DNA, 25 bp, Probe sequence
gataacaaccgtcccataaaagaca

SEQ ID NO: 132140 - DNA, 25 bp, Probe sequence
ggagctataaccctaatgtgtggat

SEQ ID NO: 132141 - DNA, 25 bp, Probe sequence
taaccctaatgtgtggatttaattt

SEQ ID NO: 132142 - DNA, 25 bp, Probe sequence
tagcaatgataacaaccgtcccata

SEQ ID NO: 132143 - DNA, 25 bp, Probe sequence
ttactatctcttctgtctaaaaaca

SEQ ID NO: 132144 - DNA, 25 bp, Probe sequence
atttatttttgcgttgtgaattagt

SEQ ID NO: 132145 - DNA, 25 bp, Probe sequence
atatttagtcgattgatacctatca

SEQ ID NO: 132146 - DNA, 25 bp, Probe sequence
ataatcaatttactggaagatattt

SEQ ID NO: 132147 - DNA, 25 bp, Probe sequence
atcaactattttcagcatacgataa

SEQ ID NO: 132148 - DNA, 25 bp, Probe sequence
actcctatgtaggaattattcatat

SEQ ID NO: 132149 - DNA, 25 bp, Probe sequence
catagtttattatcacacttaatta

SEQ ID NO: 132150 - DNA, 25 bp, Probe sequence
cctatcaactattttcagcatacga

SEQ ID NO: 132151 - DNA, 25 bp, Probe sequence
gaagatatttagtcgattgatacct

SEQ ID NO: 132152 - DNA, 25 bp, Probe sequence
gatacctatcaactattttcagcat

SEQ ID NO: 132153 - DNA, 25 bp, Probe sequence
gtcacactcctatgtaggaattatt

SEQ ID NO: 132154 - DNA, 25 bp, Probe sequence
tacctatcaactattttcagcatac

SEQ ID NO: 132155 - DNA, 25 bp, Probe sequence
tatatttttcaagggagaatacgaa

SEQ ID NO: 132156 - DNA, 25 bp, Probe sequence
ttttcagcatacgataaattataac

SEQ ID NO: 132157 - DNA, 25 bp, Probe sequence
ttttgcgttgtgaattagtataatc

SEQ ID NO: 132158 - DNA, 25 bp, Probe sequence
ttatcacacttaattattatatttt

SEQ ID NO: 132159 - DNA, 25 bp, Probe sequence
attttcaaacattactgcctagctt

SEQ ID NO: 132160 - DNA, 25 bp, Probe sequence
acgcctcgggtcattttatataaat

SEQ ID NO: 132161 - DNA, 25 bp, Probe sequence
aaatgttcctcatcatatccgtttc

SEQ ID NO: 132162 - DNA, 25 bp, Probe sequence
cccgaggtattcagttcgaacgcct

SEQ ID NO: 132163 - DNA, 25 bp, Probe sequence
gagcaaatgtacttattttcaaaca

SEQ ID NO: 132164 - DNA, 25 bp, Probe sequence
gagttcggacttaaacatatttctg

SEQ ID NO: 132165 - DNA, 25 bp, Probe sequence
gtcatctcacacattttataaatat

SEQ ID NO: 132166 - DNA, 25 bp, Probe sequence
tcgaacgcctcgggtcattttatat

SEQ ID NO: 132167 - DNA, 25 bp, Probe sequence
tcttattcaattaaacccgaggtat

SEQ ID NO: 132168 - DNA, 25 bp, Probe sequence
tcaattgtcatctcacacattttat

SEQ ID NO: 132169 - DNA, 25 bp, Probe sequence
taagtccgatttcttattcaattaa

SEQ ID NO: 132170 - DNA, 25 bp, Probe sequence
tactgcctagctttaattgacgtta

SEQ ID NO: 132171 - DNA, 25 bp, Probe sequence
tatccgtttcaattgtcatctcaca

SEQ ID NO: 132172 - DNA, 25 bp, Probe sequence
ttttatgttcaaatgttcctcatca

SEQ ID NO: 132173 - DNA, 25 bp, Probe sequence
ttcctcatcatatccgtttcaattg

SEQ ID NO: 132174 - DNA, 25 bp, Probe sequence
attctcctttacttctgtagttcta

SEQ ID NO: 132175 - DNA, 25 bp, Probe sequence
ataacgttaaaatgatggacaatct

SEQ ID NO: 132176 - DNA, 25 bp, Probe sequence
aaatatatagatgctcttcccccaa

SEQ ID NO: 132177 - DNA, 25 bp, Probe sequence
cattctcctttacttctgtagttct

SEQ ID NO: 132178 - DNA, 25 bp, Probe sequence
cattgcattttgcatatacttcaca

SEQ ID NO: 132179 - DNA, 25 bp, Probe sequence
cctttacttctgtagttctaagtcg

SEQ ID NO: 132180 - DNA, 25 bp, Probe sequence
gacaatctattcattgcattttgca

SEQ ID NO: 132181 - DNA, 25 bp, Probe sequence
gatggacaatctattcattgcattt

SEQ ID NO: 132182 - DNA, 25 bp, Probe sequence
gttctaagtcgttaaattcattata

SEQ ID NO: 132183 - DNA, 25 bp, Probe sequence
gtagttctaagtcgttaaattcatt

SEQ ID NO: 132184 - DNA, 25 bp, Probe sequence
ggggaaataagacgtcttatatact

SEQ ID NO: 132185 - DNA, 25 bp, Probe sequence
tctcctttacttctgtagttctaag

SEQ ID NO: 132186 - DNA, 25 bp, Probe sequence
tacttctgtagttctaagtcgttaa

SEQ ID NO: 132187 - DNA, 25 bp, Probe sequence
tatacttcacaataatttaaggggg

SEQ ID NO: 132188 - DNA, 25 bp, Probe sequence
ttcattctcctttacttctgtagtt

SEQ ID NO: 132189 - DNA, 25 bp, Probe sequence
attatcaacttattacttagcttat

SEQ ID NO: 132190 - DNA, 25 bp, Probe sequence
atattgtccatgtcgctaacatcat

SEQ ID NO: 132191 - DNA, 25 bp, Probe sequence
atctatctagttattgttgttagta

SEQ ID NO: 132192 - DNA, 25 bp, Probe sequence
acatcatattacgtcaaatctttta

SEQ ID NO: 132193 - DNA, 25 bp, Probe sequence
aatgatgctttattttagactgctt

SEQ ID NO: 132194 - DNA, 25 bp, Probe sequence
aattacatactattatatacctgtt

SEQ ID NO: 132195 - DNA, 25 bp, Probe sequence
caacttattacttagcttatattta

SEQ ID NO: 132196 - DNA, 25 bp, Probe sequence
cacttacttccttcaaagaattaca

SEQ ID NO: 132197 - DNA, 25 bp, Probe sequence
ctttctcacttacttccttcaaaga

SEQ ID NO: 132198 - DNA, 25 bp, Probe sequence
gctttattttagactgctttttctt

SEQ ID NO: 132199 - DNA, 25 bp, Probe sequence
gaaatttacacttatctatctagtt

SEQ ID NO: 132200 - DNA, 25 bp, Probe sequence
gtaatatcatattgtccatgtcgct

SEQ ID NO: 132201 - DNA, 25 bp, Probe sequence
tgtcgctaacatcatattacgtcaa

SEQ ID NO: 132202 - DNA, 25 bp, Probe sequence
tacacttatctatctagttattgtt

SEQ ID NO: 132203 - DNA, 25 bp, Probe sequence
tactattatatacctgtttacaaga

SEQ ID NO: 132204 - DNA, 25 bp, Probe sequence
atcctatatcgatttttctagtgat

SEQ ID NO: 132205 - DNA, 25 bp, Probe sequence
agggttcatcactaattattaaaat

SEQ ID NO: 132206 - DNA, 25 bp, Probe sequence
aaagactaagggttcatcactaatt

SEQ ID NO: 132207 - DNA, 25 bp, Probe sequence
aattttagccagctataaattcaat

SEQ ID NO: 132208 - DNA, 25 bp, Probe sequence
cgatttttctagtgattggtgcctc

SEQ ID NO: 132209 - DNA, 25 bp, Probe sequence
gcctcagtctttttaattttagcca

SEQ ID NO: 132210 - DNA, 25 bp, Probe sequence
gactaagggttcatcactaattatt

SEQ ID NO: 132211 - DNA, 25 bp, Probe sequence
gttgcacctcttttatatcaaaaac

SEQ ID NO: 132212 - DNA, 25 bp, Probe sequence
gtctttttaattttagccagctata

SEQ ID NO: 132213 - DNA, 25 bp, Probe sequence
ggtgcctcagtctttttaattttag

SEQ ID NO: 132214 - DNA, 25 bp, Probe sequence
tgattggtgcctcagtctttttaat

SEQ ID NO: 132215 - DNA, 25 bp, Probe sequence
tcactaattattaaaatcctatatc

SEQ ID NO: 132216 - DNA, 25 bp, Probe sequence
tagtgattggtgcctcagtcttttt

SEQ ID NO: 132217 - DNA, 25 bp, Probe sequence
ttctagtgattggtgcctcagtctt

SEQ ID NO: 132218 - DNA, 25 bp, Probe sequence
ttggtgcctcagtctttttaatttt

SEQ ID NO: 132219 - DNA, 25 bp, Probe sequence
attactttttctcgtttatgcgtat

SEQ ID NO: 132220 - DNA, 25 bp, Probe sequence
atatatctatatcatccacctttta

SEQ ID NO: 132221 - DNA, 25 bp, Probe sequence
atctatatcatccaccttttattta

SEQ ID NO: 132222 - DNA, 25 bp, Probe sequence
aaaattcatttttattcgtctagat

SEQ ID NO: 132223 - DNA, 25 bp, Probe sequence
aactccttgtattatctttacattc

SEQ ID NO: 132224 - DNA, 25 bp, Probe sequence
aatttggctaattggctttatgttt

SEQ ID NO: 132225 - DNA, 25 bp, Probe sequence
ctcgtttatgcgtataatctttttt

SEQ ID NO: 132226 - DNA, 25 bp, Probe sequence
gctaattggctttatgtttaatcat

SEQ ID NO: 132227 - DNA, 25 bp, Probe sequence
gatggaatcgttttcatatttttaa

SEQ ID NO: 132228 - DNA, 25 bp, Probe sequence
gattataatatatgccactattcaa

SEQ ID NO: 132229 - DNA, 25 bp, Probe sequence
taatcattataattgtttcgttttt

SEQ ID NO: 132230 - DNA, 25 bp, Probe sequence
tatcatccaccttttatttataaat

SEQ ID NO: 132231 - DNA, 25 bp, Probe sequence
tatatgccactattcaatttaatac

SEQ ID NO: 132232 - DNA, 25 bp, Probe sequence
ttaatacaactcttttttgatacaa

SEQ ID NO: 132233 - DNA, 25 bp, Probe sequence
ttcgtctagatggaatcgttttcat

SEQ ID NO: 132234 - DNA, 25 bp, Probe sequence
aggttacgccctctttacataagcg

SEQ ID NO: 132235 - DNA, 25 bp, Probe sequence
ataatttgcgttcttgattcgaaaa

SEQ ID NO: 132236 - DNA, 25 bp, Probe sequence
actatcttcaccccttataagtaat

SEQ ID NO: 132237 - DNA, 25 bp, Probe sequence
aattatagttacttcaatcatgatt

SEQ ID NO: 132238 - DNA, 25 bp, Probe sequence
cgccctctttacataagcgtctaat

SEQ ID NO: 132239 - DNA, 25 bp, Probe sequence
ccctctttacataagcgtctaatat

SEQ ID NO: 132240 - DNA, 25 bp, Probe sequence
gcgttcttgattcgaaaaattcaga

SEQ ID NO: 132241 - DNA, 25 bp, Probe sequence
gaaactatatatgacgtggttgctt

SEQ ID NO: 132242 - DNA, 25 bp, Probe sequence
gttgcttataatttgcgttcttgat

SEQ ID NO: 132243 - DNA, 25 bp, Probe sequence
gttacgccctctttacataagcgtc

SEQ ID NO: 132244 - DNA, 25 bp, Probe sequence
gttacttcaatcatgattagtttat

SEQ ID NO: 132245 - DNA, 25 bp, Probe sequence
gtggttgcttataatttgcgttctt

SEQ ID NO: 132246 - DNA, 25 bp, Probe sequence
tcttcaccccttataagtaattaca

SEQ ID NO: 132247 - DNA, 25 bp, Probe sequence
tcaccccttataagtaattacattt

SEQ ID NO: 132248 - DNA, 25 bp, Probe sequence
ttatgatatcttttgtaaatttaat

SEQ ID NO: 132249 - DNA, 25 bp, Probe sequence
ataaagtaatcatctttcacaaaaa

SEQ ID NO: 132250 - DNA, 25 bp, Probe sequence
atcatctttcacaaaaatccaaaga

SEQ ID NO: 132251 - DNA, 25 bp, Probe sequence
atgataaagtaatcatctttcacaa

SEQ ID NO: 132252 - DNA, 25 bp, Probe sequence
agtaatcatctttcacaaaaatcca

SEQ ID NO: 132253 - DNA, 25 bp, Probe sequence
aaagtaatcatctttcacaaaaatc

SEQ ID NO: 132254 - DNA, 25 bp, Probe sequence
aagtaatcatctttcacaaaaatcc

SEQ ID NO: 132255 - DNA, 25 bp, Probe sequence
aatcatctttcacaaaaatccaaag

SEQ ID NO: 132256 - DNA, 25 bp, Probe sequence
gataaagtaatcatctttcacaaaa

SEQ ID NO: 132257 - DNA, 25 bp, Probe sequence
gtaatcatctttcacaaaaatccaa

SEQ ID NO: 132258 - DNA, 25 bp, Probe sequence
tgataaagtaatcatctttcacaaa

SEQ ID NO: 132259 - DNA, 25 bp, Probe sequence
taatcatctttcacaaaaatccaaa

SEQ ID NO: 132260 - DNA, 25 bp, Probe sequence
taaagtaatcatctttcacaaaaat

SEQ ID NO: 132261 - DNA, 25 bp, Probe sequence
atttaaacatctattctcctctgaa

SEQ ID NO: 132262 - DNA, 25 bp, Probe sequence
atctaggtatttctccgattttggt

SEQ ID NO: 132263 - DNA, 25 bp, Probe sequence
atatctaggtatttctccgattttg

SEQ ID NO: 132264 - DNA, 25 bp, Probe sequence
atacctacctcttttcttagtatat

SEQ ID NO: 132265 - DNA, 25 bp, Probe sequence
acctcttttcttagtatatctaggt

SEQ ID NO: 132266 - DNA, 25 bp, Probe sequence
acctacctcttttcttagtatatct

SEQ ID NO: 132267 - DNA, 25 bp, Probe sequence
ctacctcttttcttagtatatctag

SEQ ID NO: 132268 - DNA, 25 bp, Probe sequence
tctaggtatttctccgattttggtt

SEQ ID NO: 132269 - DNA, 25 bp, Probe sequence
gtatatctaggtatttctccgattt

SEQ ID NO: 132270 - DNA, 25 bp, Probe sequence
ggttaatttaaacatctattctcct

SEQ ID NO: 132271 - DNA, 25 bp, Probe sequence
taatttaaacatctattctcctctg

SEQ ID NO: 132272 - DNA, 25 bp, Probe sequence
tacctacctcttttcttagtatatc

SEQ ID NO: 132273 - DNA, 25 bp, Probe sequence
tttaaacatctattctcctctgaaa

SEQ ID NO: 132274 - DNA, 25 bp, Probe sequence
ttagtatatctaggtatttctccga

SEQ ID NO: 132275 - DNA, 25 bp, Probe sequence
ttaaacatctattctcctctgaaaa

SEQ ID NO: 132276 - DNA, 25 bp, Probe sequence
atatcaaaagtaataccttcatctt

SEQ ID NO: 132277 - DNA, 25 bp, Probe sequence
agccattcgccttaatcaattagac

SEQ ID NO: 132278 - DNA, 25 bp, Probe sequence
acacttccttagccctatatatcaa

SEQ ID NO: 132279 - DNA, 25 bp, Probe sequence
aaaacacttccttagccctatatat

SEQ ID NO: 132280 - DNA, 25 bp, Probe sequence
aacgagtctttttattgaaagccat

SEQ ID NO: 132281 - DNA, 25 bp, Probe sequence
cttccttagccctatatatcaaaag

SEQ ID NO: 132282 - DNA, 25 bp, Probe sequence
gcatactcaaaaagactggtacatg

SEQ ID NO: 132283 - DNA, 25 bp, Probe sequence
gtataccagtctaattcgaaaaaat

SEQ ID NO: 132284 - DNA, 25 bp, Probe sequence
gtacatgtataccagtctaattcga

SEQ ID NO: 132285 - DNA, 25 bp, Probe sequence
taccttcactataaaaaacgagtct

SEQ ID NO: 132286 - DNA, 25 bp, Probe sequence
taccttcatctttatattcattatt

SEQ ID NO: 132287 - DNA, 25 bp, Probe sequence
tataattcattttaagcatactcaa

SEQ ID NO: 132288 - DNA, 25 bp, Probe sequence
tattttcaaactaccttcactataa

SEQ ID NO: 132289 - DNA, 25 bp, Probe sequence
tattgaaagccattcgccttaatca

SEQ ID NO: 132290 - DNA, 25 bp, Probe sequence
ttcattattttcaaactaccttcac

SEQ ID NO: 132291 - DNA, 25 bp, Probe sequence
attacttgattatttgctctttaca

SEQ ID NO: 132292 - DNA, 25 bp, Probe sequence
atttaccatcacataggcgcttatc

SEQ ID NO: 132293 - DNA, 25 bp, Probe sequence
atatcatgattctctaccgttatgt

SEQ ID NO: 132294 - DNA, 25 bp, Probe sequence
atctaatttatgcggatttcctgta

SEQ ID NO: 132295 - DNA, 25 bp, Probe sequence
agcgcctatgtcatgatttaccatc

SEQ ID NO: 132296 - DNA, 25 bp, Probe sequence
aacgaccacaaaacatacacaacta

SEQ ID NO: 132297 - DNA, 25 bp, Probe sequence
aagacaaacttaaccattcacaaat

SEQ ID NO: 132298 - DNA, 25 bp, Probe sequence
catacacaactacattttctctaat

SEQ ID NO: 132299 - DNA, 25 bp, Probe sequence
gcctaacccgtcactgtgagttggg

SEQ ID NO: 132300 - DNA, 25 bp, Probe sequence
gatgacaacttattcttttcagggg

SEQ ID NO: 132301 - DNA, 25 bp, Probe sequence
gtgcccgtactcggtaattcaatac

SEQ ID NO: 132302 - DNA, 25 bp, Probe sequence
gtccaacttcaaatatccaaaccta

SEQ ID NO: 132303 - DNA, 25 bp, Probe sequence
tgctctttacaacaccgagcgtgcc

SEQ ID NO: 132304 - DNA, 25 bp, Probe sequence
tcgtactctatcatggctttcttat

SEQ ID NO: 132305 - DNA, 25 bp, Probe sequence
tacttattactttccatttcatcta

SEQ ID NO: 132306 - DNA, 25 bp, Probe sequence
attaccatatggcttacaacctaac

SEQ ID NO: 132307 - DNA, 25 bp, Probe sequence
atcaattaccatatggcttacaacc

SEQ ID NO: 132308 - DNA, 25 bp, Probe sequence
accatatggcttacaacctaactaa

SEQ ID NO: 132309 - DNA, 25 bp, Probe sequence
aatcacactatgttacaggaaaatt

SEQ ID NO: 132310 - DNA, 25 bp, Probe sequence
aatactatcaattaccatatggctt

SEQ ID NO: 132311 - DNA, 25 bp, Probe sequence
aattaatcacactatgttacaggaa

SEQ ID NO: 132312 - DNA, 25 bp, Probe sequence
catatggcttacaacctaactaacg

SEQ ID NO: 132313 - DNA, 25 bp, Probe sequence
gaaaattaatcacactatgttacag

SEQ ID NO: 132314 - DNA, 25 bp, Probe sequence
gttgcaattacaaatatttccgttt

SEQ ID NO: 132315 - DNA, 25 bp, Probe sequence
tggcttacaacctaactaacgaaag

SEQ ID NO: 132316 - DNA, 25 bp, Probe sequence
tgcaattacaaatatttccgtttaa

SEQ ID NO: 132317 - DNA, 25 bp, Probe sequence
taccatatggcttacaacctaacta

SEQ ID NO: 132318 - DNA, 25 bp, Probe sequence
tatggcttacaacctaactaacgaa

SEQ ID NO: 132319 - DNA, 25 bp, Probe sequence
ttataacaacaatctattgcaaatt

SEQ ID NO: 132320 - DNA, 25 bp, Probe sequence
ttccgtttaattataacaacaatct

SEQ ID NO: 132321 - DNA, 25 bp, Probe sequence
acgcggtgggcgaaatcagtttgaa

SEQ ID NO: 132322 - DNA, 25 bp, Probe sequence
aaacacgcggtgggcgaaatcagtt

SEQ ID NO: 132323 - DNA, 25 bp, Probe sequence
aattgactgacttcgttttaccgcg

SEQ ID NO: 132324 - DNA, 25 bp, Probe sequence
gcggtgggcgaaatcagtttgaatt

SEQ ID NO: 132325 - DNA, 25 bp, Probe sequence
gctatgttaaaaacacgcggtgggc

SEQ ID NO: 132326 - DNA, 25 bp, Probe sequence
gaattgactgacttcgttttaccgc

SEQ ID NO: 132327 - DNA, 25 bp, Probe sequence
gtttgaattgactgacttcgtttta

SEQ ID NO: 132328 - DNA, 25 bp, Probe sequence
gttatacatatattctaattgcaca

SEQ ID NO: 132329 - DNA, 25 bp, Probe sequence
gtaaatgccaatgggagtgggacag

SEQ ID NO: 132330 - DNA, 25 bp, Probe sequence
gtgggcgaaatcagtttgaattgac

SEQ ID NO: 132331 - DNA, 25 bp, Probe sequence
tcgttttaccgcgtgtttaataatg

SEQ ID NO: 132332 - DNA, 25 bp, Probe sequence
tctaattgcacatttaaacttcgta

SEQ ID NO: 132333 - DNA, 25 bp, Probe sequence
taaacttcgtaaatgccaatgggag

SEQ ID NO: 132334 - DNA, 25 bp, Probe sequence
tacatatattctaattgcacattta

SEQ ID NO: 132335 - DNA, 25 bp, Probe sequence
taccgcgtgtttaataatgttatac

SEQ ID NO: 132336 - DNA, 25 bp, Probe sequence
atttacttaaccaagcactcataat

SEQ ID NO: 132337 - DNA, 25 bp, Probe sequence
aacctaaaaatatcatcccatccac

SEQ ID NO: 132338 - DNA, 25 bp, Probe sequence
aagtgtatacgctaatcatttcaaa

SEQ ID NO: 132339 - DNA, 25 bp, Probe sequence
cgggatgcacatcttagttctaatg

SEQ ID NO: 132340 - DNA, 25 bp, Probe sequence
gcactcataatgaccatcctttcta

SEQ ID NO: 132341 - DNA, 25 bp, Probe sequence
gaccatcctttctattgtttaattt

SEQ ID NO: 132342 - DNA, 25 bp, Probe sequence
gtcagcacctctatttttttagttt

SEQ ID NO: 132343 - DNA, 25 bp, Probe sequence
ggctatgacatttctatttcaggct

SEQ ID NO: 132344 - DNA, 25 bp, Probe sequence
tcttgaactacctttaacttaatct

SEQ ID NO: 132345 - DNA, 25 bp, Probe sequence
tcttccctcaaagtaagtatcctac

SEQ ID NO: 132346 - DNA, 25 bp, Probe sequence
tcatcccatccacaatgattgtatc

SEQ ID NO: 132347 - DNA, 25 bp, Probe sequence
taaaccgtaatacttgttcctacat

SEQ ID NO: 132348 - DNA, 25 bp, Probe sequence
tatacagttaattttcttccctcaa

SEQ ID NO: 132349 - DNA, 25 bp, Probe sequence
tatttacatgcttgggtcttgattc

SEQ ID NO: 132350 - DNA, 25 bp, Probe sequence
ttatgtttgctggtgtcgtatttta

SEQ ID NO: 132351 - DNA, 25 bp, Probe sequence
agtaccatcacagcattcatagtta

SEQ ID NO: 132352 - DNA, 25 bp, Probe sequence
agccatgatccttttccttatatct

SEQ ID NO: 132353 - DNA, 25 bp, Probe sequence
accatcacagcattcatagttaaaa

SEQ ID NO: 132354 - DNA, 25 bp, Probe sequence
acttgaaaatgtcacgttttccaca

SEQ ID NO: 132355 - DNA, 25 bp, Probe sequence
aaatgtcacgttttccacaatattt

SEQ ID NO: 132356 - DNA, 25 bp, Probe sequence
cttttccttatatcttagtccatac

SEQ ID NO: 132357 - DNA, 25 bp, Probe sequence
ctttagtaccatcacagcattcata

SEQ ID NO: 132358 - DNA, 25 bp, Probe sequence
ccttatatcttagtccatacttgct

SEQ ID NO: 132359 - DNA, 25 bp, Probe sequence
gcaactttagtaccatcacagcatt

SEQ ID NO: 132360 - DNA, 25 bp, Probe sequence
gatccttttccttatatcttagtcc

SEQ ID NO: 132361 - DNA, 25 bp, Probe sequence
gagttcgcaactttagtaccatcac

SEQ ID NO: 132362 - DNA, 25 bp, Probe sequence
gtcacgttttccacaatatttgtaa

SEQ ID NO: 132363 - DNA, 25 bp, Probe sequence
gtgtataagccatgatccttttcct

SEQ ID NO: 132364 - DNA, 25 bp, Probe sequence
tacttatctataacgagttcgcaac

SEQ ID NO: 132365 - DNA, 25 bp, Probe sequence
tagttaaaatatgttggtgtcgtat

SEQ ID NO: 132366 - DNA, 25 bp, Probe sequence
actttacttctctaccacactaaag

SEQ ID NO: 132367 - DNA, 25 bp, Probe sequence
aaaggcaagacatttgtgcctataa

SEQ ID NO: 132368 - DNA, 25 bp, Probe sequence
aacttatcatttttagcaatacatt

SEQ ID NO: 132369 - DNA, 25 bp, Probe sequence
aagatttttatattgaagttgtact

SEQ ID NO: 132370 - DNA, 25 bp, Probe sequence
ccaccctttactttcaatactgtat

SEQ ID NO: 132371 - DNA, 25 bp, Probe sequence
gcacatattgtgcttgccttattat

SEQ ID NO: 132372 - DNA, 25 bp, Probe sequence
gcaatacattacaacctttttcaga

SEQ ID NO: 132373 - DNA, 25 bp, Probe sequence
gaagttgtacttcttgcacatattg

SEQ ID NO: 132374 - DNA, 25 bp, Probe sequence
gtgcttgccttattatgtaaagtta

SEQ ID NO: 132375 - DNA, 25 bp, Probe sequence
tgtgcctataaaaatgctaaaccaa

SEQ ID NO: 132376 - DNA, 25 bp, Probe sequence
tgtaaagttattttctttctatctt

SEQ ID NO: 132377 - DNA, 25 bp, Probe sequence
tcacttggtattttcgttgtttact

SEQ ID NO: 132378 - DNA, 25 bp, Probe sequence
tacttctctaccacactaaagtgta

SEQ ID NO: 132379 - DNA, 25 bp, Probe sequence
tttcagaaaattcggtgtattgttt

SEQ ID NO: 132380 - DNA, 25 bp, Probe sequence
ttgtttactttacttctctaccaca

SEQ ID NO: 132381 - DNA, 25 bp, Probe sequence
attctccctatgttttattatgcac

SEQ ID NO: 132382 - DNA, 25 bp, Probe sequence
ataacatttttattatgcggctcat

SEQ ID NO: 132383 - DNA, 25 bp, Probe sequence
atgcggctcataactttttaagaaa

SEQ ID NO: 132384 - DNA, 25 bp, Probe sequence
acattctccctatgttttattatgc

SEQ ID NO: 132385 - DNA, 25 bp, Probe sequence
acatttttattatgcggctcataac

SEQ ID NO: 132386 - DNA, 25 bp, Probe sequence
ctccctatgttttattatgcacaat

SEQ ID NO: 132387 - DNA, 25 bp, Probe sequence
ccctatgttttattatgcacaatta

SEQ ID NO: 132388 - DNA, 25 bp, Probe sequence
gcggctcataactttttaagaaact

SEQ ID NO: 132389 - DNA, 25 bp, Probe sequence
ggctcataactttttaagaaactgt

SEQ ID NO: 132390 - DNA, 25 bp, Probe sequence
taacatttttattatgcggctcata

SEQ ID NO: 132391 - DNA, 25 bp, Probe sequence
taaacattctccctatgttttatta

SEQ ID NO: 132392 - DNA, 25 bp, Probe sequence
tatgcggctcataactttttaagaa

SEQ ID NO: 132393 - DNA, 25 bp, Probe sequence
tattttttagataatgtcatagtat

SEQ ID NO: 132394 - DNA, 25 bp, Probe sequence
tattatgcacaattataacattttt

SEQ ID NO: 132395 - DNA, 25 bp, Probe sequence
ttctccctatgttttattatgcaca

SEQ ID NO: 132396 - DNA, 25 bp, Probe sequence
attacctttctacattcatttacat

SEQ ID NO: 132397 - DNA, 25 bp, Probe sequence
atatcattacctttctacattcatt

SEQ ID NO: 132398 - DNA, 25 bp, Probe sequence
atcattacctttctacattcattta

SEQ ID NO: 132399 - DNA, 25 bp, Probe sequence
acctttctacattcatttacatatc

SEQ ID NO: 132400 - DNA, 25 bp, Probe sequence
cattacctttctacattcatttaca

SEQ ID NO: 132401 - DNA, 25 bp, Probe sequence
ctttctacattcatttacatatctg

SEQ ID NO: 132402 - DNA, 25 bp, Probe sequence
gatatatcattacctttctacattc

SEQ ID NO: 132403 - DNA, 25 bp, Probe sequence
tcattacctttctacattcatttac

SEQ ID NO: 132404 - DNA, 25 bp, Probe sequence
tacattcatttacatatctgattca

SEQ ID NO: 132405 - DNA, 25 bp, Probe sequence
tatcattacctttctacattcattt

SEQ ID NO: 132406 - DNA, 25 bp, Probe sequence
tatatcattacctttctacattcat

SEQ ID NO: 132407 - DNA, 25 bp, Probe sequence
ttacctttctacattcatttacata

SEQ ID NO: 132408 - DNA, 25 bp, Probe sequence
ttacatatctgattcaacaaaatga

SEQ ID NO: 132409 - DNA, 25 bp, Probe sequence
ttcatttacatatctgattcaacaa

SEQ ID NO: 132410 - DNA, 25 bp, Probe sequence
ttctacattcatttacatatctgat

SEQ ID NO: 132411 - DNA, 25 bp, Probe sequence
ataatctacatatttaacgttctat

SEQ ID NO: 132412 - DNA, 25 bp, Probe sequence
atctcattaactaaatttcacggac

SEQ ID NO: 132413 - DNA, 25 bp, Probe sequence
aggtcattctttaaatacatcacag

SEQ ID NO: 132414 - DNA, 25 bp, Probe sequence
acgagtcacttgatgcaaagtcaat

SEQ ID NO: 132415 - DNA, 25 bp, Probe sequence
aaatagtacgagtcacttgatgcaa

SEQ ID NO: 132416 - DNA, 25 bp, Probe sequence
aacgttctatattttgaattttcag

SEQ ID NO: 132417 - DNA, 25 bp, Probe sequence
aatgcttgcatctttgttttttagg

SEQ ID NO: 132418 - DNA, 25 bp, Probe sequence
aatagtcagatttatctcattaact

SEQ ID NO: 132419 - DNA, 25 bp, Probe sequence
gcatctttgttttttaggtggtatt

SEQ ID NO: 132420 - DNA, 25 bp, Probe sequence
gaattcgaaataaaatgcttgcatc

SEQ ID NO: 132421 - DNA, 25 bp, Probe sequence
gtaatcacttctttatgtttgaatt

SEQ ID NO: 132422 - DNA, 25 bp, Probe sequence
gtgtggtgttttataggtcattctt

SEQ ID NO: 132423 - DNA, 25 bp, Probe sequence
ggtggtattgtatgtatatcaagta

SEQ ID NO: 132424 - DNA, 25 bp, Probe sequence
ggacttgtaatcacttctttatgtt

SEQ ID NO: 132425 - DNA, 25 bp, Probe sequence
tttcacggacttgtaatcacttctt

SEQ ID NO: 132426 - DNA, 25 bp, Probe sequence
atcatccctaggtatagttggcatt

SEQ ID NO: 132427 - DNA, 25 bp, Probe sequence
aagacgcctttcattcaggtaggtc

SEQ ID NO: 132428 - DNA, 25 bp, Probe sequence
aatatatatatacgaaatgccaact

SEQ ID NO: 132429 - DNA, 25 bp, Probe sequence
caatcctcattgttttaatatatat

SEQ ID NO: 132430 - DNA, 25 bp, Probe sequence
caagcactaactgttcaccctaatt

SEQ ID NO: 132431 - DNA, 25 bp, Probe sequence
caccctaatttaagacgcctttcat

SEQ ID NO: 132432 - DNA, 25 bp, Probe sequence
gcactaactgttcaccctaatttaa

SEQ ID NO: 132433 - DNA, 25 bp, Probe sequence
gaaatgccaactatatcatccctag

SEQ ID NO: 132434 - DNA, 25 bp, Probe sequence
gtaacaagcactaactgttcaccct

SEQ ID NO: 132435 - DNA, 25 bp, Probe sequence
ggcatttttcgtttaactcatgtgt

SEQ ID NO: 132436 - DNA, 25 bp, Probe sequence
tgttcaccctaatttaagacgcctt

SEQ ID NO: 132437 - DNA, 25 bp, Probe sequence
tgccaactatatcatccctaggtat

SEQ ID NO: 132438 - DNA, 25 bp, Probe sequence
tctcattacacaatcctcattgttt

SEQ ID NO: 132439 - DNA, 25 bp, Probe sequence
taggtatagttggcatttttcgttt

SEQ ID NO: 132440 - DNA, 25 bp, Probe sequence
ttcgtttaactcatgtgtaacaagc

SEQ ID NO: 132441 - DNA, 25 bp, Probe sequence
attgaatgacaatacaactctgtta

SEQ ID NO: 132442 - DNA, 25 bp, Probe sequence
attttatcggtctagtggctgattt

SEQ ID NO: 132443 - DNA, 25 bp, Probe sequence
atcggtctagtggctgatttcaagc

SEQ ID NO: 132444 - DNA, 25 bp, Probe sequence
aaatatgcgtattgacgctttattt

SEQ ID NO: 132445 - DNA, 25 bp, Probe sequence
aactctgttaaaatgatggacgtag

SEQ ID NO: 132446 - DNA, 25 bp, Probe sequence
catgcttataacatgtttatagaag

SEQ ID NO: 132447 - DNA, 25 bp, Probe sequence
ctatctattttatcggtctagtggc

SEQ ID NO: 132448 - DNA, 25 bp, Probe sequence
ctagtggctgatttcaagctagaaa

SEQ ID NO: 132449 - DNA, 25 bp, Probe sequence
cggtctagtggctgatttcaagcta

SEQ ID NO: 132450 - DNA, 25 bp, Probe sequence
gaatgacaatacaactctgttaaaa

SEQ ID NO: 132451 - DNA, 25 bp, Probe sequence
gatggacgtagataaatatgcgtat

SEQ ID NO: 132452 - DNA, 25 bp, Probe sequence
gtggctgatttcaagctagaaatat

SEQ ID NO: 132453 - DNA, 25 bp, Probe sequence
tgcgtattgacgctttattttaaaa

SEQ ID NO: 132454 - DNA, 25 bp, Probe sequence
tctattttatcggtctagtggctga

SEQ ID NO: 132455 - DNA, 25 bp, Probe sequence
ttatcggtctagtggctgatttcaa

SEQ ID NO: 132456 - DNA, 25 bp, Probe sequence
attatgcgcgtgttatactaaatta

SEQ ID NO: 132457 - DNA, 25 bp, Probe sequence
aggctgttttttatgcgcatacata

SEQ ID NO: 132458 - DNA, 25 bp, Probe sequence
aacacgctttgaaaatccgatttat

SEQ ID NO: 132459 - DNA, 25 bp, Probe sequence
aaggctgttttttatgcgcatacat

SEQ ID NO: 132460 - DNA, 25 bp, Probe sequence
gcgcatacataacctgatatgtttt

SEQ ID NO: 132461 - DNA, 25 bp, Probe sequence
gatatgtttttaattatgcgcgtgt

SEQ ID NO: 132462 - DNA, 25 bp, Probe sequence
gatttataaaggtttttcaaggctg

SEQ ID NO: 132463 - DNA, 25 bp, Probe sequence
gtttttcaaggctgttttttatgcg

SEQ ID NO: 132464 - DNA, 25 bp, Probe sequence
gtttttaattatgcgcgtgttatac

SEQ ID NO: 132465 - DNA, 25 bp, Probe sequence
gttttttatgcgcatacataacctg

SEQ ID NO: 132466 - DNA, 25 bp, Probe sequence
tcaaggctgttttttatgcgcatac

SEQ ID NO: 132467 - DNA, 25 bp, Probe sequence
taaatacctttcaaaacacgctttg

SEQ ID NO: 132468 - DNA, 25 bp, Probe sequence
taaattttaatactgcggggtgtct

SEQ ID NO: 132469 - DNA, 25 bp, Probe sequence
tatgcgcatacataacctgatatgt

SEQ ID NO: 132470 - DNA, 25 bp, Probe sequence
tatgcgcgtgttatactaaattaaa

SEQ ID NO: 132471 - DNA, 25 bp, Probe sequence
atgtattttagctaaacgacattgt

SEQ ID NO: 132472 - DNA, 25 bp, Probe sequence
agggtgcttttggatgattggtata

SEQ ID NO: 132473 - DNA, 25 bp, Probe sequence
aaatgcacaaacaaaagcaccctaa

SEQ ID NO: 132474 - DNA, 25 bp, Probe sequence
aactttagggtgcttttggatgatt

SEQ ID NO: 132475 - DNA, 25 bp, Probe sequence
aatgatgtattttagctaaacgaca

SEQ ID NO: 132476 - DNA, 25 bp, Probe sequence
cacaaacaaaagcaccctaatttgt

SEQ ID NO: 132477 - DNA, 25 bp, Probe sequence
ctaactttagggtgcttttggatga

SEQ ID NO: 132478 - DNA, 25 bp, Probe sequence
gcttttggatgattggtatacagtt

SEQ ID NO: 132479 - DNA, 25 bp, Probe sequence
gtctaactttagggtgcttttggat

SEQ ID NO: 132480 - DNA, 25 bp, Probe sequence
ggtgcttttggatgattggtataca

SEQ ID NO: 132481 - DNA, 25 bp, Probe sequence
ggtatacagttttactataatgatg

SEQ ID NO: 132482 - DNA, 25 bp, Probe sequence
ggatgattggtatacagttttacta

SEQ ID NO: 132483 - DNA, 25 bp, Probe sequence
tgcacaaacaaaagcaccctaattt

SEQ ID NO: 132484 - DNA, 25 bp, Probe sequence
taagtctaactttagggtgcttttg

SEQ ID NO: 132485 - DNA, 25 bp, Probe sequence
tttagggtgcttttggatgattggt

SEQ ID NO: 132486 - DNA, 25 bp, Probe sequence
agttgttgtacacattccttaaatg

SEQ ID NO: 132487 - DNA, 25 bp, Probe sequence
acttttcgtcaactatcttttattg

SEQ ID NO: 132488 - DNA, 25 bp, Probe sequence
aatcacctactatcttacataataa

SEQ ID NO: 132489 - DNA, 25 bp, Probe sequence
cttacggaagtatgttttatttatg

SEQ ID NO: 132490 - DNA, 25 bp, Probe sequence
gaagtatgttttatttatgggggag

SEQ ID NO: 132491 - DNA, 25 bp, Probe sequence
gaacttttcgtcaactatcttttat

SEQ ID NO: 132492 - DNA, 25 bp, Probe sequence
gagaacttttcgtcaactatctttt

SEQ ID NO: 132493 - DNA, 25 bp, Probe sequence
gatagtacattgagaacttttcgtc

SEQ ID NO: 132494 - DNA, 25 bp, Probe sequence
gtacacattccttaaatgactaaca

SEQ ID NO: 132495 - DNA, 25 bp, Probe sequence
gtaaggtagttgttgtacacattcc

SEQ ID NO: 132496 - DNA, 25 bp, Probe sequence
gtcaactatcttttattgtaaggta

SEQ ID NO: 132497 - DNA, 25 bp, Probe sequence
ggtagttgttgtacacattccttaa

SEQ ID NO: 132498 - DNA, 25 bp, Probe sequence
tccttaaatgactaacaactttgtt

SEQ ID NO: 132499 - DNA, 25 bp, Probe sequence
tttcgtcaactatcttttattgtaa

SEQ ID NO: 132500 - DNA, 25 bp, Probe sequence
tttaatcacctactatcttacataa

SEQ ID NO: 132501 - DNA, 25 bp, Probe sequence
atatgtgcttattaaccgttaacaa

SEQ ID NO: 132502 - DNA, 25 bp, Probe sequence
acatcttttgtagttagctttattc

SEQ ID NO: 132503 - DNA, 25 bp, Probe sequence
aacaccatctataccagttcttcac

SEQ ID NO: 132504 - DNA, 25 bp, Probe sequence
ccgcttctcgaaaaataattatatt

SEQ ID NO: 132505 - DNA, 25 bp, Probe sequence
gaatttaataaacaccatctatacc

SEQ ID NO: 132506 - DNA, 25 bp, Probe sequence
gttcttcaccgcttctcgaaaaata

SEQ ID NO: 132507 - DNA, 25 bp, Probe sequence
gtagttagctttattcttaaattga

SEQ ID NO: 132508 - DNA, 25 bp, Probe sequence
gtgcttattaaccgttaacaacacg

SEQ ID NO: 132509 - DNA, 25 bp, Probe sequence
tgatttcgttaatttaattttatat

SEQ ID NO: 132510 - DNA, 25 bp, Probe sequence
tcttcaccgcttctcgaaaaataat

SEQ ID NO: 132511 - DNA, 25 bp, Probe sequence
tcttttgtagttagctttattctta

SEQ ID NO: 132512 - DNA, 25 bp, Probe sequence
taattattactgtacatcttttgta

SEQ ID NO: 132513 - DNA, 25 bp, Probe sequence
taaacaccatctataccagttcttc

SEQ ID NO: 132514 - DNA, 25 bp, Probe sequence
tactgtacatcttttgtagttagct

SEQ ID NO: 132515 - DNA, 25 bp, Probe sequence
ttcaccgcttctcgaaaaataatta

SEQ ID NO: 132516 - DNA, 25 bp, Probe sequence
atttaaattagtgctcgaatctcat

SEQ ID NO: 132517 - DNA, 25 bp, Probe sequence
atcattgcgtgcttcactgaaaatt

SEQ ID NO: 132518 - DNA, 25 bp, Probe sequence
aacctttgctaaatcaagactccct

SEQ ID NO: 132519 - DNA, 25 bp, Probe sequence
aatctcattgatttgggcgcttttt

SEQ ID NO: 132520 - DNA, 25 bp, Probe sequence
aattagtgctcgaatctcattgatt

SEQ ID NO: 132521 - DNA, 25 bp, Probe sequence
gcgtgcttcactgaaaatttgtata

SEQ ID NO: 132522 - DNA, 25 bp, Probe sequence
gctcgaatctcattgatttgggcgc

SEQ ID NO: 132523 - DNA, 25 bp, Probe sequence
gatttgggcgctttttaatttgtat

SEQ ID NO: 132524 - DNA, 25 bp, Probe sequence
tgctaaatcaagactccctttttaa

SEQ ID NO: 132525 - DNA, 25 bp, Probe sequence
tcctttaaatcattgcgtgcttcac

SEQ ID NO: 132526 - DNA, 25 bp, Probe sequence
tctcattgatttgggcgctttttaa

SEQ ID NO: 132527 - DNA, 25 bp, Probe sequence
taaatcattgcgtgcttcactgaaa

SEQ ID NO: 132528 - DNA, 25 bp, Probe sequence
tttgctaaatcaagactcccttttt

SEQ ID NO: 132529 - DNA, 25 bp, Probe sequence
tttatcctttaaatcattgcgtgct

SEQ ID NO: 132530 - DNA, 25 bp, Probe sequence
ttgtatttaaaatcaacctttgcta

SEQ ID NO: 132531 - DNA, 25 bp, Probe sequence
agtctcaccttatcatgacacaaag

SEQ ID NO: 132532 - DNA, 25 bp, Probe sequence
agctgtcactgttactgcacacata

SEQ ID NO: 132533 - DNA, 25 bp, Probe sequence
acctcagtctcaccttatcatgaca

SEQ ID NO: 132534 - DNA, 25 bp, Probe sequence
acgtataattatctttcctcgtatt

SEQ ID NO: 132535 - DNA, 25 bp, Probe sequence
aaacacgtataattatctttcctcg

SEQ ID NO: 132536 - DNA, 25 bp, Probe sequence
aagtgatttatttcatattcaatgt

SEQ ID NO: 132537 - DNA, 25 bp, Probe sequence
ctgttactgcacacatacctcagtc

SEQ ID NO: 132538 - DNA, 25 bp, Probe sequence
ctgtcactgttactgcacacatacc

SEQ ID NO: 132539 - DNA, 25 bp, Probe sequence
gttttaaatttatacagctgtcact

SEQ ID NO: 132540 - DNA, 25 bp, Probe sequence
tcactgttactgcacacatacctca

SEQ ID NO: 132541 - DNA, 25 bp, Probe sequence
tcagtctcaccttatcatgacacaa

SEQ ID NO: 132542 - DNA, 25 bp, Probe sequence
tacagctgtcactgttactgcacac

SEQ ID NO: 132543 - DNA, 25 bp, Probe sequence
tatacagctgtcactgttactgcac

SEQ ID NO: 132544 - DNA, 25 bp, Probe sequence
ttactgcacacatacctcagtctca

SEQ ID NO: 132545 - DNA, 25 bp, Probe sequence
ttcattttaagtgcgaattcaacga

SEQ ID NO: 132546 - DNA, 25 bp, Probe sequence
atttattcaccaaccactaaacaat

SEQ ID NO: 132547 - DNA, 25 bp, Probe sequence
atatttcccacatttattcaccaac

SEQ ID NO: 132548 - DNA, 25 bp, Probe sequence
acgctcacttggttatgctaatata

SEQ ID NO: 132549 - DNA, 25 bp, Probe sequence
acatgttacgctcacttggttatgc

SEQ ID NO: 132550 - DNA, 25 bp, Probe sequence
cttactctcccaaatttttaacatg

SEQ ID NO: 132551 - DNA, 25 bp, Probe sequence
ccacatttattcaccaaccactaaa

SEQ ID NO: 132552 - DNA, 25 bp, Probe sequence
gatatcattttgtttatatttccca

SEQ ID NO: 132553 - DNA, 25 bp, Probe sequence
gttacgctcacttggttatgctaat

SEQ ID NO: 132554 - DNA, 25 bp, Probe sequence
gtttatatttcccacatttattcac

SEQ ID NO: 132555 - DNA, 25 bp, Probe sequence
tcattttgtttatatttcccacatt

SEQ ID NO: 132556 - DNA, 25 bp, Probe sequence
taacgattttactaataatatttcg

SEQ ID NO: 132557 - DNA, 25 bp, Probe sequence
tactctcccaaatttttaacatgtt

SEQ ID NO: 132558 - DNA, 25 bp, Probe sequence
tatgctaatataacgattttactaa

SEQ ID NO: 132559 - DNA, 25 bp, Probe sequence
ttttaacatgttacgctcacttggt

SEQ ID NO: 132560 - DNA, 25 bp, Probe sequence
ttcaccaaccactaaacaatattaa

SEQ ID NO: 132561 - DNA, 25 bp, Probe sequence
atatgaatgctttttactagagtgc

SEQ ID NO: 132562 - DNA, 25 bp, Probe sequence
ataattttgcataatatttttgtta

SEQ ID NO: 132563 - DNA, 25 bp, Probe sequence
atgctttttactagagtgcacattg

SEQ ID NO: 132564 - DNA, 25 bp, Probe sequence
agagtgcacattgaacatacagtat

SEQ ID NO: 132565 - DNA, 25 bp, Probe sequence
acgctaaaaactatcgtaattacat

SEQ ID NO: 132566 - DNA, 25 bp, Probe sequence
actagagtgcacattgaacatacag

SEQ ID NO: 132567 - DNA, 25 bp, Probe sequence
aactatcgtaattacatatatatgt

SEQ ID NO: 132568 - DNA, 25 bp, Probe sequence
gctttttactagagtgcacattgaa

SEQ ID NO: 132569 - DNA, 25 bp, Probe sequence
gaatgctttttactagagtgcacat

SEQ ID NO: 132570 - DNA, 25 bp, Probe sequence
gtgcacattgaacatacagtatgat

SEQ ID NO: 132571 - DNA, 25 bp, Probe sequence
tgactcataatctataacgctaaaa

SEQ ID NO: 132572 - DNA, 25 bp, Probe sequence
tcataatctataacgctaaaaacta

SEQ ID NO: 132573 - DNA, 25 bp, Probe sequence
tttttgttatatgaatgctttttac

SEQ ID NO: 132574 - DNA, 25 bp, Probe sequence
ttttactagagtgcacattgaacat

SEQ ID NO: 132575 - DNA, 25 bp, Probe sequence
ttgttatatgaatgctttttactag

SEQ ID NO: 132576 - DNA, 25 bp, Probe sequence
agtaacttgtcttgcaactaccttt

SEQ ID NO: 132577 - DNA, 25 bp, Probe sequence
actacctttgtattgttgcattttt

SEQ ID NO: 132578 - DNA, 25 bp, Probe sequence
acttgtcttgcaactacctttgtat

SEQ ID NO: 132579 - DNA, 25 bp, Probe sequence
aacttgtcttgcaactacctttgta

SEQ ID NO: 132580 - DNA, 25 bp, Probe sequence
aactacctttgtattgttgcatttt

SEQ ID NO: 132581 - DNA, 25 bp, Probe sequence
cttgtcttgcaactacctttgtatt

SEQ ID NO: 132582 - DNA, 25 bp, Probe sequence
ctacctttgtattgttgcattttta

SEQ ID NO: 132583 - DNA, 25 bp, Probe sequence
gttgcatttttagacaccctgcaca

SEQ ID NO: 132584 - DNA, 25 bp, Probe sequence
gtaacttgtcttgcaactacctttg

SEQ ID NO: 132585 - DNA, 25 bp, Probe sequence
gtcttgcaactacctttgtattgtt

SEQ ID NO: 132586 - DNA, 25 bp, Probe sequence
tgttgcatttttagacaccctgcac

SEQ ID NO: 132587 - DNA, 25 bp, Probe sequence
tgcatttttagacaccctgcacact

SEQ ID NO: 132588 - DNA, 25 bp, Probe sequence
taacttgtcttgcaactacctttgt

SEQ ID NO: 132589 - DNA, 25 bp, Probe sequence
ttgcatttttagacaccctgcacac

SEQ ID NO: 132590 - DNA, 25 bp, Probe sequence
ttgtcttgcaactacctttgtattg

SEQ ID NO: 132591 - DNA, 25 bp, Probe sequence
atttaaaatttcagcatttctgttt

SEQ ID NO: 132592 - DNA, 25 bp, Probe sequence
atttcagcatttctgtttaaaattt

SEQ ID NO: 132593 - DNA, 25 bp, Probe sequence
atgctttcgaatttaaaatttcagc

SEQ ID NO: 132594 - DNA, 25 bp, Probe sequence
aaatttcagcatttctgtttaaaat

SEQ ID NO: 132595 - DNA, 25 bp, Probe sequence
caatgctttcgaatttaaaatttca

SEQ ID NO: 132596 - DNA, 25 bp, Probe sequence
cagcatttctgtttaaaatttaatt

SEQ ID NO: 132597 - DNA, 25 bp, Probe sequence
gctttcgaatttaaaatttcagcat

SEQ ID NO: 132598 - DNA, 25 bp, Probe sequence
gaatttaaaatttcagcatttctgt

SEQ ID NO: 132599 - DNA, 25 bp, Probe sequence
tcgaatttaaaatttcagcatttct

SEQ ID NO: 132600 - DNA, 25 bp, Probe sequence
taaaatttcagcatttctgtttaaa

SEQ ID NO: 132601 - DNA, 25 bp, Probe sequence
tataatctttaatacaggaggcgct

SEQ ID NO: 132602 - DNA, 25 bp, Probe sequence
tttcagcatttctgtttaaaattta

SEQ ID NO: 132603 - DNA, 25 bp, Probe sequence
tttaaaatttcagcatttctgttta

SEQ ID NO: 132604 - DNA, 25 bp, Probe sequence
ttcaatgctttcgaatttaaaattt

SEQ ID NO: 132605 - DNA, 25 bp, Probe sequence
ttcagcatttctgtttaaaatttaa

SEQ ID NO: 132606 - DNA, 25 bp, Probe sequence
atgggcgtatcttacttattgtagg

SEQ ID NO: 132607 - DNA, 25 bp, Probe sequence
aaaggatatgacacaaacttcatgt

SEQ ID NO: 132608 - DNA, 25 bp, Probe sequence
aaaatatgggcgtatcttacttatt

SEQ ID NO: 132609 - DNA, 25 bp, Probe sequence
aatatgggcgtatcttacttattgt

SEQ ID NO: 132610 - DNA, 25 bp, Probe sequence
gccccttttttatgcttcataaaca

SEQ ID NO: 132611 - DNA, 25 bp, Probe sequence
gcgtatcttacttattgtaggtagc

SEQ ID NO: 132612 - DNA, 25 bp, Probe sequence
gacacaaacttcatgtcacaccctt

SEQ ID NO: 132613 - DNA, 25 bp, Probe sequence
gtatcttacttattgtaggtagcgc

SEQ ID NO: 132614 - DNA, 25 bp, Probe sequence
gggcgtatcttacttattgtaggta

SEQ ID NO: 132615 - DNA, 25 bp, Probe sequence
tcttacttattgtaggtagcgcccc

SEQ ID NO: 132616 - DNA, 25 bp, Probe sequence
tacttattgtaggtagcgccccttt

SEQ ID NO: 132617 - DNA, 25 bp, Probe sequence
taaaaatatgggcgtatcttactta

SEQ ID NO: 132618 - DNA, 25 bp, Probe sequence
tatgggcgtatcttacttattgtag

SEQ ID NO: 132619 - DNA, 25 bp, Probe sequence
ttacttattgtaggtagcgcccctt

SEQ ID NO: 132620 - DNA, 25 bp, Probe sequence
ttatgcttcataaacacaacaaaaa

SEQ ID NO: 132621 - DNA, 25 bp, Probe sequence
attgcttttgtctaatatgtacgat

SEQ ID NO: 132622 - DNA, 25 bp, Probe sequence
aggctactactccaaacattattta

SEQ ID NO: 132623 - DNA, 25 bp, Probe sequence
agcaccattgcttttgtctaatatg

SEQ ID NO: 132624 - DNA, 25 bp, Probe sequence
aatctgtatcctcactcaaaaatct

SEQ ID NO: 132625 - DNA, 25 bp, Probe sequence
aatttacacaaacatcatcacttag

SEQ ID NO: 132626 - DNA, 25 bp, Probe sequence
caattcctttcaaataaagccctct

SEQ ID NO: 132627 - DNA, 25 bp, Probe sequence
caactctgtaaggttcattcattga

SEQ ID NO: 132628 - DNA, 25 bp, Probe sequence
cattcattgaattgtaagtttagat

SEQ ID NO: 132629 - DNA, 25 bp, Probe sequence
gatagctttcaactctgtaaggttc

SEQ ID NO: 132630 - DNA, 25 bp, Probe sequence
gtttagataaaggctactactccaa

SEQ ID NO: 132631 - DNA, 25 bp, Probe sequence
gtagcgatagctttcaactctgtaa

SEQ ID NO: 132632 - DNA, 25 bp, Probe sequence
gtacgattaatctgtatcctcactc

SEQ ID NO: 132633 - DNA, 25 bp, Probe sequence
tcccttttctcaatttacacaaaca

SEQ ID NO: 132634 - DNA, 25 bp, Probe sequence
tcatcacttagaaagcaccattgct

SEQ ID NO: 132635 - DNA, 25 bp, Probe sequence
tatcctcactcaaaaatctactaag

SEQ ID NO: 132636 - DNA, 25 bp, Probe sequence
attttgattttaagcaatgcagtat

SEQ ID NO: 132637 - DNA, 25 bp, Probe sequence
atgcttcattgagattttgatttta

SEQ ID NO: 132638 - DNA, 25 bp, Probe sequence
agatgcttcattgagattttgattt

SEQ ID NO: 132639 - DNA, 25 bp, Probe sequence
aaagatgcttcattgagattttgat

SEQ ID NO: 132640 - DNA, 25 bp, Probe sequence
aaaagatgcttcattgagattttga

SEQ ID NO: 132641 - DNA, 25 bp, Probe sequence
aagcaatgcagtataactattaact

SEQ ID NO: 132642 - DNA, 25 bp, Probe sequence
aagatgcttcattgagattttgatt

SEQ ID NO: 132643 - DNA, 25 bp, Probe sequence
cacttacgattaaaagatgcttcat

SEQ ID NO: 132644 - DNA, 25 bp, Probe sequence
gcttcattgagattttgattttaag

SEQ ID NO: 132645 - DNA, 25 bp, Probe sequence
gcagtataactattaactgatttat

SEQ ID NO: 132646 - DNA, 25 bp, Probe sequence
gagattttgattttaagcaatgcag

SEQ ID NO: 132647 - DNA, 25 bp, Probe sequence
gatgcttcattgagattttgatttt

SEQ ID NO: 132648 - DNA, 25 bp, Probe sequence
gattttaagcaatgcagtataacta

SEQ ID NO: 132649 - DNA, 25 bp, Probe sequence
gattaaaagatgcttcattgagatt

SEQ ID NO: 132650 - DNA, 25 bp, Probe sequence
tacgattaaaagatgcttcattgag

SEQ ID NO: 132651 - DNA, 25 bp, Probe sequence
ataacattgctatgacctttcaagt

SEQ ID NO: 132652 - DNA, 25 bp, Probe sequence
acctttcaagtcagattttaatatc

SEQ ID NO: 132653 - DNA, 25 bp, Probe sequence
atgagcgtatagttggtcttacgta

SEQ ID NO: 132654 - DNA, 25 bp, Probe sequence
aaaaaacactgtacattatgccaat

SEQ ID NO: 132655 - DNA, 25 bp, Probe sequence
caagtagcatttatcgctgcttgtt

SEQ ID NO: 132656 - DNA, 25 bp, Probe sequence
gcacattccatcggcatataacatt

SEQ ID NO: 132657 - DNA, 25 bp, Probe sequence
gcaaacaccataaaagactacaatt

SEQ ID NO: 132658 - DNA, 25 bp, Probe sequence
gaattgcttataaaatcgtcatgtt

SEQ ID NO: 132659 - DNA, 25 bp, Probe sequence
gttatgtcactttgaaaactagcaa

SEQ ID NO: 132660 - DNA, 25 bp, Probe sequence
gtacattatgccaatatgagcgtat

SEQ ID NO: 132661 - DNA, 25 bp, Probe sequence
gtgtatttgtttagaatatcctctt

SEQ ID NO: 132662 - DNA, 25 bp, Probe sequence
ggtcttacgtaataaaagctcgtga

SEQ ID NO: 132663 - DNA, 25 bp, Probe sequence
tgtttagaatatcctcttttttagt

SEQ ID NO: 132664 - DNA, 25 bp, Probe sequence
tcgtcatgtttaaacgttatgtcac

SEQ ID NO: 132665 - DNA, 25 bp, Probe sequence
ttatcgctgcttgttttttatgaat

SEQ ID NO: 132666 - DNA, 25 bp, Probe sequence
atttttttatgctattttggataat

SEQ ID NO: 132667 - DNA, 25 bp, Probe sequence
atcgctttgattaccaacaaggttc

SEQ ID NO: 132668 - DNA, 25 bp, Probe sequence
atgaatcgctttgattaccaacaag

SEQ ID NO: 132669 - DNA, 25 bp, Probe sequence
aaatgaatcgctttgattaccaaca

SEQ ID NO: 132670 - DNA, 25 bp, Probe sequence
aacgactcattataaatgaatcgct

SEQ ID NO: 132671 - DNA, 25 bp, Probe sequence
aatcgctttgattaccaacaaggtt

SEQ ID NO: 132672 - DNA, 25 bp, Probe sequence
caaggttctaaatcttgttggtatt

SEQ ID NO: 132673 - DNA, 25 bp, Probe sequence
gctttgattaccaacaaggttctaa

SEQ ID NO: 132674 - DNA, 25 bp, Probe sequence
gaatcgctttgattaccaacaaggt

SEQ ID NO: 132675 - DNA, 25 bp, Probe sequence
gattaccaacaaggttctaaatctt

SEQ ID NO: 132676 - DNA, 25 bp, Probe sequence
ggtatttttttatgctattttggat

SEQ ID NO: 132677 - DNA, 25 bp, Probe sequence
ggataatatgagacaatacgatgat

SEQ ID NO: 132678 - DNA, 25 bp, Probe sequence
tcgctttgattaccaacaaggttct

SEQ ID NO: 132679 - DNA, 25 bp, Probe sequence
tcttacaaaataaaacgactcatta

SEQ ID NO: 132680 - DNA, 25 bp, Probe sequence
ttggtatttttttatgctattttgg

SEQ ID NO: 132681 - DNA, 25 bp, Probe sequence
atgcttgcaaagttagtcctagtta

SEQ ID NO: 132682 - DNA, 25 bp, Probe sequence
atgatgcaacttttccatgctattc

SEQ ID NO: 132683 - DNA, 25 bp, Probe sequence
acgcctccagtcaattagtacaatc

SEQ ID NO: 132684 - DNA, 25 bp, Probe sequence
acgcgcttgtaattttctcaatgcc

SEQ ID NO: 132685 - DNA, 25 bp, Probe sequence
caacatcggggttcgaagactccct

SEQ ID NO: 132686 - DNA, 25 bp, Probe sequence
aagactcccttaagacagacctgta

SEQ ID NO: 132687 - DNA, 25 bp, Probe sequence
caatcattacaatcagactatcaga

SEQ ID NO: 132688 - DNA, 25 bp, Probe sequence
cagacctgtataattacgcgcttgt

SEQ ID NO: 132689 - DNA, 25 bp, Probe sequence
ctcaatgccaacttgaatttcactt

SEQ ID NO: 132690 - DNA, 25 bp, Probe sequence
gacatacgacaacatcggggttcga

SEQ ID NO: 132691 - DNA, 25 bp, Probe sequence
gaatttcacttattaatgatgcaac

SEQ ID NO: 132692 - DNA, 25 bp, Probe sequence
gtcctagttaagagattacgttcac

SEQ ID NO: 132693 - DNA, 25 bp, Probe sequence
gttaaagtcacctttatgattgact

SEQ ID NO: 132694 - DNA, 25 bp, Probe sequence
ttacatacgcctccagtcaattagt

SEQ ID NO: 132695 - DNA, 25 bp, Probe sequence
ttccatgctattcaatgcttgcaaa

SEQ ID NO: 132696 - DNA, 25 bp, Probe sequence
attacttaataactgaatacaacta

SEQ ID NO: 132697 - DNA, 25 bp, Probe sequence
atacaactaattatcacgcattttc

SEQ ID NO: 132698 - DNA, 25 bp, Probe sequence
atgttctgcctccaaaaatttatta

SEQ ID NO: 132699 - DNA, 25 bp, Probe sequence
acaactaattatcacgcattttcca

SEQ ID NO: 132700 - DNA, 25 bp, Probe sequence
aactaattatcacgcattttccaaa

SEQ ID NO: 132701 - DNA, 25 bp, Probe sequence
aactgaatacaactaattatcacgc

SEQ ID NO: 132702 - DNA, 25 bp, Probe sequence
caactaattatcacgcattttccaa

SEQ ID NO: 132703 - DNA, 25 bp, Probe sequence
gaatacaactaattatcacgcattt

SEQ ID NO: 132704 - DNA, 25 bp, Probe sequence
gatgttctgcctccaaaaatttatt

SEQ ID NO: 132705 - DNA, 25 bp, Probe sequence
gttctgcctccaaaaatttattact

SEQ ID NO: 132706 - DNA, 25 bp, Probe sequence
tgttctgcctccaaaaatttattac

SEQ ID NO: 132707 - DNA, 25 bp, Probe sequence
tgcctccaaaaatttattacttaat

SEQ ID NO: 132708 - DNA, 25 bp, Probe sequence
tctgcctccaaaaatttattactta

SEQ ID NO: 132709 - DNA, 25 bp, Probe sequence
tacaactaattatcacgcattttcc

SEQ ID NO: 132710 - DNA, 25 bp, Probe sequence
ttctgcctccaaaaatttattactt

SEQ ID NO: 132711 - DNA, 25 bp, Probe sequence
atacaaaacgtatcattcacacaaa

SEQ ID NO: 132712 - DNA, 25 bp, Probe sequence
actagcaataaagggttcaaatgaa

SEQ ID NO: 132713 - DNA, 25 bp, Probe sequence
aaaacgtatcattcacacaaagtgt

SEQ ID NO: 132714 - DNA, 25 bp, Probe sequence
aagctttcatgatactttcataaac

SEQ ID NO: 132715 - DNA, 25 bp, Probe sequence
aaggcaactcaagcgatgttcataa

SEQ ID NO: 132716 - DNA, 25 bp, Probe sequence
aattttctactgtaaaggcaactca

SEQ ID NO: 132717 - DNA, 25 bp, Probe sequence
cgtacctttctataattaattcaat

SEQ ID NO: 132718 - DNA, 25 bp, Probe sequence
gcgatgttcataaagctttcatgat

SEQ ID NO: 132719 - DNA, 25 bp, Probe sequence
gcaactcaagcgatgttcataaagc

SEQ ID NO: 132720 - DNA, 25 bp, Probe sequence
gaaggtatatccagctcaaattagg

SEQ ID NO: 132721 - DNA, 25 bp, Probe sequence
gatactttcataaactagcaataaa

SEQ ID NO: 132722 - DNA, 25 bp, Probe sequence
gttcaaatgaaggtatatccagctc

SEQ ID NO: 132723 - DNA, 25 bp, Probe sequence
gtaaaggcaactcaagcgatgttca

SEQ ID NO: 132724 - DNA, 25 bp, Probe sequence
tccagctcaaattagggagtgggac

SEQ ID NO: 132725 - DNA, 25 bp, Probe sequence
ttcaacgtacctttctataattaat

SEQ ID NO: 132726 - DNA, 25 bp, Probe sequence
atcttagctttgtcttttatgtgtt

SEQ ID NO: 132727 - DNA, 25 bp, Probe sequence
atgtgttagtcatcatgtatacgac

SEQ ID NO: 132728 - DNA, 25 bp, Probe sequence
agtcatcatgtatacgacatcctac

SEQ ID NO: 132729 - DNA, 25 bp, Probe sequence
agctttgtcttttatgtgttagtca

SEQ ID NO: 132730 - DNA, 25 bp, Probe sequence
aagacaaagctgttatgatcttagc

SEQ ID NO: 132731 - DNA, 25 bp, Probe sequence
cttagctttgtcttttatgtgttag

SEQ ID NO: 132732 - DNA, 25 bp, Probe sequence
ctttgtcttttatgtgttagtcatc

SEQ ID NO: 132733 - DNA, 25 bp, Probe sequence
ctgttatgatcttagctttgtcttt

SEQ ID NO: 132734 - DNA, 25 bp, Probe sequence
gatcttagctttgtcttttatgtgt

SEQ ID NO: 132735 - DNA, 25 bp, Probe sequence
gttagtcatcatgtatacgacatcc

SEQ ID NO: 132736 - DNA, 25 bp, Probe sequence
gttatgatcttagctttgtctttta

SEQ ID NO: 132737 - DNA, 25 bp, Probe sequence
gtcttttatgtgttagtcatcatgt

SEQ ID NO: 132738 - DNA, 25 bp, Probe sequence
tgatcttagctttgtcttttatgtg

SEQ ID NO: 132739 - DNA, 25 bp, Probe sequence
tcatcatgtatacgacatcctacta

SEQ ID NO: 132740 - DNA, 25 bp, Probe sequence
tatgatcttagctttgtcttttatg

SEQ ID NO: 132741 - DNA, 25 bp, Probe sequence
atttgatatcttactagccttctta

SEQ ID NO: 132742 - DNA, 25 bp, Probe sequence
atcttactagccttcttaagacgat

SEQ ID NO: 132743 - DNA, 25 bp, Probe sequence
acctccttatttgatatcttactag

SEQ ID NO: 132744 - DNA, 25 bp, Probe sequence
actagccttcttaagacgatattcc

SEQ ID NO: 132745 - DNA, 25 bp, Probe sequence
aaacctccttatttgatatcttact

SEQ ID NO: 132746 - DNA, 25 bp, Probe sequence
aatataaacctccttatttgatatc

SEQ ID NO: 132747 - DNA, 25 bp, Probe sequence
ctccttatttgatatcttactagcc

SEQ ID NO: 132748 - DNA, 25 bp, Probe sequence
ccttatttgatatcttactagcctt

SEQ ID NO: 132749 - DNA, 25 bp, Probe sequence
gacgatattccgtctatttcaatta

SEQ ID NO: 132750 - DNA, 25 bp, Probe sequence
gatatcttactagccttcttaagac

SEQ ID NO: 132751 - DNA, 25 bp, Probe sequence
taaacctccttatttgatatcttac

SEQ ID NO: 132752 - DNA, 25 bp, Probe sequence
tagccttcttaagacgatattccgt

SEQ ID NO: 132753 - DNA, 25 bp, Probe sequence
tttgatatcttactagccttcttaa

SEQ ID NO: 132754 - DNA, 25 bp, Probe sequence
ttatttgatatcttactagccttct

SEQ ID NO: 132755 - DNA, 25 bp, Probe sequence
ttactagccttcttaagacgatatt

SEQ ID NO: 132756 - DNA, 25 bp, Probe sequence
aggtcagtcttaaccctaaggtcag

SEQ ID NO: 132757 - DNA, 25 bp, Probe sequence
aggtcagtcttacgtttgtctgagg

SEQ ID NO: 132758 - DNA, 25 bp, Probe sequence
acgtttgtctgaggtaagacttcgg

SEQ ID NO: 132759 - DNA, 25 bp, Probe sequence
aagacttcgggatgcgttgagtggt

SEQ ID NO: 132760 - DNA, 25 bp, Probe sequence
cagtcttaaccctaaggtcagtctt

SEQ ID NO: 132761 - DNA, 25 bp, Probe sequence
cttcgggatgcgttgagtggttaat

SEQ ID NO: 132762 - DNA, 25 bp, Probe sequence
ctaaggtcagtcttacgtttgtctg

SEQ ID NO: 132763 - DNA, 25 bp, Probe sequence
ctcgcctccttcaacgatgtgaata

SEQ ID NO: 132764 - DNA, 25 bp, Probe sequence
gcctccttcaacgatgtgaatacat

SEQ ID NO: 132765 - DNA, 25 bp, Probe sequence
gcgttgagtggttaatgttttcctt

SEQ ID NO: 132766 - DNA, 25 bp, Probe sequence
gaggtaagacttcgggatgcgttga

SEQ ID NO: 132767 - DNA, 25 bp, Probe sequence
gttattataaccctaaggtcagtct

SEQ ID NO: 132768 - DNA, 25 bp, Probe sequence
gtcagtcttacgtttgtctgaggta

SEQ ID NO: 132769 - DNA, 25 bp, Probe sequence
gggatgcgttgagtggttaatgttt

SEQ ID NO: 132770 - DNA, 25 bp, Probe sequence
tcttaaccctaaggtcagtcttacg

SEQ ID NO: 132771 - DNA, 25 bp, Probe sequence
atttatcgtttttatttgaagctat

SEQ ID NO: 132772 - DNA, 25 bp, Probe sequence
acatcactcgcttatttatcgtttt

SEQ ID NO: 132773 - DNA, 25 bp, Probe sequence
aaaaaaagatcactgatgagtcagt

SEQ ID NO: 132774 - DNA, 25 bp, Probe sequence
aacatcactcgcttatttatcgttt

SEQ ID NO: 132775 - DNA, 25 bp, Probe sequence
aacttctattgagcttataacataa

SEQ ID NO: 132776 - DNA, 25 bp, Probe sequence
catcactcgcttatttatcgttttt

SEQ ID NO: 132777 - DNA, 25 bp, Probe sequence
cataaatttctatttattcttaatt

SEQ ID NO: 132778 - DNA, 25 bp, Probe sequence
cttctattgagcttataacataaat

SEQ ID NO: 132779 - DNA, 25 bp, Probe sequence
tcgtttttatttgaagctatattta

SEQ ID NO: 132780 - DNA, 25 bp, Probe sequence
taacatcactcgcttatttatcgtt

SEQ ID NO: 132781 - DNA, 25 bp, Probe sequence
taaacttctattgagcttataacat

SEQ ID NO: 132782 - DNA, 25 bp, Probe sequence
tatcgtttttatttgaagctatatt

SEQ ID NO: 132783 - DNA, 25 bp, Probe sequence
tatatttaaacttctattgagctta

SEQ ID NO: 132784 - DNA, 25 bp, Probe sequence
tatttaaacttctattgagcttata

SEQ ID NO: 132785 - DNA, 25 bp, Probe sequence
tttaaacttctattgagcttataac

SEQ ID NO: 132786 - DNA, 25 bp, Probe sequence
atatacacatagttttattggcgaa

SEQ ID NO: 132787 - DNA, 25 bp, Probe sequence
atcactgtagctacacatccaacaa

SEQ ID NO: 132788 - DNA, 25 bp, Probe sequence
atcgtgaagcagttgatcgtttagg

SEQ ID NO: 132789 - DNA, 25 bp, Probe sequence
atgccattacattcctactacaaaa

SEQ ID NO: 132790 - DNA, 25 bp, Probe sequence
atgaaataccttacgcaatgaaaca

SEQ ID NO: 132791 - DNA, 25 bp, Probe sequence
atgttagcggctcgtgcatgtgtat

SEQ ID NO: 132792 - DNA, 25 bp, Probe sequence
acagtatactaattggtccaggtct

SEQ ID NO: 132793 - DNA, 25 bp, Probe sequence
acaaccgcatcaaaatttaatcgta

SEQ ID NO: 132794 - DNA, 25 bp, Probe sequence
aaagaagcggttatgagtgccacat

SEQ ID NO: 132795 - DNA, 25 bp, Probe sequence
caatcggtagcccagcaatggcgac

SEQ ID NO: 132796 - DNA, 25 bp, Probe sequence
aatgattgaaatgactgacagtata

SEQ ID NO: 132797 - DNA, 25 bp, Probe sequence
aatcattcagcattacattctcgtt

SEQ ID NO: 132798 - DNA, 25 bp, Probe sequence
aattggtccaggtcttggcgttgat

SEQ ID NO: 132799 - DNA, 25 bp, Probe sequence
caggtcttggcgttgatttcaaagg

SEQ ID NO: 132800 - DNA, 25 bp, Probe sequence
ccaccatcaagacttatcaatgaaa

SEQ ID NO: 132801 - DNA, 25 bp, Probe sequence
gcggtagtggtttaatcactgtagc

SEQ ID NO: 132802 - DNA, 25 bp, Probe sequence
gctacacatccaacaaatcattcag

SEQ ID NO: 132803 - DNA, 25 bp, Probe sequence
gcatgtgtatttagcggtagtggtt

SEQ ID NO: 132804 - DNA, 25 bp, Probe sequence
gcaatggcgactggtggtatgggcg

SEQ ID NO: 132805 - DNA, 25 bp, Probe sequence
gaagcgatggttattgatattaatg

SEQ ID NO: 132806 - DNA, 25 bp, Probe sequence
gagcgtaatcgtgaagcagttgatc

SEQ ID NO: 132807 - DNA, 25 bp, Probe sequence
gatacacttgctggtatgattacaa

SEQ ID NO: 132808 - DNA, 25 bp, Probe sequence
gattaagtggtattcctattgagga

SEQ ID NO: 132809 - DNA, 25 bp, Probe sequence
ggtggtatgggcgatacacttgctg

SEQ ID NO: 132810 - DNA, 25 bp, Probe sequence
ggtccaggtcttggcgttgatttca

SEQ ID NO: 132811 - DNA, 25 bp, Probe sequence
ggtagcccagcaatggcgactggtg

SEQ ID NO: 132812 - DNA, 25 bp, Probe sequence
ggttatgagtgccacatatacacat

SEQ ID NO: 132813 - DNA, 25 bp, Probe sequence
ggaacagacatatgagcgtaatcgt

SEQ ID NO: 132814 - DNA, 25 bp, Probe sequence
tgggcgatacacttgctggtatgat

SEQ ID NO: 132815 - DNA, 25 bp, Probe sequence
tctcgttgcccagaagcgatggtta

SEQ ID NO: 132816 - DNA, 25 bp, Probe sequence
tacattctcgttgcccagaagcgat

SEQ ID NO: 132817 - DNA, 25 bp, Probe sequence
tactacaaaatatacaaccgcatca

SEQ ID NO: 132818 - DNA, 25 bp, Probe sequence
tagcggctcgtgcatgtgtatttag

SEQ ID NO: 132819 - DNA, 25 bp, Probe sequence
ttcagcattacattctcgttgccca

SEQ ID NO: 132820 - DNA, 25 bp, Probe sequence
attcttgggccaatccttcggaaga

SEQ ID NO: 132821 - DNA, 25 bp, Probe sequence
atttgtggataactctgtgggcatt

SEQ ID NO: 132822 - DNA, 25 bp, Probe sequence
atgcgttggttcaattcttgggcca

SEQ ID NO: 132823 - DNA, 25 bp, Probe sequence
atgtcgtttggtcctccaaattgtt

SEQ ID NO: 132824 - DNA, 25 bp, Probe sequence
atgatgtctatcttggtgtatgggc

SEQ ID NO: 132825 - DNA, 25 bp, Probe sequence
atggcttgcttccaatatttctctt

SEQ ID NO: 132826 - DNA, 25 bp, Probe sequence
agatagcatctttccttgtatttct

SEQ ID NO: 132827 - DNA, 25 bp, Probe sequence
aactttccagttatccacaagttat

SEQ ID NO: 132828 - DNA, 25 bp, Probe sequence
aacttctatgatgtctatcttggtg

SEQ ID NO: 132829 - DNA, 25 bp, Probe sequence
catattttctggtgctttttcgtct

SEQ ID NO: 132830 - DNA, 25 bp, Probe sequence
catattctgctatggcttgcttcca

SEQ ID NO: 132831 - DNA, 25 bp, Probe sequence
ctttccttgtatttctaatgtaatg

SEQ ID NO: 132832 - DNA, 25 bp, Probe sequence
ctgtgggcattgtgggtatttctct

SEQ ID NO: 132833 - DNA, 25 bp, Probe sequence
ccttgggtcatgcgttggttcaatt

SEQ ID NO: 132834 - DNA, 25 bp, Probe sequence
gcatctttccttgtatttctaatgt

SEQ ID NO: 132835 - DNA, 25 bp, Probe sequence
gttatcaactttccagttatccaca

SEQ ID NO: 132836 - DNA, 25 bp, Probe sequence
gtttccctacagctaaaatggtgat

SEQ ID NO: 132837 - DNA, 25 bp, Probe sequence
gtctatcttggtgtatgggcctaaa

SEQ ID NO: 132838 - DNA, 25 bp, Probe sequence
gtgtatgggcctaaacgtttttcat

SEQ ID NO: 132839 - DNA, 25 bp, Probe sequence
gtgattttcatgtcgtttggtcctc

SEQ ID NO: 132840 - DNA, 25 bp, Probe sequence
gtgtataacttgtgtatttgtggat

SEQ ID NO: 132841 - DNA, 25 bp, Probe sequence
gggtcatgcgttggttcaattcttg

SEQ ID NO: 132842 - DNA, 25 bp, Probe sequence
ggtcctccaaattgttatcaacttt

SEQ ID NO: 132843 - DNA, 25 bp, Probe sequence
ggttcaattcttgggccaatccttc

SEQ ID NO: 132844 - DNA, 25 bp, Probe sequence
ggataactctgtgggcattgtgggt

SEQ ID NO: 132845 - DNA, 25 bp, Probe sequence
ggctagtattcgttggccttctttt

SEQ ID NO: 132846 - DNA, 25 bp, Probe sequence
ggcctaaacgtttttcatattctgc

SEQ ID NO: 132847 - DNA, 25 bp, Probe sequence
ggccaatccttcggaagatagcatc

SEQ ID NO: 132848 - DNA, 25 bp, Probe sequence
tgcttccaatatttctcttttagtt

SEQ ID NO: 132849 - DNA, 25 bp, Probe sequence
tctcttttagtttccctacagctaa

SEQ ID NO: 132850 - DNA, 25 bp, Probe sequence
tatttctcttttagtttccctacag

SEQ ID NO: 132851 - DNA, 25 bp, Probe sequence
tttcatgtcgtttggtcctccaaat

SEQ ID NO: 132852 - DNA, 25 bp, Probe sequence
ttttggctagtattcgttggccttc

SEQ ID NO: 132853 - DNA, 25 bp, Probe sequence
ttctgctatggcttgcttccaatat

SEQ ID NO: 132854 - DNA, 25 bp, Probe sequence
atacgaagaagctcaagttacccga

SEQ ID NO: 132855 - DNA, 25 bp, Probe sequence
atatcttaagcgttcatgatggcta

SEQ ID NO: 132856 - DNA, 25 bp, Probe sequence
atcaaaacctatatcatcaatcagt

SEQ ID NO: 132857 - DNA, 25 bp, Probe sequence
agtgttttagcgacttgtcaggact

SEQ ID NO: 132858 - DNA, 25 bp, Probe sequence
agcttggccgaactagaatctgata

SEQ ID NO: 132859 - DNA, 25 bp, Probe sequence
actgtggccgtgttatcaatcaata

SEQ ID NO: 132860 - DNA, 25 bp, Probe sequence
actattcaacaacgactcaaaagac

SEQ ID NO: 132861 - DNA, 25 bp, Probe sequence
aaagcattcgatcggctcaaactca

SEQ ID NO: 132862 - DNA, 25 bp, Probe sequence
aaagctgtgttcaattattaccttc

SEQ ID NO: 132863 - DNA, 25 bp, Probe sequence
aaaccatactattcaacaacgactc

SEQ ID NO: 132864 - DNA, 25 bp, Probe sequence
aaactacactcaatcacgagcagct

SEQ ID NO: 132865 - DNA, 25 bp, Probe sequence
aaacatgttgtacccctatattgat

SEQ ID NO: 132866 - DNA, 25 bp, Probe sequence
aactcaatattttcatcagcttggc

SEQ ID NO: 132867 - DNA, 25 bp, Probe sequence
aagcctcgctggcatctatttcaaa

SEQ ID NO: 132868 - DNA, 25 bp, Probe sequence
aatggtactttcacgatagacacag

SEQ ID NO: 132869 - DNA, 25 bp, Probe sequence
aataaaagcctcgctggcatctatt

SEQ ID NO: 132870 - DNA, 25 bp, Probe sequence
aattgcgcaatacttagaagctgat

SEQ ID NO: 132871 - DNA, 25 bp, Probe sequence
cactcaatcacgagcagctgataga

SEQ ID NO: 132872 - DNA, 25 bp, Probe sequence
caggacttctttcaaaatcaacagc

SEQ ID NO: 132873 - DNA, 25 bp, Probe sequence
cgtatcaaattcgaaaagctttcca

SEQ ID NO: 132874 - DNA, 25 bp, Probe sequence
ccctttgggtatcactatcataatg

SEQ ID NO: 132875 - DNA, 25 bp, Probe sequence
cctaattactgtggccgtgttatca

SEQ ID NO: 132876 - DNA, 25 bp, Probe sequence
gcgacttgtcaggacttctttcaaa

SEQ ID NO: 132877 - DNA, 25 bp, Probe sequence
gctttccaaaacatcattcaacaac

SEQ ID NO: 132878 - DNA, 25 bp, Probe sequence
gaagctcaagttacccgaactcaga

SEQ ID NO: 132879 - DNA, 25 bp, Probe sequence
gaactgattcaacaaggacaatgtg

SEQ ID NO: 132880 - DNA, 25 bp, Probe sequence
gaaaacatgttcccagctattgtca

SEQ ID NO: 132881 - DNA, 25 bp, Probe sequence
gatcggctcaaactcaatattttca

SEQ ID NO: 132882 - DNA, 25 bp, Probe sequence
gtgttcaattattaccttcaaggtt

SEQ ID NO: 132883 - DNA, 25 bp, Probe sequence
gtgttatcaatcaatacggacaata

SEQ ID NO: 132884 - DNA, 25 bp, Probe sequence
gggtatcactatcataatggtactt

SEQ ID NO: 132885 - DNA, 25 bp, Probe sequence
tgttcccagctattgtcagtacaac

SEQ ID NO: 132886 - DNA, 25 bp, Probe sequence
tcacgctaaacatgttgtaccccta

SEQ ID NO: 132887 - DNA, 25 bp, Probe sequence
ttcaacaacgtttcacgctaaacat

SEQ ID NO: 132888 - DNA, 25 bp, Probe sequence
atatcatgaattacaaacctaagaa

SEQ ID NO: 132889 - DNA, 25 bp, Probe sequence
atcactgagaaatcttctgaagcaa

SEQ ID NO: 132890 - DNA, 25 bp, Probe sequence
aggatcaatcgacttatttaactaa

SEQ ID NO: 132891 - DNA, 25 bp, Probe sequence
agcgattgtaactcttaaagaagga

SEQ ID NO: 132892 - DNA, 25 bp, Probe sequence
agcaatggctgaagacaaatacact

SEQ ID NO: 132893 - DNA, 25 bp, Probe sequence
acgtatgggccgttaccaaggctat

SEQ ID NO: 132894 - DNA, 25 bp, Probe sequence
aaatacactttcgacgttgatactc

SEQ ID NO: 132895 - DNA, 25 bp, Probe sequence
aaagaaggatcaatcgacttattta

SEQ ID NO: 132896 - DNA, 25 bp, Probe sequence
aagttgcaagtgttaatatcatgaa

SEQ ID NO: 132897 - DNA, 25 bp, Probe sequence
caagagatattcttaagcgccccgt

SEQ ID NO: 132898 - DNA, 25 bp, Probe sequence
cactttcgacgttgatactcgtgtt

SEQ ID NO: 132899 - DNA, 25 bp, Probe sequence
ctttcgacgttgatactcgtgttaa

SEQ ID NO: 132900 - DNA, 25 bp, Probe sequence
cgttgatactcgtgttaacaaaaca

SEQ ID NO: 132901 - DNA, 25 bp, Probe sequence
cgacgttgatactcgtgttaacaaa

SEQ ID NO: 132902 - DNA, 25 bp, Probe sequence
ccgtaatcactgagaaatcttctga

SEQ ID NO: 132903 - DNA, 25 bp, Probe sequence
gccccgtaatcactgagaaatcttc

SEQ ID NO: 132904 - DNA, 25 bp, Probe sequence
gccgttaccaaggctatacaaacaa

SEQ ID NO: 132905 - DNA, 25 bp, Probe sequence
gcgccccgtaatcactgagaaatct

SEQ ID NO: 132906 - DNA, 25 bp, Probe sequence
gcaagagatattcttaagcgccccg

SEQ ID NO: 132907 - DNA, 25 bp, Probe sequence
gaagacaaatacactttcgacgttg

SEQ ID NO: 132908 - DNA, 25 bp, Probe sequence
gaaggatcaatcgacttatttaact

SEQ ID NO: 132909 - DNA, 25 bp, Probe sequence
gaaaagcgattgtaactcttaaaga

SEQ ID NO: 132910 - DNA, 25 bp, Probe sequence
gaaatcttctgaagcaatggctgaa

SEQ ID NO: 132911 - DNA, 25 bp, Probe sequence
gaaatcttcaacgtaaaagttgcaa

SEQ ID NO: 132912 - DNA, 25 bp, Probe sequence
gacaaatacactttcgacgttgata

SEQ ID NO: 132913 - DNA, 25 bp, Probe sequence
gatactcgtgttaacaaaacacaag

SEQ ID NO: 132914 - DNA, 25 bp, Probe sequence
gtatgggccgttaccaaggctatac

SEQ ID NO: 132915 - DNA, 25 bp, Probe sequence
ggccgttaccaaggctatacaaaca

SEQ ID NO: 132916 - DNA, 25 bp, Probe sequence
ggctgaagacaaatacactttcgac

SEQ ID NO: 132917 - DNA, 25 bp, Probe sequence
tgggccgttaccaaggctatacaaa

SEQ ID NO: 132918 - DNA, 25 bp, Probe sequence
tacactttcgacgttgatactcgtg

SEQ ID NO: 132919 - DNA, 25 bp, Probe sequence
tatgggccgttaccaaggctataca

SEQ ID NO: 132920 - DNA, 25 bp, Probe sequence
ttaccaaggctatacaaacaaaaga

SEQ ID NO: 132921 - DNA, 25 bp, Probe sequence
ttcgacgttgatactcgtgttaaca

SEQ ID NO: 132922 - DNA, 25 bp, Probe sequence
tcgtcaaggtacaatccgtgctcca

SEQ ID NO: 132923 - DNA, 25 bp, Probe sequence
attgagccaaataatagcgttttat

SEQ ID NO: 132924 - DNA, 25 bp, Probe sequence
attacgtcaaggtacgcatgctgtt

SEQ ID NO: 132925 - DNA, 25 bp, Probe sequence
atggcgtggcggtggtatcgtattc

SEQ ID NO: 132926 - DNA, 25 bp, Probe sequence
agcgttttattcgaagctattaatt

SEQ ID NO: 132927 - DNA, 25 bp, Probe sequence
acgcaacatccctggcgttcaagtg

SEQ ID NO: 132928 - DNA, 25 bp, Probe sequence
aaaaaggaacaggtcgtgctcgtca

SEQ ID NO: 132929 - DNA, 25 bp, Probe sequence
aaaagttgaggaggtgctcggataa

SEQ ID NO: 132930 - DNA, 25 bp, Probe sequence
aagcggtggcggacgtaaaccatgg

SEQ ID NO: 132931 - DNA, 25 bp, Probe sequence
aatgctgacagcttagtaattactg

SEQ ID NO: 132932 - DNA, 25 bp, Probe sequence
aatgcctaagaaaatgcgtcgttta

SEQ ID NO: 132933 - DNA, 25 bp, Probe sequence
catccctggcgttcaagtgacaact

SEQ ID NO: 132934 - DNA, 25 bp, Probe sequence
cgtgcttcattacgtcaaggtacgc

SEQ ID NO: 132935 - DNA, 25 bp, Probe sequence
gcgtcgtttagctttacgctcagca

SEQ ID NO: 132936 - DNA, 25 bp, Probe sequence
gctattaatttacaacgtgcttcat

SEQ ID NO: 132937 - DNA, 25 bp, Probe sequence
ggtatcgtattcggaccaactccaa

SEQ ID NO: 132938 - DNA, 25 bp, Probe sequence
gaatcgttcagcagtaagcggtggc

SEQ ID NO: 132939 - DNA, 25 bp, Probe sequence
gacggaactaaatcaggttcaatcg

SEQ ID NO: 132940 - DNA, 25 bp, Probe sequence
gacgcattcaacttcgaagctccaa

SEQ ID NO: 132941 - DNA, 25 bp, Probe sequence
gatgcagtattcggtattgagccaa

SEQ ID NO: 132942 - DNA, 25 bp, Probe sequence
gtacgcatgctgttaagaatcgttc

SEQ ID NO: 132943 - DNA, 25 bp, Probe sequence
gtcgtgctcgtcaaggtacaatccg

SEQ ID NO: 132944 - DNA, 25 bp, Probe sequence
gtgacaactgctcaaggtttaaatg

SEQ ID NO: 132945 - DNA, 25 bp, Probe sequence
ggttcaatcgaattaagcgatgcag

SEQ ID NO: 132946 - DNA, 25 bp, Probe sequence
ggaccaactccaagaagttatgcat

SEQ ID NO: 132947 - DNA, 25 bp, Probe sequence
ggcggacgtaaaccatggaagcaaa

SEQ ID NO: 132948 - DNA, 25 bp, Probe sequence
ggcttaactgtagttgacgcattca

SEQ ID NO: 132949 - DNA, 25 bp, Probe sequence
ggcgttcaagtgacaactgctcaag

SEQ ID NO: 132950 - DNA, 25 bp, Probe sequence
tgaattatcagcacgcaacatccct

SEQ ID NO: 132951 - DNA, 25 bp, Probe sequence
tgctccacaatggcgtggcggtggt

SEQ ID NO: 132952 - DNA, 25 bp, Probe sequence
tcaacttcgaagctccaaaaactaa

SEQ ID NO: 132953 - DNA, 25 bp, Probe sequence
tagatatcactaatgctgacagctt

SEQ ID NO: 132954 - DNA, 25 bp, Probe sequence
tagtaattactgaagctgctgctaa

SEQ ID NO: 132955 - DNA, 25 bp, Probe sequence
ttacgctcagcattatctttcaaag

SEQ ID NO: 132956 - DNA, 25 bp, Probe sequence
ataaaccagctgaaggtcacgctaa

SEQ ID NO: 132957 - DNA, 25 bp, Probe sequence
atccctgtaacagtagtagaagcta

SEQ ID NO: 132958 - DNA, 25 bp, Probe sequence
atggcttcagatgcttctagagtat

SEQ ID NO: 132959 - DNA, 25 bp, Probe sequence
aggtcacgctaaaaaagctgacgca

SEQ ID NO: 132960 - DNA, 25 bp, Probe sequence
agcacctaagcgcttcattcgtgaa

SEQ ID NO: 132961 - DNA, 25 bp, Probe sequence
acgaagtaggtcaagaagtctcagt

SEQ ID NO: 132962 - DNA, 25 bp, Probe sequence
acgccacggacaatctcgtggacct

SEQ ID NO: 132963 - DNA, 25 bp, Probe sequence
acttttgtagctggcgacgttattg

SEQ ID NO: 132964 - DNA, 25 bp, Probe sequence
acactgtaactgttcaaaacttaga

SEQ ID NO: 132965 - DNA, 25 bp, Probe sequence
acaatctcgtggacctatgtcacac

SEQ ID NO: 132966 - DNA, 25 bp, Probe sequence
aaagctgacgcagcacctaagcgct

SEQ ID NO: 132967 - DNA, 25 bp, Probe sequence
aacggtgaattaatccctgtaacag

SEQ ID NO: 132968 - DNA, 25 bp, Probe sequence
aagtctcagtagatacttttgtagc

SEQ ID NO: 132969 - DNA, 25 bp, Probe sequence
aaggccaaaaaatgccaggacgtat

SEQ ID NO: 132970 - DNA, 25 bp, Probe sequence
aatgccaggacgtatgggtggaaac

SEQ ID NO: 132971 - DNA, 25 bp, Probe sequence
aattccgcaatgtagacgtggatgc

SEQ ID NO: 132972 - DNA, 25 bp, Probe sequence
caaggtgcaattaaacgccacggac

SEQ ID NO: 132973 - DNA, 25 bp, Probe sequence
cacagagcaccaggttctgtaggta

SEQ ID NO: 132974 - DNA, 25 bp, Probe sequence
catttccacagagcaccaggttctg

SEQ ID NO: 132975 - DNA, 25 bp, Probe sequence
gcgacgttattgacgtaacaggcgt

SEQ ID NO: 132976 - DNA, 25 bp, Probe sequence
gcttcattcgtgaattccgcaatgt

SEQ ID NO: 132977 - DNA, 25 bp, Probe sequence
gcaattaaacgccacggacaatctc

SEQ ID NO: 132978 - DNA, 25 bp, Probe sequence
gaagttgatggatacaacgcaatcc

SEQ ID NO: 132979 - DNA, 25 bp, Probe sequence
gaagtagttcaagttgacacagaaa

SEQ ID NO: 132980 - DNA, 25 bp, Probe sequence
gacacaagtattcggagaaaacggt

SEQ ID NO: 132981 - DNA, 25 bp, Probe sequence
gacgtggatgcttacgaagtaggtc

SEQ ID NO: 132982 - DNA, 25 bp, Probe sequence
gtaggtatggcttcagatgcttcta

SEQ ID NO: 132983 - DNA, 25 bp, Probe sequence
gtaacaggcgtatcaaaaggtaaag

SEQ ID NO: 132984 - DNA, 25 bp, Probe sequence
gggtggaaacactgtaactgttcaa

SEQ ID NO: 132985 - DNA, 25 bp, Probe sequence
ggtttagtagaaatcagaacttcaa

SEQ ID NO: 132986 - DNA, 25 bp, Probe sequence
ggatacaacgcaatccaagttggat

SEQ ID NO: 132987 - DNA, 25 bp, Probe sequence
tggacctatgtcacacggttctcat

SEQ ID NO: 132988 - DNA, 25 bp, Probe sequence
taagcgcttcattcgtgaattccgc

SEQ ID NO: 132989 - DNA, 25 bp, Probe sequence
ttctcatttccacagagcaccaggt

SEQ ID NO: 132990 - DNA, 25 bp, Probe sequence
tgtttctggaccaattccgttacca

SEQ ID NO: 132991 - DNA, 25 bp, Probe sequence
accaaaaacagttgacgctttaatg

SEQ ID NO: 132992 - DNA, 25 bp, Probe sequence
acagttgacgctttaatgggcttaa

SEQ ID NO: 132993 - DNA, 25 bp, Probe sequence
acagcgaaacgttctggtgcagatg

SEQ ID NO: 132994 - DNA, 25 bp, Probe sequence
aaacagttgacgctttaatgggctt

SEQ ID NO: 132995 - DNA, 25 bp, Probe sequence
aaacttaccatctggtgtagacatc

SEQ ID NO: 132996 - DNA, 25 bp, Probe sequence
aacgttctggtgcagatgtttctgg

SEQ ID NO: 132997 - DNA, 25 bp, Probe sequence
aatgggcttaaacttaccatctggt

SEQ ID NO: 132998 - DNA, 25 bp, Probe sequence
aatcgatattgtaaacccaacacca

SEQ ID NO: 132999 - DNA, 25 bp, Probe sequence
caattccgttaccaactgagaaatc

SEQ ID NO: 133000 - DNA, 25 bp, Probe sequence
cagatgtttctggaccaattccgtt

SEQ ID NO: 133001 - DNA, 25 bp, Probe sequence
ccatctggtgtagacatcgaaatca

SEQ ID NO: 133002 - DNA, 25 bp, Probe sequence
gcgaaacgttctggtgcagatgttt

SEQ ID NO: 133003 - DNA, 25 bp, Probe sequence
gcttaaacttaccatctggtgtaga

SEQ ID NO: 133004 - DNA, 25 bp, Probe sequence
gcagagaagattgtagaaacagcga

SEQ ID NO: 133005 - DNA, 25 bp, Probe sequence
gcagatgtttctggaccaattccgt

SEQ ID NO: 133006 - DNA, 25 bp, Probe sequence
gaaacagcgaaacgttctggtgcag

SEQ ID NO: 133007 - DNA, 25 bp, Probe sequence
gaccaattccgttaccaactgagaa

SEQ ID NO: 133008 - DNA, 25 bp, Probe sequence
gatgtttctggaccaattccgttac

SEQ ID NO: 133009 - DNA, 25 bp, Probe sequence
gattaaaagcttatgatcaccgcgt

SEQ ID NO: 133010 - DNA, 25 bp, Probe sequence
gattcacgtgaacaattcgaacaac

SEQ ID NO: 133011 - DNA, 25 bp, Probe sequence
gttgacgctttaatgggcttaaact

SEQ ID NO: 133012 - DNA, 25 bp, Probe sequence
gttctggtgcagatgtttctggacc

SEQ ID NO: 133013 - DNA, 25 bp, Probe sequence
gtgaacaattcgaacaacgtacaca

SEQ ID NO: 133014 - DNA, 25 bp, Probe sequence
gggcttaaacttaccatctggtgta

SEQ ID NO: 133015 - DNA, 25 bp, Probe sequence
ggtgtagacatcgaaatcaaattat

SEQ ID NO: 133016 - DNA, 25 bp, Probe sequence
ggtgcagatgtttctggaccaattc

SEQ ID NO: 133017 - DNA, 25 bp, Probe sequence
tggaccaattccgttaccaactgag

SEQ ID NO: 133018 - DNA, 25 bp, Probe sequence
ggcaaaacaaaaaatcagaatcaga

SEQ ID NO: 133019 - DNA, 25 bp, Probe sequence
ttctggaccaattccgttaccaact

SEQ ID NO: 133020 - DNA, 25 bp, Probe sequence
tcgatattgtaaacccaacaccaaa

SEQ ID NO: 133021 - DNA, 25 bp, Probe sequence
tctggaccaattccgttaccaactg

SEQ ID NO: 133022 - DNA, 25 bp, Probe sequence
tctggtgcagatgtttctggaccaa

SEQ ID NO: 133023 - DNA, 25 bp, Probe sequence
ttaccatctggtgtagacatcgaaa

SEQ ID NO: 133024 - DNA, 25 bp, Probe sequence
acaactacaacaacttcttatatcg

SEQ ID NO: 133025 - DNA, 25 bp, Probe sequence
acaactttcttatctatggcctata

SEQ ID NO: 133026 - DNA, 25 bp, Probe sequence
aacttcaggtgttgctgtaggtgct

SEQ ID NO: 133027 - DNA, 25 bp, Probe sequence
aaggtgccatttttgtagcgactgc

SEQ ID NO: 133028 - DNA, 25 bp, Probe sequence
caactggtattgcgtgtggatttat

SEQ ID NO: 133029 - DNA, 25 bp, Probe sequence
caggttgttgtttcctattagcgct

SEQ ID NO: 133030 - DNA, 25 bp, Probe sequence
gcatttgtaggctcgctattcatgg

SEQ ID NO: 133031 - DNA, 25 bp, Probe sequence
gcattctttgcatttactgttgtgt

SEQ ID NO: 133032 - DNA, 25 bp, Probe sequence
gcaggtgttaaaggcgtatcagaag

SEQ ID NO: 133033 - DNA, 25 bp, Probe sequence
gaagatggctgtttcagcaggtata

SEQ ID NO: 133034 - DNA, 25 bp, Probe sequence
gaaaagttttgaagttgcagtgcca

SEQ ID NO: 133035 - DNA, 25 bp, Probe sequence
gagctggtagagcattgttctcaga

SEQ ID NO: 133036 - DNA, 25 bp, Probe sequence
gatcatcacagcaatcgttggtatg

SEQ ID NO: 133037 - DNA, 25 bp, Probe sequence
gatattcggtatcgttattacagtt

SEQ ID NO: 133038 - DNA, 25 bp, Probe sequence
gattccaagtattgaaccaacgttc

SEQ ID NO: 133039 - DNA, 25 bp, Probe sequence
gttggtatgttcactggattgattc

SEQ ID NO: 133040 - DNA, 25 bp, Probe sequence
gttaaccatgggtattccttggcaa

SEQ ID NO: 133041 - DNA, 25 bp, Probe sequence
gtaggtgctagaacaggatttgcta

SEQ ID NO: 133042 - DNA, 25 bp, Probe sequence
gtagcgactgcattagcagcatttg

SEQ ID NO: 133043 - DNA, 25 bp, Probe sequence
ggtggtaggtgtattaatggctgca

SEQ ID NO: 133044 - DNA, 25 bp, Probe sequence
ggattgattcaaatgccatctggta

SEQ ID NO: 133045 - DNA, 25 bp, Probe sequence
ggttctatctttatcggtatgatca

SEQ ID NO: 133046 - DNA, 25 bp, Probe sequence
ggatttgctagtatcgtaacaggtt

SEQ ID NO: 133047 - DNA, 25 bp, Probe sequence
tgtacttcatatttgttcatggtta

SEQ ID NO: 133048 - DNA, 25 bp, Probe sequence
tgttctcagattctttagctacgat

SEQ ID NO: 133049 - DNA, 25 bp, Probe sequence
tgaagcgtttaaagacccaagtcaa

SEQ ID NO: 133050 - DNA, 25 bp, Probe sequence
tctttagtccgttaatcgctgttgt

SEQ ID NO: 133051 - DNA, 25 bp, Probe sequence
taacaagtgcagttacgacaccagc

SEQ ID NO: 133052 - DNA, 25 bp, Probe sequence
tatccaattacaatgcttatctcta

SEQ ID NO: 133053 - DNA, 25 bp, Probe sequence
tattttagcagttaacccgcaagtt

SEQ ID NO: 133054 - DNA, 25 bp, Probe sequence
tattctcaggtatattctttgcgat

SEQ ID NO: 133055 - DNA, 25 bp, Probe sequence
ttaggcggtatcacaactttcttat

SEQ ID NO: 133056 - DNA, 25 bp, Probe sequence
ttgggacatttaactgatccaccag

SEQ ID NO: 133057 - DNA, 25 bp, Probe sequence
ttgatttctttgatacagctggtac

SEQ ID NO: 133058 - DNA, 25 bp, Probe sequence
agtatgatgcacagctatccctggg

SEQ ID NO: 133059 - DNA, 25 bp, Probe sequence
aaagtatctgatcaccatgcaatta

SEQ ID NO: 133060 - DNA, 25 bp, Probe sequence
aaaaatggtcagatgcttgtgtgcc

SEQ ID NO: 133061 - DNA, 25 bp, Probe sequence
aagtcgtaacctatccaagaacaga

SEQ ID NO: 133062 - DNA, 25 bp, Probe sequence
aatcctctggtaaagtatctcgtaa

SEQ ID NO: 133063 - DNA, 25 bp, Probe sequence
ctccgcacgagtatgacgcgataac

SEQ ID NO: 133064 - DNA, 25 bp, Probe sequence
ccgtcgattatggattagctcagtt

SEQ ID NO: 133065 - DNA, 25 bp, Probe sequence
gcgtatgaagtctaaatcctctggt

SEQ ID NO: 133066 - DNA, 25 bp, Probe sequence
gcggtatatcgttgtgtttgtggac

SEQ ID NO: 133067 - DNA, 25 bp, Probe sequence
gcaccagaagaattaacgtcgccac

SEQ ID NO: 133068 - DNA, 25 bp, Probe sequence
gcaacgcgtgcactaacaacaaagt

SEQ ID NO: 133069 - DNA, 25 bp, Probe sequence
gaagaccttccaattatacctaaat

SEQ ID NO: 133070 - DNA, 25 bp, Probe sequence
gaatggcgattagaagaccttccaa

SEQ ID NO: 133071 - DNA, 25 bp, Probe sequence
gaatgcccaacgtgtggtaaattca

SEQ ID NO: 133072 - DNA, 25 bp, Probe sequence
gaagtcgtatccgcaatcactgtac

SEQ ID NO: 133073 - DNA, 25 bp, Probe sequence
gaacatgaaacaacacctccagaat

SEQ ID NO: 133074 - DNA, 25 bp, Probe sequence
gacaaatgcgacacctgaacaatac

SEQ ID NO: 133075 - DNA, 25 bp, Probe sequence
gagatgcaacagcctttttcagaag

SEQ ID NO: 133076 - DNA, 25 bp, Probe sequence
gagatattgctgatgctttacaaat

SEQ ID NO: 133077 - DNA, 25 bp, Probe sequence
gagattaatcagttcaaaccacaac

SEQ ID NO: 133078 - DNA, 25 bp, Probe sequence
gatgcttgtgtgccaagatccatct

SEQ ID NO: 133079 - DNA, 25 bp, Probe sequence
gatcaccatgcaattattcctacag

SEQ ID NO: 133080 - DNA, 25 bp, Probe sequence
gatatgattgtcgagcgttttttag

SEQ ID NO: 133081 - DNA, 25 bp, Probe sequence
gatttgtattatgcagcgttagcga

SEQ ID NO: 133082 - DNA, 25 bp, Probe sequence
gttgcaacaagggccgacattatcg

SEQ ID NO: 133083 - DNA, 25 bp, Probe sequence
gttgcagggcacacatttgttttga

SEQ ID NO: 133084 - DNA, 25 bp, Probe sequence
gtcacgtgggcgttaggtcatctag

SEQ ID NO: 133085 - DNA, 25 bp, Probe sequence
gtcgccacttttaactgcacaatgg

SEQ ID NO: 133086 - DNA, 25 bp, Probe sequence
gtgagacctgtcatgtcagacttaa

SEQ ID NO: 133087 - DNA, 25 bp, Probe sequence
ggtggtatcggcacagttgcaacaa

SEQ ID NO: 133088 - DNA, 25 bp, Probe sequence
ggagaaccctcagaactttattcaa

SEQ ID NO: 133089 - DNA, 25 bp, Probe sequence
ggacattctgaaacgcaagcacata

SEQ ID NO: 133090 - DNA, 25 bp, Probe sequence
tatccctgggacgtgttcagacacc

SEQ ID NO: 133091 - DNA, 25 bp, Probe sequence
ttcagacaccaacgattcaattagt

SEQ ID NO: 133092 - DNA, 25 bp, Probe sequence
attaacatgttacaatacatttaac

SEQ ID NO: 133093 - DNA, 25 bp, Probe sequence
atttaacacatcatttgcaatcatt

SEQ ID NO: 133094 - DNA, 25 bp, Probe sequence
atacatttaacacatcatttgcaat

SEQ ID NO: 133095 - DNA, 25 bp, Probe sequence
atcatttgcaatcattgaatttaaa

SEQ ID NO: 133096 - DNA, 25 bp, Probe sequence
atgttacaatacatttaacacatca

SEQ ID NO: 133097 - DNA, 25 bp, Probe sequence
agtggaatagatgaagcacgttcga

SEQ ID NO: 133098 - DNA, 25 bp, Probe sequence
acatttaacacatcatttgcaatca

SEQ ID NO: 133099 - DNA, 25 bp, Probe sequence
acatcatttgcaatcattgaattta

SEQ ID NO: 133100 - DNA, 25 bp, Probe sequence
acatgttacaatacatttaacacat

SEQ ID NO: 133101 - DNA, 25 bp, Probe sequence
acacatcatttgcaatcattgaatt

SEQ ID NO: 133102 - DNA, 25 bp, Probe sequence
acaatacatttaacacatcatttgc

SEQ ID NO: 133103 - DNA, 25 bp, Probe sequence
aacacatcatttgcaatcattgaat

SEQ ID NO: 133104 - DNA, 25 bp, Probe sequence
aacatgttacaatacatttaacaca

SEQ ID NO: 133105 - DNA, 25 bp, Probe sequence
aatacatttaacacatcatttgcaa

SEQ ID NO: 133106 - DNA, 25 bp, Probe sequence
caatacatttaacacatcatttgca

SEQ ID NO: 133107 - DNA, 25 bp, Probe sequence
cacatcatttgcaatcattgaattt

SEQ ID NO: 133108 - DNA, 25 bp, Probe sequence
catgttacaatacatttaacacatc

SEQ ID NO: 133109 - DNA, 25 bp, Probe sequence
catcatttgcaatcattgaatttaa

SEQ ID NO: 133110 - DNA, 25 bp, Probe sequence
catttgcaatcattgaatttaaatc

SEQ ID NO: 133111 - DNA, 25 bp, Probe sequence
catttaacacatcatttgcaatcat

SEQ ID NO: 133112 - DNA, 25 bp, Probe sequence
gcaatcattgaatttaaatcaaaga

SEQ ID NO: 133113 - DNA, 25 bp, Probe sequence
gatattaacatgttacaatacattt

SEQ ID NO: 133114 - DNA, 25 bp, Probe sequence
gttacaatacatttaacacatcatt

SEQ ID NO: 133115 - DNA, 25 bp, Probe sequence
gtgatattaacatgttacaatacat

SEQ ID NO: 133116 - DNA, 25 bp, Probe sequence
gtggaatagatgaagcacgttcgaa

SEQ ID NO: 133117 - DNA, 25 bp, Probe sequence
tggaatagatgaagcacgttcgaaa

SEQ ID NO: 133118 - DNA, 25 bp, Probe sequence
taacacatcatttgcaatcattgaa

SEQ ID NO: 133119 - DNA, 25 bp, Probe sequence
tacaatacatttaacacatcatttg

SEQ ID NO: 133120 - DNA, 25 bp, Probe sequence
tacatttaacacatcatttgcaatc

SEQ ID NO: 133121 - DNA, 25 bp, Probe sequence
tagtggaatagatgaagcacgttcg

SEQ ID NO: 133122 - DNA, 25 bp, Probe sequence
tttgcaatcattgaatttaaatcaa

SEQ ID NO: 133123 - DNA, 25 bp, Probe sequence
tttaacacatcatttgcaatcattg

SEQ ID NO: 133124 - DNA, 25 bp, Probe sequence
ttacaatacatttaacacatcattt

SEQ ID NO: 133125 - DNA, 25 bp, Probe sequence
ttaacacatcatttgcaatcattga

SEQ ID NO: 133126 - DNA, 25 bp, Probe sequence
attgcgttttgtttttagagccacg

SEQ ID NO: 133127 - DNA, 25 bp, Probe sequence
attaatgtcatgatgtgttattgcg

SEQ ID NO: 133128 - DNA, 25 bp, Probe sequence
atcaagattttaaaagtatcgctaa

SEQ ID NO: 133129 - DNA, 25 bp, Probe sequence
atgatgtgttattgcgttttgtttt

SEQ ID NO: 133130 - DNA, 25 bp, Probe sequence
atgtcatgatgtgttattgcgtttt

SEQ ID NO: 133131 - DNA, 25 bp, Probe sequence
atgtgttattgcgttttgtttttag

SEQ ID NO: 133132 - DNA, 25 bp, Probe sequence
atggcgcatacttgatatatgaata

SEQ ID NO: 133133 - DNA, 25 bp, Probe sequence
aagtcttaaaacgcatgattaatgt

SEQ ID NO: 133134 - DNA, 25 bp, Probe sequence
aatgtcatgatgtgttattgcgttt

SEQ ID NO: 133135 - DNA, 25 bp, Probe sequence
catgatgtgttattgcgttttgttt

SEQ ID NO: 133136 - DNA, 25 bp, Probe sequence
gcgttttgtttttagagccacgtat

SEQ ID NO: 133137 - DNA, 25 bp, Probe sequence
gatgtgttattgcgttttgttttta

SEQ ID NO: 133138 - DNA, 25 bp, Probe sequence
gatatatgaatatcatcaagatttt

SEQ ID NO: 133139 - DNA, 25 bp, Probe sequence
gattaatgtcatgatgtgttattgc

SEQ ID NO: 133140 - DNA, 25 bp, Probe sequence
gtatggcgcatacttgatatatgaa

SEQ ID NO: 133141 - DNA, 25 bp, Probe sequence
gtcatgatgtgttattgcgttttgt

SEQ ID NO: 133142 - DNA, 25 bp, Probe sequence
gtcttaaaacgcatgattaatgtca

SEQ ID NO: 133143 - DNA, 25 bp, Probe sequence
gtgttattgcgttttgtttttagag

SEQ ID NO: 133144 - DNA, 25 bp, Probe sequence
ggcgcatacttgatatatgaatatc

SEQ ID NO: 133145 - DNA, 25 bp, Probe sequence
tgtgttattgcgttttgtttttaga

SEQ ID NO: 133146 - DNA, 25 bp, Probe sequence
tgtcatgatgtgttattgcgttttg

SEQ ID NO: 133147 - DNA, 25 bp, Probe sequence
tgtatggcgcatacttgatatatga

SEQ ID NO: 133148 - DNA, 25 bp, Probe sequence
tgttattgcgttttgtttttagagc

SEQ ID NO: 133149 - DNA, 25 bp, Probe sequence
tgatgtgttattgcgttttgttttt

SEQ ID NO: 133150 - DNA, 25 bp, Probe sequence
tgcgttttgtttttagagccacgta

SEQ ID NO: 133151 - DNA, 25 bp, Probe sequence
tcatgatgtgttattgcgttttgtt

SEQ ID NO: 133152 - DNA, 25 bp, Probe sequence
taatgtcatgatgtgttattgcgtt

SEQ ID NO: 133153 - DNA, 25 bp, Probe sequence
taaagtcttaaaacgcatgattaat

SEQ ID NO: 133154 - DNA, 25 bp, Probe sequence
tatggcgcatacttgatatatgaat

SEQ ID NO: 133155 - DNA, 25 bp, Probe sequence
tattgcgttttgtttttagagccac

SEQ ID NO: 133156 - DNA, 25 bp, Probe sequence
tttaaagtcttaaaacgcatgatta

SEQ ID NO: 133157 - DNA, 25 bp, Probe sequence
ttattgcgttttgtttttagagcca

SEQ ID NO: 133158 - DNA, 25 bp, Probe sequence
ttaatgtcatgatgtgttattgcgt

SEQ ID NO: 133159 - DNA, 25 bp, Probe sequence
ttgcgttttgtttttagagccacgt

SEQ ID NO: 133160 - DNA, 25 bp, Probe sequence
attacttactttgtaggtagctact

SEQ ID NO: 133161 - DNA, 25 bp, Probe sequence
atcacatgcgtggatcagtaggtat

SEQ ID NO: 133162 - DNA, 25 bp, Probe sequence
atgttgaattttactctggaaagaa

SEQ ID NO: 133163 - DNA, 25 bp, Probe sequence
atggctgatataggtggtgcctttg

SEQ ID NO: 133164 - DNA, 25 bp, Probe sequence
agcattagttgcgggattgttagta

SEQ ID NO: 133165 - DNA, 25 bp, Probe sequence
accacatgtggcaatcgatttcttt

SEQ ID NO: 133166 - DNA, 25 bp, Probe sequence
acgtgtatcaggcagtgtttgtcta

SEQ ID NO: 133167 - DNA, 25 bp, Probe sequence
actgccatttataggtatgacgacc

SEQ ID NO: 133168 - DNA, 25 bp, Probe sequence
actttcccatgcaaatatgccgtta

SEQ ID NO: 133169 - DNA, 25 bp, Probe sequence
acagatagtcaagtcattgctacat

SEQ ID NO: 133170 - DNA, 25 bp, Probe sequence
aagacgacattgttggtcacttgga

SEQ ID NO: 133171 - DNA, 25 bp, Probe sequence
aagtcattgctacattagttcttaa

SEQ ID NO: 133172 - DNA, 25 bp, Probe sequence
aatatcgaacactgccatttatagg

SEQ ID NO: 133173 - DNA, 25 bp, Probe sequence
cagtgccactcgttacatacattgt

SEQ ID NO: 133174 - DNA, 25 bp, Probe sequence
cgatttctttagcatactttcccat

SEQ ID NO: 133175 - DNA, 25 bp, Probe sequence
gcaattatttcttatggtattcagt

SEQ ID NO: 133176 - DNA, 25 bp, Probe sequence
gaaggtagtgatcaattcgatttta

SEQ ID NO: 133177 - DNA, 25 bp, Probe sequence
gaaagtatatacctgctactattaa

SEQ ID NO: 133178 - DNA, 25 bp, Probe sequence
gactggtgctatgaatattggattg

SEQ ID NO: 133179 - DNA, 25 bp, Probe sequence
gattgctgtctggttttttagaaaa

SEQ ID NO: 133180 - DNA, 25 bp, Probe sequence
gattgtttgcatatccactaattga

SEQ ID NO: 133181 - DNA, 25 bp, Probe sequence
gtatcattattttgtacgtgtatca

SEQ ID NO: 133182 - DNA, 25 bp, Probe sequence
gtaggtagctactttagtgaaggta

SEQ ID NO: 133183 - DNA, 25 bp, Probe sequence
gtcacactcccatctttagttattg

SEQ ID NO: 133184 - DNA, 25 bp, Probe sequence
gtgatgtttggaattacttactttg

SEQ ID NO: 133185 - DNA, 25 bp, Probe sequence
gtggcgaaaatgattgctgtctggt

SEQ ID NO: 133186 - DNA, 25 bp, Probe sequence
ggtggtgcctttgtgatgtttggaa

SEQ ID NO: 133187 - DNA, 25 bp, Probe sequence
tcccatctttagttattgtgaattt

SEQ ID NO: 133188 - DNA, 25 bp, Probe sequence
tcagtaggtatgatgactggtgcta

SEQ ID NO: 133189 - DNA, 25 bp, Probe sequence
tcacatccatttaccacatgtggca

SEQ ID NO: 133190 - DNA, 25 bp, Probe sequence
tagttcttaatgtcacactcccatc

SEQ ID NO: 133191 - DNA, 25 bp, Probe sequence
tatgccgttatcaatgattttgcta

SEQ ID NO: 133192 - DNA, 25 bp, Probe sequence
ttgaagtgatatggcctaaaacggg

SEQ ID NO: 133193 - DNA, 25 bp, Probe sequence
ttgttggtcacttggatgttcccgg

SEQ ID NO: 133194 - DNA, 25 bp, Probe sequence
attctctttaccatttacagttatc

SEQ ID NO: 133195 - DNA, 25 bp, Probe sequence
attcgtacgacggcaatttctatta

SEQ ID NO: 133196 - DNA, 25 bp, Probe sequence
atgtcatcgacactagttactatta

SEQ ID NO: 133197 - DNA, 25 bp, Probe sequence
atgggttgactgctgatgatgtaga

SEQ ID NO: 133198 - DNA, 25 bp, Probe sequence
atggatactgcaaagcctgttgaga

SEQ ID NO: 133199 - DNA, 25 bp, Probe sequence
atggcgcttattgctctgaaattga

SEQ ID NO: 133200 - DNA, 25 bp, Probe sequence
aaagctcaagatgccaatacagttc

SEQ ID NO: 133201 - DNA, 25 bp, Probe sequence
aaaattcagccatgtcagacgttaa

SEQ ID NO: 133202 - DNA, 25 bp, Probe sequence
aaggttaatatcggtggtgcatcag

SEQ ID NO: 133203 - DNA, 25 bp, Probe sequence
aatggtatttctgcaagtcaacttg

SEQ ID NO: 133204 - DNA, 25 bp, Probe sequence
caagggcaatctcaatcccaaagtg

SEQ ID NO: 133205 - DNA, 25 bp, Probe sequence
gctattacttatacaccgaagcctg

SEQ ID NO: 133206 - DNA, 25 bp, Probe sequence
gcaacgccacaaagtacccaagatg

SEQ ID NO: 133207 - DNA, 25 bp, Probe sequence
gaaaaagccgactggtggtacgatt

SEQ ID NO: 133208 - DNA, 25 bp, Probe sequence
gaagcctggtgaaacggagcaagca

SEQ ID NO: 133209 - DNA, 25 bp, Probe sequence
gacacaattagcctttgcaatgtta

SEQ ID NO: 133210 - DNA, 25 bp, Probe sequence
gttgttttagttgtcttgggcggtg

SEQ ID NO: 133211 - DNA, 25 bp, Probe sequence
gattatgcaacgacggtatctgcta

SEQ ID NO: 133212 - DNA, 25 bp, Probe sequence
gtagtccagtagatccaacgggtag

SEQ ID NO: 133213 - DNA, 25 bp, Probe sequence
gttactattatcgtcttcttaccac

SEQ ID NO: 133214 - DNA, 25 bp, Probe sequence
gtttagaccttttgcattggctatt

SEQ ID NO: 133215 - DNA, 25 bp, Probe sequence
gtttgctatctttttaatggttgtt

SEQ ID NO: 133216 - DNA, 25 bp, Probe sequence
gtgggtggcacaacacgacaagtga

SEQ ID NO: 133217 - DNA, 25 bp, Probe sequence
gtggtatgccgacagcgaaactagg

SEQ ID NO: 133218 - DNA, 25 bp, Probe sequence
ggtgatgtgcgtacttctatttcta

SEQ ID NO: 133219 - DNA, 25 bp, Probe sequence
ggtgcattagttcctttgttatttg

SEQ ID NO: 133220 - DNA, 25 bp, Probe sequence
ggcagacgaaccgtgaaatcaccct

SEQ ID NO: 133221 - DNA, 25 bp, Probe sequence
ggaggaccgagactaggcactagct

SEQ ID NO: 133222 - DNA, 25 bp, Probe sequence
ggcactagctttatttcagcaggtg

SEQ ID NO: 133223 - DNA, 25 bp, Probe sequence
tgtcagacgttaatcaggcatcacc

SEQ ID NO: 133224 - DNA, 25 bp, Probe sequence
tcgtcttcttaccacttgtgtttgt

SEQ ID NO: 133225 - DNA, 25 bp, Probe sequence
tagtgtcaattacactcgttccagc

SEQ ID NO: 133226 - DNA, 25 bp, Probe sequence
tatcacttcttatggcgcttattgc

SEQ ID NO: 133227 - DNA, 25 bp, Probe sequence
ttccggttttagcatattcattttc

SEQ ID NO: 133228 - DNA, 25 bp, Probe sequence
attaagccaccattttttattcaat

SEQ ID NO: 133229 - DNA, 25 bp, Probe sequence
atcagaggtgctatttatcgctttg

SEQ ID NO: 133230 - DNA, 25 bp, Probe sequence
atggtttgatatggacattgtagaa

SEQ ID NO: 133231 - DNA, 25 bp, Probe sequence
agtggcaattgctttatataatgaa

SEQ ID NO: 133232 - DNA, 25 bp, Probe sequence
agtaaaaaccgatcacaaacagtat

SEQ ID NO: 133233 - DNA, 25 bp, Probe sequence
agaggtgctatttatcgctttgaac

SEQ ID NO: 133234 - DNA, 25 bp, Probe sequence
agccaccattttttattcaatggga

SEQ ID NO: 133235 - DNA, 25 bp, Probe sequence
acgcacaagcaacttcaccatattc

SEQ ID NO: 133236 - DNA, 25 bp, Probe sequence
aaattacattcaggtgggtatcatc

SEQ ID NO: 133237 - DNA, 25 bp, Probe sequence
aaagacgcacaagcaacttcaccat

SEQ ID NO: 133238 - DNA, 25 bp, Probe sequence
aagcaacttcaccatattcaatttt

SEQ ID NO: 133239 - DNA, 25 bp, Probe sequence
aagatggtaaggtaaagtggcaatt

SEQ ID NO: 133240 - DNA, 25 bp, Probe sequence
aagtttcaaaatatcattcggttat

SEQ ID NO: 133241 - DNA, 25 bp, Probe sequence
caagagaagtatgagcaaggcttta

SEQ ID NO: 133242 - DNA, 25 bp, Probe sequence
cacaagcaacttcaccatattcaat

SEQ ID NO: 133243 - DNA, 25 bp, Probe sequence
cagttagatcggtttagttttccag

SEQ ID NO: 133244 - DNA, 25 bp, Probe sequence
cattcaggtgggtatcatcataaat

SEQ ID NO: 133245 - DNA, 25 bp, Probe sequence
gaagaaagtgattccatgcgtacta

SEQ ID NO: 133246 - DNA, 25 bp, Probe sequence
gaaatttgatcacatcattcattat

SEQ ID NO: 133247 - DNA, 25 bp, Probe sequence
gaccattacacagatttgattttaa

SEQ ID NO: 133248 - DNA, 25 bp, Probe sequence
gatcggtttagttttccaggagatg

SEQ ID NO: 133249 - DNA, 25 bp, Probe sequence
gatcacaaacagtatcgaattggtt

SEQ ID NO: 133250 - DNA, 25 bp, Probe sequence
gtatcgaattggttgaaatggtttg

SEQ ID NO: 133251 - DNA, 25 bp, Probe sequence
gtcgcttttgctactcaaattgttc

SEQ ID NO: 133252 - DNA, 25 bp, Probe sequence
gtgctatttatcgctttgaaccatt

SEQ ID NO: 133253 - DNA, 25 bp, Probe sequence
gtgattccatgcgtactaaaaaatt

SEQ ID NO: 133254 - DNA, 25 bp, Probe sequence
ggtgggtatcatcataaatatggaa

SEQ ID NO: 133255 - DNA, 25 bp, Probe sequence
ggtttagttttccaggagatgttat

SEQ ID NO: 133256 - DNA, 25 bp, Probe sequence
ggatgatgatgaaattaagccacca

SEQ ID NO: 133257 - DNA, 25 bp, Probe sequence
ggagtcgcttttgctactcaaattg

SEQ ID NO: 133258 - DNA, 25 bp, Probe sequence
tcattcattatatagatcagttaga

SEQ ID NO: 133259 - DNA, 25 bp, Probe sequence
tattcaatttttatcagaggtgcta

SEQ ID NO: 133260 - DNA, 25 bp, Probe sequence
tttgctactcaaattgttcaagaga

SEQ ID NO: 133261 - DNA, 25 bp, Probe sequence
tttatcgctttgaaccattagtata

SEQ ID NO: 133262 - DNA, 25 bp, Probe sequence
attctatttctatagtacttctcaa

SEQ ID NO: 133263 - DNA, 25 bp, Probe sequence
atttctaaattgcgttctgaaacgg

SEQ ID NO: 133264 - DNA, 25 bp, Probe sequence
atttctatagtacttctcaaaagaa

SEQ ID NO: 133265 - DNA, 25 bp, Probe sequence
atcgatgtgattatccgtaaaatct

SEQ ID NO: 133266 - DNA, 25 bp, Probe sequence
agggagttaagtcagttaaagcact

SEQ ID NO: 133267 - DNA, 25 bp, Probe sequence
agtacttctcaaaagaaattgttag

SEQ ID NO: 133268 - DNA, 25 bp, Probe sequence
acattttgaaatgctatgggataca

SEQ ID NO: 133269 - DNA, 25 bp, Probe sequence
aaagttcaacgttttatagaagcag

SEQ ID NO: 133270 - DNA, 25 bp, Probe sequence
aaagcactggttaaaaacaacacat

SEQ ID NO: 133271 - DNA, 25 bp, Probe sequence
aaagacaagtattctatttctatag

SEQ ID NO: 133272 - DNA, 25 bp, Probe sequence
aacaacacataagatttcaattgaa

SEQ ID NO: 133273 - DNA, 25 bp, Probe sequence
aagagcttatttctaaattgcgttc

SEQ ID NO: 133274 - DNA, 25 bp, Probe sequence
ctatttctatagtacttctcaaaag

SEQ ID NO: 133275 - DNA, 25 bp, Probe sequence
gcgttctgaaacggatgaaagacaa

SEQ ID NO: 133276 - DNA, 25 bp, Probe sequence
gcttatttctaaattgcgttctgaa

SEQ ID NO: 133277 - DNA, 25 bp, Probe sequence
gcactggttaaaaacaacacataag

SEQ ID NO: 133278 - DNA, 25 bp, Probe sequence
gaagctgaaaagattagcggtaaag

SEQ ID NO: 133279 - DNA, 25 bp, Probe sequence
gaagcagaaagggagttaagtcagt

SEQ ID NO: 133280 - DNA, 25 bp, Probe sequence
gaaatgctatgggatacaagtaaaa

SEQ ID NO: 133281 - DNA, 25 bp, Probe sequence
gaaatagaagtgttaagcgttacaa

SEQ ID NO: 133282 - DNA, 25 bp, Probe sequence
gacaagtattctatttctatagtac

SEQ ID NO: 133283 - DNA, 25 bp, Probe sequence
gagcttatttctaaattgcgttctg

SEQ ID NO: 133284 - DNA, 25 bp, Probe sequence
gatgtgattatccgtaaaatctata

SEQ ID NO: 133285 - DNA, 25 bp, Probe sequence
gatacattacattttgaaatgctat

SEQ ID NO: 133286 - DNA, 25 bp, Probe sequence
gttcaacgttttatagaagcagaaa

SEQ ID NO: 133287 - DNA, 25 bp, Probe sequence
gttaagtcagttaaagcactggtta

SEQ ID NO: 133288 - DNA, 25 bp, Probe sequence
gtattctatttctatagtacttctc

SEQ ID NO: 133289 - DNA, 25 bp, Probe sequence
gtaaaatcgatgtgattatccgtaa

SEQ ID NO: 133290 - DNA, 25 bp, Probe sequence
gtgattatccgtaaaatctataaaa

SEQ ID NO: 133291 - DNA, 25 bp, Probe sequence
gggatacaagtaaaatcgatgtgat

SEQ ID NO: 133292 - DNA, 25 bp, Probe sequence
taaattgcgttctgaaacggatgaa

SEQ ID NO: 133293 - DNA, 25 bp, Probe sequence
tctatttctatagtacttctcaaaa

SEQ ID NO: 133294 - DNA, 25 bp, Probe sequence
taaagtgtatgaagctgaaaagatt

SEQ ID NO: 133295 - DNA, 25 bp, Probe sequence
tagaagtgttaagcgttacaaacta

SEQ ID NO: 133296 - DNA, 25 bp, Probe sequence
agataaactaggacgtcccatccgt

SEQ ID NO: 133297 - DNA, 25 bp, Probe sequence
attacgcgacgtctattggtttgaa

SEQ ID NO: 133298 - DNA, 25 bp, Probe sequence
atctgtgacagatcggtgtaacttt

SEQ ID NO: 133299 - DNA, 25 bp, Probe sequence
aaatacgcattacaggtggagaacc

SEQ ID NO: 133300 - DNA, 25 bp, Probe sequence
aacagttgccaatcgtcaacgtaaa

SEQ ID NO: 133301 - DNA, 25 bp, Probe sequence
aatcattttgttctacatgtacacg

SEQ ID NO: 133302 - DNA, 25 bp, Probe sequence
caggtggagaaccattgatgcgacg

SEQ ID NO: 133303 - DNA, 25 bp, Probe sequence
ctgctcaaacagttgccaatcgtca

SEQ ID NO: 133304 - DNA, 25 bp, Probe sequence
gcgacgtctattggtttgaatgtaa

SEQ ID NO: 133305 - DNA, 25 bp, Probe sequence
gcaaggctgtcatcagatgggaagt

SEQ ID NO: 133306 - DNA, 25 bp, Probe sequence
gaattaatgtcagtttggatgctat

SEQ ID NO: 133307 - DNA, 25 bp, Probe sequence
gaatcgctaaggtatatgcagaatt

SEQ ID NO: 133308 - DNA, 25 bp, Probe sequence
gaacaaattgattacgcgacgtcta

SEQ ID NO: 133309 - DNA, 25 bp, Probe sequence
gaaatggctagaatcgctaaggtat

SEQ ID NO: 133310 - DNA, 25 bp, Probe sequence
gagatgatcgatattcagatgagag

SEQ ID NO: 133311 - DNA, 25 bp, Probe sequence
gaggtatttggagatgatttcgtat

SEQ ID NO: 133312 - DNA, 25 bp, Probe sequence
gttaaagcgtttattcgttctggcg

SEQ ID NO: 133313 - DNA, 25 bp, Probe sequence
gatgggaagttttacggatgtttat

SEQ ID NO: 133314 - DNA, 25 bp, Probe sequence
gatgatacgctatttcaatcaatca

SEQ ID NO: 133315 - DNA, 25 bp, Probe sequence
gatcggtgtaactttaggtgtgatt

SEQ ID NO: 133316 - DNA, 25 bp, Probe sequence
gatcctgtagaaccaaaatattttg

SEQ ID NO: 133317 - DNA, 25 bp, Probe sequence
gtcccatccgtgacttacggttatc

SEQ ID NO: 133318 - DNA, 25 bp, Probe sequence
gttctggcgtgaccgacgaagaatt

SEQ ID NO: 133319 - DNA, 25 bp, Probe sequence
gttttacggatgtttatttgcaact

SEQ ID NO: 133320 - DNA, 25 bp, Probe sequence
gtgacttacggttatctgtgacaga

SEQ ID NO: 133321 - DNA, 25 bp, Probe sequence
gtgtttcacaatcattttgttctac

SEQ ID NO: 133322 - DNA, 25 bp, Probe sequence
ggtgtgattattgcatgcctaaaga

SEQ ID NO: 133323 - DNA, 25 bp, Probe sequence
ggagatgatttcgtatttttaccta

SEQ ID NO: 133324 - DNA, 25 bp, Probe sequence
ggataatggtgttcaatttggtttg

SEQ ID NO: 133325 - DNA, 25 bp, Probe sequence
ggatgctattgatgatacgctattt

SEQ ID NO: 133326 - DNA, 25 bp, Probe sequence
tttattcgttctggcgtgaccgacg

SEQ ID NO: 133327 - DNA, 25 bp, Probe sequence
taaagcgactacgattttagaacaa

SEQ ID NO: 133328 - DNA, 25 bp, Probe sequence
tattgaagatattggtttgactaca

SEQ ID NO: 133329 - DNA, 25 bp, Probe sequence
ttggtttgattacaagtgtttcaca

SEQ ID NO: 133330 - DNA, 25 bp, Probe sequence
attgttttttgtcgtttctgttgat

SEQ ID NO: 133331 - DNA, 25 bp, Probe sequence
attattattagtacaaatgcgcaat

SEQ ID NO: 133332 - DNA, 25 bp, Probe sequence
atgcgccctcatattggtacaaaaa

SEQ ID NO: 133333 - DNA, 25 bp, Probe sequence
aggcgctataactaaagcactacat

SEQ ID NO: 133334 - DNA, 25 bp, Probe sequence
aggtccattagcaggaatttataca

SEQ ID NO: 133335 - DNA, 25 bp, Probe sequence
agggatgtagatgcgccctcatatt

SEQ ID NO: 133336 - DNA, 25 bp, Probe sequence
agtttttagtttctcatcttattga

SEQ ID NO: 133337 - DNA, 25 bp, Probe sequence
acggtgagaccttttatagtagagt

SEQ ID NO: 133338 - DNA, 25 bp, Probe sequence
acaatcatgaagcaacatcctgaag

SEQ ID NO: 133339 - DNA, 25 bp, Probe sequence
aaatgcgcaattggcaacgcaattt

SEQ ID NO: 133340 - DNA, 25 bp, Probe sequence
aaatcatttagatgtcgcagctttt

SEQ ID NO: 133341 - DNA, 25 bp, Probe sequence
aaagcactacattctgataattaca

SEQ ID NO: 133342 - DNA, 25 bp, Probe sequence
aagcccaaagcttttgcggaagtga

SEQ ID NO: 133343 - DNA, 25 bp, Probe sequence
catcctgaagaagaattgttttttg

SEQ ID NO: 133344 - DNA, 25 bp, Probe sequence
ccaacaattgcattttatagtccga

SEQ ID NO: 133345 - DNA, 25 bp, Probe sequence
gcggaagtgaacggtgagacctttt

SEQ ID NO: 133346 - DNA, 25 bp, Probe sequence
gcatgatttggacgctttaattcaa

SEQ ID NO: 133347 - DNA, 25 bp, Probe sequence
gaagatggacgttttattccaacaa

SEQ ID NO: 133348 - DNA, 25 bp, Probe sequence
gttgatacaccaatgattactggta

SEQ ID NO: 133349 - DNA, 25 bp, Probe sequence
gtttctcatcttattgaaaatcatt

SEQ ID NO: 133350 - DNA, 25 bp, Probe sequence
gtatcagtttttagtttctcatctt

SEQ ID NO: 133351 - DNA, 25 bp, Probe sequence
gtaagcacgttgtatcagtttttag

SEQ ID NO: 133352 - DNA, 25 bp, Probe sequence
gtccgaatgcattaggcgctataac

SEQ ID NO: 133353 - DNA, 25 bp, Probe sequence
gtcgtttctgttgatacaccaatga

SEQ ID NO: 133354 - DNA, 25 bp, Probe sequence
ggtaaagctgtaagcacgttgtatc

SEQ ID NO: 133355 - DNA, 25 bp, Probe sequence
ggacgttttattccaacaattgcat

SEQ ID NO: 133356 - DNA, 25 bp, Probe sequence
ggcaacgcaatttaaatatccaaat

SEQ ID NO: 133357 - DNA, 25 bp, Probe sequence
tgtagatgcgccctcatattggtac

SEQ ID NO: 133358 - DNA, 25 bp, Probe sequence
taattcttgcaggtggtcattcagt

SEQ ID NO: 133359 - DNA, 25 bp, Probe sequence
ttggtaagcccaaagcttttgcgga

SEQ ID NO: 133360 - DNA, 25 bp, Probe sequence
ttagatgtcgcagcttttaaagaag

SEQ ID NO: 133361 - DNA, 25 bp, Probe sequence
ttatagtccgaatgcattaggcgct

SEQ ID NO: 133362 - DNA, 25 bp, Probe sequence
ttttgtcgtttctgttgatacacca

SEQ ID NO: 133363 - DNA, 25 bp, Probe sequence
ttatcagcatgatttggacgcttta

SEQ ID NO: 133364 - DNA, 25 bp, Probe sequence
attgtttgaacgttatccgcaaatc

SEQ ID NO: 133365 - DNA, 25 bp, Probe sequence
cattaattccaccggttagtggagg

SEQ ID NO: 133366 - DNA, 25 bp, Probe sequence
atttattgtttgaacgttatccgca

SEQ ID NO: 133367 - DNA, 25 bp, Probe sequence
atgaaggtactttacttcgcagaaa

SEQ ID NO: 133368 - DNA, 25 bp, Probe sequence
aggaagatattgtgcttgaacaagc

SEQ ID NO: 133369 - DNA, 25 bp, Probe sequence
agatatattacaaaaagcacaggaa

SEQ ID NO: 133370 - DNA, 25 bp, Probe sequence
agcattgactgtacaacaatttgaa

SEQ ID NO: 133371 - DNA, 25 bp, Probe sequence
acgttatccgcaaatcaataataaa

SEQ ID NO: 133372 - DNA, 25 bp, Probe sequence
acaagcattgactgtacaacaattt

SEQ ID NO: 133373 - DNA, 25 bp, Probe sequence
aaaagtttcaagttgctgtaaatga

SEQ ID NO: 133374 - DNA, 25 bp, Probe sequence
aagcattgactgtacaacaatttga

SEQ ID NO: 133375 - DNA, 25 bp, Probe sequence
aagtttcaagttgctgtaaatgagg

SEQ ID NO: 133376 - DNA, 25 bp, Probe sequence
cacaggaagatattgtgcttgaaca

SEQ ID NO: 133377 - DNA, 25 bp, Probe sequence
gcattaattccaccggttagtggag

SEQ ID NO: 133378 - DNA, 25 bp, Probe sequence
gcttgaacaagcattgactgtacaa

SEQ ID NO: 133379 - DNA, 25 bp, Probe sequence
gaaggtactttacttcgcagaaatt

SEQ ID NO: 133380 - DNA, 25 bp, Probe sequence
gaacgttatccgcaaatcaataata

SEQ ID NO: 133381 - DNA, 25 bp, Probe sequence
gaacaagcattgactgtacaacaat

SEQ ID NO: 133382 - DNA, 25 bp, Probe sequence
gttgcattaattccaccggttagtg

SEQ ID NO: 133383 - DNA, 25 bp, Probe sequence
gttgctgtaaatgaggaatttgtac

SEQ ID NO: 133384 - DNA, 25 bp, Probe sequence
gtttcaagttgctgtaaatgaggaa

SEQ ID NO: 133385 - DNA, 25 bp, Probe sequence
gtttgaacgttatccgcaaatcaat

SEQ ID NO: 133386 - DNA, 25 bp, Probe sequence
gtactttacttcgcagaaattaaag

SEQ ID NO: 133387 - DNA, 25 bp, Probe sequence
tgtttgaacgttatccgcaaatcaa

SEQ ID NO: 133388 - DNA, 25 bp, Probe sequence
tgaacgttatccgcaaatcaataat

SEQ ID NO: 133389 - DNA, 25 bp, Probe sequence
tgaaggtactttacttcgcagaaat

SEQ ID NO: 133390 - DNA, 25 bp, Probe sequence
taataaaaagtttcaagttgctgta

SEQ ID NO: 133391 - DNA, 25 bp, Probe sequence
ttgcattaattccaccggttagtgg

SEQ ID NO: 133392 - DNA, 25 bp, Probe sequence
tattgtttgaacgttatccgcaaat

SEQ ID NO: 133393 - DNA, 25 bp, Probe sequence
tttgaacgttatccgcaaatcaata

SEQ ID NO: 133394 - DNA, 25 bp, Probe sequence
tttattgtttgaacgttatccgcaa

SEQ ID NO: 133395 - DNA, 25 bp, Probe sequence
ttacttcgcagaaattaaagatata

SEQ ID NO: 133396 - DNA, 25 bp, Probe sequence
ttgaacaagcattgactgtacaaca

SEQ ID NO: 133397 - DNA, 25 bp, Probe sequence
ttgtttgaacgttatccgcaaatca

SEQ ID NO: 133398 - DNA, 25 bp, Probe sequence
gtttttaccggtcatgttcgcgaat

SEQ ID NO: 133399 - DNA, 25 bp, Probe sequence
atatgaagcgtatattccaatggct

SEQ ID NO: 133400 - DNA, 25 bp, Probe sequence
atggctgaaaagaaattggcacaaa

SEQ ID NO: 133401 - DNA, 25 bp, Probe sequence
agggccattacaaatttcagatatc

SEQ ID NO: 133402 - DNA, 25 bp, Probe sequence
agaaccgatacaaacagaacaatat

SEQ ID NO: 133403 - DNA, 25 bp, Probe sequence
agcaaatgaatatgcaattgagcgt

SEQ ID NO: 133404 - DNA, 25 bp, Probe sequence
accggtcatgttcgcgaatggacta

SEQ ID NO: 133405 - DNA, 25 bp, Probe sequence
acagaacaatatcgtgaattcacta

SEQ ID NO: 133406 - DNA, 25 bp, Probe sequence
aaaatggcctggaacgataacgagt

SEQ ID NO: 133407 - DNA, 25 bp, Probe sequence
aaatgaatatcaaggtgcagtagtt

SEQ ID NO: 133408 - DNA, 25 bp, Probe sequence
aacgataacgagtattgttcataga

SEQ ID NO: 133409 - DNA, 25 bp, Probe sequence
catcgtaaagatgcctatcgagcaa

SEQ ID NO: 133410 - DNA, 25 bp, Probe sequence
gactaaaggcgtcaaaacggaatat

SEQ ID NO: 133411 - DNA, 25 bp, Probe sequence
gccattacaaatttcagatatcgct

SEQ ID NO: 133412 - DNA, 25 bp, Probe sequence
gcgtatattccaatggctgaaaaga

SEQ ID NO: 133413 - DNA, 25 bp, Probe sequence
gcagtagttgtttttaccggtcatg

SEQ ID NO: 133414 - DNA, 25 bp, Probe sequence
gaatagggccattacaaatttcaga

SEQ ID NO: 133415 - DNA, 25 bp, Probe sequence
gaatggactaaaggcgtcaaaacgg

SEQ ID NO: 133416 - DNA, 25 bp, Probe sequence
gaagcgtatattccaatggctgaaa

SEQ ID NO: 133417 - DNA, 25 bp, Probe sequence
gaaattggcacaaattggagatgaa

SEQ ID NO: 133418 - DNA, 25 bp, Probe sequence
gagtattgttcatagaatagggcca

SEQ ID NO: 133419 - DNA, 25 bp, Probe sequence
gatgcctatcgagcaaatgaatatg

SEQ ID NO: 133420 - DNA, 25 bp, Probe sequence
gtgcagtagttgtttttaccggtca

SEQ ID NO: 133421 - DNA, 25 bp, Probe sequence
gttcgcgaatggactaaaggcgtca

SEQ ID NO: 133422 - DNA, 25 bp, Probe sequence
gtttcttcaccgcatcgtaaagatg

SEQ ID NO: 133423 - DNA, 25 bp, Probe sequence
gggaagatggttcaaaatggcaagg

SEQ ID NO: 133424 - DNA, 25 bp, Probe sequence
ggtcatgttcgcgaatggactaaag

SEQ ID NO: 133425 - DNA, 25 bp, Probe sequence
ggcctggaacgataacgagtattgt

SEQ ID NO: 133426 - DNA, 25 bp, Probe sequence
tcaccgcatcgtaaagatgcctatc

SEQ ID NO: 133427 - DNA, 25 bp, Probe sequence
taaatgaaaaatggcctggaacgat

SEQ ID NO: 133428 - DNA, 25 bp, Probe sequence
tagttgtttttaccggtcatgttcg

SEQ ID NO: 133429 - DNA, 25 bp, Probe sequence
ttgtttttaccggtcatgttcgcga

SEQ ID NO: 133430 - DNA, 25 bp, Probe sequence
tttcagatatcgctgtattaattgc

SEQ ID NO: 133431 - DNA, 25 bp, Probe sequence
tttaccggtcatgttcgcgaatgga

SEQ ID NO: 133432 - DNA, 25 bp, Probe sequence
attacaggattcagacgtcgatcac

SEQ ID NO: 133433 - DNA, 25 bp, Probe sequence
atagcattaatgtaagggagcatga

SEQ ID NO: 133434 - DNA, 25 bp, Probe sequence
atcagcaaactgtaacacgtgtaga

SEQ ID NO: 133435 - DNA, 25 bp, Probe sequence
atgaagaagagttgcaagtattaca

SEQ ID NO: 133436 - DNA, 25 bp, Probe sequence
agcgggggcagatcaaagtattgta

SEQ ID NO: 133437 - DNA, 25 bp, Probe sequence
agcattttgaagcgggggcagatca

SEQ ID NO: 133438 - DNA, 25 bp, Probe sequence
acaggattcagacgtcgatcacatg

SEQ ID NO: 133439 - DNA, 25 bp, Probe sequence
aaatctgttacaattgacaccaata

SEQ ID NO: 133440 - DNA, 25 bp, Probe sequence
aatatcgtattagttgaaggcttta

SEQ ID NO: 133441 - DNA, 25 bp, Probe sequence
aattgacaccaatatcgtattagtt

SEQ ID NO: 133442 - DNA, 25 bp, Probe sequence
cacatggttatacagttgctactat

SEQ ID NO: 133443 - DNA, 25 bp, Probe sequence
gctactattaaacatcatgggcatg

SEQ ID NO: 133444 - DNA, 25 bp, Probe sequence
gcaaactgtaacacgtgtagataat

SEQ ID NO: 133445 - DNA, 25 bp, Probe sequence
gaatgtttgttatagcattaatgta

SEQ ID NO: 133446 - DNA, 25 bp, Probe sequence
gaagattttacagcatttgagcaat

SEQ ID NO: 133447 - DNA, 25 bp, Probe sequence
gaagcgggggcagatcaaagtattg

SEQ ID NO: 133448 - DNA, 25 bp, Probe sequence
gacgtcgatcacatgaagcattttg

SEQ ID NO: 133449 - DNA, 25 bp, Probe sequence
gaggcatattgtctctttcttaaag

SEQ ID NO: 133450 - DNA, 25 bp, Probe sequence
gatgaggcatattgtctctttctta

SEQ ID NO: 133451 - DNA, 25 bp, Probe sequence
gattttgaaaaagtcgtagtctatc

SEQ ID NO: 133452 - DNA, 25 bp, Probe sequence
gattcagacgtcgatcacatgaagc

SEQ ID NO: 133453 - DNA, 25 bp, Probe sequence
gttgaaggctttaaaaatgctgatt

SEQ ID NO: 133454 - DNA, 25 bp, Probe sequence
gttgctactattaaacatcatgggc

SEQ ID NO: 133455 - DNA, 25 bp, Probe sequence
gtaacacgtgtagataatcaaaatc

SEQ ID NO: 133456 - DNA, 25 bp, Probe sequence
gtctggtaagacaacattgatgagg

SEQ ID NO: 133457 - DNA, 25 bp, Probe sequence
gggagcatgaagattttacagcatt

SEQ ID NO: 133458 - DNA, 25 bp, Probe sequence
ggggcagatcaaagtattgtacaag

SEQ ID NO: 133459 - DNA, 25 bp, Probe sequence
ggtaagacaacattgatgaggcata

SEQ ID NO: 133460 - DNA, 25 bp, Probe sequence
ggttatacagttgctactattaaac

SEQ ID NO: 133461 - DNA, 25 bp, Probe sequence
ggaagatattcaattacaggattca

SEQ ID NO: 133462 - DNA, 25 bp, Probe sequence
tgtaggttacaaaaagtctggtaag

SEQ ID NO: 133463 - DNA, 25 bp, Probe sequence
tgaagcattttgaagcgggggcaga

SEQ ID NO: 133464 - DNA, 25 bp, Probe sequence
tcagacgtcgatcacatgaagcatt

SEQ ID NO: 133465 - DNA, 25 bp, Probe sequence
tacagcatttgagcaatggttatta

SEQ ID NO: 133466 - DNA, 25 bp, Probe sequence
attgagtagcgtgttacgccccgtt

SEQ ID NO: 133467 - DNA, 25 bp, Probe sequence
atgggattcctcttgttgcattaga

SEQ ID NO: 133468 - DNA, 25 bp, Probe sequence
acattactgtcccaaggtcaacacg

SEQ ID NO: 133469 - DNA, 25 bp, Probe sequence
aagcgagtctagttcagtacggggg

SEQ ID NO: 133470 - DNA, 25 bp, Probe sequence
aaatgggcaattggctcatccttca

SEQ ID NO: 133471 - DNA, 25 bp, Probe sequence
aactctcgattcttagtctattttg

SEQ ID NO: 133472 - DNA, 25 bp, Probe sequence
aagggaacacttactttctgccatt

SEQ ID NO: 133473 - DNA, 25 bp, Probe sequence
aaggcagtccaaacattgtctcgcc

SEQ ID NO: 133474 - DNA, 25 bp, Probe sequence
aatcacggcatcttacatgtccttc

SEQ ID NO: 133475 - DNA, 25 bp, Probe sequence
aatttttccacgttatcaccaactg

SEQ ID NO: 133476 - DNA, 25 bp, Probe sequence
cagaccgtactgttttagatcgcca

SEQ ID NO: 133477 - DNA, 25 bp, Probe sequence
cattctgctggttcgggtaagtcta

SEQ ID NO: 133478 - DNA, 25 bp, Probe sequence
ccatctcgcttccttgcatagtaat

SEQ ID NO: 133479 - DNA, 25 bp, Probe sequence
ccaccaccaattccaagacttcttg

SEQ ID NO: 133480 - DNA, 25 bp, Probe sequence
gcagatgggtcctatcatccatttc

SEQ ID NO: 133481 - DNA, 25 bp, Probe sequence
gactccacgccgtacggtatatgca

SEQ ID NO: 133482 - DNA, 25 bp, Probe sequence
gaagcattccaacctttttacgaag

SEQ ID NO: 133483 - DNA, 25 bp, Probe sequence
gaagcagttcgagctatcgctaaat

SEQ ID NO: 133484 - DNA, 25 bp, Probe sequence
gacactgtctatcaactactagcaa

SEQ ID NO: 133485 - DNA, 25 bp, Probe sequence
gagtttcgagcatactgttgggcaa

SEQ ID NO: 133486 - DNA, 25 bp, Probe sequence
gatctaatggtcctggtcgtgttgg

SEQ ID NO: 133487 - DNA, 25 bp, Probe sequence
gggatttgacgaacctttacttcat

SEQ ID NO: 133488 - DNA, 25 bp, Probe sequence
ggtcgatgaagcgcattcttctcaa

SEQ ID NO: 133489 - DNA, 25 bp, Probe sequence
ggatgtgttagtcgctttttcaggt

SEQ ID NO: 133490 - DNA, 25 bp, Probe sequence
tgattgtgacagcttcacgactcca

SEQ ID NO: 133491 - DNA, 25 bp, Probe sequence
tgcttggttggcataccatctcgct

SEQ ID NO: 133492 - DNA, 25 bp, Probe sequence
tctggataccctacttcttatttat

SEQ ID NO: 133493 - DNA, 25 bp, Probe sequence
tcaaccaatctattcatcggtcatt

SEQ ID NO: 133494 - DNA, 25 bp, Probe sequence
tcaatctcttcatccttgggtactt

SEQ ID NO: 133495 - DNA, 25 bp, Probe sequence
tatcagatactcagcaccatggtcc

SEQ ID NO: 133496 - DNA, 25 bp, Probe sequence
tatcgcactcgatccaacagtatta

SEQ ID NO: 133497 - DNA, 25 bp, Probe sequence
ttttgcttttacagctacaccgaaa

SEQ ID NO: 133498 - DNA, 25 bp, Probe sequence
ttatctcattcaacattctgctggt

SEQ ID NO: 133499 - DNA, 25 bp, Probe sequence
ttactttcaacctgcatcatcttta

SEQ ID NO: 133500 - DNA, 25 bp, Probe sequence
acctttcttactcaaacgaatctct

SEQ ID NO: 133501 - DNA, 25 bp, Probe sequence
atattaacttattctcatcaggatc

SEQ ID NO: 133502 - DNA, 25 bp, Probe sequence
aggtgctagcaccattaaacatcta

SEQ ID NO: 133503 - DNA, 25 bp, Probe sequence
agtcgctttagcaacaaatgttcca

SEQ ID NO: 133504 - DNA, 25 bp, Probe sequence
agtgaacttttcacgatttcagata

SEQ ID NO: 133505 - DNA, 25 bp, Probe sequence
aacaatcactcatcacagaagcggt

SEQ ID NO: 133506 - DNA, 25 bp, Probe sequence
aacatctatatcaaggtcaattcta

SEQ ID NO: 133507 - DNA, 25 bp, Probe sequence
aacgaatctctcaaatttccaacta

SEQ ID NO: 133508 - DNA, 25 bp, Probe sequence
aagtttctactatcgataggctcat

SEQ ID NO: 133509 - DNA, 25 bp, Probe sequence
aagggcgtattggatggcaaggttt

SEQ ID NO: 133510 - DNA, 25 bp, Probe sequence
aatcaggtgggattcttgcgttaga

SEQ ID NO: 133511 - DNA, 25 bp, Probe sequence
aatatcagactgtaggaccctatct

SEQ ID NO: 133512 - DNA, 25 bp, Probe sequence
aattttatcattgcgttacctgaga

SEQ ID NO: 133513 - DNA, 25 bp, Probe sequence
gcgatccctctattgcatgaacaac

SEQ ID NO: 133514 - DNA, 25 bp, Probe sequence
gcggtgacaaaaggcatagacccga

SEQ ID NO: 133515 - DNA, 25 bp, Probe sequence
gctcaacctaacatatctgctacag

SEQ ID NO: 133516 - DNA, 25 bp, Probe sequence
gaagaacgttttgaagaagctccag

SEQ ID NO: 133517 - DNA, 25 bp, Probe sequence
gaagaagctccagatattcatatta

SEQ ID NO: 133518 - DNA, 25 bp, Probe sequence
gaacaacaacaaatcgtccaatatc

SEQ ID NO: 133519 - DNA, 25 bp, Probe sequence
gacacaacatatcaatctatcgaag

SEQ ID NO: 133520 - DNA, 25 bp, Probe sequence
gactttataagtggttatgccttta

SEQ ID NO: 133521 - DNA, 25 bp, Probe sequence
gacggcacgattggaaaagtcgctt

SEQ ID NO: 133522 - DNA, 25 bp, Probe sequence
gatggcaaggtttaacttctaacga

SEQ ID NO: 133523 - DNA, 25 bp, Probe sequence
gatattctttttgctatgagtgggg

SEQ ID NO: 133524 - DNA, 25 bp, Probe sequence
gattggattggtagtatcccttcaa

SEQ ID NO: 133525 - DNA, 25 bp, Probe sequence
gtttcattaaattcaggtgtactac

SEQ ID NO: 133526 - DNA, 25 bp, Probe sequence
gtattggactattactaagcttaaa

SEQ ID NO: 133527 - DNA, 25 bp, Probe sequence
gtatcccttcaaattggagtgttcg

SEQ ID NO: 133528 - DNA, 25 bp, Probe sequence
gtgggaatcataaggtcttctttta

SEQ ID NO: 133529 - DNA, 25 bp, Probe sequence
ggaccctatctcataacgggaactg

SEQ ID NO: 133530 - DNA, 25 bp, Probe sequence
ggcatagacccgaatgtggaaatga

SEQ ID NO: 133531 - DNA, 25 bp, Probe sequence
taattattcttatgcgatccctcta

SEQ ID NO: 133532 - DNA, 25 bp, Probe sequence
tattctcgataacctttcttactca

SEQ ID NO: 133533 - DNA, 25 bp, Probe sequence
ttctcatcaggatcagctcaaccta

SEQ ID NO: 133534 - DNA, 25 bp, Probe sequence
attcacaacggttctgccttattct

SEQ ID NO: 133535 - DNA, 25 bp, Probe sequence
atgaacttggtgaactcggtcgctt

SEQ ID NO: 133536 - DNA, 25 bp, Probe sequence
atgggaacttcccaaatgctctcag

SEQ ID NO: 133537 - DNA, 25 bp, Probe sequence
agcagatgcatatctaggtccagac

SEQ ID NO: 133538 - DNA, 25 bp, Probe sequence
actgccgaagtagctacctttggtc

SEQ ID NO: 133539 - DNA, 25 bp, Probe sequence
acctttggtcaagagctaaatcctg

SEQ ID NO: 133540 - DNA, 25 bp, Probe sequence
acttcctaacgacttattctacaat

SEQ ID NO: 133541 - DNA, 25 bp, Probe sequence
aacgtcttcacgatacattactaaa

SEQ ID NO: 133542 - DNA, 25 bp, Probe sequence
aatgctctcagcaatgacagaacgt

SEQ ID NO: 133543 - DNA, 25 bp, Probe sequence
caatgattcgtgggggagatcctga

SEQ ID NO: 133544 - DNA, 25 bp, Probe sequence
gagggcataatccaacttcctaacg

SEQ ID NO: 133545 - DNA, 25 bp, Probe sequence
gaagcaggtgcacacttcacgagtc

SEQ ID NO: 133546 - DNA, 25 bp, Probe sequence
gaacgcttcagggtattcattttat

SEQ ID NO: 133547 - DNA, 25 bp, Probe sequence
gactgtcattaaacgtcttcacgat

SEQ ID NO: 133548 - DNA, 25 bp, Probe sequence
gacgtgctattttatgtgattcaag

SEQ ID NO: 133549 - DNA, 25 bp, Probe sequence
gagcgaccggtttgaaggatttaca

SEQ ID NO: 133550 - DNA, 25 bp, Probe sequence
gagcttatctcaatggtttctctga

SEQ ID NO: 133551 - DNA, 25 bp, Probe sequence
gagaacgccttttgaagaacgcttc

SEQ ID NO: 133552 - DNA, 25 bp, Probe sequence
gagatcctgaaaacatggcgcttgg

SEQ ID NO: 133553 - DNA, 25 bp, Probe sequence
gagtgtagacacgaaccttagagat

SEQ ID NO: 133554 - DNA, 25 bp, Probe sequence
gagtgactattgaacgaccgcaacg

SEQ ID NO: 133555 - DNA, 25 bp, Probe sequence
ggaaacccaggtgctggcgagagtt

SEQ ID NO: 133556 - DNA, 25 bp, Probe sequence
gtacaactcgttgatgcgtccaata

SEQ ID NO: 133557 - DNA, 25 bp, Probe sequence
tgttttcaaaactgtctacgaccaa

SEQ ID NO: 133558 - DNA, 25 bp, Probe sequence
ggattgcctcgagttagtgatggac

SEQ ID NO: 133559 - DNA, 25 bp, Probe sequence
ggttatcttaccaatgactgtcatt

SEQ ID NO: 133560 - DNA, 25 bp, Probe sequence
ggacgcatggcaattattcacaacg

SEQ ID NO: 133561 - DNA, 25 bp, Probe sequence
ggaagtacattaacgagcgaccggt

SEQ ID NO: 133562 - DNA, 25 bp, Probe sequence
tgaaacattactcgcagacccagca

SEQ ID NO: 133563 - DNA, 25 bp, Probe sequence
tgaatcatttggttttactcgagtg

SEQ ID NO: 133564 - DNA, 25 bp, Probe sequence
tcggtcgctttggtgttggattgcc

SEQ ID NO: 133565 - DNA, 25 bp, Probe sequence
tatctccaacccaccatttggtgtc

SEQ ID NO: 133566 - DNA, 25 bp, Probe sequence
tttgattactgtatctccaacccac

SEQ ID NO: 133567 - DNA, 25 bp, Probe sequence
ttctgccttattctctggaaaccca

SEQ ID NO: 133568 - DNA, 25 bp, Probe sequence
attttcaacttatgtttttctgcgg

SEQ ID NO: 133569 - DNA, 25 bp, Probe sequence
atatttagaagattgccagcagtcc

SEQ ID NO: 133570 - DNA, 25 bp, Probe sequence
acaatactgaatacgttctgggcgg

SEQ ID NO: 133571 - DNA, 25 bp, Probe sequence
agaaggttgggatatcgttcatgtt

SEQ ID NO: 133572 - DNA, 25 bp, Probe sequence
accttttgtctttcgatgacgattt

SEQ ID NO: 133573 - DNA, 25 bp, Probe sequence
actatcaccttttgtctttcgatga

SEQ ID NO: 133574 - DNA, 25 bp, Probe sequence
acttatgtttttctgcggttattag

SEQ ID NO: 133575 - DNA, 25 bp, Probe sequence
aatactgaatacgttctgggcggaa

SEQ ID NO: 133576 - DNA, 25 bp, Probe sequence
aatgatgcagccaacgatctgttaa

SEQ ID NO: 133577 - DNA, 25 bp, Probe sequence
ctactatcaccttttgtctttcgat

SEQ ID NO: 133578 - DNA, 25 bp, Probe sequence
gccagcagtccgagttagattattt

SEQ ID NO: 133579 - DNA, 25 bp, Probe sequence
gccaacgatctgttaaaagaaggtt

SEQ ID NO: 133580 - DNA, 25 bp, Probe sequence
gctaatgatgcagccaacgatctgt

SEQ ID NO: 133581 - DNA, 25 bp, Probe sequence
gcagtccgagttagattattttcaa

SEQ ID NO: 133582 - DNA, 25 bp, Probe sequence
gaagattgccagcagtccgagttag

SEQ ID NO: 133583 - DNA, 25 bp, Probe sequence
gaaaaactactatcaccttttgtct

SEQ ID NO: 133584 - DNA, 25 bp, Probe sequence
gatgcagccaacgatctgttaaaag

SEQ ID NO: 133585 - DNA, 25 bp, Probe sequence
gatgacgatttagctaatgatgcag

SEQ ID NO: 133586 - DNA, 25 bp, Probe sequence
gatttagctaatgatgcagccaacg

SEQ ID NO: 133587 - DNA, 25 bp, Probe sequence
gattgccagcagtccgagttagatt

SEQ ID NO: 133588 - DNA, 25 bp, Probe sequence
gtccgagttagattattttcaactt

SEQ ID NO: 133589 - DNA, 25 bp, Probe sequence
gggatatcgttcatgttggtacaaa

SEQ ID NO: 133590 - DNA, 25 bp, Probe sequence
ggttgggatatcgttcatgttggta

SEQ ID NO: 133591 - DNA, 25 bp, Probe sequence
ggataatggacaagcgtactacaat

SEQ ID NO: 133592 - DNA, 25 bp, Probe sequence
ggacaagcgtactacaatactgaat

SEQ ID NO: 133593 - DNA, 25 bp, Probe sequence
tgggcggaactaaaaatcagtatga

SEQ ID NO: 133594 - DNA, 25 bp, Probe sequence
tgaatacgttctgggcggaactaaa

SEQ ID NO: 133595 - DNA, 25 bp, Probe sequence
tcaccttttgtctttcgatgacgat

SEQ ID NO: 133596 - DNA, 25 bp, Probe sequence
tcaacttatgtttttctgcggttat

SEQ ID NO: 133597 - DNA, 25 bp, Probe sequence
tagaagattgccagcagtccgagtt

SEQ ID NO: 133598 - DNA, 25 bp, Probe sequence
tatcgttcatgttggtacaaaatta

SEQ ID NO: 133599 - DNA, 25 bp, Probe sequence
tatcaccttttgtctttcgatgacg

SEQ ID NO: 133600 - DNA, 25 bp, Probe sequence
ttgccagcagtccgagttagattat

SEQ ID NO: 133601 - DNA, 25 bp, Probe sequence
ttgtctttcgatgacgatttagcta

SEQ ID NO: 133602 - DNA, 25 bp, Probe sequence
attggtgcaggttcagtttctgata

SEQ ID NO: 133603 - DNA, 25 bp, Probe sequence
attgtagctacttatgatataccaa

SEQ ID NO: 133604 - DNA, 25 bp, Probe sequence
attgactgaatctgacgctgctgaa

SEQ ID NO: 133605 - DNA, 25 bp, Probe sequence
atatggctatgcagaggttaaagtt

SEQ ID NO: 133606 - DNA, 25 bp, Probe sequence
ataaggctgtaaaggcggaagtgtt

SEQ ID NO: 133607 - DNA, 25 bp, Probe sequence
agtgattgatcatattggtgcaggt

SEQ ID NO: 133608 - DNA, 25 bp, Probe sequence
acccaatcccagttaaagaagcaat

SEQ ID NO: 133609 - DNA, 25 bp, Probe sequence
aagtagcaatgcgtcctggtagcgt

SEQ ID NO: 133610 - DNA, 25 bp, Probe sequence
caacgttaacaagtgctggagctac

SEQ ID NO: 133611 - DNA, 25 bp, Probe sequence
cacaaggggcaagtggtcagaatcg

SEQ ID NO: 133612 - DNA, 25 bp, Probe sequence
ctagaagtcttcccgcaaataatta

SEQ ID NO: 133613 - DNA, 25 bp, Probe sequence
ccaatgattcgtgccttagcagaaa

SEQ ID NO: 133614 - DNA, 25 bp, Probe sequence
gcgcagatgctgttgttatgtttga

SEQ ID NO: 133615 - DNA, 25 bp, Probe sequence
gcggtccttgcaacatatggctatg

SEQ ID NO: 133616 - DNA, 25 bp, Probe sequence
gctgttaaacatatgtgtggcgcac

SEQ ID NO: 133617 - DNA, 25 bp, Probe sequence
gattttaccaaggcaaacccattca

SEQ ID NO: 133618 - DNA, 25 bp, Probe sequence
gcaaacccattcacacgatttatac

SEQ ID NO: 133619 - DNA, 25 bp, Probe sequence
gaagcggtgcgtattatgactggag

SEQ ID NO: 133620 - DNA, 25 bp, Probe sequence
gaactatttgtgaaaccagctgtta

SEQ ID NO: 133621 - DNA, 25 bp, Probe sequence
gacgctgctgaagaggaacttcttt

SEQ ID NO: 133622 - DNA, 25 bp, Probe sequence
gatggttttgcaattcgcagtgttg

SEQ ID NO: 133623 - DNA, 25 bp, Probe sequence
gttgtagcgattgcacatgctaact

SEQ ID NO: 133624 - DNA, 25 bp, Probe sequence
gttggggatcacgaagcggtgcgta

SEQ ID NO: 133625 - DNA, 25 bp, Probe sequence
tgtggcgcactagaagtcttcccgc

SEQ ID NO: 133626 - DNA, 25 bp, Probe sequence
gtcgctgttattgcaacaggaagcg

SEQ ID NO: 133627 - DNA, 25 bp, Probe sequence
ggtcatgttaccaggagggtcacgt

SEQ ID NO: 133628 - DNA, 25 bp, Probe sequence
ggagctactgtagtaccttcaggat

SEQ ID NO: 133629 - DNA, 25 bp, Probe sequence
ggaaatccatcagcttgttttacag

SEQ ID NO: 133630 - DNA, 25 bp, Probe sequence
tgccggcaattacggtagcacttga

SEQ ID NO: 133631 - DNA, 25 bp, Probe sequence
tcgcagtgttgattcacaaggggca

SEQ ID NO: 133632 - DNA, 25 bp, Probe sequence
tcaacgtatcgttaatcagcagagt

SEQ ID NO: 133633 - DNA, 25 bp, Probe sequence
taaatcaccttatgatggttttgca

SEQ ID NO: 133634 - DNA, 25 bp, Probe sequence
tttgactatttacctgagatttata

SEQ ID NO: 133635 - DNA, 25 bp, Probe sequence
ttgcacatgctaactgtatggtcat

SEQ ID NO: 133636 - DNA, 25 bp, Probe sequence
agttaatgcgcgatgaactgcccac

SEQ ID NO: 133637 - DNA, 25 bp, Probe sequence
agcggcagctttagcggtatccgtc

SEQ ID NO: 133638 - DNA, 25 bp, Probe sequence
agctgtggcgctaaactatggtcat

SEQ ID NO: 133639 - DNA, 25 bp, Probe sequence
acatgaggttgaatttgctggtatc

SEQ ID NO: 133640 - DNA, 25 bp, Probe sequence
acacctaagaattggggaacttctg

SEQ ID NO: 133641 - DNA, 25 bp, Probe sequence
acaattatggcatacctatggtatt

SEQ ID NO: 133642 - DNA, 25 bp, Probe sequence
aaccggtaaatcaacagcggcagct

SEQ ID NO: 133643 - DNA, 25 bp, Probe sequence
aatggtagataccgtttacacatct

SEQ ID NO: 133644 - DNA, 25 bp, Probe sequence
ccccacggttacattgtaatggtag

SEQ ID NO: 133645 - DNA, 25 bp, Probe sequence
ctaaattttggcatgcctcagaaaa

SEQ ID NO: 133646 - DNA, 25 bp, Probe sequence
cgaatctgaccgtgatcgaatcacg

SEQ ID NO: 133647 - DNA, 25 bp, Probe sequence
ccttagtgacagcctttctgaagca

SEQ ID NO: 133648 - DNA, 25 bp, Probe sequence
gcgactgtatttaaagatatgctga

SEQ ID NO: 133649 - DNA, 25 bp, Probe sequence
gcaggtccataccaattagatgcaa

SEQ ID NO: 133650 - DNA, 25 bp, Probe sequence
gaacaacactttcaggatgtcaaca

SEQ ID NO: 133651 - DNA, 25 bp, Probe sequence
gacagcctttctgaagcataaacat

SEQ ID NO: 133652 - DNA, 25 bp, Probe sequence
gttggaatggcacacgtaacgctct

SEQ ID NO: 133653 - DNA, 25 bp, Probe sequence
gatgcaaaggcgtggcgtaaaactt

SEQ ID NO: 133654 - DNA, 25 bp, Probe sequence
gagtcattacatcatttttgaagca

SEQ ID NO: 133655 - DNA, 25 bp, Probe sequence
gatgtcaacaatgtcgtgaatgcac

SEQ ID NO: 133656 - DNA, 25 bp, Probe sequence
gatgaacatcattggtttaaagcta

SEQ ID NO: 133657 - DNA, 25 bp, Probe sequence
gatcagttagcatctttagagccta

SEQ ID NO: 133658 - DNA, 25 bp, Probe sequence
gttgtatcgttgttgaagctaaatt

SEQ ID NO: 133659 - DNA, 25 bp, Probe sequence
gtagtgcctatatctagttgtatcg

SEQ ID NO: 133660 - DNA, 25 bp, Probe sequence
gtaagttttctgatgacacagcgtt

SEQ ID NO: 133661 - DNA, 25 bp, Probe sequence
ggcacacgtaacgctcttgaaggtt

SEQ ID NO: 133662 - DNA, 25 bp, Probe sequence
ggcaagaaacagtcacttgtttttt

SEQ ID NO: 133663 - DNA, 25 bp, Probe sequence
tggcatgcctcagaaaatacagaaa

SEQ ID NO: 133664 - DNA, 25 bp, Probe sequence
tgtcatttcaacgtcagaatacagt

SEQ ID NO: 133665 - DNA, 25 bp, Probe sequence
tcgaggtcaaaatcattgcgactgt

SEQ ID NO: 133666 - DNA, 25 bp, Probe sequence
tcatttttgaagcaggtccatacca

SEQ ID NO: 133667 - DNA, 25 bp, Probe sequence
tagcatctttagagcctattgtcga

SEQ ID NO: 133668 - DNA, 25 bp, Probe sequence
tatggtatttgacgagctctcctca

SEQ ID NO: 133669 - DNA, 25 bp, Probe sequence
tttgctggtatcatctttagtttta

SEQ ID NO: 133670 - DNA, 25 bp, Probe sequence
atatgtggaaaagcccaacctagcg

SEQ ID NO: 133671 - DNA, 25 bp, Probe sequence
attgccttacacagtttgaatagtt

SEQ ID NO: 133672 - DNA, 25 bp, Probe sequence
attcgtttcgaaagtcttattaatg

SEQ ID NO: 133673 - DNA, 25 bp, Probe sequence
attacttagaaacaatcaaccatac

SEQ ID NO: 133674 - DNA, 25 bp, Probe sequence
atagatcaatttagacaggctgtaa

SEQ ID NO: 133675 - DNA, 25 bp, Probe sequence
atcaaccatacaacagaattcgcta

SEQ ID NO: 133676 - DNA, 25 bp, Probe sequence
agtagtcaatgtttcaagtcgtatt

SEQ ID NO: 133677 - DNA, 25 bp, Probe sequence
acaggctgtaattggtatttctctt

SEQ ID NO: 133678 - DNA, 25 bp, Probe sequence
aaagcccaacctagcgaaactatat

SEQ ID NO: 133679 - DNA, 25 bp, Probe sequence
aatgcagatcaagtctcttctttag

SEQ ID NO: 133680 - DNA, 25 bp, Probe sequence
aatagtatcaaaccttcatctcaca

SEQ ID NO: 133681 - DNA, 25 bp, Probe sequence
caagtctcttctttagaaagcttta

SEQ ID NO: 133682 - DNA, 25 bp, Probe sequence
caaactgtggagcaacatactgtgg

SEQ ID NO: 133683 - DNA, 25 bp, Probe sequence
caaaccttcatctcacaataataat

SEQ ID NO: 133684 - DNA, 25 bp, Probe sequence
cgatcataatgatacttacttcaaa

SEQ ID NO: 133685 - DNA, 25 bp, Probe sequence
gcgactttttaacaagatacctcat

SEQ ID NO: 133686 - DNA, 25 bp, Probe sequence
gcaatacaattgaacagcacccaga

SEQ ID NO: 133687 - DNA, 25 bp, Probe sequence
gaataccgaccaaattttatatgtg

SEQ ID NO: 133688 - DNA, 25 bp, Probe sequence
gaagattcattaatttcaaacctta

SEQ ID NO: 133689 - DNA, 25 bp, Probe sequence
gaagcatctcaatacgatatattaa

SEQ ID NO: 133690 - DNA, 25 bp, Probe sequence
gaacagcacccagaactaacaatga

SEQ ID NO: 133691 - DNA, 25 bp, Probe sequence
gaaagagtaactctcaatactttga

SEQ ID NO: 133692 - DNA, 25 bp, Probe sequence
gagtttattgatcaaggtacagcca

SEQ ID NO: 133693 - DNA, 25 bp, Probe sequence
gaggatacatttcattttacattat

SEQ ID NO: 133694 - DNA, 25 bp, Probe sequence
gatgaaatccctaaacattttataa

SEQ ID NO: 133695 - DNA, 25 bp, Probe sequence
gatatattaattgccttacacagtt

SEQ ID NO: 133696 - DNA, 25 bp, Probe sequence
gtcgtattatcgaagaagcatctca

SEQ ID NO: 133697 - DNA, 25 bp, Probe sequence
gtggaatgtgacaaaactggttttt

SEQ ID NO: 133698 - DNA, 25 bp, Probe sequence
ggtacagccattttgaatatattag

SEQ ID NO: 133699 - DNA, 25 bp, Probe sequence
taaaacaacaccgagatttatcgtt

SEQ ID NO: 133700 - DNA, 25 bp, Probe sequence
tacttacttcaaatttatccgtagt

SEQ ID NO: 133701 - DNA, 25 bp, Probe sequence
tatttctcttaatctatacgatcat

SEQ ID NO: 133702 - DNA, 25 bp, Probe sequence
tattcactgctataactgatttaat

SEQ ID NO: 133703 - DNA, 25 bp, Probe sequence
ttcattttacattattcactgctat

SEQ ID NO: 133704 - DNA, 25 bp, Probe sequence
atcgctttgtattacttttgaccat

SEQ ID NO: 133705 - DNA, 25 bp, Probe sequence
atgaattttcaagtaagtccctatt

SEQ ID NO: 133706 - DNA, 25 bp, Probe sequence
agttctatactgaaggttatggtta

SEQ ID NO: 133707 - DNA, 25 bp, Probe sequence
agcccagagttctatactgaaggtt

SEQ ID NO: 133708 - DNA, 25 bp, Probe sequence
actaagcgtgtgtatgaccagttaa

SEQ ID NO: 133709 - DNA, 25 bp, Probe sequence
acactgtatatccaacgtatcaagg

SEQ ID NO: 133710 - DNA, 25 bp, Probe sequence
aaaacactgtatatccaacgtatca

SEQ ID NO: 133711 - DNA, 25 bp, Probe sequence
aaaagcattcagcccagagttctat

SEQ ID NO: 133712 - DNA, 25 bp, Probe sequence
aaaattatgattgcggatgataccg

SEQ ID NO: 133713 - DNA, 25 bp, Probe sequence
aagcattcagcccagagttctatac

SEQ ID NO: 133714 - DNA, 25 bp, Probe sequence
aaggatagaccgacagataagcaac

SEQ ID NO: 133715 - DNA, 25 bp, Probe sequence
aatatatcgctttgtattacttttg

SEQ ID NO: 133716 - DNA, 25 bp, Probe sequence
gcgtgtgtatgaccagttaatagaa

SEQ ID NO: 133717 - DNA, 25 bp, Probe sequence
gctttgtattacttttgaccatgta

SEQ ID NO: 133718 - DNA, 25 bp, Probe sequence
gcattcagcccagagttctatactg

SEQ ID NO: 133719 - DNA, 25 bp, Probe sequence
gcagatggtttgaaaaggttgtatg

SEQ ID NO: 133720 - DNA, 25 bp, Probe sequence
gaagtattaaaagcattcagcccag

SEQ ID NO: 133721 - DNA, 25 bp, Probe sequence
gaagaaactaagcgtgtgtatgacc

SEQ ID NO: 133722 - DNA, 25 bp, Probe sequence
gagctgtttggcgctaaaacactgt

SEQ ID NO: 133723 - DNA, 25 bp, Probe sequence
gaccagttaatagaaaaaggcagtg

SEQ ID NO: 133724 - DNA, 25 bp, Probe sequence
gatccttatggtatatctttacatt

SEQ ID NO: 133725 - DNA, 25 bp, Probe sequence
gtattacttttgaccatgtagaaga

SEQ ID NO: 133726 - DNA, 25 bp, Probe sequence
gtatgaagagctgtttggcgctaaa

SEQ ID NO: 133727 - DNA, 25 bp, Probe sequence
gtaagagatccttatggtatatctt

SEQ ID NO: 133728 - DNA, 25 bp, Probe sequence
gtgtacttcaatttggagatataaa

SEQ ID NO: 133729 - DNA, 25 bp, Probe sequence
ggtatatctttacatttatttacga

SEQ ID NO: 133730 - DNA, 25 bp, Probe sequence
ggttatggttatgtaagagatcctt

SEQ ID NO: 133731 - DNA, 25 bp, Probe sequence
ggttgtatgaagagctgtttggcgc

SEQ ID NO: 133732 - DNA, 25 bp, Probe sequence
ggatgataccgaaggtttacctata

SEQ ID NO: 133733 - DNA, 25 bp, Probe sequence
ggcgctaaaacactgtatatccaac

SEQ ID NO: 133734 - DNA, 25 bp, Probe sequence
tccaacgtatcaaggatagaccgac

SEQ ID NO: 133735 - DNA, 25 bp, Probe sequence
taacccaaggtaataatatatcgct

SEQ ID NO: 133736 - DNA, 25 bp, Probe sequence
taaaattgatcaatgtgtacttcaa

SEQ ID NO: 133737 - DNA, 25 bp, Probe sequence
tagaccgacagataagcaacttaat

SEQ ID NO: 133738 - DNA, 25 bp, Probe sequence
atcgtacagttaaagcagccgtact

SEQ ID NO: 133739 - DNA, 25 bp, Probe sequence
atgttgaagatgttggcacgcgtgc

SEQ ID NO: 133740 - DNA, 25 bp, Probe sequence
atgtcatcattacgactggtggaac

SEQ ID NO: 133741 - DNA, 25 bp, Probe sequence
atgggcgaacatcaaaacgttaaat

SEQ ID NO: 133742 - DNA, 25 bp, Probe sequence
agcagccgtactaacggtatcagat

SEQ ID NO: 133743 - DNA, 25 bp, Probe sequence
agaaaagctcattaaaccagaatta

SEQ ID NO: 133744 - DNA, 25 bp, Probe sequence
acgacgcaggtgaagaagtggttag

SEQ ID NO: 133745 - DNA, 25 bp, Probe sequence
acagataaaggtggtcaatgcgtgc

SEQ ID NO: 133746 - DNA, 25 bp, Probe sequence
aaagcagccgtactaacggtatcag

SEQ ID NO: 133747 - DNA, 25 bp, Probe sequence
aaccagaattaaatcatctgattca

SEQ ID NO: 133748 - DNA, 25 bp, Probe sequence
aagatgttggcacgcgtgcattatt

SEQ ID NO: 133749 - DNA, 25 bp, Probe sequence
aatcatctgattcatgagcttacaa

SEQ ID NO: 133750 - DNA, 25 bp, Probe sequence
caaaacgttaaattgaatcgtacag

SEQ ID NO: 133751 - DNA, 25 bp, Probe sequence
cagttaaagcagccgtactaacggt

SEQ ID NO: 133752 - DNA, 25 bp, Probe sequence
catctgattcatgagcttacaaaat

SEQ ID NO: 133753 - DNA, 25 bp, Probe sequence
ccgtactaacggtatcagatactag

SEQ ID NO: 133754 - DNA, 25 bp, Probe sequence
gccgtactaacggtatcagatacta

SEQ ID NO: 133755 - DNA, 25 bp, Probe sequence
gcattagaaaagctcattaaaccag

SEQ ID NO: 133756 - DNA, 25 bp, Probe sequence
gcaggtgaagaagtggttagaagaa

SEQ ID NO: 133757 - DNA, 25 bp, Probe sequence
gaatcgtacagttaaagcagccgta

SEQ ID NO: 133758 - DNA, 25 bp, Probe sequence
gaagatgttggcacgcgtgcattat

SEQ ID NO: 133759 - DNA, 25 bp, Probe sequence
gacgcaggtgaagaagtggttagaa

SEQ ID NO: 133760 - DNA, 25 bp, Probe sequence
gatgtcatcattacgactggtggaa

SEQ ID NO: 133761 - DNA, 25 bp, Probe sequence
gttgaagatgttggcacgcgtgcat

SEQ ID NO: 133762 - DNA, 25 bp, Probe sequence
gttatgttgaagatgttggcacgcg

SEQ ID NO: 133763 - DNA, 25 bp, Probe sequence
gtacagttaaagcagccgtactaac

SEQ ID NO: 133764 - DNA, 25 bp, Probe sequence
gggcgaacatcaaaacgttaaattg

SEQ ID NO: 133765 - DNA, 25 bp, Probe sequence
tgttgaagatgttggcacgcgtgca

SEQ ID NO: 133766 - DNA, 25 bp, Probe sequence
tgaatcgtacagttaaagcagccgt

SEQ ID NO: 133767 - DNA, 25 bp, Probe sequence
tctgattcatgagcttacaaaataa

SEQ ID NO: 133768 - DNA, 25 bp, Probe sequence
taaatcatctgattcatgagcttac

SEQ ID NO: 133769 - DNA, 25 bp, Probe sequence
tttagatatttgagttatgttgaag

SEQ ID NO: 133770 - DNA, 25 bp, Probe sequence
ttgaagatgttggcacgcgtgcatt

SEQ ID NO: 133771 - DNA, 25 bp, Probe sequence
ttgatgtcatcattacgactggtgg

SEQ ID NO: 133772 - DNA, 25 bp, Probe sequence
atttggtttcagtaaaatgcaacgt

SEQ ID NO: 133773 - DNA, 25 bp, Probe sequence
atacatggcatgacacgcacatcag

SEQ ID NO: 133774 - DNA, 25 bp, Probe sequence
atgacacgcacatcagatgccacac

SEQ ID NO: 133775 - DNA, 25 bp, Probe sequence
agttatccgtatttaaacaagaatg

SEQ ID NO: 133776 - DNA, 25 bp, Probe sequence
acgcacatcagatgccacacatcta

SEQ ID NO: 133777 - DNA, 25 bp, Probe sequence
acacatggacaggacgttgacgtta

SEQ ID NO: 133778 - DNA, 25 bp, Probe sequence
acagagtacatatacagaagctgca

SEQ ID NO: 133779 - DNA, 25 bp, Probe sequence
acagaagctgcatttatacctggta

SEQ ID NO: 133780 - DNA, 25 bp, Probe sequence
aaataacttatggcgatatttggga

SEQ ID NO: 133781 - DNA, 25 bp, Probe sequence
aagcatttgctagcgttacgtagtg

SEQ ID NO: 133782 - DNA, 25 bp, Probe sequence
aagaatgaacaacgttatgcaacat

SEQ ID NO: 133783 - DNA, 25 bp, Probe sequence
cttgctttaactgtttggtaccaca

SEQ ID NO: 133784 - DNA, 25 bp, Probe sequence
ccgtgacgatggcaacaagtttaca

SEQ ID NO: 133785 - DNA, 25 bp, Probe sequence
gctagcgttacgtagtgatgttgat

SEQ ID NO: 133786 - DNA, 25 bp, Probe sequence
gaacgttattcaaggcaaattttat

SEQ ID NO: 133787 - DNA, 25 bp, Probe sequence
gatgtaccaagttatccgtatttaa

SEQ ID NO: 133788 - DNA, 25 bp, Probe sequence
gatgcaaccgataactttgaaacac

SEQ ID NO: 133789 - DNA, 25 bp, Probe sequence
gatgccacacatctaatgaatttat

SEQ ID NO: 133790 - DNA, 25 bp, Probe sequence
gttacgtagtgatgttgatattgat

SEQ ID NO: 133791 - DNA, 25 bp, Probe sequence
gtttacaattaagagatgcgatgaa

SEQ ID NO: 133792 - DNA, 25 bp, Probe sequence
gtttggtaccacaattgccagcatt

SEQ ID NO: 133793 - DNA, 25 bp, Probe sequence
gtcattcaacctgccgtgacgatgg

SEQ ID NO: 133794 - DNA, 25 bp, Probe sequence
gtgagtcaagaacgttattcaaggc

SEQ ID NO: 133795 - DNA, 25 bp, Probe sequence
gtggttgcagctaaaaagcatttgc

SEQ ID NO: 133796 - DNA, 25 bp, Probe sequence
gtggagatgtaccaagttatccgta

SEQ ID NO: 133797 - DNA, 25 bp, Probe sequence
ggtggaaggtttttaatacatggca

SEQ ID NO: 133798 - DNA, 25 bp, Probe sequence
ggtaccacaattgccagcattaaat

SEQ ID NO: 133799 - DNA, 25 bp, Probe sequence
ggtagtcattattcatttggtttca

SEQ ID NO: 133800 - DNA, 25 bp, Probe sequence
tggtaaaacaccttgctttaactgt

SEQ ID NO: 133801 - DNA, 25 bp, Probe sequence
tcaacctgccgtgacgatggcaaca

SEQ ID NO: 133802 - DNA, 25 bp, Probe sequence
taactttgaaacacgacaactgatt

SEQ ID NO: 133803 - DNA, 25 bp, Probe sequence
tatacctggtaaaacaccttgcttt

SEQ ID NO: 133804 - DNA, 25 bp, Probe sequence
ttaacggaacaaccaattgacacaa

SEQ ID NO: 133805 - DNA, 25 bp, Probe sequence
ttgccagcattaaatttaacatgtg

SEQ ID NO: 133806 - DNA, 25 bp, Probe sequence
atatgattgccggattacgtaaagc

SEQ ID NO: 133807 - DNA, 25 bp, Probe sequence
ataccaatcatatttgtgacacatt

SEQ ID NO: 133808 - DNA, 25 bp, Probe sequence
atcatttgatgaaacaatatcctat

SEQ ID NO: 133809 - DNA, 25 bp, Probe sequence
atctggcattggtaaaactactgtt

SEQ ID NO: 133810 - DNA, 25 bp, Probe sequence
atgaagcagaacaaatggctcatga

SEQ ID NO: 133811 - DNA, 25 bp, Probe sequence
atgacattgtcaggtggagaggcac

SEQ ID NO: 133812 - DNA, 25 bp, Probe sequence
agatgaacctttttctagtttggat

SEQ ID NO: 133813 - DNA, 25 bp, Probe sequence
agcagatgaagctattatcgaagtg

SEQ ID NO: 133814 - DNA, 25 bp, Probe sequence
acctttttctagtttggatgatact

SEQ ID NO: 133815 - DNA, 25 bp, Probe sequence
actactgttttaaatatgattgccg

SEQ ID NO: 133816 - DNA, 25 bp, Probe sequence
acaatatcctatgacattgtcaggt

SEQ ID NO: 133817 - DNA, 25 bp, Probe sequence
aaatattacttttatggctgaacca

SEQ ID NO: 133818 - DNA, 25 bp, Probe sequence
aatggctcatgaaattattacaatt

SEQ ID NO: 133819 - DNA, 25 bp, Probe sequence
aatttatgcagttcgtggtccatct

SEQ ID NO: 133820 - DNA, 25 bp, Probe sequence
aattcaacaacgacgtattggatat

SEQ ID NO: 133821 - DNA, 25 bp, Probe sequence
cgtgtagcacttgcacgtgcactta

SEQ ID NO: 133822 - DNA, 25 bp, Probe sequence
gcacgaaaccagatttaattttatt

SEQ ID NO: 133823 - DNA, 25 bp, Probe sequence
gccggattacgtaaagcagatgaag

SEQ ID NO: 133824 - DNA, 25 bp, Probe sequence
gctattatcgaagtgaatgggcaat

SEQ ID NO: 133825 - DNA, 25 bp, Probe sequence
gcacttgcacgtgcacttagcacga

SEQ ID NO: 133826 - DNA, 25 bp, Probe sequence
gagagtattacattagttaaacgta

SEQ ID NO: 133827 - DNA, 25 bp, Probe sequence
gtagcacttgcacgtgcacttagca

SEQ ID NO: 133828 - DNA, 25 bp, Probe sequence
gtcaggtggagaggcacaacgtgta

SEQ ID NO: 133829 - DNA, 25 bp, Probe sequence
gtgacacattcaaactatgaagcag

SEQ ID NO: 133830 - DNA, 25 bp, Probe sequence
gtggtccatctggcattggtaaaac

SEQ ID NO: 133831 - DNA, 25 bp, Probe sequence
ggagaggcacaacgtgtagcacttg

SEQ ID NO: 133832 - DNA, 25 bp, Probe sequence
tgatactgaaccaaaaatttatgca

SEQ ID NO: 133833 - DNA, 25 bp, Probe sequence
tgcacttagcacgaaaccagattta

SEQ ID NO: 133834 - DNA, 25 bp, Probe sequence
tcaacgaatggcaaataccaatcat

SEQ ID NO: 133835 - DNA, 25 bp, Probe sequence
tagttaaacgtattttcaacgaatg

SEQ ID NO: 133836 - DNA, 25 bp, Probe sequence
tattacttttatggctgaaccatct

SEQ ID NO: 133837 - DNA, 25 bp, Probe sequence
ttatgcagttcgtggtccatctggc

SEQ ID NO: 133838 - DNA, 25 bp, Probe sequence
ttcgtggtccatctggcattggtaa

SEQ ID NO: 133839 - DNA, 25 bp, Probe sequence
ttcgcatcaatatagatgatactga

SEQ ID NO: 133840 - DNA, 25 bp, Probe sequence
cctattgttttgccgccaacggtat

SEQ ID NO: 133841 - DNA, 25 bp, Probe sequence
attctattaatcatcttctcgccaa

SEQ ID NO: 133842 - DNA, 25 bp, Probe sequence
atgcctgacttaacacctttttgga

SEQ ID NO: 133843 - DNA, 25 bp, Probe sequence
atgaagcgtggttatgggtattagt

SEQ ID NO: 133844 - DNA, 25 bp, Probe sequence
acgagttgctgtaatcagtacgatt

SEQ ID NO: 133845 - DNA, 25 bp, Probe sequence
acaggtgctgtgatagcatctgtca

SEQ ID NO: 133846 - DNA, 25 bp, Probe sequence
aatggttgcaggatatattccaaat

SEQ ID NO: 133847 - DNA, 25 bp, Probe sequence
aatgtatcaacatactgtgcaaggc

SEQ ID NO: 133848 - DNA, 25 bp, Probe sequence
aatatacttcttagtggaacaaggt

SEQ ID NO: 133849 - DNA, 25 bp, Probe sequence
cacctttttggatatcaatacgagt

SEQ ID NO: 133850 - DNA, 25 bp, Probe sequence
caggtataatgatgagttttgctcg

SEQ ID NO: 133851 - DNA, 25 bp, Probe sequence
gcgaatgtactacatttacctgtag

SEQ ID NO: 133852 - DNA, 25 bp, Probe sequence
gctagtcgcattctctattgtggtt

SEQ ID NO: 133853 - DNA, 25 bp, Probe sequence
gcattctctattgtggttatatcta

SEQ ID NO: 133854 - DNA, 25 bp, Probe sequence
gcatctgtcattgttagttttccac

SEQ ID NO: 133855 - DNA, 25 bp, Probe sequence
gaacgatgggagcaagtgaaacgaa

SEQ ID NO: 133856 - DNA, 25 bp, Probe sequence
gagtttggtgctacattaatggttg

SEQ ID NO: 133857 - DNA, 25 bp, Probe sequence
gatgagttttgctcgtgcattaggt

SEQ ID NO: 133858 - DNA, 25 bp, Probe sequence
gatattacctattgttttgccgcca

SEQ ID NO: 133859 - DNA, 25 bp, Probe sequence
gattaatacagctagaacgatggga

SEQ ID NO: 133860 - DNA, 25 bp, Probe sequence
gtgcattaggtgagtttggtgctac

SEQ ID NO: 133861 - DNA, 25 bp, Probe sequence
gggtattagtgctagtcgcattctc

SEQ ID NO: 133862 - DNA, 25 bp, Probe sequence
ggtcaattctttgcgaatgtactac

SEQ ID NO: 133863 - DNA, 25 bp, Probe sequence
ggaaagtttattgatattacctatt

SEQ ID NO: 133864 - DNA, 25 bp, Probe sequence
tgccgccaacggtattaggttttat

SEQ ID NO: 133865 - DNA, 25 bp, Probe sequence
tccaaataaaacgaatacactacct

SEQ ID NO: 133866 - DNA, 25 bp, Probe sequence
tcctcaaattaattttaccattagc

SEQ ID NO: 133867 - DNA, 25 bp, Probe sequence
tcatcttctcgccaagaggaccaat

SEQ ID NO: 133868 - DNA, 25 bp, Probe sequence
taaacgctctattttagcaggtata

SEQ ID NO: 133869 - DNA, 25 bp, Probe sequence
tacactacctttagaaatatacttc

SEQ ID NO: 133870 - DNA, 25 bp, Probe sequence
tagttttccactaatgtatcaacat

SEQ ID NO: 133871 - DNA, 25 bp, Probe sequence
tagtgctagtcgcattctctattgt

SEQ ID NO: 133872 - DNA, 25 bp, Probe sequence
tttaccattagctaaacgctctatt

SEQ ID NO: 133873 - DNA, 25 bp, Probe sequence
ttcactttgacaggtgctgtgatag

SEQ ID NO: 133874 - DNA, 25 bp, Probe sequence
attggcgttgtagatgtcattgaaa

SEQ ID NO: 133875 - DNA, 25 bp, Probe sequence
atgccatagaaagtgatgcgcttgc

SEQ ID NO: 133876 - DNA, 25 bp, Probe sequence
atgaacctattggcgttgtagatgt

SEQ ID NO: 133877 - DNA, 25 bp, Probe sequence
atggtaagggaacattatcaaaaag

SEQ ID NO: 133878 - DNA, 25 bp, Probe sequence
agatatgaattttgaactaggtatt

SEQ ID NO: 133879 - DNA, 25 bp, Probe sequence
agatgtgattaaacgcttagtagct

SEQ ID NO: 133880 - DNA, 25 bp, Probe sequence
acctattggcgttgtagatgtcatt

SEQ ID NO: 133881 - DNA, 25 bp, Probe sequence
acgcttagtagcttatttaaataat

SEQ ID NO: 133882 - DNA, 25 bp, Probe sequence
actaggtattatggaattgtatgcc

SEQ ID NO: 133883 - DNA, 25 bp, Probe sequence
acattgaattagatggatttggtgt

SEQ ID NO: 133884 - DNA, 25 bp, Probe sequence
aaataatgaacctattggcgttgta

SEQ ID NO: 133885 - DNA, 25 bp, Probe sequence
aatttgccgcgtaactctgacgttg

SEQ ID NO: 133886 - DNA, 25 bp, Probe sequence
caaatcaaggttcaaatcattatgc

SEQ ID NO: 133887 - DNA, 25 bp, Probe sequence
cgttgacgagtcgcatatagatgcc

SEQ ID NO: 133888 - DNA, 25 bp, Probe sequence
cgcgtaactctgacgttgaaattgc

SEQ ID NO: 133889 - DNA, 25 bp, Probe sequence
cgtcaacatcaattacatacaaatc

SEQ ID NO: 133890 - DNA, 25 bp, Probe sequence
gcctatttaaaagttgcatatcagt

SEQ ID NO: 133891 - DNA, 25 bp, Probe sequence
tgccgcgtaactctgacgttgaaat

SEQ ID NO: 133892 - DNA, 25 bp, Probe sequence
gccgcgtaactctgacgttgaaatt

SEQ ID NO: 133893 - DNA, 25 bp, Probe sequence
gaacctattggcgttgtagatgtca

SEQ ID NO: 133894 - DNA, 25 bp, Probe sequence
gacgagtcgcatatagatgcctatt

SEQ ID NO: 133895 - DNA, 25 bp, Probe sequence
gagtcgcatatagatgcctatttaa

SEQ ID NO: 133896 - DNA, 25 bp, Probe sequence
gatgtcattgaaagtgaaaattaca

SEQ ID NO: 133897 - DNA, 25 bp, Probe sequence
gatatgtatgcaaagcaaggttatg

SEQ ID NO: 133898 - DNA, 25 bp, Probe sequence
gattaaacgcttagtagcttattta

SEQ ID NO: 133899 - DNA, 25 bp, Probe sequence
gtatgccatagaaagtgatgcgctt

SEQ ID NO: 133900 - DNA, 25 bp, Probe sequence
ggcgttgtagatgtcattgaaagtg

SEQ ID NO: 133901 - DNA, 25 bp, Probe sequence
taatgaacctattggcgttgtagat

SEQ ID NO: 133902 - DNA, 25 bp, Probe sequence
taaacgcttagtagcttatttaaat

SEQ ID NO: 133903 - DNA, 25 bp, Probe sequence
tacatacaaatcaaggttcaaatca

SEQ ID NO: 133904 - DNA, 25 bp, Probe sequence
tttgccgcgtaactctgacgttgaa

SEQ ID NO: 133905 - DNA, 25 bp, Probe sequence
tattggcgttgtagatgtcattgaa

SEQ ID NO: 133906 - DNA, 25 bp, Probe sequence
tttaaaagttgcatatcagtttagt

SEQ ID NO: 133907 - DNA, 25 bp, Probe sequence
ttgccgcgtaactctgacgttgaaa

SEQ ID NO: 133908 - DNA, 25 bp, Probe sequence
accattttcttcagtaccaattgta

SEQ ID NO: 133909 - DNA, 25 bp, Probe sequence
attggtacattgattatgggcatga

SEQ ID NO: 133910 - DNA, 25 bp, Probe sequence
attatatccagttgtagcattcatg

SEQ ID NO: 133911 - DNA, 25 bp, Probe sequence
atcactcgcagtttcgtcaaattat

SEQ ID NO: 133912 - DNA, 25 bp, Probe sequence
agctttaatgacagcgattatcgct

SEQ ID NO: 133913 - DNA, 25 bp, Probe sequence
acttaatcactcgcagtttcgtcaa

SEQ ID NO: 133914 - DNA, 25 bp, Probe sequence
actaccattttcttcagtaccaatt

SEQ ID NO: 133915 - DNA, 25 bp, Probe sequence
acataccatttacgaaagctatttc

SEQ ID NO: 133916 - DNA, 25 bp, Probe sequence
acagctttacttaatcactcgcagt

SEQ ID NO: 133917 - DNA, 25 bp, Probe sequence
aacattggtattttcttagcaggtg

SEQ ID NO: 133918 - DNA, 25 bp, Probe sequence
aatttcattagcttatttgcctggt

SEQ ID NO: 133919 - DNA, 25 bp, Probe sequence
cattagcttatttgcctggtgatat

SEQ ID NO: 133920 - DNA, 25 bp, Probe sequence
ctcgcagtttcgtcaaattatggga

SEQ ID NO: 133921 - DNA, 25 bp, Probe sequence
gctttacttaatcactcgcagtttc

SEQ ID NO: 133922 - DNA, 25 bp, Probe sequence
gcttatttgcctggtgatatattaa

SEQ ID NO: 133923 - DNA, 25 bp, Probe sequence
gacagcgattatcgctattttagga

SEQ ID NO: 133924 - DNA, 25 bp, Probe sequence
gtagcaagtttgattggtacagctt

SEQ ID NO: 133925 - DNA, 25 bp, Probe sequence
gtaccaattgtacttcaaaacattg

SEQ ID NO: 133926 - DNA, 25 bp, Probe sequence
gtctttttattattagtagttgctg

SEQ ID NO: 133927 - DNA, 25 bp, Probe sequence
gtgttatcgtctttttattattagt

SEQ ID NO: 133928 - DNA, 25 bp, Probe sequence
tggtaccggtaattccactaccatt

SEQ ID NO: 133929 - DNA, 25 bp, Probe sequence
ggtacagctttacttaatcactcgc

SEQ ID NO: 133930 - DNA, 25 bp, Probe sequence
ggcacattaagtgttatcgtctttt

SEQ ID NO: 133931 - DNA, 25 bp, Probe sequence
tggattttattcgttggtattttag

SEQ ID NO: 133932 - DNA, 25 bp, Probe sequence
tgggcatgattattaacataccatt

SEQ ID NO: 133933 - DNA, 25 bp, Probe sequence
tccactaccattttcttcagtacca

SEQ ID NO: 133934 - DNA, 25 bp, Probe sequence
taattccactaccattttcttcagt

SEQ ID NO: 133935 - DNA, 25 bp, Probe sequence
taatttctggattttattcgttggt

SEQ ID NO: 133936 - DNA, 25 bp, Probe sequence
tatccagttgtagcattcatgattg

SEQ ID NO: 133937 - DNA, 25 bp, Probe sequence
tatagcattagatgttattggtaca

SEQ ID NO: 133938 - DNA, 25 bp, Probe sequence
tttactattatatccagttgtagca

SEQ ID NO: 133939 - DNA, 25 bp, Probe sequence
tttacgaaagctatttcaatttcat

SEQ ID NO: 133940 - DNA, 25 bp, Probe sequence
tttagtttttggtgttatagcatta

SEQ ID NO: 133941 - DNA, 25 bp, Probe sequence
ttaggacgtaaatatggcacattaa

SEQ ID NO: 133942 - DNA, 25 bp, Probe sequence
attgccaattttaaatgagccagtc

SEQ ID NO: 133943 - DNA, 25 bp, Probe sequence
atttacaggcccgcttacagattta

SEQ ID NO: 133944 - DNA, 25 bp, Probe sequence
atacgggcattgattttttaggagt

SEQ ID NO: 133945 - DNA, 25 bp, Probe sequence
atgggatgttttaacgactgcttat

SEQ ID NO: 133946 - DNA, 25 bp, Probe sequence
agagattgatatggttgctttagaa

SEQ ID NO: 133947 - DNA, 25 bp, Probe sequence
acctgagcatgatggttctgcagaa

SEQ ID NO: 133948 - DNA, 25 bp, Probe sequence
acacactttataacaaattctactt

SEQ ID NO: 133949 - DNA, 25 bp, Probe sequence
aaagaagcctttgaagacattattc

SEQ ID NO: 133950 - DNA, 25 bp, Probe sequence
aaaattgtttttgatagcgatatag

SEQ ID NO: 133951 - DNA, 25 bp, Probe sequence
aacattattatttacaggcccgctt

SEQ ID NO: 133952 - DNA, 25 bp, Probe sequence
aagaatggcgtatgcatgccttttt

SEQ ID NO: 133953 - DNA, 25 bp, Probe sequence
aattctacttactttttatgggatg

SEQ ID NO: 133954 - DNA, 25 bp, Probe sequence
caggcccgcttacagatttagcaaa

SEQ ID NO: 133955 - DNA, 25 bp, Probe sequence
ccatctttgagcgcatcagtaaaaa

SEQ ID NO: 133956 - DNA, 25 bp, Probe sequence
gccttttttatggacgcattgccaa

SEQ ID NO: 133957 - DNA, 25 bp, Probe sequence
gaatgaacgccaatatacgggcatt

SEQ ID NO: 133958 - DNA, 25 bp, Probe sequence
gaagatattcaagttgcgccatcat

SEQ ID NO: 133959 - DNA, 25 bp, Probe sequence
gaaaacgttcaattgataggggtca

SEQ ID NO: 133960 - DNA, 25 bp, Probe sequence
gacatttgagtgtaaagatgggcgc

SEQ ID NO: 133961 - DNA, 25 bp, Probe sequence
gagtaagttatgcagcggtaccacc

SEQ ID NO: 133962 - DNA, 25 bp, Probe sequence
gatgttagacaaagatgggcgaatg

SEQ ID NO: 133963 - DNA, 25 bp, Probe sequence
gatgggcgcaaaattaatgtcataa

SEQ ID NO: 133964 - DNA, 25 bp, Probe sequence
gatccagaagcggttaaaattgttt

SEQ ID NO: 133965 - DNA, 25 bp, Probe sequence
gataggggtcagtacaattggtgct

SEQ ID NO: 133966 - DNA, 25 bp, Probe sequence
gttatggaccaagtcaaggtaagac

SEQ ID NO: 133967 - DNA, 25 bp, Probe sequence
gttgcgccatcatatgaacgaggaa

SEQ ID NO: 133968 - DNA, 25 bp, Probe sequence
gtatgcatgccttttttatggacgc

SEQ ID NO: 133969 - DNA, 25 bp, Probe sequence
gtagataacaacgcattttttgatt

SEQ ID NO: 133970 - DNA, 25 bp, Probe sequence
ggtaccaccattaacacactttata

SEQ ID NO: 133971 - DNA, 25 bp, Probe sequence
ggaaatgttgaagaacctgagcatg

SEQ ID NO: 133972 - DNA, 25 bp, Probe sequence
ggaatgcatattgggatccagaagc

SEQ ID NO: 133973 - DNA, 25 bp, Probe sequence
taacgactgcttatattggtaacaa

SEQ ID NO: 133974 - DNA, 25 bp, Probe sequence
tatgcagcggtaccaccattaacac

SEQ ID NO: 133975 - DNA, 25 bp, Probe sequence
ttgattatataactgcacttgctaa

SEQ ID NO: 133976 - DNA, 25 bp, Probe sequence
atatgctggtgattacattgtgagt

SEQ ID NO: 133977 - DNA, 25 bp, Probe sequence
tacggcgataactggggtcgtggtg

SEQ ID NO: 133978 - DNA, 25 bp, Probe sequence
atcaaaaagtagcaccaacagtagt

SEQ ID NO: 133979 - DNA, 25 bp, Probe sequence
atgttattagtgttagctgcgtgtg

SEQ ID NO: 133980 - DNA, 25 bp, Probe sequence
atgtggaagaatttgaaagctacta

SEQ ID NO: 133981 - DNA, 25 bp, Probe sequence
aggacatattgttaaagttgatgct

SEQ ID NO: 133982 - DNA, 25 bp, Probe sequence
agaagtattatatcaagcatttggt

SEQ ID NO: 133983 - DNA, 25 bp, Probe sequence
agcaggttgggctgaagtgaaacaa

SEQ ID NO: 133984 - DNA, 25 bp, Probe sequence
actgcaaaagcaggttgggctgaag

SEQ ID NO: 133985 - DNA, 25 bp, Probe sequence
aaaatgcaaccagaacaacaaaagt

SEQ ID NO: 133986 - DNA, 25 bp, Probe sequence
aacaaagctgaaactaaatcttata

SEQ ID NO: 133987 - DNA, 25 bp, Probe sequence
aacgcattgcagtagttgcgccaac

SEQ ID NO: 133988 - DNA, 25 bp, Probe sequence
aagcaattggacaagatgcaacagt

SEQ ID NO: 133989 - DNA, 25 bp, Probe sequence
aagttgatgctggtacatactggta

SEQ ID NO: 133990 - DNA, 25 bp, Probe sequence
aattaggtgcaaacattgtagctgt

SEQ ID NO: 133991 - DNA, 25 bp, Probe sequence
gatattccgaaagaccctaaacgca

SEQ ID NO: 133992 - DNA, 25 bp, Probe sequence
gcgccaacatatgctggtggactta

SEQ ID NO: 133993 - DNA, 25 bp, Probe sequence
gctgcgtgtgggaaccaaggtgaaa

SEQ ID NO: 133994 - DNA, 25 bp, Probe sequence
gcaaacattgtagctgtaaatcaac

SEQ ID NO: 133995 - DNA, 25 bp, Probe sequence
gaaacaactgctaaagacggtaaag

SEQ ID NO: 133996 - DNA, 25 bp, Probe sequence
gaaagaccctaaacgcattgcagta

SEQ ID NO: 133997 - DNA, 25 bp, Probe sequence
gaaagctactaaagaaggacatatt

SEQ ID NO: 133998 - DNA, 25 bp, Probe sequence
gatgcaacagtgtcattgtttgatg

SEQ ID NO: 133999 - DNA, 25 bp, Probe sequence
gataactggggtcgtggtggagaag

SEQ ID NO: 134000 - DNA, 25 bp, Probe sequence
gttgcgccaacatatgctggtggac

SEQ ID NO: 134001 - DNA, 25 bp, Probe sequence
gtgaaggtaaacctacaccaggata

SEQ ID NO: 134002 - DNA, 25 bp, Probe sequence
gtagcaccaacagtagttgttgact

SEQ ID NO: 134003 - DNA, 25 bp, Probe sequence
gtgttagctgcgtgtgggaaccaag

SEQ ID NO: 134004 - DNA, 25 bp, Probe sequence
ggtacaacgatccttatacattaga

SEQ ID NO: 134005 - DNA, 25 bp, Probe sequence
ggacgatggcaaaacggtagatatt

SEQ ID NO: 134006 - DNA, 25 bp, Probe sequence
tacacttacggcgataactggggtc

SEQ ID NO: 134007 - DNA, 25 bp, Probe sequence
tacatactggtacaacgatccttat

SEQ ID NO: 134008 - DNA, 25 bp, Probe sequence
tatacattagatttcatgcgtaaag

SEQ ID NO: 134009 - DNA, 25 bp, Probe sequence
ttaattattgtatactctactgaca

SEQ ID NO: 134010 - DNA, 25 bp, Probe sequence
attgcacgagacagagatattgatg

SEQ ID NO: 134011 - DNA, 25 bp, Probe sequence
attgccctatttttacctttggcag

SEQ ID NO: 134012 - DNA, 25 bp, Probe sequence
atttttacctttggcagatcatcag

SEQ ID NO: 134013 - DNA, 25 bp, Probe sequence
atttaagtctattaattgcacgaga

SEQ ID NO: 134014 - DNA, 25 bp, Probe sequence
atcacaatattctaattgccctatt

SEQ ID NO: 134015 - DNA, 25 bp, Probe sequence
atcaggtgcatatttaagtctatta

SEQ ID NO: 134016 - DNA, 25 bp, Probe sequence
atcgatatccttacggaacattacg

SEQ ID NO: 134017 - DNA, 25 bp, Probe sequence
atgcgattcaatcacaatattctaa

SEQ ID NO: 134018 - DNA, 25 bp, Probe sequence
aagttgttgatttcttaaacgctat

SEQ ID NO: 134019 - DNA, 25 bp, Probe sequence
catcattcgatgcgattcaatcaca

SEQ ID NO: 134020 - DNA, 25 bp, Probe sequence
aatcactatttatcgtaaagttgtt

SEQ ID NO: 134021 - DNA, 25 bp, Probe sequence
ccctatttttacctttggcagatca

SEQ ID NO: 134022 - DNA, 25 bp, Probe sequence
cctttggcagatcatcaggtgcata

SEQ ID NO: 134023 - DNA, 25 bp, Probe sequence
ccacagtatatcgatatccttacgg

SEQ ID NO: 134024 - DNA, 25 bp, Probe sequence
gcgcattgtaatggcgattatgatg

SEQ ID NO: 134025 - DNA, 25 bp, Probe sequence
gaagcaatcactatttatcgtaaag

SEQ ID NO: 134026 - DNA, 25 bp, Probe sequence
gaacgcgtgaataaaaacgagcatg

SEQ ID NO: 134027 - DNA, 25 bp, Probe sequence
gagcatgattttgatcgtagaccta

SEQ ID NO: 134028 - DNA, 25 bp, Probe sequence
gagacagagatattgatggtgttat

SEQ ID NO: 134029 - DNA, 25 bp, Probe sequence
gatggtgttattgatttttatggtt

SEQ ID NO: 134030 - DNA, 25 bp, Probe sequence
gatcatcaggtgcatatttaagtct

SEQ ID NO: 134031 - DNA, 25 bp, Probe sequence
gattttgatcgtagacctaatgacg

SEQ ID NO: 134032 - DNA, 25 bp, Probe sequence
gttgatttcttaaacgctataacaa

SEQ ID NO: 134033 - DNA, 25 bp, Probe sequence
gtatatcgatatccttacggaacat

SEQ ID NO: 134034 - DNA, 25 bp, Probe sequence
gtagacctaatgacgaagcaatcac

SEQ ID NO: 134035 - DNA, 25 bp, Probe sequence
ggaacattacgatttaattcaacta

SEQ ID NO: 134036 - DNA, 25 bp, Probe sequence
tctaattgccctatttttacctttg

SEQ ID NO: 134037 - DNA, 25 bp, Probe sequence
tcaacatttgaacgcgtgaataaaa

SEQ ID NO: 134038 - DNA, 25 bp, Probe sequence
tcaactaagttatcgtttattacca

SEQ ID NO: 134039 - DNA, 25 bp, Probe sequence
taagttatcgtttattaccagaagt

SEQ ID NO: 134040 - DNA, 25 bp, Probe sequence
tatgattaacattgctgattatact

SEQ ID NO: 134041 - DNA, 25 bp, Probe sequence
tatccttacggaacattacgattta

SEQ ID NO: 134042 - DNA, 25 bp, Probe sequence
tattctaattgccctatttttacct

SEQ ID NO: 134043 - DNA, 25 bp, Probe sequence
ttcattgcgcattgtaatggcgatt

SEQ ID NO: 134044 - DNA, 25 bp, Probe sequence
tgggtagtccaacaagagggggaag

SEQ ID NO: 134045 - DNA, 25 bp, Probe sequence
atccacctatggaagatgcagcata

SEQ ID NO: 134046 - DNA, 25 bp, Probe sequence
aggcgaacttgatggtgccacagca

SEQ ID NO: 134047 - DNA, 25 bp, Probe sequence
atggtctcaagatatgttggagcaa

SEQ ID NO: 134048 - DNA, 25 bp, Probe sequence
agtgaagctgaaatgggtagtccaa

SEQ ID NO: 134049 - DNA, 25 bp, Probe sequence
agaagacatggttattttgcaatca

SEQ ID NO: 134050 - DNA, 25 bp, Probe sequence
acacatattattgttgctgcttata

SEQ ID NO: 134051 - DNA, 25 bp, Probe sequence
aaattgccgataattgggacgtatt

SEQ ID NO: 134052 - DNA, 25 bp, Probe sequence
aagctgatgatgggtatattttaaa

SEQ ID NO: 134053 - DNA, 25 bp, Probe sequence
cacagcattatctattggttggcat

SEQ ID NO: 134054 - DNA, 25 bp, Probe sequence
ccattacaacgttactatcgtgaca

SEQ ID NO: 134055 - DNA, 25 bp, Probe sequence
gcacaagctgctagaaattatgctg

SEQ ID NO: 134056 - DNA, 25 bp, Probe sequence
gcaacattgccaactgtgcaacaaa

SEQ ID NO: 134057 - DNA, 25 bp, Probe sequence
gagtaaagcactaacacatattatt

SEQ ID NO: 134058 - DNA, 25 bp, Probe sequence
gatggtgccacagcattatctattg

SEQ ID NO: 134059 - DNA, 25 bp, Probe sequence
gatcaacatagccaatttccatata

SEQ ID NO: 134060 - DNA, 25 bp, Probe sequence
gttactatcgtgacatgcgtgcagg

SEQ ID NO: 134061 - DNA, 25 bp, Probe sequence
gttatttaggtatagcacaagctgc

SEQ ID NO: 134062 - DNA, 25 bp, Probe sequence
gtatgcgagcgacagaaagtcatga

SEQ ID NO: 134063 - DNA, 25 bp, Probe sequence
gtacacatgctgttaaagctgatga

SEQ ID NO: 134064 - DNA, 25 bp, Probe sequence
gtcgtaggacaaatttatgaacaga

SEQ ID NO: 134065 - DNA, 25 bp, Probe sequence
gtgcgagacaatttttatggagtac

SEQ ID NO: 134066 - DNA, 25 bp, Probe sequence
gtgacatgcgtgcaggattacacaa

SEQ ID NO: 134067 - DNA, 25 bp, Probe sequence
gggacgtattaggtatgcgagcgac

SEQ ID NO: 134068 - DNA, 25 bp, Probe sequence
ggggaagaccaagtacacatgctgt

SEQ ID NO: 134069 - DNA, 25 bp, Probe sequence
ggtgaaggtgcgaccatagaagaca

SEQ ID NO: 134070 - DNA, 25 bp, Probe sequence
ggttggcatgtgagtgtcgtaggac

SEQ ID NO: 134071 - DNA, 25 bp, Probe sequence
ggattacacaatccacctatggaag

SEQ ID NO: 134072 - DNA, 25 bp, Probe sequence
ggatattgcatataccaagctgtta

SEQ ID NO: 134073 - DNA, 25 bp, Probe sequence
ggaacgattgcaacattgccaactg

SEQ ID NO: 134074 - DNA, 25 bp, Probe sequence
tatggataattcctttttaataaca

SEQ ID NO: 134075 - DNA, 25 bp, Probe sequence
tttgcaatcatttttaggcgaactt

SEQ ID NO: 134076 - DNA, 25 bp, Probe sequence
tttgcaatccaacatagccctaata

SEQ ID NO: 134077 - DNA, 25 bp, Probe sequence
tttgcctggtgttgaaattgccgat

SEQ ID NO: 134078 - DNA, 25 bp, Probe sequence
attccattattattggtttcgctaa

SEQ ID NO: 134079 - DNA, 25 bp, Probe sequence
ataacggcgatatcagattgctata

SEQ ID NO: 134080 - DNA, 25 bp, Probe sequence
atcagattgctatatcaatcaatag

SEQ ID NO: 134081 - DNA, 25 bp, Probe sequence
atgcattacctgaagataaagaact

SEQ ID NO: 134082 - DNA, 25 bp, Probe sequence
agaacttgcttcagttttgggtcaa

SEQ ID NO: 134083 - DNA, 25 bp, Probe sequence
actgtcagcttaatatttgtacaaa

SEQ ID NO: 134084 - DNA, 25 bp, Probe sequence
actattacccaatattgcaaagttt

SEQ ID NO: 134085 - DNA, 25 bp, Probe sequence
aaagaacttagtatcaatgtgatta

SEQ ID NO: 134086 - DNA, 25 bp, Probe sequence
aaaactgtcagcttaatatttgtac

SEQ ID NO: 134087 - DNA, 25 bp, Probe sequence
aacttgcttcagttttgggtcaaag

SEQ ID NO: 134088 - DNA, 25 bp, Probe sequence
aatagaaaatgcattacctgaagat

SEQ ID NO: 134089 - DNA, 25 bp, Probe sequence
aattcgaaactaaaactgtcagctt

SEQ ID NO: 134090 - DNA, 25 bp, Probe sequence
catatgcttgaagataacggcgata

SEQ ID NO: 134091 - DNA, 25 bp, Probe sequence
cttgcttcagttttgggtcaaagtc

SEQ ID NO: 134092 - DNA, 25 bp, Probe sequence
ctgattttatgaagtatttagcaca

SEQ ID NO: 134093 - DNA, 25 bp, Probe sequence
ccaatattgcaaagtttagtaccgg

SEQ ID NO: 134094 - DNA, 25 bp, Probe sequence
gctaataactattacccaatattgc

SEQ ID NO: 134095 - DNA, 25 bp, Probe sequence
gcttcagttttgggtcaaagtcaat

SEQ ID NO: 134096 - DNA, 25 bp, Probe sequence
gaagaacttgcttcagttttgggtc

SEQ ID NO: 134097 - DNA, 25 bp, Probe sequence
gaaaaagtgcaaactgattttatga

SEQ ID NO: 134098 - DNA, 25 bp, Probe sequence
gatatagtgttttcgaaaaagtgca

SEQ ID NO: 134099 - DNA, 25 bp, Probe sequence
gattaattccattattattggtttc

SEQ ID NO: 134100 - DNA, 25 bp, Probe sequence
gtttcgctaataactattacccaat

SEQ ID NO: 134101 - DNA, 25 bp, Probe sequence
tggtttcgctaataactattaccca

SEQ ID NO: 134102 - DNA, 25 bp, Probe sequence
gtgtttcatatgcttgaagataacg

SEQ ID NO: 134103 - DNA, 25 bp, Probe sequence
ggacttaagatatagtgttttcgaa

SEQ ID NO: 134104 - DNA, 25 bp, Probe sequence
ggaaatacaaagtagttatggcata

SEQ ID NO: 134105 - DNA, 25 bp, Probe sequence
ggcgatatcagattgctatatcaat

SEQ ID NO: 134106 - DNA, 25 bp, Probe sequence
tgcaaagtttagtaccggaaataca

SEQ ID NO: 134107 - DNA, 25 bp, Probe sequence
tttgggtcaaagtcaattcgaaact

SEQ ID NO: 134108 - DNA, 25 bp, Probe sequence
tattgcaaagtttagtaccggaaat

SEQ ID NO: 134109 - DNA, 25 bp, Probe sequence
tatttgtacaaatggacttaagata

SEQ ID NO: 134110 - DNA, 25 bp, Probe sequence
tttagcacataaaaattctgatgaa

SEQ ID NO: 134111 - DNA, 25 bp, Probe sequence
ttcgaaactaaaactgtcagcttaa

SEQ ID NO: 134112 - DNA, 25 bp, Probe sequence
attaatcgcaatcctaacttgccaa

SEQ ID NO: 134113 - DNA, 25 bp, Probe sequence
atcctaacttgccaatgaatccaga

SEQ ID NO: 134114 - DNA, 25 bp, Probe sequence
atgtcatacaacaagttggtggcaa

SEQ ID NO: 134115 - DNA, 25 bp, Probe sequence
agtagttaaaactgctataaagcta

SEQ ID NO: 134116 - DNA, 25 bp, Probe sequence
agaagccattgcatggttattctaa

SEQ ID NO: 134117 - DNA, 25 bp, Probe sequence
aacgaggcgcaataaatgccggtct

SEQ ID NO: 134118 - DNA, 25 bp, Probe sequence
aaaactgctataaagctaattatta

SEQ ID NO: 134119 - DNA, 25 bp, Probe sequence
aacgctgtcggtgatgcagttaaac

SEQ ID NO: 134120 - DNA, 25 bp, Probe sequence
aatcgcaatcctaacttgccaatga

SEQ ID NO: 134121 - DNA, 25 bp, Probe sequence
caatcctaacttgccaatgaatcca

SEQ ID NO: 134122 - DNA, 25 bp, Probe sequence
ctaacttgccaatgaatccagaagc

SEQ ID NO: 134123 - DNA, 25 bp, Probe sequence
ctcaactgtagtcaaagaagccatt

SEQ ID NO: 134124 - DNA, 25 bp, Probe sequence
ccagctaacgctgtcggtgatgcag

SEQ ID NO: 134125 - DNA, 25 bp, Probe sequence
cgcaataaatgccggtctaagtaaa

SEQ ID NO: 134126 - DNA, 25 bp, Probe sequence
gccggtctaagtaaaagtgatgctg

SEQ ID NO: 134127 - DNA, 25 bp, Probe sequence
gcacaacaacgaattggcggaacaa

SEQ ID NO: 134128 - DNA, 25 bp, Probe sequence
gctggaataatctcaactgtagtca

SEQ ID NO: 134129 - DNA, 25 bp, Probe sequence
gctgtcggtgatgcagttaaacgag

SEQ ID NO: 134130 - DNA, 25 bp, Probe sequence
gctgcaactatttttgataaagggt

SEQ ID NO: 134131 - DNA, 25 bp, Probe sequence
gctaacgctgtcggtgatgcagtta

SEQ ID NO: 134132 - DNA, 25 bp, Probe sequence
gaatccagaagcacaacaacgaatt

SEQ ID NO: 134133 - DNA, 25 bp, Probe sequence
gaagtaccagctaacgctgtcggtg

SEQ ID NO: 134134 - DNA, 25 bp, Probe sequence
gaagcacaacaacgaattggcggaa

SEQ ID NO: 134135 - DNA, 25 bp, Probe sequence
gaggcgcaataaatgccggtctaag

SEQ ID NO: 134136 - DNA, 25 bp, Probe sequence
gataaagggtattcaggtattgtaa

SEQ ID NO: 134137 - DNA, 25 bp, Probe sequence
gtagtcaaagaagccattgcatggt

SEQ ID NO: 134138 - DNA, 25 bp, Probe sequence
gtaccagctaacgctgtcggtgatg

SEQ ID NO: 134139 - DNA, 25 bp, Probe sequence
gtaaaagaattgaaaccattgctaa

SEQ ID NO: 134140 - DNA, 25 bp, Probe sequence
gtgaaaattaatcgcaatcctaact

SEQ ID NO: 134141 - DNA, 25 bp, Probe sequence
gtgatgctggaataatctcaactgt

SEQ ID NO: 134142 - DNA, 25 bp, Probe sequence
ggggcaaagcaaaaaatgtcataca

SEQ ID NO: 134143 - DNA, 25 bp, Probe sequence
ggtggcaaaaaagctgcaactattt

SEQ ID NO: 134144 - DNA, 25 bp, Probe sequence
ggtgatgcagttaaacgaggcgcaa

SEQ ID NO: 134145 - DNA, 25 bp, Probe sequence
ggtcagaagtaccagctaacgctgt

SEQ ID NO: 134146 - DNA, 25 bp, Probe sequence
attggtcgcaaataaaattcttgaa

SEQ ID NO: 134147 - DNA, 25 bp, Probe sequence
attctattaaatttattaccaactg

SEQ ID NO: 134148 - DNA, 25 bp, Probe sequence
attctaacatactttatgtcgaacg

SEQ ID NO: 134149 - DNA, 25 bp, Probe sequence
atttcaattacatagataatgccta

SEQ ID NO: 134150 - DNA, 25 bp, Probe sequence
atcactttcatttcaattacataga

SEQ ID NO: 134151 - DNA, 25 bp, Probe sequence
atctatcactttcatttcaattaca

SEQ ID NO: 134152 - DNA, 25 bp, Probe sequence
atcgttagagatttcgcaatttaat

SEQ ID NO: 134153 - DNA, 25 bp, Probe sequence
atgcctatgatttagcatactatca

SEQ ID NO: 134154 - DNA, 25 bp, Probe sequence
atgatttcacatgagaatattcaat

SEQ ID NO: 134155 - DNA, 25 bp, Probe sequence
agcatctatcactttcatttcaatt

SEQ ID NO: 134156 - DNA, 25 bp, Probe sequence
accagactttaatatgatttcacat

SEQ ID NO: 134157 - DNA, 25 bp, Probe sequence
aaatcttgcgaatcaaataaataca

SEQ ID NO: 134158 - DNA, 25 bp, Probe sequence
aattcttgaaagagaccctaataat

SEQ ID NO: 134159 - DNA, 25 bp, Probe sequence
aatggtcgcaagcatctatcacttt

SEQ ID NO: 134160 - DNA, 25 bp, Probe sequence
aatgctaatttattatacgaatttt

SEQ ID NO: 134161 - DNA, 25 bp, Probe sequence
gcatactatcattattggcaatcgt

SEQ ID NO: 134162 - DNA, 25 bp, Probe sequence
gcaagcatctatcactttcatttca

SEQ ID NO: 134163 - DNA, 25 bp, Probe sequence
gaatatcatgaaatggtcgcaagca

SEQ ID NO: 134164 - DNA, 25 bp, Probe sequence
gaaatggtcgcaagcatctatcact

SEQ ID NO: 134165 - DNA, 25 bp, Probe sequence
gaaaagcgttaacattctattaaat

SEQ ID NO: 134166 - DNA, 25 bp, Probe sequence
gaaatccttggagaaccagacttta

SEQ ID NO: 134167 - DNA, 25 bp, Probe sequence
gagaccctaataataagttagcaat

SEQ ID NO: 134168 - DNA, 25 bp, Probe sequence
gagatttcgcaatttaataatgcta

SEQ ID NO: 134169 - DNA, 25 bp, Probe sequence
gataatgcctatgatttagcatact

SEQ ID NO: 134170 - DNA, 25 bp, Probe sequence
gatttagcatactatcattattggc

SEQ ID NO: 134171 - DNA, 25 bp, Probe sequence
gtatcatatttatcaaatcttgcga

SEQ ID NO: 134172 - DNA, 25 bp, Probe sequence
gtcgcaagcatctatcactttcatt

SEQ ID NO: 134173 - DNA, 25 bp, Probe sequence
ggagaaccagactttaatatgattt

SEQ ID NO: 134174 - DNA, 25 bp, Probe sequence
ggagaatattctaacatactttatg

SEQ ID NO: 134175 - DNA, 25 bp, Probe sequence
tggtcgcaagcatctatcactttca

SEQ ID NO: 134176 - DNA, 25 bp, Probe sequence
tgagaatattcaattggtcgcaaat

SEQ ID NO: 134177 - DNA, 25 bp, Probe sequence
tacgaatttttagaaatccttggag

SEQ ID NO: 134178 - DNA, 25 bp, Probe sequence
tatgtcgaacgaaatttcagatgaa

SEQ ID NO: 134179 - DNA, 25 bp, Probe sequence
ttggcaatcgttagagatttcgcaa

SEQ ID NO: 134180 - DNA, 25 bp, Probe sequence
ataaaggacaacgccctctttcata

SEQ ID NO: 134181 - DNA, 25 bp, Probe sequence
atctttaaacccttcaatagcacat

SEQ ID NO: 134182 - DNA, 25 bp, Probe sequence
atgggatacttctgcttaaaaattg

SEQ ID NO: 134183 - DNA, 25 bp, Probe sequence
atgaagctacattaatcgacaaaga

SEQ ID NO: 134184 - DNA, 25 bp, Probe sequence
atgacgttttcgtagaacaatttga

SEQ ID NO: 134185 - DNA, 25 bp, Probe sequence
agaaaccaagaaattccaaacatct

SEQ ID NO: 134186 - DNA, 25 bp, Probe sequence
agcacatttcctaaaacataaagca

SEQ ID NO: 134187 - DNA, 25 bp, Probe sequence
agctgcagtagctgatacggaataa

SEQ ID NO: 134188 - DNA, 25 bp, Probe sequence
acccttcaatagcacatttcctaaa

SEQ ID NO: 134189 - DNA, 25 bp, Probe sequence
aaatcttctgcattgccattagtaa

SEQ ID NO: 134190 - DNA, 25 bp, Probe sequence
aacatctttaaacccttcaatagca

SEQ ID NO: 134191 - DNA, 25 bp, Probe sequence
aacgccctctttcataactatataa

SEQ ID NO: 134192 - DNA, 25 bp, Probe sequence
aagctaaatcttctgcattgccatt

SEQ ID NO: 134193 - DNA, 25 bp, Probe sequence
aatcttaatcactttatttatagca

SEQ ID NO: 134194 - DNA, 25 bp, Probe sequence
aataaggattatgacgttttcgtag

SEQ ID NO: 134195 - DNA, 25 bp, Probe sequence
aattatagataaatcagaccttgaa

SEQ ID NO: 134196 - DNA, 25 bp, Probe sequence
aattcaactcaattgaagctaaatc

SEQ ID NO: 134197 - DNA, 25 bp, Probe sequence
cagaccttgaaataatgggatactt

SEQ ID NO: 134198 - DNA, 25 bp, Probe sequence
catacgtacgtatttaattatagat

SEQ ID NO: 134199 - DNA, 25 bp, Probe sequence
cttctgcattgccattagtaatatt

SEQ ID NO: 134200 - DNA, 25 bp, Probe sequence
gccattagtaatattagctgcagta

SEQ ID NO: 134201 - DNA, 25 bp, Probe sequence
gccctctttcataactatataagtc

SEQ ID NO: 134202 - DNA, 25 bp, Probe sequence
gaacgatcaaaattccatacgtacg

SEQ ID NO: 134203 - DNA, 25 bp, Probe sequence
gaaataatgggatacttctgcttaa

SEQ ID NO: 134204 - DNA, 25 bp, Probe sequence
gatcaaaattccatacgtacgtatt

SEQ ID NO: 134205 - DNA, 25 bp, Probe sequence
gataagggcagatacgtcgatgaaa

SEQ ID NO: 134206 - DNA, 25 bp, Probe sequence
gatttgaatactaatactatggatg

SEQ ID NO: 134207 - DNA, 25 bp, Probe sequence
gggcagatacgtcgatgaaaatgga

SEQ ID NO: 134208 - DNA, 25 bp, Probe sequence
ggatgataagggcagatacgtcgat

SEQ ID NO: 134209 - DNA, 25 bp, Probe sequence
tccaaacatctttaaacccttcaat

SEQ ID NO: 134210 - DNA, 25 bp, Probe sequence
taatcgacaaagaaactggcgaaat

SEQ ID NO: 134211 - DNA, 25 bp, Probe sequence
taaacccttcaatagcacatttcct

SEQ ID NO: 134212 - DNA, 25 bp, Probe sequence
tattagctgcagtagctgatacgga

SEQ ID NO: 134213 - DNA, 25 bp, Probe sequence
tatttatagcatttctgatctcaga

SEQ ID NO: 134214 - DNA, 25 bp, Probe sequence
attgcttgaaccgtttggcttacct

SEQ ID NO: 134215 - DNA, 25 bp, Probe sequence
attcggttataactttgtattaatg

SEQ ID NO: 134216 - DNA, 25 bp, Probe sequence
atgccttttgtcattgtgacttggt

SEQ ID NO: 134217 - DNA, 25 bp, Probe sequence
agtggtgcaactaggtacaacaaca

SEQ ID NO: 134218 - DNA, 25 bp, Probe sequence
accgtttggcttacctgcattaaca

SEQ ID NO: 134219 - DNA, 25 bp, Probe sequence
aaagttccgatgctgacgatgcctt

SEQ ID NO: 134220 - DNA, 25 bp, Probe sequence
cactcttagctgttatagctagttt

SEQ ID NO: 134221 - DNA, 25 bp, Probe sequence
cattgtagctctattaggtggtaat

SEQ ID NO: 134222 - DNA, 25 bp, Probe sequence
ctagtttgttaagctttatcattgt

SEQ ID NO: 134223 - DNA, 25 bp, Probe sequence
ctgcattaacattgccatttattat

SEQ ID NO: 134224 - DNA, 25 bp, Probe sequence
gccattgcgttaacaatctttttag

SEQ ID NO: 134225 - DNA, 25 bp, Probe sequence
gcgattaacccttatatttcgactt

SEQ ID NO: 134226 - DNA, 25 bp, Probe sequence
gctgctgcagtgagagaagttttaa

SEQ ID NO: 134227 - DNA, 25 bp, Probe sequence
gctttatcattgtagctctattagg

SEQ ID NO: 134228 - DNA, 25 bp, Probe sequence
gacaggttaaatttgtagatacatc

SEQ ID NO: 134229 - DNA, 25 bp, Probe sequence
gacgatgccttttgtcattgtgact

SEQ ID NO: 134230 - DNA, 25 bp, Probe sequence
gaccatataaagttccgatgctgac

SEQ ID NO: 134231 - DNA, 25 bp, Probe sequence
gataagtcaggattagatattgtta

SEQ ID NO: 134232 - DNA, 25 bp, Probe sequence
gatacatcgttaaagttaatgcctc

SEQ ID NO: 134233 - DNA, 25 bp, Probe sequence
gtgagagaagttttaagaccatata

SEQ ID NO: 134234 - DNA, 25 bp, Probe sequence
ggtacaacaacattgcttgaaccgt

SEQ ID NO: 134235 - DNA, 25 bp, Probe sequence
ggcaatcgcactaggatatacattt

SEQ ID NO: 134236 - DNA, 25 bp, Probe sequence
ggcttacctgcattaacattgccat

SEQ ID NO: 134237 - DNA, 25 bp, Probe sequence
tgtgacttggtttacaattttactt

SEQ ID NO: 134238 - DNA, 25 bp, Probe sequence
tgtattaatggcaatcgcactagga

SEQ ID NO: 134239 - DNA, 25 bp, Probe sequence
tcagtcattatttgaaggattcagt

SEQ ID NO: 134240 - DNA, 25 bp, Probe sequence
tcagtcaagtatttatcgaagcgag

SEQ ID NO: 134241 - DNA, 25 bp, Probe sequence
taactgccattgcgttaacaatctt

SEQ ID NO: 134242 - DNA, 25 bp, Probe sequence
taacaatgatagcaactttattaac

SEQ ID NO: 134243 - DNA, 25 bp, Probe sequence
taaaacagcgattaacccttatatt

SEQ ID NO: 134244 - DNA, 25 bp, Probe sequence
tacaattttactttcaggacaggtt

SEQ ID NO: 134245 - DNA, 25 bp, Probe sequence
tatatttcgacttttttaggtgtgt

SEQ ID NO: 134246 - DNA, 25 bp, Probe sequence
ttatcgaagcgagtgtaattggtgg

SEQ ID NO: 134247 - DNA, 25 bp, Probe sequence
ttccgatgctgacgatgccttttgt

SEQ ID NO: 134248 - DNA, 25 bp, Probe sequence
agaagtttacaagacgaaagaacag

SEQ ID NO: 134249 - DNA, 25 bp, Probe sequence
attaatgatttagtcaacgcaacat

SEQ ID NO: 134250 - DNA, 25 bp, Probe sequence
atttagtcaacgcaacatttcaagt

SEQ ID NO: 134251 - DNA, 25 bp, Probe sequence
atgatttagtcaacgcaacatttca

SEQ ID NO: 134252 - DNA, 25 bp, Probe sequence
agtgctcagagttcaaaccttacta

SEQ ID NO: 134253 - DNA, 25 bp, Probe sequence
agtgagtctaacgaaatctcatcta

SEQ ID NO: 134254 - DNA, 25 bp, Probe sequence
agattgctaagtgctcagagttcaa

SEQ ID NO: 134255 - DNA, 25 bp, Probe sequence
aaatcatattttaagaagtgagtct

SEQ ID NO: 134256 - DNA, 25 bp, Probe sequence
aaactgatttcagaattagaagaat

SEQ ID NO: 134257 - DNA, 25 bp, Probe sequence
aacgcaacatttcaagttaagaagt

SEQ ID NO: 134258 - DNA, 25 bp, Probe sequence
aagagattgctaagtgctcagagtt

SEQ ID NO: 134259 - DNA, 25 bp, Probe sequence
aagtgctcagagttcaaaccttact

SEQ ID NO: 134260 - DNA, 25 bp, Probe sequence
ctcagagttcaaaccttactattta

SEQ ID NO: 134261 - DNA, 25 bp, Probe sequence
gctaagtgctcagagttcaaacctt

SEQ ID NO: 134262 - DNA, 25 bp, Probe sequence
gctcagagttcaaaccttactattt

SEQ ID NO: 134263 - DNA, 25 bp, Probe sequence
gcaaatattcaaaaactgatttcag

SEQ ID NO: 134264 - DNA, 25 bp, Probe sequence
gaagtgagtctaacgaaatctcatc

SEQ ID NO: 134265 - DNA, 25 bp, Probe sequence
gaacagttattgtttatgttacaga

SEQ ID NO: 134266 - DNA, 25 bp, Probe sequence
gagattgctaagtgctcagagttca

SEQ ID NO: 134267 - DNA, 25 bp, Probe sequence
gagtctaacgaaatctcatctaaag

SEQ ID NO: 134268 - DNA, 25 bp, Probe sequence
gatttagtcaacgcaacatttcaag

SEQ ID NO: 134269 - DNA, 25 bp, Probe sequence
gattgctaagtgctcagagttcaaa

SEQ ID NO: 134270 - DNA, 25 bp, Probe sequence
gttaagaagtttttcagagatacaa

SEQ ID NO: 134271 - DNA, 25 bp, Probe sequence
gttacagatacacaaaaagcaaata

SEQ ID NO: 134272 - DNA, 25 bp, Probe sequence
gttattgtttatgttacagatacac

SEQ ID NO: 134273 - DNA, 25 bp, Probe sequence
gtcaacgcaacatttcaagttaaga

SEQ ID NO: 134274 - DNA, 25 bp, Probe sequence
gtctaacgaaatctcatctaaagag

SEQ ID NO: 134275 - DNA, 25 bp, Probe sequence
gtgctcagagttcaaaccttactat

SEQ ID NO: 134276 - DNA, 25 bp, Probe sequence
tgtttatgttacagatacacaaaaa

SEQ ID NO: 134277 - DNA, 25 bp, Probe sequence
tgctcagagttcaaaccttactatt

SEQ ID NO: 134278 - DNA, 25 bp, Probe sequence
tcagagttcaaaccttactatttaa

SEQ ID NO: 134279 - DNA, 25 bp, Probe sequence
tagtcaacgcaacatttcaagttaa

SEQ ID NO: 134280 - DNA, 25 bp, Probe sequence
tttagtcaacgcaacatttcaagtt

SEQ ID NO: 134281 - DNA, 25 bp, Probe sequence
ttgctaagtgctcagagttcaaacc

SEQ ID NO: 134282 - DNA, 25 bp, Probe sequence
atttgaaggggcatttatagcaaca

SEQ ID NO: 134283 - DNA, 25 bp, Probe sequence
atattggtaatgtcccaatgcatga

SEQ ID NO: 134284 - DNA, 25 bp, Probe sequence
atgaatttgaaggggcatttatagc

SEQ ID NO: 134285 - DNA, 25 bp, Probe sequence
atgaatggccaattttattatagaa

SEQ ID NO: 134286 - DNA, 25 bp, Probe sequence
atgaatgtagatatgaatggccaat

SEQ ID NO: 134287 - DNA, 25 bp, Probe sequence
atgatggtcaaactataatgttcaa

SEQ ID NO: 134288 - DNA, 25 bp, Probe sequence
atgtagatatgaatggccaatttta

SEQ ID NO: 134289 - DNA, 25 bp, Probe sequence
atggccaattttattatagaagtat

SEQ ID NO: 134290 - DNA, 25 bp, Probe sequence
aggggcatttatagcaacaaatgaa

SEQ ID NO: 134291 - DNA, 25 bp, Probe sequence
agatatgaatggccaattttattat

SEQ ID NO: 134292 - DNA, 25 bp, Probe sequence
aagatagattatgatggtcaaacta

SEQ ID NO: 134293 - DNA, 25 bp, Probe sequence
aatgtcccaatgcatgatattaaaa

SEQ ID NO: 134294 - DNA, 25 bp, Probe sequence
aatattggtaatgtcccaatgcatg

SEQ ID NO: 134295 - DNA, 25 bp, Probe sequence
gaatttgaaggggcatttatagcaa

SEQ ID NO: 134296 - DNA, 25 bp, Probe sequence
gaatgtagatatgaatggccaattt

SEQ ID NO: 134297 - DNA, 25 bp, Probe sequence
gaatggccaattttattatagaagt

SEQ ID NO: 134298 - DNA, 25 bp, Probe sequence
gatggtcaaactataatgttcaaat

SEQ ID NO: 134299 - DNA, 25 bp, Probe sequence
gatatgaatggccaattttattata

SEQ ID NO: 134300 - DNA, 25 bp, Probe sequence
gttgaaatgtttgttgaatatgtaa

SEQ ID NO: 134301 - DNA, 25 bp, Probe sequence
gtagatatgaatggccaattttatt

SEQ ID NO: 134302 - DNA, 25 bp, Probe sequence
gtaatgtcccaatgcatgatattaa

SEQ ID NO: 134303 - DNA, 25 bp, Probe sequence
ggtcaaactataatgttcaaattta

SEQ ID NO: 134304 - DNA, 25 bp, Probe sequence
ggtaatgtcccaatgcatgatatta

SEQ ID NO: 134305 - DNA, 25 bp, Probe sequence
ggccaattttattatagaagtatta

SEQ ID NO: 134306 - DNA, 25 bp, Probe sequence
tggtaatgtcccaatgcatgatatt

SEQ ID NO: 134307 - DNA, 25 bp, Probe sequence
tgtcccaatgcatgatattaaaagt

SEQ ID NO: 134308 - DNA, 25 bp, Probe sequence
tgatttatttccaactgaaaaaaag

SEQ ID NO: 134309 - DNA, 25 bp, Probe sequence
tgaaggggcatttatagcaacaaat

SEQ ID NO: 134310 - DNA, 25 bp, Probe sequence
tcaaatttaatattggtaatgtccc

SEQ ID NO: 134311 - DNA, 25 bp, Probe sequence
taatgtcccaatgcatgatattaaa

SEQ ID NO: 134312 - DNA, 25 bp, Probe sequence
taacgttgaaatgtttgttgaatat

SEQ ID NO: 134313 - DNA, 25 bp, Probe sequence
tatgaatggccaattttattataga

SEQ ID NO: 134314 - DNA, 25 bp, Probe sequence
tattggtaatgtcccaatgcatgat

SEQ ID NO: 134315 - DNA, 25 bp, Probe sequence
ttgaaggggcatttatagcaacaaa

SEQ ID NO: 134316 - DNA, 25 bp, Probe sequence
attccatcacccgatatttgcggtt

SEQ ID NO: 134317 - DNA, 25 bp, Probe sequence
attccaatagcgcttcaatagatag

SEQ ID NO: 134318 - DNA, 25 bp, Probe sequence
attctgattccaatagcgcttcaat

SEQ ID NO: 134319 - DNA, 25 bp, Probe sequence
atcgtatttattgtcgtcacaagaa

SEQ ID NO: 134320 - DNA, 25 bp, Probe sequence
agcatgttataattatcttgaaaag

SEQ ID NO: 134321 - DNA, 25 bp, Probe sequence
acgtaaattgactatttcgattaat

SEQ ID NO: 134322 - DNA, 25 bp, Probe sequence
aaagttttctaaagtcactatgctt

SEQ ID NO: 134323 - DNA, 25 bp, Probe sequence
aactgcacacatactaatgttgaaa

SEQ ID NO: 134324 - DNA, 25 bp, Probe sequence
ctaaagtcactatgcttattcaagc

SEQ ID NO: 134325 - DNA, 25 bp, Probe sequence
ctgattccaatagcgcttcaataga

SEQ ID NO: 134326 - DNA, 25 bp, Probe sequence
gcgtttaactgcacacatactaatg

SEQ ID NO: 134327 - DNA, 25 bp, Probe sequence
gaagagttatacgttttaggaatat

SEQ ID NO: 134328 - DNA, 25 bp, Probe sequence
gaacgttattttggtcaatatacat

SEQ ID NO: 134329 - DNA, 25 bp, Probe sequence
gaaatattcatttcatctcactttg

SEQ ID NO: 134330 - DNA, 25 bp, Probe sequence
gactcaagtgaaactattaaatcta

SEQ ID NO: 134331 - DNA, 25 bp, Probe sequence
gataattctgattccaatagcgctt

SEQ ID NO: 134332 - DNA, 25 bp, Probe sequence
gttatttaaacaatcatcaatggct

SEQ ID NO: 134333 - DNA, 25 bp, Probe sequence
gtcactatgcttattcaagcatgtt

SEQ ID NO: 134334 - DNA, 25 bp, Probe sequence
gtgactatattgaacgttattttgg

SEQ ID NO: 134335 - DNA, 25 bp, Probe sequence
gggatcaacgtaaattgactatttc

SEQ ID NO: 134336 - DNA, 25 bp, Probe sequence
ggaatattaaatctgcataaaggtc

SEQ ID NO: 134337 - DNA, 25 bp, Probe sequence
tgtgactatgtatcgtatttattgt

SEQ ID NO: 134338 - DNA, 25 bp, Probe sequence
tgacggttaaagaattacagggtga

SEQ ID NO: 134339 - DNA, 25 bp, Probe sequence
tgaaagaaatccaatctaagatggc

SEQ ID NO: 134340 - DNA, 25 bp, Probe sequence
tgaattccatcacccgatatttgcg

SEQ ID NO: 134341 - DNA, 25 bp, Probe sequence
tgaataatgagcttagtgactatat

SEQ ID NO: 134342 - DNA, 25 bp, Probe sequence
tccatcacccgatatttgcggttag

SEQ ID NO: 134343 - DNA, 25 bp, Probe sequence
tcatttcatctcactttgactcaag

SEQ ID NO: 134344 - DNA, 25 bp, Probe sequence
taagcgtttaactgcacacatacta

SEQ ID NO: 134345 - DNA, 25 bp, Probe sequence
tacagggtgaattccatcacccgat

SEQ ID NO: 134346 - DNA, 25 bp, Probe sequence
tagttgtgactatgtatcgtattta

SEQ ID NO: 134347 - DNA, 25 bp, Probe sequence
tatacatttgattttagttgtgact

SEQ ID NO: 134348 - DNA, 25 bp, Probe sequence
tattcatttcatctcactttgactc

SEQ ID NO: 134349 - DNA, 25 bp, Probe sequence
ttcatctcactttgactcaagtgaa

SEQ ID NO: 134350 - DNA, 25 bp, Probe sequence
atagtccaacatctcattcaattaa

SEQ ID NO: 134351 - DNA, 25 bp, Probe sequence
atcatattagactggagcattgctt

SEQ ID NO: 134352 - DNA, 25 bp, Probe sequence
atctcattcaattaaccattcccaa

SEQ ID NO: 134353 - DNA, 25 bp, Probe sequence
agattgcatttttaattaacgactt

SEQ ID NO: 134354 - DNA, 25 bp, Probe sequence
acttccgaaaatggtgtacttgtga

SEQ ID NO: 134355 - DNA, 25 bp, Probe sequence
aaagttcttcaagtatgcgcgagat

SEQ ID NO: 134356 - DNA, 25 bp, Probe sequence
caatgtgtcatttgtttgccagccg

SEQ ID NO: 134357 - DNA, 25 bp, Probe sequence
catggttttaatcattattctcgtt

SEQ ID NO: 134358 - DNA, 25 bp, Probe sequence
gaattcagacgctatacgtttatcg

SEQ ID NO: 134359 - DNA, 25 bp, Probe sequence
gaattaatatatcatctggaaccaa

SEQ ID NO: 134360 - DNA, 25 bp, Probe sequence
gaatgcaaactatatgatgcgtggc

SEQ ID NO: 134361 - DNA, 25 bp, Probe sequence
gatggtagtcgtcatttagtagccg

SEQ ID NO: 134362 - DNA, 25 bp, Probe sequence
gacacgatgattgtaacgaagttca

SEQ ID NO: 134363 - DNA, 25 bp, Probe sequence
gaacaaatcactttattacttcaaa

SEQ ID NO: 134364 - DNA, 25 bp, Probe sequence
gaaatcgcaagtagtcatggtttta

SEQ ID NO: 134365 - DNA, 25 bp, Probe sequence
gacagataattattcactacatatt

SEQ ID NO: 134366 - DNA, 25 bp, Probe sequence
gatagtgtatgttgtgttgttgaag

SEQ ID NO: 134367 - DNA, 25 bp, Probe sequence
gattatttaacaaacaaccaccata

SEQ ID NO: 134368 - DNA, 25 bp, Probe sequence
gttacaatcgacacaagcaatgagc

SEQ ID NO: 134369 - DNA, 25 bp, Probe sequence
gtttgccagccgcattgttaaatga

SEQ ID NO: 134370 - DNA, 25 bp, Probe sequence
gtagccgaagaagtgcacgattatt

SEQ ID NO: 134371 - DNA, 25 bp, Probe sequence
gggtcttcaacaatttagccatgct

SEQ ID NO: 134372 - DNA, 25 bp, Probe sequence
ggagtcaaatgtatcaacctaaaaa

SEQ ID NO: 134373 - DNA, 25 bp, Probe sequence
ggtacaggtgtagtttcaatcaatc

SEQ ID NO: 134374 - DNA, 25 bp, Probe sequence
ggttgctagcacttttagaatcttg

SEQ ID NO: 134375 - DNA, 25 bp, Probe sequence
ggagcattgcttaattgatatttta

SEQ ID NO: 134376 - DNA, 25 bp, Probe sequence
tgcgcgagattgatataccttttga

SEQ ID NO: 134377 - DNA, 25 bp, Probe sequence
tcattcattaatggtctcaagcaat

SEQ ID NO: 134378 - DNA, 25 bp, Probe sequence
tacgtttatcgtgtaagggtcttca

SEQ ID NO: 134379 - DNA, 25 bp, Probe sequence
tagactattttatcttaccgctaag

SEQ ID NO: 134380 - DNA, 25 bp, Probe sequence
tattctcgttttatacacctcttta

SEQ ID NO: 134381 - DNA, 25 bp, Probe sequence
tttcgaggacttattatgcacatgt

SEQ ID NO: 134382 - DNA, 25 bp, Probe sequence
ttaaccattcccaattagttgaaat

SEQ ID NO: 134383 - DNA, 25 bp, Probe sequence
ttaacgacttaaatactactgcaat

SEQ ID NO: 134384 - DNA, 25 bp, Probe sequence
attaattattgcctcagcatatgcc

SEQ ID NO: 134385 - DNA, 25 bp, Probe sequence
attttgcggatatgcatttgcaggt

SEQ ID NO: 134386 - DNA, 25 bp, Probe sequence
atcaagcttttctgccattatagtg

SEQ ID NO: 134387 - DNA, 25 bp, Probe sequence
atcagagcttgcacagatttatcaa

SEQ ID NO: 134388 - DNA, 25 bp, Probe sequence
atgatacatcagtctcatatttcat

SEQ ID NO: 134389 - DNA, 25 bp, Probe sequence
aggcattgcagaacgtttaaatact

SEQ ID NO: 134390 - DNA, 25 bp, Probe sequence
atggggaacatcaggtatttactat

SEQ ID NO: 134391 - DNA, 25 bp, Probe sequence
agtgctgttacatctgtagcaactg

SEQ ID NO: 134392 - DNA, 25 bp, Probe sequence
actgcagggattgcacttatttcta

SEQ ID NO: 134393 - DNA, 25 bp, Probe sequence
aaatactgcaatgcctgcaatttta

SEQ ID NO: 134394 - DNA, 25 bp, Probe sequence
aactactatttctaaaggcatccat

SEQ ID NO: 134395 - DNA, 25 bp, Probe sequence
aaggcatccattctgtaggaagttt

SEQ ID NO: 134396 - DNA, 25 bp, Probe sequence
gcttgtattcgctgcaggtgttgct

SEQ ID NO: 134397 - DNA, 25 bp, Probe sequence
gctattttttaatatcagccttttt

SEQ ID NO: 134398 - DNA, 25 bp, Probe sequence
gcaggtgttgcttcgattgtaatta

SEQ ID NO: 134399 - DNA, 25 bp, Probe sequence
gcacagtgccagccttgatttatta

SEQ ID NO: 134400 - DNA, 25 bp, Probe sequence
gcaactggtacagcatggggctctg

SEQ ID NO: 134401 - DNA, 25 bp, Probe sequence
gaaaaataccaagtctctcgttccg

SEQ ID NO: 134402 - DNA, 25 bp, Probe sequence
gacagatggtttcaaagcaacattt

SEQ ID NO: 134403 - DNA, 25 bp, Probe sequence
gacagtaccatgttatttatgcgca

SEQ ID NO: 134404 - DNA, 25 bp, Probe sequence
gttggatgttttctggcacagtgcc

SEQ ID NO: 134405 - DNA, 25 bp, Probe sequence
gttgtaacaggctttgtgttttttg

SEQ ID NO: 134406 - DNA, 25 bp, Probe sequence
gttatttgttgtattgcgcttgtat

SEQ ID NO: 134407 - DNA, 25 bp, Probe sequence
gtcatcgaattcacgtttaacttaa

SEQ ID NO: 134408 - DNA, 25 bp, Probe sequence
gtctctcgttccgttttatcaagaa

SEQ ID NO: 134409 - DNA, 25 bp, Probe sequence
gtctgggttcccttaattgtgatca

SEQ ID NO: 134410 - DNA, 25 bp, Probe sequence
gtgatcattgtttgtttgctattta

SEQ ID NO: 134411 - DNA, 25 bp, Probe sequence
gtggggacttttaatcatcatttca

SEQ ID NO: 134412 - DNA, 25 bp, Probe sequence
ggattgcaaaacgtgtaggcttaac

SEQ ID NO: 134413 - DNA, 25 bp, Probe sequence
tggggctctgcatcaactgcaggga

SEQ ID NO: 134414 - DNA, 25 bp, Probe sequence
taaaatggctacagtgccagctatg

SEQ ID NO: 134415 - DNA, 25 bp, Probe sequence
taacatatgggtctgggttccctta

SEQ ID NO: 134416 - DNA, 25 bp, Probe sequence
tacgaatcaacttcatgtctctgtt

SEQ ID NO: 134417 - DNA, 25 bp, Probe sequence
ttgtaattattatggtcggtgtgtt

SEQ ID NO: 134418 - DNA, 25 bp, Probe sequence
attgcatcaaccattttagagagag

SEQ ID NO: 134419 - DNA, 25 bp, Probe sequence
atcaacagctaaagaatcacgtatt

SEQ ID NO: 134420 - DNA, 25 bp, Probe sequence
atcgtttgtttaatacaagcccagt

SEQ ID NO: 134421 - DNA, 25 bp, Probe sequence
atggctgcagcaatggggtcaattc

SEQ ID NO: 134422 - DNA, 25 bp, Probe sequence
atggtgagcaaaggccacgatgtta

SEQ ID NO: 134423 - DNA, 25 bp, Probe sequence
agcaatggggtcaattcgttttatg

SEQ ID NO: 134424 - DNA, 25 bp, Probe sequence
acggcagcagtagatatggtgagca

SEQ ID NO: 134425 - DNA, 25 bp, Probe sequence
acttcatgcaatcgaattagaacgt

SEQ ID NO: 134426 - DNA, 25 bp, Probe sequence
aacgcaatcgaaaagggcggatttg

SEQ ID NO: 134427 - DNA, 25 bp, Probe sequence
aagcccagtattttcacaaattcca

SEQ ID NO: 134428 - DNA, 25 bp, Probe sequence
aatggtaatcctgaagtgcatccag

SEQ ID NO: 134429 - DNA, 25 bp, Probe sequence
aatgcagcagttgatttatctctaa

SEQ ID NO: 134430 - DNA, 25 bp, Probe sequence
caaattccaggaccaaatcatgtag

SEQ ID NO: 134431 - DNA, 25 bp, Probe sequence
catacagttagattacttcatgcaa

SEQ ID NO: 134432 - DNA, 25 bp, Probe sequence
gaagatgaaccattaaatcgtttgt

SEQ ID NO: 134433 - DNA, 25 bp, Probe sequence
gaacgtttcgtaaaattcactgata

SEQ ID NO: 134434 - DNA, 25 bp, Probe sequence
gaagctgtctaaatgattgttatga

SEQ ID NO: 134435 - DNA, 25 bp, Probe sequence
gaaatggcgcagttacggcagcagt

SEQ ID NO: 134436 - DNA, 25 bp, Probe sequence
gagagacttctttgaggaaggctta

SEQ ID NO: 134437 - DNA, 25 bp, Probe sequence
gatattcttcaacatggctgcagca

SEQ ID NO: 134438 - DNA, 25 bp, Probe sequence
gttcaagtgattattccatcttcat

SEQ ID NO: 134439 - DNA, 25 bp, Probe sequence
gtaggatcaggaaatggcgcagtta

SEQ ID NO: 134440 - DNA, 25 bp, Probe sequence
gtaccgacaccaaatatagatgcag

SEQ ID NO: 134441 - DNA, 25 bp, Probe sequence
gtacgcgtgtcgattttgaaaatgc

SEQ ID NO: 134442 - DNA, 25 bp, Probe sequence
gtaatggcagagcatgtaactgata

SEQ ID NO: 134443 - DNA, 25 bp, Probe sequence
gtcgtgttattgatgtaccgacacc

SEQ ID NO: 134444 - DNA, 25 bp, Probe sequence
gtcgtatcttcttttcaacatatga

SEQ ID NO: 134445 - DNA, 25 bp, Probe sequence
gtgattattccatcttcatacatag

SEQ ID NO: 134446 - DNA, 25 bp, Probe sequence
ggccacgatgttaaattatattgtc

SEQ ID NO: 134447 - DNA, 25 bp, Probe sequence
tgtacgtcgtatcttcttttcaaca

SEQ ID NO: 134448 - DNA, 25 bp, Probe sequence
tacgttgacgtatggtacgcgtgtc

SEQ ID NO: 134449 - DNA, 25 bp, Probe sequence
tatggtcaagcttaggtcgtgttat

SEQ ID NO: 134450 - DNA, 25 bp, Probe sequence
ttatctctaaatgtacgtcgtatct

SEQ ID NO: 134451 - DNA, 25 bp, Probe sequence
ttaggccgtagattaggttttgaat

SEQ ID NO: 134452 - DNA, 25 bp, Probe sequence
atttgatttatgtattggtgctgat

SEQ ID NO: 134453 - DNA, 25 bp, Probe sequence
atacattgaatgtgacgttaccacg

SEQ ID NO: 134454 - DNA, 25 bp, Probe sequence
agggtatacatgctttagaggttta

SEQ ID NO: 134455 - DNA, 25 bp, Probe sequence
actaggtaatcatgacttagctaaa

SEQ ID NO: 134456 - DNA, 25 bp, Probe sequence
aatcttttgtttatggtcgtactat

SEQ ID NO: 134457 - DNA, 25 bp, Probe sequence
aaattgcccaatatcgtagtcgttt

SEQ ID NO: 134458 - DNA, 25 bp, Probe sequence
aaatacgtgtcaaacatactgcaaa

SEQ ID NO: 134459 - DNA, 25 bp, Probe sequence
aaatgctgggcaaatcttatctaca

SEQ ID NO: 134460 - DNA, 25 bp, Probe sequence
aaggtcatactattaaagtctttga

SEQ ID NO: 134461 - DNA, 25 bp, Probe sequence
catcggtggattaacagctgctgca

SEQ ID NO: 134462 - DNA, 25 bp, Probe sequence
gcgacaacgcctaatatggggcaag

SEQ ID NO: 134463 - DNA, 25 bp, Probe sequence
gcaaatcttatctacaatgacagtg

SEQ ID NO: 134464 - DNA, 25 bp, Probe sequence
gaagagtaggtattgttccgttatt

SEQ ID NO: 134465 - DNA, 25 bp, Probe sequence
gcaagcatactttaatcactatcca

SEQ ID NO: 134466 - DNA, 25 bp, Probe sequence
gcaatggaagatgctatcgtattag

SEQ ID NO: 134467 - DNA, 25 bp, Probe sequence
gaaaaagcattacagcgttatgata

SEQ ID NO: 134468 - DNA, 25 bp, Probe sequence
gaaaccactcaaatcttttgtttat

SEQ ID NO: 134469 - DNA, 25 bp, Probe sequence
gaaattggcgctgggattggtatcg

SEQ ID NO: 134470 - DNA, 25 bp, Probe sequence
gacagtgttagatgacaaagatcgc

SEQ ID NO: 134471 - DNA, 25 bp, Probe sequence
gagatgcagcacatgcgacaacgcc

SEQ ID NO: 134472 - DNA, 25 bp, Probe sequence
gataaagttaccatacatttcgcgg

SEQ ID NO: 134473 - DNA, 25 bp, Probe sequence
gttaccatacatttcgcggaacaag

SEQ ID NO: 134474 - DNA, 25 bp, Probe sequence
gttgcagttagaaatcgtattatga

SEQ ID NO: 134475 - DNA, 25 bp, Probe sequence
gtcgtactattttactaggagatgc

SEQ ID NO: 134476 - DNA, 25 bp, Probe sequence
gtgaaacaggtatcttattgcataa

SEQ ID NO: 134477 - DNA, 25 bp, Probe sequence
gtgagacaatctgtaaatgctgaca

SEQ ID NO: 134478 - DNA, 25 bp, Probe sequence
ggtaaacctcatttgcaagcatact

SEQ ID NO: 134479 - DNA, 25 bp, Probe sequence
ggttcattacaattaactcgaagga

SEQ ID NO: 134480 - DNA, 25 bp, Probe sequence
ggcgctgggattggtatcggagata

SEQ ID NO: 134481 - DNA, 25 bp, Probe sequence
tgccaaatgcattagcagctggaca

SEQ ID NO: 134482 - DNA, 25 bp, Probe sequence
tatggggcaaggtgctggacaagca

SEQ ID NO: 134483 - DNA, 25 bp, Probe sequence
taggtgcaggcatcggtggattaac

SEQ ID NO: 134484 - DNA, 25 bp, Probe sequence
tatagttcgtttggtaaacctcatt

SEQ ID NO: 134485 - DNA, 25 bp, Probe sequence
ttggtgctgatggaattcattctaa

SEQ ID NO: 134486 - DNA, 25 bp, Probe sequence
atatcaaatgcgatggaatccagaa

SEQ ID NO: 134487 - DNA, 25 bp, Probe sequence
atcacagaaaaagtgccaatgtcgg

SEQ ID NO: 134488 - DNA, 25 bp, Probe sequence
atcttgttagccatgcattagtaga

SEQ ID NO: 134489 - DNA, 25 bp, Probe sequence
atcctgcgcaacatcaatatgcgag

SEQ ID NO: 134490 - DNA, 25 bp, Probe sequence
agccatgcattagtagaaacaggta

SEQ ID NO: 134491 - DNA, 25 bp, Probe sequence
aaatcctataagcagtttggtataa

SEQ ID NO: 134492 - DNA, 25 bp, Probe sequence
aaaggaacaatggacatcaccagat

SEQ ID NO: 134493 - DNA, 25 bp, Probe sequence
aaagtgccaatgtcggaatctgaag

SEQ ID NO: 134494 - DNA, 25 bp, Probe sequence
aacttttttggtataggagcattcg

SEQ ID NO: 134495 - DNA, 25 bp, Probe sequence
aatggacatcaccagataaggcgat

SEQ ID NO: 134496 - DNA, 25 bp, Probe sequence
aatgactatttcacataaagacaat

SEQ ID NO: 134497 - DNA, 25 bp, Probe sequence
cgctattacaacttttttggtatag

SEQ ID NO: 134498 - DNA, 25 bp, Probe sequence
gctaaagcaatgactatttcacata

SEQ ID NO: 134499 - DNA, 25 bp, Probe sequence
gcaacatcaatatgcgagtgacatt

SEQ ID NO: 134500 - DNA, 25 bp, Probe sequence
gaatccagaaaatcctgcgcaacat

SEQ ID NO: 134501 - DNA, 25 bp, Probe sequence
gaaaatcctgcgcaacatcaatatg

SEQ ID NO: 134502 - DNA, 25 bp, Probe sequence
gaaaacaatcaactgaatttatatc

SEQ ID NO: 134503 - DNA, 25 bp, Probe sequence
gaaacaggtaacggcaaatcagaat

SEQ ID NO: 134504 - DNA, 25 bp, Probe sequence
gaggatggtaaatttgttgaagcaa

SEQ ID NO: 134505 - DNA, 25 bp, Probe sequence
gatggaatccagaaaatcctgcgca

SEQ ID NO: 134506 - DNA, 25 bp, Probe sequence
gatagtagtgctgttcgtagtggga

SEQ ID NO: 134507 - DNA, 25 bp, Probe sequence
gtagtgctgttcgtagtgggaaaag

SEQ ID NO: 134508 - DNA, 25 bp, Probe sequence
gtcatttatcttgttagccatgcat

SEQ ID NO: 134509 - DNA, 25 bp, Probe sequence
gtgccaatgtcggaatctgaagtta

SEQ ID NO: 134510 - DNA, 25 bp, Probe sequence
gggaaaggtattgtacagacaaaag

SEQ ID NO: 134511 - DNA, 25 bp, Probe sequence
gggaaagtttttctagaagctcaag

SEQ ID NO: 134512 - DNA, 25 bp, Probe sequence
ggtggtgcaaagttcattcgtaatg

SEQ ID NO: 134513 - DNA, 25 bp, Probe sequence
ggtaacggcaaatcagaattagcaa

SEQ ID NO: 134514 - DNA, 25 bp, Probe sequence
ggataaatcctataagcagtttggt

SEQ ID NO: 134515 - DNA, 25 bp, Probe sequence
ggttaatgtcatttatcttgttagc

SEQ ID NO: 134516 - DNA, 25 bp, Probe sequence
ggagcattcgatagtagtgctgttc

SEQ ID NO: 134517 - DNA, 25 bp, Probe sequence
tcgtagtgggaaaagttatgctgaa

SEQ ID NO: 134518 - DNA, 25 bp, Probe sequence
tttatcttgttagccatgcattagt

SEQ ID NO: 134519 - DNA, 25 bp, Probe sequence
ttggtggtgcaaagttcattcgtaa

SEQ ID NO: 134520 - DNA, 25 bp, Probe sequence
attacgcgcgattaaagcaggtttt

SEQ ID NO: 134521 - DNA, 25 bp, Probe sequence
atagcatcattcagcagtatcgcga

SEQ ID NO: 134522 - DNA, 25 bp, Probe sequence
atgctgcacgtcgctctaattcagc

SEQ ID NO: 134523 - DNA, 25 bp, Probe sequence
atggcatcaaaatttcgaatcgctt

SEQ ID NO: 134524 - DNA, 25 bp, Probe sequence
agaagcatacccgtgacgctttacg

SEQ ID NO: 134525 - DNA, 25 bp, Probe sequence
agaacctgactttgtgcataaactt

SEQ ID NO: 134526 - DNA, 25 bp, Probe sequence
agctggggtcgacatatttatcaaa

SEQ ID NO: 134527 - DNA, 25 bp, Probe sequence
aaaccacttttacaatcaatccact

SEQ ID NO: 134528 - DNA, 25 bp, Probe sequence
aaaatacgtctcgtacaccaggtga

SEQ ID NO: 134529 - DNA, 25 bp, Probe sequence
cgagcaacgccagaagaaaccagag

SEQ ID NO: 134530 - DNA, 25 bp, Probe sequence
cgcatgctggtcgtttttcaaatca

SEQ ID NO: 134531 - DNA, 25 bp, Probe sequence
ccctttaattgcaagtggcgggatt

SEQ ID NO: 134532 - DNA, 25 bp, Probe sequence
gcgggattaattctccagagtctgc

SEQ ID NO: 134533 - DNA, 25 bp, Probe sequence
gcagatatggtcggcatgtcttcgc

SEQ ID NO: 134534 - DNA, 25 bp, Probe sequence
gaagcacctgacaattttattttag

SEQ ID NO: 134535 - DNA, 25 bp, Probe sequence
gaaacaacatggtagcctcgctatt

SEQ ID NO: 134536 - DNA, 25 bp, Probe sequence
gagtctgctttagatgctttacaac

SEQ ID NO: 134537 - DNA, 25 bp, Probe sequence
gatcatgatgcttgtatccctggat

SEQ ID NO: 134538 - DNA, 25 bp, Probe sequence
gattcaaacatttttctcaactttt

SEQ ID NO: 134539 - DNA, 25 bp, Probe sequence
gattgcacaacgtttgctgattcaa

SEQ ID NO: 134540 - DNA, 25 bp, Probe sequence
gttatgcgtgcggtacaagaagtga

SEQ ID NO: 134541 - DNA, 25 bp, Probe sequence
gtacagaccattacggtgccgactc

SEQ ID NO: 134542 - DNA, 25 bp, Probe sequence
gtatcgcgatgctacattacgcgcg

SEQ ID NO: 134543 - DNA, 25 bp, Probe sequence
gtatccctggattaactaacatggc

SEQ ID NO: 134544 - DNA, 25 bp, Probe sequence
gggtcatggacgtttcaaacatcca

SEQ ID NO: 134545 - DNA, 25 bp, Probe sequence
ggcgctgcttacattgaaccttatg

SEQ ID NO: 134546 - DNA, 25 bp, Probe sequence
tacggtgccgactcattaaaaaatc

SEQ ID NO: 134547 - DNA, 25 bp, Probe sequence
tgttatcgccatgtctcatgagaaa

SEQ ID NO: 134548 - DNA, 25 bp, Probe sequence
tcaatccacttacctaatggcatca

SEQ ID NO: 134549 - DNA, 25 bp, Probe sequence
tagcaatcgctagctggggtcgaca

SEQ ID NO: 134550 - DNA, 25 bp, Probe sequence
ttttaggatttcgagcaacgccaga

SEQ ID NO: 134551 - DNA, 25 bp, Probe sequence
ttaggatataccattgacgagttca

SEQ ID NO: 134552 - DNA, 25 bp, Probe sequence
ttcgaatcgctttgtattatcacca

SEQ ID NO: 134553 - DNA, 25 bp, Probe sequence
ttcgccttttgtcacagaacctgac

SEQ ID NO: 134554 - DNA, 25 bp, Probe sequence
attactttttttgctgtttcattat

SEQ ID NO: 134555 - DNA, 25 bp, Probe sequence
attagcgattgtagtggcatatttt

SEQ ID NO: 134556 - DNA, 25 bp, Probe sequence
aggtttagtctgtctatttatgatg

SEQ ID NO: 134557 - DNA, 25 bp, Probe sequence
agtgttagctattactttttttgct

SEQ ID NO: 134558 - DNA, 25 bp, Probe sequence
agcgattgtagtggcatatttttta

SEQ ID NO: 134559 - DNA, 25 bp, Probe sequence
aaacgtcagctgtaatttctaatac

SEQ ID NO: 134560 - DNA, 25 bp, Probe sequence
aaaaacgtcagctgtaatttctaat

SEQ ID NO: 134561 - DNA, 25 bp, Probe sequence
cagagatagaacaacgatgaaagta

SEQ ID NO: 134562 - DNA, 25 bp, Probe sequence
ctttttttgctgtttcattatcaat

SEQ ID NO: 134563 - DNA, 25 bp, Probe sequence
cgattgtagtggcatattttttatt

SEQ ID NO: 134564 - DNA, 25 bp, Probe sequence
gctgtttcattatcaattagtctag

SEQ ID NO: 134565 - DNA, 25 bp, Probe sequence
gcttcttttttaatcgtaatattag

SEQ ID NO: 134566 - DNA, 25 bp, Probe sequence
gaaattagtgttagctattactttt

SEQ ID NO: 134567 - DNA, 25 bp, Probe sequence
gagaatgttaaaaacgtcagctgta

SEQ ID NO: 134568 - DNA, 25 bp, Probe sequence
gttaaaaacgtcagctgtaatttct

SEQ ID NO: 134569 - DNA, 25 bp, Probe sequence
gtttagtctgtctatttatgatgaa

SEQ ID NO: 134570 - DNA, 25 bp, Probe sequence
gtttcattatcaattagtctagttg

SEQ ID NO: 134571 - DNA, 25 bp, Probe sequence
gtaatattagcgattgtagtggcat

SEQ ID NO: 134572 - DNA, 25 bp, Probe sequence
gtcagctgtaatttctaatacatta

SEQ ID NO: 134573 - DNA, 25 bp, Probe sequence
gtcataggtttagtctgtctattta

SEQ ID NO: 134574 - DNA, 25 bp, Probe sequence
gtctttaatatgatgttcagagata

SEQ ID NO: 134575 - DNA, 25 bp, Probe sequence
gtctagttgtctttaatatgatgtt

SEQ ID NO: 134576 - DNA, 25 bp, Probe sequence
gtgcatattaattcgagaatgttaa

SEQ ID NO: 134577 - DNA, 25 bp, Probe sequence
tgaaagtaatcgttaacgcttcttt

SEQ ID NO: 134578 - DNA, 25 bp, Probe sequence
taatacattattagtcataggttta

SEQ ID NO: 134579 - DNA, 25 bp, Probe sequence
tactttttttgctgtttcattatca

SEQ ID NO: 134580 - DNA, 25 bp, Probe sequence
tagttgtctttaatatgatgttcag

SEQ ID NO: 134581 - DNA, 25 bp, Probe sequence
tagtcataggtttagtctgtctatt

SEQ ID NO: 134582 - DNA, 25 bp, Probe sequence
tagtctgtctatttatgatgaaatt

SEQ ID NO: 134583 - DNA, 25 bp, Probe sequence
tatcaattagtctagttgtctttaa

SEQ ID NO: 134584 - DNA, 25 bp, Probe sequence
tattagtcataggtttagtctgtct

SEQ ID NO: 134585 - DNA, 25 bp, Probe sequence
tttgctgtttcattatcaattagtc

SEQ ID NO: 134586 - DNA, 25 bp, Probe sequence
ttttttgctgtttcattatcaatta

SEQ ID NO: 134587 - DNA, 25 bp, Probe sequence
ttagtctagttgtctttaatatgat

SEQ ID NO: 134588 - DNA, 25 bp, Probe sequence
ataagttgtcaagcatctattctac

SEQ ID NO: 134589 - DNA, 25 bp, Probe sequence
atctttagctgcagaatcattgaat

SEQ ID NO: 134590 - DNA, 25 bp, Probe sequence
atgaacatctactaaccggtgtcaa

SEQ ID NO: 134591 - DNA, 25 bp, Probe sequence
atggaagcgcgtaagtgttgtcttg

SEQ ID NO: 134592 - DNA, 25 bp, Probe sequence
aggcgagttattagcacttcaaatt

SEQ ID NO: 134593 - DNA, 25 bp, Probe sequence
aggtcactacccatactttaagaca

SEQ ID NO: 134594 - DNA, 25 bp, Probe sequence
agtacaagctttaacgggaatgcgt

SEQ ID NO: 134595 - DNA, 25 bp, Probe sequence
agtatacacccatgtaacggagaaa

SEQ ID NO: 134596 - DNA, 25 bp, Probe sequence
agaggattcttattcacaactagta

SEQ ID NO: 134597 - DNA, 25 bp, Probe sequence
acgattacccaaatgaacatctact

SEQ ID NO: 134598 - DNA, 25 bp, Probe sequence
acgaaactaaatacagatactacga

SEQ ID NO: 134599 - DNA, 25 bp, Probe sequence
acgggaatgcgtataggcgagttat

SEQ ID NO: 134600 - DNA, 25 bp, Probe sequence
actttgacttttcacactctattag

SEQ ID NO: 134601 - DNA, 25 bp, Probe sequence
acattaccatcaattccagaacagc

SEQ ID NO: 134602 - DNA, 25 bp, Probe sequence
tctactaaccggtgtcaaacttcca

SEQ ID NO: 134603 - DNA, 25 bp, Probe sequence
aaaatgtacaactatcttgaattac

SEQ ID NO: 134604 - DNA, 25 bp, Probe sequence
aacaagtcattcaaatacgcgattt

SEQ ID NO: 134605 - DNA, 25 bp, Probe sequence
aacaaacttttatctttagctgcag

SEQ ID NO: 134606 - DNA, 25 bp, Probe sequence
aacagtttgcattacagaactcgta

SEQ ID NO: 134607 - DNA, 25 bp, Probe sequence
aacgaccataaaagtatacacccat

SEQ ID NO: 134608 - DNA, 25 bp, Probe sequence
ctacccatactttaagacacacgca

SEQ ID NO: 134609 - DNA, 25 bp, Probe sequence
gcagttaaattctacgattacccaa

SEQ ID NO: 134610 - DNA, 25 bp, Probe sequence
gaacatacgttcttacaggaggtat

SEQ ID NO: 134611 - DNA, 25 bp, Probe sequence
gaaaagggttgggcataccgatgaa

SEQ ID NO: 134612 - DNA, 25 bp, Probe sequence
gaaatacaaagatccatacacagat

SEQ ID NO: 134613 - DNA, 25 bp, Probe sequence
gacacacgcatataagtttattggt

SEQ ID NO: 134614 - DNA, 25 bp, Probe sequence
gatactacaaaaactacaggttcaa

SEQ ID NO: 134615 - DNA, 25 bp, Probe sequence
gatattaacggaactcttcatagaa

SEQ ID NO: 134616 - DNA, 25 bp, Probe sequence
gtcaagcatctattctacaaatcaa

SEQ ID NO: 134617 - DNA, 25 bp, Probe sequence
ggaggtataaacatgtggttcgaaa

SEQ ID NO: 134618 - DNA, 25 bp, Probe sequence
ggcataccgatgaaaaaacgaccat

SEQ ID NO: 134619 - DNA, 25 bp, Probe sequence
taattgctggtgctctagaagtaca

SEQ ID NO: 134620 - DNA, 25 bp, Probe sequence
taaggtaccaacttggacacatgaa

SEQ ID NO: 134621 - DNA, 25 bp, Probe sequence
tacagaactcgtattttaattgctg

SEQ ID NO: 134622 - DNA, 25 bp, Probe sequence
attttagaccaatcaaaatggatta

SEQ ID NO: 134623 - DNA, 25 bp, Probe sequence
agaaactgaccagcttccaaatttc

SEQ ID NO: 134624 - DNA, 25 bp, Probe sequence
agcttccaaatttccaacctggatg

SEQ ID NO: 134625 - DNA, 25 bp, Probe sequence
agaagaaactgaccagcttccaaat

SEQ ID NO: 134626 - DNA, 25 bp, Probe sequence
accagcttccaaatttccaacctgg

SEQ ID NO: 134627 - DNA, 25 bp, Probe sequence
acctggatgctatatgaacggaaaa

SEQ ID NO: 134628 - DNA, 25 bp, Probe sequence
aaatttccaacctggatgctatatg

SEQ ID NO: 134629 - DNA, 25 bp, Probe sequence
aagaaactgaccagcttccaaattt

SEQ ID NO: 134630 - DNA, 25 bp, Probe sequence
aagtgttatatgaggaacttgccca

SEQ ID NO: 134631 - DNA, 25 bp, Probe sequence
aatttgaaaattatgcacgtagaca

SEQ ID NO: 134632 - DNA, 25 bp, Probe sequence
aatttccaacctggatgctatatga

SEQ ID NO: 134633 - DNA, 25 bp, Probe sequence
caacctggatgctatatgaacggaa

SEQ ID NO: 134634 - DNA, 25 bp, Probe sequence
cagcttccaaatttccaacctggat

SEQ ID NO: 134635 - DNA, 25 bp, Probe sequence
cttccaaatttccaacctggatgct

SEQ ID NO: 134636 - DNA, 25 bp, Probe sequence
ccagcttccaaatttccaacctgga

SEQ ID NO: 134637 - DNA, 25 bp, Probe sequence
ccaacctggatgctatatgaacgga

SEQ ID NO: 134638 - DNA, 25 bp, Probe sequence
ccaaatttccaacctggatgctata

SEQ ID NO: 134639 - DNA, 25 bp, Probe sequence
gcttccaaatttccaacctggatgc

SEQ ID NO: 134640 - DNA, 25 bp, Probe sequence
gaagaaactgaccagcttccaaatt

SEQ ID NO: 134641 - DNA, 25 bp, Probe sequence
gaagaactttgcataaataacgaaa

SEQ ID NO: 134642 - DNA, 25 bp, Probe sequence
gaaactgaccagcttccaaatttcc

SEQ ID NO: 134643 - DNA, 25 bp, Probe sequence
gatagaagaaactgaccagcttcca

SEQ ID NO: 134644 - DNA, 25 bp, Probe sequence
gggattatacgaagaactttgcata

SEQ ID NO: 134645 - DNA, 25 bp, Probe sequence
ggatgctatatgaacggaaaaattt

SEQ ID NO: 134646 - DNA, 25 bp, Probe sequence
tccaacctggatgctatatgaacgg

SEQ ID NO: 134647 - DNA, 25 bp, Probe sequence
tccaaatttccaacctggatgctat

SEQ ID NO: 134648 - DNA, 25 bp, Probe sequence
tacgtaaagcagaagtgttatatga

SEQ ID NO: 134649 - DNA, 25 bp, Probe sequence
tacgaagaactttgcataaataacg

SEQ ID NO: 134650 - DNA, 25 bp, Probe sequence
tagaagaaactgaccagcttccaaa

SEQ ID NO: 134651 - DNA, 25 bp, Probe sequence
tttccaacctggatgctatatgaac

SEQ ID NO: 134652 - DNA, 25 bp, Probe sequence
ttatataaggcgtaatttatcagaa

SEQ ID NO: 134653 - DNA, 25 bp, Probe sequence
ttccaaatttccaacctggatgcta

SEQ ID NO: 134654 - DNA, 25 bp, Probe sequence
ttgggattatacgaagaactttgca

SEQ ID NO: 134655 - DNA, 25 bp, Probe sequence
ttccaacctggatgctatatgaacg

SEQ ID NO: 134656 - DNA, 25 bp, Probe sequence
attggagtttctcaacctacagtct

SEQ ID NO: 134657 - DNA, 25 bp, Probe sequence
attacttcaatgtaccgaaatcaag

SEQ ID NO: 134658 - DNA, 25 bp, Probe sequence
atacatcaagaaacaattgctgctc

SEQ ID NO: 134659 - DNA, 25 bp, Probe sequence
atcaagaaacaattgctgctcattt

SEQ ID NO: 134660 - DNA, 25 bp, Probe sequence
aaatattgatcagagagaacttgct

SEQ ID NO: 134661 - DNA, 25 bp, Probe sequence
aaacaattgctgctcattttgataa

SEQ ID NO: 134662 - DNA, 25 bp, Probe sequence
aacaacttgcagattacttcaatgt

SEQ ID NO: 134663 - DNA, 25 bp, Probe sequence
aacttgcagattacttcaatgtacc

SEQ ID NO: 134664 - DNA, 25 bp, Probe sequence
caacctacagtctccaattggattc

SEQ ID NO: 134665 - DNA, 25 bp, Probe sequence
caacaaactaaatatccacgaatta

SEQ ID NO: 134666 - DNA, 25 bp, Probe sequence
cttgctgaagctattggagtttctc

SEQ ID NO: 134667 - DNA, 25 bp, Probe sequence
cttgcagattacttcaatgtaccga

SEQ ID NO: 134668 - DNA, 25 bp, Probe sequence
ctcaacctacagtctccaattggat

SEQ ID NO: 134669 - DNA, 25 bp, Probe sequence
cctacagtctccaattggattcaac

SEQ ID NO: 134670 - DNA, 25 bp, Probe sequence
gctgaagctattggagtttctcaac

SEQ ID NO: 134671 - DNA, 25 bp, Probe sequence
gctattggagtttctcaacctacag

SEQ ID NO: 134672 - DNA, 25 bp, Probe sequence
gcagattacttcaatgtaccgaaat

SEQ ID NO: 134673 - DNA, 25 bp, Probe sequence
gaattcaacaacttgcagattactt

SEQ ID NO: 134674 - DNA, 25 bp, Probe sequence
gaagctattggagtttctcaaccta

SEQ ID NO: 134675 - DNA, 25 bp, Probe sequence
gaaaaccttcaagaacttatgaatg

SEQ ID NO: 134676 - DNA, 25 bp, Probe sequence
gaaacaattgctgctcattttgata

SEQ ID NO: 134677 - DNA, 25 bp, Probe sequence
gagagaacttgctgaagctattgga

SEQ ID NO: 134678 - DNA, 25 bp, Probe sequence
gagaacttgctgaagctattggagt

SEQ ID NO: 134679 - DNA, 25 bp, Probe sequence
gattcaacaaactaaatatccacga

SEQ ID NO: 134680 - DNA, 25 bp, Probe sequence
gattcattgaatgggttagaaatag

SEQ ID NO: 134681 - DNA, 25 bp, Probe sequence
gtaccgaaatcaagaattactgaat

SEQ ID NO: 134682 - DNA, 25 bp, Probe sequence
gtctccaattggattcaacaaacta

SEQ ID NO: 134683 - DNA, 25 bp, Probe sequence
ggagtttctcaacctacagtctcca

SEQ ID NO: 134684 - DNA, 25 bp, Probe sequence
tctcaacctacagtctccaattgga

SEQ ID NO: 134685 - DNA, 25 bp, Probe sequence
tacagtctccaattggattcaacaa

SEQ ID NO: 134686 - DNA, 25 bp, Probe sequence
ttttatctgaaaaccttcaagaact

SEQ ID NO: 134687 - DNA, 25 bp, Probe sequence
ttctcaacctacagtctccaattgg

SEQ ID NO: 134688 - DNA, 25 bp, Probe sequence
ttcaacaacttgcagattacttcaa

SEQ ID NO: 134689 - DNA, 25 bp, Probe sequence
ttggagtttctcaacctacagtctc

SEQ ID NO: 134690 - DNA, 25 bp, Probe sequence
ataacgatagtccttatccatctta

SEQ ID NO: 134691 - DNA, 25 bp, Probe sequence
atcgttacttctttagatttacatt

SEQ ID NO: 134692 - DNA, 25 bp, Probe sequence
agcaaaactctacacatcattcatc

SEQ ID NO: 134693 - DNA, 25 bp, Probe sequence
actctacacatcattcatccaaaag

SEQ ID NO: 134694 - DNA, 25 bp, Probe sequence
acataagagattgctcactcaatat

SEQ ID NO: 134695 - DNA, 25 bp, Probe sequence
acacatcattcatccaaaagataga

SEQ ID NO: 134696 - DNA, 25 bp, Probe sequence
aaagcaaaactctacacatcattca

SEQ ID NO: 134697 - DNA, 25 bp, Probe sequence
aaactctacacatcattcatccaaa

SEQ ID NO: 134698 - DNA, 25 bp, Probe sequence
aaaactctacacatcattcatccaa

SEQ ID NO: 134699 - DNA, 25 bp, Probe sequence
aactctacacatcattcatccaaaa

SEQ ID NO: 134700 - DNA, 25 bp, Probe sequence
aagcaaaactctacacatcattcat

SEQ ID NO: 134701 - DNA, 25 bp, Probe sequence
aagagattgctcactcaatatttag

SEQ ID NO: 134702 - DNA, 25 bp, Probe sequence
aatggtgaagttattaaagtacaag

SEQ ID NO: 134703 - DNA, 25 bp, Probe sequence
caaaactctacacatcattcatcca

SEQ ID NO: 134704 - DNA, 25 bp, Probe sequence
cattcatccaaaagatagagttgtc

SEQ ID NO: 134705 - DNA, 25 bp, Probe sequence
gcaaaactctacacatcattcatcc

SEQ ID NO: 134706 - DNA, 25 bp, Probe sequence
gaataacgatagtccttatccatct

SEQ ID NO: 134707 - DNA, 25 bp, Probe sequence
gagattgctcactcaatatttagat

SEQ ID NO: 134708 - DNA, 25 bp, Probe sequence
gagttgtcagtttagatcatgtttt

SEQ ID NO: 134709 - DNA, 25 bp, Probe sequence
gatcatgttttgtatttcgacatta

SEQ ID NO: 134710 - DNA, 25 bp, Probe sequence
gattgctcactcaatatttagataa

SEQ ID NO: 134711 - DNA, 25 bp, Probe sequence
gttgtcagtttagatcatgttttgt

SEQ ID NO: 134712 - DNA, 25 bp, Probe sequence
gtttagatcatgttttgtatttcga

SEQ ID NO: 134713 - DNA, 25 bp, Probe sequence
gtatacataagagattgctcactca

SEQ ID NO: 134714 - DNA, 25 bp, Probe sequence
gtcagtttagatcatgttttgtatt

SEQ ID NO: 134715 - DNA, 25 bp, Probe sequence
tgtatttcgacattaacgttaaagg

SEQ ID NO: 134716 - DNA, 25 bp, Probe sequence
tgttttgtatttcgacattaacgtt

SEQ ID NO: 134717 - DNA, 25 bp, Probe sequence
tgctgaaagcaaaactctacacatc

SEQ ID NO: 134718 - DNA, 25 bp, Probe sequence
tgctcactcaatatttagataaaga

SEQ ID NO: 134719 - DNA, 25 bp, Probe sequence
tctacacatcattcatccaaaagat

SEQ ID NO: 134720 - DNA, 25 bp, Probe sequence
taacgatagtccttatccatcttaa

SEQ ID NO: 134721 - DNA, 25 bp, Probe sequence
tacttctttagatttacatttaatt

SEQ ID NO: 134722 - DNA, 25 bp, Probe sequence
tagagttgtcagtttagatcatgtt

SEQ ID NO: 134723 - DNA, 25 bp, Probe sequence
ttagatcatgttttgtatttcgaca

SEQ ID NO: 134724 - DNA, 25 bp, Probe sequence
aaggtaagttttcatggggacatat

SEQ ID NO: 134725 - DNA, 25 bp, Probe sequence
atttcttcttctaaagcgacgaatg

SEQ ID NO: 134726 - DNA, 25 bp, Probe sequence
atggtccactatttgcaatctcaga

SEQ ID NO: 134727 - DNA, 25 bp, Probe sequence
agaagcgcttgatcgaattttagaa

SEQ ID NO: 134728 - DNA, 25 bp, Probe sequence
acgatggatgcatgggggcttcagc

SEQ ID NO: 134729 - DNA, 25 bp, Probe sequence
acacggatacaccatcttataaacg

SEQ ID NO: 134730 - DNA, 25 bp, Probe sequence
aaattagatttcatggtagtccaag

SEQ ID NO: 134731 - DNA, 25 bp, Probe sequence
aagcggtattacaagttcacgtgac

SEQ ID NO: 134732 - DNA, 25 bp, Probe sequence
aagcaaaattattcccattatcatt

SEQ ID NO: 134733 - DNA, 25 bp, Probe sequence
aagttcacgtgacagatcgtgttaa

SEQ ID NO: 134734 - DNA, 25 bp, Probe sequence
aagattatcttgtagaaccaggtac

SEQ ID NO: 134735 - DNA, 25 bp, Probe sequence
aatggtcgattgttagagcacttcc

SEQ ID NO: 134736 - DNA, 25 bp, Probe sequence
aatttttaacattcacagcaacata

SEQ ID NO: 134737 - DNA, 25 bp, Probe sequence
caaagtgccacgtgcatttgttgaa

SEQ ID NO: 134738 - DNA, 25 bp, Probe sequence
ccatcacatgattctccagcaaata

SEQ ID NO: 134739 - DNA, 25 bp, Probe sequence
gcgtatccattacgtggacataata

SEQ ID NO: 134740 - DNA, 25 bp, Probe sequence
gcagaacctggttatggtccactat

SEQ ID NO: 134741 - DNA, 25 bp, Probe sequence
gcaatctcagattcagaagcagaaa

SEQ ID NO: 134742 - DNA, 25 bp, Probe sequence
gaaccctaataatttccgtgtcaat

SEQ ID NO: 134743 - DNA, 25 bp, Probe sequence
gacacggcggtgactcaggtagtat

SEQ ID NO: 134744 - DNA, 25 bp, Probe sequence
gaggcattcatgaaggtgcagaagt

SEQ ID NO: 134745 - DNA, 25 bp, Probe sequence
gatccaaatcaatgtatcttatgtg

SEQ ID NO: 134746 - DNA, 25 bp, Probe sequence
gattatgttttcccgggaaatcagg

SEQ ID NO: 134747 - DNA, 25 bp, Probe sequence
gttcaagatattgccaagcacctgc

SEQ ID NO: 134748 - DNA, 25 bp, Probe sequence
gtattcaacgtttataccaagcatt

SEQ ID NO: 134749 - DNA, 25 bp, Probe sequence
gtacaaccatcacatgattctccag

SEQ ID NO: 134750 - DNA, 25 bp, Probe sequence
gtgatgttgatcaatacacggatac

SEQ ID NO: 134751 - DNA, 25 bp, Probe sequence
ggggacatattaattcagatcaacg

SEQ ID NO: 134752 - DNA, 25 bp, Probe sequence
tgggggcttcagcatcaaacgtatg

SEQ ID NO: 134753 - DNA, 25 bp, Probe sequence
tggtaagtcaccgttgaaccctaat

SEQ ID NO: 134754 - DNA, 25 bp, Probe sequence
tgccaagcacctgcaacaaaaggct

SEQ ID NO: 134755 - DNA, 25 bp, Probe sequence
tagaacggttggacacggcggtgac

SEQ ID NO: 134756 - DNA, 25 bp, Probe sequence
tatgactgatacggaacctggttca

SEQ ID NO: 134757 - DNA, 25 bp, Probe sequence
tatcattcatttcttcttctaaagc

SEQ ID NO: 134758 - DNA, 25 bp, Probe sequence
attgttggccgtggtactactgaaa

SEQ ID NO: 134759 - DNA, 25 bp, Probe sequence
attcggtattttagtaatcttagcg

SEQ ID NO: 134760 - DNA, 25 bp, Probe sequence
atttggtgtcgattcagatgctgat

SEQ ID NO: 134761 - DNA, 25 bp, Probe sequence
ataagatacacaatccgttagatcg

SEQ ID NO: 134762 - DNA, 25 bp, Probe sequence
atggtggaccaaatatggctgttaa

SEQ ID NO: 134763 - DNA, 25 bp, Probe sequence
atggtgatccattcacaatcgcttt

SEQ ID NO: 134764 - DNA, 25 bp, Probe sequence
agagcgtagtgatagtattatgatt

SEQ ID NO: 134765 - DNA, 25 bp, Probe sequence
agcattgaagtttattagaagtcgt

SEQ ID NO: 134766 - DNA, 25 bp, Probe sequence
aagagcggaaattgttggccgtggt

SEQ ID NO: 134767 - DNA, 25 bp, Probe sequence
aagtataccgcgtgatacaagagcg

SEQ ID NO: 134768 - DNA, 25 bp, Probe sequence
aatcttagcgattgtagctgttgtg

SEQ ID NO: 134769 - DNA, 25 bp, Probe sequence
catgcctatgcatatggtggaccaa

SEQ ID NO: 134770 - DNA, 25 bp, Probe sequence
cattcactgttgatggtgttcgttt

SEQ ID NO: 134771 - DNA, 25 bp, Probe sequence
ctactgaaaaaattgcacatgccta

SEQ ID NO: 134772 - DNA, 25 bp, Probe sequence
ccatcatcgattacacattttaata

SEQ ID NO: 134773 - DNA, 25 bp, Probe sequence
gcgacaatcgatatggatggtttgc

SEQ ID NO: 134774 - DNA, 25 bp, Probe sequence
gctggtggtgactttggtcgacaac

SEQ ID NO: 134775 - DNA, 25 bp, Probe sequence
gagtggtcaaggcggcattcaaagt

SEQ ID NO: 134776 - DNA, 25 bp, Probe sequence
gaaggtgctggtggtgactttggtc

SEQ ID NO: 134777 - DNA, 25 bp, Probe sequence
gactttggtcgacaacaacgtcagc

SEQ ID NO: 134778 - DNA, 25 bp, Probe sequence
gacggattgtactacttcattccta

SEQ ID NO: 134779 - DNA, 25 bp, Probe sequence
gagcagtcaaaagctgaaagtacta

SEQ ID NO: 134780 - DNA, 25 bp, Probe sequence
gtagctgttgtgtatgtagctgcta

SEQ ID NO: 134781 - DNA, 25 bp, Probe sequence
gtaatgatacattcactgttgatgg

SEQ ID NO: 134782 - DNA, 25 bp, Probe sequence
gtgttcgttttacaaaaggacagca

SEQ ID NO: 134783 - DNA, 25 bp, Probe sequence
gtgtcgattcagatgctgatcgtaa

SEQ ID NO: 134784 - DNA, 25 bp, Probe sequence
ggcggcattcaaagtgacggattgt

SEQ ID NO: 134785 - DNA, 25 bp, Probe sequence
ggtcgacaacaacgtcagcaaattg

SEQ ID NO: 134786 - DNA, 25 bp, Probe sequence
tgggattgaaacgttcgtctaaaag

SEQ ID NO: 134787 - DNA, 25 bp, Probe sequence
tgtgccaattgatcattatgcgaca

SEQ ID NO: 134788 - DNA, 25 bp, Probe sequence
tcggcggtgttgatgtagtaagtaa

SEQ ID NO: 134789 - DNA, 25 bp, Probe sequence
tacttcattcctagtgagcagtcaa

SEQ ID NO: 134790 - DNA, 25 bp, Probe sequence
tatgattttatctatcaaccctaaa

SEQ ID NO: 134791 - DNA, 25 bp, Probe sequence
ttcacaatcgctttatttggtgtcg

SEQ ID NO: 134792 - DNA, 25 bp, Probe sequence
atcgttacaattgctgatattaaga

SEQ ID NO: 134793 - DNA, 25 bp, Probe sequence
atgaaatcaacaaacaaacaataaa

SEQ ID NO: 134794 - DNA, 25 bp, Probe sequence
aggaatcgttacaattgctgatatt

SEQ ID NO: 134795 - DNA, 25 bp, Probe sequence
agattcttatattcatagatatgag

SEQ ID NO: 134796 - DNA, 25 bp, Probe sequence
agaaacctgacaagattcttatatt

SEQ ID NO: 134797 - DNA, 25 bp, Probe sequence
acctgacaagattcttatattcata

SEQ ID NO: 134798 - DNA, 25 bp, Probe sequence
actaaaggaatcgttacaattgctg

SEQ ID NO: 134799 - DNA, 25 bp, Probe sequence
acaagattcttatattcatagatat

SEQ ID NO: 134800 - DNA, 25 bp, Probe sequence
aaatgaaatcaacaaacaaacaata

SEQ ID NO: 134801 - DNA, 25 bp, Probe sequence
aaaggaatcgttacaattgctgata

SEQ ID NO: 134802 - DNA, 25 bp, Probe sequence
aaacctgacaagattcttatattca

SEQ ID NO: 134803 - DNA, 25 bp, Probe sequence
aactaaaggaatcgttacaattgct

SEQ ID NO: 134804 - DNA, 25 bp, Probe sequence
aacctgacaagattcttatattcat

SEQ ID NO: 134805 - DNA, 25 bp, Probe sequence
aagaaacctgacaagattcttatat

SEQ ID NO: 134806 - DNA, 25 bp, Probe sequence
aagattcttatattcatagatatga

SEQ ID NO: 134807 - DNA, 25 bp, Probe sequence
aaggaatcgttacaattgctgatat

SEQ ID NO: 134808 - DNA, 25 bp, Probe sequence
aatcgttacaattgctgatattaag

SEQ ID NO: 134809 - DNA, 25 bp, Probe sequence
caagattcttatattcatagatatg

SEQ ID NO: 134810 - DNA, 25 bp, Probe sequence
ctaaaggaatcgttacaattgctga

SEQ ID NO: 134811 - DNA, 25 bp, Probe sequence
ctgacaagattcttatattcataga

SEQ ID NO: 134812 - DNA, 25 bp, Probe sequence
cgttacaattgctgatattaagaat

SEQ ID NO: 134813 - DNA, 25 bp, Probe sequence
cctgacaagattcttatattcatag

SEQ ID NO: 134814 - DNA, 25 bp, Probe sequence
gaataagaaacctgacaagattctt

SEQ ID NO: 134815 - DNA, 25 bp, Probe sequence
gaatcgttacaattgctgatattaa

SEQ ID NO: 134816 - DNA, 25 bp, Probe sequence
gaaacctgacaagattcttatattc

SEQ ID NO: 134817 - DNA, 25 bp, Probe sequence
gacaagattcttatattcatagata

SEQ ID NO: 134818 - DNA, 25 bp, Probe sequence
gattcttatattcatagatatgaga

SEQ ID NO: 134819 - DNA, 25 bp, Probe sequence
gttacaattgctgatattaagaata

SEQ ID NO: 134820 - DNA, 25 bp, Probe sequence
ggaatcgttacaattgctgatatta

SEQ ID NO: 134821 - DNA, 25 bp, Probe sequence
tgacaagattcttatattcatagat

SEQ ID NO: 134822 - DNA, 25 bp, Probe sequence
tcgttacaattgctgatattaagaa

SEQ ID NO: 134823 - DNA, 25 bp, Probe sequence
taaaggaatcgttacaattgctgat

SEQ ID NO: 134824 - DNA, 25 bp, Probe sequence
tacaattgctgatattaagaataag

SEQ ID NO: 134825 - DNA, 25 bp, Probe sequence
ttaagaataagaaacctgacaagat

SEQ ID NO: 134826 - DNA, 25 bp, Probe sequence
atacaaatcctaaaccttgggacat

SEQ ID NO: 134827 - DNA, 25 bp, Probe sequence
atacgaggagaaggtgctttttgta

SEQ ID NO: 134828 - DNA, 25 bp, Probe sequence
ataagttaatatgttcgtggttgaa

SEQ ID NO: 134829 - DNA, 25 bp, Probe sequence
atcgtacgtatatgattatccgcat

SEQ ID NO: 134830 - DNA, 25 bp, Probe sequence
agatggtaaggcaattgatcattta

SEQ ID NO: 134831 - DNA, 25 bp, Probe sequence
agcatgtcatgaaacggtacttaaa

SEQ ID NO: 134832 - DNA, 25 bp, Probe sequence
aaatgcaaatggtggttatcaaaaa

SEQ ID NO: 134833 - DNA, 25 bp, Probe sequence
aaaccttgggacattgctgcacagt

SEQ ID NO: 134834 - DNA, 25 bp, Probe sequence
aaaattggaagacgctattatatcg

SEQ ID NO: 134835 - DNA, 25 bp, Probe sequence
aagcgtcatcgatttgatttagtta

SEQ ID NO: 134836 - DNA, 25 bp, Probe sequence
aattgatcatttaaagggtgcacct

SEQ ID NO: 134837 - DNA, 25 bp, Probe sequence
catttatggattatggatcccattg

SEQ ID NO: 134838 - DNA, 25 bp, Probe sequence
cgcctcatttagttatcgtttagtt

SEQ ID NO: 134839 - DNA, 25 bp, Probe sequence
gcacagtttttatttgcagaactat

SEQ ID NO: 134840 - DNA, 25 bp, Probe sequence
gacgctattatatcgtttaatgcac

SEQ ID NO: 134841 - DNA, 25 bp, Probe sequence
gatttatttgacgcctcatttagtt

SEQ ID NO: 134842 - DNA, 25 bp, Probe sequence
gattattgtattatattggcgtatt

SEQ ID NO: 134843 - DNA, 25 bp, Probe sequence
gttggtgcttgcggattagattcta

SEQ ID NO: 134844 - DNA, 25 bp, Probe sequence
gttatcgtttagttggtgcttgcgg

SEQ ID NO: 134845 - DNA, 25 bp, Probe sequence
gtagataaacagattcaacaacaat

SEQ ID NO: 134846 - DNA, 25 bp, Probe sequence
gtcaatttggggcacatattaatac

SEQ ID NO: 134847 - DNA, 25 bp, Probe sequence
gtggcaaaaggtcaatttggggcac

SEQ ID NO: 134848 - DNA, 25 bp, Probe sequence
gggacattgctgcacagtttttatt

SEQ ID NO: 134849 - DNA, 25 bp, Probe sequence
gggtgcaccttttattataagtaat

SEQ ID NO: 134850 - DNA, 25 bp, Probe sequence
ggtgcaagatttatttgacgcctca

SEQ ID NO: 134851 - DNA, 25 bp, Probe sequence
ggtaaaccaatgttatcgtacgtat

SEQ ID NO: 134852 - DNA, 25 bp, Probe sequence
ttttccggaacaccaactattagcg

SEQ ID NO: 134853 - DNA, 25 bp, Probe sequence
ggattagattctatgcgagtggcaa

SEQ ID NO: 134854 - DNA, 25 bp, Probe sequence
ggatcccattgatggaactgccaat

SEQ ID NO: 134855 - DNA, 25 bp, Probe sequence
ggaagaaccaccatcgttaaaattg

SEQ ID NO: 134856 - DNA, 25 bp, Probe sequence
ggaacaccaactattagcggaagaa

SEQ ID NO: 134857 - DNA, 25 bp, Probe sequence
ggaactgccaatttagtaaaacagc

SEQ ID NO: 134858 - DNA, 25 bp, Probe sequence
tgattatccgcataaaaagctttat

SEQ ID NO: 134859 - DNA, 25 bp, Probe sequence
tattggcgtatttttatgaaggtaa

SEQ ID NO: 134860 - DNA, 25 bp, Probe sequence
attataccttcgatatcactcgccc

SEQ ID NO: 134861 - DNA, 25 bp, Probe sequence
attgcatctacagtcatcgctacag

SEQ ID NO: 134862 - DNA, 25 bp, Probe sequence
atatcactcgcccattagaagaaca

SEQ ID NO: 134863 - DNA, 25 bp, Probe sequence
atcactcgcccattagaagaacata

SEQ ID NO: 134864 - DNA, 25 bp, Probe sequence
agctgtagtaaaaatcaaagacggt

SEQ ID NO: 134865 - DNA, 25 bp, Probe sequence
agtcatcgctacaggtcttctaact

SEQ ID NO: 134866 - DNA, 25 bp, Probe sequence
acatagaaaaaatattccagtggtt

SEQ ID NO: 134867 - DNA, 25 bp, Probe sequence
aaatcgattcgattacttggtatta

SEQ ID NO: 134868 - DNA, 25 bp, Probe sequence
aactaatgatgctaaggcgttcttt

SEQ ID NO: 134869 - DNA, 25 bp, Probe sequence
aagtaattattgcatctacagtcat

SEQ ID NO: 134870 - DNA, 25 bp, Probe sequence
aaggacgatgaacgtgctgataaat

SEQ ID NO: 134871 - DNA, 25 bp, Probe sequence
aatggttattataccttcgatatca

SEQ ID NO: 134872 - DNA, 25 bp, Probe sequence
aatgatgctaaggcgttctttagtt

SEQ ID NO: 134873 - DNA, 25 bp, Probe sequence
aattattgcatctacagtcatcgct

SEQ ID NO: 134874 - DNA, 25 bp, Probe sequence
cactcgcccattagaagaacataga

SEQ ID NO: 134875 - DNA, 25 bp, Probe sequence
catctacagtcatcgctacaggtct

SEQ ID NO: 134876 - DNA, 25 bp, Probe sequence
cttcgatatcactcgcccattagaa

SEQ ID NO: 134877 - DNA, 25 bp, Probe sequence
ctcgcccattagaagaacatagaaa

SEQ ID NO: 134878 - DNA, 25 bp, Probe sequence
cgatatcactcgcccattagaagaa

SEQ ID NO: 134879 - DNA, 25 bp, Probe sequence
cgctacaggtcttctaactcaaact

SEQ ID NO: 134880 - DNA, 25 bp, Probe sequence
gctaaaaatttagcagaccaagcta

SEQ ID NO: 134881 - DNA, 25 bp, Probe sequence
gaagccgatgaaaaaaacgaacact

SEQ ID NO: 134882 - DNA, 25 bp, Probe sequence
gacgatgaacgtgctgataaattaa

SEQ ID NO: 134883 - DNA, 25 bp, Probe sequence
gatgaacgtgctgataaattaataa

SEQ ID NO: 134884 - DNA, 25 bp, Probe sequence
gttgaagacttatatgtaatagcta

SEQ ID NO: 134885 - DNA, 25 bp, Probe sequence
gggtaaaggcaatacaatagctgta

SEQ ID NO: 134886 - DNA, 25 bp, Probe sequence
ggtaaaactgttgaagacttatatg

SEQ ID NO: 134887 - DNA, 25 bp, Probe sequence
ggttattataccttcgatatcactc

SEQ ID NO: 134888 - DNA, 25 bp, Probe sequence
tgctaaggcgttctttagttatgaa

SEQ ID NO: 134889 - DNA, 25 bp, Probe sequence
tcgctacaggtcttctaactcaaac

SEQ ID NO: 134890 - DNA, 25 bp, Probe sequence
taaaaacggcgaaatcgattcgatt

SEQ ID NO: 134891 - DNA, 25 bp, Probe sequence
tacagtcatcgctacaggtcttcta

SEQ ID NO: 134892 - DNA, 25 bp, Probe sequence
ttattgcatctacagtcatcgctac

SEQ ID NO: 134893 - DNA, 25 bp, Probe sequence
ttgcatctacagtcatcgctacagg

SEQ ID NO: 134894 - DNA, 25 bp, Probe sequence
attgctctcatcttaatttatacat

SEQ ID NO: 134895 - DNA, 25 bp, Probe sequence
attttgtttctttcgttatatcagt

SEQ ID NO: 134896 - DNA, 25 bp, Probe sequence
atacgattgggattggcgcatttta

SEQ ID NO: 134897 - DNA, 25 bp, Probe sequence
atgcactcacaattgcagcttacat

SEQ ID NO: 134898 - DNA, 25 bp, Probe sequence
aggtgttatattttatgcactcaca

SEQ ID NO: 134899 - DNA, 25 bp, Probe sequence
agctatgagtattgtttcggtgttc

SEQ ID NO: 134900 - DNA, 25 bp, Probe sequence
aaataaaatgtttgaagtgcctgca

SEQ ID NO: 134901 - DNA, 25 bp, Probe sequence
aagctttagcatatacgattgggat

SEQ ID NO: 134902 - DNA, 25 bp, Probe sequence
aagtcgccgtttgagtttggtccat

SEQ ID NO: 134903 - DNA, 25 bp, Probe sequence
aagtgcctgcatttttacctgtagc

SEQ ID NO: 134904 - DNA, 25 bp, Probe sequence
aaggcttcgagctggttttgcgtat

SEQ ID NO: 134905 - DNA, 25 bp, Probe sequence
aatatatgacacagtttctacctaa

SEQ ID NO: 134906 - DNA, 25 bp, Probe sequence
cgtatattattgctctcatcttaat

SEQ ID NO: 134907 - DNA, 25 bp, Probe sequence
gcatttttacctgtagcattcttat

SEQ ID NO: 134908 - DNA, 25 bp, Probe sequence
gcagcttacataggaccaattttgt

SEQ ID NO: 134909 - DNA, 25 bp, Probe sequence
gaaacctaggttcaacaattgcatt

SEQ ID NO: 134910 - DNA, 25 bp, Probe sequence
gaaacagccaatgaacttgagctaa

SEQ ID NO: 134911 - DNA, 25 bp, Probe sequence
gagagatttgcttataattccaatt

SEQ ID NO: 134912 - DNA, 25 bp, Probe sequence
gatgccatcaaggcttcgagctggt

SEQ ID NO: 134913 - DNA, 25 bp, Probe sequence
gttcaacaattgcattacatatagc

SEQ ID NO: 134914 - DNA, 25 bp, Probe sequence
gtttggtccatatctcatactatcc

SEQ ID NO: 134915 - DNA, 25 bp, Probe sequence
gtattgtttcggtgttcttatttgc

SEQ ID NO: 134916 - DNA, 25 bp, Probe sequence
gtagcattcttattaattgtgattg

SEQ ID NO: 134917 - DNA, 25 bp, Probe sequence
gtaatctgatatttgtagcgactat

SEQ ID NO: 134918 - DNA, 25 bp, Probe sequence
gtccatatctcatactatccatcat

SEQ ID NO: 134919 - DNA, 25 bp, Probe sequence
gtgactgatgcaaagtcgccgtttg

SEQ ID NO: 134920 - DNA, 25 bp, Probe sequence
ggtgttcttatttgcatttattcat

SEQ ID NO: 134921 - DNA, 25 bp, Probe sequence
ggattggcgcattttatttatttca

SEQ ID NO: 134922 - DNA, 25 bp, Probe sequence
tgtgattgtaggtccaatagttgaa

SEQ ID NO: 134923 - DNA, 25 bp, Probe sequence
tagcgactatcacacaagctttagc

SEQ ID NO: 134924 - DNA, 25 bp, Probe sequence
tatccatcatattagttttcactta

SEQ ID NO: 134925 - DNA, 25 bp, Probe sequence
tttgcatttattcatgtgactgatg

SEQ ID NO: 134926 - DNA, 25 bp, Probe sequence
tttctacctaaacatttgcaatata

SEQ ID NO: 134927 - DNA, 25 bp, Probe sequence
ttcgagctggttttgcgtatatcaa

SEQ ID NO: 134928 - DNA, 25 bp, Probe sequence
attggtgtcatcttcttaacgattg

SEQ ID NO: 134929 - DNA, 25 bp, Probe sequence
attgccaacttggattcctggtgtt

SEQ ID NO: 134930 - DNA, 25 bp, Probe sequence
atggacaggcccatcagttatcctt

SEQ ID NO: 134931 - DNA, 25 bp, Probe sequence
atggcagcgaatttattctcggtaa

SEQ ID NO: 134932 - DNA, 25 bp, Probe sequence
aggcccatcagttatccttgcatat

SEQ ID NO: 134933 - DNA, 25 bp, Probe sequence
agtccgtttgttgcaacatttgcta

SEQ ID NO: 134934 - DNA, 25 bp, Probe sequence
acgattggcgtggggcttttcatgg

SEQ ID NO: 134935 - DNA, 25 bp, Probe sequence
accctacaacaggatcatttgcaac

SEQ ID NO: 134936 - DNA, 25 bp, Probe sequence
aactttgttgtattaactgcagcaa

SEQ ID NO: 134937 - DNA, 25 bp, Probe sequence
aatcggtattacatttgcagctgga

SEQ ID NO: 134938 - DNA, 25 bp, Probe sequence
gctggttttggtcttattttctttg

SEQ ID NO: 134939 - DNA, 25 bp, Probe sequence
ccttgcatatttaattgcgggtatc

SEQ ID NO: 134940 - DNA, 25 bp, Probe sequence
gcagcaatgtcaggatgtaactcag

SEQ ID NO: 134941 - DNA, 25 bp, Probe sequence
gcagtatctcttggtattttaattg

SEQ ID NO: 134942 - DNA, 25 bp, Probe sequence
gcagcaggttatatgacagcatgga

SEQ ID NO: 134943 - DNA, 25 bp, Probe sequence
gcagctggattaattaactttgttg

SEQ ID NO: 134944 - DNA, 25 bp, Probe sequence
gaatatatgaagttttggttcccgg

SEQ ID NO: 134945 - DNA, 25 bp, Probe sequence
gaaggtcacccattcaaaatgcctg

SEQ ID NO: 134946 - DNA, 25 bp, Probe sequence
gagacattggaagtccgtttgttgc

SEQ ID NO: 134947 - DNA, 25 bp, Probe sequence
gagtgaggtcatcgcagtaggagaa

SEQ ID NO: 134948 - DNA, 25 bp, Probe sequence
gattattgctggttttggtcttatt

SEQ ID NO: 134949 - DNA, 25 bp, Probe sequence
gattccttggtttatgattttattc

SEQ ID NO: 134950 - DNA, 25 bp, Probe sequence
gtcgtatgatttatacacttgctca

SEQ ID NO: 134951 - DNA, 25 bp, Probe sequence
gtgattatatacatcctgcagcagg

SEQ ID NO: 134952 - DNA, 25 bp, Probe sequence
ggggattgagtgcccgtcaaattca

SEQ ID NO: 134953 - DNA, 25 bp, Probe sequence
ggattcctggtgttattgctatttt

SEQ ID NO: 134954 - DNA, 25 bp, Probe sequence
ggcggatttatgccaaatggtattg

SEQ ID NO: 134955 - DNA, 25 bp, Probe sequence
tggttcccggaattgccaacttgga

SEQ ID NO: 134956 - DNA, 25 bp, Probe sequence
tggtggccatgcggtaggtatttct

SEQ ID NO: 134957 - DNA, 25 bp, Probe sequence
tcaggtattttcagtgcgagtcgta

SEQ ID NO: 134958 - DNA, 25 bp, Probe sequence
tagtgcgtctattttaccaggtatg

SEQ ID NO: 134959 - DNA, 25 bp, Probe sequence
ttacctttatatatcgatggagcga

SEQ ID NO: 134960 - DNA, 25 bp, Probe sequence
ttcaaaatgcctggtggcgcagtaa

SEQ ID NO: 134961 - DNA, 25 bp, Probe sequence
ttgcacttggtggtacgattggcgt

SEQ ID NO: 134962 - DNA, 25 bp, Probe sequence
attgttttttctagctggtccagta

SEQ ID NO: 134963 - DNA, 25 bp, Probe sequence
attatattgttttttctagctggtc

SEQ ID NO: 134964 - DNA, 25 bp, Probe sequence
agtaagatcttttgttgttggttca

SEQ ID NO: 134965 - DNA, 25 bp, Probe sequence
accatttcgcgtgcaagtaagatct

SEQ ID NO: 134966 - DNA, 25 bp, Probe sequence
acattatattgttttttctagctgg

SEQ ID NO: 134967 - DNA, 25 bp, Probe sequence
acagacaccatttcgcgtgcaagta

SEQ ID NO: 134968 - DNA, 25 bp, Probe sequence
aacaaacagacaccatttcgcgtgc

SEQ ID NO: 134969 - DNA, 25 bp, Probe sequence
aacagacaccatttcgcgtgcaagt

SEQ ID NO: 134970 - DNA, 25 bp, Probe sequence
aagatcttttgttgttggttcaatg

SEQ ID NO: 134971 - DNA, 25 bp, Probe sequence
aatttggtgattggtcctatattta

SEQ ID NO: 134972 - DNA, 25 bp, Probe sequence
caaacagacaccatttcgcgtgcaa

SEQ ID NO: 134973 - DNA, 25 bp, Probe sequence
cagacaccatttcgcgtgcaagtaa

SEQ ID NO: 134974 - DNA, 25 bp, Probe sequence
catttcgcgtgcaagtaagatcttt

SEQ ID NO: 134975 - DNA, 25 bp, Probe sequence
gcgtgcaagtaagatcttttgttgt

SEQ ID NO: 134976 - DNA, 25 bp, Probe sequence
gctggtccagtaattttaggcgttg

SEQ ID NO: 134977 - DNA, 25 bp, Probe sequence
gaaatttggtgattggtcctatatt

SEQ ID NO: 134978 - DNA, 25 bp, Probe sequence
gacaccatttcgcgtgcaagtaaga

SEQ ID NO: 134979 - DNA, 25 bp, Probe sequence
gatgggttacattatattgtttttt

SEQ ID NO: 134980 - DNA, 25 bp, Probe sequence
gatcttttgttgttggttcaatgat

SEQ ID NO: 134981 - DNA, 25 bp, Probe sequence
gttttttctagctggtccagtaatt

SEQ ID NO: 134982 - DNA, 25 bp, Probe sequence
gattggtcctatatttaacaaacag

SEQ ID NO: 134983 - DNA, 25 bp, Probe sequence
gttgttggttcaatgatttacttaa

SEQ ID NO: 134984 - DNA, 25 bp, Probe sequence
gtgattggtcctatatttaacaaac

SEQ ID NO: 134985 - DNA, 25 bp, Probe sequence
ggttcaatgatttacttaatactcg

SEQ ID NO: 134986 - DNA, 25 bp, Probe sequence
ggcgttggaaatttggtgattggtc

SEQ ID NO: 134987 - DNA, 25 bp, Probe sequence
tggtccagtaattttaggcgttgga

SEQ ID NO: 134988 - DNA, 25 bp, Probe sequence
tcaatgatttacttaatactcgcaa

SEQ ID NO: 134989 - DNA, 25 bp, Probe sequence
tagctggtccagtaattttaggcgt

SEQ ID NO: 134990 - DNA, 25 bp, Probe sequence
tatattgttttttctagctggtcca

SEQ ID NO: 134991 - DNA, 25 bp, Probe sequence
tattgttttttctagctggtccagt

SEQ ID NO: 134992 - DNA, 25 bp, Probe sequence
ttaacaaacagacaccatttcgcgt

SEQ ID NO: 134993 - DNA, 25 bp, Probe sequence
ttcgcgtgcaagtaagatcttttgt

SEQ ID NO: 134994 - DNA, 25 bp, Probe sequence
ttggtgattggtcctatatttaaca

SEQ ID NO: 134995 - DNA, 25 bp, Probe sequence
ttgttttttctagctggtccagtaa

SEQ ID NO: 134996 - DNA, 25 bp, Probe sequence
attgccacaagtagtgtgaaagcgg

SEQ ID NO: 134997 - DNA, 25 bp, Probe sequence
atcttactagtacaacattaccgat

SEQ ID NO: 134998 - DNA, 25 bp, Probe sequence
atgtttggctattgaagattctgta

SEQ ID NO: 134999 - DNA, 25 bp, Probe sequence
atggtgcaacagccgcgattgcagc

SEQ ID NO: 135000 - DNA, 25 bp, Probe sequence
acgatcaaattgtagcgcgtttctt

SEQ ID NO: 135001 - DNA, 25 bp, Probe sequence
acattaccgatgattgatacgatta

SEQ ID NO: 135002 - DNA, 25 bp, Probe sequence
aatgacaagcgcacaggacttttct

SEQ ID NO: 135003 - DNA, 25 bp, Probe sequence
aagatgttgaacaagttaaacctga

SEQ ID NO: 135004 - DNA, 25 bp, Probe sequence
aagcattgatttttatcgttcttct

SEQ ID NO: 135005 - DNA, 25 bp, Probe sequence
caaattgtagcgcgtttctttacga

SEQ ID NO: 135006 - DNA, 25 bp, Probe sequence
gccgcgattgcagctggattagatg

SEQ ID NO: 135007 - DNA, 25 bp, Probe sequence
gcgcacaggacttttctaatgtaga

SEQ ID NO: 135008 - DNA, 25 bp, Probe sequence
gctacagatttgcatgaccatttaa

SEQ ID NO: 135009 - DNA, 25 bp, Probe sequence
gcatgaccatttaattaaagcgatt

SEQ ID NO: 135010 - DNA, 25 bp, Probe sequence
gcagctggattagatgttattgtta

SEQ ID NO: 135011 - DNA, 25 bp, Probe sequence
gcaacagccgcgattgcagctggat

SEQ ID NO: 135012 - DNA, 25 bp, Probe sequence
gaattatatttatctgcagtacaac

SEQ ID NO: 135013 - DNA, 25 bp, Probe sequence
gaacatcatcttactagtacaacat

SEQ ID NO: 135014 - DNA, 25 bp, Probe sequence
gacaagcgcacaggacttttctaat

SEQ ID NO: 135015 - DNA, 25 bp, Probe sequence
gaggtagttgttggtagagaagatg

SEQ ID NO: 135016 - DNA, 25 bp, Probe sequence
gatggcatttttaaagcaacgtcac

SEQ ID NO: 135017 - DNA, 25 bp, Probe sequence
gatgcataatgccgatcctataagc

SEQ ID NO: 135018 - DNA, 25 bp, Probe sequence
gatacgattaaatcattgatggcat

SEQ ID NO: 135019 - DNA, 25 bp, Probe sequence
gttcttctattggaggagcagctac

SEQ ID NO: 135020 - DNA, 25 bp, Probe sequence
gttatatttgatttcgatggaacaa

SEQ ID NO: 135021 - DNA, 25 bp, Probe sequence
ggagcagctacagatttgcatgacc

SEQ ID NO: 135022 - DNA, 25 bp, Probe sequence
ggaacaataatagatacggaacaac

SEQ ID NO: 135023 - DNA, 25 bp, Probe sequence
tgtaaatggtgcaacagccgcgatt

SEQ ID NO: 135024 - DNA, 25 bp, Probe sequence
tgtagcgcgtttctttacgaaatag

SEQ ID NO: 135025 - DNA, 25 bp, Probe sequence
tgccgatcctataagcattgatttt

SEQ ID NO: 135026 - DNA, 25 bp, Probe sequence
tctgcagtacaacaattaaattata

SEQ ID NO: 135027 - DNA, 25 bp, Probe sequence
taaagcaacgtcacattcctatggc

SEQ ID NO: 135028 - DNA, 25 bp, Probe sequence
ttatcgttcttctattggaggagca

SEQ ID NO: 135029 - DNA, 25 bp, Probe sequence
ttgatttttatcgttcttctattgg

SEQ ID NO: 135030 - DNA, 25 bp, Probe sequence
attactccaacctacgatgcgaaaa

SEQ ID NO: 135031 - DNA, 25 bp, Probe sequence
attttggaacaacagctgcactcat

SEQ ID NO: 135032 - DNA, 25 bp, Probe sequence
atttgcgggcgttagttatgtacac

SEQ ID NO: 135033 - DNA, 25 bp, Probe sequence
atcttattcttatttggtggcgtcg

SEQ ID NO: 135034 - DNA, 25 bp, Probe sequence
atggcattactttacttcatcgcat

SEQ ID NO: 135035 - DNA, 25 bp, Probe sequence
aggtgtgacatttgctgctggtgta

SEQ ID NO: 135036 - DNA, 25 bp, Probe sequence
agtgcaggtgctgatgtcgtcgttc

SEQ ID NO: 135037 - DNA, 25 bp, Probe sequence
agctgaaatcgtcccagcatttaaa

SEQ ID NO: 135038 - DNA, 25 bp, Probe sequence
agccattcttgttgcactgattgcc

SEQ ID NO: 135039 - DNA, 25 bp, Probe sequence
acatggctgcgtttttagcaatcat

SEQ ID NO: 135040 - DNA, 25 bp, Probe sequence
aaacctgcattagactgccctattg

SEQ ID NO: 135041 - DNA, 25 bp, Probe sequence
aacgaagctatcgtctcactagcct

SEQ ID NO: 135042 - DNA, 25 bp, Probe sequence
cttcttcttaggtgcaacggctgct

SEQ ID NO: 135043 - DNA, 25 bp, Probe sequence
ctttgccgcaggtgctgtaggtcaa

SEQ ID NO: 135044 - DNA, 25 bp, Probe sequence
cgtagttgcacacttcttcttaggt

SEQ ID NO: 135045 - DNA, 25 bp, Probe sequence
ccctattgtgttcccttatgcacaa

SEQ ID NO: 135046 - DNA, 25 bp, Probe sequence
gcgccgctctaaatggtatcctaat

SEQ ID NO: 135047 - DNA, 25 bp, Probe sequence
gctgcactcatcatggtctgtggca

SEQ ID NO: 135048 - DNA, 25 bp, Probe sequence
gcttgtaccaaattctaaacctgca

SEQ ID NO: 135049 - DNA, 25 bp, Probe sequence
gcaacggctgctgtattcggtaatg

SEQ ID NO: 135050 - DNA, 25 bp, Probe sequence
gatattttaagtcaaccagccattc

SEQ ID NO: 135051 - DNA, 25 bp, Probe sequence
gtcattttacctggcgtagttgcac

SEQ ID NO: 135052 - DNA, 25 bp, Probe sequence
gtcatcatacattttacatggctgc

SEQ ID NO: 135053 - DNA, 25 bp, Probe sequence
gtcatcggtatgtttatcttattct

SEQ ID NO: 135054 - DNA, 25 bp, Probe sequence
gtcggtatcgtgttcggtaacgcag

SEQ ID NO: 135055 - DNA, 25 bp, Probe sequence
gggattatttggtgcgattctattt

SEQ ID NO: 135056 - DNA, 25 bp, Probe sequence
ggtggtgctgcaacaacattctcag

SEQ ID NO: 135057 - DNA, 25 bp, Probe sequence
ggattctttgtcagctttattacag

SEQ ID NO: 135058 - DNA, 25 bp, Probe sequence
tggctcaatcagttactttgccgca

SEQ ID NO: 135059 - DNA, 25 bp, Probe sequence
tgttatcggcgcactcgtattagga

SEQ ID NO: 135060 - DNA, 25 bp, Probe sequence
tcatcgcatgcttatttgcgggcgt

SEQ ID NO: 135061 - DNA, 25 bp, Probe sequence
tttggtggcgtcgtcattttacctg

SEQ ID NO: 135062 - DNA, 25 bp, Probe sequence
ttaccattattattcttgccatttt

SEQ ID NO: 135063 - DNA, 25 bp, Probe sequence
ttcggcaaaatattccaacacgcat

SEQ ID NO: 135064 - DNA, 25 bp, Probe sequence
ataccaacaggattacatcacttta

SEQ ID NO: 135065 - DNA, 25 bp, Probe sequence
aggtggtattattatttcagctatt

SEQ ID NO: 135066 - DNA, 25 bp, Probe sequence
agcaatgtatgctacgacacctaaa

SEQ ID NO: 135067 - DNA, 25 bp, Probe sequence
agcagatcaacatacgttttggttt

SEQ ID NO: 135068 - DNA, 25 bp, Probe sequence
acattaacagcagtcgttgtaggta

SEQ ID NO: 135069 - DNA, 25 bp, Probe sequence
acttcttcttattcagattcttaat

SEQ ID NO: 135070 - DNA, 25 bp, Probe sequence
aaagcgtttcggtagtgcaatgatt

SEQ ID NO: 135071 - DNA, 25 bp, Probe sequence
aagccattaaaagagcaattccctt

SEQ ID NO: 135072 - DNA, 25 bp, Probe sequence
aatgtacgcatttggtgttgtaggt

SEQ ID NO: 135073 - DNA, 25 bp, Probe sequence
aatcctacaatcatggggagtttag

SEQ ID NO: 135074 - DNA, 25 bp, Probe sequence
aattcccttatggctttatgcttca

SEQ ID NO: 135075 - DNA, 25 bp, Probe sequence
caagattacgcttaactgtttatga

SEQ ID NO: 135076 - DNA, 25 bp, Probe sequence
cacgcatcaacaaatggcacacgga

SEQ ID NO: 135077 - DNA, 25 bp, Probe sequence
cttgcagcattgatgggttacttaa

SEQ ID NO: 135078 - DNA, 25 bp, Probe sequence
ctaaaaaagcaccaggtcatgcagc

SEQ ID NO: 135079 - DNA, 25 bp, Probe sequence
gcaggtattgccacattggatacga

SEQ ID NO: 135080 - DNA, 25 bp, Probe sequence
gcagcaattacttgtgttatttggc

SEQ ID NO: 135081 - DNA, 25 bp, Probe sequence
gaagttggaccagtagtagtcaatc

SEQ ID NO: 135082 - DNA, 25 bp, Probe sequence
gacagtaccacaagttcgtgaagca

SEQ ID NO: 135083 - DNA, 25 bp, Probe sequence
gatgttaccattagcagcaattact

SEQ ID NO: 135084 - DNA, 25 bp, Probe sequence
gatacggaatatttcacgcatcaac

SEQ ID NO: 135085 - DNA, 25 bp, Probe sequence
gttcgctttctttgggatagtgctt

SEQ ID NO: 135086 - DNA, 25 bp, Probe sequence
gttatttggccaactgttcagcacg

SEQ ID NO: 135087 - DNA, 25 bp, Probe sequence
gtattaatgttcgctttctttggga

SEQ ID NO: 135088 - DNA, 25 bp, Probe sequence
gtatccaagttgtagtaggtatgac

SEQ ID NO: 135089 - DNA, 25 bp, Probe sequence
gtagcgatttacttcttcttattca

SEQ ID NO: 135090 - DNA, 25 bp, Probe sequence
gtcgttgtaggtattactgagccat

SEQ ID NO: 135091 - DNA, 25 bp, Probe sequence
gtgcttggctttgcgacattattta

SEQ ID NO: 135092 - DNA, 25 bp, Probe sequence
gggatagtgcttggctttgcgacat

SEQ ID NO: 135093 - DNA, 25 bp, Probe sequence
ggtggctgggttatttttacgcata

SEQ ID NO: 135094 - DNA, 25 bp, Probe sequence
ggccaactgttcagcacggtattgg

SEQ ID NO: 135095 - DNA, 25 bp, Probe sequence
tgtacctggtttaaaatcaattgca

SEQ ID NO: 135096 - DNA, 25 bp, Probe sequence
tagactttatttcaacaaactggtt

SEQ ID NO: 135097 - DNA, 25 bp, Probe sequence
ttgatattccattacctggacgtaa

SEQ ID NO: 135098 - DNA, 25 bp, Probe sequence
atgctattttattatcgttcattag

SEQ ID NO: 135099 - DNA, 25 bp, Probe sequence
atggtttcgaattgatgtttgataa

SEQ ID NO: 135100 - DNA, 25 bp, Probe sequence
agatgtcattgaggtagaatttttt

SEQ ID NO: 135101 - DNA, 25 bp, Probe sequence
agagaatgaacatgtcgaagttgaa

SEQ ID NO: 135102 - DNA, 25 bp, Probe sequence
accacgttatcgaaacatcaacaca

SEQ ID NO: 135103 - DNA, 25 bp, Probe sequence
acgttatcgaaacatcaacacaaca

SEQ ID NO: 135104 - DNA, 25 bp, Probe sequence
aaagctttataaattttctccagag

SEQ ID NO: 135105 - DNA, 25 bp, Probe sequence
aacaggtggcacccaaatgctattt

SEQ ID NO: 135106 - DNA, 25 bp, Probe sequence
aagatgactatcggtatgcctggac

SEQ ID NO: 135107 - DNA, 25 bp, Probe sequence
aattttctccagagttagtatacga

SEQ ID NO: 135108 - DNA, 25 bp, Probe sequence
catggtgcatggtttcgaattgatg

SEQ ID NO: 135109 - DNA, 25 bp, Probe sequence
ctatcggtatgcctggactaagtga

SEQ ID NO: 135110 - DNA, 25 bp, Probe sequence
ccaaatgctattttattatcgttca

SEQ ID NO: 135111 - DNA, 25 bp, Probe sequence
gctttataaattttctccagagtta

SEQ ID NO: 135112 - DNA, 25 bp, Probe sequence
gaatacgttaagatgactatcggta

SEQ ID NO: 135113 - DNA, 25 bp, Probe sequence
gaatctttagttatggatgaatacg

SEQ ID NO: 135114 - DNA, 25 bp, Probe sequence
gaaagacgatttactaatttagaat

SEQ ID NO: 135115 - DNA, 25 bp, Probe sequence
gactatcggtatgcctggactaagt

SEQ ID NO: 135116 - DNA, 25 bp, Probe sequence
gagttagtatacgaagcttggacaa

SEQ ID NO: 135117 - DNA, 25 bp, Probe sequence
gatgactatcggtatgcctggacta

SEQ ID NO: 135118 - DNA, 25 bp, Probe sequence
gatcaacaacgtaatggcaaagtaa

SEQ ID NO: 135119 - DNA, 25 bp, Probe sequence
gtagatcaacaacgtaatggcaaag

SEQ ID NO: 135120 - DNA, 25 bp, Probe sequence
ggtggcacccaaatgctattttatt

SEQ ID NO: 135121 - DNA, 25 bp, Probe sequence
ggtgcatggtttcgaattgatgttt

SEQ ID NO: 135122 - DNA, 25 bp, Probe sequence
tgtaccacgttatcgaaacatcaac

SEQ ID NO: 135123 - DNA, 25 bp, Probe sequence
ggcacccaaatgctattttattatc

SEQ ID NO: 135124 - DNA, 25 bp, Probe sequence
tgaacgtgaaacaggtggcacccaa

SEQ ID NO: 135125 - DNA, 25 bp, Probe sequence
tgaggtagaattttttgaacgtgaa

SEQ ID NO: 135126 - DNA, 25 bp, Probe sequence
tcggtatgcctggactaagtgaaac

SEQ ID NO: 135127 - DNA, 25 bp, Probe sequence
tctccagagttagtatacgaagctt

SEQ ID NO: 135128 - DNA, 25 bp, Probe sequence
tatcgtattgtagatcaacaacgta

SEQ ID NO: 135129 - DNA, 25 bp, Probe sequence
tatcgaaacatcaacacaacaataa

SEQ ID NO: 135130 - DNA, 25 bp, Probe sequence
tattttattatcgttcattagttga

SEQ ID NO: 135131 - DNA, 25 bp, Probe sequence
ttagtatacgaagcttggacaaaga

SEQ ID NO: 135132 - DNA, 25 bp, Probe sequence
atctctattattatgtcaggtcctt

SEQ ID NO: 135133 - DNA, 25 bp, Probe sequence
atgtcaggtcctttagctaaaaata

SEQ ID NO: 135134 - DNA, 25 bp, Probe sequence
atgggtggcgtaaagtcgacagtta

SEQ ID NO: 135135 - DNA, 25 bp, Probe sequence
atggtggtattgaatggttgttgca

SEQ ID NO: 135136 - DNA, 25 bp, Probe sequence
acgaatggcatttctttaaatcatg

SEQ ID NO: 135137 - DNA, 25 bp, Probe sequence
actgttgctgcaatagcacctgttg

SEQ ID NO: 135138 - DNA, 25 bp, Probe sequence
actagatgcagtgtccaaaggtatt

SEQ ID NO: 135139 - DNA, 25 bp, Probe sequence
aaagtgaaatcaaagcgtggcgcag

SEQ ID NO: 135140 - DNA, 25 bp, Probe sequence
aagcgtggcgcagaattaggaattg

SEQ ID NO: 135141 - DNA, 25 bp, Probe sequence
aatggctacagttgttggaggtgca

SEQ ID NO: 135142 - DNA, 25 bp, Probe sequence
aattgctgcggttagaacacaacat

SEQ ID NO: 135143 - DNA, 25 bp, Probe sequence
gcccgcaagtcatttcagcggctgg

SEQ ID NO: 135144 - DNA, 25 bp, Probe sequence
gcgacagatgtaccaactgcgctag

SEQ ID NO: 135145 - DNA, 25 bp, Probe sequence
gcggctggtgtagctggtatttcac

SEQ ID NO: 135146 - DNA, 25 bp, Probe sequence
gcaggtgcattttcaaatacagctg

SEQ ID NO: 135147 - DNA, 25 bp, Probe sequence
gcacctgttggttacggatttgcac

SEQ ID NO: 135148 - DNA, 25 bp, Probe sequence
gaatcattggtctcatagatggttc

SEQ ID NO: 135149 - DNA, 25 bp, Probe sequence
gaaaggtgcaggccattcaaacatt

SEQ ID NO: 135150 - DNA, 25 bp, Probe sequence
gaggctgcttccaaggtttattacc

SEQ ID NO: 135151 - DNA, 25 bp, Probe sequence
gatgttgatttttattttagcaggt

SEQ ID NO: 135152 - DNA, 25 bp, Probe sequence
gttacggatttgcacaagcgacaga

SEQ ID NO: 135153 - DNA, 25 bp, Probe sequence
gtttattaccatatagcccgcaagt

SEQ ID NO: 135154 - DNA, 25 bp, Probe sequence
gtattgccaggtgctattttaacga

SEQ ID NO: 135155 - DNA, 25 bp, Probe sequence
gtatgtttgtttctatatctatggg

SEQ ID NO: 135156 - DNA, 25 bp, Probe sequence
gtgtcgcagatattgccacggcaaa

SEQ ID NO: 135157 - DNA, 25 bp, Probe sequence
ggttgttgcaatttgttcgctctaa

SEQ ID NO: 135158 - DNA, 25 bp, Probe sequence
ggattgtttgtgatttgtatgtttg

SEQ ID NO: 135159 - DNA, 25 bp, Probe sequence
ggaggtgcaatgttcggcgataatc

SEQ ID NO: 135160 - DNA, 25 bp, Probe sequence
ggcaaacaacaccatctctattatt

SEQ ID NO: 135161 - DNA, 25 bp, Probe sequence
tggtggtttagtcggtattattcaa

SEQ ID NO: 135162 - DNA, 25 bp, Probe sequence
tcttgatatatttggaggctgcttc

SEQ ID NO: 135163 - DNA, 25 bp, Probe sequence
taccaactgcgctagcaatggctac

SEQ ID NO: 135164 - DNA, 25 bp, Probe sequence
tatcgtattgattggcggaacatta

SEQ ID NO: 135165 - DNA, 25 bp, Probe sequence
tttaggactatcattaatcccagaa

SEQ ID NO: 135166 - DNA, 25 bp, Probe sequence
attacagtagcaatgattgtttatg

SEQ ID NO: 135167 - DNA, 25 bp, Probe sequence
attagcattattgttttgattatta

SEQ ID NO: 135168 - DNA, 25 bp, Probe sequence
attagtaagtgtgtctatcgtgttc

SEQ ID NO: 135169 - DNA, 25 bp, Probe sequence
atgatgttttaccaattattatatt

SEQ ID NO: 135170 - DNA, 25 bp, Probe sequence
atggcattaatagtatctagagcta

SEQ ID NO: 135171 - DNA, 25 bp, Probe sequence
agggagctatgatgttttaccaatt

SEQ ID NO: 135172 - DNA, 25 bp, Probe sequence
agtgtgtctatcgtgttcattttta

SEQ ID NO: 135173 - DNA, 25 bp, Probe sequence
agtaagtgtgtctatcgtgttcatt

SEQ ID NO: 135174 - DNA, 25 bp, Probe sequence
agcattattgttttgattattatta

SEQ ID NO: 135175 - DNA, 25 bp, Probe sequence
aagtgtgtctatcgtgttcattttt

SEQ ID NO: 135176 - DNA, 25 bp, Probe sequence
aatagcgactgtttttcctgaacaa

SEQ ID NO: 135177 - DNA, 25 bp, Probe sequence
cagcaatttaaagtcatatcattaa

SEQ ID NO: 135178 - DNA, 25 bp, Probe sequence
cagggttactttacattggatttgt

SEQ ID NO: 135179 - DNA, 25 bp, Probe sequence
ctcagggttactttacattggattt

SEQ ID NO: 135180 - DNA, 25 bp, Probe sequence
gctatgatgttttaccaattattat

SEQ ID NO: 135181 - DNA, 25 bp, Probe sequence
gaatagcgactgtttttcctgaaca

SEQ ID NO: 135182 - DNA, 25 bp, Probe sequence
gttttaccaattattatatttgcaa

SEQ ID NO: 135183 - DNA, 25 bp, Probe sequence
gtatcgtattggttcaaatattaga

SEQ ID NO: 135184 - DNA, 25 bp, Probe sequence
gtaagtgtgtctatcgtgttcattt

SEQ ID NO: 135185 - DNA, 25 bp, Probe sequence
gtctcagggttactttacattggat

SEQ ID NO: 135186 - DNA, 25 bp, Probe sequence
ggttactttacattggatttgtaat

SEQ ID NO: 135187 - DNA, 25 bp, Probe sequence
ggatttgtaatttatacattaacta

SEQ ID NO: 135188 - DNA, 25 bp, Probe sequence
ggaatagcgactgtttttcctgaac

SEQ ID NO: 135189 - DNA, 25 bp, Probe sequence
ggagctatgatgttttaccaattat

SEQ ID NO: 135190 - DNA, 25 bp, Probe sequence
tgcattaatgcttaaatggtggctt

SEQ ID NO: 135191 - DNA, 25 bp, Probe sequence
taagtatcgtattggttcaaatatt

SEQ ID NO: 135192 - DNA, 25 bp, Probe sequence
taagtgtgtctatcgtgttcatttt

SEQ ID NO: 135193 - DNA, 25 bp, Probe sequence
tagcgactgtttttcctgaacaaaa

SEQ ID NO: 135194 - DNA, 25 bp, Probe sequence
tatacattaactatagggagctatg

SEQ ID NO: 135195 - DNA, 25 bp, Probe sequence
tatagggagctatgatgttttacca

SEQ ID NO: 135196 - DNA, 25 bp, Probe sequence
tattagaaaatatactgggaatcag

SEQ ID NO: 135197 - DNA, 25 bp, Probe sequence
tatttttgattttagcattagcttt

SEQ ID NO: 135198 - DNA, 25 bp, Probe sequence
ttatatttgcaataagtatcgtatt

SEQ ID NO: 135199 - DNA, 25 bp, Probe sequence
ttttgattattattacagtagcaat

SEQ ID NO: 135200 - DNA, 25 bp, Probe sequence
attcttcatgattatgccgcttcaa

SEQ ID NO: 135201 - DNA, 25 bp, Probe sequence
attcatggatttacaactgaggcat

SEQ ID NO: 135202 - DNA, 25 bp, Probe sequence
atttgaaacgaatgtctatccgcta

SEQ ID NO: 135203 - DNA, 25 bp, Probe sequence
atcaacgcttacaaggctataaaat

SEQ ID NO: 135204 - DNA, 25 bp, Probe sequence
atcctagtcctattcttcatgatta

SEQ ID NO: 135205 - DNA, 25 bp, Probe sequence
aacgaatgtctatccgctattttgg

SEQ ID NO: 135206 - DNA, 25 bp, Probe sequence
aagatgcacaagaagtacgccaagt

SEQ ID NO: 135207 - DNA, 25 bp, Probe sequence
aaggaattagagtgaactgtgtagc

SEQ ID NO: 135208 - DNA, 25 bp, Probe sequence
caattgcgtatgctaaagaaggtgc

SEQ ID NO: 135209 - DNA, 25 bp, Probe sequence
caagaggtaccgggtttacaatctg

SEQ ID NO: 135210 - DNA, 25 bp, Probe sequence
ctcaagatcctagaacaaaatttaa

SEQ ID NO: 135211 - DNA, 25 bp, Probe sequence
gcgattaactatcttccgagtgaag

SEQ ID NO: 135212 - DNA, 25 bp, Probe sequence
gcatatcaacaattaggtggcttag

SEQ ID NO: 135213 - DNA, 25 bp, Probe sequence
gcagtgttaattcctggtgatataa

SEQ ID NO: 135214 - DNA, 25 bp, Probe sequence
gcagcaattatttcattaactaaaa

SEQ ID NO: 135215 - DNA, 25 bp, Probe sequence
gaaggtgcagatgtagcgattaact

SEQ ID NO: 135216 - DNA, 25 bp, Probe sequence
gaaagtggtcaaaaggcagtgttaa

SEQ ID NO: 135217 - DNA, 25 bp, Probe sequence
gatgatattcatggatttacaactg

SEQ ID NO: 135218 - DNA, 25 bp, Probe sequence
gattgtggcgaaacgtcttaccaag

SEQ ID NO: 135219 - DNA, 25 bp, Probe sequence
gtagcgattaactatcttccgagtg

SEQ ID NO: 135220 - DNA, 25 bp, Probe sequence
gtctatccgctattttggacagttc

SEQ ID NO: 135221 - DNA, 25 bp, Probe sequence
gtcctattcttcatgattatgccgc

SEQ ID NO: 135222 - DNA, 25 bp, Probe sequence
gtgactcagcaatagggcgtgcagc

SEQ ID NO: 135223 - DNA, 25 bp, Probe sequence
ggtaccgggtttacaatctgaaatg

SEQ ID NO: 135224 - DNA, 25 bp, Probe sequence
ggtggcttagataatgttactttag

SEQ ID NO: 135225 - DNA, 25 bp, Probe sequence
ggcgtgcagcagcaattgcgtatgc

SEQ ID NO: 135226 - DNA, 25 bp, Probe sequence
tgttactttagttgctggacatcaa

SEQ ID NO: 135227 - DNA, 25 bp, Probe sequence
tcacaggtggtgactcagcaatagg

SEQ ID NO: 135228 - DNA, 25 bp, Probe sequence
tcaactatgaccttgttgaacaagc

SEQ ID NO: 135229 - DNA, 25 bp, Probe sequence
tacaatctgaaatgacgccagcacc

SEQ ID NO: 135230 - DNA, 25 bp, Probe sequence
tagggcgtgcagcagcaattgcgta

SEQ ID NO: 135231 - DNA, 25 bp, Probe sequence
tatgccgcttcaaaagcagcaatta

SEQ ID NO: 135232 - DNA, 25 bp, Probe sequence
tatccgctattttggacagttcaaa

SEQ ID NO: 135233 - DNA, 25 bp, Probe sequence
ttgctggacatcaacagtatcatga

SEQ ID NO: 135234 - DNA, 25 bp, Probe sequence
atttacctggcgctgtgatgaatga

SEQ ID NO: 135235 - DNA, 25 bp, Probe sequence
atttgcgttaattggttctcatagt

SEQ ID NO: 135236 - DNA, 25 bp, Probe sequence
atagctgttcgggctgacattgatg

SEQ ID NO: 135237 - DNA, 25 bp, Probe sequence
agtagaaatctatctgcgtttgatg

SEQ ID NO: 135238 - DNA, 25 bp, Probe sequence
agtacctgagtattttgttgaattt

SEQ ID NO: 135239 - DNA, 25 bp, Probe sequence
agaactaggacatggcgcttttaaa

SEQ ID NO: 135240 - DNA, 25 bp, Probe sequence
agccagaacaatgcaacgatccagt

SEQ ID NO: 135241 - DNA, 25 bp, Probe sequence
acgatccagttattgtgttggcgca

SEQ ID NO: 135242 - DNA, 25 bp, Probe sequence
acattttccaagtgtatttgcgtta

SEQ ID NO: 135243 - DNA, 25 bp, Probe sequence
aaacaggggcaattacatcagcagt

SEQ ID NO: 135244 - DNA, 25 bp, Probe sequence
aatgatggaacagccgcttacgatt

SEQ ID NO: 135245 - DNA, 25 bp, Probe sequence
aattgagggcactcttactgggcgt

SEQ ID NO: 135246 - DNA, 25 bp, Probe sequence
aatagtattcaatccatagttagta

SEQ ID NO: 135247 - DNA, 25 bp, Probe sequence
cacgattacaagatattgcggacgg

SEQ ID NO: 135248 - DNA, 25 bp, Probe sequence
cagtgcgtagttttgatcctgtggt

SEQ ID NO: 135249 - DNA, 25 bp, Probe sequence
cctggagaaggtattttcatcaatt

SEQ ID NO: 135250 - DNA, 25 bp, Probe sequence
gcgtatgtacaaggcacagtgcgta

SEQ ID NO: 135251 - DNA, 25 bp, Probe sequence
gaagcggtagtaacaattggacaaa

SEQ ID NO: 135252 - DNA, 25 bp, Probe sequence
gatgaggcattgacgcataaagcaa

SEQ ID NO: 135253 - DNA, 25 bp, Probe sequence
gtctgagttgtatagctgttcgggc

SEQ ID NO: 135254 - DNA, 25 bp, Probe sequence
gtacaagcagtattgggttttcata

SEQ ID NO: 135255 - DNA, 25 bp, Probe sequence
gtcattgctgatcatgcgtatgtac

SEQ ID NO: 135256 - DNA, 25 bp, Probe sequence
gtgttggcgcaattgattaatagta

SEQ ID NO: 135257 - DNA, 25 bp, Probe sequence
gggttttcataatgacccatcgcgt

SEQ ID NO: 135258 - DNA, 25 bp, Probe sequence
ggtggtcatgctgcaaagccagaac

SEQ ID NO: 135259 - DNA, 25 bp, Probe sequence
ggtaatacttggaatgtcattgctg

SEQ ID NO: 135260 - DNA, 25 bp, Probe sequence
ggaacagccgcttacgattggagaa

SEQ ID NO: 135261 - DNA, 25 bp, Probe sequence
tctgcgtttgatgaagcggtagtaa

SEQ ID NO: 135262 - DNA, 25 bp, Probe sequence
tcatcaatttccagaactatccgat

SEQ ID NO: 135263 - DNA, 25 bp, Probe sequence
taaaggcgtgggtggtcatgctgca

SEQ ID NO: 135264 - DNA, 25 bp, Probe sequence
tactgggcgtgttaaattcattttt

SEQ ID NO: 135265 - DNA, 25 bp, Probe sequence
ttcacatggctagtattttggctac

SEQ ID NO: 135266 - DNA, 25 bp, Probe sequence
ttcgggctgacattgatgctttacc

SEQ ID NO: 135267 - DNA, 25 bp, Probe sequence
ttcaggttatagtcaacattttcca

SEQ ID NO: 135268 - DNA, 25 bp, Probe sequence
atcaacagataaacctttgaagggt

SEQ ID NO: 135269 - DNA, 25 bp, Probe sequence
atcattttggtatcaatcacgcaga

SEQ ID NO: 135270 - DNA, 25 bp, Probe sequence
atgctgtacctaaagaggcaagttc

SEQ ID NO: 135271 - DNA, 25 bp, Probe sequence
agtgatactgtagctgtcctcttac

SEQ ID NO: 135272 - DNA, 25 bp, Probe sequence
agatggcaaaattgtatatgctgga

SEQ ID NO: 135273 - DNA, 25 bp, Probe sequence
agcagagcatgatttgcttactatg

SEQ ID NO: 135274 - DNA, 25 bp, Probe sequence
agccaaagaagcaggttttaaagtg

SEQ ID NO: 135275 - DNA, 25 bp, Probe sequence
acatccgaagatgacttgtttaaaa

SEQ ID NO: 135276 - DNA, 25 bp, Probe sequence
aaatgattgcgttacttccggaagt

SEQ ID NO: 135277 - DNA, 25 bp, Probe sequence
aacacaggtgataaggctaatttag

SEQ ID NO: 135278 - DNA, 25 bp, Probe sequence
aacatttggtggatctcgagaacat

SEQ ID NO: 135279 - DNA, 25 bp, Probe sequence
aacgcgggtacaattaacacaggtg

SEQ ID NO: 135280 - DNA, 25 bp, Probe sequence
catacccatttaacatttggtggat

SEQ ID NO: 135281 - DNA, 25 bp, Probe sequence
ctagggcctcatgctgtacctaaag

SEQ ID NO: 135282 - DNA, 25 bp, Probe sequence
gcttactatgattaaacacggcgtg

SEQ ID NO: 135283 - DNA, 25 bp, Probe sequence
gaagcaattgaaagtgtctaatcgt

SEQ ID NO: 135284 - DNA, 25 bp, Probe sequence
gaaagtgtctaatcgtttagctgag

SEQ ID NO: 135285 - DNA, 25 bp, Probe sequence
gacggtaaggtcatcgtagataaca

SEQ ID NO: 135286 - DNA, 25 bp, Probe sequence
gagatgtcattaaaacgtcaaggta

SEQ ID NO: 135287 - DNA, 25 bp, Probe sequence
gaggcaagttcaaatgaggcatttt

SEQ ID NO: 135288 - DNA, 25 bp, Probe sequence
gggatgcaccaaatcatgaatatat

SEQ ID NO: 135289 - DNA, 25 bp, Probe sequence
gggtggtggcatattatctaccgtt

SEQ ID NO: 135290 - DNA, 25 bp, Probe sequence
ggtaagtcttaccttgaaatattag

SEQ ID NO: 135291 - DNA, 25 bp, Probe sequence
ggtacagttgtcattaaagatggca

SEQ ID NO: 135292 - DNA, 25 bp, Probe sequence
ggtatcaatcacgcagaaaaagtta

SEQ ID NO: 135293 - DNA, 25 bp, Probe sequence
ggatctcgagaacatgagatgtcat

SEQ ID NO: 135294 - DNA, 25 bp, Probe sequence
ggcgtgcttgcagttgaaagtaaga

SEQ ID NO: 135295 - DNA, 25 bp, Probe sequence
tgaaacatactttcctagggcctca

SEQ ID NO: 135296 - DNA, 25 bp, Probe sequence
tgctactagagaaacatccgaagat

SEQ ID NO: 135297 - DNA, 25 bp, Probe sequence
taatttagtaatttgggatgcacca

SEQ ID NO: 135298 - DNA, 25 bp, Probe sequence
taaacacggcgtgcttgcagttgaa

SEQ ID NO: 135299 - DNA, 25 bp, Probe sequence
taggcggactggaattagcaattga

SEQ ID NO: 135300 - DNA, 25 bp, Probe sequence
tattatctaccgttaatgctactag

SEQ ID NO: 135301 - DNA, 25 bp, Probe sequence
ttctgtgaaacaggtgtatttacaa

SEQ ID NO: 135302 - DNA, 25 bp, Probe sequence
attggttctcaaggtattgtgcaag

SEQ ID NO: 135303 - DNA, 25 bp, Probe sequence
agtacaatcaggaaagccagttgct

SEQ ID NO: 135304 - DNA, 25 bp, Probe sequence
accagcttacattagaccattattc

SEQ ID NO: 135305 - DNA, 25 bp, Probe sequence
aaatcgtcttgtacgtgacggtgaa

SEQ ID NO: 135306 - DNA, 25 bp, Probe sequence
aacaatattcgtcaagtagccttca

SEQ ID NO: 135307 - DNA, 25 bp, Probe sequence
aagcgccacgtgtattaatttcaaa

SEQ ID NO: 135308 - DNA, 25 bp, Probe sequence
aagatatcgagcgtgcggatgaaga

SEQ ID NO: 135309 - DNA, 25 bp, Probe sequence
caaggactaccatcacgtattgctt

SEQ ID NO: 135310 - DNA, 25 bp, Probe sequence
aatgggcttagctttaaatcgtctt

SEQ ID NO: 135311 - DNA, 25 bp, Probe sequence
aatcgggttagttggaaatgctgta

SEQ ID NO: 135312 - DNA, 25 bp, Probe sequence
caagtagccttcaataacggagtga

SEQ ID NO: 135313 - DNA, 25 bp, Probe sequence
cgtattgcttggttaggctatggag

SEQ ID NO: 135314 - DNA, 25 bp, Probe sequence
cgacatgttgatgctggctatgaca

SEQ ID NO: 135315 - DNA, 25 bp, Probe sequence
ccaggctttgtaccagcttacatta

SEQ ID NO: 135316 - DNA, 25 bp, Probe sequence
gcctgaatgggcaaactgggatcat

SEQ ID NO: 135317 - DNA, 25 bp, Probe sequence
gcgcaaccgttagcaattactatga

SEQ ID NO: 135318 - DNA, 25 bp, Probe sequence
gctgcaggtggttcatggatttcat

SEQ ID NO: 135319 - DNA, 25 bp, Probe sequence
gcaggcactgttacactgacagcag

SEQ ID NO: 135320 - DNA, 25 bp, Probe sequence
gtatgggtggtgcgcaaccgttagc

SEQ ID NO: 135321 - DNA, 25 bp, Probe sequence
gaactgtcacaagcttcaatggcaa

SEQ ID NO: 135322 - DNA, 25 bp, Probe sequence
gacagcaggtttaggtggtatgggt

SEQ ID NO: 135323 - DNA, 25 bp, Probe sequence
gacgagaccatttagatgctggttc

SEQ ID NO: 135324 - DNA, 25 bp, Probe sequence
gagctaggtaatcaacactttaatg

SEQ ID NO: 135325 - DNA, 25 bp, Probe sequence
gaccaaacaagtgcacatgatccgc

SEQ ID NO: 135326 - DNA, 25 bp, Probe sequence
gatccgctaaatggatatgtgccac

SEQ ID NO: 135327 - DNA, 25 bp, Probe sequence
gattgggctgtattgaatgcactca

SEQ ID NO: 135328 - DNA, 25 bp, Probe sequence
gtagcagatggatcagagcgtgctg

SEQ ID NO: 135329 - DNA, 25 bp, Probe sequence
gtgacgcggttggtgattgggctgt

SEQ ID NO: 135330 - DNA, 25 bp, Probe sequence
gtggcggtgttggcatgggatattc

SEQ ID NO: 135331 - DNA, 25 bp, Probe sequence
ggtgaaatttcagcaccaattgtta

SEQ ID NO: 135332 - DNA, 25 bp, Probe sequence
tggacagatgacagccggtagttgg

SEQ ID NO: 135333 - DNA, 25 bp, Probe sequence
tgggatattcacttcatgcgggtat

SEQ ID NO: 135334 - DNA, 25 bp, Probe sequence
taatggagatttagcaggcactgtt

SEQ ID NO: 135335 - DNA, 25 bp, Probe sequence
taaaacacatgaagaagcgccacgt

SEQ ID NO: 135336 - DNA, 25 bp, Probe sequence
attccaagtgataaggtgtcttcag

SEQ ID NO: 135337 - DNA, 25 bp, Probe sequence
atttagtgcatcattttttaaaata

SEQ ID NO: 135338 - DNA, 25 bp, Probe sequence
atgtttacgatttgtatggatgtca

SEQ ID NO: 135339 - DNA, 25 bp, Probe sequence
aggtttgtatccacatactgttctt

SEQ ID NO: 135340 - DNA, 25 bp, Probe sequence
aggggcgcattggtgcaaaagaagg

SEQ ID NO: 135341 - DNA, 25 bp, Probe sequence
agctcgttgctaatttagtgcatca

SEQ ID NO: 135342 - DNA, 25 bp, Probe sequence
acgcaaagtttatttgattatgcta

SEQ ID NO: 135343 - DNA, 25 bp, Probe sequence
aacaagcatttgcaggtttgccgga

SEQ ID NO: 135344 - DNA, 25 bp, Probe sequence
cagatgcgattaaacaagcatttgc

SEQ ID NO: 135345 - DNA, 25 bp, Probe sequence
catatgacgctgacaatagaactgc

SEQ ID NO: 135346 - DNA, 25 bp, Probe sequence
gcatttgcaggtttgccggatttga

SEQ ID NO: 135347 - DNA, 25 bp, Probe sequence
gcagtgttaggtttgtatccacata

SEQ ID NO: 135348 - DNA, 25 bp, Probe sequence
gcaaaacgtattattccaagtgata

SEQ ID NO: 135349 - DNA, 25 bp, Probe sequence
gaatcaatgtgaaactttagtcgat

SEQ ID NO: 135350 - DNA, 25 bp, Probe sequence
gaatccaacatatgacgctgacaat

SEQ ID NO: 135351 - DNA, 25 bp, Probe sequence
gaaactttagtcgattacggaaatg

SEQ ID NO: 135352 - DNA, 25 bp, Probe sequence
gattgattatgtctttgcagatgaa

SEQ ID NO: 135353 - DNA, 25 bp, Probe sequence
gtattgctgagatgaatccaacata

SEQ ID NO: 135354 - DNA, 25 bp, Probe sequence
gtcgattacggaaatgtttatcatg

SEQ ID NO: 135355 - DNA, 25 bp, Probe sequence
gtgtacaagcaaggtgaaccaaatt

SEQ ID NO: 135356 - DNA, 25 bp, Probe sequence
ggtgttgctttaaacaaggggcgca

SEQ ID NO: 135357 - DNA, 25 bp, Probe sequence
ggtgaaccaaatttatggactggaa

SEQ ID NO: 135358 - DNA, 25 bp, Probe sequence
ggtgtcttcagttagtattgctgag

SEQ ID NO: 135359 - DNA, 25 bp, Probe sequence
ggtatattaggctatgctgttgaca

SEQ ID NO: 135360 - DNA, 25 bp, Probe sequence
ggtttgccggatttgaatcaatgtg

SEQ ID NO: 135361 - DNA, 25 bp, Probe sequence
tgtatccacatactgttcttgaatt

SEQ ID NO: 135362 - DNA, 25 bp, Probe sequence
taaggtgtcttcagttagtattgct

SEQ ID NO: 135363 - DNA, 25 bp, Probe sequence
tagatagtgaaacagacccgaaaaa

SEQ ID NO: 135364 - DNA, 25 bp, Probe sequence
taggctatgctgttgacaaaggtgt

SEQ ID NO: 135365 - DNA, 25 bp, Probe sequence
tatggactggaaggttagatagtga

SEQ ID NO: 135366 - DNA, 25 bp, Probe sequence
tatgctgttgacaaaggtgttgctt

SEQ ID NO: 135367 - DNA, 25 bp, Probe sequence
tttgtatggatgtcattgatagtgc

SEQ ID NO: 135368 - DNA, 25 bp, Probe sequence
ttaaacaaggggcgcattggtgcaa

SEQ ID NO: 135369 - DNA, 25 bp, Probe sequence
ttgcaggtttgccggatttgaatca

SEQ ID NO: 135370 - DNA, 25 bp, Probe sequence
attacaggtgtatgcacttctaata

SEQ ID NO: 135371 - DNA, 25 bp, Probe sequence
agaggtggataaatttaactggtat

SEQ ID NO: 135372 - DNA, 25 bp, Probe sequence
aaagcactcaagttaatgacattaa

SEQ ID NO: 135373 - DNA, 25 bp, Probe sequence
aagatgtcgcatttataactgataa

SEQ ID NO: 135374 - DNA, 25 bp, Probe sequence
aatcaatggtgacatgacgctggga

SEQ ID NO: 135375 - DNA, 25 bp, Probe sequence
cttacctcaaatggcgcaactaatt

SEQ ID NO: 135376 - DNA, 25 bp, Probe sequence
cgttttgttgtggttgtcgatgaaa

SEQ ID NO: 135377 - DNA, 25 bp, Probe sequence
gaattgacccatataagttccatga

SEQ ID NO: 135378 - DNA, 25 bp, Probe sequence
gaattactcttacctcaaatggcgc

SEQ ID NO: 135379 - DNA, 25 bp, Probe sequence
gaacgtggttacaatattacaggtg

SEQ ID NO: 135380 - DNA, 25 bp, Probe sequence
gaaagatgtcaaagcactcaagtta

SEQ ID NO: 135381 - DNA, 25 bp, Probe sequence
gacttagcaattgatggtgctgatg

SEQ ID NO: 135382 - DNA, 25 bp, Probe sequence
gacgctgggaattggtacaggaagt

SEQ ID NO: 135383 - DNA, 25 bp, Probe sequence
gacccatataagttccatgagtatt

SEQ ID NO: 135384 - DNA, 25 bp, Probe sequence
gagacgtttaagttaccagtagagg

SEQ ID NO: 135385 - DNA, 25 bp, Probe sequence
gagtatttaattcatctgacaggtg

SEQ ID NO: 135386 - DNA, 25 bp, Probe sequence
gatgttttaagtcaaatcaatggtg

SEQ ID NO: 135387 - DNA, 25 bp, Probe sequence
gatgttgatcatatcgacttagcaa

SEQ ID NO: 135388 - DNA, 25 bp, Probe sequence
gatatggcagatcaagttattgtag

SEQ ID NO: 135389 - DNA, 25 bp, Probe sequence
gttgtggttgtcgatgaaacgaaaa

SEQ ID NO: 135390 - DNA, 25 bp, Probe sequence
gttcaatacttaggtgagacgttta

SEQ ID NO: 135391 - DNA, 25 bp, Probe sequence
gttaccaaaaggaattgacccatat

SEQ ID NO: 135392 - DNA, 25 bp, Probe sequence
gtagatccatctttaaatataatta

SEQ ID NO: 135393 - DNA, 25 bp, Probe sequence
gtaaaattgaatcatacgctgatat

SEQ ID NO: 135394 - DNA, 25 bp, Probe sequence
gtgacatgacgctgggaattggtac

SEQ ID NO: 135395 - DNA, 25 bp, Probe sequence
gtgtaaacgaagatgtcgcatttat

SEQ ID NO: 135396 - DNA, 25 bp, Probe sequence
ggtggtgcgctgttcagagagaaag

SEQ ID NO: 135397 - DNA, 25 bp, Probe sequence
ggtgtatgcacttctaataaaattg

SEQ ID NO: 135398 - DNA, 25 bp, Probe sequence
ggtgctgatgaagtagatccatctt

SEQ ID NO: 135399 - DNA, 25 bp, Probe sequence
ggcgcaactaattaaagaacgtggt

SEQ ID NO: 135400 - DNA, 25 bp, Probe sequence
tcatctgacaggtgtgtttgagaca

SEQ ID NO: 135401 - DNA, 25 bp, Probe sequence
tacaatggaattactcttacctcaa

SEQ ID NO: 135402 - DNA, 25 bp, Probe sequence
tacttcttagatatggcagatcaag

SEQ ID NO: 135403 - DNA, 25 bp, Probe sequence
tactcttacctcaaatggcgcaact

SEQ ID NO: 135404 - DNA, 25 bp, Probe sequence
attttagtagtatgtggccacggtt

SEQ ID NO: 135405 - DNA, 25 bp, Probe sequence
atggctgacttgtttatttgtggta

SEQ ID NO: 135406 - DNA, 25 bp, Probe sequence
aaaagctctcagaaaaattacaaca

SEQ ID NO: 135407 - DNA, 25 bp, Probe sequence
aacttaatgcaccatctgatatcga

SEQ ID NO: 135408 - DNA, 25 bp, Probe sequence
aatgcaccatctgatatcgaagttg

SEQ ID NO: 135409 - DNA, 25 bp, Probe sequence
aattacaacaacttaacatgattta

SEQ ID NO: 135410 - DNA, 25 bp, Probe sequence
cagagatggctgacttgtttatttg

SEQ ID NO: 135411 - DNA, 25 bp, Probe sequence
catctgatatcgaagttgaacatag

SEQ ID NO: 135412 - DNA, 25 bp, Probe sequence
cttaatgcaccatctgatatcgaag

SEQ ID NO: 135413 - DNA, 25 bp, Probe sequence
cttaggcaacttaatgcaccatctg

SEQ ID NO: 135414 - DNA, 25 bp, Probe sequence
ctaggggatgtcttagttcttgata

SEQ ID NO: 135415 - DNA, 25 bp, Probe sequence
gcaccatctgatatcgaagttgaac

SEQ ID NO: 135416 - DNA, 25 bp, Probe sequence
gcaacttaatgcaccatctgatatc

SEQ ID NO: 135417 - DNA, 25 bp, Probe sequence
gaattacaacaaaagctctcagaaa

SEQ ID NO: 135418 - DNA, 25 bp, Probe sequence
gaaaattttagtagtatgtggccac

SEQ ID NO: 135419 - DNA, 25 bp, Probe sequence
gacagcaagtccagagatggctgac

SEQ ID NO: 135420 - DNA, 25 bp, Probe sequence
gacattatgacagcaagtccagaga

SEQ ID NO: 135421 - DNA, 25 bp, Probe sequence
gacttgtttatttgtggtagagatt

SEQ ID NO: 135422 - DNA, 25 bp, Probe sequence
gagatggctgacttgtttatttgtg

SEQ ID NO: 135423 - DNA, 25 bp, Probe sequence
gagatttagctgaaaatgccgaacg

SEQ ID NO: 135424 - DNA, 25 bp, Probe sequence
gatggctgacttgtttatttgtggt

SEQ ID NO: 135425 - DNA, 25 bp, Probe sequence
gtatgtggccacggtttaggaagta

SEQ ID NO: 135426 - DNA, 25 bp, Probe sequence
gtagtatgtggccacggtttaggaa

SEQ ID NO: 135427 - DNA, 25 bp, Probe sequence
gtcttagttcttgataatattttag

SEQ ID NO: 135428 - DNA, 25 bp, Probe sequence
gtccagagatggctgacttgtttat

SEQ ID NO: 135429 - DNA, 25 bp, Probe sequence
ggggatgtcttagttcttgataata

SEQ ID NO: 135430 - DNA, 25 bp, Probe sequence
ggatgtcttagttcttgataatatt

SEQ ID NO: 135431 - DNA, 25 bp, Probe sequence
ggaagtagttttatggtagaaatga

SEQ ID NO: 135432 - DNA, 25 bp, Probe sequence
tgtggccacggtttaggaagtagtt

SEQ ID NO: 135433 - DNA, 25 bp, Probe sequence
ggctgacttgtttatttgtggtaga

SEQ ID NO: 135434 - DNA, 25 bp, Probe sequence
tagtagtatgtggccacggtttagg

SEQ ID NO: 135435 - DNA, 25 bp, Probe sequence
taggcaacttaatgcaccatctgat

SEQ ID NO: 135436 - DNA, 25 bp, Probe sequence
tatgacagcaagtccagagatggct

SEQ ID NO: 135437 - DNA, 25 bp, Probe sequence
tatttgtggtagagatttagctgaa

SEQ ID NO: 135438 - DNA, 25 bp, Probe sequence
ataggttatcaagaatcgtatcaaa

SEQ ID NO: 135439 - DNA, 25 bp, Probe sequence
atcggcatttatataatatttatgt

SEQ ID NO: 135440 - DNA, 25 bp, Probe sequence
atgattaaaagtatcggcatttata

SEQ ID NO: 135441 - DNA, 25 bp, Probe sequence
atgttatttggcggaattttgaata

SEQ ID NO: 135442 - DNA, 25 bp, Probe sequence
aggttatcaagaatcgtatcaaatg

SEQ ID NO: 135443 - DNA, 25 bp, Probe sequence
agtgacatcattaatatacagtttg

SEQ ID NO: 135444 - DNA, 25 bp, Probe sequence
agtatcggcatttatataatattta

SEQ ID NO: 135445 - DNA, 25 bp, Probe sequence
aaagtatcggcatttatataatatt

SEQ ID NO: 135446 - DNA, 25 bp, Probe sequence
aaaagtatcggcatttatataatat

SEQ ID NO: 135447 - DNA, 25 bp, Probe sequence
aagtatcggcatttatataatattt

SEQ ID NO: 135448 - DNA, 25 bp, Probe sequence
aagtgacatcattaatatacagttt

SEQ ID NO: 135449 - DNA, 25 bp, Probe sequence
aataggttatcaagaatcgtatcaa

SEQ ID NO: 135450 - DNA, 25 bp, Probe sequence
gaataggttatcaagaatcgtatca

SEQ ID NO: 135451 - DNA, 25 bp, Probe sequence
gaatcgtatcaaatgaagtgacatc

SEQ ID NO: 135452 - DNA, 25 bp, Probe sequence
gaagtgacatcattaatatacagtt

SEQ ID NO: 135453 - DNA, 25 bp, Probe sequence
gacatcattaatatacagtttgaaa

SEQ ID NO: 135454 - DNA, 25 bp, Probe sequence
gattaaaagtatcggcatttatata

SEQ ID NO: 135455 - DNA, 25 bp, Probe sequence
gttatcaagaatcgtatcaaatgaa

SEQ ID NO: 135456 - DNA, 25 bp, Probe sequence
gttatttggcggaattttgaatagg

SEQ ID NO: 135457 - DNA, 25 bp, Probe sequence
gtatcggcatttatataatatttat

SEQ ID NO: 135458 - DNA, 25 bp, Probe sequence
gtgacatcattaatatacagtttga

SEQ ID NO: 135459 - DNA, 25 bp, Probe sequence
ggttatcaagaatcgtatcaaatga

SEQ ID NO: 135460 - DNA, 25 bp, Probe sequence
ggcggaattttgaataggttatcaa

SEQ ID NO: 135461 - DNA, 25 bp, Probe sequence
tggcggaattttgaataggttatca

SEQ ID NO: 135462 - DNA, 25 bp, Probe sequence
tgacatcattaatatacagtttgaa

SEQ ID NO: 135463 - DNA, 25 bp, Probe sequence
tcggcatttatataatatttatgtt

SEQ ID NO: 135464 - DNA, 25 bp, Probe sequence
taggttatcaagaatcgtatcaaat

SEQ ID NO: 135465 - DNA, 25 bp, Probe sequence
tttggcggaattttgaataggttat

SEQ ID NO: 135466 - DNA, 25 bp, Probe sequence
tatgttatttggcggaattttgaat

SEQ ID NO: 135467 - DNA, 25 bp, Probe sequence
tatttggcggaattttgaataggtt

SEQ ID NO: 135468 - DNA, 25 bp, Probe sequence
tttatgttatttggcggaattttga

SEQ ID NO: 135469 - DNA, 25 bp, Probe sequence
ttatttggcggaattttgaataggt

SEQ ID NO: 135470 - DNA, 25 bp, Probe sequence
ttatgttatttggcggaattttgaa

SEQ ID NO: 135471 - DNA, 25 bp, Probe sequence
ttggcggaattttgaataggttatc

SEQ ID NO: 135472 - DNA, 25 bp, Probe sequence
ataaaccacattctggctttacatt

SEQ ID NO: 135473 - DNA, 25 bp, Probe sequence
atccttttaaatttggtgcttctat

SEQ ID NO: 135474 - DNA, 25 bp, Probe sequence
atgaatttatgttagaggtcgatac

SEQ ID NO: 135475 - DNA, 25 bp, Probe sequence
atgtcgttgataatcatcgcatttc

SEQ ID NO: 135476 - DNA, 25 bp, Probe sequence
aggaagatatagcggtagaattgat

SEQ ID NO: 135477 - DNA, 25 bp, Probe sequence
agcaccgtcaattttaaaagctggt

SEQ ID NO: 135478 - DNA, 25 bp, Probe sequence
acaacatgcgcaattaagccaacaa

SEQ ID NO: 135479 - DNA, 25 bp, Probe sequence
aaagctggtgaagtgttcaattcga

SEQ ID NO: 135480 - DNA, 25 bp, Probe sequence
aacaaatgacacgttttggtggtct

SEQ ID NO: 135481 - DNA, 25 bp, Probe sequence
aacacaatttttaccaaatgatatt

SEQ ID NO: 135482 - DNA, 25 bp, Probe sequence
aatcatcgcatttcaagtaatcaat

SEQ ID NO: 135483 - DNA, 25 bp, Probe sequence
cagcctgatgagtgggatagtccat

SEQ ID NO: 135484 - DNA, 25 bp, Probe sequence
gaattatggagcaagagtagtgtct

SEQ ID NO: 135485 - DNA, 25 bp, Probe sequence
gaagcagttgcatcagaagacacat

SEQ ID NO: 135486 - DNA, 25 bp, Probe sequence
gaacatcatttacatggtggatgtc

SEQ ID NO: 135487 - DNA, 25 bp, Probe sequence
gacgattacacatatttatgatgcg

SEQ ID NO: 135488 - DNA, 25 bp, Probe sequence
gagtagtgtcttggaaatatcatga

SEQ ID NO: 135489 - DNA, 25 bp, Probe sequence
gatgagcgaaatattgttacaggtg

SEQ ID NO: 135490 - DNA, 25 bp, Probe sequence
gatcacccatttacagttggtgaac

SEQ ID NO: 135491 - DNA, 25 bp, Probe sequence
gatagttgaagttgagcaccaaaga

SEQ ID NO: 135492 - DNA, 25 bp, Probe sequence
gatatttttacatcacaacatgcgc

SEQ ID NO: 135493 - DNA, 25 bp, Probe sequence
gttacaggtgatattctagatttac

SEQ ID NO: 135494 - DNA, 25 bp, Probe sequence
gtgtacttcaatttgaatcgagata

SEQ ID NO: 135495 - DNA, 25 bp, Probe sequence
gtgggatagtccatttaatatttat

SEQ ID NO: 135496 - DNA, 25 bp, Probe sequence
ggtggatgtcatggtttggacaata

SEQ ID NO: 135497 - DNA, 25 bp, Probe sequence
ggtgatatcgatgtgacgattacac

SEQ ID NO: 135498 - DNA, 25 bp, Probe sequence
ggtcgatacagatatgcctcatgtt

SEQ ID NO: 135499 - DNA, 25 bp, Probe sequence
ggtcgattgaatacgaagcagttgc

SEQ ID NO: 135500 - DNA, 25 bp, Probe sequence
tggtgaaaaagcaccgtcaatttta

SEQ ID NO: 135501 - DNA, 25 bp, Probe sequence
tgaaatcagctgatgatcatttccc

SEQ ID NO: 135502 - DNA, 25 bp, Probe sequence
tcgaaaacaagtttccgtatcgaag

SEQ ID NO: 135503 - DNA, 25 bp, Probe sequence
tctggctttacattagaaacacaat

SEQ ID NO: 135504 - DNA, 25 bp, Probe sequence
tcagaagacacattgtttagtccta

SEQ ID NO: 135505 - DNA, 25 bp, Probe sequence
tatgatgcggatcaccaatggtcga

SEQ ID NO: 135506 - DNA, 25 bp, Probe sequence
attcggaagagtatatgcagcatat

SEQ ID NO: 135507 - DNA, 25 bp, Probe sequence
atatgcagcatatggtggcgtattt

SEQ ID NO: 135508 - DNA, 25 bp, Probe sequence
atcggtgcaatcatttgtattgtag

SEQ ID NO: 135509 - DNA, 25 bp, Probe sequence
atgttatatccgatttttatattta

SEQ ID NO: 135510 - DNA, 25 bp, Probe sequence
agctggcttatgtgaaataggtggg

SEQ ID NO: 135511 - DNA, 25 bp, Probe sequence
acctgatttggctgtggcttaggga

SEQ ID NO: 135512 - DNA, 25 bp, Probe sequence
aaggacagtcttcacttgttgggct

SEQ ID NO: 135513 - DNA, 25 bp, Probe sequence
caatcatttccatcattcggaagag

SEQ ID NO: 135514 - DNA, 25 bp, Probe sequence
cagtcttcacttgttgggctaatag

SEQ ID NO: 135515 - DNA, 25 bp, Probe sequence
catgttatatggtgtcattgcgaca

SEQ ID NO: 135516 - DNA, 25 bp, Probe sequence
catttcaatcatttccatcattcgg

SEQ ID NO: 135517 - DNA, 25 bp, Probe sequence
gacagtcttcacttgttgggctaat

SEQ ID NO: 135518 - DNA, 25 bp, Probe sequence
gacatttcaatcatttccatcattc

SEQ ID NO: 135519 - DNA, 25 bp, Probe sequence
gagtttgatttttgcgatggtcgta

SEQ ID NO: 135520 - DNA, 25 bp, Probe sequence
gatgttatcggtgcaatcatttgta

SEQ ID NO: 135521 - DNA, 25 bp, Probe sequence
gatactcatgttatatggtgtcatt

SEQ ID NO: 135522 - DNA, 25 bp, Probe sequence
gatacctgatttggctgtggcttag

SEQ ID NO: 135523 - DNA, 25 bp, Probe sequence
gatttggctgtggcttagggaagga

SEQ ID NO: 135524 - DNA, 25 bp, Probe sequence
gatttttgcgatggtcgtagataaa

SEQ ID NO: 135525 - DNA, 25 bp, Probe sequence
gtgtcattgcgacatttcaatcatt

SEQ ID NO: 135526 - DNA, 25 bp, Probe sequence
gggatacctgatttggctgtggctt

SEQ ID NO: 135527 - DNA, 25 bp, Probe sequence
gggggatacctgatttggctgtggc

SEQ ID NO: 135528 - DNA, 25 bp, Probe sequence
ggtgggggatacctgatttggctgt

SEQ ID NO: 135529 - DNA, 25 bp, Probe sequence
ggtcgtagataaacaaatgccagat

SEQ ID NO: 135530 - DNA, 25 bp, Probe sequence
tcacttgttgggctaataggcggtg

SEQ ID NO: 135531 - DNA, 25 bp, Probe sequence
ggctgtggcttagggaaggacagtc

SEQ ID NO: 135532 - DNA, 25 bp, Probe sequence
ggcgtatttatcatcatgagtttga

SEQ ID NO: 135533 - DNA, 25 bp, Probe sequence
tgcagcatatggtggcgtatttatc

SEQ ID NO: 135534 - DNA, 25 bp, Probe sequence
tgcgacatttcaatcatttccatca

SEQ ID NO: 135535 - DNA, 25 bp, Probe sequence
tcttcacttgttgggctaataggcg

SEQ ID NO: 135536 - DNA, 25 bp, Probe sequence
tcatttgtattgtaggtgttttagt

SEQ ID NO: 135537 - DNA, 25 bp, Probe sequence
taaatatgatgttatcggtgcaatc

SEQ ID NO: 135538 - DNA, 25 bp, Probe sequence
ttatatttatattagctggcttatg

SEQ ID NO: 135539 - DNA, 25 bp, Probe sequence
ttgtaggtgttttagtaatgttgct

SEQ ID NO: 135540 - DNA, 25 bp, Probe sequence
attgctgccttaatgattggcctat

SEQ ID NO: 135541 - DNA, 25 bp, Probe sequence
attacaagtatttcaccaatccaac

SEQ ID NO: 135542 - DNA, 25 bp, Probe sequence
attatgcatctcaaatagctatgga

SEQ ID NO: 135543 - DNA, 25 bp, Probe sequence
atagcagttgccgtgactcagatta

SEQ ID NO: 135544 - DNA, 25 bp, Probe sequence
atcaatctttgatgccactgacatt

SEQ ID NO: 135545 - DNA, 25 bp, Probe sequence
atgcataagttttgggcgacattta

SEQ ID NO: 135546 - DNA, 25 bp, Probe sequence
atggcattatctttctaatgttctt

SEQ ID NO: 135547 - DNA, 25 bp, Probe sequence
aggttttcaagcaacaggcgaatac

SEQ ID NO: 135548 - DNA, 25 bp, Probe sequence
agcgagtaagtcatgaagattcaca

SEQ ID NO: 135549 - DNA, 25 bp, Probe sequence
aaacatcgcgtgtcattgaaatgat

SEQ ID NO: 135550 - DNA, 25 bp, Probe sequence
aacatgtttgatgatggtccagata

SEQ ID NO: 135551 - DNA, 25 bp, Probe sequence
aactatgctttagcttatggcatta

SEQ ID NO: 135552 - DNA, 25 bp, Probe sequence
aatctcaattgtaatggtagctgtc

SEQ ID NO: 135553 - DNA, 25 bp, Probe sequence
cagtacttacatttgaacgtggctt

SEQ ID NO: 135554 - DNA, 25 bp, Probe sequence
ctcggatcattaacatctagaatag

SEQ ID NO: 135555 - DNA, 25 bp, Probe sequence
gccatttcaattagttgtacgcgct

SEQ ID NO: 135556 - DNA, 25 bp, Probe sequence
gaacgtggcttatttaattcaatga

SEQ ID NO: 135557 - DNA, 25 bp, Probe sequence
gacttgctacaaggttttaacgtgg

SEQ ID NO: 135558 - DNA, 25 bp, Probe sequence
gatgccactgacattacttggtatg

SEQ ID NO: 135559 - DNA, 25 bp, Probe sequence
gattggcctatctaacattgataag

SEQ ID NO: 135560 - DNA, 25 bp, Probe sequence
gtagccggggaattaaatatcaaca

SEQ ID NO: 135561 - DNA, 25 bp, Probe sequence
gtagcagcaccgaatgaacaaatct

SEQ ID NO: 135562 - DNA, 25 bp, Probe sequence
gtcttggcaaattattattgtcgga

SEQ ID NO: 135563 - DNA, 25 bp, Probe sequence
ggtagctgtcttgatatggattgca

SEQ ID NO: 135564 - DNA, 25 bp, Probe sequence
ggaaatgaatcaattgtcttggcaa

SEQ ID NO: 135565 - DNA, 25 bp, Probe sequence
ggcgacatttactttgacatatatc

SEQ ID NO: 135566 - DNA, 25 bp, Probe sequence
tgctagtgagaaaacatcgcgtgtc

SEQ ID NO: 135567 - DNA, 25 bp, Probe sequence
tgccgtgactcagattattttaatt

SEQ ID NO: 135568 - DNA, 25 bp, Probe sequence
tcaccaatccaacatatttttgcta

SEQ ID NO: 135569 - DNA, 25 bp, Probe sequence
tcaaggtgaatcaaaatcgcacgtt

SEQ ID NO: 135570 - DNA, 25 bp, Probe sequence
taatcacaagttatattccgttttt

SEQ ID NO: 135571 - DNA, 25 bp, Probe sequence
tagttgtacgcgctcaaacttcagg

SEQ ID NO: 135572 - DNA, 25 bp, Probe sequence
tatgcatttttgcctttgacttaaa

SEQ ID NO: 135573 - DNA, 25 bp, Probe sequence
ttggtatgattgcattttatatcgc

SEQ ID NO: 135574 - DNA, 25 bp, Probe sequence
atagtctatcaaaagggaatcaaca

SEQ ID NO: 135575 - DNA, 25 bp, Probe sequence
atcaaggttatgttaaacgattcca

SEQ ID NO: 135576 - DNA, 25 bp, Probe sequence
atgtgatgatgtttgtattttagat

SEQ ID NO: 135577 - DNA, 25 bp, Probe sequence
aagacttaaatgattggggcagtac

SEQ ID NO: 135578 - DNA, 25 bp, Probe sequence
acattagaggcatcattcatagtga

SEQ ID NO: 135579 - DNA, 25 bp, Probe sequence
acaacagcaaatatcgtattggctt

SEQ ID NO: 135580 - DNA, 25 bp, Probe sequence
acaatcgtttatagttctcaccgta

SEQ ID NO: 135581 - DNA, 25 bp, Probe sequence
aaatatcgtattggcttgagcgttt

SEQ ID NO: 135582 - DNA, 25 bp, Probe sequence
aacgattccaagttgtagaaccatc

SEQ ID NO: 135583 - DNA, 25 bp, Probe sequence
aagcaaggtcttcagttgacgattg

SEQ ID NO: 135584 - DNA, 25 bp, Probe sequence
gaacgcggtttacatgggaaattga

SEQ ID NO: 135585 - DNA, 25 bp, Probe sequence
cagaaacaacactaccagatttaac

SEQ ID NO: 135586 - DNA, 25 bp, Probe sequence
gcctttcagtggtctagacccagtt

SEQ ID NO: 135587 - DNA, 25 bp, Probe sequence
gaaccaactgaaggacacattacgt

SEQ ID NO: 135588 - DNA, 25 bp, Probe sequence
gaaggacacattacgtataacggta

SEQ ID NO: 135589 - DNA, 25 bp, Probe sequence
gaaccatcattacaagatatattca

SEQ ID NO: 135590 - DNA, 25 bp, Probe sequence
gagaaggttggtggcaaggatgcat

SEQ ID NO: 135591 - DNA, 25 bp, Probe sequence
gatgagcctttcagtggtctagacc

SEQ ID NO: 135592 - DNA, 25 bp, Probe sequence
gatatcaatcatgtacgtgcatcta

SEQ ID NO: 135593 - DNA, 25 bp, Probe sequence
gtatgttacataaaccagaattact

SEQ ID NO: 135594 - DNA, 25 bp, Probe sequence
gtacgtgcatctaatggtaacaaga

SEQ ID NO: 135595 - DNA, 25 bp, Probe sequence
gtacaatcgtattggttatttaccg

SEQ ID NO: 135596 - DNA, 25 bp, Probe sequence
ggtctagacccagttaatgttgagt

SEQ ID NO: 135597 - DNA, 25 bp, Probe sequence
ggggcagtacaatcgtttatagttc

SEQ ID NO: 135598 - DNA, 25 bp, Probe sequence
ggtcttcagttgacgattgagaatg

SEQ ID NO: 135599 - DNA, 25 bp, Probe sequence
ggtcaacttgttgtttctggtgata

SEQ ID NO: 135600 - DNA, 25 bp, Probe sequence
ggcttgagcgttttgatattactga

SEQ ID NO: 135601 - DNA, 25 bp, Probe sequence
tgttgtttctggtgatatcaatcat

SEQ ID NO: 135602 - DNA, 25 bp, Probe sequence
tgcaggtaaaacaacgacatttcgt

SEQ ID NO: 135603 - DNA, 25 bp, Probe sequence
tcgtttatagttctcaccgtatgga

SEQ ID NO: 135604 - DNA, 25 bp, Probe sequence
tactaatattagatgagcctttcag

SEQ ID NO: 135605 - DNA, 25 bp, Probe sequence
ttttaggcttaagtgaaccaactga

SEQ ID NO: 135606 - DNA, 25 bp, Probe sequence
ttcagctgttagcaagtatgttaca

SEQ ID NO: 135607 - DNA, 25 bp, Probe sequence
ttggcaactttaaagggaatgtcaa

SEQ ID NO: 135608 - DNA, 25 bp, Probe sequence
atatctagtgctaatgatacttaac

SEQ ID NO: 135609 - DNA, 25 bp, Probe sequence
atacttaacatgcaaaaatggcact

SEQ ID NO: 135610 - DNA, 25 bp, Probe sequence
atctagtgctaatgatacttaacat

SEQ ID NO: 135611 - DNA, 25 bp, Probe sequence
atgcaaaaatggcactatttaaatt

SEQ ID NO: 135612 - DNA, 25 bp, Probe sequence
atgatacttaacatgcaaaaatggc

SEQ ID NO: 135613 - DNA, 25 bp, Probe sequence
agtgctaatgatacttaacatgcaa

SEQ ID NO: 135614 - DNA, 25 bp, Probe sequence
acttaacatgcaaaaatggcactat

SEQ ID NO: 135615 - DNA, 25 bp, Probe sequence
acatatctagtgctaatgatactta

SEQ ID NO: 135616 - DNA, 25 bp, Probe sequence
acatgcaaaaatggcactatttaaa

SEQ ID NO: 135617 - DNA, 25 bp, Probe sequence
aaacatatctagtgctaatgatact

SEQ ID NO: 135618 - DNA, 25 bp, Probe sequence
aaaacatatctagtgctaatgatac

SEQ ID NO: 135619 - DNA, 25 bp, Probe sequence
aaaaaacatatctagtgctaatgat

SEQ ID NO: 135620 - DNA, 25 bp, Probe sequence
aacatgcaaaaatggcactatttaa

SEQ ID NO: 135621 - DNA, 25 bp, Probe sequence
aacatatctagtgctaatgatactt

SEQ ID NO: 135622 - DNA, 25 bp, Probe sequence
catgcaaaaatggcactatttaaat

SEQ ID NO: 135623 - DNA, 25 bp, Probe sequence
catatctagtgctaatgatacttaa

SEQ ID NO: 135624 - DNA, 25 bp, Probe sequence
cttaacatgcaaaaatggcactatt

SEQ ID NO: 135625 - DNA, 25 bp, Probe sequence
ctagtgctaatgatacttaacatgc

SEQ ID NO: 135626 - DNA, 25 bp, Probe sequence
ctaatgatacttaacatgcaaaaat

SEQ ID NO: 135627 - DNA, 25 bp, Probe sequence
gctaatgatacttaacatgcaaaaa

SEQ ID NO: 135628 - DNA, 25 bp, Probe sequence
gcaaaaatggcactatttaaatttt

SEQ ID NO: 135629 - DNA, 25 bp, Probe sequence
gaaaaaacatatctagtgctaatga

SEQ ID NO: 135630 - DNA, 25 bp, Probe sequence
gatacttaacatgcaaaaatggcac

SEQ ID NO: 135631 - DNA, 25 bp, Probe sequence
gtgctaatgatacttaacatgcaaa

SEQ ID NO: 135632 - DNA, 25 bp, Probe sequence
ggaaaaaacatatctagtgctaatg

SEQ ID NO: 135633 - DNA, 25 bp, Probe sequence
tggaaaaaacatatctagtgctaat

SEQ ID NO: 135634 - DNA, 25 bp, Probe sequence
tgcaaaaatggcactatttaaattt

SEQ ID NO: 135635 - DNA, 25 bp, Probe sequence
tgctaatgatacttaacatgcaaaa

SEQ ID NO: 135636 - DNA, 25 bp, Probe sequence
tctagtgctaatgatacttaacatg

SEQ ID NO: 135637 - DNA, 25 bp, Probe sequence
taacatgcaaaaatggcactattta

SEQ ID NO: 135638 - DNA, 25 bp, Probe sequence
tacttaacatgcaaaaatggcacta

SEQ ID NO: 135639 - DNA, 25 bp, Probe sequence
tagtgctaatgatacttaacatgca

SEQ ID NO: 135640 - DNA, 25 bp, Probe sequence
tatctagtgctaatgatacttaaca

SEQ ID NO: 135641 - DNA, 25 bp, Probe sequence
ttaacatgcaaaaatggcactattt

SEQ ID NO: 135642 - DNA, 25 bp, Probe sequence
attccaaatttagcgttgtgcgttc

SEQ ID NO: 135643 - DNA, 25 bp, Probe sequence
atttccaatgattatgacagtattc

SEQ ID NO: 135644 - DNA, 25 bp, Probe sequence
atacttatggttccagctgtgtgtg

SEQ ID NO: 135645 - DNA, 25 bp, Probe sequence
atggaacaattacctcaagtaggtt

SEQ ID NO: 135646 - DNA, 25 bp, Probe sequence
atgccgatgggtcttaatattttgt

SEQ ID NO: 135647 - DNA, 25 bp, Probe sequence
agaacaatgttatttccaatgatta

SEQ ID NO: 135648 - DNA, 25 bp, Probe sequence
acttttgtctatagtttggcaacgt

SEQ ID NO: 135649 - DNA, 25 bp, Probe sequence
aaacaccggaagaaacagataatca

SEQ ID NO: 135650 - DNA, 25 bp, Probe sequence
aacaattgttatgatagtattccta

SEQ ID NO: 135651 - DNA, 25 bp, Probe sequence
aagacgtagtgaatattggtatatg

SEQ ID NO: 135652 - DNA, 25 bp, Probe sequence
aatttagcgttgtgcgttcgaagat

SEQ ID NO: 135653 - DNA, 25 bp, Probe sequence
caagtaggttttatgaaatcattcg

SEQ ID NO: 135654 - DNA, 25 bp, Probe sequence
gcgttcgaagatttcacgatatatc

SEQ ID NO: 135655 - DNA, 25 bp, Probe sequence
gacagtaagccggcaaataaatatg

SEQ ID NO: 135656 - DNA, 25 bp, Probe sequence
gacagtattcagtattatattttat

SEQ ID NO: 135657 - DNA, 25 bp, Probe sequence
gagtatattgatgattatccttaca

SEQ ID NO: 135658 - DNA, 25 bp, Probe sequence
gatagttattatgacagtgatttta

SEQ ID NO: 135659 - DNA, 25 bp, Probe sequence
gatttcacgatatatcaagaacaat

SEQ ID NO: 135660 - DNA, 25 bp, Probe sequence
gattatccttacatctgtgtatact

SEQ ID NO: 135661 - DNA, 25 bp, Probe sequence
gttgtgcgttcgaagatttcacgat

SEQ ID NO: 135662 - DNA, 25 bp, Probe sequence
gtattacagattatcgatagttatt

SEQ ID NO: 135663 - DNA, 25 bp, Probe sequence
gtctatagtttggcaacgtttattc

SEQ ID NO: 135664 - DNA, 25 bp, Probe sequence
ggttccagctgtgtgtgtgctaata

SEQ ID NO: 135665 - DNA, 25 bp, Probe sequence
ggcaacgtttattccaaatttagcg

SEQ ID NO: 135666 - DNA, 25 bp, Probe sequence
tgtttatttaggcctaacaattgtt

SEQ ID NO: 135667 - DNA, 25 bp, Probe sequence
tccagctgtgtgtgtgctaataata

SEQ ID NO: 135668 - DNA, 25 bp, Probe sequence
taatattttgttagtacttctttat

SEQ ID NO: 135669 - DNA, 25 bp, Probe sequence
taaatatggcgaaagcccaaaatac

SEQ ID NO: 135670 - DNA, 25 bp, Probe sequence
tacatctgtgtatacttttgtctat

SEQ ID NO: 135671 - DNA, 25 bp, Probe sequence
tagcgttgtgcgttcgaagatttca

SEQ ID NO: 135672 - DNA, 25 bp, Probe sequence
tagtattcctatgctttgacagtaa

SEQ ID NO: 135673 - DNA, 25 bp, Probe sequence
tatgctttgacagtaagccggcaaa

SEQ ID NO: 135674 - DNA, 25 bp, Probe sequence
tatggttccagctgtgtgtgtgcta

SEQ ID NO: 135675 - DNA, 25 bp, Probe sequence
tttaaggggagatcaagacgtagtg

SEQ ID NO: 135676 - DNA, 25 bp, Probe sequence
atgacgggtggtagcgagtggacga

SEQ ID NO: 135677 - DNA, 25 bp, Probe sequence
atatagcgtcgattgtatcacgagt

SEQ ID NO: 135678 - DNA, 25 bp, Probe sequence
atgatatcgatttgacatcacagac

SEQ ID NO: 135679 - DNA, 25 bp, Probe sequence
atggattacttatcatcatggggac

SEQ ID NO: 135680 - DNA, 25 bp, Probe sequence
agcacttggtgcaaaggcaactggt

SEQ ID NO: 135681 - DNA, 25 bp, Probe sequence
aaggtggtactaactttgtagatat

SEQ ID NO: 135682 - DNA, 25 bp, Probe sequence
aatttcagttttcgcgagtggtggt

SEQ ID NO: 135683 - DNA, 25 bp, Probe sequence
caaatccatgttaattctcctcaag

SEQ ID NO: 135684 - DNA, 25 bp, Probe sequence
gcggacgtaccagtagaaaaggctt

SEQ ID NO: 135685 - DNA, 25 bp, Probe sequence
gcgcgaaaaatgaatcctgaaggca

SEQ ID NO: 135686 - DNA, 25 bp, Probe sequence
gcgagtggacgaaaaacatcaatga

SEQ ID NO: 135687 - DNA, 25 bp, Probe sequence
gcatcattctatcccatcaattaat

SEQ ID NO: 135688 - DNA, 25 bp, Probe sequence
gcaatgttggtgcggacgtaccagt

SEQ ID NO: 135689 - DNA, 25 bp, Probe sequence
gaatcgtgaatttgtgacttggtta

SEQ ID NO: 135690 - DNA, 25 bp, Probe sequence
gaaggcatgatttttagcaatgttg

SEQ ID NO: 135691 - DNA, 25 bp, Probe sequence
gaagcagttgaattacttgaggcac

SEQ ID NO: 135692 - DNA, 25 bp, Probe sequence
gaaaagctagctgtagttgcaagag

SEQ ID NO: 135693 - DNA, 25 bp, Probe sequence
gaaacaacggcttatcaaagcgaaa

SEQ ID NO: 135694 - DNA, 25 bp, Probe sequence
gacagtctacagttgagtcattact

SEQ ID NO: 135695 - DNA, 25 bp, Probe sequence
gagtcattacttgaaacaacggctt

SEQ ID NO: 135696 - DNA, 25 bp, Probe sequence
gaggcacaagcgttacaaatccatg

SEQ ID NO: 135697 - DNA, 25 bp, Probe sequence
gattttgataagatgcgttttgtgc

SEQ ID NO: 135698 - DNA, 25 bp, Probe sequence
gtatgtcgatgttagtggcaaaggt

SEQ ID NO: 135699 - DNA, 25 bp, Probe sequence
gtacaccactcgatgcaattaaaag

SEQ ID NO: 135700 - DNA, 25 bp, Probe sequence
tgacgacttaacacaaaaacaaatc

SEQ ID NO: 135701 - DNA, 25 bp, Probe sequence
ggcattgcacatacagtagcttatg

SEQ ID NO: 135702 - DNA, 25 bp, Probe sequence
tgagaaatccacgcatggctgagac

SEQ ID NO: 135703 - DNA, 25 bp, Probe sequence
tgcatgacttacaacaaataggcgt

SEQ ID NO: 135704 - DNA, 25 bp, Probe sequence
tctcctcaagaattagttatgcctg

SEQ ID NO: 135705 - DNA, 25 bp, Probe sequence
tatgcctgaagggaatcgtgaattt

SEQ ID NO: 135706 - DNA, 25 bp, Probe sequence
tttcgcgagtggtggtttacgtaca

SEQ ID NO: 135707 - DNA, 25 bp, Probe sequence
ttatcatcatggggacagtctacag

SEQ ID NO: 135708 - DNA, 25 bp, Probe sequence
tttacgtacaccactcgatgcaatt

SEQ ID NO: 135709 - DNA, 25 bp, Probe sequence
ttttgtgcatcattctatcccatca

SEQ ID NO: 135710 - DNA, 25 bp, Probe sequence
attaacggtatgccacgagctaaat

SEQ ID NO: 135711 - DNA, 25 bp, Probe sequence
attaatcatctttttcagacgtaaa

SEQ ID NO: 135712 - DNA, 25 bp, Probe sequence
attagattgtgcagatgtcgtcata

SEQ ID NO: 135713 - DNA, 25 bp, Probe sequence
atttgcttagctgtaatgtttgtta

SEQ ID NO: 135714 - DNA, 25 bp, Probe sequence
atatgccggcattacatttacatta

SEQ ID NO: 135715 - DNA, 25 bp, Probe sequence
atcatcatcaaacgttggaatcatt

SEQ ID NO: 135716 - DNA, 25 bp, Probe sequence
atgccacgagctaaatataaatctt

SEQ ID NO: 135717 - DNA, 25 bp, Probe sequence
atgcgactattgtttggtatgattt

SEQ ID NO: 135718 - DNA, 25 bp, Probe sequence
agatgtcgtcatattaattttagat

SEQ ID NO: 135719 - DNA, 25 bp, Probe sequence
agcaacgtaatatcattcgtactgc

SEQ ID NO: 135720 - DNA, 25 bp, Probe sequence
agctgggatttatggtatgaacttt

SEQ ID NO: 135721 - DNA, 25 bp, Probe sequence
aagagataccaaaagatgcgactat

SEQ ID NO: 135722 - DNA, 25 bp, Probe sequence
aagaccgccatgtagatgatcgctt

SEQ ID NO: 135723 - DNA, 25 bp, Probe sequence
aatggtcatggatagtgtctttaag

SEQ ID NO: 135724 - DNA, 25 bp, Probe sequence
caacatatcgatgaccacttgatta

SEQ ID NO: 135725 - DNA, 25 bp, Probe sequence
ctattcaccaatagcactaaatatt

SEQ ID NO: 135726 - DNA, 25 bp, Probe sequence
ccgccatgtagatgatcgctttaat

SEQ ID NO: 135727 - DNA, 25 bp, Probe sequence
gctgtcgtattaatcatctttttca

SEQ ID NO: 135728 - DNA, 25 bp, Probe sequence
gaagtggatgatgcaattaacggta

SEQ ID NO: 135729 - DNA, 25 bp, Probe sequence
gaaaattttgagtcatacacgtcat

SEQ ID NO: 135730 - DNA, 25 bp, Probe sequence
gatgaccacttgattaagcaacgta

SEQ ID NO: 135731 - DNA, 25 bp, Probe sequence
gtattagtaacatatcatcatcaaa

SEQ ID NO: 135732 - DNA, 25 bp, Probe sequence
gtatcagttatattttcaccgttaa

SEQ ID NO: 135733 - DNA, 25 bp, Probe sequence
gtaaaacgtgtactgtttcctatgc

SEQ ID NO: 135734 - DNA, 25 bp, Probe sequence
gtgtttatcattttgaagaccgcca

SEQ ID NO: 135735 - DNA, 25 bp, Probe sequence
ggtatgattttgatgaaccgaatga

SEQ ID NO: 135736 - DNA, 25 bp, Probe sequence
tgtctttaagttacgttcggatttg

SEQ ID NO: 135737 - DNA, 25 bp, Probe sequence
tgagtcatacacgtcatttagaatg

SEQ ID NO: 135738 - DNA, 25 bp, Probe sequence
tgaactttgtaaatatgccggcatt

SEQ ID NO: 135739 - DNA, 25 bp, Probe sequence
tcaccgttaacattcatagctggga

SEQ ID NO: 135740 - DNA, 25 bp, Probe sequence
taaacattcgctatacattcaacat

SEQ ID NO: 135741 - DNA, 25 bp, Probe sequence
tatggggtcaaactattcaccaata

SEQ ID NO: 135742 - DNA, 25 bp, Probe sequence
tatttcaactttgtatatgcacttg

SEQ ID NO: 135743 - DNA, 25 bp, Probe sequence
ttcgctatacattcaacatatcgat

SEQ ID NO: 135744 - DNA, 25 bp, Probe sequence
ataaccaaacagtccagcaactatt

SEQ ID NO: 135745 - DNA, 25 bp, Probe sequence
atcgcacctgaaattgcaattgcac

SEQ ID NO: 135746 - DNA, 25 bp, Probe sequence
atgattggactgaagctataactat

SEQ ID NO: 135747 - DNA, 25 bp, Probe sequence
accttatatcgttatcgcacctgaa

SEQ ID NO: 135748 - DNA, 25 bp, Probe sequence
actatagcttctcagccattactac

SEQ ID NO: 135749 - DNA, 25 bp, Probe sequence
acatcaagttggtttaagtctatta

SEQ ID NO: 135750 - DNA, 25 bp, Probe sequence
acagtccagcaactattaactgcaa

SEQ ID NO: 135751 - DNA, 25 bp, Probe sequence
aaatttagcaaccgtactgggcgat

SEQ ID NO: 135752 - DNA, 25 bp, Probe sequence
acaaggctatgttcaagcaatgatt

SEQ ID NO: 135753 - DNA, 25 bp, Probe sequence
aagcaatgattgatagcgttaatga

SEQ ID NO: 135754 - DNA, 25 bp, Probe sequence
aagttgaatcaacatgtggcatttt

SEQ ID NO: 135755 - DNA, 25 bp, Probe sequence
caacacgcatcattgtaaaagaaca

SEQ ID NO: 135756 - DNA, 25 bp, Probe sequence
catttttgtattgagtgccatcgac

SEQ ID NO: 135757 - DNA, 25 bp, Probe sequence
cattcacacttatctgtattacaaa

SEQ ID NO: 135758 - DNA, 25 bp, Probe sequence
ctataactatagcttctcagccatt

SEQ ID NO: 135759 - DNA, 25 bp, Probe sequence
ctcagccattactacaagaacaaat

SEQ ID NO: 135760 - DNA, 25 bp, Probe sequence
gccatcgacaatcattcacacttat

SEQ ID NO: 135761 - DNA, 25 bp, Probe sequence
gcaagaccgaacaatgacgtacatc

SEQ ID NO: 135762 - DNA, 25 bp, Probe sequence
gcaaccgtactgggcgataaccaaa

SEQ ID NO: 135763 - DNA, 25 bp, Probe sequence
gcaattgcacatgcaagaccgaaca

SEQ ID NO: 135764 - DNA, 25 bp, Probe sequence
gaacaatgacgtacatcaagttggt

SEQ ID NO: 135765 - DNA, 25 bp, Probe sequence
gacaatcattcacacttatctgtat

SEQ ID NO: 135766 - DNA, 25 bp, Probe sequence
gacattttgtcaacaacacgcatca

SEQ ID NO: 135767 - DNA, 25 bp, Probe sequence
gagtgccatcgacaatcattcacac

SEQ ID NO: 135768 - DNA, 25 bp, Probe sequence
gggcgataaccaaacagtccagcaa

SEQ ID NO: 135769 - DNA, 25 bp, Probe sequence
gtgtcattagacattttgtcaacaa

SEQ ID NO: 135770 - DNA, 25 bp, Probe sequence
tcaacatgtggcattttgtgatgaa

SEQ ID NO: 135771 - DNA, 25 bp, Probe sequence
tagcttctcagccattactacaaga

SEQ ID NO: 135772 - DNA, 25 bp, Probe sequence
tagcgttaatgaacttggaccttat

SEQ ID NO: 135773 - DNA, 25 bp, Probe sequence
tatatcgttatcgcacctgaaattg

SEQ ID NO: 135774 - DNA, 25 bp, Probe sequence
tttgtgatgaagatcactacgcatc

SEQ ID NO: 135775 - DNA, 25 bp, Probe sequence
ttagcaaccgtactgggcgataacc

SEQ ID NO: 135776 - DNA, 25 bp, Probe sequence
ttggaccttatatcgttatcgcacc

SEQ ID NO: 135777 - DNA, 25 bp, Probe sequence
ttgtcaacaacacgcatcattgtaa

SEQ ID NO: 135778 - DNA, 25 bp, Probe sequence
attcacggtggattcaatgcactac

SEQ ID NO: 135779 - DNA, 25 bp, Probe sequence
atgtcgtagtcatgggtgatggttc

SEQ ID NO: 135780 - DNA, 25 bp, Probe sequence
agcgttgtcaataaatatttgcttc

SEQ ID NO: 135781 - DNA, 25 bp, Probe sequence
actttccaagcgatacaacgtgttt

SEQ ID NO: 135782 - DNA, 25 bp, Probe sequence
actgcctatctatccaaagacacca

SEQ ID NO: 135783 - DNA, 25 bp, Probe sequence
acaacgtgtttatgatcaattagta

SEQ ID NO: 135784 - DNA, 25 bp, Probe sequence
aaatgacacatcctgatatgaagct

SEQ ID NO: 135785 - DNA, 25 bp, Probe sequence
aaaacataagcagccttcaacatta

SEQ ID NO: 135786 - DNA, 25 bp, Probe sequence
aaccatcaccgttccattggagatt

SEQ ID NO: 135787 - DNA, 25 bp, Probe sequence
aagacaccagagtttcatattgacg

SEQ ID NO: 135788 - DNA, 25 bp, Probe sequence
aagtcagtttggtgtcaatgagatt

SEQ ID NO: 135789 - DNA, 25 bp, Probe sequence
aatgggcgaatggcctaccattaac

SEQ ID NO: 135790 - DNA, 25 bp, Probe sequence
aatcaacagccattaccgaataaat

SEQ ID NO: 135791 - DNA, 25 bp, Probe sequence
aatttatccaattagacaatcacat

SEQ ID NO: 135792 - DNA, 25 bp, Probe sequence
caatcgctcgattatgtttaaaaat

SEQ ID NO: 135793 - DNA, 25 bp, Probe sequence
caccaattttagatgcaacactatc

SEQ ID NO: 135794 - DNA, 25 bp, Probe sequence
ctttcgctttaatttcagacatcaa

SEQ ID NO: 135795 - DNA, 25 bp, Probe sequence
gaaaccgtgttatgaatagcgttgt

SEQ ID NO: 135796 - DNA, 25 bp, Probe sequence
gagttttatgattatcctaagatgg

SEQ ID NO: 135797 - DNA, 25 bp, Probe sequence
tgaggttgtactgcctatctatcca

SEQ ID NO: 135798 - DNA, 25 bp, Probe sequence
gatgatatgcaagtctttcgcttta

SEQ ID NO: 135799 - DNA, 25 bp, Probe sequence
gatgcggttctaagtcagtttggtg

SEQ ID NO: 135800 - DNA, 25 bp, Probe sequence
gattcaatgcactacaaccatcacc

SEQ ID NO: 135801 - DNA, 25 bp, Probe sequence
gttgcaacatcatcaatacattgag

SEQ ID NO: 135802 - DNA, 25 bp, Probe sequence
gtttatatgtttggtggtggacgtg

SEQ ID NO: 135803 - DNA, 25 bp, Probe sequence
gtgatggttcaggtggtgcactggc

SEQ ID NO: 135804 - DNA, 25 bp, Probe sequence
ggtggacgtgaaatgacacatcctg

SEQ ID NO: 135805 - DNA, 25 bp, Probe sequence
ggtgcactggcattatcctttgtac

SEQ ID NO: 135806 - DNA, 25 bp, Probe sequence
ggtacatgattttccaatttatcca

SEQ ID NO: 135807 - DNA, 25 bp, Probe sequence
ggcctaccattaacagataagcgca

SEQ ID NO: 135808 - DNA, 25 bp, Probe sequence
taagcagccttcaacattaaatgtt

SEQ ID NO: 135809 - DNA, 25 bp, Probe sequence
tatcctttgtacaatctcttttaga

SEQ ID NO: 135810 - DNA, 25 bp, Probe sequence
tatttgcttcacaatcgctcgatta

SEQ ID NO: 135811 - DNA, 25 bp, Probe sequence
ttgtatttaatctcaccaattttag

SEQ ID NO: 135812 - DNA, 25 bp, Probe sequence
gacgggattcatgttagtaaacggt

SEQ ID NO: 135813 - DNA, 25 bp, Probe sequence
atttctgcgtcaacagggcaatggt

SEQ ID NO: 135814 - DNA, 25 bp, Probe sequence
attggtattatctttattattctat

SEQ ID NO: 135815 - DNA, 25 bp, Probe sequence
atttcaatgaatttcccaatcatga

SEQ ID NO: 135816 - DNA, 25 bp, Probe sequence
atcgcaatgattttagcacctgcaa

SEQ ID NO: 135817 - DNA, 25 bp, Probe sequence
agggcaatggttgatgacgggattc

SEQ ID NO: 135818 - DNA, 25 bp, Probe sequence
agtactctttacaattggttcatta

SEQ ID NO: 135819 - DNA, 25 bp, Probe sequence
agttgcaacgatatttagcatcatc

SEQ ID NO: 135820 - DNA, 25 bp, Probe sequence
acctgaaaaacgtggtgctgccatg

SEQ ID NO: 135821 - DNA, 25 bp, Probe sequence
acgtggtgctgccatgggtacaatg

SEQ ID NO: 135822 - DNA, 25 bp, Probe sequence
acaaaccctaaagctgatatcccag

SEQ ID NO: 135823 - DNA, 25 bp, Probe sequence
aatgccattaggttcaattgttatt

SEQ ID NO: 135824 - DNA, 25 bp, Probe sequence
aataccaattacggcgtatctattt

SEQ ID NO: 135825 - DNA, 25 bp, Probe sequence
caatcatgatggttggacgtgtatt

SEQ ID NO: 135826 - DNA, 25 bp, Probe sequence
caagccattggtgcaggtgtactaa

SEQ ID NO: 135827 - DNA, 25 bp, Probe sequence
cggaatttaatatttctgcgtcaac

SEQ ID NO: 135828 - DNA, 25 bp, Probe sequence
cctggttctctaattatgggtctac

SEQ ID NO: 135829 - DNA, 25 bp, Probe sequence
cgacacgtcaatcaaatcaatctaa

SEQ ID NO: 135830 - DNA, 25 bp, Probe sequence
cctgttgtacaagatcatatgcgtg

SEQ ID NO: 135831 - DNA, 25 bp, Probe sequence
gaaggtgtttcacgcggtaaaatat

SEQ ID NO: 135832 - DNA, 25 bp, Probe sequence
gactacgaccttcattattagctac

SEQ ID NO: 135833 - DNA, 25 bp, Probe sequence
gacgtgtattacaagccattggtgc

SEQ ID NO: 135834 - DNA, 25 bp, Probe sequence
gataaaacgaatcctgttgtacaag

SEQ ID NO: 135835 - DNA, 25 bp, Probe sequence
gtacgattggttttggtgctttgtt

SEQ ID NO: 135836 - DNA, 25 bp, Probe sequence
gggtacaatgggtatcgcaatgatt

SEQ ID NO: 135837 - DNA, 25 bp, Probe sequence
ggtgcaggtgtactaatgccattag

SEQ ID NO: 135838 - DNA, 25 bp, Probe sequence
ggtccaacattatcaggttatattg

SEQ ID NO: 135839 - DNA, 25 bp, Probe sequence
ggattgttattattacctggttctc

SEQ ID NO: 135840 - DNA, 25 bp, Probe sequence
ggaatgtgatgttttacggtatgtt

SEQ ID NO: 135841 - DNA, 25 bp, Probe sequence
tgttttacggtatgttcattatcgg

SEQ ID NO: 135842 - DNA, 25 bp, Probe sequence
tatatcaatatacaacaaaccctaa

SEQ ID NO: 135843 - DNA, 25 bp, Probe sequence
tattattacaatttatccacctgaa

SEQ ID NO: 135844 - DNA, 25 bp, Probe sequence
tattcggtatgtttattgcgatttt

SEQ ID NO: 135845 - DNA, 25 bp, Probe sequence
ttagttgcgttagtactctttacaa

SEQ ID NO: 135846 - DNA, 25 bp, Probe sequence
atagcaccagtgacaggtgttgcga

SEQ ID NO: 135847 - DNA, 25 bp, Probe sequence
atcaagtcaacttactgggtacctt

SEQ ID NO: 135848 - DNA, 25 bp, Probe sequence
accaatgctcattcaaggtatgaca

SEQ ID NO: 135849 - DNA, 25 bp, Probe sequence
aacaagcgttcaccgatatttatta

SEQ ID NO: 135850 - DNA, 25 bp, Probe sequence
aagataatcctataccttacataat

SEQ ID NO: 135851 - DNA, 25 bp, Probe sequence
aatattattgaagacgccacgtttt

SEQ ID NO: 135852 - DNA, 25 bp, Probe sequence
aattattctgtctggcgtatggtct

SEQ ID NO: 135853 - DNA, 25 bp, Probe sequence
gccacgttttgtattaccaatgctc

SEQ ID NO: 135854 - DNA, 25 bp, Probe sequence
gcagcagcagttatttcaagagcta

SEQ ID NO: 135855 - DNA, 25 bp, Probe sequence
gaaagccgcttattatagctatgat

SEQ ID NO: 135856 - DNA, 25 bp, Probe sequence
gacgtctaacgcacaattaacatta

SEQ ID NO: 135857 - DNA, 25 bp, Probe sequence
gagaggcatgacgatgattcagatt

SEQ ID NO: 135858 - DNA, 25 bp, Probe sequence
gagggagttcatcaagtttattagg

SEQ ID NO: 135859 - DNA, 25 bp, Probe sequence
gatggttgcattaagatttcttcaa

SEQ ID NO: 135860 - DNA, 25 bp, Probe sequence
gatgcttgttaatggtattgcacca

SEQ ID NO: 135861 - DNA, 25 bp, Probe sequence
gatatgtttttgcctggattaccag

SEQ ID NO: 135862 - DNA, 25 bp, Probe sequence
gttgcgccaacaatagggggcataa

SEQ ID NO: 135863 - DNA, 25 bp, Probe sequence
gtttgcaggaattggtattacgctc

SEQ ID NO: 135864 - DNA, 25 bp, Probe sequence
gtattgcttaatcattggaactttt

SEQ ID NO: 135865 - DNA, 25 bp, Probe sequence
gtattgcaccagttgttgcgccaac

SEQ ID NO: 135866 - DNA, 25 bp, Probe sequence
gtaatttgtttgctggtccaatttc

SEQ ID NO: 135867 - DNA, 25 bp, Probe sequence
gtctggcgtatggtctttgtcattc

SEQ ID NO: 135868 - DNA, 25 bp, Probe sequence
ggtgttgcgacacttggttttacaa

SEQ ID NO: 135869 - DNA, 25 bp, Probe sequence
ggtccaatttcagattcaactgggc

SEQ ID NO: 135870 - DNA, 25 bp, Probe sequence
ggtctttgtcattctgactatcttt

SEQ ID NO: 135871 - DNA, 25 bp, Probe sequence
ggtaccttgttgattttatagactc

SEQ ID NO: 135872 - DNA, 25 bp, Probe sequence
ggtattacgctcattatatcaagtc

SEQ ID NO: 135873 - DNA, 25 bp, Probe sequence
ggatttatcattttaatagcaccag

SEQ ID NO: 135874 - DNA, 25 bp, Probe sequence
tgattttcaaacaacgacgtctaac

SEQ ID NO: 135875 - DNA, 25 bp, Probe sequence
tcaactgggcgcagaaagccgctta

SEQ ID NO: 135876 - DNA, 25 bp, Probe sequence
tctgcgtctccgtttattattcaaa

SEQ ID NO: 135877 - DNA, 25 bp, Probe sequence
tttacttatatttctgcgtctccgt

SEQ ID NO: 135878 - DNA, 25 bp, Probe sequence
ttgcatcgccattagtgggggtaaa

SEQ ID NO: 135879 - DNA, 25 bp, Probe sequence
ttcgtcatggtcataggttctttat

SEQ ID NO: 135880 - DNA, 25 bp, Probe sequence
gttccaaaacgtatggtccatatcc

SEQ ID NO: 135881 - DNA, 25 bp, Probe sequence
atggcattttcaagttccaaaacgt

SEQ ID NO: 135882 - DNA, 25 bp, Probe sequence
accatttcagcttcaggtaaagcga

SEQ ID NO: 135883 - DNA, 25 bp, Probe sequence
acgtatggtccatatccacaaaata

SEQ ID NO: 135884 - DNA, 25 bp, Probe sequence
aacatttacaacacagacgaagacg

SEQ ID NO: 135885 - DNA, 25 bp, Probe sequence
aactgagaacggtgattttgcaggc

SEQ ID NO: 135886 - DNA, 25 bp, Probe sequence
aagatattaccatttcagcttcagg

SEQ ID NO: 135887 - DNA, 25 bp, Probe sequence
aattcacctgaagcgcaaactaaaa

SEQ ID NO: 135888 - DNA, 25 bp, Probe sequence
ctttactgcacctaccaagcaacca

SEQ ID NO: 135889 - DNA, 25 bp, Probe sequence
gcgaataatgctgcgtttaatcagt

SEQ ID NO: 135890 - DNA, 25 bp, Probe sequence
gcggacaacaagcacaagatgatgt

SEQ ID NO: 135891 - DNA, 25 bp, Probe sequence
gctgaagcaaataaagtgacgccaa

SEQ ID NO: 135892 - DNA, 25 bp, Probe sequence
gcacctaccaagcaaccaattgtta

SEQ ID NO: 135893 - DNA, 25 bp, Probe sequence
gcaagaccgcttgcaattaatcaag

SEQ ID NO: 135894 - DNA, 25 bp, Probe sequence
gcaattggttttttcattttaatct

SEQ ID NO: 135895 - DNA, 25 bp, Probe sequence
gaattccagctatgaaatcaactga

SEQ ID NO: 135896 - DNA, 25 bp, Probe sequence
gaagcgtgtatctaaaggaagttta

SEQ ID NO: 135897 - DNA, 25 bp, Probe sequence
gaaatcttgcccgaagtgcggacaa

SEQ ID NO: 135898 - DNA, 25 bp, Probe sequence
gatgattagttcaccacaaattata

SEQ ID NO: 135899 - DNA, 25 bp, Probe sequence
gatgagaaaaatggtgccttgggca

SEQ ID NO: 135900 - DNA, 25 bp, Probe sequence
gatctggtcaaaatatattacgtgt

SEQ ID NO: 135901 - DNA, 25 bp, Probe sequence
gtagcttcttatattcaaaccagat

SEQ ID NO: 135902 - DNA, 25 bp, Probe sequence
gtcaaccgatgaagatatacaaact

SEQ ID NO: 135903 - DNA, 25 bp, Probe sequence
gtgccttgggcaattggttttttca

SEQ ID NO: 135904 - DNA, 25 bp, Probe sequence
gtgaagatatcgaagactatgttga

SEQ ID NO: 135905 - DNA, 25 bp, Probe sequence
gtgacgccaataggtaattttatac

SEQ ID NO: 135906 - DNA, 25 bp, Probe sequence
gggcttaagcaatttgtcagcgacc

SEQ ID NO: 135907 - DNA, 25 bp, Probe sequence
ggggacatatagaattccagctatg

SEQ ID NO: 135908 - DNA, 25 bp, Probe sequence
ggtagatgttactgaagattttgaa

SEQ ID NO: 135909 - DNA, 25 bp, Probe sequence
taatatgagctttactgcacctacc

SEQ ID NO: 135910 - DNA, 25 bp, Probe sequence
tactaagaaacttcaattcacctga

SEQ ID NO: 135911 - DNA, 25 bp, Probe sequence
tttgtcagcgaccttaaaaatacgg

SEQ ID NO: 135912 - DNA, 25 bp, Probe sequence
ttattatattgttctttttactaag

SEQ ID NO: 135913 - DNA, 25 bp, Probe sequence
ttctttgctggatattctttagcga

SEQ ID NO: 135914 - DNA, 25 bp, Probe sequence
aaataaggccgcagtaagccgacga

SEQ ID NO: 135915 - DNA, 25 bp, Probe sequence
attgcgcaagatattactaatgatt

SEQ ID NO: 135916 - DNA, 25 bp, Probe sequence
attactaatgatttaaattctgaag

SEQ ID NO: 135917 - DNA, 25 bp, Probe sequence
attatgacagatattgcgcaagata

SEQ ID NO: 135918 - DNA, 25 bp, Probe sequence
ataaagaacctttgacaattagtga

SEQ ID NO: 135919 - DNA, 25 bp, Probe sequence
ataacgttaacgcattaactgcaaa

SEQ ID NO: 135920 - DNA, 25 bp, Probe sequence
ataaggccgcagtaagccgacgaat

SEQ ID NO: 135921 - DNA, 25 bp, Probe sequence
atcgcattaaaacatatagcaatca

SEQ ID NO: 135922 - DNA, 25 bp, Probe sequence
agagcagtctaacgtattaggtatg

SEQ ID NO: 135923 - DNA, 25 bp, Probe sequence
accaaatttaaatattgatcaacgt

SEQ ID NO: 135924 - DNA, 25 bp, Probe sequence
acatttacaagaccatattcaattt

SEQ ID NO: 135925 - DNA, 25 bp, Probe sequence
aaggccgcagtaagccgacgaatta

SEQ ID NO: 135926 - DNA, 25 bp, Probe sequence
aacgcattaactgcaaaaatgttga

SEQ ID NO: 135927 - DNA, 25 bp, Probe sequence
aaggtagagcatatttgaaagaacg

SEQ ID NO: 135928 - DNA, 25 bp, Probe sequence
caatcatcgcattaaaacatatagc

SEQ ID NO: 135929 - DNA, 25 bp, Probe sequence
catattcaatttttagagcagttta

SEQ ID NO: 135930 - DNA, 25 bp, Probe sequence
gccgcagtaagccgacgaattaaaa

SEQ ID NO: 135931 - DNA, 25 bp, Probe sequence
gcagtaagccgacgaattaaaaagt

SEQ ID NO: 135932 - DNA, 25 bp, Probe sequence
gcagtctaacgtattaggtatgtta

SEQ ID NO: 135933 - DNA, 25 bp, Probe sequence
gaagtcatcaatcatcgcattaaaa

SEQ ID NO: 135934 - DNA, 25 bp, Probe sequence
gaacgtaatgcgattatgacagata

SEQ ID NO: 135935 - DNA, 25 bp, Probe sequence
gaacctttgacaattagtgaaatca

SEQ ID NO: 135936 - DNA, 25 bp, Probe sequence
gaaagaacgtaatgcgattatgaca

SEQ ID NO: 135937 - DNA, 25 bp, Probe sequence
gaaattcataaccttaactgacaaa

SEQ ID NO: 135938 - DNA, 25 bp, Probe sequence
gacagatattgcgcaagatattact

SEQ ID NO: 135939 - DNA, 25 bp, Probe sequence
gagcagtttataaataacgttaacg

SEQ ID NO: 135940 - DNA, 25 bp, Probe sequence
gatcaacgtttgaaattcataacct

SEQ ID NO: 135941 - DNA, 25 bp, Probe sequence
gtattagaagtcatcaatcatcgca

SEQ ID NO: 135942 - DNA, 25 bp, Probe sequence
gtcatcaatcatcgcattaaaacat

SEQ ID NO: 135943 - DNA, 25 bp, Probe sequence
taaaacatttacaagaccatattca

SEQ ID NO: 135944 - DNA, 25 bp, Probe sequence
tagaagtcatcaatcatcgcattaa

SEQ ID NO: 135945 - DNA, 25 bp, Probe sequence
tatgaaatttcattagagcagtcta

SEQ ID NO: 135946 - DNA, 25 bp, Probe sequence
ttagtgaaatcacgcaaagacaagg

SEQ ID NO: 135947 - DNA, 25 bp, Probe sequence
ttaactgacaaaggtagagcatatt

SEQ ID NO: 135948 - DNA, 25 bp, Probe sequence
attatttgaatatgcagatcgagtg

SEQ ID NO: 135949 - DNA, 25 bp, Probe sequence
atttttcaatcttcacatttagttc

SEQ ID NO: 135950 - DNA, 25 bp, Probe sequence
atccgcatcagttatctggcggtga

SEQ ID NO: 135951 - DNA, 25 bp, Probe sequence
agatatcgtcaaaaatttcggagaa

SEQ ID NO: 135952 - DNA, 25 bp, Probe sequence
acagcaagtttagatgccgatagag

SEQ ID NO: 135953 - DNA, 25 bp, Probe sequence
aagaagcgggaatgaccaaacaaca

SEQ ID NO: 135954 - DNA, 25 bp, Probe sequence
aagagcaatacaacttttgaaaaat

SEQ ID NO: 135955 - DNA, 25 bp, Probe sequence
caatcttcacatttagttccttatt

SEQ ID NO: 135956 - DNA, 25 bp, Probe sequence
caaaagttgttgagatgatacgtca

SEQ ID NO: 135957 - DNA, 25 bp, Probe sequence
cattgctaacgatattaggcggatt

SEQ ID NO: 135958 - DNA, 25 bp, Probe sequence
gcgggaatgaccaaacaacaaagtt

SEQ ID NO: 135959 - DNA, 25 bp, Probe sequence
gcaacgtgttgcgattatgagagca

SEQ ID NO: 135960 - DNA, 25 bp, Probe sequence
gagagcatttatgaataatccgaaa

SEQ ID NO: 135961 - DNA, 25 bp, Probe sequence
gatgatacgtcaacaaattaaagaa

SEQ ID NO: 135962 - DNA, 25 bp, Probe sequence
gatcgcttgaatgtatatccgcatc

SEQ ID NO: 135963 - DNA, 25 bp, Probe sequence
gttctgggaaaacaacattgctaac

SEQ ID NO: 135964 - DNA, 25 bp, Probe sequence
gattacacacgatcgaagattattt

SEQ ID NO: 135965 - DNA, 25 bp, Probe sequence
gattggtattatgattacacacgat

SEQ ID NO: 135966 - DNA, 25 bp, Probe sequence
gttccttatttaaaagtgatagagc

SEQ ID NO: 135967 - DNA, 25 bp, Probe sequence
gtttagatgccgatagagcaacaaa

SEQ ID NO: 135968 - DNA, 25 bp, Probe sequence
gtcaaacgagtggtacagtgcttta

SEQ ID NO: 135969 - DNA, 25 bp, Probe sequence
gtgcctctggttctgggaaaacaac

SEQ ID NO: 135970 - DNA, 25 bp, Probe sequence
gtcattttaaatggtgcctctggtt

SEQ ID NO: 135971 - DNA, 25 bp, Probe sequence
gtgatagagcaattgacactcgtag

SEQ ID NO: 135972 - DNA, 25 bp, Probe sequence
gtggtacagtgctttacaatgatgc

SEQ ID NO: 135973 - DNA, 25 bp, Probe sequence
gtggaacaaggggaatttgtcattt

SEQ ID NO: 135974 - DNA, 25 bp, Probe sequence
tggtgcctctggttctgggaaaaca

SEQ ID NO: 135975 - DNA, 25 bp, Probe sequence
tgtatatccgcatcagttatctggc

SEQ ID NO: 135976 - DNA, 25 bp, Probe sequence
taaatggtgcctctggttctgggaa

SEQ ID NO: 135977 - DNA, 25 bp, Probe sequence
tctggcggtgaaaagcaacgtgttg

SEQ ID NO: 135978 - DNA, 25 bp, Probe sequence
tcttcacatttagttccttatttaa

SEQ ID NO: 135979 - DNA, 25 bp, Probe sequence
taggcggattgttaagtcaaacgag

SEQ ID NO: 135980 - DNA, 25 bp, Probe sequence
tatgcagatcgagtgattgaattag

SEQ ID NO: 135981 - DNA, 25 bp, Probe sequence
tttcggagaaggtttgtctgaaaca

SEQ ID NO: 135982 - DNA, 25 bp, Probe sequence
atatttcgttatttgaacactttga

SEQ ID NO: 135983 - DNA, 25 bp, Probe sequence
atagtaggactatcatttatgatgc

SEQ ID NO: 135984 - DNA, 25 bp, Probe sequence
agtggtttagctcaagggcttggta

SEQ ID NO: 135985 - DNA, 25 bp, Probe sequence
aggtgattatcctaaaaatgctcat

SEQ ID NO: 135986 - DNA, 25 bp, Probe sequence
agacatttattgagtgcgttagttt

SEQ ID NO: 135987 - DNA, 25 bp, Probe sequence
actagttatagagtttctggtattt

SEQ ID NO: 135988 - DNA, 25 bp, Probe sequence
aatgctcatgaggtcgctattaatg

SEQ ID NO: 135989 - DNA, 25 bp, Probe sequence
aatttcgttatattttaatcacatt

SEQ ID NO: 135990 - DNA, 25 bp, Probe sequence
cgcatagttccattgtgctattgaa

SEQ ID NO: 135991 - DNA, 25 bp, Probe sequence
gcgattttaggtgcctcactatcat

SEQ ID NO: 135992 - DNA, 25 bp, Probe sequence
gctgtgatcatcatagtaggactat

SEQ ID NO: 135993 - DNA, 25 bp, Probe sequence
gcaacttagtgatacgcaacagaat

SEQ ID NO: 135994 - DNA, 25 bp, Probe sequence
gaacgataacggatttaatgcattg

SEQ ID NO: 135995 - DNA, 25 bp, Probe sequence
gaaatcgcaacttagtgatacgcaa

SEQ ID NO: 135996 - DNA, 25 bp, Probe sequence
gagccgcaaattgagaaatcgcaac

SEQ ID NO: 135997 - DNA, 25 bp, Probe sequence
gagcaagcaccgttaaatatgatga

SEQ ID NO: 135998 - DNA, 25 bp, Probe sequence
gagattatgttttacaaatttcgtt

SEQ ID NO: 135999 - DNA, 25 bp, Probe sequence
gatgtgattacaatgaatgacgtta

SEQ ID NO: 136000 - DNA, 25 bp, Probe sequence
gataagttagctgcagacaacatta

SEQ ID NO: 136001 - DNA, 25 bp, Probe sequence
gttctaagtgcatttttctatgtta

SEQ ID NO: 136002 - DNA, 25 bp, Probe sequence
gttaaacaacaacgcatacaactta

SEQ ID NO: 136003 - DNA, 25 bp, Probe sequence
gttatcaagcagagcaagcaccgtt

SEQ ID NO: 136004 - DNA, 25 bp, Probe sequence
gtggatcctatcgaagcaattggag

SEQ ID NO: 136005 - DNA, 25 bp, Probe sequence
gggcttggtagggagaatatttcgt

SEQ ID NO: 136006 - DNA, 25 bp, Probe sequence
ggggtaggtattgctgtgatcatca

SEQ ID NO: 136007 - DNA, 25 bp, Probe sequence
ggtggggatatttatattagtagcg

SEQ ID NO: 136008 - DNA, 25 bp, Probe sequence
ggttaatacggcattttatccagtg

SEQ ID NO: 136009 - DNA, 25 bp, Probe sequence
ggtgcctcactatcatttatcaaat

SEQ ID NO: 136010 - DNA, 25 bp, Probe sequence
tggtgttatttattagtggtttagc

SEQ ID NO: 136011 - DNA, 25 bp, Probe sequence
tgagtgcgttagttttacaaatttt

SEQ ID NO: 136012 - DNA, 25 bp, Probe sequence
tccattgtgctattgaacgataacg

SEQ ID NO: 136013 - DNA, 25 bp, Probe sequence
tagctgcagacaacattagagtcgg

SEQ ID NO: 136014 - DNA, 25 bp, Probe sequence
tagtagcgattttaggtgcctcact

SEQ ID NO: 136015 - DNA, 25 bp, Probe sequence
tttctggtattttaaacgacacaat

SEQ ID NO: 136016 - DNA, 25 bp, Probe sequence
atcacctggtgcgtcaacagctgta

SEQ ID NO: 136017 - DNA, 25 bp, Probe sequence
atgaaatcttgggtaccgttaatga

SEQ ID NO: 136018 - DNA, 25 bp, Probe sequence
aggtaaggatggcacagttgattgt

SEQ ID NO: 136019 - DNA, 25 bp, Probe sequence
atggtgccgtcatttggttatcgct

SEQ ID NO: 136020 - DNA, 25 bp, Probe sequence
agtttaccattactccaaaagactg

SEQ ID NO: 136021 - DNA, 25 bp, Probe sequence
agataacccagatcgctttattcaa

SEQ ID NO: 136022 - DNA, 25 bp, Probe sequence
agcacaacctggcgaagagagttca

SEQ ID NO: 136023 - DNA, 25 bp, Probe sequence
acacgttttgtagacggcaagcgtt

SEQ ID NO: 136024 - DNA, 25 bp, Probe sequence
aagcgttcattgttatttggtccat

SEQ ID NO: 136025 - DNA, 25 bp, Probe sequence
ctttattcaagcggtgccacacatg

SEQ ID NO: 136026 - DNA, 25 bp, Probe sequence
ccggtacagggcattcagcactttg

SEQ ID NO: 136027 - DNA, 25 bp, Probe sequence
gctgcattacttggtgcatcacctg

SEQ ID NO: 136028 - DNA, 25 bp, Probe sequence
gcggtgccacacatgagttttgtca

SEQ ID NO: 136029 - DNA, 25 bp, Probe sequence
gcagggcaacgtgtccaagtaatca

SEQ ID NO: 136030 - DNA, 25 bp, Probe sequence
gaagtgattgatcgtcatcatgcta

SEQ ID NO: 136031 - DNA, 25 bp, Probe sequence
gatgtcatcttaattggtggcggta

SEQ ID NO: 136032 - DNA, 25 bp, Probe sequence
gatgatggcacattagctgcattac

SEQ ID NO: 136033 - DNA, 25 bp, Probe sequence
gttatcgcttaacagatcatgagga

SEQ ID NO: 136034 - DNA, 25 bp, Probe sequence
gtaagtggattattcctgcgctgta

SEQ ID NO: 136035 - DNA, 25 bp, Probe sequence
gtcatcatgctaaagtgtacggaaa

SEQ ID NO: 136036 - DNA, 25 bp, Probe sequence
gtctgatgaaccaattgctttaact

SEQ ID NO: 136037 - DNA, 25 bp, Probe sequence
gtgacgatgttatctgcaggtatca

SEQ ID NO: 136038 - DNA, 25 bp, Probe sequence
gtggcggtattatgagtgcaacatt

SEQ ID NO: 136039 - DNA, 25 bp, Probe sequence
gggaagtgattacagcagggcaacg

SEQ ID NO: 136040 - DNA, 25 bp, Probe sequence
gggcattcagcactttgcgagttga

SEQ ID NO: 136041 - DNA, 25 bp, Probe sequence
ggtacagatgttaactttggtgcgt

SEQ ID NO: 136042 - DNA, 25 bp, Probe sequence
ggaaaagcagcagtgggtgcgccac

SEQ ID NO: 136043 - DNA, 25 bp, Probe sequence
tgagttttgtcattggcgaagataa

SEQ ID NO: 136044 - DNA, 25 bp, Probe sequence
tgcaggtttctcacctaaattttta

SEQ ID NO: 136045 - DNA, 25 bp, Probe sequence
tgctggcggtgcgagtttaccatta

SEQ ID NO: 136046 - DNA, 25 bp, Probe sequence
taagagtctttttcccaaatgctaa

SEQ ID NO: 136047 - DNA, 25 bp, Probe sequence
tattcctgcgctgtacaaatcaaga

SEQ ID NO: 136048 - DNA, 25 bp, Probe sequence
tttggtccatttgcaggtttctcac

SEQ ID NO: 136049 - DNA, 25 bp, Probe sequence
ttgtatttattggtgctggcggtgc

SEQ ID NO: 136050 - DNA, 25 bp, Probe sequence
atttgcaatagctcgtgaactcggc

SEQ ID NO: 136051 - DNA, 25 bp, Probe sequence
attcagccattagttaaggacaaaa

SEQ ID NO: 136052 - DNA, 25 bp, Probe sequence
attaattcagccattagttaaggac

SEQ ID NO: 136053 - DNA, 25 bp, Probe sequence
atagttcaattaattcagccattag

SEQ ID NO: 136054 - DNA, 25 bp, Probe sequence
agttcaattaattcagccattagtt

SEQ ID NO: 136055 - DNA, 25 bp, Probe sequence
agatttgcaatagctcgtgaactcg

SEQ ID NO: 136056 - DNA, 25 bp, Probe sequence
agaaatagttcaattaattcagcca

SEQ ID NO: 136057 - DNA, 25 bp, Probe sequence
aaatagttcaattaattcagccatt

SEQ ID NO: 136058 - DNA, 25 bp, Probe sequence
aagatttgcaatagctcgtgaactc

SEQ ID NO: 136059 - DNA, 25 bp, Probe sequence
aatagttcaattaattcagccatta

SEQ ID NO: 136060 - DNA, 25 bp, Probe sequence
aattaattcagccattagttaagga

SEQ ID NO: 136061 - DNA, 25 bp, Probe sequence
aattcagccattagttaaggacaaa

SEQ ID NO: 136062 - DNA, 25 bp, Probe sequence
caattaattcagccattagttaagg

SEQ ID NO: 136063 - DNA, 25 bp, Probe sequence
cgtgaactcggccgttatttataca

SEQ ID NO: 136064 - DNA, 25 bp, Probe sequence
gaagatattttagaaccagaaatag

SEQ ID NO: 136065 - DNA, 25 bp, Probe sequence
gaaatagttcaattaattcagccat

SEQ ID NO: 136066 - DNA, 25 bp, Probe sequence
gatttgcaatagctcgtgaactcgg

SEQ ID NO: 136067 - DNA, 25 bp, Probe sequence
gttcaattaattcagccattagtta

SEQ ID NO: 136068 - DNA, 25 bp, Probe sequence
gtgaactcggccgttatttatacaa

SEQ ID NO: 136069 - DNA, 25 bp, Probe sequence
gtggaagaacgatttatatcaataa

SEQ ID NO: 136070 - DNA, 25 bp, Probe sequence
ggaagaacgatttatatcaataata

SEQ ID NO: 136071 - DNA, 25 bp, Probe sequence
tgaactcggccgttatttatacaaa

SEQ ID NO: 136072 - DNA, 25 bp, Probe sequence
tcgtgaactcggccgttatttatac

SEQ ID NO: 136073 - DNA, 25 bp, Probe sequence
tcagccattagttaaggacaaaatg

SEQ ID NO: 136074 - DNA, 25 bp, Probe sequence
tcaattaattcagccattagttaag

SEQ ID NO: 136075 - DNA, 25 bp, Probe sequence
taattcagccattagttaaggacaa

SEQ ID NO: 136076 - DNA, 25 bp, Probe sequence
taagtggaagaacgatttatatcaa

SEQ ID NO: 136077 - DNA, 25 bp, Probe sequence
ttgcaatagctcgtgaactcggccg

SEQ ID NO: 136078 - DNA, 25 bp, Probe sequence
taaagataacaacgataatagtcta

SEQ ID NO: 136079 - DNA, 25 bp, Probe sequence
tagttcaattaattcagccattagt

SEQ ID NO: 136080 - DNA, 25 bp, Probe sequence
tttgcaatagctcgtgaactcggcc

SEQ ID NO: 136081 - DNA, 25 bp, Probe sequence
ttaattcagccattagttaaggaca

SEQ ID NO: 136082 - DNA, 25 bp, Probe sequence
ttcaattaattcagccattagttaa

SEQ ID NO: 136083 - DNA, 25 bp, Probe sequence
ttcagccattagttaaggacaaaat

SEQ ID NO: 136084 - DNA, 25 bp, Probe sequence
attgcctgaacatcgcatcattata

SEQ ID NO: 136085 - DNA, 25 bp, Probe sequence
atacattacaattcacttcgcatca

SEQ ID NO: 136086 - DNA, 25 bp, Probe sequence
atcacgttacatttactaggctcta

SEQ ID NO: 136087 - DNA, 25 bp, Probe sequence
atcaaaccagctatacatcgtatta

SEQ ID NO: 136088 - DNA, 25 bp, Probe sequence
atgtcatttcaacagtaccttgtga

SEQ ID NO: 136089 - DNA, 25 bp, Probe sequence
agttcagtcggctatcgatggctta

SEQ ID NO: 136090 - DNA, 25 bp, Probe sequence
agaatggtgtaggtttcgcactaac

SEQ ID NO: 136091 - DNA, 25 bp, Probe sequence
actaatcagtatgctattgcttcaa

SEQ ID NO: 136092 - DNA, 25 bp, Probe sequence
acaagatgctgctattcgcttcaac

SEQ ID NO: 136093 - DNA, 25 bp, Probe sequence
aacttatcattaccaagtcagccgt

SEQ ID NO: 136094 - DNA, 25 bp, Probe sequence
caagcccaactagatcaataccatt

SEQ ID NO: 136095 - DNA, 25 bp, Probe sequence
catacagcatcttcaattacctttg

SEQ ID NO: 136096 - DNA, 25 bp, Probe sequence
ctgtatcctgagtttcacatttggg

SEQ ID NO: 136097 - DNA, 25 bp, Probe sequence
gcgtcgctatcctcaaatcattgaa

SEQ ID NO: 136098 - DNA, 25 bp, Probe sequence
gcaagatgttaatgtttcgcgtcgg

SEQ ID NO: 136099 - DNA, 25 bp, Probe sequence
gaacaattcgggtcatatatggtca

SEQ ID NO: 136100 - DNA, 25 bp, Probe sequence
gaaacaagctgcaccttttatagag

SEQ ID NO: 136101 - DNA, 25 bp, Probe sequence
gactcacacatatcgctttaaagtt

SEQ ID NO: 136102 - DNA, 25 bp, Probe sequence
gaccaccccaatgcacatttaaagg

SEQ ID NO: 136103 - DNA, 25 bp, Probe sequence
gatcccgttcaccttgtaattacat

SEQ ID NO: 136104 - DNA, 25 bp, Probe sequence
gatatgctacaacctaatcctttga

SEQ ID NO: 136105 - DNA, 25 bp, Probe sequence
gttcgccgtgccattattaagacat

SEQ ID NO: 136106 - DNA, 25 bp, Probe sequence
gtaccagttattcatgtcgatccat

SEQ ID NO: 136107 - DNA, 25 bp, Probe sequence
gtaatgtcacatttccagagtctga

SEQ ID NO: 136108 - DNA, 25 bp, Probe sequence
gtcactcgcagatttattgcctgaa

SEQ ID NO: 136109 - DNA, 25 bp, Probe sequence
ggcaactgatggcaagtcactcgca

SEQ ID NO: 136110 - DNA, 25 bp, Probe sequence
ggttgtcttactatgtggttctggt

SEQ ID NO: 136111 - DNA, 25 bp, Probe sequence
ggcaagaagttatgcgtcgctatcc

SEQ ID NO: 136112 - DNA, 25 bp, Probe sequence
tggtgtatcacctcgtaccattcaa

SEQ ID NO: 136113 - DNA, 25 bp, Probe sequence
taattacattagcaacggaccaccc

SEQ ID NO: 136114 - DNA, 25 bp, Probe sequence
taaagctaacgatcccgttcacctt

SEQ ID NO: 136115 - DNA, 25 bp, Probe sequence
ttcgcgtcggacaattgcagatgat

SEQ ID NO: 136116 - DNA, 25 bp, Probe sequence
ttgcacttattcacgctggtactga

SEQ ID NO: 136117 - DNA, 25 bp, Probe sequence
ttgggatgcctattccatttatcaa

SEQ ID NO: 136118 - DNA, 25 bp, Probe sequence
attccaaccaaaacacatttatcgt

SEQ ID NO: 136119 - DNA, 25 bp, Probe sequence
attcatctgtatttggactttcatc

SEQ ID NO: 136120 - DNA, 25 bp, Probe sequence
atatttcacaagaccaacgtattca

SEQ ID NO: 136121 - DNA, 25 bp, Probe sequence
atcattccgattggctatatcgtta

SEQ ID NO: 136122 - DNA, 25 bp, Probe sequence
agtcgcaaatgcagcgtctggtgct

SEQ ID NO: 136123 - DNA, 25 bp, Probe sequence
aaattgccagttggtatcgcttctg

SEQ ID NO: 136124 - DNA, 25 bp, Probe sequence
aaacttattcttaccaaatggtgct

SEQ ID NO: 136125 - DNA, 25 bp, Probe sequence
aaaagctgcgatgttatgtttagtc

SEQ ID NO: 136126 - DNA, 25 bp, Probe sequence
aagcaggtaatgtcttcccagttct

SEQ ID NO: 136127 - DNA, 25 bp, Probe sequence
aataccatttttcaaattgccagtt

SEQ ID NO: 136128 - DNA, 25 bp, Probe sequence
aatacagttggtggtgtagcggcaa

SEQ ID NO: 136129 - DNA, 25 bp, Probe sequence
gcgaagttacgcataaaccattagt

SEQ ID NO: 136130 - DNA, 25 bp, Probe sequence
gcaataccgattgtactgtttttac

SEQ ID NO: 136131 - DNA, 25 bp, Probe sequence
gcaccaattcaagcttctgttgcac

SEQ ID NO: 136132 - DNA, 25 bp, Probe sequence
gaacctgcaaaagcacattctgcaa

SEQ ID NO: 136133 - DNA, 25 bp, Probe sequence
gaaacgttgaaattacctggagatg

SEQ ID NO: 136134 - DNA, 25 bp, Probe sequence
gatgtttcagtattaggtgtttctc

SEQ ID NO: 136135 - DNA, 25 bp, Probe sequence
gatttggagtgcgccattctttaaa

SEQ ID NO: 136136 - DNA, 25 bp, Probe sequence
gtatcgcttctggtgcagtagtcga

SEQ ID NO: 136137 - DNA, 25 bp, Probe sequence
gtagcggcaaaattgatttcaccac

SEQ ID NO: 136138 - DNA, 25 bp, Probe sequence
gtctggtgcttttggtgcgattggt

SEQ ID NO: 136139 - DNA, 25 bp, Probe sequence
ggtgcagtagtcgaaggtttcttcc

SEQ ID NO: 136140 - DNA, 25 bp, Probe sequence
ggtgtttctcaatcagcaactttaa

SEQ ID NO: 136141 - DNA, 25 bp, Probe sequence
ggtgctttatcatcattagtattta

SEQ ID NO: 136142 - DNA, 25 bp, Probe sequence
ggacaaacaggtacagctattttat

SEQ ID NO: 136143 - DNA, 25 bp, Probe sequence
ggactttcatcttgtcattattata

SEQ ID NO: 136144 - DNA, 25 bp, Probe sequence
tggttaccagttcttacaatttgtt

SEQ ID NO: 136145 - DNA, 25 bp, Probe sequence
tggatttgcattcaacgcattttta

SEQ ID NO: 136146 - DNA, 25 bp, Probe sequence
tggttcacttcttgtatctgctaat

SEQ ID NO: 136147 - DNA, 25 bp, Probe sequence
tggtgtaccaattgcaatttgtgca

SEQ ID NO: 136148 - DNA, 25 bp, Probe sequence
tgcgattggtatccctgtaggtgtt

SEQ ID NO: 136149 - DNA, 25 bp, Probe sequence
taaatttcattattccattcttact

SEQ ID NO: 136150 - DNA, 25 bp, Probe sequence
tattccattcttacttatctttatt

SEQ ID NO: 136151 - DNA, 25 bp, Probe sequence
ttatcgtctttaattgcagcaatac

SEQ ID NO: 136152 - DNA, 25 bp, Probe sequence
attatttttagctgcatgtggtcaa

SEQ ID NO: 136153 - DNA, 25 bp, Probe sequence
attatcattatttttagctgcatgt

SEQ ID NO: 136154 - DNA, 25 bp, Probe sequence
atcaagttacgttgcaccatattat

SEQ ID NO: 136155 - DNA, 25 bp, Probe sequence
atcattatttttagctgcatgtggt

SEQ ID NO: 136156 - DNA, 25 bp, Probe sequence
agttacgttgcaccatattatggac

SEQ ID NO: 136157 - DNA, 25 bp, Probe sequence
actggacaagcaatggttactgatc

SEQ ID NO: 136158 - DNA, 25 bp, Probe sequence
aaatattcaattgtaacggttgatt

SEQ ID NO: 136159 - DNA, 25 bp, Probe sequence
aaatcaagttacgttgcaccatatt

SEQ ID NO: 136160 - DNA, 25 bp, Probe sequence
aacggttgattatactggacaagca

SEQ ID NO: 136161 - DNA, 25 bp, Probe sequence
aaccagcaacaatctaattcaaatg

SEQ ID NO: 136162 - DNA, 25 bp, Probe sequence
aagcgaaaactgaacaacaagataa

SEQ ID NO: 136163 - DNA, 25 bp, Probe sequence
caagttacgttgcaccatattatgg

SEQ ID NO: 136164 - DNA, 25 bp, Probe sequence
caaaaatcaagttacgttgcaccat

SEQ ID NO: 136165 - DNA, 25 bp, Probe sequence
caacaatctaattcaaatgcaacaa

SEQ ID NO: 136166 - DNA, 25 bp, Probe sequence
caaatgcaacaaacaatgaccaaaa

SEQ ID NO: 136167 - DNA, 25 bp, Probe sequence
gcaaacgataaccagcaacaatcta

SEQ ID NO: 136168 - DNA, 25 bp, Probe sequence
gcaatggttactgatccaaactacc

SEQ ID NO: 136169 - DNA, 25 bp, Probe sequence
gatgataaagcgaaaactgaacaac

SEQ ID NO: 136170 - DNA, 25 bp, Probe sequence
gataaccagcaacaatctaattcaa

SEQ ID NO: 136171 - DNA, 25 bp, Probe sequence
gataatagtgcaaacgataaccagc

SEQ ID NO: 136172 - DNA, 25 bp, Probe sequence
gtaacggttgattatactggacaag

SEQ ID NO: 136173 - DNA, 25 bp, Probe sequence
ggttactgatccaaactaccaacaa

SEQ ID NO: 136174 - DNA, 25 bp, Probe sequence
ggttgattatactggacaagcaatg

SEQ ID NO: 136175 - DNA, 25 bp, Probe sequence
ggacaagcaatggttactgatccaa

SEQ ID NO: 136176 - DNA, 25 bp, Probe sequence
tttagctgcatgtggtcaagatagt

SEQ ID NO: 136177 - DNA, 25 bp, Probe sequence
tcaagatagtgaccaacaaaaagac

SEQ ID NO: 136178 - DNA, 25 bp, Probe sequence
tactgatccaaactaccaacaataa

SEQ ID NO: 136179 - DNA, 25 bp, Probe sequence
tacgttgcaccatattatggacaaa

SEQ ID NO: 136180 - DNA, 25 bp, Probe sequence
tagctgcatgtggtcaagatagtga

SEQ ID NO: 136181 - DNA, 25 bp, Probe sequence
tagcattatcattatttttagctgc

SEQ ID NO: 136182 - DNA, 25 bp, Probe sequence
tagtgcaaacgataaccagcaacaa

SEQ ID NO: 136183 - DNA, 25 bp, Probe sequence
tatactggacaagcaatggttactg

SEQ ID NO: 136184 - DNA, 25 bp, Probe sequence
tttttagctgcatgtggtcaagata

SEQ ID NO: 136185 - DNA, 25 bp, Probe sequence
ttactgatccaaactaccaacaata

SEQ ID NO: 136186 - DNA, 25 bp, Probe sequence
attcatttcattatttttatcaaga

SEQ ID NO: 136187 - DNA, 25 bp, Probe sequence
attagcaactagaacattttatgac

SEQ ID NO: 136188 - DNA, 25 bp, Probe sequence
atcctcgtgctcaagcattttataa

SEQ ID NO: 136189 - DNA, 25 bp, Probe sequence
atgacacgtttggttcttactatga

SEQ ID NO: 136190 - DNA, 25 bp, Probe sequence
agtgctcaaactgaagaaatggggg

SEQ ID NO: 136191 - DNA, 25 bp, Probe sequence
acgtcatggatttaaagtggttggt

SEQ ID NO: 136192 - DNA, 25 bp, Probe sequence
acattttatgacacgtttggttctt

SEQ ID NO: 136193 - DNA, 25 bp, Probe sequence
aaatttacacaagagattaaccatg

SEQ ID NO: 136194 - DNA, 25 bp, Probe sequence
aaagtggttggtgaacatcattttc

SEQ ID NO: 136195 - DNA, 25 bp, Probe sequence
aaccatgtagattcatttcattatt

SEQ ID NO: 136196 - DNA, 25 bp, Probe sequence
aagcattttataaacgtcatggatt

SEQ ID NO: 136197 - DNA, 25 bp, Probe sequence
aagaagatggtgcgaatgttggtta

SEQ ID NO: 136198 - DNA, 25 bp, Probe sequence
cacgtttggttcttactatgatgac

SEQ ID NO: 136199 - DNA, 25 bp, Probe sequence
cataaaatttggctaggagtttggg

SEQ ID NO: 136200 - DNA, 25 bp, Probe sequence
cataatcctcgtgctcaagcatttt

SEQ ID NO: 136201 - DNA, 25 bp, Probe sequence
cgtttggttcttactatgatgacaa

SEQ ID NO: 136202 - DNA, 25 bp, Probe sequence
gcaactagaacattttatgacacgt

SEQ ID NO: 136203 - DNA, 25 bp, Probe sequence
gaagatggtgcgaatgttggttata

SEQ ID NO: 136204 - DNA, 25 bp, Probe sequence
gaaatgggggagacctatttagaag

SEQ ID NO: 136205 - DNA, 25 bp, Probe sequence
gacacgtttggttcttactatgatg

SEQ ID NO: 136206 - DNA, 25 bp, Probe sequence
gatggtgcgaatgttggttatataa

SEQ ID NO: 136207 - DNA, 25 bp, Probe sequence
gatgaatattaatagtgctcaaact

SEQ ID NO: 136208 - DNA, 25 bp, Probe sequence
gattaaccatgtagattcatttcat

SEQ ID NO: 136209 - DNA, 25 bp, Probe sequence
gtaacggatacagatttaattatgg

SEQ ID NO: 136210 - DNA, 25 bp, Probe sequence
gtgctcaagcattttataaacgtca

SEQ ID NO: 136211 - DNA, 25 bp, Probe sequence
ggtgaacatcattttcaaacaggtg

SEQ ID NO: 136212 - DNA, 25 bp, Probe sequence
ggtgcgaatgttggttatataaaga

SEQ ID NO: 136213 - DNA, 25 bp, Probe sequence
ggttggtgaacatcattttcaaaca

SEQ ID NO: 136214 - DNA, 25 bp, Probe sequence
ggctgggataatcaaagaaatttca

SEQ ID NO: 136215 - DNA, 25 bp, Probe sequence
tgtagattcatttcattatttttat

SEQ ID NO: 136216 - DNA, 25 bp, Probe sequence
tcaaacaggtgatgtaacggataca

SEQ ID NO: 136217 - DNA, 25 bp, Probe sequence
taatcctcgtgctcaagcattttat

SEQ ID NO: 136218 - DNA, 25 bp, Probe sequence
ttttatgacacgtttggttcttact

SEQ ID NO: 136219 - DNA, 25 bp, Probe sequence
ttatgacacgtttggttcttactat

SEQ ID NO: 136220 - DNA, 25 bp, Probe sequence
atttgggatattggcggcattgcgc

SEQ ID NO: 136221 - DNA, 25 bp, Probe sequence
atatccaaccagatgcgaatgcaga

SEQ ID NO: 136222 - DNA, 25 bp, Probe sequence
atatgcatgatgattgtcgtgttaa

SEQ ID NO: 136223 - DNA, 25 bp, Probe sequence
atacctggtatctatgcgtgtggag

SEQ ID NO: 136224 - DNA, 25 bp, Probe sequence
atcaggtggaggaaatacagcatta

SEQ ID NO: 136225 - DNA, 25 bp, Probe sequence
atgctggattgcgagatatgtctgt

SEQ ID NO: 136226 - DNA, 25 bp, Probe sequence
acgacaactagtatacctggtatct

SEQ ID NO: 136227 - DNA, 25 bp, Probe sequence
acgtattaaatacttggtcggcaat

SEQ ID NO: 136228 - DNA, 25 bp, Probe sequence
aaagcgtgacagttgtttatcgaaa

SEQ ID NO: 136229 - DNA, 25 bp, Probe sequence
aaggatttggtaatacgacaactag

SEQ ID NO: 136230 - DNA, 25 bp, Probe sequence
aatcacatctaattgcaagtgcatt

SEQ ID NO: 136231 - DNA, 25 bp, Probe sequence
aatacttggtcggcaatgatgatga

SEQ ID NO: 136232 - DNA, 25 bp, Probe sequence
cagaacgtcatttcgaagttgaaac

SEQ ID NO: 136233 - DNA, 25 bp, Probe sequence
cggtccgtctggtttgtatgcaagc

SEQ ID NO: 136234 - DNA, 25 bp, Probe sequence
cgcatataagtgaagttgttttgga

SEQ ID NO: 136235 - DNA, 25 bp, Probe sequence
gcgccaaaaccttgtcatgaaattt

SEQ ID NO: 136236 - DNA, 25 bp, Probe sequence
gcgtgtggagatattgtttatcatg

SEQ ID NO: 136237 - DNA, 25 bp, Probe sequence
gcattgcgccaaaaccttgtcatga

SEQ ID NO: 136238 - DNA, 25 bp, Probe sequence
gaagcgggagaaatatatacatcga

SEQ ID NO: 136239 - DNA, 25 bp, Probe sequence
gaacgtgtggtagatattaggaaaa

SEQ ID NO: 136240 - DNA, 25 bp, Probe sequence
gagtgaaacatcttcaaagctagat

SEQ ID NO: 136241 - DNA, 25 bp, Probe sequence
gagggttatgtttcaagtcatcatg

SEQ ID NO: 136242 - DNA, 25 bp, Probe sequence
gatgcgaatgcagagggttatgttt

SEQ ID NO: 136243 - DNA, 25 bp, Probe sequence
gtatgcaagcttttatgctggattg

SEQ ID NO: 136244 - DNA, 25 bp, Probe sequence
gtacaaagttacagacgtttcaaag

SEQ ID NO: 136245 - DNA, 25 bp, Probe sequence
tgttcaatctgaattagggggtaag

SEQ ID NO: 136246 - DNA, 25 bp, Probe sequence
tgctaaaacatatatccaaccagat

SEQ ID NO: 136247 - DNA, 25 bp, Probe sequence
taagatgagaatttaccctgaaaaa

SEQ ID NO: 136248 - DNA, 25 bp, Probe sequence
tacaatcattggtggcggtccgtct

SEQ ID NO: 136249 - DNA, 25 bp, Probe sequence
tacagcattagattgggcgcatgat

SEQ ID NO: 136250 - DNA, 25 bp, Probe sequence
tatacatcgaaagcagttatcattg

SEQ ID NO: 136251 - DNA, 25 bp, Probe sequence
ttaaaccggaagttcatttgaatga

SEQ ID NO: 136252 - DNA, 25 bp, Probe sequence
ttgcaagtgcatttagtgatggtgc

SEQ ID NO: 136253 - DNA, 25 bp, Probe sequence
ttgacgatgtcattattagtcatgg

SEQ ID NO: 136254 - DNA, 25 bp, Probe sequence
atttaactggttcttctatgtatat

SEQ ID NO: 136255 - DNA, 25 bp, Probe sequence
atttcttttttatatgatcataggt

SEQ ID NO: 136256 - DNA, 25 bp, Probe sequence
atactctccagaagcatttgcaggc

SEQ ID NO: 136257 - DNA, 25 bp, Probe sequence
atcacttgtacacacacatacactt

SEQ ID NO: 136258 - DNA, 25 bp, Probe sequence
atgatggtgacaaaaggattcttcc

SEQ ID NO: 136259 - DNA, 25 bp, Probe sequence
actggttcttctatgtatataacat

SEQ ID NO: 136260 - DNA, 25 bp, Probe sequence
acacacacatacacttattttaggt

SEQ ID NO: 136261 - DNA, 25 bp, Probe sequence
aaaggattcttccaagtcactggta

SEQ ID NO: 136262 - DNA, 25 bp, Probe sequence
aacataggtgttatcgttactatag

SEQ ID NO: 136263 - DNA, 25 bp, Probe sequence
aagcatatgattttactggtacaac

SEQ ID NO: 136264 - DNA, 25 bp, Probe sequence
aagtcactggtaaatcatactctcc

SEQ ID NO: 136265 - DNA, 25 bp, Probe sequence
aattatcacttgtacacacacatac

SEQ ID NO: 136266 - DNA, 25 bp, Probe sequence
caagcaattcttaaagaaccacgtg

SEQ ID NO: 136267 - DNA, 25 bp, Probe sequence
cacttattttaggtatgtttatgtt

SEQ ID NO: 136268 - DNA, 25 bp, Probe sequence
gcgtaggttattatattcatttctt

SEQ ID NO: 136269 - DNA, 25 bp, Probe sequence
gcaggctttgcaggtattgggcaca

SEQ ID NO: 136270 - DNA, 25 bp, Probe sequence
gcaggtattgggcacacaggtatgc

SEQ ID NO: 136271 - DNA, 25 bp, Probe sequence
gaagcatttgcaggctttgcaggta

SEQ ID NO: 136272 - DNA, 25 bp, Probe sequence
gaaccacgtgatgagtcttttaaaa

SEQ ID NO: 136273 - DNA, 25 bp, Probe sequence
gatcataggtttatttagtggcttt

SEQ ID NO: 136274 - DNA, 25 bp, Probe sequence
gattcttccaagtcactggtaaatc

SEQ ID NO: 136275 - DNA, 25 bp, Probe sequence
gttactataggtatgatggtgacaa

SEQ ID NO: 136276 - DNA, 25 bp, Probe sequence
gttattatattcatttcttttttat

SEQ ID NO: 136277 - DNA, 25 bp, Probe sequence
gtttatttagtggctttttctatag

SEQ ID NO: 136278 - DNA, 25 bp, Probe sequence
gtatgcttgcaggtttattgttgct

SEQ ID NO: 136279 - DNA, 25 bp, Probe sequence
gtggctttttctatagagagctaac

SEQ ID NO: 136280 - DNA, 25 bp, Probe sequence
gggcacacaggtatgcttgcaggtt

SEQ ID NO: 136281 - DNA, 25 bp, Probe sequence
ggtaaatcatactctccagaagcat

SEQ ID NO: 136282 - DNA, 25 bp, Probe sequence
tgttgctatttttccttttaagaca

SEQ ID NO: 136283 - DNA, 25 bp, Probe sequence
tactacttatttaactggttcttct

SEQ ID NO: 136284 - DNA, 25 bp, Probe sequence
tactggtacaacacaattatcactt

SEQ ID NO: 136285 - DNA, 25 bp, Probe sequence
tattaccattggagaagttatttaa

SEQ ID NO: 136286 - DNA, 25 bp, Probe sequence
tattgttgctatttttccttttaag

SEQ ID NO: 136287 - DNA, 25 bp, Probe sequence
ttttccttttaagacaagcaattct

SEQ ID NO: 136288 - DNA, 25 bp, Probe sequence
atagcaactatgattatcttggtaa

SEQ ID NO: 136289 - DNA, 25 bp, Probe sequence
atgccaatttggataggttcaatcg

SEQ ID NO: 136290 - DNA, 25 bp, Probe sequence
atgccgcggacatcaatggtttgac

SEQ ID NO: 136291 - DNA, 25 bp, Probe sequence
atggtttgacgaatccagtaaaagt

SEQ ID NO: 136292 - DNA, 25 bp, Probe sequence
agggtttatgatttttggcgctgta

SEQ ID NO: 136293 - DNA, 25 bp, Probe sequence
agtatgcaacttgtaacgttaccta

SEQ ID NO: 136294 - DNA, 25 bp, Probe sequence
accattcctaatgtttatgccaatt

SEQ ID NO: 136295 - DNA, 25 bp, Probe sequence
acgtctatcttattgttctttgcat

SEQ ID NO: 136296 - DNA, 25 bp, Probe sequence
aaatctttggagtagctattattga

SEQ ID NO: 136297 - DNA, 25 bp, Probe sequence
aaatcgtatcgcaatttttgtagca

SEQ ID NO: 136298 - DNA, 25 bp, Probe sequence
aaaatgttaaagtcaatgccgcgga

SEQ ID NO: 136299 - DNA, 25 bp, Probe sequence
aatgtggatgtttatagggtttatg

SEQ ID NO: 136300 - DNA, 25 bp, Probe sequence
caacatcgtatcattgcttcaattg

SEQ ID NO: 136301 - DNA, 25 bp, Probe sequence
caaaacgtactgaagtgccgtcata

SEQ ID NO: 136302 - DNA, 25 bp, Probe sequence
gcaggtggtaatgcaccattcctaa

SEQ ID NO: 136303 - DNA, 25 bp, Probe sequence
gcagttgttgcagcatttgcaggta

SEQ ID NO: 136304 - DNA, 25 bp, Probe sequence
gaaggatcaagcttacaaggttcac

SEQ ID NO: 136305 - DNA, 25 bp, Probe sequence
gaactagtaacaatatcgtcgtgca

SEQ ID NO: 136306 - DNA, 25 bp, Probe sequence
gaactattatacttgaatcatcata

SEQ ID NO: 136307 - DNA, 25 bp, Probe sequence
gatttttggcgctgtatcaagttta

SEQ ID NO: 136308 - DNA, 25 bp, Probe sequence
gttgcttcaggtgaaattccgccac

SEQ ID NO: 136309 - DNA, 25 bp, Probe sequence
gttacctaaacaaatgttgcctgaa

SEQ ID NO: 136310 - DNA, 25 bp, Probe sequence
ggtgttatggtatggctaggtatga

SEQ ID NO: 136311 - DNA, 25 bp, Probe sequence
ggttcaatcgtaacgtctatcttat

SEQ ID NO: 136312 - DNA, 25 bp, Probe sequence
ggaatccattcacacactatgcaac

SEQ ID NO: 136313 - DNA, 25 bp, Probe sequence
tgaccatccaaatcgtatcgcaatt

SEQ ID NO: 136314 - DNA, 25 bp, Probe sequence
tcgtgggccttattttaggtgttat

SEQ ID NO: 136315 - DNA, 25 bp, Probe sequence
tacaaggttcacaaattgcatcagc

SEQ ID NO: 136316 - DNA, 25 bp, Probe sequence
taaagttaaagatcaccaagcaggt

SEQ ID NO: 136317 - DNA, 25 bp, Probe sequence
tatcgtcgtgcaacatcgtatcatt

SEQ ID NO: 136318 - DNA, 25 bp, Probe sequence
tatcctgcatataatcctaaaccaa

SEQ ID NO: 136319 - DNA, 25 bp, Probe sequence
ttttctttagctttttatcctgcat

SEQ ID NO: 136320 - DNA, 25 bp, Probe sequence
ttccaattttcttcattttaatgtt

SEQ ID NO: 136321 - DNA, 25 bp, Probe sequence
ttgcaggtagctttgtttatattta

SEQ ID NO: 136322 - DNA, 25 bp, Probe sequence
aggcagttttacaacgtccgattca

SEQ ID NO: 136323 - DNA, 25 bp, Probe sequence
attgctgaaactttaaatcttttat

SEQ ID NO: 136324 - DNA, 25 bp, Probe sequence
acgtccgattcagcaagttatgcac

SEQ ID NO: 136325 - DNA, 25 bp, Probe sequence
acagagcgcgttttgtatcaagatt

SEQ ID NO: 136326 - DNA, 25 bp, Probe sequence
aaatcagttgatagcgaaacaatgt

SEQ ID NO: 136327 - DNA, 25 bp, Probe sequence
aaacgctaaaaagattgctgaaact

SEQ ID NO: 136328 - DNA, 25 bp, Probe sequence
aacagagagatttattttagtacaa

SEQ ID NO: 136329 - DNA, 25 bp, Probe sequence
aactgacttgtcatctgataaatca

SEQ ID NO: 136330 - DNA, 25 bp, Probe sequence
aatcttttatatcaattaacaggca

SEQ ID NO: 136331 - DNA, 25 bp, Probe sequence
caacgtccgattcagcaagttatgc

SEQ ID NO: 136332 - DNA, 25 bp, Probe sequence
gcagttttacaacgtccgattcagc

SEQ ID NO: 136333 - DNA, 25 bp, Probe sequence
gcgcgttttgtatcaagattttgta

SEQ ID NO: 136334 - DNA, 25 bp, Probe sequence
gcaagttatgcacaagattttaaat

SEQ ID NO: 136335 - DNA, 25 bp, Probe sequence
gaacagagcgcgttttgtatcaaga

SEQ ID NO: 136336 - DNA, 25 bp, Probe sequence
gaaagttgtgaaagaagttgtggat

SEQ ID NO: 136337 - DNA, 25 bp, Probe sequence
gacaaagagggaacagagcgcgttt

SEQ ID NO: 136338 - DNA, 25 bp, Probe sequence
gagggaacagagcgcgttttgtatc

SEQ ID NO: 136339 - DNA, 25 bp, Probe sequence
gagcgcgttttgtatcaagattttg

SEQ ID NO: 136340 - DNA, 25 bp, Probe sequence
gatagaactgacttgtcatctgata

SEQ ID NO: 136341 - DNA, 25 bp, Probe sequence
gattcagcaagttatgcacaagatt

SEQ ID NO: 136342 - DNA, 25 bp, Probe sequence
gttgtggatagaactgacttgtcat

SEQ ID NO: 136343 - DNA, 25 bp, Probe sequence
gttttacaacgtccgattcagcaag

SEQ ID NO: 136344 - DNA, 25 bp, Probe sequence
gtatcaagattttgtaggcagtttt

SEQ ID NO: 136345 - DNA, 25 bp, Probe sequence
gtaggcagttttacaacgtccgatt

SEQ ID NO: 136346 - DNA, 25 bp, Probe sequence
gtccgattcagcaagttatgcacaa

SEQ ID NO: 136347 - DNA, 25 bp, Probe sequence
gggaacagagcgcgttttgtatcaa

SEQ ID NO: 136348 - DNA, 25 bp, Probe sequence
ggcaatcaaaacggtgtgaaagttg

SEQ ID NO: 136349 - DNA, 25 bp, Probe sequence
tgtggatagaactgacttgtcatct

SEQ ID NO: 136350 - DNA, 25 bp, Probe sequence
tgacttgtcatctgataaatcagtt

SEQ ID NO: 136351 - DNA, 25 bp, Probe sequence
taaggaggtcatttaatatggcaaa

SEQ ID NO: 136352 - DNA, 25 bp, Probe sequence
taaatctgaggaaaacgctaaaaag

SEQ ID NO: 136353 - DNA, 25 bp, Probe sequence
tacaacgtccgattcagcaagttat

SEQ ID NO: 136354 - DNA, 25 bp, Probe sequence
tttacaacgtccgattcagcaagtt

SEQ ID NO: 136355 - DNA, 25 bp, Probe sequence
ttaacaggcaatcaaaacggtgtga

SEQ ID NO: 136356 - DNA, 25 bp, Probe sequence
atttcgtgcgttatggtgtacttga

SEQ ID NO: 136357 - DNA, 25 bp, Probe sequence
atgttgagctttatcctcacttgga

SEQ ID NO: 136358 - DNA, 25 bp, Probe sequence
aggtgtattcatttaccctgcactc

SEQ ID NO: 136359 - DNA, 25 bp, Probe sequence
acgattacgtctccaagtatttctt

SEQ ID NO: 136360 - DNA, 25 bp, Probe sequence
actcactgctatcgtcaatttgtta

SEQ ID NO: 136361 - DNA, 25 bp, Probe sequence
aaagcatattaagcctttgccagaa

SEQ ID NO: 136362 - DNA, 25 bp, Probe sequence
aattgccattggtttcttaatatat

SEQ ID NO: 136363 - DNA, 25 bp, Probe sequence
tcaaggtttacctccaatcgaaatt

SEQ ID NO: 136364 - DNA, 25 bp, Probe sequence
cgtgttctcgttcactggtttagtg

SEQ ID NO: 136365 - DNA, 25 bp, Probe sequence
cggatattcttagttcttggattag

SEQ ID NO: 136366 - DNA, 25 bp, Probe sequence
ccctgcactcttagcacttatcatt

SEQ ID NO: 136367 - DNA, 25 bp, Probe sequence
gcatcaggttgggcatacttcttat

SEQ ID NO: 136368 - DNA, 25 bp, Probe sequence
gaattttcttaaacctgcaaagcat

SEQ ID NO: 136369 - DNA, 25 bp, Probe sequence
gaatgggctggaattcctggtacat

SEQ ID NO: 136370 - DNA, 25 bp, Probe sequence
gagacacacctcaatctcaaggttt

SEQ ID NO: 136371 - DNA, 25 bp, Probe sequence
gttacgctgggtactatttattacg

SEQ ID NO: 136372 - DNA, 25 bp, Probe sequence
gtttcttctttatgttaggtgtcac

SEQ ID NO: 136373 - DNA, 25 bp, Probe sequence
gtatcggtattatgtttgtcctatt

SEQ ID NO: 136374 - DNA, 25 bp, Probe sequence
gtgtacttgattgggcgccagtcta

SEQ ID NO: 136375 - DNA, 25 bp, Probe sequence
gggatttgtaccgttctttacatca

SEQ ID NO: 136376 - DNA, 25 bp, Probe sequence
gggtatgggcaattgcctttgcaaa

SEQ ID NO: 136377 - DNA, 25 bp, Probe sequence
ggtactgtaagtgatcggagcaatg

SEQ ID NO: 136378 - DNA, 25 bp, Probe sequence
ggtattttcatcggttacgctgggt

SEQ ID NO: 136379 - DNA, 25 bp, Probe sequence
ggatgggatgtcggttttattttat

SEQ ID NO: 136380 - DNA, 25 bp, Probe sequence
ggaacgttgcgcataatgttggtgg

SEQ ID NO: 136381 - DNA, 25 bp, Probe sequence
ggccaacatcgtcttaggtgctgta

SEQ ID NO: 136382 - DNA, 25 bp, Probe sequence
tgggcgccagtctacttaagtgaag

SEQ ID NO: 136383 - DNA, 25 bp, Probe sequence
tggttaaatcctccaggcaatgctt

SEQ ID NO: 136384 - DNA, 25 bp, Probe sequence
tggtgctgtaatggccaacatcgtc

SEQ ID NO: 136385 - DNA, 25 bp, Probe sequence
tcaaggtatgggctggccaccttca

SEQ ID NO: 136386 - DNA, 25 bp, Probe sequence
tagcacttatcattgccgcaatttc

SEQ ID NO: 136387 - DNA, 25 bp, Probe sequence
tatggcacctattgctgcttggggt

SEQ ID NO: 136388 - DNA, 25 bp, Probe sequence
tatttggttatctgtttggtgctgt

SEQ ID NO: 136389 - DNA, 25 bp, Probe sequence
tttctgctgtttccatcgcatatgg

SEQ ID NO: 136390 - DNA, 25 bp, Probe sequence
agggtgaattattacctattatctt

SEQ ID NO: 136391 - DNA, 25 bp, Probe sequence
agttgttgtctttgcaatggtgttc

SEQ ID NO: 136392 - DNA, 25 bp, Probe sequence
agcgctttctatttcgaacgttggg

SEQ ID NO: 136393 - DNA, 25 bp, Probe sequence
accaggtgctggattagacccaaca

SEQ ID NO: 136394 - DNA, 25 bp, Probe sequence
aaatatcaatcaactgcacatgcag

SEQ ID NO: 136395 - DNA, 25 bp, Probe sequence
aaactgtagggcgttatggctggaa

SEQ ID NO: 136396 - DNA, 25 bp, Probe sequence
aaaatgatcgttataccagttgtat

SEQ ID NO: 136397 - DNA, 25 bp, Probe sequence
aattagcaccacttggagtgtttgc

SEQ ID NO: 136398 - DNA, 25 bp, Probe sequence
cacagatgtatggaatgcacttaac

SEQ ID NO: 136399 - DNA, 25 bp, Probe sequence
catattattccgacaaacttttttg

SEQ ID NO: 136400 - DNA, 25 bp, Probe sequence
ccagttgtattttgctcactagcgc

SEQ ID NO: 136401 - DNA, 25 bp, Probe sequence
gcggatcgcttgaagctgtgttctg

SEQ ID NO: 136402 - DNA, 25 bp, Probe sequence
gcagcattattcgttgcacagatgt

SEQ ID NO: 136403 - DNA, 25 bp, Probe sequence
gcacatgcagcagaacaatctacat

SEQ ID NO: 136404 - DNA, 25 bp, Probe sequence
gcaatggtgttctttgtattcgcta

SEQ ID NO: 136405 - DNA, 25 bp, Probe sequence
gaagctgtgttctggatgattaata

SEQ ID NO: 136406 - DNA, 25 bp, Probe sequence
gaaaaattagcctacctatgcaagt

SEQ ID NO: 136407 - DNA, 25 bp, Probe sequence
gtaccaggaacttcaatcgttgttt

SEQ ID NO: 136408 - DNA, 25 bp, Probe sequence
gagtgtttgcattcatttgtactac

SEQ ID NO: 136409 - DNA, 25 bp, Probe sequence
gataccattgtacatattattccga

SEQ ID NO: 136410 - DNA, 25 bp, Probe sequence
gtattcgctatactaggactagttg

SEQ ID NO: 136411 - DNA, 25 bp, Probe sequence
gtatggcggcagtaccaggaacttc

SEQ ID NO: 136412 - DNA, 25 bp, Probe sequence
gtgaattgcttttagcattttctac

SEQ ID NO: 136413 - DNA, 25 bp, Probe sequence
gggcttaccggcacaaggtttagca

SEQ ID NO: 136414 - DNA, 25 bp, Probe sequence
ggtgttgtcgtaggacttttattat

SEQ ID NO: 136415 - DNA, 25 bp, Probe sequence
ggtaacctatttaaaccaggtgctg

SEQ ID NO: 136416 - DNA, 25 bp, Probe sequence
ggatcagcactttatcaatctattg

SEQ ID NO: 136417 - DNA, 25 bp, Probe sequence
ggactagttgcatggatgtgtggta

SEQ ID NO: 136418 - DNA, 25 bp, Probe sequence
tggtgttgaccgtatcttagatatg

SEQ ID NO: 136419 - DNA, 25 bp, Probe sequence
tgcattagtgttaggtgttgtcgta

SEQ ID NO: 136420 - DNA, 25 bp, Probe sequence
tagcattttctacatcaagttcgga

SEQ ID NO: 136421 - DNA, 25 bp, Probe sequence
tagggattatcttcggtaacctatt

SEQ ID NO: 136422 - DNA, 25 bp, Probe sequence
tttgctcactagcgctttctatttc

SEQ ID NO: 136423 - DNA, 25 bp, Probe sequence
ttcgcagtattctttggattaggat

SEQ ID NO: 136424 - DNA, 25 bp, Probe sequence
attgacagttacttggaagagaaaa

SEQ ID NO: 136425 - DNA, 25 bp, Probe sequence
atcaaggccataagaatattcaact

SEQ ID NO: 136426 - DNA, 25 bp, Probe sequence
atgaacctggtgtaacttatgttgt

SEQ ID NO: 136427 - DNA, 25 bp, Probe sequence
aggattatttgttgaaggctttgat

SEQ ID NO: 136428 - DNA, 25 bp, Probe sequence
acctggtgtaacttatgttgtgcaa

SEQ ID NO: 136429 - DNA, 25 bp, Probe sequence
aaagtttgaaaactgcaaagcataa

SEQ ID NO: 136430 - DNA, 25 bp, Probe sequence
aaagttatcattatattatttattt

SEQ ID NO: 136431 - DNA, 25 bp, Probe sequence
aaagatgaacctggtgtaacttatg

SEQ ID NO: 136432 - DNA, 25 bp, Probe sequence
aaaacgcgattaaagttatcattat

SEQ ID NO: 136433 - DNA, 25 bp, Probe sequence
aacttatgttgtgcaaccaatcagt

SEQ ID NO: 136434 - DNA, 25 bp, Probe sequence
ctggtgtaacttatgttgtgcaacc

SEQ ID NO: 136435 - DNA, 25 bp, Probe sequence
gctaaaaaaggtctcttctataagg

SEQ ID NO: 136436 - DNA, 25 bp, Probe sequence
gcatttttctttggtctgaaaacat

SEQ ID NO: 136437 - DNA, 25 bp, Probe sequence
gcaaccaatcagtactaataaagga

SEQ ID NO: 136438 - DNA, 25 bp, Probe sequence
gaaggctttgatacagagactaaga

SEQ ID NO: 136439 - DNA, 25 bp, Probe sequence
gaacctggtgtaacttatgttgtgc

SEQ ID NO: 136440 - DNA, 25 bp, Probe sequence
gaaaacatatcaaggccataagaat

SEQ ID NO: 136441 - DNA, 25 bp, Probe sequence
gaaaaaacagagtatagtgctaaaa

SEQ ID NO: 136442 - DNA, 25 bp, Probe sequence
gatgaacctggtgtaacttatgttg

SEQ ID NO: 136443 - DNA, 25 bp, Probe sequence
gattatttgttgaaggctttgatac

SEQ ID NO: 136444 - DNA, 25 bp, Probe sequence
gttgaaggctttgatacagagacta

SEQ ID NO: 136445 - DNA, 25 bp, Probe sequence
gtatagtgctaaaaaaggtctcttc

SEQ ID NO: 136446 - DNA, 25 bp, Probe sequence
gtagcatttttctttggtctgaaaa

SEQ ID NO: 136447 - DNA, 25 bp, Probe sequence
gtaacttatgttgtgcaaccaatca

SEQ ID NO: 136448 - DNA, 25 bp, Probe sequence
gtgctaaaaaaggtctcttctataa

SEQ ID NO: 136449 - DNA, 25 bp, Probe sequence
gtgcaaccaatcagtactaataaag

SEQ ID NO: 136450 - DNA, 25 bp, Probe sequence
ggtgtaacttatgttgtgcaaccaa

SEQ ID NO: 136451 - DNA, 25 bp, Probe sequence
ggtctgaaaacatatcaaggccata

SEQ ID NO: 136452 - DNA, 25 bp, Probe sequence
ggctttgatacagagactaagaaaa

SEQ ID NO: 136453 - DNA, 25 bp, Probe sequence
tgttgtgcaaccaatcagtactaat

SEQ ID NO: 136454 - DNA, 25 bp, Probe sequence
tagtgctaaaaaaggtctcttctat

SEQ ID NO: 136455 - DNA, 25 bp, Probe sequence
tatgttgtgcaaccaatcagtacta

SEQ ID NO: 136456 - DNA, 25 bp, Probe sequence
ttggtctgaaaacatatcaaggcca

SEQ ID NO: 136457 - DNA, 25 bp, Probe sequence
ttgtgcaaccaatcagtactaataa

SEQ ID NO: 136458 - DNA, 25 bp, Probe sequence
atcaatcattttagcgataccagtt

SEQ ID NO: 136459 - DNA, 25 bp, Probe sequence
atcggtacagcagtttcttcatttt

SEQ ID NO: 136460 - DNA, 25 bp, Probe sequence
atcgctttatttgcattaattatgt

SEQ ID NO: 136461 - DNA, 25 bp, Probe sequence
actgaaggtcaaatatcaatcattt

SEQ ID NO: 136462 - DNA, 25 bp, Probe sequence
aagtaggtctagcaaatggtattta

SEQ ID NO: 136463 - DNA, 25 bp, Probe sequence
aagtatttgtgcaggtattggtaac

SEQ ID NO: 136464 - DNA, 25 bp, Probe sequence
aaggtggctttcaacttacattaca

SEQ ID NO: 136465 - DNA, 25 bp, Probe sequence
aatatcggtacagcagtttcttcat

SEQ ID NO: 136466 - DNA, 25 bp, Probe sequence
aattattatcgctttatttgcatta

SEQ ID NO: 136467 - DNA, 25 bp, Probe sequence
cagcagtttcttcatttttagcacc

SEQ ID NO: 136468 - DNA, 25 bp, Probe sequence
cgtatcaatgatgggtggtttagga

SEQ ID NO: 136469 - DNA, 25 bp, Probe sequence
gcgggtattattggttggcaaacaa

SEQ ID NO: 136470 - DNA, 25 bp, Probe sequence
gcatttggtattttcttacctaact

SEQ ID NO: 136471 - DNA, 25 bp, Probe sequence
gcaaatggtatcgtatcaatgatgg

SEQ ID NO: 136472 - DNA, 25 bp, Probe sequence
gaagttacttaattattatcgcttt

SEQ ID NO: 136473 - DNA, 25 bp, Probe sequence
gatgggtggtttaggaggattcttc

SEQ ID NO: 136474 - DNA, 25 bp, Probe sequence
gttggtgttacatcagttcctaaat

SEQ ID NO: 136475 - DNA, 25 bp, Probe sequence
gtatttcagaccatatcgcattatt

SEQ ID NO: 136476 - DNA, 25 bp, Probe sequence
gtgcaggtattggtaacggcttaat

SEQ ID NO: 136477 - DNA, 25 bp, Probe sequence
ggtgtattcattgcgctggcaacat

SEQ ID NO: 136478 - DNA, 25 bp, Probe sequence
ggtctagcaaatggtatttatggta

SEQ ID NO: 136479 - DNA, 25 bp, Probe sequence
ggtacagcagtttcttcatttttag

SEQ ID NO: 136480 - DNA, 25 bp, Probe sequence
tcgtattgttattcccgatattttt

SEQ ID NO: 136481 - DNA, 25 bp, Probe sequence
tcttacctaactacttagtaaatca

SEQ ID NO: 136482 - DNA, 25 bp, Probe sequence
tcattttagcgataccagttatttt

SEQ ID NO: 136483 - DNA, 25 bp, Probe sequence
tcaggtgtattcattgcgctggcaa

SEQ ID NO: 136484 - DNA, 25 bp, Probe sequence
tagcgataccagttattttgggatc

SEQ ID NO: 136485 - DNA, 25 bp, Probe sequence
tagtaaatcattttggaattgacaa

SEQ ID NO: 136486 - DNA, 25 bp, Probe sequence
taggtgataaatttaatgcagttaa

SEQ ID NO: 136487 - DNA, 25 bp, Probe sequence
tatattacttaagttattggtattt

SEQ ID NO: 136488 - DNA, 25 bp, Probe sequence
ttacatcagttcctaaatatttccc

SEQ ID NO: 136489 - DNA, 25 bp, Probe sequence
tattcattgcgctggcaacattctt

SEQ ID NO: 136490 - DNA, 25 bp, Probe sequence
tattgttattcccgatatttttctt

SEQ ID NO: 136491 - DNA, 25 bp, Probe sequence
ttaggtatttcagaccatatcgcat

SEQ ID NO: 136492 - DNA, 25 bp, Probe sequence
atgccaccaggtgagtcaggtctta

SEQ ID NO: 136493 - DNA, 25 bp, Probe sequence
attgccacttattgccaaaggttac

SEQ ID NO: 136494 - DNA, 25 bp, Probe sequence
atattgccacttattgccaaaggtt

SEQ ID NO: 136495 - DNA, 25 bp, Probe sequence
atgtgttgcgtaatggtgcgaaagg

SEQ ID NO: 136496 - DNA, 25 bp, Probe sequence
aggtcttatcgctacgagtaaaatt

SEQ ID NO: 136497 - DNA, 25 bp, Probe sequence
gatatgaaacttacaacatctttag

SEQ ID NO: 136498 - DNA, 25 bp, Probe sequence
acgcatattatgacaaagcttggct

SEQ ID NO: 136499 - DNA, 25 bp, Probe sequence
acctgatgtgttactaatggattta

SEQ ID NO: 136500 - DNA, 25 bp, Probe sequence
aaatcttatcaaaacgagaactaga

SEQ ID NO: 136501 - DNA, 25 bp, Probe sequence
aaaatgatatggaagttgttgcaac

SEQ ID NO: 136502 - DNA, 25 bp, Probe sequence
aatgcacctgatgaacaattattgt

SEQ ID NO: 136503 - DNA, 25 bp, Probe sequence
caattattgttagctattcgaactg

SEQ ID NO: 136504 - DNA, 25 bp, Probe sequence
caacatctttagtgaatgaatttgt

SEQ ID NO: 136505 - DNA, 25 bp, Probe sequence
caggtgagtcaggtcttatcgctac

SEQ ID NO: 136506 - DNA, 25 bp, Probe sequence
cagatccttttaaaatcttatcaaa

SEQ ID NO: 136507 - DNA, 25 bp, Probe sequence
cgagtaaaattgctgacagttttcc

SEQ ID NO: 136508 - DNA, 25 bp, Probe sequence
ccaggtgagtcaggtcttatcgcta

SEQ ID NO: 136509 - DNA, 25 bp, Probe sequence
gccacttattgccaaaggttacggg

SEQ ID NO: 136510 - DNA, 25 bp, Probe sequence
gccaccaggtgagtcaggtcttatc

SEQ ID NO: 136511 - DNA, 25 bp, Probe sequence
gctattcgaactgtatataaaggtg

SEQ ID NO: 136512 - DNA, 25 bp, Probe sequence
gaaaatagtcattgccgatgatcac

SEQ ID NO: 136513 - DNA, 25 bp, Probe sequence
gagaactagaaatattgccacttat

SEQ ID NO: 136514 - DNA, 25 bp, Probe sequence
gtatctaattcaaatcaggacactg

SEQ ID NO: 136515 - DNA, 25 bp, Probe sequence
gtcaggtcttatcgctacgagtaaa

SEQ ID NO: 136516 - DNA, 25 bp, Probe sequence
ggttacatattgaaaaatgcacctg

SEQ ID NO: 136517 - DNA, 25 bp, Probe sequence
ggaatataaacctgatgtgttacta

SEQ ID NO: 136518 - DNA, 25 bp, Probe sequence
tggtgcgaaaggttacatattgaaa

SEQ ID NO: 136519 - DNA, 25 bp, Probe sequence
tgttagctattcgaactgtatataa

SEQ ID NO: 136520 - DNA, 25 bp, Probe sequence
tgttgcgtaatggtgcgaaaggtta

SEQ ID NO: 136521 - DNA, 25 bp, Probe sequence
tgagtcaggtcttatcgctacgagt

SEQ ID NO: 136522 - DNA, 25 bp, Probe sequence
tcgctacgagtaaaattgctgacag

SEQ ID NO: 136523 - DNA, 25 bp, Probe sequence
tcattgccgatgatcacgctgttgt

SEQ ID NO: 136524 - DNA, 25 bp, Probe sequence
tagtcattgccgatgatcacgctgt

SEQ ID NO: 136525 - DNA, 25 bp, Probe sequence
ttcaaatcaggacactgcaaacaca

SEQ ID NO: 136526 - DNA, 25 bp, Probe sequence
attttccgtgattaatttcgataat

SEQ ID NO: 136527 - DNA, 25 bp, Probe sequence
atatgcctatgtgattcaagcactt

SEQ ID NO: 136528 - DNA, 25 bp, Probe sequence
atatgtgatggcgaatgcacttggt

SEQ ID NO: 136529 - DNA, 25 bp, Probe sequence
atgcctatgtgattcaagcacttag

SEQ ID NO: 136530 - DNA, 25 bp, Probe sequence
atgatgacattttcattatcagaaa

SEQ ID NO: 136531 - DNA, 25 bp, Probe sequence
atgtttgacatcaccaaaaggagtg

SEQ ID NO: 136532 - DNA, 25 bp, Probe sequence
atgtgatggcgaatgcacttggtga

SEQ ID NO: 136533 - DNA, 25 bp, Probe sequence
agagaatattcaattaatcattatg

SEQ ID NO: 136534 - DNA, 25 bp, Probe sequence
actttctgattatctaccgttgatg

SEQ ID NO: 136535 - DNA, 25 bp, Probe sequence
aaaaggagtgaaacatcatgcttaa

SEQ ID NO: 136536 - DNA, 25 bp, Probe sequence
aactttctgattatctaccgttgat

SEQ ID NO: 136537 - DNA, 25 bp, Probe sequence
aagtggcagaatggcgaaatgatcc

SEQ ID NO: 136538 - DNA, 25 bp, Probe sequence
aatgaactttctgattatctaccgt

SEQ ID NO: 136539 - DNA, 25 bp, Probe sequence
aatccatatgcctatgtgattcaag

SEQ ID NO: 136540 - DNA, 25 bp, Probe sequence
aatcattatgattattgaggatgga

SEQ ID NO: 136541 - DNA, 25 bp, Probe sequence
caaaaagaacgtgggcaaatgttag

SEQ ID NO: 136542 - DNA, 25 bp, Probe sequence
ccatatgcctatgtgattcaagcac

SEQ ID NO: 136543 - DNA, 25 bp, Probe sequence
gcctatgtgattcaagcacttagaa

SEQ ID NO: 136544 - DNA, 25 bp, Probe sequence
gaatggcgaaatgatccaagagctg

SEQ ID NO: 136545 - DNA, 25 bp, Probe sequence
gaactttctgattatctaccgttga

SEQ ID NO: 136546 - DNA, 25 bp, Probe sequence
gaaatgatccaagagctgaagagaa

SEQ ID NO: 136547 - DNA, 25 bp, Probe sequence
gaaattatgtttgacatcaccaaaa

SEQ ID NO: 136548 - DNA, 25 bp, Probe sequence
gaggatggaacatatgtgatggcga

SEQ ID NO: 136549 - DNA, 25 bp, Probe sequence
gatggcgaatgcacttggtgaagat

SEQ ID NO: 136550 - DNA, 25 bp, Probe sequence
gattcaagcacttagaaaaacattg

SEQ ID NO: 136551 - DNA, 25 bp, Probe sequence
gtgatggcgaatgcacttggtgaag

SEQ ID NO: 136552 - DNA, 25 bp, Probe sequence
gtggcagaatggcgaaatgatccaa

SEQ ID NO: 136553 - DNA, 25 bp, Probe sequence
ggaacatatgtgatggcgaatgcac

SEQ ID NO: 136554 - DNA, 25 bp, Probe sequence
tggcgaatgcacttggtgaagataa

SEQ ID NO: 136555 - DNA, 25 bp, Probe sequence
ggcgaaatgatccaagagctgaaga

SEQ ID NO: 136556 - DNA, 25 bp, Probe sequence
tgatccaagagctgaagagaatatt

SEQ ID NO: 136557 - DNA, 25 bp, Probe sequence
tgacattttcattatcagaaatcaa

SEQ ID NO: 136558 - DNA, 25 bp, Probe sequence
tgaactttctgattatctaccgttg

SEQ ID NO: 136559 - DNA, 25 bp, Probe sequence
ttccgtgattaatttcgataatttt

SEQ ID NO: 136560 - DNA, 25 bp, Probe sequence
attggattgaagctgcacaaaactc

SEQ ID NO: 136561 - DNA, 25 bp, Probe sequence
attgcttgaatccaagttgcgttgc

SEQ ID NO: 136562 - DNA, 25 bp, Probe sequence
atgatgcagatcgagttcatgaagc

SEQ ID NO: 136563 - DNA, 25 bp, Probe sequence
atgtgaacattgcttgaatccaagt

SEQ ID NO: 136564 - DNA, 25 bp, Probe sequence
aacgtgatgaagatggcattgtatt

SEQ ID NO: 136565 - DNA, 25 bp, Probe sequence
caagacgcatgtcgtggatggcgtt

SEQ ID NO: 136566 - DNA, 25 bp, Probe sequence
ctgaaacttgtacaggacgtatgcg

SEQ ID NO: 136567 - DNA, 25 bp, Probe sequence
cgatggtttggtattgcccaccact

SEQ ID NO: 136568 - DNA, 25 bp, Probe sequence
cgatgccgatggtttggtattgccc

SEQ ID NO: 136569 - DNA, 25 bp, Probe sequence
cccaccacttagcccaattatgagc

SEQ ID NO: 136570 - DNA, 25 bp, Probe sequence
ccttcaggtgctatgtataaacgtg

SEQ ID NO: 136571 - DNA, 25 bp, Probe sequence
gcctacggtatgctctgaaacttgt

SEQ ID NO: 136572 - DNA, 25 bp, Probe sequence
gcgcaagttgcgatggtattaaatt

SEQ ID NO: 136573 - DNA, 25 bp, Probe sequence
gcatgtcgtggatggcgttactgta

SEQ ID NO: 136574 - DNA, 25 bp, Probe sequence
gaaattgaatggggacctaactggg

SEQ ID NO: 136575 - DNA, 25 bp, Probe sequence
gaatcgaggcgggtatgcctacggt

SEQ ID NO: 136576 - DNA, 25 bp, Probe sequence
gacaaatcgtccaggtgctgagtac

SEQ ID NO: 136577 - DNA, 25 bp, Probe sequence
gacaggttgtccatataagaaagtt

SEQ ID NO: 136578 - DNA, 25 bp, Probe sequence
gatgccatacgtgtagtgtgacatg

SEQ ID NO: 136579 - DNA, 25 bp, Probe sequence
gtatttaccacgtttatgtgaacat

SEQ ID NO: 136580 - DNA, 25 bp, Probe sequence
gtatgctctgaaacttgtacaggac

SEQ ID NO: 136581 - DNA, 25 bp, Probe sequence
gtgacatgtaaaaacacttggacaa

SEQ ID NO: 136582 - DNA, 25 bp, Probe sequence
ggggacctaactgggaagatgactt

SEQ ID NO: 136583 - DNA, 25 bp, Probe sequence
ggtgttttattatatgatgcagatc

SEQ ID NO: 136584 - DNA, 25 bp, Probe sequence
ggtatgcctacggtatgctctgaaa

SEQ ID NO: 136585 - DNA, 25 bp, Probe sequence
ggcgttactgtatgacaggttgtcc

SEQ ID NO: 136586 - DNA, 25 bp, Probe sequence
tgagaatttctatggagggattttc

SEQ ID NO: 136587 - DNA, 25 bp, Probe sequence
tgcataggatgccatacgtgtagtg

SEQ ID NO: 136588 - DNA, 25 bp, Probe sequence
tgcgattttcccagccattgaagaa

SEQ ID NO: 136589 - DNA, 25 bp, Probe sequence
tcctgaatttagaacgatgccgatg

SEQ ID NO: 136590 - DNA, 25 bp, Probe sequence
tcgtggatggcgttactgtatgaca

SEQ ID NO: 136591 - DNA, 25 bp, Probe sequence
ttttcccagccattgaagaaatgcg

SEQ ID NO: 136592 - DNA, 25 bp, Probe sequence
ttatgatgtatttaccacgtttatg

SEQ ID NO: 136593 - DNA, 25 bp, Probe sequence
ttccaatttgacgaaacttttatga

SEQ ID NO: 136594 - DNA, 25 bp, Probe sequence
atatgcatccatatgtacatccttt

SEQ ID NO: 136595 - DNA, 25 bp, Probe sequence
atgttatgtggctgtcaaggtgtga

SEQ ID NO: 136596 - DNA, 25 bp, Probe sequence
atggcacaatgggtcaacgttggga

SEQ ID NO: 136597 - DNA, 25 bp, Probe sequence
actgactatccaagttgtggtccgg

SEQ ID NO: 136598 - DNA, 25 bp, Probe sequence
acacgtggtggttcacacaacgcgc

SEQ ID NO: 136599 - DNA, 25 bp, Probe sequence
aagactggcaaggaccaccacgttt

SEQ ID NO: 136600 - DNA, 25 bp, Probe sequence
aacatattcaaacgcctgggtcaga

SEQ ID NO: 136601 - DNA, 25 bp, Probe sequence
aagagcagttatttcgcatcgtatg

SEQ ID NO: 136602 - DNA, 25 bp, Probe sequence
cacaacgcgccgactagaatccatt

SEQ ID NO: 136603 - DNA, 25 bp, Probe sequence
ctggacgtacaatgcctaactttgc

SEQ ID NO: 136604 - DNA, 25 bp, Probe sequence
catggtgtaagtttcggtgtcagtg

SEQ ID NO: 136605 - DNA, 25 bp, Probe sequence
ccaattccaactcgacaagtcactt

SEQ ID NO: 136606 - DNA, 25 bp, Probe sequence
gcaccgaatcctggttcagatgctg

SEQ ID NO: 136607 - DNA, 25 bp, Probe sequence
gaagggcgttcaatgattatcatgg

SEQ ID NO: 136608 - DNA, 25 bp, Probe sequence
gaacgcgactacactaaaatttacg

SEQ ID NO: 136609 - DNA, 25 bp, Probe sequence
gaaaccaacacaactagtcggagga

SEQ ID NO: 136610 - DNA, 25 bp, Probe sequence
gaaacaattcaattcccatactttg

SEQ ID NO: 136611 - DNA, 25 bp, Probe sequence
gaggtggtccaacggtttggatatc

SEQ ID NO: 136612 - DNA, 25 bp, Probe sequence
gatgctttggtactgcgttatttaa

SEQ ID NO: 136613 - DNA, 25 bp, Probe sequence
gttgtggtccggatatgcctgaata

SEQ ID NO: 136614 - DNA, 25 bp, Probe sequence
gtatataaaccgacattgccgccaa

SEQ ID NO: 136615 - DNA, 25 bp, Probe sequence
ggtgtgaatggtggcggttgggctc

SEQ ID NO: 136616 - DNA, 25 bp, Probe sequence
ggtgacaaagtccgtattgctacaa

SEQ ID NO: 136617 - DNA, 25 bp, Probe sequence
ggttggttaccatcatatccacaat

SEQ ID NO: 136618 - DNA, 25 bp, Probe sequence
ggatggagtactgtcgcatttgcga

SEQ ID NO: 136619 - DNA, 25 bp, Probe sequence
ggttgggctcactatgtgggacaag

SEQ ID NO: 136620 - DNA, 25 bp, Probe sequence
ggcaaaagactatttacctggaacg

SEQ ID NO: 136621 - DNA, 25 bp, Probe sequence
ggcaagtcaatatggcgtgcgtcgt

SEQ ID NO: 136622 - DNA, 25 bp, Probe sequence
ggcgtgcgtcgttttgatcataaat

SEQ ID NO: 136623 - DNA, 25 bp, Probe sequence
tgggtgcgggtattaaccattggtt

SEQ ID NO: 136624 - DNA, 25 bp, Probe sequence
tgcagcaggtgctcgattcatcaat

SEQ ID NO: 136625 - DNA, 25 bp, Probe sequence
tgcgcaaaacgctatcgatactgaa

SEQ ID NO: 136626 - DNA, 25 bp, Probe sequence
tagcagctagacttggttggttacc

SEQ ID NO: 136627 - DNA, 25 bp, Probe sequence
tatacacctgcttggcaagaagcca

SEQ ID NO: 136628 - DNA, 25 bp, Probe sequence
atgaaaccgaatttgccggaatcat

SEQ ID NO: 136629 - DNA, 25 bp, Probe sequence
ataataaatctccatctgacgccat

SEQ ID NO: 136630 - DNA, 25 bp, Probe sequence
atcaattacccatttcctacttata

SEQ ID NO: 136631 - DNA, 25 bp, Probe sequence
atcgcaggtcctatcgttatcgaaa

SEQ ID NO: 136632 - DNA, 25 bp, Probe sequence
aggttctcttcttttagaattagca

SEQ ID NO: 136633 - DNA, 25 bp, Probe sequence
agctgtagcactaaactatggtcat

SEQ ID NO: 136634 - DNA, 25 bp, Probe sequence
aaaagatttaggttatgcgttgcaa

SEQ ID NO: 136635 - DNA, 25 bp, Probe sequence
aacaatcacttgtattttaccatct

SEQ ID NO: 136636 - DNA, 25 bp, Probe sequence
aacaacacaaaaactgccatcttta

SEQ ID NO: 136637 - DNA, 25 bp, Probe sequence
aaggtttcatattagctgaccgtgg

SEQ ID NO: 136638 - DNA, 25 bp, Probe sequence
aatgttgtcaacgccttaagagata

SEQ ID NO: 136639 - DNA, 25 bp, Probe sequence
aatccttcaccacgatacaaatcaa

SEQ ID NO: 136640 - DNA, 25 bp, Probe sequence
cagtcgtatttggtatttctgcctt

SEQ ID NO: 136641 - DNA, 25 bp, Probe sequence
cttcatttaatccttcaccacgata

SEQ ID NO: 136642 - DNA, 25 bp, Probe sequence
ctgaccgtggacgccaaacaactaa

SEQ ID NO: 136643 - DNA, 25 bp, Probe sequence
gccggaatcatttttagttttacag

SEQ ID NO: 136644 - DNA, 25 bp, Probe sequence
gcttctttagctgtatcagtcgctg

SEQ ID NO: 136645 - DNA, 25 bp, Probe sequence
gcaacaaatgcgcaatcaattaccc

SEQ ID NO: 136646 - DNA, 25 bp, Probe sequence
gtcaatcctcaaccggtaagtcaac

SEQ ID NO: 136647 - DNA, 25 bp, Probe sequence
gaagttgaaatcgcaggtcctatcg

SEQ ID NO: 136648 - DNA, 25 bp, Probe sequence
gacgagtttcctgaagcacaaacat

SEQ ID NO: 136649 - DNA, 25 bp, Probe sequence
gttttacaggtcaatcctcaaccgg

SEQ ID NO: 136650 - DNA, 25 bp, Probe sequence
gtaagtcaactgcagcttctttagc

SEQ ID NO: 136651 - DNA, 25 bp, Probe sequence
ggtataaagacaagcctcccaaaga

SEQ ID NO: 136652 - DNA, 25 bp, Probe sequence
ggaggaatgcctactgaagttgaaa

SEQ ID NO: 136653 - DNA, 25 bp, Probe sequence
tactggaaacaccgtttggtcctat

SEQ ID NO: 136654 - DNA, 25 bp, Probe sequence
tgactcaaactaacccttcatttaa

SEQ ID NO: 136655 - DNA, 25 bp, Probe sequence
tccatcactgaaggtcaaggtcgtc

SEQ ID NO: 136656 - DNA, 25 bp, Probe sequence
tctccatctgacgccatttgtgata

SEQ ID NO: 136657 - DNA, 25 bp, Probe sequence
tctctgaacgctcattagctgataa

SEQ ID NO: 136658 - DNA, 25 bp, Probe sequence
tcagtcgctggtaaccctaccaaag

SEQ ID NO: 136659 - DNA, 25 bp, Probe sequence
ttctgccttagtgacgagtttcctg

SEQ ID NO: 136660 - DNA, 25 bp, Probe sequence
ttatgacttaactcctaaaggtaca

SEQ ID NO: 136661 - DNA, 25 bp, Probe sequence
ttggtcctattgtatcgttaagtga

SEQ ID NO: 136662 - DNA, 25 bp, Probe sequence
atcatgacatttttagactaggcct

SEQ ID NO: 136663 - DNA, 25 bp, Probe sequence
actggtaaatcaacagcagcagctt

SEQ ID NO: 136664 - DNA, 25 bp, Probe sequence
aaagctgtggcactaaaccatggtc

SEQ ID NO: 136665 - DNA, 25 bp, Probe sequence
aaaagtagtgactatgtctagttgt

SEQ ID NO: 136666 - DNA, 25 bp, Probe sequence
aacgttccaatgtacacggagaagt

SEQ ID NO: 136667 - DNA, 25 bp, Probe sequence
aaccgtggtaaattttctgatgata

SEQ ID NO: 136668 - DNA, 25 bp, Probe sequence
gggcgtcaacgttccaatgtacacg

SEQ ID NO: 136669 - DNA, 25 bp, Probe sequence
aatgttgttaatgcgctaagggata

SEQ ID NO: 136670 - DNA, 25 bp, Probe sequence
aattaatgcgcgatgaaatgcccac

SEQ ID NO: 136671 - DNA, 25 bp, Probe sequence
caacctctgaatacagtatctttac

SEQ ID NO: 136672 - DNA, 25 bp, Probe sequence
caagctttctgaagtacaaacgtga

SEQ ID NO: 136673 - DNA, 25 bp, Probe sequence
cacttctgtgatttcaacctctgaa

SEQ ID NO: 136674 - DNA, 25 bp, Probe sequence
cacttgtcttttaccatttaaagct

SEQ ID NO: 136675 - DNA, 25 bp, Probe sequence
ccccacggttatattgtaatgatag

SEQ ID NO: 136676 - DNA, 25 bp, Probe sequence
ccttagtgacaagctttctgaagta

SEQ ID NO: 136677 - DNA, 25 bp, Probe sequence
gcttatccattagagcctaaaggta

SEQ ID NO: 136678 - DNA, 25 bp, Probe sequence
gcagcagctttagcagtatccgtcg

SEQ ID NO: 136679 - DNA, 25 bp, Probe sequence
gaattggggcacttctgtgatttca

SEQ ID NO: 136680 - DNA, 25 bp, Probe sequence
gaatttgcaggaattatctttagtt

SEQ ID NO: 136681 - DNA, 25 bp, Probe sequence
gaatctgaccatgatcgaattacaa

SEQ ID NO: 136682 - DNA, 25 bp, Probe sequence
gaagtcaaaatcattgcgtctgtat

SEQ ID NO: 136683 - DNA, 25 bp, Probe sequence
gaacagtcaaagatggcaatggcaa

SEQ ID NO: 136684 - DNA, 25 bp, Probe sequence
gactaggcctataccatttagatac

SEQ ID NO: 136685 - DNA, 25 bp, Probe sequence
gttcgagaactatggactaattgcc

SEQ ID NO: 136686 - DNA, 25 bp, Probe sequence
gataaagcgatcgaagtcattactc

SEQ ID NO: 136687 - DNA, 25 bp, Probe sequence
gataccatttatacatctaaacaat

SEQ ID NO: 136688 - DNA, 25 bp, Probe sequence
gtatctttactgattctgctcaaaa

SEQ ID NO: 136689 - DNA, 25 bp, Probe sequence
gtaatcaaacactttttcgaagttg

SEQ ID NO: 136690 - DNA, 25 bp, Probe sequence
gggttggcataaaactatcccacct

SEQ ID NO: 136691 - DNA, 25 bp, Probe sequence
ggcaaaaaacagtcacttgtctttt

SEQ ID NO: 136692 - DNA, 25 bp, Probe sequence
tgtggcactaaaccatggtcatgtt

SEQ ID NO: 136693 - DNA, 25 bp, Probe sequence
tgtctagttgtatggctgttgaagc

SEQ ID NO: 136694 - DNA, 25 bp, Probe sequence
tatgttgttagagcatcacttccaa

SEQ ID NO: 136695 - DNA, 25 bp, Probe sequence
tatcatctttagatcctattgtcga

SEQ ID NO: 136696 - DNA, 25 bp, Probe sequence
attacctcaatatgcttgtcatcac

SEQ ID NO: 136697 - DNA, 25 bp, Probe sequence
aggttggcgcattaactatcgcgat

SEQ ID NO: 136698 - DNA, 25 bp, Probe sequence
aggatatcctgaacaatatagctca

SEQ ID NO: 136699 - DNA, 25 bp, Probe sequence
agatttgcaatcatcctatatggac

SEQ ID NO: 136700 - DNA, 25 bp, Probe sequence
actattagccatcgatgtaggtgtc

SEQ ID NO: 136701 - DNA, 25 bp, Probe sequence
actatcgcgatattaatcgctattc

SEQ ID NO: 136702 - DNA, 25 bp, Probe sequence
acagctattagtatcggtatcatcg

SEQ ID NO: 136703 - DNA, 25 bp, Probe sequence
aaaacatcgcattattactaggtgt

SEQ ID NO: 136704 - DNA, 25 bp, Probe sequence
aatatgcttgtcatcacttgccttt

SEQ ID NO: 136705 - DNA, 25 bp, Probe sequence
caaatgtttatggcgcttggtctgg

SEQ ID NO: 136706 - DNA, 25 bp, Probe sequence
catactttttaattggatttgtcat

SEQ ID NO: 136707 - DNA, 25 bp, Probe sequence
gccatcgatgtaggtgtcgttattt

SEQ ID NO: 136708 - DNA, 25 bp, Probe sequence
gctccaatattcaaatcacgtgaaa

SEQ ID NO: 136709 - DNA, 25 bp, Probe sequence
gctatcttttcaatgacgacaaatg

SEQ ID NO: 136710 - DNA, 25 bp, Probe sequence
gcttattaatggccatggttgcttt

SEQ ID NO: 136711 - DNA, 25 bp, Probe sequence
gcacttaaaccgcttatgacaatca

SEQ ID NO: 136712 - DNA, 25 bp, Probe sequence
gcaatcatcctatatggacttaaac

SEQ ID NO: 136713 - DNA, 25 bp, Probe sequence
gacgacaaatgtttatggcgcttgg

SEQ ID NO: 136714 - DNA, 25 bp, Probe sequence
gatgctctttgtcaacaaactgttg

SEQ ID NO: 136715 - DNA, 25 bp, Probe sequence
gtattgtaatgatgctctttgtcaa

SEQ ID NO: 136716 - DNA, 25 bp, Probe sequence
ggtcgaataagcattccatactttt

SEQ ID NO: 136717 - DNA, 25 bp, Probe sequence
ggtgacaaaaacatcgcattattac

SEQ ID NO: 136718 - DNA, 25 bp, Probe sequence
ggtatcatcgcattgattggtacga

SEQ ID NO: 136719 - DNA, 25 bp, Probe sequence
ggatttgtcattatggccttagtga

SEQ ID NO: 136720 - DNA, 25 bp, Probe sequence
ggacttaaactcaatatattcgata

SEQ ID NO: 136721 - DNA, 25 bp, Probe sequence
ggctttggtggtagtgatgcactta

SEQ ID NO: 136722 - DNA, 25 bp, Probe sequence
tggccttagtgaatacatatgtaac

SEQ ID NO: 136723 - DNA, 25 bp, Probe sequence
tccattaaccatcgtacttatttta

SEQ ID NO: 136724 - DNA, 25 bp, Probe sequence
tactgattccattaaccatcgtact

SEQ ID NO: 136725 - DNA, 25 bp, Probe sequence
tagctggtggctttggtggtagtga

SEQ ID NO: 136726 - DNA, 25 bp, Probe sequence
tagtcgcattatttagctttttagc

SEQ ID NO: 136727 - DNA, 25 bp, Probe sequence
tatgacaatcattattacctcaata

SEQ ID NO: 136728 - DNA, 25 bp, Probe sequence
ttcgatattatcggtcaaggtagta

SEQ ID NO: 136729 - DNA, 25 bp, Probe sequence
ttccgttcatcagaatcatctagca

SEQ ID NO: 136730 - DNA, 25 bp, Probe sequence
attcgtcgcaatatgattactatga

SEQ ID NO: 136731 - DNA, 25 bp, Probe sequence
atatatttcaaccgatcgtgcagat

SEQ ID NO: 136732 - DNA, 25 bp, Probe sequence
atatcattcgtcgcaatatgattac

SEQ ID NO: 136733 - DNA, 25 bp, Probe sequence
atgacgaaggttatggctgtttgct

SEQ ID NO: 136734 - DNA, 25 bp, Probe sequence
atgtaacatatatttcaaccgatcg

SEQ ID NO: 136735 - DNA, 25 bp, Probe sequence
aggttatggctgtttgctaaaccca

SEQ ID NO: 136736 - DNA, 25 bp, Probe sequence
acgaaggttatggctgtttgctaaa

SEQ ID NO: 136737 - DNA, 25 bp, Probe sequence
acatatcattcgtcgcaatatgatt

SEQ ID NO: 136738 - DNA, 25 bp, Probe sequence
acatatatttcaaccgatcgtgcag

SEQ ID NO: 136739 - DNA, 25 bp, Probe sequence
aacatatatttcaaccgatcgtgca

SEQ ID NO: 136740 - DNA, 25 bp, Probe sequence
catatatttcaaccgatcgtgcaga

SEQ ID NO: 136741 - DNA, 25 bp, Probe sequence
cattcgtcgcaatatgattactatg

SEQ ID NO: 136742 - DNA, 25 bp, Probe sequence
cttatgctctgtgaacatttatatg

SEQ ID NO: 136743 - DNA, 25 bp, Probe sequence
ctctgtgaacatttatatgacgaag

SEQ ID NO: 136744 - DNA, 25 bp, Probe sequence
cgaaggttatggctgtttgctaaac

SEQ ID NO: 136745 - DNA, 25 bp, Probe sequence
gctctgtgaacatttatatgacgaa

SEQ ID NO: 136746 - DNA, 25 bp, Probe sequence
gcaaggtttacttgataggtgcggg

SEQ ID NO: 136747 - DNA, 25 bp, Probe sequence
gcaattttatgtagtaagtggttct

SEQ ID NO: 136748 - DNA, 25 bp, Probe sequence
gaaggttatggctgtttgctaaacc

SEQ ID NO: 136749 - DNA, 25 bp, Probe sequence
gacgaaggttatggctgtttgctaa

SEQ ID NO: 136750 - DNA, 25 bp, Probe sequence
gttatggctgtttgctaaacccaaa

SEQ ID NO: 136751 - DNA, 25 bp, Probe sequence
gtaacatatatttcaaccgatcgtg

SEQ ID NO: 136752 - DNA, 25 bp, Probe sequence
ggttatggctgtttgctaaacccaa

SEQ ID NO: 136753 - DNA, 25 bp, Probe sequence
ggcaaggtttacttgataggtgcgg

SEQ ID NO: 136754 - DNA, 25 bp, Probe sequence
tgtaacatatatttcaaccgatcgt

SEQ ID NO: 136755 - DNA, 25 bp, Probe sequence
tgacgaaggttatggctgtttgcta

SEQ ID NO: 136756 - DNA, 25 bp, Probe sequence
tgctctgtgaacatttatatgacga

SEQ ID NO: 136757 - DNA, 25 bp, Probe sequence
taacatatatttcaaccgatcgtgc

SEQ ID NO: 136758 - DNA, 25 bp, Probe sequence
taagcagcaagaaaatgtaacatat

SEQ ID NO: 136759 - DNA, 25 bp, Probe sequence
tatgacgaaggttatggctgtttgc

SEQ ID NO: 136760 - DNA, 25 bp, Probe sequence
tatgctctgtgaacatttatatgac

SEQ ID NO: 136761 - DNA, 25 bp, Probe sequence
tatatgatcgattagtgaatccgtt

SEQ ID NO: 136762 - DNA, 25 bp, Probe sequence
ttatggctgtttgctaaacccaaat

SEQ ID NO: 136763 - DNA, 25 bp, Probe sequence
ttcgtcgcaatatgattactatgat

SEQ ID NO: 136764 - DNA, 25 bp, Probe sequence
attggctgatggacgcgagattccg

SEQ ID NO: 136765 - DNA, 25 bp, Probe sequence
attgctgatatggctgatgatgaaa

SEQ ID NO: 136766 - DNA, 25 bp, Probe sequence
atgcgttcagcatcagcttatggta

SEQ ID NO: 136767 - DNA, 25 bp, Probe sequence
atggtttatccacatgatcatgaag

SEQ ID NO: 136768 - DNA, 25 bp, Probe sequence
agaggcatcgctatcaattgctgat

SEQ ID NO: 136769 - DNA, 25 bp, Probe sequence
accgcatcatgctttcaaatatttt

SEQ ID NO: 136770 - DNA, 25 bp, Probe sequence
acgacacgacttggcattcgtttag

SEQ ID NO: 136771 - DNA, 25 bp, Probe sequence
aagcagtcgaagctgaaccttggga

SEQ ID NO: 136772 - DNA, 25 bp, Probe sequence
aagacggtaatgtagttggtgcagt

SEQ ID NO: 136773 - DNA, 25 bp, Probe sequence
aagtttatggactcgttgcaccact

SEQ ID NO: 136774 - DNA, 25 bp, Probe sequence
aagggatcaacaacatttacgtcat

SEQ ID NO: 136775 - DNA, 25 bp, Probe sequence
aatgggtgtatcaggctgcccaaga

SEQ ID NO: 136776 - DNA, 25 bp, Probe sequence
aatgcaagccaacacaactgaaatc

SEQ ID NO: 136777 - DNA, 25 bp, Probe sequence
caggctgcccaagaagttgtgttga

SEQ ID NO: 136778 - DNA, 25 bp, Probe sequence
ctaacgaacgttaccatgcgaatat

SEQ ID NO: 136779 - DNA, 25 bp, Probe sequence
gaagacctaggtatgcgttcagcat

SEQ ID NO: 136780 - DNA, 25 bp, Probe sequence
gactcgttgcaccactatatgaaca

SEQ ID NO: 136781 - DNA, 25 bp, Probe sequence
gagttttgtcgatttggtacgcaat

SEQ ID NO: 136782 - DNA, 25 bp, Probe sequence
gagtgtgcacgtggtttattagatc

SEQ ID NO: 136783 - DNA, 25 bp, Probe sequence
gatgcagaccaactgattcgtctag

SEQ ID NO: 136784 - DNA, 25 bp, Probe sequence
gatatcgatgatggttcacgctttt

SEQ ID NO: 136785 - DNA, 25 bp, Probe sequence
gattttggtattatctcagttgaaa

SEQ ID NO: 136786 - DNA, 25 bp, Probe sequence
gattggtaacggtatggcgggcatt

SEQ ID NO: 136787 - DNA, 25 bp, Probe sequence
gttggtgcagtactatatggtgata

SEQ ID NO: 136788 - DNA, 25 bp, Probe sequence
gttaatcgtggtattgttgtcaatg

SEQ ID NO: 136789 - DNA, 25 bp, Probe sequence
gtatggcgggcattcgaacaatcga

SEQ ID NO: 136790 - DNA, 25 bp, Probe sequence
gtaaatgtaaaccgcaaattgctca

SEQ ID NO: 136791 - DNA, 25 bp, Probe sequence
ggttcacgcttttataacatgatga

SEQ ID NO: 136792 - DNA, 25 bp, Probe sequence
ggattccaaatctatatcggtggta

SEQ ID NO: 136793 - DNA, 25 bp, Probe sequence
tggtacgcaatacacgacacgactt

SEQ ID NO: 136794 - DNA, 25 bp, Probe sequence
tccaaactataaccgcatcatgctt

SEQ ID NO: 136795 - DNA, 25 bp, Probe sequence
taagaaatatcatgtgccactagtt

SEQ ID NO: 136796 - DNA, 25 bp, Probe sequence
tacatcgatacacctcataaattca

SEQ ID NO: 136797 - DNA, 25 bp, Probe sequence
ttttctgttatacctcaaatgcgtg

SEQ ID NO: 136798 - DNA, 25 bp, Probe sequence
attgatacccgagcgctttgacgaa

SEQ ID NO: 136799 - DNA, 25 bp, Probe sequence
atgatgatggcgatttaggtgtgat

SEQ ID NO: 136800 - DNA, 25 bp, Probe sequence
aggtgtgatcatgcgcaaagtattg

SEQ ID NO: 136801 - DNA, 25 bp, Probe sequence
agtattgatacccgagcgctttgac

SEQ ID NO: 136802 - DNA, 25 bp, Probe sequence
acgattacggttagatatccttggg

SEQ ID NO: 136803 - DNA, 25 bp, Probe sequence
actttaggtacatctgcaagattgc

SEQ ID NO: 136804 - DNA, 25 bp, Probe sequence
aaaatactacatttgtcatgacaat

SEQ ID NO: 136805 - DNA, 25 bp, Probe sequence
aacaatattaggccaaccaccattt

SEQ ID NO: 136806 - DNA, 25 bp, Probe sequence
caatattaggccaaccaccatttta

SEQ ID NO: 136807 - DNA, 25 bp, Probe sequence
ctgcaagattgcatccgtggttact

SEQ ID NO: 136808 - DNA, 25 bp, Probe sequence
cccgagcgctttgacgaaacaatat

SEQ ID NO: 136809 - DNA, 25 bp, Probe sequence
gcgaacatgaaaatgatgatggcga

SEQ ID NO: 136810 - DNA, 25 bp, Probe sequence
gcaaagtattgatacccgagcgctt

SEQ ID NO: 136811 - DNA, 25 bp, Probe sequence
gcaagattgcatccgtggttactta

SEQ ID NO: 136812 - DNA, 25 bp, Probe sequence
gaaattatatctacgattacggtta

SEQ ID NO: 136813 - DNA, 25 bp, Probe sequence
gacgaaacaatattaggccaaccac

SEQ ID NO: 136814 - DNA, 25 bp, Probe sequence
gagtatgaagggaaaggctatggta

SEQ ID NO: 136815 - DNA, 25 bp, Probe sequence
gaggttatgaaatatacagcgaaca

SEQ ID NO: 136816 - DNA, 25 bp, Probe sequence
gatatccttggggaagtgtgaaaag

SEQ ID NO: 136817 - DNA, 25 bp, Probe sequence
gatttaggtgtgatcatgcgcaaag

SEQ ID NO: 136818 - DNA, 25 bp, Probe sequence
gattgcatccgtggttacttaaaat

SEQ ID NO: 136819 - DNA, 25 bp, Probe sequence
gtctggtggtttgcgacaaatcctg

SEQ ID NO: 136820 - DNA, 25 bp, Probe sequence
ggtggtttgcgacaaatcctgagta

SEQ ID NO: 136821 - DNA, 25 bp, Probe sequence
ggtacatctgcaagattgcatccgt

SEQ ID NO: 136822 - DNA, 25 bp, Probe sequence
ggttagatatccttggggaagtgtg

SEQ ID NO: 136823 - DNA, 25 bp, Probe sequence
ggtttgcgacaaatcctgagtatga

SEQ ID NO: 136824 - DNA, 25 bp, Probe sequence
tggcgatttaggtgtgatcatgcgc

SEQ ID NO: 136825 - DNA, 25 bp, Probe sequence
tgatacccgagcgctttgacgaaac

SEQ ID NO: 136826 - DNA, 25 bp, Probe sequence
tgcatccgtggttacttaaaattta

SEQ ID NO: 136827 - DNA, 25 bp, Probe sequence
tccttttgtctggtggtttgcgaca

SEQ ID NO: 136828 - DNA, 25 bp, Probe sequence
ttacggttagatatccttggggaag

SEQ ID NO: 136829 - DNA, 25 bp, Probe sequence
tacccgagcgctttgacgaaacaat

SEQ ID NO: 136830 - DNA, 25 bp, Probe sequence
tatccttttgtctggtggtttgcga

SEQ ID NO: 136831 - DNA, 25 bp, Probe sequence
tttgcgacaaatcctgagtatgaag

SEQ ID NO: 136832 - DNA, 25 bp, Probe sequence
atataaaacggttaagcgtccatat

SEQ ID NO: 136833 - DNA, 25 bp, Probe sequence
atgctgtttcaggcggtgatgcatt

SEQ ID NO: 136834 - DNA, 25 bp, Probe sequence
aggtgtttgatgcctatacgacaaa

SEQ ID NO: 136835 - DNA, 25 bp, Probe sequence
agaagccgctcaacaagtcataaac

SEQ ID NO: 136836 - DNA, 25 bp, Probe sequence
aaacgacagtgacatcaacatcggt

SEQ ID NO: 136837 - DNA, 25 bp, Probe sequence
acgaaaacgacagtgacatcaacat

SEQ ID NO: 136838 - DNA, 25 bp, Probe sequence
acgacagtgacatcaacatcggtat

SEQ ID NO: 136839 - DNA, 25 bp, Probe sequence
acggttaagcgtccatatttaattg

SEQ ID NO: 136840 - DNA, 25 bp, Probe sequence
aaaggtgtttgatgcctatacgaca

SEQ ID NO: 136841 - DNA, 25 bp, Probe sequence
aaagaagccgctcaacaagtcataa

SEQ ID NO: 136842 - DNA, 25 bp, Probe sequence
aaaagatacaaaaatgccaagcatg

SEQ ID NO: 136843 - DNA, 25 bp, Probe sequence
aacaagtcataaacatgggtgttga

SEQ ID NO: 136844 - DNA, 25 bp, Probe sequence
aagccgctcaacaagtcataaacat

SEQ ID NO: 136845 - DNA, 25 bp, Probe sequence
aagaacgatagaagcaccgattgaa

SEQ ID NO: 136846 - DNA, 25 bp, Probe sequence
caacgaaaacgacagtgacatcaac

SEQ ID NO: 136847 - DNA, 25 bp, Probe sequence
cagtgacatcaacatcggtatttcc

SEQ ID NO: 136848 - DNA, 25 bp, Probe sequence
cggttaagcgtccatatttaattga

SEQ ID NO: 136849 - DNA, 25 bp, Probe sequence
ctgtttcaggcggtgatgcatttta

SEQ ID NO: 136850 - DNA, 25 bp, Probe sequence
gccgctcaacaagtcataaacatgg

SEQ ID NO: 136851 - DNA, 25 bp, Probe sequence
gcgacacctcaaggtgcaaaagata

SEQ ID NO: 136852 - DNA, 25 bp, Probe sequence
gctgtttcaggcggtgatgcatttt

SEQ ID NO: 136853 - DNA, 25 bp, Probe sequence
gctcaacaagtcataaacatgggtg

SEQ ID NO: 136854 - DNA, 25 bp, Probe sequence
gctttaatgctgtttcaggcggtga

SEQ ID NO: 136855 - DNA, 25 bp, Probe sequence
gaagcaccgattgaaaaggtgtttg

SEQ ID NO: 136856 - DNA, 25 bp, Probe sequence
gaagccgctcaacaagtcataaaca

SEQ ID NO: 136857 - DNA, 25 bp, Probe sequence
gaacgatagaagcaccgattgaaaa

SEQ ID NO: 136858 - DNA, 25 bp, Probe sequence
gacagtgacatcaacatcggtattt

SEQ ID NO: 136859 - DNA, 25 bp, Probe sequence
gtgacatcaacatcggtatttccaa

SEQ ID NO: 136860 - DNA, 25 bp, Probe sequence
tgacatcaacatcggtatttccaac

SEQ ID NO: 136861 - DNA, 25 bp, Probe sequence
tcgctttaatgctgtttcaggcggt

SEQ ID NO: 136862 - DNA, 25 bp, Probe sequence
taatgctgtttcaggcggtgatgca

SEQ ID NO: 136863 - DNA, 25 bp, Probe sequence
tttgcgacacctcaaggtgcaaaag

SEQ ID NO: 136864 - DNA, 25 bp, Probe sequence
tttcgctttaatgctgtttcaggcg

SEQ ID NO: 136865 - DNA, 25 bp, Probe sequence
ttatttgaaaaatggtttcatccaa

SEQ ID NO: 136866 - DNA, 25 bp, Probe sequence
atatcctaaaggtaaccgtggcgtg

SEQ ID NO: 136867 - DNA, 25 bp, Probe sequence
attcatccaatttagcgatcacaac

SEQ ID NO: 136868 - DNA, 25 bp, Probe sequence
attagccgcatgtgggaatgatgat

SEQ ID NO: 136869 - DNA, 25 bp, Probe sequence
atgaatgctgaagatccatcacaaa

SEQ ID NO: 136870 - DNA, 25 bp, Probe sequence
agaccgtgaattaagcgattatgct

SEQ ID NO: 136871 - DNA, 25 bp, Probe sequence
accgtggcgtgagatttatgtttaa

SEQ ID NO: 136872 - DNA, 25 bp, Probe sequence
aaacgacagtttatccattgcaatc

SEQ ID NO: 136873 - DNA, 25 bp, Probe sequence
aactggccaacatattatccttcaa

SEQ ID NO: 136874 - DNA, 25 bp, Probe sequence
aagacggtacgcttgatgaagtgat

SEQ ID NO: 136875 - DNA, 25 bp, Probe sequence
aagacttaccgaaattcatccaatt

SEQ ID NO: 136876 - DNA, 25 bp, Probe sequence
aatggcaatctgtttacccttactt

SEQ ID NO: 136877 - DNA, 25 bp, Probe sequence
aatgatccgaagaaatctgctaaag

SEQ ID NO: 136878 - DNA, 25 bp, Probe sequence
aattctacaacatggagtctttaaa

SEQ ID NO: 136879 - DNA, 25 bp, Probe sequence
cagtttatccattgcaatcatttgc

SEQ ID NO: 136880 - DNA, 25 bp, Probe sequence
ccacacgtatggttagatcctaaaa

SEQ ID NO: 136881 - DNA, 25 bp, Probe sequence
gccgtaactttatcattagccgcat

SEQ ID NO: 136882 - DNA, 25 bp, Probe sequence
gcgattatgctggtgaatggcaatc

SEQ ID NO: 136883 - DNA, 25 bp, Probe sequence
gcagggacagatttacatagctatg

SEQ ID NO: 136884 - DNA, 25 bp, Probe sequence
gcaaagcttttaactgatcaacacg

SEQ ID NO: 136885 - DNA, 25 bp, Probe sequence
gaaggtatcatcaatctatccagca

SEQ ID NO: 136886 - DNA, 25 bp, Probe sequence
gatgcgaagcctttaaaattctaca

SEQ ID NO: 136887 - DNA, 25 bp, Probe sequence
gatgagcaagttaaagaccgtgaat

SEQ ID NO: 136888 - DNA, 25 bp, Probe sequence
gatccggttgctaagaaagttgcat

SEQ ID NO: 136889 - DNA, 25 bp, Probe sequence
gtaccagccgtaactttatcattag

SEQ ID NO: 136890 - DNA, 25 bp, Probe sequence
gtcagacttgtttatgtatacaggg

SEQ ID NO: 136891 - DNA, 25 bp, Probe sequence
ggggataatttagatccggttgcta

SEQ ID NO: 136892 - DNA, 25 bp, Probe sequence
ggtggaaaacacgtgaaggtatcat

SEQ ID NO: 136893 - DNA, 25 bp, Probe sequence
ggtaaagctttagacagtggtgtta

SEQ ID NO: 136894 - DNA, 25 bp, Probe sequence
ggatatgatccacacgtatggttag

SEQ ID NO: 136895 - DNA, 25 bp, Probe sequence
ggcagaacacttccatatctttatg

SEQ ID NO: 136896 - DNA, 25 bp, Probe sequence
tacatagctatgaaccaacacaaaa

SEQ ID NO: 136897 - DNA, 25 bp, Probe sequence
tagcgatcacaacattgcacctaaa

SEQ ID NO: 136898 - DNA, 25 bp, Probe sequence
tatgttacttcttgtaccagccgta

SEQ ID NO: 136899 - DNA, 25 bp, Probe sequence
tatcatcaatctatccagcagggac

SEQ ID NO: 136900 - DNA, 25 bp, Probe sequence
atagtagacgtatcaatcacgaaca

SEQ ID NO: 136901 - DNA, 25 bp, Probe sequence
atcacgaacatagattggtttatac

SEQ ID NO: 136902 - DNA, 25 bp, Probe sequence
atcgaatctgactgggtattatagt

SEQ ID NO: 136903 - DNA, 25 bp, Probe sequence
agtagacgtatcaatcacgaacata

SEQ ID NO: 136904 - DNA, 25 bp, Probe sequence
agattataagtattttcagcagaac

SEQ ID NO: 136905 - DNA, 25 bp, Probe sequence
agcatcatgtaaataccattattaa

SEQ ID NO: 136906 - DNA, 25 bp, Probe sequence
agcctgaaaagttaaaatcgaatct

SEQ ID NO: 136907 - DNA, 25 bp, Probe sequence
acgaacatagattggtttatacagt

SEQ ID NO: 136908 - DNA, 25 bp, Probe sequence
aaatcgaatctgactgggtattata

SEQ ID NO: 136909 - DNA, 25 bp, Probe sequence
aatcgaatctgactgggtattatag

SEQ ID NO: 136910 - DNA, 25 bp, Probe sequence
aatagcatcatgtaaataccattat

SEQ ID NO: 136911 - DNA, 25 bp, Probe sequence
ctcaagcctttgaagattataagta

SEQ ID NO: 136912 - DNA, 25 bp, Probe sequence
gcctcaagcctttgaagattataag

SEQ ID NO: 136913 - DNA, 25 bp, Probe sequence
gaatctgactgggtattatagtaga

SEQ ID NO: 136914 - DNA, 25 bp, Probe sequence
gaacatagattggtttatacagtag

SEQ ID NO: 136915 - DNA, 25 bp, Probe sequence
gacaatcatataaaaatagcatcat

SEQ ID NO: 136916 - DNA, 25 bp, Probe sequence
gactgggtattatagtagacgtatc

SEQ ID NO: 136917 - DNA, 25 bp, Probe sequence
gacgtatcaatcacgaacatagatt

SEQ ID NO: 136918 - DNA, 25 bp, Probe sequence
gattggtttatacagtagatgacaa

SEQ ID NO: 136919 - DNA, 25 bp, Probe sequence
gttaaaatcgaatctgactgggtat

SEQ ID NO: 136920 - DNA, 25 bp, Probe sequence
gttttcgcctcaagcctttgaagat

SEQ ID NO: 136921 - DNA, 25 bp, Probe sequence
gtattatagtagacgtatcaatcac

SEQ ID NO: 136922 - DNA, 25 bp, Probe sequence
gggtattatagtagacgtatcaatc

SEQ ID NO: 136923 - DNA, 25 bp, Probe sequence
ggtttatacagtagatgacaatcat

SEQ ID NO: 136924 - DNA, 25 bp, Probe sequence
tcgcctcaagcctttgaagattata

SEQ ID NO: 136925 - DNA, 25 bp, Probe sequence
tctgactgggtattatagtagacgt

SEQ ID NO: 136926 - DNA, 25 bp, Probe sequence
taaaatcgaatctgactgggtatta

SEQ ID NO: 136927 - DNA, 25 bp, Probe sequence
taaatattacgttttcgcctcaagc

SEQ ID NO: 136928 - DNA, 25 bp, Probe sequence
tagacgtatcaatcacgaacataga

SEQ ID NO: 136929 - DNA, 25 bp, Probe sequence
tttcgcctcaagcctttgaagatta

SEQ ID NO: 136930 - DNA, 25 bp, Probe sequence
ttttcgcctcaagcctttgaagatt

SEQ ID NO: 136931 - DNA, 25 bp, Probe sequence
ttaaaagtattgacagaaatggtgc

SEQ ID NO: 136932 - DNA, 25 bp, Probe sequence
ttaaatattacgttttcgcctcaag

SEQ ID NO: 136933 - DNA, 25 bp, Probe sequence
ttcgcctcaagcctttgaagattat

SEQ ID NO: 136934 - DNA, 25 bp, Probe sequence
atgctgaacacttagctcaatcaat

SEQ ID NO: 136935 - DNA, 25 bp, Probe sequence
atgatggaaacactttacctccaac

SEQ ID NO: 136936 - DNA, 25 bp, Probe sequence
atggaaacactttacctccaacaga

SEQ ID NO: 136937 - DNA, 25 bp, Probe sequence
acgtagtaatcatgtcagaatcaga

SEQ ID NO: 136938 - DNA, 25 bp, Probe sequence
aaataatgctgaacacttagctcaa

SEQ ID NO: 136939 - DNA, 25 bp, Probe sequence
aaaacgtagtaatcatgtcagaatc

SEQ ID NO: 136940 - DNA, 25 bp, Probe sequence
aaaattattcatacgctcgacagaa

SEQ ID NO: 136941 - DNA, 25 bp, Probe sequence
aactgtaacatctactgatgataaa

SEQ ID NO: 136942 - DNA, 25 bp, Probe sequence
aatgctgaacacttagctcaatcaa

SEQ ID NO: 136943 - DNA, 25 bp, Probe sequence
aattattcatacgctcgacagaatt

SEQ ID NO: 136944 - DNA, 25 bp, Probe sequence
aattgcagatctagaacgtgggaaa

SEQ ID NO: 136945 - DNA, 25 bp, Probe sequence
cacttagctcaatcaattgcagatc

SEQ ID NO: 136946 - DNA, 25 bp, Probe sequence
catacgctcgacagaatttaaaggc

SEQ ID NO: 136947 - DNA, 25 bp, Probe sequence
cttagctcaatcaattgcagatcta

SEQ ID NO: 136948 - DNA, 25 bp, Probe sequence
ctccatgatggaaacactttacctc

SEQ ID NO: 136949 - DNA, 25 bp, Probe sequence
ccatgatggaaacactttacctcca

SEQ ID NO: 136950 - DNA, 25 bp, Probe sequence
gctcgacagaatttaaaggcactta

SEQ ID NO: 136951 - DNA, 25 bp, Probe sequence
gctcaatcaattgcagatctagaac

SEQ ID NO: 136952 - DNA, 25 bp, Probe sequence
gctgaacacttagctcaatcaattg

SEQ ID NO: 136953 - DNA, 25 bp, Probe sequence
gaatttaaaggcacttatgacaaaa

SEQ ID NO: 136954 - DNA, 25 bp, Probe sequence
gaatcagattataactccatgatgg

SEQ ID NO: 136955 - DNA, 25 bp, Probe sequence
gaacacttagctcaatcaattgcag

SEQ ID NO: 136956 - DNA, 25 bp, Probe sequence
gacagaatttaaaggcacttatgac

SEQ ID NO: 136957 - DNA, 25 bp, Probe sequence
gatggaaacactttacctccaacag

SEQ ID NO: 136958 - DNA, 25 bp, Probe sequence
gtaactgtaacatctactgatgata

SEQ ID NO: 136959 - DNA, 25 bp, Probe sequence
tggaaacactttacctccaacagaa

SEQ ID NO: 136960 - DNA, 25 bp, Probe sequence
tgcagatctagaacgtgggaaaact

SEQ ID NO: 136961 - DNA, 25 bp, Probe sequence
tgaacacttagctcaatcaattgca

SEQ ID NO: 136962 - DNA, 25 bp, Probe sequence
tcaattgcagatctagaacgtggga

SEQ ID NO: 136963 - DNA, 25 bp, Probe sequence
tcagaatcagattataactccatga

SEQ ID NO: 136964 - DNA, 25 bp, Probe sequence
taatgctgaacacttagctcaatca

SEQ ID NO: 136965 - DNA, 25 bp, Probe sequence
taaaaattattcatacgctcgacag

SEQ ID NO: 136966 - DNA, 25 bp, Probe sequence
tacgctcgacagaatttaaaggcac

SEQ ID NO: 136967 - DNA, 25 bp, Probe sequence
ttattcatacgctcgacagaattta

SEQ ID NO: 136968 - DNA, 25 bp, Probe sequence
attaggacaatacgaaaaggcaatt

SEQ ID NO: 136969 - DNA, 25 bp, Probe sequence
atatgatagagattgtctttttaat

SEQ ID NO: 136970 - DNA, 25 bp, Probe sequence
atagagattgtctttttaatgtatg

SEQ ID NO: 136971 - DNA, 25 bp, Probe sequence
atcagtaagtgataccaatttatta

SEQ ID NO: 136972 - DNA, 25 bp, Probe sequence
atgatagagattgtctttttaatgt

SEQ ID NO: 136973 - DNA, 25 bp, Probe sequence
aggcaatttctattagcgatatgat

SEQ ID NO: 136974 - DNA, 25 bp, Probe sequence
agtgataccaatttattaggacaat

SEQ ID NO: 136975 - DNA, 25 bp, Probe sequence
agagattgtctttttaatgtatgaa

SEQ ID NO: 136976 - DNA, 25 bp, Probe sequence
agcgatatgatagagattgtctttt

SEQ ID NO: 136977 - DNA, 25 bp, Probe sequence
acgaaaaggcaatttctattagcga

SEQ ID NO: 136978 - DNA, 25 bp, Probe sequence
aaaggcaatttctattagcgatatg

SEQ ID NO: 136979 - DNA, 25 bp, Probe sequence
aaaaggcaatttctattagcgatat

SEQ ID NO: 136980 - DNA, 25 bp, Probe sequence
aagtgataccaatttattaggacaa

SEQ ID NO: 136981 - DNA, 25 bp, Probe sequence
aaggcaatttctattagcgatatga

SEQ ID NO: 136982 - DNA, 25 bp, Probe sequence
cagtaagtgataccaatttattagg

SEQ ID NO: 136983 - DNA, 25 bp, Probe sequence
cgaaaaggcaatttctattagcgat

SEQ ID NO: 136984 - DNA, 25 bp, Probe sequence
gcgatatgatagagattgtcttttt

SEQ ID NO: 136985 - DNA, 25 bp, Probe sequence
gcaatttctattagcgatatgatag

SEQ ID NO: 136986 - DNA, 25 bp, Probe sequence
gaaaaggcaatttctattagcgata

SEQ ID NO: 136987 - DNA, 25 bp, Probe sequence
gagatcagtaagtgataccaattta

SEQ ID NO: 136988 - DNA, 25 bp, Probe sequence
gagattgtctttttaatgtatgaag

SEQ ID NO: 136989 - DNA, 25 bp, Probe sequence
gataccaatttattaggacaatacg

SEQ ID NO: 136990 - DNA, 25 bp, Probe sequence
gatagagattgtctttttaatgtat

SEQ ID NO: 136991 - DNA, 25 bp, Probe sequence
gatatgatagagattgtctttttaa

SEQ ID NO: 136992 - DNA, 25 bp, Probe sequence
gattgtctttttaatgtatgaagtc

SEQ ID NO: 136993 - DNA, 25 bp, Probe sequence
gtaagtgataccaatttattaggac

SEQ ID NO: 136994 - DNA, 25 bp, Probe sequence
gtgataccaatttattaggacaata

SEQ ID NO: 136995 - DNA, 25 bp, Probe sequence
ggacaatacgaaaaggcaatttcta

SEQ ID NO: 136996 - DNA, 25 bp, Probe sequence
ggcaatttctattagcgatatgata

SEQ ID NO: 136997 - DNA, 25 bp, Probe sequence
taagtgataccaatttattaggaca

SEQ ID NO: 136998 - DNA, 25 bp, Probe sequence
taccaatttattaggacaatacgaa

SEQ ID NO: 136999 - DNA, 25 bp, Probe sequence
tagagattgtctttttaatgtatga

SEQ ID NO: 137000 - DNA, 25 bp, Probe sequence
ttagcgatatgatagagattgtctt

SEQ ID NO: 137001 - DNA, 25 bp, Probe sequence
ttgagatcagtaagtgataccaatt

SEQ ID NO: 137002 - DNA, 25 bp, Probe sequence
atatggcgactataaatgtccttat

SEQ ID NO: 137003 - DNA, 25 bp, Probe sequence
atagcaagtcttggaaagctgcaga

SEQ ID NO: 137004 - DNA, 25 bp, Probe sequence
atgtccttattgtaaagaattagat

SEQ ID NO: 137005 - DNA, 25 bp, Probe sequence
acaactgcatttagataaagagacg

SEQ ID NO: 137006 - DNA, 25 bp, Probe sequence
aaaaacgacaccaactgcatttatt

SEQ ID NO: 137007 - DNA, 25 bp, Probe sequence
aaaagcaattatttgctgcccagca

SEQ ID NO: 137008 - DNA, 25 bp, Probe sequence
aacagcttgcggtaaaaaagaatca

SEQ ID NO: 137009 - DNA, 25 bp, Probe sequence
aacgacaccaactgcatttattaat

SEQ ID NO: 137010 - DNA, 25 bp, Probe sequence
aagttgaagatccatatgattatga

SEQ ID NO: 137011 - DNA, 25 bp, Probe sequence
aagtggaataccaatttgtcaattt

SEQ ID NO: 137012 - DNA, 25 bp, Probe sequence
aatcatttttagattttcaaaagca

SEQ ID NO: 137013 - DNA, 25 bp, Probe sequence
aatttgtcaatttagctttcttagg

SEQ ID NO: 137014 - DNA, 25 bp, Probe sequence
cgtgcgagtcatgcagtattgatgt

SEQ ID NO: 137015 - DNA, 25 bp, Probe sequence
ccaactgcatttattaatggcgaga

SEQ ID NO: 137016 - DNA, 25 bp, Probe sequence
gcgagtcatgcagtattgatgtatg

SEQ ID NO: 137017 - DNA, 25 bp, Probe sequence
gcagtattgatgtatgcacctaaat

SEQ ID NO: 137018 - DNA, 25 bp, Probe sequence
gcaagtcttggaaagctgcagagaa

SEQ ID NO: 137019 - DNA, 25 bp, Probe sequence
gcaattatttgctgcccagcaagat

SEQ ID NO: 137020 - DNA, 25 bp, Probe sequence
gaataccaatttgtcaatttagctt

SEQ ID NO: 137021 - DNA, 25 bp, Probe sequence
gacaccaactgcatttattaatggc

SEQ ID NO: 137022 - DNA, 25 bp, Probe sequence
gatgtatgcacctaaatcattttta

SEQ ID NO: 137023 - DNA, 25 bp, Probe sequence
gataatcatataaaaacgacaccaa

SEQ ID NO: 137024 - DNA, 25 bp, Probe sequence
gataaacatattaaacaactgcatt

SEQ ID NO: 137025 - DNA, 25 bp, Probe sequence
gtatgcacctaaatcatttttagat

SEQ ID NO: 137026 - DNA, 25 bp, Probe sequence
tcgaaaaacggcaaaccattagttg

SEQ ID NO: 137027 - DNA, 25 bp, Probe sequence
ggcgagaaagttgaagatccatatg

SEQ ID NO: 137028 - DNA, 25 bp, Probe sequence
ggcgactataaatgtccttattgta

SEQ ID NO: 137029 - DNA, 25 bp, Probe sequence
tgttaattttaacagcttgcggtaa

SEQ ID NO: 137030 - DNA, 25 bp, Probe sequence
tgctgcccagcaagatgaaaataaa

SEQ ID NO: 137031 - DNA, 25 bp, Probe sequence
taggtaaagactcaattgttggttc

SEQ ID NO: 137032 - DNA, 25 bp, Probe sequence
tagatgaaaaagtcatgccaaagtt

SEQ ID NO: 137033 - DNA, 25 bp, Probe sequence
ttatagtgagcatgttaattttaac

SEQ ID NO: 137034 - DNA, 25 bp, Probe sequence
ttagctttcttaggtaaagactcaa

SEQ ID NO: 137035 - DNA, 25 bp, Probe sequence
ttgtcaatttagctttcttaggtaa

SEQ ID NO: 137036 - DNA, 25 bp, Probe sequence
attactagtctttatatcaggatgt

SEQ ID NO: 137037 - DNA, 25 bp, Probe sequence
attatcattttagcttataaacctt

SEQ ID NO: 137038 - DNA, 25 bp, Probe sequence
ataaacgtgtatcatataagcaaga

SEQ ID NO: 137039 - DNA, 25 bp, Probe sequence
atcaacaacatgatgcggattatca

SEQ ID NO: 137040 - DNA, 25 bp, Probe sequence
atcattttagcttataaacctttga

SEQ ID NO: 137041 - DNA, 25 bp, Probe sequence
atgatgatgaagtgcattattatgc

SEQ ID NO: 137042 - DNA, 25 bp, Probe sequence
agcgatttgtggcgacggtattatt

SEQ ID NO: 137043 - DNA, 25 bp, Probe sequence
acgtgtatcatataagcaagatttt

SEQ ID NO: 137044 - DNA, 25 bp, Probe sequence
aaaggcaacggtgatcgtgttgatc

SEQ ID NO: 137045 - DNA, 25 bp, Probe sequence
cgtgttgatcattttgaacgcaaag

SEQ ID NO: 137046 - DNA, 25 bp, Probe sequence
gccaaaaaaggcaacggtgatcgtg

SEQ ID NO: 137047 - DNA, 25 bp, Probe sequence
gcgacggtattattattactagtct

SEQ ID NO: 137048 - DNA, 25 bp, Probe sequence
gctaatatttatgtctatgataagg

SEQ ID NO: 137049 - DNA, 25 bp, Probe sequence
gcttataaacctttgagtaatgatg

SEQ ID NO: 137050 - DNA, 25 bp, Probe sequence
gcattattatgcatatgattttagt

SEQ ID NO: 137051 - DNA, 25 bp, Probe sequence
gcaagattttgattcgagacgatat

SEQ ID NO: 137052 - DNA, 25 bp, Probe sequence
gaagcagttaaaattcaaaatcaaa

SEQ ID NO: 137053 - DNA, 25 bp, Probe sequence
gaagcgatttgtggcgacggtatta

SEQ ID NO: 137054 - DNA, 25 bp, Probe sequence
gaacgcaaagatgctaatatttatg

SEQ ID NO: 137055 - DNA, 25 bp, Probe sequence
gacgatattatcaacaacatgatgc

SEQ ID NO: 137056 - DNA, 25 bp, Probe sequence
gatcattttgaacgcaaagatgcta

SEQ ID NO: 137057 - DNA, 25 bp, Probe sequence
gatcgtgttgatcattttgaacgca

SEQ ID NO: 137058 - DNA, 25 bp, Probe sequence
gatttgtggcgacggtattattatt

SEQ ID NO: 137059 - DNA, 25 bp, Probe sequence
gattcgagacgatattatcaacaac

SEQ ID NO: 137060 - DNA, 25 bp, Probe sequence
gtctttatatcaggatgtggtaatg

SEQ ID NO: 137061 - DNA, 25 bp, Probe sequence
gtggcgacggtattattattactag

SEQ ID NO: 137062 - DNA, 25 bp, Probe sequence
ggtattattattactagtctttata

SEQ ID NO: 137063 - DNA, 25 bp, Probe sequence
ggatgtggtaatgataaatatgtga

SEQ ID NO: 137064 - DNA, 25 bp, Probe sequence
ggcaacggtgatcgtgttgatcatt

SEQ ID NO: 137065 - DNA, 25 bp, Probe sequence
tgaagcgatttgtggcgacggtatt

SEQ ID NO: 137066 - DNA, 25 bp, Probe sequence
tcaaaaacaagaacaacttgccaaa

SEQ ID NO: 137067 - DNA, 25 bp, Probe sequence
tactagtctttatatcaggatgtgg

SEQ ID NO: 137068 - DNA, 25 bp, Probe sequence
tatgcatatgattttagtgataaac

SEQ ID NO: 137069 - DNA, 25 bp, Probe sequence
tttagcttataaacctttgagtaat

SEQ ID NO: 137070 - DNA, 25 bp, Probe sequence
atttatgtgttagttgcgctaatgt

SEQ ID NO: 137071 - DNA, 25 bp, Probe sequence
atgtgttagttgcgctaatgtactg

SEQ ID NO: 137072 - DNA, 25 bp, Probe sequence
agttgcgctaatgtactgggtggta

SEQ ID NO: 137073 - DNA, 25 bp, Probe sequence
actgggtggtatgctttattatttc

SEQ ID NO: 137074 - DNA, 25 bp, Probe sequence
acaatttatgtgttagttgcgctaa

SEQ ID NO: 137075 - DNA, 25 bp, Probe sequence
aaagctcaagaagttgcgtctacaa

SEQ ID NO: 137076 - DNA, 25 bp, Probe sequence
aagctcaagaagttgcgtctacaac

SEQ ID NO: 137077 - DNA, 25 bp, Probe sequence
aatgtactgggtggtatgctttatt

SEQ ID NO: 137078 - DNA, 25 bp, Probe sequence
caagaagttgcgtctacaacatatg

SEQ ID NO: 137079 - DNA, 25 bp, Probe sequence
cacgtgtctatgtatctattattcg

SEQ ID NO: 137080 - DNA, 25 bp, Probe sequence
cattaaatgtaggtgcgtatgcttc

SEQ ID NO: 137081 - DNA, 25 bp, Probe sequence
ctgggtggtatgctttattatttca

SEQ ID NO: 137082 - DNA, 25 bp, Probe sequence
cctgcactaggtaatacatttttaa

SEQ ID NO: 137083 - DNA, 25 bp, Probe sequence
gcgctaatgtactgggtggtatgct

SEQ ID NO: 137084 - DNA, 25 bp, Probe sequence
gcgtctacaacatatgaatatttaa

SEQ ID NO: 137085 - DNA, 25 bp, Probe sequence
gctaatgtactgggtggtatgcttt

SEQ ID NO: 137086 - DNA, 25 bp, Probe sequence
gctcaagaagttgcgtctacaacat

SEQ ID NO: 137087 - DNA, 25 bp, Probe sequence
gcactaggtaatacatttttaagtt

SEQ ID NO: 137088 - DNA, 25 bp, Probe sequence
gaagttgcgtctacaacatatgaat

SEQ ID NO: 137089 - DNA, 25 bp, Probe sequence
gaaaagctcaagaagttgcgtctac

SEQ ID NO: 137090 - DNA, 25 bp, Probe sequence
gttgcgctaatgtactgggtggtat

SEQ ID NO: 137091 - DNA, 25 bp, Probe sequence
gttagttgcgctaatgtactgggtg

SEQ ID NO: 137092 - DNA, 25 bp, Probe sequence
gtgttagttgcgctaatgtactggg

SEQ ID NO: 137093 - DNA, 25 bp, Probe sequence
gggtggtatgctttattatttcaat

SEQ ID NO: 137094 - DNA, 25 bp, Probe sequence
ggtattccagaattaggtagattat

SEQ ID NO: 137095 - DNA, 25 bp, Probe sequence
tgggtggtatgctttattatttcaa

SEQ ID NO: 137096 - DNA, 25 bp, Probe sequence
tgtactgggtggtatgctttattat

SEQ ID NO: 137097 - DNA, 25 bp, Probe sequence
tgcgctaatgtactgggtggtatgc

SEQ ID NO: 137098 - DNA, 25 bp, Probe sequence
taagtttaatcaaagatacatcatt

SEQ ID NO: 137099 - DNA, 25 bp, Probe sequence
tactgggtggtatgctttattattt

SEQ ID NO: 137100 - DNA, 25 bp, Probe sequence
tagttgcgctaatgtactgggtggt

SEQ ID NO: 137101 - DNA, 25 bp, Probe sequence
tattgaaagagggtatcgctcatga

SEQ ID NO: 137102 - DNA, 25 bp, Probe sequence
ttttatggtattccagaattaggta

SEQ ID NO: 137103 - DNA, 25 bp, Probe sequence
ttgcgtctacaacatatgaatattt

SEQ ID NO: 137104 - DNA, 25 bp, Probe sequence
atataaattttctaagccttacaca

SEQ ID NO: 137105 - DNA, 25 bp, Probe sequence
atcgaggaaaacggtgaattagcta

SEQ ID NO: 137106 - DNA, 25 bp, Probe sequence
atggatttattattgtctaagcgtg

SEQ ID NO: 137107 - DNA, 25 bp, Probe sequence
aggtgctgatattacaaaagttgat

SEQ ID NO: 137108 - DNA, 25 bp, Probe sequence
agtgctgttttagttattcgtgaaa

SEQ ID NO: 137109 - DNA, 25 bp, Probe sequence
agcacaaacattcacatctaattat

SEQ ID NO: 137110 - DNA, 25 bp, Probe sequence
agcgtgttgatggtacatttaatga

SEQ ID NO: 137111 - DNA, 25 bp, Probe sequence
agccttacacattctcaagtgctgt

SEQ ID NO: 137112 - DNA, 25 bp, Probe sequence
acagttcaaaaattcaatgatggct

SEQ ID NO: 137113 - DNA, 25 bp, Probe sequence
aaaagttgatggctttaaccaatca

SEQ ID NO: 137114 - DNA, 25 bp, Probe sequence
aacaaaaacctaatgctaagatcaa

SEQ ID NO: 137115 - DNA, 25 bp, Probe sequence
aacattcacatctaattatggtaaa

SEQ ID NO: 137116 - DNA, 25 bp, Probe sequence
aagaaatggtttggtcaagatgttt

SEQ ID NO: 137117 - DNA, 25 bp, Probe sequence
aattttctaagccttacacattctc

SEQ ID NO: 137118 - DNA, 25 bp, Probe sequence
cattctcaagtgctgttttagttat

SEQ ID NO: 137119 - DNA, 25 bp, Probe sequence
ctatgtttgcaggtttagacgcagg

SEQ ID NO: 137120 - DNA, 25 bp, Probe sequence
gcaggtttagacgcagggcgttttg

SEQ ID NO: 137121 - DNA, 25 bp, Probe sequence
ccttacacattctcaagtgctgttt

SEQ ID NO: 137122 - DNA, 25 bp, Probe sequence
gctaaggataaaggtgctgatatta

SEQ ID NO: 137123 - DNA, 25 bp, Probe sequence
gaagttagcacaaacattcacatct

SEQ ID NO: 137124 - DNA, 25 bp, Probe sequence
gacgcagggcgttttgatgtaatcg

SEQ ID NO: 137125 - DNA, 25 bp, Probe sequence
gatggctttaaccaatcaatggatt

SEQ ID NO: 137126 - DNA, 25 bp, Probe sequence
gatgttattaaagcagtggctaaag

SEQ ID NO: 137127 - DNA, 25 bp, Probe sequence
gttttgatgtaatcgcgaaccaagt

SEQ ID NO: 137128 - DNA, 25 bp, Probe sequence
gtttgcaggtttagacgcagggcgt

SEQ ID NO: 137129 - DNA, 25 bp, Probe sequence
gtctaagcgtgttgatggtacattt

SEQ ID NO: 137130 - DNA, 25 bp, Probe sequence
gggcgttttgatgtaatcgcgaacc

SEQ ID NO: 137131 - DNA, 25 bp, Probe sequence
ggtattaatcctgatagagaaaaga

SEQ ID NO: 137132 - DNA, 25 bp, Probe sequence
ggctttaaccaatcaatggatttat

SEQ ID NO: 137133 - DNA, 25 bp, Probe sequence
tcaagtgctgttttagttattcgtg

SEQ ID NO: 137134 - DNA, 25 bp, Probe sequence
taagccttacacattctcaagtgct

SEQ ID NO: 137135 - DNA, 25 bp, Probe sequence
tacacattctcaagtgctgttttag

SEQ ID NO: 137136 - DNA, 25 bp, Probe sequence
tattgtctaagcgtgttgatggtac

SEQ ID NO: 137137 - DNA, 25 bp, Probe sequence
tttctaagccttacacattctcaag

SEQ ID NO: 137138 - DNA, 25 bp, Probe sequence
atacacaagttcaatggctgacaac

SEQ ID NO: 137139 - DNA, 25 bp, Probe sequence
atgacaacgattttggatgttttcc

SEQ ID NO: 137140 - DNA, 25 bp, Probe sequence
atgatgccattgatgatgacaacga

SEQ ID NO: 137141 - DNA, 25 bp, Probe sequence
atgggattgttattcctttgtccgc

SEQ ID NO: 137142 - DNA, 25 bp, Probe sequence
acactattagtgacggctttaccaa

SEQ ID NO: 137143 - DNA, 25 bp, Probe sequence
aaatttattgcatcgttcagcttta

SEQ ID NO: 137144 - DNA, 25 bp, Probe sequence
aacaaattgctggttctatcggaac

SEQ ID NO: 137145 - DNA, 25 bp, Probe sequence
aactttattaccaggagcaattgtt

SEQ ID NO: 137146 - DNA, 25 bp, Probe sequence
aacttttctccaactatgtcagact

SEQ ID NO: 137147 - DNA, 25 bp, Probe sequence
catgttgtcgctccaattgcagctg

SEQ ID NO: 137148 - DNA, 25 bp, Probe sequence
ctaggtttcggcgggttattgtatg

SEQ ID NO: 137149 - DNA, 25 bp, Probe sequence
gaatggttggtatcgcgttaggatt

SEQ ID NO: 137150 - DNA, 25 bp, Probe sequence
gaaacgattttacctatctttgtgc

SEQ ID NO: 137151 - DNA, 25 bp, Probe sequence
gattttatttctgtcattttttctg

SEQ ID NO: 137152 - DNA, 25 bp, Probe sequence
gttggcaacagtttatgcgattcga

SEQ ID NO: 137153 - DNA, 25 bp, Probe sequence
gttatcacgctggatttttatttgc

SEQ ID NO: 137154 - DNA, 25 bp, Probe sequence
gttatggcatttatgtcgatgactt

SEQ ID NO: 137155 - DNA, 25 bp, Probe sequence
gtttagcaccagctattggacctac

SEQ ID NO: 137156 - DNA, 25 bp, Probe sequence
gtcattttttctgtactaggtttcg

SEQ ID NO: 137157 - DNA, 25 bp, Probe sequence
gtgacggctttaccaagtattatga

SEQ ID NO: 137158 - DNA, 25 bp, Probe sequence
gtgtttttagtgggtatttctatct

SEQ ID NO: 137159 - DNA, 25 bp, Probe sequence
ggtatcgatgattggttcggaaacg

SEQ ID NO: 137160 - DNA, 25 bp, Probe sequence
ggttcatctatgacaaacacagtac

SEQ ID NO: 137161 - DNA, 25 bp, Probe sequence
ggaacagctgcattaattactattt

SEQ ID NO: 137162 - DNA, 25 bp, Probe sequence
ggcgattgttgttattactacggct

SEQ ID NO: 137163 - DNA, 25 bp, Probe sequence
tggagatcgcttttccatgttgtcg

SEQ ID NO: 137164 - DNA, 25 bp, Probe sequence
tgcatcgttcagctttagattctgg

SEQ ID NO: 137165 - DNA, 25 bp, Probe sequence
tcgatgacttcgggtgctttatatg

SEQ ID NO: 137166 - DNA, 25 bp, Probe sequence
tactacggcttattttgttgtaatg

SEQ ID NO: 137167 - DNA, 25 bp, Probe sequence
tacgtcaatatcggctatcaacacc

SEQ ID NO: 137168 - DNA, 25 bp, Probe sequence
tagtttcttttgttcatttatgtta

SEQ ID NO: 137169 - DNA, 25 bp, Probe sequence
tagtcgcattatttgtattacgtca

SEQ ID NO: 137170 - DNA, 25 bp, Probe sequence
tatgggtgtcacaatggtatcgatg

SEQ ID NO: 137171 - DNA, 25 bp, Probe sequence
ttgagtccgcactttgcaacattat

SEQ ID NO: 137172 - DNA, 25 bp, Probe sequence
atttcacaatatttgctagatggtc

SEQ ID NO: 137173 - DNA, 25 bp, Probe sequence
atttggcgtcgttcttatgatgtga

SEQ ID NO: 137174 - DNA, 25 bp, Probe sequence
atctaaacaacaatggattcctgta

SEQ ID NO: 137175 - DNA, 25 bp, Probe sequence
agtacatatttggcgtcgttcttat

SEQ ID NO: 137176 - DNA, 25 bp, Probe sequence
actggatgggaagatgttaatttat

SEQ ID NO: 137177 - DNA, 25 bp, Probe sequence
acacgtgctttagatacaacgcatt

SEQ ID NO: 137178 - DNA, 25 bp, Probe sequence
aacaaggtattaatgaagcgactag

SEQ ID NO: 137179 - DNA, 25 bp, Probe sequence
aaaacaggtgcaccgcttgtttatg

SEQ ID NO: 137180 - DNA, 25 bp, Probe sequence
aacggtattagtttctgcacacgga

SEQ ID NO: 137181 - DNA, 25 bp, Probe sequence
aagaacaacgtgaagcttacttagc

SEQ ID NO: 137182 - DNA, 25 bp, Probe sequence
caaaattaattttatgtcgtcatgg

SEQ ID NO: 137183 - DNA, 25 bp, Probe sequence
cactatggtggattgcaaggcttaa

SEQ ID NO: 137184 - DNA, 25 bp, Probe sequence
cattttggacagatcatatttcaca

SEQ ID NO: 137185 - DNA, 25 bp, Probe sequence
ccacctgctgaaaccgaagaacaac

SEQ ID NO: 137186 - DNA, 25 bp, Probe sequence
gcgagtggaatgctaaaaacttatt

SEQ ID NO: 137187 - DNA, 25 bp, Probe sequence
gctagatggtcaaacggtattagtt

SEQ ID NO: 137188 - DNA, 25 bp, Probe sequence
gcttacttagctgatcgtcgatata

SEQ ID NO: 137189 - DNA, 25 bp, Probe sequence
gcacacggaaattcaattcgcgcat

SEQ ID NO: 137190 - DNA, 25 bp, Probe sequence
gaagatgtgtcagatgaagatatca

SEQ ID NO: 137191 - DNA, 25 bp, Probe sequence
gaagcgactagagcaggtgaaaaag

SEQ ID NO: 137192 - DNA, 25 bp, Probe sequence
gaacaagtacatatttggcgtcgtt

SEQ ID NO: 137193 - DNA, 25 bp, Probe sequence
gatgtgaaaccacctgctgaaaccg

SEQ ID NO: 137194 - DNA, 25 bp, Probe sequence
gatcgtcgatataatcatttagata

SEQ ID NO: 137195 - DNA, 25 bp, Probe sequence
gatacaacgcattatattttaactg

SEQ ID NO: 137196 - DNA, 25 bp, Probe sequence
gatactttagttcgagtgataccat

SEQ ID NO: 137197 - DNA, 25 bp, Probe sequence
gattcctgtatataaaagctggcgt

SEQ ID NO: 137198 - DNA, 25 bp, Probe sequence
gtagcttttacatcgttattaacac

SEQ ID NO: 137199 - DNA, 25 bp, Probe sequence
gtcgtcatggacaaagcgagtggaa

SEQ ID NO: 137200 - DNA, 25 bp, Probe sequence
ggtgcaccgcttgtttatgaattaa

SEQ ID NO: 137201 - DNA, 25 bp, Probe sequence
ggcgtcgttcttatgatgtgaaacc

SEQ ID NO: 137202 - DNA, 25 bp, Probe sequence
tgaaaccacctgctgaaaccgaaga

SEQ ID NO: 137203 - DNA, 25 bp, Probe sequence
tacatcgttattaacacgtgcttta

SEQ ID NO: 137204 - DNA, 25 bp, Probe sequence
tagttcgagtgataccattttggac

SEQ ID NO: 137205 - DNA, 25 bp, Probe sequence
tagataaacgtatgatgccttattc

SEQ ID NO: 137206 - DNA, 25 bp, Probe sequence
attggtgtcatttgtcattatgttt

SEQ ID NO: 137207 - DNA, 25 bp, Probe sequence
atatttcttcattattggtgtcatt

SEQ ID NO: 137208 - DNA, 25 bp, Probe sequence
atctattgttaagtatgtcacgggt

SEQ ID NO: 137209 - DNA, 25 bp, Probe sequence
atcgtcagcttaatcagtggtcttg

SEQ ID NO: 137210 - DNA, 25 bp, Probe sequence
atgtcgaacatcatttgcacaaaaa

SEQ ID NO: 137211 - DNA, 25 bp, Probe sequence
aaatcttaaattggcgcaacgcggt

SEQ ID NO: 137212 - DNA, 25 bp, Probe sequence
aaatgcacctcgtttgttcaaagaa

SEQ ID NO: 137213 - DNA, 25 bp, Probe sequence
aaagggcgttaccatggaagtagtg

SEQ ID NO: 137214 - DNA, 25 bp, Probe sequence
aacctttccttagtagaagcgcatc

SEQ ID NO: 137215 - DNA, 25 bp, Probe sequence
aacgcaataacaattatcgtcagct

SEQ ID NO: 137216 - DNA, 25 bp, Probe sequence
cagtggtcttgtaatgttgattgta

SEQ ID NO: 137217 - DNA, 25 bp, Probe sequence
gtcacgggttttgtctttaactctg

SEQ ID NO: 137218 - DNA, 25 bp, Probe sequence
ctaggcttactaatcgtttatactg

SEQ ID NO: 137219 - DNA, 25 bp, Probe sequence
gcgcaacgcggtgcttatttgagtt

SEQ ID NO: 137220 - DNA, 25 bp, Probe sequence
gaagatgacgttgtacctaacgcaa

SEQ ID NO: 137221 - DNA, 25 bp, Probe sequence
gaagcaatttttatgttgagtgatg

SEQ ID NO: 137222 - DNA, 25 bp, Probe sequence
gaaactgaattagaagcgtatcgca

SEQ ID NO: 137223 - DNA, 25 bp, Probe sequence
gatattatcgtttctttagctgtta

SEQ ID NO: 137224 - DNA, 25 bp, Probe sequence
gtatacgttcacccagaaccagacc

SEQ ID NO: 137225 - DNA, 25 bp, Probe sequence
gtttctttagctgttattattggat

SEQ ID NO: 137226 - DNA, 25 bp, Probe sequence
gtatttcctcagtatacgttcaccc

SEQ ID NO: 137227 - DNA, 25 bp, Probe sequence
gtaggtatccaagtagttattcaaa

SEQ ID NO: 137228 - DNA, 25 bp, Probe sequence
gtagttattcaaaatgcacctcgtt

SEQ ID NO: 137229 - DNA, 25 bp, Probe sequence
gtaatgttgattgtatttgcagtca

SEQ ID NO: 137230 - DNA, 25 bp, Probe sequence
ggtttcccaattgtcgatattattt

SEQ ID NO: 137231 - DNA, 25 bp, Probe sequence
ggaagtagtgtgtttattgatgtca

SEQ ID NO: 137232 - DNA, 25 bp, Probe sequence
tgttgtagatgctaacctttcctta

SEQ ID NO: 137233 - DNA, 25 bp, Probe sequence
tcacccagaaccagaccatctataa

SEQ ID NO: 137234 - DNA, 25 bp, Probe sequence
tacgcaaatcggtttcccaattgtc

SEQ ID NO: 137235 - DNA, 25 bp, Probe sequence
tactaatcgtttatactggttttgg

SEQ ID NO: 137236 - DNA, 25 bp, Probe sequence
tagtagaagcgcatcaaatttgtga

SEQ ID NO: 137237 - DNA, 25 bp, Probe sequence
tttgtcattatgtttgtaggtatcc

SEQ ID NO: 137238 - DNA, 25 bp, Probe sequence
tttgcagtcaatcaaagactagcga

SEQ ID NO: 137239 - DNA, 25 bp, Probe sequence
ttgtctttaactctgcagctgtaag

SEQ ID NO: 137240 - DNA, 25 bp, Probe sequence
attcagaacattcagcgtattttaa

SEQ ID NO: 137241 - DNA, 25 bp, Probe sequence
atagattaactagtgttaactatgt

SEQ ID NO: 137242 - DNA, 25 bp, Probe sequence
agattaactagtgttaactatgtaa

SEQ ID NO: 137243 - DNA, 25 bp, Probe sequence
agaacattcagcgtattttaagtaa

SEQ ID NO: 137244 - DNA, 25 bp, Probe sequence
agcgtttaattcagaacattcagcg

SEQ ID NO: 137245 - DNA, 25 bp, Probe sequence
actaatagattaactagtgttaact

SEQ ID NO: 137246 - DNA, 25 bp, Probe sequence
aaagcgtttaattcagaacattcag

SEQ ID NO: 137247 - DNA, 25 bp, Probe sequence
aaaagcgtttaattcagaacattca

SEQ ID NO: 137248 - DNA, 25 bp, Probe sequence
aagcgtttaattcagaacattcagc

SEQ ID NO: 137249 - DNA, 25 bp, Probe sequence
aatagattaactagtgttaactatg

SEQ ID NO: 137250 - DNA, 25 bp, Probe sequence
aattcagaacattcagcgtatttta

SEQ ID NO: 137251 - DNA, 25 bp, Probe sequence
cagaacattcagcgtattttaagta

SEQ ID NO: 137252 - DNA, 25 bp, Probe sequence
ctaatagattaactagtgttaacta

SEQ ID NO: 137253 - DNA, 25 bp, Probe sequence
cgtttaattcagaacattcagcgta

SEQ ID NO: 137254 - DNA, 25 bp, Probe sequence
gcgtttaattcagaacattcagcgt

SEQ ID NO: 137255 - DNA, 25 bp, Probe sequence
gaacattcagcgtattttaagtaag

SEQ ID NO: 137256 - DNA, 25 bp, Probe sequence
gattaactagtgttaactatgtaaa

SEQ ID NO: 137257 - DNA, 25 bp, Probe sequence
gtttaattcagaacattcagcgtat

SEQ ID NO: 137258 - DNA, 25 bp, Probe sequence
tcagaacattcagcgtattttaagt

SEQ ID NO: 137259 - DNA, 25 bp, Probe sequence
taatagattaactagtgttaactat

SEQ ID NO: 137260 - DNA, 25 bp, Probe sequence
taattcagaacattcagcgtatttt

SEQ ID NO: 137261 - DNA, 25 bp, Probe sequence
taactaatagattaactagtgttaa

SEQ ID NO: 137262 - DNA, 25 bp, Probe sequence
tagattaactagtgttaactatgta

SEQ ID NO: 137263 - DNA, 25 bp, Probe sequence
tttaattcagaacattcagcgtatt

SEQ ID NO: 137264 - DNA, 25 bp, Probe sequence
ttaactaatagattaactagtgtta

SEQ ID NO: 137265 - DNA, 25 bp, Probe sequence
ttaattcagaacattcagcgtattt

SEQ ID NO: 137266 - DNA, 25 bp, Probe sequence
ttcagaacattcagcgtattttaag

SEQ ID NO: 137267 - DNA, 25 bp, Probe sequence
attatcatgataactaacactttta

SEQ ID NO: 137268 - DNA, 25 bp, Probe sequence
atcatgataactaacacttttattt

SEQ ID NO: 137269 - DNA, 25 bp, Probe sequence
atgataactaacacttttattttag

SEQ ID NO: 137270 - DNA, 25 bp, Probe sequence
agtcttgtcgtcattagcattatcg

SEQ ID NO: 137271 - DNA, 25 bp, Probe sequence
actaacacttttattttaggcatca

SEQ ID NO: 137272 - DNA, 25 bp, Probe sequence
acacttttattttaggcatcacagg

SEQ ID NO: 137273 - DNA, 25 bp, Probe sequence
acaagtcttgtcgtcattagcatta

SEQ ID NO: 137274 - DNA, 25 bp, Probe sequence
aacaagtcttgtcgtcattagcatt

SEQ ID NO: 137275 - DNA, 25 bp, Probe sequence
aacacttttattttaggcatcacag

SEQ ID NO: 137276 - DNA, 25 bp, Probe sequence
aagtcttgtcgtcattagcattatc

SEQ ID NO: 137277 - DNA, 25 bp, Probe sequence
caagtcttgtcgtcattagcattat

SEQ ID NO: 137278 - DNA, 25 bp, Probe sequence
caacaagtcttgtcgtcattagcat

SEQ ID NO: 137279 - DNA, 25 bp, Probe sequence
catgataactaacacttttatttta

SEQ ID NO: 137280 - DNA, 25 bp, Probe sequence
cttgtcgtcattagcattatcgctt

SEQ ID NO: 137281 - DNA, 25 bp, Probe sequence
ctaacacttttattttaggcatcac

SEQ ID NO: 137282 - DNA, 25 bp, Probe sequence
cgtcattagcattatcgctttaatt

SEQ ID NO: 137283 - DNA, 25 bp, Probe sequence
ccaacaagtcttgtcgtcattagca

SEQ ID NO: 137284 - DNA, 25 bp, Probe sequence
gattatcatgataactaacactttt

SEQ ID NO: 137285 - DNA, 25 bp, Probe sequence
gtcattagcattatcgctttaatta

SEQ ID NO: 137286 - DNA, 25 bp, Probe sequence
gtcttgtcgtcattagcattatcgc

SEQ ID NO: 137287 - DNA, 25 bp, Probe sequence
gtcgtcattagcattatcgctttaa

SEQ ID NO: 137288 - DNA, 25 bp, Probe sequence
tgtcgtcattagcattatcgcttta

SEQ ID NO: 137289 - DNA, 25 bp, Probe sequence
tgataactaacacttttattttagg

SEQ ID NO: 137290 - DNA, 25 bp, Probe sequence
tcgtcattagcattatcgctttaat

SEQ ID NO: 137291 - DNA, 25 bp, Probe sequence
tcttgtcgtcattagcattatcgct

SEQ ID NO: 137292 - DNA, 25 bp, Probe sequence
tcatgataactaacacttttatttt

SEQ ID NO: 137293 - DNA, 25 bp, Probe sequence
taactaacacttttattttaggcat

SEQ ID NO: 137294 - DNA, 25 bp, Probe sequence
taacacttttattttaggcatcaca

SEQ ID NO: 137295 - DNA, 25 bp, Probe sequence
tatcgctttaattatttttggtccg

SEQ ID NO: 137296 - DNA, 25 bp, Probe sequence
tatcatgataactaacacttttatt

SEQ ID NO: 137297 - DNA, 25 bp, Probe sequence
ttatcatgataactaacacttttat

SEQ ID NO: 137298 - DNA, 25 bp, Probe sequence
ttgtcgtcattagcattatcgcttt

SEQ ID NO: 137299 - DNA, 25 bp, Probe sequence
attgtagctattcctttatatctca

SEQ ID NO: 137300 - DNA, 25 bp, Probe sequence
attgatattagctttctttggaatt

SEQ ID NO: 137301 - DNA, 25 bp, Probe sequence
atagctattgcagttgtttatttat

SEQ ID NO: 137302 - DNA, 25 bp, Probe sequence
agagttatagctattgcagttgttt

SEQ ID NO: 137303 - DNA, 25 bp, Probe sequence
actttaattgtagctattcctttat

SEQ ID NO: 137304 - DNA, 25 bp, Probe sequence
aataaatgtactatcattagtttta

SEQ ID NO: 137305 - DNA, 25 bp, Probe sequence
aattagtgtcattgctgcgatttta

SEQ ID NO: 137306 - DNA, 25 bp, Probe sequence
aattgtagctattcctttatatctc

SEQ ID NO: 137307 - DNA, 25 bp, Probe sequence
caggcgtaatattcactttaattgt

SEQ ID NO: 137308 - DNA, 25 bp, Probe sequence
cattgctgcgattttaaccattttg

SEQ ID NO: 137309 - DNA, 25 bp, Probe sequence
cgcgattccaggcgtaatattcact

SEQ ID NO: 137310 - DNA, 25 bp, Probe sequence
ccattataccaggattagattttca

SEQ ID NO: 137311 - DNA, 25 bp, Probe sequence
gcgattccaggcgtaatattcactt

SEQ ID NO: 137312 - DNA, 25 bp, Probe sequence
gcgtaatattcactttaattgtagc

SEQ ID NO: 137313 - DNA, 25 bp, Probe sequence
gctgcgattttaaccattttggcag

SEQ ID NO: 137314 - DNA, 25 bp, Probe sequence
gctattgcagttgtttatttattga

SEQ ID NO: 137315 - DNA, 25 bp, Probe sequence
gcattattgatattagctttctttg

SEQ ID NO: 137316 - DNA, 25 bp, Probe sequence
gcagcattattgatattagctttct

SEQ ID NO: 137317 - DNA, 25 bp, Probe sequence
gacatcaaaagatattactcaaatt

SEQ ID NO: 137318 - DNA, 25 bp, Probe sequence
gatattagctttctttggaattaaa

SEQ ID NO: 137319 - DNA, 25 bp, Probe sequence
gattagattttcaattatctgcacc

SEQ ID NO: 137320 - DNA, 25 bp, Probe sequence
gattccaggcgtaatattcacttta

SEQ ID NO: 137321 - DNA, 25 bp, Probe sequence
gttatagctattgcagttgtttatt

SEQ ID NO: 137322 - DNA, 25 bp, Probe sequence
gtcattgctgcgattttaaccattt

SEQ ID NO: 137323 - DNA, 25 bp, Probe sequence
gtgtcattgctgcgattttaaccat

SEQ ID NO: 137324 - DNA, 25 bp, Probe sequence
tcactttaattgtagctattccttt

SEQ ID NO: 137325 - DNA, 25 bp, Probe sequence
tcaaattagtgtcattgctgcgatt

SEQ ID NO: 137326 - DNA, 25 bp, Probe sequence
tactcaaattagtgtcattgctgcg

SEQ ID NO: 137327 - DNA, 25 bp, Probe sequence
tagtgtcattgctgcgattttaacc

SEQ ID NO: 137328 - DNA, 25 bp, Probe sequence
tattcactttaattgtagctattcc

SEQ ID NO: 137329 - DNA, 25 bp, Probe sequence
tattgcagttgtttatttattgaaa

SEQ ID NO: 137330 - DNA, 25 bp, Probe sequence
ttaaacgcgattccaggcgtaatat

SEQ ID NO: 137331 - DNA, 25 bp, Probe sequence
ttccaggcgtaatattcactttaat

SEQ ID NO: 137332 - DNA, 25 bp, Probe sequence
ttgctgcgattttaaccattttggc

SEQ ID NO: 137333 - DNA, 25 bp, Probe sequence
atttttagaaagcacaccgaagcaa

SEQ ID NO: 137334 - DNA, 25 bp, Probe sequence
atctgctatatctggtaaacgttta

SEQ ID NO: 137335 - DNA, 25 bp, Probe sequence
atcgattatttgatattaaaccagt

SEQ ID NO: 137336 - DNA, 25 bp, Probe sequence
atgtggtgtcactgaacaagcgcta

SEQ ID NO: 137337 - DNA, 25 bp, Probe sequence
aggagctattattctatctgctata

SEQ ID NO: 137338 - DNA, 25 bp, Probe sequence
agtggtgctgaaacgatttgtgagt

SEQ ID NO: 137339 - DNA, 25 bp, Probe sequence
agaaagcacaccgaagcaagttgtt

SEQ ID NO: 137340 - DNA, 25 bp, Probe sequence
agcgctaaatcaagggatgacatat

SEQ ID NO: 137341 - DNA, 25 bp, Probe sequence
aaaaatgcgttctagcaatcaagat

SEQ ID NO: 137342 - DNA, 25 bp, Probe sequence
aatgggcaaccggattttctcaata

SEQ ID NO: 137343 - DNA, 25 bp, Probe sequence
aattggttaccatcgattatttgat

SEQ ID NO: 137344 - DNA, 25 bp, Probe sequence
catattagtggtgctgaaacgattt

SEQ ID NO: 137345 - DNA, 25 bp, Probe sequence
gctgaaacgatttgtgagtttgaca

SEQ ID NO: 137346 - DNA, 25 bp, Probe sequence
gctattattctatctgctatatctg

SEQ ID NO: 137347 - DNA, 25 bp, Probe sequence
gcaacacatttttcgtttgaagata

SEQ ID NO: 137348 - DNA, 25 bp, Probe sequence
gaacaagcgctaaatcaagggatga

SEQ ID NO: 137349 - DNA, 25 bp, Probe sequence
gaaacggtttatacaggagctatta

SEQ ID NO: 137350 - DNA, 25 bp, Probe sequence
gaaagagtgactgatgccttagcaa

SEQ ID NO: 137351 - DNA, 25 bp, Probe sequence
gacaaaatagaacagacggtacaaa

SEQ ID NO: 137352 - DNA, 25 bp, Probe sequence
gaggcagaataatatttgtggacga

SEQ ID NO: 137353 - DNA, 25 bp, Probe sequence
gatgacttaacgtatacgacaggtt

SEQ ID NO: 137354 - DNA, 25 bp, Probe sequence
gatgccttagcaattgctagttgta

SEQ ID NO: 137355 - DNA, 25 bp, Probe sequence
gttaatacgagatatggaggcagaa

SEQ ID NO: 137356 - DNA, 25 bp, Probe sequence
gtaaacgtttagattcatttggaca

SEQ ID NO: 137357 - DNA, 25 bp, Probe sequence
gtgactgatgccttagcaattgcta

SEQ ID NO: 137358 - DNA, 25 bp, Probe sequence
gggcaaccggattttctcaatataa

SEQ ID NO: 137359 - DNA, 25 bp, Probe sequence
ggggattagggcaacacatttttcg

SEQ ID NO: 137360 - DNA, 25 bp, Probe sequence
ggtgtcactgaacaagcgctaaatc

SEQ ID NO: 137361 - DNA, 25 bp, Probe sequence
ggttaccatcgattatttgatatta

SEQ ID NO: 137362 - DNA, 25 bp, Probe sequence
taacgtatacgacaggttattttgc

SEQ ID NO: 137363 - DNA, 25 bp, Probe sequence
tagggcaacacatttttcgtttgaa

SEQ ID NO: 137364 - DNA, 25 bp, Probe sequence
tattctatctgctatatctggtaaa

SEQ ID NO: 137365 - DNA, 25 bp, Probe sequence
tttttcatgaaaatgggcaaccgga

SEQ ID NO: 137366 - DNA, 25 bp, Probe sequence
ttgctagttgtatcaatgcgcatcc

SEQ ID NO: 137367 - DNA, 25 bp, Probe sequence
atataacgcaacactgatactcgat

SEQ ID NO: 137368 - DNA, 25 bp, Probe sequence
agtatagttatcacttatcaagttc

SEQ ID NO: 137369 - DNA, 25 bp, Probe sequence
acactgatactcgatgtttcacata

SEQ ID NO: 137370 - DNA, 25 bp, Probe sequence
aaagcatcatgtgtttacaagttat

SEQ ID NO: 137371 - DNA, 25 bp, Probe sequence
aaaagcactcaatgttaattataat

SEQ ID NO: 137372 - DNA, 25 bp, Probe sequence
aaggtatccaactgtgactaagcca

SEQ ID NO: 137373 - DNA, 25 bp, Probe sequence
aatgctgatgatagacgcactaaat

SEQ ID NO: 137374 - DNA, 25 bp, Probe sequence
aatagttcaaactcgccgattaagt

SEQ ID NO: 137375 - DNA, 25 bp, Probe sequence
cagaaagggttatatcggtcgctta

SEQ ID NO: 137376 - DNA, 25 bp, Probe sequence
catgtggtgcatacgggggtgtgat

SEQ ID NO: 137377 - DNA, 25 bp, Probe sequence
catgcgagtattattgacggtatta

SEQ ID NO: 137378 - DNA, 25 bp, Probe sequence
cgatgtttcacatagttttggaata

SEQ ID NO: 137379 - DNA, 25 bp, Probe sequence
gaatggcgacgttgtggatattggt

SEQ ID NO: 137380 - DNA, 25 bp, Probe sequence
gaagcggctgagaacattcatcaaa

SEQ ID NO: 137381 - DNA, 25 bp, Probe sequence
gagaacattcatcaaacattattaa

SEQ ID NO: 137382 - DNA, 25 bp, Probe sequence
gataggttgtttgaaattttgcatc

SEQ ID NO: 137383 - DNA, 25 bp, Probe sequence
gatatactcacttctagtttatcta

SEQ ID NO: 137384 - DNA, 25 bp, Probe sequence
gatattggtcaattagtctcattaa

SEQ ID NO: 137385 - DNA, 25 bp, Probe sequence
gtttgatgacatagaagcggctgag

SEQ ID NO: 137386 - DNA, 25 bp, Probe sequence
gtacgaactatacatctaatgatta

SEQ ID NO: 137387 - DNA, 25 bp, Probe sequence
gggttatatcggtcgcttaaatcgg

SEQ ID NO: 137388 - DNA, 25 bp, Probe sequence
gtggttatgatgctaatttggcgtt

SEQ ID NO: 137389 - DNA, 25 bp, Probe sequence
gggggtgtgattttaagttcaaatg

SEQ ID NO: 137390 - DNA, 25 bp, Probe sequence
ggtcgcttaaatcggtagggtatat

SEQ ID NO: 137391 - DNA, 25 bp, Probe sequence
ggtcaattagtctcattaaagcata

SEQ ID NO: 137392 - DNA, 25 bp, Probe sequence
tggctcggatatagtgcatgtacta

SEQ ID NO: 137393 - DNA, 25 bp, Probe sequence
tccaactgtgactaagccaatgtta

SEQ ID NO: 137394 - DNA, 25 bp, Probe sequence
tcgccgattaagtttattgagtttg

SEQ ID NO: 137395 - DNA, 25 bp, Probe sequence
tactcaagtagtttgccaatttata

SEQ ID NO: 137396 - DNA, 25 bp, Probe sequence
tagcgtttgataaggatgatttcga

SEQ ID NO: 137397 - DNA, 25 bp, Probe sequence
tagaccactcatctactcaagtagt

SEQ ID NO: 137398 - DNA, 25 bp, Probe sequence
tagtttatctaaagcatgtggtgca

SEQ ID NO: 137399 - DNA, 25 bp, Probe sequence
tttaggattaggtcaaatagcgttt

SEQ ID NO: 137400 - DNA, 25 bp, Probe sequence
ttaatcacggtagaccactcatcta

SEQ ID NO: 137401 - DNA, 25 bp, Probe sequence
attactggtgggcaaccgaaccaat

SEQ ID NO: 137402 - DNA, 25 bp, Probe sequence
atattgttgatatggcatttgcttt

SEQ ID NO: 137403 - DNA, 25 bp, Probe sequence
atgctaaaagtggtatatgtcctga

SEQ ID NO: 137404 - DNA, 25 bp, Probe sequence
atgagtggtagaggaccgagcgata

SEQ ID NO: 137405 - DNA, 25 bp, Probe sequence
aggaccgagcgataaagaagttgat

SEQ ID NO: 137406 - DNA, 25 bp, Probe sequence
aggattaacgaatgacgaacaagct

SEQ ID NO: 137407 - DNA, 25 bp, Probe sequence
agaaacttaagtcagctggtgtaga

SEQ ID NO: 137408 - DNA, 25 bp, Probe sequence
acttacgttcgttacagccattagc

SEQ ID NO: 137409 - DNA, 25 bp, Probe sequence
aaattaccatgataacgtcgtgaca

SEQ ID NO: 137410 - DNA, 25 bp, Probe sequence
aacgtcgtgacaacgcatagttata

SEQ ID NO: 137411 - DNA, 25 bp, Probe sequence
cgttcgttacagccattagcattaa

SEQ ID NO: 137412 - DNA, 25 bp, Probe sequence
gccattagcattaaaagcggcgaat

SEQ ID NO: 137413 - DNA, 25 bp, Probe sequence
gcggcgaattcaatatttgtcggtg

SEQ ID NO: 137414 - DNA, 25 bp, Probe sequence
gctaaacgcatattacaaggggaac

SEQ ID NO: 137415 - DNA, 25 bp, Probe sequence
gaacgattaaatctcaacacccgca

SEQ ID NO: 137416 - DNA, 25 bp, Probe sequence
gaagcatggatgatttaacaccaat

SEQ ID NO: 137417 - DNA, 25 bp, Probe sequence
gaaagaaattcgtattgctggagga

SEQ ID NO: 137418 - DNA, 25 bp, Probe sequence
gaaatggatgccgacagtattccga

SEQ ID NO: 137419 - DNA, 25 bp, Probe sequence
gaaattgattatgacacttgtgaaa

SEQ ID NO: 137420 - DNA, 25 bp, Probe sequence
gagaggtcaacttacgttcgttaca

SEQ ID NO: 137421 - DNA, 25 bp, Probe sequence
gatggagcaaaggtggcacatgata

SEQ ID NO: 137422 - DNA, 25 bp, Probe sequence
gatgccgacagtattccgattaatt

SEQ ID NO: 137423 - DNA, 25 bp, Probe sequence
gttctggcgtgatttgtggtatggg

SEQ ID NO: 137424 - DNA, 25 bp, Probe sequence
gtcagctggtgtagacagatataac

SEQ ID NO: 137425 - DNA, 25 bp, Probe sequence
gtcggtgattatctaattactggtg

SEQ ID NO: 137426 - DNA, 25 bp, Probe sequence
gtggtatgggagaatctaatcaaga

SEQ ID NO: 137427 - DNA, 25 bp, Probe sequence
ggcaaccgaaccaattagactacga

SEQ ID NO: 137428 - DNA, 25 bp, Probe sequence
tgaggatactaatattgatacctta

SEQ ID NO: 137429 - DNA, 25 bp, Probe sequence
tgaatttggctaaacgcatattaca

SEQ ID NO: 137430 - DNA, 25 bp, Probe sequence
taatatatcaccatgttctggcgtg

SEQ ID NO: 137431 - DNA, 25 bp, Probe sequence
tcgtagcattattccgattaatcaa

SEQ ID NO: 137432 - DNA, 25 bp, Probe sequence
tagactacgatatgattaatgattt

SEQ ID NO: 137433 - DNA, 25 bp, Probe sequence
tattccgattaatcaatcctacgaa

SEQ ID NO: 137434 - DNA, 25 bp, Probe sequence
ttccgattaattttttgcatccaat

SEQ ID NO: 137435 - DNA, 25 bp, Probe sequence
atattcaagtagaaagcccatcttt

SEQ ID NO: 137436 - DNA, 25 bp, Probe sequence
atatgtttggcatccatttacacaa

SEQ ID NO: 137437 - DNA, 25 bp, Probe sequence
atcaaatcgtttgtacggttgcatt

SEQ ID NO: 137438 - DNA, 25 bp, Probe sequence
atgcgctgaagcgtcatcgaaatgt

SEQ ID NO: 137439 - DNA, 25 bp, Probe sequence
atggttatgcatcgttgtgggtcaa

SEQ ID NO: 137440 - DNA, 25 bp, Probe sequence
agatgttcaaccggatattatgtgt

SEQ ID NO: 137441 - DNA, 25 bp, Probe sequence
accacttgcagctacattgacatct

SEQ ID NO: 137442 - DNA, 25 bp, Probe sequence
aacgctaaatcacggttatcatggg

SEQ ID NO: 137443 - DNA, 25 bp, Probe sequence
aatgtcattacgtttgtgccagtgt

SEQ ID NO: 137444 - DNA, 25 bp, Probe sequence
aatcgaaatcacgccaagtaatcta

SEQ ID NO: 137445 - DNA, 25 bp, Probe sequence
aataaaattgcccattctacgctgc

SEQ ID NO: 137446 - DNA, 25 bp, Probe sequence
aatacctttttccatggtcatacat

SEQ ID NO: 137447 - DNA, 25 bp, Probe sequence
aatattccgtcaatagaacttgcgg

SEQ ID NO: 137448 - DNA, 25 bp, Probe sequence
cccattctacgctgctaggatcatc

SEQ ID NO: 137449 - DNA, 25 bp, Probe sequence
gcccatctttctatcgcagtaatta

SEQ ID NO: 137450 - DNA, 25 bp, Probe sequence
gctaggatcatcaaatattccgtca

SEQ ID NO: 137451 - DNA, 25 bp, Probe sequence
gcttgtttgttcatcctaaaggctt

SEQ ID NO: 137452 - DNA, 25 bp, Probe sequence
gaaacgacatcatcaacacttgaga

SEQ ID NO: 137453 - DNA, 25 bp, Probe sequence
gaaatcgcagggtttatattggaac

SEQ ID NO: 137454 - DNA, 25 bp, Probe sequence
gatgaggtagcagttggttttggga

SEQ ID NO: 137455 - DNA, 25 bp, Probe sequence
gttggtgatgtaagaggacgaggct

SEQ ID NO: 137456 - DNA, 25 bp, Probe sequence
gttgtgggtcaatgtgcatggtcat

SEQ ID NO: 137457 - DNA, 25 bp, Probe sequence
gtttgtgccagtgttaagtatgtca

SEQ ID NO: 137458 - DNA, 25 bp, Probe sequence
gtggctacttaccacttgcagctac

SEQ ID NO: 137459 - DNA, 25 bp, Probe sequence
ggtgcgacaggcttgtttgttcatc

SEQ ID NO: 137460 - DNA, 25 bp, Probe sequence
ggtagttacctttacgatacgaatg

SEQ ID NO: 137461 - DNA, 25 bp, Probe sequence
ggacgaggcttaatgtttggagttg

SEQ ID NO: 137462 - DNA, 25 bp, Probe sequence
ggaaccgttgattcaaggtgcgaca

SEQ ID NO: 137463 - DNA, 25 bp, Probe sequence
ggcagtgcgtctgttgaaatcgcaa

SEQ ID NO: 137464 - DNA, 25 bp, Probe sequence
tggtgcggtaagtgttggtggtatc

SEQ ID NO: 137465 - DNA, 25 bp, Probe sequence
tggtggtatcaagacctttcataaa

SEQ ID NO: 137466 - DNA, 25 bp, Probe sequence
tcatggggatacgattggtgcggta

SEQ ID NO: 137467 - DNA, 25 bp, Probe sequence
tattctgatacaggcagtgcgtctg

SEQ ID NO: 137468 - DNA, 25 bp, Probe sequence
ttttccatggtcatacatacaccgg

SEQ ID NO: 137469 - DNA, 25 bp, Probe sequence
atacatttgaagaacatgccacgta

SEQ ID NO: 137470 - DNA, 25 bp, Probe sequence
atcaccacaccttgcatttaaaatg

SEQ ID NO: 137471 - DNA, 25 bp, Probe sequence
atgctttgaaaacacgtggtcatcg

SEQ ID NO: 137472 - DNA, 25 bp, Probe sequence
atgtatcggcgagtaattttttaat

SEQ ID NO: 137473 - DNA, 25 bp, Probe sequence
acttttaagcaacctgtatcaccac

SEQ ID NO: 137474 - DNA, 25 bp, Probe sequence
aaaattaggtgctattagcgatgcc

SEQ ID NO: 137475 - DNA, 25 bp, Probe sequence
aaccatttcaaactgaggaacgcca

SEQ ID NO: 137476 - DNA, 25 bp, Probe sequence
aataaaacagtctatacatttgaag

SEQ ID NO: 137477 - DNA, 25 bp, Probe sequence
caaactgaggaacgccaagacggga

SEQ ID NO: 137478 - DNA, 25 bp, Probe sequence
aattgccgtaccaatatatgaaggt

SEQ ID NO: 137479 - DNA, 25 bp, Probe sequence
catgccacgtatgaaaatttctcag

SEQ ID NO: 137480 - DNA, 25 bp, Probe sequence
gaaaatttctcagaagcatttttaa

SEQ ID NO: 137481 - DNA, 25 bp, Probe sequence
gacataacgtcactttatactttta

SEQ ID NO: 137482 - DNA, 25 bp, Probe sequence
gatttctacatgactaaagatctaa

SEQ ID NO: 137483 - DNA, 25 bp, Probe sequence
gattttatcttaattgagggtgctg

SEQ ID NO: 137484 - DNA, 25 bp, Probe sequence
gattgtgcagattgtgtcatcagtg

SEQ ID NO: 137485 - DNA, 25 bp, Probe sequence
gattgtgtcatcagtgtgttgccat

SEQ ID NO: 137486 - DNA, 25 bp, Probe sequence
gttgccatcaaaattaggtgctatt

SEQ ID NO: 137487 - DNA, 25 bp, Probe sequence
gtacgaatactgatgtaggcaaaac

SEQ ID NO: 137488 - DNA, 25 bp, Probe sequence
gtcactttatacttttaagcaacct

SEQ ID NO: 137489 - DNA, 25 bp, Probe sequence
gtcatcagtgtgttgccatcaaaat

SEQ ID NO: 137490 - DNA, 25 bp, Probe sequence
gtgtcatcagtgtgttgccatcaaa

SEQ ID NO: 137491 - DNA, 25 bp, Probe sequence
gggggaattgccgtaccaatatatg

SEQ ID NO: 137492 - DNA, 25 bp, Probe sequence
ggtacagatgatttctacatgacta

SEQ ID NO: 137493 - DNA, 25 bp, Probe sequence
tgctgggggaattgccgtaccaata

SEQ ID NO: 137494 - DNA, 25 bp, Probe sequence
ggcaaaacctatgttacaaagcatt

SEQ ID NO: 137495 - DNA, 25 bp, Probe sequence
tgagggtgctgggggaattgccgta

SEQ ID NO: 137496 - DNA, 25 bp, Probe sequence
tgtgatttaagctatgacataacgt

SEQ ID NO: 137497 - DNA, 25 bp, Probe sequence
tgtatcaccacaccttgcatttaaa

SEQ ID NO: 137498 - DNA, 25 bp, Probe sequence
tgaggatttttattacaagtacgaa

SEQ ID NO: 137499 - DNA, 25 bp, Probe sequence
tatgttacaaagcatttataccatg

SEQ ID NO: 137500 - DNA, 25 bp, Probe sequence
tttaagcaacctgtatcaccacacc

SEQ ID NO: 137501 - DNA, 25 bp, Probe sequence
ttataccatgctttgaaaacacgtg

SEQ ID NO: 137502 - DNA, 25 bp, Probe sequence
tttttaataatgaatcgctatacag

SEQ ID NO: 137503 - DNA, 25 bp, Probe sequence
attacagtactcatattgtctctac

SEQ ID NO: 137504 - DNA, 25 bp, Probe sequence
atagtattgatttacctacccttat

SEQ ID NO: 137505 - DNA, 25 bp, Probe sequence
atgcgccagcgtatcataatgtaca

SEQ ID NO: 137506 - DNA, 25 bp, Probe sequence
atgtgctatctcataaacctattta

SEQ ID NO: 137507 - DNA, 25 bp, Probe sequence
agggcgatattaaaagatgcaccaa

SEQ ID NO: 137508 - DNA, 25 bp, Probe sequence
agagtcgacaaaatgcgccagcgta

SEQ ID NO: 137509 - DNA, 25 bp, Probe sequence
agcatgcattggcgtattactatca

SEQ ID NO: 137510 - DNA, 25 bp, Probe sequence
acattatgtcacttactcttgcgct

SEQ ID NO: 137511 - DNA, 25 bp, Probe sequence
aaaggatttctattgctagggcgat

SEQ ID NO: 137512 - DNA, 25 bp, Probe sequence
aaagccatgagagcatcgcttatga

SEQ ID NO: 137513 - DNA, 25 bp, Probe sequence
aaaagttttaaccaagcagtcaatg

SEQ ID NO: 137514 - DNA, 25 bp, Probe sequence
aaccaggaatgtatcaagactttat

SEQ ID NO: 137515 - DNA, 25 bp, Probe sequence
aaggtagtaatttatctggcggaga

SEQ ID NO: 137516 - DNA, 25 bp, Probe sequence
ctcttgcgcttttatgatatcgatg

SEQ ID NO: 137517 - DNA, 25 bp, Probe sequence
gaagcaactgcaagtattgaccctg

SEQ ID NO: 137518 - DNA, 25 bp, Probe sequence
gaagcaagcatgttgccacgacttc

SEQ ID NO: 137519 - DNA, 25 bp, Probe sequence
gaacagctgattcaaacggcaatta

SEQ ID NO: 137520 - DNA, 25 bp, Probe sequence
gaaatattcgcatcgatggtgttga

SEQ ID NO: 137521 - DNA, 25 bp, Probe sequence
gacttcatcatgtcattacctgagg

SEQ ID NO: 137522 - DNA, 25 bp, Probe sequence
gttgccacgacttcatcatgtcatt

SEQ ID NO: 137523 - DNA, 25 bp, Probe sequence
gtcacttactcttgcgcttttatga

SEQ ID NO: 137524 - DNA, 25 bp, Probe sequence
gtgctgcacacgtacttgaaatgat

SEQ ID NO: 137525 - DNA, 25 bp, Probe sequence
gtgattggacgatttattacagcat

SEQ ID NO: 137526 - DNA, 25 bp, Probe sequence
ggaggttattcgtggtattcaagta

SEQ ID NO: 137527 - DNA, 25 bp, Probe sequence
ggttattttaattcgcatcattcaa

SEQ ID NO: 137528 - DNA, 25 bp, Probe sequence
ggaagtgggaaatctacattatgtc

SEQ ID NO: 137529 - DNA, 25 bp, Probe sequence
ggcgtattactatcattttttgcga

SEQ ID NO: 137530 - DNA, 25 bp, Probe sequence
tgattgtattagttgcatgcttatt

SEQ ID NO: 137531 - DNA, 25 bp, Probe sequence
tcgtggcaagtatcattattagcat

SEQ ID NO: 137532 - DNA, 25 bp, Probe sequence
tcaacagcaataattggaccttcag

SEQ ID NO: 137533 - DNA, 25 bp, Probe sequence
tatcccattcaatttattgcattta

SEQ ID NO: 137534 - DNA, 25 bp, Probe sequence
ttgtctctacttgtagtttcgtggc

SEQ ID NO: 137535 - DNA, 25 bp, Probe sequence
tttaggatttagcatgtcattttta

SEQ ID NO: 137536 - DNA, 25 bp, Probe sequence
ttacctacccttattatgatttcaa

SEQ ID NO: 137537 - DNA, 25 bp, Probe sequence
atgcatcgtattatctttaggtgta

SEQ ID NO: 137538 - DNA, 25 bp, Probe sequence
agggtcacatcacttattgctaaaa

SEQ ID NO: 137539 - DNA, 25 bp, Probe sequence
accggtcggcatgtatttgatatct

SEQ ID NO: 137540 - DNA, 25 bp, Probe sequence
accattgccaagcttatatcacgat

SEQ ID NO: 137541 - DNA, 25 bp, Probe sequence
aaagctgccaagttagcacaatgtc

SEQ ID NO: 137542 - DNA, 25 bp, Probe sequence
aaacttggcaatccagaagctacgg

SEQ ID NO: 137543 - DNA, 25 bp, Probe sequence
aaaacaacgagtcactattgcaaga

SEQ ID NO: 137544 - DNA, 25 bp, Probe sequence
aagcatttatcatttacagtaccag

SEQ ID NO: 137545 - DNA, 25 bp, Probe sequence
aagatgcgcctatcattgtattaga

SEQ ID NO: 137546 - DNA, 25 bp, Probe sequence
aatgctcattgattggcgtatggct

SEQ ID NO: 137547 - DNA, 25 bp, Probe sequence
caagtgtgttgttttggagcgtcaa

SEQ ID NO: 137548 - DNA, 25 bp, Probe sequence
ctccctttaggcgtagtggaatcta

SEQ ID NO: 137549 - DNA, 25 bp, Probe sequence
cggaatttttcctatgcatcgtatt

SEQ ID NO: 137550 - DNA, 25 bp, Probe sequence
gaatagcgcgattgtagagtttatc

SEQ ID NO: 137551 - DNA, 25 bp, Probe sequence
gaagctacggatgaggcagttgaaa

SEQ ID NO: 137552 - DNA, 25 bp, Probe sequence
gacgatctggtctttaagcatttat

SEQ ID NO: 137553 - DNA, 25 bp, Probe sequence
gatactgggatgtgacttcaggtga

SEQ ID NO: 137554 - DNA, 25 bp, Probe sequence
gatactcagcggatttgcttctgat

SEQ ID NO: 137555 - DNA, 25 bp, Probe sequence
gataccaatttcaattttcgctttt

SEQ ID NO: 137556 - DNA, 25 bp, Probe sequence
gattggcgtatggctagtgccttat

SEQ ID NO: 137557 - DNA, 25 bp, Probe sequence
gttgtctatcatcagtgtcttttct

SEQ ID NO: 137558 - DNA, 25 bp, Probe sequence
gtcagctgctatctttttatacata

SEQ ID NO: 137559 - DNA, 25 bp, Probe sequence
gtgtagtagcaccgattaagaattt

SEQ ID NO: 137560 - DNA, 25 bp, Probe sequence
gtgggatacgcacatgcatacaaaa

SEQ ID NO: 137561 - DNA, 25 bp, Probe sequence
ggtagcggtaagtcaaccattgcca

SEQ ID NO: 137562 - DNA, 25 bp, Probe sequence
ggttatctacgattcaacatgcaga

SEQ ID NO: 137563 - DNA, 25 bp, Probe sequence
ggagctagtgtattaccttcaacat

SEQ ID NO: 137564 - DNA, 25 bp, Probe sequence
ggagcgtcaacgatgctatcacata

SEQ ID NO: 137565 - DNA, 25 bp, Probe sequence
ggaaacttacttttgtcagctgcta

SEQ ID NO: 137566 - DNA, 25 bp, Probe sequence
tgttattgcacatcggttatctacg

SEQ ID NO: 137567 - DNA, 25 bp, Probe sequence
tttagggattttaccggtcggcatg

SEQ ID NO: 137568 - DNA, 25 bp, Probe sequence
tcagtgtcttttctggattagttcc

SEQ ID NO: 137569 - DNA, 25 bp, Probe sequence
tacctttagcacatatgattcctga

SEQ ID NO: 137570 - DNA, 25 bp, Probe sequence
tagtgccttattagtaacgatacca

SEQ ID NO: 137571 - DNA, 25 bp, Probe sequence
attgcttgtagtaagtttagtgaca

SEQ ID NO: 137572 - DNA, 25 bp, Probe sequence
attttatcagtgttgatttttacgg

SEQ ID NO: 137573 - DNA, 25 bp, Probe sequence
atagcacgtgtgaaaaaacttgata

SEQ ID NO: 137574 - DNA, 25 bp, Probe sequence
aggtgccgaataatgcggtaaaggc

SEQ ID NO: 137575 - DNA, 25 bp, Probe sequence
agagcaagtcagtacataagcaaca

SEQ ID NO: 137576 - DNA, 25 bp, Probe sequence
acagcaatttaataccagttagaca

SEQ ID NO: 137577 - DNA, 25 bp, Probe sequence
aaatggctaaacaacaaagtattca

SEQ ID NO: 137578 - DNA, 25 bp, Probe sequence
aagtattcatttggatagcaagagc

SEQ ID NO: 137579 - DNA, 25 bp, Probe sequence
aataccagttagacaaccggatgca

SEQ ID NO: 137580 - DNA, 25 bp, Probe sequence
aatagtatccgactgcagacattta

SEQ ID NO: 137581 - DNA, 25 bp, Probe sequence
cagataatttaatagatggcacgaa

SEQ ID NO: 137582 - DNA, 25 bp, Probe sequence
cagttagtgacatagcacgtgtgaa

SEQ ID NO: 137583 - DNA, 25 bp, Probe sequence
ccgactgcagacatttactaaaaca

SEQ ID NO: 137584 - DNA, 25 bp, Probe sequence
gcaagtcagtacataagcaacaatt

SEQ ID NO: 137585 - DNA, 25 bp, Probe sequence
gaataatagtgctgtaaatccaagt

SEQ ID NO: 137586 - DNA, 25 bp, Probe sequence
gaaggtgtgaatgaaaacagcaatt

SEQ ID NO: 137587 - DNA, 25 bp, Probe sequence
gaaaaacgcaaatggaacatcgaat

SEQ ID NO: 137588 - DNA, 25 bp, Probe sequence
gaaagatgataatgaggtgccgaat

SEQ ID NO: 137589 - DNA, 25 bp, Probe sequence
gacatttactaaaacatccagataa

SEQ ID NO: 137590 - DNA, 25 bp, Probe sequence
gatccaaatgttattaatcagttga

SEQ ID NO: 137591 - DNA, 25 bp, Probe sequence
gatttttacggataatgcgaacgcc

SEQ ID NO: 137592 - DNA, 25 bp, Probe sequence
gattctaaaatagtatccgactgca

SEQ ID NO: 137593 - DNA, 25 bp, Probe sequence
gttagacaaccggatgcaaattatc

SEQ ID NO: 137594 - DNA, 25 bp, Probe sequence
gttataagtttatttgttgcaattt

SEQ ID NO: 137595 - DNA, 25 bp, Probe sequence
gtattaaagcaaatgatattcacac

SEQ ID NO: 137596 - DNA, 25 bp, Probe sequence
gtatccgactgcagacatttactaa

SEQ ID NO: 137597 - DNA, 25 bp, Probe sequence
gtaatacagcaataatggctttatt

SEQ ID NO: 137598 - DNA, 25 bp, Probe sequence
gtgctgtaaatccaagtattaaagc

SEQ ID NO: 137599 - DNA, 25 bp, Probe sequence
gggccagttagtgacatagcacgtg

SEQ ID NO: 137600 - DNA, 25 bp, Probe sequence
ggatagcaagagcaagtcagtacat

SEQ ID NO: 137601 - DNA, 25 bp, Probe sequence
ggataatgcgaacgccgaaaataac

SEQ ID NO: 137602 - DNA, 25 bp, Probe sequence
ggaacatcgaataatagtgctgtaa

SEQ ID NO: 137603 - DNA, 25 bp, Probe sequence
tattggtttaatattgcttgtagta

SEQ ID NO: 137604 - DNA, 25 bp, Probe sequence
ttgataatttaatagatggcacgaa

SEQ ID NO: 137605 - DNA, 25 bp, Probe sequence
attggttacgaacgcgcaacaataa

SEQ ID NO: 137606 - DNA, 25 bp, Probe sequence
acattggttacgaacgcgcaacaat

SEQ ID NO: 137607 - DNA, 25 bp, Probe sequence
cacattggttacgaacgcgcaacaa

SEQ ID NO: 137608 - DNA, 25 bp, Probe sequence
cattggttacgaacgcgcaacaata

SEQ ID NO: 137609 - DNA, 25 bp, Probe sequence
cttgttgcgttttttgcacattggt

SEQ ID NO: 137610 - DNA, 25 bp, Probe sequence
ctgtcttgttgcgttttttgcacat

SEQ ID NO: 137611 - DNA, 25 bp, Probe sequence
gcgttttttgcacattggttacgaa

SEQ ID NO: 137612 - DNA, 25 bp, Probe sequence
gctgtcttgttgcgttttttgcaca

SEQ ID NO: 137613 - DNA, 25 bp, Probe sequence
gcacattggttacgaacgcgcaaca

SEQ ID NO: 137614 - DNA, 25 bp, Probe sequence
gttgcgttttttgcacattggttac

SEQ ID NO: 137615 - DNA, 25 bp, Probe sequence
gttttttgcacattggttacgaacg

SEQ ID NO: 137616 - DNA, 25 bp, Probe sequence
gtcttgttgcgttttttgcacattg

SEQ ID NO: 137617 - DNA, 25 bp, Probe sequence
ttggttacgaacgcgcaacaataaa

SEQ ID NO: 137618 - DNA, 25 bp, Probe sequence
ggctgtcttgttgcgttttttgcac

SEQ ID NO: 137619 - DNA, 25 bp, Probe sequence
tggttacgaacgcgcaacaataaaa

SEQ ID NO: 137620 - DNA, 25 bp, Probe sequence
tgtcttgttgcgttttttgcacatt

SEQ ID NO: 137621 - DNA, 25 bp, Probe sequence
tgttgcgttttttgcacattggtta

SEQ ID NO: 137622 - DNA, 25 bp, Probe sequence
tgcacattggttacgaacgcgcaac

SEQ ID NO: 137623 - DNA, 25 bp, Probe sequence
tgcgttttttgcacattggttacga

SEQ ID NO: 137624 - DNA, 25 bp, Probe sequence
tcttgttgcgttttttgcacattgg

SEQ ID NO: 137625 - DNA, 25 bp, Probe sequence
tttgcacattggttacgaacgcgca

SEQ ID NO: 137626 - DNA, 25 bp, Probe sequence
ttttttgcacattggttacgaacgc

SEQ ID NO: 137627 - DNA, 25 bp, Probe sequence
tttttgcacattggttacgaacgcg

SEQ ID NO: 137628 - DNA, 25 bp, Probe sequence
ttttgcacattggttacgaacgcgc

SEQ ID NO: 137629 - DNA, 25 bp, Probe sequence
ttgcacattggttacgaacgcgcaa

SEQ ID NO: 137630 - DNA, 25 bp, Probe sequence
ttgcgttttttgcacattggttacg

SEQ ID NO: 137631 - DNA, 25 bp, Probe sequence
ttgttgcgttttttgcacattggtt

SEQ ID NO: 137632 - DNA, 25 bp, Probe sequence
attgttggcggcattaatacgttaa

SEQ ID NO: 137633 - DNA, 25 bp, Probe sequence
attatgttgtctatttattgctgtt

SEQ ID NO: 137634 - DNA, 25 bp, Probe sequence
atttatcattgttggcggcattaat

SEQ ID NO: 137635 - DNA, 25 bp, Probe sequence
atcattgttggcggcattaatacgt

SEQ ID NO: 137636 - DNA, 25 bp, Probe sequence
atgttgtctatttattgctgttaaa

SEQ ID NO: 137637 - DNA, 25 bp, Probe sequence
agttttccaattacgcagattgtca

SEQ ID NO: 137638 - DNA, 25 bp, Probe sequence
acctacttggagaaaattcattagt

SEQ ID NO: 137639 - DNA, 25 bp, Probe sequence
acacaaacgcatgctgaaattttaa

SEQ ID NO: 137640 - DNA, 25 bp, Probe sequence
aaactaacacaaacgcatgctgaaa

SEQ ID NO: 137641 - DNA, 25 bp, Probe sequence
aaaatttatcattgttggcggcatt

SEQ ID NO: 137642 - DNA, 25 bp, Probe sequence
aacacaaacgcatgctgaaatttta

SEQ ID NO: 137643 - DNA, 25 bp, Probe sequence
aactaacacaaacgcatgctgaaat

SEQ ID NO: 137644 - DNA, 25 bp, Probe sequence
aatttatcattgttggcggcattaa

SEQ ID NO: 137645 - DNA, 25 bp, Probe sequence
cattgttggcggcattaatacgtta

SEQ ID NO: 137646 - DNA, 25 bp, Probe sequence
ctaacacaaacgcatgctgaaattt

SEQ ID NO: 137647 - DNA, 25 bp, Probe sequence
gaaactaacacaaacgcatgctgaa

SEQ ID NO: 137648 - DNA, 25 bp, Probe sequence
gagaaaattcattagttttccaatt

SEQ ID NO: 137649 - DNA, 25 bp, Probe sequence
gttgtctatttattgctgttaaaat

SEQ ID NO: 137650 - DNA, 25 bp, Probe sequence
tgaattgttattttgtttacagggt

SEQ ID NO: 137651 - DNA, 25 bp, Probe sequence
tgaaactaacacaaacgcatgctga

SEQ ID NO: 137652 - DNA, 25 bp, Probe sequence
tgctgttaaaattattacacattga

SEQ ID NO: 137653 - DNA, 25 bp, Probe sequence
tcattgttggcggcattaatacgtt

SEQ ID NO: 137654 - DNA, 25 bp, Probe sequence
taagcttacaaacagttttattata

SEQ ID NO: 137655 - DNA, 25 bp, Probe sequence
taaaacctacttggagaaaattcat

SEQ ID NO: 137656 - DNA, 25 bp, Probe sequence
tacacattgaatatatgattagtca

SEQ ID NO: 137657 - DNA, 25 bp, Probe sequence
tatgattagtcatattaccggattt

SEQ ID NO: 137658 - DNA, 25 bp, Probe sequence
tatgttgtctatttattgctgttaa

SEQ ID NO: 137659 - DNA, 25 bp, Probe sequence
tattatgttgtctatttattgctgt

SEQ ID NO: 137660 - DNA, 25 bp, Probe sequence
ttgtatcctggctaaatttgccagc

SEQ ID NO: 137661 - DNA, 25 bp, Probe sequence
ttttccaattacgcagattgtcaac

SEQ ID NO: 137662 - DNA, 25 bp, Probe sequence
ttatcattgttggcggcattaatac

SEQ ID NO: 137663 - DNA, 25 bp, Probe sequence
ttagttttccaattacgcagattgt

SEQ ID NO: 137664 - DNA, 25 bp, Probe sequence
ttatgttgtctatttattgctgtta

SEQ ID NO: 137665 - DNA, 25 bp, Probe sequence
ttgttggcggcattaatacgttaaa

SEQ ID NO: 137666 - DNA, 25 bp, Probe sequence
atacggtaaaatcagcaccattttt

SEQ ID NO: 137667 - DNA, 25 bp, Probe sequence
atatattacagaaatttggatgcct

SEQ ID NO: 137668 - DNA, 25 bp, Probe sequence
ataatggtgatttagccgggatact

SEQ ID NO: 137669 - DNA, 25 bp, Probe sequence
atcaattacaacaacttgcgtcgtt

SEQ ID NO: 137670 - DNA, 25 bp, Probe sequence
atggtgatttagccgggatacttgg

SEQ ID NO: 137671 - DNA, 25 bp, Probe sequence
atggacgacaggctcagcaacatat

SEQ ID NO: 137672 - DNA, 25 bp, Probe sequence
agtatatggtatttgaagcacaggg

SEQ ID NO: 137673 - DNA, 25 bp, Probe sequence
agccgggatacttggcttatgtata

SEQ ID NO: 137674 - DNA, 25 bp, Probe sequence
aaatggacgacaggctcagcaacat

SEQ ID NO: 137675 - DNA, 25 bp, Probe sequence
aatttggatgcctgttaaagggtga

SEQ ID NO: 137676 - DNA, 25 bp, Probe sequence
caacttgcgtcgttaacgttagtag

SEQ ID NO: 137677 - DNA, 25 bp, Probe sequence
caacaacttgcgtcgttaacgttag

SEQ ID NO: 137678 - DNA, 25 bp, Probe sequence
cagaaatttggatgcctgttaaagg

SEQ ID NO: 137679 - DNA, 25 bp, Probe sequence
catcactacatacatcaatatcaag

SEQ ID NO: 137680 - DNA, 25 bp, Probe sequence
gcagtacctaaagcagttcaacaaa

SEQ ID NO: 137681 - DNA, 25 bp, Probe sequence
gcaccattttttgagttgtatcagg

SEQ ID NO: 137682 - DNA, 25 bp, Probe sequence
gaagaggttcatcactacatacatc

SEQ ID NO: 137683 - DNA, 25 bp, Probe sequence
gaaaatggacgacaggctcagcaac

SEQ ID NO: 137684 - DNA, 25 bp, Probe sequence
gacgacaggctcagcaacatatagc

SEQ ID NO: 137685 - DNA, 25 bp, Probe sequence
gaggttcatcactacatacatcaat

SEQ ID NO: 137686 - DNA, 25 bp, Probe sequence
gatgtcataacattagcaagttcaa

SEQ ID NO: 137687 - DNA, 25 bp, Probe sequence
gatttagccgggatacttggcttat

SEQ ID NO: 137688 - DNA, 25 bp, Probe sequence
gattgcagttaccggagataatagt

SEQ ID NO: 137689 - DNA, 25 bp, Probe sequence
gttaccggagataatagtgctgata

SEQ ID NO: 137690 - DNA, 25 bp, Probe sequence
ggttcatcactacatacatcaatat

SEQ ID NO: 137691 - DNA, 25 bp, Probe sequence
ggaatatcaattacaacaacttgcg

SEQ ID NO: 137692 - DNA, 25 bp, Probe sequence
tggaagaggttcatcactacataca

SEQ ID NO: 137693 - DNA, 25 bp, Probe sequence
tgcgtcgttaacgttagtaggtatt

SEQ ID NO: 137694 - DNA, 25 bp, Probe sequence
tcaggatggtgatactacaagtgaa

SEQ ID NO: 137695 - DNA, 25 bp, Probe sequence
tagcaagttcaaagtatatggtatt

SEQ ID NO: 137696 - DNA, 25 bp, Probe sequence
tagtaggtattaaagaaacgtatga

SEQ ID NO: 137697 - DNA, 25 bp, Probe sequence
tttttgagttgtatcaggatggtga

SEQ ID NO: 137698 - DNA, 25 bp, Probe sequence
ttagccgggatacttggcttatgta

SEQ ID NO: 137699 - DNA, 25 bp, Probe sequence
ttacaacaacttgcgtcgttaacgt

SEQ ID NO: 137700 - DNA, 25 bp, Probe sequence
attgacgcaccaatttataacgcaa

SEQ ID NO: 137701 - DNA, 25 bp, Probe sequence
attatggtgcgacttggcaagataa

SEQ ID NO: 137702 - DNA, 25 bp, Probe sequence
atttatctaaaatagcggctgaaca

SEQ ID NO: 137703 - DNA, 25 bp, Probe sequence
atattcgatttttataatgcattta

SEQ ID NO: 137704 - DNA, 25 bp, Probe sequence
atcattatcaattgacgcaccaatt

SEQ ID NO: 137705 - DNA, 25 bp, Probe sequence
atgcgatgttcgatataccatatag

SEQ ID NO: 137706 - DNA, 25 bp, Probe sequence
atgtcacagtgcttggtaggaaaac

SEQ ID NO: 137707 - DNA, 25 bp, Probe sequence
agattacttagaggcattggttgaa

SEQ ID NO: 137708 - DNA, 25 bp, Probe sequence
agctttgcagcacaacgattttcat

SEQ ID NO: 137709 - DNA, 25 bp, Probe sequence
acacatgttgtgacgcaccctgatt

SEQ ID NO: 137710 - DNA, 25 bp, Probe sequence
aaacattatggtgcgacttggcaag

SEQ ID NO: 137711 - DNA, 25 bp, Probe sequence
aaacatccgaagattacttagaggc

SEQ ID NO: 137712 - DNA, 25 bp, Probe sequence
aaacaattagatatacctgtgaaat

SEQ ID NO: 137713 - DNA, 25 bp, Probe sequence
aatgcatttattgggacaagtgatt

SEQ ID NO: 137714 - DNA, 25 bp, Probe sequence
aatagcggctgaacaagtgaagaaa

SEQ ID NO: 137715 - DNA, 25 bp, Probe sequence
caatcctttgtatgcgatgttcgat

SEQ ID NO: 137716 - DNA, 25 bp, Probe sequence
caccctgatttcattgttcctatgc

SEQ ID NO: 137717 - DNA, 25 bp, Probe sequence
gcagatgttatctctgtccgtgtct

SEQ ID NO: 137718 - DNA, 25 bp, Probe sequence
gaagatagggacaatcgccgattta

SEQ ID NO: 137719 - DNA, 25 bp, Probe sequence
gacaatcgccgatttacatattgat

SEQ ID NO: 137720 - DNA, 25 bp, Probe sequence
gaggcattggttgaaatagttaagt

SEQ ID NO: 137721 - DNA, 25 bp, Probe sequence
gatggcagatgttatctctgtccgt

SEQ ID NO: 137722 - DNA, 25 bp, Probe sequence
gataaagaacgaatatcttggggca

SEQ ID NO: 137723 - DNA, 25 bp, Probe sequence
gatttacatattgatcgtcataata

SEQ ID NO: 137724 - DNA, 25 bp, Probe sequence
gtattatgggccatgttcattttcg

SEQ ID NO: 137725 - DNA, 25 bp, Probe sequence
gtatgactacgcaagacatttggaa

SEQ ID NO: 137726 - DNA, 25 bp, Probe sequence
gggaagttgaaagtatgactacgca

SEQ ID NO: 137727 - DNA, 25 bp, Probe sequence
gtgatttcaatcctttgtatgcgat

SEQ ID NO: 137728 - DNA, 25 bp, Probe sequence
gggacaagtgatttcaatcctttgt

SEQ ID NO: 137729 - DNA, 25 bp, Probe sequence
ggctatccaagacaatggcgttcag

SEQ ID NO: 137730 - DNA, 25 bp, Probe sequence
ggcgttcagaagatatttaccagga

SEQ ID NO: 137731 - DNA, 25 bp, Probe sequence
tgtccgtgtctaggctatccaagac

SEQ ID NO: 137732 - DNA, 25 bp, Probe sequence
tggtatgattatagctttgcagcac

SEQ ID NO: 137733 - DNA, 25 bp, Probe sequence
ttgcagcacaacgattttcattaga

SEQ ID NO: 137734 - DNA, 25 bp, Probe sequence
attcaaccacatatgcatgcatcag

SEQ ID NO: 137735 - DNA, 25 bp, Probe sequence
atacgaccaatttcacgttttatcg

SEQ ID NO: 137736 - DNA, 25 bp, Probe sequence
accgattgcaggtgctgttctgatc

SEQ ID NO: 137737 - DNA, 25 bp, Probe sequence
acgacagttttatcacaattagcta

SEQ ID NO: 137738 - DNA, 25 bp, Probe sequence
actgattgcatgtttacttgtactt

SEQ ID NO: 137739 - DNA, 25 bp, Probe sequence
aacactggatttacagcttttccga

SEQ ID NO: 137740 - DNA, 25 bp, Probe sequence
ctggtgctgatgcatttgttgctgc

SEQ ID NO: 137741 - DNA, 25 bp, Probe sequence
ccgttcgtggtgattttcttcttga

SEQ ID NO: 137742 - DNA, 25 bp, Probe sequence
gcttttccgatgttagcggcttcaa

SEQ ID NO: 137743 - DNA, 25 bp, Probe sequence
gcatatcctaaaggtggcggcgcgt

SEQ ID NO: 137744 - DNA, 25 bp, Probe sequence
gcagttgcaacttggtatactttac

SEQ ID NO: 137745 - DNA, 25 bp, Probe sequence
gaactgcggttcctggagtaacatt

SEQ ID NO: 137746 - DNA, 25 bp, Probe sequence
gaaacgtcatttcccagatgtaaga

SEQ ID NO: 137747 - DNA, 25 bp, Probe sequence
gaggctcattattagtcgattacat

SEQ ID NO: 137748 - DNA, 25 bp, Probe sequence
gataatgctgccttctattttgtac

SEQ ID NO: 137749 - DNA, 25 bp, Probe sequence
gtacaggcaacgaccgtgatgattt

SEQ ID NO: 137750 - DNA, 25 bp, Probe sequence
gtcggatgcattatcttcagtggct

SEQ ID NO: 137751 - DNA, 25 bp, Probe sequence
gtcgctgttagtatatcatctggtg

SEQ ID NO: 137752 - DNA, 25 bp, Probe sequence
gtgatcgcttaggctactctaactc

SEQ ID NO: 137753 - DNA, 25 bp, Probe sequence
ggggattgcttgcaggaggctcatt

SEQ ID NO: 137754 - DNA, 25 bp, Probe sequence
ggtattagcagccaacactggattt

SEQ ID NO: 137755 - DNA, 25 bp, Probe sequence
ggttagcgattctttcgtcggatgc

SEQ ID NO: 137756 - DNA, 25 bp, Probe sequence
ggccgatacttattttcttgccgtt

SEQ ID NO: 137757 - DNA, 25 bp, Probe sequence
tggcggcgcgtatatggtgtccaag

SEQ ID NO: 137758 - DNA, 25 bp, Probe sequence
tgttctgatcttattagctgcttta

SEQ ID NO: 137759 - DNA, 25 bp, Probe sequence
tcgattacatactgactgtcgctgt

SEQ ID NO: 137760 - DNA, 25 bp, Probe sequence
taactgaatctgccaccgtattatc

SEQ ID NO: 137761 - DNA, 25 bp, Probe sequence
tagttggtatcgttggtttagcata

SEQ ID NO: 137762 - DNA, 25 bp, Probe sequence
tataggtactttccgtgtggcgaca

SEQ ID NO: 137763 - DNA, 25 bp, Probe sequence
tatcctatccagtatatcttttcat

SEQ ID NO: 137764 - DNA, 25 bp, Probe sequence
tatcagtagtgggtgcagttgcaac

SEQ ID NO: 137765 - DNA, 25 bp, Probe sequence
ttcagtggcttacggtcccgaacaa

SEQ ID NO: 137766 - DNA, 25 bp, Probe sequence
ttccatttacactagcacaattcgg

SEQ ID NO: 137767 - DNA, 25 bp, Probe sequence
ttgttgctgcattcccaagtttata

SEQ ID NO: 137768 - DNA, 25 bp, Probe sequence
attataccagttctattgaataaat

SEQ ID NO: 137769 - DNA, 25 bp, Probe sequence
attatttttgacaccttatatgtta

SEQ ID NO: 137770 - DNA, 25 bp, Probe sequence
atttattttattataccagttctat

SEQ ID NO: 137771 - DNA, 25 bp, Probe sequence
atttttgacaccttatatgttaata

SEQ ID NO: 137772 - DNA, 25 bp, Probe sequence
attttattataccagttctattgaa

SEQ ID NO: 137773 - DNA, 25 bp, Probe sequence
atatttaccattatttttgacacct

SEQ ID NO: 137774 - DNA, 25 bp, Probe sequence
ataccagttctattgaataaattaa

SEQ ID NO: 137775 - DNA, 25 bp, Probe sequence
atgagatttattttattataccagt

SEQ ID NO: 137776 - DNA, 25 bp, Probe sequence
agatttattttattataccagttct

SEQ ID NO: 137777 - DNA, 25 bp, Probe sequence
accattatttttgacaccttatatg

SEQ ID NO: 137778 - DNA, 25 bp, Probe sequence
cattatttttgacaccttatatgtt

SEQ ID NO: 137779 - DNA, 25 bp, Probe sequence
ccattatttttgacaccttatatgt

SEQ ID NO: 137780 - DNA, 25 bp, Probe sequence
gagatttattttattataccagttc

SEQ ID NO: 137781 - DNA, 25 bp, Probe sequence
gatttattttattataccagttcta

SEQ ID NO: 137782 - DNA, 25 bp, Probe sequence
gtatatttaccattatttttgacac

SEQ ID NO: 137783 - DNA, 25 bp, Probe sequence
gtgcctaatgagatttattttatta

SEQ ID NO: 137784 - DNA, 25 bp, Probe sequence
ggtatatttaccattatttttgaca

SEQ ID NO: 137785 - DNA, 25 bp, Probe sequence
taccattatttttgacaccttatat

SEQ ID NO: 137786 - DNA, 25 bp, Probe sequence
tatttaccattatttttgacacctt

SEQ ID NO: 137787 - DNA, 25 bp, Probe sequence
tatatttaccattatttttgacacc

SEQ ID NO: 137788 - DNA, 25 bp, Probe sequence
tatttttgacaccttatatgttaat

SEQ ID NO: 137789 - DNA, 25 bp, Probe sequence
tattttattataccagttctattga

SEQ ID NO: 137790 - DNA, 25 bp, Probe sequence
tattataccagttctattgaataaa

SEQ ID NO: 137791 - DNA, 25 bp, Probe sequence
tttgacaccttatatgttaataggt

SEQ ID NO: 137792 - DNA, 25 bp, Probe sequence
tttaccattatttttgacaccttat

SEQ ID NO: 137793 - DNA, 25 bp, Probe sequence
tttattttattataccagttctatt

SEQ ID NO: 137794 - DNA, 25 bp, Probe sequence
tttattataccagttctattgaata

SEQ ID NO: 137795 - DNA, 25 bp, Probe sequence
tttttgacaccttatatgttaatag

SEQ ID NO: 137796 - DNA, 25 bp, Probe sequence
ttttattataccagttctattgaat

SEQ ID NO: 137797 - DNA, 25 bp, Probe sequence
ttttgacaccttatatgttaatagg

SEQ ID NO: 137798 - DNA, 25 bp, Probe sequence
ttataccagttctattgaataaatt

SEQ ID NO: 137799 - DNA, 25 bp, Probe sequence
ttattttattataccagttctattg

SEQ ID NO: 137800 - DNA, 25 bp, Probe sequence
ttatttttgacaccttatatgttaa

SEQ ID NO: 137801 - DNA, 25 bp, Probe sequence
ttaccattatttttgacaccttata

SEQ ID NO: 137802 - DNA, 25 bp, Probe sequence
ttttgtaactggtgcaacgggcctt

SEQ ID NO: 137803 - DNA, 25 bp, Probe sequence
attgatcaagcgttagcagatttta

SEQ ID NO: 137804 - DNA, 25 bp, Probe sequence
agtaacggttgatggtgtggttggt

SEQ ID NO: 137805 - DNA, 25 bp, Probe sequence
agaacaacttggtgttgaaccaaat

SEQ ID NO: 137806 - DNA, 25 bp, Probe sequence
agcaaatgaggaaacttcacttgat

SEQ ID NO: 137807 - DNA, 25 bp, Probe sequence
agcgttagcagattttaaaccagaa

SEQ ID NO: 137808 - DNA, 25 bp, Probe sequence
agcgcaaggtggtactctgatttat

SEQ ID NO: 137809 - DNA, 25 bp, Probe sequence
actggtgcaacgggccttattggca

SEQ ID NO: 137810 - DNA, 25 bp, Probe sequence
acatctattcaagctattcattttg

SEQ ID NO: 137811 - DNA, 25 bp, Probe sequence
aaagtattgcctttatgtatgaacc

SEQ ID NO: 137812 - DNA, 25 bp, Probe sequence
aaccaaatattgatattcaacctgc

SEQ ID NO: 137813 - DNA, 25 bp, Probe sequence
aagtaattgcccaaagtattgcctt

SEQ ID NO: 137814 - DNA, 25 bp, Probe sequence
aatgtagcagatgatgcacctgtta

SEQ ID NO: 137815 - DNA, 25 bp, Probe sequence
caaccatttgaacgtggcgtaagca

SEQ ID NO: 137816 - DNA, 25 bp, Probe sequence
cttcacttgattttaactcaactgg

SEQ ID NO: 137817 - DNA, 25 bp, Probe sequence
gaatggtcaacaaaagctagctgct

SEQ ID NO: 137818 - DNA, 25 bp, Probe sequence
gaagaggggcatgaggttgctggtt

SEQ ID NO: 137819 - DNA, 25 bp, Probe sequence
gaacgtggcgtaagcaatgagaagt

SEQ ID NO: 137820 - DNA, 25 bp, Probe sequence
gaaaatggtatctataatgtagcag

SEQ ID NO: 137821 - DNA, 25 bp, Probe sequence
gagaagtttaaagcgcaaggtggta

SEQ ID NO: 137822 - DNA, 25 bp, Probe sequence
gatgaatacgttgttttacgttttg

SEQ ID NO: 137823 - DNA, 25 bp, Probe sequence
gaggttgctggttttactacatctg

SEQ ID NO: 137824 - DNA, 25 bp, Probe sequence
gatgatgcagttgaaacatctattc

SEQ ID NO: 137825 - DNA, 25 bp, Probe sequence
gatgcacctgttaaaggttctgaat

SEQ ID NO: 137826 - DNA, 25 bp, Probe sequence
gatatggcagcaaatacgaaagtac

SEQ ID NO: 137827 - DNA, 25 bp, Probe sequence
gttgctggttttactacatctgaga

SEQ ID NO: 137828 - DNA, 25 bp, Probe sequence
gtgcaacgggccttattggcattaa

SEQ ID NO: 137829 - DNA, 25 bp, Probe sequence
gtgacactttcagatggcgtaacat

SEQ ID NO: 137830 - DNA, 25 bp, Probe sequence
gggccttattggcattaaattagtt

SEQ ID NO: 137831 - DNA, 25 bp, Probe sequence
ggtacttggtacggaaaagatggca

SEQ ID NO: 137832 - DNA, 25 bp, Probe sequence
ggaaacttcacttgattttaactca

SEQ ID NO: 137833 - DNA, 25 bp, Probe sequence
ggcgtaacatcatttgtgcatcttg

SEQ ID NO: 137834 - DNA, 25 bp, Probe sequence
tatggatggtcaagtgacactttca

SEQ ID NO: 137835 - DNA, 25 bp, Probe sequence
tttactacatctgagaatggtcaac

SEQ ID NO: 137836 - DNA, 25 bp, Probe sequence
aaattgcaattgctggatcgggtgc

SEQ ID NO: 137837 - DNA, 25 bp, Probe sequence
tttacttggtagtggaccagttgaa

SEQ ID NO: 137838 - DNA, 25 bp, Probe sequence
atacatctcatgttgaagcggttaa

SEQ ID NO: 137839 - DNA, 25 bp, Probe sequence
acacttattgacggatatacatctc

SEQ ID NO: 137840 - DNA, 25 bp, Probe sequence
aaagatttgtgttaatggtacggca

SEQ ID NO: 137841 - DNA, 25 bp, Probe sequence
aagttggtgcgcattatccatccat

SEQ ID NO: 137842 - DNA, 25 bp, Probe sequence
cagtgttggagtgtaatatggcatc

SEQ ID NO: 137843 - DNA, 25 bp, Probe sequence
cagtcaatcgctttattactgattt

SEQ ID NO: 137844 - DNA, 25 bp, Probe sequence
gctggatcgggtgcattaggtagtg

SEQ ID NO: 137845 - DNA, 25 bp, Probe sequence
gcaggatatgatgtcacacttattg

SEQ ID NO: 137846 - DNA, 25 bp, Probe sequence
gaagcggaattgaatggtgtcatta

SEQ ID NO: 137847 - DNA, 25 bp, Probe sequence
gaagcggttaagcaacatggattaa

SEQ ID NO: 137848 - DNA, 25 bp, Probe sequence
gaaagccctggacacagtcatttac

SEQ ID NO: 137849 - DNA, 25 bp, Probe sequence
gaaatagtgcatgtagcgacgattg

SEQ ID NO: 137850 - DNA, 25 bp, Probe sequence
ggacggcaggtcttgaaagccctgg

SEQ ID NO: 137851 - DNA, 25 bp, Probe sequence
gagaggcattcgagttaaacattcc

SEQ ID NO: 137852 - DNA, 25 bp, Probe sequence
gttacgacttggacggcaggtcttg

SEQ ID NO: 137853 - DNA, 25 bp, Probe sequence
gttgtctttctatttccaaagtcta

SEQ ID NO: 137854 - DNA, 25 bp, Probe sequence
gttgctgatttacttaacgaagcgg

SEQ ID NO: 137855 - DNA, 25 bp, Probe sequence
gttgctcaatcacaaattgtcagag

SEQ ID NO: 137856 - DNA, 25 bp, Probe sequence
gtagttatgcgaagtgtttgattta

SEQ ID NO: 137857 - DNA, 25 bp, Probe sequence
gtagcgacgattgataatgttcatt

SEQ ID NO: 137858 - DNA, 25 bp, Probe sequence
gtgcgcattatccatccatgtatca

SEQ ID NO: 137859 - DNA, 25 bp, Probe sequence
gggtgcattaggtagtggctttggt

SEQ ID NO: 137860 - DNA, 25 bp, Probe sequence
ggtgccaaactatttcaagcaggat

SEQ ID NO: 137861 - DNA, 25 bp, Probe sequence
ggtagtggctttggtgccaaactat

SEQ ID NO: 137862 - DNA, 25 bp, Probe sequence
ggtacggcaaatgcattaagcacag

SEQ ID NO: 137863 - DNA, 25 bp, Probe sequence
ggacgaaagcatttacgatgttgtc

SEQ ID NO: 137864 - DNA, 25 bp, Probe sequence
tggacacagtcatttacttggtagt

SEQ ID NO: 137865 - DNA, 25 bp, Probe sequence
tcagaggtgttacgacttggacggc

SEQ ID NO: 137866 - DNA, 25 bp, Probe sequence
tcattgcgcagtatgttgctcaatc

SEQ ID NO: 137867 - DNA, 25 bp, Probe sequence
tatccatccatgtatcaagatttaa

SEQ ID NO: 137868 - DNA, 25 bp, Probe sequence
tttacgatgttgtctttctatttcc

SEQ ID NO: 137869 - DNA, 25 bp, Probe sequence
ttctatttccaaagtctatgcaatt

SEQ ID NO: 137870 - DNA, 25 bp, Probe sequence
attcaaggtttgtctgcagcatgta

SEQ ID NO: 137871 - DNA, 25 bp, Probe sequence
atcgctgttagcttatctgccttat

SEQ ID NO: 137872 - DNA, 25 bp, Probe sequence
atgataagtcgggtgttgcttcagg

SEQ ID NO: 137873 - DNA, 25 bp, Probe sequence
atgttgtaggttcattactcatcat

SEQ ID NO: 137874 - DNA, 25 bp, Probe sequence
agtgcgccagatgataagtcgggtg

SEQ ID NO: 137875 - DNA, 25 bp, Probe sequence
agattttatctcaacatggtccgaa

SEQ ID NO: 137876 - DNA, 25 bp, Probe sequence
aatcttgttgtcccattacaatcaa

SEQ ID NO: 137877 - DNA, 25 bp, Probe sequence
gctattcgcgcagtcacttgttaat

SEQ ID NO: 137878 - DNA, 25 bp, Probe sequence
gctattggtctattggttcttgggg

SEQ ID NO: 137879 - DNA, 25 bp, Probe sequence
gcatttggagtagcagtatctggta

SEQ ID NO: 137880 - DNA, 25 bp, Probe sequence
gaacttaggtggtttcacaggtatg

SEQ ID NO: 137881 - DNA, 25 bp, Probe sequence
gacaacgtgccttaagctattggtc

SEQ ID NO: 137882 - DNA, 25 bp, Probe sequence
gatacagcagttgctagtgcgccag

SEQ ID NO: 137883 - DNA, 25 bp, Probe sequence
gttggcgttcaatatttgttgtttc

SEQ ID NO: 137884 - DNA, 25 bp, Probe sequence
gattgggttaatcttattgtcgtta

SEQ ID NO: 137885 - DNA, 25 bp, Probe sequence
gttgctgataaatttggtcgcgtca

SEQ ID NO: 137886 - DNA, 25 bp, Probe sequence
gtatttgtacgttgtttggtggctt

SEQ ID NO: 137887 - DNA, 25 bp, Probe sequence
gtcacttgttaatcttgttgtccca

SEQ ID NO: 137888 - DNA, 25 bp, Probe sequence
gtgtttatctgttcattagttggtt

SEQ ID NO: 137889 - DNA, 25 bp, Probe sequence
gtgtagcaggtggtgcacttatcgt

SEQ ID NO: 137890 - DNA, 25 bp, Probe sequence
gtggtgcaactatttcaaacttctt

SEQ ID NO: 137891 - DNA, 25 bp, Probe sequence
ggtgctggtgatgttgctgataaat

SEQ ID NO: 137892 - DNA, 25 bp, Probe sequence
ggtcgcgtcaaaattacttatgtag

SEQ ID NO: 137893 - DNA, 25 bp, Probe sequence
ggtttgtttatcgtaggtgctggtg

SEQ ID NO: 137894 - DNA, 25 bp, Probe sequence
ggatatttattgtttggtactggtt

SEQ ID NO: 137895 - DNA, 25 bp, Probe sequence
ggaagtggctttacagtgattgggt

SEQ ID NO: 137896 - DNA, 25 bp, Probe sequence
ggctacatatataggttggcgttca

SEQ ID NO: 137897 - DNA, 25 bp, Probe sequence
tctgccttatttgctggtttgttta

SEQ ID NO: 137898 - DNA, 25 bp, Probe sequence
taatcaaacatgcacctgagactaa

SEQ ID NO: 137899 - DNA, 25 bp, Probe sequence
tacacctttgccagcatttttaatt

SEQ ID NO: 137900 - DNA, 25 bp, Probe sequence
taggatttaattcttcgcaaacggg

SEQ ID NO: 137901 - DNA, 25 bp, Probe sequence
tattgtcgttaacatttttaccaga

SEQ ID NO: 137902 - DNA, 25 bp, Probe sequence
ttagaggtgacaaccgattgctttt

SEQ ID NO: 137903 - DNA, 25 bp, Probe sequence
ttgttgcatttttagtcattttact

SEQ ID NO: 137904 - DNA, 25 bp, Probe sequence
atgccttagaccaaggttttgaagg

SEQ ID NO: 137905 - DNA, 25 bp, Probe sequence
ataatgccttagaccaaggttttga

SEQ ID NO: 137906 - DNA, 25 bp, Probe sequence
atccaaaaaataatgccttagacca

SEQ ID NO: 137907 - DNA, 25 bp, Probe sequence
atggctccagccaatccattggtaa

SEQ ID NO: 137908 - DNA, 25 bp, Probe sequence
agccaatccattggtaaatccaaaa

SEQ ID NO: 137909 - DNA, 25 bp, Probe sequence
aataatgccttagaccaaggttttg

SEQ ID NO: 137910 - DNA, 25 bp, Probe sequence
aatgccttagaccaaggttttgaag

SEQ ID NO: 137911 - DNA, 25 bp, Probe sequence
caatccattggtaaatccaaaaaat

SEQ ID NO: 137912 - DNA, 25 bp, Probe sequence
caaaaaataatgccttagaccaagg

SEQ ID NO: 137913 - DNA, 25 bp, Probe sequence
cagccaatccattggtaaatccaaa

SEQ ID NO: 137914 - DNA, 25 bp, Probe sequence
ctccagccaatccattggtaaatcc

SEQ ID NO: 137915 - DNA, 25 bp, Probe sequence
ctcggtgttccttttgttaagccag

SEQ ID NO: 137916 - DNA, 25 bp, Probe sequence
gctccagccaatccattggtaaatc

SEQ ID NO: 137917 - DNA, 25 bp, Probe sequence
ccaaaaaataatgccttagaccaag

SEQ ID NO: 137918 - DNA, 25 bp, Probe sequence
ccagccaatccattggtaaatccaa

SEQ ID NO: 137919 - DNA, 25 bp, Probe sequence
gccaatccattggtaaatccaaaaa

SEQ ID NO: 137920 - DNA, 25 bp, Probe sequence
gtaaatccaaaaaataatgccttag

SEQ ID NO: 137921 - DNA, 25 bp, Probe sequence
gtccagttaaatttaaatatcgcca

SEQ ID NO: 137922 - DNA, 25 bp, Probe sequence
ggctccagccaatccattggtaaat

SEQ ID NO: 137923 - DNA, 25 bp, Probe sequence
tggctccagccaatccattggtaaa

SEQ ID NO: 137924 - DNA, 25 bp, Probe sequence
tggtaaatccaaaaaataatgcctt

SEQ ID NO: 137925 - DNA, 25 bp, Probe sequence
tgaaggtccagttaaatttaaatat

SEQ ID NO: 137926 - DNA, 25 bp, Probe sequence
tgccttagaccaaggttttgaaggt

SEQ ID NO: 137927 - DNA, 25 bp, Probe sequence
tccagccaatccattggtaaatcca

SEQ ID NO: 137928 - DNA, 25 bp, Probe sequence
tccaaaaaataatgccttagaccaa

SEQ ID NO: 137929 - DNA, 25 bp, Probe sequence
tccagttaaatttaaatatcgccaa

SEQ ID NO: 137930 - DNA, 25 bp, Probe sequence
tcggtgttccttttgttaagccagt

SEQ ID NO: 137931 - DNA, 25 bp, Probe sequence
taatgccttagaccaaggttttgaa

SEQ ID NO: 137932 - DNA, 25 bp, Probe sequence
ttagaccaaggttttgaaggtccag

SEQ ID NO: 137933 - DNA, 25 bp, Probe sequence
taaatccaaaaaataatgccttaga

SEQ ID NO: 137934 - DNA, 25 bp, Probe sequence
tagaccaaggttttgaaggtccagt

SEQ ID NO: 137935 - DNA, 25 bp, Probe sequence
attgcaggctatttcttaagttttg

SEQ ID NO: 137936 - DNA, 25 bp, Probe sequence
attgcgttaagcaccctttataggt

SEQ ID NO: 137937 - DNA, 25 bp, Probe sequence
atagtgttattaaagcgatgcctaa

SEQ ID NO: 137938 - DNA, 25 bp, Probe sequence
aggactaatctatgcgacaagagct

SEQ ID NO: 137939 - DNA, 25 bp, Probe sequence
aggacttaaaggactaatctatgcg

SEQ ID NO: 137940 - DNA, 25 bp, Probe sequence
agccacaattcataggaaaatcact

SEQ ID NO: 137941 - DNA, 25 bp, Probe sequence
accttttatcctaggcgaacaatct

SEQ ID NO: 137942 - DNA, 25 bp, Probe sequence
acgccttgcgcttatgaataaaaga

SEQ ID NO: 137943 - DNA, 25 bp, Probe sequence
aaattagagaatcctcgagacccaa

SEQ ID NO: 137944 - DNA, 25 bp, Probe sequence
aataattttgatataccaagttata

SEQ ID NO: 137945 - DNA, 25 bp, Probe sequence
aattgaacgccttgcgcttatgaat

SEQ ID NO: 137946 - DNA, 25 bp, Probe sequence
ctaggcgaacaatctttatcaagta

SEQ ID NO: 137947 - DNA, 25 bp, Probe sequence
gctatttcttaagttttgatgcccc

SEQ ID NO: 137948 - DNA, 25 bp, Probe sequence
gctagatatctttatattagaccaa

SEQ ID NO: 137949 - DNA, 25 bp, Probe sequence
gaacgccttgcgcttatgaataaaa

SEQ ID NO: 137950 - DNA, 25 bp, Probe sequence
gaacacgtaaaatagaaccaaagat

SEQ ID NO: 137951 - DNA, 25 bp, Probe sequence
gaacaatctttatcaagtatttcta

SEQ ID NO: 137952 - DNA, 25 bp, Probe sequence
gacaagagctgataaaggaacacgt

SEQ ID NO: 137953 - DNA, 25 bp, Probe sequence
gaaattgaacgccttgcgcttatga

SEQ ID NO: 137954 - DNA, 25 bp, Probe sequence
gaaatagtatagccacaattcatag

SEQ ID NO: 137955 - DNA, 25 bp, Probe sequence
gagctgataaaggaacacgtaaaat

SEQ ID NO: 137956 - DNA, 25 bp, Probe sequence
gatgaaattgaacgccttgcgctta

SEQ ID NO: 137957 - DNA, 25 bp, Probe sequence
gatttctctcatcagggtgaaaaat

SEQ ID NO: 137958 - DNA, 25 bp, Probe sequence
gttaagcaccctttataggtggaat

SEQ ID NO: 137959 - DNA, 25 bp, Probe sequence
gtgttattaaagcgatgcctaagtc

SEQ ID NO: 137960 - DNA, 25 bp, Probe sequence
gggattgcgttaagcaccctttata

SEQ ID NO: 137961 - DNA, 25 bp, Probe sequence
ggaaaatcactaattactgtaaaga

SEQ ID NO: 137962 - DNA, 25 bp, Probe sequence
tgcaattgcaggctatttcttaagt

SEQ ID NO: 137963 - DNA, 25 bp, Probe sequence
taatctatgcgacaagagctgataa

SEQ ID NO: 137964 - DNA, 25 bp, Probe sequence
tactttgctagatatctttatatta

SEQ ID NO: 137965 - DNA, 25 bp, Probe sequence
tagtatagccacaattcataggaaa

SEQ ID NO: 137966 - DNA, 25 bp, Probe sequence
tatcctaggcgaacaatctttatca

SEQ ID NO: 137967 - DNA, 25 bp, Probe sequence
tattgatttctctcatcagggtgaa

SEQ ID NO: 137968 - DNA, 25 bp, Probe sequence
ttagagaatcctcgagacccaatga

SEQ ID NO: 137969 - DNA, 25 bp, Probe sequence
atctgtttcggttattatcggtggc

SEQ ID NO: 137970 - DNA, 25 bp, Probe sequence
atatgcgttacttccaattataaaa

SEQ ID NO: 137971 - DNA, 25 bp, Probe sequence
atcggtggcattcgtattgccttgg

SEQ ID NO: 137972 - DNA, 25 bp, Probe sequence
atggtgtgctgtttgcagctttaat

SEQ ID NO: 137973 - DNA, 25 bp, Probe sequence
atggcacaacgtttattttagcagg

SEQ ID NO: 137974 - DNA, 25 bp, Probe sequence
acacgacatcgtaaaaatcaatcta

SEQ ID NO: 137975 - DNA, 25 bp, Probe sequence
aaaatcaatctaatcatcggccgca

SEQ ID NO: 137976 - DNA, 25 bp, Probe sequence
aatgcgacggatggcacaacgttta

SEQ ID NO: 137977 - DNA, 25 bp, Probe sequence
aatcatcggccgcaaagtattaata

SEQ ID NO: 137978 - DNA, 25 bp, Probe sequence
aattcaaacagttccagtcattgca

SEQ ID NO: 137979 - DNA, 25 bp, Probe sequence
cgtattgccttggttgttgcgatag

SEQ ID NO: 137980 - DNA, 25 bp, Probe sequence
gctatcattgcaatcgtcattgatg

SEQ ID NO: 137981 - DNA, 25 bp, Probe sequence
gctattttaatgttagtcatgggct

SEQ ID NO: 137982 - DNA, 25 bp, Probe sequence
gcttggtgacattgtgattcgtggt

SEQ ID NO: 137983 - DNA, 25 bp, Probe sequence
gcagctttaattggtattccattgg

SEQ ID NO: 137984 - DNA, 25 bp, Probe sequence
gcaagatacacaaaactttctggat

SEQ ID NO: 137985 - DNA, 25 bp, Probe sequence
gaatgacacgcaatcaagtgctacg

SEQ ID NO: 137986 - DNA, 25 bp, Probe sequence
gattgaattaccgttatctgtttcg

SEQ ID NO: 137987 - DNA, 25 bp, Probe sequence
gttggatcatttataggagcaccta

SEQ ID NO: 137988 - DNA, 25 bp, Probe sequence
gttgcgataggtgttgttgccgttg

SEQ ID NO: 137989 - DNA, 25 bp, Probe sequence
gtcattgcaatgttagctattttaa

SEQ ID NO: 137990 - DNA, 25 bp, Probe sequence
gtgcgattccgattgctatcattgc

SEQ ID NO: 137991 - DNA, 25 bp, Probe sequence
gtgattcgtggtacaaatgcgacgg

SEQ ID NO: 137992 - DNA, 25 bp, Probe sequence
gtgtttttatatgcgttacttccaa

SEQ ID NO: 137993 - DNA, 25 bp, Probe sequence
ggagcacctacgcttggtgacattg

SEQ ID NO: 137994 - DNA, 25 bp, Probe sequence
ggtgttgttgccgttggatcattta

SEQ ID NO: 137995 - DNA, 25 bp, Probe sequence
ggtatagctagtgttgatgcgaata

SEQ ID NO: 137996 - DNA, 25 bp, Probe sequence
ggatgctggcaaaggtatgggaatg

SEQ ID NO: 137997 - DNA, 25 bp, Probe sequence
tgtctgtctatggtgtgctgtttgc

SEQ ID NO: 137998 - DNA, 25 bp, Probe sequence
tgatgcgaatattaaggatgctggc

SEQ ID NO: 137999 - DNA, 25 bp, Probe sequence
tcgtcattgatgtactattaagatt

SEQ ID NO: 138000 - DNA, 25 bp, Probe sequence
tcaaacacttattaatgtctgtcta

SEQ ID NO: 138001 - DNA, 25 bp, Probe sequence
ttttagcaggtgcgattccgattgc

SEQ ID NO: 138002 - DNA, 25 bp, Probe sequence
ttccattgggaatcttgcttgcaag

SEQ ID NO: 138003 - DNA, 25 bp, Probe sequence
atttctatcattagtactaccacaa

SEQ ID NO: 138004 - DNA, 25 bp, Probe sequence
atttcatttttatcatttctatcat

SEQ ID NO: 138005 - DNA, 25 bp, Probe sequence
atctttggcgaggtactggttggtt

SEQ ID NO: 138006 - DNA, 25 bp, Probe sequence
cggtttccgtttatcgtatacgcat

SEQ ID NO: 138007 - DNA, 25 bp, Probe sequence
atgattttaattagtcttttcggtg

SEQ ID NO: 138008 - DNA, 25 bp, Probe sequence
agcattgatcattttagttacattt

SEQ ID NO: 138009 - DNA, 25 bp, Probe sequence
agctgaaaagcgtgcaggattccat

SEQ ID NO: 138010 - DNA, 25 bp, Probe sequence
acatccctggatttttaggcgtatt

SEQ ID NO: 138011 - DNA, 25 bp, Probe sequence
aaatcgatttggtcaagttacattc

SEQ ID NO: 138012 - DNA, 25 bp, Probe sequence
aaaagacattcttcccattcttctt

SEQ ID NO: 138013 - DNA, 25 bp, Probe sequence
aacagcctatatccggactttgaaa

SEQ ID NO: 138014 - DNA, 25 bp, Probe sequence
aagcgtacatgtcaagcttttgcga

SEQ ID NO: 138015 - DNA, 25 bp, Probe sequence
aagacgtctcgtttatgatgtttaa

SEQ ID NO: 138016 - DNA, 25 bp, Probe sequence
aagttacattcaaagacgtctcgtt

SEQ ID NO: 138017 - DNA, 25 bp, Probe sequence
aatacatcgtcatgagtttgttctt

SEQ ID NO: 138018 - DNA, 25 bp, Probe sequence
catctatcggtttccgtttatcgta

SEQ ID NO: 138019 - DNA, 25 bp, Probe sequence
cgtagcctttgtgatttcattttta

SEQ ID NO: 138020 - DNA, 25 bp, Probe sequence
ccacaaagtatccattacatccctg

SEQ ID NO: 138021 - DNA, 25 bp, Probe sequence
gcttcgtcatcatttagcattgatc

SEQ ID NO: 138022 - DNA, 25 bp, Probe sequence
gcattaacaccaaaacatttagctg

SEQ ID NO: 138023 - DNA, 25 bp, Probe sequence
gcaggattccatgagttgttctttg

SEQ ID NO: 138024 - DNA, 25 bp, Probe sequence
gagttgttctttgatttaattttcg

SEQ ID NO: 138025 - DNA, 25 bp, Probe sequence
gattatggcgataagcgtacatgtc

SEQ ID NO: 138026 - DNA, 25 bp, Probe sequence
gtcttcctatctaacagcctatatc

SEQ ID NO: 138027 - DNA, 25 bp, Probe sequence
gtcttttcggtgtatattggatcat

SEQ ID NO: 138028 - DNA, 25 bp, Probe sequence
gtggtctcatcaaacattttttaca

SEQ ID NO: 138029 - DNA, 25 bp, Probe sequence
ggttccatttcagctgatttatttt

SEQ ID NO: 138030 - DNA, 25 bp, Probe sequence
tggttaatcacgccttatttccata

SEQ ID NO: 138031 - DNA, 25 bp, Probe sequence
tgttcttatggttaatgtggtctca

SEQ ID NO: 138032 - DNA, 25 bp, Probe sequence
tgatgcatttagtagaacgtttttc

SEQ ID NO: 138033 - DNA, 25 bp, Probe sequence
tcaatatcgctttaggtgtgattaa

SEQ ID NO: 138034 - DNA, 25 bp, Probe sequence
tactggttggtttagcttcgtcatc

SEQ ID NO: 138035 - DNA, 25 bp, Probe sequence
ttcccattcttcttatgcgtggcaa

SEQ ID NO: 138036 - DNA, 25 bp, Probe sequence
ttaattttcgtctatgccattcaaa

SEQ ID NO: 138037 - DNA, 25 bp, Probe sequence
atacgtatgcattcatggtaacgaa

SEQ ID NO: 138038 - DNA, 25 bp, Probe sequence
atcgcttaccgtattatctggatgt

SEQ ID NO: 138039 - DNA, 25 bp, Probe sequence
aggtaaagaacctgctgtcgtcgca

SEQ ID NO: 138040 - DNA, 25 bp, Probe sequence
aggtctagtctacgacgcattaaac

SEQ ID NO: 138041 - DNA, 25 bp, Probe sequence
acagcattatcaacaagcgaatcgc

SEQ ID NO: 138042 - DNA, 25 bp, Probe sequence
aaacaccactattttgataaacaga

SEQ ID NO: 138043 - DNA, 25 bp, Probe sequence
aaggcgatggctatgaaggatttaa

SEQ ID NO: 138044 - DNA, 25 bp, Probe sequence
aatgccttaattaatggggatgcta

SEQ ID NO: 138045 - DNA, 25 bp, Probe sequence
aatatcatttagagacagtttcaga

SEQ ID NO: 138046 - DNA, 25 bp, Probe sequence
caagcgaatcgcaaattatttcaca

SEQ ID NO: 138047 - DNA, 25 bp, Probe sequence
ctgtcgtcgcagaagaatttttgaa

SEQ ID NO: 138048 - DNA, 25 bp, Probe sequence
gcccggactaggtagtaagagcacg

SEQ ID NO: 138049 - DNA, 25 bp, Probe sequence
ccaccttatgctgcgagtgctgttg

SEQ ID NO: 138050 - DNA, 25 bp, Probe sequence
gcaaataggtctagtctacgacgca

SEQ ID NO: 138051 - DNA, 25 bp, Probe sequence
gaagttagacgttgcattaggttat

SEQ ID NO: 138052 - DNA, 25 bp, Probe sequence
gaacctgctgtcgtcgcagaagaat

SEQ ID NO: 138053 - DNA, 25 bp, Probe sequence
gacagtttcagatttagcaaagcat

SEQ ID NO: 138054 - DNA, 25 bp, Probe sequence
gatgtagtttgcccggactaggtag

SEQ ID NO: 138055 - DNA, 25 bp, Probe sequence
gatgataaacaatttttcccacctt

SEQ ID NO: 138056 - DNA, 25 bp, Probe sequence
gataaacaatttttcccaccttatg

SEQ ID NO: 138057 - DNA, 25 bp, Probe sequence
gatataatggcacagatttaacggg

SEQ ID NO: 138058 - DNA, 25 bp, Probe sequence
gttcatggatgaatcgtaaaggcga

SEQ ID NO: 138059 - DNA, 25 bp, Probe sequence
gtttaggtatggatagttcatggat

SEQ ID NO: 138060 - DNA, 25 bp, Probe sequence
gtatggttttgcgaatacgtatgca

SEQ ID NO: 138061 - DNA, 25 bp, Probe sequence
gtacgattcaacataatgccttaat

SEQ ID NO: 138062 - DNA, 25 bp, Probe sequence
gtacagtgagaccaatgcaaatagg

SEQ ID NO: 138063 - DNA, 25 bp, Probe sequence
ggggatgctaatatatcaggtgtta

SEQ ID NO: 138064 - DNA, 25 bp, Probe sequence
tgctgcgagtgctgttgcaacaaat

SEQ ID NO: 138065 - DNA, 25 bp, Probe sequence
tttagggtcaagtacgattcaacat

SEQ ID NO: 138066 - DNA, 25 bp, Probe sequence
tacggttgttaatagagcatgatac

SEQ ID NO: 138067 - DNA, 25 bp, Probe sequence
tatctggatgtagtttgcccggact

SEQ ID NO: 138068 - DNA, 25 bp, Probe sequence
ttatttcacatatgttacggttgtt

SEQ ID NO: 138069 - DNA, 25 bp, Probe sequence
ttaggttattctacagatggtcgaa

SEQ ID NO: 138070 - DNA, 25 bp, Probe sequence
ttgtcttatcgcttaccgtattatc

SEQ ID NO: 138071 - DNA, 25 bp, Probe sequence
attaactgtggcaggtgtcttacaa

SEQ ID NO: 138072 - DNA, 25 bp, Probe sequence
attagttgggctacacttgcaagtt

SEQ ID NO: 138073 - DNA, 25 bp, Probe sequence
agttgatgtcgaaaacactggaaca

SEQ ID NO: 138074 - DNA, 25 bp, Probe sequence
actgcaacggtactcgttactgcac

SEQ ID NO: 138075 - DNA, 25 bp, Probe sequence
actgcactagcattaggtgttgatg

SEQ ID NO: 138076 - DNA, 25 bp, Probe sequence
acttgccatcattgttgcagtacct

SEQ ID NO: 138077 - DNA, 25 bp, Probe sequence
aaacgcctgcaattgtagcgctatt

SEQ ID NO: 138078 - DNA, 25 bp, Probe sequence
aactattccaacactagctgtactt

SEQ ID NO: 138079 - DNA, 25 bp, Probe sequence
caagttatgtaggtgcgggtggatt

SEQ ID NO: 138080 - DNA, 25 bp, Probe sequence
cattattacttgccatcattgttgc

SEQ ID NO: 138081 - DNA, 25 bp, Probe sequence
gccatcattgttgcagtacctatag

SEQ ID NO: 138082 - DNA, 25 bp, Probe sequence
gctgtacttgctattatgataccga

SEQ ID NO: 138083 - DNA, 25 bp, Probe sequence
gaacatggtggacagttgatgtcga

SEQ ID NO: 138084 - DNA, 25 bp, Probe sequence
gagttcctacatgaacatggtggac

SEQ ID NO: 138085 - DNA, 25 bp, Probe sequence
gatccactgatgattgtaactgcaa

SEQ ID NO: 138086 - DNA, 25 bp, Probe sequence
gattgtaactgcaacggtactcgtt

SEQ ID NO: 138087 - DNA, 25 bp, Probe sequence
gttgggctacacttgcaagttatgt

SEQ ID NO: 138088 - DNA, 25 bp, Probe sequence
gtatgggaatgacacaatttcaatt

SEQ ID NO: 138089 - DNA, 25 bp, Probe sequence
gtagcgctatttatttatgtattat

SEQ ID NO: 138090 - DNA, 25 bp, Probe sequence
gtacctataggcattttattatcaa

SEQ ID NO: 138091 - DNA, 25 bp, Probe sequence
ggtgttgatgccttattagctttag

SEQ ID NO: 138092 - DNA, 25 bp, Probe sequence
ggtgatttcattttcaatggtttaa

SEQ ID NO: 138093 - DNA, 25 bp, Probe sequence
ggtactcgttactgcactagcatta

SEQ ID NO: 138094 - DNA, 25 bp, Probe sequence
ggtgcgggtggattaggtgatttca

SEQ ID NO: 138095 - DNA, 25 bp, Probe sequence
ggtttaaatttatatgatccactga

SEQ ID NO: 138096 - DNA, 25 bp, Probe sequence
ggcaggtgtcttacaaactattcca

SEQ ID NO: 138097 - DNA, 25 bp, Probe sequence
tgatgccttattagctttagttgaa

SEQ ID NO: 138098 - DNA, 25 bp, Probe sequence
tgaaggatgttgaattgccgttagc

SEQ ID NO: 138099 - DNA, 25 bp, Probe sequence
tccaacactagctgtacttgctatt

SEQ ID NO: 138100 - DNA, 25 bp, Probe sequence
tcccaaaggcttaaaagtatctgga

SEQ ID NO: 138101 - DNA, 25 bp, Probe sequence
tctgtgtatgtaattagttgggcta

SEQ ID NO: 138102 - DNA, 25 bp, Probe sequence
tatgataccgatttttggtgttggt

SEQ ID NO: 138103 - DNA, 25 bp, Probe sequence
tatatttctatagtggcattattac

SEQ ID NO: 138104 - DNA, 25 bp, Probe sequence
ttggtgttggtaaaacgcctgcaat

SEQ ID NO: 138105 - DNA, 25 bp, Probe sequence
atagactgattcaagaccgtcccaa

SEQ ID NO: 138106 - DNA, 25 bp, Probe sequence
agtaggactgattacgcgtgccaat

SEQ ID NO: 138107 - DNA, 25 bp, Probe sequence
agcaacacactactaatgtcaaagt

SEQ ID NO: 138108 - DNA, 25 bp, Probe sequence
aaacttgtggatttaccggagtcat

SEQ ID NO: 138109 - DNA, 25 bp, Probe sequence
aagactgtagaaggtgtaatgatta

SEQ ID NO: 138110 - DNA, 25 bp, Probe sequence
cagcagaactatcaggtgggcaaca

SEQ ID NO: 138111 - DNA, 25 bp, Probe sequence
cgaaaattaggcaagacgtttatct

SEQ ID NO: 138112 - DNA, 25 bp, Probe sequence
gcatttattggaaccagtggaagtg

SEQ ID NO: 138113 - DNA, 25 bp, Probe sequence
gcattggatcctattacgagagata

SEQ ID NO: 138114 - DNA, 25 bp, Probe sequence
gcatgagcaacacactactaatgtc

SEQ ID NO: 138115 - DNA, 25 bp, Probe sequence
gcaacaacatatttataccgttcaa

SEQ ID NO: 138116 - DNA, 25 bp, Probe sequence
gacaatattttaagacatcccgcaa

SEQ ID NO: 138117 - DNA, 25 bp, Probe sequence
gacacgatttggggcgatagtgagg

SEQ ID NO: 138118 - DNA, 25 bp, Probe sequence
gacatcccgcaaatgattttgtacg

SEQ ID NO: 138119 - DNA, 25 bp, Probe sequence
gacgtttatctttgtaacacatgat

SEQ ID NO: 138120 - DNA, 25 bp, Probe sequence
gaccgtcccaatgacaagactgtag

SEQ ID NO: 138121 - DNA, 25 bp, Probe sequence
gagcgttatccagcagaactatcag

SEQ ID NO: 138122 - DNA, 25 bp, Probe sequence
gagcacttgcggccgaacaagatat

SEQ ID NO: 138123 - DNA, 25 bp, Probe sequence
gagagatacgttacaagatttagtt

SEQ ID NO: 138124 - DNA, 25 bp, Probe sequence
gagtcatttttagagcgttatccag

SEQ ID NO: 138125 - DNA, 25 bp, Probe sequence
gatttaccggagtcatttttagagc

SEQ ID NO: 138126 - DNA, 25 bp, Probe sequence
gattttgtacgtgattttataggac

SEQ ID NO: 138127 - DNA, 25 bp, Probe sequence
gattcaagaccgtcccaatgacaag

SEQ ID NO: 138128 - DNA, 25 bp, Probe sequence
gttcggagtatgaatcctgtcgaat

SEQ ID NO: 138129 - DNA, 25 bp, Probe sequence
gtatatgacacgatttggggcgata

SEQ ID NO: 138130 - DNA, 25 bp, Probe sequence
gtagatgacatctctttagatattc

SEQ ID NO: 138131 - DNA, 25 bp, Probe sequence
gtaagagcacttgcggccgaacaag

SEQ ID NO: 138132 - DNA, 25 bp, Probe sequence
gtcagaaggtaaggtggtgcaattt

SEQ ID NO: 138133 - DNA, 25 bp, Probe sequence
ggtacccaaattgttgaaatggact

SEQ ID NO: 138134 - DNA, 25 bp, Probe sequence
ggtgggcaacaacaacgtatcggtg

SEQ ID NO: 138135 - DNA, 25 bp, Probe sequence
ggatgaagcgattaaattagcagac

SEQ ID NO: 138136 - DNA, 25 bp, Probe sequence
tgattacgcgtgccaatgttgttga

SEQ ID NO: 138137 - DNA, 25 bp, Probe sequence
tctggggaatttatcgcatttattg

SEQ ID NO: 138138 - DNA, 25 bp, Probe sequence
taaaccgtatgattgaagcgacaga

SEQ ID NO: 138139 - DNA, 25 bp, Probe sequence
atttcacattttcgacacttttttg

SEQ ID NO: 138140 - DNA, 25 bp, Probe sequence
atatttcacattttcgacacttttt

SEQ ID NO: 138141 - DNA, 25 bp, Probe sequence
ataatatttcacattttcgacactt

SEQ ID NO: 138142 - DNA, 25 bp, Probe sequence
acattttcgacacttttttgctata

SEQ ID NO: 138143 - DNA, 25 bp, Probe sequence
acaatggatgcgtgtgcattattac

SEQ ID NO: 138144 - DNA, 25 bp, Probe sequence
aatggatgcgtgtgcattattacaa

SEQ ID NO: 138145 - DNA, 25 bp, Probe sequence
aataatatttcacattttcgacact

SEQ ID NO: 138146 - DNA, 25 bp, Probe sequence
aatatttcacattttcgacactttt

SEQ ID NO: 138147 - DNA, 25 bp, Probe sequence
cacattttcgacacttttttgctat

SEQ ID NO: 138148 - DNA, 25 bp, Probe sequence
cattttcgacacttttttgctataa

SEQ ID NO: 138149 - DNA, 25 bp, Probe sequence
cggttgtccgtctgtaacaatggat

SEQ ID NO: 138150 - DNA, 25 bp, Probe sequence
gcggttgtccgtctgtaacaatgga

SEQ ID NO: 138151 - DNA, 25 bp, Probe sequence
ccgtctgtaacaatggatgcgtgtg

SEQ ID NO: 138152 - DNA, 25 bp, Probe sequence
gcgtgtgcattattacaaaaattcg

SEQ ID NO: 138153 - DNA, 25 bp, Probe sequence
gcattattacaaaaattcgactttt

SEQ ID NO: 138154 - DNA, 25 bp, Probe sequence
gatgcgtgtgcattattacaaaaat

SEQ ID NO: 138155 - DNA, 25 bp, Probe sequence
gttgtccgtctgtaacaatggatgc

SEQ ID NO: 138156 - DNA, 25 bp, Probe sequence
gtaacaatggatgcgtgtgcattat

SEQ ID NO: 138157 - DNA, 25 bp, Probe sequence
gtaataatatttcacattttcgaca

SEQ ID NO: 138158 - DNA, 25 bp, Probe sequence
gtctgtaacaatggatgcgtgtgca

SEQ ID NO: 138159 - DNA, 25 bp, Probe sequence
gtccgtctgtaacaatggatgcgtg

SEQ ID NO: 138160 - DNA, 25 bp, Probe sequence
gtgcattattacaaaaattcgactt

SEQ ID NO: 138161 - DNA, 25 bp, Probe sequence
ggttgtccgtctgtaacaatggatg

SEQ ID NO: 138162 - DNA, 25 bp, Probe sequence
tgtccgtctgtaacaatggatgcgt

SEQ ID NO: 138163 - DNA, 25 bp, Probe sequence
tgctataaaacaaccaattgagcga

SEQ ID NO: 138164 - DNA, 25 bp, Probe sequence
tcgacacttttttgctataaaacaa

SEQ ID NO: 138165 - DNA, 25 bp, Probe sequence
tctgtaacaatggatgcgtgtgcat

SEQ ID NO: 138166 - DNA, 25 bp, Probe sequence
tcacattttcgacacttttttgcta

SEQ ID NO: 138167 - DNA, 25 bp, Probe sequence
taatatttcacattttcgacacttt

SEQ ID NO: 138168 - DNA, 25 bp, Probe sequence
tatttcacattttcgacactttttt

SEQ ID NO: 138169 - DNA, 25 bp, Probe sequence
tttcacattttcgacacttttttgc

SEQ ID NO: 138170 - DNA, 25 bp, Probe sequence
ttcacattttcgacacttttttgct

SEQ ID NO: 138171 - DNA, 25 bp, Probe sequence
ttcgacacttttttgctataaaaca

SEQ ID NO: 138172 - DNA, 25 bp, Probe sequence
ttcgacttttgtaataatatttcac

SEQ ID NO: 138173 - DNA, 25 bp, Probe sequence
attggacaagctaaacgcagtgaaa

SEQ ID NO: 138174 - DNA, 25 bp, Probe sequence
atttcataaaggtgccattttggag

SEQ ID NO: 138175 - DNA, 25 bp, Probe sequence
atatttgagagcgttaatctttaat

SEQ ID NO: 138176 - DNA, 25 bp, Probe sequence
atatcatacactcattcaacagact

SEQ ID NO: 138177 - DNA, 25 bp, Probe sequence
atcatacactcattcaacagactga

SEQ ID NO: 138178 - DNA, 25 bp, Probe sequence
atccttgttacacgttgaataataa

SEQ ID NO: 138179 - DNA, 25 bp, Probe sequence
atgtagtacttatccatggcttcaa

SEQ ID NO: 138180 - DNA, 25 bp, Probe sequence
atggcttcaaaaattatgttgcact

SEQ ID NO: 138181 - DNA, 25 bp, Probe sequence
agctaagttcgaagaaatgccacag

SEQ ID NO: 138182 - DNA, 25 bp, Probe sequence
aaattatgttgcactattatttcat

SEQ ID NO: 138183 - DNA, 25 bp, Probe sequence
aaatgtagtacttatccatggcttc

SEQ ID NO: 138184 - DNA, 25 bp, Probe sequence
aaggtgcaagcagctcgtcagttac

SEQ ID NO: 138185 - DNA, 25 bp, Probe sequence
aatggatgcatccttgttacacgtt

SEQ ID NO: 138186 - DNA, 25 bp, Probe sequence
gcgtgttgaaaagtatattaaccaa

SEQ ID NO: 138187 - DNA, 25 bp, Probe sequence
gcagctcgtcagttacgatttgaaa

SEQ ID NO: 138188 - DNA, 25 bp, Probe sequence
gcaagcagctcgtcagttacgattt

SEQ ID NO: 138189 - DNA, 25 bp, Probe sequence
gaaggtaaagggatgcatgataagt

SEQ ID NO: 138190 - DNA, 25 bp, Probe sequence
gaagcgtataaatggatgcatcctt

SEQ ID NO: 138191 - DNA, 25 bp, Probe sequence
gaaaaggtgcaagcagctcgtcagt

SEQ ID NO: 138192 - DNA, 25 bp, Probe sequence
gaaacagaattagaggaagcgtata

SEQ ID NO: 138193 - DNA, 25 bp, Probe sequence
gactgaaaaggtgcaagcagctcgt

SEQ ID NO: 138194 - DNA, 25 bp, Probe sequence
gagagtcaatggcaagaagaatata

SEQ ID NO: 138195 - DNA, 25 bp, Probe sequence
gatgcatccttgttacacgttgaat

SEQ ID NO: 138196 - DNA, 25 bp, Probe sequence
gataaatatcatacactcattcaac

SEQ ID NO: 138197 - DNA, 25 bp, Probe sequence
gttgcactattatttcataaaggtg

SEQ ID NO: 138198 - DNA, 25 bp, Probe sequence
gttattcctaaagagttagaagcta

SEQ ID NO: 138199 - DNA, 25 bp, Probe sequence
gtagtacttatccatggcttcaaaa

SEQ ID NO: 138200 - DNA, 25 bp, Probe sequence
gtacttatccatggcttcaaaaatt

SEQ ID NO: 138201 - DNA, 25 bp, Probe sequence
gtgcaagcagctcgtcagttacgat

SEQ ID NO: 138202 - DNA, 25 bp, Probe sequence
ggtgccattttggaggataaatatc

SEQ ID NO: 138203 - DNA, 25 bp, Probe sequence
ggacaagctaaacgcagtgaaacaa

SEQ ID NO: 138204 - DNA, 25 bp, Probe sequence
tggatgcatccttgttacacgttga

SEQ ID NO: 138205 - DNA, 25 bp, Probe sequence
tgcatccttgttacacgttgaataa

SEQ ID NO: 138206 - DNA, 25 bp, Probe sequence
tacactcattcaacagactgaaaag

SEQ ID NO: 138207 - DNA, 25 bp, Probe sequence
atacaacgaggccctgtgaatcatg

SEQ ID NO: 138208 - DNA, 25 bp, Probe sequence
atccacttattttatctaatggtca

SEQ ID NO: 138209 - DNA, 25 bp, Probe sequence
atggtcatgatatgtcattcgtttc

SEQ ID NO: 138210 - DNA, 25 bp, Probe sequence
aggcctgtattattatggacattac

SEQ ID NO: 138211 - DNA, 25 bp, Probe sequence
agcagcagcactaattatcgtaaaa

SEQ ID NO: 138212 - DNA, 25 bp, Probe sequence
acctggttcaggtctattgttagca

SEQ ID NO: 138213 - DNA, 25 bp, Probe sequence
aaccgtttttcatcaaggcctgtat

SEQ ID NO: 138214 - DNA, 25 bp, Probe sequence
catttgcgatatgtggacctattct

SEQ ID NO: 138215 - DNA, 25 bp, Probe sequence
gctgtagcgccaaatttttcaatat

SEQ ID NO: 138216 - DNA, 25 bp, Probe sequence
gcagtgcaaagcggtgtgattcaac

SEQ ID NO: 138217 - DNA, 25 bp, Probe sequence
gaattatctcatctgcagcagcagc

SEQ ID NO: 138218 - DNA, 25 bp, Probe sequence
gaatcgctggcgttattggaacatc

SEQ ID NO: 138219 - DNA, 25 bp, Probe sequence
gaacatgtctagtttaaacgctggt

SEQ ID NO: 138220 - DNA, 25 bp, Probe sequence
gacaatgtacgctttaacatttgcg

SEQ ID NO: 138221 - DNA, 25 bp, Probe sequence
gacacatgtttctgttcaagctatc

SEQ ID NO: 138222 - DNA, 25 bp, Probe sequence
gacattcgtctttataaatccactt

SEQ ID NO: 138223 - DNA, 25 bp, Probe sequence
gattgcaaactcagtgacattcgtc

SEQ ID NO: 138224 - DNA, 25 bp, Probe sequence
gagtcaggacttacatgtatcagaa

SEQ ID NO: 138225 - DNA, 25 bp, Probe sequence
gttggcgctatacatttctattctt

SEQ ID NO: 138226 - DNA, 25 bp, Probe sequence
gttgaaggcgacacaagccaagtaa

SEQ ID NO: 138227 - DNA, 25 bp, Probe sequence
gttatcggcgatttagtaggttggc

SEQ ID NO: 138228 - DNA, 25 bp, Probe sequence
gtaccaattggaacggttatcggcg

SEQ ID NO: 138229 - DNA, 25 bp, Probe sequence
gtaagcgttggttaatgatttctgt

SEQ ID NO: 138230 - DNA, 25 bp, Probe sequence
gtcaatcatgcgactatttacattc

SEQ ID NO: 138231 - DNA, 25 bp, Probe sequence
gtcattcgtttcattagcacttcta

SEQ ID NO: 138232 - DNA, 25 bp, Probe sequence
ggtaatggcattattgctgtagcgc

SEQ ID NO: 138233 - DNA, 25 bp, Probe sequence
ggagtactaatccagcagtgcaaag

SEQ ID NO: 138234 - DNA, 25 bp, Probe sequence
tggacttgtctatacagggtttagt

SEQ ID NO: 138235 - DNA, 25 bp, Probe sequence
tgatttctgtttctatttttatcgt

SEQ ID NO: 138236 - DNA, 25 bp, Probe sequence
taggattaatcgttgttttcacatt

SEQ ID NO: 138237 - DNA, 25 bp, Probe sequence
tatcagaagctgtcgttggtcaatt

SEQ ID NO: 138238 - DNA, 25 bp, Probe sequence
tattggaggcttggtcatgacacat

SEQ ID NO: 138239 - DNA, 25 bp, Probe sequence
ttacagcgatgttatcagcacctaa

SEQ ID NO: 138240 - DNA, 25 bp, Probe sequence
ttgtgagtattattgttggcttctt

SEQ ID NO: 138241 - DNA, 25 bp, Probe sequence
atatgggcttgtgtcgattcctggt

SEQ ID NO: 138242 - DNA, 25 bp, Probe sequence
atctaaattatcacttgcagctaca

SEQ ID NO: 138243 - DNA, 25 bp, Probe sequence
agtcgtgtttattcatacaactgcg

SEQ ID NO: 138244 - DNA, 25 bp, Probe sequence
actgcgaccattatgtctgctttga

SEQ ID NO: 138245 - DNA, 25 bp, Probe sequence
acaactgcgaccattatgtctgctt

SEQ ID NO: 138246 - DNA, 25 bp, Probe sequence
aataatggcttgattgcaattaatt

SEQ ID NO: 138247 - DNA, 25 bp, Probe sequence
aatttcaattgttagtcgtgtttat

SEQ ID NO: 138248 - DNA, 25 bp, Probe sequence
aatttagatcgtgcattcgtacaag

SEQ ID NO: 138249 - DNA, 25 bp, Probe sequence
gcgtaccacctttacaagcgattaa

SEQ ID NO: 138250 - DNA, 25 bp, Probe sequence
gctatggtcaatttttcaatgcaag

SEQ ID NO: 138251 - DNA, 25 bp, Probe sequence
gcttgtgtcgattcctggtatgatg

SEQ ID NO: 138252 - DNA, 25 bp, Probe sequence
gcaagacatcaattagtagcacgaa

SEQ ID NO: 138253 - DNA, 25 bp, Probe sequence
gaatctaaattatcacttgcagcta

SEQ ID NO: 138254 - DNA, 25 bp, Probe sequence
gtaccacctttacaagcgattaaat

SEQ ID NO: 138255 - DNA, 25 bp, Probe sequence
gacaggcttaattattggtggcgta

SEQ ID NO: 138256 - DNA, 25 bp, Probe sequence
gaccattatgtctgctttgattgcg

SEQ ID NO: 138257 - DNA, 25 bp, Probe sequence
gatggtactaatattgaatctaaat

SEQ ID NO: 138258 - DNA, 25 bp, Probe sequence
gattcggttaaaacatatgggcttg

SEQ ID NO: 138259 - DNA, 25 bp, Probe sequence
gatcgtgcattcgtacaagatggta

SEQ ID NO: 138260 - DNA, 25 bp, Probe sequence
gattcctggtatgatgacaggctta

SEQ ID NO: 138261 - DNA, 25 bp, Probe sequence
gattgcgacatatttaagctatggt

SEQ ID NO: 138262 - DNA, 25 bp, Probe sequence
gtattcgtttagctatagtgccaac

SEQ ID NO: 138263 - DNA, 25 bp, Probe sequence
gtgcattcgtacaagatggtactaa

SEQ ID NO: 138264 - DNA, 25 bp, Probe sequence
gtgtttattcatacaactgcgacca

SEQ ID NO: 138265 - DNA, 25 bp, Probe sequence
gtgtcgattcctggtatgatgacag

SEQ ID NO: 138266 - DNA, 25 bp, Probe sequence
ggtcaatttttcaatgcaagacatc

SEQ ID NO: 138267 - DNA, 25 bp, Probe sequence
tggcttctaaaggtgcaatacgtga

SEQ ID NO: 138268 - DNA, 25 bp, Probe sequence
tggtggcgtaccacctttacaagcg

SEQ ID NO: 138269 - DNA, 25 bp, Probe sequence
tgattgcaattaatttagcttacca

SEQ ID NO: 138270 - DNA, 25 bp, Probe sequence
tctgctttgattgcgacatatttaa

SEQ ID NO: 138271 - DNA, 25 bp, Probe sequence
taagctatggtcaatttttcaatgc

SEQ ID NO: 138272 - DNA, 25 bp, Probe sequence
tacgtgaaagtattcgtttagctat

SEQ ID NO: 138273 - DNA, 25 bp, Probe sequence
ttattggtggcgtaccacctttaca

SEQ ID NO: 138274 - DNA, 25 bp, Probe sequence
tttattcatacaactgcgaccatta

SEQ ID NO: 138275 - DNA, 25 bp, Probe sequence
attgcgtcaacgaatcagttatttg

SEQ ID NO: 138276 - DNA, 25 bp, Probe sequence
attagatgaatcgaccagtgcatta

SEQ ID NO: 138277 - DNA, 25 bp, Probe sequence
attataggtccatcaggtagtggta

SEQ ID NO: 138278 - DNA, 25 bp, Probe sequence
atacaccggatattcttttattaga

SEQ ID NO: 138279 - DNA, 25 bp, Probe sequence
ataaaggcgagagtattgccattat

SEQ ID NO: 138280 - DNA, 25 bp, Probe sequence
atgtcgggtggtgagcggcaaagaa

SEQ ID NO: 138281 - DNA, 25 bp, Probe sequence
acgaatcagttatttgatgcagcaa

SEQ ID NO: 138282 - DNA, 25 bp, Probe sequence
acatgatattcccatcacttgcacg

SEQ ID NO: 138283 - DNA, 25 bp, Probe sequence
aaatatgtcgggtggtgagcggcaa

SEQ ID NO: 138284 - DNA, 25 bp, Probe sequence
aaaggtaaaccctataatgattatg

SEQ ID NO: 138285 - DNA, 25 bp, Probe sequence
aaccctataatgattatgacccgga

SEQ ID NO: 138286 - DNA, 25 bp, Probe sequence
aagaattgctatagcgcgccaactg

SEQ ID NO: 138287 - DNA, 25 bp, Probe sequence
aagatgtcggtttgggacattatca

SEQ ID NO: 138288 - DNA, 25 bp, Probe sequence
gcgccaactgatgtatacaccggat

SEQ ID NO: 138289 - DNA, 25 bp, Probe sequence
gcgagagtattgccattataggtcc

SEQ ID NO: 138290 - DNA, 25 bp, Probe sequence
gcgagcgatagaatcatactagatc

SEQ ID NO: 138291 - DNA, 25 bp, Probe sequence
gcaaagtgacttgtttggtgaaacg

SEQ ID NO: 138292 - DNA, 25 bp, Probe sequence
gaatcatactagatcatatcagtct

SEQ ID NO: 138293 - DNA, 25 bp, Probe sequence
gaagataacatgatattcccatcac

SEQ ID NO: 138294 - DNA, 25 bp, Probe sequence
gacccggaagaattgcgtcaacgaa

SEQ ID NO: 138295 - DNA, 25 bp, Probe sequence
gatgtatacaccggatattctttta

SEQ ID NO: 138296 - DNA, 25 bp, Probe sequence
gatgcagcaaagtgacttgtttggt

SEQ ID NO: 138297 - DNA, 25 bp, Probe sequence
gatttagtgtataaagcgagcgata

SEQ ID NO: 138298 - DNA, 25 bp, Probe sequence
gggacattatcaattaagttcggaa

SEQ ID NO: 138299 - DNA, 25 bp, Probe sequence
gggtggtgagcggcaaagaattgct

SEQ ID NO: 138300 - DNA, 25 bp, Probe sequence
ggaagtggaaaatatgtcgggtggt

SEQ ID NO: 138301 - DNA, 25 bp, Probe sequence
tgattatgacccggaagaattgcgt

SEQ ID NO: 138302 - DNA, 25 bp, Probe sequence
tgatattcccatcacttgcacgtaa

SEQ ID NO: 138303 - DNA, 25 bp, Probe sequence
tgaatcgaccagtgcattagacgtt

SEQ ID NO: 138304 - DNA, 25 bp, Probe sequence
tcccatcacttgcacgtaatgataa

SEQ ID NO: 138305 - DNA, 25 bp, Probe sequence
tagcgcgccaactgatgtatacacc

SEQ ID NO: 138306 - DNA, 25 bp, Probe sequence
tagtccaactagtggagaactttat

SEQ ID NO: 138307 - DNA, 25 bp, Probe sequence
tattcccatcacttgcacgtaatga

SEQ ID NO: 138308 - DNA, 25 bp, Probe sequence
ttgctatagcgcgccaactgatgta

SEQ ID NO: 138309 - DNA, 25 bp, Probe sequence
attggtattgccgttaattgtatta

SEQ ID NO: 138310 - DNA, 25 bp, Probe sequence
attgtaacgcaatatggtactcaca

SEQ ID NO: 138311 - DNA, 25 bp, Probe sequence
attcacggttaaagatcatggtttc

SEQ ID NO: 138312 - DNA, 25 bp, Probe sequence
atggtactcacattgatgcaccaat

SEQ ID NO: 138313 - DNA, 25 bp, Probe sequence
agatcaattaccaactcgtggcgcc

SEQ ID NO: 138314 - DNA, 25 bp, Probe sequence
aaatggtgatttagttggcgaacgt

SEQ ID NO: 138315 - DNA, 25 bp, Probe sequence
aaagatgcacctgggttccctgtta

SEQ ID NO: 138316 - DNA, 25 bp, Probe sequence
aaacgttatttagaagacattgatt

SEQ ID NO: 138317 - DNA, 25 bp, Probe sequence
aacacgtgcgcatatagaagcatgg

SEQ ID NO: 138318 - DNA, 25 bp, Probe sequence
aattgtattagacttttcaacagaa

SEQ ID NO: 138319 - DNA, 25 bp, Probe sequence
caactcgtggcgccatcatttacgc

SEQ ID NO: 138320 - DNA, 25 bp, Probe sequence
gcgaacggacaacaacatgcaccgg

SEQ ID NO: 138321 - DNA, 25 bp, Probe sequence
gcaacttgggttgatttaacgcata

SEQ ID NO: 138322 - DNA, 25 bp, Probe sequence
gaagtagcgaacaacaatgatttca

SEQ ID NO: 138323 - DNA, 25 bp, Probe sequence
gaacctggcacttttgttgcacttc

SEQ ID NO: 138324 - DNA, 25 bp, Probe sequence
gaacgttatattcttggtcaggata

SEQ ID NO: 138325 - DNA, 25 bp, Probe sequence
gaaataccacgttttagtgagtttg

SEQ ID NO: 138326 - DNA, 25 bp, Probe sequence
gacacaatatcctttatggcaacaa

SEQ ID NO: 138327 - DNA, 25 bp, Probe sequence
gagcatggtactattgaacctggca

SEQ ID NO: 138328 - DNA, 25 bp, Probe sequence
gttgcacttcgtaccgattggtcaa

SEQ ID NO: 138329 - DNA, 25 bp, Probe sequence
gatgcatctgtggacgttgtaaaaa

SEQ ID NO: 138330 - DNA, 25 bp, Probe sequence
gatcatggtttctatgtgcaacgtt

SEQ ID NO: 138331 - DNA, 25 bp, Probe sequence
gataccgatgcatctgtggacgttg

SEQ ID NO: 138332 - DNA, 25 bp, Probe sequence
gttggcgaacgttatattcttggtc

SEQ ID NO: 138333 - DNA, 25 bp, Probe sequence
gattggtcaaaacgttggcctaata

SEQ ID NO: 138334 - DNA, 25 bp, Probe sequence
gtcaggataaataccaagtcgagtt

SEQ ID NO: 138335 - DNA, 25 bp, Probe sequence
gtgttgaagctgttggtcatgaaac

SEQ ID NO: 138336 - DNA, 25 bp, Probe sequence
ggtcatgaaacattcgataccgatg

SEQ ID NO: 138337 - DNA, 25 bp, Probe sequence
ggttccctgttagagcatttgcaat

SEQ ID NO: 138338 - DNA, 25 bp, Probe sequence
ggtttctatgtgcaacgttggaata

SEQ ID NO: 138339 - DNA, 25 bp, Probe sequence
ggcgccatcatttacgctatcagcc

SEQ ID NO: 138340 - DNA, 25 bp, Probe sequence
tgcacctgggttccctgttagagca

SEQ ID NO: 138341 - DNA, 25 bp, Probe sequence
tcagccctaaaccaaaagatgcacc

SEQ ID NO: 138342 - DNA, 25 bp, Probe sequence
tacgctatcagccctaaaccaaaag

SEQ ID NO: 138343 - DNA, 25 bp, Probe sequence
gtaaactaggcggtggtccagttgt

SEQ ID NO: 138344 - DNA, 25 bp, Probe sequence
attaacttatacagtggtgccacag

SEQ ID NO: 138345 - DNA, 25 bp, Probe sequence
attatgatggatgctacaagtattg

SEQ ID NO: 138346 - DNA, 25 bp, Probe sequence
ataacatcgaagtacaatgggatac

SEQ ID NO: 138347 - DNA, 25 bp, Probe sequence
aatgggatacgacaccaggtggagg

SEQ ID NO: 138348 - DNA, 25 bp, Probe sequence
agagcctgtcagtgatcaaattatt

SEQ ID NO: 138349 - DNA, 25 bp, Probe sequence
acgccatatagtgaatttgaagtgc

SEQ ID NO: 138350 - DNA, 25 bp, Probe sequence
acagtggtgccacagtgcaagaaga

SEQ ID NO: 138351 - DNA, 25 bp, Probe sequence
acagatgtaaacggcattgctggtt

SEQ ID NO: 138352 - DNA, 25 bp, Probe sequence
acagatgcgggaagtattcatgtcg

SEQ ID NO: 138353 - DNA, 25 bp, Probe sequence
aaagcatttgataatcgctatggct

SEQ ID NO: 138354 - DNA, 25 bp, Probe sequence
aaaatgctgagaatggtcaatactc

SEQ ID NO: 138355 - DNA, 25 bp, Probe sequence
aatgcgtaactatatagagcctgtc

SEQ ID NO: 138356 - DNA, 25 bp, Probe sequence
catgtcttaacgcctgaagaacgta

SEQ ID NO: 138357 - DNA, 25 bp, Probe sequence
ccaggtggaggtacagatgcgggaa

SEQ ID NO: 138358 - DNA, 25 bp, Probe sequence
gcgggaagtattcatgtcgcaaatg

SEQ ID NO: 138359 - DNA, 25 bp, Probe sequence
gaatcagtcagtcaaattacttaaa

SEQ ID NO: 138360 - DNA, 25 bp, Probe sequence
gaagaagctgaagaagctggcgttg

SEQ ID NO: 138361 - DNA, 25 bp, Probe sequence
gaagctggcgttgaagtaggcaata

SEQ ID NO: 138362 - DNA, 25 bp, Probe sequence
gaggtatcatcggttctaaaccgcc

SEQ ID NO: 138363 - DNA, 25 bp, Probe sequence
gataaatatttaactgcgaaagcat

SEQ ID NO: 138364 - DNA, 25 bp, Probe sequence
gatagtaaactaggcggtggtccag

SEQ ID NO: 138365 - DNA, 25 bp, Probe sequence
gtttatagatattggtgttagtagc

SEQ ID NO: 138366 - DNA, 25 bp, Probe sequence
gtaaacggcattgctggttatgaaa

SEQ ID NO: 138367 - DNA, 25 bp, Probe sequence
gtcaatactcaattatgatttctgg

SEQ ID NO: 138368 - DNA, 25 bp, Probe sequence
gtggtgcgaaagtggcagcgaatac

SEQ ID NO: 138369 - DNA, 25 bp, Probe sequence
ggttttatttcatttacgccagttg

SEQ ID NO: 138370 - DNA, 25 bp, Probe sequence
tggtggatggtggaatcaagtcatg

SEQ ID NO: 138371 - DNA, 25 bp, Probe sequence
tccgtcttgttactgaaattgtccg

SEQ ID NO: 138372 - DNA, 25 bp, Probe sequence
taatcgctatggctgtgcattagct

SEQ ID NO: 138373 - DNA, 25 bp, Probe sequence
tatggatgaagttggttttatggta

SEQ ID NO: 138374 - DNA, 25 bp, Probe sequence
tatttcatttacgccagttggtgga

SEQ ID NO: 138375 - DNA, 25 bp, Probe sequence
ttgttactgaaattgtccgttcatt

SEQ ID NO: 138376 - DNA, 25 bp, Probe sequence
ttacgccagttggtggatggtggaa

SEQ ID NO: 138377 - DNA, 25 bp, Probe sequence
attaaccatcagcacagggtcgtct

SEQ ID NO: 138378 - DNA, 25 bp, Probe sequence
attaatactatcggcatggtcacat

SEQ ID NO: 138379 - DNA, 25 bp, Probe sequence
ataacacaatcttttgaaaaattag

SEQ ID NO: 138380 - DNA, 25 bp, Probe sequence
atcagcacagggtcgtctataccgt

SEQ ID NO: 138381 - DNA, 25 bp, Probe sequence
atcggcatggtcacattatgattaa

SEQ ID NO: 138382 - DNA, 25 bp, Probe sequence
atgagcaattacacggttaagatta

SEQ ID NO: 138383 - DNA, 25 bp, Probe sequence
agcacagggtcgtctataccgtaga

SEQ ID NO: 138384 - DNA, 25 bp, Probe sequence
cacagggtcgtctataccgtagatg

SEQ ID NO: 138385 - DNA, 25 bp, Probe sequence
aaaaattcagcgaaatcagatttaa

SEQ ID NO: 138386 - DNA, 25 bp, Probe sequence
aaccatcagcacagggtcgtctata

SEQ ID NO: 138387 - DNA, 25 bp, Probe sequence
aatactatcggcatggtcacattat

SEQ ID NO: 138388 - DNA, 25 bp, Probe sequence
caagaagaattaaccatcagcacag

SEQ ID NO: 138389 - DNA, 25 bp, Probe sequence
cagcacagggtcgtctataccgtag

SEQ ID NO: 138390 - DNA, 25 bp, Probe sequence
ccatcagcacagggtcgtctatacc

SEQ ID NO: 138391 - DNA, 25 bp, Probe sequence
cagggtcgtctataccgtagatgat

SEQ ID NO: 138392 - DNA, 25 bp, Probe sequence
catcagcacagggtcgtctataccg

SEQ ID NO: 138393 - DNA, 25 bp, Probe sequence
ctatcggcatggtcacattatgatt

SEQ ID NO: 138394 - DNA, 25 bp, Probe sequence
gcacagggtcgtctataccgtagat

SEQ ID NO: 138395 - DNA, 25 bp, Probe sequence
gaattaaccatcagcacagggtcgt

SEQ ID NO: 138396 - DNA, 25 bp, Probe sequence
gaagtcatttttagaaattgttgag

SEQ ID NO: 138397 - DNA, 25 bp, Probe sequence
gagactttaaaaaatgatccgtata

SEQ ID NO: 138398 - DNA, 25 bp, Probe sequence
gagcaattacacggttaagattaaa

SEQ ID NO: 138399 - DNA, 25 bp, Probe sequence
gatccgtataaaataacacaatctt

SEQ ID NO: 138400 - DNA, 25 bp, Probe sequence
gtattaatactatcggcatggtcac

SEQ ID NO: 138401 - DNA, 25 bp, Probe sequence
gtcgtctataccgtagatgatcgaa

SEQ ID NO: 138402 - DNA, 25 bp, Probe sequence
gggtcgtctataccgtagatgatcg

SEQ ID NO: 138403 - DNA, 25 bp, Probe sequence
tctataccgtagatgatcgaaataa

SEQ ID NO: 138404 - DNA, 25 bp, Probe sequence
tcagcacagggtcgtctataccgta

SEQ ID NO: 138405 - DNA, 25 bp, Probe sequence
taaccatcagcacagggtcgtctat

SEQ ID NO: 138406 - DNA, 25 bp, Probe sequence
tactatcggcatggtcacattatga

SEQ ID NO: 138407 - DNA, 25 bp, Probe sequence
tagagcctaaatatttagagcgata

SEQ ID NO: 138408 - DNA, 25 bp, Probe sequence
tatttagagcgatattcaagaagaa

SEQ ID NO: 138409 - DNA, 25 bp, Probe sequence
ttaaccatcagcacagggtcgtcta

SEQ ID NO: 138410 - DNA, 25 bp, Probe sequence
ttaatactatcggcatggtcacatt

SEQ ID NO: 138411 - DNA, 25 bp, Probe sequence
attcctacccaaaaacatacactat

SEQ ID NO: 138412 - DNA, 25 bp, Probe sequence
ataaccaccacaaatccatctaaga

SEQ ID NO: 138413 - DNA, 25 bp, Probe sequence
atcaacactttttatttatctctct

SEQ ID NO: 138414 - DNA, 25 bp, Probe sequence
atgaaaatcgcttaccaactattaa

SEQ ID NO: 138415 - DNA, 25 bp, Probe sequence
atgggttacggcattctcatgcttc

SEQ ID NO: 138416 - DNA, 25 bp, Probe sequence
actattttcagttgctatggatcga

SEQ ID NO: 138417 - DNA, 25 bp, Probe sequence
actatcatatgctattgaacgctat

SEQ ID NO: 138418 - DNA, 25 bp, Probe sequence
aaccatcaacaaaacactctattac

SEQ ID NO: 138419 - DNA, 25 bp, Probe sequence
aagacacaggtaaagctcagaacat

SEQ ID NO: 138420 - DNA, 25 bp, Probe sequence
aagagctgttcaaggactattttca

SEQ ID NO: 138421 - DNA, 25 bp, Probe sequence
aatgcacattaacttatttatccga

SEQ ID NO: 138422 - DNA, 25 bp, Probe sequence
aattgtccttgggataaccaccaca

SEQ ID NO: 138423 - DNA, 25 bp, Probe sequence
ccgatattgagcctattgatgtgca

SEQ ID NO: 138424 - DNA, 25 bp, Probe sequence
gctggctggtatccatcgaatcaga

SEQ ID NO: 138425 - DNA, 25 bp, Probe sequence
gaatcagaatccatgggttacggca

SEQ ID NO: 138426 - DNA, 25 bp, Probe sequence
gaatggaacctattattttcgtgca

SEQ ID NO: 138427 - DNA, 25 bp, Probe sequence
gaacgctatgctaagctggctggta

SEQ ID NO: 138428 - DNA, 25 bp, Probe sequence
gaagcatttctcttattttgataaa

SEQ ID NO: 138429 - DNA, 25 bp, Probe sequence
gaaattttccttccatggtataaga

SEQ ID NO: 138430 - DNA, 25 bp, Probe sequence
gacagactttgtaatgagctataac

SEQ ID NO: 138431 - DNA, 25 bp, Probe sequence
gactcaggagtactaaccatcaaca

SEQ ID NO: 138432 - DNA, 25 bp, Probe sequence
gactggaatgcgaattggtgaagct

SEQ ID NO: 138433 - DNA, 25 bp, Probe sequence
gagctataacggtattcctacccaa

SEQ ID NO: 138434 - DNA, 25 bp, Probe sequence
gggagaaaatccacttatcattaaa

SEQ ID NO: 138435 - DNA, 25 bp, Probe sequence
ggtgaagctactgccattcaatggg

SEQ ID NO: 138436 - DNA, 25 bp, Probe sequence
ggagccatttcctttaaagaagcaa

SEQ ID NO: 138437 - DNA, 25 bp, Probe sequence
ggaacgtatggacatctttatccta

SEQ ID NO: 138438 - DNA, 25 bp, Probe sequence
ggcgagcgttcgtcatattgtatta

SEQ ID NO: 138439 - DNA, 25 bp, Probe sequence
tggatcgagcaattgtccttgggat

SEQ ID NO: 138440 - DNA, 25 bp, Probe sequence
taacagtaatttcgaggtagctaac

SEQ ID NO: 138441 - DNA, 25 bp, Probe sequence
taaaatggctgtttccgatattgag

SEQ ID NO: 138442 - DNA, 25 bp, Probe sequence
tactgtagactacttgcgaaacaaa

SEQ ID NO: 138443 - DNA, 25 bp, Probe sequence
ttatctctctgtggtttttatttat

SEQ ID NO: 138444 - DNA, 25 bp, Probe sequence
ttctcatgcttccttgttaatcagt

SEQ ID NO: 138445 - DNA, 25 bp, Probe sequence
attctaggaattcggttttcaaatg

SEQ ID NO: 138446 - DNA, 25 bp, Probe sequence
attacaaaagggcatatctactatc

SEQ ID NO: 138447 - DNA, 25 bp, Probe sequence
atatctactatcaatctcgaaagct

SEQ ID NO: 138448 - DNA, 25 bp, Probe sequence
atatggaacttctttttcagcagac

SEQ ID NO: 138449 - DNA, 25 bp, Probe sequence
atctactatcaatctcgaaagctag

SEQ ID NO: 138450 - DNA, 25 bp, Probe sequence
atggaacttctttttcagcagacat

SEQ ID NO: 138451 - DNA, 25 bp, Probe sequence
agggcatatctactatcaatctcga

SEQ ID NO: 138452 - DNA, 25 bp, Probe sequence
agatagagtccctcgtgaagctgtt

SEQ ID NO: 138453 - DNA, 25 bp, Probe sequence
agctagatagagtccctcgtgaagc

SEQ ID NO: 138454 - DNA, 25 bp, Probe sequence
agtccctcgtgaagctgttgaagaa

SEQ ID NO: 138455 - DNA, 25 bp, Probe sequence
aaagctagatagagtccctcgtgaa

SEQ ID NO: 138456 - DNA, 25 bp, Probe sequence
aaaggatttagttgagctaggatat

SEQ ID NO: 138457 - DNA, 25 bp, Probe sequence
aaagggcatatctactatcaatctc

SEQ ID NO: 138458 - DNA, 25 bp, Probe sequence
aacttctttttcagcagacatcata

SEQ ID NO: 138459 - DNA, 25 bp, Probe sequence
cttctttttcagcagacatcataaa

SEQ ID NO: 138460 - DNA, 25 bp, Probe sequence
gctagatagagtccctcgtgaagct

SEQ ID NO: 138461 - DNA, 25 bp, Probe sequence
gctaggatatggaacttctttttca

SEQ ID NO: 138462 - DNA, 25 bp, Probe sequence
gcatatctactatcaatctcgaaag

SEQ ID NO: 138463 - DNA, 25 bp, Probe sequence
gaacttctttttcagcagacatcat

SEQ ID NO: 138464 - DNA, 25 bp, Probe sequence
gaaagctagatagagtccctcgtga

SEQ ID NO: 138465 - DNA, 25 bp, Probe sequence
gagctaggatatggaacttcttttt

SEQ ID NO: 138466 - DNA, 25 bp, Probe sequence
gatagagtccctcgtgaagctgttg

SEQ ID NO: 138467 - DNA, 25 bp, Probe sequence
gtccctcgtgaagctgttgaagaaa

SEQ ID NO: 138468 - DNA, 25 bp, Probe sequence
gggcatatctactatcaatctcgaa

SEQ ID NO: 138469 - DNA, 25 bp, Probe sequence
ggatatggaacttctttttcagcag

SEQ ID NO: 138470 - DNA, 25 bp, Probe sequence
ggaacttctttttcagcagacatca

SEQ ID NO: 138471 - DNA, 25 bp, Probe sequence
ggcatatctactatcaatctcgaaa

SEQ ID NO: 138472 - DNA, 25 bp, Probe sequence
tgataacggtcacaaaaaaggattt

SEQ ID NO: 138473 - DNA, 25 bp, Probe sequence
tcgaaagctagatagagtccctcgt

SEQ ID NO: 138474 - DNA, 25 bp, Probe sequence
tctaggaattcggttttcaaatgaa

SEQ ID NO: 138475 - DNA, 25 bp, Probe sequence
tagagtccctcgtgaagctgttgaa

SEQ ID NO: 138476 - DNA, 25 bp, Probe sequence
tagatagagtccctcgtgaagctgt

SEQ ID NO: 138477 - DNA, 25 bp, Probe sequence
tttcaaatgaaaacaggtctgagta

SEQ ID NO: 138478 - DNA, 25 bp, Probe sequence
tttcagcagacatcataaaaaaagc

SEQ ID NO: 138479 - DNA, 25 bp, Probe sequence
attgattggtagtgtcggatttgga

SEQ ID NO: 138480 - DNA, 25 bp, Probe sequence
attttactgccattgacactcatac

SEQ ID NO: 138481 - DNA, 25 bp, Probe sequence
atggacgaaatcactagctttttag

SEQ ID NO: 138482 - DNA, 25 bp, Probe sequence
aggtgtggcaggtttctcaagtgaa

SEQ ID NO: 138483 - DNA, 25 bp, Probe sequence
agttttgtgaaatcctttgcgaaag

SEQ ID NO: 138484 - DNA, 25 bp, Probe sequence
accgagcaagcaaagaaaagttccg

SEQ ID NO: 138485 - DNA, 25 bp, Probe sequence
acagctagaaagtgaccatacagta

SEQ ID NO: 138486 - DNA, 25 bp, Probe sequence
acaaaggcaacccaaatctcgcaat

SEQ ID NO: 138487 - DNA, 25 bp, Probe sequence
acaaggaaactatatcgtctagctt

SEQ ID NO: 138488 - DNA, 25 bp, Probe sequence
aaatctcgcaatttgagttgatatt

SEQ ID NO: 138489 - DNA, 25 bp, Probe sequence
aacagcagattgtcgataccaacca

SEQ ID NO: 138490 - DNA, 25 bp, Probe sequence
aagtaatcgtgaatgtcgctgtgaa

SEQ ID NO: 138491 - DNA, 25 bp, Probe sequence
aaggatattcctactagttctagtg

SEQ ID NO: 138492 - DNA, 25 bp, Probe sequence
aattgacccattatttgacggaaga

SEQ ID NO: 138493 - DNA, 25 bp, Probe sequence
cacctttgaggtactgttttctgtt

SEQ ID NO: 138494 - DNA, 25 bp, Probe sequence
ctctatcctaccgccacagaaaaag

SEQ ID NO: 138495 - DNA, 25 bp, Probe sequence
cgtctagctttcatgtggttgtcca

SEQ ID NO: 138496 - DNA, 25 bp, Probe sequence
gaacaagttattaccgaagacaaag

SEQ ID NO: 138497 - DNA, 25 bp, Probe sequence
gaaatcctttgcgaaagactacttt

SEQ ID NO: 138498 - DNA, 25 bp, Probe sequence
gacactcatactgtccgtgaaacag

SEQ ID NO: 138499 - DNA, 25 bp, Probe sequence
gactaccaacccaaacagctagaaa

SEQ ID NO: 138500 - DNA, 25 bp, Probe sequence
gactacttttcgtggcaacaatccc

SEQ ID NO: 138501 - DNA, 25 bp, Probe sequence
gattgtcgataccaaccaagtagaa

SEQ ID NO: 138502 - DNA, 25 bp, Probe sequence
gttccgatgattaaagttggcacgc

SEQ ID NO: 138503 - DNA, 25 bp, Probe sequence
gtaagtaatcatgtgttacctatga

SEQ ID NO: 138504 - DNA, 25 bp, Probe sequence
gtgtgaacgatatacaggtgtggca

SEQ ID NO: 138505 - DNA, 25 bp, Probe sequence
gtggttgtccatatagatgaatcag

SEQ ID NO: 138506 - DNA, 25 bp, Probe sequence
ggtactgttttctgttgaacaagtt

SEQ ID NO: 138507 - DNA, 25 bp, Probe sequence
ggtgaatcctatctttaccagaaaa

SEQ ID NO: 138508 - DNA, 25 bp, Probe sequence
ggcacgcataagaaattaacctttg

SEQ ID NO: 138509 - DNA, 25 bp, Probe sequence
ggaattggtgaatcctatctttacc

SEQ ID NO: 138510 - DNA, 25 bp, Probe sequence
ggcaacaatcccaagaagccattga

SEQ ID NO: 138511 - DNA, 25 bp, Probe sequence
tgttttatgggttttattgattggt

SEQ ID NO: 138512 - DNA, 25 bp, Probe sequence
ttagaaacgttcttccagctctatc

SEQ ID NO: 138513 - DNA, 25 bp, Probe sequence
attcctagtcattttctttgcagat

SEQ ID NO: 138514 - DNA, 25 bp, Probe sequence
atgacgctacgcaagaaatctctat

SEQ ID NO: 138515 - DNA, 25 bp, Probe sequence
atggcggtggctttttaaattatgt

SEQ ID NO: 138516 - DNA, 25 bp, Probe sequence
acaaggcggtgtgaccgtttcacca

SEQ ID NO: 138517 - DNA, 25 bp, Probe sequence
aaaagcagactatcccaatcctata

SEQ ID NO: 138518 - DNA, 25 bp, Probe sequence
aagaccatctgattggggctagacg

SEQ ID NO: 138519 - DNA, 25 bp, Probe sequence
aatcggttatggcgacttaagcagt

SEQ ID NO: 138520 - DNA, 25 bp, Probe sequence
aaggattcttctattccacaaggcg

SEQ ID NO: 138521 - DNA, 25 bp, Probe sequence
aatgcaggcacatatgtgactcatg

SEQ ID NO: 138522 - DNA, 25 bp, Probe sequence
cagttttatgttcagttggtttcac

SEQ ID NO: 138523 - DNA, 25 bp, Probe sequence
ctcgtgtcgcccaagatcagtatga

SEQ ID NO: 138524 - DNA, 25 bp, Probe sequence
cttatcttctttcattcaacctata

SEQ ID NO: 138525 - DNA, 25 bp, Probe sequence
cgcctaccacctcttttgattgtag

SEQ ID NO: 138526 - DNA, 25 bp, Probe sequence
ccaagcaggcgaccttatcttcttt

SEQ ID NO: 138527 - DNA, 25 bp, Probe sequence
ccaatcctatagccatacctgtgaa

SEQ ID NO: 138528 - DNA, 25 bp, Probe sequence
gcagtcgttattggcaagaccatct

SEQ ID NO: 138529 - DNA, 25 bp, Probe sequence
gcaagtggaatcgggcggtacagca

SEQ ID NO: 138530 - DNA, 25 bp, Probe sequence
gaaaccgtgcaagtcattatggacg

SEQ ID NO: 138531 - DNA, 25 bp, Probe sequence
gacacttccccaacagaatttgatg

SEQ ID NO: 138532 - DNA, 25 bp, Probe sequence
gagtaccgaagagtccatcaaacaa

SEQ ID NO: 138533 - DNA, 25 bp, Probe sequence
gtttcaccagaagtgttggcacacc

SEQ ID NO: 138534 - DNA, 25 bp, Probe sequence
gtttcacaatacctaaccgacactt

SEQ ID NO: 138535 - DNA, 25 bp, Probe sequence
gtttcttatatcttagccattatgc

SEQ ID NO: 138536 - DNA, 25 bp, Probe sequence
gtttccctatgtctttggaggggcg

SEQ ID NO: 138537 - DNA, 25 bp, Probe sequence
gtgactcatgtggcgatatatttag

SEQ ID NO: 138538 - DNA, 25 bp, Probe sequence
gggaaatcgcttttatcatgcaggc

SEQ ID NO: 138539 - DNA, 25 bp, Probe sequence
ggaagaagcccaagcaggcgacctt

SEQ ID NO: 138540 - DNA, 25 bp, Probe sequence
tggggctagacgtgttattcataac

SEQ ID NO: 138541 - DNA, 25 bp, Probe sequence
tgatttgtagtgtggtcttctctct

SEQ ID NO: 138542 - DNA, 25 bp, Probe sequence
tcatgcaggcgacccaatcggttat

SEQ ID NO: 138543 - DNA, 25 bp, Probe sequence
taccgcccaacagtttgagtaccga

SEQ ID NO: 138544 - DNA, 25 bp, Probe sequence
tatgacaaagctggcatttctctcc

SEQ ID NO: 138545 - DNA, 25 bp, Probe sequence
ttcttttttctcttattattcctag

SEQ ID NO: 138546 - DNA, 25 bp, Probe sequence
ttggcacaccgtccgttgattgaaa

SEQ ID NO: 138547 - DNA, 25 bp, Probe sequence
atcggcttcctttattgcgtatgca

SEQ ID NO: 138548 - DNA, 25 bp, Probe sequence
agttctccctttttcatgattatgt

SEQ ID NO: 138549 - DNA, 25 bp, Probe sequence
acgtgacagcttattctctgttcaa

SEQ ID NO: 138550 - DNA, 25 bp, Probe sequence
cgcaagcgtcagcaaaccgtcacgc

SEQ ID NO: 138551 - DNA, 25 bp, Probe sequence
aaagaaaacccatcatctcctgttc

SEQ ID NO: 138552 - DNA, 25 bp, Probe sequence
aacccatgtcaaatatgcccttcat

SEQ ID NO: 138553 - DNA, 25 bp, Probe sequence
aagtgtttcgcagacctcgtcaaat

SEQ ID NO: 138554 - DNA, 25 bp, Probe sequence
caacagatacaggcgacaccaaccc

SEQ ID NO: 138555 - DNA, 25 bp, Probe sequence
ctccttctttttattctcattgttg

SEQ ID NO: 138556 - DNA, 25 bp, Probe sequence
cgtggtgtttattctatcggcttcc

SEQ ID NO: 138557 - DNA, 25 bp, Probe sequence
cgtcacgcctgttttgtcacaaaac

SEQ ID NO: 138558 - DNA, 25 bp, Probe sequence
tccaaagatgtcagtaccgccagtc

SEQ ID NO: 138559 - DNA, 25 bp, Probe sequence
gcgtatgcacccgattatattgcga

SEQ ID NO: 138560 - DNA, 25 bp, Probe sequence
gcaggcatgccattaccaagttatt

SEQ ID NO: 138561 - DNA, 25 bp, Probe sequence
gcaacaaggcggtatcgggcaacga

SEQ ID NO: 138562 - DNA, 25 bp, Probe sequence
gcaacgactctcaaaacatgggcag

SEQ ID NO: 138563 - DNA, 25 bp, Probe sequence
gaagcctatgccttagatttcatta

SEQ ID NO: 138564 - DNA, 25 bp, Probe sequence
gaaagtttattgtctaccagtccag

SEQ ID NO: 138565 - DNA, 25 bp, Probe sequence
gacaccaccgaagcaattcaatcag

SEQ ID NO: 138566 - DNA, 25 bp, Probe sequence
gtttttgccaatcagtttcctatta

SEQ ID NO: 138567 - DNA, 25 bp, Probe sequence
gtatctcgatttttgttttccttct

SEQ ID NO: 138568 - DNA, 25 bp, Probe sequence
ggataacgctcctttgtgtgggcgt

SEQ ID NO: 138569 - DNA, 25 bp, Probe sequence
tggcagataccaaagctcaacgcaa

SEQ ID NO: 138570 - DNA, 25 bp, Probe sequence
tggacaatagctggggctggcttcc

SEQ ID NO: 138571 - DNA, 25 bp, Probe sequence
tctctttatctatcgaacgccacag

SEQ ID NO: 138572 - DNA, 25 bp, Probe sequence
taaccctaccgaagacgatttccag

SEQ ID NO: 138573 - DNA, 25 bp, Probe sequence
taaccagcagcatgttcgcaagcgt

SEQ ID NO: 138574 - DNA, 25 bp, Probe sequence
tacaccgaatggcttttccagttca

SEQ ID NO: 138575 - DNA, 25 bp, Probe sequence
taccgttgcctttagtatttccact

SEQ ID NO: 138576 - DNA, 25 bp, Probe sequence
taggcacgctgggcaatgcagtaca

SEQ ID NO: 138577 - DNA, 25 bp, Probe sequence
tattcgctgtcagcaagttctccct

SEQ ID NO: 138578 - DNA, 25 bp, Probe sequence
tattgcttcaatatggctccactga

SEQ ID NO: 138579 - DNA, 25 bp, Probe sequence
tttccactatgctttattcgctgtc

SEQ ID NO: 138580 - DNA, 25 bp, Probe sequence
ttaccttgattattaccgttgcctt

SEQ ID NO: 138581 - DNA, 25 bp, Probe sequence
ggcagatttggtcttacccgattcc

SEQ ID NO: 138582 - DNA, 25 bp, Probe sequence
atggcaagattcatgctctgcaact

SEQ ID NO: 138583 - DNA, 25 bp, Probe sequence
agtacgaccttttggcgatatgcta

SEQ ID NO: 138584 - DNA, 25 bp, Probe sequence
agagttgcttcatgcctttgatacc

SEQ ID NO: 138585 - DNA, 25 bp, Probe sequence
acccgattccaatagctcttttgaa

SEQ ID NO: 138586 - DNA, 25 bp, Probe sequence
tactttccccgttgataccagtatg

SEQ ID NO: 138587 - DNA, 25 bp, Probe sequence
acaggtatttccagccgagatagcg

SEQ ID NO: 138588 - DNA, 25 bp, Probe sequence
acaggtgtcccttttgatgactacg

SEQ ID NO: 138589 - DNA, 25 bp, Probe sequence
aaatatttatctccaacctagcctt

SEQ ID NO: 138590 - DNA, 25 bp, Probe sequence
aaagccttgccattgatattctcac

SEQ ID NO: 138591 - DNA, 25 bp, Probe sequence
aaaccttacctgatattgcccatga

SEQ ID NO: 138592 - DNA, 25 bp, Probe sequence
cgattttgtttctatgcctatggcg

SEQ ID NO: 138593 - DNA, 25 bp, Probe sequence
ccagcaacagcagtttactttcccc

SEQ ID NO: 138594 - DNA, 25 bp, Probe sequence
gcgattggttcgagcaggacgtgcc

SEQ ID NO: 138595 - DNA, 25 bp, Probe sequence
gctttagactttatccactctgacc

SEQ ID NO: 138596 - DNA, 25 bp, Probe sequence
gcttgaaatttgcctttcgttccac

SEQ ID NO: 138597 - DNA, 25 bp, Probe sequence
gaatttattccctcaagcaagcgat

SEQ ID NO: 138598 - DNA, 25 bp, Probe sequence
gatgactacgactaccatttaccga

SEQ ID NO: 138599 - DNA, 25 bp, Probe sequence
gatagcgagaagtttcctgtcctgc

SEQ ID NO: 138600 - DNA, 25 bp, Probe sequence
gattgtcattagtacctttgcttta

SEQ ID NO: 138601 - DNA, 25 bp, Probe sequence
gtagactatcgcttttttattggtt

SEQ ID NO: 138602 - DNA, 25 bp, Probe sequence
ggtatttacgtcggttacaatctcg

SEQ ID NO: 138603 - DNA, 25 bp, Probe sequence
ggttatgcagtttcacccgattttt

SEQ ID NO: 138604 - DNA, 25 bp, Probe sequence
ggttacttgacccttatgtgatttt

SEQ ID NO: 138605 - DNA, 25 bp, Probe sequence
ggacaggcaaccattgttgacccaa

SEQ ID NO: 138606 - DNA, 25 bp, Probe sequence
tgcaggggtctatttcgttactcaa

SEQ ID NO: 138607 - DNA, 25 bp, Probe sequence
tgatggcagtgtcacccaatccatt

SEQ ID NO: 138608 - DNA, 25 bp, Probe sequence
tgattttgcccatctgttattcagt

SEQ ID NO: 138609 - DNA, 25 bp, Probe sequence
tcctgtcctgcgtaaagctattcgg

SEQ ID NO: 138610 - DNA, 25 bp, Probe sequence
tcacgtcggattttttggctggtct

SEQ ID NO: 138611 - DNA, 25 bp, Probe sequence
tacgatattctcaaacccactcgct

SEQ ID NO: 138612 - DNA, 25 bp, Probe sequence
tagcgtccgcttttattggttcatt

SEQ ID NO: 138613 - DNA, 25 bp, Probe sequence
ttcagtactctttggcggacaggca

SEQ ID NO: 138614 - DNA, 25 bp, Probe sequence
ttgataccagaccgcctgtgcgaaa

SEQ ID NO: 138615 - DNA, 25 bp, Probe sequence
atgctagctgtctatgctaattcgg

SEQ ID NO: 138616 - DNA, 25 bp, Probe sequence
atgtgtttctcattaagtcaaagtg

SEQ ID NO: 138617 - DNA, 25 bp, Probe sequence
acagcaaaattatattgtacttgtt

SEQ ID NO: 138618 - DNA, 25 bp, Probe sequence
aaacgatttttcagatatgctagct

SEQ ID NO: 138619 - DNA, 25 bp, Probe sequence
aaaagttccagaatatgctctgtta

SEQ ID NO: 138620 - DNA, 25 bp, Probe sequence
aactcttgctcgatttattccgaca

SEQ ID NO: 138621 - DNA, 25 bp, Probe sequence
aacgagattgtatagacccagctta

SEQ ID NO: 138622 - DNA, 25 bp, Probe sequence
aagtttcagatattcaatgaatcca

SEQ ID NO: 138623 - DNA, 25 bp, Probe sequence
caatttagccaaactcttgctcgat

SEQ ID NO: 138624 - DNA, 25 bp, Probe sequence
cttgctcgatttattccgacagaag

SEQ ID NO: 138625 - DNA, 25 bp, Probe sequence
gccaaactcttgctcgatttattcc

SEQ ID NO: 138626 - DNA, 25 bp, Probe sequence
gctgtctatgctaattcggtaaaat

SEQ ID NO: 138627 - DNA, 25 bp, Probe sequence
gaatatgctctgttaaaactagaat

SEQ ID NO: 138628 - DNA, 25 bp, Probe sequence
gaagaccaaaaagaagccatgtgtt

SEQ ID NO: 138629 - DNA, 25 bp, Probe sequence
gaagccatgtgtttctcattaagtc

SEQ ID NO: 138630 - DNA, 25 bp, Probe sequence
gaacgattagggtcagataccaatt

SEQ ID NO: 138631 - DNA, 25 bp, Probe sequence
gacatgaaagataaaggctgggtga

SEQ ID NO: 138632 - DNA, 25 bp, Probe sequence
gatttattccgacagaagttagtga

SEQ ID NO: 138633 - DNA, 25 bp, Probe sequence
gtaacttgggagatgttttatttca

SEQ ID NO: 138634 - DNA, 25 bp, Probe sequence
gtcaaagtgattcagaagatcccag

SEQ ID NO: 138635 - DNA, 25 bp, Probe sequence
gtcagataccaatttaagtttcaga

SEQ ID NO: 138636 - DNA, 25 bp, Probe sequence
gggaaatggtgagctgggaaaacga

SEQ ID NO: 138637 - DNA, 25 bp, Probe sequence
tgagctgggaaaacgaagtcctttt

SEQ ID NO: 138638 - DNA, 25 bp, Probe sequence
gggtgatagattccttttactttcg

SEQ ID NO: 138639 - DNA, 25 bp, Probe sequence
ggctgggtgatagattccttttact

SEQ ID NO: 138640 - DNA, 25 bp, Probe sequence
ggtatcgaatacagtagtaacttgg

SEQ ID NO: 138641 - DNA, 25 bp, Probe sequence
ggagatgttttatttcaatttagcc

SEQ ID NO: 138642 - DNA, 25 bp, Probe sequence
tgatagattccttttactttcgtta

SEQ ID NO: 138643 - DNA, 25 bp, Probe sequence
tgaaggtattattgcaaaatggaca

SEQ ID NO: 138644 - DNA, 25 bp, Probe sequence
tagacccagcttatatgaacgatta

SEQ ID NO: 138645 - DNA, 25 bp, Probe sequence
tattgtacttgttaagctatttgaa

SEQ ID NO: 138646 - DNA, 25 bp, Probe sequence
tttcagatatgctagctgtctatgc

SEQ ID NO: 138647 - DNA, 25 bp, Probe sequence
ttactttcgttacaaacagcaaaat

SEQ ID NO: 138648 - DNA, 25 bp, Probe sequence
ttagccaaactcttgctcgatttat

SEQ ID NO: 138649 - DNA, 25 bp, Probe sequence
atttatattagtggcaataatgccg

SEQ ID NO: 138650 - DNA, 25 bp, Probe sequence
atattagtggcaataatgccgaaaa

SEQ ID NO: 138651 - DNA, 25 bp, Probe sequence
atatatcttgaatctactggtacaa

SEQ ID NO: 138652 - DNA, 25 bp, Probe sequence
atatcttgaatctactggtacaatg

SEQ ID NO: 138653 - DNA, 25 bp, Probe sequence
atcttgaatctactggtacaatgga

SEQ ID NO: 138654 - DNA, 25 bp, Probe sequence
agagacaatatatcttgaatctact

SEQ ID NO: 138655 - DNA, 25 bp, Probe sequence
actggtacaatggacaaagtaagag

SEQ ID NO: 138656 - DNA, 25 bp, Probe sequence
aaaagataatagtggtacaacaaat

SEQ ID NO: 138657 - DNA, 25 bp, Probe sequence
aatctactggtacaatggacaaagt

SEQ ID NO: 138658 - DNA, 25 bp, Probe sequence
aatgctgtgattataggtttagaag

SEQ ID NO: 138659 - DNA, 25 bp, Probe sequence
aatgccgaaaataatgctgtgatta

SEQ ID NO: 138660 - DNA, 25 bp, Probe sequence
aatatatcttgaatctactggtaca

SEQ ID NO: 138661 - DNA, 25 bp, Probe sequence
caatatatcttgaatctactggtac

SEQ ID NO: 138662 - DNA, 25 bp, Probe sequence
cttgaatctactggtacaatggaca

SEQ ID NO: 138663 - DNA, 25 bp, Probe sequence
cgaaccaatttatattagtggcaat

SEQ ID NO: 138664 - DNA, 25 bp, Probe sequence
cctacagaagcgagaaaagattttt

SEQ ID NO: 138665 - DNA, 25 bp, Probe sequence
gcgagaaaagatttttatcaattac

SEQ ID NO: 138666 - DNA, 25 bp, Probe sequence
gaatctactggtacaatggacaaag

SEQ ID NO: 138667 - DNA, 25 bp, Probe sequence
gaaccaatttatattagtggcaata

SEQ ID NO: 138668 - DNA, 25 bp, Probe sequence
gacaatatatcttgaatctactggt

SEQ ID NO: 138669 - DNA, 25 bp, Probe sequence
gagacaatatatcttgaatctactg

SEQ ID NO: 138670 - DNA, 25 bp, Probe sequence
gagaaaaagataatagtggtacaac

SEQ ID NO: 138671 - DNA, 25 bp, Probe sequence
gatgatattgattgggataatcttt

SEQ ID NO: 138672 - DNA, 25 bp, Probe sequence
gtgattataggtttagaagattgga

SEQ ID NO: 138673 - DNA, 25 bp, Probe sequence
tgttaataataatcacgaaccaatt

SEQ ID NO: 138674 - DNA, 25 bp, Probe sequence
tgctgtgattataggtttagaagat

SEQ ID NO: 138675 - DNA, 25 bp, Probe sequence
tcttgaatctactggtacaatggac

SEQ ID NO: 138676 - DNA, 25 bp, Probe sequence
tcacgaaccaatttatattagtggc

SEQ ID NO: 138677 - DNA, 25 bp, Probe sequence
taataatcacgaaccaatttatatt

SEQ ID NO: 138678 - DNA, 25 bp, Probe sequence
taatcacgaaccaatttatattagt

SEQ ID NO: 138679 - DNA, 25 bp, Probe sequence
taatgccgaaaataatgctgtgatt

SEQ ID NO: 138680 - DNA, 25 bp, Probe sequence
tatcttgaatctactggtacaatgg

SEQ ID NO: 138681 - DNA, 25 bp, Probe sequence
tatatcttgaatctactggtacaat

SEQ ID NO: 138682 - DNA, 25 bp, Probe sequence
ttgaatctactggtacaatggacaa

SEQ ID NO: 138683 - DNA, 25 bp, Probe sequence
attgactaccaatctttgggacgtg

SEQ ID NO: 138684 - DNA, 25 bp, Probe sequence
attacgtggaagaaacaggacagct

SEQ ID NO: 138685 - DNA, 25 bp, Probe sequence
atcaaccgtctatgtgaagccattc

SEQ ID NO: 138686 - DNA, 25 bp, Probe sequence
acgccgattagtgaaatcaaccgtc

SEQ ID NO: 138687 - DNA, 25 bp, Probe sequence
agaatcggtttaaatgaggactacg

SEQ ID NO: 138688 - DNA, 25 bp, Probe sequence
acctagttacctctcatggggtatt

SEQ ID NO: 138689 - DNA, 25 bp, Probe sequence
agcttggtgaagtcccttccaattt

SEQ ID NO: 138690 - DNA, 25 bp, Probe sequence
agcttggaagaattactggaaaaca

SEQ ID NO: 138691 - DNA, 25 bp, Probe sequence
accaatctttgggacgtgatatgga

SEQ ID NO: 138692 - DNA, 25 bp, Probe sequence
acctctcatggggtatttgaatatt

SEQ ID NO: 138693 - DNA, 25 bp, Probe sequence
ggacagcttggtgaagtcccttcca

SEQ ID NO: 138694 - DNA, 25 bp, Probe sequence
aatacatgattttgagcttcctttt

SEQ ID NO: 138695 - DNA, 25 bp, Probe sequence
gaaggtgaattagtcggagcatggt

SEQ ID NO: 138696 - DNA, 25 bp, Probe sequence
gaagccattcaagaaatcgaaggta

SEQ ID NO: 138697 - DNA, 25 bp, Probe sequence
gaaatggcagaaagaatcggtttaa

SEQ ID NO: 138698 - DNA, 25 bp, Probe sequence
gaaattcaaggcatgtggtttagta

SEQ ID NO: 138699 - DNA, 25 bp, Probe sequence
gatgtcgcccgttattacgtggaag

SEQ ID NO: 138700 - DNA, 25 bp, Probe sequence
gagcatggtttactccaccaattga

SEQ ID NO: 138701 - DNA, 25 bp, Probe sequence
gagcttccttttgatgtggacgaat

SEQ ID NO: 138702 - DNA, 25 bp, Probe sequence
gattcgatggaagatgtcgcccgtt

SEQ ID NO: 138703 - DNA, 25 bp, Probe sequence
gaggactacgaagaatatgcaatac

SEQ ID NO: 138704 - DNA, 25 bp, Probe sequence
gaggatattcattgttatagtgatt

SEQ ID NO: 138705 - DNA, 25 bp, Probe sequence
gtcggagcatggtttactccaccaa

SEQ ID NO: 138706 - DNA, 25 bp, Probe sequence
gttatagtgattgtgattcgatgga

SEQ ID NO: 138707 - DNA, 25 bp, Probe sequence
gtggacgaatacacgccgattagtg

SEQ ID NO: 138708 - DNA, 25 bp, Probe sequence
ggtacacctatttataatgaactca

SEQ ID NO: 138709 - DNA, 25 bp, Probe sequence
ggtttactccaccaattgatgagga

SEQ ID NO: 138710 - DNA, 25 bp, Probe sequence
ggaaatgaaagtctatgtggcaaat

SEQ ID NO: 138711 - DNA, 25 bp, Probe sequence
ggcatgtggtttagtagcttggaag

SEQ ID NO: 138712 - DNA, 25 bp, Probe sequence
tggaagatgtcgcccgttattacgt

SEQ ID NO: 138713 - DNA, 25 bp, Probe sequence
tgattttgagcttccttttgatgtg

SEQ ID NO: 138714 - DNA, 25 bp, Probe sequence
tgaagtcccttccaatttacaaaat

SEQ ID NO: 138715 - DNA, 25 bp, Probe sequence
taattacctagttacctctcatggg

SEQ ID NO: 138716 - DNA, 25 bp, Probe sequence
tatgtggcaaatttaggacggtata

SEQ ID NO: 138717 - DNA, 25 bp, Probe sequence
agtaccacttccagagaattacgaa

SEQ ID NO: 138718 - DNA, 25 bp, Probe sequence
attcacttgcacaccctaatacaaa

SEQ ID NO: 138719 - DNA, 25 bp, Probe sequence
agtgatgtggtttcacaagctattg

SEQ ID NO: 138720 - DNA, 25 bp, Probe sequence
aaataggcattcacttgcacaccct

SEQ ID NO: 138721 - DNA, 25 bp, Probe sequence
agacagcaagctccatatatgataa

SEQ ID NO: 138722 - DNA, 25 bp, Probe sequence
acttgcacaccctaatacaaatatt

SEQ ID NO: 138723 - DNA, 25 bp, Probe sequence
acaagctattgaagacgctgagtct

SEQ ID NO: 138724 - DNA, 25 bp, Probe sequence
aaatgatcaatttaaatctctttta

SEQ ID NO: 138725 - DNA, 25 bp, Probe sequence
aacgtgcctttgacagagttcacac

SEQ ID NO: 138726 - DNA, 25 bp, Probe sequence
aacctactgaacttgctgatatagt

SEQ ID NO: 138727 - DNA, 25 bp, Probe sequence
aagagttccttttgatgatttagac

SEQ ID NO: 138728 - DNA, 25 bp, Probe sequence
aagtcataaagatttgattacccag

SEQ ID NO: 138729 - DNA, 25 bp, Probe sequence
aagggctggaatacgctttgcacat

SEQ ID NO: 138730 - DNA, 25 bp, Probe sequence
aatggtgaatatcaacgtgcctttg

SEQ ID NO: 138731 - DNA, 25 bp, Probe sequence
aataggtatttcaagtacagttaca

SEQ ID NO: 138732 - DNA, 25 bp, Probe sequence
cacactgcttttcatggatatttaa

SEQ ID NO: 138733 - DNA, 25 bp, Probe sequence
gaaggaggtaacgagattgtttcta

SEQ ID NO: 138734 - DNA, 25 bp, Probe sequence
gaaagagctcttcaaattattatga

SEQ ID NO: 138735 - DNA, 25 bp, Probe sequence
gaaattcaacctactgaacttgctg

SEQ ID NO: 138736 - DNA, 25 bp, Probe sequence
gaaattacagttcctagagacgaaa

SEQ ID NO: 138737 - DNA, 25 bp, Probe sequence
gacaacgataaggtcatcaaatgga

SEQ ID NO: 138738 - DNA, 25 bp, Probe sequence
gacagagttcacactgcttttcatg

SEQ ID NO: 138739 - DNA, 25 bp, Probe sequence
gacgctgagtcttttatgagtaatg

SEQ ID NO: 138740 - DNA, 25 bp, Probe sequence
gagactgacgattttacttattata

SEQ ID NO: 138741 - DNA, 25 bp, Probe sequence
gagttcacactgcttttcatggata

SEQ ID NO: 138742 - DNA, 25 bp, Probe sequence
gaggtaactttagatgagactgacg

SEQ ID NO: 138743 - DNA, 25 bp, Probe sequence
gattacccagacagcaagctccata

SEQ ID NO: 138744 - DNA, 25 bp, Probe sequence
gtacagttacagattatattagcgg

SEQ ID NO: 138745 - DNA, 25 bp, Probe sequence
ggaatacgctttgcacatatcttaa

SEQ ID NO: 138746 - DNA, 25 bp, Probe sequence
tgattagctctcttaatgaagcaag

SEQ ID NO: 138747 - DNA, 25 bp, Probe sequence
tcaaatggaatgattagctctctta

SEQ ID NO: 138748 - DNA, 25 bp, Probe sequence
tactattttagtaccacttccagag

SEQ ID NO: 138749 - DNA, 25 bp, Probe sequence
tacgctttgcacatatcttaaaata

SEQ ID NO: 138750 - DNA, 25 bp, Probe sequence
tatattagcggataccttgataagt

SEQ ID NO: 138751 - DNA, 25 bp, Probe sequence
agtcgcccctacattaaaaatcgca

SEQ ID NO: 138752 - DNA, 25 bp, Probe sequence
cttcaatcccgataacccattggag

SEQ ID NO: 138753 - DNA, 25 bp, Probe sequence
atgtacggattcgattccctaccaa

SEQ ID NO: 138754 - DNA, 25 bp, Probe sequence
ataaactggcggttgcttctcatat

SEQ ID NO: 138755 - DNA, 25 bp, Probe sequence
atcggagctggtatgatttctttca

SEQ ID NO: 138756 - DNA, 25 bp, Probe sequence
atgatgttcccttagaagacgcaga

SEQ ID NO: 138757 - DNA, 25 bp, Probe sequence
agatgttctcaacggtacaaccatt

SEQ ID NO: 138758 - DNA, 25 bp, Probe sequence
acaaccattatctccaccatgattc

SEQ ID NO: 138759 - DNA, 25 bp, Probe sequence
aactttctattggctcaacatcgga

SEQ ID NO: 138760 - DNA, 25 bp, Probe sequence
aactggttacatcatcaagtcgccc

SEQ ID NO: 138761 - DNA, 25 bp, Probe sequence
aacgcttggatttagctatcaacga

SEQ ID NO: 138762 - DNA, 25 bp, Probe sequence
aatgcatttccgtctttcgaagctt

SEQ ID NO: 138763 - DNA, 25 bp, Probe sequence
cacacagccagagccttattctttt

SEQ ID NO: 138764 - DNA, 25 bp, Probe sequence
cgactggcttatggcgtttctcaaa

SEQ ID NO: 138765 - DNA, 25 bp, Probe sequence
gcagtccctactcaacaggtgaaag

SEQ ID NO: 138766 - DNA, 25 bp, Probe sequence
gaacgctttggaacgcttcaatccc

SEQ ID NO: 138767 - DNA, 25 bp, Probe sequence
gaacaacaacatctagccatggagg

SEQ ID NO: 138768 - DNA, 25 bp, Probe sequence
gaaacacactttatattggctcatt

SEQ ID NO: 138769 - DNA, 25 bp, Probe sequence
gactttggctattattcttatcccg

SEQ ID NO: 138770 - DNA, 25 bp, Probe sequence
gagccacccaagccatgaaagattt

SEQ ID NO: 138771 - DNA, 25 bp, Probe sequence
gatttattggcacatcaacaggcgg

SEQ ID NO: 138772 - DNA, 25 bp, Probe sequence
gattccctaccaatgatgtggctca

SEQ ID NO: 138773 - DNA, 25 bp, Probe sequence
gttgtcctagtctctcatgatgtaa

SEQ ID NO: 138774 - DNA, 25 bp, Probe sequence
gttgcttctcatattaccagacctt

SEQ ID NO: 138775 - DNA, 25 bp, Probe sequence
gtggagcattacgcctaaccacaca

SEQ ID NO: 138776 - DNA, 25 bp, Probe sequence
ggagatgttattcgactatgtacgg

SEQ ID NO: 138777 - DNA, 25 bp, Probe sequence
ggaaaaggctgtcggcaatttgaaa

SEQ ID NO: 138778 - DNA, 25 bp, Probe sequence
tgaaacaggcaaggcagtccctact

SEQ ID NO: 138779 - DNA, 25 bp, Probe sequence
tcggtgatattgttgtcctagtctc

SEQ ID NO: 138780 - DNA, 25 bp, Probe sequence
tcaatcgctatatccgctttgcaga

SEQ ID NO: 138781 - DNA, 25 bp, Probe sequence
taaaaaatgaccgagccacccaagc

SEQ ID NO: 138782 - DNA, 25 bp, Probe sequence
taccagaccttacctatcggatatt

SEQ ID NO: 138783 - DNA, 25 bp, Probe sequence
tatatgctacacgaagactttggct

SEQ ID NO: 138784 - DNA, 25 bp, Probe sequence
ttcttatcccgaacactatcgtttc

SEQ ID NO: 138785 - DNA, 25 bp, Probe sequence
attgggagttcgattctctccctca

SEQ ID NO: 138786 - DNA, 25 bp, Probe sequence
attgattgaatctctcctgcataca

SEQ ID NO: 138787 - DNA, 25 bp, Probe sequence
atcaagatcagcttttgcacctaga

SEQ ID NO: 138788 - DNA, 25 bp, Probe sequence
atgccattgcttcatgacagaggag

SEQ ID NO: 138789 - DNA, 25 bp, Probe sequence
aggtacaggttcagacttgctttga

SEQ ID NO: 138790 - DNA, 25 bp, Probe sequence
agcacttggtctatcattttgtact

SEQ ID NO: 138791 - DNA, 25 bp, Probe sequence
agctggctttattatcactatcgta

SEQ ID NO: 138792 - DNA, 25 bp, Probe sequence
aaatcctattttattctcacattga

SEQ ID NO: 138793 - DNA, 25 bp, Probe sequence
aaaagcaatctgagcctgtaccgca

SEQ ID NO: 138794 - DNA, 25 bp, Probe sequence
aatgggctttggtatgatgttcgga

SEQ ID NO: 138795 - DNA, 25 bp, Probe sequence
aattatgcttatcttggtttgtctg

SEQ ID NO: 138796 - DNA, 25 bp, Probe sequence
aattgctgggggcactggtagtgga

SEQ ID NO: 138797 - DNA, 25 bp, Probe sequence
caaacaacgaatccgccattttcct

SEQ ID NO: 138798 - DNA, 25 bp, Probe sequence
cagtattctcactgctctttttgta

SEQ ID NO: 138799 - DNA, 25 bp, Probe sequence
gctaggtcgtgaaagtaccaccgtt

SEQ ID NO: 138800 - DNA, 25 bp, Probe sequence
gctggtagtttttctagtcgtccta

SEQ ID NO: 138801 - DNA, 25 bp, Probe sequence
gcttctttttaattcttgcctgtca

SEQ ID NO: 138802 - DNA, 25 bp, Probe sequence
gcaccgtcaaaagttagctcgtatg

SEQ ID NO: 138803 - DNA, 25 bp, Probe sequence
gcaaagctttatattcttgacccta

SEQ ID NO: 138804 - DNA, 25 bp, Probe sequence
gaaaccatgaaacaacaccctaact

SEQ ID NO: 138805 - DNA, 25 bp, Probe sequence
gacaactttaacttccgtgtggctt

SEQ ID NO: 138806 - DNA, 25 bp, Probe sequence
gagcgttacaatcggtgaactggca

SEQ ID NO: 138807 - DNA, 25 bp, Probe sequence
gatttggcagacttaggggcggtca

SEQ ID NO: 138808 - DNA, 25 bp, Probe sequence
gtatgcggacttatcagctggcttt

SEQ ID NO: 138809 - DNA, 25 bp, Probe sequence
gtaccaccgttattcataaactcaa

SEQ ID NO: 138810 - DNA, 25 bp, Probe sequence
gtcctactcccttttcattggagag

SEQ ID NO: 138811 - DNA, 25 bp, Probe sequence
gtggtagctcaagatggacgtgtca

SEQ ID NO: 138812 - DNA, 25 bp, Probe sequence
ggtttgtctgccaattttcttattt

SEQ ID NO: 138813 - DNA, 25 bp, Probe sequence
tgtggctttgggtcgtatgtctgaa

SEQ ID NO: 138814 - DNA, 25 bp, Probe sequence
tgagttttatacaccccttgtacca

SEQ ID NO: 138815 - DNA, 25 bp, Probe sequence
tgagcctgtaccgcacgaagtgaaa

SEQ ID NO: 138816 - DNA, 25 bp, Probe sequence
tctctccctcacatgttaattgctg

SEQ ID NO: 138817 - DNA, 25 bp, Probe sequence
ttctatcaacttcatacgccatact

SEQ ID NO: 138818 - DNA, 25 bp, Probe sequence
ttgcctgtcaacgtccagacgcaaa

SEQ ID NO: 138819 - DNA, 25 bp, Probe sequence
attgaaattttccgccttgcgtcgt

SEQ ID NO: 138820 - DNA, 25 bp, Probe sequence
atcctgtggcagataccgtagcgac

SEQ ID NO: 138821 - DNA, 25 bp, Probe sequence
accgtagcgacggctacttttcgag

SEQ ID NO: 138822 - DNA, 25 bp, Probe sequence
agaagcgtccgaaagtgaaaaatag

SEQ ID NO: 138823 - DNA, 25 bp, Probe sequence
aaagaccagacatttggcacattga

SEQ ID NO: 138824 - DNA, 25 bp, Probe sequence
aaggacaaggacgcatgatacaagt

SEQ ID NO: 138825 - DNA, 25 bp, Probe sequence
cctgtggcagataccgtagcgacgg

SEQ ID NO: 138826 - DNA, 25 bp, Probe sequence
cttgcgtcgtgaggttcgtatccag

SEQ ID NO: 138827 - DNA, 25 bp, Probe sequence
cggctacttttcgaggggcagacgt

SEQ ID NO: 138828 - DNA, 25 bp, Probe sequence
cccgcttctgttcctttgaaagaat

SEQ ID NO: 138829 - DNA, 25 bp, Probe sequence
gttcctttgaaagaatttgactaca

SEQ ID NO: 138830 - DNA, 25 bp, Probe sequence
gctacttttcgaggggcagacgttg

SEQ ID NO: 138831 - DNA, 25 bp, Probe sequence
gcagacgatcttgtattaaaaggac

SEQ ID NO: 138832 - DNA, 25 bp, Probe sequence
gaatttgactacaacgcagaagtgg

SEQ ID NO: 138833 - DNA, 25 bp, Probe sequence
gaatgaagatggtacggtttccgaa

SEQ ID NO: 138834 - DNA, 25 bp, Probe sequence
gaacgtacctatgacttaaaatcaa

SEQ ID NO: 138835 - DNA, 25 bp, Probe sequence
gaaattaaagaacgtacctatgact

SEQ ID NO: 138836 - DNA, 25 bp, Probe sequence
gacaaaacctcatcagaaatataaa

SEQ ID NO: 138837 - DNA, 25 bp, Probe sequence
gactacaacgcagaagtggaattaa

SEQ ID NO: 138838 - DNA, 25 bp, Probe sequence
gaggttcgtatccagaatgaagatg

SEQ ID NO: 138839 - DNA, 25 bp, Probe sequence
gataccgtagcgacggctacttttc

SEQ ID NO: 138840 - DNA, 25 bp, Probe sequence
gtattgtgattgaaaaagaccagac

SEQ ID NO: 138841 - DNA, 25 bp, Probe sequence
gtggcagataccgtagcgacggcta

SEQ ID NO: 138842 - DNA, 25 bp, Probe sequence
gtcgtgaggttcgtatccagaatga

SEQ ID NO: 138843 - DNA, 25 bp, Probe sequence
gtggaattaatcaatcctgtggcag

SEQ ID NO: 138844 - DNA, 25 bp, Probe sequence
gggcagacgttgattggtacgtgaa

SEQ ID NO: 138845 - DNA, 25 bp, Probe sequence
ggcacattgaaattttccgccttgc

SEQ ID NO: 138846 - DNA, 25 bp, Probe sequence
ggtacgtgaaagcagacgatcttgt

SEQ ID NO: 138847 - DNA, 25 bp, Probe sequence
ggacagacaaaacctcatcagaaat

SEQ ID NO: 138848 - DNA, 25 bp, Probe sequence
tgcgtcgtgaggttcgtatccagaa

SEQ ID NO: 138849 - DNA, 25 bp, Probe sequence
tgatacaagtcagtatccccgcttc

SEQ ID NO: 138850 - DNA, 25 bp, Probe sequence
tgaagatggtacggtttccgaagaa

SEQ ID NO: 138851 - DNA, 25 bp, Probe sequence
tcgaggggcagacgttgattggtac

SEQ ID NO: 138852 - DNA, 25 bp, Probe sequence
taatcaatcctgtggcagataccgt

SEQ ID NO: 138853 - DNA, 25 bp, Probe sequence
atgatattgttgtcattcttccctc

SEQ ID NO: 138854 - DNA, 25 bp, Probe sequence
agggaacattgaacaacgtcgaata

SEQ ID NO: 138855 - DNA, 25 bp, Probe sequence
agaaggttataaaattggcaatcga

SEQ ID NO: 138856 - DNA, 25 bp, Probe sequence
accgcagaaggttataaaattggca

SEQ ID NO: 138857 - DNA, 25 bp, Probe sequence
accaattacattatgcacgcagacg

SEQ ID NO: 138858 - DNA, 25 bp, Probe sequence
acccacatattaccgcagaaggtta

SEQ ID NO: 138859 - DNA, 25 bp, Probe sequence
accattctctctcgtagttacaatt

SEQ ID NO: 138860 - DNA, 25 bp, Probe sequence
actcaacgattcaacgagcagatga

SEQ ID NO: 138861 - DNA, 25 bp, Probe sequence
acattatgcacgcagacgatatggt

SEQ ID NO: 138862 - DNA, 25 bp, Probe sequence
aaatatgtcattcccaatatggaaa

SEQ ID NO: 138863 - DNA, 25 bp, Probe sequence
aaatggcagaccaaccattctctct

SEQ ID NO: 138864 - DNA, 25 bp, Probe sequence
aaaagtcaaactcatcaacccacat

SEQ ID NO: 138865 - DNA, 25 bp, Probe sequence
aagtcaaactcatcaacccacatat

SEQ ID NO: 138866 - DNA, 25 bp, Probe sequence
catcaacccacatattaccgcagaa

SEQ ID NO: 138867 - DNA, 25 bp, Probe sequence
cattctctctcgtagttacaattta

SEQ ID NO: 138868 - DNA, 25 bp, Probe sequence
gctggcgagaaacattttgaatccg

SEQ ID NO: 138869 - DNA, 25 bp, Probe sequence
gctggtgaagggaacattgaacaac

SEQ ID NO: 138870 - DNA, 25 bp, Probe sequence
gaatccgacgaaaaagtcaaactca

SEQ ID NO: 138871 - DNA, 25 bp, Probe sequence
gcacgcagacgatatggtgaaagca

SEQ ID NO: 138872 - DNA, 25 bp, Probe sequence
gcaatcgaggatttaccaattacat

SEQ ID NO: 138873 - DNA, 25 bp, Probe sequence
gaacttaaatatgtcattcccaata

SEQ ID NO: 138874 - DNA, 25 bp, Probe sequence
gagaaacattttgaatccgacgaaa

SEQ ID NO: 138875 - DNA, 25 bp, Probe sequence
gatttaccaattacattatgcacgc

SEQ ID NO: 138876 - DNA, 25 bp, Probe sequence
gattcaacgagcagatgatattgtt

SEQ ID NO: 138877 - DNA, 25 bp, Probe sequence
gttacaatttatactcaacgattca

SEQ ID NO: 138878 - DNA, 25 bp, Probe sequence
ggacaattagaatatgctggtgaag

SEQ ID NO: 138879 - DNA, 25 bp, Probe sequence
ggcgagaaacattttgaatccgacg

SEQ ID NO: 138880 - DNA, 25 bp, Probe sequence
tgaacaacgtcgaataaatggcaga

SEQ ID NO: 138881 - DNA, 25 bp, Probe sequence
tccgaagctggcgagaaacattttg

SEQ ID NO: 138882 - DNA, 25 bp, Probe sequence
tctctctcgtagttacaatttatac

SEQ ID NO: 138883 - DNA, 25 bp, Probe sequence
tcaacccacatattaccgcagaagg

SEQ ID NO: 138884 - DNA, 25 bp, Probe sequence
tcaaactcatcaacccacatattac

SEQ ID NO: 138885 - DNA, 25 bp, Probe sequence
tatactcaacgattcaacgagcaga

SEQ ID NO: 138886 - DNA, 25 bp, Probe sequence
ttccctccgaagctggcgagaaaca

SEQ ID NO: 138887 - DNA, 25 bp, Probe sequence
attaccgtattgcaattttgatgct

SEQ ID NO: 138888 - DNA, 25 bp, Probe sequence
attttcagagttgtccttacgagat

SEQ ID NO: 138889 - DNA, 25 bp, Probe sequence
atttatttcttttctcagaggtggg

SEQ ID NO: 138890 - DNA, 25 bp, Probe sequence
atcgctattaatcttctaaacggga

SEQ ID NO: 138891 - DNA, 25 bp, Probe sequence
atgtaaatgcatgtcctgggagtgg

SEQ ID NO: 138892 - DNA, 25 bp, Probe sequence
acccgtctatttttaagcactatct

SEQ ID NO: 138893 - DNA, 25 bp, Probe sequence
acaaccctcaaattcagtcaatgtt

SEQ ID NO: 138894 - DNA, 25 bp, Probe sequence
aaatctcgagatggtatcacactta

SEQ ID NO: 138895 - DNA, 25 bp, Probe sequence
aaatgctaactagtcacacttttca

SEQ ID NO: 138896 - DNA, 25 bp, Probe sequence
aaaggagacttgctttatcccactc

SEQ ID NO: 138897 - DNA, 25 bp, Probe sequence
aagagcttacgtcagccaaattaat

SEQ ID NO: 138898 - DNA, 25 bp, Probe sequence
aactgtaaacagtaacgttgcacgt

SEQ ID NO: 138899 - DNA, 25 bp, Probe sequence
aacgttgcacgtaatattgctagta

SEQ ID NO: 138900 - DNA, 25 bp, Probe sequence
aagcactatctattttttattaacg

SEQ ID NO: 138901 - DNA, 25 bp, Probe sequence
cgaccgtggttttataagttatgat

SEQ ID NO: 138902 - DNA, 25 bp, Probe sequence
gcaattttgtactttactgaatcag

SEQ ID NO: 138903 - DNA, 25 bp, Probe sequence
gaataattgctatcacatacactaa

SEQ ID NO: 138904 - DNA, 25 bp, Probe sequence
gaagttcagtatactcaagtttctg

SEQ ID NO: 138905 - DNA, 25 bp, Probe sequence
gacgctacatggctgttacaggtct

SEQ ID NO: 138906 - DNA, 25 bp, Probe sequence
gatactgttatcgctattaatcttc

SEQ ID NO: 138907 - DNA, 25 bp, Probe sequence
gatatttgtgtacttgctcctcaac

SEQ ID NO: 138908 - DNA, 25 bp, Probe sequence
gatttgtcactttctcatgatttta

SEQ ID NO: 138909 - DNA, 25 bp, Probe sequence
gtttctgaaatgtatcacactatgt

SEQ ID NO: 138910 - DNA, 25 bp, Probe sequence
gtagacttctactctaattttcaga

SEQ ID NO: 138911 - DNA, 25 bp, Probe sequence
gtcacacttttcaatcaaagacgct

SEQ ID NO: 138912 - DNA, 25 bp, Probe sequence
ggtatcacacttactacagcacata

SEQ ID NO: 138913 - DNA, 25 bp, Probe sequence
tgggtggggacaatacatcagtttt

SEQ ID NO: 138914 - DNA, 25 bp, Probe sequence
tgctttatcccactcaattattaga

SEQ ID NO: 138915 - DNA, 25 bp, Probe sequence
tcagaggtgggttattttacgagta

SEQ ID NO: 138916 - DNA, 25 bp, Probe sequence
tcaacactatcctctgttttcactg

SEQ ID NO: 138917 - DNA, 25 bp, Probe sequence
tacttcaaaacaaccctcaaattca

SEQ ID NO: 138918 - DNA, 25 bp, Probe sequence
tactaaggaggatttacccaacata

SEQ ID NO: 138919 - DNA, 25 bp, Probe sequence
tagtggagacgacaacggtgttgat

SEQ ID NO: 138920 - DNA, 25 bp, Probe sequence
tatcctctgttttcactgggtgagt

SEQ ID NO: 138921 - DNA, 25 bp, Probe sequence
atatcgacttagacttactagggtt

SEQ ID NO: 138922 - DNA, 25 bp, Probe sequence
atttccactgaattagactctcatc

SEQ ID NO: 138923 - DNA, 25 bp, Probe sequence
atactcagattctcatgaccacaca

SEQ ID NO: 138924 - DNA, 25 bp, Probe sequence
atgagactattaccagtgttcctga

SEQ ID NO: 138925 - DNA, 25 bp, Probe sequence
atgggtggcaagggcattggattat

SEQ ID NO: 138926 - DNA, 25 bp, Probe sequence
aaggtgtaggtagtatttctctatt

SEQ ID NO: 138927 - DNA, 25 bp, Probe sequence
aatgttggtagtacttcgtttgaat

SEQ ID NO: 138928 - DNA, 25 bp, Probe sequence
aattctactccatacaatcgacttg

SEQ ID NO: 138929 - DNA, 25 bp, Probe sequence
ctacagaattgtcagctttatcagc

SEQ ID NO: 138930 - DNA, 25 bp, Probe sequence
gcaaatctatcgttatgaatccagc

SEQ ID NO: 138931 - DNA, 25 bp, Probe sequence
gaatatatcgctagcttgtttgacg

SEQ ID NO: 138932 - DNA, 25 bp, Probe sequence
gaatccgaaatctttcgattcgata

SEQ ID NO: 138933 - DNA, 25 bp, Probe sequence
gaagtgtctgaaatatctcggatga

SEQ ID NO: 138934 - DNA, 25 bp, Probe sequence
gaaccagaagctcatattcatcatc

SEQ ID NO: 138935 - DNA, 25 bp, Probe sequence
gaacaggcaatcccatcagaacatc

SEQ ID NO: 138936 - DNA, 25 bp, Probe sequence
gaaattctattcgtctatccgacta

SEQ ID NO: 138937 - DNA, 25 bp, Probe sequence
gacgatgaagctctgttgggctcaa

SEQ ID NO: 138938 - DNA, 25 bp, Probe sequence
gaccacacattctgtacatttagct

SEQ ID NO: 138939 - DNA, 25 bp, Probe sequence
gagatttgtgcttccatttctttaa

SEQ ID NO: 138940 - DNA, 25 bp, Probe sequence
gaggatgttgtgtatctaatcaatc

SEQ ID NO: 138941 - DNA, 25 bp, Probe sequence
gtttatatctactcttcaaattcga

SEQ ID NO: 138942 - DNA, 25 bp, Probe sequence
gtttatgttgacgctcttcgagatg

SEQ ID NO: 138943 - DNA, 25 bp, Probe sequence
ggggtggtttgcaattgagttaggt

SEQ ID NO: 138944 - DNA, 25 bp, Probe sequence
ggttcagtgtattctcctaatcttc

SEQ ID NO: 138945 - DNA, 25 bp, Probe sequence
ggattattatctctgcgacatttga

SEQ ID NO: 138946 - DNA, 25 bp, Probe sequence
tgacgctcttcgagatgttcttaga

SEQ ID NO: 138947 - DNA, 25 bp, Probe sequence
tgctattgcttttgcatgtcaggaa

SEQ ID NO: 138948 - DNA, 25 bp, Probe sequence
tgctcttactgcattgagaatctta

SEQ ID NO: 138949 - DNA, 25 bp, Probe sequence
tagactctcatcaatttaacgaatt

SEQ ID NO: 138950 - DNA, 25 bp, Probe sequence
tagtcgaatttgaagcgtgtcgttc

SEQ ID NO: 138951 - DNA, 25 bp, Probe sequence
tatccgactatgaattttactacac

SEQ ID NO: 138952 - DNA, 25 bp, Probe sequence
tattctaacttatgtcagtccaatt

SEQ ID NO: 138953 - DNA, 25 bp, Probe sequence
ttcagggaaaaccaatgctcttact

SEQ ID NO: 138954 - DNA, 25 bp, Probe sequence
ttcttctttcctcaactatgtcaga

SEQ ID NO: 138955 - DNA, 25 bp, Probe sequence
attttgtcattttttttgaagatat

SEQ ID NO: 138956 - DNA, 25 bp, Probe sequence
acgtagtgtgttccactgctgattt

SEQ ID NO: 138957 - DNA, 25 bp, Probe sequence
actgctgatttctttttgagcatta

SEQ ID NO: 138958 - DNA, 25 bp, Probe sequence
aacgtagtgtgttccactgctgatt

SEQ ID NO: 138959 - DNA, 25 bp, Probe sequence
cactgctgatttctttttgagcatt

SEQ ID NO: 138960 - DNA, 25 bp, Probe sequence
ctttttgagcattataggcggtatg

SEQ ID NO: 138961 - DNA, 25 bp, Probe sequence
ctgatttctttttgagcattatagg

SEQ ID NO: 138962 - DNA, 25 bp, Probe sequence
cgtagtgtgttccactgctgatttc

SEQ ID NO: 138963 - DNA, 25 bp, Probe sequence
ccactgctgatttctttttgagcat

SEQ ID NO: 138964 - DNA, 25 bp, Probe sequence
gcattataggcggtatgttggaaga

SEQ ID NO: 138965 - DNA, 25 bp, Probe sequence
gaagatatgagtttttttaagcgga

SEQ ID NO: 138966 - DNA, 25 bp, Probe sequence
gaacgtagtgtgttccactgctgat

SEQ ID NO: 138967 - DNA, 25 bp, Probe sequence
gatatgagtttttttaagcggattc

SEQ ID NO: 138968 - DNA, 25 bp, Probe sequence
gatttctttttgagcattataggcg

SEQ ID NO: 138969 - DNA, 25 bp, Probe sequence
gttccactgctgatttctttttgag

SEQ ID NO: 138970 - DNA, 25 bp, Probe sequence
gggaacgtagtgtgttccactgctg

SEQ ID NO: 138971 - DNA, 25 bp, Probe sequence
gtagtgtgttccactgctgatttct

SEQ ID NO: 138972 - DNA, 25 bp, Probe sequence
ggtagggaacgtagtgtgttccact

SEQ ID NO: 138973 - DNA, 25 bp, Probe sequence
tgttccactgctgatttctttttga

SEQ ID NO: 138974 - DNA, 25 bp, Probe sequence
tgagtttttttaagcggattcctca

SEQ ID NO: 138975 - DNA, 25 bp, Probe sequence
tgagcattataggcggtatgttgga

SEQ ID NO: 138976 - DNA, 25 bp, Probe sequence
tccactgctgatttctttttgagca

SEQ ID NO: 138977 - DNA, 25 bp, Probe sequence
taagcggattcctcacaaaatttta

SEQ ID NO: 138978 - DNA, 25 bp, Probe sequence
tataggcggtatgttggaagaaaag

SEQ ID NO: 138979 - DNA, 25 bp, Probe sequence
taagcctgaaaatgataaagcggta

SEQ ID NO: 138980 - DNA, 25 bp, Probe sequence
taaagcggtagggaacgtagtgtgt

SEQ ID NO: 138981 - DNA, 25 bp, Probe sequence
tagggaacgtagtgtgttccactgc

SEQ ID NO: 138982 - DNA, 25 bp, Probe sequence
taggcggtatgttggaagaaaagaa

SEQ ID NO: 138983 - DNA, 25 bp, Probe sequence
tagtgtgttccactgctgatttctt

SEQ ID NO: 138984 - DNA, 25 bp, Probe sequence
tatgagtttttttaagcggattcct

SEQ ID NO: 138985 - DNA, 25 bp, Probe sequence
ttttaagcggattcctcacaaaatt

SEQ ID NO: 138986 - DNA, 25 bp, Probe sequence
tttttaagcggattcctcacaaaat

SEQ ID NO: 138987 - DNA, 25 bp, Probe sequence
ttctttttgagcattataggcggta

SEQ ID NO: 138988 - DNA, 25 bp, Probe sequence
ttccactgctgatttctttttgagc

SEQ ID NO: 138989 - DNA, 25 bp, Probe sequence
aggaattatcctttactagcacgta

SEQ ID NO: 138990 - DNA, 25 bp, Probe sequence
atattgcagcagctgttggcgtatc

SEQ ID NO: 138991 - DNA, 25 bp, Probe sequence
atgagcgtttatttagtcgtgaaga

SEQ ID NO: 138992 - DNA, 25 bp, Probe sequence
atgggaccggaattacgtcagtatt

SEQ ID NO: 138993 - DNA, 25 bp, Probe sequence
agctctacctattgtgtctggcatg

SEQ ID NO: 138994 - DNA, 25 bp, Probe sequence
agcgggcacttggatgaatacaggt

SEQ ID NO: 138995 - DNA, 25 bp, Probe sequence
acgtttcttacagtcatgcaattta

SEQ ID NO: 138996 - DNA, 25 bp, Probe sequence
actcgtggtggtcatatggaagctg

SEQ ID NO: 138997 - DNA, 25 bp, Probe sequence
acaaggtgctaagactcgtggtggt

SEQ ID NO: 138998 - DNA, 25 bp, Probe sequence
aactctcgtatgaccagcttcggta

SEQ ID NO: 138999 - DNA, 25 bp, Probe sequence
aagatggtgttggcttaccgctatt

SEQ ID NO: 139000 - DNA, 25 bp, Probe sequence
aagtatccaagctttattacgattg

SEQ ID NO: 139001 - DNA, 25 bp, Probe sequence
aaggtctagctaaagcgggcacttg

SEQ ID NO: 139002 - DNA, 25 bp, Probe sequence
aattgcgattgcactaggtttaggt

SEQ ID NO: 139003 - DNA, 25 bp, Probe sequence
caatcaattcacctaaccgttacga

SEQ ID NO: 139004 - DNA, 25 bp, Probe sequence
cagaaattactgctgatcatattgt

SEQ ID NO: 139005 - DNA, 25 bp, Probe sequence
cgcgcatttgagctgaagttggcac

SEQ ID NO: 139006 - DNA, 25 bp, Probe sequence
cgtcagtatttattttctggggata

SEQ ID NO: 139007 - DNA, 25 bp, Probe sequence
gcggcatctggtaagttagtgacac

SEQ ID NO: 139008 - DNA, 25 bp, Probe sequence
gctgaagatttgattcgtttcgtcg

SEQ ID NO: 139009 - DNA, 25 bp, Probe sequence
gcttaccgctatttacagctctacc

SEQ ID NO: 139010 - DNA, 25 bp, Probe sequence
gaaggcttattcaatattgcagcag

SEQ ID NO: 139011 - DNA, 25 bp, Probe sequence
gaaggtggcttatcagaatatcatt

SEQ ID NO: 139012 - DNA, 25 bp, Probe sequence
gaacacaatgtttccgatgcaacgt

SEQ ID NO: 139013 - DNA, 25 bp, Probe sequence
gaaaagcaatatcgtgtcacaaact

SEQ ID NO: 139014 - DNA, 25 bp, Probe sequence
gaaacacttgtacgtacgatggtgg

SEQ ID NO: 139015 - DNA, 25 bp, Probe sequence
gacggcttttacatacagaacacaa

SEQ ID NO: 139016 - DNA, 25 bp, Probe sequence
gaccagcttcggtactactaaagat

SEQ ID NO: 139017 - DNA, 25 bp, Probe sequence
gattgatccgtattacttaagtgat

SEQ ID NO: 139018 - DNA, 25 bp, Probe sequence
gtggtactggtgcaacattccaaga

SEQ ID NO: 139019 - DNA, 25 bp, Probe sequence
ggtggtgaaggtggtactggtgcaa

SEQ ID NO: 139020 - DNA, 25 bp, Probe sequence
tcccggtttatttggtgttcgtgat

SEQ ID NO: 139021 - DNA, 25 bp, Probe sequence
tcgtttcgtcgatcagttgcagcaa

SEQ ID NO: 139022 - DNA, 25 bp, Probe sequence
ttggctggaaaatataactctcgta

SEQ ID NO: 139023 - DNA, 25 bp, Probe sequence
atgccgtttaacgctgtaactgttt

SEQ ID NO: 139024 - DNA, 25 bp, Probe sequence
acaaattattgctcgtgtcggtccc

SEQ ID NO: 139025 - DNA, 25 bp, Probe sequence
agtgagtttaggattcgcgaatgcg

SEQ ID NO: 139026 - DNA, 25 bp, Probe sequence
acggcattcttttctatgtctttac

SEQ ID NO: 139027 - DNA, 25 bp, Probe sequence
aaggtgcaatggcttggcccttttt

SEQ ID NO: 139028 - DNA, 25 bp, Probe sequence
cattccgtcagatggtatgtggcat

SEQ ID NO: 139029 - DNA, 25 bp, Probe sequence
cgagggcatgatttaggcgcaacga

SEQ ID NO: 139030 - DNA, 25 bp, Probe sequence
gcgaatgcgggaatctttttgacaa

SEQ ID NO: 139031 - DNA, 25 bp, Probe sequence
gcatttggtccgcaagtaggtgcaa

SEQ ID NO: 139032 - DNA, 25 bp, Probe sequence
gcagacttaggtatatcgttaggtg

SEQ ID NO: 139033 - DNA, 25 bp, Probe sequence
gcaaggtgtgtgtacggcattcttt

SEQ ID NO: 139034 - DNA, 25 bp, Probe sequence
gcaattgtcattatctttatcgcat

SEQ ID NO: 139035 - DNA, 25 bp, Probe sequence
gaaggtgtatcattgtactcgctat

SEQ ID NO: 139036 - DNA, 25 bp, Probe sequence
gaacaggaacccgatacgtcagata

SEQ ID NO: 139037 - DNA, 25 bp, Probe sequence
gacaatacaggccatcgcagttgtt

SEQ ID NO: 139038 - DNA, 25 bp, Probe sequence
gatgggacctatttccgatttagta

SEQ ID NO: 139039 - DNA, 25 bp, Probe sequence
gattgttgcatcgattgtatttggt

SEQ ID NO: 139040 - DNA, 25 bp, Probe sequence
gttatcggtatcgttatgggggcat

SEQ ID NO: 139041 - DNA, 25 bp, Probe sequence
gtacatttgtaccgttatacacagt

SEQ ID NO: 139042 - DNA, 25 bp, Probe sequence
gtactcgctattttcaacgattcca

SEQ ID NO: 139043 - DNA, 25 bp, Probe sequence
gtaactgtttttgcgcaatttttca

SEQ ID NO: 139044 - DNA, 25 bp, Probe sequence
gggggcatacatgttaacagcaatg

SEQ ID NO: 139045 - DNA, 25 bp, Probe sequence
ggtgtacccaacattaacatcatac

SEQ ID NO: 139046 - DNA, 25 bp, Probe sequence
ggtttatttattgcctgtgcagact

SEQ ID NO: 139047 - DNA, 25 bp, Probe sequence
ggttatttcgtagcacgtgttatgc

SEQ ID NO: 139048 - DNA, 25 bp, Probe sequence
ggaccattagttgccgtaggtattt

SEQ ID NO: 139049 - DNA, 25 bp, Probe sequence
ggaacatcgttctgaaggtgtatca

SEQ ID NO: 139050 - DNA, 25 bp, Probe sequence
ggcttggccctttttgagattatat

SEQ ID NO: 139051 - DNA, 25 bp, Probe sequence
ggcgcaacgaatacggttatcggta

SEQ ID NO: 139052 - DNA, 25 bp, Probe sequence
tgatgttctttagtgccaatgcaat

SEQ ID NO: 139053 - DNA, 25 bp, Probe sequence
tcgttaggtggcgcattgatgggac

SEQ ID NO: 139054 - DNA, 25 bp, Probe sequence
tatcgcattaacaacaacattcttt

SEQ ID NO: 139055 - DNA, 25 bp, Probe sequence
tatcgcgtgacctttgctgaacagg

SEQ ID NO: 139056 - DNA, 25 bp, Probe sequence
tttcgaccatgggcaggacaaatta

SEQ ID NO: 139057 - DNA, 25 bp, Probe sequence
atatcctaatatgttatcaggtgga

SEQ ID NO: 139058 - DNA, 25 bp, Probe sequence
agacgtcatcaaattggtgctgtat

SEQ ID NO: 139059 - DNA, 25 bp, Probe sequence
aagtgacaatgcttatacaagagaa

SEQ ID NO: 139060 - DNA, 25 bp, Probe sequence
aattccgacaagcgcattgcataaa

SEQ ID NO: 139061 - DNA, 25 bp, Probe sequence
aattggtgctgtatttcaagattat

SEQ ID NO: 139062 - DNA, 25 bp, Probe sequence
caagcgcattgcataaaagtgacaa

SEQ ID NO: 139063 - DNA, 25 bp, Probe sequence
cacatgatattcaagctgccacgta

SEQ ID NO: 139064 - DNA, 25 bp, Probe sequence
ctcgacatgtcaattcaaacacaaa

SEQ ID NO: 139065 - DNA, 25 bp, Probe sequence
gccattagttcactcgacatgtcaa

SEQ ID NO: 139066 - DNA, 25 bp, Probe sequence
gctgccacgtatttatgtgatcaat

SEQ ID NO: 139067 - DNA, 25 bp, Probe sequence
gcacatgtttttaagcgtcgtcgaa

SEQ ID NO: 139068 - DNA, 25 bp, Probe sequence
gcaatatgtattaaccctaaatata

SEQ ID NO: 139069 - DNA, 25 bp, Probe sequence
gaagccattagttcactcgacatgt

SEQ ID NO: 139070 - DNA, 25 bp, Probe sequence
gaacaaattccgacaagcgcattgc

SEQ ID NO: 139071 - DNA, 25 bp, Probe sequence
gaaacgcgtcagttgagttatattt

SEQ ID NO: 139072 - DNA, 25 bp, Probe sequence
gaaaggtgtgtcatttgagtgtcca

SEQ ID NO: 139073 - DNA, 25 bp, Probe sequence
gaaatcttatttgaagtgatgtgtc

SEQ ID NO: 139074 - DNA, 25 bp, Probe sequence
gagttatatttttatcacacatgat

SEQ ID NO: 139075 - DNA, 25 bp, Probe sequence
gagtcgtatgatattaggtattgag

SEQ ID NO: 139076 - DNA, 25 bp, Probe sequence
gatgtgtcaatgtgatggacaacct

SEQ ID NO: 139077 - DNA, 25 bp, Probe sequence
gatattcaagctgccacgtatttat

SEQ ID NO: 139078 - DNA, 25 bp, Probe sequence
gattcatttacgtgaaacgcgtcag

SEQ ID NO: 139079 - DNA, 25 bp, Probe sequence
gttcactcgacatgtcaattcaaac

SEQ ID NO: 139080 - DNA, 25 bp, Probe sequence
gtcatttgagtgtccaatcggtgcg

SEQ ID NO: 139081 - DNA, 25 bp, Probe sequence
gtcgtcgaacacctatcgtgaaagg

SEQ ID NO: 139082 - DNA, 25 bp, Probe sequence
ggtctatctaaggcatacatggata

SEQ ID NO: 139083 - DNA, 25 bp, Probe sequence
ggtgcgacgattgcgattatcggag

SEQ ID NO: 139084 - DNA, 25 bp, Probe sequence
ttaagcgtcgtcgaacacctatcgt

SEQ ID NO: 139085 - DNA, 25 bp, Probe sequence
tcatatcaaagcgcacatgttttta

SEQ ID NO: 139086 - DNA, 25 bp, Probe sequence
tagatttattgattcatttacgtga

SEQ ID NO: 139087 - DNA, 25 bp, Probe sequence
tatattttgtttgatgaagccatta

SEQ ID NO: 139088 - DNA, 25 bp, Probe sequence
ttatcggagaaagtggtagcggtaa

SEQ ID NO: 139089 - DNA, 25 bp, Probe sequence
ttgagtgtccaatcggtgcgacgat

SEQ ID NO: 139090 - DNA, 25 bp, Probe sequence
ttcaagattatacgtcatcattaca

SEQ ID NO: 139091 - DNA, 25 bp, Probe sequence
atttcacatgatttaacggttatta

SEQ ID NO: 139092 - DNA, 25 bp, Probe sequence
atacccttacatgttatcaggagga

SEQ ID NO: 139093 - DNA, 25 bp, Probe sequence
acggctttagatacaattacacaat

SEQ ID NO: 139094 - DNA, 25 bp, Probe sequence
actcgtgagtgatgtgaattttaca

SEQ ID NO: 139095 - DNA, 25 bp, Probe sequence
aaatcatacccttacatgttatcag

SEQ ID NO: 139096 - DNA, 25 bp, Probe sequence
aaaacactttgactgtgcgatgatt

SEQ ID NO: 139097 - DNA, 25 bp, Probe sequence
aagattgcagaccgtgttgttgtga

SEQ ID NO: 139098 - DNA, 25 bp, Probe sequence
cagtcttgcatcatccagaacatgt

SEQ ID NO: 139099 - DNA, 25 bp, Probe sequence
catacgtcaatgtctacacaagaaa

SEQ ID NO: 139100 - DNA, 25 bp, Probe sequence
catttgacgattacagatacctgga

SEQ ID NO: 139101 - DNA, 25 bp, Probe sequence
cgtgaatcagtcttgcatcatccag

SEQ ID NO: 139102 - DNA, 25 bp, Probe sequence
ccatcaactactgtcggtaaacaaa

SEQ ID NO: 139103 - DNA, 25 bp, Probe sequence
gccgacaacggctttagatacaatt

SEQ ID NO: 139104 - DNA, 25 bp, Probe sequence
gcgattgatgattgctttagcgtta

SEQ ID NO: 139105 - DNA, 25 bp, Probe sequence
gcgatggtcatgcaacaaggtagtc

SEQ ID NO: 139106 - DNA, 25 bp, Probe sequence
gctttagcgttagctttgaaaccaa

SEQ ID NO: 139107 - DNA, 25 bp, Probe sequence
gcatcatccagaacatgtttatacg

SEQ ID NO: 139108 - DNA, 25 bp, Probe sequence
gcagaccgtgttgttgtgatgaaaa

SEQ ID NO: 139109 - DNA, 25 bp, Probe sequence
gaatgttacagcgattgatgattgc

SEQ ID NO: 139110 - DNA, 25 bp, Probe sequence
gaatcagtcttgcatcatccagaac

SEQ ID NO: 139111 - DNA, 25 bp, Probe sequence
gaaagtacatacgtcaatgtctaca

SEQ ID NO: 139112 - DNA, 25 bp, Probe sequence
gactgtgcgatgattttcatttcac

SEQ ID NO: 139113 - DNA, 25 bp, Probe sequence
gatgtactggaagcatttatagata

SEQ ID NO: 139114 - DNA, 25 bp, Probe sequence
gatgattgctttagcgttagctttg

SEQ ID NO: 139115 - DNA, 25 bp, Probe sequence
gatacctggacagatcaaccactcg

SEQ ID NO: 139116 - DNA, 25 bp, Probe sequence
gttatcaggaggaatgttacagcga

SEQ ID NO: 139117 - DNA, 25 bp, Probe sequence
gtgaattttacattaactaagggtg

SEQ ID NO: 139118 - DNA, 25 bp, Probe sequence
gtgcgatgattttcatttcacatga

SEQ ID NO: 139119 - DNA, 25 bp, Probe sequence
gtgatgaggggtgatgtacatgatt

SEQ ID NO: 139120 - DNA, 25 bp, Probe sequence
ggtgaaactttaggcgttattggag

SEQ ID NO: 139121 - DNA, 25 bp, Probe sequence
ggacagatcaaccactcgtgagtga

SEQ ID NO: 139122 - DNA, 25 bp, Probe sequence
tgcaacaaggtagtcgtgcctttga

SEQ ID NO: 139123 - DNA, 25 bp, Probe sequence
tcattgctgatgagccgacaacggc

SEQ ID NO: 139124 - DNA, 25 bp, Probe sequence
taggcgttattggagaaagtggtag

SEQ ID NO: 139125 - DNA, 25 bp, Probe sequence
atttccgtatcacttactatgacaa

SEQ ID NO: 139126 - DNA, 25 bp, Probe sequence
atagactggtattcagcacgtcgaa

SEQ ID NO: 139127 - DNA, 25 bp, Probe sequence
ataccaataaccatttgctacctta

SEQ ID NO: 139128 - DNA, 25 bp, Probe sequence
atcacggtgaagtgacagcccctaa

SEQ ID NO: 139129 - DNA, 25 bp, Probe sequence
atcccacaacatatataaagacgct

SEQ ID NO: 139130 - DNA, 25 bp, Probe sequence
atgacaaaagcaatactcgtaagta

SEQ ID NO: 139131 - DNA, 25 bp, Probe sequence
atggcgcgatattaactttgatgat

SEQ ID NO: 139132 - DNA, 25 bp, Probe sequence
agtcggacaccttaatagattacct

SEQ ID NO: 139133 - DNA, 25 bp, Probe sequence
agacgctaaacttggcacttactat

SEQ ID NO: 139134 - DNA, 25 bp, Probe sequence
agcacgtcgaaagacatcaagtgta

SEQ ID NO: 139135 - DNA, 25 bp, Probe sequence
agctctcacatggcgcgatattaac

SEQ ID NO: 139136 - DNA, 25 bp, Probe sequence
acctactcacatgatgtatgacatc

SEQ ID NO: 139137 - DNA, 25 bp, Probe sequence
actttgatgatgactttatccatat

SEQ ID NO: 139138 - DNA, 25 bp, Probe sequence
aaatgttgcatctcttgtagggaat

SEQ ID NO: 139139 - DNA, 25 bp, Probe sequence
aaagggcgaaattagagctctcaca

SEQ ID NO: 139140 - DNA, 25 bp, Probe sequence
aaagcattaaagacacataccaata

SEQ ID NO: 139141 - DNA, 25 bp, Probe sequence
gaattagagggagtcggacacctta

SEQ ID NO: 139142 - DNA, 25 bp, Probe sequence
caatcaattctatgaggcgcttgct

SEQ ID NO: 139143 - DNA, 25 bp, Probe sequence
caaactattgttctactctggagca

SEQ ID NO: 139144 - DNA, 25 bp, Probe sequence
cagcccctaaaacgaaatcagccat

SEQ ID NO: 139145 - DNA, 25 bp, Probe sequence
gcatctcttgtagggaattttgaaa

SEQ ID NO: 139146 - DNA, 25 bp, Probe sequence
gaaatcagccatacgtgatatatat

SEQ ID NO: 139147 - DNA, 25 bp, Probe sequence
gagggacattctggagactacttaa

SEQ ID NO: 139148 - DNA, 25 bp, Probe sequence
gatatatatttacctactcacatga

SEQ ID NO: 139149 - DNA, 25 bp, Probe sequence
gattaccttttgacaagctcgttga

SEQ ID NO: 139150 - DNA, 25 bp, Probe sequence
ggcacttactatttccgtatcactt

SEQ ID NO: 139151 - DNA, 25 bp, Probe sequence
ggcgcttgctacacaacaacaaaaa

SEQ ID NO: 139152 - DNA, 25 bp, Probe sequence
tgctaccttattttaaatctatgga

SEQ ID NO: 139153 - DNA, 25 bp, Probe sequence
tctactctggagcaagaaagggcga

SEQ ID NO: 139154 - DNA, 25 bp, Probe sequence
taacttaaacttatcccacaacata

SEQ ID NO: 139155 - DNA, 25 bp, Probe sequence
taaacaaaacagactatcacggtga

SEQ ID NO: 139156 - DNA, 25 bp, Probe sequence
tagtatcattactgaatcatgcaat

SEQ ID NO: 139157 - DNA, 25 bp, Probe sequence
tatgaggcgcttgctacacaacaac

SEQ ID NO: 139158 - DNA, 25 bp, Probe sequence
ttggacgttagaacaattcaatcaa

SEQ ID NO: 139159 - DNA, 25 bp, Probe sequence
atatacggtgattttctagggttgt

SEQ ID NO: 139160 - DNA, 25 bp, Probe sequence
atatgtgtgctaacaatagttttct

SEQ ID NO: 139161 - DNA, 25 bp, Probe sequence
atcaaagaacaataaatgcgcaaga

SEQ ID NO: 139162 - DNA, 25 bp, Probe sequence
atcatcttcagtttctcgttttata

SEQ ID NO: 139163 - DNA, 25 bp, Probe sequence
agtagttgactattatgaagattca

SEQ ID NO: 139164 - DNA, 25 bp, Probe sequence
acatatttcgcttatcaaagaacaa

SEQ ID NO: 139165 - DNA, 25 bp, Probe sequence
aaagctcataaatctattgtttcaa

SEQ ID NO: 139166 - DNA, 25 bp, Probe sequence
aatgcgcaagaattagtagttgact

SEQ ID NO: 139167 - DNA, 25 bp, Probe sequence
aattccttacgacaatatctaacaa

SEQ ID NO: 139168 - DNA, 25 bp, Probe sequence
caaatactttgatctattagaatac

SEQ ID NO: 139169 - DNA, 25 bp, Probe sequence
catcttcagtttctcgttttatatt

SEQ ID NO: 139170 - DNA, 25 bp, Probe sequence
cgacaatatctaacaaatactttga

SEQ ID NO: 139171 - DNA, 25 bp, Probe sequence
gcatcgatgaattccttacgacaat

SEQ ID NO: 139172 - DNA, 25 bp, Probe sequence
gaattatcatcttcagtttctcgtt

SEQ ID NO: 139173 - DNA, 25 bp, Probe sequence
gaatacattgatgactatagagtta

SEQ ID NO: 139174 - DNA, 25 bp, Probe sequence
gaatctttaacatatttcgcttatc

SEQ ID NO: 139175 - DNA, 25 bp, Probe sequence
gaaaaattcacacataaagctcata

SEQ ID NO: 139176 - DNA, 25 bp, Probe sequence
gaaatagagatcttgaatctttaac

SEQ ID NO: 139177 - DNA, 25 bp, Probe sequence
gagcatcgatgaattccttacgaca

SEQ ID NO: 139178 - DNA, 25 bp, Probe sequence
gagttaaacatgatctagagaaaat

SEQ ID NO: 139179 - DNA, 25 bp, Probe sequence
gatgagagcatcgatgaattcctta

SEQ ID NO: 139180 - DNA, 25 bp, Probe sequence
gatgaattccttacgacaatatcta

SEQ ID NO: 139181 - DNA, 25 bp, Probe sequence
gttacaacattatttacaattagaa

SEQ ID NO: 139182 - DNA, 25 bp, Probe sequence
gttagggaatataagtgtacatcaa

SEQ ID NO: 139183 - DNA, 25 bp, Probe sequence
gttttctagctaatgaattatcatc

SEQ ID NO: 139184 - DNA, 25 bp, Probe sequence
gtgtacatcaattaatatacggtga

SEQ ID NO: 139185 - DNA, 25 bp, Probe sequence
gtgtgctaacaatagttttctagct

SEQ ID NO: 139186 - DNA, 25 bp, Probe sequence
gggttgttagaaagtattgcaaacg

SEQ ID NO: 139187 - DNA, 25 bp, Probe sequence
ggctaacaaaaccaagtaatgaaag

SEQ ID NO: 139188 - DNA, 25 bp, Probe sequence
tctcgttttatattttcctattatg

SEQ ID NO: 139189 - DNA, 25 bp, Probe sequence
tctttaacatatttcgcttatcaaa

SEQ ID NO: 139190 - DNA, 25 bp, Probe sequence
taaatctattgtttcaaaatgggaa

SEQ ID NO: 139191 - DNA, 25 bp, Probe sequence
tacggtgattttctagggttgttag

SEQ ID NO: 139192 - DNA, 25 bp, Probe sequence
ttatcatcttcagtttctcgtttta

SEQ ID NO: 139193 - DNA, 25 bp, Probe sequence
atttatgcgattagaccaagtttgt

SEQ ID NO: 139194 - DNA, 25 bp, Probe sequence
atctggcttttcatttttaggatta

SEQ ID NO: 139195 - DNA, 25 bp, Probe sequence
atcttgcaaatatctggcttttcat

SEQ ID NO: 139196 - DNA, 25 bp, Probe sequence
atccccgcatctcttctaaagataa

SEQ ID NO: 139197 - DNA, 25 bp, Probe sequence
atgcgtgcgtgtgatgttatgttgg

SEQ ID NO: 139198 - DNA, 25 bp, Probe sequence
agttttcaacatctactaggtactg

SEQ ID NO: 139199 - DNA, 25 bp, Probe sequence
atgcagtacactgcttctgaccatg

SEQ ID NO: 139200 - DNA, 25 bp, Probe sequence
atgttgtaacgttagcattaattgc

SEQ ID NO: 139201 - DNA, 25 bp, Probe sequence
atgggtgccgaaaatattatcatgg

SEQ ID NO: 139202 - DNA, 25 bp, Probe sequence
atggcatttaacttcttatccgatg

SEQ ID NO: 139203 - DNA, 25 bp, Probe sequence
agcagatattgctatcatctctagt

SEQ ID NO: 139204 - DNA, 25 bp, Probe sequence
acttcttatccgatgctttacaaat

SEQ ID NO: 139205 - DNA, 25 bp, Probe sequence
aatgatgtttgcgccaggtattgcc

SEQ ID NO: 139206 - DNA, 25 bp, Probe sequence
catggcatttattttgacgcgttgg

SEQ ID NO: 139207 - DNA, 25 bp, Probe sequence
cttgtgacattttatgatcctaacc

SEQ ID NO: 139208 - DNA, 25 bp, Probe sequence
gcgcctactgcagagtggggcatga

SEQ ID NO: 139209 - DNA, 25 bp, Probe sequence
gaccaagtttgttatatgtctttgt

SEQ ID NO: 139210 - DNA, 25 bp, Probe sequence
gatcctaaccatatcgatacagcaa

SEQ ID NO: 139211 - DNA, 25 bp, Probe sequence
gattaggtgtcaaagcgcctactgc

SEQ ID NO: 139212 - DNA, 25 bp, Probe sequence
gttgacgccttaatcatgcgtgcgt

SEQ ID NO: 139213 - DNA, 25 bp, Probe sequence
gtttctgtacttattggatctattt

SEQ ID NO: 139214 - DNA, 25 bp, Probe sequence
gtgtgatgttatgttggcattccca

SEQ ID NO: 139215 - DNA, 25 bp, Probe sequence
ggggcatgatgcttaacgaagctag

SEQ ID NO: 139216 - DNA, 25 bp, Probe sequence
ggattagcagcaccacttgtgacat

SEQ ID NO: 139217 - DNA, 25 bp, Probe sequence
ggattcttatcaggatatttccaag

SEQ ID NO: 139218 - DNA, 25 bp, Probe sequence
ggatctattttaggattcttatcag

SEQ ID NO: 139219 - DNA, 25 bp, Probe sequence
tggcattcccaagttatgttgtaac

SEQ ID NO: 139220 - DNA, 25 bp, Probe sequence
tgcgccaggtattgccatagtgatt

SEQ ID NO: 139221 - DNA, 25 bp, Probe sequence
tcgatgtgttcaatgatcttgcaaa

SEQ ID NO: 139222 - DNA, 25 bp, Probe sequence
taaagataaacttcgttctgtgaaa

SEQ ID NO: 139223 - DNA, 25 bp, Probe sequence
tactaggtactgaccatttaggtag

SEQ ID NO: 139224 - DNA, 25 bp, Probe sequence
tatttccaagggtttgttgacgcct

SEQ ID NO: 139225 - DNA, 25 bp, Probe sequence
tattgtattatatgtctttttagga

SEQ ID NO: 139226 - DNA, 25 bp, Probe sequence
ttgacgcgttgggcatggttctgtc

SEQ ID NO: 139227 - DNA, 25 bp, Probe sequence
attggatcattcccacaaagccgag

SEQ ID NO: 139228 - DNA, 25 bp, Probe sequence
attctgggtaaaccctgactgtggt

SEQ ID NO: 139229 - DNA, 25 bp, Probe sequence
ataaagaccatgttgcaagtgcact

SEQ ID NO: 139230 - DNA, 25 bp, Probe sequence
atcaccattcgcgcaacgtattgaa

SEQ ID NO: 139231 - DNA, 25 bp, Probe sequence
atcacttagatagcatcccagttgg

SEQ ID NO: 139232 - DNA, 25 bp, Probe sequence
aaacttgcaacgtcttcagttcgtg

SEQ ID NO: 139233 - DNA, 25 bp, Probe sequence
aaaagcacgttatgagcgtttccaa

SEQ ID NO: 139234 - DNA, 25 bp, Probe sequence
aagttatccaagttgacgaacctgc

SEQ ID NO: 139235 - DNA, 25 bp, Probe sequence
aatcgaccgctcattattctgggta

SEQ ID NO: 139236 - DNA, 25 bp, Probe sequence
aattagatgcattgcgtcgcctatt

SEQ ID NO: 139237 - DNA, 25 bp, Probe sequence
cactaactatcattacatcgtacct

SEQ ID NO: 139238 - DNA, 25 bp, Probe sequence
ctacagcaatcaatcgttcactaca

SEQ ID NO: 139239 - DNA, 25 bp, Probe sequence
cgtgaaggcttaccattacgctctg

SEQ ID NO: 139240 - DNA, 25 bp, Probe sequence
gcgtacttcaagacaatcaccattc

SEQ ID NO: 139241 - DNA, 25 bp, Probe sequence
gaaggcttaagctttgcaactgaaa

SEQ ID NO: 139242 - DNA, 25 bp, Probe sequence
gaacgtgcacatcttaaattcttaa

SEQ ID NO: 139243 - DNA, 25 bp, Probe sequence
gaaacatctcgtagccatggtgatt

SEQ ID NO: 139244 - DNA, 25 bp, Probe sequence
gacgaacctgcattacgtgaaggct

SEQ ID NO: 139245 - DNA, 25 bp, Probe sequence
gagccaatcttagttacagacgaca

SEQ ID NO: 139246 - DNA, 25 bp, Probe sequence
gagcctaaagtgagtcgcaatgtat

SEQ ID NO: 139247 - DNA, 25 bp, Probe sequence
gagcgtttccaaaatcaatcattca

SEQ ID NO: 139248 - DNA, 25 bp, Probe sequence
gatttcgaaagcgtgcgtacttcaa

SEQ ID NO: 139249 - DNA, 25 bp, Probe sequence
gttcactacaacaaatcgaccgctc

SEQ ID NO: 139250 - DNA, 25 bp, Probe sequence
gtcattcaaccatcatcttcattat

SEQ ID NO: 139251 - DNA, 25 bp, Probe sequence
ggttgggtgcaatcatatggttcac

SEQ ID NO: 139252 - DNA, 25 bp, Probe sequence
ggacagcgcctttaactgttgatga

SEQ ID NO: 139253 - DNA, 25 bp, Probe sequence
ggcttagatgtattagttcacggtg

SEQ ID NO: 139254 - DNA, 25 bp, Probe sequence
tcccagttggtgatttctctttata

SEQ ID NO: 139255 - DNA, 25 bp, Probe sequence
tcttaagttctttacctgttggtgg

SEQ ID NO: 139256 - DNA, 25 bp, Probe sequence
taccggatttaccaacaacaactat

SEQ ID NO: 139257 - DNA, 25 bp, Probe sequence
taccattacgctctgaatatcacga

SEQ ID NO: 139258 - DNA, 25 bp, Probe sequence
tatgtgttattctcaattcggtcaa

SEQ ID NO: 139259 - DNA, 25 bp, Probe sequence
tattcatagtccacgtattccaaca

SEQ ID NO: 139260 - DNA, 25 bp, Probe sequence
ttcggtcaaatcattcatgctattc

SEQ ID NO: 139261 - DNA, 25 bp, Probe sequence
attaatgttgcatgtgttgcgtaat

SEQ ID NO: 139262 - DNA, 25 bp, Probe sequence
atattgccgacttctggattaacag

SEQ ID NO: 139263 - DNA, 25 bp, Probe sequence
atattgccagtgatcgttattacga

SEQ ID NO: 139264 - DNA, 25 bp, Probe sequence
atcgttattacgattgcctatgctg

SEQ ID NO: 139265 - DNA, 25 bp, Probe sequence
agagcaagcggtgtgaaatctatca

SEQ ID NO: 139266 - DNA, 25 bp, Probe sequence
agcagatatcattaatgcgctatta

SEQ ID NO: 139267 - DNA, 25 bp, Probe sequence
acgccaaatgtaacaccagagttga

SEQ ID NO: 139268 - DNA, 25 bp, Probe sequence
aaacgtattgcgctcatgtttccat

SEQ ID NO: 139269 - DNA, 25 bp, Probe sequence
aacaccagagttgattgcagaaacg

SEQ ID NO: 139270 - DNA, 25 bp, Probe sequence
aagcatatgtattaattgtagcggt

SEQ ID NO: 139271 - DNA, 25 bp, Probe sequence
aagattaagggagggcgcacgatga

SEQ ID NO: 139272 - DNA, 25 bp, Probe sequence
aagtacggtttcaatgatccattat

SEQ ID NO: 139273 - DNA, 25 bp, Probe sequence
aatgggtggactagttgttatcgag

SEQ ID NO: 139274 - DNA, 25 bp, Probe sequence
caatcttttgtatgtctataccaat

SEQ ID NO: 139275 - DNA, 25 bp, Probe sequence
caaatgaaaatccagctgtgacaat

SEQ ID NO: 139276 - DNA, 25 bp, Probe sequence
gaaagttacatattgccagtgatcg

SEQ ID NO: 139277 - DNA, 25 bp, Probe sequence
gaaatgttagacgctcgatggtgga

SEQ ID NO: 139278 - DNA, 25 bp, Probe sequence
gacatttctattgacgtatattaca

SEQ ID NO: 139279 - DNA, 25 bp, Probe sequence
gacgctcgatggtggaacaattaaa

SEQ ID NO: 139280 - DNA, 25 bp, Probe sequence
gaggaaagttcactgatcgtgcgat

SEQ ID NO: 139281 - DNA, 25 bp, Probe sequence
gatcgtgcgatacgttcagtggctt

SEQ ID NO: 139282 - DNA, 25 bp, Probe sequence
gatagcttcaatacttattatttac

SEQ ID NO: 139283 - DNA, 25 bp, Probe sequence
gttaaacatattgccgacttctgga

SEQ ID NO: 139284 - DNA, 25 bp, Probe sequence
gttttatgacatttctattgacgta

SEQ ID NO: 139285 - DNA, 25 bp, Probe sequence
gtagcggtattatttattgtattta

SEQ ID NO: 139286 - DNA, 25 bp, Probe sequence
tggttacttgaagcgatgcaattta

SEQ ID NO: 139287 - DNA, 25 bp, Probe sequence
tccagctgtgacaattttacatgca

SEQ ID NO: 139288 - DNA, 25 bp, Probe sequence
tcgagtatatctttgcatggcctgg

SEQ ID NO: 139289 - DNA, 25 bp, Probe sequence
taatgcgctattaaatccaagatta

SEQ ID NO: 139290 - DNA, 25 bp, Probe sequence
tacaagttgcggtatcaatcttttg

SEQ ID NO: 139291 - DNA, 25 bp, Probe sequence
tattttaggtgtagttagtgcatta

SEQ ID NO: 139292 - DNA, 25 bp, Probe sequence
ttattatttacgtttcagtgaagtt

SEQ ID NO: 139293 - DNA, 25 bp, Probe sequence
ttaccatcatattggatagcttcaa

SEQ ID NO: 139294 - DNA, 25 bp, Probe sequence
ttctaactgcattaccatcatattg

SEQ ID NO: 139295 - DNA, 25 bp, Probe sequence
agtatgatatacgagccgcttgtac

SEQ ID NO: 139296 - DNA, 25 bp, Probe sequence
agttaagcgtagtcaacctatgaat

SEQ ID NO: 139297 - DNA, 25 bp, Probe sequence
agcatatcaacctgcattggctgaa

SEQ ID NO: 139298 - DNA, 25 bp, Probe sequence
agcgattggtcatatggtaaacaga

SEQ ID NO: 139299 - DNA, 25 bp, Probe sequence
acgagccgcttgtacgtaacacgaa

SEQ ID NO: 139300 - DNA, 25 bp, Probe sequence
aaagttcgatggtactggtccattt

SEQ ID NO: 139301 - DNA, 25 bp, Probe sequence
acaatcacagtatgaattaccattc

SEQ ID NO: 139302 - DNA, 25 bp, Probe sequence
aaaaatgatcaatactggggcgaaa

SEQ ID NO: 139303 - DNA, 25 bp, Probe sequence
aaaagtaatgcctgctggtgaaaca

SEQ ID NO: 139304 - DNA, 25 bp, Probe sequence
aacaagcaattaacgtatacgacgg

SEQ ID NO: 139305 - DNA, 25 bp, Probe sequence
aacagtcagacaagcgattggtcat

SEQ ID NO: 139306 - DNA, 25 bp, Probe sequence
aacgtcgtacttctggtgattatga

SEQ ID NO: 139307 - DNA, 25 bp, Probe sequence
aagtgcaacatcaggcattgagaac

SEQ ID NO: 139308 - DNA, 25 bp, Probe sequence
aattgctgaacgtcgtacttctggt

SEQ ID NO: 139309 - DNA, 25 bp, Probe sequence
cacacggtagtatgacagttgttgc

SEQ ID NO: 139310 - DNA, 25 bp, Probe sequence
catttgatgctgacgcagttaagaa

SEQ ID NO: 139311 - DNA, 25 bp, Probe sequence
ctggtgaaacagcattcctatcaat

SEQ ID NO: 139312 - DNA, 25 bp, Probe sequence
cgatgcctcgtccatatgtatttgt

SEQ ID NO: 139313 - DNA, 25 bp, Probe sequence
gaaaaaccagcaactcaattatttg

SEQ ID NO: 139314 - DNA, 25 bp, Probe sequence
gacttaatgttcaaccaaacttggg

SEQ ID NO: 139315 - DNA, 25 bp, Probe sequence
gatccacaaagtactattgcagcat

SEQ ID NO: 139316 - DNA, 25 bp, Probe sequence
gatagcttagacaaagactctttaa

SEQ ID NO: 139317 - DNA, 25 bp, Probe sequence
tgaatccgcatgtttacggtggatc

SEQ ID NO: 139318 - DNA, 25 bp, Probe sequence
gtactatgacaaaggttcttcaagt

SEQ ID NO: 139319 - DNA, 25 bp, Probe sequence
gggctaattttaactggttgtggcg

SEQ ID NO: 139320 - DNA, 25 bp, Probe sequence
ggtactggtccatttaaattaggtg

SEQ ID NO: 139321 - DNA, 25 bp, Probe sequence
ggctgaattagcgatgcctcgtcca

SEQ ID NO: 139322 - DNA, 25 bp, Probe sequence
taactggttgtggcggtaataaagg

SEQ ID NO: 139323 - DNA, 25 bp, Probe sequence
tacaggtgactatcaagttaagcgt

SEQ ID NO: 139324 - DNA, 25 bp, Probe sequence
tacaacagcattgatgacgcattta

SEQ ID NO: 139325 - DNA, 25 bp, Probe sequence
tatgccaacacgtaagtatgacctt

SEQ ID NO: 139326 - DNA, 25 bp, Probe sequence
tttatccctatttcacacggtagta

SEQ ID NO: 139327 - DNA, 25 bp, Probe sequence
ttaatttcgatatgccaacacgtaa

SEQ ID NO: 139328 - DNA, 25 bp, Probe sequence
ttggggattattgtacgatccacaa

SEQ ID NO: 139329 - DNA, 25 bp, Probe sequence
attgatccattttcacagccagacg

SEQ ID NO: 139330 - DNA, 25 bp, Probe sequence
atcttacaagaatatctgctttatg

SEQ ID NO: 139331 - DNA, 25 bp, Probe sequence
atggttggacgtgcctcaacatcag

SEQ ID NO: 139332 - DNA, 25 bp, Probe sequence
agctgtaccatttaagcaagtctat

SEQ ID NO: 139333 - DNA, 25 bp, Probe sequence
acagccagacgaaaacggacattac

SEQ ID NO: 139334 - DNA, 25 bp, Probe sequence
acgaaacggttgtcatggcatgcac

SEQ ID NO: 139335 - DNA, 25 bp, Probe sequence
acggacattactttgatttttcagc

SEQ ID NO: 139336 - DNA, 25 bp, Probe sequence
acacactacagcaattgtcgttaga

SEQ ID NO: 139337 - DNA, 25 bp, Probe sequence
acaatgtgtcaacgaatctctgctt

SEQ ID NO: 139338 - DNA, 25 bp, Probe sequence
caacgaatctctgctttagctgagc

SEQ ID NO: 139339 - DNA, 25 bp, Probe sequence
ccgtcagtcaacctgcttcaattta

SEQ ID NO: 139340 - DNA, 25 bp, Probe sequence
gcagatgcttattatgacacactac

SEQ ID NO: 139341 - DNA, 25 bp, Probe sequence
gcaaagtgtcaaacatgtcatttta

SEQ ID NO: 139342 - DNA, 25 bp, Probe sequence
gaaaaatcaaaacgcttatatcaag

SEQ ID NO: 139343 - DNA, 25 bp, Probe sequence
gaaatcttgccagatatcttacaag

SEQ ID NO: 139344 - DNA, 25 bp, Probe sequence
gaaattgtacatgggatcgacacat

SEQ ID NO: 139345 - DNA, 25 bp, Probe sequence
gacttttcattgaaagccattttcg

SEQ ID NO: 139346 - DNA, 25 bp, Probe sequence
gacgtgcctcaacatcagaaaaatc

SEQ ID NO: 139347 - DNA, 25 bp, Probe sequence
gtcatggcatgcacagcagatgctt

SEQ ID NO: 139348 - DNA, 25 bp, Probe sequence
gaggcgcatcaacatctggaaggta

SEQ ID NO: 139349 - DNA, 25 bp, Probe sequence
gatgtaccggtttatgtgtataagt

SEQ ID NO: 139350 - DNA, 25 bp, Probe sequence
gatgttgttcaaattccaagaatgc

SEQ ID NO: 139351 - DNA, 25 bp, Probe sequence
gtcaaaatacaaaacgaggcgcatc

SEQ ID NO: 139352 - DNA, 25 bp, Probe sequence
ggaaaattatccagtacgtcctgaa

SEQ ID NO: 139353 - DNA, 25 bp, Probe sequence
gtgtataagttatttcctgaaggac

SEQ ID NO: 139354 - DNA, 25 bp, Probe sequence
gggatcgacacattcaaactcaaca

SEQ ID NO: 139355 - DNA, 25 bp, Probe sequence
tgagcatttcgaaatcttgccagat

SEQ ID NO: 139356 - DNA, 25 bp, Probe sequence
tcctgaaggaccgataacgatgaca

SEQ ID NO: 139357 - DNA, 25 bp, Probe sequence
tcagttcctaactcgctatgaagca

SEQ ID NO: 139358 - DNA, 25 bp, Probe sequence
tatccagtacgtcctgaaactttgg

SEQ ID NO: 139359 - DNA, 25 bp, Probe sequence
tcaacttatcttggcgatacacgta

SEQ ID NO: 139360 - DNA, 25 bp, Probe sequence
taatccgtgaaatgcgtttaatgtg

SEQ ID NO: 139361 - DNA, 25 bp, Probe sequence
tagaagtcgttgaatcgccactgca

SEQ ID NO: 139362 - DNA, 25 bp, Probe sequence
ttgatttttcagctgtaccatttaa

SEQ ID NO: 139363 - DNA, 25 bp, Probe sequence
attattgttagttggttcaggtgca

SEQ ID NO: 139364 - DNA, 25 bp, Probe sequence
atcatattcagctcgacaattcctt

SEQ ID NO: 139365 - DNA, 25 bp, Probe sequence
aggtgcttcagttatcggtattgat

SEQ ID NO: 139366 - DNA, 25 bp, Probe sequence
agacggacaggcgtctaccacaggt

SEQ ID NO: 139367 - DNA, 25 bp, Probe sequence
accacaggttactttgacaatatag

SEQ ID NO: 139368 - DNA, 25 bp, Probe sequence
aaatgtcgtagttgcaatgcgcttt

SEQ ID NO: 139369 - DNA, 25 bp, Probe sequence
aacatatgagaccacagcaaatttt

SEQ ID NO: 139370 - DNA, 25 bp, Probe sequence
aatcactgcaatatattacagcgca

SEQ ID NO: 139371 - DNA, 25 bp, Probe sequence
gcggaagataagtggcaatgtgtga

SEQ ID NO: 139372 - DNA, 25 bp, Probe sequence
gcaaatttttgatatagcactttat

SEQ ID NO: 139373 - DNA, 25 bp, Probe sequence
gcaatatttaattatccgtcacaag

SEQ ID NO: 139374 - DNA, 25 bp, Probe sequence
gaatcgttaacgtcttagcaccaaa

SEQ ID NO: 139375 - DNA, 25 bp, Probe sequence
gaagcgcattacgagcgtgtattac

SEQ ID NO: 139376 - DNA, 25 bp, Probe sequence
gaacaacaatttaatgcttggcgtg

SEQ ID NO: 139377 - DNA, 25 bp, Probe sequence
gaaaagtttgaagcgcattacgagc

SEQ ID NO: 139378 - DNA, 25 bp, Probe sequence
gaaacaggtgcttcagttatcggta

SEQ ID NO: 139379 - DNA, 25 bp, Probe sequence
gacaattcctttaaagtacagcatt

SEQ ID NO: 139380 - DNA, 25 bp, Probe sequence
gacgtctattagacggacaggcgtc

SEQ ID NO: 139381 - DNA, 25 bp, Probe sequence
gagcgtgtattacaagacgatcaat

SEQ ID NO: 139382 - DNA, 25 bp, Probe sequence
gttaacgtcttagcaccaaatgaag

SEQ ID NO: 139383 - DNA, 25 bp, Probe sequence
gtagttgcaatgcgctttggtgatg

SEQ ID NO: 139384 - DNA, 25 bp, Probe sequence
gtgcatatccaatgacgttaattca

SEQ ID NO: 139385 - DNA, 25 bp, Probe sequence
gtgacgcatatcatattcagctcga

SEQ ID NO: 139386 - DNA, 25 bp, Probe sequence
ggtgatggcatcaaagcaatattta

SEQ ID NO: 139387 - DNA, 25 bp, Probe sequence
ggttcaggtgcatatccaatgacgt

SEQ ID NO: 139388 - DNA, 25 bp, Probe sequence
ggcgtctaccacaggttactttgac

SEQ ID NO: 139389 - DNA, 25 bp, Probe sequence
taattatccgtcacaagaaacagcg

SEQ ID NO: 139390 - DNA, 25 bp, Probe sequence
taatgcttggcgtgacgttgaagaa

SEQ ID NO: 139391 - DNA, 25 bp, Probe sequence
taaaggtaggtattacggatgtcta

SEQ ID NO: 139392 - DNA, 25 bp, Probe sequence
taaatcctatttatgaacaacaatt

SEQ ID NO: 139393 - DNA, 25 bp, Probe sequence
tacagcgcagtgtgttaaacaagtg

SEQ ID NO: 139394 - DNA, 25 bp, Probe sequence
tacggatcaaaaggtatctgaactt

SEQ ID NO: 139395 - DNA, 25 bp, Probe sequence
tattgatccacaagccgttgaccta

SEQ ID NO: 139396 - DNA, 25 bp, Probe sequence
ttcagctcgacaattcctttaaagt

SEQ ID NO: 139397 - DNA, 25 bp, Probe sequence
gggaaaatagctgtggttctggtac

SEQ ID NO: 139398 - DNA, 25 bp, Probe sequence
attatcaacgtaatgacgcatgcaa

SEQ ID NO: 139399 - DNA, 25 bp, Probe sequence
atcgccaatcagttgatggccgcaa

SEQ ID NO: 139400 - DNA, 25 bp, Probe sequence
atgagcggtaatgaattttgcggta

SEQ ID NO: 139401 - DNA, 25 bp, Probe sequence
atgacgatacttgttcattcaaaac

SEQ ID NO: 139402 - DNA, 25 bp, Probe sequence
agtcatttgcttaaagaccaacagt

SEQ ID NO: 139403 - DNA, 25 bp, Probe sequence
agttgatggccgcaacacatgtatg

SEQ ID NO: 139404 - DNA, 25 bp, Probe sequence
aatccttcggggaatatgacgatac

SEQ ID NO: 139405 - DNA, 25 bp, Probe sequence
aacagtaggtatgatgctttttgat

SEQ ID NO: 139406 - DNA, 25 bp, Probe sequence
aagcccatcgtgttgtgccaacaac

SEQ ID NO: 139407 - DNA, 25 bp, Probe sequence
aagcgatgtcatcaattgggatatc

SEQ ID NO: 139408 - DNA, 25 bp, Probe sequence
aattttgcggtaatgcgacgatgtc

SEQ ID NO: 139409 - DNA, 25 bp, Probe sequence
caaatgccacaagcccatcgtgttg

SEQ ID NO: 139410 - DNA, 25 bp, Probe sequence
gccagggggcagtattttagtgaca

SEQ ID NO: 139411 - DNA, 25 bp, Probe sequence
gctagtgaatatgcatctatcgcca

SEQ ID NO: 139412 - DNA, 25 bp, Probe sequence
gaagttcaaatgccacaagcccatc

SEQ ID NO: 139413 - DNA, 25 bp, Probe sequence
gaattttctaagtataatccttcgg

SEQ ID NO: 139414 - DNA, 25 bp, Probe sequence
gaatcggcaggttatagaattttct

SEQ ID NO: 139415 - DNA, 25 bp, Probe sequence
gaacaacgtcaatttttacagccat

SEQ ID NO: 139416 - DNA, 25 bp, Probe sequence
gacgcatgcaaagattttacagtac

SEQ ID NO: 139417 - DNA, 25 bp, Probe sequence
gatttagtgcaatgcgcaattcatg

SEQ ID NO: 139418 - DNA, 25 bp, Probe sequence
gattttcacttagttatgagcggta

SEQ ID NO: 139419 - DNA, 25 bp, Probe sequence
gttctggtacagcatcaattggggt

SEQ ID NO: 139420 - DNA, 25 bp, Probe sequence
gtaatgcgacgatgtcatatataca

SEQ ID NO: 139421 - DNA, 25 bp, Probe sequence
ggacaggttacaactgtagctacag

SEQ ID NO: 139422 - DNA, 25 bp, Probe sequence
gggggcagtattttagtgacatcaa

SEQ ID NO: 139423 - DNA, 25 bp, Probe sequence
ggtacagcatcaattggggttttta

SEQ ID NO: 139424 - DNA, 25 bp, Probe sequence
ggtaggctttatagaatcaacacaa

SEQ ID NO: 139425 - DNA, 25 bp, Probe sequence
tgatgctttttgatgaacaacgtca

SEQ ID NO: 139426 - DNA, 25 bp, Probe sequence
tctggctgttcggatttagtgcaat

SEQ ID NO: 139427 - DNA, 25 bp, Probe sequence
tatgggtaatcattcatggaaagca

SEQ ID NO: 139428 - DNA, 25 bp, Probe sequence
tatgcatctatcgccaatcagttga

SEQ ID NO: 139429 - DNA, 25 bp, Probe sequence
tttacagtacatcagccagggggca

SEQ ID NO: 139430 - DNA, 25 bp, Probe sequence
ttacagccattaatctatataccag

SEQ ID NO: 139431 - DNA, 25 bp, Probe sequence
attggactttgattttgaacatgaa

SEQ ID NO: 139432 - DNA, 25 bp, Probe sequence
attattggactttgattttgaacat

SEQ ID NO: 139433 - DNA, 25 bp, Probe sequence
atagaaaatacgattccagaagatc

SEQ ID NO: 139434 - DNA, 25 bp, Probe sequence
ataagtcatagtgagcttttgaatt

SEQ ID NO: 139435 - DNA, 25 bp, Probe sequence
ataataattggctttgctaataatt

SEQ ID NO: 139436 - DNA, 25 bp, Probe sequence
atcagttagaaactaattccgttag

SEQ ID NO: 139437 - DNA, 25 bp, Probe sequence
atctgatatggctagttcattaaaa

SEQ ID NO: 139438 - DNA, 25 bp, Probe sequence
agttttagattgctatatcaagcta

SEQ ID NO: 139439 - DNA, 25 bp, Probe sequence
acataagtcatagtgagcttttgaa

SEQ ID NO: 139440 - DNA, 25 bp, Probe sequence
aaatctgatatggctagttcattaa

SEQ ID NO: 139441 - DNA, 25 bp, Probe sequence
aaaatacgattccagaagatcgaga

SEQ ID NO: 139442 - DNA, 25 bp, Probe sequence
aagtcatagtgagcttttgaattta

SEQ ID NO: 139443 - DNA, 25 bp, Probe sequence
aattggagataatcagttagaaact

SEQ ID NO: 139444 - DNA, 25 bp, Probe sequence
caagctataagagagattgcagata

SEQ ID NO: 139445 - DNA, 25 bp, Probe sequence
gaattacaagtattagcaaacgaaa

SEQ ID NO: 139446 - DNA, 25 bp, Probe sequence
gaagtatttgatgaattgtatcttg

SEQ ID NO: 139447 - DNA, 25 bp, Probe sequence
gaacataagtcatagtgagcttttg

SEQ ID NO: 139448 - DNA, 25 bp, Probe sequence
gaaagttttagattgctatatcaag

SEQ ID NO: 139449 - DNA, 25 bp, Probe sequence
gagagattgcagataaaattggaga

SEQ ID NO: 139450 - DNA, 25 bp, Probe sequence
gattgctatatcaagctataagaga

SEQ ID NO: 139451 - DNA, 25 bp, Probe sequence
gttagtttattattattggactttg

SEQ ID NO: 139452 - DNA, 25 bp, Probe sequence
gtcatagtgagcttttgaatttaat

SEQ ID NO: 139453 - DNA, 25 bp, Probe sequence
ggactttgattttgaacatgaagta

SEQ ID NO: 139454 - DNA, 25 bp, Probe sequence
tgattttgaacatgaagtatttgat

SEQ ID NO: 139455 - DNA, 25 bp, Probe sequence
tccgttagtttattattattggact

SEQ ID NO: 139456 - DNA, 25 bp, Probe sequence
taattccgttagtttattattattg

SEQ ID NO: 139457 - DNA, 25 bp, Probe sequence
taaaataataattggctttgctaat

SEQ ID NO: 139458 - DNA, 25 bp, Probe sequence
taaaatctgatatggctagttcatt

SEQ ID NO: 139459 - DNA, 25 bp, Probe sequence
tagagaacataagtcatagtgagct

SEQ ID NO: 139460 - DNA, 25 bp, Probe sequence
tagtgagcttttgaatttaatagaa

SEQ ID NO: 139461 - DNA, 25 bp, Probe sequence
tattattattggactttgattttga

SEQ ID NO: 139462 - DNA, 25 bp, Probe sequence
tattggactttgattttgaacatga

SEQ ID NO: 139463 - DNA, 25 bp, Probe sequence
tttagattgctatatcaagctataa

SEQ ID NO: 139464 - DNA, 25 bp, Probe sequence
ttccctgaattacaagtattagcaa

SEQ ID NO: 139465 - DNA, 25 bp, Probe sequence
atctgacgacagttcattcataact

SEQ ID NO: 139466 - DNA, 25 bp, Probe sequence
atgatgaatcaaggtggctctattg

SEQ ID NO: 139467 - DNA, 25 bp, Probe sequence
atggcctggcgagatgttaagtgat

SEQ ID NO: 139468 - DNA, 25 bp, Probe sequence
agtggtagactttgtgtctgacata

SEQ ID NO: 139469 - DNA, 25 bp, Probe sequence
agtagtcttcttagcatctgacgac

SEQ ID NO: 139470 - DNA, 25 bp, Probe sequence
agcatctgacgacagttcattcata

SEQ ID NO: 139471 - DNA, 25 bp, Probe sequence
acaacaagtggtagactttgtgtct

SEQ ID NO: 139472 - DNA, 25 bp, Probe sequence
aaattagtagtcttcttagcatctg

SEQ ID NO: 139473 - DNA, 25 bp, Probe sequence
aaaaatggatgactccgctgggacg

SEQ ID NO: 139474 - DNA, 25 bp, Probe sequence
aaggaacagtttggaagaatcgatg

SEQ ID NO: 139475 - DNA, 25 bp, Probe sequence
aatgcgaaggcgtataatgtggata

SEQ ID NO: 139476 - DNA, 25 bp, Probe sequence
aattttacaaaatcaatcgcaattg

SEQ ID NO: 139477 - DNA, 25 bp, Probe sequence
cattcataactggagagacgattcg

SEQ ID NO: 139478 - DNA, 25 bp, Probe sequence
ctattgttaatacgtcttcattttc

SEQ ID NO: 139479 - DNA, 25 bp, Probe sequence
ctggcgagatgttaagtgatgattc

SEQ ID NO: 139480 - DNA, 25 bp, Probe sequence
gaattgatggtggtgtgatggctta

SEQ ID NO: 139481 - DNA, 25 bp, Probe sequence
gaatcgatgtgttgtttaataatgc

SEQ ID NO: 139482 - DNA, 25 bp, Probe sequence
gacaggtacgagtgaggatgatgca

SEQ ID NO: 139483 - DNA, 25 bp, Probe sequence
gactttgtgtctgacataaaggaac

SEQ ID NO: 139484 - DNA, 25 bp, Probe sequence
gacgacagttcattcataactggag

SEQ ID NO: 139485 - DNA, 25 bp, Probe sequence
gagacgattcgaattgatggtggtg

SEQ ID NO: 139486 - DNA, 25 bp, Probe sequence
gagtatccaatagatgtgtatgaca

SEQ ID NO: 139487 - DNA, 25 bp, Probe sequence
gagtgaggatgatgcaggtaaaaca

SEQ ID NO: 139488 - DNA, 25 bp, Probe sequence
gtcttcttagcatctgacgacagtt

SEQ ID NO: 139489 - DNA, 25 bp, Probe sequence
ggtgacaatgcgaaggcgtataatg

SEQ ID NO: 139490 - DNA, 25 bp, Probe sequence
ggtaaaccagaagaagttgctaaat

SEQ ID NO: 139491 - DNA, 25 bp, Probe sequence
ggatgatgcaggtaaaacatttaga

SEQ ID NO: 139492 - DNA, 25 bp, Probe sequence
ggaagaatcgatgtgttgtttaata

SEQ ID NO: 139493 - DNA, 25 bp, Probe sequence
ggctctattgttaatacgtcttcat

SEQ ID NO: 139494 - DNA, 25 bp, Probe sequence
ggcctggcgagatgttaagtgatga

SEQ ID NO: 139495 - DNA, 25 bp, Probe sequence
taaactgacaggtacgagtgaggat

SEQ ID NO: 139496 - DNA, 25 bp, Probe sequence
tagtcttcttagcatctgacgacag

SEQ ID NO: 139497 - DNA, 25 bp, Probe sequence
ttcttagcatctgacgacagttcat

SEQ ID NO: 139498 - DNA, 25 bp, Probe sequence
ttgatggtggtgtgatggcttacac

SEQ ID NO: 139499 - DNA, 25 bp, Probe sequence
attgacggtggtgttatggcttaca

SEQ ID NO: 139500 - DNA, 25 bp, Probe sequence
ataaagttgcagtcgtaacaggagc

SEQ ID NO: 139501 - DNA, 25 bp, Probe sequence
atcgctttagctcaagaaggtgcgt

SEQ ID NO: 139502 - DNA, 25 bp, Probe sequence
atgcgtggaacatttttgatgacga

SEQ ID NO: 139503 - DNA, 25 bp, Probe sequence
atgatgactaaaggtggctctattg

SEQ ID NO: 139504 - DNA, 25 bp, Probe sequence
atggtagagatggcattcgagctaa

SEQ ID NO: 139505 - DNA, 25 bp, Probe sequence
aggtgcgtatgtattggcggtagac

SEQ ID NO: 139506 - DNA, 25 bp, Probe sequence
agtaatggtgacaaagcaaaggctt

SEQ ID NO: 139507 - DNA, 25 bp, Probe sequence
agaaatggatgacaccgctgggacg

SEQ ID NO: 139508 - DNA, 25 bp, Probe sequence
agcatctgatgagagttcatttatt

SEQ ID NO: 139509 - DNA, 25 bp, Probe sequence
acagattgggcatgttgatgtgtta

SEQ ID NO: 139510 - DNA, 25 bp, Probe sequence
acacatcttcattttcaggacaggc

SEQ ID NO: 139511 - DNA, 25 bp, Probe sequence
aaattgacaattttgcatcagaaat

SEQ ID NO: 139512 - DNA, 25 bp, Probe sequence
aaatccattgcaatcgaatatggta

SEQ ID NO: 139513 - DNA, 25 bp, Probe sequence
aaccagaagaagtaggcaagctcgt

SEQ ID NO: 139514 - DNA, 25 bp, Probe sequence
aagcaaaggcttatattgtggatat

SEQ ID NO: 139515 - DNA, 25 bp, Probe sequence
ctcgttgtctttttagcatctgatg

SEQ ID NO: 139516 - DNA, 25 bp, Probe sequence
gcttctgcaatcgctttagctcaag

SEQ ID NO: 139517 - DNA, 25 bp, Probe sequence
gcagcagatttgtatcgctcaggat

SEQ ID NO: 139518 - DNA, 25 bp, Probe sequence
gcaagctcgttgtctttttagcatc

SEQ ID NO: 139519 - DNA, 25 bp, Probe sequence
gcaagcgaacaacaaattgacaatt

SEQ ID NO: 139520 - DNA, 25 bp, Probe sequence
gaagtaggcaagctcgttgtctttt

SEQ ID NO: 139521 - DNA, 25 bp, Probe sequence
gacaagcttctgcaatcgctttagc

SEQ ID NO: 139522 - DNA, 25 bp, Probe sequence
gacaggcagcagatttgtatcgctc

SEQ ID NO: 139523 - DNA, 25 bp, Probe sequence
gagtatccaacagatgtatatgaca

SEQ ID NO: 139524 - DNA, 25 bp, Probe sequence
gtatcggacaagcttctgcaatcgc

SEQ ID NO: 139525 - DNA, 25 bp, Probe sequence
gatttgtatcgctcaggatataatg

SEQ ID NO: 139526 - DNA, 25 bp, Probe sequence
gttaacacatcttcattttcaggac

SEQ ID NO: 139527 - DNA, 25 bp, Probe sequence
gtagatatgcgtggaacatttttga

SEQ ID NO: 139528 - DNA, 25 bp, Probe sequence
gtacaggtatcggacaagcttctgc

SEQ ID NO: 139529 - DNA, 25 bp, Probe sequence
ggcatgttgatgtgttatttaataa

SEQ ID NO: 139530 - DNA, 25 bp, Probe sequence
ggctctattgttaacacatcttcat

SEQ ID NO: 139531 - DNA, 25 bp, Probe sequence
tcttcattttcaggacaggcagcag

SEQ ID NO: 139532 - DNA, 25 bp, Probe sequence
taacaggagcaagtacaggtatcgg

SEQ ID NO: 139533 - DNA, 25 bp, Probe sequence
aaattaacggttgtcattattgtgt

SEQ ID NO: 139534 - DNA, 25 bp, Probe sequence
attattgatcttgtctttgttgtaa

SEQ ID NO: 139535 - DNA, 25 bp, Probe sequence
atgccgtataattacaagaaacaaa

SEQ ID NO: 139536 - DNA, 25 bp, Probe sequence
atgatgaacttagtgcattgattaa

SEQ ID NO: 139537 - DNA, 25 bp, Probe sequence
atgtctgtaatgagccaaggtgaaa

SEQ ID NO: 139538 - DNA, 25 bp, Probe sequence
aaattgatgaagtcttgagttttag

SEQ ID NO: 139539 - DNA, 25 bp, Probe sequence
aaattattgatcttgtctttgttgt

SEQ ID NO: 139540 - DNA, 25 bp, Probe sequence
aagtgacgcttgaatttgcagaaat

SEQ ID NO: 139541 - DNA, 25 bp, Probe sequence
aatgagccaaggtgaaaagtttatt

SEQ ID NO: 139542 - DNA, 25 bp, Probe sequence
aatgttaaattcaatcaaagacttt

SEQ ID NO: 139543 - DNA, 25 bp, Probe sequence
aattattgaccggctaaaatcattt

SEQ ID NO: 139544 - DNA, 25 bp, Probe sequence
gaagtttgaaattattgaccggcta

SEQ ID NO: 139545 - DNA, 25 bp, Probe sequence
gaagtcttgagttttagacatttag

SEQ ID NO: 139546 - DNA, 25 bp, Probe sequence
gaacaaattattgatcttgtctttg

SEQ ID NO: 139547 - DNA, 25 bp, Probe sequence
gaaaaagtgacgcttgaatttgcag

SEQ ID NO: 139548 - DNA, 25 bp, Probe sequence
gacatttagatttatttactgatca

SEQ ID NO: 139549 - DNA, 25 bp, Probe sequence
gaccggctaaaatcattttatgatg

SEQ ID NO: 139550 - DNA, 25 bp, Probe sequence
gagttaatgtctgtaatgagccaag

SEQ ID NO: 139551 - DNA, 25 bp, Probe sequence
gagttttagacatttagatttattt

SEQ ID NO: 139552 - DNA, 25 bp, Probe sequence
gatcttgtctttgttgtaaaccaaa

SEQ ID NO: 139553 - DNA, 25 bp, Probe sequence
gtgaaaagtttattcatcaatcacc

SEQ ID NO: 139554 - DNA, 25 bp, Probe sequence
ggttgtcattattgtgttgatatcc

SEQ ID NO: 139555 - DNA, 25 bp, Probe sequence
ggagagttaatgtctgtaatgagcc

SEQ ID NO: 139556 - DNA, 25 bp, Probe sequence
tgtcattattgtgttgatatccata

SEQ ID NO: 139557 - DNA, 25 bp, Probe sequence
tcttgtctttgttgtaaaccaaatt

SEQ ID NO: 139558 - DNA, 25 bp, Probe sequence
taatgtctgtaatgagccaaggtga

SEQ ID NO: 139559 - DNA, 25 bp, Probe sequence
taacggttgtcattattgtgttgat

SEQ ID NO: 139560 - DNA, 25 bp, Probe sequence
tattgaccggctaaaatcattttat

SEQ ID NO: 139561 - DNA, 25 bp, Probe sequence
tattgatcttgtctttgttgtaaac

SEQ ID NO: 139562 - DNA, 25 bp, Probe sequence
tattgtgttgatatccataaaaaag

SEQ ID NO: 139563 - DNA, 25 bp, Probe sequence
ttagatttatttactgatcaagaaa

SEQ ID NO: 139564 - DNA, 25 bp, Probe sequence
ttagtgcattgattaagttattaat

SEQ ID NO: 139565 - DNA, 25 bp, Probe sequence
ttgaaattattgaccggctaaaatc

SEQ ID NO: 139566 - DNA, 25 bp, Probe sequence
ttgatcttgtctttgttgtaaacca

SEQ ID NO: 139567 - DNA, 25 bp, Probe sequence
accgcttcaaacacaaattacttag

SEQ ID NO: 139568 - DNA, 25 bp, Probe sequence
atcattgctcaattaaccgcttcaa

SEQ ID NO: 139569 - DNA, 25 bp, Probe sequence
acgtccaaccgttattatcgaattg

SEQ ID NO: 139570 - DNA, 25 bp, Probe sequence
actcgcagataattcattggcaact

SEQ ID NO: 139571 - DNA, 25 bp, Probe sequence
acacaacccgtgtacagcaaagaga

SEQ ID NO: 139572 - DNA, 25 bp, Probe sequence
aaatctattactgctcacaaggagg

SEQ ID NO: 139573 - DNA, 25 bp, Probe sequence
aaatacgacattccaatcattgctc

SEQ ID NO: 139574 - DNA, 25 bp, Probe sequence
aaagcacttttcaatccatctcaaa

SEQ ID NO: 139575 - DNA, 25 bp, Probe sequence
aaaacgcactctttttgcataatga

SEQ ID NO: 139576 - DNA, 25 bp, Probe sequence
aacatcgtgggactcaattgtcatc

SEQ ID NO: 139577 - DNA, 25 bp, Probe sequence
catattgaattaccagagcacgcat

SEQ ID NO: 139578 - DNA, 25 bp, Probe sequence
gttgacgcgctacttttcgaaacgt

SEQ ID NO: 139579 - DNA, 25 bp, Probe sequence
gaatctattcagacacttaaacctg

SEQ ID NO: 139580 - DNA, 25 bp, Probe sequence
gaaccactcgtacatattacatgtc

SEQ ID NO: 139581 - DNA, 25 bp, Probe sequence
gaacaaaccatttttcataggcatt

SEQ ID NO: 139582 - DNA, 25 bp, Probe sequence
gagaccgaaacttaatcggcttgca

SEQ ID NO: 139583 - DNA, 25 bp, Probe sequence
gattcattagaacttgcagcatact

SEQ ID NO: 139584 - DNA, 25 bp, Probe sequence
gtttatacattatcacaccgtttca

SEQ ID NO: 139585 - DNA, 25 bp, Probe sequence
ttggtggttgctgtggtacaacgcc

SEQ ID NO: 139586 - DNA, 25 bp, Probe sequence
gtagatgcggtaacactcgcagata

SEQ ID NO: 139587 - DNA, 25 bp, Probe sequence
gtgctgatgtcattcaaaccaatac

SEQ ID NO: 139588 - DNA, 25 bp, Probe sequence
gtgattccgataccaacgaaagcac

SEQ ID NO: 139589 - DNA, 25 bp, Probe sequence
ggtgttcgtttaattggtggttgct

SEQ ID NO: 139590 - DNA, 25 bp, Probe sequence
ggtgcaaccaatgtctatgatgtta

SEQ ID NO: 139591 - DNA, 25 bp, Probe sequence
ggattaactgaactcgctctaagat

SEQ ID NO: 139592 - DNA, 25 bp, Probe sequence
ggatttaatcgatactgttcatgaa

SEQ ID NO: 139593 - DNA, 25 bp, Probe sequence
ggatatcagcttacaaactattctt

SEQ ID NO: 139594 - DNA, 25 bp, Probe sequence
ggatacaccgaaacatttagacacg

SEQ ID NO: 139595 - DNA, 25 bp, Probe sequence
ggcattatgcctatcgcaagttaca

SEQ ID NO: 139596 - DNA, 25 bp, Probe sequence
tgcaagagtctttcacacatattga

SEQ ID NO: 139597 - DNA, 25 bp, Probe sequence
taaaacaactcgttcaatgtggtgc

SEQ ID NO: 139598 - DNA, 25 bp, Probe sequence
ttaacactgacggtgatgcgctgaa

SEQ ID NO: 139599 - DNA, 25 bp, Probe sequence
ttagccataactggtgatccttcaa

SEQ ID NO: 139600 - DNA, 25 bp, Probe sequence
ttaccatgccactaagcacttgaac

SEQ ID NO: 139601 - DNA, 25 bp, Probe sequence
attgcatctatttctggctttgaag

SEQ ID NO: 139602 - DNA, 25 bp, Probe sequence
attaacattgcatctatttctggct

SEQ ID NO: 139603 - DNA, 25 bp, Probe sequence
aggctgcattaccaactatgttaga

SEQ ID NO: 139604 - DNA, 25 bp, Probe sequence
acattgcatctatttctggctttga

SEQ ID NO: 139605 - DNA, 25 bp, Probe sequence
acaggtgcaggtagtggtattggag

SEQ ID NO: 139606 - DNA, 25 bp, Probe sequence
aacattgcatctatttctggctttg

SEQ ID NO: 139607 - DNA, 25 bp, Probe sequence
aagatagtgtgaaggtagtgccaac

SEQ ID NO: 139608 - DNA, 25 bp, Probe sequence
caaacattcggtggtttggatattg

SEQ ID NO: 139609 - DNA, 25 bp, Probe sequence
catctatttctggctttgaagtaac

SEQ ID NO: 139610 - DNA, 25 bp, Probe sequence
catcttattaacattgcatctattt

SEQ ID NO: 139611 - DNA, 25 bp, Probe sequence
cattgcatctatttctggctttgaa

SEQ ID NO: 139612 - DNA, 25 bp, Probe sequence
cttattaacattgcatctatttctg

SEQ ID NO: 139613 - DNA, 25 bp, Probe sequence
ctatttctggctttgaagtaacgaa

SEQ ID NO: 139614 - DNA, 25 bp, Probe sequence
ccaactatgttagaacaatcaagtg

SEQ ID NO: 139615 - DNA, 25 bp, Probe sequence
gcaggtagtggtattggagaagcaa

SEQ ID NO: 139616 - DNA, 25 bp, Probe sequence
gctgcattaccaactatgttagaac

SEQ ID NO: 139617 - DNA, 25 bp, Probe sequence
gcattaccaactatgttagaacaat

SEQ ID NO: 139618 - DNA, 25 bp, Probe sequence
gcacaacaaacattcggtggtttgg

SEQ ID NO: 139619 - DNA, 25 bp, Probe sequence
gcaacattactacatgaagaagggg

SEQ ID NO: 139620 - DNA, 25 bp, Probe sequence
gttcacactattactcaaggattag

SEQ ID NO: 139621 - DNA, 25 bp, Probe sequence
gttacaggtgcaggtagtggtattg

SEQ ID NO: 139622 - DNA, 25 bp, Probe sequence
gtagttacaggtgcaggtagtggta

SEQ ID NO: 139623 - DNA, 25 bp, Probe sequence
gtacgatttatagtgcgacgaaagc

SEQ ID NO: 139624 - DNA, 25 bp, Probe sequence
gtgaatgaaattacagtgcgtcctg

SEQ ID NO: 139625 - DNA, 25 bp, Probe sequence
ggtgcaggtagtggtattggagaag

SEQ ID NO: 139626 - DNA, 25 bp, Probe sequence
ggattagaaaaagagttggcaaaga

SEQ ID NO: 139627 - DNA, 25 bp, Probe sequence
tggagaagcaattgcaacattacta

SEQ ID NO: 139628 - DNA, 25 bp, Probe sequence
tgaaattacagtgcgtcctgtataa

SEQ ID NO: 139629 - DNA, 25 bp, Probe sequence
tgcatctatttctggctttgaagta

SEQ ID NO: 139630 - DNA, 25 bp, Probe sequence
tcgtctaagattactgattatcaag

SEQ ID NO: 139631 - DNA, 25 bp, Probe sequence
tcacactattactcaaggattagaa

SEQ ID NO: 139632 - DNA, 25 bp, Probe sequence
taacattgcatctatttctggcttt

SEQ ID NO: 139633 - DNA, 25 bp, Probe sequence
tagcagtagttacaggtgcaggtag

SEQ ID NO: 139634 - DNA, 25 bp, Probe sequence
tttctggctttgaagtaacgaaaag

SEQ ID NO: 139635 - DNA, 25 bp, Probe sequence
atcaaggattaattggtgacatcaa

SEQ ID NO: 139636 - DNA, 25 bp, Probe sequence
atgccttacattgatgctgagcgtt

SEQ ID NO: 139637 - DNA, 25 bp, Probe sequence
atgctgagcgtttgtatcactttgc

SEQ ID NO: 139638 - DNA, 25 bp, Probe sequence
agcgcttattttctcagacgtaagt

SEQ ID NO: 139639 - DNA, 25 bp, Probe sequence
aaagagattgaagcgcttattttct

SEQ ID NO: 139640 - DNA, 25 bp, Probe sequence
aactattgattctatgccttacatt

SEQ ID NO: 139641 - DNA, 25 bp, Probe sequence
cactttgctatggaacgtaaatcgt

SEQ ID NO: 139642 - DNA, 25 bp, Probe sequence
ctattgattctatgccttacattga

SEQ ID NO: 139643 - DNA, 25 bp, Probe sequence
ctatgccttacattgatgctgagcg

SEQ ID NO: 139644 - DNA, 25 bp, Probe sequence
cctaactattgattctatgccttac

SEQ ID NO: 139645 - DNA, 25 bp, Probe sequence
gccttacattgatgctgagcgtttg

SEQ ID NO: 139646 - DNA, 25 bp, Probe sequence
gcgtttgtatcactttgctatggaa

SEQ ID NO: 139647 - DNA, 25 bp, Probe sequence
gctgagcgtttgtatcactttgcta

SEQ ID NO: 139648 - DNA, 25 bp, Probe sequence
gctatgatatttacgtgaacactgg

SEQ ID NO: 139649 - DNA, 25 bp, Probe sequence
gaacgtaaatcgttagtcactaact

SEQ ID NO: 139650 - DNA, 25 bp, Probe sequence
gaagcgcttattttctcagacgtaa

SEQ ID NO: 139651 - DNA, 25 bp, Probe sequence
gaacactggtgtaaatcaaggatta

SEQ ID NO: 139652 - DNA, 25 bp, Probe sequence
gagcgtttgtatcactttgctatgg

SEQ ID NO: 139653 - DNA, 25 bp, Probe sequence
gatgctgagcgtttgtatcactttg

SEQ ID NO: 139654 - DNA, 25 bp, Probe sequence
gatatttacgtgaacactggtgtaa

SEQ ID NO: 139655 - DNA, 25 bp, Probe sequence
gattctatgccttacattgatgctg

SEQ ID NO: 139656 - DNA, 25 bp, Probe sequence
gattgaagcgcttattttctcagac

SEQ ID NO: 139657 - DNA, 25 bp, Probe sequence
gttacctaactattgattctatgcc

SEQ ID NO: 139658 - DNA, 25 bp, Probe sequence
gtttgtatcactttgctatggaacg

SEQ ID NO: 139659 - DNA, 25 bp, Probe sequence
gtatcactttgctatggaacgtaaa

SEQ ID NO: 139660 - DNA, 25 bp, Probe sequence
gtgacatcaaagatggttacctaac

SEQ ID NO: 139661 - DNA, 25 bp, Probe sequence
ggttacctaactattgattctatgc

SEQ ID NO: 139662 - DNA, 25 bp, Probe sequence
tacctaactattgattctatgcctt

SEQ ID NO: 139663 - DNA, 25 bp, Probe sequence
tattttctcagacgtaagtagctat

SEQ ID NO: 139664 - DNA, 25 bp, Probe sequence
ttctatgccttacattgatgctgag

SEQ ID NO: 139665 - DNA, 25 bp, Probe sequence
ttctcagacgtaagtagctatgata

SEQ ID NO: 139666 - DNA, 25 bp, Probe sequence
ttgaagcgcttattttctcagacgt

SEQ ID NO: 139667 - DNA, 25 bp, Probe sequence
ttgattctatgccttacattgatgc

SEQ ID NO: 139668 - DNA, 25 bp, Probe sequence
ttgtatcactttgctatggaacgta

SEQ ID NO: 139669 - DNA, 25 bp, Probe sequence
attacttgaccaaatggtaagtcat

SEQ ID NO: 139670 - DNA, 25 bp, Probe sequence
atgcggcacaaggggcttgggtgaa

SEQ ID NO: 139671 - DNA, 25 bp, Probe sequence
atgttcgtatgcatcatgatcatca

SEQ ID NO: 139672 - DNA, 25 bp, Probe sequence
aggttattgcgcctgaacatgttcg

SEQ ID NO: 139673 - DNA, 25 bp, Probe sequence
agtggtttaccagatttagcagtat

SEQ ID NO: 139674 - DNA, 25 bp, Probe sequence
agtgaggttattgcgcctgaacatg

SEQ ID NO: 139675 - DNA, 25 bp, Probe sequence
aaaaatgcggcacaaggggcttggg

SEQ ID NO: 139676 - DNA, 25 bp, Probe sequence
aaatgcggcacaaggggcttgggtg

SEQ ID NO: 139677 - DNA, 25 bp, Probe sequence
aacagattagtgaggttattgcgcc

SEQ ID NO: 139678 - DNA, 25 bp, Probe sequence
ccagatttagcagtattggaacaaa

SEQ ID NO: 139679 - DNA, 25 bp, Probe sequence
gcctgaacatgttcgtatgcatcat

SEQ ID NO: 139680 - DNA, 25 bp, Probe sequence
gcgcctgaacatgttcgtatgcatc

SEQ ID NO: 139681 - DNA, 25 bp, Probe sequence
gcggcacaaggggcttgggtgaaaa

SEQ ID NO: 139682 - DNA, 25 bp, Probe sequence
gcttgggtgaaaaatgccacagacg

SEQ ID NO: 139683 - DNA, 25 bp, Probe sequence
gcatcatgatcatcaaaataagctg

SEQ ID NO: 139684 - DNA, 25 bp, Probe sequence
gaaaaatgccacagacgaattaaaa

SEQ ID NO: 139685 - DNA, 25 bp, Probe sequence
gaacatgttcgtatgcatcatgatc

SEQ ID NO: 139686 - DNA, 25 bp, Probe sequence
gaaaatattacttgaccaaatggta

SEQ ID NO: 139687 - DNA, 25 bp, Probe sequence
gaggttattgcgcctgaacatgttc

SEQ ID NO: 139688 - DNA, 25 bp, Probe sequence
gatgagaaaatattacttgaccaaa

SEQ ID NO: 139689 - DNA, 25 bp, Probe sequence
gattagtgaggttattgcgcctgaa

SEQ ID NO: 139690 - DNA, 25 bp, Probe sequence
gttcgtatgcatcatgatcatcaaa

SEQ ID NO: 139691 - DNA, 25 bp, Probe sequence
gttattgcgcctgaacatgttcgta

SEQ ID NO: 139692 - DNA, 25 bp, Probe sequence
gtgaggttattgcgcctgaacatgt

SEQ ID NO: 139693 - DNA, 25 bp, Probe sequence
ggggcttgggtgaaaaatgccacag

SEQ ID NO: 139694 - DNA, 25 bp, Probe sequence
gggtgaaaaatgccacagacgaatt

SEQ ID NO: 139695 - DNA, 25 bp, Probe sequence
ggtttaccagatttagcagtattgg

SEQ ID NO: 139696 - DNA, 25 bp, Probe sequence
ggttattgcgcctgaacatgttcgt

SEQ ID NO: 139697 - DNA, 25 bp, Probe sequence
ggacttgattttagtggtttaccag

SEQ ID NO: 139698 - DNA, 25 bp, Probe sequence
tcgtatgcatcatgatcatcaaaat

SEQ ID NO: 139699 - DNA, 25 bp, Probe sequence
tattgcgcctgaacatgttcgtatg

SEQ ID NO: 139700 - DNA, 25 bp, Probe sequence
ttagtgaggttattgcgcctgaaca

SEQ ID NO: 139701 - DNA, 25 bp, Probe sequence
ttgcgcctgaacatgttcgtatgca

SEQ ID NO: 139702 - DNA, 25 bp, Probe sequence
ttgaccaaatggtaagtcatttcaa

SEQ ID NO: 139703 - DNA, 25 bp, Probe sequence
atagaatctttcgatagagaaacga

SEQ ID NO: 139704 - DNA, 25 bp, Probe sequence
atcaacgtatccgacatcacgaaat

SEQ ID NO: 139705 - DNA, 25 bp, Probe sequence
atccgacatcacgaaatgaaattag

SEQ ID NO: 139706 - DNA, 25 bp, Probe sequence
atgatcatttcttatatctcaaaca

SEQ ID NO: 139707 - DNA, 25 bp, Probe sequence
atgtatgatcatttcttatatctca

SEQ ID NO: 139708 - DNA, 25 bp, Probe sequence
acgaatcaacgtatccgacatcacg

SEQ ID NO: 139709 - DNA, 25 bp, Probe sequence
acaatctgacagaattgaaggagat

SEQ ID NO: 139710 - DNA, 25 bp, Probe sequence
aacgtatccgacatcacgaaatgaa

SEQ ID NO: 139711 - DNA, 25 bp, Probe sequence
aacgaatcaacgtatccgacatcac

SEQ ID NO: 139712 - DNA, 25 bp, Probe sequence
cacgtattatagaatctttcgatag

SEQ ID NO: 139713 - DNA, 25 bp, Probe sequence
cgaatcaacgtatccgacatcacga

SEQ ID NO: 139714 - DNA, 25 bp, Probe sequence
gctatgatcaggatgacacgtatta

SEQ ID NO: 139715 - DNA, 25 bp, Probe sequence
gaattaagacatcaaacacgcaaga

SEQ ID NO: 139716 - DNA, 25 bp, Probe sequence
gaattatagtgaagacgctatgatc

SEQ ID NO: 139717 - DNA, 25 bp, Probe sequence
gaatcaacgtatccgacatcacgaa

SEQ ID NO: 139718 - DNA, 25 bp, Probe sequence
gaagacgctatgatcaggatgacac

SEQ ID NO: 139719 - DNA, 25 bp, Probe sequence
gaaaatgcctatgatgaagaaagaa

SEQ ID NO: 139720 - DNA, 25 bp, Probe sequence
gaaacgaatcaacgtatccgacatc

SEQ ID NO: 139721 - DNA, 25 bp, Probe sequence
gaaatgtgaacaaatgtatgatcat

SEQ ID NO: 139722 - DNA, 25 bp, Probe sequence
gacatcaaacacgcaagaaatgtga

SEQ ID NO: 139723 - DNA, 25 bp, Probe sequence
gacgctatgatcaggatgacacgta

SEQ ID NO: 139724 - DNA, 25 bp, Probe sequence
gagaaacgaatcaacgtatccgaca

SEQ ID NO: 139725 - DNA, 25 bp, Probe sequence
gagaatatctaaaacaatctgacag

SEQ ID NO: 139726 - DNA, 25 bp, Probe sequence
gatcatttcttatatctcaaacata

SEQ ID NO: 139727 - DNA, 25 bp, Probe sequence
gtatccgacatcacgaaatgaaatt

SEQ ID NO: 139728 - DNA, 25 bp, Probe sequence
gtatgatcatttcttatatctcaaa

SEQ ID NO: 139729 - DNA, 25 bp, Probe sequence
gtgaagacgctatgatcaggatgac

SEQ ID NO: 139730 - DNA, 25 bp, Probe sequence
tgatcaggatgacacgtattataga

SEQ ID NO: 139731 - DNA, 25 bp, Probe sequence
tgacacgtattatagaatctttcga

SEQ ID NO: 139732 - DNA, 25 bp, Probe sequence
tgaacttgaaaatgcctatgatgaa

SEQ ID NO: 139733 - DNA, 25 bp, Probe sequence
tcatttcttatatctcaaacataaa

SEQ ID NO: 139734 - DNA, 25 bp, Probe sequence
tcaacgtatccgacatcacgaaatg

SEQ ID NO: 139735 - DNA, 25 bp, Probe sequence
taatgaacttgaaaatgcctatgat

SEQ ID NO: 139736 - DNA, 25 bp, Probe sequence
ttaagacatcaaacacgcaagaaat

SEQ ID NO: 139737 - DNA, 25 bp, Probe sequence
ataaaaacctacgagctacttaatg

SEQ ID NO: 139738 - DNA, 25 bp, Probe sequence
atcagggagatccaactggtcaaaa

SEQ ID NO: 139739 - DNA, 25 bp, Probe sequence
atgcagttgatataaaaacctacga

SEQ ID NO: 139740 - DNA, 25 bp, Probe sequence
agggagatccaactggtcaaaagac

SEQ ID NO: 139741 - DNA, 25 bp, Probe sequence
agttgatataaaaacctacgagcta

SEQ ID NO: 139742 - DNA, 25 bp, Probe sequence
agatgcagttgatataaaaacctac

SEQ ID NO: 139743 - DNA, 25 bp, Probe sequence
acctacgagctacttaatgatcagg

SEQ ID NO: 139744 - DNA, 25 bp, Probe sequence
acgataatatgaaagatgcagttga

SEQ ID NO: 139745 - DNA, 25 bp, Probe sequence
aaagatgcagttgatataaaaacct

SEQ ID NO: 139746 - DNA, 25 bp, Probe sequence
aaacctacgagctacttaatgatca

SEQ ID NO: 139747 - DNA, 25 bp, Probe sequence
aaaaacctacgagctacttaatgat

SEQ ID NO: 139748 - DNA, 25 bp, Probe sequence
aaaacctacgagctacttaatgatc

SEQ ID NO: 139749 - DNA, 25 bp, Probe sequence
aaaagacaataatatatcaaggaac

SEQ ID NO: 139750 - DNA, 25 bp, Probe sequence
aacctacgagctacttaatgatcag

SEQ ID NO: 139751 - DNA, 25 bp, Probe sequence
aagatgcagttgatataaaaaccta

SEQ ID NO: 139752 - DNA, 25 bp, Probe sequence
cagttgatataaaaacctacgagct

SEQ ID NO: 139753 - DNA, 25 bp, Probe sequence
cagggagatccaactggtcaaaaga

SEQ ID NO: 139754 - DNA, 25 bp, Probe sequence
cgataatatgaaagatgcagttgat

SEQ ID NO: 139755 - DNA, 25 bp, Probe sequence
gcagttgatataaaaacctacgagc

SEQ ID NO: 139756 - DNA, 25 bp, Probe sequence
gaaagatgcagttgatataaaaacc

SEQ ID NO: 139757 - DNA, 25 bp, Probe sequence
gagatccaactggtcaaaagacaat

SEQ ID NO: 139758 - DNA, 25 bp, Probe sequence
gatgcagttgatataaaaacctacg

SEQ ID NO: 139759 - DNA, 25 bp, Probe sequence
gataatatgaaagatgcagttgata

SEQ ID NO: 139760 - DNA, 25 bp, Probe sequence
gatataaaaacctacgagctactta

SEQ ID NO: 139761 - DNA, 25 bp, Probe sequence
gttgatataaaaacctacgagctac

SEQ ID NO: 139762 - DNA, 25 bp, Probe sequence
gggagatccaactggtcaaaagaca

SEQ ID NO: 139763 - DNA, 25 bp, Probe sequence
ggagatccaactggtcaaaagacaa

SEQ ID NO: 139764 - DNA, 25 bp, Probe sequence
tggtcaaaagacaataatatatcaa

SEQ ID NO: 139765 - DNA, 25 bp, Probe sequence
tgatataaaaacctacgagctactt

SEQ ID NO: 139766 - DNA, 25 bp, Probe sequence
tgcagttgatataaaaacctacgag

SEQ ID NO: 139767 - DNA, 25 bp, Probe sequence
tcagggagatccaactggtcaaaag

SEQ ID NO: 139768 - DNA, 25 bp, Probe sequence
taaaaacctacgagctacttaatga

SEQ ID NO: 139769 - DNA, 25 bp, Probe sequence
tataaaaacctacgagctacttaat

SEQ ID NO: 139770 - DNA, 25 bp, Probe sequence
ttgatataaaaacctacgagctact

SEQ ID NO: 139771 - DNA, 25 bp, Probe sequence
attcgcttttgcttttgcatcaggt

SEQ ID NO: 139772 - DNA, 25 bp, Probe sequence
atttcagcagtacttttgactttca

SEQ ID NO: 139773 - DNA, 25 bp, Probe sequence
atatggcggtacttttcgcctcact

SEQ ID NO: 139774 - DNA, 25 bp, Probe sequence
atcttacccgatgatgtatatggcg

SEQ ID NO: 139775 - DNA, 25 bp, Probe sequence
agatcctgatgaactcattgcagac

SEQ ID NO: 139776 - DNA, 25 bp, Probe sequence
agcacaacaatttgtcgatgcactg

SEQ ID NO: 139777 - DNA, 25 bp, Probe sequence
acatccagcaacaatgtctcacgct

SEQ ID NO: 139778 - DNA, 25 bp, Probe sequence
aactcattgcagacatcaaatacgc

SEQ ID NO: 139779 - DNA, 25 bp, Probe sequence
aagtgttggtctcgaagatcctgat

SEQ ID NO: 139780 - DNA, 25 bp, Probe sequence
aatggcggtgccgttattggctttc

SEQ ID NO: 139781 - DNA, 25 bp, Probe sequence
caatcacctttattacttggcgctg

SEQ ID NO: 139782 - DNA, 25 bp, Probe sequence
caagtcttggtggcgatgttaaata

SEQ ID NO: 139783 - DNA, 25 bp, Probe sequence
ctcacgctgcactacctgaagaagt

SEQ ID NO: 139784 - DNA, 25 bp, Probe sequence
cgatgcactgacattaccactcgtt

SEQ ID NO: 139785 - DNA, 25 bp, Probe sequence
cgaacaaatcgagggtgccattcaa

SEQ ID NO: 139786 - DNA, 25 bp, Probe sequence
ccaccactctatgattcttcaacat

SEQ ID NO: 139787 - DNA, 25 bp, Probe sequence
gcatcaggtattgctgctatttcag

SEQ ID NO: 139788 - DNA, 25 bp, Probe sequence
gaactactggtagctgtggacaata

SEQ ID NO: 139789 - DNA, 25 bp, Probe sequence
gaaacaccatcgaatccctgtttta

SEQ ID NO: 139790 - DNA, 25 bp, Probe sequence
gacatagcgatttaattgctggtgc

SEQ ID NO: 139791 - DNA, 25 bp, Probe sequence
tgcacgaagtggcaaccctaaccgt

SEQ ID NO: 139792 - DNA, 25 bp, Probe sequence
gagggtgccattcaatcaaacacaa

SEQ ID NO: 139793 - DNA, 25 bp, Probe sequence
gtacttttcgcctcactgagcaaat

SEQ ID NO: 139794 - DNA, 25 bp, Probe sequence
gatattcgattggcgtagaggtgtg

SEQ ID NO: 139795 - DNA, 25 bp, Probe sequence
ggaggcattcaatgagtcaattcct

SEQ ID NO: 139796 - DNA, 25 bp, Probe sequence
ggacaatacatttatgacaccgtta

SEQ ID NO: 139797 - DNA, 25 bp, Probe sequence
tggaatatcattcagctaacccacc

SEQ ID NO: 139798 - DNA, 25 bp, Probe sequence
tggtgatcatgtcatcttacccgat

SEQ ID NO: 139799 - DNA, 25 bp, Probe sequence
taccactcgtttcagtgagtctggg

SEQ ID NO: 139800 - DNA, 25 bp, Probe sequence
tttcagaagtttattatccgggact

SEQ ID NO: 139801 - DNA, 25 bp, Probe sequence
ttactgatatcaaagctgtttctaa

SEQ ID NO: 139802 - DNA, 25 bp, Probe sequence
ttcaacattccatcaaacaagtctt

SEQ ID NO: 139803 - DNA, 25 bp, Probe sequence
ttggctttcgtttagctgatgagtc

SEQ ID NO: 139804 - DNA, 25 bp, Probe sequence
ttgactttcaaatctggtgatcatg

SEQ ID NO: 139805 - DNA, 25 bp, Probe sequence
atattccagaagtcaatcaagttgt

SEQ ID NO: 139806 - DNA, 25 bp, Probe sequence
aggaactgctggatatatagaaggt

SEQ ID NO: 139807 - DNA, 25 bp, Probe sequence
acaattcattggatgcagtatcatt

SEQ ID NO: 139808 - DNA, 25 bp, Probe sequence
aactgagatatttaacttctgatga

SEQ ID NO: 139809 - DNA, 25 bp, Probe sequence
aacgattttatgtgcattagatgtt

SEQ ID NO: 139810 - DNA, 25 bp, Probe sequence
aagactaagcgatgcatttactaat

SEQ ID NO: 139811 - DNA, 25 bp, Probe sequence
aatggttcgtctgtaatcatgggat

SEQ ID NO: 139812 - DNA, 25 bp, Probe sequence
aatgccgaatggttcaaacgtagta

SEQ ID NO: 139813 - DNA, 25 bp, Probe sequence
aatgctgctagctgataaggtgaaa

SEQ ID NO: 139814 - DNA, 25 bp, Probe sequence
aatgccaatatttatcacttatgat

SEQ ID NO: 139815 - DNA, 25 bp, Probe sequence
catcgttctgctgcatctacttatc

SEQ ID NO: 139816 - DNA, 25 bp, Probe sequence
gccagcttaaaggctcaactattag

SEQ ID NO: 139817 - DNA, 25 bp, Probe sequence
gcgctttctggggatcaatcgcaaa

SEQ ID NO: 139818 - DNA, 25 bp, Probe sequence
gcaagcagaagcattaaggtcatta

SEQ ID NO: 139819 - DNA, 25 bp, Probe sequence
gaagttcagaaaattttgtcccata

SEQ ID NO: 139820 - DNA, 25 bp, Probe sequence
gaacaaactcaaatgctgctagctg

SEQ ID NO: 139821 - DNA, 25 bp, Probe sequence
gacacatgccgttactaatggattt

SEQ ID NO: 139822 - DNA, 25 bp, Probe sequence
gagcataatgttttactgtctacta

SEQ ID NO: 139823 - DNA, 25 bp, Probe sequence
gagatgtcgatgccaaatatttatt

SEQ ID NO: 139824 - DNA, 25 bp, Probe sequence
gagtctagtattatattcattcagc

SEQ ID NO: 139825 - DNA, 25 bp, Probe sequence
gatgaagcacatcgttctgctgcat

SEQ ID NO: 139826 - DNA, 25 bp, Probe sequence
gatccaagcgttatattttctaaat

SEQ ID NO: 139827 - DNA, 25 bp, Probe sequence
gatagtgattttggattgttgacag

SEQ ID NO: 139828 - DNA, 25 bp, Probe sequence
gatattgctggattccatgccaaag

SEQ ID NO: 139829 - DNA, 25 bp, Probe sequence
gattgggacacatgccgttactaat

SEQ ID NO: 139830 - DNA, 25 bp, Probe sequence
gtgatattttatgtccatttcatta

SEQ ID NO: 139831 - DNA, 25 bp, Probe sequence
gggaattatacaccgaagcttttag

SEQ ID NO: 139832 - DNA, 25 bp, Probe sequence
ggcgttaataatatctgcaactggt

SEQ ID NO: 139833 - DNA, 25 bp, Probe sequence
ttaattccgattgcgctttctgggg

SEQ ID NO: 139834 - DNA, 25 bp, Probe sequence
tctgctgcatctacttatcaacgag

SEQ ID NO: 139835 - DNA, 25 bp, Probe sequence
tagatttttcattttacaacgcagg

SEQ ID NO: 139836 - DNA, 25 bp, Probe sequence
tagtgttaattatcgccaaattgta

SEQ ID NO: 139837 - DNA, 25 bp, Probe sequence
tatattcattcagcaacttggtaga

SEQ ID NO: 139838 - DNA, 25 bp, Probe sequence
tttggtgtgactgattatgtacatc

SEQ ID NO: 139839 - DNA, 25 bp, Probe sequence
cctttaatgtgggaatttcctggcg

SEQ ID NO: 139840 - DNA, 25 bp, Probe sequence
attaaattgggccccagcggatata

SEQ ID NO: 139841 - DNA, 25 bp, Probe sequence
aggagctattattttttctgataac

SEQ ID NO: 139842 - DNA, 25 bp, Probe sequence
agtaggagctattattttttctgat

SEQ ID NO: 139843 - DNA, 25 bp, Probe sequence
agcggatataccagccgttaataaa

SEQ ID NO: 139844 - DNA, 25 bp, Probe sequence
actacagaacatgaatatgattttg

SEQ ID NO: 139845 - DNA, 25 bp, Probe sequence
acatacaaatgtactttaaacaaag

SEQ ID NO: 139846 - DNA, 25 bp, Probe sequence
acaaaattctttgtgcacagagaag

SEQ ID NO: 139847 - DNA, 25 bp, Probe sequence
taaattgggccccagcggatatacc

SEQ ID NO: 139848 - DNA, 25 bp, Probe sequence
aaagtaatcaatgtagtaggagcta

SEQ ID NO: 139849 - DNA, 25 bp, Probe sequence
aacataagagtattgaatggttgtc

SEQ ID NO: 139850 - DNA, 25 bp, Probe sequence
aatgtgggaatttcctggcggtaag

SEQ ID NO: 139851 - DNA, 25 bp, Probe sequence
aattaaattgggccccagcggatat

SEQ ID NO: 139852 - DNA, 25 bp, Probe sequence
aattctttgtgcacagagaagtgaa

SEQ ID NO: 139853 - DNA, 25 bp, Probe sequence
ccccagcggatataccagccgttaa

SEQ ID NO: 139854 - DNA, 25 bp, Probe sequence
cccagcggatataccagccgttaat

SEQ ID NO: 139855 - DNA, 25 bp, Probe sequence
ccagcggatataccagccgttaata

SEQ ID NO: 139856 - DNA, 25 bp, Probe sequence
ccagccgttaataaaattatgactg

SEQ ID NO: 139857 - DNA, 25 bp, Probe sequence
gcggatataccagccgttaataaaa

SEQ ID NO: 139858 - DNA, 25 bp, Probe sequence
gctattattttttctgataacaaaa

SEQ ID NO: 139859 - DNA, 25 bp, Probe sequence
gaatggttgtcaataaacgaacttg

SEQ ID NO: 139860 - DNA, 25 bp, Probe sequence
gagctattattttttctgataacaa

SEQ ID NO: 139861 - DNA, 25 bp, Probe sequence
gataaattaaattgggccccagcgg

SEQ ID NO: 139862 - DNA, 25 bp, Probe sequence
gataacaaaattctttgtgcacaga

SEQ ID NO: 139863 - DNA, 25 bp, Probe sequence
gttaacaacatacaaatgtacttta

SEQ ID NO: 139864 - DNA, 25 bp, Probe sequence
gtaggagctattattttttctgata

SEQ ID NO: 139865 - DNA, 25 bp, Probe sequence
ggttgtcaataaacgaacttgataa

SEQ ID NO: 139866 - DNA, 25 bp, Probe sequence
ggatataccagccgttaataaaatt

SEQ ID NO: 139867 - DNA, 25 bp, Probe sequence
tgataaattaaattgggccccagcg

SEQ ID NO: 139868 - DNA, 25 bp, Probe sequence
taaattaaattgggccccagcggat

SEQ ID NO: 139869 - DNA, 25 bp, Probe sequence
taatgtgggaatttcctggcggtaa

SEQ ID NO: 139870 - DNA, 25 bp, Probe sequence
tagtaggagctattattttttctga

SEQ ID NO: 139871 - DNA, 25 bp, Probe sequence
tataccagccgttaataaaattatg

SEQ ID NO: 139872 - DNA, 25 bp, Probe sequence
ttaatgtgggaatttcctggcggta

SEQ ID NO: 139873 - DNA, 25 bp, Probe sequence
attcctttacttgcaataacatcaa

SEQ ID NO: 139874 - DNA, 25 bp, Probe sequence
attaccattgtttatttccaatata

SEQ ID NO: 139875 - DNA, 25 bp, Probe sequence
atttggtttactgttgaattgacaa

SEQ ID NO: 139876 - DNA, 25 bp, Probe sequence
atatttggtattttcggtggcgcat

SEQ ID NO: 139877 - DNA, 25 bp, Probe sequence
atactttatctatctgatcttatac

SEQ ID NO: 139878 - DNA, 25 bp, Probe sequence
atctgacgcttctaaccatatctac

SEQ ID NO: 139879 - DNA, 25 bp, Probe sequence
agtaatgcgttaatcgatagtttgc

SEQ ID NO: 139880 - DNA, 25 bp, Probe sequence
actagttggtaatgttggcgtcttt

SEQ ID NO: 139881 - DNA, 25 bp, Probe sequence
aaatttaaattatctgacgcttcta

SEQ ID NO: 139882 - DNA, 25 bp, Probe sequence
aactgctatacggatcctgcgttta

SEQ ID NO: 139883 - DNA, 25 bp, Probe sequence
aaccatatctacagctatcaccatt

SEQ ID NO: 139884 - DNA, 25 bp, Probe sequence
aatcgatagtttgcaaagaggctca

SEQ ID NO: 139885 - DNA, 25 bp, Probe sequence
aattggtgtcattgtaatactagtt

SEQ ID NO: 139886 - DNA, 25 bp, Probe sequence
gctatcaccattattaactgctata

SEQ ID NO: 139887 - DNA, 25 bp, Probe sequence
gaggctcaaatattattttacctgc

SEQ ID NO: 139888 - DNA, 25 bp, Probe sequence
gatgaggagcatttagcaacaagta

SEQ ID NO: 139889 - DNA, 25 bp, Probe sequence
gattggtaatttcttacgtcggagt

SEQ ID NO: 139890 - DNA, 25 bp, Probe sequence
gatttttctgaaacttgggaattct

SEQ ID NO: 139891 - DNA, 25 bp, Probe sequence
gtattttcggtggcgcatattctga

SEQ ID NO: 139892 - DNA, 25 bp, Probe sequence
gtgctgttttcgttacaaataattt

SEQ ID NO: 139893 - DNA, 25 bp, Probe sequence
gggcaattcttcctgaaattattga

SEQ ID NO: 139894 - DNA, 25 bp, Probe sequence
gggcgttggtgtatatggactagct

SEQ ID NO: 139895 - DNA, 25 bp, Probe sequence
ggggaaagtatttagtatctcatct

SEQ ID NO: 139896 - DNA, 25 bp, Probe sequence
ggtggcgcatattctgataaacata

SEQ ID NO: 139897 - DNA, 25 bp, Probe sequence
ggatcctgcgtttagggcaattctt

SEQ ID NO: 139898 - DNA, 25 bp, Probe sequence
ggactaacaagatcagttgccattc

SEQ ID NO: 139899 - DNA, 25 bp, Probe sequence
tggactagctacatcatgtttaggt

SEQ ID NO: 139900 - DNA, 25 bp, Probe sequence
tggtaatgttggcgtcttttttatt

SEQ ID NO: 139901 - DNA, 25 bp, Probe sequence
taattatacctttactaagcttaag

SEQ ID NO: 139902 - DNA, 25 bp, Probe sequence
taatgtgtttccaagtgtggcgata

SEQ ID NO: 139903 - DNA, 25 bp, Probe sequence
taggatttatttttaatgcactttt

SEQ ID NO: 139904 - DNA, 25 bp, Probe sequence
ttttacctgctttaattggtgtcat

SEQ ID NO: 139905 - DNA, 25 bp, Probe sequence
ttagtatctcatctacatcgaatta

SEQ ID NO: 139906 - DNA, 25 bp, Probe sequence
ttgacaaaccaatcatctttaaaat

SEQ ID NO: 139907 - DNA, 25 bp, Probe sequence
atggacctgtaaaaggagactcgat

SEQ ID NO: 139908 - DNA, 25 bp, Probe sequence
aggtcatcgagacgaatttgatccg

SEQ ID NO: 139909 - DNA, 25 bp, Probe sequence
agtaccaggtaaaccaggaatcaag

SEQ ID NO: 139910 - DNA, 25 bp, Probe sequence
agaccaccggtcgatagcgtaacaa

SEQ ID NO: 139911 - DNA, 25 bp, Probe sequence
agacagagcaaaaccaaatggccca

SEQ ID NO: 139912 - DNA, 25 bp, Probe sequence
agacaatcacaacaccaatcacagt

SEQ ID NO: 139913 - DNA, 25 bp, Probe sequence
agcagaccaactcatccaagtggcc

SEQ ID NO: 139914 - DNA, 25 bp, Probe sequence
aaatggcccagttcattcaatggat

SEQ ID NO: 139915 - DNA, 25 bp, Probe sequence
aacgagcagaattaccaaaaacagg

SEQ ID NO: 139916 - DNA, 25 bp, Probe sequence
aagattgtagagttcggtggagaga

SEQ ID NO: 139917 - DNA, 25 bp, Probe sequence
aatttgatccgaagttaccaacagg

SEQ ID NO: 139918 - DNA, 25 bp, Probe sequence
caatcacagtgaacccattaacagg

SEQ ID NO: 139919 - DNA, 25 bp, Probe sequence
caactcatccaagtggcccagtaaa

SEQ ID NO: 139920 - DNA, 25 bp, Probe sequence
cagtagagataccgtttgaaacaaa

SEQ ID NO: 139921 - DNA, 25 bp, Probe sequence
cgacgccaacactaaaaaatccatt

SEQ ID NO: 139922 - DNA, 25 bp, Probe sequence
gctggattaatgttattggctcgta

SEQ ID NO: 139923 - DNA, 25 bp, Probe sequence
gaatttgatccgaagttaccaacag

SEQ ID NO: 139924 - DNA, 25 bp, Probe sequence
gaagagatcacaaaacaaccagtag

SEQ ID NO: 139925 - DNA, 25 bp, Probe sequence
gaaaacccagagaagccgagcagac

SEQ ID NO: 139926 - DNA, 25 bp, Probe sequence
gagaagccgagcagaccaactcatc

SEQ ID NO: 139927 - DNA, 25 bp, Probe sequence
gagccagtggatgatgtgattaaac

SEQ ID NO: 139928 - DNA, 25 bp, Probe sequence
gagggtcaaccaacagaagagatca

SEQ ID NO: 139929 - DNA, 25 bp, Probe sequence
gatccaaaaggacctgaaaacccag

SEQ ID NO: 139930 - DNA, 25 bp, Probe sequence
gatatctttgatccaaacttaccaa

SEQ ID NO: 139931 - DNA, 25 bp, Probe sequence
gtgagaagacaataacgacgccaac

SEQ ID NO: 139932 - DNA, 25 bp, Probe sequence
ggtggcgagaaaataccgcaaggtc

SEQ ID NO: 139933 - DNA, 25 bp, Probe sequence
ggtcatcgagacgaatttgatccga

SEQ ID NO: 139934 - DNA, 25 bp, Probe sequence
ggacaaccaggaagtaagacaatca

SEQ ID NO: 139935 - DNA, 25 bp, Probe sequence
ggaaaagtgatcgaagagccagtgg

SEQ ID NO: 139936 - DNA, 25 bp, Probe sequence
ggaatcaagaatccagacacaggaa

SEQ ID NO: 139937 - DNA, 25 bp, Probe sequence
ggcccagtaaatcctaacaatccag

SEQ ID NO: 139938 - DNA, 25 bp, Probe sequence
tccaaacttaccaacagatcaaacg

SEQ ID NO: 139939 - DNA, 25 bp, Probe sequence
taatcctgatttagcaccagggaca

SEQ ID NO: 139940 - DNA, 25 bp, Probe sequence
tacaacctggtgaagagcgagtgaa

SEQ ID NO: 139941 - DNA, 25 bp, Probe sequence
atttcttaattacatctagtcaaag

SEQ ID NO: 139942 - DNA, 25 bp, Probe sequence
atacggacctgaaacaatagcgcca

SEQ ID NO: 139943 - DNA, 25 bp, Probe sequence
atacaagttccatggacaaaactga

SEQ ID NO: 139944 - DNA, 25 bp, Probe sequence
atgctggtaaaacttgggagacttc

SEQ ID NO: 139945 - DNA, 25 bp, Probe sequence
atcttaacttatgttgcttcaactg

SEQ ID NO: 139946 - DNA, 25 bp, Probe sequence
atgttgcttcaactggtaaaatgag

SEQ ID NO: 139947 - DNA, 25 bp, Probe sequence
atggtttgataggagctttacaatt

SEQ ID NO: 139948 - DNA, 25 bp, Probe sequence
atggctggatgagaactgacttgaa

SEQ ID NO: 139949 - DNA, 25 bp, Probe sequence
aggtctggtaaattcaggcggattt

SEQ ID NO: 139950 - DNA, 25 bp, Probe sequence
acaggtgctgatggttgggggttct

SEQ ID NO: 139951 - DNA, 25 bp, Probe sequence
aacaatagcgccaggtcatcgagac

SEQ ID NO: 139952 - DNA, 25 bp, Probe sequence
aactaatggtggaatccttggggat

SEQ ID NO: 139953 - DNA, 25 bp, Probe sequence
aagggataaatgcaaatggctggat

SEQ ID NO: 139954 - DNA, 25 bp, Probe sequence
ccatcaatcaaataccacaggtgct

SEQ ID NO: 139955 - DNA, 25 bp, Probe sequence
gcggacaattcaactaatacatcag

SEQ ID NO: 139956 - DNA, 25 bp, Probe sequence
gaatccttggggataaaggtctggt

SEQ ID NO: 139957 - DNA, 25 bp, Probe sequence
gcaagctggacaaggttatagagga

SEQ ID NO: 139958 - DNA, 25 bp, Probe sequence
gaagcgccaaaaacaataacagaat

SEQ ID NO: 139959 - DNA, 25 bp, Probe sequence
gacaaaactgaaaagcaagctggac

SEQ ID NO: 139960 - DNA, 25 bp, Probe sequence
gacagttctggtaattcacaaatgg

SEQ ID NO: 139961 - DNA, 25 bp, Probe sequence
gatggggccttaatcaagggataaa

SEQ ID NO: 139962 - DNA, 25 bp, Probe sequence
gatggaaagtttcatgggcaacgtt

SEQ ID NO: 139963 - DNA, 25 bp, Probe sequence
gatgtcatcttaacttatgttgctt

SEQ ID NO: 139964 - DNA, 25 bp, Probe sequence
gatactggatacatttatacaagtt

SEQ ID NO: 139965 - DNA, 25 bp, Probe sequence
gggcaacgtttaaatgatgtcatct

SEQ ID NO: 139966 - DNA, 25 bp, Probe sequence
gggagacttcaataacagatttagg

SEQ ID NO: 139967 - DNA, 25 bp, Probe sequence
ggtttatctaaaaatcaggcatata

SEQ ID NO: 139968 - DNA, 25 bp, Probe sequence
ggttcagagtttacttttacaccag

SEQ ID NO: 139969 - DNA, 25 bp, Probe sequence
tctagtcaaagatggggccttaatc

SEQ ID NO: 139970 - DNA, 25 bp, Probe sequence
taaactatgcggacaattcaactaa

SEQ ID NO: 139971 - DNA, 25 bp, Probe sequence
tagagtggcaaataaccatcaatca

SEQ ID NO: 139972 - DNA, 25 bp, Probe sequence
tagaggatacggagcttttgtgaaa

SEQ ID NO: 139973 - DNA, 25 bp, Probe sequence
taggggtatcagaggtaaccaggtt

SEQ ID NO: 139974 - DNA, 25 bp, Probe sequence
ttacttttacaccagaagcgccaaa

SEQ ID NO: 139975 - DNA, 25 bp, Probe sequence
attccatggtcaattacttaataat

SEQ ID NO: 139976 - DNA, 25 bp, Probe sequence
attcattccaatatgcagataattc

SEQ ID NO: 139977 - DNA, 25 bp, Probe sequence
atgactttgagtttaacattagagt

SEQ ID NO: 139978 - DNA, 25 bp, Probe sequence
atgttattggcacgtagaagaaaaa

SEQ ID NO: 139979 - DNA, 25 bp, Probe sequence
actggcgctgatggatgggggttct

SEQ ID NO: 139980 - DNA, 25 bp, Probe sequence
aaatctgaagcatataactttttaa

SEQ ID NO: 139981 - DNA, 25 bp, Probe sequence
aaaggtatctgaagtcactcgtttc

SEQ ID NO: 139982 - DNA, 25 bp, Probe sequence
aaaacaggtgctgatggaactacag

SEQ ID NO: 139983 - DNA, 25 bp, Probe sequence
aaaacgaattgacaggagcattaca

SEQ ID NO: 139984 - DNA, 25 bp, Probe sequence
aagcggataattcattccaatatgc

SEQ ID NO: 139985 - DNA, 25 bp, Probe sequence
aagacagggaacatctcaaggtgta

SEQ ID NO: 139986 - DNA, 25 bp, Probe sequence
aattacttctagtcaaagacaggga

SEQ ID NO: 139987 - DNA, 25 bp, Probe sequence
caatccagaggatctaaaggtatct

SEQ ID NO: 139988 - DNA, 25 bp, Probe sequence
catcaatcggtaacaactggcgctg

SEQ ID NO: 139989 - DNA, 25 bp, Probe sequence
cggggataatgagagccgaatatgc

SEQ ID NO: 139990 - DNA, 25 bp, Probe sequence
cggtaacaactggcgctgatggatg

SEQ ID NO: 139991 - DNA, 25 bp, Probe sequence
gcaggacaaggatttaaagggtatg

SEQ ID NO: 139992 - DNA, 25 bp, Probe sequence
gcagataattctattgatacaacag

SEQ ID NO: 139993 - DNA, 25 bp, Probe sequence
gaagtcactcgtttcaataataaaa

SEQ ID NO: 139994 - DNA, 25 bp, Probe sequence
gaagagaaacaggcaggacaaggat

SEQ ID NO: 139995 - DNA, 25 bp, Probe sequence
gacaaaacgtgaatttaatccgaag

SEQ ID NO: 139996 - DNA, 25 bp, Probe sequence
gagtagctaataatcatcaatcggt

SEQ ID NO: 139997 - DNA, 25 bp, Probe sequence
gaggtatattaggtcccaaaggaat

SEQ ID NO: 139998 - DNA, 25 bp, Probe sequence
gtagagataccgttcgagacaaaac

SEQ ID NO: 139999 - DNA, 25 bp, Probe sequence
gtgttgatatacaaagcaatccaga

SEQ ID NO: 140000 - DNA, 25 bp, Probe sequence
gggaacatctcaaggtgtatatgca

SEQ ID NO: 140001 - DNA, 25 bp, Probe sequence
gggaagctaatatatcagatttggg

SEQ ID NO: 140002 - DNA, 25 bp, Probe sequence
ggtgtatatgcaaatggttggatga

SEQ ID NO: 140003 - DNA, 25 bp, Probe sequence
ggtacgtttgtaaaaacaggtgctg

SEQ ID NO: 140004 - DNA, 25 bp, Probe sequence
ggtataattttaaagatcccatgga

SEQ ID NO: 140005 - DNA, 25 bp, Probe sequence
ggaactacagcaaaggttggaacaa

SEQ ID NO: 140006 - DNA, 25 bp, Probe sequence
ggaaaattccatggtcaattactta

SEQ ID NO: 140007 - DNA, 25 bp, Probe sequence
taactcaacatttaaactaacgcct

SEQ ID NO: 140008 - DNA, 25 bp, Probe sequence
taaactaacgcctaatctagttaat

SEQ ID NO: 140009 - DNA, 25 bp, Probe sequence
attaactacatatgagctgcgtaaa

SEQ ID NO: 140010 - DNA, 25 bp, Probe sequence
atttttgtcttacattagataatta

SEQ ID NO: 140011 - DNA, 25 bp, Probe sequence
atatttttgtcttacattagataat

SEQ ID NO: 140012 - DNA, 25 bp, Probe sequence
atatcggtatagaccaatctagaat

SEQ ID NO: 140013 - DNA, 25 bp, Probe sequence
atcggtatagaccaatctagaattg

SEQ ID NO: 140014 - DNA, 25 bp, Probe sequence
atgtaatcattgttgtttctgtaaa

SEQ ID NO: 140015 - DNA, 25 bp, Probe sequence
actacatatgagctgcgtaaatatt

SEQ ID NO: 140016 - DNA, 25 bp, Probe sequence
acatatgagctgcgtaaatatttaa

SEQ ID NO: 140017 - DNA, 25 bp, Probe sequence
acacaattatattaaaaatcttttg

SEQ ID NO: 140018 - DNA, 25 bp, Probe sequence
aaatcttttgagtgaaataaatatt

SEQ ID NO: 140019 - DNA, 25 bp, Probe sequence
aaatgtaatcattgttgtttctgta

SEQ ID NO: 140020 - DNA, 25 bp, Probe sequence
aaatgtagagacccacatgatagta

SEQ ID NO: 140021 - DNA, 25 bp, Probe sequence
aaaatatttttgtcttacattagat

SEQ ID NO: 140022 - DNA, 25 bp, Probe sequence
aagttatatcggtatagaccaatct

SEQ ID NO: 140023 - DNA, 25 bp, Probe sequence
aagggttacttgaataaatgtagag

SEQ ID NO: 140024 - DNA, 25 bp, Probe sequence
aatgtaatcattgttgtttctgtaa

SEQ ID NO: 140025 - DNA, 25 bp, Probe sequence
aattatttagtattagcatatttag

SEQ ID NO: 140026 - DNA, 25 bp, Probe sequence
gaataaatgtagagacccacatgat

SEQ ID NO: 140027 - DNA, 25 bp, Probe sequence
gaaaagcaagagcaatattaaatta

SEQ ID NO: 140028 - DNA, 25 bp, Probe sequence
gaccaatctagaattgttaaaagcg

SEQ ID NO: 140029 - DNA, 25 bp, Probe sequence
gagacccacatgatagtagaaatgt

SEQ ID NO: 140030 - DNA, 25 bp, Probe sequence
gagtattaactacatatgagctgcg

SEQ ID NO: 140031 - DNA, 25 bp, Probe sequence
gttatatcggtatagaccaatctag

SEQ ID NO: 140032 - DNA, 25 bp, Probe sequence
gtttctgtaaaacaacacaattata

SEQ ID NO: 140033 - DNA, 25 bp, Probe sequence
gtattaactacatatgagctgcgta

SEQ ID NO: 140034 - DNA, 25 bp, Probe sequence
gtagagacccacatgatagtagaaa

SEQ ID NO: 140035 - DNA, 25 bp, Probe sequence
gtaatcattgttgtttctgtaaaac

SEQ ID NO: 140036 - DNA, 25 bp, Probe sequence
ggtaaatattttatgagagacatta

SEQ ID NO: 140037 - DNA, 25 bp, Probe sequence
ggtatagaccaatctagaattgtta

SEQ ID NO: 140038 - DNA, 25 bp, Probe sequence
tgtaatcattgttgtttctgtaaaa

SEQ ID NO: 140039 - DNA, 25 bp, Probe sequence
taactacatatgagctgcgtaaata

SEQ ID NO: 140040 - DNA, 25 bp, Probe sequence
tagagacccacatgatagtagaaat

SEQ ID NO: 140041 - DNA, 25 bp, Probe sequence
tagtattagcatatttagatgtatt

SEQ ID NO: 140042 - DNA, 25 bp, Probe sequence
tatgagctgcgtaaatatttaaaaa

SEQ ID NO: 140043 - DNA, 25 bp, Probe sequence
atttgcggtattattaggtgacgat

SEQ ID NO: 140044 - DNA, 25 bp, Probe sequence
aaaaaaggcaatcattcccgctgct

SEQ ID NO: 140045 - DNA, 25 bp, Probe sequence
atcggcaatgaaccatttgcggtat

SEQ ID NO: 140046 - DNA, 25 bp, Probe sequence
tagtgacaggtcgccacaaacgcgc

SEQ ID NO: 140047 - DNA, 25 bp, Probe sequence
agcgatgccaaaggaaatgcttcct

SEQ ID NO: 140048 - DNA, 25 bp, Probe sequence
agccagcacaaggtacggcaccatc

SEQ ID NO: 140049 - DNA, 25 bp, Probe sequence
acagttgattgacgtttatgaagaa

SEQ ID NO: 140050 - DNA, 25 bp, Probe sequence
acaaaaaggtttagggcatgcgatt

SEQ ID NO: 140051 - DNA, 25 bp, Probe sequence
aaaagtttgttgaaaagccagcaca

SEQ ID NO: 140052 - DNA, 25 bp, Probe sequence
aacgcgcgattgaagatcattttga

SEQ ID NO: 140053 - DNA, 25 bp, Probe sequence
aatcattcccgctgctggtttaggg

SEQ ID NO: 140054 - DNA, 25 bp, Probe sequence
cggaagcagatactcatcgttatgg

SEQ ID NO: 140055 - DNA, 25 bp, Probe sequence
gcgagaagaattaacacgatttatt

SEQ ID NO: 140056 - DNA, 25 bp, Probe sequence
gacttcgaaggcgaacgttatgacg

SEQ ID NO: 140057 - DNA, 25 bp, Probe sequence
gaaggcgcaggtaacgaaattcagt

SEQ ID NO: 140058 - DNA, 25 bp, Probe sequence
gaagttccggaagcagatactcatc

SEQ ID NO: 140059 - DNA, 25 bp, Probe sequence
gaagtgccagcagtgaaacagttga

SEQ ID NO: 140060 - DNA, 25 bp, Probe sequence
gaagaagctgcaagagctggaattg

SEQ ID NO: 140061 - DNA, 25 bp, Probe sequence
gaaagatgacagtatgcgagaagaa

SEQ ID NO: 140062 - DNA, 25 bp, Probe sequence
gaaattcagttaacagatgcgattg

SEQ ID NO: 140063 - DNA, 25 bp, Probe sequence
gatattattatagtgacaggtcgcc

SEQ ID NO: 140064 - DNA, 25 bp, Probe sequence
gatattgttgaatctgaagtgccag

SEQ ID NO: 140065 - DNA, 25 bp, Probe sequence
tgtattaacgcctgaaattttcgat

SEQ ID NO: 140066 - DNA, 25 bp, Probe sequence
gtgtatgcatatgacttcgaaggcg

SEQ ID NO: 140067 - DNA, 25 bp, Probe sequence
gggcatgcgattagttctgcgcgtc

SEQ ID NO: 140068 - DNA, 25 bp, Probe sequence
ggtcgccacaaacgcgcgattgaag

SEQ ID NO: 140069 - DNA, 25 bp, Probe sequence
ggaaatgcttcctatcttagataaa

SEQ ID NO: 140070 - DNA, 25 bp, Probe sequence
ggcaccatcaaacctagctattatg

SEQ ID NO: 140071 - DNA, 25 bp, Probe sequence
tctgcgcgtcaatttatcggcaatg

SEQ ID NO: 140072 - DNA, 25 bp, Probe sequence
tacggcaccatcaaacctagctatt

SEQ ID NO: 140073 - DNA, 25 bp, Probe sequence
tagttctgcgcgtcaatttatcggc

SEQ ID NO: 140074 - DNA, 25 bp, Probe sequence
tagggactagatttttaccagcaac

SEQ ID NO: 140075 - DNA, 25 bp, Probe sequence
ttcccgctgctggtttagggactag

SEQ ID NO: 140076 - DNA, 25 bp, Probe sequence
tttaccagcaactaaagcgatgcca

SEQ ID NO: 140077 - DNA, 25 bp, Probe sequence
atcgaacgcgatatcatccaagcat

SEQ ID NO: 140078 - DNA, 25 bp, Probe sequence
aggtgctgatatagtcttacattca

SEQ ID NO: 140079 - DNA, 25 bp, Probe sequence
agctaaaggcttattgtcaattatc

SEQ ID NO: 140080 - DNA, 25 bp, Probe sequence
aactttgcatttacgcattgagcgt

SEQ ID NO: 140081 - DNA, 25 bp, Probe sequence
aatgtcagccattcaattaatatgt

SEQ ID NO: 140082 - DNA, 25 bp, Probe sequence
aatgtcagtcacttcaagcaattga

SEQ ID NO: 140083 - DNA, 25 bp, Probe sequence
aatcctacacgctcaacatttgaaa

SEQ ID NO: 140084 - DNA, 25 bp, Probe sequence
cacatgttgatatgccagatgctga

SEQ ID NO: 140085 - DNA, 25 bp, Probe sequence
cacgtactaaaaatcctacacgctc

SEQ ID NO: 140086 - DNA, 25 bp, Probe sequence
catggtattgcatcattcgctacat

SEQ ID NO: 140087 - DNA, 25 bp, Probe sequence
catttgaaacctgttttgccaaact

SEQ ID NO: 140088 - DNA, 25 bp, Probe sequence
ctagcaggtgtcgtaaccgtcaaag

SEQ ID NO: 140089 - DNA, 25 bp, Probe sequence
cgcattgagcgtgcgcaatcaaacg

SEQ ID NO: 140090 - DNA, 25 bp, Probe sequence
ccgtcaaagatgaatcactcgcgca

SEQ ID NO: 140091 - DNA, 25 bp, Probe sequence
gaaattttagtttcattcgatttat

SEQ ID NO: 140092 - DNA, 25 bp, Probe sequence
gacataacgatgtactagcaggtgt

SEQ ID NO: 140093 - DNA, 25 bp, Probe sequence
gacgaagtactatatagcgggcaaa

SEQ ID NO: 140094 - DNA, 25 bp, Probe sequence
gatgattcaaccggtgctatagcga

SEQ ID NO: 140095 - DNA, 25 bp, Probe sequence
gatagttatttgttgttacgtggac

SEQ ID NO: 140096 - DNA, 25 bp, Probe sequence
ggtgctatagcgaatccaatccatt

SEQ ID NO: 140097 - DNA, 25 bp, Probe sequence
ggcattgatgagtatttaatccgct

SEQ ID NO: 140098 - DNA, 25 bp, Probe sequence
tgcatcattcgctacatcaagtgga

SEQ ID NO: 140099 - DNA, 25 bp, Probe sequence
tgaaacattagtgaccttcccttac

SEQ ID NO: 140100 - DNA, 25 bp, Probe sequence
tgaaggatacacagttagcccaaat

SEQ ID NO: 140101 - DNA, 25 bp, Probe sequence
tccaatccatttatctactgcctac

SEQ ID NO: 140102 - DNA, 25 bp, Probe sequence
tcccttacacccaaacacatgttga

SEQ ID NO: 140103 - DNA, 25 bp, Probe sequence
tacacagttagcccaaatcacatta

SEQ ID NO: 140104 - DNA, 25 bp, Probe sequence
tagcgggcaaactggcatgcttagt

SEQ ID NO: 140105 - DNA, 25 bp, Probe sequence
tatcgacaatacttttttaacacct

SEQ ID NO: 140106 - DNA, 25 bp, Probe sequence
tttaacaccttatctttcaacacca

SEQ ID NO: 140107 - DNA, 25 bp, Probe sequence
ttacgtggacttaaaactttgcatt

SEQ ID NO: 140108 - DNA, 25 bp, Probe sequence
ttcacaacatgactggcgcaacact

SEQ ID NO: 140109 - DNA, 25 bp, Probe sequence
ttaacaaggcctatagcgtcgctaa

SEQ ID NO: 140110 - DNA, 25 bp, Probe sequence
ttaatccgcttatcactaggtgttg

SEQ ID NO: 140111 - DNA, 25 bp, Probe sequence
attcggtttaggtgccatacttggg

SEQ ID NO: 140112 - DNA, 25 bp, Probe sequence
atcacatcgatgattacagcgttaa

SEQ ID NO: 140113 - DNA, 25 bp, Probe sequence
acgattatttccgtttcaggtatca

SEQ ID NO: 140114 - DNA, 25 bp, Probe sequence
acagcgttaatgctaggtataccat

SEQ ID NO: 140115 - DNA, 25 bp, Probe sequence
aacgcgcaaatgtttcagtgttaaa

SEQ ID NO: 140116 - DNA, 25 bp, Probe sequence
caccacatccaggaccggtagtcat

SEQ ID NO: 140117 - DNA, 25 bp, Probe sequence
cagtgacgaatgcgatttatccaat

SEQ ID NO: 140118 - DNA, 25 bp, Probe sequence
ccattccagttacactcattgcagg

SEQ ID NO: 140119 - DNA, 25 bp, Probe sequence
ggaccggtagtcatcgcaaaagaat

SEQ ID NO: 140120 - DNA, 25 bp, Probe sequence
gcgatttcaactacaggtattgtct

SEQ ID NO: 140121 - DNA, 25 bp, Probe sequence
gctgatggtggtggtgcaactcgaa

SEQ ID NO: 140122 - DNA, 25 bp, Probe sequence
gcagtattatttgcaatcgttacga

SEQ ID NO: 140123 - DNA, 25 bp, Probe sequence
gcagctgtgctacgtatcgcattag

SEQ ID NO: 140124 - DNA, 25 bp, Probe sequence
gattattgccattccagttacactc

SEQ ID NO: 140125 - DNA, 25 bp, Probe sequence
gattccgtctgcgtatacacgagaa

SEQ ID NO: 140126 - DNA, 25 bp, Probe sequence
gttgcacaaaaaatgattccgtctg

SEQ ID NO: 140127 - DNA, 25 bp, Probe sequence
gttattgattattggcggtggcggt

SEQ ID NO: 140128 - DNA, 25 bp, Probe sequence
gtatttacagtagcaaaacgcgcaa

SEQ ID NO: 140129 - DNA, 25 bp, Probe sequence
gtaggtttagtcttactgattccat

SEQ ID NO: 140130 - DNA, 25 bp, Probe sequence
gtatcgcattaggttcggctacagt

SEQ ID NO: 140131 - DNA, 25 bp, Probe sequence
gtcttaccattattacaatcatcag

SEQ ID NO: 140132 - DNA, 25 bp, Probe sequence
gtgacacatggctttttaccaccac

SEQ ID NO: 140133 - DNA, 25 bp, Probe sequence
ggtgcaggtagtgtgattttgtctc

SEQ ID NO: 140134 - DNA, 25 bp, Probe sequence
ggatcaagagatgccaggatttggt

SEQ ID NO: 140135 - DNA, 25 bp, Probe sequence
ggaacagcagggacagccatgctaa

SEQ ID NO: 140136 - DNA, 25 bp, Probe sequence
ggcggtggcggtacatttaaacaag

SEQ ID NO: 140137 - DNA, 25 bp, Probe sequence
ggctacagtagctgcgatttcaact

SEQ ID NO: 140138 - DNA, 25 bp, Probe sequence
ggcgatatttcagcgttaggtgcac

SEQ ID NO: 140139 - DNA, 25 bp, Probe sequence
tggattgttgcagctgtgctacgta

SEQ ID NO: 140140 - DNA, 25 bp, Probe sequence
tgcttgttgcagcatttatcgtcgg

SEQ ID NO: 140141 - DNA, 25 bp, Probe sequence
tacaatgggcaatgcttgttgcagc

SEQ ID NO: 140142 - DNA, 25 bp, Probe sequence
tagtgtctacgataacgcaacttgt

SEQ ID NO: 140143 - DNA, 25 bp, Probe sequence
tatggccgttaatcagtgttgtttt

SEQ ID NO: 140144 - DNA, 25 bp, Probe sequence
ttccgtttcaggtatcatcttcatt

SEQ ID NO: 140145 - DNA, 25 bp, Probe sequence
gtcgaaactgcgaaacgtctcggtg

SEQ ID NO: 140146 - DNA, 25 bp, Probe sequence
tattacttgggcagataaccgcgct

SEQ ID NO: 140147 - DNA, 25 bp, Probe sequence
atttagtgcgcaaatgcatagcttg

SEQ ID NO: 140148 - DNA, 25 bp, Probe sequence
atgcatagcttgattgcgatggatc

SEQ ID NO: 140149 - DNA, 25 bp, Probe sequence
acgtctcggtgttgatccttatgat

SEQ ID NO: 140150 - DNA, 25 bp, Probe sequence
aaagttcatgcttaggtgcctgcgt

SEQ ID NO: 140151 - DNA, 25 bp, Probe sequence
aaacatacattttctatcatttatt

SEQ ID NO: 140152 - DNA, 25 bp, Probe sequence
aagaacatatgattcgcgctgcatt

SEQ ID NO: 140153 - DNA, 25 bp, Probe sequence
aatggcttccgcaacagggatgttt

SEQ ID NO: 140154 - DNA, 25 bp, Probe sequence
aatgcaagaggttcattcttcggtt

SEQ ID NO: 140155 - DNA, 25 bp, Probe sequence
caatcgtttcatcgatggtcggtgc

SEQ ID NO: 140156 - DNA, 25 bp, Probe sequence
caaagcgtgttaaaccaggtgcaga

SEQ ID NO: 140157 - DNA, 25 bp, Probe sequence
cacacaccaaacgttgatgtctcag

SEQ ID NO: 140158 - DNA, 25 bp, Probe sequence
cagataaccgcgctgcaaaatatgc

SEQ ID NO: 140159 - DNA, 25 bp, Probe sequence
cattcttcggtttaactttatctca

SEQ ID NO: 140160 - DNA, 25 bp, Probe sequence
gcgattcgtactgtgatagataaac

SEQ ID NO: 140161 - DNA, 25 bp, Probe sequence
gaaggtgttctttacaatttgtata

SEQ ID NO: 140162 - DNA, 25 bp, Probe sequence
gaagtgcatgatggcaatgcgattt

SEQ ID NO: 140163 - DNA, 25 bp, Probe sequence
gaagatttttcaatcgtttcatcga

SEQ ID NO: 140164 - DNA, 25 bp, Probe sequence
gaacgacgagtaccaagtcagtctt

SEQ ID NO: 140165 - DNA, 25 bp, Probe sequence
gacacagagttagtggttcctgaaa

SEQ ID NO: 140166 - DNA, 25 bp, Probe sequence
gatgtctcagaagaaaacccagatg

SEQ ID NO: 140167 - DNA, 25 bp, Probe sequence
gatacaccgtttgttattggtgcga

SEQ ID NO: 140168 - DNA, 25 bp, Probe sequence
gattattcaatggcttccgcaacag

SEQ ID NO: 140169 - DNA, 25 bp, Probe sequence
gattcgcgctgcattagaaggtgtt

SEQ ID NO: 140170 - DNA, 25 bp, Probe sequence
gttgctgtcacaatcggtacatctg

SEQ ID NO: 140171 - DNA, 25 bp, Probe sequence
gtttaatattccatccctatttagc

SEQ ID NO: 140172 - DNA, 25 bp, Probe sequence
gtatggcgtcaaatgatgtcagata

SEQ ID NO: 140173 - DNA, 25 bp, Probe sequence
gtcttaacagaggaccactacgtca

SEQ ID NO: 140174 - DNA, 25 bp, Probe sequence
ggtgtcgtattgagatggttgcgcg

SEQ ID NO: 140175 - DNA, 25 bp, Probe sequence
ggctatgatttacacacaccaaacg

SEQ ID NO: 140176 - DNA, 25 bp, Probe sequence
tggtgcgagtgatggggtcctttct

SEQ ID NO: 140177 - DNA, 25 bp, Probe sequence
tcgtatccatttttatcaatttaag

SEQ ID NO: 140178 - DNA, 25 bp, Probe sequence
tatgattggtgtcgacattggaacg

SEQ ID NO: 140179 - DNA, 25 bp, Probe sequence
attgcaacaaaatcaactcatccaa

SEQ ID NO: 140180 - DNA, 25 bp, Probe sequence
atgaaacattaatcaaagcatctaa

SEQ ID NO: 140181 - DNA, 25 bp, Probe sequence
atgactttgaatttcatgaaacatt

SEQ ID NO: 140182 - DNA, 25 bp, Probe sequence
atgtgttgccgtttggggaacaaga

SEQ ID NO: 140183 - DNA, 25 bp, Probe sequence
atgggtgcacatgtgttgccgtttg

SEQ ID NO: 140184 - DNA, 25 bp, Probe sequence
agagaaatggttggaaggtatgaca

SEQ ID NO: 140185 - DNA, 25 bp, Probe sequence
aaatcaactcatccaattagaaaga

SEQ ID NO: 140186 - DNA, 25 bp, Probe sequence
aacccgcaagattttgaacgcatac

SEQ ID NO: 140187 - DNA, 25 bp, Probe sequence
aagcaatttaatgtgagtcgttcgc

SEQ ID NO: 140188 - DNA, 25 bp, Probe sequence
aagatattgaaggattttggttgaa

SEQ ID NO: 140189 - DNA, 25 bp, Probe sequence
caagtgtttattgatgcagtggaac

SEQ ID NO: 140190 - DNA, 25 bp, Probe sequence
catccatgcgacaacgtatgcaaca

SEQ ID NO: 140191 - DNA, 25 bp, Probe sequence
ctcgttttaacatccatgcgacaac

SEQ ID NO: 140192 - DNA, 25 bp, Probe sequence
gcatacatcataatcatcaagtgtt

SEQ ID NO: 140193 - DNA, 25 bp, Probe sequence
gaatgggtgcacatgtgttgccgtt

SEQ ID NO: 140194 - DNA, 25 bp, Probe sequence
gaaggtacgttactcactgaaaatc

SEQ ID NO: 140195 - DNA, 25 bp, Probe sequence
gaacgcatacatcataatcatcaag

SEQ ID NO: 140196 - DNA, 25 bp, Probe sequence
gactacctatcgtaaaagaaatgaa

SEQ ID NO: 140197 - DNA, 25 bp, Probe sequence
gatgcagtggaacaatacgacagtc

SEQ ID NO: 140198 - DNA, 25 bp, Probe sequence
gatgcagaatcatttacgaagcatg

SEQ ID NO: 140199 - DNA, 25 bp, Probe sequence
gttactcactgaaaatcaaatggca

SEQ ID NO: 140200 - DNA, 25 bp, Probe sequence
gtatgacaactggagaaggtatcgc

SEQ ID NO: 140201 - DNA, 25 bp, Probe sequence
gtcgttcgccaattcgagatgcatt

SEQ ID NO: 140202 - DNA, 25 bp, Probe sequence
gtgagtcgttcgccaattcgagatg

SEQ ID NO: 140203 - DNA, 25 bp, Probe sequence
gtgcacatgtgttgccgtttgggga

SEQ ID NO: 140204 - DNA, 25 bp, Probe sequence
gtgaatggtcacatagctgaaggta

SEQ ID NO: 140205 - DNA, 25 bp, Probe sequence
ggaacaatacgacagtcaaattttg

SEQ ID NO: 140206 - DNA, 25 bp, Probe sequence
tagctgaaggtacgttactcactga

SEQ ID NO: 140207 - DNA, 25 bp, Probe sequence
tttggagtcatttaaaaccagtaat

SEQ ID NO: 140208 - DNA, 25 bp, Probe sequence
ttacgaagcatgactttgaatttca

SEQ ID NO: 140209 - DNA, 25 bp, Probe sequence
ttaacatccatgcgacaacgtatgc

SEQ ID NO: 140210 - DNA, 25 bp, Probe sequence
ttaaactcattttggagtcatttaa

SEQ ID NO: 140211 - DNA, 25 bp, Probe sequence
ttaatgtgagtcgttcgccaattcg

SEQ ID NO: 140212 - DNA, 25 bp, Probe sequence
ttcgccaattcgagatgcatttaaa

SEQ ID NO: 140213 - DNA, 25 bp, Probe sequence
attagaaatatcccacatacaacat

SEQ ID NO: 140214 - DNA, 25 bp, Probe sequence
atcccacatacaacataacaattaa

SEQ ID NO: 140215 - DNA, 25 bp, Probe sequence
atgtcatgagtaaatcagctgaaat

SEQ ID NO: 140216 - DNA, 25 bp, Probe sequence
atgtctaactattcgactggagaac

SEQ ID NO: 140217 - DNA, 25 bp, Probe sequence
aggaataattcaatattctagcatt

SEQ ID NO: 140218 - DNA, 25 bp, Probe sequence
agtattcgtcgtaacatttggatta

SEQ ID NO: 140219 - DNA, 25 bp, Probe sequence
acgcattattgcattgaagtaccta

SEQ ID NO: 140220 - DNA, 25 bp, Probe sequence
aaagatttaggttgtgcgttaagcg

SEQ ID NO: 140221 - DNA, 25 bp, Probe sequence
aactgtcatgaaacgcattattgca

SEQ ID NO: 140222 - DNA, 25 bp, Probe sequence
ctaactattcgactggagaactcgc

SEQ ID NO: 140223 - DNA, 25 bp, Probe sequence
ctaactgccagcatatattctcacc

SEQ ID NO: 140224 - DNA, 25 bp, Probe sequence
gcgtcgtgtgtatacagaacaacag

SEQ ID NO: 140225 - DNA, 25 bp, Probe sequence
gcattattgcattgaagtacctaaa

SEQ ID NO: 140226 - DNA, 25 bp, Probe sequence
gaaggaaagcgtcgtgtgtatacag

SEQ ID NO: 140227 - DNA, 25 bp, Probe sequence
gaacgattcaatattatgatcgcaa

SEQ ID NO: 140228 - DNA, 25 bp, Probe sequence
gaacaacagcgacaaacattagagt

SEQ ID NO: 140229 - DNA, 25 bp, Probe sequence
gaaaccacaaggatttacagaagga

SEQ ID NO: 140230 - DNA, 25 bp, Probe sequence
gaaaagtattcgtcgtaacatttgg

SEQ ID NO: 140231 - DNA, 25 bp, Probe sequence
gaaagcgtcgtgtgtatacagaaca

SEQ ID NO: 140232 - DNA, 25 bp, Probe sequence
gaaatatcccacatacaacataaca

SEQ ID NO: 140233 - DNA, 25 bp, Probe sequence
gacaaacattagagttaatcttatt

SEQ ID NO: 140234 - DNA, 25 bp, Probe sequence
gatcgcaaaggtattttgaaaccac

SEQ ID NO: 140235 - DNA, 25 bp, Probe sequence
gagcatgtcatgagtaaatcagctg

SEQ ID NO: 140236 - DNA, 25 bp, Probe sequence
gatttaggttgtgcgttaagcgata

SEQ ID NO: 140237 - DNA, 25 bp, Probe sequence
gattcaatattatgatcgcaaaggt

SEQ ID NO: 140238 - DNA, 25 bp, Probe sequence
gttaagcgatatagatatgttgcta

SEQ ID NO: 140239 - DNA, 25 bp, Probe sequence
gtcatgaaacgcattattgcattga

SEQ ID NO: 140240 - DNA, 25 bp, Probe sequence
gtgtgtatacagaacaacagcgaca

SEQ ID NO: 140241 - DNA, 25 bp, Probe sequence
ggatttacagaaggaaagcgtcgtg

SEQ ID NO: 140242 - DNA, 25 bp, Probe sequence
tgtgcgttaagcgatatagatatgt

SEQ ID NO: 140243 - DNA, 25 bp, Probe sequence
tacagaacaacagcgacaaacatta

SEQ ID NO: 140244 - DNA, 25 bp, Probe sequence
taggttgtgcgttaagcgatataga

SEQ ID NO: 140245 - DNA, 25 bp, Probe sequence
tatgttgctaaaaggtgaaggtact

SEQ ID NO: 140246 - DNA, 25 bp, Probe sequence
ttttgaaaccacaaggatttacaga

SEQ ID NO: 140247 - DNA, 25 bp, Probe sequence
attccagtctttttagcagaacgcg

SEQ ID NO: 140248 - DNA, 25 bp, Probe sequence
attaggtttcgtagagttagatcat

SEQ ID NO: 140249 - DNA, 25 bp, Probe sequence
atattcagcaccctaaagaaaatgg

SEQ ID NO: 140250 - DNA, 25 bp, Probe sequence
atatttagaggatttgcgacatgat

SEQ ID NO: 140251 - DNA, 25 bp, Probe sequence
atggatatgtgggcaagtttagaac

SEQ ID NO: 140252 - DNA, 25 bp, Probe sequence
agaaaatggttaccgcagtttacat

SEQ ID NO: 140253 - DNA, 25 bp, Probe sequence
accgcagtttacatatcgttgtatc

SEQ ID NO: 140254 - DNA, 25 bp, Probe sequence
aaaccatcactatatttagaggatt

SEQ ID NO: 140255 - DNA, 25 bp, Probe sequence
aacgcgttgaggtattgcctgttga

SEQ ID NO: 140256 - DNA, 25 bp, Probe sequence
aagattatattcagcaccctaaaga

SEQ ID NO: 140257 - DNA, 25 bp, Probe sequence
aatttcaatcacatttataaacaca

SEQ ID NO: 140258 - DNA, 25 bp, Probe sequence
aattacaacaaattcattctgaaat

SEQ ID NO: 140259 - DNA, 25 bp, Probe sequence
cagtctttttagcagaacgcgttga

SEQ ID NO: 140260 - DNA, 25 bp, Probe sequence
cgtaaagattatattcagcacccta

SEQ ID NO: 140261 - DNA, 25 bp, Probe sequence
cctatacatcatatggagcgacgtg

SEQ ID NO: 140262 - DNA, 25 bp, Probe sequence
gcagaacgcgttgaggtattgcctg

SEQ ID NO: 140263 - DNA, 25 bp, Probe sequence
gcatttgatacgttattaggtttcg

SEQ ID NO: 140264 - DNA, 25 bp, Probe sequence
gcagagacggaaaagtatcgagatt

SEQ ID NO: 140265 - DNA, 25 bp, Probe sequence
gaaagaatgtgcgacagagattact

SEQ ID NO: 140266 - DNA, 25 bp, Probe sequence
gaggtattgcctgttgaaattcaaa

SEQ ID NO: 140267 - DNA, 25 bp, Probe sequence
gaggatttgcgacatgattttaaaa

SEQ ID NO: 140268 - DNA, 25 bp, Probe sequence
gatcgaaaaccatcactatatttag

SEQ ID NO: 140269 - DNA, 25 bp, Probe sequence
gttgcttaaacaagaagacgtacaa

SEQ ID NO: 140270 - DNA, 25 bp, Probe sequence
gttaccgcagtttacatatcgttgt

SEQ ID NO: 140271 - DNA, 25 bp, Probe sequence
gtatgtagatcgaaaaccatcacta

SEQ ID NO: 140272 - DNA, 25 bp, Probe sequence
gtatgtaattacttagatgatattt

SEQ ID NO: 140273 - DNA, 25 bp, Probe sequence
gtgcgacagagattactgaagttga

SEQ ID NO: 140274 - DNA, 25 bp, Probe sequence
gtgatgaagcatttgatacgttatt

SEQ ID NO: 140275 - DNA, 25 bp, Probe sequence
ggaattcgcgtagtatgtaattact

SEQ ID NO: 140276 - DNA, 25 bp, Probe sequence
tggagcgacgtgtgaaagaaatgcg

SEQ ID NO: 140277 - DNA, 25 bp, Probe sequence
tgattgaagagatgttgcttaaaca

SEQ ID NO: 140278 - DNA, 25 bp, Probe sequence
tcgtagagttagatcatatttattc

SEQ ID NO: 140279 - DNA, 25 bp, Probe sequence
tacatcatatggagcgacgtgtgaa

SEQ ID NO: 140280 - DNA, 25 bp, Probe sequence
taggtatggatatgtgggcaagttt

SEQ ID NO: 140281 - DNA, 25 bp, Probe sequence
atgttgttcctattgcggcgaaaaa

SEQ ID NO: 140282 - DNA, 25 bp, Probe sequence
atattcaagaacaatcaaatcaaga

SEQ ID NO: 140283 - DNA, 25 bp, Probe sequence
agatgttgttcctattgcggcgaaa

SEQ ID NO: 140284 - DNA, 25 bp, Probe sequence
caaccaaagtggtggcgttcgacaa

SEQ ID NO: 140285 - DNA, 25 bp, Probe sequence
agaggtggatagtgaatatgcaaca

SEQ ID NO: 140286 - DNA, 25 bp, Probe sequence
agaagagaacttcgtacaattccat

SEQ ID NO: 140287 - DNA, 25 bp, Probe sequence
acttcgtacaattccatacagcaac

SEQ ID NO: 140288 - DNA, 25 bp, Probe sequence
acaaagagaaccgcttatggatggt

SEQ ID NO: 140289 - DNA, 25 bp, Probe sequence
aaagatgttgttcctattgcggcga

SEQ ID NO: 140290 - DNA, 25 bp, Probe sequence
aaaaagatgttgttcctattgcggc

SEQ ID NO: 140291 - DNA, 25 bp, Probe sequence
aagagaacttcgtacaattccatac

SEQ ID NO: 140292 - DNA, 25 bp, Probe sequence
aagtggtggcgttcgacaaagagaa

SEQ ID NO: 140293 - DNA, 25 bp, Probe sequence
caagataaatcgtactttgatagcg

SEQ ID NO: 140294 - DNA, 25 bp, Probe sequence
cgtacaattccatacagcaacaatg

SEQ ID NO: 140295 - DNA, 25 bp, Probe sequence
ccaaagtggtggcgttcgacaaaga

SEQ ID NO: 140296 - DNA, 25 bp, Probe sequence
ccaaaagttgtggaatcatttaaag

SEQ ID NO: 140297 - DNA, 25 bp, Probe sequence
gcggcgaaaaaagcgaaagattggt

SEQ ID NO: 140298 - DNA, 25 bp, Probe sequence
gcaacaactgataatgaagaacata

SEQ ID NO: 140299 - DNA, 25 bp, Probe sequence
gaacttcgtacaattccatacagca

SEQ ID NO: 140300 - DNA, 25 bp, Probe sequence
gaaagattggtatcgagcgttatcg

SEQ ID NO: 140301 - DNA, 25 bp, Probe sequence
gagaacttcgtacaattccatacag

SEQ ID NO: 140302 - DNA, 25 bp, Probe sequence
gatgttgttcctattgcggcgaaaa

SEQ ID NO: 140303 - DNA, 25 bp, Probe sequence
gatagcgaatcaattggcaaccaaa

SEQ ID NO: 140304 - DNA, 25 bp, Probe sequence
gttgttcctattgcggcgaaaaaag

SEQ ID NO: 140305 - DNA, 25 bp, Probe sequence
gattggtatcgagcgttatcgaaag

SEQ ID NO: 140306 - DNA, 25 bp, Probe sequence
gttcctattgcggcgaaaaaagcga

SEQ ID NO: 140307 - DNA, 25 bp, Probe sequence
ggtggcgttcgacaaagagaaccgc

SEQ ID NO: 140308 - DNA, 25 bp, Probe sequence
ggcgttcgacaaagagaaccgctta

SEQ ID NO: 140309 - DNA, 25 bp, Probe sequence
ggcaaccaaagtggtggcgttcgac

SEQ ID NO: 140310 - DNA, 25 bp, Probe sequence
ggtatcgagcgttatcgaaagaaga

SEQ ID NO: 140311 - DNA, 25 bp, Probe sequence
ggatagtgaatatgcaacaactgat

SEQ ID NO: 140312 - DNA, 25 bp, Probe sequence
taaatcgtactttgatagcgaatca

SEQ ID NO: 140313 - DNA, 25 bp, Probe sequence
ttcgacaaagagaaccgcttatgga

SEQ ID NO: 140314 - DNA, 25 bp, Probe sequence
ttcgtacaattccatacagcaacaa

SEQ ID NO: 140315 - DNA, 25 bp, Probe sequence
atagaggctttgcgattttagtagg

SEQ ID NO: 140316 - DNA, 25 bp, Probe sequence
atcctagcttattcgcattagaaga

SEQ ID NO: 140317 - DNA, 25 bp, Probe sequence
atgaacctatctgtgaaattaaata

SEQ ID NO: 140318 - DNA, 25 bp, Probe sequence
atgacgcaagtttataatgcagcta

SEQ ID NO: 140319 - DNA, 25 bp, Probe sequence
atgtaatggctgaagttgttcgtaa

SEQ ID NO: 140320 - DNA, 25 bp, Probe sequence
agctgcgaactgtaataatttgtaa

SEQ ID NO: 140321 - DNA, 25 bp, Probe sequence
acaattaacattgcgtttccaagag

SEQ ID NO: 140322 - DNA, 25 bp, Probe sequence
aaattattatcctagcttattcgca

SEQ ID NO: 140323 - DNA, 25 bp, Probe sequence
aagatattaccagatttaccacagt

SEQ ID NO: 140324 - DNA, 25 bp, Probe sequence
caattaatgggcgagtatttagcaa

SEQ ID NO: 140325 - DNA, 25 bp, Probe sequence
caagtagcaaaaacagcggtggata

SEQ ID NO: 140326 - DNA, 25 bp, Probe sequence
cagcgattatgatgatagcgatatt

SEQ ID NO: 140327 - DNA, 25 bp, Probe sequence
gcgatctaagctgcgaactgtaata

SEQ ID NO: 140328 - DNA, 25 bp, Probe sequence
gctttatgttaaatagagccatggc

SEQ ID NO: 140329 - DNA, 25 bp, Probe sequence
gcaatcataggtttatttgtccttg

SEQ ID NO: 140330 - DNA, 25 bp, Probe sequence
gacattattaattgttacggttata

SEQ ID NO: 140331 - DNA, 25 bp, Probe sequence
gacattcttcattgtgacattcagt

SEQ ID NO: 140332 - DNA, 25 bp, Probe sequence
gaccgtcatcgacattcttcattgt

SEQ ID NO: 140333 - DNA, 25 bp, Probe sequence
gaccattgccagatgagttaattga

SEQ ID NO: 140334 - DNA, 25 bp, Probe sequence
gagccatggctaatgaagatagact

SEQ ID NO: 140335 - DNA, 25 bp, Probe sequence
gttgttttcaataccaacacctgtt

SEQ ID NO: 140336 - DNA, 25 bp, Probe sequence
gttacggttataccattttatatat

SEQ ID NO: 140337 - DNA, 25 bp, Probe sequence
gtttccaagagttattgacgttgca

SEQ ID NO: 140338 - DNA, 25 bp, Probe sequence
gtataattatattcaatcagcaatg

SEQ ID NO: 140339 - DNA, 25 bp, Probe sequence
gtccgtcgcgatctaagctgcgaac

SEQ ID NO: 140340 - DNA, 25 bp, Probe sequence
tcggttacttatgtggtaatttcca

SEQ ID NO: 140341 - DNA, 25 bp, Probe sequence
tatgtggtaatttccaatttggatt

SEQ ID NO: 140342 - DNA, 25 bp, Probe sequence
taggaacatcaactatacatgcaat

SEQ ID NO: 140343 - DNA, 25 bp, Probe sequence
tttcaataccaacacctgttgcagt

SEQ ID NO: 140344 - DNA, 25 bp, Probe sequence
tttgtaatttagcgtttgcaatatg

SEQ ID NO: 140345 - DNA, 25 bp, Probe sequence
tttaaaggtccgtcgcgatctaagc

SEQ ID NO: 140346 - DNA, 25 bp, Probe sequence
ttggattattagttgcaaccggaac

SEQ ID NO: 140347 - DNA, 25 bp, Probe sequence
ttgttcgtaaagaagcaacgctctt

SEQ ID NO: 140348 - DNA, 25 bp, Probe sequence
ttgcagtagtttttattacaataca

SEQ ID NO: 140349 - DNA, 25 bp, Probe sequence
attgcaattcaatactttgttgtac

SEQ ID NO: 140350 - DNA, 25 bp, Probe sequence
atttcggacctgtattagcaccaat

SEQ ID NO: 140351 - DNA, 25 bp, Probe sequence
atcgctgtgattatgtggttctatg

SEQ ID NO: 140352 - DNA, 25 bp, Probe sequence
atggctgtattatgggcgattattg

SEQ ID NO: 140353 - DNA, 25 bp, Probe sequence
aggtcgttcaaaattcgtagctaga

SEQ ID NO: 140354 - DNA, 25 bp, Probe sequence
actaggtcttggtggtatcggtatt

SEQ ID NO: 140355 - DNA, 25 bp, Probe sequence
acgtaaggtggatgttcgcgcttgc

SEQ ID NO: 140356 - DNA, 25 bp, Probe sequence
aaattcggtccacgtaagatgatta

SEQ ID NO: 140357 - DNA, 25 bp, Probe sequence
aacgttttagcttctatgcaattgc

SEQ ID NO: 140358 - DNA, 25 bp, Probe sequence
aagacttacctgagcaacatagaat

SEQ ID NO: 140359 - DNA, 25 bp, Probe sequence
aatcgttccagcagtaatcgctgtg

SEQ ID NO: 140360 - DNA, 25 bp, Probe sequence
ccgtgtattaggattaggtcgttca

SEQ ID NO: 140361 - DNA, 25 bp, Probe sequence
gctactgaaaagtcatcaccaccat

SEQ ID NO: 140362 - DNA, 25 bp, Probe sequence
gcatcattcttctctctaggttatg

SEQ ID NO: 140363 - DNA, 25 bp, Probe sequence
gcagtttcaattatctttgctgtac

SEQ ID NO: 140364 - DNA, 25 bp, Probe sequence
gcaagtaccatcggggatgttggct

SEQ ID NO: 140365 - DNA, 25 bp, Probe sequence
gaaaccagatcaacctttaattgtt

SEQ ID NO: 140366 - DNA, 25 bp, Probe sequence
gacattccaattgttaatcgttcca

SEQ ID NO: 140367 - DNA, 25 bp, Probe sequence
gagcattagttcattaccttggtta

SEQ ID NO: 140368 - DNA, 25 bp, Probe sequence
gagcatcaagtgcattattagcagg

SEQ ID NO: 140369 - DNA, 25 bp, Probe sequence
gagcaaacatttcatatatcgctaa

SEQ ID NO: 140370 - DNA, 25 bp, Probe sequence
gttggctgaaaaattcggtccacgt

SEQ ID NO: 140371 - DNA, 25 bp, Probe sequence
gtattttctggttatcactaggtct

SEQ ID NO: 140372 - DNA, 25 bp, Probe sequence
gtccgctattagcaggtctattcgt

SEQ ID NO: 140373 - DNA, 25 bp, Probe sequence
ggtgcaatttctgaccgtgtattag

SEQ ID NO: 140374 - DNA, 25 bp, Probe sequence
ggtggagtgcatttacaatcttaac

SEQ ID NO: 140375 - DNA, 25 bp, Probe sequence
ggacgtaacttctctggtacagtat

SEQ ID NO: 140376 - DNA, 25 bp, Probe sequence
tggtggtatcggtatttcaatgggt

SEQ ID NO: 140377 - DNA, 25 bp, Probe sequence
tcttctctctaggttatgcattaat

SEQ ID NO: 140378 - DNA, 25 bp, Probe sequence
taacagaagtattccacgttaactt

SEQ ID NO: 140379 - DNA, 25 bp, Probe sequence
taccttggttattaatgttcttctt

SEQ ID NO: 140380 - DNA, 25 bp, Probe sequence
taggtgcattaatcagtccgctatt

SEQ ID NO: 140381 - DNA, 25 bp, Probe sequence
tattagcaggatcatatttcggacc

SEQ ID NO: 140382 - DNA, 25 bp, Probe sequence
ttgcgttcttctttattggggttat

SEQ ID NO: 140383 - DNA, 25 bp, Probe sequence
attgtgccagctttgctgtctacta

SEQ ID NO: 140384 - DNA, 25 bp, Probe sequence
attccgagactatatgacgattttc

SEQ ID NO: 140385 - DNA, 25 bp, Probe sequence
atatttttatcatgtgcaccagctt

SEQ ID NO: 140386 - DNA, 25 bp, Probe sequence
acttcacaactataactatcatgtt

SEQ ID NO: 140387 - DNA, 25 bp, Probe sequence
aagtgctaggtgtatttaattttgt

SEQ ID NO: 140388 - DNA, 25 bp, Probe sequence
aatgatacttcgtgttactataact

SEQ ID NO: 140389 - DNA, 25 bp, Probe sequence
gaattattcctctcgtgactttaac

SEQ ID NO: 140390 - DNA, 25 bp, Probe sequence
cattgattcaaaacatatacacgcc

SEQ ID NO: 140391 - DNA, 25 bp, Probe sequence
gctttgctgtctactataatttcta

SEQ ID NO: 140392 - DNA, 25 bp, Probe sequence
gcagttatgcaaattgtacttggta

SEQ ID NO: 140393 - DNA, 25 bp, Probe sequence
gcaccagctttggcaccaatcttag

SEQ ID NO: 140394 - DNA, 25 bp, Probe sequence
gcaattggttgcggaattattcctc

SEQ ID NO: 140395 - DNA, 25 bp, Probe sequence
gaagtatagattctcgtgattcgaa

SEQ ID NO: 140396 - DNA, 25 bp, Probe sequence
gacgattttcaagtaccactatttt

SEQ ID NO: 140397 - DNA, 25 bp, Probe sequence
gagctcaagctatggcgaactatca

SEQ ID NO: 140398 - DNA, 25 bp, Probe sequence
gataaatgcgacagttggcggtttt

SEQ ID NO: 140399 - DNA, 25 bp, Probe sequence
gttttttgctcgttatatctatcgt

SEQ ID NO: 140400 - DNA, 25 bp, Probe sequence
gtacttgtgttggtattgtgccagc

SEQ ID NO: 140401 - DNA, 25 bp, Probe sequence
gtgcagtgacacataactttatatt

SEQ ID NO: 140402 - DNA, 25 bp, Probe sequence
gggagtactttaggtgcaagatggg

SEQ ID NO: 140403 - DNA, 25 bp, Probe sequence
ggatttttagcatttttcgcatcat

SEQ ID NO: 140404 - DNA, 25 bp, Probe sequence
ggatttgctatatttacgttattgt

SEQ ID NO: 140405 - DNA, 25 bp, Probe sequence
ggcaccaatcttagggagtacttta

SEQ ID NO: 140406 - DNA, 25 bp, Probe sequence
ggcgttggaatatcaggagttttgt

SEQ ID NO: 140407 - DNA, 25 bp, Probe sequence
ggcggttttatatttatcgttgcag

SEQ ID NO: 140408 - DNA, 25 bp, Probe sequence
tgtttttacctattactgttagtgt

SEQ ID NO: 140409 - DNA, 25 bp, Probe sequence
tcgtgactttaactttattagccaa

SEQ ID NO: 140410 - DNA, 25 bp, Probe sequence
taattggtatcatttctcagccgtt

SEQ ID NO: 140411 - DNA, 25 bp, Probe sequence
tagcatttttcgcatcattgattca

SEQ ID NO: 140412 - DNA, 25 bp, Probe sequence
tatctagctttatttgtgcagtgac

SEQ ID NO: 140413 - DNA, 25 bp, Probe sequence
tatcatttctcagccgttggtagcc

SEQ ID NO: 140414 - DNA, 25 bp, Probe sequence
tatacacgcctattattccgagact

SEQ ID NO: 140415 - DNA, 25 bp, Probe sequence
ttggtagccttttacttcacaacta

SEQ ID NO: 140416 - DNA, 25 bp, Probe sequence
ttggaatgactgtcggtgcattatt

SEQ ID NO: 140417 - DNA, 25 bp, Probe sequence
attcatcctgaatggctttattgtg

SEQ ID NO: 140418 - DNA, 25 bp, Probe sequence
atttttcagcactcaagatattatt

SEQ ID NO: 140419 - DNA, 25 bp, Probe sequence
atcttgttttagagcctgcttatac

SEQ ID NO: 140420 - DNA, 25 bp, Probe sequence
atcctgaatggctttattgtgcaaa

SEQ ID NO: 140421 - DNA, 25 bp, Probe sequence
aggcaaacaatttttcagcactcaa

SEQ ID NO: 140422 - DNA, 25 bp, Probe sequence
agagcctgcttatactggcgaaggc

SEQ ID NO: 140423 - DNA, 25 bp, Probe sequence
actggcgaaggcaaacaatttttca

SEQ ID NO: 140424 - DNA, 25 bp, Probe sequence
aacaatttttcagcactcaagatat

SEQ ID NO: 140425 - DNA, 25 bp, Probe sequence
aatcttgttttagagcctgcttata

SEQ ID NO: 140426 - DNA, 25 bp, Probe sequence
caatttttcagcactcaagatatta

SEQ ID NO: 140427 - DNA, 25 bp, Probe sequence
caaacaatttttcagcactcaagat

SEQ ID NO: 140428 - DNA, 25 bp, Probe sequence
cttgttttagagcctgcttatactg

SEQ ID NO: 140429 - DNA, 25 bp, Probe sequence
cctgcttatactggcgaaggcaaac

SEQ ID NO: 140430 - DNA, 25 bp, Probe sequence
gctaatcttgttttagagcctgctt

SEQ ID NO: 140431 - DNA, 25 bp, Probe sequence
gcttatactggcgaaggcaaacaat

SEQ ID NO: 140432 - DNA, 25 bp, Probe sequence
gcaaaggctaatcttgttttagagc

SEQ ID NO: 140433 - DNA, 25 bp, Probe sequence
gaattccaagagatacttaatagtg

SEQ ID NO: 140434 - DNA, 25 bp, Probe sequence
gaaggcaaacaatttttcagcactc

SEQ ID NO: 140435 - DNA, 25 bp, Probe sequence
gaatggctttattgtgcaaaggcta

SEQ ID NO: 140436 - DNA, 25 bp, Probe sequence
gagcctgcttatactggcgaaggca

SEQ ID NO: 140437 - DNA, 25 bp, Probe sequence
gattttcaagaattccaagagatac

SEQ ID NO: 140438 - DNA, 25 bp, Probe sequence
gattggtctaaagattttcaagaat

SEQ ID NO: 140439 - DNA, 25 bp, Probe sequence
gttttagagcctgcttatactggcg

SEQ ID NO: 140440 - DNA, 25 bp, Probe sequence
ggtctaaagattttcaagaattcca

SEQ ID NO: 140441 - DNA, 25 bp, Probe sequence
ggcaaacaatttttcagcactcaag

SEQ ID NO: 140442 - DNA, 25 bp, Probe sequence
ggctttattgtgcaaaggctaatct

SEQ ID NO: 140443 - DNA, 25 bp, Probe sequence
ggcgaaggcaaacaatttttcagca

SEQ ID NO: 140444 - DNA, 25 bp, Probe sequence
tgaatttaaatattgattggtctaa

SEQ ID NO: 140445 - DNA, 25 bp, Probe sequence
tcatcctgaatggctttattgtgca

SEQ ID NO: 140446 - DNA, 25 bp, Probe sequence
taatcttgttttagagcctgcttat

SEQ ID NO: 140447 - DNA, 25 bp, Probe sequence
tagagcctgcttatactggcgaagg

SEQ ID NO: 140448 - DNA, 25 bp, Probe sequence
tattgtgcaaaggctaatcttgttt

SEQ ID NO: 140449 - DNA, 25 bp, Probe sequence
tttagagcctgcttatactggcgaa

SEQ ID NO: 140450 - DNA, 25 bp, Probe sequence
ttgtgcaaaggctaatcttgtttta

SEQ ID NO: 140451 - DNA, 25 bp, Probe sequence
atttcatatcatagagttgattgat

SEQ ID NO: 140452 - DNA, 25 bp, Probe sequence
atcaaaaccagcaattactaaatcg

SEQ ID NO: 140453 - DNA, 25 bp, Probe sequence
atctctaacacaatttcatatcata

SEQ ID NO: 140454 - DNA, 25 bp, Probe sequence
atgatgatgaaatggcagttattat

SEQ ID NO: 140455 - DNA, 25 bp, Probe sequence
atggcagttattatagagtttttaa

SEQ ID NO: 140456 - DNA, 25 bp, Probe sequence
agatttatctctaacacaatttcat

SEQ ID NO: 140457 - DNA, 25 bp, Probe sequence
accagcaattactaaatcgataaaa

SEQ ID NO: 140458 - DNA, 25 bp, Probe sequence
aaattatcttatatacatgatgaat

SEQ ID NO: 140459 - DNA, 25 bp, Probe sequence
aaaccagcaattactaaatcgataa

SEQ ID NO: 140460 - DNA, 25 bp, Probe sequence
aacacaatttcatatcatagagttg

SEQ ID NO: 140461 - DNA, 25 bp, Probe sequence
aagacttagtagttgaatcgcacaa

SEQ ID NO: 140462 - DNA, 25 bp, Probe sequence
aagtctttgatgatgatgaaatggc

SEQ ID NO: 140463 - DNA, 25 bp, Probe sequence
aatgtatcaaaaccagcaattacta

SEQ ID NO: 140464 - DNA, 25 bp, Probe sequence
aatttttgtctgaaatgttaaatgt

SEQ ID NO: 140465 - DNA, 25 bp, Probe sequence
caaaaccagcaattactaaatcgat

SEQ ID NO: 140466 - DNA, 25 bp, Probe sequence
cttttagcgaaagacttagtagttg

SEQ ID NO: 140467 - DNA, 25 bp, Probe sequence
gaatcgcacaatgaatttaacaaaa

SEQ ID NO: 140468 - DNA, 25 bp, Probe sequence
gaagaggtacttaaagtctttgatg

SEQ ID NO: 140469 - DNA, 25 bp, Probe sequence
gaaaatgccgataaaagaagacagt

SEQ ID NO: 140470 - DNA, 25 bp, Probe sequence
gaaagacttagtagttgaatcgcac

SEQ ID NO: 140471 - DNA, 25 bp, Probe sequence
gaaatggcagttattatagagtttt

SEQ ID NO: 140472 - DNA, 25 bp, Probe sequence
gacttagtagttgaatcgcacaatg

SEQ ID NO: 140473 - DNA, 25 bp, Probe sequence
gaggtacttaaagtctttgatgatg

SEQ ID NO: 140474 - DNA, 25 bp, Probe sequence
gaggaactagatttatctctaacac

SEQ ID NO: 140475 - DNA, 25 bp, Probe sequence
gatttatctctaacacaatttcata

SEQ ID NO: 140476 - DNA, 25 bp, Probe sequence
gttgaatcgcacaatgaatttaaca

SEQ ID NO: 140477 - DNA, 25 bp, Probe sequence
gttaaatgtatcaaaaccagcaatt

SEQ ID NO: 140478 - DNA, 25 bp, Probe sequence
gtagttgaatcgcacaatgaattta

SEQ ID NO: 140479 - DNA, 25 bp, Probe sequence
gtgaataataaatttttgtctgaaa

SEQ ID NO: 140480 - DNA, 25 bp, Probe sequence
ggaactagatttatctctaacacaa

SEQ ID NO: 140481 - DNA, 25 bp, Probe sequence
taattattcattaacacaaaaagga

SEQ ID NO: 140482 - DNA, 25 bp, Probe sequence
tttatctctaacacaatttcatatc

SEQ ID NO: 140483 - DNA, 25 bp, Probe sequence
ttatctctaacacaatttcatatca

SEQ ID NO: 140484 - DNA, 25 bp, Probe sequence
ttagtagttgaatcgcacaatgaat

SEQ ID NO: 140485 - DNA, 25 bp, Probe sequence
atttcaaacgtcttggtgaaggtgt

SEQ ID NO: 140486 - DNA, 25 bp, Probe sequence
aggtgtttatgatgaagaagatttg

SEQ ID NO: 140487 - DNA, 25 bp, Probe sequence
agtgtgttgctttctatggggaaac

SEQ ID NO: 140488 - DNA, 25 bp, Probe sequence
agaaactggattaacggctggtcaa

SEQ ID NO: 140489 - DNA, 25 bp, Probe sequence
actggattaacggctggtcaacaaa

SEQ ID NO: 140490 - DNA, 25 bp, Probe sequence
aaattatcacttgttaagtattaga

SEQ ID NO: 140491 - DNA, 25 bp, Probe sequence
aaagcattgttatatgcaccgttat

SEQ ID NO: 140492 - DNA, 25 bp, Probe sequence
aaactggattaacggctggtcaaca

SEQ ID NO: 140493 - DNA, 25 bp, Probe sequence
aacgtcttggtgaaggtgtttatga

SEQ ID NO: 140494 - DNA, 25 bp, Probe sequence
aactggattaacggctggtcaacaa

SEQ ID NO: 140495 - DNA, 25 bp, Probe sequence
aagcattgttatatgcaccgttata

SEQ ID NO: 140496 - DNA, 25 bp, Probe sequence
aagtattagaggacaagtttcagaa

SEQ ID NO: 140497 - DNA, 25 bp, Probe sequence
cattagctgcaagtgaacaagtcat

SEQ ID NO: 140498 - DNA, 25 bp, Probe sequence
ctggattaacggctggtcaacaaat

SEQ ID NO: 140499 - DNA, 25 bp, Probe sequence
gccattagctgcaagtgaacaagtc

SEQ ID NO: 140500 - DNA, 25 bp, Probe sequence
gctgcaagtgaacaagtcattaact

SEQ ID NO: 140501 - DNA, 25 bp, Probe sequence
gctttctatggggaaacatgatcca

SEQ ID NO: 140502 - DNA, 25 bp, Probe sequence
gaatgaaaattatcacttgttaagt

SEQ ID NO: 140503 - DNA, 25 bp, Probe sequence
gaagcattgaatgaaaattatcact

SEQ ID NO: 140504 - DNA, 25 bp, Probe sequence
gaaactggattaacggctggtcaac

SEQ ID NO: 140505 - DNA, 25 bp, Probe sequence
gaggacaagtttcagaaaatgggat

SEQ ID NO: 140506 - DNA, 25 bp, Probe sequence
gattaacggctggtcaacaaatact

SEQ ID NO: 140507 - DNA, 25 bp, Probe sequence
gttggattttcaaatggatcaaata

SEQ ID NO: 140508 - DNA, 25 bp, Probe sequence
gtacttgttggattttcaaatggat

SEQ ID NO: 140509 - DNA, 25 bp, Probe sequence
gtcttggtgaaggtgtttatgatga

SEQ ID NO: 140510 - DNA, 25 bp, Probe sequence
gtgccattagctgcaagtgaacaag

SEQ ID NO: 140511 - DNA, 25 bp, Probe sequence
gtgtgttgctttctatggggaaaca

SEQ ID NO: 140512 - DNA, 25 bp, Probe sequence
gtgttgctttctatggggaaacatg

SEQ ID NO: 140513 - DNA, 25 bp, Probe sequence
ggtgaaggtgtttatgatgaagaag

SEQ ID NO: 140514 - DNA, 25 bp, Probe sequence
ggattaacggctggtcaacaaatac

SEQ ID NO: 140515 - DNA, 25 bp, Probe sequence
ggatcaaatatagcgattaacttaa

SEQ ID NO: 140516 - DNA, 25 bp, Probe sequence
tagcgattaacttaatgttgcgttc

SEQ ID NO: 140517 - DNA, 25 bp, Probe sequence
tttctatggggaaacatgatccaat

SEQ ID NO: 140518 - DNA, 25 bp, Probe sequence
ttaacggctggtcaacaaatacttg

SEQ ID NO: 140519 - DNA, 25 bp, Probe sequence
ataggcctatagttaatccaattaa

SEQ ID NO: 140520 - DNA, 25 bp, Probe sequence
atcaatgttgcgataggtaactttg

SEQ ID NO: 140521 - DNA, 25 bp, Probe sequence
atgttgcgataggtaactttgaagt

SEQ ID NO: 140522 - DNA, 25 bp, Probe sequence
agggaaccatgagattgaaattgat

SEQ ID NO: 140523 - DNA, 25 bp, Probe sequence
agaacgcagggaaccatgagattga

SEQ ID NO: 140524 - DNA, 25 bp, Probe sequence
accaactagatttactatcaatgtt

SEQ ID NO: 140525 - DNA, 25 bp, Probe sequence
actaccaactagatttactatcaat

SEQ ID NO: 140526 - DNA, 25 bp, Probe sequence
actagatttactatcaatgttgcga

SEQ ID NO: 140527 - DNA, 25 bp, Probe sequence
aaagaacgcagggaaccatgagatt

SEQ ID NO: 140528 - DNA, 25 bp, Probe sequence
aaactaccaactagatttactatca

SEQ ID NO: 140529 - DNA, 25 bp, Probe sequence
aactagatttactatcaatgttgcg

SEQ ID NO: 140530 - DNA, 25 bp, Probe sequence
aactaccaactagatttactatcaa

SEQ ID NO: 140531 - DNA, 25 bp, Probe sequence
aacgcagggaaccatgagattgaaa

SEQ ID NO: 140532 - DNA, 25 bp, Probe sequence
aagaacgcagggaaccatgagattg

SEQ ID NO: 140533 - DNA, 25 bp, Probe sequence
caatgttgcgataggtaactttgaa

SEQ ID NO: 140534 - DNA, 25 bp, Probe sequence
caaagaacgcagggaaccatgagat

SEQ ID NO: 140535 - DNA, 25 bp, Probe sequence
ctagatttactatcaatgttgcgat

SEQ ID NO: 140536 - DNA, 25 bp, Probe sequence
ctaccaactagatttactatcaatg

SEQ ID NO: 140537 - DNA, 25 bp, Probe sequence
cgcagggaaccatgagattgaaatt

SEQ ID NO: 140538 - DNA, 25 bp, Probe sequence
gcagggaaccatgagattgaaattg

SEQ ID NO: 140539 - DNA, 25 bp, Probe sequence
gaacgcagggaaccatgagattgaa

SEQ ID NO: 140540 - DNA, 25 bp, Probe sequence
gacaaagaacgcagggaaccatgag

SEQ ID NO: 140541 - DNA, 25 bp, Probe sequence
gagattgaaattgataggcctatag

SEQ ID NO: 140542 - DNA, 25 bp, Probe sequence
gataggcctatagttaatccaatta

SEQ ID NO: 140543 - DNA, 25 bp, Probe sequence
gttgcgataggtaactttgaagtaa

SEQ ID NO: 140544 - DNA, 25 bp, Probe sequence
gtgacaaagaacgcagggaaccatg

SEQ ID NO: 140545 - DNA, 25 bp, Probe sequence
tgataggcctatagttaatccaatt

SEQ ID NO: 140546 - DNA, 25 bp, Probe sequence
tgacaaagaacgcagggaaccatga

SEQ ID NO: 140547 - DNA, 25 bp, Probe sequence
tgagattgaaattgataggcctata

SEQ ID NO: 140548 - DNA, 25 bp, Probe sequence
taccaactagatttactatcaatgt

SEQ ID NO: 140549 - DNA, 25 bp, Probe sequence
tagatttactatcaatgttgcgata

SEQ ID NO: 140550 - DNA, 25 bp, Probe sequence
taggcctatagttaatccaattaaa

SEQ ID NO: 140551 - DNA, 25 bp, Probe sequence
ttgcgataggtaactttgaagtaaa

SEQ ID NO: 140552 - DNA, 25 bp, Probe sequence
ttgataggcctatagttaatccaat

SEQ ID NO: 140553 - DNA, 25 bp, Probe sequence
atattttagagactgtttacggtat

SEQ ID NO: 140554 - DNA, 25 bp, Probe sequence
ataaagggccagcagcacgtcaagg

SEQ ID NO: 140555 - DNA, 25 bp, Probe sequence
agggcaggcaggaacaaattccatt

SEQ ID NO: 140556 - DNA, 25 bp, Probe sequence
acggtatgacaactattgcgcatga

SEQ ID NO: 140557 - DNA, 25 bp, Probe sequence
acaaattccattacaagaccgtctt

SEQ ID NO: 140558 - DNA, 25 bp, Probe sequence
acaagaccgtcttttagagtgccta

SEQ ID NO: 140559 - DNA, 25 bp, Probe sequence
aaaagacagtcaatcaagatgatat

SEQ ID NO: 140560 - DNA, 25 bp, Probe sequence
aagtcgatggccaagtgtatcaatt

SEQ ID NO: 140561 - DNA, 25 bp, Probe sequence
aagtgttgccatttgaagaagtcga

SEQ ID NO: 140562 - DNA, 25 bp, Probe sequence
aatattacaaaagggcaggcaggaa

SEQ ID NO: 140563 - DNA, 25 bp, Probe sequence
catcatgtgtcatttcgtgtgaaag

SEQ ID NO: 140564 - DNA, 25 bp, Probe sequence
cttttagagtgcctaacgatgacgc

SEQ ID NO: 140565 - DNA, 25 bp, Probe sequence
ggaagaatggaccggttccagtaga

SEQ ID NO: 140566 - DNA, 25 bp, Probe sequence
gaccgtcttttagagtgcctaacga

SEQ ID NO: 140567 - DNA, 25 bp, Probe sequence
gcacgtgtggggcatattttaatag

SEQ ID NO: 140568 - DNA, 25 bp, Probe sequence
gcacctggtgtaccttggaagaatg

SEQ ID NO: 140569 - DNA, 25 bp, Probe sequence
gcacgtcaaggttatggtgaggtac

SEQ ID NO: 140570 - DNA, 25 bp, Probe sequence
gaagaagtcgatggccaagtgtatc

SEQ ID NO: 140571 - DNA, 25 bp, Probe sequence
gaagcattatatgcacgtgtggggc

SEQ ID NO: 140572 - DNA, 25 bp, Probe sequence
gaagcgtgggcaacgaaatataaag

SEQ ID NO: 140573 - DNA, 25 bp, Probe sequence
gacaactattgcgcatgaagataat

SEQ ID NO: 140574 - DNA, 25 bp, Probe sequence
gagactgtttacggtatgacaacta

SEQ ID NO: 140575 - DNA, 25 bp, Probe sequence
gatgataaagggccagcagcacgtc

SEQ ID NO: 140576 - DNA, 25 bp, Probe sequence
gatgcaatagaagcgtgggcaacga

SEQ ID NO: 140577 - DNA, 25 bp, Probe sequence
gttatggtgaggtacatcatgtgtc

SEQ ID NO: 140578 - DNA, 25 bp, Probe sequence
ggtggccaggtaatcttaataaaag

SEQ ID NO: 140579 - DNA, 25 bp, Probe sequence
ggtacatcatgtgtcatttcgtgtg

SEQ ID NO: 140580 - DNA, 25 bp, Probe sequence
ggcaatggtggccaggtaatcttaa

SEQ ID NO: 140581 - DNA, 25 bp, Probe sequence
ggccagcagcacgtcaaggttatgg

SEQ ID NO: 140582 - DNA, 25 bp, Probe sequence
ggccaagtgtatcaattaatttcag

SEQ ID NO: 140583 - DNA, 25 bp, Probe sequence
tcgcattacttgaagttggcgaagg

SEQ ID NO: 140584 - DNA, 25 bp, Probe sequence
tagaaatttcaacagatggaccagg

SEQ ID NO: 140585 - DNA, 25 bp, Probe sequence
ttcgtgtgaaagatcatgatgcaat

SEQ ID NO: 140586 - DNA, 25 bp, Probe sequence
ttctttgattttccaaatattacaa

SEQ ID NO: 140587 - DNA, 25 bp, Probe sequence
tcaacggttgtcgcctaaaggcaaa

SEQ ID NO: 140588 - DNA, 25 bp, Probe sequence
attttgaagttactactcttacaga

SEQ ID NO: 140589 - DNA, 25 bp, Probe sequence
atagcgagacacatgggtgtttata

SEQ ID NO: 140590 - DNA, 25 bp, Probe sequence
ataaatatttaaatggctttgagcc

SEQ ID NO: 140591 - DNA, 25 bp, Probe sequence
ataagcttattctttggcaatattt

SEQ ID NO: 140592 - DNA, 25 bp, Probe sequence
atcaacggttgtcgcctaaaggcaa

SEQ ID NO: 140593 - DNA, 25 bp, Probe sequence
atcgtcagtctattattgacaagta

SEQ ID NO: 140594 - DNA, 25 bp, Probe sequence
atggctttgagccaaccaaaaagag

SEQ ID NO: 140595 - DNA, 25 bp, Probe sequence
agtctattattgacaagtattatcc

SEQ ID NO: 140596 - DNA, 25 bp, Probe sequence
agaaatcgtcagtctattattgaca

SEQ ID NO: 140597 - DNA, 25 bp, Probe sequence
actataagcttattctttggcaata

SEQ ID NO: 140598 - DNA, 25 bp, Probe sequence
acaaaagccagtcatcaagcacagt

SEQ ID NO: 140599 - DNA, 25 bp, Probe sequence
aaattgtcatggagaacttaaacat

SEQ ID NO: 140600 - DNA, 25 bp, Probe sequence
aaaagttctactataagcttattct

SEQ ID NO: 140601 - DNA, 25 bp, Probe sequence
aacgagattcgagacaaaagccagt

SEQ ID NO: 140602 - DNA, 25 bp, Probe sequence
gcctaaaggcaaaacgagattcgag

SEQ ID NO: 140603 - DNA, 25 bp, Probe sequence
gcttattctttggcaatatttgaaa

SEQ ID NO: 140604 - DNA, 25 bp, Probe sequence
gaaggataatcaaatggtcctttag

SEQ ID NO: 140605 - DNA, 25 bp, Probe sequence
gaagttactactcttacagatttac

SEQ ID NO: 140606 - DNA, 25 bp, Probe sequence
gacacatgggtgtttatagaagaac

SEQ ID NO: 140607 - DNA, 25 bp, Probe sequence
gagccaaccaaaaagagaaatcgtc

SEQ ID NO: 140608 - DNA, 25 bp, Probe sequence
gattcgagacaaaagccagtcatca

SEQ ID NO: 140609 - DNA, 25 bp, Probe sequence
gttctactataagcttattctttgg

SEQ ID NO: 140610 - DNA, 25 bp, Probe sequence
gttactactcttacagatttaccaa

SEQ ID NO: 140611 - DNA, 25 bp, Probe sequence
ggttgtcgcctaaaggcaaaacgag

SEQ ID NO: 140612 - DNA, 25 bp, Probe sequence
tgaaaggttatcaacggttgtcgcc

SEQ ID NO: 140613 - DNA, 25 bp, Probe sequence
tgaaatagcgagacacatgggtgtt

SEQ ID NO: 140614 - DNA, 25 bp, Probe sequence
tcgagacaaaagccagtcatcaagc

SEQ ID NO: 140615 - DNA, 25 bp, Probe sequence
tctactataagcttattctttggca

SEQ ID NO: 140616 - DNA, 25 bp, Probe sequence
tcagactctagtgaacaaaagttct

SEQ ID NO: 140617 - DNA, 25 bp, Probe sequence
tactactcttacagatttaccaaaa

SEQ ID NO: 140618 - DNA, 25 bp, Probe sequence
tactcttacagatttaccaaaatta

SEQ ID NO: 140619 - DNA, 25 bp, Probe sequence
tatcaacggttgtcgcctaaaggca

SEQ ID NO: 140620 - DNA, 25 bp, Probe sequence
tttgaagttactactcttacagatt

SEQ ID NO: 140621 - DNA, 25 bp, Probe sequence
attttccctaagcatgctgagacat

SEQ ID NO: 140622 - DNA, 25 bp, Probe sequence
ataaaggtccgcaaccaattcaacg

SEQ ID NO: 140623 - DNA, 25 bp, Probe sequence
aggttggattacacgtgaaaaggat

SEQ ID NO: 140624 - DNA, 25 bp, Probe sequence
atggcagatattttccctaagcatg

SEQ ID NO: 140625 - DNA, 25 bp, Probe sequence
agcatttcatatgttgtaagtcaat

SEQ ID NO: 140626 - DNA, 25 bp, Probe sequence
acgtgtatatatggcttgtttaact

SEQ ID NO: 140627 - DNA, 25 bp, Probe sequence
acaaaagcgtttgatgtgttaacaa

SEQ ID NO: 140628 - DNA, 25 bp, Probe sequence
aacgtattagagaccgcgtattaat

SEQ ID NO: 140629 - DNA, 25 bp, Probe sequence
aaggtccgcaaccaattcaacgtat

SEQ ID NO: 140630 - DNA, 25 bp, Probe sequence
aagtgcacaatctacagaagtgtaa

SEQ ID NO: 140631 - DNA, 25 bp, Probe sequence
caaatggcagatattttccctaagc

SEQ ID NO: 140632 - DNA, 25 bp, Probe sequence
ccaattcaacgtattagagaccgcg

SEQ ID NO: 140633 - DNA, 25 bp, Probe sequence
ccgcaaccaattcaacgtattagag

SEQ ID NO: 140634 - DNA, 25 bp, Probe sequence
gcagtgctcgagttgctttataata

SEQ ID NO: 140635 - DNA, 25 bp, Probe sequence
gcaagtagcagcatttcatatgttg

SEQ ID NO: 140636 - DNA, 25 bp, Probe sequence
gaatttgcagtgctcgagttgcttt

SEQ ID NO: 140637 - DNA, 25 bp, Probe sequence
gatgataaacgtgtatatatggctt

SEQ ID NO: 140638 - DNA, 25 bp, Probe sequence
gatattttccctaagcatgctgaga

SEQ ID NO: 140639 - DNA, 25 bp, Probe sequence
gtatatatggcttgtttaactgaaa

SEQ ID NO: 140640 - DNA, 25 bp, Probe sequence
gtagcagcatttcatatgttgtaag

SEQ ID NO: 140641 - DNA, 25 bp, Probe sequence
gtccgcaaccaattcaacgtattag

SEQ ID NO: 140642 - DNA, 25 bp, Probe sequence
gtgctcgagttgctttataataaag

SEQ ID NO: 140643 - DNA, 25 bp, Probe sequence
gggcgttagacacattagagcaaat

SEQ ID NO: 140644 - DNA, 25 bp, Probe sequence
ggatgaattaacaatcttacaacaa

SEQ ID NO: 140645 - DNA, 25 bp, Probe sequence
ggacaaaggttggattacacgtgaa

SEQ ID NO: 140646 - DNA, 25 bp, Probe sequence
ggcagatattttccctaagcatgct

SEQ ID NO: 140647 - DNA, 25 bp, Probe sequence
ggcttaaatattactgaatttgcag

SEQ ID NO: 140648 - DNA, 25 bp, Probe sequence
tggcttgtttaactgaaaaaggtca

SEQ ID NO: 140649 - DNA, 25 bp, Probe sequence
taagcatgctgagacattaacaaaa

SEQ ID NO: 140650 - DNA, 25 bp, Probe sequence
taacaatcttacaacaagcgtttaa

SEQ ID NO: 140651 - DNA, 25 bp, Probe sequence
tagggcgttagacacattagagcaa

SEQ ID NO: 140652 - DNA, 25 bp, Probe sequence
tttgcagtgctcgagttgctttata

SEQ ID NO: 140653 - DNA, 25 bp, Probe sequence
ttccctaagcatgctgagacattaa

SEQ ID NO: 140654 - DNA, 25 bp, Probe sequence
ttgtcggaatgaatagggcgttaga

SEQ ID NO: 140655 - DNA, 25 bp, Probe sequence
atcttagatactgagcaatttggtt

SEQ ID NO: 140656 - DNA, 25 bp, Probe sequence
atggatgcatttcatttcagacatg

SEQ ID NO: 140657 - DNA, 25 bp, Probe sequence
agcaatttggtttatcagtgatggt

SEQ ID NO: 140658 - DNA, 25 bp, Probe sequence
actaagcaattcgatccacaaaaga

SEQ ID NO: 140659 - DNA, 25 bp, Probe sequence
aacaattagatacagcgagccattt

SEQ ID NO: 140660 - DNA, 25 bp, Probe sequence
aacaaaaattcgatgcattccaagc

SEQ ID NO: 140661 - DNA, 25 bp, Probe sequence
cagccgcattgttaggtattgattc

SEQ ID NO: 140662 - DNA, 25 bp, Probe sequence
cattccaagcagatttccatatttc

SEQ ID NO: 140663 - DNA, 25 bp, Probe sequence
gccttgtatgactggtcaagtaaac

SEQ ID NO: 140664 - DNA, 25 bp, Probe sequence
gccattttgtgctaatttttgcgcg

SEQ ID NO: 140665 - DNA, 25 bp, Probe sequence
gcgttacgtgatgaattaaaagcgc

SEQ ID NO: 140666 - DNA, 25 bp, Probe sequence
gaatcaaacaattatggatgcattt

SEQ ID NO: 140667 - DNA, 25 bp, Probe sequence
gaaccttggaagtttgtcgtgattc

SEQ ID NO: 140668 - DNA, 25 bp, Probe sequence
gacgacagccgcattgttaggtatt

SEQ ID NO: 140669 - DNA, 25 bp, Probe sequence
gagtcaggtagattgtctccaagtt

SEQ ID NO: 140670 - DNA, 25 bp, Probe sequence
gatgacgacagccgcattgttaggt

SEQ ID NO: 140671 - DNA, 25 bp, Probe sequence
gatgcattccaagcagatttccata

SEQ ID NO: 140672 - DNA, 25 bp, Probe sequence
gatcaccgtatgtacaacatatgtt

SEQ ID NO: 140673 - DNA, 25 bp, Probe sequence
gatcaagccttgtatgactggtcaa

SEQ ID NO: 140674 - DNA, 25 bp, Probe sequence
gatacagcgagccattttgtgctaa

SEQ ID NO: 140675 - DNA, 25 bp, Probe sequence
gatttccatatttctgataatgatc

SEQ ID NO: 140676 - DNA, 25 bp, Probe sequence
gattgtctccaagttctcttgggtt

SEQ ID NO: 140677 - DNA, 25 bp, Probe sequence
gttattgaatgggttggaccaaaag

SEQ ID NO: 140678 - DNA, 25 bp, Probe sequence
ggtagattgtctccaagttctcttg

SEQ ID NO: 140679 - DNA, 25 bp, Probe sequence
tgtccgatggaaggttttagtctgg

SEQ ID NO: 140680 - DNA, 25 bp, Probe sequence
ggaaggttttagtctggatacagtg

SEQ ID NO: 140681 - DNA, 25 bp, Probe sequence
ggatacagtgacagacattttagca

SEQ ID NO: 140682 - DNA, 25 bp, Probe sequence
ggaagtttgtcgtgattcaagatca

SEQ ID NO: 140683 - DNA, 25 bp, Probe sequence
ggcaatatgatgacgacagccgcat

SEQ ID NO: 140684 - DNA, 25 bp, Probe sequence
tgattcaagatcaagcgttacgtga

SEQ ID NO: 140685 - DNA, 25 bp, Probe sequence
taaaagcgcacagttggggcgcagc

SEQ ID NO: 140686 - DNA, 25 bp, Probe sequence
taggtattgattcatgtccgatgga

SEQ ID NO: 140687 - DNA, 25 bp, Probe sequence
ttttgtgctaatttttgcgcgtaaa

SEQ ID NO: 140688 - DNA, 25 bp, Probe sequence
ttctcttgggttagaaccttggaag

SEQ ID NO: 140689 - DNA, 25 bp, Probe sequence
atattttaaaacatacttctgaagc

SEQ ID NO: 140690 - DNA, 25 bp, Probe sequence
atattacatttattgctgcgagtgg

SEQ ID NO: 140691 - DNA, 25 bp, Probe sequence
atatgcgaagttgaagtctattttc

SEQ ID NO: 140692 - DNA, 25 bp, Probe sequence
atagagatatgtattttatttctga

SEQ ID NO: 140693 - DNA, 25 bp, Probe sequence
atacgagattttattatcatcagtt

SEQ ID NO: 140694 - DNA, 25 bp, Probe sequence
ataaaagctttaatcgtcaggtgtt

SEQ ID NO: 140695 - DNA, 25 bp, Probe sequence
atggttaaggctattgcggtagata

SEQ ID NO: 140696 - DNA, 25 bp, Probe sequence
agctttaatcgtcaggtgtttcaac

SEQ ID NO: 140697 - DNA, 25 bp, Probe sequence
aaagtattgatcaactcgtcatctg

SEQ ID NO: 140698 - DNA, 25 bp, Probe sequence
aattacctgaggatgattatgtcaa

SEQ ID NO: 140699 - DNA, 25 bp, Probe sequence
caactcgtcatctgtggtttgaaaa

SEQ ID NO: 140700 - DNA, 25 bp, Probe sequence
ctccaagtaatgataagcagggtgt

SEQ ID NO: 140701 - DNA, 25 bp, Probe sequence
gcggtagatatggacgggacgtttt

SEQ ID NO: 140702 - DNA, 25 bp, Probe sequence
gctgtcgctccaagtaatgataagc

SEQ ID NO: 140703 - DNA, 25 bp, Probe sequence
gcaacgcaattcagcaatgatatta

SEQ ID NO: 140704 - DNA, 25 bp, Probe sequence
gaagtctattttcggggatagagat

SEQ ID NO: 140705 - DNA, 25 bp, Probe sequence
gaagttgaagtctattttcggggat

SEQ ID NO: 140706 - DNA, 25 bp, Probe sequence
gaagaagtagcaacgcaattcagca

SEQ ID NO: 140707 - DNA, 25 bp, Probe sequence
gagatattacatttattgctgcgag

SEQ ID NO: 140708 - DNA, 25 bp, Probe sequence
gatagcattgatattattatgccaa

SEQ ID NO: 140709 - DNA, 25 bp, Probe sequence
gatatggacgggacgtttttagatt

SEQ ID NO: 140710 - DNA, 25 bp, Probe sequence
gatattattatgccaaacatgacta

SEQ ID NO: 140711 - DNA, 25 bp, Probe sequence
gtattgatcaactcgtcatctgtgg

SEQ ID NO: 140712 - DNA, 25 bp, Probe sequence
gtagcaacgcaattcagcaatgata

SEQ ID NO: 140713 - DNA, 25 bp, Probe sequence
gtcatctgtggtttgaaaagcgcgt

SEQ ID NO: 140714 - DNA, 25 bp, Probe sequence
gggcaggcattaaaacgattgttag

SEQ ID NO: 140715 - DNA, 25 bp, Probe sequence
ggctattgcggtagatatggacggg

SEQ ID NO: 140716 - DNA, 25 bp, Probe sequence
tgtggtttgaaaagcgcgtatattt

SEQ ID NO: 140717 - DNA, 25 bp, Probe sequence
tgatcaactcgtcatctgtggtttg

SEQ ID NO: 140718 - DNA, 25 bp, Probe sequence
tgatattaaacttgtctcaagtggg

SEQ ID NO: 140719 - DNA, 25 bp, Probe sequence
ttaatcgtcaggtgtttcaacaggt

SEQ ID NO: 140720 - DNA, 25 bp, Probe sequence
ttatttctgaaaatggtgcagttat

SEQ ID NO: 140721 - DNA, 25 bp, Probe sequence
ttaatattaatcgtgagacgcatcc

SEQ ID NO: 140722 - DNA, 25 bp, Probe sequence
ttcgctaagcatagttatgtgatgg

SEQ ID NO: 140723 - DNA, 25 bp, Probe sequence
attgcaggacacactttcattgacc

SEQ ID NO: 140724 - DNA, 25 bp, Probe sequence
atttacaaatcttaaagcagccaaa

SEQ ID NO: 140725 - DNA, 25 bp, Probe sequence
atcactagatgatcaaaatatttca

SEQ ID NO: 140726 - DNA, 25 bp, Probe sequence
aggaccagcaacacctgaacaatta

SEQ ID NO: 140727 - DNA, 25 bp, Probe sequence
agtatatccaggaccagcaacacct

SEQ ID NO: 140728 - DNA, 25 bp, Probe sequence
agttggtaatgaaacacgtaagtat

SEQ ID NO: 140729 - DNA, 25 bp, Probe sequence
actttcattgaccgtccgaactatc

SEQ ID NO: 140730 - DNA, 25 bp, Probe sequence
acatatcgataattatcttcacgat

SEQ ID NO: 140731 - DNA, 25 bp, Probe sequence
acactttcattgaccgtccgaacta

SEQ ID NO: 140732 - DNA, 25 bp, Probe sequence
aaatctttgtagctacagaagtcaa

SEQ ID NO: 140733 - DNA, 25 bp, Probe sequence
aaagtggcaggctatattgaaattc

SEQ ID NO: 140734 - DNA, 25 bp, Probe sequence
aaaccacatatcgataattatcttc

SEQ ID NO: 140735 - DNA, 25 bp, Probe sequence
aacattaattacttgtgatgattac

SEQ ID NO: 140736 - DNA, 25 bp, Probe sequence
aacgtaaaatctttgtagctacaga

SEQ ID NO: 140737 - DNA, 25 bp, Probe sequence
aagaaccagtatatccaggaccagc

SEQ ID NO: 140738 - DNA, 25 bp, Probe sequence
caatgaaaagacaggcgtttgggaa

SEQ ID NO: 140739 - DNA, 25 bp, Probe sequence
aatatttcaattgcaggacacactt

SEQ ID NO: 140740 - DNA, 25 bp, Probe sequence
gctatattgaaattccagatgctga

SEQ ID NO: 140741 - DNA, 25 bp, Probe sequence
gcatatttgtttgctaaaccacata

SEQ ID NO: 140742 - DNA, 25 bp, Probe sequence
gcaggacacactttcattgaccgtc

SEQ ID NO: 140743 - DNA, 25 bp, Probe sequence
gaaccagtatatccaggaccagcaa

SEQ ID NO: 140744 - DNA, 25 bp, Probe sequence
gaccgtccgaactatcaatttacaa

SEQ ID NO: 140745 - DNA, 25 bp, Probe sequence
gaggtgtaagctttgcagaagaaaa

SEQ ID NO: 140746 - DNA, 25 bp, Probe sequence
gtttgctaaaccacatatcgataat

SEQ ID NO: 140747 - DNA, 25 bp, Probe sequence
gtccgaactatcaatttacaaatct

SEQ ID NO: 140748 - DNA, 25 bp, Probe sequence
ggacacactttcattgaccgtccga

SEQ ID NO: 140749 - DNA, 25 bp, Probe sequence
ggcaggctatattgaaattccagat

SEQ ID NO: 140750 - DNA, 25 bp, Probe sequence
tgcaggacacactttcattgaccgt

SEQ ID NO: 140751 - DNA, 25 bp, Probe sequence
tccagatgctgatattaaagaacca

SEQ ID NO: 140752 - DNA, 25 bp, Probe sequence
taaatagaggtgtaagctttgcaga

SEQ ID NO: 140753 - DNA, 25 bp, Probe sequence
taaagcagccaaaaaaggtagtatg

SEQ ID NO: 140754 - DNA, 25 bp, Probe sequence
tatccaggaccagcaacacctgaac

SEQ ID NO: 140755 - DNA, 25 bp, Probe sequence
tttcattgaccgtccgaactatcaa

SEQ ID NO: 140756 - DNA, 25 bp, Probe sequence
tttcaattgcaggacacactttcat

SEQ ID NO: 140757 - DNA, 25 bp, Probe sequence
attaatgacaatcgctggtgtggta

SEQ ID NO: 140758 - DNA, 25 bp, Probe sequence
atcgctggtgtggtacttatcctag

SEQ ID NO: 140759 - DNA, 25 bp, Probe sequence
atgacaatcgctggtgtggtactta

SEQ ID NO: 140760 - DNA, 25 bp, Probe sequence
atgagtcattttgaaattaatggta

SEQ ID NO: 140761 - DNA, 25 bp, Probe sequence
aggagccttaacgtatgaaaaaatg

SEQ ID NO: 140762 - DNA, 25 bp, Probe sequence
acttatcctagtggcagcatatttg

SEQ ID NO: 140763 - DNA, 25 bp, Probe sequence
acaatcgctggtgtggtacttatcc

SEQ ID NO: 140764 - DNA, 25 bp, Probe sequence
aaaatggacaaatcgattaatgaca

SEQ ID NO: 140765 - DNA, 25 bp, Probe sequence
aatgacaatcgctggtgtggtactt

SEQ ID NO: 140766 - DNA, 25 bp, Probe sequence
aatcgctggtgtggtacttatccta

SEQ ID NO: 140767 - DNA, 25 bp, Probe sequence
caatcgctggtgtggtacttatcct

SEQ ID NO: 140768 - DNA, 25 bp, Probe sequence
ctggtgtggtacttatcctagtggc

SEQ ID NO: 140769 - DNA, 25 bp, Probe sequence
cgctggtgtggtacttatcctagtg

SEQ ID NO: 140770 - DNA, 25 bp, Probe sequence
gctggtgtggtacttatcctagtgg

SEQ ID NO: 140771 - DNA, 25 bp, Probe sequence
gaaatgttaacaggcattgtgaaat

SEQ ID NO: 140772 - DNA, 25 bp, Probe sequence
gacaatcgctggtgtggtacttatc

SEQ ID NO: 140773 - DNA, 25 bp, Probe sequence
gattaatgacaatcgctggtgtggt

SEQ ID NO: 140774 - DNA, 25 bp, Probe sequence
gttaacaggcattgtgaaatgtata

SEQ ID NO: 140775 - DNA, 25 bp, Probe sequence
gtacttatcctagtggcagcatatt

SEQ ID NO: 140776 - DNA, 25 bp, Probe sequence
gtgaaatgtataaaaggagccttaa

SEQ ID NO: 140777 - DNA, 25 bp, Probe sequence
gtgtggtacttatcctagtggcagc

SEQ ID NO: 140778 - DNA, 25 bp, Probe sequence
gtggtacttatcctagtggcagcat

SEQ ID NO: 140779 - DNA, 25 bp, Probe sequence
ggagccttaacgtatgaaaaaatgg

SEQ ID NO: 140780 - DNA, 25 bp, Probe sequence
ggtgtggtacttatcctagtggcag

SEQ ID NO: 140781 - DNA, 25 bp, Probe sequence
ggtacttatcctagtggcagcatat

SEQ ID NO: 140782 - DNA, 25 bp, Probe sequence
tgacaatcgctggtgtggtacttat

SEQ ID NO: 140783 - DNA, 25 bp, Probe sequence
tggtacttatcctagtggcagcata

SEQ ID NO: 140784 - DNA, 25 bp, Probe sequence
tggtgtggtacttatcctagtggca

SEQ ID NO: 140785 - DNA, 25 bp, Probe sequence
tgtggtacttatcctagtggcagca

SEQ ID NO: 140786 - DNA, 25 bp, Probe sequence
tcgctggtgtggtacttatcctagt

SEQ ID NO: 140787 - DNA, 25 bp, Probe sequence
taatgacaatcgctggtgtggtact

SEQ ID NO: 140788 - DNA, 25 bp, Probe sequence
tacttatcctagtggcagcatattt

SEQ ID NO: 140789 - DNA, 25 bp, Probe sequence
ttttgaaattaatggtatactatat

SEQ ID NO: 140790 - DNA, 25 bp, Probe sequence
ttaatgacaatcgctggtgtggtac

SEQ ID NO: 140791 - DNA, 25 bp, Probe sequence
atttaaatctttatcgctcagcatg

SEQ ID NO: 140792 - DNA, 25 bp, Probe sequence
atcaatcatctttatagcattcatc

SEQ ID NO: 140793 - DNA, 25 bp, Probe sequence
atctttatcgctcagcatgattatc

SEQ ID NO: 140794 - DNA, 25 bp, Probe sequence
atcatctttatagcattcatcatta

SEQ ID NO: 140795 - DNA, 25 bp, Probe sequence
atctttatagcattcatcattaaca

SEQ ID NO: 140796 - DNA, 25 bp, Probe sequence
atcgttttcatgttctactatattc

SEQ ID NO: 140797 - DNA, 25 bp, Probe sequence
atcgctcagcatgattatcgttttc

SEQ ID NO: 140798 - DNA, 25 bp, Probe sequence
atgctaagactatcaatcatcttta

SEQ ID NO: 140799 - DNA, 25 bp, Probe sequence
agcattcatcattaacacaacgatt

SEQ ID NO: 140800 - DNA, 25 bp, Probe sequence
acgactgagggaacgtgggtcaatc

SEQ ID NO: 140801 - DNA, 25 bp, Probe sequence
aaatctttatcgctcagcatgatta

SEQ ID NO: 140802 - DNA, 25 bp, Probe sequence
aacgattacatatggatatacgact

SEQ ID NO: 140803 - DNA, 25 bp, Probe sequence
aagactatcaatcatctttatagca

SEQ ID NO: 140804 - DNA, 25 bp, Probe sequence
caatcatctttatagcattcatcat

SEQ ID NO: 140805 - DNA, 25 bp, Probe sequence
catgttctactatattcgttttgtt

SEQ ID NO: 140806 - DNA, 25 bp, Probe sequence
ctttatcgctcagcatgattatcgt

SEQ ID NO: 140807 - DNA, 25 bp, Probe sequence
cgctcagcatgattatcgttttcat

SEQ ID NO: 140808 - DNA, 25 bp, Probe sequence
gactgagggaacgtgggtcaatcta

SEQ ID NO: 140809 - DNA, 25 bp, Probe sequence
gaacgtgggtcaatctattatttaa

SEQ ID NO: 140810 - DNA, 25 bp, Probe sequence
gagggaacgtgggtcaatctattat

SEQ ID NO: 140811 - DNA, 25 bp, Probe sequence
gattatcgttttcatgttctactat

SEQ ID NO: 140812 - DNA, 25 bp, Probe sequence
gttctactatattcgttttgttatt

SEQ ID NO: 140813 - DNA, 25 bp, Probe sequence
gttttcatgttctactatattcgtt

SEQ ID NO: 140814 - DNA, 25 bp, Probe sequence
gtgggtcaatctattatttaaatct

SEQ ID NO: 140815 - DNA, 25 bp, Probe sequence
gggaacgtgggtcaatctattattt

SEQ ID NO: 140816 - DNA, 25 bp, Probe sequence
tcgttttcatgttctactatattcg

SEQ ID NO: 140817 - DNA, 25 bp, Probe sequence
tacatatggatatacgactgaggga

SEQ ID NO: 140818 - DNA, 25 bp, Probe sequence
tactatattcgttttgttattgaga

SEQ ID NO: 140819 - DNA, 25 bp, Probe sequence
tatagcattcatcattaacacaacg

SEQ ID NO: 140820 - DNA, 25 bp, Probe sequence
ttatcgctcagcatgattatcgttt

SEQ ID NO: 140821 - DNA, 25 bp, Probe sequence
ttatcgttttcatgttctactatat

SEQ ID NO: 140822 - DNA, 25 bp, Probe sequence
ttaaatctttatcgctcagcatgat

SEQ ID NO: 140823 - DNA, 25 bp, Probe sequence
ttcatgttctactatattcgttttg

SEQ ID NO: 140824 - DNA, 25 bp, Probe sequence
ttcatcattaacacaacgattacat

SEQ ID NO: 140825 - DNA, 25 bp, Probe sequence
attagtaccagatagatgcttctta

SEQ ID NO: 140826 - DNA, 25 bp, Probe sequence
atagatgcttcttaattatctctga

SEQ ID NO: 140827 - DNA, 25 bp, Probe sequence
atcattagtaccagatagatgcttc

SEQ ID NO: 140828 - DNA, 25 bp, Probe sequence
atctgtctggatcattagtaccaga

SEQ ID NO: 140829 - DNA, 25 bp, Probe sequence
atgcttcttaattatctctgaagaa

SEQ ID NO: 140830 - DNA, 25 bp, Probe sequence
agtaccagatagatgcttcttaatt

SEQ ID NO: 140831 - DNA, 25 bp, Probe sequence
agatgcttcttaattatctctgaag

SEQ ID NO: 140832 - DNA, 25 bp, Probe sequence
agaagcatctgtctggatcattagt

SEQ ID NO: 140833 - DNA, 25 bp, Probe sequence
agcatctgtctggatcattagtacc

SEQ ID NO: 140834 - DNA, 25 bp, Probe sequence
accagatagatgcttcttaattatc

SEQ ID NO: 140835 - DNA, 25 bp, Probe sequence
aaagaagcatctgtctggatcatta

SEQ ID NO: 140836 - DNA, 25 bp, Probe sequence
aaaaagaagcatctgtctggatcat

SEQ ID NO: 140837 - DNA, 25 bp, Probe sequence
aaaaaagaagcatctgtctggatca

SEQ ID NO: 140838 - DNA, 25 bp, Probe sequence
aaaagaagcatctgtctggatcatt

SEQ ID NO: 140839 - DNA, 25 bp, Probe sequence
aagcatctgtctggatcattagtac

SEQ ID NO: 140840 - DNA, 25 bp, Probe sequence
aagaagcatctgtctggatcattag

SEQ ID NO: 140841 - DNA, 25 bp, Probe sequence
aattatctctgaagaagttgaaaga

SEQ ID NO: 140842 - DNA, 25 bp, Probe sequence
catctgtctggatcattagtaccag

SEQ ID NO: 140843 - DNA, 25 bp, Probe sequence
cattagtaccagatagatgcttctt

SEQ ID NO: 140844 - DNA, 25 bp, Probe sequence
cttaattatctctgaagaagttgaa

SEQ ID NO: 140845 - DNA, 25 bp, Probe sequence
ctgtctggatcattagtaccagata

SEQ ID NO: 140846 - DNA, 25 bp, Probe sequence
gcatctgtctggatcattagtacca

SEQ ID NO: 140847 - DNA, 25 bp, Probe sequence
gaagcatctgtctggatcattagta

SEQ ID NO: 140848 - DNA, 25 bp, Probe sequence
gatgcttcttaattatctctgaaga

SEQ ID NO: 140849 - DNA, 25 bp, Probe sequence
gatcattagtaccagatagatgctt

SEQ ID NO: 140850 - DNA, 25 bp, Probe sequence
gatagatgcttcttaattatctctg

SEQ ID NO: 140851 - DNA, 25 bp, Probe sequence
gtaccagatagatgcttcttaatta

SEQ ID NO: 140852 - DNA, 25 bp, Probe sequence
ggatcattagtaccagatagatgct

SEQ ID NO: 140853 - DNA, 25 bp, Probe sequence
tctgtctggatcattagtaccagat

SEQ ID NO: 140854 - DNA, 25 bp, Probe sequence
tcattagtaccagatagatgcttct

SEQ ID NO: 140855 - DNA, 25 bp, Probe sequence
taccagatagatgcttcttaattat

SEQ ID NO: 140856 - DNA, 25 bp, Probe sequence
tagatgcttcttaattatctctgaa

SEQ ID NO: 140857 - DNA, 25 bp, Probe sequence
tagtaccagatagatgcttcttaat

SEQ ID NO: 140858 - DNA, 25 bp, Probe sequence
ttagtaccagatagatgcttcttaa

SEQ ID NO: 140859 - DNA, 25 bp, Probe sequence
atttcatagatactttcgctacgct

SEQ ID NO: 140860 - DNA, 25 bp, Probe sequence
atagatgagttcttatgtattgata

SEQ ID NO: 140861 - DNA, 25 bp, Probe sequence
agatatcacgatttggaccaacttc

SEQ ID NO: 140862 - DNA, 25 bp, Probe sequence
acccgcatgggtttgcattgaattc

SEQ ID NO: 140863 - DNA, 25 bp, Probe sequence
acttcttcaaactagcttatttccg

SEQ ID NO: 140864 - DNA, 25 bp, Probe sequence
aaatactatcaaaatccacccgcat

SEQ ID NO: 140865 - DNA, 25 bp, Probe sequence
aaatccacccgcatgggtttgcatt

SEQ ID NO: 140866 - DNA, 25 bp, Probe sequence
aaaagaatggcggctatttcataga

SEQ ID NO: 140867 - DNA, 25 bp, Probe sequence
aaccaacccatcatagcaaatctaa

SEQ ID NO: 140868 - DNA, 25 bp, Probe sequence
aattattgacttcaacagaccaaaa

SEQ ID NO: 140869 - DNA, 25 bp, Probe sequence
aattcatgcaactaggtcaattcgt

SEQ ID NO: 140870 - DNA, 25 bp, Probe sequence
ctaggtcaattcgtttcgtttctca

SEQ ID NO: 140871 - DNA, 25 bp, Probe sequence
caattcgtttcgtttctcaacttct

SEQ ID NO: 140872 - DNA, 25 bp, Probe sequence
cagctcataaccaacccatcatagc

SEQ ID NO: 140873 - DNA, 25 bp, Probe sequence
gctaatattttaatgcctttagtta

SEQ ID NO: 140874 - DNA, 25 bp, Probe sequence
gaataaacgaggacaactacccgag

SEQ ID NO: 140875 - DNA, 25 bp, Probe sequence
gcaattatccaagcaagatatcacg

SEQ ID NO: 140876 - DNA, 25 bp, Probe sequence
gaatttgcttatttatcagatttag

SEQ ID NO: 140877 - DNA, 25 bp, Probe sequence
gaaacaaatcagctcataaccaacc

SEQ ID NO: 140878 - DNA, 25 bp, Probe sequence
gacacaaattcaagaacaccagaag

SEQ ID NO: 140879 - DNA, 25 bp, Probe sequence
gacgaagaattgagagttgctaata

SEQ ID NO: 140880 - DNA, 25 bp, Probe sequence
gaggacaactacccgagaagttgaa

SEQ ID NO: 140881 - DNA, 25 bp, Probe sequence
gatactttcgctacgctagaattac

SEQ ID NO: 140882 - DNA, 25 bp, Probe sequence
gatacacaatgttgcatttaacttt

SEQ ID NO: 140883 - DNA, 25 bp, Probe sequence
gtttcgtttctcaacttctattaca

SEQ ID NO: 140884 - DNA, 25 bp, Probe sequence
gtagtaatgcaattatccaagcaag

SEQ ID NO: 140885 - DNA, 25 bp, Probe sequence
ggcatatctagaaacatgttcggaa

SEQ ID NO: 140886 - DNA, 25 bp, Probe sequence
ggcggctatttcatagaatttgctt

SEQ ID NO: 140887 - DNA, 25 bp, Probe sequence
tcttcaaactagcttatttccgaaa

SEQ ID NO: 140888 - DNA, 25 bp, Probe sequence
tcgctacgctagaattacataatca

SEQ ID NO: 140889 - DNA, 25 bp, Probe sequence
tcgtttctcaacttctattacaaga

SEQ ID NO: 140890 - DNA, 25 bp, Probe sequence
taatattattgacaccgaaaaagca

SEQ ID NO: 140891 - DNA, 25 bp, Probe sequence
taatgcattagctatcaaaagattt

SEQ ID NO: 140892 - DNA, 25 bp, Probe sequence
ttggaccaacttcaaaagcgatata

SEQ ID NO: 140893 - DNA, 25 bp, Probe sequence
gggtggactagcaggcacaccaact

SEQ ID NO: 140894 - DNA, 25 bp, Probe sequence
aggatcaccagaagcatccgggcac

SEQ ID NO: 140895 - DNA, 25 bp, Probe sequence
atttagatgtcatgcgagacgcagt

SEQ ID NO: 140896 - DNA, 25 bp, Probe sequence
atcacgtgatgaagtgcgagcgcaa

SEQ ID NO: 140897 - DNA, 25 bp, Probe sequence
aacgtaaaatctttggcacagctga

SEQ ID NO: 140898 - DNA, 25 bp, Probe sequence
aagttggttcagcatctgcaatggc

SEQ ID NO: 140899 - DNA, 25 bp, Probe sequence
aatgcaattggttcgggtaacgctt

SEQ ID NO: 140900 - DNA, 25 bp, Probe sequence
caggcacaccaactggcgaagcaat

SEQ ID NO: 140901 - DNA, 25 bp, Probe sequence
catccgggcacgctatggcattagc

SEQ ID NO: 140902 - DNA, 25 bp, Probe sequence
cgatgggtattatttgtgcaacgcc

SEQ ID NO: 140903 - DNA, 25 bp, Probe sequence
gctgctaaactacgtgattataatg

SEQ ID NO: 140904 - DNA, 25 bp, Probe sequence
gcagtcaaaggtgccattgcaacaa

SEQ ID NO: 140905 - DNA, 25 bp, Probe sequence
gcagctgcagcagtagctatattcg

SEQ ID NO: 140906 - DNA, 25 bp, Probe sequence
gcaaacaatgcaagtgtagctggtg

SEQ ID NO: 140907 - DNA, 25 bp, Probe sequence
gaaacacatcatgctttgtctggat

SEQ ID NO: 140908 - DNA, 25 bp, Probe sequence
gagagactatagattatgccgtaga

SEQ ID NO: 140909 - DNA, 25 bp, Probe sequence
gtagctatattcggaggatcaccag

SEQ ID NO: 140910 - DNA, 25 bp, Probe sequence
gtagctggtgcaacaggtggctgcc

SEQ ID NO: 140911 - DNA, 25 bp, Probe sequence
gtagccggacttgttgaaattcctt

SEQ ID NO: 140912 - DNA, 25 bp, Probe sequence
gtgaaactggattgggtggactagc

SEQ ID NO: 140913 - DNA, 25 bp, Probe sequence
gtcatttgcggatatcatggttaaa

SEQ ID NO: 140914 - DNA, 25 bp, Probe sequence
gtgtaacgggctacactggtcatga

SEQ ID NO: 140915 - DNA, 25 bp, Probe sequence
gtggctgccaagctgaagttggttc

SEQ ID NO: 140916 - DNA, 25 bp, Probe sequence
gggtaacgctttaatttcagcagat

SEQ ID NO: 140917 - DNA, 25 bp, Probe sequence
ggaattaagcggtaaatcacgtgat

SEQ ID NO: 140918 - DNA, 25 bp, Probe sequence
tgggcgtgtcgtagcaaacaatgca

SEQ ID NO: 140919 - DNA, 25 bp, Probe sequence
tgttgaaattccttgtgttatgaga

SEQ ID NO: 140920 - DNA, 25 bp, Probe sequence
tgaagtcaatgctgcgatgggtatt

SEQ ID NO: 140921 - DNA, 25 bp, Probe sequence
taaggttggtcgtaaccttcctgca

SEQ ID NO: 140922 - DNA, 25 bp, Probe sequence
tcagcagatttagcattagcaggta

SEQ ID NO: 140923 - DNA, 25 bp, Probe sequence
taaccttcctgcatcattacgtgaa

SEQ ID NO: 140924 - DNA, 25 bp, Probe sequence
ttcagcattgtttgggcgtgtcgta

SEQ ID NO: 140925 - DNA, 25 bp, Probe sequence
ttcttattcacttcagcattgtttg

SEQ ID NO: 140926 - DNA, 25 bp, Probe sequence
ttgtgcaacgccaacagctggttcc

SEQ ID NO: 140927 - DNA, 25 bp, Probe sequence
atacagtgacgtaaacgtttcctat

SEQ ID NO: 140928 - DNA, 25 bp, Probe sequence
atttgctcaaacacaccaaggacat

SEQ ID NO: 140929 - DNA, 25 bp, Probe sequence
ataccattaaataaagcaatctcag

SEQ ID NO: 140930 - DNA, 25 bp, Probe sequence
atgaatcatttgctcaaacacacca

SEQ ID NO: 140931 - DNA, 25 bp, Probe sequence
atggcaaagagctatgattatcaaa

SEQ ID NO: 140932 - DNA, 25 bp, Probe sequence
agttctcatacggctggtgcagtaa

SEQ ID NO: 140933 - DNA, 25 bp, Probe sequence
ccttcaagttctcatacggctggtg

SEQ ID NO: 140934 - DNA, 25 bp, Probe sequence
aaatgcttggttgtaataccattaa

SEQ ID NO: 140935 - DNA, 25 bp, Probe sequence
aaatcttcattagaaattgcagctg

SEQ ID NO: 140936 - DNA, 25 bp, Probe sequence
aaagattgggaattcagcacgcgca

SEQ ID NO: 140937 - DNA, 25 bp, Probe sequence
aacacaccaaggacatggtacagat

SEQ ID NO: 140938 - DNA, 25 bp, Probe sequence
aaggcgatagtattggtcaacatcc

SEQ ID NO: 140939 - DNA, 25 bp, Probe sequence
aattatcggtatttcaatcggtggt

SEQ ID NO: 140940 - DNA, 25 bp, Probe sequence
cggctggtgcagtaaagattgggaa

SEQ ID NO: 140941 - DNA, 25 bp, Probe sequence
cgatattatcggaccagttatgatg

SEQ ID NO: 140942 - DNA, 25 bp, Probe sequence
gctatgattatcaaagtgctttcga

SEQ ID NO: 140943 - DNA, 25 bp, Probe sequence
gaaattgcagctgatgatggtatta

SEQ ID NO: 140944 - DNA, 25 bp, Probe sequence
gactaaagcacaagtaaatcatttc

SEQ ID NO: 140945 - DNA, 25 bp, Probe sequence
gatgtcgctattgtgggtggagcaa

SEQ ID NO: 140946 - DNA, 25 bp, Probe sequence
gataaccgaattaaatcttcattag

SEQ ID NO: 140947 - DNA, 25 bp, Probe sequence
gttgttgacggaaatatgactaaag

SEQ ID NO: 140948 - DNA, 25 bp, Probe sequence
gtatttcaatcggtggtggtacaat

SEQ ID NO: 140949 - DNA, 25 bp, Probe sequence
gtgctttcgatattatcggaccagt

SEQ ID NO: 140950 - DNA, 25 bp, Probe sequence
gggatattcaacatttgataaccga

SEQ ID NO: 140951 - DNA, 25 bp, Probe sequence
gggtggagcaatgggatattcaaca

SEQ ID NO: 140952 - DNA, 25 bp, Probe sequence
ggtcaacatccaaactgtgcttata

SEQ ID NO: 140953 - DNA, 25 bp, Probe sequence
ggtacagatgtcgctattgtgggtg

SEQ ID NO: 140954 - DNA, 25 bp, Probe sequence
ggattaccaattttagttgttgacg

SEQ ID NO: 140955 - DNA, 25 bp, Probe sequence
ggaattcagcacgcgcaatattggg

SEQ ID NO: 140956 - DNA, 25 bp, Probe sequence
tgacgtaaacgtttcctatataaat

SEQ ID NO: 140957 - DNA, 25 bp, Probe sequence
tcagcacgcgcaatattgggagata

SEQ ID NO: 140958 - DNA, 25 bp, Probe sequence
tcaagttctcatacggctggtgcag

SEQ ID NO: 140959 - DNA, 25 bp, Probe sequence
tcaacgatatgaaattagactgtaa

SEQ ID NO: 140960 - DNA, 25 bp, Probe sequence
ttcaatcggtggtggtacaattaaa

SEQ ID NO: 140961 - DNA, 25 bp, Probe sequence
attaccagcattcatcgcagcttat

SEQ ID NO: 140962 - DNA, 25 bp, Probe sequence
atcgcaacagtgattattgtcagca

SEQ ID NO: 140963 - DNA, 25 bp, Probe sequence
atgcactgattggggtcgtcaacgc

SEQ ID NO: 140964 - DNA, 25 bp, Probe sequence
aggcttggacttaattgtggtgatc

SEQ ID NO: 140965 - DNA, 25 bp, Probe sequence
agcaggaagtttaagcggtatcgca

SEQ ID NO: 140966 - DNA, 25 bp, Probe sequence
aacaatccatatgcattagcggtca

SEQ ID NO: 140967 - DNA, 25 bp, Probe sequence
aagcggtatcgcagtaggtattcta

SEQ ID NO: 140968 - DNA, 25 bp, Probe sequence
aaggtatggcaacaccaattgcagg

SEQ ID NO: 140969 - DNA, 25 bp, Probe sequence
aatagcgcaatatccagtacaacta

SEQ ID NO: 140970 - DNA, 25 bp, Probe sequence
gcaccagcaattgctttcggacttg

SEQ ID NO: 140971 - DNA, 25 bp, Probe sequence
gcttaaacttaggcgttgcaccagt

SEQ ID NO: 140972 - DNA, 25 bp, Probe sequence
gcagtttgtattgagccattgacgc

SEQ ID NO: 140973 - DNA, 25 bp, Probe sequence
gacttgcatcaatcattacacctgg

SEQ ID NO: 140974 - DNA, 25 bp, Probe sequence
gacatttctaccacaagcattctta

SEQ ID NO: 140975 - DNA, 25 bp, Probe sequence
gactacaagcattatccggtgcagc

SEQ ID NO: 140976 - DNA, 25 bp, Probe sequence
gacgctatttttaaagtatgcaccg

SEQ ID NO: 140977 - DNA, 25 bp, Probe sequence
gtatcgtgacatttagcggactagt

SEQ ID NO: 140978 - DNA, 25 bp, Probe sequence
gtaggtattctaacgtgcttaaact

SEQ ID NO: 140979 - DNA, 25 bp, Probe sequence
gtgttcctatggctattggagcact

SEQ ID NO: 140980 - DNA, 25 bp, Probe sequence
gggtcgtcaacgcatgtatcgtgac

SEQ ID NO: 140981 - DNA, 25 bp, Probe sequence
ggtggaccgtcaaaagcatttgcag

SEQ ID NO: 140982 - DNA, 25 bp, Probe sequence
ggtgcagcttgtgcgacatttctac

SEQ ID NO: 140983 - DNA, 25 bp, Probe sequence
ggtatgacaccgctaagttcaatgg

SEQ ID NO: 140984 - DNA, 25 bp, Probe sequence
ggactgacaggtgttcctatggcta

SEQ ID NO: 140985 - DNA, 25 bp, Probe sequence
ggagcactaacatgtacaggtagct

SEQ ID NO: 140986 - DNA, 25 bp, Probe sequence
ggactagtgattcctgttacaggta

SEQ ID NO: 140987 - DNA, 25 bp, Probe sequence
tgtggtgatcttatttgcaccagca

SEQ ID NO: 140988 - DNA, 25 bp, Probe sequence
tgcaccgtacggtaaacaaggacta

SEQ ID NO: 140989 - DNA, 25 bp, Probe sequence
tagcggtcattttaggactagtgat

SEQ ID NO: 140990 - DNA, 25 bp, Probe sequence
tagctcatttgttaaccttatttta

SEQ ID NO: 140991 - DNA, 25 bp, Probe sequence
taggtagtgctgtcactgcggtagg

SEQ ID NO: 140992 - DNA, 25 bp, Probe sequence
taggcgttgcaccagtatttgcggt

SEQ ID NO: 140993 - DNA, 25 bp, Probe sequence
ttacacctggtgtgctagcaacatt

SEQ ID NO: 140994 - DNA, 25 bp, Probe sequence
ttgtcagcattgtcttagcctatat

SEQ ID NO: 140995 - DNA, 25 bp, Probe sequence
atttcaccagttttagatgcaacga

SEQ ID NO: 140996 - DNA, 25 bp, Probe sequence
atacctggatattaccaattccata

SEQ ID NO: 140997 - DNA, 25 bp, Probe sequence
atcaagcgacgtatgtgctttttga

SEQ ID NO: 140998 - DNA, 25 bp, Probe sequence
atcgttgtaatgggtgactctgcgg

SEQ ID NO: 140999 - DNA, 25 bp, Probe sequence
atccagtatttccgataccagagcg

SEQ ID NO: 141000 - DNA, 25 bp, Probe sequence
atggcagtgtgttcttagctgaaca

SEQ ID NO: 141001 - DNA, 25 bp, Probe sequence
agattccgcatcaagattatcaagc

SEQ ID NO: 141002 - DNA, 25 bp, Probe sequence
agagctaagcgtcgttttatgtata

SEQ ID NO: 141003 - DNA, 25 bp, Probe sequence
accaattccatatttatccagtatt

SEQ ID NO: 141004 - DNA, 25 bp, Probe sequence
acatattgtgcaaccaggacatatt

SEQ ID NO: 141005 - DNA, 25 bp, Probe sequence
aaaaatggtctacacttgcgtttgg

SEQ ID NO: 141006 - DNA, 25 bp, Probe sequence
aaagaaagacccaatggtaggtgtg

SEQ ID NO: 141007 - DNA, 25 bp, Probe sequence
aaaaaatggcgccacagacagcagg

SEQ ID NO: 141008 - DNA, 25 bp, Probe sequence
aagtcatcatgccagtatatccgaa

SEQ ID NO: 141009 - DNA, 25 bp, Probe sequence
cactcaatgctaaagtcatcatgcc

SEQ ID NO: 141010 - DNA, 25 bp, Probe sequence
cttagatggtttaggtcgtattaca

SEQ ID NO: 141011 - DNA, 25 bp, Probe sequence
gcagcatcctgaaattcctgactac

SEQ ID NO: 141012 - DNA, 25 bp, Probe sequence
gaagtactgtacccagatgctttga

SEQ ID NO: 141013 - DNA, 25 bp, Probe sequence
gaacttgcagaaacactcaatgcta

SEQ ID NO: 141014 - DNA, 25 bp, Probe sequence
gaacaatgggcaggggacacacctt

SEQ ID NO: 141015 - DNA, 25 bp, Probe sequence
gatgcaacgatgcagcatcctgaaa

SEQ ID NO: 141016 - DNA, 25 bp, Probe sequence
gtatatccgaagattccgcatcaag

SEQ ID NO: 141017 - DNA, 25 bp, Probe sequence
gtgactctgcgggcggtcaaattgc

SEQ ID NO: 141018 - DNA, 25 bp, Probe sequence
ggggacacacctttagataactaca

SEQ ID NO: 141019 - DNA, 25 bp, Probe sequence
ggtctacacttgcgtttggattttt

SEQ ID NO: 141020 - DNA, 25 bp, Probe sequence
ggtatacgattatctagagctaagc

SEQ ID NO: 141021 - DNA, 25 bp, Probe sequence
ggacatattgtattaatttcaccag

SEQ ID NO: 141022 - DNA, 25 bp, Probe sequence
tgaacttatcgcaattgttgagtgc

SEQ ID NO: 141023 - DNA, 25 bp, Probe sequence
tcctgaaattcctgactacttaaag

SEQ ID NO: 141024 - DNA, 25 bp, Probe sequence
tcgaatttattgatgaacttgcaga

SEQ ID NO: 141025 - DNA, 25 bp, Probe sequence
tcgaacatgactttatacctggata

SEQ ID NO: 141026 - DNA, 25 bp, Probe sequence
tacccagatgctttgaacttatcgc

SEQ ID NO: 141027 - DNA, 25 bp, Probe sequence
taggtcgtattacattaactgttgg

SEQ ID NO: 141028 - DNA, 25 bp, Probe sequence
tatcatttgctcaattgttaaaaga

SEQ ID NO: 141029 - DNA, 25 bp, Probe sequence
atattttcactgtacctgtggattt

SEQ ID NO: 141030 - DNA, 25 bp, Probe sequence
atatccgttagcagttgtacatgtc

SEQ ID NO: 141031 - DNA, 25 bp, Probe sequence
atcagtgtagcgtgtgtcatgccgt

SEQ ID NO: 141032 - DNA, 25 bp, Probe sequence
atgcatcgtcaagggcgttttatcg

SEQ ID NO: 141033 - DNA, 25 bp, Probe sequence
agaaatgcatcgtcaagggcgtttt

SEQ ID NO: 141034 - DNA, 25 bp, Probe sequence
acgttttgaacatcatcttaagcaa

SEQ ID NO: 141035 - DNA, 25 bp, Probe sequence
acatgtcatgcgcgatcagtgtagc

SEQ ID NO: 141036 - DNA, 25 bp, Probe sequence
aaattgaagacttgatgcaatcata

SEQ ID NO: 141037 - DNA, 25 bp, Probe sequence
aattaaatattttcactgtacctgt

SEQ ID NO: 141038 - DNA, 25 bp, Probe sequence
cagtgtagcgtgtgtcatgccgttt

SEQ ID NO: 141039 - DNA, 25 bp, Probe sequence
cgtgtgtcatgccgttttaccacaa

SEQ ID NO: 141040 - DNA, 25 bp, Probe sequence
ccaatgtgccattagctgtgattaa

SEQ ID NO: 141041 - DNA, 25 bp, Probe sequence
gcgatcagtgtagcgtgtgtcatgc

SEQ ID NO: 141042 - DNA, 25 bp, Probe sequence
gcattccgtgaatttattcatcaat

SEQ ID NO: 141043 - DNA, 25 bp, Probe sequence
gcagttgtacatgtcatgcgcgatc

SEQ ID NO: 141044 - DNA, 25 bp, Probe sequence
gcaacgttttgaacatcatcttaag

SEQ ID NO: 141045 - DNA, 25 bp, Probe sequence
gaagcattccgtgaatttattcatc

SEQ ID NO: 141046 - DNA, 25 bp, Probe sequence
gaagctattgctggagaattaaata

SEQ ID NO: 141047 - DNA, 25 bp, Probe sequence
gatatgcaacgttttgaacatcatc

SEQ ID NO: 141048 - DNA, 25 bp, Probe sequence
gtacctgtggatttaatttttatga

SEQ ID NO: 141049 - DNA, 25 bp, Probe sequence
gtcaagggcgttttatcgatatgca

SEQ ID NO: 141050 - DNA, 25 bp, Probe sequence
gtcatgccgttttaccacaaattga

SEQ ID NO: 141051 - DNA, 25 bp, Probe sequence
gtcatgcgcgatcagtgtagcgtgt

SEQ ID NO: 141052 - DNA, 25 bp, Probe sequence
gtgccattagctgtgattaatcaaa

SEQ ID NO: 141053 - DNA, 25 bp, Probe sequence
gtgtcatgccgttttaccacaaatt

SEQ ID NO: 141054 - DNA, 25 bp, Probe sequence
gggcgttttatcgatatgcaacgtt

SEQ ID NO: 141055 - DNA, 25 bp, Probe sequence
tgccgttttaccacaaattgaagac

SEQ ID NO: 141056 - DNA, 25 bp, Probe sequence
tgtacatgtcatgcgcgatcagtgt

SEQ ID NO: 141057 - DNA, 25 bp, Probe sequence
tgtagcgtgtgtcatgccgttttac

SEQ ID NO: 141058 - DNA, 25 bp, Probe sequence
tccgttagcagttgtacatgtcatg

SEQ ID NO: 141059 - DNA, 25 bp, Probe sequence
taaatagtgtcgaagcattccgtga

SEQ ID NO: 141060 - DNA, 25 bp, Probe sequence
tagtgtcgaagcattccgtgaattt

SEQ ID NO: 141061 - DNA, 25 bp, Probe sequence
tattcatcaatatccgttagcagtt

SEQ ID NO: 141062 - DNA, 25 bp, Probe sequence
ttttcactgtacctgtggatttaat

SEQ ID NO: 141063 - DNA, 25 bp, Probe sequence
attggctggaattgatgaggaggac

SEQ ID NO: 141064 - DNA, 25 bp, Probe sequence
atttttaatttagctgatggtacgc

SEQ ID NO: 141065 - DNA, 25 bp, Probe sequence
atttagctgatggtacgctagaaat

SEQ ID NO: 141066 - DNA, 25 bp, Probe sequence
atggtacgctagaaatttacatcga

SEQ ID NO: 141067 - DNA, 25 bp, Probe sequence
atggagagcgttatgtatgaattgg

SEQ ID NO: 141068 - DNA, 25 bp, Probe sequence
agaaatttacatcgaccatgacgaa

SEQ ID NO: 141069 - DNA, 25 bp, Probe sequence
acgctagaaatttacatcgaccatg

SEQ ID NO: 141070 - DNA, 25 bp, Probe sequence
acatcgaccatgacgaaaaaacaat

SEQ ID NO: 141071 - DNA, 25 bp, Probe sequence
aaaggtattcgtgtcagaagattta

SEQ ID NO: 141072 - DNA, 25 bp, Probe sequence
aaaagtatggagagcgttatgtatg

SEQ ID NO: 141073 - DNA, 25 bp, Probe sequence
aacaataattacagaattccatgat

SEQ ID NO: 141074 - DNA, 25 bp, Probe sequence
aagtatggagagcgttatgtatgaa

SEQ ID NO: 141075 - DNA, 25 bp, Probe sequence
aatttacatcgaccatgacgaaaaa

SEQ ID NO: 141076 - DNA, 25 bp, Probe sequence
aattccatgatttaaaggtattcgt

SEQ ID NO: 141077 - DNA, 25 bp, Probe sequence
cgaccatgacgaaaaaacaataatt

SEQ ID NO: 141078 - DNA, 25 bp, Probe sequence
cgctagaaatttacatcgaccatga

SEQ ID NO: 141079 - DNA, 25 bp, Probe sequence
gcgttatgtatgaattggctggaat

SEQ ID NO: 141080 - DNA, 25 bp, Probe sequence
gctgatggtacgctagaaatttaca

SEQ ID NO: 141081 - DNA, 25 bp, Probe sequence
gaaaattaatgaatctttgaagaaa

SEQ ID NO: 141082 - DNA, 25 bp, Probe sequence
gaaatttacatcgaccatgacgaaa

SEQ ID NO: 141083 - DNA, 25 bp, Probe sequence
gagcgttatgtatgaattggctgga

SEQ ID NO: 141084 - DNA, 25 bp, Probe sequence
gagagcgttatgtatgaattggctg

SEQ ID NO: 141085 - DNA, 25 bp, Probe sequence
gatttaaaggtattcgtgtcagaag

SEQ ID NO: 141086 - DNA, 25 bp, Probe sequence
gtatgaattggctggaattgatgag

SEQ ID NO: 141087 - DNA, 25 bp, Probe sequence
gtatggagagcgttatgtatgaatt

SEQ ID NO: 141088 - DNA, 25 bp, Probe sequence
gtacgctagaaatttacatcgacca

SEQ ID NO: 141089 - DNA, 25 bp, Probe sequence
ggtacgctagaaatttacatcgacc

SEQ ID NO: 141090 - DNA, 25 bp, Probe sequence
ggtattcgtgtcagaagatttaaaa

SEQ ID NO: 141091 - DNA, 25 bp, Probe sequence
ggctggaattgatgaggaggacaag

SEQ ID NO: 141092 - DNA, 25 bp, Probe sequence
tccatgatttaaaggtattcgtgtc

SEQ ID NO: 141093 - DNA, 25 bp, Probe sequence
taattacagaattccatgatttaaa

SEQ ID NO: 141094 - DNA, 25 bp, Probe sequence
taatttagctgatggtacgctagaa

SEQ ID NO: 141095 - DNA, 25 bp, Probe sequence
tacgctagaaatttacatcgaccat

SEQ ID NO: 141096 - DNA, 25 bp, Probe sequence
tttacatcgaccatgacgaaaaaac

SEQ ID NO: 141097 - DNA, 25 bp, Probe sequence
cacctatacttatgaaaacggaagc

SEQ ID NO: 141098 - DNA, 25 bp, Probe sequence
attggtacacagacaggcggttttt

SEQ ID NO: 141099 - DNA, 25 bp, Probe sequence
atttacttagttaaagcaagcaaga

SEQ ID NO: 141100 - DNA, 25 bp, Probe sequence
atattagatggttcgaagatttgag

SEQ ID NO: 141101 - DNA, 25 bp, Probe sequence
atatcgtttatattagatggttcga

SEQ ID NO: 141102 - DNA, 25 bp, Probe sequence
ataaagtacctgtcacaatacatga

SEQ ID NO: 141103 - DNA, 25 bp, Probe sequence
atcagcacatgaattactcaacaat

SEQ ID NO: 141104 - DNA, 25 bp, Probe sequence
atggttacgacattgatgcgatggg

SEQ ID NO: 141105 - DNA, 25 bp, Probe sequence
agatgaaatgggtgtttcagtttga

SEQ ID NO: 141106 - DNA, 25 bp, Probe sequence
agacaggcggtttttacagattgag

SEQ ID NO: 141107 - DNA, 25 bp, Probe sequence
agcaagcaagatgaaatgggtgttt

SEQ ID NO: 141108 - DNA, 25 bp, Probe sequence
acattgatgcgatgggtgtcgttag

SEQ ID NO: 141109 - DNA, 25 bp, Probe sequence
acagcgtttattaatcagcacatga

SEQ ID NO: 141110 - DNA, 25 bp, Probe sequence
acacagacaggcggtttttacagat

SEQ ID NO: 141111 - DNA, 25 bp, Probe sequence
aacagaaggtctattagttgcagag

SEQ ID NO: 141112 - DNA, 25 bp, Probe sequence
caatcaaggcatttcacctatactt

SEQ ID NO: 141113 - DNA, 25 bp, Probe sequence
caaggcatttcacctatacttatga

SEQ ID NO: 141114 - DNA, 25 bp, Probe sequence
gcgtgcattgtattggtacacagac

SEQ ID NO: 141115 - DNA, 25 bp, Probe sequence
gaattactcaacaatgatcaatcaa

SEQ ID NO: 141116 - DNA, 25 bp, Probe sequence
gaaggtctattagttgcagagaaag

SEQ ID NO: 141117 - DNA, 25 bp, Probe sequence
gaaatcgaagtgaatggttacgaca

SEQ ID NO: 141118 - DNA, 25 bp, Probe sequence
gagaacagcgtttattaatcagcac

SEQ ID NO: 141119 - DNA, 25 bp, Probe sequence
gatgcgatgggtgtcgttagtaata

SEQ ID NO: 141120 - DNA, 25 bp, Probe sequence
gatcaatcaaggcatttcacctata

SEQ ID NO: 141121 - DNA, 25 bp, Probe sequence
gttacgacattgatgcgatgggtgt

SEQ ID NO: 141122 - DNA, 25 bp, Probe sequence
gtattggtacacagacaggcggttt

SEQ ID NO: 141123 - DNA, 25 bp, Probe sequence
gtacctgtcacaatacatgacaaac

SEQ ID NO: 141124 - DNA, 25 bp, Probe sequence
gggtgtcgttagtaatatcgtttat

SEQ ID NO: 141125 - DNA, 25 bp, Probe sequence
ggtacacagacaggcggtttttaca

SEQ ID NO: 141126 - DNA, 25 bp, Probe sequence
ggcatttcacctatacttatgaaaa

SEQ ID NO: 141127 - DNA, 25 bp, Probe sequence
tcgaagatttgagaacagcgtttat

SEQ ID NO: 141128 - DNA, 25 bp, Probe sequence
tcagtttgaaattgtgtccgcacat

SEQ ID NO: 141129 - DNA, 25 bp, Probe sequence
tcacaatacatgacaaaccagtagg

SEQ ID NO: 141130 - DNA, 25 bp, Probe sequence
ttcagtttgaaattgtgtccgcaca

SEQ ID NO: 141131 - DNA, 25 bp, Probe sequence
atttcgacgatgtcattaacgccat

SEQ ID NO: 141132 - DNA, 25 bp, Probe sequence
aggagttggcgacggagatttcata

SEQ ID NO: 141133 - DNA, 25 bp, Probe sequence
acctcagaactgtatgatttagcga

SEQ ID NO: 141134 - DNA, 25 bp, Probe sequence
actacaaaaatttcttgttatagat

SEQ ID NO: 141135 - DNA, 25 bp, Probe sequence
aaaagttcaagttctgctcttggca

SEQ ID NO: 141136 - DNA, 25 bp, Probe sequence
aagacatgacgcaagacgaaataag

SEQ ID NO: 141137 - DNA, 25 bp, Probe sequence
aagttcaagttctgctcttggcaat

SEQ ID NO: 141138 - DNA, 25 bp, Probe sequence
aagttctgctcttggcaatgctttt

SEQ ID NO: 141139 - DNA, 25 bp, Probe sequence
aatgctactaatttcgacgatgtca

SEQ ID NO: 141140 - DNA, 25 bp, Probe sequence
aatcttgctgaattattggataatg

SEQ ID NO: 141141 - DNA, 25 bp, Probe sequence
caatgcttttaatcttgctgaatta

SEQ ID NO: 141142 - DNA, 25 bp, Probe sequence
cagaactgtatgatttagcgaaaga

SEQ ID NO: 141143 - DNA, 25 bp, Probe sequence
gctcttggcaatgcttttaatcttg

SEQ ID NO: 141144 - DNA, 25 bp, Probe sequence
gctactaatttcgacgatgtcatta

SEQ ID NO: 141145 - DNA, 25 bp, Probe sequence
gcttttaatcttgctgaattattgg

SEQ ID NO: 141146 - DNA, 25 bp, Probe sequence
gcaataggagttggcgacggagatt

SEQ ID NO: 141147 - DNA, 25 bp, Probe sequence
gaaaaaacctcagaactgtatgatt

SEQ ID NO: 141148 - DNA, 25 bp, Probe sequence
gacggagatttcataaaaagttcaa

SEQ ID NO: 141149 - DNA, 25 bp, Probe sequence
gacgcaagacgaaataagaggctta

SEQ ID NO: 141150 - DNA, 25 bp, Probe sequence
gacgatgtcattaacgccattcaaa

SEQ ID NO: 141151 - DNA, 25 bp, Probe sequence
gagagaaactgaatttgatattttg

SEQ ID NO: 141152 - DNA, 25 bp, Probe sequence
gatgtcattaacgccattcaaaaac

SEQ ID NO: 141153 - DNA, 25 bp, Probe sequence
gttggcgacggagatttcataaaaa

SEQ ID NO: 141154 - DNA, 25 bp, Probe sequence
gttctgctcttggcaatgcttttaa

SEQ ID NO: 141155 - DNA, 25 bp, Probe sequence
gttcaagttctgctcttggcaatgc

SEQ ID NO: 141156 - DNA, 25 bp, Probe sequence
gtcattaacgccattcaaaaacgta

SEQ ID NO: 141157 - DNA, 25 bp, Probe sequence
ggataatgctactaatttcgacgat

SEQ ID NO: 141158 - DNA, 25 bp, Probe sequence
tcgacgatgtcattaacgccattca

SEQ ID NO: 141159 - DNA, 25 bp, Probe sequence
tctgctcttggcaatgcttttaatc

SEQ ID NO: 141160 - DNA, 25 bp, Probe sequence
tctcagcaataggagttggcgacgg

SEQ ID NO: 141161 - DNA, 25 bp, Probe sequence
tcaagttctgctcttggcaatgctt

SEQ ID NO: 141162 - DNA, 25 bp, Probe sequence
tattttgtttttctcagcaatagga

SEQ ID NO: 141163 - DNA, 25 bp, Probe sequence
ttggcaatgcttttaatcttgctga

SEQ ID NO: 141164 - DNA, 25 bp, Probe sequence
ttgatattttgtttttctcagcaat

SEQ ID NO: 141165 - DNA, 25 bp, Probe sequence
atattttctattcaccgttctggtt

SEQ ID NO: 141166 - DNA, 25 bp, Probe sequence
atatgcaagctatctttggtccaaa

SEQ ID NO: 141167 - DNA, 25 bp, Probe sequence
ataatattacactaccaccattttt

SEQ ID NO: 141168 - DNA, 25 bp, Probe sequence
accagcggcggcatttgctatttat

SEQ ID NO: 141169 - DNA, 25 bp, Probe sequence
accaccatttttaggattctttgca

SEQ ID NO: 141170 - DNA, 25 bp, Probe sequence
actgctggtgcatttactactggta

SEQ ID NO: 141171 - DNA, 25 bp, Probe sequence
aaagctttaggcgcatcaggtgtat

SEQ ID NO: 141172 - DNA, 25 bp, Probe sequence
aacaatcttccctacgaaacatgcg

SEQ ID NO: 141173 - DNA, 25 bp, Probe sequence
aactgggatcgttcacacgcattat

SEQ ID NO: 141174 - DNA, 25 bp, Probe sequence
aactgcatttttaactggtatcact

SEQ ID NO: 141175 - DNA, 25 bp, Probe sequence
aacgatttgtaccgattgtgacatc

SEQ ID NO: 141176 - DNA, 25 bp, Probe sequence
gctttagccgcatggtgttacaaca

SEQ ID NO: 141177 - DNA, 25 bp, Probe sequence
gcattattagttattccagtcggta

SEQ ID NO: 141178 - DNA, 25 bp, Probe sequence
gcaccaagcatcgttacaccaatga

SEQ ID NO: 141179 - DNA, 25 bp, Probe sequence
gaaattcgtaactctagtgtcgcaa

SEQ ID NO: 141180 - DNA, 25 bp, Probe sequence
gaagtacctgatcaagtattcgctg

SEQ ID NO: 141181 - DNA, 25 bp, Probe sequence
gaaccagttcacgtagaagcacttg

SEQ ID NO: 141182 - DNA, 25 bp, Probe sequence
gaacgctcattaattccatttggtt

SEQ ID NO: 141183 - DNA, 25 bp, Probe sequence
gacattttctcatatgccaaagggg

SEQ ID NO: 141184 - DNA, 25 bp, Probe sequence
gacggtgttgcagcattagcagcgc

SEQ ID NO: 141185 - DNA, 25 bp, Probe sequence
gatggcgtaccatttactgctggtg

SEQ ID NO: 141186 - DNA, 25 bp, Probe sequence
gatttcgtcggtcatggaagcagca

SEQ ID NO: 141187 - DNA, 25 bp, Probe sequence
gtattacttcttattcgactttgca

SEQ ID NO: 141188 - DNA, 25 bp, Probe sequence
gtattatcatgggtgctttagccgc

SEQ ID NO: 141189 - DNA, 25 bp, Probe sequence
gtagcaccgtttgatggtacagtga

SEQ ID NO: 141190 - DNA, 25 bp, Probe sequence
gtcggtattgtatatgctatcgtgt

SEQ ID NO: 141191 - DNA, 25 bp, Probe sequence
ggtacagcacttggattagcaggag

SEQ ID NO: 141192 - DNA, 25 bp, Probe sequence
ggaacaacagacatctatgcaccag

SEQ ID NO: 141193 - DNA, 25 bp, Probe sequence
tggtatgacattctcaggtggtttc

SEQ ID NO: 141194 - DNA, 25 bp, Probe sequence
tgatgtttggtttaccagcggcggc

SEQ ID NO: 141195 - DNA, 25 bp, Probe sequence
tcggtcaaatcattccattatcaga

SEQ ID NO: 141196 - DNA, 25 bp, Probe sequence
tattagctggtacatcattcttagt

SEQ ID NO: 141197 - DNA, 25 bp, Probe sequence
tttgcgtggccaccaattcaagatg

SEQ ID NO: 141198 - DNA, 25 bp, Probe sequence
ttcattcttatttgtagcaccagta

SEQ ID NO: 141199 - DNA, 25 bp, Probe sequence
attacggagatgttaaagcggtata

SEQ ID NO: 141200 - DNA, 25 bp, Probe sequence
atcaatgcggtgttgccttatacca

SEQ ID NO: 141201 - DNA, 25 bp, Probe sequence
atcacaaatacaatccctcaaatta

SEQ ID NO: 141202 - DNA, 25 bp, Probe sequence
agtaccacatataacttttctagtg

SEQ ID NO: 141203 - DNA, 25 bp, Probe sequence
agctagatgtaacatcgtcgacatc

SEQ ID NO: 141204 - DNA, 25 bp, Probe sequence
accagtaccacatataacttttcta

SEQ ID NO: 141205 - DNA, 25 bp, Probe sequence
aaatctcaaaggcatctgggttatg

SEQ ID NO: 141206 - DNA, 25 bp, Probe sequence
aaacttgttgactatattaatgtat

SEQ ID NO: 141207 - DNA, 25 bp, Probe sequence
aacataaatctcaaaggcatctggg

SEQ ID NO: 141208 - DNA, 25 bp, Probe sequence
aactaggatttgatttctcgatttc

SEQ ID NO: 141209 - DNA, 25 bp, Probe sequence
aagtttgttaccagtaccacatata

SEQ ID NO: 141210 - DNA, 25 bp, Probe sequence
aaggcatctgggttatgcgattaaa

SEQ ID NO: 141211 - DNA, 25 bp, Probe sequence
aatgcggtgttgccttataccaact

SEQ ID NO: 141212 - DNA, 25 bp, Probe sequence
aatacaatccctcaaattactgaac

SEQ ID NO: 141213 - DNA, 25 bp, Probe sequence
cacgaaatgcagacgattacagggc

SEQ ID NO: 141214 - DNA, 25 bp, Probe sequence
gcagacgattacagggcaatgggac

SEQ ID NO: 141215 - DNA, 25 bp, Probe sequence
catcctaagtttgttaccagtacca

SEQ ID NO: 141216 - DNA, 25 bp, Probe sequence
gcggtgttgccttataccaacttat

SEQ ID NO: 141217 - DNA, 25 bp, Probe sequence
gaaataatattgtaggtgacggtta

SEQ ID NO: 141218 - DNA, 25 bp, Probe sequence
gaaattataccgaaaggctatgaaa

SEQ ID NO: 141219 - DNA, 25 bp, Probe sequence
gacgattacagggcaatgggacaaa

SEQ ID NO: 141220 - DNA, 25 bp, Probe sequence
gacggttatgattcagtaaattacg

SEQ ID NO: 141221 - DNA, 25 bp, Probe sequence
gatttctcgatttcacataatccat

SEQ ID NO: 141222 - DNA, 25 bp, Probe sequence
gtatctaaaaggtataatccaccat

SEQ ID NO: 141223 - DNA, 25 bp, Probe sequence
gtaggtgacggttatgattcagtaa

SEQ ID NO: 141224 - DNA, 25 bp, Probe sequence
gtgttgccttataccaacttatacc

SEQ ID NO: 141225 - DNA, 25 bp, Probe sequence
ggtatataaacatgattttctttgt

SEQ ID NO: 141226 - DNA, 25 bp, Probe sequence
ggatttgatttctcgatttcacata

SEQ ID NO: 141227 - DNA, 25 bp, Probe sequence
taccgaaaggctatgaaattgaaca

SEQ ID NO: 141228 - DNA, 25 bp, Probe sequence
tgccttataccaacttataccaagt

SEQ ID NO: 141229 - DNA, 25 bp, Probe sequence
tctcgatttcacataatccatatac

SEQ ID NO: 141230 - DNA, 25 bp, Probe sequence
tcacataatccatatacagaaagtt

SEQ ID NO: 141231 - DNA, 25 bp, Probe sequence
taaacatgattttctttgtattaaa

SEQ ID NO: 141232 - DNA, 25 bp, Probe sequence
taggacacgaaatgcagacgattac

SEQ ID NO: 141233 - DNA, 25 bp, Probe sequence
attgctggtgacggtgcattccaaa

SEQ ID NO: 141234 - DNA, 25 bp, Probe sequence
atttaaattttatcatgtacgtcat

SEQ ID NO: 141235 - DNA, 25 bp, Probe sequence
atttagatttagatcaaattccacc

SEQ ID NO: 141236 - DNA, 25 bp, Probe sequence
atcctaaaaatatcggacatcgttt

SEQ ID NO: 141237 - DNA, 25 bp, Probe sequence
atgctgcgccattaccaggtaaaat

SEQ ID NO: 141238 - DNA, 25 bp, Probe sequence
atgaagaagcgcttggttatggtaa

SEQ ID NO: 141239 - DNA, 25 bp, Probe sequence
atgtacgtcatgaagaagtagcaag

SEQ ID NO: 141240 - DNA, 25 bp, Probe sequence
agtttacgtacagtgagagatcaat

SEQ ID NO: 141241 - DNA, 25 bp, Probe sequence
aagcggtttgggataaatggatgga

SEQ ID NO: 141242 - DNA, 25 bp, Probe sequence
aaattgcatatccaaatagacaagc

SEQ ID NO: 141243 - DNA, 25 bp, Probe sequence
aaccagtagatacatcaagaccaac

SEQ ID NO: 141244 - DNA, 25 bp, Probe sequence
aagttcatcatttcaagttggttag

SEQ ID NO: 141245 - DNA, 25 bp, Probe sequence
aatgtaccgcaattaatattatctg

SEQ ID NO: 141246 - DNA, 25 bp, Probe sequence
aatcggtgtggcattaagtatcggt

SEQ ID NO: 141247 - DNA, 25 bp, Probe sequence
aattatgtgaagatgtagccgttta

SEQ ID NO: 141248 - DNA, 25 bp, Probe sequence
taagtatcggtggccctggtttaat

SEQ ID NO: 141249 - DNA, 25 bp, Probe sequence
ctggtgacggtgcattccaaatggt

SEQ ID NO: 141250 - DNA, 25 bp, Probe sequence
cctaatgctgcgccattaccaggta

SEQ ID NO: 141251 - DNA, 25 bp, Probe sequence
gccaaaatggataatgtaccgcaat

SEQ ID NO: 141252 - DNA, 25 bp, Probe sequence
gtacaatgggttgcggtcttccagg

SEQ ID NO: 141253 - DNA, 25 bp, Probe sequence
gcattaagtatcggtggccctggtt

SEQ ID NO: 141254 - DNA, 25 bp, Probe sequence
gcagcaggtggtaaaggttatacaa

SEQ ID NO: 141255 - DNA, 25 bp, Probe sequence
gaagcaattcgtacggcatatgaac

SEQ ID NO: 141256 - DNA, 25 bp, Probe sequence
gaagcattagttaaagcattacaag

SEQ ID NO: 141257 - DNA, 25 bp, Probe sequence
gtatcggtggccctggtttaattca

SEQ ID NO: 141258 - DNA, 25 bp, Probe sequence
gtagccgtttataatcaccaaattg

SEQ ID NO: 141259 - DNA, 25 bp, Probe sequence
gtacagcacttggaacgaaagcatt

SEQ ID NO: 141260 - DNA, 25 bp, Probe sequence
gtcgatagtttacgtacagtgagag

SEQ ID NO: 141261 - DNA, 25 bp, Probe sequence
gtggccctggtttaattcatttatt

SEQ ID NO: 141262 - DNA, 25 bp, Probe sequence
ggttaggtacaatgggttgcggtct

SEQ ID NO: 141263 - DNA, 25 bp, Probe sequence
tggacaaacgaatagtacagcactt

SEQ ID NO: 141264 - DNA, 25 bp, Probe sequence
taaagcattacaagcatgggatata

SEQ ID NO: 141265 - DNA, 25 bp, Probe sequence
tatgttgatcctaatgctgcgccat

SEQ ID NO: 141266 - DNA, 25 bp, Probe sequence
ttaactggtaaaatcggtgtggcat

SEQ ID NO: 141267 - DNA, 25 bp, Probe sequence
attgtttattcatttgctttattat

SEQ ID NO: 141268 - DNA, 25 bp, Probe sequence
attcatttgctttattatggggaca

SEQ ID NO: 141269 - DNA, 25 bp, Probe sequence
agtggtcgaaggagtttgaacaatc

SEQ ID NO: 141270 - DNA, 25 bp, Probe sequence
agtgagtactggcgcgagctatgct

SEQ ID NO: 141271 - DNA, 25 bp, Probe sequence
agaatacgcctatatatccctctga

SEQ ID NO: 141272 - DNA, 25 bp, Probe sequence
agcagtgttgcatggtattggcaca

SEQ ID NO: 141273 - DNA, 25 bp, Probe sequence
agctcagttttaagcagtgttgcat

SEQ ID NO: 141274 - DNA, 25 bp, Probe sequence
acatcgtttagccatacaactgaac

SEQ ID NO: 141275 - DNA, 25 bp, Probe sequence
aaattggccataaagtggatgaagg

SEQ ID NO: 141276 - DNA, 25 bp, Probe sequence
acaatcaaatgctagtcctaatgtc

SEQ ID NO: 141277 - DNA, 25 bp, Probe sequence
aaagcatcgcaatgacgttaatgtc

SEQ ID NO: 141278 - DNA, 25 bp, Probe sequence
aatgtcataggatacactcgacgcg

SEQ ID NO: 141279 - DNA, 25 bp, Probe sequence
aatcagctcagttttaagcagtgtt

SEQ ID NO: 141280 - DNA, 25 bp, Probe sequence
cgcctatatatccctctgaatgagc

SEQ ID NO: 141281 - DNA, 25 bp, Probe sequence
cctgaatggagtaagttggttaata

SEQ ID NO: 141282 - DNA, 25 bp, Probe sequence
gctcgaacagtggtcgaaggagttt

SEQ ID NO: 141283 - DNA, 25 bp, Probe sequence
gcatggtattggcacacatcgttta

SEQ ID NO: 141284 - DNA, 25 bp, Probe sequence
gcacacatcgtttagccatacaact

SEQ ID NO: 141285 - DNA, 25 bp, Probe sequence
gacgttaatgtcatatacagagatg

SEQ ID NO: 141286 - DNA, 25 bp, Probe sequence
gattatattgtttattcatttgctt

SEQ ID NO: 141287 - DNA, 25 bp, Probe sequence
gttgcatggtattggcacacatcgt

SEQ ID NO: 141288 - DNA, 25 bp, Probe sequence
gtattggcacacatcgtttagccat

SEQ ID NO: 141289 - DNA, 25 bp, Probe sequence
ggatacactcgacgcgatagtgagt

SEQ ID NO: 141290 - DNA, 25 bp, Probe sequence
tggcgcgagctatgctttggaacaa

SEQ ID NO: 141291 - DNA, 25 bp, Probe sequence
tgtacggtgatattaaagacggtgc

SEQ ID NO: 141292 - DNA, 25 bp, Probe sequence
tgagtactggcgcgagctatgcttt

SEQ ID NO: 141293 - DNA, 25 bp, Probe sequence
tcgacgcgatagtgagtactggcgc

SEQ ID NO: 141294 - DNA, 25 bp, Probe sequence
tcgtttagccatacaactgaacaag

SEQ ID NO: 141295 - DNA, 25 bp, Probe sequence
tttgctttattatggggacaattcg

SEQ ID NO: 141296 - DNA, 25 bp, Probe sequence
tcataggatacactcgacgcgatag

SEQ ID NO: 141297 - DNA, 25 bp, Probe sequence
tcaaatgctagtcctaatgtcatag

SEQ ID NO: 141298 - DNA, 25 bp, Probe sequence
tactggcgcgagctatgctttggaa

SEQ ID NO: 141299 - DNA, 25 bp, Probe sequence
tagcttaattgggcatttattgaga

SEQ ID NO: 141300 - DNA, 25 bp, Probe sequence
tatatatccctctgaatgagcgaat

SEQ ID NO: 141301 - DNA, 25 bp, Probe sequence
attccaagccctaaattagctaaga

SEQ ID NO: 141302 - DNA, 25 bp, Probe sequence
atttatctgatttatcacgtgaaac

SEQ ID NO: 141303 - DNA, 25 bp, Probe sequence
atcacgtgaaacaggtgttggaatt

SEQ ID NO: 141304 - DNA, 25 bp, Probe sequence
atctgatttatcacgtgaaacaggt

SEQ ID NO: 141305 - DNA, 25 bp, Probe sequence
atgactattttagcgaatactagaa

SEQ ID NO: 141306 - DNA, 25 bp, Probe sequence
atggcagaagttttacaagttgagg

SEQ ID NO: 141307 - DNA, 25 bp, Probe sequence
agattccaagccctaaattagctaa

SEQ ID NO: 141308 - DNA, 25 bp, Probe sequence
agccatgttcttaaaaggctttaat

SEQ ID NO: 141309 - DNA, 25 bp, Probe sequence
actagaaagtttaaagaagccatgt

SEQ ID NO: 141310 - DNA, 25 bp, Probe sequence
aaatggcagaagttttacaagttga

SEQ ID NO: 141311 - DNA, 25 bp, Probe sequence
aaagattccaagccctaaattagct

SEQ ID NO: 141312 - DNA, 25 bp, Probe sequence
aaagaagccatgttcttaaaaggct

SEQ ID NO: 141313 - DNA, 25 bp, Probe sequence
aagattccaagccctaaattagcta

SEQ ID NO: 141314 - DNA, 25 bp, Probe sequence
aaggctttaatttatctgatttatc

SEQ ID NO: 141315 - DNA, 25 bp, Probe sequence
caagccctaaattagctaagaaaat

SEQ ID NO: 141316 - DNA, 25 bp, Probe sequence
caggtgttggaatttcttatttaag

SEQ ID NO: 141317 - DNA, 25 bp, Probe sequence
ctttaatttatctgatttatcacgt

SEQ ID NO: 141318 - DNA, 25 bp, Probe sequence
taatggtaaaaagattccaagccct

SEQ ID NO: 141319 - DNA, 25 bp, Probe sequence
gaatttcttatttaagccaaattat

SEQ ID NO: 141320 - DNA, 25 bp, Probe sequence
gaagccatgttcttaaaaggcttta

SEQ ID NO: 141321 - DNA, 25 bp, Probe sequence
gaaacaggtgttggaatttcttatt

SEQ ID NO: 141322 - DNA, 25 bp, Probe sequence
gactattttagcgaatactagaaag

SEQ ID NO: 141323 - DNA, 25 bp, Probe sequence
gatttatcacgtgaaacaggtgttg

SEQ ID NO: 141324 - DNA, 25 bp, Probe sequence
gattccaagccctaaattagctaag

SEQ ID NO: 141325 - DNA, 25 bp, Probe sequence
gtgttggaatttcttatttaagcca

SEQ ID NO: 141326 - DNA, 25 bp, Probe sequence
tggaatttcttatttaagccaaatt

SEQ ID NO: 141327 - DNA, 25 bp, Probe sequence
ggcagaagttttacaagttgaggta

SEQ ID NO: 141328 - DNA, 25 bp, Probe sequence
ggctttaatttatctgatttatcac

SEQ ID NO: 141329 - DNA, 25 bp, Probe sequence
tccaagccctaaattagctaagaaa

SEQ ID NO: 141330 - DNA, 25 bp, Probe sequence
taatttatctgatttatcacgtgaa

SEQ ID NO: 141331 - DNA, 25 bp, Probe sequence
tatttaagccaaattattaatggta

SEQ ID NO: 141332 - DNA, 25 bp, Probe sequence
tttatcacgtgaaacaggtgttgga

SEQ ID NO: 141333 - DNA, 25 bp, Probe sequence
ttccaagccctaaattagctaagaa

SEQ ID NO: 141334 - DNA, 25 bp, Probe sequence
ttgaatttgaagtaaaggaggcata

SEQ ID NO: 141335 - DNA, 25 bp, Probe sequence
cccttagccggcagtattgttggtc

SEQ ID NO: 141336 - DNA, 25 bp, Probe sequence
attgctgaaaaaatgtctgttaaac

SEQ ID NO: 141337 - DNA, 25 bp, Probe sequence
attatatactctttttcgcagtcat

SEQ ID NO: 141338 - DNA, 25 bp, Probe sequence
atatactctttttcgcagtcattat

SEQ ID NO: 141339 - DNA, 25 bp, Probe sequence
ataggaacatgtatcgttgcattat

SEQ ID NO: 141340 - DNA, 25 bp, Probe sequence
atcgttgcattatcttcaggttata

SEQ ID NO: 141341 - DNA, 25 bp, Probe sequence
atgcacaaagtccaattaataatca

SEQ ID NO: 141342 - DNA, 25 bp, Probe sequence
agacgatggtctttttcttcatacc

SEQ ID NO: 141343 - DNA, 25 bp, Probe sequence
agccggcagtattgttggtctattt

SEQ ID NO: 141344 - DNA, 25 bp, Probe sequence
actacaactaggaatcatcattgtg

SEQ ID NO: 141345 - DNA, 25 bp, Probe sequence
aatttaagattgtaccgctaacttg

SEQ ID NO: 141346 - DNA, 25 bp, Probe sequence
caaaagatttttcatcttcccttag

SEQ ID NO: 141347 - DNA, 25 bp, Probe sequence
cagtattgttggtctatttttattt

SEQ ID NO: 141348 - DNA, 25 bp, Probe sequence
catcattgtgattacttatattggc

SEQ ID NO: 141349 - DNA, 25 bp, Probe sequence
cttagccggcagtattgttggtcta

SEQ ID NO: 141350 - DNA, 25 bp, Probe sequence
cgatggtctttttcttcataccgtc

SEQ ID NO: 141351 - DNA, 25 bp, Probe sequence
cgctaaattatatactctttttcgc

SEQ ID NO: 141352 - DNA, 25 bp, Probe sequence
ccggcagtattgttggtctattttt

SEQ ID NO: 141353 - DNA, 25 bp, Probe sequence
ccgtcagttgtaggtattatggatg

SEQ ID NO: 141354 - DNA, 25 bp, Probe sequence
gctaacttgggtagaagacggtgca

SEQ ID NO: 141355 - DNA, 25 bp, Probe sequence
gaacatgtatcgttgcattatcttc

SEQ ID NO: 141356 - DNA, 25 bp, Probe sequence
gatgttgcttccgaaattacgctaa

SEQ ID NO: 141357 - DNA, 25 bp, Probe sequence
gattacttatattggcacagaaatt

SEQ ID NO: 141358 - DNA, 25 bp, Probe sequence
gattgtaccgctaacttgggtagaa

SEQ ID NO: 141359 - DNA, 25 bp, Probe sequence
gttgcttccgaaattacgctaaatt

SEQ ID NO: 141360 - DNA, 25 bp, Probe sequence
gtatcgttgcattatcttcaggtta

SEQ ID NO: 141361 - DNA, 25 bp, Probe sequence
ggtattatggatgttgcttccgaaa

SEQ ID NO: 141362 - DNA, 25 bp, Probe sequence
tgcattatcttcaggttatattgct

SEQ ID NO: 141363 - DNA, 25 bp, Probe sequence
tctttttcttcataccgtcagttgt

SEQ ID NO: 141364 - DNA, 25 bp, Probe sequence
tagaagacggtgcaaactttttatt

SEQ ID NO: 141365 - DNA, 25 bp, Probe sequence
ttttcttcataccgtcagttgtagg

SEQ ID NO: 141366 - DNA, 25 bp, Probe sequence
ttcttcataccgtcagttgtaggta

SEQ ID NO: 141367 - DNA, 25 bp, Probe sequence
tttatttactattacaatttaagat

SEQ ID NO: 141368 - DNA, 25 bp, Probe sequence
ttcccttagccggcagtattgttgg

SEQ ID NO: 141369 - DNA, 25 bp, Probe sequence
attttcgattatactaccctagata

SEQ ID NO: 141370 - DNA, 25 bp, Probe sequence
atataggcgtgaccactttgccagt

SEQ ID NO: 141371 - DNA, 25 bp, Probe sequence
atcatattttcgattatactaccct

SEQ ID NO: 141372 - DNA, 25 bp, Probe sequence
atgaagtagatataggcgtgaccac

SEQ ID NO: 141373 - DNA, 25 bp, Probe sequence
agatttagcaggtgaagacttcatt

SEQ ID NO: 141374 - DNA, 25 bp, Probe sequence
accaacatcaatttcagagcaacta

SEQ ID NO: 141375 - DNA, 25 bp, Probe sequence
accgatgcaggtcaaattttttatg

SEQ ID NO: 141376 - DNA, 25 bp, Probe sequence
aaatcattatatattgcacaaccta

SEQ ID NO: 141377 - DNA, 25 bp, Probe sequence
aaacatgggcatgtcggcagtcatg

SEQ ID NO: 141378 - DNA, 25 bp, Probe sequence
aaacaattaagtcatgccacaacga

SEQ ID NO: 141379 - DNA, 25 bp, Probe sequence
aactgttaaactcgaagatttagca

SEQ ID NO: 141380 - DNA, 25 bp, Probe sequence
aacgttggctttgttccgaatactg

SEQ ID NO: 141381 - DNA, 25 bp, Probe sequence
cattgggaattaggtgttgtttgga

SEQ ID NO: 141382 - DNA, 25 bp, Probe sequence
gcgacttatcgtgagcagagagcat

SEQ ID NO: 141383 - DNA, 25 bp, Probe sequence
gcacaacctacaattagtaaagcaa

SEQ ID NO: 141384 - DNA, 25 bp, Probe sequence
gaacgcttgaatggactggaaacag

SEQ ID NO: 141385 - DNA, 25 bp, Probe sequence
gaaaatgctaaaaacgttggctttg

SEQ ID NO: 141386 - DNA, 25 bp, Probe sequence
gaaatggaacgcttgaatggactgg

SEQ ID NO: 141387 - DNA, 25 bp, Probe sequence
gactcgcaaaatatgaaactgttaa

SEQ ID NO: 141388 - DNA, 25 bp, Probe sequence
gagcaactaaatggagatgtgaagc

SEQ ID NO: 141389 - DNA, 25 bp, Probe sequence
gagagcatcgactcgcaaaatatga

SEQ ID NO: 141390 - DNA, 25 bp, Probe sequence
gattatttaccatctgaaatggaac

SEQ ID NO: 141391 - DNA, 25 bp, Probe sequence
gattatactaccctagataaggaag

SEQ ID NO: 141392 - DNA, 25 bp, Probe sequence
gtattagtattttaccaacatcaat

SEQ ID NO: 141393 - DNA, 25 bp, Probe sequence
gtagcgcaaatttcacaatggcatg

SEQ ID NO: 141394 - DNA, 25 bp, Probe sequence
gtcatgccacaacgaaatggataga

SEQ ID NO: 141395 - DNA, 25 bp, Probe sequence
gtgagcagagagcatcgactcgcaa

SEQ ID NO: 141396 - DNA, 25 bp, Probe sequence
gggcatgtcggcagtcatgaatatg

SEQ ID NO: 141397 - DNA, 25 bp, Probe sequence
ggtgaagacttcattttatttaata

SEQ ID NO: 141398 - DNA, 25 bp, Probe sequence
ggaagatttgcgacttatcgtgagc

SEQ ID NO: 141399 - DNA, 25 bp, Probe sequence
ggctttgttccgaatactgtagcgc

SEQ ID NO: 141400 - DNA, 25 bp, Probe sequence
ggcatgttatagaagatttagttac

SEQ ID NO: 141401 - DNA, 25 bp, Probe sequence
tgttccgaatactgtagcgcaaatt

SEQ ID NO: 141402 - DNA, 25 bp, Probe sequence
ttaggtgttgtttggaagaaggata

SEQ ID NO: 141403 - DNA, 25 bp, Probe sequence
atactttttgttataaatgctcttc

SEQ ID NO: 141404 - DNA, 25 bp, Probe sequence
ataaatgctcttcaaataaataatg

SEQ ID NO: 141405 - DNA, 25 bp, Probe sequence
ataatgatttaccaataagtatatc

SEQ ID NO: 141406 - DNA, 25 bp, Probe sequence
atcgctataactgggattatacttt

SEQ ID NO: 141407 - DNA, 25 bp, Probe sequence
atggtcatggaatcgctataactgg

SEQ ID NO: 141408 - DNA, 25 bp, Probe sequence
atggaatcgctataactgggattat

SEQ ID NO: 141409 - DNA, 25 bp, Probe sequence
actttttgttataaatgctcttcaa

SEQ ID NO: 141410 - DNA, 25 bp, Probe sequence
aaatggtcatggaatcgctataact

SEQ ID NO: 141411 - DNA, 25 bp, Probe sequence
aaagaaatatattcataaacctgac

SEQ ID NO: 141412 - DNA, 25 bp, Probe sequence
aaaaatggtcatggaatcgctataa

SEQ ID NO: 141413 - DNA, 25 bp, Probe sequence
aaaatggtcatggaatcgctataac

SEQ ID NO: 141414 - DNA, 25 bp, Probe sequence
aatggtcatggaatcgctataactg

SEQ ID NO: 141415 - DNA, 25 bp, Probe sequence
aatgctcttcaaataaataatgatt

SEQ ID NO: 141416 - DNA, 25 bp, Probe sequence
aatcgctataactgggattatactt

SEQ ID NO: 141417 - DNA, 25 bp, Probe sequence
catggaatcgctataactgggatta

SEQ ID NO: 141418 - DNA, 25 bp, Probe sequence
ctttttgttataaatgctcttcaaa

SEQ ID NO: 141419 - DNA, 25 bp, Probe sequence
ctataactgggattatactttttgt

SEQ ID NO: 141420 - DNA, 25 bp, Probe sequence
gctataactgggattatactttttg

SEQ ID NO: 141421 - DNA, 25 bp, Probe sequence
gaatcgctataactgggattatact

SEQ ID NO: 141422 - DNA, 25 bp, Probe sequence
gactgataaaaatggtcatggaatc

SEQ ID NO: 141423 - DNA, 25 bp, Probe sequence
gataaaaatggtcatggaatcgcta

SEQ ID NO: 141424 - DNA, 25 bp, Probe sequence
gatttaccaataagtatatcaagta

SEQ ID NO: 141425 - DNA, 25 bp, Probe sequence
gtcatggaatcgctataactgggat

SEQ ID NO: 141426 - DNA, 25 bp, Probe sequence
ggtcatggaatcgctataactggga

SEQ ID NO: 141427 - DNA, 25 bp, Probe sequence
ggaatcgctataactgggattatac

SEQ ID NO: 141428 - DNA, 25 bp, Probe sequence
tggtcatggaatcgctataactggg

SEQ ID NO: 141429 - DNA, 25 bp, Probe sequence
tggaatcgctataactgggattata

SEQ ID NO: 141430 - DNA, 25 bp, Probe sequence
tgttataaatgctcttcaaataaat

SEQ ID NO: 141431 - DNA, 25 bp, Probe sequence
tcgctataactgggattatactttt

SEQ ID NO: 141432 - DNA, 25 bp, Probe sequence
tcatggaatcgctataactgggatt

SEQ ID NO: 141433 - DNA, 25 bp, Probe sequence
taaaaatggtcatggaatcgctata

SEQ ID NO: 141434 - DNA, 25 bp, Probe sequence
tactttttgttataaatgctcttca

SEQ ID NO: 141435 - DNA, 25 bp, Probe sequence
tttgttataaatgctcttcaaataa

SEQ ID NO: 141436 - DNA, 25 bp, Probe sequence
tttttgttataaatgctcttcaaat

SEQ ID NO: 141437 - DNA, 25 bp, Probe sequence
atagccatgatattaatgaattata

SEQ ID NO: 141438 - DNA, 25 bp, Probe sequence
atgcagaaaatcaggggctcttaga

SEQ ID NO: 141439 - DNA, 25 bp, Probe sequence
atgtatgcagaaaatcaggggctct

SEQ ID NO: 141440 - DNA, 25 bp, Probe sequence
aggtcttaagcactgacgttacaaa

SEQ ID NO: 141441 - DNA, 25 bp, Probe sequence
agcactgacgttacaaatagccatg

SEQ ID NO: 141442 - DNA, 25 bp, Probe sequence
actgacgttacaaatagccatgata

SEQ ID NO: 141443 - DNA, 25 bp, Probe sequence
acaaggtcttaagcactgacgttac

SEQ ID NO: 141444 - DNA, 25 bp, Probe sequence
aaatcaggggctcttagaaacagat

SEQ ID NO: 141445 - DNA, 25 bp, Probe sequence
aaatgagattaacagcgatatacaa

SEQ ID NO: 141446 - DNA, 25 bp, Probe sequence
aaactatttggataagacgcaatga

SEQ ID NO: 141447 - DNA, 25 bp, Probe sequence
aagcactgacgttacaaatagccat

SEQ ID NO: 141448 - DNA, 25 bp, Probe sequence
aaggtcttaagcactgacgttacaa

SEQ ID NO: 141449 - DNA, 25 bp, Probe sequence
caaggtcttaagcactgacgttaca

SEQ ID NO: 141450 - DNA, 25 bp, Probe sequence
aatcaggggctcttagaaacagata

SEQ ID NO: 141451 - DNA, 25 bp, Probe sequence
aattgacaaggtcttaagcactgac

SEQ ID NO: 141452 - DNA, 25 bp, Probe sequence
cactgacgttacaaatagccatgat

SEQ ID NO: 141453 - DNA, 25 bp, Probe sequence
cttaagcactgacgttacaaatagc

SEQ ID NO: 141454 - DNA, 25 bp, Probe sequence
ctgacgttacaaatagccatgatat

SEQ ID NO: 141455 - DNA, 25 bp, Probe sequence
gcagaaaatcaggggctcttagaaa

SEQ ID NO: 141456 - DNA, 25 bp, Probe sequence
gcactgacgttacaaatagccatga

SEQ ID NO: 141457 - DNA, 25 bp, Probe sequence
gaaaatcaggggctcttagaaacag

SEQ ID NO: 141458 - DNA, 25 bp, Probe sequence
gacaaggtcttaagcactgacgtta

SEQ ID NO: 141459 - DNA, 25 bp, Probe sequence
gacgttacaaatagccatgatatta

SEQ ID NO: 141460 - DNA, 25 bp, Probe sequence
gagatttatatgtatttaagagatg

SEQ ID NO: 141461 - DNA, 25 bp, Probe sequence
gagattaacagcgatatacaaaata

SEQ ID NO: 141462 - DNA, 25 bp, Probe sequence
gtatgcagaaaatcaggggctctta

SEQ ID NO: 141463 - DNA, 25 bp, Probe sequence
gtcttaagcactgacgttacaaata

SEQ ID NO: 141464 - DNA, 25 bp, Probe sequence
ggtcttaagcactgacgttacaaat

SEQ ID NO: 141465 - DNA, 25 bp, Probe sequence
ggaattaaagagcattttattttga

SEQ ID NO: 141466 - DNA, 25 bp, Probe sequence
tgacaaggtcttaagcactgacgtt

SEQ ID NO: 141467 - DNA, 25 bp, Probe sequence
tcaggggctcttagaaacagataaa

SEQ ID NO: 141468 - DNA, 25 bp, Probe sequence
taatgaattatatttatttcttaaa

SEQ ID NO: 141469 - DNA, 25 bp, Probe sequence
taagcactgacgttacaaatagcca

SEQ ID NO: 141470 - DNA, 25 bp, Probe sequence
ttgacaaggtcttaagcactgacgt

SEQ ID NO: 141471 - DNA, 25 bp, Probe sequence
gcgtccgttgttaaagttcaaggcg

SEQ ID NO: 141472 - DNA, 25 bp, Probe sequence
attgatacatttcctgagcaacagt

SEQ ID NO: 141473 - DNA, 25 bp, Probe sequence
attgcggatgaggcatatccttcta

SEQ ID NO: 141474 - DNA, 25 bp, Probe sequence
attaggtcatgtagttgctgccgtt

SEQ ID NO: 141475 - DNA, 25 bp, Probe sequence
atgtagttgctgccgttggtttagc

SEQ ID NO: 141476 - DNA, 25 bp, Probe sequence
atgatacgcgtggtgcagaagcaag

SEQ ID NO: 141477 - DNA, 25 bp, Probe sequence
atggtgcaaagctagtgaatcagac

SEQ ID NO: 141478 - DNA, 25 bp, Probe sequence
atggcgttgacgatactgaaaaatt

SEQ ID NO: 141479 - DNA, 25 bp, Probe sequence
aaacggtatcttctgaacgtattat

SEQ ID NO: 141480 - DNA, 25 bp, Probe sequence
aaggtgttatgaatggcatacatgc

SEQ ID NO: 141481 - DNA, 25 bp, Probe sequence
catgcaacagcgtccgttgttaaag

SEQ ID NO: 141482 - DNA, 25 bp, Probe sequence
cttcagttgtcgctgcagctagtta

SEQ ID NO: 141483 - DNA, 25 bp, Probe sequence
cctgagcaacagttactatctttaa

SEQ ID NO: 141484 - DNA, 25 bp, Probe sequence
gcgcaaggtgcattacccgttggat

SEQ ID NO: 141485 - DNA, 25 bp, Probe sequence
gcattacccgttggattattaccga

SEQ ID NO: 141486 - DNA, 25 bp, Probe sequence
gcatatgttgtacctatgatggtgg

SEQ ID NO: 141487 - DNA, 25 bp, Probe sequence
gcagaagcaagtgcgcatgcatacg

SEQ ID NO: 141488 - DNA, 25 bp, Probe sequence
gcaacaggaaatgatacgcgtggtg

SEQ ID NO: 141489 - DNA, 25 bp, Probe sequence
gaatggaacgtgcttctgtattggc

SEQ ID NO: 141490 - DNA, 25 bp, Probe sequence
gaactggagaagaggttgccaaacg

SEQ ID NO: 141491 - DNA, 25 bp, Probe sequence
gaaaatgtcatcgcgcaaggtgcat

SEQ ID NO: 141492 - DNA, 25 bp, Probe sequence
gagtattttatccaatcatgcaaca

SEQ ID NO: 141493 - DNA, 25 bp, Probe sequence
gatgctatgggcgctaatatgctta

SEQ ID NO: 141494 - DNA, 25 bp, Probe sequence
gatacgaaagatgctatgggcgcta

SEQ ID NO: 141495 - DNA, 25 bp, Probe sequence
gtcgctgcagctagttatggtgcaa

SEQ ID NO: 141496 - DNA, 25 bp, Probe sequence
gggcgctaatatgcttaatacgatt

SEQ ID NO: 141497 - DNA, 25 bp, Probe sequence
ggttgccaaacgaatggaacgtgct

SEQ ID NO: 141498 - DNA, 25 bp, Probe sequence
ggtcaaatcgtctttgatggcgttg

SEQ ID NO: 141499 - DNA, 25 bp, Probe sequence
ggcatatccttctattaaagcgcgt

SEQ ID NO: 141500 - DNA, 25 bp, Probe sequence
tggaagagccttcagttgtcgctgc

SEQ ID NO: 141501 - DNA, 25 bp, Probe sequence
tagcaaggggcgagagaactggaga

SEQ ID NO: 141502 - DNA, 25 bp, Probe sequence
tatccaatcatgcaacagcgtccgt

SEQ ID NO: 141503 - DNA, 25 bp, Probe sequence
tattaccgaatatcattgtggacga

SEQ ID NO: 141504 - DNA, 25 bp, Probe sequence
ttaaagcgcgtggtggtggttacca

SEQ ID NO: 141505 - DNA, 25 bp, Probe sequence
ccaagcggttggaggtgcagtcgga

SEQ ID NO: 141506 - DNA, 25 bp, Probe sequence
atcacaatacctttaaagccaacag

SEQ ID NO: 141507 - DNA, 25 bp, Probe sequence
atggtgctattgccaaaaaagtagg

SEQ ID NO: 141508 - DNA, 25 bp, Probe sequence
agcccaagcggttggaggtgcagtc

SEQ ID NO: 141509 - DNA, 25 bp, Probe sequence
agcggttggaggtgcagtcggaagt

SEQ ID NO: 141510 - DNA, 25 bp, Probe sequence
aaaattaagctgttagagttggaga

SEQ ID NO: 141511 - DNA, 25 bp, Probe sequence
aacagtgtgtttggaatgaattaag

SEQ ID NO: 141512 - DNA, 25 bp, Probe sequence
aagccaaaaatgtcagcccaagcgg

SEQ ID NO: 141513 - DNA, 25 bp, Probe sequence
aagccaacaggtagtcattttcaac

SEQ ID NO: 141514 - DNA, 25 bp, Probe sequence
aagtctgaccgctgttttgtttgaa

SEQ ID NO: 141515 - DNA, 25 bp, Probe sequence
aatgtcagcccaagcggttggaggt

SEQ ID NO: 141516 - DNA, 25 bp, Probe sequence
caacgtatggtgctattgccaaaaa

SEQ ID NO: 141517 - DNA, 25 bp, Probe sequence
caaaaatgtcagcccaagcggttgg

SEQ ID NO: 141518 - DNA, 25 bp, Probe sequence
cagtggttagacgcgtattttaaag

SEQ ID NO: 141519 - DNA, 25 bp, Probe sequence
caggtagtcattttcaacagtgtgt

SEQ ID NO: 141520 - DNA, 25 bp, Probe sequence
gccaacaggtagtcattttcaacag

SEQ ID NO: 141521 - DNA, 25 bp, Probe sequence
gctgttagagttggagaatatcgat

SEQ ID NO: 141522 - DNA, 25 bp, Probe sequence
gaatatcgatatgtcaaagctttat

SEQ ID NO: 141523 - DNA, 25 bp, Probe sequence
gaaaatacgtctttagcgatattta

SEQ ID NO: 141524 - DNA, 25 bp, Probe sequence
gaaatcacaatacctttaaagccaa

SEQ ID NO: 141525 - DNA, 25 bp, Probe sequence
gacaatcctgaaatcacaatacctt

SEQ ID NO: 141526 - DNA, 25 bp, Probe sequence
gacacagtggttagacgcgtatttt

SEQ ID NO: 141527 - DNA, 25 bp, Probe sequence
gaccgctgttttgtttgaaaatcaa

SEQ ID NO: 141528 - DNA, 25 bp, Probe sequence
gacgcgtattttaaaggtgacaatc

SEQ ID NO: 141529 - DNA, 25 bp, Probe sequence
gaggcgacacagtggttagacgcgt

SEQ ID NO: 141530 - DNA, 25 bp, Probe sequence
gttggaggtgcagtcggaagtaatc

SEQ ID NO: 141531 - DNA, 25 bp, Probe sequence
gtcagcccaagcggttggaggtgca

SEQ ID NO: 141532 - DNA, 25 bp, Probe sequence
gtcattttcaacagtgtgtttggaa

SEQ ID NO: 141533 - DNA, 25 bp, Probe sequence
gtctgaccgctgttttgtttgaaaa

SEQ ID NO: 141534 - DNA, 25 bp, Probe sequence
gtgcagtcggaagtaatccattatc

SEQ ID NO: 141535 - DNA, 25 bp, Probe sequence
gggaagaaaatacgtctttagcgat

SEQ ID NO: 141536 - DNA, 25 bp, Probe sequence
ggtagtcattttcaacagtgtgttt

SEQ ID NO: 141537 - DNA, 25 bp, Probe sequence
ggaggtgcagtcggaagtaatccat

SEQ ID NO: 141538 - DNA, 25 bp, Probe sequence
taacaacgtatggtgctattgccaa

SEQ ID NO: 141539 - DNA, 25 bp, Probe sequence
atgctctgctagactgccagtgtat

SEQ ID NO: 141540 - DNA, 25 bp, Probe sequence
atgtcttaacattcattttttatca

SEQ ID NO: 141541 - DNA, 25 bp, Probe sequence
atggcatttttagtcagtacagtac

SEQ ID NO: 141542 - DNA, 25 bp, Probe sequence
atggcgattatctattcatcaggtg

SEQ ID NO: 141543 - DNA, 25 bp, Probe sequence
cagttgtggcacgtacaggcaaagg

SEQ ID NO: 141544 - DNA, 25 bp, Probe sequence
aaaatcaattcacaccgctatctgc

SEQ ID NO: 141545 - DNA, 25 bp, Probe sequence
aacacctatttttccagttgtggca

SEQ ID NO: 141546 - DNA, 25 bp, Probe sequence
aactcgatgcatttataggtggtac

SEQ ID NO: 141547 - DNA, 25 bp, Probe sequence
aaccgctcggatttggaacatggca

SEQ ID NO: 141548 - DNA, 25 bp, Probe sequence
catggaaatggacggcacttgcagt

SEQ ID NO: 141549 - DNA, 25 bp, Probe sequence
aattgtcgagtttacgtgatcaagt

SEQ ID NO: 141550 - DNA, 25 bp, Probe sequence
cacaccgctatctgcgtatgcattt

SEQ ID NO: 141551 - DNA, 25 bp, Probe sequence
cacctttgtcggatcaactcgatgc

SEQ ID NO: 141552 - DNA, 25 bp, Probe sequence
ctattgtatattccttgtgtttcta

SEQ ID NO: 141553 - DNA, 25 bp, Probe sequence
ctatcctctagtcactgcatatgtc

SEQ ID NO: 141554 - DNA, 25 bp, Probe sequence
taggggaagggtatcaaccgcattt

SEQ ID NO: 141555 - DNA, 25 bp, Probe sequence
gaacatggcaagcaggtgctacgtt

SEQ ID NO: 141556 - DNA, 25 bp, Probe sequence
gatgcaggccttgttaatgtgattc

SEQ ID NO: 141557 - DNA, 25 bp, Probe sequence
gatctttcaaactacatttacatgg

SEQ ID NO: 141558 - DNA, 25 bp, Probe sequence
gtaccgagtattatggctgcgcgca

SEQ ID NO: 141559 - DNA, 25 bp, Probe sequence
gtacatatgatttatcgccgatttc

SEQ ID NO: 141560 - DNA, 25 bp, Probe sequence
gtgctacgttagtgccaggattttt

SEQ ID NO: 141561 - DNA, 25 bp, Probe sequence
ggtacatttatttttggcggctcag

SEQ ID NO: 141562 - DNA, 25 bp, Probe sequence
ggatcagtattagtctttgtaccac

SEQ ID NO: 141563 - DNA, 25 bp, Probe sequence
ggcaactggagtggcgtaacggtag

SEQ ID NO: 141564 - DNA, 25 bp, Probe sequence
ggctgtatctgttcgtcgagagatg

SEQ ID NO: 141565 - DNA, 25 bp, Probe sequence
ggctgcgcgcagtattgaaaatgaa

SEQ ID NO: 141566 - DNA, 25 bp, Probe sequence
tggcggctcagtagtcatttggcta

SEQ ID NO: 141567 - DNA, 25 bp, Probe sequence
tggtatgttagtgcaaccgctcgga

SEQ ID NO: 141568 - DNA, 25 bp, Probe sequence
tggcattattgctggtgtaggatca

SEQ ID NO: 141569 - DNA, 25 bp, Probe sequence
tgcaccattcatgtcatgctctgct

SEQ ID NO: 141570 - DNA, 25 bp, Probe sequence
tatggaatcgttcggtttaagcggg

SEQ ID NO: 141571 - DNA, 25 bp, Probe sequence
tacatggattggcacacctttgtcg

SEQ ID NO: 141572 - DNA, 25 bp, Probe sequence
ttaacgctttaactggttcgtatga

SEQ ID NO: 141573 - DNA, 25 bp, Probe sequence
atatgttgtatcgtctaagtgcctt

SEQ ID NO: 141574 - DNA, 25 bp, Probe sequence
atgcttgttctattgcattagaaga

SEQ ID NO: 141575 - DNA, 25 bp, Probe sequence
atgacgctatcataacgattaaaca

SEQ ID NO: 141576 - DNA, 25 bp, Probe sequence
atgttgtatcgtctaagtgcctttg

SEQ ID NO: 141577 - DNA, 25 bp, Probe sequence
aaagggccatgtattattgaagtaa

SEQ ID NO: 141578 - DNA, 25 bp, Probe sequence
aacagatgacgctatcataacgatt

SEQ ID NO: 141579 - DNA, 25 bp, Probe sequence
aagtgcctttgggttaacagatgac

SEQ ID NO: 141580 - DNA, 25 bp, Probe sequence
aatggtgaaatgaataaggcttata

SEQ ID NO: 141581 - DNA, 25 bp, Probe sequence
aatgtttatttaaagggccatgtat

SEQ ID NO: 141582 - DNA, 25 bp, Probe sequence
aatatgttgtatcgtctaagtgcct

SEQ ID NO: 141583 - DNA, 25 bp, Probe sequence
tatcgtctaagtgcctttgggttaa

SEQ ID NO: 141584 - DNA, 25 bp, Probe sequence
cattgcgatgcttgttctattgcat

SEQ ID NO: 141585 - DNA, 25 bp, Probe sequence
ctttgggttaacagatgacgctatc

SEQ ID NO: 141586 - DNA, 25 bp, Probe sequence
ctaagtgcctttgggttaacagatg

SEQ ID NO: 141587 - DNA, 25 bp, Probe sequence
gcctttgggttaacagatgacgcta

SEQ ID NO: 141588 - DNA, 25 bp, Probe sequence
gcgaatggatattgctaatgagaat

SEQ ID NO: 141589 - DNA, 25 bp, Probe sequence
gcgatgcttgttctattgcattaga

SEQ ID NO: 141590 - DNA, 25 bp, Probe sequence
gctaatgagaatatgttgtatcgtc

SEQ ID NO: 141591 - DNA, 25 bp, Probe sequence
gacgctatcataacgattaaacaaa

SEQ ID NO: 141592 - DNA, 25 bp, Probe sequence
gttgtatcgtctaagtgcctttggg

SEQ ID NO: 141593 - DNA, 25 bp, Probe sequence
gtatcgtctaagtgcctttgggtta

SEQ ID NO: 141594 - DNA, 25 bp, Probe sequence
gtctaagtgcctttgggttaacaga

SEQ ID NO: 141595 - DNA, 25 bp, Probe sequence
gtgcctttgggttaacagatgacgc

SEQ ID NO: 141596 - DNA, 25 bp, Probe sequence
tgttgtatcgtctaagtgcctttgg

SEQ ID NO: 141597 - DNA, 25 bp, Probe sequence
ggttaacagatgacgctatcataac

SEQ ID NO: 141598 - DNA, 25 bp, Probe sequence
ggccatgtattattgaagtaaacgg

SEQ ID NO: 141599 - DNA, 25 bp, Probe sequence
tgtatcgtctaagtgcctttgggtt

SEQ ID NO: 141600 - DNA, 25 bp, Probe sequence
tgaagtaaacggacaacagttaagt

SEQ ID NO: 141601 - DNA, 25 bp, Probe sequence
tcgtctaagtgcctttgggttaaca

SEQ ID NO: 141602 - DNA, 25 bp, Probe sequence
taaacggacaacagttaagtattag

SEQ ID NO: 141603 - DNA, 25 bp, Probe sequence
tatgttgtatcgtctaagtgccttt

SEQ ID NO: 141604 - DNA, 25 bp, Probe sequence
ttgcgatgcttgttctattgcatta

SEQ ID NO: 141605 - DNA, 25 bp, Probe sequence
ttgtatcgtctaagtgcctttgggt

SEQ ID NO: 141606 - DNA, 25 bp, Probe sequence
ttgggttaacagatgacgctatcat

SEQ ID NO: 141607 - DNA, 25 bp, Probe sequence
attattccacgagttgatattgaag

SEQ ID NO: 141608 - DNA, 25 bp, Probe sequence
atatccacaaggtgcaacaaatgta

SEQ ID NO: 141609 - DNA, 25 bp, Probe sequence
ataaatggtccgcggtcattgcatg

SEQ ID NO: 141610 - DNA, 25 bp, Probe sequence
atgacgttagtcaaacatctttaaa

SEQ ID NO: 141611 - DNA, 25 bp, Probe sequence
atgtttagtgtcttctttgcgtttg

SEQ ID NO: 141612 - DNA, 25 bp, Probe sequence
atgggtatggcattagcgtttggtg

SEQ ID NO: 141613 - DNA, 25 bp, Probe sequence
agccgtaatgattggactagcagtt

SEQ ID NO: 141614 - DNA, 25 bp, Probe sequence
actggtacaggaatgacatctacag

SEQ ID NO: 141615 - DNA, 25 bp, Probe sequence
actgcatttgcagatatcacatatg

SEQ ID NO: 141616 - DNA, 25 bp, Probe sequence
aaagatgatggtattgtgcaaccga

SEQ ID NO: 141617 - DNA, 25 bp, Probe sequence
aaacggttgaatcacaggaatctga

SEQ ID NO: 141618 - DNA, 25 bp, Probe sequence
aacaagcatcaactaaattcaaaac

SEQ ID NO: 141619 - DNA, 25 bp, Probe sequence
aaggcacaaatacgtgttgtcttta

SEQ ID NO: 141620 - DNA, 25 bp, Probe sequence
aatgcaccgaaatttgacaatgata

SEQ ID NO: 141621 - DNA, 25 bp, Probe sequence
gcgtttggtgtactctttgatgcct

SEQ ID NO: 141622 - DNA, 25 bp, Probe sequence
gcatggatagtgattgtagctgcaa

SEQ ID NO: 141623 - DNA, 25 bp, Probe sequence
gaagtcttccttatgtcgcgaattc

SEQ ID NO: 141624 - DNA, 25 bp, Probe sequence
gaaagacttacgtgacaatcataat

SEQ ID NO: 141625 - DNA, 25 bp, Probe sequence
gatgccttcgtagtcagaatgatgt

SEQ ID NO: 141626 - DNA, 25 bp, Probe sequence
gataccacttgctacaaatgcaccg

SEQ ID NO: 141627 - DNA, 25 bp, Probe sequence
gatattgaaggacatgcacttgaaa

SEQ ID NO: 141628 - DNA, 25 bp, Probe sequence
gtattccaagaagatgtcatgatta

SEQ ID NO: 141629 - DNA, 25 bp, Probe sequence
gtaggcggtaattctgaactagttg

SEQ ID NO: 141630 - DNA, 25 bp, Probe sequence
gtactctttgatgccttcgtagtca

SEQ ID NO: 141631 - DNA, 25 bp, Probe sequence
gtagctgcaatattgataccacttg

SEQ ID NO: 141632 - DNA, 25 bp, Probe sequence
gtcagaatgatgttaattcctgcat

SEQ ID NO: 141633 - DNA, 25 bp, Probe sequence
gtcttctttgcgtttgtattccaag

SEQ ID NO: 141634 - DNA, 25 bp, Probe sequence
ggtccgcggtcattgcatggatagt

SEQ ID NO: 141635 - DNA, 25 bp, Probe sequence
ggttcgtggtatttaccagcatggt

SEQ ID NO: 141636 - DNA, 25 bp, Probe sequence
ggactagcagttggtatcgattatg

SEQ ID NO: 141637 - DNA, 25 bp, Probe sequence
tgctgcaggattaccaattataagt

SEQ ID NO: 141638 - DNA, 25 bp, Probe sequence
taagatggggacattcatcgcaaaa

SEQ ID NO: 141639 - DNA, 25 bp, Probe sequence
taaatgaggcgatacctttatttgc

SEQ ID NO: 141640 - DNA, 25 bp, Probe sequence
ttacattaaaggcattggtcttgca

SEQ ID NO: 141641 - DNA, 25 bp, Probe sequence
atacgttatttcaataataatggga

SEQ ID NO: 141642 - DNA, 25 bp, Probe sequence
atgggaattgtattagcaatttggt

SEQ ID NO: 141643 - DNA, 25 bp, Probe sequence
agtcaaagtcatttagatagcggat

SEQ ID NO: 141644 - DNA, 25 bp, Probe sequence
agatacgttatttcaataataatgg

SEQ ID NO: 141645 - DNA, 25 bp, Probe sequence
acgttatttcaataataatgggaat

SEQ ID NO: 141646 - DNA, 25 bp, Probe sequence
actgagtcaaagtcatttagatagc

SEQ ID NO: 141647 - DNA, 25 bp, Probe sequence
acaactgagtcaaagtcatttagat

SEQ ID NO: 141648 - DNA, 25 bp, Probe sequence
aaagtcatttagatagcggatttat

SEQ ID NO: 141649 - DNA, 25 bp, Probe sequence
aaacaactgagtcaaagtcatttag

SEQ ID NO: 141650 - DNA, 25 bp, Probe sequence
aacaactgagtcaaagtcatttaga

SEQ ID NO: 141651 - DNA, 25 bp, Probe sequence
aactgagtcaaagtcatttagatag

SEQ ID NO: 141652 - DNA, 25 bp, Probe sequence
aatgggaattgtattagcaatttgg

SEQ ID NO: 141653 - DNA, 25 bp, Probe sequence
caactgagtcaaagtcatttagata

SEQ ID NO: 141654 - DNA, 25 bp, Probe sequence
caaagtcatttagatagcggattta

SEQ ID NO: 141655 - DNA, 25 bp, Probe sequence
ctgagtcaaagtcatttagatagcg

SEQ ID NO: 141656 - DNA, 25 bp, Probe sequence
gagatacgttatttcaataataatg

SEQ ID NO: 141657 - DNA, 25 bp, Probe sequence
gagtcaaagtcatttagatagcgga

SEQ ID NO: 141658 - DNA, 25 bp, Probe sequence
gatacgttatttcaataataatggg

SEQ ID NO: 141659 - DNA, 25 bp, Probe sequence
gtcaaagtcatttagatagcggatt

SEQ ID NO: 141660 - DNA, 25 bp, Probe sequence
gtgagatacgttatttcaataataa

SEQ ID NO: 141661 - DNA, 25 bp, Probe sequence
gggaattgtattagcaatttggtca

SEQ ID NO: 141662 - DNA, 25 bp, Probe sequence
ggaattgtattagcaatttggtcat

SEQ ID NO: 141663 - DNA, 25 bp, Probe sequence
tgggaattgtattagcaatttggtc

SEQ ID NO: 141664 - DNA, 25 bp, Probe sequence
tgagtcaaagtcatttagatagcgg

SEQ ID NO: 141665 - DNA, 25 bp, Probe sequence
tgagatacgttatttcaataataat

SEQ ID NO: 141666 - DNA, 25 bp, Probe sequence
tcaaagtcatttagatagcggattt

SEQ ID NO: 141667 - DNA, 25 bp, Probe sequence
taaacaactgagtcaaagtcattta

SEQ ID NO: 141668 - DNA, 25 bp, Probe sequence
tacgttatttcaataataatgggaa

SEQ ID NO: 141669 - DNA, 25 bp, Probe sequence
tttttcttcatagtttatgtgttgt

SEQ ID NO: 141670 - DNA, 25 bp, Probe sequence
cctggttacgatttttcagtccaag

SEQ ID NO: 141671 - DNA, 25 bp, Probe sequence
aggtcaagacataccattagtgatt

SEQ ID NO: 141672 - DNA, 25 bp, Probe sequence
acttcagcagttgttggataccatc

SEQ ID NO: 141673 - DNA, 25 bp, Probe sequence
acaaggtggcggcactgatgattca

SEQ ID NO: 141674 - DNA, 25 bp, Probe sequence
aacttcttgaaacgtgttatcgctg

SEQ ID NO: 141675 - DNA, 25 bp, Probe sequence
aagccagtacttgatcgtgaaggtg

SEQ ID NO: 141676 - DNA, 25 bp, Probe sequence
gaacttcccgtttgcgattatggct

SEQ ID NO: 141677 - DNA, 25 bp, Probe sequence
aatactatgcacgttcaatgatgga

SEQ ID NO: 141678 - DNA, 25 bp, Probe sequence
ccagactacttattacacttcttag

SEQ ID NO: 141679 - DNA, 25 bp, Probe sequence
gcgagcattggattaaagcggtaaa

SEQ ID NO: 141680 - DNA, 25 bp, Probe sequence
tcaggtacggacgctaaaacaggta

SEQ ID NO: 141681 - DNA, 25 bp, Probe sequence
gcatgttcacgtgcaattgtgcata

SEQ ID NO: 141682 - DNA, 25 bp, Probe sequence
gcagagcttatgttacgtgtttcgg

SEQ ID NO: 141683 - DNA, 25 bp, Probe sequence
gaagcaggattaccaaaaggcgtag

SEQ ID NO: 141684 - DNA, 25 bp, Probe sequence
gaagcaggtaagccatgggatgaag

SEQ ID NO: 141685 - DNA, 25 bp, Probe sequence
gaagcagttggtgatgcagctgaag

SEQ ID NO: 141686 - DNA, 25 bp, Probe sequence
gaaccaacaatcatttcaggactta

SEQ ID NO: 141687 - DNA, 25 bp, Probe sequence
gaaacctgctgaggatacaccttat

SEQ ID NO: 141688 - DNA, 25 bp, Probe sequence
gacaatacgtatatgggcccagtta

SEQ ID NO: 141689 - DNA, 25 bp, Probe sequence
gaggatacaccttatatcgcttata

SEQ ID NO: 141690 - DNA, 25 bp, Probe sequence
gattacggtttaactggtgcagtga

SEQ ID NO: 141691 - DNA, 25 bp, Probe sequence
gttacatttacaggatcacgtgcga

SEQ ID NO: 141692 - DNA, 25 bp, Probe sequence
gtgtttcggcaattattcgtcgtcg

SEQ ID NO: 141693 - DNA, 25 bp, Probe sequence
gtcgtcgaaaagcggaaattgcagc

SEQ ID NO: 141694 - DNA, 25 bp, Probe sequence
ggtggtttcaaaatgtcaggtacgg

SEQ ID NO: 141695 - DNA, 25 bp, Probe sequence
ggtcagcaaatgatcgtgcagagct

SEQ ID NO: 141696 - DNA, 25 bp, Probe sequence
ggataccatccatttggtggtttca

SEQ ID NO: 141697 - DNA, 25 bp, Probe sequence
ggatcacgtgcgacaggtactagaa

SEQ ID NO: 141698 - DNA, 25 bp, Probe sequence
ggcgtagttaactttgttcctggtg

SEQ ID NO: 141699 - DNA, 25 bp, Probe sequence
tcccgtttgcgattatggctggtac

SEQ ID NO: 141700 - DNA, 25 bp, Probe sequence
tcaatcctgcagacacatcacaagt

SEQ ID NO: 141701 - DNA, 25 bp, Probe sequence
taactttgttcctggtgatccgaaa

SEQ ID NO: 141702 - DNA, 25 bp, Probe sequence
ttaaatcaatcaatcctgcagacac

SEQ ID NO: 141703 - DNA, 25 bp, Probe sequence
ttggtccagttgttggctttgtgaa

SEQ ID NO: 141704 - DNA, 25 bp, Probe sequence
atttcgattccttttgatacagatt

SEQ ID NO: 141705 - DNA, 25 bp, Probe sequence
ataggacctaattgtggattctaca

SEQ ID NO: 141706 - DNA, 25 bp, Probe sequence
atggtacgatgcaaactttgatcaa

SEQ ID NO: 141707 - DNA, 25 bp, Probe sequence
agacaatgtaagtatttcgattcct

SEQ ID NO: 141708 - DNA, 25 bp, Probe sequence
acttaatcaatgaacgtgcacgagc

SEQ ID NO: 141709 - DNA, 25 bp, Probe sequence
aaagtcgttcgtaaaattgataatg

SEQ ID NO: 141710 - DNA, 25 bp, Probe sequence
aaaatggtacgatgcaaactttgat

SEQ ID NO: 141711 - DNA, 25 bp, Probe sequence
aagtatttcgattccttttgataca

SEQ ID NO: 141712 - DNA, 25 bp, Probe sequence
aatgtaagtatttcgattccttttg

SEQ ID NO: 141713 - DNA, 25 bp, Probe sequence
aatgttagcagaaaaatggtacgat

SEQ ID NO: 141714 - DNA, 25 bp, Probe sequence
aatgtctatgtaaacaccaattgtt

SEQ ID NO: 141715 - DNA, 25 bp, Probe sequence
aatcaatgaacgtgcacgagcgaaa

SEQ ID NO: 141716 - DNA, 25 bp, Probe sequence
aattatttcaaacaacaacagacaa

SEQ ID NO: 141717 - DNA, 25 bp, Probe sequence
gcacgagcgaaagatatttgctttg

SEQ ID NO: 141718 - DNA, 25 bp, Probe sequence
gaaggcagtgtgattggtgctggta

SEQ ID NO: 141719 - DNA, 25 bp, Probe sequence
gaacgtgcacgagcgaaagatattt

SEQ ID NO: 141720 - DNA, 25 bp, Probe sequence
gacagattacaattggcgataatgt

SEQ ID NO: 141721 - DNA, 25 bp, Probe sequence
gacctaattgtggattctacacagc

SEQ ID NO: 141722 - DNA, 25 bp, Probe sequence
gatacagattatggttggaacgtta

SEQ ID NO: 141723 - DNA, 25 bp, Probe sequence
gatatttgctttgaattaaatcata

SEQ ID NO: 141724 - DNA, 25 bp, Probe sequence
gattatggttggaacgttaaactag

SEQ ID NO: 141725 - DNA, 25 bp, Probe sequence
gattccttttgatacagattatggt

SEQ ID NO: 141726 - DNA, 25 bp, Probe sequence
gtaagtatttcgattccttttgata

SEQ ID NO: 141727 - DNA, 25 bp, Probe sequence
gtgacgattggagaaggcagtgtga

SEQ ID NO: 141728 - DNA, 25 bp, Probe sequence
gtgtgattggtgctggtagtgttgt

SEQ ID NO: 141729 - DNA, 25 bp, Probe sequence
ggtggacagattacaattggcgata

SEQ ID NO: 141730 - DNA, 25 bp, Probe sequence
ggatggtggacagattacaattggc

SEQ ID NO: 141731 - DNA, 25 bp, Probe sequence
ggagaaggcagtgtgattggtgctg

SEQ ID NO: 141732 - DNA, 25 bp, Probe sequence
ggcagtgtgattggtgctggtagtg

SEQ ID NO: 141733 - DNA, 25 bp, Probe sequence
ggcgataatgtttttataggaccta

SEQ ID NO: 141734 - DNA, 25 bp, Probe sequence
tgattggtgctggtagtgttgtcac

SEQ ID NO: 141735 - DNA, 25 bp, Probe sequence
tttatggatggtggacagattacaa

SEQ ID NO: 141736 - DNA, 25 bp, Probe sequence
ttggcagtaatacttggtttggcgg

SEQ ID NO: 141737 - DNA, 25 bp, Probe sequence
ttcgattccttttgatacagattat

SEQ ID NO: 141738 - DNA, 25 bp, Probe sequence
attgactttgatgatatagaactac

SEQ ID NO: 141739 - DNA, 25 bp, Probe sequence
attgatgattcctaatatggctctc

SEQ ID NO: 141740 - DNA, 25 bp, Probe sequence
atagctaatatcatcttttacaata

SEQ ID NO: 141741 - DNA, 25 bp, Probe sequence
atgtctttatgtgaatgaccatttt

SEQ ID NO: 141742 - DNA, 25 bp, Probe sequence
agaggtcaggaagcaaatttatttt

SEQ ID NO: 141743 - DNA, 25 bp, Probe sequence
agtgaacaatgcaatcccacacgtt

SEQ ID NO: 141744 - DNA, 25 bp, Probe sequence
accaaccagtccatatatagctaat

SEQ ID NO: 141745 - DNA, 25 bp, Probe sequence
aaatttgaacttgcgacagcactcg

SEQ ID NO: 141746 - DNA, 25 bp, Probe sequence
aaatattttctgagatgggctataa

SEQ ID NO: 141747 - DNA, 25 bp, Probe sequence
aatgcaatcccacacgttgggcaga

SEQ ID NO: 141748 - DNA, 25 bp, Probe sequence
aatcagttgcctcaaggtgcaccaa

SEQ ID NO: 141749 - DNA, 25 bp, Probe sequence
cagagataatattgactttgatgat

SEQ ID NO: 141750 - DNA, 25 bp, Probe sequence
ctggttttgttcctaggaaatcaat

SEQ ID NO: 141751 - DNA, 25 bp, Probe sequence
gcaatcccacacgttgggcagaaat

SEQ ID NO: 141752 - DNA, 25 bp, Probe sequence
gaatcgtctaacatgtacagagata

SEQ ID NO: 141753 - DNA, 25 bp, Probe sequence
gaaaacttttttccgagtatcacat

SEQ ID NO: 141754 - DNA, 25 bp, Probe sequence
gacaattatgtttaaaccaggagac

SEQ ID NO: 141755 - DNA, 25 bp, Probe sequence
gacagcactcgcaaatttgtgtaca

SEQ ID NO: 141756 - DNA, 25 bp, Probe sequence
gacatatcttgcaattaattctttg

SEQ ID NO: 141757 - DNA, 25 bp, Probe sequence
gagatatactcgatatgctgatgat

SEQ ID NO: 141758 - DNA, 25 bp, Probe sequence
gattcctaatatggctctcaaaaat

SEQ ID NO: 141759 - DNA, 25 bp, Probe sequence
gtattgtacagaaggcaagttcata

SEQ ID NO: 141760 - DNA, 25 bp, Probe sequence
gtacagtgaataatcagttgcctca

SEQ ID NO: 141761 - DNA, 25 bp, Probe sequence
gtgcaccaaccagtccatatatagc

SEQ ID NO: 141762 - DNA, 25 bp, Probe sequence
ggattatgagcagcaatttattatg

SEQ ID NO: 141763 - DNA, 25 bp, Probe sequence
ggctctcaaaaatatccaaaggtgg

SEQ ID NO: 141764 - DNA, 25 bp, Probe sequence
tgggctataaatttgaacttgcgac

SEQ ID NO: 141765 - DNA, 25 bp, Probe sequence
tgatttcaagaaaggcgttagttta

SEQ ID NO: 141766 - DNA, 25 bp, Probe sequence
tgatattactatttctggatctaat

SEQ ID NO: 141767 - DNA, 25 bp, Probe sequence
tccgagtatcacatttaagcaggtt

SEQ ID NO: 141768 - DNA, 25 bp, Probe sequence
tcaaggtgcaccaaccagtccatat

SEQ ID NO: 141769 - DNA, 25 bp, Probe sequence
taatgttatcaaaatacctaaacga

SEQ ID NO: 141770 - DNA, 25 bp, Probe sequence
taaaagaatcttttcttattgtcaa

SEQ ID NO: 141771 - DNA, 25 bp, Probe sequence
taaatgtgcaactggttttgttcct

SEQ ID NO: 141772 - DNA, 25 bp, Probe sequence
attacttatgcaggaatagaattac

SEQ ID NO: 141773 - DNA, 25 bp, Probe sequence
attattagatggtttctggcatata

SEQ ID NO: 141774 - DNA, 25 bp, Probe sequence
atattgcaagaatgtctttctcaaa

SEQ ID NO: 141775 - DNA, 25 bp, Probe sequence
atgtatgttaaaaatcatgctgata

SEQ ID NO: 141776 - DNA, 25 bp, Probe sequence
aggctataaaaatactcaagcatta

SEQ ID NO: 141777 - DNA, 25 bp, Probe sequence
agaaatactccaaataatacactga

SEQ ID NO: 141778 - DNA, 25 bp, Probe sequence
actccaaataatacactgagccttt

SEQ ID NO: 141779 - DNA, 25 bp, Probe sequence
aagagtaacggattacatcagcaga

SEQ ID NO: 141780 - DNA, 25 bp, Probe sequence
aataatacactgagccttttttggc

SEQ ID NO: 141781 - DNA, 25 bp, Probe sequence
aatacactgagccttttttggcatg

SEQ ID NO: 141782 - DNA, 25 bp, Probe sequence
caaacagatttttatattattactt

SEQ ID NO: 141783 - DNA, 25 bp, Probe sequence
cactgagccttttttggcatgagaa

SEQ ID NO: 141784 - DNA, 25 bp, Probe sequence
catgctgatatgaaatcgaaatttt

SEQ ID NO: 141785 - DNA, 25 bp, Probe sequence
ctcaagcattagtatcaaattttag

SEQ ID NO: 141786 - DNA, 25 bp, Probe sequence
ctgagccttttttggcatgagaatg

SEQ ID NO: 141787 - DNA, 25 bp, Probe sequence
gccttttttggcatgagaatgatca

SEQ ID NO: 141788 - DNA, 25 bp, Probe sequence
gaatgtctttctcaaaaatttctaa

SEQ ID NO: 141789 - DNA, 25 bp, Probe sequence
gaatgatcagtggaaacctttattt

SEQ ID NO: 141790 - DNA, 25 bp, Probe sequence
gaaaaggttcatattattagatggt

SEQ ID NO: 141791 - DNA, 25 bp, Probe sequence
gatggtttctggcatataaaaaagt

SEQ ID NO: 141792 - DNA, 25 bp, Probe sequence
gatattgtaaatccaggtaagtact

SEQ ID NO: 141793 - DNA, 25 bp, Probe sequence
gtaaatccaggtaagtactacaact

SEQ ID NO: 141794 - DNA, 25 bp, Probe sequence
gtactacaacttaggctataaaaat

SEQ ID NO: 141795 - DNA, 25 bp, Probe sequence
gtaacggattacatcagcagaaaaa

SEQ ID NO: 141796 - DNA, 25 bp, Probe sequence
ggtaagtactacaacttaggctata

SEQ ID NO: 141797 - DNA, 25 bp, Probe sequence
ggattacatcagcagaaaaattttg

SEQ ID NO: 141798 - DNA, 25 bp, Probe sequence
tgtctttctcaaaaatttctaatta

SEQ ID NO: 141799 - DNA, 25 bp, Probe sequence
tgatcagtggaaacctttatttaaa

SEQ ID NO: 141800 - DNA, 25 bp, Probe sequence
tgagataaaaatagcttttgtacaa

SEQ ID NO: 141801 - DNA, 25 bp, Probe sequence
tgagaatgatcagtggaaaccttta

SEQ ID NO: 141802 - DNA, 25 bp, Probe sequence
tccaaataatacactgagccttttt

SEQ ID NO: 141803 - DNA, 25 bp, Probe sequence
tctggcatataaaaaagttcctaaa

SEQ ID NO: 141804 - DNA, 25 bp, Probe sequence
taatggatacttcaataaaaaacgg

SEQ ID NO: 141805 - DNA, 25 bp, Probe sequence
tacactgagccttttttggcatgag

SEQ ID NO: 141806 - DNA, 25 bp, Probe sequence
ataccaaataatctatcatctaatt

SEQ ID NO: 141807 - DNA, 25 bp, Probe sequence
atcaatgattgtcactttacaaata

SEQ ID NO: 141808 - DNA, 25 bp, Probe sequence
atcagcgactttattgatgcaataa

SEQ ID NO: 141809 - DNA, 25 bp, Probe sequence
atctatcatctaatttttctaaagc

SEQ ID NO: 141810 - DNA, 25 bp, Probe sequence
atgaaaagtatttagacgagtattt

SEQ ID NO: 141811 - DNA, 25 bp, Probe sequence
atgtagaatttaatcaagcggttat

SEQ ID NO: 141812 - DNA, 25 bp, Probe sequence
aggaaaatcaatcagcgactttatt

SEQ ID NO: 141813 - DNA, 25 bp, Probe sequence
acttcattatttttaactgcaaaca

SEQ ID NO: 141814 - DNA, 25 bp, Probe sequence
aaagcagtggaatattattttgcaa

SEQ ID NO: 141815 - DNA, 25 bp, Probe sequence
aagagcacagaaatcaaatcaatga

SEQ ID NO: 141816 - DNA, 25 bp, Probe sequence
aagttatttaattttgatagatgat

SEQ ID NO: 141817 - DNA, 25 bp, Probe sequence
aataatctatcatctaatttttcta

SEQ ID NO: 141818 - DNA, 25 bp, Probe sequence
aatagttcaagtatcttaacttcat

SEQ ID NO: 141819 - DNA, 25 bp, Probe sequence
aatataccaaataatctatcatcta

SEQ ID NO: 141820 - DNA, 25 bp, Probe sequence
gaatttaatcaagcggttattaagt

SEQ ID NO: 141821 - DNA, 25 bp, Probe sequence
caatcagcgactttattgatgcaat

SEQ ID NO: 141822 - DNA, 25 bp, Probe sequence
caagtatcttaacttcattattttt

SEQ ID NO: 141823 - DNA, 25 bp, Probe sequence
caaagttttttgaatagtaataatg

SEQ ID NO: 141824 - DNA, 25 bp, Probe sequence
catctaatttttctaaagcagtgga

SEQ ID NO: 141825 - DNA, 25 bp, Probe sequence
gacaggaaaatcaatcagcgacttt

SEQ ID NO: 141826 - DNA, 25 bp, Probe sequence
gagattattatattttgcatacata

SEQ ID NO: 141827 - DNA, 25 bp, Probe sequence
gagtattttagaaatgttttaggcg

SEQ ID NO: 141828 - DNA, 25 bp, Probe sequence
gatagatgatttttcagggacagga

SEQ ID NO: 141829 - DNA, 25 bp, Probe sequence
gattgtcactttacaaatatattaa

SEQ ID NO: 141830 - DNA, 25 bp, Probe sequence
gttcaagtatcttaacttcattatt

SEQ ID NO: 141831 - DNA, 25 bp, Probe sequence
gttttgtcaagatcttatagaacat

SEQ ID NO: 141832 - DNA, 25 bp, Probe sequence
gggacaggaaaatcaatcagcgact

SEQ ID NO: 141833 - DNA, 25 bp, Probe sequence
tcaaatcaatgattgtcactttaca

SEQ ID NO: 141834 - DNA, 25 bp, Probe sequence
taatctatcatctaatttttctaaa

SEQ ID NO: 141835 - DNA, 25 bp, Probe sequence
taacttcattatttttaactgcaaa

SEQ ID NO: 141836 - DNA, 25 bp, Probe sequence
taaagttttgtcaagatcttataga

SEQ ID NO: 141837 - DNA, 25 bp, Probe sequence
tagaacatataaaagagcacagaaa

SEQ ID NO: 141838 - DNA, 25 bp, Probe sequence
tatcatctaatttttctaaagcagt

SEQ ID NO: 141839 - DNA, 25 bp, Probe sequence
ttttaactgcaaacaatataccaaa

SEQ ID NO: 141840 - DNA, 25 bp, Probe sequence
atttgaaagtcaaccgctctaatat

SEQ ID NO: 141841 - DNA, 25 bp, Probe sequence
atatttgaaagtcaaccgctctaat

SEQ ID NO: 141842 - DNA, 25 bp, Probe sequence
ataagtccaatcaatattcagcatc

SEQ ID NO: 141843 - DNA, 25 bp, Probe sequence
atcagctgaatattgtgggaaaaca

SEQ ID NO: 141844 - DNA, 25 bp, Probe sequence
agtccaatcaatattcagcatcagc

SEQ ID NO: 141845 - DNA, 25 bp, Probe sequence
agtcaaccgctctaatatgattaca

SEQ ID NO: 141846 - DNA, 25 bp, Probe sequence
agcatcagctgaatattgtgggaaa

SEQ ID NO: 141847 - DNA, 25 bp, Probe sequence
aaatatttgaaagtcaaccgctcta

SEQ ID NO: 141848 - DNA, 25 bp, Probe sequence
aaagtcaaccgctctaatatgatta

SEQ ID NO: 141849 - DNA, 25 bp, Probe sequence
aaccgctctaatatgattacatata

SEQ ID NO: 141850 - DNA, 25 bp, Probe sequence
aagaaactcatataaagtgaaacat

SEQ ID NO: 141851 - DNA, 25 bp, Probe sequence
aagtccaatcaatattcagcatcag

SEQ ID NO: 141852 - DNA, 25 bp, Probe sequence
aagtcaaccgctctaatatgattac

SEQ ID NO: 141853 - DNA, 25 bp, Probe sequence
aatatttgaaagtcaaccgctctaa

SEQ ID NO: 141854 - DNA, 25 bp, Probe sequence
caaccgctctaatatgattacatat

SEQ ID NO: 141855 - DNA, 25 bp, Probe sequence
cagcatcagctgaatattgtgggaa

SEQ ID NO: 141856 - DNA, 25 bp, Probe sequence
ccaatcaatattcagcatcagctga

SEQ ID NO: 141857 - DNA, 25 bp, Probe sequence
gcatcagctgaatattgtgggaaaa

SEQ ID NO: 141858 - DNA, 25 bp, Probe sequence
gaagttcaagtttatgatcaaaaac

SEQ ID NO: 141859 - DNA, 25 bp, Probe sequence
gaaagtcaaccgctctaatatgatt

SEQ ID NO: 141860 - DNA, 25 bp, Probe sequence
gattacatataagtccaatcaatat

SEQ ID NO: 141861 - DNA, 25 bp, Probe sequence
gttgaagttcaagtttatgatcaaa

SEQ ID NO: 141862 - DNA, 25 bp, Probe sequence
gtttatgatcaaaaacaacacgttt

SEQ ID NO: 141863 - DNA, 25 bp, Probe sequence
gtcaaccgctctaatatgattacat

SEQ ID NO: 141864 - DNA, 25 bp, Probe sequence
gtccaatcaatattcagcatcagct

SEQ ID NO: 141865 - DNA, 25 bp, Probe sequence
gtgggaaaacagttgaagttcaagt

SEQ ID NO: 141866 - DNA, 25 bp, Probe sequence
tgaaagtcaaccgctctaatatgat

SEQ ID NO: 141867 - DNA, 25 bp, Probe sequence
tccaatcaatattcagcatcagctg

SEQ ID NO: 141868 - DNA, 25 bp, Probe sequence
tcaaccgctctaatatgattacata

SEQ ID NO: 141869 - DNA, 25 bp, Probe sequence
taagtccaatcaatattcagcatca

SEQ ID NO: 141870 - DNA, 25 bp, Probe sequence
tataagtccaatcaatattcagcat

SEQ ID NO: 141871 - DNA, 25 bp, Probe sequence
tatttgaaagtcaaccgctctaata

SEQ ID NO: 141872 - DNA, 25 bp, Probe sequence
tttgaaagtcaaccgctctaatatg

SEQ ID NO: 141873 - DNA, 25 bp, Probe sequence
ttgaaagtcaaccgctctaatatga

SEQ ID NO: 141874 - DNA, 25 bp, Probe sequence
atataacttacgaactaaacataat

SEQ ID NO: 141875 - DNA, 25 bp, Probe sequence
atttagaagaagtcgatattcgcat

SEQ ID NO: 141876 - DNA, 25 bp, Probe sequence
atttagaaattgacgaattagcaca

SEQ ID NO: 141877 - DNA, 25 bp, Probe sequence
atatgaagcacatcaaatttgggaa

SEQ ID NO: 141878 - DNA, 25 bp, Probe sequence
atgcaccatatgaaatgtttttaga
